United States Patent Application Publication US 2014/0259212 A1 - sequence listing, part 37

SEQ ID NO: 130968 - DNA, 750 bp, Ostreococcus tauri
  CDS (1)..(750)
atgttcgcgatcaaagatgatgactctgtgtccacaaaaatccaaaatgaagacgtttcagacgacgcgcgcgcgcgaccgatcgcgttggtgctcacgtcacatccggacgatgaatcgtacttcttcgcgccgacgattcagttcttgaggcgttcggggcgttcggtacacctggtgtgcttgagcgacggcgcggctggcggagacggcgaagagaggaaacgagagttgctcaaggcgaaggaggcgctcgagatcgaggctctgtgcgtggtcgagacggaggatttgagagacgggatggatcgcgattggcccagagagacggtgatggctgtgttggacgcgtacgaggagggggctccaggggcgatcgagtctgtggtgacattcgacggtcgaggcgtgagcggacacatcaatcacgtagcgacgcacgagggggcgaagatgtggatcgaacggaagaaggatgtgttggcagcgaatgggggcgacggatcggtgccgcgagtgtgggtattggagacgacgaatattgcgcgcaagtattccggagcgctggacgcggcgacgtcgtatttgactacgttggtcgattcgaggcgcgcattcattccttgcttgtccttagccgagagcttcagagccgttcgtgcgcataagtcgcagttcgtgtggtatcgtaagctcttcttcgcgttctctaggtacacgtatttgaacacgctgcgccgcatcgattaa

SEQ ID NO: 130969 - protein, 249 aa, Ostreococcus tauri
MFAIKDDDSVSTKIQNEDVSDDARARPIALVLTSHPDDESYFFAPTIQFLRRSGRSVHLVCLSDGAAGGDGEERKRELLKAKEALEIEALCVVETEDLRDGMDRDWPRETVMAVLDAYEEGAPGAIESVVTFDGRGVSGHINHVATHEGAKMWIERKKDVLAANGGDGSVPRVWVLETTNIARKYSGALDAATSYLTTLVDSRRAFIPCLSLAESFRAVRAHKSQFVWYRKLFFAFSRYTYLNTLRRID

SEQ ID NO: 130970 - DNA, 918 bp, Aspergillus oryzae
  CDS (1)..(918)
atgtctccatcatcattcatatcgctgggcttcgctatcacagccgtcttcatcttttggacattatccgccacgtcttcctcaccatttgctcgtaatttcccccgcttgtacaacaagcggatatgcctattaatagcccaccccgacgatgaggcgatgtttttcgcaccgacggtgctagctttaaccaagccagagctgggaaaccatctcaagatcttatgtctcagtagcggagacgccgacggactaggccacatccgcaaaaaggagcttaaaaaaagcgctgtgcacctaggcctccgcagcgagtccgatgtcctcatcatagacgacccaacccgcttccccgacagcatgagcgccacctggtccgaaagcgacgtctcaagcttgcttgcctccgccttcgcccccgaaataggcgacgcccagtccgggtcccgaaaacgaggagcaacgcgggataaaccacccgtcgcgactatcgatgtgctcctcacctttgacagacatggtataagcaaccaccccaaccaccgttctctctaccatggcgctgtccacttccttcgtaccctgatgaaagataagcccgggtatacctgcccggtctcgttgtacacgctcactacgacgaacatcttgcgcaagtatatcggtgtgcttgacgcgcccttgagcatggcgcgtggggctgtcgattctttgttttcgggcttgaagggctcatctcgttcctcgaaggaggatgcgcctgcgagacttctgtttgtaagctctgttggcgaatggatgacggcgcagtcggctatggttaaggctcatcagagtcagatggtttggtttcgatatgggtggattactcttggtcgttatatggcggttaatgatctcaagcgtgagaaggtttaa

SEQ ID NO: 130971 - protein, 305 aa, Aspergillus oryzae
MSPSSFISLGFAITAVFIFWTLSATSSSPFARNFPRLYNKRICLLIAHPDDEAMFFAPTVLALTKPELGNHLKILCLSSGDADGLGHIRKKELKKSAVHLGLRSESDVLIIDDPTRFPDSMSATWSESDVSSLLASAFAPEIGDAQSGSRKRGATRDKPPVATIDVLLTFDRHGISNHPNHRSLYHGAVHFLRTLMKDKPGYTCPVSLYTLTTTNILRKYIGVLDAPLSMARGAVDSLFSGLKGSSRSSKEDAPARLLFVSSVGEWMTAQSAMVKAHQSQMVWFRYGWITLGRYMAVNDLKREKV

SEQ ID NO: 130972 - DNA, 747 bp, Schizosaccharomyces pombe
  CDS (1)..(747)
atgatttggttttggtcaactttgttagttaccgcaatagctgtattatccactgcaaatgaatcctcttctggtcaagagaaattagcagttgaatcaatccttttcgtctttgctcatcccgatgatgaatctatgttttttggtcccaccatcgactatttaggcaatcagcattctactcgagttcatgttttgtgtctttctaatggcaatgccgatgggctcggaagcgttagagaaaaagagttggtcgtcgctgcttctaagtaccaaattgataaaaccaatgttcatgttgtgtcagatcctcaattgcaagacggtatgcaggcaaaatgggatccaaccgatgtagcgaaacacatttctcaaataattgaacgttacaacattaaaacgctcattacctttgacaataaaggaatatccggtcacccaaaccatatcgcatgttacgaaggtgccatgaaaattgtcaaagctactccccaagttcaagtcttcgttttagagtcggttaatatatttcgaaaatacatctcatatttggacaccattcccactcttgtccaaagtcaggcgggtcgaaacgatacaataatcattcacgcagatcgaaaatctactcagcgcatacgcgatgctatggtacgaggacacaaaagtcaaatggtttggtttcgctacggctggatatacttgtctaagtatatgtctaacaatgtattaaagcgggctacttaa

SEQ ID NO: 130973 - protein, 248 aa, Schizosaccharomyces pombe
MIWFWSTLLVTAIAVLSTANESSSGQEKLAVESILFVFAHPDDESMFFGPTIDYLGNQHSTRVHVLCLSNGNADGLGSVREKELVVAASKYQIDKTNVHVVSDPQLQDGMQAKWDPTDVAKHISQIIERYNIKTLITFDNKGISGHPNHIACYEGAMKIVKATPQVQVFVLESVNIFRKYISYLDTIPTLVQSQAGRNDTIIIHADRKSTQRIRDAMVRGHKSQMVWFRYGWIYLSKYMSNNVLKRAT

SEQ ID NO: 130974 - DNA, 792 bp, Zea mays
  CDS (1)..(792)
atggcgtggatctggatggtcctcgcggcgggagccgtgctcctgtgggcgatctctttgggtcgggtcctctcctgcgccgcgccgtcctgtgtgcccccgagcccgcagttcatgccccctctcagcggtgacaggaggagccgaaacgtgctgctggtcgtcgcccaccctgacgacgagtccatgttcttcgctccaaccattcttttcctcaagtcgaaaggccacagtattcacattctgtgcatgtctcgaggtaatgctgatggtctgggagatactcgtaaggaagaactgtaccacgcctgtgtcagcctcaagattccacatgaacaagtcaaagtcttggaccacccaaaactgcaggatggatttcatgagaaatgggaacatggactagtagcagaacttaccatggagcatgtccaactgtgggccattgacacgattgttacatttgattcatatggagtatcaggccatccaaaccacaaagatgttcatcacggcatatgcaagtttctccatacgaacaagcaagggaacgtggaagcttgggaactagcaagtctcagtattcttcgcaagtacagtggtccgattgacatttggctttcttcattgacgtccttcgcaaggtcaaaacagccaatctatactctagttaacagtagcccgtccaaaagctatgaggcaatggctgcacacagaagtcagtgggtttggtttagaagattgtttgtcatgttctcgagttatacatacataaatatgctacggagaatttaa

SEQ ID NO: 130975 - protein, 263 aa, Zea mays
MAWIWMVLAAGAVLLWAISLGRVLSCAAPSCVPPSPQFMPPLSGDRRSRNVLLVVAHPDDESMFFAPTILFLKSKGHSIHILCMSRGNADGLGDTRKEELYHACVSLKIPHEQVKVLDHPKLQDGFHEKWEHGLVAELTMEHVQLWAIDTIVTFDSYGVSGHPNHKDVHHGICKFLHTNKQGNVEAWELASLSILRKYSGPIDIWLSSLTSFARSKQPIYTLVNSSPSKSYEAMAAHRSQWVWFRRLFVMFSSYTYINMLRRI

SEQ ID NO: 130976 - DNA, 792 bp, Zea mays
  CDS (1)..(792)
atggcgtggatctggatggtcctcgcggcgggagccgtgctcctgtgggcgatctctctgggaaggatcttctcctccgccgcgccgtcctgtgtgcccctgagcccgcagttcatgccccctctccgcggcgacaggaggacccggaacgtgatgctcgtcgtcgcccaccccgacgacgagtccatgttctttgctccaactatccttttcctcaagtcaaaaggtcacaacattcacattctgtgcatgtctcgaggtaatgctgatggtctcggagatactcgtaaagaagaattgtaccatgcctgtgaaacccttaagattccacatgaacaagttgaagtcttggaccacccgaaattgcaggatggatttcatgagaaatgggaccatgaactagtatcagaacttgtcatggagcatgtccaactatgggtcattgacatgattgtgacatttgattcatatggagtatcaggccacccaaaccacagagatgttcattacggcatatgcaagtttctccatgcgaataggcaaggaaatgttgaagcttgggaactagcaagcctgaatattcttcgcaagtacagtggtccggttgacatttggctttcttcgctgatctccgtctcaaggtcaaagcagtcaatctatactctagttaacagtagcccgtccagaagctatgaggcaatggctgcacacagaagtcagtgggtttggtttagaagagtgttcgtcatgctctcaagttatacctacataaacatgctacagaaaatttag

SEQ ID NO: 130977 - protein, 263 aa, Zea mays
MAWIWMVLAAGAVLLWAISLGRIFSSAAPSCVPLSPQFMPPLRGDRRTRNVMLVVAHPDDESMFFAPTILFLKSKGHNIHILCMSRGNADGLGDTRKEELYHACETLKIPHEQVEVLDHPKLQDGFHEKWDHELVSELVMEHVQLWVIDMIVTFDSYGVSGHPNHRDVHYGICKFLHANRQGNVEAWELASLNILRKYSGPVDIWLSSLISVSRSKQSIYTLVNSSPSRSYEAMAAHRSQWVWFRRVFVMLSSYTYINMLQKI

SEQ ID NO: 130978 - DNA, 792 bp, Zea mays
  CDS (1)..(792)
atggcgtggatctggatggtcctcgcggcgggagccgtgctcctgtgggcgatctctttggggcgggtcctctcctccgccgcgccgtcctgtgtgccctcgagcccgcagttcatgccccctctcagcggtgacaggaggagccggaacgtgctgctggtcgtcgcccaccccgacgacgagtccatgttcttcgctccaaccattcttttcctcaagtcgaaaggccacagtattcacattctgtgcatgtctcgaggtaatgctgatggtctgggagatactcgtaaggaagaactgtaccacgcctgtgtcagcctcaagattccacatgaacaagtcaaagtcttggaccacccaaaattgcaggatggatttcatgagaaatgggaacatggactagtagcagaacttaccatggagcttgtccaactgtgggccattgacacgattgttacatttgattcatatggagtatcaggccatccaaaccacaaagatgttcatcacggcatatgcaagtttctccatacgaacaagcaagggaacgtggaagcttgggaactagcaagtctcagtattcttcgcaagtacagtggtccgattgacatttggctttcttcattgacgtccttcgcaaggtcaaaacagccaatctatactctagttaacagtagcccgtccaaaagctatgaggcaatggctgcacacagaagtcagtgggtttggtttagaagattgtttgtcatgttctcgagttatacatacataaatatgctacggagaatttaa

SEQ ID NO: 130979 - protein, 263 aa, Zea mays
MAWIWMVLAAGAVLLWAISLGRVLSSAAPSCVPSSPQFMPPLSGDRRSRNVLLVVAHPDDESMFFAPTILFLKSKGHSIHILCMSRGNADGLGDTRKEELYHACVSLKIPHEQVKVLDHPKLQDGFHEKWEHGLVAELTMELVQLWAIDTIVTFDSYGVSGHPNHKDVHHGICKFLHTNKQGNVEAWELASLSILRKYSGPIDIWLSSLTSFARSKQPIYTLVNSSPSKSYEAMAAHRSQWVWFRRLFVMFSSYTYINMLRRI

SEQ ID NO: 130980 - DNA, 24 bp, Artificial sequence
  primer
atgaagatgttgaggcgtacaaag

SEQ ID NO: 130981 - DNA, 29 bp, Artificial sequence
  primer
ctaatatgtataaacatcaaattcattaa

SEQ ID NO: 130982 - protein, 297 aa, Artificial sequence
  consensus sequence
  Variant (7)..(7): Xaa in position 7 is any amino acid
  Variant (11)..(11): Xaa in position 11 is any amino acid
  Variant (14)..(24): Xaa in position 14 to 24 is any amino acid
  Variant (25)..(30): Xaa in position 25 to 30 is any or no amino acid
  Variant (32)..(32): Xaa in position 32 is any amino acid
  Variant (34)..(34): Xaa in position 34 is any amino acid
  Variant (36)..(38): Xaa in position 36 to 38 is any amino acid
  Variant (39)..(40): Xaa in position 39 to 40 is any or no amino acid
  Variant (42)..(42): Xaa in position 42 is any amino acid
  Variant (44)..(45): Xaa in position 44 to 45 is any amino acid
  Variant (47)..(48): Xaa in position 47 to 48 is any amino acid
  Variant (51)..(56): Xaa in position 51 to 56 is any amino acid
  Variant (58)..(68): Xaa in position 58 to 68 is any amino acid
  Variant (69)..(75): Xaa in position 69 to 75 is any or no amino acid
  Variant (77)..(77): Xaa in position 77 is any amino acid
  Variant (78)..(81): Xaa in position 78 to 81 is any or no amino acid
  Variant (83)..(102): Xaa in position 83 to 102 is any amino acid
  Variant (103)..(127): Xaa in position 103 to 127 is any or no amino acid
  Variant (131)..(132): Xaa in position 131 to 132 is any amino acid
  Variant (136)..(136): Xaa in position 136 is any amino acid
  Variant (138)..(138): Xaa in position 138 is any amino acid
  Variant (141)..(145): Xaa in position 141 to 145 is any amino acid
  Variant (147)..(160): Xaa in position 147 to 160 is any amino acid
  Variant (161)..(188): Xaa in position 161 to 188 is any or no amino acid
  Variant (190)..(192): Xaa in position 190 to 192 is any amino acid
  Variant (193)..(196): Xaa in position 193 to 196 is any or no amino acid
  Variant (199)..(225): Xaa in position 199 to 225 is any amino acid
  Variant (226)..(273): Xaa in position 226 to 273 is any or no amino acid
  Variant (275)..(275): Xaa in position 275 is any amino acid
  Variant (278)..(278): Xaa in position 278 is any amino acid
  Variant (283)..(288): Xaa in position 283 to 288 is any amino acid
  Variant (290)..(290): Xaa in position 290 is any amino acid
  Variant (292)..(294): Xaa in position 292 to 294 is any amino acid
  Variant (296)..(296): Xaa in position 296 is any amino acid
AHPDDEXMFFXPTXXXXXXXXXXXXXXXXXCXSXGXXXXXGXGXXRXXELXXXXXXLXXXXXXXXXXXXXXXXXXDXXXXXWXXXXXXXXXXXXXXXXXXXXXXXXXXXXXXXXXXXXXXXXXXXXXTFDXXGVSXHXNHXXXXXGXXXXXXXXXXXXXXXXXXXXXXXXXXXXXXXXXXXXXXXXXXLXXXXXXXKYXXXXXXXXXXXXXXXXXXXXXXXXXXXXXXXXXXXXXXXXXXXXXXXXXXXXXXXXXXXXXXXXXXXXXXXXXXXHXSQXVWFRXXXXXXSXYXXXNXL

SEQ ID NO: 130983 - protein, 28 aa, Artificial sequence
  protein pattern
  Variant (2)..(3): Xaa in position 2 to 3 is any amino acid
  Variant (4)..(4): Xaa in position 4 is any or no amino acid
  Variant (6)..(6): Xaa in position 6 is any amino acid
  Variant (9)..(10): Xaa in position 9 to 10 is any amino acid
  Variant (14)..(14): Xaa in position 14 is any amino acid
  Variant (15)..(15): Xaa in position 15 is Ala, Gly, Leu or Val
  Variant (16)..(16): Xaa in position 16 is Phe, Trp or Tyr
  Variant (17)..(18): Xaa in position 17 to 18 is any amino acid
  Variant (19)..(19): Xaa in position 19 is Phe, Ile or Leu
  Variant (20)..(20): Xaa in position 20 is Gly or Ser
  Variant (21)..(21): Xaa in position 21 is any amino acid
  Variant (22)..(22): Xaa in position 22 is Phe or Tyr
  Variant (23)..(25): Xaa in position 23 to 25 is any amino acid
  Variant (27)..(27): Xaa in position 27 is any amino acid
  Variant (28)..(28): Xaa in position 28 is Phe or Leu
MXXXHXSQXXWFRXXXXXXXXXXXXNXX

SEQ ID NO: 130984 - protein, 16 aa, Artificial sequence
  protein pattern
  Variant (6)..(6): Xaa in position 6 is any amino acid
  Variant (10)..(10): Xaa in position 10 is Ala, Gly or Ser
  Variant (12)..(12): Xaa in position 12 is any amino acid
  Variant (13)..(15): Xaa in position 13 to 15 is any or no amino acid
HPDDEXMFFXPXXXXL

SEQ ID NO: 130985 - protein, 19 aa, Artificial sequence
  protein pattern
  Variant (4)..(5): Xaa in position 4 to 5 is any amino acid
  Variant (7)..(7): Xaa in position 7 is Ile or Val
  Variant (9)..(9): Xaa in position 9 is any amino acid
  Variant (11)..(11): Xaa in position 11 is any amino acid
  Variant (14)..(14): Xaa in position 14 is any amino acid
  Variant (15)..(15): Xaa in position 15 is Ala, Asp or Ser
  Variant (16)..(18): Xaa in position 16 to 18 is any amino acid
  Variant (19)..(19): Xaa in position 19 is Ala or Gly
TFDXXGXSXHXNHXXXXXX

SEQ ID NO: 130986 - DNA, 243 bp, Saccharomyces cerevisiae
  CDS (1)..(243)
atgatcactatgaagatgttcttgtttttaaacgaggcatgcatctttatagattctgtatgcgaaggtattgttttctggggcctttgtctattcgtatgcgccgaatgtgagaatgccagttataggggtgccgaggtgccttataaaacccttttccgttcctgtgatacttccatttttggtgtagcagaatgtctgaatttagttgctatagatcctcgttcagaagcgtattgctaa

SEQ ID NO: 130987 - protein, 80 aa, Saccharomyces cerevisiae
MITMKMFLFLNEACIFIDSVCEGIVFWGLCLFVCAECENASYRGAEVPYKTLFRSCDTSIFGVAECLNLVAIDPRSEAYC

SEQ ID NO: 130988 - DNA, 306 bp, Saccharomyces cerevisiae
  CDS (1)..(306)
atggagatgctcttgtttctgaacgaatcatacatctttcataggtttcgtatgtggagtattgttttatggcactcatgtgtattcgtatgcgcagaatgtgggaatgcctattataggggtgccggggggtgccttgaaaaacccttttgcgcgcctgttaagtttccgttttcagtcaaaaagaatatccgaattttagatttggaccctcgttcagaagcttactgtctaagccatcatttggtgtgtcctaaacggtttccatgcaaagcaacatctttgttactcattcctgaaggttga

SEQ ID NO: 130989 - protein, 101 aa, Saccharomyces cerevisiae
MEMLLFLNESYIFHRFRMWSIVLWHSCVFVCAECGNAYYRGAGGCLEKPFCAPVKFPFSVKKNIRILDLDPRSEAYCLSHHLVCPKRFPCKATSLLLIPEG

SEQ ID NO: 130990 - DNA, 231 bp, Saccharomyces cerevisiae
  CDS (1)..(231)
atggagatgctcttgtttctgaacgaatcatacatctttcatagacttcgtatgtggagtattgtattatggcactcatgtgtattcgtatgcgcagaatgtgggaatgccaattatagggtgccgaggtgccttataaaacccttttctgtgcctgtgacatttcctttttcggtcaaaaagaatatccgaattttagatttggaccctcgtacagaagcttattgttaa

SEQ ID NO: 130991 - protein, 76 aa, Saccharomyces cerevisiae
MEMLLFLNESYIFHRLRMWSIVLWHSCVFVCAECGNANYRVPRCLIKPFSVPVTFPFSVKKNIRILDLDPRTEAYC

SEQ ID NO: 130992 - DNA, 333 bp, Saccharomyces cerevisiae
  CDS (1)..(333)
atggagatgaccttgtttctgaacgaatcatacatctttcatagacttcgtatgtggagtattgttttatggcactcatgtgtattcgtatgcgcagaatgtgggaatgccaattatagggtgccgaggtgccttataaaacccttttctgtgcctgtgacatttcctttttcggtcaaaaagaatatccgaattttagatttggaccctcgtacagaagcttattgtctaagcccatattcagtctgctctaaacggcttccatgcaagaaatatttctatctcttgaattcgtacaacattaaacgtgtgttgggagtcgtatactgttag

SEQ ID NO: 130993 - protein, 110 aa, Saccharomyces cerevisiae
MEMTLFLNESYIFHRLRMWSIVLWHSCVFVCAECGNANYRVPRCLIKPFSVPVTFPFSVKKNIRILDLDPRTEAYCLSPYSVCSKRLPCKKYFYLLNSYNIKRVLGVVYC

SEQ ID NO: 130994 - DNA, 333 bp, Saccharomyces cerevisiae
  CDS (1)..(333)
atggagatgctcttgtttctgaacgaatcatacatctttcatagacttcgtatgtggagtactgttttatggcactcatgtgtattcgtatgcgtagaatgtgagaatgccaattatagggtgccgaggtgccttataaaacccttttctgtgcctgtgacatttcctttttcggtcaaaaagaatatccgaattttagatttggaccctcgtacagaagcttattgtctaagcccatattcagtctgctctaaacggcttccatgcaagaaatatttctatctcttgaattcgtacaacattaaacgtgtgttgggagtcgtatactgttag

SEQ ID NO: 130995 - protein, 110 aa, Saccharomyces cerevisiae
MEMLLFLNESYIFHRLRMWSTVLWHSCVFVCVECENANYRVPRCLIKPFSVPVTFPFSVKKNIRILDLDPRTEAYCLSPYSVCSKRLPCKKYFYLLNSYNIKRVLGVVYC

SEQ ID NO: 130996 - DNA, 26 bp, Artificial sequence
  primer
atgatcactatgaagatgttcttgtt

SEQ ID NO: 130997 - DNA, 24 bp, Artificial sequence
  primer
ttagcaatacgcttctgaacgagg

SEQ ID NO: 130998 - protein, 77 aa, Artificial sequence
  consensus sequence
  Variant (4)..(4): Xaa in position 4 is any amino acid
  Variant (16)..(16): Xaa in position 16 is any amino acid
  Variant (35)..(35): Xaa in position 35 is any amino acid
  Variant (38)..(38): Xaa in position 38 is any amino acid
  Variant (41)..(43): Xaa in position 41 to 43 is any amino acid
  Variant (44)..(44): Xaa in position 44 is any or no amino acid
  Variant (47)..(47): Xaa in position 47 is any amino acid
  Variant (51)..(52): Xaa in position 51 to 52 is any amino acid
  Variant (73)..(73): Xaa in position 73 is any amino acid
MEMXLFLNESYIFHRXRMWSIVLWHSCVFVCAECXNAXYRXXXXCLXKPFXXPVTFPFSVKKNIRILDLDPRXEAYC

SEQ ID NO: 130999 - DNA, 474 bp, Saccharomyces cerevisiae
  CDS (1)..(474)
atgatagaggcgttggaaatagttctattgctcgttatacaatcacttcaatatatctgtcgcacatgcatagcttttttgctaataccattcttaggcctgtatgcattcgatctcttcctatacgtttatcggatgatactttatctgtcacaaatgttcaattacaagagaaaactaggacgttctaaaacaaataataggccgcatagtcccaggctacataagatatacagtagtggggattgcatggataccttaattggccaagtaagggatttgagagtatttttgttatccacgatccacagccactctaaaagattcttttctacgagatttcagacaaaatcaggcattaactctgctattgacgcgaatgatgttgaaacaacatctgacgtatctagttttacaaatttacatttaacaaggtcatcggaagaaggttattatatcgcaggatcgatataa

SEQ ID NO: 131000 - protein, 157 aa, Saccharomyces cerevisiae
MIEALEIVLLLVIQSLQYICRTCIAFLLIPFLGLYAFDLFLYVYRMILYLSQMFNYKRKLGRSKTNNRPHSPRLHKIYSSGDCMDTLIGQVRDLRVFLLSTIHSHSKRFFSTRFQTKSGINSAIDANDVETTSDVSSFTNLHLTRSSEEGYYIAGSI

SEQ ID NO: 131001 - DNA, 25 bp, Artificial sequence
  primer
atgatagaggcgttggaaatagttc

SEQ ID NO: 131002 - DNA, 26 bp, Artificial sequence
  primer
ttatatcgatcctgcgatataataac

SEQ ID NO: 131003 - DNA, 801 bp, Arabidopsis thaliana
  CDS (1)..(801)
atggcttccttcgtggaatctggttggcagtaccttgtgacacattttagcgactttcaactggcatgtattgggagttttctcctccatgaaagcgtgtttttcttatctggactccctttcatttttcttgaaaggcaaggctttctcagcaagtacaaaattcagacaaaaaataacacacctgcagcccaaggaaaatgtattactcgcctgttgctttatcatttctccgtaaacttgcccctgatgttggcctcctaccctgtcttccgagccatgggaatgcgaagcagttttcctctgccgtcctggaaagaagtgtctgcccagatattattctactttatcattgaggattttgtcttctattggggtcatcggatcttgcattcaaaatggctgtacaagaacgtgcatagtgtgcatcatgaatatgccacaccatttggtttgacatcagaatatgctcaccccgctgagattctatttctgggttttgctaccatagtcggtccagctcttactggccctcacctaattactctctggttatggatggtgttgagagtgctggagacagttgaggcacattgtggttatcatttcccatggagcctctcaaattttcttcctctgtatggaggtgctgacttccatgactaccatcaccgactgctatacacaaagtccggaaactactcttcaacttttgtgtatatggactggatctttggtactgacaaggggtacagaagactgaagacccttaaagaaaacggtgacatgaaacaaacgtga

SEQ ID NO: 131004 - protein, 266 aa, Arabidopsis thaliana
MASFVESGWQYLVTHFSDFQLACIGSFLLHESVFFLSGLPFIFLERQGFLSKYKIQTKNNTPAAQGKCITRLLLYHFSVNLPLMLASYPVFRAMGMRSSFPLPSWKEVSAQILFYFIIEDFVFYWGHRILHSKWLYKNVHSVHHEYATPFGLTSEYAHPAEILFLGFATIVGPALTGPHLITLWLWMVLRVLETVEAHCGYHFPWSLSNFLPLYGGADFHDYHHRLLYTKSGNYSSTFVYMDWIFGTDKGYRRLKTLKENGDMKQT

SEQ ID NO: 131005 - DNA, 1337 bp, Oryza sativa
  CDS (62)..(868)
gaggagatcccctgatccctcttcctcgccggcggcaatcgctcgccggagtcaaggtaggatgatggcggcggcggggctggagtcggcgtgggagtacctcatcacgcatttcagcgagttccagctggcctccatcggcaccttcctcctccacgagagcgtcttcttcctctccggcctcccctctctcctcttcgagcgcctcggcctcttctccaagtacaagatccagaagaagagcaatacacccgattaccagaacagatgtgtagtgcgtctcgttctctaccatgtctgcgtcaatctccctctcaccattttatcatatcgcaccttcaaattcatgggcttgaggagcacccttccgctgcctcactggacagttgtcgtctcccaagtgctcttcttttttgtgcttgaggatttcatattctactgggggcatagggcactgcataccaaatggctgtaccagcatgttcacagcgtccaccatgaatatgccacaccctttggcctaacatctgaatatgctcaccctgctgagattctattcttgggctttgctaccgtggccggccctgcccttactggccctcacctcttcactctctgggtgtggatggtcttgagggtcttggagacagttgaggctcacagtggctaccacttcccatggagcccgtccaatttcttgccattgtatggcggcgctgaattccatgactatcatcaccgtgttctctacaccaagcctgggaattactcgtcgaccttcatctacatggactggctgtttgggactgataaagattaccgcaagacaaaggccctagaggagaaagaaaggacgaagcatctgtaaattgtgagctcttatccctttgctggcgccttattcccaatgagctttcatgtgttgtagtactgatgatgagacattccgttgattgaagcaaaacggcaggcaggcgtcttaaccactgctaccttgattagggcacatgtgtatgtatgcggtgctcctcctgttattagttttcttcatgctgtaattctccattgtaattttggactgcagagttgggggtagaggtgtcctgcgattaatttgaagcaaaataaaaggttaagttttgctgaggatcgatgtttgtttgcactggtgttgctcagatcgggatatgacgactttgtgtcttgtttgttgggatgttagaaatgcaaaattattactgtatatatgggccctggctggagtgtttcaggatgtcccaaattgtaaacggcctggacctgcctggcccatctaaaacggggcctttcgcttcttc

SEQ ID NO: 131006 - protein, 268 aa, Oryza sativa
MMAAAGLESAWEYLITHFSEFQLASIGTFLLHESVFFLSGLPSLLFERLGLFSKYKIQKKSNTPDYQNRCVVRLVLYHVCVNLPLTILSYRTFKFMGLRSTLPLPHWTVVVSQVLFFFVLEDFIFYWGHRALHTKWLYQHVHSVHHEYATPFGLTSEYAHPAEILFLGFATVAGPALTGPHLFTLWVWMVLRVLETVEAHSGYHFPWSPSNFLPLYGGAEFHDYHHRVLYTKPGNYSSTFIYMDWLFGTDKDYRKTKALEEKERTKHL

SEQ ID NO: 131007 - DNA, 1376 bp, Sorghum bicolor
  CDS (124)..(930)
gccggccgggccggcggtacgttgctcaactagagaactccgcctcgtcctccgagagcaggccacaggccaggctctggctcacccgctcccctcctcgcatcttcgccgccggcgatcataatggcggcgcccatgtccgccatcgagtccgcgtggcaggtcctgatcgccaacttcaccgagttccagctcgccaccgtcgtcaccttcctgctccacgagaccgtcttcttcctctccggcctcccctccctcctcttcgagcgcttcggactcttcgccaagtacaagatccagaagaagagcaacacccctgcttaccaaaacagatgtgtcttgcgtcttattctgtaccatgtctgtgtgaacctgcctgtcatgattttctcataccctgccttcagatttatgggtcttaggagctctcttcctctaccacattggacggttgttgtatctcaagttcttttctactttgtccttgaggattttatattctactgggggcacagggcactgcatacgaaatggctatacaagcatgttcacagcgtccaccacgagtatgccacaccctttggtttaacttccgaatatgcccacccagctgaaattttgttcctgggattcgccacagtggttggtcctgctcttactggccctcatctgttcaccctgtggctgtggatggtgttgaggatattggagacagttgaagctcacagcggctatcacttcccatggagcccatcaaatttcctgccactgtatggcggctcggacttccatgactaccatcaccgtgtgctgtacacaaagtcagggaactatgcctcgacatttgtttatatggactggttgtttgggacggacaaggattatcgcaaggcaaagaccattgaggagaaagaagggaagaatctgtagattgtggaagctgctcagtgaagacatcagcaagactggcaatagagttgagctcatggaaaaagagatggacgcaccctagaaacactcagtcagttattgcctgacgatccatactataggttgagattttgatttcctgtgtttgctatgatcaagaatgaggtcctggcgaccttggtctgtcatgaactgaatctgataatttgtaatctcctcttgggtttttgctttgcgtttgtttcgactcgggggtgtatacatatgggaatgggatggcctggcagcagtactgaattgaaccatcagagacggcgggagtagctttgcaccctagaaactgtccatgaaagtctgggatggcaaggattgattgcttgtgtactttgttggtaagggatttcggatttgttcttctcgtttatataattttccgggatctcggt

SEQ ID NO: 131008 - protein, 268 aa, Sorghum bicolor
MAAPMSAIESAWQVLIANFTEFQLATVVTFLLHETVFFLSGLPSLLFERFGLFAKYKIQKKSNTPAYQNRCVLRLILYHVCVNLPVMIFSYPAFRFMGLRSSLPLPHWTVVVSQVLFYFVLEDFIFYWGHRALHTKWLYKHVHSVHHEYATPFGLTSEYAHPAEILFLGFATVVGPALTGPHLFTLWLWMVLRILETVEAHSGYHFPWSPSNFLPLYGGSDFHDYHHRVLYTKSGNYASTFVYMDWLFGTDKDYRKAKTIEEKEGKNL

SEQ ID NO: 131009 - DNA, 915 bp, Zea mays
  CDS (1)..(915)
atggctagagaaaaaaaaatccgccttctcctcccagtcgcaggccaggctcagcctcccctctcccctcctcggcatcttcgccgccggcgatctatctctctcacaatggcggtgcccatgtccgccatcgagtccgcgtggcagctcctgatcgccaacttcaccgagttccagctcgccaccgtcatcaccttcctgctccacgagaccgtcttctttctctctggccttccctccctcctcttcgagcgcttcggactcttcgccaaatacaagatccagaagaggagcaacacctctgcttaccaaaacagatgtgtcttgcgtcttattctctaccatgtctctgtgaacctgcctgtcatgattttgtcgtaccctgccttcaaattcatgggtcttaggagctctcttcctttgccacattggtcggttgttgtatctcaagttcttttctactttgtccttgaggattttatattctattgggggcacagggcattgcatacgaaatggctatacaaacacgttcacagcgtccaccacgagtacgccacaccctttggtttaacatcggaatatgcccacccagctgaaattttgttcctgggattcgccacagttgttggtcctgctcttactggccctcatctcttcaccctgtggctgtggatggtgttgagggttttggagacagttgaagctcacagcggctatcacttcccatggagcccatcaaatttcctgccgctgtatggcggctcggacttccatgactaccatcaccgtgtgctgtacacaaagtcagggaactatgcctcaacatttgtttacatggactggttgttcggcacggacaaggattatcgcaaggcaaagaccattgaggagaaagaagggaaaaatctgtga

SEQ ID NO: 131010 - protein, 304 aa, Zea mays
MAREKKIRLLLPVAGQAQPPLSPPRHLRRRRSISLTMAVPMSAIESAWQLLIANFTEFQLATVITFLLHETVFFLSGLPSLLFERFGLFAKYKIQKRSNTSAYQNRCVLRLILYHVSVNLPVMILSYPAFKFMGLRSSLPLPHWSVVVSQVLFYFVLEDFIFYWGHRALHTKWLYKHVHSVHHEYATPFGLTSEYAHPAEILFLGFATVVGPALTGPHLFTLWLWMVLRVLETVEAHSGYHFPWSPSNFLPLYGGSDFHDYHHRVLYTKSGNYASTFVYMDWLFGTDKDYRKAKTIEEKEGKNL

SEQ ID NO: 131011 - DNA, 915 bp, Zea mays
  CDS (1)..(915)
atgacgaggggccaggctcagcctcccccctcccctcctcggcatcttcgccgccggcgatctatctctctcacaatggcggcgcccatgtcagccatcgactcagcgtggcagctcctgatcgccaacttcaccgagttccagctcgccaccgtcgtcaccttcctgctccacgagaccgtcttcttcctctccggcctcccctccctcctcttcgagcgcttcggactcttcgccaagtacaagatccagaagaagagcaacacctctgcttaccaaaacagatgtgtcttgcgcctcattctctaccatgtatgtgtgaacctgcctgtcatgattttctcgtatcctgccttcaaattcatgggtctcaggagctctcttcctttgccacattggtcggttgttgtatctcaagttcttttctactttgtccttgaggattttatattctattgggggcacagggcattgcatacgaaatggctatacaaacacgttcacagcgtccaccacgagtacgccacaccctttggtttaacatcggaatatgcccacccagctgaaattttgttcctgggattcgccacagttgttggtcctgctcttactggccctcatctcttcaccctgtggctgtggatggtgttgagggttttggagacagttgaagctcacagcggctatcacttcccatggagcccatcaaatttcctgccgctgtatggcggctcggacttccatgactaccatcaccgtgtgctgtacacaaagtcagggaactatgcctcaacatttgtttacatggactggttgttcggcacggacaaggattatcgcaaggcaaagaccattgaggagaaagaagggaaaatctgtagattgtggaagctgctcagcaagactggcgattga

SEQ ID NO: 131012 - protein, 304 aa, Zea mays
MTRGQAQPPPSPPRHLRRRRSISLTMAAPMSAIDSAWQLLIANFTEFQLATVVTFLLHETVFFLSGLPSLLFERFGLFAKYKIQKKSNTSAYQNRCVLRLILYHVCVNLPVMIFSYPAFKFMGLRSSLPLPHWSVVVSQVLFYFVLEDFIFYWGHRALHTKWLYKHVHSVHHEYATPFGLTSEYAHPAEILFLGFATVVGPALTGPHLFTLWLWMVLRVLETVEAHSGYHFPWSPSNFLPLYGGSDFHDYHHRVLYTKSGNYASTFVYMDWLFGTDKDYRKAKTIEEKEGKICRLWKLLSKTGD

SEQ ID NO: 131013 - DNA, 1047 bp, Zea mays
  CDS (1)..(1047)
atgggcaacgtgagcggcggtacggcacaaggccacgacaggccaaaagagaggagacggagcaatggaattggaaggccacgagaggagtctgagctcgccgctttagcgagcgcaagcagagcctgccaaaaggctagagaaaaaaaaatccgccttctcctcccagtcgcaggccaggctcagcctcccctctcccctcctcggcatcttcgccgccggcgatctatctctctcacaatggcggcgcccatgtcagccatcgactcagcgtggcagctcctgatcgccaacttcaccgagttccagctcgccaccgtcgtcaccttcctgctccacgagaccgtcttcttcctctccggcctcccctccctcctcttcgagcgcttcggactcttcgccaagtacaagatccagaagaagagcaacacctctgcttaccaaaacagatgtgtcttgcgcctcattctctaccatgtatgtgtgaacctgcctgtcatgattttctcgtatcctgccttcaaattcatgggtctcaggagctctcttcctttgccacattggtcggttgttgtatctcaagttcttttctactttgtccttgaggattttatattctattgggggcacagggcattgcatacgaaatggctatacaaacacgttcacagcgtccaccatgagtacgccacaccctttggtttaacatcggaatatgcccacccagctgaaattttgttcctgggattcgccacagttgttggtcctgctcttactggccctcatctcttcaccctgtggctgtggatggtgttgagggttttggagacagttgaagctcacagcggctatcacttcccatggagcccatcaaatttcctgccgctgtatggcggctcggacttccatgactaccatcaccgtgtgctgtacacaaagtcagggaactatgcctcaacatttgtttacatggactggttgttcggcacggacaaggattatcgcaaggcaaagaccattgaggagaaagaagggaaaaatctgtga

SEQ ID NO: 131014 - protein, 348 aa, Zea mays
MGNVSGGTAQGHDRPKERRRSNGIGRPREESELAALASASRACQKAREKKIRLLLPVAGQAQPPLSPPRHLRRRRSISLTMAAPMSAIDSAWQLLIANFTEFQLATVVTFLLHETVFFLSGLPSLLFERFGLFAKYKIQKKSNTSAYQNRCVLRLILYHVCVNLPVMIFSYPAFKFMGLRSSLPLPHWSVVVSQVLFYFVLEDFIFYWGHRALHTKWLYKHVHSVHHEYATPFGLTSEYAHPAEILFLGFATVVGPALTGPHLFTLWLWMVLRVLETVEAHSGYHFPWSPSNFLPLYGGSDFHDYHHRVLYTKSGNYASTFVYMDWLFGTDKDYRKAKTIEEKEGKNL

SEQ ID NO: 131015 - DNA, 1105 bp, Zea mays
  CDS (86)..(883)
gagacaaacgccacattccgccacctcctctcccaaaggctcgccctccccggctcccctcgtatcttcgccgtcggcgatcaaaatggcggtgcccatgtccgccatcgagtccgcgtggcagctcctgatcgccaacttcaccgagttccagctcgccaccgtcatcaccttcctgctccacgagaccgtcttctttctctctggccttccctccctcctcttcgagcgcttcggactcttcgccaaatacaagatccagaagaggagcaacacctctgcttaccaaaacagatgtgtcttgcgtcttattctgtaccatgtctctgtgaacctgcctgtcatgattttgtcgtaccctgccttcaaattcatgggtcttaggagctctcttcctctaccacattggacggttgttgtatctcaagttcttttctactttgtccttgaggattttatattctactgggggcacagggcactgcatacgaaatggctatacaaacatgttcacagcgtccaccacgagtacgccacaccctttggtttaacttccgaatatgcccacccagctgaaattttgttcctgggattcgccacagttgttggtcctgctcttactggccctcatctgttcaccctgtggctgtggatggtgttgagggtattggagactgttgaagctcacagcggctatcacttcccatggagcccatcaaatttcctgccactgtacggtggctcggacttccatgactaccatcaccgagtgctgtacacaaagtcagggaactatgcctcgacatttgtttacatggactggttgttccggacggacaatggttatcgcaaggcaaagagaccattgaggagcaagaagtgaagaagaagaagaatctgtaaagtgttgaagctgctcatcaacaggactggcgatagagttgcgcctcatcatggaaggagagaagatggatgcagtcagttattgcctgacgaccaatactataggctcctgagatgttgatttccctgtgttttctatgatcaagaacgaggtcctggcgaccttggtctgtcatgaactgaatttgataaaaaaattgtc

SEQ ID NO: 131016 - protein, 265 aa, Zea mays
MAVPMSAIESAWQLLIANFTEFQLATVITFLLHETVFFLSGLPSLLFERFGLFAKYKIQKRSNTSAYQNRCVLRLILYHVSVNLPVMILSYPAFKFMGLRSSLPLPHWTVVVSQVLFYFVLEDFIFYWGHRALHTKWLYKHVHSVHHEYATPFGLTSEYAHPAEILFLGFATVVGPALTGPHLFTLWLWMVLRVLETVEAHSGYHFPWSPSNFLPLYGGSDFHDYHHRVLYTKSGNYASTFVYMDWLFRTDNGYRKAKRPLRSKK

SEQ ID NO: 131017 - DNA, 1137 bp, Glycine max
  CDS (76)..(891)
  misc_feature (1134)..(1134): n is a, g, c or t
  misc_feature (1135)..(1135): n is a, g, c or t
acaacacaactcaactctgcatccacttccccactctctcacatattgcctctctctttcctctttccattgtccatggcgtccctcatcgaatctggctggcagtacttgatcacacatttcagtgactttcaactggcgtgtttgggaagtttctttctacatgaaggcgttttcttcttgtctggacttccctttatatggcttgagagggcagggtggatgagcaagtacaaaattcaggccaaaaataacacccctgcagctcaggagaaatgtattgttcgtctgttgctttaccattttggtgtcaatctacctgttatgattttttcatatcctgtcttcacatacatgggcatgcggagtagtcttcccctaccgtcctggaaagtagttctaattcaaataatcttttacttcattttggaggactttatattctactggggacatagaatactgcacacaaagtggttatacaagcatgtgcacagtgttcatcatgagtatgctacaccgtttggattgacttctgaatatgctcatcctgctgagatacttttccttgggtttgctaccatttttggtcctgccattactgggccccacttgataactctctggttatggatggttctgagagtcctagagacagttgaggctcattgtggttaccatttcccatggagtctttccaacttccttccattgtatggaggagctgatttccatgactatcatcaccgtttattgtacaccaagtctgggaactattcatcaacttttacttacatggaccggatatttgggactgatataggctacagaaagttgaaagcattgaagagcataggagttgaagacagtggcgagcaaaagaaacaataagaatacgtttttaggaatatccaggaatgattagagagttgatttgcaaaagggcatatttgaaaaatgtctatgatatcaactccttatgtgttcttgtgtttttgtagtagctggtgtttgtcttcaatgtgctgatggctttttctggacattcatgccctgttattagaaaaacttcattattgacagtaatttcaattttgggatgtttccctttgctgatctaaaaaaaaaaaaaanncc

SEQ ID NO: 131018 - protein, 271 aa, Glycine max
MASLIESGWQYLITHFSDFQLACLGSFFLHEGVFFLSGLPFIWLERAGWMSKYKIQAKNNTPAAQEKCIVRLLLYHFGVNLPVMIFSYPVFTYMGMRSSLPLPSWKVVLIQIIFYFILEDFIFYWGHRILHTKWLYKHVHSVHHEYATPFGLTSEYAHPAEILFLGFATIFGPAITGPHLITLWLWMVLRVLETVEAHCGYHFPWSLSNFLPLYGGADFHDYHHRLLYTKSGNYSSTFTYMDRIFGTDIGYRKLKALKSIGVEDSGEQKKQ

SEQ ID NO: 131019 - DNA, 1170 bp, Gossypium hirsutum
  CDS (123)..(938)
gtatctatacctgtctctctatctctctctgtttttctctctcccgcaaggatttaattttttaattaaaaacccattttggattctcagtgttttgcttgtcacttccaagcatcactctcatggcttccatcattgaatctggttggctgtatctgatcacgcatttcagcgacttccaactagctagtatgggaagtttccttcttcatgaaagtgttttcttcttatctgggcttccatttatatatcttgaaagagctggattgctaagcaaatacaagattcagacaaaaaacaatacccctactgctcaagaaaaatgtatcactcgccttcttttgtatcattttagcgtcaatttaccgcttatgattgtctcgtatcccgtcttcagatgcatgggcatgagaagtagtctaccattgccatcctggaaagtggttctaactcagataatattctacttcattctggaggattttgtgttttactggggacatcgtgttttacatacaaaatggctgtacaagcatgtacacagtgtccatcatgaatatgcaacaccattcggactgacatcggaatatgctcacccagctgagatattgttccttggctttgccacaattgttggtcctgccatcaccggcccacatctgattactctctggttgtggatggttcttagagtcctcgagacagttgaggcacattgtggttaccattttccatggagcctctcgaactttcttcctttatatgggggtgctgattttcatgactatcatcatcgtttgctttacacgaaatctggcaactactcatccactttcatttacatggactggatattcggtaccgataaaggctacagaaagctgaaagcactaaaacacaacggagtcggagtcgaagatgacagcgagcaaacataatggagagaaaactagtttcgagtttgagggttcgggatgatttattaatcgtttaatgactttaggtataatttatcttttttatttcaacagtaataaagtgtcatgttattgtttccataggtaataatttggggtaaaaaaaaattaaaagtagtgaaatataattttaattaaatatgcctttaaaatatgttttcaaataaataaaaaatatatatattcagagtcg

SEQ ID NO: 131020 - protein, 271 aa, Gossypium hirsutum
MASIIESGWLYLITHFSDFQLASMGSFLLHESVFFLSGLPFIYLERAGLLSKYKIQTKNNTPTAQEKCITRLLLYHFSVNLPLMIVSYPVFRCMGMRSSLPLPSWKVVLTQIIFYFILEDFVFYWGHRVLHTKWLYKHVHSVHHEYATPFGLTSEYAHPAEILFLGFATIVGPAITGPHLITLWLWMVLRVLETVEAHCGYHFPWSLSNFLPLYGGADFHDYHHRLLYTKSGNYSSTFIYMDWIFGTDKGYRKLKALKHNGVGVEDDSEQT

SEQ ID NO: 131021 - DNA, 810 bp, Populus balsamifera subsp. trichocarpa
  CDS (1)..(810)
atggcctccctcatcgaatcttgctggctgtatttgatcacgcatttcagcgattttcagttggcatgtcttggaagtttctttcttcatgaaagcatcttcttcttgtctggtattcctttcatatatcttgaaagggctggatggctgaaaaagtacaaaatccagatgaaaaacaacactcctgcatctcaagagaaatgtattattcgcctacttttatatcattttggtgttaacctaccagttatgctggcctcctatcctgtcttcagacacatgggcatgcaaagtagtcttccattcccgtcctggaatgtaattctaacgcagataacattctacttcatcctggaagattttatattctactggggacatcggattttacacacaaaatggctgtacaagcatgtgcacagtgttcatcatgaatatgctacaccatttggattaacttctgaatatgctcaccctgctgaaatactgttccttggctttgctaccattattggtcctgccatcactgggccccatctgcttactttgtggttatggatggtactaagggtcctggagacggttgaagcacattgtggttatcatttcccatggagcctctccaacttcttacctttgtatggaggtgctgattttcatgactaccatcaccggttgctgtatactaaatctggaaactactcatctactttcacctacatggactgggtattcggtaccgataaaggttacagaaagttgcaagcattgaagaatgctggagtggaaaatggcggcaagcaaatgtaa

SEQ ID NO: 131022 - protein, 269 aa, Populus balsamifera subsp. trichocarpa
MASLIESCWLYLITHFSDFQLACLGSFFLHESIFFLSGIPFIYLERAGWLKKYKIQMKNNTPASQEKCIIRLLLYHFGVNLPVMLASYPVFRHMGMQSSLPFPSWNVILTQITFYFILEDFIFYWGHRILHTKWLYKHVHSVHHEYATPFGLTSEYAHPAEILFLGFATIIGPAITGPHLLTLWLWMVLRVLETVEAHCGYHFPWSLSNFLPLYGGADFHDYHHRLLYTKSGNYSSTFTYMDWVFGTDKGYRKLQALKNAGVENGGKQM

SEQ ID NO: 131023 - DNA, 1031 bp, Panicum virgatum
  CDS (67)..(867)
aggagaccagaccaccaccaccaccactccacccccatcacagaaacagagagagccctgcctacaatggcggcggccctcgagtctggctggcaggtcctgaccgccaacttcaccgagttccagctcgccaccgtcttcaccttcctgatccacgaggccgccttcttcctctccggcctcccctccctcctcttcgagcgcttcgggctcttcgccaagtacaagattcagaagaagagcaacacctctgcttatcaaaacagatgtgtcctgcgtctcattctctaccatgtctgtgtgaacttgcctgtcgtgattttctcctaccctgccttcaaattcatgggccttaggagctctcttcctctgccacactggacggttgtcgtatctcaaattctattctactttgtactggaggattttgtattctattgggggcaccgggcactgcacaccaaatggctatacaagcatgtccacagcgtccaccacgaatatgctacaccctttgggttaacttctgaatacgcccaccccgctgaaattttgttcctgggattcgccacagttgttggccctgctcttactggccctcatttgttgaccctgtggctttgggtggtgttgagggtattggagacagttgaagctcacagcggctaccacttcccatggagcccctcaaatttcctgccactgtatggcggctcggacttccatgactaccatcaccgtgtgctctacaccaagtcagggaactattcctcgacttttgtgtacatggactggttgtttgggacggacaaggattaccgcaaggtgaaggccatggaggagaaggaagggaacaaggatatgtagatgatgcatgcatgggatctgcgaataatgaagacaggaggctattagcagcacgtactgagtactacaatcgtacgtaatcctggggatttgtgttagttcctgctttaatttgtttgggcgggatcggatgtatatacatgggatgggtttggatcggagct

SEQ ID NO: 131024 - protein, 266 aa, Panicum virgatum
MAAALESGWQVLTANFTEFQLATVFTFLIHEAAFFLSGLPSLLFERFGLFAKYKIQKKSNTSAYQNRCVLRLILYHVCVNLPVVIFSYPAFKFMGLRSSLPLPHWTVVVSQILFYFVLEDFVFYWGHRALHTKWLYKHVHSVHHEYATPFGLTSEYAHPAEILFLGFATVVGPALTGPHLLTLWLWVVLRVLETVEAHSGYHFPWSPSNFLPLYGGSDFHDYHHRVLYTKSGNYSSTFVYMDWLFGTDKDYRKVKAMEEKEGNKDM

SEQ ID NO: 131025 - DNA, 1139 bp, Panicum virgatum
  CDS (59)..(859)
gactaccaccacaccgtcacccccatcacagaaagaaagagagagagccctacctacaatggcggcggccctcgagtctgcctggcaggtcctgaccgccaacttctccgagttccagctcgccaccgtcttcaccttcctgatccacgagaccgccttcttcctctccggcctcccctccctcctcttcgagcgcttcggactcttcgccaagtacaagattcaaaagaagagcaacacctctgcttatgaaaacagatgtgtcctgcgcctcatactctaccatgtctgtgtgaacttgcctgtcatcattttctcctaccctgccttcaaattcatgggccttaggagctctcttcctctgccacactggacggttgttgtatctcaagttgcattctactttgtactggaggattttgtattctactgggggcaccgggcactgcacaccaaatggctatacaagcatgtccacagcgtccaccacgaatatgctacaccctttgggttaacttctgaatacgcccaccctgctgagattttgttcctgggattcgccacagttgttggtcctgctcttactggccctcatttgttgaccctgtggctttgggtggtgttgagggtattggagacagttgaagctcacagcggctaccacttcccatggagcccctcaaatttcctgccactgtatggaggctcggacttccatgactaccatcaccgtgtgctctacaccaagtcagggaactatgcctcgacttttgtgtacatggactggttgtttgggacggacaaggattaccgcaaggcgaaggccatggaggagaaggaagggaacaaggatacgtagatcgatcatgcatgggagctgcgaataatgaagacaggcggagctagcaatacgtactgtctgtgtactacaatcgtacgtacgtaatccttggggtttgccgtttgcgttcctgctttgtttaatttggccgggatcggatgtatatatacatttggatcggagctagctagtagcaagatggtcgatgaggttgatgtgaccttagtttgcttgtgtgatgaattaacaataatgtcagcaattaaataaagccacaactatagccggcctgttcagc

SEQ ID NO: 131026 - protein, 266 aa, Panicum virgatum
MAAALESAWQVLTANFSEFQLATVFTFLIHETAFFLSGLPSLLFERFGLFAKYKIQKKSNTSAYENRCVLRLILYHVCVNLPVIIFSYPAFKFMGLRSSLPLPHWTVVVSQVAFYFVLEDFVFYWGHRALHTKWLYKHVHSVHHEYATPFGLTSEYAHPAEILFLGFATVVGPALTGPHLLTLWLWVVLRVLETVEAHSGYHFPWSPSNFLPLYGGSDFHDYHHRVLYTKSGNYASTFVYMDWLFGTDKDYRKAKAMEEKEGNKDT

SEQ ID NO: 131027 - DNA, 1176 bp, Panicum virgatum
  CDS (119)..(919)
agctacagcttaaacacaagaagaagaggagaggagaggagaggagtggagtggagaggagactaccaccacaccgtcacccccatcacagaaagaaagagagagagccctacctacaatggcggcggccctcgagtctgcctggcaggtcctgaccgccaacttctccgagttccagctcgccaccgtcttcaccttcctgatccacgagaccgccttcttcctctccggcctcccctccctcctcttcgagcgcttcggactcttcgccaagtacaagattcagaagaagagcaacacctctgcttatcaaaacagatgtgtcctgcgtctcatactctaccatgtctgtgtgaacttgcctgtcatcattttctcctaccctgccttcaaattcatgggccttaggagctctcttcctctgccacactggacggttgttgtatctcaagttgcattctactttgtactggaggattttgtattctactgggggcaccgggcactgcacaccaaatggctatacaagcatgtccacagcgtccaccacgaatatgctacaccctttgggttaacttctgaatacgcccaccctgctgagattttgttcctgggattcgccacagttgttggtcctgctcttactggccctcatttgttgaccctgtggctttgggtggtgttgagggtattggagacagttgaagctcacagcggctaccacttcccatggagcccctcaaatttcctgccactgtatggaggctcggacttccatgactaccatcaccgtgtgctctacaccaagtcagggaactatgcctcgacttttgtgtacatggactggttgtttgggacggacaaggattaccgcatggtgaaggccatggaggagaaggaagggaacaaggatatgtagatgatgcatgcatgggatctgcgaataatgaagacaggcggagctagcaatatgtactgtctgtgtactacaatcgtacgtacgtaatccttggggtttgtgttcctgctttgtttaatttggccgggatcggatgtatatatacatttggatcggagctagctagtagcaagatggtcgatgaggttgatgtgaccttagtttgcttgtgtgatgaattaacaataatgtcagcaattaaataaagccacaactgc

SEQ ID NO: 131028 - protein, 266 aa, Panicum virgatum
MAAALESAWQVLTANFSEFQLATVFTFLIHETAFFLSGLPSLLFERFGLFAKYKIQKKSNTSAYQNRCVLRLILYHVCVNLPVIIFSYPAFKFMGLRSSLPLPHWTVVVSQVAFYFVLEDFVFYWGHRALHTKWLYKHVHSVHHEYATPFGLTSEYAHPAEILFLGFATVVGPALTGPHLLTLWLWVVLRVLETVEAHSGYHFPWSPSNFLPLYGGSDFHDYHHRVLYTKSGNYASTFVYMDWLFGTDKDYRMVKAMEEKEGNKDM

SEQ ID NO: 131029 - DNA, 798 bp, Oryza sativa (japonica cultivar-group)
  CDS (1)..(798)
atggggattggggcgtcggacgagctgctgggcacgttcgtgccgatcgccgtgtactggctctactcggggctgtacctcgcgctggacggcgtggagcggctggacgtgtaccggctgcaccccagggaggaggaggccgccaagaacgtcgtctccaggggcaccgtcgtcaggggcgtcctcgtccagcaggccttccaggtcgccgtctcgctcaccctcttcgcggttattggtgatgaaagtgatattgaacagaagcaaccttctgcccttgtgatattgctgcaatttgccattgcaatgttcgttatggatacatggcagtacttcatgcacagatacatgcacatcaacaagttcctatataaacatatccactccaagcaccacactcttgtagtcccttattcctttggagctctttacaaccatcctcttgagggtcttattttggacaccattggtggtgctctctcattcctcgtctctggtatgacaccacggacatccatattctttttctcgttcgcaaccatcaagacagtggatgatcattgtggtctgtggcttcctggtaacatcctccatgcgctgttcaacaacaacagcgcttatcatgacattcatcatcagctctatggaaacaagtacaacttttcacaaccattttttgtcatttgggacaagatacttggaacttacatgccttactctatcgagcacagaaaaggaggagggtttgagtcacggccagttaaactcaacatagcagagcagaccaagactgattag

SEQ ID NO: 131030 - protein, 265 aa, Oryza sativa (japonica cultivar-group)
MGIGASDELLGTFVPIAVYWLYSGLYLALDGVERLDVYRLHPREEEAAKNVVSRGTVVRGVLVQQAFQVAVSLTLFAVIGDESDIEQKQPSALVILLQFAIAMFVMDTWQYFMHRYMHINKFLYKHIHSKHHTLVVPYSFGALYNHPLEGLILDTIGGALSFLVSGMTPRTSIFFFSFATIKTVDDHCGLWLPGNILHALFNNNSAYHDIHHQLYGNKYNFSQPFFVIWDKILGTYMPYSIEHRKGGGFESRPVKLNIAEQTKTD

SEQ ID NO: 131031 - DNA, 903 bp, Oryza sativa (japonica cultivar-group)
  CDS (1)..(903)
atgctcccgtacgcgacggcggcggaggcggaggcggcggtggggcggggcctgacgtgggcggaggcggcctggttccgctactcggcggccatcccggactactgcctctactgccacaacgtccccatcctcctcctcgtctacaccctcgcgccgctccccctcgcgctgctcgagctccgccgccacctgccgctgccgcacaagctgcagcccggcgtgcgccacccgccggccgccttcctccggtgctacgctgccaccgcgcgcgtgctgctcctcgccgtcgggccggtccagctggcgtcgttccctgcggtgagggcggtggggatacggacggggctgccgctgccgtcggcgggggagacggcggcgcaggtggcggtgtacctgctggtggaggactacctgggctactggatccaccgcctgctgcacacgccgtgggcctaccaccacatccaccgagtccaccacgagttcaccgcgcccatgggctacgccgccccgtacgcccactgggccgagatcctcatcctcggcttcccggccttcgccggcccagccatcgtgccgtgccacatgaccaccttctggctctggttcgtgcttcgccacctcgaggccatccacatccacagcgggttcaagttgccgttcgatccgaccaagtatatcccgttgtatggaggagtggagtaccatgactaccaccatttcgtgggaggacacagccagagcaacttctcttctgtcttcactttctgtgattacatctacgggactgacagaggctacagataccataaggcaagcttgtcaaagctgaaggagatggcaggaaaccacgttgagaaaggagatgaaaatggattcggcaacgggaaacaagattaa

SEQ ID NO: 131032 - protein, 300 aa, Oryza sativa (japonica cultivar-group)
MLPYATAAEAEAAVGRGLTWAEAAWFRYSAAIPDYCLYCHNVPILLLVYTLAPLPLALLELRRHLPLPHKLQPGVRHPPAAFLRCYAATARVLLLAVGPVQLASFPAVRAVGIRTGLPLPSAGETAAQVAVYLLVEDYLGYWIHRLLHTPWAYHHIHRVHHEFTAPMGYAAPYAHWAEILILGFPAFAGPAIVPCHMTTFWLWFVLRHLEAIHIHSGFKLPFDPTKYIPLYGGVEYHDYHHFVGGHSQSNFSSVFTFCDYIYGTDRGYRYHKASLSKLKEMAGNHVEKGDENGFGNGKQD

SEQ ID NO: 131033 - DNA, 807 bp, Oryza sativa (japonica cultivar-group)
  CDS (1)..(807)
atgatggcggcggcggggctggagtcggcgtgggagtacctcatcacgcatttcagcgagttccagctggcctccatcggcaccttcctcctccacgagagcgtcttcttcctctccggcctcccctctctcctcttcgagcgcctcggcctcttctccaagtacaagatccagaagaagagcaatacacccgattaccagaacagatgtgtagtgcgtctcgttctctaccatgtctgcgtcaatctccctctcaccattttatcatatcgcaccttcaaattcatgggcttgaggagcacccttccgctgcctcactggacagttgtcgtctcccaagtgctcttcttttttgtgcttgaggatttcatattctactgggggcatagggcactgcataccaaatggctgtaccagcatgttcacagcgtccaccatgaatatgccacaccctttggcctaacatctgaatatgctcaccctgctgagattctattcttgggctttgctaccgtggccggccctgcccttactggccctcacctcttcactctctgggtgtggatggtcttgagggtcttggagacagttgaggctcacagtggctaccacttcccatggagcccgtccaatttcttgccattgtatggcggcgctgaattccatgactatcatcaccgtgttctctacaccaagtctgggaattactcgtcgaccttcatctacatggactggctgtttgggactgataaagattaccgcaagacaaaggccctagaggagaaagaaaggacgaagcatctgtaa

SEQ ID NO: 131034 - protein, 268 aa, Oryza sativa (japonica cultivar-group)
MMAAAGLESAWEYLITHFSEFQLASIGTFLLHESVFFLSGLPSLLFERLGLFSKYKIQKKSNTPDYQNRCVVRLVLYHVCVNLPLTILSYRTFKFMGLRSTLPLPHWTVVVSQVLFFFVLEDFIFYWGHRALHTKWLYQHVHSVHHEYATPFGLTSEYAHPAEILFLGFATVAGPALTGPHLFTLWVWMVLRVLETVEAHSGYHFPWSPSNFLPLYGGAEFHDYHHRVLYTKSGNYSSTFIYMDWLFGTDKDYRKTKALEEKERTKHL

SEQ ID NO: 131035 - DNA, 906 bp, Oryza sativa (japonica cultivar-group)
  CDS (1)..(906)
atgctgccctacgcgacggcggcggaggcggaggcggcgctggggagggcgatgacggcggcggagtcgctgtggttcaggtactcggcggggatcccggactacgtcctcttctggcacaacatcctcttcctcttcgtcgtcttcacgctcgcgccgctccccgtcgcgctcctcgagctccgcgcgccggccgccgtggggccgttcaagctgcagcccaaggtgcggctctcccgggaggagttcttccgctgctacagggacgtcatgcgcctcttcttcctcgtcatcggcccgctccagctcgtgtcctaccctaccgtcaagatggtgggaatccacacagggctgccactgccgtcgctgggggagatggcggcgcagctgctggtgtacttcctggttgaggactacctcaactactggatccatcggttgctacatggggagtggggctatgagaagatccaccgtgtccaccatgagttcacggcacccattggattcgccgcgccatatgcacactgggctgaggtgctcatcctcggcatcccctcctttgtcgggccagcgcttgcacctggtcacatgatcaccttctggctctggattgtactccgccagatggaggccatagagacacacagcggctttgatttcccgttcaacctgacaaagtatattccattctatggaggcgcagaataccatgattatcatcactatgttggacgccagagtcagagcaatttcgcttctgttttcacgtattgtgattatctatatggaaccgacaaaggttacagataccataaggcgtaccaagcaaagatgaaggctctggggcaaacggaaggcgagaaagcagatagcaatggattgagctacgcgaagttggattaa

SEQ ID NO: 131036 - protein, 301 aa, Oryza sativa (japonica cultivar-group)
MLPYATAAEAEAALGRAMTAAESLWFRYSAGIPDYVLFWHNILFLFVVFTLAPLPVALLELRAPAAVGPFKLQPKVRLSREEFFRCYRDVMRLFFLVIGPLQLVSYPTVKMVGIHTGLPLPSLGEMAAQLLVYFLVEDYLNYWIHRLLHGEWGYEKIHRVHHEFTAPIGFAAPYAHWAEVLILGIPSFVGPALAPGHMITFWLWIVLRQMEAIETHSGFDFPFNLTKYIPFYGGAEYHDYHHYVGRQSQSNFASVFTYCDYLYGTDKGYRYHKAYQAKMKALGQTEGEKADSNGLSYAKLD

SEQ ID NO: 131037 - DNA, 801 bp, Oryza sativa (japonica cultivar-group)
  CDS (1)..(801)
atggcggcgtccgccctcgactccgcctgggagggcctcaccggcagcttcaccgagttccagctcgccaccgtcgtcaccttcctcctccacgagaccgtcttcttcctctccggcctcccctccctcctcttcgagcgcttcggcctcttcgccaagtacaagatccagaagaagagcaataccccttcttaccagaatagatgtgtgctgcgtctcattctgtaccatgtctgtgtgaacttgcctgtaatggttttatcctaccctgccttcaaattcatgggcctgaggagctctcttcctctgccacactggacggttattgtttctcaagttcttttttactttgtactcgaggattttatattttattggggacatagggcactgcacaccaaatggctatacaagcatgttcacagcgttcaccatgaatatgctacaccctttggcttgacttcagaatatgcccaccctgctgaaattttgttccttgggttcgccacaattgttggtccggccctcactggtccgcacttgttcactctatggctgtggatggtgttgagggtattggagacagttgaagctcacagtggataccatttcccatggagcccatcaaatttcttgccactgtatggaggctccgactttcatgactatcatcaccgtgtgctctacaccaaatcaggaaactacgcctctacttttgtttacatggactggctgtttggcacggacaaggattaccgcaatgccaaggctatcgaggagaaagacgggaagcatttgtaa

SEQ ID NO: 131038 - protein, 266 aa, Oryza sativa (japonica cultivar-group)
MAASALDSAWEGLTGSFTEFQLATVVTFLLHETVFFLSGLPSLLFERFGLFAKYKIQKKSNTPSYQNRCVLRLILYHVCVNLPVMVLSYPAFKFMGLRSSLPLPHWTVIVSQVLFYFVLEDFIFYWGHRALHTKWLYKHVHSVHHEYATPFGLTSEYAHPAEILFLGFATIVGPALTGPHLFTLWLWMVLRVLETVEAHSGYHFPWSPSNFLPLYGGSDFHDYHHRVLYTKSGNYASTFVYMDWLFGTDKDYRNAKAIEEKDGKHL

SEQ ID NO: 131039 - DNA, 660 bp, Arabidopsis thaliana
  CDS (1)..(660)
atggaaagatatcaccaagttgtcagtgttctcatttccccaatgaccaaaagtaatactcctgaagcccagggaaaatgcattgctcgactattactttaccattgctgcgtaaacttgcccctcatgatggcgtcgtatcctgtattcagattcatgggcatggaaagcagttttcctctgccgtcctggaaagtggtgtctgcccagatcttattctacttcatcattgaggattttgtattctattggggtcacaggatcttgcatactaaatggctctacaagaacgtgcacagtgtgcatcatgagtacgcgacaccgtttggtttgacatcagaatatgctcatcccgctgaaattctgttccttggttttgctaccattgttggtccggctctcaccgggcctcacctgatcaccctttggttatggatgatgctcagagttattgagacagttgaggcacattgtggttatcatttcccatggagcccctcgaattttcttcctctatacggcggtgctgacttccatgactaccatcatcgattactctacacaaagtctggcaactactcatcaacgtttgtttacatggactggatctttggcaccgataaaggttacagaaaacttaaggccctaaaagaaacctga

SEQ ID NO: 131040 - protein, 219 aa, Arabidopsis thaliana
MERYHQVVSVLISPMTKSNTPEAQGKCIARLLLYHCCVNLPLMMASYPVFRFMGMESSFPLPSWKVVSAQILFYFIIEDFVFYWGHRILHTKWLYKNVHSVHHEYATPFGLTSEYAHPAEILFLGFATIVGPALTGPHLITLWLWMMLRVIETVEAHCGYHFPWSPSNFLPLYGGADFHDYHHRLLYTKSGNYSSTFVYMDWIFGTDKGYRKLKALKET

SEQ ID NO: 131041 - DNA, 897 bp, Arabidopsis thaliana
  CDS (1)..(897)
atgattccttacgctacagtcgaagaagcttcaatcgcactgggacgaaacctcacacgtctcgaaactctatggttcgattactccgccacgaagtccgattactatctctactgtcacaacattttgttcttgttcctcgtcttctctctcgttcctctccctctcgttttcgtcgaattggctcgatctgcttctggtttgtttaatcggtataagatccagcctaaggttaattactctttatctgatatgttcaaatgttacaaagacgtcatgacgatgtttatcctcgtcgttggtccattgcaactcgtttcttatccttcgattcagatgattgagatacgatctggattaccattaccaacaattacagagatgctgtcacagttagtagtctacttcttgatagaagactacactaactactgggtacatagattctttcatagtaaatggggatacgataagattcatcgagttcatcacgagtacacagctcctataggatatgctgctccttatgcacattgggctgaagttttgcttctcggaatcccgacgtttatgggaccagctattgctcctggtcatatgataaccttttggttgtggattgctttaaggcaaatggaagctattgagactcacagtggatatgattttccatggagtccaacaaaatacatccctttctacggtggtgctgagtaccatgactatcatcactacgttggaggacaaagtcaaagcaacttcgcttcagtgttcacgtactgtgattacatttatggaactgacaagggttacagattccaaaagaagcttcttgagcagatcaaggagtcgtcgaagaagagcaacaagcataacggaggaataaaatccgattag

SEQ ID NO: 131042 - protein, 298 aa, Arabidopsis thaliana
MIPYATVEEASIALGRNLTRLETLWFDYSATKSDYYLYCHNILFLFLVFSLVPLPLVFVELARSASGLFNRYKIQPKVNYSLSDMFKCYKDVMTMFILVVGPLQLVSYPSIQMIEIRSGLPLPTITEMLSQLVVYFLIEDYTNYWVHRFFHSKWGYDKIHRVHHEYTAPIGYAAPYAHWAEVLLLGIPTFMGPAIAPGHMITFWLWIALRQMEAIETHSGYDFPWSPTKYIPFYGGAEYHDYHHYVGGQSQSNFASVFTYCDYIYGTDKGYRFQKKLLEQIKESSKKSNKHNGGIKSD

SEQ ID NO: 131043 - DNA, 819 bp, Arabidopsis thaliana
  CDS (1)..(819)
atggattctctcgttgaatccggttggaagtaccttgttacgcatttcagtgactttcaactggcgtgtattgggagttttatacttcatgaaagcgtgtttttcttgtctggactcccttacattttcctagaaaggactggttttctgagcaactacaaaattcagaccaaaagtaatactcctgaagcccagggaaaatgcattgctcgactattactttaccattgctgcgtaaacttgcccctcatgatggcgtcgtatcctgtattcagattcatgggcatggaaagcagttttcctctgccgtcctggaaagtggtgtctgcccagatcttattctacttcatcattgaggattttgtattctattggggtcacaggatcttgcatactaaatggctctacaagaacgtgcacagtgtgcatcatgagtacgcgacaccgtttggtttgacatcagaatatgctcatcccgctgaaattctgttccttggttttgctaccattgttggtccggctctcaccgggcctcacctgatcaccctttggttatggatgatgctcagagttattgagacagttgaggcacattgtggttatcatttcccatggagcccctcgaattttcttcctctatacggcggatctttaatattaatgtgggaatcatttgcttacagtgctgacttccatgactaccatcatcgattactctacacaaagtctggcaactactcatcaacgtttgtttacatggactggatctttggcaccgataaaggttacagaaaacttaaggccctaaaagaaacctga

SEQ ID NO: 131044 - protein, 272 aa, Arabidopsis thaliana
MDSLVESGWKYLVTHFSDFQLACIGSFILHESVFFLSGLPYIFLERTGFLSNYKIQTKSNTPEAQGKCIARLLLYHCCVNLPLMMASYPVFRFMGMESSFPLPSWKVVSAQILFYFIIEDFVFYWGHRILHTKWLYKNVHSVHHEYATPFGLTSEYAHPAEILFLGFATIVGPALTGPHLITLWLWMMLRVIETVEAHCGYHFPWSPSNFLPLYGGSLILMWESFAYSADFHDYHHRLLYTKSGNYSSTFVYMDWIFGTDKGYRKLKALKET

SEQ ID NO: 131045 - DNA, 876 bp, Arabidopsis thaliana
  CDS (1)..(876)
atgatcccttatccaaccgtagaagatgcgtccgtggcgttaggacgaaaccttacttggttcgagacggtttggttcgattactcagccaccaaatccaatttccatgtatattgccacaccattctggttctcttccttgtcttttcactagctccttttcctcttgtgattgtcgaatggaccggttggttcgatcagtttaagattcagaagaaggttaagtattcgttgtctgatatgttccaatgttataaagaagtcatgaagttgttccttctcgtcgtcggcacattgcaaatcgtttcttatccttccatccagatggttgggattcgaagtggtttgccattaccatcgttaatggagatagtagcacaattagtggtttacttcttgatagaagattacactaactactggatccatagatggatgcattgcaaatggggttacgagaagattcatcgaatccatcatgagtacacatcacctatcggatacgcatcgccgtatgcgcattgggccgagattttgattcttgggattccgacgtttcttggaccggcaattgctcctggccatataatgacgttttggttatggatatctttacgacaattcgaggcgattgagacccacagcggatatgattttccatggagtgtgacaaaattaattccattttacggtggacctgagtatcatgactaccatcactacgttggaggacaaagccagagcaactttgcttcggttttcacttactgcgattacatttatggaactgataaaggctatcgaatccataagaagcttcttcatcatcagattaaagaggaagctgaagagaagagagtaaggaaacacgattag

SEQ ID NO: 131046 - protein, 291 aa, Arabidopsis thaliana
MIPYPTVEDASVALGRNLTWFETVWFDYSATKSNFHVYCHTILVLFLVFSLAPFPLVIVEWTGWFDQFKIQKKVKYSLSDMFQCYKEVMKLFLLVVGTLQIVSYPSIQMVGIRSGLPLPSLMEIVAQLVVYFLIEDYTNYWIHRWMHCKWGYEKIHRIHHEYTSPIGYASPYAHWAEILILGIPTFLGPAIAPGHIMTFWLWISLRQFEAIETHSGYDFPWSVTKLIPFYGGPEYHDYHHYVGGQSQSNFASVFTYCDYIYGTDKGYRIHKKLLHHQIKEEAEEKRVRKHD

SEQ ID NO: 131047 - DNA, 900 bp, Arabidopsis thaliana
  CDS (1)..(900)
atgatcccatacgcaacaatcgaagaagcgtcgatcgcattatctcgaaacctcacatggctagagactctctggttcgattactccgccaccaaatccgattactacctctactgccacaacattctcttcctcttcctcatcttctctctcgttcctctccctctcgttttcatcgaatcatctcaatccacctcagatttgttcaatcgctacaaaatccaaccaaaagtgaaaaactcattctcatcgatgttcaaatgttacaaagacgtcatgaagatgttcatcctcgtcgttggtccattacaactcgtttcttatccttcgattcagatgattgagatacgaagtggattaccattaccatcatgtatggagattgtagcacagttagtggtttacttcttggtagaggattatactaattactgggttcatagattctttcattgtaaatggggttatgagaagtttcatcatattcatcatgagtatacagctcctattggttatgctgctccttatgctcattgggctgaggttttgcttcttggcattcccacgtttcttggacctgctattgctcctggtcatatgattaccttttggttgtggattgctttacgacagattgaggctatcgaaactcatagcggatatgatttcccatggtctctgacaaagtacattccattttatggtggagctgagtatcatgattaccatcactacgttggaggacaaagccagagtaactttgcttcagtttttacttactgcgattacatctatggaactgataaaggttaccgattccagaagaagcttcttcagcagatgaaggagaagtccaagaagagcaacaagctggttaatggaggagagaaattcgattag

SEQ ID NO: 131048 - protein, 299 aa, Arabidopsis thaliana
MIPYATIEEASIALSRNLTWLETLWFDYSATKSDYYLYCHNILFLFLIFSLVPLPLVFIESSQSTSDLFNRYKIQPKVKNSFSSMFKCYKDVMKMFILVVGPLQLVSYPSIQMIEIRSGLPLPSCMEIVAQLVVYFLVEDYTNYWVHRFFHCKWGYEKFHHIHHEYTAPIGYAAPYAHWAEVLLLGIPTFLGPAIAPGHMITFWLWIALRQIEAIETHSGYDFPWSLTKYIPFYGGAEYHDYHHYVGGQSQSNFASVFTYCDYIYGTDKGYRFQKKLLQQMKEKSKKSNKLVNGGEKFD

SEQ ID NO: 131049 - DNA, 1221 bp, Drosophila melanogaster
  CDS (1)..(1221)
atgtcaaatccggtgcacggaaaaccgccaaatagcatgggcctctcatccggctcattatccgcatcctcgcccatttcggtgtcccagcaagcgggaagctctgggaacagttcctcatcatcatcatcctcctcctcctattcgttgggcggtggaatcgtcaaggacaaggcgggtctgccgccggtctacctcaacctgaatgataatgccaaggaacagacaccattgcctggttcaccgctgcaaaactgggatgacgcccgcaccgccgacgtttggctgtcctcgctgcacagcgtcatcttcatcatcacctgcgccctggccgccttcattctgttccgcaacgtgctcacctggcatctgcagagcttttggggagcctccggtgatttctggcagtcgcagtgggacaaattcatcgactcgttcggcgacgagcccatggttctttgggtcttcggtaccaccatattcacgatgctcgtctactggaccgtgggcacactgtacaccttcatggacctgaccaatcggcccgcctgtctgcgcaagtacaagatccagccgggcaccaatgagcccgtggaggttcgtcgtctgctaaaggtgatctggtgcgtggtctgcaaccagatattcgtgggcataccattggcctatgccagctatcgactaatggagatccgtggactgagcgacattcgtgacctgcccacattccactgggtctgctttgagctgaccgtgtgcatcctgatggaggagctgggattctactattcgcaccgtctgctgcaccacaagcacatctacaagtacatccataagcagcatcatgagtggacggcccccatctcggtgacggccatctattgccatcccattgagcacatctttagcaacctgttgccgcccttcctgggcgtctttctcatgggcagccatgtggccaccgcgtggctgtggttcgccctggccatcctttcaacactcaacgcccactccggctatcatctgccgttctttcccagtcccgaggcgcatgattttcaccatttaaaattcaacaactgtttcggcgtgctgggcgtcttggatcgcctccatggcaccgattcccttttccgggccaccaagtcgtatgcgcgacacatcatgatgctgagcttcaagccgccgcgcgatgcattccccgatccgacgatgaagtaa

SEQ ID NO: 131050 - protein, 406 aa, Drosophila melanogaster
MSNPVHGKPPNSMGLSSGSLSASSPISVSQQAGSSGNSSSSSSSSSSYSLGGGIVKDKAGLPPVYLNLNDNAKEQTPLPGSPLQNWDDARTADVWLSSLHSVIFIITCALAAFILFRNVLTWHLQSFWGASGDFWQSQWDKFIDSFGDEPMVLWVFGTTIFTMLVYWTVGTLYTFMDLTNRPACLRKYKIQPGTNEPVEVRRLLKVIWCVVCNQIFVGIPLAYASYRLMEIRGLSDIRDLPTFHWVCFELTVCILMEELGFYYSHRLLHHKHIYKYIHKQHHEWTAPISVTAIYCHPIEHIFSNLLPPFLGVFLMGSHVATAWLWFALAILSTLNAHSGYHLPFFPSPEAHDFHHLKFNNCFGVLGVLDRLHGTDSLFRATKSYARHIMMLSFKPPRDAFPDPTMK

SEQ ID NO: 131051 - DNA, 783 bp, Arabidopsis thaliana
  CDS (1)..(783)
atggattctctcgttgaatccggttggaagtaccttgttacgcatttcagtgactttcaactggcgtgtattgggagttttatacttcatgaaagcgtgtttttcttgtctggactcccttacattttcctagaaaggactggttttctgagcaactacaaaattcagaccaaaagtaatactcctgaagcccagggaaaatgcattgctcgactattactttaccattgctgcgtaaacttgcccctcatgatggcgtcgtatcctgtattcagattcatgggcatggaaagcagttttcctctgccgtcctggaaagtggtgtctgcccagatcttattctacttcatcattgaggattttgtattctattggggtcacaggatcttgcatactaaatggctctacaagaacgtgcacagtgtgcatcatgagtacgcgacaccgtttggtttgacatcagaatatgctcatcccgctgaaattctgttccttggttttgctaccattgttggtccggctctcaccgggcctcacctgatcaccctttggttatggatgatgctcagagttattgagacagttgaggcacattgtggttatcatttcccatggagcccctcgaattttcttcctctatacggcggtgctgacttccatgactaccatcatcgattactctacacaaagtctggcaactactcatcaacgtttgtttacatggactggatctttggcaccgataaaggttacagaaaacttaaggccctaaaagaaacctga

SEQ ID NO: 131052 - protein, 260 aa, Arabidopsis thaliana
MDSLVESGWKYLVTHFSDFQLACIGSFILHESVFFLSGLPYIFLERTGFLSNYKIQTKSNTPEAQGKCIARLLLYHCCVNLPLMMASYPVFRFMGMESSFPLPSWKVVSAQILFYFIIEDFVFYWGHRILHTKWLYKNVHSVHHEYATPFGLTSEYAHPAEILFLGFATIVGPALTGPHLITLWLWMMLRVIETVEAHCGYHFPWSPSNFLPLYGGADFHDYHHRLLYTKSGNYSSTFVYMDWIFGTDKGYRKLKALKET

SEQ ID NO: 131053 - DNA, 762 bp, Arabidopsis thaliana
  CDS (1)..(762)
atgatgcagtaccttgttacgcatttcagtgactttcaactggcgtgtattgggagttttatacttcatgaaagcgtgtttttcttgtctggactcccttacattttcctagaaaggactggttttctgagcaactacaaaattcagaccaaaagtaatactcctgaagcccagggaaaatgcattgctcgactattactttaccattgctgcgtaaacttgcccctcatgatggcgtcgtatcctgtattcagattcatgggcatggaaagcagttttcctctgccgtcctggaaagtggtgtctgcccagatcttattctacttcatcattgaggattttgtattctattggggtcacaggatcttgcatactaaatggctctacaagaacgtgcacagtgtgcatcatgagtacgcgacaccgtttggtttgacatcagaatatgctcatcccgctgaaattctgttccttggttttgctaccattgttggtccggctctcaccgggcctcacctgatcaccctttggttatggatgatgctcagagttattgagacagttgaggcacattgtggttatcatttcccatggagcccctcgaattttcttcctctatacggcggtgctgacttccatgactaccatcatcgattactctacacaaagtctggcaactactcatcaacgtttgtttacatggactggatctttggcaccgataaaggttacagaaaacttaaggccctaaaagaaacctga

SEQ ID NO: 131054 - protein, 253 aa, Arabidopsis thaliana
MMQYLVTHFSDFQLACIGSFILHESVFFLSGLPYIFLERTGFLSNYKIQTKSNTPEAQGKCIARLLLYHCCVNLPLMMASYPVFRFMGMESSFPLPSWKVVSAQILFYFIIEDFVFYWGHRILHTKWLYKNVHSVHHEYATPFGLTSEYAHPAEILFLGFATIVGPALTGPHLITLWLWMMLRVIETVEAHCGYHFPWSPSNFLPLYGGADFHDYHHRLLYTKSGNYSSTFVYMDWIFGTDKGYRKLKALKET

SEQ ID NO: 131055 - DNA, 687 bp, Arabidopsis thaliana
  CDS (1)..(687)
atgcttctcttaccctttatggtcaacacatacttttcttttgtccctatgcagacaaaaaataacacacctgcagcccaaggaaaatgtattactcgcctgttgctttatcatttctccgtaaacttgcccctgatgttggcctcctaccctgtcttccgagccatgggaatgcgaagcagttttcctctgccgtcctggaaagaagtgtctgcccagatattattctactttatcattgaggattttgtcttctattggggtcatcggatcttgcattcaaaatggctgtacaagaacgtgcatagtgtgcatcatgaatatgccacaccatttggtttgacatcagaatatgctcaccccgctgagattctatttctgggttttgctaccatagtcggtccagctcttactggccctcacctaattactctctggttatggatggtgttgagagtgctggagacagttgaggcacattgtggttatcatttcccatggagcctctcaaattttcttcctctgtatggaggtgctgacttccatgactaccatcaccgactgctatacacaaagtccggaaactactcttcaacttttgtgtatatggactggatctttggtactgacaaggggtacagaagactgaagacccttaaagaaaacggtgacatgaaacaaacgtga

SEQ ID NO: 131056 - protein, 228 aa, Arabidopsis thaliana
MLLLPFMVNTYFSFVPMQTKNNTPAAQGKCITRLLLYHFSVNLPLMLASYPVFRAMGMRSSFPLPSWKEVSAQILFYFIIEDFVFYWGHRILHSKWLYKNVHSVHHEYATPFGLTSEYAHPAEILFLGFATIVGPALTGPHLITLWLWMVLRVLETVEAHCGYHFPWSLSNFLPLYGGADFHDYHHRLLYTKSGNYSSTFVYMDWIFGTDKGYRRLKTLKENGDMKQT

SEQ ID NO: 131057 - DNA, 852 bp, Strongylocentrotus purpuratus
  CDS (1)..(852)
atggcggacatactgagcgctgatcctttcgtggagaatcatacaagtgtttctattgatggaggattcgagcatgcatggaggtacatgacagacaactacacaagattccagatcgcagcttacggatccgcactccttcattgtgtatcgtacattttgatttcttctccatcgatcctgttccgatacattcctttcatggatcgcttcaagattcaacaaaagccactgtcaggagctaatgagatgaaatgtatccgtcttcttctggtgaatcagttcataatccatgtccccttctaccttggagcgtattactactgtgaaatcatcaatcttccgttcagctacgagactatgtcatcatggtacattactcttgccaagtgttttgcttgtctagttgtcgaggatacatggcattatttcagccaccgtctacttcaccataagagcatctacaaatacgtccacaaagtacatcacacttggcaggctccccacggaatggtagccgagtgtgttcatcctgtagaaacaatcctccttggtgtgggcaacatgtggggcgtcctcatctttggaaatcatttcatcctcctgtgggcctggatgtttgtacgtctcctagaagtgattgacgtccactctggatacaacgtcccgcttaaccccctgcatctattcccattctatggaggtgctaagttccacgactttcatcacatgaacttaaaaggaaactacgcccctacgtttacgtggtgggataagatttttggtactgatattcagtataatgaatactataagatgaagagggaggaggaccttaagaagcaaaagtga

SEQ ID NO: 131058 - protein, 283 aa, Strongylocentrotus purpuratus
MADILSADPFVENHTSVSIDGGFEHAWRYMTDNYTRFQIAAYGSALLHCVSYILISSPSILFRYIPFMDRFKIQQKPLSGANEMKCIRLLLVNQFIIHVPFYLGAYYYCEIINLPFSYETMSSWYITLAKCFACLVVEDTWHYFSHRLLHHKSIYKYVHKVHHTWQAPHGMVAECVHPVETILLGVGNMWGVLIFGNHFILLWAWMFVRLLEVIDVHSGYNVPLNPLHLFPFYGGAKFHDFHHMNLKGNYAPTFTWWDKIFGTDIQYNEYYKMKREEDLKKQK

SEQ ID NO: 131059 - DNA, 873 bp, Strongylocentrotus purpuratus
  CDS (1)..(873)
atggcttcggtaaagcaagatctgtctttcgtctggaataattatagccgtatacccatggacatggcgggtcttgatggcagtcgttcggcccttcagcctatctgggacgggcttcgtagcttttttggtgacgaggtgctctgctcccctgctttccccgtcgggatggccatcgggtactacttctttctctgcatgatctacatgttcctagacgtgtatggcgttaaacactgggcatggcttcgtaagtacaagctccaccaggacatccatatgacacaaccacagctctacaacaccatggttttgactatgtggaaccacgccctgtacatcgtaccagctggggtcctccaatacatgtacgggccacctttccccctcaacgatgatgccccgctgctgatgcagttcctctgggaccagtcgatctgtctcttcatctttgacctcagctatggtatcctccactactggttccatactaacagatgggcttaccgggccattcactccgtccatcaccagtaccactcccccttctgctgggttacccagtatctccacccaatcgagcttatcttcgtcggcgccacgactgccatcatccccaagatccttcaagtccacaccctcagttacttcggcttccaaatgttcaatatctggatcagcgttgaggcccattgcggctacgagttccccttctcgctctccctcgttatccctttcgacattgtcgccggacctcgtaagcacgacctccaccacatgaaaccgatgtcgaactatatgccgcatctgacgtggctcgacaagttgatgggatgggagttcaatggatacgacacaaagaagaagaagtag

SEQ ID NO: 131060 - protein, 290 aa, Strongylocentrotus purpuratus
MASVKQDLSFVWNNYSRIPMDMAGLDGSRSALQPIWDGLRSFFGDEVLCSPAFPVGMAIGYYFFLCMIYMFLDVYGVKHWAWLRKYKLHQDIHMTQPQLYNTMVLTMWNHALYIVPAGVLQYMYGPPFPLNDDAPLLMQFLWDQSICLFIFDLSYGILHYWFHTNRWAYRAIHSVHHQYHSPFCWVTQYLHPIELIFVGATTAIIPKILQVHTLSYFGFQMFNIWISVEAHCGYEFPFSLSLVIPFDIVAGPRKHDLHHMKPMSNYMPHLTWLDKLMGWEFNGYDTKKKK

SEQ ID NO: 131061 - DNA, 996 bp, Nasonia vitripennis
  CDS (1)..(996)
atgggcgagagcaagcagaaaacctcgtccaagctgttgtcgagtctgaggatcgtcttcttcgttatcggcacgatagtcatcggcttcgcggccttctgcaactcgctcacctggcacctgcagaagttctggggagcctcgggcgacttctggcaggcccagtgggagaagatcgtctacaggctgggggatgatcccgcgacctactgggtgcaaggctcgatggccctgaccttcctggtctactggctcttcggcggcatctacaccttcatggacctgactaaccgaccagcggcgctgcgccgctacaagacccagccgggcacgaacgagcccgtctccaagcgcgccctggccttcgtcatcggtcaggtcctcttcaaccagatcgccgtcggcctacccctggcccagttcgcctacaagctcatgcagtggcgaggcttcccgccgctccaccagctgccaaccttccactgcttcctcgccgagatagccttccacatcctctgcgaggagatcggcttctactactcgcaccggctgctgcaccagaagagcctctataagcggatacacaagcagcaccaccagtggacggctccggtagccgtgaccgcgatctactgtcatcccctcgagcacatcggctcgaacctgctgccgccgttcctcggcgtcttcctcctcggctcgcacgtcgccaccgcctggctctggttctccctggccatactctcgacgctcaacgcgcactccggctatcacatgcccttcttcccgtcgcccgaggcccacgactttcatcatctcaagtttaatcaatgctacggggtgctgggtgttctggaccgcttccacggcaccgacacgcagttccgcaactccagggcgtacgagcgtcacataatgcttttgagcctgaaaccagctcgcgaagctttccccgacgagaagaaagaggaaagggcgattccgcggtccaaataa

SEQ ID NO: 131062 - protein, 331 aa, Nasonia vitripennis
MGESKQKTSSKLLSSLRIVFFVIGTIVIGFAAFCNSLTWHLQKFWGASGDFWQAQWEKIVYRLGDDPATYWVQGSMALTFLVYWLFGGIYTFMDLTNRPAALRRYKTQPGTNEPVSKRALAFVIGQVLFNQIAVGLPLAQFAYKLMQWRGFPPLHQLPTFHCFLAEIAFHILCEEIGFYYSHRLLHQKSLYKRIHKQHHQWTAPVAVTAIYCHPLEHIGSNLLPPFLGVFLLGSHVATAWLWFSLAILSTLNAHSGYHMPFFPSPEAHDFHHLKFNQCYGVLGVLDRFHGTDTQFRNSRAYERHIMLLSLKPAREAFPDEKKEERAIPRSK

SEQ ID NO: 131063 - DNA, 903 bp, Magnaporthe grisea 70-15
  CDS (1)..(903)
atggccaacgtcaccggggtggcttctgccaccgatatgccgatacaggctgtctttgccgaagtcagccagcactttcagcagctcacaatgatggagcggctatgggctacttggtacacctggatgcaaaatgatgtcttggccacggggcttttgacatttatcatccacgaagtagtgtatttcgggaggtctattccatggatcatcatggacagcatgccgatcttccagaaatacaaaatccagcagaccaaagtcccaaccatcaaggagcagcttcactgcgcggggctggtcctcctgagccacttcaccgtcgagctgcccgagatctgggtgttccaccccgtggccatctactgcggcatggcgtttgacgtgcccttccctccggcctggaagattgcgctgcacatcgccgtcttcttcgtgctcgaggacgcgtggcactactggacgcaccggctgatgcactacccgccgctgtaccgatcgatccacaagctgcaccacacgtacacggcgccctttgggctgacggccgagtacgcatccccgatcgaggtgctggtgctggggctgggcaccgcggggacgccgctgctgtgggtgtacctgacgggcgacctgcacctcttcacgatgcaggcgtggatcgtgctgaggctgctgcaggcggtggatgcgcacagcggctacgagttcccctggagcctgcaccacatcctgccgttctgggccggcgcgcagcaccacgacatccaccacgagcagtttgtcggcaactacgcctcgtcgtttaggtggtgggattactttatggacaccgaggccggcgctgaggccaacgccaagcggagggagaggaagatggcggcgctgaagaagacgctgtga

SEQ ID NO: 131064 - protein, 300 aa, Magnaporthe grisea 70-15
MANVTGVASATDMPIQAVFAEVSQHFQQLTMMERLWATWYTWMQNDVLATGLLTFIIHEVVYFGRSIPWIIMDSMPIFQKYKIQQTKVPTIKEQLHCAGLVLLSHFTVELPEIWVFHPVAIYCGMAFDVPFPPAWKIALHIAVFFVLEDAWHYWTHRLMHYPPLYRSIHKLHHTYTAPFGLTAEYASPIEVLVLGLGTAGTPLLWVYLTGDLHLFTMQAWIVLRLLQAVDAHSGYEFPWSLHHILPFWAGAQHHDIHHEQFVGNYASSFRWWDYFMDTEAGAEANAKRRERKMAALKKTL

SEQ ID NO: 131065 - DNA, 930 bp, Magnaporthe grisea 70-15
  CDS (1)..(930)
atggaagctttcaaaaacgccaccatcgcggcgggggctaccgccctgaacagtagccacggctatttcgatgttttcgaagaggtctcaaagtaccatgttcaactcagcgtcttggagcgcctttgggctgcgtggtatttgtggtggcagaatgatactcttgccacaggcataatgagcttcgccatgcacgagattgtttacttcggccggtccctcccctggattatcatcgacgccataccatacttcaggcaatggaagattcaaaaccaaaagatcccgacggccaaggaacaatgggactgcacgatgctcgtcctgctcggccactttaccgtcgaactgccccagatttgggtcttccaccccctggctacatactttggtctcgaccacggcgtccccttccctccggcttggaagatcgccatgcagattgccattttctttgttattgaagacctgtggcactaccttttccaccgcgcgctccattacggtcctctatacaagaacatccacaagttacaccacacctattcagcaccctttggtctcgccgccgaatacgcctctccaattgaagtaatgcttctggggtttggtgttgtcggaactccaatagtgtggacatccatcacgggtgacctgcaccttttcaccatgtatctgtggattgttctccgtctcttccaagccattgacgctcacagtggttacgatttcccttggagcttgcgcaagttcttgcccttctggggaggtgccgatttccatgatttgcaccacgagcgcttcatcggcaactacgcatccagcttcaggtggtgggactgggttttcgacactgaggctggcgatgagcccgcaaggaagaggagagagaaaaagcttgcggccctcaaggctaagaaggcccagtaa

SEQ ID NO: 131066 - protein, 309 aa, Magnaporthe grisea 70-15
MEAFKNATIAAGATALNSSHGYFDVFEEVSKYHVQLSVLERLWAAWYLWWQNDTLATGIMSFAMHEIVYFGRSLPWIIIDAIPYFRQWKIQNQKIPTAKEQWDCTMLVLLGHFTVELPQIWVFHPLATYFGLDHGVPFPPAWKIAMQIAIFFVIEDLWHYLFHRALHYGPLYKNIHKLHHTYSAPFGLAAEYASPIEVMLLGFGVVGTPIVWTSITGDLHLFTMYLWIVLRLFQAIDAHSGYDFPWSLRKFLPFWGGADFHDLHHERFIGNYASSFRWWDWVFDTEAGDEPARKRREKKLAALKAKKAQ

SEQ ID NO: 131067 - DNA, 918 bp, Gibberella zeae PH-1
  CDS (1)..(918)
atggatgcgctaaacgcgacctctttcgcgtccttcaaccaaaccaaggactactttgtcgtcctcgaggaggtttctaagtacaatgtccagctcaacatggtcgagaaactttgggccgcttggtacctttggatgcagaacgacaccctcgcgaccggtatcatgagttttgttctccacgaacttgtctacttcggccgctgcattcccttcatgctgatggatttcatcccctacttccagcaattccgaatccagaagcaaaagattcccaccattaaggagcaatgggactgtgccgccattgttctcatcagccacttcaccgccgaactccctcagatctggttcttccaccccatcgctacctacttcggcatggactacggcgtgcctttccctcctgtgtggaagatggctctccaaatcgctatttgcttcgtgatggaggatgcttggcactactggttccaccgtgctctgcactacggtcccctctacaaggccatccacaagatgcaccacacctactccgctcctttcggtctcgccgctgagtatgcttcacccatcgaaactgctctcctcggaattggtgtcgttggatgcccaattgtcctccttgctgttactggcgagctccacctcttcaccatgtacacctggatcgttctccgtcttttccaggccatcgactctcacagcggctatgactttccctggagtctgcgccacatcctccccgtctgggctggcgctcatcaccacgatcttcaccacgagaagttcatcggcaactacgcctccagcttcacctggtgggactactgcctggacaccgaggccggtgccgacgctcacaagcgccgccgcgagaagaagctcgctgccatcaaggcccagaagcagcaatag

SEQ ID NO: 131068 - protein, 305 aa, Gibberella zeae PH-1
MDALNATSFASFNQTKDYFVVLEEVSKYNVQLNMVEKLWAAWYLWMQNDTLATGIMSFVLHELVYFGRCIPFMLMDFIPYFQQFRIQKQKIPTIKEQWDCAAIVLISHFTAELPQIWFFHPIATYFGMDYGVPFPPVWKMALQIAICFVMEDAWHYWFHRALHYGPLYKAIHKMHHTYSAPFGLAAEYASPIETALLGIGVVGCPIVLLAVTGELHLFTMYTWIVLRLFQAIDSHSGYDFPWSLRHILPVWAGAHHHDLHHEKFIGNYASSFTWWDYCLDTEAGADAHKRRREKKLAAIKAQKQQ

SEQ ID NO: 131069 - DNA, 741 bp, Gibberella zeae PH-1
  CDS (1)..(741)
atgtccggactttgggctcaagtagtaactcaatacggcaccttcaaggttgaaatcattggatctctcgctatccaggtcctcttctggtgggttccttctgccggctttgttttgcttgatcgactcgcgccttcgtttgctgcaaaacacaagattcagcctgcaccgaagcagccgacatcatctgaaatctttgatgcggtccttatttccttcagaaatcaactgattataaccggactacaagttaccccggctattctctcaaccagatcctccgcctttcagatcacaccatcgttaccatctacaaaggattttattcttcatttcttaatctgtctgattgcacgagagattttattctattacgctcatcgacttctccatttaccttacctatatcgccgcatccacaagattcatcacaagttcactgcgccagtgtcattcgcatcacagtatgctcaccctgttgagcacattgtagcaaacacgattcccattgtccttccacctgtactattgcagactcatatcctgacaatgtgggcgtttgtttcctggcagctcatcgagacggcgaccgtccatagtggctatgatttcttcggaggtgcggcatatcgtcatgatcgacatcatgagaggttcaatgttcattttggaggcatgccgtggttggaccggttgcacggtactgatgaaattgaagggttggtgaagaaacataattga

SEQ ID NO: 131070 - protein, 246 aa, Gibberella zeae PH-1
MSGLWAQVVTQYGTFKVEIIGSLAIQVLFWWVPSAGFVLLDRLAPSFAAKHKIQPAPKQPTSSEIFDAVLISFRNQLIITGLQVTPAILSTRSSAFQITPSLPSTKDFILHFLICLIAREILFYYAHRLLHLPYLYRRIHKIHHKFTAPVSFASQYAHPVEHIVANTIPIVLPPVLLQTHILTMWAFVSWQLIETATVHSGYDFFGGAAYRHDRHHERFNVHFGGMPWLDRLHGTDEIEGLVKKHN

SEQ ID NO: 131071 - DNA, 1038 bp, Apis mellifera
  CDS (1)..(1038)
atgctctgtgatatgttaatcaaacatgtgttatacgaacttacattgacgcctaggagcagtgaagataagaatcaaacgccaccgactttgctttcaagtttaagaagcgttttattcgtaattggaactgtagtaatcggatttgctgcattctgcaattcgctaacatggcacttacaaagattttggggagcctcaggtgatttttggcaagcacaatgggataaaatcttagataaattaggagatgatcccggcacgctttgggtttatggctcgataggactgacatttttcgtgtactggttctttggcgggatttacatgattctagatataactaatcggccagcagttttacgaagatacaaaatacaaccgggtacgaacgaaccggtcgacacgagagaattgttcaaagtaatcgctcaagtactattcaatcaaaccattgttggacttcctctagcgtatattagttatcaccttatggaatggcgcggttatccccctgtacgcgaattgccgaccttccactgggtacttgttgaaattgcttttcacatattgtgcgaggaaattggattttattactcgcacagatttctgcatagccgctatctatataaatatatacataaacaacaccacgaatggacggctcctatagctataacatcattgtattgtcatcctttagaacatattggttctaatttattaccaccgtttttgggagtatatatcataggttctcatgtggctactgcttggctttggttttcgcttgctattctttctacattaaatgcgcattctggttaccatctaccattttttccatctccagaagctcatgattttcatcatttaaagtttaatcaatgttttggagttttgggagtattagaccgaattcatggaacagacacacattttcgaaattctagagcttaccaacgtcatgtaatgatgcttagctttactccaccaagagaagcttttccagatgaagtaaaatataaatctaaataa

SEQ ID NO: 131072 - protein, 345 aa, Apis mellifera
MLCDMLIKHVLYELTLTPRSSEDKNQTPPTLLSSLRSVLFVIGTVVIGFAAFCNSLTWHLQRFWGASGDFWQAQWDKILDKLGDDPGTLWVYGSIGLTFFVYWFFGGIYMILDITNRPAVLRRYKIQPGTNEPVDTRELFKVIAQVLFNQTIVGLPLAYISYHLMEWRGYPPVRELPTFHWVLVEIAFHILCEEIGFYYSHRFLHSRYLYKYIHKQHHEWTAPIAITSLYCHPLEHIGSNLLPPFLGVYIIGSHVATAWLWFSLAILSTLNAHSGYHLPFFPSPEAHDFHHLKFNQCFGVLGVLDRIHGTDTHFRNSRAYQRHVMMLSFTPPREAFPDEVKYKSK

SEQ ID NO: 131073 - DNA, 927 bp, Candida glabrata CBS 138
  CDS (1)..(927)
atgtctgccgttttcaacaacgctacattgacggacttggtccgcgaagacacttacttcaagaccttggccaacatcggtaagtttcaaccacagttgaactttatggagcaatactgggctgcttggtacacttacatgaacaacgatgttctagccaccggtctaatgttcttcctattgcacgagttcatgtacttcttcagatgtctgccatggttcatcattgaccaaatcccatacttcagaaagtggaagttgcaaccaaccaagattccttccaccaaggaacaactatactgtttgaaggccgtcctgctgtcccacttcttggtcgaggccatcccaatctggactttccacccaatgtgtgaaaaactaggtatcaccgtcgaagtcccattcccttcaatcaagaaaatgtccctagagatcgctctgttcttcgttttggaagacatgtggcactactgggcccacaggctattccactacggtgtcttctacaagtacatccacaagcaacaccaccgttacgctgccccattcggtctatccgctgagtacgctcacccattggaaactatgtctctaggtttcggtaccgtcggtatgccaatcctatacgtcatgtacactggtaacttgcatttgttcaccttatgtgtatggattaccttgagactgttccaagccgtcgactctcactccggttacgacttcccatggtccttgaacaagttcttgcctttctgggccggtgccgaacaccacgacttgcaccaccactacttcatcggtaactacgcttcttctttcagatggtgggattactgtctggacaccgaatctggtccagaagctaaggtcgccagagaagaaagaatgaagtccaaggctgaacaaaaggctaagaagaccaattga

SEQ ID NO: 131074 - protein, 308 aa, Candida glabrata CBS 138
MSAVFNNATLTDLVREDTYFKTLANIGKFQPQLNFMEQYWAAWYTYMNNDVLATGLMFFLLHEFMYFFRCLPWFIIDQIPYFRKWKLQPTKIPSTKEQLYCLKAVLLSHFLVEAIPIWTFHPMCEKLGITVEVPFPSIKKMSLEIALFFVLEDMWHYWAHRLFHYGVFYKYIHKQHHRYAAPFGLSAEYAHPLETMSLGFGTVGMPILYVMYTGNLHLFTLCVWITLRLFQAVDSHSGYDFPWSLNKFLPFWAGAEHHDLHHHYFIGNYASSFRWWDYCLDTESGPEAKVAREERMKSKAEQKAKKTN

SEQ ID NO: 131075 - DNA, 951 bp, Kluyveromyces lactis NRRL Y-1140
  CDS (1)..(951)
atgtcttctgctgtcatgtcttcagtgttcagcaatggtacaattgctgaacttgttggtcaaggtcaaggtttgagttatggccaggtgctctctaacataaaagttgttcaaccacaattaaacttcatggaacaatattgggctgcttggtactgttatatgaataacgatatcttggctaccggtttgatgtttttcttgttacatgaattcatgtactttttcagatgtctcccttgggctatcatcgatcaaataccatatttcagaagatggaagattcaaccaacaaagattccttctgcgaaggaacaacttttctgtctgaaatctgttcttctatcacatttcctagtggaagctattccaatttggactttccatccaatgtgtcaaaaattaggtatctctgtcgcggtacccttcccatctttgactactatggctaaacaaatttctttgttcttcttcctagaagatgcttggcattattggttccatcgtttgttccattacggtgtcttctacaagtatattcacaagcaacatcatcgttacgcggctcctttcggtctagctgctgagtacgctcaccctgtcgaaactttgtccttgggtttcggtaccgttggtatgccaatcttctacgtcatgtacaccggtaacttgcatctattcactttgtgtctatggattaccatgagattattccaagccgtcgattctcactctggttacgatttcccatggtctttaaacaaattcttgccattctggtctggtgctgaacatcacgatctacatcaccattacttcatcgggaactacgcttcctctttcagatggtgggattatgtattggacactgaagctggcccggaagctaaagctgaaagagaagaaagaatgaagctaaaggctgaaaagaaggcaaagaaagctaattaa

SEQ ID NO: 131076 - protein, 316 aa, Kluyveromyces lactis NRRL Y-1140
MSSAVMSSVFSNGTIAELVGQGQGLSYGQVLSNIKVVQPQLNFMEQYWAAWYCYMNNDILATGLMFFLLHEFMYFFRCLPWAIIDQIPYFRRWKIQPTKIPSAKEQLFCLKSVLLSHFLVEAIPIWTFHPMCQKLGISVAVPFPSLTTMAKQISLFFFLEDAWHYWFHRLFHYGVFYKYIHKQHHRYAAPFGLAAEYAHPVETLSLGFGTVGMPIFYVMYTGNLHLFTLCLWITMRLFQAVDSHSGYDFPWSLNKFLPFWSGAEHHDLHHHYFIGNYASSFRWWDYVLDTEAGPEAKAEREERMKLKAEKKAKKAN

SEQ ID NO: 131077 - DNA, 915 bp, Debaryomyces hansenii CBS767
  CDS (1)..(915)
atgtcatcaagtgtctttcacgattactctgggttttctaatgccacaacatttggcgaagtttacaataacttcaaccaaattgacctgttgaactggatggaaaaattatgggggtcatattattattacatgggcaatgacttgtttgccaccgggttgttgtttttcacattgcacgaggctatgtatttcggtagatgtatcccatggatgattatcgacagaattccatatttcaacaaatataagattcaggatgctaagattccatcgaacaaggaacagtgggaatgtttgaagtctgtgttaacatcgcactttttagtggaagcttttccaatctggtttttccacccattgtgtcaacaaatcggaattagtttcgagattccattcccagatatatcatctatgttgatccaattggcggtttttttcgtatgtgaggacgcatggcattactggttccatagagccttacaccacggtgtcttctacaagtatatccataagcaacatcacagatacgcggcaccattcggattgactgcagagtatgctcatccaattgaagttatgttattaggatttggtactgttggtattccaattgtgtggtgtttaatcactaagaatttgcatcttttcaccgtttgtatctggatcaccttaagattgttccaagcagttgattcacattccggatacgaattcccatggtcattacatcactttgtaccattctgggctggtgctgatcaccatgatgaacaccaccatttcttcattggaagttacagttcatctttcagatggtgggatttcgttttagataccgaagctggtcctaaaggtaagtcttcaagagagcaaaaaatgaagaccaaagctgaatcaaagaaacaattatag

SEQ ID NO: 131078 - protein, 304 aa, Debaryomyces hansenii CBS767
MSSSVFHDYSGFSNATTFGEVYNNFNQIDLLNWMEKLWGSYYYYMGNDLFATGLLFFTLHEAMYFGRCIPWMIIDRIPYFNKYKIQDAKIPSNKEQWECLKSVLTSHFLVEAFPIWFFHPLCQQIGISFEIPFPDISSMLIQLAVFFVCEDAWHYWFHRALHHGVFYKYIHKQHHRYAAPFGLTAEYAHPIEVMLLGFGTVGIPIVWCLITKNLHLFTVCIWITLRLFQAVDSHSGYEFPWSLHHFVPFWAGADHHDEHHHFFIGSYSSSFRWWDFVLDTEAGPKGKSSREQKMKTKAESKKQL

SEQ ID NO: 131079 - DNA, 996 bp, Debaryomyces hansenii CBS767
  CDS (1)..(996)
atggatttattcaaacggacatcagctttactgcccatattggcaaatagtcacttggcatctaatatctctacagaatcgtataccgatgtatttcatagcttgcaaaatctttcgcaaggggacacatcagtatcccagctcaacatacttgaaaagttgtgggcttcatggtatatttacatgaataatgatatcttggctactggtatattattttttgctacccatgaacttatgtatttcgggcggtgtttaccttggttaataattgatcggattagtttttttaataaatggaagatccaggatgaaaaaataccttctgacaaggagcagtgggaatgctttaagtcggtgttgaaactgcacctactcgtggaagccttaccaatctggttatttcatccattatgtgctactttgaacatctccatcgacgtcccattcccttcctacttagtaatgttcttacaaatctgcttattctttgtttgtgaagacttctggcattattgggctcacagactatttcattatggctggctatacaaatatattcataagcaacatcacagatatgccgcaccatttggcttgactgcagaatatgcgcatccggtagaggtaatgtctcttggatttggaaccgtgggattcccaatcatttatgcctacataaccaaatgcaaaccctcgcttgacctaccttccttgcatttattcactctttcgttctggataaccttgagactattccaagcggtggattcccactccggttacgactttccatggtcactacacaacgtattaccgttctgggcaggtgctgatcaccacgacgaccaccatcattattttattggcaactatgccagctcttttcgttggatcgattatttcatgagcacagaaagtggtgagattgcgaaagctaacagagaaaagcgcatgagaaggagagctgaaattcaagctaagaaatcacaataa

SEQ ID NO: 131080 - protein, 331 aa, Debaryomyces hansenii CBS767
MDLFKRTSALLPILANSHLASNISTESYTDVFHSLQNLSQGDTSVSQLNILEKLWASWYIYMNNDILATGILFFATHELMYFGRCLPWLIIDRISFFNKWKIQDEKIPSDKEQWECFKSVLKLHLLVEALPIWLFHPLCATLNISIDVPFPSYLVMFLQICLFFVCEDFWHYWAHRLFHYGWLYKYIHKQHHRYAAPFGLTAEYAHPVEVMSLGFGTVGFPIIYAYITKCKPSLDLPSLHLFTLSFWITLRLFQAVDSHSGYDFPWSLHNVLPFWAGADHHDDHHHYFIGNYASSFRWIDYFMSTESGEIAKANREKRMRRRAEIQAKKSQ

SEQ ID NO: 131081 - DNA, 930 bp, Yarrowia lipolytica CLIB122
  CDS (1)..(930)
atgtcttcgattctcgagagcatcaactccaccgtcacccccgcggcctcctacatcggcacctacgccaagctgtccgacgcccacgccgacaccctcaacattgtcgagcgggtgtgggcatcatactttgtgtggtggggcaatgatctcattgcttgcggcatcttcattttcctgctgcacgagattctctactttggccggtgcgtgccctggatgatcctcgaccagatcccctactttcacaagtggaagatccagggcgaggccaaggtgccctctgtggccgagcagtgggagtgcatgaagtccgtgctcatctcgcactttatggtcgaggccatccccatctggggcttctaccccgtctgcaagtacgccggaatttccatcgacgtgcccttcccctcctggatgaagatctgtgcccatctcgccctattttttgtgctggaggatacctggcactactggctgcaccgaggccttcactacggtcccttctacaagcacatccacaagcagcaccaccgatacgccgctccctttggtttgactgccgagtacgctcaccccgttgaggtggctttgcttggtgtcggaactgtgggcatccccattgcctgggtcatgctaaccggtgatctccatctcttcaccgtgtctgtgtggatcgccctgcgactcttccaggccatcgacgcccattctggctatgagttccccgtgtctctgcatcacttcttgcccatctgggccggtgccgaccaccacgatgaccaccatcgatacttcaccggcaactacgcctcgtcgttccgatggtgggactttgtgctcgacaccgaggccggtcccgccgccaaggccgagcgacagcagcgacttgccgccaaggctgctaagaaggccaagaagcagcagtaa

SEQ ID NO: 131082 - protein, 309 aa, Yarrowia lipolytica CLIB122
MSSILESINSTVTPAASYIGTYAKLSDAHADTLNIVERVWASYFVWWGNDLIACGIFIFLLHEILYFGRCVPWMILDQIPYFHKWKIQGEAKVPSVAEQWECMKSVLISHFMVEAIPIWGFYPVCKYAGISIDVPFPSWMKICAHLALFFVLEDTWHYWLHRGLHYGPFYKHIHKQHHRYAAPFGLTAEYAHPVEVALLGVGTVGIPIAWVMLTGDLHLFTVSVWIALRLFQAIDAHSGYEFPVSLHHFLPIWAGADHHDDHHRYFTGNYASSFRWWDFVLDTEAGPAAKAERQQRLAAKAAKKAKKQQ

SEQ ID NO: 131083 - DNA, 1017 bp, Apis mellifera
  CDS (1)..(1017)
atggatgtgcagaagcagtataaagtgacgcctaggagcagtgaagataagaatcaaacgccaccgactttgctttcaagtttaagaagcgttttattcgtaattggaactgtagtaatcggatttgctgcattctgcaattcgctaacatggcacttacaaagattttggggagcctcaggtgatttttggcaagcacaatgggataaaatcttagataaattaggagatgatcccggcacgctttgggtttatggctcgataggactgacatttttcgtgtactggttctttggcgggatttacatgattctagatataactaatcggccagcagttttacgaagatacaaaatacaaccgggtacgaacgaaccggtcgacacgagagaattgttcaaagtaatcgctcaagtactattcaatcaaaccattgttggacttcctctagcgtatattagttatcaccttatggaatggcgcggttatccccctgtacgcgaattgccgaccttccactgggtacttgttgaaattgcttttcacatattgtgcgaggaaattggattttattactcgcacagatttctgcatagccgctatctatataaatatatacataaacaacaccacgaatggacggctcctatagctataacatcattgtattgtcatcctttagaacatattggttctaatttattaccaccgtttttgggagtatatatcataggttctcatgtggctactgcttggctttggttttcgcttgctattctttctacattaaatgcgcattctggttaccatctaccattttttccatctccagaagctcatgattttcatcatttaaagtttaatcaatgttttggagttttgggagtattagaccgaattcatggaacagacacacattttcgaaattctagagcttaccaacgtcatgtaatgatgcttagctttactccaccaagagaagcttttccagatgaagtaaaatataaatctaaataa

SEQ ID NO: 131084 - protein, 338 aa, Apis mellifera
MDVQKQYKVTPRSSEDKNQTPPTLLSSLRSVLFVIGTVVIGFAAFCNSLTWHLQRFWGASGDFWQAQWDKILDKLGDDPGTLWVYGSIGLTFFVYWFFGGIYMILDITNRPAVLRRYKIQPGTNEPVDTRELFKVIAQVLFNQTIVGLPLAYISYHLMEWRGYPPVRELPTFHWVLVEIAFHILCEEIGFYYSHRFLHSRYLYKYIHKQHHEWTAPIAITSLYCHPLEHIGSNLLPPFLGVYIIGSHVATAWLWFSLAILSTLNAHSGYHLPFFPSPEAHDFHHLKFNQCFGVLGVLDRIHGTDTHFRNSRAYQRHVMMLSFTPPREAFPDEVKYKSK

SEQ ID NO: 131085 - DNA, 1026 bp, Apis mellifera
  CDS (1)..(1026)
atgttgctactcgaaactttatttcaacgaaaagtgacgcctaggagcagtgaagataagaatcaaacgccaccgactttgctttcaagtttaagaagcgttttattcgtaattggaactgtagtaatcggatttgctgcattctgcaattcgctaacatggcacttacaaagattttggggagcctcaggtgatttttggcaagcacaatgggataaaatcttagataaattaggagatgatcccggcacgctttgggtttatggctcgataggactgacatttttcgtgtactggttctttggcgggatttacatgattctagatataactaatcggccagcagttttacgaagatacaaaatacaaccgggtacgaacgaaccggtcgacacgagagaattgttcaaagtaatcgctcaagtactattcaatcaaaccattgttggacttcctctagcgtatattagttatcaccttatggaatggcgcggttatccccctgtacgcgaattgccgaccttccactgggtacttgttgaaattgcttttcacatattgtgcgaggaaattggattttattactcgcacagatttctgcatagccgctatctatataaatatatacataaacaacaccacgaatggacggctcctatagctataacatcattgtattgtcatcctttagaacatattggttctaatttattaccaccgtttttgggagtatatatcataggttctcatgtggctactgcttggctttggttttcgcttgctattctttctacattaaatgcgcattctggttaccatctaccattttttccatctccagaagctcatgattttcatcatttaaagtttaatcaatgttttggagttttgggagtattagaccgaattcatggaacagacacacattttcgaaattctagagcttaccaacgtcatgtaatgatgcttagctttactccaccaagagaagcttttccagatgaagtaaaatataaatctaaataa

SEQ ID NO: 131086 - protein, 341 aa, Apis mellifera
MLLLETLFQRKVTPRSSEDKNQTPPTLLSSLRSVLFVIGTVVIGFAAFCNSLTWHLQRFWGASGDFWQAQWDKILDKLGDDPGTLWVYGSIGLTFFVYWFFGGIYMILDITNRPAVLRRYKIQPGTNEPVDTRELFKVIAQVLFNQTIVGLPLAYISYHLMEWRGYPPVRELPTFHWVLVEIAFHILCEEIGFYYSHRFLHSRYLYKYIHKQHHEWTAPIAITSLYCHPLEHIGSNLLPPFLGVYIIGSHVATAWLWFSLAILSTLNAHSGYHLPFFPSPEAHDFHHLKFNQCFGVLGVLDRIHGTDTHFRNSRAYQRHVMMLSFTPPREAFPDEVKYKSK

SEQ ID NO: 131087 - DNA, 942 bp, Aspergillus nidulans FGSC A4
  CDS (1)..(942)
atggaacaattgaatgtgggtggtcccctctcgaggtggtggtcccataccacgaccacttactcgcccacaacaatcgagttctttggcagcgctgccgtcctcttcatcgggttctgggtgccgtctcttatattcacctggatggacactctcggcccgaagcacatcccctggcgcaagatccaggccccggctagacagccccagtacgcagccgtgaaaaagggacttgtcaattccctgcaaaatcagctccttacgagtgtgctgcatctggcatacctaggcatgctgcactttttcacttcgggtgcaaagactacgatatacaatgtcgattccgccctcccatcccctacccgcatggcccgggacattgtcatcagcatcgtgctgcaagacataatcttctaccactcccaccgcggcctgcaccaccccaagatttaccggcacatccataagaagcatcatgagtttacaaccccgatcgccttggctgccctctacgcccaccctgtcgagtacttcctctccaatatcctccccgtcgcccttccgcctgcgttgctgggagcgcacgttgtgaccttttggtttatgttaacgtgggctttgttgcttgctattattgcccattgcggatatgagctcccgcctatttatggctggaatatggaggtccatgacatgcatcacgagctatttgtgggcaatttcggtaccattgggttttgcgacgtgctttatgggacgagattgacggattctaaggctacaagggttgcgagagacaggttgaaggaagatacaacggaggacaccatcaccgcaaagaacataagtagcagcgcattcaacccgcttcagagaaacggtcttggattagagcaaggagactggcagggatttttcagccatcacacgaggcatcactga

SEQ ID NO: 131088 - protein, 313 aa, Aspergillus nidulans FGSC A4
MEQLNVGGPLSRWWSHTTTTYSPTTIEFFGSAAVLFIGFWVPSLIFTWMDTLGPKHIPWRKIQAPARQPQYAAVKKGLVNSLQNQLLTSVLHLAYLGMLHFFTSGAKTTIYNVDSALPSPTRMARDIVISIVLQDIIFYHSHRGLHHPKIYRHIHKKHHEFTTPIALAALYAHPVEYFLSNILPVALPPALLGAHVVTFWFMLTWALLLAIIAHCGYELPPIYGWNMEVHDMHHELFVGNFGTIGFCDVLYGTRLTDSKATRVARDRLKEDTTEDTITAKNISSSAFNPLQRNGLGLEQGDWQGFFSHHTRHH

SEQ ID NO: 131089 - DNA, 1602 bp, Aspergillus nidulans FGSC A4
  CDS (1)..(1602)
atggcgaatgtaacactcccttctggctcgatgtcataccctgagctccttcaggttgccaaacaagactccagcctctcgtggccggagcagttgtggtgggcgcactataccttctggaacaacgatgtccttgcgactggggttatgacctttcttgcccacgagctcatctacttcggccgctgcattccctggatcgtcgccgatgctcttcccagtgtctttcgtcgtttcaagatccaagaccacaagaccccgtcattcagcgaccaatggacatgtgttaagtacatcctcgccatccacttcatcgtcgagctaccgttgatcgtcctctttcatccgatgatggaagtctgccacgtccaatatacgctgcccttcccgaaactgtctctcttcgctgcgcaagtcgctctctttttcatcgtcgaagacacataccactactggctgcatcgggccatgcattggggcccgctgtaccgttccatccaccgcattcaccaccaatacgctgcaccgttcgggctgacggctgaatacgccagtccggcagagacattcctgctaggcctgggtacaatttgcccgccccttattcttggatccatcactggcgatgtacatctgataactgtattgggatggatggcgctgcgtcagctgcaggcaattgacgcgcattcaggctatgacttcccctggagcttgcgacgaatcgtcccattttggggcggcgccgattggcacgatgaccatcatcgatacttttggggaaactattccagctctttcacgcattgggacatatatgtagcagtaacaagaacgagaggtaaagaagtccaggtcctcggaacggaagtgtgtgaagtggctgtaccggtacctgatccacgagcaaaactgggtgctaaccaaggtcacattatcgtgggcaatggcgcatcaccgaccggtcggatttacccggcctccgcagcctcttccttcctacgtaaagctgctctgctttgctcgggccctctggtccctttgtttgcttggatgcagcacacaaagcgcctattctctcctcttcacctccctcgtcctactgctatcctccgtttgttctgcgtctgctatccactgtccccaatctgctggcatatcatggcccattcaatgcgggtacttgtctatgctcgcgtttctgatatcccagggaaccctcaagctcgccatatcgcccttggagacctccttactggcaatctcctgggccggaggttctacgccactccccggccgccggtatacgaccacgtccatattccagcggatttcgactctagccagccgcttgagcggtggttcatcttcgacctgaatgttggagaaactctctcgcgtagtgaagtcacgcggttacctcatctggtctatcttgctagccgccagggcgatgaatggatattcattagacgcgatacttccattgagaatgcgaaatccaaagcagcgtcgtttacctggggcggacgttcagagcagaaactcgtttctgaattgcaaaaccagtccggagggcacagcgtcggtccagacacataa

SEQ ID NO: 131090 - protein, 533 aa, Aspergillus nidulans FGSC A4
MANVTLPSGSMSYPELLQVAKQDSSLSWPEQLWWAHYTFWNNDVLATGVMTFLAHELIYFGRCIPWIVADALPSVFRRFKIQDHKTPSFSDQWTCVKYILAIHFIVELPLIVLFHPMMEVCHVQYTLPFPKLSLFAAQVALFFIVEDTYHYWLHRAMHWGPLYRSIHRIHHQYAAPFGLTAEYASPAETFLLGLGTICPPLILGSITGDVHLITVLGWMALRQLQAIDAHSGYDFPWSLRRIVPFWGGADWHDDHHRYFWGNYSSSFTHWDIYVAVTRTRGKEVQVLGTEVCEVAVPVPDPRAKLGANQGHIIVGNGASPTGRIYPASAASSFLRKAALLCSGPLVPLFAWMQHTKRLFSPLHLPRPTAILRLFCVCYPLSPICWHIMAHSMRVLVYARVSDIPGNPQARHIALGDLLTGNLLGRRFYATPRPPVYDHVHIPADFDSSQPLERWFIFDLNVGETLSRSEVTRLPHLVYLASRQGDEWIFIRRDTSIENAKSKAASFTWGGRSEQKLVSELQNQSGGHSVGPDT

SEQ ID NO: 131091 - DNA, 780 bp, Aspergillus nidulans FGSC A4
  CDS (1)..(780)
atggatcttcactccaagctgcaagccgcctggtatcggctcatcaacacatacaggcctggtaccatcgagctgacggggtcgatcgctactcagaccgttggcttcattctcccagcaacgctttacctgctgatcgacactctgtttccggagttctccaagcggcacaagatccagagtgcgggccgacaaccgactcgtccacagatcttgcactgtgtgaaagtgacattgttcaaccatgtgtgggtggtggcaatccacgctatgctggtctactgggctggcctggaccatgccatcatgaacctggatccgatcgtgccgccgtggagagagtttattgtggactttgtctttgcgctcttggcccgagaaatattattttactacatccatcgtacgctgcatcacccgcgaatctatgcctatatccataaaatgcaccacaaatatactacgcccgtggcgttcgcgggggagtatgcccatcctgtcgaacatgtcattgcaaacatcctaccgattacgctaccgttatatctcaaaggcgcccactacctgtccatcatcgcatttgtcagctttgagctctgggaggctgccgctgaccacagcgggtacgactttctgaaactgccgccggccgaactgcacgacttgcaccatgagaaattccgcgtgcattatggtactattggactgatggactggatccatgggacagacgttgtgggctgggacagaccagagacggacaaaagagatgaacaataa

SEQ ID NO: 131092 - protein, 259 aa, Aspergillus nidulans FGSC A4
MDLHSKLQAAWYRLINTYRPGTIELTGSIATQTVGFILPATLYLLIDTLFPEFSKRHKIQSAGRQPTRPQILHCVKVTLFNHVWVVAIHAMLVYWAGLDHAIMNLDPIVPPWREFIVDFVFALLAREILFYYIHRTLHHPRIYAYIHKMHHKYTTPVAFAGEYAHPVEHVIANILPITLPLYLKGAHYLSIIAFVSFELWEAAADHSGYDFLKLPPAELHDLHHEKFRVHYGTIGLMDWIHGTDVVGWDRPETDKRDEQ

SEQ ID NO: 131093 - DNA, 966 bp, Candida albicans SC5314
  CDS (1)..(966): transl_table=12
atggaagttttgcatcaattaactactaatcatacttcaagtttatctaatttgataaataatcatccaacaagtttttcatcaattttaaaagaagttgatattactaatcatagtttaacttatattgaaaaattatgggcctcatattatatttatatgaataatgatattttagctacagggttattatttttcattactcatgaattaatgtattttggtagatgtttaccatggtttattattgataaaactccttggtttaatcgttataaaattcaaccaacaaaaattcctactaatcaagaacaatgggaatgttttaaaacggttttaaaacaacattttcttgttgaagctttacctatttggttattccatccagtatgtgctaaattaggtattacttatgatgttccattccccaattggaaaattcaagctatacaaattgccatttttttcatttgtgaagatttttggcattttgtattccatagtttatttcatcaaggttggttttataaaaatattcataaagttcatcataaatatgctgctccatttggtttagcagcagaatatgctcatccagtcgaagtcatggccttaggagtggggacggtggggttccctattttatatgcttatttggccacagtttatactaatatgccaccacttcatttatttacattgacaacttggattgttttaagattattccaagccgttgattctcattctggttatgattttccttggtcattaaacaagttcttcccactttgggctggtgctgctcatcatgatgaacatcatcattatttcattggtaattatgctagttcttttaccctttgggattggttattccaaactgaatgtggtacttatgctagaaaaagaagagaaagaaatagtcgagctagtgctgaaagtaaacataaaaaaactttatag

SEQ ID NO: 131094 - protein, 321 aa, Candida albicans SC5314
MEVLHQLTTNHTSSLSNLINNHPTSFSSILKEVDITNHSLTYIEKLWASYYIYMNNDILATGLLFFITHELMYFGRCLPWFIIDKTPWFNRYKIQPTKIPTNQEQWECFKTVLKQHFLVEALPIWLFHPVCAKLGITYDVPFPNWKIQAIQIAIFFICEDFWHFVFHSLFHQGWFYKNIHKVHHKYAAPFGLAAEYAHPVEVMALGVGTVGFPILYAYLATVYTNMPPLHLFTLTTWIVLRLFQAVDSHSGYDFPWSLNKFFPLWAGAAHHDEHHHYFIGNYASSFTLWDWLFQTECGTYARKRRERNSRASAESKHKKTL

SEQ ID NO: 131095 - DNA, 966 bp, Candida albicans SC5314
  CDS (1)..(966): transl_table=12
atggaagttttgcatcaattaactactaatcatacttcaagtttatctaatttgataaataatcatccaacaagtttttcatcaattttaaaagaagttgatattactaatcatagtttaacttatattgaaaaattatgggcctcatattatatttatatgaataatgatattttagctacagggttattatttttcattactcatgaattaatgtattttggtagatgtttaccatggtttattattgataaaactccttggtttaatcgttataaaattcaaccaacaaaaattcctactaatcaagaacaatgggaatgttttaaaacggttttaaaacaacattttcttgttgaagctttacctatttggttattccatccagtatgtgctaaattaggtattacttatgatgttccattccccaattggaaaattcaagctatacaaattgccatttttttcatttgtgaagatttttggcattttgtattccatagtttatttcatcaaggttggttttataaaaatattcataaagttcatcataaatatgctgctccatttggtttagcagcagaatatgctcatccagtcgaagtcatggccttaggagtggggacggtggggttccctattttatatgcttatttggccacagtttatactaatatgccaccacttcatttatttacattgacaacttggattgttttaagattattccaagccgttgattctcattctggttatgattttccttggtcattaaataagttcttcccactttgggctggtgctgctcatcatgatgaacatcatcattatttcattggtaattatgctagttcttttaccctttgggattggttattccaaactgaatgtggtacttatgctagaaaaagaagagaaagaaatagtcaagctagtgctgaaagtaaacataaaaaaactttatag

SEQ ID NO: 131096 - protein, 321 aa, Candida albicans SC5314
MEVLHQLTTNHTSSLSNLINNHPTSFSSILKEVDITNHSLTYIEKLWASYYIYMNNDILATGLLFFITHELMYFGRCLPWFIIDKTPWFNRYKIQPTKIPTNQEQWECFKTVLKQHFLVEALPIWLFHPVCAKLGITYDVPFPNWKIQAIQIAIFFICEDFWHFVFHSLFHQGWFYKNIHKVHHKYAAPFGLAAEYAHPVEVMALGVGTVGFPILYAYLATVYTNMPPLHLFTLTTWIVLRLFQAVDSHSGYDFPWSLNKFFPLWAGAAHHDEHHHYFIGNYASSFTLWDWLFQTECGTYARKRRERNSQASAESKHKKTL

SEQ ID NO: 131097 - DNA, 942 bp, Ustilago maydis 521
  CDS (1)..(942)
atggagttcgtctcgcagcagttcaactcgaccgtggggtcgattttgaacccgaccacgacgcacttggcagccgatttgtacaagaacactgactttgcttcgctcaacgtgttggagagggcatgggccaactggtacctctactggggcaacccggtgctcgcgacgggtatcatgtcgtttgtgctgcacgagctcgtgtactttggacgagccattccttggatcatcatcgactcgatgcctagcatgcgcaagtacaagctgcaggacgaaaagatccccacgcctgagcagcagtggaagtgcaccaagtacgtgctgctctcgcactttacggtcgagttgccacagatctggtcgtttcacccgatttgcgagtactttggtctcgccacgcacgacgttcctttccctcactggaccaagatcgcctggcagattggcgtgtttttcctgtttgaagacgcgtttcactactgggctcatcgcgctctccactggggtcctctgtacaagcacatccacaagaagcaccacgaatactcggcgccgttcggacttgcggctgaatacgcacatcctctggaagtgctgattctgggcatgggtacgattggaggaccgtttgcgctttgcgcgttcaccaaggaccttcacattttgaccgtctacatctggattgtgctgcgtctgttccaagctattgacgctcactctggttacgactttccgatttctttgcacaactgggtcccgttctgggcgggtgcggaccaccacgactaccaccaccaggcgtttgtaggctgctactcgacgtcgttccgatggtgggaccacatgctgggtaccgacctgtcgtacaagcgtgcgcgtgctcgtcaggccgagaagaagcgagaggccttgcaagctgcgaaggcgaaagcgcagtaa

SEQ ID NO: 131098 - protein, 313 aa, Ustilago maydis 521
MEFVSQQFNSTVGSILNPTTTHLAADLYKNTDFASLNVLERAWANWYLYWGNPVLATGIMSFVLHELVYFGRAIPWIIIDSMPSMRKYKLQDEKIPTPEQQWKCTKYVLLSHFTVELPQIWSFHPICEYFGLATHDVPFPHWTKIAWQIGVFFLFEDAFHYWAHRALHWGPLYKHIHKKHHEYSAPFGLAAEYAHPLEVLILGMGTIGGPFALCAFTKDLHILTVYIWIVLRLFQAIDAHSGYDFPISLHNWVPFWAGADHHDYHHQAFVGCYSTSFRWWDHMLGTDLSYKRARARQAEKKREALQAAKAKAQ

SEQ ID NO: 131099 - DNA, 1188 bp, Ustilago maydis 521
  CDS (1)..(1188)
atgaccactcgaaccgccacgtccacaagcaccactgtgcacggtcaccttggtgatctcaagctgcgcaatgctgccatcactggtcctcatttgcagccaaaggctgccaaacaagatcttgcagacaccaagcctgactccgctcgtacttttccaggcctgggcttcaagcttagtcccaccgaggagaggctgcgtgccaagcgcaattggggcttcctcgagaccgcctacgataactccaaggtcatgggtctcaccacccactttgtcaccatcaccatggccatcgtctttaacaagtcttggcttgccaagcccgtttatgactggctgaacacctacgatcgcttcaccatccacactgttcacacttggatcttgctttccacctgccaactgctggtcattggcctttttgccctcaccgacttgagcggccgtccgtcgtggctggccaggtaccgcatgcagccacacaagcctccgacgctggctcagtacaagaagctgatccctgtcgtcttattcaacctcgtcgtcgtcaatacgatctccaacatcatctactatcctttggccgaatggcgaggaattcagaccacctacgagacgctcccttcaggcaaaaaattggtcgctcagtggctcgtttgtctcttgatggaagatatcggcttctacactgtccatcgagctctgcaccacccacgcatctacaagtacatccacaagaagcatcacgaattcagtgcacccattgccggagcgtccacatacgcccatccactcgagcactacttcagcaacctcgttcccatccttgtcggcttgctcatcacacgcgcccatatcagcgtgcagtacctcttcttcactggcctcatgatcggcagtcacgtgcagcacagcggctataatagatttgctaattactgcgcggttcgtgtcgctccagttcccttcctgacatgtgctttggtccacgattggcaccactacttcaacacggagaactacggcccagtcggcctgcttgacgccatcttcaagaccaacaagaccttcaaagcctggacaagcgaaaccgttgctgccttccatggcgatcgcgccaaggccaggcaggccgccctcgagaagcttgcccaaatcgaggccgaagagcaagagcgaatcagataa

SEQ ID NO: 131100 - protein, 395 aa, Ustilago maydis 521
MTTRTATSTSTTVHGHLGDLKLRNAAITGPHLQPKAAKQDLADTKPDSARTFPGLGFKLSPTEERLRAKRNWGFLETAYDNSKVMGLTTHFVTITMAIVFNKSWLAKPVYDWLNTYDRFTIHTVHTWILLSTCQLLVIGLFALTDLSGRPSWLARYRMQPHKPPTLAQYKKLIPVVLFNLVVVNTISNIIYYPLAEWRGIQTTYETLPSGKKLVAQWLVCLLMEDIGFYTVHRALHHPRIYKYIHKKHHEFSAPIAGASTYAHPLEHYFSNLVPILVGLLITRAHISVQYLFFTGLMIGSHVQHSGYNRFANYCAVRVAPVPFLTCALVHDWHHYFNTENYGPVGLLDAIFKTNKTFKAWTSETVAAFHGDRAKARQAALEKLAQIEAEEQERIR

SEQ ID NO: 131101 - DNA, 1032 bp, Cryptococcus neoformans var. neoformans B-3501A
  CDS (1)..(1032)
atggccgctgcagccgcctttgacctgctcgacaagtacatccccggcgcctcagattctctgaccattgtcaatgccaccaccgcgcaaaacaccctctatccaggtgtcgactttgccgccctcaactggctcgagagattatgggcatcctactacgtctgggtcggcaaccccatcattgccaccggcttgatgagctttttgctccacgaaattgtctattttggacggtgtatcccttggctcatcatcgatgctatgccctacttccaaaagtggaagcttcagcctaacaagcacgtctctcgcgcgcaaatcctcaaatgcaccaaggtcgttcttctcactcacttcacctgtgaagctccccttatcctcgccttccaccctatctgttgcttgttcggaatgaagacttacgaaatacctttttcatctatcggtctcatggctgcgcaaatcgccttcttcttcgtctttgaggacactttccattactgggctcacagggctttgcactatggtcctttgtacaagcacattcacaagctccaccacgagttctctgctcctattggtatcgccgccgaatatgcccatcctcttgaagttttgatcctcgcgcaaggaacgatctctggaccattcttgtacgctgtattcaggaatgaccttcacatcctcaccgtctacgtttggatcactcttcgtctttggcaagcagtcgacgctcattctggctacgacttcccttggtctctccgacacttcctccccttctgggccggtgccgaccaccacgatttccaccatgccactttcacttcatgcttctctaccagtttcaggtggtgggactactactttggcactgatgtcaagtaccacgcttacaaggctcgtgttgctgctgccggtgtcaaggaacgtgcagctgttgaaaagcgcgagatggaaaagctcgaaaaggagggtatcattgaggagcgcgctgcagcgtcgcacagcaagcgggggaagaaggagtag

SEQ ID NO: 131102 - protein, 343 aa, Cryptococcus neoformans var. neoformans B-3501A
MAAAAAFDLLDKYIPGASDSLTIVNATTAQNTLYPGVDFAALNWLERLWASYYVWVGNPIIATGLMSFLLHEIVYFGRCIPWLIIDAMPYFQKWKLQPNKHVSRAQILKCTKVVLLTHFTCEAPLILAFHPICCLFGMKTYEIPFSSIGLMAAQIAFFFVFEDTFHYWAHRALHYGPLYKHIHKLHHEFSAPIGIAAEYAHPLEVLILAQGTISGPFLYAVFRNDLHILTVYVWITLRLWQAVDAHSGYDFPWSLRHFLPFWAGADHHDFHHATFTSCFSTSFRWWDYYFGTDVKYHAYKARVAAAGVKERAAVEKREMEKLEKEGIIEERAAASHSKRGKKE

SEQ ID NO: 131103 - DNA, 861 bp, Strongylocentrotus purpuratus
  CDS (1)..(861)
atggcggctgaatctgtgctaaatgatttgccaattgtggagaatgcaactgacggtggaatgggggcttttgaagaaggatggaggtacatgaattcaaactattccaggtttcagatctcaacatacatgtcagcatgccttcacatagttacctactttctcttctgctcaccatcgttcatcttccagtttttccgcttcatggaccggtacaagatacagcaggataaaccgaccacatgggaccaggaatggaaatgcttcaagcttgttattgccaaccaagtgctcatccagacaccattcttctcaggggcctacttcttctgccaatatatgaatattccatttgactatgagtccatgcctgtttggtatatgacacttgcccactgctttggtagtttagtgctagaggatgcctggcattacttccttcatagagctcttcatcataaaagcatctacaagtacatccacaagatccatcacaacttccaggcccctttcggcatgacggctgaatacgctcatccaatggagactatgattctgggaatgggtttcatgtggggtatgctcctcttctgcgatcacttgattttcttatggtgctggatgtgtgtccgtctgatcgaaaccatcgatgtccactccggatacgacttccccatcaatccacttcacgtcatcccattctatggaggtgcgaggttccatgacttccatcacaagaatttcaacggtaactactcctctacattcacctggtgggacaagatctttggtacagacatgcagtacaaggattattacgccaaactacaagatcagaagactgaaaagaaagccaactaa

SEQ ID NO: 131104 - protein, 286 aa, Strongylocentrotus purpuratus
MAAESVLNDLPIVENATDGGMGAFEEGWRYMNSNYSRFQISTYMSACLHIVTYFLFCSPSFIFQFFRFMDRYKIQQDKPTTWDQEWKCFKLVIANQVLIQTPFFSGAYFFCQYMNIPFDYESMPVWYMTLAHCFGSLVLEDAWHYFLHRALHHKSIYKYIHKIHHNFQAPFGMTAEYAHPMETMILGMGFMWGMLLFCDHLIFLWCWMCVRLIETIDVHSGYDFPINPLHVIPFYGGARFHDFHHKNFNGNYSSTFTWWDKIFGTDMQYKDYYAKLQDQKTEKKAN

SEQ ID NO: 131105 - DNA, 1137 bp, Tribolium castaneum
  CDS (1)..(1137)
atgtacgacaaaagcgctcaaaaacggcacaggaaaaggaaaacctggagaattaaacacttgaaaatgttgggcgattatgaagatgagtcgtcgtcttcgagtggcgagctcaccccgactcgcaagtccggccctggagcggcggcccaaaatagcgcccagcaaaacccatcgatcctctcctccttacggagcgtcttaattgttataagttcggcgctgatttgtttcgcagcggcgagaaattcaatcacttggcactgccagagattctggggggcgtcgggcgacttctggcaggcccaatgggacaagttcttggatacggtgggcgaggatcccttcagtttatgggtttatgggacaacggtcttgacctttggggtgtattggctgtttggggggatttacacgattttagatatgacaaacaaaccggcggccctccgacggtacaaaatccagccggggacgaacgaacccgtcgacaataaaaaactgctccatgtcatttggtgcgtgattttcaatcaaatcatagtcggcttgccctccacgatcctcatgtattggatcatgtcctggcgggggttccccccattgcgcgagctgcccactttccattgggttttgtacgaattggcggtgcacattctagtcgaagaagcagccttttattactcccacagactcctccaccaccgctccctctacaaaatcatccacaagcaacaccacgaatggacagcccctattgccgtcactgcaatttacagccacccgattgagcatctcttctccaatttgattcccccatttttgggggtttttattatggggtctcacgtggccacggcgtggttatggttcactttagccctcctatcgacgctaaatgcccactctgggtaccacctaccgttcttcccatcaccggaagcccatgatttccaccacatgaaattcaacaattgtttcggggtgttgggtgtgttggaccggcttcatggtaccgataccaacttccggtcatcgagggcctacgtacggcacattatgatgctgagcttcatacctccaagggaggcctaccccgaccccaacccttgcaaacacaagctgggcaagcagtaa

SEQ ID NO: 131106 - protein, 378 aa, Tribolium castaneum
MYDKSAQKRHRKRKTWRIKHLKMLGDYEDESSSSSGELTPTRKSGPGAAAQNSAQQNPSILSSLRSVLIVISSALICFAAARNSITWHCQRFWGASGDFWQAQWDKFLDTVGEDPFSLWVYGTTVLTFGVYWLFGGIYTILDMTNKPAALRRYKIQPGTNEPVDNKKLLHVIWCVIFNQIIVGLPSTILMYWIMSWRGFPPLRELPTFHWVLYELAVHILVEEAAFYYSHRLLHHRSLYKIIHKQHHEWTAPIAVTAIYSHPIEHLFSNLIPPFLGVFIMGSHVATAWLWFTLALLSTLNAHSGYHLPFFPSPEAHDFHHMKFNNCFGVLGVLDRLHGTDTNFRSSRAYVRHIMMLSFIPPREAYPDPNPCKHKLGKQ

SEQ ID NO: 131107 - DNA, 798 bp, Oryza sativa subsp
  CDS (1)..(798)
atggggattggggcgtcggacgagctgctgggcacgttcgtgccgatcgccgtgtactggctctactcggggctgtacctcgcgctggacggcgtggagcggctggacgtgtaccggctgcaccccagggaggaggaggccgccaagaacgtcgtctccaggggcaccgtcgtcaggggcgtcctcgtccagcaggccttccaggtcgccgtctcgctcaccctcttcgcggttattggtgatgaaagtgatattgaacagaagcaaccttctgcccttgtgatattgctgcaatttgccattgcaatgttcgttatggatacatggcagtacttcatgcacagatacatgcacatcaacaagttcctatataaacatatccactccaagcaccacactcttgtagtcccttattcctttggagctctttacaaccatcctcttgagggtcttattttggacaccattggtggtgctctctcattcctcgtctctggtatgacaccacggacatccatattctttttctcgttcgcaaccatcaagacagtggatgatcattgtggtctgtggcttcctggtaacatcctccatgcgctgttcaacaacaacagcgcttatcatgacattcatcatcagctctatggaaacaagtacaacttttcacaaccattttttgtcatgtgggacaagatacttggaacttacatgccttactctatcgagcacagaaaaggaggagggtttgagtcacggccagttaaactcaacatagcagagcagaccaagactgattag

SEQ ID NO: 131108 - protein, 265 aa, Oryza sativa subsp
MGIGASDELLGTFVPIAVYWLYSGLYLALDGVERLDVYRLHPREEEAAKNVVSRGTVVRGVLVQQAFQVAVSLTLFAVIGDESDIEQKQPSALVILLQFAIAMFVMDTWQYFMHRYMHINKFLYKHIHSKHHTLVVPYSFGALYNHPLEGLILDTIGGALSFLVSGMTPRTSIFFFSFATIKTVDDHCGLWLPGNILHALFNNNSAYHDIHHQLYGNKYNFSQPFFVMWDKILGTYMPYSIEHRKGGGFESRPVKLNIAEQTKTD

SEQ ID NO: 131109 - DNA, 903 bp, Oryza sativa subsp
  CDS (1)..(903)
atgctcccgtacgcgacggcggcggaggcggaggcggcggtggggcggggcctgacgtgggcggaggcggcctggttccgctactcggcgtccatcccggactactgcctctactgccacaacgtccccatcctcctcctcgtctacaccctcgcgccgctccccctcgcgctgctcgagctccgccgccacctgccgctgccgcacaagctgcagcccggcgtgcgccacccgccggccgccttcctccggtgctacgcggccaccgcgcgcgtgctgctcctcgccgtcgggccggtccagctggcgtcgttccctgcggtgagggcggtggggatacggacggggctgccgctgccgtcggcgggggagacggcggcgcaggtggcggtgtacctgctggtggaggactacctgggctactggatccaccgcctgctgcacacgccgtgggcctaccaccacatccaccgagtccaccacgagttcaccgcgcccatgggctacgccgccccgtacgcccactgggccgagatcctcatcctcggcttcccggccttcgccggcccagccatcgtgccgtgccacatgaccaccttctggctctggttcgtgcttcgccacctcgaggccatccacatccacagcgggttcaagttgccgttcgatccgaccaagtatatcccgttgtatggaggagtggagtaccatgactaccaccatttcgtgggaggacacagccagagcaacttctcttctgtcttcactttctgtgattacatctacgggactgacagaggctacagataccataaggcaagcttgtcaaagctgaaggagatggcaggaaatcacgttgagaaaggagatgaaaatggattcggcaacgggaaacaagattaa

SEQ ID NO: 131110 - protein, 300 aa, Oryza sativa subsp
MLPYATAAEAEAAVGRGLTWAEAAWFRYSASIPDYCLYCHNVPILLLVYTLAPLPLALLELRRHLPLPHKLQPGVRHPPAAFLRCYAATARVLLLAVGPVQLASFPAVRAVGIRTGLPLPSAGETAAQVAVYLLVEDYLGYWIHRLLHTPWAYHHIHRVHHEFTAPMGYAAPYAHWAEILILGFPAFAGPAIVPCHMTTFWLWFVLRHLEAIHIHSGFKLPFDPTKYIPLYGGVEYHDYHHFVGGHSQSNFSSVFTFCDYIYGTDRGYRYHKASLSKLKEMAGNHVEKGDENGFGNGKQD

SEQ ID NO: 131111 - DNA, 897 bp, Oryza sativa subsp
  CDS (1)..(897)
atgctgccctacgcgacggcggcggaggcggaggcggcgctggggagggcgatgacggcggcggagtcgctgtggttcaggtactcggcggggatcccggactacgtcctcttctggcacaacatcctcttcctcttcgtcgtcttcacgctcgcgccgctccccgtcgcgctcctcgagctccgcgcgccggccgccgtggggccgttcaagctgcagcccaaggtgcggctctcccgggaggagttcttccgctgctacagggacgtcatgcgcctcttcttcctcgtcatcggcccgctccagctcgtgtcctaccctaccgtcaagatggtgggaatccacacagggctgccactgccgtcgctgggggagatggcggcgcagctgctggtgtacttcctggttgaggactacctcaactactggatccatcggttgctacatggggagtggggctatgagaagatccaccgtgtccaccatgagttcacggcacccattggattcgccgcgccatatgcacactgggctgaggtgctcatcctcggcatcccctcctttgtcgggccagcgcttgcacctggtcacatgatcaccttctggctctggattgtactccgccagatggaggccatagagacacacagcggctttgatttcccgttcaacctgacaaagtatattccattctatggaggcgcagaataccatgattatcatcactatgttggacgccagagtcagagcaatttcgcttctgttttcacgtattgtgatatctatatggaaccgacaaaataccataaggcgtaccaagcaaagatgaaggctctggggcaaacggaaggcgagaaagcagatagcaatggattgagctacgcgaagttggattaa

SEQ ID NO: 131112 - protein, 298 aa, Oryza sativa subsp
MLPYATAAEAEAALGRAMTAAESLWFRYSAGIPDYVLFWHNILFLFVVFTLAPLPVALLELRAPAAVGPFKLQPKVRLSREEFFRCYRDVMRLFFLVIGPLQLVSYPTVKMVGIHTGLPLPSLGEMAAQLLVYFLVEDYLNYWIHRLLHGEWGYEKIHRVHHEFTAPIGFAAPYAHWAEVLILGIPSFVGPALAPGHMITFWLWIVLRQMEAIETHSGFDFPFNLTKYIPFYGGAEYHDYHHYVGRQSQSNFASVFTYCDIYMEPTKYHKAYQAKMKALGQTEGEKADSNGLSYAKLD

SEQ ID NO: 131113 - DNA, 723 bp, Oryza sativa subsp
  CDS (1)..(723)
atgctgccctacgcgacggcggcggaggcggaggcggcgctggggagggcgatgacggcggcggagtcgctgtggttcagggacgtcatgcgcctcttcttcctcgtcatcggcccgctccagctcgtgtcctaccctaccgtcaagatggtgggaatccacacagggctgccactgccgtcgctgggggagatggcggcgcagctgctggtgtacttcctggttgaggactacctcaactactggatccatcggttgctacatggggagtggggctatgagaagatccaccgtgtccaccatgagttcacggcacccattggattcgccgcgccatatgcacactgggctgaggtgctcatcctcggcatcccctcctttgtcgggccagcgcttgcacctggtcacatgatcaccttctggctctggattgtactccgccagatggaggccatagagacacacagcggctttgatttcccgttcaacctgacaaagtatattccattctatggaggcgcagaataccatgattatcatcactatgttggacgccagagtcagagcaatttcgcttctgttttcacgtattgtgattatctatatggaaccgacaaaggttacagataccataaggcgtaccaagcaaagatgaaggctctggggcaaacggaaggcgagaaagcagatagcaatggattgagctacgcgaagttggattaa

SEQ ID NO: 131114 - protein, 240 aa, Oryza sativa subsp
MLPYATAAEAEAALGRAMTAAESLWFRDVMRLFFLVIGPLQLVSYPTVKMVGIHTGLPLPSLGEMAAQLLVYFLVEDYLNYWIHRLLHGEWGYEKIHRVHHEFTAPIGFAAPYAHWAEVLILGIPSFVGPALAPGHMITFWLWIVLRQMEAIETHSGFDFPFNLTKYIPFYGGAEYHDYHHYVGRQSQSNFASVFTYCDYLYGTDKGYRYHKAYQAKMKALGQTEGEKADSNGLSYAKLD

SEQ ID NO: 131115 - DNA, 2463 bp, Arabidopsis thaliana
  CDS (1)..(2463)
atgatcccatacgcaacaatcgaagaagcgtcgatcgcattatctcgaaacctcacatggctagagactctctggttcgattactccgccaccaaatccgattactacctctactgccacaacattctcttcctcttcctcatcttctctctcgttcctctccctctcgttttcatcgaatcatctcaatccacctcagatttgttcaatcgctacaaaatccaaccaaaagtgaaaaactcattctcatcgatgttcaaatgttacaaagacgtcatgaagatgttcatcctcgtcgttggtccattacaactcgtttcttatccttcgattcaggttgattttgtttttcgtgtgttgaaacagatgattgagatacgaagtggattaccattaccatcatgtatggagattgtagcacagttagtggtttacttcttggtagaggattatactaattactgggttcatagattctttcattgtaaatggggttatgagaagtttcatcatattcatcatgagtatacagctcctattggttatgctgctccttatgctcattgggctgaggttttgcttcttggcattcccacgtttcttggacctgctattgctcctggtcatatgattaccttttggttgtggattgctttacgacagattgaggctatcgaaactcatagcggatatgatttcccatggtctctgacaaagtacattccattttatggtggagctgagtatcatgattaccatcactacgttggaggacaaagccagagtaactttgcttcagtttttacttactgcgattacatctatggaactgataaaggttaccgattccagaagaagcttcttcagcagaagaaggttaagtattcgttgtctgatatgttccaatgttataaagaagtcatgaagttgttccttctcgtcgtcggcacattgcaaatcgtttcttatccttccatccagatggttgggattcgaagtggtttgccattaccatcgttaatggagatagtagcacaattagtggtttacttcttgatagaagattacactaactactggatccatagatggatgcattgcaaatggggttacgagaagattcatcgaatccatcatgagtacacatcacctatcggatacgcatcgccgtatgcgcattgggccgagattttgattcttgggattccgacgtttcttggaccggcaattgctcctggccatataatgacgttttggttatggatatctttacgacaattcgaggcgattgagacccacagcggatatgattttccatggagtgtgacaaaattaattccattttacggtggacctgagtatcatgactaccatcactacgttggaggacaaagccagagcaactttgcttcggttttcacttactgcgattacatttatggaactgataaacgttttaaactaattacgtattatagaatattgaccagtgttgacgttgttgttatattgttttctgtcattagggctatcgaatccataagaagcttcttcatcatcagaaccccgacaatggcgtggaacgtgttcaagttctgcacagcacttcgcgccttgggttcgatcatgatcttaattgttatcgggatcatcggattcacatactacgccgttgtcgtcgttaattacggacctgctctactgatcggtggtgtcgattcattactatctgttctcgtcttagcgttcttccactttctgcttataatgctactgtggagttatttctctgttgttgtgacggaccctggtggtgttccaacgggttggaggccagaattagacatagagaaaagcgagggaaaccaagctttgattggagaagcttcggttggagattcctcgtctcatggtgtaagatattgtagaaagtgcaatcaatataaaccgcctcgttctcaccattgttcagtctgtggaagatgcatactaaagatggaccatcactgtgtttgggtggtgaattgtgttggtgcaaataactacaaatcatttctcctattcttgaacaccttaacgttaccatctgattcaaaaacttcactctcttgctttccagtattgaacatagcatttgccctaagtgtcctaggcttcctaataatgcacataatgttggtcgctcgtaacaccacaactattgaggtaaagcaacaactctcacttggttttgctcttaacttgggttctctcaggaatctccatgcgtatgagaagcatacagtgaactggccatacaacgttggtcgtaagacaaactttgaacaggtttttggaagtgataaaatgtattggttcgtgccattgtacacggaagacgataagaagaagttgccagcacttggagggttagactttacgagcaggtcggagtccgagacagagccgcttcagtctctatga

SEQ ID NO: 131116 - protein, 820 aa, Arabidopsis thaliana
MIPYATIEEASIALSRNLTWLETLWFDYSATKSDYYLYCHNILFLFLIFSLVPLPLVFIESSQSTSDLFNRYKIQPKVKNSFSSMFKCYKDVMKMFILVVGPLQLVSYPSIQVDFVFRVLKQMIEIRSGLPLPSCMEIVAQLVVYFLVEDYTNYWVHRFFHCKWGYEKFHHIHHEYTAPIGYAAPYAHWAEVLLLGIPTFLGPAIAPGHMITFWLWIALRQIEAIETHSGYDFPWSLTKYIPFYGGAEYHDYHHYVGGQSQSNFASVFTYCDYIYGTDKGYRFQKKLLQQKKVKYSLSDMFQCYKEVMKLFLLVVGTLQIVSYPSIQMVGIRSGLPLPSLMEIVAQLVVYFLIEDYTNYWIHRWMHCKWGYEKIHRIHHEYTSPIGYASPYAHWAEILILGIPTFLGPAIAPGHIMTFWLWISLRQFEAIETHSGYDFPWSVTKLIPFYGGPEYHDYHHYVGGQSQSNFASVFTYCDYIYGTDKRFKLITYYRILTSVDVVVILFSVIRAIESIRSFFIIRTPTMAWNVFKFCTALRALGSIMILIVIGIIGFTYYAVVVVNYGPALLIGGVDSLLSVLVLAFFHFLLIMLLWSYFSVVVTDPGGVPTGWRPELDIEKSEGNQALIGEASVGDSSSHGVRYCRKCNQYKPPRSHHCSVCGRCILKMDHHCVWVVNCVGANNYKSFLLFLNTLTLPSDSKTSLSCFPVLNIAFALSVLGFLIMHIMLVARNTTTIEVKQQLSLGFALNLGSLRNLHAYEKHTVNWPYNVGRKTNFEQVFGSDKMYWFVPLYTEDDKKKLPALGGLDFTSRSESETEPLQSL

SEQ ID NO: 131117 - DNA, 948 bp, Ostreococcus tauri
  CDS (1)..(948)
atgtcgacgtttacggacctcgcgctgtccgtcgaacgacgggtcgacggagcgatcgagaaggtttggagcgagatcttggagcgattccacccgttcgtgatcgcgggacccctgacgttcgcgtatcatgagctggtgtacttcggcgcgtggatgccgtggttggcgatggatcgattcgagtacttccaaaagtggaagatccagcgagagaagcgcccgagcgcggagatggtgatgaagtgtgtggtgaagctgttgaaatcgcacgtgttcgtgcagttgccgatgcagatgatgttttatttcgtggcgccttactttggattttcgctcgcgctcgaggcgctgccgaaatcaagggatttcttgtggcagattcccgtcttcttcgtcattgaggacttttatttttactggattcatagattcttgcatcacaagcgcgtgtacaagtacgtgcacaaggttcatcatgagcacaagtatccgttcgggattgcggcggagtatgctcatccggtggagaccttcttcttaggcatcggtaccttgctcggcccgctgttcttcgccaagcacatggtaaccttgtgggtgtggttatttttccgtctcctcgagacagtggaggatcactctgggtacgatgtgccgtggaacccgaccaatctgattccgttctggggcggcgctgtgcaccacgatttccaccacaagacgtttgaggggccgtattcgagcgtcttcacctggtgcgactggatgtttggcacggataaggagtttagggcgcatcagccaagcttcgaggtggtaaggagtcgtgggcgtacccggcggtgttccgaggggcaccaaacgaccaggccctggctgagacgcgcgccaccacaaaaaagctcgactagtctcgtgtttttccagttgaaagaatctcgttaa

SEQ ID NO: 131118 - protein, 315 aa, Ostreococcus tauri
MSTFTDLALSVERRVDGAIEKVWSEILERFHPFVIAGPLTFAYHELVYFGAWMPWLAMDRFEYFQKWKIQREKRPSAEMVMKCVVKLLKSHVFVQLPMQMMFYFVAPYFGFSLALEALPKSRDFLWQIPVFFVIEDFYFYWIHRFLHHKRVYKYVHKVHHEHKYPFGIAAEYAHPVETFFLGIGTLLGPLFFAKHMVTLWVWLFFRLLETVEDHSGYDVPWNPTNLIPFWGGAVHHDFHHKTFEGPYSSVFTWCDWMFGTDKEFRAHQPSFEVVRSRGRTRRCSEGHQTTRPWLRRAPPQKSSTSLVFFQLKESR

SEQ ID NO: 131119 - DNA, 879 bp, Phaeosphaeria nodorum
  CDS (1)..(879)
atggcgcaggatacttactggggctcctttgaggagatctccaagtacaatgtccagctcaatttcctcgagcagatgtggcttgcatggtacgcatggattggcaacgacgtcctggcgacaggaatcatgtcattcgtttggcacgaaaccctctacttcgggcgatcactcccctggatcatcgtcgaccagatcccgtacttcaggaagtacaagatccaagagcacaaaattcctaccgcctgggaacaaacacaatgcgcccttctcgtcctcctctcccacttcactgtcgagctcccccagatctggcttttccaccctatgtgccagtacttcggcctccagacctccgtaccgttccctagcctcttcaaaatggcctatcagatcgccatcttcttcgtcatggaggacacttggcactactgggcgcatcgcgccatgcacgccataccatacttatacaagaacgtccacaagatccaccaccagtactctgcaccttttggtcttgctgctgaatatgcctcccccattgaggtcatggttctcggtttcggaagtgttggttgccccattctctggtgtgccattaccaaggaccttcacatcctgacaatgtacatctggattgcgcttcgtctcttccaagccatcgacgcccacagcggttacgagttcccctggtctctgcaccacttccttcccttctgggccggcgccgagcaccatgacgttcaccacgagaagttcattggtaactacgccagtagcttcaggtggtgggactttgtccttgacaccgaggccggtgctgaggcctccaagaaaaggagagagaagaagctcgccaaggccaggaaggcccagtaa

SEQ ID NO: 131120 - protein, 292 aa, Phaeosphaeria nodorum
MAQDTYWGSFEEISKYNVQLNFLEQMWLAWYAWIGNDVLATGIMSFVWHETLYFGRSLPWIIVDQIPYFRKYKIQEHKIPTAWEQTQCALLVLLSHFTVELPQIWLFHPMCQYFGLQTSVPFPSLFKMAYQIAIFFVMEDTWHYWAHRAMHAIPYLYKNVHKIHHQYSAPFGLAAEYASPIEVMVLGFGSVGCPILWCAITKDLHILTMYIWIALRLFQAIDAHSGYEFPWSLHHFLPFWAGAEHHDVHHEKFIGNYASSFRWWDFVLDTEAGAEASKKRREKKLAKARKAQ

SEQ ID NO: 131121 - DNA, 912 bp, Aedes aegypti
  CDS (1)..(912)
atgtcgttgggagtggaaatcttcgaccttccggcgaggcacttccgagtgttttggggcgcttccggtgatctgtggcagtccctgtgggatcgagtgctggatgtaacaggtgacgacccgttccgcctatggatcttcggtaccctcatctacaccatgaccctgtactggaccatcggctccatctacactctgctcgacgtcaccaaccggccagccttcatgcgtcgtttcaaggttcaaccgggcaccaacgaacccgtcgacaacgatcgactccggcgagttatccgtcaggttctcttcaatcaagtcttcaccggtctcccgatgctgctgggtctgtatcacatcctcaccccacaaaccccggaactgatccgaaagctgcccacttttaccactgtcatgtggcagctcgcggtttgcatcctgatcgaagaactcgggttctactacagccaccggttgcttcatcacggccgaatctaccggtttatccacaagcagcaccacgagtggaccgctccgatcgccattacagcgatgtatgcgcaccccattgagaacctgatcagtaacttgctgccgatcggagtgggcgtgtggagcaccggatgtcacatctccgtagcgtggctttggtttacgttggctatttccaacacgttgcacgtgcactctggataccatctgccgttcctgccgagcccggaacagcacgacttccatcatttgaaattcaaccaatgcttcggcgtgctcggagtcctagactggctccacggcaccagcagcatgttcatgagctcgaagcaagccgaacgggactacatcatgaccggattccggccggtgcgtgaggttcatcccgatcaggagaaggcagcgatcgggaaaaacaagtag

SEQ ID NO: 131122 - protein, 303 aa, Aedes aegypti
MSLGVEIFDLPARHFRVFWGASGDLWQSLWDRVLDVTGDDPFRLWIFGTLIYTMTLYWTIGSIYTLLDVTNRPAFMRRFKVQPGTNEPVDNDRLRRVIRQVLFNQVFTGLPMLLGLYHILTPQTPELIRKLPTFTTVMWQLAVCILIEELGFYYSHRLLHHGRIYRFIHKQHHEWTAPIAITAMYAHPIENLISNLLPIGVGVWSTGCHISVAWLWFTLAISNTLHVHSGYHLPFLPSPEQHDFHHLKFNQCFGVLGVLDWLHGTSSMFMSSKQAERDYIMTGFRPVREVHPDQEKAAIGKNK

SEQ ID NO: 131123 - DNA, 864 bp, Aedes aegypti
  CDS (1)..(864)
atggacatggaaccaatagtggtcggcttacgtaacgaatccggatcgacgttcctgcaggatcgatggaattcgttgctggacacgattggtgacgaaccggagttcctgtacgtgtgggcgttgaccacctgggtcaatgggttcttctgggctttcggaggactgttcgtccttatggacgtcaccaatcgtccccgatggctgcgaaagttcaaaacacaacccggaacgaatgaacccctggaatggaccggcctctggagagtcatgaaaaccattctcttcaatcaaacggtgattggagttccgctgacctacatcgggttccacacggcaggaaagtccaatcttccggatgttcgagtccttccgagtaccttcgaagtcgtgcgcgatctgtgtgtctgcttgttctttgctgaagtgggattctactacatccatcggttcttgcatctgaagccactgtatcggcacgtccacaagaagcatcacgaatggacggccccttttgcctgggctgccatgtactgccatccggtggaacacattctgagcaacatgattcctccgatcataggaattcatctgatgaagagtcacttggcgacggccgccctgtggttccctctggtgatcgtgaatacggtgcgagaccactgcgggtaccatttgccgtttttccccagctcggagtatcacgactatcaccacgccaagttcacggaatgtttcggaacttttggctatctggattggttgcacggcactgataggcagtatcgtaagagcaagcagtgtcttcggcacaggtggctgtggtcgacaaagtcggcccgggaactgattccggataagtga

SEQ ID NO: 131124 - protein, 287 aa, Aedes aegypti
MDMEPIVVGLRNESGSTFLQDRWNSLLDTIGDEPEFLYVWALTTWVNGFFWAFGGLFVLMDVTNRPRWLRKFKTQPGTNEPLEWTGLWRVMKTILFNQTVIGVPLTYIGFHTAGKSNLPDVRVLPSTFEVVRDLCVCLFFAEVGFYYIHRFLHLKPLYRHVHKKHHEWTAPFAWAAMYCHPVEHILSNMIPPIIGIHLMKSHLATAALWFPLVIVNTVRDHCGYHLPFFPSSEYHDYHHAKFTECFGTFGYLDWLHGTDRQYRKSKQCLRHRWLWSTKSARELIPDK

SEQ ID NO: 131125 - DNA, 804 bp, Aedes aegypti
  CDS (1)..(804)
atgatctgtgaggtgtgtcaacggcagtgggagcggtttttggacatctacaacccgaatccatcggcattatggattttcggcacaatattctacactgttctggtggtaaccattgtgtctggttcgttcatgtttatggacctcaccggtcttccgaaacgtttacgaaagtacaagatccaaccgggaactaatgaaccacttacatgggaccagttgaagaagttgataaagacagcatttatcaacttggttgtggtaggaacaccaacgttgactgtatttcacatgatctcagtcaaaacaggtcgcttatcggatcttcgccagttgccaacagttggagaaatcttatacacaattccagtttcgatgttgttaactgaagttgcgttttactacagtcaccgattgttacactcaaaacatttgtacaaattgattcacaaaaaacatcacgaatggaccgctccggtatcgttagccgctgtctacgcgcatcctatcgagcatatcatcagtaatatggcaccactttacctggggatctttattaccaaagcacacttggttacaatgtggatatgggctacgatagcacttcttgggacattgcacgaccattcaggctatcatctgccctatttgttaggaagtcctgatgtacacgattttcaccaccaaaagttcaatcaatgctatggagccatcggcatcttggactggctgcacggaaccgacgttcagtttagacgttacaaggccaaacaacgagcagcactccaggactcagataaataa

SEQ ID NO: 131126 - protein, 267 aa, Aedes aegypti
MICEVCQRQWERFLDIYNPNPSALWIFGTIFYTVLVVTIVSGSFMFMDLTGLPKRLRKYKIQPGTNEPLTWDQLKKLIKTAFINLVVVGTPTLTVFHMISVKTGRLSDLRQLPTVGEILYTIPVSMLLTEVAFYYSHRLLHSKHLYKLIHKKHHEWTAPVSLAAVYAHPIEHIISNMAPLYLGIFITKAHLVTMWIWATIALLGTLHDHSGYHLPYLLGSPDVHDFHHQKFNQCYGAIGILDWLHGTDVQFRRYKAKQRAALQDSDK

SEQ ID NO: 131127 - DNA, 1269 bp, Chaetomium globosum
  CDS (138)..(1058)
tcgatcatcgaccgacgccggggtcttcttttccttctttcctgcccgcctgccagccgtttgaaccttcatctgcgcgccttctttttctcttccaacgccgccttggcgcaaccaggctatcggcaccgcccaagatggcgtccgcagtcctgaactcgaccatttcgggtctgacctcatcagcttctatcaccaccgttttcgaggaggtttccaagtacaatgttcagctgaacgtcttcgagcgcctctgggccgcttggtatctctggatgcagaatgacacgattgcgacgggtatcatgagcttcgtcatgcacgagttcgtctacttcggacggtccctcccctggatcatcatcgacgccatcccattcttcaacaaatacaagcttcagaataccaaggtaccgacatggaaggagcagtgggagtgcgctggtctcgtcctcctcagccactgcaccgtcgagcttccccagatctggctgttccaccccgtcgcaacctacttcggcctggactacggcgttcctttcccgcccgcctggaagatggcgatgcaaattgccatcttcttcgctgttgaggatgcctggcattactggatgcaccgggcgctgcactacggcccgctttacaagtcgatccacaagctgcaccacacctacagcgcaccgttcggcctcgccgccgagtacgcgtccccgattgaagtgatgctcctgggtttcggtatcgtcggaacccccatcatctgggtctccatcacgggcgagctgcacctcatcaccatgtacctgtggatcgtcctccgcctcttccaagccattgacgcccactctggctacgacttcccctggagtctgcgccgcattctgcccttctgggccggcgctgaccaccacgatctgcaccacgagcgcttcatcggcaactacgcctccagcttccgctggtgggactactgcctcgacaccgaggccggtgaggctgccagcaagcagcgtcgtgagaggaagttggccgagatccgggccaagaaggcgcagtaaatgccacgcttccctctactagacgagagcgttgatgacgagaatgtggccgtcttcaattgacacaacatcctggggactgatgaagagaggcggatgatcctcgaaccgggccgccgtaaaaaggatagatatcggcagggcttgaaggaaaacgaccggggaacacatccaaggtggatatgacatctgtgatgacgaaacatacgag

SEQ ID NO: 131128 - protein, 306 aa, Chaetomium globosum
MASAVLNSTISGLTSSASITTVFEEVSKYNVQLNVFERLWAAWYLWMQNDTIATGIMSFVMHEFVYFGRSLPWIIIDAIPFFNKYKLQNTKVPTWKEQWECAGLVLLSHCTVELPQIWLFHPVATYFGLDYGVPFPPAWKMAMQIAIFFAVEDAWHYWMHRALHYGPLYKSIHKLHHTYSAPFGLAAEYASPIEVMLLGFGIVGTPIIWVSITGELHLITMYLWIVLRLFQAIDAHSGYDFPWSLRRILPFWAGADHHDLHHERFIGNYASSFRWWDYCLDTEAGEAASKQRRERKLAEIRAKKAQ

SEQ ID NO: 131129 - DNA, 912 bp, Medicago truncatula
  CDS (1)..(912)
atgatcccttaccaatctcttcacgacgccgagatctccctcggtcgtaatctcaccttcgccgaaaccctatggttcaactactccgctaccaaatccgattactttctcttctgtcataacattctctttctcttcctcatcttctccctcgttcctcttcctctcgtttttctcgaaatcaaacgcttataccccttcgatgagtacaagatccaacccaaagttcgtttatctctccatgaaatgcttaattgctataaagatgtcctgaaaatgttcttccttgttgttggtcctcttcaactcatttcttacccttccatcaagatgattggaattaggacaggattgccgttaccgtctggatttgagatactatcgcaattattggtgtattttttggtggaggattatacgaattactggatccatagatttctgcataataaatggggttatgaaaagattcatcgagttcatcatgaatatcaagctccgattggatttgcggcgccttatgcacattgggcggagatcttgattttggggattccatcttttcttggaccggctatggttcctggtcacatgattacgttttggttgtggattgcattgcgccaagttgaagccattgatacacacagcgggtatgacttcccctggaatcccacaaaatacattccattttatggtggcgctgagcatcacgattaccatcattatgttggaggacaaagccagagcaattttgcatcagttttcacatattgtgattacatctatggaacagacaagggttttcggtatcagaagaagatacttcaaaagctgaaggaagattcgacaaatggtgctgcgcagaatggaagatcatacagtgaacaggaaaattataaatctgaatga

SEQ ID NO: 131130 - protein, 303 aa, Medicago truncatula
MIPYQSLHDAEISLGRNLTFAETLWFNYSATKSDYFLFCHNILFLFLIFSLVPLPLVFLEIKRLYPFDEYKIQPKVRLSLHEMLNCYKDVLKMFFLVVGPLQLISYPSIKMIGIRTGLPLPSGFEILSQLLVYFLVEDYTNYWIHRFLHNKWGYEKIHRVHHEYQAPIGFAAPYAHWAEILILGIPSFLGPAMVPGHMITFWLWIALRQVEAIDTHSGYDFPWNPTKYIPFYGGAEHHDYHHYVGGQSQSNFASVFTYCDYIYGTDKGFRYQKKILQKLKEDSTNGAAQNGRSYSEQENYKSE

SEQ ID NO: 131131 - DNA, 816 bp, Medicago truncatula
  CDS (1)..(816)
atggcttccatctttgaatctggttggcagtacttaatcacacattttagtgattttcaattggcatgcttgggaagtttctttctacatgaaagtgttttcttcttatctggacttccttttgtatggatcgagagggcaggttggttgagcaagtacaagattcaggcgaaaaataatagccctgaagctcaggataaatgtattgttcgcctgttgctatatcatttcggtgtcaatctacctgttatgattttttcatatcccgtcttcagatacatgggaatgcagagtagtcttcccctaccgtcctggaatataattctaactcaaataatgttttatttcattttggaggacttcatattctattggggacacaggattttgcacacaaaatggttatacaagcatatccacagtgtacatcacgagtatgcgacaccatttggacttacttcggaatatgctcatcctgccgaaatacttttccttgggtttgcaaccattgttggccctgccatcactgggccccacttgataactttgtggttatggatggttgtgagagtcttagagacagttgaggcacattgcggttaccattttccgtggagtccctcaaacttccttcccttatatggcggatctgatttccacgattatcatcatcgtttgttgtacactaagtccggaaactattcatcaacgttcacttacatggaccggatatttggaactgatgtaggatacagaaagttaaaagcattgaagagcagagaatttgaagacagttacgagcaaaagaaacaataa

SEQ ID NO: 131132 - protein, 271 aa, Medicago truncatula
MASIFESGWQYLITHFSDFQLACLGSFFLHESVFFLSGLPFVWIERAGWLSKYKIQAKNNSPEAQDKCIVRLLLYHFGVNLPVMIFSYPVFRYMGMQSSLPLPSWNIILTQIMFYFILEDFIFYWGHRILHTKWLYKHIHSVHHEYATPFGLTSEYAHPAEILFLGFATIVGPAITGPHLITLWLWMVVRVLETVEAHCGYHFPWSPSNFLPLYGGSDFHDYHHRLLYTKSGNYSSTFTYMDRIFGTDVGYRKLKALKSREFEDSYEQKKQ

SEQ ID NO: 131133 - DNA, 885 bp, Aspergillus oryzae
  CDS (1)..(885)
atgtctccttcgattccatcgagagctttcaaattcatcgaggacttgagcacctccgtacaaggtaccgacagcatggattatcaccgtggaaagctactcaactatgtggcctttcaatggtctcacatagtcaccaattactccccggaaagcattgagcttctcggtacattcgctgttcactttatcttttactggtttggttcgcttgtcttcgctctcgccgacctctatgctccttcctctattctcaagaaatacaagatccaatccatctccaagcagccttcccgccaggtcatgctccaatgcattcccagtgcccttcaaaaccagctcatcacatcagccttgcatgcgctcaaactcttggctcttcgcagtatcactggccgatttgccgggtaccgcattgagcgtaccttgccatcactactagagattataaccgatgcccccctctgctttatcggccgggactttgtctgctactatgaccatcgcattctccacctgccttggttctaccgacgcttccacaaggagcaccacaagtttacagcacctgtggctgtggcagcggagcacacacatcctgtggaccatatcctcataaatgttctgccggttgttataccggcaaccctgtttcgagtacatcttgtaacgttttggttgctcatgtcgtcaacaatcctacaggggtctctgggtcattcagggtggcatgtgcggagtatttttgataggaaaactaccagtcatgacgcacaccatgagctgtttgatgtcgaatatgggacgttgggcttgatggattggctgcacgggacaaactatatgggaaagcacaaaagtaaaggcaaagggaaggtgcattaa

SEQ ID NO: 131134 - protein, 294 aa, Aspergillus oryzae
MSPSIPSRAFKFIEDLSTSVQGTDSMDYHRGKLLNYVAFQWSHIVTNYSPESIELLGTFAVHFIFYWFGSLVFALADLYAPSSILKKYKIQSISKQPSRQVMLQCIPSALQNQLITSALHALKLLALRSITGRFAGYRIERTLPSLLEIITDAPLCFIGRDFVCYYDHRILHLPWFYRRFHKEHHKFTAPVAVAAEHTHPVDHILINVLPVVIPATLFRVHLVTFWLLMSSTILQGSLGHSGWHVRSIFDRKTTSHDAHHELFDVEYGTLGLMDWLHGTNYMGKHKSKGKGKVH

SEQ ID NO: 131135 - DNA, 912 bp, Aspergillus oryzae
  CDS (1)..(912)
atggaccaaacaatgaattcgacgctactgtcggctcccccggagacttactggggccagtttgaagagatatctaaatacaatacccatttaaatgtcctcgagaggctttggacagcatggtatgcatggatgcaaaacgatgtcctggcgactggcatcatgtcttttgttatgcacgagatagtttattttgggcgctccctgccctggatcttcatagacagtttgggcctactcaagggttataaaatccagagtaataaaattccttcattgcgcgagcaatgggattgcgcgaaatttgtactactgagccattttacagttgaactacctcagatctggctattccatcccatggctcaattctttggcctttcgacgtcggttcctttccccactttttggacaatggcctaccaaattgcaatattcttcgtgcttgaggatacatggcactacttctcgcaccgagcacttcattggggtcccctctacaaggctattcacaaaattcaccatcagtattcagccccctttggcatggcagctgaatatgcttctccgatcgaggtcatgattctcggtttcggtactgttggctgtccgatcctctggtgcgcagtaaccggcgatctgcacattttcaccatgtacgtttggattgtactacggctgttccaagctatcgatgcacacagcggttatgagtttccttggagtctccatcatttccttccattctgggcgggcgctgaccaccatgatctccaccacgagaaatttgtcggtaactactctagcagcttcaggtggtgggattaccttctagataccgagtacagcccagaggcaatcaaacgacggagggagaacaaggctggaggagacgctcggaaagaccagtga

SEQ ID NO: 131136 - protein, 303 aa, Aspergillus oryzae
MDQTMNSTLLSAPPETYWGQFEEISKYNTHLNVLERLWTAWYAWMQNDVLATGIMSFVMHEIVYFGRSLPWIFIDSLGLLKGYKIQSNKIPSLREQWDCAKFVLLSHFTVELPQIWLFHPMAQFFGLSTSVPFPTFWTMAYQIAIFFVLEDTWHYFSHRALHWGPLYKAIHKIHHQYSAPFGMAAEYASPIEVMILGFGTVGCPILWCAVTGDLHIFTMYVWIVLRLFQAIDAHSGYEFPWSLHHFLPFWAGADHHDLHHEKFVGNYSSSFRWWDYLLDTEYSPEAIKRRRENKAGGDARKDQ

SEQ ID NO: 131137 - DNA, 885 bp, Aspergillus oryzae
  CDS (1)..(885)
atggagtccttcaattctactactgcccttccccaaatggcttcatatacagacctcatcaagctggcccatcaaaaccccaacctgtccagcatggaaaacctctgggaggcttactactcctattggaacaatgatatcctcgccacaggaattatcaccttcatcgcccatgaactaatttacttcggccgctgcctcccatggatcatcgcggacgcaatgccaggtactttcaaccgatggaggatacaagatcacaaagcaccaccctcagtagccacccaatgggactgcactaagtatatactcgccatccacttcatcgtcgaacttcctctcattgtcctctttcaccccatgatggacctctgcggcctcaaatatgcttcccccttcccagacctcaaaactctagccgcccaacttgccatcttcttcattgttgaagacacctaccactactggttacaccgtgctttccattggggccctctctaccgctccatccaccgcatccaccaccaatacgcgactcctttcggtctcacggccgaatacgccagcccctgggaaaccctcctactcggtcttggcacgatcgccccaccactcgtcctgggctatttcacagagaacgtccatctgatcaccgtgttggtatggatgggtctgcgccaagtacaggctatcgactcgcactcgggatatgatttcccctggagcttgagacggatcatgccgttctggggcggagctgactggcatgatgatcatcatcgttactttgtgggtaattactcgagctcgttccgctattgggatatcttgatgggtaccgttgctggccctaagaatgggcgtgagcatagacgtcgtaattag

SEQ ID NO: 131138 - protein, 294 aa, Aspergillus oryzae
MESFNSTTALPQMASYTDLIKLAHQNPNLSSMENLWEAYYSYWNNDILATGIITFIAHELIYFGRCLPWIIADAMPGTFNRWRIQDHKAPPSVATQWDCTKYILAIHFIVELPLIVLFHPMMDLCGLKYASPFPDLKTLAAQLAIFFIVEDTYHYWLHRAFHWGPLYRSIHRIHHQYATPFGLTAEYASPWETLLLGLGTIAPPLVLGYFTENVHLITVLVWMGLRQVQAIDSHSGYDFPWSLRRIMPFWGGADWHDDHHRYFVGNYSSSFRYWDILMGTVAGPKNGREHRRRN

SEQ ID NO: 131139 - DNA, 783 bp, Aspergillus oryzae
  CDS (1)..(783)
atggatctccactcccaactgcaggccgcctgggaccatgttagaacaacatacaaaccaggcacaatcgaactgacgggggtgatcgtaactcagatcgtcggatttatcatcccagcaacactctatatgctgatcgatgtcctgttcccgaagttctcccagcgccacaagattcagaacatccgccgacaacctacccgccagcaaatcctgcactgcgttcaggttacgatgcttaaccacgtttgggtagtggccttgtacgcactactcgtttatcttaccgggttagactatgcttttacgaaccaagatccggtcgtccctccttggaaaacgtttatcgtggacttcaccttcggccttctagcgcgagaaatatcattctactatgtccaccgtgctctgcatcaccccagcatctacgcatatattcataagatgcaccataaatacacagcacccgtggcgtttgcagcggagtacgcccatcctgttgaacatattctcgcaaatatcctgccgctcacgctcccgctctatctcaaaggcgcacactttttgtccatcgttttcttttttgtctttgagctctgggaagctgcagctgaccacagcgggtatgacttcttgaaactgccaccggctgagctgcatgacttgcatcatgagaaatttcgcgtgaattatgggactattgggttaatggactggattcatgggactgatgttgtggggtgggataggcctaaggcgaggaaggtgaagattgctgaatga

SEQ ID NO: 131140 - protein, 260 aa, Aspergillus oryzae
MDLHSQLQAAWDHVRTTYKPGTIELTGVIVTQIVGFIIPATLYMLIDVLFPKFSQRHKIQNIRRQPTRQQILHCVQVTMLNHVWVVALYALLVYLTGLDYAFTNQDPVVPPWKTFIVDFTFGLLAREISFYYVHRALHHPSIYAYIHKMHHKYTAPVAFAAEYAHPVEHILANILPLTLPLYLKGAHFLSIVFFFVFELWEAAADHSGYDFLKLPPAELHDLHHEKFRVNYGTIGLMDWIHGTDVVGWDRPKARKVKIAE

SEQ ID NO: 131141 - DNA, 930 bp, Saccharomyces cerevisiae
  CDS (1)..(930)
atgtctgccgttttcaacaacgctaccctttcaggtctagtccaagcaagcacctactcacaaactttgcaaaatgtcgcccattaccaacctcaattgaatttcatggagaaatactgggccgcatggtacagttacatgaacaatgatgttttggccaccggtctaatgttctttttattgcatgaatttatgtatttctttagatgtttgccatggttcatcatcgaccaaattccatactttagaagatggaagttacaaccaactaagattccaagtgctaaggaacaactatactgtttgaaatccgttcttctatctcatttcttggtcgaggccatccctatctggaccttccacccaatgtgtgaaaaattaggtattactgtcgaagttccattcccatctttgaaaacaatggctctagaaattggtctattcttcgtcttggaagatacatggcattactgggctcaccgtctattccactacggtgtcttctacaagtacattcacaagcaacatcacagatacgctgctccattcggtctttctgctgaatatgctcatcctgctgaaactttgtctttgggttttggtaccgttggtatgccaattctttacgtcatgtacactggtaaattacacttgttcactctatgtgtatggatcaccctaagattattccaagctgttgactctcattctggttatgacttcccatggtctttgaacaagatcatgccattctgggctggcgctgaacaccacgatttgcatcatcactactttattggtaactacgcttcctctttcagatggtgggattactgtctagacactgaatctggtccagaagctaaggcctccagagaagaaagaatgaagaagagagctgaaaaaaatgctcaaaagaagactaactaa

SEQ ID NO: 131142 - protein, 309 aa, Saccharomyces cerevisiae
MSAVFNNATLSGLVQASTYSQTLQNVAHYQPQLNFMEKYWAAWYSYMNNDVLATGLMFFLLHEFMYFFRCLPWFIIDQIPYFRRWKLQPTKIPSAKEQLYCLKSVLLSHFLVEAIPIWTFHPMCEKLGITVEVPFPSLKTMALEIGLFFVLEDTWHYWAHRLFHYGVFYKYIHKQHHRYAAPFGLSAEYAHPAETLSLGFGTVGMPILYVMYTGKLHLFTLCVWITLRLFQAVDSHSGYDFPWSLNKIMPFWAGAEHHDLHHHYFIGNYASSFRWWDYCLDTESGPEAKASREERMKKRAEKNAQKKTN

SEQ ID NO: 131143 - DNA, 1469 bp, Arabidopsis thaliana
  CDS (114)..(1010)
ccaaaacactctcctgtgacttctcttctcttcttctctctcgatctcttccccaaaaatcttcagatctctacatcaccggagagacgagaaacactcaccgtgagaaaaccatgattccttacgctacagtcgaagaagcttcaatcgcactgggacgaaacctcacacgtctcgaaactctatggttcgattactccgccacgaagtccgattactatctctactgtcacaacattttgttcttgttcctcgtcttctctctcgttcctctccctctcgttttcgtcgaattggctcgatctgcttctggtttgtttaatcggtataagatccagcctaaggttaattactctttatctgatatgttcaaatgttacaaagacgtcatgacgatgtttatcctcgtcgttggtccattgcaactcgtttcttatccttcgattcagatgattgagatacgatctggattaccattaccaacaattacagagatgctgtcacagttagtagtctacttcttgatagaagaatacactaactactgggttcatagattctttcatagtaaatggggatacgataagattcatcgagttcatcacgagtacacagctcctataggatatgctgctccttatgcacattgggctgaagttttgcttctcggaatcccgacgtttatgggaccagctattgctcctggtcatatgataaccttttggttgtggattgctttaaggcaaatggaagctattgagactcacagtggatatgattttccatggagtccaacaaaatacatccctttctacggtggtgctgagtaccatgactatcatcactacgttggaggacaaagtcaaagcaacttcgcttcagtgttcacgtactgtgattacatttatggaactgacaagggttacagattccaaaagaagcttcttgagcagatcaaggagtcgtcgaagaagagcaacaagcataacggaggaataaaatccgattagtaaaaaccggagaagaagattttaacctttcaaagaatagctaagcatgcactactacaagttacgtagtcagcttcacgaaaagagaaagggagtggattgaaatttcgggtgtgtctctcttatgtcatcagagttgttactaactaccttctttctttagttcacatgaaaaatgctctgcttccgacatgtgggtcattgatgtataagtgtgtcggaactgggttttgctctctgtcattttttaatatttatgtttcgtcgtcttgaagaaagaagatgtcgtcaaaaaaaaaaaaaaaaccccttcaaaaacaattttaccaaaaaaaaatatctgaaaaatttccaaaaccaccaaaaatgccttccaacccggtcaggccgctggcaaaactaaagaaaaaaacaattttctgcctggacaggccaagggatgcctgctgctgcactgga

SEQ ID NO: 131144 - protein, 298 aa, Arabidopsis thaliana
MIPYATVEEASIALGRNLTRLETLWFDYSATKSDYYLYCHNILFLFLVFSLVPLPLVFVELARSASGLFNRYKIQPKVNYSLSDMFKCYKDVMTMFILVVGPLQLVSYPSIQMIEIRSGLPLPTITEMLSQLVVYFLIEEYTNYWVHRFFHSKWGYDKIHRVHHEYTAPIGYAAPYAHWAEVLLLGIPTFMGPAIAPGHMITFWLWIALRQMEAIETHSGYDFPWSPTKYIPFYGGAEYHDYHHYVGGQSQSNFASVFTYCDYIYGTDKGYRFQKKLLEQIKESSKKSNKHNGGIKSD

SEQ ID NO: 131145 - DNA, 955 bp, Aster tripolium
  CDS (46)..(939)
ttggttgctgtgcctggatcttcatttcttcggcgggcatcccaaatgttgccttactcctccttgcaagaggctgaagcagccatgggtcgatctctcacctttgcggaaaccttgtggttcaactactctgccaacaagtccgactacgtcctctactgccacaacattcccttaattttcttcctcaccactttcttacccatcgtgtacgtggttatcgaattcctcttccctgattatgcagcctcttacaaaattcaacccaagattaaagtttctttatatgagaacttcaaagtttacttgggtgtaatgcgaacgttcttcctcctggttgcacccatactgctcgcctctcatccttctgtacaaatgattggtattcgaacaagcttgcccttaccctcactattggagattgcatctcaattgctggtctactttcttattgaggactacaccaactattggatccatagattctttcattgcaagtggatgtataacaatattcatgttgttcatcatgaatacacagcaccaaccgggtttgctacacagcatgcacactggtttagatattggtgtttgggtattccatctttcttgggcccttctattgctccgggccacatggttaccttcttgttgtggcttgctttgaggcagtttgaggcgatagagaatcacagtggatacgactttccatggacatataaaaaattcatcccattctctgctggggccgaatatcatgactatcaccattatgttggagaaaagagccagagcaacttttggcaccccatctttacttactgtgactacctatatggaacagacaagggatacaggaaccggaagaaacttctggcgcagcaggaaagatggtcaaaaagcgagggtaagcgtgcaaaaggggaacatatgcgatgaaacaggtaataaaaaa

SEQ ID NO: 131146 - protein, 297 aa, Aster tripolium
MLPYSSLQEAEAAMGRSLTFAETLWFNYSANKSDYVLYCHNIPLIFFLTTFLPIVYVVIEFLFPDYAASYKIQPKIKVSLYENFKVYLGVMRTFFLLVAPILLASHPSVQMIGIRTSLPLPSLLEIASQLLVYFLIEDYTNYWIHRFFHCKWMYNNIHVVHHEYTAPTGFATQHAHWFRYWCLGIPSFLGPSIAPGHMVTFLLWLALRQFEAIENHSGYDFPWTYKKFIPFSAGAEYHDYHHYVGEKSQSNFWHPIFTYCDYLYGTDKGYRNRKKLLAQQERWSKSEGKRAKGEHMR

SEQ ID NO: 131147 - DNA, 900 bp, Arabidopsis thaliana
  CDS (1)..(900)
atgatcccatacgcaacaatcgaagaagcgtcgatcgcattatctcggaacctcacatggctagagactctctggttcgattactccgccaccaaatccgattactacctctactgccacaacattctcttcctcttcctcatcttctctctcgttcctctccctctcgttttcatcgaatcatctcaatccacctcagatttgttcaatcgctacaaaatccaaccaaaagtgaaaaactcattctcatcgatgttcaaatgttacaaagacgtcatgaagatgtccatcctcgtcgttggtccattacaactcgtttcttatccttcgattcagatgattgagatacgaagtggattaccattaccatcatgtatggagattgtagcacagttagtggtttacttcttggtagaggattatactaattactgggttcatagattctttcattgtaaatggggttatgagaagtttcatcatattcatcatgagtatacagctcctattggttatgctgctccttatgctcattgggctgaggttttgcttcttggcattcccacgtttcttggacctgctattgctcctggtcatatgattaccttttggttgtggattgctttacgacagattgaggctatcgaaactcatagcggatatgatttcccatggtctctgacaaagtacattccattttatggtggagctgagtatcatgattaccatcactacgttggaggacaaagccagagtaactttgcttcagtttttacttactgcgattacatctatggaactgataaaggttaccgattccagaagaagcttcttcagcagatgaaggagaagtccaagaagagcaacaagctggttaatggaggagagaaattcgattag

SEQ ID NO: 131148 - protein, 299 aa, Arabidopsis thaliana
MIPYATIEEASIALSRNLTWLETLWFDYSATKSDYYLYCHNILFLFLIFSLVPLPLVFIESSQSTSDLFNRYKIQPKVKNSFSSMFKCYKDVMKMSILVVGPLQLVSYPSIQMIEIRSGLPLPSCMEIVAQLVVYFLVEDYTNYWVHRFFHCKWGYEKFHHIHHEYTAPIGYAAPYAHWAEVLLLGIPTFLGPAIAPGHMITFWLWIALRQIEAIETHSGYDFPWSLTKYIPFYGGAEYHDYHHYVGGQSQSNFASVFTYCDYIYGTDKGYRFQKKLLQQMKEKSKKSNKLVNGGEKFD

SEQ ID NO: 131149 - DNA, 810 bp, Gossypium arboreum
  CDS (1)..(810)
atggctgccattattgaatctgggtggctgtatctgatcacgcatttcagtgacttccaactagcaagtctaggaagtttctttcttcacgaaagtgttttcttcttatccggacttccatttatatatctggaaagagctggattgttgagcaaatacaagattcagacgaaaaacaacagccttgctgctcaggaaaaatgtatcacccgcctgcttctgtatcacattggtgtcaaccttccgcttatgattgcatcttatcctttcttcagattcatgggcatgaaaagtagtctgccatttccatcctggaaagtggttctgtcacagataatattctatttcatcctggaggattttgtgttttactggggacatcgtattttacatacaaaatggctgtacaagcatgtgcacagtgttcatcatgagtatgctactccatttggactgacatccgagtatgctcaccctgccgagatattgttccttggctttgcaacaataattggtccagccatcactggcccacatcttattactctctggttatggatgactcttagagtcctagagacagttgaggcacattgtggttaccattttccatggagcctctcaaactttctacctttatatgggggtgctgattttcatgactatcatcatcgtttgctttatacaaaatctggcaactactcatctacatttgtttacatggactggatattcggtactgacaagggttacagaaaattgaaagcactaaagcgcgatggagtcgaagaagaagcaaagcaaacataa

SEQ ID NO: 131150 - protein, 269 aa, Gossypium arboreum
MAAIIESGWLYLITHFSDFQLASLGSFFLHESVFFLSGLPFIYLERAGLLSKYKIQTKNNSLAAQEKCITRLLLYHIGVNLPLMIASYPFFRFMGMKSSLPFPSWKVVLSQIIFYFILEDFVFYWGHRILHTKWLYKHVHSVHHEYATPFGLTSEYAHPAEILFLGFATIIGPAITGPHLITLWLWMTLRVLETVEAHCGYHFPWSLSNFLPLYGGADFHDYHHRLLYTKSGNYSSTFVYMDWIFGTDKGYRKLKALKRDGVEEEAKQT

SEQ ID NO: 131151 - DNA, 795 bp, Zea mays
  CDS (1)..(795)
atgtcagccatcgactcagcgtggcagctcctgatcgccaacttcaccgagttccagctcgccaccgtcgtcaccttcctgctccacgagaccgtcttcttcctctccggcctcccctccctcctcttcgagcgcttcggactcttcgccaagtacaagatccagaagaagagcaacacctctgcttaccaaaacagatgtgtcttgcgcctcattctctaccatgtatgtgtgaacctgcctgtcatgattttctcgtatcctgccttcaaattcatgggtctcaggagctctcttcctttgccacattggtcggttgttgtatctcaagttcttttctactttgtccttgaggattttatattctattgggggcacagggcattgcatacgaaatggctatacaaacacgttcacagcgtccaccacgagtacgccacaccctttggtttaacatcggaatatgcccacccagctgaaattttgttcctgggattcgccacagttgttggtcctgctcttactggccctcatctcttcaccctgtggctgtggatggtgttgagggttttggagacagttgaagctcacagcggctatcacttcccatggagcccatcaaatttcctgccgctgtatggcggctcggacttccatgactaccatcaccgtgtgctgtacacaaagtcagggaactatgcctcaacatttgtttacatggactggttgttcggcacggacaaggattatcgcaaggcaaagaccattgaggagaaagaagggaaaaatctgtag

SEQ ID NO: 131152 - protein, 264 aa, Zea mays
MSAIDSAWQLLIANFTEFQLATVVTFLLHETVFFLSGLPSLLFERFGLFAKYKIQKKSNTSAYQNRCVLRLILYHVCVNLPVMIFSYPAFKFMGLRSSLPLPHWSVVVSQVLFYFVLEDFIFYWGHRALHTKWLYKHVHSVHHEYATPFGLTSEYAHPAEILFLGFATVVGPALTGPHLFTLWLWMVLRVLETVEAHSGYHFPWSPSNFLPLYGGSDFHDYHHRVLYTKSGNYASTFVYMDWLFGTDKDYRKAKTIEEKEGKNL

SEQ ID NO: 131153 - DNA, 855 bp, Oryza sativa subsp
  CDS (1)..(855)
atgctcccgtacgcgacggcggcggaggcggaggcggcggttgggcggggcctgacgtgggcggaggcggcctggttccgctactcggcggccatcccggactactgcctctactgccacaacgtccccatcctcctcctcgtctacaccctcgcgccgctccccctcgcgctgctcgagctccgccgccacctgccgctgccgcacaagctgcagcccggcgtgcgccacccgccggccgccttcctccggtgctacgctgccaccgcgcgcgtgctgctcctcgccgtcgggccggtccagctggcgtcgttccctgcggtgagggcggtggggatacggacggggctgccgctgccgtcggcgggggagacggcggcgcaggtggcggtgtacctgctggtggaggactacctgggctactggatccaccgcctgctgcacacgccgtgggcctaccaccacatccaccgagtccaccacgagttcaccgcgcccatgggctacgccgccccgtacgcccactgggccgagatcctcatcctcggcttcccggccttcgccggcccagccatcgtgccgtgccacatgaccaccttctggctctggttcgtgcttcgccacctcgaggccatccacatccacagcgggttcaagttgccgttcgatccgaccaagtatatcccgttgtatggaggagtggagtaccatgactaccaccatttcgtgggaggacacagccagagcaacttctcttctgtcttcactttctgtgattacatctacgggactgacagaggctacagataccataaggcaagcttgtcaaagatgagaatatttgttagagcttag

SEQ ID NO: 131154 - protein, 284 aa, Oryza sativa subsp
MLPYATAAEAEAAVGRGLTWAEAAWFRYSAAIPDYCLYCHNVPILLLVYTLAPLPLALLELRRHLPLPHKLQPGVRHPPAAFLRCYAATARVLLLAVGPVQLASFPAVRAVGIRTGLPLPSAGETAAQVAVYLLVEDYLGYWIHRLLHTPWAYHHIHRVHHEFTAPMGYAAPYAHWAEILILGFPAFAGPAIVPCHMTTFWLWFVLRHLEAIHIHSGFKLPFDPTKYIPLYGGVEYHDYHHFVGGHSQSNFSSVFTFCDYIYGTDRGYRYHKASLSKMRIFVRA

SEQ ID NO: 131155 - DNA, 1299 bp, Arabidopsis thaliana
  CDS (120)..(1019)
aaaaatccaacaacaacgacgacactctcctctctcactctctctctcaatctcaatctcaatctcacgtcaacgaccgtcgccgtcaccggaaggaaacgatttcatcatcttctacaatgatcccatacgcaacaatcgaagaagcgtcgatcgcattatctcgaaacctcacatggctagagactctctggttcgattactccgccaccaaatctgattactacctctactgccacaacattctcttcctcttcctcatcttctctctcgttcctctccctctcgttctcatcgaatcagctcaatccacctcagatttgttcaatcgctacaaaatccaaccaaaagtgaaaaactcgttctcatcgatgttgaaatgttacaaagacgtcatgaagatgttcatcctcgtcgttggtccattacaactcgtttcttatccttcgattcagatgattgagatacgaagtggattaccattaccatcatgtatggagattgtagcacagtttgtggtttacttcttggtagaggattatactaattactgggttcatagattctttcattgtaaatggggttatgagaagtttcatcatattcatcatgagtatacagctcctattggttatgctgctccttatgctcattgggctgaggttttgcttcttggcattcccacgtttcttggacctgctattgctcctggtcatatgattaccttttggttgtggattgctttacgacagattgaggctatcgaaactcatagcggatatgatttcccatggtctctgacaaagtacattccattttatggtggagctgagtatcatgattaccatcactacgttggaggacaaagccagagtaactttgcttcagtttttacttactgcgattacatctatggaactgataaaggttaccgattccagaagaagcttcttcagcagatgaaggagaagtccaagaagagcaacaagctggttaatggaggagagaaattcgattagtaaatctaaaacccctcgcgaggttgacttaccgtaagtttcaagcattctacaaatgtagtcaatacttaaaaatgaaagggtagttagttttctcttttctggtcttccctgtgtcacatgaaaatgctcgtgacgagttcctatctgaagttttttttaaaactcttttggaattggtgtgtgtcaataaatcctttttgtatattttaaatgttacataatgcattcattggcttgtaacaagttcctactctgatagtattaagttaagttaagt

SEQ ID NO: 131156 - protein, 299 aa, Arabidopsis thaliana
MIPYATIEEASIALSRNLTWLETLWFDYSATKSDYYLYCHNILFLFLIFSLVPLPLVLIESAQSTSDLFNRYKIQPKVKNSFSSMLKCYKDVMKMFILVVGPLQLVSYPSIQMIEIRSGLPLPSCMEIVAQFVVYFLVEDYTNYWVHRFFHCKWGYEKFHHIHHEYTAPIGYAAPYAHWAEVLLLGIPTFLGPAIAPGHMITFWLWIALRQIEAIETHSGYDFPWSLTKYIPFYGGAEYHDYHHYVGGQSQSNFASVFTYCDYIYGTDKGYRFQKKLLQQMKEKSKKSNKLVNGGEKFD

SEQ ID NO: 131157 - DNA, 1441 bp, Arabidopsis thaliana
  CDS (148)..(1044)
accaaaaacattcgccaactatacacataacaaaagaaaacactctcttgtgacttctcttctcttcttctctctcgatctcttccccaaaaatcttcagatctctacatcaccggagagacgagaaacactcaccgtgagaaaaccatgattccttacgctacagtcgaagaagcttcaatcgcactgggacgaaacctcacacgtctcgaaactctatggttcgattactccgccacgaagtccgattactatctctactgtcacaacattttgttcttgttcctcgtcttctctctcgttcctctccctctcgttttcatcgaattggctcgatctgcttctggtttgtttaatcggtataagatccagcctaaggttaattactctttatctgatatgttcaaatgttacaaagacgtcatgacgatgtttatcctcgtcgttggtccattgcaactcgtttcttatccttcgattcagatgattgagatacgatctggattaccattaccaacaattacagagatgctgtcacagttagtagtctacttcttgatagaagactacactaactactgggtacatagattctttcatagtaaatggggatacgataagattcatcgagttcatcacgagtacacagctcctataggatatgctgctccttatgcacattgggctgaagttttgcttctcggaatcccgacgtttatgggaccagctattgctcctggtcatatgataaccttttggttgtggattgctttaaggcaaatggaagctattgagactcacagtggatatgattttccatggagtccaacaaaatacatccctttctacggtggtgctgagtaccatgactatcatcactacgttggaggacaaagtcaaagcaacttcgcttcagtgttcacgtactgtgattacatttatggaactgacaagggttacagattccaaaagaagcttcttgagcagatcaaggagtcgtcgaagaagagcaacaagcataacggaggaataaaatccgattagtaaaaaccggagaagaagattttaacctttcaaagaatagctaagcatgcactactacaagttacgtagtcagcttcacgaaaagagaaagggagtggattgaaatttcgggtgtgtctctcttatgtcatcagagttgttactaactaccttctttctttagttcacatgaaaaatgctctgcttccgacatgtgggtcattgatgtataagtgtgtcggaactgggttttgctctctgtcattttttaatatttatgtttcgtcgtcttgaagaaagaagatgtcgtcatcaaagtcttgtttgtctttcatagtaagagaccttgttcgtaaatcacctctttggtaacttaccacttaggttaagggtaatattatatactggttgtctaacc

SEQ ID NO: 131158 - protein, 298 aa, Arabidopsis thaliana
MIPYATVEEASIALGRNLTRLETLWFDYSATKSDYYLYCHNILFLFLVFSLVPLPLVFIELARSASGLFNRYKIQPKVNYSLSDMFKCYKDVMTMFILVVGPLQLVSYPSIQMIEIRSGLPLPTITEMLSQLVVYFLIEDYTNYWVHRFFHSKWGYDKIHRVHHEYTAPIGYAAPYAHWAEVLLLGIPTFMGPAIAPGHMITFWLWIALRQMEAIETHSGYDFPWSPTKYIPFYGGAEYHDYHHYVGGQSQSNFASVFTYCDYIYGTDKGYRFQKKLLEQIKESSKKSNKHNGGIKSD

SEQ ID NO: 131159 - DNA, 801 bp, Arabidopsis thaliana
  CDS (1)..(801)
atggcttccttcgtggaatctggttggcagtaccttgtgacacattttagcgactttcaactggcatgtattgggagttttctcttccatgaaagcgtgtttttcttatctggactccctttcatttttcttgaaaggcaaggctttctcagcaagtacaaaattcagacaaaaaataacacacctgcagcccaaggaaaatgtattactcgcctgttgctttatcatttctccgtaaacttgcccctgatgttggcctcctaccctgtcttccgagccatgggaatgcgaagcagttttcctctgccgtcctggaaagaagtgtctgcccagatattattctactttatcattgaggattttgtcttctattggggtcatcggatcttgcattcaaaatggctgtacaagaacgtgcatagtgtgcatcatgaatatgccacaccatttggtttgacatcagaatatgctcaccccgctgagattctatttctgggttttgctaccatagtcggtccagctcttactggccctcacctaattactctctggttatggatggtgttgagagtgctggagacagttgaggcacattgtggttatcatttcccatggagcctctcaaattttcttcctctgtatggaggtgctgacttccatgactaccatcaccgactgctatacacaaagtccggaaactactcttcaacttttgtgtatatggactggatctttggtactgacaaggggtacagaagactgaagacccttaaagaaaacggtgacatgaaacaaacgtga

SEQ ID NO: 131160 - protein, 266 aa, Arabidopsis thaliana
MASFVESGWQYLVTHFSDFQLACIGSFLFHESVFFLSGLPFIFLERQGFLSKYKIQTKNNTPAAQGKCITRLLLYHFSVNLPLMLASYPVFRAMGMRSSFPLPSWKEVSAQILFYFIIEDFVFYWGHRILHSKWLYKNVHSVHHEYATPFGLTSEYAHPAEILFLGFATIVGPALTGPHLITLWLWMVLRVLETVEAHCGYHFPWSLSNFLPLYGGADFHDYHHRLLYTKSGNYSSTFVYMDWIFGTDKGYRRLKTLKENGDMKQT

SEQ ID NO: 131161 - DNA, 786 bp, Arabidopsis thaliana
  CDS (1)..(786)
atgtggttgatgcagtaccttgtgacacattttagcgactttcaactggcatgtattgggagttttctcctccatgaaagcgtgtttttcttatctggactccctttcatttttcttgaaaggcaaggctttctcagcaagtacaaaattcagacaaaaaataacacacctgcagcccaaggaaaatgtattactcgcctgttgctttatcatttctccgtaaacttgcccctgatgttggcctcctaccctgtcttccgagccatgggaatgcgaagcagttttcctctgccgtcctggaaagaagtgtctgcccagatattattctactttatcattgaggattttgtcttctattggggtcatcggatcttgcattcaaaatggctgtacaagaacgtgcatagtgtgcatcatgaatatgccacaccatttggtttgacatcagaatatgctcaccccgctgagattctatttctgggttttgctaccatagtcggtccagctcttactggccctcacctaattactctctggttatggatggtgttgagagtgctggagacagttgaggcacattgtggttatcatttcccatggagcctctcaaattttcttcctctgtatggaggtgctgacttccatgactaccatcaccgactgctatacacaaagtccggaaactactcttcaacttttgtgtatatggactggatctttggtactgacaaggggtacagaagactgaagacccttaaagaaaacggtgacatgaaacaaacgtga

SEQ ID NO: 131162 - protein, 261 aa, Arabidopsis thaliana
MWLMQYLVTHFSDFQLACIGSFLLHESVFFLSGLPFIFLERQGFLSKYKIQTKNNTPAAQGKCITRLLLYHFSVNLPLMLASYPVFRAMGMRSSFPLPSWKEVSAQILFYFIIEDFVFYWGHRILHSKWLYKNVHSVHHEYATPFGLTSEYAHPAEILFLGFATIVGPALTGPHLITLWLWMVLRVLETVEAHCGYHFPWSLSNFLPLYGGADFHDYHHRLLYTKSGNYSSTFVYMDWIFGTDKGYRRLKTLKENGDMKQT

SEQ ID NO: 131163 - DNA, 912 bp, Arabidopsis thaliana
  CDS (1)..(912)
atgattccttacgctacagtcgaagaagcttcaatcgcactgggacgaaacctcacacgtctcgaaactctatggttcgattactccgccacgaagtccgattactatctctactgtcacaacattttgttcttgttcctcgtcttctctctcgttcctctccctctcgttttcgtcgaattggctcgatctgcttctggtttgtttaatcggtataagatccagcctaaggttaattactctttatctgatatgttcaaatgttacaaagacgtcatgacgatgtttatcctcgtcgttggtccattgcaactcgtttcttatccttcgattcagatgattgagatacgatctggattaccattaccaacaattacagagatgctgtcacagttagtagtctacttcttgatagaagactacactaactactgggtacatagattctttcatagtaaatggggatacgataagattcatcgagttcatcacgagtacacagctcctataggatatgctgctccttatgcacattgggctgaagttttgcttctcggaatcccgacgtttatgggaccagctattgctcctggtcatatgataaccttttggttgtggattgctttaaggcaaatggaagctattgagactcacagtggatatgattttccatggagtccaacaaaatacatccctttctacggtggtgctgagtaccatgactatcatcactacgttggaggacaaagtcaaagcaacttcgcttcagtgttcacgtactgtgattacatttatggaactgacaagatgtggctatatcagggttacagattccaaaagaagcttcttgagcagatcaaggagtcgtcgaagaagagcaacaagcataacggaggaataaaatccgattag

SEQ ID NO: 131164 - protein, 303 aa, Arabidopsis thaliana
MIPYATVEEASIALGRNLTRLETLWFDYSATKSDYYLYCHNILFLFLVFSLVPLPLVFVELARSASGLFNRYKIQPKVNYSLSDMFKCYKDVMTMFILVVGPLQLVSYPSIQMIEIRSGLPLPTITEMLSQLVVYFLIEDYTNYWVHRFFHSKWGYDKIHRVHHEYTAPIGYAAPYAHWAEVLLLGIPTFMGPAIAPGHMITFWLWIALRQMEAIETHSGYDFPWSPTKYIPFYGGAEYHDYHHYVGGQSQSNFASVFTYCDYIYGTDKMWLYQGYRFQKKLLEQIKESSKKSNKHNGGIKSD

SEQ ID NO: 131165 - DNA, 1148 bp, Nicotiana tabacum
  CDS (127)..(942)
gcacgagaaaaggctttgttattttctcccatctgtctttttctcaattttccttgttttcttctccgaaccatccccatcggaatctgcttaaacccttttgaccatacgtcgtcgtttcggaacatggacgactacctgaatttattcatagaggagacatcgttttacaatcgggtggttttaggtacattcttaccggaatcatggtggggtccacttcctcattggtttcagggttggctcaggaattacattggtggggtgttactttactttatatctggttttctttggtgcttctacatctatcgcctgaagcgcaatgtctatatccctaaagatgccatcccttcaaatagagctatgctcttgcaaataggagttgccatgaaagctatgccattttattgtgctcttccgtcactttctgagtatatgattgtaaatgggtggacaaaatgtttctcaagaattagcgacgttggatggctttcctaccttatttatatggcagtttatttggtaatagtagaattcggcatttactggatgcatcgcgagttgcatgacataaaacttctgtacaaatatctccatgctacacatcatatttacaacaagcaaaatacactctccccatttgctggtttggcgttccacccattggatggaatactgcaggcagtgccacatgtagtagctcttttcctgttgcctgaacattttacgacacacatagctctcttattcatcgaagccatatggactgcaaatatccatgactgcaaacatgcgaaggtgtggccagttatgggtgctggctaccataccatccaccatactacgtaccggcataattatggtcattacacaatatggatggactggatgttcggaacacttcgtgatcctgtagaagatgaggtcaagaaaatgtaacattcttctctgcaaccaacggtctcgttgtttgttttcctagttattaggctgcccctgtggctggtgcttcattaagagttctgtcttgtgtgcatttcgtggatgtaaattttattattggtagtttttcaagttgtagactgaaaacaattatgctagaaaaaaaaaatgtgttatggtcccaaaaaaaaaaaaaaaaaaaa

SEQ ID NO: 131166 - protein, 271 aa, Nicotiana tabacum
MDDYLNLFIEETSFYNRVVLGTFLPESWWGPLPHWFQGWLRNYIGGVLLYFISGFLWCFYIYRLKRNVYIPKDAIPSNRAMLLQIGVAMKAMPFYCALPSLSEYMIVNGWTKCFSRISDVGWLSYLIYMAVYLVIVEFGIYWMHRELHDIKLLYKYLHATHHIYNKQNTLSPFAGLAFHPLDGILQAVPHVVALFLLPEHFTTHIALLFIEAIWTANIHDCKHAKVWPVMGAGYHTIHHTTYRHNYGHYTIWMDWMFGTLRDPVEDEVKKM

SEQ ID NO: 131167 - DNA, 903 bp, Schizosaccharomyces pombe
  CDS (1)..(903)
atgaatactacttctgaagttattgttggcacaggctttcaagccatccgccaacaacttgctcaaatgcatcccgaactaaattttgtcgagcaattatggctcgcttactataagtggtttgacaacgatgttgttgctactggccttatgtccttccttcttcacgaacttatctacttcggtcgttgcattccttggatgattatcgatgccatgccctacttccgccgctggaaaatccaacccaagaaagttcccacccttgctgaacaatgggagtgcacacgcttggttcttctttctcattttaccgtggagcttcctcaaatctggctctttgaccctatgtgcgctacctttggtctttctacctctgttcccttccctcctgtcactaaaatgatttggcaaattaccctgttcttcttcctcgaagacacttggcattactgggctcatcgccttttccactatggtattttctatcgtttcattcacaaagttcaccaccgctacagtgcaccttttggtctttctgctgaatatgctcatccattggagatcatccttttgggtgccggtaccgtctttgttcctttgatgtggtgttacttcacccatgatttgcacttggtcaccatgtatatttggatcacccttcgtctattccaagcagtcgattctcatgctggctacgacttcccttggtctttgaacaaattccttcccatttgggcaggtgctgatcaccacgattatcaccatatggctttcaaggataacttctctagctctttccgctggtgggatgctgtccttaagactgatcagaactaccatcaattcaaagcccgtcgtcttgctgccaaatatgaggctgaaagcaaaaaggctaaataa

SEQ ID NO: 131168 - protein, 300 aa, Schizosaccharomyces pombe
MNTTSEVIVGTGFQAIRQQLAQMHPELNFVEQLWLAYYKWFDNDVVATGLMSFLLHELIYFGRCIPWMIIDAMPYFRRWKIQPKKVPTLAEQWECTRLVLLSHFTVELPQIWLFDPMCATFGLSTSVPFPPVTKMIWQITLFFFLEDTWHYWAHRLFHYGIFYRFIHKVHHRYSAPFGLSAEYAHPLEIILLGAGTVFVPLMWCYFTHDLHLVTMYIWITLRLFQAVDSHAGYDFPWSLNKFLPIWAGADHHDYHHMAFKDNFSSSFRWWDAVLKTDQNYHQFKARRLAAKYEAESKKAK

SEQ ID NO: 131169 - DNA, 1440 bp, Saccharomyces cerevisiae
  CDS (187)..(1116)
tctatataatatataatacaggaggatctattcttttttttcttcttctcttcttctctcccttttttctctctcttcgtttctttccttccagtaaatctttatattagttgtaactttttctctttagatagtagcatagaggactaaggaaaagtagtacagccataaaaaaaagaggaaaagatgtctgccgttttcaacaacgctaccctttcaggtctagtccaagcaagcacctactcacaaactttgcaaaatgtcgcccattaccaacctcaattgaatttcatggagaaatactgggccgcatggtacagttacatgaacaatgatgttttggccaccggtctaatgttctttttattgcatgaatttatgtatttctttagatgtttgccatggttcatcatcgaccaaattccatactttagaagatggaagttacaaccaactaagattccaagtgctaaggaacaactatactgtttgaaatccgttcttctatctcatttcttggtcgaggccatccctatctggaccttccacccaatgtgtgaaaaattaggtattactgtcgaagttccattcccatctttgaaaacaatggctctagaaattggtctattcttcgtcttggaagatacatggcattactgggctcaccgtctattccactacggtgtcttctacaagtacattcacaagcaacatcacagatacgctgctccattcggtctttctgctgaatatgctcatcctgctgaaactttgtctttgggttttggtaccgttggtatgccaattctttacgtcatgtacactggtaaattacacttgttcactctatgtgtatggatcaccctaagattattccaagctgttgactctcattctggttatgacttcccatggtctttgaacaagatcatgccattctgggctggcgctgaacaccacgatttgcatcatcactactttattggtaactacgcttcctctttcagatggtgggattactgtctagacactgaatctggtccagaagctaaggcctccagagaagaaagaatgaagaagagagctgaaaacaatgctcaaaagaagactaactaagagaagaaacatacttcaaaaaaaaaaaaaagaaaaacaacaaaaaaacgtataaaatgaaataaatttcgaaccgctttttttccttttttttttttttactttgtttgacctcccctaactctttctttttaccttcacaattgtttattttaatatatgatttttaaattaattcaggttaattctaaaaactatattgcaatcttttaaatatatgtatacacgttcattaccacgtatacatatccatatatatatatatatatatacatactatttatgataaatttttaacaagcaaacccattattaaatgctata

SEQ ID NO: 131170 - protein, 309 aa, Saccharomyces cerevisiae
MSAVFNNATLSGLVQASTYSQTLQNVAHYQPQLNFMEKYWAAWYSYMNNDVLATGLMFFLLHEFMYFFRCLPWFIIDQIPYFRRWKLQPTKIPSAKEQLYCLKSVLLSHFLVEAIPIWTFHPMCEKLGITVEVPFPSLKTMALEIGLFFVLEDTWHYWAHRLFHYGVFYKYIHKQHHRYAAPFGLSAEYAHPAETLSLGFGTVGMPILYVMYTGKLHLFTLCVWITLRLFQAVDSHSGYDFPWSLNKIMPFWAGAEHHDLHHHYFIGNYASSFRWWDYCLDTESGPEAKASREERMKKRAENNAQKKTN

SEQ ID NO: 131171 - DNA, 801 bp, Brassica napus
  CDS (1)..(801)
atgggttccttcgtcgaatccggttggcagtaccttgtgacgcattttagcgactttcaactggcctgcatcgggagttttctcctccatgaaagcgtcttcttcttatctggtctcccttttatttacctcgaaagacatggctttctcaccaagtacaaaattcaggcaaaaaacaacacacctgctgctcaaggaaaatgtatcactcgcctgttgctttatcatttctgcgtgaatttgcccctcatgatggcttcctatcctgtcttcaaagccatgggaatgcgaagcagttttcctctaccctcctggaaagaagtgtctgcccagatattgttctacttcatcattgaggattttgttttctattggggacatcggatcttgcactcaaaatggctttacaagaacgtccacagtgtgcatcatgaatatgccacaccgttcggtttgacatcagaatatgctcaccccgcagagattctattcctgggatttgctaccatagttggtccagctctcacaggcccccacctgattacgctctggttatggatggttctgagagtgcttgagacagtggaagcacattgtggctatcatttcccatggagtctctcaaatttccttcctctgtatggaggtgctgacttccatgactaccatcaccgcctcctctacacaaagtctggaaactactcttcaacttttgtgtatatggactggatctttggtaccgataagggctacagaagactcaagtctcttaaagaaaatagcaacttgaaacaaacgtga

SEQ ID NO: 131172 - protein, 266 aa, Brassica napus
MGSFVESGWQYLVTHFSDFQLACIGSFLLHESVFFLSGLPFIYLERHGFLTKYKIQAKNNTPAAQGKCITRLLLYHFCVNLPLMMASYPVFKAMGMRSSFPLPSWKEVSAQILFYFIIEDFVFYWGHRILHSKWLYKNVHSVHHEYATPFGLTSEYAHPAEILFLGFATIVGPALTGPHLITLWLWMVLRVLETVEAHCGYHFPWSLSNFLPLYGGADFHDYHHRLLYTKSGNYSSTFVYMDWIFGTDKGYRRLKSLKENSNLKQT

SEQ ID NO: 131173 - DNA, 837 bp, Triticum aestivum
  CDS (1)..(837)
atggcggcggcggcggcggagcaggactactggggcctgttccgggaggagacgggctggtacaacgagatcttcctcagcgccgtcgtgccgggcggcggcggctggtggcgggcgctgccgcacccgctccgctcctggctgcgcaactgcatcggcggctacctcctctacttcgccaccggcttcctctggtgcttcgtcatctactactggaagcgcaacgcctacatccccaaagatgctgtccctacagtagaagctatgaagaagcaaataattgttgcatcaaaggctatgcctttctactgtgctcttccatccgtatctgagcacatgattgagagtggatggacacggtgtttctttcatatcagcgaagttggttggcccatgtacattgtctatgtgtctctatatctcatctttgtggagtttggaatttactggatgcacagagagttgcatgacataaagccactatacaagcatctacatgcaacccaccacatttacaacaaggagaataccctatcaccatttgctggactagcattccatccattggacgggatactgcaagccatatcgcacgtgattgctctgttccttctcccgatgcacttcaggacgcacattgctctgttattcatagaggcggtgtggacggccaacatccacgactgcatccatggcaagatctggccggtgatgggcgccggctaccacaccatccaccacacgacgtaccggcacaactacggccactacaccgtgtggatggactggctgtttggcaccctccgcgagccggaggatctcctcaagaaggactga

SEQ ID NO: 131174 - protein, 278 aa, Triticum aestivum
MAAAAAEQDYWGLFREETGWYNEIFLSAVVPGGGGWWRALPHPLRSWLRNCIGGYLLYFATGFLWCFVIYYWKRNAYIPKDAVPTVEAMKKQIIVASKAMPFYCALPSVSEHMIESGWTRCFFHISEVGWPMYIVYVSLYLIFVEFGIYWMHRELHDIKPLYKHLHATHHIYNKENTLSPFAGLAFHPLDGILQAISHVIALFLLPMHFRTHIALLFIEAVWTANIHDCIHGKIWPVMGAGYHTIHHTTYRHNYGHYTVWMDWLFGTLREPEDLLKKD

SEQ ID NO: 131175 - DNA, 906 bp, Zea mays
  CDS (1)..(906)
atgctgccctacgcgacggcggcggaggcggaggtggcgcttggccggcccatgacgcccgccgaggcgctgtggttccggtacaccgcgggggtgtccgactaccacctctactgctgcaacatcctcttcctcttcgtcgtcttcacggtggccccgcttcccatcgcgctcctcgagctccgggccccggccgcggtctcgccgtacaaactgcagccgcgggtgcggctctccagggccgagttcgtccggtgctacaaggacgtcctccgcatcttcttcctcgtcatcggcccgctccagctcgtctcctacccggcggtcaagtttgtgggaattcacacgaagttgcctttgccgtcccttgcggagttggcagcacagctactggtgtacttccttgttgaggactacctcaattactggatccacaggtttctccacggggagtgggggtaccagaatatccaccgtgttcaccatgagttcactgcgccaataggattcgcagctccatatgcacactgggctgaggtgctgatactcggcatcccctccttcgtcgggccagccattgttccaggccacatgatcacattctggctctggattatactccgtcaggtggaggctatcgagacacatagcggctttgatttcccattcaccccgacaaagtatattccattctatggaggagcagaataccatgactatcatcattatgtaggaggccagagccaaagcaattttgcttctgttttcacttactgtgattacttatatggcactgacaaaggttacagattccacaaaacatacctagcaaagctgaaggatctggggcataatgatggccagaaaggagacggcagcggacccagctacgtgaaactggattag

SEQ ID NO: 131176 - protein, 301 aa, Zea mays
MLPYATAAEAEVALGRPMTPAEALWFRYTAGVSDYHLYCCNILFLFVVFTVAPLPIALLELRAPAAVSPYKLQPRVRLSRAEFVRCYKDVLRIFFLVIGPLQLVSYPAVKFVGIHTKLPLPSLAELAAQLLVYFLVEDYLNYWIHRFLHGEWGYQNIHRVHHEFTAPIGFAAPYAHWAEVLILGIPSFVGPAIVPGHMITFWLWIILRQVEAIETHSGFDFPFTPTKYIPFYGGAEYHDYHHYVGGQSQSNFASVFTYCDYLYGTDKGYRFHKTYLAKLKDLGHNDGQKGDGSGPSYVKLD

SEQ ID NO: 131177 - DNA, 849 bp, Hordeum vulgare
  CDS (1)..(849)
atggcggcggcggcggcggcggcggcggcgggggaggattactggggcctgttccgggaggagacggactggtacaacgagatcttcctcagcgcggtcgtccccggcggcggcggctggtggcgggcgctgccgcacccgctccgctcctggctgcgcaactgcatcggcggctacctcctctacttcgccaccggcttcctctggtgcttcgtcatctactactggaagcgcaacgcctacatccccaaagatgctgtccctacagtagaagctatgaagaagcaaataattgttgcatcaaaggctatgcctttctactgcgctcttccgtctgtatctgagcacatgattgagagtggatggacccggtgtttttttcatatcagtgaagttggttggccgatgtattttgtatatgtggctttatatctcacctttgtggagtttggaatttactggatgcacagagagttgcatgacataaaaccactgtataagcacctacacgcaacccaccacatttacaacaaggagaataccctatcaccatttgctggactagcattccatccattggacggtattctgcaagccatatcgcacgtgattgctctgttcattctcccggtgcatttccggacgcacgtcgccctcatattcatagaggcggtgtggacggccaacatccacgactgcatccacggcaaggtctggccggtgatgggcgccggttaccacaccatccaccacacgacataccggcacaactatggccactacaccgtgtggatggattggctgtttggcaccctccgcgagccggaggatctcctcaagaaggactga

SEQ ID NO: 131178 - protein, 282 aa, Hordeum vulgare
MAAAAAAAAAGEDYWGLFREETDWYNEIFLSAVVPGGGGWWRALPHPLRSWLRNCIGGYLLYFATGFLWCFVIYYWKRNAYIPKDAVPTVEAMKKQIIVASKAMPFYCALPSVSEHMIESGWTRCFFHISEVGWPMYFVYVALYLTFVEFGIYWMHRELHDIKPLYKHLHATHHIYNKENTLSPFAGLAFHPLDGILQAISHVIALFILPVHFRTHVALIFIEAVWTANIHDCIHGKVWPVMGAGYHTIHHTTYRHNYGHYTVWMDWLFGTLREPEDLLKKD

SEQ ID NO: 131179 - DNA, 906 bp, Hordeum vulgare
  CDS (1)..(906)
atgctcccgtgggcgacggcggcggaggccgaggcggcgctgggccggcccatgacgcccgcggaggcgctctggttccggtggaccgccgggacgcccgactacggcctctactgcctcaacatcctcttcctcctcctcgtcttcacgctcgcgccgctccccgtcgcgctcctcgagctccgcgcgccgcgggccgtcgggccgtacaagctgcagccccgggtgcgcctctcgcgggccgacttcctcaagtgctacggggacgtcatgcgcatcttcttcctcgtcatcggaccgctccagctcgtctcctaccccgccgtcaagatggtggggatccacaccggactgccgctgccgtctctgggggagatggcggcgcagctggtggtctacttcctggtcgaggactacctcaactactggatccaccggctgctgcacggtgagtggggctatgagaagatccaccggatccaccacgagtacaccgcgcccattggcttcgcagcgccatacgctcactgggcagaggtgctcatacttggcatcccctccttcgctggcccggccattgcaccaggccacatgattaccttctggctctggattatacttcgtcagatggaagccattgacacacacagcggttttgatttcccattcagcctgacaaagtatattccgttctatggaggagcagaataccatgattatcatcactacgttggaggccaaagccagagcaattttgcttcggttttcacgtactgtgattacctgtatgggaccgacagaggctacagattccacaaggcttacttagcaaagttgaaggacctggagccaagcgacggcaagaaagaagatgccaatggattcagttatgcgaagttggattag

SEQ ID NO: 131180 - protein, 301 aa, Hordeum vulgare
MLPWATAAEAEAALGRPMTPAEALWFRWTAGTPDYGLYCLNILFLLLVFTLAPLPVALLELRAPRAVGPYKLQPRVRLSRADFLKCYGDVMRIFFLVIGPLQLVSYPAVKMVGIHTGLPLPSLGEMAAQLVVYFLVEDYLNYWIHRLLHGEWGYEKIHRIHHEYTAPIGFAAPYAHWAEVLILGIPSFAGPAIAPGHMITFWLWIILRQMEAIDTHSGFDFPFSLTKYIPFYGGAEYHDYHHYVGGQSQSNFASVFTYCDYLYGTDRGYRFHKAYLAKLKDLEPSDGKKEDANGFSYAKLD

SEQ ID NO: 131181 - DNA, 912 bp, Helianthus annuus
  CDS (1)..(912)
atgctgccatacaccaccgtacacgccgccgaaaccgccatcggccgcccactcaccgccgcagaaaccctctggttcaactactccgccaccaaatccgactacttcctctactgccacaacattctcttcctcttcctcgtcttcactctcgttcccctcttctacgtcttcatcgaattcttcttccctaaatatgtaactgcttacaagattcaacccaaagtcaaatactcctttgttgataatattaattgctactttgatgtaatgcggacgtttgttcttgttgttggacctctgcagcttgtttcctatccttccattcaaatgattggcattagaacaagcttgcccttaccgtctctaacggagatcgtttcgcaattgttcgtttattttctcgtggaggacttcacaaattactggattcatcgatttctgcacggaaaatgggggtatgaaaatattcacaaggttcaccatgaatacacaacacctataggatatgccgcaccatacgctcactgggccgaggtcttaattcttgggataccgtcttttctggggcccgccatggttccgggccatatgattacattctggctgtggattgctttgaggcagattgaagctattgagactcacagtgggtatgatctcccctggacattaacaaagtttattcctttctatggtggagctgattaccatgattatcatcattatgttggaggacaaagccagagtaattttgcatctgccttcacttattgtgactacatatatggaacagacaagggttaccgttaccagaagaaagtcctgcgacagctgagagatggcttgaaaagtgatggaaaacctaatgatggatcacatgcttctggacaaggtattaaatctgactag

SEQ ID NO: 131182 - protein, 303 aa, Helianthus annuus
MLPYTTVHAAETAIGRPLTAAETLWFNYSATKSDYFLYCHNILFLFLVFTLVPLFYVFIEFFFPKYVTAYKIQPKVKYSFVDNINCYFDVMRTFVLVVGPLQLVSYPSIQMIGIRTSLPLPSLTEIVSQLFVYFLVEDFTNYWIHRFLHGKWGYENIHKVHHEYTTPIGYAAPYAHWAEVLILGIPSFLGPAMVPGHMITFWLWIALRQIEAIETHSGYDLPWTLTKFIPFYGGADYHDYHHYVGGQSQSNFASAFTYCDYIYGTDKGYRYQKKVLRQLRDGLKSDGKPNDGSHASGQGIKSD

SEQ ID NO: 131183 - DNA, 801 bp, Brassica napus
  CDS (1)..(801)
atggcttccctcgtcgaatccggttggcagtaccttgtgacgcattttagcgactttcaactggcctgcattgggagtttcctcctccatgaaagcgtcttcttcttatctggtctccctttcatttacctcgaaagacatggctttctcaccaagtacaaaattcaggcaaaaaacaacacacctgctgctcaaggaaaatgtatcactcgcctgttgctttatcatttctgcgtgaatttgcccctcatgatggcttcctatcctgtcttcaaagccatgggaatgcgaagcagttttcctctaccctcctggaaagaagtgtctgcccagatattattctacttcatcattgaggattttgttttctattggggtcatcggatcttgcactcaaaatggctttacaagaacgtccacagtgtgcatcatgaatatgccacaccgttcggtttgacatcagaatatgctcacccagctgagattctattcctgggatttgctaccatagtcggtccagctctaaccggcccgcacttgattactctctggttatggatggttctgagagtgcttgagacagtggaagcacattgtggctatcatttcccatggagtctctcaaatttccttcctctgtatggaggtgctgacttccatgactaccatcaccgcctcctctacacaaagtctggaaactactcttcaacttttgtgtatatggactggatctttggtaccgataagggctacagaagactcaagtctcttaaagaaaatagcaacttgaaacaaacgtga

SEQ ID NO: 131184 - protein, 266 aa, Brassica napus
MASLVESGWQYLVTHFSDFQLACIGSFLLHESVFFLSGLPFIYLERHGFLTKYKIQAKNNTPAAQGKCITRLLLYHFCVNLPLMMASYPVFKAMGMRSSFPLPSWKEVSAQILFYFIIEDFVFYWGHRILHSKWLYKNVHSVHHEYATPFGLTSEYAHPAEILFLGFATIVGPALTGPHLITLWLWMVLRVLETVEAHCGYHFPWSLSNFLPLYGGADFHDYHHRLLYTKSGNYSSTFVYMDWIFGTDKGYRRLKSLKENSNLKQT

SEQ ID NO: 131185 - DNA, 894 bp, Glycine max
  CDS (1)..(894)
atgctcccctacgcttccatcccggaggccgtggcggcgctgggccgcaacctcaccttcgcggagaccctctggttcaactactccgcctccaagtccgattacttcctctactgccacaacattctgttcctcttcctcgtcttctccctcgtccccctccccctcgtcttcctcgaattcaagcgcttctccttcgtctcttcccacaagatccaaccaaaagtccgcttgtccctggccgaaaccttcaagtgctacaaagacgtcatgcgcatgttcttcctcgtcgtcggccccctccaactcatctcttacccttccatccagatgattgggatcaggacgggcttgccattaccttcgtggcgggagatcctctcgcagcttctggtgtactttctcgtagaggattacaccaattactggatccacaggtttctgcacaacgattgggggtacgagaagattcaccgcgtccaccacgagtaccatgcgcccattggattcgccgcgccctatgcccactgggccgagatcttgatcctcgggattccctcctttcttgggcctgccatggttcctggccacattatcaccttctggctctggatagccttgcgccagattgaagccattgacacgcacagcgggtatgactttcctaggagtatcacaaaatatattccattttatggtggtgctgagtatcatgattaccatcattacgttggaagacaaagccaaagcaattttgcttcagttttcacatactgtgattacatctatggaactgacaaggggtataggtatcagaaaaaaatacttcagaagttgaaggaagagttggcaaatggtgttgagcagaacggaggattatacaagactgactga

SEQ ID NO: 131186 - protein, 297 aa, Glycine max
MLPYASIPEAVAALGRNLTFAETLWFNYSASKSDYFLYCHNILFLFLVFSLVPLPLVFLEFKRFSFVSSHKIQPKVRLSLAETFKCYKDVMRMFFLVVGPLQLISYPSIQMIGIRTGLPLPSWREILSQLLVYFLVEDYTNYWIHRFLHNDWGYEKIHRVHHEYHAPIGFAAPYAHWAEILILGIPSFLGPAMVPGHIITFWLWIALRQIEAIDTHSGYDFPRSITKYIPFYGGAEYHDYHHYVGRQSQSNFASVFTYCDYIYGTDKGYRYQKKILQKLKEELANGVEQNGGLYKTD

SEQ ID NO: 131187 - DNA, 816 bp, Glycine max
  CDS (1)..(816)
atggcgtccctcatcgaatctggctggcagtacttgatcacacatttcagtgactttcaactggcgtgtttgggaagtttctttctacatgaaggtgttttcttcttgtctggacttccctttatatggcttgagagggcagggtggatgagcaagtacaaaattcaggccaaaaataacacccctgcagctcaggagaaatgtattgttcgtctgttgctttaccattttggtgtcaatctacctgttatgattttttcatatcctgtcttcacatacatgggcatgcggagtagtcttcccctaccgtcctggaaagtagttctaattcaaataatcttttacttcattttggaggactttatattctactggggacatagaatactgcacacaaagtggttatacaagcatgtgcacagtgttcatcatgagtatgctacaccgtttggattgacttctgaatatgctcatcctgctgagatacttttccttgggtttgctaccatttttggtcctgccattactgggccccacttgataactctctggttatggatggttctgagagtcctagagacagttgaggctcattgtggttaccatttcccatggagtctttccaacttccttccattgtatggaggagctgatttccatgactatcatcaccgtttattgtacaccaagtctgggaactattcatcaacttttacttacatggaccggatatttgggactgatataggctacagaaagttgaaagcattgaagagcataggagttgaagacagtagcgagcaaaagaaacaataa

SEQ ID NO: 131188 - protein, 271 aa, Glycine max
MASLIESGWQYLITHFSDFQLACLGSFFLHEGVFFLSGLPFIWLERAGWMSKYKIQAKNNTPAAQEKCIVRLLLYHFGVNLPVMIFSYPVFTYMGMRSSLPLPSWKVVLIQIIFYFILEDFIFYWGHRILHTKWLYKHVHSVHHEYATPFGLTSEYAHPAEILFLGFATIFGPAITGPHLITLWLWMVLRVLETVEAHCGYHFPWSLSNFLPLYGGADFHDYHHRLLYTKSGNYSSTFTYMDRIFGTDIGYRKLKALKSIGVEDSSEQKKQ

SEQ ID NO: 131189 - DNA, 807 bp, Zea mays
  CDS (1)..(807)
atggcggtgcccatgtccgccatcgagtccgcgtggcagctcctgatcgccaacttcaccgagttccagctcgccaccgtcatcaccttcctgctccacgagaccgtcttctttctctctggccttccctccctcctcttcgagcgcttcggactcttcgccaaatacaagatccagaagaggagcaacacctctgcttaccaaaacagatgtgtcttgcgtcttattctctaccatgtctctgtgaacctgcctgtcatgattttgtcgtaccctgccttcaaattcatgggtcttaggagctctcttcctttgccacattggtcggttgttgtatctcaagttcttttctactttgtccttgaggattttatattctattgggggcacagggcattgcatacgaaatggctatacaaacacgttcacagcgtccaccacgagtacgccacaccctttggtttaacatcggaatatgcccacccagctgaaattttgttcctgggattcgccacagttgttggtcctgctcttactggccctcatctcttcaccctgtggctgtggatggtgttgagggttttggagacagttgaagctcacagcggctatcacttcccatggagcccatcaaatttcctgccgctgtatggcggctcggacttccatgactaccatcaccgtgtgctgtacacaaagtcagggaactatgcctcaacatttgtttacatggactggttgttcggcacggacaaggattatcgcaaggcaaagaccattgaggagaaagaagggaaaaatctgtag

SEQ ID NO: 131190 - protein, 268 aa, Zea mays
MAVPMSAIESAWQLLIANFTEFQLATVITFLLHETVFFLSGLPSLLFERFGLFAKYKIQKRSNTSAYQNRCVLRLILYHVSVNLPVMILSYPAFKFMGLRSSLPLPHWSVVVSQVLFYFVLEDFIFYWGHRALHTKWLYKHVHSVHHEYATPFGLTSEYAHPAEILFLGFATVVGPALTGPHLFTLWLWMVLRVLETVEAHSGYHFPWSPSNFLPLYGGSDFHDYHHRVLYTKSGNYASTFVYMDWLFGTDKDYRKAKTIEEKEGKNL

SEQ ID NO: 131191 - DNA, 816 bp, Glycine max
  CDS (1)..(816)
atggcgtccctcatcgaatctggctggcagtacttgatcacacatttcagtgactttcaactggcgtgtttgggaagtttctttctacatgaaggcgttttcttcttgtctggacttccctttatatggcttgagagggcagggtggatgagcaagtacaaaattcaggccaaaaataacacccctgcagctcaggagaaatgtattgttcgcctgttgctttaccattttggtgtcaatctacctgttatgattttttcatatcccgtcttcacatacatgggcatgcggagtagtcttcccctaccgtcctggaaagtagttctaattcaaataatcttttacttcattttggaggactttatattctactggggacatagaatactgcacacaaaatggctatacaagcatgtgcacagtgttcatcatgagtatgctacaccgtttggattgacttctgaatatgctcatcctgctgagatacttttccttgggtttgctaccatttttggtcccgccattactgggccccacttgataactctctggttatggatggttctgagagtcctagagacagttgaggctcactgtggttaccatttcccatggagtctttcgaacttccttccattgtatggaggagctgatttccacgactatcatcaccgtttattgtacaccaagtctgggaactattcatcaacttttacttacatggaccggatatttgggactgatataggctacagaaagttgaaagcattgaagagcataggagttgaagacaatagtgaacaaaagaaacaataa

SEQ ID NO: 131192 - protein, 271 aa, Glycine max
MASLIESGWQYLITHFSDFQLACLGSFFLHEGVFFLSGLPFIWLERAGWMSKYKIQAKNNTPAAQEKCIVRLLLYHFGVNLPVMIFSYPVFTYMGMRSSLPLPSWKVVLIQIIFYFILEDFIFYWGHRILHTKWLYKHVHSVHHEYATPFGLTSEYAHPAEILFLGFATIFGPAITGPHLITLWLWMVLRVLETVEAHCGYHFPWSLSNFLPLYGGADFHDYHHRLLYTKSGNYSSTFTYMDRIFGTDIGYRKLKALKSIGVEDNSEQKKQ

SEQ ID NO: 131193 - DNA, 894 bp, Glycine max
  CDS (1)..(894)
atgctcccctacgcttccatcccggaggccgtggcggcgctgggccgcaacctcaccttcgcggagaccctctggttcaactactccgccgccaagtccgattacttcctctactgccacaacattctgttcctcttcctcgtcttctccctcgtccccctccccctcgtcttcctcgaattcaagcgcttctccttcgtctcttcccacaagatccaaccaaaagtccgcttgtccctggccgaaaccttcaagtgctacaaagacgtcatgcgcatgttcttcctcgtcgtcggccccctccaactcatctcttacccttccatccagatgattgggatcaggacgggcttgccattaccttcgtggcgggagatcctctcgcagcttctggtgtactttctcgtagaggattacaccaattactggatccacaggtttctgcacaacgattgggggtacgagaagattcaccgcgtccaccacgagtaccatgcgcccattggattcgccgcgccctatgcccactgggccgagatcttgatcctcgggattccctcctttcttgggcctgccatggttcctggccacattatcaccttctggctctggatagccttgcgccagattgaagccattgacacgcacagcgggtatgactttcctaggagtatcacaaaatatattccattttatggtggtgctgagtatcatgattaccatcattacgttggaagacaaagccaaagcaattttgcttcagttttcacatactgtgattacatctatggaactgacaaggggtataggtatcagaaaaaaatacttcagaagttgaaggaagagttggcaaatggtgttgagcagaacggaggattatacaagactgactga

SEQ ID NO: 131194 - protein, 297 aa, Glycine max
MLPYASIPEAVAALGRNLTFAETLWFNYSAAKSDYFLYCHNILFLFLVFSLVPLPLVFLEFKRFSFVSSHKIQPKVRLSLAETFKCYKDVMRMFFLVVGPLQLISYPSIQMIGIRTGLPLPSWREILSQLLVYFLVEDYTNYWIHRFLHNDWGYEKIHRVHHEYHAPIGFAAPYAHWAEILILGIPSFLGPAMVPGHIITFWLWIALRQIEAIDTHSGYDFPRSITKYIPFYGGAEYHDYHHYVGRQSQSNFASVFTYCDYIYGTDKGYRYQKKILQKLKEELANGVEQNGGLYKTD

SEQ ID NO: 131195 - DNA, 906 bp, Zea mays
  CDS (1)..(906)
atgctgccctacgcgacggcggcggaggcggaggcggcgcttggccggcccatgacgcccgccgaggcgctgtggttccggtacaccgcgggggtgtccgactaccacctctactgctgcaacatcctcttcctcttcgtcgtcttcacggtggccccgcttcccatcgcgctcctcgagctccgggccccggccgcggtctcgccgtacaaactgcagccgcgggtgcggctctccagggccgagttcgtccggtgctacaaggacgtcctccgcatcttcttcctcgtcatcggcccgctccagctcgtctcctacccggcggtcaagtttgtgggaattcacacgaagttgcctttgccgtcccttgcggagttggcagcacagctactggtgtacttccttgttgaggactacctcaattactggatccacaggtttctccacggggagtgggggtaccagaatatccaccgtgttcaccatgagttcactgcgccaataggattcgcagctccatatgcacactgggctgaggtgctgatactcggcatcccctccttcgtcgggccagccattgttccaggccacatgatcacattctggctctggattatactccgtcaggtggaggctatcgagacacatagcggctttgatttcccattcaccccgacaaagtatattccattctatggaggagcagaataccatgactatcatcattatgtaggaggccagagccaaagcaattttgcttctgttttcacttactgtgattacttatatggcactgacaaaggttacagattccacaaaacatacctagcaaagctgaaggatctggggcataatgatggccagaaaggagacggcagcggacccagctatgtgaaactggattag

SEQ ID NO: 131196 - protein, 301 aa, Zea mays
MLPYATAAEAEAALGRPMTPAEALWFRYTAGVSDYHLYCCNILFLFVVFTVAPLPIALLELRAPAAVSPYKLQPRVRLSRAEFVRCYKDVLRIFFLVIGPLQLVSYPAVKFVGIHTKLPLPSLAELAAQLLVYFLVEDYLNYWIHRFLHGEWGYQNIHRVHHEFTAPIGFAAPYAHWAEVLILGIPSFVGPAIVPGHMITFWLWIILRQVEAIETHSGFDFPFTPTKYIPFYGGAEYHDYHHYVGGQSQSNFASVFTYCDYLYGTDKGYRFHKTYLAKLKDLGHNDGQKGDGSGPSYVKLD

SEQ ID NO: 131197 - DNA, 921 bp, Zea mays
  CDS (1)..(921)
atgatcccctacgcgactgcggcggaggcggagggagcactggggcgcaccatgacgtgggctgagacagcatggtacgagtactcggcggtgatgccagattcctggctgcactgccacaccacatttatcctgttcgtcatctacagcatcgccccgctgcccctgctactcctagagcagttcgctccgtccgtcgtgctgccgtacaagctgcagccccgggtacggctgcccccggcagcctccctcagctgctacatggacgcggcctgcatctttccgctcgccgttggccttcagttcgtctcctatcctgcggtcgccaagatactaaggacccgaatgggactgccgttgccgtcggtgagggagaccatcgcgcagctagtcgtatactctctagtggaggattacctcagctactggatgcaccgtctgctgcacacccagtggtgctacgagaagatccaccgcgtccaccacgagttcacggctcctacaggcttcgccatgtcgtacagccactgggccgagaacgtcgtcctttctatcccggccttggccggcccagtgctcgtgccatgccatgtcaccacgcagtggctatggttctccatccgcctaattgagggcattaacacgcacagcggttaccatttcccgttcagcccttgcaggctgattccattctacggaggggctgcataccatgactaccatcactatgcaggaggccgtagccaaagcaactttgcacccctgttcacctactgtgattatttatataggacagacaaaggctacagataccacaagctaaagcaagagaagctgaagagtctagcagaaaatagtgcggataaaggaggcaactactcattcgacgaagggaaaaagaacagatatttttgtgcctga

SEQ ID NO: 131198 - protein, 306 aa, Zea mays
MIPYATAAEAEGALGRTMTWAETAWYEYSAVMPDSWLHCHTTFILFVIYSIAPLPLLLLEQFAPSVVLPYKLQPRVRLPPAASLSCYMDAACIFPLAVGLQFVSYPAVAKILRTRMGLPLPSVRETIAQLVVYSLVEDYLSYWMHRLLHTQWCYEKIHRVHHEFTAPTGFAMSYSHWAENVVLSIPALAGPVLVPCHVTTQWLWFSIRLIEGINTHSGYHFPFSPCRLIPFYGGAAYHDYHHYAGGRSQSNFAPLFTYCDYLYRTDKGYRYHKLKQEKLKSLAENSADKGGNYSFDEGKKNRYFCA

SEQ ID NO: 131199 - DNA, 807 bp, Zea mays
  CDS (1)..(807)
atggcggcgcccatgtcagccatcgactcagcgtggcagctcctgatcgccaacttcaccgagttccagctcgccaccgtcgtcaccttcctgctccacgagaccgtcttcttcctctccggcctcccctccctcctcttcgagcgcttcggactcttcgccaagtacaagatccagaagaagagcaacacctctgcttaccaaaacagatgtgtcttgcgcctcattctctaccatgtatgtgtgaacctgcctgtcatgattttctcgtatcctgccttcaaattcatgggtctcaggagctctcttcctttgccacattggtcggttgttgtatctcaagttcttttctactttgtccttgaggattttatattctattgggggcacagggcattgcatacgaaatggctatacaaacacgttcacagcgtccaccatgagtacgccacaccctttggtttaacatcggaatatgcccacccagctgaaattttgttcctgggattcgccacagttgttggtcctgctcttactggccctcatctcttcaccctgtggctgtggatggtgttgagggttttggagacagttgaagctcacagcggctatcacttcccatggagcccatcaaatttcctgccgctgtatggcggctcggacttccatgactaccatcaccgtgtgctgtacacaaagtcagggaactatgcctcaacatttgtttacatggactggttgttcggcacggacaaggattatcgcaaggcaaagaccattgaggagaaagaagggaaaaatctgtag

SEQ ID NO: 131200 - protein, 268 aa, Zea mays
MAAPMSAIDSAWQLLIANFTEFQLATVVTFLLHETVFFLSGLPSLLFERFGLFAKYKIQKKSNTSAYQNRCVLRLILYHVCVNLPVMIFSYPAFKFMGLRSSLPLPHWSVVVSQVLFYFVLEDFIFYWGHRALHTKWLYKHVHSVHHEYATPFGLTSEYAHPAEILFLGFATVVGPALTGPHLFTLWLWMVLRVLETVEAHSGYHFPWSPSNFLPLYGGSDFHDYHHRVLYTKSGNYASTFVYMDWLFGTDKDYRKAKTIEEKEGKNL

SEQ ID NO: 131201 - DNA, 750 bp, Zea mays
  CDS (1)..(750)
atggggatcggggcggtgtcggacgagttgctgggcacgttcgtgccgatcgccgtgtactggctctactcagggctctacgtcgcgctggatggggtggggcggctcgacggataccggctgcacaccagggaggaggccgctacgaagaacgtcgtctccaaggccgccgtcgtcagaggcgttctcgtccagcaggtcttccaggttattggtgatgagagtagtactggacagaagcaacctcctgttcttgtcatagtgttgcagtttataactgcaatggttgttatggacacatggcagtacttcatgcacagatacatgcacattaacaagtttctgtataaacacatccattctaagcaccatactcttgtagtcccttattcctttggagctctatacaaccatcctcttgagggccttattttggacaccattggtggtgcactctcattcctcgtctctggtatgactccacggacatccatattctttttctcctttgcaaccatcaaaactgtggatgatcattgtgggctgtggcttcctggtaatatcctccaggcgctgttcagcaataacagtgcttatcatgacattcaccatcagctctatggaaacaagtacaacttttcacaacccttctttgtgatgtgggacaagattctcggaacttacatgccctactctattgaacaacgaaaaggaggggggatcgaatcaaaaccagctaaactcgactga

SEQ ID NO: 131202 - protein, 249 aa, Zea mays
MGIGAVSDELLGTFVPIAVYWLYSGLYVALDGVGRLDGYRLHTREEAATKNVVSKAAVVRGVLVQQVFQVIGDESSTGQKQPPVLVIVLQFITAMVVMDTWQYFMHRYMHINKFLYKHIHSKHHTLVVPYSFGALYNHPLEGLILDTIGGALSFLVSGMTPRTSIFFFSFATIKTVDDHCGLWLPGNILQALFSNNSAYHDIHHQLYGNKYNFSQPFFVMWDKILGTYMPYSIEQRKGGGIESKPAKLD

SEQ ID NO: 131203 - DNA, 20 bp, Artificial sequence
  primer
atggcttccttcgtggaatc

SEQ ID NO: 131204 - DNA, 20 bp, Artificial sequence
  primer
tcacgtttgtttcatgtcac

SEQ ID NO: 131205 - protein, 322 aa, Artificial sequence
  consensus sequence
  Variant (2)..(3): Xaa in position 2 to 3 is any amino acid
  Variant (4)..(85): Xaa in position 4 to 85 is any or no amino acid
  Variant (87)..(87): Xaa in position 87 is any amino acid
  Variant (89)..(116): Xaa in position 89 to 116 is any amino acid
  Variant (117)..(145): Xaa in position 117 to 145 is any or no amino acid
  Variant (147)..(161): Xaa in position 147 to 161 is any amino acid
  Variant (164)..(166): Xaa in position 164 to 166 is any amino acid
  Variant (168)..(169): Xaa in position 168 to 169 is any amino acid
  Variant (172)..(173): Xaa in position 172 to 173 is any amino acid
  Variant (175)..(178): Xaa in position 175 to 178 is any amino acid
  Variant (179)..(179): Xaa in position 179 is any or no amino acid
  Variant (181)..(183): Xaa in position 181 to 183 is any amino acid
  Variant (185)..(186): Xaa in position 185 to 186 is any amino acid
  Variant (189)..(192): Xaa in position 189 to 192 is any amino acid
  Variant (194)..(199): Xaa in position 194 to 199 is any amino acid
  Variant (200)..(202): Xaa in position 200 to 202 is any or no amino acid
  Variant (206)..(207): Xaa in position 206 to 207 is any amino acid
  Variant (209)..(210): Xaa in position 209 to 210 is any amino acid
  Variant (211)..(211): Xaa in position 211 is any or no amino acid
  Variant (213)..(219): Xaa in position 213 to 219 is any amino acid
  Variant (221)..(225): Xaa in position 221 to 225 is any amino acid
  Variant (226)..(238): Xaa in position 226 to 238 is any or no amino acid
  Variant (240)..(241): Xaa in position 240 to 241 is any amino acid
  Variant (243)..(245): Xaa in position 243 to 245 is any amino acid
  Variant (247)..(248): Xaa in position 247 to 248 is any amino acid
  Variant (250)..(257): Xaa in position 250 to 257 is any amino acid
  Variant (259)..(259): Xaa in position 259 is any amino acid
  Variant (262)..(263): Xaa in position 262 to 263 is any amino acid
  Variant (265)..(270): Xaa in position 265 to 270 is any amino acid
  Variant (271)..(291): Xaa in position 271 to 291 is any or no amino acid
  Variant (294)..(294): Xaa in position 294 is any amino acid
  Variant (297)..(301): Xaa in position 297 to 301 is any amino acid
  Variant (302)..(304): Xaa in position 302 to 304 is any or no amino acid
  Variant (306)..(308): Xaa in position 306 to 308 is any amino acid
  Variant (309)..(312): Xaa in position 309 to 312 is any or no amino acid
  Variant (314)..(316): Xaa in position 314 to 316 is any amino acid
  Variant (318)..(321): Xaa in position 318 to 321 is any amino acid
WXXXXXXXXXXXXXXXXXXXXXXXXXXXXXXXXXXXXXXXXXXXXXXXXXXXXXXXXXXXXXXXXXXXXXXXXXXXXXXXXXXXXKXQXXXXXXXXXXXXXXXXXXXXXXXXXXXXXXXXXXXXXXXXXXXXXXXXXXXXXXXXXPXXXXXXXXXXXXXXXEDXXXYXXHRXXHXXXXXYXXXHXXHHXXXXPXXXXXXXXXYAHXXEXXXLXXXXXXXPXXXXXXXXXXXXXXXXXXHXXTXXXWXXLXXXXXXXXHXGYXXPXXXXXXXXXXXXXXXXXXXXXXXXXXXHDXHHXXXXXXXXNXXXXXXXFXXXDXXXXT

SEQ ID NO: 131206 - protein, 27 aa, Artificial sequence
  protein pattern
  Variant (2)..(3): Xaa in position 2 to 3 is any amino acid
  Variant (4)..(4): Xaa in position 4 is Ile or Val
  Variant (6)..(7): Xaa in position 6 to 7 is any amino acid
  Variant (10)..(11): Xaa in position 10 to 11 is any amino acid
  Variant (12)..(12): Xaa in position 12 is any or no amino acid
  Variant (14)..(14): Xaa in position 14 is any or no amino acid
  Variant (16)..(16): Xaa in position 16 is Phe, Ile, Met or Val
  Variant (17)..(17): Xaa in position 17 is Ala, Gly or Ser
  Variant (18)..(18): Xaa in position 18 is any amino acid
  Variant (19)..(19): Xaa in position 19 is Ala, Ser or Thr
  Variant (20)..(20): Xaa in position 20 is Ala or Ser
  Variant (21)..(21): Xaa in position 21 is any amino acid
  Variant (23)..(23): Xaa in position 23 is Ala, Cys or Ser
  Variant (24)..(26): Xaa in position 24 to 26 is any amino acid
YXXXHXXHHXXXAXPXXXXXXYXXXXE

SEQ ID NO: 131207 - protein, 16 aa, Artificial sequence
  protein pattern
  Variant (2)..(4): Xaa in position 2 to 4 is any amino acid
  Variant (5)..(5): Xaa in position 5 is Glu, Asn, Gln or Ser
  Variant (6)..(6): Xaa in position 6 is Ala or Thr
  Variant (7)..(7): Xaa in position 7 is Ile, Leu or Val
  Variant (8)..(9): Xaa in position 8 to 9 is any amino acid
  Variant (11)..(11): Xaa in position 11 is Ala, Cys or Ser
  Variant (13)..(13): Xaa in position 13 is Phe or Tyr
  Variant (14)..(14): Xaa in position 14 is Asp, Glu, His or Lys
  Variant (15)..(15): Xaa in position 15 is Phe, Leu or Met
LXXXXXXXXHXGXXXP

SEQ ID NO: 131208 - DNA, 897 bp, Arabidopsis thaliana; identical to SEQ ID NO: 131041
  CDS (1)..(897)

SEQ ID NO: 131209 - protein, 298 aa, Arabidopsis thaliana; identical to SEQ ID NO: 131042

SEQ ID NO: 131210 - DNA, 1579 bp, Glycine max
  CDS (220)..(1113)
  misc_feature (1571)..(1571): n is a, g, c or t
cccactgctccgttcctgcggcccgggccgaatcccaggttcggcagcagcagacaagcatccagcgcagcatccaccacgtccgcaaaaatcccacaccgcttgcttccctggcccctcccctctctcacatcaaatccatttcgccaaatttcacatcactcttcacaaacagaaaaatagtcctccgccgccggcaatcctaggtttccggtgacgatgctcccctacgcttccatcccggaggccgtggcggcgctgggccgcaacctcaccttcgcggagaccctctggttcaactactccgccgccaagtccgattacttcctctactgccacaacattctgttcctcttcctcgtcttctccctcgtccccctccccctcgtcttcctcgaattcaagcgcttctccttcgtctcttcccacaagatccaaccaaaagtccgcttgtccctggccgaaaccttcaagtgctacaaagacgtcatgcgcatgttcttcctcgtcgtcggccccctccaactcatctcttacccttccatccagatgattgggatcaggacgggcttgccattaccttcgtggcgggagatcctctcgcagcttctggtgtactttctcgtagaggattacaccaattactggatccacaggtttctgcacaacgattgggggtacgagaagattcaccgcgtccaccacgagtaccatgcgcccattggattcgccgcgccctatgcccactgggccgagatcttgatcctcgggattccctcctttcttgggcctgccatggttcctggccacattatcaccttctggctctggatagccttgcgccagattgaagccattgacacgcacagcgggtatgactttcctaggagtatcacaaaatatattccattttatggtggtgctgagtatcatgattaccatcattacgttggaagacaaagccaaagcaattttgcttcagttttcacatactgtgattacatctatggaactgacaaggggtataggtatcagaaaaaaatacttcagaagttgaaggaagagttggcaaatggtgttgagcagaacggaggattatacaagactgactgagagactgaagtgtcttaggtggtttcagaatgcgttgcctgttgactctttggaaccaccaaaattcttgtagacatatatatatatatatatatctgctgtggcaaaatagatgtctttggttagcttcagggtggagattagtagaatggagctttacaatttgtggttttgtgttggaagaggaggggggcacgggaggaatttcttctgttgtcatgttctggaattcaaacattttggttttggttcatgtctgtcagaatgttccttctcctatggattgtaaattcagaatcttctattgtcatgttctggaattcaaacattttggtttgggttcatgtctgccagaatgttccttccccagtgggttgtaaactcagaaatatgtaataggcttcctcggctgggatataattcgaaaattataataaaaattggaagttcggttttanaaaaaaaa

SEQ ID NO: 131211 - protein, 297 aa, Glycine max; identical to SEQ ID NO: 131194

SEQ ID NO: 131212 - DNA, 1561 bp, Zea mays
  CDS (403)..(1323)
ttggtaaattgacgtcacattataaaccagttcagtaatgataacagaagtttcaacaccttaacagcaacatactgcagccgagagccaagtgcctaaacagcataacataaatctatcgccagtaacaaactcggcaataactagcagcaaccataactcctcaacctttcatagctttcgaaataagaaaaggtaatattttcgagaaccataattcgtcacattcggccaatctccaaatcaagagcttattcttcctcctcagcctccccgggccggccggtcccgcatgccccgaacagttgaagctactagcgtgtagctagggaagagaagcgcgcgagtagctagcagacgtacgtaggcagaagcctagctgggtttgaagggccccgatcgatgatcccctacgcgactgcggcggaggcggagggagcactggggcgcaccatgacgtgggctgagacagcatggtacgagtactcggcggtgatgccagattcctggctgcactgccacaccacatttatcctgttcgtcatctacagcatcgccccgctgcccctgctactcctagagcagttcgctccgtccgtcgtgctgccgtacaagctgcagccccgggtacggctgcccccggcagcctccctcagctgctacatggacgcggcctgcatctttccgctcgccgttggccttcagttcgtctcctatcctgcggtcgccaagatactaaggacccgaatgggactgccgttgccgtcggtgagggagaccatcgcgcagctagtcgtatactctctagtggaggattacctcagctactggatgcaccgtctgctgcacacccagtggtgctacgagaagatccaccgcgtccaccacgagttcacggctcctacaggcttcgccatgtcgtacagccactgggccgagaacgtcgtcctttctatcccggccttggccggcccagtgctcgtgccatgccatgtcaccacgcagtggctatggttctccatccgcctaattgagggcattaacacgcacagcggttaccatttcccgttcagcccttgcaggctgattccattctacggaggggctgcataccatgactaccatcactatgcaggaggccgtagccaaagcaactttgcacccctgttcacctactgtgattatttatataggacagacaaaggctacagataccacaagctaaagcaagagaagctgaagagtctagcagaaaatagtgcggataaaggaggcaactactcattcgacgaagggaaaaagaacagatatttttgtgcctgagcgtacgaagaataatcaaggctattacttcgtcctgttcgaagggaagatttgcaaataaataattcgaatttactgcagaagctcttgattggtcgacgaacaaatatattgttgcaatccgtttcgtgtattctatatatctaatatgaaacttttttgtcggaatatatggatcatcccgatacattactttataagtaatgaataccacataagtttttgttggaagatggtc

SEQ ID NO: 131213 - protein, 306 aa, Zea mays; identical to SEQ ID NO: 131198

SEQ ID NO: 131214 - DNA, 1408 bp, Zea mays
  CDS (203)..(1108)
cctgcagtaccgtccggaatcctcgttctctccgccggcgcgctcactctccctggtctctcgtctcctccactccaagagaacaggcgccggcgaaaggcgggagcagcgcgctgcccattcaccgccccctgatttcttgggagttgcggatcggtctccggggcagcgtggaacggctgggcccctcggatcgccggagatgctgccctacgcgacggcggcggaggcggaggcggcgcttggccggcccatgacgcccgccgaggcgctgtggttccggtacaccgcgggggtgtccgactaccacctctactgctgcaacatcctcttcctcttcgtcgtcttcacggtggccccgcttcccatcgcgctcctcgagctccgggccccggccgcggtctcgccgtacaaactgcagccgcgggtgcggctctccagggccgagttcgtccggtgctacaaggacgtcctccgcatcttcttcctcgtcatcggcccgctccagctcgtctcctacccggcggtcaagtttgtgggaattcacacgaagttgcctttgccgtcccttgcggagttggcagcacagctactggtgtacttccttgttgaggactacctcaattactggatccacaggtttctccacggggagtgggggtaccagaatatccaccgtgttcaccatgagttcactgcgccaataggattcgcagctccatatgcacactgggctgaggtgctgatactcggcatcccctccttcgtcgggccagccattgttccaggccacatgatcacattctggctctggattatactccgtcaggtggaggctatcgagacacatagcggctttgatttcccattcaccccgacaaagtatattccattctatggaggagcagaataccatgactatcatcattatgtaggaggccagagccaaagcaattttgcttctgttttcacttactgtgattacttatatggcactgacaaaggttacagattccacaaaacatacctagcaaagctgaaggatctggggcataatgatggccagaaaggagacggcagcggacccagctatgtgaaactggattagattgcaagatatagtgcatcttgagtgtttctatggtcatcgacttcactgtggcatttcgaaatgggatattgctgagttgggctggtcacgtgtgttctcatttctgtagcaggcatacagctttcagctctaccttcttctttcttttttttttctagcgtttatgaaattctatggaacttgtacgctgacgaataacaacgcaactctcacgaataacaacgccaattcttaaagttaaaaaaaaaagctccgtgcttttgccaatttggaccagttgctgtatagttttctagc

SEQ ID NO: 131215 - protein, 301 aa, Zea mays; identical to SEQ ID NO: 131196

SEQ ID NO: 131216 - DNA, 882 bp, Zea mays
  CDS (1)..(882)
atgatgccctacggcacggcggcggaggcagaggcggcgctggggcgctccatgacctgggcagaggccctgtggttccggtactcagcggggatgccggacctgtgtctgacgtggcacgtctccctcgtctacctcgtcttgtacgcgttggttccgctgccggtcatggttatccagaagctcgcgccggggtacgccctgcggcacaagctgcagcccggggtgccggagccctcgccggtttccacctacgtcgaatacataagggacagcaggggcgtcaccctggccgccttgggcccgttcccgctcatctactccatcgcattcaagctgttcggggtccggacgggactccctttgccgtcggtctgggagactgcgacgcacctggcggtgtattcgctggtggaggactacacgtcgtactggctccaccgcttcctgcacaccaggtgggggtacgagaagatccaccgcgtccaccacgagaagacggcgccgtccgggttcgccgccgcctacgccacgggcactgagctcagcttgtacctcaccacgctcttccttgggccggcgatcgtgcccagccacgtcaccacgcactggctcttgttctccatccgcataatggaggccttcgacacacacagcgggtaccacttcccgttcagcctcgcgaggttcatcccgttctacggtggcgcggaattccacgactaccatcactacgccggagagaagaccaggagcaatttcagttccgtgttcacgtactgtgattatatatatgggacaaacaaaggctacatgtaccacaagagaagcctagccgagctgaagacgaaggaggccgaacacagcgggaaagaagactga

SEQ ID NO: 131217 - protein, 293 aa, Zea mays
MMPYGTAAEAEAALGRSMTWAEALWFRYSAGMPDLCLTWHVSLVYLVLYALVPLPVMVIQKLAPGYALRHKLQPGVPEPSPVSTYVEYIRDSRGVTLAALGPFPLIYSIAFKLFGVRTGLPLPSVWETATHLAVYSLVEDYTSYWLHRFLHTRWGYEKIHRVHHEKTAPSGFAAAYATGTELSLYLTTLFLGPAIVPSHVTTHWLLFSIRIMEAFDTHSGYHFPFSLARFIPFYGGAEFHDYHHYAGEKTRSNFSSVFTYCDYIYGTNKGYMYHKRSLAELKTKEAEHSGKED

SEQ ID NO: 131218 - DNA, 900 bp, Allium porrum
  CDS (1)..(900)
atgatcccctatccatctctgacagctgcagaagcggccctgaaccgtccgctaacctacgccgaaaccatttggttcaattactccgccacaatacccgatccgttgctgtattaccacaatacgattttcctttttgttattttcacgctagtacctctccctttggctcttctcgagctctattggccgtctgttttgaagccgttcaagatccagccgaaggtgtacctgtcgaaatctgagtttttggaatgttataagaatgtcattaaggttttcttcttagttgtttgcccgcttcagcttctgtcgtatcctactgttaagttcgtgggaataaggactgggctaccattaccatcagtatgggaagttgcatctcaattagcagtgtacttcttgttggaggattttggaaattattggattcacagatggctacatggaaaatgggggtacgagaagattcacaaagttcatcatgaatatactgcaccaataggttttgctgctccttacgcccattgggctgaggtgttgatccttggtattccatcgtttcttggacctgctattgttcctggacacatgattactctttggttatggatagctctgaggcaaattgaggcactggatacccatagcgggtacgacttccctttgagttttaccaagttcattcctttctatggaggcgctgaatatcatgattatcatcattatgttggagggcaaagccagagcaatttcgcttctgtgtttacgtattgtgactacgtatatggaactgacaagggttacaggtatcgaaaggcatgcctctcgatgatgaaggaagaatcggaaaaccaaaacggagttgagaattcttttcagaaccagaaatctgattga

SEQ ID NO: 131219 - protein, 299 aa, Allium porrum
MIPYPSLTAAEAALNRPLTYAETIWFNYSATIPDPLLYYHNTIFLFVIFTLVPLPLALLELYWPSVLKPFKIQPKVYLSKSEFLECYKNVIKVFFLVVCPLQLLSYPTVKFVGIRTGLPLPSVWEVASQLAVYFLLEDFGNYWIHRWLHGKWGYEKIHKVHHEYTAPIGFAAPYAHWAEVLILGIPSFLGPAIVPGHMITLWLWIALRQIEALDTHSGYDFPLSFTKFIPFYGGAEYHDYHHYVGGQSQSNFASVFTYCDYVYGTDKGYRYRKACLSMMKEESENQNGVENSFQNQKSD

SEQ ID NO: 131220 - DNA, 897 bp, Brassica napus
  CDS (1)..(897)
atgatcccttacgcaacgatcgaagaggcctctctggcgttaggccgaaacctcacgaccctcgagactctctggttcgattactccgccacgaagtcagattactacctatactgccacaacatcctcttcctcttcctcatcttctccctcgtccccctccctctcgtcttcgtcgaattggcgcgatccgcctcgggatggttcgatcggtacaagattcagcccaaggtcaagaactccttctccgacatgttccgctgctacagagatgtaatgaagatgttcatcctcgttgtcggccctttgcagctcgtgtcctacccttcaatccagatgattgagattcggagtgggttgccgttaccgtctttcggggagattgcggcgcagttagtggtgtacttcttggtggaggactatacgaactattgggttcatagattctttcatagcaagtggggttacgagaagattcatcatatacatcatgagtacactgctcctatagggtacgctgcgccttatgcgcattgggctgaggttttgcttcttggggttccgacgtttcttggacctgctattgctcctggacacatgattaccttctggttgtggattgctttgcgccagattgaagccattgagactcacagcggatatgattttccatggacactgacgaaattcattccattctatggtggagctgagtatcatgattaccatcattacgttggaggacaaagccaaagcaactttgcttcagttttcacttactgcgattacatctatggaactgacaaaggttaccgattccaaaagaagtttcttcagcagatcaagcaggagtccaagaagagcaacatgcagaatggaggagataagttagattag

SEQ ID NO: 131221 - protein, 298 aa, Brassica napus
MIPYATIEEASLALGRNLTTLETLWFDYSATKSDYYLYCHNILFLFLIFSLVPLPLVFVELARSASGWFDRYKIQPKVKNSFSDMFRCYRDVMKMFILVVGPLQLVSYPSIQMIEIRSGLPLPSFGEIAAQLVVYFLVEDYTNYWVHRFFHSKWGYEKIHHIHHEYTAPIGYAAPYAHWAEVLLLGVPTFLGPAIAPGHMITFWLWIALRQIEAIETHSGYDFPWTLTKFIPFYGGAEYHDYHHYVGGQSQSNFASVFTYCDYIYGTDKGYRFQKKFLQQIKQESKKSNMQNGGDKLD

SEQ ID NO: 131222 - DNA, 918 bp, Hordeum vulgare
  CDS (1)..(918)
atgctcccgtgggcgacggcggcggaggccgaggcggcgctgggccggcccatgacgcccgcggaggcgctctggttccggtggaccgccgggacgcccgactacggcctctactgcctcaacatcctcttcctcctcctcgtcttcacgctcgcgccgctccccgtcgcgctcctcgagctccgcgcgccgcgggccgtcgggccgtacaagctgcagccccgggtgcgcctctcgcgggccgacttcctcaagtgctacggggacgtcatgcgcatcttcttcctcgtcatcggaccgctccagctcgtctcctaccccgccgtcaagatggtggggatccacaccggactgccgctgccgtctctgggggagatggcggcgcagctggtggtctacttcctggtcgaggactacctcaactactggatccaccggctgctgcacggtgagtggggctatgagaagatccaccggatccaccacgagtacaccgcgcccattggcttcgcagcgccatacgctcactgggcagaggtgctcatacttggcatcccctccttcgctggcccggccattgcaccaggccacatgattaccttctggctctggattatacttcgtcagatggaagccattgacacacacagcggttttgatttcccattcagcctgacaaagtatattccgttctatggaggagcagaatcccatgattatcatcactacgttggaggccaaagccagagcatttttgcttcggttttcacgtactgtgatcccctgtgtggcaccgacagaggctacagattccacagggcttccttaccaatgttgagggccctggccccccccgccgccaagaaagatgcccccatgggtttcagttccgcgaagggggattacgtggtcttatag

SEQ ID NO: 131223 - protein, 305 aa, Hordeum vulgare
MLPWATAAEAEAALGRPMTPAEALWFRWTAGTPDYGLYCLNILFLLLVFTLAPLPVALLELRAPRAVGPYKLQPRVRLSRADFLKCYGDVMRIFFLVIGPLQLVSYPAVKMVGIHTGLPLPSLGEMAAQLVVYFLVEDYLNYWIHRLLHGEWGYEKIHRIHHEYTAPIGFAAPYAHWAEVLILGIPSFAGPAIAPGHMITFWLWIILRQMEAIDTHSGFDFPFSLTKYIPFYGGAESHDYHHYVGGQSQSIFASVFTYCDPLCGTDRGYRFHRASLPMLRALAPPAAKKDAPMGFSSAKGDYVVL

SEQ ID NO: 131224 - DNA, 906 bp, Triticum sp
  CDS (1)..(906)
atgctcccgtgggcgacggcggcggaggccgaggcggcgctggagcgcgccatgacggccgcggaggcgctctggttccggtggaccgcggaggcgtccgactactacctctactgcctcaacatcctcttcctcctcgtcgtcttcacgctcgcgccgctccccgtcgcgctcctcgagctccgcgcgccgcgggccgtcgggccgtacaagctgcagccccgggtgcggctctcgcgggccgagttcatcaagtgctacggcgacgtcatgcgcatcttcttcctcgtcatcggcccgcttcagctcgtctcctaccccgccgtcaagatggtgggaatccacaccggactgccgctgccgtctctgggggagatggcggcacagctgctggtctacttcctggttgaggactacctcaactactggatccaccggctgctgcacggtgagtggggctatgagaagatccaccggatccaccatgagtacaccgcgcccattggctttgccgcgccatacgcacactgggcagaggtgctcatacttggcatcccctccttcgctgggccggccattgcaccaggccacatgataacattctggctctggattatacttcgtcagatggaagccattgatacacacagcggttttgatttcccattcagcctgacaaagtatattccattctatggaggagcagaataccatgattatcatcactacgttggaggccaaagccagagcaattttgcttccgttttcacgtactgtgattacctatatgggaccgacagaggttacagattccacaaggcttacttagcaaagttgaaggatctggcgccaagcgacggcgagaaagaaggtgccgacggattcgcttatgcaaagttggattag

SEQ ID NO: 131225 - protein, 301 aa, Triticum sp
MLPWATAAEAEAALERAMTAAEALWFRWTAEASDYYLYCLNILFLLVVFTLAPLPVALLELRAPRAVGPYKLQPRVRLSRAEFIKCYGDVMRIFFLVIGPLQLVSYPAVKMVGIHTGLPLPSLGEMAAQLLVYFLVEDYLNYWIHRLLHGEWGYEKIHRIHHEYTAPIGFAAPYAHWAEVLILGIPSFAGPAIAPGHMITFWLWIILRQMEAIDTHSGFDFPFSLTKYIPFYGGAEYHDYHHYVGGQSQSNFASVFTYCDYLYGTDRGYRFHKAYLAKLKDLAPSDGEKEGADGFAYAKLD

SEQ ID NO: 131226 - DNA, 903 bp, Oryza sativa (japonica cultivar-group); identical to SEQ ID NO: 131031
  CDS (1)..(903)

SEQ ID NO: 131227 - protein, 300 aa, Oryza sativa (japonica cultivar-group); identical to SEQ ID NO: 131032

SEQ ID NO: 131228 - DNA, 807 bp, Oryza sativa (japonica cultivar-group); identical to SEQ ID NO: 131033
  CDS (1)..(807)

SEQ ID NO: 131229 - protein, 268 aa, Oryza sativa (japonica cultivar-group); identical to SEQ ID NO: 131034

SEQ ID NO: 131230 - DNA, 906 bp, Oryza sativa (japonica cultivar-group); identical to SEQ ID NO: 131035
  CDS (1)..(906)

SEQ ID NO: 131231 - protein, 301 aa, Oryza sativa (japonica cultivar-group); identical to SEQ ID NO: 131036

SEQ ID NO: 131232 - DNA, 801 bp, Oryza sativa (japonica cultivar-group); identical to SEQ ID NO: 131037
  CDS (1)..(801)

SEQ ID NO: 131233 - protein, 266 aa, Oryza sativa (japonica cultivar-group); identical to SEQ ID NO: 131038

SEQ ID NO: 131234 - DNA, 801 bp, Arabidopsis thaliana; identical to SEQ ID NO: 131003
  CDS (1)..(801)

SEQ ID NO: 131235 - protein, 266 aa, Arabidopsis thaliana; identical to SEQ ID NO: 131004

SEQ ID NO: 131236 - DNA, 819 bp, Arabidopsis thaliana; identical to SEQ ID NO: 131043
  CDS (1)..(819)

SEQ ID NO: 131237 - protein, 272 aa, Arabidopsis thaliana; identical to SEQ ID NO: 131044

SEQ ID NO: 131238 - DNA, 876 bp, Arabidopsis thaliana; identical to SEQ ID NO: 131045
  CDS (1)..(876)

SEQ ID NO: 131239 - protein, 291 aa, Arabidopsis thaliana; identical to SEQ ID NO: 131046

SEQ ID NO: 131240 - DNA, 900 bp, Arabidopsis thaliana; identical to SEQ ID NO: 131047
  CDS (1)..(900)

SEQ ID NO: 131241 - protein, 299 aa, Arabidopsis thaliana; identical to SEQ ID NO: 131048

SEQ ID NO: 131242 - DNA, 1221 bp, Drosophila melanogaster; identical to SEQ ID NO: 131049
  CDS (1)..(1221)

SEQ ID NO: 131243 - protein, 406 aa, Drosophila melanogaster; identical to SEQ ID NO: 131050

SEQ ID NO: 131244 - DNA, 783 bp, Arabidopsis thaliana; identical to SEQ ID NO: 131051
  CDS (1)..(783)

SEQ ID NO: 131245 - protein, 260 aa, Arabidopsis thaliana; identical to SEQ ID NO: 131052

SEQ ID NO: 131246 - DNA, 762 bp, Arabidopsis thaliana; identical to SEQ ID NO: 131053
  CDS (1)..(762)

SEQ ID NO: 131247 - protein, 253 aa, Arabidopsis thaliana; identical to SEQ ID NO: 131054

SEQ ID NO: 131248 - DNA, 852 bp, Strongylocentrotus purpuratus; identical to SEQ ID NO: 131057
  CDS (1)..(852)

SEQ ID NO: 131249 - protein, 283 aa, Strongylocentrotus purpuratus; identical to SEQ ID NO: 131058

SEQ ID NO: 131250 - DNA, 996 bp, Nasonia vitripennis; identical to SEQ ID NO: 131061
  CDS (1)..(996)

SEQ ID NO: 131251 - protein, 331 aa, Nasonia vitripennis; identical to SEQ ID NO: 131062

SEQ ID NO: 131252 - DNA, 930 bp, Magnaporthe grisea 70-15; identical to SEQ ID NO: 131065
  CDS (1)..(930)

SEQ ID NO: 131253 - protein, 309 aa, Magnaporthe grisea 70-15; identical to SEQ ID NO: 131066

SEQ ID NO: 131254 - DNA, 918 bp, Gibberella zeae PH-1; identical to SEQ ID NO: 131067
  CDS (1)..(918)

SEQ ID NO: 131255 - protein, 305 aa, Gibberella zeae PH-1; identical to SEQ ID NO: 131068

SEQ ID NO: 131256 - DNA, 915 bp, Debaryomyces hansenii CBS767; identical to SEQ ID NO: 131077
  CDS (1)..(915)

SEQ ID NO: 131257 - protein, 304 aa, Debaryomyces hansenii CBS767; identical to SEQ ID NO: 131078

SEQ ID NO: 131258 - DNA, 996 bp, Debaryomyces hansenii CBS767; identical to SEQ ID NO: 131079
  CDS (1)..(996)

SEQ ID NO: 131259 - protein, 331 aa, Debaryomyces hansenii CBS767; identical to SEQ ID NO: 131080

SEQ ID NO: 131260 - DNA, 930 bp, Yarrowia lipolytica CLIB122; identical to SEQ ID NO: 131081
  CDS (1)..(930)

SEQ ID NO: 131261 - protein, 309 aa, Yarrowia lipolytica CLIB122; identical to SEQ ID NO: 131082

SEQ ID NO: 131262 - DNA, 966 bp, Candida albicans SC5314; identical to SEQ ID NO: 131093
  CDS (1)..(966): transl_table=12

SEQ ID NO: 131263 - protein, 321 aa, Candida albicans SC5314; identical to SEQ ID NO: 131094

SEQ ID NO: 131264 - DNA, 942 bp, Ustilago maydis 521; identical to SEQ ID NO: 131097
  CDS (1)..(942)

SEQ ID NO: 131265 - protein, 313 aa, Ustilago maydis 521; identical to SEQ ID NO: 131098

SEQ ID NO: 131266 - DNA, 1032 bp, Cryptococcus neoformans var. neoformans B-3501A; identical to SEQ ID NO: 131101
  CDS (1)..(1032)

SEQ ID NO: 131267 - protein, 343 aa, Cryptococcus neoformans var. neoformans B-3501A; identical to SEQ ID NO: 131102

SEQ ID NO: 131268 - DNA, 861 bp, Strongylocentrotus purpuratus; identical to SEQ ID NO: 131103
  CDS (1)..(861)

SEQ ID NO: 131269 - protein, 286 aa, Strongylocentrotus purpuratus; identical to SEQ ID NO: 131104

SEQ ID NO: 131270 - DNA, 1137 bp, Tribolium castaneum; identical to SEQ ID NO: 131105
  CDS (1)..(1137)

SEQ ID NO: 131271 - protein, 378 aa, Tribolium castaneum; identical to SEQ ID NO: 131106

SEQ ID NO: 131272 - DNA, 903 bp, Oryza sativa subsp; identical to SEQ ID NO: 131109
  CDS (1)..(903)

SEQ ID NO: 131273 - protein, 300 aa, Oryza sativa subsp; identical to SEQ ID NO: 131110

SEQ ID NO: 131274 - DNA, 897 bp, Oryza sativa subsp; identical to SEQ ID NO: 131111
  CDS (1)..(897)

SEQ ID NO: 131275 - protein, 298 aa, Oryza sativa subsp; identical to SEQ ID NO: 131112

SEQ ID NO: 131276 - DNA, 723 bp, Oryza sativa subsp; identical to SEQ ID NO: 131113
  CDS (1)..(723)

SEQ ID NO: 131277 - protein, 240 aa, Oryza sativa subsp; identical to SEQ ID NO: 131114

SEQ ID NO: 131278 - DNA, 2463 bp, Arabidopsis thaliana; identical to SEQ ID NO: 131115
  CDS (1)..(2463)

SEQ ID NO: 131279 - protein, 820 aa, Arabidopsis thaliana; identical to SEQ ID NO: 131116

SEQ ID NO: 131280 - DNA, 948 bp, Ostreococcus tauri; identical to SEQ ID NO: 131117
  CDS (1)..(948)

SEQ ID NO: 131281 - protein, 315 aa, Ostreococcus tauri; identical to SEQ ID NO: 131118

SEQ ID NO: 131282 - DNA, 879 bp, Aedes aegypti
  CDS (1)..(879)
atgttcgatccggtggccaatgtgaccatcgggctgcccgatggaatcaactccagttcatatttccagcgaaaatgggatgcctttctggatgtagttggcgatgatccggattttctctactttgggtttctaacgatatggacctatgcgctattttgggtgatcggtggttgtttcgtgttcatggacctcaccaataagccaaagttcatgcggaagtacaaaaaccagcccggaacacatgaacccctggaatggagcaaactgaaacctttgttgaagaccgtcatcatcaaccaactggtgtttggaatcccaacatcgtacttctcgtaccacggccggaaatgggtcacttcaggtctaccagagatgcggccgctgccgtcgctggaaatcatcatccgagacatgttggtgtgtatcgtcatgtgggagatcaccttctactacagtcatcgactgctgcacgccaacttctggtacaagtacatccacaagaagcaccacgaatggccggcgccaattgcctgggctgccatgtatgcccatccgtttgagttcgtcatcagcgatctgcttccggtgtacattgggcctgctctgatggccagccatccggtcacgatcgccatctggttcgtgtttgtcatgatggacaccctggtggatcactccgggtaccacgtgccattcctgggaagctccgagcagcacgattaccaccacttgaaatttaaccagtgctacggactcttcggttggtgggacaccctacacggtacgaacgaagaattccgcaagaagaaacagtacctacgaaacaagagaatattctctctgaaatcagctcgcgagcttattccagatgagtag

SEQ ID NO: 131283 - protein, 292 aa, Aedes aegypti
MFDPVANVTIGLPDGINSSSYFQRKWDAFLDVVGDDPDFLYFGFLTIWTYALFWVIGGCFVFMDLTNKPKFMRKYKNQPGTHEPLEWSKLKPLLKTVIINQLVFGIPTSYFSYHGRKWVTSGLPEMRPLPSLEIIIRDMLVCIVMWEITFYYSHRLLHANFWYKYIHKKHHEWPAPIAWAAMYAHPFEFVISDLLPVYIGPALMASHPVTIAIWFVFVMMDTLVDHSGYHVPFLGSSEQHDYHHLKFNQCYGLFGWWDTLHGTNEEFRKKKQYLRNKRIFSLKSARELIPDE

SEQ ID NO: 131284 - DNA, 852 bp, Aedes aegypti
  CDS (1)..(852)
atggaaatagattacaacgtttccaaaagtgacggttttctgcagcagaaatgggacgccttcctggatgtggtcggtgacgacccggccaccttgtacatctgggtgcagatgttctatgtctactcccactactggctcatgggtgccctgttcatgatcatggacattaccgggaagccgaagtttcttcgaaagtataaaacgcaaccaggggttaatgaaccgatcaagtggagcgatctgaagaagatcatcaaaacggttctgttcaaccagttcgtcataggggctcccctgacgtacatcggttttcacctgtcgatcgacaaggacctgccagatgtccgtgttcttccgccgctgacgaccgtcgtgcgggactttatcgtttgcatgttcatgtgggagattggtttctactacagccatcgactgctgcaccacaagtacctgtacaaaatcatccacaagaaacatcacgaatttaccgccccggtttcgtgggcggccatttacgcgcaccccatcgagcacatattcagcaatatgattcctccgatgttgggcatctcgctcatgaggtgccacgtggtaacttccgctctctggttcaactacgtcatccaggacacgctgacggcgcactccggctaccatctgccgttcctgatgagttcggagtaccacgactatcatcatttgaaatttaaccaatgtttcggcaccaatggcctcctggattggctgcatgggacggatgcaaacttccgtaagacgaagtatgggcaacgcgatcaacgattgttagggctgaaatcggcacgggaactggtcccggataaggattaa

SEQ ID NO: 131285 - protein, 283 aa, Aedes aegypti
MEIDYNVSKSDGFLQQKWDAFLDVVGDDPATLYIWVQMFYVYSHYWLMGALFMIMDITGKPKFLRKYKTQPGVNEPIKWSDLKKIIKTVLFNQFVIGAPLTYIGFHLSIDKDLPDVRVLPPLTTVVRDFIVCMFMWEIGFYYSHRLLHHKYLYKIIHKKHHEFTAPVSWAAIYAHPIEHIFSNMIPPMLGISLMRCHVVTSALWFNYVIQDTLTAHSGYHLPFLMSSEYHDYHHLKFNQCFGTNGLLDWLHGTDANFRKTKYGQRDQRLLGLKSARELVPDKD

SEQ ID NO: 131286 - DNA, 852 bp, Aedes aegypti
  CDS (1)..(852)
atggaaatagattacaacgtttccaaaagtgacggttttctgcagcagaaatgggacgccttcctggatgtggtcggtgacgacccggccaccttgtacatctgggtgcagatgttctatgtttactcgcactactggctcatgggcgccctgttcatgatcatggacattaccgggaagccgaagtttcttcgaaagtataaaacgcaaccaggggttaatgaaccgatcaagtggagcgatctgaagaagatcatcaaaacggtcctgttcaaccagttcgtcattggggctcccctgacgtacatcggttttcacctgtcgatcgacaaggacctgccagatgtccgagttcttccgccgctgacgaccgtcgtgcgggaccttatcgtttgcatgttcatgtgggagattggtttctactacagccatcgactgctgcaccacaagtacctgtacaagatcatccacaagaaacatcacgaatttaccgccccggtttcgtgggcggccatttacgcgcaccccatcgagcacatattcagcaatatgattcctccgatgttgggcgtctcgctcatgaggtgccacgtggtaacttccgctctctggttcaactacgtcatccaggacacgctgacggcgcactccggctaccatctgccgttcctgatgagttcggagtaccacgactatcaccatttgaaatttaaccaatgtttcggcaccaatggtctcctggattggctgcatgggacggatgcaaacttccgtaagacgaagtatgggcaacgcgatcaacgattgttagggctgaaatcggcacgggaactggtcccggataaggattaa

SEQ ID NO: 131287 - protein, 283 aa, Aedes aegypti
MEIDYNVSKSDGFLQQKWDAFLDVVGDDPATLYIWVQMFYVYSHYWLMGALFMIMDITGKPKFLRKYKTQPGVNEPIKWSDLKKIIKTVLFNQFVIGAPLTYIGFHLSIDKDLPDVRVLPPLTTVVRDLIVCMFMWEIGFYYSHRLLHHKYLYKIIHKKHHEFTAPVSWAAIYAHPIEHIFSNMIPPMLGVSLMRCHVVTSALWFNYVIQDTLTAHSGYHLPFLMSSEYHDYHHLKFNQCFGTNGLLDWLHGTDANFRKTKYGQRDQRLLGLKSARELVPDKD

SEQ ID NO: 131288 - DNA, 804 bp, Aedes aegypti; identical to SEQ ID NO: 131125
  CDS (1)..(804)

SEQ ID NO: 131289 - protein, 267 aa, Aedes aegypti; identical to SEQ ID NO: 131126

SEQ ID NO: 131290 - DNA, 1269 bp, Chaetomium globosum; identical to SEQ ID NO: 131127
  CDS (138)..(1058)

SEQ ID NO: 131291 - protein, 306 aa, Chaetomium globosum; identical to SEQ ID NO: 131128

SEQ ID NO: 131292 - DNA, 912 bp, Medicago truncatula; identical to SEQ ID NO: 131129
  CDS (1)..(912)

SEQ ID NO: 131293 - protein, 303 aa, Medicago truncatula; identical to SEQ ID NO: 131130

SEQ ID NO: 131294 - DNA, 816 bp, Medicago truncatula; identical to SEQ ID NO: 131131
  CDS (1)..(816)

SEQ ID NO: 131295 - protein, 271 aa, Medicago truncatula; identical to SEQ ID NO: 131132

SEQ ID NO: 131296 - DNA, 912 bp, Aspergillus oryzae; identical to SEQ ID NO: 131135
  CDS (1)..(912)

SEQ ID NO: 131297 - protein, 303 aa, Aspergillus oryzae; identical to SEQ ID NO: 131136

SEQ ID NO: 131298 - DNA, 885 bp, Aspergillus oryzae; identical to SEQ ID NO: 131137
  CDS (1)..(885)

SEQ ID NO: 131299 - protein, 294 aa, Aspergillus oryzae; identical to SEQ ID NO: 131138

SEQ ID NO: 131300 - DNA, 930 bp, Saccharomyces cerevisiae; identical to SEQ ID NO: 131141
  CDS (1)..(930)

SEQ ID NO: 131301 - protein, 309 aa, Saccharomyces cerevisiae; identical to SEQ ID NO: 131142

SEQ ID NO: 131302 - DNA, 897 bp, Arabidopsis thaliana
  CDS (1)..(897)
atgattccttacgctacagtcgaagaagcttcaatcgcactgggacgaaacctcacacgtctcgaaactctatggttcgattactccgccacgaagtccgattactatctctactgtcacaacattttgttcttgttcctcgtcttctctctcgttcctctccctctcgttttcgtcgaattggctcgatctgcttctggtttgtttaatcggtataagatccagcctaaggttaattactctttatctgatatgttcaaatgttacaaagacgtcatgacgatgtttatcctcgtcgttggtccattgcaactcgtttcttatccttcgattcagatgattgagatacgatctggattaccattaccaacaattacagagatgctgtcacagttagtagtctacttcttgatagaagaatacactaactactgggttcatagattctttcatagtaaatggggatacgataagattcatcgagttcatcacgagtacacagctcctataggatatgctgctccttatgcacattgggctgaagttttgcttctcggaatcccgacgtttatgggaccagctattgctcctggtcatatgataaccttttggttgtggattgctttaaggcaaatggaagctattgagactcacagtggatatgattttccatggagtccaacaaaatacatccctttctacggtggtgctgagtaccatgactatcatcactacgttggaggacaaagtcaaagcaacttcgcttcagtgttcacgtactgtgattacatttatggaactgacaagggttacagattccaaaagaagcttcttgagcagatcaaggagtcgtcgaagaagagcaacaagcataacggaggaataaaatccgattag

SEQ ID NO: 131303 - protein, 298 aa, Arabidopsis thaliana; identical to SEQ ID NO: 131144

SEQ ID NO: 131304 - DNA, 955 bp, Aster tripolium; identical to SEQ ID NO: 131145
  CDS (46)..(939)

SEQ ID NO: 131305 - protein, 297 aa, Aster tripolium; identical to SEQ ID NO: 131146

SEQ ID NO: 131306 - DNA, 900 bp, Arabidopsis thaliana; identical to SEQ ID NO: 131147
  CDS (1)..(900)

SEQ ID NO: 131307 - protein, 299 aa, Arabidopsis thaliana; identical to SEQ ID NO: 131148

SEQ ID NO: 131308 - DNA, 810 bp, Gossypium arboreum; identical to SEQ ID NO: 131149
  CDS (1)..(810)

SEQ ID NO: 131309 - protein, 269 aa, Gossypium arboreum; identical to SEQ ID NO: 131150

SEQ ID NO: 131310 - DNA, 795 bp, Zea mays; identical to SEQ ID NO: 131151
  CDS (1)..(795)

SEQ ID NO: 131311 - protein, 264 aa, Zea mays; identical to SEQ ID NO: 131152

SEQ ID NO: 131312 - DNA, 855 bp, Oryza sativa subsp
  CDS (1)..(855)
atgctcccgtacgcgacggcggcggaggcggaggcggcggtggggcggggcctgacgtgggcggaggcggcctggttccgctactcggcggccatcccggactactgcctctactgccacaacgtccccatcctcctcctcgtctacaccctcgcgccgctccccctcgcgctgctcgagctccgccgccacctgccgctgccgcacaagctgcagcccggcgtgcgccacccgccggccgccttcctccggtgctacgctgccaccgcgcgcgtgctgctcctcgccgtcgggccggtccagctggcgtcgttccctgcggtgagggcggtggggatacggacggggctgccgctgccgtcggcgggggagacggcggcgcaggtggcggtgtacctgctggtggaggactacctgggctactggatccaccgcctgctgcacacgccgtgggcctaccaccacatccaccgagtccaccacgagttcaccgcgcccatgggctacgccgccccgtacgcccactgggccgagatcctcatcctcggcttcccggccttcgccggcccagccatcgtgccgtgccacatgaccaccttctggctctggttcgtgcttcgccacctcgaggccatccacatccacagcgggttcaagttgccgttcgatccgaccaagtatatcccgttgtatggaggagtggagtaccatgactaccaccatttcgtgggaggacacagccagagcaacttctcttctgtcttcactttctgtgattacatctacgggactgacagaggctacagataccataaggcaagcttgtcaaagatgagaatatttgttagagcttag

SEQ ID NO: 131313 - protein, 284 aa, Oryza sativa subsp; identical to SEQ ID NO: 131154

SEQ ID NO: 131314 - DNA, 900 bp, Arabidopsis thaliana
  CDS (1)..(900)
atgatcccatacgcaacaatcgaagaagcgtcgatcgcattatctcgaaacctcacatggctagagactctctggttcgattactccgccaccaaatctgattactacctctactgccacaacattctcttcctcttcctcatcttctctctcgttcctctccctctcgttctcatcgaatcagctcaatccacctcagatttgttcaatcgctacaaaatccaaccaaaagtgaaaaactcgttctcatcgatgttgaaatgttacaaagacgtcatgaagatgttcatcctcgtcgttggtccattacaactcgtttcttatccttcgattcagatgattgagatacgaagtggattaccattaccatcatgtatggagattgtagcacagtttgtggtttacttcttggtagaggattatactaattactgggttcatagattctttcattgtaaatggggttatgagaagtttcatcatattcatcatgagtatacagctcctattggttatgctgctccttatgctcattgggctgaggttttgcttcttggcattcccacgtttcttggacctgctattgctcctggtcatatgattaccttttggttgtggattgctttacgacagattgaggctatcgaaactcatagcggatatgatttcccatggtctctgacaaagtacattccattttatggtggagctgagtatcatgattaccatcactacgttggaggacaaagccagagtaactttgcttcagtttttacttactgcgattacatctatggaactgataaaggttaccgattccagaagaagcttcttcagcagatgaaggagaagtccaagaagagcaacaagctggttaatggaggagagaaattcgattag

SEQ ID NO: 131315 - protein, 299 aa, Arabidopsis thaliana; identical to SEQ ID NO: 131156

SEQ ID NO: 131316 - DNA, 897 bp, Arabidopsis thaliana
  CDS (1)..(897)
atgattccttacgctacagtcgaagaagcttcaatcgcactgggacgaaacctcacacgtctcgaaactctatggttcgattactccgccacgaagtccgattactatctctactgtcacaacattttgttcttgttcctcgtcttctctctcgttcctctccctctcgttttcatcgaattggctcgatctgcttctggtttgtttaatcggtataagatccagcctaaggttaattactctttatctgatatgttcaaatgttacaaagacgtcatgacgatgtttatcctcgtcgttggtccattgcaactcgtttcttatccttcgattcagatgattgagatacgatctggattaccattaccaacaattacagagatgctgtcacagttagtagtctacttcttgatagaagactacactaactactgggtacatagattctttcatagtaaatggggatacgataagattcatcgagttcatcacgagtacacagctcctataggatatgctgctccttatgcacattgggctgaagttttgcttctcggaatcccgacgtttatgggaccagctattgctcctggtcatatgataaccttttggttgtggattgctttaaggcaaatggaagctattgagactcacagtggatatgattttccatggagtccaacaaaatacatccctttctacggtggtgctgagtaccatgactatcatcactacgttggaggacaaagtcaaagcaacttcgcttcagtgttcacgtactgtgattacatttatggaactgacaagggttacagattccaaaagaagcttcttgagcagatcaaggagtcgtcgaagaagagcaacaagcataacggaggaataaaatccgattag

SEQ ID NO: 131317 - protein, 298 aa, Arabidopsis thaliana; identical to SEQ ID NO: 131158

SEQ ID NO: 131318 - DNA, 801 bp, Arabidopsis thaliana; identical to SEQ ID NO: 131159
  CDS (1)..(801)

SEQ ID NO: 131319 - protein, 266 aa, Arabidopsis thaliana; identical to SEQ ID NO: 131160

SEQ ID NO: 131320 - DNA, 786 bp, Arabidopsis thaliana; identical to SEQ ID NO: 131161
  CDS (1)..(786)

SEQ ID NO: 131321 - protein, 261 aa, Arabidopsis thaliana; identical to SEQ ID NO: 131162

SEQ ID NO: 131322 - DNA, 912 bp, Arabidopsis thaliana; identical to SEQ ID NO: 131163
  CDS (1)..(912)

SEQ ID NO: 131323 - protein, 303 aa, Arabidopsis thaliana; identical to SEQ ID NO: 131164

SEQ ID NO: 131324 - DNA, 903 bp, Schizosaccharomyces pombe; identical to SEQ ID NO: 131167
  CDS (1)..(903)

SEQ ID NO: 131325 - protein, 300 aa, Schizosaccharomyces pombe; identical to SEQ ID NO: 131168

SEQ ID NO: 131326 - DNA, 930 bp, Saccharomyces cerevisiae
  CDS (1)..(930)
atgtctgccgttttcaacaacgctaccctttcaggtctagtccaagcaagcacctactcacaaactttgcaaaatgtcgcccattaccaacctcaattgaatttcatggagaaatactgggccgcatggtacagttacatgaacaatgatgttttggccaccggtctaatgttctttttattgcatgaatttatgtatttctttagatgtttgccatggttcatcatcgaccaaattccatactttagaagatggaagttacaaccaactaagattccaagtgctaaggaacaactatactgtttgaaatccgttcttctatctcatttcttggtcgaggccatccctatctggaccttccacccaatgtgtgaaaaattaggtattactgtcgaagttccattcccatctttgaaaacaatggctctagaaattggtctattcttcgtcttggaagatacatggcattactgggctcaccgtctattccactacggtgtcttctacaagtacattcacaagcaacatcacagatacgctgctccattcggtctttctgctgaatatgctcatcctgctgaaactttgtctttgggttttggtaccgttggtatgccaattctttacgtcatgtacactggtaaattacacttgttcactctatgtgtatggatcaccctaagattattccaagctgttgactctcattctggttatgacttcccatggtctttgaacaagatcatgccattctgggctggcgctgaacaccacgatttgcatcatcactactttattggtaactacgcttcctctttcagatggtgggattactgtctagacactgaatctggtccagaagctaaggcctccagagaagaaagaatgaagaagagagctgaaaacaatgctcaaaagaagactaactaa

SEQ ID NO: 131327 - protein, 309 aa, Saccharomyces cerevisiae; identical to SEQ ID NO: 131170

SEQ ID NO: 131328 - DNA, 801 bp, Brassica napus; identical to SEQ ID NO: 131171
  CDS (1)..(801)

SEQ ID NO: 131329 - protein, 266 aa, Brassica napus; identical to SEQ ID NO: 131172

SEQ ID NO: 131330 - DNA, 906 bp, Zea mays; identical to SEQ ID NO: 131175
  CDS (1)..(906)

SEQ ID NO: 131331 - protein, 301 aa, Zea mays; identical to SEQ ID NO: 131176

SEQ ID NO: 131332 - DNA, 906 bp, Hordeum vulgare; identical to SEQ ID NO: 131179
  CDS (1)..(906)

SEQ ID NO: 131333 - protein, 301 aa, Hordeum vulgare; identical to SEQ ID NO: 131180

SEQ ID NO: 131334 - DNA, 912 bp, Helianthus annuus; identical to SEQ ID NO: 131181
  CDS (1)..(912)

SEQ ID NO: 131335 - protein, 303 aa, Helianthus annuus; identical to SEQ ID NO: 131182

SEQ ID NO: 131336 - DNA, 801 bp, Brassica napus; identical to SEQ ID NO: 131183
  CDS (1)..(801)

SEQ ID NO: 131337 - protein, 266 aa, Brassica napus; identical to SEQ ID NO: 131184

SEQ ID NO: 131338 - DNA, 894 bp, Glycine max; identical to SEQ ID NO: 131185
  CDS (1)..(894)

SEQ ID NO: 131339 - protein, 297 aa, Glycine max; identical to SEQ ID NO: 131186

SEQ ID NO: 131340 - DNA, 816 bp, Glycine max; identical to SEQ ID NO: 131187
  CDS (1)..(816)

SEQ ID NO: 131341 - protein, 271 aa, Glycine max; identical to SEQ ID NO: 131188

SEQ ID NO: 131342 - DNA, 807 bp, Zea mays; identical to SEQ ID NO: 131189
  CDS (1)..(807)

SEQ ID NO: 131343 - protein, 268 aa, Zea mays; identical to SEQ ID NO: 131190

SEQ ID NO: 131344 - DNA, 816 bp, Glycine max; identical to SEQ ID NO: 131191
  CDS (1)..(816)

SEQ ID NO: 131345 - protein, 271 aa, Glycine max; identical to SEQ ID NO: 131192

SEQ ID NO: 131346 - DNA, 816 bp, Glycine max
  CDS (1)..(816)
atggcgtccctcatcgaatctggctggcagtacttgatcacacatttcagtgactttcaactggcgtgtttgggaagtttctttctacatgaaggcgttttcttcttgtctggacttccctttatatggcttgagagggcagggtggatgagcaagtacaaaattcaggccaaaaataacacccctgcagctcaggagaaatgtattgttcgtctgttgctttaccattttggtgtcaatctacctgttatgattttttcatatcctgtcttcacatacatgggcatgcggagtagtcttcccctaccgtcctggaaagtagttctaattcaaataatcttttacttcattttggaggactttatattctactggggacatagaatactgcacacaaagtggttatacaagcatgtgcacagtgttcatcatgagtatgctacaccgtttggattgacttctgaatatgctcatcctgctgagatacttttccttgggtttgctaccatttttggtcctgccattactgggccccacttgataactctctggttatggatggttctgagagtcctagagacagttgaggctcattgtggttaccatttcccatggagtctttccaacttccttccattgtatggaggagctgatttccatgactatcatcaccgtttattgtacaccaagtctgggaactattcatcaacttttacttacatggaccggatatttgggactgatataggctacagaaagttgaaagcattgaagagcataggagttgaagacagtggcgagcaaaagaaacaataa

SEQ ID NO: 131347 - protein, 271 aa, Glycine max; identical to SEQ ID NO: 131018

SEQ ID NO: 131348 - DNA, 807 bp, Zea mays; identical to SEQ ID NO: 131199
  CDS (1)..(807)

SEQ ID NO: 131349 - protein, 268 aa, Zea mays; identical to SEQ ID NO: 131200

SEQ ID NO: 131350 - DNA, 798 bp, Zea mays
  CDS (1)..(798)
atggcggtgcccatgtccgccatcgagtccgcgtggcagctcctgatcgccaacttcaccgagttccagctcgccaccgtcatcaccttcctgctccacgagaccgtcttctttctctctggccttccctccctcctcttcgagcgcttcggactcttcgccaaatacaagatccagaagaggagcaacacctctgcttaccaaaacagatgtgtcttgcgtcttattctgtaccatgtctctgtgaacctgcctgtcatgattttgtcgtaccctgccttcaaattcatgggtcttaggagctctcttcctctaccacattggacggttgttgtatctcaagttcttttctactttgtccttgaggattttatattctactgggggcacagggcactgcatacgaaatggctatacaaacatgttcacagcgtccaccacgagtacgccacaccctttggtttaacttccgaatatgcccacccagctgaaattttgttcctgggattcgccacagttgttggtcctgctcttactggccctcatctgttcaccctgtggctgtggatggtgttgagggtattggagactgttgaagctcacagcggctatcacttcccatggagcccatcaaatttcctgccactgtacggtggctcggacttccatgactaccatcaccgagtgctgtacacaaagtcagggaactatgcctcgacatttgtttacatggactggttgttccggacggacaatggttatcgcaaggcaaagagaccattgaggagcaagaagtga

SEQ ID NO: 131351 - protein, 265 aa, Zea mays; identical to SEQ ID NO: 131016

SEQ ID NO: 131352 - DNA, 21 bp, Artificial sequence
  primer
atgattccttacgctacagtc

SEQ ID NO: 131353 - DNA, 20 bp, Artificial sequence
  primer
ctaatcggattttattcctc

SEQ ID NO: 131354 - protein, 299 aa, Artificial sequence
  consensus sequence
  Variant (2)..(3): Xaa in position 2 to 3 is any amino acid
  Variant (5)..(6): Xaa in position 5 to 6 is any amino acid
  Variant (7)..(35): Xaa in position 7 to 35 is any or no amino acid
  Variant (37)..(49): Xaa in position 37 to 49 is any amino acid
  Variant (50)..(53): Xaa in position 50 to 53 is any or no amino acid
  Variant (55)..(55): Xaa in position 55 is any amino acid
  Variant (57)..(67): Xaa in position 57 to 67 is any amino acid
  Variant (68)..(70): Xaa in position 68 to 70 is any or no amino acid
  Variant (72)..(79): Xaa in position 72 to 79 is any amino acid
  Variant (80)..(81): Xaa in position 80 to 81 is any or no amino acid
  Variant (83)..(84): Xaa in position 83 to 84 is any amino acid
  Variant (86)..(90): Xaa in position 86 to 90 is any amino acid
  Variant (91)..(91): Xaa in position 91 is any or no amino acid
  Variant (93)..(105): Xaa in position 93 to 105 is any amino acid
  Variant (106)..(115): Xaa in position 106 to 115 is any or no amino acid
  Variant (117)..(123): Xaa in position 117 to 123 is any amino acid
  Variant (125)..(128): Xaa in position 125 to 128 is any amino acid
  Variant (130)..(131): Xaa in position 130 to 131 is any amino acid
  Variant (134)..(136): Xaa in position 134 to 136 is any amino acid
  Variant (139)..(139): Xaa in position 139 is any amino acid
  Variant (142)..(143): Xaa in position 142 to 143 is any amino acid
  Variant (145)..(148): Xaa in position 145 to 148 is any amino acid
  Variant (150)..(152): Xaa in position 150 to 152 is any amino acid
  Variant (154)..(155): Xaa in position 154 to 155 is any amino acid
  Variant (158)..(161): Xaa in position 158 to 161 is any amino acid
  Variant (163)..(163): Xaa in position 163 is any amino acid
  Variant (165)..(168): Xaa in position 165 to 168 is any amino acid
  Variant (172)..(173): Xaa in position 172 to 173 is any amino acid
  Variant (175)..(177): Xaa in position 175 to 177 is any amino acid
  Variant (180)..(185): Xaa in position 180 to 185 is any amino acid
  Variant (187)..(191): Xaa in position 187 to 191 is any amino acid
  Variant (192)..(204): Xaa in position 192 to 204 is any or no amino acid
  Variant (206)..(207): Xaa in position 206 to 207 is any amino acid
  Variant (209)..(211): Xaa in position 209 to 211 is any amino acid
  Variant (213)..(214): Xaa in position 213 to 214 is any amino acid
  Variant (217)..(223): Xaa in position 217 to 223 is any amino acid
  Variant (228)..(228): Xaa in position 228 is any amino acid
  Variant (231)..(233): Xaa in position 231 to 233 is any amino acid
  Variant (234)..(237): Xaa in position 234 to 237 is any or no amino acid
  Variant (239)..(241): Xaa in position 239 to 241 is any amino acid
  Variant (243)..(245): Xaa in position 243 to 245 is any amino acid
  Variant (246)..(257): Xaa in position 246 to 257 is any or no amino acid
  Variant (260)..(260): Xaa in position 260 is any amino acid
  Variant (263)..(266): Xaa in position 263 to 266 is any amino acid
  Variant (267)..(270): Xaa in position 267 to 270 is any or no amino acid
  Variant (272)..(273): Xaa in position 272 to 273 is any amino acid
  Variant (275)..(275): Xaa in position 275 is any amino acid
  Variant (276)..(276): Xaa in position 276 is any or no amino acid
  Variant (278)..(280): Xaa in position 278 to 280 is any amino acid
  Variant (282)..(284): Xaa in position 282 to 284 is any amino acid
  Variant (288)..(290): Xaa in position 288 to 290 is any amino acid
  Variant (291)..(298): Xaa in position 291 to 298 is any or no amino acid
EXXWXXXXXXXXXXXXXXXXXXXXXXXXXXXXXXXPXXXXXXXXXXXXXXXXXKXQXXXXXXXXXXXXXXCXXXXXXXXXXVXXPXXXXXXPXXXXXXXXXXXXXXXXXXXXXXXPXXXXXXXQXXXXFXXEDXXXYWXHRXXHXXXXYXXXHXXHHXXXXPXGXXXXYAHXXEXXXLGXXXXXXPXXXXXXXXXXXXXXXXXXHXXTXXXWXXLRXXXXXXXHSGYXFPXXXXXXXPXXXGXXXXXXXXXXXXXXXHDXHHXXXXXXXXNXXSXXFXXXDXXXGTDXXXXXXXXXXXK

SEQ ID NO: 131355 - protein, 28 aa, Artificial sequence
  protein pattern
  Variant (2)..(3): Xaa in position 2 to 3 is any or no amino acid
  Variant (5)..(5): Xaa in position 5 is any amino acid
  Variant (6)..(6): Xaa in position 6 is any or no amino acid
  Variant (8)..(9): Xaa in position 8 to 9 is any amino acid
  Variant (12)..(12): Xaa in position 12 is any amino acid
  Variant (13)..(13): Xaa in position 13 is Phe, Trp or Tyr
  Variant (14)..(14): Xaa in position 14 is any amino acid
  Variant (15)..(15): Xaa in position 15 is Ala, Ser or Thr
  Variant (17)..(17): Xaa in position 17 is Phe, Ile or Val
  Variant (18)..(18): Xaa in position 18 is Ala, Gly or Ser
  Variant (19)..(19): Xaa in position 19 is any amino acid
  Variant (20)..(20): Xaa in position 20 is Ala, Ser or Thr
  Variant (21)..(21): Xaa in position 21 is Ala or Ser
  Variant (22)..(22): Xaa in position 22 is any amino acid
  Variant (24)..(24): Xaa in position 24 is Ala, Cys or Ser
  Variant (25)..(27): Xaa in position 25 to 27 is any amino acid
YXXKXXHXXHHXXXXPXXXXXXYXXXXE

SEQ ID NO: 131356 - protein, 21 aa, Artificial sequence
  protein pattern
  Variant (2)..(2): Xaa in position 2 is any amino acid
  Variant (3)..(4): Xaa in position 3 to 4 is any or no amino acid
  Variant (6)..(7): Xaa in position 6 to 7 is any or no amino acid
  Variant (10)..(10): Xaa in position 10 is any amino acid
  Variant (11)..(11): Xaa in position 11 is Phe, Ile, Leu, Met or Val
  Variant (12)..(12): Xaa in position 12 is Glu or Gln
  Variant (13)..(13): Xaa in position 13 is Ala or Thr
  Variant (14)..(14): Xaa in position 14 is Ile, Leu or Val
  Variant (15)..(15): Xaa in position 15 is Asp, Glu or His
  Variant (16)..(16): Xaa in position 16 is any amino acid
  Variant (18)..(18): Xaa in position 18 is Ala, Cys or Ser
  Variant (20)..(20): Xaa in position 20 is Phe or Tyr
  Variant (21)..(21): Xaa in position 21 is Asp, Glu, His or Lys
TXXXWXXLRXXXXXXXHXGXX

SEQ ID NO: 131357 - protein, 13 aa, Artificial sequence
  protein pattern
  Variant (2)..(2): Xaa in position 2 is Phe or Leu
  Variant (3)..(3): Xaa in position 3 is Trp or Tyr
  Variant (4)..(4): Xaa in position 4 is Ala or Gly
  Variant (6)..(6): Xaa in position 6 is Ala, Ser or Val
  Variant (7)..(7): Xaa in position 7 is any amino acid
  Variant (8)..(8): Xaa in position 8 is Phe, His, Trp or Tyr
  Variant (11)..(11): Xaa in position 11 is any amino acid
PXXXGXXXHDXHH

SEQ ID NO: 131358 - protein, 13 aa, Artificial sequence
  protein pattern
  Variant (3)..(5): Xaa in position 3 to 5 is any amino acid
  Variant (8)..(8): Xaa in position 8 is any amino acid
  Variant (11)..(11): Xaa in position 11 is any amino acid
  Variant (12)..(12): Xaa in position 12 is Phe or Leu
EDXXXYWXHRXXH

SEQ ID NO: 131359 - DNA, 954 bp, Escherichia coli
  CDS (1)..(954): transl_table=11
atgagtacacttgaacctgctgcccagtcgaaaccgccgggcggatttaagctgtggttgtcgcagctgcaaatgaagcatgggcgcaaactggtcattgcgttgccatatatctggttgatcttgctgtttctgctgccatttctgattgtctttaaaataagcctggcggagatggcgcgcgctattccaccttataccgaactgatggagtgggctgacgggcaactgtccatcactcttaatctcggtaattttctgcaactgaccgacgatccgctctatttcgatgcttatctccagtcgctacaggtggctgcgatttcgacattttgctgtttactgatcggctatccgctggcgtgggcggtggcgcacagtaagccttcgacccgtaatattttattactactggtgatcctgccgtcgtggacctcgtttctgatccgcgtttatgcctggatgggaatattaaaaaacaacggtgtgctgaataattttctgctgtggctgggggttatcgatcaaccgctgaccattctgcataccaatctggccgtttatatcggcattgtttacgcttacgtgccgtttatggtactgccgatttataccgcgttgattcgtattgattattcgctggtggaagcagcgctggatctcggtgcacgaccgctgaaaacgttctttactgtgatcgtgccgctgactaaaggtgggattattgccggatcgatgctggtgtttatcccggctgtgggcgagtttgtgatcccggaactgctcggtggcccggacagcatcatgatcgggcgcgtgctatggcaagagtttttcaataaccgcgactggccggtggcctcggcggtagcgatcatcatgttgctgctgctaattgtgccgataatgtggttccacaaacaccagcaaaaaagcgtgggagaacacggataa

SEQ ID NO: 131360 - protein, 317 aa, Escherichia coli
MSTLEPAAQSKPPGGFKLWLSQLQMKHGRKLVIALPYIWLILLFLLPFLIVFKISLAEMARAIPPYTELMEWADGQLSITLNLGNFLQLTDDPLYFDAYLQSLQVAAISTFCCLLIGYPLAWAVAHSKPSTRNILLLLVILPSWTSFLIRVYAWMGILKNNGVLNNFLLWLGVIDQPLTILHTNLAVYIGIVYAYVPFMVLPIYTALIRIDYSLVEAALDLGARPLKTFFTVIVPLTKGGIIAGSMLVFIPAVGEFVIPELLGGPDSIMIGRVLWQEFFNNRDWPVASAVAIIMLLLLIVPIMWFHKHQQKSVGEHG

SEQ ID NO: 131361 - DNA, 969 bp, Mesorhizobium loti MAFF303099
  CDS (1)..(969): transl_table=11
atgtccaacatcgccgtcgccgatgccgccgcgccaccgaccgccgccaagccgttgctgacgcggctgggtgccggcttcgtcaaccggctcgtcatcatcgtcccctacctctggctgctgttcttcttcctcatccccttcgtcatcgtcttcaagatttcattgtcgcagacggcgatcgccatgccgccctacacgccggtgctcgacttcagcgacggcatctccggtttcttcgccgggttccgcgacctcaacttcgacaattatgtctggctgacgcaggacgcgctctatttcaaggcctatgtgacgagcgtcatcattgccgcgatctcgaccgtgctgacgctgatcgtcggctaccccatcgcctatggcatgtcacgcgcgccggctactatccgcccgaccttgctgatgctggtcattctgccgttctggacgtcgttcctgatccgcgtctatgcctggatcggcattctgaagcccgagggcctgctcaaccagctgctcttgtcgctgcatatcatcaaccagccgctggtcatcctcaacacctatacggcgatcttcatcggcatcgtctattcctacctgccgttcatggtgctgccgctctattcgtcactggaaaagatggattactcgctgatcgaggcggccaaggatctgggctgcccgccgaccgcggctttctggaaaatcaccttcccgctgtcgctgccgggcgtcattgccggctgcctgctggtgttcatcccggccgtcggcgagttcgtcattcccgacctgctcggcggctcgcagacgctgatgatcggcaagacgctgtggaacgagttcttcgccaaccgcgactggccggtctcgtcggccgtcgccgtcatcctgcttttgctgctcaccgtgccgatcatgcttttccagcaggcacaggcgcgtgcccaggagcagggcaaatga

SEQ ID NO: 131362 - protein, 322 aa, Mesorhizobium loti MAFF303099
MSNIAVADAAAPPTAAKPLLTRLGAGFVNRLVIIVPYLWLLFFFLIPFVIVFKISLSQTAIAMPPYTPVLDFSDGISGFFAGFRDLNFDNYVWLTQDALYFKAYVTSVIIAAISTVLTLIVGYPIAYGMSRAPATIRPTLLMLVILPFWTSFLIRVYAWIGILKPEGLLNQLLLSLHIINQPLVILNTYTAIFIGIVYSYLPFMVLPLYSSLEKMDYSLIEAAKDLGCPPTAAFWKITFPLSLPGVIAGCLLVFIPAVGEFVIPDLLGGSQTLMIGKTLWNEFFANRDWPVSSAVAVILLLLLTVPIMLFQQAQARAQEQGK

SEQ ID NO: 131363 - DNA, 966 bp, Agrobacterium tumefaciens str. C58
  CDS (1)..(966): transl_table=11
gtggctgaactggaaaccggattcagggcttgtcctgacacgctgagggaggcttcgatggcgatcaccactcccgagaaccggcaaagcccctggcgctggctggtcgttgcggttccctatttctggctgctgctgtttttcgccgcaccctttctcatcatcgtcaagatttcgctgtcggatacggcgatctccatgccgccctatacgcctgtcttcgaagggttttcgaagctcggcgaatttttctcgcagctggatttcgagaattatctcttcctgacggaagacccgctctacattgaagcctatctgtcgtcgctgcgcatcgccttcatctctaccttcctactgctgctgatcggttatcccatggcgctggccatggcgcgcgcaccgtcttccgtgcgcccgacgctggtgatgctggtgatcctgccgttctggacctcgttcctgatccgcgtttacgcctggatcggcattctgaagccggaaggcctgttgacggtgctgtttcagtggcttgggtttctcggaccagaccagcaggtcaatatcttccgcaccgagacggcgatcttcatcggcatcgtttattcctatctgcccttcatggtcctgccgctttattcggcgctggaaaaactcgacaatacgctgcttgaggcggccgccgatctcggttgcccgccctggaaggccttctggaaaatcactttcccgctctccctgccgggcgtggtcgccggggcgatgatctgcttcatcccgataacaggcgagttcgtcattcccgatctgctgggcggcgcccagacgctgatgatcggcaagacgctgtggacggaattcttcggcaatcgcgactggcccttggcatccgctgtcgccgtgctgttgctgatcctgctggtggtgcccatcgccatcttccagaaccagcagaagaaggtggggtga

SEQ ID NO: 131364 - protein, 321 aa, Agrobacterium tumefaciens str. C58
MAELETGFRACPDTLREASMAITTPENRQSPWRWLVVAVPYFWLLLFFAAPFLIIVKISLSDTAISMPPYTPVFEGFSKLGEFFSQLDFENYLFLTEDPLYIEAYLSSLRIAFISTFLLLLIGYPMALAMARAPSSVRPTLVMLVILPFWTSFLIRVYAWIGILKPEGLLTVLFQWLGFLGPDQQVNIFRTETAIFIGIVYSYLPFMVLPLYSALEKLDNTLLEAAADLGCPPWKAFWKITFPLSLPGVVAGAMICFIPITGEFVIPDLLGGAQTLMIGKTLWTEFFGNRDWPLASAVAVLLLILLVVPIAIFQNQQKKVG

SEQ ID NO: 131365 - DNA, 912 bp, Sinorhizobium meliloti 1021
  CDS (1)..(912): transl_table=11
atggcgaaacttgcctcagccctcgtcagccgcctggtcataatcattccctatgcctggctcctgttcttcttcctcatcccgttcttcatcgttttccgcatctcgctgtcgcagacggccgttgcgatgccgccctatatgcccgtcttcgacctggccggcggcctttccggcattatggagaagcttggcgaattctcgctcgacaactacgtctggctgacggaggacgtcctctatttcaacgcctatgtgtcgagcgtcgtcatcgccgccatctcgaccttcctgacgctcctgatcggctatccgatcgcctatggcatggcaaaggcgccgcgttcgttgcggcccacgctgctgatgattgtgatcctgcccttctggacgagctttctgatccgcgtctatgcctggatcgccatcctgaagccggagggcctgctcaaccaggttctgtcggcggtcggcctgatcgatcagccgctcatcatcctcaacaccaacttggcgatctatatcggcatcgtctattcctatctgcccttcatggtgctgccgatctactcggcgcttgagaagatggaccattcgctgacggaagccgcccaggacctcggctgcacgcctgccgccgccttctggcgcgtgacctttcctctgtcgctccccggcgtggtggcgggctgcctgctcgttttcattccggctgtcggcgaattcgtgatccccgacctcctcggcggctcggaaacactgatgatcggcaagaccttgtggagcgaattcaattccaatcgcgactggccggtttcgtcggcggtggcgatcatcctgctcatgatcctggtgataccgatcgtctatttccagaacatccaggccaaagccgacggcgaggagaggtga

SEQ ID NO: 131366 - protein, 303 aa, Sinorhizobium meliloti 1021
MAKLASALVSRLVIIIPYAWLLFFFLIPFFIVFRISLSQTAVAMPPYMPVFDLAGGLSGIMEKLGEFSLDNYVWLTEDVLYFNAYVSSVVIAAISTFLTLLIGYPIAYGMAKAPRSLRPTLLMIVILPFWTSFLIRVYAWIAILKPEGLLNQVLSAVGLIDQPLIILNTNLAIYIGIVYSYLPFMVLPIYSALEKMDHSLTEAAQDLGCTPAAAFWRVTFPLSLPGVVAGCLLVFIPAVGEFVIPDLLGGSETLMIGKTLWSEFNSNRDWPVSSAVAIILLMILVIPIVYFQNIQAKADGEER

SEQ ID NO: 131367 - DNA, 954 bp, Salmonella typhimurium LT2
  CDS (1)..(954): transl_table=11
atgagcacacttgaacctccggcacgcatcagtaaacctggcggcgcggcgctatggttggcgcgaatgcaaatgaaacatgggcgtaagctggttattgctttgccttatatctggctcattctgctgtttttattgccgtttcttatcgtctttaagataagcctggcggaaatggcgcgggcgatcccgccgtataccgatctgctggaatgggctgacggtcagttgtcgattacgctcaatctcggtaattttttgcaactgaccgacgatccgctttatttcgaagcctatctgcaatcgttacaaattgccggtatttccacaatctgctgcctgctgctgggctacccgctggcgtgggcggtggcgcacagcaagccctccacgcgcaatatcctgctgctgttggtgattctgccctcgtggacgtcttttttaatacgcgtctatgcctggatgggcattttgaaaaacaacggtgcgctgaacaatgtgttgctgtggctaggggttatcgatcagccgctgacgatcctgcacactaacctggccgtctatatcggcattgtttatgcttatctgccgtttatggtactgcccatttataccgcattgacgcgcattgattattcgctggtggaagcgtcgctggatctcggcgcccgaccgctgaaaacattttttagcatcattgtcccgctcaccaaaggcggaatcatcgccggctcgatgctggtttttatcccggcggtgggtgagttcgtgatcccggaactgcttggcgggccggacagtatcatgattggtcgcgtcctgtggcaggagtttttcaataaccgcgactggccggttgcttctgcggtcgccattattatgttgctgctgctgatagtaccgatcatgtggttccataaacatcagcaaaaaagtgtgggggagcacggatga

SEQ ID NO: 131368 - protein, 317 aa, Salmonella typhimurium LT2
MSTLEPPARISKPGGAALWLARMQMKHGRKLVIALPYIWLILLFLLPFLIVFKISLAEMARAIPPYTDLLEWADGQLSITLNLGNFLQLTDDPLYFEAYLQSLQIAGISTICCLLLGYPLAWAVAHSKPSTRNILLLLVILPSWTSFLIRVYAWMGILKNNGALNNVLLWLGVIDQPLTILHTNLAVYIGIVYAYLPFMVLPIYTALTRIDYSLVEASLDLGARPLKTFFSIIVPLTKGGIIAGSMLVFIPAVGEFVIPELLGGPDSIMIGRVLWQEFFNNRDWPVASAVAIIMLLLLIVPIMWFHKHQQKSVGEHG

SEQ ID NO: 131369 - DNA, 909 bp, Agrobacterium tumefaciens str. C58
  CDS (1)..(909): transl_table=11
atggcgatcaccactcccgagaaccggcaaagcccctggcgctggctggtcgttgcggttccctatttctggctgctgctgtttttcgccgcaccctttctcatcatcgtcaagatttcgctgtcggatacggcgatctccatgccgccctatacgcctgtcttcgaagggttttcgaagctcggcgaatttttctcgcagctggatttcgagaattatctcttcctgacggaagacccgctctacattgaagcctatctgtcgtcgctgcgcatcgccttcatctctaccttcctactgctgctgatcggttatcccatggcgctggccatggcgcgcgcaccgtcttccgtgcgcccgacgctggtgatgctggtgatcctgccgttctggacctcgttcctgatccgcgtttacgcctggatcggcattctgaagccggaaggcctgttgacggtgctgtttcagtggcttgggtttctcggaccagaccagcaggtcaatatcttccgcaccgagacggcgatcttcatcggcatcgtttattcctatctgcccttcatggtcctgccgctttattcggcgctggaaaaactcgacaatacgctgcttgaggcggccgccgatctcggttgcccgccctggaaggccttctggaaaatcactttcccgctctccctgccgggcgtggtcgccggggcgatgatctgcttcatcccgataacaggcgagttcgtcattcccgatctgctgggcggcgcccagacgctgatgatcggcaagacgctgtggacggaattcttcggcaatcgcgactggcccttggcatccgctgtcgccgtgctgttgctgatcctgctggtggtgcccatcgccatcttccagaaccagcagaagaaggtggggtga

SEQ ID NO: 131370 - protein, 302 aa, Agrobacterium tumefaciens str. C58
MAITTPENRQSPWRWLVVAVPYFWLLLFFAAPFLIIVKISLSDTAISMPPYTPVFEGFSKLGEFFSQLDFENYLFLTEDPLYIEAYLSSLRIAFISTFLLLLIGYPMALAMARAPSSVRPTLVMLVILPFWTSFLIRVYAWIGILKPEGLLTVLFQWLGFLGPDQQVNIFRTETAIFIGIVYSYLPFMVLPLYSALEKLDNTLLEAAADLGCPPWKAFWKITFPLSLPGVVAGAMICFIPITGEFVIPDLLGGAQTLMIGKTLWTEFFGNRDWPLASAVAVLLLILLVVPIAIFQNQQKKVG

SEQ ID NO: 131371 - DNA, 912 bp, Brucella melitensis 16M
  CDS (1)..(912): transl_table=11
atgcaaagggtgatcgcttccatcgccagccgccttgtcatcgcagtgccatatctctggctgctggtgttcttcttggtgccgttcttcatcgtcttcaagatttccctgtcggaagtcgcgatggcgatcccggcctatgcgccgaccttcgatctggcacggggatttgcggcgaactgggagaaaataaagcagctctccttcgataattatctgtggctgcttgacgatccgctctattacaaggcctatctgtcgagcgtccgcattgccgccatttccactgttctgacgctgattgtggcctatccgatggcctatggcattgcgcgcgcgccagccaccatccgtccgacattgttgatgatggttatcctgccgttctggacctcgttcctcatccgcgtctatgcgtggatcggtattttgaagccggaagggctgctcaatcagttcctcatggggctgaacatcatcgatacgccgctcaatatcctgaacaccgatacggcggtgttcatcggtatcgtctattcctatctgcccttcatggtgctgccgatctattcgtctttggaaaagatggattattcgctgatcgaggcggcgcaggatctgggctgcacaccctttgccgccttctggaagatcacctttccgttgtcgctggcgggtgttctggccggctgcttcctcgtcttcatcccggcggtgggcgaattcgtcatcccggatcttctgggtggatcacagacgctgatgatcggcaagacgatctggagcgagttcttctccaaccgcgactggccggtctcctcggcggtggcggtggtgctgctcgtcctgctgattgtaccgatcgtcattttccagcaggtgcaggcgcgggcacaggaaaaggggaaatag

SEQ ID NO: 131372 - protein, 303 aa, Brucella melitensis 16M
MQRVIASIASRLVIAVPYLWLLVFFLVPFFIVFKISLSEVAMAIPAYAPTFDLARGFAANWEKIKQLSFDNYLWLLDDPLYYKAYLSSVRIAAISTVLTLIVAYPMAYGIARAPATIRPTLLMMVILPFWTSFLIRVYAWIGILKPEGLLNQFLMGLNIIDTPLNILNTDTAVFIGIVYSYLPFMVLPIYSSLEKMDYSLIEAAQDLGCTPFAAFWKITFPLSLAGVLAGCFLVFIPAVGEFVIPDLLGGSQTLMIGKTIWSEFFSNRDWPVSSAVAVVLLVLLIVPIVIFQQVQARAQEKGK

SEQ ID NO: 131373 - DNA, 930 bp, Streptomyces coelicolor A3(2)
  CDS (1)..(930): transl_table=11
atgtccaccctcaccgaggcgccaccgcccctctccccgcccgcgccggagcagaagcccccgcgcaggcgcggccggtggacgccgtactggctgctgctgcccggcatcctctggctggtcgtcttcttcgcggcgccgatggtctaccaggcctccacctccgtgcagacgggctcgctggaggagggctacaaggtcacctggcacttcgccacctactgggacgcgctgaccgagtactggccgcagttcctgcgctcggtcgcctacgccgcctccgcgaccgtgctgtgcctgctgctcggctacccgctcgcgtacctcatcgccttccgcgcgggccgctggcgcaatctgatcatgatcctggtgatcgcgccgttcttcaccagcttcctgatccgcaccctggcctggaagacgatcctcgccgacggcggcccggtggtcggcgccctgaacacgctgcacgtcctcgacgtgaccggctggctcggctggacctccggcgaccgcgtgctggccaccccgctcgcggtggtctgcggtctgacgtacaacttcctgcccttcatgatcctgccgctctacacctccctggagcgcatcgacggccggctgcacgaggcggcgggcgacctgtacgccaagccctccacggtcttccgcaaggtcaccttcccgctgtcgatgccgggtgtcgtctccggcacgctgctgaccttcatcccggccaccggcgactacgtcaacgcctccctgctgggctcggccgacaccggaatgatcggaaacgtgatccagtcgcagttcctgcgggtgctggactatccgacggcggcggcgctctcgttcattctgatggcggcgatcctcgccatggtcaccttctacatccgcaagtcggggacggaggatctggtttag

SEQ ID NO: 131374 - protein, 309 aa, Streptomyces coelicolor A3(2)
MSTLTEAPPPLSPPAPEQKPPRRRGRWTPYWLLLPGILWLVVFFAAPMVYQASTSVQTGSLEEGYKVTWHFATYWDALTEYWPQFLRSVAYAASATVLCLLLGYPLAYLIAFRAGRWRNLIMILVIAPFFTSFLIRTLAWKTILADGGPVVGALNTLHVLDVTGWLGWTSGDRVLATPLAVVCGLTYNFLPFMILPLYTSLERIDGRLHEAAGDLYAKPSTVFRKVTFPLSMPGVVSGTLLTFIPATGDYVNASLLGSADTGMIGNVIQSQFLRVLDYPTAAALSFILMAAILAMVTFYIRKSGTEDLV

SEQ ID NO: 131375 - DNA, 912 bp, Xanthomonas axonopodis pv. citri str. 306
  CDS (1)..(912): transl_table=11
atgaaacgcgtgttcatacgcgggttagcgggcgcgcgctggggcgtgatcgccgcaccatatctgtggatgctggtgttcttcgcgattccgttcctgatcgtgctgaagatttccttcgccgagcgcgccaccgcgatgccgccgtatacgccgctattggcggttgctgccgacggtgcggtgagcctcaaactgcatctgggcgcctatctggccttgctgcgcgatagccagtacgtggctgcctacctgagttcgatcaagatcgcggccatttccaccgcactggcgctgttgatcggctacccgatggcctacgtgatcgcgcggctaccgctggccacacgcaacgtggcgatgatgctggtggtgctgccgtcgtggacgtcgtttctgatccgcgtgtacgcgtggatcggcattctcgatggcaatggtgtgctcaatcaggcgctgttggcgctgggtgtgatcgagcagccgttgcaattgttgtacacgccgatcgccgcttacatcggcatcgtgtactgctatctgccgttcatggtgttgccgctgtacgccaacctggtcaagcacgatcagcgcctgctcgaagcagcctacgacctgggtgcgcggccatggcaggcattcgtccgcatcaccttgccactatcgcgcaacggcatcgtggccggctgcatgctggtgatgattccggcggtcggcgagttcgtcatcccggaaatgctgggcgggccgaacaccttgatgatcgggcgcgtgctgtggggcgagttcttcaataaccgcgactggccggtggcagcggcagtggccacggtgatgttgctgctgctgttgctgccgatcgtgatcttccaccgttaccagcagcgtgagctggaagggcgcctgacatga

SEQ ID NO: 131376 - protein, 303 aa, Xanthomonas axonopodis pv. citri str. 306
MKRVFIRGLAGARWGVIAAPYLWMLVFFAIPFLIVLKISFAERATAMPPYTPLLAVAADGAVSLKLHLGAYLALLRDSQYVAAYLSSIKIAAISTALALLIGYPMAYVIARLPLATRNVAMMLVVLPSWTSFLIRVYAWIGILDGNGVLNQALLALGVIEQPLQLLYTPIAAYIGIVYCYLPFMVLPLYANLVKHDQRLLEAAYDLGARPWQAFVRITLPLSRNGIVAGCMLVMIPAVGEFVIPEMLGGPNTLMIGRVLWGEFFNNRDWPVAAAVATVMLLLLLLPIVIFHRYQQRELEGRLT

SEQ ID NO: 131377 - DNA, 912 bp, Brucella suis 1330
  CDS (1)..(912): transl_table=11
atgcaaagggtgatcgcttccatcgccagccgccttgtcatcgcagtgccatatctctggctgctggtgttcttcttggtgccgttcttcatcgtcttcaagatttccctgtcggaagtcgcgatggcgatcccggcctatgcgccgaccttcgatctggcacggggatttgcggcgaactgggagaaaataaagcagctctccttcgataattatctgtggctgcttgacgatccgctctattacaaggcctatctgtcgagcgtccgcattgccgccatttccactgttctgacgctgattgtggcctatccgatggcctatggcattgcgcgcgcgccagccaccatccgtccgacattgttgatgatggttatcctgccgttctggacctcgttcctcatccgcgtctatgcgtggatcggtattttgaagccggaagggctgctcaatcagttcctcatggggctgaacatcatcgatacgccgctcaatatcctgaacaccgatacggcggtgttcatcggtatcgtctattcctatctgcccttcatggtgctgccgatctattcgtctttggaaaagatggattattcgctgatcgaggcggcgcaggatctgggctgcacaccctttgccgccttctggaagatcacctttccgttgtcgctggcgggtgttctggccggctgcttcctcgtcttcatcccggcggtgggcgaattcgtcatcccggatcttctgggtggatcacagacgctgatgatcggcaagacgatctggagcgagttcttctccaaccgcgactggccggtctcctcggcggtggcggtggtgctgctcgtcctgctgattgtgtcgatcgtcattttccagcaggtgcaggcgcgggcacaggaaaaggggaaatag

SEQ ID NO: 131378 - protein, 303 aa, Brucella suis 1330
MQRVIASIASRLVIAVPYLWLLVFFLVPFFIVFKISLSEVAMAIPAYAPTFDLARGFAANWEKIKQLSFDNYLWLLDDPLYYKAYLSSVRIAAISTVLTLIVAYPMAYGIARAPATIRPTLLMMVILPFWTSFLIRVYAWIGILKPEGLLNQFLMGLNIIDTPLNILNTDTAVFIGIVYSYLPFMVLPIYSSLEKMDYSLIEAAQDLGCTPFAAFWKITFPLSLAGVLAGCFLVFIPAVGEFVIPDLLGGSQTLMIGKTIWSEFFSNRDWPVSSAVAVVLLVLLIVSIVIFQQVQARAQEKGK

SEQ ID NO: 131379 - DNA, 954 bp, Shigella flexneri 2a str. 301
  CDS (1)..(954): transl_table=11
atgaatacacttgaacctgctgcccagtcgaaaccgccgggcggatttaagctgtggttgtcgcagctgcaaatgaagcatgggcgcaaactggtcattgcgttgccatatatctggttgatcttgctgtttctgctgccatttctgattgtctttaaaataagcctggcggagatggcgcgcgctattccaccttataccgaactgatggagtgggctgacgggcaactgtccatcactcttaatctcggtaattttctgcaactgaccgacgatccgctctatttcgatgcttatctccagtcgctacaggtggctgcgatttcgacattttgctgtttactgatcggctatccgctggcgtgggcggtggcgcacagtaagccttcgacccgtaatattttattactactggtgatcctgccgtcgtggacctcgtttctgatccgcgtttatgcttggatgggaatattaaaaaacaacggtgtgctgaataattttctgctgtggctgggggttatcgatcaaccgctgaccattcttcataccaatctggcagtttatattggcattgtttacgcctacgtgccgtttatggtgctgccgatttataccgcgttgattcgtattgattattcgctggtggaagcagcgctggatctcggtgcacgaccgctgaaaacgttctttactgtgatcgtgccgctgactaaaggtgggattattgccggatcgatgctggtgtttatcccggctgtgggcgagtttgtgatcccggaactgctcggtggcccggacagcatcatgatcgggcgcgtgctatggcaagagtttttcaataaccgcgactggccggtggcctcggcggtagcgatcatcatgttgctgctgctaattgtgccgataatgtggttccacaaacaccagcaaaaaagcgtgggagaacacggatga

SEQ ID NO: 131380 - protein, 317 aa, Shigella flexneri 2a str. 301
MNTLEPAAQSKPPGGFKLWLSQLQMKHGRKLVIALPYIWLILLFLLPFLIVFKISLAEMARAIPPYTELMEWADGQLSITLNLGNFLQLTDDPLYFDAYLQSLQVAAISTFCCLLIGYPLAWAVAHSKPSTRNILLLLVILPSWTSFLIRVYAWMGILKNNGVLNNFLLWLGVIDQPLTILHTNLAVYIGIVYAYVPFMVLPIYTALIRIDYSLVEAALDLGARPLKTFFTVIVPLTKGGIIAGSMLVFIPAVGEFVIPELLGGPDSIMIGRVLWQEFFNNRDWPVASAVAIIMLLLLIVPIMWFHKHQQKSVGEHG

SEQ ID NO: 131381 - DNA, 906 bp, Shewanella oneidensis MR-1
  CDS (1)..(906): transl_table=11
atgaagataaagtcaaaactcaaatggcttaaaggacgtttctggacgattagcttcccttatgcttggctattgctgttctttgccttgccctttgcgatcgtttttaagatcagtttgtctacggcggcgattgctatcccgccctatgaagcgacctttcaatatgcagatgatgtgttaaatatctttctgcacttaggtaactatttaatgttgctcgatgatccgttgtactacacagcgtatctcagttcactaaaaatggccctagtatcaacaatcggttgtttgattatcggctatcccatggcctatgccattgcccgcgcacctgccagatggcagaccgttttactgctattggtgatgctaccttcatggacctcatttttaatccgggtttacgcttggatggggatcttaagtaatacaggcattatcaataactcgttaatgtggcttgggattatttctgagccattgcaaatattaaacaccaatattgctgtgtatatcgggattatttatgcctatttaccctttatgatcctgccgctatacgcgactttagttaagttggacatgagtttaattgaggctgcatcggatcttggctcaagccgtatcaataccttctggaaaatcactttcccgttatctaagagtggggtgattgcaggttctatgctggtgtttattccggcggtaggtgagtttgtgatccctgagctactcggcggcccagattccttaatgataggtaaagtattgtggcaggagttcttcaataaccgtgattggccggtagcctcatcactggcaattgtgatgctagtactactgattattcctattaccttattccatcgctatcaagcgcgtagtttggagaaagacctatga

SEQ ID NO: 131382 - protein, 301 aa, Shewanella oneidensis MR-1
MKIKSKLKWLKGRFWTISFPYAWLLLFFALPFAIVFKISLSTAAIAIPPYEATFQYADDVLNIFLHLGNYLMLLDDPLYYTAYLSSLKMALVSTIGCLIIGYPMAYAIARAPARWQTVLLLLVMLPSWTSFLIRVYAWMGILSNTGIINNSLMWLGIISEPLQILNTNIAVYIGIIYAYLPFMILPLYATLVKLDMSLIEAASDLGSSRINTFWKITFPLSKSGVIAGSMLVFIPAVGEFVIPELLGGPDSLMIGKVLWQEFFNNRDWPVASSLAIVMLVLLIIPITLFHRYQARSLEKDL

SEQ ID NO: 131383 - DNA, 921 bp, Pseudomonas putida KT2440
  CDS (1)..(921): transl_table=11
atgaaactgcgcaagctcaagcgagccttccagcgtctggtcccggaggggcggcacttggtgatcggcgtgccgttcatctggctgttcctgttcttcatgctgccgttcttcatcgtcctgaagatcagttttgccgaagctgacgtggcaattccgccgtataccgagatctacacctacgtcgaagacaagatccagctggtcctcaacctggccaactacgggctgttgaccgaggatgagctgtacctctcggcctatctgggttcgctgaagatggcgttcttcagcaccctgctgtgcctgctgatcggcttcccgatggcctacgccattgccaacgccaagaaggagacccagacggtcctgctgttgctgatcatgatgccaacctggaccgcgatcctgatccgcgtctatgcctggatgggtatcctcagcaacaacggcctgctcaacggtttcctcctgtggaccggcttgatcgaccagccgttgcagatcctcaacaccaacctggcggtgtacatcggcgtggtctattcgtacctgccgttcatgatcctgccgctgttcgccaacctggttaagcatgatccgagcctgctcgaagctgcctccgacctgggttcgagcaccttcaacagcttctggaagatcacggtaccgttgtcgaagaacggcatcatcgccggctgcatgctggtgttcatcccggtggtgggcgagttcgtgatcccggaactgctgggtggcccggaaaccctgatgatcggtaaagtgctgtggcaggagttcttcaacaaccgtgactggccggtggcatccgccctggcggtggtgatgctggcaatcctgatcgtgccgatcctgctgttcaaccgtagccaggccaaagagatggagggccgcgcatga

SEQ ID NO: 131384 - protein, 306 aa, Pseudomonas putida KT2440
MKLRKLKRAFQRLVPEGRHLVIGVPFIWLFLFFMLPFFIVLKISFAEADVAIPPYTEIYTYVEDKIQLVLNLANYGLLTEDELYLSAYLGSLKMAFFSTLLCLLIGFPMAYAIANAKKETQTVLLLLIMMPTWTAILIRVYAWMGILSNNGLLNGFLLWTGLIDQPLQILNTNLAVYIGVVYSYLPFMILPLFANLVKHDPSLLEAASDLGSSTFNSFWKITVPLSKNGIIAGCMLVFIPVVGEFVIPELLGGPETLMIGKVLWQEFFNNRDWPVASALAVVMLAILIVPILLFNRSQAKEMEGRA

SEQ ID NO: 131385 - DNA, 945 bp, Escherichia coli CFT073
  CDS (1)..(945): transl_table=11
atgagtacacttgaacctgctgcccagccaaaaccctttaagctgtggttgtcgcagctgcaaatgaaacatgggcgcaaactggttattgcgttgccatatatctggttgatcttgctgtttctgctgccatttctgatcgtctttaaaataagcctggcggagatggcgcgcgctattccaccttataccgaattgatggagtgggctgacgggcaactttctatcactcttaatctcggtaattttctgcaactgaccgacgatccgctctattttgatgcttatctccagtcgttacaggtggcggcgatttcgactatttgctgtttactgatcggctatccgctggcgtgggcggtggcgcacagtaagccttcgacccgtaatatcttattactactggtgatcctgccgtcgtggacctcgtttctgattcgtgtctacgcctggatgggaatattaaaaaacaacggtgtgctgaataattttctgctgtggctgggggttatcgatcaaccgctgaccattctgcataccaactttgcggtttatattggcattgtttacgcctacgtgccgtttatggtgctgccgatttacaccgcgttgattcgtattgattattcgctggtggaagcggcactggatctcggtgcacgaccgctgaaaacgttctttactgtgatcgtgccgctgactaaaggtgggattattgccggatcgatgctggtgtttatcccggctgtgggcgagtttgtgatcccggaactgctcggtggcccggacagcatcatgatcgggcgcgtgctgtggcaggagttctttaacaaccgcgactggccggtggcctcagcggtagcgatcatcatgttgctgctgctaattatgccgataatgtggttccacaaacatcagcaaaaaagcgtgggagaacacggatga

SEQ ID NO: 131386 - protein, 314 aa, Escherichia coli CFT073
MSTLEPAAQPKPFKLWLSQLQMKHGRKLVIALPYIWLILLFLLPFLIVFKISLAEMARAIPPYTELMEWADGQLSITLNLGNFLQLTDDPLYFDAYLQSLQVAAISTICCLLIGYPLAWAVAHSKPSTRNILLLLVILPSWTSFLIRVYAWMGILKNNGVLNNFLLWLGVIDQPLTILHTNFAVYIGIVYAYVPFMVLPIYTALIRIDYSLVEAALDLGARPLKTFFTVIVPLTKGGIIAGSMLVFIPAVGEFVIPELLGGPDSIMIGRVLWQEFFNNRDWPVASAVAIIMLLLLIMPIMWFHKHQQKSVGEHG

SEQ ID NO: 131387 - DNA, 915 bp, Bradyrhizobium japonicum USDA 110
  CDS (1)..(915): transl_table=11
atgagcggacgccggatcttcgcgcgaccggcgcgcttcgccgcgatcgccccctatgtctggatggtgctgctcttcctggtgccgttcgccttcgtgctgaagatcagcctgtcgcagaccgcgatcgcgcagccgccctacgagccggtgttcgacctggcggcgggatgggaatcgctaaaggcggcctttgccgcgctgtcgctcgacaatttcaggctgctcggttccgacgacatctatgtgtacgcctatgtgcgcagcctgaccgtcgcggtcacggcgacggcgctgctgctcctgatcggctatcccatcgcctatggcatggcgcggttgccgaagcgctggcaggcggtggcgatggtgctggtgatcgtgccgttctggacctcgttcctgatccgcatctatgcctggatcaacatcctccagcacgacggcctgctcaaccagatcctgctcgcgctgcatctggtcagccagccggtggtgtggctctccaccgataccgcgatgtatatcggcatcgtctactcttatcttccattcatgatcctgccgctctatgccacgctcgccaagatggagccggcgctggaggaggcggcctccgatctcggcgcgccgccctggcaggtgttctggctcgtcaccttcccgctgtcgctgcccggcgtcggcgccggcgtgctcttgtgcttcatccccatcgtcggcgagttcgtgattccggacctcctggccggctccaattcgctgatgatcggccagaccctgtggctcgaattcttcaccaacaaggactggccggtcgcttccgcagcggccatcgtgctgctggtggtgctgctggtgccgctgttgctgtacgaacggctgcagaagcgacaactggaacaggggcggtga

SEQ ID NO: 131388 - protein, 304 aa, Bradyrhizobium japonicum USDA 110
MSGRRIFARPARFAAIAPYVWMVLLFLVPFAFVLKISLSQTAIAQPPYEPVFDLAAGWESLKAAFAALSLDNFRLLGSDDIYVYAYVRSLTVAVTATALLLLIGYPIAYGMARLPKRWQAVAMVLVIVPFWTSFLIRIYAWINILQHDGLLNQILLALHLVSQPVVWLSTDTAMYIGIVYSYLPFMILPLYATLAKMEPALEEAASDLGAPPWQVFWLVTFPLSLPGVGAGVLLCFIPIVGEFVIPDLLAGSNSLMIGQTLWLEFFTNKDWPVASAAAIVLLVVLLVPLLLYERLQKRQLEQGR

SEQ ID NO: 131389 - DNA, 984 bp, Ruegeria sp. PR1b
  CDS (1)..(984): transl_table=11
gtggggcggcgcgtcgggcgttgtgatcacgtcatgagcggcctttccctgcaccgagccgtcccgtttgtcacgcccctgcatcggctttgcgcggcactggggttttccgggcgcgggctggtcatcgccgtgccggtgacatggctgctaatcttcttcctgatcccgtttctggtggtggccaagatctcgctgtcagaggcggcgctcgcgcggccgccctatctgccaatctgggactgggccgatggcatcctgtcgatcgacctgaactttggcaactacctgttcctgctggaagatccgctctatttcgcggcctatctggaatcggtcaagatcgccgccggctccaccgtgatcaccctgttgatcggctatccgatggcctacctgatcgcgcgcgcgcaccccgggctgcgcaacctgctgttgctggcggtgatcctgccattctggacctcgttcctgttgcgcgtctacgcgtggatcggattcctgaaatccaacgggatcatcaacaacatgctgctgaacatcggcttgattgatgagccgctggtgatgctgcaaaccgattttgccgtatatgtcggcatcgtctacacctatcttcccttcatgatcctgccgctttacgccaacctcgtgaagctcgaccaatcctatatcgaggcggcctcggatcttggcgcacggccggccgtgacgttcttcacagtcacgctgccgctgtcgttcagcggcattctggccgggtcgatgctggtgtttatcccggcggtcggggagtttgtgatcccggcgctcttgggtgggcctgacactctgatgatcggcaaggtgctgtggaacgagttcttctcgaaccgggattggccggtggcctcggcggtggcgattgtcatgctgctggttctggtcatccccatcatgctgctgcgcaaggcgcaggccagtgaagcggaggcgaacgcatga

SEQ ID NO: 131390 - protein, 327 aa, Ruegeria sp. PR1b
MGRRVGRCDHVMSGLSLHRAVPFVTPLHRLCAALGFSGRGLVIAVPVTWLLIFFLIPFLVVAKISLSEAALARPPYLPIWDWADGILSIDLNFGNYLFLLEDPLYFAAYLESVKIAAGSTVITLLIGYPMAYLIARAHPGLRNLLLLAVILPFWTSFLLRVYAWIGFLKSNGIINNMLLNIGLIDEPLVMLQTDFAVYVGIVYTYLPFMILPLYANLVKLDQSYIEAASDLGARPAVTFFTVTLPLSFSGILAGSMLVFIPAVGEFVIPALLGGPDTLMIGKVLWNEFFSNRDWPVASAVAIVMLLVLVIPIMLLRKAQASEAEANA

SEQ ID NO: 131391 - DNA, 954 bp, Pseudomonas syringae pv. tomato str. DC3000
  CDS (1)..(954): transl_table=11
gtgggaagacgacagcggcgtggtactgcgctcatgaaaatacgcaagatcaagcgcgctttcgagcgcataaaacccaccgggcggcagatggtcatcggtgtgccgttcctctggctattcctgttctttgccttgccgtttttgattgtgctcaagatcagcttcgccgaagccgacgtcgcgatcccgccgtacaccgagatcttcagttacgccgacgaaaagctgcaaatggccctgaatttcgccaactacaccttgctcagcggcgatgatctgtacgtttcggcgtacctgggttcgctgaaaatggcgtttatcagcaccgcgctatgcctgctgatcggctacccgatggcctacgccatcgccagcgcccgcaaggacctgcagaccgtgctgttgctgctgatcatgatgccgacctggaccgcgatcctgattcgcgtgtatgcgtggatgggtattctcagcaacaacggcctgctcaacgcctttctgatgtggctgggcctgatcgacgcgccgttgcagatcctcaataccaacctggcggtgtacatcggcgtggtctattcctacctgccgttcatgatcctgccgctctatgccaacctcgtgaagcacgacaccagcctgctggaagccgcgtccgacctgggctccagcaccttcaacagcttctggaaaatcaccgtgccgctgtccaagaacggcgtgatcgctggctgcatgctggtgtttatcccggtggtgggcgagttcgtgatccccgaactgctcggtggcccggaaaccctgatgatcggccgtgtgctgtggcaggaattcttcaacaaccgtgactggccggtggcttcggcactggcggtcatcatgctgctggtgctgatcgtgcccattattctgttcaaccgcagtcaggccaaagagctggagggcaaggcatga

SEQ ID NO: 131392 - protein, 317 aa, Pseudomonas syringae pv. tomato str. DC3000
MGRRQRRGTALMKIRKIKRAFERIKPTGRQMVIGVPFLWLFLFFALPFLIVLKISFAEADVAIPPYTEIFSYADEKLQMALNFANYTLLSGDDLYVSAYLGSLKMAFISTALCLLIGYPMAYAIASARKDLQTVLLLLIMMPTWTAILIRVYAWMGILSNNGLLNAFLMWLGLIDAPLQILNTNLAVYIGVVYSYLPFMILPLYANLVKHDTSLLEAASDLGSSTFNSFWKITVPLSKNGVIAGCMLVFIPVVGEFVIPELLGGPETLMIGRVLWQEFFNNRDWPVASALAVIMLLVLIVPIILFNRSQAKELEGKA

SEQ ID NO: 131393 - DNA, 861 bp, Vibrio parahaemolyticus RIMD 2210633
  CDS (1)..(861): transl_table=11
atgataagcaagaagattaatcttcagaacgcaatcattaccctaattgttggttggctaacacttttcgtgttggttccaaacctaatgattatcggtacaagttttttaacgcgtgatgaagcgaacttaattgaactgacttttactttcgacaactaccttcgcttacttgatccattgtacgcaaaagtgctgatgcactctttctacatggcaatcattgcgacgttgttgtgtttaatcatcggctacccatttgcttacatcgtggcaaaaatgcctgagaaatggcgcccgtttatgctgtttcttgtgattgtaccgttttggacaaactcacttatccgtacttacggtttgaagattgttcttggcacacagggcatcttgaacaagtcattaatggcaatggatattatcgataagccattgcgtcttatgtataccgaaacagcggtaatgattggtcttgtctacattttgcttccgtttatgattctgcctctgtattcggcaatcgagaagctagacaacacctacattgaggctgcaaaagacttaggcgcaagcaaactgcaaaccatcacaaaagtgatcttgccgttaacgatgccaggcattattggtggctgtttgttggtacttcttcctgcgttaggtatgttctacatctccgaccttctaggcggagcgaagaacctattaattggtaacgtaattaagagccaagtattaaacgctcgtgattggccattcggtgcggcaaccagtatcgcacttactattgcaatggcaatcatgctgtacgcctactacagagcaggcaaactattgaataagaaggtggagctagactaa

SEQ ID NO: 131394 - protein, 286 aa, Vibrio parahaemolyticus RIMD 2210633
MISKKINLQNAIITLIVGWLTLFVLVPNLMIIGTSFLTRDEANLIELTFTFDNYLRLLDPLYAKVLMHSFYMAIIATLLCLIIGYPFAYIVAKMPEKWRPFMLFLVIVPFWTNSLIRTYGLKIVLGTQGILNKSLMAMDIIDKPLRLMYTETAVMIGLVYILLPFMILPLYSAIEKLDNTYIEAAKDLGASKLQTITKVILPLTMPGIIGGCLLVLLPALGMFYISDLLGGAKNLLIGNVIKSQVLNARDWPFGAATSIALTIAMAIMLYAYYRAGKLLNKKVELD

SEQ ID NO: 131395 - DNA, 954 bp, Salmonella enterica subsp. enterica serovar Typhi Ty2
  CDS (1)..(954): transl_table=11
atgagcacacttgaacctccggcacgcatcagtaaacctggcggcgcggcgctatggttggcgcgaatgcaaatgaaacatgggcgtaagctggttattgctttgccttatatctggctcattctgctgtttttactgccgtttcttatcgtctttaagataagcctggcggaaatggcgcgggcgatcccgccgtataccgatctgctggaatgggctgacggtcagttgtcgattacgctcaacctcggcaattttttgcaactgaccgacgatccgctctatttcgaagcctgtctgcaatcgttacaaattgccggtatttccacaatctgctgcctgctgctgggctacccgctggcgtgggcggtggcgcacagcaagccctccacgcgcaatatcctgctgctgttggtgattctgccctcgtggacgtcttttttaatacgcgtctatgcctggatgggcattttgaaaaacaacggtgtgctgaacaatgtgttgctgtggctaggggttatcgatcagccgctgacgatcctgcacactaacctggccgtctatatcggcattgtttatgcgtatctgctgtttatggttctgcccatttataccgcgttgacgcgcattgattattcgctggtggaagcgtcgctggatctcggcgcccgaccgatgaaaacattttttagcatcattgtcccgctcaccaaaggcggaatcatcgccggctcgatgctggtttttatcccggcggtgggcgagttcgtgatcccggaactgcttggcgggccggacagtatcatgattggtcgcgtcctgtggcaggagtttttcaataaccgcgactggccggtggcttctgcggtcgccattattatgttgctgctgctgatagtcccgatcatgtggttccataaacatcagcaaaaaagtgtgggggagcacggatga

SEQ ID NO: 131396 - protein, 317 aa, Salmonella enterica subsp. enterica serovar Typhi Ty2
MSTLEPPARISKPGGAALWLARMQMKHGRKLVIALPYIWLILLFLLPFLIVFKISLAEMARAIPPYTDLLEWADGQLSITLNLGNFLQLTDDPLYFEACLQSLQIAGISTICCLLLGYPLAWAVAHSKPSTRNILLLLVILPSWTSFLIRVYAWMGILKNNGVLNNVLLWLGVIDQPLTILHTNLAVYIGIVYAYLLFMVLPIYTALTRIDYSLVEASLDLGARPMKTFFSIIVPLTKGGIIAGSMLVFIPAVGEFVIPELLGGPDSIMIGRVLWQEFFNNRDWPVASAVAIIMLLLLIVPIMWFHKHQQKSVGEHG

SEQ ID NO: 131397 - DNA, 945 bp, Streptomyces avermitilis MA-4680
  CDS (1)..(945): transl_table=11
gtgatgacgagcctcgccgacgccccgccgccgctcgccccgcccgccgccgagaagccgcccaggtcgcccaaggcgcgcaaacgcggccgcctcgtcccgtactggctgctgctgcccggcctcctgtggctggtggtcttcttcgcgctgccgatgatctaccaggcctccacctccgtgcagacgggttccctggaggagggcttcaaggtcacctggcacttccagacctactggaacgccctgtccgactactggccgcagttcctgcggtccgtgctctacgcgggcgccgccacgctcctgtgtctgctgctcggctacccgctcgcgtatctgatcgccttccgcgccggccgctggcgcaacgtcgtgctgatcctggtcatcgcgccgttcttcaccagcttcctgatccgtacgctcgcctggaagacgatcctcgcggacggcggcccggtcgtcggcaccctcaactcgctgcacgtcctggacgtcaccaactggctcggcatgaccgcgggcgaccgcgtcctggccaccccgctcgcggtggtctgcggtctgacgtacaacttcctgccgttcatgatcctcccgctctacacctcgctggagcgcatcgacggacgcctccacgaggcggcgggcgatctgtacgcgaagccgttcaccaccttccggaaggtcaccttcccgctgtcgatgccgggcgtcgtctccggaacgctgctgaccttcatcccggccagcggcgactacgtgaacgccgatctcctcggctccacggacacccgcatggtcggcaacgtcatccagacgcagttcctgcggattctcgactatccgacggccgcggcactctcgttcatcctcatggccgcgatcctcatcatggtcacgctctacatccgcaagtccgggacggaggatctggtctaa

SEQ ID NO: 131398 - protein, 314 aa, Streptomyces avermitilis MA-4680
MMTSLADAPPPLAPPAAEKPPRSPKARKRGRLVPYWLLLPGLLWLVVFFALPMIYQASTSVQTGSLEEGFKVTWHFQTYWNALSDYWPQFLRSVLYAGAATLLCLLLGYPLAYLIAFRAGRWRNVVLILVIAPFFTSFLIRTLAWKTILADGGPVVGTLNSLHVLDVTNWLGMTAGDRVLATPLAVVCGLTYNFLPFMILPLYTSLERIDGRLHEAAGDLYAKPFTTFRKVTFPLSMPGVVSGTLLTFIPASGDYVNADLLGSTDTRMVGNVIQTQFLRILDYPTAAALSFILMAAILIMVTLYIRKSGTEDLV

SEQ ID NO: 131399 - DNA, 867 bp, Haemophilus ducreyi 35000HP
  CDS (1)..(867): transl_table=11
atgaagattgctaataacaaatttcaaaatggtacagtggctgttatttttgggtggttgttgctttttgtactggttccaaatttactggtgttattgatcagttttttaactgaaaatcgtcaaagtgcttattttgttgattttagttttaatcttgattcgtatgcggccttgtttaatgatacttatgcaacagtattatggaactcgttaaaaatgtcagcaatagcgacttttttctgtttgctgattggttatccttttgcttttattattgccaaaatgccagcaaaaatacgaccgctattactttttctagtggtattgccttttgggactaattcattgattcgtatttatggtattaaaattttcttaggcgtaaaaggtgtattgaatgaagcattactcgcagtaggtttgattgatcaacctttacggttactcaattcagaattggccattattattggtttggtttatattctattgccctttatgattttaccgctgtattcttcaattgagaaaattgataatcgtttattagaagcggcaaaagatttaggtgcaaatgcattgcaacgctttattcgtatcactattccattaacgatgccgggtattgtggccggttgcttattagtattattgcctgcgatgggaatgttctatgttgcagatctattaggcggtggtaaaacgccattaattggtaatattatcaagagtctattcttgaatactaaccagttaccattaggatcggcagtcagtattgcattaaccttgctcatggcattgatgttgtatgtatattatcgtgctaacaaatttttaaataaaaaggtggagcttgaataa

SEQ ID NO: 131400 - protein, 288 aa, Haemophilus ducreyi 35000HP
MKIANNKFQNGTVAVIFGWLLLFVLVPNLLVLLISFLTENRQSAYFVDFSFNLDSYAALFNDTYATVLWNSLKMSAIATFFCLLIGYPFAFIIAKMPAKIRPLLLFLVVLPFGTNSLIRIYGIKIFLGVKGVLNEALLAVGLIDQPLRLLNSELAIIIGLVYILLPFMILPLYSSIEKIDNRLLEAAKDLGANALQRFIRITIPLTMPGIVAGCLLVLLPAMGMFYVADLLGGGKTPLIGNIIKSLFLNTNQLPLGSAVSIALTLLMALMLYVYYRANKFLNKKVELE

SEQ ID NO: 131401 - DNA, 915 bp, Bordetella bronchiseptica RB50
  CDS (1)..(915): transl_table=11
atgaggcggttcgccctgccgcggccatcgcgccgcacggtggccatcgtgccgccgttcgcctggctggtgctgttcctgctggtgccgttcctgctggtgttcaagatcagcttcgcggagctgcagttcggcattccgccgtacacgccactggccgagttcaaggacgaggccgtgcagctcagcctgcacctgcgcggctatgtcctgctgttcaccgacagcctgtatgtcgccacttacctcaattcggtcaagatggcggcgatcaccacgctgtgctgcattctcatcggctatccgatcgcctactacatcgcgcgttcggcgcccgcgctgcgcaatctgctgctgctggccgtgatcctgccgttctggacctcgctgctgctgcgcgtctacgcgtgggtgggcatcctgcgcaacgacggcctgctgaacaagctgctgatgagcctgggcctgatttccagtccgctggaaatataccgtaccgacctggccgtctacatcggcctggtctatgcctacctgccgttcttcatcctgccgctgtacgccaacctggtgaagatggacctgcgcctgctcgaagccgcctacgacctgggcgcgcggccgtggcaggcgttctggcgcatcaccgtgccattgtcgcggccgggcgtgatcgccggcgccatgctggtgttcatcccgtcggtgggcgagtacgtcatcccggaaatgctgggcggcgccgacaccctgatgatggggcgtgtcatgtggaacgagttcttcaacaacaccgattggccgatggcctcggccgtcacctgcgtgatggtgctgttgctgctggtgccgctggccctgttccagtacaaccagatcaagcagcaggatttcgccggcggaggccgccgatga

SEQ ID NO: 131402 - protein, 304 aa, Bordetella bronchiseptica RB50
MRRFALPRPSRRTVAIVPPFAWLVLFLLVPFLLVFKISFAELQFGIPPYTPLAEFKDEAVQLSLHLRGYVLLFTDSLYVATYLNSVKMAAITTLCCILIGYPIAYYIARSAPALRNLLLLAVILPFWTSLLLRVYAWVGILRNDGLLNKLLMSLGLISSPLEIYRTDLAVYIGLVYAYLPFFILPLYANLVKMDLRLLEAAYDLGARPWQAFWRITVPLSRPGVIAGAMLVFIPSVGEYVIPEMLGGADTLMMGRVMWNEFFNNTDWPMASAVTCVMVLLLLVPLALFQYNQIKQQDFAGGGRR

SEQ ID NO: 131403 - DNA, 909 bp, Chromobacterium violaceum ATCC 12472
  CDS (1)..(909): transl_table=11
atgaaactaccggatctgaaacgttgtctgccgacgggcaggggggccgtgataggcgtgcctttcctgtttctgttcgtgttcttcctgctacctttcctgctggtggtgggtatcagcttttcccagcagcagctgggcattccgccgtatacgccgctcaccaagttcgagaacgacgtgatcggcatcgcgctcaacatcggccactacaagttcatgctgagcgatgacctgtacttcgccacctacatcagctcggtgaagatggccttcgtctccaccgtgctgtgcctgctgatcggctacccgatggcttactacatcgccagggccgagggcgcggcgcgcaacacgctgatgatgatggtgatgctgccgttctggacctcctacctgatccgcgtctacgcctggatcggcatcctgaagaacgacggctttctcaaccagttcctgctgtggctgggcgtgatcgacagtccgctgcacctgtaccacaccaattggggcgtctacatcggcatggtgttttcttatctgccgttcatgatcatgccgttgtacgcccacctggtgaagatggacctgacgctgctggaggccgcctacgacctgggcgccaaaccgtggcgcgcgttctggcaggtgaccttgcccctgtcgaagaacggcatcatcgccggcagcctgctggtgttcatcccggcggtgggcgagtacgtgattccggagctgttgggcggctcggacacgctgatgataggacgggtgatgtgggaggagttcttcaacaatatggattggccgatggccgccaccgtcacctgctgcatggtattgctgctgctggtgccgatggcgctgttccagcactaccaggtcaagagcatggaggaagcgcaatga

SEQ ID NO: 131404 - protein, 302 aa, Chromobacterium violaceum ATCC 12472
MKLPDLKRCLPTGRGAVIGVPFLFLFVFFLLPFLLVVGISFSQQQLGIPPYTPLTKFENDVIGIALNIGHYKFMLSDDLYFATYISSVKMAFVSTVLCLLIGYPMAYYIARAEGAARNTLMMMVMLPFWTSYLIRVYAWIGILKNDGFLNQFLLWLGVIDSPLHLYHTNWGVYIGMVFSYLPFMIMPLYAHLVKMDLTLLEAAYDLGAKPWRAFWQVTLPLSKNGIIAGSLLVFIPAVGEYVIPELLGGSDTLMIGRVMWEEFFNNMDWPMAATVTCCMVLLLLVPMALFQHYQVKSMEEAQ

SEQ ID NO: 131405 - DNA, 855 bp, Gloeobacter violaceus PCC 7421
  CDS (1)..(855): transl_table=11
ttgaaaacctctgccttctcccccctgcggggcattctgctcaccgccccagccgtcatgtatctactggctttcctcgcggctccccttgccctggtggccgctacgagtgtgctgagccgtagcccctacggcgaagtggtcttcaaattcaccgccgacaactacacccgtctgttcgatcctctctatctcaacatcctgctcgattcgctgacgattgccggggcgacaacggccatcacgttgctcatcggctatccgctcgcttggtggatggcccgcgtcccgcaacgggtgcgctcggtggcgctgtttgccattctggtaccgttctggacaaattttttgatccgcatctacgcctggatcttaattctgcgttctgggggactgcttgaagggctgcttgcgggattggggctctggcgcggttcgatcgaaattctctacactccctgggcggtgctcatcggtatggtctacgagtttttgcccttcatggtgctgccgctctacgccagcctcgaaaagatcgacgaagcgcagctcgccgccgccgccgatcttggcgccagaccgttccaggtattctggcgcgtcgtgctgcccctgggactaccgggcctggtggcgggcagcaccctggtttttgtcccggcgatgggcatgttcgccgtgcccgatttgatgggtggggcacgcacgttgctggtgggcaatttgatccgcaaccagtttctagtcgcacgcgactggccctttggagcggcggcggccatggtgctggtgatcctcaccctcgggctgctggtcctctacacccgctttgccgagaaggaaacactcgtatga

SEQ ID NO: 131406 - protein, 284 aa, Gloeobacter violaceus PCC 7421
MKTSAFSPLRGILLTAPAVMYLLAFLAAPLALVAATSVLSRSPYGEVVFKFTADNYTRLFDPLYLNILLDSLTIAGATTAITLLIGYPLAWWMARVPQRVRSVALFAILVPFWTNFLIRIYAWILILRSGGLLEGLLAGLGLWRGSIEILYTPWAVLIGMVYEFLPFMVLPLYASLEKIDEAQLAAAADLGARPFQVFWRVVLPLGLPGLVAGSTLVFVPAMGMFAVPDLMGGARTLLVGNLIRNQFLVARDWPFGAAAAMVLVILTLGLLVLYTRFAEKETLV

SEQ ID NO: 131407 - DNA, 915 bp, Rhodopseudomonas palustris CGA009
  CDS (1)..(915): transl_table=11
atgagcggccgccggatcttcaccaagccggcgcggctcgcagccgtcgcgccttatgtctggatgctgctgttcttcctggtgccgttcggcttcgtggtgaagatcagcctgtcgcagaccgcgatcgcgcagccgccttatacgccggtgttcgatctcgccgccggctggacggcgctacgcgcggcgttcgaggcgctgtcggccgacaatttcaagctgatcctcggcgaccacctctacgtcgtctcgtatttgcgcagcctcaccgtggcggcggtgtcgaccgcgaccctgctgctgatcggctatccgatcgcctatgcgatggcgcggctgccgcgccgctggcagccactggcgatgatgctggtaatcgtgccgttctggacctcgttcctgatccgcatctacgcctggatcaacatcctgcagcatgacggcctgctcaatcagctgctgctggcgctgcgcatcgtgtcgaagccggtggtgtggctgtcgacagacactgcaatgtatgtcggcatcgtctattcgtatctgccgttcatggtgctgccgctgtatgcgacgctggcgaagctgccgcattcgctgtcggaagccgccgccgatctcggcgcctcgccgcggcaggcattctggctggtgacgttcccgctgtcgctgcccggcatcggcgccggcgtgctgctgtgcttcatcccgatcgtcggcgaattcgtcatccccgatctgctcggcggctcgacctcgccgatgatcggccagacgctgtggctggagttcttcaccaaccgcgactggccggtcgcctcggcgctggctgtgctgctgctcggcgtgttgctgctgccgctgttgatctacgagcgggcgcagcgccgccagctcgaggggaggtcgtga

SEQ ID NO: 131408 - protein, 304 aa, Rhodopseudomonas palustris CGA009
MSGRRIFTKPARLAAVAPYVWMLLFFLVPFGFVVKISLSQTAIAQPPYTPVFDLAAGWTALRAAFEALSADNFKLILGDHLYVVSYLRSLTVAAVSTATLLLIGYPIAYAMARLPRRWQPLAMMLVIVPFWTSFLIRIYAWINILQHDGLLNQLLLALRIVSKPVVWLSTDTAMYVGIVYSYLPFMVLPLYATLAKLPHSLSEAAADLGASPRQAFWLVTFPLSLPGIGAGVLLCFIPIVGEFVIPDLLGGSTSPMIGQTLWLEFFTNRDWPVASALAVLLLGVLLLPLLIYERAQRRQLEGRS

SEQ ID NO: 131409 - DNA, 966 bp, Erwinia carotovora subsp. atroseptica SCRI1043
  CDS (1)..(966): transl_table=11
atgactttatttcccgaacatcacacggcggaaccaccaggcaaagccagactctggctgcgagtgttgatggcgcgctggcgtcaaaagcacggccgcaagctggttatcgcgctgccgtatctgtggctgctgctgctgtttatgctgccattcctgatcgtatttaaaatcagttttgctgaaatggcgcgggcgattccgccctataccgatctggtttcctggatggacgacaagctggatatttcccttaaccttgggaactacctgcatttgttggacgatccgctgtatttcgattcctatatgcaatcgcttcaggttgctgctgtatcgacgctgtgctgcttgtttattggctatccactggcctgggcagtcgcgcacagtaaaccctcaacgcgtaatattctgctattactggtgatactgccgtcatggacgtcgttcctgattcgcgtttacgcctggatggggattctgaaaaataacggtatcctgaataactttctgctgtggctgggcgtgattgatgaaccgctgatcattctgcataccaatttggcggtttatatcggcgtcgtctattcctatctgccgtttatggtgttgccgatttataccgcgctgacgcggctggactattcgctagtggaagcctcgttggatctgggcgcacggccattaagaacctttttcagcgtgatcgtcccgctaacgaaaggcggaattattgcgggctcgatgttggtattcattccagcggtgggggaatacgtgattccagaactgcttggcgggccggacagcatcatgattggccgtattctgtggcaggaattctttaataaccgcgattggccagtggcatccgctgtcgccatcgtcatgctgctgctgttgattatgccgattatgtggttccacaagcatcagagcaaaacggcggagggggaagcgtga

SEQ ID NO: 131410 - protein, 321 aa, Erwinia carotovora subsp. atroseptica SCRI1043
MTLFPEHHTAEPPGKARLWLRVLMARWRQKHGRKLVIALPYLWLLLLFMLPFLIVFKISFAEMARAIPPYTDLVSWMDDKLDISLNLGNYLHLLDDPLYFDSYMQSLQVAAVSTLCCLFIGYPLAWAVAHSKPSTRNILLLLVILPSWTSFLIRVYAWMGILKNNGILNNFLLWLGVIDEPLIILHTNLAVYIGVVYSYLPFMVLPIYTALTRLDYSLVEASLDLGARPLRTFFSVIVPLTKGGIIAGSMLVFIPAVGEYVIPELLGGPDSIMIGRILWQEFFNNRDWPVASAVAIVMLLLLIMPIMWFHKHQSKTAEGEA

SEQ ID NO: 131411 - DNA, 966 bp, Yersinia pseudotuberculosis IP 32953
  CDS (1)..(966): transl_table=11
gtgataccagaatccacgagtggggccgcagaacccccgatccgctcagttgggccggtcagggcgctgatacaacgcttccaaatggcgcatggccgtaaactggtcatcgccatgccatatttatggctattcctcttatttatgctgcctttcctgatcgtgtttaaaatcagtttggcggaaatggtgcgggcggttcccccttataccgatctcaccacttggctggacggcaagctggatatctcgctaaatctgggtaattacctgctactgctggatgatccgttatatatcgatgcctatttgcaatcgttgcaagtggcggcggtatcaacgctgtgctgcctgcttattggctacccattggcttgggcgattgctcacagtaaaccatcgacccgcaacatcttattgctgttggttatcttgccgtcatggacgtcatttctgatccgggtttatgcctggatggggatcctaaaaaataacggcatcttgaataactttttaatatggaccggaattattgatcagccgctagtcatcttacacaccaatctggccgtttatattggcgtggtgtattcctacctgccatttatggtgttgccgatttataccgcattaacgcgactggattactcgctggtagaagctgcgttggatctcggggccaggccgttcaagacgtttatcagtgtgattatcccgttgaccaaaggcggtattgtcgctggctctatgttggtatttatccctgcagtaggggagtttgtgatccccgagctccttggtgggccggatagcatcatgattggccgcattttgtggcaggagtttttcaataatcgcgactggccggtggcctctgcggtggcaaccgtgatgttagtgctgctgattgccccgatactctggttccacaaacatcaaaataaagatattgggggcgcgagatga

SEQ ID NO: 131412 - protein, 321 aa, Yersinia pseudotuberculosis IP 32953
MIPESTSGAAEPPIRSVGPVRALIQRFQMAHGRKLVIAMPYLWLFLLFMLPFLIVFKISLAEMVRAVPPYTDLTTWLDGKLDISLNLGNYLLLLDDPLYIDAYLQSLQVAAVSTLCCLLIGYPLAWAIAHSKPSTRNILLLLVILPSWTSFLIRVYAWMGILKNNGILNNFLIWTGIIDQPLVILHTNLAVYIGVVYSYLPFMVLPIYTALTRLDYSLVEAALDLGARPFKTFISVIIPLTKGGIVAGSMLVFIPAVGEFVIPELLGGPDSIMIGRILWQEFFNNRDWPVASAVATVMLVLLIAPILWFHKHQNKDIGGAR

SEQ ID NO: 131413 - DNA, 825 bp, Legionella pneumophila subsp. pneumophila str. Philadelphia 1
  CDS (1)..(825): transl_table=11
atgaaggctaaatcatctgcactgtatttattgtatttttggctaattatttttggcttcattcctttgttaatggtgctggttgccagctttttatcccaagacagtattcatcttgttaccttgccattgacattggaaaattattttgacttgtttactcctgtttttgcaaaaatccttttccgatccttgctgatagcctgtgtcaccacccttctttgcctgctcatcgcctatccctttagttatcttatgattaaatcaaaacaccaatctattttattgctgttgattatcatacctttctggacaagctcattaataagaacttatgctttgattgctatccttaaatacaaaggcgtgataaatgccctcttgctgaaattgcatttgattgatgttcccttgtcactactctataccaattttgcggtcgttattggcttggtttacaatcttttccctttcatggtcctacccatttttactaatatggaacggttcgatttcaggttaattgaggcagctaaagatttaggggcaaacaagtggtctatatttacacgagtatttttgcctaacacagcccctggagtcttatcaggttgtttgctggtcttgttaccagcaatgactttattttacattcctaatgtattaggtggcgctcgttccattttattgggaaatttaatccaaaatcaattccttgtcctgagcgattggcctcagggagccgctaccagtgtgctattaacttccgttctgcttattttaatgttcatttttcggcgacagaacaatgaggtcattcgatga

SEQ ID NO: 131414 - protein, 274 aa, Legionella pneumophila subsp. pneumophila str. Philadelphia 1
MKAKSSALYLLYFWLIIFGFIPLLMVLVASFLSQDSIHLVTLPLTLENYFDLFTPVFAKILFRSLLIACVTTLLCLLIAYPFSYLMIKSKHQSILLLLIIIPFWTSSLIRTYALIAILKYKGVINALLLKLHLIDVPLSLLYTNFAVVIGLVYNLFPFMVLPIFTNMERFDFRLIEAAKDLGANKWSIFTRVFLPNTAPGVLSGCLLVLLPAMTLFYIPNVLGGARSILLGNLIQNQFLVLSDWPQGAATSVLLTSVLLILMFIFRRQNNEVIR

SEQ ID NO: 131415 - DNA, 930 bp, Burkholderia pseudomallei K96243
  CDS (1)..(930): transl_table=11
atgaacgcgctttcgtccctgtttgcgtggcccgtcaggaagttcggcctcacaggcagaacggccgtgatcgcgggcccgttcttctggctcgtgctgttcttcctcgtgccgttcgtgctcgtcgtcaagatcagtttcgcgcagctgcagctcggcattccgccgtatacggaactcacggcgctcgccgacggcgtgctcagcatcaagctgaacctgcagcactacgcgttcctgttcagcgacagcctgtacttcgcgacctacgtgaactcggtcgtcgtcgcggccgtcacgacgctgctgtgcctgctgatcggctatccgatggcgtactacatcgcgcgctcgaacccgggcacgcgcaacctgctgatgatggcggtgatgctgccgttctggacgtcgttcctgatccgcgtgtatgcatggatcggcatcctgaagaacaacgggctgctcaacaacttcctgctgtggacggggctcatcagcacgccgatcgagctgtaccggacgaacgtcggtgtctatatcgggatggtctactcgtatctgccgttcctcgtgatgccgctctacgcgcacctggtgaagatggacctgcgcctgctcgaagccgcctacgacctgggcgcgaagccgtggaaggcgttcgtgcagatcacgctgccgctgtcgaagaacgggatcatcgcgggctgcctgctcgtgttcattccggccgtcggcgagtacgtgattcccgagctgctcggcggcgcgaacacgctgatgatcggccgcgtgatgtggaacgagttcttcaacaacgcggactggccgatggcgtcggcggtgacctgcgcgatggtgctgctgctcctcgtgccgatggcgatgttccagcacttccaggcgaaggagcaggagggccaccgccgatga

SEQ ID NO: 131416 - protein, 309 aa, Burkholderia pseudomallei K96243
MNALSSLFAWPVRKFGLTGRTAVIAGPFFWLVLFFLVPFVLVVKISFAQLQLGIPPYTELTALADGVLSIKLNLQHYAFLFSDSLYFATYVNSVVVAAVTTLLCLLIGYPMAYYIARSNPGTRNLLMMAVMLPFWTSFLIRVYAWIGILKNNGLLNNFLLWTGLISTPIELYRTNVGVYIGMVYSYLPFLVMPLYAHLVKMDLRLLEAAYDLGAKPWKAFVQITLPLSKNGIIAGCLLVFIPAVGEYVIPELLGGANTLMIGRVMWNEFFNNADWPMASAVTCAMVLLLLVPMAMFQHFQAKEQEGHRR

SEQ ID NO: 131417 - DNA, 918 bp, Silicibacter pomeroyi DSS-3
  CDS (1)..(918): transl_table=11
atggacagccacggcgggtgtgctgctggcaaactgatgcgccggttcctgctgatcgccattccctatgcctggcttctggtgctgttcctggtgccatttgtcatcgtgctgaaaatctcgctgtcggacgcggccatcgcccgaccgccctatttcccgcagttcgactgggccgaaggtgtcatggcctttgtccgggaactggatttcgagaatttcatcttcctgacccaagatgatctgtactggaaagcctatctgagcagcctcaggatcgcgacaaccgcgaccctgctgacgctggtggcgggctatccgatcgcctatgccatggcccgcgcgccagaggaatggcgcccgaccctgatgatgcttgtgatcctgccgttctggacctcgttcctgatccgggtctatgcgtggatggggatcctgtcgaacgaagggtacctgaaccagatcctgctctggaccgggatcatcaacgagccgctgaccatcctgaacaccaacacggcggtctatatcggtatcgtctatacatatctgcccttcatgatcctgccggtctattcggcgcttgaccggatggacgggtcgctgatcgaggcggccgaggatctgggctgttcgcgggcgcaggccttttggctggttaccatcccgctgtcacggccgggtatcatcgcgggctgtttcctggtcttcatcccggttctgggtgaattcgtgatcccctcgttgttgggtggctccggcacgctgatgatcggcaaggtgttgtgggaggagttcttctccaaccgcgactggccggttgcctcggcggtggcggtggtgctgctcttgatcctcgtggtgcccatcgtgctgttccagcgcaaccagcagaaacaggcggaggccgagaaatga

SEQ ID NO: 131418 - protein, 305 aa, Silicibacter pomeroyi DSS-3
MDSHGGCAAGKLMRRFLLIAIPYAWLLVLFLVPFVIVLKISLSDAAIARPPYFPQFDWAEGVMAFVRELDFENFIFLTQDDLYWKAYLSSLRIATTATLLTLVAGYPIAYAMARAPEEWRPTLMMLVILPFWTSFLIRVYAWMGILSNEGYLNQILLWTGIINEPLTILNTNTAVYIGIVYTYLPFMILPVYSALDRMDGSLIEAAEDLGCSRAQAFWLVTIPLSRPGIIAGCFLVFIPVLGEFVIPSLLGGSGTLMIGKVLWEEFFSNRDWPVASAVAVVLLLILVVPIVLFQRNQQKQAEAEK

SEQ ID NO: 131419 - DNA, 966 bp, Neisseria gonorrhoeae FA 1090
  CDS (1)..(966): transl_table=11
atgaaccttaataaactgaaaaacaaactgttccgccgtccggggcagcgtgcggtgattgccgtaccgtatatttggcttttggtgctgtttctgattccgttcgccatcgtgctgaaaatcagctttgccgaacaagaaatcgccattccaccgtttactcctttaacgacgatagatgaggatttgggtcgcctgaacatcgccgtcagctatcaaaactatgccgatattttccaaaatttttggcatacccttaaccccttcggcgacagtgaaaacagtaatatctatctgatgacttattggtcttcaattaagactgcgctgacgacgacggtgatttgcctgttggtcggttacccgaccgcctatgcgatttcccgtgccaatccttccgtccgcaatggtttgctgcttgccatcatgttacctttttggacatcgttcctgctgcgtgtctatgcgtggatgggtttgctcgggcataacggcatcataaacaacttattgattaagatgggtattatcagagaaccattagatttgttctataatgcgttttcgttaaatttggtaatggtttatgcctatctgccgtttatgattctgccgctttacacgcagctggtgaaactggacagccgcctgcttgaagcggcttccgacttgggcgcgggaccggtcaaatcgttcttgacgattaccctgcctttgtcgaaaaccggcattattgcaggttcgatgctggttttcgtccccgctgtcggtgagttcgtcattcccgagctggtcggcggttcggaaaacctgatgatcggtaaagtattgtggcaggcattctttgatcaaaacaactggccgttggcttctgccgtcgccgtcgtgatggtcgcgctactggttgtaccgattgccctgttccagcactatgaaaaccgcgaattggaagaaggagccaaataa

SEQ ID NO: 131420 - protein, 321 aa, Neisseria gonorrhoeae FA 1090
MNLNKLKNKLFRRPGQRAVIAVPYIWLLVLFLIPFAIVLKISFAEQEIAIPPFTPLTTIDEDLGRLNIAVSYQNYADIFQNFWHTLNPFGDSENSNIYLMTYWSSIKTALTTTVICLLVGYPTAYAISRANPSVRNGLLLAIMLPFWTSFLLRVYAWMGLLGHNGIINNLLIKMGIIREPLDLFYNAFSLNLVMVYAYLPFMILPLYTQLVKLDSRLLEAASDLGAGPVKSFLTITLPLSKTGIIAGSMLVFVPAVGEFVIPELVGGSENLMIGKVLWQAFFDQNNWPLASAVAVVMVALLVVPIALFQHYENRELEEGAK

SEQ ID NO: 131421 - DNA, 921 bp, Pseudomonas syringae pv. syringae B728a
  CDS (1)..(921): transl_table=11
atgaaaatccgcaagatcaagcgcgcgttcgagcgcataaagcccaacgggcggcagatggtcatcggcgtgccgttcctctggctgttcctgttctttgctctgccgtttctgatcgtgctcaagatcagcttcgccgaggccgacgtcgcgatcccgccgtacaccgaaatcttcagctacgccgacgaaaagctgcagatggtcctcaacttcgccaactacaccttgctcagtggcgatgatctgtacgtttcggcctatctgggctcgctgaagatggccttcatcagcaccttgctgtgtctgctgattggctatccgatggcctacgccatcgccagcgcgcgcaaggacctgcaaaccgtgctgttgctgctgatcatgatgccgacctggacggcgatcctgatccgcgtctacgcctggatgggcatcctcagcaacaacgggctgctcaatgcattcctgatgtggctgggcctgatcgacgcgccgttgcagatcctcaacaccaacctggcggtgtacatcggcgtggtctattcctacctgccgttcatgatcctgccgctgtacgccaaccttgtgaagcacgacaccagcctgctggaagccgcgtccgacctgggttcgagcaccttcaacagcttctggaaaatcaccgtgccgctgtccaagaacggcgtgatcgccggctgcatgctggtattcattccggtggtcggcgagttcgtgattcccgagctgctcggcggcccggaaaccctgatgatcggccgcgtgctgtggcaggaattcttcaacaaccgtgactggccggtggcttcggcgctggcggtcatcatgctgctggtgctgatcgtgcccatcatcctgttcaaccgcagtcaggccaaagaactggagggcaaggcatga

SEQ ID NO: 131422 - protein, 306 aa, Pseudomonas syringae pv. syringae B728a
MKIRKIKRAFERIKPNGRQMVIGVPFLWLFLFFALPFLIVLKISFAEADVAIPPYTEIFSYADEKLQMVLNFANYTLLSGDDLYVSAYLGSLKMAFISTLLCLLIGYPMAYAIASARKDLQTVLLLLIMMPTWTAILIRVYAWMGILSNNGLLNAFLMWLGLIDAPLQILNTNLAVYIGVVYSYLPFMILPLYANLVKHDTSLLEAASDLGSSTFNSFWKITVPLSKNGVIAGCMLVFIPVVGEFVIPELLGGPETLMIGRVLWQEFFNNRDWPVASALAVIMLLVLIVPIILFNRSQAKELEGKA

SEQ ID NO: 131423 - DNA, 954 bp, Colwellia psychrerythraea 34H
  CDS (1)..(954): transl_table=11
atgagtaaagtaaccggcactttttggctcggtcgttatgacacagtcaaaactcgatttagttcattgaaaaaaattcgctggggtagatactctgttatctctatcccttccttatggttagccttatttttctttattccctttttagttgtgtttaaaatttcactggctgaatctgctatagctgtacctccttatacagatatgtttgcttggaatgtagaagatgcaattattgatgtaaaaataaaacttggcaactatttatacctttttgaagactccttttatttagacgcctatttaagttcagttaagatcgccgcggtctctactttttttactttattaatcggctttccaatggcctattttattgcaagtaaaacaggcaccatgcgaacgcttttattaacgcttgttatcttacctttttggacttcatttctattacgagtctatgcgtggatgggctttcttaaaaagaatggtattgttaatgagtttttacaaggcattggccttattgaccaacctattcaaatgttacaaaccgactttgctgtatacattggtattgtctacacctacttaccttttatgatcttacctttgtacaccaccttagaaaaactagatggtagtttgattgaagcgtctaaagatctgggtgcaggaccaattagaacctttttcttgattaccttacccatgtctatgcccggtattttagctggctgtttattagtgttcatacctgccgttggagaatttgttattcctgccctattaggtgcgtctgacacgttaatgataggacgagtgctttgggatgagttcttccagaatagagactggccaatggcctcagcagtggcgaccatgatgttacttattttagttgttcctataatgtttttacgtaatggcaaaaaagaaggagctgaataa

SEQ ID NO: 131424 - protein, 317 aa, Colwellia psychrerythraea 34H
MSKVTGTFWLGRYDTVKTRFSSLKKIRWGRYSVISIPSLWLALFFFIPFLVVFKISLAESAIAVPPYTDMFAWNVEDAIIDVKIKLGNYLYLFEDSFYLDAYLSSVKIAAVSTFFTLLIGFPMAYFIASKTGTMRTLLLTLVILPFWTSFLLRVYAWMGFLKKNGIVNEFLQGIGLIDQPIQMLQTDFAVYIGIVYTYLPFMILPLYTTLEKLDGSLIEASKDLGAGPIRTFFLITLPMSMPGILAGCLLVFIPAVGEFVIPALLGASDTLMIGRVLWDEFFQNRDWPMASAVATMMLLILVVPIMFLRNGKKEGAE

SEQ ID NO: 131425 - DNA, 957 bp, Pseudomonas syringae pv. phaseolicola 1448A
  CDS (1)..(957): transl_table=11
gtggtgggaagacgacagcggcgtggtactgcgctcatgaaaatccgcaagatcaagcgcgcgttcgagcgcataaagcccaacgggcggcagatggtcatcggcgtgccgttcctctggctgtttctgttctttgccctgccgtttttgatcgtgctcaagatcagcttcgccgaagccgacgtcgcgatcccgccatacaccgagatcttcagctacgccgacgaaaagctgcagatggtcctcaacttcgccaactacaccttgctcagtggcgatgacctgtacgtttcggcctatctgggctcgctgaagatggccttcatcagcaccttgctgtgcctgctgatcggctatccgatggcctatgccatcgccagcgcgcgcaaggacctgcaaaccgtgctgttgctgctgatcatgatgccgacctggacggcgatcctgatccgcgtctacgcctggatgggcatcctcagcaacaacgggctgctcaatgctttcctgatgtggcttgggctgatcgacgcgccgttgcagatcctcaacaccaacctggcggtgtacatcggcgtggtctattcctacctgccgttcatgattttgccgctgtacgccaaccttgtgaagcatgacaccagcctgctggaagccgcgtccgatctgggttcgagcactttcaacagcttctggaaaatcaccgtgccgctgtccaagaacggtgtgatcgccggctgcatgctggtattcatcccggtggtcggcgaattcgtgattcccgaactgctgggtggcccggaaacactgatgatcggccgcgtgctgtggcaggaattcttcaacaaccgtgactggccggtggcttcggcgctggcagtcatcatgctgctggtgctgatcgtgcctatcatcctgttcaaccgcagtcaggccaaagaactggagggcaaggcatga

SEQ ID NO: 131426 - protein, 318 aa, Pseudomonas syringae pv. phaseolicola 1448A
MVGRRQRRGTALMKIRKIKRAFERIKPNGRQMVIGVPFLWLFLFFALPFLIVLKISFAEADVAIPPYTEIFSYADEKLQMVLNFANYTLLSGDDLYVSAYLGSLKMAFISTLLCLLIGYPMAYAIASARKDLQTVLLLLIMMPTWTAILIRVYAWMGILSNNGLLNAFLMWLGLIDAPLQILNTNLAVYIGVVYSYLPFMILPLYANLVKHDTSLLEAASDLGSSTFNSFWKITVPLSKNGVIAGCMLVFIPVVGEFVIPELLGGPETLMIGRVLWQEFFNNRDWPVASALAVIMLLVLIVPIILFNRSQAKELEGKA

SEQ ID NO: 131427 - DNA, 894 bp, Anabaena variabilis ATCC 29413
  CDS (1)..(894): transl_table=11
gtgaatacagaaattcgtgatactccagatgatcttgccaacattcaaaagttaaaccgccgaaagttaaatcttatccaacctttggcattgctagcgccgtctggtatttggttattactattattagtactaccaacattgataatttttcagttgagtctagttcccaatattagaccaggagatatagtcaaccccagtggattggataactatgtccgcatacttgaccccttatacttgcaagtaatcctgcgatcgctctggttggcattaggtacaatggcgatctgtctaattttgggttttccggtggcgtattggattgcccaaattgcaccgcaacgctggcgcaatctcctggtaataggctttgtcttacctttgtggacttcttctctactccgttcctatgcttggataaccattctccgcccgactggtcttttgaacagtctattgaacagcatcggtttacctactttagaactacttaaccgtacaccagctgttttaattggcatgagttacagcctactcccttacatggtgttgattttatacgcttcattagagaagttagataaacgcttactagaagcagcagcagatttaggcgcaagtcccgtcaaggctttttggaaagtcacagttccgcaaatttccccaggaatcacggctggttctctccttgtcttaattacagccttaggggactttattgacccagaattactcggtggtgcttctagtatgacggcagccaggctagtttataaccaatttctcggagttacccaaaactggggctttggttcagcgttgagtatgaccctaattttggctgtgagtatagcgatcgctctactgattaaatttggcgatcgctag

SEQ ID NO: 131428 - protein, 297 aa, Anabaena variabilis ATCC 29413
MNTEIRDTPDDLANIQKLNRRKLNLIQPLALLAPSGIWLLLLLVLPTLIIFQLSLVPNIRPGDIVNPSGLDNYVRILDPLYLQVILRSLWLALGTMAICLILGFPVAYWIAQIAPQRWRNLLVIGFVLPLWTSSLLRSYAWITILRPTGLLNSLLNSIGLPTLELLNRTPAVLIGMSYSLLPYMVLILYASLEKLDKRLLEAAADLGASPVKAFWKVTVPQISPGITAGSLLVLITALGDFIDPELLGGASSMTAARLVYNQFLGVTQNWGFGSALSMTLILAVSIAIALLIKFGDR

SEQ ID NO: 131429 - DNA, 915 bp, Pseudomonas fluorescens PfO-1
  CDS (1)..(915): transl_table=11
atgagaaccttcaatcagcaattcctgcgcctggtgcccagcgggcgaaagttcgtcatcggcattccgttcatctggctgttcctgttcttcatgctgccgttcttcctggtgatgaagatcagcttctcggaagccgcgctgtcgatcccgccgtactcggagatctacacctacgccgaacagaaattccagctgctgctgaacatcggcaactacaccatgcttggcgaggacgagctgtacctgtcggcctacctcggttcgctgaaggtcgcggcactgagcacgatgatgtgcctggtgatcggcttcccgatggcttacgcgatcaccaaggccagcaaggaagcgcaaaacgtcctgttgctgttgatcatgatgccgacctggaccgcgatcctgatccgcgtttacgcgtggatgggcatcctcagcaacaacggtctgcttaacgcatttttgatgtggaccgggctcaccgatcacccgatcgagatcctcaacaccaacaccgccgtctacattggggtcgtgtatgcctatctgccgttcatggtgctgccgctctacgccaacctggtgaagcacgacggcagcctgttggaagccgcgcaggatctgggttcgagcaacttcaacaacttctggaaaatcaccgtgccgctggccaagaacggcatcatcgccggctgcatgctggtgttcattccggtggtgggcgagttcgtgattccggaactgctgggcggcccggagaccctgatgatcggtcgcgtgctgtggcaagagttcttcaataaccgcgactggccggtggcgtctgctctggcggtggtgatgctgttgatcctgattgtgccgatcctgctgttcaaccgcagccaggccaaagagatggagggacgaggatga

SEQ ID NO: 131430 - protein, 304 aa, Pseudomonas fluorescens PfO-1
MRTFNQQFLRLVPSGRKFVIGIPFIWLFLFFMLPFFLVMKISFSEAALSIPPYSEIYTYAEQKFQLLLNIGNYTMLGEDELYLSAYLGSLKVAALSTMMCLVIGFPMAYAITKASKEAQNVLLLLIMMPTWTAILIRVYAWMGILSNNGLLNAFLMWTGLTDHPIEILNTNTAVYIGVVYAYLPFMVLPLYANLVKHDGSLLEAAQDLGSSNFNNFWKITVPLAKNGIIAGCMLVFIPVVGEFVIPELLGGPETLMIGRVLWQEFFNNRDWPVASALAVVMLLILIVPILLFNRSQAKEMEGRG

SEQ ID NO: 131431 - DNA, 921 bp, Pseudomonas fluorescens PfO-1
  CDS (1)..(921): transl_table=11
atgaacatgcgcaaattcaaacgccggctcaatcgaataattcccggtggccgccagttggtcatcggggttccgttcatctggctgttcctgttcttcatgctgccgttcttcatcgtcctgaagatcagcttcgccgaagcggacgtggccattccgccgtacaccgagatctacacttacgccgagcagaagctgcaactgctgctgaacctgggcaactacgcgatgctcggcgacgacgagctgtacatcgccgcctacctcggctcgctgaagatggcatttttcagcacgctgctgtgcctgttgatcggttacccgatggcctacgccatcgccagcgcccgcaaagagctgcaaacggtgctggtgctgctgatcatgatgccgacctggaccgcgatcctgatccgcgtctatgcgtggatgggtatcctcagcaacaacggcctgctcaacggcttcctgatgagcatgggtttgatcgacgagccgctgcagattctcaacaccaacctcgcggtgtacatcggcgtcgtctactcgtacctgccgttcatgatcctgccgctgtacgccaacctggtgaagcacgacaccagcctgctggaggccgcttccgacctcggttcgagcaccttcaacagcttctggaaaatcaccgtgccgctgtccaagaacggcatcatcgccggctgcatgctggtgttcatcccggtggtgggcgagttcgtgatcccggaactgctcggcggtccggaaaccctgatgatcggtaaagtgctctggcaagagttcttcaacaaccgtgactggccggtggcgtccgccctggcggtggtgatgctggcgatcctgatcgtgccgatcatcctgttcaaccgcagtcaggccaaggaaatggagggtaaagaatga

SEQ ID NO: 131432 - protein, 306 aa, Pseudomonas fluorescens PfO-1
MNMRKFKRRLNRIIPGGRQLVIGVPFIWLFLFFMLPFFIVLKISFAEADVAIPPYTEIYTYAEQKLQLLLNLGNYAMLGDDELYIAAYLGSLKMAFFSTLLCLLIGYPMAYAIASARKELQTVLVLLIMMPTWTAILIRVYAWMGILSNNGLLNGFLMSMGLIDEPLQILNTNLAVYIGVVYSYLPFMILPLYANLVKHDTSLLEAASDLGSSTFNSFWKITVPLSKNGIIAGCMLVFIPVVGEFVIPELLGGPETLMIGKVLWQEFFNNRDWPVASALAVVMLAILIVPIILFNRSQAKEMEGKE

SEQ ID NO: 131433 - DNA, 993 bp, Rhodospirillum rubrum ATCC 11170
  CDS (1)..(993): transl_table=11
atgaccgccgagccggccccgggcgccgcgccggtgtcgcgcccgcccgaaatcctgccgggcatggcgccttggcgcatgtggcttgatgcccagatccgccacaacggccggcggctggtgatcctggtgccctatgtctggctgctgctgtttttcgttctgcccttcgccatcgtcctcaagatctcctttgccgaattccgcgtcggcgtgccgccctatacggccctgatcgacttcacccaggacgcctatctgcggctgaccctggcgctgtcgaactacaagtacatgctcgacgacgagatgtacgtgatcgcctatctgaattcgctgcgcatcgccggcatttccaccgtgctcgccctgctgatcggctatccgatggcctatggcatcgccagggcgcccaaggggccgcgcaccatcttgctgttcctggtgatcttgccgttctggacgtcgttcctcatccgcgtctatgcctggatgggcatcctcaagggcaacggcctgctcaataccttcctgatctggaccggggtgatcgaccagccgctgaccatcatgggcacggaatgggcggtgttcatcggcatcgtctattcctatctgcccttcatggtgctgccgctgtacgccaccttggagaagctcgaccccagcttgctcgaagccgcccacgacctgggctgccggccgtggaaggcctttctgaccatcaccctgccgctgtcggtgccgggaatcatcgccggatcgatgctggtgttcatcccctcggtcggcgagttcgtcatccccgaactgctgggcggggccgataccttcatgatcggccgggtgctgtggaacgagttcttcctcaaccgcgattggccggtggcctcggcggtggcggtggcgatgctgctgatgctggtggtgccgatcatgatcttccagaacatccaggccaaacaggccgaagcggcggaggaacggtcataa

SEQ ID NO: 131434 - protein, 330 aa, Rhodospirillum rubrum ATCC 11170
MTAEPAPGAAPVSRPPEILPGMAPWRMWLDAQIRHNGRRLVILVPYVWLLLFFVLPFAIVLKISFAEFRVGVPPYTALIDFTQDAYLRLTLALSNYKYMLDDEMYVIAYLNSLRIAGISTVLALLIGYPMAYGIARAPKGPRTILLFLVILPFWTSFLIRVYAWMGILKGNGLLNTFLIWTGVIDQPLTIMGTEWAVFIGIVYSYLPFMVLPLYATLEKLDPSLLEAAHDLGCRPWKAFLTITLPLSVPGIIAGSMLVFIPSVGEFVIPELLGGADTFMIGRVLWNEFFLNRDWPVASAVAVAMLLMLVVPIMIFQNIQAKQAEAAEERS

SEQ ID NO: 131435 - DNA, 882 bp, Francisella tularensis subsp. holarctica
  CDS (1)..(882): transl_table=11
atgcaaaacttagaaaaaagctttagacatactttagtttatctaattccttttatatggtttgtagtttttctgcttataccatttttatttgtcgtaggtattagctttactttacccgctgatggtactccgcctgttacttcgttgatgacttataaacaatcagcactacactttacgctatatctaagtaattatattgagctgattcattataatctaatattcatatcattacttaaatcttttaaagttgcttttataactacagtattgtgtattttaatcggttatccgatggcattagcattatcaaaagccaaaaagaacacccagattttctttttagttctaattatcattccatactggacctcatttctacttagaacatatgcgtgggtgacattactaggtaaccataccttaaatcaatttctaatggatttaggcttaccaagcatggctttactttacaatgatttttcgatgtatttaggtatggtttattgttacttaccatttctagtgttaccactgtatagcactctaattaaaatcgatcctagtatctatgatgctgctgaggatttaggctctaggccgattaattctttctttaagataacactaccattatcaatgcctgggctaattgctggcagcttgttaatatttatcccagctattggtgaagtagttgtgccacaaattatgggtggtatggattcattaatgattggtaatgttatttgggaagagtttttcacatctaataattggggtatggcagctacgatatccgtagttttaatagttatactagttttacctatcctatggatgcaacgcattcaagcaaagcgaacttttgtttag

SEQ ID NO: 131436 - protein, 293 aa, Francisella tularensis subsp. holarctica
MQNLEKSFRHTLVYLIPFIWFVVFLLIPFLFVVGISFTLPADGTPPVTSLMTYKQSALHFTLYLSNYIELIHYNLIFISLLKSFKVAFITTVLCILIGYPMALALSKAKKNTQIFFLVLIIIPYWTSFLLRTYAWVTLLGNHTLNQFLMDLGLPSMALLYNDFSMYLGMVYCYLPFLVLPLYSTLIKIDPSIYDAAEDLGSRPINSFFKITLPLSMPGLIAGSLLIFIPAIGEVVVPQIMGGMDSLMIGNVIWEEFFTSNNWGMAATISVVLIVILVLPILWMQRIQAKRTFV

SEQ ID NO: 131437 - DNA, 909 bp, Saccharophagus degradans 2-40
  CDS (1)..(909): transl_table=11
gtgatacacgcttttacatctaaatgggttaaacctaaacacgccattatcgcagcgccttggctctggctttctgtgttttttgttttgccttttgtttttgtattaaaaataagtttttctgaggccctacttgcgcagcccccctacgacacaattattcgcgatatagacgaaggcctaataactttaaaaattaatttaggcacttacctattattatttgaagacagtctctacttagaagcactactgggttcgcttaaagtagcaaccatttctacattgctgtgtttattgatcggttaccccatggcgtacggtattgctagcgcacccaaagcttggcgcttaccgttattgatgctgattattttaccgttttggacatcgtttttaattcgaatctacgcatggataggcctactaaaggcaaatggtttaattaatacgctactgcttaaaattggaataatcgaccaacccttaactattttatataccaacaccgcggtttacattgggattgtttacaactacttaccatttttaattctgcccctgtacgccaccctagtgcggttagatcgtacactgctagaggctgcagcagacttgggctgtagaccttggcgacaatttaccagcatcacattaccgcaatctatgcctggggtactggcgggctgcatgctggtgtttattccggtgatgggcgaatttgtcattcctgatttgctcggtgggccagatacactcatgctgggcaagcttatgtggatggagttttttaacaataaagattggccgctggcctccgcactggcggtgatattacttattgtattagtggtgccgtttatgctgatgcgtcacttcgaagccaaagcggcagaggagctagcataa

SEQ ID NO: 131438 - protein, 302 aa, Saccharophagus degradans 2-40
MIHAFTSKWVKPKHAIIAAPWLWLSVFFVLPFVFVLKISFSEALLAQPPYDTIIRDIDEGLITLKINLGTYLLLFEDSLYLEALLGSLKVATISTLLCLLIGYPMAYGIASAPKAWRLPLLMLIILPFWTSFLIRIYAWIGLLKANGLINTLLLKIGIIDQPLTILYTNTAVYIGIVYNYLPFLILPLYATLVRLDRTLLEAAADLGCRPWRQFTSITLPQSMPGVLAGCMLVFIPVMGEFVIPDLLGGPDTLMLGKLMWMEFFNNKDWPLASALAVILLIVLVVPFMLMRHFEAKAAEELA

SEQ ID NO: 131439 - DNA, 930 bp, Burkholderia xenovorans LB400
  CDS (1)..(930): transl_table=11
atgaagcgctcgttcaattccttcgccaactggccggtgcggcgcttcaacctgaccggccgcacggcggtggtggccggtccgttcatctggctgctgctgttttttctcgtgccgttcctgctggtcgtcaagatcagcttcgccgacttgcagctcggcattccgccgtacacggagttgaccaacttcgcggacggcgcgattcacatcacgctcgacctgtcgcattacgcgtttctgctgaccgacagcctctatttcgcgacctacgtgaattccgtggtggtggccgcgatctcgacgctgttgtgtttgctgatcggctacccgatggcgtattacatcgcccgttcgaatccggccagccgcaatctgctgatgatggccgtgatgctgccgttctggacgtcgtttctgattcgcgtgtatgcgtggatcggcatcctgaagaacaatggcttgctgaataacttcctgatgtcgatcgggctgattcactcgccgatcgagctgtatcacacgaataccgccgtttatatcggcatggtctattcgtatctgccttttctcgtcatgccgctgtacgcgcatctggtgaaaatggacatgacgctgctggaggccgcctacgacctcggagcgcggccctggaaggcattctggcagatcacgttgccgctctcgaagaacggcatcatcgccggctgtttgctggtgttcattccggcagtgggcgagtacgtgattcccgaattgctgggcggcgcgaacacgctgatgatcggccgcgtgatgtggaacgagttcttcgacaatgccgattggccgatggcatccgccgtgacgtgcgcgatggtgttgctgctattggtgccgatggcgcttttccagtactcgcaggcaaaggcgatggaggaaaagcgctga

SEQ ID NO: 131440 - protein, 309 aa, Burkholderia xenovorans LB400
MKRSFNSFANWPVRRFNLTGRTAVVAGPFIWLLLFFLVPFLLVVKISFADLQLGIPPYTELTNFADGAIHITLDLSHYAFLLTDSLYFATYVNSVVVAAISTLLCLLIGYPMAYYIARSNPASRNLLMMAVMLPFWTSFLIRVYAWIGILKNNGLLNNFLMSIGLIHSPIELYHTNTAVYIGMVYSYLPFLVMPLYAHLVKMDMTLLEAAYDLGARPWKAFWQITLPLSKNGIIAGCLLVFIPAVGEYVIPELLGGANTLMIGRVMWNEFFDNADWPMASAVTCAMVLLLLVPMALFQYSQAKAMEEKR

SEQ ID NO: 131441 - DNA, 882 bp, Silicibacter sp. TM1040
  CDS (1)..(882): transl_table=11
atgcgccgttttttcctgatcgccgtcccctatgcatggcttttggccctgtttttggtgccgttcctgatcgtcctcaaaatctcgctgtcggatgcagccatcgctcgcccgccctattttccgcagtttgactgggcagaggggatccgcgcattccttgctgagctcgattttgagaatttcacctggcttctcgaagacgatctctactggaaagcctacctgagcagccttcagattgcactcacctcaacgctcttgaccctgatcgtcggctacccaattgcctatggcatggcccgcgcgcccgaggaatggcgcccgacgttgatgatgctggtgatcttgccgttctggacctctttcctgatccgcgtctacgcttggaagggcattctgtcgaacgagggatttctcaaccagttcctgatgtggaccggacttgtgtcagagccactccagatcctgaataccacaaccgccgtctacatcggcatcgtctacacctacctgccattcatgattctcccgatttacgccgcgctcgagagaatggacgacagcctaatcgaagctgcagaagatctgggttgttcgcgcctctcggccttttggctcgtgacgattcccctatccaaaggcggcatcatcgcaggctgcttcctcgtctttatcccggcgatgggcgagttcgtgatcccgtccctgctgggcggatctgacacgctgatgatcggtaaagtgctctgggaggagttcttctccaaccgggattggccggtggcgagcgcagtggcggttatcttgttgctgattctcgtggtgccgatcgtgctgttccagcgcaaccagcaaaaagagcaggagggtgacacatga

SEQ ID NO: 131442 - protein, 293 aa, Silicibacter sp. TM1040
MRRFFLIAVPYAWLLALFLVPFLIVLKISLSDAAIARPPYFPQFDWAEGIRAFLAELDFENFTWLLEDDLYWKAYLSSLQIALTSTLLTLIVGYPIAYGMARAPEEWRPTLMMLVILPFWTSFLIRVYAWKGILSNEGFLNQFLMWTGLVSEPLQILNTTTAVYIGIVYTYLPFMILPIYAALERMDDSLIEAAEDLGCSRLSAFWLVTIPLSKGGIIAGCFLVFIPAMGEFVIPSLLGGSDTLMIGKVLWEEFFSNRDWPVASAVAVILLLILVVPIVLFQRNQQKEQEGDT

SEQ ID NO: 131443 - DNA, 912 bp, Mesorhizobium sp. BNC1
  CDS (1)..(912): transl_table=11
atgcgaaagcttgtccccagcctcggcaggcgcctggtcattgccgttccatatttttggttgctggtcttctttctcgttcccttcttcatcgtcctgaagatctcgctatcgcagccgatgatcgccataccgccctatttgcctgtcttcagctggcaagacggcatcggcggtttcatccagaagctgggggctctctctctcgacaattatctttggctcgcgggcgatccgctttacgtgaatgcctatctctcgagcctttggatcgccgctgtttcgacacttctcaccttgctcgtgggttatcccatcgcctacggaatggcgcgcgcgccgctttccatccggcccattctcctgatgatggtgatcttgccgttctggacgagctttctgatccgcgtctatgcctggatcggaatcttgaagcctgaagggcttctcaaccagttccttatgctgcttggtgtcatcgaccagcctcttgtcatcatcaacacgacgacggcagtctatatcggcatcgtctattcctacctgccattcatggtactgccgctctatgcgacactggaaaaaatggactattcgctgatcgaggcggccgaggatctcggctgcacggccttctctgctttttggaagatcacctttccgctctcccgcccaggcatcgttgcgggatgtatgctggtcttcattccggccgtcggcgaattcgtcattcccgatctgctcggcggttcccagacattgatgatcggcaaaacgctctggaacgagtttttcgccaatcgcgactggccggtttcttcagcagtggcgatcgtgctcctgctccttctggtattgcctatcgtctacttccagcgtgcccaggcgcgtgcgcaggaaaaggcgggttga

SEQ ID NO: 131444 - protein, 303 aa, Mesorhizobium sp. BNC1
MRKLVPSLGRRLVIAVPYFWLLVFFLVPFFIVLKISLSQPMIAIPPYLPVFSWQDGIGGFIQKLGALSLDNYLWLAGDPLYVNAYLSSLWIAAVSTLLTLLVGYPIAYGMARAPLSIRPILLMMVILPFWTSFLIRVYAWIGILKPEGLLNQFLMLLGVIDQPLVIINTTTAVYIGIVYSYLPFMVLPLYATLEKMDYSLIEAAEDLGCTAFSAFWKITFPLSRPGIVAGCMLVFIPAVGEFVIPDLLGGSQTLMIGKTLWNEFFANRDWPVSSAVAIVLLLLLVLPIVYFQRAQARAQEKAG

SEQ ID NO: 131445 - DNA, 882 bp, Trichodesmium erythraeum IMS101
  CDS (1)..(882): transl_table=11
atgtggcaacctcagaaaaaacagtcaacctcaaacattgaaaaatctcaactaaaaaaattactaattcttctattccctgcaactatctggctattaatttttttcatcatcccgttagtaattgttttaatttacagcttcctagaacgaggtacttatggcggtgtcgtttggaaatttactctagataactatcaacgactaggtcaaggaatatactggggaatattttggcggtctttattctttagtttaactacaactataatgtgtttattaattggctaccctttagcatattttattgctactattagaccaccttggcgtaatgttttattgatgttagttattattcctttttggactaattttttagtacgtacttatgcttggatagtcctgcttcggactgaaggaatatttaatattgccttacaaagtttacagctaacagacaaacctttaactattttatttacaccctttgctgtgactattggtttagtttatggctacttgccgtttatgattttacctttatatgccacaattgaacgctttaatttttatttattagaagctgctcaagatttgggagctaatgatttacgcaccttttttcgtatatttttaccattaacaattcgaggtatagttgcaggttgtttactagtttttattccggcatttggtgcttttattactcctgatattttaggtggtgcaaaaactatgatggtaggaaacttgattcaaaatcaatttattaaagctagaaattggccgtttggttcggcactatcaattgccttgatgataattgtattaattccagttatcatctattttgcagtatcggaagaggaaaataattaa

SEQ ID NO: 131446 - protein, 293 aa, Trichodesmium erythraeum IMS101
MWQPQKKQSTSNIEKSQLKKLLILLFPATIWLLIFFIIPLVIVLIYSFLERGTYGGVVWKFTLDNYQRLGQGIYWGIFWRSLFFSLTTTIMCLLIGYPLAYFIATIRPPWRNVLLMLVIIPFWTNFLVRTYAWIVLLRTEGIFNIALQSLQLTDKPLTILFTPFAVTIGLVYGYLPFMILPLYATIERFNFYLLEAAQDLGANDLRTFFRIFLPLTIRGIVAGCLLVFIPAFGAFITPDILGGAKTMMVGNLIQNQFIKARNWPFGSALSIALMIIVLIPVIIYFAVSEEENN

SEQ ID NO: 131447 - DNA, 906 bp, Shewanella sp. MR-4
  CDS (1)..(906): transl_table=11
atgaagatgaagtcaaaactaaaatggcttaagggacgtttctggacgattagcttcccctacgcttggctgttgttgttcttcgccttgccctttgccattgtccttaagatcagtttttcgacggcggcgatttcgattccgccctacgaggcgaccttccaatatgcggatgatgtattaaacatcttcctgcatttaggtaactatttgatgttacttgatgattcgctgtattacaccgcgtatctcagttcattaaaaatggcgcttatttcgaccattggctgtttgatcattggttatcccatggcctatgccattgcccgtgcgccagcaaggttgcaaaccgtgctgttgttattggtgatgttaccttcttggacctcgttcttaatccgcgtttatgcctggatggggatcttaagtaacacggggattatcaataacacattgatgtggttaggagtcatttctgagccattgcaaatcttaaacactaacatcgccgtttatatcgggattatctacgcctatttgccctttatgattttgccgctgtacgcgaccttagtgaagttagatatgagcctgattgaggctgcatctgacttagggtcgagccgtttaaataccttctggaaaatcactttcccgttatcgaagagcggggtgattgcaggttctatgctggtgtttattcctgcggtaggggagtttgtgatccctgagttgctcggcggcccagattctctgatgataggtaaagtgctgtggcaggagttcttcaataaccgtgactggcctgtggcctcatctctggcgattgtgatgctggcactcttgattattcctattaccttattccatcgctatcaggcgcgtagtttggagaaagacctatga

SEQ ID NO: 131448 - protein, 301 aa, Shewanella sp. MR-4
MKMKSKLKWLKGRFWTISFPYAWLLLFFALPFAIVLKISFSTAAISIPPYEATFQYADDVLNIFLHLGNYLMLLDDSLYYTAYLSSLKMALISTIGCLIIGYPMAYAIARAPARLQTVLLLLVMLPSWTSFLIRVYAWMGILSNTGIINNTLMWLGVISEPLQILNTNIAVYIGIIYAYLPFMILPLYATLVKLDMSLIEAASDLGSSRLNTFWKITFPLSKSGVIAGSMLVFIPAVGEFVIPELLGGPDSLMIGKVLWQEFFNNRDWPVASSLAIVMLALLIIPITLFHRYQARSLEKDL

SEQ ID NO: 131449 - DNA, 912 bp, Rhizobium leguminosarum bv. viciae 3841
  CDS (1)..(912): transl_table=11
atgggcaagctcgcgtccggcctctacaatcgcctcgtcatcgccattccctatacttggctgctgctgttcttcctggcgccgttcttcatcgtcttccgcatttcgctgtcgacgacggcgatcgccatgccgccttacgagcccgtcttctcacttgccgacggttgggccgggctctggagcaagatcggagagctctccttcgacaattacagctacctcaccgaggactcgctctatttcaatgcctatgtctcgagcgtggtgattgccgggatctccaccttcctgaccctgctgatcgcctatccgattgcctatggcatggcacaggcgccgcgcagcatccgtccgacgctggtgatgctggtcatcctgccgttctggacgagcttcctgattcgcgtctattcctggatcgcgatcctgaagccggaggggcttttcaaccagcttctcctgtcgctgcacatcatcgacagtccgctgatcatcctcaacaccaataccgccgtctatatcggcatcgtctattcctatctgcccttcatggtgttgccgctctattcggctctggagaagatggacggtacgctgatcgaagcggcgcaggatcttggttgcacgccgatcaaggccttctggcgcgtcacctttccgctgtcgatccccggcgtggtggccggctgcatgctggtcttcatccccgccgtcggtgaattcgtcattcccgacctgctcggcggttcgcagacgctgatgatcggcaagacgctctggaacgaattcaacgccaaccgcgattggccggtctcctcggcggtagcaacgatcctgctgatgatcctggtaatcccgatcgtcttcttccagaacgcccaggccaaggccgaagagcgggggaaataa

SEQ ID NO: 131450 - protein, 303 aa, Rhizobium leguminosarum bv. viciae 3841
MGKLASGLYNRLVIAIPYTWLLLFFLAPFFIVFRISLSTTAIAMPPYEPVFSLADGWAGLWSKIGELSFDNYSYLTEDSLYFNAYVSSVVIAGISTFLTLLIAYPIAYGMAQAPRSIRPTLVMLVILPFWTSFLIRVYSWIAILKPEGLFNQLLLSLHIIDSPLIILNTNTAVYIGIVYSYLPFMVLPLYSALEKMDGTLIEAAQDLGCTPIKAFWRVTFPLSIPGVVAGCMLVFIPAVGEFVIPDLLGGSQTLMIGKTLWNEFNANRDWPVSSAVATILLMILVIPIVFFQNAQAKAEERGK

SEQ ID NO: 131451 - DNA, 882 bp, Pseudomonas aeruginosa UCBPP-PA14
  CDS (1)..(882): transl_table=11
atgcccaccgggcggcatgcggtcatcggggtgccgttcctgtggctcttcctgttcttcctgctgcccttcgccatcgtgctgaagatcagcctggcggaagcggacgtggccatcccgccctacaccgagatcttcgcctacgcggaccagcagttgcaggtgctcctcaacctcggcaactacctgatgctgaccgatgacccgctctacatcgatgcctacctcggctcgctgaagatggccttcatcagtaccctgatctgcctgctggtgggctacccgatggcctacgccatcgcccgctccagccagtcctcgcagactgtcctgctgctgctgatcatgatgccgacctggacggcgatcctgatccgggtctatgcctggatgggcatcctttccaacaacggcctgctcaacagcgtactgatggggctggggctcatcagcgagccgctgaccatcctcaataccaacatcgcggtgtacatcggcatcgtctattcctacctgccgttcatgatcctgccgctctacgccaacctggtgaagcacgacccgagcctgctggaggccgcttccgacctgggcgcgcgtaacttcaccagcttctggaagatcaccgtgccgctgtcgaagaacggcatcatcgccggctgcatgctggtgttcatcccggcggtgggcgagttcgtcatcccggaactgctcggcggccccgagaccctgatgatcggcaaggtgctctggcaggagttcttcaacaaccgcgactggccggtggcgtccgccctggcggtggtaatgctggcgatcctgatcatcccgatcatcctgttcaacaagaaccaggccaaagaactggagggcaaggtatga

SEQ ID NO: 131452 - protein, 293 aa, Pseudomonas aeruginosa UCBPP-PA14
MPTGRHAVIGVPFLWLFLFFLLPFAIVLKISLAEADVAIPPYTEIFAYADQQLQVLLNLGNYLMLTDDPLYIDAYLGSLKMAFISTLICLLVGYPMAYAIARSSQSSQTVLLLLIMMPTWTAILIRVYAWMGILSNNGLLNSVLMGLGLISEPLTILNTNIAVYIGIVYSYLPFMILPLYANLVKHDPSLLEAASDLGARNFTSFWKITVPLSKNGIIAGCMLVFIPAVGEFVIPELLGGPETLMIGKVLWQEFFNNRDWPVASALAVVMLAILIIPIILFNKNQAKELEGKV

SEQ ID NO: 131453 - DNA, 906 bp, Shewanella sp. ANA-3
  CDS (1)..(906): transl_table=11
atgaagatgaagtcaaaactaaaatggcttaagggacgtttctggacgattagcttcccctacgcttggctgttgttgttcttcgccttgccctttgccattgtccttaagatcagtttttcgacggcggcgatttcgattccgccctacgaggcgaccttccaatatgcggatgatgtattaaacatcttcctgcatttaggtaactacttgatgttgctagatgattcgctgtattacaccgcgtatctcagctcattaaaaatggcgctcatttcgaccattggctgtttgatcattggttatcccatggcctatgccattgcccgtgcgccagcaaggttgcaaaccgtgctgctgctattggtgatgctaccttcttggacctcgttcttaattcgcgtttatgcctggatggggatcttaagtaacacggggattatcaataacacattgatgtggttaggaataatttctgatccattgcaaatcctcaacactaatatcgccgtctatatcgggattatctacgcctatttgccctttatgattttgccgctgtacgcgaccttagtgaagttagatatgagcctgattgaagccgcatcagacttagggtccagccgtttaaataccttctggaaaatcactttcccgttatcgaagagcggggtgattgcaggttctatgctggtgtttattccggcggtaggggagtttgtgatccctgagctgctcggcggcccagattctctgatgataggtaaagtgctgtggcaggaattcttcaataaccgtgactggccagtggcctcatcactggcgattgtgatgctggcactcttgattattcctattaccttattccatcgctatcaggcgcgtagtttggagaaagacctatga

SEQ ID NO: 131454 - protein, 301 aa, Shewanella sp. ANA-3
MKMKSKLKWLKGRFWTISFPYAWLLLFFALPFAIVLKISFSTAAISIPPYEATFQYADDVLNIFLHLGNYLMLLDDSLYYTAYLSSLKMALISTIGCLIIGYPMAYAIARAPARLQTVLLLLVMLPSWTSFLIRVYAWMGILSNTGIINNTLMWLGIISDPLQILNTNIAVYIGIIYAYLPFMILPLYATLVKLDMSLIEAASDLGSSRLNTFWKITFPLSKSGVIAGSMLVFIPAVGEFVIPELLGGPDSLMIGKVLWQEFFNNRDWPVASSLAIVMLALLIIPITLFHRYQARSLEKDL

SEQ ID NO: 131455 - DNA, 966 bp, Neisseria meningitidis FAM18
  CDS (1)..(966): transl_table=11
atgaaccttaataaactgaaaaacaaactgttccgccgcccggggcagcgtgtggtgattgccgtaccgtatatttggcttttggtgctgtttctgattccgttcgccatcgtgctgaaaatcagctttgccgaacaagaaatcgccattccgccgtttacgccgctgaccagcatcgacgaagatttaggtcgtctgaatatcaccatcagttatcaaaactatgccgatattttccaaaatttttggcatacccttaacccgttcggcgacagtgaaaacagcaatatctatctgatgacctactggtcttcaatcaaaaccgcattgatgacgacagtgatttgcctgttggtcggttatccgaccgcctatgcgatttctcgtgccaatccttctgtccgcaatggtttgctgcttgccattatgctgcccttttggacatcgttcctgttgcgcgtctatgcgtggatgggtctgctcgggcataacggtattgtaaacaacctgttgattaaaatgggtattatcagcgagcctttggatttgttctacaatgccttttcgctcaatttggtgatggtttacgcctatctgccgtttatgattctgccgctatacacgcaactggtgaaactcgacaaccgcctgcttgaagcggcttccgatttgggcgcggggccggtcaaatcgttcttgacgattaccctgcctttgtcgaaaaccggcattattgcaggctccatgctggttttcgtccctgctgtcggcgagttcgtcattcccgagctggtcggcggttcggaaaacctgatgattggtaaagtcttgtggcaggcgttcttcgatcaaaacaactggccgctggcttccgccgtcgccgtcgtgatggtcgcgctgctggtcgtgccgattgccctgtttcagcattatgaaaaccgcgaattggaagaaggagccaaataa

SEQ ID NO: 131456 - protein, 321 aa, Neisseria meningitidis FAM18
MNLNKLKNKLFRRPGQRVVIAVPYIWLLVLFLIPFAIVLKISFAEQEIAIPPFTPLTSIDEDLGRLNITISYQNYADIFQNFWHTLNPFGDSENSNIYLMTYWSSIKTALMTTVICLLVGYPTAYAISRANPSVRNGLLLAIMLPFWTSFLLRVYAWMGLLGHNGIVNNLLIKMGIISEPLDLFYNAFSLNLVMVYAYLPFMILPLYTQLVKLDNRLLEAASDLGAGPVKSFLTITLPLSKTGIIAGSMLVFVPAVGEFVIPELVGGSENLMIGKVLWQAFFDQNNWPLASAVAVVMVALLVVPIALFQHYENRELEEGAK

SEQ ID NO: 131457 - DNA, 888 bp, Magnetospirillum magnetotacticum MS-1
  CDS (1)..(888): transl_table=11
atgaaaggcctgctggagggcaggggagggcgtttcctggtgggactggcgccctatgcctggttgctgctgttctttctggtgcctttcctgatcgttctcaagatcagcctgtccgagccgcagatgggcattccgccctatatgccgctctgggtcgagggtgtctttagagggacgctggcgggctacaacaccctgttgggggacgatctttatctgctggcctatctgggatcgcttaaattggcggggatctccacgctgggctgtttgttgctaggctatcccgccgcctatgccatcgcccgcgcacccgccagccgccgccaggcgctgctgatgctggtggcgctgccgttctggacctcgttcctgatccgcgtctacgcctggatcggcatcttgaagaacgaaggcctgctcaacatggccctgatgggcatgggggtcatctccgagcccttgcagattctcgagacctccacggcggtggtcatcggcatggtctattcctacctgccgttcatgatcctgccgctttacgccacgctcgagaagatggacctgtcgctgctggaagccgccgccgatctgggttgccgtccattcaaggcgtttttggctatcaccttgccgctcagcatgcccggaatcatcgcgggctgcatgctggtcttcattccggcggtgggcgagttcgtcattcccgatctgctgggtggtcccgacacattggtgatcggcaaggtgctgtgggccgagttcttcgacaaccgcgactggccgacggcctcggcggtggcggtggccatgctggtgcttctggtggtgcccatcatggtgttccagcatttcgaggccaaacggctggagcgcgagggatga

SEQ ID NO: 131458 - protein, 295 aa, Magnetospirillum magnetotacticum MS-1
MKGLLEGRGGRFLVGLAPYAWLLLFFLVPFLIVLKISLSEPQMGIPPYMPLWVEGVFRGTLAGYNTLLGDDLYLLAYLGSLKLAGISTLGCLLLGYPAAYAIARAPASRRQALLMLVALPFWTSFLIRVYAWIGILKNEGLLNMALMGMGVISEPLQILETSTAVVIGMVYSYLPFMILPLYATLEKMDLSLLEAAADLGCRPFKAFLAITLPLSMPGIIAGCMLVFIPAVGEFVIPDLLGGPDTLVIGKVLWAEFFDNRDWPTASAVAVAMLVLLVVPIMVFQHFEAKRLEREG

SEQ ID NO: 131459 - DNA, 894 bp, Nostoc punctiforme PCC 73102
  CDS (1)..(894): transl_table=11
atgaatattgaaaaaaatgggatttcccaaatagaaaaattgcctcgcctgcgaggaaattggctgcaacctttgatattacttgcaccatcgggaatttggttattacttttgttggtgctgccaactttgataattttcgagttaagtttagttgcagacattcgaccgggagatttggttaatcccaacggattccaaaactacatccgaatatttgactcgctttacttacaagtaattgtgcgatcgctattttttgcgttgggcactacaataatttgtttaattttaggcttccctgtcgcctattggattgctcaaatagcgccgctacgttggcgtaatttgctgctattaggctttgttttgccgttgtggacttcttcattacttcggtcatacgcttggattacaattcttcgtcctactggtttgttaaacagtttactcagcactttaggcttgcctactttgcaattacttaaccagagtcaagctgtatttattggtatgagttacagcttgttaccctatatggttttgattttatatgcttctctcgaaaagctagacaaacggttgttagaagcggcagctgatttaggtgcaaatccgatggaaacttttttccaaattactgtaccgcaaattctgcctggaattacggctgcttctatgcttgtattcatcacaggtttgggagattttgtcgatccagaattacttggtggtgcttctagtatgacggcagcaaggttagtttataaccagtttcttggagcaacccagaattggggatttggttccgctttaagtatgacgttaattttgcttgttagtattgcgatcgcacttttaattaagtttggcgaacctggacccaaacgctaa

SEQ ID NO: 131460 - protein, 297 aa, Nostoc punctiforme PCC 73102
MNIEKNGISQIEKLPRLRGNWLQPLILLAPSGIWLLLLLVLPTLIIFELSLVADIRPGDLVNPNGFQNYIRIFDSLYLQVIVRSLFFALGTTIICLILGFPVAYWIAQIAPLRWRNLLLLGFVLPLWTSSLLRSYAWITILRPTGLLNSLLSTLGLPTLQLLNQSQAVFIGMSYSLLPYMVLILYASLEKLDKRLLEAAADLGANPMETFFQITVPQILPGITAASMLVFITGLGDFVDPELLGGASSMTAARLVYNQFLGATQNWGFGSALSMTLILLVSIAIALLIKFGEPGPKR

SEQ ID NO: 131461 - DNA, 882 bp, Sulfitobacter sp. EE-36
  CDS (1)..(882): transl_table=11
atgaatatgcgtcgctttttccttatcgcggtgccctatgcctggttgctcgcgctgtttctcattcctttcatcattgtttttaaaatttctctctctgatctggctttgtcgattcctccttactccccgacggcaaaggacgggatctgggcgatgttcgcggcattcgatctggaaaactttacctttcttgcttcggacgatctctactggaaggcttacctaagcagtttgaagattgcgttaatatctacagttttagcggttttggtgggctaccccatggcctacggcatggctcgcgcgcccgaggaatggcgtccgaccttcatgatgctggtgatcttgcccttttggaccagtttcctgatccgcgtttacgcatgggtcggtattctgagtaatgaggggcttttgaatcaattcctgctgtggttgggcatcatcgatacgcctttgacgatcatgaacacgacgaccgcggtctatataggaattgtttacacttatctgccattcatgattctaccgatttatgccgcgctagatcggttggacgaatccttgatcgaggccgctgaagatctgggatgttcacggttaaaggcattctggctggtcacgatacctttgtctcgcaacgggatcattgcagggtgtttcctggtctttatccccgcgctgggcgaattcgttatcccgtctttgttgggcggttcagggacgttgatgatcggcaaggtcttgttcgaggagttctttaacaaccgcgactggcccgtcgcgagcgcggtggcggtgatcctgctgctgatcctgatcgttccaatcgttctgttccaacgcaaccagcaacgtcaggcggaggtggagtcatga

SEQ ID NO: 131462 - protein, 293 aa, Sulfitobacter sp. EE-36
MNMRRFFLIAVPYAWLLALFLIPFIIVFKISLSDLALSIPPYSPTAKDGIWAMFAAFDLENFTFLASDDLYWKAYLSSLKIALISTVLAVLVGYPMAYGMARAPEEWRPTFMMLVILPFWTSFLIRVYAWVGILSNEGLLNQFLLWLGIIDTPLTIMNTTTAVYIGIVYTYLPFMILPIYAALDRLDESLIEAAEDLGCSRLKAFWLVTIPLSRNGIIAGCFLVFIPALGEFVIPSLLGGSGTLMIGKVLFEEFFNNRDWPVASAVAVILLLILIVPIVLFQRNQQRQAEVES

SEQ ID NO: 131463 - DNA, 867 bp, Roseovarius nubinhibens ISM
  CDS (1)..(867): transl_table=11
gtgccctatctgtggctgctggcgctgtttctcgtgccgtttctcatcgtggtgaagatcagcctcagcgacacggcgctggccattccgccctatacgcccgagctcgacctgcgcgagggctgggccggggtgaaagagtttctggcggggctcgattttgaaaacttcgagtttctggccagtgacgatctctactggcgggcctatctctcgtcgctccagatcgcggccatctcgacctttttgacgctgctggtgggctatccgattgcctatggcatggccaaggcgcccgagcattggcggccgacgcttttgcttctggtgatcttgccgttctggacctcgttcctgatccgggtctattcttggatgggcatcctggcgactgagggctatctcaaccagctcttgatcagcatcgggatcattggcgagccgctgaccattctgaacaccaatgtcgcggtctatatcggcatcgtctacacctatctgcccttcatgatcctgccgatctacagctcgctcgagcggcttgacggatctcttctggaggcggccgaagaccttggctgttcgcggttctcggccttctggctggtgacctttccgctgtctaaggcgggggtgatcgcggggtcgttcctcgtctttatcccggcgctcggtgagtttgtgatcccctcgctgcttggcgggtccaagacgctgatgatcggcaaggttctctgggaagagttcttcaacaaccgggactggccggtggcgagcgcggtggcggtgatcctgctgctgttgctgatcgtgccgatcatcctcttccagcgcaacgagcagaaacagcgggaggcggaaggatga

SEQ ID NO: 131464 - protein, 288 aa, Roseovarius nubinhibens ISM
MPYLWLLALFLVPFLIVVKISLSDTALAIPPYTPELDLREGWAGVKEFLAGLDFENFEFLASDDLYWRAYLSSLQIAAISTFLTLLVGYPIAYGMAKAPEHWRPTLLLLVILPFWTSFLIRVYSWMGILATEGYLNQLLISIGIIGEPLTILNTNVAVYIGIVYTYLPFMILPIYSSLERLDGSLLEAAEDLGCSRFSAFWLVTFPLSKAGVIAGSFLVFIPALGEFVIPSLLGGSKTLMIGKVLWEEFFNNRDWPVASAVAVILLLLLIVPIILFQRNEQKQREAEG

SEQ ID NO: 131465 - DNA, 891 bp, Oceanicola batsensis HTCC2597
  CDS (1)..(891): transl_table=11
atgcgacgtctgatcctcatcgccataccctatgtctggctgctcgccctgtttctgatccccttcttcatcgtggtgaagatctcgctttcggacgtggcactggcgcggccgccctacatgccgcagctcgactggtcggccggctgggaggggatacggaatttcttcgccgcgctggacttcgagaacttcggcttcctgacgaccgacgatctttactggaaggcctacctctcctcgcttcagatcgcggggatctcgaccctgctgaccctgatcgtcggctttccgattgcctacggcatggcgcgcgcgcccgagcactggcgcccgacgctgatgatgctggtgatattgccgttctggaccagcttcctgatccgggtctacgcctggatgggcatcctgtcgcagaacgggcttctgaacggcgtgctgatgtcgctcggcgtgatcggcgagccgctgacgatcctgaacaccgatgtcgcggtctatatcgggatcgtctacacctatctgccgttcatgatcctgccgatctacgcggcgctggaaaagctggacagttcgcttctcgaggccgccgaggatctcggctgttcacgcctgaccgccttctggctgatcaccgtgccgctgtcgaaacagggggtgatcgccggctgtttcctcgtcttcattccggccgtgggggaattcgtcatcccgtcgcttctgggcggctccgagacactgatgatcggcaaggtgctgtacgaggagttcttctcgaaccgggactggccggtggcttcggccgtggcggtggttctgcttctgatcctggtgatcccgatcgtgctgttccagcggaacgagcagaagcaacgtgaggctgaaggatga

SEQ ID NO: 131466 - protein, 296 aa, Oceanicola batsensis HTCC2597
MRRLILIAIPYVWLLALFLIPFFIVVKISLSDVALARPPYMPQLDWSAGWEGIRNFFAALDFENFGFLTTDDLYWKAYLSSLQIAGISTLLTLIVGFPIAYGMARAPEHWRPTLMMLVILPFWTSFLIRVYAWMGILSQNGLLNGVLMSLGVIGEPLTILNTDVAVYIGIVYTYLPFMILPIYAALEKLDSSLLEAAEDLGCSRLTAFWLITVPLSKQGVIAGCFLVFIPAVGEFVIPSLLGGSETLMIGKVLYEEFFSNRDWPVASAVAVVLLLILVIPIVLFQRNEQKQREAEG

SEQ ID NO: 131467 - DNA, 903 bp, Pseudoalteromonas tunicata D2
  CDS (1)..(903): transl_table=11
atgatggctttaaaggacttcaaaatccgcagccaaacaattgtttcagccattccaacaatatggctaacattgttttttatgctgccttttctgtttgtacttaaaatcagcctttctgaagcaacacttgcacaaccgccttatttggatttagtacgtgatgttgaagatggcttagtgacaatcaagataaactttgccaattacttattattacttgaagactcactttattttagcgctttgcttggctcgctaaaagtggcctttatttctactattttatgtatttttgtcggctacccaatggcttatgctattgcaaccgcacctgaaaaatggcgcacgcccctattaatgttaatcatcctacctttttggacatcgtttttaatccgtgtttatgcatggatcggcatcttaaaaagtaacggtgtgattaataattttttgatgtggcttggggtcatcgaccaaccgttagagattttacatacacctaccgcggtttatatcggtattgtttatagctatttacctttctttattttgcccttgtacgccactttagtgaaattagatggctcgttactcgaagcagccgctgatttaggggcaaaaccgataacacaatttttcactattacgttaccgcaatcggtttccggtattttagctggggcaatgttagtatttattccagtcatgggtgaatttgtgatccccgacttactcggtggccctgatacattaatgcttggaaaactgatgtggattgaattctttaacaataaagattggcctgtcgcttcagcactgaccactgtgttactgattgtattgataattccgttcatttatatgcaaaattatgaacgtaaagttgtggatgacatttaa

SEQ ID NO: 131468 - protein, 300 aa, Pseudoalteromonas tunicata D2
MMALKDFKIRSQTIVSAIPTIWLTLFFMLPFLFVLKISLSEATLAQPPYLDLVRDVEDGLVTIKINFANYLLLLEDSLYFSALLGSLKVAFISTILCIFVGYPMAYAIATAPEKWRTPLLMLIILPFWTSFLIRVYAWIGILKSNGVINNFLMWLGVIDQPLEILHTPTAVYIGIVYSYLPFFILPLYATLVKLDGSLLEAAADLGAKPITQFFTITLPQSVSGILAGAMLVFIPVMGEFVIPDLLGGPDTLMLGKLMWIEFFNNKDWPVASALTTVLLIVLIIPFIYMQNYERKVVDDI

SEQ ID NO: 131469 - DNA, 957 bp, Oceanospirillum sp. MED92
  CDS (1)..(957): transl_table=11
atgagtatttcgaccggttctgtatgggttgatggttcatcatcccgcatgcagcgctacaacatttttcgccgggtgaactgggggagattcgctgtagtcgctattcccgctttctggctggggatctttttctttatcccgtttctggtggtgttcaaaatctccctgtcagaaacggcgatcgcagtgcctccctatacaccactgctggagtgggatctggaagaggcctatatcaatctcaagataagcctcggtaactatctctacctgttggaagatgccttctatctggaggcttacctcagctcgattaagatcgctgcaatctccacgttctttactctgctgatcgcattcccgatcgcttacctgatcgcacgcagcgatggttcgcgtcgggcactgctattggcgttggttattctgccattctggacctcatttctgctgcgtgtgtatgcatggatgggcttcctgaaaaagaacggtattgttaacgagttcctgctgtcgctgggcatcattgaccaacccttggtcatgctacagaccgatttcgccgtgtatctgggtatcgtctatacctacttgccattcatggtgctgccgctatacagcgcactggaaaagatggatatgacgttgctggaagccgctgaagatctgggttgtcgtccggctcaaagcttcttcctgatcactttgccactggccattccaggtatcgtcgccggctgtctgttggtgtttattccggcggtgggtgagtttgttatacctgcactgttgggtggctccgatacgctgatgataggtcgggtgctctgggatgagttcttcctcaaccgagactggccgatggcctcagcggttgccattgtcatgcttatagtactggtactgccgatcatgctgatccgtaatggccagggtaaaggggaggcgatctga

SEQ ID NO: 131470 - protein, 318 aa, Oceanospirillum sp. MED92
MSISTGSVWVDGSSSRMQRYNIFRRVNWGRFAVVAIPAFWLGIFFFIPFLVVFKISLSETAIAVPPYTPLLEWDLEEAYINLKISLGNYLYLLEDAFYLEAYLSSIKIAAISTFFTLLIAFPIAYLIARSDGSRRALLLALVILPFWTSFLLRVYAWMGFLKKNGIVNEFLLSLGIIDQPLVMLQTDFAVYLGIVYTYLPFMVLPLYSALEKMDMTLLEAAEDLGCRPAQSFFLITLPLAIPGIVAGCLLVFIPAVGEFVIPALLGGSDTLMIGRVLWDEFFLNRDWPMASAVAIVMLIVLVLPIMLIRNGQGKGEAI

SEQ ID NO: 131471 - DNA, 918 bp, Xanthobacter autotrophicus Py2
  CDS (1)..(918): transl_table=11
atggcgatggccggggagaagggacggggccgctggttcgtgatcgcggtgccctatctgtggctcctcgcgctgttccttgcgcccttcctcatcgtattcaagatctcgctgtcgcaggacgtggtggcccagccgccctacgcgccgaccctcgacctggcgcagggctgggcgggcttcaccgaattcctgtcgggcctgtccttcgcgaactatgcctatgtgctggatttttcgaatgagttcctggaggcttacggctccagcctgatcatcgcctcgatctccaccgtgcttctgctgctggtggggtacccagtcgcctacgccatggcgcgggcgccgcgctccatccagccgacgctgctgatgctggtgatcctgccgttctggacctccttcctcatccgcgtctatgcgtggatcggcatcctgtcgcaggaagggctgctcaatcaggccctgatggcgctgggggtgatccacacgccgctggagatcctgaacaccaacctcgccgtctatatcggcatcgtctattcctacctgcctttcatggtgctgccgctttacgcggcactggaaaagctcgacctcacgctgctggaggccgccgccgatctcggctgcccgccggccaaggcgttctggaccatcacctttccgctctccctgccgggcgtggcggccggcgccctgctgtgcttcatcccggcggtgggagagttcgtcattcccgacctcctgggcggctcggacacgctgatgatcggcaagtcgctatggaccgagttcaccgtgaaccggtcctggacggtctcgtccgcggtggcggtgctgctgctgctcgtgctggtgatccccatcgtgatctaccagaacatccagcagcgcgagctggaggcgggcaaatga

SEQ ID NO: 131472 - protein, 305 aa, Xanthobacter autotrophicus Py2
MAMAGEKGRGRWFVIAVPYLWLLALFLAPFLIVFKISLSQDVVAQPPYAPTLDLAQGWAGFTEFLSGLSFANYAYVLDFSNEFLEAYGSSLIIASISTVLLLLVGYPVAYAMARAPRSIQPTLLMLVILPFWTSFLIRVYAWIGILSQEGLLNQALMALGVIHTPLEILNTNLAVYIGIVYSYLPFMVLPLYAALEKLDLTLLEAAADLGCPPAKAFWTITFPLSLPGVAAGALLCFIPAVGEFVIPDLLGGSDTLMIGKSLWTEFTVNRSWTVSSAVAVLLLLVLVIPIVIYQNIQQRELEAGK

SEQ ID NO: 131473 - DNA, 867 bp, Rickettsiella grylli
  CDS (1)..(867): transl_table=11
atgaaaactgaccaattttttaaaagaacgacgataagtatggtatgggtgtggttgtcattatttgctttactcccgacacttttagttctcattatcagtatgcttgaacgtgatccggttcggctcgtacagtggaggttttccttacaaaattatcaagcattattaaatcctatttattttaaagtattttggcattcttttcttattgctgggttttgtagcctcatttgtctcgtgttaggttttccttttgcctattttttagcgcggcttcattccaaatataaaagtttattattgtttttagtgattattcctttttggaccagttcattaattcgtacgtatgccattatctccttattaaaaacgaaagggttgttaaatacagtccttttatcactcggtattattcgccatcccttaactattttgtatacgaatacagcagtcattattggcctcgtctatagtttacttccctttatgatattgcctttatatgcgaatattgaaaaattaaatacccaattgattgacgccgcgcgcgatttaggtgcaaattcattgaacattttaagtcgaattattttgccactcacattacccgggattataggcggaattattttagtttttttgcctgcaatgagtctgttttatattccggatattttgggaggtgctaaatcacttctggttggaaatctgattcaaaacgaatttttagcggcgcataattggcctttaggttctgcagtgagtgtggtgctcacgttggcgatgggcgtattactattactttatcgacgtgtccataaaatagggcgataccacgatgaatcgattggcgaaatttag

SEQ ID NO: 131474 - protein, 288 aa, Rickettsiella grylli
MKTDQFFKRTTISMVWVWLSLFALLPTLLVLIISMLERDPVRLVQWRFSLQNYQALLNPIYFKVFWHSFLIAGFCSLICLVLGFPFAYFLARLHSKYKSLLLFLVIIPFWTSSLIRTYAIISLLKTKGLLNTVLLSLGIIRHPLTILYTNTAVIIGLVYSLLPFMILPLYANIEKLNTQLIDAARDLGANSLNILSRIILPLTLPGIIGGIILVFLPAMSLFYIPDILGGAKSLLVGNLIQNEFLAAHNWPLGSAVSVVLTLAMGVLLLLYRRVHKIGRYHDESIGEI

SEQ ID NO: 131475 - DNA, 897 bp, Oceanobacter sp. RED65
  CDS (1)..(897): transl_table=11
atgaataagatcaagtcactcattccagccggaaagttttgggtgattttaccgccctatgtctggttactcgttttctttgtgctgccgtttgtatttgtgggcaaaatatctgtgtcagaatcgattctatcgattccaccatatagccctatgttcgaatggttggatgaaaagctcagtatctcgattaattttgccaattatatttggttgttggacgatcctttatatgcagaagcctactggaactccatcgttattgcattttggtccactgtattttgcttattaatcggttatccgatggggtatgccattgcccgagcccccaagcatcagcaaccaatttggttactgctcgtattacttccgagctggacgtcgtttctgattcgcgtatacgcttggatggggctattaaaagataatggtctaattaacaactcactcatgtttgtgggcattattgatgaaccattacgtatgatgaataccaactttgccgtatacgtaggtattgtttacagctatttaccgtttatggttctgcctttgtatgccaacttggttaagcatgatcaatcactgattgaagcagcatccgatttaggtgcgaacaaagtaactactttctttaaggtcaccttaccgctctcttttaacggcattgttgctggctctatgctggtatttatccctgttgtaggtgagtacgtaattcctgaactattaggcggtactgataccatcatgatcggtaaagtattgtgggaagagttctttaataaccgcgattggccggttgctgcgtccttagcggtcgtcatgattttgattctgattattcctattacgctgttccaccattatcagaataaggaggtgcaatcatga

SEQ ID NO: 131476 - protein, 298 aa, Oceanobacter sp. RED65
MNKIKSLIPAGKFWVILPPYVWLLVFFVLPFVFVGKISVSESILSIPPYSPMFEWLDEKLSISINFANYIWLLDDPLYAEAYWNSIVIAFWSTVFCLLIGYPMGYAIARAPKHQQPIWLLLVLLPSWTSFLIRVYAWMGLLKDNGLINNSLMFVGIIDEPLRMMNTNFAVYVGIVYSYLPFMVLPLYANLVKHDQSLIEAASDLGANKVTTFFKVTLPLSFNGIVAGSMLVFIPVVGEYVIPELLGGTDTIMIGKVLWEEFFNNRDWPVAASLAVVMILILIIPITLFHHYQNKEVQS

SEQ ID NO: 131477 - DNA, 921 bp, Pseudomonas putida GB-1
  CDS (1)..(921): transl_table=11
atgaaactgcgcaagctcaagcgagccttccagcgcctggtcccggaggggcggcacctggtgatcggcgtgccgttcatctggctgttcctgttcttcatgctgccgttcttcattgtcctgaagatcagttttgccgaagccgacgtggcgatcccgccgtataccgagatctacacctacgtcgaagacaagattcagttggtgctcaacctggccaactatgggctgttgaccgaggatgagctgtatatctcggcctacctggggtcgttgaagatggccttcttcagcaccattctgtgcctgctgatcggcttcccgatggcctacgccattgccaacgccaagaaggagacccagacggtcctgctgctgctgatcatgatgccgacctggaccgcgatcctgatccgcgtctatgcctggatgggcatcctcagcaacaacggcttgctcaacggtttcctgatgtggactgggctgatcgaccagccactgcagatcctcaacaccaacctggcggtgtacatcggcgtggtctattcgtacctgccgttcatgatcctgccgctgtttgccaacctggttaagcatgacccttcgttgctggaggctgcttctgacctggggtcgagcaccttcaacagcttctggaaaatcaccgtgccgctgtcgaagaacggcatcatcgccggctgcatgctggtgttcatcccggtggtgggcgagttcgtgatccctgaactgctcggcggcccggaaaccctgatgatcggtaaagtgctgtggcaggagttcttcaacaaccgtgactggccggtggcgtctgcattggcggtggtgatgctggcgatcctgatcgtgccgatcctgctgttcaaccgcagccaggccaaagaaatggagggccgcgcatga

SEQ ID NO: 131478 - protein, 306 aa, Pseudomonas putida GB-1
MKLRKLKRAFQRLVPEGRHLVIGVPFIWLFLFFMLPFFIVLKISFAEADVAIPPYTEIYTYVEDKIQLVLNLANYGLLTEDELYISAYLGSLKMAFFSTILCLLIGFPMAYAIANAKKETQTVLLLLIMMPTWTAILIRVYAWMGILSNNGLLNGFLMWTGLIDQPLQILNTNLAVYIGVVYSYLPFMILPLFANLVKHDPSLLEAASDLGSSTFNSFWKITVPLSKNGIIAGCMLVFIPVVGEFVIPELLGGPETLMIGKVLWQEFFNNRDWPVASALAVVMLAILIVPILLFNRSQAKEMEGRA

SEQ ID NO: 131479 - DNA, 861 bp, Actinobacillus actinomycetemcomitans
  CDS (1)..(861): transl_table=11
atgaagataatcaataataaattccagaaaattactgttgcgattatcttcagctggctaatcttcttcgtgctgatcccaaacttattggtattagtcgtaagttttttaacccgagatggtagcaacttttataccttgccatttaactttgaaaactacatcaacctgtttaatccgctttatgcgcaggtggtgtggaactcattgtatatgtcaatcattgccgccattatttgtttactaatcggttatccgtttgcctttatggtcagtaaaattcacccgaaatatcgaccgctcttattgttccttgtggtgttgccgttctggacaaactcgcttattcgtatttacggcatgaaagtgttcctcggcgtgaaaggcgtattgaacaccatgttattggaaatgggtattttgagtgaaccgattcggattctgaacaccgaagtggcggtgattatcggtttggtgtatttgcttctgccgttcatgattctgccgctctactccgccattgaaaagttagacggacgcttattggaagcggcaaaagacttgggggcaaacgcgttccaacgattcttccgcgtgattctgccgttgaccatgccgggcatcgttgcaggctgcttgttggtattattgccggcaatgggaatgttttatgtagcggacttactcggcggcgcgaaagtgttgcttgtgggtaacgtgattaagagcgaattcttaatttcccgcaactgggcgttcggttccgcaatcagtatcggattgaccattttgatggcattactcatcttcgtgtattaccgcgcgaataaattattgaacaaaaaagtggagttggaataa

SEQ ID NO: 131480 - protein, 286 aa, Actinobacillus actinomycetemcomitans
MKIINNKFQKITVAIIFSWLIFFVLIPNLLVLVVSFLTRDGSNFYTLPFNFENYINLFNPLYAQVVWNSLYMSIIAAIICLLIGYPFAFMVSKIHPKYRPLLLFLVVLPFWTNSLIRIYGMKVFLGVKGVLNTMLLEMGILSEPIRILNTEVAVIIGLVYLLLPFMILPLYSAIEKLDGRLLEAAKDLGANAFQRFFRVILPLTMPGIVAGCLLVLLPAMGMFYVADLLGGAKVLLVGNVIKSEFLISRNWAFGSAISIGLTILMALLIFVYYRANKLLNKKVELE

SEQ ID NO: 131481 - DNA, 23 bp, Artificial sequence
  primer
atgagtacacttgaacctgctgc

SEQ ID NO: 131482 - DNA, 25 bp, Artificial sequence
  primer
ttatccgtgttctcccacgcttttt

SEQ ID NO: 131483 - protein, 299 aa, Artificial sequence
  consensus sequence
  Variant (2)..(3): Xaa in position 2 to 3 is any amino acid
  Variant (6)..(8): Xaa in position 6 to 8 is any amino acid
  Variant (10)..(11): Xaa in position 10 to 11 is any amino acid
  Variant (14)..(15): Xaa in position 14 to 15 is any amino acid
  Variant (17)..(18): Xaa in position 17 to 18 is any amino acid
  Variant (21)..(28): Xaa in position 21 to 28 is any amino acid
  Variant (29)..(32): Xaa in position 29 to 32 is any or no amino acid
  Variant (34)..(39): Xaa in position 34 to 39 is any amino acid
  Variant (40)..(58): Xaa in position 40 to 58 is any or no amino acid
  Variant (61)..(62): Xaa in position 61 to 62 is any amino acid
  Variant (64)..(66): Xaa in position 64 to 66 is any amino acid
  Variant (67)..(82): Xaa in position 67 to 82 is any or no amino acid
  Variant (84)..(89): Xaa in position 84 to 89 is any amino acid
  Variant (91)..(93): Xaa in position 91 to 93 is any amino acid
  Variant (95)..(97): Xaa in position 95 to 97 is any amino acid
  Variant (99)..(101): Xaa in position 99 to 101 is any amino acid
  Variant (103)..(104): Xaa in position 103 to 104 is any amino acid
  Variant (108)..(108): Xaa in position 108 is any amino acid
  Variant (110)..(112): Xaa in position 110 to 112 is any amino acid
  Variant (114)..(120): Xaa in position 114 to 120 is any amino acid
  Variant (121)..(123): Xaa in position 121 to 123 is any or no amino acid
  Variant (125)..(130): Xaa in position 125 to 130 is any amino acid
  Variant (132)..(132): Xaa in position 132 is any amino acid
  Variant (135)..(136): Xaa in position 135 to 136 is any amino acid
  Variant (140)..(140): Xaa in position 140 is any amino acid
  Variant (144)..(146): Xaa in position 144 to 146 is any amino acid
  Variant (148)..(149): Xaa in position 148 to 149 is any amino acid
  Variant (150)..(150): Xaa in position 150 is any or no amino acid
  Variant (152)..(153): Xaa in position 152 to 153 is any amino acid
  Variant (155)..(156): Xaa in position 155 to 156 is any amino acid
  Variant (158)..(160): Xaa in position 158 to 160 is any amino acid
  Variant (162)..(165): Xaa in position 162 to 165 is any amino acid
  Variant (167)..(169): Xaa in position 167 to 169 is any amino acid
  Variant (170)..(179): Xaa in position 170 to 179 is any or no amino acid
  Variant (181)..(182): Xaa in position 181 to 182 is any amino acid
  Variant (185)..(185): Xaa in position 185 is any amino acid
  Variant (188)..(188): Xaa in position 188 is any amino acid
  Variant (191)..(191): Xaa in position 191 is any amino acid
  Variant (197)..(197): Xaa in position 197 is any amino acid
  Variant (200)..(200): Xaa in position 200 is any amino acid
  Variant (202)..(203): Xaa in position 202 to 203 is any amino acid
  Variant (205)..(207): Xaa in position 205 to 207 is any amino acid
  Variant (209)..(210): Xaa in position 209 to 210 is any amino acid
  Variant (212)..(212): Xaa in position 212 is any amino acid
  Variant (216)..(216): Xaa in position 216 is any amino acid
  Variant (220)..(225): Xaa in position 220 to 225 is any amino acid
  Variant (227)..(231): Xaa in position 227 to 231 is any amino acid
  Variant (234)..(236): Xaa in position 234 to 236 is any amino acid
  Variant (238)..(239): Xaa in position 238 to 239 is any amino acid
  Variant (242)..(243): Xaa in position 242 to 243 is any amino acid
  Variant (249)..(250): Xaa in position 249 to 250 is any amino acid
  Variant (257)..(257): Xaa in position 257 is any amino acid
  Variant (262)..(265): Xaa in position 262 to 265 is any amino acid
  Variant (269)..(273): Xaa in position 269 to 273 is any amino acid
  Variant (276)..(279): Xaa in position 276 to 279 is any amino acid
  Variant (280)..(280): Xaa in position 280 is any or no amino acid
  Variant (284)..(285): Xaa in position 284 to 285 is any amino acid
  Variant (288)..(295): Xaa in position 288 to 295 is any amino acid
  Variant (297)..(298): Xaa in position 297 to 298 is any amino acid
PXXWLXXXFXXPFXXVXXISXXXXXXXXXXXXPXXXXXXXXXXXXXXXXXXXXXXXXXNYXXLXXXXXXXXXXXXXXXXXXXYXXXXXXSXXXAXXXTXXXLXXGYPXAXXXAXXXXXXXXXXLXXXXXXPXWTXXLIRXYAWXXXLXXXGXXNXXLXXXGXXXXPXXXXXXXXXXXXXTXXAVXIGXVYXYLPFMXLPXYXXLXXXDXXLXEAAXDLGXXXXXXFXXXXXPLXXXGXXAGXXLVFIPXXGEFVIPXLLGGXXXXMIGXXXXXEFXXXXXDWPXXSAXXXXXXXXLXXP

SEQ ID NO: 131484 - protein, 45 aa, Artificial sequence
  protein pattern
  Variant (2)..(2): Xaa in position 2 is any amino acid
  Variant (3)..(3): Xaa in position 3 is Ala, Ser or Thr
  Variant (4)..(5): Xaa in position 4 to 5 is any amino acid
  Variant (7)..(7): Xaa in position 7 is Ile or Val
  Variant (8)..(8): Xaa in position 8 is Ala, Gly, Ile, Leu or Val
  Variant (11)..(11): Xaa in position 11 is Ala, Cys, Ser or Val
  Variant (12)..(12): Xaa in position 12 is Phe, Leu or Met
  Variant (13)..(13): Xaa in position 13 is Ile or Leu
  Variant (14)..(14): Xaa in position 14 is Cys or Val
  Variant (15)..(15): Xaa in position 15 is Phe or Met
  Variant (16)..(16): Xaa in position 16 is Ile or Val
  Variant (18)..(19): Xaa in position 18 to 19 is any amino acid
  Variant (22)..(22): Xaa in position 22 is Phe or Tyr
  Variant (26)..(26): Xaa in position 26 is any amino acid
  Variant (27)..(27): Xaa in position 27 is any or no amino acid
  Variant (29)..(29): Xaa in position 29 is Ala, Gly, Leu or Val
  Variant (31)..(36): Xaa in position 31 to 36 is any amino acid
  Variant (37)..(37): Xaa in position 37 is any or no amino acid
  Variant (39)..(40): Xaa in position 39 to 40 is any amino acid
  Variant (41)..(41): Xaa in position 41 is Ile, Leu or Met
  Variant (42)..(42): Xaa in position 42 is Phe, Trp or Tyr
  Variant (43)..(43): Xaa in position 43 is any amino acid
  Variant (44)..(44): Xaa in position 44 is Ala or Glu
PXXXXGXXAGXXXXXXPXXGEXVIPXXLXGXXXXXXXGXXXXXXF

SEQ ID NO: 131485 - protein, 42 aa, Artificial sequence
  protein pattern
  Variant (2)..(3): Xaa in position 2 to 3 is any amino acid
  Variant (4)..(4): Xaa in position 4 is Ala or Gly
  Variant (5)..(6): Xaa in position 5 to 6 is any amino acid
  Variant (7)..(7): Xaa in position 7 is Ile, Leu or Val
  Variant (9)..(9): Xaa in position 9 is any or no amino acid
  Variant (11)..(11): Xaa in position 11 is any or no amino acid
  Variant (13)..(14): Xaa in position 13 to 14 is any amino acid
  Variant (15)..(15): Xaa in position 15 is Phe, Leu or Val
  Variant (16)..(16): Xaa in position 16 is Leu or Pro
  Variant (18)..(18): Xaa in position 18 is Phe, Leu or Met
  Variant (19)..(19): Xaa in position 19 is Ile or Val
  Variant (20)..(20): Xaa in position 20 is Leu or Met
  Variant (22)..(22): Xaa in position 22 is Ile, Leu or Val
  Variant (23)..(23): Xaa in position 23 is Phe or Tyr
  Variant (24)..(24): Xaa in position 24 is Ala, Ser or Thr
  Variant (25)..(25): Xaa in position 25 is any amino acid
  Variant (26)..(26): Xaa in position 26 is Ile, Leu or Met
  Variant (27)..(27): Xaa in position 27 is any amino acid
  Variant (28)..(28): Xaa in position 28 is Lys or Arg
  Variant (29)..(29): Xaa in position 29 is any amino acid
  Variant (30)..(30): Xaa in position 30 is Asp, Glu, Asn or Pro
  Variant (31)..(34): Xaa in position 31 to 34 is any amino acid
  Variant (35)..(35): Xaa in position 35 is Ala, Asp or Glu
  Variant (37)..(37): Xaa in position 37 is Ala or Ser
  Variant (38)..(38): Xaa in position 38 is any amino acid
  Variant (42)..(42): Xaa in position 42 is Ala, Cys or Ser
TXXXXXXGXVXYXXXXFXXXPXXXXXXXXXXXXXXAXXDLGX

SEQ ID NO: 131486 - protein, 28 aa, Artificial sequence
  protein pattern
  Variant (2)..(4): Xaa in position 2 to 4 is any or no amino acid
  Variant (6)..(6): Xaa in position 6 is any amino acid
  Variant (9)..(9): Xaa in position 9 is Ala or Ser
  Variant (10)..(10): Xaa in position 10 is any amino acid
  Variant (12)..(12): Xaa in position 12 is Ile or Leu
  Variant (14)..(14): Xaa in position 14 is any amino acid
  Variant (18)..(18): Xaa in position 18 is any amino acid
  Variant (19)..(19): Xaa in position 19 is Ala, Gly, Asn or Thr
  Variant (20)..(20): Xaa in position 20 is Phe, Ile or Leu
  Variant (22)..(23): Xaa in position 22 to 23 is any amino acid
  Variant (24)..(24): Xaa in position 24 is Asp, Glu, Asn or Thr
  Variant (26)..(26): Xaa in position 26 is any amino acid
  Variant (27)..(27): Xaa in position 27 is Ile, Leu or Val
  Variant (28)..(28): Xaa in position 28 is Asn or Thr
LXXXPXWTXXLXRXYAWXXXLXXXGXXX

SEQ ID NO: 131487 - protein, 20 aa, Artificial sequence
  protein pattern
  Variant (2)..(2): Xaa in position 2 is Gly, Pro or Thr
  Variant (3)..(3): Xaa in position 3 is any amino acid
  Variant (4)..(4): Xaa in position 4 is Ala, Gly or Ser
  Variant (6)..(7): Xaa in position 6 to 7 is any or no amino acid
  Variant (9)..(13): Xaa in position 9 to 13 is any amino acid
  Variant (14)..(14): Xaa in position 14 is any or no amino acid
  Variant (16)..(16): Xaa in position 16 is Ala, Ile, Leu or Val
  Variant (17)..(17): Xaa in position 17 is Ile, Leu, Met or Val
  Variant (18)..(18): Xaa in position 18 is any amino acid
  Variant (19)..(19): Xaa in position 19 is Ile, Leu, Pro or Val
  Variant (20)..(20): Xaa in position 20 is Ala, Ile, Leu, Pro or Val
WXXXSXXAXXXXXXLXXXXX

SEQ ID NO: 131488 - protein, 21 aa, Artificial sequence
  protein pattern
  Variant (2)..(3): Xaa in position 2 to 3 is any amino acid
  Variant (5)..(5): Xaa in position 5 is Phe, Leu or Met
  Variant (6)..(7): Xaa in position 6 to 7 is any amino acid
  Variant (8)..(9): Xaa in position 8 to 9 is Phe or Leu
  Variant (10)..(10): Xaa in position 10 is any amino acid
  Variant (11)..(11): Xaa in position 11 is Ala, Ile, Leu or Val
  Variant (14)..(14): Xaa in position 14 is any amino acid
  Variant (15)..(18): Xaa in position 15 to 18 is any or no amino acid
  Variant (21)..(21): Xaa in position 21 is Phe, Leu or Val
PXXWXXXXXXXPFXXXXXISX

SEQ ID NO: 131489 - DNA, 504 bp, Escherichia coli
  CDS (1)..(504): transl_table=11
atgggtatgcaacgtctggccaccattgcaccgccacaggttcatgagatatgggcgctactcagccagatcccggacccggagatcccggtgctgaccattactgatttaggcatggtgcgtaatgtgacacagatgggagaaggatgggtgatcggctttacgccgacatattccggttgtccggcaacggaacatttgattggcgcgatacgtgaggcaatgacaaccaacgggtttacccccgttcaggttgtgctgcaactcgacccggcatggaccaccgactggatgacccccgatgcccgtgagcgtctgcgagagtatggcattagcccgcccgccggacacagttgccatgcccatttgccgccagaagtacgttgcccgcgctgcgccagcgtccataccacacttatcagtgaatttggttccacggcctgcaaagcattgtaccgctgcgatagttgccgcgaacctttcgattatttcaaatgtatttaa

SEQ ID NO: 131490 - protein, 167 aa, Escherichia coli
MGMQRLATIAPPQVHEIWALLSQIPDPEIPVLTITDLGMVRNVTQMGEGWVIGFTPTYSGCPATEHLIGAIREAMTTNGFTPVQVVLQLDPAWTTDWMTPDARERLREYGISPPAGHSCHAHLPPEVRCPRCASVHTTLISEFGSTACKALYRCDSCREPFDYFKCI

SEQ ID NO: 131491 - DNA, 513 bp, Deinococcus radiodurans R1
  CDS (1)..(513): transl_table=11
gtggtgatgggtcaggcggaacctgccgccgcctacccggacccggcagccgtctgggccgcgctctcgcaggtgcccgaccccgaaatcccggtcgtgtccatcgtggacatgggcatggtgcgcgaggtgaaggtggacggtgaaggggtgtcggtcacctttacgcccaccttcagcggctgcccggcactgcacgtcatccggcagagcatcgaggacgccgtgcgtgggctgggcgtgaatgacgtggaggtcaaaagcacgctgacgccgccctggaccaccgattcgattttgccggatgcccgcgaacgcctgcgcgagtacggcatcgcgccgcccgcgcccgccgagggcagcctgatttcgctggagccggagcccacatcctgccctcgctgcggctcgttcaacgtgcggatgaccgccagcttcggcccgacgctgtgcaagcggctgtacgtgtgcgatgcctgtaaagagccgttcgaggggtttaagagcgtttga

SEQ ID NO: 131492 - protein, 170 aa, Deinococcus radiodurans R1
MVMGQAEPAAAYPDPAAVWAALSQVPDPEIPVVSIVDMGMVREVKVDGEGVSVTFTPTFSGCPALHVIRQSIEDAVRGLGVNDVEVKSTLTPPWTTDSILPDARERLREYGIAPPAPAEGSLISLEPEPTSCPRCGSFNVRMTASFGPTLCKRLYVCDACKEPFEGFKSV

SEQ ID NO: 131493 - DNA, 513 bp, Streptomyces coelicolor A3(2)
  CDS (1)..(513): transl_table=11
gtgacccgggacccggcgctcgcggacgcgcgccgcgcccggcacgtcgccgagcaggtgcccgaccccgagctgcccatgctgaccctcgccgacctcggcgtgctgcgcgacgtcgaggtggacggggacggcaccgtggtcgccagcctgacccccacctactcgggctgcccggccatggccgagatgcgggcggacgtcgccgcgcggctgcgcgcggcgggctacccgcgtgtggagatccgcaccgtcctggacccgccctggaccagcgactggatcaccgagtccggccgcggcaagctcgccgagcacggaatcgccccgcccggcgccgcaccccgcggcccggtctccctggtgctgtcgcccacccggcccgcggtgccctgcccccgctgcggctcggcggacaccgaggagacctcccgcttcgccgccacgtcctgcaaggcgctgtggcgctgccgggcctgccgcgagccgttcgagtacgtcaaggagatctga

SEQ ID NO: 131494 - protein, 170 aa, Streptomyces coelicolor A3(2)
MTRDPALADARRARHVAEQVPDPELPMLTLADLGVLRDVEVDGDGTVVASLTPTYSGCPAMAEMRADVAARLRAAGYPRVEIRTVLDPPWTSDWITESGRGKLAEHGIAPPGAAPRGPVSLVLSPTRPAVPCPRCGSADTEETSRFAATSCKALWRCRACREPFEYVKEI

SEQ ID NO: 131495 - DNA, 534 bp, Pseudomonas putida KT2440
  CDS (1)..(534): transl_table=11
atgcaacctggtgaactgattgccggcgaccgcggcgcacgggcacagcaaggcgacgacgtggcccgtgcctgggcggtattgggccaggtcatggaccctgaagtgccggtggtcagcgtggtcgacctggggatcgtgcgcgatgtcgattggcgcgccggccacctgcacctggtggtcaccccgacctactctggctgcccggccaccgaagtcatcgaaggggatatccgccaggcgctggaacaggccggcttcagcgcgccagagctggagcgccggctgaccccggcctggagcaccgactggatcaccgaactgggccgcgagcgcctgcgcgcttatggcattgcgccgccgcaaggcagcgccagcaagcgcagcctgctcggcgaagccccccaggtgtgctgcccgcaatgcggcagcgcccataccgaattgctcagccagttcggctccacggcctgcaaggcgctgtaccgctgccgcgagtgcctggagccattcgactatttcaaatgcatttga

SEQ ID NO: 131496 - protein, 177 aa, Pseudomonas putida KT2440
MQPGELIAGDRGARAQQGDDVARAWAVLGQVMDPEVPVVSVVDLGIVRDVDWRAGHLHLVVTPTYSGCPATEVIEGDIRQALEQAGFSAPELERRLTPAWSTDWITELGRERLRAYGIAPPQGSASKRSLLGEAPQVCCPQCGSAHTELLSQFGSTACKALYRCRECLEPFDYFKCI

SEQ ID NO: 131497 - DNA, 504 bp, Bradyrhizobium japonicum USDA 110
  CDS (1)..(504): transl_table=11
atggtgaccgtgtccgagagcggtgccgatctgcgccggcgcgcctgggatgctgcggcgagcgtggtcgatccggaaatcccggtgctgacgatcgccgatctcggcgtgctccgcgatgtcgttctcgacggcgaccatgtcgaggtcgcgatcaccccgacctattcgggctgcccggccatgaacatgatcgcgctcgaaatcgaggtcgcgctggagcgcgccggcttccatcgtccgaaggtccgcacggtgttgtcgccggcctggaccaccgactggatgagcgaggaggggcggcggaagctgcgcgcctacggcatcgcgccgccacaggcttcaaactcgcgccgcgcgctgttcggcgagcagtctgtcgcgtgcccgcaatgcggttctgacaggaccgagctgctgtccgaattcggctcgacctcctgcaaggcgctgtggcgctgcaaggcctgccgcgaacccttcgattacttcaagtgtcattga

SEQ ID NO: 131498 - protein, 167 aa, Bradyrhizobium japonicum USDA 110
MVTVSESGADLRRRAWDAAASVVDPEIPVLTIADLGVLRDVVLDGDHVEVAITPTYSGCPAMNMIALEIEVALERAGFHRPKVRTVLSPAWTTDWMSEEGRRKLRAYGIAPPQASNSRRALFGEQSVACPQCGSDRTELLSEFGSTSCKALWRCKACREPFDYFKCH

SEQ ID NO: 131499 - DNA, 507 bp, Bordetella bronchiseptica RB50
  CDS (1)..(507): transl_table=11
gtgaacgccttgcccagggtgccggccggccaggtgctggcctggctggaaagcgtgcccgacccggagatccccgtgctgtcggtggtggatctcggcgtggtgcgcgacatcggctgggacggcgatacctgcgtggtcaccatcacgcccacgtactcgggctgtccggccatgcgcgaaatcacccacgacatcgagaccacgctggccggccacggcctggccagcgtgcgggtcgagacgcgcctggcgccggcctggaccaccgactggatgaccgcgcgcggccgcgccgcgctcaggcagtacggcatcgccgcgccggtcgagcgcgccgtcgatatttccggcatcagccggcgccgcgccgcgcccgccatcgaatgcccgcactgcggttcgctcgatacgcggctgatcagccatttcggatcgacctcctgcaaggcgctgtaccgttgcgtcgcctgccgcgagccgttcgattacttcaagccccactga

SEQ ID NO: 131500 - protein, 168 aa, Bordetella bronchiseptica RB50
MNALPRVPAGQVLAWLESVPDPEIPVLSVVDLGVVRDIGWDGDTCVVTITPTYSGCPAMREITHDIETTLAGHGLASVRVETRLAPAWTTDWMTARGRAALRQYGIAAPVERAVDISGISRRRAAPAIECPHCGSLDTRLISHFGSTSCKALYRCVACREPFDYFKPH

SEQ ID NO: 131501 - DNA, 504 bp, Rhodopseudomonas palustris CGA009
  CDS (1)..(504): transl_table=11
atggtgacgctgacgggcagcgacgccgagctgcgacagcgcgcctgggatgccgccgcgacggtgtgtgatccggaaatcccggttctgaccatcgccgatctcggcgtgctgcgcgaggtgcgcgtcgagcacggccgcgtcgaggtcgcgatcaccccgacctattccggatgtccggcgatgaacatgatcgcgctggagatcgagaccgcgctggcgcgtgccggcatcgcgcaggcgcgggtcaccaccgtgctggcgccggcctggaccaccgattggatgagcgaggccggccgcgccaagctgaaggactacggcatcgccccgccgcaggcgaccggctcccgccgcgcgctgttcggcaccctggaaatcgcctgcccgcaatgcggctcgaccgacaccgagcagctgtctgaattcggctcgacttcgtgcaaggcgctgtggcgctgcaagagctgccgcgaaccattcgattacttcaagtgccattga

SEQ ID NO: 131502 - protein, 167 aa, Rhodopseudomonas palustris CGA009
MVTLTGSDAELRQRAWDAAATVCDPEIPVLTIADLGVLREVRVEHGRVEVAITPTYSGCPAMNMIALEIETALARAGIAQARVTTVLAPAWTTDWMSEAGRAKLKDYGIAPPQATGSRRALFGTLEIACPQCGSTDTEQLSEFGSTSCKALWRCKSCREPFDYFKCH

SEQ ID NO: 131503 - DNA, 621 bp, Burkholderia pseudomallei K96243
  CDS (1)..(621): transl_table=11
atgcccgccttccccgcctccgccctcggccaaccgaccgccgccgatgcccgtgagggccggcgccccgtcaccggacgcgccgccgcgcccggcgacgatccgctcgtcgagcgcgcgtggagcgcgctcgaagcggtgcccgatcccgagataccggtcgtgtcgatccgcgagctcggcatcctgcgcgacgtgcgccgcgcctcggacggcgccctcgaagtcgtgatcacgccgacctattccggctgcccggcgatgcagcagatcgccgaggacatcggcgccgcgctccggcaagcgggcatcgcgccgcaccgaatcgcaaccgtgctcgctcccgcgtggacgaccgactggatcaccgccgacgcccgcgagaagctccgcgcatacggcatcgcgccgcccgtcggccaatgcggcgaggcgcgcggcgcgcacgcggccgcgccgcgcgtcgtgcgcttcatgccgaagccgccggccgcgccgctctgcccgcgctgcggctccgcgcataccgagcggctcgcgcaattcgcgtcgaccgcgtgcaaggcgctctatcgctgcctcgactgccgcgaacccttcgactacttcaaaccttattga

SEQ ID NO: 131504 - protein, 206 aa, Burkholderia pseudomallei K96243
MPAFPASALGQPTAADAREGRRPVTGRAAAPGDDPLVERAWSALEAVPDPEIPVVSIRELGILRDVRRASDGALEVVITPTYSGCPAMQQIAEDIGAALRQAGIAPHRIATVLAPAWTTDWITADAREKLRAYGIAPPVGQCGEARGAHAAAPRVVRFMPKPPAAPLCPRCGSAHTERLAQFASTACKALYRCLDCREPFDYFKPY

SEQ ID NO: 131505 - DNA, 462 bp, Silicibacter pomeroyi DSS-3
  CDS (1)..(462): transl_table=11
atggaccagccgtcgcaacagcaggtctgggactggctcgataccgttccagaccccgagatcccggtgatctcggtcgtcgatctgggcatcgtgcgcgatgtcgcctgggagggggaaacactgacggtgaccgtcacccccacctattcgggctgccccgcgaccgcgatcatctcgatggatatcgagaccgcactgcgcaaccggggggtcaaggatatccggatcaagacccagatatcgcccgcctggaccactgactggctgagcgagaagggcaaggtgaagctggaggaatacggcatcgccccgccccgccctgccggcggccccgaacgctgtccgcgctgcggcagcaaggcggtcgaaaaggtgagccagttcggctcgaccccgtgcaaggcccattggcgctgtaccgactgcctggaacccttcgactatttcaaatgtatctga

SEQ ID NO: 131506 - protein, 153 aa, Silicibacter pomeroyi DSS-3
MDQPSQQQVWDWLDTVPDPEIPVISVVDLGIVRDVAWEGETLTVTVTPTYSGCPATAIISMDIETALRNRGVKDIRIKTQISPAWTTDWLSEKGKVKLEEYGIAPPRPAGGPERCPRCGSKAVEKVSQFGSTPCKAHWRCTDCLEPFDYFKCI

SEQ ID NO: 131507 - DNA, 501 bp, Dechloromonas aromatica RCB
  CDS (1)..(501): transl_table=11
atgagcgcaaacgtcgatgccgcctgggctgcgctggaatatctggccgatccggaaattccggtcatctcgctgcgcgagctcggcatcctgcgcgatatccgggtcggtgccgacggtctggaagtggtcatcacgcccacctacagcggctgcccggcgatgagccagatcgaggatgacgtgcgctcgaccttgctcgccaagggcatctcggcgcgtgtcgtgacgcaactggctcccgcctggaccaccgactggatgagcgaaaccggcaaggaaaagctgcgcgcctacggcattgcgccgccgcaccagacgccggccggcagcaatgtcgtgcgcttcatcagcaagccggccaaggtcgaaaccgtgccctgtccgcattgcggctcggcgcatacggtcgagtcctcccattttggatcgacggcctgcaaggcgctgtacaagtgccttgattgccaggaaccgttcgattacttcaagccttactaa

SEQ ID NO: 131508 - protein, 166 aa, Dechloromonas aromatica RCB
MSANVDAAWAALEYLADPEIPVISLRELGILRDIRVGADGLEVVITPTYSGCPAMSQIEDDVRSTLLAKGISARVVTQLAPAWTTDWMSETGKEKLRAYGIAPPHQTPAGSNVVRFISKPAKVETVPCPHCGSAHTVESSHFGSTACKALYKCLDCQEPFDYFKPY

SEQ ID NO: 131509 - DNA, 543 bp, Ralstonia eutropha JMP134
  CDS (1)..(543): transl_table=11
atgaacactgttgcgctttccgacgccgaacgcaccacgcgcgcgtgggctgcgctggagtcggtgcccgaccccgaaatccccgtggtatcgattcgggacctcggcatcctgcgcgatattgccgtagccgacggcgcgacgctcgaagtcaccatcacgccgacgtattcgggctgcccggccatgtcgcagatcgccgaggacatcggccaggccctcgacgcggcaggactcgggccctggcgcgtccgcacggcgctatcgccggcgtggacgaccgactggatcagcgacgccgcacgcgaacgcctgcgcgaattcggcattgcgccgccgcggcaatgcgacgcggcaccagccacgcagccgttgcgcttcgtgccgcgcgccgcccgcgccggcgcaccggataccgtggcctgtccgcgctgcggcagccgccatacgcaggaaatctcgcgcttcgcatcgacggcctgcaaggcgctttaccgttgcctcgattgccgcgaaccgttcgactacttcaaaccctactaa

SEQ ID NO: 131510 - protein, 180 aa, Ralstonia eutropha JMP134
MNTVALSDAERTTRAWAALESVPDPEIPVVSIRDLGILRDIAVADGATLEVTITPTYSGCPAMSQIAEDIGQALDAAGLGPWRVRTALSPAWTTDWISDAARERLREFGIAPPRQCDAAPATQPLRFVPRAARAGAPDTVACPRCGSRHTQEISRFASTACKALYRCLDCREPFDYFKPY

SEQ ID NO: 131511 - DNA, 486 bp, Nocardioides sp. JS614
  CDS (1)..(486): transl_table=11
gtgaggcccgcgtggaagatcgccgccgacgtcccggatcccgagctgccggtggtgaccatcgccgacctcgggatcctgcgcgacgtgaccgaggacgaccagggccgcgtgcacgtccagatcactccgacgtactccgggtgcccggcgatggagaccatccgcgccgacctgatcgagagcctgaccgccgccggctacctgcacgtggacgtcgagttcgtgctcgcgccggcgtggacgaccgactggatgaccgcggaggccaaggagaagctggcggcctacggcatcgcgccgcccggtgaccggccggcgtccggcctcccgggccagcccctgagcctgcccctgagcgtgcgctgcccacagtgcgggtcggtggacacccgggagtcgagccgcttcgggtcgaccgcctgcaagtcgctgtgggtgtgtcgcagctgccgggagccgttcgaccacttcaaggccctctga

SEQ ID NO: 131512 - protein, 161 aa, Nocardioides sp. JS614
MRPAWKIAADVPDPELPVVTIADLGILRDVTEDDQGRVHVQITPTYSGCPAMETIRADLIESLTAAGYLHVDVEFVLAPAWTTDWMTAEAKEKLAAYGIAPPGDRPASGLPGQPLSLPLSVRCPQCGSVDTRESSRFGSTACKSLWVCRSCREPFDHFKAL

SEQ ID NO: 131513 - DNA, 507 bp, Croceibacter atlanticus HTCC2559
  CDS (1)..(507): transl_table=11
atggtagccgagcagcaaccacatatcaacaaaaaacttatagacattctagagtcggtttccgatcctgaagttccagtgctttcaattttagatttaggtgttgttcgttatgcagattttgaagacgacggaaaagtttcagtaaaaatcacaccaacatatagcggttgtccagcaatggatgttattggtgacgacattgaaaaagcattgacagaagccggttataaatcaaaagtaaaattgattctttctcctgcttggaccacagattggatgagcgagaatggcaagagaaaactcgaagagtacggcatcgcgccaccaatggacgccacagcagataaagctgcgttactaggaaatgccaagattgtaaaatgcacaaactgcggaagtacgaacacacatttggtaagtcagtttggctcaacggcttgcaaagcaatgtttaaatgtgacgattgccaagagccgttcgactattttaaatgtttaacctaa

SEQ ID NO: 131514 - protein, 168 aa, Croceibacter atlanticus HTCC2559
MVAEQQPHINKKLIDILESVSDPEVPVLSILDLGVVRYADFEDDGKVSVKITPTYSGCPAMDVIGDDIEKALTEAGYKSKVKLILSPAWTTDWMSENGKRKLEEYGIAPPMDATADKAALLGNAKIVKCTNCGSTNTHLVSQFGSTACKAMFKCDDCQEPFDYFKCLT

SEQ ID NO: 131515 - DNA, 540 bp, Oceanospirillum sp. MED92
  CDS (1)..(540): transl_table=11
atgaatgaaatctcactgatgccggaagagcagtaccagcgcctgcagcaacgcaacgctgaagacgtaaaggaactatgggatctgctcgacgaagttaaagaccccgaagtaccggtgctgacgatttgggatctggggattctgcgtgatatcgaacgtgaaggtgacagcgtgattgtcaccatcacgccgacctactccggttgtccggcgatggacaacatcagcacagacgtcactcaggtattgaatgatgctggttacgctgatgtgaaggtgaaaacctcactgtcgcctgcctggagttcagaatggatgtcccctgagggccgtcgcaaactgcgtaactatggcattgcgccaccagaagacgcagatcttgatgaagacggtctgacaccggatgcccacgcgcagtgtccacactgtagttcccgaaatacacgccgggtaagtgagtttggctctacagcctgtaaagcactgtttcagtgtaacgactgtaacgaaccatttgactattttaagaaaatctag

SEQ ID NO: 131516 - protein, 179 aa, Oceanospirillum sp. MED92
MNEISLMPEEQYQRLQQRNAEDVKELWDLLDEVKDPEVPVLTIWDLGILRDIEREGDSVIVTITPTYSGCPAMDNISTDVTQVLNDAGYADVKVKTSLSPAWSSEWMSPEGRRKLRNYGIAPPEDADLDEDGLTPDAHAQCPHCSSRNTRRVSEFGSTACKALFQCNDCNEPFDYFKKI

SEQ ID NO: 131517 - DNA, 507 bp, Xanthobacter autotrophicus Py2
  CDS (1)..(507): transl_table=11
gtgaccggcgcggcgctggccgatccggcggcgctgcgcgaggaggtgtggcgcgtggcgggtgcggtcacggacccggagatcccggtgctctccatcgccgacctcggcgtgctgcgcgacgtgcgcatcgctgacgggcgggtggaagtactgatcacgcccacctattcgggctgcccggccatgaccatgatcgcgatcgagatcgagctggcgctcagcaaggccggcctcggaccggtggtggtgaagaccgtgctggccccggcctggacgaccgatttcatgagcgaggacggccggcgcaagctgaaggcctacggcatcgccccgccgacgaaaaccgctgggcgccgggcgctgttcggggtcgaggtggtggaatgcccgcagtgcggctcctccgacacggcggaaatcgcgccgttcggctccacctcctgcaagtccctgtggcagtgcaaggcctgccgcgagccgttcgattatttcaaatgccactga

SEQ ID NO: 131518 - protein, 168 aa, Xanthobacter autotrophicus Py2
MTGAALADPAALREEVWRVAGAVTDPEIPVLSIADLGVLRDVRIADGRVEVLITPTYSGCPAMTMIAIEIELALSKAGLGPVVVKTVLAPAWTTDFMSEDGRRKLKAYGIAPPTKTAGRRALFGVEVVECPQCGSSDTAEIAPFGSTSCKSLWQCKACREPFDYFKCH

SEQ ID NO: 131519 - DNA, 522 bp, marine gamma proteobacterium HTCC2080
  CDS (1)..(522): transl_table=11
gtgaccagcgtcacagcagattgcattcctctcttgccgattgaggaattagcgcgtcgccgtcgtcgccaggagtcctcagtgggcgatatttgggagttgcttgacagtgtaatggatccagagatccctgtaatttcgttgtacgaactgggcgtcctgcaggatatacgccgggatggtgatgcagtgaagttggtgctgacacccacctacattggttgcccggctttagggattatggaagaggacgctcgtgctgctcttaccgcgggcgggtaccatcaggtgatagtagagactcgcctggcaccggcatggactacagcgtggctaacccccgaggcgcggcgaaaaatgaccgcttatggcgtggcgtcaccacaagagggcggtattgcatgtccccaatgcggtagcgtcaacaccgaagttattagtgagtttggatcaacagcctgcaaatcactttttcgatgtgttgcttgccatgagcctttcgacgtttttaaggcgatctga

SEQ ID NO: 131520 - protein, 173 aa, marine gamma proteobacterium HTCC2080
MTSVTADCIPLLPIEELARRRRRQESSVGDIWELLDSVMDPEIPVISLYELGVLQDIRRDGDAVKLVLTPTYIGCPALGIMEEDARAALTAGGYHQVIVETRLAPAWTTAWLTPEARRKMTAYGVASPQEGGIACPQCGSVNTEVISEFGSTACKSLFRCVACHEPFDVFKAI

SEQ ID NO: 131521 - DNA, 537 bp, Corynebacterium glutamicum
  CDS (1)..(537): transl_table=11
atgtcgatcaccacaaccaaccatccacttcgcccccaagatacagagcttgctcgactctgggacattgccgctcaagttcctgatccagaaatcccagtgatctccattgctgatcttggaatcttgcgcggagtggctttcgaaggaaataccgtggtggtcaccattactcccacctattcaggatgccccgcgatgggaaccatcacagctgacgttgtcgatgccctaaagcgtgaaggctttgaaaacacccgcgttgatcttgttctccaccctgcatggtccacggattggatgactgagcacggtaaagaaaaactccgcgaatacggcatcgcgccacctcagggaatgtcacggaggacttcaggaccaattttgctcaatcttgctcctccaactccggtgacgtgcccacactgccactccaccaacaccaaattaattagccagttcggttcaacctcttgcaaatctcttcatacctgcaaggactgctttgagcctttcgattacttcaaggtgcactaa

SEQ ID NO: 131522 - protein, 178 aa, Corynebacterium glutamicum
MSITTTNHPLRPQDTELARLWDIAAQVPDPEIPVISIADLGILRGVAFEGNTVVVTITPTYSGCPAMGTITADVVDALKREGFENTRVDLVLHPAWSTDWMTEHGKEKLREYGIAPPQGMSRRTSGPILLNLAPPTPVTCPHCHSTNTKLISQFGSTSCKSLHTCKDCFEPFDYFKVH

SEQ ID NO: 131523 - DNA, 525 bp, Rhizobium meliloti
  CDS (1)..(525): transl_table=11
atggcaacggcgatacgcccctcgatcgcggatgtatggcattggctctcgcaagtgccggatccggaaattccggtcatctccgtgaccgacctcggcatcgtccgcaacgtcgactgggatggcgaaacgctggtggtgacggtgacgccgacctattcgggctgtcccgccacggcggtcatcaacctcgatatcgagcggcggctcaaggagaacggcatcgagagtgtcaggctcgaacgccagctctcgcccgcctggaccaccgactggattagcgccgagggccgcgaaaagcttgaaagctatggcattgcggcccccgtcgacggcagcggggcggagggcaggctgttgaaacggatcgaaggcctctcgggcggtgcggcgctgacggtctcctgtccgcgctgtggctccgcccggaccgataaggtcagccagttcggatcgacgccctgcaaagcgagctatcgctgccgggactgtctggagcccttcgattatttcaaatgcatctga

SEQ ID NO: 131524 - protein, 174 aa, Rhizobium meliloti
MATAIRPSIADVWHWLSQVPDPEIPVISVTDLGIVRNVDWDGETLVVTVTPTYSGCPATAVINLDIERRLKENGIESVRLERQLSPAWTTDWISAEGREKLESYGIAAPVDGSGAEGRLLKRIEGLSGGAALTVSCPRCGSARTDKVSQFGSTPCKASYRCRDCLEPFDYFKCI

SEQ ID NO: 131525 - DNA, 492 bp, Azoarcus evansii
  CDS (1)..(492): transl_table=11
atgctgaccgaaacccaggcctgggacgtcctccacgccgtgcccgatcccgagatcccggtgatctcggtgaccgagctcggcatcgtgcgcgaggtccatgcgcgcgacggcgggctgcacatcgtcgtcacgccgacctattccggctgtccggcgaccgaggtgatcgcgcagagcatccgcgatgcgctcgtcgccgccggcgccggcgaggtcgatgtcgagacgcgcctcgcgcccgcctggaccaccgcctggatcaccgagccggcgaaggagaagctgcgcgcctacggcatcgcgcccccgtccggcgacgcggcggtcggcggtgcccagccgatccgcttcgtgccgcgcaagctcgcctgcccgcgctgcggctcgaccgacacgacccgcctgtcgcagttcggctcgaccgcgtgcaaggcgctgtaccgctgccagagctgtctcgaaccattcgaatacttcaaaccgatctag

SEQ ID NO: 131526 - protein, 163 aa, Azoarcus evansii
MLTETQAWDVLHAVPDPEIPVISVTELGIVREVHARDGGLHIVVTPTYSGCPATEVIAQSIRDALVAAGAGEVDVETRLAPAWTTAWITEPAKEKLRAYGIAPPSGDAAVGGAQPIRFVPRKLACPRCGSTDTTRLSQFGSTACKALYRCQSCLEPFEYFKPI

SEQ ID NO: 131527 - DNA, 22 bp, Artificial sequence
  primer
atgggtatgcaacgtctggcca

SEQ ID NO: 131528 - DNA, 28 bp, Artificial sequence
  primer
ttaaatacatttgaaataatcgaaaggt

SEQ ID NO: 131529 - protein, 164 aa, Artificial sequence
  consensus sequence
  Variant (2)..(6): Xaa in position 2 to 6 is any amino acid
  Variant (8)..(8): Xaa in position 8 is any amino acid
  Variant (12)..(12): Xaa in position 12 is any amino acid
  Variant (15)..(19): Xaa in position 15 to 19 is any amino acid
  Variant (22)..(23): Xaa in position 22 to 23 is any amino acid
  Variant (25)..(37): Xaa in position 25 to 37 is any amino acid
  Variant (38)..(38): Xaa in position 38 is any or no amino acid
  Variant (48)..(50): Xaa in position 48 to 50 is any amino acid
  Variant (52)..(58): Xaa in position 52 to 58 is any amino acid
  Variant (60)..(62): Xaa in position 60 to 62 is any amino acid
  Variant (64)..(71): Xaa in position 64 to 71 is any amino acid
  Variant (72)..(72): Xaa in position 72 is any or no amino acid
  Variant (74)..(74): Xaa in position 74 is any amino acid
  Variant (82)..(89): Xaa in position 82 to 89 is any amino acid
  Variant (91)..(92): Xaa in position 91 to 92 is any amino acid
  Variant (99)..(104): Xaa in position 99 to 104 is any amino acid
  Variant (105)..(127): Xaa in position 105 to 127 is any or no amino acid
  Variant (130)..(130): Xaa in position 130 is any amino acid
  Variant (134)..(135): Xaa in position 134 to 135 is any amino acid
  Variant (137)..(139): Xaa in position 137 to 139 is any amino acid
  Variant (141)..(141): Xaa in position 141 is any amino acid
  Variant (146)..(146): Xaa in position 146 is any amino acid
  Variant (149)..(149): Xaa in position 149 is any amino acid
  Variant (151)..(152): Xaa in position 151 to 152 is any amino acid
  Variant (154)..(155): Xaa in position 154 to 155 is any amino acid
  Variant (157)..(157): Xaa in position 157 is any amino acid
WXXXXXVXDPEXPVXXXXXLGXXRXXXXXXXXXXXXXXTPTYSGCPAXXXIXXXXXXXLXXXGXXXXXXXXXLXPAWTTDWXXXXXXXXLXXYGIAPPXXXXXXXXXXXXXXXXXXXXXXXXXXXXXCPXCGSXXTXXXSXFGSTXCKXLXXCXXCXEPFDYFK

SEQ ID NO: 131530 - protein, 39 aa, Artificial sequence
  protein pattern
  Variant (3)..(3): Xaa in position 3 is any amino acid
  Variant (5)..(5): Xaa in position 5 is any amino acid
  Variant (7)..(8): Xaa in position 7 to 8 is any or no amino acid
  Variant (10)..(14): Xaa in position 10 to 14 is any amino acid
  Variant (15)..(16): Xaa in position 15 to 16 is any or no amino acid
  Variant (18)..(18): Xaa in position 18 is Ala or Gly
  Variant (19)..(19): Xaa in position 19 is Ala or Ser
  Variant (21)..(21): Xaa in position 21 is Ala, Pro or Ser
  Variant (24)..(24): Xaa in position 24 is Ala or Ser
  Variant (25)..(25): Xaa in position 25 is any amino acid
  Variant (26)..(26): Xaa in position 26 is Phe, His, Trp or Tyr
  Variant (27)..(27): Xaa in position 27 is any amino acid
  Variant (29)..(29): Xaa in position 29 is any amino acid
  Variant (30)..(30): Xaa in position 30 is Ala, Asp, Glu or Ser
  Variant (32)..(32): Xaa in position 32 is any amino acid
  Variant (36)..(36): Xaa in position 36 is Asp or Glu
  Variant (37)..(37): Xaa in position 37 is any amino acid
  Variant (38)..(38): Xaa in position 38 is Phe or Val
CPXCXSXXTXXXXXXXFXXTXCKXXXXCXXCXEPFXXXK

SEQ ID NO: 131531 - DNA, 2559 bp, Escherichia coli
  CDS (1)..(2559): transl_table=11
atgcaaaggaaaactctattgtcggcctgtattgcattagctctgagtggtcagggttgggcggcagatatcacagaggtagaaaccaccacaggtgaaaagaaaaataccaatgtgacttgtccggcagacccaggaaaactcagtccggaagagcttaaacgcttaccctctgaatgctctcctttagtcgaacaaaacctgatgccatggctttccacaggcgctgctgcgttaatcacggccttagccgtagtggaactaaacgacgatgatgatcatcatcatcgcaacaattctccactcccaccgacaccccctgatgatgaatcagacgacactccagttcccccaactcctggcggagatgagataataccggacgatccggatgatacgcctacacctcccaaaccggtttcgtttaataatgacgttattctcgataaaacagaaaaaacgttaactattcgcgattcagtttttacttataccgagaatgctgacgggactatatctctgcaagatagcaatggtcgtaaggcaacgattaatctttggcagattgatgaagcgaataacactgttgcccttgaaggggtgagcgcagatggcgcaacgaagtggcaatataatcacaacggtgagcttgttattacgggtgataatgccacagtaaacaacaatggcaaaaccaccgttgacggtaaagattccaccggtacggaaatcaacggtaataacgggaaagtgattcaggacggcgatctggatgtcagcggcggcggtcacggtattgatatcaccggtgacagcgcgacggtggataacaagggcaccatgaccgtcaccgatccggagtccatgggtatccagatcgacggtgacaaggccatcgtcaataacgaaggcgagagcaccatcaccaacggtggcaccggcacccagattaatggtgatgacgccacggcaaacaacaacggcaaaaccaccgttgacggcaaggattccaccggtacggaaatcaacggtaataacggaaaagttattcaggacggcgatctggatgtcagcggcggcggtcacggtattgatatcaccggcgacagcgcaacggtggataacaagggcaccatgaccgtcaccgatccggagtccatcggtatccaggttgacggcgaccaggcggttgttaacaacgaaggcgagagcgccatcaccaacggtggcaccggcacgcagattaacggtgatgacgccacggcaaacaacaacggcaaaaccaccgttgacggcaaggattccaccggtacggaaattgctggcaataacgggaaggtgattcaggacggcgatctggatgtcagcggcggcggtcacggtattgatatcaccggcgacagcgcaacggtggataacaagggcaccatgaccgtcaccgatccggagtccatcggtatccagattgacggcgaccaggccatcgtcaataacgaaggcgagagcactatcaccaatggcggcaccggcactcagatcaacggtaacgacgccaccgcgaataacagtggaaaaaccactgttgatggaaaagattccacgggtaccaaaatcgcgggcaatatcggcattgtaaatctggatggtagcctgactgttacaggcggtgcgcatggtgttgagaacattggtgacaacggcacggttaacaacaaaggagatattgttgtttccgatactggatcgattggcgtgctcatcaacggtgagggggcaacagtatccaatacgggtgatgttaacgttagcaatgaagcgacagggttcagcatcacaaccaacagtgggaaggtttcgctggcaggcagtatgcaggttggcgatttctcgaccggggtagatcttaatggcaacaataacagcgtgacgctggcggcaaaagatctaaaagtggtcgggcagaaagcgacgggcataaacgtttctggcgatgcgaatacagtgaatatcactggtaacgttctggttgataaggataaaaccgcagacaatgcggcggaatatttcttcgatccatccgtgggtatcaacgtttacggcagtgataataacgtgacgctggatggaaagttaactgttgtatcagacagtgaggttacttctcgtcagagtaatttatttgatggcagcgcagagaaaacgtcaggtctggttgtgattggcgatggcaataccgttaatatgaatggtggacttgaactgattggagagaaaaacgcgcttgcagatgggtcgcaggttacttccttgcgcacaggatatagttataccagcgttattgtcgttagtggtgagtcgtcggtatatctgaatggagatacgacaatcagcggagaattccctctggggtttgccggggttattcgggtacaggataaagctttgctggaaattggcagtggcgctacgctaacaatgcaggatattgacagttttgaacatcatgggacaagaaccctggatttgcccctatatttccagacatctgttatcacttaa

SEQ ID NO: 131532 - protein, 852 aa, Escherichia coli
MQRKTLLSACIALALSGQGWAADITEVETTTGEKKNTNVTCPADPGKLSPEELKRLPSECSPLVEQNLMPWLSTGAAALITALAVVELNDDDDHHHRNNSPLPPTPPDDESDDTPVPPTPGGDEIIPDDPDDTPTPPKPVSFNNDVILDKTEKTLTIRDSVFTYTENADGTISLQDSNGRKATINLWQIDEANNTVALEGVSADGATKWQYNHNGELVITGDNATVNNNGKTTVDGKDSTGTEINGNNGKVIQDGDLDVSGGGHGIDITGDSATVDNKGTMTVTDPESMGIQIDGDKAIVNNEGESTITNGGTGTQINGDDATANNNGKTTVDGKDSTGTEINGNNGKVIQDGDLDVSGGGHGIDITGDSATVDNKGTMTVTDPESIGIQVDGDQAVVNNEGESAITNGGTGTQINGDDATANNNGKTTVDGKDSTGTEIAGNNGKVIQDGDLDVSGGGHGIDITGDSATVDNKGTMTVTDPESIGIQIDGDQAIVNNEGESTITNGGTGTQINGNDATANNSGKTTVDGKDSTGTKIAGNIGIVNLDGSLTVTGGAHGVENIGDNGTVNNKGDIVVSDTGSIGVLINGEGATVSNTGDVNVSNEATGFSITTNSGKVSLAGSMQVGDFSTGVDLNGNNNSVTLAAKDLKVVGQKATGINVSGDANTVNITGNVLVDKDKTADNAAEYFFDPSVGINVYGSDNNVTLDGKLTVVSDSEVTSRQSNLFDGSAEKTSGLVVIGDGNTVNMNGGLELIGEKNALADGSQVTSLRTGYSYTSVIVVSGESSVYLNGDTTISGEFPLGFAGVIRVQDKALLEIGSGATLTMQDIDSFEHHGTRTLDLPLYFQTSVIT

SEQ ID NO: 131533 - DNA, 3516 bp, Escherichia coli B
  CDS (1)..(3516): transl_table=11
atgcaaaggaaaactctattgtcggcctgtattgcattagctctgagtggtcagggttgggcggcagatatcacagaggtagaaaccaccacaggtgaaaagaaaaataccaatgtgacttgtccggcagacccaggaaaactcagtccggaagagcttaaacgcttaccctctgaatgctctcctttagtcgaacaaaacctgatgccatggcttgccacaggcgctgctgcgttaatcacggccttagccgtagtggaactaaacgacgatgatgatcatcatcatcgcaacaattctccactcccaccgacaccccctgatgatgaatcagacgacactccagttcccccaagtcctggcggagatgagataataccggacgatccggatgatacgcctacacctcccaaaccgatttcgtttaataatgacgttattctcgataaagcagaaaaaacgttaactattcgcgattcagtttttacttataccgagaatgctgacgggactatttctctgcaagatagcaatggtcgtaaggcaacgattaatctttggcagattgatgaagcgaataacactgttgcccttgaaggggtgagcgcagatggcgcaacgaagtggcaatataatcataaaggtgagcttgttattacgggtgataatgccacagtaaacaacaatggcaaaaccaccgttgacggcaaggattccaccggtacggaaatcaacggtaataacgggaaagtgattcaggacggcgatctggatgtcagcggcggcggtcacggtattgatatcaccggtgacagcgcgacggtagataacaagggcaccatgaccgttaccgatccggagtccatcggtatccagattgacggcgacaaggcggttgttaataacgaaggcgagagcaccatcaccaacggcggcaccggcacgcagattaacggtgacgacgccacggcgaataacagcggcaaaaccaccgttgacggcaaggattccactggcacggaaatcaacggtaataacgggaaagttatccaggacggcgatctggatgtcagcggcggcggtcacggtattgatatcaccggtgacagcgcgacgctagataacaagggcaccatgaccgttaccgatccggagtccatcggtatccagattgacggcgacaaggcggttgttaataacgaaggcgagagcaccatcaccaacggcggcaccggcacgcagattaacggtgacgacgccacggcgaataacagcggcaaaaccaccgttgacggcaaggattccactggcacggaaatcaacggcaataacgggaaagtgattcaggacggcgatctggatgtcagcggcggcggtcacggtattgatatcaccggcgacagcgctacggtggataacaagggcaccatgaccgtcaccgatccggagtccatcggtatccagattgacggcgacaaggccatcgtcaataacgaaggcgacagttccatcaccaacggtggcaccggcacgcagattaacggtgacgaggccacgacgaataacaacggcaaaaccaccgttgacggcaaggattccaccggtacggaaattgctggcaataacgggaaggtgattcaggacggcgatctggatgtcagcggcggcggtcacgggattgatatcaccggcgacagtgcgacggtggataacaagggcaccatgaccgtcaccgatccggagtccatgggtatccagatcgacggtgacaaggcggttgttaacaacgaagacgacagttccatcaccaacggcggcaccggcacccagattaatggtgatgacgccacggcaaacaacaacggcaaaaccaccgttgacggcaaggattccaccggtacggaaatcaacggtaataacggaaaagttattcaggacggcgatctggatgtcagcggcggcggtcacgggattgatatcaccggcgacagcgcgacggtggataacaagggcaccatgaccgtcaccgatccggagtccatcggtatccaggttgacggcgaccaggcggttgttaacaacgaaggcgagagcgccatcaccaacggtggcaccggcacgcagattaacggtgatgacgccacggcaaacaacaacggcaaaaccaccgttgacggcaaggattccaccggtacggaaattgctggcaataacgggaaggtgattcaggacggcgatctggatgtcagcggcggcggtcacggtattgatatcaccggcgacagcgcaacggtggataacaagggcaccatgaccgtcaccgatccggagtccatcggtatccaggttgacggcgaccaggccatcgtcaataacgaaggcgagagcactatcaccaatggcggcaccggcactcagatcaacggtaacgacgccaccgcgaataacagtggaaaaaccactgttgatggaaaagattccacgggtaccaaaatcgcgggcaatatcggcattgtaaatctggatggtagcctgactgttacaggcggtgcgcatggtgttgagaacattggtgacaacggcacggttaacaacaaaggagatattgttgtttccgatactggatcgattggcgtgctcatcaacggtgagggggcaacagtatccaatacgggtgatgttaacgttagcaatgaagcgacagggttcagcatcacaaccaacagtgggaaggtttcgctggcaggcagtatgcaggttggcgatttctcgaccggggtagatcttaatggcaacaataacagcgtgacgctggcggcaaaagatctaaaagtggtcgggcagaaagcgacgggcataaacgtttctggcgatgcgaatacagtgaatatcactggtaacgttctggttgataaggataaaaccgcagacaatgcggcggaatatttcttcgatccatccgtgggtatcaacgtttacggcagtgataataacgtgacgctggatggaaagttaactgttgtatcagacagtgaggttacttctcgtcagagtaatttatttgatggcagcgcagagaaaacgtcaggtctggttgtgattggcgatggcaataccgttaatatgaatggtggacttgaactgattggagagaaaaacgcgcttgcagatgggtcgcaggttgcttccttgcgcacaggatatagttataccagcgttattgtcgttagtggtgagtcgtcggtatatctgaatggagatacgacaatcagcggagaattccctctggggtttgccggggttattcgggtacaggataaagctttgctggaaattggcagtggcgctacgctaacaatgcaggatattgacagttttgaacatcatgggacaagaaccccagaacttacttatgctgattccggtgcgaaaattgttaataaaggtacttgtagattcaattggtcaacgcaacagttatgtgaaaacatggggttgcggaggttttttgaatga

SEQ ID NO: 131534 - protein, 1171 aa, Escherichia coli B
MQRKTLLSACIALALSGQGWAADITEVETTTGEKKNTNVTCPADPGKLSPEELKRLPSECSPLVEQNLMPWLATGAAALITALAVVELNDDDDHHHRNNSPLPPTPPDDESDDTPVPPSPGGDEIIPDDPDDTPTPPKPISFNNDVILDKAEKTLTIRDSVFTYTENADGTISLQDSNGRKATINLWQIDEANNTVALEGVSADGATKWQYNHKGELVITGDNATVNNNGKTTVDGKDSTGTEINGNNGKVIQDGDLDVSGGGHGIDITGDSATVDNKGTMTVTDPESIGIQIDGDKAVVNNEGESTITNGGTGTQINGDDATANNSGKTTVDGKDSTGTEINGNNGKVIQDGDLDVSGGGHGIDITGDSATLDNKGTMTVTDPESIGIQIDGDKAVVNNEGESTITNGGTGTQINGDDATANNSGKTTVDGKDSTGTEINGNNGKVIQDGDLDVSGGGHGIDITGDSATVDNKGTMTVTDPESIGIQIDGDKAIVNNEGDSSITNGGTGTQINGDEATTNNNGKTTVDGKDSTGTEIAGNNGKVIQDGDLDVSGGGHGIDITGDSATVDNKGTMTVTDPESMGIQIDGDKAVVNNEDDSSITNGGTGTQINGDDATANNNGKTTVDGKDSTGTEINGNNGKVIQDGDLDVSGGGHGIDITGDSATVDNKGTMTVTDPESIGIQVDGDQAVVNNEGESAITNGGTGTQINGDDATANNNGKTTVDGKDSTGTEIAGNNGKVIQDGDLDVSGGGHGIDITGDSATVDNKGTMTVTDPESIGIQVDGDQAIVNNEGESTITNGGTGTQINGNDATANNSGKTTVDGKDSTGTKIAGNIGIVNLDGSLTVTGGAHGVENIGDNGTVNNKGDIVVSDTGSIGVLINGEGATVSNTGDVNVSNEATGFSITTNSGKVSLAGSMQVGDFSTGVDLNGNNNSVTLAAKDLKVVGQKATGINVSGDANTVNITGNVLVDKDKTADNAAEYFFDPSVGINVYGSDNNVTLDGKLTVVSDSEVTSRQSNLFDGSAEKTSGLVVIGDGNTVNMNGGLELIGEKNALADGSQVASLRTGYSYTSVIVVSGESSVYLNGDTTISGEFPLGFAGVIRVQDKALLEIGSGATLTMQDIDSFEHHGTRTPELTYADSGAKIVNKGTCRFNWSTQQLCENMGLRRFFE

SEQ ID NO: 131535 - DNA, 5862 bp, Salmonella typhimurium
  CDS (1)..(5862): transl_table=11
atgaaccctatgcaaaagaaaaaacttatttctatcgctatcgctttaacgctacaaagttattacattccggccatcgccgcagaaaataacgatgatgaaaaagaatgtcccagtaatatctcctccctgcctaaagaaaaacgcgcaaaactctcaccgacctgccttgctacacctgaaaatgataatcactggggctgggttgctggcggcgttgctgcattggtcgcaggtgtggctattggcgttgaaaataacggtggcggagattctaatcattcttataccccccctaagcccgataatggcggcgacgtcaccccgcccgacgatggcggcaacgtcaccccgcccgacgatggcggcaacgtcaccccgcccgacgatggcggcgatgacaatgtgaccccgcccgacgatagtggcgatgacgatgtggccccgcctgacgatagcggcgatgacgatgtaaccccgcccgacgatagcggcgatgatgatgtgaccccgcccgacgatagcggcgatggcgatgtgaccccgcccgacgatagcggcgatgacgatgtaaccccgcccgacgatagcggcgatgacgatgtgaccccgcctgacgatagcggcgatgacgatgtaaccccgcccgacgatagcggcgatgacgatgtgaccccgcccgatgatagcggcgatgacgatgtaaccccgcccgatgatagcggcgatgacgacgacacgcccccagatgactctgttattaccttcagcaacggcgtcaccatcgataaaggcaaagacaccctgaccttcgacagcttcaaactggataacggcagcgttcttgagggtgccgtgtggaattattcagaacaggacaaccagtggcagctcaccaccgcggacggtaaaacgctgaacgtcaccggctgggacgtgaccgacgccaatgccgccgtgattgaaggcacccaggaaaacggtctctactggaagtacgacagccggggctatctgattattgccgacgataacaccaccgttatcagcggcgatgaccaggcgcataattccgatcgcggcatggatatcagcggccaggatcgcaccggcgtgattatttccggcgatagaaccgtcaacacgctcaccggggactccagtgtgaccgacggtgccaccggcatggttatctccggtgacggcaccaccaacaccatttcgggccactccacggtggacaacgccaccggcgcgctgatttccggcaacggcaccaccaccaatttcgccggtgacattgccgtgagcggcggcggcaccgccatcatcatcgacggcgacaacgccacgattaagaataccggtacctctgacatcagcggcgcaggctccaccggcaccgtcattgacggcaataacgcccgcgtcaacaatgacggtgatatgaccatcaccgacggcggcaccggcggccacattaccggcgacaacgtggttatcgataacgccgggagcactaccgtcagcggcgcagacgccacggcgctgtatatcgaaggcgacaacgcgctcgttatcaacgaaggtaatcaaactatctctggcggcgccgtcggtacgcgcattgacggcgacgacgcccataccaccaataccggtgatatcgcggtggatggcgcgggctctgccgccgtgattatcaacggcgacaacggcagcctgacccaggcgggcgatctgctggtcaccgacggcgcgatgggcatcatcacctatggcaccggaaatgaagcaaaaaataccggcaacgccaccgtacgtgatgcggactcggtgggttttgtggttgcaggcgaaaaaaacaccttcaaaaacaaaggggatattgacgtcagccttaacggcaccggcgcgctggtgagcggcgatatgtcgcaggttacgctggatggcgatattaacgttgtctcagtccaggacagcgaaggcgtgtttagctcagcgacaggggtgagcgtgagcggcgacagcaacgccgttgatatcaccggcaacgtaaatatcagcgccgactacgggcaggatgatctggctgccggggctcccccgttaaccggcgttgtcgtcggcggtaacggcaataccgttacccttaatggcgcgctgaatattgatgacaacgatctgtccgccaccggcggacaatacctggacgttgttggcctgagcgtaacaggtgatgataacgacgttgagattgacggcggtattaatatcacccacagcgaggatccacttgatggaacctctgcagacattaccggcatcagcgtcagcggtaacagtaccgttacgctaaacggtcattctaccattgataccaacacggtagtgggggggcacgttgtactggcgcgggtcaacaacggcggctccctgattctgggtgatgactcagttgttgacgttaatgtcagttatatacccacaggctattacacctacaacgcgttgctgatggctgatggcgaaggcacatcaattgaaaataaaggcgatattacaagccatggcgtgtattccgtcattcgcgcagataacggctcggaagtcagcaacagcggagatattctggtctacgcgaccagtagcaacagtagtgaggatcgtgcagccatcacaagggctagtggcgagggatcggctgttcataacaaagccggcggcgatatcaccctcatttctgatcagacgccgcagggcagtggcggtattgaagtatacccattgaaatggtacacccacaccttttacgccatgatggcttcggattatggcgatgtcgttaacgatgagggcgccacgatccatttgcagggggcaggtgtatatggcgttaccgccagccgaggtaaagcactaaacgaaggcaatatctatctggatggccttgtcccgacgctggacgatgaaaataacatcaccagcaccagctactggcagccatcatcgctctatctcaccagctcaggaatggtggcgggttccaccgatgccgatggcgacgccaccgccatcaacaccggcaacattaccgtcaacaacgccgggttcggcatgatggcgcttaatggcggcaccgccattaaccagggcgtgatcaccctgaccgccgatgacggcgtgaccggtcaggcagacgagctggtcgggatggcggcgctcaacggcggcgtcgtcatcaacgacaccagcggcgtgattaacatcgacgccgattacggccaggcgtttctgagcgacagttccagctacatcatcaataacggctctatcaaccttaacggcagcccgatggatgatactgattcacacatgggcggcacgccaacggacaaaatctggattcagtctctgcccggcagcggcgacagcgacaccaggacctccgacacaggtttcttcaccgccggtacgctggccaactacggtactgaaaccctgaacggcgatgtggacgttaacgggggctggctgtacaacgaagcgggcgcctcgctcaccgtcaacggcaccgtgacgattaacggcggggctaacgcgctggctaactacgggacgctggacgcggacgctatttccacctggcacagcctctttaatgaagcggacggcagcatcaccaccgatctgttaacccttaatggcgacgtcactttttacaataacggcgatttcaccggctccatagcgggcaccagctaccagcaggaaatcgtcaatactggcgatatgacggtggcggaagatggcaaatcgctggtcagcggcagcttctatttctataacgaagaggacgctacgcttaccaacagcggcagcgcggtggaaggcggcgagaacaccatcatcaatctgacgcgcgccaacgattcgctgacccaggtgaacagcggcaccatcaccgccactaacggttacagcgccatcaccacggtcaacggcagcaatgaccccaaatggatctggaacaccgcaaccggcgtgattaacggtattaacccggatgcgccgctaatcaatttgggccgcggctataacttcggcaaccagggcactatcaacgtgcagggcgataacgccgtggcgattagcggcggcaccagcagttatgtcattaacctggtcaatagcggcaccatcaacgtcggtaccgagcagggcaaggaggacggcaccaacggcaccgggcttatcggcatcaagggcaacggtaatgccaccaccataaacaacaccgcagacggcgtgatcaacgtttacgcggatgactcgtatgcgtttggcggcaagaccaaagccatcatcaacaacggcgaaatcaacctgctgtgcgacagcggctgcgacatctacgcgccgggtactacgggcacgcagaacgaccataacgggacagcggacatcgtcatcccggatgcgactaccgccccgaccgagggcagcatcccgacgccgccagcggatcccaacgcgccgcagcagctctccaactatattgttggcaccaacgccgacggtagctccggtacgctgaaagccaataacctggtgattggcgacaacgtgaaggtggataccggctttaccagcggtacggcggataccaccgtggtggtggataacgccttcaccggcagcaatatccagggcgcggacaacatcacttccaccagcgtggtgtggaacgcccagggtagccaggatgccgacggcaacgttgacgtcaccatgaccaaaaacgcctatgccgatgtggcgaccgacagctcggtaagcgacgtggcgcaggcgctggacgccggttacaccaacaacgagctgtacaccagccttaatgtggggactaccgccgagctgaacagcgcactcaagcaggtgagcggtgctcaagccaccacggtattccgtgaagcgcgtgtactcagcaaccgctttaccatgctggccgacgccgcgccgcaaattaaagatggtctggcgttcaacgtggtggcgaaaggcgacccacgtgcggagctgggcaacgacacccagtacgacatgctggcattacgccagacgttggatctcaccgccagccagaatctgacgctggagtacggtattgcgcgtctggatggcgacggttcgaaaactgcgggcgataacggcctgacaggcggctacagccagttctttggcctgaagcacagcatggcgtttgatgaaggtctggcgtggaacaacagcctacgctatgacgtgcataacctcgacagcagccgttctgttgcctatggcgatgtcaacaaaattgccgattccgacatgcgtcagcagtaccttgagtttcgcagtgaaggggcgaaaactttcaccatgatgggcgatgcgctgaaagtcacgccgtatgccggggtgaaattccgtcacaccatggaagatggctacaaagagcgcagcgccggagattttaacctgtcgatgaactctggcaacgaaacggcggtagactctattgtcggcctgaagctggattacgccgggaaagacggctggagcgccaccgctaccctggaaggtggcccgaacctgagctacagcaagagccagcgtacagcgtcattacagggtgcggcgggtcaatcgttcggcgtggatgacggtcaaaaaggcggcggcgttaatggtctggcaaccatcggcgtgaaatacagcagcaatgataccgcgctacatctggatgcctaccagtggaaggaagacggtatcagcgataaaggctttatgcttaacgttaagaaaacatttcgttaa

SEQ ID NO: 131536 - protein, 1953 aa, Salmonella typhimurium
MNPMQKKKLISIAIALTLQSYYIPAIAAENNDDEKECPSNISSLPKEKRAKLSPTCLATPENDNHWGWVAGGVAALVAGVAIGVENNGGGDSNHSYTPPKPDNGGDVTPPDDGGNVTPPDDGGNVTPPDDGGDDNVTPPDDSGDDDVAPPDDSGDDDVTPPDDSGDDDVTPPDDSGDGDVTPPDDSGDDDVTPPDDSGDDDVTPPDDSGDDDVTPPDDSGDDDVTPPDDSGDDDVTPPDDSGDDDDTPPDDSVITFSNGVTIDKGKDTLTFDSFKLDNGSVLEGAVWNYSEQDNQWQLTTADGKTLNVTGWDVTDANAAVIEGTQENGLYWKYDSRGYLIIADDNTTVISGDDQAHNSDRGMDISGQDRTGVIISGDRTVNTLTGDSSVTDGATGMVISGDGTTNTISGHSTVDNATGALISGNGTTTNFAGDIAVSGGGTAIIIDGDNATIKNTGTSDISGAGSTGTVIDGNNARVNNDGDMTITDGGTGGHITGDNVVIDNAGSTTVSGADATALYIEGDNALVINEGNQTISGGAVGTRIDGDDAHTTNTGDIAVDGAGSAAVIINGDNGSLTQAGDLLVTDGAMGIITYGTGNEAKNTGNATVRDADSVGFVVAGEKNTFKNKGDIDVSLNGTGALVSGDMSQVTLDGDINVVSVQDSEGVFSSATGVSVSGDSNAVDITGNVNISADYGQDDLAAGAPPLTGVVVGGNGNTVTLNGALNIDDNDLSATGGQYLDVVGLSVTGDDNDVEIDGGINITHSEDPLDGTSADITGISVSGNSTVTLNGHSTIDTNTVVGGHVVLARVNNGGSLILGDDSVVDVNVSYIPTGYYTYNALLMADGEGTSIENKGDITSHGVYSVIRADNGSEVSNSGDILVYATSSNSSEDRAAITRASGEGSAVHNKAGGDITLISDQTPQGSGGIEVYPLKWYTHTFYAMMASDYGDVVNDEGATIHLQGAGVYGVTASRGKALNEGNIYLDGLVPTLDDENNITSTSYWQPSSLYLTSSGMVAGSTDADGDATAINTGNITVNNAGFGMMALNGGTAINQGVITLTADDGVTGQADELVGMAALNGGVVINDTSGVINIDADYGQAFLSDSSSYIINNGSINLNGSPMDDTDSHMGGTPTDKIWIQSLPGSGDSDTRTSDTGFFTAGTLANYGTETLNGDVDVNGGWLYNEAGASLTVNGTVTINGGANALANYGTLDADAISTWHSLFNEADGSITTDLLTLNGDVTFYNNGDFTGSIAGTSYQQEIVNTGDMTVAEDGKSLVSGSFYFYNEEDATLTNSGSAVEGGENTIINLTRANDSLTQVNSGTITATNGYSAITTVNGSNDPKWIWNTATGVINGINPDAPLINLGRGYNFGNQGTINVQGDNAVAISGGTSSYVINLVNSGTINVGTEQGKEDGTNGTGLIGIKGNGNATTINNTADGVINVYADDSYAFGGKTKAIINNGEINLLCDSGCDIYAPGTTGTQNDHNGTADIVIPDATTAPTEGSIPTPPADPNAPQQLSNYIVGTNADGSSGTLKANNLVIGDNVKVDTGFTSGTADTTVVVDNAFTGSNIQGADNITSTSVVWNAQGSQDADGNVDVTMTKNAYADVATDSSVSDVAQALDAGYTNNELYTSLNVGTTAELNSALKQVSGAQATTVFREARVLSNRFTMLADAAPQIKDGLAFNVVAKGDPRAELGNDTQYDMLALRQTLDLTASQNLTLEYGIARLDGDGSKTAGDNGLTGGYSQFFGLKHSMAFDEGLAWNNSLRYDVHNLDSSRSVAYGDVNKIADSDMRQQYLEFRSEGAKTFTMMGDALKVTPYAGVKFRHTMEDGYKERSAGDFNLSMNSGNETAVDSIVGLKLDYAGKDGWSATATLEGGPNLSYSKSQRTASLQGAAGQSFGVDDGQKGGGVNGLATIGVKYSSNDTALHLDAYQWKEDGISDKGFMLNVKKTFR

SEQ ID NO: 131537 - DNA, 25 bp, Artificial sequence
  primer
atgcaaaggaaaactctattgtcgg

SEQ ID NO: 131538 - DNA, 24 bp, Artificial sequence
  primer
ttaagtgataacagatgtctggaa

SEQ ID NO: 131539 - DNA, 249 bp, ESCHERICHIA COLI
  CDS (1)..(249): transl_table=11
atgggcattctgtcatggattatttttgggcttattgccggtattctggcgaagtggatcatgccaggtaaagatggaggtggattctttatgactatcctgctggggatagtcggtgccgtagtcggcggatggatcagcacgctgtttggctttggtaaagtcgatggcttcaattttggcagcttcgtggttgccgttattggtgcgattgtcgtgctatttatctacaggaagattaaaagttaa

SEQ ID NO: 131540 - protein, 82 aa, ESCHERICHIA COLI
MGILSWIIFGLIAGILAKWIMPGKDGGGFFMTILLGIVGAVVGGWISTLFGFGKVDGFNFGSFVVAVIGAIVVLFIYRKIKS

SEQ ID NO: 131541 - DNA, 258 bp, Mesorhizobium loti MAFF303099
  CDS (1)..(258): transl_table=11
atgggtatcatcagctggatcattctcggcgccatcgccggcttcctgggcagcaagatcgtcaacaagaccggccaaggcctaatcatggatatcgtgctcggcattgtcggcgccattgtcggcggcgtgatttgcagccgactctttggcgtgggtgtcaccggtctcaacatctccagcctgatcgtcgcggtggttggcgcgatagtcgtgctgtgggcctaccatcaattcagcggaaggcggacgctttag

SEQ ID NO: 131542 - protein, 85 aa, Mesorhizobium loti MAFF303099
MGIISWIILGAIAGFLGSKIVNKTGQGLIMDIVLGIVGAIVGGVICSRLFGVGVTGLNISSLIVAVVGAIVVLWAYHQFSGRRTL

SEQ ID NO: 131543 - DNA, 258 bp, Mesorhizobium loti MAFF303099
  CDS (1)..(258): transl_table=11
atgtcaatcatcagttggatcatccttggggttatcgctggcttcctgggcagcaagatagtcaacaagaccggtcaaggtattctactggatatcgcgctcggtatcgtcggcgccattgttggcggcctcattttcagcgcgtttggcgcttcgggcgttaccggcctcaacatctacagcttggtggttgcggtaatcggagcggttattgtgctttgggcctatcaccagatcactggcaaccgagcaccctag

SEQ ID NO: 131544 - protein, 85 aa, Mesorhizobium loti MAFF303099
MSIISWIILGVIAGFLGSKIVNKTGQGILLDIALGIVGAIVGGLIFSAFGASGVTGLNIYSLVVAVIGAVIVLWAYHQITGNRAP

SEQ ID NO: 131545 - DNA, 258 bp, Mesorhizobium loti MAFF303099
  CDS (1)..(258): transl_table=11
atgtcaatcatcagttggatcatccttggggttatcgctggcttcctgggcagcaagatagtcaacaagaccggtcaaggtattctcctcgacatcgtgctcggtgtcgtcggtgccattgtcggcggactcattttcagcgcgtttggcgcttcgggcgttaccggcctcaatatatacagcttggtggttgcggtcattggagccgttattgtgctgtgggcgtatcaccagatgactgccaaccgagcaccttag

SEQ ID NO: 131546 - protein, 85 aa, Mesorhizobium loti MAFF303099
MSIISWIILGVIAGFLGSKIVNKTGQGILLDIVLGVVGAIVGGLIFSAFGASGVTGLNIYSLVVAVIGAVIVLWAYHQMTANRAP

SEQ ID NO: 131547 - DNA, 255 bp, Escherichia coli O157:H7 EDL933
  CDS (1)..(255): transl_table=11
atgggaattattgcctggattatttttggcctgatagccggcattatcgccaagctaatcatgccggggcgtgatggtggtggatttttcctgacctgtattctcgggatagtcggtgcggtggtcggcggctggctggcgaccatgtttggcattggcggctccattagtggttttaatctgcacagcttcctggtggcggtggtgggcgctatcctggtgctgggcgtattccgcctcctgcgaagagaataa

SEQ ID NO: 131548 - protein, 84 aa, Escherichia coli O157:H7 EDL933
MGIIAWIIFGLIAGIIAKLIMPGRDGGGFFLTCILGIVGAVVGGWLATMFGIGGSISGFNLHSFLVAVVGAILVLGVFRLLRRE

SEQ ID NO: 131549 - DNA, 255 bp, Agrobacterium tumefaciens str. C58
  CDS (1)..(255): transl_table=11
atggaatctgctggcattggctggattgcagctatcatcatcggtggggtcgccgggtggctcgccgaacaattcatgaaaagcaatatgggtgttttcatgaacatccttcttggaatcgtcggcgcgatcgtcgccaacgccattcttgcagtatttggaatcgttttgaccggctggctcggttatctcattgccggcttcgtcggcgcctgcatcctcatcgccatcggcagagctttcagacgcgggtga

SEQ ID NO: 131550 - protein, 84 aa, Agrobacterium tumefaciens str. C58
MESAGIGWIAAIIIGGVAGWLAEQFMKSNMGVFMNILLGIVGAIVANAILAVFGIVLTGWLGYLIAGFVGACILIAIGRAFRRG

SEQ ID NO: 131551 - DNA, 252 bp, Agrobacterium tumefaciens str. C58
  CDS (1)..(252): transl_table=11
atggaagacgcacaagttggctggattgcagcaatcatcatcggcggcgtagccggttggctcgccgaacagttcatgaaaagcaatatgggtgttttcatgaacatcatcctcggcattatcggggccatcgtcgccaatttccttctggggctcatcggcgtctcgctcggaggctggattggctatctcatcgcaggtttcatcggcgcctgcattctcatcgccgtcgggcgcgcatttcgcagataa

SEQ ID NO: 131552 - protein, 83 aa, Agrobacterium tumefaciens str. C58
MEDAQVGWIAAIIIGGVAGWLAEQFMKSNMGVFMNIILGIIGAIVANFLLGLIGVSLGGWIGYLIAGFIGACILIAVGRAFRR

SEQ ID NO: 131553 - DNA, 324 bp, Yersinia pestis CO92
  CDS (1)..(324): transl_table=11
ttgaatcaaccgatatggtggtttagaacatatggggtaagcggaacagtaatcattaattttatggaggcgctcatgggcatactatcttggattatttttggccttatagccggtattttggcgaagtggattatgcctggtgaggatgggggtggatttatcatgaccatcatcttgggtattattggtgcattggtcgggggttatatcagcactttctttggaatgggaagagttgacggatttaatctgggcagctttgtagtggcagtaatcggctcactggttgttctgtttatttatcggaagttaagaagctag

SEQ ID NO: 131554 - protein, 107 aa, Yersinia pestis CO92
MNQPIWWFRTYGVSGTVIINFMEALMGILSWIIFGLIAGILAKWIMPGEDGGGFIMTIILGIIGALVGGYISTFFGMGRVDGFNLGSFVVAVIGSLVVLFIYRKLRS

SEQ ID NO: 131555 - DNA, 306 bp, Caulobacter crescentus CB15
  CDS (1)..(306): transl_table=11
ttgattgggcaagggtcgcgcagggcgaccgctcacggagtccccaccatgtctattctcgcctggctgcttatgggcctgatcgccggcttcatcgccagcaagctcgtcaaccgcaacggtggcggcgtgctgctggatatcgcccttggcgtcgtcggcgcgtttgtcggcggctggctgttcagccagttcggcaacgccggcgtctcgggcttcaatctctacagcctgctggtcgccacgatcggcgccgtggtgatcctggcgctgtatcatctggtcttcggccgacgcgcgctttag

SEQ ID NO: 131556 - protein, 101 aa, Caulobacter crescentus CB15
MIGQGSRRATAHGVPTMSILAWLLMGLIAGFIASKLVNRNGGGVLLDIALGVVGAFVGGWLFSQFGNAGVSGFNLYSLLVATIGAVVILALYHLVFGRRAL

SEQ ID NO: 131557 - DNA, 255 bp, Salmonella enterica subsp. enterica serovar Typhi str. CT18
  CDS (1)..(255): transl_table=11
atgggaattatcgcctggattgtttttggtttgattgccggcgttatcgccaaattgcttatgccggggcgcgatggcgggggatttatcctgacctgtattctcggtatcgtcggggcggtcgttggcggatggctggcgacgatgtttggtattggcggcagtatcagcggctttaatctgcacagtttcctggtcgccgtggtgggcgcgattgtggtgctggtgattttccgccttctgcgacgcggctaa

SEQ ID NO: 131558 - protein, 84 aa, Salmonella enterica subsp. enterica serovar Typhi str. CT18
MGIIAWIVFGLIAGVIAKLLMPGRDGGGFILTCILGIVGAVVGGWLATMFGIGGSISGFNLHSFLVAVVGAIVVLVIFRLLRRG

SEQ ID NO: 131559 - DNA, 276 bp, Nostoc sp. PCC 7120
  CDS (1)..(276): transl_table=11
atgaacattatcgcctggattattcttggtctcatcgctggagctatagccaaagctatttaccccggtcgtcaaggtggtggtattttgggaactatgatcttaggtattattggcgctttaatcggtggtacaattgttaccctgctagatacgggaacactacaatttaccgcagctagccttagtatttctgggataatcgtggcgattattggagccatagtagctatctttttgtggaatctaatcactggaagctccagaagctattag

SEQ ID NO: 131560 - protein, 91 aa, Nostoc sp. PCC 7120
MNIIAWIILGLIAGAIAKAIYPGRQGGGILGTMILGIIGALIGGTIVTLLDTGTLQFTAASLSISGIIVAIIGAIVAIFLWNLITGSSRSY

SEQ ID NO: 131561 - DNA, 261 bp, Brucella melitensis 16M
  CDS (1)..(261): transl_table=11
atgtctgttataagctggataatactaggcttgatcgccggcttcatcggcagcaagattgtcaataaaagtggccagggcatgtttttcgacatcgcgcttggcgtcgtcggcgccatcatcggcggcgttattttcaccttcttcggcgcacagggcgttaccggcctcaatatctacagcctgatcgtttcggtcatcggtgccgtcatcgtgctgtggatttatcacgccgttacgggcaaacgctccatgggctga

SEQ ID NO: 131562 - protein, 86 aa, Brucella melitensis 16M
MSVISWIILGLIAGFIGSKIVNKSGQGMFFDIALGVVGAIIGGVIFTFFGAQGVTGLNIYSLIVSVIGAVIVLWIYHAVTGKRSMG

SEQ ID NO: 131563 - DNA, 267 bp, Streptomyces coelicolor A3(2)
  CDS (1)..(267): transl_table=11
atgaccgtcatcagctggatcatcctcggactgctggccggagccatcgccaagttcctgctgccgggccgcgaccccggagggctcatcggcaccaccctcatcggcatcgcgggcgccttcctcggcggctggatatcggcccgctggatggaccacccgatcagcaaggacttctacgacggcgccacctgggcggcggcgatcggcggttcgctggtgctcctggtcgcctaccggctcctgttcggcaactcgcgcgactga

SEQ ID NO: 131564 - protein, 88 aa, Streptomyces coelicolor A3(2)
MTVISWIILGLLAGAIAKFLLPGRDPGGLIGTTLIGIAGAFLGGWISARWMDHPISKDFYDGATWAAAIGGSLVLLVAYRLLFGNSRD

SEQ ID NO: 131565 - DNA, 288 bp, Shigella flexneri 2a str. 301
  CDS (1)..(288): transl_table=11
ttgcgaccgattcatcgaaacgagggcctgaacatgggaattattgcctggattatttttggcctgatagccggcattatcggcaagctaatcatgccggggcgtgatggtggtggatttttcctgacctgtattctcgggatagtcggtgcggtggtcggcggctggctggcgaccatgtttggcattgacggctccatcagcggttttaatttgcacagcttcctggtggcggtggtgggcgctatcctggtgctgggcgtattccgcctcctgcgaagagaataa

SEQ ID NO: 131566 - protein, 95 aa, Shigella flexneri 2a str. 301
MRPIHRNEGLNMGIIAWIIFGLIAGIIGKLIMPGRDGGGFFLTCILGIVGAVVGGWLATMFGIDGSISGFNLHSFLVAVVGAILVLGVFRLLRRE

SEQ ID NO: 131567 - DNA, 264 bp, Bradyrhizobium japonicum USDA 110
  CDS (1)..(264): transl_table=11
atgggcatcatctggacgatcatcatcggtttcatcgcaggagtcatcgcgaaattcatcacgcccggcggcaacgagccgactggtttcgttctgaccacgatccttggaatcgtgggagcgttcgtggcgacctatctcggtcaggggctcggctggtatcggcctggcgaaggagcggggctggtcggcgccgtcatcggcgcgatcatcgtacttttcgtctatgggctgatggcgggcaggagcggccgggctatctag

SEQ ID NO: 131568 - protein, 87 aa, Bradyrhizobium japonicum USDA 110
MGIIWTIIIGFIAGVIAKFITPGGNEPTGFVLTTILGIVGAFVATYLGQGLGWYRPGEGAGLVGAVIGAIIVLFVYGLMAGRSGRAI

SEQ ID NO: 131569 - DNA, 249 bp, Vibrio parahaemolyticus RIMD 2210633
  CDS (1)..(249): transl_table=11
atgggtatcatttcttggattattttgggcttgatcgccggagccttagcgaaatggttgatgccaggaaaagatggtggaggctggatcgcaaccatgttgctcgggattgccggtgcctttgttggtggtttccttggcggcattcttggatttggtggcgcgacaggtgtaaacatcggcagcatcattaccgcaacgctgggcgcgtttattctgctgtttgtttacaatcgcttcttgagatga

SEQ ID NO: 131570 - protein, 82 aa, Vibrio parahaemolyticus RIMD 2210633
MGIISWIILGLIAGALAKWLMPGKDGGGWIATMLLGIAGAFVGGFLGGILGFGGATGVNIGSIITATLGAFILLFVYNRFLR

SEQ ID NO: 131571 - DNA, 246 bp, Bacteroides thetaiotaomicron VPI-5482
  CDS (1)..(246): transl_table=11
atgggctttatttggtatattattattggtattatagccggctttcttgcaggtaagataatgcgtggcggaggttttggccttattataaatttgttacttggtattctcggaggagtgctgggcggttgggtatttgcccttttcggacttgcggcttcgggattgattggaagtttgataacttctaccgtaggagctattctggtattatggattgcttctttattctcgaaatctaaataa

SEQ ID NO: 131572 - protein, 81 aa, Bacteroides thetaiotaomicron VPI-5482
MGFIWYIIIGIIAGFLAGKIMRGGGFGLIINLLLGILGGVLGGWVFALFGLAASGLIGSLITSTVGAILVLWIASLFSKSK

SEQ ID NO: 131573 - DNA, 255 bp, Shigella flexneri 2a str. 2457T
  CDS (1)..(255): transl_table=11
atgggaattattgcctggattatttttggcctgatagccggcattatcggcaagctaatcatgccggggcgtgatggtggtggatttttcctgacctgtattctcgggatagtcggtgcggtggtcggcggctggctggcgaccatgtttggcattgacggctccatcagcggttttaatttgcacagcttcctggtggcggtggtgggcgctatcctggtgctgggcgtattccgcctcctgcgaagagaataa

SEQ ID NO: 131574 - protein, 84 aa, Shigella flexneri 2a str. 2457T
MGIIAWIIFGLIAGIIGKLIMPGRDGGGFFLTCILGIVGAVVGGWLATMFGIDGSISGFNLHSFLVAVVGAILVLGVFRLLRRE

SEQ ID NO: 131575 - DNA, 246 bp, Bdellovibrio bacteriovorus HD100
  CDS (1)..(246): transl_table=11
atgggcatcatctggaccatcatcatcggttttgtcgtgggcttaattgcgaaattcctgatgccgggcaaagatggcggcggattcattatgaccactcttctgggaatcataggctcggtggtgggaacctatgttggaagtgctttgggctggtacgaagtgggtgaaggggctggttttatcgcgtcggttctgggagcgatgattgtgctgttcctggcccgcatgctgaccaaacgctag

SEQ ID NO: 131576 - protein, 81 aa, Bdellovibrio bacteriovorus HD100
MGIIWTIIIGFVVGLIAKFLMPGKDGGGFIMTTLLGIIGSVVGTYVGSALGWYEVGEGAGFIASVLGAMIVLFLARMLTKR

SEQ ID NO: 131577 - DNA, 264 bp, Saccharopolyspora erythraea NRRL 2338
  CDS (1)..(264): transl_table=11
atgggaatcgtcagctggatcgtgctgggactgatcgcgggagccatcgcgaagctgctcatgccgggcaaggacccgggcggctgcatcatcaccatcctgctcggcatcgcgggcgcgttcgtgggcggctgggtcggcaagaccctcttccacgtccagctcggcaagttcttcgacgcccgcacctggggtctggcgatcctcggctcgctgatcctgctcatcggctaccggctgctcttcggcgcccggcgcgactga

SEQ ID NO: 131578 - protein, 87 aa, Saccharopolyspora erythraea NRRL 2338
MGIVSWIVLGLIAGAIAKLLMPGKDPGGCIITILLGIAGAFVGGWVGKTLFHVQLGKFFDARTWGLAILGSLILLIGYRLLFGARRD

SEQ ID NO: 131579 - DNA, 261 bp, Saccharopolyspora erythraea NRRL 2338
  CDS (1)..(261): transl_table=11
atgggcatcctgagttggattgttttcgggctgatcgccggcgcgatcgccaagttcatcatgccgggaaaggatccgggcgggatcatcgtgacgatcatcatcggtgtgctcggcggactgctcggcggctggctgggatcggccgtgagcggcggaggtgtgtcgggcttcaacgtgatgagcttcgtgtgggcggtcgtcggatcgctgatcctgctcatcatctaccggctgatcttccaccgggcgcgggcgtag

SEQ ID NO: 131580 - protein, 86 aa, Saccharopolyspora erythraea NRRL 2338
MGILSWIVFGLIAGAIAKFIMPGKDPGGIIVTIIIGVLGGLLGGWLGSAVSGGGVSGFNVMSFVWAVVGSLILLIIYRLIFHRARA

SEQ ID NO: 131581 - DNA, 252 bp, Pseudomonas stutzeri A1501
  CDS (1)..(252): transl_table=11
atgggcatcatcggcaccatcatcatcggcctgatcgtcggcctcatcgcgcgcttcctgaagcctggcgacgacagcatgggctggatcatgaccatcctgctgggtatcggcggctcgctgctggcgacctacggcggccaggcgctcggcctgtaccaggccggcgagggcgcaggctttatcggcgccgtggtcggtgcgatcatcctgctggtgatctacggcatggtcaccagccgcaagcactga

SEQ ID NO: 131582 - protein, 83 aa, Pseudomonas stutzeri A1501
MGIIGTIIIGLIVGLIARFLKPGDDSMGWIMTILLGIGGSLLATYGGQALGLYQAGEGAGFIGAVVGAIILLVIYGMVTSRKH

SEQ ID NO: 131583 - DNA, 249 bp, Enterobacter sp. 638
  CDS (1)..(249): transl_table=11
atgggaattttatcctggattatttttggtcttattgcggggattctggcgaagtggatcatgccgggcaaagacggcggtgggttcttcgtcaccgtaattctgggtgtcattggtgccgtggtcggtggctggatcagcaccttgttcggttttggtaaggtcgatggcttcaacttcggcagctttgccgtcgcagtcattggtgcgttggtcgttctgtttatctacagaaaaatcaaaagctaa

SEQ ID NO: 131584 - protein, 82 aa, Enterobacter sp. 638
MGILSWIIFGLIAGILAKWIMPGKDGGGFFVTVILGVIGAVVGGWISTLFGFGKVDGFNFGSFAVAVIGALVVLFIYRKIKS

SEQ ID NO: 131585 - DNA, 255 bp, Enterobacter sp. 638
  CDS (1)..(255): transl_table=11
atgggtatcatcgcgtggattgtgtttggtctgattgccggtattatcgcaaaattcatcatgcctgggcgtgatggcggcggctttatcctgacctgtgtgctgggtgtgattggtgcagttgtgggaggctggctggcgacaatgtttggcgtcggcggcagcgtgagtggtttcaatttgcacagtttcctggtggctgtcgtgggtgctatcgtcgttctggcgatattccggttactcaggcgtgcgtaa

SEQ ID NO: 131586 - protein, 84 aa, Enterobacter sp. 638
MGIIAWIVFGLIAGIIAKFIMPGRDGGGFILTCVLGVIGAVVGGWLATMFGVGGSVSGFNLHSFLVAVVGAIVVLAIFRLLRRA

SEQ ID NO: 131587 - DNA, 261 bp, Clavibacter michiganensis subsp. michiganensis NCPPB 382
  CDS (1)..(261): transl_table=11
atgggcatcatcggttttctggttctgggtctgatcgccggagcgctcgccaagctgatcctcccgggcaagcagggtggcggaatcatcgtcacgctgatcctgggcgtcgtcggggccttcctcggcggcttcatcggcagcgcgctcttcaacaagggcgtcgacagcttcgacctcggctcgctcgcgctcgccatcgtcggcgcgatcatcgtcctgctggtctacggcgcgatcgtcggccgcaagaaggcctag

SEQ ID NO: 131588 - protein, 86 aa, Clavibacter michiganensis subsp. michiganensis NCPPB 382
MGIIGFLVLGLIAGALAKLILPGKQGGGIIVTLILGVVGAFLGGFIGSALFNKGVDSFDLGSLALAIVGAIIVLLVYGAIVGRKKA

SEQ ID NO: 131589 - DNA, 255 bp, Acidiphilium cryptum JF-5
  CDS (1)..(255): transl_table=11
atgcacctgataggttttatcattcttggcctgatcgcgggctggatcgccagccagatcgtcgataacggcggcaagggaccgatcctcgatatcgtactcggcatcgtcggcgcgctagtcggcggccagattttccttgcgcttggcttcgcgcccggtggcggctttctctacagcctgttcgtctcggtcgtcggcgcggtgatcatactcgttgcctatcatgccctgctcggtcgtcgccgattgtaa

SEQ ID NO: 131590 - protein, 84 aa, Acidiphilium cryptum JF-5
MHLIGFIILGLIAGWIASQIVDNGGKGPILDIVLGIVGALVGGQIFLALGFAPGGGFLYSLFVSVVGAVIILVAYHALLGRRRL

SEQ ID NO: 131591 - DNA, 246 bp, Pseudomonas putida F1
  CDS (1)..(246): transl_table=11
atgggtatcattggaaccatcttcatcggcctcatcgtcggcctgctggcccgcttcatcaaaccgggcgatgacagcatgggctggatcatgaccatcctgctgggtattgccggctccttgttggctacctatggcggccaggcgctgggtatataccaggccgggcaagcggcgggcttccttggcgcgctgatcggtgccgtggtgctgctggtgatctacggattcatcaagaaacgctga

SEQ ID NO: 131592 - protein, 81 aa, Pseudomonas putida F1
MGIIGTIFIGLIVGLLARFIKPGDDSMGWIMTILLGIAGSLLATYGGQALGIYQAGQAAGFLGALIGAVVLLVIYGFIKKR

SEQ ID NO: 131593 - DNA, 249 bp, Klebsiella pneumoniae subsp. pneumoniae MGH 78578
  CDS (1)..(249): transl_table=11
atgggtattctttcctggatcatttttggacttattgccggtattttagccaagtggattatgccggggaaagacggcggcgggtttattgtgaccgttattctggggatcatcggcgccgtggttggcggctggatcagtaccctgtttggttttggcaaggtcgacgggtttaatttcggcagctttgtggtcgcggtaatcggcgcgctggtcgtgctgtttatctaccggaaagtgcgcagttaa

SEQ ID NO: 131594 - protein, 82 aa, Klebsiella pneumoniae subsp. pneumoniae MGH 78578
MGILSWIIFGLIAGILAKWIMPGKDGGGFIVTVILGIIGAVVGGWISTLFGFGKVDGFNFGSFVVAVIGALVVLFIYRKVRS

SEQ ID NO: 131595 - DNA, 264 bp, Ochrobactrum anthropi ATCC 49188
  CDS (1)..(264): transl_table=11
atgtctgttataagctggataatactaggcttgattgccggcttcatcggcagcaagatcgttaataaaagtggccagggcctgttcctggatattgctctcggcattgtcggcgccattgtcggcggtgtgatctcgtctcagctttttggacgtggcgtcactggcgcattcgatccgatcagccttgttatcgcgatcatcggctcaataatcgtgttgtgggtataccacgcaattaccggcaagcgttccatcggctga

SEQ ID NO: 131596 - protein, 87 aa, Ochrobactrum anthropi ATCC 49188
MSVISWIILGLIAGFIGSKIVNKSGQGLFLDIALGIVGAIVGGVISSQLFGRGVTGAFDPISLVIAIIGSIIVLWVYHAITGKRSIG

SEQ ID NO: 131597 - DNA, 255 bp, Cronobacter sakazakii ATCC BAA-894
  CDS (1)..(255): transl_table=11
atgggtattttgtcctggatcgtatttggccttatcgcgggtattattgccaaactgattatgccgggccgtgacggcggcggctttattctgacctgtgtgctcgggatcgtgggtgcggtggtcggcggctggctggcgacattctttggcgtgggcggtagcgtgacgggctttaacctgccgagcttcctggtggcggtcgtcggtgccattgtggtgctgctgatcttccgtatgctgcgcagggattaa

SEQ ID NO: 131598 - protein, 84 aa, Cronobacter sakazakii ATCC BAA-894
MGILSWIVFGLIAGIIAKLIMPGRDGGGFILTCVLGIVGAVVGGWLATFFGVGGSVTGFNLPSFLVAVVGAIVVLLIFRMLRRD

SEQ ID NO: 131599 - DNA, 255 bp, Citrobacter koseri ATCC BAA-895
  CDS (1)..(255): transl_table=11
atgggaattattgcctggattatttttggtctgattgcaggtgttatcgctaagctgattatgccgggtcgcgatggcggtggttttatactgacctgtattctcggtatcgttggtgcggttgtcggcggctggctggcaaccatgtttggtatcggcggcagcatcagcgggttcaatcttcacagtttcctggtggccgtcgtcggggcgattgttgtgctcggcgtttttcgccttctgcggcgcaattaa

SEQ ID NO: 131600 - protein, 84 aa, Citrobacter koseri ATCC BAA-895
MGIIAWIIFGLIAGVIAKLIMPGRDGGGFILTCILGIVGAVVGGWLATMFGIGGSISGFNLHSFLVAVVGAIVVLGVFRLLRRN

SEQ ID NO: 131601 - DNA, 249 bp, Citrobacter koseri ATCC BAA-895
  CDS (1)..(249): transl_table=11
atgggcattatttcatggattatctttgggcttattgcaggtattctggcgaagtggattatgcctggtaaggatggcggcgggttcttcatgacgatcatcctggggatcgtcggtgccgtggtagggggatggatcagcacgttcttcgggtttggcaaagttgacggcttcaactttggcagctttgccgtagcggttatcggcgcgattgtcgttctgtttatctacagaaaaatcaaaagttaa

SEQ ID NO: 131602 - protein, 82 aa, Citrobacter koseri ATCC BAA-895
MGIISWIIFGLIAGILAKWIMPGKDGGGFFMTIILGIVGAVVGGWISTFFGFGKVDGFNFGSFAVAVIGAIVVLFIYRKIKS

SEQ ID NO: 131603 - DNA, 255 bp, Escherichia coli E24377A
  CDS (1)..(255): transl_table=11
atgggaattattgcctggattatttttggcctgatagccggcattatcgccaagctaatcatgccggggcgtgatggtggtggatttttcctgacctgtattctcgggatagtcggtgcggtggtcggcggctggctggcgaccatgtttggcattggcggctccatcagtggttttaatctgcacagcttcctggtggcggtggtgggagctattctcgttctgggcatattccgcctcctgcgaagagaataa

SEQ ID NO: 131604 - protein, 84 aa, Escherichia coli E24377A
MGIIAWIIFGLIAGIIAKLIMPGRDGGGFFLTCILGIVGAVVGGWLATMFGIGGSISGFNLHSFLVAVVGAILVLGIFRLLRRE

SEQ ID NO: 131605 - DNA, 249 bp, Serratia proteamaculans 568
  CDS (1)..(249): transl_table=11
atgggaattatttcctggatcatcttcggcctgatcgccggtattttagccaagtggatcatgccgggcaaagacggtggcggttttatcctgaccatagtgttgggtattgtcggcgccgtggttgggggctatatcagcaccttctttggctacggcagagtggacggtttcaacttcggcagcttcgtggtggcagtgattggtgccatcgtggtgctgtttgtttaccgtaaaatccgcagctaa

SEQ ID NO: 131606 - protein, 82 aa, Serratia proteamaculans 568
MGIISWIIFGLIAGILAKWIMPGKDGGGFILTIVLGIVGAVVGGYISTFFGYGRVDGFNFGSFVVAVIGAIVVLFVYRKIRS

SEQ ID NO: 131607 - DNA, 255 bp, Salmonella enterica subsp. arizonae serovar 62:z4,z23:--
  CDS (1)..(255): transl_table=11
atgggaattatcgcctggattgtttttggtttgatcgccggcgttatcgccaaattgcttatgccggggcgtgatggcgggggatttatcctgacctgtattctcggtatcgtgggggcggtcgtgggcggatggctggcgacgatgtttggtatcggcggcagtatcagcggctttaatctgcatagtttcctggtcgctgtcgtgggtgctattgtggtgctggtgattttccgctttctgcgacgcaactaa

SEQ ID NO: 131608 - protein, 84 aa, Salmonella enterica subsp. arizonae serovar 62:z4,z23:--
MGIIAWIVFGLIAGVIAKLLMPGRDGGGFILTCILGIVGAVVGGWLATMFGIGGSISGFNLHSFLVAVVGAIVVLVIFRFLRRN

SEQ ID NO: 131609 - DNA, 249 bp, Salmonella enterica subsp. arizonae serovar 62:z4,z23:--
  CDS (1)..(249): transl_table=11
atgggtattctttcatggattatttttgggcttattgcgggtattttagctaaatggatcatgccgggtaaagatggcggtggattctttatgactatcattctggggatcgtcggtgcggtagtcggagggtggatcagtacgctctttggcttcggtaaagtggatggtttcaacttcggcagctttgcagtcgcagtgatcggcgcgattgtcgtgttgttaatctacagaaaaattaaaagctaa

SEQ ID NO: 131610 - protein, 82 aa, Salmonella enterica subsp. arizonae serovar 62:z4,z23:--
MGILSWIIFGLIAGILAKWIMPGKDGGGFFMTIILGIVGAVVGGWISTLFGFGKVDGFNFGSFAVAVIGAIVVLLIYRKIKS

SEQ ID NO: 131611 - DNA, 261 bp, Brucella canis ATCC 23365
  CDS (1)..(261): transl_table=11
atgtctgttataagctggataatactaggcttgatcgccggcttcatcggcagcaagattgtcaataaaagtggccagggcatgtttctcgacatcgcgcttggcgtcgtcggcgccatcatcggcggcgttattttcaccttcttcagcgcacagggcgttaccggcctcaatatctacagcctgatcgtttcggtcatcggtgccgtcatcgtgctgtggatttatcatgccgttacgggcaaacgctccataggctga

SEQ ID NO: 131612 - protein, 86 aa, Brucella canis ATCC 23365
MSVISWIILGLIAGFIGSKIVNKSGQGMFLDIALGVVGAIIGGVIFTFFSAQGVTGLNIYSLIVSVIGAVIVLWIYHAVTGKRSIG

SEQ ID NO: 131613 - DNA, 264 bp, Sorangium cellulosum 'So ce 56'
  CDS (1)..(264): transl_table=11
atgtccgtgctgttgtggatcctgtttggcctcatcgtcggcatcatcgccaagctgctgacccctggccgcgacccgggcggcttcgtggtcacggcgctgctgggcgtggccggctccttgctcggcggcttcatcggccgggcgctggggctctatccgtcgtatcagtcgagcggcggcttcttcacgtcgatcctgggcgccatcatcctcctcgccatctacaacgcgacgatcggccggcgaacgacgaggccctga

SEQ ID NO: 131614 - protein, 87 aa, Sorangium cellulosum 'So ce 56'
MSVLLWILFGLIVGIIAKLLTPGRDPGGFVVTALLGVAGSLLGGFIGRALGLYPSYQSSGGFFTSILGAIILLAIYNATIGRRTTRP

SEQ ID NO: 131615 - DNA, 267 bp, Methylobacterium extorquens PA1
  CDS (1)..(267): transl_table=11
atggaaattctctggaccatcatcatcggtttcgtggccggcatcatcgccaagttcatcatgcccggtgacaaggagccgtccggcttcatcctgacgacgatcctcggcatcgtcggcgccttcgtcgcgaccttcatcggtcaggcggtcggctggtacgggcccaacgagggggcgcgcttcatcggctccatcgtcggcgcctgcgtggtgctggcgatctacggcttcatcgccggccggaccagcagccgctcgctctga

SEQ ID NO: 131616 - protein, 88 aa, Methylobacterium extorquens PA1
MEILWTIIIGFVAGIIAKFIMPGDKEPSGFILTTILGIVGAFVATFIGQAVGWYGPNEGARFIGSIVGACVVLAIYGFIAGRTSSRSL

SEQ ID NO: 131617 - DNA, 246 bp, Pseudomonas putida GB-1
  CDS (1)..(246): transl_table=11
atgggcatcattggaaccatcttcatcggcctcatcgtcggcctgctggcccgcttcatcaagccgggcgacgacagcatgggctggatcatgaccatcctgctgggtattgccggctccctgttggccacctatggcggccaggcgctgggcatttaccaggctgggcaggcagcaggcttccttggcgccttgattggtgcggtcatccttctggtgatctacggattcatcaagaaacgctga

SEQ ID NO: 131618 - protein, 81 aa, Pseudomonas putida GB-1
MGIIGTIFIGLIVGLLARFIKPGDDSMGWIMTILLGIAGSLLATYGGQALGIYQAGQAAGFLGALIGAVILLVIYGFIKKR

SEQ ID NO: 131619 - DNA, 258 bp, Caulobacter sp. K31
  CDS (1)..(258): transl_table=11
atgtctattcttgcgtgggtcgtgctcggcctcgtcgccggcttcatcgccagcaagcttgtcagtcgcagcggcggcagcttggtggtcgacttggtgctggggatcgtcggcgccgtggtcggcggcttcttgttcaatcagttcggctcggccggcgtcaccggtctgaacctctacagcctgctggtcgccgtgatcggcgcggtcgtcgtgctggcgatctaccatgcgttcacgggccgtcgagcgctgtag

SEQ ID NO: 131620 - protein, 85 aa, Caulobacter sp. K31
MSILAWVVLGLVAGFIASKLVSRSGGSLVVDLVLGIVGAVVGGFLFNQFGSAGVTGLNLYSLLVAVIGAVVVLAIYHAFTGRRAL

SEQ ID NO: 131621 - DNA, 258 bp, Caulobacter sp. K31
  CDS (1)..(258): transl_table=11
atgtctattctcgcgtggatcgttctcggccttatcgccgggttcatcgccagcaagatcgtcaatcgttcgggcggaagcctggttctcgacttggtgttggggattgtcggagcggtggtcggcggctttctgttcaatcagttcggcagcgccggcgtctccggcctcaacctctatagcctgctcgtcgccaccgtcggcgccgtggtggtcctgctgatctaccacatgcttttgggccgtcgcgccctctag

SEQ ID NO: 131622 - protein, 85 aa, Caulobacter sp. K31
MSILAWIVLGLIAGFIASKIVNRSGGSLVLDLVLGIVGAVVGGFLFNQFGSAGVSGLNLYSLLVATVGAVVVLLIYHMLLGRRAL

SEQ ID NO: 131623 - DNA, 252 bp, Finegoldia magna ATCC 29328
  CDS (1)..(252): transl_table=11
atgggaattatttcatggattatagtaggagcattagcaggatggataggatctaaaattactggtaacgatgcaaacatgggagcaggtgctaacattctttgcggaattgtcggagctacaatcggtggctgggtaatgagtattatcggaaaaagtggagtaaatggattcaacctttacagcattttagttgcaattttaggttcagtaattttactatctattattaacaaaattaaaaagaaataa

SEQ ID NO: 131624 - protein, 83 aa, Finegoldia magna ATCC 29328
MGIISWIIVGALAGWIGSKITGNDANMGAGANILCGIVGATIGGWVMSIIGKSGVNGFNLYSILVAILGSVILLSIINKIKKK

SEQ ID NO: 131625 - DNA, 279 bp, Clavibacter michiganensis subsp. sepedonicus
  CDS (1)..(279): transl_table=11
atgctcggactaatcatcagcctcatcgtcatcggcctcatcgccggcttcatcgcccgcgcggtcgtgcccggacgccagagcatgtcgatcctcatgaccatcgtgctcggcatcgtcggctcgttcgtcggcggattcctcgcgttcctgctgttccagcgcgacgccatggacggcttcttccagcccgccggcatcatcggatccatcatcggcgcgatcatcgtgctgctcatctacgtgaaggtcggcggccgcaagtccgttcgccgctga

SEQ ID NO: 131626 - protein, 92 aa, Clavibacter michiganensis subsp. sepedonicus
MLGLIISLIVIGLIAGFIARAVVPGRQSMSILMTIVLGIVGSFVGGFLAFLLFQRDAMDGFFQPAGIIGSIIGAIIVLLIYVKVGGRKSVRR

SEQ ID NO: 131627 - DNA, 246 bp, Pseudomonas putida W619
  CDS (1)..(246): transl_table=11
atgggcatcattggaactatcttcatcggcctcatcgttggcctgctggcgcgcttcatcaagcccggcgacgacagcatgggctggatcatgaccatcctgctgggtatcgccggctccttgatcgccacgtatggcggccaggccttggggatttaccaggccgggcaggcagcgggcttcttcggcgcgctggtcggtgccatcgtcctgctggtgatcttcggattcatcaagaaacgctga

SEQ ID NO: 131628 - protein, 81 aa, Pseudomonas putida W619
MGIIGTIFIGLIVGLLARFIKPGDDSMGWIMTILLGIAGSLIATYGGQALGIYQAGQAAGFFGALVGAIVLLVIFGFIKKR

SEQ ID NO: 131629 - DNA, 264 bp, Cyanothece sp. ATCC 51142
  CDS (1)..(264): transl_table=11
atgaatattattgcttggattattttaggtttattagcaggggcgatcgctaaatggatttttcctggtcatcagggtgggggctttctggctaccatgtttctgggaatcatcggggcatttattggcggaacgctgatgactttcattaggacaggaaccctacaattggttggagcctctttaagtattccaggggttgttgtggctgttttaggagctattattgccatctggctttggggtttaattaatcgtggctaa

SEQ ID NO: 131630 - protein, 87 aa, Cyanothece sp. ATCC 51142
MNIIAWIILGLLAGAIAKWIFPGHQGGGFLATMFLGIIGAFIGGTLMTFIRTGTLQLVGASLSIPGVVVAVLGAIIAIWLWGLINRG

SEQ ID NO: 131631 - DNA, 267 bp, Streptomyces griseus subsp. griseus NBRC 13350
  CDS (1)..(267): transl_table=11
atgggcatcatcgcctggatcctcatcggcctgttcgcggggctcatcgccaaggcgctgacgccgggcaaggaccccgggggctgcctcgtcacgatcgtcatcggcatcgtgggcgggctgctcggcggctggctcggcaaggtgatcttcggcgtcgactcgatcgacggattcttcagcctctcgacgtgggtcgccgccgtggtcggttcggtgatcgtcctgctcgtctaccggctggtcaccggacagcggtcgcgctga

SEQ ID NO: 131632 - protein, 88 aa, Streptomyces griseus subsp. griseus NBRC 13350
MGIIAWILIGLFAGLIAKALTPGKDPGGCLVTIVIGIVGGLLGGWLGKVIFGVDSIDGFFSLSTWVAAVVGSVIVLLVYRLVTGQRSR

SEQ ID NO: 131633 - DNA, 297 bp, Kocuria rhizophila DC2201
  CDS (1)..(297): transl_table=11
atgcttgagcaacgaaaacttgaggtggagaacatgggcatttttagctggatcatcctcggcctgatcgctggcgctctcgccaagctgatcctgccgggcaagcagggtggtgggatcatcgtcaccatcatcctgggcatcgtgggcgcgttcctcggtggctggctgggctccttcatcccgggcctgcacgccggtatcgacaagatcagcatcggcaccatcatcacgtccgtgatcggcgcgatcatcgtgctgctgatctacggcttcgtggtcaaccgccgccgctga

SEQ ID NO: 131634 - protein, 98 aa, Kocuria rhizophila DC2201
MLEQRKLEVENMGIFSWIILGLIAGALAKLILPGKQGGGIIVTIILGIVGAFLGGWLGSFIPGLHAGIDKISIGTIITSVIGAIIVLLIYGFVVNRRR

SEQ ID NO: 131635 - DNA, 273 bp, Nostoc punctiforme PCC 73102
  CDS (1)..(273): transl_table=11
atgaatattcttgcttggattgttttaggtctaattgctggtgcgatcgctaaagctatctaccccggtcatcaaggtggcggtattctaggaacaatcttattaggaatcatcggcgcttttgttggtggtagtctaggagtatttttcagtacaggaacgttaagtttagcagctccaactctaagtatcccgggtattgcagtagcagttctgggtgcaattgttgcagttttcctctggaatttattaacaaatcgcagtgcagtctaa

SEQ ID NO: 131636 - protein, 90 aa, Nostoc punctiforme PCC 73102
MNILAWIVLGLIAGAIAKAIYPGHQGGGILGTILLGIIGAFVGGSLGVFFSTGTLSLAAPTLSIPGIAVAVLGAIVAVFLWNLLTNRSAV

SEQ ID NO: 131637 - DNA, 255 bp, Shigella boydii CDC 3083-94
  CDS (1)..(255): transl_table=11
atgggaattattgcctggattatttttggcctgatagccggcattatcgccaagctaatcatgccggggcgtgatggtggtggatttttccagacctgtattctcgggatagtcggtgcggtggtcggcggctggctggcgaccatgtttggcattggcggctccatcagcggttttgatttgcacagcttcctggtggcggtggtgggagctattctcgttctgggcgtattccgcctgctgcgaagagaataa

SEQ ID NO: 131638 - protein, 84 aa, Shigella boydii CDC 3083-94
MGIIAWIIFGLIAGIIAKLIMPGRDGGGFFQTCILGIVGAVVGGWLATMFGIGGSISGFDLHSFLVAVVGAILVLGVFRLLRRE

SEQ ID NO: 131639 - DNA, 267 bp, Methylobacterium populi BJ001
  CDS (1)..(267): transl_table=11
atggaaattctctggaccatcatcatcggcttcgtagccggcgtcatcgccaagttcatcatgcccggcgacaaggagcccgccggcttcatcatgacgacgatcctcggcatcgtcggcgccttcgtcgcgaccttcatcggtcaggcggtcggctggtacggacccaacgagggggcccgcttcatcggctcgatcgtcggcgcctgcgtcgtgctcgcgatctacggcttcatcgccggccgcaccagcagccgctcgctctga

SEQ ID NO: 131640 - protein, 88 aa, Methylobacterium populi BJ001
MEILWTIIIGFVAGVIAKFIMPGDKEPAGFIMTTILGIVGAFVATFIGQAVGWYGPNEGARFIGSIVGACVVLAIYGFIAGRTSSRSL

SEQ ID NO: 131641 - DNA, 270 bp, Stenotrophomonas maltophilia R551-3
  CDS (1)..(270): transl_table=11
atgaatggtctgttcggcagcagcagctggctgtacatcatcctggtcggcttcttcgtcggcctgctcgggcgattcttcatgcccggcaacaaccgcatgggctgcctcctgaccatcgtgctgggcatcatcggcgcgctgctggccgggtggttcggccagtacatgggctggtacgccgccggcgaaccggccggtttcttcggtgcggtcgtgggcgcggtcgtcgtgctggcgatcctgcgcctgttcagcggtcgccgctga

SEQ ID NO: 131642 - protein, 89 aa, Stenotrophomonas maltophilia R551-3
MNGLFGSSSWLYIILVGFFVGLLGRFFMPGNNRMGCLLTIVLGIIGALLAGWFGQYMGWYAAGEPAGFFGAVVGAVVVLAILRLFSGRR

SEQ ID NO: 131643 - DNA, 261 bp, Geobacter bemidjiensis Bem
  CDS (1)..(261): transl_table=11
atgggaattttaacttggataatattaggtctggtggttggtgcacttgcgaagttgttgatgcccggcgatgatccgggagggatcttcataacgatcctgctcggtatcgctggggcattcctgggcgggatgataggcacgacgctcgggatagggtcggtaacagggttcaacatgttgagcattttgttggccatcgtgggcgcgattattctcctggtcctctatcgagtcatcaggaggccgcaccgcggctaa

SEQ ID NO: 131644 - protein, 86 aa, Geobacter bemidjiensis Bem
MGILTWIILGLVVGALAKLLMPGDDPGGIFITILLGIAGAFLGGMIGTTLGIGSVTGFNMLSILLAIVGAIILLVLYRVIRRPHRG

SEQ ID NO: 131645 - DNA, 345 bp, Proteus mirabilis HI4320
  CDS (97)..(345): transl_table=11
gtacaattattggaaaaaatcactatttcgtcttacactcttaaagtgaccatttttaatatactatctatattatcactacatttagggggaactatgggatttctttcttggattgtgttcggtcttattgcgggtatcttagccaaattcttaatgcctggctcgtatgatatcggccttatctggacctgtattctaggtattgtgggtgctgtagttggtggtgtaattagtaatttctttggtaaaggcaaagtagatggtttcaattttggtagttttgtcgttgccgtaataggggcaatcgttgtgctttatttagcaaaaatatttgccagttaa

SEQ ID NO: 131646 - protein, 82 aa, Proteus mirabilis HI4320
MGFLSWIVFGLIAGILAKFLMPGSYDIGLIWTCILGIVGAVVGGVISNFFGKGKVDGFNFGSFVVAVIGAIVVLYLAKIFAS

SEQ ID NO: 131647 - DNA, 255 bp, Salmonella enterica
  subsp. enterica serovar Dublin str. CT_02021853
  CDS (1)..(255): transl_table=11
atgggaattatcgcctggattgtttttggtttgattgccggcgttatcgccaaattgcttatgccggggcgcgatggcgggggatttatcctgacctgtattctcggtattgtcggggcggtcgttggcggatggctggcgacgatgtttggtattggcggcagtatcagcggctttaatctgcacagtttcctggtcgccgtggtgggcgcgattatggtgctggtgattttccgccttctgcgacgcggctaa

SEQ ID NO: 131648 - protein, 84 aa, Salmonella enterica
  subsp. enterica serovar Dublin str. CT_02021853
MGIIAWIVFGLIAGVIAKLLMPGRDGGGFILTCILGIVGAVVGGWLATMFGIGGSISGFNLHSFLVAVVGAIMVLVIFRLLRRG

SEQ ID NO: 131649 - DNA, 417 bp, Acidithiobacillus ferrooxidans ATCC 53993
  CDS (89)..(349): transl_table=11
ctatggcttcgacgaaagggaatccgcgatggcggaagccgcgttgctggatgtcggcgcgctggaagtcatcgttgagtaaccgcccatgactctcttgagcatcatcatcttcctcctcatcggcggcatctccggctggctggccgggctgctgatcacgggacgcggcttcggaatggtcggagatatcatcgtgggtatcatcggcgcgttcatcggcggctttgtcctcatctttttcggcctggccggccttttcggggcgggcatcgtcggcgccgtcatcgtggcgttcatcggcgcggtcatccttctcagcatcatcaagatcatcaaaaaaatctgactccgccgggagtctctccggggcgcggcgcgcgcctcatgctcctgcggcataggcgcagcacgcat

SEQ ID NO: 131650 - protein, 86 aa, Acidithiobacillus ferrooxidans ATCC 53993
MTLLSIIIFLLIGGISGWLAGLLITGRGFGMVGDIIVGIIGAFIGGFVLIFFGLAGLFGAGIVGAVIVAFIGAVILLSIIKIIKKI

SEQ ID NO: 131651 - DNA, 270 bp, Rhodospirillum centenum SW
  CDS (1)..(270): transl_table=11
atgtccatcatcgtctggatcatcctgggcctgatcgccggctggatcgccagcaagatcatgcacggcagcggctccggcttcgtggtgaacctcgtgctggggatcgtcggggcgttcgtcggcggcatcgtgttccggatgatcgggggcgccggcgtcaccggcctgaacatctggagcatcctggtcgccgtcgtgggcgcggtcctcgtgctctggatctacaacgcggtcgcgggccgccgtcgggcggcgccacgcctctga

SEQ ID NO: 131652 - protein, 89 aa, Rhodospirillum centenum SW
MSIIVWIILGLIAGWIASKIMHGSGSGFVVNLVLGIVGAFVGGIVFRMIGGAGVTGLNIWSILVAVVGAVLVLWIYNAVAGRRRAAPRL

SEQ ID NO: 131653 - DNA, 255 bp, Escherichia fergusonii ATCC 35469
  CDS (1)..(255): transl_table=11
atgggaattattgcctggattatatttggtttgattgcaggggttatcgccaagctgatcatgccggggcgcgatggcgggggatttttcctgacctgtattctcggtattgtcggtgcggtggtcggcggctggctggcgaccatgtttggtattggcggcagcatcagtggatttaacctgcatagtttcctcgtcgcggtggttggcgcgatcctggtgctgggcgtatttcgcctcctgcgacgggaataa

SEQ ID NO: 131654 - protein, 84 aa, Escherichia fergusonii ATCC 35469
MGIIAWIIFGLIAGVIAKLIMPGRDGGGFFLTCILGIVGAVVGGWLATMFGIGGSISGFNLHSFLVAVVGAILVLGVFRLLRRE

SEQ ID NO: 131655 - DNA, 249 bp, Escherichia fergusonii ATCC 35469
  CDS (1)..(249): transl_table=11
atgggcattctgtcatggattatttttggtttgattgctggtatcctggcgaaatggatcatgccaggtaaagatggtggtggcttctttatgaccatcattttggggattgtaggtgctgttgttggtggttggattagtactttctttggctacgggaaagttgatggctttaacttcggcagcttcgtggtcgccgtaattggcgcgatagttgtgctgttgatttacaggaaaatcaaaagctaa

SEQ ID NO: 131656 - protein, 82 aa, Escherichia fergusonii ATCC 35469
MGILSWIIFGLIAGILAKWIMPGKDGGGFFMTIILGIVGAVVGGWISTFFGYGKVDGFNFGSFVVAVIGAIVVLLIYRKIKS

SEQ ID NO: 131657 - DNA, 255 bp, Escherichia coli 55989
  CDS (1)..(255): transl_table=11
atgggaattattgcctggattatttttggcctgatagccggcattatcgccaagctaatcatgccgaggcgtgatggtggtggatttttcctgacctgtattctcgggatagtcggtgcggtggtcggcggctggctggcgaccatgtttggcattggcggctccatcagtggttttaatctgcacagcttcctggtggcggtggtgggagctattctcgttctgggcatattccgcctcctgcgaagagaataa

SEQ ID NO: 131658 - protein, 84 aa, Escherichia coli 55989
MGIIAWIIFGLIAGIIAKLIMPRRDGGGFFLTCILGIVGAVVGGWLATMFGIGGSISGFNLHSFLVAVVGAILVLGIFRLLRRE

SEQ ID NO: 131659 - DNA, 255 bp, Escherichia coli IAI39
  CDS (1)..(255): transl_table=11
atgggaattattgcctggattatttttggcctgatagccggcataatcgccaagctaatcatgccgggacgtgatggtggtggatttttcctgacctgtattctcgggatagtcggtgcggtggtcggcggctggctggcgaccatgtttggcattggcggcaccatcagcggttttaatttgcacagcttcctggtggcggtggtgggcgctatcctggtgctgggcgtattccgcctcctgcgaagagaataa

SEQ ID NO: 131660 - protein, 84 aa, Escherichia coli IAI39
MGIIAWIIFGLIAGIIAKLIMPGRDGGGFFLTCILGIVGAVVGGWLATMFGIGGTISGFNLHSFLVAVVGAILVLGVFRLLRRE

SEQ ID NO: 131661 - DNA, 276 bp, Arthrobacter chlorophenolicus A6
  CDS (1)..(276): transl_table=11
atgggttttcttgcttggattattctcggcctgattgttggggccattgtcaaagccgtcatgcccggcagggttggcggcggttgggtcaccagcctggttctgggtgtggtgggcgccatagtaggcggctggattggcagccttctgttcaaccggggcgatctgggcttcttcgacctcggaacctggattctcgctattgttggcggcctggtggtcgccggcatctacggagcaatcacaggccgcggcaaggcaacccgcgcgccatag

SEQ ID NO: 131662 - protein, 91 aa, Arthrobacter chlorophenolicus A6
MGFLAWIILGLIVGAIVKAVMPGRVGGGWVTSLVLGVVGAIVGGWIGSLLFNRGDLGFFDLGTWILAIVGGLVVAGIYGAITGRGKATRAP

SEQ ID NO: 131663 - DNA, 255 bp, Alcanivorax sp. DG881
  CDS (1)..(255): transl_table=11
atgggaattttatcctggattgtattcggcctgatcgccggcatcatcgctaaatggattatgccggggaaggacccgggcggctttattgttactacgctgatcggtatcgctggtgccgtggtcggtggctggctgggctccattaccggcctgggcggttccgtcagcggcttcagtctgggcagcttcatcaccgccatcgtcggcgcgctggtgctgctggccctgtaccggatggtaaagaaaggctag

SEQ ID NO: 131664 - protein, 84 aa, Alcanivorax sp. DG881
MGILSWIVFGLIAGIIAKWIMPGKDPGGFIVTTLIGIAGAVVGGWLGSITGLGGSVSGFSLGSFITAIVGALVLLALYRMVKKG

SEQ ID NO: 131665 - DNA, 243 bp, Brevundimonas sp. BAL3
  CDS (1)..(243): transl_table=11
atgggcattatcgcctggatcatcatcggcatcgtcgcgggctggctcgcggaacagatcatgggccgcaaccacggcctgatcaccaatctgatcgtcggcgtcatcggcgccctgatcggcggcttcgtcgccaatgcactgggcttcgcctggggcggctggatcggttcgaccatcgtcgccaccatcggcgccatcatccttctgttccttctgggtctggtcaagcgtcgcgcttga

SEQ ID NO: 131666 - protein, 80 aa, Brevundimonas sp. BAL3
MGIIAWIIIGIVAGWLAEQIMGRNHGLITNLIVGVIGALIGGFVANALGFAWGGWIGSTIVATIGAIILLFLLGLVKRRA

SEQ ID NO: 131667 - DNA, 249 bp, Pectobacterium atrosepticum SCRI1043
  CDS (1)..(249): transl_table=11
atgggtattctgtcttgggttatttttggcttgattgcggggattttggctaagtggattatgcccggtaaagacggcggtggcttcatcctgacggtgctactcgggattgtcggtgcagttgtgggtggctacatcagcgttttctttgggttcggtcgggtggatggctttaacttcggcagctttgtcgtcgcggttgtcggcgcgattgttgtgctgtgggtttaccgcaagattcgagattaa

SEQ ID NO: 131668 - protein, 82 aa, Pectobacterium atrosepticum SCRI1043
MGILSWVIFGLIAGILAKWIMPGKDGGGFILTVLLGIVGAVVGGYISVFFGFGRVDGFNFGSFVVAVVGAIVVLWVYRKIRD

SEQ ID NO: 131669 - DNA, 264 bp, Propionibacterium acnes KPA171202
  CDS (1)..(264): transl_table=11
atgggattcattggatggattgttctcggcctcatcgcaggcgccatcgctaaggccatcatgccgggcaagcagggcggcgggttcctcgtcactctgcttctcggtgtcatcggcgcggtcctcggcggctggctcggttccgctatcttcaacaaaccgctcggtaaattctggagcccctggacctggctcatttcaatcgttggtgctcttatcgtcctgtggatctggggcatcatcaccaagaagaaagcacagtaa

SEQ ID NO: 131670 - protein, 87 aa, Propionibacterium acnes KPA171202
MGFIGWIVLGLIAGAIAKAIMPGKQGGGFLVTLLLGVIGAVLGGWLGSAIFNKPLGKFWSPWTWLISIVGALIVLWIWGIITKKKAQ

SEQ ID NO: 131671 - DNA, 249 bp, Yersinia pseudotuberculosis IP 32953
  CDS (1)..(249): transl_table=11
atgggcatactatcttggattatttttggccttatagccggtattttggcgaagtggattatgcctggtgaggatgggggtggatttatcatgaccatcatcttgggtattattggtgcattggtcgggggctatatcagcactttctttggaatgggaagagttgacggatttaatctgggcagctttgtagtggcagtaatcggctcactggttgttctgtttatttatcggaagttaagaagctag

SEQ ID NO: 131672 - protein, 82 aa, Yersinia pseudotuberculosis IP 32953
MGILSWIIFGLIAGILAKWIMPGEDGGGFIMTIILGIIGALVGGYISTFFGMGRVDGFNLGSFVVAVIGSLVVLFIYRKLRS

SEQ ID NO: 131673 - DNA, 249 bp, Zymomonas mobilis subsp. mobilis ZM4
  CDS (1)..(249): transl_table=11
atggggctcatttcttggcttatcgtcggcggtattattggatggctcgctggacttattatgaaaggcagcggcagcggcgtttttcttaatattattatcggtgttgtcggggcttctttggggggctttatcttcaaccgtggtgatattggcgatgtcggcctgaccctgcaaagttttctggtctcattgatcggtgccgttattttgttggcggtgatcaatttctttaaatcacgcaactga

SEQ ID NO: 131674 - protein, 82 aa, Zymomonas mobilis subsp. mobilis ZM4
MGLISWLIVGGIIGWLAGLIMKGSGSGVFLNIIIGVVGASLGGFIFNRGDIGDVGLTLQSFLVSLIGAVILLAVINFFKSRN

SEQ ID NO: 131675 - DNA, 255 bp, Salmonella enterica
  subsp. enterica serovar Choleraesuis str. SC-B67
  CDS (1)..(255): transl_table=11
atgggaattatcgcctggattatttttggtttgattgccggcgttatcgccaaattgcttatgccggggcgcgatggcgggggatttatcctgacctgtattctcggtatcgtcggggcggtcgttggcggatggctggcgacgatgtttggtattggcggcagtatcagcggctttcatctgcacagtttcctggtcgccgtggtgggcgcgattgtggtgctggtgattttccgccttctgcgacgcggctaa

SEQ ID NO: 131676 - protein, 84 aa, Salmonella enterica
  subsp. enterica serovar Choleraesuis str. SC-B67
MGIIAWIIFGLIAGVIAKLLMPGRDGGGFILTCILGIVGAVVGGWLATMFGIGGSISGFHLHSFLVAVVGAIVVLVIFRLLRRG

SEQ ID NO: 131677 - DNA, 261 bp, Brucella abortus bv. 1 str. 9-941
  CDS (1)..(261): transl_table=11
atgtctgttataagctggataatactaggcttgatcgccggcttcatcggcagcaagattgtcaataaaagtggccagggcatgtttttcgacatcgcgcttggcgtcgtcggcgccatcatcggcggcgttattttcaccttcttcggcgcacagggcgttaccggcctcaatatctacagcctgatcgtttcggtcatcggtgccgtcatcgtgctgtggatttatcatgccgttacgggcaaacgctccataggctga

SEQ ID NO: 131678 - protein, 86 aa, Brucella abortus bv. 1 str. 9-941
MSVISWIILGLIAGFIGSKIVNKSGQGMFFDIALGVVGAIIGGVIFTFFGAQGVTGLNIYSLIVSVIGAVIVLWIYHAVTGKRSIG

SEQ ID NO: 131679 - DNA, 264 bp, Corynebacterium glutamicum ATCC 13032
  CDS (1)..(264): transl_table=11
atgcttgccctaggttggattacatggatcattattggtggtctagctggttggattgcctccaagattaaaggcactgatgctcagcaaggaattttgctgaacatagtcgtcggtattatcggtggtttgttaggcggctggctgcttggaatcttcggagtggatgttgccggtggcggcttgatcttcagcttcatcacatgtctgattggtgctgtcattttgctgacgatcgtgcagttcttcactcggaagaagtaa

SEQ ID NO: 131680 - protein, 87 aa, Corynebacterium glutamicum ATCC 13032
MLALGWITWIIIGGLAGWIASKIKGTDAQQGILLNIVVGIIGGLLGGWLLGIFGVDVAGGGLIFSFITCLIGAVILLTIVQFFTRKK

SEQ ID NO: 131681 - DNA, 255 bp, Psychrobacter arcticus 273-4
  CDS (1)..(255): transl_table=11
atgagctttatttggatgattatcgttggtctggttgcaggtttattagcacgtgcgattaagccaggtagcgaccctatgggttggattatgaccattgtattgggtatcgttggtgcgatgcttggtggtttcgttgctggattaatcggtatcaacgctgatggcggtttcactggtctaatcttctcagtaatcggtgcgattaccttactgttcatctacgagatgattatgagtaaacgccgcatataa

SEQ ID NO: 131682 - protein, 84 aa, Psychrobacter arcticus 273-4
MSFIWMIIVGLVAGLLARAIKPGSDPMGWIMTIVLGIVGAMLGGFVAGLIGINADGGFTGLIFSVIGAITLLFIYEMIMSKRRI

SEQ ID NO: 131683 - DNA, 255 bp, Shigella sonnei Ss046
  CDS (1)..(255): transl_table=11
ttgcgtccgattcatcgaaacgagggcctgaacatgggaattattgcttggattatttttggcctgatagccggcattatcgccaagctaatcatgccggggcgtgatggtggtggatttttcctgacctgtattctcgggatagtcggtgcggtggtcggcggctggctggcgaccatgtttggcattggcggctccatcagcggttttaatttgcacagcttcctggtggcggtggtgggtgaggtagcctga

SEQ ID NO: 131684 - protein, 84 aa, Shigella sonnei Ss046
MRPIHRNEGLNMGIIAWIIFGLIAGIIAKLIMPGRDGGGFFLTCILGIVGAVVGGWLATMFGIGGSISGFNLHSFLVAVVGEVA

SEQ ID NO: 131685 - DNA, 255 bp, Rhodobacter sphaeroides 2.4.1
  CDS (1)..(255): transl_table=11
ttgaccatcatctggaccatcatcatcggcttcatcgccggcgtgattgcgaagtttctccacccgggagacaacgagccctcgggcttcatcctgaccacgatcctcgggatcgtgggtgccctcgtcgccacctggctggggcaggccgtgggctggtacggccccggcgaaggcgcgggcttcatcggagccatcgtcggcgccatcgtccttctggtgatctggggcgccgtgaccagaaagcgcggctga

SEQ ID NO: 131686 - protein, 84 aa, Rhodobacter sphaeroides 2.4.1
MTIIWTIIIGFIAGVIAKFLHPGDNEPSGFILTTILGIVGALVATWLGQAVGWYGPGEGAGFIGAIVGAIVLLVIWGAVTRKRG

SEQ ID NO: 131687 - DNA, 255 bp, Shigella boydii Sb227
  CDS (1)..(255): transl_table=11
atgggaattattgcctggattatttttggcctgatagccggcattatcgccaagctaatcatgccggggcgtgatggtggtggatttttccagacctgtattctcgggatagtcggtgcggtggtcggcggctggctggcgaccatgtttggcattggcggctccatcagcggttttaatttgcacagcttcctggtggcggtggtgggagctattctcgttctgggcttattccgcctgctgcgaagagaataa

SEQ ID NO: 131688 - protein, 84 aa, Shigella boydii Sb227
MGIIAWIIFGLIAGIIAKLIMPGRDGGGFFQTCILGIVGAVVGGWLATMFGIGGSISGFNLHSFLVAVVGAILVLGLFRLLRRE

SEQ ID NO: 131689 - DNA, 249 bp, Chromohalobacter salexigens DSM 3043
  CDS (1)..(249): transl_table=11
atgggcatcatcgcatggatcgtcttcggcctgctggccggtatcgtcgccaagctcatcatgccgggccgcgatcccggcggcctcatcgtcagcctcatcctcggggtactcggcgccatcgtcggcggctggatcggtaccgcgctgggcttcggcacggtggatggcttcaacctcggcagcttcgccatcgccgtgctcggggccatcatcctcctggggctctaccgcatcgtgaagaaatga

SEQ ID NO: 131690 - protein, 82 aa, Chromohalobacter salexigens DSM 3043
MGIIAWIVFGLLAGIVAKLIMPGRDPGGLIVSLILGVLGAIVGGWIGTALGFGTVDGFNLGSFAIAVLGAIILLGLYRIVKK

SEQ ID NO: 131691 - DNA, 246 bp, Nitrobacter hamburgensis X14
  CDS (1)..(246): transl_table=11
atgggcgtcattgtgtggttgattgtcggcgcgatcgcgggttggctggctggtttgatcgtgaaaggcggaggcttcggactgatcggaaatatcatcatcggcatcatcggcgcaatcgtcgccggctggcttttgccgctgttcggagttctgatcggcggcggttttttcgcccaggtcatcaatgcagccatcggcgccatcatcgttctcctcgtggtgtcgttcatcaaacgcgcctga

SEQ ID NO: 131692 - protein, 81 aa, Nitrobacter hamburgensis X14
MGVIVWLIVGAIAGWLAGLIVKGGGFGLIGNIIIGIIGAIVAGWLLPLFGVLIGGGFFAQVINAAIGAIIVLLVVSFIKRA

SEQ ID NO: 131693 - DNA, 255 bp, Psychrobacter cryohalolentis K5
  CDS (1)..(255): transl_table=11
atgagctttatttggatgattattgttggtctggttgcaggtttattggcacgtgcgattaagccaggtagcgatcctatgggttggattatgacgattgtattgggtatcgttggtgcgatgcttggtggttttgttgctggcctaattggtatcaatgctgatggcggtttcactggtctaatcttctcagtaattggtgcgattatattactgttcatctatgagatgattatgagtaaacgtcgcgtataa

SEQ ID NO: 131694 - protein, 84 aa, Psychrobacter cryohalolentis K5
MSFIWMIIVGLVAGLLARAIKPGSDPMGWIMTIVLGIVGAMLGGFVAGLIGINADGGFTGLIFSVIGAIILLFIYEMIMSKRRV

SEQ ID NO: 131695 - DNA, 246 bp, Pseudomonas entomophila L48
  CDS (1)..(246): transl_table=11
atgggcatcattggaaccatcttcatcggcctgatcgtcggcctgctggcgcgtttcctgaaaccgggtgacgacagcatgggctggatcatgaccatcctcctcggcatcgccggctccctggccgccacctatggcgggcaagcccttggcatctaccaggccgggcaggccgcaggcttcttcggggccttggtgggcgccatcatcctcttggtgatctacggcttcatcaagaagagctga

SEQ ID NO: 131696 - protein, 81 aa, Pseudomonas entomophila L48
MGIIGTIFIGLIVGLLARFLKPGDDSMGWIMTILLGIAGSLAATYGGQALGIYQAGQAAGFFGALVGAIILLVIYGFIKKS

SEQ ID NO: 131697 - DNA, 267 bp, Myxococcus xanthus DK 1622
  CDS (1)..(267): transl_table=11
atggggatcatcgcattcatcgtcatcggcctcatcgcgggtctcatcgcccgcgccatcctccccgggaagcagagcatggggctcatcgcaacgaccttgctcggcatggtcggttcgctcgtgggcggccttgtcggttcgctgttccagcgtgatggtcggctcttcgacgtgaggccctcaggcatcatcatgtcggtgattggcgcaatcgtcgtgctcctgctggtgggcgcagccggacggcgacgggtacatgcctga

SEQ ID NO: 131698 - protein, 88 aa, Myxococcus xanthus DK 1622
MGIIAFIVIGLIAGLIARAILPGKQSMGLIATTLLGMVGSLVGGLVGSLFQRDGRLFDVRPSGIIMSVIGAIVVLLLVGAAGRRRVHA

SEQ ID NO: 131699 - DNA, 264 bp, Rubrobacter xylanophilus DSM 9941
  CDS (1)..(264): transl_table=11
atgggcgtcataagctggatcgtggtgggcctcatcgccgggcttctcgccaagctgctgatgcccggcgacgacccgggcggcctgatcatcaccaccatcctcgggatggccggcgcgctggtgggcggcttcctggtcgggttgctcggcggggcgggggtcaccggcttcaacatctggtcggtactggtggccacgctgggggccgtcatcctgctggcggtctaccgggcgctgctcggggggcgccgcagggtctag

SEQ ID NO: 131700 - protein, 87 aa, Rubrobacter xylanophilus DSM 9941
MGVISWIVVGLIAGLLAKLLMPGDDPGGLIITTILGMAGALVGGFLVGLLGGAGVTGFNIWSVLVATLGAVILLAVYRALLGGRRRV

SEQ ID NO: 131701 - DNA, 255 bp, Alcanivorax borkumensis SK2
  CDS (1)..(255): transl_table=11
atgggaattttatcttggatcgtattcggtcttatcgccggtatcattgctaaatggattatgcctggaaaggatccgggcggcttcattgtcaccaccctaatcggtatcgcgggtgctgtggtcggtggctggctaggctccatcactggcctaggcggttcggtcagcgggttcagcctaggcagctttgtcaccgccattatcggtgcattggtactgctggctctgtaccggcagatgaaaaagttttag

SEQ ID NO: 131702 - protein, 84 aa, Alcanivorax borkumensis SK2
MGILSWIVFGLIAGIIAKWIMPGKDPGGFIVTTLIGIAGAVVGGWLGSITGLGGSVSGFSLGSFVTAIIGALVLLALYRQMKKF

SEQ ID NO: 131703 - DNA, 315 bp, Granulibacter bethesdensis CGDNIH1
  CDS (1)..(315): transl_table=11
atgttcatgcgtcatgatcggtctggagacctgcatcaaaggcgcaccgcaatgttttcacttctatggactattctcatcggcctgatcgtcggggcggtggccaagctgatcatgccgggacgtgatccgggtggtatcatcgtcaccattctgctgggcattggcggctctctggttgccacctggctcggccgcgccctgcattggtatggtcccgaggatggggcccgctttatcggctcggtcgtaggcgccatcatcattctggcaatctaccgcttcatcgtcggtcgttcatcaaatacggtgtga

SEQ ID NO: 131704 - protein, 104 aa, Granulibacter bethesdensis CGDNIH1
MFMRHDRSGDLHQRRTAMFSLLWTILIGLIVGAVAKLIMPGRDPGGIIVTILLGIGGSLVATWLGRALHWYGPEDGARFIGSVVGAIIILAIYRFIVGRSSNTV

SEQ ID NO: 131705 - DNA, 255 bp, Burkholderia ambifaria AMMD
  CDS (1)..(255): transl_table=11
atgactcatggcttgattatgtggctcatcatcggcgcgatcgccggctggctggcaggcctgctcgtcaagggcggtggcttcggcctgatcgtcgacatcatcgtcggtatcgtcggcgcggtgatcggcggctggctggccacgatgctcggtatcggcatcggcagcggattcatcggctcggtgatcgtcgctgtcatcggcgccgtgatccttctgttcgtgatccggctgttcaggcgcgcggcctga

SEQ ID NO: 131706 - protein, 84 aa, Burkholderia ambifaria AMMD
MTHGLIMWLIIGAIAGWLAGLLVKGGGFGLIVDIIVGIVGAVIGGWLATMLGIGIGSGFIGSVIVAVIGAVILLFVIRLFRRAA

SEQ ID NO: 131707 - DNA, 264 bp, Rhodopseudomonas palustris BisA53
  CDS (1)..(264): transl_table=11
atgggcattctgtggaccatcatcatcggctttgtcgcgggcgtcatcgccaaattcctgatgccgggagacaatgagccctcgggcttcatcctgaccaccgtgctgggcatcgtcggcgccttcgtcgcgacctttttgggacagtcattgggctggtacgggccggggcagggcgcggggctgatcggcgccgtggtcggtgcgattatcgtgctgctgatctatggctggttggccggccgccgacagcggacgatctga

SEQ ID NO: 131708 - protein, 87 aa, Rhodopseudomonas palustris BisA53
MGILWTIIIGFVAGVIAKFLMPGDNEPSGFILTTVLGIVGAFVATFLGQSLGWYGPGQGAGLIGAVVGAIIVLLIYGWLAGRRQRTI

SEQ ID NO: 131709 - DNA, 252 bp, Solibacter usitatus Ellin6076
  CDS (1)..(252): transl_table=11
atgacgtttctatcgtggatcgcgttaggccttctggcaggcttcatcgcaagcaaaatcgtgaataagcatggcgagggtgcgtttctcgatatcctgcttggcgtagtgggcgccgtggttggaggcctgatattcggcgtcttcggcgctggaggagtgagcggctttaacctgtacagcctgcttgtggcggtagtcggcgcaatcctcacactgtttgtctaccatgctgttcaccgcgccgtttga

SEQ ID NO: 131710 - protein, 83 aa, Solibacter usitatus Ellin6076
MTFLSWIALGLLAGFIASKIVNKHGEGAFLDILLGVVGAVVGGLIFGVFGAGGVSGFNLYSLLVAVVGAILTLFVYHAVHRAV

SEQ ID NO: 131711 - DNA, 264 bp, Arthrobacter sp. FB24
  CDS (1)..(264): transl_table=11
atgggttttttcgcatttctgattctgggccttatcgctggagcaatcgctaaggcaatcctcccgggccgtcagggcggtggcattttcatcaccctgctcctgggcgtcgtaggagctttcctcggcggctggattggtagcctgctcttcggtgttggcatcaacgagttcttctcgctgtccacatggctcctggccattggcggcgcgatcatcgtcctgcttgtttacggcatgatcaccaagcgcacggcccgctaa

SEQ ID NO: 131712 - protein, 87 aa, Arthrobacter sp. FB24
MGFFAFLILGLIAGAIAKAILPGRQGGGIFITLLLGVVGAFLGGWIGSLLFGVGINEFFSLSTWLLAIGGAIIVLLVYGMITKRTAR

SEQ ID NO: 131713 - DNA, 267 bp, Arthrobacter sp. FB24
  CDS (1)..(267): transl_table=11
atgggcttcattggctggatcattctcggactcattgtaggagctatcgtcaaggcgatcatgcctggcaaggtcggcggcggctgggtcaccagcctcgttcttggtgttgtcggcgccatcgtcggcggctggatcggcgacctgttgtttggcgggggcaaaatggaattctggaaccttggttcctggcttcttgccatcgtcggcggcctggtagtagccggcatctacggcttcatcaccggcagaagcaagaccacttaa

SEQ ID NO: 131714 - protein, 88 aa, Arthrobacter sp. FB24
MGFIGWIILGLIVGAIVKAIMPGKVGGGWVTSLVLGVVGAIVGGWIGDLLFGGGKMEFWNLGSWLLAIVGGLVVAGIYGFITGRSKTT

SEQ ID NO: 131715 - DNA, 264 bp, Arthrobacter sp. FB24
  CDS (1)..(264): transl_table=11
atgggaattctcggatttctcctgctcggcttgatcgcgggagctatcgcaaaggccatacttcccggaaggcagggcggcggctgggtagtcaccctggtactgggtgtggtcggcgccatccttggcggatggatcggttcgctggtcttcggcggcggcctcgctgagttcttcgatctcaggacctggctgctggctattctgggcgccgtgattgtgctgggcatcttcggtgccgtcacgcgtcgaagcagggcctga

SEQ ID NO: 131716 - protein, 87 aa, Arthrobacter sp. FB24
MGILGFLLLGLIAGAIAKAILPGRQGGGWVVTLVLGVVGAILGGWIGSLVFGGGLAEFFDLRTWLLAILGAVIVLGIFGAVTRRSRA

SEQ ID NO: 131717 - DNA, 252 bp, Polaromonas naphthalenivorans CJ2
  CDS (1)..(252): transl_table=11
atgagcattatctggaccatcatcattggactcatcgtcggcatcgtcgccaaattcctgatgccgggccgcgacccgggcggctttgtcatcaccgccatcatcggcatcgtcggttcggtcatcgccacctacctgggccgggcgcttggcatgtaccggcccggtgagtcggcgggctttattgccgccgtcattggcgcgatcattctgctgttcctctaccgcatggtggcgggccgcaaagcctga

SEQ ID NO: 131718 - protein, 83 aa, Polaromonas naphthalenivorans CJ2
MSIIWTIIIGLIVGIVAKFLMPGRDPGGFVITAIIGIVGSVIATYLGRALGMYRPGESAGFIAAVIGAIILLFLYRMVAGRKA

SEQ ID NO: 131719 - DNA, 252 bp, Burkholderia mallei SAVP1
  CDS (1)..(252): transl_table=11
atggctcatggcttgattatgtggctcatcatcggcgcaatcgccggctggctcgccggcctgctcgtgaagggcggcggcttcgggctgctcgtggacatcatcgtcggcatcgtcggcgccgtcatcggcggctggctcgccggcatcctcggcattcacatcggcggcggcttcatcagctcggtgatcgtcgccgtcatcggcgcggtcattctgctgttcgtgatccggctattcaaacgagcctga

SEQ ID NO: 131720 - protein, 83 aa, Burkholderia mallei SAVP1
MAHGLIMWLIIGAIAGWLAGLLVKGGGFGLLVDIIVGIVGAVIGGWLAGILGIHIGGGFISSVIVAVIGAVILLFVIRLFKRA

SEQ ID NO: 131721 - DNA, 246 bp, Azotobacter vinelandii
  CDS (1)..(246): transl_table=11
atgggcatcctcggcaccattctcatcggcctgttgatcggcgtggtcgcacgtttcctcaaaccgggcgaccagcccatgggctggatcatgaccatcctgctcggcatcggcggttcgctcgtggccacctacggcggccaggtgctgggcatctaccgcgccggcgaagccgccggcttcatcggcgcggtgatcggcgccattgtcctgctggtgatctacggctacctgcgcaaatcctga

SEQ ID NO: 131722 - protein, 81 aa, Azotobacter vinelandii
MGILGTILIGLLIGVVARFLKPGDQPMGWIMTILLGIGGSLVATYGGQVLGIYRAGEAAGFIGAVIGAIVLLVIYGYLRKS

SEQ ID NO: 131723 - DNA, 246 bp, Parvularcula bermudensis HTCC2503
  CDS (1)..(246): transl_table=11
atgggtattatcttgtggattatcgtcggcggtatcgctggctggctggccgaaaaggcgatgaagagcgagcatagcatttggatgaatatcgccctcggcatgctcggcgcggtggtgctgaactggctcttactggccgtcggcattggcaccctcgggggcgttttggggcaattggtgatcgcgtttctcggcgcctgtctcctcatctggattggccggatgatccgtcggcgggcctga

SEQ ID NO: 131724 - protein, 81 aa, Parvularcula bermudensis HTCC2503
MGIILWIIVGGIAGWLAEKAMKSEHSIWMNIALGMLGAVVLNWLLLAVGIGTLGGVLGQLVIAFLGACLLIWIGRMIRRRA

SEQ ID NO: 131725 - DNA, 243 bp, Photobacterium sp. SKA34
  CDS (1)..(243): transl_table=11
atgtctattatcacttggattattgttggtcttatcgctggtgcgttagctaaatggttaatgcctggaaatgatggtggcggttggattgctacatgtggtttaggtattgctggttcttttgccggtggtttccttggttcattgctgggtattggtgcttcaggtttacttggtaccattattgttgcaactgttggtgctttggtactgctatttatctataaccgatttattcgttaa

SEQ ID NO: 131726 - protein, 80 aa, Photobacterium sp. SKA34
MSIITWIIVGLIAGALAKWLMPGNDGGGWIATCGLGIAGSFAGGFLGSLLGIGASGLLGTIIVATVGALVLLFIYNRFIR

SEQ ID NO: 131727 - DNA, 249 bp, Photobacterium sp. SKA34
  CDS (1)..(249): transl_table=11
atgggtattttatcttggattattcttggtttaattgctggtgcattggcaaagtttttaatgcctggtaaagatggcggtggttggattgtaacaatggcattgggtattggcggtgcatttgttggtggttttgtgggtaaatttattggtttaggccaagcaacaggtgtaaacattggcagcattattaccgctaccttgggtgcatttattattttgtttatttataaccgttttattcgttaa

SEQ ID NO: 131728 - protein, 82 aa, Photobacterium sp. SKA34
MGILSWIILGLIAGALAKFLMPGKDGGGWIVTMALGIGGAFVGGFVGKFIGLGQATGVNIGSIITATLGAFIILFIYNRFIR

SEQ ID NO: 131729 - DNA, 249 bp, Vibrio alginolyticus 12G01
  CDS (1)..(249): transl_table=11
atgggtattatttcttggattattttgggcttaatcgccggcgcacttgctaaatggctcatgccaggaaaagatgggggcggttggattgcaacaatgttacttggtattgcaggggcatttgtaggtggcttccttggcggcattctcggtttcggcggagcaactggcgtcaacattggtagtatcattaccgcaacactaggcgcatttattctgttgtttgtttataaccgtttcttaaaataa

SEQ ID NO: 131730 - protein, 82 aa, Vibrio alginolyticus 12G01
MGIISWIILGLIAGALAKWLMPGKDGGGWIATMLLGIAGAFVGGFLGGILGFGGATGVNIGSIITATLGAFILLFVYNRFLK

SEQ ID NO: 131731 - DNA, 252 bp, Mariprofundus ferrooxydans PV-1
  CDS (1)..(252): transl_table=11
atggatatcattagtttgattatatttttagcagttggcgcactggccggctggatggccggcaacatcatgaagggaagcggatttggtgtcataggcaatattattgtgggcattgttggtgctgtattgggtggctttgtattcggtttgcttggcataacaactggcgggttattaggtgctatcattatggccacgattggcgctgttatgttgttatttttaattggtttaattaagaagacctga

SEQ ID NO: 131732 - protein, 83 aa, Mariprofundus ferrooxydans PV-1
MDIISLIIFLAVGALAGWMAGNIMKGSGFGVIGNIIVGIVGAVLGGFVFGLLGITTGGLLGAIIMATIGAVMLLFLIGLIKKT

SEQ ID NO: 131733 - DNA, 273 bp, Nodularia spumigena CCY 9414
  CDS (1)..(273): transl_table=11
atgaacattcttgcatggattgctttaggtttaattgctggagctatcgctaaagccatttaccccggacatcaaggtggtggcattttaggaacaatcttactgggaattatcggtgcttttattggtggtagcttgggagtattttttagtacaggaacctttgccttagcggctcctactctcagtattacgggtatcatcttagcaatacttggtgccatcgtggctattttcttgtggaacttgttaacttctcgcagtgctgcataa

SEQ ID NO: 131734 - protein, 90 aa, Nodularia spumigena CCY 9414
MNILAWIALGLIAGAIAKAIYPGHQGGGILGTILLGIIGAFIGGSLGVFFSTGTFALAAPTLSITGIILAILGAIVAIFLWNLLTSRSAA

SEQ ID NO: 131735 - DNA, 252 bp, Vibrio harveyi HY01
  CDS (1)..(252): transl_table=11
atgggctttctatcttggattattctaggcttgattgctggtgcattagctaaatggttgatgccaggtaatgatggcggcggttggattgccactatggtactgggtatcgtgggcgctttcgttggtggcttcttaggaagctttattggccttggcgctgcagacggcgtgaatataggcagcatcatcaccgcaacgttaggtgctttcgttgtattgtttgtctataaccgctttattaaaggttga

SEQ ID NO: 131736 - protein, 83 aa, Vibrio harveyi HY01
MGFLSWIILGLIAGALAKWLMPGNDGGGWIATMVLGIVGAFVGGFLGSFIGLGAADGVNIGSIITATLGAFVVLFVYNRFIKG

SEQ ID NO: 131737 - DNA, 255 bp, Ralstonia pickettii 12D
  CDS (1)..(255): transl_table=11
atggcctcacatggtttgattgcctggttgatcattggcgcggtggcgggctggctggccggcatcctggtcaagggcggcggtttcggcatcttcgtcgacatcgtggtcggcatcgtcggtgcgttcatcagcggatggctggcgggggtgctcggcatctcgctgggcggcgggtggatcggctcgatcatcacggcggtgatcggcgcggtgatcctgctgttcatcatccggctaatcaagcgcgcatag

SEQ ID NO: 131738 - protein, 84 aa, Ralstonia pickettii 12D
MASHGLIAWLIIGAVAGWLAGILVKGGGFGIFVDIVVGIVGAFISGWLAGVLGISLGGGWIGSIITAVIGAVILLFIIRLIKRA

SEQ ID NO: 131739 - DNA, 252 bp, Vibrio campbellii AND4
  CDS (1)..(252): transl_table=11
atgggctttctatcttggattattcttggtttgatagctggcgcgctcgccaaatggttgatgccaggaaatgatggtggcggttggcttgccaccatggtactagggattgtgggcgcctttgtcggcggtttcttggggagctttatcggccttggtggtaccgacggcgttaatataggtagtatcatcaccgcaacagcgggtgccttcgttgtgttatttgtctacaaccgctttattaggggttga

SEQ ID NO: 131740 - protein, 83 aa, Vibrio campbellii AND4
MGFLSWIILGLIAGALAKWLMPGNDGGGWLATMVLGIVGAFVGGFLGSFIGLGGTDGVNIGSIITATAGAFVVLFVYNRFIRG

SEQ ID NO: 131741 - DNA, 255 bp, Salmonella enterica
  subsp. enterica serovar Schwarzengrund str. SL480
  CDS (1)..(255): transl_table=11
atgggaattatcgcctggattatttttggtttgattgccggcgttatcgccaaattgcttatgccggggcgcgatggcgggggatttatcctgacctgtattctcggtatcgtcggggcggtcgttggcggatggctggcgacgatgtttggtattggcggcagtatcagcggctttaatctgcacagtttcctggtcgccgtggtgggcgcgattgtggtgctggtgattttccgccttctgcgacgcggctaa

SEQ ID NO: 131742 - protein, 84 aa, Salmonella enterica
  subsp. enterica serovar Schwarzengrund str. SL480
MGIIAWIIFGLIAGVIAKLLMPGRDGGGFILTCILGIVGAVVGGWLATMFGIGGSISGFNLHSFLVAVVGAIVVLVIFRLLRRG

SEQ ID NO: 131743 - DNA, 270 bp, Arthrobacter chlorophenolicus A6
  CDS (1)..(270): transl_table=11
atgggcattctcggatttctcatcttgggcctgattgcgggcgccattgcaaaggccatcctgccgggccgtcaaggcggcggctgggtggtgaccatggtcctcggcgttgtcggcgctatcctcggcggctggatcgggtcgctgatcttcggtggcggcttggccgaattcttcgatatccgcacctggctgctggccatcctcggatccatcgtggtcctgctgatctacggtgcagtcatgaaccgcagcggacaccgggcctag

SEQ ID NO: 131744 - protein, 89 aa, Arthrobacter chlorophenolicus A6
MGILGFLILGLIAGAIAKAILPGRQGGGWVVTMVLGVVGAILGGWIGSLIFGGGLAEFFDIRTWLLAILGSIVVLLIYGAVMNRSGHRA

SEQ ID NO: 131745 - DNA, 243 bp, Thauera sp. MZ1T
  CDS (1)..(243): transl_table=11
atgggcatcatcggaaccatcctcatcggcctgatcgtcggcttcgtcgcgcgcctgctgcaccccggcaaggacggcctcggggtcatcatgacctcgctgctcggcatcgccggctcgctggtcgccacctacggcggccaggcgctcggcatctatcacgccggcgagggcgcgggtttcctcggtgcggtcatcggcgcggtggtgatccttttcgtggtgacccgcctcaagaaatga

SEQ ID NO: 131746 - protein, 80 aa, Thauera sp. MZ1T
MGIIGTILIGLIVGFVARLLHPGKDGLGVIMTSLLGIAGSLVATYGGQALGIYHAGEGAGFLGAVIGAVVILFVVTRLKK

SEQ ID NO: 131747 - DNA, 255 bp, Escherichia albertii TW07627
  CDS (1)..(255): transl_table=11
atgggaattattgcctggattatttttggcctgatagcgggcgttatcgccaagctgatcatgccgggacgtgatggtggaggatttatcctgacctgtattctcgggatagtcggtgcggtcgtcggcggctggctggcgaccatgtttggcattggcggtaccatcagcggttttaatttacacagcttcctggtggcggtggtcggcgctatcctggttctgggggtatttcgcctcctgcgaagagaatag

SEQ ID NO: 131748 - protein, 84 aa, Escherichia albertii TW07627
MGIIAWIIFGLIAGVIAKLIMPGRDGGGFILTCILGIVGAVVGGWLATMFGIGGTISGFNLHSFLVAVVGAILVLGVFRLLRRE

SEQ ID NO: 131749 - DNA, 273 bp, Micrococcus luteus NCTC 2665
  CDS (1)..(273): transl_table=11
atgggcatcattggctggatcgttctcggtctcatcgccggcgccatcgctcgcgccatcctccccggacgtcagggcggcgggtggctcggcgccctcctcaccggcatcgtcggtgctctcctcggcggctggatcgcctccctgctgttcaacttcgacgtgaacgagaagttcttcgatctgggcacctggatcttcgcgatcatcggcggcgttatcgtcgccgccgtgtggcaggccattacccgccgcaccggcacccgcgcctga

SEQ ID NO: 131750 - protein, 90 aa, Micrococcus luteus NCTC 2665
MGIIGWIVLGLIAGAIARAILPGRQGGGWLGALLTGIVGALLGGWIASLLFNFDVNEKFFDLGTWIFAIIGGVIVAAVWQAITRRTGTRA

SEQ ID NO: 131751 - DNA, 252 bp, Providencia stuartii ATCC 25827
  CDS (1)..(252): transl_table=11
atgatgggagtcatttcttgggtcatttttggtctgattgcaggggtattggctaaatggattatgccaggcacttaccatattggttttatcatgactattgtactcggaattgttgggtctgttgtgggtggctacatcagtaccttcttcggtaaaggtaaagtagacggcttcaatttcggtagttttgttgttgcggttatcggtgcgatcgtcgtgctatttttagctgggatatttgccaaatag

SEQ ID NO: 131752 - protein, 83 aa, Providencia stuartii ATCC 25827
MMGVISWVIFGLIAGVLAKWIMPGTYHIGFIMTIVLGIVGSVVGGYISTFFGKGKVDGFNFGSFVVAVIGAIVVLFLAGIFAK

SEQ ID NO: 131753 - DNA, 288 bp, bacterium Ellin514
  CDS (1)..(288): transl_table=11
atgcacattctaggaaccataatcatcggttttattgtaggtgtgatcgcaaagttattgatgccgggacgtgatccgggtggctttgttattaccacgttattgggtattgctggcgctttcatcgctaaatacatcggtcaggccttgggttggtatcgtgagggacaaaacgcgggcttcatcgcgtctgtaataggtgcaatcatccttctggctatttatcaccttgttcgccgcggtgttagacacgacaatgtccacggtgactcacctaaaatcaggtaa

SEQ ID NO: 131754 - protein, 95 aa, bacterium Ellin514
MHILGTIIIGFIVGVIAKLLMPGRDPGGFVITTLLGIAGAFIAKYIGQALGWYREGQNAGFIASVIGAIILLAIYHLVRRGVRHDNVHGDSPKIR

SEQ ID NO: 131755 - DNA, 261 bp, Geobacter sp. M21
  CDS (1)..(261): transl_table=11
atgggaattttaacttggatcatattaggtctggtggttggtgcactcgcgaagttgttgatgcccggcgatgatccgggagggatcttcgtaacgatcctcatcggtatcgcgggggcattcctgggcggtatgataggttcgatgctcggggtaggatcgataacagggttcaacatgttgagcattgtgttggccatcgtgggcgcggttattctcctggtcctctatcgagtcatcaggaaaccgcaccgcggctaa

SEQ ID NO: 131756 - protein, 86 aa, Geobacter sp. M21
MGILTWIILGLVVGALAKLLMPGDDPGGIFVTILIGIAGAFLGGMIGSMLGVGSITGFNMLSIVLAIVGAVILLVLYRVIRKPHRG

SEQ ID NO: 131757 - DNA, 249 bp, Escherichia coli B171; identical to SEQ ID NO: 131539
  CDS (91)..(249): transl_table=11

SEQ ID NO: 131758 - protein, 52 aa, Escherichia coli B171
MTILLGIVGAVVGGWISTLFGFGKVDGFNFGSFVVAVIGAIVVLFIYRKIKS

SEQ ID NO: 131759 - DNA, 267 bp, Streptomyces sp. SPB74
  CDS (1)..(267): transl_table=11
atgggcatcatcagctggatcatccttggtctcctggcgggagcggtcgcgaagatcctcctcccgggccgtgacccgggcggcctcgtcggcacgaccctcatcggcatcgtcggcgccttcctcggtggctggatctcgtcccgcttcctggaccacccgatctcgaaggacttctacgacctgcccacctggatctccgcgatcggcggctcgctcgtcctgctcatcggctaccgcctgatcttcggcaactcgcgggactga

SEQ ID NO: 131760 - protein, 88 aa, Streptomyces sp. SPB74
MGIISWIILGLLAGAVAKILLPGRDPGGLVGTTLIGIVGAFLGGWISSRFLDHPISKDFYDLPTWISAIGGSLVLLIGYRLIFGNSRD

SEQ ID NO: 131761 - DNA, 249 bp, Enterobacter cancerogenus ATCC 35316
  CDS (1)..(249): transl_table=11
atgggaattttatcctggattatctttggtctgattgcgggtatcctggcgaagtggattatgccgggcaaagatggcggtggttttatcgtcaccgtaatactgggtattatcggcgcggtggttggcggctggatcagcaccctgttcggattcggtaaagtggacggattcaacttcggcagttttgccgtcgcggtgattggtgcgctggttgttctgtttatctacagaaaaatcaaaagctaa

SEQ ID NO: 131762 - protein, 82 aa, Enterobacter cancerogenus ATCC 35316
MGILSWIIFGLIAGILAKWIMPGKDGGGFIVTVILGIIGAVVGGWISTLFGFGKVDGFNFGSFAVAVIGALVVLFIYRKIKS

SEQ ID NO: 131763 - DNA, 255 bp, Microcoleus chthonoplastes PCC 7420
  CDS (1)..(255): transl_table=11
atgggaattttagcctggattgttttaggaattctcgctggcgcgatcgcgaaggcgatttatccaggtcaccaaggcggtggtatcctggcgacgatggcactgggaatcgttggggctttagttggaggctggattggtaacttactctttggagtcggttttacaggctttacttggtggggtttactgattgcaattgtgggcgcgatggtcgtcttgttcatctacggtctggttacgaaaaacgcataa

SEQ ID NO: 131764 - protein, 84 aa, Microcoleus chthonoplastes PCC 7420
MGILAWIVLGILAGAIAKAIYPGHQGGGILATMALGIVGALVGGWIGNLLFGVGFTGFTWWGLLIAIVGAMVVLFIYGLVTKNA

SEQ ID NO: 131765 - DNA, 255 bp, Synechococcus sp. PCC 7335
  CDS (1)..(255): transl_table=11
atgggcattcttgcttgggttattttagggttattggctggtgcgatcgctcgcgctatttaccctggccatcagggtttgggtattcttggaactatggttttaggtatcatcggtgcggttgttggtggttttattgctaacgctgtagttggcgtcggagcaggcttatctatccctggcgtcattgtcgccgtgctgggtgctatccttactttgttcatctactacgcggttacaaagcgtactgcatga

SEQ ID NO: 131766 - protein, 84 aa, Synechococcus sp. PCC 7335
MGILAWVILGLLAGAIARAIYPGHQGLGILGTMVLGIIGAVVGGFIANAVVGVGAGLSIPGVIVAVLGAILTLFIYYAVTKRTA

SEQ ID NO: 131767 - DNA, 249 bp, Providencia rustigianii DSM 4541
  CDS (1)..(249): transl_table=11
atgggagttattgcttggatcgtgtttggtttaatcgccggtgttttagcgaaatggcttatgccaggaacctatcagatgggttttatcatgacgacagtattagggatcgtcggtgcggttgttggggggtacattagtactttctttggcaaaggtaaggtcgatggctttaattttggtagttttattgtcgcagttattggcgcaatagtggtgctatttttagccggaatgtttatcaaatag

SEQ ID NO: 131768 - protein, 82 aa, Providencia rustigianii DSM 4541
MGVIAWIVFGLIAGVLAKWLMPGTYQMGFIMTTVLGIVGAVVGGYISTFFGKGKVDGFNFGSFIVAVIGAIVVLFLAGMFIK

SEQ ID NO: 131769 - DNA, 249 bp, Providencia alcalifaciens DSM 30120
  CDS (1)..(249): transl_table=11
atgggcgttattgcttggattatctttggtttaatcgcgggtgttttagctaaatggctgatgcctggaacctatcaaatgggtttcattatgaccacggttctggggatcgtaggggccgttgttgggggatatatcagcacattctttggtaaaggtaaggtagatggatttaattttggcagctttattgtcgccgttattggtgccatcgtcgtactattccttgcagggatgtttatcaagtag

SEQ ID NO: 131770 - protein, 82 aa, Providencia alcalifaciens DSM 30120
MGVIAWIIFGLIAGVLAKWLMPGTYQMGFIMTTVLGIVGAVVGGYISTFFGKGKVDGFNFGSFIVAVIGAIVVLFLAGMFIK

SEQ ID NO: 131771 - DNA, 252 bp, Parabacteroides johnsonii DSM 18315
  CDS (1)..(252): transl_table=11
atgggatttttatggtacattatcataggtatagcagccggttttcttgctggtaaaatcatgcggggaggtggcttcggagtaataatcaatctgattttgggaatagtcggcggtgtattgggcggctgggtattcggattgttcgggattgcggcttccggtattatcggcagcctgattacggcaacagtcggagccattctggtactatggatcgcttcgttgtttaataagcgaaatgtagattag

SEQ ID NO: 131772 - protein, 83 aa, Parabacteroides johnsonii DSM 18315
MGFLWYIIIGIAAGFLAGKIMRGGGFGVIINLILGIVGGVLGGWVFGLFGIAASGIIGSLITATVGAILVLWIASLFNKRNVD

SEQ ID NO: 131773 - DNA, 252 bp, Oryza sativa subsp. indica
  CDS (1)..(252)
atgttttccctgatcggtaccctgctcgtcggcctcgtcgtcggtctgctcgcccgtgccttgaagcccggggatgacaagctaggctggatcatgacctccctgctcggggtggctggctccttcctcgccacttacgtgggtgtcgccatgggctggtaccagcagggcgaagccgcggggtggatcgcctccatcgtcggcgccatcgtgctgctggttctctacggcatgatccgcagcaagtcctga

SEQ ID NO: 131774 - protein, 83 aa, Oryza sativa subsp. indica
MFSLIGTLLVGLVVGLLARALKPGDDKLGWIMTSLLGVAGSFLATYVGVAMGWYQQGEAAGWIASIVGAIVLLVLYGMIRSKS

SEQ ID NO: 131775 - DNA, 270 bp, Nocardia farcinica
  CDS (1)..(270): transl_table=11
atgtggaacgcaatcgtccaaatcgtcggcttcctgatcatcggtgtcatcatcggattcctcgcccgcgcactgaaacccggtgccgacaaactcaatttcaagatgaccgcgctgctcggcatggcgggcgcgctgatcggcggcatcgtcgccagcctgatcggcaagggttcgatcaccgaactcaatttctggggtttcgtgttcgccgtcatcgcggcgatcgcgctgctgttcctcgcaccggtgctgcagggcaagcgctga

SEQ ID NO: 131776 - protein, 89 aa, Nocardia farcinica
MWNAIVQIVGFLIIGVIIGFLARALKPGADKLNFKMTALLGMAGALIGGIVASLIGKGSITELNFWGFVFAVIAAIALLFLAPVLQGKR

SEQ ID NO: 131777 - DNA, 276 bp, Nocardia farcinica
  CDS (1)..(276): transl_table=11
atgctcggtctcggaatcatcgggtggatcatcatcggcggtctggcgggctggatcgccagcaagatcatgaagaccgacgctcagcagggcatcctgctcaacatcgtggtcggcgtcatcggcggtctgctcggtggtttcctgctgaagctgctgggcgtcgacgtggagggcggcggcctgtggttcagcttcttcacctgcctgggcggtgcggtgatcctgctgttcctggtcggcctcgtcaccggccgacgcggcgccatgcgctga

SEQ ID NO: 131778 - protein, 91 aa, Nocardia farcinica
MLGLGIIGWIIIGGLAGWIASKIMKTDAQQGILLNIVVGVIGGLLGGFLLKLLGVDVEGGGLWFSFFTCLGGAVILLFLVGLVTGRRGAMR

SEQ ID NO: 131779 - DNA, 276 bp, Streptomyces avermitilis
  CDS (1)..(276): transl_table=11
atgggctggttgtgggcgatcatcgtcggatttgtgctgggtctgctcgccaaactgatcctgccgggcaagcagcacagcccgctctggctgaccaccatcatgggcatcatcggcgccatcgtcggcaacgcgatcgcacagggcctcggcatcgcggagaccaagggcatcgactggggccgacacggcctccagctggcggcagcggtcgtcctggtgttcctcggcgacatgctgtacatggcgatgcggggcagcaaacagcgggcctga

SEQ ID NO: 131780 - protein, 91 aa, Streptomyces avermitilis
MGWLWAIIVGFVLGLLAKLILPGKQHSPLWLTTIMGIIGAIVGNAIAQGLGIAETKGIDWGRHGLQLAAAVVLVFLGDMLYMAMRGSKQRA

SEQ ID NO: 131781 - DNA, 267 bp, Streptomyces avermitilis
  CDS (1)..(267): transl_table=11
atgggtatcgtcggctggatcattctggggctgttggcaggcgccatcgccaaattcctgctcccgggccgtgacccgggcggcttcatcggcacgaccgtcatcggtgtcgcgggggccttcatcgggggctggatatcggcacgttggctggaccacccgatcaccaagcagttctacgacggcgccacctgggcggcggcgatcggcggctcgctggtcctgctgatcatctaccgcctcctgttcggagactcacgccgctga

SEQ ID NO: 131782 - protein, 88 aa, Streptomyces avermitilis
MGIVGWIILGLLAGAIAKFLLPGRDPGGFIGTTVIGVAGAFIGGWISARWLDHPITKQFYDGATWAAAIGGSLVLLIIYRLLFGDSRR

SEQ ID NO: 131783 - DNA, 282 bp, Streptomyces avermitilis
  CDS (1)..(282): transl_table=11
atggtgggaattctcgcctggattctgattggtttgctggccggcgccattgccaagctgctcctcccgggcaaggacccgggcggcatcatcgtgaccatgctgatcggcatcgccggtggtctgctgggtggctggctgggcaaggtcatcttcaaggtcgactcgatcgacggcttcttcgacctgtcgacgtggatcgccgccatcgtcggctcgctcatcctgctcctgctctaccgggccgtcacgggcaaccggcgctcgcacaggcacgcgtag

SEQ ID NO: 131784 - protein, 93 aa, Streptomyces avermitilis
MVGILAWILIGLLAGAIAKLLLPGKDPGGIIVTMLIGIAGGLLGGWLGKVIFKVDSIDGFFDLSTWIAAIVGSLILLLLYRAVTGNRRSHRHA

SEQ ID NO: 131785 - DNA, 246 bp, Bradyrhizobium japonicum
  CDS (1)..(246): transl_table=11
atgggaattctcgcagcactcatcatcggcgcgatcgccggctggctcgccggcaagattgtccacggggcgggatttgggctgatcggcaacatggtcgtcggcatcatcggcgcgctggttgcgggctgggtgctgcctcagctgcacatccagctcgccaccggcacggtcggcgccatcgtggatgccaccatcggcgcggtgattgtgctcgtcatcctttcgctgataaaacgggtctga

SEQ ID NO: 131786 - protein, 81 aa, Bradyrhizobium japonicum
MGILAALIIGAIAGWLAGKIVHGAGFGLIGNMVVGIIGALVAGWVLPQLHIQLATGTVGAIVDATIGAVIVLVILSLIKRV

SEQ ID NO: 131787 - DNA, 270 bp, Bradyrhizobium japonicum
  CDS (1)..(270): transl_table=11
atggacatgagcatcctttggacgatcatcatcggatttctcgtcggactggtcgcgaagttcatcatgcccggcgataagtccgagcccaaagggttcattttgaccacggtcctgggaattgtcggcgcgttcgttgcgacctggctcggccaggccgtgggatggtaccggttcggggagggcgccggcttcatcggaagcgtggtcggtgccatcatcctcctgtttctgtacggccttttcatgagtcgtcaggggcgcgcctga

SEQ ID NO: 131788 - protein, 89 aa, Bradyrhizobium japonicum
MDMSILWTIIIGFLVGLVAKFIMPGDKSEPKGFILTTVLGIVGAFVATWLGQAVGWYRFGEGAGFIGSVVGAIILLFLYGLFMSRQGRA

SEQ ID NO: 131789 - DNA, 267 bp, Bradyrhizobium japonicum
  CDS (1)..(267): transl_table=11
atgggcggcctgttgtggatcatcgtcgtcggcttcatcgccggtctcatcgcgcgctggctcgcgccggggccgaacaatccgagcggcttcatcctcaccaccatcctcggcatcgccggtgcgtttctggcgacgttcgtcggccaggcgatcgggcactacggcgcggaccagggcgccggcttcatcatggccacgatcggcgcggtggtggtgctgttcatctggcaccggctggtggcgagcggcgtgatcaaggggtag

SEQ ID NO: 131790 - protein, 88 aa, Bradyrhizobium japonicum
MGGLLWIIVVGFIAGLIARWLAPGPNNPSGFILTTILGIAGAFLATFVGQAIGHYGADQGAGFIMATIGAVVVLFIWHRLVASGVIKG

SEQ ID NO: 131791 - DNA, 255 bp, Rhizobium meliloti
  CDS (1)..(255): transl_table=11
atgggcattgaaagcattctggtattcctgatcgtcggcgcggttgcaggctggcttgccggtttgatcgtcagcggaggcggcttcggtctgctcgggaatatcgtgatcggcatcgtcggcgccttcatcgctggccttctcttcccggccatcgggatcagcatcggcaccggcatcttttctgccattattcactcgacgatcggcgccgtgatccttctggtgctgattcgcgtcgtcaaacaggcctga

SEQ ID NO: 131792 - protein, 84 aa, Rhizobium meliloti
MGIESILVFLIVGAVAGWLAGLIVSGGGFGLLGNIVIGIVGAFIAGLLFPAIGISIGTGIFSAIIHSTIGAVILLVLIRVVKQA

SEQ ID NO: 131793 - DNA, 252 bp, Rhizobium meliloti
  CDS (1)..(252): transl_table=11
atgggtataatctggaccattattattggctttgtcgccggtatcgtggcgaagctcatcgtgcccggcgaaaacgagccgaaaggcttcgtcctgacgacgatcctgggcattgtgggcgctttcgtcgcgtcatatctggggcaggcattggggtggtacaacgccaacgagggcgccgggttcatcggagccatcgtcggtgccgtgatcgttttgcttctatggggcgccgtcgcccggcgcgcttaa

SEQ ID NO: 131794 - protein, 83 aa, Rhizobium meliloti
MGIIWTIIIGFVAGIVAKLIVPGENEPKGFVLTTILGIVGAFVASYLGQALGWYNANEGAGFIGAIVGAVIVLLLWGAVARRA

SEQ ID NO: 131795 - DNA, 25 bp, Artificial sequence
  primer
atgggcattctgtcatggattattt

SEQ ID NO: 131796 - DNA, 24 bp, Artificial sequence
  primer
ttaacttttaatcttcctgtagat

SEQ ID NO: 131797 - protein, 90 aa, Artificial sequence
  consensus sequence
  Variant (2)..(6): Xaa in position 2 to 6 is any amino acid
  Variant (7)..(12): Xaa in position 7 to 12 is any or no amino acid
  Variant (14)..(15): Xaa in position 14 to 15 is any amino acid
  Variant (17)..(18): Xaa in position 17 to 18 is any amino acid
  Variant (21)..(22): Xaa in position 21 to 22 is any amino acid
  Variant (24)..(28): Xaa in position 24 to 28 is any amino acid
  Variant (30)..(31): Xaa in position 30 to 31 is any amino acid
  Variant (32)..(35): Xaa in position 32 to 35 is any or no amino acid
  Variant (37)..(40): Xaa in position 37 to 40 is any amino acid
  Variant (41)..(42): Xaa in position 41 to 42 is any or no amino acid
  Variant (45)..(46): Xaa in position 45 to 46 is any amino acid
  Variant (49)..(51): Xaa in position 49 to 51 is any amino acid
  Variant (53)..(74): Xaa in position 53 to 74 is any amino acid
  Variant (75)..(84): Xaa in position 75 to 84 is any or no amino acid
  Variant (87)..(89): Xaa in position 87 to 89 is any amino acid
MXXXXXXXXXXXIXXGXXAGXXAXXXXXGXXXXXXGXXXXXXLGXXGAXXXGXXXXXXXXXXXXXXXXXXXXXXXXXXXXXXXXGAXXXL

SEQ ID NO: 131798 - protein, 17 aa, Artificial sequence
  protein pattern
  Variant (2)..(6): Xaa in position 2 to 6 is any amino acid
  Variant (7)..(7): Xaa in position 7 is any or no amino acid
  Variant (9)..(9): Xaa in position 9 is any or no amino acid
  Variant (11)..(11): Xaa in position 11 is Ile, Met or Val
  Variant (12)..(12): Xaa in position 12 is Ala, Gly, Ile, Leu or Val
  Variant (14)..(14): Xaa in position 14 is Ala, Gly or Ser
  Variant (15)..(15): Xaa in position 15 is any amino acid
  Variant (16)..(16): Xaa in position 16 is Ala, Ile, Leu or Val
  Variant (17)..(17): Xaa in position 17 is Ala or Gly
GXXXXXXLXGXXGXXXX

SEQ ID NO: 131799 - DNA, 480 bp, Escherichia coli
  CDS (1)..(480): transl_table=11
atgttcacgattaaaacagatgatctcacccatccagcagtgcaagcattagtggcttaccatatttccggcatgctgcagcagtctccccccgaaagcagtcatgctttagatgtgcaaaaattacgtaacccgacagtgacattctggtcagtatgggaaggcgaacaactcgcaggaattggtgcgctgaagttgctggatgataaacacggcgagctgaaatcaatgcgtaccgcgccaaattatttacgtcgtggtgtcgccagtctgattttacgccacattttgcaggtcgcccaggacagatgccttcatcgcctgagcttagaaacgggtacacaggctggatttacggcctgccatcaactttatttgaagcatggtttcgctgattgcgaaccgtttgctgattatcgacttgatccacacagtcgatttttatcattgacgctatgcgaaaataatgaattgccataa

SEQ ID NO: 131800 - protein, 159 aa, Escherichia coli
MFTIKTDDLTHPAVQALVAYHISGMLQQSPPESSHALDVQKLRNPTVTFWSVWEGEQLAGIGALKLLDDKHGELKSMRTAPNYLRRGVASLILRHILQVAQDRCLHRLSLETGTQAGFTACHQLYLKHGFADCEPFADYRLDPHSRFLSLTLCENNELP

SEQ ID NO: 131801 - DNA, 456 bp, Bacillus halodurans C-125
  CDS (1)..(456): transl_table=11
atgaaaataaaaattgatgatttgcgtagtaatcaagtagtcgaactcataagggaacatcttcacggtatgacgctacactccccgccagaaagtatccatgcgctagatttaagttcgcttcaacaacctgaaatcacggtttggagtgtatgggagggggaagacttggctggcattggtgccttgaaacagcttgatgatcatcacggtgagatcaaatcgatgcgaacatcgaaggcatatttaagaaaaggagtagcgaaaagactcttaaatcatctcattgaagaagcaaacagccgtggctacaaacagattagtttagagaccggttcaatggaagcttttgagcctgctaggaaattgtatgaagcattcggtttccagtattgtgagccgtttgccgattatacggaagacccgaatagtttgtatatgacaaaggcattatag

SEQ ID NO: 131802 - protein, 151 aa, Bacillus halodurans C-125
MKIKIDDLRSNQVVELIREHLHGMTLHSPPESIHALDLSSLQQPEITVWSVWEGEDLAGIGALKQLDDHHGEIKSMRTSKAYLRKGVAKRLLNHLIEEANSRGYKQISLETGSMEAFEPARKLYEAFGFQYCEPFADYTEDPNSLYMTKAL

SEQ ID NO: 131803 - DNA, 480 bp, Escherichia coli O157:H7 EDL933
  CDS (1)..(480): transl_table=11
atgttcacgattaaaacagatgatctcacccatccagcagtgcaagcattagtggcttaccatatttccggcatgctgcagcagtctccccctgaaagcagtcatgctttagacgtgcaaaaattacgtaacccgacagtgacattctggtcagtatgggaaggcgaacaactcgcaggaattggtgcgctgaagttgctggatgataaacatggcgaactgaaatcaatgcggaccgcgccaaattatttacgtcggggtgtcgccagtctgattttacgccacattttgcaggtcgcccatgacagatgccttcatcgcctgagtttagaaacgggtacacaggctggatttacggcctgccatcaactttatttgaagcatggtttcgttgattgcgaaccgtttgccgattatcaacttgatccacacagtcgatttttgtcattgacgctatgcgaagataatgagttgctttga

SEQ ID NO: 131804 - protein, 159 aa, Escherichia coli O157:H7 EDL933
MFTIKTDDLTHPAVQALVAYHISGMLQQSPPESSHALDVQKLRNPTVTFWSVWEGEQLAGIGALKLLDDKHGELKSMRTAPNYLRRGVASLILRHILQVAHDRCLHRLSLETGTQAGFTACHQLYLKHGFVDCEPFADYQLDPHSRFLSLTLCEDNELL

SEQ ID NO: 131805 - DNA, 456 bp, Bacillus subtilis subsp. subtilis str. 168
  CDS (1)..(456): transl_table=11
ttgcatataaaaatagacgatttaactggacgtcaggtggtttcactggtgaatgagcatttacatagcatgacgcttatgtccccgccagaaagcattcatgccttaggtctagaaaaactaagagggcctgaaataacattttggagcgcatgggaaggtgatgaactagctggctgcggagcgctaaaagaactggacacccggcatggagaaatcaaatcaatgcgaacatctgcatcacatttaagaaaaggcgttgccaaacaagttctccagcacatcattgaagaagccgagaagcgaggctatgagcggttaagcttagaaacgggttcaatggcttcatttgagccggcaagaaaattgtatgaaagcttcggtttccagtattgtgaaccgtttgcagactacggtgaagatccaaacagtgtgtttatgacgaagaaattgtga

SEQ ID NO: 131806 - protein, 151 aa, Bacillus subtilis subsp. subtilis str. 168
MHIKIDDLTGRQVVSLVNEHLHSMTLMSPPESIHALGLEKLRGPEITFWSAWEGDELAGCGALKELDTRHGEIKSMRTSASHLRKGVAKQVLQHIIEEAEKRGYERLSLETGSMASFEPARKLYESFGFQYCEPFADYGEDPNSVFMTKKL

SEQ ID NO: 131807 - DNA, 471 bp, Caulobacter crescentus CB15
  CDS (1)..(471): transl_table=11
atgcccaagccgcagcttcgcatcatcgccggcgatttcgaggatcctcgcatcatcgccctgctggcccaccacttcgcaaccatgcgctccaccggcccggaagagagctgtcacgtgatgccgctgggcaccatgcgtcaggctgatctcgactttttcgccgcctgggacggcgacgccctggcggggttcggcgcggtcaagcagctgggcgacggccacggcgagatcaagtccatgcacaccgccgcagcgtatcgaggccggggcgtcggccaagccgtcctggatcatctgtcgacgcacgcgcgcgccctgggcttgcagcgtctcagccttgagaccggggctggcgacttcttcgttcccgctcgcgcgatgtacgcccgcaacgggttccagacttgcgaccccttcggcgactacaagcccgatcccaacagcgtgttcatgacgcgcatgctctag

SEQ ID NO: 131808 - protein, 156 aa, Caulobacter crescentus CB15
MPKPQLRIIAGDFEDPRIIALLAHHFATMRSTGPEESCHVMPLGTMRQADLDFFAAWDGDALAGFGAVKQLGDGHGEIKSMHTAAAYRGRGVGQAVLDHLSTHARALGLQRLSLETGAGDFFVPARAMYARNGFQTCDPFGDYKPDPNSVFMTRML

SEQ ID NO: 131809 - DNA, 459 bp, Bradyrhizobium japonicum USDA 110
  CDS (1)..(459): transl_table=11
gtggaaatcaggcaggacgatccgacggccccctatgtcgcctatttgttggcgcatcatctggaagagctccgcagcgtcatgggcgagcatgcgcaggcgctggacgcgagcggtctttcggctgcgagcgtcacgttctggacggcctggcagggtgatgtgctggctggattcggggctttgaagcaattggatgagacgcacggcgaagtgaagtcgatgcgcgctgcgcccactgcgcggcgtagcggggtcggacgcgctctgctgcaccacatcattgccgagggccgcaagcgaggatatcagcaactcagtttggagacgggcacagcgccgctgcacgctcccgccatctcgctgtaccggagcgccggtttcgtatcctgcgagccgttcgctgactatcaggcgagcccgcacaaccagttcatgcgcctcgacctgtccaagtga

SEQ ID NO: 131810 - protein, 152 aa, Bradyrhizobium japonicum USDA 110
MEIRQDDPTAPYVAYLLAHHLEELRSVMGEHAQALDASGLSAASVTFWTAWQGDVLAGFGALKQLDETHGEVKSMRAAPTARRSGVGRALLHHIIAEGRKRGYQQLSLETGTAPLHAPAISLYRSAGFVSCEPFADYQASPHNQFMRLDLSK

SEQ ID NO: 131811 - DNA, 456 bp, Vibrio vulnificus YJ016
  CDS (1)..(456): transl_table=11
gtgattattaccactgacgatttacagcataaacaagtcattacgctgctcgaagaacatctgcaagacatgtatgccacctcaccagcggagagtgtccacgccctagatttaagtgcattgcaacatccggatgtgaccttttggactggctggcaaaaagaaaccttactcggttgcaccgcattgaagcgtctgacgcaccaacatggtgaactcaaatccatgcgcaccacacacgccgccagaggcaaaggggtggcctccaggcttttgcagcatttgattgagcacgccaagcagcaaggttatcagcaaatcagtttagagactggaacgatggccttttttgcccccgctcgcgccctctacgagaaatttggctttgagtattgcgcaccttttggcgactatcaggaagacccaaacagctgcttcatgacgttaacactctga

SEQ ID NO: 131812 - protein, 151 aa, Vibrio vulnificus YJ016
MIITTDDLQHKQVITLLEEHLQDMYATSPAESVHALDLSALQHPDVTFWTGWQKETLLGCTALKRLTHQHGELKSMRTTHAARGKGVASRLLQHLIEHAKQQGYQQISLETGTMAFFAPARALYEKFGFEYCAPFGDYQEDPNSCFMTLTL

SEQ ID NO: 131813 - DNA, 459 bp, Colwellia psychrerythraea 34H
  CDS (1)..(459): transl_table=11
atggaaattcgtattggttcactaacacatcctgcagtcatcgcattgttagagcaacatcatcaagatatgttattacactctccagaagaaagtgtacatgcactcgatttatctgcattagcgcaagagaacatcagcttttggtgtgtttggaaagatgatgcattagcaggttgtggtgccttaaaagagttagataatgcccatggtgaaattaaatccatgcgaacctcaccagactttttacgtcaaggcgtggcaaaattgctcgtggaatatattatcagtcaagcaactaatcgtggctatcaaaaactgagtttagaaacaggcactatggccgcctttttacccgcacaaaaactctaccaacaacttggttttcatttttgccagccctttggcaattatcaagaagatccctttagcacctttatgtcaaagagcatctgctaa

SEQ ID NO: 131814 - protein, 152 aa, Colwellia psychrerythraea 34H
MEIRIGSLTHPAVIALLEQHHQDMLLHSPEESVHALDLSALAQENISFWCVWKDDALAGCGALKELDNAHGEIKSMRTSPDFLRQGVAKLLVEYIISQATNRGYQKLSLETGTMAAFLPAQKLYQQLGFHFCQPFGNYQEDPFSTFMSKSIC

SEQ ID NO: 131815 - DNA, 465 bp, Novosphingobium aromaticivorans DSM 12444
  CDS (1)..(465): transl_table=11
atggcaaggttgcgcatcgtggaagacgatctctcgggcgaggcgatacggggcctcgtcgcgctccatcttgccgggatgcatgcgcactcgccggcctgcaaggtccacgcgttgcctgtcgaggcgctgcggcaaccgggcgtgacattctattccgcgtggatggacgatgacctcgccggaatgggcgcgctccggcagatcgacccttcgcacagcgagatcaagtcgatgcgcgtagtcccggacttcctgggcaagggcatcggcgaggcgatcctgctccaccttctggccgtcgcccgcgcgaaaggccatgctcgggtcagtctcgaaaccggcaccggcccggcattcgaacccgccctgcggctctaccgcaagcacggcttcaacaattgcgcggccttcgcggactacgtgctcgacgacttcagccagtgcctgaccttggttctatga

SEQ ID NO: 131816 - protein, 154 aa, Novosphingobium aromaticivorans DSM 12444
MARLRIVEDDLSGEAIRGLVALHLAGMHAHSPACKVHALPVEALRQPGVTFYSAWMDDDLAGMGALRQIDPSHSEIKSMRVVPDFLGKGIGEAILLHLLAVARAKGHARVSLETGTGPAFEPALRLYRKHGFNNCAAFADYVLDDFSQCLTLVL

SEQ ID NO: 131817 - DNA, 504 bp, Saccharophagus degradans 2-40
  CDS (1)..(504): transl_table=11
atgctgcaccgcaaaacaataggtgtaagtggtttaccaatggaactaacaattgaagttgacgatttatcgcggcctgcgattgcagaattactatccgatcacatgcgtgaaatgtgggaggtatctaacccagaaagctgccatacactggcgttagataagttgcgcgcaccagaagtcacattttggagtgtatggagcggcgatgagttggttggttgcggtgcaattaaaagactgaatgacacacacctagagcttaaatctatgcgtaccaagccgcagtaccaaggtaagggagtgggtgcgcagttgttgcggcatataattgcctatgccgaggatgaaggttatacacgtattagtttagaaacaggctcttcatcgtggtttgatagagcgtgtaacctgtatgagaaatttggtttcacctattgcgagcctttcggtgattatacgttagaccctaacagtttatttatgacacgtactctaccctag

SEQ ID NO: 131818 - protein, 167 aa, Saccharophagus degradans 2-40
MLHRKTIGVSGLPMELTIEVDDLSRPAIAELLSDHMREMWEVSNPESCHTLALDKLRAPEVTFWSVWSGDELVGCGAIKRLNDTHLELKSMRTKPQYQGKGVGAQLLRHIIAYAEDEGYTRISLETGSSSWFDRACNLYEKFGFTYCEPFGDYTLDPNSLFMTRTLP

SEQ ID NO: 131819 - DNA, 564 bp, Rhodococcus sp. RHA1
  CDS (1)..(564): transl_table=11
atggtgcgccgcggttcaggcagcgcggtactcgttgcgatttctcgcgcgggcttcggcatactcgacatcgttgcccggtcgaaaccgaaagtcgagagcctgcacgtgtacatcgaagtcgacgacctgtcccgcgaggccgtgcacggactgttggccgagcacctggcggacatgcgtgccacgtcgccgcccgacagtgttcacgccctcgatctgcccggcttgcgggacccgtcggtcaccgtgtggacgctctgggacgaggagacggtgctgggaaccgtggctctgcgtgagctctcgccggccgagggcgagatcaagtcgatgcggacggccaccgaggcgcgcgggcggggtgtggccagccggctcctcgcgcatctggtcgacgaggcgcgggcacgcgggtacgtccggctcaacctcgagaccggcaccgaggacttcttcgccccggccaggcgcctgtacaccgagcacggcttcaccgaatgccccccgttcgggagctacggcaacgatccgaacagcatcttcttcacactcgccctgtga

SEQ ID NO: 131820 - protein, 187 aa, Rhodococcus sp. RHA1
MVRRGSGSAVLVAISRAGFGILDIVARSKPKVESLHVYIEVDDLSREAVHGLLAEHLADMRATSPPDSVHALDLPGLRDPSVTVWTLWDEETVLGTVALRELSPAEGEIKSMRTATEARGRGVASRLLAHLVDEARARGYVRLNLETGTEDFFAPARRLYTEHGFTECPPFGSYGNDPNSIFFTLAL

SEQ ID NO: 131821 - DNA, 462 bp, Hyphomonas neptunium ATCC 15444
  CDS (1)..(462): transl_table=11
atgaccatcgacatccgcccagacgacctcaccagccccgaaatggcagagctgatcgccgttcacgcccagaccatgctggcgtcatccccgcccgagagctgccacttcctgcctattgatggcctgcgccagccctcggtcagtgtctggtcgatgtgggaggacggcgcgctgatcggctgcggcgccctgaaagagctgggcaatggcgggggcgagatcaaatccatgcacacccgcgcccatcttcgcggcaggggccttggccggttgatgctggatcatatcctgagtgtggcaaaggcgcgcggctatacagacctctggcttgaaaccggatcgatggacgccttcattccagcccgccgcctctacgaatcctacggtttctcctatagcggcccgttcggggagtatgctgaagatccaaacagcgtcttcatgcatttgcatttctga

SEQ ID NO: 131822 - protein, 153 aa, Hyphomonas neptunium ATCC 15444
MTIDIRPDDLTSPEMAELIAVHAQTMLASSPPESCHFLPIDGLRQPSVSVWSMWEDGALIGCGALKELGNGGGEIKSMHTRAHLRGRGLGRLMLDHILSVAKARGYTDLWLETGSMDAFIPARRLYESYGFSYSGPFGEYAEDPNSVFMHLHF

SEQ ID NO: 131823 - DNA, 456 bp, Shewanella sp. ANA-3
  CDS (1)..(456): transl_table=11
atgaaaataatactagatgatctaaaagggcctgaaattgcagcacttttaactgaacacctcgaggatatgcgagcaacctcgccgccggaaagtgtgcacgcattagacttggatggactgcgccaacccaatattcgcttttggacactgtgggatggccgaaatctggcgggctgcggtgcactaaaatggttagatgccgagcacgcagagatcaaatcgatgcgtaccgccgccacctacaaacaacaggggattgcttctaaggtattgcagcatttgatcaatgacgccaaagccgcaggcgtgcagcgcctcagtttagaaacgggctcaatggcctttttccagcccgcccgtaacctgtatgccaaatttggcttcgagctgtgcggcccctttgccgattacgtgctcgaccccaatagcctgtttatgaccaaaaagctctag

SEQ ID NO: 131824 - protein, 151 aa, Shewanella sp. ANA-3
MKIILDDLKGPEIAALLTEHLEDMRATSPPESVHALDLDGLRQPNIRFWTLWDGRNLAGCGALKWLDAEHAEIKSMRTAATYKQQGIASKVLQHLINDAKAAGVQRLSLETGSMAFFQPARNLYAKFGFELCGPFADYVLDPNSLFMTKKL

SEQ ID NO: 131825 - DNA, 456 bp, Vibrio sp. Ex25
  CDS (1)..(456): transl_table=11
atgagaattgaaattgacgatttagaacggccgcaggtgcttgcgttgttggaagagcatttacaggacatgtacgctacatcgccaccagagagcgtgcatgcgttagatgtaagcaagttgaagctgccttcaatcacgttttggacgggctgggatggtgagcagctattgggatgtgtggcaatgagccaactagaagatggtcacgcagagttgaaatcgatgcgtacgacgccgtcggcgagaaaacagggtgtggcatcccgcttactcaatcacgtgattgagcaagcgaaacatcaggggatacaacgtctaagtttggaaactgggtcgatggcattttttgaacccgcgcatcgcctatatgaaaaacatggcttcgcgtactgcgagccgtttggcgactatcaacctgctccaaacagccgctttatgaccctagcgttgtag

SEQ ID NO: 131826 - protein, 151 aa, Vibrio sp. Ex25
MRIEIDDLERPQVLALLEEHLQDMYATSPPESVHALDVSKLKLPSITFWTGWDGEQLLGCVAMSQLEDGHAELKSMRTTPSARKQGVASRLLNHVIEQAKHQGIQRLSLETGSMAFFEPAHRLYEKHGFAYCEPFGDYQPAPNSRFMTLAL

SEQ ID NO: 131827 - DNA, 456 bp, Alteromonadales bacterium TW-7
  CDS (1)..(456): transl_table=11
atggatattagaacagacgcgctttcaaacccacacattataaagctactacaagcgcatcataacgatatgctaaaacactcccccatagagagcatacatgcacttgatgtgactaaactcactcagcccgacataaccttttatagcttatggattgataataacttagcgggtgttggcgcattaaaagtgctcaatgccacgcatggcgaaattaaatcaatgcgcacctcaagtagctatttacgccaaggcatagcggctaagttactcacgcatattattgagcaagcaacactgcgagggtataaaaaacttagcttagaaaccggcactgctaaggcatttttacccgcacaaaagctttacgtccaatttggttttaaagagtgcgaaccgtttggtaattatgagttagacccgtatagcttgtttatgagtaaagcgctttga

SEQ ID NO: 131828 - protein, 151 aa, Alteromonadales bacterium TW-7
MDIRTDALSNPHIIKLLQAHHNDMLKHSPIESIHALDVTKLTQPDITFYSLWIDNNLAGVGALKVLNATHGEIKSMRTSSSYLRQGIAAKLLTHIIEQATLRGYKKLSLETGTAKAFLPAQKLYVQFGFKECEPFGNYELDPYSLFMSKAL

SEQ ID NO: 131829 - DNA, 477 bp, marine gamma proteobacterium HTCC2080
  CDS (1)..(477): transl_table=11
atggaaattaagcccgatgatttgtctgaccaaagggtagttgctctgctggaggaacacattgatgacatgtatcgcgcctcgccacccgagagtgtgcacactctagatttaagtgcgctgcgcagtagcgacgtcagtttttgggtgctctggcaaaacgaaacgccggtgggctgtgttgcccttcaagagcatgaaaacacctgggctgaaattaaatccatgcgcagctcaaacggtcatcggggcaagggtattggtaagcagcttctggactatgtgctgttggtcgctaaacagcgcaactatcaatatctgcggctggaaacaggctgtgaagatttttttaagcctgcacgagaaatctaccgtcgctatggctttgtccagcgcagcccattcgcagattacgcagacgatcccaacagcgtgtttatggaaaaagcgattaaccccagctttggagaaaactga

SEQ ID NO: 131830 - protein, 158 aa, marine gamma proteobacterium HTCC2080
MEIKPDDLSDQRVVALLEEHIDDMYRASPPESVHTLDLSALRSSDVSFWVLWQNETPVGCVALQEHENTWAEIKSMRSSNGHRGKGIGKQLLDYVLLVAKQRNYQYLRLETGCEDFFKPAREIYRRYGFVQRSPFADYADDPNSVFMEKAINPSFGEN

SEQ ID NO: 131831 - DNA, 522 bp, Bacillus amyloliquefaciens
  CDS (1)..(522): transl_table=11
atggcgcaggctgtgaacctttgctatggtcaaagaaaatatgcacagcaagggtggtttgaagtggacgtaaggaaagaagatgtcacagcgcaggacgtcattgtgcttttacaggatcatctgaagagcatgaccatgcattctcctccggaaagtatacatgcgctcaatgcggaccggctgcgtcagcctgacgttacgttttggagtgcgagggaaaacggcatcctgctcggctgcggtgccttaaaggagctaaacagccggcacggtgagatcaaatcaatgaaaacctctccgcatcatgtcagaaaaggcgttgccaaccggatcctccgccatatgcttgaagaagcaaggcagcggggctatcagcggatcagcttagaaaccggttctatggaggcttttctccccgccagacgcctgtatgaaaaagccgggtttcaatattgtgatccgtttgcacattataaagaggacccgaacagcttgtttatgacgttaaacataggctga

SEQ ID NO: 131832 - protein, 173 aa, Bacillus amyloliquefaciens
MAQAVNLCYGQRKYAQQGWFEVDVRKEDVTAQDVIVLLQDHLKSMTMHSPPESIHALNADRLRQPDVTFWSARENGILLGCGALKELNSRHGEIKSMKTSPHHVRKGVANRILRHMLEEARQRGYQRISLETGSMEAFLPARRLYEKAGFQYCDPFAHYKEDPNSLFMTLNIG

SEQ ID NO: 131833 - DNA, 25 bp, Artificial sequence
  primer
atgttcacgattaaaacagatgatc

SEQ ID NO: 131834 - DNA, 28 bp, Artificial sequence
  primer
ttatggcaattcattattttcgcatagc

SEQ ID NO: 131835 - protein, 144 aa, Artificial sequence
  consensus sequence
  Variant (2)..(3): Xaa in position 2 to 3 is any amino acid
  Variant (7)..(13): Xaa in position 7 to 13 is any amino acid
  Variant (15)..(17): Xaa in position 15 to 17 is any amino acid
  Variant (19)..(21): Xaa in position 19 to 21 is any amino acid
  Variant (23)..(25): Xaa in position 23 to 25 is any amino acid
  Variant (28)..(28): Xaa in position 28 is any amino acid
  Variant (31)..(31): Xaa in position 31 is any amino acid
  Variant (33)..(33): Xaa in position 33 is any amino acid
  Variant (35)..(38): Xaa in position 35 to 38 is any amino acid
  Variant (40)..(45): Xaa in position 40 to 45 is any amino acid
  Variant (48)..(49): Xaa in position 48 to 49 is any amino acid
  Variant (51)..(54): Xaa in position 51 to 54 is any amino acid
  Variant (56)..(56): Xaa in position 56 is any amino acid
  Variant (58)..(59): Xaa in position 58 to 59 is any amino acid
  Variant (62)..(63): Xaa in position 62 to 63 is any amino acid
  Variant (65)..(67): Xaa in position 65 to 67 is any amino acid
  Variant (69)..(69): Xaa in position 69 is any amino acid
  Variant (71)..(71): Xaa in position 71 is any amino acid
  Variant (77)..(83): Xaa in position 77 to 83 is any amino acid
  Variant (85)..(89): Xaa in position 85 to 89 is any amino acid
  Variant (91)..(91): Xaa in position 91 is any amino acid
  Variant (93)..(96): Xaa in position 93 to 96 is any amino acid
  Variant (98)..(100): Xaa in position 98 to 100 is any amino acid
  Variant (102)..(105): Xaa in position 102 to 105 is any amino acid
  Variant (111)..(114): Xaa in position 111 to 114 is any amino acid
  Variant (116)..(116): Xaa in position 116 is any amino acid
  Variant (119)..(120): Xaa in position 119 to 120 is any amino acid
  Variant (123)..(125): Xaa in position 123 to 125 is any amino acid
  Variant (128)..(129): Xaa in position 128 to 129 is any amino acid
  Variant (131)..(131): Xaa in position 131 is any amino acid
  Variant (134)..(135): Xaa in position 134 to 135 is any amino acid
  Variant (137)..(138): Xaa in position 137 to 138 is any amino acid
  Variant (141)..(141): Xaa in position 141 is any amino acid
  Variant (143)..(143): Xaa in position 143 is any amino acid
IXXDDLXXXXXXXLXXXHXXXMXXXSPXESXHXLXXXXLXXXXXXFWXXWXXXXLXGXXALXXLXXXHXEXKSMRTXXXXXXXGXXXXXLXHXXXXAXXXGXXXXSLETGXXXXFXPAXXLYXXXGFXXCXPFXXYXXDPXSXF

SEQ ID NO: 131836 - protein, 60 aa, Artificial sequence
  protein pattern
  Variant (2)..(2): Xaa in position 2 is any amino acid
  Variant (4)..(4): Xaa in position 4 is Ile, Leu, Met or Val
  Variant (5)..(5): Xaa in position 5 is any amino acid
  Variant (6)..(6): Xaa in position 6 is Ala, Asp, Glu, Asn, Gln, Ser or Thr
  Variant (7)..(7): Xaa in position 7 is any amino acid
  Variant (9)..(11): Xaa in position 9 to 11 is any amino acid
  Variant (12)..(12): Xaa in position 12 is Cys or Gly
  Variant (13)..(15): Xaa in position 13 to 15 is any amino acid
  Variant (16)..(16): Xaa in position 16 is Ile, Leu or Val
  Variant (17)..(17): Xaa in position 17 is any amino acid
  Variant (22)..(22): Xaa in position 22 is Ala, Ser or Thr
  Variant (23)..(25): Xaa in position 23 to 25 is any amino acid
  Variant (27)..(28): Xaa in position 27 to 28 is any amino acid
  Variant (29)..(29): Xaa in position 29 is Ala or Cys
  Variant (30)..(31): Xaa in position 30 to 31 is any amino acid
  Variant (32)..(32): Xaa in position 32 is Leu or Met
  Variant (34)..(36): Xaa in position 34 to 36 is any amino acid
  Variant (39)..(40): Xaa in position 39 to 40 is any amino acid
  Variant (41)..(41): Xaa in position 41 is Cys or Ser
  Variant (42)..(42): Xaa in position 42 is any amino acid
  Variant (43)..(43): Xaa in position 43 is Ala or Pro
  Variant (45)..(45): Xaa in position 45 is Ala or Gly
  Variant (46)..(46): Xaa in position 46 is any amino acid
  Variant (48)..(49): Xaa in position 48 to 49 is any amino acid
  Variant (50)..(50): Xaa in position 50 is Ala or Asp
  Variant (51)..(51): Xaa in position 51 is Asp or Pro
  Variant (52)..(52): Xaa in position 52 is any amino acid
  Variant (54)..(55): Xaa in position 54 to 55 is any amino acid
  Variant (56)..(56): Xaa in position 56 is Phe, Leu or Met
  Variant (57)..(59): Xaa in position 57 to 59 is any amino acid
  Variant (60)..(60): Xaa in position 60 is Phe, Ile or Leu
LXHXXXXAXXXXXXXXXLETGXXXXFXXXXXXYXXXGFXXXXXFXXYXXXXXSXXXXXXX

SEQ ID NO: 131837 - protein, 56 aa, Artificial sequence
  protein pattern
  Variant (2)..(5): Xaa in position 2 to 5 is any amino acid
  Variant (6)..(6): Xaa in position 6 is any or no amino acid
  Variant (8)..(8): Xaa in position 8 is any or no amino acid
  Variant (11)..(11): Xaa in position 11 is any amino acid
  Variant (13)..(13): Xaa in position 13 is any amino acid
  Variant (14)..(14): Xaa in position 14 is Leu or Met
  Variant (15)..(15): Xaa in position 15 is Ala, Asp, Gly, Asn or Pro
  Variant (16)..(16): Xaa in position 16 is Ala, Ile, Leu or Val
  Variant (17)..(17): Xaa in position 17 is Asp, Glu, Gly, Gln, Ser or Thr
  Variant (18)..(18): Xaa in position 18 is any amino acid
  Variant (19)..(19): Xaa in position 19 is Leu or Met
  Variant (20)..(22): Xaa in position 20 to 22 is any amino acid
  Variant (23)..(23): Xaa in position 23 is Asp, Glu, Asn, Ser or Thr
  Variant (24)..(24): Xaa in position 24 is Ile, Leu or Val
  Variant (25)..(25): Xaa in position 25 is any amino acid
  Variant (26)..(26): Xaa in position 26 is Phe or Val
  Variant (27)..(27): Xaa in position 27 is Phe, Trp or Tyr
  Variant (28)..(28): Xaa in position 28 is Ala, Cys, Ser, Thr or Val
  Variant (29)..(34): Xaa in position 29 to 34 is any amino acid
  Variant (35)..(35): Xaa in position 35 is Leu or Pro
  Variant (36)..(36): Xaa in position 36 is Ala, Ile, Leu or Val
  Variant (38)..(38): Xaa in position 38 is any amino acid
  Variant (39)..(39): Xaa in position 39 is Gly, Thr or Val
  Variant (41)..(41): Xaa in position 41 is Ile, Leu, Met or Val
  Variant (42)..(44): Xaa in position 42 to 44 is any amino acid
  Variant (45)..(45): Xaa in position 45 is Asp, Glu, Gly, Asn or Thr
  Variant (46)..(48): Xaa in position 46 to 48 is any amino acid
  Variant (49)..(49): Xaa in position 49 is Ala, Gly or Leu
  Variant (51)..(51): Xaa in position 51 is Ile or Leu
  Variant (55)..(55): Xaa in position 55 is His, Lys or Arg
  Variant (56)..(56): Xaa in position 56 is Ser or Thr
MXXXXXPXESXHXXXXXXXXXXXXXXXXXXXXXXXXGXXAXXXXXXXXXEXKSMXX

SEQ ID NO: 131838 - protein, 18 aa, Artificial sequence
  protein pattern
  Variant (2)..(3): Xaa in position 2 to 3 is any amino acid
  Variant (4)..(4): Xaa in position 4 is Asp or Gly
  Variant (5)..(5): Xaa in position 5 is Ala, Asp or Ser
  Variant (7)..(10): Xaa in position 7 to 10 is any amino acid
  Variant (11)..(11): Xaa in position 11 is Ile, Met or Val
  Variant (12)..(13): Xaa in position 12 to 13 is any amino acid
  Variant (15)..(15): Xaa in position 15 is Ile, Leu or Val
  Variant (16)..(17): Xaa in position 16 to 17 is any amino acid
IXXXXLXXXXXXXLXXXH

SEQ ID NO: 131839 - DNA, 1278 bp, Escherichia coli
  CDS (1)..(1278): transl_table=11
atggacgttacgccgctgatgcgcgttgatggtttcgccatgctttacaccgggctggtattgttggcgagcctcgccacctgtactttcgcctacccgtggcttgaaggctataacgacaacaaggatgagttctacctgttggtgttaattgccgcgctgggcgggatcctgctggcgaatgccaaccatctggcgtctctgttcctcggtatcgaactgatctctttgccgctgtttggcctggtcggttacgctttccgccagaaacgttcactggaagccagtatcaaatacaccatcctttctgccgcagcgtcttctttcctgctgtttggtatggcgctggtgtatgcgcagtctggcgacctgtcgtttgtcgcgttgggtaaaaaccttggcgacggtatgctcaacgagccgctgttgctggcaggtttcggcctgatgattgttggcctcggcttcaaactctctctggtgccgttccacctgtggacgccagacgtataccagggcgcgcctgcgccggtttccactttcctggcgacggcgagcaaaatcgctatcttcggtgtggtgatgcgtctgttcctctacgcaccggtgggtgacagcgaagcgattcgcgtggtgctggcgattatcgcctttgcctccatcatcttcggtaacctgatggcgctgagccagaccaatatcaaacgtctgctcggttactcatctatctctcacctcggctatctgctggtagcgctgattgcgctgcaaaccggcgagatgtcgatggaagcggtaggggtttacctggccggttatctgttcagcagcctcggcgcgttcggcgtggtcagcctgatgtccagcccgtatcgtggcccggatgctgattccctgttctcttaccgcggtctgttctggcatcgtccgatcctcgcggcagtgatgacggtgatgatgctgtctctggccggtatcccgatgacgctgggctttatcggtaagttctacgtgctggcggtcggtgtccaggcacacttgtggtggctggtgggtgccgtggttgtcggttcggcaatcggcctctactactacctgcgcgtggcggtgagcctgtatcttcacgccccggaacaaccgggtcgcgatgcaccatcaaactggcagtacagcgcgggcggtatcgttgtgctgatctctgcactgttggtactggtgctgggtgtatggccacaaccgctgattagcattgtgcgtttggcaatgccgctgatgtaa

SEQ ID NO: 131840 - protein, 425 aa, Escherichia coli
MDVTPLMRVDGFAMLYTGLVLLASLATCTFAYPWLEGYNDNKDEFYLLVLIAALGGILLANANHLASLFLGIELISLPLFGLVGYAFRQKRSLEASIKYTILSAAASSFLLFGMALVYAQSGDLSFVALGKNLGDGMLNEPLLLAGFGLMIVGLGFKLSLVPFHLWTPDVYQGAPAPVSTFLATASKIAIFGVVMRLFLYAPVGDSEAIRVVLAIIAFASIIFGNLMALSQTNIKRLLGYSSISHLGYLLVALIALQTGEMSMEAVGVYLAGYLFSSLGAFGVVSLMSSPYRGPDADSLFSYRGLFWHRPILAAVMTVMMLSLAGIPMTLGFIGKFYVLAVGVQAHLWWLVGAVVVGSAIGLYYYLRVAVSLYLHAPEQPGRDAPSNWQYSAGGIVVLISALLVLVLGVWPQPLISIVRLAMPLM

SEQ ID NO: 131841 - DNA, 1428 bp, Bradyrhizobium sp. ORS278
  CDS (1)..(1428): transl_table=11
atgatcgagaatcttgggcctcagctttgggtggtgctgccggagctgctgctggccttgggggccatggcgctgttgatgctgggcgcgtttcgcggccaggggacgacggggatcgtcaccggcctcgcggtcgtgctgctgatcgtggtcggcatcctggtgctgaggcagccggccgggcaggcgttcggcggcagcttcatcgccgacagctatgcgcgctttctgaagatcctggcgatcatcggctcgatcggcacgctggtgatgtcggcggagtttctctccaagccggaccgccgcatcttcgaatatgcgatcctggtgctgctctcgaccttgggcatgctggtcctgatctcggccggcgatctgatcgcgctctatctcggcctcgagctgatgtcgctcgcgctttacgtcgtcgccgccagccatcgcgacaacgtcaagtcgaccgaggccggcctgaagtacttcgtgctcggcgcgctttcgtccggcatgctcctctacggcgcctcgctggtctacggcttcaccggcacggtgagctttgccggaattgccgcggcgaccaagaccggcagcgtcggcgtgatcttcggcctcgtcttcctgttcgccggcatgtgcttcaaggtctcggccgtgccgttccacatgtggacgccggacgtctatgaaggcgcgccgacgccggtgacggcgttcttcgcctcggcaccgaaggtcgccgcgatcgccgtgttcgcgcgcgtcgcgctcaccgcgttcccgggcatcaccttccagtggcagcagatcatcgtgttcgtttcgatcgcctcgatggcgctcggctcgttcgccgcgatcggccagaccaacatcaagcggctgatggcctactcgtcgatcggccacatgggcttcgcgctggtcggcctcgccgccggcacggtggaaggcgcgcagggcgtgctgacctatatcgcgatctatgtcgcgatgacgctgggctcattcgcggtgatcatggcgatcaagcgcaacggccagtcgttcgagaagatcagcgacttcgccggtctgtcccgcaccaacccgctgctggccttcttcttcgcaatgctcttgttctcgctggccggcgtcccgccactcgcgggcttcttcgccaaatggtacgtcttcgtcgccgcgatcaagggcggtctgttcacgctgtcggtgatcggcgtgctgaccagcgtcgtcggcgcctactattatctgctcatcgtcaagacgatgtatttcgaccagccgctgccgacggtcgatccggtccggatcgagctgcgcaccgtgctcgcgatctccggcatcttcaacatcctgttcttcgcctatcccggcccgctggtcagcgccgctgcggccgcggcgaagtcgctgttctag

SEQ ID NO: 131842 - protein, 475 aa, Bradyrhizobium sp. ORS278
MIENLGPQLWVVLPELLLALGAMALLMLGAFRGQGTTGIVTGLAVVLLIVVGILVLRQPAGQAFGGSFIADSYARFLKILAIIGSIGTLVMSAEFLSKPDRRIFEYAILVLLSTLGMLVLISAGDLIALYLGLELMSLALYVVAASHRDNVKSTEAGLKYFVLGALSSGMLLYGASLVYGFTGTVSFAGIAAATKTGSVGVIFGLVFLFAGMCFKVSAVPFHMWTPDVYEGAPTPVTAFFASAPKVAAIAVFARVALTAFPGITFQWQQIIVFVSIASMALGSFAAIGQTNIKRLMAYSSIGHMGFALVGLAAGTVEGAQGVLTYIAIYVAMTLGSFAVIMAIKRNGQSFEKISDFAGLSRTNPLLAFFFAMLLFSLAGVPPLAGFFAKWYVFVAAIKGGLFTLSVIGVLTSVVGAYYYLLIVKTMYFDQPLPTVDPVRIELRTVLAISGIFNILFFAYPGPLVSAAAAAAKSLF

SEQ ID NO: 131843 - DNA, 1056 bp, Arbacia lixula
  CDS (1)..(1056): transl_table=9
atgtatcgggtaaacctcatattcttatttacaacagtcgtatctgggaccaatatcgttattttttcacaaaaatgatttgtaatttgagttgggctagagttaagaacacttgctcttgttccgattttgatttccaactttttctcacgaaaagtagaagcaaccataaagtacttcctaattcaagcttttagagctctcctattaaaaagagctttaatccaagcatgattaactggttcttggtcagtcccacgaccagtgcaaagactctcatttattttaatggccattgcccttgcgtttaagttagggttagcaccatgtcacttttggtttccagatgttctccaagggctaccatttctacaaggtcttatagttgcgtcctgacagaagatagcccctcttattatcttcttttgcatatcccaactatctttttcataccttattataacagatgcacttatttctaccctgattgggtgctgaggaggcttaaaccagactcaaactcggaagatccttgccttttcttctattggaaaaatgggctggatagttctaacttctgtttattcccttaatgctgctgtaattatgatgttagtttatttaaccataacaacttctatttttatgatatttaacttattaaatatttcgacactagggcacttaaactctgccacaagaatgtctcctattagagcccttattatagtgctctctattttgtctctaggtggcttacccccattagcagggtttactataaagttttattccctactctctttaataaatagaggatttatgctattttcaatagtcttgatagttagtagcctactaagcttatttttttatcttcgaatatcatttaaagctagattaattttgtttccccaacacattatgaacataacttcttgacgaaactcaaggtccgttgcctctctttcattaaaaacttgattcatttcaacactttttgtaataggagcattttcaacccctataattttatctctacatatgaccttataa

SEQ ID NO: 131844 - protein, 351 aa, Arbacia lixula
MYRVNLIFLFTTVVSGTNIVIFSQNWFVIWVGLELSTLALVPILISNFFSRNVEATIKYFLIQAFSALLLNSALIQAWLTGSWSVPRPVQSLSFILMAIALAFKLGLAPCHFWFPDVLQGLPFLQGLIVASWQKIAPLIIFFCISQLSFSYLIITDALISTLIGCWGGLNQTQTRKILAFSSIGNMGWIVLTSVYSLNAAVIMMLVYLTITTSIFMIFNLLNISTLGHLNSATSMSPISALIIVLSILSLGGLPPLAGFTIKFYSLLSLINSGFMLFSIVLIVSSLLSLFFYLRISFNASLILFPQHIMNITSWRNSSSVASLSLNTWFISTLFVIGAFSTPIILSLHMTL

SEQ ID NO: 131845 - DNA, 1017 bp, Katharina tunicata
  CDS (1)..(1017): transl_table=5
  misc_feature (283)..(283): n is a, g, c or t
  misc_feature (284)..(284): n is a, g, c or t
  misc_feature (574)..(574): n is a, g, c or t
  misc_feature (575)..(575): n is a, g, c or t
  misc_feature (576)..(576): n is a, g, c or t
gtgttaaattttccttttgttggcttatttatttttattttattttttggtactttattttctttatcctctattcattgattcggggtttggcttggcttagaattaaatttaataggttttatccctgttatagtccaaaaaagtactagtgaagaaactgagtctggtgttaagtattttttggttcaagctgttggctcagctttgtttttgtttggattgatgttgataaattgaaacttttgttgttgagagttaaatttttttagaggtttttcgnncagaggtttaattttttttggtttgctgataaaacttggggcagcaccatttcatttttgggttcctagggttgtagctgggctatcatgaatatctaattttttgttattaacagttcaaaaaattgctccattgtttatggtttgttggtatttaaatttatctagatttttgttgttaatcttagtatttttatcttctttatttggaggagtcggaggggttaatcagacttcagtacgggcattaattgcttactcgtctattttgcacataggatggatgcttnnnggggctagagcgggatggagcagtatttttttttacttttttttttactgttttattttaggttttattgcttatttaatggggctagatgagagatttaatatgagttgttttagaagagtgtatgtgtgaaattcttattcgcgtaattttttagtttttatattattgtctttagggggcttgccccctttacttggcttttttggtaagtggttagtgttagttagattgttatctttagggaatttagttttaagaattattttagtttgtgggtctataattagattatattattatttagtgcttagtttttcattacttttaagcaaagggaggtgaagaagcggagcattggtatctaagaatttaatgtggtttggcggagctataaatttgagggggttaggtgttttattgtggttaagtactttttag

SEQ ID NO: 131846 - protein, 338 aa, Katharina tunicata
  misc_feature (95)..(95): The Xaa at location 95 stands for Ala, Arg, Asn, Asp, Cys, Gly, His, Ile, Leu, Phe, Pro, Ser, Thr, Tyr, or Val.
  misc_feature (192)..(192): The Xaa at location 192 stands for Stop, Ala, Arg, Asn, Asp, Cys, Gln, Glu, Gly, His, Ile, Leu, Lys, Met, Phe, Pro, Ser, Thr, Trp, Tyr, or Val.
MLNFPFVGLFIFILFFGTLFSLSSIHWFGVWLGLELNLMGFIPVMVQKSTSEETESGVKYFLVQAVGSALFLFGLMLMNWNFCCWELNFFSGFSXSGLIFFGLLMKLGAAPFHFWVPSVVAGLSWMSNFLLLTVQKIAPLFMVCWYLNLSSFLLLILVFLSSLFGGVGGVNQTSVRALIAYSSILHMGWMLXGASAGWSSIFFYFFFYCFILGFIAYLMGLDESFNMSCFSSVYVWNSYSRNFLVFMLLSLGGLPPLLGFFGKWLVLVSLLSLGNLVLSIILVCGSMISLYYYLVLSFSLLLSKGSWSSGALVSKNLMWFGGAMNLSGLGVLLWLSTF

SEQ ID NO: 131847 - DNA, 1050 bp, Balanoglossus carnosus
  CDS (1)..(1050): transl_table=9
atgaaccctatcgttttttccctcctctctctcacagttatagcagggacactcctcgttcttacagcatcaaactgattttttatttggctgggactagaaatcaacaccctagccttccttcctttattaatctcaacccatcaccctcgtgccacagaggctaccacaaagtactttctcattcaggcactagcctcagccctcctgctattcggaggcctcctccaagcatctcaatttaactcatgaaataccgacactcaacttctgcctgccacaactattctcctcattgccgcagtaacacttaagatggccattgcaccctgtcatggctgacttccagacgtcttacagggcctccctttccgaatcggacttatcctttcaacttggcaaaagatcgccccgttctccatccttcttttactcccgacccaaccaacatgagttttcttcacactaggccttctctcagtcataatagggggctgaggtggcctcaaccaaactcatattcgaaagctccttgcttactcatccatagcccatcttggatgaatcatcactatttaccctctctcctcacaaattagaaccctcactcttgtactttactttttcttaaccggcacactattccttgcactccactttctcaacacaccaagccttgccgacttaggcaacatagttaatctagccccctggcttacaactcttaccttattcactacactttcactaggcggcctccctccccttacagggttcttaagcaagtgactaattcttcaagaactctccctcaacaccaacctggtaatagcaactacacttattatggccagccttattagccttttcttttatctccgcatcacttatatcatactcctcacactctcccctcaacacactacaatctctttgacatgacgaaccgcccagagagcaagactggctaatatcctgttggccgctcttctaactattagaattgccgggctcgcactacccccatcctggctacctttatttttctaa

SEQ ID NO: 131848 - protein, 349 aa, Balanoglossus carnosus
MNPIVFSLLSLTVIAGTLLVLTASNWFFIWLGLEINTLAFLPLLISTHHPRATEATTKYFLIQALASALLLFGGLLQASQFNSWNTDTQLLPATTILLIAAVTLKMAIAPCHGWLPDVLQGLPFRIGLILSTWQKIAPFSILLLLPTQPTWVFFTLGLLSVIIGGWGGLNQTHIRKLLAYSSIAHLGWIITIYPLSSQISTLTLVLYFFLTGTLFLALHFLNTPSLADLGNIVNLAPWLTTLTLFTTLSLGGLPPLTGFLSKWLILQELSLNTNLVIATTLIMASLISLFFYLRITYIILLTLSPQHTTISLTWRTAQSASLANILLAALLTISIAGLALPPSWLPLFF

SEQ ID NO: 131849 - DNA, 1341 bp, Ceratitis capitata
  CDS (1)..(1341): transl_table=5
atgttaaaattaattttaataataatttttattagtcctatttgttttatacaaggtttattttgaatggttcataatttattatttgttattacatttgttttaattttaataaatttttgcttaaattattttgttaatatttcttattttataggatttgatgttttatcttatggattaattttattaagattttgaatttgttcattaataattgttgctagagaatctgttaataaatataataactataagaatttgtttttatttaatgttttaatacttttaatttttttagttttaacatttagaagaataaatttatttatattttatttattttttgaaagaagattaattcctacattatttttaattttagggtgaggatatcaacctgagcgattacaagctggagtttatttattattttatactttattagtttctttacctttattagtaggtattttttatttatataaaaattgtaatacaataaatttttatttgttatcaaattatatatttaattataatttgttatacttagcaataattttagcttttttagttaaaatacctatattcttagttcatttatgattaccaaaagctcatgtagaagctcctgtatctgggtcaataattttagctggaattatgttgaaattaggaggatatggattattacgagtttttagatttttgcaattgattggattaaaatataattatatttgagtgagaattagattaattgggggtgttttaattagtttagtttgtttgcgtcaaactgatttaaaggcattaattgcttattcttctgtagctcatataggaattgtattaggtggattaatgacattaagatattgaggtttaagtggttcttatactttaataattggtcatggattatgttcttctggtttattttgtttagctaatattacttatgagcgattaggaagtcggagtttattaattaataaggggttattaaattttataccttctataacattgtggtggtttttgttaagtgtttgtaatatagcagcacctccatcattaaatttattaggagaaatttctttattaaatagaattgttagatgatcttgattaactataatttctttatcttttctttctttttttagagctgcttatactttatatttatatgcttatagacaacatggaaaaattttttcaggtgtttattcatttagtgggggaaatattcgagagtattttttattatttcttcattgatttcctttaaatttattaattttgaaaagagaagtttgtttattttgaatttaa

SEQ ID NO: 131850 - protein, 446 aa, Ceratitis capitata
MLKLILMMIFISPICFMQGLFWMVHNLLFVITFVLILMNFCLNYFVNISYFMGFDVLSYGLILLSFWICSLMIVASESVNKYNNYKNLFLFNVLMLLIFLVLTFSSMNLFMFYLFFESSLIPTLFLILGWGYQPERLQAGVYLLFYTLLVSLPLLVGIFYLYKNCNTMNFYLLSNYMFNYNLLYLAMILAFLVKMPMFLVHLWLPKAHVEAPVSGSMILAGIMLKLGGYGLLRVFSFLQLIGLKYNYIWVSISLIGGVLISLVCLRQTDLKALIAYSSVAHMGIVLGGLMTLSYWGLSGSYTLMIGHGLCSSGLFCLANITYERLGSRSLLINKGLLNFMPSMTLWWFLLSVCNMAAPPSLNLLGEISLLNSIVSWSWLTMISLSFLSFFSAAYTLYLYAYSQHGKIFSGVYSFSGGNIREYFLLFLHWFPLNLLILKSEVCLFWI

SEQ ID NO: 131851 - DNA, 1533 bp, Zea mays
  CDS (1)..(1533): transl_table=11
atgatctggcatgtacagaatgaaaacttcattctcgattctacgagaatttttatgaaagcgtttcatttgcttctcttccatggaagtttcattttcccagaatgtatcctaatttttggcctaattcttcttctgatgatcgatttaacctctgatcaaaaagatagaccttggttctatttcatctcttcaacaagtttagtaataagcataacggccctattgttccgatggagagaagaacctataattagcttttcgggaaatttccaaacgaacaatttcaacgaaatctttcaatttcttattttattatgttcaactttatgtattcctctatccgtagagtacattgaatgtacagaaatggctataacagagtttctgttattcgtattaacagctactctagggggaatgtttttatgtggtgctaacgatttaataactatctttgtagctccagaatgtttcagtttatgttcctacctattgtctggatataccaagagagatctacggtctaatgaggctactatgaaatatttactcatgggtggggcaagctcttctattctggttcatggtttctcttggctatatggttcatctgggggggagatcgagcttcaagaaattgtgaatggtcttatcaatacacaaatgtataactccccaggaatttcaattgcgcttatattcatcactgtaggacttgggttcaagctttccccagccccttttcatcaatggactcctgacgtctacgaaggatcccccactccagtcgttgcttttctttctgttacttcgaaagtagctgcttcagctttagccacgcgaattctcgatattcctttttatttctcatcaaacgaatggcatcttcttctggaaatcctagctattcttagcatgatattggggaatctccttgctattactcaaacaagcatgaaacgtatgcttgcatattcgtccatagggcaaatcggatatgtaattattggaataattgttggagactcaaatgatggatatgcaagcatgataacttatatgctgttctatatctccatgaatctaggaacttttgcttgcattgtattatttggtctacgtaccggaactgataacattcgagattatgcaggattatacacgaaagatccttttttggctctctctttagccctatgtctcttatccctaggaggccttcctccactagcaggtttcttcggaaaactctatctattctggtgtggatggcaagcaggcctatatttcttggtttcaataggactccttacgagcgttctttctatctactattatctaaaaataatcaagttattaatgactggacgaaaccaagaaataaccccttatgtgcgaaattatagaagatcccctttaagatcaaacaattccatcgaattgagtatgactgtatgtgtgatagcatctactataccaggaatatcaatgaaccccattcttgcaattgctcaggataccctcttttag

SEQ ID NO: 131852 - protein, 510 aa, Zea mays
MIWHVQNENFILDSTRIFMKAFHLLLFHGSFIFPECILIFGLILLLMIDLTSDQKDRPWFYFISSTSLVISITALLFRWREEPIISFSGNFQTNNFNEIFQFLILLCSTLCIPLSVEYIECTEMAITEFLLFVLTATLGGMFLCGANDLITIFVAPECFSLCSYLLSGYTKRDLRSNEATMKYLLMGGASSSILVHGFSWLYGSSGGEIELQEIVNGLINTQMYNSPGISIALIFITVGLGFKLSPAPFHQWTPDVYEGSPTPVVAFLSVTSKVAASALATRILDIPFYFSSNEWHLLLEILAILSMILGNLLAITQTSMKRMLAYSSIGQIGYVIIGIIVGDSNDGYASMITYMLFYISMNLGTFACIVLFGLRTGTDNIRDYAGLYTKDPFLALSLALCLLSLGGLPPLAGFFGKLYLFWCGWQAGLYFLVSIGLLTSVLSIYYYLKIIKLLMTGRNQEITPYVRNYRRSPLRSNNSIELSMTVCVIASTIPGISMNPILAIAQDTLF

SEQ ID NO: 131853 - DNA, 1539 bp, Arabidopsis thaliana
  CDS (1)..(1539): transl_table=11
atgatctggcatgtacagaatgaaaatttcattctcgattctacgagaatttttatgaaagcctttcatttgcttctcttcgatggaagttttattttcccagaatgtatcctaatttttggcctaattcttcttctgatgatcgattcaacctctgatcaaaaagatataccttggttatatttcatctcttcaacaagtttcgtaatgagcataacggccctattgttccgatggagagaagaacctatgattagcttttcaggaaatttccaaacgaacaatttcaacgaaatctttcaatttcttattttactatgttcaactctctgtattcctctatccgtagagtacattgaatgtacagaaatggctataacagagtttctgttattcatattaacagctactctaggaggaatgtttttatgtggtgctaacgatttaataactatctttgtagctccagaatgtttcagtttatgctcctacctattatctggatataccaagaaagatatacgatctaatgaggctactatgaaatatttactcatgggtggggcaagctcttctattctggttcatggtttctcttggctatatggttcatccgggggagagattgagcttcaagaaatagtgaatggtcttatcaatacacaaatgtataactccccaggaatttcaattgcgcttatattcatcactgtaggaattgggttcaagctttccctagccccttctcatcaatggactcctgacgtatacgaaggatctcccactccagtcgttgcttttctttctgttacttcgaaagtagctgcttcagcttcagccactcgaattttcgatattcctttttatttctcatcaaatgaatggcatcttcttctggaaatcctagctattcttagcatgatattcgggaatctcattgctattactcaaacaagcatgaaacgtatgcttgcatattcgtccataggtcaaatcggatatgtaattattggaataattgttggagactcaaatggtggatatgcgagcatgataacttatatgctgttctatatcgccatgaatctaggaacttttgcttgcattatattatttggtctacgtaccggaactgataacattcgagattatgcaggattatacacaaaagatccttttttggctctctctttagctctatgtctcttatccctaggaggtcttcctccactagcaggtttttttggaaaactccatttattctggtgtggatggcaggcaggcctatatttcttggtttcaataggactccttacgagcgttctttctatctactattatctaaaaataatcaagttattaatgactggacgaaaccaagaaataacccctcacatgcgaaattatagaatatcccctttaagatcaaacaattccatcgaattgagtatgattgtatgtgtgatagcatctactataccaggaatatcaatgaacccgattattgcgattgctcaggataccctttttagcttctag

SEQ ID NO: 131854 - protein, 512 aa, Arabidopsis thaliana
MIWHVQNENFILDSTRIFMKAFHLLLFDGSFIFPECILIFGLILLLMIDSTSDQKDIPWLYFISSTSFVMSITALLFRWREEPMISFSGNFQTNNFNEIFQFLILLCSTLCIPLSVEYIECTEMAITEFLLFILTATLGGMFLCGANDLITIFVAPECFSLCSYLLSGYTKKDIRSNEATMKYLLMGGASSSILVHGFSWLYGSSGGEIELQEIVNGLINTQMYNSPGISIALIFITVGIGFKLSLAPSHQWTPDVYEGSPTPVVAFLSVTSKVAASASATRIFDIPFYFSSNEWHLLLEILAILSMIFGNLIAITQTSMKRMLAYSSIGQIGYVIIGIIVGDSNGGYASMITYMLFYIAMNLGTFACIILFGLRTGTDNIRDYAGLYTKDPFLALSLALCLLSLGGLPPLAGFFGKLHLFWCGWQAGLYFLVSIGLLTSVLSIYYYLKIIKLLMTGRNQEITPHMRNYRISPLRSNNSIELSMIVCVIASTIPGISMNPIIAIAQDTLFSF

SEQ ID NO: 131855 - DNA, 1467 bp, Beta vulgaris subsp. vulgaris
  CDS (1)..(1467)
atgttcaatctttttttagcggtttccccagagatctttctcattaatgcaaccttcattttgctcattcatggagttatttttagtacctctaagaaatatgattatccaccgttagtcagtaatgtgggttggcttggattacttagtgttctaataaccttgcttttgctcgctgctggcgcacctctcctaactattgcccatttattctggaataatctttttaagagggacaattttacatatttctgccaaatccttctattattaagtacggctggtaccatttcgatgtgttttgattttttcgaacaagagaggtttgatgcttttgaattcattgtattaatttcacttcctactcgcagtatgctctttatgatctcggctcatgatctaattgccatgtatttagctattgagcctcaaagtttatgtttttatgtgatcgcagcatcaaaaagaaagtctgaattttctacggaagccggctcgaaatatttgatcttaggtgcattttcttctggaatattattgtttggttgttccatgatctatgggtctacaggagctacccatttcgatcaattagccaagattttgaccggatacgaaatcactggtgttcgatctagtggtatttttatggggattctttttatcgctgtaggatccctattcaagatcactgcagttccttttcatatgtgggcacccgatatctatgagggttcacccaccccggttacagcattcttttctattgcgcctaaaatatctatttctgctaatattttacgtgtttttatttatggttcctatggagctacattgcaacaaatcttctttttctgcagcattgcttctatgatcttaggagcactggccgccatggcccaaacgaaagtaaaaagacttctagctcatagttcaattggacatgtaggttatattcgtactggtttctcatgtggaaccatagaaggaattcaatcactactaattggtctctttatttatgcatcaatgacgatagatgcattcgctatagtttcagcattacggcaaacacgtgtcaaatatatagcggatttgggcgctctagccaaaacgaatcctatttcggctattaccttctctattactatgttctcatacgcaggaatacccccgttagccggcttttgtagtaaattctatttgttcttcgccgctttgggttgtggggcttacttcctagccccagtgggagtagtgactagcgttataggttgtttttattatatacgtttagtgaaaagaatgttttttgatacacctaggacatggattctatatgaaccaatggatcgtgacaagtcgttactactagcaatgacttcctctttcattacttcatcctttccatatccttctcccttgttctcagttactcatcaaatggcactcagtttatatctttaa

SEQ ID NO: 131856 - protein, 488 aa, Beta vulgaris subsp. vulgaris
MFNLFLAVSPEIFLINATFILLIHGVIFSTSKKYDYPPLVSNVGWLGLLSVLITLLLLAAGAPLLTIAHLFWNNLFKRDNFTYFCQILLLLSTAGTISMCFDFFEQERFDAFEFIVLISLPTRSMLFMISAHDLIAMYLAIEPQSLCFYVIAASKRKSEFSTEAGSKYLILGAFSSGILLFGCSMIYGSTGATHFDQLAKILTGYEITGVRSSGIFMGILFIAVGSLFKITAVPFHMWAPDIYEGSPTPVTAFFSIAPKISISANILRVFIYGSYGATLQQIFFFCSIASMILGALAAMAQTKVKRLLAHSSIGHVGYIRTGFSCGTIEGIQSLLIGLFIYASMTIDAFAIVSALRQTRVKYIADLGALAKTNPISAITFSITMFSYAGIPPLAGFCSKFYLFFAALGCGAYFLAPVGVVTSVIGCFYYIRLVKRMFFDTPRTWILYEPMDRDKSLLLAMTSSFITSSFPYPSPLFSVTHQMALSLYL

SEQ ID NO: 131857 - DNA, 1500 bp, Arabidopsis thaliana
  CDS (1)..(1500)
atgaaagcagaattcgttcggatcctcccacacatgttcaatctttttttagcggtttccccagagatctttatcattaatgcaacctccattttgctcattcatggagttgtatttagtacctctaagaaatatgattatccgccgttagccagtaatgtgggttggcttggattacttagtgttctaataaccttgcttctgctcgccgctggcgcacctctcctaactattgcccatttattctggaataatctttttaggagggacaattttacatatttctgccaaatctttctattattaagtacggctggtaccatttcgatgtgtttcgattcttccgaccaagagaggtttgatgcttttgaattcattgtattaattccacttcctactcgcggtatgctctttatgatctcggctcatgatttaattgccatgtatttagctattgagcctcaaagtttatgtttttatgtaatcgcagcatcaaaaagaaagtctgaattttccacggaagccggctcgaaatatttgatcttaggtgcattttcctctggaatattattgtttggttgttccatgatctatgggtctactggagctacccacttcgatcaattagccaagattttgaccggatacgaaatcactggtgctcgatctagtggtatttttatggggattctgtctatcgctgtaggattcctattcaagatcactgcagttccttttcatatgtgggcaccagatatctatgagggttcacccaccccggttacagcattcctttctattgcgcctaaaatctctatttctgctaatattttacgtgtttctatttatggttcctatggagctacattgcaacaaatcttctttttctgcagcattgcttctatgatcttaggagcactggccgccatggcccaaacgaaagtcaaaagacctctagctcatagttcaattggacatgtaggttatattcgtactggtttctcatgtggaaccatagaaggaattcaatcactactaattggtatctttatttatgcattaatgacgatggatgcattcgccatagtttcagcattacggcaaacccgtgtcaaatatatagcggatttgggcgctctagccaaaacgaatcctatttcggctattaccttctccattactatgttctcatacgcaggaatacccccgttagccggcttttgtagcaaattctatttgttcttcgccgctttgggttgtggggcttactttctagccccagtgggagtagtgactagcgttataggtcgtttttattatatacgcttagtgaaaagaatgttttttgatacacctaggacatggattctatatgaaccaatggatcgtaataagtcgttactactagcaatgacttcctttttcattacttcatccttgctatacccctctcctttgttctcagttactcatcaaatggcactcagttcatatctttaa

SEQ ID NO: 131858 - protein, 499 aa, Arabidopsis thaliana
MKAEFVRILPHMFNLFLAVSPEIFIINATSILLIHGVVFSTSKKYDYPPLASNVGWLGLLSVLITLLLLAAGAPLLTIAHLFWNNLFRRDNFTYFCQIFLLLSTAGTISMCFDSSDQERFDAFEFIVLIPLPTRGMLFMISAHDLIAMYLAIEPQSLCFYVIAASKRKSEFSTEAGSKYLILGAFSSGILLFGCSMIYGSTGATHFDQLAKILTGYEITGARSSGIFMGILSIAVGFLFKITAVPFHMWAPDIYEGSPTPVTAFLSIAPKISISANILRVSIYGSYGATLQQIFFFCSIASMILGALAAMAQTKVKRPLAHSSIGHVGYIRTGFSCGTIEGIQSLLIGIFIYALMTMDAFAIVSALRQTRVKYIADLGALAKTNPISAITFSITMFSYAGIPPLAGFCSKFYLFFAALGCGAYFLAPVGVVTSVIGRFYYIRLVKRMFFDTPRTWILYEPMDRNKSLLLAMTSFFITSSLLYPSPLFSVTHQMALSSYL

SEQ ID NO: 131859 - DNA, 1410 bp, Buchnera aphidicola str. APS (Acyrthosiphon pisum)
  CDS (1)..(1410): transl_table=11
atgttaactgttatcacagtcatattatctatttcttataatcgaaatcatttttttgttgctgtattcagtatattaggtcttatattcgccctatgttcactatattttttaattgaaattattcctataaacgtaagtatattatttcattttaatagtaatgctattttatatatcggaatgattttaatttctagcatctgtacgtgtattttttcatatccgtggttattaaaatatccgtttaacaaagaggagttttatttattagtaattatttcaactttaggtgcaatatcattaactatatctcatcatatggcgtcattttttattaatattgaactaatatctttacctatgtttggtttaattgcttattcaagatatcaaaaatactctttagagtcttcattaaaatatattattttatctggcgtttcttctagttttttattatttggtattgcatgggtttattcgatttctggaggtcttgattttttatctatacataagagttttaattttgcatctgaaaaagaaatattagtagtgctgtttggaataagcatgatacttttatccttattttttaagctgtcaattgtaccatttcatttatggactcctgatatttatcaaggctctccaacatcagtattatctttttttagcactgccgggaaaatttctgtttttagcgtactattaaattttttatcatatttttctaattcagacaacaaagtaatatattttatattatcgttgataattattttatctatattagttggtaatttgatggctctttttcaaaaagacatcaaaagatttttaggatatacatctatatctcaaataggatatttgttgatagtattgcttgtatcacataagaattattcattttctttagaagctagtgcgatatatttatgtggttatttatttagtaatatagcgtgtcttggtattgtaaatttaatttcaacttcacatataaataataatgctagttcaataaattcatatcgagggttgttttggtctcatccacttttatctagtgtattgactttagttttgatttcatctgcaggtattccaatgactttagggtttattggaaaattttatatattatcaattgttatgatagaacatttatggttaataggttttgcttttctaattggaagtctattaggtttatactgttatttaagaataattttaaatttatatttacacccatcgaaattatttaaaagagatttaaatatacctctgaattgggtttatactccttctggtatagtaatatgtatttcaggaataatactgttagctttaggtatatatcctaatccattaattggcttaattaaatgtactatataa

SEQ ID NO: 131860 - protein, 469 aa, Buchnera aphidicola str. APS (Acyrthosiphon pisum)
MLTVITVILSISYNRNHFFVAVFSILGLIFALCSLYFLIEIIPINVSILFHFNSNAILYIGMILISSICTCIFSYPWLLKYPFNKEEFYLLVIISTLGAISLTISHHMASFFINIELISLPMFGLIAYSRYQKYSLESSLKYIILSGVSSSFLLFGIAWVYSISGGLDFLSIHKSFNFASEKEILVVLFGISMILLSLFFKLSIVPFHLWTPDIYQGSPTSVLSFFSTAGKISVFSVLLNFLSYFSNSDNKVIYFILSLIIILSILVGNLMALFQKDIKRFLGYTSISQIGYLLIVLLVSHKNYSFSLEASAIYLCGYLFSNIACLGIVNLISTSHINNNASSINSYRGLFWSHPLLSSVLTLVLISSAGIPMTLGFIGKFYILSIVMIEHLWLIGFAFLIGSLLGLYCYLRIILNLYLHPSKLFKRDLNIPLNWVYTPSGIVICISGIILLALGIYPNPLIGLIKCTI

SEQ ID NO: 131861 - DNA, 1278 bp, Escherichia coli O157:H7 EDL933
  CDS (1)..(1278): transl_table=11
  misc_feature (830)..(830): r is g or a
  misc_feature (1186)..(1186): r is g or a
atggacgttacgccgctgatgcgcgttgatggtttcgccatgctttacaccgggctggtattgttggcgagcctcgccacctgtactttcgcctacccgtggcttgaaggctataacgacaacaaggatgagttctacctgttggtgttaattgccgcgctgggcgggatcctgctggcgaatgcaaaccatctggcgtctctgttcctcggtattgaactgatctctttgccgctgtttggcctggtcggttacgctttccgccagaaacgttcgctggaagccagtatcaaatacaccatcctttctgccgcagcgtcttctttcctgctgttcggtatggcgctggtgtatgcgcagtctggcgacctgtcgtttgtcgcgctgggtaaaaacctcggcgacggtatgctaaacgagccgctgttgctggcaggtttcggcctgatgattgttggcctcggcttcaaactctctctggtgccgttccacctgtggacgccagacgtataccagggcgcgcctgcgccggtttccactttcctggcgacggcgagcaaaatcgctatcttcggtgtggtgatgcgtctgttcctctacgcaccggtgggtgacagcgaagcgattcgggtggtgctggcgattatcgcctttgcctccatcatcttcggtaacctgatggcgctgagccagaccaatatcaaacgtctgctcggttactcatctatctctcacctcggctatctgctggtggcgctgattgcgctgcaaactggcgagatgtcgatggaagcggtaggggtttacctggccggttatctgttcagcarcctcggcgcgttcggcgtggtcagcctgatgtccagcccgtatcgtggcccggatgctgattccctgttctcttaccgcggtctgttctggcatcgtccgatcctcgcggcggtgatgacggtgatgatgctgtctctggccggtatcccgatgacgctgggctttatcggtaagttctacgtgctggcggttggtgtccaggcacacctgtggtggctggtgggtgccgtggttgtcggttcggcaatcggcctctactactacctgcgcgtggcggtgagcctgtacctgcacgcaccggaacaaccgggtcgcgatgcaccgtcaaactggcagtacagcgcgggcggtatcrtggtgctgatttctgcactgttggtactggtgctgggtgtatggccacaaccgctgattagtattgtgcggttagcaatgccgctgatgtaa

SEQ ID NO: 131862 - protein, 425 aa, Escherichia coli O157:H7 EDL933
  misc_feature (277)..(277): The Xaa at location 277 stands for Asn, or Ser.
  misc_feature (396)..(396): The Xaa at location 396 stands for Met, or Val.
MDVTPLMRVDGFAMLYTGLVLLASLATCTFAYPWLEGYNDNKDEFYLLVLIAALGGILLANANHLASLFLGIELISLPLFGLVGYAFRQKRSLEASIKYTILSAAASSFLLFGMALVYAQSGDLSFVALGKNLGDGMLNEPLLLAGFGLMIVGLGFKLSLVPFHLWTPDVYQGAPAPVSTFLATASKIAIFGVVMRLFLYAPVGDSEAIRVVLAIIAFASIIFGNLMALSQTNIKRLLGYSSISHLGYLLVALIALQTGEMSMEAVGVYLAGYLFSXLGAFGVVSLMSSPYRGPDADSLFSYRGLFWHRPILAAVMTVMMLSLAGIPMTLGFIGKFYVLAVGVQAHLWWLVGAVVVGSAIGLYYYLRVAVSLYLHAPEQPGRDAPSNWQYSAGGIXVLISALLVLVLGVWPQPLISIVRLAMPLM

SEQ ID NO: 131863 - DNA, 1449 bp, Agrobacterium tumefaciens str. C58
  CDS (1)..(1449): transl_table=11
ttggacatgaccgctgaaatcctttttgccagtctgcacatcgcgacgcccgagctgatccttgcggtcggcgcgctggcgctgctcatgattggcgtcttctcgggcgacaagtcgacaacgacggtgaccggccttgccgttgccctcctgctcgtcgtcggtctctggatcatctttgcccccgcatcgggcgtggccttcggcggtgtttacatcgccgatgcattcggcaatttcatgaaggtgctggcgctgatcggctccatcaccgccatgatcctcgccgtcggccagggccgtttcgagccgatcggtcgtttcgaatatccggtgctgctggttctggccactctcggcatcttgctgatgatctcggccaacaacatgatctcgctctacatggcgctagaactgcagtcgctggccctctacgtcgtctgcgccatcaaccgcgagagcctgcgctccacggaagctggcctgaaatacttcgttctcggcgcgctctcctccggcatgctgctttacggcatgtcgctggtttacggcttcaccggcaataccggcttcaccgaaatcgcgcaggttctggcgtcggaaacgcgctcgctcggcctcgtctttggtctggtcttcgttctcgccggtcttgcgttcaagatttccgccgtgccgttccacatgtggacgcctgatgtttatgaaggtgcgccgaccccagtcaccgccttcctgtcggctgcaccgaagatcggcgccatggcgatcctcgtgcgtatcgtcgtcgaggctttccagccggtctttgccgactggcagcagatcgtcgtcttcatctccatcgcttcgatgctgctcggctccttcgcagcaatcggccagaagaacatcaagcgcctgatggcctattcctccatcggtcacatgggttatgcgctggtcggtcttgcggccggcaccgaagccggtatttcgggcgtcattctttacatgaccatctacatggtcatgacgcttggcaccttcgcctgcattctctccatgcgccgcaaggaaatcggcaatgtcgaaaatgttgaggatcttgccgggctttcctccaccaatcccttcatggcggttgtgttgacgatcctgatgttctcgcttgccggtattccgccgctcgccggcttcttcggcaaatattacgtcttccttgccgccatcgaagcgaagctttatccgctcgccatcatcggtgtgatcggctcggttgtcggcgcctattattatatccgcgtcgtcaaggtcatgtggttcgatgaggccaaggacaagttcgaacgtccggccggtgaactgaaagtcgtttatgcgctttcggccctgttcgttgtcgccttcgtcgtctttggcggtgcacttggcaacgcggtgactgttgcggcgaagaccttcttttga

SEQ ID NO: 131864 - protein, 482 aa, Agrobacterium tumefaciens str. C58
MDMTAEILFASLHIATPELILAVGALALLMIGVFSGDKSTTTVTGLAVALLLVVGLWIIFAPASGVAFGGVYIADAFGNFMKVLALIGSITAMILAVGQGRFEPIGRFEYPVLLVLATLGILLMISANNMISLYMALELQSLALYVVCAINRESLRSTEAGLKYFVLGALSSGMLLYGMSLVYGFTGNTGFTEIAQVLASETRSLGLVFGLVFVLAGLAFKISAVPFHMWTPDVYEGAPTPVTAFLSAAPKIGAMAILVRIVVEAFQPVFADWQQIVVFISIASMLLGSFAAIGQKNIKRLMAYSSIGHMGYALVGLAAGTEAGISGVILYMTIYMVMTLGTFACILSMRRKEIGNVENVEDLAGLSSTNPFMAVVLTILMFSLAGIPPLAGFFGKYYVFLAAIEAKLYPLAIIGVIGSVVGAYYYIRVVKVMWFDEAKDKFERPAGELKVVYALSALFVVAFVVFGGALGNAVTVAAKTFF

SEQ ID NO: 131865 - DNA, 1443 bp, Agrobacterium tumefaciens str. C58
  CDS (1)..(1443): transl_table=11
atgaccgctgaaatcctttttgccagtctgcacatcgcgacgcccgagctgatccttgcggtcggcgcgctggcgctgctcatgattggcgtcttctcgggcgacaagtcgacaacgacggtgaccggccttgccgttgccctcctgctcgtcgtcggtctctggatcatctttgcccccgcatcgggcgtggccttcggcggtgtttacatcgccgatgcattcggcaatttcatgaaggtgctggcgctgatcggctccatcaccgccatgatcctcgccgtcggccagggccgtttcgagccgatcggtcgtttcgaatatccggtgctgctggttctggccactctcggcatcttgctgatgatctcggccaacaacatgatctcgctctacatggcgctagaactgcagtcgctggccctctacgtcgtctgcgccatcaaccgcgagagcctgcgctccacggaagctggcctgaaatacttcgttctcggcgcgctctcctccggcatgctgctttacggcatgtcgctggtttacggcttcaccggcaataccggcttcaccgaaatcgcgcaggttctggcgtcggaaacgcgctcgctcggcctcgtctttggtctggtcttcgttctcgccggtcttgcgttcaagatttccgccgtgccgttccacatgtggacgcctgatgtttatgaaggtgcgccgaccccagtcaccgccttcctgtcggctgcaccgaagatcggcgccatggcgatcctcgtgcgtatcgtcgtcgaggctttccagccggtctttgccgactggcagcagatcgtcgtcttcatctccatcgcttcgatgctgctcggctccttcgcagcaatcggccagaagaacatcaagcgcctgatggcctattcctccatcggtcacatgggttatgcgctggtcggtcttgcggccggcaccgaagccggtatttcgggcgtcattctttacatgaccatctacatggtcatgacgcttggcaccttcgcctgcattctctccatgcgccgcaaggaaatcggcaatgtcgaaaatgttgaggatcttgccgggctttcctccaccaatcccttcatggcggttgtgttgacgatcctgatgttctcgcttgccggtattccgccgctcgccggcttcttcggcaaatattacgtcttccttgccgccatcgaagcgaagctttatccgctcgccatcatcggtgtgatcggctcggttgtcggcgcctattattatatccgcgtcgtcaaggtcatgtggttcgatgaggccaaggacaagttcgaacgtccggccggtgaactgaaagtcgtttatgcgctttcggccctgttcgttgtcgccttcgtcgtctttggcggtgcacttggcaacgcggtgactgttgcggcgaagaccttcttttga

SEQ ID NO: 131866 - protein, 480 aa, Agrobacterium tumefaciens str. C58
MTAEILFASLHIATPELILAVGALALLMIGVFSGDKSTTTVTGLAVALLLVVGLWIIFAPASGVAFGGVYIADAFGNFMKVLALIGSITAMILAVGQGRFEPIGRFEYPVLLVLATLGILLMISANNMISLYMALELQSLALYVVCAINRESLRSTEAGLKYFVLGALSSGMLLYGMSLVYGFTGNTGFTEIAQVLASETRSLGLVFGLVFVLAGLAFKISAVPFHMWTPDVYEGAPTPVTAFLSAAPKIGAMAILVRIVVEAFQPVFADWQQIVVFISIASMLLGSFAAIGQKNIKRLMAYSSIGHMGYALVGLAAGTEAGISGVILYMTIYMVMTLGTFACILSMRRKEIGNVENVEDLAGLSSTNPFMAVVLTILMFSLAGIPPLAGFFGKYYVFLAAIEAKLYPLAIIGVIGSVVGAYYYIRVVKVMWFDEAKDKFERPAGELKVVYALSALFVVAFVVFGGALGNAVTVAAKTFF

SEQ ID NO: 131867 - DNA, 1437 bp, Brucella melitensis 16M
  CDS (1)..(1437): transl_table=11
atgcagactgatctgttagctcatctgaccctggcagcaccggaggttctccttgctgtaggcgccttggcacggctcatgatcggcgtgttttctggcgaacgggcaaccacgctcgtcaatggattgtccgtcgctgtgctgattgcggcattggctctggtgcttctggttcccgcaaacggcacggttttcggtggtgcgttcgtcattgacggctttagccgcttcatgaaggtgctgacgctgctcggatccattgtggcgctcatcatgtcggttggctttgccaaggcggagaaattcgacaagttcgagttcccggtgctgatcgtgattgccacgctcggcatgctcctgatggtttcggccaatagcatgctgacgctttatctgggtctcgaactgcaatcgctggcgctctatgttctggcggcgttcaaccgtgatagcgttcgttccacagaagcaggcctcaaatattttgtgctgggttcgctttcttcgggcatgttgctctatggcatatcgctcgtttacggctataccggccatatcggcttcgtggaaatcgcgcaggctgtttcgggtggccagcgcgagcttggcttggtgttcggcctcatcttcatccttgccggtcttgtattcaagatttccgccgttccgttccacatgtggacgccggacgtttatgaaggcgctccgaccccggtaacggcattctttgccggggcaccgaagatggccgccatggcgctcatcattcgtgttgtgactgaggcttttgctccggttacgcatgactggcagcaggttatcatcttcgttgcactcgcctccatggtgttgggcgcgttcgccgcgatcggccagcgcaacgtcaagcgcctgatggcctattcctcgatcagccatatgggttatgcgctcgttggtctggctgcgggcacggttatcggcgtcaagggcgtgatgatctatatggcgatctatctcgccatgacgctcggcagcttcgctttcattcttgccatgcgcaccaaggacggcaacgtcgaaaacatcgacgatctggctggtctgtcgcgcaccaatccggtgctggcaacggtcatgaccatcttcctgttttcgcttgcaggcattccgccgctggcaggcttcttcggcaagtggtacaccttccttgccgccgtggaagcaggcctttatccgcttgccatcatcggtatcgtggcttcggtcgtgggcgcgttctactatctgcgcatgatcaagatcatgtggttcgatgaaccggcagcgggttttgttccggtcgcgggcgagcttcgcctcgtactcggcgtaacaggtgccttcgtgcttttctatgtcttccttgctggcccgattggcggatatgccgaagccgcagccaggacgtttttctaa

SEQ ID NO: 131868 - protein, 478 aa, Brucella melitensis 16M
MQTDLLAHLTLAAPEVLLAVGALARLMIGVFSGERATTLVNGLSVAVLIAALALVLLVPANGTVFGGAFVIDGFSRFMKVLTLLGSIVALIMSVGFAKAEKFDKFEFPVLIVIATLGMLLMVSANSMLTLYLGLELQSLALYVLAAFNRDSVRSTEAGLKYFVLGSLSSGMLLYGISLVYGYTGHIGFVEIAQAVSGGQRELGLVFGLIFILAGLVFKISAVPFHMWTPDVYEGAPTPVTAFFAGAPKMAAMALIIRVVTEAFAPVTHDWQQVIIFVALASMVLGAFAAIGQRNVKRLMAYSSISHMGYALVGLAAGTVIGVKGVMIYMAIYLAMTLGSFAFILAMRTKDGNVENIDDLAGLSRTNPVLATVMTIFLFSLAGIPPLAGFFGKWYTFLAAVEAGLYPLAIIGIVASVVGAFYYLRMIKIMWFDEPAAGFVPVAGELRLVLGVTGAFVLFYVFLAGPIGGYAEAAARTFF

SEQ ID NO: 131869 - DNA, 1470 bp, Methanosarcina acetivorans C2A
  CDS (1)..(1470): transl_table=11
atggacgaattaatgtatcttgcacctgaaatcgtggtggttgcaaccggcctggtcgtacttctggccggagtcttcctgtccccccgggccaagaacatacttggttacctggcaaccctgggaatccttgcagccctcttcctgacggttaaaagcttcgggctcctgacgatgcagggcttccaggtcggatattcaatcttctcagaagctctgaatatcgatgccctctcccagttcttcaaactggtcttcctggtagttgccctgattgtttcaattgctgcaatcaagtacaatgagaacagtgaccacacagaagagttctacaccctgatgctctttgcaaccttcgggatgatgatcgtagcttctgcaaacgacctggtcgtactcttcgttgcctttgaactggcaagtcttgcaacatacgcccttgcaggctacgaaaagcagaacccgaggtctcttgaaggagccatgaagtatttcgtgatcggttcggtctcggcagccctcatgctcttcgggctttcctttgtttacggggcaaccggcactaccagcatccccctgattgctgcaaaccccgggctccttatagaaaacccgatcgggcttgtagcggtcgtgctgctgattgcaggtttcggcttcaagatggcccttgtgcccttccacatgtgggctccggatacctaccagggttctccctcggtcgtttccgccctgcttgcagccgggtccaagaagatgggctttgtggcagccttcagaatcttcattgtggctcttgtggccctacagcctgactggcagtttatctttactatcctggcagttgcaacaatgaccttcggaaacatagtcgcagttgcccagaccagcgtaaaacgcatgctcgcctactcttccgtagcccaggccggatacattgcaatggcttttgccgttatgacccctgtggccctcggaggaggcatcatgtacgctcttgcccacgcctttatgaaagcaggagcctttattgcagccggagtcgtggtctggatggtgagccaggaaaagacgggcaacctcgatgtccccgaccacctggacagctttaagggcctcggaaaaagaatgcctcttgcagccctttccatgacggtcttcgtctttgccctcgcaggtattcccccgactgcaggtttcatggccaagttcgtgctcttctcttcaaccatccaggcgggcatggcctggcttgcagtaatagcgatcctgaacagtgccctttccctgttctactacgcacggcttgtgagatacatgtacttcctgccccccgagggtaaatccgtcagcgttcctttcccatatgcagccgcccttctggttgcagtggcaggcgtgctggtaatgggtatctggcccgaacccttcgtggaactggctatgaaagcagcaatggtactggtataa

SEQ ID NO: 131870 - protein, 489 aa, Methanosarcina acetivorans C2A
MDELMYLAPEIVVVATGLVVLLAGVFLSPRAKNILGYLATLGILAALFLTVKSFGLLTMQGFQVGYSIFSEALNIDALSQFFKLVFLVVALIVSIAAIKYNENSDHTEEFYTLMLFATFGMMIVASANDLVVLFVAFELASLATYALAGYEKQNPRSLEGAMKYFVIGSVSAALMLFGLSFVYGATGTTSIPLIAANPGLLIENPIGLVAVVLLIAGFGFKMALVPFHMWAPDTYQGSPSVVSALLAAGSKKMGFVAAFRIFIVALVALQPDWQFIFTILAVATMTFGNIVAVAQTSVKRMLAYSSVAQAGYIAMAFAVMTPVALGGGIMYALAHAFMKAGAFIAAGVVVWMVSQEKTGNLDVPDHLDSFKGLGKRMPLAALSMTVFVFALAGIPPTAGFMAKFVLFSSTIQAGMAWLAVIAILNSALSLFYYARLVRYMYFLPPEGKSVSVPFPYAAALLVAVAGVLVMGIWPEPFVELAMKAAMVLV

SEQ ID NO: 131871 - DNA, 1659 bp, Streptomyces coelicolor A3(2)
  CDS (1)..(1659): transl_table=11
gtgagcgcaacagccgtccacagcctgtggacaacggcggcgacggcggccgacccgatcgccaagatcgacgcaccgaagatcgagtacggacagttgtcgcccgtcctcatcgtcctcggcgcggcgatcatcggaatcctggtcgaggccttcgtgccgcgcagatcccgctactacgcgcagatgttcgtgtccgccgtcgccctggtcgcggcgttcgcggcgatcgtcgcgctcgcggcgggcggatacggcacgaccaaggccgggatcgcggcgatgggtgccgtcgccgtcgacggaccggccctgttcctccagggcaccattctgctgaccagcctggtcggcctgttcaccttcgccgagcggcgcctcgacccggagcagcacggcaaccgtgtcgactccttcgccgcgcaggcggccgccgtgcccggcagcgagagcgagcagaaggcggtcaaggccggcttcaccacgacggaggtcttcccgctcctcctcttcgccgtcgccggcatgctggtcttcccggcggccaacgacctgctgacgctcttcgtggcgctggaggtcttctccctcccgctgtacctgctgtgcgcgctggcccgccgcaagcggctcatgtcgcaggaggcggcggtcaagtacttcctgctcggcgccttcgcctccgcgttcaccctgttcggcatcgccctgctctacggctacgcgggctcgatgtcgtacggcacgatcgcccaggtcgtcgacggcaccgtgcagaacgtcaccccggcgctcgccgacaccatgggcaacgacgcgctgcttctcgtcggctccgcgctgatcgtcatgggcctgctgttcaaggtgggcgccgtgccgttccacatgtggacaccggacgtgtaccagggcgcgccgacgccggtgaccggcttcatggcggcggcgaccaaggtggccgccttcggcgccctgctccgcatcctgtacgtcgtcctgcccggcctgcgctgggactggcggccggtgatgtggggcgtggcgatcgtcacgatgctggccggcgcgatcgtcgcgatcacgcagaccgacatcaagcggctgctggcgtactcgtcgatcgcgcacgcgggcttcatcctcgccggtgtgatcgcgaccacaccggagggcatctcgtccgtcctcttctacctggccgcgtactccttcgtcacgatcggcgccttcgcggtcgtcacgctggtccgcgacgcgggcggcgaggcgacgcacctgtcgaagtgggccgggctcgggcgcaggtcgccgctggtggcggcggtcttcgcggtgttcctgctggccttcgccggtatcccgctgacctccggtttctccgggaagttcgccgtgttcaaggcggcggcggagggcggcgcggccccgctggtcgtgatcggtgtgatctcgtcggcgatcgccgcgttcttctacatccgggtgatcgtgctgatgttcttcagcgagccgcgtccggagggcccgacggtcgcggtgccgtcaccgctgacgatgacggcgatcgccgtgggcgtggcggtcacggtggtgctcggcgtggcgccccagtacttcctggacctggcgggtcaggcgggggtgttcgtgcgctga

SEQ ID NO: 131872 - protein, 552 aa, Streptomyces coelicolor A3(2)
MSATAVHSLWTTAATAADPIAKIDAPKIEYGQLSPVLIVLGAAIIGILVEAFVPRRSRYYAQMFVSAVALVAAFAAIVALAAGGYGTTKAGIAAMGAVAVDGPALFLQGTILLTSLVGLFTFAERRLDPEQHGNRVDSFAAQAAAVPGSESEQKAVKAGFTTTEVFPLLLFAVAGMLVFPAANDLLTLFVALEVFSLPLYLLCALARRKRLMSQEAAVKYFLLGAFASAFTLFGIALLYGYAGSMSYGTIAQVVDGTVQNVTPALADTMGNDALLLVGSALIVMGLLFKVGAVPFHMWTPDVYQGAPTPVTGFMAAATKVAAFGALLRILYVVLPGLRWDWRPVMWGVAIVTMLAGAIVAITQTDIKRLLAYSSIAHAGFILAGVIATTPEGISSVLFYLAAYSFVTIGAFAVVTLVRDAGGEATHLSKWAGLGRRSPLVAAVFAVFLLAFAGIPLTSGFSGKFAVFKAAAEGGAAPLVVIGVISSAIAAFFYIRVIVLMFFSEPRPEGPTVAVPSPLTMTAIAVGVAVTVVLGVAPQYFLDLAGQAGVFVR

SEQ ID NO: 131873 - DNA, 1995 bp, Streptomyces coelicolor A3(2)
  CDS (1)..(1995): transl_table=11
gtgaccacgaccaccctcgccgtactcgtccccctccttcccttcctcggggcagccgccggtctcctcctgggtcggtcggcccccggtttcgcccgtcccctcgccgtcctgccgacgctggcgtccctcgtcctcgccgccctcgtcgcggcgcgtcagggcggtggccgggccctcgacgcagtcaccgagctgacgcccaccggttcggtccccgtcgaactcgccctgcacatcgacggcttcgccgccctcgtcgccgtcctggtcggcaccgtcgccacctgcgtgcagatctactccacgggatacctgcgcgacgacccgcgctacgcgtcgtacgccgctctcgtctccctgttcacctccgccatgttcctcgtcgtctactccggcgacctgatggtgctgctggtcggctgggaagtcatgggcatctgctcgtacttcctcgtcggccactactgggagaccccggaggcgcgcgccgcctccctcaaggccttcctcgtcaccaagctcggcgacgtcccctttctgatcggtctgctggcgctggtcaccgaggcgggctccttccgcatcaccaagatcctcggagcggtcgcgagcggctcgctcgaccacccgacgctgatcgcgctgctgctcctggccggtgtcgcgggcaagtcggcgcagttcccgctgcacacctggcttcccgacgcgatggcgggcccgacgcccgtctccgcgctgatccacgccgcgacgatggtcgccgccggtgtgtacttcgtcgcccggctccttccgctcttcgaggcctcgcgggccgcgatggtcgtcctcgccgtcatggccgccgtcacgatggtcggctccgcgctcgccgccctcgcccaggacgacatcaaacgcgtcctggcctactcgacgatcggacagctcggctacatgaccggcgccctcgccacgggcgaccggggcgccgccgtcttccacctcctctcccacggcgccttcaaggcgctcctgttcctcgccgccggcgtgatcatccacgccgccggcaccaactcgctggccgccatgtcccggatgcggggcctgcgcgaccgcgtccccgacgcctactggacgatgaccgtggccctgctcgcgctggccgcgatcccgcccttcagcggcttcttctccaaggagtccgtcctcggtgctgcggagcacgtcgtcaccggccacaccgagcatgcccccggcgccgcgggctggaccgtactcgtcgccggcctgatcacggccctgctcaccgccgcctacgcggcccgcctgtggctgctggccttccgcggccgaggcgccgaggcccccgaccacggcaggcagccgctggtcatgaacgccgtgctctgggtcctcgccctcccctcactcgcactgggcggactcgccttccggctgctgcccgactggttcgacggccaggacctcactccgaccctcaccacctccgtgctcggcacgggcgtggccctggtcggcggcatcgtcacctacgccgcctggcggcacaccacggcgctcgccgaccgcacgccgttgggcgccgtcgcggcccaccccgagggcgacgccggcctggtggaggccgaggcgatcgccgcccaccgggccgcctacggagacctggcctccgcacccgacccgtcggatccgggacggctgctgctgggccccgtgcaccggcacgctgcggcgggcttccacctggacgcggtgtacgcgaccctcttcctccgccccgtccaggcgggcgcgagcctcgtccggttcctcgaccgcgaggtcgtcgacacctacgtacgcgcggcgggcgccctgccccgcctgctcggggccgccgtacgacgtgcccagaccggcaatgtgcagacctatgtgagcgcgctgctcgccggcaccgtcgtcctcgcggtcgccgccgtcctcgtcgccgcgggagcgtga

SEQ ID NO: 131874 - protein, 664 aa, Streptomyces coelicolor A3(2)
MTTTTLAVLVPLLPFLGAAAGLLLGRSAPGFARPLAVLPTLASLVLAALVAARQGGGRALDAVTELTPTGSVPVELALHIDGFAALVAVLVGTVATCVQIYSTGYLRDDPRYASYAALVSLFTSAMFLVVYSGDLMVLLVGWEVMGICSYFLVGHYWETPEARAASLKAFLVTKLGDVPFLIGLLALVTEAGSFRITKILGAVASGSLDHPTLIALLLLAGVAGKSAQFPLHTWLPDAMAGPTPVSALIHAATMVAAGVYFVARLLPLFEASRAAMVVLAVMAAVTMVGSALAALAQDDIKRVLAYSTIGQLGYMTGALATGDRGAAVFHLLSHGAFKALLFLAAGVIIHAAGTNSLAAMSRMRGLRDRVPDAYWTMTVALLALAAIPPFSGFFSKESVLGAAEHVVTGHTEHAPGAAGWTVLVAGLITALLTAAYAARLWLLAFRGRGAEAPDHGRQPLVMNAVLWVLALPSLALGGLAFRLLPDWFDGQDLTPTLTTSVLGTGVALVGGIVTYAAWRHTTALADRTPLGAVAAHPEGDAGLVEAEAIAAHRAAYGDLASAPDPSDPGRLLLGPVHRHAAAGFHLDAVYATLFLRPVQAGASLVRFLDREVVDTYVRAAGALPRLLGAAVRRAQTGNVQTYVSALLAGTVVLAVAAVLVAAGA

SEQ ID NO: 131875 - DNA, 1461 bp, Xanthomonas axonopodis pv. citri str. 306
  CDS (1)..(1461): transl_table=11
atgaccacgccaacgctcgcgccgttgaccaccgctgacctggctccgctcgtaccggagctggtgctgatcggcggcgccttcgcactgctgatgctcgacctgttcgtgagccagcggaacaaggtctggacccacctgtcctccgttgccgtgcttgccgtggtgctcgtgttgcttgcgaccggcacgggcgggcagggcgatatcttcaacggcatgttcgtccgcgacacggcggccgatgtcatgaagaccgtgatcgtgctggtcagcgggctgagcctggtctacggctggacctacctgcgcgagcgcaatctctaccagggcgaaatcccggtattggtactgttcgccaccgccggcatgatgttgctggcatcggccggtagcctgctgatggtgtatctgggtctggagctgctggcgctgtgctcctacgcactggtcgcctccaaccgcgacaatggcctggccaccgaagcggcgatgaagtatttcgtcctgggctcgctcgcgtcgggtctgctgctgtacggcatgtcgctggtctacggcgccaccggtacgctcagcctggccggcatccatgatgcgatcgaaggctccaacgagcgcacgttgctgctgaccggcaccatcttcatgatcgccggcgtcgccttcaagctcggtgctgcgcccttccacatgtggctgcccgacgtgtatcagggtgcgcctgcaccgatcgcgttgttcatcagctcggcgcccaagcttgcagcgttcggtatggcctatcgcctgctggaagtcggcatgggtccgttgtcgccgcagtggcatctgctgatcggcggcttgtcggcggtgtcgctggtggtcggtaacctgatggccattgcgcagagcaacctcaagcgcatgctcgcgtactcgacggtctcgcatatcggcttcctgctgatgggcgtggctggcggcggggaagaaggctacgcggccgcgatgttctatgcggtcagctacacgatcatgtccaccgcttcgttcggcgccatcatcgcgctgtcgcgtaacgggttcgaagcggaaaacatcgacgacttcaagggactcaacgcgcgcaatccgtggatggctggcctggtgctgtgcatcatggcgtctttggcaggtatccccccgttcctcggtttctggaccaagctggcggtgctgggcgcggcagtgaagggcgacatgctgtggctggcgttggtcggcgtgatctgcgcagtgatcggcgcgtactactacctgcgcgtcatcaaggtcatgtacttcgacgagccggtaggcgagccgttgccggccaataacgatcgtgtgctgggtaccgtgctcggcgtcaatgcgctggccctgcttgcacttggcctggcctggagtccgatcatggtgtggtgccagcgcgcgttcgccggcctcgcgtaa

SEQ ID NO: 131876 - protein, 486 aa, Xanthomonas axonopodis pv. citri str. 306
MTTPTLAPLTTADLAPLVPELVLIGGAFALLMLDLFVSQRNKVWTHLSSVAVLAVVLVLLATGTGGQGDIFNGMFVRDTAADVMKTVIVLVSGLSLVYGWTYLRERNLYQGEIPVLVLFATAGMMLLASAGSLLMVYLGLELLALCSYALVASNRDNGLATEAAMKYFVLGSLASGLLLYGMSLVYGATGTLSLAGIHDAIEGSNERTLLLTGTIFMIAGVAFKLGAAPFHMWLPDVYQGAPAPIALFISSAPKLAAFGMAYRLLEVGMGPLSPQWHLLIGGLSAVSLVVGNLMAIAQSNLKRMLAYSTVSHIGFLLMGVAGGGEEGYAAAMFYAVSYTIMSTASFGAIIALSRNGFEAENIDDFKGLNARNPWMAGLVLCIMASLAGIPPFLGFWTKLAVLGAAVKGDMLWLALVGVICAVIGAYYYLRVIKVMYFDEPVGEPLPANNDRVLGTVLGVNALALLALGLAWSPIMVWCQRAFAGLA

SEQ ID NO: 131877 - DNA, 1500 bp, Cryptococcus neoformans var. grubii
  CDS (1)..(1500): transl_table=4
atgctagtaactagtctatttattattatgatggccgtagcgctatctaatacatctattaatcctattctactaactcggatgtgttcactagttctactttacactgcagcactatcatataatgctctagatcttcaaggtattggagaaggtgtaagtatttacagtggtctattccaggtaacatcagtgtctcaatcggctgacacatttatctttgttattggtgctatgattcttctaccatgggctcctgtaacaagtaatctacaatcacgatctacagtatttacagcagtaccaactattacaacatatcctattattattctatttacaacttgtggtgcttcattcctagtctcaagtgcagatctagtatcagtatatctaagtattgaactacaatcatttgcagtatatattctagctactctttatcgagattcagattctgctacagcagctggtctaaagtatttcctactaggaggactatcatcagctctaattctactaggatcagcactaatttatggatatacaggtctaacaaatctagaaaatatttatacactactatcagtatcagaaacaaatgaaatgaatctatgtgctattggtctatttatttttgttattggtttcctatttaagatttcagctgctccattccataattgggctcctgatgtatatgatggagtaccaacaattgtgacaacatggctaacaattatgccaaagctatcaattctaattctactacttgaagtacaagcaggtgtaggacaatcatttacagtatggacaaatctgctactagtatcatcactactatcactagtaattggtactgtagtaggactagcacaaacacgaatcaagcgactactagcctatagtacaatttcacatgtaggatttctactactagcactaggagtaaatacagaagaatcaattgaatcattcctattttatctagtacaatatagtatcacaaatctaaatgcatttatgattattctagcatttggatatgttatgcattcatcagtatctcgatcatcaggacaaaatactgatctacaacttattattgaactagctggacaattccgatctaatcctattctaggactatctctaactgtttgtctattttcaatggcaggagtaccaccactaatgggattctttgcaaagcaaacagtactatattcagctacacatagtggatattatttcctatcaattgtagcaattctagtatcagtagtaagtgcttattattatcttaagattgtacgagtaattcactttgattcaccatcatctgaaattctaacagtgtcatcaccagaacaaaagctatcatcagtacatagctttgcaattgcaacactaactatgattatcgccctatttgcggtatatccagatctaattctaaatagcacaactctactggctctaacactatatggatattaa

SEQ ID NO: 131878 - protein, 499 aa, Cryptococcus neoformans var. grubii
MLVTSLFIIMMAVALSNTSINPILLTRMCSLVLLYTAALSYNALDLQGIGEGVSIYSGLFQVTSVSQSADTFIFVIGAMILLPWAPVTSNLQSRSTVFTAVPTITTYPIIILFTTCGASFLVSSADLVSVYLSIELQSFAVYILATLYRDSDSATAAGLKYFLLGGLSSALILLGSALIYGYTGLTNLENIYTLLSVSETNEMNLCAIGLFIFVIGFLFKISAAPFHNWAPDVYDGVPTIVTTWLTIMPKLSILILLLEVQAGVGQSFTVWTNLLLVSSLLSLVIGTVVGLAQTRIKRLLAYSTISHVGFLLLALGVNTEESIESFLFYLVQYSITNLNAFMIILAFGYVMHSSVSRSSGQNTDLQLIIELAGQFRSNPILGLSLTVCLFSMAGVPPLMGFFAKQTVLYSATHSGYYFLSIVAILVSVVSAYYYLKIVRVIHFDSPSSEILTVSSPEQKLSSVHSFAIATLTMIIALFAVYPDLILNSTTLLALTLYGY

SEQ ID NO: 131879 - DNA, 1278 bp, Shigella flexneri 2a str. 301
  CDS (1)..(1278): transl_table=11
atggacgttacgccgctgatgcgcgttgatggtttcgccatgctttacaccgggctggtattgttggcgagcctcgccacctgtactttcgcctacccgtggcttgaaggctataacgacaacaaggatgagttctacctgttggtgttaattgccgcgctgggcgggatcctgctggcgaatgcaaaccatctggcgtctctgttcctcggtattgaactgatctctttgccgctgtttggcctggtcggttacgctttccgccagaaacgttcgctggaagccagtatcaaatacaccatcctttctgccgcagcgtcttctttcctgctgttcggtatggcgctggtgtatgcgcagtctggcgacctgtcgtttgtcgcgctgggtaaaaacctcggcgacggtatgctcaacgagccgctgttgctggcaggtttcggcatgatgattgttggcctcggcttcaaactctctctggtgccgttccacctgtggacgccagacgtataccagggcgcgcctgcgccggtttccactttcctggcgacggcgagcaaaatcgctatcttcggtgtggtgatgcgtctgttcctctacgcaccggtgggtgacagcgaagcgattcgcgtagtactggcgattatcgcctttgcctccatcatcttcggtaacctgatggcgttgagccagaccaacatcaaacgtctgctcggttactcatctatctctcacctcggctatctgctggtggcgctgattgcgctgcaaaccggcgagatgtcgatggaagcggtaggggtttacctggccggttatctgttcagcagcctcggcgcgttcggcgtggtcagcctgatgtccagcccgtatcgtggcccggatgctgattccctgttctcttaccgcggtctgttctggcatcgtccgatcctcgcggcagtgatgacggtgatgatgctgtctctggccggtatcccgatgacgctgggctttatcggtaagttctacgtgctggcggtcggtgtccaggcacacttgtggtggctggtgggtgccgtggttgtcggttcggcaatcggcctctactactacctgcgcgtggcggtgagcctgtacctgcacgcaccggaacaaccgggtcgcgatgcaccgtcaaactggcagtacagcgcgggcggtatcgtggtgctgatttctgcactgttggtactggtgctgggtgtatggccacaaccgctgattagtattgtgcggttagcaatgccgctgatgtaa

SEQ ID NO: 131880 - protein, 425 aa, Shigella flexneri 2a str. 301
MDVTPLMRVDGFAMLYTGLVLLASLATCTFAYPWLEGYNDNKDEFYLLVLIAALGGILLANANHLASLFLGIELISLPLFGLVGYAFRQKRSLEASIKYTILSAAASSFLLFGMALVYAQSGDLSFVALGKNLGDGMLNEPLLLAGFGMMIVGLGFKLSLVPFHLWTPDVYQGAPAPVSTFLATASKIAIFGVVMRLFLYAPVGDSEAIRVVLAIIAFASIIFGNLMALSQTNIKRLLGYSSISHLGYLLVALIALQTGEMSMEAVGVYLAGYLFSSLGAFGVVSLMSSPYRGPDADSLFSYRGLFWHRPILAAVMTVMMLSLAGIPMTLGFIGKFYVLAVGVQAHLWWLVGAVVVGSAIGLYYYLRVAVSLYLHAPEQPGRDAPSNWQYSAGGIVVLISALLVLVLGVWPQPLISIVRLAMPLM

SEQ ID NO: 131881 - DNA, 1464 bp, Shewanella oneidensis MR-1
  CDS (1)..(1464): transl_table=11
atgactttctccgcttcccaactgctggcactgcttcccctgctgctgaccaccggggccatggcggccctgatgctggccatcgcctggcgccgctgtgtcaccaccgcctttaccgtgaccattgttggcctcaacatggcactgttctcgctgcccatcgtgatggcgcagggggatcagggggtcaccccgctgctgcaagtggacagttacgccgtcttctacatgggactggttctgatcggcgctctggccacctgtaccttcggtcagtcctggctgaaagcctacccggacaacagggaggagttcttcctgctgctgttgatcgccacagccggtggtctggtgctagcttgctcccgccacctcgcctccctgtttatcgggatcgagatgctgaccctgccgatgttcggtctggtgggctacgcctaccgcgagcgccactcgctggaagccgcggtgaaatacatggtgctttctgccgccgccaccgccttcctgctgtttggcatggcgctgctctatgcacaggcaggcagcctgagctttgccgccctggggcagaccctggccgagagcccggctcaccacccactgctgatgggcggtttggggttaatgctggtcggctttgcctttaaattgtcgctggcccccttccacctctggaccccggatgtctatgaaggtgccccggcaccggtcgccaccttcctcgccaccgtcagcaaggtggcggtctttgccgtgttgctgcgcttctatctggcggtcccggcggcgagcgatcccatgatccactggctgctggctgctatggcggtcatctccatcctcgtcggcaacctgctggcactggtgcagaccaacgtcaaacggatgctgggctactcctccatctcccactttggttatctgctggcggtgatcgtggcgagccgcatcggccagatgccggtggaagcggccggggtctatctgctgatgtatctcttcaccagtctgggtgcctttggcgtggtgagcatgatgtcgagcccctatcgcggcaaggatgcagactccctgcacagctatcgcggcctgttctggaagcgtccttacctcaccgccgtgctgacggtgatgatgctctctctggccggtattccgatgacgctcggctttatcggcaagttctacctcatcggcgtcaccgtcgaggcacagctctggtggctctccggtgccatcgtgctcggcagcgccctgggtctctactactacctcaaggtgatggtgaccctctatctgcgcgaaccgggcatgcagcagcgggatgccagcgccgactgggcactctcctccggtggcgtggtagtactgctctctgccgcgctggtggtgttgctgggactctatccccagccggtcatcactctggtgcagggtttccagcacgtggtgttgcagtaa

SEQ ID NO: 131882 - protein, 487 aa, Shewanella oneidensis MR-1
MTFSASQLLALLPLLLTTGAMAALMLAIAWRRCVTTAFTVTIVGLNMALFSLPIVMAQGDQGVTPLLQVDSYAVFYMGLVLIGALATCTFGQSWLKAYPDNREEFFLLLLIATAGGLVLACSRHLASLFIGIEMLTLPMFGLVGYAYRERHSLEAAVKYMVLSAAATAFLLFGMALLYAQAGSLSFAALGQTLAESPAHHPLLMGGLGLMLVGFAFKLSLAPFHLWTPDVYEGAPAPVATFLATVSKVAVFAVLLRFYLAVPAASDPMIHWLLAAMAVISILVGNLLALVQTNVKRMLGYSSISHFGYLLAVIVASRIGQMPVEAAGVYLLMYLFTSLGAFGVVSMMSSPYRGKDADSLHSYRGLFWKRPYLTAVLTVMMLSLAGIPMTLGFIGKFYLIGVTVEAQLWWLSGAIVLGSALGLYYYLKVMVTLYLREPGMQQRDASADWALSSGGVVVLLSAALVVLLGLYPQPVITLVQGFQHVVLQ

SEQ ID NO: 131883 - DNA, 1533 bp, Pseudomonas putida KT2440
  CDS (1)..(1533): transl_table=11
atgattttgccttggctgatcctgatccccttcatcggcggcttcctctgctggctgggtgagcgcttcggcgccaccctgccgcgctggatcgcgctgcttaccatgtccctgctgcttggcatcggcctgtggctgtggggtaccggcgactacacccttgctcccgccccgggcgccgaaccggcctgggctctcgaatacaaagtcgagtggatcaagcgtttcggcatcagcatccacctggccctggacggcctgtcgctgctgatgatcctgctcaccggcctgctcggtgtgctgtcggtactgtgttcctggaaagagatccagcgccacgtcggcttcttccacctcaacctgatgtggatcctcggcggcgtggtcggtgtgttcctggccctggacctgttcctgttcttcttcttctgggaaatgatgctggtgccgatgtacttcctcatcgcgctctggggtcacagctcggcagacggcaagaagacccggatctacgcggcgaccaagttcttcatcttcacccaggccagcggcctgatcatgctggtggcgatcctgggcctggtgctggtcaactacaacaccactggcgtgctcaccttcaactacagcgacctgctcaaggccgagttgccggccggtatcgagtacgtgctgatgctgggcttcttcatcgccttcgcggtgaagctgccagtggtgccgttccactcctggctgcctgacgctcacgcccaggcaccgaccgcaggctcggtggacctggcgggtatcttgctgaagaccgcggcctacggcctgctgcgcttcgctctgccgctgttcccgaacgcctcggccgagttcgcgccgatcgccatgaccctgggcctgatcggtatcttctacggtgccttcctggccttcgcacaaaccgacatcaagcgcctgatcgccttctccagcgtctcgcacatgggcttcgtgctgatcggtatctactccggcagccagcaggccctgcaaggtgcggtgatccagatgctggcccacggcctgtcggctgcggcgctgttcatcctgtccggccagctgtacgagcgcctgcacacccgtgacatgcgtcagatgggtggcctgtggcaccgcatcgcctacctgccggccatcagcctgttcttcgcagcggcatcgctgggcctgccaggcaccggcaacttcgtcggcgagttcctgatcctgatcggcagcttcgtgcatgtaccgtggatcaccgtgatcgccactaccggcctggtgttcggttctgtttactcgctgatcatgatccaccgtgcctacttcggcccggccaagaccgacaccgtgctggccggcatggacggtcgcgaactgatcatggttctgggtctggcggtattgctgatcctgctgggcgtgtatccgcagccgttcctcgacacctctgccgccaccatgagtggtgtgcagcagtggctcggatccgctttcactcaactcgcttcggcccggtaa

SEQ ID NO: 131884 - protein, 510 aa, Pseudomonas putida KT2440
MILPWLILIPFIGGFLCWLGERFGATLPRWIALLTMSLLLGIGLWLWGTGDYTLAPAPGAEPAWALEYKVEWIKRFGISIHLALDGLSLLMILLTGLLGVLSVLCSWKEIQRHVGFFHLNLMWILGGVVGVFLALDLFLFFFFWEMMLVPMYFLIALWGHSSADGKKTRIYAATKFFIFTQASGLIMLVAILGLVLVNYNTTGVLTFNYSDLLKAELPAGIEYVLMLGFFIAFAVKLPVVPFHSWLPDAHAQAPTAGSVDLAGILLKTAAYGLLRFALPLFPNASAEFAPIAMTLGLIGIFYGAFLAFAQTDIKRLIAFSSVSHMGFVLIGIYSGSQQALQGAVIQMLAHGLSAAALFILSGQLYERLHTRDMRQMGGLWHRIAYLPAISLFFAAASLGLPGTGNFVGEFLILIGSFVHVPWITVIATTGLVFGSVYSLIMIHRAYFGPAKTDTVLAGMDGRELIMVLGLAVLLILLGVYPQPFLDTSAATMSGVQQWLGSAFTQLASAR

SEQ ID NO: 131885 - DNA, 1470 bp, Pseudomonas putida KT2440
  CDS (1)..(1470): transl_table=11
atggaattcaccactcaacacttcatcgcattggcgccgatgctgatcaccaccatcaccacggtggtggtgatgctggcgatcgcctggaagcgcaaccactcgcagaccttcctgctgtccaccgtgggcctgaacctggccctgctgtcgctcctgccggcgctgaaggtcgcgccgctggcggtcacatcgctgatcaccatcgacaagttcgcctgcctgtacatggcgatcatcctcgtggcgacgctggcctgcgtcaccctcgcccacgcctacctcggcgagggcgccaagggtttcccgggcaaccgtgaagaactgtacctgttgctgctgatgtcggccctcggtggcctggtgctggtcagcgccaaccacctagccggcctgttcatcggcctggagctgttgtcggtaccggtctacggcctggtggcgtatgccttcttcaacaagcgatcgctggaagctggcatcaagtacatggtgctgtcggccgcaggctcggctttcctgctgttcggcatggccctgctgtacgccgacgccggcagcctgagcttcgaccagatcggcaaggccctggctaccaccagcatgccaagcctggtggcccagctgggcctgggcatgatgctggttggcctggccttcaagctgtcgctggtaccgttccatctgtggaccccggacgtgtacgaaggcgctccggcgccggtcgccgcgttcctggcaaccgccagcaaggtggcagtattcgccgttgtcgtacgcctgttcatgctctcccctgctgccagcagcggcgtgctcagcaccgtattggcggtgattgccgtagcctcgatcctgattggtaacctgctggcgctgacccagagcaacctcaagcgtctgctgggttactcgtccatcgcccacttcggttacctggtcatcgcgttggtcgccagcaagggcctggccctggaagccatgggcgtttacctggtcacctacgtgatcaccagcctgggcgccttcggcgtcatcaccctcatgtcctcgccatacggcggccgtgacgccgatgccctgtacgagtaccgcggcctgttctggcgccgcccgtacctgacagcggtactgaccgtgatgatgctgtcgctggcgggtatcccgctgaccgccggcttcatcggcaagttctacatcatcgctaccggtgtcgaatcgcacctgtggtggttggtcggtgcgctggtgatcggtagcgccatcggcgtgtactactacctgcgcgtcatggttaccctgtacctggtcgagccgaacctgcgtcgtcacgacgccccgctcaagtgggaacagcgcaccggcggtgtcatgctgctggctatcgccattctcgctttcgtactgggtgtgtacccgcagcccctgctggagatggttcagcaagcgggcctgcaactgatcggttga

SEQ ID NO: 131886 - protein, 489 aa, Pseudomonas putida KT2440
MEFTTQHFIALAPMLITTITTVVVMLAIAWKRNHSQTFLLSTVGLNLALLSLLPALKVAPLAVTSLITIDKFACLYMAIILVATLACVTLAHAYLGEGAKGFPGNREELYLLLLMSALGGLVLVSANHLAGLFIGLELLSVPVYGLVAYAFFNKRSLEAGIKYMVLSAAGSAFLLFGMALLYADAGSLSFDQIGKALATTSMPSLVAQLGLGMMLVGLAFKLSLVPFHLWTPDVYEGAPAPVAAFLATASKVAVFAVVVRLFMLSPAASSGVLSTVLAVIAVASILIGNLLALTQSNLKRLLGYSSIAHFGYLVIALVASKGLALEAMGVYLVTYVITSLGAFGVITLMSSPYGGRDADALYEYRGLFWRRPYLTAVLTVMMLSLAGIPLTAGFIGKFYIIATGVESHLWWLVGALVIGSAIGVYYYLRVMVTLYLVEPNLRRHDAPLKWEQRTGGVMLLAIAILAFVLGVYPQPLLEMVQQAGLQLIG

SEQ ID NO: 131887 - DNA, 1041 bp, Branchiostoma belcheri
  CDS (1)..(1041): transl_table=5
atgagtccctatatttccccattgtttggtcttgcaataggtagaagagtcttacttatttcatcttctactcattgagtttttgtatggctagggttagagttaggtacattagcatttatccctatattagcttggtggcattcgtcgctggaggttgaagcaactgtaaagtacttcattattcaggcgatagcggctgcagtgtttttttttggggggttagtaataacaagtactgaatatattagtgggttaagtcagtttgtagggaattttggtgaggtcttgattatattttctattattataaagctggggctagtgccatttcattactgggtggtggatgtagttcaaggtctaaattacttgcccggaatggtcttgttaacatgacagaaagtaccgggtttaatggttttagtccaattagtatcaatacagaatgggcttattttgctcatctttggggcattatctgctttttggggtgggttaggaggtttgggccagacacaaatgcggaaattactagcgttctcttcaattgcccatttagggtgattggtgtctgggtgtgtcgtggggacaatattgggtagaatatattttatcttatatgtagtgctttcaattcctgtatttgtgtttttatatattttaaataatactcatttaaatcaagtgcgagcaagattagtaagaaatcctgttgctgctatagttgttggagtggggtttttgtcattagcggggttacccccttttataggattttttggtaagtggttagtgctaacttgattacttaataattttctggtggggggtgcagtagcgttagtagtcggggctttagttagtttattctattatttacgagtaagatatatatgcatggtaattttagggccacagcagattatggtaagattaagctgacgaaaaggatttatgggtagtttgttaggggggttagtagtgttaaacttgttaggattgctattggtaggaggcattagctcattatctaaatag

SEQ ID NO: 131888 - protein, 346 aa, Branchiostoma belcheri
MSPYISPLFGLAMGSSVLLISSSTHWVFVWLGLELGTLAFIPMLAWWHSSLEVEATVKYFIIQAMAAAVFFFGGLVMTSTEYISGLSQFVGNFGEVLIMFSIIMKLGLVPFHYWVVDVVQGLNYLPGMVLLTWQKVPGLMVLVQLVSMQNGLILLIFGALSAFWGGLGGLGQTQMRKLLAFSSIAHLGWLVSGCVVGTMLGSMYFILYVVLSIPVFVFLYILNNTHLNQVRASLVSNPVAAMVVGVGFLSLAGLPPFMGFFGKWLVLTWLLNNFLVGGAVALVVGALVSLFYYLRVSYMCMVILGPQQIMVSLSWRKGFMGSLLGGLVVLNLLGLLLVGGISSLSK

SEQ ID NO: 131889 - DNA, 1278 bp, Salmonella enterica subsp. enterica serovar Typhi Ty2
  CDS (1)..(1278): transl_table=11
atggacgtcacgccgctgatgcgcgttgacggctttgcgatgctctacaccgggctggtgctgctggcgagcctcgccacctgtacttttgcctacccgtggctggaaggctataacgataaccaggaagagttctacctgctggtgttaatcgccagcctggggggaattctgctggcgaacgccaaccatctggcggcgctgttcctcggtattgaactgatctcactgccgctgttcggcctgattggttatgctttccgccagaaacgctcgctggaagccagtatcaaatacaccatcctctccgccgccgcctcgtctttcctgctgttcgggatggcgctggtctatgcgcagtccggcaacctgtctttcgaagcgctcggtaagagcctcggcgatggtatgctgcacgagccgttgctgctggcgggctttggcctgatgattgtcggtctgggctttaaactctctctggtgccgttccacctgtggacgccagacgtttaccagggcgcgcctgcgccggtttctaccttcctggcgacggcgagcaaaatcgctatcttcggcgtggtaatgcgtctgttcctgtatgcgccggtaggcgacagcgaagcggtacgcgtggtgctgggcattatcgcctttgcctctatcatcttcggtaacctgatggcgctgagccagaccaacatcaaacgtctgctcggttactcttctatctctcacctcggctatctgctggtggcgctgattgccctgcagagcggcgagatgtcgatggaagcggtaggcgtttatctggccggttatctgttcagcagcctcggcgcgtttggcgtggtcagcctgatgtccagcccgttccgcggcccggatgccgactccctgtactcttaccgtggtctgttctggcaccgtccggttcttgccgcggtgatgacggtgatgatgctgtcgctggcaggtatcccaatgacgctgggctttatcggcaaattctacgtgctggcggtcggcgttcaggccagcctgtggtggctggtcgccgccgtggtggtgggttccgcgattggtttgtactactacctgcgcgttgcggtgagtctctacctgcacgcgccgcagcaaccgggacgcgacgcgccgacaaactggcagtacagcgcaggcggtatcgtggtgctgatctccgcgttgctggtgttggtactgggcgtctggccgcagccgctgattagccttgtgcagttagcgacgccgttgatgtaa

SEQ ID NO: 131890 - protein, 425 aa, Salmonella enterica subsp. enterica serovar Typhi Ty2
MDVTPLMRVDGFAMLYTGLVLLASLATCTFAYPWLEGYNDNQEEFYLLVLIASLGGILLANANHLAALFLGIELISLPLFGLIGYAFRQKRSLEASIKYTILSAAASSFLLFGMALVYAQSGNLSFEALGKSLGDGMLHEPLLLAGFGLMIVGLGFKLSLVPFHLWTPDVYQGAPAPVSTFLATASKIAIFGVVMRLFLYAPVGDSEAVRVVLGIIAFASIIFGNLMALSQTNIKRLLGYSSISHLGYLLVALIALQSGEMSMEAVGVYLAGYLFSSLGAFGVVSLMSSPFRGPDADSLYSYRGLFWHRPVLAAVMTVMMLSLAGIPMTLGFIGKFYVLAVGVQASLWWLVAAVVVGSAIGLYYYLRVAVSLYLHAPQQPGRDAPTNWQYSAGGIVVLISALLVLVLGVWPQPLISLVQLATPLM

SEQ ID NO: 131891 - DNA, 1629 bp, Streptomyces avermitilis MA-4680
  CDS (1)..(1629): transl_table=11
gtgagcgcatcagccgtccacagcctgtggacaacggcggccgatccgatttccaagatcgacgcacccaagatcgaatacgggcaattgtcgcccaccctgatcgtcatcggggcggctctcgtcggagtgctggtcgaggcgttcgtcccgcgcaagtcccgctactacgcccaggtgttcgtgtccgtcgtcgcgctcgccgccgccttcgcggccgtggtggcgctcgcggcgggcggatacggcaccacgaaggcgcacatcgcggccatgggcgcgatcgccgtcgacggaccggccctgttcctccagggcacgatcctgctcgccggactgctcggcgtgttcaccttcgccgaacggcgcctcgacccggaggtacacggcaaccgggtcgactccttcgccgcgcaggccgcgtccgtgccgggcagcgacagcgagaaagcggcggtcaaggcagggttcaccaccaccgaggtgttcccgctgctcctcttcgccgtcggcggcatgctgatcttcccgtcggccaacgacctgctgacgctcttcgtggccctggaagtcttctcgctgcccctgtacctgctgtgcgccgtggcccgccgcaagcggctcatgtcgcaggaggccgccgtcaagtacttcctgctcggcgccttcgcctccgcgttcaccctcttcggcatcgcgctcctgtacggatacgcgggctcgatgtcgtacgcgacgatcgcgcaggtcgtcgacggcaccgtgcagaacgtcgacccggcgctcgccggcaccatgggcaacgacgcgctgctgctcgtcggcgccgcgatgctggtgatggggctgctgttcaaggtgggcgcggtgccgttccacatgtggacgccggacgtgtaccagggcgcgccgaccccggtcaccggcttcatggcggcggcgaccaaggtggcggcgttcggcgcgctgctgcggctcctgtacgtggtcctgccgggcctgcgctgggactggcggccggtcatgtgggccgtcgcgatcgtcaccatgctcggcggtgcgatcgtcgcgatcacccagaccgacatcaaacggctgctcgcgtactcgtcgatcgcgcacgcgggcttcatcctcgcgggtgtcatcgcgacgaccccggacggtgtctcgtccgtcctcttctacctgggcgcctactcgttcgtgacgatcggggccttcgcggtggtcacactcgtccgggacgcgggcggcgaggccacccacctgtccaagtgggcggggctcgggcgcaggtcgccgctggtggcggccgtgttcgcggtcttcctgctggccttcgcgggcattccgctgacctccgggttcgccggaaagttcgccgtgttcaaggcggcggcggagggcggcgcggccccgctcgtcgtggtcggtgtgatctcgtcggcgatcgccgcgttcttctacatccgggtgatcgtgctgatgttcttcagcgagccgcgtccggaggggccgacggtggccgtgccgtcgccgctgacgacgacggtgatcggggtgggcgtggtggtcacgctggtgctgggggtcgcaccgcagtacttcctggatctggccggttag

SEQ ID NO: 131892 - protein, 542 aa, Streptomyces avermitilis MA-4680
MSASAVHSLWTTAADPISKIDAPKIEYGQLSPTLIVIGAALVGVLVEAFVPRKSRYYAQVFVSVVALAAAFAAVVALAAGGYGTTKAHIAAMGAIAVDGPALFLQGTILLAGLLGVFTFAERRLDPEVHGNRVDSFAAQAASVPGSDSEKAAVKAGFTTTEVFPLLLFAVGGMLIFPSANDLLTLFVALEVFSLPLYLLCAVARRKRLMSQEAAVKYFLLGAFASAFTLFGIALLYGYAGSMSYATIAQVVDGTVQNVDPALAGTMGNDALLLVGAAMLVMGLLFKVGAVPFHMWTPDVYQGAPTPVTGFMAAATKVAAFGALLRLLYVVLPGLRWDWRPVMWAVAIVTMLGGAIVAITQTDIKRLLAYSSIAHAGFILAGVIATTPDGVSSVLFYLGAYSFVTIGAFAVVTLVRDAGGEATHLSKWAGLGRRSPLVAAVFAVFLLAFAGIPLTSGFAGKFAVFKAAAEGGAAPLVVVGVISSAIAAFFYIRVIVLMFFSEPRPEGPTVAVPSPLTTTVIGVGVVVTLVLGVAPQYFLDLAG

SEQ ID NO: 131893 - DNA, 1482 bp, Bacillus cereus ATCC 14579
  CDS (1)..(1482): transl_table=11
atggtgccagaatttattattctcggcgccgccatcctcctttccatatgtgatttgttttttaagctgaaccatagatatgtagctcttggtgcgattgctgccatcgtattagcaatcgtgtcattaattactctatatagcgaaccggcaggagatattttaaatggatcgtttgtgttagatggattttcaaaagggtttaaaacgttgctattaggtgcctcagccctcattttatgcaccgcaatgagcgatgataagaagaatccaatcgaagataaaggtgaatattattacttatttttaatggcacttcttggtgcgatgttcatggcttctagtgtagattttattacccttttcgttggtttggagttactttcactttcttcttatattttagtaggaatacgaaaaaagagccgtgcatcaaatgaagcggcaatgaaatacgtcattagcggaggaattggaacggcgattacgctcttcggaatgagttatttatacggtattacaggttcaactaacattgtagatatgcaaaaggtactcactggggaactcgctagtggtattcagttattgttagctctcgcatttcttttattgctagttggtctctcatttaaaattgccacagtgccgtttcatatgtgggcacctgatgtgtatgaaggagcggctacacctgttactgcttttcttggaacgatttctaaaattgccgggttcctactcattattcgtttgttccttatgatctttgcaagtgtattaatacaaggagatatgcaatctttatatgggcatatgagtatatatattgcggtgctagcaagtattacgatgattgttgggaatgtagtcgcattaaaacaatacaatataaagcgtttatttgcttattcgggcattgctcatgcaggatatttactcgttccacttgtggcattatcaccatttacgatggatagcatgtggttttatatgctggcatacatgcttatgaatataggcgcatttgctatcatccacggcttaatcttacaaaataatgaggaaaatataacaattttcacaggtttatataaaaggtcaccatttacagcgataatgatgacaatttttattttatcgttggctgggataccaggaacggctggctttattggaaagattaatatctttttaggcgcacttcatgtagagccagcacattacgtactagcttcgattatgatgggtacgacagttgtttcattcgtatattatttccgtattttacaacaaatgtttttccgcaccggagagacagaagagagaatacggttaccgttaaatataaaggttgttatgagtctttgtgcaatttcgattgtaatactagggattatgccgatgattgggtacaatttcttttatgaatattttccattaatgaaagatttcttcttcttagggaacgtggtacaatag

SEQ ID NO: 131894 - protein, 493 aa, Bacillus cereus ATCC 14579
MVPEFIILGAAILLSICDLFFKLNHRYVALGAIAAIVLAIVSLITLYSEPAGDILNGSFVLDGFSKGFKTLLLGASALILCTAMSDDKKNPIEDKGEYYYLFLMALLGAMFMASSVDFITLFVGLELLSLSSYILVGIRKKSRASNEAAMKYVISGGIGTAITLFGMSYLYGITGSTNIVDMQKVLTGELASGIQLLLALAFLLLLVGLSFKIATVPFHMWAPDVYEGAATPVTAFLGTISKIAGFLLIIRLFLMIFASVLIQGDMQSLYGHMSIYIAVLASITMIVGNVVALKQYNIKRLFAYSGIAHAGYLLVPLVALSPFTMDSMWFYMLAYMLMNIGAFAIIHGLILQNNEENITIFTGLYKRSPFTAIMMTIFILSLAGIPGTAGFIGKINIFLGALHVEPAHYVLASIMMGTTVVSFVYYFRILQQMFFRTGETEERIRLPLNIKVVMSLCAISIVILGIMPMIGYNFFYEYFPLMKDFFFLGNVVQ

SEQ ID NO: 131895 - DNA, 1521 bp, Bacillus anthracis str. Ames
  CDS (1)..(1521): transl_table=11
atggatatgaatacgttacttagcttatcgtggcatctcatggtgccagaattcatcattctcggggctgccatccttctttccatatgtgatttgttttttaagctgaaccatagatatgtagcgcttggtgcaatcgcggcggtcgtattagcaatcgtgtcactaattacgctatatagcgaaccagcgggagatattttaaatggatcgtttgtgttagatggattttcaaaaggatttaaaacgttgttgttaggcggagccgccctcatcttatgcaccgcaatgagcgatgataagaaaaatccaattgaagataagggagagtattattacttatttttaatggcgcttcttggggcgatgtttatggcttctagcgttgatttcgttacacttttcgtcggtttagaattgctttcactttcttcctacattttagtaggaatacgaaaaaagaaccgtgcatcaaatgaggcggccatgaaatatgtcattaatggaggaattggaacggcaattacactctttggaatgagttacttatacggcattacagggtcaactaatatcgtggatatgcaaaaagtatttgccggggaactggctagtggcattcagttattgctagctctcgcattcctactcttactcgttgggctctcattcaaaattgcgacagtgccgtttcatatgtgggcacctgatgtgtatgagggagcggctacacctgttactgcttttcttggaacaatttctaaaatggcgggtttcttactcattattcgtttgttcctcatggtttttgcaagtgtatcagtgcaaggagatatgcaatctttatacggacgtatgagcatatatatcgctgtgctagctagcattacgatgattattggaaatgtagtcgcattaaagcaatataacgtaaaacgcctatttgcttattcgggaatcgcccatgcgggatatttactcgttccgcttgtcgcattatcaccatttacgatggatagtatgtggttttacatgcttgcgtatatgcttatgaatataggcgcgtttgcaattatccacggcttaatcttacaaagcaataaagaaaatattaccattttcactggattatataaaaggtcgccatttacagcgattgtgatgacgatttttattttatcgctagcggggataccaggaacagctggtttcattgggaaaattaacatctttttaggggctcttcatgtagagccagctcattacgtactagcttctattatgatggggacgacagtcatttcattcgtatattatttccgtattttacagcaaatgtttttccggacgggagaagtagaagagaaaattcgcttgccgctcaatataaagattgtgatgagcttttgtgcaatttcgattgtaatactagggattgtgccgatgattggatacaatttcttttatgaatattttccattaatgaaagatttcttcttcttagggaacgtggtacaatag

SEQ ID NO: 131896 - protein, 506 aa, Bacillus anthracis str. Ames
MDMNTLLSLSWHLMVPEFIILGAAILLSICDLFFKLNHRYVALGAIAAVVLAIVSLITLYSEPAGDILNGSFVLDGFSKGFKTLLLGGAALILCTAMSDDKKNPIEDKGEYYYLFLMALLGAMFMASSVDFVTLFVGLELLSLSSYILVGIRKKNRASNEAAMKYVINGGIGTAITLFGMSYLYGITGSTNIVDMQKVFAGELASGIQLLLALAFLLLLVGLSFKIATVPFHMWAPDVYEGAATPVTAFLGTISKMAGFLLIIRLFLMVFASVSVQGDMQSLYGRMSIYIAVLASITMIIGNVVALKQYNVKRLFAYSGIAHAGYLLVPLVALSPFTMDSMWFYMLAYMLMNIGAFAIIHGLILQSNKENITIFTGLYKRSPFTAIVMTIFILSLAGIPGTAGFIGKINIFLGALHVEPAHYVLASIMMGTTVISFVYYFRILQQMFFRTGEVEEKIRLPLNIKIVMSFCAISIVILGIVPMIGYNFFYEYFPLMKDFFFLGNVVQ

SEQ ID NO: 131897 - DNA, 1740 bp, Penicillium marneffei
  CDS (1)..(1740): transl_table=4
ttattttatacaaaatgtaattatcgttatctatctttgttaatagcatcagttttttctttattattgtctaattctttagcttttagacgtgatatttcaatactttattctagaattggaattattattttattttattgtatatatttagcttacaatagtttatttataacatatatagataatggtattggtatatttggaagtttattttatatatcttctataacacaagcgtttcatattttaatcttttttttaagtatattaatattaaatatgactgctttttatcctagaaaattaatatatagtggatatttaggtatttttaatttattattttcaaagttacaatttttaaaaaaacttactatatctaatattattttaaaaaatggagaacaatattctatattagaatatactttagtgttattatttgttataataggtagtattctattaatatctagtagtgatttaatctctatttttttagctatagaattacaaagttatggattatatttattatgtgcaatttatagaaattcagagtcatctacttcatctagtttaacttattttttattaggtgcattagcatcttgttttatacttttaggtatagctttaatatatgctaatttaggtgtaacttatttagatagtttttatataataaataatttatcttctattttagatcaaagtgtaaataaatttaataattatacaacttttataccttattctattttattaatagctgtaggtctattatttaaaatatctgctgctccatttcatttttgatctcctgatgtttatgatggtatccctacaatagtaacaacatttgttgcaaatattgcaaaaatatctattttaattttaatattacaattagttcattttacaaataatatttatatttctactaattattcttgaacaactagtttattattaagttctttattatctttaactataggtactgtattaggtttaactcaatttagaattaaaagattattagcttatagtacaatatcacatttaggttttatgttattagctttaagtattaatagtgtagaatcaatacaatcttttatattttatttaatacaatatagtatttctaatgttaacgcattcattatattagtagctataggttatagtttatatagttataatgatagtaatataaataataaacaaatagtagataaaaataattctcctatacaaatgataactcaattaaaaggatatttccatattaatagtatattagctttaagttttgctattactttattttcatttgctggtattcctcctttaatgggattctttgcaaaacagatggtattttcttctgctttacaagaagggtttatttttttaactttaattggtgtattaactagtgttattagtgctgtatattatttatacatagtgaaaactatgttttttgattgacattcttatacatatttaaataaattaaataatttaagaatacctgttgttttaattaataaaaataaaaaaataaaagaattttatttaaaatcagattttactttatctagttcttttagtttaactatttcaattttaactttagtaatattattatttatatttatgcctaatgaatgattaaatatgtcaaatatactttctatattattatttgtacctaatagtatataa

SEQ ID NO: 131898 - protein, 579 aa, Penicillium marneffei
MFYTKCNYRYLSLLIASVFSLLLSNSLAFRRDISILYSRIGIIILFYCIYLAYNSLFITYIDNGIGIFGSLFYISSITQAFHILIFFLSILILNMTAFYPRKLIYSGYLGIFNLLFSKLQFLKKLTISNIILKNGEQYSILEYTLVLLFVIIGSILLISSSDLISIFLAIELQSYGLYLLCAIYRNSESSTSSSLTYFLLGALASCFILLGIALIYANLGVTYLDSFYIINNLSSILDQSVNKFNNYTTFIPYSILLIAVGLLFKISAAPFHFWSPDVYDGIPTIVTTFVANIAKISILILILQLVHFTNNIYISTNYSWTTSLLLSSLLSLTIGTVLGLTQFRIKRLLAYSTISHLGFMLLALSINSVESIQSFIFYLIQYSISNVNAFIILVAIGYSLYSYNDSNINNKQIVDKNNSPIQMITQLKGYFHINSILALSFAITLFSFAGIPPLMGFFAKQMVFSSALQEGFIFLTLIGVLTSVISAVYYLYIVKTMFFDWHSYTYLNKLNNLRIPVVLINKNKKIKEFYLKSDFTLSSSFSLTISILTLVILLFIFMPNEWLNMSNILSILLFVPNSI

SEQ ID NO: 131899 - DNA, 1365 bp, Rhodopseudomonas palustris CGA009
  CDS (1)..(1365): transl_table=11
atgaccgccgcccaattcgccgcgctatcaccgctggtggtgctggccatcgccgctgtcgcggcgatgatgctggtgccgctggcgcggctgcagatcgtgcaggcctctgccgctgccgggctggcgatcgccgcagcattggtgctgctgcggatcggcgcgcccgccgcaccgatgggcgcgctcttcaccgacgacggcccggcgcggttcggcatcgtgtttgcgtgcctggtgtcgctcggcgcgttggtgtttctgcgcaccggtcaccccgccaaggaggcgccgtcgctgctggtgctggtggcgatcggtgccgccacgttggccggcgccggccacgccgcgacgctgtttctcggcatcgaaatcctcagcctgtcgctgatcgcgctgttcgcgtttcgcctgacgcggcaggggctggaggcggcctacaagtttctggtgatgagcggtctggcgtcctccgcgctgctgctcggcatcgcgctgatctttgccgaaaccggcgcgctggatttcgccggctggggtggtcgcggtgcgctgacggcgttcggcaccgcgctgctgctcgcaggtctcgccttcaagttctcgctggtgccgttccacatgtggacgccggatgccttcgaagccgcaccggcgagtgccgcgacgctggccggcgtggtgtccaaatccgcggtggcgatcgtgatcctgcggctagcgctgaccgcgcatctgccggagccggtgtggagccaaggtctcgccgcgctcggcggcgcctcggtgctgatcggcaatctgctggcgctgcggcagccgcaactgccgcggatgctcggctattcgacgatcgcgcattccggctacatcgcgctgatcatcgcctccggcacgccgcatgccggcgaggcggtgctgttctatctggcgatctatgcgccggcgatgctcggggcgctgtgcgtctcggccgcgctcggccgcgcgccgacgctgcctgacctgcacgggctgatgaagcggcgcccgcttgaggcgattgcgctgtcactgtcgctattgtcgctcgccggcctgccggcggcgggcggcttcatcgccaagctgttcctgctgcgggtcctgatcgacggcagcctgtgggtgctggtcgggatcgtggtcgccggctcgtcgctcggcttcttctactacgcgaagttcttcaccgcgccgttcgtcggccacacccacgacgagtccgagccgctgccgcagctcgatcgcggcctcttgattgtttgcatcgcgctgatcgtgatcttcggggtggccccggctggcctgatgaacgtcgttgccgcgacgatggcgccgtag

SEQ ID NO: 131900 - protein, 454 aa, Rhodopseudomonas palustris CGA009
MTAAQFAALSPLVVLAIAAVAAMMLVPLARLQIVQASAAAGLAIAAALVLLRIGAPAAPMGALFTDDGPARFGIVFACLVSLGALVFLRTGHPAKEAPSLLVLVAIGAATLAGAGHAATLFLGIEILSLSLIALFAFRLTRQGLEAAYKFLVMSGLASSALLLGIALIFAETGALDFAGWGGRGALTAFGTALLLAGLAFKFSLVPFHMWTPDAFEAAPASAATLAGVVSKSAVAIVILRLALTAHLPEPVWSQGLAALGGASVLIGNLLALRQPQLPRMLGYSTIAHSGYIALIIASGTPHAGEAVLFYLAIYAPAMLGALCVSAALGRAPTLPDLHGLMKRRPLEAIALSLSLLSLAGLPAAGGFIAKLFLLRVLIDGSLWVLVGIVVAGSSLGFFYYAKFFTAPFVGHTHDESEPLPQLDRGLLIVCIALIVIFGVAPAGLMNVVAATMAP

SEQ ID NO: 131901 - DNA, 1056 bp, Conus textile
  CDS (1)..(1056): transl_table=5
atgttttcaagtcttccgtttgggttaatatttttatctgtaatagggtttgggactataatgtctctttcttctgtccattggttggggatttgagcgggtttagaaataaatttgattgggtttttaccaatacttatctaccaaaaaaaggtttctgaaagagagtctgctgttaagtatttcattgttcaggcgctagggtctagtttattgatttttgggagtcttttaagatttagaacttcttttgggtgggatacgatctcaatgagcaacggtagtgggctcggtctttgtgccctagtaagagggctgtctgtaaagcttggggtattcccctttcactattgggttcctagagtaatggctggtttatcatgattttcccgtatattgctagcaacctgacagaagttggctccgttatttttacttctttctttatgtgagttaggtgaaacaaaagaactgcctgttttgttttgtattataagtgcggggagagctttggtcggtggtattggggggctaaaccagacacaaatccgggcgcttcttgcttattcatctattgggcatttaggttgaatgctctttgctatgcttcatagagagtgatgtataaagttatatttacttgtttatctaagtattactgcctctttgtttataagcttatgattaaaagattctagagctataaaagatgttagtagattgaagcactttaaagcctatcatttagtaattatgttgttattactttctctttctgggttacctccgcttttaggtttcgtttctaagtgattagtggtctatattggtagaaggggatcgttcttatttattatttttttattaattttgggatctctcataaggctattttattatttaagactgtttttttcttttttcttaaatttttttaagaataatgacaggggatcagatattgctactatgaaaagaggcgttattttgatttctgtgttaaacatggttggaggggcgttaatcttattgaggaattttatgggaatgatataa

SEQ ID NO: 131902 - protein, 351 aa, Conus textile
MFSSLPFGLMFLSVMGFGTMMSLSSVHWLGIWAGLEMNLIGFLPMLIYQKKVSESESAVKYFIVQALGSSLLIFGSLLSFSTSFGWDTISMSNGSGLGLCALVSGLSVKLGVFPFHYWVPSVMAGLSWFSRMLLATWQKLAPLFLLLSLCELGETKELPVLFCIMSAGSALVGGIGGLNQTQIRALLAYSSIGHLGWMLFAMLHSEWCMKLYLLVYLSITASLFMSLWLKDSSAMKDVSSLKHFKAYHLVIMLLLLSLSGLPPLLGFVSKWLVVYIGSSGSFLFIIFLLILGSLMSLFYYLSLFFSFFLNFFKNNDSGSDIATMKSGVILISVLNMVGGALILLSNFMGMM

SEQ ID NO: 131903 - DNA, 1521 bp, Prochlorococcus marinus str. AS9601
  CDS (1)..(1521): transl_table=11
gtgcccaacgaaatctttacaattaatttaaatgctcaagccattattccagaggcttttattttactaggtattgttggaacacttcttgtagatttagctggagaaaaaactgcatcgaagtgggcaccaataatttgctatttgtcaatcggaagctctcttgttagcttggcattgcagtggagtaatccggtagaaaacgcattccttggatcctttaattcagataatttggcaatcgcatttagagcaataatttctttatcaaccttgatttctttacttataagttggcggtatacagaacaaagtggaagcccaattggagagtttgctgcgatagttctttcagccacacttggagcaatgcttttatgtggatctactgaccttattagtgtatttatttctcttgaaactttatctgtagcaagctacttactttctggctacctcaagagagatccaagaagttcagaagcggccttaaaatacctccttgtcggatcagctgctgctgctgtctatttgtatggatcctcttttctttatggattaagtggttcaacaaacttagcgacaataggtttagagattatcaataagccatccttcataacttcactagcacttgtatttgtcttatcaacagttgcatttaaaattgctgctgttccctttcatcaatggactcctgacgtatatgagggttcacctactcctgtagtagcttttttatctgttggttcaaaaacagcgggctttgcatttgcgataagaatattaagcacaactttctcttcttttgacgaagaatggaaacttttatttaccattttggcaatattgagcatggctctaggaaatgttgtagctctagctcaaacctcaatgaaaaggatgctagcttacagttctattggacaagcaggatttgtaatgattggaatagtatctggcacacaagatggtttatcagctgctgttttatatttggctgcatatttatttatgaatttgggtgcattttcttgtgtaatacttttctcactaagaactggttctgacagaattcttgattactcaggactttaccaaaaagatcctctcattacattaggcttaagcctttgtcttctatcacttggaggtttacctccaatgttgggattttttggaaaaatatacttgttctttgcaggttgggccaatcatcaatatctactagttattgttggattagtaacttcagttatatctatttattactacatttcagtgataaaaatgatggtagttaaagaaccacaggaagcttctgaaatagtcaaatcatatcctgaaattaattggggaattgaaggattacctcccttgagaattgcactttacacttgcgtagcggtaactgctcttggaggaatcctatctaatcctctttttaaattagccaatacagcagtttcagaaactccttttttacaagatattattgctatagcaaacaatatttcctag

SEQ ID NO: 131904 - protein, 506 aa, Prochlorococcus marinus str. AS9601
MPNEIFTINLNAQAIIPEAFILLGIVGTLLVDLAGEKTASKWAPIICYLSIGSSLVSLALQWSNPVENAFLGSFNSDNLAIAFRAIISLSTLISLLISWRYTEQSGSPIGEFAAIVLSATLGAMLLCGSTDLISVFISLETLSVASYLLSGYLKRDPRSSEAALKYLLVGSAAAAVYLYGSSFLYGLSGSTNLATIGLEIINKPSFITSLALVFVLSTVAFKIAAVPFHQWTPDVYEGSPTPVVAFLSVGSKTAGFAFAIRILSTTFSSFDEEWKLLFTILAILSMALGNVVALAQTSMKRMLAYSSIGQAGFVMIGIVSGTQDGLSAAVLYLAAYLFMNLGAFSCVILFSLRTGSDRILDYSGLYQKDPLITLGLSLCLLSLGGLPPMLGFFGKIYLFFAGWANHQYLLVIVGLVTSVISIYYYISVIKMMVVKEPQEASEIVKSYPEINWGIEGLPPLRIALYTCVAVTALGGILSNPLFKLANTAVSETPFLQDIIAIANNIS

SEQ ID NO: 131905 - DNA, 1536 bp, Chlorokybus atmophyticus
  CDS (1)..(1536): transl_table=11
atggaatttaaagatctaatatcttccttgaacttaataagacttctccctgaagggattgtaactattcttttagtattcattttattgatagatttaacatttcaaaaaagagttctttcttggttgctatatattcctcttgtagggcttgtttgcagtatggtggttctacttcgtcaatggggttctcaagatactctatcttttttgggtagttttcaaggagattcacttagtattgcattccgcttcttcattttattatctgctgttttgtgtattcttctttctaaagaatatgttgagcggtctcgtactgcgttaacagaattctttgttcttcttttaacagcagttatagggggcatgttattgtcaggtgctaatgatttaatcatgatctttctttcattggagaccttgggattatcttcctatctattaactgggtatatgaaaaaggatctacgctcaaatgaggcagccattaaatatttattaataggtgcagctagttcctcaattttactttatggtctttctttactttatggattgtcgggtggagcaattgaaataagtacgattgcaaaaaatattgtagataaaggattatctcaatctttcgcatcttgggttgctttaatctttattactgtagggatcggttttaaagtagcagcggctccatttcatcaatgggctcctgatgtatatgaaggttcaccaacccctgttgttgcttttttatccgttggatcaaaagcagcgggtcttgccttagcaacacgtattcttacaaccctctttccatatctgactaatgaatggcacctcttgtttcaagtattagctagtttaagtatgattttaggcaatttaatagcaatctctcagaccagcatgaagcgtatgcttggatattcatccgttagtcaagctggttttttaatgattggacttatagcgggcaatccaaatggatactcgagtatgctagtttatatgcttctttatatctttatgaatttgggagcctttgcttgtataatcctgtttggattgaaagccgggacagaccaaatccgtgattatgctggattatatagaaaagatccttttttagttttttgctttagcatctcattactttctttaggcggaatcccaccattagcaggcttttttggcaaactctatctattttggtcggggtggcaatcaggattctacatcctcgtatttattggcctttttaccagtgtaatctctatctattattatcttcgtgttattaaagtaatgattgttacagaaccacaagagatgtcaatctatgtacaaagatatactcaaagaagatggtcaataacgcagcttcaacccatagaattaggaattggtctctgtgtattaggatccgtattagctggggtacttgttaatcctattataaatatagctcagcaaacagtactttacactccgttattacaacaaagcgaagaacttatgcgaactctaaccttttaa

SEQ ID NO: 131906 - protein, 511 aa, Chlorokybus atmophyticus
MEFKDLISSLNLIRLLPEGIVTILLVFILLIDLTFQKRVLSWLLYIPLVGLVCSMVVLLRQWGSQDTLSFLGSFQGDSLSIAFRFFILLSAVLCILLSKEYVERSRTALTEFFVLLLTAVIGGMLLSGANDLIMIFLSLETLGLSSYLLTGYMKKDLRSNEAAIKYLLIGAASSSILLYGLSLLYGLSGGAIEISTIAKNIVDKGLSQSFASWVALIFITVGIGFKVAAAPFHQWAPDVYEGSPTPVVAFLSVGSKAAGLALATRILTTLFPYLTNEWHLLFQVLASLSMILGNLIAISQTSMKRMLGYSSVSQAGFLMIGLIAGNPNGYSSMLVYMLLYIFMNLGAFACIILFGLKAGTDQIRDYAGLYRKDPFLVFCFSISLLSLGGIPPLAGFFGKLYLFWSGWQSGFYILVFIGLFTSVISIYYYLRVIKVMIVTEPQEMSIYVQRYTQRRWSITQLQPIELGIGLCVLGSVLAGVLVNPIINIAQQTVLYTPLLQQSEELMRTLTF

SEQ ID NO: 131907 - DNA, 1533 bp, Populus trichocarpa
  CDS (1)..(1533): transl_table=11
atgatctggcatgtacagaatgaaaacttcattctcgattctacgagaatttttatgaaagcctttcatttgcttctcttcgatggaagttttattttcccagaatgtatcctaatttttggcctaattcttcttctgatgatcgattcaacctctgatcaaaaagatatgccttggttatatttcatctcttcaacaagtttagtaatgagtataacggccctattgttccgatggagagaagaacctatgattagcttttcgggaaatttccaaacgaacaatttcaacgaaatctttcaatttcttattttactatgttcaactctatgtattcctctatccgtagagtacattgaatgtacagaaatggctataacagagtttctcttattcgtattaacagctactctaggaggaatgtttttatgcggtgctaacgatttaataactatctttgtagctccagaatgtttcagtttatgctcatacctattatctggatataccaagaaagatgtacggtctaatgaggctactacgaaatatttactcatgggtggggcaagctcttctattctggttcatggtttctcttggctatatggttcgtccgggggagagatcgagcttcaagaaatagtgaatggtcttatcaatacacaaatgtataactccccaggaatttcaattgcgcttatattcatcactgtaggaattgggttcaagctttccccagccccttctcatcaatggactcctgacgtatacgaaggatctcccactccagtcgttgcttttctttctgttacttcgaaagtagctgcttcagcttcagccactcgaattttcgatattcctttttatttctcatcaaacgaatggcatcttcttctggaaatcctagctattctgagcatgatagtggggaatctcattgctattactcaaacaagcatgaaacgtatgcttgcatattcgtccataggtcaaattggatatgtaattattggaataattgttggagactcaaatggtggatatgcaagcatgataacttatatgctcttctatatctccatgaatctaggaacttttgcttgcattgtattatttggtctacgcaccggaactgataacattcgagattatgcaggattatacacgaaagatccttttttggctctctctttagccctatgtctcttatccctaggaggtcttcctccactagcaggttttttcggaaaactccatttattctggtgtggatggcaggcaggcctatatttcttggtttcaataggactccttacgagcgttctttctatctactattatctaaaaataatcaagttattaatgactggacaaaaccaagaaataacccctcacgtgcgaaattatagaggatcccctttaagatcaaacaattccatcgaattgagtatgattgtatgtgtgatagcatctactataccgggaatatcaatgagcccgattattgaaattgctcaagatacccttttttag

SEQ ID NO: 131908 - protein, 510 aa, Populus trichocarpa
MIWHVQNENFILDSTRIFMKAFHLLLFDGSFIFPECILIFGLILLLMIDSTSDQKDMPWLYFISSTSLVMSITALLFRWREEPMISFSGNFQTNNFNEIFQFLILLCSTLCIPLSVEYIECTEMAITEFLLFVLTATLGGMFLCGANDLITIFVAPECFSLCSYLLSGYTKKDVRSNEATTKYLLMGGASSSILVHGFSWLYGSSGGEIELQEIVNGLINTQMYNSPGISIALIFITVGIGFKLSPAPSHQWTPDVYEGSPTPVVAFLSVTSKVAASASATRIFDIPFYFSSNEWHLLLEILAILSMIVGNLIAITQTSMKRMLAYSSIGQIGYVIIGIIVGDSNGGYASMITYMLFYISMNLGTFACIVLFGLRTGTDNIRDYAGLYTKDPFLALSLALCLLSLGGLPPLAGFFGKLHLFWCGWQAGLYFLVSIGLLTSVLSIYYYLKIIKLLMTGQNQEITPHVRNYRGSPLRSNNSIELSMIVCVIASTIPGISMSPIIEIAQDTLF

SEQ ID NO: 131909 - DNA, 1284 bp, Thermus thermophilus HB27
  CDS (1)..(1284): transl_table=11
atgaccctggcgatcctcgcggtcttctccgtggccttgacccttctcggtttcgtcctcccgccccagggcgtgaagcgggccacgctcctgggcctggccctggccctcgcaagcctcctcctcacctgggggaagcccttcgccttcgggccctacgcggtggacggtatctcccaggtcttcaccctcctcgccctcctgggggccttgtggaccgtgggcctcgtgcgctcggggcggtttgagttctacctcctcgtcctctacgccgccttgggcatgcacctcctcgcctccacccggcacctcctcctgatgctcgtggccctcgaggccctctccctccccctctacgccctcgccacctggcgccgggggcagggcctcgaggccgccctcaagtacttcctcctgggggccttggccgccgccttcttcctctacggggcggccctcttctacggggccacggggagcctcgtcctgggcacccccggggaaggccccctctacgccctggccctgggcctgctcctcgtgggcctgggctttaaggcggccctcgcccccttccacttctggacccccgacgtctaccagggaagccccacccccgtggtcctcttcatggccacctcggtgaaggccgcggccttcgccgccctcctccgggtggccgcaccccccgaggccctcgccctcctcgtggccctctccgtggtggtggggaacctggcggccctggcgcagaaggaggccaagcggcttctcgcctactcctccatcgcccacgccgggtacatggccctcgccctctacaccggaaacgcccaggccctgggcttctacctcctcacctacgtcctggccacgggcctcgccttcgccgtcctaagccagatctccccggaccgggtgcccctggaggccctccggggcctctaccggaaagaccccctcctgggcctcgccttcctggtggccatgctttccctgctgggcctgccgcccctcgcgggcttttggggcaagtacctggccttcgccgaggcggcccgggccggggcctggggggtcttggtcctggccctcgtcaccagcgccgtgagcgcctactactacctcgggcttgggcttgccgtcttcgcgcggcccgaggagacccccttccgcccaggccctccctgggcccgggccgcggtcgtggccgccggggtcctcctcctcgccttggggctcctccccggcctcgtcctccccgccttggccgcggggggttaa

SEQ ID NO: 131910 - protein, 427 aa, Thermus thermophilus HB27
MTLAILAVFSVALTLLGFVLPPQGVKRATLLGLALALASLLLTWGKPFAFGPYAVDGISQVFTLLALLGALWTVGLVRSGRFEFYLLVLYAALGMHLLASTRHLLLMLVALEALSLPLYALATWRRGQGLEAALKYFLLGALAAAFFLYGAALFYGATGSLVLGTPGEGPLYALALGLLLVGLGFKAALAPFHFWTPDVYQGSPTPVVLFMATSVKAAAFAALLRVAAPPEALALLVALSVVVGNLAALAQKEAKRLLAYSSIAHAGYMALALYTGNAQALGFYLLTYVLATGLAFAVLSQISPDRVPLEALRGLYRKDPLLGLAFLVAMLSLLGLPPLAGFWGKYLAFAEAARAGAWGVLVLALVTSAVSAYYYLGLGLAVFARPEETPFRPGPPWARAAVVAAGVLLLALGLLPGLVLPALAAGG

SEQ ID NO: 131911 - DNA, 1017 bp, Hutchinsoniella macracantha
  CDS (1)..(1017): transl_table=5
atgattaatttgtttcagttattttttgtttttggtttaattttagggattttaattaggatttcttcttctagttggtttggtgtatgggtgggtttggagttgaatctaatgtcttttgtaccgttggtgacgagtgtatttaatcgtttatatagtgaggctgctttgaagtattttcttattcaggcttttggttctgtaattttattatttagtgttttgggttatgtttttagtagttctttattttttttgatttttttgatgggttctttgttattgaagttgggggcggctccgtttcatttttgatttcctaatgtgatagggggtttgtcttggataggtgtaattttattaatagttatacagaaaattacgccttttgtaatattaaattatatttatttatgtgtgggtgattatttattgatttttttggttatatctattttagtaggtagcttggggggtttaaatcaattattattacgtgttttattagcttattcctctatcgggcatgttggttggataatgggtggtattttagtgagtgatgttgtttggtttttgtattttattatttatagtttgtgttctttagctttgattttattttttatgtggggagatattaattgttttagacagttatatggaagattatttttttcttataggtatttattatttattgggttattgttgatttctttgggagggttgcctccttttttaggtttttattctaaatggatagttatttttggtttattaaatttaaattacaggttaatttgtttatttatggttatattttctcttattgttttatattgatatttacgtttaggttattctttattgttgggtggttatgattttaagggttggttattatacggggtaggggggagtggaatgttttatttgttgtctttttttgtggttttaagtttatttggttttatgtgtgtttttttggttggtggttgaggtttattgttatag

SEQ ID NO: 131912 - protein, 338 aa, Hutchinsoniella macracantha
MINLFQLFFVFGLILGILISISSSSWFGVWVGLELNLMSFVPLVTSVFNRLYSEAALKYFLIQAFGSVILLFSVLGYVFSSSLFFLIFLMGSLLLKLGAAPFHFWFPNVMGGLSWMGVILLMVMQKITPFVMLNYIYLCVGDYLLIFLVMSILVGSLGGLNQLLLRVLLAYSSIGHVGWMMGGILVSDVVWFLYFIIYSLCSLALILFFMWGDINCFSQLYGSLFFSYSYLLFIGLLLISLGGLPPFLGFYSKWMVIFGLLNLNYSLICLFMVMFSLIVLYWYLRLGYSLLLGGYDFKGWLLYGVGGSGMFYLLSFFVVLSLFGFMCVFLVGGWGLLL

SEQ ID NO: 131913 - DNA, 1086 bp, Haliotis rubra
  CDS (1)..(1086): transl_table=5
atgctatcaataatgccttttgggttcttattctctttcattacattcctgggatctatcctttccctgtcttcaatccactgactaagaatttgggttgggctagaaatcaacataatgggatttatcccacttttaatctaccgaggactaactatagagacagaatccagaattaagtacttcattatacaagcactgggatcaagaatacttatgttcggaagccttctatcattcaacctctccctgtcatgagaagcctgacaataccacacaagcccacttggactaaccttaattattcttagcctgttcctgaaactaggggctttcccattccacttttggttaccagaggtgataataaacctctcctgacttaattgccttattctaaccacctgacaaaagctggccccagtattcctgctaaccgccatgacacagagatgaaaccaccagcccatcatctcgaccctattcatcatagcgggcctctccagacttattggcggattagggggaatcaatcaaactcaaattcgaacgctcctggcctactcatcaattggccacgtcggttgaataacattctgcgcattaactagggaaagagcactaaaaatttacttcattatttatacattaatctcaatttgtctattcgcaaacctgtgaacttctgatattaaatctttccggcatatcggggctataaaaaatgaaaaccctaagatcaaccagctaaccttaatttttatcctcctatccctagggggaatgccccctctcctgggattcgccgcaaaatggacagccatctctttctcctgcattatttcttcaccagccctggttttcccacttctactaggaagcttaataagattattttactacttaacccttctcttcagaatgacattctcatcttcaataacgctcatttcctctaacaaccatcaaactcaaaacctcccggggtccctaaacattatattaaccccagcaatcctaatcatcaattttgctggtgcgtttctggtcctgggcataatctcaatgtcagtggatttcatttaa

SEQ ID NO: 131914 - protein, 361 aa, Haliotis rubra
MLSMMPFGFLFSFITFLGSILSLSSIHWLSIWVGLEINMMGFIPLLIYRGLTMETESSIKYFIMQALGSSMLMFGSLLSFNLSLSWEAWQYHTSPLGLTLIILSLFLKLGAFPFHFWLPEVMMNLSWLNCLILTTWQKLAPVFLLTAMTQSWNHQPIISTLFIMAGLSSLIGGLGGINQTQIRTLLAYSSIGHVGWMTFCALTSESALKIYFIIYTLISICLFANLWTSDIKSFRHIGAMKNENPKINQLTLIFILLSLGGMPPLLGFAAKWTAISFSCIISSPALVFPLLLGSLMSLFYYLTLLFSMTFSSSMTLISSNNHQTQNLPGSLNIMLTPAILIINFAGAFLVLGMISMSVDFI

SEQ ID NO: 131915 - DNA, 1455 bp, Bartonella quintana str. Toulouse
  CDS (1)..(1455): transl_table=11
atgcaaactgaaataatagctcaattagtgttaatttttccagagattttaatagcattggggggcgttatattgcttttgattggtgtttattccaatacacgttcctctttaaccgtgactggtttggctattgccctttttgtcgcaaccattgttattctcgtcgtttttccgaaaagtggcttatttcaaaccaatgcgcttattattgattctttcggtcgttatatgaaaattttaacacttattggtgcactttttgctcttattatgtctgttgattttacctgtacgcataagtttgatatatttgagtttccagtgcttgttcttttagcaagtcttggcatgatgctgatgatttcagctggtaatatgctgtcactttatatggggttagaactacaatccttagctttatatgttttagctgcgattaatcgtaataatgtaaaatcgtctgaagcaggtataaagtactttgttttaggagcattatcgtcaggcttgctcctttatggtatttctttgctttatggttttaccggtcaaattggttttcgcgaaattgctattgctttaaaaagtgaaagtctacaattaggtgttatctttggcattgtttttattttagctggtttggctttcaaaatttctgctgttccatttcatatgtggacacctgatgtttacgaaggagcgccaacaccaattacagcattttttgcaggtgctcctaaagttgcggcaatggctttactcgttcgtattattgttctggtattcattccatcagagagttccgatggctctatgcctgcatggcagcaaattttggtgttcatggcaattgcatcaatgatacttggtgcatttgctgcaattggccagagcaatgttaagcgtttaatggcttattcgtctatcagtcatatgggatatgcgcttgtcgggttagctgctggagatatgcttgggataaaaagcgttattctttatatgactatttatcttagtatggtgattggttcatttgcctttattcttggaatgcggcgtagtggtggaaatgttgaaaatatttatgatctttcaggattggtaaagacgaatccgtttatggctgttatgatgacgatacaacttttctctttagcaagtatacctcctatggctggtttttttggaaagtggtatacattttctgccgctgttcatgctggacttacaccacttgctgttgttggtatgctagcatctgttattggggctttttactatttgcgtctcattaaaattatgtggtttgatgatgcaaaagcgcattttattattttatcgaatgagcttcggttttgtctttgtctttctgcattatttattttattttatacgctttttggaatttggtttgctgacttggcagaaaaagcagctattgcattgttttaa

SEQ ID NO: 131916 - protein, 484 aa, Bartonella quintana str. Toulouse
MQTEIIAQLVLIFPEILIALGGVILLLIGVYSNTRSSLTVTGLAIALFVATIVILVVFPKSGLFQTNALIIDSFGRYMKILTLIGALFALIMSVDFTCTHKFDIFEFPVLVLLASLGMMLMISAGNMLSLYMGLELQSLALYVLAAINRNNVKSSEAGIKYFVLGALSSGLLLYGISLLYGFTGQIGFREIAIALKSESLQLGVIFGIVFILAGLAFKISAVPFHMWTPDVYEGAPTPITAFFAGAPKVAAMALLVRIIVLVFIPSESSDGSMPAWQQILVFMAIASMILGAFAAIGQSNVKRLMAYSSISHMGYALVGLAAGDMLGIKSVILYMTIYLSMVIGSFAFILGMRRSGGNVENIYDLSGLVKTNPFMAVMMTIQLFSLASIPPMAGFFGKWYTFSAAVHAGLTPLAVVGMLASVIGAFYYLRLIKIMWFDDAKAHFIILSNELRFCLCLSALFILFYTLFGIWFADLAEKAAIALF

SEQ ID NO: 131917 - DNA, 1521 bp, Bacillus thuringiensis serovar konkukian str. 97-27
  CDS (1)..(1521): transl_table=11
atggatatgaatacgttacttagcttatcgtggcatctcatggtgccagaattcatcattctcggggctgccatccttctttccatatgtgatttgttttttaagctgaaccatagatacgtagcgcttggtgcaatcgcggcggtcgtattagcaatcgtgtcactaattacgctatatagcgaaccagcgggagatattttaaatggatcgtttgtgttagatggattttcaaaaggatttaaaacgttgttgttaggcggggcagcccttattttgtgcaccgcaatgagcgatgataagaaaaatccaattgaagataagggagagtattattacttatttttaatggcgcttcttggggcgatgtttatggcttctagcgttgatttcgttacacttttcgtcggtttagaattgctttcactttcttcctacattttagtaggaatacgaaaaaagaaccttgcatcaaatgaggcagcaatgaaatatgtcattaatggaggaattggaacggcaattacactctttggaatgagttacttatacggtattacagggtcaactaatatcgtggatatgcaaaaagtatttgccggggaactggctagtggcattcagttattgctagctctcgcattcctactcttactcgttgggctctcattcaaaattgcgacagtgccgtttcatatgtgggcacctgatgtgtatgagggagcggctacacctgttactgcttttcttggaacaatttctaaaatggcgggtttcttactcattattcgtttgttcctcatggtttttgcaagtgtatcggtgcaaggagacatgcaatctttatacgggcgtatgagcatatatatcgctgtgctagctagtattacgatgattattggaaatgtagtcgcattaaagcaatataatgtaaaacgcctatttgcttattcgggaattgcgcatgcgggatatttactcgttccgcttgtcgcattatcaccatttacgatggatagtatgtggttttacatgcttgcgtatatgcttatgaatataggcgcgtttgcaattattcacggcttaatcttacaaagcgataaagaaaatatcaccattttcactggattatataaaaggtcgccatttacagcgattgtgatgacgatttttattttatcgctagcggggataccaggaacagctggttttattgggaaaattaacatctttttaggggctcttcatgtagagccagctcattacgtactagcttctattatgatggggacgacagtcatttcattcgtatattatttccgtattttacaacaaatgtttttcaggacgggagaagtagaagagaaaattcgcttgccactcaatataaagattgtgatgagcttttgtgcaatttcgattgtaatactagggattatgccgatgattggatacaatttcttttatgaatattttccattaatgaaagatttcttcttcttagggaacgtggtacaatag

SEQ ID NO: 131918 - protein, 506 aa, Bacillus thuringiensis serovar konkukian str. 97-27
MDMNTLLSLSWHLMVPEFIILGAAILLSICDLFFKLNHRYVALGAIAAVVLAIVSLITLYSEPAGDILNGSFVLDGFSKGFKTLLLGGAALILCTAMSDDKKNPIEDKGEYYYLFLMALLGAMFMASSVDFVTLFVGLELLSLSSYILVGIRKKNLASNEAAMKYVINGGIGTAITLFGMSYLYGITGSTNIVDMQKVFAGELASGIQLLLALAFLLLLVGLSFKIATVPFHMWAPDVYEGAATPVTAFLGTISKMAGFLLIIRLFLMVFASVSVQGDMQSLYGRMSIYIAVLASITMIIGNVVALKQYNVKRLFAYSGIAHAGYLLVPLVALSPFTMDSMWFYMLAYMLMNIGAFAIIHGLILQSDKENITIFTGLYKRSPFTAIVMTIFILSLAGIPGTAGFIGKINIFLGALHVEPAHYVLASIMMGTTVISFVYYFRILQQMFFRTGEVEEKIRLPLNIKIVMSFCAISIVILGIMPMIGYNFFYEYFPLMKDFFFLGNVVQ

SEQ ID NO: 131919 - DNA, 1485 bp, Acinetobacter sp. ADP1
  CDS (1)..(1485): transl_table=11
atgtctttttctcagcttatgccgttagcacctgtcatgattgtggctttaaccgcagtcgtggtaatgatcctgatttcgattaaacgaaaccacaatctgattgcaacagcttcggtcatcggcttaaaccttgcggcggcttatattcttctcacaatgtttggtggtcagtttgtaccatcaaatgttatgggtatgtttatggttgatccattcacattgctctaccagcttcttattttggttgcatcattggcatgttgtaccttgtcgcatgcttatatcgattcatatcaagaaaatcgtgaagaactctatctattgctactggtttcggtatcaggtgccatgttgatggtttctagcgcgcattatgcatcgttcttcattagccttgagctgatgtcgattcctgtctatggtttgctggcttatacctatcaacgtagtcgttctttagaagctggaatcaaatatctggttttatctgctacagcgtctgcaatgctattgatgggtatggcatacatttatgcatatacaggttctttagcattttatgattctgtacaggcactatttgaagcgattcagcaaccaatggtcattttaggtcttggcctgatcatttttgcagttgctttcaaactgtcacttgcaccatttcataagtggacaccagatgtttatgcaggcgcaccggcacctttagtcacattccttgcgaccgcagcgaaagttgcaacgattggtttgtttgtacgctttatgctgacttctggggcaatcctgatcgattcaatcgtgacaattattaccattcttgcggtattgtcgattgtgattggtaacttgcttgctgttcgtcaggtgaatttaaagcgtgtacttgcttactcatcgattgcccattttggttacttactcattgctttagtgagcatgacttatgcaagtttaggtagcgtaaccgtatatgtgatcacttatgtactcactacaattggtgcatttggtgctgtagcgctgatgtcgagtccttacaacaacgtggatgaagcagaaagtcttgcagattatcgtggtctattttggcgtcgtccagttttaaccgcgaccttaacggtgatgatgctatctcttgcaggtattccattaactgctggatttattggtaaattcctcgtggtaatggctgccgtaaccactcaacactggttcttggctgcaatgattgtggtgggtagtggtattggtttgtactattatttgcgcgtcatgattgtgatgtatatgaccccaccagatgtcccacgtatcgatgcagataagcattggggacaaaaagtgggcggtatcatggtacttgctgcggctgcattggtcttgattattggtatctatccagatccgattatcaagcttgcacttgaaggtgaaattctttctccattacattttgtgttagcaaatcatcagtaa

SEQ ID NO: 131920 - protein, 494 aa, Acinetobacter sp. ADP1
MSFSQLMPLAPVMIVALTAVVVMILISIKRNHNLIATASVIGLNLAAAYILLTMFGGQFVPSNVMGMFMVDPFTLLYQLLILVASLACCTLSHAYIDSYQENREELYLLLLVSVSGAMLMVSSAHYASFFISLELMSIPVYGLLAYTYQRSRSLEAGIKYLVLSATASAMLLMGMAYIYAYTGSLAFYDSVQALFEAIQQPMVILGLGLIIFAVAFKLSLAPFHKWTPDVYAGAPAPLVTFLATAAKVATIGLFVRFMLTSGAILIDSIVTIITILAVLSIVIGNLLAVRQVNLKRVLAYSSIAHFGYLLIALVSMTYASLGSVTVYVITYVLTTIGAFGAVALMSSPYNNVDEAESLADYRGLFWRRPVLTATLTVMMLSLAGIPLTAGFIGKFLVVMAAVTTQHWFLAAMIVVGSGIGLYYYLRVMIVMYMTPPDVPRIDADKHWGQKVGGIMVLAAAALVLIIGIYPDPIIKLALEGEILSPLHFVLANHQ

SEQ ID NO: 131921 - DNA, 1035 bp, Pteronarcys princeps
  CDS (1)..(1035): transl_table=5
gtgctaaataatccaaccaaattcttatttttgataacattaataagtggtactttaatctctgtttcagccaattcatgatttggagcatgagtagggttagaaattaatcttttatcttttatccccttaataactaattctaataatttattatctactgaagcttctttaaaatactttttaactcaagccctagcttctgctacactattatttacaattattcttgctgctctaatttttagatcccctagatcattattaattagaaatcctttcttaattaccttagttaattcatctttattattaaaaatgggagctgctcccttccatttttgattcccaggtgtaatagagggattaaactgaataaatggtcttatactaataacctgacaaaaacttgctccattaatattactttcttataatctaaaaattgacatctttattgctttagcaattatcttatcagtaattattggatctttaggaggcctcaatcaaacttcattacgtaaaattcttgcttattcctctattaatcatttaggttgattagtagcagcattaaccttaggggaaaatttatgaggactttattttataatttattcttttttaactgctacaattattttcatacttcattcatttaaattattctattttaatcaaatcttttcattaaattttactccccctgttattaaattttcattatttataactttactatcccttggtggactccctccatttattggatttcttccaaagtgaatcattattcaatctatagttgaagctaatctaaccctactaattactattatagtagtaataacactaattactctattttactatctacgaataggatttggagcctttatattaacttattctgaatctttatgaaattattcctatttacaaaataatttcactcacataactgccctaaccttaacaatatgttcaaccttagggttagttatttgtgcaactctataccacattttctaa

SEQ ID NO: 131922 - protein, 344 aa, Pteronarcys princeps
MLNNPTKFLFLMTLMSGTLISVSANSWFGAWVGLEINLLSFIPLMTNSNNLLSTEASLKYFLTQALASATLLFTIILAALIFSSPSSLLISNPFLITLVNSSLLLKMGAAPFHFWFPGVMEGLNWMNGLMLMTWQKLAPLMLLSYNLKIDIFIALAIILSVIIGSLGGLNQTSLRKILAYSSINHLGWLVAALTLGENLWGLYFMIYSFLTATIIFMLHSFKLFYFNQIFSLNFTPPVIKFSLFMTLLSLGGLPPFIGFLPKWIIIQSMVEANLTLLITIMVVMTLITLFYYLRMGFGAFMLTYSESLWNYSYLQNNFTHMTALTLTMCSTLGLVICATLYHIF

SEQ ID NO: 131923 - DNA, 1476 bp, Symbiobacterium thermophilum IAM 14863
  CDS (1)..(1476): transl_table=11
gtgcctgtcgatctcaacttcaccattgcggcgccgctcctggcgctggccgccggggcgctgctgatcctgctgctggacctgctcttccggtacgagacgattcaggggcccatgtacgtcgccgcggtcggcgcggtgctcgtcgcgggctggtacctggtgccgctctggcggggggccgccgagccgttcggcttccacggcatgctggtgatggaccggttcgccgcggtctacggtctggtgctgctcggcgccgcgctcctggcgatcctgctctccttcggcagggtgcgggaggaccagtccggctatctcgccctcctgctctgggctgccatgggcatggtgctgctgggcggcgccgggaacctgatggtcatcttcctcggcatcgagctgctgtcgctggcgctgtacgtgatgatcgcgttcgcgccgaagcggatggcggcccgggaggcggccttcaagtacttcgtgctgggttcggtggccgccgcgttcctgatcttcggctttgccctgatctacggcgccgccggtaccatgtcgctcaccggcatcgccgcggccgcccggtcgttcaccagcgagggcgcctggtcggtgggcctctactacaaggtgggcgtgggcctggccatcgtgggcctggcgttcaagatggcgctggtgccgttccacatctgggcgcccgacgtctaccagggcgcgccgacgcccgtgacggcgtttatggccatcggcaccaaggcggcggccttcgccgccatggcccgcctcctggtcgcggccgtcccccaggcctaccagccgtccttcctgctgccgctgtccatcctggccttcgcctcgatgatgctgggcgccacggtgggtatctggcagagcgacctgaagcggctgatggcttactccggcattgccaacgccggttacctgatcatggcgatcccgggactggggctggacgggctgtctgccgccgcctactacctcgccgcctacggcttcgcgacgatgggcgtcttcgcggtcgtccgcatcctggaggcggacggggtggacggctcgcagctggccaacctgaaggggctcttctaccgcagcccgtgggtgggcgtctgcctggccgtgctgttcttcggcctgatcggcgtgccgccgacgggcgggttcgtgggcaagttcctgctggccatcgccgccgtgcggggcggcgcctggatcgtcctgaccggtctgatcctctccaccggcatttccgcctacgtctacctgaaggtgatcggtaccgccttcacgcggacgaaggtggccccgcagcccgaggagggcgaggagccgcatccgcccacccgcaccgccgcccaggtggtgctggccatcgccaccgccggcacgctggtgctgggcgtgctgcccgggccggtgtccgagctcctgcgggtggcactggcggggatgtga

SEQ ID NO: 131924 - protein, 491 aa, Symbiobacterium thermophilum IAM 14863
MPVDLNFTIAAPLLALAAGALLILLLDLLFRYETIQGPMYVAAVGAVLVAGWYLVPLWRGAAEPFGFHGMLVMDRFAAVYGLVLLGAALLAILLSFGRVREDQSGYLALLLWAAMGMVLLGGAGNLMVIFLGIELLSLALYVMIAFAPKRMAAREAAFKYFVLGSVAAAFLIFGFALIYGAAGTMSLTGIAAAARSFTSEGAWSVGLYYKVGVGLAIVGLAFKMALVPFHIWAPDVYQGAPTPVTAFMAIGTKAAAFAAMARLLVAAVPQAYQPSFLLPLSILAFASMMLGATVGIWQSDLKRLMAYSGIANAGYLIMAIPGLGLDGLSAAAYYLAAYGFATMGVFAVVRILEADGVDGSQLANLKGLFYRSPWVGVCLAVLFFGLIGVPPTGGFVGKFLLAIAAVRGGAWIVLTGLILSTGISAYVYLKVIGTAFTRTKVAPQPEEGEEPHPPTRTAAQVVLAIATAGTLVLGVLPGPVSELLRVALAGM

SEQ ID NO: 131925 - DNA, 1482 bp, Methylococcus capsulatus str. Bath
  CDS (1)..(1482): transl_table=11
gtgaccaccgacgctctcaccgccctgctccccttcatcgtgctgtcggcggccgccgttgccgtgatgctggccatcgcgatccggcggagcttccgcctcgttttctggctgacggtcggcgggctgctggcgggcctgtccaccctaccccacgcttcgtccgtcgcgccgctccaggtcacggacttgctgcgggttgacgcctatggcctgttcttccatgcccttttcctgctcgccgcgctcgtcgtcgccctcctgtgcctggcctatttccgccggcgcgagaacgagaacgaagaaatcttcgtgctgctcctcacctcgaccctgggggccctgctgctggtatccagcgcccatctcgccatgttcttcctcggcctggaggtgctgacgatctccctgttcccgatgatcgcctatagcgtccgggcctcccgcccgctggaagcgggcatcaaatacctgatgctgtcgggactcgcctcctctttcctcatgttcggcatggcaatggtctacggcgacctgggcgtactctcgttcgaacagatcggcgcgcatggcgcggaactggagcaaaaaccgctggctctcgccggactgttcctgatcctggccgcgatcggcttcaaactgtcgctggtgccgttccacctgtggacgccggacgtctaccagggcgcgcccaccccggtcaccgccttcctggcgaccgtgtcgaaggcgtccgtgttcgccctgctgctcagattcttcaccgccgcccacgccgagcgctcggaaacctttctctgcgtgctcggcctcctggccgtcgtttccatcctggccggcaatctcctggcgctgctgcaggtcagtctgaaacgcctgctcgcctattcttctatcgcccacatgggctatctactgacgggattcgtcgcggcgggactgctgcgacgggacctgcagacggaaacgatcgccttctacctcgccgcctacacggtcaccagtctgaccgccttcggcgccatctcggccttgtccgacgacgaccgcgaatccgaccggctcagcgactacgccggcctgttctggcgctcgccctggcttgccgcggtgctgacactctccctgctgtcgctggcgggaatcccgctcacagtcggcttcgtcggcaagttctacgtcttcgccgtcggcgtgcaggcggagacctggccgctggtggcgaccgtcgtcatcggcagcggcatcggcatctactattacctccgtgtcgtgctgaccatgatccagccggccggtgtcggtcagcgggtcacgctgcatccggcggcgggaaccgctttggccgctgcggcactggtcattctcgcggccggattgtttccgcagcctttgatcgatgccgccgccaatgtgccacaaccgccccccaccgccgacagcccgcaacggctcaccgcgacgggcggactcccataa

SEQ ID NO: 131926 - protein, 493 aa, Methylococcus capsulatus str. Bath
MTTDALTALLPFIVLSAAAVAVMLAIAIRRSFRLVFWLTVGGLLAGLSTLPHASSVAPLQVTDLLRVDAYGLFFHALFLLAALVVALLCLAYFRRRENENEEIFVLLLTSTLGALLLVSSAHLAMFFLGLEVLTISLFPMIAYSVRASRPLEAGIKYLMLSGLASSFLMFGMAMVYGDLGVLSFEQIGAHGAELEQKPLALAGLFLILAAIGFKLSLVPFHLWTPDVYQGAPTPVTAFLATVSKASVFALLLRFFTAAHAERSETFLCVLGLLAVVSILAGNLLALLQVSLKRLLAYSSIAHMGYLLTGFVAAGLLRRDLQTETIAFYLAAYTVTSLTAFGAISALSDDDRESDRLSDYAGLFWRSPWLAAVLTLSLLSLAGIPLTVGFVGKFYVFAVGVQAETWPLVATVVIGSGIGIYYYLRVVLTMIQPAGVGQRVTLHPAAGTALAAAALVILAAGLFPQPLIDAAANVPQPPPTADSPQRLTATGGLP

SEQ ID NO: 131927 - DNA, 1041 bp, Asymmetron lucayanum
  CDS (1)..(1041): transl_table=5
atgagtccttatatttcccctttatttagatttacaataatccttagcctcctggtaattttatgttctactcactgagttttcatgtggttaggcctggaaatcggcacattagcatttattccgttactcacttgatgacacggcgccacggaagtagaagcaacagtaaaatacttcttaactcaagcagtagcagcggcgattttcttctttggaggcttagtattactaagtagcgaatccattagcggtgtcgcacaatgattgggaagactaggtgaaattattattttactttcagtgttaataaaattaggtatagcaccaatccactactgagtaattgacgtagtacagggattaaactatatccccgggatagtcctgctaacttgacaaaaacttccagggttagcagttctctcacagctcctttcagagagtaacagtcatattttacttcttctagcacctgcttctgccctcatcggggggctaggaggcctaggtcagacacaaatacggaaactcttgggattttcctcaatttctcatcttggttgattagtagttgggttggttattaactctttactgggagccatgtactttttcttatatattatcatctcccttccggtctttctttcgctccatatctcagggggagtacatctcaaccaattacgcaacgccctagcatctaattctatattatctatttcggtgggtgtaggattcctatctttagcaggccttcccccttttctgggtttttttattaagtgattagtgctcacccattctataacccaatttttattaattgcatctacccttcttattgtgggttcattaattagtgcattttattatttacgtattagctatctttgtctagtgattttagcaccccagcaagtcatagctataaccaactggcgtaacacacctaagattaatttaattagtgttattttattattaaatatcataggtctattattagtagctgcactaagtacttttactaagtaa

SEQ ID NO: 131928 - protein, 346 aa, Asymmetron lucayanum
MSPYISPLFSFTMILSLLVILCSTHWVFMWLGLEIGTLAFIPLLTWWHGATEVEATVKYFLTQAVAAAIFFFGGLVLLSSESISGVAQWLGSLGEIIILLSVLMKLGMAPIHYWVIDVVQGLNYIPGMVLLTWQKLPGLAVLSQLLSESNSHILLLLAPASALIGGLGGLGQTQMRKLLGFSSISHLGWLVVGLVINSLLGAMYFFLYIIISLPVFLSLHISGGVHLNQLRNALASNSMLSISVGVGFLSLAGLPPFLGFFIKWLVLTHSMTQFLLIASTLLIVGSLISAFYYLRISYLCLVILAPQQVMAMTNWRNTPKINLISVILLLNIMGLLLVAALSTFTK

SEQ ID NO: 131929 - DNA, 1467 bp, Nicotiana tabacum
  CDS (1)..(1467)
atgttcaatctttttttagcggtttccccagagatctttatcattaatgcaaccttcattttgctcattcatggagttgtatttagtacctctaagaaatatgattatccaccgttagtcagtaatgtgggttggcttggattacttagtgttctaataaccttgcttctgctcgccgctggcgcacctctcctaactattgcccatttattctggaataatctttttaggagggacaattttacatatttctgccaaatccttctattattaagtacggctggtaccatttcgatgtgtttcaattctttcgaacaagagaggtttgatgcttttgaatccattgtattaattccacttcctactcgcggtatgctctttatgatctcggcttatgattcaattgccatgtatttagctattgagcctcaaagtttatgtttttatgtgatcgcagcatcaaaaagaaagtctgaattttctacggaagccggctcgaaatatttgatcttaggtgcatttccctctggaatattattgtttggttgttccatgatctatgggtctactggagctacccacttcgatcaattagccaagattttgaccggatacgaaatcactggtgctcgatctagtggtatttttatggggattctatttatcgctgtaggatccctattcaagatcactgcagttccttttcatatgtgggcacctgatatctatgagggttcacccaccccggttacagcattcctttctattgcgcctaaaatctctatttctgctaatatttcacgtgtttctatttatggttcttatggagctacattgcaacaaatcttctttttctgcagcattgcttctatgatcttaggggcactggccgccatggcccaaacgaaagtaaaaagacttctagctcatagttcaattggacatgtaggttatattcgtactggtttctcatgtggaaccatagaaggaattcaatcactactaattggtatctttatttatgcatcaatgacgatagatgcattcgccatagttttagcattacggcaaacccgtgtcaaatatatagctgatttgggcgctctagccaaaacgaatcctattttggctattaccttctccattactatgttctcatacgcaggaatacccccgttagccggcttttgtagcaaattctatttgttcttcgccgctttgggttgtggggcttacttcctagccccagtgggagtagtgactagcgttataggtcgtttttattatatacgcttagcgaaaagaatgttttttgatacacctaggacatggattctatatgaaccaatggatcgtgacaagtcgttactactagcaatgacttcctctttcattacttcattctttccatatccctctcctttgttctcagttactcatcaaatggcactcagttcatatctttaa

SEQ ID NO: 131930 - protein, 488 aa, Nicotiana tabacum
MFNLFLAVSPEIFIINATFILLIHGVVFSTSKKYDYPPLVSNVGWLGLLSVLITLLLLAAGAPLLTIAHLFWNNLFRRDNFTYFCQILLLLSTAGTISMCFNSFEQERFDAFESIVLIPLPTRGMLFMISAYDSIAMYLAIEPQSLCFYVIAASKRKSEFSTEAGSKYLILGAFPSGILLFGCSMIYGSTGATHFDQLAKILTGYEITGARSSGIFMGILFIAVGSLFKITAVPFHMWAPDIYEGSPTPVTAFLSIAPKISISANISRVSIYGSYGATLQQIFFFCSIASMILGALAAMAQTKVKRLLAHSSIGHVGYIRTGFSCGTIEGIQSLLIGIFIYASMTIDAFAIVLALRQTRVKYIADLGALAKTNPILAITFSITMFSYAGIPPLAGFCSKFYLFFAALGCGAYFLAPVGVVTSVIGRFYYIRLAKRMFFDTPRTWILYEPMDRDKSLLLAMTSSFITSFFPYPSPLFSVTHQMALSSYL

SEQ ID NO: 131931 - DNA, 1572 bp, Rhizopus oryzae
  CDS (1)..(1572)
atggttttattcggtgtattaaccatgattttagcgattgccttattttcccttcgaattcctgcgatttattttaatcgaatcacaattattttactacttttttctgctttattatcatataattctctttatatgaataatattggttcaggagtaggagtgttcggtggattatttcaagttacaactattactcaaagtattgatgtatttatttatttattaggagctttagtacttttattaagtgaaaaagcaaatagagcaaatactctatcatttaataaattaaattcaactttagtaaataagagtaaaggattatcagtattagctgaatatcctcttattgctttattttctgtattaggtatgagtagtttaatttcaagtagtgacttaatttctatgtttttatctattgaattacaaagttttgctgtatatattttagctactatttacagagagtcagaatctgcaacatcagctggattaaaatatttcttattaggaagtttatcttcagctttaattttattaggaagtagtttattatatagttttacaggactaactagttttgaaggattatatatgttatgttctacaacagaaacaaatactgcgattgaaattagtgtattattaattatggtaggtttactatttaaagtatctgcagctccatttcataattgggctccagatgtatatgatggagtacctacagtagtaacaacttggttaacaacaatgccaaaaattgctttcttagtatttattttagaattccaaggatttactcaattagctaattggtcttcatggactaatttattattaattagttcattattatcattattaattggtacaattggaggattagctcaatatagaattaaacgattattaacatatagtacaatttctcatgtaggatttttactattagcattagcaattaataatgaagaatctgtagaatcttttttattttatctaattcaatattcattaactaatattaatgtattttttattttagtagcatttggttacttattaggatctaaaggattatctatttattcaccaattcaattaattaatcaattaaaaggtcaatttaaagtaaatcctttacttggattaagtcttgctatttgtttattttctatggcaggtattcctcctttagtaggattttttggtaaacagatggttttatatgcagcaactcataatggaaatttctttttagcttttgtagctattttagtaagtgtagttagtgctgcatattatttaagaattattaaagttattcattttgatcctgtaccagcgccatcagcattatcattaattaaaactacggaaatttcttctgatttaaatgtaactgaaacaaataattctctagaaggttcttctgaagaattatcaacttcaagtagtttagtaattgcaacaattactcttctattaattttctttattattaatccaacaccattattaaacagtgttcacttaatcactttaaatctattttattggtaa

SEQ ID NO: 131932 - protein, 523 aa, Rhizopus oryzae
MVLFGVLTMILAIALFSLRIPAIYFNRITIILLLFSALLSYNSLYMNNIGSGVGVFGGLFQVTTITQSIDVFIYLLGALVLLLSEKANRANTLSFNKLNSTLVNKSKGLSVLAEYPLIALFSVLGMSSLISSSDLISMFLSIELQSFAVYILATIYRESESATSAGLKYFLLGSLSSALILLGSSLLYSFTGLTSFEGLYMLCSTTETNTAIEISVLLIMVGLLFKVSAAPFHNWAPDVYDGVPTVVTTWLTTMPKIAFLVFILEFQGFTQLANWSSWTNLLLISSLLSLLIGTIGGLAQYRIKRLLTYSTISHVGFLLLALAINNEESVESFLFYLIQYSLTNINVFFILVAFGYLLGSKGLSIYSPIQLINQLKGQFKVNPLLGLSLAICLFSMAGIPPLVGFFGKQMVLYAATHNGNFFLAFVAILVSVVSAAYYLRIIKVIHFDPVPAPSALSLIKTTEISSDLNVTETNNSLEGSSEELSTSSSLVIATITLLLIFFIINPTPLLNSVHLITLNLFYW

SEQ ID NO: 131933 - DNA, 1479 bp, Psychrobacter arcticus 273-4
  CDS (1)..(1479): transl_table=11
atgaacgattttacgatgaatgatttgatggggctattgccttatgcaccaatcattgcggtagtgattacggtattggtggtgatgattgccattactatgaagcgctcacatatggtaactggtacgatttcggtcgtcggtcttaatattggtctgtttattttgcttgggcaaatggcaggcatcattgacagtgggtcgctcgtgccagcggctgagcagttattcgttattgataactttgctcagtttaatatggtgattatctttatctgtgcattggcatgttgtacgttatcttatgcctatttagccgatttaaaagaccataaagaagagctgtatttgctcatgttgctatcaacggttggtgcgctgcttatggtttgcgcccagcacttagcatccttctttatgagtctggagatgctatcgataccgctatatggcatgctgtcatatacttatatgcgcactcgctcgcttgagtcggggctgaagtacttagtgctatcagcgacagcatcggcaacgctgctgatgggcatggcatttatctatgcagaagtcggctcgcttgcttttaagcctatcagtttaaccttagcagatacgtttgaatcgccgctgttaatcttaggggcagcgatgatgatgtttggtattgcctttaagctttctgctgcgccctttcatatctggacaccagatgtctacgaaggcgcacctgcacctatcgcgacttatctggcctcggtatcaaaagtagcgatgatggcactggcagtacgatttttaattgatacctcactattggcattaccatcggtgcaaatgctgctgatggttatggcaaccttgtcgattttgctaggtaacttactcgcggtacgccaaaccagtctcaaacgcttgcttggttattcatccattgcccatatgggttatgtgttaatcgtaatcgtgagcattggctctgctgctgatagtatttctagcatgtatatggcgatttatgcctttacctctatcggtgcctttggcgtagtgaccttgatgtctagcccttatcgcttatctggtgaagcggatgaattaacgcattatcaagggctgttttggcgtcgtccggtattgacggctgtcatgaccatcatgatgttgtctttggcgggtattccactgaccgcaggctttattacgaagctgtttgcgattcttgctgccgtacaaggtaccaattggttcttggcagcgatgattatcttgggtagtgccattggtctgttctattacctacgcgtcttgctcacgctatttaaacgtccaaaacagtttattgaatttgacgtctcaaagcagtggggtctacgtaccggtggtatcatggtcattgcagtcacggcaatcattgtattctttggtgtgttgccaaacagtatgattgaatgggcgagtttggctcgtatttggtaa

SEQ ID NO: 131934 - protein, 492 aa, Psychrobacter arcticus 273-4
MNDFTMNDLMGLLPYAPIIAVVITVLVVMIAITMKRSHMVTGTISVVGLNIGLFILLGQMAGIIDSGSLVPAAEQLFVIDNFAQFNMVIIFICALACCTLSYAYLADLKDHKEELYLLMLLSTVGALLMVCAQHLASFFMSLEMLSIPLYGMLSYTYMRTRSLESGLKYLVLSATASATLLMGMAFIYAEVGSLAFKPISLTLADTFESPLLILGAAMMMFGIAFKLSAAPFHIWTPDVYEGAPAPIATYLASVSKVAMMALAVRFLIDTSLLALPSVQMLLMVMATLSILLGNLLAVRQTSLKRLLGYSSIAHMGYVLIVIVSIGSAADSISSMYMAIYAFTSIGAFGVVTLMSSPYRLSGEADELTHYQGLFWRRPVLTAVMTIMMLSLAGIPLTAGFITKLFAILAAVQGTNWFLAAMIILGSAIGLFYYLRVLLTLFKRPKQFIEFDVSKQWGLRTGGIMVIAVTAIIVFFGVLPNSMIEWASLARIW

SEQ ID NO: 131935 - DNA, 1446 bp, Dehalococcoides sp. CBDB1
  CDS (1)..(1446): transl_table=11
atgcctgagataataatactgataacagccctattggtaataataaccgacctctttttgaccaaaagcaagaggcacctggcctacctgtctctgctgggtttaggggcagcggctgttgccacagtgcttaactggaataacccgccggaactggctttcggcggtatgtgggcactggacggatacgccaatttcttccgtattctttttatcagcctttcagggctggttataatggcttcaatagattatgtaaacaagttcaggcgtttccaaggcgagtattatgcactggtattgcttgccctgctgggcatgataatgatggcctccactaccaatcttattaccatgtacctttcgcttgaactggccgggctggctttttacgtactggtaggtttccttaaggaccagcgttctaccgaatctgccctcaaatacctgcttttaggcggggtagcttccgccatgctggtatttggtttagtgctcatctacggtttcagcggagaaaccaatctgggcagtattcttaactatatacagacacttccgtccggcatggacataaccgcccataccggatttatactgggtattatactgactattaccgggctggggttcaaagtggctgccgtcccgtttcagttctgggcaccggatgtttatcagggttcacccacccctatcactttgtacctttccatagccagcaaagcggctggatttgccctattcctgcgtcttttctacactcttttcacagacccgctggcactaagccaagagtgggcgctgatagttgccgtactggcaactgccggtatgacactaggtaacgtactggctataccccaaaagaatattaaaagaatgctgggttattccagcatagcccacgccggttacatactggtagctttggcggcagtcggcaattcacctgaactggcagacggacggataagcctgctattttatctggtcgcctttgcggtatcagacctggtcgcctttgtttcaatcatcgccatcagccgctctaccggcagtgacgagatatcatcttacgaagggttagccaaaacaaacccggtatatgcctctgctcttacactggcattattatcgcttaccggttttcctcctttggcaggcttccttgccaagtattatatattcagtgcggctgttcaggcagacttgctgtggcttatgattgtggcggctgtaaataccgtaatatccgccgttttctacttcaacgtaatacgggtgatgtggctaagacaaccccgcgaggaagtgcgagtgttggcttcatggccgcttaaactggcacttggtatttcgggcatggctgtgttaatattcggcattgtacctgaagctcttctaaaccttatagaaaaggctaccgagctaataattcattag

SEQ ID NO: 131936 - protein, 481 aa, Dehalococcoides sp. CBDB1
MPEIIILITALLVIITDLFLTKSKRHLAYLSLLGLGAAAVATVLNWNNPPELAFGGMWALDGYANFFRILFISLSGLVIMASIDYVNKFRRFQGEYYALVLLALLGMIMMASTTNLITMYLSLELAGLAFYVLVGFLKDQRSTESALKYLLLGGVASAMLVFGLVLIYGFSGETNLGSILNYIQTLPSGMDITAHTGFILGIILTITGLGFKVAAVPFQFWAPDVYQGSPTPITLYLSIASKAAGFALFLRLFYTLFTDPLALSQEWALIVAVLATAGMTLGNVLAIPQKNIKRMLGYSSIAHAGYILVALAAVGNSPELADGRISLLFYLVAFAVSDLVAFVSIIAISRSTGSDEISSYEGLAKTNPVYASALTLALLSLTGFPPLAGFLAKYYIFSAAVQADLLWLMIVAAVNTVISAVFYFNVIRVMWLRQPREEVRVLASWPLKLALGISGMAVLIFGIVPEALLNLIEKATELIIH

SEQ ID NO: 131937 - DNA, 1563 bp, Anabaena variabilis ATCC 29413
  CDS (1)..(1563): transl_table=11
atggattttgctaatcttgcagcccagttaaatgctggaacaattttgccagagggaattgtaattgtcaccctcatgggggttttgattgttgatttgattttagggcgtacatcctcacgctggatcggatatctggcgatcgcaggcttactggcggcgattgttgccctgtattttcaatgggatgctaccaatcccatctcttttactggcgggtttattggtgatgacctcagcatcatctttcgcggtatcatcgccctgtctgccgttgttaccatcttgatgtcaatccgctatgttgagcagagtggaactgctttagcggaattcatcgctattttgttaactgcgactttgggcgggatgtttgtctctggggctagtgagttggtgatgattttcatctccctagaaacactgagtatttcctcttatttgttgacaggttataccaagcgtgacccccgttctaatgaggcagccctgaaatacttgttgattggcgcttccagcacagcagtatttctgtatggtgtgtcacttttatacggtctatccggtggacaaacagaactgagtgcgatcgctaacggaattattacagctaacgttggtcaatcactaggtgcagttattgccctggtttttgtcatcgcgggtattggctttaagatttccgccgcacctttccaccaatggacaccagacgtatatgaaggcgctcccaccccagtgattgcctttttatccgttggttccaaggcagcaggctttgccctcgctatccgtctgttaaccacagttttccccttcgtcgccgaagaatggaaatttgtgttcacagccttggccgtcctcagtatgattttgggtaatgttgtcgccctagcccaaaccagcatgaaacggatgctagcttattcatccattgcccaagccgggtttgtgatgattggcttgattgctggaactgatgccggatacgccagcatgatcttttacttgctggtttacctgttcatgaacctgtgcggttttacctgcatcattctgttctctctgcggacaggaaccgaccaaattgccgaatactctgggttatatcaaaaagacccactcctcacactaggtttgagtatctccctgctttcattgggcggtattcctccactagccgggttttttggcaaaatttacttgttctgggctggttggcaagcaggtctttactggttggtcttactaggcttagtaaccagcgttgtctccatctactactacattcgcgtagtcaaaatgatggtagtcaaagaaccccaagaaatgtccgatgtagtcaaaaattaccccgaaatacgttggaatttacctggatttagaccattgcaagtgggtttagtattgactttgattgctacctccgtagcaggaattttatctaatccactctttactttggcaaataattctgttgccaatactgcaattctgcaaaccacaaaagttgtcagtactcaggtaagtgctattcctgctgagaaatcagagggtttgtaa

SEQ ID NO: 131938 - protein, 520 aa, Anabaena variabilis ATCC 29413
MDFANLAAQLNAGTILPEGIVIVTLMGVLIVDLILGRTSSRWIGYLAIAGLLAAIVALYFQWDATNPISFTGGFIGDDLSIIFRGIIALSAVVTILMSIRYVEQSGTALAEFIAILLTATLGGMFVSGASELVMIFISLETLSISSYLLTGYTKRDPRSNEAALKYLLIGASSTAVFLYGVSLLYGLSGGQTELSAIANGIITANVGQSLGAVIALVFVIAGIGFKISAAPFHQWTPDVYEGAPTPVIAFLSVGSKAAGFALAIRLLTTVFPFVAEEWKFVFTALAVLSMILGNVVALAQTSMKRMLAYSSIAQAGFVMIGLIAGTDAGYASMIFYLLVYLFMNLCGFTCIILFSLRTGTDQIAEYSGLYQKDPLLTLGLSISLLSLGGIPPLAGFFGKIYLFWAGWQAGLYWLVLLGLVTSVVSIYYYIRVVKMMVVKEPQEMSDVVKNYPEIRWNLPGFRPLQVGLVLTLIATSVAGILSNPLFTLANNSVANTAILQTTKVVSTQVSAIPAEKSEGL

SEQ ID NO: 131939 - DNA, 1344 bp, Rhodobacter sphaeroides 2.4.1
  CDS (1)..(1344): transl_table=11
atgccgagctttcctgcccttgtgcccgtgatcctgctcggtgtcggcgcggtggcggcgatgctggccgccccccgcctgcccggcctctcgcgctggatcgcgggaacggcgctcctctgcgcgagcgtcgcactcgcgctgcggctcggcgcacctgcaagcctctcggagctgctggccgacgaccggctggcacgcctcgcggggctcggcatctgcctcgcgggtctgggcagccttgccttcctgcgcccggctggtccctcgaaggaggggccggcgcttctccttctcgccacgctcgggggcacggtgctcgcgggcgccatccatgcggcgacccttttcctcgggctcgagctcatcacgctggccctcgtcgcgctcttcgtcctgccgctcgaccggcccgcgctcgaggcgggctacaagttcctgatcctcggcgcggcggcggccgcaacgctgctgatggggctcgccctcgcccatgccgcgacggggtcgctcgcgctcgtggccctcggcggcgagggcgtgcttccggcgctggccgcagcgctcctcctcgcagggctcgccttcaagttcgccctcgtgcccttccacatgtggacgccggacgccttcaccggagcgcccggcgccgcggcggccttcgcgggcgccgcctcgaagatcgccgtggtggtggcgctgatccggctcgatgcggtgggcctgcccgaggtctgggcactcggcctcgcggccttcggcggcgcctcgatgctcctcggcaacatcgcggccctccggcaggacagtctggcgcggatgctcggctattcctcggtggcccatgcgggttacatcgcggcggcgctgggggcgggcgcggcttcggcgccggcggccgcgggcttctacatcctggcctatgcgcccgggctgctggccgcgctctgtgtggcgacgctcctcgggcgcgagacgcggatcggcgatctgcgcggcctcgtctggtcccggccgctcgccggggccgcgctggcggtggcgctcgtctcgctggcgggcctgccggtgtcggcgggattcttcggcaaatatgcgatcttctcggccctcatcgaggcgcgggcctggctgctcctcgcgctcgcgctcgtgggctcggccctcggagcctattactacctgcgcttcgtggcgttgatcttccgccgtgtggaggctcctgcccttgccccgctccgctggtccgaccgcacgcttctcgcgctggccaccggcatgaccctccttctcggggtccggcccgacctgctcctagacctcgtgcggacagccctcggctga

SEQ ID NO: 131940 - protein, 447 aa, Rhodobacter sphaeroides 2.4.1
MPSFPALVPVILLGVGAVAAMLAAPRLPGLSRWIAGTALLCASVALALRLGAPASLSELLADDRLARLAGLGICLAGLGSLAFLRPAGPSKEGPALLLLATLGGTVLAGAIHAATLFLGLELITLALVALFVLPLDRPALEAGYKFLILGAAAAATLLMGLALAHAATGSLALVALGGEGVLPALAAALLLAGLAFKFALVPFHMWTPDAFTGAPGAAAAFAGAASKIAVVVALIRLDAVGLPEVWALGLAAFGGASMLLGNIAALRQDSLARMLGYSSVAHAGYIAAALGAGAASAPAAAGFYILAYAPGLLAALCVATLLGRETRIGDLRGLVWSRPLAGAALAVALVSLAGLPVSAGFFGKYAIFSALIEARAWLLLALALVGSALGAYYYLRFVALIFRRVEAPALAPLRWSDRTLLALATGMTLLLGVRPDLLLDLVRTALG

SEQ ID NO: 131941 - DNA, 1455 bp, Geobacter metallireducens GS-15
  CDS (1)..(1455): transl_table=11
atggaaacaattgcaattcctgccattaacttcgcaccaataatgccagaggtcatactttcgatctttgcgatggtgctgctccttgtaaacgtattcgttccgagtgagcacaaggcctatctgggatatttgagtctcgtaggcgtcattgtcgccggattcacgctcattggtggatggggggtacctctctcggcgttcaatgattctgttgttcaggataacttctctatatttttcaagggcattttcctcctcacggttgcgatgagcattcttatctcggatcaatatttcaagcgtgaagaatgcaatctcggggaactttacccactgcttctctttgccacggttggtatgatgcttatggcgtctggtacggatttgatgactatttttcttggtctcgaagtgctctccgtatctctgtatattttggcaggctttaacagggccaatgttaagtcgaatgaagctggcctcaagtactttcttcttggcgcgttttcaactggattcctcctgtacggaatggccctcacctacggcgctaccggcactacgcgcgtagtgaagattgctgagtatgtgtcgcaaaacggagtcgtggcgcagaatcctatgtttgtgatcggaatgctgctgatggcggtaggcttttccttcaagatcgccgctgctccgttccatatgtggactccggatgtctacgagggtgctccgactccaatgaccgctttcatgtcagcggggccgaaggcagccggtttcgcagcatttatgcgcgttgttattattgctttcccttcgcttaaggctgactggtccgatctcctctggattcttgccgttcttaccatgaccattggtaacctgattgctctcaatcaggacaatatcaagaggatgctcgcatactcatcgattgcgcacgctgggtatgctctggtcggttttgccgccggaaatgcagaggggacggcaggcattctcttctacatgctttcctatgcttttatgaatataggggcctttgccattatcgttcttgttggcaagaagggcgaagcaaacaataatgttatggattacgcagggttcggaactaagcacccggtgctggccctggcaatggcagtcttcctcttctcgctggctggcataccgccgactgctggttttatcggtaagttctacctcttctctggcgccataaaggctgggtatgtatggcttgccatcatcggggtactgaatagtgccgcgtcggtatattactatctccgtgtgatggtttatatgtatatgaaggatcctgttgaagagtttgactggatgaagcttactccggcagttgccatctgcattattattgctgtggttggtgtcctgttgccaggagttgttccagcgtttctcctcaaccttgcacagcaggcagttctcctttaa

SEQ ID NO: 131942 - protein, 484 aa, Geobacter metallireducens GS-15
METIAIPAINFAPIMPEVILSIFAMVLLLVNVFVPSEHKAYLGYLSLVGVIVAGFTLIGGWGVPLSAFNDSVVQDNFSIFFKGIFLLTVAMSILISDQYFKREECNLGELYPLLLFATVGMMLMASGTDLMTIFLGLEVLSVSLYILAGFNRANVKSNEAGLKYFLLGAFSTGFLLYGMALTYGATGTTRVVKIAEYVSQNGVVAQNPMFVIGMLLMAVGFSFKIAAAPFHMWTPDVYEGAPTPMTAFMSAGPKAAGFAAFMRVVIIAFPSLKADWSDLLWILAVLTMTIGNLIALNQDNIKRMLAYSSIAHAGYALVGFAAGNAEGTAGILFYMLSYAFMNIGAFAIIVLVGKKGEANNNVMDYAGFGTKHPVLALAMAVFLFSLAGIPPTAGFIGKFYLFSGAIKAGYVWLAIIGVLNSAASVYYYLRVMVYMYMKDPVEEFDWMKLTPAVAICIIIAVVGVLLPGVVPAFLLNLAQQAVLL

SEQ ID NO: 131943 - DNA, 1467 bp, Triticum aestivum
  CDS (1)..(1467)
atgttcaatctttttttagcggtttccccagagatctttatcattaacgcaaccttcattttgctcattcatggagttgtatttagtacctctaagaaagatgattatccaccgttagttagtaatgtgggttggcttggattacttagtgttctaataaccttgcttctgctcgccgctggcgcacctctcctaactattgcccatttattctggaataatttttttaggagggacaattttacatatttctgccaaatccttctattattaagtacggctggtaccatttcgatgtgtttcgattttttcgaaaaagagaggtttgatgcttctgaattcattgtattaattccacttcctactcgcagtatgctcttaatgatcccggctcatgatttaattgccatgtatttagctattgagcttcaaagtttatgtttttatgtgatcgcagcatcaaaaagaaagtctgaattttccacggaagccggctcaaaatatttgatcttaggtgcatttccctctggaatattattgttcggttgttccatgatctatgggtctactggagctacccacttcgatcaattagccaagattttgaccggatacgaaatcactggtgctcgatctagtggtatttttatggggattctttttatcgctgtaggattcctattcaagattactgcagttccttttcatatgtgggcacctgatatctatgagggttcacccaccccggtgacagcattcctttctattgcgcctaaaatctctatttctgcaaatatgtcacgtgtttctattgttgcttcctatgggggtacattacaacaaatcttctttttctgcagcattgcttctatgatcttaggagcactggccgccatggcccaaacgaaagtcaaaagacctctagctcatagttcgattggacatgtaggttatattcgtactggtttctcatgtggaaccatagaaggaattcaatcactactaattggtatatttatttatgcatcaatgacgatagatgcattcgccatagttccagcattacggcaaacccgtgtcaaatatatagcggatttgggcgctctagccaaaacgaatcctatttcggctatgaccttctccattacaatgttctcatacgcaggaatacccccgttagccggcttttgtagcaaattctatttgttcttcgccgctttgggttgtggggcttacttcctagccccagtgggagtagtgactagcgttataggtcgtttttattatatacgcttagcgaaaagaatgttttttgatagacctaggacatggattctatatgaaccaatggatcgtgacaagtcgttactactagcaatgacttcctctttcattacttcatcctttccatatccctctcccttgttcgatcttactcatcaaatggcactcagttcatatctgtaa

SEQ ID NO: 131944 - protein, 488 aa, Triticum aestivum
MFNLFLAVSPEIFIINATFILLIHGVVFSTSKKDDYPPLVSNVGWLGLLSVLITLLLLAAGAPLLTIAHLFWNNFFRRDNFTYFCQILLLLSTAGTISMCFDFFEKERFDASEFIVLIPLPTRSMLLMIPAHDLIAMYLAIELQSLCFYVIAASKRKSEFSTEAGSKYLILGAFPSGILLFGCSMIYGSTGATHFDQLAKILTGYEITGARSSGIFMGILFIAVGFLFKITAVPFHMWAPDIYEGSPTPVTAFLSIAPKISISANMSRVSIVASYGGTLQQIFFFCSIASMILGALAAMAQTKVKRPLAHSSIGHVGYIRTGFSCGTIEGIQSLLIGIFIYASMTIDAFAIVPALRQTRVKYIADLGALAKTNPISAMTFSITMFSYAGIPPLAGFCSKFYLFFAALGCGAYFLAPVGVVTSVIGRFYYIRLAKRMFFDRPRTWILYEPMDRDKSLLLAMTSSFITSSFPYPSPLFDLTHQMALSSYL

SEQ ID NO: 131945 - DNA, 1464 bp, Rhodospirillum rubrum ATCC 11170
  CDS (1)..(1464): transl_table=11
atgacgttccaatcactgatccttgggcccgccctgccggaaatcctgctggccgtccttggtctggttcttttgatggtcggggtgttccgtaaaaccgacagcaccggtctggtggggctgctggcggtttacggcctgttgatggctttggccgtggtcggcctgggggcggcgccggaaacgccgcaactggcctttggcgggctgttcatcgatgacggcttcgcccgctatgccaaggcgctgaccctgctcggcgcggtgctgaccctgctgctgtcgatggtgtggctcaagcgcgagaacgaggggcgcttcgagttcccgattctggtgctgttcgccaccatcggcatgatgatgatgatctcggccaacgatctgatcgccctttacatggggttggagcttcagtcgctggcgctttacgtgatcgccgcctatcagcgcgacaatctgaaatccaccgaggccggccttaagtatttcgtccttggcgccctggcctcgggcctgctgctctatggcatgtcgctggtttacggcttcgccggcaccacccgcttcgacggtctggcccaggtggcggccgccgagggcggcatttcgaccgggttgctgatcggcatcgtcttcatcatcgccggtctcgccttcaaggtctcggccgtgcccttccatatgtgggcgcccgatgtctatgagggcgcgccgaccccggtgaccgccttcttcgccgtcgcccccaagatcgccgccctgaccctgttcgcccgggtgatgatggggcccttcgccgcctatgccgaccagtggcagcaggtgatcatcctgatctccatcctgtcgatgctgctcggcggcttcgccgccatcgtccagaccaatatcaagcggctgatggcctatagctcgatcggtcacgtcggctatgccctgatcggcatcgccgccggcaccaccgagggcgttcgcggcgttctggtctatctggcgatctatctgttcatgaacgtcggcaccttcaccgtcatcctggcgatgcgccagaaggggcgggcggtcgaaggcatcaacgatctggccggtctgtccaagcagcatccgatgatggccgccgccatggccgtcttcatgttctcgatggccggcgtaccgcctttggccggtttcttcggcaagttctatgtcttcatggcggcggtgaattccggcctgttcgccctggcggtgatcggcgttctgtcgagcgtggtggccgccttctactatctgcgcatcatcaagctgatgtatttcgatgaggcgaccgaaccgctggatgcgctttcgggcacgacgatgaaggtgatcttgatcggcaccgccgccgtggtcgccttgttcttcctggcgccgtccgtggtggtcgatggcgcccaggcggcggccgaggcgctgaccttcgcctccgcccgctga

SEQ ID NO: 131946 - protein, 487 aa, Rhodospirillum rubrum ATCC 11170
MTFQSLILGPALPEILLAVLGLVLLMVGVFRKTDSTGLVGLLAVYGLLMALAVVGLGAAPETPQLAFGGLFIDDGFARYAKALTLLGAVLTLLLSMVWLKRENEGRFEFPILVLFATIGMMMMISANDLIALYMGLELQSLALYVIAAYQRDNLKSTEAGLKYFVLGALASGLLLYGMSLVYGFAGTTRFDGLAQVAAAEGGISTGLLIGIVFIIAGLAFKVSAVPFHMWAPDVYEGAPTPVTAFFAVAPKIAALTLFARVMMGPFAAYADQWQQVIILISILSMLLGGFAAIVQTNIKRLMAYSSIGHVGYALIGIAAGTTEGVRGVLVYLAIYLFMNVGTFTVILAMRQKGRAVEGINDLAGLSKQHPMMAAAMAVFMFSMAGVPPLAGFFGKFYVFMAAVNSGLFALAVIGVLSSVVAAFYYLRIIKLMYFDEATEPLDALSGTTMKVILIGTAAVVALFFLAPSVVVDGAQAAAEALTFASAR

SEQ ID NO: 131947 - DNA, 1431 bp, Moorella thermoacetica ATCC 39073
  CDS (1)..(1431): transl_table=11
atggcgaatttgcatctcttaacggtggaaatcctgacggcagccctgggactgggactcctggccctgggtctcctggtaccccacagtgatcgccggggtattgcctatgtagctactgccggtctggccggtattctagcggcggccttcggcatgcgggaagccagtggtgtagttctcgggggatatgtcattgacccctttggtacctatttcaaaattctcttcctggtggcggccatgctaactgctgcctgctcctatgattatgtagaaaagatgggtctgaaccagggcgaatactatgccctgctggtcctggccaccctgggaatgatggtcctggcttcctcgggggaactggtcagcctttacctgggcttggaactgatgaccataaccttttgtatcctggcggcctttcacctgggcgacgccaaatcagcggaagcaggcattaagtacgtcctgctgggggccatgtcctcggccattttcctgtatggcctgagcctggtttatggcagcagcggtaccacagttatccgggaaatcggccaggcagtggctaccaggggggcgagcccggccctgctcctggggaccatctttatcttggcaggttttgccttcaaggtgacggcagtacccttccatatgtggtccccggatgtgtatgaaggagcaccgactccggttacaggctttctctcagttgcctccaaagctgccgcctttgcagccctggtacgggtgttcttcggcgccctgccggacctccacagcttctgggtccagctctttatcgccctggcggtcctaaccatcgttctgggcaacctggtggccatcccccagaccaacatcaaaaggctgctggcttactccagcatcgcccaggccggttatctgttgctgggtattgtttccttctccgtcctgggggtaggggcggtaatgtattacgccatgctctacgtctttggcaacatgggtgcctttatggctgctacggccttttataataacgacggcagtgatgagattaaggattacgccggcctggccaggcgttcacccctggtggcggcgttaatgctcttctccctcctgtccctggccgggataccacccatggccggttttgtcggcaagttttacctctttatgtcgataatttcccggcagtatatctggctggccatcctgggcattttgatgagcatggtgtcggtatactactatctcctggtggccaaagccatgtacctgggtaacccgccggaggggagcaaacctttgcgggtagcacccggcctccaggtggccatggtagtatcactgctaattctttttatcctgggaatttacccgacaccccttaccaactatgccatgaattcggctgtaaccttctttatgccctga

SEQ ID NO: 131948 - protein, 476 aa, Moorella thermoacetica ATCC 39073
MANLHLLTVEILTAALGLGLLALGLLVPHSDRRGIAYVATAGLAGILAAAFGMREASGVVLGGYVIDPFGTYFKILFLVAAMLTAACSYDYVEKMGLNQGEYYALLVLATLGMMVLASSGELVSLYLGLELMTITFCILAAFHLGDAKSAEAGIKYVLLGAMSSAIFLYGLSLVYGSSGTTVIREIGQAVATRGASPALLLGTIFILAGFAFKVTAVPFHMWSPDVYEGAPTPVTGFLSVASKAAAFAALVRVFFGALPDLHSFWVQLFIALAVLTIVLGNLVAIPQTNIKRLLAYSSIAQAGYLLLGIVSFSVLGVGAVMYYAMLYVFGNMGAFMAATAFYNNDGSDEIKDYAGLARRSPLVAALMLFSLLSLAGIPPMAGFVGKFYLFMSIISRQYIWLAILGILMSMVSVYYYLLVAKAMYLGNPPEGSKPLRVAPGLQVAMVVSLLILFILGIYPTPLTNYAMNSAVTFFMP

SEQ ID NO: 131949 - DNA, 1452 bp, Francisella tularensis subsp. holarctica
  CDS (1)..(1452): transl_table=11
atgagtttatcaatcctttatattttgccagaaatactactagcactaggtgtcatagttgtaatgttttctggactttttctacatggtaagattagaaacattaactatatttttttccaagtatttacactacttgctttgatagcaacttttgctaaagagtatctgatacagactactggcttagtgtttgagggtcaggttgtatttagtggctttgcatatacattacaactagtaatacttgtcttagcagtctttgttgcattatattcaagagattatgtcaaagatagaaaaatatcagatggtgatttctatacattgttaatgctatgcgtacttggtgcaatggttttaacagcggcacatagtttagttacaatatatgttggtctagagttattatcattaccaatgtatgcattgatcgcaatctatagagattcaggcaaaggtcttgaggccgcgatcaaatactttgttttaggggctattgcatcggctctactattatttgggatgtcatttgtctatggaatgacaggcaagcttgatattacagaaatagccaatgtattagcacatggtaacttcgcaggcttacagcagcagtttttgcttgtatacttggtaatgatgatcgctacatttttattcaaacttggtgctttcccttttcatatgtggttaccagatgtttatcaaggtgctccaaacgcagtagcaaatatcgttgcaactattccaaaagttgctgcctttgcgatgcttgtgaatatcttatttgttggcttcccatcactaaaagattcatggatatatctgtttaggattataggtatattgtcaatattttttggtagcttggtggcactctcacagactaatgttaaacgacttttgggttactcaacagtttcacagattggttttgtgctattggcaacaacattaaatcctcaaggatatgccttaactgcggcaagcttctatgtcatagtgtatttatttacaactttagctgtatttggcgtacttacaactatttctgtcgggggatatgaagttcaggatcttaatgacttaaaaggtttcaacacaaaagattcatggttagcatttatcttgttgattgtgctattttcaatggcgggtatccctccatttggtggctttattgctaaactatttgtagttatgggattaattaatgatggtaattacttcttggcgtgttttgtactatttatggcagtaatagcatcattctactatgtgcgtgtcatcaaaaccatgtactttgatgatcctgataatgatgaaactgttaagccaccgttgacatctctaatagcattaagtattaacggtttggtactattattcttagggattatgccaatgctccttttgggagttcttacccaagttactaatgttatataa

SEQ ID NO: 131950 - protein, 483 aa, Francisella tularensis subsp. holarctica
MSLSILYILPEILLALGVIVVMFSGLFLHGKIRNINYIFFQVFTLLALIATFAKEYLIQTTGLVFEGQVVFSGFAYTLQLVILVLAVFVALYSRDYVKDRKISDGDFYTLLMLCVLGAMVLTAAHSLVTIYVGLELLSLPMYALIAIYRDSGKGLEAAIKYFVLGAIASALLLFGMSFVYGMTGKLDITEIANVLAHGNFAGLQQQFLLVYLVMMIATFLFKLGAFPFHMWLPDVYQGAPNAVANIVATIPKVAAFAMLVNILFVGFPSLKDSWIYLFRIIGILSIFFGSLVALSQTNVKRLLGYSTVSQIGFVLLATTLNPQGYALTAASFYVIVYLFTTLAVFGVLTTISVGGYEVQDLNDLKGFNTKDSWLAFILLIVLFSMAGIPPFGGFIAKLFVVMGLINDGNYFLACFVLFMAVIASFYYVRVIKTMYFDDPDNDETVKPPLTSLIALSINGLVLLFLGIMPMLLLGVLTQVTNVI

SEQ ID NO: 131951 - DNA, 1467 bp, Oryza sativa (indica cultivar-group)
  CDS (1)..(1467)
atgttcaatctttttttagcggtttccccagagatctttatcattaacgcaaccttcattttgctcattcatggagttgtatttagtacctctaagaaagatgattatccaccgttagttagtaatgtgggttggcttggattacttagtgttctaataaccttgcttctgctcgccgctggcgcacctctcctaactattgcccatttattctggaataatttttttaggagggacaattttacatatttctgccaaatccttctattattaagtacggctggtaccatttcgatgtgtttcgattctttcgaaaaagagaggtttgatgcttctgaattcattgtattaattccacttcctactcgcagtatgctcttaatgatcccggctcatgatttaattgccatgtatttagctattgagcttcaaagtttatgtttttatgtgatcgcagcatcaaaaagaaagtctgaattttccacggaagccggctcaaaatatttgatcttaggtgcatttccctctggaatattattgttcggttgttccatgatctatgggtctactggagctacccacttcgatcaattagccaagattttgaccggatacgaaatcactggtgctcaatctagtggtatttttatggggattctttttatcgctgtaggattcctattcaagattactgcagttccttttcatatgtgggcacctgatatctatgagggttcacccaccccggtgacagcattcctttctattgcgcctaaaatctctatttctgcaaatatgtcacgtgtttctattgttgcttcctatgggggtacattacaacaaatcttctttttctgcagcattgcttctatgatcttaggagcactggccgccatggcccaaacgaaagtcaaaagacctctagctcatagttcgattggacatgtaggttatattcgtactggtttctcatgtggaaccatagaaggaattcaatcactactaattggtatatttatttatgcatcaatgacgatagatgcattcgccatagttccagcattacggcaaacccgtgtcaaatatatagcggatttgggcgctctagccaaaacgaatcctattttggctatgaccttctccattacaatgttctcatacgcaggaatacccccgttagccggcttttgtagcaaattctatttgttcttcgccgctttgggttgtggggcttacttcctagccccagtgggagtagtgactagcgttataggttgtttttattatatacgcttagtgaaaagaatgttttttgatagacctaggacatggattctatatgaaccaatggatcgtgacaagtcgttactactagcaatgacttcctctttcattacttcatcctttccatatccctctcccttgttcgatcttactcatcaaatggcactcagttcatatctgtaa

SEQ ID NO: 131952 - protein, 488 aa, Oryza sativa (indica cultivar-group)
MFNLFLAVSPEIFIINATFILLIHGVVFSTSKKDDYPPLVSNVGWLGLLSVLITLLLLAAGAPLLTIAHLFWNNFFRRDNFTYFCQILLLLSTAGTISMCFDSFEKERFDASEFIVLIPLPTRSMLLMIPAHDLIAMYLAIELQSLCFYVIAASKRKSEFSTEAGSKYLILGAFPSGILLFGCSMIYGSTGATHFDQLAKILTGYEITGAQSSGIFMGILFIAVGFLFKITAVPFHMWAPDIYEGSPTPVTAFLSIAPKISISANMSRVSIVASYGGTLQQIFFFCSIASMILGALAAMAQTKVKRPLAHSSIGHVGYIRTGFSCGTIEGIQSLLIGIFIYASMTIDAFAIVPALRQTRVKYIADLGALAKTNPILAMTFSITMFSYAGIPPLAGFCSKFYLFFAALGCGAYFLAPVGVVTSVIGCFYYIRLVKRMFFDRPRTWILYEPMDRDKSLLLAMTSSFITSSFPYPSPLFDLTHQMALSSYL

SEQ ID NO: 131953 - DNA, 1491 bp, Desulfitobacterium hafniense Y51
  CDS (1)..(1491): transl_table=11
atgatgagtttcgaattatctttactctcaacggaaatcattatggcagtccttggccttggcttattggcagtaggtctcatccttccccgcgggtcgagacaaggaatgttccctcttaccttattcgcccttttgggaacccttgcttacgctgtctatgatttcttctatggtggaaatgcggcattcctgcaaggaatgtatatgcacgaccaatttgcaggctttttcaagattcttttcctggttgcggcactcctggtggtgctttccacgaaaaactatgtggctaaattccaggcttaccgcggtgagttttaccctctgctcctcttggccgctttgggcatgatgctgatggctggtgccggggatctcctcactatgtatgtaggcttagagttgatgaccatcaccttctatattctcgtcgcttaccatcccaatgatcccaaatcctcagaggcgggcattaagtatttggtactgggagccgcctcttcagcagttctgctctacggtatcagcctgatctatggactcaccggagacacccagatgcactctgtggctatgtccttaggtgctgaggcgaatacagtgactatcctggctaccgtgatgatgctggctggatttggctttaaaatcagtttggttcctttccatatgtgggcaccggatatttatgaaggggctcctgctcccatcaccgcattcttggccacagcctccaaagccgccggttttgcggccttggtcagattctatgtcctgatgatgtacaatcattccatggctgaagccggactcatcctgcttctggtattggccgctataacgatgatcatcggtaacctgatggccttcccgcaaaagaatatccaacgcttgatggcttattcggggattgctcaggcaggctacatcatcgttggcgtcatcgcagtctccattgccagctcggcatcccaatggggagtcgatccggtcagtgcttttgtggatgggatcaaaggggtattgttctacctgatgatttatgtctttgccaacctgggggccttcgcggtcattacccatgtggcccagagccagggcagcactgagatcaaggattatgcaggtttggcaaaacgttccccgctggccgccgcagttcttaccttatccgttctttctttggctgggattccgcccttggcaggatttgtgggtaaattctaccttttctcggcagtcatcaaccaaggacatgtctggatagcggtgataggttttgtgatgagtatgatctccgtctattactatttatccattgttaagatcatgtatctgggcgatggggaaggattacctgaagtgcctgttcatggtgcggccaaatttggcatgatattctccatgattgtcacgattgttttaggtatttaccccacaccgttggctcaaatggcgcttaccgccgcttcgagtctagtaaaatag

SEQ ID NO: 131954 - protein, 496 aa, Desulfitobacterium hafniense Y51
MMSFELSLLSTEIIMAVLGLGLLAVGLILPRGSRQGMFPLTLFALLGTLAYAVYDFFYGGNAAFLQGMYMHDQFAGFFKILFLVAALLVVLSTKNYVAKFQAYRGEFYPLLLLAALGMMLMAGAGDLLTMYVGLELMTITFYILVAYHPNDPKSSEAGIKYLVLGAASSAVLLYGISLIYGLTGDTQMHSVAMSLGAEANTVTILATVMMLAGFGFKISLVPFHMWAPDIYEGAPAPITAFLATASKAAGFAALVRFYVLMMYNHSMAEAGLILLLVLAAITMIIGNLMAFPQKNIQRLMAYSGIAQAGYIIVGVIAVSIASSASQWGVDPVSAFVDGIKGVLFYLMIYVFANLGAFAVITHVAQSQGSTEIKDYAGLAKRSPLAAAVLTLSVLSLAGIPPLAGFVGKFYLFSAVINQGHVWIAVIGFVMSMISVYYYLSIVKIMYLGDGEGLPEVPVHGAAKFGMIFSMIVTIVLGIYPTPLAQMALTAASSLVK

SEQ ID NO: 131955 - DNA, 1560 bp, Myxococcus xanthus DK 1622
  CDS (1)..(1560): transl_table=11
atgaacctgcccaatctcagcctggcagacttcctcccgctgctgcccgccatcatcatggtggtgggcgcctccatcctgctgttgtcggaggtgttcctctccacgacggcgtcgcgcgcgtaccaggcggtgctcaccgtggtgacggcggtggcggccggcgccatggcgctgacgacgatgttcgagccaccccaggaggtgatgctcggcttcggcgtgatggaccccttctccagcttcctcaccttcgtggtgtgcgtgggcctggggctggcgaccctgagctcggtgagcttcctgcgcaagcgcggcgcggagcgcggtgagttctacgcgctgatgctgttcgcctcggcgggcatgagcctgcttgcgatgtcgaacgagctcatcacgctcttcgtcaacatcgaggtcctctccctctccacctacgcgctgacgtcgtacctgcggcgtggcacgcggccgagcgaggcgggcttcaagtacttcatcctgggcgccttctcgtccgcggtgctgctctacggcgcggcgctgctgtacggcgccaccggcaccacccacctgacggccatggccggtccgctgtccaccgccatgtcgtcgcagccgggcctggtgtacgcgggcatcatcctggtgatcacgggcttcgccttcaaggtcgccgcggtgccgttccacatgtggacgccggacgtctacgagggcgcgccgacgccggtcaccgcgctgatgagcgtgggcgtgaaggcggccgccttcgcggcgatggtccgcgtgttcttcatggtgggcaagggcgtggacccgcagatgctgctgggcctgttctccgtgctggccttcctcaccatggtggcgggcaacctgctggcgattccgcagcgcaacgtgaagcgcatgctggcgtactcgtccattgcccacgccggctacctgctggtgggcgtggccgccctcttcgtcaccggcccgggcgagcagttccgcctgctgggtgcgtccgcgctgacgggtggcaccccgctgggcctggcccgcgcggaggcgctgcgcggcatcctctactacctgctggcgtacacgttcagcgcggtgggcgccttcgccatcgtctccgtcctggagcgtcgcgaggacgaggagaagggcaccgcctgggacctggagcgcttcagcgggctggcgcagcgcaagccgggttgggccttcgcgatggcggccttcatgctgtcgctgggtggcatcccgcccaccatcggattcatgagcaagctgctcatcttccaggccgccgtggatgcgggcctcatcggcctcaccatcgtcggcgtgctctccagcgcggtgggcatctattactacctgcgcgtggtggtctacatgttcatgcggccggtgccggagggcgcgcaggcgctcgagaagagctggtccaccgaactggcgctggtgctgtccaccgcggcggtcgtgattctgggcatcatccccggtcccatcatgggctggctggagcaggccagcagcatcttcggccagtag

SEQ ID NO: 131956 - protein, 519 aa, Myxococcus xanthus DK 1622
MNLPNLSLADFLPLLPAIIMVVGASILLLSEVFLSTTASRAYQAVLTVVTAVAAGAMALTTMFEPPQEVMLGFGVMDPFSSFLTFVVCVGLGLATLSSVSFLRKRGAERGEFYALMLFASAGMSLLAMSNELITLFVNIEVLSLSTYALTSYLRRGTRPSEAGFKYFILGAFSSAVLLYGAALLYGATGTTHLTAMAGPLSTAMSSQPGLVYAGIILVITGFAFKVAAVPFHMWTPDVYEGAPTPVTALMSVGVKAAAFAAMVRVFFMVGKGVDPQMLLGLFSVLAFLTMVAGNLLAIPQRNVKRMLAYSSIAHAGYLLVGVAALFVTGPGEQFRLLGASALTGGTPLGLARAEALRGILYYLLAYTFSAVGAFAIVSVLERREDEEKGTAWDLERFSGLAQRKPGWAFAMAAFMLSLGGIPPTIGFMSKLLIFQAAVDAGLIGLTIVGVLSSAVGIYYYLRVVVYMFMRPVPEGAQALEKSWSTELALVLSTAAVVILGIIPGPIMGWLEQASSIFGQ

SEQ ID NO: 131957 - DNA, 1443 bp, Rubrobacter xylanophilus DSM 9941
  CDS (1)..(1443): transl_table=11
gtgcctgtttccggagaggctttcctggggcttctgcccgagctggtagcgacgggtttcctgctcgtggtgctgctgggcggggtctttgccgggccccgcagcgaggcgctggtggccgcgctcgccgggctggggacgctggcgtccttcgccgcggcggcggggctgctcgccgccggcttctcgggcaccttcttcggcggcggctacgccgtggaccccttcgcgctctacttcaagctcatcataaccgcgacggccttcttcaccgtcatagccgccgcgcggtgggccgaaaggacgggggacgccccggagtacatgacgctcatcatcgcggtcgcgctcggggggatgctgctcgtctccatgcgcgacctgttcggggtctttctcgcggtcgagctcgccaccatcccctcctacgcgatggtggccttcgaccgcaggcgccgggagagcgccgagggggggatgaagtacctgatcacgggggtcatagcctcctccttcctgctctacgggatcgtcttgatctacggggtctccgggtcggcgaacctctcgcgggtggccgaggccttcggggaggggctcagcccggtggcgatcgtcgggctggtgctgatgatcagcggcctcgccttcaaggtctccgccgcccccttccacttctggacgccggacgcctaccagggcgcccccaccagcgcggcggcctttctctcggtggcccccaaggcggcgatcttcgcggcgctgctgcgcatcctgctggacgggatgccgcaggccgctccgacctggacggcgctcatggcggtcatcgctatcgtgaccatgttcgtggggaacctgctcgccctgcggcagagcaacgtccgccggatgctggcctacagctcggtggcgcactccggatacatcctcgcggccttcgccgcgctgcagggggacgccgtctcgtcgggggtgcaggcggtcatgatctacagcgcggcctacgcggtgatgaacctgggggccttcctcaccatcgacctggtgggggaggaggccaagagcttcaacgggctgttcgccacccgcccgatgctggcggcggccatggccgtgttcatggccgcgctcgtcggcatcccgcccctctccggctttttcggcaaggcctgggtgatctacgccggcgcggggtcgggctcggcgctggtgtacgtcgcggtggcggcgctggtcgtaaacagcgtgctctcggtgccctactacttcggcatcatccgcaacatgttccaggaggagccggtctcggcgggggggccggccaagaagggggacggcggggtggcgttcaccgtctacgccatggcgctcctcaccgcgctgttcttcctcggggtcgggccgctggcggcgcttgccgccggctccgggctgttgtag

SEQ ID NO: 131958 - protein, 480 aa, Rubrobacter xylanophilus DSM 9941
MPVSGEAFLGLLPELVATGFLLVVLLGGVFAGPRSEALVAALAGLGTLASFAAAAGLLAAGFSGTFFGGGYAVDPFALYFKLIITATAFFTVIAAARWAERTGDAPEYMTLIIAVALGGMLLVSMRDLFGVFLAVELATIPSYAMVAFDRRRRESAEGGMKYLITGVIASSFLLYGIVLIYGVSGSANLSRVAEAFGEGLSPVAIVGLVLMISGLAFKVSAAPFHFWTPDAYQGAPTSAAAFLSVAPKAAIFAALLRILLDGMPQAAPTWTALMAVIAIVTMFVGNLLALRQSNVRRMLAYSSVAHSGYILAAFAALQGDAVSSGVQAVMIYSAAYAVMNLGAFLTIDLVGEEAKSFNGLFATRPMLAAAMAVFMAALVGIPPLSGFFGKAWVIYAGAGSGSALVYVAVAALVVNSVLSVPYYFGIIRNMFQEEPVSAGGPAKKGDGGVAFTVYAMALLTALFFLGVGPLAALAAGSGLL

SEQ ID NO: 131959 - DNA, 1164 bp, Populus alba
  CDS (1)..(1164): transl_table=11
atggctataacagagtttctcttattcgtattaacagctactctaggaggaatgtttttatgcggtgctaacgatttaataactatctttgtagctccagaatgtttcagtttatgctcatacctattatctggatataccaagaaagatgtacggtctaatgaggctactacgaaatatttactcatgggtggggcaagctcttctattctggttcatggtttctcttggctatatggttcgtccgggggagagatcgagcttcaagaaatagtgaatggtcttatcaatacacaaatgtataactccccaggaatttcaattgcgcttatattcatcactgtaggaattgggttcaagctttccccagccccttctcatcaatggactcctgacgtatacgaaggatctcccactccagtcgttgcttttctttctgttacttcgaaagtagctgcttcagcttcagccactcgaattttcgatattcctttttatttctcatcaaacgaatggcatcttcttctggaaatcctagctattctgagcatgatagtggggaatctcattgctattactcaaacaagcatgaaacgtatgcttgcatattcgtccataggtcaaattggatatgtaattattggaataattgttggagactcaaatggtggatatgcaagcatgataacttatatgctcttctatatctccatgaatctaggaacttttgcttgcattgtattatttggtctacgcaccggaactgataacattcgagattatgcaggattatacacgaaagatccttttttggctctctctttagccctatgtctcttatccctaggaggtcttcctccactagcaggttttttcggaaaactccatttattctggtgtggatggcaggcaggcctatatttcttggtttcaataggactccttacgagcgttctttctatctactattatctaaaaataatcaagttattaatgactggacaaaaccaagaaataacccctcacgtgcgaaattatagaggatcccctttaagatcaaacaattccatcgaattgagtatgattgtatgtgtgatagcatctactataccgggaatatcaatgagcccgattattgaaattgctcaagatacccttttttag

SEQ ID NO: 131960 - protein, 387 aa, Populus alba
MAITEFLLFVLTATLGGMFLCGANDLITIFVAPECFSLCSYLLSGYTKKDVRSNEATTKYLLMGGASSSILVHGFSWLYGSSGGEIELQEIVNGLINTQMYNSPGISIALIFITVGIGFKLSPAPSHQWTPDVYEGSPTPVVAFLSVTSKVAASASATRIFDIPFYFSSNEWHLLLEILAILSMIVGNLIAITQTSMKRMLAYSSIGQIGYVIIGIIVGDSNGGYASMITYMLFYISMNLGTFACIVLFGLRTGTDNIRDYAGLYTKDPFLALSLALCLLSLGGLPPLAGFFGKLHLFWCGWQAGLYFLVSIGLLTSVLSIYYYLKIIKLLMTGQNQEITPHVRNYRGSPLRSNNSIELSMIVCVIASTIPGISMSPIIEIAQDTLF

SEQ ID NO: 131961 - DNA, 1665 bp, Verticillium dahliae
  CDS (1)..(1665): transl_table=4
atgatagtagtttcaattttatttatattactttccaatgccgttactttaagacgagatgtatcaatactattcaatagagtagctattttagctttaacttactgtattttacaagatatggtgagtttatctattgtaagtaaaggtatagggttacatggaggtttacttcatataactaatattacacaaattttccatatatttattttttttattactatattaattttacaattaactagttttcatcctagaaaagtttgaatccctgagtattcatctttatcagatttattaaattctaaacttgtttattatagaactaaaattataaataaaatgggagaacatttaaaaattatagaatatccattaatattattatttgttaatttaggtggagttttcttaatgtcaactaatgatttggtgtctattttccctattctcctttctatagaattacaaagttatggtttatatattgtaagtacaatatatagaaattctgagtcatctactactggaggtttaatctactttttattaggtggattaagttcatgttttattttattaggtacagctttattatatgctaattctggtactacaaacttagatggtttatatataattaacagtataagtgattttagtgatatgacttattgatataaaccttattatattaatttttctttattagtatttagtataggattcttatttaaaataggtgctgctccattccatttttgatctcctgatgtttatgacgctatacctactatagttacaacatttgtagctatagttgcgaaaatttctatattaattttcttattagaattagtttattatacaagtaatagtttttctgatctaaattgaacttttagtttaataataagttcattatttcacttaattattggaacagttgttggtttaacacaatttagaattaaaagattatttgcttatagtactatttctcatgtaggttatatgttattagctttaggaatatcaagtatagaatctactcaagcatttatattttatttaacacaatattctataagtaacttaaatgcttttgttatattaatagctataggattttctttctatcgttatgtaagtgataataaagaacataaagaacttttagataaaaataattctcctttacaattagttagtcaattacgaggttacttttatataaaccctttattatctataagtttagctattacaatattctctttcatgggtatacctcctcttgtaggattctttggaaaacaaatggtattaagtgcagctttagataaaggatatatatttataactttagttgctatcttaactagtgttgtaggaggagtttattatttaactataataaaagaaattttcttttattcacctacatataaaattaaccctttactagtaaatttaaatatacctggtaaaattgaacctagttctaaagaagttaatattaaacatgataatatagttatagctagccctatagcatttattatttctgttattactttaataatattattatttatatttataaataaagaatgattaagcatgggtaccatattggtacatattttatttaattattaa

SEQ ID NO: 131962 - protein, 554 aa, Verticillium dahliae
MIVVSILFILLSNAVTLRRDVSILFNRVAILALTYCILQDMVSLSIVSKGIGLHGGLLHITNITQIFHIFIFFITILILQLTSFHPRKVWIPEYSSLSDLLNSKLVYYRTKIINKMGEHLKIIEYPLILLFVNLGGVFLMSTNDLVSIFPILLSIELQSYGLYIVSTIYRNSESSTTGGLIYFLLGGLSSCFILLGTALLYANSGTTNLDGLYIINSISDFSDMTYWYKPYYINFSLLVFSIGFLFKIGAAPFHFWSPDVYDAIPTIVTTFVAIVAKISILIFLLELVYYTSNSFSDLNWTFSLIISSLFHLIIGTVVGLTQFRIKRLFAYSTISHVGYMLLALGISSIESTQAFIFYLTQYSISNLNAFVILIAIGFSFYRYVSDNKEHKELLDKNNSPLQLVSQLRGYFYINPLLSISLAITIFSFMGIPPLVGFFGKQMVLSAALDKGYIFITLVAILTSVVGGVYYLTIIKEIFFYSPTYKINPLLVNLNIPGKIEPSSKEVNIKHDNIVIASPIAFIISVITLIILLFIFINKEWLSMGTILVHILFNY

SEQ ID NO: 131963 - DNA, 1581 bp, Trichodesmium erythraeum IMS101
  CDS (1)..(1581): transl_table=11
atgatagatttatctaccattgcagctcaacttaatgcccgcaccattctcccagaaggaatagtcgtgatcaccctgctggtagttctcgtcggagacctaatactggggcgtagttctactaaatggactccttatgccgccattgttggtctcttaggagcaattgtagccttatatactcaatgggatagtagcaataccataggttttttaggagcctttaatgccgatgccctgagtatagcatttagaggcattattgctatatcagcgattactactatattaatgtcagtagcatacatagaacaaactggaactccactaggagaatttatctgtattctgctaaccgctaccttgggagcaatgttcctatctggagcagatgagttggtaatgattttcatttctctagaaactctaagtatctcctcttatttattaaccggttatacaaaacgtgatcctcgttctaatgaagcagcattaaaatatttactcataggagccgctagctccgcaatttttctttatggcatttccctgctttatggtttatccggtggagaaaccaggttaacagcgatcgcttctagtatggcaaatgctggtagtgctaatatttcactagccctcgtcattgccttagtatttgctattgcaggtatttctttcaaaatttctgctgttccttttcatcaatggactccagatgtttacgaaggttctcctactccagttgtggcctttctttcagtgggttctaaagcagcaggttttgccctagccattcgtcttttagtaacagctttcccattagtttcagaacaatggcattttgtatttactgccctagctattctaagtatggtattaggtaatgtagttgctcttgcccaaaccagcatgaaacgtctacttgcttactcatctattggacaagctggttttgtgatgatcggtcttttggccaatacggaagcaggttacgctagcatgatattttatctgctggtttatttatttatgaacttgggtggttttacctgtgtgattttattttctctacgtacaggtacagaccaaattagtgaatatgcaggtctataccaaaaagacccactgttaacattaggattaagtctttgtttgttgtctttaggtggtataccaccacttgcaggtttctttggtaaaatttatctgttttgggcaggctggcaagctggattatattggttagttttattaggattaattaccagtgtggcttctatttactattacattcgtgtggttaaaatgatggtagtaaaagaaccacaagaaatgtctgatgtaattaaaaattatcctcccattagctggaaactccctggtatgcgtcctttacaagtaggattaattttgtcagttctagcaacatctttagctggaattttatctaaccctttatttactttagctaatagttctattgctaaaactcctatgttaaattcagctttagtcaagactgttgaagctaattcagtagccagtcaactagatttttctttgccgtcaaagaactag

SEQ ID NO: 131964 - protein, 526 aa, Trichodesmium erythraeum IMS101
MIDLSTIAAQLNARTILPEGIVVITLLVVLVGDLILGRSSTKWTPYAAIVGLLGAIVALYTQWDSSNTIGFLGAFNADALSIAFRGIIAISAITTILMSVAYIEQTGTPLGEFICILLTATLGAMFLSGADELVMIFISLETLSISSYLLTGYTKRDPRSNEAALKYLLIGAASSAIFLYGISLLYGLSGGETRLTAIASSMANAGSANISLALVIALVFAIAGISFKISAVPFHQWTPDVYEGSPTPVVAFLSVGSKAAGFALAIRLLVTAFPLVSEQWHFVFTALAILSMVLGNVVALAQTSMKRLLAYSSIGQAGFVMIGLLANTEAGYASMIFYLLVYLFMNLGGFTCVILFSLRTGTDQISEYAGLYQKDPLLTLGLSLCLLSLGGIPPLAGFFGKIYLFWAGWQAGLYWLVLLGLITSVASIYYYIRVVKMMVVKEPQEMSDVIKNYPPISWKLPGMRPLQVGLILSVLATSLAGILSNPLFTLANSSIAKTPMLNSALVKTVEANSVASQLDFSLPSKN

SEQ ID NO: 131965 - DNA, 1467 bp, Zea mays subsp. parviglumis
  CDS (1)..(1467)
atgttcaatctttttttagcggtttccccagagatctttctcattaacgcaaccttcattttgctcattcatggagttgtatttagtacctctaagaaagatgattatccaccgttagttagtaatgtgggttggcttggattacttagtgttctaataaccttgcttctgctcgccgctggcgcacctctcctaactattgcccatttattctggaataatttttttaggagggacaattttacatatttctgccaaatccttctattattaagtacggctggtaccatttcgatgtgtttcgattctgtcgaaaaagagaggtttgatgcttttgaattcattgtattaattccacttcctactcgcagtatgctcttaatgatcccggctcatgatttaattgccatgtatttagctattgagcttcaaagtttatgtttttatgtgatcgcagcatcaaaaagaaagtctgaattttccacggaagccggctcaaaatatttgatcttaggtgcatttccctctggaatattattgttcggttgttccatgatctatgggtctactggagctacccacttcgatcaattagccaagattttgaccggatacgaaatcactggtgctcgatctagtggtatttttatggggattctttttatcgctgtaggatccctattcaagattactgcagttccttttcatatgtgggcacctgatatctatgagggttcacccaccccggtgacagcattcctttctattgcgcctaaaatctctatttctgcaaatatgtcacgtgtttctattgttgcttcctatgggggtacattacaacaaatcttctttttctgcagcattgcttctatgatcttaggagcactggccgccatggcccaaacgaaagtaaaaagacctctagctcatagttcgattggacatgtaggttatattcgtactggtttctcatgtggaaccatagaaggaattcaatcactactaattggtatatttatttatgcatcaatgacgatagatgcattcgccatagttccagcattacggcaaacccgtgtcaaatatatagcggatttgggcgctctagccaaaacgaatcctattttggctatgaccttctccattacaatgttctcatacgcaggaatacccccgttagccggcttttgtagcaaattctatttgttcttcgccgctttgggttgtggggcttacttcctagccccagtgggagtagtgactagcgttataggtcgtttttattatatacgcttagcgaaaagaatgttttttgatagacctaggacatggattctatatgaaccaatggatcgtgacaagtcgttactactagcaatgacttcctctttcattacttcatcctttccatatccctctcccttgttcgatcttactcatcaaatggcactcagttcatatctgtaa

SEQ ID NO: 131966 - protein, 488 aa, Zea mays subsp. parviglumis
MFNLFLAVSPEIFLINATFILLIHGVVFSTSKKDDYPPLVSNVGWLGLLSVLITLLLLAAGAPLLTIAHLFWNNFFRRDNFTYFCQILLLLSTAGTISMCFDSVEKERFDAFEFIVLIPLPTRSMLLMIPAHDLIAMYLAIELQSLCFYVIAASKRKSEFSTEAGSKYLILGAFPSGILLFGCSMIYGSTGATHFDQLAKILTGYEITGARSSGIFMGILFIAVGSLFKITAVPFHMWAPDIYEGSPTPVTAFLSIAPKISISANMSRVSIVASYGGTLQQIFFFCSIASMILGALAAMAQTKVKRPLAHSSIGHVGYIRTGFSCGTIEGIQSLLIGIFIYASMTIDAFAIVPALRQTRVKYIADLGALAKTNPILAMTFSITMFSYAGIPPLAGFCSKFYLFFAALGCGAYFLAPVGVVTSVIGRFYYIRLAKRMFFDRPRTWILYEPMDRDKSLLLAMTSSFITSSFPYPSPLFDLTHQMALSSYL

SEQ ID NO: 131967 - DNA, 1467 bp, Alkalilimnicola ehrlichei MLHE-1
  CDS (1)..(1467): transl_table=11
atgaccgtcgagacgccggacttcgtgatgccggatttttccctggcgctgccggagatctggatgctggtgatggcctgtgtggtgctggtcgtggacctgtacagccaggacagccgccgcgggatgaccttcatgctgacccagttcaccctggtggtggcgggggtgctggccattgtcgcccattggggtgagcctgcggtcaccttcagtggcacctatgtctccgacaacctggcggcggtccttaaggtggccatcgccggtctgggcttcctcagctttgcctactgccgcgattacctggaggaccgcggcctgctcaagggtgagtacttcgtgctcgggctcttttcgctgctgggcatgatgatcatggcctcggcgcacaatctcatgacggtctacctgggcctggagctgctggcgctcaccctgtacgccatggtggcctttaaccgcgataacctgcgggccaccgaggcggcgatgaaatacttcgttctgggtgccatcgcctcgggcatcctgctctacggcatgtccctgatctacggcgccacgggctcgctgaacctggccgaggtggcggtctatgccggtgagcagggcgcgaacgattggctgttgctgctcgggatgaccctggtggtggtaggcgtggccttcaagttcggcgccgtgccgttccacacttggatgcccgacgtctatcagggcgcgccgaccacggtggcgctgttcgccagcaccgcacccaaggtcgcggcggtggcgctgttcgtccggctgctctccgagggactggggccaatccacgaccagtggcaaccgatgatcatcctgctcgcggtggcctccctggtggtgggtaacctggcggcattggcgcagaccaacatcaaacgcatgctggcctactccaccgcgtcacacgtgggctttatcctgctcggcttcattgccggcaccgctgagggctactcgacggcgctgttctacgccatcacctacggcatcatgtcggccggggcatttggtctcatcatcctcctctcccaccgcggctttgaggcggagaatatcagtgacttcaaggggctgaacgatcgcagtccggccatggcgctgatgatgctgttgttgatgttctccatgaccggtatccccggcacggtgggcttctacgcaaagtggttggtgatcaaatcggtggtggacgtgggcctggtctggctggcggtgttcgccgtggtcttcgccgttatcggcgccttctactacctgcgggtcctcaagttcgtctactttgataagcccgagacggacgcgccgccgcaaaccggctcgccggcgatgcgaggccttctggtggcgaacggcatcgccgtgctgctgcttggcatcttcccggacagcctgatctccgcctgcatggcggcctttggcgtgagttatgggtga

SEQ ID NO: 131968 - protein, 488 aa, Alkalilimnicola ehrlichei MLHE-1
MTVETPDFVMPDFSLALPEIWMLVMACVVLVVDLYSQDSRRGMTFMLTQFTLVVAGVLAIVAHWGEPAVTFSGTYVSDNLAAVLKVAIAGLGFLSFAYCRDYLEDRGLLKGEYFVLGLFSLLGMMIMASAHNLMTVYLGLELLALTLYAMVAFNRDNLRATEAAMKYFVLGAIASGILLYGMSLIYGATGSLNLAEVAVYAGEQGANDWLLLLGMTLVVVGVAFKFGAVPFHTWMPDVYQGAPTTVALFASTAPKVAAVALFVRLLSEGLGPIHDQWQPMIILLAVASLVVGNLAALAQTNIKRMLAYSTASHVGFILLGFIAGTAEGYSTALFYAITYGIMSAGAFGLIILLSHRGFEAENISDFKGLNDRSPAMALMMLLLMFSMTGIPGTVGFYAKWLVIKSVVDVGLVWLAVFAVVFAVIGAFYYLRVLKFVYFDKPETDAPPQTGSPAMRGLLVANGIAVLLLGIFPDSLISACMAAFGVSYG

SEQ ID NO: 131969 - DNA, 1623 bp, Coffea arabica
  CDS (1)..(1623): transl_table=11
atgatctggcatgtacagaatgaaaacttcattctcgattctacgagaatttttatgaaagcctttcatttgcttctcttcgatggaagtttgattttcccagaatgtatcctaatttttggcctaattcttcttctgatgatcgattcatcctcggatcaaaaagatataccttggttatatttcatcccttcaacaagtttagtaatgagcataacggccctattgttccgatggagagaagaacctatgattagcttttcgggaaatttccaaacgaacaatttcaacgaaatctttcaatttcttattttactatgttcaactctatgtattcctctatccgtagagtacattgaatgtacagaaatggctataacagagtttctcttattcgtattaacagctactctaggaggaatgtttttatgcggtgctaacgatttcataactatctttgtagctccagaatgtttcagtttatgctcctacctattatctggatataccaagaaagatgtacggtctaatgaggctactatgaaatatttactcatgggtggggcaagctcttctattctggttcatggtttctcttggctatatggttcatctgggggagagatcgagcttcaagaaatagtgaatggtcttatcaatacacaaatgtataactccccaggaatttcaattgcgctcatattcatcactgtaggaattgggttcaagctttccccagccccttctcatcaatggactcctgacgtatacgaaggagtgcggttcgttcgagaaattcctacctctctatctatctctgagatgtttggatttttcaaaactccatggacatgcagaagagaaatatctcccactcccgtcgttgcttttctttctgttacttcgaaagtagctgcttcagcttcagccactcgaattttcgatattcctttttatttctcatcaaacggatggcatcttcttctggaaatcctagctattcttagcatgatattgggaaatctcattgctattactcaaacaagcatgaaacgtatgcttgcatattcgtccataggtcaaatcggatatgtaattattggaataattgttggagactcaaatgatggatatgcaagcatgataacttatatgctcttctatatctccatgaatctaggaacttttgcttgcattgtattatttggtctacgtaccggaacagataacattcgagattatgcaggattatacacgaaagatccttttttggctctctctttagccctatgtctcttatccctaggaggcctgcctccactagcaggttttttcggaaaactctatttattctggtgtggatggcaggcaggcctatatttcttggttttaataggactccttacaagcgttgtttctatctactattatctaaaaataatcaagttattaatgactggacgaaaccaagaaataacccctcacgtgcgaaattatagaagatctcctttaagatcaaacaattccatcgaattgagtatgattgtatgtgtaatagcatctactataccaggaatatcaatgaacccgattattgcaattgctcaggatagccttttttag

SEQ ID NO: 131970 - protein, 540 aa, Coffea arabica
MIWHVQNENFILDSTRIFMKAFHLLLFDGSLIFPECILIFGLILLLMIDSSSDQKDIPWLYFIPSTSLVMSITALLFRWREEPMISFSGNFQTNNFNEIFQFLILLCSTLCIPLSVEYIECTEMAITEFLLFVLTATLGGMFLCGANDFITIFVAPECFSLCSYLLSGYTKKDVRSNEATMKYLLMGGASSSILVHGFSWLYGSSGGEIELQEIVNGLINTQMYNSPGISIALIFITVGIGFKLSPAPSHQWTPDVYEGVRFVREIPTSLSISEMFGFFKTPWTCRREISPTPVVAFLSVTSKVAASASATRIFDIPFYFSSNGWHLLLEILAILSMILGNLIAITQTSMKRMLAYSSIGQIGYVIIGIIVGDSNDGYASMITYMLFYISMNLGTFACIVLFGLRTGTDNIRDYAGLYTKDPFLALSLALCLLSLGGLPPLAGFFGKLYLFWCGWQAGLYFLVLIGLLTSVVSIYYYLKIIKLLMTGRNQEITPHVRNYRRSPLRSNNSIELSMIVCVIASTIPGISMNPIIAIAQDSLF

SEQ ID NO: 131971 - DNA, 1461 bp, Solibacter usitatus Ellin6076
  CDS (1)..(1461): transl_table=11
atgcccgttagtcccgccttcaacccgcaggacgccctgcgcttcctgcccgaaatcattttgaccgtgatgggcacgctgctcatggtgctcgatccggtaatccacaagcgttcttccaacgcattcggccacatcagcctgatcgcgctggtcatggctctcggcgccagcatctacgcttacggcatcgcggggccggccttcggcggcatgctgatggtcgatggcttcgcgaccttcttccgagtggtcgtcatcacggttggcatccttaccgtttttccttcctaccgattcctcgcgcgccaggacgccgagacttccgagtaccacgccctcctgcttttctcgatcgccggccagtgcctcatggccgcctcgaacgacctgatcatggtcttcatcggactggaaatttcttccatcgccagctatgtgctcgccggctatctgcgcgacgataagcgcgccaatgaggccgcgctcaagtatttcctgctcggctcctttgccaccggcttcttcctctacggtgtcgcgtggatttacggcctcacccgcagcgtgaatctctccgtggtccgcggcgtcttccagcaccagccggtagacccgaccttcgtcggcatcgccgccgcgctcatgtttgtcggactggcgttcaaggtgtccgccgcgcccttccagatctgggcgcccgacgtctaccagggcgcgcccactcccgtctccgctttcctctccgcgggtcccaaggccgccgctttcgccatcttcctgcggatcttcatgactgccttcgagcccatcagcgataagtggcagccgctggtctggaccgccgcgctcgcctccatgtgcatcggcaacttcgcggccatcctgcagaccaacatcaagcgcatgctggcctacagctccatcgcccatgcggggtatgtgctggtggcgctcaccgcgcacagcgaaaccggcgtggccgccgccatgttctatctcgcaggctacgccttcatgaacgtcggcgccttcgccgcggtcagtgtgcttaccggcaaaggcgagcgctaccagaacatcgacgacttcaagggcatgggccgcaagcagccgctcgcagccgccatgttcaccattttcctgctctcgctgctcggcgtgccgctcaccggaggcttcttcggcaagttctatatcttcaaggccgccctggatagccacctgatctggctcaccgttctcggcctgttgaacagcgctgtgggcgcctactactacctgcgcattctggtggtgatgtacatgtacgagcccggcgaagccgccgacgccgcggagcccctggctcccagcctcgcgttcgccctgattctgccggccctcggcactcttgcgctcggcatcttccccggctgggtcctcgagttcgccacaaagtccgccgcgaacctcaagtag

SEQ ID NO: 131972 - protein, 486 aa, Solibacter usitatus Ellin6076
MPVSPAFNPQDALRFLPEIILTVMGTLLMVLDPVIHKRSSNAFGHISLIALVMALGASIYAYGIAGPAFGGMLMVDGFATFFRVVVITVGILTVFPSYRFLARQDAETSEYHALLLFSIAGQCLMAASNDLIMVFIGLEISSIASYVLAGYLRDDKRANEAALKYFLLGSFATGFFLYGVAWIYGLTRSVNLSVVRGVFQHQPVDPTFVGIAAALMFVGLAFKVSAAPFQIWAPDVYQGAPTPVSAFLSAGPKAAAFAIFLRIFMTAFEPISDKWQPLVWTAALASMCIGNFAAILQTNIKRMLAYSSIAHAGYVLVALTAHSETGVAAAMFYLAGYAFMNVGAFAAVSVLTGKGERYQNIDDFKGMGRKQPLAAAMFTIFLLSLLGVPLTGGFFGKFYIFKAALDSHLIWLTVLGLLNSAVGAYYYLRILVVMYMYEPGEAADAAEPLAPSLAFALILPALGTLALGIFPGWVLEFATKSAANLK

SEQ ID NO: 131973 - DNA, 1029 bp, Priapulus caudatus
  CDS (1)..(1029): transl_table=5
atgtttattctaccacaccatattttattcttatttattctgttatttagaataaccatagttgcatgttctaactcctgattttcaatgtgattagggctagagataaatatattatcttttgtgactttgttaataacaagagttaatatacgtgaggctgaatctggtattaaatattttcttgttcaagtattaggttctattgggtttttatttgggagtctaagattaggttgttctggtttcttcttctcttttaacgagttcttatgaacctacttaatttttttttcactcttattaaaaattggtgttggaccttttcatttttgatttcctggggtaatagaagggattaatataattaattgtggaatattaataacatgacaaaagttaggacctttttgtattttgattgatttacaaaactcaattataaaatctgttttagtagttttcgcaataatctctgggttagttggaggactaggtggtctcaatcaaacaagcttacgcaaacttctagcctattcatcaattgggcaccttggttgaatacttggagctatttttatttccaataccatctgaaagacttattttttaacctatagttttttaagactaagattgattttaattttatttttcatgggatttactcatattaatcaagtattttcctttgggtgagaaaaaacaactgatagtttaataattataataatatttttatccctggggggtctacccccatttggggggtttttaataaaatgagttgtttttaatggtttagttaacaatgggttatttcttttaagaaccattctaatttcaagaagtttactgaatcttttttattacctgcgtgtttgctattcattaagattaataggaagagatgcacctttatgagtatcaataaacacaagaactaatatttccatttgggtagtattgtcaggtgtaattagaattattattctgtttagctcttcttttattttaatattaatataa

SEQ ID NO: 131974 - protein, 342 aa, Priapulus caudatus
MFILPHHILFLFILLFSMTMVACSNSWFSMWLGLEMNMLSFVTLLMTSVNMREAESGIKYFLVQVLGSIGFLFGSLSLGCSGFFFSFNEFLWTYLIFFSLLLKIGVGPFHFWFPGVMEGINMINCGMLMTWQKLGPFCILIDLQNSIMKSVLVVFAMISGLVGGLGGLNQTSLRKLLAYSSIGHLGWMLGAIFISNTIWKTYFLTYSFLSLSLILILFFMGFTHINQVFSFGWEKTTDSLMIMMMFLSLGGLPPFGGFLMKWVVFNGLVNNGLFLLSTILISSSLLNLFYYLRVCYSLSLMGSDAPLWVSMNTSTNISIWVVLSGVISIIILFSSSFILMLM

SEQ ID NO: 131975 - DNA, 1452 bp, Magnetococcus sp. MC-1
  CDS (1)..(1452): transl_table=11
atggcgattcaaatgcccgacattaacctcgcccttatgctgccagagattgtcatttctgtggtagccatgggactgcttctagccagtgcttggtgggagggtgccgaaggggcgcgccgtatacgccgtattgcagcgggtgctttaatggtggccatggtgatcaccttgctgggggtgggtgccacgcagagcagcacgtttggcggtatgtttgttaatgatcgttttgctgcgtttatgaaggtgatgctctacctttcgacgctgctgcccatggtggtctcttgggtctatctggagaagagcaagctgggcaatggggagtattttgttttgaccctgtttgccatgctgggtggcatgtttatgatcagcagcggcagctttttggtgctctatctgggcattgagttgctgtcacttgccatttatgtgctggccgcatacaagcgcgatgatttggcttccaacgaggcgggtttaaaatattttgtgttgggctctatggcatcgggtatcttgctgtatggcatctcactgatttatggcgtaaccggtagtgtggattttgcgaccattaatgcttatttgcagcaggaccaccacagcatgcttggtattaccatgggcttgatattggtggtatcggggctatcgttcaaaattgcggcggcaccattccatatgtgggcacccgatgtctatgagggtgcgcctacctcggttacggcgtttatggcggccatgccgaagattgcggcgtttgcggccctattccgggttttggtggaggcgtttggccccatgcacgccacctggggccccattatggcactgttggcggtggtttctatgggtgttggcgcgctggcgggtttgggtcagagcaacatcaagcgcttgctggcttactcttccatcggtcacgtgggttatgctttgatcggcctagcggttggtaaccagatggggtatgaggccgtattggtctatctaaccatctacatttttatgaatgtgggggcctttggtttaatcttggtattgaacaaagagggctttggtgaccagattgaagactataaagggctgtcggctaagcgtcctggtttggcgctgttgatggcgatctttatgtttagcatggcgggtattccaccccttgcgggttttatggctaagttacagattttcatggcggccattgatgcgcacatgtataccgtggccattttgggtgtgttgtttagtgcggtgtcggctttttactatctgaaggtgatcaaaaccatgtacttcgatgaagcggagcgggcctttgatatgccaatggattttcttagtcgggccattgtgggtgtaagcggtattttggtggtgctgtggggtattttaccggggtcattgatggcatccgtggcagagacgattaaatcgttgatgtaa

SEQ ID NO: 131976 - protein, 483 aa, Magnetococcus sp. MC-1
MAIQMPDINLALMLPEIVISVVAMGLLLASAWWEGAEGARRIRRIAAGALMVAMVITLLGVGATQSSTFGGMFVNDRFAAFMKVMLYLSTLLPMVVSWVYLEKSKLGNGEYFVLTLFAMLGGMFMISSGSFLVLYLGIELLSLAIYVLAAYKRDDLASNEAGLKYFVLGSMASGILLYGISLIYGVTGSVDFATINAYLQQDHHSMLGITMGLILVVSGLSFKIAAAPFHMWAPDVYEGAPTSVTAFMAAMPKIAAFAALFRVLVEAFGPMHATWGPIMALLAVVSMGVGALAGLGQSNIKRLLAYSSIGHVGYALIGLAVGNQMGYEAVLVYLTIYIFMNVGAFGLILVLNKEGFGDQIEDYKGLSAKRPGLALLMAIFMFSMAGIPPLAGFMAKLQIFMAAIDAHMYTVAILGVLFSAVSAFYYLKVIKTMYFDEAERAFDMPMDFLSRAIVGVSGILVVLWGILPGSLMASVAETIKSLM

SEQ ID NO: 131977 - DNA, 1533 bp, Hordeum vulgare subsp. vulgare
  CDS (1)..(1533): transl_table=11
atgatctggcatgtacagaatgaaaacttcattctcgattctacgagaatttttatgaaagcgtttcatttgcttctcttcaatggaagtttcattttcccagaatgtatcctaatttttggcctaattcttcttctgatgatcgattcaacctctgatcaaaaagatagaccttggttctatttcatctcttcaacaagtttagtaataagcataacggccctattgttccgatggagagaagaacctataattagcttttcgggaaatttccaaacgaacaatttcaacgaaatctttcaatttctcattttattatgttcaactttatgtattcctctatccgtagagtacattgaatgtacagaaatggctataacagagtttctgttattcgtattaacagctactctagggggaatgtttttatgtggtgctaacgatttaataactatctttgtagctccagaatgtttcagtttatgttcctacctattgtctggatataccaagagagatctacggtctaatgaggctactatgaaatatttactcatgggtggggcaagctcttctattctggttcatggtttctcttggctatatggttcatctgggggggagatcgagcttcaagaaattgtgaacggtcttatcaatacacaaatgtataactccccaggaatttcaattgcgcttatatccatcactgtaggacttgggttcaagctttccccagccccttttcatcaatggactcctgacgtctacgaaggatcccccactccagtcgttgcttttctttctgttacttcgaaagtagctgcttcagcttcagccacgcgaattctcgatattcctttttatttctcatcaaacgaatggcatcttcttctggaaatcctagctattcttagcatgattttggggaatctccttgctattactcaaacaagcatgaaacgtatgcttgcatattcgtccatagggcaaatcggatatgtaattattggaataattgttggagactcaaatgatggatatgcaagcatgataacttatatgctgttctatatctccatgaatctaggaacttttgcttgcattgtattatttggtctacgtaccggaactgataacattcgagattatgcaggattatacatgaaagatccttttttggctctctctttagccctatgtctcttatccctaggaggccttcctccactagcaggtttcttcggaaaactctatctattctggtgtggatggcaagcaggcctatatttcttggtttcaataggactccttacgagcgttctttctatctactattatctaaaaataatcaagttattaatgactggacgaaaccaagaaataaccccttatgtgcgaaattatagaagatcccctttaagatcaaacaattccatcgaattgagtatgactgtatgtgtgatagcatctactataccaggaatatcaatgaaccccattcttgcaattgctcaggataccctcttttag

SEQ ID NO: 131978 - protein, 510 aa, Hordeum vulgare subsp. vulgare
MIWHVQNENFILDSTRIFMKAFHLLLFNGSFIFPECILIFGLILLLMIDSTSDQKDRPWFYFISSTSLVISITALLFRWREEPIISFSGNFQTNNFNEIFQFLILLCSTLCIPLSVEYIECTEMAITEFLLFVLTATLGGMFLCGANDLITIFVAPECFSLCSYLLSGYTKRDLRSNEATMKYLLMGGASSSILVHGFSWLYGSSGGEIELQEIVNGLINTQMYNSPGISIALISITVGLGFKLSPAPFHQWTPDVYEGSPTPVVAFLSVTSKVAASASATRILDIPFYFSSNEWHLLLEILAILSMILGNLLAITQTSMKRMLAYSSIGQIGYVIIGIIVGDSNDGYASMITYMLFYISMNLGTFACIVLFGLRTGTDNIRDYAGLYMKDPFLALSLALCLLSLGGLPPLAGFFGKLYLFWCGWQAGLYFLVSIGLLTSVLSIYYYLKIIKLLMTGRNQEITPYVRNYRRSPLRSNNSIELSMTVCVIASTIPGISMNPILAIAQDTLF

SEQ ID NO: 131979 - DNA, 1602 bp, Nocardioides sp. JS614
  CDS (1)..(1602): transl_table=11
atggacttcatcaagcccacgatcgagtacggcgacgtctggccgctcctcgtggtcttcggcgtcgccgccgtcggcgtgctcgtcgaggggttcgtgccccgcgcccagcgctacctcgtgcaggccgcgctggcgatcgccggcgtggtcgtcgccctggtcggcacgatcctcgtggcccgcgaccttgacgtgctcggggacggggccgcccgcggcgccatcgacgtcgagggcaccatcgcggtcgacggcccggcgctgttcatctgggggatgctgctggtcttcgcgctcggtggcgcgctgctgttcgccgagcgccggctcgagggcggggtctcggcgttcgccggccaggccgccgcgctgcccggcaccgaggccgagcggcaggcgtcgacgcgcggcctggagcacaccgaggtctacccgctgatgatgttcgcgctgggcggcatgatgctgttcgcggccgcgaacgacctgctgacgctgttcgtcgccctcgaggtgctctcgctcccgctgtacctgctctccgggctcgcccggcgccgccggctgctgagccaggaggcggcgctgaagtacttcatgctcggcgccttctcctccgggttcttcctctacggtgccgcgctcgtctacggcttctccggctcgatgggcttcgccgagatcaacgaggcggtgcgcgacgacgtcggcaaccagaccctgctgctgatcggcatcggcatgctctcggtcgggctgctgttcaaggtcggcgcggtgccgttccactcctggacgcccgacgtctaccagggcgcgcccaccgcggtcaccgccttcatggcggccggcacgaagatcgcggcgttcggcgcgatgctccggctgttctacgtcgccttcggctccgaccggtggagctggcagccgatgctgtggatcatcgcgatcctcacgatgctcgtgggtgcgctcatcgcgatcgtccagaccgacatgaagcggatgctcgcctactcgtcggtggcccacaccggcttcctgctcaccggcgtgctcggcgtgcagcaggcctccgagctggccgacggcgaggtgacctcgctgcaggcggtgctcttctacctcgtcacctacggcttcgcggtcgtcggcgcgttcgcggtcgtcaccctggtgcgcgacgcgggcggcgaggccggccagttcgtgcgctggcgggggatcgggcgccgctccccgctggtcgccggggtgttcgcgttcttcctgctctcgatggccggcatcccgctgaccgccggcttcgtcggcaagtgggcggtcttcacggtggccctcgccgccggcgcctggcccgtggtcatcgcagccgtgctgtgcagcatcatcgcggtgttcttctacgtgcgggtgatcctgctgatgttcttcgaggacgacgacgtcagtgcccagggtgaggtcgcgagcgtcacgaagccctcggtcctgacctcggcgacgatcttcgtcggcgtggccgcgaccctggtgctcggtgtcgttcccggaccggtgctcgatctcgccgccaatgcaggacaattcgtcaggtga

SEQ ID NO: 131980 - protein, 533 aa, Nocardioides sp. JS614
MDFIKPTIEYGDVWPLLVVFGVAAVGVLVEGFVPRAQRYLVQAALAIAGVVVALVGTILVARDLDVLGDGAARGAIDVEGTIAVDGPALFIWGMLLVFALGGALLFAERRLEGGVSAFAGQAAALPGTEAERQASTRGLEHTEVYPLMMFALGGMMLFAAANDLLTLFVALEVLSLPLYLLSGLARRRRLLSQEAALKYFMLGAFSSGFFLYGAALVYGFSGSMGFAEINEAVRDDVGNQTLLLIGIGMLSVGLLFKVGAVPFHSWTPDVYQGAPTAVTAFMAAGTKIAAFGAMLRLFYVAFGSDRWSWQPMLWIIAILTMLVGALIAIVQTDMKRMLAYSSVAHTGFLLTGVLGVQQASELADGEVTSLQAVLFYLVTYGFAVVGAFAVVTLVRDAGGEAGQFVRWRGIGRRSPLVAGVFAFFLLSMAGIPLTAGFVGKWAVFTVALAAGAWPVVIAAVLCSIIAVFFYVRVILLMFFEDDDVSAQGEVASVTKPSVLTSATIFVGVAATLVLGVVPGPVLDLAANAGQFVR

SEQ ID NO: 131981 - DNA, 1605 bp, Nostoc punctiforme PCC 73102
  CDS (1)..(1605): transl_table=11
atggattttgctaatattgcatcccagttaaatgctggaacgattttaccagaggggattgttattctcaccctcttgggggttttgattgttgatttgattttggggcgtacatccgcacgctggattggatatctagcgatcgcaggtttatttacttccattgtcgccctatattttcaatgggacaatcctaatcccatctcttttaccggtggctttaatggtgatgacctgagtatcgtctttcgcggcatcattgccttgtctgcggctgtgactatactgatgtcaattcgctacgtcgatcaaagcggcactcctttagccgaattcatcgctattttgctgagtgcgactttaggagggatgtttttatccggggctagtgagttggtgatgattttcatctccctagaaaccctgagtatttcctcttacttgctgacaggttataccaagcgtgacccccgctccaatgaagcggcgctgaaatacttgttaattggagcttccagtacagcagtatttttgtacggtgtatcactgctgtatggattatctggaggacaaactgaattaagtgcgatcgcaaatggcattgccacagcgaaagtgggacaatctttaggtttagtgattgctctagtttttgcgatcgcaggtattggctttaaaatctccgctgcacctttccaccagtggacaccagacgtttatgaaggcgctcccaccccagtcatcgcctttttatctgttggttccaaagcagctgggtttgccctagccatccgcttgctgacaacagccttccctcttgttgcagacgagtggagatttgtcttcactgctctagccgttctcagcatgattttgggtaacgtagtcgccctagcccaaaccagcatgaaacgaatgctagcttattcatccattgcccaagccgggtttgtgatgattggcttgattgctgggacacaagcagggtatgccagtatgatattttacctactggtttacttgttcatgaacctgtgcggttttacctgcatcatcctgttctcactgcggacaggaaccgaccagattgccgaatactctgggttatatcaaaaagacccactcctaacattggggttgagtattgctctgctttccttgggtggtattccaccattggctgggtttttcggcaagatttacttattctgggctggttggcaagcaggactttattggttagtcttactgggcttagttaccaccgtcgtctccatctactactacattcgcgtagttaagatgatggtagtcaaagaaccccatgaaatgtccgacgcggtgaagaattatccacaagtgcgttgggatttacctggactaaggcctttgcaagtcgggctggtgataacattaattgccacttccctagcagggattttgtcaaatccactgtttacattggctaacaattccatctccaatacgccatttttgcaagcaacaatcaacagtcatgtagaagcacaaaatctactgcttttaccaaagttagattcggttagtcagtctcaaccctcagttgattctaccgctaagatttaa

SEQ ID NO: 131982 - protein, 534 aa, Nostoc punctiforme PCC 73102
MDFANIASQLNAGTILPEGIVILTLLGVLIVDLILGRTSARWIGYLAIAGLFTSIVALYFQWDNPNPISFTGGFNGDDLSIVFRGIIALSAAVTILMSIRYVDQSGTPLAEFIAILLSATLGGMFLSGASELVMIFISLETLSISSYLLTGYTKRDPRSNEAALKYLLIGASSTAVFLYGVSLLYGLSGGQTELSAIANGIATAKVGQSLGLVIALVFAIAGIGFKISAAPFHQWTPDVYEGAPTPVIAFLSVGSKAAGFALAIRLLTTAFPLVADEWRFVFTALAVLSMILGNVVALAQTSMKRMLAYSSIAQAGFVMIGLIAGTQAGYASMIFYLLVYLFMNLCGFTCIILFSLRTGTDQIAEYSGLYQKDPLLTLGLSIALLSLGGIPPLAGFFGKIYLFWAGWQAGLYWLVLLGLVTTVVSIYYYIRVVKMMVVKEPHEMSDAVKNYPQVRWDLPGLRPLQVGLVITLIATSLAGILSNPLFTLANNSISNTPFLQATINSHVEAQNLLLLPKLDSVSQSQPSVDSTAKI

SEQ ID NO: 131983 - DNA, 1566 bp, Crocosphaera watsonii WH 8501
  CDS (1)..(1566): transl_table=11
atggacttttctagtaacgttgccagtcaactaaatgcggtgacaattctaccggaaggaattgttatcattaccttgatgctggttctcattggtgatctgattgggggtcgtaatgccagaacatggctaccctacttcgctatcgctggtttattagcggctttatttgccctttaccgagcttgggatagccctgataccttggggtttctcggggcgtttgatggggataatttaagtattgtcttccgcgggattatcgccttatgcactattgtcacccttctcatgtctattcgctacgtggaacagacgggaacctccctggcggaattcatcgccatcatgttaacagctactttggggggaatgtttctctccggggctaatgagttggtgatgatttttatctctttggagatgttgagtatctcttcttatctgatgacgggatacatgaagcgagatcctcgttctaatgaagctgctttaaaatatctgttgatcggagcttcgagttcggctatttttctctacggtagttccttgttatacggtttatcgggaggggaaaccactctaaacgcaatttcagagaaaattttgaccaacgatagtagttcttctttgggactggcgatcgctttagtattcattgttgcaggtattgcctttaaaatttctgctgttcctttccaccaatggacccccgatgtctatgagggttccccaactccggtggtggcgtttctctcggtgggatcgaaagcagcagggttcgccttagctattcgcttacttgtaacggcttttgcttctattgtggatcaatggcatttaattttcaccgccttggctatcctcagtatggttttgggtaatgtggtagctttgacccaaactagcatgaaacggatgttagcctattcttccataggccaagctgggtttgtgatgattggtttaacggccggaaccgatgctggatactctagcatggtgttttacttattagtttatctgttcatgaacttaggagcctttagtggggtgattttgttctccctacgcaccggaactgatcaaattagtgaatacgcaggactttatcaaaaagatccccttttaactttagggttaagtctttgtttactgtctttagggggtattcctcccctggctggattttttggcaagatttatattttttgggctggttggcaagcaggactttatggcctagttatactggctttagtagctagtgtggtatctatttactattacatccgtgtggtgaaaatgatggtagtaaaagaaccccaggagatgtccgatgcagttaaaaactatcccgaaattcaatggaatttacagggaatgcgtcctttacaagtgggattagtgttatcggtcatagccacctctctggcagggattttatctaatcctctctttactttagccaacaattctgtgaccactaccccgattttacaatcatcggtggttaatactcgtatttctcaagtggaaactccttctcctagcattaacccataa

SEQ ID NO: 131984 - protein, 521 aa, Crocosphaera watsonii WH 8501
MDFSSNVASQLNAVTILPEGIVIITLMLVLIGDLIGGRNARTWLPYFAIAGLLAALFALYRAWDSPDTLGFLGAFDGDNLSIVFRGIIALCTIVTLLMSIRYVEQTGTSLAEFIAIMLTATLGGMFLSGANELVMIFISLEMLSISSYLMTGYMKRDPRSNEAALKYLLIGASSSAIFLYGSSLLYGLSGGETTLNAISEKILTNDSSSSLGLAIALVFIVAGIAFKISAVPFHQWTPDVYEGSPTPVVAFLSVGSKAAGFALAIRLLVTAFASIVDQWHLIFTALAILSMVLGNVVALTQTSMKRMLAYSSIGQAGFVMIGLTAGTDAGYSSMVFYLLVYLFMNLGAFSGVILFSLRTGTDQISEYAGLYQKDPLLTLGLSLCLLSLGGIPPLAGFFGKIYIFWAGWQAGLYGLVILALVASVVSIYYYIRVVKMMVVKEPQEMSDAVKNYPEIQWNLQGMRPLQVGLVLSVIATSLAGILSNPLFTLANNSVTTTPILQSSVVNTRISQVETPSPSINP

SEQ ID NO: 131985 - DNA, 1458 bp, Xylella fastidiosa Dixon
  CDS (1)..(1458): transl_table=11
atgaccatgccgacatctgggttaaacattgccgatctggctcccttgttgccggagctagtccttctagctagtacctttgcattgttgatgatcgatctatttatcggtcaagtgcggaaggtttggacgcattttctttcggttgcgattttggttgttgtgttgtccatgttagtcgccggtgttggcgggcaaggtgcagcgtttcatgggatgtttgtgcgtgatagcgctgccgatatgatgaaagtggtgattgtcttggtcagcgccctaagtttggtttacgggtggagttacttgcgtgagcgcaacttgttccagggtgaaattccagtgctcgtgttgtttgccaccttggggatgatggtcctggtgtctgcgggtcacttgctgatggtgtacctggggcttgagctgttggcgctttgttcctatgcgttggttggggtcaatcgcgatagcaaaatatcgactgaggcagcgatgaagtacatcgtgcttggttcgttggcctctggtttgctgttatatggaatgtctttgatttatggtgccactggcacactcagtctgcccggtatcagcgatgtgatccatggttcatcggaaaagacgctgctgttgacgggtacggtatttttgattgccggagtagcttttaaacttggtgccgtgccgtttcatatgtggttgcccgatgtgtatcaaggggcgccgacacccattgttttgtttatcagttcggcgccaaagttggcagcattcggtatggcttatcgactattggaagtgggtgtcggtccattgtcgccgcagtggcatttgatttttggtggtctggcggcgctctccttggtgattggcaatctgatggcgattgtgcagaccaacttgaagcgtatgctggcttactcgactgtctctcatgtcggttttttgatgatgggtatgtctggtggcggtatacgcggttattcctcgtccatgttctatgtgttgagttacgcaatcatgtctaccgcttcgtttggagcgattattgcgatgtcacgctgcggttccgaggctgagaatattgacgactttaaaggattgagcacgcgtcatccttggatggcgtgcttgctcttatgtgtcatggcttcgttagctggtattcctcccttcttaggattttggacaaaatttgctgtgctcggtgctgcagtccaggggggcatgctgtggttggcgattcttggggtgatctgtgcggtgattggtgcttactattatcttcgtgtcattaaagtgatgtattttgatgagcctgttggtgagccgctcccagtgaatgatggtcgtgttctgagggtcattctgagtattaatgtgttcgctctgttggctttaggaatcctttggaacccgatcattgattggtgccagaaggcatttgctcatctggcttga

SEQ ID NO: 131986 - protein, 485 aa, Xylella fastidiosa Dixon
MTMPTSGLNIADLAPLLPELVLLASTFALLMIDLFIGQVRKVWTHFLSVAILVVVLSMLVAGVGGQGAAFHGMFVRDSAADMMKVVIVLVSALSLVYGWSYLRERNLFQGEIPVLVLFATLGMMVLVSAGHLLMVYLGLELLALCSYALVGVNRDSKISTEAAMKYIVLGSLASGLLLYGMSLIYGATGTLSLPGISDVIHGSSEKTLLLTGTVFLIAGVAFKLGAVPFHMWLPDVYQGAPTPIVLFISSAPKLAAFGMAYRLLEVGVGPLSPQWHLIFGGLAALSLVIGNLMAIVQTNLKRMLAYSTVSHVGFLMMGMSGGGIRGYSSSMFYVLSYAIMSTASFGAIIAMSRCGSEAENIDDFKGLSTRHPWMACLLLCVMASLAGIPPFLGFWTKFAVLGAAVQGGMLWLAILGVICAVIGAYYYLRVIKVMYFDEPVGEPLPVNDGRVLRVILSINVFALLALGILWNPIIDWCQKAFAHLA

SEQ ID NO: 131987 - DNA, 1434 bp, Roseovarius nubinhibens ISM
  CDS (1)..(1434): transl_table=11
atgatccaggctgatctgaatattctgctgcccgagattgtgctcgcggtctatgcgatgctgggcctgctgggcgcggtctataccggcaaggaccggatggcggggatgctggtctggctgaccgccgggctgttcgtggcgctggccttctatatcgcctcggccaccggcacgcgcacggcctttggcggcatgttcatcgacgatggctttgctcgctttgccaaggtgacgatcctgctcagcgcagcggcggttctggtgatgagccaggattacatggcgcggcgcaacctgctcaagtttgagtacccgatgcttgtgacgctggccgcggtcggcatgatggtgatggtgagcgcgggcgatctcatggcgctttacatggggctcgagctgcaatcgctggcgctctatgtgattgctgcattgcgtcgtgacagcgtcaaatccaccgaggccgggctcaagtatttcgtgctgggcgcgctcagctctggtctgctgctctatggggcgtcgctggtctatggctttgccgggacgacctcctttgccgggatcatcaccgcggccgagggtcacgcgccgctggggctgcttctgggcctcgtctttgtgatctcgggcatggcgttcaagatctcggcggtgccgttccacatgtggacgcccgacgtctatgaaggcgcaccgaccccggtcaccgctttctttgccaccgcgcccaagatggcggcgatggggcttttcgcgcgggtggtctatgacgcctttggcggcatcatgtccgactggcagcagatcgtggcgttgctgtcggtgctgtcgatgttcctcggcgccgtggcggcgatcggtcagcgcgatatcaagcggctcatggcctattcctcgatcgcgcatatgggttatgcgctgatggggctggcggccgggaccgagcttggcgtgcagtcgatgctcatctacatggcgatctatgtgacgatgaatgtcggcacctttgcctttatcctgtcgatgagccgggacggccagccggtgacggatatccagggtctcaacatgtatgcccgcgccaacccggtgcgtgcgctgtcgatgctggttcttctgttcagcctcgcgggcgtgccgcccttccttggcttctttggcaagttctacgtgctgcgcgcggcctatgaaggtgggctcgcgtggctcgctattgccggtgtggtggcctcggtgatcggtgcctattactatctgcggatcgtcttcttcatgtatttcggcgaagagcgtgagccgctggaccggccgcaatcgccggtgctctggggctttctcgtggcctcggcaggcgtgatgaccgtggggatcgtgttcctcttcggcatcgagaacgtggcgcaggccgcggccctgtcgctcatcaagtga

SEQ ID NO: 131988 - protein, 477 aa, Roseovarius nubinhibens ISM
MIQADLNILLPEIVLAVYAMLGLLGAVYTGKDRMAGMLVWLTAGLFVALAFYIASATGTRTAFGGMFIDDGFARFAKVTILLSAAAVLVMSQDYMARRNLLKFEYPMLVTLAAVGMMVMVSAGDLMALYMGLELQSLALYVIAALRRDSVKSTEAGLKYFVLGALSSGLLLYGASLVYGFAGTTSFAGIITAAEGHAPLGLLLGLVFVISGMAFKISAVPFHMWTPDVYEGAPTPVTAFFATAPKMAAMGLFARVVYDAFGGIMSDWQQIVALLSVLSMFLGAVAAIGQRDIKRLMAYSSIAHMGYALMGLAAGTELGVQSMLIYMAIYVTMNVGTFAFILSMSRDGQPVTDIQGLNMYARANPVRALSMLVLLFSLAGVPPFLGFFGKFYVLRAAYEGGLAWLAIAGVVASVIGAYYYLRIVFFMYFGEEREPLDRPQSPVLWGFLVASAGVMTVGIVFLFGIENVAQAAALSLIK

SEQ ID NO: 131989 - DNA, 1461 bp, Rickettsiella grylli
  CDS (1)..(1461): transl_table=11
atgatgacattacaacaatatcttctctatcctgcacttcctgaaatcgctttattattgatgacttgcgttatcctattcattgatcttttcgcgaaacaaaaaaacaatcgacttacctatagtgcgactcaactcagtttactgattacattggcgttgttgattcatttatatcatgtaccggcacaattattgttccacgcacattttacatgggatctcgttgcttactttattaaattgtgcattttgatattcagtttatttgcttttgtgtatgcgcgtgatgcgctaaaaaacctgtcgattcattcaggtgaatattatttattaggtttattttcaatactcggtatgttggtgttgacatcggccaatagtctcttaacgctttatttaggtttggaattattatcctttccactctacgcgatggtagccttacgacgtcaatccagtcagggggctgaagcagccataaaatattttattttaggcgcattggcatcgggtttatttttatatggtctttctttgctgtatggtgcaagccattctctgattttatcctctattcacgatgtgttagttatcggcggtcaatcaccactattactgagcacgattcttatttttattcttgcgggcattgcatttaaagtaggtgcggcacccttccagctgtgggtgccagacgtttatcaaggggcgcccaccccggtcacgttgtttattagtgctggaccgaaaatagcgggcttagccttagccatccgcatactcgtgggtacaatgcctagtttactcagttattggcagcccttaattgcagtgattgctattttatcatttagtttgggcaatctagtggcgattgtccaaagcaatttaaagcgtatgctcgcttattcatcggtcgcacatatgggatatggcttactggggttggttgcgggtacgaagatgggttacgccatgagtatcttttatatgcttgcctatggcttaatggcattggccgcttttggtttgcttgtggtgatgagtcgatttactcagattgaagatatcaatgacttaaaaggcctcaatgctcgtagtccttggctcgcgctcatgatgttgatcactatgttttctatggcaggaattccgccgacaataggcttttttgcgaagctgggtatattagaagcgttgatttcagtgcatttattatggatagccactttagcgattatttttgcgattattggtgcttattattacattaatgtggttaaagtgatgtattttgaagagccagagcccaccgttccacagttaagtgttgcttctgatgcctatcttgcactcagtattaatgctatactactccttattttgggtctgtttcccagtcaattgatatggctcgctaaaacgattttttttacaattaatcaccctgtttattag

SEQ ID NO: 131990 - protein, 486 aa, Rickettsiella grylli
MMTLQQYLLYPALPEIALLLMTCVILFIDLFAKQKNNRLTYSATQLSLLITLALLIHLYHVPAQLLFHAHFTWDLVAYFIKLCILIFSLFAFVYARDALKNLSIHSGEYYLLGLFSILGMLVLTSANSLLTLYLGLELLSFPLYAMVALRRQSSQGAEAAIKYFILGALASGLFLYGLSLLYGASHSLILSSIHDVLVIGGQSPLLLSTILIFILAGIAFKVGAAPFQLWVPDVYQGAPTPVTLFISAGPKIAGLALAIRILVGTMPSLLSYWQPLIAVIAILSFSLGNLVAIVQSNLKRMLAYSSVAHMGYGLLGLVAGTKMGYAMSIFYMLAYGLMALAAFGLLVVMSRFTQIEDINDLKGLNARSPWLALMMLITMFSMAGIPPTIGFFAKLGILEALISVHLLWIATLAIIFAIIGAYYYINVVKVMYFEEPEPTVPQLSVASDAYLALSINAILLLILGLFPSQLIWLAKTIFFTINHPVY

SEQ ID NO: 131991 - DNA, 1470 bp, Pseudomonas putida GB-1
  CDS (1)..(1470): transl_table=11
atggaattcaccactcaacacttcatcgcattggcgccgatgctgatcaccaccatcaccacggtggtggtgatgctggcgatcgcctggaagcgcaaccactcgcagaccttcctgctgtccaccgtgggcctgaacctggccctgctgtcgatcctgccggcgctgaaggttgcgccgctggcggtcaccccgctgatcaccatcgacaagttcgcctgcttgtacatggcgatcatcctggtcgccacgctggcctgcgtcaccctcgctcacgcctacctcggcgaaggctccaaaggtttcccgggcaaccgtgaagaactgtacctgctgctgctgatgtcggccctcggtggcctggtgctggtcagcgccaaccacctggccggcctgttcattggcctggagctgctgtcggtaccggtctatggcctggtggcctatgcgttcttcaacaaacgctcgctggaagccggcatcaagtacatggtgctgtcggccgcaggctcggcgttcctgctgttcggcatggccctgctgtacgccgacgccggcagcctcagcttcgaccagatcggcaaggccctggctaccaccagcatgccaagcctggtggcccaactgggcctgggcatgatgctggtcggcctggccttcaagctgtcgctggtaccgttccacctgtggaccccggacgtatacgaaggcgccccggcacctgtcgccgcgttcctggcaaccgccagcaaggtggcagtattcgccgtggtcgtgcgcctgttcatgctctcccctgctgccagcagcggcgtgttgagcaccgtgctggcggtgatcgccgtggcctcgatcctgattggtaacctgctggcgctgacccagagcaacctcaagcgtctgctgggttactcgtccatcgcccacttcggttacctggtcatcgcgctggtcgccagcaagggcctggccctggaagccatgggcgtgtacctggtcacctacgtgatcaccagcctgggcgccttcggtgtcatcaccctgatgtcctcgccctacggcggccgtgacgccgacgcactgtacgagtaccgcggcctgttctggcgccgtccgtacctgaccgcggtactgaccgtgatgatgctgtcgctggcgggcatcccgctgaccgctggtttcatcggcaagttctacatcatcgccaccggcgtcgagtcgcacctgtggtggctggtcggtgcgctggtgatcggtagcgccatcggcgtttactactacctgcgtgtcatggtgaccctgtacctggtcgagccgaacctgcgtcgccacgacgccccgctgaagtgggaacagcgcaccggcggcgtcatgctgctggccatcgccattcttgctttcgtgctgggcgtatacccgcagccactgctggaactggttcagcaagcgggcctgcaactgatcggctga

SEQ ID NO: 131992 - protein, 489 aa, Pseudomonas putida GB-1
MEFTTQHFIALAPMLITTITTVVVMLAIAWKRNHSQTFLLSTVGLNLALLSILPALKVAPLAVTPLITIDKFACLYMAIILVATLACVTLAHAYLGEGSKGFPGNREELYLLLLMSALGGLVLVSANHLAGLFIGLELLSVPVYGLVAYAFFNKRSLEAGIKYMVLSAAGSAFLLFGMALLYADAGSLSFDQIGKALATTSMPSLVAQLGLGMMLVGLAFKLSLVPFHLWTPDVYEGAPAPVAAFLATASKVAVFAVVVRLFMLSPAASSGVLSTVLAVIAVASILIGNLLALTQSNLKRLLGYSSIAHFGYLVIALVASKGLALEAMGVYLVTYVITSLGAFGVITLMSSPYGGRDADALYEYRGLFWRRPYLTAVLTVMMLSLAGIPLTAGFIGKFYIIATGVESHLWWLVGALVIGSAIGVYYYLRVMVTLYLVEPNLRRHDAPLKWEQRTGGVMLLAIAILAFVLGVYPQPLLELVQQAGLQLIG

SEQ ID NO: 131993 - DNA, 1533 bp, Pseudomonas putida GB-1
  CDS (1)..(1533): transl_table=11
atgattttgccttggctgatcctgatccccttcatcggcggcttcctgtgctggctgggtgagcgcttcggcgccaccctgccgcgctggatcgcgctgctgaccatgtccctgctgcttggcatcggcctgtggctgtggggcaccggcgactacaccctggcccctgctccgggcgccgaacctgcctgggcactcgaatacaaagtcgagtggatcaagcgcttcggtatcagcatccacttggccctcgacggcctgtcgctgctgatgatcctgctcaccggcctgctcggtgtgctgtcggtactgtgttcctggaaagagatccagcgccacgtcggcttcttccacctcaacctgatgtggatcctcggcggcgtggtcggtgtgttcctggccctggacctgttcctgttcttcttcttctgggaaatgatgctggtgccgatgtacttcctcatcgcgctctggggtcacagctcggcagacggcaagaaaacccggatctacgcggcgaccaagttcttcatcttcacccaggccagcggcctgatcatgctggtggcgatcctgggcctggtgctggtcaactacaacaccaccggcgtgctcacgttcaactacagcgacctgctgaaggccgagctgccagccggcgtcgagtacgtgctgatgctgggcttcttcattgccttcgcggtgaagctgccggtcgtgccgttccactcctggctgcctgatgctcacgcccaggcaccgaccgcaggttccgtggacctggcgggtatcttgctgaagacagcggcctacggcctgctgcgcttcgccctgccgctgttcccgaatgcctcggccgagtttgcgcccatcgccatgaccctgggcctgatcggtatcttctacggtgctttcctggccttcgcacaaaccgacatcaagcgcctgatcgcgttctccagtgtctcgcacatgggcttcgtgctgatcggcatctactccggcagccagcaggccctgcaaggcgcggtgatccagatgctggcccacggcctgtcggctgccgcgctgttcatcctgtccggccagctgtacgagcgcctgcacacccgtgacatgcgtcaaatgggcggcctgtggcaccgcatcgcttacctgccggccatcagcctgttcttcgccgccgcatcgctgggcctgcctggcaccggtaacttcgtcggcgagttcctgatcctgatcggcagcttcgtgcatgtaccgtggatcaccgtgattgccaccacaggtttggtgttcggttcggtgtactcgctgatcatgatccaccgcgcctacttcggcccggccaagagcgataccgtgctggccggcatggacggtcgcgaactgatcatggtcctgggtctggcggtattgctgatcctgctgggcgtgtatccgcagccgttcctcgacacctctgccgccaccatgagtggtgtgcagcagtggctcggttccgctttcactcaactcgcttcggcccggtaa

SEQ ID NO: 131994 - protein, 510 aa, Pseudomonas putida GB-1
MILPWLILIPFIGGFLCWLGERFGATLPRWIALLTMSLLLGIGLWLWGTGDYTLAPAPGAEPAWALEYKVEWIKRFGISIHLALDGLSLLMILLTGLLGVLSVLCSWKEIQRHVGFFHLNLMWILGGVVGVFLALDLFLFFFFWEMMLVPMYFLIALWGHSSADGKKTRIYAATKFFIFTQASGLIMLVAILGLVLVNYNTTGVLTFNYSDLLKAELPAGVEYVLMLGFFIAFAVKLPVVPFHSWLPDAHAQAPTAGSVDLAGILLKTAAYGLLRFALPLFPNASAEFAPIAMTLGLIGIFYGAFLAFAQTDIKRLIAFSSVSHMGFVLIGIYSGSQQALQGAVIQMLAHGLSAAALFILSGQLYERLHTRDMRQMGGLWHRIAYLPAISLFFAAASLGLPGTGNFVGEFLILIGSFVHVPWITVIATTGLVFGSVYSLIMIHRAYFGPAKSDTVLAGMDGRELIMVLGLAVLLILLGVYPQPFLDTSAATMSGVQQWLGSAFTQLASAR

SEQ ID NO: 131995 - DNA, 1443 bp, Marinobacter sp. ELB17
  CDS (1)..(1443): transl_table=11
atgcccgttgctgttcttatcgcctatctgccaataattctggtcgccgcgacggcgattgcggtgatgcttggcatcgcctggcgccgcgagcacgccgtaacggttgccgccagcgtgctgggcctggggctggccttgatcgctcaggtgtttgcctggcgggtgattccggtacacacgccactgcttgattttgatggtctggcgctattagccgggatcttgatactggcgtcgaccctggtttgcgcgattctggctcatggttatcttgagtcttttcacggcgcccgcgaagaattttatgttctgctgctgtgcgcggcggcagggggcctggtgctggtggcgagtcggcacctggccagcctgttcatcggcctggagctgttatccatgccgctctatggaatgctggcctacgcttaccatgagccacgctcccttgaagccggcattaaatacctaattctttctgccgccgccagcgcatttttgctgttcggtatggcgctgctctatgctcaaaccggtgagttacggatcgacgttttgatggccagccttgattcgcacaccggtatctggggcctggcgggcgttggcctgatgctcgttgggttaggcttcaagctttcggtagtgccctttcatctatggaccccggacgtctacgagggcgggccggggccggcggccacctttctggccactgccagcaaggtggcggtattcgcgctgctgctgcggctgatgctgtcgacgccggttgcccagggtgactggctgcgagcggtgtttaccgggctggcacttgccagcatgctaatcggcaacctgctggcgctgactcaatctaacctcaaacgcatcctcggctattcgtccattgcgcacttcggctacctgctcattgtgctggtggtcgcggacggcctggcggcggaaacgggaggggtctacctgatcacctacgtgttgagcactctggcggcgtttggcgtggtcattctgatttcgagcacgatcagcggcgaagatgcagcagcgctgcaccactatcgaggcctgttctggcggcgcccttatctgaccgcagtacttaccgtggcgatgctgtcactggcgggcattccggcaaccgtcggcttcatcggcaagttttatctcatcgctctgggcgttgaaggccagcgctggtggctggtgggcggcatcatccttggcagcgccatcgggctttactactacctgagggtcaccatcacgctgtttatggccgagccgggaatgcaccgtcgcgacgcatcggatgactggggctcgcgggcagggggcttggtggtccttgctgtagcagggttggtgatattgctgggcgtctatccggcgccgatgatcgaacttgcgcgagcccttggtgggataaccatccgctga

SEQ ID NO: 131996 - protein, 480 aa, Marinobacter sp. ELB17
MPVAVLIAYLPIILVAATAIAVMLGIAWRREHAVTVAASVLGLGLALIAQVFAWRVIPVHTPLLDFDGLALLAGILILASTLVCAILAHGYLESFHGAREEFYVLLLCAAAGGLVLVASRHLASLFIGLELLSMPLYGMLAYAYHEPRSLEAGIKYLILSAAASAFLLFGMALLYAQTGELRIDVLMASLDSHTGIWGLAGVGLMLVGLGFKLSVVPFHLWTPDVYEGGPGPAATFLATASKVAVFALLLRLMLSTPVAQGDWLRAVFTGLALASMLIGNLLALTQSNLKRILGYSSIAHFGYLLIVLVVADGLAAETGGVYLITYVLSTLAAFGVVILISSTISGEDAAALHHYRGLFWRRPYLTAVLTVAMLSLAGIPATVGFIGKFYLIALGVEGQRWWLVGGIILGSAIGLYYYLRVTITLFMAEPGMHRRDASDDWGSRAGGLVVLAVAGLVILLGVYPAPMIELARALGGITIR

SEQ ID NO: 131997 - DNA, 1038 bp, Cephalothrix rufifrons
  CDS (1)..(1038): transl_table=5
  misc_feature (143)..(143): k is g or t
atgtttttgggttttccttttaaattattctttttttttgttttatttcttggttctttaataagtttatcttcttcacattggatagggatatgaataggattggaattaaatttaatatcatttattcctttattaataakaatttcttctgttgaagaagtggaaagtggtgtaaagtattttttagttcaagctttaggtagaagtttttttctttggggaggtttttggttatattcaataggaataaattttaattttttttcattacattgattttgttctctaattcttttaggaggtttactgttgaaaataggttcctttccttttcatttttgagtaccgtcagtaataagttctttaagttgactagggtgtatattgttagcaacttgacaaaagttagcacctttatttatttgtttttgattcttttttgattcttggttctttgttgtattatttctttcagttttttgttcaattattggagggttagggggtattaatcaagttcaaattcgtgttttaatggcatattcatctattaatcatttaggttgaatgatagcagtatcaactatttctttttttggtttatcaatatactatatggtttatttttttatttctttatctttgtttttattattttctaccgtgggttatggtcgagtttctcagcttttcggcctaataacaaataaatttattttgcttattatcatgatagttttagtatctttagccggtcttcctccttttacaggattctttgctaagtggattgtattccaagagatactattaaataatcaaattttttttttaatttttttagttttaggatctgtttttagtttatatttttacttaaatctttttttttctgtttttttaacgggatttagatattctttgaagttttcaggagaagtaagaaaatctttatcattagtttttatcatgataataattttatcagttttaggtttagggttttttgagcttttttatgtcttttttatttaa

SEQ ID NO: 131998 - protein, 345 aa, Cephalothrix rufifrons
  misc_feature (48)..(48): The Xaa at location 48 stands for Met, or Ser.
MFLGFPFKLFFFFVLFLGSLMSLSSSHWMGMWMGLELNLMSFIPLLMXISSVEEVESGVKYFLVQALGSSFFLWGGFWLYSMGMNFNFFSLHWFCSLILLGGLLLKMGSFPFHFWVPSVMSSLSWLGCMLLATWQKLAPLFICFWFFFDSWFFVVLFLSVFCSIIGGLGGINQVQIRVLMAYSSINHLGWMMAVSTISFFGLSMYYMVYFFISLSLFLLFSTVGYGRVSQLFGLMTNKFILLIIMMVLVSLAGLPPFTGFFAKWIVFQEMLLNNQIFFLIFLVLGSVFSLYFYLNLFFSVFLTGFSYSLKFSGEVSKSLSLVFIMMMILSVLGLGFFELFYVFFI

SEQ ID NO: 131999 - DNA, 1467 bp, Triticum aestivum
  CDS (1)..(1467)
atgttcaatctttttttagcggttttcccagagatctttatcattaacgcaaccttcattttgctcattcatggagttgtatttagtacctctaagaaagatgattatccaccgttagttagtaatgtgggttggcttggattacttagtgttctaataaccttgcttctgctcgccgctggcgcacctctcctaactattgcccatttattctggaataatttttttaggagggacaattttacatatttctgccaaatccttctattattaagtacggctggtaccatttcgatgtgttttgattttttcgaaaaagagaggtttgatgcttttgaattcattgtattaattctactttctacttgcagtatgctcttaatgatctcggcttatgatttaattgccatgtatttagctattgagcttcaaagtttatgtttttatgtgatcgcagcatcaaaaagaaagtctgaattttccacggaagccggcttaaaatatttgatcttaggtgcattttcctctggaatattattgttcggttgttccatgatctatgggtctactggagctacccacttcgatcaattagccaagattttgaccggatacgaaattactggtgctcgatctagtggtatttttatggggattctttttatcgctgtaggattcctatttaagattactgcagttccttttcatatgtgggcacctgatatctatgagggttcacccaccccggtgacagcattcctttctattgcgcctaaaatctctatttttgcaaatatgttacgtgtttttattgttgcttcctatgggggtacattacaacaaatcttctttttctgcagcattgcttctatgatcttaggagcactggccgccatggcccaaacgaaagtcaaaagacttctagcttatagttcgattggacatgtaggttatatttgtattggtttctcatgtggaaccatagaaggaattcaatcactactaattggtatatttatttatgcattaatgacgatagatgcattcgccatagttttagcattacggcaaacccgtgtcaaatatatagcggatttgggcgctctagccaaaacgaatcctattttggctatgaccttctccattacaatgttctcatacgcaggaatacccccgttagccggcttttgtagcaaattctatttgttcttcgccgctttgggttgtggggcttacttcctagccttagtgggagtagtgactagcgttataggttgtttttattatatacgcttagtgaaaagaatgttttttgatagacctaggacatggattctatatgaaccaatggatcgtgacaagtcgttactactagcaatgacttcctctttcattattttattttttttatatccttcttccttgttcgatcttactcatcaaatggcactcagtttatatctgtaa

SEQ ID NO: 132000 - protein, 488 aa, Triticum aestivum
MFNLFLAVFPEIFIINATFILLIHGVVFSTSKKDDYPPLVSNVGWLGLLSVLITLLLLAAGAPLLTIAHLFWNNFFRRDNFTYFCQILLLLSTAGTISMCFDFFEKERFDAFEFIVLILLSTCSMLLMISAYDLIAMYLAIELQSLCFYVIAASKRKSEFSTEAGLKYLILGAFSSGILLFGCSMIYGSTGATHFDQLAKILTGYEITGARSSGIFMGILFIAVGFLFKITAVPFHMWAPDIYEGSPTPVTAFLSIAPKISIFANMLRVFIVASYGGTLQQIFFFCSIASMILGALAAMAQTKVKRLLAYSSIGHVGYICIGFSCGTIEGIQSLLIGIFIYALMTIDAFAIVLALRQTRVKYIADLGALAKTNPILAMTFSITMFSYAGIPPLAGFCSKFYLFFAALGCGAYFLALVGVVTSVIGCFYYIRLVKRMFFDRPRTWILYEPMDRDKSLLLAMTSSFIILFFLYPSSLFDLTHQMALSLYL

SEQ ID NO: 132001 - DNA, 1539 bp, Fragaria ananassa
  CDS (1)..(1539): transl_table=11
atgatctggcatgtacagaatgaaaacttcattctcgattctacgagaatttttatgaaagcctttcatttgcttctcttcgatggaagttttattttcccagaatgtatcctaatttttggcctaattcttcttctgatgatcgattcaacctctgatcaaaaagatataccttggttatatttcatctcttcaacaagtttagtaatgagcataacggccctattgttccgatggagagaagaacctacgattagcttttcaggaaatttccaaacgaacaatttcaacgaaatctttcaatttcttattttactatgttcaactctatgtattcctctatccgtagagtacattgaatgtacagaaatggctataacagagtttcttttattcgtattaacagctactctaggaggaatgtttttatgcggcgctaacgatttaataactatctttgtagctccagaatgtttcagtttatgctcctacctattatctggatataccaagaaagatgtacggtctaatgaggctactacgaagtatttactcatgggtggggcaagctcttctattctggttcacggtttctcttggctatatggttcatccgggggggagatcgagcttcaagaaatagtgaatggtcttatcaatacacaaatgtataactccccaggaatttcaattgcgcttatattcatcactgtaggaattgggttcaagctttccctagccccttctcatcaatggactcctgacgtatacgaaggatctcccactccagttgttgcttttctttctgttacttcgaaagttgctgcttcagctttagccactcgaattttcgatattcctttttatttctcatcaaacgaatggcatcttcttctggaaatcctagctattcttagcatgatattggggaatctcattgctattactcaaacaagcatgaaacgtatgcttgcatattcgtccataggtcaaatcggatatgtaattattggaataattgttggagactcaaatggtggatatgcgagcatgataacttatatgctgttctatatcgccatgaatctaggaacttttgcttgcattatattatttggtctacgtaccggaactgataacattcgagattatgcaggattatacacaaaagatccttttttggctctctctttagctctatgtctcttatccctaggaggtcttcctccactagcaggtttttttggaaaactccatttattctggtgtggatggcaggcaggcctatatttcttggtttcaataggactccttacgagcgttctttctatctactattatctaaaaataatcaagttattaatgactggacgaaaccaagaaataacccctcacatgcgaaattatagaatatcccctttaagatcaaacaattccatcgaattgagtatgattgtatgtgtgatagcatctactataccaggaatatcaatgaacccgattattgcgattgctcaggataccctttttagcttctag

SEQ ID NO: 132002 - protein, 512 aa, Fragaria ananassa
MIWHVQNENFILDSTRIFMKAFHLLLFDGSFIFPECILIFGLILLLMIDSTSDQKDIPWLYFISSTSLVMSITALLFRWREEPTISFSGNFQTNNFNEIFQFLILLCSTLCIPLSVEYIECTEMAITEFLLFVLTATLGGMFLCGANDLITIFVAPECFSLCSYLLSGYTKKDVRSNEATTKYLLMGGASSSILVHGFSWLYGSSGGEIELQEIVNGLINTQMYNSPGISIALIFITVGIGFKLSLAPSHQWTPDVYEGSPTPVVAFLSVTSKVAASALATRIFDIPFYFSSNEWHLLLEILAILSMILGNLIAITQTSMKRMLAYSSIGQIGYVIIGIIVGDSNGGYASMITYMLFYIAMNLGTFACIILFGLRTGTDNIRDYAGLYTKDPFLALSLALCLLSLGGLPPLAGFFGKLHLFWCGWQAGLYFLVSIGLLTSVLSIYYYLKIIKLLMTGRNQEITPHMRNYRISPLRSNNSIELSMIVCVIASTIPGISMNPIIAIAQDTLFSF

SEQ ID NO: 132003 - DNA, 1023 bp, Traulia szetschuanensis
  CDS (1)..(1023): transl_table=5
atgaccaacaactctacaaaacttctcttcctatcaacattaatgataggaacgatcctgtccatttcatcaaattcctgatttggagtttgaataggactagagatcaacttactctcatttatccccctaatagcaaataataaaagaataataatgaatgaatcgtcaattaaatattttattgttcaggcaatagcatcaacaatattattattttcaattttattgattcaaataaaataccccttagggtgagaaaaagaaattattccatcaataataattagatccagattattactaaagatcggagctgcaccattccacttctgatttacagaagtaataggaacatcaacatgaattaactgtttaatcctaataacatgacaaaaaattgccccaataatgattttatcatactgtatccaaattggggtatttatcttcttcattacaatcaccagaattgttattggagcgataggaggtcttaatcaaacgtcactacaacaacttcttgcttattcgtctattagacatattggatgaataataagatctctcttaattagagagaacgtttgagaattatacttcactatctattcaatactaagagtgatcctggtattaatattcagacaaaaaaatttattctttattaaccaaatttactcaagaatgaatacaaaaacagaaattaaattcataatatttctgtcactattatccctaggaggactccccccattcctaggatttttaccaaaatgaattgttatacaatcactcatcgaaaataacctaacaattttgataacaatcatagttgtactaacaacaattactttatattattatttacgaattagattttcagctctgattctatcctacacagaaaattcatgactagtaagaattaaaagtaaaaaaataagatttatactaccatttaatgtgataatttcaaccctaggattaatttcatcttcagtcttggtttacctaaactaa

SEQ ID NO: 132004 - protein, 340 aa, Traulia szetschuanensis
MTNNSTKLLFLSTLMMGTILSISSNSWFGVWMGLEINLLSFIPLMANNKSMMMNESSIKYFIVQAMASTMLLFSILLIQMKYPLGWEKEIIPSMMISSSLLLKIGAAPFHFWFTEVMGTSTWINCLILMTWQKIAPMMILSYCIQIGVFIFFITITSIVIGAMGGLNQTSLQQLLAYSSISHIGWMMSSLLISENVWELYFTIYSMLSVILVLMFSQKNLFFINQIYSSMNTKTEIKFMMFLSLLSLGGLPPFLGFLPKWIVMQSLIENNLTILMTIMVVLTTITLYYYLRISFSALILSYTENSWLVSIKSKKMSFMLPFNVMISTLGLISSSVLVYLN

SEQ ID NO: 132005 - DNA, 1041 bp, Branchiostoma belcheri
  CDS (1)..(1041): transl_table=5
atgagtccttatatttctcctttatttggtgttgcaatgattgttagtgtattgctaattatgtctacgagccattgggtttttatatgattgggtttagagctgggtacattagcatttgtgcctattttggcttgatggcattcttcattagaggtggaggcaactgttaagtattttattattcaagctatggctgctgcgttgttcttttttggtggtttagtaataacaagaagtgagtatgtaagaaatatgggttgtctattcggtaatttaggagaattactaattatattttcggtaataatgaagttagggttggctccgtttcactattgagtagtagatgtgattcaagggttaaattatgttccggggatggtgttgttaacatggcaaaaagtaccagggttaatagttttaatccaattgacatcttcttataatagtttatttcttttgatgtttggtgggttgtcagctctgcttgggggtttagggggtttgggtcagacgcaactgcgaaagttgttggcattttcttctattgcccatttagggtgattagttgtgggtagagttgtcgggtcaatattaggggtaagatactttctcttgtattgttctctttctattcctatcttttcttttttgtatatgttgaatagtttgcatttaaaccaattgcgaatgagtcttacaattaaccctgttgttacgatcttgcttggtattgggtttttgtctttggccgggttgcctccctttttgggattctttggtaaatggttagtattgacgtatcttgtggatcattttctgttaggggttgcgattgtgttagtagtaggaacattaattagtcttttctattatttgcggattagttatttatgtattatagtgttaggtccgcagcagattatagtgggcttgagttgacggaaactctatggagtgagtttagttagtgggttggcaataataaatattgttggtttgctggttgtgggaggggtaagctgtttacctaaatag

SEQ ID NO: 132006 - protein, 346 aa, Branchiostoma belcheri
MSPYISPLFGVAMIVSVLLIMSTSHWVFMWLGLELGTLAFVPILAWWHSSLEVEATVKYFIIQAMAAALFFFGGLVMTSSEYVSNMGCLFGNLGELLIMFSVMMKLGLAPFHYWVVDVIQGLNYVPGMVLLTWQKVPGLMVLIQLTSSYNSLFLLMFGGLSALLGGLGGLGQTQLRKLLAFSSIAHLGWLVVGSVVGSMLGVSYFLLYCSLSIPIFSFLYMLNSLHLNQLRMSLTINPVVTILLGIGFLSLAGLPPFLGFFGKWLVLTYLVDHFLLGVAIVLVVGTLISLFYYLRISYLCIMVLGPQQIMVGLSWRKLYGVSLVSGLAMMNIVGLLVVGGVSCLPK

SEQ ID NO: 132007 - DNA, 1503 bp, Rhodothermus marinus
  CDS (1)..(1503): transl_table=11
atggacctactggaagcctaccggatgcttccggccgacctctgggcggcctttccgctggtgctgacggccgtcgtgggcctggtgctggtcgtctgggacgcgttctggaacgacgcgccgccgatcccctgggtggcggccggcacgctggcgctggcgctgatctgggagctgggtggcctgagccgcgcgccggagacggccttctacgggctgatccgggtgggcggcatggcctcgttcgtgaacgcgatcatcctggccagcggcctgctgacgatcgcgctgtcggtgccctacctgaagcgcattcgccacctgcacggcgaggtctatgcgctgatcctgtttgccacggttggcatgatcgtgctggcctcggccaacagcctgatttcggtcttcgtgggccttgagactatgtcgatctgcctgtacatcatgacgggactggtccgcgaagacgtaggggccggcgaggccgccctgaagtactttctgctgggcgccttctcgacgggctttttcctgtacggcattgcgctgctgtatggcgccacgggcacgatgtatctgccgcagatggcggcgcatctggccgagggcgcgcacccgatcatgttctgggccggcgtggcgctgctgctgatcggcttcctgttcaaggtgggcgccgtgcccttccacatgtggacgcccgacgtctatcagggggcgccgacgacgctgacgggctatatggccgcggcatcgaaggcggcggcctttgcggcgctggtactggtgctcgacgccgcgttgccggccgagcgctggcaattgctgctggcgctggtggcgctggtgacgatggtggccggcaacgtgctggccctcgtccagcagaacgtcaagcgcatgctggcctattcgtcgatcgcccacgccggctacatcctgaccggcctggcggccggcacgcccgaaggatacgccggagcgctgttctacctgctggtctacgcgctgatgaacatcggcgccttcggcgtgatggcctttctggagtgggacggcaaggaaggctatgagcagacggtcgattcgctggcgggcatcggctaccggcggccactgctgggcgtggccatggcgttcttcatgttcagcctgacgggctttccaccgctggccgggttcatcgcgaagtacgccgtctttgcaccggccgtgaaggcggggttgacttggctggtgatcgtcggtgtgctggccagtgtgctctcggcctactactacctgcgcgtggtgtacgtcttctggatgaagtcgccggacgaagcgcccgagccggtgcgccagcagaccttcccggtgccgctggcaccccgggcggtgctggtggtgtgtgtggtactgatcgtgctgctgggcgtgctgcccggtctgctggaagtgaccgcgtcgttcttcccgacgccagccgccccgccggcggctaccacggcgcttttgccgtag

SEQ ID NO: 132008 - protein, 500 aa, Rhodothermus marinus
MDLLEAYRMLPADLWAAFPLVLTAVVGLVLVVWDAFWNDAPPIPWVAAGTLALALIWELGGLSRAPETAFYGLIRVGGMASFVNAIILASGLLTIALSVPYLKRIRHLHGEVYALILFATVGMIVLASANSLISVFVGLETMSICLYIMTGLVREDVGAGEAALKYFLLGAFSTGFFLYGIALLYGATGTMYLPQMAAHLAEGAHPIMFWAGVALLLIGFLFKVGAVPFHMWTPDVYQGAPTTLTGYMAAASKAAAFAALVLVLDAALPAERWQLLLALVALVTMVAGNVLALVQQNVKRMLAYSSIAHAGYILTGLAAGTPEGYAGALFYLLVYALMNIGAFGVMAFLEWDGKEGYEQTVDSLAGIGYRRPLLGVAMAFFMFSLTGFPPLAGFIAKYAVFAPAVKAGLTWLVIVGVLASVLSAYYYLRVVYVFWMKSPDEAPEPVRQQTFPVPLAPRAVLVVCVVLIVLLGVLPGLLEVTASFFPTPAAPPAATTALLP

SEQ ID NO: 132009 - DNA, 1041 bp, Branchiostoma lanceolatum
  CDS (1)..(1041): transl_table=5
atgagtccttacatttcacctttatttggggttgcgataagtgttagagtattactaattatgtcttcgtctcattgagtgtttatgtgactaggcttagagttagggacattggcctttgtccctatcttaacctggtggcattcatcgttagaagtagaagcaacggtaaaatactttattgttcaggcgatagccgctgctatatttttctttgggggtttagtaagtaccgggacggaatatattagtagtttaaaccagattgtaggaaatactggggaagtaataattatgttagccgttgcaatgaagttaggccttgcaccatttcattattgggtagttgatgttgttcaagggttaaactatatcccaggaatagtactgctgacttggcaaaaagttccagggttaatagttttaacacaactaggtaccacatataacagattttttctgttaacattgggtgttttatctcccctcttagggggtttaggaggtctgggtcaaactcaggttcgaaaactgctggcgttttcttcaaatgcgcatctaggttggttagtttcgggttgtgtaattgggtccctattgggtatcacatattttgctttgtatgttgtcttgtccctccctgtctttctgttccttcacttactcaacgcggtgcatttgaatcatttacggataagtttgatatttaatcctgcaagtggtatgctagtgggtattgggttcttatctttggggggattgccaccttttttagggttcttcgggaaatgattattactcactcatctcgtagacggtttcttgctggggttggctatcatactaatcgtgggtacactagttagcctcttttactatttacgtgtaagttacctgtgtcttgttatcctgggtccacagcaagttatgatcgggctaagctgacgtaaaatctatataactaatttagtcagaggaatagttgtattaaacatgatcggtctagtactggtggggggtgttagttgcttacctaaatag

SEQ ID NO: 132010 - protein, 346 aa, Branchiostoma lanceolatum
MSPYISPLFGVAMSVSVLLIMSSSHWVFMWLGLELGTLAFVPILTWWHSSLEVEATVKYFIVQAMAAAMFFFGGLVSTGTEYISSLNQIVGNTGEVMIMLAVAMKLGLAPFHYWVVDVVQGLNYIPGMVLLTWQKVPGLMVLTQLGTTYNSFFLLTLGVLSPLLGGLGGLGQTQVRKLLAFSSNAHLGWLVSGCVIGSLLGITYFALYVVLSLPVFLFLHLLNAVHLNHLRMSLMFNPASGMLVGIGFLSLGGLPPFLGFFGKWLLLTHLVDGFLLGLAIMLIVGTLVSLFYYLRVSYLCLVILGPQQVMIGLSWRKIYMTNLVSGMVVLNMIGLVLVGGVSCLPK

SEQ ID NO: 132011 - DNA, 1749 bp, Lingula unguis
  CDS (1)..(1749): transl_table=5
attcctttttttttagtaatttccttgttttttcccattttagcagtaaagtatgccttcaatcatcataaagatgtcttttcatttaacctagtcgatttaggttcttcagttctgaaaattgatgtaatttttgatggttataggacaacttttgcctctttggtctgtttcattgcgctcagggttatctttttctccttagattatatgaaagaagagaagaatcaagatcggttttattttctattttttttttttatttttagaatactaactcttatttttattcctcatttacctggtctctttttgggttgagatttgttaggtatgtcctcatttcttctagtgagattttataagtcttcatctgcttctaagggagccatgttgacagctctcactagccgcattggagatgctttccttttaatctttttaactttttgttttttaacttacggaactttaggtcctgcttttttgtcagctaaaagaattccaggtatcattattttttgtgttgttttagcgtctataactaaaagagcacaaactccatttagtaggtgacttccagcagctatggctgcacctacacctgtttctgctcttgttcattcatcaaccctagtgacagctggggtgtatgtcttagttcaaaattttagaattgtatctctgatttcttgggttttattaggcattggaggattaactatggtgcttcctggcttaatggcattgttcgaggtagatcttaagcgggttgttgctttgtcaactttaagtcagcttgggttaatatttttttttctaggagctgggtttaaagagttggcttttgcacacatagcatctcatgctgtggtaaaagctttgctatttgttagtgttggtatagtaatctatgcgagatgtcactgtcaagatatcagttttttaggaggtcgattgaagtcaataccagtggctcaaattggttttttggcaagcttactaggattagttggcttcccatttgtaggatgttactacagaaaacactcactagtaagaggtattaggggaagagtatatagggctggagtacttttggttttatacattggttttttttttacagtagcctatagaactcgactttttagagtaataatcatgtctaggcctgctaagctacacaccccactgtggaatacaaaagatatagatgatgaagagcattggtctgtttttgtgttaatatttggattgtctgttctcccgtttattatctatccgttaagtggggtgaataccgggttagaggttagggctagaaataatagctcctataatatagccaactcttgaatagtgtttggagcatttattgggtggctggccccacgaatctcacctcactcaccagatttatttataagaggttggaatgatcttgctaaggaaaaaattggtgattatagaaaagacgtttcagaacgttgtgattctgggtgatgagagatatatagtgtgttaggattttataatgtcttcttaaaagacttgtgacaacttgaagttatagtccatgaaaaatttaagtctaaggtgttagaaaaggatccatctttttacccctgaatagtctctaaaattgatgaaataatagataaattttggggggttttttattttatatgttgacttttattttctgtagcgttagttatattaattggttgactattttctttatag

SEQ ID NO: 132012 - protein, 582 aa, Lingula unguis
MPFFLVISLFFPILAVKYAFNHHKDVFSFNLVDLGSSVLKIDVIFDGYSTTFASLVCFIALSVIFFSLDYMKEEKNQDRFYFLFFFFIFSMLTLIFIPHLPGLFLGWDLLGMSSFLLVSFYKSSSASKGAMLTALTSRIGDAFLLIFLTFCFLTYGTLGPAFLSAKSIPGIIIFCVVLASMTKSAQTPFSSWLPAAMAAPTPVSALVHSSTLVTAGVYVLVQNFSIVSLISWVLLGIGGLTMVLPGLMALFEVDLKRVVALSTLSQLGLMFFFLGAGFKELAFAHMASHAVVKALLFVSVGMVIYASCHCQDISFLGGRLKSMPVAQIGFLASLLGLVGFPFVGCYYSKHSLVSGISGSVYSAGVLLVLYIGFFFTVAYSTRLFSVMIMSSPAKLHTPLWNTKDMDDEEHWSVFVLMFGLSVLPFIIYPLSGVNTGLEVSASNNSSYNMANSWMVFGAFIGWLAPRISPHSPDLFMSGWNDLAKEKIGDYSKDVSERCDSGWWEMYSVLGFYNVFLKDLWQLEVMVHEKFKSKVLEKDPSFYPWMVSKIDEMMDKFWGVFYFMCWLLFSVALVMLIGWLFSL

SEQ ID NO: 132013 - DNA, 1440 bp, uncultured bacterium 463
  CDS (1)..(1440): transl_table=11
atgaatgagtttgtcgccatcgccccactgctgatgttagcccttggcgcgaccgcggtcatgttacagatcgcttttctgcggagtgtcagactcactgccgtcgtggcgacagtgtcgctattgctggccagcgcctcctgtttttacgccaacgacacggctcccctgcaggtgggtgcgttactgcaagctgatacttacagcctgctgttttgcatcctgtttacgcttgccggcgccgtcacctgcgtactatcgctggattacattcaacatcacggggatgaaccagaggaatacttcctgttgttgattctcgccaccctgggcgcctgtgtattagcttacgcggtgcatctggcttcattgctgctggggttggagctgctttccgtatctctttacgcgcttatcgcctatccaaaccgatcattacttcccctggaagctgcaatcaagtacctggtcctgtctggcgcagcttccgcaacacttctgtttggctttgctctgctttacgccaccaccggcaccctacacttcagtgagctgggcaccgcgctggaacaaagcgatatgggagctgcattaccgatggcaggagcagccatgattctggcaggtctcgccttcaagttatcagctgtgccgttccacctgtggacaccggatgtttacgatggcgcgcctgctcctatcagtggttttctcgcctcagtaggcaaggccgctgtgttcgtcgtcttattaaggctgttcctggaagcgaacctgttccgctatgaacgactggtagaacttaccggactgatggccatactgagtatgctcgcaggcaacctgctcgccctacaacaaaccaacatcaagcgcatgcttgcctattcctctatcgcacatatcggctatctactgattgtgtttatggtttgcctggacctaagcaaccgcgacatcgcgatagaggccgccgccttttacctgatcgcttacacggcaacgacactcgccgctttcggtctgcttactttgatcaatgaaaagcgtgtagaacgagagcaagtgcagctgcaacatgtcagcggtcttttctggcgccaacctgtgctggcagggctaatgctggtagcgctgctttcactggcaggaatacccttaacagctggcttcatcggcaagttttacattttcagtgcagccgtcagcggcagcaactggattctattggccgcactgatcatcggtagcggcatcagcatttactattatctgcgcgtcgttttttacatgacaaaacacgctgaagaacacaaggacgcgatagagctttctcccggctggtccggcaaagccctgtcctgtttgctcatcgccagcattttagtgctgggaatcatgcctcagtctctaatagcagttttagggtctatactttag

SEQ ID NO: 132014 - protein, 479 aa, uncultured bacterium 463
MNEFVAIAPLLMLALGATAVMLQIAFLRSVRLTAVVATVSLLLASASCFYANDTAPLQVGALLQADTYSLLFCILFTLAGAVTCVLSLDYIQHHGDEPEEYFLLLILATLGACVLAYAVHLASLLLGLELLSVSLYALIAYPNRSLLPLEAAIKYLVLSGAASATLLFGFALLYATTGTLHFSELGTALEQSDMGAALPMAGAAMILAGLAFKLSAVPFHLWTPDVYDGAPAPISGFLASVGKAAVFVVLLRLFLEANLFRYERLVELTGLMAILSMLAGNLLALQQTNIKRMLAYSSIAHIGYLLIVFMVCLDLSNRDIAIEAAAFYLIAYTATTLAAFGLLTLINEKRVEREQVQLQHVSGLFWRQPVLAGLMLVALLSLAGIPLTAGFIGKFYIFSAAVSGSNWILLAALIIGSGISIYYYLRVVFYMTKHAEEHKDAIELSPGWSGKALSCLLIASILVLGIMPQSLIAVLGSIL

SEQ ID NO: 132015 - DNA, 1539 bp, Oryza sativa subsp
  CDS (1)..(1539)
atgatctggcatgtacagaatgaaaacttcattctcgattctacgagaatttttatgaaagcgtttcatttgcttctcttccagggaagtttcattttcccagaatgtatcctaatttttggcctaattcttcttctgatgatcgatttaacctctgatcaaaaagatagaccttggttctatttcatctcttcaacaagtttagtaataagcataacggccctattgttccgatggagagaagaacctataattagcttttcgggaaatttccaaacgaacaatttcaacgaaatctttcaatttcttattttattatgttcaactttatgtattcctctatccgtagagtacattgaatgtacagaaatggctataacagagtttctgttattcgtattaacagctactctagggggaatgtttttatgtggtgctaacgatttaataactatctttgtagctccagaatgtttcagtttatgttcctacctattgtctggatataccaagagagatctacggtctaatgaggctactatgaaatatttactcatgggtggggcaagctcttctattctggttcatggtttctcttggctatatggttcatctgggggggagatcgagcttcaagaaattgtgaacggtcttatcaatacacaaatgtataactccccaggaatttcaattgcgcttatatccatcactgtaggacttgggttcaagctttccccagccccttttcatcaatggactcctgacgtctacgaaggagtgtggtcccccactccagtcgttgcttttctttctgttacttcgaaagttgctgcttcagcttcagccacgcgaattctcgatattcctttttatttctcatcaaacgaatggcatcttcttctggaaatcctagctattcttagcatgatattggggaatctccttgctattactcaaacaagcatgaaacgtatgcttgcatattcgtccatagggcaaatcggatatgtaattattggaataattgttggagactcaaatgatggatatgcaagcatgataacttatatgcttttctatatctccatgaatctaggaacttttgcttgcattgtattatttggtctacgtaccggaactgataacattcgagattatgcaggattatacacgaaagatccttttttggctctctctttagccctatgtctcttatccctaggaggccttcctccactagcaggtttcttcggaaaactctatctattctggtgtggatggcaagcaggcctatatttcttggtttcaataggactccttacgagcgttctttctatctactattatctaaaaatagtcaagttattaatgactggacgaaaccaagaaataaccccttatgtgcgaaattatagaagatcccctttaagatcaaacaattccatcgaattgagtatgactgtatgtgtgatagcatctactataccaggaatatcaatgaaccccattcttgcaattgctcaggataccctcttttag

SEQ ID NO: 132016 - protein, 512 aa, Oryza sativa subsp
MIWHVQNENFILDSTRIFMKAFHLLLFQGSFIFPECILIFGLILLLMIDLTSDQKDRPWFYFISSTSLVISITALLFRWREEPIISFSGNFQTNNFNEIFQFLILLCSTLCIPLSVEYIECTEMAITEFLLFVLTATLGGMFLCGANDLITIFVAPECFSLCSYLLSGYTKRDLRSNEATMKYLLMGGASSSILVHGFSWLYGSSGGEIELQEIVNGLINTQMYNSPGISIALISITVGLGFKLSPAPFHQWTPDVYEGVWSPTPVVAFLSVTSKVAASASATRILDIPFYFSSNEWHLLLEILAILSMILGNLLAITQTSMKRMLAYSSIGQIGYVIIGIIVGDSNDGYASMITYMLFYISMNLGTFACIVLFGLRTGTDNIRDYAGLYTKDPFLALSLALCLLSLGGLPPLAGFFGKLYLFWCGWQAGLYFLVSIGLLTSVLSIYYYLKIVKLLMTGRNQEITPYVRNYRRSPLRSNNSIELSMTVCVIASTIPGISMNPILAIAQDTLF

SEQ ID NO: 132017 - DNA, 1041 bp, Branchiostoma belcheri
  CDS (1)..(1041): transl_table=5
atgagtccctatatttccccattgtttggtcttgcaataggtagaagagtcttacttattttatcttctactcattgagtttttgtatggctagggttagagctaggtacattagcatttatccctatattagcttggtgacattcgtcgctggaggttgaagcaactgtaaagtacttcattattcaggcgatagcggctgcagtgtttttttttgggggtttagtaataacaagtactgaatatattagtgggctaagtcagtttgtagggaattttggtgaggtcttgattatgttttctattattataaagctggggctagtgccatttcattactgggtggtggatgtagttcaaggtctaaattacttgcccggaatggttttgttaacatgacagaaagtaccgggtttaatggttttagtccaattagtatcaatacagaatgggcttattttgctcatctttggggcattatctgctttttggggtgggttaggaggtttgggtcagacacaaatgcggaaattactagcgttctcttcaattgcccatttagggtgattggtgtctgggtgtgttgtggggacaatattgggtagaatatattttatcttatatgtagtgctttcaattcctgtatttgtgtttttatgtattctaaataatactcatttaaatcaagtgcgagcaagattagtaagaaatcctgttgctgctatagttgttggagtggggtttttgtcattagcggggttacccccttttataggattttttggtaagtggttagtgctaacttgactacttaataattttctggtggggggtgcagtagcgttagtagtcggggctttagttagtttattctattatttacgagtaagatatatatgtatggtaattttagggccacagcagattatggtaagattaagctgacgaaaaggatttatgggtagtttgttaggggggttagtagtattaaacttgttaggattgctattggtaggaggcattagctcattacctaaatag

SEQ ID NO: 132018 - protein, 346 aa, Branchiostoma belcheri
MSPYISPLFGLAMGSSVLLILSSTHWVFVWLGLELGTLAFIPMLAWWHSSLEVEATVKYFIIQAMAAAVFFFGGLVMTSTEYISGLSQFVGNFGEVLIMFSIIMKLGLVPFHYWVVDVVQGLNYLPGMVLLTWQKVPGLMVLVQLVSMQNGLILLIFGALSAFWGGLGGLGQTQMRKLLAFSSIAHLGWLVSGCVVGTMLGSMYFILYVVLSIPVFVFLCILNNTHLNQVRASLVSNPVAAMVVGVGFLSLAGLPPFMGFFGKWLVLTWLLNNFLVGGAVALVVGALVSLFYYLRVSYMCMVILGPQQIMVSLSWRKGFMGSLLGGLVVLNLLGLLLVGGISSLPK

SEQ ID NO: 132019 - DNA, 1041 bp, Branchiostoma belcheri
  CDS (1)..(1041): transl_table=5
atgagtccctatatttccccattgtttggtcttgcaataggtagaagagtcttacttatttcatcttctactcattgagtttttgtatggctagggttagagctgggtacattagcatttatccctatattagcttggtggcattcgtcgctggaggttgaagcaactgtaaagtacttcattattcaggcgatagcggctgcagtgtttttttttgggggtttagtaataacaagtactgaatatattagtgggctaagtcagtttgtagggaattttggtgaggtcttgattatattttctatcattataaagctggggctagtgccatttcattactgggtggtggacgtagttcaaggtctaaattacttgcccggaatggtcttgttaacatgacagaaagtaccgggtttaatggttttagtccaattagtatcaatacagaatgggcttattttgctcatctttggggcattatctgctttttggggtgggttaggaggtttgggtcagacacaaatgcggaaattactagcgttctcttcaattgcccatttagggtgattggtgtctgggtgtgttgtggggacaatattgggtagaatatattttatcttatatgtagtgctctcaattcctgtatttgtatttttatatattttaaataatactcatttaaatcaagtgcgagcaagattagtaagaaatcctgttgctgctatagttgttggagtggggtttttgtcattagcggggttacccccttttataggattttttggtaagtggttagtgctaacttgattacttaataattttctggtggggggtgcagtagcgttagtagtcggggctttagttagtttattctattatttacgagtaagatatatatgtatggtaattttaggaccacagcagattatggtaagattaagctgacgaaaaggatttatgggtagtttgttaggggggttagtagtgttaaacttgttaggattgctattggtagggggcattagctcattacctaaatag

SEQ ID NO: 132020 - protein, 346 aa, Branchiostoma belcheri
MSPYISPLFGLAMGSSVLLISSSTHWVFVWLGLELGTLAFIPMLAWWHSSLEVEATVKYFIIQAMAAAVFFFGGLVMTSTEYISGLSQFVGNFGEVLIMFSIIMKLGLVPFHYWVVDVVQGLNYLPGMVLLTWQKVPGLMVLVQLVSMQNGLILLIFGALSAFWGGLGGLGQTQMRKLLAFSSIAHLGWLVSGCVVGTMLGSMYFILYVVLSIPVFVFLYILNNTHLNQVRASLVSNPVAAMVVGVGFLSLAGLPPFMGFFGKWLVLTWLLNNFLVGGAVALVVGALVSLFYYLRVSYMCMVILGPQQIMVSLSWRKGFMGSLLGGLVVLNLLGLLLVGGISSLPK

SEQ ID NO: 132021 - DNA, 1041 bp, Branchiostoma belcheri
  CDS (1)..(1041): transl_table=5
atgagtccctatatttccccattgtttggtcttgcaataggtagaagagtcttacttatttcatcttctactcattgagtttttgtatggttagggttagagctaggtacattagcatttatccctatattagcttggtggcattcgtcgttggaggttgaagcaactgtaaagtacttcattattcaggcgatagcggctgcagtgtttttttttgggggtttagtaataacaggtactgaatatattagtgggctaagtcagtttgtagggaattttggtgaggtcttgattatattttctattattataaagctggggctagtgccatttcattactgggtggtggatgtagttcaaggtctaaattacttgcccggaatggtcttgttaacatgacagaaagtaccgggtttaatggttttagtccaattagtatcaatacagaatgggcttattttgctcatttttggggcattatctgctttttggggtgggttaggaggtttgggtcagacacaaatgcggaaattactagcgttctcttcaattgcccatttagggtgattggtgtctgggtgtgttgtggggacaatattgggtagaatatattttatcttatatgtagtgctttcaattcctgtatttgtgtttttatatattttaaataatactcatttaaatcaagtgcgagcaagattagtaagaaatcctgttgctgctatagttgttggagtggggtttttgtcattagcggggttacccccttttataggattttttggtaagtggttagtgctaacttgattacttaataattttctggtggggggtgcagtagcgttagtagtcggggctttagttagtttattctattatttacgagtaagatatatatgtatggtaattttagggccacagcagatcatggtaagattaagctgacgaaaaggatttatgggtagtttgttaggggggttagtagtgctaaacttgttagggttgctattggtaggaggcattagctcattacctaaatag

SEQ ID NO: 132022 - protein, 346 aa, Branchiostoma belcheri
MSPYISPLFGLAMGSSVLLISSSTHWVFVWLGLELGTLAFIPMLAWWHSSLEVEATVKYFIIQAMAAAVFFFGGLVMTGTEYISGLSQFVGNFGEVLIMFSIIMKLGLVPFHYWVVDVVQGLNYLPGMVLLTWQKVPGLMVLVQLVSMQNGLILLIFGALSAFWGGLGGLGQTQMRKLLAFSSIAHLGWLVSGCVVGTMLGSMYFILYVVLSIPVFVFLYILNNTHLNQVRASLVSNPVAAMVVGVGFLSLAGLPPFMGFFGKWLVLTWLLNNFLVGGAVALVVGALVSLFYYLRVSYMCMVILGPQQIMVSLSWRKGFMGSLLGGLVVLNLLGLLLVGGISSLPK

SEQ ID NO: 132023 - DNA, 1476 bp, Rhizobium meliloti
  CDS (1)..(1476): transl_table=11
atgtcgatcccgctgctgagcctcatcgtcttcgtgcccgtcgccggggcggccgttctgatgttcatgcgcagcgacgatgcggtgcggtggactgcgctcggtttcgggattatcgatctcgctctctgcgtggtgatgctggccggcttcgacacgacgacccacgaaatgcagttcaccgagagccgtccctgggtgcccgcgctcgggatcacctatgcgctcggcgtcgacggcatcagcgcgctcttcctgttcctgacggcgctgttgagcttgatctccgtgctcgcttcctgggtggcgatcgaccgcaaggtgaaggagttcatggtcagcctgctggtcatgcaggcgctgatgctcggtgtcttctgcgcgctcgacctgttcctgttctacgtcttctgggaggcgatgctgattccgatgtatctgatcatcggcgtctggggcggcgaaggccgggtctatgctgcgttcaagttcttcctctacacgctggccggcagcatcctcttcctgatcggcgtcatcgtgctctatttccaggggggcgagaccttcgacatactcgccctgacggggcaggatctgcccttcggcgtccagtcctggctgttcttcgccttcctggtggccttcgctgtcaaggtgccgatggtgccggtgcacacctggctgccggacgcccatgtgcaggcgccgactgcgggcagcatcattctcgcgggcgtgctcctgaagatgggtgcttacggattcctgcgcttctcgctgccgatgctgccggaagcatcgctctattattcgacgctcatgctcgcgctttcggcccttgcgatcgtttatggcggcctcctggctctggcccaggacgacctgaagaagctggtggcctattccagcatcagccatatgggattcgtgacgcttgggattttcgcgctgaatctgcgcgggctcgagggcagcatcctgcagatgttcaatcacgggataacgacgggcgcattgttcctgttcgtgggcctgatctacgagcgcacgcatacccgcagcatcgcgaattacggcgggctgatgaaggcggcgcccgtctataccgcctttcttgcgctcttcaccctgtcttcgatggcgctgccggggacgaacgctttcgtgggcgaactgctggtgctgtcaggcgggtttgcggcaaacctcgccgcgggcgccgcggccgtggtgggtgcgttgctgagtgccgcctacctgctcggcatgtacgggaaagtggcgcttggtccgccgagtgtgagtgcgaagtatgagatacatgacgtgaacggccgcgagatggctgccatcctgccgctcgccatcttcgtgctctgggttggactctatccgcgcccgttcctcgggatcatcgatgcgtcggttcgaaatctgctggtgcaggtacacggtgaagggagtggtcaatga

SEQ ID NO: 132024 - protein, 491 aa, Rhizobium meliloti
MSIPLLSLIVFVPVAGAAVLMFMRSDDAVRWTALGFGIIDLALCVVMLAGFDTTTHEMQFTESRPWVPALGITYALGVDGISALFLFLTALLSLISVLASWVAIDRKVKEFMVSLLVMQALMLGVFCALDLFLFYVFWEAMLIPMYLIIGVWGGEGRVYAAFKFFLYTLAGSILFLIGVIVLYFQGGETFDILALTGQDLPFGVQSWLFFAFLVAFAVKVPMVPVHTWLPDAHVQAPTAGSIILAGVLLKMGAYGFLRFSLPMLPEASLYYSTLMLALSALAIVYGGLLALAQDDLKKLVAYSSISHMGFVTLGIFALNLRGLEGSILQMFNHGITTGALFLFVGLIYERTHTRSIANYGGLMKAAPVYTAFLALFTLSSMALPGTNAFVGELLVLSGGFAANLAAGAAAVVGALLSAAYLLGMYGKVALGPPSVSAKYEIHDVNGREMAAILPLAIFVLWVGLYPRPFLGIIDASVRNLLVQVHGEGSGQ

SEQ ID NO: 132025 - DNA, 1533 bp, Brassica napus
  CDS (1)..(1533)
atgatctggcatgtacagaatgaaaatttcattctcgattctacgagaatttttatgaaagcctttcatttgcttctcttcgatggaagttttattttcccagaatgtatcctaatttttggcctaatccttcttctgatgatcgattcaacctctgatcaaaaagatataccttggttatatttcatctcgtcaacaagtttcgtaatgagcataacggccctattgttccgatggagagaagaacctatgattagcttttcaggaaatttccaaacgaacaatttcaacgaaatctttcaatttcttattttactatgttcaactctctgtattcctctatccgtagagtacattgaatgtacagaaatggctataacagagtttctgttattcgtattaacagctactctaggaggaatgtttttatgtggtgctaacgatttaataactatctttgtagctccagaatgtttcagtttatgctcctacctattatctggatataccaagaaagatgtacgatctaatgaagctactatgaaatatttactcatgggtggggcaagctcttctactctggttcatggtttctcttggctatatggttcatccgggggagagattgagcttcaagaaatagtgaatggtcttatcaatacacaaatgtataactccccaggaatttcaattgcgcttatattcatcactgtaggaattgggttcaagctttccctagccccttctcatcaatggactcctgacgtataccaaggatctcccactccagtcgttgcttttctttctgttacttcgaaagtagctgcttcagctttagccactcgaattttcgatattcctttttatttctcatcaaatgaatggcatcttcttctggaaatcctagctattcttagcatgatattggggaatctcattgctattactcaaacaagcatgaaacgtatgcttgcatattcgtccataggtcaaatcggatatgtaattattggaataattgttggagactcaaatggtggatatgcgagcatgataacttatatgctgttctatatctccatgaatctaggaacttttgcttgcattatattatttggtctacgtaccggaactgataacattcgagattatgcaggattatacacaaaagatccttttttggctctctctttagctctatgtctcttatccctaggaggtcttcctccactagcaggtttttttggaaaacttcatttattctggtgtggatggcgggcaggcctatatttcttggtttcaataggactccttacgagcgttctttctatctactattatctaaaaataatcaagttattaatgactggacgaaaccaagaaataacccctcacgtgcgaaattatagaatatcccctttaagatcaaccaattccatcgaattgagtatgattgtatgtgtgatagcatctactataccaggaatatcaatgaacccgattattgcgattgctcaggatagccctttttag

SEQ ID NO: 132026 - protein, 510 aa, Brassica napus
MIWHVQNENFILDSTRIFMKAFHLLLFDGSFIFPECILIFGLILLLMIDSTSDQKDIPWLYFISSTSFVMSITALLFRWREEPMISFSGNFQTNNFNEIFQFLILLCSTLCIPLSVEYIECTEMAITEFLLFVLTATLGGMFLCGANDLITIFVAPECFSLCSYLLSGYTKKDVRSNEATMKYLLMGGASSSTLVHGFSWLYGSSGGEIELQEIVNGLINTQMYNSPGISIALIFITVGIGFKLSLAPSHQWTPDVYQGSPTPVVAFLSVTSKVAASALATRIFDIPFYFSSNEWHLLLEILAILSMILGNLIAITQTSMKRMLAYSSIGQIGYVIIGIIVGDSNGGYASMITYMLFYISMNLGTFACIILFGLRTGTDNIRDYAGLYTKDPFLALSLALCLLSLGGLPPLAGFFGKLHLFWCGWRAGLYFLVSIGLLTSVLSIYYYLKIIKLLMTGRNQEITPHVRNYRISPLRSTNSIELSMIVCVIASTIPGISMNPIIAIAQDSPF

SEQ ID NO: 132027 - DNA, 1626 bp, Coffea arabica
  CDS (1)..(1626): transl_table=11
atgatctggcatgtacagaatgaaaacttcattctcgattctacgagaatttttatgaaagcctttcatttgcttctcttcgatggaagtttgattttcccagaatgtatcctaatttttggcctaattcttcttctgatgatcgattcatcctcggatcaaaaagatataccttggttatatttcatcccttcaacaagtttagtaatgagcataacggccctattgttccgatggagagaagaacctatgattagcttttcgggaaatttccaaacgaacaatttcaacgaaatctttcaatttcttattttactatgttcaactctatgtattcctctatccgtagagtacattgaatgtacagaaatggctataacagagtttctcttattcgtattaacagctactctaggaggaatgtttttatgcggtgctaacgatttcataactatctttgtagctccagaatgtttcagtttatgctcctacctattatctggatataccaagaaagatgtacggtctaatgaggctactatgaaatatttactcatgggtggggcaagctcttctattctggttcatggtttctcttggctatatggttcatctgggggagagatcgagcttcaagaaatagtgaatggtcttatcaatacacaaatgtataactccccaggaatttcaattgcgctcatattcatcactgtaggaattgggttcaagctttccccagccccttctcatcaatggactcctgacgtatacgaaggagtgcggttcgttcgagaaattcctacctctctatctatctctgagatgtttggatttttcaaaactccatggacatgcagaagagaaatactatctcccactcccgtcgttgcttttctttctgttacttcgaaagtagctgcttcagcttcagccactcgaattttcgatattcctttttatttctcatcaaacggatggcatcttcttctggaaatcctagctattcttagcatgatattgggaaatctcattgctattactcaaacaagcatgaaacgtatgcttgcatattcgtccataggtcaaatcggatatgtaattattggaataattgttggagactcaaatgatggatatgcaagcatgataacttatatgctcttctatatctccatgaatctaggaacttttgcttgcattgtattatttggtctacgtaccggaacagataacattcgagattatgcaggattatacacgaaagatccttttttggctctctctttagccctatgtctcttatccctaggaggcctgcctccactagcaggttttttcggaaaactctatttattctggtgtggatggcaggcaggcctatatttcttggttttaataggactccttacaagcgttgtttctatctactattatctaaaaataatcaagttattaatgactggacgaaaccaagaaataacccctcacgtgcgaaattatagaagatctcctttaagatcaaacaattccatcgaattgagtatgattgtatgtgtaatagcatctactataccaggaatatcaatgaacccgattattgcaattgctcaggatagccttttttag

SEQ ID NO: 132028 - protein, 541 aa, Coffea arabica
MIWHVQNENFILDSTRIFMKAFHLLLFDGSLIFPECILIFGLILLLMIDSSSDQKDIPWLYFIPSTSLVMSITALLFRWREEPMISFSGNFQTNNFNEIFQFLILLCSTLCIPLSVEYIECTEMAITEFLLFVLTATLGGMFLCGANDFITIFVAPECFSLCSYLLSGYTKKDVRSNEATMKYLLMGGASSSILVHGFSWLYGSSGGEIELQEIVNGLINTQMYNSPGISIALIFITVGIGFKLSPAPSHQWTPDVYEGVRFVREIPTSLSISEMFGFFKTPWTCRREILSPTPVVAFLSVTSKVAASASATRIFDIPFYFSSNGWHLLLEILAILSMILGNLIAITQTSMKRMLAYSSIGQIGYVIIGIIVGDSNDGYASMITYMLFYISMNLGTFACIVLFGLRTGTDNIRDYAGLYTKDPFLALSLALCLLSLGGLPPLAGFFGKLYLFWCGWQAGLYFLVLIGLLTSVVSIYYYLKIIKLLMTGRNQEITPHVRNYRRSPLRSNNSIELSMIVCVIASTIPGISMNPIIAIAQDSLF

SEQ ID NO: 132029 - DNA, 1533 bp, Daucus carota
  CDS (1)..(1533): transl_table=11
atgatctggcatgtacagaatgaaaacttcattctcgattctacgagaatttttatgaaagcctttcatttgcttctcttcgatggaagtttgattgtcccagaatgtatcctaatttttggcctaattcttcttctgatgatcgattcaacctctgatcaaaaagatataccttggttatatttcatctcttcaacaagtttagtaatgagcataacggccctcttgttccgatggagagaagaacccgtgattagtttttcgggaaattttcaaacgaacaatttcaacgaaatctttcaatttcttattttactatgttcaactctatgtattcctctatccgtagagtacattgaatgtacagaaatggctataacagagtttctcttattcgtattaacagctactctaggaggaatgtttttatgcggtgctaacgatttaataactatctttgtagctccagaatgtttcagtttatgctcctacctattatctggatatacgaagaaagatgtacggtctaatgaggctactatgaaatatttactcatgggtggggcaagctcttctattctggttcatggtttctcttggctatatggttcatccgggggagagatcgagcttcaagaaatagtgaatggtcttatcaatacacaaatgtataactccccaggaatttcaattgcgctcatattcatcactgtaggaattggattcaagctttccccagccccttctcatcaatggactcctgacgtatacgaaggatctcccactccagtcgttgcttttctttctgttacttcgaaagtagctgcttcagcttcagccactcgaattttcgatattcctttttatttctcatcaaatgaatggcatcttcttctggaaaccctagctattcttagcatgatattggggaatcttattgctataactcaaacaagcatgaaacgtatgcttgcatattcgtccataggtcaaatcggatatgtaattattggaataattgttggagactcaaatgatggatatgcaagcatgataacttatatgctgttctatatctccatgaatctaggaacttttgcttgcattgtattatttggtctacgtaccggaactgataacattcgagattatgcaggattatatacgaaagatccttttttggctctctctttagccctatgtctcttatccctaggaggtcttcctccactagcaggttttttcggaaaactctatttattctggtgtggatggcaggcaggcctatatttcttggttttaataggactccttacaagcgttgtttctatctactattatctaaaaataatcaagttattaatgactggacgaacccaagaaataacccctcacgtgcgaaattatagaagatctcctttcagatcaaacaattccatcgaattgagtatgattgtatgtgtgatagcatctactataccaggaatatcaatgaacccgattattgcaattgctcaggatacccttttttag

SEQ ID NO: 132030 - protein, 510 aa, Daucus carota
MIWHVQNENFILDSTRIFMKAFHLLLFDGSLIVPECILIFGLILLLMIDSTSDQKDIPWLYFISSTSLVMSITALLFRWREEPVISFSGNFQTNNFNEIFQFLILLCSTLCIPLSVEYIECTEMAITEFLLFVLTATLGGMFLCGANDLITIFVAPECFSLCSYLLSGYTKKDVRSNEATMKYLLMGGASSSILVHGFSWLYGSSGGEIELQEIVNGLINTQMYNSPGISIALIFITVGIGFKLSPAPSHQWTPDVYEGSPTPVVAFLSVTSKVAASASATRIFDIPFYFSSNEWHLLLETLAILSMILGNLIAITQTSMKRMLAYSSIGQIGYVIIGIIVGDSNDGYASMITYMLFYISMNLGTFACIVLFGLRTGTDNIRDYAGLYTKDPFLALSLALCLLSLGGLPPLAGFFGKLYLFWCGWQAGLYFLVLIGLLTSVVSIYYYLKIIKLLMTGRTQEITPHVRNYRRSPFRSNNSIELSMIVCVIASTIPGISMNPIIAIAQDTLF

SEQ ID NO: 132031 - DNA, 1533 bp, Eucalyptus globulus subsp
  CDS (1)..(1533): transl_table=11
atgatctggcatgtacagaatgaaaacctcattctcgattctacgagaatttttatgaaagcctttcatttgcttctcttcgatggaagttttattttcccagaatgtatcctaatttttggcctaattcttcttctgatgatcgattcaacctctgatcaaaaagatataccttggttctatttcatctcttcaacaagtttagtaatgagcataacggccctattgttccgatggagagaagaacctatgattatcttttcaggaaatttccaaacgaacaatttcaacgaaatctttcaatttcttattttactatgttcaactctatgtattcctctatccgtagagtacattgaatgtacagaaatggctatcacagagtttctcttatttgtattaacagctactctaggaggaatgtttttatgcggtgctaacgatttaataactatctttgtagctccagaatgtttcagtttatgctcctacctattatctggatataccaagaaggatgtacggtctaatgaggctactatgaaatatttactcatgggtggggcaagctcttctattctggttcatggtttctcttggctatatggttcatccgggggagagatcgagcttcaagaaatagtgaatggtcttatcaatacacaaatgtataactccccaggaattttaattgcgcttctattcatcactgtaggaattgggttcaagctttccctagccccttctcatcaatggactcctgacgtatacgaaggatctcccactccagtcgttgcttttctttctgttacttcgaaagtagctgcttcagcttcagccactcgaattttcgatattcctttttatttctcatcaaacgaatggcatcttcttctggaaatcctagctattcttagcatgatattggggaatctcattgctattactcaaacaagcatgaaacgtatgcttgcatattcgtccataggtcaaatcggatatgtaattattggaataattgttggagactcaaatggtggatatgcgagcatgataacttatatgctgttctatatctccatgaatctaggaacttttgcttgcattgtattatttggtctacgtaccggaactgataacattcgagattatgcaggattatacacgaaagatccttttttggctctctctttagccctatgtctcttatccctaggaggtcttcctccactagcaggttttttcggaaaactccatttattctggtgtggatggcaggcaggcctatacttcttggtttcaataggactccttacgagcgttatttctatctactattatctaaaaataatcaagttattaatgactggacgaaaccaagaaataacacctcacgtgcgaaattatagaagatcccctttaagatcaaacaattccatcgaattgagtatgattgtatgtgtgatagcatctactataccaggaatatcaatgaacccgattattgcaattgctcaggatacccttttttag

SEQ ID NO: 132032 - protein, 510 aa, Eucalyptus globulus subsp
MIWHVQNENLILDSTRIFMKAFHLLLFDGSFIFPECILIFGLILLLMIDSTSDQKDIPWFYFISSTSLVMSITALLFRWREEPMIIFSGNFQTNNFNEIFQFLILLCSTLCIPLSVEYIECTEMAITEFLLFVLTATLGGMFLCGANDLITIFVAPECFSLCSYLLSGYTKKDVRSNEATMKYLLMGGASSSILVHGFSWLYGSSGGEIELQEIVNGLINTQMYNSPGILIALLFITVGIGFKLSLAPSHQWTPDVYEGSPTPVVAFLSVTSKVAASASATRIFDIPFYFSSNEWHLLLEILAILSMILGNLIAITQTSMKRMLAYSSIGQIGYVIIGIIVGDSNGGYASMITYMLFYISMNLGTFACIVLFGLRTGTDNIRDYAGLYTKDPFLALSLALCLLSLGGLPPLAGFFGKLHLFWCGWQAGLYFLVSIGLLTSVISIYYYLKIIKLLMTGRNQEITPHVRNYRRSPLRSNNSIELSMIVCVIASTIPGISMNPIIAIAQDTLF

SEQ ID NO: 132033 - DNA, 1542 bp, Gloeobacter violaceus
  CDS (1)..(1542): transl_table=11
atgaacatcgatctggccgcactcaacgccgggacactctggcccgaatacatcgtcaccatcaccctgattgtggtgttgctggtggatttgatctcgggccgcaaggcttcctggtcgcttccttatctggcacttttggggttgggaattgccaccgccacgctgctgccgatgtggattctcgaaaatccggtgagttttctgggcagcttcaccgccgatccgctgagcgtcgtttttcgcgcctttattttgatctcggccgccctcacggtgctgatgtcggtgcgctacatcaaccaatcgagtctggcgacggccgaattttatgtgctgctattgggggcgaccctcggggcgatgctgctgtcgggctcctcggagatggcgatgatcttcgtggctctggagttgctcagtatcaccagttatctgctctcgggctacgccaagctcgacaagcgctctaacgaagcttcgctcaagtatttgctcatcggtgcggccagttccggtatcttcctgtacggcatgtcgctgctgtatgggttttccggcggccagacgcagctgaccgagatcgccccgcgcatcgtgaatctgggttttccggccttgctgtcgctggtcctggtggcggcgggcatctgcttcaagctctcggcagtgcccttccaccagtggacccccgacgtttacgaaggatcgcccacgccggtggtcgcttttttgtcggtcggttcgaaagccgccggtttcgccctggccatccgctttatgacctcggcctacccgggcttttctgagcagtggcagacgctctttgtgcttctggccatcctcagtatggtgctgggcaacgtggtggccatcgcccagaccagcatgaagcgcatgctcgcctactcgtcgatcgcccaggccggttatgtgatgatcggccttgccatcggcacccaggaaggctacagcagcatgatcctctacatcggcacctacttgtttatgaacctgggggcgttcatggcggtggtgctcttcagcctgcgcaccggcaccgacgagatcaccgcctacagcggcctctaccagaaagatccgttcctgacgctggtgctcagtttgtgcctgctttccttggcgggcattccgccgctcgcgggctttttcggcaagttgtacctgttttgggcggcggtgcagtcccaggcctatacactcgttttcttcggcctggtcacctcggtggcatcgatttattactacgtgcgcgtcgtcaagctgatgctggtcaaagaaccgtctccccaggtgctcgcttattccgaggcgggcgatcaagacggcatccagaccctcaaagccggcatgttgattacgacggtggcgaccgtcgtgctgggaatcttgttcccgccgctgatcagcctcgccgacacctcgctgcgggcaaccccttcgctgcagcaggtgcggaccgcaacgcccgtctcccgagtgagcaccggtgcccaagcgcctgctgatcacgggcgctag

SEQ ID NO: 132034 - protein, 513 aa, Gloeobacter violaceus
MNIDLAALNAGTLWPEYIVTITLIVVLLVDLISGRKASWSLPYLALLGLGIATATLLPMWILENPVSFLGSFTADPLSVVFRAFILISAALTVLMSVRYINQSSLATAEFYVLLLGATLGAMLLSGSSEMAMIFVALELLSITSYLLSGYAKLDKRSNEASLKYLLIGAASSGIFLYGMSLLYGFSGGQTQLTEIAPRIVNLGFPALLSLVLVAAGICFKLSAVPFHQWTPDVYEGSPTPVVAFLSVGSKAAGFALAIRFMTSAYPGFSEQWQTLFVLLAILSMVLGNVVAIAQTSMKRMLAYSSIAQAGYVMIGLAIGTQEGYSSMILYIGTYLFMNLGAFMAVVLFSLRTGTDEITAYSGLYQKDPFLTLVLSLCLLSLAGIPPLAGFFGKLYLFWAAVQSQAYTLVFFGLVTSVASIYYYVRVVKLMLVKEPSPQVLAYSEAGDQDGIQTLKAGMLITTVATVVLGILFPPLISLADTSLRATPSLQQVRTATPVSRVSTGAQAPADHGR

SEQ ID NO: 132035 - DNA, 1533 bp, Gossypium barbadense
  CDS (1)..(1533): transl_table=11
atgatctggcatgtacagaatgaaaacttcattctcgattctacgagaatttttatgaaagcctttcatttgcttctcttcgatggaagttttattttcccagaatgtatcctaatttttggcctaattcttcttctgatgatcgattcaacctctgatcaaaaagatataccttggttatatttcatctcttcaacaagtttagtaatgagcataacggccctattgttccgatggagagaagaacctatgattagcttttcaggaaatttccaaacgaacaatttcaacgaaatctttcaatttcttattttactatgttcaactctatgtattcctctatccgtagagtacattgaatgtacagaaatggctatagcagagtttctgttattcgtattaacagctactctaggaggaatgtttttatgcggtgctaacgatttaataactatctttgtagctccagaatgtttcagtttatgctcctacctattatctggatataccaagaaagatgtacggtctaatgaggctactacgaaatatttactcatgggtggggcaagctcttctattctggttcatggtttctcttggctatatggttcatccgggggagagatcgagcttcaagaaatagtgaatggtcttatcaatacacaaatgtataactccccaggaatttcaattgcgcttatattcatcactgtaggaattgggttcaagctttccccagccccttctcatcaatggactcctgacgtatacgaaggatctcccactccagtcgttgcttttctttctgttacttcgaaagtagctgcttcggcttcagccactcgaattttcgatattcctttttatttctcatcaaacgaatggcatcttcttctggaaatcctagctattcttagcatgatattggggaatctcattgctattactcaaacaagcatgaaacgtatgcttgcatattcgtccataggtcaaatcggatatgtaattattggaataattgttggaaactcaaatggtggatatgcgagcatgataacttatatgctgttctatatctccatgaatctaggaacttttgcttgcattgtattatttggtctacgtaccggaactgataacattcgagattatgcaggattatacacaaaagatccttttttggctctctctttagctccatgtctcttatctctaggaggtcttcctccactagcaggttttttcggaaaactccatttattctggtgtggatggcaggcaggcctatatttcttggtttcaataggactccttacgagcgttgtttctatctactattatctaaaaataatcaagttattaatgactggacgaaaccaagaaataacccctcacgtgcgaaattatagaagatcccctttaagatcaaacaattccatcgaattgagtatgattgtatgtgtgatagcatctactataccaggaatatcaatgaacccgattattgcaattgctcaggatacccttttttag

SEQ ID NO: 132036 - protein, 510 aa, Gossypium barbadense
MIWHVQNENFILDSTRIFMKAFHLLLFDGSFIFPECILIFGLILLLMIDSTSDQKDIPWLYFISSTSLVMSITALLFRWREEPMISFSGNFQTNNFNEIFQFLILLCSTLCIPLSVEYIECTEMAIAEFLLFVLTATLGGMFLCGANDLITIFVAPECFSLCSYLLSGYTKKDVRSNEATTKYLLMGGASSSILVHGFSWLYGSSGGEIELQEIVNGLINTQMYNSPGISIALIFITVGIGFKLSPAPSHQWTPDVYEGSPTPVVAFLSVTSKVAASASATRIFDIPFYFSSNEWHLLLEILAILSMILGNLIAITQTSMKRMLAYSSIGQIGYVIIGIIVGNSNGGYASMITYMLFYISMNLGTFACIVLFGLRTGTDNIRDYAGLYTKDPFLALSLAPCLLSLGGLPPLAGFFGKLHLFWCGWQAGLYFLVSIGLLTSVVSIYYYLKIIKLLMTGRNQEITPHVRNYRRSPLRSNNSIELSMIVCVIASTIPGISMNPIIAIAQDTLF

SEQ ID NO: 132037 - DNA, 1533 bp, Gossypium hirsutum
  CDS (1)..(1533): transl_table=11
atgatctggcatgtacagaatgaaaacttcattctcgattctacgagaatttttatgaaagcctttcatttgcttctcttcgatggaagttttattttcccagaatgtatcctaatttttggcctaattcttcttctgatgatcgattcaacctctgatcaaaaagatataccttggttatatttcatctcttcaacaagtttagtaatgagcataacggccctattgttccgatggagagaagaacctatgattagcttttcaggaaatttccaaacgaacaatttcaacgaaatctttcaatttcttattttactatgttcaactctatgtattcctctatccgtagagtacattgaatgtacagaaatggctatagcagagtttctgttattcgtattaacagctactctaggaggaatgtttttatgcggtgctaacgatttaataactatctttgtagctccagaatgtttcagtttatgctcctacctattatctggatataccaagaaagatgtacggtctaatgaggctactacgaaatatttactcatgggtggggcaagctcttctattctggttcatggtttctcttggctatatggttcatccgggggagagatcgagcttcaagaaatagtgaatggtcttatcaatacacaaatgtataactccccaggaatttcaattgcgcttatattcatcactgtaggaattgggttcaagctttccccagccccttctcatcaatggactcctgacgtatacgaaggatctcccactccagtcgttgcttttctttctgttacttcgaaagtagctgcttcggcttcagccactcgaattttcgatattcctttttatttctcatcaaacgaatggcatcttcttctggaaatcctagctattcttagcatgatattggggaatctcattgctattactcaaacaagcatgaaacgtatgcttgcatattcgtccataggtcaaatcggatatgtaattattggaataattgttggagactcaaatggtggatatgcgagcatgataacttatatgctgttctatatctccatgaatctaggaacttttgcttgcattgtattatttggtctacgtaccggaactgataacattcgagattatgcaggattatacacaaaagatccttttttggctctctctttagctctatgtctcttatctctaggaggtcttcctccactagcaggttttttcggaaaactccatttattctggtgtggatggcaggcaggcctatatttcttggtttcaataggactccttacgagcgttgtttctatctactattatctaaaaataatcaagttattaatgactggacgaaaccaagaaataacccctcacgtgcgaaattatagaagatcccctttaagatcaaacaattccatcgaattgagtatgattgtatgtgtgatagcatctactataccaggaatatcaatgaacccgattattgcaattgctcaggatacccttttttag

SEQ ID NO: 132038 - protein, 510 aa, Gossypium hirsutum
MIWHVQNENFILDSTRIFMKAFHLLLFDGSFIFPECILIFGLILLLMIDSTSDQKDIPWLYFISSTSLVMSITALLFRWREEPMISFSGNFQTNNFNEIFQFLILLCSTLCIPLSVEYIECTEMAIAEFLLFVLTATLGGMFLCGANDLITIFVAPECFSLCSYLLSGYTKKDVRSNEATTKYLLMGGASSSILVHGFSWLYGSSGGEIELQEIVNGLINTQMYNSPGISIALIFITVGIGFKLSPAPSHQWTPDVYEGSPTPVVAFLSVTSKVAASASATRIFDIPFYFSSNEWHLLLEILAILSMILGNLIAITQTSMKRMLAYSSIGQIGYVIIGIIVGDSNGGYASMITYMLFYISMNLGTFACIVLFGLRTGTDNIRDYAGLYTKDPFLALSLALCLLSLGGLPPLAGFFGKLHLFWCGWQAGLYFLVSIGLLTSVVSIYYYLKIIKLLMTGRNQEITPHVRNYRRSPLRSNNSIELSMIVCVIASTIPGISMNPIIAIAQDTLF

SEQ ID NO: 132039 - DNA, 1533 bp, Helianthus annuus
  CDS (1)..(1533): transl_table=11
atgatctggcatgtacagaatgaaaacttcattctcgattctacgagaatttttatgaaagcctttcatttgcttctcttcgatggaagtttgattttcccagaatgtatcctaatttttggcctaattcttcttctgatgatcgattcaacctctgatcaaaaagatataccttggttatatttcatctcttcaacaagtttagtaatgagcataacggccctattgttccgatggagagaggaacctatgattagcttttcgggaaatttccaaacgaacaatttcaacgaaatctttcaatttcttattttactatgttcaactctatgtattcctctatccgtagagtacattgaatgtacagaaatggctataacagagtttctcttattcatattaacagctactataggaggaatgtttttatgcggtgctaacgatttaataactatctttgtagctccagaatgtttcagtttatgctcctacctattatctggatatacgaagaaagatgtacggtctaatgaggctactatgaaatatttactcatgggtggggcaagctcttctattctggttcatggtttctcttggctatatggttcatccgggggagagatcgagcttcaagaaatagtgaatggtcttatcaatacacaaatgtataactccccaggaatttcaattgcgctcatattcatcactgtaggaattgggttcaagctttccccagccccttctcatcaatggactcctgacgtatacgaaggatctcccactccagtcgttgcttttctttctgttacttcgaaagtagctgcttcagcttcagccactcgaattttcgatattcctttttatttctcatcaaacgaatggcatcttcttctggaaatcctagctattcttagcatgatattggggaatctcattgctattactcaaacaagcatgaaacgtatgcttgcatattcgtccatagggcaaatcggatatgtaattattggaataattgttggagactcaaatgatggatatgcaagcatgataacttatatgctgttctatatctccatgaatctaggaacttttgcttgcattgtcttatttggtctacgtaccggaactgagaacattcgagattatgcaggattatacacgaaagatccttttttggctctctctttagccctatgtctcttatcgctaggaggtcttcctccactagcaggttttttcggaaaactctatttattctggtgtggatggcaggcaggcctatatttattggttttaataggactccttacaagcgttgtttctatctactattatctaaaaataatcaagttattaatgactggacgaaaccaagaaataacccctcacgtgcgaaattatagaagatcccctttaagatcaaacaattccatcgaattgagtatgattgtatgtgtgatagcatctactataccaggaatatcaatgaatccgattattgcaattgctcaggatacccttttttag

SEQ ID NO: 132040 - protein, 510 aa, Helianthus annuus
MIWHVQNENFILDSTRIFMKAFHLLLFDGSLIFPECILIFGLILLLMIDSTSDQKDIPWLYFISSTSLVMSITALLFRWREEPMISFSGNFQTNNFNEIFQFLILLCSTLCIPLSVEYIECTEMAITEFLLFILTATIGGMFLCGANDLITIFVAPECFSLCSYLLSGYTKKDVRSNEATMKYLLMGGASSSILVHGFSWLYGSSGGEIELQEIVNGLINTQMYNSPGISIALIFITVGIGFKLSPAPSHQWTPDVYEGSPTPVVAFLSVTSKVAASASATRIFDIPFYFSSNEWHLLLEILAILSMILGNLIAITQTSMKRMLAYSSIGQIGYVIIGIIVGDSNDGYASMITYMLFYISMNLGTFACIVLFGLRTGTENIRDYAGLYTKDPFLALSLALCLLSLGGLPPLAGFFGKLYLFWCGWQAGLYLLVLIGLLTSVVSIYYYLKIIKLLMTGRNQEITPHVRNYRRSPLRSNNSIELSMIVCVIASTIPGISMNPIIAIAQDTLF

SEQ ID NO: 132041 - DNA, 1518 bp, Huperzia lucidula
  CDS (1)..(1518)
atgaatttagattttgatttatacatcctatatggaaatagtattttacccgaatgtattctaattcttagtttagttattcttctaatagtggattcaatctatggaaaaaaagatacgccttggttatatataattcccttttcaggtttagtaacaagcataacagttttattctttcagtgggaagaagaacctattattaccttcatgggtagtttccaaataaacacttttaacaaaatatttcaatttttgattctactatgctcagtactatgtgttcccttatctgtggattatattcaatgtacagaaatggctataacagagtttttgtcattcatactaacagctaccttgggagcaacgtttctatgtggtgctaatgatccagtaactatctttgtgtctctggaatgcttaagtctatgttcttatctattatctggatatacaaaaagggatgtaagatctaatgaagcaactatgaaatacttacttatgggtggaacaagttcttctattttggcttatggtttttcctggctatatggtttatccggggggcaaactcaacttcaagaaatagcgaaaggacttataagtacacaaatgtataactctccaggaacttcgattgcacctatatgcacaatggtaggaattggatttaagctttctttagttccttttcatcaatggactcccgacgtatatgaaggatcaccaactccagtcgttgcttttctttctgtcgtttcaaaagtagcagtttcagctttagctattcgaattttaaatattgtttttcccttatcatcgaacgagtggcattcagttctggaaatactagctatttctagtatgatactaggcaattttattgcaattactcaaacaagcatgaaacgtatgcttgcatattcttcaataagtcaaattggatatattatgattggaataattgctggaaactcaaatggatatacaagcgtggtcacttacatgctgttctatatttttatgaatctaggaaccttcgcttgtatcatattattcagttcgcgcacgggaacggataacattcgagattatgcaggattatatctaaaagatcctttactggcttcttgttttgcctcgtgtctattatctctaggaggtgttcccccgctatcaggtttttttggaaaactttacctattttggtgcggatggcaagcgggtctacattcattagtttcaatagggctcttcacaagtgtcatttcaatatactactatttaaaaattattaagttgttagtaactaaacgaaacgaggaagtaactccttatataacaaattatataaattcttcatattttttaacatcaaaaaatgttactgaacttagtatgatgatatgtgtaatagcatctaccgtattgggattagcagtaaatccaatcattactatggctcagaattctattttttcaagtcgtttcactagcagtttattaatcttataa

SEQ ID NO: 132042 - protein, 505 aa, Huperzia lucidula
MNLDFDLYILYGNSILPECILILSLVILLIVDSIYGKKDTPWLYIIPFSGLVTSITVLFFQWEEEPIITFMGSFQINTFNKIFQFLILLCSVLCVPLSVDYIQCTEMAITEFLSFILTATLGATFLCGANDPVTIFVSLECLSLCSYLLSGYTKRDVRSNEATMKYLLMGGTSSSILAYGFSWLYGLSGGQTQLQEIAKGLISTQMYNSPGTSIAPICTMVGIGFKLSLVPFHQWTPDVYEGSPTPVVAFLSVVSKVAVSALAIRILNIVFPLSSNEWHSVLEILAISSMILGNFIAITQTSMKRMLAYSSISQIGYIMIGIIAGNSNGYTSVVTYMLFYIFMNLGTFACIILFSSRTGTDNIRDYAGLYLKDPLLASCFASCLLSLGGVPPLSGFFGKLYLFWCGWQAGLHSLVSIGLFTSVISIYYYLKIIKLLVTKRNEEVTPYITNYINSSYFLTSKNVTELSMMICVIASTVLGLAVNPIITMAQNSIFSSRFTSSLLIL

SEQ ID NO: 132043 - DNA, 1533 bp, Lactuca sativa
  CDS (1)..(1533): transl_table=11
atgatctggcatgtacagaatgaaaacttcattctcgattctacgagaatttttatgaaagcctttcatttgcttctcttcgatggaagtttgattttcccagaatgtatcctaatttttggcctaattcttcttctgatgatcgattcaacctctgatcaaaaagatataccttggttatatttcatctcttcaacaagtttagtaatgagcataacgtccctattgttccgatggagagaggaacctatgattagcttttcgggaaatttccaaacgaacaatttcaacgaaatctttcaatttcttattttactatgttcaactctatgtattcctctatccgtagagtacattgaatgtacagaaatggctataacagagtttctcttattcgtattaacagctactataggaggaatgtttttatgtggtgctaacgatttaataactatctttgtagctccagaatgtttcagtttatgctcctacctattatctggatataccaagaaagatgtacggtctaatgaggctactatgaaatatttactcatgggtggggcaagctcttctattctggttcatggtttctcttggctatatggttcatccgggggagagatcgagcttcaagaaatagtgaatggtcttatcaatacacaaatgtataactccccaggaatttcaattgcgctcatattcatcactgtaggaattgggttcaagctttccccagccccttctcatcaatggactcctgacgtatacgaaggatctcccactccagtcgttgcttttctttctgttacttcgaaagtagctgcttcagcttcagccactcgaattttcgatattcctttttatttctcatcaaacgaatggcatcttcttctggaaatcctagctattcttagcatgatattggggaatctcattgctattactcaaacaagcatgaaacgtatgcttgcatattcgtccataggtcaaatcggatatgtaattattggaataattgttggagactcaaatgatggatatgcaagcatgataacttatatgttgttctatatctccatgaatctaggaacttttgcttgcattgtcttatttggtctacgtaccggaactgagaacattcgagattatgcaggattatacacgaaagatccttttttggctctctctttagccctatgtctcttatccctaggaggtcttcctccactagcaggttttttcggaaaactctatttattctggtgtggatggcaggcaggcctatatttcttggttttaataggactccttacaagcgttgtttctatctactattatctaaaaataatcaagttattaatgactggacgaaaccaagaaataacccctcacgtgcgaaattatagaagatcccctttaagatcaaacaattccatcgaattgagtatgattgtatgtgtgatagcatctactataccaggaatatcaatgaatccgattattgcaattgctcaggatacccttttttag

SEQ ID NO: 132044 - protein, 510 aa, Lactuca sativa
MIWHVQNENFILDSTRIFMKAFHLLLFDGSLIFPECILIFGLILLLMIDSTSDQKDIPWLYFISSTSLVMSITSLLFRWREEPMISFSGNFQTNNFNEIFQFLILLCSTLCIPLSVEYIECTEMAITEFLLFVLTATIGGMFLCGANDLITIFVAPECFSLCSYLLSGYTKKDVRSNEATMKYLLMGGASSSILVHGFSWLYGSSGGEIELQEIVNGLINTQMYNSPGISIALIFITVGIGFKLSPAPSHQWTPDVYEGSPTPVVAFLSVTSKVAASASATRIFDIPFYFSSNEWHLLLEILAILSMILGNLIAITQTSMKRMLAYSSIGQIGYVIIGIIVGDSNDGYASMITYMLFYISMNLGTFACIVLFGLRTGTENIRDYAGLYTKDPFLALSLALCLLSLGGLPPLAGFFGKLYLFWCGWQAGLYFLVLIGLLTSVVSIYYYLKIIKLLMTGRNQEITPHVRNYRRSPLRSNNSIELSMIVCVIASTIPGISMNPIIAIAQDTLF

SEQ ID NO: 132045 - DNA, 1509 bp, Mesostigma viride
  CDS (1)..(1509)
atggaatttaaagatctgattgcttccttaaatattgatgccgtgcttccagaggcaattattatttgttcttcattatttatattgatcattgatctaatatttcaaagaagagccaatgctgtattgccttatatggcaatcttaggtttgattttaagtatgctgagtttattattccaatggaatggaaaagaagttacagcttttcttggcagttttcaaacagattccctaagtatagcatttcgtttgcttattgcactctcttcaatgttatgtgtacttttatctatagaatatttagaaaactcaaaaaaaactttatcagagtttttagttatatttctaacagccactcttggagcaatgttactatgtggttctaacgatattctaatgatatttttatcattagaaacattaggattatgttcatatatacttacaggatatatgaaaaaagatattcgttctaatgaggcttctatcaaatatttattaattggtgcagctagttcttctatattactttatggattttctctattatatggactatctcatggtcacatagaaattcatgaaatagcagcaaatttgattaaagatcagaatggtaattcattggcatctttagtagcactagcattaattattgtaggaatatctttcaaaatagctgcagctccctttcatcaatgggctccagatgtgtatgaaggagcaccaactcctgtcgtagcttttttatctgttagttctaaagcagcaggattaatgttagctacaagaataatgactattttatttccatacattataaacgagtggcataatatctttcaaatattagctattttaagcatggctattggtaatatcattgctattagtcaaacaaatattaaacgtatgctaggatattcatcaattgctcaagcaggttttttattagtaggattacttgcgggaaatataaatggttattctagtatgttagtatacatgttaatttacctatttatgaatttaggagcttttgcatgtgtaattttatttagtttgaaaacgggtagtgatcaaattagggattatggaggtttatatctaaaagatcctatattagccttatgtttaagtatttgcttattgtcgttaggtggtattccaccttttggtggtttttttggaaaattatatttattttgggctggctgggaagctggatcttacttattagtttttgtaggtttattaactagtgttatttctattttttattatataaaaataataaaaatgatgatcatcaaagaatctccagaagtttcttttgctataaaaaattatagtcaaaaaagatggtctataaaagatatcactccaatagaagtaagtattcttatatgtgttataggaactacaatttctggaatttttgtaaatcctattatttctattgctcaacaaacagtcatagatagttcttggttaatggcaatataa

SEQ ID NO: 132046 - protein, 502 aa, Mesostigma viride
MEFKDLIASLNIDAVLPEAIIICSSLFILIIDLIFQRRANAVLPYMAILGLILSMLSLLFQWNGKEVTAFLGSFQTDSLSIAFRLLIALSSMLCVLLSIEYLENSKKTLSEFLVIFLTATLGAMLLCGSNDILMIFLSLETLGLCSYILTGYMKKDIRSNEASIKYLLIGAASSSILLYGFSLLYGLSHGHIEIHEIAANLIKDQNGNSLASLVALALIIVGISFKIAAAPFHQWAPDVYEGAPTPVVAFLSVSSKAAGLMLATRIMTILFPYIINEWHNIFQILAILSMAIGNIIAISQTNIKRMLGYSSIAQAGFLLVGLLAGNINGYSSMLVYMLIYLFMNLGAFACVILFSLKTGSDQIRDYGGLYLKDPILALCLSICLLSLGGIPPFGGFFGKLYLFWAGWEAGSYLLVFVGLLTSVISIFYYIKIIKMMIIKESPEVSFAIKNYSQKRWSIKDITPIEVSILICVIGTTISGIFVNPIISIAQQTVIDSSWLMAI

SEQ ID NO: 132047 - DNA, 1533 bp, Oryza nivara
  CDS (1)..(1533): transl_table=11
atgatctggcatgtacagaatgaaaacttcattctcgattctacgagaatttttatgaaagcgtttcatttgcttctcttccagggaagtttcattttcccagaatgtatcctaatttttggcctaattcttcttctgatgatcgatttaacctctgatcaaaaagatagaccttggttctatttcatctcttcaacaagtttagtaataagcataacggccctattgttccgatggagagaagaacctataattagcttttcgggaaatttccaaacgaacaatttcaacgaaatctttcaatttcttattttattatgttcaactttatgtattcctctatccgtagagtacattgaatgtacagaaatggctataacagagtttctgttattcgtattaacagctactctagggggaatgtttttatgtggtgctaacgatttaataactatctttgtagctccagaatgtttcagtttatgttcctacctattgtctggatataccaagagagatctacggtctaatgaggctactatgaaatatttactcatgggtggggcaagctcttctattctggttcatggtttctcttggctatatggttcatctgggggggagatcgagcttcaagaaattgtgaacggtcttatcaatacacaaatgtataactccccaggaatttcaattgcgcttatatccatcactgtaggacttgggttcaagctttccccagccccttttcatcaatggactcctgacgtctacgaaggatcccccactccagtcgttgcttttctttctgttacttcgaaagttgctgcttcagcttcagccacgcgaattctcgatattcctttttatttctcatcaaacgaatggcatcttcttctggaaatcctagctattcttagcatgatattggggaatctccttgctattactcaaacaagcatgaaacgtatgcttgcatattcgtccatagggcaaatcggatatgtaattattggaataattgttggagactcaaatgatggatatgcaagcatgataacttatatgcttttctatatctccatgaatctaggaacttttgcttgcattgtattatttggtctacgtaccggaactgataacattcgagattatgcaggattatacacgaaagatccttttttggctctctctttagccctatgtctcttatccctaggaggccttcctccactagcaggtttcttcggaaaactctatctattctggtgtggatggcaagcaggcctatatttcttggtttcaataggactccttacgagcgttctttctatctactattatctaaaaatagtcaagttattaatgactggacgaaaccaagaaataaccccttatgtgcgaaattatagaagatcccctttaagatcaaacaattccatcgaattgagtatgactgtatgtgtgatagcatctactataccaggaatatcaatgaaccccattcttgcaattgctcaggataccctcttttag

SEQ ID NO: 132048 - protein, 510 aa, Oryza nivara
MIWHVQNENFILDSTRIFMKAFHLLLFQGSFIFPECILIFGLILLLMIDLTSDQKDRPWFYFISSTSLVISITALLFRWREEPIISFSGNFQTNNFNEIFQFLILLCSTLCIPLSVEYIECTEMAITEFLLFVLTATLGGMFLCGANDLITIFVAPECFSLCSYLLSGYTKRDLRSNEATMKYLLMGGASSSILVHGFSWLYGSSGGEIELQEIVNGLINTQMYNSPGISIALISITVGLGFKLSPAPFHQWTPDVYEGSPTPVVAFLSVTSKVAASASATRILDIPFYFSSNEWHLLLEILAILSMILGNLLAITQTSMKRMLAYSSIGQIGYVIIGIIVGDSNDGYASMITYMLFYISMNLGTFACIVLFGLRTGTDNIRDYAGLYTKDPFLALSLALCLLSLGGLPPLAGFFGKLYLFWCGWQAGLYFLVSIGLLTSVLSIYYYLKIVKLLMTGRNQEITPYVRNYRRSPLRSNNSIELSMTVCVIASTIPGISMNPILAIAQDTLF

SEQ ID NO: 132049 - DNA, 1506 bp, Physcomitrella patens
  CDS (1)..(1506)
atggaattagaacttgatctttcttttttttacaaaacaactattttgcctgaatgtgttcttattttttgtctaataagtattttaatattagatttaattttaaaaataaaagataaaaatgtatttttttttatttctttagtaagtttattattaagtatttttattttaatatttcaattaaaagaagaacccgttattagttttttaggcaattttcaagctgataattttaacaaaatatttcgaatttttatagcattatgttcaatattatgtattcctttatctattgattttattaaatgtacaaaattagcaataacagaatttcttatttttttattaactgcaactatcggaggaatgtttttatgtggtgctaacgatttgattactatttttgtatctttagaatgcttaagtttatgttcttatttattatccggttatactaaaaaagatgtgcgatctaacgaagcggttatgaaatatttacttataggtggaacaagttcatctattttagcttatggtttttcgtggctttacggtttatctggaggagaatttcaacttcaaaaaatagcagatgggcttgttagtacagagatgtataattctttcggaagtttgcttgcactggtatttattattgtaggaattggatttaaactttctttagtaccttttcatcaatggactcctgatgtctatgaaggatcccctaccccagtcgttgcttttctttcagttgcttcaaaaatagcgggtttagctttgctagttcgtctttttaatattgtttttccttttcttcctaatcaatggcattcacttttagaaatatcagctatttgtagcatgatattgggtaatttggtagctattactcaaacaagtatgaagcgtatgcttgcatattcctcaataagtcaaattggatatttaatgattggattagttacaggaaattttgacggatatacaagtatgatagtttatttattattttatatatttatgaatttaggaacttttgcttgtattatcctatttggattacgtacaggaacagataatattcgtgattatagtggattaattttaaaagatccgttattaactttttctcttgctttatgcttattgtctttagggggtattccccctttatctggtttttttggaaaactttatttattttggtgtgcttggaaaactggtttatattttttagtttttattggtctttttacaagcgttatttctatatattattatttaaaaataattaaattattaattactacagaaaataaagaagtaacttcttatgtacaatcttacaccgtttcttctttttcgcttctctcaaaaaattcaattgaagttagtataattatatgtgtaattgcttctatatttttaggaatatttatgaatccaattattaacatccttcaaattaatttacatttaaacacttttacaaatatttaa

SEQ ID NO: 132050 - protein, 501 aa, Physcomitrella patens
MELELDLSFFYKTTILPECVLIFCLISILILDLILKIKDKNVFFFISLVSLLLSIFILIFQLKEEPVISFLGNFQADNFNKIFRIFIALCSILCIPLSIDFIKCTKLAITEFLIFLLTATIGGMFLCGANDLITIFVSLECLSLCSYLLSGYTKKDVRSNEAVMKYLLIGGTSSSILAYGFSWLYGLSGGEFQLQKIADGLVSTEMYNSFGSLLALVFIIVGIGFKLSLVPFHQWTPDVYEGSPTPVVAFLSVASKIAGLALLVRLFNIVFPFLPNQWHSLLEISAICSMILGNLVAITQTSMKRMLAYSSISQIGYLMIGLVTGNFDGYTSMIVYLLFYIFMNLGTFACIILFGLRTGTDNIRDYSGLILKDPLLTFSLALCLLSLGGIPPLSGFFGKLYLFWCAWKTGLYFLVFIGLFTSVISIYYYLKIIKLLITTENKEVTSYVQSYTVSSFSLLSKNSIEVSIIICVIASIFLGIFMNPIINILQINLHLNTFTNI

SEQ ID NO: 132051 - DNA, 1491 bp, Psilotum nudum
  CDS (1)..(1491)
atgaaagaaattgagtcgtttctcgtatatagtagttccattctaccggaatgtattttaatcttcagttcaatagggattctttccatagatttactttcacttcctaatgaaggagatacattttggtcttactcaatctcgttagcagccttagcaataagcataataatcttgctgcttcaatggaacaaagaacctgtcttgactttttccgaaactttccaaataagccgttttaacgatatctttcgattctttctcctaatctgttcattcttatgtatcccattatctgtggactacatacgatgtacaaagatgcccgtaacggaatttttactattcgtactaacagctaccctaggaggaatgtttttatgcggtgccaatgatttgataagtattttcgtagcatcagaatgtttagcgttatcttcctatttattatccggatatacaaagagagatgtacgatccaatgaagcgatgatgaaatacctcctcatgggtggagcaagttcttccatcctggtttatggtttttccttgccatacggtttatctggaggggaaattcaacttcgagggatggtgaatggacttatcaacatgcaaatgtataactctgcaggggtatctattgcaatgatctttatccttgtgggaattggatttaaactatctctggttccttttcatcaatggacgcccgatgtatatgaaggatcccccactccagttgttgcttttttttccgtcacttcgaaagtagctgctttggctctagctactcgacttttccatattttattctcatctctatcaaatgaatggcatcttcctctggaaatattggctattcttagtatgatcctaggaaatctaatagctgtcactcagacaagtatgaaacgtatgcttgcatattcttcaataagtcagattggatatattcttattggcatcattgctggagattcggacaatggatatgcaagcatgataacatacatgctaatttatatcttcatgaatttaggaacttttgcttgtatcacatcattcgggttacgtacagggaccgataacattcgagattatgcgggattgtataggaaagatcctattttaactctctctctagtcttatgtttactatccctgggtggtattccgcccctcgcgggttttttcggaaaactttatctattctggtgtggatggaaagcaggtctatacttcctggtctcaatagcacttttcaccagtgttatttctatttattactattcgaggataatcaaattactatttaccgaacggaacaaacgaataactatttatatgcaagattataagggttctccctattttctaataccaaataattcgattggaatcacaatgattctatgtacgatagcatctactgtaccaggaatattgataaatcccattattgcaattgcgcagaatactcttttttaa

SEQ ID NO: 132052 - protein, 496 aa, Psilotum nudum
MKEIESFLVYSSSILPECILIFSSIGILSIDLLSLPNEGDTFWSYSISLAALAISIIILLLQWNKEPVLTFSETFQISRFNDIFRFFLLICSFLCIPLSVDYIRCTKMPVTEFLLFVLTATLGGMFLCGANDLISIFVASECLALSSYLLSGYTKRDVRSNEAMMKYLLMGGASSSILVYGFSLPYGLSGGEIQLRGMVNGLINMQMYNSAGVSIAMIFILVGIGFKLSLVPFHQWTPDVYEGSPTPVVAFFSVTSKVAALALATRLFHILFSSLSNEWHLPLEILAILSMILGNLIAVTQTSMKRMLAYSSISQIGYILIGIIAGDSDNGYASMITYMLIYIFMNLGTFACITSFGLRTGTDNIRDYAGLYRKDPILTLSLVLCLLSLGGIPPLAGFFGKLYLFWCGWKAGLYFLVSIALFTSVISIYYYSRIIKLLFTERNKRITIYMQDYKGSPYFLIPNNSIGITMILCTIASTVPGILINPIIAIAQNTLF

SEQ ID NO: 132053 - DNA, 1533 bp, Saccharum officinarum
  CDS (1)..(1533): transl_table=11
atgatctggcatgtacagaatgaaaacttcattctcgattctacgagaatttttatgaaagcgtttcatttgcttctcttcaatggaagtttcattttcccagaatgtatcctaatttttggcctaattcttcttctgatgatcgatttaacctctgatcaaaaagatagaccttggttctatttcatctcttcaacaagtttagtaataagcataacggccctattgttccgatggagagaagaacctataattagcttttcgggaaatttccaaacgaacaatttcaacgaaatctttcaatttcttattttattatgttcaactttatgtattcctctatccgtagagtacattgaatgtacagaaatggctataacagagtttctgttattcgtattaacagctactctagggggaatgtttttatgtggtgctaacgatttaataactatctttgtagctccagaatgtttcagtttatgttcctacctattgtctggatataccaagagagatctacggtctaatgaggctactatgaaatatttactcatgggtggggcaagctcttctattctggttcatggtttctcttggctatatggttcatctgggggggagatcgagcttcaagaaattgtgaatggtcttatcaatacacaaatgtataactccccaggaatttcaattgcgcttatattcatcactgtaggacttgggttcaagctttccccagccccttttcatcaatggactcctgacgtctacgaaggatcccccactccagtcgttgcttttctttctgttacttcgaaagtagctgcttcagctttagccacgcgaattctcgatattcctttttatttctcatcaaacgaatggcatcttcttctggaaatcctagctattcttagcatgatattggggaatctccttgctattactcaaacaagcatgaaacgtatgcttgcatattcgtccatagggcaaatcggatatgtaattattggaataattgttggagactcaaatgatggatatgcaagcatgataacttatatgctgttctatatctccatgaatctaggaacttttgcttgcattgtattatttggtctacgtaccggaactgataacattcgagattatgcaggattatacacgaaagatccttttttggctctctctttagccctatgtctcttatccctaggaggccttcctccactagcaggtttcttcggaaaactctatctattctggtgtggatggcaagcaggcctatatttcttggtttcaataggactccttacgagcgttctttctatctactattatctaaaaataatcaagttattaatgactggacgaaaccaagaaataaccccttatgtgcgaaattatagaagatcccctttaagatcaaacaattccatcgaattgagtatgactgtatgtgtgatagcatctactataccaggaatatcaatgaaccccattcttgcaattgctcaggataccctcttttag

SEQ ID NO: 132054 - protein, 510 aa, Saccharum officinarum
MIWHVQNENFILDSTRIFMKAFHLLLFNGSFIFPECILIFGLILLLMIDLTSDQKDRPWFYFISSTSLVISITALLFRWREEPIISFSGNFQTNNFNEIFQFLILLCSTLCIPLSVEYIECTEMAITEFLLFVLTATLGGMFLCGANDLITIFVAPECFSLCSYLLSGYTKRDLRSNEATMKYLLMGGASSSILVHGFSWLYGSSGGEIELQEIVNGLINTQMYNSPGISIALIFITVGLGFKLSPAPFHQWTPDVYEGSPTPVVAFLSVTSKVAASALATRILDIPFYFSSNEWHLLLEILAILSMILGNLLAITQTSMKRMLAYSSIGQIGYVIIGIIVGDSNDGYASMITYMLFYISMNLGTFACIVLFGLRTGTDNIRDYAGLYTKDPFLALSLALCLLSLGGLPPLAGFFGKLYLFWCGWQAGLYFLVSIGLLTSVLSIYYYLKIIKLLMTGRNQEITPYVRNYRRSPLRSNNSIELSMTVCVIASTIPGISMNPILAIAQDTLF

SEQ ID NO: 132055 - DNA, 1533 bp, Solanum lycopersicum
  CDS (1)..(1533): transl_table=11
atgatctggcatgtacagaatgaaaacttcattctcgattctacgagaatttttatgaaagcctttcatttgcttctcttcgatggaagtttgattttcccagaatgtatcctaatttttggcctaattcttcttctgatgatcgattcaacctctgatcaaaaagatataccttggttatatttcatctcttcaacaagtttagtaatgagcataacggccctattgttccgatggagagaagaacctatgattagcttttcgggaaatttccaaacgaacaatttcaacgaaatctttcaatttcttattttactatgttcaactctatgtattcctctatccgtagagtacattgaatgtacagaaatggctataacagagtttctcttattcgtattaacagctactctagggggaatgtttttatgcggtgctaacgatttaataactatctttgtagccccagaatgtttcagtttatgctcctacctattatctggatataccaagaaagatgtacggtctaatgaggctactatgaaatatttactcatgggtggggcaagctcttctattctggttcatggtttctcttggctatatggttcatccgggggagagattgagcttcaagaaatagtaaacggtcttatcaatacacaaatgtataactccccaggaatttcaattgcgctcatattcattaccgtaggaattgggttcaagctttccccagccccttctcatcaatggactcctgacgtatacgaaggatctcccactccagtcgttgcttttctttctgttacttcgaaagtagctgcttcagcttcagccactcgaattttcaatattcctttttatttctcatcaaacgaatggcatcttcttctggaaatcctagctattcttagcatgatattgggaaatctcattgctattactcaaacaagcatgaaacgtatgcttgcatattcgtccataggccaaatcggatatgtaattattggaataattgttggagactcaaatgatggatatgcaagcatgataacttatatgctgttctatatctccatgaatctaggaacttttgcttgcattgtattatttggtctacgtaccggaactgataacattcgagattatgcaggattatacacaaaagatccttttttggctctctctttagccctatgtctcttatccctaggaggtcttcctccactagcaggttttttcggaaaactctatttattctggtgtggatggcaggcaggcctatatttcttggttttaataggactccttacaagcgttgtttctatctactattatctaaaaataatcaagttattaatgactggacgaaaccaagaaataacccctcacgtgcgaaattatagaagatcccctttaagatcaaacaattccatcgaattgagtatgattgtatgtgtgatagcatctactataccaggaatatcaatgaacccgattattgcaattgctcaggatagccttttttag

SEQ ID NO: 132056 - protein, 510 aa, Solanum lycopersicum
MIWHVQNENFILDSTRIFMKAFHLLLFDGSLIFPECILIFGLILLLMIDSTSDQKDIPWLYFISSTSLVMSITALLFRWREEPMISFSGNFQTNNFNEIFQFLILLCSTLCIPLSVEYIECTEMAITEFLLFVLTATLGGMFLCGANDLITIFVAPECFSLCSYLLSGYTKKDVRSNEATMKYLLMGGASSSILVHGFSWLYGSSGGEIELQEIVNGLINTQMYNSPGISIALIFITVGIGFKLSPAPSHQWTPDVYEGSPTPVVAFLSVTSKVAASASATRIFNIPFYFSSNEWHLLLEILAILSMILGNLIAITQTSMKRMLAYSSIGQIGYVIIGIIVGDSNDGYASMITYMLFYISMNLGTFACIVLFGLRTGTDNIRDYAGLYTKDPFLALSLALCLLSLGGLPPLAGFFGKLYLFWCGWQAGLYFLVLIGLLTSVVSIYYYLKIIKLLMTGRNQEITPHVRNYRRSPLRSNNSIELSMIVCVIASTIPGISMNPIIAIAQDSLF

SEQ ID NO: 132057 - DNA, 1533 bp, Solanum tuberosum
  CDS (1)..(1533): transl_table=11
atgatctggcatgtacagaatgaaaacttcattctcgattctacgagaatttttatgaaagcctttcatttgcttctcttcgatggaagtttgattttcccagaatgtatcctaatttttggcctaattcttcttctgatgatcgattcaacctctgatcaaaaagatataccttggttatatttcatctcttcaacaagtttagtactgagcataacggccctattgttccgatggagagaagaacctatgattagcttttcgggaaatttccaaacgaacaatttcaacgaaatctttcaatttcttattttactatgttcaactctatgtattcctctatccgtagagtacattgaatgtacagaaatggctataacagagtttctcttattcgtattaacagctactctagggggaatgtttttatgcggtgctaacgatttaataactatctttgtagccccagaatgtttcagtttatgctcctacctattatctggatataccaagaaagatgtacggtctaatgaggctactatgaaatatttactcatgggtggggcaagctcttctattctggttcatggtttctcttggctatatggttcatccgggggagagattgagcttcaagaaatagtaaacggtcttatcaatacacaaatgtataactccccaggaatttcaattgcgctcatattcattaccgtaggaattgggttcaagctttccccagccccttctcatcaatggactcctgacgtatacgaaggatctcccactccagtcgttgcttttctttctgttacttcgaaagtagctgcttcagcttcagccactcgaattttcgatattcctttttatttctcatcaaacgaatggcatcttcttctggaaatcctagctattcttagcatgatattgggaaatctcattgctattactcaaacaagcatgaaacgtatgcttgcatattcgtccataggccaaatcggatatgtaattattggaataattgttggagactcaaatgatggatatgcaagcatgataacttatatgctgttctatatctccatgaatctaggaacttttgcttgcattgtattatttggtctacgtaccggaactgataacattcgagattatgcaggattatacacaaaagatccttttttggctctctctttagccctatgtctcttatccctgggaggtcttcctccactagcaggttttttcggaaaactctatttattctggtgtggatggcaggcaggcctatatttcttggttttaataggactccttacaagcgttgtttctatctactattatctaaaaataatcaagttattaatgactggacgaaaccaagaaataacccctcacgtgcgaaattatagaagatcccctttaagatcaaacaattccatcgaattgagtatgattgtatgtgtgatagcatctactataccaggaatatcaatgaacccgattattgcaattgctcaggatagccttttttag

SEQ ID NO: 132058 - protein, 510 aa, Solanum tuberosum
MIWHVQNENFILDSTRIFMKAFHLLLFDGSLIFPECILIFGLILLLMIDSTSDQKDIPWLYFISSTSLVLSITALLFRWREEPMISFSGNFQTNNFNEIFQFLILLCSTLCIPLSVEYIECTEMAITEFLLFVLTATLGGMFLCGANDLITIFVAPECFSLCSYLLSGYTKKDVRSNEATMKYLLMGGASSSILVHGFSWLYGSSGGEIELQEIVNGLINTQMYNSPGISIALIFITVGIGFKLSPAPSHQWTPDVYEGSPTPVVAFLSVTSKVAASASATRIFDIPFYFSSNEWHLLLEILAILSMILGNLIAITQTSMKRMLAYSSIGQIGYVIIGIIVGDSNDGYASMITYMLFYISMNLGTFACIVLFGLRTGTDNIRDYAGLYTKDPFLALSLALCLLSLGGLPPLAGFFGKLYLFWCGWQAGLYFLVLIGLLTSVVSIYYYLKIIKLLMTGRNQEITPHVRNYRRSPLRSNNSIELSMIVCVIASTIPGISMNPIIAIAQDSLF

SEQ ID NO: 132059 - DNA, 1533 bp, Glycine max
  CDS (1)..(1533): transl_table=11
atgatctggcatgtacagaatgaaaacttcattctcgattctacaagaatttttatgaaagcctttcatttgcctctcttcgatggaagttttattttcccagaatgtatcctaatttttggcctaattcttcttctgatgattgattcaacctctgatcaaaaagatatatcttggttctattttatctcttcaacaagtttagtaatgagcataacggccctattgttccgatggagagaagaacctatgattagcttttcgggaaatttccaaacgaacaatttcaacgaaatctttcaatttcttattttactatgttcaactctatgtattcctctatccgtagagtacattgaatgtacagaaatggctataacagagtttctgttattcatattaacagctactctaggaggaatgtttttatgcggcgctaacgatttaataactatctttgtagctctagaatgtttcagtttatgttcctatctactatctggatataccaagaaagatgtacggtctaatgaggctactacgaaatatttactcatgggtggggcaagctcttctattctggttcatggtttctcttggctatatggttcatccgggggagagatcgagcttcaagaaatagtgaacggtcttatcaatacacaaatgtataactccccaggaattttaattgcacttttattcatcactgtaggaattgggttcaagctttccccagccccttctcatcaatggactcctgacgtatacgaaggatctcccactccagtcgttgcttttctttctgttacttcgaaagtagctgcttcagcttcagccactcgaattttcgatatccctttttatttctcatcaaacgaatggcatcttcttctggaaatcctagctattcttagcatgatattggggaatctcattgctattacccaaacaagcatgaaacgtatgcttgcgtattcgtccataggtcaaatcggatatgtaattattggaataattgttggagactcaaatggtggatatgcaagcatgataacttatatgctgttctatatctcgatgaatctaggaacttttgcttgcattgtatcatttggtctacgtaccggaactgataacattcgagattatgcaggattatacacgaaagatccttatttggctctctctttagccctatgtctcttatccttaggaggtcttcctccactatcaggttttttcggaaaacttcatttattctggtgtggatggcaggcaggcttatatttcttagtttcaataggactccttacgagtgttgtttctatctactattatttaaaaataatcaagttattaatgactggacgaaaccaagaaataactcctcacgtgcgaaattatcgaaggccccctttaagatcaaacaattccatcgaattaagtatgattgtatgtgtgatagcatctactataccaggaatatcaatgaaccctattattgaaattgctcaggatacccttttttag

SEQ ID NO: 132060 - protein, 510 aa, Glycine max
MIWHVQNENFILDSTRIFMKAFHLPLFDGSFIFPECILIFGLILLLMIDSTSDQKDISWFYFISSTSLVMSITALLFRWREEPMISFSGNFQTNNFNEIFQFLILLCSTLCIPLSVEYIECTEMAITEFLLFILTATLGGMFLCGANDLITIFVALECFSLCSYLLSGYTKKDVRSNEATTKYLLMGGASSSILVHGFSWLYGSSGGEIELQEIVNGLINTQMYNSPGILIALLFITVGIGFKLSPAPSHQWTPDVYEGSPTPVVAFLSVTSKVAASASATRIFDIPFYFSSNEWHLLLEILAILSMILGNLIAITQTSMKRMLAYSSIGQIGYVIIGIIVGDSNGGYASMITYMLFYISMNLGTFACIVSFGLRTGTDNIRDYAGLYTKDPYLALSLALCLLSLGGLPPLSGFFGKLHLFWCGWQAGLYFLVSIGLLTSVVSIYYYLKIIKLLMTGRNQEITPHVRNYRRPPLRSNNSIELSMIVCVIASTIPGISMNPIIEIAQDTLF

SEQ ID NO: 132061 - DNA, 1533 bp, Spinacia oleracea
  CDS (1)..(1533): transl_table=11
atgatctggcatgtacagaatgaaaacttcattctcgattctacgagaatttttatgaaagcctttcatttgcttctcttcgatggaagtttgatttttccagaatgtatcctaatttttggcctaattcttcttctgatgatcgattcaacctctgatcaaaaagatataccttggttatatttcatctcttcaacaagtttagtaatgagcataacagccctgttgttccgatggagagaagaacctatgattagcttttcaggaaatttccaaacgaacaatttcaacgaaatctttcaatttcttattttactatgttcaactctatgtattcctctatccgtagagtacattgaatgtacagaaatggctctaacagagtttctgttattcatattaacagctactctaggaggaatgtttttatgcggtgctaacgatttaataactatctttgtagctccagaatgtttcagtttatgctcctacctattatctggatataccaagaaagatgtacggtctaatgaggctactacgaaatatttactcatgggtggggcaagctcttctattctggttcatggtttctcttggctatatggttcatccggtggagagatcgagcttcaagaaatagtgaatggtcttatcaatacacaaatgtataactccccgggaatttcaattgcgcttatattcatcactgtaggaattgggttcaagctttccccagccccttctcatcaatggactcctgacgtatacgaaggatctcccactccagtcgttgcttttctttctgttacttcgaaagtagctgcttcagcttcagccactcgaattttcgatattcccttttatttctcatcaaacgaatggcatcttcttctggaaatcctagctattcttagcatgatattggggaatctcattgctattactcaaacaagcatgaaacgtatgcttgcatattcgtccataggtcaaatcggatatgtaattattggaataattgttggagactcaaatgatggatatgcaagcatgataacttatatgctgttctatatctccatgaatctaggaacttttgcttgcattgtattatttggtctacgtaccggaactgataacattcgagattatgcaggattatacacgaaagatccttttttggctctctctttagccctatgcctcttatccctggggggtcttcctccactagcaggttttttcggaaaaatctatttattctggtgtggatggcaggcaggcctatatttcttggttttaataggactccttacgagcgttctttctatctactattatctaaaaataatcaagttattaatgactggacgaaaccaagaaataacccctcacgtgcgaaattatagaagatcccctttaagatcaaagaattccatcgaattcagtatgattgtatgtgtgatagcatctactataccaggaatatcaatgaacccgattattacaattgctcaggatacccttttttag

SEQ ID NO: 132062 - protein, 510 aa, Spinacia oleracea
MIWHVQNENFILDSTRIFMKAFHLLLFDGSLIFPECILIFGLILLLMIDSTSDQKDIPWLYFISSTSLVMSITALLFRWREEPMISFSGNFQTNNFNEIFQFLILLCSTLCIPLSVEYIECTEMALTEFLLFILTATLGGMFLCGANDLITIFVAPECFSLCSYLLSGYTKKDVRSNEATTKYLLMGGASSSILVHGFSWLYGSSGGEIELQEIVNGLINTQMYNSPGISIALIFITVGIGFKLSPAPSHQWTPDVYEGSPTPVVAFLSVTSKVAASASATRIFDIPFYFSSNEWHLLLEILAILSMILGNLIAITQTSMKRMLAYSSIGQIGYVIIGIIVGDSNDGYASMITYMLFYISMNLGTFACIVLFGLRTGTDNIRDYAGLYTKDPFLALSLALCLLSLGGLPPLAGFFGKIYLFWCGWQAGLYFLVLIGLLTSVLSIYYYLKIIKLLMTGRNQEITPHVRNYRRSPLRSKNSIEFSMIVCVIASTIPGISMNPIITIAQDTLF

SEQ ID NO: 132063 - DNA, 1542 bp, Staurastrum punctulatum
  CDS (1)..(1542)
atggaaactaatcagttattttcattagacaatctaattactattttacctgagtgtgttttaatcatctgtttattaacaattttaatgatcgatgttatcactaaaaaatcagtatggttatctaatatagctttactaggtcttttaacaagtacattcattttactttttcaattaacaaataatgaagttggttttactgcttttttaggtagttttcaagtagatggttttactatagcatttcgttgtcttttaactttatcatcagctctttgtattcctttatctacagaatatattcgtcgttctggaatgactcaagctgaatttttaattttgttattaactgcaaccttagggggaatgtttctctgcggtgcaaatgatcttgttaccatctttgtatctcttgaatgtcttagtctctcttcttatttattagctggacaagctaagaaagatatacgttcgaacgaagcttctcttaaatatttattaatgggaggggcaagttcttcaatacttgtttatggcttttcctggttatatggcctttcaggaggagaattgcagctttctaaaatagtaaatggaataagcagtcaagacatttatctatcatccgcagtaagtctcgatgggaaaactttcggggcacttggcctttgggttgcttttgtttgtattcttgtcggaataggctttaaaatttcagcggttccttttcatcaatggactccagatgtttatgaaggatctcctactcccgtagttgcatttctttctgttgggtcaaaagcagctggattagcgcttgctactcgactattaagtattgtttttcctgcaattgaagatcaatggcatatagttctagaaatagtagctttccttagtatggtttttgggaacttaattgctgcaacacaaacaagtatgaaacggatgctagcttattcttctattagtcaagctggttatttactaattgccattttagttggaaattctgatggatatgctagtatgattacgtatctgctaatctatacttttatgaatttgggtgcttttgcttgtacggttatttttggtttacgtactggtacagatcaaatacgtgattatacaggattatatcttaaagatccctggttagcatttgctcttagtatatgtttattatctttagctggtatgcctccgttagctggtttttttggaaaattgtatttattctggtgtggttggcaatctcatttatatttacttgtttatacaggtcttattacaagtgtaatttctttatattactatctacgagtagtgaaagcaatgatgacaaaagaagtaaaagaaatgtcgacttatgtacgagaatatgttactccttctatgtctattttttcttcaagttcaattgaattaggtcttactttatgtgtactagcttcaagtattttaggtttttttatgaatcctcttattgatgtaactaagcaaagtatgctagtgaataattttcttgttttttaa

SEQ ID NO: 132064 - protein, 513 aa, Staurastrum punctulatum
METNQLFSLDNLITILPECVLIICLLTILMIDVITKKSVWLSNIALLGLLTSTFILLFQLTNNEVGFTAFLGSFQVDGFTIAFRCLLTLSSALCIPLSTEYIRRSGMTQAEFLILLLTATLGGMFLCGANDLVTIFVSLECLSLSSYLLAGQAKKDIRSNEASLKYLLMGGASSSILVYGFSWLYGLSGGELQLSKIVNGISSQDIYLSSAVSLDGKTFGALGLWVAFVCILVGIGFKISAVPFHQWTPDVYEGSPTPVVAFLSVGSKAAGLALATRLLSIVFPAIEDQWHIVLEIVAFLSMVFGNLIAATQTSMKRMLAYSSISQAGYLLIAILVGNSDGYASMITYLLIYTFMNLGAFACTVIFGLRTGTDQIRDYTGLYLKDPWLAFALSICLLSLAGMPPLAGFFGKLYLFWCGWQSHLYLLVYTGLITSVISLYYYLRVVKAMMTKEVKEMSTYVREYVTPSMSIFSSSSIELGLTLCVLASSILGFFMNPLIDVTKQSMLVNNFLVF

SEQ ID NO: 132065 - DNA, 1533 bp, Vitis vinifera
  CDS (1)..(1533): transl_table=11
atgatctggcatatacagaatgaaaacttcattctcgattctacgagaatttttatgaaagcctttcatttgcttctcttcgatggaagttttattttcccagaatgtatcctaatttttggcctaattcttcttctgatgatcgattcaacctctgatcaaaaagatataccttggttatatttcatctcttcaacaagtttagtaatgagcataacggccctattgttccgatggagagaagaacctatgattagcttttcgggaaatttccaaacgaacaatttcaacgaaatctttcaatttcttattttactatgttcaactctatgtattcctctatccgtagagtacattgaatgtacagaaatggctataacagagtttctcttattcgtattaacagctactctaggaggaatgtttttatgcggtgctaacgatttaataactatctttgtagctccagaatgtttcagtttatgctcctacctattatctggatataccaagaaagatgtacggtctaatgaggctactacgaaatatttactcatgggtggggcaagttcttctattctggttcatggtttctcttggctatatggttcatccgggggagagatcgagcttcaagaaatagtgaatggtcttatcaatacacaaatgtataactccccaggaatttcaattgcgcttatattcatcactgtaggaattgggttcaagctttccccagccccttctcatcaatggactcctgacgtatacgaaggatctcccactccagtcgttgcttttctttctgttacttcgaaagtagctgcttcagcttcagccactcgaattttcgatattcctttttatttctcatcaaacgaatggcatcttcttctggaaatcctagctattcttagcatgatattggggaatctcattgctattactcaaacaagcatgaaacgtatgcttgcatattcgtccataggtcaaatcggatatgtaattattggaataattgttggagactcaaatggtggatatgcaagcatgataacttatatgctgttctatatctccatgaatctaggaacttttgcttgcattgtatcatttggtctacgtaccggaactgataacattcgagattatgcaggattatacacgaaagatccttttttggctctctctttagccctatgtctcttatccctaggaggtcttcctccactagcaggttttttcggaaaactccatttattctggtgtggatggcaggcaggcctatatttcttggtttcaataggactccttacgagcgttgtttctatctactattatctaaaaataatcaagttattaatgactggacgaaaccaagaaataacccctcacgtgcgaaattatataagatctcctttaagatcaaacaattccatcgaattgagtatgattgtatgtgtgatagcatctactataccaggaatatcaatgaacccgattattgcaattgctcaggatacccttttttag

SEQ ID NO: 132066 - protein, 510 aa, Vitis vinifera
MIWHIQNENFILDSTRIFMKAFHLLLFDGSFIFPECILIFGLILLLMIDSTSDQKDIPWLYFISSTSLVMSITALLFRWREEPMISFSGNFQTNNFNEIFQFLILLCSTLCIPLSVEYIECTEMAITEFLLFVLTATLGGMFLCGANDLITIFVAPECFSLCSYLLSGYTKKDVRSNEATTKYLLMGGASSSILVHGFSWLYGSSGGEIELQEIVNGLINTQMYNSPGISIALIFITVGIGFKLSPAPSHQWTPDVYEGSPTPVVAFLSVTSKVAASASATRIFDIPFYFSSNEWHLLLEILAILSMILGNLIAITQTSMKRMLAYSSIGQIGYVIIGIIVGDSNGGYASMITYMLFYISMNLGTFACIVSFGLRTGTDNIRDYAGLYTKDPFLALSLALCLLSLGGLPPLAGFFGKLHLFWCGWQAGLYFLVSIGLLTSVVSIYYYLKIIKLLMTGRNQEITPHVRNYIRSPLRSNNSIELSMIVCVIASTIPGISMNPIIAIAQDTLF

SEQ ID NO: 132067 - DNA, 1065 bp, Asterina pectinifera
  CDS (1)..(1065): transl_table=9
atgcatcgtaaaattttgatggtattaattgctaatgtggtattggggactctaattgtcttgaggagacaccattggtttaccttgtgggtgggacttgaaatgaatactttgtctatattgccgattctttcttatcagtttactcctcgtaaagttgagtcgtcggtaaagtattttttagttcaatctgttagagctgggattgtattgaatgttgtgattattcaggcttggttatattcttcttggtctttgatggagcctttaaaacaggctacttcctttttgatgaccttggctttagggcttaagctgggcttgtttccttgtcactattgatttcctgatgttattcaaggagttgggtttatacagggcttggttctatctacttggcaaaagatagcaccgtttgctgttcttgtctatgtggtagaaagattaaatataagtttattggctagtttaggagtattgtcggtccttgtaggagggtgaggaggtttaaatcagactcaaatgcggaagatatttgccttttcttctatagctcatattggttgaatttgtagcacagttggatattctgttagagttgcgtgcgttatgctggttgcttacataataataaactcttcggttttttttatggctaaaagttttgatttaaagtctttatctcatgtgggccgtttatccctttataattttgtggggggagccgggctggttttgagaatcttatctttaggggggttgccgcccctttttgggtttttgataaagtttatatctttaaagtgcttagttgagaaaggatgcttcattttagctggggttttggttatgggtagattgttaaggttgtttttttatcttcgaatagcctttaaaaggagtttgactttgtttccacaacattcgttagtagtttttaggtgacgtagaaatcgcaatcaaactggggggtttacctctgaaggtgtgttgttgagagtaagatttggaataagatcattgggtttagtttgtttacctgtgtttatatcattattaaaataa

SEQ ID NO: 132068 - protein, 354 aa, Asterina pectinifera
MHRNILMVLIANVVLGTLIVLSSHHWFTLWVGLEMNTLSILPILSYQFTPRNVESSVKYFLVQSVSAGIVLNVVIIQAWLYSSWSLMEPLNQATSFLMTLALGLKLGLFPCHYWFPDVIQGVGFIQGLVLSTWQKIAPFAVLVYVVESLNISLLASLGVLSVLVGGWGGLNQTQMRKIFAFSSIAHIGWICSTVGYSVSVACVMLVAYIIINSSVFFMANSFDLKSLSHVGRLSLYNFVGGAGLVLSILSLGGLPPLFGFLIKFISLKCLVENGCFILAGVLVMGSLLSLFFYLRIAFNSSLTLFPQHSLVVFSWRSNRNQTGGFTSEGVLLSVSFGISSLGLVCLPVFISLLN

SEQ ID NO: 132069 - DNA, 1440 bp, Rhizobium meliloti
  CDS (1)..(1440): transl_table=11
atgactgctgccgcgcttctccaatgggccttggcgagcgtccccgagatcatcgtggtcaccggtgcctgcgtcctgctgattgtcggagagcttgtgcgcaagggacgcgacgatctgctcctgtgggcttcagtagcgatcgtgctcctcgccgcggtagccacgctcatgctggcaggcgagatgcggccagcctatgcgggcatgttcatttccgaccgcttcgccgtcttcttcaagttggtgttttatctggcgaccatcctgaccttcttcctgtcgcggaaatacgccgagatagaggggatcggcaggagcgaatattatgtcctgctgctctttgcccttgtgggaatgatgatcatggcctcggcgatcgacctcctgtcgatctatgtgggtctcgagttgatggtgctctgcacctatgtgctgacaggcttcctgcgcaaagagcggcggtcgaacgaggcggcgttgaaatatgtgatcctcggcgcggtctcgacggcgattttcctttatggagtctcgctcatctacgggctcactggtacgacccagctggaccggatggctgaggcggtgagcggcggtccgctcgatcccgccctgctgctggcggtcgttttcatcgttgcggggctggtcttcaagatcggcgccgtgccgttccatatgtgggtgccggatgtctatgaaggcgcgccgacgacgatcaccgccttcatgtcggtcgcgcccaaggcggccggattcgcggtgattctccgggtgttcctcaatccgcttgtcgaagcttcgaacgcctggatcatcgtcgcggccattgcggtggcaacgatggcgctcggcagtttcgtcgcgcttgtgcaggataatttcaagcgcctgctcgcctattccagcatcgcccatgccggtttcgccattttcggagtggtggccggcggccaggacgggatcgccagcgtaatgctctatctgctcatctacactttcatgaatctcggcattttcggcgcggtgatcatgatgcggaacggcgatttttccggcgaagtcatcgaagactacgcgggtttcgccaagttccatcccggactcgcgcttctgatgctcctttatctcttctcgctcgccggcattccgccgacggccgggttcttcgccaagttctatgtgctggtcgcgctggtcgagcgcggtttcgtcgcgctggcggtgatcgcagtcctgctcagcgtcgtctccgcctatttctatatccgcatcgtgatggtgatctacatgcgcgagccggaaagggcgttcgaacctgcgttgacgccgctcgtcagcgccacgctcgccttcaccgccgccggcaccatcggcatcggcctgtttccggcgtggttcctgaggcttgctcaacagtcggctttcggcgggtaa

SEQ ID NO: 132070 - protein, 479 aa, Rhizobium meliloti
MTAAALLQWALASVPEIIVVTGACVLLIVGELVRKGRDDLLLWASVAIVLLAAVATLMLAGEMRPAYAGMFISDRFAVFFKLVFYLATILTFFLSRKYAEIEGIGRSEYYVLLLFALVGMMIMASAIDLLSIYVGLELMVLCTYVLTGFLRKERRSNEAALKYVILGAVSTAIFLYGVSLIYGLTGTTQLDRMAEAVSGGPLDPALLLAVVFIVAGLVFKIGAVPFHMWVPDVYEGAPTTITAFMSVAPKAAGFAVILRVFLNPLVEASNAWIIVAAIAVATMALGSFVALVQDNFKRLLAYSSIAHAGFAIFGVVAGGQDGIASVMLYLLIYTFMNLGIFGAVIMMRNGDFSGEVIEDYAGFAKFHPGLALLMLLYLFSLAGIPPTAGFFAKFYVLVALVERGFVALAVIAVLLSVVSAYFYIRIVMVIYMREPERAFEPALTPLVSATLAFTAAGTIGIGLFPAWFLRLAQQSAFGG

SEQ ID NO: 132071 - DNA, 1461 bp, Pseudomonas aeruginosa
  CDS (1)..(1461): transl_table=11
atgacctttacgatccaacacttcatcgcgctcctgccactgctgatcaccagcgccaccctggtggtggtgatgctggcggtagcctggaaacgcaatcactcgttcaccgccaccctctcggtgatcggcctcaacctggccctgctgtcgctgctgccggtcctcggcgtcaccccgatcgaggtgacaccgctggtgctggtggacaactacgcctgcttctacatggccctggtgctggtctccgccctggcctgcgtgaccctcgcccacgcctacatggaaagctatccgggtaaccgcgaagagctgtacctgctcctgctgctggccaccgccggcggcctggtgctggtcagcgcgcagcacctggccagcctgttcatcggcctggagctgctctcggtcccggtctacgggatggtcgcctacgccttcttcaacaagcgctcgctggaagccggcatcaagtacaccgtgctctcggccgccggctccgccttcctgctgttcggcatggccctgctctacgccgagtccggtaccctgggcttcgccggccttggcgccaaggtcgccgagcacgtgctgagcggcccgctggtcagcgttggcgtaggcatgatgctggtcggcctgggcttcaagctgtcgctggtgcccttccacctgtggaccccggatgtctacgaaggcgccccggcgccggtctcggcgttcctcgccaccgccagcaaggtcgcggtgttcgccgtgctgctgcggctgttccagatcgccccggcggccctggacaaccaactgctgaacatctccctgagcgtcatcgcggtcgcctcgatcctcttcggcaacctgctggcactgacccagagcaacatcaagcgcctgctcggctactcgtccatcgcccacctgggctacctgctggtcgccctgatcgccagcaagggcatggccgtggaagcggtcggcgtctacctggctacctacgtactgacctccctcggcgcgttcggcgtgatcaccctgatgtccaccccgtacagcggccgcgacgccgatgcgctgttcgagtaccgcggcttgttctggcgccggccggtactgaccgcggtgatgaccgtgatgatgctgtcgctggcaggcatcccgctgaccgccggcttcatcggcaagttctacgtgatcgcggtcggcgtcgagtcgcacctgtggtggctgatcggcgccctggtgctgggcagcgccatcggcctgtactactacctgcgggtcatggtcaccctgttcctggtcgagcccggcatccgccagcacgacgcaccgttcaactggggccagcgcgccggcggcatcatgctggtcgccatcgccctgctggcgttcttcctcggcgtctacccgcagccgctgctggaaatcctccagcattccggcctggccctcgccggctga

SEQ ID NO: 132072 - protein, 486 aa, Pseudomonas aeruginosa
MTFTIQHFIALLPLLITSATLVVVMLAVAWKRNHSFTATLSVIGLNLALLSLLPVLGVTPIEVTPLVLVDNYACFYMALVLVSALACVTLAHAYMESYPGNREELYLLLLLATAGGLVLVSAQHLASLFIGLELLSVPVYGMVAYAFFNKRSLEAGIKYTVLSAAGSAFLLFGMALLYAESGTLGFAGLGAKVAEHVLSGPLVSVGVGMMLVGLGFKLSLVPFHLWTPDVYEGAPAPVSAFLATASKVAVFAVLLRLFQIAPAALDNQLLNISLSVIAVASILFGNLLALTQSNIKRLLGYSSIAHLGYLLVALIASKGMAVEAVGVYLATYVLTSLGAFGVITLMSTPYSGRDADALFEYRGLFWRRPVLTAVMTVMMLSLAGIPLTAGFIGKFYVIAVGVESHLWWLIGALVLGSAIGLYYYLRVMVTLFLVEPGIRQHDAPFNWGQRAGGIMLVAIALLAFFLGVYPQPLLEILQHSGLALAG

SEQ ID NO: 132073 - DNA, 1458 bp, Salmonella paratyphi
  CDS (1)..(1458): transl_table=11
atgacaataactccacaacacctgattgcgctgctaccgctgctgatcgtcggcttgacggtggtggttgtgatgctctccattgcgtggcgacgcaatcacttcctcaatgccacgctgtcggtcattgggcttaacgctgctctggtttcgctttggtttgtcggccaggccggggcaatggacgtcacgccgctgatgcgcgttgacggctttgcgatgctctacaccgggctggtgctgctggcgagcctcgccacctgtacctttgcctacccgtggctggaaggctataacgataaccaggaagagttctacctgctggtgttaatcgccagcctggggggaattctgctggcgaacgccaaccatctggcgacgctgttcctcggtattgaactgatctcactgccgctgttcggcctgattggttatgctttccgccagaaacgctcgctggaagccagtatcaaatacaccatcctctccgccgccgcctcgtctttcctgctgttcgggatggcgctggtctatgcgcagtccggcaacctgtctttcgaagcgctcggtaagagcctcggcgatggtatgctgcacgagccgttgctgctggcgggctttggcctgatgattgtcggtccgggctttaaactctctctggtgccgttccacctgtggacgccagacgtttaccagggcgcgcctgcgccggtttctaccttcctggcgacggcgagcaaaatcgctatcttcggcgtggtaatgcgtctgttcctgtatgcgccggtaggcgacagcgaagcggtacgcgtggtgctgggcattatcgcctttgcctctatcatcttcggtaacctgatggcgctgagccagaccaacatcaaacgtctgctcggttactcttctatctctcacctcggctatctgctggtggcgctgattgccctgcagagcggcgagatgtcgatggaagcggtaggcgtttatctggccggttatctgttcagcagcctcggcgcgtttggcgtggtcagcctgatgtccagcccgttccgcggcccggatgccgactccctgtactcttaccgtggtctgttctggcaccgtccggttcttgccgcggtgatgacggtgatgatgctgtcgctggcaggtatcccaatgacgctgggctttatcggcaaattctacgtgctggcggtcggcgttcaggccagcctgtggtggctggtcgccgccgtggtggtgggttccgcgattggtttgtactactacctgcgcgttgcggtgagtctctacctgcacgcgccgcagcaaccgggacgcgacgcgccgacaaactggcagtacagcgcaggcggtatcgtggtgctgatctccgcgttgctggtgttggtactgggcgtctggccgcagccgctgattagccttgtgcagttagcgacgccgttgatgtaa

SEQ ID NO: 132074 - protein, 485 aa, Salmonella paratyphi
MTITPQHLIALLPLLIVGLTVVVVMLSIAWRRNHFLNATLSVIGLNAALVSLWFVGQAGAMDVTPLMRVDGFAMLYTGLVLLASLATCTFAYPWLEGYNDNQEEFYLLVLIASLGGILLANANHLATLFLGIELISLPLFGLIGYAFRQKRSLEASIKYTILSAAASSFLLFGMALVYAQSGNLSFEALGKSLGDGMLHEPLLLAGFGLMIVGPGFKLSLVPFHLWTPDVYQGAPAPVSTFLATASKIAIFGVVMRLFLYAPVGDSEAVRVVLGIIAFASIIFGNLMALSQTNIKRLLGYSSISHLGYLLVALIALQSGEMSMEAVGVYLAGYLFSSLGAFGVVSLMSSPFRGPDADSLYSYRGLFWHRPVLAAVMTVMMLSLAGIPMTLGFIGKFYVLAVGVQASLWWLVAAVVVGSAIGLYYYLRVAVSLYLHAPQQPGRDAPTNWQYSAGGIVVLISALLVLVLGVWPQPLISLVQLATPLM

SEQ ID NO: 132075 - DNA, 1458 bp, Salmonella typhimurium
  CDS (1)..(1458): transl_table=11
atgacaataactccacaacacctgattgcgctgctaccgctgctgatcgtcggcttgacggtggtggttgtgatgctctccattgcgtggcgacgcaatcacttcctcaatgccacgctgtcggtcattgggcttaacgctgctctggtttcgctttggtttgtcggccaggccggggcaatggacgtcacgccgctgatgcgcgttgacggctttgcgatgctctacaccggactggtgctgctggcgagcctcgccacctgtacctttgcctacccgtggctggaaggctataacgataaccaggaagagttctacctgctggtgttaatcgccagcctgggcggaattctgctggcgaacgccaaccatctggcggcgctgttcctcggtattgaactgatctcactgccgctgttcggcctgattggttatgctttccgccagaaacgctcgctggaagccagtatcaaatacaccatcctctccgccgccgcctcgtctttcctgctgttcgggatggcgctggtctatgcgcagtccggcaacctgtctttcgaagcgctcggtaagagcctcggcgatggtatgctgcacgagccgttgctgctggcgggctttggcctgatgattgtcggtctgggctttaaactctctctggtgccgttccacctgtggacgccagacgtttaccagggcgcgcctgcgccggtttctaccttcctggcgacggcgagcaaaatcgctatcttcggcgtggtgatgcgtctgttcctgtatgcgccggtaggcgacagcgaagcggtacgcgtggtgctgggcattatcgcctttgcctctatcatcttcggtaacctgatggcgctgagccagaccaacatcaaacgtctgctcggttactcttctatctctcacctcggctatctgctggtggcgctgattgccctgcagagcggcgagatgtcgatggaagcggtaggcgtttatctggccggttatctgttcagcagcctcggcgcgtttggcgtggtcagcctgatgtccagcccgttccgcggcccggatgcggattctctgtactcttaccgtggtctattctggcaccgcccggttcttgccgcggtgatgacggtgatgatgctgtcgctggcaggtatcccgatgacgctgggctttatcggcaaattctacgtgctggcggtcggcgttcaggccagcctgtggtggctggtcgccgccgtggtagtgggttccgcgattggtttgtactactacctgcgtgttgcggtgagtctctacctgcacgcgccgcagcaaccgggacgcgacgcgccgacaaactggcagtacagcgcaggcggtatcgtggtgctgatctccgcgttgctggtgttggtactgggcgtctggccgcagccgctgattagccttgtgcaactggcgatgccgctgatgtaa

SEQ ID NO: 132076 - protein, 485 aa, Salmonella typhimurium
MTITPQHLIALLPLLIVGLTVVVVMLSIAWRRNHFLNATLSVIGLNAALVSLWFVGQAGAMDVTPLMRVDGFAMLYTGLVLLASLATCTFAYPWLEGYNDNQEEFYLLVLIASLGGILLANANHLAALFLGIELISLPLFGLIGYAFRQKRSLEASIKYTILSAAASSFLLFGMALVYAQSGNLSFEALGKSLGDGMLHEPLLLAGFGLMIVGLGFKLSLVPFHLWTPDVYQGAPAPVSTFLATASKIAIFGVVMRLFLYAPVGDSEAVRVVLGIIAFASIIFGNLMALSQTNIKRLLGYSSISHLGYLLVALIALQSGEMSMEAVGVYLAGYLFSSLGAFGVVSLMSSPFRGPDADSLYSYRGLFWHRPVLAAVMTVMMLSLAGIPMTLGFIGKFYVLAVGVQASLWWLVAAVVVGSAIGLYYYLRVAVSLYLHAPQQPGRDAPTNWQYSAGGIVVLISALLVLVLGVWPQPLISLVQLAMPLM

SEQ ID NO: 132077 - DNA, 1458 bp, Shigella flexneri
  CDS (1)..(1458): transl_table=11
atgacaataactccacaaaacctgatcgcactgctaccgttgctgatcgtcggcttgacggtggtggttgtgatgctctccattgcgtggcgacgcaatcatttcctcaacgctacgctctcggttattgggcttaacgcggcgctggtttcgctctggtttgttggccaggcgggcgctatggacgttacgccgctgatgcgcgttgatggtttcgccatgctttacaccgggctggtattgttggcgagcctcgccacctgtactttcgcctacccgtggcttgaaggctataacgacaacaaggatgagttctacctgttggtgttaattgccgcgctgggcgggatcctgctggcgaatgcaaaccatctggcgtctctgttcctcggtattgaactgatctctttgccgctgtttggcctggtcggttacgctttccgccagaaacgttcgctggaagccagtatcaaatacaccatcctttctgccgcagcgtcttctttcctgctgttcggtatggcgctggtgtatgcgcagtctggcgacctgtcgtttgtcgcgctgggtaaaaacctcggcgacggtatgctcaacgagccgctgttgctggcaggtttcggcatgatgattgttggcctcggcttcaaactctctctggtgccgttccacctgtggacgccagacgtataccagggcgcgcctgcgccggtttccactttcctggcgacggcgagcaaaatcgctatcttcggtgtggtgatgcgtctgttcctctacgcaccggtgggtgacagcgaagcgattcgcgtagtactggcgattatcgcctttgcctccatcatcttcggtaacctgatggcgttgagccagaccaacatcaaacgtctgctcggttactcatctatctctcacctcggctatctgctggtggcgctgattgcgctgcaaaccggcgagatgtcgatggaagcggtaggggtttacctggccggttatctgttcagcagcctcggcgcgttcggcgtggtcagcctgatgtccagcccgtatcgtggcccggatgctgattccctgttctcttaccgcggtctgttctggcatcgtccgatcctcgcggcagtgatgacggtgatgatgctgtctctggccggtatcccgatgacgctgggctttatcggtaagttctacgtgctggcggtcggtgtccaggcacacttgtggtggctggtgggtgccgtggttgtcggttcggcaatcggcctctactactacctgcgcgtggcggtgagcctgtacctgcacgcaccggaacaaccgggtcgcgatgcaccgtcaaactggcagtacagcgcgggcggtatcgtggtgctgatttctgcactgttggtactggtgctgggtgtatggccacaaccgctgattagtattgtgcggttagcaatgccgctgatgtaa

SEQ ID NO: 132078 - protein, 485 aa, Shigella flexneri
MTITPQNLIALLPLLIVGLTVVVVMLSIAWRRNHFLNATLSVIGLNAALVSLWFVGQAGAMDVTPLMRVDGFAMLYTGLVLLASLATCTFAYPWLEGYNDNKDEFYLLVLIAALGGILLANANHLASLFLGIELISLPLFGLVGYAFRQKRSLEASIKYTILSAAASSFLLFGMALVYAQSGDLSFVALGKNLGDGMLNEPLLLAGFGMMIVGLGFKLSLVPFHLWTPDVYQGAPAPVSTFLATASKIAIFGVVMRLFLYAPVGDSEAIRVVLAIIAFASIIFGNLMALSQTNIKRLLGYSSISHLGYLLVALIALQTGEMSMEAVGVYLAGYLFSSLGAFGVVSLMSSPYRGPDADSLFSYRGLFWHRPILAAVMTVMMLSLAGIPMTLGFIGKFYVLAVGVQAHLWWLVGAVVVGSAIGLYYYLRVAVSLYLHAPEQPGRDAPSNWQYSAGGIVVLISALLVLVLGVWPQPLISIVRLAMPLM

SEQ ID NO: 132079 - DNA, 1464 bp, Yersinia pestis
  CDS (1)..(1464): transl_table=11
atgacaataactcctcaacaactgatcgcaatgctaccgctgttgatcgtcggattgacggtggtggttgtgatgctgtccattgcgtggcgacgcgatcattttattaatgccacactgaccgtcattgggcttaatctggcgctgctgtcactttactttgttggacaggtcgggccgatggatgtcactccgctgatgcgggttgacggctattcgatgttctacaccgggctggtgattatcgccagcttggcgaccagcacgtttgcttacccttggttggtcggctacccggataaccgcgaagagttctatctgctggtgctgattgcggctttgggcggtattctgctcgccagtgccaatcatctggcgtcgctgttcttgggtattgaattgcttactttgccgctgtttggtctgattggttatgcctatcgccagaagcgttcactggaagccagtatcaaatacatgctgttgtcggcggcggcatcgtcattcctgctgttcggtatggcgctgttgtatgctgagtccggtagcctgtccttcgtagggttgggccagagcctaagtgactcgatggtgcaccaaccgctgattctggcgggtctgggcatgatgattgttggcctcggctttaaactgtcgttggtaccgttccaattgtggacacccgatgtgtatcagggcgcacccgcgccagtttccacgttcctggcgaccgccagcaagattgctatctttgccgtagtgatgcgcttgtttatgtacgcaccggcggcggatagcgaagccgtgcgtttggttctgtcgattattgcggtggcctcgatcctgtttggcaacctgatggcgatcagccagaccaacatcaaacgcctgttgggttactcctctattgcccaccttggttatttgctgattgcattggtcgcagtacaaacacacgagctcgcattaccgctggaaaccatcggggtgtatctggcggggtatctgttcagtagcctgggggcatttggcgtcgttagcctgatgtccagcccgtacaaaggcccagatgcagaatccctgttctcttaccgtggcttgttctggcataagcctattctgtctgcggtgatgacagtgatgatgttgtcactggccggtatcccaatgacactgggctttatcggtaaattctttgtggtggcaatgggggtcagcgccaacttgtggtggttgactggcgcggtggtgttaggcagtgccatcggcttgtactattatctgcgcgttaccgtcagtttgttcctcagcccgccgcagagcttagtacgtgataccccgagcaactgggcattaacggccggtggtgtggtggtactgatctccgcgattttggtactggtgttgggtatctatccgcaaccgttgataacactggtgcagatggctcagcccttgatgtga

SEQ ID NO: 132080 - protein, 487 aa, Yersinia pestis
MTITPQQLIAMLPLLIVGLTVVVVMLSIAWRRDHFINATLTVIGLNLALLSLYFVGQVGPMDVTPLMRVDGYSMFYTGLVIIASLATSTFAYPWLVGYPDNREEFYLLVLIAALGGILLASANHLASLFLGIELLTLPLFGLIGYAYRQKRSLEASIKYMLLSAAASSFLLFGMALLYAESGSLSFVGLGQSLSDSMVHQPLILAGLGMMIVGLGFKLSLVPFQLWTPDVYQGAPAPVSTFLATASKIAIFAVVMRLFMYAPAADSEAVRLVLSIIAVASILFGNLMAISQTNIKRLLGYSSIAHLGYLLIALVAVQTHELALPLETIGVYLAGYLFSSLGAFGVVSLMSSPYKGPDAESLFSYRGLFWHKPILSAVMTVMMLSLAGIPMTLGFIGKFFVVAMGVSANLWWLTGAVVLGSAIGLYYYLRVTVSLFLSPPQSLVRDTPSNWALTAGGVVVLISAILVLVLGIYPQPLITLVQMAQPLM

SEQ ID NO: 132081 - DNA, 22 bp, Artificial sequence
  primer
atggacgttacgccgctgatgc

SEQ ID NO: 132082 - DNA, 23 bp, Artificial sequence
  primer
ttacatcagcggcattgccaaac

SEQ ID NO: 132083 - protein, 424 aa, Artificial sequence
  consensus sequence
  Variant (2)..(18): Xaa in position 2 to 18 is any amino acid
  Variant (19)..(21): Xaa in position 19 to 21 is any or no amino acid
  Variant (23)..(41): Xaa in position 23 to 41 is any amino acid
  Variant (42)..(48): Xaa in position 42 to 48 is any or no amino acid
  Variant (50)..(51): Xaa in position 50 to 51 is any amino acid
  Variant (54)..(65): Xaa in position 54 to 65 is any amino acid
  Variant (66)..(66): Xaa in position 66 is any or no amino acid
  Variant (68)..(68): Xaa in position 68 is any amino acid
  Variant (69)..(71): Xaa in position 69 to 71 is any or no amino acid
  Variant (73)..(73): Xaa in position 73 is any amino acid
  Variant (74)..(75): Xaa in position 74 to 75 is any or no amino acid
  Variant (77)..(94): Xaa in position 77 to 94 is any amino acid
  Variant (95)..(123): Xaa in position 95 to 123 is any or no amino acid
  Variant (126)..(129): Xaa in position 126 to 129 is any amino acid
  Variant (131)..(131): Xaa in position 131 is any amino acid
  Variant (133)..(133): Xaa in position 133 is any amino acid
  Variant (135)..(135): Xaa in position 135 is any amino acid
  Variant (139)..(140): Xaa in position 139 to 140 is any amino acid
  Variant (142)..(142): Xaa in position 142 is any amino acid
  Variant (143)..(173): Xaa in position 143 to 173 is any or no amino acid
  Variant (175)..(185): Xaa in position 175 to 185 is any amino acid
  Variant (187)..(209): Xaa in position 187 to 209 is any amino acid
  Variant (210)..(227): Xaa in position 210 to 227 is any or no amino acid
  Variant (229)..(230): Xaa in position 229 to 230 is any amino acid
  Variant (231)..(231): Xaa in position 231 is any or no amino acid
  Variant (233)..(238): Xaa in position 233 to 238 is any amino acid
  Variant (240)..(242): Xaa in position 240 to 242 is any amino acid
  Variant (245)..(245): Xaa in position 245 is any amino acid
  Variant (252)..(254): Xaa in position 252 to 254 is any amino acid
  Variant (256)..(270): Xaa in position 256 to 270 is any amino acid
  Variant (271)..(300): Xaa in position 271 to 300 is any or no amino acid
  Variant (302)..(304): Xaa in position 302 to 304 is any amino acid
  Variant (306)..(310): Xaa in position 306 to 310 is any amino acid
  Variant (311)..(312): Xaa in position 311 to 312 is any or no amino acid
  Variant (314)..(328): Xaa in position 314 to 328 is any amino acid
  Variant (329)..(352): Xaa in position 329 to 352 is any or no amino acid
  Variant (354)..(355): Xaa in position 354 to 355 is any amino acid
  Variant (356)..(357): Xaa in position 356 to 357 is any or no amino acid
  Variant (359)..(369): Xaa in position 359 to 369 is any amino acid
  Variant (372)..(372): Xaa in position 372 is any amino acid
  Variant (374)..(374): Xaa in position 374 is any amino acid
  Variant (376)..(378): Xaa in position 376 to 378 is any amino acid
  Variant (381)..(382): Xaa in position 381 to 382 is any amino acid
  Variant (384)..(404): Xaa in position 384 to 404 is any amino acid
  Variant (405)..(416): Xaa in position 405 to 416 is any or no amino acid
  Variant (418)..(422): Xaa in position 418 to 422 is any amino acid
GXXXXXXXXXXXXXXXXXXXXEXXXXXXXXXXXXXXXXXXXXXXXXXXAXXKYXXXXXXXXXXXXXGXXXXYXXXGXXXXXXXXXXXXXXXXXXXXXXXXXXXXXXXXXXXXXXXXXXXXXXXFKXXXXPXHXWXPDVXXGXXXXXXXXXXXXXXXXXXXXXXXXXXXXXXXXPXXXXXXXXXXXKXXXXXXXXXXXXXXXXXXXXXXXXXXXXXXXXXXXXXXXXXSXXXGXXXXXXQXXXKRXLAYSSIXXXGXXXXXXXXXXXXXXXXXXXXXXXXXXXXXXXXXXXXXXXXXXXXXYXXXYXXXXXXXFXXXXXXXXXXXXXXXXXXXXXXXXXXXXXXXXXXXXXXXLXXXXPXXXXXXXXXXXSLXGXPXXXGFXXKXXXXXXXXXXXXXXXXXXXXXXXXXXXXXXXXXSXXXXXYY

SEQ ID NO: 132084 - protein, 18 aa, Artificial sequence
  protein pattern
  Variant (3)..(3): Xaa in position 3 is Phe, Ile, Leu, Met or Val
  Variant (4)..(4): Xaa in position 4 is Ala, Gly, Ser or Thr
  Variant (5)..(6): Xaa in position 5 to 6 is any amino acid
  Variant (8)..(10): Xaa in position 8 to 10 is any amino acid
  Variant (12)..(12): Xaa in position 12 is any amino acid
  Variant (15)..(16): Xaa in position 15 to 16 is any amino acid
  Variant (17)..(17): Xaa in position 17 is Ala, Asp, Glu, Gln or Thr
  Variant (18)..(18): Xaa in position 18 is Ala or Gly
FKXXXXPXXXWXPDXXXX

SEQ ID NO: 132085 - protein, 26 aa, Artificial sequence
  protein pattern
  Variant (2)..(2): Xaa in position 2 is any amino acid
  Variant (3)..(4): Xaa in position 3 to 4 is any or no amino acid
  Variant (7)..(7): Xaa in position 7 is any amino acid
  Variant (8)..(8): Xaa in position 8 is Ile, Leu or Val
  Variant (9)..(9): Xaa in position 9 is any amino acid
  Variant (10)..(10): Xaa in position 10 is Gly, Gln or Ser
  Variant (11)..(11): Xaa in position 11 is Ala, Gly or Ser
  Variant (12)..(12): Xaa in position 12 is any amino acid
  Variant (13)..(13): Xaa in position 13 is Ala, Gly, Pro or Ser
  Variant (14)..(14): Xaa in position 14 is Ala, Ser or Thr
  Variant (15)..(15): Xaa in position 15 is Ala, Gly or Ser
  Variant (16)..(19): Xaa in position 16 to 19 is any amino acid
  Variant (21)..(25): Xaa in position 21 to 25 is any amino acid
  Variant (26)..(26): Xaa in position 26 is Ala, Gly or Ser
AXXXKYXXXXXXXXXXXXXGXXXXXX

SEQ ID NO: 132086 - DNA, 1518 bp, Escherichia coli
  CDS (1)..(1518)
atgtgcggtattgtcggtatcgccggtgttatgccggttaaccagtcgatttatgatgccttaacggtgcttcagcatcgcggtcaggatgccgccggcatcatcaccatagatgccaataactgcttccgtttgcgtaaagcgaacgggctggtgagcgatgtatttgaagctcgccatatgcagcgtttgcagggcaatatgggcattggtcatgtgcgttaccccacggctggcagctccagcgcctctgaagcgcagccgttttacgttaactccccgtatggcattacgcttgcccacaacggcaatctgaccaacgctcacgagttgcgtaaaaaactgtttgaagaaaaacgccgccacatcaacaccacttccgactcggaaattctgcttaatatcttcgccagcgagctggacaacttccgccactacccgctggaagccgacaatattttcgctgccattgctgccacaaaccgcttaatccgcggcgcgtatgcctgtgtggcgatgattatcggccacggtatggttgctttccgcgatccaaacgggattcgtccgctggtactgggaaaacgtgatattgacgagaaccgtacagaatatatggtcgcttccgaaagcgtagcgctcgatacgctgggctttgatttcctgcgtgacgtcgcgccgggcgaagcgatttacatcactgaagaagggcagttgtttacccgtcaatgtgctgacaatccggtcagcaatccgtgcctgtttgagtatgtatactttgcccgcccggactcgtttatcgacaaaatttccgtttacagcgcgcgtgtgaatatgggcacgaaactgggcgagaaaattgcccgcgaatgggaagatctggatatcgacgtggtgatcccgatcccagaaacctcgtgtgatatcgcgctggaaattgctcgtattctgggcaaaccgtaccgccagggcttcgttaaaaaccgctatgttggccgcacctttatcatgccgggccagcagctgcgtcgtaagtccgtgcgccgtaaactgaatgccaaccgcgccgagttccgcgataaaaacgtcctgctggtcgacgactccatcgtccgtggcaccacttctgagcagattatcgagatggcacgcgaagccggagcgaagaaagtgtacctcgcttctgcggcaccggaaattcgcttcccgaacgtttatggtattgatatgccgagcgccacggaactgatcgctcacggtcgcgaagttgatgaaattcgccagatcatcggtgctgacgggttgattttccaggatctgaacgatctgatcgacgccgttcgcgctgaaaatccggatatccagcagtttgaatgctcggtgttcaacggcgtctacgtcaccaaagatgttgatcagggctacctcgatttcctcgatacgttacgtaatgatgacgccaaagcagtgcaacgtcagaacgaagtggaaaatctcgaaatgcataacgaaggataa

SEQ ID NO: 132087 - protein, 505 aa, Escherichia coli
MCGIVGIAGVMPVNQSIYDALTVLQHRGQDAAGIITIDANNCFRLRKANGLVSDVFEARHMQRLQGNMGIGHVRYPTAGSSSASEAQPFYVNSPYGITLAHNGNLTNAHELRKKLFEEKRRHINTTSDSEILLNIFASELDNFRHYPLEADNIFAAIAATNRLIRGAYACVAMIIGHGMVAFRDPNGIRPLVLGKRDIDENRTEYMVASESVALDTLGFDFLRDVAPGEAIYITEEGQLFTRQCADNPVSNPCLFEYVYFARPDSFIDKISVYSARVNMGTKLGEKIAREWEDLDIDVVIPIPETSCDIALEIARILGKPYRQGFVKNRYVGRTFIMPGQQLRRKSVRRKLNANRAEFRDKNVLLVDDSIVRGTTSEQIIEMAREAGAKKVYLASAAPEIRFPNVYGIDMPSATELIAHGREVDEIRQIIGADGLIFQDLNDLIDAVRAENPDIQQFECSVFNGVYVTKDVDQGYLDFLDTLRNDDAKAVQRQNEVENLEMHNEG

SEQ ID NO: 132088 - DNA, 1879 bp, Nicotiana tabacum
  CDS (49)..(1770)
ctagccccccacttgcttttccttctgtcctccttttttccaccgcccatggccgccaccgtctccaccgcctctgccgccgccaccaataaatctcctctttcgcagcccctcgacaaacccttttgctccccatctcaaaagctcttatctttatcccctaaaaccctcccaaaaccctatagaactctcgtcaccgcatcttccaaaaaccccttaaacgacgtcgtttcgtttaagaaatcagctgacaatacattggactcgtattttgacgatgaagacaaaccccgtgaagagtgtggcgttgtgggcatctatggcgactcagaagcttcacgcctttgctatttagcacttcacgcgcttctacaccgtggccaagaaggcgccggcattgtcgccgttaacgacgacgttcttaagtcaattacaggtgttgggttagtatccgacgtgttcaatgagtcaaagcttgaccaactccctggtgacatggcaattggccacgtctggtactctactgctggctcttctatgttaaaaaatgttcagccttttgttgctaattataaatttgggtcagttggtgttgcccataatggtaatttagtgaattataagttactgcgtggtgaactagaagagaatgggtcaatttttaatacgagttctgatactgaagtggtacttcaccttattgctatatcgaaagctaggccttttttattgaggattgttgaggcttgtgaaaaaattgaaggtgcttattctatggtgtttgttactgaggataagttggttgccgtaagggatcctcatgggtttaggccattggttatgggtaggagaagtaatggtgctgttgtttttgcgtcggagacgtgtgctttggatttgattgaggctacttatgagagggaggtgaatcctggtgaggttgttgttgtggataaagatggggttcattctatttatttgatgcctcatcccgagcataaatcttgtatctttgagcatatttactttgctctgcctaattcggtcgtgtttgggaggtctgtgtacgagtctaggcgtgcttttggagagattcttgcgactgaagctcccgtagaatgtgatgttgggatagcagttcctgattcgggtatcgtggctgcgctcggttatgctgctaaagcgggggtaccgtttcaacaaggtttgataaggtcgcattatgttggtaggacatttatcgagccgtcgcagaagataagggatttcggggtgaagcttaagttgtcaccagttagggcattattggaggggaaaagggttgtggtcgtggacgattcaatcgttagagggacgacctcgtccaagattgtgaggttgttgaaggaggcgggtgcgaaagaggttcatatgaggattgcaagcccaccaattatagcttcttgttattatggagtggatactcctagttcagatgagctgatatcaaataggatgagtgtggaggagattaaggagttcattggatcggattcgcttgcttttctgccaatggatagcttgaataagttgttaggcaatgattctaaaagcttttgctatgcttgcttttcgggcaattacccggtcgagccgacgggtaaggttaaaaggattggggatttcatggatgatggattaagtggagatatggattccattgatggtggttggctaccaggaagtagtagggttcaaaagactatcttgaatgaagttagaaccggctaaactttcttttccatgtttgctttagtttttgctttggatttctaatgcttgactatagaaattataagtttcaatgaagtctctttttctaaaaaaaaaaaaaaaaaaa

SEQ ID NO: 132089 - protein, 573 aa, Nicotiana tabacum
MAATVSTASAAATNKSPLSQPLDKPFCSPSQKLLSLSPKTLPKPYRTLVTASSKNPLNDVVSFKKSADNTLDSYFDDEDKPREECGVVGIYGDSEASRLCYLALHALLHRGQEGAGIVAVNDDVLKSITGVGLVSDVFNESKLDQLPGDMAIGHVWYSTAGSSMLKNVQPFVANYKFGSVGVAHNGNLVNYKLLRGELEENGSIFNTSSDTEVVLHLIAISKARPFLLRIVEACEKIEGAYSMVFVTEDKLVAVRDPHGFRPLVMGRRSNGAVVFASETCALDLIEATYEREVNPGEVVVVDKDGVHSIYLMPHPEHKSCIFEHIYFALPNSVVFGRSVYESRRAFGEILATEAPVECDVGIAVPDSGIVAALGYAAKAGVPFQQGLIRSHYVGRTFIEPSQKIRDFGVKLKLSPVRALLEGKRVVVVDDSIVRGTTSSKIVRLLKEAGAKEVHMRIASPPIIASCYYGVDTPSSDELISNRMSVEEIKEFIGSDSLAFLPMDSLNKLLGNDSKSFCYACFSGNYPVEPTGKVKRIGDFMDDGLSGDMDSIDGGWLPGSSRVQKTILNEVRTG

SEQ ID NO: 132090 - DNA, 1869 bp, Nicotiana tabacum
  CDS (25)..(1746)
ctgtcctcatttttcccaccacccatggccgccaccgtctccaccgcctctgccgccgccaccaacaaatatcctctttcacagccccttgacaaacccttttgctccctatctcaaaagctcttatctttatcccctaaaacccatcctaaaccctacagaactctcatcaccgcctcttccaaaaaccccttaaacgacgtcatttcgtttaagaaatcagctgacaataccttggactcctattttgacgatgacgataaaccccgtgaagagtgcggcgttgtgggcatctatggcgactcagaagcttcacgcctttgctatttagcacttcacgcgcttcaacaccgtggccaagaaggcgccggcattgtcgccgttaacgacgacgttcttaagtcaattacaggtgttgggttagtatccgacgtgttcaatgagtcaaagcttgaccaactccctggtgacatggcaattggccacgtaaggtactctactgctggctcttctatgttaaaaaatgttcagccttttgttgctagttataaatttgggtcagttggtgttgcccataatggtaatttagtgaattataagttactgcgtagtgaactagaggaaaatgggtcaatttttaatacaagttctgatactgaggttgtacttcaccttattgctatatctaaagctaggccatttttattgaggattgttgaggcttgtgaaaaaattgaaggtgcttattctatggtgtttgttactgaggataagttggttgccgtaagggatcctcatgggtttaggccattggttatgggtaggagaagtaatggtgctgttgttttcgcgtctgagacgtgtgctttggatttgattgaggctacttatgagagggaggtgaatcctggtgaggttgttgttgtggataaagatggggttcagtctatttgtttgatgcctcatcctgagcgtaaatcttgtatctttgagcatatttactttgctctgcctaattcggtcgtgtttgggaggtctgtgtacgagtctaggcgtgctttcggggagattcttgctactgaagctcccgtggaatgtgatgttgtgatagcagttcctgactcgggtgtcgtggctgcgctcggttatgctgctaaagcaggggtaccgtttcaacaaggtttgattaggtcgcattatgttggtaggacgttcatcgagccatcgcagaagataagggatttcggggtgaagcttaagctgtcgccggttagggcggtgttggagggaaaaagagttgtggtcgtggatgattcgatcgttagaggaacgacctcgtccaagattgtgaggctgttaaaggaggcgggtgcgaaagaggttcatatgaggattgcaagcccaccaattatagcttcttgttattatggagtggatactcctagttcagatgagttgatatcaaataggatgagtgtggaggagattaaggagttcattggatcggattcgcttgcttttctgccaatggatagcttgaataagctcttaggcaatgattctaaaagcttttgctatgcttgcttttcgggcaattacccagtcgagccgacgggtaaggttaaaaggataggggatttcatggatgatggattaagtggagatatggattccattgatggtggatggctaccaggaagtagtagggttcaaaagactatcttgaatgaagttagaaccagctaaactttcttttccatgtttgctttagtttttgctttggatttctaatgcttgaccatagaaattataagtttcaatgaagtctctttttctatttggaatgccacatgattctactgatctatg

SEQ ID NO: 132091 - protein, 573 aa, Nicotiana tabacum
MAATVSTASAAATNKYPLSQPLDKPFCSLSQKLLSLSPKTHPKPYRTLITASSKNPLNDVISFKKSADNTLDSYFDDDDKPREECGVVGIYGDSEASRLCYLALHALQHRGQEGAGIVAVNDDVLKSITGVGLVSDVFNESKLDQLPGDMAIGHVRYSTAGSSMLKNVQPFVASYKFGSVGVAHNGNLVNYKLLRSELEENGSIFNTSSDTEVVLHLIAISKARPFLLRIVEACEKIEGAYSMVFVTEDKLVAVRDPHGFRPLVMGRRSNGAVVFASETCALDLIEATYEREVNPGEVVVVDKDGVQSICLMPHPERKSCIFEHIYFALPNSVVFGRSVYESRRAFGEILATEAPVECDVVIAVPDSGVVAALGYAAKAGVPFQQGLIRSHYVGRTFIEPSQKIRDFGVKLKLSPVRAVLEGKRVVVVDDSIVRGTTSSKIVRLLKEAGAKEVHMRIASPPIIASCYYGVDTPSSDELISNRMSVEEIKEFIGSDSLAFLPMDSLNKLLGNDSKSFCYACFSGNYPVEPTGKVKRIGDFMDDGLSGDMDSIDGGWLPGSSRVQKTILNEVRTS

SEQ ID NO: 132092 - DNA, 1533 bp, Eremothecium gossypii
  CDS (1)..(1533)
atgtgtggcatattaggcgttgtgctagccgatcagtcgaaggtggtcgcccctgagttgtttgatggctcactgttcttacagcatcgcggtcaagatgctgccgggattgctacgtgcggccccggtgggcgcttgtaccaatgtaagggcaatggtatggcacgggacgtgttcacgcaagctcggatgtcagggttggttggctctatggggattgcacacctgagatatcccactgcaggctccagtgcgaactcagaagcgcagccattctatgtgaatagtccctacggaatttgcatgagtcataatggtaatctggtgaacacgatgtctctacgtagatatcttgatgaagacgttcaccgtcatattaacacggacagcgattctgagctactgcttaatatatttgccgcggagctggaaaagtacaacaaatatcgtgtgaacaacgatgatatattttgtgctctagagggtgtttacaaacgttgtcgcggtggctatgcttgtgttggcatgttggcgggatatggattgtttggtttccgggaccccaatgggatcaggccgctattgtttggtgagcgcgtcaacgatgacggcaccatggactacatgctagcgtccgaaagtgtcgttcttaaggcccaccgcttccaaaacatacgtgatattcttcccggccaagccgtcattatccctaaaacgtgcggctccagtccaccagagttccggcaggtagtgccaattgaggcctacaaaccggacttgtttgagtacgtgtatttcgctcgtgctgacagcgttctggacggtatttccgtttaccatacacgcctgttgatgggtatcaaacttgccgagaacatcaaaaaacagatcgatctggacgaaattgacgttgttgtatctgttcctgacactgcacgtacctgtgcattggagtgtgccaaccatttaaacaaaccttatcgcgaaggatttgtcaagaacagatatgttggaagaacatttatcatgccaaaccaaaaagagcgagtatcttctgtgcgccgcaagttgaacccaatgaactcagaatttaaagacaagcgcgtgctgattgtcgatgattccattgtgcgaggtaccacttccaaagagattgttaacatggcgaaggaatccggtgctgccaaggtctactttgcctctgcagcgccagcaattcgtttcaatcacatctacgggattgacctagcagatactaagcagcttgtcgcctacaacagaactgttgaagaaatcactgcggagctgggctgtgaccgcgtcatctatcaatctttggatgacctcatcgactgttgcaagacagacatcatctcagaatttgaagttggagttttcactggtaactacgttacaggtgttgaggatgtgtacttgcaggaattagaacgttgccgcgctcttaataactcgaataagggtgaagcgaaggccgaggttgatattggtctctacaattctgccgactattag

SEQ ID NO: 132093 - protein, 510 aa, Eremothecium gossypii
MCGILGVVLADQSKVVAPELFDGSLFLQHRGQDAAGIATCGPGGRLYQCKGNGMARDVFTQARMSGLVGSMGIAHLRYPTAGSSANSEAQPFYVNSPYGICMSHNGNLVNTMSLRRYLDEDVHRHINTDSDSELLLNIFAAELEKYNKYRVNNDDIFCALEGVYKRCRGGYACVGMLAGYGLFGFRDPNGIRPLLFGERVNDDGTMDYMLASESVVLKAHRFQNIRDILPGQAVIIPKTCGSSPPEFRQVVPIEAYKPDLFEYVYFARADSVLDGISVYHTRLLMGIKLAENIKKQIDLDEIDVVVSVPDTARTCALECANHLNKPYREGFVKNRYVGRTFIMPNQKERVSSVRRKLNPMNSEFKDKRVLIVDDSIVRGTTSKEIVNMAKESGAAKVYFASAAPAIRFNHIYGIDLADTKQLVAYNRTVEEITAELGCDRVIYQSLDDLIDCCKTDIISEFEVGVFTGNYVTGVEDVYLQELERCRALNNSNKGEAKAEVDIGLYNSADY

SEQ ID NO: 132094 - DNA, 1518 bp, Dichelobacter nodosus VCS1703A
  CDS (1)..(1518): transl_table=11
atgtgtggcattgtgggaattgtcgcttgcagccccgttaatcaagcgttatatgatgcattaattatgcttcagcaccgcggtcaagatgccgccggcatcgttaccagcgtgcacggtcgtttttttatgcacaaaaacaatggattagttgccaatgttttcaagcaagaagatatgcaacgtttatacggcacaatgggcattgcgcacgtgcgttatcccaccgccggcacctccagctccgccgaagcgcaaccgctttacgttaattcgccgtacggcatcgttttagcgcataacggcaatttaaccaacgccgtaacgctgatgaaagaagtgcaagaaacgcatttccgccacatcaatacttgctcggattcggaagtattgctcaatatttttgcccacgaattaagccaaacgcgttctacggcgctgacttctgatcatattttccaagctattcgccgtacgcatcaacgcgttaaaggcgcttatgccgttgttgccatgatcagcggttatggattaattgcttttcgcgatccttatgccattcgtcctttaatttacggcgaacgtttagatgcgcaaggtcgtaaagaatatatggttgcttccgaaagcgtggcattagaagcgcagggctttcgcattgtgcgcgatttggcgccggcagaagccattatcatcacggaagacggtcgctttttcagcgaaatttgtgccgaacacgccaaacgggttccgtgtatttttgaatacgtttattttgctcgctccgattccaccatcgacggcattaatgtttataaagcgcgtttacgcatgggcgaaaaactcgcgcaacaaattcaaaaagaatgggcagatcacgatattgacgccgttattcccattccggataccagtcgccccgcagcattagcgctggcgaaacatttaggcgttgaatttcgcgaaggctttatgaaaaaccgctatatcgggcgcactttcatcatgcccgaacaagcgcaacgagaacgttccgtgcggcaaaaattgagcccgttgcctttggagtttcgcgataaaaacgtgttattggtagacgattctatcgtccgcggcaccaccagcgagcaaatcattcaattggcgcgggaatcgggggcgaaaaaagtctattttgcgagcgccgcgccggcggttcgttttccgaatgtatacggcattgatatgccgacgcatgaagaactcattgcttatcaacgtgataccgatgaagtggcggcattaatcggtgccgataaagtgatttatcaaactttgcccgatttattagccgcggtgataacggattcatcagcgccgcaggaatttgattgttctgtttttaatggttgttatgtcaccggcgacattgacgatgcctatttgcgccaattagtgcagcaacgcgatgatcaagcccgcgcacggattacgcctatcaatcctcgtccgctggatttgcttcacgctcatgactga

SEQ ID NO: 132095 - protein, 505 aa, Dichelobacter nodosus VCS1703A
MCGIVGIVACSPVNQALYDALIMLQHRGQDAAGIVTSVHGRFFMHKNNGLVANVFKQEDMQRLYGTMGIAHVRYPTAGTSSSAEAQPLYVNSPYGIVLAHNGNLTNAVTLMKEVQETHFRHINTCSDSEVLLNIFAHELSQTRSTALTSDHIFQAIRRTHQRVKGAYAVVAMISGYGLIAFRDPYAIRPLIYGERLDAQGRKEYMVASESVALEAQGFRIVRDLAPAEAIIITEDGRFFSEICAEHAKRVPCIFEYVYFARSDSTIDGINVYKARLRMGEKLAQQIQKEWADHDIDAVIPIPDTSRPAALALAKHLGVEFREGFMKNRYIGRTFIMPEQAQRERSVRQKLSPLPLEFRDKNVLLVDDSIVRGTTSEQIIQLARESGAKKVYFASAAPAVRFPNVYGIDMPTHEELIAYQRDTDEVAALIGADKVIYQTLPDLLAAVITDSSAPQEFDCSVFNGCYVTGDIDDAYLRQLVQQRDDQARARITPINPRPLDLLHAHD

SEQ ID NO: 132096 - DNA, 1626 bp, Oryza sativa (japonica cultivar-group)
  CDS (1)..(1626)
atggccgccgccgccgccgccgcgtcaacgtcgcgcctcctcctcctccgccaccaccaccacgccgccgccgacgggtcgaagcagcagcagcagctcaggtattcctccaagccgtcttctctcgctctgccccggctgcgccttttgccggcggccggggcgctgctgcccgaccgggtcaccccgttctcctacgaggaggacgacgagtccgacgaccacccgcgcgaggagtgcgggctggtcggggtcgtgggggaccccgacgcgtcgtcgctctgctacctcgggctgcagaagctgcagcaccgcggggaggagggtgccgggattgtcgccgtcgggggtgacgggaagctcaagtcggtcaccgggctcggcctcgtcgccgacgtgttcggtgaccccgcacggctggcatcgctccccgggccagccgccatcgggcacgtgaggtactccaccgccggcgccgccgcgtcgctgcggaacgtgcagccgttcctggccgggtacaggttcgggcaggtcgccgtcgcgcacaacggcaacctcgtcaactaccaggcgctgcggaacaagctggaggcgaggggctccatcttcaacacctcgtcggacacggaggtcatcctccacctcatcgcgacgtcgctgtcgcggccactgctgtcccgcatctgcgacgcgtgcgagcgcctcgcgggggcctactcgctgctgttcctgacggccgataagatgttcgccgtgcgcgacccgcacgggttccgcccgctggtgctcggccgccgccgcaacggcaccgtcgcgttcgcgtcggagacttgcgcgctggacctcatcgaggcgacctacgagcgcgaggtggagcccggggaggtggtcgtcgtcgaccgccgcgacatgtccgtctcctcagcgtgcctcgtcccgcaccgcccccgccgctcctgcgtcttcgagcacatctacttcgccctcccaaactccgtcgtcttctcgcacgccgtccacgagcgccgcaccgccttcggccgcgcgctcgcggaggagtcccccgccgcgggcgccgacgtggtcatcccggttcccgactcggggttctacgccgcgctcgggttcgcgcgcgcgtcggggctggagttccagcagggcctcatccggtggcactacagcggccgcagcttcatccagccgacgcaggcgatccgcgacctcgccgtgaagctcaagctggcaccggtccacggcgtgatccgcgggaagagcgtggtggtggtggacgactccctggtgcgcggcaccacctcgagcaagatcgtgcggctgctccgcgacgccggcgcgcgcgaggtgcacatgcggatcgcgagcccgccggtggtgggctcgtgcctgtacggcatcgacacgcccagcgagggggagctcatctccaaccggatggatctcgagggcgtccgccgcgagatcggcagcgactcgctcgccttcctctcgctcggcaagctccacagcatctacggcgccgaggcggagggctactgcgacgcctgcttctcgcgcaactaccccgtgctgcccacgctgcccgagccggtcgtagagctcgaggagtga

SEQ ID NO: 132097 - protein, 541 aa, Oryza sativa (japonica cultivar-group)
MAAAAAAASTSRLLLLRHHHHAAADGSKQQQQLRYSSKPSSLALPRLRLLPAAGALLPDRVTPFSYEEDDESDDHPREECGLVGVVGDPDASSLCYLGLQKLQHRGEEGAGIVAVGGDGKLKSVTGLGLVADVFGDPARLASLPGPAAIGHVRYSTAGAAASLRNVQPFLAGYRFGQVAVAHNGNLVNYQALRNKLEARGSIFNTSSDTEVILHLIATSLSRPLLSRICDACERLAGAYSLLFLTADKMFAVRDPHGFRPLVLGRRRNGTVAFASETCALDLIEATYEREVEPGEVVVVDRRDMSVSSACLVPHRPRRSCVFEHIYFALPNSVVFSHAVHERRTAFGRALAEESPAAGADVVIPVPDSGFYAALGFARASGLEFQQGLIRWHYSGRSFIQPTQAIRDLAVKLKLAPVHGVIRGKSVVVVDDSLVRGTTSSKIVRLLRDAGAREVHMRIASPPVVGSCLYGIDTPSEGELISNRMDLEGVRREIGSDSLAFLSLGKLHSIYGAEAEGYCDACFSRNYPVLPTLPEPVVELEE

SEQ ID NO: 132098 - DNA, 1452 bp, Mesorhizobium loti MAFF303099
  CDS (1)..(1452): transl_table=11
gtgctttccgccgaggccgacgaccatttccacgacgaatgcggcgttttcggcattttcggccggcaggacgcagcggccatcgtcacactcggcctgcatgcgctgcagcatcgcggccaggaagcggccggcatcgtttcctatgacggcagccagttccatgtcgaacgccatgtcggcctgatcggcgacactttcaccaagcagcgcgttatcgacagcctgcaaggcaaccgcgccatcggccatacgcgctacgccacgacgggcggcgccggcatgcgcaacatccagcccttcttcgccgagctcgccgatggcggctttgccgtcgcccataatggcaatctgaccaacgccatgacggtgcagcgcgcgctgcagaagcagggcgcgatcttctcctcgacctccgacaccgagacgctcctgcatctggttgcgaccagcaaggaacgcgacctcaactcacgcttcatcgacgccgtgcggcaggtcgaaggtgccttctcgctggtggcgatgacggccaagaagatgatcggctgccgcgatccgctcggcatccggccgctggtgctcggcgacctcgacggcgcttggattctcgcttccgagacctgcgcgctcgacattatcggcgcgcgtttcgtgcgcgacctgaaacccggcgagatggtcgtcgtcacctccaagggcattgaaagcctgttcccgttcgaaccgcagaagacccgcttctgcatctttgaatatgtctatttcgcccggccggattcttcggtcgaaggccgcaacgtctacgaggtgcgcaagcgcatcggcgccgaattggcacaggaaaacccggtcgaggccgacatcgtcgtgccggtgccggattcgggcaccccggcggcgatcggcttcagccaggcggccggcattcccttcgagctcggcatcatccgcaaccactatgtcggccgtaccttcatccagcccggcgattcgatccgccacatgggcgtcaagctgaagcacaacgccaaccgccgcatgatcgagggcaagcgcgtcgtgctggtcgacgattcgatcgtgcgcggcaccaccagccagaagatcgtgcagatggtgcgcgatgccggcgcccgggaggtgcatatgcgcatcgcttcgccgccgaccagcgcctcctgcttctacggcgttgacacgccggagaaatcgaaactgctggcgtcgcgcatgtcggtggaagagatggccgagttcatccgtgtcgattcgctcggcttcctttccatcaacggcctctaccgcgccgtcggcgaggccggccgcaacgatgagcaaccgcaattctgcgacgcctgcttcaccggccagtatccgacccgcctgctcgacttcgaaggccacgacaatgtgcgcacgctgtcgctgctggcgaacagtggggcgtaa

SEQ ID NO: 132099 - protein, 483 aa, Mesorhizobium loti MAFF303099
MLSAEADDHFHDECGVFGIFGRQDAAAIVTLGLHALQHRGQEAAGIVSYDGSQFHVERHVGLIGDTFTKQRVIDSLQGNRAIGHTRYATTGGAGMRNIQPFFAELADGGFAVAHNGNLTNAMTVQRALQKQGAIFSSTSDTETLLHLVATSKERDLNSRFIDAVRQVEGAFSLVAMTAKKMIGCRDPLGIRPLVLGDLDGAWILASETCALDIIGARFVRDLKPGEMVVVTSKGIESLFPFEPQKTRFCIFEYVYFARPDSSVEGRNVYEVRKRIGAELAQENPVEADIVVPVPDSGTPAAIGFSQAAGIPFELGIIRNHYVGRTFIQPGDSIRHMGVKLKHNANRRMIEGKRVVLVDDSIVRGTTSQKIVQMVRDAGAREVHMRIASPPTSASCFYGVDTPEKSKLLASRMSVEEMAEFIRVDSLGFLSINGLYRAVGEAGRNDEQPQFCDACFTGQYPTRLLDFEGHDNVRTLSLLANSGA

SEQ ID NO: 132100 - DNA, 1425 bp, Thermoplasma volcanium GSS1
  CDS (1)..(1425): transl_table=11
gtggattcccggccccaaggatcagatcctataaatgggcaaaagccaagtgaagattgcgcagttgtggggttcaaggggaagataaacgcctataaccccataataactgcacttcgaacattgcaacatagaggccaggaatcggctggtatggctgtttttgacggcaagaaggtaacgttgaaaaaaggaagtggcctagtaacagatgtttttaatcctgcaaccgacgatattaaaggttacgtgggagtaggccatacacgttattcaactgctggatcaaaaaatgtggttaatgctgggccatttgtaatgaactcttctttcggttacataaccatatcccacaacggtgagatagtaaacgctgatgaattgcgtgattccatgaaaaaagaagggatcacgttccagagcgattcagatacagaggttatgctggcagagctttcgagaaatatctcaaagtatggcctaaaaagaggattcgaacagtccatggagagcctaaggggagcttatgcatgcgcaataagcataaatgatcgcctctacgccgtaagggacccaaatgggataaggcctctggttatagggaagaataacgacggatacatagtagcttcagaaagctgcgcaatagatgctctcgaaggcacgttaataaaaaacatcgaaccaggggaagtagttgagatatctgacgaaggcataagaacaattgtaagcaaatctgcaaatcgaatagcccactgcatgtttgagtatgtatatttctcaaggccggatagcgttatagacggcataaacgtttatgccgccagggtaaacatgggcagaatacttgctaaggagagcccagttgaagctgacatagtcgtccctgttccagattcagggcgttctcaagcaataggttattccatggaatctggaatgccttacacagaggggctgattaagaataggtattcggagaggaccttcataatgcctactcagagcgataggaaggccgcgatacatttgaagctaaatcctatacgcgaagtgatagggggaaagaaggtagtgcttgtagatgatagcatagtccgtggaaacactatgaggttcatcgtcggcctaatgaggaaatatggcgcaaaggagatacatgtcagaattggatcgccgcatataatcgcaccatgctattttggtgtcgacatgaagacgaaggatcaattcatagcgcgcggtaaaaccgatgaggagataaacagagaaatcggggccgattcactcgcgtttctttcagttgacggcctcaaacaggcgatatctatgaaaaacaataacctgtgccttgggtgcctcacaggagaatatcctatagatatatcaaagaaactcgcagaaaatattacttcttactag

SEQ ID NO: 132101 - protein, 474 aa, Thermoplasma volcanium GSS1
MDSRPQGSDPINGQKPSEDCAVVGFKGKINAYNPIITALRTLQHRGQESAGMAVFDGKKVTLKKGSGLVTDVFNPATDDIKGYVGVGHTRYSTAGSKNVVNAGPFVMNSSFGYITISHNGEIVNADELRDSMKKEGITFQSDSDTEVMLAELSRNISKYGLKRGFEQSMESLRGAYACAISINDRLYAVRDPNGIRPLVIGKNNDGYIVASESCAIDALEGTLIKNIEPGEVVEISDEGIRTIVSKSANRIAHCMFEYVYFSRPDSVIDGINVYAARVNMGRILAKESPVEADIVVPVPDSGRSQAIGYSMESGMPYTEGLIKNRYSERTFIMPTQSDRKAAIHLKLNPIREVIGGKKVVLVDDSIVRGNTMRFIVGLMRKYGAKEIHVRIGSPHIIAPCYFGVDMKTKDQFIARGKTDEEINREIGADSLAFLSVDGLKQAISMKNNNLCLGCLTGEYPIDISKKLAENITSY

SEQ ID NO: 132102 - DNA, 1701 bp, Arabidopsis thaliana
  CDS (1)..(1701)
atggcggccacaacaagcttctcctcttccctctctttaatcactaaaccaaacaattcttcttacaccaatcaacctctccctctcttccccaaacccttccttaaacctccccatctctctctccttccttctcccctctcctctcctcctccttcactcatccatggagtctcctcctacttctcctctccttcaccatccgaagacaattctcataccccttttgattaccacaacgacgaagacgacgaaaagcctcgagaagagtgcggtgtcgttggaatctatggagatccagaagcttcacggctctgttacttagctctccacgcacttcaacatcgtggtcaagaaggtgcaggtattgtaacagttagtcccgagaaagttcttcaaaccattacaggtgttggtttagtctctgaggttttcaacgaatcaaaacttgatcaattacctggtgaatttgctattggtcatgttcgttactcaacagctggagcttctatgctcaagaacgttcagcctttcgtcgccggttatcgattcggttctatcggtgttgcccacaatggtaatttagtaaattacaaaactttgagagctatgcttgaagagaacggttctatcttcaatactagctctgatactgaggttgtgcttcatttgattgctatttctaaagctagacctttttttatgaggattattgatgcttgtgagaaacttcaaggtgcttattcaatggtgtttgttactgaggataagcttgttgctgttcgtgatccttatgggtttagaccgttagttatgggtaggagaagtaatggagctgttgttttcgcttcggagacttgtgctcttgatttgattgaagctacttatgagagagaggtttatcctggtgaggttttggttgtggataaggatggtgtcaagtctcagtgtttgatgcccaagtttgagcctaagcaatgtattttcgaacatatctacttctcgttgcctaactcgattgtgtttggtcggtccgtgtatgaatctaggcatgtttttggtgagattttggctaccgagtcgcctgttgagtgcgatgttgtcatcgctgtgcctgactctggtgttgtggctgctctcgggtacgctgcgaaatccggtgtgccgtttcaacaggggttgattaggtctcattacgtagggaggacgttcattgagccgtcacagaagattagagactttggtgtgaagcttaagttgtctcctgttcgtggtgttttagaagggaagagagttgttgtggtggatgattcgattgttagaggcacaacttcgtctaagattgtgcgtttattgagagaagctggtgcaaaagaggttcatatgaggattgctagtcctcctatagtagcttcttgttactatggtgttgatacgcctagctcagaggagttgatatccaatagattgagtgttgaggagattaacgagttcatcgggagtgactctcttgcgtttctatcgttcgatacgttgaagaaacacttggggaaagactctaagagcttctgctatgcgtgcttcacgggtgactatcccgtgaagccaacagaagttaaggtgaaacgaggaggaggggatttcattgatgacggtctcgttggtagcttcgaaaacatcgaagcaggttgggttcgataa

SEQ ID NO: 132103 - protein, 566 aa, Arabidopsis thaliana
MAATTSFSSSLSLITKPNNSSYTNQPLPLFPKPFLKPPHLSLLPSPLSSPPPSLIHGVSSYFSSPSPSEDNSHTPFDYHNDEDDEKPREECGVVGIYGDPEASRLCYLALHALQHRGQEGAGIVTVSPEKVLQTITGVGLVSEVFNESKLDQLPGEFAIGHVRYSTAGASMLKNVQPFVAGYRFGSIGVAHNGNLVNYKTLRAMLEENGSIFNTSSDTEVVLHLIAISKARPFFMRIIDACEKLQGAYSMVFVTEDKLVAVRDPYGFRPLVMGRRSNGAVVFASETCALDLIEATYEREVYPGEVLVVDKDGVKSQCLMPKFEPKQCIFEHIYFSLPNSIVFGRSVYESRHVFGEILATESPVECDVVIAVPDSGVVAALGYAAKSGVPFQQGLIRSHYVGRTFIEPSQKIRDFGVKLKLSPVRGVLEGKRVVVVDDSIVRGTTSSKIVRLLREAGAKEVHMRIASPPIVASCYYGVDTPSSEELISNRLSVEEINEFIGSDSLAFLSFDTLKKHLGKDSKSFCYACFTGDYPVKPTEVKVKRGGGDFIDDGLVGSFENIEAGWVR

SEQ ID NO: 132104 - DNA, 1686 bp, Arabidopsis thaliana
  CDS (1)..(1686)
atggcggccacctctagcatctcttcttctctatctctcaatgctaaacccaacaagctctctaacaacaacaacaacaataagcctcaccgtttcctccgtaatcccttccttaacccctcctcctcctctttctctcctcttccggcttctatctcctcttcttcttcttctccttcgtttccgctcagagtttcaaaccctcttaccctgttggcggcagacaacgatgattatgacgagaagcctcgggaagagtgtggagttgtcggaatctacggtgactcagaagcttcacgactctgttacttagctctccatgcgcttcagcatcgaggtcaagaaggtgcaggtattgttaccgttagtaaagataaggttcttcagaccattacaggtgttggtttggtctctgaggttttcagtgaatccaaactcgatcaattaccaggagacatagccattggtcatgtcaggtactcgactgctggttcttctatgctcaagaacgttcagccgtttgttgctggttatcgatttggctctgttggtgttgctcacaatggcaatttagtgaattacacgaaattgagagctgatttagaggaaaatggttcgattttcaatactagctctgatactgaggttgtgcttcatttgattgccatttctaaagctagaccctttttcatgagaattgttgatgcttgtgagaagcttcaaggtgcttattcgatggtgtttgtgactgaggataagcttgttgctgttcgtgacccacatgggtttaggcctttagttatgggtaggagaagtaatggagctgttgtgtttgcttctgagacttgtgctcttgatttgattgaagctacttatgagagagaggtttatcctggtgaggttttagttgtggataaagatggtgtcaaatgtcagtgtttgatgcctcatcctgagccaaagcaatgcattttcgaacatatttacttctcgttgcctaattcgattgtctttggtcggtctgtgtatgagtctaggcatgtctttggtgagattttagctactgagtcacctgttgattgtgatgtggtgatcgctgtgcctgactcgggtgttgtggctgctcttggttacgcggctaaagctggtgtagcgtttcagcaaggtttgattaggtctcattatgttggaaggactttcattgagccgtctcagaaaatcagagattttggagtgaagctgaagctatcgccagtccgaggagttttagaagggaaaagagttgttgttgttgatgattcgattgttagaggaacaacttcgtccaagattgtgcgtttattgagagaagcgggtgcgaaagaggttcacatgaggatcgcgagtcctcctattattgcatcttgttactacggagtggacacgcctagctcaaatgagttgatatcgaataggatgagtgttgatgaaatcagggattacatcggatgtgattcccttgcgtttttgtcgtttgagacgttaaagaaacatttgggggaagattctagaagcttctgctatgcatgcttcacgggggactatccggtgaagcctacagaggataaggtgaagcgaggaggagattttatcgatgatggtctcgttggaggaatccacaacattgaaggaggttgggtacggtag

SEQ ID NO: 132105 - protein, 561 aa, Arabidopsis thaliana
MAATSSISSSLSLNAKPNKLSNNNNNNKPHRFLRNPFLNPSSSSFSPLPASISSSSSSPSFPLRVSNPLTLLAADNDDYDEKPREECGVVGIYGDSEASRLCYLALHALQHRGQEGAGIVTVSKDKVLQTITGVGLVSEVFSESKLDQLPGDIAIGHVRYSTAGSSMLKNVQPFVAGYRFGSVGVAHNGNLVNYTKLRADLEENGSIFNTSSDTEVVLHLIAISKARPFFMRIVDACEKLQGAYSMVFVTEDKLVAVRDPHGFRPLVMGRRSNGAVVFASETCALDLIEATYEREVYPGEVLVVDKDGVKCQCLMPHPEPKQCIFEHIYFSLPNSIVFGRSVYESRHVFGEILATESPVDCDVVIAVPDSGVVAALGYAAKAGVAFQQGLIRSHYVGRTFIEPSQKIRDFGVKLKLSPVRGVLEGKRVVVVDDSIVRGTTSSKIVRLLREAGAKEVHMRIASPPIIASCYYGVDTPSSNELISNRMSVDEIRDYIGCDSLAFLSFETLKKHLGEDSRSFCYACFTGDYPVKPTEDKVKRGGDFIDDGLVGGIHNIEGGWVR

SEQ ID NO: 132106 - DNA, 1599 bp, Arabidopsis thaliana
  CDS (1)..(1599)
atggccttctctgtagaagaaatctcgtctattctccctaacagtttatccgcaaaccctaggaatgtttctcaaaatactatttccccttcctttttcaagccctcccttaaaccgtacgcttccaaaaccctaatctcattgtcatgtagacgctcactttcccctgttttctcggcgggaacatatgtcactaacgttgacgaagatgacaagcttcacgaagaatgcggagttgtcggaatccatggagaccctgaagcttcccgtctctcttacttggctctacacgcactgcaacaccgtggccaagaaggagcaggaattgtagccgctaatcaaaacggtctcgaatcaatcacaggggtcggattagtctcagatgtgttcaccgagtcaaaactaaacaatcttcctggcgacatagcgatagggcatgtccggtactcaacttccggagcctctatgctcaagaatgttcagcctttcatcgctagctgcaagctaggatcactcgcagtagctcacaatggtaatttcgtgaattacaagcaactgaagacaaagctcgaggagatgggttcaatcttcatcacaagttctgataccgagctcgttcttcacctgatcgccaaatctaaggctaagacgtttcttttgagggtcattgatgcttgtgagaagcttagaggtgcttactcgatggttttcgtctttgaagacaagcttattgctgttcgtgacccttttgggtttagaccacttgtgatgggcagaagaagcaacggagcagttgtttttgcctccgagacttgtgctctggacctgattgatgcgacttatgaacgtgaagtgtgtcccggtgagattgtggtcgtggatagaaaccatggagacagttcaatgttcatgatctctcaccctgaacagaaacagtgcgtttttgagcatggttacttctcacagcccaactcaattgtctttggccgttctgtgtatgaaacacgccgcatgtacggcgagatcctagccaccgtggcacctgtcgattgtgatgttgtcattgcagtgccagactcggggacagtggctgctcttggatatgcagccaaagctggagtgccgttccagattggtcttctgagatcacactatgctaaacgtacgtttatagagccgactcaggaaatccgtgattttgcagtgaaggtgaagctatctcctgttcgagcagtccttgaagggaagcgggtggtagtagtggacgactctattgtccgcggtaccacgagtttgaagatagttcggatgcttagagatgccggagcaaaggaggttcatatgagaatcgcattgccgccgatgattgcatcgtgttactatggagtggacaccccgaggagccaagagttgatctctagtaagatgagcgttgaggcgatccagaagcatattaattgtgattctttggcgtttctaccattagatagcttgaaaggagtctatggaccagtcgagtcacacaggtattgctatgcctgctttactgggaagtaccctgtgaccaaaacagagtctgaggaggccgacgcttcatga

SEQ ID NO: 132107 - protein, 532 aa, Arabidopsis thaliana
MAFSVEEISSILPNSLSANPRNVSQNTISPSFFKPSLKPYASKTLISLSCRRSLSPVFSAGTYVTNVDEDDKLHEECGVVGIHGDPEASRLSYLALHALQHRGQEGAGIVAANQNGLESITGVGLVSDVFTESKLNNLPGDIAIGHVRYSTSGASMLKNVQPFIASCKLGSLAVAHNGNFVNYKQLKTKLEEMGSIFITSSDTELVLHLIAKSKAKTFLLRVIDACEKLRGAYSMVFVFEDKLIAVRDPFGFRPLVMGRRSNGAVVFASETCALDLIDATYEREVCPGEIVVVDRNHGDSSMFMISHPEQKQCVFEHGYFSQPNSIVFGRSVYETRRMYGEILATVAPVDCDVVIAVPDSGTVAALGYAAKAGVPFQIGLLRSHYAKRTFIEPTQEIRDFAVKVKLSPVRAVLEGKRVVVVDDSIVRGTTSLKIVRMLRDAGAKEVHMRIALPPMIASCYYGVDTPRSQELISSKMSVEAIQKHINCDSLAFLPLDSLKGVYGPVESHRYCYACFTGKYPVTKTESEEADAS

SEQ ID NO: 132108 - DNA, 1398 bp, Aquifex aeolicus VF5
  CDS (1)..(1398): transl_table=11
atgtgcggagttgcaggagtctttaattccccttacgcagcggaatatgcccttttaatgatttactcactccagcacaggggacaggaaagtgtagggataagttcctctgatgaaaaggaaatttacaccgttaaaaaacccggaagggttttagaagcgataaaaaaagaagaccttgaaaaattaaaaggaagtatagcgatagcacacgtcaggtactcaacagcgggaaacgcaggaggctttaacgcccagcctcttgtgagggaaacacctctcggaaaagttgcggtagtacacaacggaaacctcgtaaacttcctaactttgagaaaggagcttgaagataaaggtataaagttcaattacaactctgacagcgaactctttttagcacttcttgaggaaggaaggacctatatacctgaaggtgtaacgcttcatccggaggacaaggatttccttccctacatcttttacgccctttctagagttaaaggtgcctacagtttgatatacctctttagggacaagctcgtagttgcgagggatccatacggtttcagacccttagccttgggaaggaagaaaaacaccattctggtagcttcggagagctgtgcctttgacatacttgaagctgaattctggagagaagtaaaaccgggtgaagttctcgtaatagacaaaaaaggaaagaggagctacaggatattcagttcacccagaaaagctatgtgcatatttgagtttgtgtacttctcaagaccggacagctacatattcggcgactgggtatacaacgtgagaaaagaaatgggaagacagcttgcgagagaagataacatagaagcggacgttgtcattcccgttcccgattctggagtcgttccggcactcggatacgcggaggaaaagggactgccttttgagtacgggcttataagaaaccactacgtgggaaggagctttatagaaccaacacccgaactcagaaacttaagagttttaatgaagctctctcccaacagagccgttctgcaagggaagagagttatagttatagatgactccctcgtgagaggaactacctcaaagaggatagtcagcatgctcaggagggcaggtgctaaggaaatacacatgaggatagcctctccgcccgtcgtgggaccctgttactacggcatagacacgcccacaaaagaggagttaatagcaaacaaaatgccgatagaggatatagccaagttcataggtgtagattccctgaagtacctttctttagaaggcttgagaaagtgtgttgataagcctgaagatttctgcgacgcatgctttagcctgaattatcccgtagaagttgaagataatgtcccctcaaagatacgctaa

SEQ ID NO: 132109 - protein, 465 aa, Aquifex aeolicus VF5
MCGVAGVFNSPYAAEYALLMIYSLQHRGQESVGISSSDEKEIYTVKKPGRVLEAIKKEDLEKLKGSIAIAHVRYSTAGNAGGFNAQPLVRETPLGKVAVVHNGNLVNFLTLRKELEDKGIKFNYNSDSELFLALLEEGRTYIPEGVTLHPEDKDFLPYIFYALSRVKGAYSLIYLFRDKLVVARDPYGFRPLALGRKKNTILVASESCAFDILEAEFWREVKPGEVLVIDKKGKRSYRIFSSPRKAMCIFEFVYFSRPDSYIFGDWVYNVRKEMGRQLAREDNIEADVVIPVPDSGVVPALGYAEEKGLPFEYGLIRNHYVGRSFIEPTPELRNLRVLMKLSPNRAVLQGKRVIVIDDSLVRGTTSKRIVSMLRRAGAKEIHMRIASPPVVGPCYYGIDTPTKEELIANKMPIEDIAKFIGVDSLKYLSLEGLRKCVDKPEDFCDACFSLNYPVEVEDNVPSKIR

SEQ ID NO: 132110 - DNA, 1515 bp, Vibrio cholerae O1 biovar eltor str. N16961
  CDS (1)..(1515): transl_table=11
atgtgtggtattgttggaatcgtgggtacaacgcctgtaaaccagtcaatttatgacgctttgacggtcttgcagcatcgtggccaagatgccgcgggtatttgtaccatagaaagcaatcgttttcgtctgcgtaaggcaaacggattagtcagggatgtctttgaagcgaaacacatgcaacgcctgcaaggcaacgtcgggatcggccatgtgcgttaccccaccgcaggtagctctagcgcctcagaagctcaacctttctatgtcaactctcctttcggtatcacacttgctcacaacggtaatctgaccaacgcgaaccaagtgcgtcaaaagctgtttgaaaaagaccgtcgtcatgtgaataccacttcggattcagaggtgttgctcaacgtactggctcatgaaattgataccgtaaagggcaatgtcaccgccgacgatgtgttccgtgcaatcagcaatgttcaccgtaccattcgaggtgcttatgcggtggcggcgatgatcattggtcacggtatgattgcgtttcgtgacccacacggtattcgaccattgtgtctcggtaagcgtgaagtcaatggtcagctcgaatatatggtcgcctccgaatcggtcgcactggatgcggttgggttcgacttcgtgcgagatgtcgcgcccggtgaagcgatttatgccactttcgacggtgagctctacaccaaacagtgtgccgataatccagcactcaacccatgcatctttgaatttgtctactttgcgcgccctgattcgtttatcgacaagatttctgtttatagcgctcgtgtagagatgggtaagcgtttaggtgagcgcatcaaaaatgattacagcgatctcgatatcgatgtagtcatcccgattcctgaaacctcttgtgatatcgccctacaaattgcacaggcgattgataaaccatatcgccaaggctttgttaaaaaccgctatgttggccgaacctttatcatgccgggtcagcagcaacgtaagaaatcggtacgccgcaaactcaatgcgattcgctcagagtttaaagataaaaacgtactactggtggatgattctatcgtgcgtggcactacctcagagcagatcattgagatggctcgtgattctggggcgaagaaagtctacatcgtctctgctgcccctgagattcgcttcccgaacgtgtatggtattgatatgccaagtgccaatgagctgattgctcatggtcgtgataacgatgctatctgtaagcagattggtgccgatgccttgatattccaaactttagaggatttggtggaagcggttcgctgtggcaaccctgatatcgtcaagtttgaagcttcggtctttaatggcgaatacgtgacgggtgacatcgatcagcagtacttagattttctcgagtcgatgcgcagtgatgacgcgaaagtgcagcgtgaaattcaacaagatctggctaaccttgagctgcataacgaaggcgcttaa

SEQ ID NO: 132111 - protein, 504 aa, Vibrio cholerae O1 biovar eltor str. N16961
MCGIVGIVGTTPVNQSIYDALTVLQHRGQDAAGICTIESNRFRLRKANGLVRDVFEAKHMQRLQGNVGIGHVRYPTAGSSSASEAQPFYVNSPFGITLAHNGNLTNANQVRQKLFEKDRRHVNTTSDSEVLLNVLAHEIDTVKGNVTADDVFRAISNVHRTIRGAYAVAAMIIGHGMIAFRDPHGIRPLCLGKREVNGQLEYMVASESVALDAVGFDFVRDVAPGEAIYATFDGELYTKQCADNPALNPCIFEFVYFARPDSFIDKISVYSARVEMGKRLGERIKNDYSDLDIDVVIPIPETSCDIALQIAQAIDKPYRQGFVKNRYVGRTFIMPGQQQRKKSVRRKLNAIRSEFKDKNVLLVDDSIVRGTTSEQIIEMARDSGAKKVYIVSAAPEIRFPNVYGIDMPSANELIAHGRDNDAICKQIGADALIFQTLEDLVEAVRCGNPDIVKFEASVFNGEYVTGDIDQQYLDFLESMRSDDAKVQREIQQDLANLELHNEGA

SEQ ID NO: 132112 - DNA, 1422 bp, Bacillus halodurans C-125
  CDS (1)..(1422): transl_table=11
atgtttgctgaaatcaaaggcttaaacgaagaatgtggtgtgtttgcgatttggggtcatgaagatgcggcacaagtagcttattacggcttgcacagcctccaacatcgcgggcaagaaggcgctggaatcgttgtgacagatggccatcaactgtcggttcacaaaggactcggtttagttaatgatgtctttaatcctgatatttttgattcgttaaaaggaaaggcagctgtcggtcacgttcgctatgcgacggcaggaggtgggggctatgctaacgttcagccccttgtcttccgttcacagattggtagccttgcgatcgcccataacggaaatctcgtcaatgcgaaccatttaaaaaatcaattggagaatcagggaagtatttttcaatcaacgtccgatacagaagtgctcgcccatctcattaagcgaagcggatatcaccatattcgggagcagttgaaaagctcgctctccatgcttaaaggagcctatgcctttgcggtgatgacggaacgtgagctcatggtcgcacttgatccgaatggtttgcgccccctttccatcggtcgattgggagaagcctacgtcgttgcctctgaaacatgtgcctttgacgtcatcggtgctgaatatgtgcgtgaagtggagcctggggagctcgtgacgattaacgacgacggtcttacgtcagagcggtttgtaggcgaagcggcccgtgccatttgtagcatggagtacgtttacttcgcacgtcctgatagcaacgtggatacgatcaatgttcatacagctcggaaaaatttagggaagcaactcgcgattgaagctccagtagaagcagatgtcgtgactggggtacctgattccagtatctctgcggcgattggttatgctgagcagtcagggattccgtatgagttaggcttaatcaaaaatcgttatgtaggacgaacgtttattcagccgtcccaagccttgcgcgaacaaggggtcaaaatgaagctttccgctgtacgtggagttgtggaaggcaagcgtgtcgtcatgattgatgattccatcgtgcgtgggacgacgagccgacgaattgtcaacatgctccgtgaagcgggagcgaaagaggtgcatgtccgcattagtgcaccgccgattaagcatccgtgcttttatgggattgatacatcaacaaaagaagagttaattgcagccactcattcgattgaagagatgcgcaagcaaatgggtgcagactcgttatccttcttaagcttagaaggtcttgttaaaggggttggccgttcgaatgaagtgtcttcatgcggacaatgtttagcgtgctttaccggacaatacccgacagaaatttatcctgatacacttcatccacacgacaagcttttaccggtatag

SEQ ID NO: 132113 - protein, 473 aa, Bacillus halodurans C-125
MFAEIKGLNEECGVFAIWGHEDAAQVAYYGLHSLQHRGQEGAGIVVTDGHQLSVHKGLGLVNDVFNPDIFDSLKGKAAVGHVRYATAGGGGYANVQPLVFRSQIGSLAIAHNGNLVNANHLKNQLENQGSIFQSTSDTEVLAHLIKRSGYHHIREQLKSSLSMLKGAYAFAVMTERELMVALDPNGLRPLSIGRLGEAYVVASETCAFDVIGAEYVREVEPGELVTINDDGLTSERFVGEAARAICSMEYVYFARPDSNVDTINVHTARKNLGKQLAIEAPVEADVVTGVPDSSISAAIGYAEQSGIPYELGLIKNRYVGRTFIQPSQALREQGVKMKLSAVRGVVEGKRVVMIDDSIVRGTTSRRIVNMLREAGAKEVHVRISAPPIKHPCFYGIDTSTKEELIAATHSIEEMRKQMGADSLSFLSLEGLVKGVGRSNEVSSCGQCLACFTGQYPTEIYPDTLHPHDKLLPV

SEQ ID NO: 132114 - DNA, 1500 bp, Lactococcus lactis subsp. lactis Il1403
  CDS (1)..(1500): transl_table=11
atgtttggcaaagaacagacgcttgatttaagagtgctggggaagaattcgtccaatgaaaatagttggtggcaacaacatccagatgacgaacgatctcatttaaatgaagaatgtggacttttcggtgttttgggacatcctgatgctgctcgcctgacctattttggacttcatgctctccaacatcgcgggcaagaaggcgcagggattttggtcaataataatggcaaactcaatcgtcatcgtggtctgggtctggtcacagaagttttccgtgacgaaaaagatttggaagagctgacaggctcgtcagccattggacacgtccgttatgccacggctggttcagcaaatatcaataatattcagcctttccagtttgaatttcatgacggagcacttggacttgcccacaatggaaatttaaccaacgcccaatcattgcgctgtgaacttgaaaaatctggggcaatcttttctagtaattcagacacggaaattctcatgcacttgattcgccgtagtcatcatccagaatttatgggcagagtcaaagaagcgctcaatacggtcaaaggtggctttgcctatctcattatgactgaaaactcaattgtcgcagcccttgatcctaatggatttcgaccactctcaatcggaaaaatgagcaatggtgcgctcgttgtggcctcagaaacctgtgcttttgatgtcgttggtgccacttggattcaagatgttcaacccggtgaaatcattgaaattaatgacgacggcattcatgtggaccaatttactgacagcaccaacatgaccatttgttcaatggaatacatctattttgcccgtcctgacagtaatattgctggagttaatgttcatactgccagaaaacgttcaggaaaaattttagcccaagaagcccaaattgatgctgatattgtcatcggtgtgcctaattcatcactcagtgccgcttcaggctacgctgaagaatctggcttgccttacgaaatgggcctgattaaaaatcagtatgtggcaagaaccttcattcaaccgactcaagaacttcgtgaacaaggcgttcgcatgaaattgagtgctgttcgaggtgttgtagaaggcaaacgtgtcattatggtggatgatagtattgtgcgtgggacaaccagccgtcgcattgtcaaactcctcaaagacgcaggcgccgctgaagttcatgtggcaatcgccagtcccgctctcaaatatccttgcttttatggcattgatattcaagatcgtgacgaactcatcgcagctacacacacgactgatgaaatcagagaagctatcggagcagatagtctgacctatctcagccagacaggacttgtcgaggcgattggtcatgataaactttgcttgtcatattttgatggcgaatatccaacgccgctttatgattatgaagctgactatttggaatcgttagcgaaaaatagcgtgaaatga

SEQ ID NO: 132115 - protein, 499 aa, Lactococcus lactis subsp. lactis Il1403
MFGKEQTLDLRVLGKNSSNENSWWQQHPDDERSHLNEECGLFGVLGHPDAARLTYFGLHALQHRGQEGAGILVNNNGKLNRHRGLGLVTEVFRDEKDLEELTGSSAIGHVRYATAGSANINNIQPFQFEFHDGALGLAHNGNLTNAQSLRCELEKSGAIFSSNSDTEILMHLIRRSHHPEFMGRVKEALNTVKGGFAYLIMTENSIVAALDPNGFRPLSIGKMSNGALVVASETCAFDVVGATWIQDVQPGEIIEINDDGIHVDQFTDSTNMTICSMEYIYFARPDSNIAGVNVHTARKRSGKILAQEAQIDADIVIGVPNSSLSAASGYAEESGLPYEMGLIKNQYVARTFIQPTQELREQGVRMKLSAVRGVVEGKRVIMVDDSIVRGTTSRRIVKLLKDAGAAEVHVAIASPALKYPCFYGIDIQDRDELIAATHTTDEIREAIGADSLTYLSQTGLVEAIGHDKLCLSYFDGEYPTPLYDYEADYLESLAKNSVK

SEQ ID NO: 132116 - DNA, 1545 bp, Neisseria meningitidis MC58
  CDS (1)..(1545): transl_table=11
atgtgcggcgtattaggtttggtcagtcatgaacccgtgaaccagcttctgtacgacggcttgcagatgttgcagcacagggggcaggatgcggcgggcattgcaacggcggaaggcggtaccttccatatgcacaaaggcaaaggcatggtgcgcgaagtgttccgcacacgcaatatgcgcgatttgaccggcaacgccggcatcgcccacgtccgttatcctactgcgggcaacgcaggcagcagcgcggaggcgcagcctttctacgtcagctcgccgttcggcatcgttttggcgcacaacggcaacctcaccaacactgccgaactgtatgaaaacgtgtgtaacaaacacctgcgccacgtcaacaccagctccgattccgaagtcttgctcaacgtattcgcgcacgaattacgccgcgaagtctctaaaaacgccgacccgcaccggctcaatgccgacaatattttcaacgccgttgcccaagtccaccgcctggtgcgcggcgcatacggtgtgattgccatgattgcgggctacggtatgctcgccttccgcgacccttacggcatccgcccgctggtattgggttcgcaaaccgacagcgaaggcagaaaatcctatgccgtcgcctccgaatccgtcgccttcaacgcgcttacctacgatttggaacgcgacatccggccgggcgaagcggtatttgtcggctttgacggcacaatgattgcccgccaatgcagcgaccgtgccaaactcagcccctgcctttttgaatatgtttattttgcccgccccgactctgtgattgacggcgtatccgtttaccaatcgcgcttggatatgggcgtgtcgctggcggaaaaaatcaaacgcgagctgcccgtggacggcatcgatgtcgtgatgcccattcccgacaccagccgccccagcgcgatggagcttgccgtccatctcgacaaaccctaccgcgagggtttgattaaaaaccgctatatcggccgcacctttattatgcccggacaggcgacgcgcaaaaaatccgtgcgccaaaaactcagcccgatggaaaccgaatttgcaggcaaaagcgtgttgctggtggacgactccatcgtgcgcgggacgaccagccgcgaaatcgtcgaaatggtacgcgcggcgggcgcgcgcaaagtctatatcgcctccgccgcgcccgaagtgcgctatcccaatgtgtacggcattgatatgcccacgcgcgaagagttgattgccaacgggcgcagcgcggcggaaatcgccgccgaaatcggcgcggacggcatcgtatttcaagacttgggcgatttggaagccgtcgtcaaagcactcaatccgaaaatcgaatccttcgattcgtcctgtttcaacggcatttatcagaccggcgacatcgatgatgcctacctcgaccgcctgtctgccgagaaatccggctgcggcggtctgaaaatccacccgagcaggatggaacacagcatcagcatcagcgatgcgggcgacgaagaataa

SEQ ID NO: 132117 - protein, 514 aa, Neisseria meningitidis MC58
MCGVLGLVSHEPVNQLLYDGLQMLQHRGQDAAGIATAEGGTFHMHKGKGMVREVFRTRNMRDLTGNAGIAHVRYPTAGNAGSSAEAQPFYVSSPFGIVLAHNGNLTNTAELYENVCNKHLRHVNTSSDSEVLLNVFAHELRREVSKNADPHRLNADNIFNAVAQVHRLVRGAYGVIAMIAGYGMLAFRDPYGIRPLVLGSQTDSEGRKSYAVASESVAFNALTYDLERDIRPGEAVFVGFDGTMIARQCSDRAKLSPCLFEYVYFARPDSVIDGVSVYQSRLDMGVSLAEKIKRELPVDGIDVVMPIPDTSRPSAMELAVHLDKPYREGLIKNRYIGRTFIMPGQATRKKSVRQKLSPMETEFAGKSVLLVDDSIVRGTTSREIVEMVRAAGARKVYIASAAPEVRYPNVYGIDMPTREELIANGRSAAEIAAEIGADGIVFQDLGDLEAVVKALNPKIESFDSSCFNGIYQTGDIDDAYLDRLSAEKSGCGGLKIHPSRMEHSISISDAGDEE

SEQ ID NO: 132118 - DNA, 1473 bp, Halobacterium sp. NRC-1
  CDS (1)..(1473): transl_table=11
atgtcaggcggccccgcggacggacccatgagtgaccatccaaccgagaaatgtggggtcgtcggtgcctcactgtcggcccgtgacgccgcgcttccgacgtactacgcgctgtacgccctccagcaccgcggccaggagtcggcgggcatcgtcgcccacgacggcttccagcaacaccaacacgtcggcatggggctggtgggtgacgccttcgacgaagccgacatcgacgcgctgcacggttcggccgccatcggccacgttcgctatccgaccgcggggagcgtcgacaagtcctgcgcgcagccgttctcggtgtcgttcaagggcggtgcgctcggcctgagccacaacggcaacctcgtcaacgccgacgagttgcgcgcggacctcgcggcaagcgggcacgcgttcaccagcgacggcgacaccgaggtcatcgcccacgacctcgcgcgcaacctcctcgacgccgacctcgtggacgccgtcgagcggaccatggagcgcatccacgggtcgtactcgctgaccatcatgcacgacgacaccgtgttgggcgtccgggacccacgggggaaccgcccgctggtgctggggaccgtcgaggacggctacgtcatcgccagcgagtccgccgcgatcgacaccatcggcggcgatgtcgtccgtgacgtccgtcccggcgaggcgatcgtcctcgacgacgacggcacggggttttccgcccaccagctcgtcgaccgcgacaccactgcccactgctttttcgagtacgtgtatttcgcgcgcccggattcggtcatcgacgacgaactcgtctacgaggtccggcgcaacctcggccgccaactgtggcacgagaccggcgtcgaaagcgatgtcgtggtgcccgtccccgactccgggcgggcgttcgcgtccggctacgccgacgccgccaccgaagacgggagcgacgtggagttcgccgaggggttgatgaaaaaccggtacgtcggccgcacgttcatcatgcccacccaggaggcccgcgagcgcgccgtccggctcaagctcaaccccatcaagtccaccgtcgaggggcagtcggtcacgatcatcgacgactccatcgtacggggcacgaccagcagccagctcgttgatctggtccgggacgcgggcgcaaccgaggtccacgtgcgcatcggcgccccccagatacaggccccgtgttacttcggcatcgacatggcgacccgcgaggaactcatcgccgccgaccggacggccgacgagatcgcggcggagatcggcgcggactcgctgtcgtatctcccgctgtccgcggtcacggcggccatcgggaagagcgaagccgacatgtgcgcggggtgtgtgaccggcgcgtacccatacgacgtcgacggcgaggcgaccgaccgggacgccgagcgcccgacagtcacgccgtccagcgacgactga

SEQ ID NO: 132119 - protein, 490 aa, Halobacterium sp. NRC-1
MSGGPADGPMSDHPTEKCGVVGASLSARDAALPTYYALYALQHRGQESAGIVAHDGFQQHQHVGMGLVGDAFDEADIDALHGSAAIGHVRYPTAGSVDKSCAQPFSVSFKGGALGLSHNGNLVNADELRADLAASGHAFTSDGDTEVIAHDLARNLLDADLVDAVERTMERIHGSYSLTIMHDDTVLGVRDPRGNRPLVLGTVEDGYVIASESAAIDTIGGDVVRDVRPGEAIVLDDDGTGFSAHQLVDRDTTAHCFFEYVYFARPDSVIDDELVYEVRRNLGRQLWHETGVESDVVVPVPDSGRAFASGYADAATEDGSDVEFAEGLMKNRYVGRTFIMPTQEARERAVRLKLNPIKSTVEGQSVTIIDDSIVRGTTSSQLVDLVRDAGATEVHVRIGAPQIQAPCYFGIDMATREELIAADRTADEIAAEIGADSLSYLPLSAVTAAIGKSEADMCAGCVTGAYPYDVDGEATDRDAERPTVTPSSDD

SEQ ID NO: 132120 - DNA, 1338 bp, Campylobacter jejuni subsp. jejuni NCTC 11168
  CDS (1)..(1338): transl_table=11
atgtgtgcagttgtaggagttatcaattcaaaaaatgctagcacttatgcgtattatgcgctttttgctatgcaacaccgtgggcaagaagcaagtggcattagtgtgagtaatggtaaaaatattaagactattaaagctaaaggtgaagtgagtcaaatttttaatcctgataatctaaaaactttagaaggtgaaatcgctataggccataatcgctattctacagcaggaaattcaagtttaaatgacgctcagcccatagcagctacttcggttttaggtgatattgctttagcgcataatggaaatttagtcaataaagaagaggtaagatcaagacttattcaagatggagctatttttcaaaccaatatggatacagaaaatgttgtccatcttatcgcaagaagtaagcaagaaagtctaaaagatagatttattgagagtttaaaagaatgtataggagcttattgttttgttttagcaagcaaagataaactttatgttgtaagagatcctcatggggtgcgtcctttgtctttagggcgtttaaaagatggaggctatatagttgctagtgaaacttgtgcttttgatcttatagaggctgaatttattcgtgatgttaaaccaggggaaatgcttatttttactcagggaaatgataaatttgaaagcatagaacttttttctcaaactcctagaatttgcgcttttgaatacatttattttgctagacctgatagtatagtagaaggcaaaagcgtgtatgaagtgcgtaaaaaaatgggcgaagctttagctaaaaaatttgcttataaagcagactttgtcgtgcctgtgccagatagtggagtaagtgcagctataggttttgcgcaatatttacaaatccctcttgaaatggcaatagtaagaaatcattatgtaggaagaacttttatagagccaactcaagagcttagaaatttaaaagtaaaattaaaacttaatcctatgcgtaaagttttagaaggcaaagaaatcgtagtcattgatgatagcttggtgcgtggcactacttctaaaaaaataatttctttgcttcgtgctgcaggagcgagcaaaatccatcttgccatagcttgtcctgagatcaaatttcctgatacttatggcatagatactccaacttttgaagaacttatcagtgcaaataaaaatgctgaagaagtgcgtgaatatgtagaagctgatacgctaagttttttaagcatagaagagctaactcaaagcataggcgatgaaaggaaatattctttaatcagttttgatggagattattttattaaataa

SEQ ID NO: 132121 - protein, 445 aa, Campylobacter jejuni subsp. jejuni NCTC 11168
MCAVVGVINSKNASTYAYYALFAMQHRGQEASGISVSNGKNIKTIKAKGEVSQIFNPDNLKTLEGEIAIGHNRYSTAGNSSLNDAQPIAATSVLGDIALAHNGNLVNKEEVRSRLIQDGAIFQTNMDTENVVHLIARSKQESLKDRFIESLKECIGAYCFVLASKDKLYVVRDPHGVRPLSLGRLKDGGYIVASETCAFDLIEAEFIRDVKPGEMLIFTQGNDKFESIELFSQTPRICAFEYIYFARPDSIVEGKSVYEVRKKMGEALAKKFAYKADFVVPVPDSGVSAAIGFAQYLQIPLEMAIVRNHYVGRTFIEPTQELRNLKVKLKLNPMRKVLEGKEIVVIDDSLVRGTTSKKIISLLRAAGASKIHLAIACPEIKFPDTYGIDTPTFEELISANKNAEEVREYVEADTLSFLSIEELTQSIGDERKYSLISFDGDYFIK

SEQ ID NO: 132122 - DNA, 1545 bp, Neisseria meningitidis Z2491
  CDS (1)..(1545): transl_table=11
atgtgcggcgtattaggtttggtcagtcatgaacccgtgaaccagcttctgtacgacggtttgcagatgttgcagcacagggggcaggatgcggcgggcattgcaacggcggaaggcggtaccttccatatgcacaaaggcaaaggcatggtgcgcgaagtgttccgcacacgcaatatgcgcgatttggtcggcaacgccggcatcgcccacgtccgttatcctactgcgggcaacgcgggcagcagcgcggaggcgcagcctttctacgtcagctcgccgttcggcatcgttttggcgcacaacggcaacctcaccaacacggccgaactttatgaaaacgtgtgcaacaaacacctgcgccacgtcaacaccagctccgattccgaagtcttgctcaacgtattcgcgcacgaattgcgccgcgaagtctctaaaaacgccgacccgcaccggctcaatgccgacaatattttcaacgccgttgccgaagtccaccgcctggtgcacggcgcatacggtgtggttgccatgattgcgggctacggtatgcttgccttccgcgacccttacggcatccgcccgctggtattgggttcgcaaaccgacagcgaaggcaggaaatcctatgccgtcgcctccgaatccgtcgccttcaacgcgcttgcctacgatttggaacgcgatatccggccgggcgaagcggtatttgtcggctttgacggcacaatcatcgcccgacaatgcagcgataaggccaaactcagcccctgcctttttgaatacgtctattttgcccgtcccgactccgtgattgacggcgtgtccgtttaccagtcgcgcttggatatgggcgtgtccttggcggaaaaaatcaaacgcgagctgcccgtggacggcatcgatgtcgtgatgcccatccccgacaccagccgccccagcgcgatggagcttgctgtccacctcaaaaagccttaccgcgaaggtttgattaaaaaccgctatatcggccgcacctttattatgcccggccaggcgacgcgcaaaaaatccgtgcgccaaaaactcagcccgatggaaaccgaatttgcaggcaaaagcgtgttgctggtggacgactccatcgtgcgcggtacgaccagccgtgaaatcgtcgaaatggtacgcgcggctggcgcgcgcaaagtctatatcgcctccgccgcgcccgaagtgcgctatcccaacgtatacggcatcgatatgcccacgcgcgaagagttgattgccaatgggcgcagcgcggcggaaatcgccgccgaaatcggcgcggacggcatcgtgtttcaagacttgggcgatttggaagccgtcgtcaaagcactcaacccgaaaatcgaatccttcgattcgtcctgtttcaacggcatttatcagaccggcgacatcgatgatgcctacctcgaccgcctgtctgccgagaaatccggctgcggcggtctgaaaatccacccgagcaggatggaacacagcatcagcatcagcgatgcgggcgacgaagaataa

SEQ ID NO: 132123 - protein, 514 aa, Neisseria meningitidis Z2491
MCGVLGLVSHEPVNQLLYDGLQMLQHRGQDAAGIATAEGGTFHMHKGKGMVREVFRTRNMRDLVGNAGIAHVRYPTAGNAGSSAEAQPFYVSSPFGIVLAHNGNLTNTAELYENVCNKHLRHVNTSSDSEVLLNVFAHELRREVSKNADPHRLNADNIFNAVAEVHRLVHGAYGVVAMIAGYGMLAFRDPYGIRPLVLGSQTDSEGRKSYAVASESVAFNALAYDLERDIRPGEAVFVGFDGTIIARQCSDKAKLSPCLFEYVYFARPDSVIDGVSVYQSRLDMGVSLAEKIKRELPVDGIDVVMPIPDTSRPSAMELAVHLKKPYREGLIKNRYIGRTFIMPGQATRKKSVRQKLSPMETEFAGKSVLLVDDSIVRGTTSREIVEMVRAAGARKVYIASAAPEVRYPNVYGIDMPTREELIANGRSAAEIAAEIGADGIVFQDLGDLEAVVKALNPKIESFDSSCFNGIYQTGDIDDAYLDRLSAEKSGCGGLKIHPSRMEHSISISDAGDEE

SEQ ID NO: 132124 - DNA, 1434 bp, Deinococcus radiodurans R1
  CDS (1)..(1434): transl_table=11
atgtctgaacacttccacgaacacgacctgaatttcgacaagccccgcgaggaatgcggcgttttcggcatctactctgcgcagcccaacgacctcgcgtggctgacctacctgggcctgttcgccctacaacaccgggggcaggaagcggcgggcatgtgcgtcagcgacggcgaccgctttcacgtcgagaaagacctggggctggtcacgcaggtgttcgacgagcggcggctcgacagcgtgcggctggcaggcgcgcaggtcagcatcgggcacgtgcgctactcgaccaccggctccaacctgcgcttcaacgcccagccgctgaccacccgcaccaacaagggcattctgggcatggcgcacaacggcaacttcgtcaacgcgctggaagtgcggcgcgagatgctggaagaaggcgccttgttcgccaccaccaacgacagcgaagtgatgctgaacctgattgcccgcgagagccgcatggacctcgtggaagcgacggcggcggccatgcagcgcctgcgcggcggctatgcctgcgtgctgatgagccgcagccagcttctcggctttcgcgacccgcacggtgttcggcccctggttatcgggcagcgggaggacggcgcgtgggtgctggcttccgaaccctgcgccctgtacgccatcggggcgcggctgattcgggatgtggcgcccggcgaactcgtctggattgaccgcgaagggctgcactccttgatggtcgaggcccgccagcccaccccctgctcgttcgagtggatttattttgcccgctccgacagccagctcgacggcatcgacacccacgagagccgcattcgcatgggccagcagctcgcccgcgaaaagccggtggaggccgacatcgtggtgcccgtgcccgactccggcatcggcgccgccatcgggtacgcccgcgagagcggcatcccgttcgactacggcctctacaaaaacccctacgcgggccgcacctttatcgcccccacgcaggaagcccgcgagctgaaggtcaagatgaagctctcccccacctccgccgtgcgcggcaagcgggtggtgctggtggacgactccatcgtgcgcggcaccaccagccgccagatcgtcaacctgctgcgcgacgcgggcgccaccgaagtgcacttccgcgtgtccagcccgcccatcactcacccgtgcttttacggcatcgacaccgccgcccgcaaggaactggtcgcctcgacgcacagcgtggacgaaatccgtgacctcatcggcgccgacaccctggccttcatcagcgaacaggggctgcgcaaggccatcggcggccctggcctctgctcggcgtgctttacgggggattacccggcaggcacaccgctgttgaatgatgtggataagttggcgctggaagtctag

SEQ ID NO: 132125 - protein, 477 aa, Deinococcus radiodurans R1
MSEHFHEHDLNFDKPREECGVFGIYSAQPNDLAWLTYLGLFALQHRGQEAAGMCVSDGDRFHVEKDLGLVTQVFDERRLDSVRLAGAQVSIGHVRYSTTGSNLRFNAQPLTTRTNKGILGMAHNGNFVNALEVRREMLEEGALFATTNDSEVMLNLIARESRMDLVEATAAAMQRLRGGYACVLMSRSQLLGFRDPHGVRPLVIGQREDGAWVLASEPCALYAIGARLIRDVAPGELVWIDREGLHSLMVEARQPTPCSFEWIYFARSDSQLDGIDTHESRIRMGQQLAREKPVEADIVVPVPDSGIGAAIGYARESGIPFDYGLYKNPYAGRTFIAPTQEARELKVKMKLSPTSAVRGKRVVLVDDSIVRGTTSRQIVNLLRDAGATEVHFRVSSPPITHPCFYGIDTAARKELVASTHSVDEIRDLIGADTLAFISEQGLRKAIGGPGLCSACFTGDYPAGTPLLNDVDKLALEV

SEQ ID NO: 132126 - DNA, 1458 bp, Xylella fastidiosa 9a5c
  CDS (1)..(1458): transl_table=11
atgtgtggtatcctcggtatcgttggcaatcaaaacgttgctggccaactctatgacggtttgactgttctgcagcatcgtggacaagatgctgcaggcattgccacggccagtggcactcgcttgcgcgttcaaaaggccaatggtttggtacgagacgtattcgacgagcagcgtatggcggtccttgatggctgtattgggattgctcattgccgttatccaactgctggttctgaggggatggatgaggcacaacctttttacgtcaactcaccgtatggcattgctctagcacataatggaaaccttatcaacacagaggcgctacaccaacaggtgttcgaagcggatcgacgtaacatcaacaccgactctgacagcgaggtattacttaacgtattcgcatatgagttagatgcgcagcgtatgctcactccagaagcggcaattcgtgctgtagcaggagtacatcgccgctgtaagggcggctatgccgtagtcagcatgatattagggctgggacttgttgcattccgcgatccacacggtatccgtccgttggtgctgggaaagcgtgtacataccgaaggtgatgaatatatggtcgcttccgaatcagctgcactcgatatcctagggtttatacgtatacgcgatgtacgtccaggtgaggctgtggtgattactgcacgtggcgaactgttttcagaggtctgtgctacacctaccaaccatgctccatgcattttcgagtacgtttacttcgcacgtccggattcgatgatcgataatatttcagtacataaggcgcgcatgcgtatgggtgtgaagttaggtgaaaagatcctgcgcttgcgcccgaatcacgatatcgacaccattattccgataccggatacctcgcgggatgcagcgctggaaatatctaacgtgctcggcgtaaagtatcgcgaaggtttcgttaaaaatcgctacgttggccgtacttttatcatgccgggacagggagagcgagttaagtcagtacgtcgtaaacttaacccaatccatctggagttccgaaaccgcgtggtgctgttgattgatgattcaattgttcgcggtaccaccagccgccagattgtccagatggtaagagatgctggtgcacgcaaggtgtacttagcaagtgctgcgcctcctgtgcgttatccaaatgtgtatggcattgatatgccagctgcagatgaattaatcgcacatgatcggactgagcaggaaatacaatcccttcttggctgcgactggttgatttaccaagatttagaggatctagaaaacgctgtgcgcgagggaaaccaagaaatcaagcaatttgattcctcgtgcttcaatggtcattacatcactggaattgaacggggctatttagatcgcatccgtcaactacgctccgatgaggtaaagcgaaaataa

SEQ ID NO: 132127 - protein, 485 aa, Xylella fastidiosa 9a5c
MCGILGIVGNQNVAGQLYDGLTVLQHRGQDAAGIATASGTRLRVQKANGLVRDVFDEQRMAVLDGCIGIAHCRYPTAGSEGMDEAQPFYVNSPYGIALAHNGNLINTEALHQQVFEADRRNINTDSDSEVLLNVFAYELDAQRMLTPEAAIRAVAGVHRRCKGGYAVVSMILGLGLVAFRDPHGIRPLVLGKRVHTEGDEYMVASESAALDILGFIRIRDVRPGEAVVITARGELFSEVCATPTNHAPCIFEYVYFARPDSMIDNISVHKARMRMGVKLGEKILRLRPNHDIDTIIPIPDTSRDAALEISNVLGVKYREGFVKNRYVGRTFIMPGQGERVKSVRRKLNPIHLEFRNRVVLLIDDSIVRGTTSRQIVQMVRDAGARKVYLASAAPPVRYPNVYGIDMPAADELIAHDRTEQEIQSLLGCDWLIYQDLEDLENAVREGNQEIKQFDSSCFNGHYITGIERGYLDRIRQLRSDEVKRK

SEQ ID NO: 132128 - DNA, 1353 bp, Sulfolobus solfataricus P2
  CDS (1)..(1353): transl_table=11
atggatagcatacgtgataaatgtggagtctttgctgtatctagccctaaagaagtaaatattcaactggtagtagagggaattagactacttcagcataggggtcaagaatctgcaggaatcgcatatgctgagaatggggaaatattgacgattaagggatctggacttgtagacgaagtatttaaggaaaatcttaataaatttataaaaaatggaataggtcatgtaagatattcaacaagtggaaaaagctcaattgaagaagcacagcctttaggcgactcaaaaatagtcgtggcgttcaatgggacaataagcaactattaccagtttggatcatttagggtagatactgaatttatatataagttctttaagcaaaaattggcctttcgctctatccctgatactgtaaaggaatttatgaaagttgtcgatggtggatactctgtagctattcttttgaatgatgaagagattgtagtatttagagatcctaaaggatttcatccagttgtattaggatttttagaaggatcattaatagtttcctcggaggattccgttattagacaactaggtgggagcgttttgaaacatattctaccaagcgaaatgataattatgaaaaatggcaaaatattatatgacaaagtaatctatgaggagaaaaattacgctacttgttccttcgaatatatatactttgcaagaccagattccaatatagatgggcattcagtttacttagctaggataaggttaggtgaattattagcagaaaaacacccagctaacggagatattgtagttccagtgccggactcatcaaggccaatagcgctgggcttttctagaaaaagtcacatacctttagaggaacctctagttagaacaatttcctctgtaaggtccttcataatgccaactcaagataagagaaatgaggtattagaagagaaatttggagtggttgcagatgcagtaagggggaaaagaatagttttaatagacgactcaatagttaggggaaatactatgaagagaataataactatgttacgtaaagccggcgccaaagaaattcatgtacgtataggatcacctatgataaaatacccttgttatatgggaatagactttcctaaaagagaagagttgattgcgcataataaatctgaaaaagaaataggaaatgagctgaacgctgattctattgaatttctaagtgtcgaagagatgttacaaggaataggtagaagagacttatgcaatgcatgcttttctgggatttatcctctcaaatttaactataattctacagagttagaaagaatatttgggaagtga

SEQ ID NO: 132129 - protein, 450 aa, Sulfolobus solfataricus P2
MDSIRDKCGVFAVSSPKEVNIQLVVEGIRLLQHRGQESAGIAYAENGEILTIKGSGLVDEVFKENLNKFIKNGIGHVRYSTSGKSSIEEAQPLGDSKIVVAFNGTISNYYQFGSFRVDTEFIYKFFKQKLAFRSIPDTVKEFMKVVDGGYSVAILLNDEEIVVFRDPKGFHPVVLGFLEGSLIVSSEDSVIRQLGGSVLKHILPSEMIIMKNGKILYDKVIYEEKNYATCSFEYIYFARPDSNIDGHSVYLARIRLGELLAEKHPANGDIVVPVPDSSRPIALGFSRKSHIPLEEPLVRTISSVRSFIMPTQDKRNEVLEEKFGVVADAVRGKRIVLIDDSIVRGNTMKRIITMLRKAGAKEIHVRIGSPMIKYPCYMGIDFPKREELIAHNKSEKEIGNELNADSIEFLSVEEMLQGIGRRDLCNACFSGIYPLKFNYNSTELERIFGK

SEQ ID NO: 132130 - DNA, 1215 bp, Sulfolobus solfataricus P2
  CDS (1)..(1215): transl_table=11
gtgatattaatggctggaatactaggtatattagcgttcgatgatgtatggaatgtatctagatttttatattatggtctaataggcttgcaacatagaggatattctaaaagtggaatagcaatattgaacaagcagaggaatatatttactaaactagagaacgtagcgcctgaggatttagaaattaaagacttgaatggatgggctggaataggttatgctggaatcagaaatagttatcccataacaatagataatggtgctatagtcgttgatgggatgatagatgataacaatgttcttaaccatgtcataagagagccagaaaatgcaatagatgatattaaaaagccgatctcgttcatagccattagtaaagacggccagttaatagcctatagagacgaactaggacttaagccgttaagcataggtggatttggattcgatttagcagttatttcctccgaaccaacgtcaatgtttgtaataggggctgagttcaaaagggaaattaatccgggagagttagtgatcgttgacaaatatcatattgaatccaaacaggtgagaatacctagaaaatcgtattgtactatagagtacgtataccaagctagaatagacagtatgatcaacgaaagagaaatctatgacctaagagtgaaaataggggaagaattagccttagaatatccaataaatgctgattcagtaataggagttccagaaaccgcattacctttcgcaataggctattccaagaaattaaatataccattagacttaggctttacgaggacagggagcccaataaggacaatgttatcttctgatgctttcctaaaaatagttggggtccaacttaagctaaacccaataaaaagtgcagtaaaaggaaagagaataattctaatagatgattctatggtcaccggaactacccttaaaaacactatatttaacttgagaaaattgggcgcaaaggaaatccacgtgctgataggaagccctaaattagtctcacaatgtccgtacggagttgaagtccccgacgaaaaagaattgatctcagctaatcttaacgacgaaactatagcgagggttttaggtgcagactctatacactggttaagcatagaaggattgttcaaagccattgggcatagggatctctgcttaggatgtatgactaaaaaatatccatggtga

SEQ ID NO: 132131 - protein, 404 aa, Sulfolobus solfataricus P2
MILMAGILGILAFDDVWNVSRFLYYGLIGLQHRGYSKSGIAILNKQRNIFTKLENVAPEDLEIKDLNGWAGIGYAGIRNSYPITIDNGAIVVDGMIDDNNVLNHVIREPENAIDDIKKPISFIAISKDGQLIAYRDELGLKPLSIGGFGFDLAVISSEPTSMFVIGAEFKREINPGELVIVDKYHIESKQVRIPRKSYCTIEYVYQARIDSMINEREIYDLRVKIGEELALEYPINADSVIGVPETALPFAIGYSKKLNIPLDLGFTRTGSPIRTMLSSDAFLKIVGVQLKLNPIKSAVKGKRIILIDDSMVTGTTLKNTIFNLRKLGAKEIHVLIGSPKLVSQCPYGVEVPDEKELISANLNDETIARVLGADSIHWLSIEGLFKAIGHRDLCLGCMTKKYPW

SEQ ID NO: 132132 - DNA, 1443 bp, Streptococcus pneumoniae TIGR4
  CDS (1)..(1443): transl_table=11
atgacatacgaagtaaaatctcttaatgaagaatgtggtgttttcggtatttggggacatccagatgctgctaagttgacctattttggactccacagtcttcaacaccgtggtcaggagggggcaggaatcctctccaatgatcaaggacaactgaagcgccatcgtgacatggggcttttatcagaagttttcagaaatccagctaatttggataaattgacaggagctggtgcgattgggcatgtgcgttatgcgactgctggcgaagcttctgtagataacatccagcccttcctcttccgttttcacgatatgcagtttggtttggctcataatggaaatctgaccaatgcagcctctctcaagaaagaactggaacaaagaggagcaattttcagcgcgacttcggactctgaaatcttggctcacctcattcgtcgcagtcataatcctagcctgatgggcaaaatcaaggaagcgctcagccttgtcaaaggtggttttgcctatatcttgctgtttgaggacaagttgattgcggctcttgacccaaatggattccgaccgctttcgattggtaaaatggctaatggagcagttgttgtatcttctgaaacctgtgcttttgaggtcattggtgccgagtggattcgtgatttgaagccaggtgagattgtgatcattgatgacgagggcattcagtatgacagctatacagatgatacccagttggcggtttgttctatggagtatatctactttgctcgccctgattctaatatccacggtgtcaatgtccatacggcacgtaagagaatgggagcgcaattggcgcgagaatttaagcatgaggcagatattgtagttggtgtgcccaattcttccctaagcgcggctatgggatttgcggaagaatcaggcttaccaaatgaaatgggtctgatcaaaaaccaatacacccagcgaacttttatccaaccgactcaagaattgcgggagcaaggagtgcggatgaaactgtctgctgtttcgggtgttgtcaaaggcaaacgtgtggtcatggtggatgattccattgtacgtggaacaacctctcgtcgtatcgttcagctcttgaaagaagcgggtgcgactgaggttcacgttgccattggaagtcctgcactagcgtatccatgtttctacgggattgatatccagacccgtcaggagctgattgcagccaatcatacggtcgaagaaactcgccaaatcattggtgcggacagtctgacttatctttcaattgatggcttgattgagtcgattggtatcgaaacagatgcgccgaacggtggtctctgtgtcgcttactttgacggtgactacccaacgcctctttatgactacgaagaagactatcgtagaagtttggaagaaaagaccagtttttacaagtag

SEQ ID NO: 132133 - protein, 480 aa, Streptococcus pneumoniae TIGR4
MTYEVKSLNEECGVFGIWGHPDAAKLTYFGLHSLQHRGQEGAGILSNDQGQLKRHRDMGLLSEVFRNPANLDKLTGAGAIGHVRYATAGEASVDNIQPFLFRFHDMQFGLAHNGNLTNAASLKKELEQRGAIFSATSDSEILAHLIRRSHNPSLMGKIKEALSLVKGGFAYILLFEDKLIAALDPNGFRPLSIGKMANGAVVVSSETCAFEVIGAEWIRDLKPGEIVIIDDEGIQYDSYTDDTQLAVCSMEYIYFARPDSNIHGVNVHTARKRMGAQLAREFKHEADIVVGVPNSSLSAAMGFAEESGLPNEMGLIKNQYTQRTFIQPTQELREQGVRMKLSAVSGVVKGKRVVMVDDSIVRGTTSRRIVQLLKEAGATEVHVAIGSPALAYPCFYGIDIQTRQELIAANHTVEETRQIIGADSLTYLSIDGLIESIGIETDAPNGGLCVAYFDGDYPTPLYDYEEDYRRSLEEKTSFYK

SEQ ID NO: 132134 - DNA, 1428 bp, Clostridium acetobutylicum ATCC 824
  CDS (1)..(1428): transl_table=11
atgataaaagaacagtgcgcagctgaaaatgaagatatggataagttcaaagaagaatgcggtgtatttggaattttttcaaataaagatatagatgcttctagactaacttactacggtttatatgctcttcaacacaggggacaggagagtgcaggcattgctgtatccaatggaaaagaactttgtgtttataaaaatatggggcttgtagcagatgtgttcaatcctgaaattatagattcattggttggaagctctgccataggtcatgttagatactcgacaacaggtggaagtaatgcaaacaatgctcagcctataatgagtaattttaaattagggtctattgctattgctcataatggtaacctagttaatgctgatgttataagagaacttctacaggatggcggcactatgttccaaacttccattgatactgaagttatcttgaatcttatagctagagctgctaaaaagggaatagagaaagcagttgtggatgcaattcaagcaatcaaaggttcatacgctattgtaattctcacaaaggataaattaataggagttagagatccaaatggtataagaccactttgtattgggaaaattgatgatagctatataatttgttctgaaagttgtgcactggatactgtaggtgctgagtttgttagagatgtaaatcctggagaaatagtaatagttgataaggacggacttagaagtataaattttgcagaaaaaacaaagtgcgaaacctgtgcttttgaatatatttattttgctagacctgacagtgtaatagatggaatagatgtaaataaatcaagagaacttgctggagaacaattatttaaggattctcctgtagaggcagacatagtaattggagtacctgattcaggaataccagcggcaattggttacgctagagcttctgggataccgtatactttggggctgataaaaaataaatacataggtagaacctttatagctccaacacaggaacttagggaaaaagctgtatctgttaagctgaatcctgtgaagtcaataatagagggaaaaagagttgttttaatagatgactccatagttagaggaactacaagcaagagacttgtggatattatacgtaaagctggagcaaaagaagtacattttagggtgtcttcacctatagtaaaatttccatgctactttggaatagatactccttatagaaaagacctcattggtgcacataaaacagttgaagaaataagagattttataggagcagatagtttgggatatttaagtatagacgctcttttaaaaacccttggaaaagataaaaaattttgtcttggatgctttaatggtgtatatccagtgtcagcaccagttgaggctgataaggatagacttgaaacttaa

SEQ ID NO: 132135 - protein, 475 aa, Clostridium acetobutylicum ATCC 824
MIKEQCAAENEDMDKFKEECGVFGIFSNKDIDASRLTYYGLYALQHRGQESAGIAVSNGKELCVYKNMGLVADVFNPEIIDSLVGSSAIGHVRYSTTGGSNANNAQPIMSNFKLGSIAIAHNGNLVNADVIRELLQDGGTMFQTSIDTEVILNLIARAAKKGIEKAVVDAIQAIKGSYAIVILTKDKLIGVRDPNGIRPLCIGKIDDSYIICSESCALDTVGAEFVRDVNPGEIVIVDKDGLRSINFAEKTKCETCAFEYIYFARPDSVIDGIDVNKSRELAGEQLFKDSPVEADIVIGVPDSGIPAAIGYARASGIPYTLGLIKNKYIGRTFIAPTQELREKAVSVKLNPVKSIIEGKRVVLIDDSIVRGTTSKRLVDIIRKAGAKEVHFRVSSPIVKFPCYFGIDTPYRKDLIGAHKTVEEIRDFIGADSLGYLSIDALLKTLGKDKKFCLGCFNGVYPVSAPVEADKDRLET

SEQ ID NO: 132136 - DNA, 1509 bp, Agrobacterium tumefaciens str. C58
  CDS (1)..(1509): transl_table=11
atgattgagccgctttcgcattccccgttttctgggtccactttcaaggaagagatcgatggcgatacgctgcatgaagaatgcggcgttttcggcattctcggccatgacgatgcctcggcgctgaccgctctcggcctgcatgcgcttcagcatcgcggccaggaagcagccggcatcgtctcctttgatggcaagcgcttccatcaggagcgccatatgggcctcgtcggcgatcattataccgatccggcaacccttgcccgcctgcccggctccatcgcgattggccacacccgttattccacgacaggcgaagtggcgatgcgcaatgtgcagccgctgtttgccgagctggaagaaggcggcatttcgattgcccataacggcaatttcaccaacggcctgacgctgcgccgccagatcatcgccaccggcgccatctgtcagtcgacatcggataccgaagtcgtgctgcatctcatcgcccgttcacgccactcttccaccgccgatcgtttcatcgatgctatcaggcagatggaaggcggttattcgatgctggcgatgacgcggaccaagctgatcgccgcccgcgacccgatcggcatccgcccgctggtcatgggagagcttgatggcaagccgatcttctgctcggaaacctgtgctctcgacatcatcggcgcgaaattcgtgcgcgacgtggaaaacggcgaagtcatcatctgcgaaatccagcctgacggttctatcaccatcgatgcccgcaagccctcgaagccgcagccggagcgtctctgcctgttcgaatatgtctatttcgcccgtcccgattccgtcgtcggcggccgcaacgtctatacgacgcgcaagaacatgggcatgaaccttgccaaggaagcgccgctggaagccgatgtcgtggttccggttcccgatggcggcacgccggcagcgctcggttttgcgcaggcaagcggtattcccttcgaatacggcatcatccgcaaccattatgtcggtcgcaccttcattgagccgacacagcagatccgcgctttcggcgtcaagctcaagcattccgccaaccgggcgatgatcgaaggcaagcgcgtggtgctggtggatgattccatcgtgcgcggcacgacttcggtgaagatcgtgcagatgatccgcgaggcgggcgccaaggaagtgcatatccgcgtcgccagcccgatgatcttccatccggatttctacggcatcgacacgcctgacgctgataagctgctcgccaaccaatatgccgatgtggacgccatggcgaaattcattggtgccgattcgctggctttcctgtcgattgacgggctgtaccgcgccgttggcggtgaaaaccgcaaccacgcgcgcccgcagttcaccgaccattatttcaccggcgattatccgacccgtcttctcgaccagaacggcgaggccatgggcagcaagatttccatgctggccagcaacggctga

SEQ ID NO: 132137 - protein, 502 aa, Agrobacterium tumefaciens str. C58
MIEPLSHSPFSGSTFKEEIDGDTLHEECGVFGILGHDDASALTALGLHALQHRGQEAAGIVSFDGKRFHQERHMGLVGDHYTDPATLARLPGSIAIGHTRYSTTGEVAMRNVQPLFAELEEGGISIAHNGNFTNGLTLRRQIIATGAICQSTSDTEVVLHLIARSRHSSTADRFIDAIRQMEGGYSMLAMTRTKLIAARDPIGIRPLVMGELDGKPIFCSETCALDIIGAKFVRDVENGEVIICEIQPDGSITIDARKPSKPQPERLCLFEYVYFARPDSVVGGRNVYTTRKNMGMNLAKEAPLEADVVVPVPDGGTPAALGFAQASGIPFEYGIIRNHYVGRTFIEPTQQIRAFGVKLKHSANRAMIEGKRVVLVDDSIVRGTTSVKIVQMIREAGAKEVHIRVASPMIFHPDFYGIDTPDADKLLANQYADVDAMAKFIGADSLAFLSIDGLYRAVGGENRNHARPQFTDHYFTGDYPTRLLDQNGEAMGSKISMLASNG

SEQ ID NO: 132138 - DNA, 1443 bp, Streptococcus pneumoniae R6
  CDS (1)..(1443): transl_table=11
atgacatacgaagtaaaatctcttaatgaagaatgtggtgttttcggtatttggggacatccagatgctgctaagttgacctattttggactccacagtcttcaacaccgtggtcaggagggggcaggaatcctctccaatgatcaaggacaactgaagcggcatcgcgatatgggtcttctatcagaagtcttcagaaatcctgctaacttagataaattgacgggaactggtgcgattgggcatgtgcgttacgcgactgctggcgaagcttctgtagataatatccagcccttcctcttccgttttcacgatatgcagtttggcttggctcataatggaaatctgaccaatgcagcctctctcaagaaagaactggaacaaagaggagcaattttcagcgcgacttcggactctgaaatcttggctcacctcattcgtcgcagtcataatcctagcctgatgggcaaaatcaaggaagcgctcagccttgtcaaaggtggttttgcctatatcttgctgtttgaggacaagttgattgcggctcttgacccaaatggattccgaccgctttcgattggtaaaatggctaatggagcagttgttgtatcttctgaaacctgtgcttttgaggtcattggtgccgagtggattcgtgatttgaagccaggtgagattgtgatcattgatgacgagggcattcagtatgacagctatacagatgatacccagttggcggtttgttctatggagtatatctactttgctcgccctgattctaatatccacggtgtcaatgtccatacggcacgtaagagaatgggagcgcaattggcgcgagaatttaagcatgaggcagatattgtagttggtgtgcccaattcttccctaagcgcggctatgggatttgcggaagaagcaggcttaccaaatgaaatgggtctgatcaaaaaccaatacacccagcgaacttttatccaaccgactcaagaattgcgggagcaaggagtgcggatgaaactgtctgctgtttcgggtgttgtcaaaggcaaacgtgtggtcatggtggatgattccattgtacgtggaacaacctctcgtcgtatcgttcagctcttgaaagaagcgggtgcgactgaggttcacgttgccattggaagtcctgcactagcgtatccatgtttctacgggattgatatccagacccgtcaggagctgattgcagccaatcatacggtcgaagaaactcgccaaatcattggtgcggacagtatgacttatctttcaattgatggcttgattgagtcgattggtatcgaaacagatgcgccgaacggtggtctctgtgtcgcttactttgacggtgactacccaacgcctctctatgactacgaagaagactatcgtagaagtttggaagaaaagaccagtttttacaagtag

SEQ ID NO: 132139 - protein, 480 aa, Streptococcus pneumoniae R6
MTYEVKSLNEECGVFGIWGHPDAAKLTYFGLHSLQHRGQEGAGILSNDQGQLKRHRDMGLLSEVFRNPANLDKLTGTGAIGHVRYATAGEASVDNIQPFLFRFHDMQFGLAHNGNLTNAASLKKELEQRGAIFSATSDSEILAHLIRRSHNPSLMGKIKEALSLVKGGFAYILLFEDKLIAALDPNGFRPLSIGKMANGAVVVSSETCAFEVIGAEWIRDLKPGEIVIIDDEGIQYDSYTDDTQLAVCSMEYIYFARPDSNIHGVNVHTARKRMGAQLAREFKHEADIVVGVPNSSLSAAMGFAEEAGLPNEMGLIKNQYTQRTFIQPTQELREQGVRMKLSAVSGVVKGKRVVMVDDSIVRGTTSRRIVQLLKEAGATEVHVAIGSPALAYPCFYGIDIQTRQELIAANHTVEETRQIIGADSMTYLSIDGLIESIGIETDAPNGGLCVAYFDGDYPTPLYDYEEDYRRSLEEKTSFYK

SEQ ID NO: 132140 - DNA, 1332 bp, Sulfolobus tokodaii str. 7
  CDS (1)..(1332): transl_table=11
atgaaggttaaagaacactgcggtattgttggagtttatgctgataattctccaatgatttcttacgaatccctaaaattattacaacataggggacaagaatcagcaggaattacttacagaaaagatgggagtttagttaccatgaaaggcttgggtttagttgaagaggcattagatcctaggcttcttcctaatgcgaaactatcaataggtcatgttagatattcaactaccggtaaaggttcacttgacgaggctcaacctttaagtaacggtaaaattgctatagcatttaatggtacaataactaattattttaagttcggaacttctaccgatactgaatttattcttaaggttctctcggaggcgcctaacattaaagaaggaattagaaggttagttgacttagctgacggtgcatactcactcgtagttttaactaatgaaggagaacttatcggctttagagatcctaaaggattccgtcctctggtcttaggtaaaattaataacggttatataattgcttcagaagattccgtaatcagacaattaggaggtaagcctttaagagatgtaaaacctggagaaatgatatacattaaagatggtgaaattgaaagcgaagttatttctagggatcgtgtaagtttttgctcatttgagtacatctattttgccagacccgattctataattgatggtgtgtctgtttataactctaggataaagctaggagaaattttagctgaaaatcatggagttgatgcagatgtagctataccagttccagaatcctcaattccgattgcaataggattctctaggaaatcaaagattcctatggaatacggtttgattagaacactcgtagcaaagaggtcttttatcatgcctacacaagataaaagaaatgctgtactagaagagaaatttggtatagtcaaaagtgtagtagaaaataagaaagttgttgtcattgatgactcaatcgttagaggaaatactatgagaaaaattgtaagaatgataagggataatggtgctaaggaagttcatgtaagaataggctctccaaaagtaaaatatccttgttatatgggtatagattttccattatctaaagaactaatagctagtgagaaagatgaaaaagaaatagctaagtatattggtgctgattcagttgagttcttaacagttgaagaaatgattaaagccataggaagacctgatttatgtcatgcatgtttttctggagtttatccccttaaattttcatataatttgcaagtattagaatctatatttaaaaaggtgagttaa

SEQ ID NO: 132141 - protein, 443 aa, Sulfolobus tokodaii str. 7
MKVKEHCGIVGVYADNSPMISYESLKLLQHRGQESAGITYRKDGSLVTMKGLGLVEEALDPRLLPNAKLSIGHVRYSTTGKGSLDEAQPLSNGKIAIAFNGTITNYFKFGTSTDTEFILKVLSEAPNIKEGIRRLVDLADGAYSLVVLTNEGELIGFRDPKGFRPLVLGKINNGYIIASEDSVIRQLGGKPLRDVKPGEMIYIKDGEIESEVISRDRVSFCSFEYIYFARPDSIIDGVSVYNSRIKLGEILAENHGVDADVAIPVPESSIPIAIGFSRKSKIPMEYGLIRTLVAKRSFIMPTQDKRNAVLEEKFGIVKSVVENKKVVVIDDSIVRGNTMRKIVRMIRDNGAKEVHVRIGSPKVKYPCYMGIDFPLSKELIASEKDEKEIAKYIGADSVEFLTVEEMIKAIGRPDLCHACFSGVYPLKFSYNLQVLESIFKKVS

SEQ ID NO: 132142 - DNA, 1491 bp, Sinorhizobium meliloti 1021
  CDS (1)..(1491): transl_table=11
atgaccgatctcagatccagcgaaatccatgacgaactcgacggcgacaccctccatgaggagtgcggcgttttcggcattctcggccatccggacgccgccgcgctgacggcgctcggcctgcacgctctccagcatcgagggcaggaagccgccggtatcgtcaccttcgacgggcggcagttctattcggagcgccggatgggtctcgtcggcgaccactataccgatcccacgacgctcgcgaagctgcccggttcgatgtcgatcggccatgtacgctattccaccaccggtgagacggtcctgcgcaacgtccagccgctgtttgccgagctgcaggaaggcggaatcgcaatcgcgcacaacggcaacttcacgaacggcctgacgctgcggcgccagatcatcgcagacggtgccatctgtcagtcgacatccgacaccgaagtcgtgctgcacctgatcgcgcggtcgaaacacgtctcttccagcgatcgcttcgccgacgctatcgcccaggtcgaaggcggctattcgatgctggctctgacccgcaccaagctgatcgccgcccgcgacccgaacggcattcgcccgctcgtcatgggcgaactcgacggcaagccgatcttctgctcggagacctgcgcgctggatatcatcggcgccaaattcgttcgcgatatcgagaacggtgaaatcgtcatctgcgaaattcagccggacgggtcgatcaccatcgatgcccgcaagccgcagaatccgctgccggaacgcctttgccttttcgagtacgtctatttcgcccggccggattcggtcgtcggcggccgcaacgtctacgtcgcccgcaagaacatgggcaagaacctcgccatcgaggcccccgtcgaggcggatgtcgtggtgcccgttccggacggcggtacgccggctgcaatcggctatgcgcaggaaagcggcatccccttcgagctcggcatcatccgcaatcactatgtcgggcggaccttcatcgagccgacgcagcagattcgcgccttcggcgtcaagctcaagcattctgcgaaccgggcgatgatcgccggcaagcgcgtcgtgctcgtcgacgattccatcgtccgcggcaccacttcggtcaagatcgtccagatgatgcgcgaggcaggcgcccgcgaggtgcatgtgcgcgtcgcgagcccgatgatcttccacccggatttctacggcatcgacacgcccgaccgtgacaagctgctcgccaaccagcatgccgacctcgcctcgatgtgtcgcttcatcggcgccgattctctcgaattcctctcgatcgacgggctttatcgtgccgtcggcggcgagaagcgcgacccgcaggcgccgcagttcaccgatcactatttcaccggggactacccgacccgccttctcgaccagggggcagcgagcaacgttcgcaaactctcggttctcgccagcaacggataa

SEQ ID NO: 132143 - protein, 496 aa, Sinorhizobium meliloti 1021
MTDLRSSEIHDELDGDTLHEECGVFGILGHPDAAALTALGLHALQHRGQEAAGIVTFDGRQFYSERRMGLVGDHYTDPTTLAKLPGSMSIGHVRYSTTGETVLRNVQPLFAELQEGGIAIAHNGNFTNGLTLRRQIIADGAICQSTSDTEVVLHLIARSKHVSSSDRFADAIAQVEGGYSMLALTRTKLIAARDPNGIRPLVMGELDGKPIFCSETCALDIIGAKFVRDIENGEIVICEIQPDGSITIDARKPQNPLPERLCLFEYVYFARPDSVVGGRNVYVARKNMGKNLAIEAPVEADVVVPVPDGGTPAAIGYAQESGIPFELGIIRNHYVGRTFIEPTQQIRAFGVKLKHSANRAMIAGKRVVLVDDSIVRGTTSVKIVQMMREAGAREVHVRVASPMIFHPDFYGIDTPDRDKLLANQHADLASMCRFIGADSLEFLSIDGLYRAVGGEKRDPQAPQFTDHYFTGDYPTRLLDQGAASNVRKLSVLASNG

SEQ ID NO: 132144 - DNA, 1425 bp, Thermoplasma acidophilum DSM 1728
  CDS (1)..(1425): transl_table=11
gtggattccctgcccccaggatcagatcctatagatgggcaaaagccaagtgaagactgtgctgttgtgggctttaagggtaggatcaacgcctatgagcccataataaccgcactgcgtacactgcagcacagaggtcaagaatcagccggtatggctgtttttgatggcagaaaaactgtcctgaagaagggtcgtggccttgtaaccgacgttttcaatcctgcaacggatagcataaagggcaaggtcggggttggccatacccgttattctacagccggttccaaggacgttatcgatgctggtccattcgttataaattcccaggttggattcatctctctttcccataacggcgaaatcgtcaacgcggatgagctgaaggaggagatgaagaaggaaggcgtaaattttcagagtgattcagacaccgaggtactgctcgcagagctttcaagaaacatttcaaagtacggcctgaaaaaaggttttgaggtgtctatgaacaccctcaggggggcctatgcctgcgcagtgggcataaatgacaggctcttcgccatgagggacccaaacggaataaggcccctcatcgtaggaaagaatgcggatggatacataatagccagtgaaagctgtgccatagatgcacttgatgggacgatcataaggaatgttgaacccggcgaggtcgttgaactgacagatgacggcctgaagaccatagcacttcacgaaggagagaagaccgcacactgtatgtttgaatacgtatacttctcaaggcctgacagcaccatagatggcataaatgtgtatatggccagggtcaaaatgggcatgatgcttgccaaggagagccccgtggaggccgacatggtcatacctgtccccgattccggtagatcgcaggccatcgggttctcgatgcagtcaggcataccctacaccgaaggcttgatgaagaacaggtattccgaaagaactttcataatgcctacacaaagcgacagaaaggccgcgatcaggctgaagctgaaccccgtcagggaagtcatatctggtaagaggattgtgctggtcgatgatagcatcgtaaggggaaacaccatgcgattcatcgtgagcatgatgagaaagtatggtgcgaaggaggttcatgttcgcataggttcgccacacataattgcaccttgctatttcggcgtggatatgaagacaaaggatcagttcatagcacgcggaaaaacggatgcagagataaacagcgagataggagctgattcgctggcattcctctccatagatggcctcaaggaagccattggccttgatgagaataatctgtgtcttggatgtctgaccggcacctatcccatagacatatcgaaaaaacttgcggagaagatcacgcagtattga

SEQ ID NO: 132145 - protein, 474 aa, Thermoplasma acidophilum DSM 1728
MDSLPPGSDPIDGQKPSEDCAVVGFKGRINAYEPIITALRTLQHRGQESAGMAVFDGRKTVLKKGRGLVTDVFNPATDSIKGKVGVGHTRYSTAGSKDVIDAGPFVINSQVGFISLSHNGEIVNADELKEEMKKEGVNFQSDSDTEVLLAELSRNISKYGLKKGFEVSMNTLRGAYACAVGINDRLFAMRDPNGIRPLIVGKNADGYIIASESCAIDALDGTIIRNVEPGEVVELTDDGLKTIALHEGEKTAHCMFEYVYFSRPDSTIDGINVYMARVKMGMMLAKESPVEADMVIPVPDSGRSQAIGFSMQSGIPYTEGLMKNRYSERTFIMPTQSDRKAAIRLKLNPVREVISGKRIVLVDDSIVRGNTMRFIVSMMRKYGAKEVHVRIGSPHIIAPCYFGVDMKTKDQFIARGKTDAEINSEIGADSLAFLSIDGLKEAIGLDENNLCLGCLTGTYPIDISKKLAEKITQY

SEQ ID NO: 132146 - DNA, 1503 bp, Caulobacter crescentus CB15
  CDS (1)..(1503): transl_table=11
atgaccttcctgggccagtcgactgaccgctattcctcgagcccctggcgggacccggaggacgacagcctgcgtctggaatgcggcgtgttcggcgtgttcggcgtgcgtgacgccgccgccatcgccgcgctgggcctccacgctttgcagcaccgcggccaggaggcctgcggcatcgccgccttcgacggcaatcgcttccacactgagcggcacatggggcatgtcggcgacgccttcaccggcgccgacctcgtccagcgcctgccgggcaacatggccatcggccacacgcgctattcgacggccggcggcagcttcatccgcaacgtccagccgatgttcgccgaccttgagaccggcggcgtcgcgatcgctcacaacggcaacctgaccaacttcctgaccctgcgcgagcgtctggtgcaggaaggcgcgatcttccagtcgacctcggactccgaagcgatccttcacctgatcgcgcgctcgcggaaggccaagatcgtcgatcgcttcgtcgatgcgatcagccagatcgagggcggctacgccctggtggcgatcaccaacaagaagatgatcggcgtgcgcgatccgctgggcatccgcccgctggtgctgggtgatctggacggcaagccggtgctggcgtctgagacctgcgcgctcgacatgatcggcgcccgcttcgtgcgcgacatcgaacatggcgagatggtggtgatcgaggagaccggtatcacctcgaccaagccgttccagaccgccccggcgcgcccctgcgtgttcgagtatgtctatttcgcccgtcccgacagcgtcgtgaacggtcgctcggtctatggcgtgcgcaagcgcatgggcatgaacctggccaaggaaaccggcgtcgaggccgatgtcgtggtgcccgtgcccgacagcggcgtgccggccgcgctcggctacgcccagcagagcggcctgccgttcgagatgggcatcatccgcaaccactatgtgggccgcaccttcatccagcccacccagggcgtgcgcgaactgggcgtgcgcatgaagcacagccccaatcgcgcggtcctcgcgggcaagcgcgtcgtcctgatcgacgactcgatcgtgcgcggcaccacctcgctgaagatcgtccgcatggtccgcgaagccggcgccaaggaggtccacctccgctcggccagcccgccgatcaagtggcccgacttctacggcatcgacatgcccgagcgtgagcagctgctggccgccaacaagtcgctggaagagatggcccggttcctggaggtcgactcgctgggcttcctgtccgtggacggtctctacgacgccctggaagcgggtcagcgcgacccggcgaccccgcagttcaccgatcactacttcaccggcgactatccgacccgcctgacggaccgcgagatcgccgagggtcgcaacgaaaccaacgacaagcagctttcgctgctggtcagcgcgtga

SEQ ID NO: 132147 - protein, 500 aa, Caulobacter crescentus CB15
MTFLGQSTDRYSSSPWRDPEDDSLRLECGVFGVFGVRDAAAIAALGLHALQHRGQEACGIAAFDGNRFHTERHMGHVGDAFTGADLVQRLPGNMAIGHTRYSTAGGSFIRNVQPMFADLETGGVAIAHNGNLTNFLTLRERLVQEGAIFQSTSDSEAILHLIARSRKAKIVDRFVDAISQIEGGYALVAITNKKMIGVRDPLGIRPLVLGDLDGKPVLASETCALDMIGARFVRDIEHGEMVVIEETGITSTKPFQTAPARPCVFEYVYFARPDSVVNGRSVYGVRKRMGMNLAKETGVEADVVVPVPDSGVPAALGYAQQSGLPFEMGIIRNHYVGRTFIQPTQGVRELGVRMKHSPNRAVLAGKRVVLIDDSIVRGTTSLKIVRMVREAGAKEVHLRSASPPIKWPDFYGIDMPEREQLLAANKSLEEMARFLEVDSLGFLSVDGLYDALEAGQRDPATPQFTDHYFTGDYPTRLTDREIAEGRNETNDKQLSLLVSA

SEQ ID NO: 132148 - DNA, 1518 bp, Salmonella typhimurium LT2
  CDS (1)..(1518): transl_table=11
atgtgcggtattgtcggtatcgccggtgttatgccggtcaaccagtcgatttatgacgcgttaacagtgctccagcatcgtggtcaggatgctgccggtatcatcaccattgatgcgaataactgcttccgcttgcgtaaggcaaacgggctggtgaacgatatttttgaagctcgccacatgcagcgtttgcagggcaacatggggatcggccatgtgcgctaccctaccgcaggcagctccagcgcttcggaagcgcaacctttttacgttaactcgccgtatggcatcacgttggcccataatggcaacctgactaatgcgcacgagctacgtaaaaagctgtttgaagaaaagcgccgtcatatcaacaccacctccgattccgaaatcctgctcaatattttcgccagcgagctcgacaacttccgtcactatccgctggaagccgacaatatttttgccgcgattgccgcgactaaccgtcaaatccgtggcgcctatgcctgcgtggcgatgattatcggccacggcatggtggcttttcgcgatccgcacggcattcgcccgttagtgctgggcaagcgtgacgttggcgatggtcgtacggagtatatggtcgcttctgaaagcgtggcgctggatacgctgggctttgagtttctgcgcgatgtcgcgccgggcgaagctatctatattaccgaaaaggggcaactgttcacgcgccagtgcgcggataacccggtcagtaacccctgtctgtttgagtacgtttattttgctcgcccggactcctttatcgacaagatctccgtctacagcgctcgtgtgaatatgggcaccaaacttggcgaaaaaatcgctcgtgaatgggaagatctggacatcgacgtcgtgatccctatcccggaaacctcctgcgatatcgcactggaaattgcccgtattctcggcaagccgtaccgccagggatttgtcaaaaatcgttacgtgggacgtacctttatcatgccgggccaacagctacgccgtaaatccgtgcgccgtaagctcaatgctaatcgcgcggaattccgcgataagaacgtcctgctggtggatgattccatcgtgcgtggcaccacatcagagcagatcatcgagatggcccgggaagccggcgcgaagaaggtttatctggcgtccgccgcgccggaaattcgtttccccaacgtctatggcattgatatgccgaccgccaatgagctgatcgcgcatggtcgcgaggtggatgagattcgtcagatcatcggcgcagacgggcttatcttccaggatctgaacgatctgatcgaagccgtacgcgcggaaaatccggatatccagcagtttgagtgttcggtatttaacgggatatatgtcaccaaagacgtagaccagcaatacctcgacttcctggattcattacgtaatgacgacgccaaagcggtgctgttccagaacgaaatggaaaacctggaaatgcataacgaaggctaa

SEQ ID NO: 132149 - protein, 505 aa, Salmonella typhimurium LT2
MCGIVGIAGVMPVNQSIYDALTVLQHRGQDAAGIITIDANNCFRLRKANGLVNDIFEARHMQRLQGNMGIGHVRYPTAGSSSASEAQPFYVNSPYGITLAHNGNLTNAHELRKKLFEEKRRHINTTSDSEILLNIFASELDNFRHYPLEADNIFAAIAATNRQIRGAYACVAMIIGHGMVAFRDPHGIRPLVLGKRDVGDGRTEYMVASESVALDTLGFEFLRDVAPGEAIYITEKGQLFTRQCADNPVSNPCLFEYVYFARPDSFIDKISVYSARVNMGTKLGEKIAREWEDLDIDVVIPIPETSCDIALEIARILGKPYRQGFVKNRYVGRTFIMPGQQLRRKSVRRKLNANRAEFRDKNVLLVDDSIVRGTTSEQIIEMAREAGAKKVYLASAAPEIRFPNVYGIDMPTANELIAHGREVDEIRQIIGADGLIFQDLNDLIEAVRAENPDIQQFECSVFNGIYVTKDVDQQYLDFLDSLRNDDAKAVLFQNEMENLEMHNEG

SEQ ID NO: 132150 - DNA, 1428 bp, Listeria monocytogenes EGD-e
  CDS (1)..(1428): transl_table=11
atgcttgctgaagtaaaaggacttaacgaagaatgtggtatttttggtatttgggatcatcctaatgcagcggaaatcacctattatgggttgcatagtttacaacatcgcggtcaagaaggtgccggaattgtttcgacagacggcgaaatactaaaaggtcaccgaaatctcggccttttagcagacgtatttaaacatggtgaactagatgatttaaaaggtaaagcagccattggccatgttcgatacgcgacagctggtcaaaaaaacttagggaacgtacaaccatttttatttcactttcatagttcttctttagcacttgcgcataacgggaatttggttaatgcgaaaagtttacgccgtgaactagaagaagaaggcgctatttttcaaacgagttcggatacagaagtgttagcgcatttaattaaacgtagccatacaggggattttgtggaagatttaaaagtggctttgaacaaggttaagggtggctttgcgtacatgcttctgacggaagatacgatgtatgctgcacttgatccgaatggttttagaccgctttcgattggtcgcattggtgattcttacgtagttgcttcagaaacatgtgcttttgaaacggttggcgctgaatttgttcgagacgtggagccaggcgaactaattattattaatgatgacggacttcggattgaaaaatttacggaaaatgtgaagcattcgatttgtagtatggagtatatttattttgctcgaccagactctaatatcgctgggattaatgtccactcagctagaaaacgttctgggaaaaggctagcgaaagaagcatttattgatgccgatgttgttacaggtgtgccagattcgagtatttctgcggcgattggttatgcggaagaggctggacttccatacgagcttggcctcatcaaaaatagatatgtggcaagaacctttatccaaccatcgcaagaactcagagagcaaggggttagaatgaagctttcggcggtgcgtggggttgtggaagggaaacgtgttgtcatgattgatgattcgattgtgcgcgggacgacgagtaaacgtattgtgcaacttttgcgggaagcgggagcagcggaagttcatgtgagaatagcttcaccgccacttgcttacccttgtttttacggtattgatattcaaacgcgaaatgaattaatcgcatctaattattctgtcgatgaaatttgtcggattattggggctgattctttagagtatttgagtgaagagggtttagtagattccattggtagaccttatccgaacgaaccatacgggggactttgtatggcttatttcaacggcgattacccaacccctttatacgattatgaagcggaatatttagcgagcttagaagcagaaaaataa

SEQ ID NO: 132151 - protein, 475 aa, Listeria monocytogenes EGD-e
MLAEVKGLNEECGIFGIWDHPNAAEITYYGLHSLQHRGQEGAGIVSTDGEILKGHRNLGLLADVFKHGELDDLKGKAAIGHVRYATAGQKNLGNVQPFLFHFHSSSLALAHNGNLVNAKSLRRELEEEGAIFQTSSDTEVLAHLIKRSHTGDFVEDLKVALNKVKGGFAYMLLTEDTMYAALDPNGFRPLSIGRIGDSYVVASETCAFETVGAEFVRDVEPGELIIINDDGLRIEKFTENVKHSICSMEYIYFARPDSNIAGINVHSARKRSGKRLAKEAFIDADVVTGVPDSSISAAIGYAEEAGLPYELGLIKNRYVARTFIQPSQELREQGVRMKLSAVRGVVEGKRVVMIDDSIVRGTTSKRIVQLLREAGAAEVHVRIASPPLAYPCFYGIDIQTRNELIASNYSVDEICRIIGADSLEYLSEEGLVDSIGRPYPNEPYGGLCMAYFNGDYPTPLYDYEAEYLASLEAEK

SEQ ID NO: 132152 - DNA, 1428 bp, Listeria innocua Clip11262
  CDS (1)..(1428): transl_table=11
atgcttgctgaagtaaaaggacttaatgaagaatgtggtatttttggtatttgggatcatcctaatgcagcggaaatcacttactatgggttgcatagtttacaacatcgcggtcaagaaggtgccggaattgtttcaacagacggagaaacgttaaaagggcatcggaatcttgggcttttagcagatgtatttaagcacggtgaactagacgatttaaaaggtaaggcagcaattggccacgttcgctatgcaacagctggtcaaaaaaacttaggaaatgtacaaccatttttatttcattttcacagttcttcacttgcacttgcgcataatggaaatttagtgaatgcgaagactttacgccgcgaattagaagaagaaggagctatctttcaaacaagttcggacacggaagtattagcgcatttaattaaacgcagccatactggtgattttgtagaagatttaaaagtagctttaaacaaggtcaaaggtggctttgcatatatgctgcttacagaagatacaatgtatgccgcgcttgatccaaatggctttagaccgctttcgattggtcgaattggcgattcttatgtagttgcttctgaaacttgtgcttttgaaacggttggtgctgaatttgtccgtgatgtggagccaggtgaactgattattattaataatgacggactgcggattgaaaaatttacggaaaatgtgacgcattcgatttgtagtatggaatatatttattttgctcgtccggactctaatattgctggaattaatgttcactcagctagaaagcgttctgggaaaagacttgcaaaagaagcatttattgatgcggatgtagtgacaggtgtgccggattcaagtatttctgcggcgattgggtatgcagaagaagccggactgccgtacgaacttggtctcatcaaaaatagatatgtggcaagaacttttattcagccatcgcaagaacttagggaacaaggggttagaatgaagctttctgcggtgcgaggagttgtggaaggtaaacgagttgtcatgattgatgattccatcgttcgcgggacgacaagtaaacgcattgtccagcttttacgtgaagcgggcgcggcggaagttcatgtgagaattgcttctccaccacttgcttatccttgtttttatggaattgatattcaaacacgaaatgaattgattgcttctaattattctgttgatgaaatttgccgtattattggcgcagattctttagagtatttgagtgaagaaggtttagtagattccattggcaaaccttatccgaatgaaccttatgggggactttgtatggcttattttaacggggattatccgacccctttatacgattatgaagcagaatatttagcgagcttagaagcagaaaaataa

SEQ ID NO: 132153 - protein, 475 aa, Listeria innocua Clip11262
MLAEVKGLNEECGIFGIWDHPNAAEITYYGLHSLQHRGQEGAGIVSTDGETLKGHRNLGLLADVFKHGELDDLKGKAAIGHVRYATAGQKNLGNVQPFLFHFHSSSLALAHNGNLVNAKTLRRELEEEGAIFQTSSDTEVLAHLIKRSHTGDFVEDLKVALNKVKGGFAYMLLTEDTMYAALDPNGFRPLSIGRIGDSYVVASETCAFETVGAEFVRDVEPGELIIINNDGLRIEKFTENVTHSICSMEYIYFARPDSNIAGINVHSARKRSGKRLAKEAFIDADVVTGVPDSSISAAIGYAEEAGLPYELGLIKNRYVARTFIQPSQELREQGVRMKLSAVRGVVEGKRVVMIDDSIVRGTTSKRIVQLLREAGAAEVHVRIASPPLAYPCFYGIDIQTRNELIASNYSVDEICRIIGADSLEYLSEEGLVDSIGKPYPNEPYGGLCMAYFNGDYPTPLYDYEAEYLASLEAEK

SEQ ID NO: 132154 - DNA, 1500 bp, Nostoc sp. PCC 7120
  CDS (1)..(1500): transl_table=11
atgattcccattgattccgtcactccggatgagtaccctaatcagactaacaacccaattgatagtcaagaaaatcgtcctgacaagccagaagaggcttgtggagttttcggcatttacgccccaggagaaaatgttgcaaaactgacctactttggattgtatgccctgcaacatcggggtcaagaatcagctggcattgccacgtttgagggtacaacagttcacctgcataaagacatgggtttggtttctcaagtctttaatgagtcgattttagaagagttgcctggtgatatcggcgttggtcatacccgttactctaccactggttccagccgcaaagttaatgcccagcctgctgtcctagacactcgtttaggcaagctagctctagcacataatggtaatttagtcaatactgtgaagttgcgccaagagttagttaatagcaactgcaacctagtgacaaccacagactcagaaatgattgcttttgcgatcgctcaagcagtcaacgcaggtgcggactggttagatggggcgattcaagcattccatcgttgcgagggagcttttagcttagtgattggcacacctgttggtgtgatgggagtgcgtgacaccaacggcattcgtcctctggtaattgggattttgcctggtaatcctgtgcgctatgttttatcctcggaaacttgtggtttagacattattggcgctgaatttctacgagatgtagaaccaggtgaagtagtttggattaccgaaaaaggtttagcttcctaccactggagtcaaaagccagaacgaagattgtgtattttcgagatgatttattttgctcgtcccgatagccaaatgcacaacgagagtttgtacagttatcggatgcgtttaggaaggcaactagcagccgaatcctacgtagatgctgatattgtctttggtgtacctgattctggtattcctgctgctattggattttcccaggcttctggtgttgcctacggtgaagggttaattaagaatcgctatgttggtcgcacctttattcagccaacccaaaccatgcgggagtcggggattaagatgaaactcaaccccctcaaagatgtgctggcgggtaaaagagtgattatcgttgatgactccattgtcagaggtactactagccgcaaactagttaaagctttacgtgatgctggtgcagccgaagtacatatgcggatttcttccccaccagtaactcatccttgtttctacggaattgatactgattctcaagaccagctaattgctgctactaagtcagtagaagagattgccaagcaattagaagtagaaagcctggcctatctcagttgggatgggatgttagaagcaaccagagaagacaaaaatagtttctgttctgcctgttttacaggtgattaccctgttggtattcctgaacaggtgaaacgcgctaagttgattttagaaaaggtagtagtttag

SEQ ID NO: 132155 - protein, 499 aa, Nostoc sp. PCC 7120
MIPIDSVTPDEYPNQTNNPIDSQENRPDKPEEACGVFGIYAPGENVAKLTYFGLYALQHRGQESAGIATFEGTTVHLHKDMGLVSQVFNESILEELPGDIGVGHTRYSTTGSSRKVNAQPAVLDTRLGKLALAHNGNLVNTVKLRQELVNSNCNLVTTTDSEMIAFAIAQAVNAGADWLDGAIQAFHRCEGAFSLVIGTPVGVMGVRDTNGIRPLVIGILPGNPVRYVLSSETCGLDIIGAEFLRDVEPGEVVWITEKGLASYHWSQKPERRLCIFEMIYFARPDSQMHNESLYSYRMRLGRQLAAESYVDADIVFGVPDSGIPAAIGFSQASGVAYGEGLIKNRYVGRTFIQPTQTMRESGIKMKLNPLKDVLAGKRVIIVDDSIVRGTTSRKLVKALRDAGAAEVHMRISSPPVTHPCFYGIDTDSQDQLIAATKSVEEIAKQLEVESLAYLSWDGMLEATREDKNSFCSACFTGDYPVGIPEQVKRAKLILEKVVV

SEQ ID NO: 132156 - DNA, 1536 bp, Ralstonia solanacearum GMI1000
  CDS (1)..(1536): transl_table=11
atgtgcggtatcgttggggtggtttcggccacgcccgtcaatcagctgatctacgacagcctgctgctgctgcagcaccgggggcaggacgcggcgggcattgccaccgcggccggcagcaccttccacatgcacaaggccaacggcatggtgcgcgacgtgttccgcacgcgcaacatgcgcggcctgccgggcaccatcggcatcggccaggtgcgctatccgaccgccggctccgccagcgaggaagaggcccagccgttctatgtcagcgcaccgttcggcatcgtgctggctcacaacggcaacctgaccaactccgagcagctgcgcgaagagatgttccggcgcgaccgccgccacatcaacacgcattccgactccgaagtgctgctcaacgtgctggccgacgaactgcagcgcgccagcaacgacatcgcgttgtcgcccgaggccatcttcaaggcggtggccggcatgcatcgccgcgtgcgcggctcgtacgccatcgtgtcgcagatcgccggctacggcatgctggccgtgcgcgacccgttcggcatccgtccgctggcgctgggcagccaggaaacgccggacggcgtcgagtggatggtggcctccgaatcggtggcgctggaaggcatcggcttcaagttcgagcgcgatgtggcgccgggcgaagccatcttcgtcgacctcgaaggccagctgcacaccaagcagtgcgcggatcatccggtcctgacgccctgcatcttcgaatacgtctatctggcgcggccggactcgcgcatggacggcgcgtccgtgtacgacgcgcgcctgcgcatgggcgattacctggccgagaagatcaagcgcgaggtgaccgacccgatcgacgtggtgatgccgatccccgattcgagccggccggcggccatgcaggtcgccaactgcctgggcgtgccgtaccgggaaggcttcttcaagaaccgctacgtgggccgcaccttcatcatgccgggccaggcggtgcgcaagaaatcggtgcgccagaagctgaacgccatggcgatcgagttcaagggcaagaacgtgctgatcgtcgacgattccatcgtgcgcggcaccacgtcgtcggagatcgtgcagatggcgcgcgatgcgggcgcgaagaaggtgatcttcgcctcggcggcgccgccggtgaagttccccaacgtgtacggcatcgacatgcccacgcgcagcgaactggtcgcgcacggtcgcacgcacgacgagatcgcccggatcatcggcgccgaccagctcgtctaccaggacgtggaagacatgaagcgcgcggtgcgcgacgtcaacccggcgctgcgcgatttcgaggcatcgtgcttcgacggccactacgtgaccggcgatatcgacgaagcgtatctcgaccggctggaagcgtcgcgcaacagcgcggcggcctgcgcggcccgcgacagcgcgcagaacgacaatccgcgcacgcagctgcacttgcagccgtcggccgtcaacgagtaa

SEQ ID NO: 132157 - protein, 511 aa, Ralstonia solanacearum GMI1000
MCGIVGVVSATPVNQLIYDSLLLLQHRGQDAAGIATAAGSTFHMHKANGMVRDVFRTRNMRGLPGTIGIGQVRYPTAGSASEEEAQPFYVSAPFGIVLAHNGNLTNSEQLREEMFRRDRRHINTHSDSEVLLNVLADELQRASNDIALSPEAIFKAVAGMHRRVRGSYAIVSQIAGYGMLAVRDPFGIRPLALGSQETPDGVEWMVASESVALEGIGFKFERDVAPGEAIFVDLEGQLHTKQCADHPVLTPCIFEYVYLARPDSRMDGASVYDARLRMGDYLAEKIKREVTDPIDVVMPIPDSSRPAAMQVANCLGVPYREGFFKNRYVGRTFIMPGQAVRKKSVRQKLNAMAIEFKGKNVLIVDDSIVRGTTSSEIVQMARDAGAKKVIFASAAPPVKFPNVYGIDMPTRSELVAHGRTHDEIARIIGADQLVYQDVEDMKRAVRDVNPALRDFEASCFDGHYVTGDIDEAYLDRLEASRNSAAACAARDSAQNDNPRTQLHLQPSAVNE

SEQ ID NO: 132158 - DNA, 1644 bp, Drosophila melanogaster
  CDS (1)..(1644)
atgatggcgcaaagtgattctggaaattgctgtgccaagcttaataaagatgagtgctgccagaagacaaaggatgtgatcttgagcggcgtatctcccaaaatgtttcccgacaaaatctacaagtctgttcaacccaaaggagaggatgccaccggaatgacctgcgaatgcggtgtttttgcagccatcgcttgcggggattacccaacacaactggacatagcacagatgatctgcctcggtctggtggctctgcagcatcgtggccaggagtcggcgggaatagtgaccagtttgggcaagtcctccaagaatttcagcgtacacaagggcatgggcatgatcaacaatctgttcaatgacgaggcgatcaggaagttaaagggtaacctgggaataggacacacccggtattccacggccgcagcctcggaagttgtgaactgccagccgtttgtggtgcacactgcccatggagcactggccattgcccacaatggtgagctagtgaactgcgagtccctgaggagggaggtcctggagcgaggagtgggcctgtctacgcacagtgacagtgaacttattgcccaatccctgtgctgtgcaccagaggatgtgtcggagcacgatggacccaattggccggccagaattcgccatttcatgaccctggctccactctcctactccctggtcgtgatgcacaaggataagatctacgctgtccgcgattcctatggcaatagaccgctgtgcttgggaaaaatcgtgcccgttgatgcaggacatgcgaatatcaatgaccaactggccgagggttgggtggtcagtagtgaaagctgcggattcctctccatcggagccagatatgttcgcgaggtggagcccggtgagatcatcgagctgtcacgaaatggttatagaaccgtggatatcgttgaaagaccggactataagcgcatggcattctgcatctttgagtacgtctactttgcccgcagtgattccatgttcgagggtcagatggtttactcagcccgcctgcaatgtggtcgccagttggccagggaatcgccattagatgcggatttggtcagctcggttccggaatcgggcacagcagctgcccatggttatgccagggagtcgggactgccattcggggaagttctctgcaagaatcgctatgtgggccgcacgttcatccaaccctcgacgagattgcgacagttgggcgtggccaaaaagtttggtgccctggctcaaaatgtcgagggcaagcggatcgtgctagtcgatgactccatagtgaggggaaataccattggaccgattatcaaactcctgcgagatgccggcgccaccgaggtgcacattcgcattgccagtcctccgctgcaatatccctgctacatgggtatcaatatacccactcgtgaggagctaatagccaacaaattgaatgcggatcagctggcggatcacgtgggtgcggatagtctggcctatttgagtgtggagggtctggtcaaggccgtccagatgaacaaggcccatgtgaatccactcaaagctggctactgcaccgcttgcctaacgggcgagtatcctggcggattgccggaggagctcagctggtag

SEQ ID NO: 132159 - protein, 547 aa, Drosophila melanogaster
MMAQSDSGNCCAKLNKDECCQKTKDVILSGVSPKMFPDKIYKSVQPKGEDATGMTCECGVFAAIACGDYPTQLDIAQMICLGLVALQHRGQESAGIVTSLGKSSKNFSVHKGMGMINNLFNDEAIRKLKGNLGIGHTRYSTAAASEVVNCQPFVVHTAHGALAIAHNGELVNCESLRREVLERGVGLSTHSDSELIAQSLCCAPEDVSEHDGPNWPARIRHFMTLAPLSYSLVVMHKDKIYAVRDSYGNRPLCLGKIVPVDAGHANINDQLAEGWVVSSESCGFLSIGARYVREVEPGEIIELSRNGYRTVDIVERPDYKRMAFCIFEYVYFARSDSMFEGQMVYSARLQCGRQLARESPLDADLVSSVPESGTAAAHGYARESGLPFGEVLCKNRYVGRTFIQPSTRLRQLGVAKKFGALAQNVEGKRIVLVDDSIVRGNTIGPIIKLLRDAGATEVHIRIASPPLQYPCYMGINIPTREELIANKLNADQLADHVGADSLAYLSVEGLVKAVQMNKAHVNPLKAGYCTACLTGEYPGGLPEELSW

SEQ ID NO: 132160 - DNA, 1551 bp, Brucella melitensis 16M
  CDS (1)..(1551): transl_table=11
gtgcctccgcttttccgcgatatgcttaagttgcctctgcaatcgaaaggccttgcggcaatgaccagccattcttctgaaaatgccccctttatgctggatgatgacaccctgcatgaagaatgtggtgtattcggcattctgggccatgaggatgcggctgcgctgaccgcgctcggcctgcatgcgctccagcatcgcggtcaggaagccgccggcattgtttcctatcataatcgccgtttccattccgaacgccatatgggcctcgtcggcgaccatttcaccgatgcggcaacactgaaccgcctgccgggcaaccgcgccatcggccatgtgcgttattccacaaccggcgagacgatcctgcgcaatgtacagccgctgtttgcggaactggaagtcggcggcatcgccattgcccataacggcaatttcaccaatggcattacgctgcgcaaacagttgattgcttccggcgcgatcttccaggcaacgtcggatacggaagtcgtgctgcacatgattgcccgttcgcggcactcctcctcaaccgaccgtttcgtggaagcgatccgccaggttgaaggcggctatgccatgctggcgcttacccgcaccaagctgatcgccgcgcgcgatcccatcggcattcgcccgctcgtcatgggcgagctggacggcaagccgatcttctgctcggaaacctgcgctctcgatattatcggcgcgaaatatattcgcgacgtcgagaatggcgaagtggtagtctgcgaaatccagaaggatggctccatcaccacccgatccatcaagccggaaaatccgcagccggagcggctgtgcctttttgaatatgtttatttcgcacggccggattcggtagtgggtggccgcagcgtctatgtggcgcgcaagaacatgggcatgaaccttgccgccgaggcgggcgtggatgccgatgtggtcgtgcccgtaccggatggcggtacgccggcagcgctgggctttgcgcaggcaagcggtattccgtttgaatatggcatcatccgcaaccattatgtgggccgcaccttcattgagcctacacagcagatccgcgcgcttggcgtgaagctgaaacattcagccaatcgcgctatgattgaaggcaagcgggtcgttctggtggatgattccatcgtgcgcggcaccacctcggtcaagatcgttcagatgatccgcgacgcaggcgcaaccgaagtccatatgcgcgtggcaagcccgatgatcttccacccggatttttacggtatcgacaccccccatgccgataagctgctggccaaccagcacgaaagcctcgaatccatgtgccgctacatcggcgccgattcgctggccttcctttccatcgacgggctctacaaggccgttggcggaaagccgcgtgatccaaaggcgccgaccttcaccgatcactatttcacgggcgagtatccgacccgccttctggatcaggaaggcgaaagcaacgtccacaccttgtcgctgctcgccagcaacggctga

SEQ ID NO: 132161 - protein, 516 aa, Brucella melitensis 16M
MPPLFRDMLKLPLQSKGLAAMTSHSSENAPFMLDDDTLHEECGVFGILGHEDAAALTALGLHALQHRGQEAAGIVSYHNRRFHSERHMGLVGDHFTDAATLNRLPGNRAIGHVRYSTTGETILRNVQPLFAELEVGGIAIAHNGNFTNGITLRKQLIASGAIFQATSDTEVVLHMIARSRHSSSTDRFVEAIRQVEGGYAMLALTRTKLIAARDPIGIRPLVMGELDGKPIFCSETCALDIIGAKYIRDVENGEVVVCEIQKDGSITTRSIKPENPQPERLCLFEYVYFARPDSVVGGRSVYVARKNMGMNLAAEAGVDADVVVPVPDGGTPAALGFAQASGIPFEYGIIRNHYVGRTFIEPTQQIRALGVKLKHSANRAMIEGKRVVLVDDSIVRGTTSVKIVQMIRDAGATEVHMRVASPMIFHPDFYGIDTPHADKLLANQHESLESMCRYIGADSLAFLSIDGLYKAVGGKPRDPKAPTFTDHYFTGEYPTRLLDQEGESNVHTLSLLASNG

SEQ ID NO: 132162 - DNA, 1263 bp, Pyrobaculum aerophilum str. IM2
  CDS (1)..(1263): transl_table=11
atgtgcggcataggcggcgcctggggcggcagggccggggagagggttaggcgcatggccccctggctcatgcaccggggacatgagggggtggggtatgcgtatatgaaaggaggggagattgccctgggggagccccgggacgacgcagagggggccttggtgcacaccagatacagcacctcgggggagtacggagtgcaactacagccagtcctcgccaagtatagagatttagaaatcgccgtggtcttcaacgggacagtagttaactacaagagactcggcgtggagagccccagttttgacggcgacgcgcttgccaaggccttggcgagggagatatgggagcggggagttgagcagggggttataagcgtatactctaaaatcgtcggcgcggccaccctcctggccttgaccccctggggccttctggccgtgagagatccgcgggggattaggccgctggcctaccgtctctacggagagggggtggccttctcttcagagaccgtggcgctgggaggcgggcaggaggtggccccgggcctagccgtgttgtacggcaagaggatggccttttggaaaatacccccaggagaggccaaaatatgcgccatggagctagtctacttcgcccacccagcctctattctgggcaaccgcctcgtggccgacgtgaggagggcattggggagggccctcgcagaggtggagacccacaacttcgacgtagtggcctacgtccccgagactgcgaggactgcggcggaggccttcgccgaggcgctgggaaagccgctggtagacgccgtggtgaagaacaggtttgcggggcgggtcttcatcacgccgcctcacctccgaaaccccggcgatgcctttcgggctgtgccccagctggtagagggcagaagggttgcccttgtggacgactcgttgataagaggcacaaacattaggacggtggtgagattgctgaaggaggcgggagccagggaggtacacgtgaggatagcgtcgccccccgtgaaatggccctgcttcttcggcatggacttccagacaaggagggagcttgtagctcacaaacgcgacgtggaggcaataagggcgtacataggcgcggacagcctcatatacctacccctcgaaaagtttagacagatcctgggaagcgcctgctacggctgcttcaccggggagtacccggtccagataaacgtcgaggaggcggaggtaagtacgcgcggcgcttag

SEQ ID NO: 132163 - protein, 420 aa, Pyrobaculum aerophilum str. IM2
MCGIGGAWGGRAGERVRRMAPWLMHRGHEGVGYAYMKGGEIALGEPRDDAEGALVHTRYSTSGEYGVQLQPVLAKYRDLEIAVVFNGTVVNYKRLGVESPSFDGDALAKALAREIWERGVEQGVISVYSKIVGAATLLALTPWGLLAVRDPRGIRPLAYRLYGEGVAFSSETVALGGGQEVAPGLAVLYGKRMAFWKIPPGEAKICAMELVYFAHPASILGNRLVADVRRALGRALAEVETHNFDVVAYVPETARTAAEAFAEALGKPLVDAVVKNRFAGRVFITPPHLRNPGDAFRAVPQLVEGRRVALVDDSLIRGTNIRTVVRLLKEAGAREVHVRIASPPVKWPCFFGMDFQTRRELVAHKRDVEAIRAYIGADSLIYLPLEKFRQILGSACYGCFTGEYPVQINVEEAEVSTRGA

SEQ ID NO: 132164 - DNA, 1446 bp, Clostridium perfringens str. 13
  CDS (1)..(1446): transl_table=11
atggtgaagccaaattttgatattatggatccacaaaatgataaattcaaagatgaatgcggagtttttggagttttcgcaaataaaccaatagatgttgcttctataaattattatggactttatgctcttcaacatagaggacaagaaagtgctggcattgcagtagcaaatggagaagatataaaagttcataaggggttaggtgttttaacggaagcctttgaagctgaagatttaaagagacttagagaatttaatggttatatatcaataggacatgttagatattctacagcgggagctaaaactgttgaaaatgcacaacctttagttagtaatactaaacttggtcctatatctactgctcataatggtaatttagttaatgcagatgtaataagaagtcttttagaggatgggggacaagttttccatactagtgttgattctgaggtgattacaagcttagttgctagaggagctaaaaaagggattgagagggctgtaattgatgctatatcagcggttaaaggttctttcgctatggtaataatgactaaggataagctaataggtataagagatccacatggaattagacctttatgcttaggaaaatttgaagagggatatatattaacttcagaaagttgtgctttagacacaattggagcagagtttgtgagagatataaaaccaggagaaatcgtggttatagataatgatgggattaaaagttatagatattcagaaaatactgtttgccaaacctgtgcctttgaatatatatactttgcaagaccagattcagtaattgatggtttagatgttcaaactacaagggttaagcaaggagaaatattatttaaagaatatccaatagatgctgatattgtggtagctgtaccagattcaggaataccagctgctatgggatatgctaaggcttcaggaattccttatgaggttggatttgtgaaaaatagatatataggaagaacatttatatcaccatcacaagaaattagggagagagctgtagctgtaaagcttaatcctttaaaagttaatgtaaatggaaagagagttattttaatagacgattctattgttagaggaacaacttctaaacatttaattgaatctttaagaagagctggtgctaaggaagttcattttctagttgcatcaccaatggttaaatatccatgttattttggcattgatacaccatatagaagtcagttaattggagcaagtagaagtgtagaagaaattagagagatgataggttgtgattctctagggtatttaagtttagaaggaatgtacgaaagttttgaaggtagaagaaatttctgtgtaggatgctttagtggggtttatccagttgcagcgcctatggaagctttagaggataatcttgaaagggtggagaattaa

SEQ ID NO: 132165 - protein, 481 aa, Clostridium perfringens str. 13
MVKPNFDIMDPQNDKFKDECGVFGVFANKPIDVASINYYGLYALQHRGQESAGIAVANGEDIKVHKGLGVLTEAFEAEDLKRLREFNGYISIGHVRYSTAGAKTVENAQPLVSNTKLGPISTAHNGNLVNADVIRSLLEDGGQVFHTSVDSEVITSLVARGAKKGIERAVIDAISAVKGSFAMVIMTKDKLIGIRDPHGIRPLCLGKFEEGYILTSESCALDTIGAEFVRDIKPGEIVVIDNDGIKSYRYSENTVCQTCAFEYIYFARPDSVIDGLDVQTTRVKQGEILFKEYPIDADIVVAVPDSGIPAAMGYAKASGIPYEVGFVKNRYIGRTFISPSQEIRERAVAVKLNPLKVNVNGKRVILIDDSIVRGTTSKHLIESLRRAGAKEVHFLVASPMVKYPCYFGIDTPYRSQLIGASRSVEEIREMIGCDSLGYLSLEGMYESFEGRRNFCVGCFSGVYPVAAPMEALEDNLERVEN

SEQ ID NO: 132166 - DNA, 1350 bp, Pyrococcus furiosus DSM 3638
  CDS (1)..(1350): transl_table=11
gtgaggggtgaaagcatagtgattagggagaaatgtggtatatttgcggcatatgctgataatgctcctgagaaggcttattactctctgttatcactccagcatagaggtcaggagggagctggaattactttttgggaaaatggtatcaagacgataaagggaattgggcttgtccctgaagtttttaaagggggaatagagtcgaaatcaagccttgcaattggacatgtgagatattctacttttggctcccttacggaagttcagcccattgaagttaaatgttgcaattataagcttgcaatagctcacaatgggactcttacaaactatctgccattaagagagaagtatgaaagtgagggcttcaagtttaactccactatagacacagagctaattggagtggcctttttgaaacattacaaagagctcggagatgaattcaaggcaatggaagaagtttttaatgaagttaggggagcttattctgtggcaattctctttgatggaaagataatcgtggcgagagatcccgctggttttagacctttagcttatggagaaggagatggtttttatttcgcttctgagaactcaggtttgagaatgtttacaaataagattagagatgtctttccaggcgaagtttttgttgttgaagagggtgaaatttatagtaaagttctgaagaaacttcctcatagccattgtgtttttgaatatatttactttgcaagacctgatagcaatatagagggggtaagtgtttacttggcaaggtataggatgggagttgaattagcaagagaaagcccagctcctggagatgttgttatagctgttcccgattctggaaggacagcggcccttggttttgcccatgaaagtggaattccttatatggaaggacttataaagaaccgttatattgggagaacttttatcatgcccagcggaagggagcttaaagttaagctaaagctttctcctgtaagggaggtcattgagggaaaaagggtggttttggttgatgattcaatagttagaggaacgaccataaagagaatagtaaagatgattagagatgcaggggctgaggaagttcatgtaagaatttcttcacctccaattagatatccatgctacatggggatagatattccaactaggcatgagcttattgcagcatggagaactgtcgaggatataagaagagaaattggagctgattctttagcttatttgagcatagaaggccttaaaagagctgtaggaatagaggatctttgcatggcctgcttaactggtcattatcccgagtgggcctttgactttgagttatga

SEQ ID NO: 132167 - protein, 449 aa, Pyrococcus furiosus DSM 3638
MRGESIVIREKCGIFAAYADNAPEKAYYSLLSLQHRGQEGAGITFWENGIKTIKGIGLVPEVFKGGIESKSSLAIGHVRYSTFGSLTEVQPIEVKCCNYKLAIAHNGTLTNYLPLREKYESEGFKFNSTIDTELIGVAFLKHYKELGDEFKAMEEVFNEVRGAYSVAILFDGKIIVARDPAGFRPLAYGEGDGFYFASENSGLRMFTNKIRDVFPGEVFVVEEGEIYSKVLKKLPHSHCVFEYIYFARPDSNIEGVSVYLARYRMGVELARESPAPGDVVIAVPDSGRTAALGFAHESGIPYMEGLIKNRYIGRTFIMPSGRELKVKLKLSPVREVIEGKRVVLVDDSIVRGTTIKRIVKMIRDAGAEEVHVRISSPPIRYPCYMGIDIPTRHELIAAWRTVEDIRREIGADSLAYLSIEGLKRAVGIEDLCMACLTGHYPEWAFDFEL

SEQ ID NO: 132168 - DNA, 1548 bp, Corynebacterium glutamicum ATCC 13032
  CDS (1)..(1548): transl_table=11
gtggcattacttgatcagcacacgctccctggttcaatggtaaataccgagcattccaccggaatgacccaggtaaaccacccgtacgatgatctcaacgaacaggcaccgcaggaagaatgcggcgttttcggcgtttgggcgccaggtgaggaagtctcgaaacttacctactttggcctcttcgcacttcagcaccgtggtcaagaagccgcgggcatcgcagtaggcgatggcgaacagatcctggttttcaaagatttgggcctagtctcccaagttttcgacgaaccaattctggaatccctccgcggaaacatcgccatcggacacacccgatacaccaccgccggcggaaacacctgggaaaatgcccagcctatgttccgcatggcaccagatggcaccgatatcgcccttggacacaacggcaacctgattaattacatcgagttgttggacaaagccaccgaacttggcctcgtcgatcccgccaagaagccatcagataccgatgtgctcactggactgctcgcaagcggcgtccatgacggaaataatctctttgattccgccaaggaactcctccccagcgtcaagggagcctactgcctcaccttcaccgacggacacaccctgtacgcagcgcgtgatccattcggcatccgcccactgtccatcggccgcctcgagcgcggctgggtagtcgcatctgaaaccgcagcgctcgacatcgtaggtgcctcgcatgtgcgcgaggtcgaaccaggcgaactgattgctatcgacgaatccggcctcaagtccgcacgattcgccgagacaacccgcaaaggttgcgtcttcgaatacgtttacctggctcgtccagactccgtgatcaagggaagaaacgtcaacgaagcccgacttgaaatcggccgcaagctcgctgcagaagcaccagcagtcggcgatctagtcatcccaaccccagaatcaggcaccccagcagcagttggattcgcccaagcatctggcatcccattcggccaaggcatggtcaaaaacgcctacgttggccgaaccttcatccagccttccgacactctccgccaactgggaatccgcctcaagctgaacccattgcgcgaggttatcgccggaaagcgccttgtggttgtggatgattccatcgtccgcggtaacacccaacgcgccgtgatccgcatgttgcgcgaagccggtgcagctgaggttcacgtacgcatcgcctcaccacccgtgaaatggccatgcttctacggcatcgattttgccaccccaggcgaactcattgccaacgctgtcaccagtgacaacgaagcagaaatggtagaagcagtccgctccgcaatcggcgcagacaccctcggctacgtctccatcgactccatggttgcagcaaccgagcaaccagccaacgaactctgcatcgcctgcttcgacggcaaataccccatgggtctgccacagggaaacagcaacgcagacctagtccgcaagatgcaagcaaccgcctcaagttaa

SEQ ID NO: 132169 - protein, 515 aa, Corynebacterium glutamicum ATCC 13032
MALLDQHTLPGSMVNTEHSTGMTQVNHPYDDLNEQAPQEECGVFGVWAPGEEVSKLTYFGLFALQHRGQEAAGIAVGDGEQILVFKDLGLVSQVFDEPILESLRGNIAIGHTRYTTAGGNTWENAQPMFRMAPDGTDIALGHNGNLINYIELLDKATELGLVDPAKKPSDTDVLTGLLASGVHDGNNLFDSAKELLPSVKGAYCLTFTDGHTLYAARDPFGIRPLSIGRLERGWVVASETAALDIVGASHVREVEPGELIAIDESGLKSARFAETTRKGCVFEYVYLARPDSVIKGRNVNEARLEIGRKLAAEAPAVGDLVIPTPESGTPAAVGFAQASGIPFGQGMVKNAYVGRTFIQPSDTLRQLGIRLKLNPLREVIAGKRLVVVDDSIVRGNTQRAVIRMLREAGAAEVHVRIASPPVKWPCFYGIDFATPGELIANAVTSDNEAEMVEAVRSAIGADTLGYVSIDSMVAATEQPANELCIACFDGKYPMGLPQGNSNADLVRKMQATASS

SEQ ID NO: 132170 - DNA, 1347 bp, Fusobacterium nucleatum subsp. nucleatum ATCC 25586
  CDS (1)..(1347): transl_table=11
atgggaatattagctttacattcaaaaaaagttagaaatgatttagtgggaatcgcatattatggaatgtatgctttacaacatagaggacaagcaggagcaggatatactatctgtgactctaaaactaataatgaagtaagaataaaaactattaaaaatgtaggacttgtatcagatgtatttaaagttgaagattttcaaaaatttattggaactatcttaatagctcatacaagatatggtagtaaaaatacagtttcttcaagaaattgtcaacctgttggtggagaatctgctatgggttatatatctcttgtacataatggtgacatatcaaatcaagctgaattgaaacaagaattattaaacaatggttctttattccaaacagcaatagatactgaaattatactaaaacttttaagtatcaatggtaaatatggttataaagaagcagttttaaaaacagttaaaaaattaaaaggttgttttactcttggaataataataaatgataaacttataggagttcgtgatcctgaaggattaagaccattatgtctaggtagaatagttgaaaatgatatgtatgttctggcttctgaaacttgtgcattagatgctattggtgcagaatttgtgagagatatagaagcaggagaaatggtagttatagatgacaatggagtggaaagcataaaatataaggaaagtagtaaaaaagcaagttcatttgaatatatttattttggaagaccagatagtgttatagatggaattagtgtttacgattttagacatcaaacgggaaaatgcttatatgaacaaaatccgatagaagctgatattgttattggtgttcctgattcaggtgttccagcagcaataggatattctgaagcaagtggaataccctattcagcagcacttttaaaaaataaatatgtaggtagaacatttattgctcctgtacaagaattgagagagagagcagtaaaagttaaattgaatcctattaaagaattaattaagggaaaaagagttgtagttatagatgactctattgttcgtggaacaacttctaaaaaattaatagatattttatttgaagcaggagcaaaagaagttcactttagatcagcttcaccagttgttattgaagaatcatattttggagtaaatatagatcctaataataagttaatgggaagctatatgagtattgaagaaattagaaaagtaataggagcaacaacattggactatctttcattaaaaaatttaaagaaaattttaaatggtggagaagatttttatatgggttgctttaaggaggatgaataa

SEQ ID NO: 132171 - protein, 448 aa, Fusobacterium nucleatum subsp. nucleatum ATCC 25586
MGILALHSKKVRNDLVGIAYYGMYALQHRGQAGAGYTICDSKTNNEVRIKTIKNVGLVSDVFKVEDFQKFIGTILIAHTRYGSKNTVSSRNCQPVGGESAMGYISLVHNGDISNQAELKQELLNNGSLFQTAIDTEIILKLLSINGKYGYKEAVLKTVKKLKGCFTLGIIINDKLIGVRDPEGLRPLCLGRIVENDMYVLASETCALDAIGAEFVRDIEAGEMVVIDDNGVESIKYKESSKKASSFEYIYFGRPDSVIDGISVYDFRHQTGKCLYEQNPIEADIVIGVPDSGVPAAIGYSEASGIPYSAALLKNKYVGRTFIAPVQELRERAVKVKLNPIKELIKGKRVVVIDDSIVRGTTSKKLIDILFEAGAKEVHFRSASPVVIEESYFGVNIDPNNKLMGSYMSIEEIRKVIGATTLDYLSLKNLKKILNGGEDFYMGCFKEDE

SEQ ID NO: 132172 - DNA, 1455 bp, Streptococcus pyogenes MGAS8232
  CDS (1)..(1455): transl_table=11
atgacatacgaagtaaaatctctaaatgaagaatgtggagtctttggtatctgggggcatcctcaggcagctcaagtcacttactttgggcttcatagccttcaacatcgcggtcaagaaggagctggtattgtttcaaatgacaatgggaaactctatggttatcgaaatgttgggcttctttctgaagtttttaagaatcaatctgaattagataatttaactgggaatgcggctattggacatgttcggtatgctactgcaggttctgcagatattcgcaatattcagccttttctttataaatttcatgacgggcaatttgctttatgccataatggtaatttgacaaatgctatttccttaaggaaagaattagaaaagcaaggtgcaattttcaatgcctcctcagatactgaaattttaatgcatttgattcgtcgaagccataactcaaatttcatgggaaaggtaaaagaagctctaaatacagtaaagggtggctttgcctatctactgatgacagaaaataaattaattgctgctcttgaccctaatgcctttcgtcctttgtcaattggacaaatgcaaaatggtgcctgggttatttccagtgagacctgtgcttttgaggtggtaggcgcaaaatgggttagagatgttgaacctggcgaagttattcttatagacgatagtggtattcaatgtgatcgttatactgatgaaacgcaactggcaatttgttcgatggaatatgtctattttgcaaggccggattcaactatacatggtgttaatgttcatacggctcgaaaaaatatgggaaagcgtcttgcacaagaatttaaacaggatgctgatattgtaattggtgtcccaaattcgtccttatcggctgctatgggctttgctgaagaatccggattaccaaatgagatgggtcttgtaaaaaatcagtatacgcagcgaacctttattcaaccgacacaagaattaagggaacaaggtgttcgaatgaaactatcagcggtatctggtgttgtcaaaggaaagcgcgttgttatgattgatgactcaattgtaagaggaacgacttctagaaggattgtcggattattaagagaagcaggagctagtgaagtacatgttgctatagctagtccagaattaaagtatccttgtttttatggtattgatattcaaacaagacgagaattaatttcagcaaatcacgctgttgacgaagtgtgtgatattattggcgcagatagtctgacctatctctcattagatgggttgattgaatcaattggactcgaaacaaaagcaccaaatggtggtttatgcgtagcttactttgatgggcattatccaacaccgctttatgattatgaagaagaatacctcagaagtttagaagagaaaacaagtttttatattcaaaaagtgaaataa

SEQ ID NO: 132173 - protein, 484 aa, Streptococcus pyogenes MGAS8232
MTYEVKSLNEECGVFGIWGHPQAAQVTYFGLHSLQHRGQEGAGIVSNDNGKLYGYRNVGLLSEVFKNQSELDNLTGNAAIGHVRYATAGSADIRNIQPFLYKFHDGQFALCHNGNLTNAISLRKELEKQGAIFNASSDTEILMHLIRRSHNSNFMGKVKEALNTVKGGFAYLLMTENKLIAALDPNAFRPLSIGQMQNGAWVISSETCAFEVVGAKWVRDVEPGEVILIDDSGIQCDRYTDETQLAICSMEYVYFARPDSTIHGVNVHTARKNMGKRLAQEFKQDADIVIGVPNSSLSAAMGFAEESGLPNEMGLVKNQYTQRTFIQPTQELREQGVRMKLSAVSGVVKGKRVVMIDDSIVRGTTSRRIVGLLREAGASEVHVAIASPELKYPCFYGIDIQTRRELISANHAVDEVCDIIGADSLTYLSLDGLIESIGLETKAPNGGLCVAYFDGHYPTPLYDYEEEYLRSLEEKTSFYIQKVK

SEQ ID NO: 132174 - DNA, 1356 bp, Methanopyrus kandleri AV19
  CDS (1)..(1356): transl_table=11
ttgtgcggggtttccggctgttacctgcttaaggaaaacgaggcgggcgtttataattacctcatcctccatgcgaaccagcacaggggccaagagtcggccggaatctgcgtgtacgatggactccgactggtcgggaagaagggcatgggcctagtgaccgaagtcttcgatcggcccgacctgcggaagctctcgggtccagtgggtatcggccacgtcaggtactcgacgactggcgcttccgagctcgtcaacgcccaaccgttcaaagtggggtactcgaagggcgagctggctttggcccacaacggagacatcgtgaactccgaagagctaaggcgggagctcgtttccgacggacatgctttcgtttcggagactgattcggaggtcatcgcccgactgctcgcggtcgctctcaccgagaccgacgatatgttcgaggcgttcgaggacgttatggaacggttggtaggctcgtactccctgaccgtgataacgagtcacggtgacctaatcgcggtccgagatccctggggattccgaccactgtgcctgggatgggacgaacgtggcttcttcgtttcctccgagacggtaggtctggacgtgttaggtgtggaggaacgccgcgagctggaacgtggcgaggtagtttggattcgggagggcgacgtcgaaagtaaagtcgtgagaagggaacgcaaggccgtctgtatgttcgagttcgtgtacttcgcacggccggattccatcatcgaaggcaggtgcgtgtacgaatgtcggaagtgcatgggtaagcgactcgccgaggaggccccggtcgagtgcgatctggtggttcccgtcccggattcgggtcggacggcggcgctgggatacgcggagtcgttgggggtccctatggaagagggactgatcaaaaatcggtacgtgggtaggacgttcatcatgccggagcaggaggagcgcgtacggagcatccgggtaaagctgaaccccatccgggaggtgatcaaagggtgctcgctggcagtagtggacgacagcatcgtacgtggaaacacctctcgacaaatagtggaaatgctgcgggatgccggggcccgtgaggttcacatgaggatcgcgtcacctcccgtggtgtccccttgttactacgggatcgacatggccacgaaggaggagctaatagccgcagacctcgatgttccagagatctgtgagaaaatctcggcagactcgctggcttacctgtctctagaaggtctcgtcgagtcgatcagattgaagaaacgggagctgtgcgtgggttgcctcacgggggagtaccccaccccggtccccgaatga

SEQ ID NO: 132175 - protein, 451 aa, Methanopyrus kandleri AV19
MCGVSGCYLLKENEAGVYNYLILHANQHRGQESAGICVYDGLRLVGKKGMGLVTEVFDRPDLRKLSGPVGIGHVRYSTTGASELVNAQPFKVGYSKGELALAHNGDIVNSEELRRELVSDGHAFVSETDSEVIARLLAVALTETDDMFEAFEDVMERLVGSYSLTVITSHGDLIAVRDPWGFRPLCLGWDERGFFVSSETVGLDVLGVEERRELERGEVVWIREGDVESKVVRRERKAVCMFEFVYFARPDSIIEGRCVYECRKCMGKRLAEEAPVECDLVVPVPDSGRTAALGYAESLGVPMEEGLIKNRYVGRTFIMPEQEERVRSIRVKLNPIREVIKGCSLAVVDDSIVRGNTSRQIVEMLRDAGAREVHMRIASPPVVSPCYYGIDMATKEELIAADLDVPEICEKISADSLAYLSLEGLVESIRLKKRELCVGCLTGEYPTPVPE

SEQ ID NO: 132176 - DNA, 1455 bp, Methanosarcina acetivorans C2A
  CDS (1)..(1455): transl_table=11
ctgcaccggaggtcaagattgaaagaagaatgcggagttgcaggcataatcctccctgacgacaggtctcagtcaaatactgtcgcattcaagctttactatgccctgtacgccctccagcataggggacaggaatctacgggtataatggtgcatgatgggacatctcccctctccatcaagggtatggggcttgtgccggacgtgtacaacaaggattctctggggcgccttatagggaatgcaggagtcggacacgtccgctactctacgactggcgggtcaaggattgaaaattgtcagccttttatccttaatttcaagggtggaacagttgccattgcccataacgggaatctggtaaatgcaagagcgctcaaagacgagctggaaaacgaaggccgaatttttataagtaattccgataccgaggttatcggtcacctgcttgtgaaggaactgataaggcacgatcctatcgagtctatcaggaatgtaatgcgcaagcttgttggatcttattctcttgttatcttcatcaacggtgttgtgtacgctgtcagggaccccttcggcctcaagcccctctgttttggagaagttgacggcggatatggaatattttcggaaagtgttgctattgataccctgaacggcacccttatccgggatgtcaggccaggcgaggtaatggtctttacgagttcaggctttgagagccaccagctcacaaatgagccccacccggcacattgtgtttttgagtttatttactttgcaagacccgattccgtcatagacggcaaactcgtctacaagatccgggaaagaatcggaagagagcttgcccgtgagcatgatgttgaagcggatatcgtttctcctgtccctgactcgggaattacgtctgcaatcggctatgcaagagagtccggaatcatgtatctggaaggtcttatgaagaaccgctacatagggcgcacatttattcttccgggacaggacctgcgcgaaactgcagttcggctcaagatgaacgccattcaggaaaacgtcaaaggaaagcgtgtagtccttgtcgatgacagcattgtccgcggcacaacttcccggcgtatcatagatatggtcaggaaggcaggtgcgtcagaagtccatgcaagggtcggaagtccggcaattattgccccctgctatctcgggatcgatatggcaacccggcaggaacttattgcctcatacaagactataaaagaggttgaagggctaataaatgccgactctctcggttatctcagcattgaagggctcatgagagctcttgagtgcgataagaacgatatgtgcatcggctgccttacaggtgagtatcctgtagacatccccggcgagaaatgcagaaaaaagcagtcccgccttgatgatttcagtaaggacgcaagttcctctaagtaa

SEQ ID NO: 132177 - protein, 484 aa, Methanosarcina acetivorans C2A
MHRRSRLKEECGVAGIILPDDRSQSNTVAFKLYYALYALQHRGQESTGIMVHDGTSPLSIKGMGLVPDVYNKDSLGRLIGNAGVGHVRYSTTGGSRIENCQPFILNFKGGTVAIAHNGNLVNARALKDELENEGRIFISNSDTEVIGHLLVKELIRHDPIESIRNVMRKLVGSYSLVIFINGVVYAVRDPFGLKPLCFGEVDGGYGIFSESVAIDTLNGTLIRDVRPGEVMVFTSSGFESHQLTNEPHPAHCVFEFIYFARPDSVIDGKLVYKIRERIGRELAREHDVEADIVSPVPDSGITSAIGYARESGIMYLEGLMKNRYIGRTFILPGQDLRETAVRLKMNAIQENVKGKRVVLVDDSIVRGTTSRRIIDMVRKAGASEVHARVGSPAIIAPCYLGIDMATRQELIASYKTIKEVEGLINADSLGYLSIEGLMRALECDKNDMCIGCLTGEYPVDIPGEKCRKKQSRLDDFSKDASSSK

SEQ ID NO: 132178 - DNA, 1398 bp, Thermoanaerobacter tengcongensis MB4
  CDS (1)..(1398): transl_table=11
atgggaaatggagagaaattaaaagaggaatgtggtgtttttggtgcctttagtttgtccacttcagttacttcttatatctattatggcttacaagccttgcagcacagagggcaggaaagttcaggtatagctatttatgatggcgaaaaaataaattgtattaaggggttgggacttgtcagcgaggtctttaataaggagaatttaaagacattagaggggaaaatggggataggccatgtaaggtattctactacaggcagcaataacattataaatgctcaacccctcgttgctaattttaaaaacaaatatatggctcttgcccataatggcaatttgataaacgcagaagagttaagatgcctattggaggaggatggtagaatatttcaaactacaactgatagtgaaataattctccatctaattgcaaaaaattttcaagaaaacttaatcggagctcttttagaaacaatgaaacaaataaaaggttcatatgctttggtgattttaacagacaataaattaatagggataagagacgtaaacagtataaggcctctttgcataggtaaaaaagatgacacttatttcttatcttctgagtcttgtgcttttgacgtaataggagcagaattgatacgagatgtggaagcaggtgaaatagttataattgatgaaaaaggtatagattctgttaagttagaagtaaaagaaaaaaagaagccttgtgtttttgaatacatctattttgctagacctgacagtgtcatagatggaaaaagtgtttattttacacgattggagatggggaaaagattagctgaagaagcacctgtagatgcagacttggtagtaccagttccagattcaggtattgctgctgcaagaggctattctctcaaaacagggataccaatgggggaaggacttataaaaaataaatacattggaaggacttttattgctcccgaccaaagggatagagagacaggcgtgaggataaagctaaatgtcttaaaagaattggttcaaggcaaaaggatagttttaatagatgattcaattgttagaggcacaactatgaaaagattagtgagtctactaaaaaatggcggagcaaaagaagtccatgtgaggataagttcaccccctgttaaatattcttgctactttggaattgatactccgacaaaaaaagaactgatagcggcgaggatgtcagttgaagagatgtgcaaattaataggagctgacagcctacagtttttaagtattgaagggcttataaaaagtgtaggacttaaatctatttgcacaggttgctttgatggcaattatcctatgtatgttccaaaagaaagaagtaaatatctttttgagaaaaaataa

SEQ ID NO: 132179 - protein, 465 aa, Thermoanaerobacter tengcongensis MB4
MGNGEKLKEECGVFGAFSLSTSVTSYIYYGLQALQHRGQESSGIAIYDGEKINCIKGLGLVSEVFNKENLKTLEGKMGIGHVRYSTTGSNNIINAQPLVANFKNKYMALAHNGNLINAEELRCLLEEDGRIFQTTTDSEIILHLIAKNFQENLIGALLETMKQIKGSYALVILTDNKLIGIRDVNSIRPLCIGKKDDTYFLSSESCAFDVIGAELIRDVEAGEIVIIDEKGIDSVKLEVKEKKKPCVFEYIYFARPDSVIDGKSVYFTRLEMGKRLAEEAPVDADLVVPVPDSGIAAARGYSLKTGIPMGEGLIKNKYIGRTFIAPDQRDRETGVRIKLNVLKELVQGKRIVLIDDSIVRGTTMKRLVSLLKNGGAKEVHVRISSPPVKYSCYFGIDTPTKKELIAARMSVEEMCKLIGADSLQFLSIEGLIKSVGLKSICTGCFDGNYPMYVPKERSKYLFEKK

SEQ ID NO: 132180 - DNA, 1593 bp, Streptomyces coelicolor A3(2)
  CDS (1)..(1593): transl_table=11
gtgatccatgagtggtcccgtatccccaattcggaccagtggtcgatctcgcctacactcgaaggcgtgccacgtggtgacggtcgactcaatcacgatctgcttcccggcgagaagggcccccaggacgcttgcggcgtcttcggtgtctgggctccgggcgaagaggtcgcaaagctcacgtacttcgggctgtacgccctccagcatcggggccaggaatccgcgggaatcgcggtcagcaacggctcccagatcctcgtcttcaaggacatgggcctggtgtcccaggtcttcgacgagacctcgctcggttcgctccagggtcacatcgcggtcggtcacgcccgctactcgaccaccggtgcctccgtgtgggagaacgcccagccgacgttccgtgccaccgcgcagggttccatcgcgctcgggcacaacggcaacctcgtcaacaccgcccagctcgccgggctggtggccgacctgccgaagcaggacggccgctccacccgggtcgcggcgaccaacgacaccgacctgatcaccgcgctgctcgcgggccaggtcgacgacgacggcaagccgctgaccgtcgaggaggcggccggcaaggtgctgccccaggtgcgcggcgccttctccctcgtcttcatggacgagcacaccctctacgccgcccgcgacccgcagggcatccgcccgctggtcctcggccgcctggagcgcggctgggtggtcgcctccgagtccgccgccctggacatctgcggcgcctcctacgtccgggagatcgagccgggcgagttcgtcgccatcgacgagaacggcctgcggacatcgcgattcgcagaagcgaagcccaagggctgtgtcttcgagtacgtgtacctggcccgcccggacaccgacatcgccggccgcaacgtctacctctcgcgtgtcgagatgggccgcaagctggcgaaggaggcccccgcggaggccgatctcgtcatagcgaccccggaatccggcacccccgccgcgatcggctacgccgaggcctccggcatccccttcggcaacggcctggtgaagaacgcctatgtcggccggaccttcatccagccctcacagaccatccgccagctgggcatccgcctgaagctgaatcccctgaaggaagtcatcaagggcaagcggctggtcgtcgtcgacgactccatcgtccgcggcaacacccagcgggccctggtccgcatgctccgcgaggcgggcgccgccgagatccacatccggatctcgtccccgcccgtgaagtggccctgcttcttcggcatcgacttcgccacccgcgccgagctgatcgccaacggcatgagcgtcgaggagatcggcacctcgatgggcgccgactccctggcgtacatctccatcgacggcatgatcgaggcgaccaccatcgccaagcccaacctgtgccgcgcctgcttcgacggcgagtacccgatggagcttcccgaccccgagctgctcggcaagcagctcctggagaccgagctggccgccgggcccgccggtacggccgccgccgacgccatccgtcgcccgtag

SEQ ID NO: 132181 - protein, 530 aa, Streptomyces coelicolor A3(2)
MIHEWSRIPNSDQWSISPTLEGVPRGDGRLNHDLLPGEKGPQDACGVFGVWAPGEEVAKLTYFGLYALQHRGQESAGIAVSNGSQILVFKDMGLVSQVFDETSLGSLQGHIAVGHARYSTTGASVWENAQPTFRATAQGSIALGHNGNLVNTAQLAGLVADLPKQDGRSTRVAATNDTDLITALLAGQVDDDGKPLTVEEAAGKVLPQVRGAFSLVFMDEHTLYAARDPQGIRPLVLGRLERGWVVASESAALDICGASYVREIEPGEFVAIDENGLRTSRFAEAKPKGCVFEYVYLARPDTDIAGRNVYLSRVEMGRKLAKEAPAEADLVIATPESGTPAAIGYAEASGIPFGNGLVKNAYVGRTFIQPSQTIRQLGIRLKLNPLKEVIKGKRLVVVDDSIVRGNTQRALVRMLREAGAAEIHIRISSPPVKWPCFFGIDFATRAELIANGMSVEEIGTSMGADSLAYISIDGMIEATTIAKPNLCRACFDGEYPMELPDPELLGKQLLETELAAGPAGTAAADAIRRP

SEQ ID NO: 132182 - DNA, 1458 bp, Methanosarcina mazei Go1
  CDS (1)..(1458): transl_table=11
ttgaaagaagagtgcggggttgcaggcataattttgcctgatgacagacccgcgtcaaatgctgtcgcattcaagctttattatgccctttatgcccttcagcacagaggacaggaatcgacaggcataatggtgcacaacggctcatgtccgctttccatcaaaggaatggggcttgtacctgatgtatataacaaagattccctcgggcgtctggtcggtaatgcaggagtcgggcatgtccgttactccacaactggcgggtcaaagattgaaaactgtcagccttttatcctgaacttcaagggcggaacagttgccattgctcataatgggaatctggtaaatgcaagggaactgaaggatgagctggaaaatgaaggcagaatttttatcagtgattcagatactgaagttattggccatctgcttgtaaaagaactgataaaacacgaacctatcgagtctatcaggactgtaatgcgcaagcttgttggctcttactctcttgtcattttcattaacggtgttatctacgccgtaagggatcctttcggttttaagccactctgttttggagaagttgacggcggatacggagtattttccgagagcgtagccattgacaccctgaacggcacccttataagggacgtcaaaccaggcgaggtcatggtctttacaggctcaggttttgaaagccaccagctcgcaaatgaaccgcatccggcacattgcgtttttgagttcatttactttgcaaggccagactccgttatagacggcaagcttgtctataaagtaagggaaagaatcggaagggagcttgcccgcgaacatcatgtagacgcagacatcgtgtctcctgtccctgactccggaatcacttccgcaatcggctatgcaagggaatcaggtataatgtacctggaagggctcatgaagaaccgttatatcgggcgcaccttcattcttccgggacaggacctgcgtgaaactgcagttcggcttaagatgaacgctattcaggacaatatcaaaggcaaacgtgttgtcctggtagatgacagcattgtccgcgggactacctcgaggcgtatcatagatatggtcaggaaggcaggcgcgtcagaagtccacgcaagggtcggaagcccggcaattattgccccctgctacctgggaatcgatatggcaacccggcaggaacttatcgcttcatacaagaccataaaagaggtcgaagggctgataagtgctgattctctcggctacctcagcatcgacgggcttatgagagcacttgagtgcgacaagaacgacatgtgcattggctgccttacaggagaatatcctgtagagatcccgggcgagaaatgcagaaagaaacagacccgtctggacgatttcagtaaggctgaaagatcctctcaggcagtatctccggacagcctttaa

SEQ ID NO: 132183 - protein, 485 aa, Methanosarcina mazei Go1
MKEECGVAGIILPDDRPASNAVAFKLYYALYALQHRGQESTGIMVHNGSCPLSIKGMGLVPDVYNKDSLGRLVGNAGVGHVRYSTTGGSKIENCQPFILNFKGGTVAIAHNGNLVNARELKDELENEGRIFISDSDTEVIGHLLVKELIKHEPIESIRTVMRKLVGSYSLVIFINGVIYAVRDPFGFKPLCFGEVDGGYGVFSESVAIDTLNGTLIRDVKPGEVMVFTGSGFESHQLANEPHPAHCVFEFIYFARPDSVIDGKLVYKVRERIGRELAREHHVDADIVSPVPDSGITSAIGYARESGIMYLEGLMKNRYIGRTFILPGQDLRETAVRLKMNAIQDNIKGKRVVLVDDSIVRGTTSRRIIDMVRKAGASEVHARVGSPAIIAPCYLGIDMATRQELIASYKTIKEVEGLISADSLGYLSIDGLMRALECDKNDMCIGCLTGEYPVEIPGEKCRKKQTRLDDFSKAERSSQAVSPDSL

SEQ ID NO: 132184 - DNA, 1467 bp, Xanthomonas campestris pv. campestris str. ATCC 33913
  CDS (1)..(1467): transl_table=11
atgtgtggcatcgtcggtattgtcggcaaccagaacgtcgccgggcagctctatgacggcctgaccgtcctgcagcatcgcgggcaggatgccgcaggcatcgccacggccgatggcacgcggttgcgcgtgcaaaaagccaacggcctggtccgcgacgtcttcgacgaaaagaagatggcggtgctggaaggccgcgtcggcatcgcgcattgccgctacccgaccgccggctcggaaggcatggacgaagcacagccgttctacgtcaattcgccgtacggcatcgcgctggcgcacaacggcaatctgatcaacaccgaggccttgcgccagcaggtgttcgaggccgaccgccgcaatatcaacaccgattcggacagcgaagtgctgttgaacgtgttcgcctacgagctggacgcgcaacgcatgctcacccccgaagcggcgatccgcgcggtagctggcgtgcaccgccgctgcaagggtggctatgcggtggtcagtgtggtgctgggcctgggcctggtggcattccgcgacccacacggcatccgcccgctggtcctgggcaagcgcgaacacgccgaaggcaccgaatacatcgtgtcgtccgaatcggcggccttggacatccttggctaccagcgcgtgcgcgacgtgcgcccgggcgaggcgctggtgatcactgcgcgtggcgagctgttctccgaaatctgcgccgcgccgaccgaccatgcgccgtgcatcttcgagtacgtgtatttcgcgcgtcccgattcgatgatcgacaacatctcggtgcacaaggcgcgcatgcgcatgggcctgaagctgggcgagaagatcctgcgcctgcgcccggaccatgacatcgacaccatcattccgatcccggatacctcgcgcgatgtggcgctggagatgtccaacgtgctcggcgtgaagtaccgcgaaggcttcgtcaaaaaccgttacgtgggccgcaccttcatcatgccggggcagggcgaacggcagaaatcggtacgccgcaagctcaacccgatccatctggaattccgcaaccgcgtggtgctgctggtcgacgattcgatcgtgcgcggcaccaccagccggcagatcgtgcagatggcgcgcgacgccggtgcacgcaaggtgtatctggcctcggccgcgccgccggtgcgctacccgaatatctacggcatcgacatgccggccgccgaagaactgattgcgcatggccgcagcgagcaggaaatccaggaattcctgggctgcgactggctgatctaccaggatctggaagacctggaagtggcggtgcgcgaaggcaatccggacatcaagcagttcgattcgtcgtgcttcaacggcgagtacatcaccggtatcgagccagggtatttcgagcgcatccagcagctgcgttcggacgatgccaagaagcgccggcgcgcctga

SEQ ID NO: 132185 - protein, 488 aa, Xanthomonas campestris pv. campestris str. ATCC 33913
MCGIVGIVGNQNVAGQLYDGLTVLQHRGQDAAGIATADGTRLRVQKANGLVRDVFDEKKMAVLEGRVGIAHCRYPTAGSEGMDEAQPFYVNSPYGIALAHNGNLINTEALRQQVFEADRRNINTDSDSEVLLNVFAYELDAQRMLTPEAAIRAVAGVHRRCKGGYAVVSVVLGLGLVAFRDPHGIRPLVLGKREHAEGTEYIVSSESAALDILGYQRVRDVRPGEALVITARGELFSEICAAPTDHAPCIFEYVYFARPDSMIDNISVHKARMRMGLKLGEKILRLRPDHDIDTIIPIPDTSRDVALEMSNVLGVKYREGFVKNRYVGRTFIMPGQGERQKSVRRKLNPIHLEFRNRVVLLVDDSIVRGTTSRQIVQMARDAGARKVYLASAAPPVRYPNIYGIDMPAAEELIAHGRSEQEIQEFLGCDWLIYQDLEDLEVAVREGNPDIKQFDSSCFNGEYITGIEPGYFERIQQLRSDDAKKRRRA

SEQ ID NO: 132186 - DNA, 1467 bp, Xanthomonas axonopodis pv. citri str. 306
  CDS (1)..(1467): transl_table=11
atgtgtggcatcgtcggtattgtcggcaaccagaacgtcgccgggcagctgtatgacggcctgaccgtcctgcagcatcgtgggcaggacgccgcaggcatcgccaccgcagatggcacgcgcctgcgcgtgcagaaggccaacggcctggtgcgcgacgtcttcgacgaaaagaagatggcggtgctggaaggccgcgtcggcatcgcgcattgccgctacccgaccgcaggttcggaaggcatggacgaggcgcagccgttctacgtcaactcgccctacggcatcgcgctggcgcacaacggcaacctgatcaacaccgaggccttgcgccaacaggtgttcgaagccgaccgccgcaatatcaataccgattcggacagcgaagtgctgttgaacgtgttcgcctacgagctggacgcgcagcgcatgcttacccccgaagcggcgatccgcgcggtggccggcgtgcaccgccgttgcaagggcggctacgcggtggtcagcgtggtgctgggcctgggcctggtggcgttccgcgatccgcacggcatccgcccgctggtgctgggcaagcgcgagcatgccgaaggcaccgaatacatcgtgtcctccgaatcggcagcgctggatatcctcggctaccagcgcgtgcgcgacgtgcgcccgggcgaagcgctggtgatcaccgcgcgcggcgaactgttctcggaagtctgcgcggcaccgaccaacaacgcgccgtgcattttcgagtacgtgtatttcgcgcgccccgattcgatgatcgacaacatctcggtgcacaaggcgcgcatgcgcatgggcctgaagctgggcgaaaagatcctgcgcctgcgcccggaccatgacatcgacaccatcattccgatcccggacacctcgcgcgatgtggcgttggagatgtccaacgtgctcggcgtgaagtaccgcgagggcttcgtcaagaatcgctacgtgggccgcaccttcatcatgccggggcagggcgaacggcagaaatcggtacgtcgcaagctcaatccgatccatctggaatttcgtaaccgcgtggtgctgctggtggacgattccatcgtgcgcggcaccaccagccggcagatcgtgcagatggcgcgcgatgccggtgcgcgcaaggtgtacctggcctccgccgcgccgccggtgcgctaccccaacatctacggcatcgacatgccggccgccgaagagctcatcgcgcatggccgcagcgagctggaaatccaggagttcctgggctgcgactggctgatctaccaggatctggaagacctggaagtggcggtgcgcgaaggtaatccggacatcaagcagttcgattcttcgtgcttcaacggcgagtacatcaccggtatcgaaccggggtatttcgaacgcatccagcagctgcgctcggacgatgccaagaagcgtcgccgcgcctga

SEQ ID NO: 132187 - protein, 488 aa, Xanthomonas axonopodis pv. citri str. 306
MCGIVGIVGNQNVAGQLYDGLTVLQHRGQDAAGIATADGTRLRVQKANGLVRDVFDEKKMAVLEGRVGIAHCRYPTAGSEGMDEAQPFYVNSPYGIALAHNGNLINTEALRQQVFEADRRNINTDSDSEVLLNVFAYELDAQRMLTPEAAIRAVAGVHRRCKGGYAVVSVVLGLGLVAFRDPHGIRPLVLGKREHAEGTEYIVSSESAALDILGYQRVRDVRPGEALVITARGELFSEVCAAPTNNAPCIFEYVYFARPDSMIDNISVHKARMRMGLKLGEKILRLRPDHDIDTIIPIPDTSRDVALEMSNVLGVKYREGFVKNRYVGRTFIMPGQGERQKSVRRKLNPIHLEFRNRVVLLVDDSIVRGTTSRQIVQMARDAGARKVYLASAAPPVRYPNIYGIDMPAAEELIAHGRSELEIQEFLGCDWLIYQDLEDLEVAVREGNPDIKQFDSSCFNGEYITGIEPGYFERIQQLRSDDAKKRRRA

SEQ ID NO: 132188 - DNA, 1494 bp, Chlorobium tepidum TLS
  CDS (1)..(1494): transl_table=11
atgtgcggagttttcggcgtttttaattcaaaaactcccgccgaagataccttttacggcctctactcgctacaacaccgaggacaggaagccgcaggtatcgtcgttgccgaatacaacaaggccaagaaaaagaccctgttcaagcagcataaagggctggggctggtatccgaagttttcaaggacgaacagattttcgagaacctgagcggatacgcagcaatcggccataaccgctactccaccaccggcgcctccaaatcgaacaacaatatccagcccttctccctcacctaccgctccggcagcctcgccatcgcccacaacggaaacctgaccaattcgagagttttgcgcaaggagctgaccgaagagggcgtaattttccaggcctcatcggataccgaaatcatcccgcaccttgccgcgcgcagcaaggaaaaagagccactgcaccagatttacgatgcattgcggcaggtagaaggagctttttcgatcgtgattctggccaacaaccagatgattgcggcgcgagacccttacggcgtgcgccccttggctctcggcaagaaaatcgatcccgcaaccggtgagctggcctacgtcgtagcgagcgaaacctgtgctttcgacatcatcaaggccgagtacatccgcgacatcgaaccgggtgaaatcctcctgatcgaccacctcgccgtggacaacgaaaagccggtttcgctctaccttccacctgtcgagcgcaaagcccgctgcatcttcgagtatgtctatttcgcccgcccggacagcttcatctttcggcactcggttgacaaggtgcgccggaacctcggcaagaacctggccagggaatcaacgatcgaacgagaccccaacgacaaggagctggccgtagtcagcgtgccagactcctcgaacacggctgcgctcggcttcgtcagagaaagcaacaaactcggcaagcctgcgcgcttcgagcacggcctgatccgcaaccactatgttggccgcacctttattcagccaggcattcagagccgtgaaatcaaggttcgctcgaaatacaacatcgtgcgcggcgtcatgcagggccgcccaatcatcctcgtcgatgactcgatcgtgcgcggcacaacggccaagatgctcatcaagctggttcgcgaggccaatccgaaagagattcacctgcacatcagctcaccaccgatcaccaatccctgcttttacggcatggacttcccctccaagcgccaactgctcacgcacatgcttgctgacgccgagcacgagctgggcgatatcgaaaaaatcagggagtacatcggcgtggattcactgagatatctctccatgcagggcctcctgaacagcgtaccggaattcgagggcgaaacctgcagctactgcactgcctgcttcagcggcgactaccccatcccgatcgccgacgccacgaccgacaaggaagagaacgactaa

SEQ ID NO: 132189 - protein, 497 aa, Chlorobium tepidum TLS
MCGVFGVFNSKTPAEDTFYGLYSLQHRGQEAAGIVVAEYNKAKKKTLFKQHKGLGLVSEVFKDEQIFENLSGYAAIGHNRYSTTGASKSNNNIQPFSLTYRSGSLAIAHNGNLTNSRVLRKELTEEGVIFQASSDTEIIPHLAARSKEKEPLHQIYDALRQVEGAFSIVILANNQMIAARDPYGVRPLALGKKIDPATGELAYVVASETCAFDIIKAEYIRDIEPGEILLIDHLAVDNEKPVSLYLPPVERKARCIFEYVYFARPDSFIFRHSVDKVRRNLGKNLARESTIERDPNDKELAVVSVPDSSNTAALGFVRESNKLGKPARFEHGLIRNHYVGRTFIQPGIQSREIKVRSKYNIVRGVMQGRPIILVDDSIVRGTTAKMLIKLVREANPKEIHLHISSPPITNPCFYGMDFPSKRQLLTHMLADAEHELGDIEKIREYIGVDSLRYLSMQGLLNSVPEFEGETCSYCTACFSGDYPIPIADATTDKEEND

SEQ ID NO: 132190 - DNA, 1518 bp, Yersinia pestis KIM
  CDS (1)..(1518): transl_table=11
atgtgcggtattgtcggtatcgccggttttacaccggtaaaccagtcgatttatgatgcgttgatggtgcttcagcatcggggtcaggatgcggcgggtattgttaccattgatgcccataatgggttccgtctgcggaaagcgaacggcttggtgaaggatgtatttgaaacccggcatatgctgcgtttacaggggaatatggggattggtcatgttcgttacccaacggcaggcagctccagcgcttctgaagctcaacctttctatgttaactcaccgtttggcattaccctggctcacaatggtaatctgactaacgctcaccaactgagaaagaaattattcgaagtttctcgtcgtcatgtaaataccacgtctgactcagaaattctgttgaatatttttgccagtgaattggatcgtttccagcattatccgttggagtctgacaacatttttgccgctgttgccgcgacgcaccagttgattcgtggtgcttatgcctgcgtcgcaatgattatcggccacggtatggtcgctttccgtgaccccaacggtattcgtccgctggtgattggtaaacgcacgctggctgatgggcgcaatgagtatatggttgcgtccgaaagtgtggctttggatacacttgattttgagttcttgcgtgatgttgcaccgggcgaagccgtgtatatcaccgagaaaggccaactgttcacgcgtcagtgtgctgagaatccaaaatacaacccatgcttgtttgaatatgtttattttgcccgcccagactcctttatggataaaatttctgtttacagtgcgcgcgtccgcatggggcagaagttggggaccaaaatagccaaacagtgggaagacatggatatcgatgttgtcattcctattccagaaacctcttgcgatatcgcactggaaattgcccgaattctggataaaccgtaccgtcaggggtttgtcaaaaaccgttatgtcgggcgtacatttatcatgccgggtcagcaagaacgccgtaaatcggtgcgtcgtaagctgaatgctaatcgtgctgagttccgtggtaaaaacgtgttattggtggatgattccattgttcgcgggaccacgtcagagcagattgtcgaaatggcacgggaagctggggcgaaaaaagtgtactttgcgtcggcagcacctgaaatccgtttcccgaatgtgtacggtatcgatatgccaagtgctaatgagttgattgctcatggccgtgaagttgatgaaattcgtcagttgattggcgccgatgcactgattttccaagatcttactgatcttattgatgcagtacgtgaagataatccagacattacccagttcgaatgttctgtctttaatggtatttacgtgacgaaagatgtggatcagagctatctggaatatcttgagtcattacgtaacgacgatgcgcaggcattgcgtagccacaatgaagcggaaaatttagagatgcataacgaaggttaa

SEQ ID NO: 132191 - protein, 505 aa, Yersinia pestis KIM
MCGIVGIAGFTPVNQSIYDALMVLQHRGQDAAGIVTIDAHNGFRLRKANGLVKDVFETRHMLRLQGNMGIGHVRYPTAGSSSASEAQPFYVNSPFGITLAHNGNLTNAHQLRKKLFEVSRRHVNTTSDSEILLNIFASELDRFQHYPLESDNIFAAVAATHQLIRGAYACVAMIIGHGMVAFRDPNGIRPLVIGKRTLADGRNEYMVASESVALDTLDFEFLRDVAPGEAVYITEKGQLFTRQCAENPKYNPCLFEYVYFARPDSFMDKISVYSARVRMGQKLGTKIAKQWEDMDIDVVIPIPETSCDIALEIARILDKPYRQGFVKNRYVGRTFIMPGQQERRKSVRRKLNANRAEFRGKNVLLVDDSIVRGTTSEQIVEMAREAGAKKVYFASAAPEIRFPNVYGIDMPSANELIAHGREVDEIRQLIGADALIFQDLTDLIDAVREDNPDITQFECSVFNGIYVTKDVDQSYLEYLESLRNDDAQALRSHNEAENLEMHNEG

SEQ ID NO: 132192 - DNA, 1449 bp, Thermosynechococcus elongatus BP-1
  CDS (1)..(1449): transl_table=11
atgacagaacaacaatttgcggataagccggaagaggcctgtggggtatttggggtttatgcccccggggcggatgtggctcgcctcacctactttggtctctatgccctgcaacaccgaggtcaggaatccgctggaattgctacatttgccggtgacaccgtccactgtcacaaggatatgggtttggtgtcccaagtctttgacgaagagattttgggacggctggtgggagatttggctgtgggccacaaccgctactcaaccacgggttccagtcgcattgtcaacgcccaaccagtggtggtagacactcgtttaggacctttggccttagcccacaacggcaacttagtgaatacctacgccctgcgggaacaggtgctggcctgtgatgcgccgacggcggtgttggcgagcacaaccgattctgaactcattgcctgggcgatcgcccaagcggtggccaccggtcaatcctgggcagaggggatgattacagcggctcaacagtgccaaggggcttttagtttagtaatgggtaccccagcgggattgtttggactgcgggatgcccacggcatccgtcccttagtcattggccgcttgatgacagaagggacgccccactatgtccttgcttcggagacctgcgccctcgatattattggtgccgactatgtgcgggatgtggagccgggggaactggtgcacattactccggaagggattggcagtgtgcagtgggcagagtctcaacggaagctgtgtatctttgagatgatttactttgcccgtcccgatagtgtcatgcagcgggagagcctctatagctatcggcagcgcttgggttatcagttgggtcgtgaagctcccgccgatgccgacgtggtgattgctgtgcctgattctggggtgccagcggccattggcttttcccaagcaactggggtaccctatgccgaaggcttgattaaaagtcgctacgtggggcggacatttattcagcccacccagtcgatgcgggagtcgggaattcgcatgaagctgaatccactgccagatgtgctgatgggtcagcgggtggtgattgtggatgactcgattgtgcggggcaccactagccgcaaaattgtcaaggcgctgcgggatgccggtgctgtggaagtccacatgcgcatttcttcgccccctgttacccacccctgcttctatggcatcgataccgatacccaagatcagctgattgctgccaccaagtctgtgcctgaaattgccgctcagattggcgtggattccctcagttacctcagttggcaggggatgattgccgccacctacgatacgggcgatcgcttctgttccgcctgttttaccggcaactacccgattagcatccccgagccagtgaaacggcaaaagttggtgcttgagcaacttccccaatga

SEQ ID NO: 132193 - protein, 482 aa, Thermosynechococcus elongatus BP-1
MTEQQFADKPEEACGVFGVYAPGADVARLTYFGLYALQHRGQESAGIATFAGDTVHCHKDMGLVSQVFDEEILGRLVGDLAVGHNRYSTTGSSRIVNAQPVVVDTRLGPLALAHNGNLVNTYALREQVLACDAPTAVLASTTDSELIAWAIAQAVATGQSWAEGMITAAQQCQGAFSLVMGTPAGLFGLRDAHGIRPLVIGRLMTEGTPHYVLASETCALDIIGADYVRDVEPGELVHITPEGIGSVQWAESQRKLCIFEMIYFARPDSVMQRESLYSYRQRLGYQLGREAPADADVVIAVPDSGVPAAIGFSQATGVPYAEGLIKSRYVGRTFIQPTQSMRESGIRMKLNPLPDVLMGQRVVIVDDSIVRGTTSRKIVKALRDAGAVEVHMRISSPPVTHPCFYGIDTDTQDQLIAATKSVPEIAAQIGVDSLSYLSWQGMIAATYDTGDRFCSACFTGNYPISIPEPVKRQKLVLEQLPQ

SEQ ID NO: 132194 - DNA, 1455 bp, Streptococcus agalactiae 2603V/R
  CDS (1)..(1455): transl_table=11
atgacatacgaagtaaaatctctaaatgaagaatgtggagtctttggtatctgggggtatcctcaggcagctcaagtcacttactttgggcttcatagccttcaacatcgcggtcaagaaggagctggtattatttcaaatgataatgggaaactctatggttatcgaaatgttgggctcctttctgaagtttttaagaatcaatctgaattagataatttaactgggaatgcggctattggacatgttcggtatgctactgcaggttctgcagatattcgcaatattcagccttttctttataaatttcatgatgggcaatttgctttatgtcataatggtaatttgacaaatgctatttcctcaaggaaagaattagaaaagcaaggtgcaattttcaatgcctcctcagatactgaaattttaatgcatttgattcgtcgaagccataacccaagttttatggggaaggtaaaagaagctttaagcactgtaaagggaggtttcgcctatctactgatgacagaagataaattaattgctgctcttgaccctaatgcctttcgtcctttgtcaattggacaaatgcaaaatggtgcctgggttatttccagtgagacctgtgcttttgaggtggtaggcgcaaaatgggttagagatgttgaacctggtgaagttattcttatagacgatagtggtattcaatgtgatcgttatactgatgaaacgcaactggcaatttgttcgatggaatatgtctattttgcaaggccggattcaactatacatggtgttaatgttcatacggctcgaaaaaatatgggaaagcgtcttgcacaagaatttaaacaggatgctgatattgtaattggtgtcccaaattcgtccttatcggctgctatgggctttgctgaagaatccggattaccaaatgagatgggccttgtaaaaaatcagtatacgcagcgaacctttattcaaccgacacaagaattaagggaacaaggtgttcgaatgaaattatcagcggtatctggtgttgtcaaaggaaagcgcgttgttatgattgatgactcaattgtaagaggaacgacttctagaaggattgtaggattattaagagaagcaggagctactgaagtacatgttgctatagctagtccagaattaaagtatccttgtttttatggaattgatattcaaacaagacgagaattaatttcagcaaatcacgctgttgacgaagtgtgtgatattattggcgcagatagtctaacttatctatcaatcgatgggttaattaaatcaattggactcgaaacaaaagcaccaaatggtggtttatgcgtagcttactttgatggacattatccaacaccgctttatgattatgaagaagaatacctcagaagtttagaagaaaaaacaagtttttatattcaaaaagtgaaataa

SEQ ID NO: 132195 - protein, 484 aa, Streptococcus agalactiae 2603V/R
MTYEVKSLNEECGVFGIWGYPQAAQVTYFGLHSLQHRGQEGAGIISNDNGKLYGYRNVGLLSEVFKNQSELDNLTGNAAIGHVRYATAGSADIRNIQPFLYKFHDGQFALCHNGNLTNAISSRKELEKQGAIFNASSDTEILMHLIRRSHNPSFMGKVKEALSTVKGGFAYLLMTEDKLIAALDPNAFRPLSIGQMQNGAWVISSETCAFEVVGAKWVRDVEPGEVILIDDSGIQCDRYTDETQLAICSMEYVYFARPDSTIHGVNVHTARKNMGKRLAQEFKQDADIVIGVPNSSLSAAMGFAEESGLPNEMGLVKNQYTQRTFIQPTQELREQGVRMKLSAVSGVVKGKRVVMIDDSIVRGTTSRRIVGLLREAGATEVHVAIASPELKYPCFYGIDIQTRRELISANHAVDEVCDIIGADSLTYLSIDGLIKSIGLETKAPNGGLCVAYFDGHYPTPLYDYEEEYLRSLEEKTSFYIQKVK

SEQ ID NO: 132196 - DNA, 1407 bp, Oceanobacillus iheyensis HTE831
  CDS (1)..(1407): transl_table=11
atgcttgctgaaatcaaaggcataaatgaagaatgtggtgtttttggcatctggggtcacgaaaaagcagctgaattaacttattatggcttacattccatgcaacatcgaggacaagaaggtgctggggttgttgttaatacgggtagcgaactaaaaggacataaaggtttgggtcttgtaaatgatgtgttcaaacgagttaaatttgatgacttggaaggaagtgtagcagtagggcacgtccggtatgcgacacaaggtgggagaggcattgaaaatgtccaacctttattatttcagtcacaaactggcggaatggcgctagcacataatggtaatctgatgaacgcacatgaactgcgtggcgaattagaaggagaaggaagcatattacaaacctcttcggatacggaagtcttagctcatttaattaaacgtagtggagaagtaacagaggactctatagctcgtgcactgaatcgtgtagtcggtgcatacgcatatatcatactgcaagaagataaaatgtttgcagcacttgatccttcaggtattcgtccactttctattggtagattgggagatgcttatgtgatagcttccgagacgtgtgcttttgaccaaattggtgcaacatttgaacgagaagtgcttccaggggaattgatcacaattagtgatgaagggatgacctctactcgatttgcaccaagagacaagcgacgaatgtgtgcaatggaatatgtctacctttctagaccagatagtgatgtgaactatgtgaatgtccatgcgtcgagaaaacaaatggggaaagagttagcgaaagaatcatccgttgatgcggatatcgttgtcggtgtacctgattctagtatttctgctgcaatcggctatgcggaagaaagtggactcccttatgaaatgggcatcataaaaaatcgttatgtcggacgtacctttatccaaccatctcaagaactcagagaattaggggtgaagatgaagctttcacctgttcgaagcattattgaaggaaaacgagttgttatgattgatgattcaattgtacgtgggacaacaagccgacgcattgttcagatgttacgagaagcgggtgcaaaagagattcatgttcggatagcttctccagcgattcaaaatccatgttattacggaattgatatgtctactaaaaaagaattaattggagccaattattctgttgatgaaatcaatggaattataggctcagatacgctagcttatttatcagaaaaagggttggaaaaagcaatcgtaaaagacaaaacgattaatcaaggtgtttgtatggcttgtatgactggcaaatacccagtaaaacaagacggtgaattggaaattcattatacaagttgttaa

SEQ ID NO: 132197 - protein, 468 aa, Oceanobacillus iheyensis HTE831
MLAEIKGINEECGVFGIWGHEKAAELTYYGLHSMQHRGQEGAGVVVNTGSELKGHKGLGLVNDVFKRVKFDDLEGSVAVGHVRYATQGGRGIENVQPLLFQSQTGGMALAHNGNLMNAHELRGELEGEGSILQTSSDTEVLAHLIKRSGEVTEDSIARALNRVVGAYAYIILQEDKMFAALDPSGIRPLSIGRLGDAYVIASETCAFDQIGATFEREVLPGELITISDEGMTSTRFAPRDKRRMCAMEYVYLSRPDSDVNYVNVHASRKQMGKELAKESSVDADIVVGVPDSSISAAIGYAEESGLPYEMGIIKNRYVGRTFIQPSQELRELGVKMKLSPVRSIIEGKRVVMIDDSIVRGTTSRRIVQMLREAGAKEIHVRIASPAIQNPCYYGIDMSTKKELIGANYSVDEINGIIGSDTLAYLSEKGLEKAIVKDKTINQGVCMACMTGKYPVKQDGELEIHYTSC

SEQ ID NO: 132198 - DNA, 1512 bp, Bifidobacterium longum NCC2705
  CDS (1)..(1512): transl_table=11
ttgtcggctgaactcgaagacattcacgaggaatgtggcatcttcggcgtatggggccaccccgacgcctcacgactcacctattttggcctgcacgcgctgcagcatcgcggtcaggaaggtgccggcatcgtctccaacgataacggtcatctcatcggtcatcgcggactcggcctgctcacccaggtgttcggcgatgagcgcgaaatcgaacgactgaagggcaattgcgccatcggccacgtgcgttacgcaacggccggctcgggcaccacggacaacatccagccgttcatcttccgcttccatgacggcgacgtggctctgtgccataacggcaacctgacgaactgcccgtcactgcgccgcaagcttgaagacgaaggcgccatcttccattcgaactccgacaccgaagtgctgatgcacttgattcgccgttcgatgcagcgcacctttatggacaagctcaaggaagcgctcaacacggtgcatggcggtttcgcctacctgctgatgaccgaagacgccatgatcggcgcactcgacccgaacggcttccgcccgctctccctcggcaagatgaagaacggcgcctacgtgctcgcctccgaaacctgcgcactggatgtcgtcggcgccgagctggtgcgtaacattcgcccgggtgaaatcgtggtggtcaacgatcacggctacaagatcgtgcagtacaccaacaacacgcagctggccatctgctcgatggagtacatctacttcgcccgcccggattccgatatctatggcgtcaacgtgcactccgcccgcaagcgcatgggcgcacgtctcgccgccgaatccccggtggaggccgatatggttatcggcgtgccgaactcctcattgtccgccgcatccggctatgcggaagcagcaggcctgcccaacgaaatgggtctaatcaaaaaccagtatgtggcccgcaccttcattcagcccacgcaagaactgcgcgagcagggtgtgcgtatgaagctctctgctgtgcgcagcgtggttaaaggcaagcgcgttatcgttatcgatgattccatcgtgcgcggcaccacgtccaagcgcatcgtgcagctgctcaaggaagccggcgccgctgaagtgcatatgcgcatcagctccccgccgctgaagtacccctgcttctatggcatcgatatctccaccaccaaggaactcatcgcagccaagatgagcgtggaggaaatccgtgaatacatcggcgcggattccttggcctacctttcgctcgacggtctggtcgaatccatcggactgaacgccgacgccccatacggtggcctgtgcgtcgcctacttcaacggcgactaccccactgcgctcgacgactacgaggccgacttcctgaagtccctcacgcccgaggaccgtgtgcgtctgcctgaattcgcgctgtacaagagcaagtacatcggcaacgagtacaacaccgtgcagccggacgccgaatag

SEQ ID NO: 132199 - protein, 503 aa, Bifidobacterium longum NCC2705
MSAELEDIHEECGIFGVWGHPDASRLTYFGLHALQHRGQEGAGIVSNDNGHLIGHRGLGLLTQVFGDEREIERLKGNCAIGHVRYATAGSGTTDNIQPFIFRFHDGDVALCHNGNLTNCPSLRRKLEDEGAIFHSNSDTEVLMHLIRRSMQRTFMDKLKEALNTVHGGFAYLLMTEDAMIGALDPNGFRPLSLGKMKNGAYVLASETCALDVVGAELVRNIRPGEIVVVNDHGYKIVQYTNNTQLAICSMEYIYFARPDSDIYGVNVHSARKRMGARLAAESPVEADMVIGVPNSSLSAASGYAEAAGLPNEMGLIKNQYVARTFIQPTQELREQGVRMKLSAVRSVVKGKRVIVIDDSIVRGTTSKRIVQLLKEAGAAEVHMRISSPPLKYPCFYGIDISTTKELIAAKMSVEEIREYIGADSLAYLSLDGLVESIGLNADAPYGGLCVAYFNGDYPTALDDYEADFLKSLTPEDRVRLPEFALYKSKYIGNEYNTVQPDAE

SEQ ID NO: 132200 - DNA, 1458 bp, Brucella suis 1330
  CDS (1)..(1458): transl_table=11
atgctggatgatgacaccctgcatgaagaatgtggtgtattcggcattctgggccatgaggatgcggctgcgctgaccgcgctcggcctgcatgcgctccagcatcgcggtcaggaagccgccggcattgtttcctatcataatcgccgtttccattccgaacgccatatgggcctcgtcggcgaccatttcaccgatgcggcaacactgaaccgcctgccgggcaaccgcgccatcggccatgtgcgttattccacaaccggcgagacgatcctgcgcaatgtacagccgctgtttgcggaactggaagtcggcggcatcgccattgcccataacggcaatttcaccaatggcattacgctgcgcaaacagttgattgcttccggcgcgatcttccaggcaacgtcggatacggaagtcgtgctgcacatgattgcccgttcgcggcactcctcctcaaccgaccgtttcgtggaagcgatccgccaggttgaaggcggctatgccatgctggcgcttacccgcaccaagctgatcgccgcgcgcgatcccatcggcattcgcccgctcgtcatgggcgagctggacggcaagccgatcttctgctcggaaacctgcgctctcgatattatcggcgcgaaatatattcgcgacgtcgagaatggcgaagtggtagtctgcgaaatccagaaggatggctccatcaccacccgatccatcaagccggaaaatccgcagccggagcggctgtgcctttttgaatatgtttatttcgcacggccggattcggtagtgggtggccgcagcgtctatgtggcgcgcaagaacatgggcatgaaccttgccgccgaggcgggcgtggatgccgatgtggtcgtgcccgtaccggatggcggtacgccggcagcgctgggctttgcgcaggcaagcggtattccgtttgaatatggcatcatccgcaaccattatgtgggccgcaccttcattgagcctacacagcagatccgcgcgcttggcgtgaagctgaaacattcagccaatcgcgctatgattgaaggcaagcgggtcgttctggtggatgattccatcgtgcgcggcaccacctcggtcaagatcgttcagatgatccgcgacgcaggcgcaaccgaagtccatatgcgcgtggcaagcccgatgatcttccacccggatttttacggtatcgacaccccccatgccgataagctgctggccaaccagcacgaaagcctcgaatccatgtgccgctacatcggcgccgattcgctggccttcctttccatcgacgggctctacaaggccgttggcggaaagccgcgtgatccaaaggcgccgaccttcaccgatcactatttcacgggcgagtatccgacccgccttctggatcaggaaggcgaaagcaacgtccacaccttgtcgctgctcgccagcaacggctga

SEQ ID NO: 132201 - protein, 485 aa, Brucella suis 1330
MLDDDTLHEECGVFGILGHEDAAALTALGLHALQHRGQEAAGIVSYHNRRFHSERHMGLVGDHFTDAATLNRLPGNRAIGHVRYSTTGETILRNVQPLFAELEVGGIAIAHNGNFTNGITLRKQLIASGAIFQATSDTEVVLHMIARSRHSSSTDRFVEAIRQVEGGYAMLALTRTKLIAARDPIGIRPLVMGELDGKPIFCSETCALDIIGAKYIRDVENGEVVVCEIQKDGSITTRSIKPENPQPERLCLFEYVYFARPDSVVGGRSVYVARKNMGMNLAAEAGVDADVVVPVPDGGTPAALGFAQASGIPFEYGIIRNHYVGRTFIEPTQQIRALGVKLKHSANRAMIEGKRVVLVDDSIVRGTTSVKIVQMIRDAGATEVHMRVASPMIFHPDFYGIDTPHADKLLANQHESLESMCRYIGADSLAFLSIDGLYKAVGGKPRDPKAPTFTDHYFTGEYPTRLLDQEGESNVHTLSLLASNG

SEQ ID NO: 132202 - DNA, 1473 bp, Leptospira interrogans serovar Lai str. 56601
  CDS (1)..(1473): transl_table=11
atgagtcgaattcccgataaatccagaataagaagacaagcccaggatgacaaaccaaaagaggaatgtgcgatttttggtatatttaattcatcggaggcttctaatttcacctatttaggtctttactcgatgcaacatcgggggcaggaatcgagcggaatcgtttcttcggacggggaacacttatatcgttatgctggaatgggcttggtggctcatatctttacggaaaccaaattaaaggaactgcaaggaaatgcggctatcggccacaatcgatattctacaactggggcttcttttttaagaaatgctcagcctcttcgagtagaatcccacttaggagccgtttctttggctcataatggaaatttggttaattcttgggaacttagaagccaactcgaaaaagaaggaagtatctttcagactacgattgattccgaagtaattgttcatttaatggctcgttctggagaaacggactttctttctgctctttcttccgctcttaaaaaagtaagaggggcatattcacttgtaattcttacaaaaacccaattgattgcagtcagagatccaaatgggtttcgtcctttagtgatgggtcgtcgagaagacggatcgatcgtatttgcttcggaaacctgtgcgtttgatattacggatacgaaatatgaaagagatgtagaaccgggcgagatgatcgtagttgataagaatggaatgaattcttattatccgtttccaaaagcttccccgagtctttgtatttttgaatatatctatttcgcaagacccgattctagtatctttggagagtcggtttataaagttcgaaagaatttaggaagatttttagctagagaattacccgttccagcggatgtagtcattccagttccggactctgccaacatagctgcgttaggttatgcagaagaatctggaatttcttatcaatctggtttgatccgttctcattacatcggtagaacttttatcgagccggatcagaaaattcgggattttggagctaagattaaatacaatgtagttcgaaacgtagtcgaaggaaaaagggtgatcgtagttgacgattcgattatgagaggaacgacgagtcgaaaaatcatcaaaatgattcgaaatgctggcgctaaagaaattcatcttagagtttctgcacctcctactatatcaccttgttattatggaatcgatattcctactcataacgaattgatcgcagcgactcacacgatcgaagaaattcgaaagtatttaagagtggatagtatcgcttatctttccgtcgagtctatgaaccgtgccgtaatggatcataaaggtggtgggttttgtaacgcgtgttttacggctcaatacccagtggagtttcagagcgagttaggaaaccagaaaagtctttttaaagaatatcaagtggaagaaagggtcgtttattga

SEQ ID NO: 132203 - protein, 490 aa, Leptospira interrogans serovar Lai str. 56601
MSRIPDKSRIRRQAQDDKPKEECAIFGIFNSSEASNFTYLGLYSMQHRGQESSGIVSSDGEHLYRYAGMGLVAHIFTETKLKELQGNAAIGHNRYSTTGASFLRNAQPLRVESHLGAVSLAHNGNLVNSWELRSQLEKEGSIFQTTIDSEVIVHLMARSGETDFLSALSSALKKVRGAYSLVILTKTQLIAVRDPNGFRPLVMGRREDGSIVFASETCAFDITDTKYERDVEPGEMIVVDKNGMNSYYPFPKASPSLCIFEYIYFARPDSSIFGESVYKVRKNLGRFLARELPVPADVVIPVPDSANIAALGYAEESGISYQSGLIRSHYIGRTFIEPDQKIRDFGAKIKYNVVRNVVEGKRVIVVDDSIMRGTTSRKIIKMIRNAGAKEIHLRVSAPPTISPCYYGIDIPTHNELIAATHTIEEIRKYLRVDSIAYLSVESMNRAVMDHKGGGFCNACFTAQYPVEFQSELGNQKSLFKEYQVEERVVY

SEQ ID NO: 132204 - DNA, 1515 bp, Shewanella oneidensis MR-1
  CDS (1)..(1515): transl_table=11
atgtgtggtatcgtcggaatagttggccaatcatcggttaatcagaccatttatgatgcactgactgtgcttcaacacagaggtcaggatgcggcaggtattgtcaccgttgatcgtggtgctttcagactacgtaaagccaatggtctagtcaaagacgtatttgaagtcaaacacatgcagcgcctacagggcaatgcgggtattggccatgtacgttatcctactgctggcagttccagtgcgtcagaagcgcagcctttctatgttaactcgccatttgggatttcattggcccataacggtaacttaaccaacacacttgaattggccgaaggcctgatcaaaaaacgtcgccatgtgaacaccacatctgactcagaggtgttgttaaacctgcttgccgatgaactgcaaaaaaccacgagcctcgatctgaccgctgacgaagtgtttgacactatcgctaaggttcatgagcaggcccgtggcgcctatgccgtagtggccatgatcattggtcaaggtttagtcgcatttcgcgatcctttcggcattcgccctttggtactaggtaaacatgaaacgccaactggcactgaatacatggtcgcctctgagagcgtggccctcgatgccgtaggctttgaagtcatgcgcgatgtggcaccaggtgaggcgatttatatttcccttgatggcaatctttacacccgccaatgtgcaaaagagccaagctattcaccttgtatcttcgaatttgtatatttcgctcgccctgattccaccatcgataatgtctctgtttacgctagccgcgtgaatatgggggctaagcttggtgagaagattaagaaagaatggtacgaccatgatatcgatgtggtgatccctattccggaaacctcatgcgatatcgcgctggaaatcgcacgctgcatggatttgccttatcgccaaggttttgtgaagaaccgttatatcggccgtacctttattatgcctggccaacaggaacgtaagaaatcagtacgccgtaaactcaatgccatcaataccgagtttaaaggtaaaaatgtcctgttagtcgatgactctatcgtgcgcggcaccacctctgagcaaattattgagatggcccgtgaagcaggggcgaagaaagtatactttgcctccgcggcgccggaaatccgcttcccgaacgtgtatggtatcgatatgccaacgtcgaacgagcttatcgcccacggtcgtgatgccgatgaaattgctaaactgattggtgccgatggcattatcttccaaaatctgccggatctgattgaagcggtaagaatggaaaatcctgagatcaaacgttttgaaacctcagtgtttgacggacattacatcaccaacgatgttgatcaatcctatcttgatcatttaacgcagcttcgtaacgatgatgccaaagctgaccgtaataaggatattggtactaaccttgagttgcacaacgtctgccatccctag

SEQ ID NO: 132205 - protein, 504 aa, Shewanella oneidensis MR-1
MCGIVGIVGQSSVNQTIYDALTVLQHRGQDAAGIVTVDRGAFRLRKANGLVKDVFEVKHMQRLQGNAGIGHVRYPTAGSSSASEAQPFYVNSPFGISLAHNGNLTNTLELAEGLIKKRRHVNTTSDSEVLLNLLADELQKTTSLDLTADEVFDTIAKVHEQARGAYAVVAMIIGQGLVAFRDPFGIRPLVLGKHETPTGTEYMVASESVALDAVGFEVMRDVAPGEAIYISLDGNLYTRQCAKEPSYSPCIFEFVYFARPDSTIDNVSVYASRVNMGAKLGEKIKKEWYDHDIDVVIPIPETSCDIALEIARCMDLPYRQGFVKNRYIGRTFIMPGQQERKKSVRRKLNAINTEFKGKNVLLVDDSIVRGTTSEQIIEMAREAGAKKVYFASAAPEIRFPNVYGIDMPTSNELIAHGRDADEIAKLIGADGIIFQNLPDLIEAVRMENPEIKRFETSVFDGHYITNDVDQSYLDHLTQLRNDDAKADRNKDIGTNLELHNVCHP

SEQ ID NO: 132206 - DNA, 1440 bp, Streptococcus mutans UA159
  CDS (1)..(1440): transl_table=11
atgacatacgaagtaaaatctctcaacgaagaatgtggggtcttcggtatctggggacatcctcaagcagctcaagtcacttattttggactgcatagtctgcaacaccgtggtcaagaaggtgctggcattctgacaaatgatgctggcaaattgatacgacatcgtgatacaggattaatttcagaagttttcaaaaatccagctaatttggaaaaattaacaggtcaggctgctattgggcatgtccgttatgcaacggctggagaagcctccattgataatatccagcctttccattttaagttttacgatatggaatttggtctggcacataacggtaacctgactaatacgaaaaccctgaagaaagaattagaacataacggcgctatcttctcttcttcatctgatacggaaattctggctcatcttattcgccgcagccataatccaagctttatgggtaaggttaaggaagcgctcaatacggtcaaaggtggttttgcctatcttctgatgatggaagataagctgattgcagctcttgatccaaacggttttcgtccgctttctattggtaaaatggcaaatggtgccatcgttgtttccagcgaaacctgtgcctttgaagtggtgggtgccgagtggattcgtgatgtcaagccgggtgaagtggttatcattgataatagtggtatccagtacgacacttacacgacagatacgcagttggctatttgttcaatggaatacatctactttgcccgtcctgactcaaatattcacggggtcaatgtccacactgctcgtaaacgtatgggagcacagttggcgcgtgagttcaaacatgaggcagacattgtggtcggtgtacctaattcctcactcagcgcagctatgggcttcgccgaagaatcaggactgccaaatgaaatgggtcttatcaaaaatcaatacacccaacgaacctttatccagccaacgcaggaactgcgtgagcaaggggttcgcatgaaactttctgccgtatctggagtggttaaaggcaaacgtgtcgtcatgattgatgactccatcgtgcgtgggacaacctcacgtcgtatcgttcagctcttgaaagaagctggtgctacagaggttcacgtggctatcggtagcccagcgctggcctatccatgtttctatgggattgatattcaaacacggcgtgaattgattgcggctaatcattctgttgaagaaacacgccagattatcggtgcggatagcctaacttacttgtctattgacggtttgattgactctatcggacttgaaacagatgccccaaacggcggtctctgtgttgcttactttgatggcaagtacccaacaccgctttacgattacgaagaagagtatcgtagaagcttggatgagaaggttagcttttattga

SEQ ID NO: 132207 - protein, 479 aa, Streptococcus mutans UA159
MTYEVKSLNEECGVFGIWGHPQAAQVTYFGLHSLQHRGQEGAGILTNDAGKLIRHRDTGLISEVFKNPANLEKLTGQAAIGHVRYATAGEASIDNIQPFHFKFYDMEFGLAHNGNLTNTKTLKKELEHNGAIFSSSSDTEILAHLIRRSHNPSFMGKVKEALNTVKGGFAYLLMMEDKLIAALDPNGFRPLSIGKMANGAIVVSSETCAFEVVGAEWIRDVKPGEVVIIDNSGIQYDTYTTDTQLAICSMEYIYFARPDSNIHGVNVHTARKRMGAQLAREFKHEADIVVGVPNSSLSAAMGFAEESGLPNEMGLIKNQYTQRTFIQPTQELREQGVRMKLSAVSGVVKGKRVVMIDDSIVRGTTSRRIVQLLKEAGATEVHVAIGSPALAYPCFYGIDIQTRRELIAANHSVEETRQIIGADSLTYLSIDGLIDSIGLETDAPNGGLCVAYFDGKYPTPLYDYEEEYRRSLDEKVSFY

SEQ ID NO: 132208 - DNA, 1455 bp, Streptococcus agalactiae NEM316
  CDS (1)..(1455): transl_table=11
atgacatacgaagtaaaatctctaaatgaagaatgtggagtctttggtatctgggggcatcctcaggcagctcaagtcacttactttgggcttcatagccttcaacatcgcggtcaagaaggtgctggtattgtttcgaatgataatgggaaactctatggttatcgaaatgttgggctcctttctgaagtttttaagaatcaatctgaattagataatttaactgggaatgcggctattggacatgttcggtatgctactgcaggttctgcagatattcgcaatattcagccttttctttataaatttcatgacgggcaatttgctttatgccataatggtaatttgacaaatgctatttctttaaggaaagaattagaaaagcaaggtgcaattttcaatgcctcctcagatactgaaattttgatgcacttgattcgtcgaagccataacccaagttttatggggaaggtaaaagaagctttaagcactgtaaagggaggcttcgcctatctactgatgacagaagataaattaattgctgctcttgaccctaatgcctttcgtcctttgtcaattggacaaatgcaaaatggtgcttgggttatttccagtgagacctgtgcttttgaggtggtaggcgcaaaatgggttagagatgttgaacctggcgaagttatccttatagacgatagtggtattcaatgtgatcgttatactgatgaaacgcaactggcaatttgttcgatggaatatgtctattttgcaaggccggattcaactatacatggtgttaatgttcatacggctcgaaaaaatatgggaaagcgtcttgcacaagaatttaaacaggatgctgatattgtaattggtgtcccaaattcgtccttatcggctgctatgggctttgctgaagaatccggattaccaaatgagatgggtcttgtaaaaaatcagtatacgcagcgaacctttattcaaccgacacaagaattaagggaacaaggtgttcgaatgaaactatcagcggtatctggtgttgtcaaaggaaagcgcgttgttatgattgatgactcaattgtaagaggaacgacttctagaaggattgtcggattattaagagaagcaggagctagtgaagtacatgttgctatagctagtccagaattaaagtatccttgtttttatggtattgatattcaaacaagacgagaattaatttcagcaaatcacgctgctgacgaagtgtgtgatattattggcgcagatagtctgacttatctctcactagatgggttgattgaatcaattggactcgaaacaaaagcaccaaatggtggtttatgcgtagcttactttgatggacattatccaacgccgctttatgattatgaagaagaatacctcagaagtttagaagaaaaaacaagtttttatattcaaaaagtgaaataa

SEQ ID NO: 132209 - protein, 484 aa, Streptococcus agalactiae NEM316
MTYEVKSLNEECGVFGIWGHPQAAQVTYFGLHSLQHRGQEGAGIVSNDNGKLYGYRNVGLLSEVFKNQSELDNLTGNAAIGHVRYATAGSADIRNIQPFLYKFHDGQFALCHNGNLTNAISLRKELEKQGAIFNASSDTEILMHLIRRSHNPSFMGKVKEALSTVKGGFAYLLMTEDKLIAALDPNAFRPLSIGQMQNGAWVISSETCAFEVVGAKWVRDVEPGEVILIDDSGIQCDRYTDETQLAICSMEYVYFARPDSTIHGVNVHTARKNMGKRLAQEFKQDADIVIGVPNSSLSAAMGFAEESGLPNEMGLVKNQYTQRTFIQPTQELREQGVRMKLSAVSGVVKGKRVVMIDDSIVRGTTSRRIVGLLREAGASEVHVAIASPELKYPCFYGIDIQTRRELISANHAADEVCDIIGADSLTYLSLDGLIESIGLETKAPNGGLCVAYFDGHYPTPLYDYEEEYLRSLEEKTSFYIQKVK

SEQ ID NO: 132210 - DNA, 1533 bp, Corynebacterium efficiens YS-314
  CDS (1)..(1533): transl_table=11
atgcatgtggcacaacttgatcagcacacatcccccggttctgtcgtgaactacccctacgatgatcacaacgaacagtccccgcaggaggaatgcggagtgttcggtgtctgggctccaggtgaagaggtggccaagctcacctacttcggtctgtttgccctgcagcaccgtgggcaggaggccgccggcattgcggtaggggacggcgaacagatcctggtgttcaaagacctcggtctggtatcccaggtcttcgacgaacccatcctggagtccctgcagggggacatcgccatcgggcacacccggtacaccaccgcgggcggcaactcctgggagaacgcccagccgatgttccgcatggccccggacggcaccgatgtggcgctgggtcacaacggcaacctcatcaaccatgtgcagctgcgcgagaaggcgaccgaactcggcctcgtcgacccgcagcagaagccttccgacaccgatgtgctgaccgcgctgctggccaacggcatcggtgacggtgatgatctcttcgaatccgcccggaagctcctccccgaggtcaggggggcctactgcctgaccttcaccgatggccacaccctctacgccgcccgtgacccctacggcatccgaccgctgtccatcggacgtctcgcccgtggctgggtggttgcctccgagacctccgccctggatatcgtcggtgcttcgctggtgcgtgaggtggagcccggtgagctcatcgccatcgatgaatccgggctgcgttccacccgttttgcagagaccaaccgcaaggcctgcgtcttcgaatatgtctacctagcccgccccgactcggtgatcaagggacgcaacgtcaatgaggtccgtctggagatcgggcgcaccctggcacgggaagccccggccgagggtgatctggtcatcccgacacctgattccggcacccctgcggcggtggggttcgcccaggcctccggcatccccttcgggcagggcatggtgaagaacgcctatgtgggacgcaccttcatccagccgtccgacaccctgcgtcagttgggcatccgcctgaagctgaacccactgcgcgaggtcatcgcaggaaaacgcctcgtggtggtcgatgattccattgtgcgtggcaacacccagcgcgcggtgatccgcatgctgcgtgaggccggggccgccgaggtccatgtgcgcatcgcctccccgccggtgaaatggccgtgtttctacggcattgacttcgccacccccggtgagctcatcgccaatgcggtcaccagtgacaacgaggaggagatggtggaggctgtccgctccgccatcggcgctgattcactcggttatgtctccatcgacgggatggtggcatccaccaccaagcccgtggaggaactgtgcctggcatgtttcaacgggcactatcccatgggattgcccgaggccaaccccaatgccgagctggtgttcaagatgcaggccggcaggcaggataagatcgggacctag

SEQ ID NO: 132211 - protein, 510 aa, Corynebacterium efficiens YS-314
MHVAQLDQHTSPGSVVNYPYDDHNEQSPQEECGVFGVWAPGEEVAKLTYFGLFALQHRGQEAAGIAVGDGEQILVFKDLGLVSQVFDEPILESLQGDIAIGHTRYTTAGGNSWENAQPMFRMAPDGTDVALGHNGNLINHVQLREKATELGLVDPQQKPSDTDVLTALLANGIGDGDDLFESARKLLPEVRGAYCLTFTDGHTLYAARDPYGIRPLSIGRLARGWVVASETSALDIVGASLVREVEPGELIAIDESGLRSTRFAETNRKACVFEYVYLARPDSVIKGRNVNEVRLEIGRTLAREAPAEGDLVIPTPDSGTPAAVGFAQASGIPFGQGMVKNAYVGRTFIQPSDTLRQLGIRLKLNPLREVIAGKRLVVVDDSIVRGNTQRAVIRMLREAGAAEVHVRIASPPVKWPCFYGIDFATPGELIANAVTSDNEEEMVEAVRSAIGADSLGYVSIDGMVASTTKPVEELCLACFNGHYPMGLPEANPNAELVFKMQAGRQDKIGT

SEQ ID NO: 132212 - DNA, 1506 bp, Pseudomonas putida KT2440
  CDS (1)..(1506): transl_table=11
atgtgtggcatcgtcggtatcgtcggtaagtcgaacgtcaatcaggcgctgtatgacgcgcttacggtcctccagcaccgcggccaggacgctgccggtatcgtgaccagccatgacggccggttgttcctgcgcaaggataatggcctggtgcgcgacgtgttccagcagcgccacatgcagcgcctggttggcaacatcggtatcggccacgtgcgctacccgactgcgggcagctcgacctcggccgaggcccagccgttctacgtcaactcgccttacggcatcaccctggctcacaacggcaacctgaccaatgtcgagcagttggccaaggagatctacgagtccgacctgcgccacgtcaacaccaactccgactcggaagtgctgctgaacgtgttcgcccatgagctggcagtgcgcggcaagctgcagccgaccgaagaagacgtgttcgctgcggtctcccatgtgcacagccgctgcgttggcggttacgccgtggtggccatgatcaccggctacggcatcgtcggtttccgcgacccccatggcattcgcccggtggtgttcggtcagcgtcacaccgacgaaggtgtggaatacatgatcgcctcggaaagcgtcgccctggacgtgctcggcttcaccctgatccgcgacctggcgccgggcgaagcggtgtacatcaccgaagaaggccagttgttcaccaagcagtgcgccgaatcgccaaagttgcagccgtgcatcttcgagcacgtctacctggcgcgtccggactcgatcatcgatggggtctcggtgtacaaggcgcgtctgcgcatgggtgaaaagctggccgacaagatcatgcgcgagcgccccgatcatgatatcgacgtggtcatcccgatcccggataccagtcgtactgccgcgctggaactggccaaccggttgggcgtcaagttccgcgaaggtttcgtcaagaaccgttacatcggccgtaccttcatcatgcccggccaggccgcgcgcaagaagtcggtgcgtcagaagctcaacgccatcgagctggagttccgcggcaagaatgtgatgctggtggacgactcgatcgtgcgcggcaccacctgcaagcagatcatccagatggcccgcgaagccggcgccaagaatgtctacttctgctccgcagcgcctgcagtacgctaccccaacgtctacggcatcgacatgccgagtgttcacgaactgatcgcccacaaccgcaccaccgaacaggtgggtgagttgattggcgccgattggctggtctatcaggacctgccagacctgatcgactcggtcggcggcggcaagatcaagatcgagcagttcgattgtgcggtgttcaacggcgagtacgtcactggcgatatcgacgaagcctacctcgaccgcatcgagcaggcccgtaacgacttggccaaggtcaagaaccaggccgtcagcgcgatcatcgacctttacaacaactga

SEQ ID NO: 132213 - protein, 501 aa, Pseudomonas putida KT2440
MCGIVGIVGKSNVNQALYDALTVLQHRGQDAAGIVTSHDGRLFLRKDNGLVRDVFQQRHMQRLVGNIGIGHVRYPTAGSSTSAEAQPFYVNSPYGITLAHNGNLTNVEQLAKEIYESDLRHVNTNSDSEVLLNVFAHELAVRGKLQPTEEDVFAAVSHVHSRCVGGYAVVAMITGYGIVGFRDPHGIRPVVFGQRHTDEGVEYMIASESVALDVLGFTLIRDLAPGEAVYITEEGQLFTKQCAESPKLQPCIFEHVYLARPDSIIDGVSVYKARLRMGEKLADKIMRERPDHDIDVVIPIPDTSRTAALELANRLGVKFREGFVKNRYIGRTFIMPGQAARKKSVRQKLNAIELEFRGKNVMLVDDSIVRGTTCKQIIQMAREAGAKNVYFCSAAPAVRYPNVYGIDMPSVHELIAHNRTTEQVGELIGADWLVYQDLPDLIDSVGGGKIKIEQFDCAVFNGEYVTGDIDEAYLDRIEQARNDLAKVKNQAVSAIIDLYNN

SEQ ID NO: 132214 - DNA, 1518 bp, Escherichia coli CFT073
  CDS (1)..(1518): transl_table=11
atgtgcggtattgtcggtatcgccggtgttatgccggttaaccagtcgatttatgatgccttaacggtgcttcagcatcgcggtcaggatgccgccggcatcatcaccatagatgccaataactgcttccgtttgcgtaaagcgaacgggctggtgagcgatgtatttgaagctcgccatatgcagcgtttgcagggcaatatgggcattggtcatgtgcgttaccccacggctggcagctccagcgcctctgaagcgcagccgttttacgttaactctccgtatggcattacgcttgcccacaacggcaatctgaccaacgctcacgagttgcgtaaaaaactgtttgaagaaaaacgccgccacatcaacaccacttccgactcggaaattctgctcaatattttcgcaagcgaactggacaacttccgccattacccgctggaagccgacaacattttcgccgccatcgctgctacaaaccgcttaatccgcggcgcgtatgcctgtgtggcgatgatcatcggccacggtatggttgctttccgcgatcctaacgggattcgtccgctggtactgggaaaacgtgatattgacgagaaccgcacagaatatatggtcgcttccgaaagcgttgcgctcgatacgctgggctttgatttcctgcgtgacgtcgcgccgggcgaagcgatttacatcactgaagaaggacagttgtttacccgtcaatgtgctgacaatccggtcagcaatccgtgcctgtttgagtatgtatactttgcccgcccggactcgttcatcgacaaaatttccgtttacagcgcgcgcgtgaatatgggcaccaaactgggcgaaaaaattgcccgcgaatgggaagatctggatatcgacgtggtgatccctattccggaaacctcgtgtgatatcgcgctggaaattgcgcgtattctgggcaaaccgtaccgccagggcttcgttaaaaaccgttatgttggccgcaccttcatcatgccgggtcagcagctgcgtcgtaagtccgtgcgccgtaaactgaacgccaaccgcgccgagttccgcgataaaaacgtcctgctggtcgacgactctatcgtccgtggcaccacttctgagcagattatcgagatggcacgcgaagccggagcgaagaaagtgtacctcgcttctgcggcaccggaaattcgcttcccgaacgtttacggtatcgatatgccgagcgccacggaactgatcgctcacggtcgcgaagtagatgaaattcgccagatcatcggtgctgacgggttgattttccaggatctgaacgatctgatcgaagccgttcgcgctgaaaacccggatatccagcagtttgaatgctcggtgttcaacggcgtctacgtcaccaaagacgttgatcagggctacctcgatttccttgatactttacgtaatgacgacgccaaagcagtgcaacgtcagaacgaagtggaaaatctcgaaatgcataacgaaggatga

SEQ ID NO: 132215 - protein, 505 aa, Escherichia coli CFT073
MCGIVGIAGVMPVNQSIYDALTVLQHRGQDAAGIITIDANNCFRLRKANGLVSDVFEARHMQRLQGNMGIGHVRYPTAGSSSASEAQPFYVNSPYGITLAHNGNLTNAHELRKKLFEEKRRHINTTSDSEILLNIFASELDNFRHYPLEADNIFAAIAATNRLIRGAYACVAMIIGHGMVAFRDPNGIRPLVLGKRDIDENRTEYMVASESVALDTLGFDFLRDVAPGEAIYITEEGQLFTRQCADNPVSNPCLFEYVYFARPDSFIDKISVYSARVNMGTKLGEKIAREWEDLDIDVVIPIPETSCDIALEIARILGKPYRQGFVKNRYVGRTFIMPGQQLRRKSVRRKLNANRAEFRDKNVLLVDDSIVRGTTSEQIIEMAREAGAKKVYLASAAPEIRFPNVYGIDMPSATELIAHGREVDEIRQIIGADGLIFQDLNDLIEAVRAENPDIQQFECSVFNGVYVTKDVDQGYLDFLDTLRNDDAKAVQRQNEVENLEMHNEG

SEQ ID NO: 132216 - DNA, 1524 bp, Bradyrhizobium japonicum USDA 110
  CDS (1)..(1524): transl_table=11
atgcgacaccctgaccaggacgcccaacttgatctcgatccaaaagccggtttgagcccggccgcgctagagcttcaggacgatctggagggggatacgctccgcgaggaatgcggcgtattcggcatctacggccaccccgacgccgccgccatcaccgccctcggcctccacgcccttcagcaccgcggccaggaagccgccggcatcgtctcctatgacggcagccgctttcacagcgaacgccgcctcggcctcgtcggcgacactttctcccgccgcgaggtgatcgaccgcctgcccggcaacatggcggtcggccatgtccgctactccaccaccggcgcgaccatcctgcgcaacgtgcagccgctgttcgccgaactcaacgccggcggccttgcggtcgcccataacggcaacctcaccaacggcctgacgctgcgccgcgagctcgtgaggaacggcgcgatgatgcagtcgaccaccgacaccgaggtgatcctgcacctcgtcgcgcgctcccggcgcagccgcttcatcgagcgctatatcgacgcgctgcgcgagatcgagggcgcctatgcgctggtctcgctgaccaacaagaagctggtcggcgcgcgcgacccgcgcggcatccgccccctggtgctcggtgagctcgatggctgcccgatcctgacgtcggagacctgcgcgctcgacatcatcggcgcgcgcttcatccgcgacatcgagccgggcgaagtcatcgtgttcgacgagaacggccaggacatccacaagccgttcccgccgatggcgccgcgtccctgcatcttcgaatacatctatttctcccgtccggattccatcgtccacggccgctcggtctacgaggtgcgcaaggcctttggtgcgcagctcgcgcgcgagagccacgtgccgatcgacgtcgtcgtgccggtgccggattccggcgtgcccgccgctgtcggctacagccagcattccggcgtgccgttcgagctcggcatcatccgcaaccactatgtcggccgcaccttcatccagccgacgcaggcaatccgcgaatccggcgtgcgcatgaagcattcggccaaccgcgccgcgatcgaaggcaagcgcatcatcctgatcgacgactcgctggtgcgcggcaccacctcgaagaagatcgtgcgcatgatgcgcgatgcaggcgcgaaggaagtgcatttccgcctcgcctcgccgccgatcctctatcccgattattacggcatcgacctgccggaccgcggcggcctgctggccgcaacgcattcgctggaggaaatgcgggagatcattggcgccgactcgctcgccttcctgtcgatcgacggcatgtaccgcgccatgggcgagcccggccgcgacccggccaatccgaagttctcggatcactgcttcaccggggcgtatccgacccacctcaccgaccagacccagaccgagcagcagccccggcaattgtcgctgctggcggaggcgagctga

SEQ ID NO: 132217 - protein, 507 aa, Bradyrhizobium japonicum USDA 110
MRHPDQDAQLDLDPKAGLSPAALELQDDLEGDTLREECGVFGIYGHPDAAAITALGLHALQHRGQEAAGIVSYDGSRFHSERRLGLVGDTFSRREVIDRLPGNMAVGHVRYSTTGATILRNVQPLFAELNAGGLAVAHNGNLTNGLTLRRELVRNGAMMQSTTDTEVILHLVARSRRSRFIERYIDALREIEGAYALVSLTNKKLVGARDPRGIRPLVLGELDGCPILTSETCALDIIGARFIRDIEPGEVIVFDENGQDIHKPFPPMAPRPCIFEYIYFSRPDSIVHGRSVYEVRKAFGAQLARESHVPIDVVVPVPDSGVPAAVGYSQHSGVPFELGIIRNHYVGRTFIQPTQAIRESGVRMKHSANRAAIEGKRIILIDDSLVRGTTSKKIVRMMRDAGAKEVHFRLASPPILYPDYYGIDLPDRGGLLAATHSLEEMREIIGADSLAFLSIDGMYRAMGEPGRDPANPKFSDHCFTGAYPTHLTDQTQTEQQPRQLSLLAEAS

SEQ ID NO: 132218 - DNA, 1458 bp, Xylella fastidiosa Temecula1
  CDS (1)..(1458): transl_table=11
atgtgcggtatcctcggtatcgttggcaatcaaaacgttgctggccaactctatgacggtttgactgttttgcaacatcgtggacaagatgctgcaggcattgccacggccagtggcactcgcttgcgcgttcaaaaggccaatggtttggtacgagacgtattcgatgagcagcgtatggcggtccttgatgggtgtattgggattgctcattgccgttatccaactgctggttctgaggggatggatgaggcacaacctttttacgtcaactcaccgtacggcattgctctagcacataatggaaaccttatcaacacagaggcgctacaccaacaggtgttcgaagcggatcgacgtaacatcaacaccgactctgacagcgaagtattacttaacgtattcgcatatgagttagatgcgcagcgtatgctcactccagaagcggcaattcgtgctgtagcaggagtacatcgccgctgtaagggcggctacgccgtagtgagcatgatattagggctgggacttgttgcattccgcgatccacacggtatccgtccgttggtgctgggaaagcgtgtacataccgaaggtgatgaatatatggtcgcttccgaatcagctgcactcgatatcctagggtttatacgtatacgcgatgtacgtccaggtgaggctgtggtgattactgcacgtggcgaactgttttcagaggtctgtgctacacctaccaaccatactccatgcattttcgagtacgtttacttcgcacgtccggattcgatgatcgataatatttcagtacataaggcacgcatgcgtatgggtgtgaagttaggtgaaaagatcctgcgcttgcgcccgaatcacgatatcgacaccattattccgataccggatacctcgcgggatgcagcgctggaaatatctaacgtgctcggcgtaaagtatcgcgaaggtttcgttaaaaatcgctacgttggccgtacttttatcatgccgggacagggagagcgagttaagtcagtacgtcgtaaacttaacccaatccatctggagttccgaaaccgcgtggtgctgttgattgatgattcaattgttcgcggtaccaccagccgccagattgtccagatggtaagagatgctggtgcacgcaaggtgtacttagcaagtgctgcgccacctgtgcgttatccaaatgtgtatggcattgatatgccagctgcagatgaattaatcgcacatgatcggactgagcaggaaatacaatcccttcttggctgcgattggttgatttaccaagatttagaggatctagaaaacgctgtgcgtgagggaaaccaagaaatcaagcaatttgattcctcatgcttcaatggtcattacatcactggaattgaacggggctatttagatcgcatccgtcaactacgctccgatgaggtaaagcgaaaataa

SEQ ID NO: 132219 - protein, 485 aa, Xylella fastidiosa Temecula1
MCGILGIVGNQNVAGQLYDGLTVLQHRGQDAAGIATASGTRLRVQKANGLVRDVFDEQRMAVLDGCIGIAHCRYPTAGSEGMDEAQPFYVNSPYGIALAHNGNLINTEALHQQVFEADRRNINTDSDSEVLLNVFAYELDAQRMLTPEAAIRAVAGVHRRCKGGYAVVSMILGLGLVAFRDPHGIRPLVLGKRVHTEGDEYMVASESAALDILGFIRIRDVRPGEAVVITARGELFSEVCATPTNHTPCIFEYVYFARPDSMIDNISVHKARMRMGVKLGEKILRLRPNHDIDTIIPIPDTSRDAALEISNVLGVKYREGFVKNRYVGRTFIMPGQGERVKSVRRKLNPIHLEFRNRVVLLIDDSIVRGTTSRQIVQMVRDAGARKVYLASAAPPVRYPNVYGIDMPAADELIAHDRTEQEIQSLLGCDWLIYQDLEDLENAVREGNQEIKQFDSSCFNGHYITGIERGYLDRIRQLRSDEVKRK

SEQ ID NO: 132220 - DNA, 1398 bp, Clostridium tetani E88
  CDS (1)..(1398): transl_table=11
atggaatggaacaatttaaaagaagataaatttaaagatgaatgtggagtttttggaatatttactggcgaagaaagagaaataggagtaataaattattatggactctttgcattacaacataggggacaagatagtgcaggaatggtagtatcaaatggagaaaaatttatatttcataaagatataggtcttgttgaagatgtgtttagttatgataaattaaataagtttaaggggatatgtggaataggtcatgttaaatattccagttgtaaaaatggagatttagataacgtacagcctgtacttggcaaggctaagctaggatcaattgctatagctcataatgggagtttagtaaatgcaaaaatagtaaaagaattattagaagaggcaggaattgtttttcaaactaatgtagaatcagaagtagtattaaatttaatagctaggtcaaataaaaaagaattagaagatgctttaatagaagctttacaaagtataaaaggatcttatgcaatgcttttaatgacacaggataaattaattggattaagagatcctaaaggtataagacctctttgcataggaaaacttgatgataattatgttatttcatctgaaagctgtgctataaatgctataggtggagagtttataagggatgtagaaccaggagaaatggtaattgtagataaaggtggattaaaaagcttaagatttgcagagaaaacaaagggaagcatatgtgcttttgaatatatatattttgcaagaccagatagctctattgataatataagtgtttatgaatatagggttaaatctggagaagaactttacaaagaatgccctgttgatgcagatattgtagtgggagttccagactcaggaatacctgctgccataggatattcaaaagcttcaggcattccctatggcatagggtttgtaaaaaataaatatataggaagaagttttatagaacctactcaagaaatgagagaaagagcggttttagtgaaattaaacccgttaaaatataatgttgagggaaaaagagttgtaattatagacgattctatagtaaggggaactactagtaaaaaacttataagttctataagacgagctggagcaaaggaagttcattttatgtcagcatcaccaatggttaagtttccttgttatttaggtattgatactcctaataaagaagatttaatggcatctaattataacatagatgaaataaaggaaatgataggagcggacagtgtaggctatttaagtattgaaggactcacaagagctttaggatgtgaaaattgtaaaaaagaattttgcttaggatgttttagtggagaatatccagtatctatacctaaagaatga

SEQ ID NO: 132221 - protein, 465 aa, Clostridium tetani E88
MEWNNLKEDKFKDECGVFGIFTGEEREIGVINYYGLFALQHRGQDSAGMVVSNGEKFIFHKDIGLVEDVFSYDKLNKFKGICGIGHVKYSSCKNGDLDNVQPVLGKAKLGSIAIAHNGSLVNAKIVKELLEEAGIVFQTNVESEVVLNLIARSNKKELEDALIEALQSIKGSYAMLLMTQDKLIGLRDPKGIRPLCIGKLDDNYVISSESCAINAIGGEFIRDVEPGEMVIVDKGGLKSLRFAEKTKGSICAFEYIYFARPDSSIDNISVYEYRVKSGEELYKECPVDADIVVGVPDSGIPAAIGYSKASGIPYGIGFVKNKYIGRSFIEPTQEMRERAVLVKLNPLKYNVEGKRVVIIDDSIVRGTTSKKLISSIRRAGAKEVHFMSASPMVKFPCYLGIDTPNKEDLMASNYNIDEIKEMIGADSVGYLSIEGLTRALGCENCKKEFCLGCFSGEYPVSIPKE

SEQ ID NO: 132222 - DNA, 1455 bp, Lactobacillus plantarum WCFS1
  CDS (1)..(1455): transl_table=11
atgcctactgaagtaagaagtctgaatgaagaatgtggcgtctttggggtttggggctcgccggacgccgcccaattaacgtactttgggctccatgcgttacaacaccgggggcaagaaggagccggtatcacggcgaatgatcacggcaaactgcagacggaacgcggactagggttgttggctgatgtctttcgggacccacggcggttggcacgtttgacgggtcaagctgcagtcggccatgtacgttatgccacggctggtaatcatggattggaaaacattcaacccttgagttttaattttagcgactcacagtttgcactcgcacataacggcaatttgacgaatgcggtgacactgcggcgacggttggaacagcatggtgccatttttcatgctagttctgatagtgagattttaatgcatctgattcgacgcagccccgcagcaacgttaacggaacaggttaaggatgctttacgtcaagtccacggaggctttgcttacttactactaacgaatgattgtttgattgccgctttggatcctaacgggttacgaccattagtcgtcggtcagttacccacgggcgggtacgtcgtttgtagtgaaacttgcgcgcttgatacgattggtgcgacgtttgttcaagatgttcagccgggagaattgttaacgatcgatgatcatggcttgacgatcgaccattatacgactgatacacagttggcgatttgttcaatggagtttatctactttgcacgtccagattctgatattcacggcgtcaacgtccattctgcacgtaaacgaatgggtgctcagctcgctgttgaacagcccgtggacgccgacattgttgtcggggtacccaattcatctttatcagcggcgaccggctatgcggaagcgagtggcctgccttacgagatgggattaattaaaaatcaatattcgtcacggacctttattcagccgacccaagcattgcgagaacagggggttcggatgaagctttcagcggtcaaaggtgttgtcgctggtaaacgagtcgtcttaatcgatgattcgattgtacgtggtaccaccagtcggcggatcgtcaaattattgaaagatgcgggtgcaaagtcagttcatttacgaattgcatcgccaccattacgctatccatgtttttacggtatcgatattcaatcgactaatgaattgattgcggctcagcaaacgattcgggagatgtgtcagacgtttggtgcggactcacttggttttctcagtgaacagggcgtcgttgatgcagttggcttgtcgaccaccgaaccgtatggtggactatgcatggcctattttaatggggattatccaacggccctgtatgattaccaagccgagtatgatgcggaaattgcgcaattacaagccaatcatgaaggggtgatcaagtga

SEQ ID NO: 132223 - protein, 484 aa, Lactobacillus plantarum WCFS1
MPTEVRSLNEECGVFGVWGSPDAAQLTYFGLHALQHRGQEGAGITANDHGKLQTERGLGLLADVFRDPRRLARLTGQAAVGHVRYATAGNHGLENIQPLSFNFSDSQFALAHNGNLTNAVTLRRRLEQHGAIFHASSDSEILMHLIRRSPAATLTEQVKDALRQVHGGFAYLLLTNDCLIAALDPNGLRPLVVGQLPTGGYVVCSETCALDTIGATFVQDVQPGELLTIDDHGLTIDHYTTDTQLAICSMEFIYFARPDSDIHGVNVHSARKRMGAQLAVEQPVDADIVVGVPNSSLSAATGYAEASGLPYEMGLIKNQYSSRTFIQPTQALREQGVRMKLSAVKGVVAGKRVVLIDDSIVRGTTSRRIVKLLKDAGAKSVHLRIASPPLRYPCFYGIDIQSTNELIAAQQTIREMCQTFGADSLGFLSEQGVVDAVGLSTTEPYGGLCMAYFNGDYPTALYDYQAEYDAEIAQLQANHEGVIK

SEQ ID NO: 132224 - DNA, 1515 bp, Tropheryma whipplei str. Twist
  CDS (1)..(1515): transl_table=11
gtgaatttggaacactattcgcgggacagtgtcctgcgaggtgatggcgcaaaaatgtgtggcatagtcgggctaatcggttcagagccagccaatcaggctatatacgacagcctcttgcttttgcagcatcgcggccaggactcaaccggaatagcgaccgatgaatcaggaatattgcacctcaggaaagcaagaggttatgttcgtgaagctttccgcaccaggcatatgcgatccttgcttggccgggttggccttgggcatgtcaggtacgctactcagggaagtgtatcaagcgaagaagaggcacagccattctatgtaaatgctccgtatggtattgcaatggtgcacaatggcaatctaacaaatgcaagcaagctcagtaaagagctgttccatacagatcgcagacaccttaacacgtcgagcgacacagaggttttaataaatgtttttgccaacgaactgcaacagagtgtctcaggttttgaattgtcaccagatcaaatttttagtgccgtttcgcgcgtgcataaacgagtcgaggggtcgtatgcggttgttgcgctaatagctggcaccggaattttggctttcagagatccgttcggaataagacctttggtattgggagcccgcgaaagcaaatttacttccaataccgagtggataatagcgagtgaatcagttgtccttgaggcgcaaggatataaactgctaagagattttgctccgggtgaggctgtatttataacgcaacagggcgagatttttatgacccaatgcgcccaaaatccacaactaaatccctgcgccttcgaatatgtttatctagcgagacccgattccgttatgaatggcgtatcggtttatgaggcacgcttgcgccttggtgacactttatctacaactatcaaacaacagatgccttgcgggaacattgatgttgttatgcccatcccagattcatcgcgcccagcggcgttacaggtctcaagaaatcttggcatagagtatcgggaagggtttttaaagaaccgatacgttggccgaactttcataatgccaggacaactccagcgcaagaaaagcgttaggcagaagctgaatgccatgggtctcgaattccgcggtaaaaatgtcctgattgttgacgattcaattgtgcgtggtacaacctcaaaggagattattcacatggctcgcagtgctggggcaaatcaggtattctttacttctgccgcgccgcctgttcgataccaaaatgtttttggaatcaacatgccaacaagctctgagcttgttgcgcacaaccggcaactacaagaaattcgtcaatacatagacgccgaccgcctcatataccaaagtattgaagatatgcgacgcgcgatcatgcatggtggtgagttcaagcgacttgaggattcgtgcttttcaggcgaatacgtgacagggcgagttacccaggagtacctggactgggttgaaaacacgcagtccagctaa

SEQ ID NO: 132225 - protein, 504 aa, Tropheryma whipplei str. Twist
MNLEHYSRDSVLRGDGAKMCGIVGLIGSEPANQAIYDSLLLLQHRGQDSTGIATDESGILHLRKARGYVREAFRTRHMRSLLGRVGLGHVRYATQGSVSSEEEAQPFYVNAPYGIAMVHNGNLTNASKLSKELFHTDRRHLNTSSDTEVLINVFANELQQSVSGFELSPDQIFSAVSRVHKRVEGSYAVVALIAGTGILAFRDPFGIRPLVLGARESKFTSNTEWIIASESVVLEAQGYKLLRDFAPGEAVFITQQGEIFMTQCAQNPQLNPCAFEYVYLARPDSVMNGVSVYEARLRLGDTLSTTIKQQMPCGNIDVVMPIPDSSRPAALQVSRNLGIEYREGFLKNRYVGRTFIMPGQLQRKKSVRQKLNAMGLEFRGKNVLIVDDSIVRGTTSKEIIHMARSAGANQVFFTSAAPPVRYQNVFGINMPTSSELVAHNRQLQEIRQYIDADRLIYQSIEDMRRAIMHGGEFKRLEDSCFSGEYVTGRVTQEYLDWVENTQSS

SEQ ID NO: 132226 - DNA, 1461 bp, Tropheryma whipplei TW08/27
  CDS (1)..(1461): transl_table=11
atgtgtggcatagtcgggctaatcggttcagagccagccaatcaggctatatacgacagcctcttgcttttgcagcatcgcggccaggactcaaccggaatagcgaccgatgaatcaggaatattgcacctcaggaaagcaagaggttatgttcgtgaagctttccgcaccaggcatatgcgatccttgcttggccgggttggccttgggcatgtcaggtacgctactcagggaagtgtatcaagcgaagaagaggcacagccattctatgtaaatgctccgtatggtattgcaatggtgcacaatggcaatctaacaaatgcaagaaagctcagtaaagagctgttccatacagatcgcagacaccttaacacgtcgagcgacacagaggttttaataaatgtttttgccaacgaactgcaacagagtgtctcaggttttgaattgtcaccagatcaaatttttagtgccgtttcgcgcgtgcataaacgagtcgaggggtcgtatgcggttgttgcgctaatagctggcaccggaattttggctttcagagatccgttcggaataagacctttggtattgggagcccgcgaaagcaaatttacttccaataccgagtggataatagcgagtgaatcagttgtccttgaggcgcaaggatataaactgctaagagattttgctccgggtgaggctgtatttataacgcaacagggcgagatttttatgacccaatgcgcccaaaatccacaactaaatccctgcgccttcgaatatgtttatctagcgagacccgattccgttatgaatggcgtatcggtttatgaggcacgcttgcgccttggtgacactttatctacaactatcaaacaacagatgccttgcgggaacattgatgttgttatgcccatcccagattcatcgcgcccagcggcgttacaggtctcaagaaatcttggcatagagtatcgggaagggtttttaaagaaccgatacgttggccgaactttcataatgccaggacaactccagcgcaagaaaagcgttaggcagaagctgaatgccatgggtctcgaattccgcggtaaaaatgtcctgattgttgacgattcaattgtgcgtggtacaacctcaaaggagattattcacatggctcgcagtgctggggcaaatcaggtattctttacttctgccgcgccgcctgttcgataccaaaatgtttttggaatcaacatgccaacaagctctgagcttgttgcgcacaaccggcaactacaagaaattcgtcaatacatagacgccgaccgcctcatataccaaagtattgaagatatgcgacgcgcgatcatgcatggtggtgagttcaagcgacttgaggattcgtgcttttcaggcgaatacgtgacagggcgagttacccaggagtacctggactgggttgaaaacacgcagtccagctaa

SEQ ID NO: 132227 - protein, 486 aa, Tropheryma whipplei TW08/27
MCGIVGLIGSEPANQAIYDSLLLLQHRGQDSTGIATDESGILHLRKARGYVREAFRTRHMRSLLGRVGLGHVRYATQGSVSSEEEAQPFYVNAPYGIAMVHNGNLTNARKLSKELFHTDRRHLNTSSDTEVLINVFANELQQSVSGFELSPDQIFSAVSRVHKRVEGSYAVVALIAGTGILAFRDPFGIRPLVLGARESKFTSNTEWIIASESVVLEAQGYKLLRDFAPGEAVFITQQGEIFMTQCAQNPQLNPCAFEYVYLARPDSVMNGVSVYEARLRLGDTLSTTIKQQMPCGNIDVVMPIPDSSRPAALQVSRNLGIEYREGFLKNRYVGRTFIMPGQLQRKKSVRQKLNAMGLEFRGKNVLIVDDSIVRGTTSKEIIHMARSAGANQVFFTSAAPPVRYQNVFGINMPTSSELVAHNRQLQEIRQYIDADRLIYQSIEDMRRAIMHGGEFKRLEDSCFSGEYVTGRVTQEYLDWVENTQSS

SEQ ID NO: 132228 - DNA, 1509 bp, Pseudomonas syringae pv. tomato str. DC3000
  CDS (1)..(1509): transl_table=11
atgtgtggcatcgtcggtatcgtcggcaagtcgaacgtcaatcaggcgctgtatgacgcgcttaccgtcctccagcaccgcggccaggacgctgccggtatcgtaaccagccacgatggccggttattcctgcgcaaggacaacggattggtgcgtgatgtgtttcatcagcgccatatgcagcgcctggtcgggcatatgggcatcggtcatgtgcgttatccaacggcgggcagttcgacttcggccgaagcccagccgttctacgtcaactcgccttacggcatcacgttggcgcataacggcaacctcaccaacgttgagcaactggccaaggagatttacgaatccgacctgcgccatgtgaacaccaattccgattcggaagtgctgctcaacgtttttgcccatgaactggccgtgcgcggcaagttgcagccgaccgaagaagatatcttcgcggccgtgaccgacgtgcaccatcgctgccgtggcggctatgcggtcgtggcaatgatcaccggctacggcatcgtcggtttccgtgacccggatgccattcgtcctatcgtgttcggccagcgtcatactgacgaaggtgtcgagtacatgatcgcgtcggaaagcgtctcgctggacgtgctgggcttcaccctgattcgcgacctggcaccgggcgaagcggtctacatcaccgaagacggcaagctgcacacccgtcagtgtgcggccaaccccaagtatgcgccgtgcatcttcgagcacgtctatctggcacgtccggactcgatcatcgatggcatctcggtctacaaggcgcgtctgcgcatgggcgagaagctggctgacaagatcttgcgcgagcgcccggatcacgacatcgatgtggtcatccccattccagacaccagccgtaccgctgcgctggaactggccaaccacctgggcgtcaagtttcgcgaaggtttcgtcaagaaccgctacatcggccggaccttcatcatgccgggtcaggcagcgcgcaaaaagtctgttcgccagaagctcaacgcaatcgagctggaatttcgcggcaagaatgtgatgctggtggatgactccattgtgcgtggcacgacctgcaagcagatcatccagatggcccgcgaagccggtgccaagaatgtctacttctgttcggctgccccggcagtgcgttaccccaacgtctacggcatcgacatgccgagtgctcacgagctgatcgctcacaaccgttccacccaggacgtggccgacctcatcggtgccgactggctggtctatcaggatctgaatgacctgatcgaagcggtcagtggcagcaagaagatcaagatcgacaacttcgactgctcggttttcgacggcaagtacgtgaccggtgacatcgacgagcactacctgaacaggatcgagagcgcgcgcaacgacgcctccaagatcaagacccaggcagtgagtgcgatcatcgatctgtacaacaactaa

SEQ ID NO: 132229 - protein, 502 aa, Pseudomonas syringae pv. tomato str. DC3000
MCGIVGIVGKSNVNQALYDALTVLQHRGQDAAGIVTSHDGRLFLRKDNGLVRDVFHQRHMQRLVGHMGIGHVRYPTAGSSTSAEAQPFYVNSPYGITLAHNGNLTNVEQLAKEIYESDLRHVNTNSDSEVLLNVFAHELAVRGKLQPTEEDIFAAVTDVHHRCRGGYAVVAMITGYGIVGFRDPDAIRPIVFGQRHTDEGVEYMIASESVSLDVLGFTLIRDLAPGEAVYITEDGKLHTRQCAANPKYAPCIFEHVYLARPDSIIDGISVYKARLRMGEKLADKILRERPDHDIDVVIPIPDTSRTAALELANHLGVKFREGFVKNRYIGRTFIMPGQAARKKSVRQKLNAIELEFRGKNVMLVDDSIVRGTTCKQIIQMAREAGAKNVYFCSAAPAVRYPNVYGIDMPSAHELIAHNRSTQDVADLIGADWLVYQDLNDLIEAVSGSKKIKIDNFDCSVFDGKYVTGDIDEHYLNRIESARNDASKIKTQAVSAIIDLYNN

SEQ ID NO: 132230 - DNA, 1515 bp, Vibrio parahaemolyticus RIMD 2210633
  CDS (1)..(1515): transl_table=11
atgtgtggtattgttggaatcgtgggcacaacgcctgtaaaccagtctatttatgacgcgttaacggtgttacagcatcgtggccaagatgccgctggtatttgtaccatagaaagcaatcgttttcgtctgcgtaaggcgaacggtttagtcaaggatgtattcgaagcaagacacatgcagcgcttgcaaggtgaggtcggtatcggccacgttcgttacccaactgcgggtagttcaagcgcctcagaagcccagcctttctacgtaaactctcctttcggtattacacttgcccacaacggtaacttgaccaacgctcacgaagttcgtcagaaactgtttgaaaaagatcgccgccacatcaacaccacttctgattcagaagtgcttctcaacgtacttgcacatgaaattgacacagtaaaaggcaatgtgactgctgaagatgtatttcgcgctgttaccaatgtgcaccgtactattcgcggtgcttatgcggtaactgcgatgatcatcggccacggtatgattgcgtttcgtgacccgcatggtattcgccctctttgtttaggcaagcgtgaagtcgctggtcgcacggaatacatggttgcatcagagtctgttgcgttggatgcggtcggttttgactttgtgcgtgacgtagctccgggtgaagcggtgtatgcgacatttgaaggtgagctgttcactaagcaatgtgcagacaatccaaagctaaatccttgtatttttgaatttgtttactttgcgcgtcctgattctttcatcgataaaatctctgtgtacagtgctcgcgttgaaatgggcaaaaagctgggtgagcgaattcgtgaagattacgccgatcttgatatagacgtcgtaatcccgattcctgaaacctcttgcgatatcgcactacaaattgctcaagcgatcgatattccttaccgccaaggctttgttaaaaaccgttacgttggccgcacgtttatcatgcctggtcagcaacaacgtaagaaatcagtgcgtcgcaagctaaacgctatccgctctgagttcaaagataagaacgtgttgctggtggatgactctatcgttcgcggtacgacatcagaacagatcattgagatggctcgcgactccggcgcgaagaaagtgtacatggtgtctgctgcaccagaagttcgcttccctaacgtttacggtatcgatatgccgagcgcgacagagctgattgctcatggtcgtgacaacgaaaccatttgtaaacagattggtgcggatgcgcttatttaccaacgtctagatgacttagttgaagcggtaggtttcggtaaccaagatatcacgcagttcgatacatctgtatttaatggtgaatacgtaactggcgatatcgatcaacaatacctcgacttcctagatggtttgcgtaatgacgatgcaaaaacgcaacgtgaaattcagcaagatctagcgaacctagagctgcacaacgaaggcgcgtaa

SEQ ID NO: 132231 - protein, 504 aa, Vibrio parahaemolyticus RIMD 2210633
MCGIVGIVGTTPVNQSIYDALTVLQHRGQDAAGICTIESNRFRLRKANGLVKDVFEARHMQRLQGEVGIGHVRYPTAGSSSASEAQPFYVNSPFGITLAHNGNLTNAHEVRQKLFEKDRRHINTTSDSEVLLNVLAHEIDTVKGNVTAEDVFRAVTNVHRTIRGAYAVTAMIIGHGMIAFRDPHGIRPLCLGKREVAGRTEYMVASESVALDAVGFDFVRDVAPGEAVYATFEGELFTKQCADNPKLNPCIFEFVYFARPDSFIDKISVYSARVEMGKKLGERIREDYADLDIDVVIPIPETSCDIALQIAQAIDIPYRQGFVKNRYVGRTFIMPGQQQRKKSVRRKLNAIRSEFKDKNVLLVDDSIVRGTTSEQIIEMARDSGAKKVYMVSAAPEVRFPNVYGIDMPSATELIAHGRDNETICKQIGADALIYQRLDDLVEAVGFGNQDITQFDTSVFNGEYVTGDIDQQYLDFLDGLRNDDAKTQREIQQDLANLELHNEGA

SEQ ID NO: 132232 - DNA, 1455 bp, Streptococcus pyogenes SSI-1
  CDS (1)..(1455): transl_table=11
atgacatacgaagtaaaatctctaaatgaagaatgtggagtctttggtatctgggggcatcctcaggcagctcaagtcacttactttgggcttcatagccttcaacatcgcggtcaagaaggagctggtattgtttcaaatgacaatgggaaactctatggttatcgaaatgttgggctcctttctgaagtttttaagaatcaatctgaattagataatttaactgggaatgcggctattggacatgttcggtatgctactgcaggttctgcagatattcgcaatattcagccttttctttataaatttcatgacgggcaatttgctttatgccataatggtaatttgacaaatgctatttccttaaggaaagaattagaaaagcaaggtgcaattttcaatgcctcctcagatactgaaattttgatgcacttgattcgtcgaagccataactcaagtttcatgggaaaggtaaaagaagctctaaatacagtaaagggtggctttgcctatctactgatgacagaaaataaactcattgctgctcttgaccctaatgcctttcgtcctttgtcaattggacaaatgcaaaatggtgcctgggttatttccagtgagacctgtgcttttgaggtggtaggcgcaaaatgggttagagatgttgaacctggcgaagttattcttatagacgatcgtggtattcaatgtgatcgttatactgatgaaacgcaactggcaatttgttcgatggaatatgtctattttgcaaggccggattcaactatacatggtgttaatgttcatacggctcgaaaaaatatgggaaagcgtcttgcacaagaatttaaacaggatgctgatattgtaattggtgtcccaaattcgtccttatcggctgctatgggctttgctgaagaatccggattaccaaatgagatgggtcttgtaaaaaatcagtatacgcagcgaacctttattcaaccgacacaagaattaagggaacaaggtgttcgaatgaaactatcagcggtatctggtgttgtcaaaggaaagcgcgttgttatgattgatgactcaattgtaagaggaacgacttctagaaggattgtcggattattaagagaagcaggagctagtgaagtacatgttgctatagctagtccagaattaaagtatccttgtttttatggtattgatattcaaacaagacgagaattaatttcagcaaatcacgctgttgacgaagtgtgtgatattattggcgcagatagtctgacctatctctcattagatgggttgattgaatcaattggactcgaaacaaaagcaccaaatggtggtttatgcgtagcttactttgatgggcattatccaacaccgctttatgattatgaagaagaatacctcagaagtttagaagagaaaacaagtttttatattcaaaaagtgaaataa

SEQ ID NO: 132233 - protein, 484 aa, Streptococcus pyogenes SSI-1
MTYEVKSLNEECGVFGIWGHPQAAQVTYFGLHSLQHRGQEGAGIVSNDNGKLYGYRNVGLLSEVFKNQSELDNLTGNAAIGHVRYATAGSADIRNIQPFLYKFHDGQFALCHNGNLTNAISLRKELEKQGAIFNASSDTEILMHLIRRSHNSSFMGKVKEALNTVKGGFAYLLMTENKLIAALDPNAFRPLSIGQMQNGAWVISSETCAFEVVGAKWVRDVEPGEVILIDDRGIQCDRYTDETQLAICSMEYVYFARPDSTIHGVNVHTARKNMGKRLAQEFKQDADIVIGVPNSSLSAAMGFAEESGLPNEMGLVKNQYTQRTFIQPTQELREQGVRMKLSAVSGVVKGKRVVMIDDSIVRGTTSRRIVGLLREAGASEVHVAIASPELKYPCFYGIDIQTRRELISANHAVDEVCDIIGADSLTYLSLDGLIESIGLETKAPNGGLCVAYFDGHYPTPLYDYEEEYLRSLEEKTSFYIQKVK

SEQ ID NO: 132234 - DNA, 1518 bp, Salmonella enterica subsp. enterica serovar Typhi Ty2
  CDS (1)..(1518): transl_table=11
atgtgcggtattgtcggtatctccggtgttatgccggtcaaccagtcgatttatgacgcgttaacagtgctccagcatcgtggtcaggatgctgccggtatcatcaccattgatgcgaataactgcttccgcttgcgtaaggcaaacgggctggtgaacgatatttttgaagctcgccacatgcagcgtttgcagggcaacatggggatcggccatgtgcgctaccctaccgcaggcagctccagcgcttcggaagcgcaacctttttacgttaactcgccgtatggcatcacgttggcccataatggcaacctgactaatgcgcacgagctacgtaaaaagctgtttgaagaaaagcgccgtcatatcaacaccacctccgattccgaaatcctgctcaatattttcgccagcgagctcgacagcttccgtcactatccgctggaagccgacaatatttttgccgcgattgccgcgactaaccgtcaaatccgcggcgcctatgcctgcgtagcgatgattatcggccacggcatggtggcttttcgcgatccgcacggcattcgcccgttagtgctgggcaagcgtgacgttggcgatggtcgtacggagtatatggtcgcttctgaaagcgtggcgctggatacgctgggctttgaattcctgcgcgatgttgcgccaggcgaagctatctatattaccgaaaaggggcaactgttcacgcgccagtgcgcggataatccggtcagtaacccctgtctgttcgagtacgtttattttgctcgcccggactcctttatcgacaaaatctccgtctacagcgctcgtgtgaatatgggcaccaaacttggcgaaaaaatcgctcgtgaatgggaagatctggacatcgacgtcgtgatccctatcccggaaacctcctgcgatatcgccctggaaattgcccgtattctcggcaagccgtaccgccagggatttgtcaaaaatcgttacgtgggacgtacctttatcatgccgggccaacagctacgccgtaaatccgtgcgccgtaagctcaatgctaatcgcgcggaattccgcgataagaacgtcctgctggtggatgattccatcgtgcgtggcaccacatcagagcagatcatcgagatggcccgggaagctggcgcgaagaaggtttatctggcgtccgccgcgccggaaattcgtttccccaacgtctatggcattgatatgccgaccgccaatgagctgatcgcgcatggtcgcgaggtggatgagattcggcagatcatcggcgcagacgggcttatcttccaggatctgaacgatctgatcgaagccgtacgcgcagaaaacccggatatccagcagtttgaatgttcggtatttaacggggtatatgtcaccaaagacgtagaccagcaatacctcgacttcctggattcattacgtaatgacgacgccaaagcggtgctgttccagaacgaaatggaaaacttggaaatgcataacgaaggctaa

SEQ ID NO: 132235 - protein, 505 aa, Salmonella enterica subsp. enterica serovar Typhi Ty2
MCGIVGISGVMPVNQSIYDALTVLQHRGQDAAGIITIDANNCFRLRKANGLVNDIFEARHMQRLQGNMGIGHVRYPTAGSSSASEAQPFYVNSPYGITLAHNGNLTNAHELRKKLFEEKRRHINTTSDSEILLNIFASELDSFRHYPLEADNIFAAIAATNRQIRGAYACVAMIIGHGMVAFRDPHGIRPLVLGKRDVGDGRTEYMVASESVALDTLGFEFLRDVAPGEAIYITEKGQLFTRQCADNPVSNPCLFEYVYFARPDSFIDKISVYSARVNMGTKLGEKIAREWEDLDIDVVIPIPETSCDIALEIARILGKPYRQGFVKNRYVGRTFIMPGQQLRRKSVRRKLNANRAEFRDKNVLLVDDSIVRGTTSEQIIEMAREAGAKKVYLASAAPEIRFPNVYGIDMPTANELIAHGREVDEIRQIIGADGLIFQDLNDLIEAVRAENPDIQQFECSVFNGVYVTKDVDQQYLDFLDSLRNDDAKAVLFQNEMENLEMHNEG

SEQ ID NO: 132236 - DNA, 1884 bp, Bacteroides thetaiotaomicron VPI-5482
  CDS (1)..(1884): transl_table=11
atggaacaattgaaacatgaatgtggcgttgccatgatacgcctgctccaacccctggagtattacgagaaaaagtacggaacatggatgtacggtctcaacaagctctatctgttgatggagaaacagcataaccgggggcaggaaggggcaggactggcatgcgtgaagctggaagcaaatccgggtgaggaatatatgtttcgcgaacgcgcgttaggttccggtgccatcaccgaaatcttcgaagctgtacagagtaacttcaaggacctcactcccgaacagttgcatgatgcggcatttgccaaacgtactttgccctttgcgggtgaagtatatatggggcatctgcgttattctactaccggaaaatccggaatctcgtacgtacatccgtttttaagaagaaacaactggcgtgctaaaaatctggctctctgcggaaacttcaatatgacgaatgtagatgaaatctttgcccgcatcaccgctatcggtcagcatccacgtaagtatgccgatacctatatcatgttggaacaggtggggcatcgtcttgaccgtgaagtggaacgcctcttcaaccttgctgaagccgaaggactgacagggatgggagtcacccattatatagaagaacatatcgaactggccaacgtattgcgtacttccagccgtgagtgggatgggggatatgtgatctgcggtctcaccggaagcggcgaatcttttgctatccgtgatccgtggggtattcgtcccgctttctggtatcaggatgatgaaatagccgtactggcttctgagcgtccggtgattcagactgctttgaatgttcccgtagaaaaaatcaaggaactgcaacccgggcaggcattgctgatcagcaaagaaggcagactgcggacttcacaaatcaacaggcctcgcgagcggcacgcctgctcgttcgaacgtatttacttctcccgtggcagcgatgtagatatctataaagaacggaaactcttgggagaaaaactggttccgaatattctgaaagccattaataacgacttggaccatactgtattttcctttatcccgaatacggccgaagttgccttctacggaatgttgcaagggctggatgactatctgaatgaagagaaagtacggcagattgcggcattggggcatcatcccaatatggaagagctggaggtcattctttcccgccgtatccgcagtgaaaaagttgccatcaaagatattaagctccgtacattcattgccgagggaaacagtcggaatgacttggctgcccacgtatatgacatcacgtacggaagtctggtttccggtgtcgacaatctcgtgattatcgacgatagcattgtgcgtggtactaccttgaagcaaagtatcatcggcattctcgaccgtcttggtccgaagaagatcgtgattgtatcttcttctccacaagttcgttatccggactattacggcatcgatatggcgaagatgagcgaatttatcgctttcaaagctgccatcgagcttctgaaagagcgggatatgaaggatgtgattgctgccgcctaccggaaatcgaaagatcaggtaggattgccgaaagaacaaatggtgaattacgtgaaggatatctatgcgccgttcaccgatgaagaaatatctgccaagatggtagaactcctgacaccgaagggaacgaaagcgaaagtggaaatcgtctaccaaccgttggaaggactccatgaagcctgtccgaaccatcagggagactggtacttcagtggaaactatcccacaccgggtggtgtgaaaatggtgaatcaggcatttatcaactacattgagcagatgtatcaattctaa

SEQ ID NO: 132237 - protein, 627 aa, Bacteroides thetaiotaomicron VPI-5482
MEQLKHECGVAMIRLLQPLEYYEKKYGTWMYGLNKLYLLMEKQHNRGQEGAGLACVKLEANPGEEYMFRERALGSGAITEIFEAVQSNFKDLTPEQLHDAAFAKRTLPFAGEVYMGHLRYSTTGKSGISYVHPFLRRNNWRAKNLALCGNFNMTNVDEIFARITAIGQHPRKYADTYIMLEQVGHRLDREVERLFNLAEAEGLTGMGVTHYIEEHIELANVLRTSSREWDGGYVICGLTGSGESFAIRDPWGIRPAFWYQDDEIAVLASERPVIQTALNVPVEKIKELQPGQALLISKEGRLRTSQINRPRERHACSFERIYFSRGSDVDIYKERKLLGEKLVPNILKAINNDLDHTVFSFIPNTAEVAFYGMLQGLDDYLNEEKVRQIAALGHHPNMEELEVILSRRIRSEKVAIKDIKLRTFIAEGNSRNDLAAHVYDITYGSLVSGVDNLVIIDDSIVRGTTLKQSIIGILDRLGPKKIVIVSSSPQVRYPDYYGIDMAKMSEFIAFKAAIELLKERDMKDVIAAAYRKSKDQVGLPKEQMVNYVKDIYAPFTDEEISAKMVELLTPKGTKAKVEIVYQPLEGLHEACPNHQGDWYFSGNYPTPGGVKMVNQAFINYIEQMYQF

SEQ ID NO: 132238 - DNA, 1410 bp, Bacteroides thetaiotaomicron VPI-5482
  CDS (1)..(1410): transl_table=11
atgggaggttttttcggaacagtctcgaaatcgagttgcgtgactgatttattctatggtacagattataactcacatctgggtacaaagcggggcggactcgcgacttatagtcaggagaaaggatttattcgctccattcacaatctggaaagtacatatttccgatccaagtttgaaggagagcttgataaatttaaaggcaatgccggcataggcattatcagcgacacagatgcacaacccattatcatcaattcccacctcggccgcttcgccatcgtcacagtcgctaaaatatcgaatatccaggaactggaagaagaccttctcaaccaaaatatgcacttcgccgaacttagttcgagcaacaccaatcaaacggaactcatcgcactgcttatcatacaaggaagaaccttcaccgaaggtatcgagaacgtattcaaacatatcaagggttcttgttctctgctgattctgacagaggatggcagtattatcgcggctcgtgaccaatggggacgtactccggtggtgatcggcaagaaagatggtgcgtatgccgctaccagcgagtcatccagtttcccgaatctggattatgaaatcgaaaagtatctgggaccgggggaaatagtacgcatgtatcccgatcatatcgagcagcttcgccaaccgaatgaaggaatgcagatttgttctttcctttgggtgtattatggtttcccgacctcttgttatgagggcaaaaatgtagaggaagtccgtttcaccagtggaatgaagatgggacagaaggacgaatcggaagtggattgtgcctgtggtatccctgattcgggagtaggtatggcgttgggttatgcggaaggtaaaggagttccttatcatcgtgccatttcaaaatatacaccgacatggcctcgtagcttcacacccagcaatcaggaaatgcgttcgctggttgcaaagatgaagctaattccgaatcgtgccatgcttcagggaaagcgtctgctgttttgtgatgattcgattgtgcgtggaacacagttgcgtgataatgtgaagattctatatgattatggagcgaaagaggtacatatgcgtatcgcttgccctccgttgatctatgcctgtccgtttgtgggtttctcggcttctaagaatgctttggagttgattacccgtcgtattattaaagaactggaaggcgatgagaataagaatctggagaaatacgccactacggggtctcccgaatacgagaaaatggttagtatcatagccgagcgtttcggactgacttcattgaaattcaacacgcttgagactttgattgaagctatcgggctgccgaaatgtaaagtgtgtacgcattgttttgatggtagcagtcacttttaa

SEQ ID NO: 132239 - protein, 469 aa, Bacteroides thetaiotaomicron VPI-5482
MGGFFGTVSKSSCVTDLFYGTDYNSHLGTKRGGLATYSQEKGFIRSIHNLESTYFRSKFEGELDKFKGNAGIGIISDTDAQPIIINSHLGRFAIVTVAKISNIQELEEDLLNQNMHFAELSSSNTNQTELIALLIIQGRTFTEGIENVFKHIKGSCSLLILTEDGSIIAARDQWGRTPVVIGKKDGAYAATSESSSFPNLDYEIEKYLGPGEIVRMYPDHIEQLRQPNEGMQICSFLWVYYGFPTSCYEGKNVEEVRFTSGMKMGQKDESEVDCACGIPDSGVGMALGYAEGKGVPYHRAISKYTPTWPRSFTPSNQEMRSLVAKMKLIPNRAMLQGKRLLFCDDSIVRGTQLRDNVKILYDYGAKEVHMRIACPPLIYACPFVGFSASKNALELITRRIIKELEGDENKNLEKYATTGSPEYEKMVSIIAERFGLTSLKFNTLETLIEAIGLPKCKVCTHCFDGSSHF

SEQ ID NO: 132240 - DNA, 1440 bp, Enterococcus faecalis V583
  CDS (1)..(1440): transl_table=11
atgtcttatgaagcaaaaagcttaaatgaagagtgtggtattttcggtatttggggtcatcctgatgcggcacaagtgacctattttggcttacacagcttgcagcatcgaggccaagaaggcgcgggaattgtggcgaacaattctgggaaattagatggccaccgtgatttaggtttattagcagaagtattccaaaagcaagaacaactgaatgcgttagaaggaacggcggctattggtcatgtacgctatgcaaccgctggtacgggtagcgtggataatattcagccatttttatttaaattttatgatagtcaaattgggttagcacacaatggcaatttgacaaatgccaaacgtttacgaaaacaactagaaagagaaggcgctatttttcattccaattcagacactgaaattttaatgcacttgattcgaaaaagcactgctgcctcgtttctcgataaattaaaagagagcttgaatttggttaagggtggctttgcttatcttttattaacagaaacgatgatgattgctgcactggatcccaacggctttcgccctctctccatcggacaaatgaacaatggggcgtacgttgtggcatccgaaacgtgtgcattagaaacagttggggctcgctttattcaagatgtggcgcctggtgaagtagtcatcatttctgatgaaggcttgaaaatagaggttttcactacggaagtccaaccggcaatttgtgcaatggaatatatttattttgcacgaccagattcaaatattgccggagttaatgtgcatacagctcgtaaaagaatggggaagaacttggcaatcgaaagtccagtcgcagctgatatggtaattggtgtaccgaactcgtcattgtctgcagctagcggctatgcagaagaagcacagataccttacgaactaggtttagtaaaaaatcaatatgtcgctcgaacattcatccagccgacacaagaattaagagaacaaggtgtccgtatgaaactatcggcagttcgtggcgtggtcaaaggaaaaaaagtcattttagtagatgattcgattgttcgcgggaccactattcggcgcattattcatttattaaaagaagcagaagcgcaagaagttcatgtcagaattgcttcaccaccattaaaatatccgtgtttttatggcattgatatacagacgcgggacgaactaattgcggcaaactattcaattgaagaaatcaaagagcagattggcgcagattcgctggcttttttgagtgaagcagggctgattgatgggattcaattaaattatgatgctccttattctgggctgtgtatggcttactttaatggagactatccaacgcctttgtatgattatgaagaacaatatcaagcatccttgaaaaaagaaactaggaggaattga

SEQ ID NO: 132241 - protein, 479 aa, Enterococcus faecalis V583
MSYEAKSLNEECGIFGIWGHPDAAQVTYFGLHSLQHRGQEGAGIVANNSGKLDGHRDLGLLAEVFQKQEQLNALEGTAAIGHVRYATAGTGSVDNIQPFLFKFYDSQIGLAHNGNLTNAKRLRKQLEREGAIFHSNSDTEILMHLIRKSTAASFLDKLKESLNLVKGGFAYLLLTETMMIAALDPNGFRPLSIGQMNNGAYVVASETCALETVGARFIQDVAPGEVVIISDEGLKIEVFTTEVQPAICAMEYIYFARPDSNIAGVNVHTARKRMGKNLAIESPVAADMVIGVPNSSLSAASGYAEEAQIPYELGLVKNQYVARTFIQPTQELREQGVRMKLSAVRGVVKGKKVILVDDSIVRGTTIRRIIHLLKEAEAQEVHVRIASPPLKYPCFYGIDIQTRDELIAANYSIEEIKEQIGADSLAFLSEAGLIDGIQLNYDAPYSGLCMAYFNGDYPTPLYDYEEQYQASLKKETRRN

SEQ ID NO: 132242 - DNA, 1521 bp, Coxiella burnetii RSA 493
  CDS (1)..(1521): transl_table=11
atgtgcggaatcgtcggtattattgccaatggcatcgttaatcaggccctttacgacgccttaaccatattgcaacaccgcggacaagatgcggctgggattatgacaagcgatggtgagcgtgtttttttgcgaaaatcgaatgggttagttcgcgatgcgattcgcgagccacacatgctgcatttagtgggtaatatgggcattggccatgttcgttatcccacggcgggatcagaaagtcctgcagaatcgcaaccgttttatgtcaattcgccttacggtttgagtctggtgcacaatggtaatttagttaatgttaaagaattaactaacgatttgattcgtagcgacttgcgccatttaaacaccacttctgattcggaaattttattgaatgtcgttgcacatgaattacagcattatggtggcgttcaactctcgcctaagcaattgtttaaagccatgacaaaagtgtatgaaagggtggaaggcgcgtttgcggctgtaatgattattacgggttatggtgttatcggatttcgcgaccctcacgctatccgtcctttagtttatgggcgccgcgataacggtaacgggccggaatatatgttggcttcggaaagcattgctttagatgcactgggttttgaactcattgacgatgtgggtcccggagaagttatttatttcgatcgtgaggggagcgttcatcgagaacgatgtgccaaacaagtgagccattctccttgcatttttgaatatatttatttagcgcgtcctgattctattattgatggtgtcccggtttaccaagcacgttctggtatgggtgaaagtctagcgcaaaaaatattacgggagcgtcccgaccacggtatcgatgtcgtgattcctatccccgacacgagtcggaacgcggcgcaggcattggcgcgcgccttagatgttccttattcagaaggttttgtaaaaaaccgttacatcggacggacatttattatgccggggcaagcgaagcggcgaagttctgttcggttaaaattaaatgccattaaagctgaatttgccaataaaaccgttttattagtggatgattccattgtgcgaggcaccacttctaaagaaattatccaaatggcgcgcgacgtgggcgctaaaaaggtgtatttcgcttctgcggctcctgaagtgcgctaccccaatgtctatggaattgatatgcctaccgctgatgaattaattgctcacaataaatcgactgaagaggtgatgcactcaattggcgctgattggctagtctatcaaaatttggaagatgtctatcaagcgataaacgacgctatgggctcgcgtaagccaaaaattgaacgatttgaagattctgtttttaccggagattatattgctggtaatattacaaaagaatatttggccgagttggccgaatcccgtaacgatgccgctaaaatgaaaaagcgggcattaaacgaacaggaagaggcgaacggattgttatga

SEQ ID NO: 132243 - protein, 506 aa, Coxiella burnetii RSA 493
MCGIVGIIANGIVNQALYDALTILQHRGQDAAGIMTSDGERVFLRKSNGLVRDAIREPHMLHLVGNMGIGHVRYPTAGSESPAESQPFYVNSPYGLSLVHNGNLVNVKELTNDLIRSDLRHLNTTSDSEILLNVVAHELQHYGGVQLSPKQLFKAMTKVYERVEGAFAAVMIITGYGVIGFRDPHAIRPLVYGRRDNGNGPEYMLASESIALDALGFELIDDVGPGEVIYFDREGSVHRERCAKQVSHSPCIFEYIYLARPDSIIDGVPVYQARSGMGESLAQKILRERPDHGIDVVIPIPDTSRNAAQALARALDVPYSEGFVKNRYIGRTFIMPGQAKRRSSVRLKLNAIKAEFANKTVLLVDDSIVRGTTSKEIIQMARDVGAKKVYFASAAPEVRYPNVYGIDMPTADELIAHNKSTEEVMHSIGADWLVYQNLEDVYQAINDAMGSRKPKIERFEDSVFTGDYIAGNITKEYLAELAESRNDAAKMKKRALNEQEEANGLL

SEQ ID NO: 132244 - DNA, 1581 bp, Streptomyces avermitilis MA-4680
  CDS (1)..(1581): transl_table=11
ttgcagaacgcaccggattcggaacggtgcacgatctcgcctacactcggtggcgtgccacgtggtgacggtcgactcaatcatgatctgctccccggtgagaaaggcccccaggacgcttgtggcgtcttcggtgtctgggctccgggcgaagaggtcgccaagctcacttacttcgggctctacgccctccagcatcggggccaggaatccgcgggtatcgcggtcagcaatggctcccagatcctcgtcttcaaggacatgggtctcgtgtcccaggtcttcgacgagacctctctcggttcgctccagggtcatatcgcggtcggtcacgcccgctactcgaccaccggtgcctccgtctgggagaacgcccagccgacgttccgcgccaccgcgcacggttcgatcgcgctcgggcacaacggcaacctggtcaacacggcgcagctcgccgagatggtcgccgacctccccaaggagaacgggcgctccccgaaggtcgcggccaccaacgacacggacctcgtcaccgcgctcctcgcgggccagcgggacgacgagggccagccgctgaccatcgaggaggcggccgccaaggtcctcccgcaggtccagggcgccttcagcctcgtcttcatgaacgagcacaccctctacgcggcccgcgacccgcagggcatccgcccgttggtcctcggccgcctcgagcgcggctgggtcatcgcctcggagtccgccgccctcgacatctgcggcgccagctacgtccgcgagatcgagccgggcgagttcgtcgccatcgacgagaacggccttcgcagctcccgattcgcggaagcgaagcccaagggctgtgtcttcgagtacgtgtacctggcccgtcccgacacggacatcgccggccgcaacgtgtacctcagccgggtcgagatgggccgtcgcctcgccaaggaggcgcccgccgaggccgacctggtgatagcgacgccggagtccggcacccccgccgcgatcggttacgcggaggcctccggcattccgttcggcgccggcctggtgaagaacgcgtatgtcggccggaccttcatccagccctcgcagacgatccgccagctcggcatccgcctcaagctgaacccgctcaaggaagtcatcaagggcaagcgcctggtcgtcgtcgacgactcgatcgtgcgcggcaacacccagcgcgcgctggtgcggatgctccgcgaagcgggtgcggcggaagtccacatccggatttcctcgccccccgtgaagtggccctgcttcttcggcatcgacttcgccacccgtgccgagctgatcgccaacggcatgacgatcgaggagatcggtacctcgctgggcgccgactccctctcgtacatctccatcgacggcatgatcgaggcgaccacgatcgccaagcccaacctctgccgggcctgcttcgacggcgagtacccgatggatctccccgaccccgaactgctgggcaagcagcttctggagaccgagctggcggcgggtcccgccgccacggccgcggccgacgcgatccgtcgcccctga

SEQ ID NO: 132245 - protein, 526 aa, Streptomyces avermitilis MA-4680
MQNAPDSERCTISPTLGGVPRGDGRLNHDLLPGEKGPQDACGVFGVWAPGEEVAKLTYFGLYALQHRGQESAGIAVSNGSQILVFKDMGLVSQVFDETSLGSLQGHIAVGHARYSTTGASVWENAQPTFRATAHGSIALGHNGNLVNTAQLAEMVADLPKENGRSPKVAATNDTDLVTALLAGQRDDEGQPLTIEEAAAKVLPQVQGAFSLVFMNEHTLYAARDPQGIRPLVLGRLERGWVIASESAALDICGASYVREIEPGEFVAIDENGLRSSRFAEAKPKGCVFEYVYLARPDTDIAGRNVYLSRVEMGRRLAKEAPAEADLVIATPESGTPAAIGYAEASGIPFGAGLVKNAYVGRTFIQPSQTIRQLGIRLKLNPLKEVIKGKRLVVVDDSIVRGNTQRALVRMLREAGAAEVHIRISSPPVKWPCFFGIDFATRAELIANGMTIEEIGTSLGADSLSYISIDGMIEATTIAKPNLCRACFDGEYPMDLPDPELLGKQLLETELAAGPAATAAADAIRRP

SEQ ID NO: 132246 - DNA, 1416 bp, Bacillus cereus ATCC 14579
  CDS (1)..(1416): transl_table=11
atgcttgctgaaataaaggggttaaacgaagaatgtggcgttttcggaatttgggggcatgaaaatgcagcacaagtttcatactacggattgcacagtttacagcaccgtgggcaagaaggcgcaggcattgtcgtaaataatggggaaaaaatcgtcggtcacaaggggttaggtttaatatcagaagtgttttcaagaggtgagctagaaggattaaatggaaaatcagcgatcggacatgtacgatatgcaacagctggtggaagtgaagttgctaacgttcaaccattgttgttccgtttttccgatcatagtatggcgttagctcataacggaaatttaattaacgcaaaaatgcttcgtcgtgaattagaagcagagggcagtatttttcaaactagttcagatacagaagtacttttacatcttattaaacgtagtacgaaagattctttaattgaaagtgtaaaagaagctttaaacaaagtgaaaggtgcgtttgcgtatcttttactaactggaaatgaaatgatcgttgcattagatccgaatgggttccgtccgctttcaattggaaagatgggggatgcttacgttgtagcatctgaaacatgtgcttttgatgtagtaggtgcaacatacattcgtgatgtagaaccgggtgaattacttatcattaatgatgaaggaattcacgtagatcgtttcacaaacgatgtagaacatgcaatttgtagtatggaatacatttactttgcacgaccagattctaatattgcaggcgttaacgttcatgcagcacgtaagaatatggggaaacgtttagcggcagaagctcctattgaagcagatgttgttactggtgtaccagactctagtatttcagctgcgattggctatgcggaggcgacaggtattccatatgagttaggattaattaaaaatcgttacgttggacgtacgtttattcaaccttctcaggaactgcgagagcaaggggttaagatgaaactttccgcagtaagaggtgtagttgaagggaaacgagttgttatgattgatgactctatcgtaagaggaacgacaagtaaacgaattgttcgtatgcttcgtgaagctggagcgacagaagttcacgtaagaattgcttcaccacctctgaaatatccatgtttctatggcattgatattcaaacgagaaaagaattaattgcagcaaatcatacagtagaagaaatccgtgaaatgatcggagcagattctttaacatttttaagcgaagatggattagtagatgcaattggacgtccatatgaagggaaatatggtggcctatgcatggcttactttaatggggactatccaacagctctttatgattatgagcaagagcttttagaaagtatgaaataa

SEQ ID NO: 132247 - protein, 471 aa, Bacillus cereus ATCC 14579
MLAEIKGLNEECGVFGIWGHENAAQVSYYGLHSLQHRGQEGAGIVVNNGEKIVGHKGLGLISEVFSRGELEGLNGKSAIGHVRYATAGGSEVANVQPLLFRFSDHSMALAHNGNLINAKMLRRELEAEGSIFQTSSDTEVLLHLIKRSTKDSLIESVKEALNKVKGAFAYLLLTGNEMIVALDPNGFRPLSIGKMGDAYVVASETCAFDVVGATYIRDVEPGELLIINDEGIHVDRFTNDVEHAICSMEYIYFARPDSNIAGVNVHAARKNMGKRLAAEAPIEADVVTGVPDSSISAAIGYAEATGIPYELGLIKNRYVGRTFIQPSQELREQGVKMKLSAVRGVVEGKRVVMIDDSIVRGTTSKRIVRMLREAGATEVHVRIASPPLKYPCFYGIDIQTRKELIAANHTVEEIREMIGADSLTFLSEDGLVDAIGRPYEGKYGGLCMAYFNGDYPTALYDYEQELLESMK

SEQ ID NO: 132248 - DNA, 1518 bp, Nitrosomonas europaea ATCC 19718
  CDS (1)..(1518): transl_table=11
atgtgtggaattttaggcgtggtagcccggtcacccgccaatcagttgctctatgatggtctgttgatgctgcagcaccgtggtcaggatgctgccggtatcgttactgcacaaggtaacagctttcacatgcataaaggtctcggtctggtacgggatgttttccgtacccgggatatgcgtgcgctgccggggtacatgggaatcggccatgtacgctaccccacggcgggatcttcaacctctcctgctgaagcacagcctttttacgtaaattccccgtttggtatcgtgctggcccataacggtaatctgaccaatgcggaaaccctcaatcaggaactgtttcttgcagaccggcgtcacgtcaatacgcattccgattcagaagtattgctgaatgtactggcgcacgagttgcaggaacgtgccgtcggttatcagcttgacctggctgagattttctcggcagtagccggtgtacacgaacgctgtcagggtgcctatgccgttattgccatgattgcaggctatggtctgctcgcattccgcgatccgtacggaatcaggccgctcgtgttcggttcagtagaaacagatgcgggtaccgagtacatggtggcttccgagagtgttgcgttggatacgctgggttttcgtctcatccgcgatgttgctcccggggaagccatttttatcgatatggaagggcatttctacagtcatcagtgcgctgctctacccagcctgaatccctgtatttttgagtacgtttatctcgcccggcctgattcgatgctggatggaatatcggtttatgaaacccgcctcaacatgggtatcaatctggcggacaagatcagtacttccatgcaacatctcgatatcgatgtcgtcattccgattccggaatccagccgtccgagtgccatgcagcttgccaaccgtcttgggatcagtttcagggaagggttcgtcaagaatcgttatgtgggcagaacctttattatgccaggccagcaacaacgccggaaatcggtcaggcagaagctgaatgcgatcgaaatagaatttcgcggcaagaatatcctgctggtcgatgattccatcgtgcgtggaaccaccagtcgggaaatcgtccagatggcgcgtgaggctggtgccaacaaagtttactttgcttcggccgcacccccggtacgttttcctaatgtttacggtatcgatatgccaactcgtcaggaactgattgcaacagatcgaaccgatgaggaaatatgtcgtgaaatcggtgcggattatctggtttatcagaatctggatgcgctcaggcaggcaatcactcagatcgatccacagatcaggcattttgaaacatcctgtttcgatggacgatacatcgcaggcaatatcactcaggaatatctctgcagaatcgagtcacaacgcaacaatcccggcctgtctcagggtgagcgtactactcagcttgatttagctctgttatcaacggattaa

SEQ ID NO: 132249 - protein, 505 aa, Nitrosomonas europaea ATCC 19718
MCGILGVVARSPANQLLYDGLLMLQHRGQDAAGIVTAQGNSFHMHKGLGLVRDVFRTRDMRALPGYMGIGHVRYPTAGSSTSPAEAQPFYVNSPFGIVLAHNGNLTNAETLNQELFLADRRHVNTHSDSEVLLNVLAHELQERAVGYQLDLAEIFSAVAGVHERCQGAYAVIAMIAGYGLLAFRDPYGIRPLVFGSVETDAGTEYMVASESVALDTLGFRLIRDVAPGEAIFIDMEGHFYSHQCAALPSLNPCIFEYVYLARPDSMLDGISVYETRLNMGINLADKISTSMQHLDIDVVIPIPESSRPSAMQLANRLGISFREGFVKNRYVGRTFIMPGQQQRRKSVRQKLNAIEIEFRGKNILLVDDSIVRGTTSREIVQMAREAGANKVYFASAAPPVRFPNVYGIDMPTRQELIATDRTDEEICREIGADYLVYQNLDALRQAITQIDPQIRHFETSCFDGRYIAGNITQEYLCRIESQRNNPGLSQGERTTQLDLALLSTD

SEQ ID NO: 132250 - DNA, 1425 bp, Helicobacter hepaticus ATCC 51449
  CDS (1)..(1425): transl_table=11
atggaaagctggaacgaagagtgcgccattgtgggcgtatataatgttgataatgcagcactcttaagctattattcactctttgcaatgcagcatagggggcaggaagcaagtgggatttccgcaagtaatggcacaaaaatcacaactatcaaaaatactggtttagtaactaaaatttttacacaaaagcgacttgataaattgcaaggtcgctcaagtattggacacaatcgctattcaactgcaggtgaagattctataaatgacacacaacctatttttgcacgatatgatttaggcgaaatggcaatcgcacataatgggaatctcacaaatgccaaagaagtgcgcgagatgcttattaaagagggaacaatattccaaagctatcttgatactgaaaatctcattcatctgattgcacgaagtaaaaaaacatcgcttactgatagaatcattgatgctttaagctacattgatggagcgtattgctttgtatttctttcacggagcaaaatgtttgctattcgtgataggtatggattgcgcccacttagcttaggcaaaatacaaaacgaagacggaagcacaggctatgttgtagcgagtgaaagttgtgcatttgaccttataggtgcggaatttgtccgagatgtcaaagcaggtgagatgattatttttgatggagcgtatgcctttcaagattctcaacccaaaagtattcaagtctttgaaccaaaaccgcatttttgcgtatttgaatacatatattttgcacgtcctgatagcaatgtgtttggacataatgtctatcaagcacgcaaacaaatgggtatagagcttgctaaagaacatcaaattcaagcagatatggtaattcctgtgccagattctggtgtggctgcagctattggttatagtaagcaaagcggaattgattttgagctaggatttatccgcaatcactatgtaggaaggacatttattgagccaacgcagcaagagagagagcttaaagttcgccttaaactcaaccctatcagagaacttatagctaataaagatattattgtcattgatgattctgtggttagaggcacgacaagtaagcaaattattaaaatcttgcgtcaagcgggggcaagaaaaattcatctacttattagctctccgcctacgatttcgccgtgcttttatggtatagatacgcccaataaggagcaactcatttgtgctaataaaagtattgaagaagtgtgtaagcatatcggtgcagattctctaggttttctctcccttagcggtttgaccaaaagtataggcgaaaacaattctttatgcaaagcgtgttttgatggacattatattgatgattataccacaggtgcagcaatccctgccgctttaaaatcctctcattaa

SEQ ID NO: 132251 - protein, 474 aa, Helicobacter hepaticus ATCC 51449
MESWNEECAIVGVYNVDNAALLSYYSLFAMQHRGQEASGISASNGTKITTIKNTGLVTKIFTQKRLDKLQGRSSIGHNRYSTAGEDSINDTQPIFARYDLGEMAIAHNGNLTNAKEVREMLIKEGTIFQSYLDTENLIHLIARSKKTSLTDRIIDALSYIDGAYCFVFLSRSKMFAIRDRYGLRPLSLGKIQNEDGSTGYVVASESCAFDLIGAEFVRDVKAGEMIIFDGAYAFQDSQPKSIQVFEPKPHFCVFEYIYFARPDSNVFGHNVYQARKQMGIELAKEHQIQADMVIPVPDSGVAAAIGYSKQSGIDFELGFIRNHYVGRTFIEPTQQERELKVRLKLNPIRELIANKDIIVIDDSVVRGTTSKQIIKILRQAGARKIHLLISSPPTISPCFYGIDTPNKEQLICANKSIEEVCKHIGADSLGFLSLSGLTKSIGENNSLCKACFDGHYIDDYTTGAAIPAALKSSH

SEQ ID NO: 132252 - DNA, 1614 bp, Rhodopirellula baltica SH 1
  CDS (1)..(1614): transl_table=11
atggctgaattgaatcacgaatgcggcgttgccgcgatctaccacctttctggtcgcgggcgcagcccggtgtgcacggacgatggaccgcgacaaatttcgcgtctgttgccccgcatgttgctcgacatccaaaatcgcgggcagcttgccgctgggatgtccacgttcgaccccgatcgtcccgcgctgctgaaaacgcggcgtgatgtcggaacggtgacggaagtcttccgcctgaatcatcgggccaaagccgaatcgttgatgaaatcgctggccggtcgcgccgccatcggacacgttcgctacgccacctgtggcgccgatgaccggaactacgctcaacctttcgagcgacggcatatccataaacgcaaatggttcagcttctgcttcaatggccaactggccaattacacccttttgaagcagcggttgctcgccgatggcgatcaccacttggcactcgacaccgacaccgaaatcattctccacgagatcgctcgattgctatcgcagtcgcaggaacgagtcgactggatcgacgtcctgaaacaggtcacggccggtttcgacggtgcctactcaatggcattgttgaccgcagaaggtgagatgttggtcgctcgcgacccattgggcatcaaaccgatgtgctacatccacgaaggcccgctgtttgcctgtgccagcgaaagcgtcgctcttttgaatctcgggttcgaaccagatcaaattcgatcgttgcctcctggtcatgcgatcttgattgatcctgacgaaggtttccggatggaacgattcgcggaacccgaaacgcccaaacactgcttctttgaatggatctatttcgccaacgtcgccagcacgctggacgaccgaagcgtctatctttcgcgaaccaacttgggtcgtgaactggccaccgcggaacgtgagttcggtcgagttccgttggacgatccagacacgatcattgtgccggttcctgacaccagcaaagctgccgcagactcgatggcctatgaattatcgatcccatgccgcgaaggcttgatccgcaaccgatatgccgggcggacattcatcgaaggcggtcgcgctcgcaaagcaaaggcggcggcaaagtacacgccgcttcgcgaagtcttgcaagggaaacgagtcatcctggtggaggactccatcgttcgaagcacgaccatgaacgcgttgctggatcgtattcgtgacgttggtggcgcgaaggaaatccacgttcgcgtggcttgcccgccgatcgttgctccgtgcttctacggaatcgacatgagcacgatcgatcaattgatcgcgccgaagtacttctcgttgaccggtgaactggacgaagaatcgcagcaacggatggccgacgatctcggtgctgattcgctgcaatacttgccagtatccgcaatcgcacgagccatcaacttgccggaggaacacctctgtcaggcttgcgtgacgggcaaatacccaacgcctatcggccagcacctgtatcagattgcatgcgacaatcgtggggcgagagtcaacaatcagcgaacctacgagcaactcgctgcggctgttgccggacagtga

SEQ ID NO: 132253 - protein, 537 aa, Rhodopirellula baltica SH 1
MAELNHECGVAAIYHLSGRGRSPVCTDDGPRQISRLLPRMLLDIQNRGQLAAGMSTFDPDRPALLKTRRDVGTVTEVFRLNHRAKAESLMKSLAGRAAIGHVRYATCGADDRNYAQPFERRHIHKRKWFSFCFNGQLANYTLLKQRLLADGDHHLALDTDTEIILHEIARLLSQSQERVDWIDVLKQVTAGFDGAYSMALLTAEGEMLVARDPLGIKPMCYIHEGPLFACASESVALLNLGFEPDQIRSLPPGHAILIDPDEGFRMERFAEPETPKHCFFEWIYFANVASTLDDRSVYLSRTNLGRELATAEREFGRVPLDDPDTIIVPVPDTSKAAADSMAYELSIPCREGLIRNRYAGRTFIEGGRARKAKAAAKYTPLREVLQGKRVILVEDSIVRSTTMNALLDRIRDVGGAKEIHVRVACPPIVAPCFYGIDMSTIDQLIAPKYFSLTGELDEESQQRMADDLGADSLQYLPVSAIARAINLPEEHLCQACVTGKYPTPIGQHLYQIACDNRGARVNNQRTYEQLAAAVAGQ

SEQ ID NO: 132254 - DNA, 1413 bp, Wigglesworthia glossinidia endosymbiont of Glossina brevipalpis
  CDS (1)..(1413): transl_table=11
atgtgcggtgttattggaatttctggggttaattcaatttctcaatctatttatgatgctttaacagttttgcagcatcgtgggcaagattccgctggaattacaacgatagataagtttaattgttttcgtgtgcataaatctagtggattagtgaaagatgtttttaaaccaaatgatataaaatatttaaaaggtaaaatgggaattggtcatgtacgttatcccactaccagagaaaaaaatatatatgaagcccaaccactatatgtaaactctccttttggaattactttagctcacaatggtaatataataaatacaaaatttttaaaaaaacaattgttcgaaactcagagaaggcatataaatacaaattcagattctgaaattttattaaatatttttgcatctgaattaaatcaattccataattatcctttgcattatgaaaatattttttcagcaataaaaaatacacataaaagagtaaaaggagcatattcttgtgtaggaatgattataggacatgggttatttgcatttagagacccttatggaattagaccattagtattaggggaacgtactctttcatgcaaaaaagagtacataatagcatctgaaacagttgctttagatatattaggatttaaacatttacgtgatgttgctccaggagagggggtgttattaactaacagtggaaagcttttgaccaagcagtgttctttaacttcaaactattgcccttgtttatttgaatatatttatttttctagaccagattctattatagacaagatatctgtttacacagctagaatgaaaatgggacaaattttaggaaaaaaaatatctagagaatggaaaaatttgaatattgatgctgtaattcctataccagaaacatcttgtgatgtagcattagaaatagctcgaatattaaaaataccatataggcaaggatttgtgaaaaatagatatgtcggaagaacatttataatgtctaatccaagcattagaaaaaaatcaataagatataaatttaatgtaaataaagctgaattttacaaaaaacaagtactcttggtagatgattcgattgtaagaggaaatacatctaagcaaattgtagaaatggcaagagatgcaggtgcaaatagcgtatatttagcatcagcttctccggaaattagatttcccaacatatatggaattgatataccagattcagaagaactaatagcacatcaaaaatcattaaatgatataagaatatcgattaaagctgatgctttaatttttcaaaatcttaatgatttagaaaaatcccttaaaaaatttaatccaaaaataaaaaattttgaatcgtccatatttaatggaatatatccaacttctttaatataa

SEQ ID NO: 132255 - protein, 470 aa, Wigglesworthia glossinidia endosymbiont of Glossina brevipalpis
MCGVIGISGVNSISQSIYDALTVLQHRGQDSAGITTIDKFNCFRVHKSSGLVKDVFKPNDIKYLKGKMGIGHVRYPTTREKNIYEAQPLYVNSPFGITLAHNGNIINTKFLKKQLFETQRRHINTNSDSEILLNIFASELNQFHNYPLHYENIFSAIKNTHKRVKGAYSCVGMIIGHGLFAFRDPYGIRPLVLGERTLSCKKEYIIASETVALDILGFKHLRDVAPGEGVLLTNSGKLLTKQCSLTSNYCPCLFEYIYFSRPDSIIDKISVYTARMKMGQILGKKISREWKNLNIDAVIPIPETSCDVALEIARILKIPYRQGFVKNRYVGRTFIMSNPSIRKKSIRYKFNVNKAEFYKKQVLLVDDSIVRGNTSKQIVEMARDAGANSVYLASASPEIRFPNIYGIDIPDSEELIAHQKSLNDIRISIKADALIFQNLNDLEKSLKKFNPKIKNFESSIFNGIYPTSLI

SEQ ID NO: 132256 - DNA, 1458 bp, Prochlorococcus marinus subsp. marinus str. CCMP1375
  CDS (1)..(1458): transl_table=11
atgtgtggaatagtaggaatagtttctaataatcaaattaatcaaaagatttatgatagtttgcttttattacagcatagagggcaggactcaacaggaatagcaacgatggaaggaagtgtttttcacttacataaatctaagggtcaagttaaagaagcatatagaacaagagacatgagaattctgaccggcaatattggaattggtcatgtaaggtatgctacttcaggagaggcacatcgagaagatgaagcacaacctttttatgtaaatgcaccttatggaattattcttgtacacaatggaaatttgacaaatacgcgtgaattagaaaaagaactttttagtattgatagaagacatacgaattcctctagtgatacagaaatgcttttaaatgtattggcaactgaaattcagtctgaaaattatggaagttcattatctcccgaacatattttttctgctatatcatcattacataaaagagtagaaggtacatattcagcaattgcaatgattgctggttatggattacttgcttttagagatccatatggaataagacctttagtcttaggtaaaagagttttagataatggtaaaaccgaatggattgttgcaagtgaatctttggtattagaaaataatgattttgatgtagtacgagatgttgtacctggtgaagctatttttatttctaatgaaggagaattttattcaaaacagtgtgctgataatccacaattgtttccttgttcttttgaatatgtttatttggctcgaccagattctgtaatgaatggtatttctgtatatgaagctagattaaggatgggagattatcttgccaagacaattcaggaacaaattacttcgggcgaaattgatgtagttatgccaattcctgattcttctagaccatctgcgatgcaggttgcaagacaattaggtcttgagtatagagaaggattttttaagaatcgttatgtaggaaggacttttattatgcctggtcaggcacaaagaaagaaatctgtacgtcaaaaacttaatgcgatgagtagtgagtttaaaggaaaaaatgtattattagtcgatgattctatagttcgtggaactacatctcgagagattgtacaaatggcaaaattagcaggagctaataaagtaacctttacttctgcggcgcctccgatacgttttcctcatgtttatggtattaatatgccatcaaagatggagttaattgctcatgataaatctattgatcaaatacaagaaactttattggcagatggtttggtatatcaaaaaatatctgatttagagcaatctattttaaaaggttctcaagtgaaaaatcttgacctttcttgctttaatggtgaatatgtaactggaaaggttactgaagaatatttagcttgggtcggatctaaatattcttcttaa

SEQ ID NO: 132257 - protein, 485 aa, Prochlorococcus marinus subsp. marinus str. CCMP1375
MCGIVGIVSNNQINQKIYDSLLLLQHRGQDSTGIATMEGSVFHLHKSKGQVKEAYRTRDMRILTGNIGIGHVRYATSGEAHREDEAQPFYVNAPYGIILVHNGNLTNTRELEKELFSIDRRHTNSSSDTEMLLNVLATEIQSENYGSSLSPEHIFSAISSLHKRVEGTYSAIAMIAGYGLLAFRDPYGIRPLVLGKRVLDNGKTEWIVASESLVLENNDFDVVRDVVPGEAIFISNEGEFYSKQCADNPQLFPCSFEYVYLARPDSVMNGISVYEARLRMGDYLAKTIQEQITSGEIDVVMPIPDSSRPSAMQVARQLGLEYREGFFKNRYVGRTFIMPGQAQRKKSVRQKLNAMSSEFKGKNVLLVDDSIVRGTTSREIVQMAKLAGANKVTFTSAAPPIRFPHVYGINMPSKMELIAHDKSIDQIQETLLADGLVYQKISDLEQSILKGSQVKNLDLSCFNGEYVTGKVTEEYLAWVGSKYSS

SEQ ID NO: 132258 - DNA, 1521 bp, Bordetella parapertussis 12822
  CDS (1)..(1521): transl_table=11
atgtgtggaatcgtcggtgtcattgggcgcgggccggtcaaccagctgctctatgacagcttgctgctgctgcaacaccgggggcaggacgcggcgggcatcgccacgctgcagggcaaccacttcaacatgtacaaggcgcacggcctggtgcgcgatgtgttccgtacccgcaacatgcgcgcgctgccgggcaccagcggcgtgggccaggtgcgctatcccaccgccggctccagcgccagcgaggaagaggcgcagccgttctacgtcaatgcgccgttcggcatcatgttcgcccacaacggcaacctgaccaactggcgcgagctgcgcgagtcgctctaccgcgccgaccgccgccacatcaataccaattccgattccgaagtgctgctcaatgtgctggcgcacgagctgcaatcggccgccagcggcgtgtcgctcgacgatgacacgatctttcgcgctgtctccgcggtgcaccagcgcgtcaagggcgcctacgccgtggtggcgcagatctcgggctacggcatgctggcgtttcgcgatccccacggcatccggccgctgtgcatcggccgccaggagaccgaggaaggcgtggaatggatggccgcctcggaatccgtggcgctagaaggcagcggttttgccttcgtgcgcgacgtcgagcccggcgaggcgatattcgtcgacctcgacggccgcatgaccagccgccagtgcgccgacaatgcgcaactggtgccgtgtatcttcgagtacgtgtactttgcccgccccgattcgctgatcgacggcgtctcggtgtacgacgcgcgcctgcgcatgggcgaatacctggccgacaaggtcgcgcgcagcatgcgcctgggcgatatcgacgtggtgatgccgattcccgactcgtcgcgtccggccgccatgcagctggcgcaccggctggggctggactatcgcgaaggcctgatcaagaaccgctacgtgggccgtacgttcatcatgccgggccaggcggtgcgccgcaaatcggtgcgccagaaactgaacgccatcggcatggaattcaagggcaagaacgtgctgctggtcgacgattccatcgtgcgcggcaccaccagccgcgagatcgtcgacatggcgcgcgcggccggcgccaacaaggtgtatttcgcctccgcggcgcctccggtgcgattccccaacgtgtacggcatcgacatgccgacccagaaggaactgatcgccaccggccgcaccgatgacgaaatcgcccgcaccatcggcgccgacgcgctgatctaccaggacctgcaggacatgcagcaggcggtgcgtgacatcaatccgcgcctgagccgcttcgaggcatcgtgtttcgacggcgagtacgtgaccggcgacatcaccgccgaatacctggcccgcctgggccagtcgcgcgacagcagcgccggcgacgaagaggccggcggcctgcagttcaacatgggctacgcggccaacgacgcctga

SEQ ID NO: 132259 - protein, 506 aa, Bordetella parapertussis 12822
MCGIVGVIGRGPVNQLLYDSLLLLQHRGQDAAGIATLQGNHFNMYKAHGLVRDVFRTRNMRALPGTSGVGQVRYPTAGSSASEEEAQPFYVNAPFGIMFAHNGNLTNWRELRESLYRADRRHINTNSDSEVLLNVLAHELQSAASGVSLDDDTIFRAVSAVHQRVKGAYAVVAQISGYGMLAFRDPHGIRPLCIGRQETEEGVEWMAASESVALEGSGFAFVRDVEPGEAIFVDLDGRMTSRQCADNAQLVPCIFEYVYFARPDSLIDGVSVYDARLRMGEYLADKVARSMRLGDIDVVMPIPDSSRPAAMQLAHRLGLDYREGLIKNRYVGRTFIMPGQAVRRKSVRQKLNAIGMEFKGKNVLLVDDSIVRGTTSREIVDMARAAGANKVYFASAAPPVRFPNVYGIDMPTQKELIATGRTDDEIARTIGADALIYQDLQDMQQAVRDINPRLSRFEASCFDGEYVTGDITAEYLARLGQSRDSSAGDEEAGGLQFNMGYAANDA

SEQ ID NO: 132260 - DNA, 1521 bp, Bordetella bronchiseptica RB50
  CDS (1)..(1521): transl_table=11
atgtgtggaatcgtcggggtcattgggcgcgggccggtcaaccagctgctctatgacagcttgctgctgctgcaacaccgggggcaggacgcggcgggcatcgccacgctgcagggcaaccacttcaacatgtacaaggcgcacggcctggtgcgcgatgtgttccgtacccgcaacatgcgcgcgctgccgggcaccagcggcgtgggccaggtgcgctatcccaccgccggctccagcgccagcgaggaagaggcgcagccgttctacgtcaatgcgccgttcggcatcatgttcgcccacaacggcaacctgaccaactggcgcgagctgcgcgagtcgctctaccgcgtcgaccgccgccacatcaataccaattccgattccgaagtgctgctcaatgtgctggcgcacgagctgcaatcggccgccagcggcgtgtcgctcgacgatgacacgatctttcgcgccgtctccgcggtgcaccagcgcgtcaagggcgcctacgccgtggtggcgcagatctcgggctacggcatgctggcgtttcgcgatccccacggcatccggccgctgtgcatcggccgccaggagaccgaggaaggcgtggaatggatggccgcctcggaatccgtggcgctggaaggcagcggttttgccttcgtgcgcgacgtcgagcccggcgaggcgatattcgtcgacctcgacggccgcatgaccagccgccagtgcgccgacaatgcgcaactggtgccgtgtatcttcgagtacgtgtactttgcccgccccgattcgctgatcgacggcgtctcggtgtacgacgcgcgcctgcgcatgggcgaatacctggccgacaaggtcgcgcgcagcatgcgcctgggcgatatcgacgtggtgatgccgattcccgactcgtcgcgcccggccgccatgcagctggcgcaccggctggggctggactatcgcgaaggcctgatcaagaaccgctacgtgggccgtacgttcatcatgccgggccaggcggtgcgccgcaaatcggtgcgccagaaactgaacgccatcggcatggaattcaagggcaagaacgtgctgctggtcgacgattccatcgtgcgcggcaccaccagccgcgagatcgtcgacatggcgcgcgcggccggcgccaacaaggtgtatttcgcctccgcggcgcctccggtgcggttccccaacgtgtacggcatcgacatgccgacccagaaggaactgatcgccaccggccgcaccgatgacgaaatcgcccgcaccatcggcgccgacgcgctgatctaccaggacctgcaggacatgcagcaggcggtgcgtgacatcaatccgcgcctgagccgcttcgaggcatcgtgtttcgacggcgagtacgtgaccggcgacatcaccgccgaatacctggcccgcctgggccagtcgcgcgacagcagcgccggcgacgaagaggccggcggcctgcagttcaacatgggctacgcggccaacgacgcctga

SEQ ID NO: 132261 - protein, 506 aa, Bordetella bronchiseptica RB50
MCGIVGVIGRGPVNQLLYDSLLLLQHRGQDAAGIATLQGNHFNMYKAHGLVRDVFRTRNMRALPGTSGVGQVRYPTAGSSASEEEAQPFYVNAPFGIMFAHNGNLTNWRELRESLYRVDRRHINTNSDSEVLLNVLAHELQSAASGVSLDDDTIFRAVSAVHQRVKGAYAVVAQISGYGMLAFRDPHGIRPLCIGRQETEEGVEWMAASESVALEGSGFAFVRDVEPGEAIFVDLDGRMTSRQCADNAQLVPCIFEYVYFARPDSLIDGVSVYDARLRMGEYLADKVARSMRLGDIDVVMPIPDSSRPAAMQLAHRLGLDYREGLIKNRYVGRTFIMPGQAVRRKSVRQKLNAIGMEFKGKNVLLVDDSIVRGTTSREIVDMARAAGANKVYFASAAPPVRFPNVYGIDMPTQKELIATGRTDDEIARTIGADALIYQDLQDMQQAVRDINPRLSRFEASCFDGEYVTGDITAEYLARLGQSRDSSAGDEEAGGLQFNMGYAANDA

SEQ ID NO: 132262 - DNA, 1461 bp, Prochlorococcus marinus subsp. pastoris str. CCMP1986
  CDS (1)..(1461): transl_table=11
atgtgtggaattgttggaattgtttcttgtgatgatgtaaatcaacagatttatgacagtcttttgctacttcagcatagaggtcaagattcaactggaatagctacaatggaaaatactgtttttcatatacataaagctaaaggacaagtaaatactgcttatagaacaagagatatgagaaatttaataggaaaaattggtttagggcatgttaggtacgcaactaaaggttcagcagaaagtgttgaagaagcacaacctttctatgttaatgctccttatggaatagttttgattcataatggaaaccttactaatacaagagacctagagaaacaattatttaatgtagataaacgccatactaattcttcaagtgatactgaaatgttgttaaacatattcgccactgaattacaagaacagatccataatcaagatctagagccagatataatttttaatgcagttaaaaatttacataaaagaattcaaggttcatatgcttcaattgctttaatttcagggcatggtttattagcttttagagatccttttggtataaggcctttagtaattggaaaaagaatttctcttattactcaaaaggaagagtggatggtagctagtgagtctttagtattagaaaataatgattatcatgttgttagagatgtggaacctggcgaggcaatttttataaccaataatggtgaatttttttcaaagcaatgctcagaaaacccaaggttatttccttgtgcttttgaatatgtttatttagctagaccagattcagtgatgaatggaatttcagtttatcaagcacgtttgaaaatgggtgattatttagctgaaacaattaagcaatcaatacagtgtggggatgtcgatgtggtaatgcctattcctgattcttcacgtcctgcggcaatgcaagttgctaggcagttggggatagagtatagagaaggtttttttaaaaatagatacgttggaagaactttcataatgcctggccatcaaaaacgtaaacaatctgtaaggcaaaagttgaatgctatgagtacagaatttaaaaataaaaatgtactaatagtcgatgattctatagtgagaggaactacatcaaaacaaatagtgcaaatggcaaaagatgctggtgcaaataaagttttttttacttcagcagctcctccagttagatatcctcatgtttatggaattaatatgcctaatagagatgaattaattgctcatgatagatcaataattgaaatagcagaaaagcttgaaatagatcatcttgtatatcaaagtgttgaaaatttgagaaaatctataattaatgattctcccattcaagaattagaaatgagttgttttactggttcttatgttactgggacggtaaatcaagaatatttaaaatgggttgaaaatgaatataattcttaa

SEQ ID NO: 132263 - protein, 486 aa, Prochlorococcus marinus subsp. pastoris str. CCMP1986
MCGIVGIVSCDDVNQQIYDSLLLLQHRGQDSTGIATMENTVFHIHKAKGQVNTAYRTRDMRNLIGKIGLGHVRYATKGSAESVEEAQPFYVNAPYGIVLIHNGNLTNTRDLEKQLFNVDKRHTNSSSDTEMLLNIFATELQEQIHNQDLEPDIIFNAVKNLHKRIQGSYASIALISGHGLLAFRDPFGIRPLVIGKRISLITQKEEWMVASESLVLENNDYHVVRDVEPGEAIFITNNGEFFSKQCSENPRLFPCAFEYVYLARPDSVMNGISVYQARLKMGDYLAETIKQSIQCGDVDVVMPIPDSSRPAAMQVARQLGIEYREGFFKNRYVGRTFIMPGHQKRKQSVRQKLNAMSTEFKNKNVLIVDDSIVRGTTSKQIVQMAKDAGANKVFFTSAAPPVRYPHVYGINMPNRDELIAHDRSIIEIAEKLEIDHLVYQSVENLRKSIINDSPIQELEMSCFTGSYVTGTVNQEYLKWVENEYNS

SEQ ID NO: 132264 - DNA, 1506 bp, Synechococcus sp. WH 8102
  CDS (1)..(1506): transl_table=11
gtgaggcagaatcctgaaggaagtctgaagtcgaggcgctcagtgcatgtgctgaaggcagagcgtcccgatcggatggaagaggcctgcggtgtcttcgccgttctggccggggaacaaccggtggcgaacctggcttatttcggtctgtatgccctgcagcatcgaggccaggaatcggctggcatcgcggtgttcaacgaaggcaaggttcgccttcataaggacatgggcctggtcagccaggtgtttgaccaggacgtgctggcccgcatgcctggagacctggccatcggccacaaccgctactccaccacgggcagcagccgggtgtgcaatgcccagcctgtggtgttgatgacgcggctgggggcctttgctttggcccacaacggcaacctggtgaatgcccgcgaattgcgggagttggtggacgacggacaggcggagttcacctcaacaacggattcggaactgatcgccttcgctgtgcagcaggcggtggatcgtgggctcgactggtcagatgccatagaggccgcgctcaagctgtgtcggggtgcgttcagccttgccatcggaacgccggatggtctgtttgctgtacgcgacggtcatggcatccgtcctttggtgttcggcacgctgggggatccagccactggtcattgggtggtgagcagtgagacctgtggcttggagatcatcggcgcccgctatgtcgatgatgtccagcccggtgaattggtccggtttgaactcggatcagcagagcctcagcgtcggcgttggagtgaggaaccgaaccgcctgtgcgtgttcgagatgatttatttcgccaggccggacagtcagttcttcggcgagtccctctacagctaccgccagcgcattggacgaacccttgctcgcgagtcgtgcgtggaggctgatctggtgatcggtgtcccagattccggcattcctgcagccattggtttttctcaggaaagtggcatcccctacggcgatggtctgatcaagaaccgttatgtcggccgtactttcatccagcccacccaggcgatgcgggaagcgggcattcgggtgaaactcaaccctctgccggatgtgctggccggaaagcgcttgatcgtgattgatgactcgatcgtgcgtggcaccaccagccgcaaattggtggtggcgttacgggatgccggtgccactgaagtgcacatgcggatcagttcgcctccggtgacgcatccctgcttttacgggatcgacaccgacacccaggatcaactgatcgccgctcagatgacccttgagcagatcaaggatcacctcaaagtggattctctggcttacctcagcaaggaaggaatgctcgaggctgcgaaggctgagtccggccatttctgcagcgcctgttttgacgggcaatacccgatccccatggatcagacgttgctgtccagcaaattgatgatggagcctgcggggattgctgcgacgtcttga

SEQ ID NO: 132265 - protein, 501 aa, Synechococcus sp. WH 8102
MRQNPEGSLKSRRSVHVLKAERPDRMEEACGVFAVLAGEQPVANLAYFGLYALQHRGQESAGIAVFNEGKVRLHKDMGLVSQVFDQDVLARMPGDLAIGHNRYSTTGSSRVCNAQPVVLMTRLGAFALAHNGNLVNARELRELVDDGQAEFTSTTDSELIAFAVQQAVDRGLDWSDAIEAALKLCRGAFSLAIGTPDGLFAVRDGHGIRPLVFGTLGDPATGHWVVSSETCGLEIIGARYVDDVQPGELVRFELGSAEPQRRRWSEEPNRLCVFEMIYFARPDSQFFGESLYSYRQRIGRTLARESCVEADLVIGVPDSGIPAAIGFSQESGIPYGDGLIKNRYVGRTFIQPTQAMREAGIRVKLNPLPDVLAGKRLIVIDDSIVRGTTSRKLVVALRDAGATEVHMRISSPPVTHPCFYGIDTDTQDQLIAAQMTLEQIKDHLKVDSLAYLSKEGMLEAAKAESGHFCSACFDGQYPIPMDQTLLSSKLMMEPAGIAATS

SEQ ID NO: 132266 - DNA, 1530 bp, Chromobacterium violaceum ATCC 12472
  CDS (1)..(1530): transl_table=11
atgtgtggaattctaggcgtggtcggtcagtcgccggtcaatcagctgctgtacgacggtttgcaggtgttgcaacatcgcggacaggacgcggccggtatcgttaccgccaatggcaagacctttcacatgcacaaaggcagcggcatggtgcgcgacgtgttccgcacccgcaacatgcgttcgctgctgggcaacgccggcatcgcccacgtgcgctacccgacggccggctcggcctcctgcctggcggaggcccagccgttctacgtcaactcgcccttcggcatcgtgctggcgcacaacggcaacctgaccaataccgatgagctgaaggcggacatgttccgcaacgacctcaggcacatcaacaccaattcggactccgaagtgctgctgaacgtgttcgcccacgaagtggctcaacgcgtgacgggccacgagctgactgtggacgcggtgttcggcgcggtggccgccgtgcatcgccgcgtcaagggcgcttacgcggtggtggcgatgatcgccggcttcggcctggtggccttccgcgaccccaacggcatccgcccgctggtgatgggctgcaccgagaccgacggcaagaccgagtacatgttcgcgtccgagtcggtggcgctggactgttcgggcttttcgctgctgcgcgatgtgcagccgggcgagtgcgtgtacgtgaccttcgacggcgacatgcacagccaggtctgcgccgaaaacacccgtctggcgccctgcctgttcgaatacgtgtacttcgcccgcccggattcggtgatcgacggcgtgtcggtctaccagtcgcgcctgaacatgggcgagacgctggcggagaagatccgccgcgatctgccgggcctggacatcgacgtggtgatcccgattcccgactccagccgccagagcgcgctgcaacttgccaacgcgctgggcctgccgtaccgcgagggcttcatcaagaaccgctacatcggccgaaccttcatcatgcccggccaggcggtgcgcaggaaatcggtgcgccagaagctgaacccggtgccgctggagttcgccggccgcaacgtgctgctggtggacgattccatcgtccgcggcaccacgtccaaggaaatcgtgcagatggcgcgcgattccggcgccaagaaggtctatttcgcgtcggccgcgccggcggtgcgcttccccaatgtctacggcatcgacatgcccacccgggcggagctgctggccaccggccgcgacgaggccgagatcgcgcgcgagatcggcgccgacgcggtgatttaccaggacctggccgcgctgaaggatgcggtgagcagcgtcaaccgcgagctgaagctgttcgagagttcctgcttcgacggcgaatacatcaccggcgacatcaccgcggcctacctggacgccatcgagtgcgcgcggctggacctgaaacacaaggaagacggcagcgagcagatgatcgatctcaacctgaacgtggcggagcagaatctgatctga

SEQ ID NO: 132267 - protein, 509 aa, Chromobacterium violaceum ATCC 12472
MCGILGVVGQSPVNQLLYDGLQVLQHRGQDAAGIVTANGKTFHMHKGSGMVRDVFRTRNMRSLLGNAGIAHVRYPTAGSASCLAEAQPFYVNSPFGIVLAHNGNLTNTDELKADMFRNDLRHINTNSDSEVLLNVFAHEVAQRVTGHELTVDAVFGAVAAVHRRVKGAYAVVAMIAGFGLVAFRDPNGIRPLVMGCTETDGKTEYMFASESVALDCSGFSLLRDVQPGECVYVTFDGDMHSQVCAENTRLAPCLFEYVYFARPDSVIDGVSVYQSRLNMGETLAEKIRRDLPGLDIDVVIPIPDSSRQSALQLANALGLPYREGFIKNRYIGRTFIMPGQAVRRKSVRQKLNPVPLEFAGRNVLLVDDSIVRGTTSKEIVQMARDSGAKKVYFASAAPAVRFPNVYGIDMPTRAELLATGRDEAEIAREIGADAVIYQDLAALKDAVSSVNRELKLFESSCFDGEYITGDITAAYLDAIECARLDLKHKEDGSEQMIDLNLNVAEQNLI

SEQ ID NO: 132268 - DNA, 1884 bp, Porphyromonas gingivalis W83
  CDS (1)..(1884): transl_table=11
atggaacctctgaaacatgaatgcggtatcgccatggtgcgactgcgcaaaccgctgagttattatcacgataagtatggcacatggatgtatggcctgaacaagctatacctcctgatggagaagcagcacaatcgaggtcaggaaggtgccgggctcgctgtggtgaagctcaacagccgtcccggagaagaatacctcttcagagaaagagcacttggggcaaatgccatctcggagatattcgactcggtacacaaggattttcaggcttattctcgagaagagctgggcgatgccgaatttgctgcctctcagataccgtatgccggagagtgctacatgggacacttgcgctacagcactaccggaaagagcggtctgactttcgtccatccgatgatacgccgcagcaactggcgtgccaagtgcttgtccatttgcggcaatttcaatctgaccaatgtggatggcatcttcgacgaaattacctctgtcggacagcatccgcgcaatatgtccgatacgcatatcctgctggagcagatcggtcatcgtctggatcgcgaggtggagcgtttgttccgtatcgggaaagaacagaatctgaaaggaatggacatcacgcattttatagaagagcgtatcgatttgtccaatgtgctcaagaagtgcagtcccttctgggatggcggatatgtcatgtgcggcctcaccggaagtggagagagctatgcagtgcgcgatccttggggcatccgacctgcattctattatatagacgatgagatcgtggtcacggcctcggagcgtcccgttatccaaactgtgatgaatctgtcggcagaggccgttcgggagttgatgcccggagaagctatctttgtcaatagcaagggagaacctcgtatcgagcgtatcttggagactaagaattatcaggcctgttcgttcgagcgtatctatttctctcgtggcagtgatcaggatatatatcgtgagagaaaggctctggggtatctgctttcggaacgcatcctccgagcgatcgattacgacatctcccatactgtcttttcattcatcccgaatacagccgaagtggcatattatggtatgttggagggcatagatcattatttggatgaatgcaagattcgagagattcgcgagaacccgaatatgagtgaagccaagttgcgtgagattctaggacgaaaggttcggtcggagaaggtggcgatcaaagacatcaagctcagaacttttattacggaaggcaatagccgcaacgatttggcggctcatgtctatgatattacctatggcacggtacaagccggcgtagacaatttggtcgtgatcgatgacagtatcgtccgtgggactactctgcggcagagcatcatcggtatcatggataggttgcaacctaagaagatcgtcattgtttccagctctccgcagattcgttatccggactactatggtatcgatatgcgtaagatgcgcgaatttgtcgctttccgctccgctgtggcacttcttcaggagcgcggtatggagcaagtgttgcacgatgcctatgcaaaagctttagagcttcggaagttgagttccggacaggaggtcgaaaatgtcgttaagactatctataagcctttcacggccgaggagatttcagccaagatggtagagctattgaagccggaaggcgtgcgtgccaaggtggagatcgtatatcaaagtttggaaggcttgcatcaggcgataccgaatcatccgggagactggtatttctccggcgattatccgacacccggaggcgctcatttggtaaatgaagcttttatcagctacatggaagaggactatggcaaataa

SEQ ID NO: 132269 - protein, 627 aa, Porphyromonas gingivalis W83
MEPLKHECGIAMVRLRKPLSYYHDKYGTWMYGLNKLYLLMEKQHNRGQEGAGLAVVKLNSRPGEEYLFRERALGANAISEIFDSVHKDFQAYSREELGDAEFAASQIPYAGECYMGHLRYSTTGKSGLTFVHPMIRRSNWRAKCLSICGNFNLTNVDGIFDEITSVGQHPRNMSDTHILLEQIGHRLDREVERLFRIGKEQNLKGMDITHFIEERIDLSNVLKKCSPFWDGGYVMCGLTGSGESYAVRDPWGIRPAFYYIDDEIVVTASERPVIQTVMNLSAEAVRELMPGEAIFVNSKGEPRIERILETKNYQACSFERIYFSRGSDQDIYRERKALGYLLSERILRAIDYDISHTVFSFIPNTAEVAYYGMLEGIDHYLDECKIREIRENPNMSEAKLREILGRKVRSEKVAIKDIKLRTFITEGNSRNDLAAHVYDITYGTVQAGVDNLVVIDDSIVRGTTLRQSIIGIMDRLQPKKIVIVSSSPQIRYPDYYGIDMRKMREFVAFRSAVALLQERGMEQVLHDAYAKALELRKLSSGQEVENVVKTIYKPFTAEEISAKMVELLKPEGVRAKVEIVYQSLEGLHQAIPNHPGDWYFSGDYPTPGGAHLVNEAFISYMEEDYGK

SEQ ID NO: 132270 - DNA, 1377 bp, Wolinella succinogenes DSM 1740
  CDS (1)..(1377): transl_table=11
gtggaaacattgagagattggaacgaagagtgcgcggttgtaggggtttataacgctgatacagcggcgagtgtggcctactattcactattttcaatgcagcatcgagggcaggaggcgagcggaattagcagctctacaggtgagaaactcatcaccatcaaggatcgagggctggtgacggcagtttttggagatgataagctcaaaaaactcaaagggcgatcggccgtaggtcacaaccgctactccacggcgggagaagattctattttggatgcccagcctgtatttgcgcgatatgatttgggtgaaatcgcgattgtgcataatggcaatctgaccaatgccaagcagattcgagaggatttgatccaaaaaggggcaatcttccagagctttatggatacggagaatctcatccatctcatcgctaaaagccaaaaagagaagctcattgatcgaatcattgacgcggtgcacaaaatagagggggcctactctctgatctttttaagtcgcaaaaagatgttcgcgattagagatccacatggttttaggcctttgagtttagggcgtatcaaaaacagcgatggtagttttggctatatggtcgcgagtgaaacctgcgcctttgatcttgtgggggcagagtatattcgagatgttgagccaggcgaaatgctcgtgtttgaggcagaaggagagccaagaagctacaaaatttttgaaaaacaacctcgtccctgtatttttgaatttgtctattttgctagacccgatagccgtgtgtttggacacaatgtctatgaggtacgcaaaaacatgggacaagagctcgctagagagaaacccattgaagcagacatggtgattcctgtgcctgatagcggggtggctgcagccattggatatgcaagagagagcgggattccttttgagcttggaattgttcgtaaccattatgtgggaagaacctttattgagcccacgcaacagagccgagagctaaaagtcaaactcaaactcaaccccattaaggagctcatccagggcaagcgtctcattgtgattgatgatagcatcgtgagagggacaactagtcggcagatcgtgagaatcttgcgtgcagcgggcgctaaagaggttcatatgaagatcagctcccctcccactatctccccttgctactatggggtcgatacgcctgataaatctcagctcatctgcgccaatatgacgctagaggagacctgccgctttatcgaagccgattctctctctttcctctctcttgaggggcttagacgcagtattcaatgcgatgagcgagagcttttttgtcaagcatgctttgacggaaaatatatagtctaa

SEQ ID NO: 132271 - protein, 458 aa, Wolinella succinogenes DSM 1740
METLRDWNEECAVVGVYNADTAASVAYYSLFSMQHRGQEASGISSSTGEKLITIKDRGLVTAVFGDDKLKKLKGRSAVGHNRYSTAGEDSILDAQPVFARYDLGEIAIVHNGNLTNAKQIREDLIQKGAIFQSFMDTENLIHLIAKSQKEKLIDRIIDAVHKIEGAYSLIFLSRKKMFAIRDPHGFRPLSLGRIKNSDGSFGYMVASETCAFDLVGAEYIRDVEPGEMLVFEAEGEPRSYKIFEKQPRPCIFEFVYFARPDSRVFGHNVYEVRKNMGQELAREKPIEADMVIPVPDSGVAAAIGYARESGIPFELGIVRNHYVGRTFIEPTQQSRELKVKLKLNPIKELIQGKRLIVIDDSIVRGTTSRQIVRILRAAGAKEVHMKISSPPTISPCYYGVDTPDKSQLICANMTLEETCRFIEADSLSFLSLEGLRRSIQCDERELFCQACFDGKYIV

SEQ ID NO: 132272 - DNA, 1437 bp, Gloeobacter violaceus PCC 7421
  CDS (1)..(1437): transl_table=11
atgacctacgctgcaccctctgctcccgacaagcctgaggaggcttgcggggtcttcggcatcctggcgccgggcgaagccgtcgccaaattgacctacttcggtctgttcgcgctccagcatcgcggccaggagtccgcggggatcgctgtgctcgacggcgaccgtctaacgatgcacaaggacatgggtctggtctcccaggtctttgacgaggcactgctaaacgagctgcaggggcaattggccgtgggccacacccgctactcgaccaccggctccagccgcaaggtaaacgcccagccggtcgtctcccgcacgcgcctcggtccggtcgtcctcgcccacaacggcaacctggtcaacgccgcccagttgcgcgaagagttgctcgcccgcgagcacaccctgctggccaccaccgattccgaagagattgtccacgccatcggcgaggcggtcgacgacggcaagggttgggtcgaggggaccgttcacgccctcaagcgctgccgcggcgccttcagcctggtgatcggcaccccggcggggctgatgggcacccgcgacgccaacggcgtgcgtccgctggtcatcggcaccctcaagggccgctacgtgctcgcgagtgagacctgcgccctcagcatcatcggtgcgaaatacctgcgcgacgtcgagcccggcgaactggtgttcatcaccgaatcgggcctggagtcccaccactgggcgaaacccgaaccgcggatgtgcatctttgagatgatctattttgcccgccccgattcgcgcgtgaacgccgagagcctctacacctaccgcgagcgcctgggcgagatcctcgctcaggaggcccctgtggaggcggacgtcgtcatcccggtccccgactcgggtacccccgccgccatcggctacgcccgcgcctccggcattctcttccagcaaggtctcatcaagaatcactacgtaggccgcacgttcatccaacccacccagacgatgcgcgaggcgggcatcaagatgaagctcaatccgttgcccgacgtcatcgaaggcaagcggatcgtaatcgtcgacgattcgatcgtgcgcggcaccaccagccgcaagattgtccaggccctgcgcgacagcggtgcgcgcgaggtgcacatgcgtatctcctcgcccccggtcacccatccctgtttctacggcatcgacaccgactcgcaggaccagttgattgccgccaccaagagcgtggatgaaattgcccggcacatcgaggtggacagccttgcctacttgagtgtcgaagggatgctcaaggcgacccgcaccgacggccagggcttttgcaccgcctgcttcaccggcgattacccgattccgattcctgatgcgatccgccgcaccaaactggtgctcgaaaaaaccgcagccagctga

SEQ ID NO: 132273 - protein, 478 aa, Gloeobacter violaceus PCC 7421
MTYAAPSAPDKPEEACGVFGILAPGEAVAKLTYFGLFALQHRGQESAGIAVLDGDRLTMHKDMGLVSQVFDEALLNELQGQLAVGHTRYSTTGSSRKVNAQPVVSRTRLGPVVLAHNGNLVNAAQLREELLAREHTLLATTDSEEIVHAIGEAVDDGKGWVEGTVHALKRCRGAFSLVIGTPAGLMGTRDANGVRPLVIGTLKGRYVLASETCALSIIGAKYLRDVEPGELVFITESGLESHHWAKPEPRMCIFEMIYFARPDSRVNAESLYTYRERLGEILAQEAPVEADVVIPVPDSGTPAAIGYARASGILFQQGLIKNHYVGRTFIQPTQTMREAGIKMKLNPLPDVIEGKRIVIVDDSIVRGTTSRKIVQALRDSGAREVHMRISSPPVTHPCFYGIDTDSQDQLIAATKSVDEIARHIEVDSLAYLSVEGMLKATRTDGQGFCTACFTGDYPIPIPDAIRRTKLVLEKTAAS

SEQ ID NO: 132274 - DNA, 1518 bp, Photorhabdus luminescens subsp. laumondii TTO1
  CDS (1)..(1518): transl_table=11
atgtgcggtattgttggtatcgtcggttttacaccggttaaccagtcgatttatgatgcgttgacggtgcttcagcaccgtgggcaagatgctgcgggcattgctactattgatggtaacaatggatttcgtttacgcaaagccaatggcttagtgagagacgtgtttgaagcccggcatatgctgcgtttacagggaacgattgggattggtcatgttcgctatccgacagcgggcagttccagtgcatcggaagctcaaccgttttatgtgaactctccatttggtattacattgacacacaatggtaatttgacgaatgctcatgagttgaagaaaaagttgtttgagaatgcccgtcgccatgtgaatactacgtcagattctgagattttgctcaacgtttttgccagtgaactggattgctcccagcattatccattggtgcctgacaatatttttgcggcagtagcggcaatgcataaacaggtgagtggtgcttatgcctgcattgcgatgattattggtcatgggttagttgctttccgtgatccgcatggtattcgtccgttggttttaggtaagcgcactttggatgatggccgtaatgagtatatggtcgcttctgaaagcgttgcattagatacgctaggctttgaattcctgcgggatgttgcatcaggtgaagcgatttatattactgaacaaggtcagttatttactcgtcaatgtgctgaaaatccttctctgactccctgtttatttgaatttgtctatttggctcgcccagattcctttattgataaaatttcggtttataacgcccgcatacggatggggcataagctaggggcgaaaattgcccgcgaatgggaagacttacatattgatgtggttattccaatccccgaaacatcttgcgatgttgcgttagaaattgcgcgcatactcggtaaaccctatcgtcagggatttgtgaaaaaccgttatgttggccggacatttatcatgcctgggcaacaggaacgccggaaatcagtccgccgtaaattgaatgctaatcgcgcagaattccgtgataaaaatgtgctattggtggatgattctattgtgcgtggtacaacgtcagaacagattgtcgatatggctcgtgaagccggcgcgaagagagtttatcttgcttcggcagcaccggaagtacgtttcccgaatgtttatggcattgatatgcccaatgcaaatgaactgattgctcatgggcgtgaagtggatgaaattcgccaacttattggtgcagatgcattgatatttcaggatttaactgatctgatcgacgctgttcgtgaagaaaacccggatgttgacgggtttgagagttcagtattcaatggtgtttatgttaccaaagacgttgaccagacttatctctattatctggagaatctgcgtaaagacgatgaagtaaaactgaataatcagaatgaagttgaaaatctggatatctataatgaaggttga

SEQ ID NO: 132275 - protein, 505 aa, Photorhabdus luminescens subsp. laumondii TTO1
MCGIVGIVGFTPVNQSIYDALTVLQHRGQDAAGIATIDGNNGFRLRKANGLVRDVFEARHMLRLQGTIGIGHVRYPTAGSSSASEAQPFYVNSPFGITLTHNGNLTNAHELKKKLFENARRHVNTTSDSEILLNVFASELDCSQHYPLVPDNIFAAVAAMHKQVSGAYACIAMIIGHGLVAFRDPHGIRPLVLGKRTLDDGRNEYMVASESVALDTLGFEFLRDVASGEAIYITEQGQLFTRQCAENPSLTPCLFEFVYLARPDSFIDKISVYNARIRMGHKLGAKIAREWEDLHIDVVIPIPETSCDVALEIARILGKPYRQGFVKNRYVGRTFIMPGQQERRKSVRRKLNANRAEFRDKNVLLVDDSIVRGTTSEQIVDMAREAGAKRVYLASAAPEVRFPNVYGIDMPNANELIAHGREVDEIRQLIGADALIFQDLTDLIDAVREENPDVDGFESSVFNGVYVTKDVDQTYLYYLENLRKDDEVKLNNQNEVENLDIYNEG

SEQ ID NO: 132276 - DNA, 1515 bp, Vibrio vulnificus YJ016
  CDS (1)..(1515): transl_table=11
atgtgtggtattgttggaatcgtgggcacaacccctgtaaaccagtcaatttatgacgcgttaacagtgttacagcatcgtggccaagatgccgctggtatttgtaccatagaaagcaatcgttttcgtctgcgtaaggcaaacggtctggtcaaagatgtgtttgaagcaaaacacatgcaacgtcttcaaggcaacgtcggcattggtcatgtacgctatccaacggccggtagttcaagtgcttcagaagcacagcctttctacgttaactcgccatttggcattagcttagcgcacaacggcaacctgactaacgcgcatgaagttcgtcagaaattgttcgaaaaagatcgccgccatgtgaataccacctcagactccgaagttcttcttaacgttcttgctcatgaaattgatacagtaaaaggcaacgttactgccgatgatgtcttccgagccatcgccaatgtccatcgtaccattcgtggtgcttacgccgttacagcgatgatcatcggtcacggtatgattgcctttcgcgacccacatggtattcgtccactttgcttaggtaagcgcgaagagaacggacaaacggaatacatggtggcgtcagaatcagtagcgctggatgcggttggctttgattttgtgcgtgacgtcgcaccaggtgaagcgatttacgcgacttttgacggtgaactctttaccaagcagtgtgctgacaatccaaaactcaacccgtgcatttttgagttcgtttactttgcacgccctgattcgtttatcgacaaaatttctgtctatagtgcgcgagtcgaaatgggtaaaaagttgggtgagcgtattaaagaagagtacgccgatcttgatattgacgttgtcattcccattccagagacctcttgtgatatcgcactgcaaatcgctcaagcgattgataagccgtaccgccaagggtttgttaaaaaccgctatgttggccgtacctttatcatgccgggccagcaattgcgtaaaaaatcggtacgtcgcaagctcaatgccattcgctctgaattcaaagataagaatgtactgttagtggacgactcaattgtacgtggcaccacttctgagcaaattatcgaaatggcgagagactcaggcgcgaagaaagtgtttattgtctctgctgcacccgaggtgcgtttcccgaacgtttacggcattgatatgccaagcgcaactgagcttattgctcatggacgagataacgagacgatctgtaagctgattggtgctgacgcgctgattttccaaaaactggaagatttagtggatgcggtgggcttgggtaaccttgatattaccaagtttgatacttcggtgtttaacggcgaatacgtgacgggtgatattgatcagcaatacctcgatttcctagattcgatgcgtaacgatgatgcaaaggttcagcgcgagattcaacaagatctggctaacctagagttgcataacgaaggtgcgtaa

SEQ ID NO: 132277 - protein, 504 aa, Vibrio vulnificus YJ016
MCGIVGIVGTTPVNQSIYDALTVLQHRGQDAAGICTIESNRFRLRKANGLVKDVFEAKHMQRLQGNVGIGHVRYPTAGSSSASEAQPFYVNSPFGISLAHNGNLTNAHEVRQKLFEKDRRHVNTTSDSEVLLNVLAHEIDTVKGNVTADDVFRAIANVHRTIRGAYAVTAMIIGHGMIAFRDPHGIRPLCLGKREENGQTEYMVASESVALDAVGFDFVRDVAPGEAIYATFDGELFTKQCADNPKLNPCIFEFVYFARPDSFIDKISVYSARVEMGKKLGERIKEEYADLDIDVVIPIPETSCDIALQIAQAIDKPYRQGFVKNRYVGRTFIMPGQQLRKKSVRRKLNAIRSEFKDKNVLLVDDSIVRGTTSEQIIEMARDSGAKKVFIVSAAPEVRFPNVYGIDMPSATELIAHGRDNETICKLIGADALIFQKLEDLVDAVGLGNLDITKFDTSVFNGEYVTGDIDQQYLDFLDSMRNDDAKVQREIQQDLANLELHNEGA

SEQ ID NO: 132278 - DNA, 1482 bp, Corynebacterium diphtheriae NCTC 13129
  CDS (1)..(1482): transl_table=11
ttgacagaccttgacgaccgcggcgaacagtctccgcgcgaggaatgtggcgtttttggtgtgtgggctccaggcgaagaagtatccaagctcacctattttggacttttcgccctgcagcaccgtggacaagaagctgcgggaatcgccgtaggtgacggcgatcaagtcgtggtatttaaagacttggggcttgtgtcccaggtgtttgacgaacctaccttggaatccctcagcggagacgtggccatcggccacacccgctattccaccgcaggtggagtgatgtgggaaaactcccaaccaatgttccgtgtaaccccagaaggaaccgatgtggcgctgtgccacaacggcaatctggtgaactacctcgagctcatggcagaagccgccgagcacgatttggtaaaacctgacactgagccctccgattccgatgtgatgacagccctgctggcacacggagtatcggagggtacatctttgcttgattccgcccgagcactcctgccgcgtatgcgtggtgcgttctgcttgacctttaccgatggtcacaccatgtatgctgctcgtgacccatggggcgttcgccctctcgtactgggtcgtctcgagcgcggctgggtggttgcctcagaaacgtgtgcactcgacatcgtgggtgcgtcgtttgttcgcgagatcgagccaggtgagctcgttgctatcgacggcgccggcatccgtagcgaacgttttgcacaaccgcaacgcaaaacctgtgtttttgagtatgtgtaccttgctcgcccagactccacaatccacggccgcaacgtcaacgcaacccgtatggagatcggacgaaggctagcacaggaatcgcctatcgacggcgaccttgtcatcccagtcccagaatccggcaaccccgctgcggtgggttacgcccaagaatcgaagattcctttcggtcaaggattggtgaaaaacgcctacgttggccgcacctttattcagccgtcgcaaaccctgcgccagctgggtattcgcctcaagctcaacccgctgcgtgaggtaatccaaggaaagcgcctgatcgttgtagatgattccattgtgcgtggcaacacccagcgagccctgatccgcatgctgcgtgaagccggtgccgccgaggttcacgtgcgtatcgcctcgccacctgtgaagtggccatgcttctacggcatcgactttgcaagccccggcgaactgatcgccaacgctgtcaccggcgataacgaagccgaggttgtacagtcagtctgtaccgcccttggcgcagattctttgggatacgcctctaccgacgccatgatcgaagccactcagcagtcccgcgccgaactatgttgtgcatgtttcgacggcgaataccccatcggtatgcctgccggaaacaagaacgcagagcttgtttctgcgatgaaacgcagctcgtgcgcaagcctcgactaa

SEQ ID NO: 132279 - protein, 493 aa, Corynebacterium diphtheriae NCTC 13129
MTDLDDRGEQSPREECGVFGVWAPGEEVSKLTYFGLFALQHRGQEAAGIAVGDGDQVVVFKDLGLVSQVFDEPTLESLSGDVAIGHTRYSTAGGVMWENSQPMFRVTPEGTDVALCHNGNLVNYLELMAEAAEHDLVKPDTEPSDSDVMTALLAHGVSEGTSLLDSARALLPRMRGAFCLTFTDGHTMYAARDPWGVRPLVLGRLERGWVVASETCALDIVGASFVREIEPGELVAIDGAGIRSERFAQPQRKTCVFEYVYLARPDSTIHGRNVNATRMEIGRRLAQESPIDGDLVIPVPESGNPAAVGYAQESKIPFGQGLVKNAYVGRTFIQPSQTLRQLGIRLKLNPLREVIQGKRLIVVDDSIVRGNTQRALIRMLREAGAAEVHVRIASPPVKWPCFYGIDFASPGELIANAVTGDNEAEVVQSVCTALGADSLGYASTDAMIEATQQSRAELCCACFDGEYPIGMPAGNKNAELVSAMKRSSCASLD

SEQ ID NO: 132280 - DNA, 1530 bp, Rhodopseudomonas palustris CGA009
  CDS (1)..(1530): transl_table=11
atggacgcgatgctcagctcttccgacgacgccgcaacgcccgcttcggacgctcgcgaccaacacatcctcgacgataccgttttcgataccgatggtgacacgctgcgcgaagagtgcggcgtgttcggcattttcggacaccccgatgccgccgcgatcaccgcgctcggcctgcacgccctgcagcaccgcggtcaggaagccgccggcatcgtctcgttcgacaacggccggtttcattccgagcgccgcctcggcctggtcggcgacaccttctcccgcgccgacgtaatcgcgcggctgccgggcaattcggcgatcggccacgtccgctattcgaccaccggcgagaccattctgcgcaacgtgcagccgctgttcgccgagctcaatgccggcggcttcgcggtcggtcacaacggcaacctcaccaacggcctcaccctgcgccgtgagctgatccgcagcggcgcgatcatgcagtcgaccaccgacaccgaagtgatcctgcatctggtcgcgcactccaagaagacccgcttcatcgagcgcttcatcgagtcgctccgcgctctggaaggcgcctactcgctggtgtcgctgaccaacaagaagctggtcggcgcccgcgatccgctcggcatccgcccgcttgtgctcggcgaactcgacggctgcccgatcctggcgtcggagacctgtgcgctcgacatcatcggcgcgcattacgtccgcgacgtcgaacccggcgaagtcatcgtgttcgaccgacacggcgtcaccagccacaagccgttcccgccgcagccgccccgcccctgcatcttcgagtacatctacttcgcgcgcccggattcggtggtcggcggccgttcggtgtacgacgtccgcaaggcgttcggcgcccagctcgcgctcgagagccacgtcgaatccgacgttgtcgtcccggtgccggattccggcgttccggcggcgatcggctattcgcggcagtcgggcgtgccgttcgaactcggcatcatccgcaaccactatgtcggccgcaccttcattcagccgacccagagcgtgcgcgaactcggcgtgcggatgaagcactcggcgaaccgcgccgcgatcgaaggcaagcggatcgtgctgatcgacgacagcctcgtccgcggcacgacctcgaagaagatcgtgaagatgatgcgcgatgccggcgcccgcgaggtgcatttccgcatcgcctcgccgccgatcacccacccggactactacggcatcgacaccccggaccgcgccggcctgctggccgcgacgcattcgctcgaagagatgcgcgacctgatcggcgccgacacgctcgccttcctgtcggtcgatggcatctatcgcgcgatgggcgaaccgggccgcgatccggcgttgccgaagttcaccgaccactgctttaccggtgactatccgaccggcctcaccgatctcaatcagaccgagtcggcgccgcggcaattgtcgctgctggccgaggcgagctga

SEQ ID NO: 132281 - protein, 509 aa, Rhodopseudomonas palustris CGA009
MDAMLSSSDDAATPASDARDQHILDDTVFDTDGDTLREECGVFGIFGHPDAAAITALGLHALQHRGQEAAGIVSFDNGRFHSERRLGLVGDTFSRADVIARLPGNSAIGHVRYSTTGETILRNVQPLFAELNAGGFAVGHNGNLTNGLTLRRELIRSGAIMQSTTDTEVILHLVAHSKKTRFIERFIESLRALEGAYSLVSLTNKKLVGARDPLGIRPLVLGELDGCPILASETCALDIIGAHYVRDVEPGEVIVFDRHGVTSHKPFPPQPPRPCIFEYIYFARPDSVVGGRSVYDVRKAFGAQLALESHVESDVVVPVPDSGVPAAIGYSRQSGVPFELGIIRNHYVGRTFIQPTQSVRELGVRMKHSANRAAIEGKRIVLIDDSLVRGTTSKKIVKMMRDAGAREVHFRIASPPITHPDYYGIDTPDRAGLLAATHSLEEMRDLIGADTLAFLSVDGIYRAMGEPGRDPALPKFTDHCFTGDYPTGLTDLNQTESAPRQLSLLAEAS

SEQ ID NO: 132282 - DNA, 1404 bp, Geobacter sulfurreducens PCA
  CDS (1)..(1404): transl_table=11
atgatgaagctctacagaccaacggaagagtgcggcattttcggtatctacggccaccctgaggcggccaatctgacgtacctgggcctttacgcccttcagcaccggggacaggaagcctgcggcatcgtctcctcggacggccgcagcctctacacccaccggagcatggggcttgtggcggatgtcttcggcaatcaggaaatcttcggcaatcttcccggtgaatccgccatcgggcacgtgcgctactccaccaccggcgactcggtcctcaagaacgtgcagcccatcaaggtcgactactccaggggctccattgccattgcccacaacggcaacctggtgaacgcccagtacatcaaggacgagttggaggcctggggttccattttccagaccactatggacacggaggtgatcctccacctgctggccacttccaagcatagttccctggaggaccggatcatcgatgccctcgggcggatcaagggggcctactgtcttctgttcctgacggaaacccgcatggtggctgcccgcgatccccacggcttccgccccctctgtctcggcaagctcggcgatgcctgggtggttgcgtccgagagctgtgccttggacctgatcgaggccgaatttgtcagggagatcgagccgggcgagatcgtggtcattaccaaggacgggctcacctcccattttccgcataagaagatcgaaccggctccttgtattttcgagttcgtctacttcgctcgcccagattcgtacatcttcggcaagaacgtctaccaggtacgcaaggacttcgggcgccaactctgccgcgagcaccgcatcgatgccgatatcgtcatcccggttcccgattcgggtgttcccgcagccctgggttatgcccaggaggcgggtattccctttgagctcgggcttatccgcaaccattacgtgggccgtaccttcattgagccccagcagtcgatccggcattttggtgtcaagatcaagctcaatccggtgcgggaggtgctgaagggaaagcgggtggtggtcatcgacgactctatcgtcagaggcaccacgtcccgcaagatcgtgaaaatggtacgcaacgccggcgcatccgaggttcacgttcgcatctcgtcgccccccacgagctatccatgctactacggcattgacacccccacccgcaaagaacttatctcctcgtcccataccatcgaggaaatccgcaagtacataaccgccgattcactgggctacctttcggaggaagggctgctccaggccgtgggcgccggcagcaatcccttctgcaaagcctgtttctccggcggctacccgatcacattcccgcgcctcatggccgaaccccaactggatcttttctga

SEQ ID NO: 132283 - protein, 467 aa, Geobacter sulfurreducens PCA
MMKLYRPTEECGIFGIYGHPEAANLTYLGLYALQHRGQEACGIVSSDGRSLYTHRSMGLVADVFGNQEIFGNLPGESAIGHVRYSTTGDSVLKNVQPIKVDYSRGSIAIAHNGNLVNAQYIKDELEAWGSIFQTTMDTEVILHLLATSKHSSLEDRIIDALGRIKGAYCLLFLTETRMVAARDPHGFRPLCLGKLGDAWVVASESCALDLIEAEFVREIEPGEIVVITKDGLTSHFPHKKIEPAPCIFEFVYFARPDSYIFGKNVYQVRKDFGRQLCREHRIDADIVIPVPDSGVPAALGYAQEAGIPFELGLIRNHYVGRTFIEPQQSIRHFGVKIKLNPVREVLKGKRVVVIDDSIVRGTTSRKIVKMVRNAGASEVHVRISSPPTSYPCYYGIDTPTRKELISSSHTIEEIRKYITADSLGYLSEEGLLQAVGAGSNPFCKACFSGGYPITFPRLMAEPQLDLF

SEQ ID NO: 132284 - DNA, 1656 bp, Mycobacterium avium subsp. paratuberculosis K-10
  CDS (1)..(1656): transl_table=11
ctgaagtgcaggtttaccccggcgggccgggatttcgccggtcaacacgcccggcggattcggcggcgcggccgcgctgcccgtagactccgttacgtcaccaaccgttccccggggagccgcccaatcgtgaccgtcgccgaacccgagcaggacttcaacgcaccccgcgaggaatgcggtgtattcggggtctgggccccgggcgaggaagtcgccaaactcacctactacggcctctacgcgctgcagcatcgcgggcaggaggccgccggcatcgccgtcgccgacggatcccaagtgctggtgttcaaggacctgggcctggtcagccaggtgttcgacgagcagacgctggccgcgatgcagggccacgtcgccatcgggcactgccgctactccaccaccggcgacaccacctgggagaacgcccagccggtgttccgcaacaccgccgcgggcaccggggttgccttggggcacaacggaaatctggtcaacaccgccgagctggccgcgcgggcccgcgacgcggggctgatcgccaagcgcgcgccggccccggcgaccaccgactccgacatcctgggcgcgctgctggcgcacggcgccgccgactccacgttggagcaggccgcgctggacctgctgccgacggtgcgcggcgccttctgtctgaccttcatggacgagaacacgctctatgcgtgccgcgatccgcatggggtgcggccactttcgctgggacggctggaccgcggctgggtggtggcctccgagaccgccgcgctcgacatcgtcggcgcctcgttcgtgcgcgacatcgaaccgggcgaactgctggcgatcgacgccgacggggtgcgctccacccggttcgccaatcccacccccaagggctgcgtcttcgagtacgtctatttggcgagaccggacagcaccatcgccggccggtccgtgcacgccacccgggtcgagatcggccggcggctggcccgggaacgccccgtcgaggccgacctggtgatcggggtgcccgagtcgggcacccccgccgccgtcggctacgcccaggaatccggcatcccctacgggcaggggctgatgaagaacgcctacgtggggcgcaccttcatccagccgtcgcagaccatccgtcaactcggtatccggctcaagctcaacccacttcgcgaggtgatccgcggcaaacggctcatcgtcgtcgacgactccatcgtgcgcggcaacactcagcgggcgctgctgcggatgctgcgcgaggccggcgccgtcgaggtgcacgtgcgcatcgcgtcaccgccggtcaaatggccctgcttctacggcatcgacttcccgtcgccggccgaactgatcgccaacgcggtcgaggacaaacacgagatgctcgaggcggtgcggcacgccatcggcgccgactcgctgggctacatctcgctgcgtggcctgatcgcagcctccgagcagccggcgtcgcggctgtgcaccgcctgcttcgacggccagtacccgatcgaactgcccggcgagacggcgttgggcaagaacgtcatcgagcacatgctcgccaacgcggcccggggcgccgggctcgacgacctggcggccgacgaagtgcccgtcgtccactga

SEQ ID NO: 132285 - protein, 551 aa, Mycobacterium avium subsp. paratuberculosis K-10
MKCRFTPAGRDFAGQHARRIRRRGRAARRLRYVTNRSPGSRPIVTVAEPEQDFNAPREECGVFGVWAPGEEVAKLTYYGLYALQHRGQEAAGIAVADGSQVLVFKDLGLVSQVFDEQTLAAMQGHVAIGHCRYSTTGDTTWENAQPVFRNTAAGTGVALGHNGNLVNTAELAARARDAGLIAKRAPAPATTDSDILGALLAHGAADSTLEQAALDLLPTVRGAFCLTFMDENTLYACRDPHGVRPLSLGRLDRGWVVASETAALDIVGASFVRDIEPGELLAIDADGVRSTRFANPTPKGCVFEYVYLARPDSTIAGRSVHATRVEIGRRLARERPVEADLVIGVPESGTPAAVGYAQESGIPYGQGLMKNAYVGRTFIQPSQTIRQLGIRLKLNPLREVIRGKRLIVVDDSIVRGNTQRALLRMLREAGAVEVHVRIASPPVKWPCFYGIDFPSPAELIANAVEDKHEMLEAVRHAIGADSLGYISLRGLIAASEQPASRLCTACFDGQYPIELPGETALGKNVIEHMLANAARGAGLDDLAADEVPVVH

SEQ ID NO: 132286 - DNA, 1386 bp, Wolbachia endosymbiont of Drosophila melanogaster
  CDS (1)..(1386): transl_table=11
atgctagatgaaatgcgtgaggaatgtggggtatttggcataagttgcaaccaaagtgctgcttttaactctatacttgctctccacgctttgcagcatagaggtcaagagtcttttggcgtagtaaccagtaacaacgataagctgcactcttatcactttcaaggtcaagtgagcagcgtatttgatgatatagatgaaataaagaaatccttacctggagattgtgcaataggtcatgttcgatactcaacaagtggtaataagtttggagtgcagcccatgtttagcaaaagtggcaaatttggggatttcgccatagcacataatggtaatttaattaatatttctccgatacgcgaacaattgattaaacaagagtgcgtttttcagtcagatattgatacagaagtagtagtgcatctgacagcaagcggtgaaaaagatagctttttagagagttttatatatgcattaaagcaaatacaaggtgcttattcttttgttgcaatcaatcaagaagtagttattggagtacgtgattcatctggaatcaggcctcttgttttaggaaagttaaacggttcttacgttcttgcatctgaaacttgtgctcttgatataataaatgcagagtttgttagagaaatagaaccaggcgaattagttaccatcagttcgggtagtaagctagcctcaatgtttcctttcccacagcaaaaatcaagtttttgtatttttgaatacgtttatttttcaagaccagacagcataatggagaataggtctatatacgatacaagaaaagaaataggaagaatacttgcagaagagagcccaccaaaaaacaatgtagatatggttgtaccaatacctgattctggaatacctgcagctattggatatgcaaagcattcaggattacctatggaactgggaataattcgtaatcattacataggaagaacttttatacaaccaaccgctgaagtacgtaaagttagaataaaattaaaattcaatgctaataagcacactttgaaaggtaaaaacataattttaatagatgatagtatagtgcgtggtagtacgttaacaaatataatagttatgctaaaggatgcaggagtaaaagagattcacctcaaaatttcaagcccaccaattaagcattcttgtttttatggaatagatacgccagagtgcaaagatttaattgctgcaaataaatctgtagaggaaattaaggaagttataggagtagatagcctagccttcttgagtattgatggattatatcaggctgttaaaggagaagtgcgtaacaatgctacaccacaatattgtgatgcttgtttcactggtgattatccaattggcaaatag

SEQ ID NO: 132287 - protein, 461 aa, Wolbachia endosymbiont of Drosophila melanogaster
MLDEMREECGVFGISCNQSAAFNSILALHALQHRGQESFGVVTSNNDKLHSYHFQGQVSSVFDDIDEIKKSLPGDCAIGHVRYSTSGNKFGVQPMFSKSGKFGDFAIAHNGNLINISPIREQLIKQECVFQSDIDTEVVVHLTASGEKDSFLESFIYALKQIQGAYSFVAINQEVVIGVRDSSGIRPLVLGKLNGSYVLASETCALDIINAEFVREIEPGELVTISSGSKLASMFPFPQQKSSFCIFEYVYFSRPDSIMENRSIYDTRKEIGRILAEESPPKNNVDMVVPIPDSGIPAAIGYAKHSGLPMELGIIRNHYIGRTFIQPTAEVRKVRIKLKFNANKHTLKGKNIILIDDSIVRGSTLTNIIVMLKDAGVKEIHLKISSPPIKHSCFYGIDTPECKDLIAANKSVEEIKEVIGVDSLAFLSIDGLYQAVKGEVRNNATPQYCDACFTGDYPIGK

SEQ ID NO: 132288 - DNA, 1440 bp, Bdellovibrio bacteriovorus HD100
  CDS (1)..(1440): transl_table=11
atgtgtggcgttgtaggactcattggtgaagatcaggccggcgaaaaactgtatccggctctcttcgcacttcagcaccgtgggcaggatgcggcggggattctgagttatgactttgaacgttcgcagtttcatctggaaaaggatcttggcctggtggaggacgtcttcaccaccgaacgccgcaagcgcctgaagggcaccatggccctggggcacacacgttattccaccattggcagtgtcgataaagaggacctgcagccgatcttcttaagttatccctatggcatcggcatgatccataacggcaacgtcacgaactatgatgaaatcgtggattatctgcgcaaccgaaaactaagatggaccttttcgcgcaacgatctggaaatcctgatgcacatggtggcggtggggctttcttcacgcaaagacaacccggatcttcccgccagtctggcggaagcggtgaaagagcttttgcaaacagttcaaggcgcctacagctccattgggatgctggctgatcagggcatgttcgccttcagcgatatgaatggcattcggcctttgctgatcggtcgccagaaaaagggcgataagtacaattactgttttgcctctgaaaagcaggtctttttcggactgggatatgaatactggcgcgatctgcgcccgggggagctggttttcgtcgacaaggatcgcaatctgcattctttcgtcttaagtgaaaagaaaccgcgcccgtgcatgtttgaatggatttactttgccggttctgaaaccgaatggcacggccgcccggtttatgaagtgcggctgaagctgggtgaaatcctggctgaagagtgccgcaaaaaaggcctggatatagatgttgtggccccggtgcccgacacctcgcgggccgcagcctgccgcctggcggaagtgctggaaaaaccttaccgcgaagttctgattaaaaaccgctatgtgcaaagaagctttatcgtcaatgaacccgaagttcgcaagatgatggtgaatctgaagctttcaccggtgcaaagtgagatcaaaggtaaaaaaattctgctggtggatgacagtattgtgcgcgggaccacttccgcgcgcatcattcggttgttgcgtgatgccggggcggagaaggtctatctggccagcacctgtccgccgatccgtcatccttgtttctatggcattgatttcccggatggggaatcactggtggcgcacaaacgcagtgaaagtgaagtggaaaagattctggaggtggacggcttggtgttcctgcctctgaatcgactgcaagaaggcctgggcctgaagaatctttgcagtgcttgtcttgatggtgattatcccgttccggtctcaactgaaaactttttgaagacccggaacatcaatttaggtggtgaactatga

SEQ ID NO: 132289 - protein, 479 aa, Bdellovibrio bacteriovorus HD100
MCGVVGLIGEDQAGEKLYPALFALQHRGQDAAGILSYDFERSQFHLEKDLGLVEDVFTTERRKRLKGTMALGHTRYSTIGSVDKEDLQPIFLSYPYGIGMIHNGNVTNYDEIVDYLRNRKLRWTFSRNDLEILMHMVAVGLSSRKDNPDLPASLAEAVKELLQTVQGAYSSIGMLADQGMFAFSDMNGIRPLLIGRQKKGDKYNYCFASEKQVFFGLGYEYWRDLRPGELVFVDKDRNLHSFVLSEKKPRPCMFEWIYFAGSETEWHGRPVYEVRLKLGEILAEECRKKGLDIDVVAPVPDTSRAAACRLAEVLEKPYREVLIKNRYVQRSFIVNEPEVRKMMVNLKLSPVQSEIKGKKILLVDDSIVRGTTSARIIRLLRDAGAEKVYLASTCPPIRHPCFYGIDFPDGESLVAHKRSESEVEKILEVDGLVFLPLNRLQEGLGLKNLCSACLDGDYPVPVSTENFLKTRNINLGGEL

SEQ ID NO: 132290 - DNA, 1464 bp, Treponema denticola ATCC 35405
  CDS (1)..(1464): transl_table=11
atgagcaaggatgatatttttaaatcgagtttaggggaagaatgcgggatcgcagctgtctgggattcaaactcctataagacggaaaatcccgaaaggctgcctttcaggccggatgacgctgcccgctcggttttttatgctcttttttctcttcaacacaggggacaagaagcggccggaatggctgtttcaaacggaaaacatatccgagtcttcaaaaaaccgggccttgtttccaacatttttaccgaacacgatatatcgaatctccaaggttatgctgccatcggccacacccgctactcgactaccggttcttcttcttttggaaatatccagcccttttatatagaaacaatgtacgggcctatagcccttgctcataacggaaaccttgtaaacgccccgcatttaaggcaaaaacttttggaaagaggggtggggctttcttctacctccgataccgaagttatgattatgatgcttgccgctgccaaaggcgattcttgggcggagcgtatagcttcatgtatgagagaatgggaaggagctttttcgattgccgttttaacggttgaaggaatttacatagccagagacccttggggcttcagacctctttgtgtcggaagttttcaggaaggggtatcggttgcggcaagcgaatcttgtgctcttttaacattgggctgtagggatgttactgaggtaaaagccggtgagattctaaagcttgtcgataacggagccgagctttgtatgcgcattccgcctaaggagcctctttctccatgtatttttgagtatgtctattttgcccgccccgactcggtttggaacaatgcttcggttcacgtatcccgtgtaaatttcggcaaggagcttgcaaaaagctccccagttgaggccgacatagttatagctattcccgattcgtcccgttcggcagccataggctactctcaagaatcgggcattccctatgatgagggtttttcaaaaaaccgctacataggacgcacctttattcagcctacccaaaaattgcgtgaccaaggcgttgcgatgaaattcaatgttctctctgaagctgtcgaaggaaaacgcatcgtagtggtcgatgacagtattgtccgcggaagcaccatgggacccttaatcaaaatgcttaggggagcaggtgcaaaagaagttcatatcagaatatcttctcctccggtacgatactcctgttttatgggtgtagatatgggagaccctgaaaacctcatcgcccacaaaaaatcggttgaagaaatcagggaacacatcggtgcagactccttagtctatctatcccaagaaagtatgctcaaggcgatgaaggatgccggagcaaacacccacttttgctgtgcctgctttgacggaaagtaccccgtcgatgtcagcggcgccgccgataaaaacagctttgagtaa

SEQ ID NO: 132291 - protein, 487 aa, Treponema denticola ATCC 35405
MSKDDIFKSSLGEECGIAAVWDSNSYKTENPERLPFRPDDAARSVFYALFSLQHRGQEAAGMAVSNGKHIRVFKKPGLVSNIFTEHDISNLQGYAAIGHTRYSTTGSSSFGNIQPFYIETMYGPIALAHNGNLVNAPHLRQKLLERGVGLSSTSDTEVMIMMLAAAKGDSWAERIASCMREWEGAFSIAVLTVEGIYIARDPWGFRPLCVGSFQEGVSVAASESCALLTLGCRDVTEVKAGEILKLVDNGAELCMRIPPKEPLSPCIFEYVYFARPDSVWNNASVHVSRVNFGKELAKSSPVEADIVIAIPDSSRSAAIGYSQESGIPYDEGFSKNRYIGRTFIQPTQKLRDQGVAMKFNVLSEAVEGKRIVVVDDSIVRGSTMGPLIKMLRGAGAKEVHIRISSPPVRYSCFMGVDMGDPENLIAHKKSVEEIREHIGADSLVYLSQESMLKAMKDAGANTHFCCACFDGKYPVDVSGAADKNSFE

SEQ ID NO: 132292 - DNA, 1416 bp, Bacillus cereus ATCC 10987
  CDS (1)..(1416): transl_table=11
atgcttgctgaaataaaggggttaaacgaagaatgtggcgttttcggaatttgggggcatgaaaatgcggcacaagtttcatattacggattgcacagtttacagcaccgtgggcaagaaggcgcaggcattgtcgtaaataatggagaaaaaatcgtcggtcacaaggggttaggtttaatatcggaagtgttttcaagaggagagctagaaggattgaacgggaaatcagcaatcggacacgtacgatacgcgacggctggtggaagtgaagtggctaacgttcaaccattactattccgtttttctgatcatagtatggcattagctcataacgggaatttaattaatgcaaaaatgcttcgccgcgaattagaggcagagggaagtatttttcaaacaagttcagatacagaagtacttttacaccttattaaacgtagtacgaaaggttcgttaattgaaagtgtaaaagaagctctaaataaagtgaaaggtgcgtttgcatatcttttactaactggaaatgaaatgattgttgcgctagatccaaatggattccgtcccctttcaattggaaagatgggagatgcttacgttgtagcatcagaaacatgtgcttttgatgtagtaggtgcaacatacattcgtgatgtagaaccgggtgaattacttatcattaatgatgatggaattcacgtagatcgttttacaaatgatgtagaacatgcaatttgcagtatggaatacatttacttcgcacgcccagattcaaatatcgctggtgttaacgtccatgcagcacgtaaaaacatggggaaacgtttggcggcagaagctcctattgaagctgatgttgttactggtgtaccagactctagcatttcagcagcaattggttatgcggaggcgacaggtattccatatgagttaggattaattaaaaatcgttacgttggacgtacgtttattcaaccttctcaggaactgcgagagcaaggggttaagatgaagctttcagcagtaagaggtgtagttgaaggaaaacgagttgttatgattgatgattctatcgtacgaggaacaacgagtaaacgaattgttcgtatgcttcgcgaggctggagcgacagaagttcacgtaagaatagcttcaccacctttgaaatatccatgtttctatggcattgatattcaaacgagaaaagaattaattgcagcaaatcatacggtagaagaaattcgtgaaatgatcggtgcagactcattaacatttttaagtgaagatggattagtagatgcaattggacgtccatatgaagggaaatacggtggcctatgtatggcgtacttcaatggagattatccaacagctctttatgattatgagcaagagcttttagaaagtatgaaataa

SEQ ID NO: 132293 - protein, 471 aa, Bacillus cereus ATCC 10987
MLAEIKGLNEECGVFGIWGHENAAQVSYYGLHSLQHRGQEGAGIVVNNGEKIVGHKGLGLISEVFSRGELEGLNGKSAIGHVRYATAGGSEVANVQPLLFRFSDHSMALAHNGNLINAKMLRRELEAEGSIFQTSSDTEVLLHLIKRSTKGSLIESVKEALNKVKGAFAYLLLTGNEMIVALDPNGFRPLSIGKMGDAYVVASETCAFDVVGATYIRDVEPGELLIINDDGIHVDRFTNDVEHAICSMEYIYFARPDSNIAGVNVHAARKNMGKRLAAEAPIEADVVTGVPDSSISAAIGYAEATGIPYELGLIKNRYVGRTFIQPSQELREQGVKMKLSAVRGVVEGKRVVMIDDSIVRGTTSKRIVRMLREAGATEVHVRIASPPLKYPCFYGIDIQTRKELIAANHTVEEIREMIGADSLTFLSEDGLVDAIGRPYEGKYGGLCMAYFNGDYPTALYDYEQELLESMK

SEQ ID NO: 132294 - DNA, 1380 bp, Methanococcus maripaludis S2
  CDS (1)..(1380): transl_table=11
atgtgtggtatctttggaatttattctcatgaaaaaagtaacattgtaaaaaaagtgtactatggtctttacgcacttcaacacagggggcaagagggtgctggaattgctgttgggaacggtaaagaaataggattctataagggattgggattggttccagaagtattttcaaacaaggaattacaaaatttgtacggacacattggcgttggccatgtaaggtactctacaaccggcagaaatacaattgaaaactgtcagccatttgttgtaaacagttcttttggaaaaattgcaattactcacaatggggatattgtaaattcaaaagaattaaaacatgaactcgaaaaaaagggacatatctttgtttctacaacagattccgaagttattgctcaacttttggttcgagaacttttaaaaaatgatgacattattactgcagttacaaacgtgacgcaaaaattaaatggtgcttactctcttttaattatctatgacgatacattgattgcaataagggatccaaacggatttaagccgttatgcattggaaaagatgacggagcatactattttagttccgaaagctgtgctcttgacattgttgatgttgaatttgaaagggacgttgctcctggagaaatggttgtcgtagataaaaatggacttaacacctacaaactaccaaatgcaaaagaaaaagcatcttcctgcatgtttgaatacgtttattttgcaagacctgattcagtaattgatggagtaagcgtttacgaagtaagaagaaacattggaaaaattttagcaagggaagctcctgaagaagttgatattgtatccccagttcctgattctggaattattttttcgcaaggatacaccgaagaagcagaagttccttactacgaagctttaattaaaaataggtatattggaagaacatttatccttccaacgcaggaagaacgagatcttgcggtaagattgaagttaaaccctgtaaaataccttttaaaagataaaaaggtcatgttgattgatgacagtattgttcgtggaactacatctggaaaaataatgaagatggctaaaaaagcgggtgcaaaaaaggttcacttaagaatcggatccccaagaattatttcaccatgtttttatggaatagacatggctacaacaaaggaattaattgcaaactcaaaaactgacgaagaaatagctgaaatgatcggtgcagattcagttgcatatttaagtattgaaggattagtcgaagcaattggaagagatgacctttgtttagcatgtttaaacgaagaatatccaacagacgtttcctgtaaatttgaatgcggaaattgcaaaaaataa

SEQ ID NO: 132295 - protein, 459 aa, Methanococcus maripaludis S2
MCGIFGIYSHEKSNIVKKVYYGLYALQHRGQEGAGIAVGNGKEIGFYKGLGLVPEVFSNKELQNLYGHIGVGHVRYSTTGRNTIENCQPFVVNSSFGKIAITHNGDIVNSKELKHELEKKGHIFVSTTDSEVIAQLLVRELLKNDDIITAVTNVTQKLNGAYSLLIIYDDTLIAIRDPNGFKPLCIGKDDGAYYFSSESCALDIVDVEFERDVAPGEMVVVDKNGLNTYKLPNAKEKASSCMFEYVYFARPDSVIDGVSVYEVRRNIGKILAREAPEEVDIVSPVPDSGIIFSQGYTEEAEVPYYEALIKNRYIGRTFILPTQEERDLAVRLKLNPVKYLLKDKKVMLIDDSIVRGTTSGKIMKMAKKAGAKKVHLRIGSPRIISPCFYGIDMATTKELIANSKTDEEIAEMIGADSVAYLSIEGLVEAIGRDDLCLACLNEEYPTDVSCKFECGNCKK

SEQ ID NO: 132296 - DNA, 1638 bp, Nasonia vitripennis
  CDS (1)..(1638)
atgtcgcgctcctgctgcaaggagacgccggagggctgctgcgagggcatgtcccgtctgcaggtgaacgacgaagaagctgctgtgtcgaaagtgctggccaggcgaggcaggagcaaaggcgagacgagaaaccagaagggcagtggcttgacacacgagtgcggtgtcttcggttgcatcgctgctggcgactggccatcgccgatcgacgttggacaagtcatatgtctcggcttggtggctcttcagcacaggggtcaggagagcgcgggaatcgtgaccagcgagggcgtctgcgccaagtcgttccacgtgcacaagggcatgggcatgatcaacaacatcttcaacgatgatagtatgaagaagttgaagggtaatctgggtatcggacacacgcgctacagtaccagtgctgctagcgaggaggtcaactgtcagcccttcgtcgtgcacacggcgcacggagcacttgccgtggctcacaacggcgagctcgtcaacaccgagtcgcttcgtaaaatggtactgggtcgcggtgtcggtctctctacgcactcggattcagagttgatcacacaggctctgtgtctgaatccgccagagggagaggtcaacggtccggactggccagctcgtataaagcacctgatgcagctcgcgccgctgtcctactccctcgtcatcatgcagagggataggatctacggagtaagagatccctacggaaatcggccgttgtgcataggaaaaatcgtgcccattggaaacttgggacacgactccgacgacgacaacatcgaagccgagggttgggtcatctcgtctgaatcgtgcggattcctgagtatcggagcacgctatgttcgagaagtttttcctggtgaaatcgtcgagatgacaagggagggcatcaagaccattgatatcgtcgagagaccagacaaaaagccccaggctttctgtatcttcgaatacgtttatttcgctagaagcgatagtatctttgaaggacaaatggtttactccgtgaggatgcagtgcggacgtgtacttgctcgtgaatcgcctatcgaagctgacatagtcagttccgtcccagaatctggaaccgctgcagcgcacggttacgccagagagtccaaaattccattcgccgaggtactatgcaaaaacagatacgtcggcagaacattcattcagccgagcacgaggctgcgacagctgggtgttgccaagaaattcggtgccctttcagagaacgtaaagggcaagaaagtgatcctcatcgacgattctatcgtcagaggaaacaccataggaccaattatcaagcttctcaaagacgccggagccaaagaggtccacataagaatcgcctccccgccgctcaagtacccgtgttacatgggtatcaacattcccacgcgagaggagctgatagccaatcggctggacagcgtcaagctggccaaacacgtgggcgctgatagtctgacgtacctttccgtcgagggtcttgtccaggcggtgcgccacggaatggacaaccgcgagagcagctacatcggtcattgcaccgcttgtcttaccggcgagtatccggacgagctgtcgagcgatatcagctggtga

SEQ ID NO: 132297 - protein, 545 aa, Nasonia vitripennis
MSRSCCKETPEGCCEGMSRLQVNDEEAAVSKVLARRGRSKGETRNQKGSGLTHECGVFGCIAAGDWPSPIDVGQVICLGLVALQHRGQESAGIVTSEGVCAKSFHVHKGMGMINNIFNDDSMKKLKGNLGIGHTRYSTSAASEEVNCQPFVVHTAHGALAVAHNGELVNTESLRKMVLGRGVGLSTHSDSELITQALCLNPPEGEVNGPDWPARIKHLMQLAPLSYSLVIMQRDRIYGVRDPYGNRPLCIGKIVPIGNLGHDSDDDNIEAEGWVISSESCGFLSIGARYVREVFPGEIVEMTREGIKTIDIVERPDKKPQAFCIFEYVYFARSDSIFEGQMVYSVRMQCGRVLARESPIEADIVSSVPESGTAAAHGYARESKIPFAEVLCKNRYVGRTFIQPSTRLRQLGVAKKFGALSENVKGKKVILIDDSIVRGNTIGPIIKLLKDAGAKEVHIRIASPPLKYPCYMGINIPTREELIANRLDSVKLAKHVGADSLTYLSVEGLVQAVRHGMDNRESSYIGHCTACLTGEYPDELSSDISW

SEQ ID NO: 132298 - DNA, 1659 bp, Gibberella zeae PH-1
  CDS (1)..(1659)
atgtgtggtgtttcgggtattttgctgggtgaccaggaagccacttcggctgctatcgatttgcacgaatctttgtattacctccaacatcgaggacaagatgctgcaggtatcgctgtttgccagggaggaagagtctcccagtgcaagggcttgggaatggccagcaaggtcttttctgatggccgacgacttgagcatctgcccggatacatgggcctgggacacgtccgctaccctaccatgggcaccgcttctgcatccgaggctcagcctttttacgtcaatgcgccattcggaatctccatgagcgtcaacggcaacctcgtcaacaccgaataccttcgcaaattcctcgacgaagaagcacaccgacatgtcaactccgattccgactcagagctccttctcaacatcttcgcacacggacttcagcagctcggcaagactcgtgccaactctgaagatatcttcactgctctgagcgatgtgtactccaagtgccagggcgcttttgcctgtactgccatgatcgctggtttcggtatcctggctttccgtgacgccaacggtattcgacccctctgcattggatcccgaccctccgctactctctccggcaccaaggattacatggttgcttccgaatctgttgtcctcaagcagctcggcttcgaggatatcatcgacattcttcccggacaggcctgctttttgcaaaagggctgtgctcccaagttccgccagatcatcaacgaccgaccctacacccccgattgcttcgagttcgtttacgttgctcgccccgactctaccatggacggtatctccgtctaccgcagccgacaaaacatgggagagaagctggccaagaagattcgtgcggttcttggagacaaggcagttgaagagatcgatgctgttattcccgttcctgagacaagtaacattgccgctgctactcttgctgaaaagcttggcaagccatatgtgactgctcttattaagaaccgatacgtccaacgaactttcattctccccaaccaagctctccgaatgaagagtgtccgccgaaagctttcacccatcgactcggaattccgcggcaagaacttgattatagtggatgacagtgtcgtccgtggaactacatcacgacaaattgtccagatggctagggatgctggtgccgtcaaggttatctttgtttcagcatctcctgaatgcatgcaccctcacatttatggtatcgatcttgcggacccaattgatctggttgcccatggtcgaactacacaggaaattgccgactatatcggtgctgacgaggtcatcttccaggaccttgacggcaaggacggattgaaggctgcttgcatggaggccgccgaaaccgaaagcaaggttgaggacttcgaggtcggtgtcttctgtggtcgctacgtcacagaagtcccagaaggatatttcgagcacttgagcgatctccgaaacggcaagcgaaaggccaaggcagccttgacagagatcaagtccggcggtgatgagggtgccaatgttgtcgtcagctctggacctacaaatggcccacctgactctgatgagcgcgaagacatcagccttcacaacatggccagcgagcagatgacaacgtcataa

SEQ ID NO: 132299 - protein, 552 aa, Gibberella zeae PH-1
MCGVSGILLGDQEATSAAIDLHESLYYLQHRGQDAAGIAVCQGGRVSQCKGLGMASKVFSDGRRLEHLPGYMGLGHVRYPTMGTASASEAQPFYVNAPFGISMSVNGNLVNTEYLRKFLDEEAHRHVNSDSDSELLLNIFAHGLQQLGKTRANSEDIFTALSDVYSKCQGAFACTAMIAGFGILAFRDANGIRPLCIGSRPSATLSGTKDYMVASESVVLKQLGFEDIIDILPGQACFLQKGCAPKFRQIINDRPYTPDCFEFVYVARPDSTMDGISVYRSRQNMGEKLAKKIRAVLGDKAVEEIDAVIPVPETSNIAAATLAEKLGKPYVTALIKNRYVQRTFILPNQALRMKSVRRKLSPIDSEFRGKNLIIVDDSVVRGTTSRQIVQMARDAGAVKVIFVSASPECMHPHIYGIDLADPIDLVAHGRTTQEIADYIGADEVIFQDLDGKDGLKAACMEAAETESKVEDFEVGVFCGRYVTEVPEGYFEHLSDLRNGKRKAKAALTEIKSGGDEGANVVVSSGPTNGPPDSDEREDISLHNMASEQMTTS

SEQ ID NO: 132300 - DNA, 1578 bp, Apis mellifera
  CDS (1)..(1578)
atgcaaacaaactcttgtaatcggataatatctcaggaaaataaaagagttaaagcattccaaaataaattgagagatgaaataataactggtcttacacatgaatgtggagtttttggatgtattgctgcaggtgattggccatctcaaattgatgttgctcaagtaatttgtttgggtttagtagcattacaacatagaggtcaagaaagtgcaggtattgttacaagtgagggtgtatgttcgaaatcttttcatgtccataagggcatgggtatgattaataacatttttaatgatgaaaacatgaaaaaactaaatggaaatcttggaattggtcatactagatatagtacaagtgcagcaagtgaagaagttaattgtcaaccatttgtggttcatacagcacatggagcattagcagttgctcacaatggagaattagtaaatacagaatcattgagaaaaatggtattaggacgtggagtaggtttatcaacatattcagattctgaattaataacacaagcactttgtttaaatcctcctgaaggtgaagttaatggtccagattggccagcacgaataaaacaccttatgcaattagcaccattatcatattcattagtaattatgcagagagacaagatatatggtgttagagatccttatggaaatcgcccattatgtcttggaaaaattgttcctattggtaatttgggaaatgaatcagatgatgatgatgaagctgaaggttgggttatatcatctgaatcatgtggctttttaagtattggagcacgatatgtgcgtgaagtatttcctggagagattgtagaattgacacgggagggtataaaaactattgatattgttgatagaccagataaaaagcctcaagcattctgcatttttgaatatgtttattttgcacgtagtgatagtatttttgaaggacaaatggtttattctgttcgaatgcaatgtggtcgagaacttgctttagaatctccaatagaagcagatatagttagttcagtacctgaatctggaactgcagcagcacatggatatgccagacagtctcaaataccgtttgcggaagtattatgcaaaaatagatatgttggtagaacatttattcaacctagtacacgactcagacaacttggtgtagcaaagaaatttggagctttatcagaaaatgtaaaaggaaaaaaattaattcttatagatgattcaattgttagaggaaatactattggacctattattaagttacttcgtgatgcaggagcaaaagaagttcatattaggatagcttctcctccattaaaatatccttgctatatgggaattaacattccaactagagaagagttaattgctaataaattggataatgtaaaattagcaaaacatgttggagctgatagcttaacatatctttcagtagatggacttgtaaaagctgtaagatttggtatggataatcgtgaaagcagttatattggtcattgtactgcttgtttaacaggagattatcctgatgaacttcctagtaatttagattggtaa

SEQ ID NO: 132301 - protein, 525 aa, Apis mellifera
MQTNSCNRIISQENKRVKAFQNKLRDEIITGLTHECGVFGCIAAGDWPSQIDVAQVICLGLVALQHRGQESAGIVTSEGVCSKSFHVHKGMGMINNIFNDENMKKLNGNLGIGHTRYSTSAASEEVNCQPFVVHTAHGALAVAHNGELVNTESLRKMVLGRGVGLSTYSDSELITQALCLNPPEGEVNGPDWPARIKHLMQLAPLSYSLVIMQRDKIYGVRDPYGNRPLCLGKIVPIGNLGNESDDDDEAEGWVISSESCGFLSIGARYVREVFPGEIVELTREGIKTIDIVDRPDKKPQAFCIFEYVYFARSDSIFEGQMVYSVRMQCGRELALESPIEADIVSSVPESGTAAAHGYARQSQIPFAEVLCKNRYVGRTFIQPSTRLRQLGVAKKFGALSENVKGKKLILIDDSIVRGNTIGPIIKLLRDAGAKEVHIRIASPPLKYPCYMGINIPTREELIANKLDNVKLAKHVGADSLTYLSVDGLVKAVRFGMDNRESSYIGHCTACLTGDYPDELPSNLDW

SEQ ID NO: 132302 - DNA, 1542 bp, Candida glabrata CBS 138
  CDS (1)..(1542)
atgtgtggtattcttggtatagcattagctgatcagaacgcctctgtggcaccagaactatgcgatggttgcatttttttgcagcatagaggccaagacgcagctggtatcgccacctgtggttcccgtggtagaatctaccagtgcaaagggaatggtatggccagagatgttttcactcagcaacgtgtttcgggcttggttgggtctatgggtattgcacacctaaggtatccaactgctggctcttctgcaaactccgaagcccaacctttttatgtgaatagtccatatggtattaaccttgcccacaatggtaacttggtcaacactgtttctttgaagagatatatggatgaagatgtacacagacatatcaacaccgacagtgactcagaactactattgaacatatttgcctctgaacttgagaagcataacaagtacagagtcaacaatgaagatgtgtttcatgctctagaaggtgtatacagactatgtcgtggtggttatgcttgtgtgggactgttagctggttttgctttgtttggtttcagagaccctaatggtattagaccactattgtttggtgagcgtgtcaacgagaatggggataaggattacatgcttgcatctgagagtgttgtattaaacgcccatggattcaccaagtttgtggatgtgaaacctggtcaggcagtcatcattccaaaggatccaaaggaaggtggccttccagagtttaggcaggttgtccctatgaactcatacagaccggacttatttgaatatgtttacttcgcaagaccggatagcattcttgatggtatttctgtgtatcatacaagactagaaatgggtgttaaactagctgaaaacattaagaagcaggttggtgttgaggatatcgatgtcgtcattccagtcccagataccgctagaacaactgctctgcaatgtgcgaatgcacttaatagaccgtacagagatggatttataaagaatagatacgttggcagaacattcattatgccaaatcaaaaagaaagagtctcatcagttagaaggaaattgaatccaatggactctgaattcagagacaagaatgttttaattgttgatgattccattgtcagaggaacaacatctagagaaatagttaacatggccaaagagtctggtgccaagaaggtgtattttgcctcagctgctcctgccatcagatacaaccacatttatggaattgatttgactgacacaaagaatctaattgcatttaataaatcagaggaagaagtcgctgaagcaattggttgtgataaagtcatttatcaatcattggaggatttaattgaatgctgcagaacggaacaaatccaaaactttgaggttggtgtgttcacaggtaactatgttactggtgtagaagatggttatttgattgagttggaacgtgttagagcggaaaatgcagaatgtaaggccgatgtaaagcctgaaagtgatgttggactctacaactgtgctgactactcatcataa

SEQ ID NO: 132303 - protein, 513 aa, Candida glabrata CBS 138
MCGILGIALADQNASVAPELCDGCIFLQHRGQDAAGIATCGSRGRIYQCKGNGMARDVFTQQRVSGLVGSMGIAHLRYPTAGSSANSEAQPFYVNSPYGINLAHNGNLVNTVSLKRYMDEDVHRHINTDSDSELLLNIFASELEKHNKYRVNNEDVFHALEGVYRLCRGGYACVGLLAGFALFGFRDPNGIRPLLFGERVNENGDKDYMLASESVVLNAHGFTKFVDVKPGQAVIIPKDPKEGGLPEFRQVVPMNSYRPDLFEYVYFARPDSILDGISVYHTRLEMGVKLAENIKKQVGVEDIDVVIPVPDTARTTALQCANALNRPYRDGFIKNRYVGRTFIMPNQKERVSSVRRKLNPMDSEFRDKNVLIVDDSIVRGTTSREIVNMAKESGAKKVYFASAAPAIRYNHIYGIDLTDTKNLIAFNKSEEEVAEAIGCDKVIYQSLEDLIECCRTEQIQNFEVGVFTGNYVTGVEDGYLIELERVRAENAECKADVKPESDVGLYNCADYSS

SEQ ID NO: 132304 - DNA, 1530 bp, Kluyveromyces lactis NRRL Y-1140
  CDS (1)..(1530)
atgtgtggtgtgttaggtatttgtttggcggatcaaacagctgctgttgctccagaattattcgacggatgtttatttttacaacatagaggtcaagatgctgctggtatctcgacttgtgggcaacgtggtagattataccaatgcaagggtaacggtatggctcgtgacgttttcactcaacaaagaatggccggattagttggttccatgggtattgctcacttgcgttatccaactgctggttccagtgctaactctgaagctcaacctttctatgtcaacagtccatatgggatctgtatgggccataacggtaatttggttaacactcaggctatacaacgttacatggatgaagatgtacatagacatatcaacacggatagtgactccgagttgttgttgaacatcttcgctgctgagttggagaaatacaacaagtacagagttaacaacgacgatatcttccatgctttagaaggtgtatatcgtttgtgtcgtggtgggtatgcctgcgttggtatggttgctggttttgccatgatcgggttcagggatcctaacggtatcagacctttgttattcggtaccagaaccaacgctgatggtactaaggactatatgctagcgtcagagagtgtggtattaaaggcccacaatttcaacgatttccgtgatttgaagcctggtgaagccgtcatcgtgccaaaggattgctcaaagagtgaaccagagtttaggcaggtggttcctgtgaattcttacagaccagatctgttcgaatacgtttatttcgctcgtccagatagtgtattggacgggatctccgtgtaccacactagattggccatgggtgtcaaattagctgaaagcgttcttaagtccataaaaccagaagacgttgatgtcgtcgtgtcggtaccagacactgcacgtacgtgtgctctcgagtgtgcaaacaccttgaataaaccataccgtgaagggtttgtgaagaacagatacgttggaagaactttcatcatgccaaatcaaaaggaacgtgtctcgagtgtgagacgtaaactaaatcctatggaatctgaattcaaggggaagcgcgtcttgattgtagatgactcaatcgttagaggtaccacatcaaaggaaatcatcaacatggccagagaatcgggtgctcttaaggtatatttcgcatctgctgctcctgccatccgtttcaaccatatttacggtatcgatttggctgacactaaacagttggttgcttacgataagactgaagaggaaatccaacatgagttaggttgtgatgaggtcatttaccaatctttggacgatttgattgactgttgcaagactccgcaaattcaaaaattcgaagtcggtgtgtttacaggtcagtatgtcactggtgtcgaagatggttaccttttagaattggaaaaggctcgtgcaatgaacgtcctcaaggccagtgccaaggcagaatccgatatcggtatatataacagcggtgactattga

SEQ ID NO: 132305 - protein, 509 aa, Kluyveromyces lactis NRRL Y-1140
MCGVLGICLADQTAAVAPELFDGCLFLQHRGQDAAGISTCGQRGRLYQCKGNGMARDVFTQQRMAGLVGSMGIAHLRYPTAGSSANSEAQPFYVNSPYGICMGHNGNLVNTQAIQRYMDEDVHRHINTDSDSELLLNIFAAELEKYNKYRVNNDDIFHALEGVYRLCRGGYACVGMVAGFAMIGFRDPNGIRPLLFGTRTNADGTKDYMLASESVVLKAHNFNDFRDLKPGEAVIVPKDCSKSEPEFRQVVPVNSYRPDLFEYVYFARPDSVLDGISVYHTRLAMGVKLAESVLKSIKPEDVDVVVSVPDTARTCALECANTLNKPYREGFVKNRYVGRTFIMPNQKERVSSVRRKLNPMESEFKGKRVLIVDDSIVRGTTSKEIINMARESGALKVYFASAAPAIRFNHIYGIDLADTKQLVAYDKTEEEIQHELGCDEVIYQSLDDLIDCCKTPQIQKFEVGVFTGQYVTGVEDGYLLELEKARAMNVLKASAKAESDIGIYNSGDY

SEQ ID NO: 132306 - DNA, 1587 bp, Debaryomyces hansenii CBS767
  CDS (1)..(1587)
atgtgtggtattttaggtatcgtacgtgccgatgagcaagccaacgttgcaaatgagttatttgaaggtgctatgtttttacagcatagaggacaagatgcagctggtatcgttacatgcggatctagaggtagattctatcagtgtaaaggaaacgggatggccagagacgttttcacacaacaaagaatgaataacttggttggtaacatgggtattacgcatttgcgttatccaactgcaggttctagtgctggtagcgaggcccaaccattctatgtgaactcgccatatggtatctgtattagtcataatggtaatttggtgaactcgattgaattgagaaattaccttgatgaaaaggtacaccgtcatataaacactgattctgattccgaattgcttatcaatatctttgcagcggaattagagaaatttaacaagtcgagagtgaacaaccaggatttgtttttggcgttgaagggaacaatggaattcatcagaggagcctatgcatgtgtagccatgttggcaggttatggtattattggtttccgtgatcccaacggtatcagaccattattgtttggtgaaagattgaattcgaacggcacgatcgattacatgttagcatccgaatcggttgtgttaaaagcacaaggtttcgataaatttagagatattaaacccggtgaagctgttattatcccaaaaggtaacaaccgtggtaataagcctgagttccgtcaagttgtcgagccaaaacaatttgcaccagatatttttgaatatgtttactttgccagacctgactcggttttggatggtgtttctgtttatagaacgagaattgacatgggtaacaagttggccgaaaatatcaccagatcattctcaggccaagatattcttaacgaaatcgacgttgtgattcctgtaccagacacttcgcgtacttcggccttgcaatgtgccgtgtcgttgaaacttccttacagagaaggattcgttaagaacagatacgttggccgtacgttcatcatgccagaccaacaagaaagaagatcgtcggtgagaagaaagttgaatgcgatggaatccgagtttaaaggacgcagtgtgttacttgttgacgactcgatcgtcagaggtaccacctcgaaggaaatcgtagcgatggccagagaggccggtgctaaaagagtgttctttgcttcgtgtgcgccaccaatcagattcaaccacatatacgggatcgatttggcggacaccaaagcgttgattgggttcaatagaaacgagcaggagattgccgaggctatcggtgccgatagggtattctaccaggacttgcaggacttgatcgactgttgtaaacaaaaaggcatcgataatttcgaagttggtgttttcaccggatcgtatatcaccggggtcgaagacaactacttacaggaattggaaaagattagagcccaaaaccagagattgagacaacacgacgccaacggcaacgtcgaagtgtgcgatgtcgacgtcaaggcggatgtagacatcagtatctacaacggaggtgattaccaatga

SEQ ID NO: 132307 - protein, 528 aa, Debaryomyces hansenii CBS767
MCGILGIVRADEQANVANELFEGAMFLQHRGQDAAGIVTCGSRGRFYQCKGNGMARDVFTQQRMNNLVGNMGITHLRYPTAGSSAGSEAQPFYVNSPYGICISHNGNLVNSIELRNYLDEKVHRHINTDSDSELLINIFAAELEKFNKSRVNNQDLFLALKGTMEFIRGAYACVAMLAGYGIIGFRDPNGIRPLLFGERLNSNGTIDYMLASESVVLKAQGFDKFRDIKPGEAVIIPKGNNRGNKPEFRQVVEPKQFAPDIFEYVYFARPDSVLDGVSVYRTRIDMGNKLAENITRSFSGQDILNEIDVVIPVPDTSRTSALQCAVSLKLPYREGFVKNRYVGRTFIMPDQQERRSSVRRKLNAMESEFKGRSVLLVDDSIVRGTTSKEIVAMAREAGAKRVFFASCAPPIRFNHIYGIDLADTKALIGFNRNEQEIAEAIGADRVFYQDLQDLIDCCKQKGIDNFEVGVFTGSYITGVEDNYLQELEKIRAQNQRLRQHDANGNVEVCDVDVKADVDISIYNGGDYQ

SEQ ID NO: 132308 - DNA, 1626 bp, Candida albicans SC5314
  CDS (1)..(1626): transl_table=12
atgtgtggaatattaggtattgtattagcagaacaaaatttaaatgttgcccctgaattatttgaaggagcaatgtttttacaacatcgaggacaagatgcagctgggattgccacttgtggatccaaaggtcgattttatcaatgtaaaggtaatggaatggcccgagatgttttcactcaacaaagaatgaataatttagttggtaattatgggatttgtcatttacgttatcctactgctggatcaagtgctggaagtgaagcgcaaccattttatgttaattcaccttatgggataagtttgagtcataatgggaatttagttaattctattgaattaagacaacatttagatgaagttgttcatcgtcatattaatactgattctgattctgaattattattaaatatttttgctgctgaattagataaatttaataaactgagagttaataatggtgatttattttctgctttaacgggtacgatgaataaaattagaggtgcttatgcatgtgttgccatgttggctgggtatggtataattggattccgtgatcctaatggaattagaccattattatttggtgaaagaattaatgctaatgatggttcaaaaagttatatgttagcttcggaatcagtagttttaaaagctcatggatttaataattttaaagatgttaaacctggtgaagcagtaattattactaaaactggtgaatatgaatttaaacaagttgttgaaccaaaaatttttgctccggatatttttgaatacgtttattttgctagacctgatagtgtattagatggagtttcaatttatcgatcaagaattgatatgggagaaaaattggctcataaaattaaatccatcatgttggataaccaagaaagtgaaggaagtgaaggaagtgaaggaaatgatgagattgatgtggttattcctgttcctgatactgctagaactagtgcatttcaatgtgcagtttcacttaataaaccattccgtgaagggtttgttaaaaatagatatattggaagaacatttattatgcctaatcaacaagaaagaagatcatcagtaagaagaaaattaaatgctatggattcagaatttaatgggaaaaatgttttattagttgatgattcaattgttagaggtactacatctaaagaaattgttgccatggctagagaagccggagctaaaaaagtattttttgcatcatgtgctccaccaattagatttaatcatatttatgggattgatttagctgacaccaaggcattagttggatttaatcgtgatgaaaatgaaattgctcaagttattggtgctgataaagttatttatcaagatttacaagatttaatagattgttgtaaatcagatattattaaaaattttgaagttggagtatttactggtgaatatattactggagttgaagataattatttacaagaattggaaaaaattagagctcaaaatcaaagattacaacaaaatataatgaaaggtttatcagtagatgcttgtattgattcaagtgatttagttgatgttaaagctgaagttgatattagtatttataatcgtggtgattatactgaataa

SEQ ID NO: 132309 - protein, 541 aa, Candida albicans SC5314
MCGILGIVLAEQNLNVAPELFEGAMFLQHRGQDAAGIATCGSKGRFYQCKGNGMARDVFTQQRMNNLVGNYGICHLRYPTAGSSAGSEAQPFYVNSPYGISLSHNGNLVNSIELRQHLDEVVHRHINTDSDSELLLNIFAAELDKFNKSRVNNGDLFSALTGTMNKIRGAYACVAMLAGYGIIGFRDPNGIRPLLFGERINANDGSKSYMLASESVVLKAHGFNNFKDVKPGEAVIITKTGEYEFKQVVEPKIFAPDIFEYVYFARPDSVLDGVSIYRSRIDMGEKLAHKIKSIMLDNQESEGSEGSEGNDEIDVVIPVPDTARTSAFQCAVSLNKPFREGFVKNRYIGRTFIMPNQQERRSSVRRKLNAMDSEFNGKNVLLVDDSIVRGTTSKEIVAMAREAGAKKVFFASCAPPIRFNHIYGIDLADTKALVGFNRDENEIAQVIGADKVIYQDLQDLIDCCKSDIIKNFEVGVFTGEYITGVEDNYLQELEKIRAQNQRLQQNIMKGLSVDACIDSSDLVDVKAEVDISIYNRGDYTE

SEQ ID NO: 132310 - DNA, 1704 bp, Ustilago maydis 521
  CDS (1)..(1704)
atgtgtggaatcaccgccctccttctcgcttccaccgagcagtcagctgcgcccgagatcaacgaggctctctcgctcctccaacatcgtggtcaggatgctgctggtattgtcacttgtggtagcaagggccgcttccaccaatgcaaggcaaacggtatggttcgtgatgtctttgacgtcaatgccatcgcccgtctccagggtagcatgggtgtaggtcacgtccgataccccaccgctggttcctcggcccactcggaagcccagccgttctacgtcaattctccctacggcatcacgtttgcccacaacggtaacctgatcaacaccgacgagcttcgtcgcttcctcgacgccgacgctcaccgtcacatcaacaccgactcggactccgaagttctgctcaacatctttgccaacaacttgcaaaagacgggcaagtttcgtatcaacgaagaggacatctttaccgcgattcgtgacctcatgaagcagtgcaagggaggctacacctgcgccgctatgatcgccggtttcggtatcattgccttccgtgaccccaatggtattcgtcctctcggcatgtgctcgcgtccctcatcggctaccaacaccgaatacctcgaaggccacgccaaggactaccttttcacctcggagtcggtcgtctgtgacgcgctcggctttgaagactttgaggatatcaaggcgggcgaggccgtcatcatcacaaggcaagccgtctcgcgacgcatcctcacgcctcccgccgactcggacgacgcctttgccttctcgcccgacatttttgagtacgtctactttgcgcgtcccgacagtgtcatggatggcgtttcggtctaccgctcgcgcatggccatgggcgacaagcttgctgacgaggtacgtcgccagcttcaagccaccggtgaaaccgtcgatgtggtgatccccgttccagatacctcgcgtgtggccgcgcttcagcttgcacagaacctcggcgtcccctatcgcgaaggtttcatcaaaaaccgctacgtcggtcgaacctttatcatgcctggccaaagtgtgcgtcgcaagaacgtgcgtcgtaagctcaacgccatggcgctcgaatttaacggcaagaacgtgctcatcgtcgacgactcgatcgtaagaggcaccacttcgaaagagatcatccagatggcgcgcgatgcgggcgcccgaaaagtcatcatggcctcttgcgcgccaccgatccgctactcgaacgtctacggtatcgacatgccttcgcgtcaagagctcgttgcctacggacgcaccgtcgagcaagtcgccgactacatccaggctgacatggtcatctaccagacgctggaggacctcatcgattcggtgcagcagttcaaccccgaactcaaacagtttgactgctctgtctttgacggccagtacatcaccggcggtgtcgatgccgcctacattgcgcatctcgagcacctgcgcagtgaaaatgccaaggcgaaaaaggaagccgccaagatccccgtcatcgcagaaagccaaaagaagatctacgccagccgcgccagcccttccgcctcgagcgtcgccgccgacgacaagctcgccaacgacgcttcagctgcagtgctcaacggcaccaacggcaatcgcaaacgccgattgaacgacgacgagctctga

SEQ ID NO: 132311 - protein, 567 aa, Ustilago maydis 521
MCGITALLLASTEQSAAPEINEALSLLQHRGQDAAGIVTCGSKGRFHQCKANGMVRDVFDVNAIARLQGSMGVGHVRYPTAGSSAHSEAQPFYVNSPYGITFAHNGNLINTDELRRFLDADAHRHINTDSDSEVLLNIFANNLQKTGKFRINEEDIFTAIRDLMKQCKGGYTCAAMIAGFGIIAFRDPNGIRPLGMCSRPSSATNTEYLEGHAKDYLFTSESVVCDALGFEDFEDIKAGEAVIITRQAVSRRILTPPADSDDAFAFSPDIFEYVYFARPDSVMDGVSVYRSRMAMGDKLADEVRRQLQATGETVDVVIPVPDTSRVAALQLAQNLGVPYREGFIKNRYVGRTFIMPGQSVRRKNVRRKLNAMALEFNGKNVLIVDDSIVRGTTSKEIIQMARDAGARKVIMASCAPPIRYSNVYGIDMPSRQELVAYGRTVEQVADYIQADMVIYQTLEDLIDSVQQFNPELKQFDCSVFDGQYITGGVDAAYIAHLEHLRSENAKAKKEAAKIPVIAESQKKIYASRASPSASSVAADDKLANDASAAVLNGTNGNRKRRLNDDEL

SEQ ID NO: 132312 - DNA, 1665 bp, Cryptococcus neoformans var. neoformans B-3501A
  CDS (1)..(1665)
atgtgcggtatcatcggcctcctccttcacgatcccctggccacgcagaccactcttgccggcacagagcttgctgagggtctttcccttctgcaacaccgtggccaggacgccgctggtgtcgtcacttgcgggtcgggtggtcgattctatcaagtaaaggcgaatggtatggtcagggatgtgtttgacgaggctgctgttgccggtctcaagggctggatgggtatcggccacgctcgataccccaccgcgggcagttctgctcatgccgaggcgcagcctttttatgttaactctccttatggaatctgttttgcccataacggtaacattgtcaacacccccgccttgagacagttccttgacgtcgacgctcatagacatatcaacactgattccgactctgagcttcttctcaacgtcctcgctaacaatcttcaaaagactggcaagttccgtatcaatgaggaagacatcttcactgccgtcggtgatcttaacaaagcctgtatcggtggctacgcctgtgtagccatgattgccggctttggtcttgtggtctttagagaccccaacggtatccgccccgtcggcatcgccaccagacaaggtgcccgaggcggacttgattatttggtcgcgagtgagaatattgttgctcagggattaggtttcagcgattgggaggatgtcaaggccggtgaggccatcatcatcacccgcgaaaaaatctctcgccgccaagtggccgaacctcaagtcttctcccccgacattttcgagtatgtctactttgctcgacccgactccactatcgacggtatcagtgtctaccgaagccgaatggccatgggagagtatctcgctgagacggccaagaaggagttggccaaagctggtttgactgtagatgttgtgattcctgtgcccgacacctctcgagttgccgctttgcaacttgctcaacaccttggaatcccttaccgagaagggtttattaagaaccgttatgttggtagaacttttatcatgccgggacagacgcagcgacgcaagaacgttcgacgaaagctcaatgccatgcccatggagtttgctggcaaggttgttatgcttgttgatgactccattgttcgaggcaccacttccaaggagattgtgcaaatggccaaggacgtaggtgccaagaaggtcgtctttgcttcctgtgctcctcccatccgttactccaacgtctatggtatcgatatgccttctcccgaagagctcgtcgcccacaatcgaactaccgaagaaattgccaagcacattggcgtcgacctcgtcatttaccagacccttgacgatcttgttgcctcgtgcaagcaatttaacccttccatcgaacagttcgactgctctgtctttaccggcgaatacgtcactggtggtgtcgatgacagatacctcgaacacttgatgaagctgagaaacgacaaggccaaggccaaaaagatccaagctgttgttgagcagccagaagggcagattagctgcagcggacccatgaacggatccgactctcttatgggtttggccaaccattctcccaaaatcgggccgtctgctatgccttctcccaacgacactgtcggccttcataactcttggttcggctcatag

SEQ ID NO: 132313 - protein, 554 aa, Cryptococcus neoformans var. neoformans B-3501A
MCGIIGLLLHDPLATQTTLAGTELAEGLSLLQHRGQDAAGVVTCGSGGRFYQVKANGMVRDVFDEAAVAGLKGWMGIGHARYPTAGSSAHAEAQPFYVNSPYGICFAHNGNIVNTPALRQFLDVDAHRHINTDSDSELLLNVLANNLQKTGKFRINEEDIFTAVGDLNKACIGGYACVAMIAGFGLVVFRDPNGIRPVGIATRQGARGGLDYLVASENIVAQGLGFSDWEDVKAGEAIIITREKISRRQVAEPQVFSPDIFEYVYFARPDSTIDGISVYRSRMAMGEYLAETAKKELAKAGLTVDVVIPVPDTSRVAALQLAQHLGIPYREGFIKNRYVGRTFIMPGQTQRRKNVRRKLNAMPMEFAGKVVMLVDDSIVRGTTSKEIVQMAKDVGAKKVVFASCAPPIRYSNVYGIDMPSPEELVAHNRTTEEIAKHIGVDLVIYQTLDDLVASCKQFNPSIEQFDCSVFTGEYVTGGVDDRYLEHLMKLRNDKAKAKKIQAVVEQPEGQISCSGPMNGSDSLMGLANHSPKIGPSAMPSPNDTVGLHNSWFGS

SEQ ID NO: 132314 - DNA, 1563 bp, Strongylocentrotus purpuratus
  CDS (1)..(1563)
atggcttcatcatcatcctcatcattgccgtcctccccttcatcttcaatgccatcaagagcagaggattggacccctgaagatgggggtcttcatgaggcatgtggtgtatttggatgtgtcgctgcaggagagtggcccacgcagctagatatacctcagctaatcacactgggtttgactggactccaacacagaggtcaagagagcgccggtatcatcacgagtcagggttcatccaagaactaccgcaaacataagggcatgggtatggttagtgcaatcttcacagacgagatcctagccaatctacatggtaatctgggcattggtcacaatcgctactccacagccggggcatcagagctcttgaactgccagccgtttgatgtggagacggtccatggacgcatcgctgtggcgcataatggagagctggtgaatgctgctcaacttaggatgaaggtgcttaaacacggtgtaggtctgtcgactggttcagactctgaggtcatcacccagctgctgacccacgcccctcccgagggggaacctgaaggccccaactggcttggtaggatacgtcaactgatgaatgaggctctcatggcttactcccttctcatcctccatgaaagctccatctatgccgtccgggatccctacggcaacaggcccctctgtatcgggaggcttgtccatgcaagacatagtgttgactgcccaaaggatgatgatgtggagggctgggtggtctcctccgaatcctgctccttccagtctattggtgcacaatactaccgagaggtccttcctggggagatcgttgagatctcaaagactggtatcaaatctctggccattgtaccccgtccggctgaagacccacaggctttctgcatctttgagtatgtctacttctcaagacccgacaccattcttgaaggacaaatggtatattcggtgcggaggaggtgtggtcagcggttggctcaagagtctcctgttgaagcagacatcgtgagcaccgtcccagagtctgccaccccagcagctctaggcttctcacatgtgtctggcatcccatacatggaagtgttgaccaagaacaggtatgtgggaaggacattcatccagcccaaccagagactgagacagctgggtgttgcaaagaagtttggcgctctcacagagaacttcaagggcaagcgcattatcatcattgacgattccattgtgaggggaacaactattggtcccatcatcaaacttctaaaaaagtctggagcaaaagaggttcacatacgagttgcatccccaccagtcaccaacccttgctacatgggcatcaacatccccactaaggaggagctcgttgccaaccgaatcccggttgaccgtctggcaggttacttcaacgcagacagcatcgcatacctgtcaatagagggcctccgaatggcagtcaccgaaggcatgcagatcgaggaaagcaaaaaacagaagcgtcttcactgtacagcttgcctgaccggagagtatccagtcaaactggaatggtga

SEQ ID NO: 132315 - protein, 520 aa, Strongylocentrotus purpuratus
MASSSSSSLPSSPSSSMPSRAEDWTPEDGGLHEACGVFGCVAAGEWPTQLDIPQLITLGLTGLQHRGQESAGIITSQGSSKNYRKHKGMGMVSAIFTDEILANLHGNLGIGHNRYSTAGASELLNCQPFDVETVHGRIAVAHNGELVNAAQLRMKVLKHGVGLSTGSDSEVITQLLTHAPPEGEPEGPNWLGRIRQLMNEALMAYSLLILHESSIYAVRDPYGNRPLCIGRLVHARHSVDCPKDDDVEGWVVSSESCSFQSIGAQYYREVLPGEIVEISKTGIKSLAIVPRPAEDPQAFCIFEYVYFSRPDTILEGQMVYSVRRRCGQRLAQESPVEADIVSTVPESATPAALGFSHVSGIPYMEVLTKNRYVGRTFIQPNQRLRQLGVAKKFGALTENFKGKRIIIIDDSIVRGTTIGPIIKLLKKSGAKEVHIRVASPPVTNPCYMGINIPTKEELVANRIPVDRLAGYFNADSIAYLSIEGLRMAVTEGMQIEESKKQKRLHCTACLTGEYPVKLEW

SEQ ID NO: 132316 - DNA, 1605 bp, Tribolium castaneum
  CDS (1)..(1605)
atgtcagaaaccgagaccaaaccctgcgagcaccccgaatccgcctccctagcatgcgaaatgagaaatttcgaaatcgagaaacgaaaaggtcgtggtgctgtcacctcaggcctaacccacgaatgtggtgttttcggggccataggatgtggcgaatggcccacaacactagaaatctcacaaattatatgctggggcctcgtcgccctccagcacaggggccaagagtccgccggaatcgtcacaagcgagggcaaatgctcgaaatacttcaacattgtcaaaggcatgggcctgatcagcaacattttcaacgaccaagcgatcagaacgctcaaaggcagcatagggattggacacacgcgttactccaccagtgcggcgagtgaagaagtcaactgccagcccttcgtggtgcacacccagcatggggcccttgcagtggcccataacggcgagttggtcaattgtgatagcttgaggaagatggttttggggcgcggcgtgggtttgtccacccattctgacagcgaattgataacgcaagcgttgtgcttgaacccgccagagggcgaatccaatgggcctgactggccggctaggatcaagcatttgatgcagttggcaccactgagctactcgcttgtgattatgctcaagaataaaatttatgccgtcagggacccctatgggaacaggccgctgtgtttggggaagatgttgccgcaaaatgagcccctcgacggcgactgcgacgacagccgcgaagccgaaggctgggtcgtctcgtcggaatcctgcggcttcctctccatcggcgcccaatacgtgcgcgaggtcttccccggcgagataatcgaaatgacccgtcacggcatccgcaccatcgacatcgtcgagcgccccgaagacaaaatccaagccttctgcatcttcgaatacgtgtacttcgcacgcgcggacagcatcttcgaggggcagatggtctacgccgtgcgcatgcaatgcggccgccagctggccatcgagcacccggtggaagccgacatcgtgagctcggtcccagagtcgggcactgcagcagcacacggattctcgcgacagagcggcatctccttcgcagaggtgctgtgcaagaacagatacgtgggccgttccttcatccagcccagcaacaggctgagacagctgagcatcgccaagaagtttggggcgctgtcggggagcgtgaaggggaagcgggtgattttgattgacgattcgatcgtcagggggaatacaattgggccgattattaagttgttgaggaatgcgggggccaccgaggtgcacattagggtggccagtccgcccctgctctatccgtgctatatggggattaatataccaacaagggaggaacttattgccaataaattggagcccgatcagttggcagagaaagtcggtgccaacagtttgaaatatctgagtgtggaaggtttggtgaaagccgtccgctccgacatcaaaaccaaaaattcgcacaaggtcggtcactgcactgcctgccttaccggcgagtatccgggcggggaaccccacaaagacttggattggtaa

SEQ ID NO: 132317 - protein, 534 aa, Tribolium castaneum
MSETETKPCEHPESASLACEMRNFEIEKRKGRGAVTSGLTHECGVFGAIGCGEWPTTLEISQIICWGLVALQHRGQESAGIVTSEGKCSKYFNIVKGMGLISNIFNDQAIRTLKGSIGIGHTRYSTSAASEEVNCQPFVVHTQHGALAVAHNGELVNCDSLRKMVLGRGVGLSTHSDSELITQALCLNPPEGESNGPDWPARIKHLMQLAPLSYSLVIMLKNKIYAVRDPYGNRPLCLGKMLPQNEPLDGDCDDSREAEGWVVSSESCGFLSIGAQYVREVFPGEIIEMTRHGIRTIDIVERPEDKIQAFCIFEYVYFARADSIFEGQMVYAVRMQCGRQLAIEHPVEADIVSSVPESGTAAAHGFSRQSGISFAEVLCKNRYVGRSFIQPSNRLRQLSIAKKFGALSGSVKGKRVILIDDSIVRGNTIGPIIKLLRNAGATEVHIRVASPPLLYPCYMGINIPTREELIANKLEPDQLAEKVGANSLKYLSVEGLVKAVRSDIKTKNSHKVGHCTACLTGEYPGGEPHKDLDW

SEQ ID NO: 132318 - DNA, 1509 bp, Tribolium castaneum
  CDS (1)..(1509)
atggcattgaaaaatgcgcctcgggacgactttacttccggtttgacgcacgaatgcggcgtttttggggctatcggcacaagtgactggcccaacacgaactctgaaatcgctcagataatctgtatcggtttggaagccctccagcatcggggtcaagagtcatgcggtgtcgcaacaagcgaaggaagcgaagattttcacatccacaaaggcatgggcttggtcaagaacgtcttcaataacgacaatatcagcaaactgaaaggctcactagggattgggcacacgagatatgccactagggccgcttcggctgctatcaattgccaaccgtttgtggtgcactccatgcacggttccttggccacggcgcacaatggcgagctagtaaactgctctagtttgaggaaaaaggttctagaccggggtgtggggctttctacgcactccgacagcgaaattataacacaagctctgtgcttaataccgccagaaggcgaagtcaatggtcccgattggcccgcaaggatccgtcatttcatgcaaatggcccccttgagctactcgctagtcctgatgctcaaggaccgcatttacgctgttagggacccgtacggcaaccggcccttgtgtctcggcaaaattttgccccctcattgcgacaggaatgacgaaagcgtgcagcctgagggatggctcgtttcgtccgaatcgtgcgcctttttgaccatcaccagatacgttcgggaggttttaccgggggaaatcgtcgaaatgacacaccagggtgtgcgaacggttgatatagtagctcgaccggctaacaaacaactagctttttgcattttcgaatatgtttatttcgcgaggcccaatagtatttttgaggggcaagaggtgtacactgtgcggtcgcactgtggcaggcaattggccattgaacatccggttgaagcggacattgtggggtctgtgcccgaatcggggaatgcggccgcttttggctactccaaggagtcgaatatcccgatgggggagcttttgacaaaaaatacgtacgttggcaggacgttcatccaaccgaacaatcggcttcgccagctgaacgtcgccttgaagtttagccccatatcgacgaatgtaaaaggcaaaagaattattcttattgacgattcgattgtaagaggcaatactattggtcctatcataaaattgttacgtcgcgtgggggctaaagaggtgcatattagagtggcaagtccgcctttgaagtacccctgcttcatgggaattaatattccgactagagaagagttgattgctaatgatttagattcgagaagtcttgctgataaagttggagccgatagtttggaatatttgagtgtggaagggcttgttaaggcggtacacagaaatattgaaaagggggctgagaaggggcactgcaccgcttgcttgactggcgaatacccagaagaaatcccctatgaattacagtggtaa

SEQ ID NO: 132319 - protein, 502 aa, Tribolium castaneum
MALKNAPRDDFTSGLTHECGVFGAIGTSDWPNTNSEIAQIICIGLEALQHRGQESCGVATSEGSEDFHIHKGMGLVKNVFNNDNISKLKGSLGIGHTRYATRAASAAINCQPFVVHSMHGSLATAHNGELVNCSSLRKKVLDRGVGLSTHSDSEIITQALCLIPPEGEVNGPDWPARIRHFMQMAPLSYSLVLMLKDRIYAVRDPYGNRPLCLGKILPPHCDRNDESVQPEGWLVSSESCAFLTITRYVREVLPGEIVEMTHQGVRTVDIVARPANKQLAFCIFEYVYFARPNSIFEGQEVYTVRSHCGRQLAIEHPVEADIVGSVPESGNAAAFGYSKESNIPMGELLTKNTYVGRTFIQPNNRLRQLNVALKFSPISTNVKGKRIILIDDSIVRGNTIGPIIKLLRRVGAKEVHIRVASPPLKYPCFMGINIPTREELIANDLDSRSLADKVGADSLEYLSVEGLVKAVHRNIEKGAEKGHCTACLTGEYPEEIPYELQW

SEQ ID NO: 132320 - DNA, 1461 bp, Prochlorococcus marinus str. AS9601
  CDS (1)..(1461): transl_table=11
atgtgcggaatagttggaatcgtttcttcgaatgatgtaaatcaacaaatttacgatagtcttttgcttctgcagcatagaggtcaagactcaacagggatagcaacaatggaaaatactgttttccatatacataaggttaaaggtcaggttaatactgcttatagaactagagatatgaggaatttaattggcaaaattggattgggtcatgttaggtatgcaactaagggatcagcagaaagtgtagaagaagcacagcctttttatgttaatgctccttatggaattgttttgatacataacggaaatttgactaataccagagatttagaaaaacagttatttaatgtggacaagcggcatacaaattcttcaagtgatactgaaatgttgttaaatgtatttgcgacagaattacaagaacaaattcataatcaagaattagaacctgatattatttttagtgcggtcaaatctttacataaaagaattcagggatcatatgcttcaattgcattaatttcaggacatggtttattggcatttagagatccttttgggataaggcctttagtcatagggaaaagactttccttaaccacaaaaaaagaagaatggatggttgcaagcgaatctttagtacttgagaataatgattatcaagtagtgagagatgtagatccaggagaagctgtttttataaatcttgatggggagtttttctctaagcaatgttctgataatcccatgctatttccctgtgcttttgaatatgtttacttagcaaggccagattcaattatgaatggaatttccgtttataaagctcgtttaaagatgggagattatttagcagaaacaataaaagaaacaattaattctggagatattgatgtagttatgcctattcctgattcttctcgacctgcggcaatgcaagttgcaagacagttagggatagaatatagggaaggtttttttaaaaatagatatgttggcagaacatttataatgcctggtcagcagaaacgtaagaaatctgtaaggcaaaaattaaatgctatgagtgcagagtttaaaaataaaaatgtattaattgttgatgactcgatagtaagaggtactacttcaaaagaaattgtgcagatggctaaagatgcaggagcaaacaaagttttttttacatcagcagctcctcctgttcgttatcctcacgtttatggaattaatatgcctaatagagatgaattaatagcacataataggacaataagtgaaatcgccgataaacttgaaattgataatcttgtttatcaaagtgttgaaagtttgcgtaaatctataattagtgattctcctattaaaggtttagagatgagttgtttcactggtgattatgtaactggaacagtaaatcaagaatacttaaattgggttgaaaatgaatataaatcttag

SEQ ID NO: 132321 - protein, 486 aa, Prochlorococcus marinus str. AS9601
MCGIVGIVSSNDVNQQIYDSLLLLQHRGQDSTGIATMENTVFHIHKVKGQVNTAYRTRDMRNLIGKIGLGHVRYATKGSAESVEEAQPFYVNAPYGIVLIHNGNLTNTRDLEKQLFNVDKRHTNSSSDTEMLLNVFATELQEQIHNQELEPDIIFSAVKSLHKRIQGSYASIALISGHGLLAFRDPFGIRPLVIGKRLSLTTKKEEWMVASESLVLENNDYQVVRDVDPGEAVFINLDGEFFSKQCSDNPMLFPCAFEYVYLARPDSIMNGISVYKARLKMGDYLAETIKETINSGDIDVVMPIPDSSRPAAMQVARQLGIEYREGFFKNRYVGRTFIMPGQQKRKKSVRQKLNAMSAEFKNKNVLIVDDSIVRGTTSKEIVQMAKDAGANKVFFTSAAPPVRYPHVYGINMPNRDELIAHNRTISEIADKLEIDNLVYQSVESLRKSIISDSPIKGLEMSCFTGDYVTGTVNQEYLNWVENEYKS

SEQ ID NO: 132322 - DNA, 1461 bp, Prochlorococcus marinus str. MIT 9515
  CDS (1)..(1461): transl_table=11
atgtgtggaattgtagggattgtttcttctgatgatgtaaatcaacaaatttacgatagtcttttgcttcttcagcatcgaggacaagattctaccggcatcgctacaatggagaatactatttttcatatacacaaagctaaaggatatgtgaatacagcttatagaactagagatatgagaaatttagtaggaaaaattgggttaggacacgttagatacgcaactaaaggtacagcagaaagtgttgaagaagcacaaccattttatgtaaatgcaccatatggaatagttttaattcataatggtaaccttaccaatacaagagatatagagaaacaattatttaatgttgataaacgtcatacaaattcttcgagtgatacagaaatgttgttaaatatatttgcaactgaattgcaagaacaaatacgtactaaagaattacagccagaaattatttttaatgcagttaaaaatttacataaacgaattcaaggatcttatgcttcaatagcacttatatctggtcatggtttattagcttttagagatccttttggcataagacctttagtaattggaaaaagaatttctcaaagtaatcaaaaaaatgagtggatggtagcaagtgagtcattagtcttagaaaataatgattatgaagttgttagagatgtggaaccaggtgaggcaatttttataactcaaaacggtgaattttattctaagcaatgttcagaaaatcctagcctttttccttgtgcattcgaatatgtttatttagcaagacctgattcagtgatgaatggaatatcagtttataaagctcgtttaaaaatgggtgattatttagcagaaacaattaagaagacgataaactctggagaagttgatgttgtaatgcctattcctgactcttctcgtcccgctgcaatgcaagtagctagacagttgggtatagaatatagagaaggattttttaaaaatagatatgttggtagaacttttataatgcctggacatcaaaaacgtaaacaatcagtaaggcagaagttgaatgctatgagtacagaatttaaaaataaaaatgtattaatagtcgatgattctatagttagagggacaacatcaaaacaaatagttcaaatggcaaaggatgctggagcgaataaagttttttttacttcagctgctcctccagttagatttcctcatgtttatggaatcaatatgcctaatagggatgaattaatagctcacgataggacaatagctgaaatcgcaaaaaagcttgaaattgataatcttgtttatcaaagtgttgataatttgaggaaatctattattaatgattcctcagtcaaagatttagagatgagttgttttacaggttcttacgtgacgggaactgtaaatcatgaatatttaaaatgggttgaaaatgaatataaatcataa

SEQ ID NO: 132323 - protein, 486 aa, Prochlorococcus marinus str. MIT 9515
MCGIVGIVSSDDVNQQIYDSLLLLQHRGQDSTGIATMENTIFHIHKAKGYVNTAYRTRDMRNLVGKIGLGHVRYATKGTAESVEEAQPFYVNAPYGIVLIHNGNLTNTRDIEKQLFNVDKRHTNSSSDTEMLLNIFATELQEQIRTKELQPEIIFNAVKNLHKRIQGSYASIALISGHGLLAFRDPFGIRPLVIGKRISQSNQKNEWMVASESLVLENNDYEVVRDVEPGEAIFITQNGEFYSKQCSENPSLFPCAFEYVYLARPDSVMNGISVYKARLKMGDYLAETIKKTINSGEVDVVMPIPDSSRPAAMQVARQLGIEYREGFFKNRYVGRTFIMPGHQKRKQSVRQKLNAMSTEFKNKNVLIVDDSIVRGTTSKQIVQMAKDAGANKVFFTSAAPPVRFPHVYGINMPNRDELIAHDRTIAEIAKKLEIDNLVYQSVDNLRKSIINDSSVKDLEMSCFTGSYVTGTVNHEYLKWVENEYKS

SEQ ID NO: 132324 - DNA, 1458 bp, Prochlorococcus marinus str. NATL1A
  CDS (1)..(1458): transl_table=11
atgtgtggaatagtaggtgttgtttcaactgatcaatgtaatcaacaaatttacgatagtttgctattgcttcagcatagaggtcaagattccactggtatagcaacaatggatggcagtgtttttcatattaataaatctaaaggtcaagttcgagaagcttatagaactagagatatgagagctttgatcggaagatcaggattgggacatgtacgttatgcaactaaaggtgctgctcatagagaagaagaagcacaacctttttatgtcaatgctccttacggaattattcttgttcataatggaaacttaacaaatacaagagagctagaaaaagaactttttaaagttgataaaagacatacaaatacatcgagcgatactgaaatgttattaaatgttttggcaacagaattaaatagtgaagtaaaaggaaaagatgtagatccagaggatctttttaatgctgttaaaagacttcactgtagagtagagggatcctatgcttcaatcgctttaatagcaggtcatggtcttttagcatttagagatccttttggaattcgccctttggttattggtaaaagggtaaaagaaaataacaaacctgagtgggtaatcgctagtgaatcgctagtcattgaaaacaatgattatgtaattgttagagatgttgaaccaggtgaggcgatatttataacttcaaatggtgagtttttttctaaacaatgctcagataatcctcaactattcccctgttcatttgaatatgtttatttagcaagacctgactcaataatgaatggtatttctgtttatgagtcaagattaagaatgggggatttattagcagaaactataaaaaaacaaatttctcttggtgatatagatgtcgtaatgccaattcctgattcttctagacctgctgcaatgcaggtagcaagacagttagggattgaatatagggagggttttttcaagaatcgttatgttggtagaacatttataatgcctggtcaatctctaagaaaacgttcagtgcgtcagaaattaaatgcaatgagtactgaatttaaaaataaaaatgtattgatagttgatgattcagtggttagaggaacgacatctcagcaaatagttcaaatggcaagaagtgcaggggctaataaagttacttttacatctgctgcaccaccaataagatatccacatgtttatggaattaatatgccaagtagaaatgaattgattgcttataatagagatataaatcaaatagaaaataatttatttattgataaaatgatttatcaagaggtaaatgatcttactcaggctattacgcaaaattctaaaattaaggaattagatttatcatgctttacaggaaaatatattacaggaacagtcactgatgaatatttaacttgggttgaagaaacatctttgtcttaa

SEQ ID NO: 132325 - protein, 485 aa, Prochlorococcus marinus str. NATL1A
MCGIVGVVSTDQCNQQIYDSLLLLQHRGQDSTGIATMDGSVFHINKSKGQVREAYRTRDMRALIGRSGLGHVRYATKGAAHREEEAQPFYVNAPYGIILVHNGNLTNTRELEKELFKVDKRHTNTSSDTEMLLNVLATELNSEVKGKDVDPEDLFNAVKRLHCRVEGSYASIALIAGHGLLAFRDPFGIRPLVIGKRVKENNKPEWVIASESLVIENNDYVIVRDVEPGEAIFITSNGEFFSKQCSDNPQLFPCSFEYVYLARPDSIMNGISVYESRLRMGDLLAETIKKQISLGDIDVVMPIPDSSRPAAMQVARQLGIEYREGFFKNRYVGRTFIMPGQSLRKRSVRQKLNAMSTEFKNKNVLIVDDSVVRGTTSQQIVQMARSAGANKVTFTSAAPPIRYPHVYGINMPSRNELIAYNRDINQIENNLFIDKMIYQEVNDLTQAITQNSKIKELDLSCFTGKYITGTVTDEYLTWVEETSLS

SEQ ID NO: 132326 - DNA, 1458 bp, Prochlorococcus marinus str. MIT 9303
  CDS (1)..(1458): transl_table=11
atgtgcggcattgttggcattgtttctactgcgctggtcaatcagcagatttatgacagcttgctgcttctacagcaccggggtcaggactctactggcatagccaccatggatggcagtgtttttcacttgcataaggcaagggggcaagtgcgggaggcctatcgcacacgtgatatgcgttccttaatcggtaatattggtcttggtcatgtcagatatgcaactaagggtgcagctgagcgggaagaagaagcacaaccattttatgtgaatgctccttacggaatcattcttattcataacggtaaccttaccaatactcgagagcttgatcgcgacttgttcaatattgatcgtcgccatacaaattcaaagagtgatacggagatgttgcttaatgttctagctactgaattgcaattgaaaatttatggtagtgatcttactccagatcaggtatttgatgctgtaacgtctgtacatcaacgagtagaaggttcttatacatctattgctttgattgcagggcacggtcttcttgcctttcgcgatccgtttgggattaggccattggtccttggtaaacgtaagtctttagaaggtgctgatgagtggattgtggctagtgagtcattggtattagagaatggtgattatgagattgttagggatgttgatcctggagaggctatttttattactcaaaatggtgagctttattcacgtcagtgtgcgaagaatccgcgtcttgtgccatgttcatttgagtatgtttatcttgctcgacctgattcagtgatgagtggaatctcggtttacgaggctcgattaaggatgggggatcgacttgcagaaactattgcaaagtacacgccatctggcgatatagatgttgtgatgccaattcctgactcttcacggcctgctgctatgcaagtggctagacagcttgggattgaatatcgtgagggcttttttaaaaatcgttatgtaggccgtacatttattatgcctggacaagctcaacgtaagaaatctgttagacaaaagttaaatgctatgggaacagaatttaaaggtaagaatgttttaattgtggatgattcaattgtacgtggtacgacttcgaaggagatagtacaaatggctcgagttgccggtgcgaataaagttacgtttacttctgcagcaccaccagtgcgatattcacatgtttatggcataaatatgccaaatcggcatgagctgattgcttataatcgcactattcctgaaatctcttctgaactttccactgatcacatggtctatcaagaggttgctgatctagaagcagcaattgttgaaggttcaggtgtttctgaacttgagctttcttgttttaccggagagtatattacagggacagttacttctgaatatctcgattggatagaacgcacacaattgtcttaa

SEQ ID NO: 132327 - protein, 485 aa, Prochlorococcus marinus str. MIT 9303
MCGIVGIVSTALVNQQIYDSLLLLQHRGQDSTGIATMDGSVFHLHKARGQVREAYRTRDMRSLIGNIGLGHVRYATKGAAEREEEAQPFYVNAPYGIILIHNGNLTNTRELDRDLFNIDRRHTNSKSDTEMLLNVLATELQLKIYGSDLTPDQVFDAVTSVHQRVEGSYTSIALIAGHGLLAFRDPFGIRPLVLGKRKSLEGADEWIVASESLVLENGDYEIVRDVDPGEAIFITQNGELYSRQCAKNPRLVPCSFEYVYLARPDSVMSGISVYEARLRMGDRLAETIAKYTPSGDIDVVMPIPDSSRPAAMQVARQLGIEYREGFFKNRYVGRTFIMPGQAQRKKSVRQKLNAMGTEFKGKNVLIVDDSIVRGTTSKEIVQMARVAGANKVTFTSAAPPVRYSHVYGINMPNRHELIAYNRTIPEISSELSTDHMVYQEVADLEAAIVEGSGVSELELSCFTGEYITGTVTSEYLDWIERTQLS

SEQ ID NO: 132328 - DNA, 1467 bp, Clostridium thermocellum ATCC 27405
  CDS (1)..(1467): transl_table=11
atgtttgatgtaataaggggaaagcattttaattacgtacacaatttgttgaaaaaagatgagtttgggtttgacaagccgaaagaagagtgtggagttttcggtatttacagtaaaggtaatttggataccgcacgtctgacttattatgccctttatgcgcttcagcacagaggacaggaaagtgcgggaattgccgtcaacaatggtgggacacttctctttcacaaggacatggggcttgttcccgagattttcaatgaaaaaattttaaacagtctcaaaggcaaaattgcaataggacatgtgagatattcgactaccggtgcgagcagcagggaaaactcccagcctatggttataaagtacaagaacggacagatggccatggctcataacggcaatcttgttaatgccgcaaagataagagaaaaacttgaggaagagggtattatattccagtcgactatagattccgaggtaattttgaatttgatttcaagattcaggctgaccagcaacaatattgaagaggccattgtcaaggtaatgaaggagataaaaggtgcgtattcgctggttattctcacaccaaacaagcttattggtatcagagaccctcacggtataagaccgctttgcatcggccgtatagatgattcctatgttcttgcttcagagacttgcgctcttgatgcagtagatgccgaatatgtaagagatgtaaatcccggagagattatcgttattgaagagagcggaatgacttcaatacaaacggaagttccggaaaagacggcactttgcatttttgagtatatttactttgcaagacccgacagctatattgacggtgtaagtgttcacagagcgagaattgaggccggaagaaggcttgcccgggagcatcctgtggaagccgaccttgttttcggagttccggattcgggtgtatccgcggcactgggttattccatggagtcgggaataccttatgatttgggacttataaaaaacaaatatatcggaagaacctttattcagccggaacagggacagagggaaagcggagtgaaaattaagcttaatgctttgaaggaagccgttaacggtaaaagggttgttatgatagatgactcaatagtcagaggtactaccagcaagagacttgttcaaattttaagggatgccggtgcgaaggaagttcatatgagaatcagctctccgccttatatgtatccatgtttctttggagttgacacatcgagcaggtcccagcttattgcggcggaatgttccgttgaggaaatcagaaagatgacaggtgcggacagccttgggtacttaagtctcgaagggctcttgaaaacgccggtgggagcaaaatgcggtttttgtaccggatgcttcacaggcaaatatccgatggaagtacctaaagatgccagcaagtatagttgcgggtaa

SEQ ID NO: 132329 - protein, 488 aa, Clostridium thermocellum ATCC 27405
MFDVIRGKHFNYVHNLLKKDEFGFDKPKEECGVFGIYSKGNLDTARLTYYALYALQHRGQESAGIAVNNGGTLLFHKDMGLVPEIFNEKILNSLKGKIAIGHVRYSTTGASSRENSQPMVIKYKNGQMAMAHNGNLVNAAKIREKLEEEGIIFQSTIDSEVILNLISRFRLTSNNIEEAIVKVMKEIKGAYSLVILTPNKLIGIRDPHGIRPLCIGRIDDSYVLASETCALDAVDAEYVRDVNPGEIIVIEESGMTSIQTEVPEKTALCIFEYIYFARPDSYIDGVSVHRARIEAGRRLAREHPVEADLVFGVPDSGVSAALGYSMESGIPYDLGLIKNKYIGRTFIQPEQGQRESGVKIKLNALKEAVNGKRVVMIDDSIVRGTTSKRLVQILRDAGAKEVHMRISSPPYMYPCFFGVDTSSRSQLIAAECSVEEIRKMTGADSLGYLSLEGLLKTPVGAKCGFCTGCFTGKYPMEVPKDASKYSCG

SEQ ID NO: 132330 - DNA, 1368 bp, Clostridium difficile 630
  CDS (1)..(1368): transl_table=11
atgtgtggagttttagggatttactctaataaagatgtaactaaagaactatattattctttatattctatgcaacacagggggcaagaaagctgtggtttagctcttttagatgatggagaaattaagtacaaaaaagatatgggattagttggagatgtttttaaggaaaatgaattatctaagttaaaaggaaatatagggattggacatgttagatattcaacagctggaggaagtcatgtttctaattgtcaacctttagttggaagttgtagaaaaagacaattagccatagctcataatggaaatctagttaatgcaaattatttaaaagatatgctagaagaagatggatatatgttccaaactaattcagatacagaagtgattttatatatacttgctagatattacaaaggggatatagtagaaagtttaaaagtgacaatggattatataaaaggtgcatatgctcttgtaataatgagtcaagaagaattggttgcagttagagacccacatggattcagacctcttgtacttggtaaaaagggtgatgaatatatatttgcatcagaaaattgtgcaatagatatacttggcggagaagttataagagatgtagagccaggagagataatagtagtcaaagatggagaactaaaatcatatttttattcagaaaattataaaccagttaagaaaagttgtatatttgaacacatatactttgcaagaaatgatgcaactatagacaatgtaaatgcatatgaatttagaattaaatgtggtgagagattagctcagaatgaaactgtaaaggcagatatggtagttccagttccagattcaggttggccaggagctattggttatgcaaatgctagtggattaaaaataagtgaaggcttagttaaaaatagatatgtaggaagaacatttataaaacctacacaagaagaaagagaaatagcagtaaaaataaaattaaatcctctttcaacaataataaaaggaaaatctataattttagtagacgactcaattgtaagaggaactacatctaaacaattagtaaaatctttaagagaagcaggagcaaaagaaattcatcttagaataacttctcctccagtagcttactcttgttactatggaatagatactccaaatcgctctaaattaattgcatcaagtaacaacgtagaagaaatgagagaatatattggatgtgatagtttaaaattcctagatatagaaggaatgttagatgcaacagaacataagtctactttctgtaaagcttgttttgatggagaatacccagttaagaaaattgataaggaggaactactttcatgttaa

SEQ ID NO: 132331 - protein, 455 aa, Clostridium difficile 630
MCGVLGIYSNKDVTKELYYSLYSMQHRGQESCGLALLDDGEIKYKKDMGLVGDVFKENELSKLKGNIGIGHVRYSTAGGSHVSNCQPLVGSCRKRQLAIAHNGNLVNANYLKDMLEEDGYMFQTNSDTEVILYILARYYKGDIVESLKVTMDYIKGAYALVIMSQEELVAVRDPHGFRPLVLGKKGDEYIFASENCAIDILGGEVIRDVEPGEIIVVKDGELKSYFYSENYKPVKKSCIFEHIYFARNDATIDNVNAYEFRIKCGERLAQNETVKADMVVPVPDSGWPGAIGYANASGLKISEGLVKNRYVGRTFIKPTQEEREIAVKIKLNPLSTIIKGKSIILVDDSIVRGTTSKQLVKSLREAGAKEIHLRITSPPVAYSCYYGIDTPNRSKLIASSNNVEEMREYIGCDSLKFLDIEGMLDATEHKSTFCKACFDGEYPVKKIDKEELLSC

SEQ ID NO: 132332 - DNA, 1461 bp, Prochlorococcus marinus str. MIT 9301
  CDS (1)..(1461): transl_table=11
atgtgcggaatagttggaatcgtttcttcagatgatgtaaatcagcaaatttacgatagtcttttgcttttgcagcatagaggtcaagattcaacaggtatagctacaatggaaaatactgttttccatatacataaggctaaaggtcaggttaatactgcttatagaacgagagatatgaggaatttaatcggcaaaattggattgggtcatgttaggtatgcaacaaaaggatcagcagaaagtgtagaagaagcacagcctttttatgttaatgctccttatggaattgttttgatacataatggaaatttgacgaacactagagttctagaaaaacaattatttaatattgataaaaggcatacaaattcttcaagtgatactgaaatgttgttaaatgtatttgcgacagaattacaagaacaaattcataatcaagaattagaacctgatattatttttagtgccgttaaatctttacataaaagaattcagggatcatatgcttcaattgcattaatttcaggacatggtttattagcattcagagatcccttcggtattaggcctttagtcataggaaaaagattttcgttaactacaaaaaaagaagagtggatggttgctagcgaatctctagttcttgagaataacgattatcaagtagtgagagacgtagatcctggagaagctgtttttataaatcttaatggtgagtttttttctaagcaatgttctgaaaatccaatgttatttccttgttcttttgaatatgtttatttagctagaccagattcaataatgaatggaatttcagtatataaagctcgcttaaagatgggagattatttggcagaaacaataaaacagacaattaattctggagacgttgatgtagttatgcctattcctgattcttctagacctgctgcaatgcaagttgcaagacagttagggattgaatatagggagggtttttttaaaaacagatatgttggccgaacattcataatgcctggtcaacagaaacgtaagaaatctgtaagacaaaagttaaatgcaatgagcgcagagtttaaaaataaaaatgtattaattgttgatgactcgatagtaagaggtaccacttcaaaagaaattgtccagatggctaaagatgcaggagcaaataaggttttcttcacatcagcagcccctcctgttcgttttcctcatgtttatggaattaatatgccgaatagagatgaattaatagctcatgacagaacaatagctgaaattgctgatcatctttcaattgataaccttgtttatcaaagtgttgaaagtttacggaaatctataataagtgattctcctattcaggatttggagatgagttgctttaccgggtcttatgtaaccggaacagtaaatcaagaatacttaaattgggttgaaaatgaatataaatcttag

SEQ ID NO: 132333 - protein, 486 aa, Prochlorococcus marinus str. MIT 9301
MCGIVGIVSSDDVNQQIYDSLLLLQHRGQDSTGIATMENTVFHIHKAKGQVNTAYRTRDMRNLIGKIGLGHVRYATKGSAESVEEAQPFYVNAPYGIVLIHNGNLTNTRVLEKQLFNIDKRHTNSSSDTEMLLNVFATELQEQIHNQELEPDIIFSAVKSLHKRIQGSYASIALISGHGLLAFRDPFGIRPLVIGKRFSLTTKKEEWMVASESLVLENNDYQVVRDVDPGEAVFINLNGEFFSKQCSENPMLFPCSFEYVYLARPDSIMNGISVYKARLKMGDYLAETIKQTINSGDVDVVMPIPDSSRPAAMQVARQLGIEYREGFFKNRYVGRTFIMPGQQKRKKSVRQKLNAMSAEFKNKNVLIVDDSIVRGTTSKEIVQMAKDAGANKVFFTSAAPPVRFPHVYGINMPNRDELIAHDRTIAEIADHLSIDNLVYQSVESLRKSIISDSPIQDLEMSCFTGSYVTGTVNQEYLNWVENEYKS

SEQ ID NO: 132334 - DNA, 1518 bp, Herminiimonas arsenicoxydans
  CDS (1)..(1518): transl_table=11
atgtgtggcattgttggcgtcgtttctcacaaccctgtaaatcaattgatctatgatgcgctgctgctgctgcagcaccgtggtcaggatgctgccggtatcgcaaccgataacggcaatacattcagcatgcacaaggccaacggcctggtacgggatgtcttccgcacgcgcaatatgcgttcgctgttcggcaattcgggtgtcggccaggtccgttatccgacggcgggctcatccagcgcggaagaagcgcagccgttctacgtcaatgcgccgttcggcatcatcatggcgcacaacggcaatctgaccaactgggaacagttgaagatcgagatgttcaagaatgacagacgtcatatcaacacgacttccgattccgaagtattgctgaacgtcctggcgcatgaaatccagcaggcgacgaccggctactcgctcgatccggcagctattttcaaagcggtggcgatggtgcacaagcgggtgcgcgggtcgtatgcagtgacggcgcagatcgccggttacggtttgctggctttccgcgatccgttcggtattcgtccgctgtgcatcggtttcaatgaaacagagcagggcactgagtatctggtggccagcgaatcggtggcgctggaaggcctgggtttccgcttcctgcgcgatgtcttgccgggcgaagcaattttcatcgacatcgaaggcaaactctacaatcagcaatgcgcagaaaatccgacgctcaatccgtgtgcgtttgaatttgtctattttgcgcgtccggattcgattatcgatggtgcatccgtctatgccacgcgtctgaaaatgggcgaatatctggcggaaaaaatcgcacgcgaattcccgctgggagatatcgatgtcgtgatgccgattccggattcctcgcgccctgcggcgatggaactggcgcacaagctcaatatcgaatatcgcgaaggttttatcaagaatcgttatatcggtcgcaccttcctgatgccggggcaagcgatacgcagcaaatcggtacgccagaaattgaacgccatcggttccgaattcaagggcaagaatgtgctgctgatcgatgattcgatcgtgcgcggcaccaccagtcgcgagatcgtgcaaatggcgcgtgaagccggtgcgaaaaaagtaatgttcgcctccgctgcgccaccggtaaaattcccgaacgtgtacggcatcgatatgccgacgcgagccgaactgatcgcctacggtcgcactgatgaagaagtctgtcgtgaaattactgcagatgccttgatctatcaggatatcgacgcactgaagcgttccatttctgacgtgaacccggcgttgaagagcctggaagcgtcgtgctttgacggtatttatgtgacaggcgatatttcgcgcgactatctggaccggattgaatttgcccgcaataatccgaaaccggaaacagacgacgcgattcgctcgcaattgaacttgaatctggcgcaggtagattaa

SEQ ID NO: 132335 - protein, 505 aa, Herminiimonas arsenicoxydans
MCGIVGVVSHNPVNQLIYDALLLLQHRGQDAAGIATDNGNTFSMHKANGLVRDVFRTRNMRSLFGNSGVGQVRYPTAGSSSAEEAQPFYVNAPFGIIMAHNGNLTNWEQLKIEMFKNDRRHINTTSDSEVLLNVLAHEIQQATTGYSLDPAAIFKAVAMVHKRVRGSYAVTAQIAGYGLLAFRDPFGIRPLCIGFNETEQGTEYLVASESVALEGLGFRFLRDVLPGEAIFIDIEGKLYNQQCAENPTLNPCAFEFVYFARPDSIIDGASVYATRLKMGEYLAEKIAREFPLGDIDVVMPIPDSSRPAAMELAHKLNIEYREGFIKNRYIGRTFLMPGQAIRSKSVRQKLNAIGSEFKGKNVLLIDDSIVRGTTSREIVQMAREAGAKKVMFASAAPPVKFPNVYGIDMPTRAELIAYGRTDEEVCREITADALIYQDIDALKRSISDVNPALKSLEASCFDGIYVTGDISRDYLDRIEFARNNPKPETDDAIRSQLNLNLAQVD

SEQ ID NO: 132336 - DNA, 1533 bp, Burkholderia vietnamiensis G4
  CDS (1)..(1533): transl_table=11
atgtgcggcatcgtaggtgttatttcccaatcccctgtcaaccagctgatctatgacagcttgctgttgctgcagcatcgcggtcaggacgcagcgggcatcgcgacggcggacggcagcaatttccacatgtacaaggcgaacggcatggtgcgcgacgtgttccgcacgcgcaacatgcgcagcctgcccggcaccttcggcatcggccaggtccgctatccgacggccggttcggcgtcgagcgaagccgaggcacagccgttctacgtgaacgcgccgttcgggatcatcctcgcgcacaacggcaacctgacgaactggcaacagctgaaggacgagatgttccggatcgaccgccggcacatcaacaccaattccgacagcgaagtgttgctgaacgtgttcgcgcacgagctgcaactgtcgaccaccggcctggagctcgatccggcctcgctgttcaaggcagtcgcgggcgtgcaccgccgtctgcagggctcgtacgcgatcgtgtcgctgatcgccggctacggcctcgtcgcgttccgcgatccgttcggcatccgcccgctctgcatcggcaagctcgaaaccgaacacggcaccgaatggatggtcgcgtcggagtcggtggccgtcgaaggcatcggcttcgaattcgtgcgcgacgtggagccgggcgaagcgatcttcatcgacaaggccggcaacttccacagccagcagtgcgctgaaaatccgacgctcaacccgtgcatgttcgaatacgtgtacctcgcgcgtccggattcgtgcctcgacggcgtgcccgtctacaacgtgcgcctgcgcatgggcgattacctcgccgagaagatccgccgcgagctgccgaacgtgccgatcgacgtcgtgatgccgatccccgattcgtcgcgtccggcggcgatgcaggtcgcggcgaagctgggcgtcgagtatcgcgaaggcttcttcaagaaccgctacgtcggccgcacgttcatcatgccgggccaggccgtgcgcaagaagtcggtgcgccagaagctcaacgcgatgagcatcgagttcaaggacaagcacgtgctgatcgtcgacgattcgatcgtgcgcggcaccacgtcgcacgagatcgtgcagatggcgcgcgatgcgggcgcgaagtcggtgatcttcgcgtcggccgcgccgcccgtgaagttcccgaacgtgtacggcatcgacatgccgacgcgcggcgagctggtcgcccacggccgcaccgatgaggaggtcgcgaagatcatcggcgccgaccacctgatctatcaggacgtcgacgacctgcgccgcgcggtgcgcgacatcaacccgaagctggaaggcttcgaggcgtcgtgcttcgacggcaactacatcaccggcgccgtgacgcccgagtacctcgacgcgatcgagcgcgcgcgcctcgcaccggcatcgcaggccgatcgcgacaccgcgagcgacaccgcgcgttcgcagatgaacctgcaactgtcggtggagtga

SEQ ID NO: 132337 - protein, 510 aa, Burkholderia vietnamiensis G4
MCGIVGVISQSPVNQLIYDSLLLLQHRGQDAAGIATADGSNFHMYKANGMVRDVFRTRNMRSLPGTFGIGQVRYPTAGSASSEAEAQPFYVNAPFGIILAHNGNLTNWQQLKDEMFRIDRRHINTNSDSEVLLNVFAHELQLSTTGLELDPASLFKAVAGVHRRLQGSYAIVSLIAGYGLVAFRDPFGIRPLCIGKLETEHGTEWMVASESVAVEGIGFEFVRDVEPGEAIFIDKAGNFHSQQCAENPTLNPCMFEYVYLARPDSCLDGVPVYNVRLRMGDYLAEKIRRELPNVPIDVVMPIPDSSRPAAMQVAAKLGVEYREGFFKNRYVGRTFIMPGQAVRKKSVRQKLNAMSIEFKDKHVLIVDDSIVRGTTSHEIVQMARDAGAKSVIFASAAPPVKFPNVYGIDMPTRGELVAHGRTDEEVAKIIGADHLIYQDVDDLRRAVRDINPKLEGFEASCFDGNYITGAVTPEYLDAIERARLAPASQADRDTASDTARSQMNLQLSVE

SEQ ID NO: 132338 - DNA, 1455 bp, Streptococcus pyogenes str. Manfredo
  CDS (1)..(1455): transl_table=11
atgacatacgaagtaaaatctctaaatgaagaatgtggagtctttggtatctgggggcatcctcaggcagctcaagtcacttactttgggcttcatagccttcaacatcgcggtcaagaaggagctggtattgtttcaaatgacaatgggaaactctatggttatcgaaatgttgggctcctttctgaagtttttaagaatcaatctgaattagataatttaactgggaatgcggctattggacatgttcggtatgctactgcaggttctgcagatattcgcaatattcagccttttctttataaatttcatgacgggcaatttgctttatgccataatggtaatttgacaaatgctatttccttaaggaaagaattagaaaagcaaggtgcaattttcaatgcctcctcagatactgaaattttgatgcacttgattcgtcgaagccataactcaagtttcatgggaaaggtaaaagaagctctaaatacagtaaagggtggctttgcctatctactgatgacagaaaataaactcattgctgctcttgaccctaatgcctttcgtcctttgtcaattggacaaatgcaaaatggtgcctgggttatttccagtgagacctgtgcttttgaggtggtaggcgcaaaatgggttagagatgttgaacctggcgaagttattcttatagacgatcgtggtattcaatgtgatcgttatactgatgaaacgcaactggcaatttgttcgatggaatatgtctattttgcaaggccggattcaactatacatggtattaatgttcatacggctcgaaaaaatatgggaaagcgtcttgcacaagaatttaaacaggatgctgatattgtaattggtgtcccaaattcgtccttatcggctgctatgggctttgctgaagaatccggattaccaaatgagatgggtcttgtaaaaaatcagtatacgcagcgaacctttattcaaccgacacaagaattaagggaacaaggtgttcgaatgaaactatcagcggtatctggtgttgtcaaaggaaagcgcgttgttatgattgatgactcaattgtaagaggaacgacttctagaaggattgtcggattattaagagaagcaggagctagtgaagtacatgttgctatagctagtccagaattaaagtatccttgtttttatggtattgatattcaaacaagacgagaattaatttcagcaaatcacgctgttgacgaagtgtgtgatattattggcgcagatagtctgacctatctctcattagatgggttgattgaatcaattggactcgaaacaaaagcaccaaatggtggtttatgcgtagcttactttgatgggcattatccaacaccgctttatgattatgaagaagaatacctcagaagtttagaagagaaaacaagtttttatattcaaaaagtgaaataa

SEQ ID NO: 132339 - protein, 484 aa, Streptococcus pyogenes str. Manfredo
MTYEVKSLNEECGVFGIWGHPQAAQVTYFGLHSLQHRGQEGAGIVSNDNGKLYGYRNVGLLSEVFKNQSELDNLTGNAAIGHVRYATAGSADIRNIQPFLYKFHDGQFALCHNGNLTNAISLRKELEKQGAIFNASSDTEILMHLIRRSHNSSFMGKVKEALNTVKGGFAYLLMTENKLIAALDPNAFRPLSIGQMQNGAWVISSETCAFEVVGAKWVRDVEPGEVILIDDRGIQCDRYTDETQLAICSMEYVYFARPDSTIHGINVHTARKNMGKRLAQEFKQDADIVIGVPNSSLSAAMGFAEESGLPNEMGLVKNQYTQRTFIQPTQELREQGVRMKLSAVSGVVKGKRVVMIDDSIVRGTTSRRIVGLLREAGASEVHVAIASPELKYPCFYGIDIQTRRELISANHAVDEVCDIIGADSLTYLSLDGLIESIGLETKAPNGGLCVAYFDGHYPTPLYDYEEEYLRSLEEKTSFYIQKVK

SEQ ID NO: 132340 - DNA, 1533 bp, Bradyrhizobium sp. ORS278
  CDS (1)..(1533): transl_table=11
atggaccagcaccacgattcttccggcgaagctcccatggaaatccaatcggatctggacttcggacctcaagcctacacgagagaccctgacctggacggagacacgctgcgcgaggagtgcggcgtgttcggcatttatgggcatagcgatgccgccgcgatcaccgcgctcggcctgcatgcgctccagcatcgcggccaggaagccgccggcatcgtctgctatgacggcacccgcttccacagcgagcggcgcctcggcctggtcggcgacaccttctcccgccgcgaggtgatcgagcgcctgcccggcaccgccgcggtcggccatgtccgctacgcgacgaccggcgcaaccatcctgcgcaacgtgcagccgctgttcgccgagctcaatgccggcggcttcgcggtcggccacaacggcaatctcaccaacggtctcacgctccgtcgcgaactggtgcgcgccggcgcgatcatgcagtcgaccaccgacaccgaggtgatcctgcatctcgtcgcgcattcccgccgcagcaacttcatcgaccgcttcatcgaggcgctgcgcgcgctggagggcgcctattcgctggtctgccttaccaacaagaagctgatcggcgcccgcgatcccctgggcatccgcccgctggtctatggcgagctcgacggctgcccgatcctggcgtcggagacctgcgcgctcgacatgatcggcgcgcgctacatccgcgacatcgagcccggcgaggtcgtgatcttcgacgaagccggcatgcacagccacaagccgttcccgccgaagcccgcgcgtccctgcgtgttcgaatacatctactttgcccggcccgattccgtggtcggcggccgctcggtctacgaggtacgcaaggcgttcggcgctcaactcgcgcgcgagagccatcccgaggtggatgtcgtcgtgccggtgccggattccggtgtgccggcggcgatcggctacagccagtattcgggcgtgccgttcgagcttggcatcatccgcaaccactatgtcggccgtaccttcatccagccgacccaggcgatccgcgaatccggcgtgcgcatgaagcactcggcgaaccgcgccgcgatcgaaggcaagcgcatcatcctgatcgacgattcgctggtgcgcggtaccacctcgcgcaagatcgtgcgcatgatgcgggacgctggcgccaccgaggtgcacttccgtcttgcgtcgccgccgatcctctaccccgactattacggcatcgacctgccggaccgcggcggcctgctcgcggcgacgcattcgctcgaggagatgcgcgagctgatcggggcggattcgctggcgttcctgtcgatcgacggcatgtaccgcgcgatgggcgagccggcccgcgaccccgccgcaccgaaatacgccgaccactgcttcaccggcagctaccccaccagcctcaccgaccagtcgctggtcgagccgacccagcagcagctgtcgctgctggcggaagcgagctga

SEQ ID NO: 132341 - protein, 510 aa, Bradyrhizobium sp. ORS278
MDQHHDSSGEAPMEIQSDLDFGPQAYTRDPDLDGDTLREECGVFGIYGHSDAAAITALGLHALQHRGQEAAGIVCYDGTRFHSERRLGLVGDTFSRREVIERLPGTAAVGHVRYATTGATILRNVQPLFAELNAGGFAVGHNGNLTNGLTLRRELVRAGAIMQSTTDTEVILHLVAHSRRSNFIDRFIEALRALEGAYSLVCLTNKKLIGARDPLGIRPLVYGELDGCPILASETCALDMIGARYIRDIEPGEVVIFDEAGMHSHKPFPPKPARPCVFEYIYFARPDSVVGGRSVYEVRKAFGAQLARESHPEVDVVVPVPDSGVPAAIGYSQYSGVPFELGIIRNHYVGRTFIQPTQAIRESGVRMKHSANRAAIEGKRIILIDDSLVRGTTSRKIVRMMRDAGATEVHFRLASPPILYPDYYGIDLPDRGGLLAATHSLEEMRELIGADSLAFLSIDGMYRAMGEPARDPAAPKYADHCFTGSYPTSLTDQSLVEPTQQQLSLLAEAS

SEQ ID NO: 132342 - DNA, 1419 bp, Dehalococcoides sp. BAV1
  CDS (1)..(1419): transl_table=11
ttgcatgaatcttgcggcgttttcggtgtatttgcccccggtcaggatgtagcccgactcacatttttcgctctgtttgccttgcagcacagagggcaggaaagttcaggcatatctacatctgatggacaggagcttaatcttcattcccagatgggtctggtttcccatattttcactgaagatatacttaaaaaactggacggccatattgccataggccacaaccgctattccaccaccggttcaagccagcagattaacgcccagccctttgtaatggggcagggagataatgttatagccatagcccataatggcaacatcgtaaattccgaagctttgaatacagaacttacctctcagggatacacctttaagacatccactgataccgaaataatcagccagcttatcctttcatctattgaaactgactgggtcaaacggatacgttatgccatgaaccgcctgaaaggggctttttcctgcacccttatgaccaaagacaccctatttgccatgcgtgactcactgggtgtccgtcccctgtgcttgggtaaaattcagggcggttatgtagtcgcttctgaaagctgtgctcttgaccatatcggagctgatttcgtgcgtgaaatagagccgggcgagattgtagctataaacggaaacggcataaccagttttaaacagcaaagctccagacgggctttgtgtatatttgagttcatttattttgcccgccccgatagcctgatagacgggcgtcttttgtattccgcccgccaagccatgggggtagaactggccaaagaatacccggtagatgcagacctggttataggcgtacctgactctgccacggctgccggtatcggctatgccgtaggttcaggcattcctccagccgaaggccttattaaaaaccgctacatggggcgaacctttattcagcctgaccagcgtctgcgtgatttgggcgtgaaactaaagttcaatccccttaagagcgttctggaaggtaagcgggtagtactggtagatgacagcatagtccggggaactaccaccccacaggttatccgcctgttacgtaaagccggcgccaaagaagtccatatgcgggtatgcgcaccccccataaccaacccatgtttcttcggggtagatatggccacccgttcagaacttattgccgccagaatgagcatacctgagatacaaaaatacataggtgcagattcacttggctatcttagcctgcccgggttgataaatgccgtggggctgcctgagaagaatttctgtctggcctgtttcaccggcgaatatgccctgccagttcaactggaaatggataaatttgcacttggcaatcaacgacacaactgttgccagatgccttcacccgaaagctag

SEQ ID NO: 132343 - protein, 472 aa, Dehalococcoides sp. BAV1
MHESCGVFGVFAPGQDVARLTFFALFALQHRGQESSGISTSDGQELNLHSQMGLVSHIFTEDILKKLDGHIAIGHNRYSTTGSSQQINAQPFVMGQGDNVIAIAHNGNIVNSEALNTELTSQGYTFKTSTDTEIISQLILSSIETDWVKRIRYAMNRLKGAFSCTLMTKDTLFAMRDSLGVRPLCLGKIQGGYVVASESCALDHIGADFVREIEPGEIVAINGNGITSFKQQSSRRALCIFEFIYFARPDSLIDGRLLYSARQAMGVELAKEYPVDADLVIGVPDSATAAGIGYAVGSGIPPAEGLIKNRYMGRTFIQPDQRLRDLGVKLKFNPLKSVLEGKRVVLVDDSIVRGTTTPQVIRLLRKAGAKEVHMRVCAPPITNPCFFGVDMATRSELIAARMSIPEIQKYIGADSLGYLSLPGLINAVGLPEKNFCLACFTGEYALPVQLEMDKFALGNQRHNCCQMPSPES

SEQ ID NO: 132344 - DNA, 1467 bp, Synechococcus sp. WH 7803
  CDS (1)..(1467): transl_table=11
gtgcatcagctcgaggcggagcgtcccgatcggatggaggaagcctgcggcgtgtttgccgttcaggcctctgagcaaccggtggccaacctggcttatttcggtctgtatgccttgcagcaccgcggccaggagtccgcgggcatcgctgtgtttaaccagggcaaggtccgtcttcataaagacatgggcctggtcagtcaggtgttcgatcaagacgtgctcgctcggatgcctggtgatctcgccattggccacaaccgttattccacaactggcagcagcagggtctgcaatgcccagccagtggttctgatgacgcgcctcggtccctttgcgctggcccacaacggcaatctggtcaacgctgccgagttgcgcgaacgcattgatgacggacaggtggaattcacgtccaccacggattccgagttgattgcgtttgccgttcagcaggctgtggatcgtgggctcgactggaaggctgcgatcacctcggcggtgtcgctctgccagggcgccttcagtttggtgatcggcactccgggagcgctctacggcctgcgcgacggatacggcatccggcccttggtgttcgggtctctcggtgaggagtccagtggtcagtgggtgctcagcagtgaaacctgtgggctcgacatcatcggggccgccttcgttgatgacgttcagcctggtgagatcgtcaccttcctgcccggggaccccaccccgcaaagggagagctggattgagcccaccacgcgcatgtgcgtgttcgagatgatttatttcgctaggccggacagtcggtttttcggtgaatcgctgtacagctatcgccagcgcatcggtcagatccttgccagggaatcggcggtggaggctgatctggtgatcggtgttccagattcgggcatccccgctgcgatcggttactcccaggccacaggactgccctatgccgatggtctgatcaagaaccgttacgtcggtcgtaccttcattcagcccacccaagcgatgcgcgaagccggcatccgcgtgaagctcaatccccttcccgatgtgctcaacggcaaacgcgttgtggtgatcgatgattcgatcgtgcgcggcacgaccagtcgcaagcttgttcaggcccttcgcgatgccggagcgactgaggtgcacatgcgcatcagctcaccaccggtgacccatccctgcttctatggcatcgataccgatacccaggatcaactgatcgctgcccgttacaccctggaggaaattgaggcccatctcaaggtggactccttggcctatctcagtaaggaaggaatggtggaggcggctggtgctgactccaaacagttctgtaccgcctgttttgacggcgattacccggtgccgatggatgagtcgatgcgctccagcaagctgatgctggagcctgccggtgtggctgccaacctgggttga

SEQ ID NO: 132345 - protein, 488 aa, Synechococcus sp. WH 7803
MHQLEAERPDRMEEACGVFAVQASEQPVANLAYFGLYALQHRGQESAGIAVFNQGKVRLHKDMGLVSQVFDQDVLARMPGDLAIGHNRYSTTGSSRVCNAQPVVLMTRLGPFALAHNGNLVNAAELRERIDDGQVEFTSTTDSELIAFAVQQAVDRGLDWKAAITSAVSLCQGAFSLVIGTPGALYGLRDGYGIRPLVFGSLGEESSGQWVLSSETCGLDIIGAAFVDDVQPGEIVTFLPGDPTPQRESWIEPTTRMCVFEMIYFARPDSRFFGESLYSYRQRIGQILARESAVEADLVIGVPDSGIPAAIGYSQATGLPYADGLIKNRYVGRTFIQPTQAMREAGIRVKLNPLPDVLNGKRVVVIDDSIVRGTTSRKLVQALRDAGATEVHMRISSPPVTHPCFYGIDTDTQDQLIAARYTLEEIEAHLKVDSLAYLSKEGMVEAAGADSKQFCTACFDGDYPVPMDESMRSSKLMLEPAGVAANLG

SEQ ID NO: 132346 - DNA, 1389 bp, Desulfovibrio vulgaris subsp. vulgaris str. Hildenborough
  CDS (1)..(1389): transl_table=11
atgatccggcattactgcggcatcttcggcatctacaaccatgccgaggccgcccgtctttcctacttcggcctctacgccctgcaacaccgcgggcaggagagcgccggcatcgtgacgtgggacggacagaaactgcgtgaacaccgcggcatgggtctcgtgcccgaggtcttcaacgaacgccacctcggcaaggaactcaagggcgacatcgccatcgggcatatccggtactccaccacgggcgcgtcgctcatccgcaacgcgcagccgttcatcgtgcgctacaagggtctcgagatcgccatcgcgcacaacggcaacctcgtgaacacgctggaattgcggcgcgaactggaggaacagggctccatcttccagacctccatcgacagcgaggtgttcgtgcacctcatcgcccgcaacctcaacgggcatacgctcgaagaggccgtcatggcggcatgccgcaaggtgaaaggggcctacgccctgctcatcctcgccaacaacaagctcatcgccgtacgcgacccgcacgggttccgtccgctggcgctgggccgcgtggcgggtgcgcatgtgttcgcgtccgagacgtgcgccttcgacctgctggaagcagagttcatacgctcgctcgacccgggcgagatggtggtcatcgaagatacgaaggtgcaaagctacaagattgagaccgaagcccccacacgccagtgcatcttcgagctcatctacttcgcacggcccgactcgctggtcttcggtgaagacgtgtaccagtgccgcaagcgcatggggcaggaactggcccgcgaatcggcccccgatgtggacttcgtgatgcccttcccggactcgggggtctacagcgccgtcggcttcgcgcaggagtcggggctgccctacgaacacgccatgatccgcaaccactatgtggggcgcaccttcatccagccctcgcaggacatgcgcgacttcagcgtccgggtgaagatcaacccggtgaagagcatgatcaagggcaagcgcatctgcatcgtggacgactccatcgtgcgcggaaccaccatccggacgcgcgtgaagaaactgcgagaactgggtgcgcgtgaagtccacttcagggtgagctgcccgcccatcaagttcccgtgcttctacggcatcgacttcgcctccaagggcgaactcatcgccgccaatcatagcgtatccgaaatcgaacgcttcatcggcatcgattcgctgcactacatcaccatcgaagggctgctgcgctcggtctcgcatcccgagaactactgtctcgcgtgcttcaccggcgactatcccatcccttgcgccggtggcggcaaactctgccttgaatgcggctgctag

SEQ ID NO: 132347 - protein, 462 aa, Desulfovibrio vulgaris subsp. vulgaris str. Hildenborough
MIRHYCGIFGIYNHAEAARLSYFGLYALQHRGQESAGIVTWDGQKLREHRGMGLVPEVFNERHLGKELKGDIAIGHIRYSTTGASLIRNAQPFIVRYKGLEIAIAHNGNLVNTLELRRELEEQGSIFQTSIDSEVFVHLIARNLNGHTLEEAVMAACRKVKGAYALLILANNKLIAVRDPHGFRPLALGRVAGAHVFASETCAFDLLEAEFIRSLDPGEMVVIEDTKVQSYKIETEAPTRQCIFELIYFARPDSLVFGEDVYQCRKRMGQELARESAPDVDFVMPFPDSGVYSAVGFAQESGLPYEHAMIRNHYVGRTFIQPSQDMRDFSVRVKINPVKSMIKGKRICIVDDSIVRGTTIRTRVKKLRELGAREVHFRVSCPPIKFPCFYGIDFASKGELIAANHSVSEIERFIGIDSLHYITIEGLLRSVSHPENYCLACFTGDYPIPCAGGGKLCLECGC

SEQ ID NO: 132348 - DNA, 1428 bp, Listeria monocytogenes str. 4b F2365
  CDS (1)..(1428): transl_table=11
atgcttgctgaagtaaaaggacttaacgaagaatgtggtatttttggtatttgggatcatcctaatgcagcggaaatcacctattatgggttgcatagtttacaacatcgcggtcaagaaggtgccggaattgtttcgacagacggtgaaacactaaaaggtcaccgaaatctcggccttttagcagatgtatttaagcatggtgaactagacgatttaaaaggtaaagcagccattggccacgttcgatatgcgacagctggtcaaaaaaacttagggaacgtacaaccatttttatttcactttcatagttcttctttagcacttgcgcataatggaaatttggttaatgcgaaaagtttacgccgtgaactagaagaagaaggcgctatttttcaaacgagttcggatacagaagtgttagcgcatttaattaaacgtagccatacaggtgattttgtggaagatttaaaagtggctttgaacaaggttaagggtggctttgcgtacatgcttctgacggaagacacgatgtatgcggcgcttgacccgaatggttttagaccgctttcgataggtcgcattggtgattcttacgtagttgcttcggaaacatgtgcctttgaaacggttggcgctgagtttgtccgcgatgtggagccaggtgaactaattattattaatgatgacgggcttcgaattgaaaaattcacggaaaatgtgacgcattcgatttgcagtatggaatacatttattttgcgcgacctgactctaatattgctggaattaatgtccactcggcaagaaaacgttctgggaaaagattagcaaaagaggcttttattgatgcagatgtggttacaggtgtaccagattccagtatttctgcagcgattggttatgcggaggaagctggtcttccttacgaacttggtctcatcaaaaatagatatgtggcaagaacttttatccagccatcacaagaacttagggaacaaggcgttagaatgaaactttctgccgtgcgcggggttgtggaaggaaaacgcgttgtcatgattgatgattcgattgttcgcgggacgacaagtaaacgcattgtccagcttttacgtgaagcaggagcggcggaagttcatgtaagaatcgcttctccaccacttgcttatccttgtttttatggaattgatatccaaacgcgaaatgaattaatcgcttctaattattctgttgatgaaatttgtcggattattggggctgattctttagagtatttgagtgaagaaggtttagtagattccattggcagaccttatccgaacgaaccttacgggggactttgtatggcttatttcaacggcgattacccaacccctttatatgattatgaagcggaatatttagcgagcttagaagcagaaaaataa

SEQ ID NO: 132349 - protein, 475 aa, Listeria monocytogenes str. 4b F2365
MLAEVKGLNEECGIFGIWDHPNAAEITYYGLHSLQHRGQEGAGIVSTDGETLKGHRNLGLLADVFKHGELDDLKGKAAIGHVRYATAGQKNLGNVQPFLFHFHSSSLALAHNGNLVNAKSLRRELEEEGAIFQTSSDTEVLAHLIKRSHTGDFVEDLKVALNKVKGGFAYMLLTEDTMYAALDPNGFRPLSIGRIGDSYVVASETCAFETVGAEFVRDVEPGELIIINDDGLRIEKFTENVTHSICSMEYIYFARPDSNIAGINVHSARKRSGKRLAKEAFIDADVVTGVPDSSISAAIGYAEEAGLPYELGLIKNRYVARTFIQPSQELREQGVRMKLSAVRGVVEGKRVVMIDDSIVRGTTSKRIVQLLREAGAAEVHVRIASPPLAYPCFYGIDIQTRNELIASNYSVDEICRIIGADSLEYLSEEGLVDSIGRPYPNEPYGGLCMAYFNGDYPTPLYDYEAEYLASLEAEK

SEQ ID NO: 132350 - DNA, 1383 bp, Picrophilus torridus DSM 9790
  CDS (1)..(1383): transl_table=11
gtggattcccagccccaagaatcagacattacaactgggcaaaaagtaaatgaggattgtgccgtcatcggcttttccggcggcggcgtatattcaagtattatagccggtctcaggtcattgcagcatcgcggccaggagagctctggaataataacatacgatggaaagatccacgttaaaaagggtatgggtcttgtcagtgaggtttttaaaaatgccgatccaatgcctggaattgttggtataggccataacaggtattcaacctcgggatcaaagggcatagaaaatgcaggtccttttgttatatcatgctcccttggatacataggcataacacataatggtgagataacaaatgagcatgaactaagggaggaattaaagcatgatggatacatcttcacaagctccagtgatacagaggtaatgttaatagaatttgtcaaggagatatcaagatatggaatcaatgagggtattaaaaggggcatggagcgtttaaagggcgcatatgctgcagtattaatgataaatgacaggctttatgccataagggataagtttggttttaggcccctggtccttggcagaacatttaatggttatataatagcatcagagacctgtgccattgatgcattatctggagagacaataaaaaatgttgaacccggtgaggttatagaggtttttaacaattcttacaaaaccatttttaaattagatggtgacgtctcacactgcatgtttgaatacgtttactttgccagacctgacagtataatagacaatatagaggtctttcaggccagggtcaggatgggcatgaggcttgccgttgaatcgcctgttgatgccgatgtcgttgttcctgttccggactctggaagggcccaggcgcttggcttttcaaaggccacgggaataccatacagcgagggtcttataaagaacagatattcagaaaggacatttataatgcccgatcaaaaaagcaggcttgcagcaataaagataaaattgaatgcaataaaatcagaaatatcaaataaaaggatagtccttgttgatgacagcatagtacgtggaaatacaatgaaatacatagttaaaattgtcagggatgccggggccagtgaggttcatgttagaataagctctccaccgataaccgcaccatgcttctatggtgttgatatgaagacaaagaatgaattcatagctgcaaataaaacaatagaaagtataaaaaatgagataggtgcggattccctggcgtacctgtcaatagatggtcttaaacaggccataggaataaaaagcatatgcattagctgtttaacaggtatctatccagagtatgttccattatcttaa

SEQ ID NO: 132351 - protein, 460 aa, Picrophilus torridus DSM 9790
MDSQPQESDITTGQKVNEDCAVIGFSGGGVYSSIIAGLRSLQHRGQESSGIITYDGKIHVKKGMGLVSEVFKNADPMPGIVGIGHNRYSTSGSKGIENAGPFVISCSLGYIGITHNGEITNEHELREELKHDGYIFTSSSDTEVMLIEFVKEISRYGINEGIKRGMERLKGAYAAVLMINDRLYAIRDKFGFRPLVLGRTFNGYIIASETCAIDALSGETIKNVEPGEVIEVFNNSYKTIFKLDGDVSHCMFEYVYFARPDSIIDNIEVFQARVRMGMRLAVESPVDADVVVPVPDSGRAQALGFSKATGIPYSEGLIKNRYSERTFIMPDQKSRLAAIKIKLNAIKSEISNKRIVLVDDSIVRGNTMKYIVKIVRDAGASEVHVRISSPPITAPCFYGVDMKTKNEFIAANKTIESIKNEIGADSLAYLSIDGLKQAIGIKSICISCLTGIYPEYVPLS

SEQ ID NO: 132352 - DNA, 1533 bp, Bartonella quintana str. Toulouse
  CDS (1)..(1533): transl_table=11
atgatcctaacccatttcttacatcatgaccgaaagaatacaatgacaaaaatggacattccctttcaagaattttcattggatggcgatactcttcatgaagaatgtggagtttttggtattctaggccatgaagatgccgcgactttaacagctcttgggctccatgcacttcagcatcgtgggcaagaagcagctggaattgtttcctatcataacaaaatgtttcatcaagaaaagcatctaggtcttgttggagatcactatacaaaccccgcaacacttgcgcgtttaccaggaaatcgcgctattgggcatacccgttattcaacaactggagaaacagtattacgcaatgtgcaacctctttttgctgagttaaaagctggaggtattgctattgcccataatggcaatcttaccaacggtcttacattacgccgggaactcattgcgtccggcgctatttgccaatcaacatcagattcagaagtttttcttcatctgattgctcgttcacgttatgaatcatcatctgatcgctttgttgatgctattcggcaagtccaaggtggatatgctatgttagcgctaacacgcaccaagctcattgccgcacgcgatccaacaggtattcgacctttggtaataggtgaacttgatggtaaaccaattttttgttccgaaacctgtgcacttgatattattggagcaaaatatgttcgtgatgtcaaaaatggagaaatcatcatatgtgagatacaaaaaaatggggaaatcactaaaaaaattataaaaccagagagtgagaaaccagaaaaactgtgcctttttgaatatgtctattttgcgcgccctgattcaatcgttggaggtcggaatgtttacatgacacgtaaaaatatggggacctatttggcacaagaagcaccctgtgagggtgatgttgtggttcccgttcctgatggaggaacacctgccgcaattggctatgcacaagaaattggaatcccctttgaacttggtatcattcgtaatcattacgttggacgcacttttatcgaaccaacacagcaaattcgtgcttttggagttaaattgaagcattctgcaaaccgtcctgtcatcgaaggaaaacgcgttattctggttgatgactccattgtacgtggaacaacatccgtcaaaattgtgcgaatgctccgggatgcaggagcaaaagaagttcacatgcgcatttctagccctatgattttctatccagatttttatggcattgatacacctaacgttgaaagccttttggctaatcaatatccagacttaaaatccatgtgcaattttgttggagctgactcattagaatttctttcaacagatggtctataccttgctgtggccggagaaaaacgaaataacgctgatccacaatttactgaccattattttaccggacattatcctacacatctggttgatcaagaaagtatcccccaaattcatcaactctctgtcctaaaaacaagagattaa

SEQ ID NO: 132353 - protein, 510 aa, Bartonella quintana str. Toulouse
MILTHFLHHDRKNTMTKMDIPFQEFSLDGDTLHEECGVFGILGHEDAATLTALGLHALQHRGQEAAGIVSYHNKMFHQEKHLGLVGDHYTNPATLARLPGNRAIGHTRYSTTGETVLRNVQPLFAELKAGGIAIAHNGNLTNGLTLRRELIASGAICQSTSDSEVFLHLIARSRYESSSDRFVDAIRQVQGGYAMLALTRTKLIAARDPTGIRPLVIGELDGKPIFCSETCALDIIGAKYVRDVKNGEIIICEIQKNGEITKKIIKPESEKPEKLCLFEYVYFARPDSIVGGRNVYMTRKNMGTYLAQEAPCEGDVVVPVPDGGTPAAIGYAQEIGIPFELGIIRNHYVGRTFIEPTQQIRAFGVKLKHSANRPVIEGKRVILVDDSIVRGTTSVKIVRMLRDAGAKEVHMRISSPMIFYPDFYGIDTPNVESLLANQYPDLKSMCNFVGADSLEFLSTDGLYLAVAGEKRNNADPQFTDHYFTGHYPTHLVDQESIPQIHQLSVLKTRD

SEQ ID NO: 132354 - DNA, 1527 bp, Bartonella henselae str. Houston-1
  CDS (1)..(1527): transl_table=11
atgaaccgtttctcacatcataatcgaaagaatacgatgacaaaaatcgacattccatttcaggagttttcattgaatgacgatacccttcatgaagaatgcggagtctttggtattcttggccatgaggatgcagcgactttaacagctcttggacttcacgcgcttcaacatcgtggacaagaagcagctgggattgtttcttaccataataaaatgtttcatcaagaaaagcatctaggtcttgttggtgatcattatacaaaccccgcaacacttgcgcgtttaccgggaaatcgcgctatcgggcatacccgttattcaacaactggagaaatagcattacgcaatgtgcaacccctttttgctgagttaaaagctggaggtattgccattgcccataatggcaatcttactaacggtcttacattacgccgagaactcattgcttccggtgctatctgccaatcaacatcagattctgaagtttttcttcatcttattgctcgttcacgttatgaatcgtcgtcagatcgctttgttgatgctattcgaaaagtggaaggtggttatgccatgttagcgctcacacgcaccaaactgattgctgcgcgtgatccaataggtattcgacctctggtgatgggtgaacttcatggtaaaccaatattttgttccgaaacctgtgcccttgatattattggagcaaaatatattcgcgatgttaaaaatggagaagtcatcgtatgtgaaatacaaaaaaatggggaaatcaccacaaaaattataaaaccagaaaataagaaaccagaaaaactttgcctttttgaatatgtctattttgcgcgtcctgattcaatcgtcggaggacgaagtgtttatatgacacgtaaaaatatgggtatccgtttagctcaagaagccccctgtgaaggtgatattgtggttcctgttcctgacgggggaacacccgctgcaattggttatgcccaagaaattggaattccctttgagcttggtattattcgtaatcattacgtcggacgcacatttatcgaaccaacacaacaaattcgcgcttttggggttaaattaaagcattctgcaaatcgtcctgttattgaaggaaaacgtgtcattctggtcgatgactccattgtacgaggaacaacatccgttaaaattgtgcaaatgctccgcgatgcaggagcaaaagaagttcatatgcgcatctctagtcctatgattttctatcccgatttctatggtattgatacacctaaagttgaaagtttgttggctaatcaatatccagatttaaaagctatgtgcaattttgttggagctgactcattagaatttctttcaacaaatggtctatatcttgctgtgataggagaaaaacgaaataatgctgatccacaatttactgaccattattttactggagattatcctacacatctagtcgatcaagaaagtattcctaaaatttatcaatcatctgtcctaaaaacaagagattaa

SEQ ID NO: 132355 - protein, 508 aa, Bartonella henselae str. Houston-1
MNRFSHHNRKNTMTKIDIPFQEFSLNDDTLHEECGVFGILGHEDAATLTALGLHALQHRGQEAAGIVSYHNKMFHQEKHLGLVGDHYTNPATLARLPGNRAIGHTRYSTTGEIALRNVQPLFAELKAGGIAIAHNGNLTNGLTLRRELIASGAICQSTSDSEVFLHLIARSRYESSSDRFVDAIRKVEGGYAMLALTRTKLIAARDPIGIRPLVMGELHGKPIFCSETCALDIIGAKYIRDVKNGEVIVCEIQKNGEITTKIIKPENKKPEKLCLFEYVYFARPDSIVGGRSVYMTRKNMGIRLAQEAPCEGDIVVPVPDGGTPAAIGYAQEIGIPFELGIIRNHYVGRTFIEPTQQIRAFGVKLKHSANRPVIEGKRVILVDDSIVRGTTSVKIVQMLRDAGAKEVHMRISSPMIFYPDFYGIDTPKVESLLANQYPDLKAMCNFVGADSLEFLSTNGLYLAVIGEKRNNADPQFTDHYFTGDYPTHLVDQESIPKIYQSSVLKTRD

SEQ ID NO: 132356 - DNA, 1539 bp, Acinetobacter sp. ADP1
  CDS (1)..(1539): transl_table=11
atgtgtggagtagttggtatagccggtaaagcgccagttaaccaaatgttgtttgatgcattaacgatgttgcagcatcgggggcaagatgcagctgggattgtaacctgccatgatggccgtttatttctcagaaaagacaatggaatggtgcgtgatgtattccatactcgtcatatgcgtgctttgatcggtaattacggtattggtcatgtgcgctatccaactgcgggttcctcaagtagtgctgaggcacaacctttttatgtgaattcaccctatggaattacgcttgcacacaatggtaatctgaccaacgctgaagaaattcacgatgatctgtttaaaacagatttgcgtcatatgaatacagattccgattccgaagttttgcttaacgtgtttgcgcacgaattgcaaaagagcggcaagttatcgcctacatcagaagatgtattccatgcggtttctcgtgtgcatgagcgctgcaagggtgcttatggcgtagttgcgatgatcactggacatggtcttgttggtttccgtgatccaaatgggattcgaccattaatttatggttcgcgtgaaactgaaaagggcgttgaatatattattgcctctgagtctgttgcaattacagcactcggattcaaaattgaacgcgatattcagccaggcgaagcaattttcatcaatgatcagggtgaattgtttacaaagcaatgtgctacaaatccacagcatcgcccatgtatctttgaatatgtttattttgcgcgtccagatgccattattgatggtatttctgtgtataaagcccgtttaaagatgggtgagaagctggcaaataaaatcttgcgcgagtggggtgaagatcacggaattgatgtcgtaattccaattccagatacaagtcgtacatcagcacttgaactggcgaatattctaggtgtgaaattccgtgaaggttttatgaaaaaccgttatatcggacgtacctttattatgccagggcagcaacaacgtaaaaaatcggtacgtcaaaagctgaacccagttgagcttgaatttaaaggtaaaaatgtattgcttgtagacgattcaatcgttcgcggtaccacctgtaatgaaattattcaaatggcgcgtgattctggtgctaaaaaggtatattttgcctctgctgcacctatggtgaagtatccaaatgtctatggtattgatatgcctgccaagacagaactgattgcttcgcaacgtagtgttgaagagattcgtgaaattatcggtgcagaccgtttggttttccaagacctggatgatctaaaaagtgctgtacgtaccaccaaagtacctgatctgacagagtttgatagttctgtttttgatggagtgtatgtggcaggtgggattgataaggcttatcttgaaaaccttgagaagaagcgcaacgatactgccaaaaatgcagcggatagttatattgatgtgaatatcgatgctgcttctgtggatttgactggaattcgagagctataa

SEQ ID NO: 132357 - protein, 512 aa, Acinetobacter sp. ADP1
MCGVVGIAGKAPVNQMLFDALTMLQHRGQDAAGIVTCHDGRLFLRKDNGMVRDVFHTRHMRALIGNYGIGHVRYPTAGSSSSAEAQPFYVNSPYGITLAHNGNLTNAEEIHDDLFKTDLRHMNTDSDSEVLLNVFAHELQKSGKLSPTSEDVFHAVSRVHERCKGAYGVVAMITGHGLVGFRDPNGIRPLIYGSRETEKGVEYIIASESVAITALGFKIERDIQPGEAIFINDQGELFTKQCATNPQHRPCIFEYVYFARPDAIIDGISVYKARLKMGEKLANKILREWGEDHGIDVVIPIPDTSRTSALELANILGVKFREGFMKNRYIGRTFIMPGQQQRKKSVRQKLNPVELEFKGKNVLLVDDSIVRGTTCNEIIQMARDSGAKKVYFASAAPMVKYPNVYGIDMPAKTELIASQRSVEEIREIIGADRLVFQDLDDLKSAVRTTKVPDLTEFDSSVFDGVYVAGGIDKAYLENLEKKRNDTAKNAADSYIDVNIDAASVDLTGIREL

SEQ ID NO: 132358 - DNA, 1518 bp, Erwinia carotovora subsp. atroseptica SCRI1043
  CDS (1)..(1518): transl_table=11
atgtgcggtattgtcggtatcgccggttttacaccggtcaaccagtcgatttatgacgcgttaacggtgttgcaacaccgtgggcaggatgccgcgggtattgtgaccatcgatgcctttaattgttttcgcctgcgtaaggccaatggcctggtgaaagatgtgtttgaagcgcggcacatgcagcgcttacagggaaacatggggcttggccatgtacgttatccgaccgcaggcagttccagcgcctcggaagcacagcctttttatgtaaactctccgttcggcatcacgatggctcacaacggtaacctgacgaacgcccacgaactgcgtaaaaagctgttcgagcaggagcgccgtcacgttaacaccacgtccgattctgaaatcctgttgaatatctttgccagagaactggaccgtttccaacattatccgttggaagccgataatatttttgcggccgttgccgcgacgcaccagcaaattcgtggtgcctatgcctgtgttggcatgattatcggtcatggcatggtggcgttccgcgatcctaacggtattcgtcctctggtgattggtaaacgtgacctggaagatggtcgcagcgaatatatggtagcgtctgaaagcgtcgcactggatacgctgggctttgagttcttacgtgatgttgcgccgggagaagcgatctacattacggaaaaagggcaactgtttactcgccagtgcgcagagaatccaaagagcaacccgtgcctgttcgaatatgtctacttcgctcgtcctgactctttcatcgataaaatttcggtctatagcgcacgcgttcgcatgggtcagaagctgggtgaaaagattgcacgtcagtgggaagatctcgatattgatgtcgtgatcccgattcctgaaacctcttgtgatatcgcgttggaaatcgcgcgcattatcaacaaaccgtatcgtcagggattcgtgaaaaaccgctatgttggtcgcacctttatcatgccgggacagcaggcgcgtaagaaatctgtgcgtcgcaagctgaacgcgaaccgtgccgagttccgtgataaaaatgtgctgctggtcgatgactctatcgtacgtggcacaacgtcggagcagattgtggagatggcgcgtgaagcaggagccaggcgtgtttatctggcctctgcggcaccggaaattcgcttccctaacgtgtacggcatcgacatgccgagcgttaatgaactgattgcccacggtcgcgaagtggacgagatctgtaagattatcggtgccgatgagctgatattccaggatctcgacgatctgatcgacgcagcgcgtgaagataacccggatattgttcagtttgaatgttcagtgttcaatgggatttacgtgacaaaagacgtcgatcaaggctatctggattatctggaagtactgcgtaacgatgatgctaaagcgttacgtagccagaatgaagtcgaagatctggaactgcacaacgaaggttaa

SEQ ID NO: 132359 - protein, 505 aa, Erwinia carotovora subsp. atroseptica SCRI1043
MCGIVGIAGFTPVNQSIYDALTVLQHRGQDAAGIVTIDAFNCFRLRKANGLVKDVFEARHMQRLQGNMGLGHVRYPTAGSSSASEAQPFYVNSPFGITMAHNGNLTNAHELRKKLFEQERRHVNTTSDSEILLNIFARELDRFQHYPLEADNIFAAVAATHQQIRGAYACVGMIIGHGMVAFRDPNGIRPLVIGKRDLEDGRSEYMVASESVALDTLGFEFLRDVAPGEAIYITEKGQLFTRQCAENPKSNPCLFEYVYFARPDSFIDKISVYSARVRMGQKLGEKIARQWEDLDIDVVIPIPETSCDIALEIARIINKPYRQGFVKNRYVGRTFIMPGQQARKKSVRRKLNANRAEFRDKNVLLVDDSIVRGTTSEQIVEMAREAGARRVYLASAAPEIRFPNVYGIDMPSVNELIAHGREVDEICKIIGADELIFQDLDDLIDAAREDNPDIVQFECSVFNGIYVTKDVDQGYLDYLEVLRNDDAKALRSQNEVEDLELHNEG

SEQ ID NO: 132360 - DNA, 1488 bp, Propionibacterium acnes KPA171202
  CDS (1)..(1488): transl_table=11
gtggcgcgcgcagacggaaggcttaccgcagacctcaacccccaggaccacgggccccaagacgcctgtggcgtcatcgggatctatgcccccggtgaggaggtttctaaactcacctacttcggcatgtatgccctgcaacaccgtggccaggaatcagctggcatggcggtgtcagacggtcgccacatgatggtctttaaagacatggggttggtgtcccaggtctttgacgaggccaccctcaattccctccagggacatatggccgtcgggcacacccggtattcgacgactggtgcgagtatctgggacaacgcccagccgacgttcaggtcgcgtcaaggtggtgacgggctagctctggcccataacggcaacctcaccaacaccggcgccctcgaagccctcatcgctgagcgtgccccggataccgaggttccccacaaagaccggatggactccagcaacgacacctcgctggtaacagccctcatgacgacctatgacggcactcttgaggaagtcgccgcccaggtcctgccccaccttcagggtgccttcagtctcgttttcatggacgaccacactttgtgcgctgctcgtgatccgcagggcatccgaccgttggtgctggggcgcctatctagtggttgggtggtcgcctccgaaactgcggctatcgacatcgtcggtggtactttcgttcgcgagatcgagcccggcgagatggtcgccattgacgcggctgggttgcgcaccagccgtttcgctgcggcccggcccaaggggtgcgtcttcgaatacgtttacctggctcgccctgacaccgttattgctggacgacgtatccacaacgttcgcgtcaaagtcggcaagatcctggcccaggaacaccctgccgacgccgacctcgtcatcccggtgccagagtctggcaccccggctgctatcggctatgccgacgagtccggcatcccctacggcatgggcctggtcaagaactcctacgtgggccggactttcatccagccctctcaaaccctgcgcaacttgggtattcggctcaagctcaacccgttgcgtgacgtcattgagggacgacgcatcgtcgtcgtcgatgactccatcgtgcgcggcaatacccagcgtcagctggtccgaatgttgcgtgaggctggtgcggccgaggtgcacgtgcgcatctcttctccgccggtgcagtggccgtgcttctacggcattgacttcgctactcgcgctcagctcatcgccccgggtcttgacgtcgaggacatctgccgatctatcggcgctgactcgcttggctacgtcagccttgacggcctcgtccgtgccacccacgttgacgccgataacctctgccgggcttgttttgacggcgtttatcccgtaccggtgcctgtctcggcgcgagccgtgctagccgacgccacccacaccaacccgaaccaggagcagcagtga

SEQ ID NO: 132361 - protein, 495 aa, Propionibacterium acnes KPA171202
MARADGRLTADLNPQDHGPQDACGVIGIYAPGEEVSKLTYFGMYALQHRGQESAGMAVSDGRHMMVFKDMGLVSQVFDEATLNSLQGHMAVGHTRYSTTGASIWDNAQPTFRSRQGGDGLALAHNGNLTNTGALEALIAERAPDTEVPHKDRMDSSNDTSLVTALMTTYDGTLEEVAAQVLPHLQGAFSLVFMDDHTLCAARDPQGIRPLVLGRLSSGWVVASETAAIDIVGGTFVREIEPGEMVAIDAAGLRTSRFAAARPKGCVFEYVYLARPDTVIAGRRIHNVRVKVGKILAQEHPADADLVIPVPESGTPAAIGYADESGIPYGMGLVKNSYVGRTFIQPSQTLRNLGIRLKLNPLRDVIEGRRIVVVDDSIVRGNTQRQLVRMLREAGAAEVHVRISSPPVQWPCFYGIDFATRAQLIAPGLDVEDICRSIGADSLGYVSLDGLVRATHVDADNLCRACFDGVYPVPVPVSARAVLADATHTNPNQEQQ

SEQ ID NO: 132362 - DNA, 1560 bp, Leifsonia xyli subsp. xyli str. CTCB07
  CDS (1)..(1560): transl_table=11
gtggccggaggagacggtcgtctcagccatgatctgctgcccggcgagaaggggccgcaggatgcttgcggtgtcttcggtgtgtgggcccccggcgaggaggtcgctaagctcagctacttcggcctctatgccctgcagcaccgcggccaggagtcggcgggcatcgcgacgagcgacgacgagaagatcctcatctacaaggacatgggcctggtctcccaggtcttcaacgagaacgcgctcaactcgctgaccggccacatcgccgtcggccacacacgatattcgaccaccggcgcctccagctggcagaacgcgcagccgaccctcggctccacctccggcggcacggtcgcgctcgggcacaacggcaacctgacgaacaccgccgagctgatggagctggtgcaggagcgctacccagcgcacgacggcgagctctcccgcggcaacacgaccgacacggccgtcgtcaccgccctgctcaccggcgatctcgaccacacgctcgaagagaccgcgctggaagtcctgccgcgtctgcgcggagcgttctgtctcgtcttcatggacgagcacacgctctacgccgcccgcgatccgcagggcgtccgcccgctggtgctcggccgcctggagcgcggctgggtcgtcgcgtcggagaccgcggcgctcgacatcgtcggcgcgagcttcgtgcgcgaggtcgagccgggcgagttcatcgccatcgacgagaacggcctgcgcagcagccgcttcgccgccgagaagcgcgcgggatgcgtcttcgaatacgtctacctcgcccgccccgacaccaccatcgccggccgcggagtctacgaggcgcgggtcgagatgggccgccagctcgcgcgtgagcacgaggtggcggccgatctcgtcatcccgacgcccgagtccggcacgcccgccgcgatcggctatgcgcaggccgctggcgtcccgttcggtcagggtctcgtgaagaactcgtacgtcggccgcaccttcatccagccgtcgcagaccatccgccagcgcggcatcaagctgaagctgaaccccctgaaggacgtcatcaagggcaagcgtctcgtcgtggtggacgattcgatcgtccgcggcaacacgcagcgtgcgctggtctcgatgctgcgcgaggccggagcggcggaggtgcatgtgcgtatctccagcccgcccatcacctggccgtgcttctacggaatcgacttcgcctcccgcgcggagctcatcgccaccggcctcggcgtcgaggaagtgcgccagtctatcggcgccgactccctcggctatctctccgaggacgggatgatcgcctccaccgagcagccccgcgagtgcctctgcaccgcgtgctttaccggcgtctacccgatcgcgctgcccgccgcccagcacctcggcaagaacctgctggaacgcccggcggcggagggcgctgccgccaccggcgacggctgcgagcccggcccggattcggagcatgagcgcctgctggcgttcggggacccgggacggcaggagtaa

SEQ ID NO: 132363 - protein, 519 aa, Leifsonia xyli subsp. xyli str. CTCB07
MAGGDGRLSHDLLPGEKGPQDACGVFGVWAPGEEVAKLSYFGLYALQHRGQESAGIATSDDEKILIYKDMGLVSQVFNENALNSLTGHIAVGHTRYSTTGASSWQNAQPTLGSTSGGTVALGHNGNLTNTAELMELVQERYPAHDGELSRGNTTDTAVVTALLTGDLDHTLEETALEVLPRLRGAFCLVFMDEHTLYAARDPQGVRPLVLGRLERGWVVASETAALDIVGASFVREVEPGEFIAIDENGLRSSRFAAEKRAGCVFEYVYLARPDTTIAGRGVYEARVEMGRQLAREHEVAADLVIPTPESGTPAAIGYAQAAGVPFGQGLVKNSYVGRTFIQPSQTIRQRGIKLKLNPLKDVIKGKRLVVVDDSIVRGNTQRALVSMLREAGAAEVHVRISSPPITWPCFYGIDFASRAELIATGLGVEEVRQSIGADSLGYLSEDGMIASTEQPRECLCTACFTGVYPIALPAAQHLGKNLLERPAAEGAAATGDGCEPGPDSEHERLLAFGDPGRQE

SEQ ID NO: 132364 - DNA, 1440 bp, Desulfotalea psychrophila LSv54
  CDS (1)..(1440): transl_table=11
atgtcacaggtaaaaacattatccgcgtcccaggactaccccacccacgaatgtggtgtttgcggtattttcgaccatgaagatgctgcaaagctcacctacttcggcctctatgccctccagcaccgtggccaagaaagtgcgggaattgttacatcaaccggcaaagaggtctttcttcacaaagatatgggacttgtgcccgagatctttaccgaagatatcctgcaaggacttaaaggggacatgtccatcggccatgtacgctactccaccaccggtgcgtccaacttcaccaatacccaacccctgatggttcaccataagaaccagaccctctccgttgcccacaatggcaacctggtgaactccaccgagctcagaaacaggctcgaggagagtggttctatctttcaaaccaccatggactccgaggccgtcctccatctcatggtacgcaacagcggtcccgatctcgataaaacactgagcgagacattccgtgccctcaagggtgcctattccctgctctatatgaccgaggacaccctcgttgccgtccgtgatcccgatggatttcgccccctctgccttggtcgcctgaccactggcggctgggttatagcctctgaaacctgcgccctcgacctcatcgaggccgattatgtacgtgatatcgagccgggtgaagttcttatcatgaaaagaggtgaggagatgcgctccatcttcccatggccaaaacagaccccgcaccactgcatctttgagcaggtctactttgcccgtcccgattccgatgtctttggtatcaacgtctatcaatcacgtaagcagatgggtaagatcctggcccgcgaggcaaagattgatgccgatttcgttatgccctttcctgattccggtaactatgcggccattggctatgcacaggaatccggtattcccatggagatgggcgtgatcagaaatcactatgtgggcaggacattcattgaaccaagccagtccatgcgtgacttcaacgtcaaggtcaagctcaaccccgtacgatctctcttgaagggaaaacgggttatcatcgttgaggattctattatccgaggaacaacaggtaagagtcgggtacgagccctacgcgaggcgggggccaaagagatccacatggtggtcagctgtcctccgaccatgcatgcctgctactatggcatcgatttcccaacctcatcacagctcattgcctgcaataagaacgtcgaagaaatcgcagaatatctgggcctggactctctccactacctcagccttgagggcatggtagaggcaacgggtatccctaaagagcactactgtctggcctgtttcaatggcatttaccccatcgcccctgatcaaaaatatcacaaagacgctctggcaacaaaggttgtcaagggctag

SEQ ID NO: 132365 - protein, 479 aa, Desulfotalea psychrophila LSv54
MSQVKTLSASQDYPTHECGVCGIFDHEDAAKLTYFGLYALQHRGQESAGIVTSTGKEVFLHKDMGLVPEIFTEDILQGLKGDMSIGHVRYSTTGASNFTNTQPLMVHHKNQTLSVAHNGNLVNSTELRNRLEESGSIFQTTMDSEAVLHLMVRNSGPDLDKTLSETFRALKGAYSLLYMTEDTLVAVRDPDGFRPLCLGRLTTGGWVIASETCALDLIEADYVRDIEPGEVLIMKRGEEMRSIFPWPKQTPHHCIFEQVYFARPDSDVFGINVYQSRKQMGKILAREAKIDADFVMPFPDSGNYAAIGYAQESGIPMEMGVIRNHYVGRTFIEPSQSMRDFNVKVKLNPVRSLLKGKRVIIVEDSIIRGTTGKSRVRALREAGAKEIHMVVSCPPTMHACYYGIDFPTSSQLIACNKNVEEIAEYLGLDSLHYLSLEGMVEATGIPKEHYCLACFNGIYPIAPDQKYHKDALATKVVKG

SEQ ID NO: 132366 - DNA, 1488 bp, Symbiobacterium thermophilum IAM 14863
  CDS (1)..(1488): transl_table=11
gtgatccggcccggtgacccgaccctggccctggccctgcagccctacctgggcgggtggccgaccaacccggacaagggcccggcggacgagtgcggcgtcttcggcatctacggccaccctgaggcggcgcgggtggtgtaccacgccctgatcgccctgcagcaccgggggcaggagtccgcgggcatcgtggccgcggacggtgcgaacctgaacacccaccggggcatggggctggtcagcgacgtgttcgagaagcccgagaccatccagcggctggccggcgacatcgccatcggccacgtgcggtattcgaccaccggctcctcccggctgggcaacgcccagcccgtggtggtgaacacccggcgcggcggactggccctggcgcacaacggcaacctcgtggacgccccggccatccgggaccggctggaggagcagggggcgatcttcaccacgtccatcgacaccgaggtgctggcccacctgatcgtccgttcccgggcgaagagcctggaggacgcgatcgtcgacgccgtgagccaggtgcacggcggctatgccctgctcatcctggccgaggaccggctgatcggcatccgggatccccacggcatccgcccgctgcagctgggccggcttgacggcagctgggtgctggcctccgagacctgcgcctttgacaccatcggcgcggagttcgtgcgggaggtggcccccggcgagatggtgaccatcagcgaggggggcaagctccggtcccgggcggcggtcagggaggccgtcgccccccggccgtgcatcttcgagttcatctacttcgcccgtcccgactcgcagttcgtcggggtcaacgtgcacaccgtgcgcaaggcgatgggccgccagctcgcgaaggaggcgccggcggatgccgacatcgtcatcggggtgcccgactcctcgatctccgcggccaccggctacgcggaggagtccggcatcccctacgaggtcgggctggtcaagaaccgctacatcgcccggacgttcatcctgccgtcccaggccgggcgcgagtcggcgctgaagctgaagctgaacccgctgcgcaaggtgatcgagggcaggcgggtggtgctggtggacgactccatcgtgcgcggcaccacgtcccgccacctggtgagcctcctccgggaggccggggcgcgggaggtgcacctgcgcatcgcatcgccgccgtaccagaacgcctgccactacggcatcgatacctccaagtccaccgacctgatcgcccgcgggcgcacggtccgggagatcgccgacgccatcggcgccgactccctggcctacctctcggtggagggcatggtgaaggccaccggcctgtcgccggaagcgggcttctgcctggcctgcttcaccggcgactacccggtgcccgtgccggaagaggccgacaagtacgcgctggaggggggctgcggctgtgactga

SEQ ID NO: 132367 - protein, 495 aa, Symbiobacterium thermophilum IAM 14863
MIRPGDPTLALALQPYLGGWPTNPDKGPADECGVFGIYGHPEAARVVYHALIALQHRGQESAGIVAADGANLNTHRGMGLVSDVFEKPETIQRLAGDIAIGHVRYSTTGSSRLGNAQPVVVNTRRGGLALAHNGNLVDAPAIRDRLEEQGAIFTTSIDTEVLAHLIVRSRAKSLEDAIVDAVSQVHGGYALLILAEDRLIGIRDPHGIRPLQLGRLDGSWVLASETCAFDTIGAEFVREVAPGEMVTISEGGKLRSRAAVREAVAPRPCIFEFIYFARPDSQFVGVNVHTVRKAMGRQLAKEAPADADIVIGVPDSSISAATGYAEESGIPYEVGLVKNRYIARTFILPSQAGRESALKLKLNPLRKVIEGRRVVLVDDSIVRGTTSRHLVSLLREAGAREVHLRIASPPYQNACHYGIDTSKSTDLIARGRTVREIADAIGADSLAYLSVEGMVKATGLSPEAGFCLACFTGDYPVPVPEEADKYALEGGCGCD

SEQ ID NO: 132368 - DNA, 1431 bp, Bacillus licheniformis ATCC 14580
  CDS (1)..(1431): transl_table=11
atgcttgctgaaatcaaaggcttaaatgaagaatgcggcgtatttgggatttgggggcatgaagaagcaccgcaaattacgtactacggccttcacagccttcagcacagaggccaggagggcgccggcatcgtcgcgacagacggcgaaaaaatgtccgcccacaaaggccaggggctgattaccgaagtttttcaaaacggtgagctcaaaaaggtgaaaggaaagggagcgatcggccacgtccgctatgcaacggcgggcggcggcggcttcgaaaacgtccagccgttccttttccattcgcaaaacaacggcagccttgcgcttgcgcacaatggaaacttagtgaacgccactcagctaaaacagcagcttgaaaaccagggcagcatttttcaaacgtcttcagatacggaagtgctcgcccatttaattaaaagaagcggccacttcgagctgaaagatcaaatcaaaaacgctctttctatgctgaaaggcgcttatgctttcctgatcatgacggaaaaggaaatgatcgtggcgcatgatccgaacggactcagaccgctatctgtcgcaatgcttggcgacgcgtacgtcgtcgcttctgaaacgtgcgcatttgatgtggtcggcgcgacatatctgcgcgatgtagaaccgggcgagatgctgatcatcaatgatgaaggcatgaagtcagagcggttctccatcaacatcaaccgttcgatctgcagcatggagtacatttatttctcaagacctgacagcaatattaacggcattaacgtccacagcgcgagaaagaatctcggcaaaaagctcgccgaggaatcaggcattgaagcagatgtggtgacaggcgttcctgactcaagcatttcagcggcgatcggctatgccgaagcgacgggaattccttacgaactcggattgatcaaaaaccgctatgtcggcagaacgttcattcagccgtcacagtcgctcagggagcagggcgtgagaatgaagctgtcagccgtccgcggggtcgttgaaggaaagcgcgtcgtcatggtggacgattcaatcgtgaggggcacgacgagccgcaggattgtgacgatgctgcgcgaagccggagcgacggaagtgcacgtcagaatcagttccccgcctattgcccatccgtgcttttacggaattgacacatcgacgcacgaagaactgatcgcgtcctctcattcagtggaagaaatccgtcaggaaatcggcgccgatacattgtcattcttgagcattgaaggactcctttccgggatcggaagacagtatgaaggtgaaaactgcggccagtgcatggcctgttttacaggaaaatatccgaccgaaatttatcaggatactgttcttcctcacgtgaaagaaatcgttttgacaaaataa

SEQ ID NO: 132369 - protein, 476 aa, Bacillus licheniformis ATCC 14580
MLAEIKGLNEECGVFGIWGHEEAPQITYYGLHSLQHRGQEGAGIVATDGEKMSAHKGQGLITEVFQNGELKKVKGKGAIGHVRYATAGGGGFENVQPFLFHSQNNGSLALAHNGNLVNATQLKQQLENQGSIFQTSSDTEVLAHLIKRSGHFELKDQIKNALSMLKGAYAFLIMTEKEMIVAHDPNGLRPLSVAMLGDAYVVASETCAFDVVGATYLRDVEPGEMLIINDEGMKSERFSININRSICSMEYIYFSRPDSNINGINVHSARKNLGKKLAEESGIEADVVTGVPDSSISAAIGYAEATGIPYELGLIKNRYVGRTFIQPSQSLREQGVRMKLSAVRGVVEGKRVVMVDDSIVRGTTSRRIVTMLREAGATEVHVRISSPPIAHPCFYGIDTSTHEELIASSHSVEEIRQEIGADTLSFLSIEGLLSGIGRQYEGENCGQCMACFTGKYPTEIYQDTVLPHVKEIVLTK

SEQ ID NO: 132370 - DNA, 1416 bp, Bacillus cereus E33L
  CDS (1)..(1416): transl_table=11
atgcttgctgaaataaaggggttaaacgaagaatgtggcgttttcggaatttgggggcatgaaaatgcggcacaagtttcatactacggattgcacagtttacagcaccgtgggcaagaaggcgcaggcattgtcgtaaataatggggaaaaaatcgtcggtcacaaggggttaggtttaatatcggaagtgttttcaagaggtgagctagaaggattgaatggaaaatcagcaatcgggcatgtacgatacgcgacggctggtggaagtgaagtagctaacgttcaaccattattattccgtttttctgatcatagtatggcattagctcataacggaaatttaattaatgcaaaaatgcttcgccgcgaattagaggcagagggaagtatttttcaaacaagttcagatacagaagtacttttacatcttattaaacgtagtacgaaagattcgttaattgaaagtgtaaaagaggctttaaataaagtgaaaggtgcgtttgcgtatcttttactaactggaaatgaaatgatcgttgcgttagatccgaatggtttccgtcctctttcaattggaaagatgggtgatgcttacgttgtagcatcagaaacatgtgctttcgatgtagtaggtgcaacatacattcgtgatgtagaaccgggtgaattacttatcatcaatgatgaaggaattcacgtagatcgttttacaaatgaagtagatcatgcaatttgtagtatggaatacatttactttgcacgaccagattctaatattgctggtattaacgtccatgcagcacgtaaaaacatgggaaaacgtttggcggcagaagctcctattgaagctgatgttgttactggtgtgccagactctagtatttcggcagcaattggttatgcggaggcgacaggtattccatatgagttaggattaattaaaaatcgttacgttggacgtacatttattcaaccttctcaagaactgcgcgagcaaggggttaagatgaagctttcagcagtaagaggggtagttgaaggaaaacgagttgttatgattgacgattctattgtaagaggaacaacgagtaaacgaattgttcgtatgcttcgtgaggctggagcgacagaagttcacgtaagaattgcgtcaccacctcttaaatatccatgtttctatggtattgatattcaaacgagaaaagaattaattgcagcaaatcatacagtagaagaaattcgtgaaatgatcggagcagattctttaacatttttaagcgaagatggattagtagatgcaattggacgtccatatgaagggaaatatggcggcctatgtatggcttactttaatggggactatccaacagctctttatgattatgagcaagagcttttagaaagtatgaaataa

SEQ ID NO: 132371 - protein, 471 aa, Bacillus cereus E33L
MLAEIKGLNEECGVFGIWGHENAAQVSYYGLHSLQHRGQEGAGIVVNNGEKIVGHKGLGLISEVFSRGELEGLNGKSAIGHVRYATAGGSEVANVQPLLFRFSDHSMALAHNGNLINAKMLRRELEAEGSIFQTSSDTEVLLHLIKRSTKDSLIESVKEALNKVKGAFAYLLLTGNEMIVALDPNGFRPLSIGKMGDAYVVASETCAFDVVGATYIRDVEPGELLIINDEGIHVDRFTNEVDHAICSMEYIYFARPDSNIAGINVHAARKNMGKRLAAEAPIEADVVTGVPDSSISAAIGYAEATGIPYELGLIKNRYVGRTFIQPSQELREQGVKMKLSAVRGVVEGKRVVMIDDSIVRGTTSKRIVRMLREAGATEVHVRIASPPLKYPCFYGIDIQTRKELIAANHTVEEIREMIGADSLTFLSEDGLVDAIGRPYEGKYGGLCMAYFNGDYPTALYDYEQELLESMK

SEQ ID NO: 132372 - DNA, 1512 bp, Mannheimia succiniciproducens MBEL55E
  CDS (1)..(1512): transl_table=11
atgtgtggtattgttggaattgtaagtcaaagcccggtcaatcaatcaatttatgatgccttgaccgtattgcagcatcgcggacaggatgctgccgggattgtgactattgatgatgaaaaccgctttcgcttgcgtaaagccaacggtttggtaagcgatgtgttccaacaggttcacatgacgcgtttacagggcaacgcggggattggacacgttcgttatccgacagccggtagctcaagcgtatcggaagcgcaacctttctatgtcaattcgccttacggcttatcattagtgcataacggcaaccttacaaattccgacgaattaaaatccaaacttttcaaattagcccgtcgtcacgtcaatactaattccgactccgaagcattgttaaatattctggcttattatcttgatcatatgcaaaccgagcatctttcaccggaagatattttttatgcgatcaaaaaaacccataaagatattcgcggcgcttatgcctgtatcgctatgattatcggtcacggtatggtggcgttcagagatcctcacggcattcgcccgttaattttgggtaaacgcgaagagagcggaaaaaccgaatatatgtttgcttcggaatctgttgcattagacaccgccggttttgacgtggtacgtgatattgaacccggcgaagcggtatatatcactttcgacggcaaactctacgcggagcaatgtgcggaaaatccggtgttaacgccttgtattttcgaatacgtttattttgcccgtccggattcgactattgacggcgtatcggtatatgcggcgcgcgtacatatgggtgaacgtttggggcaaaaaattgccaacgaatgggctgatgcggatattgatgtggtcattccggtgcctgaaacatccaatgatatcgcattaagaatcgcaaccatattgggcaaaccttaccgtcagggtttcgtaaaaaaccgttatgtgggacgcacatttattatgccggggcaaaaacagcgtattagtgcggttcgccgtaaattaaatacgatttcttccgaatttaaggataaaaacgtgttattagtggatgattccatcgtgcgcggtacaacttcggaacaaatcgttgatatggcgcgtgccgccggcgcgaagaaaatttattttgcttcggcagcgcctgaaattcgctatccgaatgtgtatggcattgatatgccgaccaagcacgaattaatcgcttatggccgcgagcctgaggaaattgccaaattaatcggcgtggataagctcatttttcaggatttatcggcattaacgcagtccgtacagcaagaaaatccaaatatcaaagaatttgatacttcggtatttaccggacattatgtgacgggcgatatttccaccgaatatctggataatattgcgcaacagcgtaatgacgcggcaaaaagaaaacgcgcaaaagatgcgacaaatctggaaatccataacgaaggataa

SEQ ID NO: 132373 - protein, 503 aa, Mannheimia succiniciproducens MBEL55E
MCGIVGIVSQSPVNQSIYDALTVLQHRGQDAAGIVTIDDENRFRLRKANGLVSDVFQQVHMTRLQGNAGIGHVRYPTAGSSSVSEAQPFYVNSPYGLSLVHNGNLTNSDELKSKLFKLARRHVNTNSDSEALLNILAYYLDHMQTEHLSPEDIFYAIKKTHKDIRGAYACIAMIIGHGMVAFRDPHGIRPLILGKREESGKTEYMFASESVALDTAGFDVVRDIEPGEAVYITFDGKLYAEQCAENPVLTPCIFEYVYFARPDSTIDGVSVYAARVHMGERLGQKIANEWADADIDVVIPVPETSNDIALRIATILGKPYRQGFVKNRYVGRTFIMPGQKQRISAVRRKLNTISSEFKDKNVLLVDDSIVRGTTSEQIVDMARAAGAKKIYFASAAPEIRYPNVYGIDMPTKHELIAYGREPEEIAKLIGVDKLIFQDLSALTQSVQQENPNIKEFDTSVFTGHYVTGDISTEYLDNIAQQRNDAAKRKRAKDATNLEIHNEG

SEQ ID NO: 132374 - DNA, 1485 bp, Bacillus licheniformis ATCC 14580
  CDS (1)..(1485): transl_table=11
atggattcatgcgcagacagaagagctcgaaagcgcatggaaaggagctatcccatgcttgctgaaatcaaaggcttaaatgaagaatgcggcgtatttgggatttgggggcatgaagaagcaccgcaaattacgtactacggccttcacagccttcagcacagaggccaggagggcgccggcatcgtcgcgacagacggcgaaaaaatgtccgcccacaaaggccaggggctgattaccgaagtttttcaaaacggtgagctcaaaaaggtgaaaggaaagggagcgatcggccacgtccgctatgcaacggcgggcggcggcggcttcgaaaacgtccagccgttccttttccattcgcaaaacaacggcagccttgcgcttgcgcacaatggaaacttagtgaacgccactcagctaaaacagcagcttgaaaaccagggcagcatttttcaaacgtcttcagatacggaagtgctcgcccatttaattaaaagaagcggccacttcgagctgaaagatcaaatcaaaaacgctctttctatgctgaaaggcgcttatgctttcctgatcatgacggaaaaggaaatgatcgtggcgcatgatccgaacggactcagaccgctatctgtcgcaatgcttggcgacgcgtacgtcgtcgcttctgaaacgtgcgcatttgatgtggtcggcgcgacatatctgcgcgatgtagaaccgggcgagatgctgatcatcaatgatgaaggcatgaagtcagagcggttctccatcaacatcaaccgttcgatctgcagcatggagtacatttatttctcaagacctgacagcaatattaacggcattaacgtccacagcgcgagaaagaatctcggcaaaaagctcgccgaggaatcaggcattgaagcagatgtggtgacaggcgttcctgactcaagcatttcagcggcgatcggctatgccgaagcgacgggaattccttacgaactcggattgatcaaaaaccgctatgtcggcagaacgttcattcagccgtcacagtcgctcagggagcagggcgtgagaatgaagctgtcagccgtccgcggggtcgttgaaggaaagcgcgtcgtcatggtggacgattcaatcgtgaggggcacgacgagccgcaggattgtgacgatgctgcgcgaagccggagcgacggaagtgcacgtcagaatcagttccccgcctattgcccatccgtgcttttacggaattgacacatcgacgcacgaagaactgatcgcgtcctctcattcagtggaagaaatccgtcaggaaatcggcgccgatacattgtcattcttgagcattgaaggactcctttccgggatcggaagacagtatgaaggtgaaaactgcggccagtgcatggcctgttttacaggaaaatatccgaccgaaatttatcaggatactgttcttcctcacgtgaaagaaatcgttttgacaaaataa

SEQ ID NO: 132375 - protein, 494 aa, Bacillus licheniformis ATCC 14580
MDSCADRRARKRMERSYPMLAEIKGLNEECGVFGIWGHEEAPQITYYGLHSLQHRGQEGAGIVATDGEKMSAHKGQGLITEVFQNGELKKVKGKGAIGHVRYATAGGGGFENVQPFLFHSQNNGSLALAHNGNLVNATQLKQQLENQGSIFQTSSDTEVLAHLIKRSGHFELKDQIKNALSMLKGAYAFLIMTEKEMIVAHDPNGLRPLSVAMLGDAYVVASETCAFDVVGATYLRDVEPGEMLIINDEGMKSERFSININRSICSMEYIYFSRPDSNINGINVHSARKNLGKKLAEESGIEADVVTGVPDSSISAAIGYAEATGIPYELGLIKNRYVGRTFIQPSQSLREQGVRMKLSAVRGVVEGKRVVMVDDSIVRGTTSRRIVTMLREAGATEVHVRISSPPIAHPCFYGIDTSTHEELIASSHSVEEIRQEIGADTLSFLSIEGLLSGIGRQYEGENCGQCMACFTGKYPTEIYQDTVLPHVKEIVLTK

SEQ ID NO: 132376 - DNA, 1500 bp, Legionella pneumophila subsp. pneumophila str. Philadelphia 1
  CDS (1)..(1500): transl_table=11
atgtgtggcattgtaggaatttacagtcatgaacccgttgctgctgagctttatgatagcttgattcatttacagcaccgggggcaagatgcctcaggtattttaaccggagctgatcgtttttacttcaaacatggacttggactggtcagagagtctattttctctgaagatattcttaaactgaaggggaatatcggcattgctcatgtgcgttatcccacggccggaggttatagtgaagcggatgttcagcctctttggatagggagccctcgcggtatagctttggctcataatggaaatttagtgaattatggagagttggttgatgatttatgcggaaaacagcataggcatttaaactctactcttgattctgaggcacttttattacttctggcagactatttagccaagggatcttattccgatcatgatgaagagcaattctttcaattactatgtatggcagttaatgaaatacatcaacgagttcagggttcctattctgttgtgagtttagtaattggcaaaggtttggttgcatttagggatccgcatggtatccgtcctttagtttggggtgagcgagtccatgaaaatggtagtaaagattatatttttgcttcagaaaccacccctttttatgctttaggttttgagcccaagggtgatttgcagcccggtgaagttgcttacgtgaatcagcaaggacaattgtacagaaaagtgctttcatcaaaaaaatttaccccttgtatatttgaatacgtttacttcgccagaccagatgccacattagacgatgtgagcgtttatcgagccagattacgtatggggcaaaatttagctaaaagctggaaaaagagatttccagatacactacctgatgtggtgattccagccccttcaacagcaaatactgccgcattagcttttgcaaatgagttgggaatacgttattccgaaggtttatataaaaatccttttattggacgtacttttattatgcctaatcaggagtcgcgatcaagacaggttcgttataaattaactcctcagaaaacggaaattaataaaaaaaaggtattaatcgttgatgacagtatcgtaaggggaactacctcacgcgaaatagtcagaatgatacgagaatatggtgcatcagaaatatattttgtatcaacctgtccaccaattaaaaacccttgtttctacgggattgatatcccatcgcgtaaaaaattgatagcagcccataaaacggaagaggaaatccgtcaatttctaggggtggataaattattataccaaactcaggaaaaccttatagaggctgtgtctcgcagggggcaatatgacatgagcaagccttgtatggcttgtatggatggtaaatacatttgtggacagattactgaagaaaaaattaaattgttggagaaaaaaagattaaccgagaatgaccaagaaacagagataggagagatgtcttga

SEQ ID NO: 132377 - protein, 499 aa, Legionella pneumophila subsp. pneumophila str. Philadelphia 1
MCGIVGIYSHEPVAAELYDSLIHLQHRGQDASGILTGADRFYFKHGLGLVRESIFSEDILKLKGNIGIAHVRYPTAGGYSEADVQPLWIGSPRGIALAHNGNLVNYGELVDDLCGKQHRHLNSTLDSEALLLLLADYLAKGSYSDHDEEQFFQLLCMAVNEIHQRVQGSYSVVSLVIGKGLVAFRDPHGIRPLVWGERVHENGSKDYIFASETTPFYALGFEPKGDLQPGEVAYVNQQGQLYRKVLSSKKFTPCIFEYVYFARPDATLDDVSVYRARLRMGQNLAKSWKKRFPDTLPDVVIPAPSTANTAALAFANELGIRYSEGLYKNPFIGRTFIMPNQESRSRQVRYKLTPQKTEINKKKVLIVDDSIVRGTTSREIVRMIREYGASEIYFVSTCPPIKNPCFYGIDIPSRKKLIAAHKTEEEIRQFLGVDKLLYQTQENLIEAVSRRGQYDMSKPCMACMDGKYICGQITEEKIKLLEKKRLTENDQETEIGEMS

SEQ ID NO: 132378 - DNA, 1509 bp, Methylococcus capsulatus str. Bath
  CDS (1)..(1509): transl_table=11
atgtgcggaattgccggtatcgtttccaacgatgaggtcaatcaggaactgtacgaggcgctcaccgtgcttcagcatcgcggccaggatgccgccggtatcgtgacctgcgagagggagcggctgcatctgcgcaaggagagcggtctggtgcgggatgtgttccacacccgccacatggtggagctgaaaggcacgatgggcatcggccacgtgcgttatcccactgccggctgttccagcaccgctgaagcgcagccgttctatgtcaattccccgtacggcatctcgctcgcccacaatggcaatctgaccaatgcggcccggctcaaacgcgaactgttccgacaggatcagcgccatatcaacaccgattcggattcggaggttctactcaacgtcttcgcccatgaaatgcagggcatcggcaagctgcgggtatcgccggacgacgtgttccgggccgtttccgcggtgcataggcgctgccgcggtgcctatgccgtggtggcgatggtcaccggtttcggcgtcgtcggcttccgcgatccgcatggcatccgccctctggttttcggcgagcgggaggggcggttcggcaaggactacatgatcgcttccgagagcgtggctctggacgtgctcggcttcgagctggttcgggatgtggcgcccggcgaggcggtcctgatcgagaaggacggtaccctgcatatccgccagtgcgccgaacacgtcgtccattccccatgcatcttcgagttcgtctatttcgcccggccggattccatcatcgacgacatctccgtctacaaggcccggctgcgcatgggggacaagctggccgacaagattctgcgggagcgccccgagcacgacatcgacgtggtcatccccatcccggacaccagccgtacttcggcgctgcagctcgccaaccggctgggcgtgaaatacagcgaaggcttcatcaagaaccgttacatcggccgtaccttcatcatgccggggcagaccctgcgcaagaagtccgtgcggcagaagctcaacgccatcgacctggagttcaagggcaagaacgtgctgctggtggacgactccatcgtgcgtggcaccacctcgacccagatcatccagatggcgcgcgacgccggcgcccgcaaggtctatttcgcctcggcctcgccgccggtgcgctaccctaatgtttacggcatcgacatgccggcggtcgaggagctgatcgcccacggccggaccgacgaacaggtacgggaagcgctgggcgcggactggctggtctatcaggatctggccgatctggtcgagtcggtacagaagggcaacccgtcgatcccccgtttcgacacctcctgcttcgacaaggattacgtcaccggtgacatcgatcaggcctatctcgatcgcctgagcgagcaccgctcggatcatgccaaggccaaacgggatgcggccgcgaccgccatcgatctttacaacaccgtctaa

SEQ ID NO: 132379 - protein, 502 aa, Methylococcus capsulatus str. Bath
MCGIAGIVSNDEVNQELYEALTVLQHRGQDAAGIVTCERERLHLRKESGLVRDVFHTRHMVELKGTMGIGHVRYPTAGCSSTAEAQPFYVNSPYGISLAHNGNLTNAARLKRELFRQDQRHINTDSDSEVLLNVFAHEMQGIGKLRVSPDDVFRAVSAVHRRCRGAYAVVAMVTGFGVVGFRDPHGIRPLVFGEREGRFGKDYMIASESVALDVLGFELVRDVAPGEAVLIEKDGTLHIRQCAEHVVHSPCIFEFVYFARPDSIIDDISVYKARLRMGDKLADKILRERPEHDIDVVIPIPDTSRTSALQLANRLGVKYSEGFIKNRYIGRTFIMPGQTLRKKSVRQKLNAIDLEFKGKNVLLVDDSIVRGTTSTQIIQMARDAGARKVYFASASPPVRYPNVYGIDMPAVEELIAHGRTDEQVREALGADWLVYQDLADLVESVQKGNPSIPRFDTSCFDKDYVTGDIDQAYLDRLSEHRSDHAKAKRDAAATAIDLYNTV

SEQ ID NO: 132380 - DNA, 1410 bp, Anaplasma marginale str. St. Maries
  CDS (1)..(1410): transl_table=11
ttggtgcagaatcgtatgccactggcaagcgtacacgaagaatgcgggatttttgcaatccagaaccacagcgacgcggctaagaagtgcctcatgggccttcatgcgctgcagcaccgcggtcaggagtcatttggcattgttacatcgtccaacaacggggagttcgctgtgtatcacagcagtgaacacgtgagtagcatattcgaaaagccggaggcacactcgttacggggcaatctgtcagtcgggcatgtaagatattccaccagcggcagtaaaccgggagcgcagccaatagtggtagactgcaagttcggcaaattggctatagcacacaacgggaacctaactaacgccgatagcctgcgtaggcagttagtcgacaaggggtgcgtgtttttgtcagacatcgatacggaggtcattgcccacttaatagcaaccagcccgtctgattcttttatcgattgcgtcatctccgccgtgaaagaggttaagggcgcgtattctctggtcatgatgacaaacaacaccctggtcggggtgagagacgctgccggtatacggccgttggtgcttggcattgtggatggggcatatgtcatggcatcagaaacttgcgcactcgatatagtaaaggcagagtttgtcagagatatacaacccggagaactggtggtaatcagccagtcaaatgagttgaccagcatgtatccgtttccgccgttgaagcgcagtttctgcatttttgagtatatatattttgccaggccggatagtgtcgtggacaacataccagtttatgaggcacgtaaaaatatcggggcagagcttgcagtagaaagccctcctcccgacaatgtagatatggtggtgcccgtaccagattctggtatcccagcagctatggggtacgcggcaaagtctggcgtgccttttgagtttgggatagtaaggaatcactatgtggggcgcactttcatccagccaaccgatggcgggcggcgcatgggggttgagctgaagcacaacgcgaactcctcagttttgcgcgggaaaaacatagttctggttgacgacagcatagtgcgtggcaccaccctgcgagaagtaatagagctgcttagaagggctggaacaaaagccatacacctccggatttctagcccgccaacactgcactcatgcttttatggtatcgatacgccggagcggtccaagttggtggcaaacaggctctctctacaagaactgaacacgatgctgcagtgcgatagcatagcatttatcagcatagatggtctgtacaaagcagtgtgcggggccccccgcaacaactcctctccacagtattgtgatgcatgcttcaccggcatgtacccggtaggcgaaatggaacagcactga

SEQ ID NO: 132381 - protein, 469 aa, Anaplasma marginale str. St. Maries
MVQNRMPLASVHEECGIFAIQNHSDAAKKCLMGLHALQHRGQESFGIVTSSNNGEFAVYHSSEHVSSIFEKPEAHSLRGNLSVGHVRYSTSGSKPGAQPIVVDCKFGKLAIAHNGNLTNADSLRRQLVDKGCVFLSDIDTEVIAHLIATSPSDSFIDCVISAVKEVKGAYSLVMMTNNTLVGVRDAAGIRPLVLGIVDGAYVMASETCALDIVKAEFVRDIQPGELVVISQSNELTSMYPFPPLKRSFCIFEYIYFARPDSVVDNIPVYEARKNIGAELAVESPPPDNVDMVVPVPDSGIPAAMGYAAKSGVPFEFGIVRNHYVGRTFIQPTDGGRRMGVELKHNANSSVLRGKNIVLVDDSIVRGTTLREVIELLRRAGTKAIHLRISSPPTLHSCFYGIDTPERSKLVANRLSLQELNTMLQCDSIAFISIDGLYKAVCGAPRNNSSPQYCDACFTGMYPVGEMEQH

SEQ ID NO: 132382 - DNA, 1527 bp, Azoarcus sp. EbN1
  CDS (1)..(1527): transl_table=11
atgtgcggaattttaggggtcgtcgcgacttccccggtcaaccagttgctctacgatggcctccaggtcctgcagcatcgcggtcaggatgctgccgggatcgcgacttccgagggcggacgcttcttgatgcacaaggggtcgggcctcgtgcgcgacgtgtttcgtacgcgaaacatgcgcaatctcgtcggcaactggggcatcggccatgtccgctatcccacggcggggtccgcgtacaatcccgccgaagcgcagccgttctacgtcaattctccgttcgggctgctgcttgcgcacaatggcaatctgacgaactcggaggaactcaagcgggaaatgttcctttccgatctgcggcacatcaacacgaattcggattcggaagtgctgctgaacgtgcttgcccatgaattgcaggcagcggcgaagggtttcaagctcgatgaggacgcggttttccgcgccgtctccggtgtccatcggcgctgccgcggcgcgtacgcggtggtcgtgatgattgccggctacggcctgctcgcgttccgcgacccgtacgggatacggccgctcgtggtcgggcgcaatgaggtcgaggccggacaggagtggctcgtcgcttcggagtccgtcgcgatggatgtcctcggcttcaggatgctgcgcgatgtcgcccccggcgaggcgatcctcatcgatacgcaggggaatttccggagccggcagtgcgcggacaagactgtcgaagcgccctgcatgttcgagttcgtctatctcgcgcggccggattcgatcatcgacggggtgtcggtgtacgagtcgcgcgtcaagatgggcgagttcctcgccgacaagctcaagcgcgtgatgccgcatgccgagatcgacgtcgtgatcccgattcccgactcgagccgaccctccgcaatggaaatggcccaccggctgaaccttccctatcgcgaaggcttcgtgaagaaccgttatatcggacgcaccttcatcatgccgggacaggcgatccggcgtaagtcggtgcgccagaagctgaacacgattccgcaggaattcaggggcaagaaagtgctcctcgtcgacgattcgatcgtgcggggaacgaccagccgtgaaatcgtgatgatggcgcgcgaggccggtgccgagaaagtctatatggcgtcggcggcgcctcccgtccggtatgcgaacgtgtacgggatcgacatgccgacgcgcgccgaactgatcgccgcaagccgcgacgaggctcagatctgccaggagatcggtgcggacggactgatctaccaggacctcgccgacctgaaggcggcggtgagagccgtgaatccggcgatcagcttcttcgagacttcgtgcttcgacggatgctatgtgacgggggacatcacgccggagtatctcaacgggatcgagaaccggcacgacgccggcaacctctcatcggacgagagcgagggcggacaactcgacctcaacctcgtaggtagccacgacaactga

SEQ ID NO: 132383 - protein, 508 aa, Azoarcus sp. EbN1
MCGILGVVATSPVNQLLYDGLQVLQHRGQDAAGIATSEGGRFLMHKGSGLVRDVFRTRNMRNLVGNWGIGHVRYPTAGSAYNPAEAQPFYVNSPFGLLLAHNGNLTNSEELKREMFLSDLRHINTNSDSEVLLNVLAHELQAAAKGFKLDEDAVFRAVSGVHRRCRGAYAVVVMIAGYGLLAFRDPYGIRPLVVGRNEVEAGQEWLVASESVAMDVLGFRMLRDVAPGEAILIDTQGNFRSRQCADKTVEAPCMFEFVYLARPDSIIDGVSVYESRVKMGEFLADKLKRVMPHAEIDVVIPIPDSSRPSAMEMAHRLNLPYREGFVKNRYIGRTFIMPGQAIRRKSVRQKLNTIPQEFRGKKVLLVDDSIVRGTTSREIVMMAREAGAEKVYMASAAPPVRYANVYGIDMPTRAELIAASRDEAQICQEIGADGLIYQDLADLKAAVRAVNPAISFFETSCFDGCYVTGDITPEYLNGIENRHDAGNLSSDESEGGQLDLNLVGSHDN

SEQ ID NO: 132384 - DNA, 1473 bp, Silicibacter pomeroyi DSS-3
  CDS (1)..(1473): transl_table=11
atgcccgcccctcgttttcccatcgcccatccctttgatgacgacaagctgcgcgaggaatgcgggatattcggggtgatcggagttcaggacgccgccagtttcgtggctcttggcctgcatgccctgcaacaccggggacaagaggcgggcggtatcgtcacccatgaccccgaacaggggttcaactcggcccgccgctttggctatgtccgcgacaacttcacctcgcaatcggtgatggaaaccctgcccggcccgctgggcatcggccatgtgcgctattccaccgccgggtccaagggtcagacccagatccgcgatgtgcagccctttttcggcgagtttgccatgggcggcgcggcgattgcccataacggcaacatcaccaatgccaatgccctgcgccgcgaactgatcgagcgcggctcgatctttcaaagctcttcggacagcgaatgcatcatccacctgatggcgcgctccttgcagcgcaccatccctgagcggatggaggatgcgctgcgtcgggtcgagggcgcgttttcggtggtggcgatgacccggaccaagctcatcggcgtgcgcgacccgctgggcgtgcgcccgctggttctgggcaaggtcggtgatggctggattctgtcctcggaaacctgcgcgctggatatcatcggcgccgagttcatccgcgagatcgaaccgggcgagatggtggtgatcactgccgaggacggggtgcagagccatttccccttccgcccgcaaccgtccaagttctgcatcttcgaacatgtctatttctcgcgccccgattcgatcctgggcgggcgcagcgtgtatgagacgcgcgaggcgatcggccgcgaactggccaaggaaagcccggtcgaggccgatctggtctgtccggtgcccgacagcggcaccccggcggcgatcggtttctcgctggaaagcggcattccctatgcgatggggatcatccgcaatcagtatatgggccgcaccttcatcgagcccaccgagcagatccgcaacatgggcgtgcgtctgaagctgaacgtgaaccgggcgctgatccggggcaagcgggtgatcctggtcgacgactcggtggtgcgcggcaccaccagccgcaagatcaaggacatgatcctggatgccggcgccaaggaggtgcatttccgcatcgccagcccgcccaccgcctggccgtgtttctatggcgtcgacacgcccgagcgcgagaagctgctggcagccaccatgagcgaggacgagatgcgcacgcatctgggggtggacagcctgaagttcatctctctcaatggactctaccgtgcagtgggcgagacaaatggccgtgacaacgcctgcccgcaatattgcgacgcctgcttctcgggcgaatacccggtgcggccctcggacatgatcgaaaagggcttctctctgaaagccgccgaatag

SEQ ID NO: 132385 - protein, 490 aa, Silicibacter pomeroyi DSS-3
MPAPRFPIAHPFDDDKLREECGIFGVIGVQDAASFVALGLHALQHRGQEAGGIVTHDPEQGFNSARRFGYVRDNFTSQSVMETLPGPLGIGHVRYSTAGSKGQTQIRDVQPFFGEFAMGGAAIAHNGNITNANALRRELIERGSIFQSSSDSECIIHLMARSLQRTIPERMEDALRRVEGAFSVVAMTRTKLIGVRDPLGVRPLVLGKVGDGWILSSETCALDIIGAEFIREIEPGEMVVITAEDGVQSHFPFRPQPSKFCIFEHVYFSRPDSILGGRSVYETREAIGRELAKESPVEADLVCPVPDSGTPAAIGFSLESGIPYAMGIIRNQYMGRTFIEPTEQIRNMGVRLKLNVNRALIRGKRVILVDDSVVRGTTSRKIKDMILDAGAKEVHFRIASPPTAWPCFYGVDTPEREKLLAATMSEDEMRTHLGVDSLKFISLNGLYRAVGETNGRDNACPQYCDACFSGEYPVRPSDMIEKGFSLKAAE

SEQ ID NO: 132386 - DNA, 1413 bp, Bacillus clausii KSM-K16
  CDS (1)..(1413): transl_table=11
atgtttactgaaatcaaaggcttgaacgaagaatgtggcgtatttgccgtttggggccataaagaagctgcgcaaattacgtattatgggttgcacagcctccagcaccgcggccaggaaggcgcaggcattgtcgtgtccgacggaaacaagctctctgcccataaagggctcggcctagtcaatgatgtgtttaatcaagatgtcttgcgtaatcttcaagggaagggcgcgattggccacgtccgttatgcgacggccggtggaggcggctatgccaatgtccagccgttgtatttcaattcgcaaaaaggcggtcttgcgattgcgcacaatggcaatcttgtcaacgccaatcacttaaaacaccagcttgaagcacaagggtcgatcttccagtccacatcggatacggaagtgctcgcccatctcattaaacgcagcggctactatacgttagaagaacaattgaaaaatgggctgtcttccttaaaaggcgcctatgcatttgccgtcatgaatgagcgccaactgatggtcgcccttgatccaaatgggttgcgtcctctttccatcggacgtttaggcgatgcgtatgtcgttgcttcagagacatgtgcgttcgacatcattggcgccacctatgagcgtgaagtaatgccaggtgaactgctcattattgacgatacaggcttgcgcagcgaacgctttgtttctccagggaaccgggcgatttgcagcatggaatacgtttattttgcgcggccagattcaaacgtggataccatcaatattcatacagcgagaaaaaatttaggaaaacagcttgcgattgaagcgccagtggaagcggatgtggtgacaggcgtgcctgattccagcatttccgcagcaattggctatgctgagcagtctggcattccttatgagttgggcatgattaaaaatcgctatgtcgggcgcacctttattcaaccttcacaagaattacgggaacaaggggtaaagatgaagctttcccctgtgcgtggcgtagttgaaggcaaacgagttgttatgattgacgattcgattgtacggggaacgactagccgccgcattgtccatatgcttcgtgatgcaggggcagctgaagtccatgtccgcatttcatcgccaccgattaaacatccgtgcttttacggaattgatacgtcaacgacggaagaattaattgcttccaaccactcaatcgaagaaatgcgggaaatcatgggggctgattcacttgcttttttgtcgactgaaggcttgaaagcagggattggccgttctgaggcgatgcataattgcgggcaatgccttgcctgctttacaggcgaatacccaacggagatttatgccgacaccgtgcatccgcacgcgaaagtatag

SEQ ID NO: 132387 - protein, 470 aa, Bacillus clausii KSM-K16
MFTEIKGLNEECGVFAVWGHKEAAQITYYGLHSLQHRGQEGAGIVVSDGNKLSAHKGLGLVNDVFNQDVLRNLQGKGAIGHVRYATAGGGGYANVQPLYFNSQKGGLAIAHNGNLVNANHLKHQLEAQGSIFQSTSDTEVLAHLIKRSGYYTLEEQLKNGLSSLKGAYAFAVMNERQLMVALDPNGLRPLSIGRLGDAYVVASETCAFDIIGATYEREVMPGELLIIDDTGLRSERFVSPGNRAICSMEYVYFARPDSNVDTINIHTARKNLGKQLAIEAPVEADVVTGVPDSSISAAIGYAEQSGIPYELGMIKNRYVGRTFIQPSQELREQGVKMKLSPVRGVVEGKRVVMIDDSIVRGTTSRRIVHMLRDAGAAEVHVRISSPPIKHPCFYGIDTSTTEELIASNHSIEEMREIMGADSLAFLSTEGLKAGIGRSEAMHNCGQCLACFTGEYPTEIYADTVHPHAKV

SEQ ID NO: 132388 - DNA, 1338 bp, Campylobacter jejuni RM1221
  CDS (1)..(1338): transl_table=11
atgtgtgcagttgtaggagttatcaattcaaaaaatgctagcacttatgcgtattatgcgctttttgctatgcaacaccgtgggcaagaagcaagtggcattagtgtgagtaatggtaaaaatattaagactattaaagctaaaggtgaagtgagtcaaatttttaatcctgataatctaaaaactttagaaggtgaaatcgctatagggcataatcgctattctacagcaggaaattcaagtttaaatgacgctcagcccatagcagctacttcggttttaggtgatattgctttagcgcataatggaaatttagtcaataaagaagaggtaagatcaagacttattcaagatggggctatttttcaaaccaatatggatacagaaaatgttgtccatcttatcgcaagaagtaagcaagaaagtctaaaagatagatttattgagagtttaaaagaatgtataggagcttattgttttgttttagcaagcaaagataaactttatgttgtaagagatcctcatggggtgcgtcctttgtctttagggcgtttaaaagatggaggctatatagttgctagtgaaacttgtgcttttgatcttatagaggctgaatttattcgtgatgttaaaccaggggaaatgcttatttttactcagggaaatgataaatttgaaagcatagaacttttttctcaaactcctagaatttgcgcttttgaatacatttattttgctagacctgatagtatagtagaaggcaaaagcgtgtatgaagtgcgtaaaaaaatgggcgaagctttagctaaaaaatttgcttataaagcagactttgtcgtgcctgtgccagatagtggagtaagtgcagctataggttttgcgcaatatttacaaatccctcttgaaatggcaatagtaagaaatcattatgtaggaagaacttttatagagccaactcaagagcttagaaatttaaaagtaaaattaaaacttaatcctatgcgtaaagttttagaaggcaaagaaatcgtagtcattgatgatagcttggtgcgtggcactacttctaaaaaaataatttccttacttcgtgctgcaggagcgagtaaaatccatcttgccatagcttgtcctgagatcaaatttcctgatacttatggtatagatactccaacttttgaagaacttatcagcgcaaataaaaatgctgaagaagtgcgtgaatatgtagaagctgatacgctaagttttttaagcataaaagagctaactcaaagcataggcgatgaaagaaaatattctttaatcagttttgatggagattattttattaaataa

SEQ ID NO: 132389 - protein, 445 aa, Campylobacter jejuni RM1221
MCAVVGVINSKNASTYAYYALFAMQHRGQEASGISVSNGKNIKTIKAKGEVSQIFNPDNLKTLEGEIAIGHNRYSTAGNSSLNDAQPIAATSVLGDIALAHNGNLVNKEEVRSRLIQDGAIFQTNMDTENVVHLIARSKQESLKDRFIESLKECIGAYCFVLASKDKLYVVRDPHGVRPLSLGRLKDGGYIVASETCAFDLIEAEFIRDVKPGEMLIFTQGNDKFESIELFSQTPRICAFEYIYFARPDSIVEGKSVYEVRKKMGEALAKKFAYKADFVVPVPDSGVSAAIGFAQYLQIPLEMAIVRNHYVGRTFIEPTQELRNLKVKLKLNPMRKVLEGKEIVVIDDSLVRGTTSKKIISLLRAAGASKIHLAIACPEIKFPDTYGIDTPTFEELISANKNAEEVREYVEADTLSFLSIKELTQSIGDERKYSLISFDGDYFIK

SEQ ID NO: 132390 - DNA, 1419 bp, Dehalococcoides ethenogenes 195
  CDS (1)..(1419): transl_table=11
ttgcatgaatcttgcggcattttcggtgtatttgcccccggtcaggatgtagcccggctcacatttttcgccctgtttgccttgcagcacaggggacaggaaagctcaggtatttctacatctgacgggcgggaacttaagctttattcccagatgggtctggtctcccatatctttactgaagatatactccgcaaactgggcggacatattgccatagggcataaccgttattccaccaccggttcaagccagcagataaacgcccagccatttctgatgggccaaggcgacaacgttatggccatagcccataacggcaatatagttaattcagaagccctgaatgccgaactaagctctcagggatatgtttttaaaagctctacagataccgaaataatcggccagcttatcctgtcagcagttgaaactgactgggtcaaacggatacgctatgccatgaaccgccttaaaggggctttttcctgcactattatgaccaaagacaccctctacgccatgcgtgacccgctgggtgtccgccccctgtgcctgggcaaaattcaagggggttacgtagttgcttccgaaagctgtgcccttgaccatatcggggctgatttcatacgcgaaatagagccgggtgaaattctggctataaatgaaaacggggtaaccagtttcaaacagccgatttcccgccgggctttgtgcatatttgaatttatttattttgcccgccctgacagccagatagacgggcagcttttatattccgcccgccaggctatgggggcagagctggccagagagtacccggtagaagcggatttggtgataggcgtacctgactccgctacagcagccggtataggttatgctataaattcaggcatacccccggccgaaggccttattaaaaaccgctacatggggcggacatttattcagcctgaccagcaccttcgcgacctgggagtaaagctcaagttcaaccccctgaggagtgttctggaagacaagcgggtagtactggtagatgacagcatagtccgcgggactaccaccccccaggttatccgcctgctgcgcaaagccggtgccaaagaagtacatatgagggtatgcgccccgcccataaccaacccctgtttcttcggggtagacatggccacccgttcggagcttattgccgctaaaatgagcgtgcctgagatacagaaatacataggggcagattcacttggttacctcagcctgcccggccttataaaggcagtggggctgcccaaagataacttctgcctggcctgtttcaccggcgaatacgccctgccggttcagctggagatggataaatttgcactcggcaaccagcgcggcaactgctgccagatgccatcacccggcagctaa

SEQ ID NO: 132391 - protein, 472 aa, Dehalococcoides ethenogenes 195
MHESCGIFGVFAPGQDVARLTFFALFALQHRGQESSGISTSDGRELKLYSQMGLVSHIFTEDILRKLGGHIAIGHNRYSTTGSSQQINAQPFLMGQGDNVMAIAHNGNIVNSEALNAELSSQGYVFKSSTDTEIIGQLILSAVETDWVKRIRYAMNRLKGAFSCTIMTKDTLYAMRDPLGVRPLCLGKIQGGYVVASESCALDHIGADFIREIEPGEILAINENGVTSFKQPISRRALCIFEFIYFARPDSQIDGQLLYSARQAMGAELAREYPVEADLVIGVPDSATAAGIGYAINSGIPPAEGLIKNRYMGRTFIQPDQHLRDLGVKLKFNPLRSVLEDKRVVLVDDSIVRGTTTPQVIRLLRKAGAKEVHMRVCAPPITNPCFFGVDMATRSELIAAKMSVPEIQKYIGADSLGYLSLPGLIKAVGLPKDNFCLACFTGEYALPVQLEMDKFALGNQRGNCCQMPSPGS

SEQ ID NO: 132392 - DNA, 1350 bp, Thermococcus kodakarensis KOD1
  CDS (1)..(1350): transl_table=11
atgcgcgaaaagtgcggggtctttgcagcactctcagagaacgcgccgaagaaagcatactacgccctgatagccctccagcaccgcggccaggagagcgccggaataagtgtatggaagcacaggataagaaccgtcgctggcagggggcttatccaggacgttttcaatgggaaaaccctctcatcccttcgctccaacctcgcgatcggtcacgtccgctactccacatccggctctctcagcgagactcagcctcttgaaacggagtgctgtggaaagaggatagcagttgcccacaacggcaccctcacgaactttctccctctgagaaagagttatgagaataggggggttaggtttcaccactccgttgattctgaacttcttgggatttcgtttctctggcacctgaatgagaccggcgacgagtttgaggccatgagagaagtctttaacgaggttaagggcgcttattcggttgctctgctcttcgacggcaaaatcctcgtagcgagagattccgtagggttcaggcccctgagctatgggattggagacggccactactttgcgagcgaggattcggctttgaggcttttcgttgacgagactgagggcggggaaataagggacgttcggccgggtgaggtctttctactctcggaagggagtgtggagagtagagttctggcgagggagaagcaccaccactgcgtcttcgagtacatctacttcgcccggccagacagcacaatagacggcgtgaacgtctatcatgcgagggtgaagatgggaagggaacttgctagggagagtcccgccgatgcagatgttgtgatagcggttcccgactctgggagggcagcagcgttgggcttttcgatggaaagcgggataccctactcggaggggctgataaagaaccgctacatcgggaggactttcataacccccggccagttctacagggagcttaaggtaaagctcaagctctcgcccgtgagggaggtcatcaacggaaagagagtcgttctcgttgatgattccatagtcagggggacgaccatgaggagactagtctcccttctgaggaaagcgggagcgaaggaagtgcacgtgagaatagcgtcgccgcctataaggcacccctgctacatgggtatagacatcccgacgaggcacgaacttatagctgccttcgggagcgttgagaaggtgaggggagcgataggtgctgacagcctggcatatttaagcgttgagggccttatcagggctgttggcaagaaagacctatgcctggcgtgcctcacaggggagtaccctgagtgggccttcaggttttaa

SEQ ID NO: 132393 - protein, 449 aa, Thermococcus kodakarensis KOD1
MREKCGVFAALSENAPKKAYYALIALQHRGQESAGISVWKHRIRTVAGRGLIQDVFNGKTLSSLRSNLAIGHVRYSTSGSLSETQPLETECCGKRIAVAHNGTLTNFLPLRKSYENRGVRFHHSVDSELLGISFLWHLNETGDEFEAMREVFNEVKGAYSVALLFDGKILVARDSVGFRPLSYGIGDGHYFASEDSALRLFVDETEGGEIRDVRPGEVFLLSEGSVESRVLAREKHHHCVFEYIYFARPDSTIDGVNVYHARVKMGRELARESPADADVVIAVPDSGRAAALGFSMESGIPYSEGLIKNRYIGRTFITPGQFYRELKVKLKLSPVREVINGKRVVLVDDSIVRGTTMRRLVSLLRKAGAKEVHVRIASPPIRHPCYMGIDIPTRHELIAAFGSVEKVRGAIGADSLAYLSVEGLIRAVGKKDLCLACLTGEYPEWAFRF

SEQ ID NO: 132394 - DNA, 1401 bp, Ehrlichia ruminantium str. Welgevonden
  CDS (1)..(1401): transl_table=11
atgcaatttaatgaaatatatgaggaatgtggagtatttgccatatataataacaattatgcagctatcaattgtattttaggattacacgctattcaacatagaggacaagaatcatttggtatagtaacatctgataatactaatttttactcctattactctaatgaacaagtgaatactatcttcactcaacaatcaaaaatagaccacctattaggaaatattgctattggacacgtacgttactctacaagcggaagcaaaactggtatgcaacctataattttagattgccaatttggaaaattagcaatagcacataatggtaaccttattaatgcattacaaattagagaatcactcattaaaaaaggacgtatattttcatcagacattgatacagaagtaatagcacatcttattgctatgaatacacaagatactatattggacaatataatatacgccctacaaaatattaagggtgcttattctttagtaattttgataaacaatactttagtatgttgtcgagatccatatggtattagaccattagtactaggcatgttagacaatgtatatgtaatagcttcagaaacatgtgctttagatatagttggagcacaatttgtcagagatattttaccaggagaattaataacaattaatcaaagtaataccttaacaagttatttcccatttgaaaaacaaaaatcaagtttttgtatttttgaatacgtatattttgcacgaccagacagtataatggaaaataagtctgtatatgaaatacgtaaaaacataggaagagaactagcaatagagaatcctgtaccaaaagatacaaatatggtaatacctatacctgattctggagtaccagctgcattagggtttgcagaatatactaatataccttttgagttcggcattattaggaatcattatataggaagaacttttatacaacctcacgaccatattcgtaatataggagtaaagcttaagcataatcccaattcttcaatattaaaaggtaaaaatatagttttaatagatgatagtattgtacgaggaacaactttaaaaaatataatagcattactccataaagcaggtgtcaaacagatacacttaagaatctcaagtcctcctactatacattcttgcttctacggaatagacacaccagaagaatcaaaattgatagccaacaatttatcaaaagcagacattataaaattattaggatgtgatagcttacatttcttaagcataaatgggctttacaaggcaatatgcaatacaaaacgcaataatgtcccacaatattgtgatgcatgcttcactggagattacccaattggtaaaatagatacaaataatgtttactaa

SEQ ID NO: 132395 - protein, 466 aa, Ehrlichia ruminantium str. Welgevonden
MQFNEIYEECGVFAIYNNNYAAINCILGLHAIQHRGQESFGIVTSDNTNFYSYYSNEQVNTIFTQQSKIDHLLGNIAIGHVRYSTSGSKTGMQPIILDCQFGKLAIAHNGNLINALQIRESLIKKGRIFSSDIDTEVIAHLIAMNTQDTILDNIIYALQNIKGAYSLVILINNTLVCCRDPYGIRPLVLGMLDNVYVIASETCALDIVGAQFVRDILPGELITINQSNTLTSYFPFEKQKSSFCIFEYVYFARPDSIMENKSVYEIRKNIGRELAIENPVPKDTNMVIPIPDSGVPAALGFAEYTNIPFEFGIIRNHYIGRTFIQPHDHIRNIGVKLKHNPNSSILKGKNIVLIDDSIVRGTTLKNIIALLHKAGVKQIHLRISSPPTIHSCFYGIDTPEESKLIANNLSKADIIKLLGCDSLHFLSINGLYKAICNTKRNNVPQYCDACFTGDYPIGKIDTNNVY

SEQ ID NO: 132396 - DNA, 1545 bp, Neisseria gonorrhoeae FA 1090
  CDS (1)..(1545): transl_table=11
atgtgcggcgtattaggtttggtcagtcatgaacccgtgaaccagcttctgtacgacggtttgcagatgttgcagcacagggggcaggatgcggcgggcattgcaacggcggaaggcggtaccttccatatgcacaaaggcaaagggatggtgagcgaagtgttccgcacgcgcaatatgcgcgatttgaccggcaacgccggcatcgcccacgtccgttatcccacggcgggcaacgccggcagcagcgcggaggcgcagcctttctacgtcagctcgcctttcggcatcgttttggcgcacaacggcaacctcaccaacactgccgaactgtatgaaaacgtgtgtaacaaacacctgcgccacatcaacaccggctccgattccgaagttttgctcaacgtattcgcgcacgaattgcgccgcgaagtctctaaaaacgccgacccgcaccggctcaatgccgacaatattttcaacgccgttgccgaagtccaccgcctagtgcgcggtgcatacggcgtggttgccatgattgcgggctacggtatgctcgccttccgcgacccttacggcatccgcccgctggcattgggttcgcaaaccgacagcgaaggcaggaaatcctatgccgtcgcctccgaatccgtcgccttcaatgcgcttgcctacgatttggaacgcgatatccggccgggcgaagcggtatttgtcggctttaacggcacaatcatcgcccgacaatgcagcgaccgtgccaaactcagcccctgcctttttgaatatgtttattttgcccgccccgactctgtgattgacggtgtatcggtttaccaatcgcgcttggatatgggcgtgtccttggcggaaaaaatcaaacgcgagctgcccgtggacggcatcgacgtcgtgatgcccattcccgataccagccgccccagtgcaatggagcttgccgtccacctcaacaaaccctaccgcgagggtttgattaaaaaccgctatatcggccgcacctttattatgcccggtcagtcgacgcgcaaaaaatccgtgcgccaaaaactcagcccgatggaaaccgaatttgcaggcaaaagcgtgttgctggtggacgactccatcgtgcgcgggacgaccagccgcgaaatcgtcgaaatggtacgcgcggcgggcgcgcgcaaagtctatatcgcctccgccgcgcccgaagtgcgctatcccaatgtgtacggcatcgatatgcccacgcgcgaagagttgattgccaacgggcgcagcgcggcggaaatcgccgccgaaatcggcgcggacggcatcgtgtttcaagacttgggcgatttggaagccgtcgtcaaagcactcaacccgaaaatcgaatccttcgattcgtcctgtttcaacggcatttatcggaccggcgacatcgatgatgcctacctcgaccgcctgtctgccgagaaatccggctgcgccggtctgaaaatccacccgagcaggatggaacacagcatcagcatcagcgatgcgggcgacgaagaataa

SEQ ID NO: 132397 - protein, 514 aa, Neisseria gonorrhoeae FA 1090
MCGVLGLVSHEPVNQLLYDGLQMLQHRGQDAAGIATAEGGTFHMHKGKGMVSEVFRTRNMRDLTGNAGIAHVRYPTAGNAGSSAEAQPFYVSSPFGIVLAHNGNLTNTAELYENVCNKHLRHINTGSDSEVLLNVFAHELRREVSKNADPHRLNADNIFNAVAEVHRLVRGAYGVVAMIAGYGMLAFRDPYGIRPLALGSQTDSEGRKSYAVASESVAFNALAYDLERDIRPGEAVFVGFNGTIIARQCSDRAKLSPCLFEYVYFARPDSVIDGVSVYQSRLDMGVSLAEKIKRELPVDGIDVVMPIPDTSRPSAMELAVHLNKPYREGLIKNRYIGRTFIMPGQSTRKKSVRQKLSPMETEFAGKSVLLVDDSIVRGTTSREIVEMVRAAGARKVYIASAAPEVRYPNVYGIDMPTREELIANGRSAAEIAAEIGADGIVFQDLGDLEAVVKALNPKIESFDSSCFNGIYRTGDIDDAYLDRLSAEKSGCAGLKIHPSRMEHSISISDAGDEE

SEQ ID NO: 132398 - DNA, 1407 bp, Bacteroides fragilis NCTC 9343
  CDS (1)..(1407): transl_table=11
atgggaggttttttcggaacagtctcgaaaacgagctgtgtgaccgatttattctacggcacagactataactcacacctgggaacaaaacggggaggacttgcgacatatagtgaagaacagggatttatccgctcgattcataacctgcagagttcatatttccgtaccaaatttgaggaagaactggataaatttaaaggaaatgccggtatcggtattatcagtgatacagacgcccaacctattattattaactcacatctcggtagatttgccattgttacggttgctaaggtcacaaaccttaaagaactcgaagaggaactactttcacaaaacatgcatttcgccgaacttagttcgggtagtaccaatcaaacggaacttatcgctttattgattattcagggtaaaaattttgtagaaggaatagagaatgtatataaccatataaaaggttcgtgttctatgcttctgttgacagaagatggagtgattgccgcacgagataaatggggacgtactcctattgttatcgggaaaaaggagggcgcttatgcagccacgagtgaatctaacagttttccgaatcttgattttgaaatagaacgctatttaggacccggtgaaatagtccgtatgcaggctgaccgtcttgaacaacttcgcaagcctgatgacaaaatgcaaatctgttcatttttgtgggtgtattacggttttcccaattcatgttatgaaggccggaatgtagaagaggtacgctttacgagcgggttgaaaatgggtgaacaagatgactgtgatgctgattgtgtttgtggaattccggattcgggtatcgggcaggcattggggtatgcagaagggaaaggcattccttatcatcgtgctattaccaagtatactcctacctggccccgtagttttactccgagcaagcaggaattacgttctttggtggcaaagatgaagttgatccctaaccgtgctatgcttcaagataagcgtattattttttgtgatgactccattgtgcgtggtacgcagttgcatgataatgtgaagattctttttgattatggtgcaaaagaggtacatatgcgtatcggatgcccaccgcttatttatggctgtccgtttattggttttacggcttcaaagtcggatatggaacttatcaccaggcagataataaaagaactggagggagatgaaaataagaatctggataaatatgctactacaggttcgccggaatatgagaagatggtaggcatcatcgccaagcgtttcggactttcgtctctcaaattcaacacgattgaaacactgattgaagccatcggattgccaaagtgtaaagtttgtacccattgttttgacggatccagttgtttctaa

SEQ ID NO: 132399 - protein, 468 aa, Bacteroides fragilis NCTC 9343
MGGFFGTVSKTSCVTDLFYGTDYNSHLGTKRGGLATYSEEQGFIRSIHNLQSSYFRTKFEEELDKFKGNAGIGIISDTDAQPIIINSHLGRFAIVTVAKVTNLKELEEELLSQNMHFAELSSGSTNQTELIALLIIQGKNFVEGIENVYNHIKGSCSMLLLTEDGVIAARDKWGRTPIVIGKKEGAYAATSESNSFPNLDFEIERYLGPGEIVRMQADRLEQLRKPDDKMQICSFLWVYYGFPNSCYEGRNVEEVRFTSGLKMGEQDDCDADCVCGIPDSGIGQALGYAEGKGIPYHRAITKYTPTWPRSFTPSKQELRSLVAKMKLIPNRAMLQDKRIIFCDDSIVRGTQLHDNVKILFDYGAKEVHMRIGCPPLIYGCPFIGFTASKSDMELITRQIIKELEGDENKNLDKYATTGSPEYEKMVGIIAKRFGLSSLKFNTIETLIEAIGLPKCKVCTHCFDGSSCF

SEQ ID NO: 132400 - DNA, 1884 bp, Bacteroides fragilis NCTC 9343
  CDS (1)..(1884): transl_table=11
atggaacaactgaaacatgaatgtggcgttgccatgatacgtttgcttaaaccgctggagtactatgaaaagaagtacggaacgtggatgtacgggctgaataagctctatctgctgatggaaaagcagcataaccgtggtcaggaaggtgccggtctggcgtgtgtgaaactggaagcaaatccgggtgaggagtatatgttccgtgagcgggcattgggttccggtgccatcaccgagatatttgagacagtacaaagcaacttcaaggatctgagcaaagaacagttgcacgatgccgcgtttgccaaacggacgctgccttttgccggagaagcttatatggggcatctgcgttactcgactaccggaaaatccgggatatcttatgttcatccgtttctcagaagaaataactggcgggcgaagaatcttgctctttgcggcaacttcaacatgactaatgtggatgaaatttttgcccgtatcacagccatcggccagcatccccgtaagtatgccgatacgtatattatgttggaacaagtggggcacaggctcgaccgtgaagtggaacgtctctttaacctggctgaggctgaaggcctgaccggcatgggcgtgacgcattacattgaggaccacatcgaccttgccaacgtgttgcgcacgtcgagtaaagaatgggacggggggtatgtgatgtgcggactgaccggtagcggagagagctttgcattgcgtgacccgtgggggattcgtccggcgttctggtatcaggatgacgagattgcggtgcttgcttccgaacgtccggtgattcagacggcactcaatgttccgataggagaaatcagggaattactgccgggacaggccctcctgatcagtaaagagggaaagttgcgtacggcacagatcaataaggcacgggagaagaaagcctgttcgttcgagcggatctacttctcgcgaggcagtgacgcggatatttacaaggagagaaaacaattgggtgagaaactggttccgaacatcctgaaagcgattgataatgacctcgaccataccgtcttctcgttcatcccgaatacggcagaggtggcattttacggtatgcttcaggggctggacaattatttgaatgaagagaaggtgcggcagattgcgagcctgggacatcatccggatcacgatgaactggaagtgattctgtcccgccgtatccgttcggagaaagtggctatcaaagatatcaaactgcgcactttcattgccgagggtaatagccggaatgacttggcagcacacgtatatgacatcacatacggcagtctccgttccggtatcgacaatctggtgattatcgacgacagcattgttcgcggtactactctgaaacagagtattatcggtatcctcgaccgtctgggaccgaagaagatagtcatcgtctcttcttctccgcaagttcgctatcccgactattacggtattgatatggcgaagatgtccgaattcatcgcctttaaagctgcaattgaattgctgaaggaccgggatatgaaagatgtgatcgcatcggcttaccggaagtcgaaagatcaggtgggactgccgaaagagcagatggtaaactatgtgaaggatatttatgctcctttcaccgatgaggagatttcggagaagatggtggaactgctgacgccgaaaggaacgaaagcgaaagtgcagattgtctatcagccgctcgaggggctgcacgaggcgtgtcccaatcatacgggagactggtacttcagtggcaactatcctacaccgggcggggtgaagctgctgaacgaagcatttattaactacatcgagcaggtgtaccaattttaa

SEQ ID NO: 132401 - protein, 627 aa, Bacteroides fragilis NCTC 9343
MEQLKHECGVAMIRLLKPLEYYEKKYGTWMYGLNKLYLLMEKQHNRGQEGAGLACVKLEANPGEEYMFRERALGSGAITEIFETVQSNFKDLSKEQLHDAAFAKRTLPFAGEAYMGHLRYSTTGKSGISYVHPFLRRNNWRAKNLALCGNFNMTNVDEIFARITAIGQHPRKYADTYIMLEQVGHRLDREVERLFNLAEAEGLTGMGVTHYIEDHIDLANVLRTSSKEWDGGYVMCGLTGSGESFALRDPWGIRPAFWYQDDEIAVLASERPVIQTALNVPIGEIRELLPGQALLISKEGKLRTAQINKAREKKACSFERIYFSRGSDADIYKERKQLGEKLVPNILKAIDNDLDHTVFSFIPNTAEVAFYGMLQGLDNYLNEEKVRQIASLGHHPDHDELEVILSRRIRSEKVAIKDIKLRTFIAEGNSRNDLAAHVYDITYGSLRSGIDNLVIIDDSIVRGTTLKQSIIGILDRLGPKKIVIVSSSPQVRYPDYYGIDMAKMSEFIAFKAAIELLKDRDMKDVIASAYRKSKDQVGLPKEQMVNYVKDIYAPFTDEEISEKMVELLTPKGTKAKVQIVYQPLEGLHEACPNHTGDWYFSGNYPTPGGVKLLNEAFINYIEQVYQF

SEQ ID NO: 132402 - DNA, 1485 bp, Corynebacterium glutamicum ATCC 13032
  CDS (1)..(1485): transl_table=11
atgacccaggtaaaccacccgtacgatgatctcaacgaacaggcaccgcaggaagaatgcggcgttttcggcgtttgggcgccaggtgaggaagtctcgaaacttacctactttggcctcttcgcacttcagcaccgtggtcaagaagccgcgggcatcgcagtaggcgatggcgaacagatcctggttttcaaagatttgggcctagtctcccaagttttcgacgaaccaattctggaatccctccgcggaaacatcgccatcggacacacccgatacaccaccgccggcggaaacacctgggaaaatgcccagcctatgttccgcatggcaccagatggcaccgatatcgcccttggacacaacggcaacctgattaattacatcgagttgttggacaaagccaccgaacttggcctcgtcgatcccgccaagaagccatcagataccgatgtgctcactggactgctcgcaagcggcgtccatgacggaaataatctctttgattccgccaaggaactcctccccagcgtcaagggagcctactgcctcaccttcaccgacggacacaccctgtacgcagcgcgtgatccattcggcatccgcccactgtccatcggccgcctcgagcgcggctgggtagtcgcatctgaaaccgcagcgctcgacatcgtaggtgcctcgcatgtgcgcgaggtcgaaccaggcgaactgattgctatcgacgaatccggcctcaagtccgcacgattcgccgagacaacccgcaaaggttgcgtcttcgaatacgtttacctggctcgtccagactccgtgatcaagggaagaaacgtcaacgaagcccgacttgaaatcggccgcaagctcgctgcagaagcaccagcagtcggcgatctagtcatcccaaccccagaatcaggcaccccagcagcagttggattcgcccaagcatctggcatcccattcggccaaggcatggtcaaaaacgcctacgttggccgaaccttcatccagccttccgacactctccgccaactgggaatccgcctcaagctgaacccattgcgcgaggttatcgccggaaagcgccttgtggttgtggatgattccatcgtccgcggtaacacccaacgcgccgtgatccgcatgttgcgcgaagccggtgcagctgaggttcacgtacgcatcgcctcaccacccgtgaaatggccatgcttctacggcatcgattttgccaccccaggcgaactcattgccaacgctgtcaccagtgacaacgaagcagaaatggtagaagcagtccgctccgcaatcggcgcagacaccctcggctacgtctccatcgactccatggttgcagcaaccgagcaaccagccaacgaactctgcatcgcctgcttcgacggcaaataccccatgggtctgccacagggaaacagcaacgcagacctagtccgcaagatgcaagcaaccgcctcaagttaa

SEQ ID NO: 132403 - protein, 494 aa, Corynebacterium glutamicum ATCC 13032
MTQVNHPYDDLNEQAPQEECGVFGVWAPGEEVSKLTYFGLFALQHRGQEAAGIAVGDGEQILVFKDLGLVSQVFDEPILESLRGNIAIGHTRYTTAGGNTWENAQPMFRMAPDGTDIALGHNGNLINYIELLDKATELGLVDPAKKPSDTDVLTGLLASGVHDGNNLFDSAKELLPSVKGAYCLTFTDGHTLYAARDPFGIRPLSIGRLERGWVVASETAALDIVGASHVREVEPGELIAIDESGLKSARFAETTRKGCVFEYVYLARPDSVIKGRNVNEARLEIGRKLAAEAPAVGDLVIPTPESGTPAAVGFAQASGIPFGQGMVKNAYVGRTFIQPSDTLRQLGIRLKLNPLREVIAGKRLVVVDDSIVRGNTQRAVIRMLREAGAAEVHVRIASPPVKWPCFYGIDFATPGELIANAVTSDNEAEMVEAVRSAIGADTLGYVSIDSMVAATEQPANELCIACFDGKYPMGLPQGNSNADLVRKMQATASS

SEQ ID NO: 132404 - DNA, 1509 bp, Pseudomonas syringae pv. syringae B728a
  CDS (1)..(1509): transl_table=11
atgtgtggcatcgtcggtatcgtcggcaagtcgaacgtcaatcaggcgctgtatgacgcgcttaccgtcctccagcaccgcggccaggacgctgccggtatcgtaaccagccatgatggccggttattcctgcgcaaggacaacggattggtgcgcgatgtgtttcatcaacgtcatatgcagcgtctggtcgggcatatgggcatcggtcacgtgcgttaccccaccgcgggcagttcgacgtcggccgaggctcagccgttttacgtcaactcgccttacggcatcacgctggcgcacaacggcaacctcaccaacgtcgagcagctggccaaggaaatttacgagtccgacctgcgccatgtgaacaccaattccgattcggaagtgctgctcaacgtgttcgcccatgaactggccgtgcgtggcaagttgcagccaaccgaagaggatatcttcgcggccgtgaccgacgtgcacaatcgctgccgcggtggttatgcggtcgtagccatgatcaccggctacggtatcgtcggcttccgtgacccggacgccattcgtcctatcgtgttcggccagcgtcacaccgacgaaggcgtcgagtacatgatcgcctcggaaagcgtatcgctggacgtgctgggctttaccctgattcgcgaccttgcaccgggcgaagcggtctacatcaccgaagacggcaagctgcacacccgtcagtgcgcggccaaccccaaatacgctccgtgtatcttcgagcacgtctatctggcgcgcccggattcgatcatcgacggtatctcggtctacaaggcgcgcctgcgcatgggcgagaagctggccgacaagatcctgcgcgagcgtccggatcacgatatcgacgtggtcatcccgattccggacaccagccgtactgcggcgctggagctggccaaccatctgggcgtcaagttccgcgaaggcttcgtcaagaaccgttacatcggccggaccttcatcatgccgggccaggctgcgcgcaagaaatccgtacgccagaagctcaacgccatcgagctggagttccgcggcaagaacgtgatgctggtggatgactccatcgtacgcggcacgacctgcaagcagatcatccagatggcccgcgaagccggtgccaagaatgtctacttctgttctgcagccccggctgtgcgctaccccaacgtctacggcatcgacatgccgagtgctcacgagctgattgcccacaaccgcaccacgcaggacgtggccgacctcatcggtgccgactggctggtctatcaggacctgaatgacctgatcgaagcggtcagcggcagcaagaaaatcaagatcgacaacttcgattgctcggttttcgacggcaagtacgtgaccggcgacatcgacgagcattatttgaaccggatcgagagcgcgcgtaatgacgcctccaagatcaagactcaggcagtgagcgcgatcatcgatctgtacaacaactaa

SEQ ID NO: 132405 - protein, 502 aa, Pseudomonas syringae pv. syringae B728a
MCGIVGIVGKSNVNQALYDALTVLQHRGQDAAGIVTSHDGRLFLRKDNGLVRDVFHQRHMQRLVGHMGIGHVRYPTAGSSTSAEAQPFYVNSPYGITLAHNGNLTNVEQLAKEIYESDLRHVNTNSDSEVLLNVFAHELAVRGKLQPTEEDIFAAVTDVHNRCRGGYAVVAMITGYGIVGFRDPDAIRPIVFGQRHTDEGVEYMIASESVSLDVLGFTLIRDLAPGEAVYITEDGKLHTRQCAANPKYAPCIFEHVYLARPDSIIDGISVYKARLRMGEKLADKILRERPDHDIDVVIPIPDTSRTAALELANHLGVKFREGFVKNRYIGRTFIMPGQAARKKSVRQKLNAIELEFRGKNVMLVDDSIVRGTTCKQIIQMAREAGAKNVYFCSAAPAVRYPNVYGIDMPSAHELIAHNRTTQDVADLIGADWLVYQDLNDLIEAVSGSKKIKIDNFDCSVFDGKYVTGDIDEHYLNRIESARNDASKIKTQAVSAIIDLYNN

SEQ ID NO: 132406 - DNA, 1518 bp, Haemophilus influenzae 86-028NP
  CDS (1)..(1518): transl_table=11
atgtgtggtattgtcggtattgttagccaaagtccggttaatgaatctatttatgcagcattaactcttttgcaacatcgtggacaagatgcggcgggtattgtaacggttgatgatgaaaaccgtttccgcttacgtaaagctaatggcttagtcagcgatgtgttccgtcaagagcatatgctacgcttgcaaggaaatgctggattagggcatattcgctatcctacggcaggaagttctagcgtctcagaggcacaacctttttatgtaaattctccctatggtgtcactttggtgcataacggcaatttaaccaactcagtggagttaaaagaaaaagtctttaaaactgcccgccgtcacgtaaacactaattcagattctgaacttcttcttaatattctcgctaatcatcttgatcacattcctcaaaaccatcttgatccacaagatattttctatgctgttcgtaaaactcacaatgatattcgtggtgcttatgcctgcgtagcgatgattattggacacggaatggttgcatttagagatccttttggtattcgtcctttggtgttgggtaaacgtgaagaaaatggcaaaactgattatatgttcgcctctgaaacagtagctttagatattgtgggtttcgagtttgtgcgtgatattgctgcgggcgaagccgtttatgtgacatttgatggcgagctttattcacaacaatgtaccgaaagtgcggtgttaaatccttgtatttttgagtatgtttattttgcacgcccagattcaacgattgatggtgtctctgtttatgcggcacgtgttcatatgggggaaaaactcgggaaaaaaattgcaaaagaatgggcggatgaaattgataatattgatgtggtcattcctattcctgaaacctccacagatattgcgttacaaatagctcgtgttctagggaagccttatcgacaaggatttgtgaaaaatcgctatgttggtcgtacctttattatgccaggtcaagcacagcgtattagttctgttcgtcgcaaattgaataccattaaagctgaatttaaagataaaaatgtgttattggtggacgattctatcgttcgtggcacaacctctgagcaaattgttgaaatggctcgctcagctggtgcgaagaaaatttactttgcctctgcagctcctgaaattcgttatccgaatgtatatggtattgatatgccgagttgtgatgaactgatcgcttacggtcgaaatgttgaggaaattgcacatttgatcggcgtagataaattaattttccaagatctgaccgcacttactgaatctgttcaattggaaaatccagccattcaaggttttgattgttcagtattcacaggcgaatatattacaggcgatattagtcctgaatatcttgataaaatcgcacttcaacgcaacgatagtgcaaagaaaaaacgtgaaaaacaagcatccaatcttgaaatttataatgaacaataa

SEQ ID NO: 132407 - protein, 505 aa, Haemophilus influenzae 86-028NP
MCGIVGIVSQSPVNESIYAALTLLQHRGQDAAGIVTVDDENRFRLRKANGLVSDVFRQEHMLRLQGNAGLGHIRYPTAGSSSVSEAQPFYVNSPYGVTLVHNGNLTNSVELKEKVFKTARRHVNTNSDSELLLNILANHLDHIPQNHLDPQDIFYAVRKTHNDIRGAYACVAMIIGHGMVAFRDPFGIRPLVLGKREENGKTDYMFASETVALDIVGFEFVRDIAAGEAVYVTFDGELYSQQCTESAVLNPCIFEYVYFARPDSTIDGVSVYAARVHMGEKLGKKIAKEWADEIDNIDVVIPIPETSTDIALQIARVLGKPYRQGFVKNRYVGRTFIMPGQAQRISSVRRKLNTIKAEFKDKNVLLVDDSIVRGTTSEQIVEMARSAGAKKIYFASAAPEIRYPNVYGIDMPSCDELIAYGRNVEEIAHLIGVDKLIFQDLTALTESVQLENPAIQGFDCSVFTGEYITGDISPEYLDKIALQRNDSAKKKREKQASNLEIYNEQ

SEQ ID NO: 132408 - DNA, 1506 bp, Pseudomonas fluorescens Pf-5
  CDS (1)..(1506): transl_table=11
atgtgtggcatcgtcggtatcgtcggtaagtcgaacgtcaatcaggcgctgtatgacgcgctaaccgtcctccagcaccgcggccaggacgctgccggtatcgtgaccagccatgatggccggttattcctgcgcaaggacaacggcctggtgcgtgatgtgttccagcagcggcacatgcagcgcctggtaggccatatgggcatcggccatgtccgctatccaaccgcgggcagctcgacctcggccgaggctcagccgttctacgtcaactcgccttacggcatcaccctggcgcacaacggcaacctgaccaatgtggagcagttggccaaggagatctacgagtccgacctgcgccacgtcaacaccaactccgactctgaagtgctgctcaacgtgtttgcccacgagctggcccagcgcggcaagttgcagcctaccgaggaagacgtgtttgccgccgtcaccgacgtgcacaaccgttgcgtgggtggctacgcggtggtggccatgatcaccggctacggcattgtcggtttccgtgacccccacggtatccgtccgatcgtcttcggccagcgtcataccgacgaaggcgtggaatacatgatcgcctcggaaagcgtttccctggatgtgctgggtttcaccctgattcgcgacctggctccgggcgaagcggtctacatcactgaagagggcaagctctacacccgccagtgcgccaccaacccgcaactcacgccgtgcatcttcgaacacgtatatctggcccgtccggattcgatcattgatggcgtctcggtgtacaaggcgcgcctgcgcatgggtgagaaactggcagagaagatcctgcgcgagcgtcctgagcacgatatcgacgtggtgatcccgattccggataccagccgcactgcggcgctggagctggcgaaccatctgggggtcaagttccgcgaaggtttcgtcaagaaccgctacataggccgtaccttcatcatgccgggccaggcggcgcggaagaaatccgtacgccagaagctcaatgcgatcgaactggaatttcgcggcaagaacgtgatgctggtggacgactccatcgtccgtggcaccacctgcaagcagattatccagatggcccgtgaagcgggcgcgaagaacgtctacttctgctcggctgcacctgccgtgcgttacccgaacgtgtatggcatcgacatgccgagcgcccacgagttgatcgcccacaatcgttcgacccaggacgtggcagacctgatcggcgccgactggctgatctaccaggacttgccggacctgatcgaggcggtcggtggtggcaagatcaagatcgagaacttcgactgcgcggtgttcgacggcaagtacgttaccggcgatgtcgacgaggcctacctgaacaagatcgagaacgctcgtaacgatgcgtccaaggccaagacccaggcggtcagcgccatcatcgatctgtacaacaactga

SEQ ID NO: 132409 - protein, 501 aa, Pseudomonas fluorescens Pf-5
MCGIVGIVGKSNVNQALYDALTVLQHRGQDAAGIVTSHDGRLFLRKDNGLVRDVFQQRHMQRLVGHMGIGHVRYPTAGSSTSAEAQPFYVNSPYGITLAHNGNLTNVEQLAKEIYESDLRHVNTNSDSEVLLNVFAHELAQRGKLQPTEEDVFAAVTDVHNRCVGGYAVVAMITGYGIVGFRDPHGIRPIVFGQRHTDEGVEYMIASESVSLDVLGFTLIRDLAPGEAVYITEEGKLYTRQCATNPQLTPCIFEHVYLARPDSIIDGVSVYKARLRMGEKLAEKILRERPEHDIDVVIPIPDTSRTAALELANHLGVKFREGFVKNRYIGRTFIMPGQAARKKSVRQKLNAIELEFRGKNVMLVDDSIVRGTTCKQIIQMAREAGAKNVYFCSAAPAVRYPNVYGIDMPSAHELIAHNRSTQDVADLIGADWLIYQDLPDLIEAVGGGKIKIENFDCAVFDGKYVTGDVDEAYLNKIENARNDASKAKTQAVSAIIDLYNN

SEQ ID NO: 132410 - DNA, 1536 bp, Psychrobacter arcticus 273-4
  CDS (1)..(1536): transl_table=11
atgtgtggagtcgttggggtcgcagctcatgagccggtcaaccaaattttgtatgatgccttaaccatgttgcagcaccgtgggcaagatgcggcaggtattgtgactttacaggatggacgtttatatttacgtaaagaaaacggcatggtacgtgacgtctttatgagtcgccatatgttaaagctggtcggtaaatttggtatcggacatgtgcgttatccaactgctggaacgtctagcagtgctgaagcacagcctttttatgtcaactcgccttacggtattacccttgcacataatggtaatttgaccaatgctgagagcttggcaaaatcgctttatcaagaagatcgccgccatttaaataccgactcagattctgaggtattgctcaatgtgcttgcacatgagatgcaaaatctaggaaaaactcatccaacgcctactgatatctttgaagcagtcacagcggtttatagtcgtgttgaaggcgcttacggtgtggtcgctctgattaccggtcatggtttgctagcattccgtgatccaaatggtattcgaccgcttatctttggtaagcgcatggctgctaatggcggcacagaatacatggtggcatcagaatcggttgccttaacaggttcaggttttagtattgtgcgtgatgttaagcctggcgaagctatctttattgatctagatcataaactgcatacgcatcagtgcgtcgagcaaaaagaatatacgccatgtatctttgaatacgtttattttgcccgtccagattcaattatggataatatttctgtctacaaatcgcgcttacgtatgggcgaaaaactggctgataaaatccttgctgaatggggtgaagatcatgatatcgatgtcgtcattcctattccagatacctcgcgcacctcagcgatggagctggcgctaaagatgaatgtgaagtatcgtgaagggtttatgaaaaaccgctatatcggtcgtacctttattatgccaggtcagcagcaacgcaaaaagtcagtacgtcaaaagctcagtgcggtaccattagagtttaaaggtaaaaacgtactcttggttgatgattctatcgttcgcggtaccacttgccatgagattatccaaatggcacgcgatgcaggcgctcgtaaagtattctttgccagtgcatcgccaccggttaaatatccaaacgtctatggtattgatatgccagtgcgtagcgagctgatcgcatcagggcatagcgttgaagaggtacgagaaattattggcgctgaccgtttaattttccaagatttggatgatttgattgaggcggtaaaagatactaagcatagcaaagttgaaggctttgattgtgcggtattcaatggctgttatatcaccggtcaaatcaacgaagcgtatcttgagcatctgcaagagcagcgtaacgacactgctaaaaagggtaaagaaggggtacaagtagtggctgatacaccagtagatatgatgggggtagaagagctttag

SEQ ID NO: 132411 - protein, 511 aa, Psychrobacter arcticus 273-4
MCGVVGVAAHEPVNQILYDALTMLQHRGQDAAGIVTLQDGRLYLRKENGMVRDVFMSRHMLKLVGKFGIGHVRYPTAGTSSSAEAQPFYVNSPYGITLAHNGNLTNAESLAKSLYQEDRRHLNTDSDSEVLLNVLAHEMQNLGKTHPTPTDIFEAVTAVYSRVEGAYGVVALITGHGLLAFRDPNGIRPLIFGKRMAANGGTEYMVASESVALTGSGFSIVRDVKPGEAIFIDLDHKLHTHQCVEQKEYTPCIFEYVYFARPDSIMDNISVYKSRLRMGEKLADKILAEWGEDHDIDVVIPIPDTSRTSAMELALKMNVKYREGFMKNRYIGRTFIMPGQQQRKKSVRQKLSAVPLEFKGKNVLLVDDSIVRGTTCHEIIQMARDAGARKVFFASASPPVKYPNVYGIDMPVRSELIASGHSVEEVREIIGADRLIFQDLDDLIEAVKDTKHSKVEGFDCAVFNGCYITGQINEAYLEHLQEQRNDTAKKGKEGVQVVADTPVDMMGVEEL

SEQ ID NO: 132412 - DNA, 1518 bp, Colwellia psychrerythraea 34H
  CDS (1)..(1518): transl_table=11
atgtgtggtattgttggtattgtcggtaaaactcctgttagtcagcatatatatgatggactaactgtacttcagcatcgtggtcaagatgctgctggtattgtaacaattcataataatactttcaggctaagaaaaggtaatgggttagtgaaagatgtttttcatacccgccatatgcttcgcctacaaggtaatattggtattggtcacattcgctatccaacagcgggcacttctagctcttcagaagcacaacctttttatgccaactcaccttttggtttgtcattggcacataatggtaacttaaccaacgctgaagaattaagaacatggttatttgatgaagctcgtcgccatgtgaacacaacttcagattctgaggttctgttaaatatcctagcgcatgaattacagcaaagtgaaaacattgcgctaacaccggaagatattttcactgcagttgctaaagtccataaacgtgttcgtggcgcatatgctactgtagcgcttattgttggtcacggtatgattgcttttcgtgaccctaacggaattcgtcctttagtttttggtaaaagagaaactgaattgggcgttgagtatatggttgcgtctgaatcagttgcgctagatgcatgttcttttgaatttgtacgtgatgttgctccaggtgaaactatatttttctctgaagatggcctaattcacagtctgcaatgtgctgaaaatcctgtttatagcccatgtatatttgaatttgtatactttgctcgccctgattcaaccatggataaaatgtctgtttatgcctctcgtgtagaaatgggaactaagttaggcgagaaaattgccgaggaatggcaagatattgatattgatgttgttattcctatccctgaaacatcttgcgatattgccttacaaatagcaaagcagcttaacttaccttaccgacaaggttttgttaaaaaccgatacatcggtcgtacttttattatgccgggtcaagagcaacgtaaaaaatcagttcgtcaaaagcttaacgctattgcaacggaatttaagggtaaaaatgttttactagttgacgattctgttgttcgaggcactacctcggagcagataattgatatggcgcgtgcctcaggtgcaaaaaatgtctattttgcttcagcagcacctgaagtaagattccctaatgtctatggtatagatatgccaagtgctaatgaactcattgcacatggtcgtgaattggatgatatttgtagtttaattggtgcagataaattaatatttcaatctcttgaggacttaatctctgcagttagcgttggcaatccagacatcaaaacttttgatacttctgtatttgatggtaactatgtcaccaatgatatcgaccaagcatatttagaaagattagatgcattgcgtaataatacgagtaaagaagaatcagacaaaaatgctgattctattattgatatgcataatgaaggtgcagagtag

SEQ ID NO: 132413 - protein, 505 aa, Colwellia psychrerythraea 34H
MCGIVGIVGKTPVSQHIYDGLTVLQHRGQDAAGIVTIHNNTFRLRKGNGLVKDVFHTRHMLRLQGNIGIGHIRYPTAGTSSSSEAQPFYANSPFGLSLAHNGNLTNAEELRTWLFDEARRHVNTTSDSEVLLNILAHELQQSENIALTPEDIFTAVAKVHKRVRGAYATVALIVGHGMIAFRDPNGIRPLVFGKRETELGVEYMVASESVALDACSFEFVRDVAPGETIFFSEDGLIHSLQCAENPVYSPCIFEFVYFARPDSTMDKMSVYASRVEMGTKLGEKIAEEWQDIDIDVVIPIPETSCDIALQIAKQLNLPYRQGFVKNRYIGRTFIMPGQEQRKKSVRQKLNAIATEFKGKNVLLVDDSVVRGTTSEQIIDMARASGAKNVYFASAAPEVRFPNVYGIDMPSANELIAHGRELDDICSLIGADKLIFQSLEDLISAVSVGNPDIKTFDTSVFDGNYVTNDIDQAYLERLDALRNNTSKEESDKNADSIIDMHNEGAE

SEQ ID NO: 132414 - DNA, 1509 bp, Pseudomonas syringae pv. phaseolicola 1448A
  CDS (1)..(1509): transl_table=11
atgtgtggcatcgtcggtatcgtcggcaagtcgaacgtcaatcaggcgctgtatgacgcgcttaccgtcctccagcaccgcggccaggacgctgccggtatcgtaaccagccacgatggccggttattcctgcgcaaggacaacggattggtgcgtgatgtgtttcatcaacgccatatgcagcgcttggtcgggcatatgggcatcggtcatgtgcgctatccaacggcgggcagctcgacgtctgcagaggcccagccgttctacgtcaactcgccttatggcatcacgttggcgcacaacggcaacctcaccaacgtcgaacaactggccaaggagatttacgaatccgacctgcgccatgtgaacaccaattccgattcggaagtgctgctcaacgttttcgcccatgagctggccgtgcgtggcaagttgcagccgaccgaagaggatatcttcgccgcagtgaccgacgtgcataatcgctgccgtggcggctatgcggtcgtggcaatgatcaccggctacggcattgtcggtttccgtgacccggacgccattcgtcctatcgtgtttggccagcgtcataccgacgaaggcgtcgaatacatgatcgcatcggaaagcgtgtcgctggacgtgctcggctttaccctgattcgcgacctggcaccgggcgaagcggtctacatcactgaagacggcaagctgcatacccgtcagtgtgcggccaaccccaaatatgcaccgtgcatcttcgaacacgtttatctggcacgtcctgactcgatcatcgacggcatttcggtctacaaggcgcgtttgcgcatgggcgagaagctggccgacaagatcctgcgcgagcgtccggatcacgatatcgatgtggtcatcccgattccggacaccagccgtaccgctgcgctggagctggccaatcatctgggcgtcaagttccgcgaaggtttcgtcaagaaccgctacatcggccggaccttcatcatgccgggccaggcagcacgcaagaaatccgtgcgtcagaagctcaacgcaatcgagctggagttccgcggcaagaacgtgatgctggtggatgactccatcgtgcgcggcacgacctgcaaacagatcatccagatggcccgtgaagccggtgccaagaatgtctacttctgttcggcggccccggccgtgcgctaccccaacgtctacggcatcgacatgccgagtgctcacgagctgatcgcccacaaccgttccactcaggacgttgccgaccttatcggtgccgactggctggtttatcaggatctgaatgacctgatcgaagcggtcagcggcagcaagaaaatcaagatcgacaacttcgattgctcggttttcgacggcaagtacgtgaccggtgacatcgacgagcattatctgaacaggatcgagagcgcgcgtaacgacgcctccaagatcaagactcaggccgtgagcgcgatcatcgatctgtacaacaactaa

SEQ ID NO: 132415 - protein, 502 aa, Pseudomonas syringae pv. phaseolicola 1448A
MCGIVGIVGKSNVNQALYDALTVLQHRGQDAAGIVTSHDGRLFLRKDNGLVRDVFHQRHMQRLVGHMGIGHVRYPTAGSSTSAEAQPFYVNSPYGITLAHNGNLTNVEQLAKEIYESDLRHVNTNSDSEVLLNVFAHELAVRGKLQPTEEDIFAAVTDVHNRCRGGYAVVAMITGYGIVGFRDPDAIRPIVFGQRHTDEGVEYMIASESVSLDVLGFTLIRDLAPGEAVYITEDGKLHTRQCAANPKYAPCIFEHVYLARPDSIIDGISVYKARLRMGEKLADKILRERPDHDIDVVIPIPDTSRTAALELANHLGVKFREGFVKNRYIGRTFIMPGQAARKKSVRQKLNAIELEFRGKNVMLVDDSIVRGTTCKQIIQMAREAGAKNVYFCSAAPAVRYPNVYGIDMPSAHELIAHNRSTQDVADLIGADWLVYQDLNDLIEAVSGSKKIKIDNFDCSVFDGKYVTGDIDEHYLNRIESARNDASKIKTQAVSAIIDLYNN

SEQ ID NO: 132416 - DNA, 1455 bp, Thermobifida fusca YX
  CDS (1)..(1455): transl_table=11
gtgtcgcaacccgacggccgcctcagcctggacatcgatcctttagaacgcggaccgcaggacgcctgcggagtgttcggggtctgggctcccggcgaagaagtaagcaaactgacctacttcggtctctacgcgctccagcaccgcggccaagagtccgcgggcatcgccctcagcaacggtgagcggatcgtcgtctacaaagacatggggctcgtgtcccaggtcttcaacgaagtcaccctggactccctcaaagggcacctggcgatcggccactgccgctactccactaccggctcatccgtctgggagaacgcgcaacccacgttcttcagcgcgcgggagggcggtctcgcgctcggccacaacggcaacctgatcaacaccccggagctcgcggcgctgctgccgtcggatcgcctgagcgcgaccacggacaccgaggtgctcacccgtctgctcgccgccgccccgcaccgcaccaccgaggaagccgccctcgacgtgctgcccaaagtcaagggcgcattctccctggtcttcatggacgagcacaccctgtacgcggctcgcgacccccagggaatccgcccgctggtcctgggccgcctcgacaccgggtgggtcgtggccagcgagaccgcggcgctcgacatcgttggtgcttccgtggtgcgcgaggtcgaaccgggagagctgctggtcatcaacgcggacggcgtcgcttcccggcgtttcgccccggccgagcccaaaggctgcctgttcgaatacgtctacctggcccgtcccgacaccacgatcgcgggacgcaacgtcaacagcgcccgcgtcgaagtggggcggcggctggcccggcagcacccggccgatgcagacgtggtcatccccgtccccgaatcgggcacgcccgcggccgtgggctacgccgaaagcagcggcatcccgttcgcccaagggctggtgaagaactcctatgtgggccgcacgttcatccagccgagccagacgctgcgccagcgcggcatccggctcaagctgaacccgctgcgcgaagtcatcgaaggcaagcggctggtcgtcgtcgacgactcgatcgtgcggggcaacacccagcgggccctggtgcggatgctgcgcgaggcgggcgctgccgaggtccacgtccggatctccagcccgcccgtgatgtggccctgctactacggcatcgacttcgccaccaaagccgaactgatcgcgggtagcctctccgtcgaagagatctgccaatccatcggcgcagactcgctcggcttcatcgatctcgatgaactggtcgcagccaccagagtcgagaagaaccggctgtgccgggcctgcttcgacggcgtctacccggtcgaggtcgacgaggactcccgcggcaagtacctgttggagaagtcctgcggcgcccctaagcgcccctag

SEQ ID NO: 132417 - protein, 484 aa, Thermobifida fusca YX
MSQPDGRLSLDIDPLERGPQDACGVFGVWAPGEEVSKLTYFGLYALQHRGQESAGIALSNGERIVVYKDMGLVSQVFNEVTLDSLKGHLAIGHCRYSTTGSSVWENAQPTFFSAREGGLALGHNGNLINTPELAALLPSDRLSATTDTEVLTRLLAAAPHRTTEEAALDVLPKVKGAFSLVFMDEHTLYAARDPQGIRPLVLGRLDTGWVVASETAALDIVGASVVREVEPGELLVINADGVASRRFAPAEPKGCLFEYVYLARPDTTIAGRNVNSARVEVGRRLARQHPADADVVIPVPESGTPAAVGYAESSGIPFAQGLVKNSYVGRTFIQPSQTLRQRGIRLKLNPLREVIEGKRLVVVDDSIVRGNTQRALVRMLREAGAAEVHVRISSPPVMWPCYYGIDFATKAELIAGSLSVEEICQSIGADSLGFIDLDELVAATRVEKNRLCRACFDGVYPVEVDEDSRGKYLLEKSCGAPKRP

SEQ ID NO: 132418 - DNA, 1458 bp, Prochlorococcus marinus str. NATL2A
  CDS (1)..(1458): transl_table=11
atgtgtggaatagtaggtgttgtttcaactgatcaatgtaatcaacaaatttacgatagtttgctattgcttcagcatagaggtcaagattccactggtatagcaacaatggatggcagtgtttttcatattaataaatctaaaggtcaagttcgagaagcttatagaactagagacatgagagctttgatcggaagatcaggattaggacatgtacgttatgcaactaaaggtgctgctcatagagaagaagaagcacaacctttctatgtcaatgctccttacggaattattcttgttcataatggaaacttaacaaatacaagagagctagaaaaagaactttttaaagttgataaaagacatacaaatacatcaagcgatactgaaatgttattaaatgttttggcaacagaattaaatagtgaagtaaaaggaaaagatgtagatccagatgatctttttaatgctgttaaaagacttcactctagagtagaaggatcctatgcttcaatcgctttaatagcaggtcatggtcttttagcgtttagagatccttttggaattcgccctttggttattggtaaaagggtaaaagaaaataacaaacctgagtgggtaatcgctagtgaatcgctagttattgaaaataatgattatgtaattgttagagatgttgaaccaggtgaggcgatatttataacttcaaatggtgagtttttttctaaacaatgctcagataatcctcaattattcccctgttcatttgaatatgtttatttagcaagacctgactcaataatgaatggtatttctgtttatgagtcaaggttaagaatgggggatttattagcagaaactataaaaaaacaaatatctcttggtgatatagatgtcgtaatgccaattcctgattcttctagacctgctgcaatgcaggtagcaagacagttaggtattgaatatagggagggttttttcaaaaatcgttatgttggtagaacatttataatgcctggtcaatctctaagaaaacgttcagtgcgtcagaaattaaacgcaatgagtactgaatttaaaaataaaaatgtattgatagttgatgattcagtggttagaggaacgacatctcagcaaatagttcaaatggcaagaagtgcaggggctaataaagttacttttacatctgctgctccaccaataagatatccacatgtttatggaattaatatgccaagtagaaatgaattgattgcgtataatagagatataaatcaaatagaaaataatttatttattgataaaatgatttatcaagaggtaaatgatcttactcaggctattacgcaaaattctaaaattaaggaattagatttatcatgctttacagggaaatatattacaggaacagtcactgatgaatatttaacttgggttgaagaaacatctttgtcttaa

SEQ ID NO: 132419 - protein, 485 aa, Prochlorococcus marinus str. NATL2A
MCGIVGVVSTDQCNQQIYDSLLLLQHRGQDSTGIATMDGSVFHINKSKGQVREAYRTRDMRALIGRSGLGHVRYATKGAAHREEEAQPFYVNAPYGIILVHNGNLTNTRELEKELFKVDKRHTNTSSDTEMLLNVLATELNSEVKGKDVDPDDLFNAVKRLHSRVEGSYASIALIAGHGLLAFRDPFGIRPLVIGKRVKENNKPEWVIASESLVIENNDYVIVRDVEPGEAIFITSNGEFFSKQCSDNPQLFPCSFEYVYLARPDSIMNGISVYESRLRMGDLLAETIKKQISLGDIDVVMPIPDSSRPAAMQVARQLGIEYREGFFKNRYVGRTFIMPGQSLRKRSVRQKLNAMSTEFKNKNVLIVDDSVVRGTTSQQIVQMARSAGANKVTFTSAAPPIRYPHVYGINMPSRNELIAYNRDINQIENNLFIDKMIYQEVNDLTQAITQNSKIKELDLSCFTGKYITGTVTDEYLTWVEETSLS

SEQ ID NO: 132420 - DNA, 1527 bp, Ralstonia eutropha JMP134
  CDS (1)..(1527): transl_table=11
atgtgcggtatcgtcggcgcggtctctacctcgcccgtcaaccaattgatttacgacagcctgctgttgttgcaacaccgcggacaggatgctgccggcatcgccaccgccaacggcagtactttccacatgcacaaggccaacggcctcgtgcgcgacgtgttccggacccgcaatatgcgcggcctgccgggcaccgccggcatcggtcaggtgcgttacccgaccgcgggctccgcctccagcgaagaagaggcacagccgttctacgtcaatgcgccgtacggcatcatcctggcccacaacggcaacctgaccaactggcagcaactgcgcgaggaaatgttccgccgcgaccgccgccacatcaatacgcactcggataccgaggtgctgctcaatgtgctcgctgacgaactgcagcgcgcgagccagggcatggcgctggatccggaaacgatcttcaaggccgtttccggcatgcaccgccgcgtgaagggctcgtacgccattgccgcgcagatcgccggttacggcatgcttgccgtgcgcgatccgttcggcatccgcccgctgagtcttggcagcgtggacacgcccaccggcaaggaatggatggtggcgtcggagtcggtggcgctggaaggcatcggctatcgcatggagcgcgacgtggcgcccggcgaggccatcttcatcgacctcgacggcaagctgtacagcaagcagtgcgcggacaaccccgtgctgacgccgtgcatcttcgagtacgtctacctggcccgtccggattcgtgcatcgatggcgtgcccgtctatgacgcccgcctgcgcatgggcgactacctggccgaaaagatccgccaggaagtgtcggccggcgacatcgacgtggtcatgccgattcccgattccagccgcccggccgccatgcaggtagccaaccggctgggcgtgggctatcgcgaaggtttcttcaagaaccgctacgtgggccgcaccttcatcatgccgggccaggcggtgcgcaagaagtcggtgcgccagaagctcaacgcgatggccgtcgagttcaagggcaagaacgtgctgatcgtcgatgactcgatcgtgcgcggcaccacgtcgttcgagatcgtgcagatggcgcgcgacgccggcgccaacaaggtcatcttcgcctcggccgcgccgccggtgaagtacccgaacgtgtacggcattgacatgccgacgcgcagcgagttggtggcccatggccgcacgcacgaagagatcgccaagatcatcggcgccgacaagctggtgtaccaggacgtggaagcgatgaagcaggctgtacgcgacatcaaccccgcgttgaacgacttcgacgcgtcgtgcttcgatggccgctacgttaccggcgacatcgacgaggcctacctggatcgcctggaaacggcgcgcagcttggctgatcgcgaaggcaccggagacatggagcgctcgcaactgcacctgcagcgttcgggcggcaacgagtaa

SEQ ID NO: 132421 - protein, 508 aa, Ralstonia eutropha JMP134
MCGIVGAVSTSPVNQLIYDSLLLLQHRGQDAAGIATANGSTFHMHKANGLVRDVFRTRNMRGLPGTAGIGQVRYPTAGSASSEEEAQPFYVNAPYGIILAHNGNLTNWQQLREEMFRRDRRHINTHSDTEVLLNVLADELQRASQGMALDPETIFKAVSGMHRRVKGSYAIAAQIAGYGMLAVRDPFGIRPLSLGSVDTPTGKEWMVASESVALEGIGYRMERDVAPGEAIFIDLDGKLYSKQCADNPVLTPCIFEYVYLARPDSCIDGVPVYDARLRMGDYLAEKIRQEVSAGDIDVVMPIPDSSRPAAMQVANRLGVGYREGFFKNRYVGRTFIMPGQAVRKKSVRQKLNAMAVEFKGKNVLIVDDSIVRGTTSFEIVQMARDAGANKVIFASAAPPVKYPNVYGIDMPTRSELVAHGRTHEEIAKIIGADKLVYQDVEAMKQAVRDINPALNDFDASCFDGRYVTGDIDEAYLDRLETARSLADREGTGDMERSQLHLQRSGGNE

SEQ ID NO: 132422 - DNA, 1389 bp, Ehrlichia canis str. Jake
  CDS (1)..(1389): transl_table=11
atgcagtttaaagaagtatatgaagaatgtggtatattcgccatacaaaacaacagacgtgctgcagtgaactgtatcttaggactacatgcacttcaacacagaggtcaagaatcatttggcatagtaacgtcagaagataacaagctttattgtcactattccaatgaacaagttaatagcatgtttaatcagcaacccaaaataaatttactactagggaaatctgcgattggacatgtacgttattctacaagtggtagtaaaattggtgtgcaaccaataactttagattgtaaattcgggaaattggcaatagcacataatggtaatcttaccaacgcaacacaaataagaaactcattaactgaaaaaggatgcatattttcatccgacatagatacagaagtaatcgcacatttaatcgctattaatacacaggctactctgttaaataacatcacaaatgcactaaaaactatcaatggtgcatactcactagtaattcttgtaaatggtaccataatatgctgccgtgacccagctggtattagacctctagtattaggcatattagataattcatacattgtagcttcagaaacttgttctctagacatagttggagcacaatttgtaagagagatatcaccaggagaactgattataattgatcaaaataatactctaacaagttcttttccatttaaaaaacaaaaatcaagtttttgcattttcgaatatgtatattttgcacgaccagacagtataataaacaataaatctgtatatgaaatacgtaaaaacataggaaaagaactcgcaatagaaaatcctgtaccaaaagatacacatatggtagtaccagtaccagactctggagtaccagctgcattaggattctcagaatatacaaaaataccttttgaatttggaattattagaaatcattacgtaggaagaacttttatccagcctagcaactacgttcgtaatatgggagtaaaacttaaacataacgctaatgcttctattttgaaagacaaaataataatcctaatagatgacagtcttgttagaggtacaacattaaaaaacatcataacattactacacaaagcgcaagttaaagaaatacatctcaggatttctagcccaccaactataaactcttgcttttacggaatagatacaccagaagagtcaaagttaatagcaaataagttatcaactacagaaatcaaaaatgaacttggctgtgatagtatatattttctaagtataaatggcctttacaaagcaatcaataacacaactaggaataatagttctcctcaatactgtgatgcttgtttcactggagattatcctataggaaaaattgagtaa

SEQ ID NO: 132423 - protein, 462 aa, Ehrlichia canis str. Jake
MQFKEVYEECGIFAIQNNRRAAVNCILGLHALQHRGQESFGIVTSEDNKLYCHYSNEQVNSMFNQQPKINLLLGKSAIGHVRYSTSGSKIGVQPITLDCKFGKLAIAHNGNLTNATQIRNSLTEKGCIFSSDIDTEVIAHLIAINTQATLLNNITNALKTINGAYSLVILVNGTIICCRDPAGIRPLVLGILDNSYIVASETCSLDIVGAQFVREISPGELIIIDQNNTLTSSFPFKKQKSSFCIFEYVYFARPDSIINNKSVYEIRKNIGKELAIENPVPKDTHMVVPVPDSGVPAALGFSEYTKIPFEFGIIRNHYVGRTFIQPSNYVRNMGVKLKHNANASILKDKIIILIDDSLVRGTTLKNIITLLHKAQVKEIHLRISSPPTINSCFYGIDTPEESKLIANKLSTTEIKNELGCDSIYFLSINGLYKAINNTTRNNSSPQYCDACFTGDYPIGKIE

SEQ ID NO: 132424 - DNA, 1434 bp, Methanosarcina barkeri str. Fusaro
  CDS (1)..(1434): transl_table=11
ttgaaagaagaatgtggcgttgcaggcataattctaccaggcgataggccgcaatccaatactgtcgcattcaagctgtattacgccttgtatgccctccagcatagaggacaggaatccactggcataatggtatatgatggtacatcctctcattccattaaaggcatgggtctcgtccctgatgtgtataacaaagattctcttgggcacctggttggaaatgtaggagtagggcatgtccgctactcaaccaccggaggatcaaaaatcgaaaattgccagccctttgttctgaaattcaaaggaggagcagttgcaattgcccataacgggaacctggttaatgccagaacgctcaaggatgaactggagtgtgaaggccgtatctttatcagtgagtccgatacagaagttattggccaccttcttgtaaaagaactgataagacacgaccctatagaatcaatccggaatgtcatgcgtaagcttgtcggttcctattccctggttatccatatcggcggtgttctgtatgctgtgcgtgaccctctcggtcttaagccgctctgctttggggaagtcgatggtggatatgcagtattctcggaaagcgtagcccttgatacccttaacggcacccttatcagggatgtacggccaggtgaggtaatagtttttacaggcgacagctttgagagctaccagataggaaacgagcctcatcccgcacattgtgtgtttgagttcatttattttgcaagacccgattctattattgacggaaaactggtctacaaagttcgggaaaatatcgggagagagcttgccagagaacatccggtagaggctgatgttgtttcacctgtcccggactctgggattacttccgcaatcggctacgccagggagtcaggcaccaaataccttgaaggcttgatgaagaaccgttatatagggcgtacatttatcctgcctggccaagagctgcgtgaaaccgcagttcggcttaaaatgaatgctatccaggataatgttaaagacaaacgtgttgttctggttgacgacagtattgtccgtggtacaacctccaggcggattatagatatggtccgcagggcaggtgcttcagaaatccatgcaaggataggaagtccagcaattattgctccctgttatctgggtatagatatggccaccaggcaagaacttatcgcctcttataagaccgtaaaagaggttgaaggccttattaatgcggattcactcggatatctaagtattgacggacttatgagggctcttgggcgcgataagtgcgacatgtgccttggctgccttacaggtgagtatcctgtcgaaattcctggagaaaactgcataaggaagcagacacgtctggatgattttaacaataaccaggaaagttcctga

SEQ ID NO: 132425 - protein, 477 aa, Methanosarcina barkeri str. Fusaro
MKEECGVAGIILPGDRPQSNTVAFKLYYALYALQHRGQESTGIMVYDGTSSHSIKGMGLVPDVYNKDSLGHLVGNVGVGHVRYSTTGGSKIENCQPFVLKFKGGAVAIAHNGNLVNARTLKDELECEGRIFISESDTEVIGHLLVKELIRHDPIESIRNVMRKLVGSYSLVIHIGGVLYAVRDPLGLKPLCFGEVDGGYAVFSESVALDTLNGTLIRDVRPGEVIVFTGDSFESYQIGNEPHPAHCVFEFIYFARPDSIIDGKLVYKVRENIGRELAREHPVEADVVSPVPDSGITSAIGYARESGTKYLEGLMKNRYIGRTFILPGQELRETAVRLKMNAIQDNVKDKRVVLVDDSIVRGTTSRRIIDMVRRAGASEIHARIGSPAIIAPCYLGIDMATRQELIASYKTVKEVEGLINADSLGYLSIDGLMRALGRDKCDMCLGCLTGEYPVEIPGENCIRKQTRLDDFNNNQESS

SEQ ID NO: 132426 - DNA, 1419 bp, Dehalococcoides sp. CBDB1
  CDS (1)..(1419): transl_table=11
ttgcatgaatcttgcggcgttttcggtgtatttgcccccggtcaggatgtagcccgactcacatttttcgctctgtttgccttgcagcacagagggcaggaaagttcaggcatatctacatctgatggacaggagcttaagcttcattcccagatgggtctggtttcccatattttcactgaagatatacttaaaaaactggacggccatattgccataggccacaaccgctattccaccaccggttcaagccagcagattaacgcccagccctttgtaatggggcagggagataatgttatagccatagcccataatggcaacatcgtaaattccgaagctttgaatacagaacttacctctcagggatacacctttaagacatccactgataccgaaataatcagccagcttatcctttcatctattgaaactgactgggtcaaacggatacgttatgccatgaaccgcctgaaaggggctttttcctgcacccttatgaccaaagacaccctatttgccatgcgtgactcactgggtgtccgtcccctgtgcttgggtaaaattcagggcggttatgtagtcacttctgaaagctgtgctcttgaccatatcggagctgatttcgtgcgtgaaatagagccgggcgagattgtagctataaacggaaacggcataaccagttttaaacagcaaagctccagacgggctttgtgtatatttgagttcatttattttgcccgccccgatagcctgatagacgggcgtcttttgtattccgcccgccaagccatgggggtagaactggccaaagaatacccggtagatgcagacctggttataggcgtacctgactctgccacggctgccggtatcggctatgccgtaggttcaggcattcctccagccgaaggccttattaaaaaccgctacatggggcgaacctttattcagcctgaccagcgtctgcgtgatttgggcgtgaaactaaagttcaatccccttaagagcgttctggaagataagcgggtagtactggtagatgacagcatagtccggggaactaccaccccacaggttatccgcctgttacgtaaagccggcgccaaagaagtccatatgcgggtatgcgcaccccccataaccaacccatgtttcttcggggtagatatggccacccgttcagaacttattgccgccagaatgagcatacctgagatacaaaaatacataggtgcagattcacttggctatcttagcctgcccgggttgataaatgccgtggggctgcctgagaagaatttctgtctggcctgtttcaccggcgaatatgccctgccagttcaactggaaatggataaatttgcacttggcaatcaacgacacaactgttgccagatgccttcacccgaaagctag

SEQ ID NO: 132427 - protein, 472 aa, Dehalococcoides sp. CBDB1
MHESCGVFGVFAPGQDVARLTFFALFALQHRGQESSGISTSDGQELKLHSQMGLVSHIFTEDILKKLDGHIAIGHNRYSTTGSSQQINAQPFVMGQGDNVIAIAHNGNIVNSEALNTELTSQGYTFKTSTDTEIISQLILSSIETDWVKRIRYAMNRLKGAFSCTLMTKDTLFAMRDSLGVRPLCLGKIQGGYVVTSESCALDHIGADFVREIEPGEIVAINGNGITSFKQQSSRRALCIFEFIYFARPDSLIDGRLLYSARQAMGVELAKEYPVDADLVIGVPDSATAAGIGYAVGSGIPPAEGLIKNRYMGRTFIQPDQRLRDLGVKLKFNPLKSVLEDKRVVLVDDSIVRGTTTPQVIRLLRKAGAKEVHMRVCAPPITNPCFFGVDMATRSELIAARMSIPEIQKYIGADSLGYLSLPGLINAVGLPEKNFCLACFTGEYALPVQLEMDKFALGNQRHNCCQMPSPES

SEQ ID NO: 132428 - DNA, 1521 bp, Thiobacillus denitrificans ATCC 25259
  CDS (1)..(1521): transl_table=11
atgtgcggggtaatcggagtcgtcgccaacacggcggtcaatcagcttttgtacgacgggctgatggtgttgcagcatcgcggacaggatgctgcgggcatcgtgaccgccgaggaaaaccgttttcacatgcacaaggcgcccgggctcgcgcgcgacgtcttccgcacacgcgacatgcgcaacctgctcggcgacatgggcgtcgcacacgtgcgctatcccaccgcgggcagtgcgtcgtcgtcggccgaatcgcagccgttctacgtgaactcgccctacggcatcgtgctcgggcacaacggcaacctgacgaacacgcatgaactgaaggaatcgttgttccgcagcgatctgcgccacgtcaacaccaactccgactccgaggtcctgctcaatgtactggcgcacgagctccacgtccgcgcgtccgggcagcagctgagcctcgatacgatcttcggcgcggtcgccggcgtccacgcgcgctgcaagggcgcctacgccgtgaccgcgttcatcgccggctacggcctgctggccttccgcgatccgcacggcatccgcccgctggtgatcggcatcaacgaccaggtcacgccgcacgagtacatcgtcgcgtccgagagcgtcgcgatcgatacgctcggcttccgcctgctgcgcgacgtcgcgcccggcgaggccgtgttcatcgactacgagcgtcggctgcacagccgccagtgcagcgacaaccccgtgctcaacccctgcattttcgaatacgtctatctggcccgcccggattcggtcatggacggaatctcggtctacagcacgcgcctcgcgatgggcgtgtcgctcgcggaaaaaatccgccgcgaattcggccacctgcagatcgacgtcgtgatcccgatccccgacaccagccgcccgtcggcgcttcaattggcgaaccatctcgcggtgccgtaccgtgagggcttcatcaagaaccgctacatcggccgcactttcatcatgccggggcaggcgctgcgcaagaagtcggtgcggcagaagctcaacgcgatcgccgaggagttcaagggcaagaacgtcctgctcgtcgacgattcgatcgtccgcggcacgacgagccgggagattgtccagatggcgcgcgacgcgggtgcggagaaggtctatttcgcgtccgcctcgccgcctgtgcgcttctgtaacgtctacggcatcgacatgccgtcgcgccgcgaactcattgccaacggccgcaatgacgaggaaatcgcgcgtgagatcggctgcgacgcgctgatctatcaggatctcgacgcgatggtcgaggtggtgcgcgccgccaacccggcgatccgcgagttcgacacctcgtgcttcaacggctgctacatcaccggcgacatcacgcccgagtacctcgactacgtcgaggccgcgcgcgacggcgaaagcccgccgccgtcggcgctgtcgacccagcagctcgacctcaacctcgcgacgggcagttga

SEQ ID NO: 132429 - protein, 506 aa, Thiobacillus denitrificans ATCC 25259
MCGVIGVVANTAVNQLLYDGLMVLQHRGQDAAGIVTAEENRFHMHKAPGLARDVFRTRDMRNLLGDMGVAHVRYPTAGSASSSAESQPFYVNSPYGIVLGHNGNLTNTHELKESLFRSDLRHVNTNSDSEVLLNVLAHELHVRASGQQLSLDTIFGAVAGVHARCKGAYAVTAFIAGYGLLAFRDPHGIRPLVIGINDQVTPHEYIVASESVAIDTLGFRLLRDVAPGEAVFIDYERRLHSRQCSDNPVLNPCIFEYVYLARPDSVMDGISVYSTRLAMGVSLAEKIRREFGHLQIDVVIPIPDTSRPSALQLANHLAVPYREGFIKNRYIGRTFIMPGQALRKKSVRQKLNAIAEEFKGKNVLLVDDSIVRGTTSREIVQMARDAGAEKVYFASASPPVRFCNVYGIDMPSRRELIANGRNDEEIAREIGCDALIYQDLDAMVEVVRAANPAIREFDTSCFNGCYITGDITPEYLDYVEAARDGESPPPSALSTQQLDLNLATGS

SEQ ID NO: 132430 - DNA, 1500 bp, Anabaena variabilis ATCC 29413
  CDS (1)..(1500): transl_table=11
atgattcccattgattccgtcactccggatgagtaccccaatcagactaacaaccccatcgatagtcaagaaaatcgtcctgacaagccagaagaggcttgtggagttttcggtatttacgccccaggagaaaatgttgcaaaactaacctactttggattgtatgccctgcaacatcggggtcaagaatcagctggtattgccacgtttgaggggacaacagttcacctacataaagacatgggtttggtttctcaagtctttaatgagtcgattctagaagagttgcctggtgatatcggtgttggtcatacccgttactctactaccggttccagccgcaaagttaatgcccaacctgctgtcctggatactcgtttaggtaagttagctttagcacacaatggcaatttagtcaatactgtgaagttgcgagaagagctagttaatagtaactgcaacctcgtgacaaccacagactcagaaatgattgcctttgcgatcgcccaagcagtcaacgcaggtgcagactggttagatggggcgattcaagcctttcatcgttgcgagggagcttttagcttagttattggcactcccgttggtgtgatgggggtgcgtgacaccaacggcattcgtcctctggtcattgggactttgcctggtaatccagtgcgttatgttttatcttcggaaacctgtggtttagatattattggcgctgattatctccgcgacgtagaaccaggcgaagtagtttggattaccgaagaaggtttagcttcctaccattggagccaaaaaccagagcgaagattgtgtattttcgagatgatttattttgctcgtcccgatagccaaatgcacaacgagactttatacagttatcggatgcgtttaggacgacagctagcagccgaatcctacgtagatgctgatattgtctttggtgtccctgactctggaattcctgctgccattggattttctcaggcttctggtgtagcctacggtgaagggttgattaaaaatcgctacgttggtcgtacctttattcagcctacccaatccatgcgcgagtcagggattaaaatgaaacttaaccccctcaaagatgtactggcgggtaaaagagtaattattgtcgatgactccattgtcaggggaactactagccgtaaactagttaaagccttacgtgatgctggtgcggcagaagtacatatgcggatttcttccccaccagtaacccacccttgtttctacggaattgatactgatactcaggatcagttaattgctgctactaagtcagtagaagaaattgccaagcaattagaagtagaaagcctcgcctatctcagttgggatgggatgttagaagccacaagagaagataaaaatagtttctgttctgcctgttttactggtgattacccagttactattcctgagcaagtgaagcggtctaagttgattttagaaaaggtagtagtttag

SEQ ID NO: 132431 - protein, 499 aa, Anabaena variabilis ATCC 29413
MIPIDSVTPDEYPNQTNNPIDSQENRPDKPEEACGVFGIYAPGENVAKLTYFGLYALQHRGQESAGIATFEGTTVHLHKDMGLVSQVFNESILEELPGDIGVGHTRYSTTGSSRKVNAQPAVLDTRLGKLALAHNGNLVNTVKLREELVNSNCNLVTTTDSEMIAFAIAQAVNAGADWLDGAIQAFHRCEGAFSLVIGTPVGVMGVRDTNGIRPLVIGTLPGNPVRYVLSSETCGLDIIGADYLRDVEPGEVVWITEEGLASYHWSQKPERRLCIFEMIYFARPDSQMHNETLYSYRMRLGRQLAAESYVDADIVFGVPDSGIPAAIGFSQASGVAYGEGLIKNRYVGRTFIQPTQSMRESGIKMKLNPLKDVLAGKRVIIVDDSIVRGTTSRKLVKALRDAGAAEVHMRISSPPVTHPCFYGIDTDTQDQLIAATKSVEEIAKQLEVESLAYLSWDGMLEATREDKNSFCSACFTGDYPVTIPEQVKRSKLILEKVVV

SEQ ID NO: 132432 - DNA, 1455 bp, Streptococcus agalactiae A909
  CDS (1)..(1455): transl_table=11
atgacatacgaagtaaaatctctaaatgaagaatgtggagtctttggtatctgggggcatcctcaggcagctcaagtcacttactttgggcttcatagccttcaacatcgcggtcaagaaggtgctggtattgtttcgaatgataatgggaaactctatggttatcgaaatgttgggctcctttctgaagtttttaagaatcaatctgaattagataatttaactgggaatgcggctattggacatgttcggtatgctactgcaggttctgcagatattcgcaatattcagccttttctttataaatttcatgacgggcaatttgctttatgtcataatggtaatttgacaaatgctatttccttaaggaaagaattagaaaagcaaggtgcaattttcaatgcctcctcagatactgaaattttgatgcatttgattcgtcgaagccataacccaagttttatggggaaggtaaaagaagctttaagcactgtaaagggaggcttcgcctatctactgatgacagaagataaattaattgctgctcttgaccctaatgcctttcgtcctttgtcaattggacaaatgcaaaatggtgcctgggttatttccagtgagacctgtgcttttgaggtggtaggcgcaaaatgggttagagatgttgaacctggcgaggttattcttatagacgatagtggtattcaatgtgatcgttatactgatgaaacgcaactggcaatttgttcgatggaatatgtctattttgcaaggccggattcaactatacatggtgttaacgttcatacggctcgaaaaaatatgggaaagcgtcttgcacaagaatttaaacaggatgctgatattataattggtgtcccaaattcgtccttatcggctgctatgggctttgctgaagaatccggactaccaaatgagatgggtcttgtaaaaaatcagtatacgcagcgaacctttattcaaccgacacaagaattaagggaacaaggtgttcgaatgaaactatcagcggtatctggtgttgtcaaaggaaagcgcgttgttatgattgatgattcaattgtaagaggaacgacttctagaaggattgtcggattattaagagaagcaggagctagtgaagtacatgttgctatagctagtccagaattaaagtatccttgtttttatggtattgatattcaaacaagacgagaattaatttcagcaaatcacgctgttgacgaagtgtgtgatattattggcgcagatagtctgacctatctctcactagatgggttgattgaatcaattggactcgaaacaaaagcaccaaatggtggtttatgcgtagcttactttgatggacattatccaacaccgctttatgattatgaagaagaatacctcagaagtttagaagaaaaaacaagtttttatattcaaaaagtgaaataa

SEQ ID NO: 132433 - protein, 484 aa, Streptococcus agalactiae A909
MTYEVKSLNEECGVFGIWGHPQAAQVTYFGLHSLQHRGQEGAGIVSNDNGKLYGYRNVGLLSEVFKNQSELDNLTGNAAIGHVRYATAGSADIRNIQPFLYKFHDGQFALCHNGNLTNAISLRKELEKQGAIFNASSDTEILMHLIRRSHNPSFMGKVKEALSTVKGGFAYLLMTEDKLIAALDPNAFRPLSIGQMQNGAWVISSETCAFEVVGAKWVRDVEPGEVILIDDSGIQCDRYTDETQLAICSMEYVYFARPDSTIHGVNVHTARKNMGKRLAQEFKQDADIIIGVPNSSLSAAMGFAEESGLPNEMGLVKNQYTQRTFIQPTQELREQGVRMKLSAVSGVVKGKRVVMIDDSIVRGTTSRRIVGLLREAGASEVHVAIASPELKYPCFYGIDIQTRRELISANHAVDEVCDIIGADSLTYLSLDGLIESIGLETKAPNGGLCVAYFDGHYPTPLYDYEEEYLRSLEEKTSFYIQKVK

SEQ ID NO: 132434 - DNA, 1506 bp, Pseudomonas fluorescens PfO-1
  CDS (1)..(1506): transl_table=11
atgtgtggcatcgtcggtatcgtcggtaagtcgaacgtcaatcaggcgctgtatgacgcgctaaccgtgctccagcaccgcggccaggacgctgccggtatcgtgaccagccatgatggccggttgttcttgcgcaaggacaatggcctggtgcgtgacgtgtttcaacagcgtcacatgcagcgcctggtcggccacatgggtatcggccacgtccgttacccgactgccggcagctcgacgtcggccgaggctcagccgttctacgtcaactcgccttacggcatcaccctggcgcacaacggtaacctgaccaacgttgaacagttggccaaagagatctacgaatccgatctgcgtcacgtcaacaccagctccgactcggaagtgttgctgaacgtgttcgcccacgagctggcccagcgcggcaagctgcaaccgaccgaagaagacgtgtttgccgccgtgaccgacgtgcacaaccgttgcgtcggtggttacgccgttgtggcgatggtgaccggttacggcatcgtcggcttccgtgacccgcacggcatccgcccgatcgtgttcggtcagcgtcacaccgacgaaggcgtcgagtacatgatcgcctccgaaagcgtttcgctggacgtgcttggcttcactctgatccgcgacctggcaccgggcgaagcggtctacatcactgaagacggcaagctgcacactcgtcagtgcgcgaccaacccgtccctgactccgtgcatcttcgaacacgtctacctggcgcgtccggattcgatcatcgacggcgtgtcggtctacaaagcccgtctgcgcatgggtgagaagctggccgagaagatcctgcgcgagcgtccagaacacgacatcgacgtggtcatcccgattccggacaccagtcgcaccgcagcactggaactggccaaccatctgggcgtgaaattccgcgaaggcttcgtcaagaaccgttacatcggccgtaccttcatcatgcccggccaggctgcgcgcaagaaatcggtacgccagaagctcaacgccatcgaactggaattccgcggcaagaacgtgatgctggtggacgactcgatcgttcgcggcaccacctgcaagcagatcatccagatggcccgtgaagccggcgcgaaaaacgtctacttctgctcggcggctccggctgttcgcttcccgaacgtgtacggcatcgacatgccgagcgctcacgagctgatcgctcacaaccgttcgactcaggatgtcgccgacctgatcggcgccgactggctgatctatcaggacctgcctgacttgatcgaagcggtcggtggcggcaagatcaagatcgaaaacttcgattgcgcagtgtttgacggcaagtacgtcaccggcgatgtcgacgaggcttacctgaacaagatcgaacaggcacgcaacgatgcctcgaaggtcaagacccaggcggtcagtgcgatcatcgatctgtacaacaactga

SEQ ID NO: 132435 - protein, 501 aa, Pseudomonas fluorescens PfO-1
MCGIVGIVGKSNVNQALYDALTVLQHRGQDAAGIVTSHDGRLFLRKDNGLVRDVFQQRHMQRLVGHMGIGHVRYPTAGSSTSAEAQPFYVNSPYGITLAHNGNLTNVEQLAKEIYESDLRHVNTSSDSEVLLNVFAHELAQRGKLQPTEEDVFAAVTDVHNRCVGGYAVVAMVTGYGIVGFRDPHGIRPIVFGQRHTDEGVEYMIASESVSLDVLGFTLIRDLAPGEAVYITEDGKLHTRQCATNPSLTPCIFEHVYLARPDSIIDGVSVYKARLRMGEKLAEKILRERPEHDIDVVIPIPDTSRTAALELANHLGVKFREGFVKNRYIGRTFIMPGQAARKKSVRQKLNAIELEFRGKNVMLVDDSIVRGTTCKQIIQMAREAGAKNVYFCSAAPAVRFPNVYGIDMPSAHELIAHNRSTQDVADLIGADWLIYQDLPDLIEAVGGGKIKIENFDCAVFDGKYVTGDVDEAYLNKIEQARNDASKVKTQAVSAIIDLYNN

SEQ ID NO: 132436 - DNA, 1464 bp, Rhodobacter sphaeroides 2.4.1
  CDS (1)..(1464): transl_table=11
atgcgccccttcctgagccaccccttcgacgatgacaagttgaaggaagagtgcggcgttttcggtgtcatcggtgtgtctgacgcagccaacttcgtagccctcggcatgcacgcgctgcagcaccgcgggcaggaggcgggcggcatcgtctcccacgatcccgagcagggcttcaattccgcccgccgcttcggctatgtgcgcgacaacttcaccgatcccgacacgatggccaccctgcccggcgcgctggccatcggccatgtgcgctattcgaccgccggctcgaagggatccaccgccatccgcgacgtgcagcccttcttcggcgagttcgccatgggcggggcagcggtcgcgcacaacggcaacctcaccaacgcggccgcgctgcggcgcgagctgatcgagcggggctcgatcttccagtcctcatcggacagcgagtgcatcatccacctgatggcgcgctcgatccagaagaacatccccgagcggatgaaggacgcgctgcgccgcgtcgagggcgccttctcggtcgtcgccatgacccgcaccaagctgatcggcgtccgtgacccactgggcgtgcgcccgctggtgatcggccggatcggcgagggctgggcgctgtcgtcggagacctgcggcctcgacatcatcggcgccgagttcatccgcgaggtcgagccgggcgagatggtggtgatcgacgagacccgcggcatcgagagcttccatccgttcgagcgccgcgccgcccggttctgcatcttcgaacatgtgtatttctcgcggccggattcgatcctcggcggccgctcggtctacgagacccggcgccagatcggggtggaactggccaaggaagcgcccgtcgatgccgatctggtctgtccggtgcccgactcgggcaccccggccgccatcggcttcagccagcagtcgggcattccctatgcgatgggcatcatccgcaaccagtacatggggcggaccttcatcgagccgaccgagcagatccgcaacatgggcgtgcggctgaagctgaacgtcaaccgtgcgctcatcaagggcaagcgggtgatcctcgtggacgattcggtggtccgcggcaccacgtcgcgcaagatcaaggacatgatcctcgatgcgggcgcggccgaggtccatttccgcatcgcctcgccgccgacggcctggccctgcttctacggcgtggacacgcccgagcggggcaagcttctcgccgcgaacatgtccgaagacgagatgcgcgactggatcggggtggattcgctgcgcttcatctcgctcgacgggctctatcgcgccgtgggcgaggccggcggccgcgatccgaacgcgccgcgctactgcgacgcctgcttctcgggcgactatccggtcgcgccctccgacaagatcgagcagggattcgagatgaaggcggccgagtag

SEQ ID NO: 132437 - protein, 487 aa, Rhodobacter sphaeroides 2.4.1
MRPFLSHPFDDDKLKEECGVFGVIGVSDAANFVALGMHALQHRGQEAGGIVSHDPEQGFNSARRFGYVRDNFTDPDTMATLPGALAIGHVRYSTAGSKGSTAIRDVQPFFGEFAMGGAAVAHNGNLTNAAALRRELIERGSIFQSSSDSECIIHLMARSIQKNIPERMKDALRRVEGAFSVVAMTRTKLIGVRDPLGVRPLVIGRIGEGWALSSETCGLDIIGAEFIREVEPGEMVVIDETRGIESFHPFERRAARFCIFEHVYFSRPDSILGGRSVYETRRQIGVELAKEAPVDADLVCPVPDSGTPAAIGFSQQSGIPYAMGIIRNQYMGRTFIEPTEQIRNMGVRLKLNVNRALIKGKRVILVDDSVVRGTTSRKIKDMILDAGAAEVHFRIASPPTAWPCFYGVDTPERGKLLAANMSEDEMRDWIGVDSLRFISLDGLYRAVGEAGGRDPNAPRYCDACFSGDYPVAPSDKIEQGFEMKAAE

SEQ ID NO: 132438 - DNA, 1359 bp, Carboxydothermus hydrogenoformans Z-2901
  CDS (1)..(1359): transl_table=11
ttgggctttgaaataagagaagagtgcggggtgtttggaatttatgccccggggcatgatgtggcccggcttacctactggggactttttgccctgcagcaccgggggcaggaaagcgcgggaattgcggtaggcgatggcagggatataaaccttcacaagggcatggggctggtggcggaagtttttagcgaggagaaattagacgggttaaaaggatttgtggccgccggacatgtacgctattcgaccaccggggccagcgtgcccataaatgcccagccgttggtatttcattataagttgggaaaaattgctttaggacataacggcaatctcgccaacgttttggagttaaagaaaaatcttctgtcccggggggcaatttttcagaccactaccgacagcgaagtgattttaaatgttattgcccagtacgcccagacggatttggtggaaggtattttaaaggcgatggtggatttaaagggagcgtattctttggtgattatgaccgagaaccaattaataggggtgcgcgatccctggggttttaggcctttggttttggggagattttacaacggttatgttttagcttccgagtcggcagcccttgataccattggcgctgagcttattcgggatgtggagccgggggaaattatcgtaattgacgaaaacggccttaaaagttataaattcctgcagggcatgaagcattccttttgcatttttgaattcatctattttgcccgaccggacagcattattaatggctatcatgtaaacaccgttcgccggaaaatgggacaggttttggccaaggaatacccggtaaaggcggatttggtggtgccggtgccggattcgggtaccgccgcagcccgggggtatgcggaggcatcggggatacctctggaagaggggttaatgaaaaatcgttatgccggccgcacttttatccggccgagccaaagagaacgggaaattggcgtgaagttaaagctaaaccctatccgggaggttttaaaggacaaaaagattgtggttattgatgattcgattgtccgggggacgaccagcaagcagattatcgagcttttaagagatgccggggccagggaaattcatttattgttaagttcgccgccgtttatacgctcctgttactacggtattgatatttcccgtgacgatgaattaattgcggcaaaatattcggttgaggaaataaaaaactatcttggggccgacggactttattatttgtctttagaaggcttacttgggatttttaaggaacgggatttttgtcttgcttgctttaccggggattacccggtaccgataaattaa

SEQ ID NO: 132439 - protein, 452 aa, Carboxydothermus hydrogenoformans Z-2901
MGFEIREECGVFGIYAPGHDVARLTYWGLFALQHRGQESAGIAVGDGRDINLHKGMGLVAEVFSEEKLDGLKGFVAAGHVRYSTTGASVPINAQPLVFHYKLGKIALGHNGNLANVLELKKNLLSRGAIFQTTTDSEVILNVIAQYAQTDLVEGILKAMVDLKGAYSLVIMTENQLIGVRDPWGFRPLVLGRFYNGYVLASESAALDTIGAELIRDVEPGEIIVIDENGLKSYKFLQGMKHSFCIFEFIYFARPDSIINGYHVNTVRRKMGQVLAKEYPVKADLVVPVPDSGTAAARGYAEASGIPLEEGLMKNRYAGRTFIRPSQREREIGVKLKLNPIREVLKDKKIVVIDDSIVRGTTSKQIIELLRDAGAREIHLLLSSPPFIRSCYYGIDISRDDELIAAKYSVEEIKNYLGADGLYYLSLEGLLGIFKERDFCLACFTGDYPVPIN

SEQ ID NO: 132440 - DNA, 1533 bp, Burkholderia sp. 383
  CDS (1)..(1533): transl_table=11
atgtgcggcatcgtaggcgttatctcccaatccccggtcaatcagctgatctatgacagcctgctgctgctgcagcatcgcggtcaggacgcggcgggcatcgcgacggcggacggcaacaatttccacatgtacaaggcgaacggcatggtgcgcgacgtgttccgcacgcgcaacatgcgcagcctgcccggcacctacgggatcggccaggtgcgctacccgaccgccggctcggcgtcgagcgaagccgaggcacaaccgttctacgtgaacgcgccgttcgggatcatcctcgcgcacaacggcaacctgacgaactggaagcaactgaaggacgagatgttccggatcgaccgccggcacctcaacaccaactccgacagcgaagtgctgctcaacgtgttcgcgcacgagctgcaactgtcgaccacgggcctcgagctcgacccggcatcggtgttcaaggccgttgcgggcgtgcatcgccgcctgcagggctcgtacgcgatcgtgtcgctgatcgccggctacggcctgctcgcgttccgcgatccgttcggcatccgcccgctgtgcatcggcaagctcgaaaccgagcacggtaccgagtggatggtcgcatcggagtcggtggctgtcgaaggcatcggtttcgaattcgtccgcgacgtgcaaccgggcgaagcgatcttcatcgacccggccggcaacttccacagccagcagtgcgcggagcagccgacgctgaatccgtgcatgttcgaatacgtgtacctcgcgcgtccggattcgtgcctcgacggcgtgccggtctacaacgtgcgtctgcgcatgggcgactatctcgccgagaagatcaagcgcgagctgccgaacgtgccgatcgacgtcgtgatgccgattcccgattcgtcgcgcccggccgcgatgcaggtcgctgcgaagctcggcgtcgagtatcgcgaaggcttcttcaagaaccgctatgtcggccgcacgttcatcatgccgggccaggccgtgcgcaagaagtcggtgcgccagaagctcaatgcgatgagcatcgagttcaaggacaagaacgtgctgatcgtcgacgattcgatcgtgcgcggcacgacctcgcatgaaatcgtgcagatggcgcgcgatgcgggcgcgaagtcggtgatcttcgcgtcggctgcgccgcccgtgaagttcccgaacgtgtacggcatcgacatgccgacgcgcggcgagctggttgcgcatggccgtaccgacgaagacgtcgcgaagatcatcggcgccgatcacctgatctatcaggacgtcgacgacctgcgccgcgcggtgcgcgacatcaacccgaagctcgaacgcttcgaggcgtcgtgcttcgacggcaactacatcaccggcgacgtgacgcccgagtatctcgatgcgatcgagcgcgcgcgcctcacgccggcatcgcaggccgatcgcgacacggctggcgacaccgaacgctcgcagatgaacctgcagctgtcggtcgagtga

SEQ ID NO: 132441 - protein, 510 aa, Burkholderia sp. 383
MCGIVGVISQSPVNQLIYDSLLLLQHRGQDAAGIATADGNNFHMYKANGMVRDVFRTRNMRSLPGTYGIGQVRYPTAGSASSEAEAQPFYVNAPFGIILAHNGNLTNWKQLKDEMFRIDRRHLNTNSDSEVLLNVFAHELQLSTTGLELDPASVFKAVAGVHRRLQGSYAIVSLIAGYGLLAFRDPFGIRPLCIGKLETEHGTEWMVASESVAVEGIGFEFVRDVQPGEAIFIDPAGNFHSQQCAEQPTLNPCMFEYVYLARPDSCLDGVPVYNVRLRMGDYLAEKIKRELPNVPIDVVMPIPDSSRPAAMQVAAKLGVEYREGFFKNRYVGRTFIMPGQAVRKKSVRQKLNAMSIEFKDKNVLIVDDSIVRGTTSHEIVQMARDAGAKSVIFASAAPPVKFPNVYGIDMPTRGELVAHGRTDEDVAKIIGADHLIYQDVDDLRRAVRDINPKLERFEASCFDGNYITGDVTPEYLDAIERARLTPASQADRDTAGDTERSQMNLQLSVE

SEQ ID NO: 132442 - DNA, 1458 bp, Synechococcus sp. CC9605
  CDS (1)..(1458): transl_table=11
atgtgcggcattatcggaatgttgtgtgttgactcagtcaaccaacagatctacgacaatctgcttctgcttcagcaccgtggtcaggactcagcagggattgtcacgatggacaatcacacattccacgtgcacaaacaaaggggacgtgtgcgtgaagcctttcgcacacgagacatgcgaaagcttctgggcaatgccgggatcggtcacgttcgttatgccacccgtggtgctgctgcatcagaagaggaagttcagccgttctatgtgaatgccccgtatggcatcacttttgttcataacggcaatctcaccaacacccatcagcttgagcaggatctgttcaagattgatcgtcgtcacaccaattcgaccagtgatacggagatgctggtcaatgtgttggccacggagattcaatctcagctcacaggccgtgatctgacaccggatcagttgtttaatgcggtggcatcactgcatcaccgcgttcagggttcctacgcagcgatcgctttgatagcgggccacggaatgctggcgtttcgggacccctatggaattcgtcctctgattctcggcaggcggttgtctgaacagggacgagaggagtggattgtcgccagtgaatccctggtgattgaaaacagcggctacgagatcgttcgtgatgttgaccctggagaagcggtgttcattgatgttgattcgaacttgcatcagcgtcagtgtgcggattctccacgattgattccctgcgcatttgagtacgtgtatttggcgcggccggattccgtcatgaacggtatttcggtgtatgagtcccggctgcgcatgggtgatcgcttggctcaaaccattgccgaaacgttgcctgcgggtgatatcgatgttgtgatgccgattcctgattcagctaggccttcggcgatgcaggtggccaagcgattgggtctcgattatcgcgaaggcttttacaaaaaccgctatgtcggccgaaccttcatcatgccgggtcaagctgaacgtaagaagtcagttcggcagaaactcaacgctctcggtactgaatttgccggcaagaatgtcttgattgtggacgattcgattgttcgtggcacaacgtcccgcgagattgttcagatggcacgcagcgctggtgctaacaaggtgacgttcacgtcggctgctccaccggttcgctatcccaatgtttatgggatcaacatgccaacccgggcggaactcctggcccacggccgaaccagtgatgagatttcagatgtccttggtgctgatcatgttgtttaccagaccgttgagaatctgctggaaagcattgttgaaaacactgagatcaaggacctcgagatgtcttgttttgatggccactatgtgaccggcggaatcgatgaagattatttccaatggctggagcggaattgcagctcctga

SEQ ID NO: 132443 - protein, 485 aa, Synechococcus sp. CC9605
MCGIIGMLCVDSVNQQIYDNLLLLQHRGQDSAGIVTMDNHTFHVHKQRGRVREAFRTRDMRKLLGNAGIGHVRYATRGAAASEEEVQPFYVNAPYGITFVHNGNLTNTHQLEQDLFKIDRRHTNSTSDTEMLVNVLATEIQSQLTGRDLTPDQLFNAVASLHHRVQGSYAAIALIAGHGMLAFRDPYGIRPLILGRRLSEQGREEWIVASESLVIENSGYEIVRDVDPGEAVFIDVDSNLHQRQCADSPRLIPCAFEYVYLARPDSVMNGISVYESRLRMGDRLAQTIAETLPAGDIDVVMPIPDSARPSAMQVAKRLGLDYREGFYKNRYVGRTFIMPGQAERKKSVRQKLNALGTEFAGKNVLIVDDSIVRGTTSREIVQMARSAGANKVTFTSAAPPVRYPNVYGINMPTRAELLAHGRTSDEISDVLGADHVVYQTVENLLESIVENTEIKDLEMSCFDGHYVTGGIDEDYFQWLERNCSS

SEQ ID NO: 132444 - DNA, 1401 bp, Geobacter metallireducens GS-15
  CDS (1)..(1401): transl_table=11
atgaagctttacagacctacggaagagtgcggcatttttggaatttatggacatcccgaggcggcaaacctgacctacctcggactttacgccctccagcaccgggggcaggaagcctgcggcattgtttcctcggacggacggagcctccacgtccaccggagcatggggctggtggccgatgttttcggcgaccaggcgattttccgcaacctcccgggtgaggcggccattgggcacgtccgctactctaccaccggcgactcggtcaccaagaacgtccagcccatcaaggtcgattattcccggggctccattgccgtggcccacaacggcaacctggtaaacgcccagatggtcaaggacgagctggaagcgtggggctccatcttccagaccactatggacaccgaggtgatcctgcacctcctggcctcctccaagcagaacgcccttgaagaccgcatcgccgaggccctcggccgcctgaaaggggcctactgcctcctcttcctgaccgagacccgcatggtggctgcccgcgatccccagggattccggcccctctgtctcggcaagctcggtgacggctgggtggtcgcctcggagagctgtgccctggacctcatcgaggccgaattcatccgcgaggtggagccaggagaggtcatcgtcatcaccaaggacggcatcacctcccatttccccctcaagaagtccgaggcagccccctgcatcttcgaattcgtctatttcgcccgtcccgattcctacatcttcggaaaaaacgtctatatggtccgcaaggatttcggtcggcaactggcccgggagcaccaggtggatgccgatatcgtgatcccggttcccgattcgggggtgccggcggccctgggctatgcccaggaggcggggcttcccttcgaactgggactgatccgcaaccactacatcggccggaccttcatcgaaccccagcagtcgatccgccacttcggggtcaagatcaagctgaacccggtgcgcgagatcctggagggaaaacgggtcgtggtcatcgacgactccatcgtccgcggcaccacctcccgcaagatcgtcaagatggtgcgcaacgccggcgcgaaggaagttcatgtccggatttcctccccccctaccagctacccctgctactacggcatcgatacccccacccggaaggaactcatctcctcgtcccacaccatcgaggaaatccgccggtacatcaccgccgattccctcggctacctgtcggaggaggggctgctgaaggcagtgggggccggtgagaatcccttttgcaaggcttgcttctccggcaactaccccatcacattccctaagctggcggctgcgccccagctggacctcttctga

SEQ ID NO: 132445 - protein, 466 aa, Geobacter metallireducens GS-15
MKLYRPTEECGIFGIYGHPEAANLTYLGLYALQHRGQEACGIVSSDGRSLHVHRSMGLVADVFGDQAIFRNLPGEAAIGHVRYSTTGDSVTKNVQPIKVDYSRGSIAVAHNGNLVNAQMVKDELEAWGSIFQTTMDTEVILHLLASSKQNALEDRIAEALGRLKGAYCLLFLTETRMVAARDPQGFRPLCLGKLGDGWVVASESCALDLIEAEFIREVEPGEVIVITKDGITSHFPLKKSEAAPCIFEFVYFARPDSYIFGKNVYMVRKDFGRQLAREHQVDADIVIPVPDSGVPAALGYAQEAGLPFELGLIRNHYIGRTFIEPQQSIRHFGVKIKLNPVREILEGKRVVVIDDSIVRGTTSRKIVKMVRNAGAKEVHVRISSPPTSYPCYYGIDTPTRKELISSSHTIEEIRRYITADSLGYLSEEGLLKAVGAGENPFCKACFSGNYPITFPKLAAAPQLDLF

SEQ ID NO: 132446 - DNA, 1389 bp, Desulfovibrio desulfuricans G20
  CDS (1)..(1389): transl_table=11
atgaaacgtgaatactgcggcgtcttcggcatatacaaccatgccgaagccgcccgcatgacctacttcggactgtatgcgctgcagcaccgcgggcaggaaagtgcgggcattgtaacatgggacggttcggccctgcgtgaagaacgcggcatggggctggtgccggaagtgttcaatgaacggcatctgagcaaagaactcaaaggcgatatcgccatcggccacacccgctattccaccaccggcgcatcgctgctgcgcaatgcccagccgttccgtgtgcgctataaaaacatggatatagccatcgcccacaacggtaatctggtaaacaccgtggagcttcgttccagactggaagaaagcggctccattttccagacgaccaacgacagcgaggtaattgtccatctgattgccaagcacatgaacggaggcactgtcgaagaagccgtcatggctgcctgccgcgaggcacgcggtgcgtattcgctgcttattctggccaatgataagatgatagccgtgcgtgacccgcacggctttcgtcctttgctgctgggaaaagtgggcgacgcgcatgtctttgccagtgaatcgtgcgcctttgatctgctggaggcggagcttatccgttccgtcaagccgggcgagatgattgtcatcgataaaggcaaggtgcacagctatgatatggatatgggcaaaaagcgccaccactgtatcttcgagctgatctactttgcccgccccgattccatggtattcggagaaaatgtctacttctgccgcaaagccatgggcaagcagctggccacggaagcgccggtggatgccgacttcgtcatgccctttcccgattccggcgtatactgcgccgtgggatacgcccagcagtcggggttgccgtacgagcatgccatgatccgcaaccactatgtgggccgcacctttatccagccttcgcaggatatgcgtgattacagcgtaagggtgaagatcaaccctgtgaaggatatgatcaaggacaagcgcatcatcattgtggatgattccatcgtgcggggtaccaccatccgcacccgcgtgaaaaaactgagggagctgggcgcccgcgaagtgcatttccgcgtgagctgcccccccatcaagtttccgtgtttctacggcattgattttgcctccaagggtgaactgattgcggccaaccattccgtaagagagatagaacgctttatcggtctggacagcctgcattacatcagcatagaggggctgctcaagtcggtcagtacgccggatgactattgtctggcatgctttaccggcagctacccgttgcagtgcgaaggaaatctgaagtcgtgccttgagtgcggctgctaa

SEQ ID NO: 132447 - protein, 462 aa, Desulfovibrio desulfuricans G20
MKREYCGVFGIYNHAEAARMTYFGLYALQHRGQESAGIVTWDGSALREERGMGLVPEVFNERHLSKELKGDIAIGHTRYSTTGASLLRNAQPFRVRYKNMDIAIAHNGNLVNTVELRSRLEESGSIFQTTNDSEVIVHLIAKHMNGGTVEEAVMAACREARGAYSLLILANDKMIAVRDPHGFRPLLLGKVGDAHVFASESCAFDLLEAELIRSVKPGEMIVIDKGKVHSYDMDMGKKRHHCIFELIYFARPDSMVFGENVYFCRKAMGKQLATEAPVDADFVMPFPDSGVYCAVGYAQQSGLPYEHAMIRNHYVGRTFIQPSQDMRDYSVRVKINPVKDMIKDKRIIIVDDSIVRGTTIRTRVKKLRELGAREVHFRVSCPPIKFPCFYGIDFASKGELIAANHSVREIERFIGLDSLHYISIEGLLKSVSTPDDYCLACFTGSYPLQCEGNLKSCLECGC

SEQ ID NO: 132448 - DNA, 1461 bp, Prochlorococcus marinus str. MIT 9312
  CDS (1)..(1461): transl_table=11
atgtgcggaatagttggaatcgtttcttcagatgatgtaaatcaacaaatttacgatagccttttgcttctacagcatagaggtcaagattcaactggtatagctacaatggaaaatactattttccatatacataaggctaaaggtcaggtgaatactgcttatagaaccagagatatgaggaatttaatcggaaaaattggattaggtcatgttaggtatgcaacaaagggatcagcagaaagtgtagaagaagctcaacctttttacgttaatgctccttatggaattgttttgatacataatggtaatttgacgaataccagagatttagaaaaacaattatttaatattgataagcggcatacaaattcttcaagtgatactgaaatgctattaaatgtacttgctacagaattgcaagaacaaattcataatcaagaattagaacctgatattatttttgatgctgtaaattctttacataaaagaattcagggatcatatgcttcaattgcattactttcaggacatggtttattagcattcagagatccttttggtattagacctttagtcataggcaaaagactttcatcaaagacaaaaaaagaagagtggatggtagctagcgaatctctagtgcttgagaataacgattatcaagtagtgagagatgtagatcctggagaagctatttttataaatcttaatggcgaatttttttctaagcaatgttccgaaaatccaatcttatgtccttgtgcttttgaatatgtttatttggctaggccagattcaattatgaatggaatttccgtttataaagctcgtttaaaaatgggagattatttgtctgaaactataaaagaatcaattaatactggagatgttgatgttgttatgcctattccggattcttctcgacctgcagctatgcaagttgcaagacagttaggtatagagtacagagaaggtttttttaaaaatagatatgttggaagaacattcataatgcctggtcagcagaaacgcaagaaatctgtaagacaaaaattaaatgctatgagtacagagtttaaaaataaaaatgtattaattgttgatgactcaatagtgagaggtactacttcaaaagaaattgtccagatggctaaagatgcaggagcaaataaagttttttttacatcagcagcacctcctgtgcgttttcctcacgtttatggaattaatatgcctaatagatgtgaattaatagctcatgatagaacaataagtgaaattgctaatcaacttgaaattgataacctcgtttatcaaagtgttgaaaatttacgcaaatctataataagcgaatctcctattgaagatttagagatgagttgctttactggtatttatgtaacaggaaaagtaaatcaagaatatttaaattgggttgaaaatgaatataaatcttag

SEQ ID NO: 132449 - protein, 486 aa, Prochlorococcus marinus str. MIT 9312
MCGIVGIVSSDDVNQQIYDSLLLLQHRGQDSTGIATMENTIFHIHKAKGQVNTAYRTRDMRNLIGKIGLGHVRYATKGSAESVEEAQPFYVNAPYGIVLIHNGNLTNTRDLEKQLFNIDKRHTNSSSDTEMLLNVLATELQEQIHNQELEPDIIFDAVNSLHKRIQGSYASIALLSGHGLLAFRDPFGIRPLVIGKRLSSKTKKEEWMVASESLVLENNDYQVVRDVDPGEAIFINLNGEFFSKQCSENPILCPCAFEYVYLARPDSIMNGISVYKARLKMGDYLSETIKESINTGDVDVVMPIPDSSRPAAMQVARQLGIEYREGFFKNRYVGRTFIMPGQQKRKKSVRQKLNAMSTEFKNKNVLIVDDSIVRGTTSKEIVQMAKDAGANKVFFTSAAPPVRFPHVYGINMPNRCELIAHDRTISEIANQLEIDNLVYQSVENLRKSIISESPIEDLEMSCFTGIYVTGKVNQEYLNWVENEYKS

SEQ ID NO: 132450 - DNA, 1467 bp, Rhodospirillum rubrum ATCC 11170
  CDS (1)..(1467): transl_table=11
atggcccccacggacatcgatttctccaccgatccgttcgatgacgacaagctgcgcgaggaatgcggcgtgttcggcgtcttcgccgatcccaatgccgcctcccataccgcgcttggcctgcacgccttgcagcatcgcggccaagaggcggcggggatcgtcaccttcgatggcacccagttccattcggtcaagggtcccggccatgtgtcggagaacttcaaatccgagacggtgatctcccagctcgtcggatcctcggccatcggccatgtccgctattcgaccaccggcggcgcggtgatgcgcaatatccagccgctgttcgccgaattcgccttcggcggcctcgccatcgcccataacggcaatctgaccaacgccatgaccttgcgcgaacggctggtccagcgcggctgcctgttccaatcgaccagcgacaccgaggtcatcgtccatctgatcgccatttcgatctgctcgtcggtggaagaccgcatcatcgacgccctgcgtcaggttcagggcgcctattcgatcgtcgccctgaccaacaacgccctgatcggcgtgcgcgacccgatgggcatccggccgctggttctcggccagctcgatggcgcctatatcttcgcctccgaaacctgcgcgcttgatatcatcggcgccgattacatccgcgatgtcgaaccgggcgagctgatcatcatcaccggcaaggaagtgcgctcgctgcgccccttcccgcagaccccctcgcatttctgcgttttcgaatacatctacttcgcccgccccgacagcatcgtcgaggagcgcagcgtctacgaggtgcgcaaggccatcggccgcgaactggcccgcgaaagcgccgtcgaggccgatgtggtggtgccggtgcccgattccggcgtgcccagcgcgctcggctatgccgccgaggccggattgccctttgaatacggcatcatccgcaatcactatgtcggccgcaccttcatccagcccaccgacaagacccgcaacctcggggtcaagcgcaagcacaaccccaaccgcagccagcttgaaggcaagcgggtcatcctggtcgatgacagcatcgtgcgcggcaccacctcgaccaagatcgtcgaaatggtccgtcaggccggggcgcgcgaggtgcatatgcgcatctccagcccgccgaccgcctatccctgcttctacggcatcgacacccccgagcgcgagaagctgctggcggccaattattcggtcgaggacatggccaagctgcttggcgtcgacagtctggccttcgtctcgctcgacgggctgtatcgggcggccggggtggagtcgcgcaatgccgagcgcccgcagttctgcgatgcctgcttctcgggccattatccggtgcccaatcaggaccgggcgcagaaaagccatcctttgcagctggcgctgctcaacgattag

SEQ ID NO: 132451 - protein, 488 aa, Rhodospirillum rubrum ATCC 11170
MAPTDIDFSTDPFDDDKLREECGVFGVFADPNAASHTALGLHALQHRGQEAAGIVTFDGTQFHSVKGPGHVSENFKSETVISQLVGSSAIGHVRYSTTGGAVMRNIQPLFAEFAFGGLAIAHNGNLTNAMTLRERLVQRGCLFQSTSDTEVIVHLIAISICSSVEDRIIDALRQVQGAYSIVALTNNALIGVRDPMGIRPLVLGQLDGAYIFASETCALDIIGADYIRDVEPGELIIITGKEVRSLRPFPQTPSHFCVFEYIYFARPDSIVEERSVYEVRKAIGRELARESAVEADVVVPVPDSGVPSALGYAAEAGLPFEYGIIRNHYVGRTFIQPTDKTRNLGVKRKHNPNRSQLEGKRVILVDDSIVRGTTSTKIVEMVRQAGAREVHMRISSPPTAYPCFYGIDTPEREKLLAANYSVEDMAKLLGVDSLAFVSLDGLYRAAGVESRNAERPQFCDACFSGHYPVPNQDRAQKSHPLQLALLND

SEQ ID NO: 132452 - DNA, 1398 bp, Moorella thermoacetica ATCC 39073
  CDS (1)..(1398): transl_table=11
atgtcgtcctggcacgaggagtgcggtgtctttggcatctacgctccgggccaggacgtggcccggctggcctactacggactctttgccctccagcaccgcggccaggagagcgctggtatcgccgtggccaacggccgccatatcgccgtccacaagggtatggggctggtggcggaggtctttaaccgggacaaccttcgggctttacatggtgacgtggccatcggccacgtgcgttactccaccactggtgccagttccctggtcaacgcccagcccctggtcttccgctacctcaggggcatggtggccatcgcccataacggtaacctgaccaacgccagcgagctgcggcgggagcttggagccagcgggtctatcttccagtcctccaccgatagtgaaatcatcgttaaccttatcgcccgccacagccaggagcccgtcgaagcagccttgctccattgccaggaagagcttcgcggtgcttattccctggtggtcatgaccgaggaacaactcatcggcgtccgtgatccccatggtgtccggcccctgtgcctgggcaggatggatggggcctggatcctggcctcggagtcctgcgccctggataccctgggggccgattttgtccgcgatctggaacccggggagattgtcattatcgacagccggggggtgcgttccctccagggaccccgggcggcccaccgggcccactgcatttttgaatatgtctactttgcccggccggatagcatcctggacggcgagaccgtcaacctggtgcggcgggaactgggccggaatctagcccgggaataccgggtggcggccgacgccgtcattccggtacccgactccggtattgccgccgccgccggctatgccgaggtggccggcctgccctttgtggaggggttgatgaaaaaccgctacgtcggccggaccttcatccagcccacccaggagatgcgggacctgggggtgcgcttgaagctcaaccctatcaagcccatcttaaaggataaaagggttattataattgatgactccctggtccggggaaccaccagccggaggatagtagccatgctgcgccaggccggggtccgggaggtgcacctgctggtggcctcgccgccggtcctgtatccctgttactacggcattgataccagcgcccggggagagctcattgccgcccggtatcccctggaggacatccgccgccatgtggatgccgacagtctccactacctcagcctggaagggttgtttcgttccgtgcagagggggatggaagacttctgcgccgcctgcttcaccggccgctaccccatccccatcccttccccggaggaggctaccaagtacagcctggaagggtag

SEQ ID NO: 132453 - protein, 465 aa, Moorella thermoacetica ATCC 39073
MSSWHEECGVFGIYAPGQDVARLAYYGLFALQHRGQESAGIAVANGRHIAVHKGMGLVAEVFNRDNLRALHGDVAIGHVRYSTTGASSLVNAQPLVFRYLRGMVAIAHNGNLTNASELRRELGASGSIFQSSTDSEIIVNLIARHSQEPVEAALLHCQEELRGAYSLVVMTEEQLIGVRDPHGVRPLCLGRMDGAWILASESCALDTLGADFVRDLEPGEIVIIDSRGVRSLQGPRAAHRAHCIFEYVYFARPDSILDGETVNLVRRELGRNLAREYRVAADAVIPVPDSGIAAAAGYAEVAGLPFVEGLMKNRYVGRTFIQPTQEMRDLGVRLKLNPIKPILKDKRVIIIDDSLVRGTTSRRIVAMLRQAGVREVHLLVASPPVLYPCYYGIDTSARGELIAARYPLEDIRRHVDADSLHYLSLEGLFRSVQRGMEDFCAACFTGRYPIPIPSPEEATKYSLEG

SEQ ID NO: 132454 - DNA, 1536 bp, Burkholderia thailandensis E264
  CDS (1)..(1536): transl_table=11
atgtgcggcatcgtaggcgttatctcccagtccccggtcaaccagctcgtctatgacagcctgctgctgctgcagcatcgcggtcaggacgcggcgggcatcgcgacggcggacggcagcaatttccatatgtacaaggcgaacggcatggtgcgcgacgtgttccgcacgcgcaacatgcgcagcctgcccggcacggccgggatcggtcaggtccgttacccgacggcgggctccgcgtcgagcgaagccgaagcgcaaccgttctatgtgaacgcgccgttcggcatcatcctcgcgcacaacggcaacctgacgaactggcagcagttgaaggacgagatgttccgcatcgaccgccgccacatcaacacgaactccgacagcgaagtgctgctgaacgtgctcgcgcacgagctgcagctttccacgacgggcctcgagctcgatccggattcgctgttcaaggcggtcgcgggcgtgcaccgccgcgcgcacggctcgtatgcgatcgtgtcgctgatcgccggctacggcctgctcgcgttccgcgatccgttcggcatccgcccgctttgcatcggcaagctcgaaaccgagcagggcaccgagtggatggtcgcgtcggagtcggtcgcggtcgagggcatcggcttcgagttcgtccgcgacgtgcagccgggcgaggcggtcttcatcgacgtgaacggcaggttccacagccgccagtgcgcggacaagccgagcctgaatccgtgcatgttcgagtacgtgtacctcgcgcgtccggactcgtgcctcgacggcgtgcccgtctacaacgtgcgcctgcgcatgggcgactaccttgccgagaagatccggcgcgagctgccggacgtgccgatcgacgtcgtgatgccgattcccgattcgtcgcggccggccgcgatgcaggtggcggcgaagctcggcgtcgagtatcgcgagggcttcttcaagaaccgctacgtcggccgcacgttcatcatgccgggccaggcggtgcgcaagaagtcggtgcgccagaagctcaacgcgatgagcatcgagttcaaggacaagcacgtgctgatcgtcgacgattcgatcgtgcgcggcaccacgtcgcacgagatcgtgcagatggcgcgcgatgcgggcgcgaagtcggtgatcttcgcgtcggcggcgccgcccgtgaaatttccgaacgtctacgggatcgacatgccgacgcgcggcgaactcgtcgcgcacggccgcaccgacgaggaagtcgcgaagatcatcggcgccgattatctgatctaccaggacgtcgacgatctgcgccgcgcggtgcgcgacatcaacccgtcgctcgagcgcttcgaggcatcgtgcttcgacggcgactacatcaccggcgacgtcacgcccgagtatctggacgcgatcgagcgcgcgcgcctcgcgcccgcgtcgcaggcggatcgcgatccgaacggcgaaggcgccgagcgctcgcagatgaacctgcagctgtcggtcgagtga

SEQ ID NO: 132455 - protein, 511 aa, Burkholderia thailandensis E264
MCGIVGVISQSPVNQLVYDSLLLLQHRGQDAAGIATADGSNFHMYKANGMVRDVFRTRNMRSLPGTAGIGQVRYPTAGSASSEAEAQPFYVNAPFGIILAHNGNLTNWQQLKDEMFRIDRRHINTNSDSEVLLNVLAHELQLSTTGLELDPDSLFKAVAGVHRRAHGSYAIVSLIAGYGLLAFRDPFGIRPLCIGKLETEQGTEWMVASESVAVEGIGFEFVRDVQPGEAVFIDVNGRFHSRQCADKPSLNPCMFEYVYLARPDSCLDGVPVYNVRLRMGDYLAEKIRRELPDVPIDVVMPIPDSSRPAAMQVAAKLGVEYREGFFKNRYVGRTFIMPGQAVRKKSVRQKLNAMSIEFKDKHVLIVDDSIVRGTTSHEIVQMARDAGAKSVIFASAAPPVKFPNVYGIDMPTRGELVAHGRTDEEVAKIIGADYLIYQDVDDLRRAVRDINPSLERFEASCFDGDYITGDVTPEYLDAIERARLAPASQADRDPNGEGAERSQMNLQLSVE

SEQ ID NO: 132456 - DNA, 1398 bp, Syntrophus aciditrophicus SB
  CDS (1)..(1398): transl_table=11
atgggcggattattcggggttgtttccaagggaaactgcataaagcctcttttttatggaacagattatcattcccacctgggaacggaaaacggggggcttgccgtaatcggagaaaaaagttttcataaagccatacacagcatcagtcaggcgcaattcaaatcgaaatttatcgatcattaccgtcagatgagagggacggccggaatcggagccattgacgatgaatcgccgcagcctttgattatccgctccaaattcggcacctttgcgattgctgcttcgggtctggtcaccaataaggatcgtctcgctcatgaactgcttcaagagggaacctcattcagtgaagtggcgggaggcgccgtcaacacagtcgatctagtggcaaagctgatcagccggagtacaagcctcgtcgagggcattgtgcagatgcaggaagtcatcgagggctcaatctgtgttctgattttgacatcggaaggcctctatgccgcgagagacaaatatggccgatttcctctggcattgggaagggaaagagatggagacgggtacgccgtagcgacggaatccagctcgtttcccaatctgaactatgaactggtgaaatttatcggtccgggagaaattgttctgatgaccgccgacggctacaggaccttgcggcctgagaatccggaaaagaaagtctgcgcgttcctctggatttataccggcacgccttcctcctcttatgaaggaatttcagtggaaaacgcaagggaacactgtgggcgggctctggctagagaggacagcattgcggctgacctggtctgcggcataccggattcaggcgtcgggcatgccctgggatatgcagcggaatcacgaattccctatcgccgacctctggtcaaatacacgcccggctatggtcggagttatacgcctcccactcaggatatccgtgatcttgtggccaccatgaaactgagtgccattcgtgatgtcatcaaagacaaccggatgatcgtctgcgatgattcgattgtacgaggcacgcagttgaaaaattacaccataaagaaactgtgggataacggcgctcgagagattcatattcgggccgcctgtccgccactcatgtttacatgcccttatggatcatcaacacgctctctttcggagctggctgccagacgcgccatccgggccatcgagggaaaggatcctgatgacgttgcaccgtatcttgattgccgttcggcggaatatgccagaatggtcgaatggatccgcaaagatttgaacgtgacgactttgaaatacctcaatattgaatccatgatcgaagccatcggcctgtcgaaagatcagctgtgccttcactgctggcgggggcactga

SEQ ID NO: 132457 - protein, 465 aa, Syntrophus aciditrophicus SB
MGGLFGVVSKGNCIKPLFYGTDYHSHLGTENGGLAVIGEKSFHKAIHSISQAQFKSKFIDHYRQMRGTAGIGAIDDESPQPLIIRSKFGTFAIAASGLVTNKDRLAHELLQEGTSFSEVAGGAVNTVDLVAKLISRSTSLVEGIVQMQEVIEGSICVLILTSEGLYAARDKYGRFPLALGRERDGDGYAVATESSSFPNLNYELVKFIGPGEIVLMTADGYRTLRPENPEKKVCAFLWIYTGTPSSSYEGISVENAREHCGRALAREDSIAADLVCGIPDSGVGHALGYAAESRIPYRRPLVKYTPGYGRSYTPPTQDIRDLVATMKLSAIRDVIKDNRMIVCDDSIVRGTQLKNYTIKKLWDNGAREIHIRAACPPLMFTCPYGSSTRSLSELAARRAIRAIEGKDPDDVAPYLDCRSAEYARMVEWIRKDLNVTTLKYLNIESMIEAIGLSKDQLCLHCWRGH

SEQ ID NO: 132458 - DNA, 1413 bp, Syntrophus aciditrophicus SB
  CDS (1)..(1413): transl_table=11
atggaaactcaactatcggttattgaagacaaaccccgcgaggcctgcggcgttttcgccgtctacggacaccccgaggccgcgaagctcaccttcttcggtctcttcgccctgcagcaccggggacaggaaagcgccggcattgccgcgtcagacggatgcatggtcagggcccataaaggaatgggactcgcttcggaagttttcggagaagaaaatctggcccgccttcccggcaatctggccatcggccatgtccgctattccacgaccggttcctccaccctgtccaatgcccagcccttcctggttcatcatggggaagaatattacgccctgggccacaacggcaacctgatcaacgcccagtcgctgcgccgggagttggaggactcgggctccatcttccagtccaccatggacagcgaggtcatcgttcacctcatggcgccgcatctgaagaaaggcattgaaccggccctgaaagccgccctcaagagggtgcagggggcttacagcatcgtcatgctgacgcggaactcggtcatcgcgttccgcgatccccgggggttccgcccgttgtcgcttggccgtctcaatgacggctgggtggtggcgtcggaaacctgcgcctttgatctcgtgggcgcccagtatctgcgggatgtccagccgggggagatcgtcatcatcaacgaagtagggttgcacagcctgaagccctttccccgtgtgccccactcccactgcatctttgagctcatctattttgcccgcccggacagtcaggtcttcgggcagaacgtctatctctgccggaagcggttcggccatgccctggcccgggaatacagccccgatgtcgatttcgtcatgccctttcccgattcgggcaactacgccgccctgggatattcggaggaaagcggcttccccttcgagatggggatgatccgcaatcattatgtaggacggactttcattcagccgacacagcccatgagggattttgcggtgcgggtgaagctcaatcccgtgaaacctctcatggcgggcaagaagatcctgatcatcgaggattccatcatccggggaacgaccagccgcaaccgggtccgctacctccgggaaaacggggccaaggccattcatatggcgatcagttgtcccccaacccggtttccctgcccctatggaatcgatttttccgcaaaaggagaactccttgccgcccagaaaggtattgaagaggagatcgcccgcttcatcggactcgattccatccattacctgagcctggagggactggtcaggagcacgggagtgaatcaggaggccttctgcctggcctgttacacgggaaagtatcctctgcagccaccgggagaaatccagaagctctgttttgaatag

SEQ ID NO: 132459 - protein, 470 aa, Syntrophus aciditrophicus SB
METQLSVIEDKPREACGVFAVYGHPEAAKLTFFGLFALQHRGQESAGIAASDGCMVRAHKGMGLASEVFGEENLARLPGNLAIGHVRYSTTGSSTLSNAQPFLVHHGEEYYALGHNGNLINAQSLRRELEDSGSIFQSTMDSEVIVHLMAPHLKKGIEPALKAALKRVQGAYSIVMLTRNSVIAFRDPRGFRPLSLGRLNDGWVVASETCAFDLVGAQYLRDVQPGEIVIINEVGLHSLKPFPRVPHSHCIFELIYFARPDSQVFGQNVYLCRKRFGHALAREYSPDVDFVMPFPDSGNYAALGYSEESGFPFEMGMIRNHYVGRTFIQPTQPMRDFAVRVKLNPVKPLMAGKKILIIEDSIIRGTTSRNRVRYLRENGAKAIHMAISCPPTRFPCPYGIDFSAKGELLAAQKGIEEEIARFIGLDSIHYLSLEGLVRSTGVNQEAFCLACYTGKYPLQPPGEIQKLCFE

SEQ ID NO: 132460 - DNA, 1635 bp, Frankia sp. CcI3
  CDS (1)..(1635): transl_table=11
gtgccagacgtcgcaccccgcttcggcgccacccccggatgggaatcagacctctccgacgagccggggccgcgtgacgcctgcggtgtgttcggggtgtgggcgcccggtgaggacgtggcgaacctggcctactacggtctgtacgcgctgcagcaccgcgggcaggaggctgccggcatcgcggtcggggacggtcggaccgtggtggtcttcaaggaactggggcttgtcgctcaggtcttcgacgaggtcaccctgtccagcctgagcggccatgtggcggtcggtcacacccggtactcgacgacgggctcctccacctgggagaacgcccagccgtcgtaccgcaccgcccgcttcggcggccccatcgcgctcgggcacaacggcaacctcaccaacatcgtcgagctcgcgcggacgctcggcgcggagcgggaccgcctgcgggcgaccaccgactcggacctcatcaccgccatgctcgccgaccatcccggcccgaccctcgtcgacgcggcgatggacgtgctgccccgcctgaccggggccttctcgctggtcttctcggacgcctcgacgctgtatgccgcccgggacgcgcacgggatccacccgctcgtgctcggccggctcgacggccatcccgacggcgcgtggatcatcgccagcgagacggccgccctcgacatcgtcggcgccaccctcgtacgggagatcgttcccggcgagctggtcgtcatcgacgccgagggggtgcgttcgcgcacgttcgcccggcccgatccgcacggctgcctgttcgagtacgtctatctcgcccgcccggacacgtcgatcgccggacgttccgtgcacgccacccgggtcgatgttggccggcagctggcccgcgaggcgccggtggaggccgacctggtcatccccgtgccgcagtccggggtacccgccgcggtcggctacgcggaggagtcgggtatcccgttcggtgagggcctggtcaagaactcctacgtcgggcgcaccttcatccagccctcgcagacgattcggcagcgcgggatccggctcaagctgaaccccctgcgggatgtgatcgaggggcgtcgcctcgtcgtggtggacgactcgatcgtccgcggcaacacgcagcgcgcgctggtgcgcatgctgcgggaggccggcgccgccgaggtccacatccggatctcctcgccgccggtacggtggccctgcttctacggcatcgacttcgcgacccgcgccgagctgatcgccagtgaggcgggcatcgaggagatcagagcctctctcggggccgactcgctggcctacgtctcgttggagggcctcgtcgaggcctcccgccaaccggccggcacgctctgccgggcctgcttcgacggcgtgtacccggttccgctgaacgattccgacaagctcggcaagcatcggctggaggcgacgggcggcgcggagaccaccgaggacatgatcgccgaggcgttgcggcgcggcgtgacgctgggcatgaacggtgccgatccctccccggacaaccacgacgccgagcctgagcccgagcccgatcttgagtccgagcccgagccggccggggtgaggcccgcatga

SEQ ID NO: 132461 - protein, 544 aa, Frankia sp. CcI3
MPDVAPRFGATPGWESDLSDEPGPRDACGVFGVWAPGEDVANLAYYGLYALQHRGQEAAGIAVGDGRTVVVFKELGLVAQVFDEVTLSSLSGHVAVGHTRYSTTGSSTWENAQPSYRTARFGGPIALGHNGNLTNIVELARTLGAERDRLRATTDSDLITAMLADHPGPTLVDAAMDVLPRLTGAFSLVFSDASTLYAARDAHGIHPLVLGRLDGHPDGAWIIASETAALDIVGATLVREIVPGELVVIDAEGVRSRTFARPDPHGCLFEYVYLARPDTSIAGRSVHATRVDVGRQLAREAPVEADLVIPVPQSGVPAAVGYAEESGIPFGEGLVKNSYVGRTFIQPSQTIRQRGIRLKLNPLRDVIEGRRLVVVDDSIVRGNTQRALVRMLREAGAAEVHIRISSPPVRWPCFYGIDFATRAELIASEAGIEEIRASLGADSLAYVSLEGLVEASRQPAGTLCRACFDGVYPVPLNDSDKLGKHRLEATGGAETTEDMIAEALRRGVTLGMNGADPSPDNHDAEPEPEPDLESEPEPAGVRPA

SEQ ID NO: 132462 - DNA, 1491 bp, Novosphingobium aromaticivorans DSM 12444
  CDS (1)..(1491): transl_table=11
atgacttcacagaacgaacttttcgacagcacgccgtgggacatcggcagtgacgacgacaagctgcgcgaagagtgcggcatcttcggcgtactgggcgtacgtgacgccgccgcgacagttgcactgggcctccacgccctgcagcatcggggccaggaagccgtcggcatcaccagtttcgacgggcaggagttctattcgcgcaagggcatcggccacgtcgcggcgaacttctcgaccggctcggccatcgccgaactgccgggcgccatggccgccggccacgtgcgctactcgaccaccggcggggccggcctgcgcaacgtgcagccgctgtttgccgacctcgcgtcgggcggcttcgcgatcgcccacaacggcaacatctcgaacgcgatgttcctcaagcgcgacctcgtgcagaagggcgcgatcttccagtcgacgtccgacaccgaagtcatcatccacctcgtcgcgacgagccgctaccccaccctgctcgaccgcttcgtcgatgccctgcggctggtcgaaggcgcctattcgctgatctgcatgacgcccgaaggcatgatcgcctgccgcgacccgcttggcatccgcccgctggtcctcggcaagatcggcgacgcggtggtcttcgcgagcgaaaccgtggcgcttgacgtggtcggcgccgaattcgtccgcgaagtggagccgggcgaactggtccaggtcgatttcgacggcaagctcagcagccaccgcccgttcggcaggccaagcgcgcggccctgcattttcgagcacgtctacttcagccgtcccgattcgctgatgggcggcaattccgtctatcaggtgcgcaaggccatcggcgcgcagctcgccatcgaaagcccggccgacgcggacctcgtcatccccgtgccggacagcggcgttcccgccgcgcttggctatgcccagcagtccggcattccgttcgagcttggcatcatccgctcgcactatgtcggccgcaccttcatccagccttccgacggtgcccgtaacgcagacgtgaagcgcaaacacaacgcgaaccgcgcactggtcgcggggaagcgcatcgtgctgatcgacgattcgatcgtgcgcggcaccaccagcctcaagatcgtgcagatgatgcgcgacgcgggtgcggcagaagtgcacatgcgcatcgccagcccgccgacggagcattcgtgcttctacggcgtcgacacgcccgaacgctcgaagctgctcgccgcgcggatggacgtgcaggccatggccgacttcatccatgccgacagcctcgccttcgtctccatcgacggtctctaccgcgcggtcggcgaggagcagcgcaacaagggctgcccgcaatattgcgacgcctgcttcaccggcgactaccccacgcggctgaccgacctcgcagagcgcgagaatccggaccagctttcgctgccggtcgaaaaggtcgcctga

SEQ ID NO: 132463 - protein, 496 aa, Novosphingobium aromaticivorans DSM 12444
MTSQNELFDSTPWDIGSDDDKLREECGIFGVLGVRDAAATVALGLHALQHRGQEAVGITSFDGQEFYSRKGIGHVAANFSTGSAIAELPGAMAAGHVRYSTTGGAGLRNVQPLFADLASGGFAIAHNGNISNAMFLKRDLVQKGAIFQSTSDTEVIIHLVATSRYPTLLDRFVDALRLVEGAYSLICMTPEGMIACRDPLGIRPLVLGKIGDAVVFASETVALDVVGAEFVREVEPGELVQVDFDGKLSSHRPFGRPSARPCIFEHVYFSRPDSLMGGNSVYQVRKAIGAQLAIESPADADLVIPVPDSGVPAALGYAQQSGIPFELGIIRSHYVGRTFIQPSDGARNADVKRKHNANRALVAGKRIVLIDDSIVRGTTSLKIVQMMRDAGAAEVHMRIASPPTEHSCFYGVDTPERSKLLAARMDVQAMADFIHADSLAFVSIDGLYRAVGEEQRNKGCPQYCDACFTGDYPTRLTDLAERENPDQLSLPVEKVA

SEQ ID NO: 132464 - DNA, 1407 bp, Anaplasma phagocytophilum HZ
  CDS (1)..(1407): transl_table=11
atgccgtttgccagtatatatgaggaatgcggaatatttgccgtgcaaaatcacagcaatgctgtgcacaagtgcctgttgggtttgcacgcactgcagcatcgtggtcaggagtcatttggtattgcagcgtcaacaccgggcatttcggagctggtttcgttttatagtggaggctgcgttagcaacatattttctaaccccgaggttcatactcttaccggaaggatggcgattggacatgtaagatattccacaagtgggggtctaacagcttcaggagcgcagccttttattgtgcaagggaggttcgggccgcttgccgtggcacacaatggcaatttgacaaatgcccgaagtttgagggaagaactcatagacaagggctgtcaatttacctccgaaatagatacagaggttgttgctcatttagcggtagtagacgaagcagaaacttttgtggattgtgtgatcaatgcactaaaaaggacaaagggagcctactcgtttgttataatggtacgtgacacacttataggcgcgcgagatcctgcggggatcagaccgttggtattaggaatggtagaaggttcgtacgtcttagcttcggagacctgtgctttagacattgtaggagcaacatttgtacgtgatattaagccaggtgaactagtagttatagataagtcaaataatataactagtttgtttccgtttaagcctctgaagtatagtttctgcatttttgagtacgtatattttgcgcgtcctgatagtgtggtagagagcaaacctgtgtatgaaacacgtaaaaacattggtgcgatgcttgctacagaaagccctcctccaagtgatgtagacatggtagtgccggtaccggattctggcattccggcggctatgggttatgcaacaaaatcaggagtgccatttgagttcggcatagtaaggaaccgttacgtagggcgcacgttcatacagccaacggataaagcaaggaagcttggtgttgagctaaaacacaatgcaaactcggcaattttaaaagggaagagcatagtattggtggatgacagcatagtacgtggcacaacactgcgtgaagttatagttttacttagaaaagccggtaccaaaaatatacatcttaggatatcgagccctcctacagtgtactcatgtttctatgggatagatactccacataggtcaagtttggtagctaataacatgtctatagcagatctagtgaagatgctagattgcgacagtctctcattcatcagcatagacgggctatataaagccataaggggcgcaaagcgagacagtgacaatcctcagtactgtgatgcatgcttcaccgggtattaccccgtgggtgaaatggagtgtaatagctaa

SEQ ID NO: 132465 - protein, 468 aa, Anaplasma phagocytophilum HZ
MPFASIYEECGIFAVQNHSNAVHKCLLGLHALQHRGQESFGIAASTPGISELVSFYSGGCVSNIFSNPEVHTLTGRMAIGHVRYSTSGGLTASGAQPFIVQGRFGPLAVAHNGNLTNARSLREELIDKGCQFTSEIDTEVVAHLAVVDEAETFVDCVINALKRTKGAYSFVIMVRDTLIGARDPAGIRPLVLGMVEGSYVLASETCALDIVGATFVRDIKPGELVVIDKSNNITSLFPFKPLKYSFCIFEYVYFARPDSVVESKPVYETRKNIGAMLATESPPPSDVDMVVPVPDSGIPAAMGYATKSGVPFEFGIVRNRYVGRTFIQPTDKARKLGVELKHNANSAILKGKSIVLVDDSIVRGTTLREVIVLLRKAGTKNIHLRISSPPTVYSCFYGIDTPHRSSLVANNMSIADLVKMLDCDSLSFISIDGLYKAIRGAKRDSDNPQYCDACFTGYYPVGEMECNS

SEQ ID NO: 132466 - DNA, 1392 bp, Neorickettsia sennetsu str. Miyayama
  CDS (1)..(1392): transl_table=11
atggtgtcgcgggatcagtctgggtggctcacggagaagtgtggtgttgtagctgtcgttggcacacccaatgctgtcgagctttctctcttggggctccatggactacagcatagaggacacgaggcctttggtatcgcatttgtgcataatggtgacgtgggtgtcgttcaccgctttggcaggattatgtcggtcaatccagttgacctttctatcccctctgctgagacggtaattggacatgtgagatactcgacgagtgggggctctgacttttcccagccagtatacttgaaataccggtcttgcgaagtagtggtagcgcataatggtaatctcactaacactgatgagataagaaccaagcttgagagtgaaggttgcgttttgcaatctgaggttgatactgaggtcatagcgcacttaatagcccgctctagcaggaagactccaacagaaaaaattgtggatgcgttgcaacaagttgagggagcctattcattactattgtttgttggaggagagatctttgctgtaagagatcctcatggagtaaggccacttagtcttggtaaacttggtgatgggattgtcatagcatctgagacctgtgcgttggacatgctcaaagcaactttcgtcagggatatggcacctggtgagctgctgcaaataaaagatggtaagctcacatctctgttcccgtttaagagaatggaacataaattttgtatctttgagcacgtgtatttcgctagaccagatagcgttttagaggggcgtagcgtctacgcctcaagaaaagaaatagggaaagaacttgctcgtgagagtaaaatcgaagccgatatggtagtacccgtacttgattctggtgtggtagcagcccttggttactcagaagagtccaacttaccgctcgaacttgcaatcacaaagaaccattattcaagcaggagttttatagaacctacgccggagcggagaaacatgagggtcaaattgaaacacaatgcaaatagattcttgctaaagggaaagaaggtggttcttgtggatgacagcatagtgagggggaccacacttaagcacctgatcactatgttgtgggaagccggaacaagtgaaatacatgtcagaatatcaagcccacggattcttaatccatgctattacggagttgacacacctaacagaaaggatctgatatcggcaaacctccctttaggagaaatgagcgtgtatttaggcgcaacaagtttgtactttcttacccttgaagggctatacaaagctgtatccgggagtgagaagcgtataggtttttgtgatgcctgtttcactggtgattatccgataaagtgccttgggacttcccaaagtacgtga

SEQ ID NO: 132467 - protein, 463 aa, Neorickettsia sennetsu str. Miyayama
MVSRDQSGWLTEKCGVVAVVGTPNAVELSLLGLHGLQHRGHEAFGIAFVHNGDVGVVHRFGRIMSVNPVDLSIPSAETVIGHVRYSTSGGSDFSQPVYLKYRSCEVVVAHNGNLTNTDEIRTKLESEGCVLQSEVDTEVIAHLIARSSRKTPTEKIVDALQQVEGAYSLLLFVGGEIFAVRDPHGVRPLSLGKLGDGIVIASETCALDMLKATFVRDMAPGELLQIKDGKLTSLFPFKRMEHKFCIFEHVYFARPDSVLEGRSVYASRKEIGKELARESKIEADMVVPVLDSGVVAALGYSEESNLPLELAITKNHYSSRSFIEPTPERRNMRVKLKHNANRFLLKGKKVVLVDDSIVRGTTLKHLITMLWEAGTSEIHVRISSPRILNPCYYGVDTPNRKDLISANLPLGEMSVYLGATSLYFLTLEGLYKAVSGSEKRIGFCDACFTGDYPIKCLGTSQST

SEQ ID NO: 132468 - DNA, 1389 bp, Ehrlichia chaffeensis str. Arkansas
  CDS (1)..(1389): transl_table=11
atgcagtttaatgaaatatatgaagaatgcggagtatttgccatacaaaataataattgtgctgctattaattgcatcctagggctacatgcacttcaacatagaggccaagaatcatttggcatagtaacgtcagaagataacaaacttcattttcactattcaaatgaacaagtcaacagcatattcaatcaacaatcaaaaatagactctttactaggaaacactgcaattggacatatacgttattctacaagtggaagtaaagttggtgttcaaccaataaccttagattgtaaatttgggaaattagcaatagcacacaatggtaacctcactaatgcagcacaaataagaaaatcacttactgaaaggggatgtatattttcatcagatatcgatacagaagtcattgctcacctaattgctattaatactgagaatactctcttggacaatgttattaatgcattaaaaaccattaagggcgcatattctttagttatattaataaacggtactataatatgttgtcgcgatccagctggaattagaccactagtattaggtatgttagataattcatatattgtagcttcagaaacttgtgctctagatatagttggagcccaatttataagagatgtattaccaggagaattcatcacaattgaccaaggtaacactttaacaagttcttttccatttaaaaaacaaaaatcaagtttttgtatttttgaatacgtatattttgcacgaccagatagtataatagacaataagtctatatatgaaatacgcaaaaacataggtaaagaattagcaatagaaaatcctattccaaaagatacacacatgatagtaccagtaccagattcgggagtaccagctgcattggggttcgcagaatacacaaaaataccttttgaatttggcattattaggaaccattatattggaagaacttttatccaacccaacgatcacattcgtagtatgggagtgaagttaaaacacaatgctaattcttccatactaaaagacaaggtaatagttttaatagatgatagcctagttagaggcacaacactaaaaagtataataacactactacacaaagcaggagttcaacaaatacatttaagaatttctagcccaccaactataaattcttgcttttatggaatagacactccagaagaatcaaaattaatagctaacaggttatcacagttagagatcaaaaatgctcttggttgcgatagtctacactttttaagtatagatggtctctacaaggcaatatgcaacacaaaacgtaataatagtatacctcaatactgtgatgcctgttttactggggattatccaataggaaaaatagaataa

SEQ ID NO: 132469 - protein, 462 aa, Ehrlichia chaffeensis str. Arkansas
MQFNEIYEECGVFAIQNNNCAAINCILGLHALQHRGQESFGIVTSEDNKLHFHYSNEQVNSIFNQQSKIDSLLGNTAIGHIRYSTSGSKVGVQPITLDCKFGKLAIAHNGNLTNAAQIRKSLTERGCIFSSDIDTEVIAHLIAINTENTLLDNVINALKTIKGAYSLVILINGTIICCRDPAGIRPLVLGMLDNSYIVASETCALDIVGAQFIRDVLPGEFITIDQGNTLTSSFPFKKQKSSFCIFEYVYFARPDSIIDNKSIYEIRKNIGKELAIENPIPKDTHMIVPVPDSGVPAALGFAEYTKIPFEFGIIRNHYIGRTFIQPNDHIRSMGVKLKHNANSSILKDKVIVLIDDSLVRGTTLKSIITLLHKAGVQQIHLRISSPPTINSCFYGIDTPEESKLIANRLSQLEIKNALGCDSLHFLSIDGLYKAICNTKRNNSIPQYCDACFTGDYPIGKIE

SEQ ID NO: 132470 - DNA, 1491 bp, Francisella tularensis subsp. holarctica
  CDS (1)..(1491): transl_table=11
atgtgtggagtaattggagtcgctggaccagatcaggttagttatgcattattttatggtttaagtcttttgcagcataggggtcaagatgctgcagggattgcaactatggattatgggcacttttttatccgtaaaaatacaggtctagtaagtgatgtatttacagatgaaaaactagagaagtcaaaaggtaatatgggtatcggtcatgttagatatcctactgcaggtagcttgggtgctgctgatagccaacctttttatgtaaataatccccatggtatagtttttgttcataatggcaatctgactaatgtgccagagcttgcacaaatgctccatgatattgaaagacgccatcttaatacaagttcagattccgaattattgcttaatttctttgcttgtgggatgaataaatcaaaaggatctgcgacttctgaggctgtttataaagcatgtaaatttgtttttgagcatgtcaaaggtggttatgcatgtactgcgatgatagcaaattttggtttaattgcttttagagatccttatggtattcgtccacttgtgcttggttttaaagagtacgatgatggtgaaaaagcttacatggtcgctagtgaaagtgttgctttagatatttccggatttaaagtattacgtgatgttgagcctggtgaggtgataataattacagaggatagaaaagttcactctaaaatctgtgcaaagaatccagttttggcaccatgcctatttgagtatgtatactttgcacgtcctgatagtattatgaatggtgtgagtgtttatcaagcgcgagtagatgcgggtaaaatcctaagtaagagaatcaaagaagcgtggaaggataaggatatcgatatcgttatccctatacctgagacaggtagagcctctgctcaagagattgcaacagcattaggtgttgagtaccgtgaaggttttgttaagaatcgctatgttggtagaacttttatcatgccagagaatgttgatagaaagaattttgtcagaagaaaactaaaccctattccagcagaatttagggataaaaatgttctacttgttgatgattctattgtccgaggtacaacatcaaagcgtattattgagatgattagagatttaggtgctaaatctgtttatcttgcttcagtatctccagccgttcgttatccaaatgtttatggtattgatatgccggttaagtcggatttaattgctcatggaaagactatagaagagattcgccagtggattggagtagatggactaatatatttaccattagaggatctaaaagagattattcaaaagcaaaaccctaaaattagagagtttgaggatagtgttttctctggtaattacattacaggtgatgtcgatgatgcttatctagatgtgctagagaaacatcgtaaagagttaaaagaattagaaaaaaaatacaaagggtttgataactaa

SEQ ID NO: 132471 - protein, 496 aa, Francisella tularensis subsp. holarctica
MCGVIGVAGPDQVSYALFYGLSLLQHRGQDAAGIATMDYGHFFIRKNTGLVSDVFTDEKLEKSKGNMGIGHVRYPTAGSLGAADSQPFYVNNPHGIVFVHNGNLTNVPELAQMLHDIERRHLNTSSDSELLLNFFACGMNKSKGSATSEAVYKACKFVFEHVKGGYACTAMIANFGLIAFRDPYGIRPLVLGFKEYDDGEKAYMVASESVALDISGFKVLRDVEPGEVIIITEDRKVHSKICAKNPVLAPCLFEYVYFARPDSIMNGVSVYQARVDAGKILSKRIKEAWKDKDIDIVIPIPETGRASAQEIATALGVEYREGFVKNRYVGRTFIMPENVDRKNFVRRKLNPIPAEFRDKNVLLVDDSIVRGTTSKRIIEMIRDLGAKSVYLASVSPAVRYPNVYGIDMPVKSDLIAHGKTIEEIRQWIGVDGLIYLPLEDLKEIIQKQNPKIREFEDSVFSGNYITGDVDDAYLDVLEKHRKELKELEKKYKGFDN

SEQ ID NO: 132472 - DNA, 1419 bp, Desulfitobacterium hafniense Y51
  CDS (1)..(1419): transl_table=11
ttgagagaaccctgggatgataaaccccatgaggaatgcggagtattcggtatttatgcgcctgagcaggaggtggcccgtctcacctatttcgggctctatgccttacagcatcggggacaggaaagtgcagggattgctgtatccaatggccgggatatccaagtccataaaggaatgggactggtggcggaggtcttttcggaaagaattcttaaggaacttgaacaggacggtaaaatggccatcggccatgtccgttattcaaccacaggttccagtctcctgaccaatgcccaacccttagtggttcattaccaaaagggtatgatggctctggctcataatggcaacttgaccaatgcgggagaattgcgggaggaattggctaaagaaggggcagtctttcagaccactgttgactcagaggtgattgtccagctgatcgcccgctacggccgggggagcttagaggatgccctcgtcaaaaccatgctggatttgcagggagcctatgctttagtagtggctgcagaagacaagattctggggatgcgcgacccccatggcgtccgccctttatgtattggtcagctggaaggacggtatgttctggcttcggaaagctgtggcctggatactatcggagcggaattcgtgcgcgatgttcagcctggagagattgttaccatcgatgaggaagggcttcattcccggcaggggtttcccgcccagaaaacagcggtctgcgccttcgaatacatttattttgcccgtcccgacagtaccatggatcaattgaatgtgaccgagagccggaggagaatgggtgttgagctggcccgggaatatcctgtcgatgccgatattgtcataccggtacctgattcggggatgaccgccgctcttggctatgctgaggaatccggcatcccctttgcccagggattgctgaagaaccgatatgtgggaagaacctttattcaacccacccaggaaatgcgggaagtagcggtccgcctgaagctcaatgccaatgcccaagtgattaagggcaagcgggtcattatgatcgatgactccatcgtgagaggaaccaccagttcccgcatcgtcgaattgctgagaaaggtgggagccaaggaggtccatctcctcatctgctcgccgccggttctttatccctgttactatggcatcgatacggcggaacgggagaagctgattgctactcagctggatcgggaggggatacgtgactatgtaggagcggattctctgcattatctatcggaagagggcgttcagcgggctttaggcgagttgtcagtctgtctggcctgctttaatggggattaccctgcagggatacctgcgggaaccagagagaaatgggcagaatttaaaagcaagtgctaa

SEQ ID NO: 132473 - protein, 472 aa, Desulfitobacterium hafniense Y51
MREPWDDKPHEECGVFGIYAPEQEVARLTYFGLYALQHRGQESAGIAVSNGRDIQVHKGMGLVAEVFSERILKELEQDGKMAIGHVRYSTTGSSLLTNAQPLVVHYQKGMMALAHNGNLTNAGELREELAKEGAVFQTTVDSEVIVQLIARYGRGSLEDALVKTMLDLQGAYALVVAAEDKILGMRDPHGVRPLCIGQLEGRYVLASESCGLDTIGAEFVRDVQPGEIVTIDEEGLHSRQGFPAQKTAVCAFEYIYFARPDSTMDQLNVTESRRRMGVELAREYPVDADIVIPVPDSGMTAALGYAEESGIPFAQGLLKNRYVGRTFIQPTQEMREVAVRLKLNANAQVIKGKRVIMIDDSIVRGTTSSRIVELLRKVGAKEVHLLICSPPVLYPCYYGIDTAEREKLIATQLDREGIRDYVGADSLHYLSEEGVQRALGELSVCLACFNGDYPAGIPAGTREKWAEFKSKC

SEQ ID NO: 132474 - DNA, 1515 bp, Saccharophagus degradans 2-40
  CDS (1)..(1515): transl_table=11
atgtgcggaatagtgggtatagttggtaagagcgatgtgaacgtagcgctgtacgacgcgttaacgatgctacaacatcgtggccaggatgccgcaggaattatgacttgccataacggcaaattggctcaacaaaaggctgttggcttagtaaaagacgtgtttcgtacgcgtcatatgcagcgcctagtgggcaacatgggtattgggcatgtgcgctatccaacggcaggcagctctggcccagctttggcgcagccgttttacgttaactcaccatacggaattgccttggcgcataacggtaaccttactaataccgagaaagttagcgaagacttgtttaaagaagatctacgtcatgtaaacacagagtccgattctgaagttttacttaacgtttttgctcacgaattgcagcttcaaggtaaattgcgacctgcaccagaagatatctttaatgccgttgccagagtgcataagcgcattcgcggtggctatgcggttgtatctatgattgcaagctacggcgtcgtagctttccgcgacccccacggtattcgtccgctggtattcggtgagcgtattaccgataaaggcaccgagtatatgatcgcctcagagagtgtttcgctggatgtgctgggctttcgcttaatccgcgatgttgcaccgggcgaggccatttttgtaacggttgatggcgaactgcatacacgtcaatgcgccgaaaaccccagtttgcgcccgtgtatattcgaacacgtgtactttgctcgtccagattccattatggatggcgtatctgtatataagtctcgcttgcgtcagggtgagaaactagcagagaaaattttgcgtgaaacgcctaatcacgacatagatgtggttattcctatcccagatagcagccgtgttgctgggcaagcattagctcaaaatttaggcgttaagttccgtgaaggcttggttaaaaaccgctatattggtcgtacttttattatgccgggccagcagcagcgtaagaaatcagtgcgtcaaaagttgaacgtaattgatttggagttccgcggtaaaaatgtactgttagtagatgactccatagtacgtggcaccacttgccagcaaataatccaaatggcgcgtgatgcaggtgcggccaaagtgtattttgcttctgcggcaccagctgtgaagtaccctaatgtttatggtattgatatgccaaccgccgcagagcttattgctcacggtcgtacagaagaagaagtgtgcaaggagattggcgccgactggctaatttaccaagatttagaagacttaatcgccgcttctagcgagggtagcccagacgttacccagtttgaatgtgctgtatttaatggcaactacgtaactggggatgtaacccccgagtatcttaaaaagttggaagatcgccgcaacgactcatcaaaaatgcgggatcaaagccagtctaacaatgccatggtgggtattcacaacgacggttaa

SEQ ID NO: 132475 - protein, 504 aa, Saccharophagus degradans 2-40
MCGIVGIVGKSDVNVALYDALTMLQHRGQDAAGIMTCHNGKLAQQKAVGLVKDVFRTRHMQRLVGNMGIGHVRYPTAGSSGPALAQPFYVNSPYGIALAHNGNLTNTEKVSEDLFKEDLRHVNTESDSEVLLNVFAHELQLQGKLRPAPEDIFNAVARVHKRIRGGYAVVSMIASYGVVAFRDPHGIRPLVFGERITDKGTEYMIASESVSLDVLGFRLIRDVAPGEAIFVTVDGELHTRQCAENPSLRPCIFEHVYFARPDSIMDGVSVYKSRLRQGEKLAEKILRETPNHDIDVVIPIPDSSRVAGQALAQNLGVKFREGLVKNRYIGRTFIMPGQQQRKKSVRQKLNVIDLEFRGKNVLLVDDSIVRGTTCQQIIQMARDAGAAKVYFASAAPAVKYPNVYGIDMPTAAELIAHGRTEEEVCKEIGADWLIYQDLEDLIAASSEGSPDVTQFECAVFNGNYVTGDVTPEYLKKLEDRRNDSSKMRDQSQSNNAMVGIHNDG

SEQ ID NO: 132476 - DNA, 1536 bp, Methylobacillus flagellatus KT
  CDS (1)..(1536): transl_table=11
atgtgtggaattatcggtgtagtcggtaaaaacccagtcaaccagctgctttacgatggactgctggttctgcagcatcgtggccaggatgctgcaggtattgtgacttgcgatggcaatacctttttcatgcataaaaacaatggcctggtgcaggatgtattccgcacccggcatatgcgcagcctgattggaaatgcggggattgcccatgttcgctatcctactgcgggttcctcatccgccgctgaagcccagcctttctatgtgaactccccatttggcattgtgctgggtcataacggaaatttgaccaattctgcacagctcaagcaggaaatgttcaggcaggatctgcgccacatcaataccaactccgattccgaagtgttgctgaacgtgctcgcccatgaaatcgagacctcatcacacaacgcggttcttaacaccgacatgattttcgaggcggtggctggggtgcacaagcgctgccgcggcgcgtatgccgtagtggccatgattgcgaatttcggtttactggcattccgcgatccgtatggcatccgtccgctggtcatcggcaagaacgaatctgagcagggcaccgaatacatcgtggcttctgaaagcgtggcgctggatgtgctgggctttactttagtgcgcgatgtagcgccaggggaggcgatcttcatcgatctggatggtaatttcttctcgcgccaatgtgccgagtcaccgcaactgtctccttgtattttcgagtatgtctacctggctcgtcctgactctgtgatcgacaacgtttccgtctatcagactcgcctacatatgggcgaaagccttgctgacaagatcgcacgcgagtggaagcacttgaagatcgacgtcgtgattccgatcccggataccagccgcccgagcgcactagagctggcgaataagcttaacctcacttatcgtgaaggcttcatcaagaaccgctatattggtcgcaccttcatcatgccggggcaggccttgcgcaagaagtcggtacgccagaaactcaatcccatcggcatggagttcaaggacaagaacgtgctgctggtggatgactctatcgtacgaggtaccacctcccggcagatcgtgcagatggcgcgcgatgccggagcgagcaaggtttttttcgcctccgctgcgcccccagtgcgttatcccaatgtgtatggcattgacatgccttcgcgcagtgaactattggccacaggtcgcactgatgaggaaatctgtgcggaaatcggcgcagacgccttgatctaccaggacctagatgcgttgatcactgccgtgcagaagagcaaccctgacatcaaggtatttgattgctcttgttttgacggcaagtacattaccggtgatatcgacgaagcctatctggcgtgtgcagaatcggtacggggcgacggggctgcgcaaaagcgtccggccaattcgattacccagcttgatctcaatcttgtcgggaccgaagaggaggagctggtatag

SEQ ID NO: 132477 - protein, 511 aa, Methylobacillus flagellatus KT
MCGIIGVVGKNPVNQLLYDGLLVLQHRGQDAAGIVTCDGNTFFMHKNNGLVQDVFRTRHMRSLIGNAGIAHVRYPTAGSSSAAEAQPFYVNSPFGIVLGHNGNLTNSAQLKQEMFRQDLRHINTNSDSEVLLNVLAHEIETSSHNAVLNTDMIFEAVAGVHKRCRGAYAVVAMIANFGLLAFRDPYGIRPLVIGKNESEQGTEYIVASESVALDVLGFTLVRDVAPGEAIFIDLDGNFFSRQCAESPQLSPCIFEYVYLARPDSVIDNVSVYQTRLHMGESLADKIAREWKHLKIDVVIPIPDTSRPSALELANKLNLTYREGFIKNRYIGRTFIMPGQALRKKSVRQKLNPIGMEFKDKNVLLVDDSIVRGTTSRQIVQMARDAGASKVFFASAAPPVRYPNVYGIDMPSRSELLATGRTDEEICAEIGADALIYQDLDALITAVQKSNPDIKVFDCSCFDGKYITGDIDEAYLACAESVRGDGAAQKRPANSITQLDLNLVGTEEEELV

SEQ ID NO: 132478 - DNA, 1551 bp, Burkholderia xenovorans LB400
  CDS (1)..(1551): transl_table=11
atgtgcggcatcgtaggcgtagtttcccactctccggtcaatcagctgatctatgacagcctgctgcttctgcagcaccgcggtcaggacgccgccggcatcgcgacggcgaacggcagcaatttccacatgcacaaggcgaacggcatggtgcgcgacgtgttccgcacgcgcaacatgcgcagcctgcccggcacgaccggtatcggccaggtccgctatccgaccgccggttccgcgtcgagcgaagaagaagcccagccgttctacgtgaacgcgccgttcggcattatcctcgcgcacaacggcaatctgaccaactggcagcaactgaaagatgagatgttccgcatcgatcgccgccacatcaataccaattccgacacggaagtgatgctcaacgtgctcgcgcacgaattgcagctttccagctcgggcctgcaactcgatccggctgcactgttcaacgccgtgtcgggcgtgcatcgccgggtgcgcggttcgtacgcgatcgtgtcgctgatcgccggttacggcctgctcggcttccgcgacccgttcggcatccgcccgctgtgcctcggcaagcaggaaacggccgaaggcgtcgagtggatcctcgcgtcggagtcggtggcgatcgaaggtatcggcttcgaattcgtgcgcgacgtggcgccgggcgaagcgattttcatcgacctcgaaggcaatctgcactcgcagcaatgcgcgacgaacccgagcctgaacccctgcattttcgaactcgtgtatctcgcgcgtccggattcggtgctcgacggcgtgccggtgtacaacgtgcgtctgcgcatgggcgactacctcgccgagaagatcaggcgcgaactgcccgacgtcgcgatcgacgtcgtgatgccgattcccgattcgtcccgtccggccgccatgcaggttgcgaagaagctgggcgttgaataccgcgagggtttcttcaagaaccgttacgttggccgcaccttcatcatgcccggccaggccgtgcgcaagaagtcggtgcgccagaagctgaacgcgatgggcatcgagttcaagggcaagaacgtgctgatcgtcgacgactcgatcgtgcgcggcaccacgtcgcatgaaatcgtgcagatggcgcgcgatgccggcgcgaacaaggtgatcttcgcttcggcggcgccgccggtgaagttcccgaacgtctacggcatcgacatgcccacgcgcggcgaactcgtcgcccacggccgctcggacgacgaagtcgcgcgcatgatcggcgcggaccatctcgtttatcaggacgtcgacgcgctcaagcaggccgtgcgcgatatcaacccggcgctgaaggaattcgaagcgtcgtgtttcgacggtaactacgtgaccggcgacgttaccaccgagtacctggatcgcatcgaaacggcgcgtctcgcaccgtcctcgcaatcggaccgcgacgccgcaagcgaagcgctcgacggcggcggcccggcccgttcgcaactgcatctgcaactgtcggtaggttga

SEQ ID NO: 132479 - protein, 516 aa, Burkholderia xenovorans LB400
MCGIVGVVSHSPVNQLIYDSLLLLQHRGQDAAGIATANGSNFHMHKANGMVRDVFRTRNMRSLPGTTGIGQVRYPTAGSASSEEEAQPFYVNAPFGIILAHNGNLTNWQQLKDEMFRIDRRHINTNSDTEVMLNVLAHELQLSSSGLQLDPAALFNAVSGVHRRVRGSYAIVSLIAGYGLLGFRDPFGIRPLCLGKQETAEGVEWILASESVAIEGIGFEFVRDVAPGEAIFIDLEGNLHSQQCATNPSLNPCIFELVYLARPDSVLDGVPVYNVRLRMGDYLAEKIRRELPDVAIDVVMPIPDSSRPAAMQVAKKLGVEYREGFFKNRYVGRTFIMPGQAVRKKSVRQKLNAMGIEFKGKNVLIVDDSIVRGTTSHEIVQMARDAGANKVIFASAAPPVKFPNVYGIDMPTRGELVAHGRSDDEVARMIGADHLVYQDVDALKQAVRDINPALKEFEASCFDGNYVTGDVTTEYLDRIETARLAPSSQSDRDAASEALDGGGPARSQLHLQLSVG

SEQ ID NO: 132480 - DNA, 1389 bp, Methanococcoides burtonii DSM 6242
  CDS (1)..(1389): transl_table=11
atgaaagaagaatgtggtgttgtcggcgtattaatgcacaaagctgatacgaaggcaaaacccgcttcactccaaatatattatgcactctatgcattgcagcataggggacaggaatccacaggaattacggtaaagaacggtgataaactcaagtccatcaagggtatgggtcttgtcccggaagtatattccaaggatgaactgttgaagcttgaaggtaggctcggtgtcggacatgttcgatattcgaccaccggagattctaacatagtcaactgtcagcctttaatggtaaactacaagaatggaaatcttgcaattgcgcataatggaaatcttgtgaacggacaggaacttcgggatgagctggaatccgaaggacgcatttttataactagttctgacacagaggtcatagctcaccttcttgtcaaagcattgctaatacacgaccctcttgaatccatcaaggaagtcatgtcaatgctcaaaggttcatattcactcgccattatgatagacgatcgacttttcgctgtgagggatccactgggattcaagccactatgcgtaggagagatcgacggcggatatgtagttgcatcggaaagcgttgccatcgacacactcaacggtaaattgacaagggatgttaaagccggcgaagttgtggagataacggaaaatggttttgaaggccatcagatgctaacggaaaagaactgtgctcattgtgtttttgagtacatatattttgcaagaccggattccatcattgatggtcagcttgtttacaaggttcgtgagcagataggcagagaacttgcaaaggaacacccagtagatgcggatatcgtttcccctgtaccagactcaggcatcacctctgcaataggttattctgatgagtcaggcatcaattatcgggaaggattgatgaagaaccgttatataggacgcacttttatcctcccgggacaggaaatgcgggaaacagcagttcgtcttaagatgaacacaatctctgagaacctcagggatagaaaggtcatcatcctcgatgacagtatcgttcgcggtacaacgtccagacgcataatcgagatggtacgtaacgcaggtgcaaaagaggtacatgcaaggataggaagccctgccattatcgcaccgtgctatatgggcatcgatatggcttcaagggaagagctcattgccgctaaaaagcctcttgttgacgtgaaaaatgctatcacagcagattcactcggatacctcagtatagaaggtcttattaaatcaataggaattcacagggacgaactttgcctgggatgtcttacagaacgatatccgataaagatagttggcgaaaagtgttctcgctaa

SEQ ID NO: 132481 - protein, 462 aa, Methanococcoides burtonii DSM 6242
MKEECGVVGVLMHKADTKAKPASLQIYYALYALQHRGQESTGITVKNGDKLKSIKGMGLVPEVYSKDELLKLEGRLGVGHVRYSTTGDSNIVNCQPLMVNYKNGNLAIAHNGNLVNGQELRDELESEGRIFITSSDTEVIAHLLVKALLIHDPLESIKEVMSMLKGSYSLAIMIDDRLFAVRDPLGFKPLCVGEIDGGYVVASESVAIDTLNGKLTRDVKAGEVVEITENGFEGHQMLTEKNCAHCVFEYIYFARPDSIIDGQLVYKVREQIGRELAKEHPVDADIVSPVPDSGITSAIGYSDESGINYREGLMKNRYIGRTFILPGQEMRETAVRLKMNTISENLRDRKVIILDDSIVRGTTSRRIIEMVRNAGAKEVHARIGSPAIIAPCYMGIDMASREELIAAKKPLVDVKNAITADSLGYLSIEGLIKSIGIHRDELCLGCLTERYPIKIVGEKCSR

SEQ ID NO: 132482 - DNA, 1533 bp, Ralstonia metallidurans CH34
  CDS (1)..(1533): transl_table=11
atgtgcggtatcgtcggtgcggtttccaccagccctgtcaatcaactcatctatgacagcctgctgctgttgcaacaccgcggacaggatgcagccggcatcgccacggccaatggcagcacctttcacatgcacaaggccaacggcatggtgcgtgacgtgttccgcacgcgcaacatgcgcagcctgccgggcacgtcgggcatcggccaggtgcgctacccgaccgccggttccgcgtcgagcgaggaagaagcacagccgttctatgtgaacgcgccgtacggcgtcatcctcgcccacaacggcaacctgaccaactcggaacagttgcgcgaggaaatgttccgtcgcgatcgccgccacatcaacacgcattcggactccgaagtgctgctgaacgtgctggccgacgaactgcaacgcgccagcagcggcaacgaactggacccggagacaatcttcaaggccgtcgcgggcatgcaccgccgcgtcaagggtgcctatgcgatcaccgcgcagatcgccggctacggcctgctggccgtacgcgatccgttcggcatccgcccgctgtgtattggcagcgtcgacaccccgaccggcaaggaatacctcatcgcctcggaatccgtggccctggaaggcatcggctaccagatggagcgcgatgtggcgccgggcgaggcgattttcatcgacctggacggctcgttccacagcaagcagtgcgctgataatccggtgctgacgccatgcatcttcgagtatgtctatctggcccgtccggattcgtgcattgacggcgtgccggtctacgatgcccgcctgcgcatgggcgactacctggccgaaaagatccgccgcgaagtgccggctggcgatattgacgtggtcatgccgattcccgattcgagccgcccggccgccatgcaggtggccaatgcgctcggcgtgcagtaccgcgagggcttcttcaagaaccgctacgtgggccgtacgttcatcatgccgggccaggcagtgcgcaagaagtcggtgcgccagaagctcaatgcgatgggtgtcgagttcaagggcaagaacgtgctgatcgtcgacgattcgatcgtccgtggtaccacgtcgctcgagatcgtgcagatggcgcgtgacgcaggtgcgaagaaggtgatcttcgcgtcggcagcgccgccggtgaagttcccgaacgtctacggtatcgacatgcccacgcgtgccgaactggtggcctatggtcgcacggacgaagaagtggcgcgcatgatcggcgccgaccagctcgtctaccaggacgtggaagcgatgaagcaggctgtgcgcgacatcaacccgaacctgcgtgactttgatgcgtcgtgcttcgacggcaagtacgttaccggcgatatcgacgacgcctatctggagcgcctcgagaccgcgcgtagcctggccgatcgtgaaggcaccaacggcggtgaaaccgaacgttcgcagctgcatctgcagcgctcgggcggcaacgaataa

SEQ ID NO: 132483 - protein, 510 aa, Ralstonia metallidurans CH34
MCGIVGAVSTSPVNQLIYDSLLLLQHRGQDAAGIATANGSTFHMHKANGMVRDVFRTRNMRSLPGTSGIGQVRYPTAGSASSEEEAQPFYVNAPYGVILAHNGNLTNSEQLREEMFRRDRRHINTHSDSEVLLNVLADELQRASSGNELDPETIFKAVAGMHRRVKGAYAITAQIAGYGLLAVRDPFGIRPLCIGSVDTPTGKEYLIASESVALEGIGYQMERDVAPGEAIFIDLDGSFHSKQCADNPVLTPCIFEYVYLARPDSCIDGVPVYDARLRMGDYLAEKIRREVPAGDIDVVMPIPDSSRPAAMQVANALGVQYREGFFKNRYVGRTFIMPGQAVRKKSVRQKLNAMGVEFKGKNVLIVDDSIVRGTTSLEIVQMARDAGAKKVIFASAAPPVKFPNVYGIDMPTRAELVAYGRTDEEVARMIGADQLVYQDVEAMKQAVRDINPNLRDFDASCFDGKYVTGDIDDAYLERLETARSLADREGTNGGETERSQLHLQRSGGNE

SEQ ID NO: 132484 - DNA, 1449 bp, Acidobacteria bacterium Ellin345
  CDS (1)..(1449): transl_table=11
atgatcgaagagaccgacgacctattcgacaagctgcacgaagagtgcggtgtcatggcgatttacaaccatcctgaagcctccaagctcgcttatctcggcctctacgccctgcagcatcgcggacaggaatccgccggcatcgcctccgccgacggcatccagatctaccgccacaaggccatgggccaggtttccgacatcttcaccgccgaggtccttgctaagctccccggccgcctcgccatcggacacacccgttactccaccagcggcgactccgccctcctcaacgcgcagcccatctccgtcgagtgcaataaaggacgcatcgccctcgcccacaacggcaacctcgtcaacgcccacgaaatccgcgccaagtttgaagcgcaaggctccatcttccaaactacatcggataccgaggtagtcgtccatctcatcgcccagtcccgtgagcagacgctcgaagacgccgtcgctgacgcgctgcgccgcatcgaaggcgcgttctcgctggtcatgaccacccctgaccgcatcttcgccgcccgcgacgcccgcggcttccgaccgctctgcatgggccgcatccccgcctccgagggccgccccgaaaccgtggtcttcgcctctgaaacctgcgccttcgacctgatcggcgccaactacgagcgcgacgtcaagcccggcgaaatgatcgtcgtcggccccgagggcatccactcccgctactacgcgcccgccctcgaacagtcgagctgcatcttcgagcacgtctatttctcgcgtcccgatagcctggtcttcggccgcagcgtccaggcctcccgcgacgaaatgggacgccagctcgcccgcgagtcccacgtcgacgccgacctcgtcatccccgtccccgactccggcgtcaccgccgccatgggctacgccgccgaaagcggcatccccttccagttcggcctcatccgcaaccactacgtaggccgcaccttcatcgagcccgaacagcgcgtccgcgacttcggcgtaaaactcaagctcaaccccgtccgcgccttaatcgaaggcaagcgcgtcatcctcatcgacgattccatcgtccgcggcaccaccagcaaaaagatcgtccgcctcgtccgcgaagccggcgccaaagaagtccacatgcgcatctcctgcccgcccaccatcagcccctgcttctacggcgtcgacacccccagcaagaagcagctgatcgccgccaacatgacggtcgaccagatccgcgactacgtaggcgccgacaccctcgcctacctaagcttggaaggcctgaaaaaagccgccggcgaaggcgacaagaccagctactgcaccgcctgctacaccggcaaataccccacacagttggtcgatgtgcatttggaagacctggcggcggtcgaggttaagagcgagtag

SEQ ID NO: 132485 - protein, 482 aa, Acidobacteria bacterium Ellin345
MIEETDDLFDKLHEECGVMAIYNHPEASKLAYLGLYALQHRGQESAGIASADGIQIYRHKAMGQVSDIFTAEVLAKLPGRLAIGHTRYSTSGDSALLNAQPISVECNKGRIALAHNGNLVNAHEIRAKFEAQGSIFQTTSDTEVVVHLIAQSREQTLEDAVADALRRIEGAFSLVMTTPDRIFAARDARGFRPLCMGRIPASEGRPETVVFASETCAFDLIGANYERDVKPGEMIVVGPEGIHSRYYAPALEQSSCIFEHVYFSRPDSLVFGRSVQASRDEMGRQLARESHVDADLVIPVPDSGVTAAMGYAAESGIPFQFGLIRNHYVGRTFIEPEQRVRDFGVKLKLNPVRALIEGKRVILIDDSIVRGTTSKKIVRLVREAGAKEVHMRISCPPTISPCFYGVDTPSKKQLIAANMTVDQIRDYVGADTLAYLSLEGLKKAAGEGDKTSYCTACYTGKYPTQLVDVHLEDLAAVEVKSE

SEQ ID NO: 132486 - DNA, 1521 bp, Silicibacter sp. TM1040
  CDS (1)..(1521): transl_table=11
atgtgcggtatcttgggcatcgcaagcagaaacgaacaagtgtttgcggaactctatgacgggctgctgatgctgcagcatcgcggtcaggatgcgtcaggcatcgtcacctacggcgatgggttctttcgcgaacgcaaggccaacggtctggtgaaggacgtctttggtgccaaagacgccgagaccctgcaaggccgtgtcgggatgggccatgtgcgctaccccaccgcaggttcgctctcggccgccgaggcgcagccgttttttgtgaacgcaccctatgggatctacctggtccacaacggcaatatcaccaacaccgaagagcagcgcgcaaaggtcaccggcaaatacagccgccacctgcgcaccacctcggattccgagatcctgctcaacgtgctggcggataaggtggctgacgcgatcaaggtcaatggcaacgcggatccgatccgcaacatctttgccggtgtgaaaatgaccatggagcgcgtccagggcgcctattccgtgatctgcctcatcgccggcgtcggcatgctggccttccgcgacccccatggcatccgcccgctctccgtggcccaacgcgaagccgagggtgagggcaatgattatgcctttgcctccgaggatgtggcttttggcatcaacggctttgaaaaactgcgggacctcaaacccggcgaggccatcctcgtcgatcttgacggcaacaagcacgagttccaggcggtcgaaggcaagctcaccccttgtatcttcgaatatgtctacctcgcccgccccgacagcctcttggacgggatctcggtatataaaacccagatccgcatggggcagacactcgccaagcagattgaggcatccggcctcgacatcgacgccatcatcccggtgccagacagcgcccgccccgtggcacttgaggtttccaacatcaccggcattcgctaccgcgaggcgctggtgaaaaaccgctatgtgggccgaacattcatcatgcccgggcaagaagaacgccagaaatccgtgcgccgcaaattgaacgcgatcccgcgcgagatgcaggaccgcaacatcctgctcattgatgactccatcgtgcggggcaatacgatcaagaagatcgtgcagatgtgtcgcgaggccggtgccaagaaggtctatatcgcctccgcttcgccgccggtgaaataccccaatgtctatggcatcgacatgcccaccaaacacgaactggtggccaacgggcgctcgatcgaggagattcgcgaggagttgggggcggatgagctgttctaccagaacctcgaggacctgatctgggccgccaaaggtggaaacccggacatcgaagcctttgattgttcgtgttttgacggcgagtatgtcaccggctcggtcagcgaggactacctcaacacgctcgaaaccagcacccgcgtgaccaagaaaatcaaggacatgcctgatgcaggcgcatcctggaacggcgcaacgctggccacctga

SEQ ID NO: 132487 - protein, 506 aa, Silicibacter sp. TM1040
MCGILGIASRNEQVFAELYDGLLMLQHRGQDASGIVTYGDGFFRERKANGLVKDVFGAKDAETLQGRVGMGHVRYPTAGSLSAAEAQPFFVNAPYGIYLVHNGNITNTEEQRAKVTGKYSRHLRTTSDSEILLNVLADKVADAIKVNGNADPIRNIFAGVKMTMERVQGAYSVICLIAGVGMLAFRDPHGIRPLSVAQREAEGEGNDYAFASEDVAFGINGFEKLRDLKPGEAILVDLDGNKHEFQAVEGKLTPCIFEYVYLARPDSLLDGISVYKTQIRMGQTLAKQIEASGLDIDAIIPVPDSARPVALEVSNITGIRYREALVKNRYVGRTFIMPGQEERQKSVRRKLNAIPREMQDRNILLIDDSIVRGNTIKKIVQMCREAGAKKVYIASASPPVKYPNVYGIDMPTKHELVANGRSIEEIREELGADELFYQNLEDLIWAAKGGNPDIEAFDCSCFDGEYVTGSVSEDYLNTLETSTRVTKKIKDMPDAGASWNGATLAT

SEQ ID NO: 132488 - DNA, 1437 bp, Myxococcus xanthus DK 1622
  CDS (1)..(1437): transl_table=11
atgcgttcctgttccgctcaccgctcgaaaggagtaaggcagcgcgccatgtgcggcatcttcggaatcgtggggcacgccgaggcctccaacctgacatacctggggctgcacgccctccagcaccgcgggcaggagtccgcgggcattgtcgcctctgacgggatggggctgcgcgctcaccggcagatgggactcgtcgccgacatcttcgatgcgccggtgctcgccgacctgcccgggcaggcggccatcggccacgtgcgctactccaccgctggaggcagcgccctcaagaacgcccagccgctcttcgtgcagtacgcgggcgggcagtgcgccatcgcgcacaacggcaacctggtgaacgcggcggagctgaagcagcagctcgaggccgacggcgccatcttccagtcggacgcggacacggaagtcatcctgcacctgctggcgcgctccaagcaggcgaccttcgagcagaagctcgtggaggcgctgcgcaaggtgacgggcgcctacagcctcctggtgctcacggagaacaagctcgtcgcggtgagagacccgcacggcatccggccgctggtgctggggcggatgaaggaaggtgcctacgtgctggccagcgagtcgaccgcgctggacctcatcgaggcggaaaccgtgcgcgagctggagccgggcgagctactcgtcatcgagaacgggctgctgcgcaccagcaagcccttcgcggagcctccgcgtcaggcgcgctgcatcttcgagcacgtgtacttcgcgcggccggactccacgctgttcggcagcaacgtgtacgaagtgcgcaaggaaatgggccgtcagctcgcgaaggagcagccggcgccctccgcggacctggtcatcgcggtgccggactcgggcgtgccggcggccatcggcttcgcgcaggccagcggcattccctacgacgtgggcctcatccgcagccactacgtgggccgcaccttcatcgagccgcagcagtccatccgccacttcggcgtgaagctgaagctgtccgcggtgcggcaggtgctcaagggcaagcgcgtggtggtggtggacgactccatcgtccgcggcaccacgagccgcaaaatcgtgaagatgatcaaggcggcgggcgcggtggaggtgcacctgcgcatctcctcgccgcccacgaagtggccttgctactacggcatcgacacgccgagccgccaggagctcatcgccgcgacgcacagcctggaggagattgccacgtacgtgaccgcagactcgctcggctacatctcccaggaaggcctgggccgcgcggtgggcgacccggagcgcggcagcttctgcaccgcctgcttctccggcaagtacctcatcggcgacttcggcgaagaacgcgccgagcccagcaagctcaccgcctga

SEQ ID NO: 132489 - protein, 478 aa, Myxococcus xanthus DK 1622
MRSCSAHRSKGVRQRAMCGIFGIVGHAEASNLTYLGLHALQHRGQESAGIVASDGMGLRAHRQMGLVADIFDAPVLADLPGQAAIGHVRYSTAGGSALKNAQPLFVQYAGGQCAIAHNGNLVNAAELKQQLEADGAIFQSDADTEVILHLLARSKQATFEQKLVEALRKVTGAYSLLVLTENKLVAVRDPHGIRPLVLGRMKEGAYVLASESTALDLIEAETVRELEPGELLVIENGLLRTSKPFAEPPRQARCIFEHVYFARPDSTLFGSNVYEVRKEMGRQLAKEQPAPSADLVIAVPDSGVPAAIGFAQASGIPYDVGLIRSHYVGRTFIEPQQSIRHFGVKLKLSAVRQVLKGKRVVVVDDSIVRGTTSRKIVKMIKAAGAVEVHLRISSPPTKWPCYYGIDTPSRQELIAATHSLEEIATYVTADSLGYISQEGLGRAVGDPERGSFCTACFSGKYLIGDFGEERAEPSKLTA

SEQ ID NO: 132490 - DNA, 1449 bp, Rubrobacter xylanophilus DSM 9941
  CDS (1)..(1449): transl_table=11
atgccgcccgccgggttcgaggggcaccgcgacgcggacaagccgagggaggcctgcggggtcttcgggatctactcgcgcgcgctggccggggagctcgcgcgccgcacctacttcgggctctacgcgctgcagcacagggggcaggagtcggcggggatcgccatctccgacggggagcgcacgaccgccgtcagggacatggggctcgtctcccaggtcttcgacgagacgcggctcgcggcgctcgaggacgggcacatctccctcgggcacgtccggtactccaccaccgggtccgcctcctgggagaacgcccagccggagttcatcgggcggggggaggtcaacgtcgccgtggcgcacaacggcaacctggtcgacgcccgcgcgctgcgcgacgagctggcgcgggagggcttcggcttcaactccacctccgacaccaccttcatcgccgcggcggtggtctcggagctggagcgggggctgccggtgggggaggccgtgcgggccgcgatgcggcgcctgaagggggcctactcggtggccatgatctgccgggacaagctggtggccttccgcgacccccacggcttccggccgctgtgcatcggccgggtggaggggggatacgccgtctccagcgagacctgcggcctggacatcgtcggggcggagtttctgcgcgaggtggatcccggcgaggtcgtggtcatcggcgacgaggggctcctgagcctgcgggggggcccggcgcgtacggcgctgtgcgtcttcgagtacgtgtacttcgcccgtcccgactcgcgcttcgacgggcgggaggtggccgacgcccgcaggaggatgggcgagcttctggccgaggaggcgccggcggaggccgacgtggtcatcccggtgcccgactccgggatcatggccgccgtcggctactcggcgcgcagcggcatcccctacgccgaagggctcataaagaaccgctacgtgggcaggactttcatccagcccaccgacgggatgcgccagctcggcatccggctgaagctgaacccgctgccctcggtcatagccgggcggcgggtcgtggtggtggacgactcgatcgtgcgggggaacacgagccggaagctggtgcggctgctcttcgaggcgggggcgcgggaggtgcacttccgggtctcctcgcccccggtgaccggcccctgctactacgggatagatatggacaccgccgaccagctggtgggggccaggcacccggtcgaggagatccggcgccagatcggggcgaccaccctggcctacctctcggtggaggcgatggtggaggcgaccggcaggccgaagggccacctgtgccgggcttgcttcgacggggagtacccggtgcgcgggagctcgcagaagttcgccctggagcgggcgggcagccgggaggggtga

SEQ ID NO: 132491 - protein, 482 aa, Rubrobacter xylanophilus DSM 9941
MPPAGFEGHRDADKPREACGVFGIYSRALAGELARRTYFGLYALQHRGQESAGIAISDGERTTAVRDMGLVSQVFDETRLAALEDGHISLGHVRYSTTGSASWENAQPEFIGRGEVNVAVAHNGNLVDARALRDELAREGFGFNSTSDTTFIAAAVVSELERGLPVGEAVRAAMRRLKGAYSVAMICRDKLVAFRDPHGFRPLCIGRVEGGYAVSSETCGLDIVGAEFLREVDPGEVVVIGDEGLLSLRGGPARTALCVFEYVYFARPDSRFDGREVADARRRMGELLAEEAPAEADVVIPVPDSGIMAAVGYSARSGIPYAEGLIKNRYVGRTFIQPTDGMRQLGIRLKLNPLPSVIAGRRVVVVDDSIVRGNTSRKLVRLLFEAGAREVHFRVSSPPVTGPCYYGIDMDTADQLVGARHPVEEIRRQIGATTLAYLSVEAMVEATGRPKGHLCRACFDGEYPVRGSSQKFALERAGSREG

SEQ ID NO: 132492 - DNA, 1473 bp, Mesorhizobium sp. BNC1
  CDS (1)..(1473): transl_table=11
atggcggaacgtgagaatttgcctctgatgggcgaagccgacgatcatttccacgacgaatgcggggtgttcggcattttcgggcgccaggatgcggctgctatcgtcaccctgggactgcatgccctccagcatcgcggccaggaagcggcaggtatcgtgtcattcgacggcagccaattccatgtcgaacgccatatcggcctgatcggcgatacgttcacaaagcctgcggtccttgagcgcctcaagggctcgcgtgcaatcggccatacccgttattccaccaccggcggctcgggcctgcgcaatgtgcagcccttctttgccgagctttccgacggcgggctggcgctcgcccataacggcaatatcaccaacgcgatgactgtgcagcgccggctgcaaaagcagggcgcaattttctcctccacctccgacaccgaaacgatcctccacctggtggcgagcagcaaggagaacaatctcaacacacggttcatcgatgcggtgcggcagctggaaggcgctttctcgctcgtggcgctcacatccaaaaagatgatcgggtgccgagatccgctgggcatccgcccgctggtgctgggtgatctcgacggcgcctatatactggcttccgagacctgtgcgcttgacattatcggcgcacgtttcgtccgcgacctcaatgccggcgagatggtagtcatcaccgagcacggcattgaaagccactttccctttgaacccgtacgccagcggttttgcatcttcgaatatgtctatttcgccaggccggattcctccgtcgaagggcgcaatgtctacgaggtgcgcaagcgcattggcgcggagctcgcgcgggaaaacccggtcgaggccgatatcgtcattccggtgcccgattccggcacgcctgccgctatcggcttctcgcaggaagctggaattcccttcgagctcggcatcatccgcaaccattatgtcggccgcaccttcatccagccgacggatgccatccgccacatgggcgtgaagctcaagcacaatgcaaaccggcgttccatcgaaggcaagcgcgtcgtgctggtcgacgattcgatcgtccgcggcacgacgagccagaaaattgtgcagatggtccgcgaggcgggcgcgagggaagtccatatgcgcattgcctcaccgccgacacgcgcttcgtgcttttacggggtcgatacgccacaaacggcgaagctgctggcctcgcgcatgtccgtcgaggagatggccgacttcattcgcgtcgattctctgggttttctatcgatcgacgggctctacagggcggtcggtgaagcggcgcgtaacggtgaggcaccgcaattctgcgatgcctgcttcaccgccgaatatccgacccagcttaccgaccaccatggtaccgacaatgtacgccagctgtcgctgctcgcggcgggcgggcaatag

SEQ ID NO: 132493 - protein, 490 aa, Mesorhizobium sp. BNC1
MAERENLPLMGEADDHFHDECGVFGIFGRQDAAAIVTLGLHALQHRGQEAAGIVSFDGSQFHVERHIGLIGDTFTKPAVLERLKGSRAIGHTRYSTTGGSGLRNVQPFFAELSDGGLALAHNGNITNAMTVQRRLQKQGAIFSSTSDTETILHLVASSKENNLNTRFIDAVRQLEGAFSLVALTSKKMIGCRDPLGIRPLVLGDLDGAYILASETCALDIIGARFVRDLNAGEMVVITEHGIESHFPFEPVRQRFCIFEYVYFARPDSSVEGRNVYEVRKRIGAELARENPVEADIVIPVPDSGTPAAIGFSQEAGIPFELGIIRNHYVGRTFIQPTDAIRHMGVKLKHNANRRSIEGKRVVLVDDSIVRGTTSQKIVQMVREAGAREVHMRIASPPTRASCFYGVDTPQTAKLLASRMSVEEMADFIRVDSLGFLSIDGLYRAVGEAARNGEAPQFCDACFTAEYPTQLTDHHGTDNVRQLSLLAAGGQ

SEQ ID NO: 132494 - DNA, 1893 bp, Cytophaga hutchinsonii ATCC 33406
  CDS (1)..(1893): transl_table=11
atgagcgatgcgattaagcacgaatgtggtatagcactcatcaggttgcgtaaaccattttcacattacgtggaaaagtacggtactccttattatggtataaataagctgtacaccctgatggaaaagcaatataacagaggccaggatggcgcaggtattgcagtaattaaattagatgttccccaaggtacgcgctacatcagccgctaccgctccgtagatcagcaacccatcgctgaaatttttgagaaagtaaataagaaattcagaaaagcaatccgtgatcataaagataaaatcaacgacgcgcagtggctgttggaaaatgtagcctttacaggtgaagttctgatggggcacttacgttacggaacgcacggtaataacgacatagaaaactgtcacccgttcttacgtcagaataactggagaagccgcagcatggttgttgccggtaacttcaacatgacaaacgttgatgaattgttcaataaacttattgaacttggtcagcatccaaaagaaaaagtagatactgttacggtattggaaaagatcggtcacttcttagatgaagaaaaccaattcttattcgaaaaacataaagataaattttcaaattctcaggtctcaaccatcattgaaaatgacctggatctgcagcgcgtattaatgcgttcatgtaaagattttgatggcggatatgccatgatgggtattgcaggccacggtgcagcttttgttgcgcgtgatccggcaggtatccgtcccgcattttactatgcagatgatgagattgtaattgtagcatctgaaagacaagccatcaaaagtgcgatggaaaaaatcagctacgaagatattaaagaagtgcagccgggctttgcattgatcattgaccgtgaaggaaattacgaagaaaaacaattcatcgatcagcttcctaaaaaatcatgcagcttcgaacgtatttatttttcaagaggctctgatcctcagatctaccaggagcgtaagcagcttggtaaaattcttaccccgcagattcttgaatccattgattacgatatagaaaataccgtattctcatacgtaccaaacacagctgaaaccagcttcttaggtatggtagaaggaatggaagagtatctggcacgttaccggaagaaagttatttcagaaggtatctcgggcgaagaacttgaaaaagtattgtcattacgtccgcgtattgaaaagatggttattaaagacgccaagctgcgttcttttattacctcagacgatgtacgccagtcatttgttgctaacctgtacgatactacacatggtgtagtgcgcagaggtattgataatcttgtgattattgatgattccattgttcgtggtacaacgttagagaatggtatccttaagatgctggataaattaggaccgaagaaaatcatcatcgtttcttctgcaccgcagatacgtttccctgattgttatggtattgatatgtcgaaggttaaagacttcgttgcgttccgtgccatgcttgcgttattgaaagaaaccaagcaggaaaatcttctggaagatgtaaatgaaaaatgtaaatctgctattgccaacttaagcggtaacatggtaaaccatgtgaaggaattatatttacagttcccgtatgagcaggtaagtaaaaagattgcagagatcattacaccgaaagggtgtaacgccgagatcgaagtaatcttccagactattgaaggtttacacagagcttgtccgaaccacattggtgactggtatttcacaggtgattacccgacaacaggggggaaccgcgtagtgaataaagcattcatgtactacatggaaggtaagacagtaagagcctattag

SEQ ID NO: 132495 - protein, 630 aa, Cytophaga hutchinsonii ATCC 33406
MSDAIKHECGIALIRLRKPFSHYVEKYGTPYYGINKLYTLMEKQYNRGQDGAGIAVIKLDVPQGTRYISRYRSVDQQPIAEIFEKVNKKFRKAIRDHKDKINDAQWLLENVAFTGEVLMGHLRYGTHGNNDIENCHPFLRQNNWRSRSMVVAGNFNMTNVDELFNKLIELGQHPKEKVDTVTVLEKIGHFLDEENQFLFEKHKDKFSNSQVSTIIENDLDLQRVLMRSCKDFDGGYAMMGIAGHGAAFVARDPAGIRPAFYYADDEIVIVASERQAIKSAMEKISYEDIKEVQPGFALIIDREGNYEEKQFIDQLPKKSCSFERIYFSRGSDPQIYQERKQLGKILTPQILESIDYDIENTVFSYVPNTAETSFLGMVEGMEEYLARYRKKVISEGISGEELEKVLSLRPRIEKMVIKDAKLRSFITSDDVRQSFVANLYDTTHGVVRRGIDNLVIIDDSIVRGTTLENGILKMLDKLGPKKIIIVSSAPQIRFPDCYGIDMSKVKDFVAFRAMLALLKETKQENLLEDVNEKCKSAIANLSGNMVNHVKELYLQFPYEQVSKKIAEIITPKGCNAEIEVIFQTIEGLHRACPNHIGDWYFTGDYPTTGGNRVVNKAFMYYMEGKTVRAY

SEQ ID NO: 132496 - DNA, 1422 bp, Clostridium perfringens ATCC 13124
  CDS (1)..(1422): transl_table=11
atggatccacaaaatgataaattcaaagatgaatgcggagtttttggagttttcgcaaataaaccaatagatgttgcttctataaattattatggactttatgctcttcaacatagaggacaagaaagtgctggcattgcagtagcaaatggagaagatataaaagttcataaggggttaggtgttttaacagaagcctttgaagctgaagatttaaagagacttagagaatttaatggttatatatcaataggacatgttagatattctacagcaggagctaaaactgttgaaaatgcacaacctttagttagtaatactaaacttggtcctatatctactgctcataatggtaatttagttaatgcagatgtaataagaagtcttttagaggatgggggacaagttttccatactagtgttgattctgaagtaattacaagcttagttgctagaggagctaaaaaagggattgagagggctgtaattgatgctatatcagcagttaaaggttctttcgctatggtaataatgactaaggataagctaataggtataagagatccgcatggaattagacctttatgcttaggaaaatttgaagaaggatatatattaacttcagaaagttgtgctttagacacaattggagcagagtttgtgagagatataaaaccaggagaaatcgtggttatagataatgatgggattaaaagttatagatattcagaaaatactgtttgtcaaacctgtgcctttgaatatatatactttgcaagaccagattcagtaattgatggtttagatgttcaaacgacaagagttaagcaaggagaaatattatttaaagaatatccaatagatgctgatattgtggtagctgtaccagattcaggaataccagctgctatgggatatgctaaggcttcaggaattccttatgaggttggatttgtgaaaaatagatatataggaagaacatttatatcaccatcacaagaaattagggagagagctgtagctgtaaagcttaatcctttaaaagttaatgtaaatggaaagagagttattttaatagacgattctattgttagaggaacaacttccaaacatttaattgaatctttaagaagagctggtgctaaggaagttcattttctagttgcatcaccaatggttaaatatccatgttattttggcattgatacaccatacagaagtcagttaattggagcaagtagaagtgtagaagagattagagaaatgataggttgtgattctctaggatatttaagtttagaaggaatgtacgaaagttttgaaggtagaagaaatttctgcgtaggatgctttagtggggtttatccagttgcagcgcctatggaagctttagaggataatcttgaaagggtggagaattaa

SEQ ID NO: 132497 - protein, 473 aa, Clostridium perfringens ATCC 13124
MDPQNDKFKDECGVFGVFANKPIDVASINYYGLYALQHRGQESAGIAVANGEDIKVHKGLGVLTEAFEAEDLKRLREFNGYISIGHVRYSTAGAKTVENAQPLVSNTKLGPISTAHNGNLVNADVIRSLLEDGGQVFHTSVDSEVITSLVARGAKKGIERAVIDAISAVKGSFAMVIMTKDKLIGIRDPHGIRPLCLGKFEEGYILTSESCALDTIGAEFVRDIKPGEIVVIDNDGIKSYRYSENTVCQTCAFEYIYFARPDSVIDGLDVQTTRVKQGEILFKEYPIDADIVVAVPDSGIPAAMGYAKASGIPYEVGFVKNRYIGRTFISPSQEIRERAVAVKLNPLKVNVNGKRVILIDDSIVRGTTSKHLIESLRRAGAKEVHFLVASPMVKYPCYFGIDTPYRSQLIGASRSVEEIREMIGCDSLGYLSLEGMYESFEGRRNFCVGCFSGVYPVAAPMEALEDNLERVEN

SEQ ID NO: 132498 - DNA, 1584 bp, Rhodococcus sp. RHA1
  CDS (1)..(1584): transl_table=11
gtgaccagagccgatctgtcggtccacagtcctaatcttctctcttcgaacccgtccgacgaggacgagaacgagccccgcgaggaatgcggagtcttcggcgtctgggcgccgggagaggatgtggcgaaactcacctactacggactttatgctctgcagcaccgtgggcaggaagcggcgggcatcgccgttgccgacggctcgcaggtgctggtcttcaaggacctcgggttggtcagccaggtgttcgacgaacagaccctggcagcgatgccgggccacgtcgccgtcggtcactgtcgctactccaccacgggctcgaccacgtgggagaacgcgcagccgatcttccgcaccaccgccgcgggcagcggcatcgccctcgggcacaacggcaacctcgtcaatacggcggagctggcgcagcgcgcccgtgaagccgggctggtcaacgacaagcggcccggcggcgccacgtccgactcggacgtcgtcggggcccttcttgcgcacgccgccgccgacagcaccatcgagcaggccgccatgaagctcctgccgacattgcgcggcgcgttctgcctcaccttcatggacgagcacacgctctacgcggcccgtgacccgcacggcatccgtccgctgtgcctcggacgcctggaccgcggctgggtcgtggccagcgagacggccgcactcgacatcgtcggcgcgtccttcgtccgcgacatcgagcccggcgaactgctcgccatcgacgccgacggcgtccgctcctcccgttttgcgaaccccgagcccaagggctgcgtgttcgagtacgtgtacctggcccgtccggacagtgtcatcgccggacgttcggtgcattccacccgcgtcgagatcggccgtcgcctcgccaccgagcaccccgccgagggcgacctcgtcatcccggtccccgaatcgggcactccggccgcggtcggttacgcgcaggggtcgggcattccgtacggccagggtctgatgaagaacgcctacgtcggccgcacgttcatccagccgtcgcagacgatccgccagctcggtatccgcctcaagctcaacccgctcaaggaagtcatccgcggcaagcgcctcgtggtggtggacgattcgatcgtccgcggcaacacccagcgcgcgctcatccggatgctccgcgaggccggcgcactggagatccatgtccggatcgcgtcgccgccggtcaagtggccctgcttctacggcatcgacttcgcctccccggccgagctgatcgccaacggcgcgggcggcggcggcgagcccgggagcttcgacgagatgctcgaaggcgtgcgccgttccatcggcgccgacaccctcggctacatctccaccgaaggcatgatcgccgccaccgagcagcctgcgtcgcgactgtgcgcggcctgcttcgacggcacgtaccccatcgcgctccccacggagacgtcgatcggaaagaacgttctcgagggaatgctcgagagcgcggcaggcggtcccgcgacgcgggagaacgacaacgcgaacgccctcagtcggccgtag

SEQ ID NO: 132499 - protein, 527 aa, Rhodococcus sp. RHA1
MTRADLSVHSPNLLSSNPSDEDENEPREECGVFGVWAPGEDVAKLTYYGLYALQHRGQEAAGIAVADGSQVLVFKDLGLVSQVFDEQTLAAMPGHVAVGHCRYSTTGSTTWENAQPIFRTTAAGSGIALGHNGNLVNTAELAQRAREAGLVNDKRPGGATSDSDVVGALLAHAAADSTIEQAAMKLLPTLRGAFCLTFMDEHTLYAARDPHGIRPLCLGRLDRGWVVASETAALDIVGASFVRDIEPGELLAIDADGVRSSRFANPEPKGCVFEYVYLARPDSVIAGRSVHSTRVEIGRRLATEHPAEGDLVIPVPESGTPAAVGYAQGSGIPYGQGLMKNAYVGRTFIQPSQTIRQLGIRLKLNPLKEVIRGKRLVVVDDSIVRGNTQRALIRMLREAGALEIHVRIASPPVKWPCFYGIDFASPAELIANGAGGGGEPGSFDEMLEGVRRSIGADTLGYISTEGMIAATEQPASRLCAACFDGTYPIALPTETSIGKNVLEGMLESAAGGPATRENDNANALSRP

SEQ ID NO: 132500 - DNA, 1515 bp, Haemophilus somnus 129PT
  CDS (1)..(1515): transl_table=11
atgtgcggaattgtgggtattgttagccatagccctgtaaatcagtctatttataatgccttgacggtattgcaacatcgggggcaagatgcggctgggattatcacagtagatgaagaaaatcgttttcgcttacgaaaagcaaatggattggtaagtgatgtctttcagcaagttcacatgctacgtttacaagggaatgcgggagttggtcatgtgcgttatcctactgccggaagttccagtgtctctgaagctcaaccattttatgtaaattcaccttacggtttaactttggtgcataacggaaatttaacaaattcagaagagttaaaacaaaaactctttacctttgctcgccgtcatgtcaataccaattcggattcggaaattttgttaaatattttggctcatcatttggatcaaacaacacaccctttatctacgcaggatatttttgaggcagttagagctactcacaaagatattcgtggtgcttatgcttgtgttgcaatgatgattggttatggcatagttgcatttcgtgatccaaatggtattcgtccgttagtattaggaaaacgtgaagatgaggtaagcggtaaaacagagtatatgtttgcttctgaaagtatcgcgttagatattgctgactttgaatttgttcgtgatgtagcaccgggagaagccgtttatgttacttttgatggtcagttatatgcacaacaatgtgctgaaagtcctaagttaacaccttgtatctttgaatatgtttatttcgctcgtccggattcttatattgatggtgtctccgtttatgcggctcgtgttcacatgggagaaaacttaggacaaaaaattgcaaaagagtggaaagatttagatattgatgttgtgattcccattcctgaaacgtctaatgatattgcgttacaaattgcacatattttaaataaaccttatcgacaaggttttgtgaaaaatcgctatgtgggaagaacctttattatgccggggcaaactcagcgtgtaagtgcggtacgtcgtaagctcaataccatctcttctgaatttaaaggtaagaatgtgttgttggttgacgactctattgtgcgagggacgacttcgaaacagattgtcgatatggcaagagcagcaggagcaaataagatctattttgcctcagcagcaccggaaattcgttatccaaatgtgtatggtattgatatgcctactaaaaatgaattaattgcttatggacgagatgttcatgaaattgctaaactcattggtgtggataaacttatattccaagatcttgatgctttaaccagagctgttcagcaagaaaatccggcaattaaagattttgattgttctgtctttaccggtgtttatgttactggagatattacctcagcgtatttggatcaagttgccgatttacgtaatgacaaagcaaagaaaaagcgtgaaaaagatgccacgaatctcgaaatgcacaatgaagcttaa

SEQ ID NO: 132501 - protein, 504 aa, Haemophilus somnus 129PT
MCGIVGIVSHSPVNQSIYNALTVLQHRGQDAAGIITVDEENRFRLRKANGLVSDVFQQVHMLRLQGNAGVGHVRYPTAGSSSVSEAQPFYVNSPYGLTLVHNGNLTNSEELKQKLFTFARRHVNTNSDSEILLNILAHHLDQTTHPLSTQDIFEAVRATHKDIRGAYACVAMMIGYGIVAFRDPNGIRPLVLGKREDEVSGKTEYMFASESIALDIADFEFVRDVAPGEAVYVTFDGQLYAQQCAESPKLTPCIFEYVYFARPDSYIDGVSVYAARVHMGENLGQKIAKEWKDLDIDVVIPIPETSNDIALQIAHILNKPYRQGFVKNRYVGRTFIMPGQTQRVSAVRRKLNTISSEFKGKNVLLVDDSIVRGTTSKQIVDMARAAGANKIYFASAAPEIRYPNVYGIDMPTKNELIAYGRDVHEIAKLIGVDKLIFQDLDALTRAVQQENPAIKDFDCSVFTGVYVTGDITSAYLDQVADLRNDKAKKKREKDATNLEMHNEA

SEQ ID NO: 132502 - DNA, 1482 bp, Trichodesmium erythraeum IMS101
  CDS (1)..(1482): transl_table=11
atgactgataactgctcttcaaatacagaagaatttttcgtacattaccaaaaaatagataagccagaagaagcttgtggtgtttttgggatttatgccccagaagaagatgtaactaaacttacctactttggtttgtatgctctacaacatcgaggtcaagagtcagcaggtattgctacttttcaaggtgataaaatatatatacataaaggaatggggttagtatctcaggtctttaatgagtcaatcttagaacaattgcctggtgatataggaattggtcatactcgttattctactactggctctagtcgtattattaatgctcaacctactgttgttgaaactcgtttagggcaattagccttggcccataatggtaatcttgttaatacagcagaattaagggaaatgttaattgaatgtgggtgtagttttaacagcactacagattcagaaatgattgcattagcgatcgccacacatgtgaaagttggtaagagttggctagaagctgctattagtgcttttcatctatgtcaaggagcctttagtttaactattgccactcaagaaggtctaatgggagtgcgtgatccccatggaataagacctctggtgattggtactttagaaaatactaactcaaaaagatatgttcttgcttcagaaacttgtgcattagatattattggagcagaatatcttcgagatgttgaaccaggagaattagtttggataacagaaaaaggcatagcttctttccactggagtcaaaaaactcagaagaaactatgtatctttgaaatgatttattttgctcgccccgatagtatgatggaagggggtagtttatatagctacagactcagaattggacgtcagttagcaagagaatcttttataagcgcagatatggtaataggcgttcctgactctggtattccagcagcaatcggtttttcccaagaatcaggtattctctatgcagaaggattaattaaaaatcgctacgttggccgtacctttattcaaccaactccgcacatgagggaatcaggtatccgcatgaaacttaaccccctcaaagatgttttagaaggcaagcgagtaattatagttgatgattccattgtacgtggtaatactagcaagaaaattgttaaggctttaagagataatggtgccacagaagtccacatgagaatttcttccccaccagtcacgcacccctgtttttatggaattgacacagataaccaggaacagttaataggggcaacaaaatcagtcgcagaaattgctgaacaaataggtgttgactctctagcatatttgagttgggaagggatgttgaaatcaacacaagaggaccccaacagtttttgttctgcctgttttactggcaactatcctattcctttaccagaaaaactgaagcgttctaaattaatattggaaaatcaagttaaagtttaa

SEQ ID NO: 132503 - protein, 493 aa, Trichodesmium erythraeum IMS101
MTDNCSSNTEEFFVHYQKIDKPEEACGVFGIYAPEEDVTKLTYFGLYALQHRGQESAGIATFQGDKIYIHKGMGLVSQVFNESILEQLPGDIGIGHTRYSTTGSSRIINAQPTVVETRLGQLALAHNGNLVNTAELREMLIECGCSFNSTTDSEMIALAIATHVKVGKSWLEAAISAFHLCQGAFSLTIATQEGLMGVRDPHGIRPLVIGTLENTNSKRYVLASETCALDIIGAEYLRDVEPGELVWITEKGIASFHWSQKTQKKLCIFEMIYFARPDSMMEGGSLYSYRLRIGRQLARESFISADMVIGVPDSGIPAAIGFSQESGILYAEGLIKNRYVGRTFIQPTPHMRESGIRMKLNPLKDVLEGKRVIIVDDSIVRGNTSKKIVKALRDNGATEVHMRISSPPVTHPCFYGIDTDNQEQLIGATKSVAEIAEQIGVDSLAYLSWEGMLKSTQEDPNSFCSACFTGNYPIPLPEKLKRSKLILENQVKV

SEQ ID NO: 132504 - DNA, 1506 bp, Synechococcus sp. CC9311
  CDS (1)..(1506): transl_table=11
atgcagaatcttgagacccatccgaagtcgaggcggccggtgcatcagctcgagatagagcgtcccgatcgcatggaagaagcctgcggtgttttcgctgttcaggccctggaacagccggtagcgaacctggtgtacttcggtctttatgccctgcagcatcggggtcaggaatccgctggcattgctgttttcaacgaaggaaaggtcaggctccacaaggacatgggcttggtgagccaggtgtttgatcaggatgtgctcgagcgcatgcccggtggtttagccgtgggccataaccgttattccaccaccgggagtagcaaggtttgcaacgcccagcccgtggtcctgatgacccgtctcggaccctttgcgctggcgcataacggcaatcttgtgaatgcagcagagctgcgagctcaggtggatgacggtgaggtggagttcacgtccacgaccgattcggagttgatcgcatatgcggttcagcaggctgtggatgggggcttggattggactgaggggatcaaagtggccgcatcccagtgccagggggctttcagtttggtgattggaacctcagatgccctgtacggcttgcgtgatggttatgggattcgcccgctggtgtacggctacctcggggagcaagatcttgggcactgggttcttagtagtgaaacctgtgggctcgacatcattggttctccgttcgttgctgatgttgaacctggcgaattagtggtgtttcgttgcggtgatcccacaccagaacgtcatcgctggattgaacccaccacacgcatgtgcgtgtttgaaatgatctatttcgctcgccctgatagtcgtttctttggtgaatcgctgtacagctatcgacagcgcatcggccagatcctggcccgtgaatccgctgttgatgcggaccttgtgattggtgttcctgattccggaattccagctgcgatcggttattcccagagcagtggcgttccctatgccgatggactgatcaaaaatcgctacgtcggccgaaccttcatccagccaacccaggccatgcgtgaggctgggattcgcgtgaagctcaatccacttccagatgttttaagtggcaaaagggttctggtgattgatgactcgatcgttcgtggaaccaccagtaaaaaattggttcaggctctccgtgatgcaggtgccattgaggtgcacatgcgcatcagttcaccacccgtaacgcatccctgcttctacggcatcgataccgatacacaggatcaattgatcgctgctcgactcacgttgcaagagattgaggagcatctcaaggtggattcgctggcttatctcagcaaggaagggatggtggaagctgcgcatgctcagtctgaacatttctgtacagcttgcttcgatgggaactatccggttccgatggacgcctcgatcaaggcgagcaaattgatgcttgaaccatcaggggtggcggcaacgaatctctga

SEQ ID NO: 132505 - protein, 501 aa, Synechococcus sp. CC9311
MQNLETHPKSRRPVHQLEIERPDRMEEACGVFAVQALEQPVANLVYFGLYALQHRGQESAGIAVFNEGKVRLHKDMGLVSQVFDQDVLERMPGGLAVGHNRYSTTGSSKVCNAQPVVLMTRLGPFALAHNGNLVNAAELRAQVDDGEVEFTSTTDSELIAYAVQQAVDGGLDWTEGIKVAASQCQGAFSLVIGTSDALYGLRDGYGIRPLVYGYLGEQDLGHWVLSSETCGLDIIGSPFVADVEPGELVVFRCGDPTPERHRWIEPTTRMCVFEMIYFARPDSRFFGESLYSYRQRIGQILARESAVDADLVIGVPDSGIPAAIGYSQSSGVPYADGLIKNRYVGRTFIQPTQAMREAGIRVKLNPLPDVLSGKRVLVIDDSIVRGTTSKKLVQALRDAGAIEVHMRISSPPVTHPCFYGIDTDTQDQLIAARLTLQEIEEHLKVDSLAYLSKEGMVEAAHAQSEHFCTACFDGNYPVPMDASIKASKLMLEPSGVAATNL

SEQ ID NO: 132506 - DNA, 1515 bp, Shewanella sp. MR-4
  CDS (1)..(1515): transl_table=11
atgtgtggtatcgtcggaatagttggccaatcatcggttaatcagaccatttatgacgcactgaccgtgcttcagcacagaggtcaggatgcggcaggtattgtgaccgttgatcgtggtgctttcagactacgtaaagccaatggtctggtcaaagatgtatttgaagtcaaacacatgcagcgcctacagggcaacgctggtattggccacgtacgttatcctactgcaggcagttccagcgcgtcagaagcgcagcctttctatgttaactcgccatttgggatttcattagcccataacggtaacttaaccaacacggttgaattagctgaaggcctgatcaaaaagcgtcgccatgtgaacaccacatccgactcagaagtattattgaacctgctggccgatgagctgcaaaaaaccaccagcttgatgctgaccgccgatgaggtgttcgacactgttgccaaggtgcacgagcaagcccgtggcgcctacgcggtagtggccatgattatcggtcaaggtctggtggcctttcgcgatcctttcggtattcgtcctctggtattaggtaagcacgaaaccccaaccggtactgagtacatggtggcctctgagagcgtggcgctcgatgccgtcggttttgaagtgatgcgcgatgtggcaccaggcgaggcaatttatatctctctcgatggtcagctttacactcgccaatgcgccaaagagccaagctactcaccttgtatcttcgaattcgtgtattttgcgcgtccagattcgactatcgacaacgtctctgtttatgccagccgcgtaaacatgggtgccaagctcggtgaaaagatcaaaaaagaatggtacgaccatgatatcgacgtggtgatcccgattcctgaaacttcatgcgatatcgcattagaaatcgcccgttgcatggacttaccttaccgccaaggttttgtgaagaaccgttatatcggccgtacctttattatgcctggtcaacaggagcgtaaaaaatcggtacgccgtaaactcaatgccatcaacactgagtttaaaggtaagaacgtgctgttagtggatgactctatcgttcgtggtaccacctcagaacaaatcattgagatggcgcgtgaagcgggtgcgaagaaagtgtactttgcctcggcggcaccggaaattcgtttcccgaacgtttacggtatcgatatgccaacctcgaatgaactgattgcccacggtcgtgatgccgacgaaattgctaagctgattggcgccgatggcattatcttccaaaatctgccggatctggttgaagcggtgagaatggaaaacccagagatcaaacgtttcgaaacctcagtgttcgacggtcactacatcactaacgatgttgaccaatcttacctcgaccacttaactcagttacgtaacgacgatgccaaagccgaccgtaataaagacattggcactaacttagagttacacaacgtttgccatccataa

SEQ ID NO: 132507 - protein, 504 aa, Shewanella sp. MR-4
MCGIVGIVGQSSVNQTIYDALTVLQHRGQDAAGIVTVDRGAFRLRKANGLVKDVFEVKHMQRLQGNAGIGHVRYPTAGSSSASEAQPFYVNSPFGISLAHNGNLTNTVELAEGLIKKRRHVNTTSDSEVLLNLLADELQKTTSLMLTADEVFDTVAKVHEQARGAYAVVAMIIGQGLVAFRDPFGIRPLVLGKHETPTGTEYMVASESVALDAVGFEVMRDVAPGEAIYISLDGQLYTRQCAKEPSYSPCIFEFVYFARPDSTIDNVSVYASRVNMGAKLGEKIKKEWYDHDIDVVIPIPETSCDIALEIARCMDLPYRQGFVKNRYIGRTFIMPGQQERKKSVRRKLNAINTEFKGKNVLLVDDSIVRGTTSEQIIEMAREAGAKKVYFASAAPEIRFPNVYGIDMPTSNELIAHGRDADEIAKLIGADGIIFQNLPDLVEAVRMENPEIKRFETSVFDGHYITNDVDQSYLDHLTQLRNDDAKADRNKDIGTNLELHNVCHP

SEQ ID NO: 132508 - DNA, 1515 bp, Alkalilimnicola ehrlichei MLHE-1
  CDS (1)..(1515): transl_table=11
atgtgtggcgtgattggaatggtggcccgggaaccggtcaaccaggccctgtacgacggactgacggtgttacagcaccgggggcaggatgccgccggcatcatgacctacgataatggccgcctgcacttgcgcaaggacaacgggctggtccgcgacgtgtttcgaacccggcacatgaaacagctgttcggtaacatggggatcggccatgtgcgctatcccaccgccggctgcgacacctcggccgaggcgcagcccttttacgtcaacagcccctacggcatctcgctcgcccacaacggcaatctgatcaatgccgaggctctgaagcgggagttgttcgaatcggacctgcgccatatcaacaccgagtccgactcggagatcctgctcaatgtttttgcccatgaactgggtcgttccggcaagatgcggatcagcccggcggacatctttgatgccgtcggcgaggtccaccggcgctgcaagggggcctacgccgtggtctccatgatcaacggctacggtatcctcggcttccgggaccccaacgggatccgccccatctgcttcggggagcggaccaccgagatgggcaaggagtacatcattgcctctgagagcgtggccctggacgtgctgggcttcacccgggtgcgcgatattgcccccggcgaggcgatcttcatcgacatggacggggtcctgcacacccgccagtgtgccgacaacccggtctcctccccctgtatcttcgaatacgtctatctggcccggcccgataccatgatcgatgaagtggccgtctataaatcgcggctgcgaatgggtgagaagctggcgggcaaggtggagcgtgagtggccggatcacgatatcgatgtggtgatccccatccccgataccagccgcaccgtggccctggagatggccaatcacctgggtgtgacctaccgcgagggcttcatcaagaatcgctacatcggtcgcaccttcatcatgcccggccagacgcagcgcaagaaatcggtgcgccagaagctcaatcccatccacctggagttccgggacaagaacgtgctgctggtggacgactccattgtccgcggcaccacctgtcagcagttggtgcagatggcccgcgatgccggtgcgcgcaaggtctacttcgcgtcggcggccccgccggtgcgctaccccaacgtctacggtatcgatatgccctccgttgaggaactcatcgcccacaaccggacggtggagcagatcgcgaaggtgatcggcgccgaccggctgatcttccaggatctggacgatctgaaagaggcggtgcattacggcaaccgggagatcgaccggttcgattgctcctgcttcgacggcgagtatgtgaccggcgacgtggacaacgattatctgcgccggcagcaggcagagcggggtgatgacgcgcgcagccgccgtctcgccaccggtgaggcgggcgcggtcggtctgcacaaccaccgctga

SEQ ID NO: 132509 - protein, 504 aa, Alkalilimnicola ehrlichei MLHE-1
MCGVIGMVAREPVNQALYDGLTVLQHRGQDAAGIMTYDNGRLHLRKDNGLVRDVFRTRHMKQLFGNMGIGHVRYPTAGCDTSAEAQPFYVNSPYGISLAHNGNLINAEALKRELFESDLRHINTESDSEILLNVFAHELGRSGKMRISPADIFDAVGEVHRRCKGAYAVVSMINGYGILGFRDPNGIRPICFGERTTEMGKEYIIASESVALDVLGFTRVRDIAPGEAIFIDMDGVLHTRQCADNPVSSPCIFEYVYLARPDTMIDEVAVYKSRLRMGEKLAGKVEREWPDHDIDVVIPIPDTSRTVALEMANHLGVTYREGFIKNRYIGRTFIMPGQTQRKKSVRQKLNPIHLEFRDKNVLLVDDSIVRGTTCQQLVQMARDAGARKVYFASAAPPVRYPNVYGIDMPSVEELIAHNRTVEQIAKVIGADRLIFQDLDDLKEAVHYGNREIDRFDCSCFDGEYVTGDVDNDYLRRQQAERGDDARSRRLATGEAGAVGLHNHR

SEQ ID NO: 132510 - DNA, 1452 bp, Hyphomonas neptunium ATCC 15444
  CDS (1)..(1452): transl_table=11
atggtctttttcgatcatgatgacgataaaccccacgaagaatgtggagttttcggagtctttggcagccttgaagcaagtctgctgacagccctggggcttcatgcccttcaacaccgaggacaggaagcggccggcatcgtcagctatgacggcaagcgcttctcctccgagcgccatatgggccttgtcggtgagagtttcggcggagaccttcgccagcgtcttcccggccatgccgccatcggccacaaccgatactccacgcagggccgcccgatggcccgcaacatccagccgatctttgcagaccttgataccggcggcttcgccgtggcgcataacggcaacctgaccaatgcccgcatcctgcgccaggaactggtgcgcaatggcgcgatcttccagtccacgatggacaccgaagtgatcctgcacctggtcgcccgcagcccgaaaaagaagttcgtcgagcgcctcgtcgatgcgatgcaccagatcgaaggcggctacgctctcgtcggcattaccggcaagaagctgatcggcgcgcgcgaccccatcggcctgcgtccgttgatcctcggccgtcatggcaaatcctatgtgctcgcctcggaaacctgcgcgctcgatattatcggcgcagaatttgtccgcgagatcgagaatggcgaagtggtcgtcatcagtgaggaaggcatcgaatcgatccgcgccttcccgccgcgcccgcccagcccgtgcattttcgagtatgtctacttcgcccgcccggacagcttcattcagggccgctcggtttatgaagtgcgccgccgcatgggcaaccagcttgcactcgaaacgcatgccgacgccgatgtgatcgtgcctgtgccagactccggcgtgcccgccgcgctcggcttttccgaggcctccggcattcccttccagatgggcatcatccggaaccattatgtcggccggactttcatccagcccacccatacgggccgccagaccgctatctccaaaaagcacagccccaaccgcgccgtgcttgagggcaagcgtgtgatcctggtggacgattccatcgtgcgcggcaacacgtcgaagaaaatcgtgcagatggtgcgcgaagccggcgcccgcgagatccacttccggtcggccagcccgccgatcgtcaacccggatttctacggcatcgacatggccgcgaaatcggaactcttcgcggccacccatacgcatgaagagatggtccgtgagctgaaggtggaaagcctcggcttcctgtctgtccccggcctctacaaagctattggcgagccggtccgcaatggcatgcagccgcaatttgccgaccattgcttcaccggcgactacccgacccagctgctcgaccatcagcgcgcccaggcagacaaagagcgtcagctctccctgctggacgatgtgtga

SEQ ID NO: 132511 - protein, 483 aa, Hyphomonas neptunium ATCC 15444
MVFFDHDDDKPHEECGVFGVFGSLEASLLTALGLHALQHRGQEAAGIVSYDGKRFSSERHMGLVGESFGGDLRQRLPGHAAIGHNRYSTQGRPMARNIQPIFADLDTGGFAVAHNGNLTNARILRQELVRNGAIFQSTMDTEVILHLVARSPKKKFVERLVDAMHQIEGGYALVGITGKKLIGARDPIGLRPLILGRHGKSYVLASETCALDIIGAEFVREIENGEVVVISEEGIESIRAFPPRPPSPCIFEYVYFARPDSFIQGRSVYEVRRRMGNQLALETHADADVIVPVPDSGVPAALGFSEASGIPFQMGIIRNHYVGRTFIQPTHTGRQTAISKKHSPNRAVLEGKRVILVDDSIVRGNTSKKIVQMVREAGAREIHFRSASPPIVNPDFYGIDMAAKSELFAATHTHEEMVRELKVESLGFLSVPGLYKAIGEPVRNGMQPQFADHCFTGDYPTQLLDHQRAQADKERQLSLLDDV

SEQ ID NO: 132512 - DNA, 1491 bp, Rhizobium leguminosarum bv. viciae 3841
  CDS (1)..(1491): transl_table=11
atgaaccagtcccattccttcccgaccgacgatccgctcgacggagatacgctgcatgaagaatgcggggttttcggaattttgggacatcccgatgccgccgcgctcacggctctcggcctgcatgccttgcagcaccgcggacaggaagcggccggcatcgtctccttcgacggcaagcgcttttatcaagagcgccacatgggtctcgtcggtgaccactataccaatccgatgacgcttgcccgcctgcccggcagcattacgatcggtcatacccgctactcgacaaccggcgaagtggccatgcgcaatgtgcagccgctctttgccgaactggaagaaggcggcatcgccattgcccataacggcaatttcaccaacggcctgacgctgcgccgccagatcatcgcgaccggcgccatctgtcagtcgacctccgataccgaagtcgtcctccacctcatcgcccgttcccgccatgcttccacgtccgaccgcttcatcgacgccattcgtcagatggaaggcggctattcgatgctcgccatgacgcgcaccaagctgattgccgcgcgcgacccgaccggcatccgcccgctggtcatgggcgaactcgacggcaagccgatcttctgctcggagacctgcgcgctcgacattatcggcgccaagttcatccgcgacgttgagaacggcgaagtcgtcatctgcgaaatccagcctgacggctcgatcagcatcgatgcgcgcaagcccagcaagccacagccggagcgcctctgcctgttcgaatatgtctatttcgcccgcccggattcggttgtcggcggccgcaacgtctatacgacgcgcaagagcatgggcatgaaccttgccaaggaatcgcccgtcgatgccgacgtgatcgtgccggtgccggatggcggcacacctgcggcgctcggctatgctcagcagagcggcattcccttcgaatacggcatcatccgcaaccattatgtcgggcgcaccttcatcgagccgacgcagcagattcgcgccttcggcgtgaagctgaagcattcggccaaccgggcgatgatcgaaggcaagcgcgtggtgctggtcgatgattccatcgtgcgtggcacgacgtctctcaagatcgtccagatgatccgtgaagccggggcgcgcgaagtccatgtccgcgtcgcgagcccgatgatcttcttcccggatttctacggcatcgacacgcctgacgcagacaagctgctggcaaaccaatatgccgatgtcgaagccatggcgaaatatatcggtgcggattcgctcgccttcctgtcgatcgacggcctctatcgcgccgttggcggcgaggatcgcaatccggtccggccgcagttcaccgaccattatttcaccggcgactatccgacccgcctgctcgacaagaacggcgagtccatgggcaacaagatttccatgcttgccagcaacggctga

SEQ ID NO: 132513 - protein, 496 aa, Rhizobium leguminosarum bv. viciae 3841
MNQSHSFPTDDPLDGDTLHEECGVFGILGHPDAAALTALGLHALQHRGQEAAGIVSFDGKRFYQERHMGLVGDHYTNPMTLARLPGSITIGHTRYSTTGEVAMRNVQPLFAELEEGGIAIAHNGNFTNGLTLRRQIIATGAICQSTSDTEVVLHLIARSRHASTSDRFIDAIRQMEGGYSMLAMTRTKLIAARDPTGIRPLVMGELDGKPIFCSETCALDIIGAKFIRDVENGEVVICEIQPDGSISIDARKPSKPQPERLCLFEYVYFARPDSVVGGRNVYTTRKSMGMNLAKESPVDADVIVPVPDGGTPAALGYAQQSGIPFEYGIIRNHYVGRTFIEPTQQIRAFGVKLKHSANRAMIEGKRVVLVDDSIVRGTTSLKIVQMIREAGAREVHVRVASPMIFFPDFYGIDTPDADKLLANQYADVEAMAKYIGADSLAFLSIDGLYRAVGGEDRNPVRPQFTDHYFTGDYPTRLLDKNGESMGNKISMLASNG

SEQ ID NO: 132514 - DNA, 1470 bp, Pediococcus pentosaceus ATCC 25745
  CDS (1)..(1470): transl_table=11
atggcagctgaattaaagggtctaaacgaagaatgcggtgtttttggtatttggaatgattcagaagctgcccaacggacctacttcggacttcacagcttacaacatcgaggccaagaaggtgctggtattgtcgttcgtaatcaagaaggacagttgaaaattcataaaggaaaggggcttttggcagatgtatttagatgtcccgatgatttggcacagctaattgggccgagtgcgattggtcatgtgcgctatggaacagctggaaaccgaggaattgaaaatatccaaccgttacttttccactacttacagggggatgtggcgatggcccataatggtaatttaaccaatgcagttagtttacgacgcgaattagaaaaaagtggtgctacttttcaatctaattctgatacggaagtactaatgcatttaattcagcatcaaaaaggtccaacttttattgaaaaattaaaagcgagtttaaaacaaattcaaggtggatttgcttacttaatccttaccaaagatgcactgtacgcggcccttgatccgaatggttttcggcccttagtaattggaaaattagctaacggttcgtatgttgttgctagtgaaacctgtgctttagatgcggtcggagcaaccttggttcgaaatgttgaaccgggacagttagttcaaattgatcatcatgggctccaaattagtaattttactactaaaacccagttatcaatttgttcgatggaatacatttattttgcgcgacccgattcaaatctttatggcgttaatgttcatctcgctcgtcaacggatgggtcaacgattggcaaaagaaaaccccattaaggtcgatatggtggtgggggtgccgaactcttcgttatcagcagcatctggagtggccgaacaactaggcgttcccaatgaaatgggattaattaaaaatcaatatagtagtaggacttttattcaaccgacccaagcactacgtgaacagggagtgaagatgaaattatctgcattaaaagcagtaattgcggggaaagatgtggcattagttgacgattcaatcgtgcggggtaccaccagtcagtatattgtgaaaatgttaaaaaatgcaggagctaagtcggtgcatttgatgataagttctccaccacttaaatatccatgtttttatggaattgatattgaacatacacgtgaattgatggctgctaattatacggtaagtgagatgtgtcagaaaattggagcagattcactgcattttttgagcctgccaggtttaattgaggcgattggtttacatcaagatgcccctaatgatggcttatgtgtagcgtattttgatggtaaatatcccacccccctttatgattatgaaaaagattttgagatccctaaaacagctaacgactttacattatcagcaatggcccaagtggaggaaaaataa

SEQ ID NO: 132515 - protein, 489 aa, Pediococcus pentosaceus ATCC 25745
MAAELKGLNEECGVFGIWNDSEAAQRTYFGLHSLQHRGQEGAGIVVRNQEGQLKIHKGKGLLADVFRCPDDLAQLIGPSAIGHVRYGTAGNRGIENIQPLLFHYLQGDVAMAHNGNLTNAVSLRRELEKSGATFQSNSDTEVLMHLIQHQKGPTFIEKLKASLKQIQGGFAYLILTKDALYAALDPNGFRPLVIGKLANGSYVVASETCALDAVGATLVRNVEPGQLVQIDHHGLQISNFTTKTQLSICSMEYIYFARPDSNLYGVNVHLARQRMGQRLAKENPIKVDMVVGVPNSSLSAASGVAEQLGVPNEMGLIKNQYSSRTFIQPTQALREQGVKMKLSALKAVIAGKDVALVDDSIVRGTTSQYIVKMLKNAGAKSVHLMISSPPLKYPCFYGIDIEHTRELMAANYTVSEMCQKIGADSLHFLSLPGLIEAIGLHQDAPNDGLCVAYFDGKYPTPLYDYEKDFEIPKTANDFTLSAMAQVEEK

SEQ ID NO: 132516 - DNA, 1611 bp, Leuconostoc mesenteroides subsp. mesenteroides ATCC 8293
  CDS (1)..(1611): transl_table=11
atggaaactaaatgcggagtaacgatgatgaacgaacaaaaaaatgaaacatcacgtcttaatgtgcgtagtttgaatgaagaatgtggcatttttggcgtctggggtcgatccgatgcggcgcaattaacatactatggactacatgcattacaacatcgtggtcaagagggtgctggtattgttgctaacaataatggtcatttgtggcaagaacgtggtttaggtctactgagtgatgtttttcgagatacatctcgcattgaagcattagctgggaaaagtgctattggtcatgtgcgttatgccacagctggatctaatggtttagaaaacatccaacctttgatggtgaattttcatgacatgcaaatctcattagcgcacaatggtaatttgacaaatgcccttacattacgtgaaaatttggaagaagaaggggccatttttcaatcatcttctgattctgaaattttattgcatttaattcgccgatctaaagcagacaaatttattgataaactaaaagaagctttaaacattgtacatggtggatttgcgttcttgctattgacgccacatggaatgtttgctgcgttggatccacacgcgtttcgaccttttgtcattggtcaaatgccggatggtcactacattgttacatctgaaacagctgctattgaagttgttggtgccaagttcgtacgcgatgtacaacctggcgaactaatcgcgattgacgacaatggtttaaccatcgatacatatactgataaaaccactttaaatattgactcgatggaatatatctattttgctcgccctgattcaatgatttatggtgtgaatgtacacaaggcacgtaagcggatgggggcagctttagcagcagaacagccggttccggaagcagacattgttgttggcattccgaactctagtttgagtgcagccgctgggtttgctgaagccagtggtttaccaaatgagatggggttagtaaaaaatcaatacattgcgcgtacatttattgaaccaacacaagataaaagagaacgagccgttcgtatgaaattaagcgctgtccgtgacgttgttgttgataaaaatgtcgttttgatagatgactcaattgttcgtggaacaacctctatgttcatcgtgcgaatgctgaaagaagctggtgctaaatcagttcatgtaagaattgcgagtcctatatttaaatttccgtcattttatggcattgatatgcaaacaacagaagaactgatgggcgcaaatcattcattgcttgaaatgacaaaaatgattgaagctgattcacttggatttttgtcagttgatgcactggttaaggcaattgacttaccatatgatggagaaggaactgggctaacgaccgcttactttgatgggcattatccaagtccaatttatgattataaagccagtttagaccgatttgttcgttctggagaagttgatttcgttcctgaaccagtaaccacttatcatccccgtcaagtggcttcattgcgacatcaggagcttttgtcagatggcactatccatttagattcacaaacaattcagggggtggaaatatga

SEQ ID NO: 132517 - protein, 536 aa, Leuconostoc mesenteroides subsp. mesenteroides ATCC 8293
METKCGVTMMNEQKNETSRLNVRSLNEECGIFGVWGRSDAAQLTYYGLHALQHRGQEGAGIVANNNGHLWQERGLGLLSDVFRDTSRIEALAGKSAIGHVRYATAGSNGLENIQPLMVNFHDMQISLAHNGNLTNALTLRENLEEEGAIFQSSSDSEILLHLIRRSKADKFIDKLKEALNIVHGGFAFLLLTPHGMFAALDPHAFRPFVIGQMPDGHYIVTSETAAIEVVGAKFVRDVQPGELIAIDDNGLTIDTYTDKTTLNIDSMEYIYFARPDSMIYGVNVHKARKRMGAALAAEQPVPEADIVVGIPNSSLSAAAGFAEASGLPNEMGLVKNQYIARTFIEPTQDKRERAVRMKLSAVRDVVVDKNVVLIDDSIVRGTTSMFIVRMLKEAGAKSVHVRIASPIFKFPSFYGIDMQTTEELMGANHSLLEMTKMIEADSLGFLSVDALVKAIDLPYDGEGTGLTTAYFDGHYPSPIYDYKASLDRFVRSGEVDFVPEPVTTYHPRQVASLRHQELLSDGTIHLDSQTIQGVEI

SEQ ID NO: 132518 - DNA, 1419 bp, Solibacter usitatus Ellin6076
  CDS (1)..(1419): transl_table=11
atgttcgataaatttcacgatgaatgcggcgtggtcgccatttacggccaccccgaggcttctaaacttgcgtatctcgggctctactcgctccagcatcgcgggcaggagagcgccggcatctgcacgtcggatggcatcgaggtccacacccacaagacgatggggcacgtggcggatatcttcaccagcgatgtgctggcaacgctgccgggcccgctcgcgatcggacacacacgctattccaccgccggcgacacggtgctgctgaacgcccagcccttctcggtggattgcaacaagggcaaggtcgcgatcgcgcacaacggcaacatcaccaacgcgacggaactccgcaaagacctggagcggcgcggcgcgatcttccaggcgtcgagcgacaccgaagtcgtgctgcacctgatggcgcactcttcggaacgcacgctggccggggcgctgcgcgacgcgctgctgcaactggagggagcattctccctggtatttctggcggaggaccgcgtcattgtggcgcgcgatccgcacggcttccgtccgctcgccatgggcgagatggaggtgtcgggcggacgcaagtgcaccgtcttcgcctccgagacctgcgccttcgacctgatcggagcggtctatttgcacgatgtagagccaggtgaaatggtaatcgtgggacccgaaggggtgacgcgtgaacgctacgcgccggcgcaggcgcggtcgcaatgcgttttcgaacacgtttatttcgcacgccccgattccatcgtcttcggacgcgcagtggaagaatcgcgggagaatttggggcgcctgctggcgcgcgaatgtccagcggatgcagacctggtggttcccgtgccggattccggcgtggccgccgcgatcggatatgccgatgaatcgggacttcccttccgccaggcgctgatccgcaatcattatgtgggccgcacgttcatcgagccctcgcaggcgatccgcgatttcggagtcaagttgaagctcaacccggtgcggcacctgctgcagggtaagcgggtcgtgctggtggatgattcgatcgtgcgcggtactaccagccgtaagatcgtccgcatggttcgccaggccggcgcgcgcgaagtgcatctgcgcatctcctgtccgcccacgatttcgccctgcttctatggcgtcgatacgccgacgcgcagcgaattgatcgcgtccaatcacagcgtggaagagatccgccgcttcgtggaagccgactcggtcggctatctttcgatcggctccctgcgtaaagcggtcggcgatgatgagaagcacgaatactgctacgcgtgctacacaggcgactacccgaccgagctcgtgaacatcgaagagctcattaccgcccgccagaagcgcaagtag

SEQ ID NO: 132519 - protein, 472 aa, Solibacter usitatus Ellin6076
MFDKFHDECGVVAIYGHPEASKLAYLGLYSLQHRGQESAGICTSDGIEVHTHKTMGHVADIFTSDVLATLPGPLAIGHTRYSTAGDTVLLNAQPFSVDCNKGKVAIAHNGNITNATELRKDLERRGAIFQASSDTEVVLHLMAHSSERTLAGALRDALLQLEGAFSLVFLAEDRVIVARDPHGFRPLAMGEMEVSGGRKCTVFASETCAFDLIGAVYLHDVEPGEMVIVGPEGVTRERYAPAQARSQCVFEHVYFARPDSIVFGRAVEESRENLGRLLARECPADADLVVPVPDSGVAAAIGYADESGLPFRQALIRNHYVGRTFIEPSQAIRDFGVKLKLNPVRHLLQGKRVVLVDDSIVRGTTSRKIVRMVRQAGAREVHLRISCPPTISPCFYGVDTPTRSELIASNHSVEEIRRFVEADSVGYLSIGSLRKAVGDDEKHEYCYACYTGDYPTELVNIEELITARQKRK

SEQ ID NO: 132520 - DNA, 1431 bp, Magnetococcus sp. MC-1
  CDS (1)..(1431): transl_table=11
ttgtttgatcctaccgacgaacattttcatgatgagtgtggcgtgtttggtgtttacaaccatgccgaagccgccaatttgacctatctgggtctttacgctttgcagcaccgggggcaggagtccggtggcatcgtctcggtgcaagatcgcatctttcacaccacccgtggtcagggcttggtggcagacgttttcaaacagagagagttggacgccctggagggggataaggccatcggtcatgtgcgctactccaccaccgggggtagtgccaacagccgtaacctacaaccgctggtggtggataccgccgacggtggtttggccattgcccacaacggtaacttggtcaacggtaccgagatgcgccgcatgctggaacgtcgcggctcgatctttcaatccaccatggataccgaagtcattgtgcatttgaccgcgctatcgcgggagaacaccttttcggatcggctggtggaggcgctcaaacaggtacagggtgcctatgccttggtggcgatggatgagaaccagatcattgtggtgcgtgacccccacggtctgcgcccgctggtactgggcaaggtgggcgagaagggcattgtggtctcgtcagaaacctgtgcccttaatctgatcgaggctcagttctggcgggatgtggaacccggcgaaatggtggtcattagccccgacggcatacgctcttactttccattccaaaaacagaagcgctctttttgcgtttttgaatatatctactttgcccgtcctgattctaacctggatggcatcaacgtctataatgcgcgtaaggcgattggtgctaaattggcggaagagtcaccggtagaggccgatgttatcattccggtgccggactctggggtgccatcggcgttgggtttttcccaggcgtcgggcataccctttgagctgggtattatccgtaaccactatgtgggacgtacctttatcgaacctcagcagcagattcgccattttggggtaaagattaagctcaatgccaacccccacatttttaaaggcaagcgggtggtattggtggatgattcggtggtgcggggtaccaccagccgtaaaattgttaaaatggtgcgggctgcgggtgcccgcgaggtgcatgtgcgcatctcttcgccccccaccaccaacccctgcttttatggcattgataccccaactcgacaggagctgttggcctctagccatactgtgagcgagatgtgcagctacattaccgcagactccctctgttatatctcccttgagggtctctacagcgccctgaatgccaaacgggtggactattgtgatgcctgttttagtggggagtatccgatcccttttcccaatcaagtgggggatcaacagctaaccttgctgaaagagtccttctataaataa

SEQ ID NO: 132521 - protein, 476 aa, Magnetococcus sp. MC-1
MFDPTDEHFHDECGVFGVYNHAEAANLTYLGLYALQHRGQESGGIVSVQDRIFHTTRGQGLVADVFKQRELDALEGDKAIGHVRYSTTGGSANSRNLQPLVVDTADGGLAIAHNGNLVNGTEMRRMLERRGSIFQSTMDTEVIVHLTALSRENTFSDRLVEALKQVQGAYALVAMDENQIIVVRDPHGLRPLVLGKVGEKGIVVSSETCALNLIEAQFWRDVEPGEMVVISPDGIRSYFPFQKQKRSFCVFEYIYFARPDSNLDGINVYNARKAIGAKLAEESPVEADVIIPVPDSGVPSALGFSQASGIPFELGIIRNHYVGRTFIEPQQQIRHFGVKIKLNANPHIFKGKRVVLVDDSVVRGTTSRKIVKMVRAAGAREVHVRISSPPTTNPCFYGIDTPTRQELLASSHTVSEMCSYITADSLCYISLEGLYSALNAKRVDYCDACFSGEYPIPFPNQVGDQQLTLLKESFYK

SEQ ID NO: 132522 - DNA, 1515 bp, Shewanella sp. ANA-3
  CDS (1)..(1515): transl_table=11
atgtgtggtatcgtcggaatagttggccaatcatcggttaatcagaccatttatgacgcactgaccgtgcttcaacacagaggtcaggatgcggcaggtattgtgaccgttgatcgtggtgctttcagactacgtaaagccaatggtctggtcaaagatgtatttgaagtcaaacacatgcaacgcctacagggcaatgcaggtattggccacgtacgttatcctactgcaggcagttccagcgcgtcagaagcgcagcctttctatgttaactcgccatttgggatttcattagcccataacggtaacttaaccaacacggttgaattagctgaaggcctgatcaaaaaacgtcgccatgtgaacaccacatccgactcagaagtattattaaacctgctggccgatgagctgcaaaaaaccactagcttaatgctgacgcctgacgaagtgttcgacactatcgccaaagtgcacgagcaagcccgtggcgcctatgcggttgtggccatgattatcggtcaaggtctggtggcatttcgcgatccattcggtattcgtccactggtattaggtaagcacgaaaccccaaccggtactgagtacatggtggcctctgagagcgtggccctcgatgccgtgggttttgaagtgatgcgtgatgtggcgccaggcgaagcgatttatatctctctcgatggccagctttacactcgccaatgcgcgaaagagccaagctactcaccttgtatcttcgaattcgtgtattttgcccgtccagattcgactatcgacaacgtctctgtttacgccagccgcgtaaacatgggggctaagctcggtgaaaagatcaaaaaagaatggtacgaccatgatatcgacgtggtgatccctattcctgaaacctcatgcgatatcgcattagaaatcgcccgttgcatggacttaccttaccgccaaggttttgtgaagaaccgttatatcggccgcacctttattatgcctggtcaacaggagcgtaaaaaatcggtacgccgtaaactcaatgccatcaacactgagtttaaaggtaagaacgttttgttagtcgatgactctatcgtgcgtggtaccacgtcggagcaaatcattgagatggcgcgtgaagcgggtgctaagaaagtgtactttgcctcggcggcaccggaaatccgtttcccgaacgtttatggtatcgatatgccaacctcgaatgagctgattgcccacggtcgtgatgccgatgaaattgctaagctgattggcgccgatggcattatcttccaaaatctgccggatctggttgaagcggtgagaatggaaaacccagagatcaaacgtttcgaaacctcagtgttcgacggtcactacatcactaacgatgttgaccaatcttacctcgaccacttaactcagttacgtaacgacgatgccaaggccgaccgtaataaagacattggcactaacttagagttacacaacgtttgccatccataa

SEQ ID NO: 132523 - protein, 504 aa, Shewanella sp. ANA-3
MCGIVGIVGQSSVNQTIYDALTVLQHRGQDAAGIVTVDRGAFRLRKANGLVKDVFEVKHMQRLQGNAGIGHVRYPTAGSSSASEAQPFYVNSPFGISLAHNGNLTNTVELAEGLIKKRRHVNTTSDSEVLLNLLADELQKTTSLMLTPDEVFDTIAKVHEQARGAYAVVAMIIGQGLVAFRDPFGIRPLVLGKHETPTGTEYMVASESVALDAVGFEVMRDVAPGEAIYISLDGQLYTRQCAKEPSYSPCIFEFVYFARPDSTIDNVSVYASRVNMGAKLGEKIKKEWYDHDIDVVIPIPETSCDIALEIARCMDLPYRQGFVKNRYIGRTFIMPGQQERKKSVRRKLNAINTEFKGKNVLLVDDSIVRGTTSEQIIEMAREAGAKKVYFASAAPEIRFPNVYGIDMPTSNELIAHGRDADEIAKLIGADGIIFQNLPDLVEAVRMENPEIKRFETSVFDGHYITNDVDQSYLDHLTQLRNDDAKADRNKDIGTNLELHNVCHP

SEQ ID NO: 132524 - DNA, 1527 bp, Mycobacterium avium 104
  CDS (1)..(1527): transl_table=11
gtgaccgtcgccgaacccgagcaggacttcaacgcaccccgcgaggaatgcggtgtattcggggtctgggccccgggcgaggaagtcgccaaactcacctactacggcctctacgcgctgcagcatcgcgggcaggaggccgccggcatcgccgtcgccgacggatcccaagtgctggtgttcaaggacctgggcctggtcagccaggtgttcgacgagcagacgctggccgcgatgcagggccacgtcgccatcgggcactgccgctactccaccaccggcgacaccacctgggagaacgcccagccggtgttccgcaacaccgccgcgggcaccggggttgccttggggcacaacggaaatctggtcaacaccgccgagctggccgcgcgggcccgcgacgccggcctgatcgccaagcgcgcgccggccccggcgaccaccgactccgacatcctgggcgcgctgctggcgcacggcgccgccgactccaccctggagcaggccgcgctggacctgctgcccacggtgcgcggcgccttctgtctgaccttcatggacgagaacacgctctatgcgtgccgcgatccgcatggggtgcggccactttcgctgggacggctggaccgcggctgggtggtggcctccgagaccgccgcgctcgacatcgtcggcgcctcgttcgtgcgcgacatcgaaccgggcgaactgctggcgatcgacgccgacggggtgcgctccacccggttcgccaatcccacccccaagggctgcgtcttcgagtacgtctatttggcgcgaccggacagcaccatcgccggccggtccgtgcacgccacccgggtcgagatcggccggcggctggcccgggaacgccccgtcgaggccgacctggtgatcggggtgcccgagtcgggcacccccgccgccgtcggctacgcccaggaatccggcatcccctatgggcaggggctgatgaagaacgcctacgtggggcgcaccttcatccagccgtcgcagaccatccgtcaactcggtatccggctcaagctcaacccacttcgcgaggtgatccgcggcaaacggctcatcgtcgtcgacgactccatcgtgcgcggcaacacccagcgggcgctgctgcggatgctgcgcgaggccggcgccgtcgaggtgcacgtgcgcatcgcctcgccgccggtcaaatggccctgcttctacggcatcgacttcccgtcgccggccgaactgatcgccaacgcggtcgaggacaaacacgagatgctcgaggcggtgcggcacgccatcggcgccgactcgctgggctacatctcgctgcgtggcctgatcgcagcctccgagcagccggcgtcgcggctgtgcaccgcctgcttcgacggccagtacccgatcgaactgcccggcgagacggcgttgggcaagaacgtcatcgagcacatgctcgccaacgcggcccggggcgccgggctcgacgacctggcggccgacgaagtgcccgtcgtccactga

SEQ ID NO: 132525 - protein, 508 aa, Mycobacterium avium 104
MTVAEPEQDFNAPREECGVFGVWAPGEEVAKLTYYGLYALQHRGQEAAGIAVADGSQVLVFKDLGLVSQVFDEQTLAAMQGHVAIGHCRYSTTGDTTWENAQPVFRNTAAGTGVALGHNGNLVNTAELAARARDAGLIAKRAPAPATTDSDILGALLAHGAADSTLEQAALDLLPTVRGAFCLTFMDENTLYACRDPHGVRPLSLGRLDRGWVVASETAALDIVGASFVRDIEPGELLAIDADGVRSTRFANPTPKGCVFEYVYLARPDSTIAGRSVHATRVEIGRRLARERPVEADLVIGVPESGTPAAVGYAQESGIPYGQGLMKNAYVGRTFIQPSQTIRQLGIRLKLNPLREVIRGKRLIVVDDSIVRGNTQRALLRMLREAGAVEVHVRIASPPVKWPCFYGIDFPSPAELIANAVEDKHEMLEAVRHAIGADSLGYISLRGLIAASEQPASRLCTACFDGQYPIELPGETALGKNVIEHMLANAARGAGLDDLAADEVPVVH

SEQ ID NO: 132526 - DNA, 1536 bp, Mycobacterium smegmatis str. MC2 155
  CDS (1)..(1536): transl_table=11
gtgatcggccacgacgacaacgagtccgaaaatgaaccccgtgaggaatgtggcgtcttcggcgtctgggccccgggcgaagaagttgccaagctgacctactacggcctctacgccctgcagcaccgcgggcaggaagccgcgggtatcgcggtcgccgatggctcccaggtgctggtcttcaaggatctgggcctggtcagtcaggtgttcgacgagcagaccctggccgcgatgccgggtcacgtcgccgtcggccactgccggtactccaccaccgggtccacgacctgggagaacgcgcaacccgtgttccgcaacaccgcggcaggcaccggcgtcgccctcggacacaacggaaacctcgtcaacacggccgaactcgccgcccgtgcccgcgacaacggcctgatcgaactcaagggtggcccggcggccaccaccgactccgacatcctcggtgcgctgctcgcgcacggcgccgccgacgcgacgctcgagcaggccgcgctcgaactgctgccgaccgtccgcggcgcgttctgcctgacgttcatggacgagaacacgctgtacgccgcgcgcgacccgcacggtgtgcggccgctgtcgctgggccggctggaccgtggctgggtggtcgcgtcggagaccgcggcgctcgacatcgtcggcgcctcgttcgtccgcgacatcgaacccggcgaactgctcgcgatcgacgccgacggcgtgcgctccacgcggttcgcgaaccccgagcccaaggggtgcgtcttcgaatacgtctacctggcccgccccgacagcacattggtcggccgctcggtgcacgccacccgcgtcgacatcggccgccgcctggcccgcgaacatcccgtcgaggccgatctggtgatcggtgtcccggaatcgggcacgcccgccgcggtggggtacgcgcaggaatcgggcatcccgttcgggcagggcctgatgaagaacgcctacgtgggccgcaccttcatccagccgtcgcagacgatccgtcagctgggcatccggctcaagctcaacccgctgcgcgaggtgatccgcggcaagcggctgatcgtggtcgacgactcgatcgtgcgcggcaacacccagcgcgccctcgtgcggatgctgcgcgaggccggggccctcgaggtgcacgtgcgcatcgcgtccccgcccgtcaggtggccgtgtttctacggcatcgatttcgccaccccggccgaactgatcgccaacgcggcctcgcaggaacacgaaggcgagatgctcgaagcggtccgccacgcgatcggcgccgacagcctcggctacatctcccagcagggcatgatcgcggccaccgagcagcccgcgtcgcggttgtgctcggcgtgcttcgacggcaagtacccgatcgagctgcccggcgagaccgccctgggcaagaacgtcatcgagcacatgctcgcctcggcggcccgcagcggcatccccgtggcgcagaacgacaacgcctcggcgttgcgcaggccctga

SEQ ID NO: 132527 - protein, 511 aa, Mycobacterium smegmatis str. MC2 155
MIGHDDNESENEPREECGVFGVWAPGEEVAKLTYYGLYALQHRGQEAAGIAVADGSQVLVFKDLGLVSQVFDEQTLAAMPGHVAVGHCRYSTTGSTTWENAQPVFRNTAAGTGVALGHNGNLVNTAELAARARDNGLIELKGGPAATTDSDILGALLAHGAADATLEQAALELLPTVRGAFCLTFMDENTLYAARDPHGVRPLSLGRLDRGWVVASETAALDIVGASFVRDIEPGELLAIDADGVRSTRFANPEPKGCVFEYVYLARPDSTLVGRSVHATRVDIGRRLAREHPVEADLVIGVPESGTPAAVGYAQESGIPFGQGLMKNAYVGRTFIQPSQTIRQLGIRLKLNPLREVIRGKRLIVVDDSIVRGNTQRALVRMLREAGALEVHVRIASPPVRWPCFYGIDFATPAELIANAASQEHEGEMLEAVRHAIGADSLGYISQQGMIAATEQPASRLCSACFDGKYPIELPGETALGKNVIEHMLASAARSGIPVAQNDNASALRRP

SEQ ID NO: 132528 - DNA, 1545 bp, Nocardioides sp. JS614
  CDS (1)..(1545): transl_table=11
gtgccctaccaaagcagcccccgcaagggaggcgacggcaggctgaccgcggcgctcgacccccaggaccagggcccccaggacgcctgcggcgtcttcggcgtctgggcacccggcgaggacgtcgccaagctcacctacttcggcctgtacgcgctccagcaccgcggccaggagtcggcgggcatcgcggtcagcaacggccgccagatcctggtctacaaggacatgggcctggtctcccaggtcttcgacgagaccaccctggcctcgctcaaggggcacctggccatcggccacagccgctactccaccaccggggcgagcacctggcagaacgcgcagccgaccttccggcccaccgcggacggctcgatcgcgctcggccacaacggcaacctgatcaacacccacgacctggcccggatggtggtcgacctgcccggccccggcgacgagctcgagctgcacacccgcccggccgagacgtcgaccaacgacaccggcctggtgaccgcgctcctggcgcaccaccccgacacgtcgctggagcagcgcgcgctggaggtgctgccccagctgaagggcgccttctgcttcgtctggatgaacgaggacaccctgtacgccgcccgcgacgcccagggcatccggccgctcgtgctcggccggctcgagcgcggctgggtggtcgccagcgaggacgccgcactggccaccatcggcgcgagcgtggtccgcgaggtcgagcccggcgagatgatcgtcatcgacgagttcggcctgcgctcacacaagttcgccgacccggcgccgaagggctgcgtcttcgagtacgtctacctggcccggccggacgccacgatcagcggccgcagcgtccacgagtcccgggtcgagatgggccgccagctcgcccgcgagtaccccgtcgacgccgacctggtgatcccggtccccgagtccggcacccccgcggccgccggctacgccgaggagagcggcatcccgttcggccagggtttcgtgaagaacgcgtacgtcgggcgcaccttcatccagcccagccagacgctgcgccagctcggcatccgcctcaagctcaacgccctcgagcacatgatccgcggcaagcggatcgtcgtcgtcgacgactcgatcgtgcgcggcaacacccagcgcgcccaggtccggatgctccgcgaggccggggcccgcgaggtccacgtgcggatctccagcccgccggtgaagtggccgtgcttctacggcatcgacttcgcgacccgcgccgagctgatcgccaacggcctgacccccgaggagatcgcggccagcatcggcgccgacagcctcggctacatctccctcgacggcatgatcgacgcgaccggcctggagccggaccggctctgccgggcctgcttcaccggcgagtacccgatcccgctccccgacgagagcctgctcggcaagcacctgctcgagtcctcgatccaggcgccgtcgtacggcaaggcgctgcccgtcctcaacaacccgtag

SEQ ID NO: 132529 - protein, 514 aa, Nocardioides sp. JS614
MPYQSSPRKGGDGRLTAALDPQDQGPQDACGVFGVWAPGEDVAKLTYFGLYALQHRGQESAGIAVSNGRQILVYKDMGLVSQVFDETTLASLKGHLAIGHSRYSTTGASTWQNAQPTFRPTADGSIALGHNGNLINTHDLARMVVDLPGPGDELELHTRPAETSTNDTGLVTALLAHHPDTSLEQRALEVLPQLKGAFCFVWMNEDTLYAARDAQGIRPLVLGRLERGWVVASEDAALATIGASVVREVEPGEMIVIDEFGLRSHKFADPAPKGCVFEYVYLARPDATISGRSVHESRVEMGRQLAREYPVDADLVIPVPESGTPAAAGYAEESGIPFGQGFVKNAYVGRTFIQPSQTLRQLGIRLKLNALEHMIRGKRIVVVDDSIVRGNTQRAQVRMLREAGAREVHVRISSPPVKWPCFYGIDFATRAELIANGLTPEEIAASIGADSLGYISLDGMIDATGLEPDRLCRACFTGEYPIPLPDESLLGKHLLESSIQAPSYGKALPVLNNP

SEQ ID NO: 132530 - DNA, 1530 bp, Azoarcus sp. BH72
  CDS (1)..(1530): transl_table=11
atgtgcggaattcttggggtggttgcgacctccccggtcaatcagttgctttacgacgggctccaggtgctgcagcaccgcggacaggatgccgcaggcatcgccacggcggagggcggtcgttttcacatgcacaaggggtccggtctggtgcgcgacgtgttccgcacccgcaacatgcgcaacctcgaaggcaactggggtatcgcgcacgtacgctaccccaccgcagggtcggcctataacgcggcggaggcccagccgttctacgtgaattcgccgttcggactgctgctcgcgcacaacggcaacctgacgaattccgaagaactcaagcgcgagatgttcctcgccgacttgcgccacatcaacaccaattccgactccgaagtgctgctgaacgtgctcgcgcacgagctgcaggccgcctgtaacggcctcaagctcgatgaggacgccgtgttccgcgccgtggccggagtgcaccgccgctgtcgcggcgcctatgcggcggtggtgatgatcgccggctacggcctgctcgccttccgcgacccctacggcatccgcccgctggtgatcggccgcaacgatgtcgccgagggcaccgagtggctggtggcgtcggaatcggtggcactcgacgtgctcggcttcacgctgctgcgcgacgtggcgccgggcgaggcggtgctgatcgacacccaaggcaatttccgcagccgccagtgcgcggaaaagaccgtcgaagcgccgtgcatgttcgagttcgtctatctcgcccgccccgactccatcatcgacggcatttcggtgtacgaatcgcgcgtcaagatgggcgagtttctcgccgagaagatgaagcggacgatgccgcacgcacagatcgacgtggtgattccgatccccgattccagccgcccgtcggccatggagatggcgcatcgactgggcctgccgtaccgcgaaggcttcgtgaagaaccgctacatcggccgcaccttcatcatgccgggccaggccaagcgccgtaagtcggtgcgccagaagctgaacacgatccaccaggagttcaagggcaagagcgtgctgctggtggacgactccatcgtgcgcggcacgaccagccgggaaatcatcaacatggcgcgcgaagccggcgccaccaaggtctacatggcctccgctgcgccgccggtgcgccacgccaacgtctatggcatcgacatgccgacgcgcagcgaactgatcgcctccgaccgcagcgaagacgaaatctgccgcgagatcggagccgacggtctgatctaccaggacctcgacgacctcaaggcctcggtgcgcgcgctcaatcccgcgatcaccttcttcgagacctcctgtttcgacggttgctacatcaccggcgacatcacgcccgagtacctcaacggcgtcgagaaccagcgcggcgaggagaaacccgccgggcgtgacgatggcgaggaagggcaactcgatctcaatctcatcacccatccggaccactga

SEQ ID NO: 132531 - protein, 509 aa, Azoarcus sp. BH72
MCGILGVVATSPVNQLLYDGLQVLQHRGQDAAGIATAEGGRFHMHKGSGLVRDVFRTRNMRNLEGNWGIAHVRYPTAGSAYNAAEAQPFYVNSPFGLLLAHNGNLTNSEELKREMFLADLRHINTNSDSEVLLNVLAHELQAACNGLKLDEDAVFRAVAGVHRRCRGAYAAVVMIAGYGLLAFRDPYGIRPLVIGRNDVAEGTEWLVASESVALDVLGFTLLRDVAPGEAVLIDTQGNFRSRQCAEKTVEAPCMFEFVYLARPDSIIDGISVYESRVKMGEFLAEKMKRTMPHAQIDVVIPIPDSSRPSAMEMAHRLGLPYREGFVKNRYIGRTFIMPGQAKRRKSVRQKLNTIHQEFKGKSVLLVDDSIVRGTTSREIINMAREAGATKVYMASAAPPVRHANVYGIDMPTRSELIASDRSEDEICREIGADGLIYQDLDDLKASVRALNPAITFFETSCFDGCYITGDITPEYLNGVENQRGEEKPAGRDDGEEGQLDLNLITHPDH

SEQ ID NO: 132532 - DNA, 1536 bp, Mycobacterium sp. KMS
  CDS (1)..(1536): transl_table=11
gtgagcggccacgacgacatcgagcccgagaacgatccccgtgaagaatgcggcgtcttcggcgtctgggccccgggtgaggatgtggccaagctcacctactacggcctctatgcgctacagcaccgtggtcaggaagcggcggggatcgccgtagccgacggctcgcaagtgctggtgttcaaggatctcggcctggtcagccaggtgttcgacgagccgacgctggccgccatgcacggacacgtcgccatcgggcactgccgctactcgacgaccgggtcgaccacctgggagaacgcccagcccgtcttccgcaacaccctggccggcaccggcgtggccgtcggccacaacggcaacctggtcaacaccaccgagctcgccgcccgggcccgcgacgccggcctgatcaacggccgcacccccggcgcggcgaccaccgattcggacatcctcggcgcgctgctggcccacggcgccgccgacgccaccgtcgaacaggcggccctcgaactgctgccgaccgtgcgcggcgcgttctgtctgaccttcatggacgagaacaccctttacgcggcccgcgacccgtatggtgtgcgcccgctgtcgctgggacggctggaccggggctgggtggtggcgtcggagaccgcggccctcgacatcgtcggcgcgtcgttcgtccgcgacatcgaaccgggcgaactgttggccatcgacgccgacggcgtgcgctccacccgcttcgccaaccccaccccgaagtcgtgcgtcttcgaatacgtctatctggcccggccggacagcacgctggccggccgctcggtgcacgccacccgcgtcgacatcggccgccgcctcgccagcgagatgcccgtcgaggccgacctggtgatcggggtccccgagtcgggcacgcccgcagccgtgggctacgcacagggctccggcatcccctacggccagggcctgatgaagaacgcctacgtcggccgcacgttcatccagccgtcgcagaccatccgccagctcggcatccggctcaaactcaacccgctcaaagaggtcatccgcggtaagcggttgatcgtggtcgacgattcgatcgtgcgcggcaacacccagcgcgcgctgatccggatgctgcgcgaggccggggccctcgaagtgcacgtccggatcgcctccccgccggtgcgatggccgtgcttctacggcatcgacttcgccaccccggccgagctgatcgccaacggcgccgaggacgaggaccagatgctcgacgccgtccgccgtgccatcggcgcggacaccctgggctacatctcacagcagggcatgatcgcggcgaccgaacagcccgcctcgcggctgtgctcggcgtgcttcgacggcaactacccgatcgagctgccgggcgagtccgcgctgggcaagaacgtcatcgagcagatgctcgcgacagccgcccgcagcgggatcccgctcgagaaggtcgacaacgacaacgcctcggcgcttcgtaggccttga

SEQ ID NO: 132533 - protein, 511 aa, Mycobacterium sp. KMS
MSGHDDIEPENDPREECGVFGVWAPGEDVAKLTYYGLYALQHRGQEAAGIAVADGSQVLVFKDLGLVSQVFDEPTLAAMHGHVAIGHCRYSTTGSTTWENAQPVFRNTLAGTGVAVGHNGNLVNTTELAARARDAGLINGRTPGAATTDSDILGALLAHGAADATVEQAALELLPTVRGAFCLTFMDENTLYAARDPYGVRPLSLGRLDRGWVVASETAALDIVGASFVRDIEPGELLAIDADGVRSTRFANPTPKSCVFEYVYLARPDSTLAGRSVHATRVDIGRRLASEMPVEADLVIGVPESGTPAAVGYAQGSGIPYGQGLMKNAYVGRTFIQPSQTIRQLGIRLKLNPLKEVIRGKRLIVVDDSIVRGNTQRALIRMLREAGALEVHVRIASPPVRWPCFYGIDFATPAELIANGAEDEDQMLDAVRRAIGADTLGYISQQGMIAATEQPASRLCSACFDGNYPIELPGESALGKNVIEQMLATAARSGIPLEKVDNDNASALRRP

SEQ ID NO: 132534 - DNA, 1545 bp, Neisseria meningitidis FAM18
  CDS (1)..(1545): transl_table=11
atgtgcggcgtattaggtttggtcagtcatgaacccgtgaaccagcttctgtacgacggtttgcagatgttgcagcacaggggacaggatgcggcgggcattgtaacggccgaaggcggtaccttccatatgcacaaaggcaaagggatggtgcgcgaagtgttccgcacgcgcaatatgcgtgatttgaccggcaacgccggcatcgcccacgtccgttatcccacggcgggcaacgccggcagcagcgcggaggcgcagcctttctacgtcagctcgccgttcggcatcgttttggcgcacaacggcaacctcaccaacactgccgaactttatgaaaacgtgtgcaacaaacacctacgccacgtcaacaccagctccgattccgaagtcttgctcaacgtattcgcgcacgaattgcgccgcgaagtctctaaaaacgccgacccgcaccggctcaatgccgacaatattttcaacgccgttgccgaagtccaccgcctggtgcgcggcgcatacggcgtggttgccatgattgcgggctacggtatgcttgccttccgcgacccttacggcatccgcccgctggtattgggttcgcaaaccgacagcgaaggcagaaaatcctatgccgtcgcctccgaatccgtcgccttcaacgcgcttacctacgatttggaacgcgacatccggccgggcgaagcggtatttgtcggctttgacggcacaatgattgcccgccaatgcagcgaccgtgccaaactcagcccctgcctttttgaatatgtttattttgcccgccccgactctgtgattgacggcgtatccgtttaccaatcgcgcttggatatgggcgtgtcgctggcggaaaaaatcaaacgcgagctgcccgtggacggcatcgacgttgtgatgcccatccccgacaccagccgccccagcgcgatggagcttgccgtccatctcgacaaaccctaccgcgagggtttgattaaaaaccgctatatcggccgcacctttattatgcccggacaggcgacgcgcaaaaaatccgtgcgccaaaaactcagcccgatggaaaccgaatttgcaggcaaaagcgtgttgctggtggacgactccatcgtgcgcgggacgaccagccgcgaaatcgtcgaaatggtacgcgcggcgggcgcgcgcaaagtctatatcgcctccgccgcgcccgaagtgcgctatcccaatgtgtacggcattgatatgcccacgcgcgaagagttgattgccaacgagcgcagcgcggcggaaatcgccgccgaaatcggcgcagacggcatcgtgttccaaaatttgagcgatttggaagccgtcgtcaaagcactcaatccgaaaatcgaatccttcgattcgtcctgtttcaacggcatttatcagaccggcgacatcgatgatgcctacctcgaccgcctgtctgccgagaaatccggctgcggcggtctgaaaatccacccgagcaggatggaacacagcatcagcatcagcgatgcgggcgacgaagaataa

SEQ ID NO: 132535 - protein, 514 aa, Neisseria meningitidis FAM18
MCGVLGLVSHEPVNQLLYDGLQMLQHRGQDAAGIVTAEGGTFHMHKGKGMVREVFRTRNMRDLTGNAGIAHVRYPTAGNAGSSAEAQPFYVSSPFGIVLAHNGNLTNTAELYENVCNKHLRHVNTSSDSEVLLNVFAHELRREVSKNADPHRLNADNIFNAVAEVHRLVRGAYGVVAMIAGYGMLAFRDPYGIRPLVLGSQTDSEGRKSYAVASESVAFNALTYDLERDIRPGEAVFVGFDGTMIARQCSDRAKLSPCLFEYVYFARPDSVIDGVSVYQSRLDMGVSLAEKIKRELPVDGIDVVMPIPDTSRPSAMELAVHLDKPYREGLIKNRYIGRTFIMPGQATRKKSVRQKLSPMETEFAGKSVLLVDDSIVRGTTSREIVEMVRAAGARKVYIASAAPEVRYPNVYGIDMPTREELIANERSAAEIAAEIGADGIVFQNLSDLEAVVKALNPKIESFDSSCFNGIYQTGDIDDAYLDRLSAEKSGCGGLKIHPSRMEHSISISDAGDEE

SEQ ID NO: 132536 - DNA, 1509 bp, Acidovorax sp. JS42
  CDS (1)..(1509): transl_table=11
atgtgtggaattgtcggcgtggtcagcacggcccccgtgaatcagctgatctatgacgccttgctgctgctgcagcaccggggacaggacgccgcgggcatcgtcacgcaggaagggcgcaagttcttcatgcacaaggccaagggcatggtgcgcgacgtgtttcgcacgcgcaacatgcgcgcactgcccggcaccatcggcctggggcaggtgcgctatcccacggcgggcaatgcctccagcgaggaggaggcccagccgttctacgtgaacgcgccgttcggcatcgtgatggtgcacaacggcaacctcaccaacgccaagcagctgcgcggcgaactggccgacaccgaccaccgccacaccaacaccgagagcgactccgaagtgctgctcaacgtgctggcgcatgagctggcgcgcgccaccagcggcgcgccgttgcagtccgaggacgtattcaaggccgtgcgcgcggtgcacaagcgcgtcaagggctcctatgccgtgatcgcgctgatcgcgggctatggcctgctggcgttccgcgacccgttcggcatccgcccgctgtgcatgggccgcggcgcggacggcaccgtgatgctggcgagcgaatccgtggcgctggagggcacgacccaggtgctggaccgtgacgtcgcgcccggcgaggccgtgttcgtgcacgccgacggccgcgtggaaacccagcagtgcgccgagaacccgcacctcaacccctgcgtgttcgagtacgtgtatttggcgcgtcccgactcggtgatggacggcatctcggtctaccaggcgcggctgaacatgggcgagacgctggccaagcgcgtgatctccaccgtgcctcccagcgagatcgacgccatcatccccatccccgaatccagccgccccagcgccatgcagctcgcgcagctgctgggcattccgtaccgcgagggcttcgtcaagaaccgctacgtgggccgcaccttcatcatgccggggcagggcgtgcgcaagaagtcggtgcgccagaagctcaacgctatcggcagcgagttcaagggccgcaaggtgctgctggtagacgactccatcgtgcgcggcaccacctccaaggagatcgtgcagatggcgcgcgacgccggcgcggtgaaggtctacctggcttctgccgcgccgccggtgcgccaccccaatgtctatggcatcgacatgcccacgcgctccgagctggtcgcgcatggccgcacggtggaggagatccgccagctgatcggcgccgacgcactgatttaccaagacgtcgaggccatgaagcaagccgtgggcaagatcaaccgcaaggtggaggggttcgaggcctcgtgcttcgacggcgtgtacatcaccggcgacatctccgacgaggaagtgacggcgctcaacgagggccgcaaccggggtggtgaagaggagcaggaagacacctcccggctgtccctgcccaacgcccaggaggcgtga

SEQ ID NO: 132537 - protein, 502 aa, Acidovorax sp. JS42
MCGIVGVVSTAPVNQLIYDALLLLQHRGQDAAGIVTQEGRKFFMHKAKGMVRDVFRTRNMRALPGTIGLGQVRYPTAGNASSEEEAQPFYVNAPFGIVMVHNGNLTNAKQLRGELADTDHRHTNTESDSEVLLNVLAHELARATSGAPLQSEDVFKAVRAVHKRVKGSYAVIALIAGYGLLAFRDPFGIRPLCMGRGADGTVMLASESVALEGTTQVLDRDVAPGEAVFVHADGRVETQQCAENPHLNPCVFEYVYLARPDSVMDGISVYQARLNMGETLAKRVISTVPPSEIDAIIPIPESSRPSAMQLAQLLGIPYREGFVKNRYVGRTFIMPGQGVRKKSVRQKLNAIGSEFKGRKVLLVDDSIVRGTTSKEIVQMARDAGAVKVYLASAAPPVRHPNVYGIDMPTRSELVAHGRTVEEIRQLIGADALIYQDVEAMKQAVGKINRKVEGFEASCFDGVYITGDISDEEVTALNEGRNRGGEEEQEDTSRLSLPNAQEA

SEQ ID NO: 132538 - DNA, 1461 bp, Magnetospirillum magnetotacticum MS-1
  CDS (1)..(1461): transl_table=11
atgctgaccacccaccccttcgacgacgaccatctccgcgaggaatgcggcgtgttcggcattttcggccatccggaagcggcggcccatgtggcgctggggcttcacgcccttcagcatcgcggccaggaagcggcgggcatcgtctcctatgacggcacgacttttcacaaccaccgtggccttggccatgtggaggataatttcgggtccgaatcggtcatccgcaagctgaagggttccatggcggtgggccatgtgcgctattccaccacgggcgagaccctgctgcgcaatgtgcagccgcttttcgccgagatggaattcggcggtctggcgctgggccataacggcaatctcaccaatgccatggcgctgcgccgccagttggtgcggcgcggctgcctgttccaatccaccaccgataccgaggtgatcatccacctcatcgccatcagcctgtattccaccgtcgaggaccgcctgatcgacgcgctgcgccagatcgagggcgcctattccctggtggcggccaccaccgacgcggtgttcggcgtgcgcgatccgttgggcatccgtccgctctgtctgggccggttggataaggcctggattctggcgtctgaatcctgcgcgctcgacatcatcggcgccgagttcgtccgcgatgtagaaccgggcgagatcgtggtgttgtcggccgagggcatccgttcggtcaagcccttcaccaagcgtccgtcacgcctgtgcatcttcgaatacatctacttcgcccggcccgattccgtggtggaaggcaccagcgtctacgaggccagaaagcgcatcggctcggaactggcccgcgaaagccaggtggatgccgacgtggtggtgccggttcccgattccggcgtgcccgcggccatcggctttgccgccgaggccgggattcccttcgaactgggcatcatccgcaaccattatgtgggccgcaccttcattcagcccaccgacagcgtgcgtcataccggcgtcaagatgaagcataacgccaaccgggcgaccctggcgggcaagcgcgtcatcctggtcgatgattccatcgtgcgcggcaccaccagccgcaagatcgtcgaaatggtgcgccaggctggtgccaccgaggtgcacatgcgcatctccagcccgccgaccacctattcctgctatttcggcatcgacacgcccgagcgcgagaagctgctggcggcgcgctacgacgtggacggcatggccaaattgatcggcgtggattcgctggccttcatctccatcgacggcctgtaccgcgcggtgggcgaaccgggccgcaattcggccgagccgcagttctgtgacgcctgcttcaccggcgactatccggtggagcccaccgactacatcaacgccaagaccgacaccaagcagctttccctgctggccgaggacagccactga

SEQ ID NO: 132539 - protein, 486 aa, Magnetospirillum magnetotacticum MS-1
MLTTHPFDDDHLREECGVFGIFGHPEAAAHVALGLHALQHRGQEAAGIVSYDGTTFHNHRGLGHVEDNFGSESVIRKLKGSMAVGHVRYSTTGETLLRNVQPLFAEMEFGGLALGHNGNLTNAMALRRQLVRRGCLFQSTTDTEVIIHLIAISLYSTVEDRLIDALRQIEGAYSLVAATTDAVFGVRDPLGIRPLCLGRLDKAWILASESCALDIIGAEFVRDVEPGEIVVLSAEGIRSVKPFTKRPSRLCIFEYIYFARPDSVVEGTSVYEARKRIGSELARESQVDADVVVPVPDSGVPAAIGFAAEAGIPFELGIIRNHYVGRTFIQPTDSVRHTGVKMKHNANRATLAGKRVILVDDSIVRGTTSRKIVEMVRQAGATEVHMRISSPPTTYSCYFGIDTPEREKLLAARYDVDGMAKLIGVDSLAFISIDGLYRAVGEPGRNSAEPQFCDACFTGDYPVEPTDYINAKTDTKQLSLLAEDSH

SEQ ID NO: 132540 - DNA, 1500 bp, Nostoc punctiforme PCC 73102
  CDS (1)..(1500): transl_table=11
atgacctctattcattctgtcacttcggatgaataccccgaccctaccaacaacccaatcaatagtcatgaaaatcagcctgacaagccagaagaagcttgtggtgtttttggcatctacgcaccaggagaaaacgttgctaaactgacctactttggattgtacgccctccagcatcggggtcaagaatcagctgggattgccacctttgaaggtacacaagtccatctccacaaagacatgggcttggtgtctcaagtttttaatgaaaccatcttggatcaattgcctggtagccttgctgttggccacactcgctattccaccacaggttctagccgtaaagttaatgcccaacccgcagtcctggaaactcgcttaggttcattagctcttgcacacaatggtaatttagtcaatacagtgcaactgcgtcaagagttgcttgagaaaaaatacaacttagttaccacaacagactcagaaatgattgcttttgcgatcgcagaagccatcaatgctggtgcagattggctagaaggttcaattcaagcatttcaccgttgtgaaggagcctttagtttagttattggcactcctaacggtgttatgggtgtccgtgacaccaatggtattcgtcccttagtaattggaactttagcaggtaatccagttcgttacgttttggcttctgagacttgtggtttagacatcattggagccgaatacctgcgagatgtagaaccaggcgaattagtttggattactgaagaaggtttagcttcctatcattggagtcaacagccccaaaggaaattgtgtatcttcgagatgatttactttgcccgtcctgatagcatcatgcacaacgagagtttgtacagctatcggatgcgcttaggacaccaactagctaaagaatcttgtgtcgatgccgatattgtctttggtgttcctgattctggtattcctgctgcgatcggattttctcaagcttctggtgtagcttacgctgaaggactgattaaaaaccgctatgttggacgaacctttattcagccaacacaaaccatgcgcgagtcaggtatccgtatgaaacttaacccgcttaaagatgtgctggcgggtaaacgagtaattattgttgatgactccattgttcgcggtactaccagccgaaaactagtcaaaaccttgcgtgaagcgggtgcagtggaagtacacatgcggatctcttccccaccagtaactcatccttgcttctatggcatcgataccgattctcaggatcagctgattgctgctaccaagtcagtagcggaaattgccaagcaactggaagtagacagcctcgcctatctcagttgggaaggaatgctagaagcgacacgagaagacaccaatagtttctgctctgcctgttttactggagattatcccgtggcgattcctgagcaagtgaagcgttctaagttgagtttagaaaaggtagtggtgtag

SEQ ID NO: 132541 - protein, 499 aa, Nostoc punctiforme PCC 73102
MTSIHSVTSDEYPDPTNNPINSHENQPDKPEEACGVFGIYAPGENVAKLTYFGLYALQHRGQESAGIATFEGTQVHLHKDMGLVSQVFNETILDQLPGSLAVGHTRYSTTGSSRKVNAQPAVLETRLGSLALAHNGNLVNTVQLRQELLEKKYNLVTTTDSEMIAFAIAEAINAGADWLEGSIQAFHRCEGAFSLVIGTPNGVMGVRDTNGIRPLVIGTLAGNPVRYVLASETCGLDIIGAEYLRDVEPGELVWITEEGLASYHWSQQPQRKLCIFEMIYFARPDSIMHNESLYSYRMRLGHQLAKESCVDADIVFGVPDSGIPAAIGFSQASGVAYAEGLIKNRYVGRTFIQPTQTMRESGIRMKLNPLKDVLAGKRVIIVDDSIVRGTTSRKLVKTLREAGAVEVHMRISSPPVTHPCFYGIDTDSQDQLIAATKSVAEIAKQLEVDSLAYLSWEGMLEATREDTNSFCSACFTGDYPVAIPEQVKRSKLSLEKVVV

SEQ ID NO: 132542 - DNA, 1512 bp, Bifidobacterium longum DJO10A
  CDS (1)..(1512): transl_table=11
ttgtcggctgaactcgaagacattcacgaggaatgtggcatcttcggcgtgtggggccaccctgacgccgcccgacttacctatttcggcctgcacgcgctgcagcatcgcggtcaggaaggcgccggcatcgtctccaacgataacggtcatctcatcggtcatcgcggactcggcctgctcacccaggtgttcggcgatgagcgcgaaatcgaacgactgaagggcaattgcgccatcggccacgtgcgttacgcaacggccggctcgggcaccacggacaacatccagccgttcatcttccgcttccatgacggcgacgtggctctgtgccataacggcaacctgacgaactgcccgtcactgcgccgcaagcttgaagacgaaggcgccatcttccattcgaactccgacaccgaagtgctgatgcacttgattcgccgttcgatgcagcgcacctttatggacaagctcaaggaagcgctcaacacggtgcatggcggtttcgcctacctgctgatgaccgaagacgccatgatcggcgcactcgacccgaacggcttccgcccgctctccctcggcaagatgaagaacggcgcctacgtgctcgcctccgaaacctgcgcactggatgtcgtcggcgccgagctggtgcgcaacattcgcccgggtgaaatcgtggtggtcaacgatcacggctacaagatcgtgcagtacaccaacaacacgcagctggccatctgctcgatggagtacatctacttcgcccgcccggattccgatatctatggcgtcaacgtgcactccgcccgcaagcgcatgggcgcacgtctcgccgccgaatccccggtggaggccgatatggttatcggcgtgccgaactcctcattgtccgccgcatccggctatgcggaagcagcaggcctgcccaacgaaatgggtctaatcaaaaaccagtatgtggcccgcaccttcattcagcccacgcaagaactgcgcgagcagggtgtgcgtatgaagctctctgctgtgcgcagcgtggttaaaggcaagcgcgttatcgttatcgatgattccatcgtgcgcggcaccacgtccaagcgcatcgtgcagctgctcaaggaagccggcgccgctgaagtgcatatgcgcatcagctccccgccgctgaagtacccctgcttctatggcatcgatatctccaccaccaaggaactcatcgcagccaagatgagcgtggaggaaatccgtgaatacatcggcgcggattccttggcctacctttcgctcgacggtctggtcgaatccatcggactgaacgccgacgccccatacggtggcctgtgcgtcgcctacttcaacggcgactaccccactgcgctcgacgactacgaggccgacttcctgaagtccctcacgcccgaggaccgtgtgcgtctgcctgaattcgcgctgtacaagagcaagtacatcggcaacgagtacaacaccgtgcagccggatgccgaatag

SEQ ID NO: 132543 - protein, 503 aa, Bifidobacterium longum DJO10A
MSAELEDIHEECGIFGVWGHPDAARLTYFGLHALQHRGQEGAGIVSNDNGHLIGHRGLGLLTQVFGDEREIERLKGNCAIGHVRYATAGSGTTDNIQPFIFRFHDGDVALCHNGNLTNCPSLRRKLEDEGAIFHSNSDTEVLMHLIRRSMQRTFMDKLKEALNTVHGGFAYLLMTEDAMIGALDPNGFRPLSLGKMKNGAYVLASETCALDVVGAELVRNIRPGEIVVVNDHGYKIVQYTNNTQLAICSMEYIYFARPDSDIYGVNVHSARKRMGARLAAESPVEADMVIGVPNSSLSAASGYAEAAGLPNEMGLIKNQYVARTFIQPTQELREQGVRMKLSAVRSVVKGKRVIVIDDSIVRGTTSKRIVQLLKEAGAAEVHMRISSPPLKYPCFYGIDISTTKELIAAKMSVEEIREYIGADSLAYLSLDGLVESIGLNADAPYGGLCVAYFNGDYPTALDDYEADFLKSLTPEDRVRLPEFALYKSKYIGNEYNTVQPDAE

SEQ ID NO: 132544 - DNA, 1344 bp, Fusobacterium nucleatum subsp. vincentii ATCC 49256
  CDS (1)..(1344): transl_table=11
atgggaatattggctttgcactcaaagaaagttagaaaagatttagtaggaatcgcatattatggaatgtatgctttgcaacatagaggacaagaaggggcagggtatactatttgtgattcaatcactaatggagaagtgagaataaaaactgttaaaaatgttgggcttgtatcagatgtttttaaagttgaggattttcaaaaatatattggaaatattttaatagcacatacaagatatggtagtaaaaatacagtttcagcaagaaattgtcaacctattggtggagagtctgctatgggatatatatctcttgttcataatggagacatatcaaatcaagttgaattaaaacaagaattattaaagaatggttcattatttcaaacagcaatagatactgaaattatattaaaacttttaagtataaatggaaaatatggatataaagaagcagttttaaaaactgttgaaaaattaaagggttgctttgctcttgcaataataataaatgataaacttataggagttcgtgacccagaaggattaagaccattatgtttaggaaaaatagttaaagatgatatgtatgttttagcttctgaatcttgtgcattagatgccattggtgctgaatttgtaagagatatagaagcaggagaaatggtagttatagatgataatggagtggaaagtataaaatataaacctagtacaaaaaaagcaagctcatttgaatatatttattttgggagaccagacagtgttatagatggaataagtgtttatgattttagacatcaaacaggtagatgtttatatgaacaaaatccaatagaggctgatattgttataggagttcctgattcaggtgttccagcagggataggatatgcagaagcaagtggaataccttattcagcagcacttttaaaaaataaatatgtaggaagaacatttattgctcctgtccaagaattaagagaaagagcagtaagagttaaattaaacccaattaaagaattaattaaaggaaaaagagttgttgttatagatgattctattgttcgtggaacaacttctaaaaaattgatagatattttatttgaggcaggagcaaaagaagtccattttagatcagcctctcctgttgttgtagaagaatcatattttggagtaaatatagatcctaataatagattgatgggaagctatatgagtgttgaagaaattagaaaagtaataggagcaacaactttggattatctttcattaaaaaatttaaagaagattttaaatggtggagaagatttttatatgggatgcttcaaagaagattaa

SEQ ID NO: 132545 - protein, 447 aa, Fusobacterium nucleatum subsp. vincentii ATCC 49256
MGILALHSKKVRKDLVGIAYYGMYALQHRGQEGAGYTICDSITNGEVRIKTVKNVGLVSDVFKVEDFQKYIGNILIAHTRYGSKNTVSARNCQPIGGESAMGYISLVHNGDISNQVELKQELLKNGSLFQTAIDTEIILKLLSINGKYGYKEAVLKTVEKLKGCFALAIIINDKLIGVRDPEGLRPLCLGKIVKDDMYVLASESCALDAIGAEFVRDIEAGEMVVIDDNGVESIKYKPSTKKASSFEYIYFGRPDSVIDGISVYDFRHQTGRCLYEQNPIEADIVIGVPDSGVPAGIGYAEASGIPYSAALLKNKYVGRTFIAPVQELRERAVRVKLNPIKELIKGKRVVVIDDSIVRGTTSKKLIDILFEAGAKEVHFRSASPVVVEESYFGVNIDPNNRLMGSYMSVEEIRKVIGATTLDYLSLKNLKKILNGGEDFYMGCFKED

SEQ ID NO: 132546 - DNA, 1518 bp, Haemophilus influenzae R2846
  CDS (1)..(1518): transl_table=11
atgtgtggtattgtcggtattgttagccaaagtccggttaatgaatctatttatgcagcattaacccttttgcaacatcgtggacaagatgcggcgggtattgtaacggttgatgatgaaaaccgtttccgcttacgtaaagctaatggcttagtcagcgatgtgttccgtcaagagcatatgctacgcttgcaaggaaatgctggattagggcatattcgctatcctacagcaggaagttctagcgtctcagaggcacaacctttttatgtaaattctccctatggtgtcactttggtgcataacggcaatttaaccaactcagtggagttaaaagaaaaagtctttaaaactgcccgccgtcacgtaaacactaattcagattctgaacttcttcttaatattctcgctaatcatcttgatcacattcctcaaaaccatcttgatccacaagatattttttatgccgttcgtaaaactcacaatgatattcgtggtgcttatgcctgcgtagcgatgattattggacatggtatggttgcatttagagatccttttggtattcgtcctttggtgttgggtaaacgtgaagaaaatggcaaaactgattatatgttcgcctctgaaacagtggctttagatattgtcggtttcgagtttgtacgtgatattgctgcgggcgaagccgtttatgtaacgtttgatggcgagctttattcacaacaatgtaccgaaagtgcggtgttaaatccttgtatttttgagtatgtttattttgcacgcccagattcaacgattgatggtgtctctgtttatgctgcacgtgttcatatgggggaaaaactcgggaaaaaaattgcaaaagaatgggcggatgaaattgataatattgatgtggtcattcctattcctgaaacttcaacagatattgcgttacaaatagctcgtgtactagggaagccttatcgacaaggatttgtgaaaaatcgctatgttggtcgcacgtttattatgccaggacaagcacagcgtattagttctgttcgccgcaaattgaataccattaaagctgaatttaaagataaaaatgtgttattggtggacgattctatcgttcgtggcacaacctctgagcaaattgttgaaatggctcgctcagctggtgcgaagaaaatttactttgcctctgctgctcctgaaattcgttatccgaatgtatatggtattgatatgccgagttgtgatgaactgatcgcttatgggcgaaatgttgatgaaattgcagaattaattggcgtagacaaattaattttccaagatctgaccgcacttactgaatctgttcaattggaaaatccagccattcaaggttttgattgttcagtattcacaggcgaatatattacaggcgatattagtcctgaatatcttaataaaatcgcaactcaacgcaacgatagtgcaaagaaaaaacgtgaaaaacaagcatctaatcttgaaatttataatgaacaataa

SEQ ID NO: 132547 - protein, 505 aa, Haemophilus influenzae R2846
MCGIVGIVSQSPVNESIYAALTLLQHRGQDAAGIVTVDDENRFRLRKANGLVSDVFRQEHMLRLQGNAGLGHIRYPTAGSSSVSEAQPFYVNSPYGVTLVHNGNLTNSVELKEKVFKTARRHVNTNSDSELLLNILANHLDHIPQNHLDPQDIFYAVRKTHNDIRGAYACVAMIIGHGMVAFRDPFGIRPLVLGKREENGKTDYMFASETVALDIVGFEFVRDIAAGEAVYVTFDGELYSQQCTESAVLNPCIFEYVYFARPDSTIDGVSVYAARVHMGEKLGKKIAKEWADEIDNIDVVIPIPETSTDIALQIARVLGKPYRQGFVKNRYVGRTFIMPGQAQRISSVRRKLNTIKAEFKDKNVLLVDDSIVRGTTSEQIVEMARSAGAKKIYFASAAPEIRYPNVYGIDMPSCDELIAYGRNVDEIAELIGVDKLIFQDLTALTESVQLENPAIQGFDCSVFTGEYITGDISPEYLNKIATQRNDSAKKKREKQASNLEIYNEQ

SEQ ID NO: 132548 - DNA, 1518 bp, Haemophilus influenzae R2866
  CDS (1)..(1518): transl_table=11
atgtgtggtattgtcggtattgttagccaaagtccggttaatgaatctatttatgcagcattaacccttttgcaacatcgtggacaagatgcggcaggtattgtaacggttgatgatgaaaaccgttttcgcttacgtaaagctaatggtttagtcagtgatgtgttccgtcaagaacatatgctacgattgcaaggaaatgctggattggggcatgttcgctatcctacagcggggagttctagcgtctcagaggcacagcctttttatgtgaattctccctatggtgtcactttagtgcataacggcaacttaaccaactcagtggagttaaaagaaaaggtctttaaaactgctcgccgccatgtaaacactaattcagattccgaacttcttcttaatattctcgccaatcacctcgatcacattcctcaagatcacctcgatccacaagatattttctatgctgttcgtaaaactcacaaggatgttcgcggtgcttatgcttgtttagcgatgattattgggcatggcatggttgcgtttcgtgatccttttggcattcgtcctttggtgttgggtaaacgcgaagaaaatggcaaaaccgattatatgtttgcctctgaaacagtggccttagatattgttggtttcgagtttgtgcgtgatattgctgcaggcgaagccgtttatgtgacgtttgatggcgagctttattcacaacaatgtgctgaaagtgcggtgttaaatccttgtatttttgagtatgtttattttgcacgcccagattcaacgattgatggcgtctctgtttatgctgcgcgtgttcacatgggcgaaaaactcggacaaaaaattgcaaaagaatgggctgatgaaattgataatattgatgtggtcattcccgttcctgaaacctccacagatattgcgttacaaatagctcgtgtactagggaagccttatcgccaaggatttgtgaaaaatcgctatgttggtcgtacctttattatgccaggtcaagcacagcgtattagttctgttcgtcgcaaattgaataccattaaagctgaatttaaagataaaaacgtgttattggtggacgattctatcgttcgtggcacaacctctgagcaaattgttgaaatggctcgctcagctggtgcgaagaaaatttactttgcctctgctgctcctgaaattcgttatccgaatgtatatggtattgatatgccgagttgtgatgaactgatcgcttatgggcgaaatgttgatgaaattgcacatttgatcggcgtagataaattaattttccaagatctgaccgcacttactgaatctgttcaattggaaaatccagccattcaaggttttgattgttcagtattcacaggcgaatatattacaggcgatattagtcctgaatatcttgataaaatcgcacttcaacgcaacgatagtgcaaagaaaaaacgtgaaaaacaagcatccaatcttgaaatttataatgaacaataa

SEQ ID NO: 132549 - protein, 505 aa, Haemophilus influenzae R2866
MCGIVGIVSQSPVNESIYAALTLLQHRGQDAAGIVTVDDENRFRLRKANGLVSDVFRQEHMLRLQGNAGLGHVRYPTAGSSSVSEAQPFYVNSPYGVTLVHNGNLTNSVELKEKVFKTARRHVNTNSDSELLLNILANHLDHIPQDHLDPQDIFYAVRKTHKDVRGAYACLAMIIGHGMVAFRDPFGIRPLVLGKREENGKTDYMFASETVALDIVGFEFVRDIAAGEAVYVTFDGELYSQQCAESAVLNPCIFEYVYFARPDSTIDGVSVYAARVHMGEKLGQKIAKEWADEIDNIDVVIPVPETSTDIALQIARVLGKPYRQGFVKNRYVGRTFIMPGQAQRISSVRRKLNTIKAEFKDKNVLLVDDSIVRGTTSEQIVEMARSAGAKKIYFASAAPEIRYPNVYGIDMPSCDELIAYGRNVDEIAHLIGVDKLIFQDLTALTESVQLENPAIQGFDCSVFTGEYITGDISPEYLDKIALQRNDSAKKKREKQASNLEIYNEQ

SEQ ID NO: 132550 - DNA, 1386 bp, Wolbachia endosymbiont of Drosophila simulans
  CDS (1)..(1386): transl_table=11
atgctagatgaaatgcgtgaggagtgtggggtatttggcataagttgcaaccaaagtgctgcttttaactctatacttgctctccacgctttgcagcatagaggtcaagagtcttttggcgtagtaaccagtaacaacgataagctgcactcttatcactttcaaggtcaagtgagcagcatatttgatgatatagatgaaataaagaaatccttacctggagattgtgcaataggtcatgttcgatactcaacaagtggtagtaaatttggagtgcagcccatgtttggcaaaagtggcaaatttggggatttcgccatagcacataatggtaatttaattaatatttctccaatacgcgaacaattaattaaacaagagtgcgtttttcagtcagatattgatacagaagtagtagtgcatctgacagcaagcggtgaaaaagatagctttttagagagttttatatatgcattaaagcaaatacaaggtgcttattcttttgtggcaatcaatcaagaagtagttattggagtacgtgatccatctggaatcaggcctcttgttttagggaagttaaacggttcttatgttcttgcatctgaaacttgtgctcttgatatagtaaatgcagagtttgttagagaaatagaaccaggtgagttagtcaccattgatcgaaatggtaatctagcttcagcatttcctttcccacagcaaaaatcaagtttttgtatttttgaatacgtttatttttcaagaccagacagcataatggagaataggtccatatatgatataagaaaagaaataggaagaatacttgcagaagagagcccaccaaaaaacaatatggatatggttgtaccaatacctgattctggaatacctgcagctattggatatgcaaagcattcaggattacctatggaactgggaataattcgtaatcattacataggaagaacttttatacaaccaaccgctgaagtacgtaaagttagaataaaattaaaattcaatgctaataagcacactttgaaaggtaaaaacataattttaatagatgatagtatagtgcgtggtagtacgttaacaaatataatagttatgttaaaggatgcaggagtaaaagagattcacctcaaaatttcaagcccaccaattaagcattcttgtttttatggaatagatacgccagagtgcaaagatttaattgctgcaaataaatctgtaaaggaaattaaggaaattataggagtagatagcctagccttcttgagtattgatggactatatcaggctgttaaaggagaggtgcgtaacaatgctataccacaatattgtgatgcttgtttcactggtgattatccgattggcaaatag

SEQ ID NO: 132551 - protein, 461 aa, Wolbachia endosymbiont of Drosophila simulans
MLDEMREECGVFGISCNQSAAFNSILALHALQHRGQESFGVVTSNNDKLHSYHFQGQVSSIFDDIDEIKKSLPGDCAIGHVRYSTSGSKFGVQPMFGKSGKFGDFAIAHNGNLINISPIREQLIKQECVFQSDIDTEVVVHLTASGEKDSFLESFIYALKQIQGAYSFVAINQEVVIGVRDPSGIRPLVLGKLNGSYVLASETCALDIVNAEFVREIEPGELVTIDRNGNLASAFPFPQQKSSFCIFEYVYFSRPDSIMENRSIYDIRKEIGRILAEESPPKNNMDMVVPIPDSGIPAAIGYAKHSGLPMELGIIRNHYIGRTFIQPTAEVRKVRIKLKFNANKHTLKGKNIILIDDSIVRGSTLTNIIVMLKDAGVKEIHLKISSPPIKHSCFYGIDTPECKDLIAANKSVKEIKEIIGVDSLAFLSIDGLYQAVKGEVRNNAIPQYCDACFTGDYPIGK

SEQ ID NO: 132552 - DNA, 1494 bp, Crocosphaera watsonii WH 8501
  CDS (1)..(1494): transl_table=11
atgactgcccaaaaaaaactgtcctccagctatcacttattagattcttcttttgataataacgattatcccttagataaacccgaagaggcttgtggtgtttttggggtattagccccagaaagagaagtggcgaaactcgcctattttggtttatacgccctgcaacaccgtggccaagaatctgccggtattgctactctaaaagacgatattattcatcttcacaaagacatgggcttagtttctcaagtctttaaccaagaaatactcccaaccctcaaaggtagcatcgcagtaggccatacccgttactctactacgggatcaagccacagagctaatgcacagcccgctgttttgaaaactcgcctcggtcatttagctttagcacataacggtaatcttgtcaataccctagaattgcgaaaaaccctagaagaacggggctgtaatttccatactagcaccgactcagaaatgatcgccgttgcgatcgcccaggaagtagatcaaggaaaagactggttagaagctgccattagtgcctttcccctgtgttctggggcttatagtttggtcattggaaccccgaaaggattaatgggagtcagagatcctcatggtgtacgacctttggttattggtatcttagacgatgatcctcggcgttatgttttagcttcagagacttgcgccctagatattattggggctgactatttaagggatgtggaacccggtgaactggtgtggatcacagaggaaggattatcttcttttcattggacagaacaaccacaaaagaaattatgtatttttgagatgatctatttcgcccgtcctgacagtttaatgcacgatgaaaccttatatagttatcgggtgcgtttagggcaacaactggccagagaatcttgtgtaaaagcagatttagttatgggtgttcctgactctggtattcctgcggccattggtttttctgaggtgtctggtattccttacggcgagggcttaatcaaaaatcgttatgtgggacgtacctttatccaacccacccaacacatgagagagtcggggattaaaatgaagttaaaccccctcaaagacgttttaaacggtaaacgggtgattatggtggatgattctattgtacggggaaccaccagccgaaaaattgtcaaagctttaagagatgccggggccaaagaagttcatatgaggatctcttcccctcctgttacccatccctgcttttatggtattgataccgataaccaaagtcagttgatagcggccacaaaatctgttgctgatatttgtgaacagatcggtgtggactctttggcctatttgagttggggcggaatgttggaaatgacacaggaagataccaatggtttttgttccgcttgttttacgggagattatcccattactattcctgatgatctcaaaggctctaaattaatgttagaacaagtacgaggttaa

SEQ ID NO: 132553 - protein, 497 aa, Crocosphaera watsonii WH 8501
MTAQKKLSSSYHLLDSSFDNNDYPLDKPEEACGVFGVLAPEREVAKLAYFGLYALQHRGQESAGIATLKDDIIHLHKDMGLVSQVFNQEILPTLKGSIAVGHTRYSTTGSSHRANAQPAVLKTRLGHLALAHNGNLVNTLELRKTLEERGCNFHTSTDSEMIAVAIAQEVDQGKDWLEAAISAFPLCSGAYSLVIGTPKGLMGVRDPHGVRPLVIGILDDDPRRYVLASETCALDIIGADYLRDVEPGELVWITEEGLSSFHWTEQPQKKLCIFEMIYFARPDSLMHDETLYSYRVRLGQQLARESCVKADLVMGVPDSGIPAAIGFSEVSGIPYGEGLIKNRYVGRTFIQPTQHMRESGIKMKLNPLKDVLNGKRVIMVDDSIVRGTTSRKIVKALRDAGAKEVHMRISSPPVTHPCFYGIDTDNQSQLIAATKSVADICEQIGVDSLAYLSWGGMLEMTQEDTNGFCSACFTGDYPITIPDDLKGSKLMLEQVRG

SEQ ID NO: 132554 - DNA, 1410 bp, Exiguobacterium sibiricum 255-15
  CDS (1)..(1410): transl_table=11
gtgttatatgacatcaaaggattaaatgaagagtgtggggtgttcgggattttcggacaaccggaagccgcgcaacttgcgtattatggtcttcacagcttacaacaccggggacaggaaggggcaggaatcgtcgcgagcgacgggaaactgcttctgccgcaccgcggacaaggactcgtcacggaagttttttcgcaggagacgcttgattccttatcggggcaccatgccattggacatgtccgctattcgacggccgggggaaatacgctcgagaatacacaaccgctccattttaaatcaagaacaggcgacttggcgctggcgcacaacggaaacctcgtcaatgccgattcgttaaaacacttacttgaagcggaaggggcgattttccaaacgacgagtgatacggaagtcgttgcccacctcgtcaaacggagtaagttaccgacgcttgaagaccggattgccgatagtctggcccggctcgtcggtgcattcgccttcttgttcttaacggaagatacattgtatgttgcggtcgatccacacggtctgcggccgttgtcgctcggtaaaacaccggacggcggaatcgtcttttcatccgagacatgtgcctttgacatcgtcggtgccgagttcatccgtgatatcgagccgggggagctcgtgacgattacgacgtccggtatgtcatcacgccagtatatggaaccgcatgaacgggcaatgtgttcgatggaatacatctacttttcccgtcccgattcgatgatcgatggggtcaatgttcatacagcacgaaaagcacttggtaaaaagatgttcgaagaagcaccggtcgaggccgatgtcgttaccggtgtgccggattcaagcatctcggcagcgatcggttacgcggaagcaagcggcattccatatgaaatgggattgattaaaaaccgttacgtcggtcggacgtttatccaaccgtcacaggaactgcgcgaacgcggcgtcaaaatgaagttatcggcgctacggggtgtcgtcaatggcaaacgggtcatcatggttgatgattcaatcgttcgcgggacgacgagtcgccgcattgtcggactgttacgggaagccggggcaacggaagttcatgtccgcatcacggcaccgccgattacgaatccatgttattacgggatcgatacgtcttcaaaagatgaattgatttccgcccggttgacaccaagtgaaatctgccaggaaatcggagcggattcacttgagtttctgacggtcaatggaatggtcaatgcaatcgaccgcccgtttgacggaccattaaaaggtcagtgtacggcttgtttcacaggcgaatatccaacaccaatcggtgcattagaactagaagccaaactttga

SEQ ID NO: 132555 - protein, 469 aa, Exiguobacterium sibiricum 255-15
MLYDIKGLNEECGVFGIFGQPEAAQLAYYGLHSLQHRGQEGAGIVASDGKLLLPHRGQGLVTEVFSQETLDSLSGHHAIGHVRYSTAGGNTLENTQPLHFKSRTGDLALAHNGNLVNADSLKHLLEAEGAIFQTTSDTEVVAHLVKRSKLPTLEDRIADSLARLVGAFAFLFLTEDTLYVAVDPHGLRPLSLGKTPDGGIVFSSETCAFDIVGAEFIRDIEPGELVTITTSGMSSRQYMEPHERAMCSMEYIYFSRPDSMIDGVNVHTARKALGKKMFEEAPVEADVVTGVPDSSISAAIGYAEASGIPYEMGLIKNRYVGRTFIQPSQELRERGVKMKLSALRGVVNGKRVIMVDDSIVRGTTSRRIVGLLREAGATEVHVRITAPPITNPCYYGIDTSSKDELISARLTPSEICQEIGADSLEFLTVNGMVNAIDRPFDGPLKGQCTACFTGEYPTPIGALELEAKL

SEQ ID NO: 132556 - DNA, 1497 bp, Prosthecochloris aestuarii DSM 271
  CDS (1)..(1497): transl_table=11
atgtgcggagtgttcggtgtctacaattctaaaactcccgctgaagataccttttacgggttatattcattgcaacacagaggtcaggaagccgcaggaattgttgtagcagattacggtgaagacaaaaagaaaacaatctaccggcagcataaagcaatgggtctggttgcggaagtcttcaaggatgaaaagctcttcgacaaacttcacggtcatgcagctataggccataatcgttactcgacgacaggggcctcaaaatcgaccaacaacatccagcctttctcgctcatctaccgctcaggaaatctcgctatagctcacaatggaaatctgaccaatgcccgggcacttcgaaaagagctgacagaaaaaggggtcatcttccaggcctcgtcagacacggaagtcattccgcatctggcagccttaagccccgaaaatgaacccatccatcagatctaccacgcgctaagacaggtacagggcgccttctccatcgtcattctcgcaaacgaccaactcattgccgcacgcgacccatacggcgtcaggccacttgcccttggaaagaaagtcgatcccgataccggagaagcatcattttacatcgccagtgaaacctgcgcgttcgacattctatcagttgaatatctcagagatgtcgaacctggcgaaattctgctcatcgacagagtatcgacccgaacacataaaccaaaatcgctctatctgccgccgtcaaaacgcaaagctcgctgtattttcgaatatgtctactttgctcgtccagacagtacgatctttcagaactccgtcgataaaatccgtcgaaacctcggcaaaaaccttgcccgggaatcaaccgtccagcaatccaacgaagacaaacatctgattgtcgccagcgttccggactcgtcaaataccgctgctctcggttttgtgcgtgaaagcaataaaatcaaccgtccagcccgtttcgaacacggtctcatccgcaaccactatgtaggaagaaccttcattcagcctggaaaggcaagcagagagattaaagttcgctccaaatacaacatcatccggggggttctgcagaatcgtcagattatcctgatcgacgactcgatcgttcgcggaacaacagcacgaatgcttataaaactcattcgggaagcaaaccccaaagaaatccacctccacatcagctcgccaccgatcaccaacccctgcttctacggcatggacttccctaccaagggccagctcctgaccaatctgttcatcggcgccgcaagcgaacaggaggaagttgaaagcatcagacaatatatcggtgtagactcgctcaaatacctctctctgcagggtctgctcaacagcgtcccgcaattcgatcatgaaacctgcagttactgcacggcctgtttcacaggagactaccccatcaagatcgaagacgcaacgaccgataaagaagaaaacgacgtataa

SEQ ID NO: 132557 - protein, 498 aa, Prosthecochloris aestuarii DSM 271
MCGVFGVYNSKTPAEDTFYGLYSLQHRGQEAAGIVVADYGEDKKKTIYRQHKAMGLVAEVFKDEKLFDKLHGHAAIGHNRYSTTGASKSTNNIQPFSLIYRSGNLAIAHNGNLTNARALRKELTEKGVIFQASSDTEVIPHLAALSPENEPIHQIYHALRQVQGAFSIVILANDQLIAARDPYGVRPLALGKKVDPDTGEASFYIASETCAFDILSVEYLRDVEPGEILLIDRVSTRTHKPKSLYLPPSKRKARCIFEYVYFARPDSTIFQNSVDKIRRNLGKNLARESTVQQSNEDKHLIVASVPDSSNTAALGFVRESNKINRPARFEHGLIRNHYVGRTFIQPGKASREIKVRSKYNIIRGVLQNRQIILIDDSIVRGTTARMLIKLIREANPKEIHLHISSPPITNPCFYGMDFPTKGQLLTNLFIGAASEQEEVESIRQYIGVDSLKYLSLQGLLNSVPQFDHETCSYCTACFTGDYPIKIEDATTDKEENDV

SEQ ID NO: 132558 - DNA, 1458 bp, Xylella fastidiosa Ann-1
  CDS (1)..(1458): transl_table=11
atgtgcggtatcctcgtatcgttggcaatcaaaacgttgcttggccaactctatgacggtttgagctgttttgcaacatcgtggacaagatgctgcaggcattgccacggccagtggcactcgcttgcgcgttcaaaaggccaatgtttggtacgagacgtattcgacgagcagcgtatggcggtccttgatgggtgtattgggattgctcattgccgttatccaactgcgggttctgaggggatggatgaggcacaacctttttacgtcaactcaccgtacggcattgctttagcacataatggaaaccttatcaacacagaggcgctacaccaacaggtgttcgaagcggatcgacgtaacatcaacaccgactctgacagcgaggtattacttaacgtattcgcatatgagttagatgcgcagcgtatgctcactccagaagcggcaattcgtgctgtagcaggagtacatcgccgctgtaagggcggctacgccgtagtcagcatgatattagggctgggacttgttgcattccgcgatccacacggtatccgtccgttggtgctgggaaagcgtgtacataccgaaggtgatgaatatatggtcgcttccgaatcagctgcactcgatatcctagggtttatacgtatacgcgatgtacgtccaggtgaggctgtggtgattactgcacgtggcgaactgttttcagaggtctgtgctacacctaccaaccatactccatgcattttcgagtacgtttacttcgcacgtccggattcgatgatcgataatatttcagtacataaggcacgcatgcgtatgggtgtgaagttaggtgaaaagatcctgcgcttgcgcccgaatcacgatatcgacaccattattccgataccggatacctcgcgggatgcagcgctggaaatatctaacgtgctcggcgtaaagtatcgcgaaggtttcgttaaaaatcgctacgttggccgtacttttatcatgccgggacagggagagcgagttaagtcagtacgtcgtaaacttaacccaatccatctggagttccgaaaccgtgtggtgctgttaattgatgattcaattgttcgcggtaccaccagccgccagattgtccagatggtaagagatgctggtgcacgcaaggtgtacttagcaagtgctgcgcctcctgtgcgttatccaaatgtgtatggcattgatatgccagctgcagatgaattaatcgcacatgatcggactgagcaggaaatacaatcccttcttggctgcgattggttgatttaccaagatttagaggatctagaaaacgctgtgcgtgagggaaaccaagaaatcaagcaatttgattcctcgtgcttcaatggtcattacatcactggaattgaacggggctatttagatcgcatccgtcaactacgctccgatgaggtaaagcgaaaataa

SEQ ID NO: 132559 - protein, 485 aa, Xylella fastidiosa Ann-1
MCGILVSLAIKTLLGQLYDGLSCFATSWTRCCRHCHGQWHSLARSKGQCLVRDVFDEQRMAVLDGCIGIAHCRYPTAGSEGMDEAQPFYVNSPYGIALAHNGNLINTEALHQQVFEADRRNINTDSDSEVLLNVFAYELDAQRMLTPEAAIRAVAGVHRRCKGGYAVVSMILGLGLVAFRDPHGIRPLVLGKRVHTEGDEYMVASESAALDILGFIRIRDVRPGEAVVITARGELFSEVCATPTNHTPCIFEYVYFARPDSMIDNISVHKARMRMGVKLGEKILRLRPNHDIDTIIPIPDTSRDAALEISNVLGVKYREGFVKNRYVGRTFIMPGQGERVKSVRRKLNPIHLEFRNRVVLLIDDSIVRGTTSRQIVQMVRDAGARKVYLASAAPPVRYPNVYGIDMPAADELIAHDRTEQEIQSLLGCDWLIYQDLEDLENAVREGNQEIKQFDSSCFNGHYITGIERGYLDRIRQLRSDEVKRK

SEQ ID NO: 132560 - DNA, 1458 bp, Xylella fastidiosa Ann-1
  CDS (1)..(1458): transl_table=11
atgtgcggtatcctcggtatcgttggcaatcaaaacgttgctggccaactctatgacggtttgactgttttgcaacatcgtggacaagatgctgcaggcattgccacggccagtggcactcgcttgcgcgttcaaaaggccaatggtttggtacgagacgtattcgacgagcagcgtatggcggtccttgatgggtgtattgggattgctcattgccgttatccaactgctggttctgaggggatggatgaggcacagcctttttacgtcaactcaccgtacggcattgctctagcacataatggaaatcttatcaatacagaggcgctacaccaacaggtgttcgaagcggatcgacgtaacatcaacaccgactctgacagcgaggtattacttaacgtattcgcatatgagttagatgcgcagcgtatgctcactccagaagcggcaattcgtgctgtagcaggagtacatcgccgctgtaagggcggctacgccgtagtcagcatgatattagggctgggacttgttgcattccgcgatccacacggtatccgtccgttggtgctgggaaagcgtgtacataccgaaggtgatgaatatatggtcgcttccgaatcagctgcactcgatatcctagggtttatacgtatacgcgatgtacgtccaggtgaggctgtggtgattactgcacgtggcgaactgttttcagaggtctgtgctacacctaccaaccatactccatgcattttcgagtacgtttacttcgcacgtccggattcgatgatcgataatatttcagtacataaggcacgcatgcgtatgggcgtgaagttaggtgaaaagatcctgcgcttgcgcccgaatcacgatatagacaccattattccgataccggatacctcgcgggatgcagcgctggaaatatctaacgtgctcggcataaagtatcgcgaaggtttcgttaaaaatcgctacgttggccgtacttttatcatgccgggacagggagagcgagttaagtcagtacgtcgtaaacttaacccaatccatctggagttccgaaaccgcgtggtgctgttgattgatgattcaattgttcgcggtaccaccagccgccagattgtccagatggtaagagatgctggtgcacgcaaggtgtacttagcaagtgctgcgccacctgtgcgttatccaaatgtgtatggcattgatatgccagctgcagatgaattaatcgcacatgatcggactgagcaggaaatacaatcccttcttggctgcgattggttgatttaccaagatttagaggatctagaaaacgctgtgcgtgagggaaaccaagaaatcaagcaatttgattcctcgtgcttcaatggtcattacatcactggaattgaacggggctatttagatcgcatccgtcaactacgctccgatgaggtaaagcgaaaataa

SEQ ID NO: 132561 - protein, 485 aa, Xylella fastidiosa Ann-1
MCGILGIVGNQNVAGQLYDGLTVLQHRGQDAAGIATASGTRLRVQKANGLVRDVFDEQRMAVLDGCIGIAHCRYPTAGSEGMDEAQPFYVNSPYGIALAHNGNLINTEALHQQVFEADRRNINTDSDSEVLLNVFAYELDAQRMLTPEAAIRAVAGVHRRCKGGYAVVSMILGLGLVAFRDPHGIRPLVLGKRVHTEGDEYMVASESAALDILGFIRIRDVRPGEAVVITARGELFSEVCATPTNHTPCIFEYVYFARPDSMIDNISVHKARMRMGVKLGEKILRLRPNHDIDTIIPIPDTSRDAALEISNVLGIKYREGFVKNRYVGRTFIMPGQGERVKSVRRKLNPIHLEFRNRVVLLIDDSIVRGTTSRQIVQMVRDAGARKVYLASAAPPVRYPNVYGIDMPAADELIAHDRTEQEIQSLLGCDWLIYQDLEDLENAVREGNQEIKQFDSSCFNGHYITGIERGYLDRIRQLRSDEVKRK

SEQ ID NO: 132562 - DNA, 1455 bp, Streptococcus suis 89/1591
  CDS (1)..(1455): transl_table=11
atgacatacgaagttaaatcactcaatgaagaatgcggtgttttcggcatttggggacatccgcaggctgctcaggtgacctattttggtctccatagtttgcagcaccgtggacaagaaggagcagggattttagcaaatgatggcggacaattgcgtcgccatcgcggaacaggcctgattgcagaagtcttcaaaaatccagcagatttagaatccttgacaggaacggctgctattggtcatgtccgttatgcaacttctggctctgcttctatcaataatatccagcccttcttatttgattttgcagacatgcaggtgggtttggcacacaatgggaatttgaccaacgcggtcagtttgaaggctgaacttgaaaaaaatggttccattttctcttcttcttctgacactgagattctcatgcacttgattcgccgcagtcacaatccagactttatgggaaaaatcaaggaagccctcaatactgttaaagggggctttgcctacctgatcttgttggaagacaaattggttgctgccttggaccctaacggtttccgtccactttcaataggcaaaatgaaaaatggtgcctgggtagttgccagcgaaacttgtgcttttgaagtagtgggggctgactgggtgcgagatgtggagcctggtgaaattgtcgtcattgatgattcaggaattcaatatgatagctatacaagagatacgcaactggctgtttgctctatggagtatgtctattttgctcgcccagattcggtaattcacggggtcaatgtccacacggctcgtaaaaatatgggtcgtcgtttggcccaggaatttcaacatgaagcagatatcgtggttggtgtgccaaactcctccctatctgcggctatgggatttgcagaggaatctggtttgccaaatgaaatggggctgattaaaaaccaatacacccagcggacctttattcaaccaacccaggaattgcgggagcagggtgtgcgcatgaagttgtcagccgtttcaagtgttgtcaaaggcaagcgtgtggtcatgattgacgactctattgttcgcggtacaactagccgccgcattgtccagcttcttcgtgatgcaggggcaaaagaagtccatgtggctatcggcagcccagaactcaagtacccgtgtttctatggtattgatattcagacccgtagggagctgatttcagccaaccataccgttgatgaagtctgtgagattatcggggcagacagtctgacctacctttctcttgaggggatgattgaagccatcggcatcgaaaccgatgcgccaaaaggcgggctctgtgtagcctactttgacggagaatttccaacgcctctctatgactatgaggaagaataccttcgtagcctagaagagaaaacgagtttctacattgaaaatgtcaagtaa

SEQ ID NO: 132563 - protein, 484 aa, Streptococcus suis 89/1591
MTYEVKSLNEECGVFGIWGHPQAAQVTYFGLHSLQHRGQEGAGILANDGGQLRRHRGTGLIAEVFKNPADLESLTGTAAIGHVRYATSGSASINNIQPFLFDFADMQVGLAHNGNLTNAVSLKAELEKNGSIFSSSSDTEILMHLIRRSHNPDFMGKIKEALNTVKGGFAYLILLEDKLVAALDPNGFRPLSIGKMKNGAWVVASETCAFEVVGADWVRDVEPGEIVVIDDSGIQYDSYTRDTQLAVCSMEYVYFARPDSVIHGVNVHTARKNMGRRLAQEFQHEADIVVGVPNSSLSAAMGFAEESGLPNEMGLIKNQYTQRTFIQPTQELREQGVRMKLSAVSSVVKGKRVVMIDDSIVRGTTSRRIVQLLRDAGAKEVHVAIGSPELKYPCFYGIDIQTRRELISANHTVDEVCEIIGADSLTYLSLEGMIEAIGIETDAPKGGLCVAYFDGEFPTPLYDYEEEYLRSLEEKTSFYIENVK

SEQ ID NO: 132564 - DNA, 1452 bp, Roseovarius nubinhibens ISM
  CDS (1)..(1452): transl_table=11
atgccaccagcacaccctttcgacgacgacaaactgaaggaggagtgtggcatatacggcgtcatcggcgttgccgacgctgccaactttgtcgccctcggcctgcacgccctgcaacaccggggccaagaggccggcggcatcgtctgccaccaccccgatcacgggttcaacaacgcccgccgctttggctatgtgcgggacaatttcaccgaccagaacctgatggcgaccctgcccgggccgctggccatcggtcacgtccgctactccaccgcaggcggcaaggccccggtgatccgcgacgtccagcccttcttcggcgaattttccatgggcggcgccgccgtcgcccataacggcaatatcaccaatgccgacgcgctgcgccgcgagctgatcgagcgcggctcgatctttcagtccaactccgacagcgaatgcatcatccacctgatggcgcgcagcctgcagaaaaccatccccgaccggatggaagacgcgctgcgccgggtcgaaggcgccttctccgtggtcgccatgacccggaccaagctcatcggcgtccgcgacccgctcggcgtgcgcccgctggtcctgggccagatcggcgacggctgggtgctgagctcggaaacctgcgccctcgacatcatcggcgcgcgctatgtgcgcgaggtcgagccgggcgaaatggtggtcatcaccgatcagggcgtcgagagccgccgccccttccgcaaacagccctcgcgcttttgcatcttcgaacatgtctatttctcgcgccccgacagcatcatcggcggccgctcggtctatgagacccgccgccagatcggcatcgagctggccaaggaaagccccgtcgacgccgatctcgtctgcccggtccccgacagcggcaccccggcggccatcggctttagccacgaatcgggcattccctacgccatggggatcatccgcaaccaatatatgggccggaccttcatcgagccgaccgagcagatccgcaacatgggcgtgcggctcaagctcaacgtcaaccgcgccctgatcgagggcaagcgcgtcatcctcgtcgatgacagcgtggtccgcggcaccacctcgcgcaagatcaaggaaatgatcctcgacgccggcgccaaggaggtccacttccgcatcgccagcccgccgaccgcctggccctgcttctatggtgtcgacacgcccgaacgcgaaaagcttctggccgccaccatgtccgaagaagaaatgcgcgatcacctgcaggtcgacagcctgcgcttcatctcgctcgacggtctctaccgcgccgtgggcgaggccgaaggccgcaacgccaaatgcccgcaatattgcgacgcctgcttctccggcgaatacccggtcgccccctccgatcagatcgaaaagggcttcacgctcaaagcggcggaatga

SEQ ID NO: 132565 - protein, 483 aa, Roseovarius nubinhibens ISM
MPPAHPFDDDKLKEECGIYGVIGVADAANFVALGLHALQHRGQEAGGIVCHHPDHGFNNARRFGYVRDNFTDQNLMATLPGPLAIGHVRYSTAGGKAPVIRDVQPFFGEFSMGGAAVAHNGNITNADALRRELIERGSIFQSNSDSECIIHLMARSLQKTIPDRMEDALRRVEGAFSVVAMTRTKLIGVRDPLGVRPLVLGQIGDGWVLSSETCALDIIGARYVREVEPGEMVVITDQGVESRRPFRKQPSRFCIFEHVYFSRPDSIIGGRSVYETRRQIGIELAKESPVDADLVCPVPDSGTPAAIGFSHESGIPYAMGIIRNQYMGRTFIEPTEQIRNMGVRLKLNVNRALIEGKRVILVDDSVVRGTTSRKIKEMILDAGAKEVHFRIASPPTAWPCFYGVDTPEREKLLAATMSEEEMRDHLQVDSLRFISLDGLYRAVGEAEGRNAKCPQYCDACFSGEYPVAPSDQIEKGFTLKAAE

SEQ ID NO: 132566 - DNA, 1485 bp, Oceanicola batsensis HTCC2597
  CDS (1)..(1485): transl_table=11
atgatcgctgacacccattcccatgacccccggctgccccgccatcccctggatgacgacaagctgcgggaagaatgcggcatcttcggcgtgatcggcgccgccgacgccgccagcttcgtcgccctcggcctgcatgcgttgcagcatcgcggccaggaggccggcggcatcgtggtgcacgaccccgagcacgggttcaactcggcccggcggctgggttacgtgcgcgacaacttcacctcgcccgacctgatggagaccctgcccggtcctctcgggatcggccacgtccgctattccacgacaggcaacaagggccataccgcgatccgcgacgtgcagcccttcttcggcgaattcgccatgggtggggccgcgctggcgcacaacggcaacatcaccaatgccgaggccctgcggaaggaactgatcgaacgcggcgcgatcttccagagctcgtccgacagcgaatgcatcatccacctgatggcgcggtcgcttcagcgcaacatccccgaccggatggaggacgcgctgcggcgggtcgagggggcattctcggtcgtggccatgaccgggacccagctgatcggggtgcgcgacgccctgggcgtgcgcccgctggtgctgggcaaggtggccgacggctatgcgctctcctccgagacctgcgccctcgatatcatcggggccgagttcgtccgcgagatcgagcccggcgagatggtcgtcatcaccgagaagggcgtcgaaagccgctttcccttccgccgtcagaactcgcgcttctgcatcttcgagcatgtctatttctcgcgccccgattccatcatcggcgggcgctcggtctacgaaacccgccggcagatcggtgtggaactggcgcgcgaagccccggtcgaggccgatctcgtctgcccggtgccggacagcggcacgcctgcggccatcggctacagccaggaatcgggcattccctacgccatggggatcatccgcaaccagtacatgggacggaccttcatcgaaccgaccgagcagatccgcaacatgggcgtgcggctcaagctgaacgtgaaccgggcgctgatcgcgggcaagcgcgtgatcctcgtcgacgactcggtggtgcgcggcacgacctcgcgcaagatcaaggaaatgatcctcgatgcgggcgcggccgaggtgcatttccgcatcgcctctccgccgaccgcctggccctgcttctacggggtggacacgccgcagcgcgaaaagctgctggccgcgaccatgtccgaggaagagatgcgggatcatctcgcggtgaacagcctcaagttcatctcgctcgacggcctctaccgcgccgccggcgcggccgaggggcgcaacgatgcctgtccgcaatattgcgacgcctgcttctcgggcgagtacccggtagagccctcggacatgatcgaacgcgggttcgaactgaaagcggcggaatag

SEQ ID NO: 132567 - protein, 494 aa, Oceanicola batsensis HTCC2597
MIADTHSHDPRLPRHPLDDDKLREECGIFGVIGAADAASFVALGLHALQHRGQEAGGIVVHDPEHGFNSARRLGYVRDNFTSPDLMETLPGPLGIGHVRYSTTGNKGHTAIRDVQPFFGEFAMGGAALAHNGNITNAEALRKELIERGAIFQSSSDSECIIHLMARSLQRNIPDRMEDALRRVEGAFSVVAMTGTQLIGVRDALGVRPLVLGKVADGYALSSETCALDIIGAEFVREIEPGEMVVITEKGVESRFPFRRQNSRFCIFEHVYFSRPDSIIGGRSVYETRRQIGVELAREAPVEADLVCPVPDSGTPAAIGYSQESGIPYAMGIIRNQYMGRTFIEPTEQIRNMGVRLKLNVNRALIAGKRVILVDDSVVRGTTSRKIKEMILDAGAAEVHFRIASPPTAWPCFYGVDTPQREKLLAATMSEEEMRDHLAVNSLKFISLDGLYRAAGAAEGRNDACPQYCDACFSGEYPVEPSDMIERGFELKAAE

SEQ ID NO: 132568 - DNA, 1458 bp, Prochlorococcus marinus str. MIT 9211
  CDS (1)..(1458): transl_table=11
atgtgcggcatagtaggtattttttctaatcatcagattaatcaattgatttatgacagcttgttattattgcagcatagagggcaagactctacaggtatagcaacgatggaaggaagtttattccatatatgtaaatcaaaaggacaagtaaaagaagcttatagaacgcgagatatgagaagtttacttggcaatataggtattggtcatgtcagatatgcgactaaaggaactgcagatagtgaaaatgaagcacaacccttttatgtcaatgcaccttatggcattattcttgtacataatggaaatttgactaatacaagagaactagaaaagcagctttttaatatagatcgaagacatacaaattcttctagtgatactgaaatgttgctaaatatctttgcaactgaaatacaagctcaaattcatggaagttctttatcaccagaacatattttttctgctattaaatcattacataaaagagtggaaggttcttatgctgctattgctttaattgctggccatggattagttgcttttagagatccgtatggaattagaccattagttttaggtaaaagaatttcggaagataatcgggatgaatggattcttgcaagcgaatctctggtcttggaaaataacgattttcaaattgttcgtgatttagatccaggggaggcagtatttatatcagtcaatggtgaacttcattcccaacaatgttcagataatcccaaactatttccttgttctttcgaatatgtttatttagctaggcctgattcaattatgaatggaatctctgtctatgaagcaaggcttcggatgggtgatcgattagcgaatactataaaaaagacacttaattctggagatattgatgttgttatgcctattcccgattcttccaggccttctgccatgcaagttgctagacaattaggtgttgaatatagagaaggattttttaaaaatagatatgtaggcagaacttttattatgccagggcaatctcaacgaaagaaatcagtacgacaaaagttaaatgctatgagtacagagtttaaaggaaaaaatattctcattgttgacgactctatagttcgaggaactacttctagagaaatagttcaaatggcaagacttgctggagcgaataaagttacatttacttcagcagctccgcctatacgatttccgcatgtttatgggattaatatgccttcaaaagatgagctaatagcatatgatcgatccattcttgaaattcagaatattttattagttgatcaattagtttatcaagaggtcggtgatcttaagactgcaattttggatgactccaagatagaagatttagatatgtcttgctttacaggtcattatgttacaggaacagttactaatgaatatttaaattgggttgaaactgaatatatttcttaa

SEQ ID NO: 132569 - protein, 485 aa, Prochlorococcus marinus str. MIT 9211
MCGIVGIFSNHQINQLIYDSLLLLQHRGQDSTGIATMEGSLFHICKSKGQVKEAYRTRDMRSLLGNIGIGHVRYATKGTADSENEAQPFYVNAPYGIILVHNGNLTNTRELEKQLFNIDRRHTNSSSDTEMLLNIFATEIQAQIHGSSLSPEHIFSAIKSLHKRVEGSYAAIALIAGHGLVAFRDPYGIRPLVLGKRISEDNRDEWILASESLVLENNDFQIVRDLDPGEAVFISVNGELHSQQCSDNPKLFPCSFEYVYLARPDSIMNGISVYEARLRMGDRLANTIKKTLNSGDIDVVMPIPDSSRPSAMQVARQLGVEYREGFFKNRYVGRTFIMPGQSQRKKSVRQKLNAMSTEFKGKNILIVDDSIVRGTTSREIVQMARLAGANKVTFTSAAPPIRFPHVYGINMPSKDELIAYDRSILEIQNILLVDQLVYQEVGDLKTAILDDSKIEDLDMSCFTGHYVTGTVTNEYLNWVETEYIS

SEQ ID NO: 132570 - DNA, 1503 bp, Erythrobacter sp. NAP1
  CDS (1)..(1503): transl_table=11
atggcaaacaccgatactgagggcgtcgcaggcaacctcactcatccatttctggaccccgatggcgacaagcttcgcgaagagtgcggcgtgttcggcgcgatcaacgcggagaaagctgctgctgcgaccgccttgggcctgcacgcgctccagcatcgcgggcaggaagcggtcggcataaccagcttcgatggcaaggatttcatctctcgccgcgcgcttggacatgtcgcggacagtttctcctcacaagaagcaatcgacgaactgcccggctcgatggcggcaggccatgtgcgctattcgacgaccggcggcgcgggccttcgcaatgtgcagccgctctatgccgagcttgcaagcggcggttttgccattgcccataatggcaacatctcgaactcgcttgcgctgaggaaagacctcgttggcaaagggtcgatcttccagtcgacctccgacaccgaagttatcatccaccttgtcgccacctcgcgttatccaacggtcgccgaccggctgatcgacgcgctgcgccttgtcgaaggggcctatgcgctgatcgtgatgacgcccgaaggcatgatcgcctgccgcgacccgctgggcatccgtccgctggtaatgggcaagcttggcgattcgatcctgttcgccagcgaaagcgtcgccttcgacgtggtcggtgccgaattcgtgcgcgaggtcgaagctggcgagatgattcaggtcggtttcgacggcgagatcaagagtctgcaccccttcggcaaccagaaggcgcggccctgcatcttcgaacacgtctatttcagccgtccagacagctcctttgccgggcacagtgtctatgaggcgcgcaaggcgatcggtcgcgaactcgctatcgaagcgccatgcgatgtcgatctggtcgtgcccgtaccggacagcggcgtgcctgcagcaattggatatgctcaggaatcgggcgtgcccttcgagcttggcatcatacgctcgcactatgtcgggcgcacatttatccagccctcggacagcgcgcgtcattcaagcgttaagcgcaagcacaacgccaatcgcggccttgtcgccggaaagcggatcgtgctcatcgacgattcgatcgtgcgcggcaccaccagcctcaagatcgtcgagatgatgcgcgaggcaggtgcaagcgaagtgcacttccgcgtcgccagcccgccgaccgcgcattcgtgcttttacggcgtggacactcccgaacgctcgaaactgctcgcagcgcgcatggaaatcgagccaatgcgcgaattcatcaaggccgacagcctcgccttcatctccatcgacggcctttaccgcgccgtcggctcgaaaagtcgcgacaaggcctgcccgcaattctgcgacgcctgcttcaccggcgattatcccaccagcctgaccgacctcgcgatgagcgaagaggggacaggcgaactcccttttgttgatcccaaagcggcctga

SEQ ID NO: 132571 - protein, 500 aa, Erythrobacter sp. NAP1
MANTDTEGVAGNLTHPFLDPDGDKLREECGVFGAINAEKAAAATALGLHALQHRGQEAVGITSFDGKDFISRRALGHVADSFSSQEAIDELPGSMAAGHVRYSTTGGAGLRNVQPLYAELASGGFAIAHNGNISNSLALRKDLVGKGSIFQSTSDTEVIIHLVATSRYPTVADRLIDALRLVEGAYALIVMTPEGMIACRDPLGIRPLVMGKLGDSILFASESVAFDVVGAEFVREVEAGEMIQVGFDGEIKSLHPFGNQKARPCIFEHVYFSRPDSSFAGHSVYEARKAIGRELAIEAPCDVDLVVPVPDSGVPAAIGYAQESGVPFELGIIRSHYVGRTFIQPSDSARHSSVKRKHNANRGLVAGKRIVLIDDSIVRGTTSLKIVEMMREAGASEVHFRVASPPTAHSCFYGVDTPERSKLLAARMEIEPMREFIKADSLAFISIDGLYRAVGSKSRDKACPQFCDACFTGDYPTSLTDLAMSEEGTGELPFVDPKAA

SEQ ID NO: 132572 - DNA, 1434 bp, Synechococcus sp. RS9917
  CDS (1)..(1434): transl_table=11
atggaggaagcgtgcggcgtgtacgccgtgctcgccgcagagcagccggtggcgaacctcacttatttcggcctgtattccctgcagcatcgcggccaggagtcggcgggaatcgccgttttcaaccagggcaaggtgcgcctgcacaaagacatgggcctggtcagccaggtgtttgatcaggacgtcctggcccgcatgcccggtcatctggccgtgggccacaaccgctattccacgaccggcagcagcagggtctgcaatgcccagccggtggtgctgatgacgcgcctcggccctttcgccttggctcacaacggcaatctcgtcaacgcagcggaactgaggcagcgtgttgatgatggccaggccgaattcacctccaccaccgattcggaattgatcgcgctggcgattcagcaggcggtggagcgcggcctcgattggcagccggcgatcacggaagccgtggccttgtgtcgtggtgctttcagtctggtgatcggcaccaatgacgccctctatgcccttcgcgacggctatggcatcagaccgctggtgtatggccgccttggcgatgccagcgaagggcactgggtggtgagcagtgaaacctgtgggctcgacatcatcggcgccagttatgaggcggatgtgcaacccggcgaaatcgtgcgctttcattgcggtgaaccggagccatcgattcagcggtgggtggaaccttccaccaggatgtgcgtgttcgaaatgatctatttcgcccggccagacagccgcttcttcggagaatcgctctacagctaccggcaacgcatcggtcagatcctggcgaaggaatcggcggtggaagccgatctggtgatcggtgtgcctgattcgggcattcctgccgccatcgggtatgcccaggcgagcggattggcgtttgccgatggcctgatcaaaaaccgctacgtcggtcgcaccttcattcaaccgacccaggcgatgcgggaagcggggatacgggtgaaattgaatccgttgccggatgtgctggccggtcagcgggtggtggtgatcgatgactcgatcgtgcgcggcaccacaagccgcaagctggtgcaggcccttcgcgatgccggtgccaccgaggtgcacatgcggatcagttccccaccggtcacccatccctgtttttacggcatcgacaccgacacccaggatcagctcatcgccgcccgtctcacgttggcggagatccaggagcatctcaaggtcgattccctcgcctatctcagcaaagaaggcatggtggaagcggcgcgggccagttcgtcccagttctgcaccgcctgttttgacggtgcctatccggtgccgatggatgaggcgatgcgctccagcaagctcatgctcgagccggccggtgtggcggcctcactccgctga

SEQ ID NO: 132573 - protein, 477 aa, Synechococcus sp. RS9917
MEEACGVYAVLAAEQPVANLTYFGLYSLQHRGQESAGIAVFNQGKVRLHKDMGLVSQVFDQDVLARMPGHLAVGHNRYSTTGSSRVCNAQPVVLMTRLGPFALAHNGNLVNAAELRQRVDDGQAEFTSTTDSELIALAIQQAVERGLDWQPAITEAVALCRGAFSLVIGTNDALYALRDGYGIRPLVYGRLGDASEGHWVVSSETCGLDIIGASYEADVQPGEIVRFHCGEPEPSIQRWVEPSTRMCVFEMIYFARPDSRFFGESLYSYRQRIGQILAKESAVEADLVIGVPDSGIPAAIGYAQASGLAFADGLIKNRYVGRTFIQPTQAMREAGIRVKLNPLPDVLAGQRVVVIDDSIVRGTTSRKLVQALRDAGATEVHMRISSPPVTHPCFYGIDTDTQDQLIAARLTLAEIQEHLKVDSLAYLSKEGMVEAARASSSQFCTACFDGAYPVPMDEAMRSSKLMLEPAGVAASLR

SEQ ID NO: 132574 - DNA, 1431 bp, Synechococcus sp. WH 5701
  CDS (1)..(1431): transl_table=11
atggaagaggcctgtggggtctttgccgtgtacgcccctggccagcaagtggccaacctcacctacttcggcctctacgccctgcagcaccggggtcaggaatcggccggcatcgctgtgttcaacggcgacaaggtgcggctgcacaaggacatgggcctggtgagccaggtctttgatcaggacgtgctcgagcgcatgcccggtgatctggccgtgggccacaaccgctattccaccaccggcagcagtcgggtctgcaacgcccagccggtggtgttgatgacccgcctcggcccctttgcgctggcccacaacggcaatctcgtcaacgtcgaggatctgcgccagtcggtgcaggccagtgagatccagttcacctccaccacggattcagaactgattgcctttgccctgcaacacgctgtggacggggggctgggctgggaggaggcgatccgcgacgcggccggccgctgccgcggggccttcagcctggcgatcggcacgcccgatgggctgttcgccctgcgtgatggccatggggtgcggcccctggtgttcggccacctcggcgacaagcaccagggccagtgggtggtcagcagtgaaacctgtggactcgacatcatcggcgccgcctacgacggtgacgtgggcccgggtgagctgatccgcttcagcgccggtgatccgctgccggcccgccagcgctggtgcgacgagcccaccaagctctgcgtgttcgagatgatctacttcgcccggcctgacagccgcttcttcggcgagtcgctttacagctaccgccaccgcatcggtgaggtgctggcgcgggaaactgctgtggaagccgacatcgtgatcggcgtccccgattccggcattcccgccgccatcggtttttccaaggccagcggcattccctttgccgatggtctgatcaaaaaccgctacgtgggccgtaccttcatccaacccacccaggcgatgcgggaggcgggcattcgcgtcaagctcaaccccctgccggatgtgctctccggcaagagggtggtggtgatcgacgattcgattgtgcggggcaccaccagccgcaagttggtgatcgccctgcgtgaggccggtgcgaccgaggtgcacatgcgcatcagctcaccgccggtcacccacccctgcttctacggcatcgacaccgacaaccaggaccagctgattgctgcgcgcctcaatctccaggagatcaccgatcatctccaggttgattccctggcctatctcagcaaggagggcatgctcgaggctgcccacgacaacgcctctcatttctgcaccgcttgcttcgacggcaactatccgatcgagatggacgattccgtgcggtccagcaagttgatgctcgagcccacgggtctggcggccagggtctga

SEQ ID NO: 132575 - protein, 476 aa, Synechococcus sp. WH 5701
MEEACGVFAVYAPGQQVANLTYFGLYALQHRGQESAGIAVFNGDKVRLHKDMGLVSQVFDQDVLERMPGDLAVGHNRYSTTGSSRVCNAQPVVLMTRLGPFALAHNGNLVNVEDLRQSVQASEIQFTSTTDSELIAFALQHAVDGGLGWEEAIRDAAGRCRGAFSLAIGTPDGLFALRDGHGVRPLVFGHLGDKHQGQWVVSSETCGLDIIGAAYDGDVGPGELIRFSAGDPLPARQRWCDEPTKLCVFEMIYFARPDSRFFGESLYSYRHRIGEVLARETAVEADIVIGVPDSGIPAAIGFSKASGIPFADGLIKNRYVGRTFIQPTQAMREAGIRVKLNPLPDVLSGKRVVVIDDSIVRGTTSRKLVIALREAGATEVHMRISSPPVTHPCFYGIDTDNQDQLIAARLNLQEITDHLQVDSLAYLSKEGMLEAAHDNASHFCTACFDGNYPIEMDDSVRSSKLMLEPTGLAARV

SEQ ID NO: 132576 - DNA, 1506 bp, Synechococcus sp. WH 7805
  CDS (1)..(1506): transl_table=11
atgcagaattccgaaggaaatccgaagtcgaggcggagcgtgcatcagctcgaggcggagcgtcccgatcggatggaggaagcctgcggtgtgttcgccgttcaggcttccgagcaaccggtggccaacctggcttatttcggtctgtatgcactgcagcatcgcggccaagaatccgcaggcatcgctgtgtttaaccagggaaaggttcgtcttcataaagacatgggcctggtcagtcaggtgttcgatcaagacgtgcttgcccggatgcccggtgatctcgccattggccataaccgttattccacaactggcagcagcagggtctgcaatgcccagccggtggttctgatgactcgccttggtcccttcgcgctggcccacaacggcaatctggtcaatgccgctgaattgcgggaacgcattgatgatggagaggttgaatttacctccaccactgattccgagctgattgccttcgcccttcagcaggctgttgatcgtgggctcgactggaaggctgcgatcacgtctgcggtgtcgctctgccagggggccttcagtctggtgatcggcactccggaagcgctttatggcctgcgcgacggctacggcatccgaccgttggtgttcggttctctcggtgaggattccagtgggcagtgggttctcagcagtgaaacctgtgggctcgacatcatcggggcttccttcgttgacgatgtgcagcccggtgagctcgtgaccttccttcccggtgatccaatcccccagagggagtgctggattgagcccaccacgcgcatgtgcgtgttcgagatgatctatttcgccaggccggacagtcggtttttcggagaatcgttgtacagctatcgccagcgcatcggtcagattcttgccagggaatcggcagtggaggctgatctcgtgatcggcgtgcctgattcagggattcctgctgcgatcggatactcccaggccacgggactgccctacgccgatggcctgatcaagaaccgttacgtcggtcgcaccttcatccagcccacccaagcgatgcgcgaagccggcatccgggtgaagctcaatcccctccccgatgtgctcaacggaaagcgcgtcgtggtgatcgatgattcgattgtgcgtggaacaaccagtcgcaagcttgttcaggctcttcgcgatgctggagccacggaggtgcacatgcgtatcagctcaccaccggtcacccatccctgcttttacggcattgataccgatacccaggatcaactgatcgctgctcgctacaccctggaggaaattgaagcccatctcaaggttgattcactggcttatctcagtcaggcaggaatgttggaagcggctggagccgatgccaaacacttttgcaccgcctgttttgatggtgattaccccgtgccgatggatgaatccatcagatccagcaagctgatgctggaacctgccggtgtggctgccaacctgagttga

SEQ ID NO: 132577 - protein, 501 aa, Synechococcus sp. WH 7805
MQNSEGNPKSRRSVHQLEAERPDRMEEACGVFAVQASEQPVANLAYFGLYALQHRGQESAGIAVFNQGKVRLHKDMGLVSQVFDQDVLARMPGDLAIGHNRYSTTGSSRVCNAQPVVLMTRLGPFALAHNGNLVNAAELRERIDDGEVEFTSTTDSELIAFALQQAVDRGLDWKAAITSAVSLCQGAFSLVIGTPEALYGLRDGYGIRPLVFGSLGEDSSGQWVLSSETCGLDIIGASFVDDVQPGELVTFLPGDPIPQRECWIEPTTRMCVFEMIYFARPDSRFFGESLYSYRQRIGQILARESAVEADLVIGVPDSGIPAAIGYSQATGLPYADGLIKNRYVGRTFIQPTQAMREAGIRVKLNPLPDVLNGKRVVVIDDSIVRGTTSRKLVQALRDAGATEVHMRISSPPVTHPCFYGIDTDTQDQLIAARYTLEEIEAHLKVDSLAYLSQAGMLEAAGADAKHFCTACFDGDYPVPMDESIRSSKLMLEPAGVAANLS

SEQ ID NO: 132578 - DNA, 1521 bp, Pseudoalteromonas tunicata D2
  CDS (1)..(1521): transl_table=11
atgtgtggtattgttggtatagtcggaacttctcctgttaatcaggcgatctatgatggcttaactgtgttacagcatcgaggacaagatgcagctggcatcatcactatcgatcgcaatacgtttagtttacgtaaagataatggattagtgaaagacgtgttccatactcgtcatatgaagcgtttacaaggcaacatgggtattggccatgtgcgttatcctaccgcaggttcttcaagttcagctgaagcgcaacctttttatgttaactctccatttggaatttcacttgcgcacaatggtaatttaaccaatgcggaagcgttaaaagaggagttattttctgttgcaaaacgtcatgttaatacgacatcagattctgaagtattattaaatgttttagcgcacgaattatctaaaccagatacgttgcatttatctcctgagcacatttttaccgctgtcacgacagtgaatgaaaaagtggttggtggttatgccgcaatagcgatgattatcggacacggcatgctggcatttcgtgatgcaaatggcattcgcccgttggtatttggtaagcgtgaaacgagtaaaggcattgaatatatgtttgcctcagaaagtgtcgcactagatgctgatggctttaattttgtacgcgatgttgccccgggtgaagcgatttttgttactaatgaaggtcaactctattcgcagcagtgtgcagagcatgcgacttattcgccttgtatttttgaatttgtatattttgcgcgtcctgattcaaccatagataaaatgtctgtctatgcaacgcgtgttaatatgggcacaaaattaggtgagaaaattgcgcgtgaatgggctgataaagacattgatgttgttatcccaattcctgaaacgtcatgtgatattgcacttgaaattgcctctgtattaaatgtgccttatcgccaaggttttgtgaaaaaccgttatattggacgcacatttattatgcctggccaagaggaacgtaaaaagtcagtgcgccgtaaacttaatgcaattgcacgtgagtttaaaggtaaaaatgtattacttgttgacgattcgattgttcgtggtacaacatctgcccaaatagtagaaatggcgcgtgaagcaggggctaagcacgtttatttcgcatcagcagcaccagaagtacgcttcccgaatgtatatggtattgatatgccatcggcaaccgagcttattgctcatggtcgtgaagtagaagatattaatgcttatattggttctgatggcctgatataccaatcattaccagatttaattgaagcggttggtaaagaaaacccagaaattaaacgttttgaaacatcggtttttgacggtcattatgtgacgggtgatatcgatcaagagtacttaaaccgtatagaagcactgcgtaacgatgcagctaaatctcatcgtgaagatgcaatgtcatcgggtttagagttacacaatcaggactcaacagaataa

SEQ ID NO: 132579 - protein, 506 aa, Pseudoalteromonas tunicata D2
MCGIVGIVGTSPVNQAIYDGLTVLQHRGQDAAGIITIDRNTFSLRKDNGLVKDVFHTRHMKRLQGNMGIGHVRYPTAGSSSSAEAQPFYVNSPFGISLAHNGNLTNAEALKEELFSVAKRHVNTTSDSEVLLNVLAHELSKPDTLHLSPEHIFTAVTTVNEKVVGGYAAIAMIIGHGMLAFRDANGIRPLVFGKRETSKGIEYMFASESVALDADGFNFVRDVAPGEAIFVTNEGQLYSQQCAEHATYSPCIFEFVYFARPDSTIDKMSVYATRVNMGTKLGEKIAREWADKDIDVVIPIPETSCDIALEIASVLNVPYRQGFVKNRYIGRTFIMPGQEERKKSVRRKLNAIAREFKGKNVLLVDDSIVRGTTSAQIVEMAREAGAKHVYFASAAPEVRFPNVYGIDMPSATELIAHGREVEDINAYIGSDGLIYQSLPDLIEAVGKENPEIKRFETSVFDGHYVTGDIDQEYLNRIEALRNDAAKSHREDAMSSGLELHNQDSTE

SEQ ID NO: 132580 - DNA, 1518 bp, Photobacterium sp. SKA34
  CDS (1)..(1518): transl_table=11
atgtgtggtattgttggaatcgtgggctcaaccccggtaaaccagtctatctatgatgcacttactgtgctgcaacatcgcggccaagatgctgcgggtatttgtaccttagaaagcaatcgtttccgtctgcgtaaagcgaatggtttagtgcgtgatgtatttgaagctaaacacatgcaacgcttacaaggtaatgtaggtatcggtcacgtgcgttatccaactgcgggtagctcaagtgcatcagaagcccaaccgttttatgttaattctccttacggtatttcactggctcataatggtaatttaaccaacgcagcagatatccgtgaaactttatttgagcaagctaaacgtcatgtcaatacaacctcagattctgagattttactgaatattctggcaaatcaacttgagcattgtccaagctatcctattagccctgatgaaatttttaaatcagtcagtgaagttcaccgaattgtaaaaggtgcgtatgcggttgttgctatggttatcggtcatggcttaattgcatttcgtgatcaaaatggtattcgccctttatgtattggtaagcgtgaagaacagggtaaaacagaatacatggtagcttcagagtcagtggctcttgatgctgttggttttgattttgtccgtgatatcgcgcctggtgaagccgtttacatcacttttgatgggcaattatttactcagcaatgtgccgataatccacagttaaatccatgtgtgtttgagtttgtttactttgctcgtccggattcatttattgataaggtttctgtttatggtgctcgtttagcgatgggcactaagcttggtgaaaagattaaacgagagtggggagatattgatatcgatgttgttattcctattccagaaacttcttgtgatagtgcgctagaaattgcacgtacgttagataaaccttaccgccaaggttttgttaaaaaccgttatgtaggccgtacgtttatcatgcctggacagcaaatgcgtcgtaagtctgtgcgtcgtaaactcaacgctattcgctctgaatttaaagataaaaatgtattgttagttgatgactctattgttcgtggtaccacatcagagcagatcatcgaaatggcaagagaagcaggcgcgaagaaagtttacttagcatccgcagcgcctgaaattcgtttccctaatgtctatggtattgatatgccaagtgctaatgagttaattgctcatggtcgcgaagtggatgaaatttcgaatattattggtgctgatggcctaattttccaagatttacaagatctggttgatgccgttgccgaaggaaaccctgaaattaaattgtttgaaacatcagtgtttaatggtaattatgttacaggtgatgtggatcaagagtacttagagtatttagattcactacgtagtgatgactccaaaaagcagcttgaaattcagcaagatttagccagtttagagttacataatgaaggcatttaa

SEQ ID NO: 132581 - protein, 505 aa, Photobacterium sp. SKA34
MCGIVGIVGSTPVNQSIYDALTVLQHRGQDAAGICTLESNRFRLRKANGLVRDVFEAKHMQRLQGNVGIGHVRYPTAGSSSASEAQPFYVNSPYGISLAHNGNLTNAADIRETLFEQAKRHVNTTSDSEILLNILANQLEHCPSYPISPDEIFKSVSEVHRIVKGAYAVVAMVIGHGLIAFRDQNGIRPLCIGKREEQGKTEYMVASESVALDAVGFDFVRDIAPGEAVYITFDGQLFTQQCADNPQLNPCVFEFVYFARPDSFIDKVSVYGARLAMGTKLGEKIKREWGDIDIDVVIPIPETSCDSALEIARTLDKPYRQGFVKNRYVGRTFIMPGQQMRRKSVRRKLNAIRSEFKDKNVLLVDDSIVRGTTSEQIIEMAREAGAKKVYLASAAPEIRFPNVYGIDMPSANELIAHGREVDEISNIIGADGLIFQDLQDLVDAVAEGNPEIKLFETSVFNGNYVTGDVDQEYLEYLDSLRSDDSKKQLEIQQDLASLELHNEGI

SEQ ID NO: 132582 - DNA, 1521 bp, Oceanospirillum sp. MED92
  CDS (1)..(1521): transl_table=11
atgtgcggcattgttggcattgtagccaaatcttatgtgaaccagacaatttttgacgcgttgactgttctgcagcaccgtggtcaggacgcagctggtatggtgacctgtgaaggtaataaattcttcctgcgtaaagataatggtttggtgaacgaagttttccgtacccgtcacatgaaacgactggttgggaacgtgggcatcggtcacgtccgttatcctacggcgggtagctccagctcagctgaagctcagccattttacgtaaactccccttacggtatcgctctggcacacaacggtaacctgactaacgctgaagagttggcggataagatgttccgtgccgacctgcgtcacatcaatacaacgtctgactcagaagttctgttgaacgtagtagcccacgaactacagcgtcagggtaaactcaagcctcaggctgaagatatgtttgaagcggttcgccgtgtacatgaacgttgtaaaggtggttatgccgctgttgcaatgattaccggctacggcatgctggcattccgtgaccctaacggtatccgtccgctgacttacggtaagcgtgaaacggaacagggtactgaatatatggttgcgtctgaaagcgttgcgctagatatttcaggctttgaacgtgttcgtgatatcgagccgggtgaagcaatctacatcgacatggatggtaacgtttctactcaacagtgtgcagaaggtacgcaactggcaccttgcttgtttgagtatgtttatctggcgcgtccggattccatcatcgatgacgtacacgttcataactcacgtatgcgcatgggcaaaaaactggcagagaaagttctgcgcgaacgccctgatcatgacatcgatgtgatcatccctatcccggataccagccgtacttctgcgatggagatggcaaaagatctgggtgttatgttccgtgaaggttttattaagaaccgttatattggccgtaccttcattatgccagggcagacacagcgtaagaaatcagtgcgccgtaagctgaaccccattggcatggagtttaaagacaaagtcgtaatgctggtggatgactccatcgtgcgtggtacgacgtctagccagattgttgagatggctcgtgatgctggcgcgaagaaggtttacttcgcatctgctgcgcctgcggttaaattcccgaacgtttatggtatcgatatgccagctgctgaagagctgatcgcacatggccgtaccgatgacgaagttggtgaagagatcggttgtgactggatgatttaccaggatctggacgatctgaaagcatctgtaaccgaaggtaatgaaaacatcactgcctttgatacctgtgtattcgatggtcagtatgtagcgggtgatatcgacgcgtcctacctggagcgattgtctcaggcgcgtaacgatgatgctaaaggcagcgatgataaaaaggttaagagtaataagtcgtctaacctgtgtagcgagatagattaa

SEQ ID NO: 132583 - protein, 506 aa, Oceanospirillum sp. MED92
MCGIVGIVAKSYVNQTIFDALTVLQHRGQDAAGMVTCEGNKFFLRKDNGLVNEVFRTRHMKRLVGNVGIGHVRYPTAGSSSSAEAQPFYVNSPYGIALAHNGNLTNAEELADKMFRADLRHINTTSDSEVLLNVVAHELQRQGKLKPQAEDMFEAVRRVHERCKGGYAAVAMITGYGMLAFRDPNGIRPLTYGKRETEQGTEYMVASESVALDISGFERVRDIEPGEAIYIDMDGNVSTQQCAEGTQLAPCLFEYVYLARPDSIIDDVHVHNSRMRMGKKLAEKVLRERPDHDIDVIIPIPDTSRTSAMEMAKDLGVMFREGFIKNRYIGRTFIMPGQTQRKKSVRRKLNPIGMEFKDKVVMLVDDSIVRGTTSSQIVEMARDAGAKKVYFASAAPAVKFPNVYGIDMPAAEELIAHGRTDDEVGEEIGCDWMIYQDLDDLKASVTEGNENITAFDTCVFDGQYVAGDIDASYLERLSQARNDDAKGSDDKKVKSNKSSNLCSEID

SEQ ID NO: 132584 - DNA, 1542 bp, marine gamma proteobacterium HTCC2207
  CDS (1)..(1542): transl_table=11
atgtgcggtgttgttggaatttccggaaactcagacgttaatgtgcgtctctatgatgcattgactgttttacagcatcgcggtcaggatgccgcaggtattgttaccgaccacgatggtgagatccatgtctgcaaaggcgtgggtctggcgcgggatgtattccgctcagaacatatggcgcgactggtgggcaatgtgggtataggccatgttcgatatcccaccgctggcagttctggcccagcactggcgcagccattttacgttaactccccatacggcatctgtattgctcacaatggcaacctgaccaatgcggatgagttgcgtaaacatatttttcgttccgatctgcgtcatctaaataccgactctgactcggaagttttgctcaatgtgtttgctcacgaattacagttgcggcgcaaactggtgccctccagtgaggatatatttgatgcagtgagaaatgttcatctgcgctgtcgcggagcctatggtgtagtcgggttagttgccaaccacgggatgttcgcgtttcgcgatatctatggcattcgaccactctgctatggctctcgcgagactgaagcgggcattgagtacgcggtggcctcagagagcgtggtgctagatagcatgggctttggccagatcaaagatctgcagcccggtgaagcgctgtttgtcgacaataagggcgagatccactttcagcaatgtgctactaatcccgaattagtaccctgtatttttgagcatgtttacttcgcccgtccagattcgatgatggacgatatttcggtttacaaatgccgtctgcgtatgggtgagaaactggctgaaaaagtcctgcgactaatgcccgaaaacgatattgatgtggtaatcccgattcccgataccagtcgtgtttccgctcaggccatggccgaaactctgggtgtaaaactccgtgaagggtttatgaaaaatcgctatatcggccgcacctttattatgccgggccagacgcagcgcaaaaaatccgtgcgtcaaaagctcaatgccgtaaagcttgagtttgccggtaagaatgtaatgctagtggacgactcgattgtccgtggcactacctctaaagaaattattcagatggcccgagatgctggagccaataaagtttatatggcctccgctgcacctggagtgcgctatcccaacgtctacggcatcgatatgccgtcagcctcagagcttattgcacacggccgcagtgacgaggaagtgggcgagattattggtgccgactggatgatctaccaagatctcgacgatctggtggcatcagctgcagagggtaatttggcgattaaacgctttgagtgttcagtgtttaatggtgactatgtcacaggagacgttgatgacgcctaccttgcgcatatagatcagcagcgtaacgacaatgccaagagcgaaggtggcgcaccgggcggtggacaaaagaatcaggttattggtattcacaataacaacagtgcggcgaatattaactaa

SEQ ID NO: 132585 - protein, 513 aa, marine gamma proteobacterium HTCC2207
MCGVVGISGNSDVNVRLYDALTVLQHRGQDAAGIVTDHDGEIHVCKGVGLARDVFRSEHMARLVGNVGIGHVRYPTAGSSGPALAQPFYVNSPYGICIAHNGNLTNADELRKHIFRSDLRHLNTDSDSEVLLNVFAHELQLRRKLVPSSEDIFDAVRNVHLRCRGAYGVVGLVANHGMFAFRDIYGIRPLCYGSRETEAGIEYAVASESVVLDSMGFGQIKDLQPGEALFVDNKGEIHFQQCATNPELVPCIFEHVYFARPDSMMDDISVYKCRLRMGEKLAEKVLRLMPENDIDVVIPIPDTSRVSAQAMAETLGVKLREGFMKNRYIGRTFIMPGQTQRKKSVRQKLNAVKLEFAGKNVMLVDDSIVRGTTSKEIIQMARDAGANKVYMASAAPGVRYPNVYGIDMPSASELIAHGRSDEEVGEIIGADWMIYQDLDDLVASAAEGNLAIKRFECSVFNGDYVTGDVDDAYLAHIDQQRNDNAKSEGGAPGGGQKNQVIGIHNNNSAANIN

SEQ ID NO: 132586 - DNA, 1542 bp, delta proteobacterium MLMS-1
  CDS (1)..(1542): transl_table=11
gtgtcgacgcatccgtataaacctgtttacacgacaaagtctcttgccatgtccccacttgatccagttttgccgaccgttggcggccgtcggtcggaaagcgccgccgcttgccgctgcttgactccgccggcggagtatccccgcgaggagtgcggggtctgtggcatattcggccacccggatgccgccaagctgacctatttcggccttttttcgctgcagcaccggggccaggaatccgccggcattgtggtctccgacggtgataaaatccgccagcacaagggcatggggctggtgccggaggtcttcagcgaaagggacctgcagggcttaaccggcgatctggcggtgggtcacgtccgctattccaccaccggcgcttcccatatcgtcaacgcccagcccttcaccgccacccatcaggggatcaccctggcggtggcccataacggcaatctggtcaatatccgggctctgcggcgggaaatggaggcccggggctccatcttccagaccaccatggacagcgaagtggtggtccacctgctggcccgttacgccgagatggggcttgagcgagcgatcgtcgagacctttaagcagatcaagggggcctattcgatcctgctgatgaccagggacaagctggtggcggtacgcgatcccggtggtttccggccgttgtgcctggggcggctgaacaatggctcttatatcgtggcttcggaaacctgtgccctggacctggtggaagcccagtatatccgtgacgtggaacccggggaggtgctggttatcgaccgtgacggtctgcatacccactccctggagcaggagcagcatccaagcttctgcattttcgagcacgtctatttcgcccgccccgacagcgatatctttggcatcaacgtctatgagagccgtaaacggatgggggagatcctggcccgggagtgtcccctggatgccgatctggtgatgccttttcccgactccggaaactatgccgccatcggctattcccaggcctcggggattcccctggagatgggggtcatccgcaatcattacatcggccgtacctttatccagcccacccagtccatgcgcgatttttcggtgcgggtcaagctcaacccggtgcgcagttttttggagaacaagcgggtgatcatcatggaggattccattatccggggtaccaccgcccgcagccggatccgctccttgcggggtatcggggtcaaggaggtgcacatggtgatcagttgcccccccacccggcacccttgttattacgggatcgacttcccttccggcggcgagctgatcgccaaccagaaaacggtggcgcagatccgtgactatctcaacctggataccctctattacctgagcctggaaggactggtggaagccaccggggcgccggcggctaatttctgcaaggcctgtttcgacggcaactacccggtgctcccggataagttgttttgcaaagacgccctaactcgccccttgacggcgcggcggtga

SEQ ID NO: 132587 - protein, 513 aa, delta proteobacterium MLMS-1
MSTHPYKPVYTTKSLAMSPLDPVLPTVGGRRSESAAACRCLTPPAEYPREECGVCGIFGHPDAAKLTYFGLFSLQHRGQESAGIVVSDGDKIRQHKGMGLVPEVFSERDLQGLTGDLAVGHVRYSTTGASHIVNAQPFTATHQGITLAVAHNGNLVNIRALRREMEARGSIFQTTMDSEVVVHLLARYAEMGLERAIVETFKQIKGAYSILLMTRDKLVAVRDPGGFRPLCLGRLNNGSYIVASETCALDLVEAQYIRDVEPGEVLVIDRDGLHTHSLEQEQHPSFCIFEHVYFARPDSDIFGINVYESRKRMGEILARECPLDADLVMPFPDSGNYAAIGYSQASGIPLEMGVIRNHYIGRTFIQPTQSMRDFSVRVKLNPVRSFLENKRVIIMEDSIIRGTTARSRIRSLRGIGVKEVHMVISCPPTRHPCYYGIDFPSGGELIANQKTVAQIRDYLNLDTLYYLSLEGLVEATGAPAANFCKACFDGNYPVLPDKLFCKDALTRPLTARR

SEQ ID NO: 132588 - DNA, 1518 bp, Oceanobacter sp. RED65
  CDS (1)..(1518): transl_table=11
atgtgtggcattgttggtctggttgctaaaagcaatgtgaatcaagccttatacgacgcattgactgtattgcagcatcgcggacaagacgcagcaggtattgtgacatcagatagtggtcgattgttcttgagaaaagacaacggtctcgtaaaagatgtatttcgcacgcggcacatgcagcgtttagtcggaactatgggtattggccatgttcgttatccgaccgctggaagctcaagctcagcagaggctcagccattttatgtgaacagtccttacggcatcgttttggctcataatggcaatctaaccaatgctcatgaattagtggaagacgtctacaaagaagatttacgtcacgtaaacactactagtgattctgaagtattgctcaatgtgtttgctcacgaattgcatgagcagaagaaactgaagccaacgcaagaggatgtattcgatgcagtagaacgcgttcataaacgtgtgaaaggtggttacgcggtaattgctatgattgcaggtatcggtgtagttggtttccgtgatccttatggtattcgtcctgcggtatttggtaagcgcgagactgaaaaaggtaccgagtacatgatcgcttccgagagtgttgcacttgatgcacttggttttaaagtgattcgagatattgagcccggtgaggcggtctatattgatgtggatggcaacttgcatactcgtcagtgtgcagagaacccagtctatcgaccatgtattttcgagcatgtttattttgctcgccctgattcaattattgataaaatcagtgtttataaagcccgtttaaaaatgggtgctcgattagccgagaaaattctacgtgaacgaccagatcatgacatagatgtagttattcccattcctgatacaagtcgttcaagtgcactggaattggccaaccgtttgggtgttaagtaccgcgaaggtttcatgaaaaaccgttacatcggtcgtaccttcatcatgcctggtcagcaactgcgtaagaaatcagtaaagcaaaaactcaatgcgttggacttagagttccgcggtaaaaatgttttgttggtagacgattctattgttcgtggtacaacgtgcgaacaaattattgaaatggcccgtgatgcaggtgccaataacgtgtatttcgcgagtgcagcgccaccagttcgttatccaaatgtatatggtatcgatatgccagcaaaagaagaatttattgcgcatgatcgtacagttgaagaaatcgagaaagccattggtgcagattggttggtttatcaagatttagaagatttggttgaagctacctgtgatggtgccgaagtgcaatacgagtttgattgttctgtttttaatggcaactatgtgacaggtgatatcgatgataattatcttgatgagctgtccgccaaacgcaatgatgcgaacaaaaaaaatgctaaagtagagaatgcaatcattgatttgcacaatgatgagtctgctgaatag

SEQ ID NO: 132589 - protein, 505 aa, Oceanobacter sp. RED65
MCGIVGLVAKSNVNQALYDALTVLQHRGQDAAGIVTSDSGRLFLRKDNGLVKDVFRTRHMQRLVGTMGIGHVRYPTAGSSSSAEAQPFYVNSPYGIVLAHNGNLTNAHELVEDVYKEDLRHVNTTSDSEVLLNVFAHELHEQKKLKPTQEDVFDAVERVHKRVKGGYAVIAMIAGIGVVGFRDPYGIRPAVFGKRETEKGTEYMIASESVALDALGFKVIRDIEPGEAVYIDVDGNLHTRQCAENPVYRPCIFEHVYFARPDSIIDKISVYKARLKMGARLAEKILRERPDHDIDVVIPIPDTSRSSALELANRLGVKYREGFMKNRYIGRTFIMPGQQLRKKSVKQKLNALDLEFRGKNVLLVDDSIVRGTTCEQIIEMARDAGANNVYFASAAPPVRYPNVYGIDMPAKEEFIAHDRTVEEIEKAIGADWLVYQDLEDLVEATCDGAEVQYEFDCSVFNGNYVTGDIDDNYLDELSAKRNDANKKNAKVENAIIDLHNDESAE

SEQ ID NO: 132590 - DNA, 1527 bp, Synechococcus sp. RS9916
  CDS (1)..(1527): transl_table=11
gtgagcggcggtgggggcgtgatgcaaaattgcgaaggaagtctgaagttgaggcggcctgtgcatcagcccatcgcagagcggcccgatcggatggaggaggcctgcggggtctatgccgtgctggctgaagggcagcccgtggccaacctcacctacttcggcctgtattcgcttcagcatcgcggccaggaatcggcggggatcgccgtgttcaacgagggcaaggtgcgtctgcacaaagacatgggcctggtgagccaggtgtttgatcaggacgtgctggcccgcatgcccggcaacctggccatcggccataaccgctattccacgactggaagcagcaaggtctgcaatgcccagccggtggtgttgatgacccggctcggcccctttgccttcgcccataacggcaatctcgtcaatgctgctgagctgcgtcagaagcttgatgacggtcaaaccgagttcgcgtccaccactgattcggaactgatcgccttcgcgattcagcaggccgtgaatcgcggactggattggaagccagccattaaggaagcggccacgatgtgtcgtggtgccttcagtctggtgattggcacctccaccgagctctacgccttgcgcgatagctatggcgttcgccctctggtgttcggtcgctttggtgaagcggagagtggccactgggtggtgagcagcgaaacctgcggcctcgacatcatcggcgcctcctacgaggcggatgtggagcctggtgagttggtcaccttccgcctgggtgacatccagcccacccgcgaacagtgggctgagccgtcgacccgcatgtgcgtgttcgaaatgatctatttcgcgcgccccgacagccgtttctttggtgagtcgctctacagctatcgccaacgcattggtcaggttctggcccgtgaatccgcggtggaagcggatctggtgattggtgtgcctgattccggcattcccgcggccatcggtttttctcaggccagtggcattacctttgccgatggtctgatcaagaaccgctacgtcggccgcaccttcattcagcccacccaggccatgcgtgaggccggcatccgcgtcaagctcaatcccctccccgatgtgctggctgggaagcgggtggtggtgatcgatgattcgatcgtgcggggcaccaccagtcgcaagctggtgcaggcccttcgggacgctggcgccacggaggtgcacatgcgcattagttcaccgccggtgacccatccctgcttctacggcatcgataccgacacccaggaccagctgattgcggctcgcctgacggtgaaggaaatcgaagcccatctcaaggtcgatagcctggcttacctcagcaaggaagggatggtggaagctgcccatgccagttccgagcacttctgcaccgcttgtttcgatggtgcttatccgattccgatggatgcgtcggtcagctccagcaagttgatgttggagccttcaggggtggccgccaccaagagctga

SEQ ID NO: 132591 - protein, 508 aa, Synechococcus sp. RS9916
MSGGGGVMQNCEGSLKLRRPVHQPIAERPDRMEEACGVYAVLAEGQPVANLTYFGLYSLQHRGQESAGIAVFNEGKVRLHKDMGLVSQVFDQDVLARMPGNLAIGHNRYSTTGSSKVCNAQPVVLMTRLGPFAFAHNGNLVNAAELRQKLDDGQTEFASTTDSELIAFAIQQAVNRGLDWKPAIKEAATMCRGAFSLVIGTSTELYALRDSYGVRPLVFGRFGEAESGHWVVSSETCGLDIIGASYEADVEPGELVTFRLGDIQPTREQWAEPSTRMCVFEMIYFARPDSRFFGESLYSYRQRIGQVLARESAVEADLVIGVPDSGIPAAIGFSQASGITFADGLIKNRYVGRTFIQPTQAMREAGIRVKLNPLPDVLAGKRVVVIDDSIVRGTTSRKLVQALRDAGATEVHMRISSPPVTHPCFYGIDTDTQDQLIAARLTVKEIEAHLKVDSLAYLSKEGMVEAAHASSEHFCTACFDGAYPIPMDASVSSSKLMLEPSGVAATKS

SEQ ID NO: 132592 - DNA, 1515 bp, Vibrio sp. Ex25
  CDS (1)..(1515): transl_table=11
atgtgtggtattgttggaatcgtgggcacaacgcctgtaaaccagtctatttatgacgcgttaacggtgttacagcatcgtggccaagatgccgctggtatttgtaccatagaaagcaatcgttttcgtctgcgcaaggcgaacggtttagtcaaggatgtatttgaagcaagacatatgcagcgcctgcaaggcgaggtcggaattggtcatgttcgttacccaacagcaggcagctcaagcgcttcagaagctcaacctttctacgtaaactctcctttcggtattacacttgcccacaatggcaacttgaccaacgctaacgaagttcgtcaaaagctgtttgaaaaagatcgccgtcatatcaataccacttcagactccgaagtattactaaatgtactggcacacgaaattgactcagtaaaaggaaatgtcacgacagaagacgtattccgcgcagtcaccaatgtgcatcgcacaattcgtggtgcttacgctgtgactgccatgatcattggtcatggtatgattgcgtttcgtgacccacacggtattcgcccgctgtgtttaggtaagcgtgaagttaatggcagagcggagtacatggttgcgtctgaatcggtagcattggatgccgtcggttttgattttgtccgtgatgttgcacctggtgaggcaatctacgcaacgtttgatggtgaactgtacacgaagcagtgtgcagataatcctaagctgaacccttgtattttcgagttcgtgtactttgctcgtccagactcgttcatcgataaaatttcggtatacagcgctcgcgttgaaatgggtaaaaagttaggcgaacgtattcgtgaagactacgcaaatcttgatattgatgtcgttattcctatccctgaaacgtcgtgcgacatagcacttcaaatcgctcaagcgatcgatatcccttaccgccaaggcttcgtgaaaaaccgttacgtgggacgtacgtttatcatgcctggtcagcaacaacgtaagaaatctgtacgtcgcaagttgaatgcaattcgttcggagttcaaagataagaatgtgttgctggtggatgactctatcgttcgtggtactacgtcagaacaaatcatcgaaatggcacgtgattctggtgcgaagaaagtgtacatggtatcagcagcaccagaagttcgattcccgaacgtgtacggcattgatatgccaagtgctaccgagcttattgctcatggccgcgacaacgatacaatttgtaagcagattggtgctgatgcattgatttatcaacgtctagaagacttagttgaggctgtcggccttggaaaccaagatattactcagttcgatacatccgtgtttaacggcgaatacgtaacgggtgatattgaccaacaatacctagacttcttagatggtcttcgtaacgatgatgcgaaaacacaacttgaaatccaacaggatttagcaaacctagagctgcataacgaaggcgcataa

SEQ ID NO: 132593 - protein, 504 aa, Vibrio sp. Ex25
MCGIVGIVGTTPVNQSIYDALTVLQHRGQDAAGICTIESNRFRLRKANGLVKDVFEARHMQRLQGEVGIGHVRYPTAGSSSASEAQPFYVNSPFGITLAHNGNLTNANEVRQKLFEKDRRHINTTSDSEVLLNVLAHEIDSVKGNVTTEDVFRAVTNVHRTIRGAYAVTAMIIGHGMIAFRDPHGIRPLCLGKREVNGRAEYMVASESVALDAVGFDFVRDVAPGEAIYATFDGELYTKQCADNPKLNPCIFEFVYFARPDSFIDKISVYSARVEMGKKLGERIREDYANLDIDVVIPIPETSCDIALQIAQAIDIPYRQGFVKNRYVGRTFIMPGQQQRKKSVRRKLNAIRSEFKDKNVLLVDDSIVRGTTSEQIIEMARDSGAKKVYMVSAAPEVRFPNVYGIDMPSATELIAHGRDNDTICKQIGADALIYQRLEDLVEAVGLGNQDITQFDTSVFNGEYVTGDIDQQYLDFLDGLRNDDAKTQLEIQQDLANLELHNEGA

SEQ ID NO: 132594 - DNA, 1518 bp, marine gamma proteobacterium HTCC2143
  CDS (1)..(1518): transl_table=11
atgtgtggcattgtcggtatggttgccaaatccaatgtaaaccaagatctctatgatgcactaacggtgctacagcatcgtggtcaagatgctgcgggaatcgttacctgcgacggtggtcgacttaatcagcgcaaagggaatgggctggtcaaagacgtcttccataaccgtcatatgcaacgattgacgggtaacattggcgtcggacatgttcgctatccgaccgctggtagttccagcccagcactggcgcaaccattttatgttaattcaccttacggcataagcttggcacacaatggcaacttgaccaattcagcagaacttagtcaggaaatattccaggcggatcttcgccatctaaacacggattctgattctgaggtattactgaatgtattcgcgcacgaattacagagtctaggcaaacttgaaccttcggcggatgatatctttaccgcgatagcaggtgttcatcgccgttgccgcggtggttatggcgcgattgccatggtagccaattatggggtggtgggatttcgtgatcccaacggcatcaggcccattgtttttggtactcgcgaaacggaggcgggtgttgaatatatgatcgcttcagaaagcgttgcactagatgcgctggggtttaagctggtgcgggacatagcgcctggcgaggcagtttatatcgatgtcgagggtaatttgcatgcacggcaatgtgccgacaatgctaagtcgactccctgtatttttgagcatgtttattttgccagacctgattctattatggatggggtatcagtttacaaggctcggctgcgacagggagagcgactggcggctaaagtcttggccttgcgcccagatcatgacatcgatgttgtggtgccaatccctgattcaagccgaattgcagggcaggcgatggcttacaatttaggggtgaaatttcgcgaaggtttggtaaaaaatcgttacatcggccgcactttcattatgcccgggcaaagccagcgaaagaaatcggtgaaacaaaaattgaatacaatcccactagagtttaaagataaaaatgtaatgctggtcgatgactctattgtccgcggaacgacctgtcagcagattattgagatggccagagatgccggagctgcaaaagtgtattttgcttcagcagcgcctccagttaggtatccgaacgtctatggtattgatatgccttctgcggaagagttaatagctcacgatcgcacggaagaggaaatatgtgaactgattggtgctgattggttagtttatcaggatttagaggatttggtcgcaagttcagttgagggaaatcctgaggtttcaacgtacgattgctcggtttttaccggtgaatatgtgactggtgatgttaccaaagattacttagccaagttagatactgcccgtagggacaacaataaatcagatcttgatgacgctgcggttatggggctccacaatgatgatgctgattcactctaa

SEQ ID NO: 132595 - protein, 505 aa, marine gamma proteobacterium HTCC2143
MCGIVGMVAKSNVNQDLYDALTVLQHRGQDAAGIVTCDGGRLNQRKGNGLVKDVFHNRHMQRLTGNIGVGHVRYPTAGSSSPALAQPFYVNSPYGISLAHNGNLTNSAELSQEIFQADLRHLNTDSDSEVLLNVFAHELQSLGKLEPSADDIFTAIAGVHRRCRGGYGAIAMVANYGVVGFRDPNGIRPIVFGTRETEAGVEYMIASESVALDALGFKLVRDIAPGEAVYIDVEGNLHARQCADNAKSTPCIFEHVYFARPDSIMDGVSVYKARLRQGERLAAKVLALRPDHDIDVVVPIPDSSRIAGQAMAYNLGVKFREGLVKNRYIGRTFIMPGQSQRKKSVKQKLNTIPLEFKDKNVMLVDDSIVRGTTCQQIIEMARDAGAAKVYFASAAPPVRYPNVYGIDMPSAEELIAHDRTEEEICELIGADWLVYQDLEDLVASSVEGNPEVSTYDCSVFTGEYVTGDVTKDYLAKLDTARRDNNKSDLDDAAVMGLHNDDADSL

SEQ ID NO: 132596 - DNA, 1518 bp, marine gamma proteobacterium HTCC2080
  CDS (1)..(1518): transl_table=11
atgtgtggattggtaggtatcgtcggcggtaacgacgtcgcggcggaaatctatgatgccctaacgatgcttcaacaccgaggtcaggatgccgctggtatcatgacctgctaccaggggaagtttctgcagcgtaaaggggagggactcgttaaggatgtgtttcgtacacagcatatgtctcgtcttctaggcgcatttggtattggacatgttcgctacccgacacaaggtagttcggggacggcgcttgctcagccgttttatgtgaactcgcctcatggcatcgcactcgcacacaatggcaatctcaccaatgcggcccagttgagcgcagagatttttgaaagtgaccgtcggcatctcaatactgattctgactcagaggtgctgcttaatgtctttgcccacgaaatacagcggctgggtaagttattccccgatgccgacgatatttttgccgcgatttcggccatgcacgagcgttgtgagggcggctacgcagcggtagcaatgattgctaatcttggcctagttgctttccgcgatccctttggaattcgcccattagtcatcggtgttcgagagcgcgagggcctagagccggagtacatggtggcttcagaaagcgtcgcgttagacgttcttgggttccgacttgtgggcgacgtcgctcctggtgagggtatctttatttccgcatcaggaaccttaattcgcagacaatgttcagaagttaccaagttgatgccctgcatttttgagcatgtttatttcgcacgacctgattcactaatcgatggtgtttcggtgtataaaacgcgaatgcggcagggggagcgattagcccgtaaagtccttaggttgcgccctgaccatgacatagatgttgtgattccaataccggatacgagtcgagttgctggtcaatccctcgcccatgagcttggcgtaaagtttcgtgaggggtttatgaagaatcgctacatcggtcgaacttttattatgccaggtcaaagtcagcgaaaaaaatcagttcgacaaaaactaaatcccgtgcccttggagtttgcgggaaagaatgtgatgttggttgatgactcaattgttcgtggcacaacctgtggccaaattatacaaatggcccgggacgccggtgccaaaaacgtatattttgcgtcagcagcgcctgccattagatttcctaatgtttacggtatcgatatgccagcggctagcgaacttatcgctcacaatcgtaccgaagctgaaattgctgaattgatcggagccgactggttggtttatcaggatttagaggatttgctagcctgttctcacgaagggaacgaagccattgaagactttgaatgctcggtattcgatggctgttacaaggcaggtaaaatcgatgagcaataccttaatacgattgaggctgcgcgctctgagggctctgagatgcgaatcgcggcttctcaggacggcgcggtcgtgggtctacataatgatgtctga

SEQ ID NO: 132597 - protein, 505 aa, marine gamma proteobacterium HTCC2080
MCGLVGIVGGNDVAAEIYDALTMLQHRGQDAAGIMTCYQGKFLQRKGEGLVKDVFRTQHMSRLLGAFGIGHVRYPTQGSSGTALAQPFYVNSPHGIALAHNGNLTNAAQLSAEIFESDRRHLNTDSDSEVLLNVFAHEIQRLGKLFPDADDIFAAISAMHERCEGGYAAVAMIANLGLVAFRDPFGIRPLVIGVREREGLEPEYMVASESVALDVLGFRLVGDVAPGEGIFISASGTLIRRQCSEVTKLMPCIFEHVYFARPDSLIDGVSVYKTRMRQGERLARKVLRLRPDHDIDVVIPIPDTSRVAGQSLAHELGVKFREGFMKNRYIGRTFIMPGQSQRKKSVRQKLNPVPLEFAGKNVMLVDDSIVRGTTCGQIIQMARDAGAKNVYFASAAPAIRFPNVYGIDMPAASELIAHNRTEAEIAELIGADWLVYQDLEDLLACSHEGNEAIEDFECSVFDGCYKAGKIDEQYLNTIEAARSEGSEMRIAASQDGAVVGLHNDV

SEQ ID NO: 132598 - DNA, 1404 bp, Candidatus Desulfococcus oleovorans Hxd3
  CDS (1)..(1404): transl_table=11
atgaacgaaccggaaagaccccgtgaagcctgcggcatcttcggcattcacgaccacgaagaagcggcccggctgacctatttcgggctttacgcgctgcagcaccggggccaggagagcgggggcatcgccgtggccagggacacccgtatcgtctgccacaaggacatgggcctggtccacgaggtctttaccccccgccacatggcccggctttccggcaccagcgccgtgggccatgtgcgctactccaccaccggcgattccgtgctggtcaatgcccagccctttgtggtcacccacaagaagaagacctatgccctggcccacaacggcaacctggtcaacgcctacgaactgaaacgggatctggaggaagagggctcgattcttcagaccaccatggacagcgagctggtggtccacctgtttatcaagaacctggcccacgggtttgaaaaggccctggaagagacggtgctgcggctcaaaggggcctactcctttgtcatgctcaccggcctgggcgagctggtgggcatcaaggaccccaacgggtttcggcccctgtgcctgggaaaactcaacggcagctatgtgctggcatccgagtcctgcgccctggacctggtgcaggccacctttgtgcgcgagctggaccccggcgagatcgtgatcatcgacgacaacgggattcgcagcttcaacccccacaagaaaagcccccgggccttctgcatcttcgagtttatctattttgcccggccggacagcacctttttcggcaaaaacgtctataccgtgcgcaaggcccacggccggcagctggccagggaggccccggtaaaggccgacctggtgatgccgtttcccgactcgggcaactacgcggccctgggctatgccgaagaatcgggcattcccctggaaatggccatgatccgcaaccactatgtgggccgcacctttattcagcccacccagagcatgcgggactttggtgtgcgggtcaagctcaaccccattcgggaggtgctggccggaaaagatatcatcatcattgaagactccatcattcggggcaccaccatcaagacccgcgtcaaaaccctgcgggccctgggcgtcaaaaaaatccacatgcgggtcagcggcccggcccaccggtttccctgccactacggcattgacttttcaacacggggggagctgatcgcggcccgaatggagcttgccgagctgacccggtacctggacctggactcccttcactacctctccgttcccggcctgctcgaggccacctgtgtggaccggccggaagagcacttctgcaaggcctgctttgacggctgctaccccgtggcctttgacgacaccgcggccaaggactgcctggcgtaa

SEQ ID NO: 132599 - protein, 467 aa, Candidatus Desulfococcus oleovorans Hxd3
MNEPERPREACGIFGIHDHEEAARLTYFGLYALQHRGQESGGIAVARDTRIVCHKDMGLVHEVFTPRHMARLSGTSAVGHVRYSTTGDSVLVNAQPFVVTHKKKTYALAHNGNLVNAYELKRDLEEEGSILQTTMDSELVVHLFIKNLAHGFEKALEETVLRLKGAYSFVMLTGLGELVGIKDPNGFRPLCLGKLNGSYVLASESCALDLVQATFVRELDPGEIVIIDDNGIRSFNPHKKSPRAFCIFEFIYFARPDSTFFGKNVYTVRKAHGRQLAREAPVKADLVMPFPDSGNYAALGYAEESGIPLEMAMIRNHYVGRTFIQPTQSMRDFGVRVKLNPIREVLAGKDIIIIEDSIIRGTTIKTRVKTLRALGVKKIHMRVSGPAHRFPCHYGIDFSTRGELIAARMELAELTRYLDLDSLHYLSVPGLLEATCVDRPEEHFCKACFDGCYPVAFDDTAAKDCLA

SEQ ID NO: 132600 - DNA, 1506 bp, Pseudomonas putida GB-1
  CDS (1)..(1506): transl_table=11
atgtgtggcatcgtcggtatcgtcggtaagtcgaacgtcaatcaggcgctgtatgacgcgcttacggtcctccagcaccgcggccaggacgctgccggtatcgtgaccagccatgacggccggttgttcctgcgcaaggataatggcctggtgcgcgacgtgttccagcagcgccacatgcagcgcctggtgggcagcatcggtatcggccacgtgcgctacccgacggcgggcagctcgacctcggccgaggcccagccgttctacgtcaactcgccgtacggcatcaccctggcccacaacggcaacctgaccaatgtcgagcagttggccaaggagatctacgagtccgacctgcgccacgtcaacaccaactccgactcggaagtgctgctgaacgtgttcgcccatgagttggcggtgcgtggcaagctgcagccaaccgaagaagacgtgttcgcggcggtttcccatgtacacagccgctgcgtcggcggttacgccgtggtggcgatgatcaccggctacggcatcgtcggcttccgcgacccccacggcatccgcccggtggtgttcggccagcgtcataccgatgaaggcgtggaatacatgatcgcctcggaaagcgtggccctggacgtgctcggctttaccctgatccgcgacctggcgccgggcgaagcggtgtacatcaccgaagaaggccagctgttcaccaagcaatgcgccgaagcgccgaagttgcagccgtgcatcttcgagcacgtctacctggcccgcccggactcgatcattgacggtatctcggtgtacaaggcccgtctgcgcatgggtgaaaaactggctgacaagatcatgcgcgagcgccctgagcatgatatcgacgtggtcatcccgatcccggataccagccgcactgctgcgctggaactggccaaccgcctgggcgtcaagttccgcgaaggtttcgtcaagaaccgttacatcggccgtaccttcatcatgcccggccaggccgcgcgcaaaaagtcagtgcgccagaagctcaacgccatcgagctggaattccgtggcaagaacgtgatgctggtggacgactcgatcgtgcgcggcaccacctgcaagcagatcatccagatggcccgcgaagccggcgccaaaaatgtctacttctgctccgcagcccctgcagtacgctaccccaacgtctacggcatcgacatgccgagtgttcacgaactgatcgcccacaaccgtaccaccgaacaggtggccgagttgatcggcgccgattggctgatctatcaggatctgccagacctgatcgactcggtcggtggcggcaagatcaagatcgatcatttcgattgcgcggtgttcaacggtgagtacgtcaccggcgatatcgacgaagcctacctcgagcgtatcgagcaggcccgtaatgacctggccaaggtcaagaaccaggccgtcagcgcgatcatcgacctctacaacaactga

SEQ ID NO: 132601 - protein, 501 aa, Pseudomonas putida GB-1
MCGIVGIVGKSNVNQALYDALTVLQHRGQDAAGIVTSHDGRLFLRKDNGLVRDVFQQRHMQRLVGSIGIGHVRYPTAGSSTSAEAQPFYVNSPYGITLAHNGNLTNVEQLAKEIYESDLRHVNTNSDSEVLLNVFAHELAVRGKLQPTEEDVFAAVSHVHSRCVGGYAVVAMITGYGIVGFRDPHGIRPVVFGQRHTDEGVEYMIASESVALDVLGFTLIRDLAPGEAVYITEEGQLFTKQCAEAPKLQPCIFEHVYLARPDSIIDGISVYKARLRMGEKLADKIMRERPEHDIDVVIPIPDTSRTAALELANRLGVKFREGFVKNRYIGRTFIMPGQAARKKSVRQKLNAIELEFRGKNVMLVDDSIVRGTTCKQIIQMAREAGAKNVYFCSAAPAVRYPNVYGIDMPSVHELIAHNRTTEQVAELIGADWLIYQDLPDLIDSVGGGKIKIDHFDCAVFNGEYVTGDIDEAYLERIEQARNDLAKVKNQAVSAIIDLYNN

SEQ ID NO: 132602 - DNA, 1524 bp, Marinobacter sp. ELB17
  CDS (1)..(1524): transl_table=11
atgtgtggcatcgtcggtatcgtcagcacttcgcacgtgaatcagttgctttatgatgcgctgaccgttcttcagcatcggggccaggacgcagcaggtattgttaccttcgaagacgagcgtttttacctgcgtaaagacaacggcctggtgcgcgatgtcttccatacccgccatatgcaccggttagtgggcaacgtcggtattggtcacgttcgttaccctaccgctggcagtgcgagctctgccgaggcccagccgttttacgtcaacagcccttacggcatcactttggcccacaacggcaacctgacaaactctgacgagctcagtaccgacttgtttcgcactgacctgcgccacatcaacaccaattcagactcggaagtgttgttgaacgtgttcgctcacgagctccagaagctgggcaagctacacccgaccaaagacgatatttttgccgccgtgcgttctgtacacgaacgctgccgcggtgcctacgcggttatcgcgatggttactggctacggcattgtcggtttccgcgaccccaatggcattcgcccgatctgttatggcgcgcgcttagccagtgacggccgcaaggaatatatgattgcgtctgaaagtgtggccctgggcgcctccggtttcaccctggtacgcgacattgcgccgggtgaagcggtgtatattgaaaccgacggcacctttcacagtgagcagtgcgccaaacagccaaagctctatccgtgtattttcgagcatgtgtacttcgcccgtccggactccatcatggacaaagtctcggtttataaagcgcgtttgcgcatgggtgaaactctggcggataaagtgctgaaggatttcgccgatcacgatatcgacgtggttatgccgataccagacaccagccgcacctcggctatgcagatggcccaccgtctgggcgtgaaattccgcgaaggctttatcaaaaaccgctacattggccgtacatttatcatgcctggccagaccatgcgcaagaaatcggtacgccagaagctaaatcccattgatctggagttccgtggcaagaacgtgatgctggttgacgattccattgtgcgcggtaccacctgcaaggaaatcgtgcagatggcccgcgatgccggcgcccgcaaagtgtatttcgcttcggccgcgcccccggtgcgttatcccaacgtgtacggcattgatatgccgtctgctaaagaactgattgctcacgatcgcactgtggaagaaatccgcgaattgatcggcgccgactggttgctgtatcagaacctggaagacctgattacgtctgttagcgatgttaatagtgatattgatggctgggaatgttcggtgtttaccggtgaatacgtaactggcgatattgatcgtgcctatctggatcggctggatggccagcgtaacgatgcaacccgctccggcactgtgacgaacgataccgaaaacggcagtatagacatgcataacgacgaagactga

SEQ ID NO: 132603 - protein, 507 aa, Marinobacter sp. ELB17
MCGIVGIVSTSHVNQLLYDALTVLQHRGQDAAGIVTFEDERFYLRKDNGLVRDVFHTRHMHRLVGNVGIGHVRYPTAGSASSAEAQPFYVNSPYGITLAHNGNLTNSDELSTDLFRTDLRHINTNSDSEVLLNVFAHELQKLGKLHPTKDDIFAAVRSVHERCRGAYAVIAMVTGYGIVGFRDPNGIRPICYGARLASDGRKEYMIASESVALGASGFTLVRDIAPGEAVYIETDGTFHSEQCAKQPKLYPCIFEHVYFARPDSIMDKVSVYKARLRMGETLADKVLKDFADHDIDVVMPIPDTSRTSAMQMAHRLGVKFREGFIKNRYIGRTFIMPGQTMRKKSVRQKLNPIDLEFRGKNVMLVDDSIVRGTTCKEIVQMARDAGARKVYFASAAPPVRYPNVYGIDMPSAKELIAHDRTVEEIRELIGADWLLYQNLEDLITSVSDVNSDIDGWECSVFTGEYVTGDIDRAYLDRLDGQRNDATRSGTVTNDTENGSIDMHNDED

SEQ ID NO: 132604 - DNA, 1641 bp, Drosophila melanogaster
  CDS (1)..(1641)
atgtcagcgccacagcaacaacaacagtcgcagcagaagcaacaacaacttgtgcgcgtggtcgagcaacaacaggtggaaccagctgaggcggtgacctccagcatggaatcggaatccatctcggccagcaaggagctaaccggtttgacgcacgagtgcggcgttttcggggcaatcgcttgcggagattggcccacccaaatggacattgcacacgtgatctgtttggggctggtggcactgcagcatcgtgggcaggagtctgcgggcatagcgaccagcgagggaaagtgctccaagaacttcaacgtgcacaagggcatgggtatgatcagcaccctgttcaacgacgactccatgaagaagcttcgtggcaacctgggcatcggtcatacacgctactcgaccgctggcggatccggagtggttaactgtcagccctttgtggtacatacgacccatggagcattggccctggcccacaatggtgagcttgttaacaacgaatctctaagaagggaggttttggccagaggcgtgggcttatccacgcacagcgacagtgagttgatcgcccagtcgttgtgctgcgccccggaggatgtttccgaactggatggacccaactggccagctaggatcaggcatttcatgatgctggcgccactctcctactcgctggtcatcatgctaaaggacaaaatctacgccgtgagggacacctatggaaatagaccgctatgcattggcaagatagtgcccatcaatgctgggcacggaaataacttagacacacctgccgatggttgggtggtgtccagtgagagctgtggcttcctgtcgatcggtgccagatacgtccgcgaagtggagcctggagagatagtggagctgtcgcgaagtggctaccgcacggtggacattgtggaaagacccgactttaagcgcatggccttttgtatatttgagtacgtttacttcgcccgcggagacagcatcttcgagggtcagatggtgtacacagtgaggctgcagtgcggccggcagctgtggcgagaggctccagtggaggcggatattgtgagttccgttcccgagtctggcacagcggcggcgcatggctatgcccgtgagtctggcattgaatttgccgaggttctctgcaggaatcgctacgtgggacggacgtttattcaaccctctacccggctgcggcagttgggagtagccaagaagttcggagccctatccgagaacgtggctggcaagagattggtcctgatagacgattccattgtgcgcggcaacaccattggaccaataatcaagctgctacgggatgcaggcgcccgggaggtgcacatccgcattgccagcccaccgctgcagtacccatgctatatgggtataaatattccaactcgagaggaattgattgccaacaagctgaaccccgaccaactagctaggcatgtgggcgccgacagtctggcttatcttagtgtggagggactagtggaggctgtccaactaaagcaccgcgatgcaggcgatagtaaatccaagggaacgggccactgcaccgcctgtctcactggcgaatatcccggtgggctgcccgatgagttgagctggtga

SEQ ID NO: 132605 - protein, 546 aa, Drosophila melanogaster
MSAPQQQQQSQQKQQQLVRVVEQQQVEPAEAVTSSMESESISASKELTGLTHECGVFGAIACGDWPTQMDIAHVICLGLVALQHRGQESAGIATSEGKCSKNFNVHKGMGMISTLFNDDSMKKLRGNLGIGHTRYSTAGGSGVVNCQPFVVHTTHGALALAHNGELVNNESLRREVLARGVGLSTHSDSELIAQSLCCAPEDVSELDGPNWPARIRHFMMLAPLSYSLVIMLKDKIYAVRDTYGNRPLCIGKIVPINAGHGNNLDTPADGWVVSSESCGFLSIGARYVREVEPGEIVELSRSGYRTVDIVERPDFKRMAFCIFEYVYFARGDSIFEGQMVYTVRLQCGRQLWREAPVEADIVSSVPESGTAAAHGYARESGIEFAEVLCRNRYVGRTFIQPSTRLRQLGVAKKFGALSENVAGKRLVLIDDSIVRGNTIGPIIKLLRDAGAREVHIRIASPPLQYPCYMGINIPTREELIANKLNPDQLARHVGADSLAYLSVEGLVEAVQLKHRDAGDSKSKGTGHCTACLTGEYPGGLPDELSW

SEQ ID NO: 132606 - DNA, 1638 bp, Drosophila simulans
  CDS (1)..(1638)
atgtcagcgccacagcaacaacagtcgcagcagcaacaacaacaacatgtgcgcgtggtcgagcaacaacaggtggaacctgctgaggcggtgacctccagcgtggaatcggaatccatctcggccagcaaggagctaaccggtttgacgcacgagtgcggtgtttttggggccatcgcctgcggagattggcccacccaaatggatattgcgcacgtgatctgtttgggactggtggcactgcagcatcgcggccaggagtccgcgggcatagcgaccagcgagggcaagtgctccaagaacttcaacgtgcacaagggcatgggtatgatcagcaccctgttcaacgacgactccatgaagaagcttcgtggcaacctgggcatcggtcatacgcgctactcgaccgccggcggatccggagtggtcaactgccagccctttgtggtgcatacgacccatggcgcattggccctggcccacaatggtgagcttgttaacaacgaatctctgaggagggaggttttggccagaggcgtgggcttatccacgcacagcgacagtgagttgatcgcccagtccctgtgctgcgccccggaggatgtttccgaactggatggacccaactggccagccaggatcaggcatttcatgatgctggcgccgctctcgtactcgctggtcatcatgctaaaggacaaaatctacgccgtgagggacacctatggaaataggccgctgtgcattggcaagatagtgcccatcaatgctgggcacggcaataactcagacacacctgccgatggttgggtggtgtccagtgagagctgcggcttcctgtcgatcggcgccagatacgttcgcgaagtggaacccggagagatagtggagctgtcgcgaagtggctaccgcacggtggacattgtggaaaggcccgacttcaaacgcatggccttttgtatatttgagtacgtttacttcgcccgcggagacagcatcttcgagggtcagatggtgtacacagtgaggctgcagtgcggccggcagctgtggcgagaggctccagtggaggcggatatcgtgagttccgttcccgagtctggcacagcggcggcgcatggctatgcccgtgagtctggcattgaatttgccgaggttctctgcaggaatcgctacgtgggacggacattcattcaaccctctacccggctgcggcagttgggagtagccaagaagttcggagccctatccgagaacgtggctggcaagagattggtcctgatagacgattccatcgtgcgcggcaacaccattggaccaataatcaagttgctgcgggatgcaggcgcccgggaggtgcacatccgcattgccagcccgccgctgcagtacccatgctatatgggtataaatattccgactcgagaggaattgattgccaacaagctgaaccccgaccaactagctaggcatgtgggcgccgacagtctggcttatcttagtgtggagggactagtggaggctgtccagctaaaacaccgcgatgcaggcgatagtaaatccaaggcaacgggccactgcaccgcctgtctcactggcgaatatcccggtgggctgcccgatgagctgagctggtga

SEQ ID NO: 132607 - protein, 545 aa, Drosophila simulans
MSAPQQQQSQQQQQQHVRVVEQQQVEPAEAVTSSVESESISASKELTGLTHECGVFGAIACGDWPTQMDIAHVICLGLVALQHRGQESAGIATSEGKCSKNFNVHKGMGMISTLFNDDSMKKLRGNLGIGHTRYSTAGGSGVVNCQPFVVHTTHGALALAHNGELVNNESLRREVLARGVGLSTHSDSELIAQSLCCAPEDVSELDGPNWPARIRHFMMLAPLSYSLVIMLKDKIYAVRDTYGNRPLCIGKIVPINAGHGNNSDTPADGWVVSSESCGFLSIGARYVREVEPGEIVELSRSGYRTVDIVERPDFKRMAFCIFEYVYFARGDSIFEGQMVYTVRLQCGRQLWREAPVEADIVSSVPESGTAAAHGYARESGIEFAEVLCRNRYVGRTFIQPSTRLRQLGVAKKFGALSENVAGKRLVLIDDSIVRGNTIGPIIKLLRDAGAREVHIRIASPPLQYPCYMGINIPTREELIANKLNPDQLARHVGADSLAYLSVEGLVEAVQLKHRDAGDSKSKATGHCTACLTGEYPGGLPDELSW

SEQ ID NO: 132608 - DNA, 1461 bp, Magnetospirillum gryphiswaldense
  CDS (1)..(1461): transl_table=11
atgttgaccaccaatcctttcgacgacgatcacctgcgcgaagaatgcggggtgttcggcatctatggccaccccgaggcggcggccttgaccgccctgggtctgcacgccctgcagcatcgcggtcaggaagcggcgggcatcgtggcccatgacggcgacgtcttccataaccaccgcgacctgggccacgtcgaggattgcttcggctccgaatccatcatccgcaagctcaagggcgcggcggccgtcggccatgtgcgttattccaccaccggcgaaaccttgctgcgcaatgtccagccgctgttcgccgagatggagtttggcggtctggccctggcccataacggcaacctgaccaacaccaacgtgttgcgccgctcgctggtcaagcgcggctgcctgttccaaagcaccaccgacaccgaggtgatcatccatctgatcgccatcagcctgtacaccagcgtcgaggaccgcctgatcgacgcgctgcgccagatcgagggcgcctattcgctgacctgcctgaccaaggacggggtgatgggcgtgcgcgacccgctgggcatccgcccgctggtgctgggcaagctggacggggcgtggtgtctggcctcggaaacctgcgccttcgacatcatcggcgccgaattcgtccgtgacgtcgaaccgggcgaaatcgtggtcatcagcgccaccggcctgcgctcgctcaagccgttcgccatcaagcagcgccgtttctgcatcttcgagtacatctatttcgcccgtcccgattccatcatggaagggaccagcgtctatgatgtccgcaagcgcatcggcgcccaattggcgcgcgaaagcgcggtggatgccgatgtcatcatcccggtgcccgattccggcgtgcccgccgccatcggttatgccgcccaggccggtattccgttcgagttgggcatcatccgcaaccattatgtcggccgcaccttcatccagcccaccgaccgcacccgccatgtgggcgtcaagatgaagcacaatcccaaccgccatgccatcgaaggcaagcgggtggtgctggtcgacgattccatcgtgcgcggcaccaccagccgcaagatcgtggaaatggtgcgtcaggccggggccagcgaagtgcacatgcgcatttcgtcgccgccgaccaaccattgctgctatttcggcatcgacacgccggaacgggaaaagctgctggcggcgcgctatgacgtggacggcatggccaagctgatcggcgtcgattcgctggccttcatctcgctcgacggcctgtacaaggcggtgggcgaggaagcccgcaacccggcggcgccgcaatattgcgatgcctgcttcaccggcgattatccgatcatgcccaccgattatgccgatcagttgtccgatcccaagcaactttccctgctgggcgaggcggggaaatga

SEQ ID NO: 132609 - protein, 486 aa, Magnetospirillum gryphiswaldense
MLTTNPFDDDHLREECGVFGIYGHPEAAALTALGLHALQHRGQEAAGIVAHDGDVFHNHRDLGHVEDCFGSESIIRKLKGAAAVGHVRYSTTGETLLRNVQPLFAEMEFGGLALAHNGNLTNTNVLRRSLVKRGCLFQSTTDTEVIIHLIAISLYTSVEDRLIDALRQIEGAYSLTCLTKDGVMGVRDPLGIRPLVLGKLDGAWCLASETCAFDIIGAEFVRDVEPGEIVVISATGLRSLKPFAIKQRRFCIFEYIYFARPDSIMEGTSVYDVRKRIGAQLARESAVDADVIIPVPDSGVPAAIGYAAQAGIPFELGIIRNHYVGRTFIQPTDRTRHVGVKMKHNPNRHAIEGKRVVLVDDSIVRGTTSRKIVEMVRQAGASEVHMRISSPPTNHCCYFGIDTPEREKLLAARYDVDGMAKLIGVDSLAFISLDGLYKAVGEEARNPAAPQYCDACFTGDYPIMPTDYADQLSDPKQLSLLGEAGK

SEQ ID NO: 132610 - DNA, 2111 bp, Vigna unguiculata
  CDS (45)..(1748)
ccggtccggaattcccgggtcgacccacgcgtccgcttcttatcatggccgcgtctaatctctccaccctctgctcctcttcacactccaaaccctctttccctttcttcaacacacaaagcttcagcgtcaacactaacactctttttctcaacaccaccaccaactcctttcaaacccttctctctcattccacccgctacactctgcctctcccatgcaccaaaaccacaaacactttcgcctccttcaatgatgacgaaaagcctcgcgaagagtgcggcgttgtgggcatctacggcgacccagaagcctcccgtctctgctccctcgccctccacgccctccagcaccgcggccaggaaggcgccggcatcgtcgccgtcgacaacaacgtcctccacacagtcaacggcgttggcctcgtttctgacgtcttcgacgagactaagctctctcagctacccggctcctgcgccattggccacgtccgctactccaccgcgggacactccaggctctgcaacgtccaacccttcgtcgccggctaccgcttcggctccgtcgccgtctcgcacaatggaaacttcgtgaactaccggtccctgcgcgccaaactggaagacaacgggtccatcttcaacacgacctccgacaccgacgtggtgctccacctgatcgccacctccaagcacagacctttcctactgagaatcgtggatgcctgcgagaatctgaagggcgcgtactccctggtgttcctcacggaggacaagctggtggccgtgaaggaccccttcgggttccgaccgttggtgatgggaaggagaagcaacggcgctgtggttttcgcctcggagacatgcgcgctggatttgatcgaagcgacgtacgagcgagaggtgaacccgggtgaggttgtggtggtggaccacaccggaatccaatccctctgcctcgtgactcatccggagccaaagcaatgcatcttcgagcacatatacttcgcgcttcccaactctgttgtcttcgggaggtccgtgtacgagtccaggagaaaattcggggaaatactggccaccgagagccccgtcgagtgcgacgtagtgatcgcggttcctgattccggggtggtggctgcgcttggctacgctgcaaaagctggggttccctttcagcaggggttgataaggtcgcactatgtggggaggaccttcatcgagccctcgcagaaaataagagattttggggtgaagctgaagctgtttccggtgcgtggcgtgcttgaagggaagagggttgtggtggtggatgaatccattgtgaggggcaccacattgtccaagattgtgaggctgataaaggaagcgggtgccaaagaggtccacatgaggattgcgtgtccacccattgttgggtcctgttactacggcgtcgacacccccagtaaggaggagttgatttccaacaggatgagtgtggaggagataagagagtttattgggtctgattccctcgcttttcttcccttggacacgttgaagaggttgttggaggatgatgctcctaactactgctatgcttgcttctccggaaaataccctgttcagccggaggaacttaaaaccagcaacctcaatgagtttgattgggacgatgctttgaatgggagtttgaaatctattgagaacgagggttgggttagaaaccaggagggagtgtctgagaataagattgttagtgtctgagaaagggtaatgcttctgtcatgttctgttttgttatgttgggtaagtgtaagctaagtgggaattgaccgttgggttgagtagataaatatgtcaaaccacacaccacattactactactactacaagctataactatactatacacagtaatctgaattcccaaaaaccctgcttaataagtaccctttgttggtctgcaagtgtgttaagatatgcatatatggaactctctccttgtttagaattggagggacacaccagattaaattctgaagttatgatttttgtcaatgtagttcctcaaattactcaaataggataaactatggaacatagttgtttccaaaaaaaaaaaaaaaa

SEQ ID NO: 132611 - protein, 567 aa, Vigna unguiculata
MAASNLSTLCSSSHSKPSFPFFNTQSFSVNTNTLFLNTTTNSFQTLLSHSTRYTLPLPCTKTTNTFASFNDDEKPREECGVVGIYGDPEASRLCSLALHALQHRGQEGAGIVAVDNNVLHTVNGVGLVSDVFDETKLSQLPGSCAIGHVRYSTAGHSRLCNVQPFVAGYRFGSVAVSHNGNFVNYRSLRAKLEDNGSIFNTTSDTDVVLHLIATSKHRPFLLRIVDACENLKGAYSLVFLTEDKLVAVKDPFGFRPLVMGRRSNGAVVFASETCALDLIEATYEREVNPGEVVVVDHTGIQSLCLVTHPEPKQCIFEHIYFALPNSVVFGRSVYESRRKFGEILATESPVECDVVIAVPDSGVVAALGYAAKAGVPFQQGLIRSHYVGRTFIEPSQKIRDFGVKLKLFPVRGVLEGKRVVVVDESIVRGTTLSKIVRLIKEAGAKEVHMRIACPPIVGSCYYGVDTPSKEELISNRMSVEEIREFIGSDSLAFLPLDTLKRLLEDDAPNYCYACFSGKYPVQPEELKTSNLNEFDWDDALNGSLKSIENEGWVRNQEGVSENKIVSV

SEQ ID NO: 132612 - DNA, 1473 bp, Corynebacterium ammoniagenes
  CDS (1)..(1473): transl_table=11
gtgaatttagatgaccaaggcgagcaagaaccccgcgaagagtgcggtgtctttggcgtctgggctcctggtgaagatgttgcgacactgacctactttggtctgttcgcattgcagcatcgtgggcaggaagctgcaggtatcggcgtcggtgatggagaccgcctcgttgtcttcaaaaacatgggcttggtctcgaatattttcgatgagtccattttaaattccctccatggctccgtgggcgtggggcatacgcgctactcgactgccggtggcaaagagtggtcgaatgtccagccgatgtttaataccacctcaaatggggtagacatcgctttgtgccacaacggcaacttggtgaactaccaagaactgcgcgatgaagcagtagctctgggactttaccgagagaatgaaaaatccctgtcggattccatgatcatgacagctttgctggcgcacggagtcggggaaggcaactctgtctttgacgccgctaagcaactgctgccaagcatcaaaggcgctttttgcttgacctttaccgatggcaagaccttgtacgccgcgcgtgacccgcacggtgtacgccccttggtcattggccgcttggcgcaaggctgggttgttgcttccgaaacctgtgcgctggatatcgtgagcgcacagtttatccgtgaggtagagcccggtgaacttatctctgtcaatgaggcaggaatccacagcgaaaaattcgctgagccgaagcgccagggctgcgtctttgaatacgtctacttggcacgtccagacaccgtgatcaaaggccgcaacgttcacgcgacgcgcgtggatattggtcgcgcacttgcgaaatctcaccctgcgccagaagctgacatggtcatccccgtgccagaatccggaaacccggcagctgttggctacgcccgggaatcgggcctgacatttgcgcacggcttggtcaaaaacgcctacgtgggtcgaaccttcattcagcccacccagaccttgcgccagctgggtattcgcctcaagctcaaccccctgcgcgaggtcatcgagggcaagtcactcgttgttgtagatgactctattgtccgcggcaacacccaacgcgcgctggtgcgcatgctgcgtgaagcaggcgctgctgaagtgcacgtgcgcattgcttcaccgccagtcaaatggccttgtttctacggcattgacttcgcctcgcctggtgaattgattgctaatatcaagccttctgatgatcctcaggtagtaaccgatgcagtgtgcgaagctatcggagcagactctttagggtttgtatctgtagatgagatggttgaggcaacgcaccaacctatcaattccttgtgtaccgcttgctttgatggcaactacgaactcggacttccgaccgctaaccccaatgctgacgctgtgcgaactttgctcagccaaaagaactga

SEQ ID NO: 132613 - protein, 490 aa, Corynebacterium ammoniagenes
MNLDDQGEQEPREECGVFGVWAPGEDVATLTYFGLFALQHRGQEAAGIGVGDGDRLVVFKNMGLVSNIFDESILNSLHGSVGVGHTRYSTAGGKEWSNVQPMFNTTSNGVDIALCHNGNLVNYQELRDEAVALGLYRENEKSLSDSMIMTALLAHGVGEGNSVFDAAKQLLPSIKGAFCLTFTDGKTLYAARDPHGVRPLVIGRLAQGWVVASETCALDIVSAQFIREVEPGELISVNEAGIHSEKFAEPKRQGCVFEYVYLARPDTVIKGRNVHATRVDIGRALAKSHPAPEADMVIPVPESGNPAAVGYARESGLTFAHGLVKNAYVGRTFIQPTQTLRQLGIRLKLNPLREVIEGKSLVVVDDSIVRGNTQRALVRMLREAGAAEVHVRIASPPVKWPCFYGIDFASPGELIANIKPSDDPQVVTDAVCEAIGADSLGFVSVDEMVEATHQPINSLCTACFDGNYELGLPTANPNADAVRTLLSQKN

SEQ ID NO: 132614 - DNA, 1386 bp, Onchocerca volvulus endobacterium
  CDS (1)..(1386): transl_table=11
atgcttgatagaatgcatgaagagtgtggggtatttggtacaagctccaacaaaaatgctgcttttgactccataataggccttcatgctttgcagcatagaggtcaggaatcttttggtgtaacgacaagtagcaatggtaagttacattcttatcgctttcaaggtcaggttagtagtgtacttgataaaataggtgaaataaaaaaatccctgcctggagattatgcaataggccatgttcggtattcaacaagtggcagtaagtctggggcacaacctatgcttggcaaaagtagtaaatttggagattttgctatagcgcataacggtaatttgattaaagtttcttcaatacgcgaacagctaatcaaacaaggatgcgtttttcaatcagatattgatacagaagtagtagtgcgtttagtagaagtcaatactaggagtagcttcttagagagttttatatacgcattaaaacaaatacaaggtgcttattcctttgttgcaattaaccaagaagtggttattggagtgcgcgatccagcaggaattaggcctcttgtttcaggaaaactaaacggttcttatgtgcttgcatctgagacttgtgcttttgatatagtaaacgctgaatttgtcagagaaatagaaccaggtgagttagtcactcttgaccggaatggtaacttagcttcagcatttcctttctcacagcaaaaatcaagtttttgtatttttgaatacgtttacttttcacgatcagacagcgtcatggagaataagtctatatataatgtaagaaaagaaataggaagaactcttgcagaggaaagtccaccaaaaaacaatgtggatatgattgtaccaatacctgattctggaacacctgtagctattggatattcaaggcattcagctttaccaatggaactgggaataattcgcaatcactatataggaagaacttttatacaaccaaccgctgaagtacgtaaagttaaaataaaattgaaatttaatgctaataagcgcatcttaaaaggtaaaaatatagttttaatagatgatagtatagtacgtggtagcacgctcagaagtataatagttatgctaaaagatgcaggagtaagagaaattcacctaaaaatttcaagcccaccaattaagtactcttgtttttatggaatcgatacaccagagcgtaaggatttaattgctgcaaaccaatctataaaagaaatggaggcagatataggagtgaatagcttaacctttttgagcattgatggtctatatcaagctgttaaggaagaaaagcgcaataacataatgtctcaatactgtgatgcttgtttcactggtgattacccaattggtaggtaa

SEQ ID NO: 132615 - protein, 461 aa, Onchocerca volvulus endobacterium
MLDRMHEECGVFGTSSNKNAAFDSIIGLHALQHRGQESFGVTTSSNGKLHSYRFQGQVSSVLDKIGEIKKSLPGDYAIGHVRYSTSGSKSGAQPMLGKSSKFGDFAIAHNGNLIKVSSIREQLIKQGCVFQSDIDTEVVVRLVEVNTRSSFLESFIYALKQIQGAYSFVAINQEVVIGVRDPAGIRPLVSGKLNGSYVLASETCAFDIVNAEFVREIEPGELVTLDRNGNLASAFPFSQQKSSFCIFEYVYFSRSDSVMENKSIYNVRKEIGRTLAEESPPKNNVDMIVPIPDSGTPVAIGYSRHSALPMELGIIRNHYIGRTFIQPTAEVRKVKIKLKFNANKRILKGKNIVLIDDSIVRGSTLRSIIVMLKDAGVREIHLKISSPPIKYSCFYGIDTPERKDLIAANQSIKEMEADIGVNSLTFLSIDGLYQAVKEEKRNNIMSQYCDACFTGDYPIGR

SEQ ID NO: 132616 - DNA, 1710 bp, Medicago truncatula
  CDS (1)..(1710)
atggccgcaactcaaactctctcttcttccttagcgaaaccctcccttctccctcccaacaacaatcgcttcttctccacatccctccataaacctactctcccctctctctccgacacccgaaaaccccttttcctcacttcctcctccaaaaacccaatttccgacatcatcctctccaacaaaaaccacccacaagacgaggttgttttcatcaacgacgacaagcctcgtgaagagtgcggcgttgttggtatctacggcgactcagaagcctcccgtctctgctacttagccctccacgctctccaacaccgcggccaagaaggcgctggaatcgtcaccgttaacaacaacgttcttcaatccatcaccggtgttggtcttgtctccgatgtcttcaacgaaaccaaactcgatcagttacccggaagcttagccatcggccatgttcgttattctactgctggacagtccatgttgaagaatgttcaaccttttgttgctgggtaccgttttggttctgttggtgttgctcataacggtaatttagttaattatcgtactttaagagctaagcttgaagaaaaaggttcgatttttaacactacttctgatactgaagttgttcttcatttgattgctacttcaaagcatagaccttttattttaagaattgttgatgcatgtgagaagcttgaaggtgcttattcgattgtgtttgttactgaggataagcttgttgctgtgagggatccatttgggtttaggcctttggttatggggaggagaagtaatggtgctgttgtttttgcttctgagacttgtgctcttgatttgattgaagctacttatgagagggaagttttccctggtgaggttattgtggttgataataatgggattcaatcgctttgtttgatggcacatccgcagccgaagcagtgtatcttcgagcatatttactttgctttgcctaattctgttgtttttggtaggtctgtgtatgaatcgcgtaggcgatttggtgaggtgcttgctactgagagtcctgttgattgtgatgttgtgatagctgttcctgattctggtgttgtggctgctcttggttatgctgcgaaagctggtgttccttttcagcaagggttgattaggtcacactatgtaggaaggactttcattgagccatctcagaaaattagggattttggtgtgaagttgaagctttcgcctgttcgtgctgtgcttgaaggtaaaagggttgttgtcgttgatgactcaattgtgaggggaacaacatcgtccaagattgtgaggttgcttaaggaagcaggtgcaaaagaagttcacatgagaattgcaagtccaccaattattggttcttgttactatggtgtggatacacctagctcagaggagctgatatctaataggatgagtgttgaagaaataagggattttattggatctgattcacttgcttttcttccaattaatagcttgcatagtatgttgggtaatgattctcctaatttttgttatgcttgtttctctgggaaataccctgttgagcctagagagcttaaggttaaaagggttggtgactttgttgatgatggtttgaatgggagtttggaacaaattgatggtggttgggttcaagccaacagaaatccaccaaaagaggtgaatactgctactggtctttga

SEQ ID NO: 132617 - protein, 569 aa, Medicago truncatula
MAATQTLSSSLAKPSLLPPNNNRFFSTSLHKPTLPSLSDTRKPLFLTSSSKNPISDIILSNKNHPQDEVVFINDDKPREECGVVGIYGDSEASRLCYLALHALQHRGQEGAGIVTVNNNVLQSITGVGLVSDVFNETKLDQLPGSLAIGHVRYSTAGQSMLKNVQPFVAGYRFGSVGVAHNGNLVNYRTLRAKLEEKGSIFNTTSDTEVVLHLIATSKHRPFILRIVDACEKLEGAYSIVFVTEDKLVAVRDPFGFRPLVMGRRSNGAVVFASETCALDLIEATYEREVFPGEVIVVDNNGIQSLCLMAHPQPKQCIFEHIYFALPNSVVFGRSVYESRRRFGEVLATESPVDCDVVIAVPDSGVVAALGYAAKAGVPFQQGLIRSHYVGRTFIEPSQKIRDFGVKLKLSPVRAVLEGKRVVVVDDSIVRGTTSSKIVRLLKEAGAKEVHMRIASPPIIGSCYYGVDTPSSEELISNRMSVEEIRDFIGSDSLAFLPINSLHSMLGNDSPNFCYACFSGKYPVEPRELKVKRVGDFVDDGLNGSLEQIDGGWVQANRNPPKEVNTATGL

SEQ ID NO: 132618 - DNA, 1749 bp, Aspergillus oryzae
  CDS (1)..(1749)
atgtgtggtatcattgctctgatccaggcgaacccgtcatcttctgccgccgttgacctgcacgaggcactatacctgctccaacatagaggtcaagatgctgctggaattgccacctgtgctgcaggtggtcgtatctaccagctgaagtcgaacggcatggcggccaaggttttccacgacggttctagggtggcagacctgccgggattcatgggcatcggtcacttgagatatcccacagccggaagcagtgcgaatgccgaggctcagcctttctatgtcaacagtccgtatggcatctgtctggcccataacggcaatttgatcaatgctccggagctcaagagatatctggactttgaggctcaccgtcatatcaacactgatagtgacagcgagctcatgctcaacgtcttcgctgatgagttgagcgaaaccaagaaggcgcgagtcaacaaggatgatgtctttgccagtctcagccggatgtatgagagatgtcaaggcggctgggcatgcactgctatgctagctggctttggtctcgtcggcttccgtgactcctatggcatccgtcccttggttcttggttccaggccttccgccgaaggcgaaggcacggactacatgatggcctctgagtctgttgctctgcatcagcttgggttcactaacatccgtgacatccaacctggtgaagcagtcatcatagaaaagggcggcgagcctgtgttccgccaggtcgccccgaagaaggcatatgctcctgatatctttgagtatgtctacttcgcgcgtcctgattccgttatcgatggcatcagtgtgtaccgtagtcgtcaacggatgggtgatcgccttgcctctaggattctcgatgtccttggaccggaagtggtcaaggacattgatgtcgtcatccctatccctgagacttccacgacgtccgcagcggccgtcgctcggtatctcgacattccgtactgccaaggtttcgtaaagaaccgctacgttttccggacattcatcatgcctgagcagaagacccgacagaagggtgttcgccgcaagctgaatgctatgcaagcagaattcaaggaccgaaatgtcctcctggttgacgacagcatcgtgcgaggaaccactagtcgggaaattgtgaccatggcgagggaagctggcgctaagaaggtttacttcgccagttgcgcaccggaaatcacacatgctcatatctatggtatcgatctggcgtcgcctaacgagctggtcgcgcataaccgcgaccccgagcagatcgccaagcacattggtgccgacagcgtcatattccagaccttgtctgacctgaaaggtgcttgtgcggagattgcccaagagaatgggctggctgaaccgcagaacttcgaggtcggagtcttctgtggtgactacgtcactcctgtttccgatgggtacttcgatcatctggaaaagatcagaggcgaaggccgcaagatcaaggctttagatcgggctaaggaagccgtcactcatggcttcgctagtgaaaaggatttccagattgctgccaacggtgtcaaattggatgccagcggcaacatcattccagcgtcgaccccaggggagtctgaagtgccacaggtcagcatctgcagcactcgcaaacctgaggagagcgaagagcatcccaaggtcaaagaccggatggacattagcatccacaacatgggcgatcacccatga

SEQ ID NO: 132619 - protein, 582 aa, Aspergillus oryzae
MCGIIALIQANPSSSAAVDLHEALYLLQHRGQDAAGIATCAAGGRIYQLKSNGMAAKVFHDGSRVADLPGFMGIGHLRYPTAGSSANAEAQPFYVNSPYGICLAHNGNLINAPELKRYLDFEAHRHINTDSDSELMLNVFADELSETKKARVNKDDVFASLSRMYERCQGGWACTAMLAGFGLVGFRDSYGIRPLVLGSRPSAEGEGTDYMMASESVALHQLGFTNIRDIQPGEAVIIEKGGEPVFRQVAPKKAYAPDIFEYVYFARPDSVIDGISVYRSRQRMGDRLASRILDVLGPEVVKDIDVVIPIPETSTTSAAAVARYLDIPYCQGFVKNRYVFRTFIMPEQKTRQKGVRRKLNAMQAEFKDRNVLLVDDSIVRGTTSREIVTMAREAGAKKVYFASCAPEITHAHIYGIDLASPNELVAHNRDPEQIAKHIGADSVIFQTLSDLKGACAEIAQENGLAEPQNFEVGVFCGDYVTPVSDGYFDHLEKIRGEGRKIKALDRAKEAVTHGFASEKDFQIAANGVKLDASGNIIPASTPGESEVPQVSICSTRKPEESEEHPKVKDRMDISIHNMGDHP

SEQ ID NO: 132620 - DNA, 2249 bp, Arabidopsis thaliana
  CDS (1)..(1686)
atggcggccacctgcagcatctcttcttctctatctctcaatgctaaacccaacaagctctctaacaacaacaacaacaataagcctcaccgtttcctccgtaatcccttccttaacccctcctcctcctctttctctcctcttccggcttctatctcctcttcttcttcttctccttcgtttccgctcagagtttcaaaccctcttacccttttggcggcagacaacgatgattatgacgagaagcctcgggaagagtgtggagttgtcggaatctacggtgactcagaagcttcacgactctgttacttagctctccatgcgcttcagcatcgaggtcaagaaggtgcaggtattgttaccgttagtaaagataaggttcttcagaccattacaggtgttggtttggtctctgaggttttcagtgaatccaaactcgatcaattaccaggagacatagccattggtcatgtcaggtactcgactgctggttcttctatgctcaagaacgttcagccgtttgttgctggttatcgatttggctctgttggtgttgctcacaatggcaatttagtgaattacacgaaattgagagctgatttagaggaaaatggttcgattttcaatactagctctgatactgaggttgtgcttcatttgattgccatttctaaagctagaccctttttcatgagaattgttgatgcttgtgagaagcttcaaggtgcttattcgatggtgtttgtgactgaggataagcttgttgctgttcgtgacccacatgggtttaggcctttagttatgggtaggagaagtaatggagctgttgtgtttgcttctgagacttgtgctcttgatttgattgaagctacttatgagagagaggtttatcctggtgaggttttagttgtggataaagatggtgtcaaatgtcagtgtttgatgcctcatcctgagccaaagcaatgcattttcgaacatatttacttctcgttgcctaattcgattgtctttggtcggtctgtgtatgagtctaggcatgtctttggtgagattttagctactgagtcacctgttgattgtgatgtggtgatcgctgtgcctgactcgggtgttgtggctgctcttggttacgcggctaaagctggtgtagcgtttcagcaaggtttgattaggtctcattatgttggaaggactttcattgagccgtctcagaaaatcagagattttggagtgaagctgaagctatcgccagtccgaggagttttagaagggaaaagagttgttgttgttgatgattcgattgttagaggaacaacttcgtccaagattgtgcgtttattgagagaagcgggtgcgaaagaggttcacatgaggatcgcgagtcctcctattattgcatcttgttactacggagtggacacgcctagctcaaatgagttgatatcgaataggatgagtgttgatgaaatcagggattacatcggatgtgattcccttgcgtttttgtcgtttgagacgttaaagaaacatttgggggaagattctagaagcttctgctatgcatgcttcacgggggactatccggtgaagcctacagaggataaggtgaagcgaggaggagattttatcgatgatggtctcgttggaggaatccacaacattgaaggaggttgggtacggtagatagcagatattcaagttctgcattatgatgatcaattttgggtactaatggagtaagatgatgacgatatcttgttgaattttgtgttccatttgaccttaattgctggcacatttttactattttattgagtctgggatggattaagattcaagggttgttcttgtctgaatctttgaaaggttttgtttacttttgtctcgttaagaattcaaatcttctctctgttttcattgcactttacttcatcagaaaatgtaatgggtgatgtggtatatgagagacatctctctatttactaaaatttgattcggttatcgatttggttatttcggttgaatatggtttgaactattccacgtcaccgtagatggtgccaaatgacaactataccctcagaacaatggataaatttgttctgtttcgttacttcctcaaatccaaacacacaaaacagaggaatttacgagattaaggaaccattgtgacgatgcctaagtttctacacacccatcaatctcacttcttcttcctccatcatccgacattgttgctgggatta

SEQ ID NO: 132621 - protein, 561 aa, Arabidopsis thaliana
MAATCSISSSLSLNAKPNKLSNNNNNNKPHRFLRNPFLNPSSSSFSPLPASISSSSSSPSFPLRVSNPLTLLAADNDDYDEKPREECGVVGIYGDSEASRLCYLALHALQHRGQEGAGIVTVSKDKVLQTITGVGLVSEVFSESKLDQLPGDIAIGHVRYSTAGSSMLKNVQPFVAGYRFGSVGVAHNGNLVNYTKLRADLEENGSIFNTSSDTEVVLHLIAISKARPFFMRIVDACEKLQGAYSMVFVTEDKLVAVRDPHGFRPLVMGRRSNGAVVFASETCALDLIEATYEREVYPGEVLVVDKDGVKCQCLMPHPEPKQCIFEHIYFSLPNSIVFGRSVYESRHVFGEILATESPVDCDVVIAVPDSGVVAALGYAAKAGVAFQQGLIRSHYVGRTFIEPSQKIRDFGVKLKLSPVRGVLEGKRVVVVDDSIVRGTTSSKIVRLLREAGAKEVHMRIASPPIIASCYYGVDTPSSNELISNRMSVDEIRDYIGCDSLAFLSFETLKKHLGEDSRSFCYACFTGDYPVKPTEDKVKRGGDFIDDGLVGGIHNIEGGWVR

SEQ ID NO: 132622 - DNA, 1722 bp, Nicotiana tabacum
  CDS (1)..(1722)
atggccgccaccgtctccaccgcctctgccgccgccaccaacaaatctcctctttcacagccccttgacaaacccttttgctccctatctcaaaagctcttatctttatcccctaaaacccatcctaaaccctacagaactctcatcaccgcctcttccaaaaaccccttaaacgacgtcatttcgtttaagaaatcagctgacaataccttggactcctattttgacgatgacgataaaccccgtgaagagtgcggcgttgtgggcatctatggcgactcagaagcttcacgcctttgctatttagcacttcacgcgcttcaacaccgtggccaagaaggcgccggcattgtcgccgttaacgacgacgttcttaagtcaattacaggtgttgggttagtatccgacgtgttcaatgagtcaaagcttgaccaactccctggtgacatggcaattggccacgtaaggtactctactgctggctcttctatgttaaaaaatgttcagccttttgttgctagttataaatttgggtcagttggtgttgcccataatggtaatttagtgaattataagttactgcgtagtgaactagaggaaaatgggtcaatttttaatacaagttctgatactgaggttgtacttcaccttattgctatatctaaagctaggccatttttattgaggattgttgaggcttgtgaaaaaattgaaggtgcttattctatggtgtttgttactgaggataagttggttgccgtaagggatcctcatgggtttaggccattggttatgggtaggagaagtaatggtgctgttgttttcgcgtctgagacgtgtgctttggatttgattgaggctacttatgagagggaggtgaatcctggtgaggttgttgttgtggataaagatggggttcagtctatttgtttgatgcctcatcccgagcgtaaatcttgtatctttgagcatatttactttgctctgcctaattcggtcgtgtttgggaggtctgtgtacgagtctaggcgtgctttcggggagattcttgctactgaagctcccgtggaatgtgatgttgtgatagcagttcctgactcgggtgtcgtggctgcgctcggttatgctgctaaagcaggggtaccgtttcaacaaggtttgattaggtcgcattatgttggtaggacgttcatcgagccatcgcagaagataagggatttcggggtgaagcttaagctgtcgccggttagggcggtgttggagggaaaaagagttgtggtcgtggatgattcgatcgttagaggaacgacctcgtccaagattgtgaggctgttaaaggaggcgggtgcgaaagaggttcatatgaggattgcaagcccaccaattatagcttcttgttattatggagtggatactcctagttcagatgagttgatatcaaataggatgagtgtggaggagattaaggagttcattggatcggattcgcttgcttttctgccaatggatagcttgaataagctcttaggcaatgattctaaaagcttttgctatgcttgcttttcgggcaattacccagtcgagccgacgggtaaggttaaaaggataggggatttcatggatgatggattaagtggagatatggattccattgatggtggatggctaccaggaagtagtagggttcaaaagactatcttgaatgaagttagaaccagctaa

SEQ ID NO: 132623 - protein, 573 aa, Nicotiana tabacum
MAATVSTASAAATNKSPLSQPLDKPFCSLSQKLLSLSPKTHPKPYRTLITASSKNPLNDVISFKKSADNTLDSYFDDDDKPREECGVVGIYGDSEASRLCYLALHALQHRGQEGAGIVAVNDDVLKSITGVGLVSDVFNESKLDQLPGDMAIGHVRYSTAGSSMLKNVQPFVASYKFGSVGVAHNGNLVNYKLLRSELEENGSIFNTSSDTEVVLHLIAISKARPFLLRIVEACEKIEGAYSMVFVTEDKLVAVRDPHGFRPLVMGRRSNGAVVFASETCALDLIEATYEREVNPGEVVVVDKDGVQSICLMPHPERKSCIFEHIYFALPNSVVFGRSVYESRRAFGEILATEAPVECDVVIAVPDSGVVAALGYAAKAGVPFQQGLIRSHYVGRTFIEPSQKIRDFGVKLKLSPVRAVLEGKRVVVVDDSIVRGTTSSKIVRLLKEAGAKEVHMRIASPPIIASCYYGVDTPSSDELISNRMSVEEIKEFIGSDSLAFLPMDSLNKLLGNDSKSFCYACFSGNYPVEPTGKVKRIGDFMDDGLSGDMDSIDGGWLPGSSRVQKTILNEVRTS

SEQ ID NO: 132624 - DNA, 1641 bp, Neurospora crassa
  CDS (1)..(1641)
atgtgtggtattctcgcccttatcctcgcggataccgatgcgtcggacgcctctgccgatttgcacgagagcttgtactatcttcaacaccgtggtcaagatgcctgtggtatcgcgacctgtggttctggaggtagaatctttcagtgcaagggcaatggcatggcctccaaggtctttgacgacggcaagcgcacggtagaccttcccggctacatgggcattgcccatcttcgttacccgactgccggaactagctctagcgccgagagtcagcctttttacgtcaactcgccctacggcatctgcttcgcgcacaacggtaacctcatcaacgctcccgccctgcgcagctatctcgaccaagaggcccatcgtcatgtgaacaccgactcggacagcgagctgatgctcaacgtctttgccaacgccctgaacgagaccggcaaggcccgtgtcaacaccgacgacatcttcagtgccctcaagaagacgtacgagaggtgccaaggtggctgggccgtcactgctatgattgctggcttcggtatcttcgccttccgtgatcaatacggcatccgccccctcattatgggatcgcgtccctccagcaccctcgaaggcggtatcgactacatgttcgcttccgagagcattgctcttcgtcagctgggcttcagcaacttccaggatatcctcccgggacaagccgtgttcatccaaaagaacgggcagcctcaattccaccaggttgttgagcaaaaggcttactcccccgatatcttcgagtacgtttacttcgcccgcccggataccatcatggatggaatctccgtgcaccgcagcaggcagaacatgggcgtgaagcttgccaacaaggtcaaggagatcctcggagaggagggtgtcaaggagattgatgtgatcattcccgtcccggagaccagtaatactgccgctgccgtggtatcagagcagcttcggaaacccttctctaacggtttcgtcaagaaccgttacgtctaccgcaccttcatcttgcccggtcagaaggccaggcaaaagagcgtccggagaaagctcagcgccatggagtccgagttcaaggaccgtgtcgtcctgctcgtggacgactccattgtccgtggcaccaccagtagggagattgtgagcatggctcgtgaggctggtgcccgcaaggttatctttgctagctgtgctcctcccatcatctacccccacatttacggtatcgatctcgcttctccacaggagctcatcgcccacgagaagacaagaagcgacatcgccaagcacatcaatgccgatgatgtcatttaccaggaccttgccgaccttaaggcggcctgtactgaggcctctcctgatcaccagaagatcaccgactttgaagtgggtgtgttctgcggcaaataccagaccgacatccctgaaggttacttcgaccacctgaacgagagccgtggcacgaagcggaaggccgccgttgtgaacggcaccaacaaggtcttggtcgccaatagcggcccggtcaatgtttctacacccgaaccccctgcgctcatggagaaccccgagaacaggcaggatatcagcatccacaacattgccaactcctaa

SEQ ID NO: 132625 - protein, 546 aa, Neurospora crassa
MCGILALILADTDASDASADLHESLYYLQHRGQDACGIATCGSGGRIFQCKGNGMASKVFDDGKRTVDLPGYMGIAHLRYPTAGTSSSAESQPFYVNSPYGICFAHNGNLINAPALRSYLDQEAHRHVNTDSDSELMLNVFANALNETGKARVNTDDIFSALKKTYERCQGGWAVTAMIAGFGIFAFRDQYGIRPLIMGSRPSSTLEGGIDYMFASESIALRQLGFSNFQDILPGQAVFIQKNGQPQFHQVVEQKAYSPDIFEYVYFARPDTIMDGISVHRSRQNMGVKLANKVKEILGEEGVKEIDVIIPVPETSNTAAAVVSEQLRKPFSNGFVKNRYVYRTFILPGQKARQKSVRRKLSAMESEFKDRVVLLVDDSIVRGTTSREIVSMAREAGARKVIFASCAPPIIYPHIYGIDLASPQELIAHEKTRSDIAKHINADDVIYQDLADLKAACTEASPDHQKITDFEVGVFCGKYQTDIPEGYFDHLNESRGTKRKAAVVNGTNKVLVANSGPVNVSTPEPPALMENPENRQDISIHNIANS

SEQ ID NO: 132626 - DNA, 1656 bp, Oryza sativa subsp
  CDS (1)..(1656)
atggccgccgccgccgccgccgccaccgccaccgcctcctccggcctcatccgctgcgccacgggaggcgcgccggcgcacggccaccaccaggtgttcaggtgctccgccgccaagccgtcccctctcgcgctgcgccaccgcgcgggccgccccgcgccgctgcaggccttccccgaatacgaccgcgtcacgcctttcgactatgacggtgaggtggacggcggcgacggcgacgaccacccgcgcgaggagtgcggcgtgttcggcgtcgtcggggacccggacgccacgtcgctctgctacctcggcctgcagaagctgcagcaccgcggggaggagggggctggcatcgccgccgcgggggacgacggcacgatcaagctggagagggggctggggctcgtcggggacgtgttcggcgacccggcccgcctcggcaagctccccggccaggccgccatcggccacgtgaggtactccaccgccggcgccgccgcctccctgcgcaacgtgcagccgttcctcgccgggtacaggttcgggcagctcgccgtggcgcacaacggcaacctggtgaactaccaggcgctgcggaacaagctggaggcgcagggctccatctttagcacgtcgtcggacacggaggtgatcctgcacctcatcgccacctcgctctcgcgccctctgctcgcgcgcatctgcgacgcctgcgagcgcctcgccggggcctactcgctgctgttcctgacggcggacaagctcctggccgtgcgcgacccgttcggcttcaggcccctggtgatgggccgccgcgccaacggcgccatcgtgttcgcgtcggagacctgcgcgctcgacctcatcgacgccacgtacgagcgcgaggtggagccaggggaggtcgtcgtcgtcgaccgccgcgacatgtcggtgtcctccgcctgcctcgtcccgcaccgcccccgcaagtcgtgcgtcttcgagcacatctacttcgcgctcccaaactccgtggtgttcggccacgccgtccacgagcgccgcaacgcctacggccgcgcgctcgccgaggagtcccccgcccccaccgccgacgtcgtcatccccgttccggactcggggttctacgccgcgctgggattctcgcagacgtcggggctcgagttccagcaaggcctcatccggtggcactacagcggccgcagcttcatccagccgtcgcaggcgatccgcgacctcgccgtcaagctcaagctcgcgcccgtgcacggcgtcatcaggggcaagagcgtggtggtggtcgacgactcgctcgtccgcggcaccacctcgagcaagatcgtgcgcctgctccgcgacgccggcgcgcgcgaggtgcacatgcggatcgccagcccgccggtcatcggctcctgcctctacggcatcgacacgcccagcgagggcgagctgatatcaaacaggatggacctcgagggagtccgcagggcgatcggctgcgactccctcgcgttcctctcgctcgacaagctccacaccatctatggcgacgaggcgcatgagctctgcgacgcctgcttctcgcggaattacccggtgctccccaccgtgccggagccggtgccggagttggtgtccgccttcgaagactga

SEQ ID NO: 132627 - protein, 551 aa, Oryza sativa subsp
MAAAAAAATATASSGLIRCATGGAPAHGHHQVFRCSAAKPSPLALRHRAGRPAPLQAFPEYDRVTPFDYDGEVDGGDGDDHPREECGVFGVVGDPDATSLCYLGLQKLQHRGEEGAGIAAAGDDGTIKLERGLGLVGDVFGDPARLGKLPGQAAIGHVRYSTAGAAASLRNVQPFLAGYRFGQLAVAHNGNLVNYQALRNKLEAQGSIFSTSSDTEVILHLIATSLSRPLLARICDACERLAGAYSLLFLTADKLLAVRDPFGFRPLVMGRRANGAIVFASETCALDLIDATYEREVEPGEVVVVDRRDMSVSSACLVPHRPRKSCVFEHIYFALPNSVVFGHAVHERRNAYGRALAEESPAPTADVVIPVPDSGFYAALGFSQTSGLEFQQGLIRWHYSGRSFIQPSQAIRDLAVKLKLAPVHGVIRGKSVVVVDDSLVRGTTSSKIVRLLRDAGAREVHMRIASPPVIGSCLYGIDTPSEGELISNRMDLEGVRRAIGCDSLAFLSLDKLHTIYGDEAHELCDACFSRNYPVLPTVPEPVPELVSAFED

SEQ ID NO: 132628 - DNA, 1620 bp, Drosophila virilis
  CDS (1)..(1620)
atggcgcaaagtgaatgtggaaatttctgtggtaagccaaatgccaatcgggcaacggaaacagttgctgccaggaaagtatttcccgataagatctacaaatcggtgcagccaaagggagaccatgtgacgggcatgacctgcgaatgcggtgtatttggcgccattgcctgtggcgattatcctacacagctggacatcgcacaaatgatctgcctgggcctggtggcgctgcagcatcgcggccaggagtcggcgggcattgtgaccagcctgggcaagagctccaagaacttcggcgtgcacaagggcatgggcatgatcaacaacatcttcaacgacaaggccatacgcaagctcaagggcaacctgggcattggccacacacgctactcaacggcagctgcctccgaggtggtcaattgccagccctttgtggtgcacacggcgcacggtgcgctggcgattgcccacaacggcgagctggtcaactgtgagtcgctgcgtcgcgaggtgctcgaacggggcgtcggcctgtccacgcacagcgacagcgaactgattgcccagtcgctgtgctgtgcgccggaggatgtctcggagcacgacggacccaattggccggcacgcatacgccattttatgacgctggcgccgctctcctactcactggtggtcatgcacaaggacaagatctatgctgtgcgcgattcctatggcaatcggccgctctgcctgggcaagattgtgcccttcgatgcgggccatgccaatatcgaggatcagctagccgagggctgggtggtgagcagcgagagctgcggatttctctccataggcgcgcgctacgtgcgcgaagtggagccgggcgagattatcgaactgtcgcgcaacggctaccggaccgtggacattgtggagcggccggactacaagcgcatggccttctgcatcttcgagtatgtttactttgcgcgcagcgactccatgtttgaaggccagatggtctactcggcgcggctgcagtgcggccggcagctggcacgggaatcgccgctggacgcggatctggtcagctctgtgccggagtcaggcactgcggcggcccatggctatgcacgtgagtcgggtctgaactttggcgaggtcctgtgcaagaatcgttatgtgggacgcaccttcatccagccctcgacgcgtttgcgccaactgggcgtggccaagaagtttggcgctctggcccaaaatgtggagggcaagcgcattgtgctcgtcgacgactcgattgtgcgtggcaatacaattggccccattattaagctgctgcgcgatgccggcgccatcgaggtgcacatccgcattgccagcccgccgctgcagtatccctgctacatgggcatcaatatacccacgcgcgaggagctcattgccaacaagctgaacgcaacgcagctggccaaccatgtcggtgccgacagtctggcctacctcagcgtggagggcctgatcaaggcggtgcagatgaacaaaacgcacgtgaatcccatcaagtccggctactgcaccgcctgcctcaccggcgagtatccgggcggtctgcccgaggagctcagctggtag

SEQ ID NO: 132629 - protein, 539 aa, Drosophila virilis
MAQSECGNFCGKPNANRATETVAARKVFPDKIYKSVQPKGDHVTGMTCECGVFGAIACGDYPTQLDIAQMICLGLVALQHRGQESAGIVTSLGKSSKNFGVHKGMGMINNIFNDKAIRKLKGNLGIGHTRYSTAAASEVVNCQPFVVHTAHGALAIAHNGELVNCESLRREVLERGVGLSTHSDSELIAQSLCCAPEDVSEHDGPNWPARIRHFMTLAPLSYSLVVMHKDKIYAVRDSYGNRPLCLGKIVPFDAGHANIEDQLAEGWVVSSESCGFLSIGARYVREVEPGEIIELSRNGYRTVDIVERPDYKRMAFCIFEYVYFARSDSMFEGQMVYSARLQCGRQLARESPLDADLVSSVPESGTAAAHGYARESGLNFGEVLCKNRYVGRTFIQPSTRLRQLGVAKKFGALAQNVEGKRIVLVDDSIVRGNTIGPIIKLLRDAGAIEVHIRIASPPLQYPCYMGINIPTREELIANKLNATQLANHVGADSLAYLSVEGLIKAVQMNKTHVNPIKSGYCTACLTGEYPGGLPEELSW

SEQ ID NO: 132630 - DNA, 1635 bp, Drosophila virilis
  CDS (1)..(1635)
atgtcaagcagcagcagcagcagcaacaattcgcagcagcagccgcagcagcagcagcagcaacatgtgcgcattgagagccgcgatcaacaggtggaggccgagttgcccacgccgttgaccattgctgaaagtaaggagctaaccggtttgacgcatgagtgcggcgtttttggtgcgattgcctgcggcgactggccaacccagattgatattgctcacgtgatctgcttgggtctggtggcattgcagcaccgtgggcaggagtcggcgggcattgcgaccagcgagggcaagtgttccaagaacttcaatgtgcacaagggcatgggcatgatcagcaccctgttcaacgacgattcgatgaagaagctgcgtggcaatctgggcattgggcatacacgctactccacggccggcgcctcggaggtggtcaattgccagccgtttgtggtgcacacggcgcatggcgccatggcgctggcccacaacggcgagctggtcaacaatgaatctctgcgtcgcgaggtgctgggccgcggcgtcggcctgtccacgcacagcgacagcgagctgatagctcagtcgctttgctgtgcaccggagggcgtctccgagcacgatggacccaactggccggcgcgcattcggcatttcatgatgctggcgccattgtcctattcgctggtcatcatgctcacggataagatctacgctgtgcgcgatacgtacggcaaccgaccgctgtgcattggcaaaatcgtgcccatcaacacgggccatgcgggccacagcacggagacacctgctgatggctgggtggtgtccagcgagagctgcggcttcttgtccattggtgcgcgctatgtgcgcgaagtggagccgggcgagattgtcgagctgacacgcaatggctatcgcaccgttgacattgtggagcgtccggacttcaagcgcatggccttctgcatctttgagtatgtgtactttgcccgcggcgacagcatcttcgaggatcagatggtgtactcagtgcgcttggagtgcggtcgccagctgtggcgcgaggcacccgttgaagcagacattgtcagctcagtgccagagtcgggcacggccgcagcgcatggctatgcgcgcgagtcgaacctcgagttcgccgaggttctgtgccggaatcgttatgtgggacgcacctttatacagccctcgacacggctgcgccaactgggcgtggccaagaagttcggcgcactgtccgagaacgtggccggcaagcggctggtgctcatcgacgattcgattgtgcgcggcaacacaatcggaccaataatcaagctgctgcgcgacgctggggcccgcgaggtgcacatacgcatcgccagccccccgctgcagtatccctgctacatgggcatcaatatacccacgcgcgaggagctgatcgccaacaagctgaacgccaagcaactggcccgtcatgtgggcgccgacagtctggcatatctgagtgtcgccggcctggtacagacggtgcagcgcaagcatgtggcatctggcaaggcgacgggtcattgcaccgcctgtctgacgggcgaatatcctggcggactgccggacgagctaagctggtag

SEQ ID NO: 132631 - protein, 544 aa, Drosophila virilis
MSSSSSSSNNSQQQPQQQQQQHVRIESRDQQVEAELPTPLTIAESKELTGLTHECGVFGAIACGDWPTQIDIAHVICLGLVALQHRGQESAGIATSEGKCSKNFNVHKGMGMISTLFNDDSMKKLRGNLGIGHTRYSTAGASEVVNCQPFVVHTAHGAMALAHNGELVNNESLRREVLGRGVGLSTHSDSELIAQSLCCAPEGVSEHDGPNWPARIRHFMMLAPLSYSLVIMLTDKIYAVRDTYGNRPLCIGKIVPINTGHAGHSTETPADGWVVSSESCGFLSIGARYVREVEPGEIVELTRNGYRTVDIVERPDFKRMAFCIFEYVYFARGDSIFEDQMVYSVRLECGRQLWREAPVEADIVSSVPESGTAAAHGYARESNLEFAEVLCRNRYVGRTFIQPSTRLRQLGVAKKFGALSENVAGKRLVLIDDSIVRGNTIGPIIKLLRDAGAREVHIRIASPPLQYPCYMGINIPTREELIANKLNAKQLARHVGADSLAYLSVAGLVQTVQRKHVASGKATGHCTACLTGEYPGGLPDELSW

SEQ ID NO: 132632 - DNA, 1470 bp, Thermoplasma volcanium
  CDS (1)..(1470): transl_table=11
gtggacaccacacctataacgtcaggactaagaggtgctcccactgtggattcccggccccaaggatcagatcctataaatgggcaaaagccaagtgaagattgcgcagttgtggggttcaaggggaagataaacgcctataaccccataataactgcacttcgaacattgcaacatagaggccaggaatcggctggtatggctgtttttgacggcaagaaggtaacgttgaaaaaaggaagtggcctagtaacagatgtttttaatcctgcaaccgacgatattaaaggttacgtgggagtaggccatacacgttattcaactgctggatcaaaaaatgtggttaatgctgggccatttgtaatgaactcttctttcggttacataaccatatcccacaacggtgagatagtaaacgctgatgaattgcgtgattccatgaaaaaagaagggatcacgttccagagcgattcagatacagaggttatgctggcagagctttcgagaaatatctcaaagtatggcctaaaaagaggattcgaacagtccatggagagcctaaggggagcttatgcatgcgcaataagcataaatgatcgcctctacgccgtaagggacccaaatgggataaggcctctggttatagggaagaataacgacggatacatagtagcttcagaaagctgcgcaatagatgctctcgaaggcacgttaataaaaaacatcgaaccaggggaagtagttgagatatctgacgaaggcataagaacaattgtaagcaaatctgcaaatcgaatagcccactgcatgtttgagtatgtatatttctcaaggccggatagcgttatagacggcataaacgtttatgccgccagggtaaacatgggcagaatacttgctaaggagagcccagttgaagctgacatagtcgtccctgttccagattcagggcgttctcaagcaataggttattccatggaatctggaatgccttacacagaggggctgattaagaataggtattcggagaggaccttcataatgcctactcagagcgataggaaggccgcgatacatttgaagctaaatcctatacgcgaagtgatagggggaaagaaggtagtgcttgtagatgatagcatagtccgtggaaacactatgaggttcatcgtcggcctaatgaggaaatatggcgcaaaggagatacatgtcagaattggatcgccgcatataatcgcaccatgctattttggtgtcgacatgaagacgaaggatcaattcatagcgcgcggtaaaaccgatgaggagataaacagagaaatcggggccgattcactcgcgtttctttcagttgacggcctcaaacaggcgatatctatgaaaaacaataacctgtgccttgggtgcctcacaggagaatatcctatagatatatcaaagaaactcgcagaaaatattacttcttactag

SEQ ID NO: 132633 - protein, 489 aa, Thermoplasma volcanium
MDTTPITSGLRGAPTVDSRPQGSDPINGQKPSEDCAVVGFKGKINAYNPIITALRTLQHRGQESAGMAVFDGKKVTLKKGSGLVTDVFNPATDDIKGYVGVGHTRYSTAGSKNVVNAGPFVMNSSFGYITISHNGEIVNADELRDSMKKEGITFQSDSDTEVMLAELSRNISKYGLKRGFEQSMESLRGAYACAISINDRLYAVRDPNGIRPLVIGKNNDGYIVASESCAIDALEGTLIKNIEPGEVVEISDEGIRTIVSKSANRIAHCMFEYVYFSRPDSVIDGINVYAARVNMGRILAKESPVEADIVVPVPDSGRSQAIGYSMESGMPYTEGLIKNRYSERTFIMPTQSDRKAAIHLKLNPIREVIGGKKVVLVDDSIVRGNTMRFIVGLMRKYGAKEIHVRIGSPHIIAPCYFGVDMKTKDQFIARGKTDEEINREIGADSLAFLSVDGLKQAISMKNNNLCLGCLTGEYPIDISKKLAENITSY

SEQ ID NO: 132634 - DNA, 1527 bp, Zymomonas mobilis
  CDS (1)..(1527): transl_table=11
atgtcgcctagcctttcgagcgaactcttttccgactctatctctaccctgacgacgacaactgaatctttagataatggggcgtctgatgatacccttcatgaagaatgtggtgttttcggtatttggggcgcagatacagccgctgccgtcgtagctctcggactacatgctttacagcatcgcggacaggaagccgccggtatcaccagctgggatgggaaaaatttccactcccgtcgtgctgttggtcacgttgcgggtaactttgaccgtgacgatgctatccgcagcttgcccggatcatgtgctattggccatgtccgctatgcaaccaccggtgccagcaccttgtgcaatgttcagccgctttatgccgaactggtttcgggcggatttgcgattgctcataacggcaatatttccaatgccgaaactttgcgccatcagttggtgcgtcatggatctatctttcaatccacgtcggatactgaaacgattatccatctggttgcgacctcaagctatcgcagcctgttagaccgattcattgatgctttaaaacaggttgagggcgcttattctctcgtctgcctgacgccggaaggcatgattgcctgtggtgatccgctgggtattcgcccgctggttctcggtaaagtcggggaaacttttgttgtcgcttccgaaacggttgctctcgatattattggcggaacctatatccgtcaggtcgaaccgggtgagctgattattatttcggaaaaagggctgcaatctattcatccctttaaaaagcagaagcctcgcccctgcattttcgagcatgtctatttttcgagaccggattctttgatcggtagcacctcggtttattctgttcggaaatctatcgggatcgaattggcgcgcgaaaatccggttgatgccgatatggttattcctgtgccagattcagggacacctgccgctatcggttatgcccagcaatcttctttgccgtttgaattgggtattatccgttcccattatgttggacgcacctttattcagccgggcgaccaagtccgtcatttgggcgtgaagctgaagcataatgccaaccgtgccttgattaaaggcaagaagttggttctagttgatgactctattgtcagaggcacgaccagcgtcaaaatcatcagaatgcttcgggatgcgggtgccaaggaaatccatttgcggattgccagcccaccgacccgtcatagctgtttttatggtgtagatacgccggagcgggcaaaattgttggcggctaaaatgaccgtcgaacagatggcagaatatatcggcgctgatagtttagcttttatttcgatggatggcctttatcgtgcggtcggtgaagaggctcgcaatgatgctcagccgcaatattgtgatgcttgctttacaggtgcctatgccacgcccctaaccgatcttggcgaattgggtgctagcgaacaactggttcgtttatccgaacaggtggctatcgcctaa

SEQ ID NO: 132635 - protein, 508 aa, Zymomonas mobilis
MSPSLSSELFSDSISTLTTTTESLDNGASDDTLHEECGVFGIWGADTAAAVVALGLHALQHRGQEAAGITSWDGKNFHSRRAVGHVAGNFDRDDAIRSLPGSCAIGHVRYATTGASTLCNVQPLYAELVSGGFAIAHNGNISNAETLRHQLVRHGSIFQSTSDTETIIHLVATSSYRSLLDRFIDALKQVEGAYSLVCLTPEGMIACGDPLGIRPLVLGKVGETFVVASETVALDIIGGTYIRQVEPGELIIISEKGLQSIHPFKKQKPRPCIFEHVYFSRPDSLIGSTSVYSVRKSIGIELARENPVDADMVIPVPDSGTPAAIGYAQQSSLPFELGIIRSHYVGRTFIQPGDQVRHLGVKLKHNANRALIKGKKLVLVDDSIVRGTTSVKIIRMLRDAGAKEIHLRIASPPTRHSCFYGVDTPERAKLLAAKMTVEQMAEYIGADSLAFISMDGLYRAVGEEARNDAQPQYCDACFTGAYATPLTDLGELGASEQLVRLSEQVAIA

SEQ ID NO: 132636 - DNA, 1473 bp, Corynebacterium ammoniagenes
  CDS (1)..(1473): transl_table=11
gtgaatttagatgaccaaggcgagcaagaaccccgcgaagagtgcggtgtctttggcgtctgggctcctggtgaagatgttgcgacactgacctactttggtctgttcgcattgcagcatcgtgggcaggaagctgcaggtatcggcgtcggtgatggagaccgcctcgttgtcttcaaagacatgggcttggtctcgaatattttcgatgagtccattttaaattccctccatggctccgtgggcgtggggcatacgcgctactcgactgccggtggcaaagagtggtcgaatgtccagccgatgtttaataccacctcaaatggggtagacatcgctttgtgccacaacggcaacttggtgaactaccaagaactgcgcgatgaagcagtagctctgggactttaccgagagaatgaaaaatccctgtcggattccatgatcatgacagctttgctggcgcacggagtcggggaaggcaactctgtctttgacgccgctaagcaactgctgccaagcatcaaaggcgctttttgcttgacctttaccgatggcaagaccttgtacgccgcgcgtgacccgcacggtgtacgccccttggtcattggccgcttggcgcaaggctgggttgttgcttccgaaacctgtgcgctggatatcgtgggcgcacagtttatccgtgaggtagagcccggtgaacttatctctgtcaatgaggcaggaatccacagcgaaaaattcgctgagccgaagcgccagggctgcgtctttgaatacgtctacttggcacgtccagacaccgtgatcaaaggccgcaacgttcacgcgacgcgcgtggatattggtcgcgcacttgcgaaatctcaccctgcgccagaagctgacatggtcatccccgtgccagaatccggaaacccggcagctgttggctacgcccgggaatcgggcctgacatttgcgcacggcttggtcaaaaacgcctacgtgggtcgaaccttcattcagcccacccagaccttgcgccagctgggtattcgcctcaagctcaaccccctgcgcgaggtcatcgagggcaagtcactcgttgttgtagatgactctattgtccgcggcaacacccaacgcgcgctggtgcgcatgctgcgtgaagcaggcgctgctgaagtgcacgtgcgcattgcttcaccgccagtcaaatggccttgtttctacggcattgacttcgcctcgcctggtgaattgattgctaatatcaagccttctgatgatcctcaggtagtaaccgatgcagtgtgcgaagctatcggagcagactctttagggtttgtatctgtagatgagatggttgaggcaacgcaccaacctatcaattccttgtgtaccgcttgctttgatggcaactacgaactcggacttccgaccgctaaccccaatgctgacgctgtgcgaactttgctcagccaaaagaactga

SEQ ID NO: 132637 - protein, 490 aa, Corynebacterium ammoniagenes
MNLDDQGEQEPREECGVFGVWAPGEDVATLTYFGLFALQHRGQEAAGIGVGDGDRLVVFKDMGLVSNIFDESILNSLHGSVGVGHTRYSTAGGKEWSNVQPMFNTTSNGVDIALCHNGNLVNYQELRDEAVALGLYRENEKSLSDSMIMTALLAHGVGEGNSVFDAAKQLLPSIKGAFCLTFTDGKTLYAARDPHGVRPLVIGRLAQGWVVASETCALDIVGAQFIREVEPGELISVNEAGIHSEKFAEPKRQGCVFEYVYLARPDTVIKGRNVHATRVDIGRALAKSHPAPEADMVIPVPESGNPAAVGYARESGLTFAHGLVKNAYVGRTFIQPTQTLRQLGIRLKLNPLREVIEGKSLVVVDDSIVRGNTQRALVRMLREAGAAEVHVRIASPPVKWPCFYGIDFASPGELIANIKPSDDPQVVTDAVCEAIGADSLGFVSVDEMVEATHQPINSLCTACFDGNYELGLPTANPNADAVRTLLSQKN

SEQ ID NO: 132638 - DNA, 1374 bp, Archaeoglobus fulgidus
  CDS (1)..(1374): transl_table=11
atgtgtggggttgtaggtatataccatcctgacggggagcttgctccccgactcgcctactattctctcttctcccttcagcatcgcggtcaggagtcggcaggtatcgcgtcctttgacaaccacataaggcagaagaggggcatgggcctcgtcaccgaggttttcaacgacgaggactttgagctgcttgcaggcaaatcggtaatcggccacgtcagatactcaacgaccggtaggtcgagacttgagaacgctcagcctttcgtcgtcaaatcaaaggcgggatacatagctgtagcacataacggaaacctcgttaactactctcagctgagaaacgagctggaaaacgagggaagggttttcacaaccgattcagataccgaggtaatttcccagctgctctcaaagtttctgatcgaggaaggggacatcataaatgctcttgaaaggctgaacgaatcacttgtgggcagctacaccatgaccatgctcgttgacgatgcggtgataggctaccgcgaccctctcggcttcaagccgctgtgcgttggaaggattgatgatggttatgtgatatgcagcgaaagctgcgcaatcgatgctctcggtggagagtttataagagacgtacagcctgggaaagcggcgattataaaagatggtgagcttgagttcgtaaaaatcgccaaatcggagaggagagctgtttgcattttcgagtacatatacttcgcccgcccggactcaataattgacggaataagcgtttacaaagcgagaagcgagatgggaaaggttctggcgagggagtctcctgtcgaagctgacttcgtttcagctgtacccgacagcggaataaccgcggcaataggctacgctcaggaatcagggctgccttactttgagggcttgataaagaacagatacgtgggcaggactttcataatgccggttcagagtctaagggagacgtcagtgaggctgaaggtaaacgtcgtcagggagaacgtgagggggaggagggttgtgctggttgacgacagcatagtgagagggaccacctcaaggagaatcgtgcagatgataaaagacgcgggagcaaaggaggtgcacatgagaatcggcagccccccaatcatagccccgtgctacttcggaatagacatgaaatcgagggaggagctgatagccgccagccataccgttgaggagatagggagaattttcggaacggatagcctcgcctacctgagcctggaaggtcttctcgaagcggttaggagggcgggtggaaagaggggatactgccttgcctgtctgacctccaaataccccgtttcagtgcctggagaggagtgtgagtgttaa

SEQ ID NO: 132639 - protein, 457 aa, Archaeoglobus fulgidus
MCGVVGIYHPDGELAPRLAYYSLFSLQHRGQESAGIASFDNHIRQKRGMGLVTEVFNDEDFELLAGKSVIGHVRYSTTGRSRLENAQPFVVKSKAGYIAVAHNGNLVNYSQLRNELENEGRVFTTDSDTEVISQLLSKFLIEEGDIINALERLNESLVGSYTMTMLVDDAVIGYRDPLGFKPLCVGRIDDGYVICSESCAIDALGGEFIRDVQPGKAAIIKDGELEFVKIAKSERRAVCIFEYIYFARPDSIIDGISVYKARSEMGKVLARESPVEADFVSAVPDSGITAAIGYAQESGLPYFEGLIKNRYVGRTFIMPVQSLRETSVRLKVNVVRENVRGRRVVLVDDSIVRGTTSRRIVQMIKDAGAKEVHMRIGSPPIIAPCYFGIDMKSREELIAASHTVEEIGRIFGTDSLAYLSLEGLLEAVRRAGGKRGYCLACLTSKYPVSVPGEECEC

SEQ ID NO: 132640 - DNA, 1431 bp, Bacillus subtilis
  CDS (1)..(1431): transl_table=11
atgcttgctgaaatcaaaggcttaaatgaagaatgcggcgtttttgggatttggggacatgaagaagccccgcaaatcacgtattacggtctccacagccttcagcaccgaggacaggagggtgctggcatcgtagcgactgacggtgaaaagctgacggctcacaaaggccaaggtctgatcactgaagtatttcaaaacggcgaactcagcaaagtaaagggaaaaggcgctatcgggcacgttcggtacgcaacggctggaggcggcggatacgaaaatgttcagccgctcctcttccgttcccaaaacaacggcagcctggcgcttgctcataacggaaatcttgtcaacgccactcagctgaagcagcagctcgaaaatcaagggagcatctttcaaacctcttcggatacagaggttttggctcacctgatcaaaagaagcggacacttcacgctgaaggatcaaattaaaaactcgctttctatgctgaaaggcgcctacgcgttcctgatcatgaccgaaacagaaatgattgtcgcacttgatccaaacgggctgagaccgctatccatcggcatgatgggcgacgcttatgtggtcgcatcagaaacatgcgcatttgacgtcgtcggcgcaacgtaccttcgcgaggtagagccgggagaaatgctgatcattaatgatgaaggcatgaaatcagagcgtttttccatgaatatcaatcgttccatttgcagcatggagtacatttatttctccagaccagacagcaatattgacggtattaatgtgcacagtgcccgtaaaaaccttgggaaaatgctggctcaggaatccgcagttgaagctgacgtcgtaaccggggttccggattccagtatttcagcggcgatcggctatgcagaggcaacaggcattccgtatgagcttggcttaatcaaaaaccgttatgttggcagaacgtttattcagccgtcccaggctctgcgtgagcaaggcgtcagaatgaagctgtctgcggtgcgcggggttgtagaaggcaaacgcgtcgtgatggtggatgactctatcgtgcgaggaacaactagccgccggattgtcacgatgctaagagaggcgggtgcgacagaggtgcatgtgaaaatcagttcaccgccgatcgctcatccgtgcttttacggcattgacacttccacacatgaagaactgatcgcgtcttcgcattctgtcggagaaatccgtcaggaaatcggagccgataccctctcatttttgagtgtggaagggctgctgaaaggcatcggcagaaaatacgatgactcgaattgcggacagtgtctcgcttgctttacaggaaaatatccgactgaaatttaccaggatacagtgcttcctcacgtaaaagaagcagtattaaccaaataa

SEQ ID NO: 132641 - protein, 476 aa, Bacillus subtilis
MLAEIKGLNEECGVFGIWGHEEAPQITYYGLHSLQHRGQEGAGIVATDGEKLTAHKGQGLITEVFQNGELSKVKGKGAIGHVRYATAGGGGYENVQPLLFRSQNNGSLALAHNGNLVNATQLKQQLENQGSIFQTSSDTEVLAHLIKRSGHFTLKDQIKNSLSMLKGAYAFLIMTETEMIVALDPNGLRPLSIGMMGDAYVVASETCAFDVVGATYLREVEPGEMLIINDEGMKSERFSMNINRSICSMEYIYFSRPDSNIDGINVHSARKNLGKMLAQESAVEADVVTGVPDSSISAAIGYAEATGIPYELGLIKNRYVGRTFIQPSQALREQGVRMKLSAVRGVVEGKRVVMVDDSIVRGTTSRRIVTMLREAGATEVHVKISSPPIAHPCFYGIDTSTHEELIASSHSVGEIRQEIGADTLSFLSVEGLLKGIGRKYDDSNCGQCLACFTGKYPTEIYQDTVLPHVKEAVLTK

SEQ ID NO: 132642 - DNA, 1416 bp, Methanococcus jannaschii
  CDS (1)..(1416): transl_table=11
atgtgtgggatatttggaatctactcttatgaaaggttaaatgtagctaaaaaaatttattatgggttgtttgctttacagcatagagggcaggaaggggctggaattgctacaagtgatgggaaaaatatacactactataaaaatattggattagttacagatgtttttaaaaatgagacattacaaaacttatttggctatattggaattggacatgtaagatattcaacaacgggaggaaaggctgttgaaaactgtcagccgtttgtagttaaaagttcatttggtaatatagctatagcccataatggagatttagtaaattcagacgaattaagaagagaattagagatgaaggggcatatattcacttcttcaactgactctgaagttatagctcaacttttggttagagaattgttaaaaacatctgataagattgaggcaataaaaaatacattaaaaaagctcgttggagcttattcacttttaataatgtttaatgattccttaattgcagtaagagacccttggggctttaaaccattgtgtattggaagagatgagagcaatatctatatatcatctgaggattgtgcattaacaaccttagatgctgaatttgttaaagatattgagccaggagaaattatagaaattaaagacggggaaataatatctcataaattagattatggtgtttctgaatacaaccctgtgaatgtcgatgtgccatgtatatacagaggagcggcaacttgtatgtttgagtatgtgtattttgcaagacctgactcaacaattgatggtattagcgtctataaggttagaaagaggattggaaaaattttggctaaagaacatccagtagatgctgatgttgtttctccaatccccgattcaggagtcacatttgccttaggattttctgaagagtcagggattccatactatgaaggtttaataaagaacagatatgttggaagaacttttattcttccatcccaaaatgagagagaattggcagtaaggttaaaattaagtccagtaaaaagtgtattggaagggaagagggttgttttggttgatgatagtattgttagaggaacaacatcaagaagaattgtaaatatggttagaaaagctggagctaaggaggtgcatttaagaattggctgtcctaagattatatccccttgctattatggtatagatatggctactaaaaaggaacttattgcctcaaacaaaacagaagaagagatagggaaagctattggagttgattctattggatatttatcattagagggattagttaaagctataggtagaaaagatttatgtttagcttgtgtaactggaaaatatccaactgaagttaattttgaaaagatattggggagagaataa

SEQ ID NO: 132643 - protein, 471 aa, Methanococcus jannaschii
MCGIFGIYSYERLNVAKKIYYGLFALQHRGQEGAGIATSDGKNIHYYKNIGLVTDVFKNETLQNLFGYIGIGHVRYSTTGGKAVENCQPFVVKSSFGNIAIAHNGDLVNSDELRRELEMKGHIFTSSTDSEVIAQLLVRELLKTSDKIEAIKNTLKKLVGAYSLLIMFNDSLIAVRDPWGFKPLCIGRDESNIYISSEDCALTTLDAEFVKDIEPGEIIEIKDGEIISHKLDYGVSEYNPVNVDVPCIYRGAATCMFEYVYFARPDSTIDGISVYKVRKRIGKILAKEHPVDADVVSPIPDSGVTFALGFSEESGIPYYEGLIKNRYVGRTFILPSQNERELAVRLKLSPVKSVLEGKRVVLVDDSIVRGTTSRRIVNMVRKAGAKEVHLRIGCPKIISPCYYGIDMATKKELIASNKTEEEIGKAIGVDSIGYLSLEGLVKAIGRKDLCLACVTGKYPTEVNFEKILGRE

SEQ ID NO: 132644 - DNA, 1425 bp, Methanobacterium thermoautotrophicum
  CDS (1)..(1425): transl_table=11
ttgttgggagaatctgaagtgagagataaatgcggtattgtagggatttactcacaggataagaaaaccggtgtggcctcccagatatattatgcgctctacgcactgcagcacaggggacaggagtctgcagggatctcaacattcaatgggaacgatatactgacacacaggggaatggggctggtctgcgacgtcttcaatcctgagaagctagaggaacttaaggggaacgtcgggataggacacgtgcgctactcaaccacaggcgaatcaaggattgagaattctcagccattctggagcgaatttcagggaggtaaaattgcaatagcccacaatggagacatcataaactccatggaactccgggaggaactcgaggaggagggtcacaactttgtctcaacgacggactcagaggtcatctgccacctcctcagcagggaatacgatgagaaaccgaacatgatatactccataaagagggtttcagagcagctggtgggatcatattccctggtggtgcttctgaaccaggacctctatgtcgtcagggaccctgtgggtataaaaccactggcctttgcaaggaagggcagcacccagatcgtggcctcggagaccgtggcctttgatgtcataggtgccgagcatgtaagggacgtccagcccggtgagatactccacctgaaccggggcaaatcctactgggttgcaaacgcccccaacaccaggagggcccactgcatgtttgagtacgtctacttcgcaaggccggacagtgtaatcgacgggcgcaacgtatacagggtccgcctcaatattggggaggccctctacagggagcacccggccaacgcagacgtggttgtacccgtacctgactcatccatcccggcggccataggatactcaagggcctcagggataccctacggtgagggcctgataaagaacaggtacgtgggtcgtacatttataatgccgacccaggaggaacgtgaaacagcggttaaactcaagatgaaccccataaggtccgaacttgagggtaaacgcatagtactcatcgatgacagtatagtgagggggacaacctcaagggcactcattgacatcataagggatgccggggcagaggagatacatctgaggataggctgcccacccataaagtccccgtgctactatggcatagcaatggcaacgaagaaggagctcatagcatccaccaggaacgttgaggagataaggaggataataggtgttgattccctgggctacctcagcatcgagtccctggtggagtgcataggtataaagaagggattcctgtgcacgggatgccttgacggggactaccccacacccctaccatctgacataagtgaatatgaggccatgaggtcctgctccagatga

SEQ ID NO: 132645 - protein, 474 aa, Methanobacterium thermoautotrophicum
MLGESEVRDKCGIVGIYSQDKKTGVASQIYYALYALQHRGQESAGISTFNGNDILTHRGMGLVCDVFNPEKLEELKGNVGIGHVRYSTTGESRIENSQPFWSEFQGGKIAIAHNGDIINSMELREELEEEGHNFVSTTDSEVICHLLSREYDEKPNMIYSIKRVSEQLVGSYSLVVLLNQDLYVVRDPVGIKPLAFARKGSTQIVASETVAFDVIGAEHVRDVQPGEILHLNRGKSYWVANAPNTRRAHCMFEYVYFARPDSVIDGRNVYRVRLNIGEALYREHPANADVVVPVPDSSIPAAIGYSRASGIPYGEGLIKNRYVGRTFIMPTQEERETAVKLKMNPIRSELEGKRIVLIDDSIVRGTTSRALIDIIRDAGAEEIHLRIGCPPIKSPCYYGIAMATKKELIASTRNVEEIRRIIGVDSLGYLSIESLVECIGIKKGFLCTGCLDGDYPTPLPSDISEYEAMRSCSR

SEQ ID NO: 132646 - DNA, 1584 bp, Mycobacterium bovis
  CDS (1)..(1584): transl_table=11
gtggccgtagactcggattacgtcaccgaccgcgccgcagggagccgccaaaccgtgaccggccagcaacccgagcaagacctgaactcgccccgggaagagtgcggtgtcttcggggtctgggccccgggtgaagacgtcgccaaactcacctactacggcctgtacgcgttgcagcatcgcggccaggaagccgccgggatcgccgtcgccgacggctcccaggtgctggtcttcaaagacctcggcctggtcagccaggtgttcgacgagcagacgttggcggccatgcagggccatgtcgccatcgggcactgtcgttactccaccaccggggacacgacgtgggagaacgcccagcccgtgttccgcaacaccgccgctggcaccggtgttgcgttgggccacaacggaaatctggtcaatgccgctgcccttgccgcccgcgcccgcgacgcggggttgatcgccacccgctgcccagccccggcgacgacggactccgacattctgggggcgctgctggcccacggtgctgccgattccaccctcgaacaggcggcgctggacctgctgcccacagtgcggggagcgttctgtctgacgttcatggacgaaaacacgctttatgcgtgccgcgacccgtacggggtgcgcccgctatcgctcgggcgtttggaccgtggctgggtggtggcctccgaaacggccgcactcgacatcgtcggcgcctcgttcgtccgtgatatcgaaccgggcgaattgctggctatcgacgccgacggggtgcggtccacccgctttgccaaccccacgcccaagggctgcgtattcgaatacgtctacctggcgcggccggacagtacgatcgccggccggtcggtacacgccgcgcgggtggagatcggtcgccgactggctcgggaatgcccggtcgaggccgacttggtgattggtgtgccggaatccggcacacccgccgcggtcggctacgcgcaggagtccggcgttccatatgggcagggtctgatgaagaacgcctatgtcgggcgcaccttcatccagccgtcacagaccatccgtcagctcggcatccggctgaagctcaacccgctcaaagaggtgatccgcggcaagcggctcatcgtcgtcgacgactcgatcgtgcggggcaacacccagcgtgcgctggtacgcatgctgcgcgaggccggtgcggtcgaattgcatgtgcgcatcgcctcgccaccggtgaagtggccgtgcttctacggtatcgacttcccctcgccggccgagttgatcgccaacgccgtggaaaacgaggacgagatgctggaggcggtacggcatgccatcggggccgacacgctgggatacatctcgctgcggggcatggtggcggcgtccgagcagcccacgtcgcggctgtgcaccgcctgcttcgacggcaagtatccaatagagctgccccgcgagaccgcgctaggcaaaaatgtcatcgagcacatgctcgccaatgcggcccgcggagccgcgctgggcgaactcgccgccgacgacgaagtccccgttgggcgctga

SEQ ID NO: 132647 - protein, 527 aa, Mycobacterium bovis
MAVDSDYVTDRAAGSRQTVTGQQPEQDLNSPREECGVFGVWAPGEDVAKLTYYGLYALQHRGQEAAGIAVADGSQVLVFKDLGLVSQVFDEQTLAAMQGHVAIGHCRYSTTGDTTWENAQPVFRNTAAGTGVALGHNGNLVNAAALAARARDAGLIATRCPAPATTDSDILGALLAHGAADSTLEQAALDLLPTVRGAFCLTFMDENTLYACRDPYGVRPLSLGRLDRGWVVASETAALDIVGASFVRDIEPGELLAIDADGVRSTRFANPTPKGCVFEYVYLARPDSTIAGRSVHAARVEIGRRLARECPVEADLVIGVPESGTPAAVGYAQESGVPYGQGLMKNAYVGRTFIQPSQTIRQLGIRLKLNPLKEVIRGKRLIVVDDSIVRGNTQRALVRMLREAGAVELHVRIASPPVKWPCFYGIDFPSPAELIANAVENEDEMLEAVRHAIGADTLGYISLRGMVAASEQPTSRLCTACFDGKYPIELPRETALGKNVIEHMLANAARGAALGELAADDEVPVGR

SEQ ID NO: 132648 - DNA, 1671 bp, Mycobacterium leprae
  CDS (1)..(1671): transl_table=11
gtgtgtttggctgtcggggtaggtgtccgggcacctaaacacgtgccacagattcgtcgactgggccgtgctggccgtagactccgttgcgtcaccaactgcgccctagggagctgcccaatcgtgaccgtccagcaacccgggcgggatttcagctcgccccgcgaagagtgcggtgtgttcggggtctgggctccgggtgaactagtcgccaaactcacttatttcggtctatacgcgttgcagcatcgcggccaggaagctgcggggatcgctgtcgctgatggatcgcaggtgttggtcttcaaagaccttggcttagttagtcaagtgttcgacgagcagacattggcggcgatggagggtcacgttgccatcggtcattgccgctactccaccaccggcgacaccacctgggaaaatgcccagcctgttttccgcaacatcgctgccggatccggggttgcgttggggcacaacggaaacctggtcaacactgccgagcttgccgcacgtgcccgcgacgcggggttgatagcaaaacgctgcccggccccagcgacaacggactccgacatcctgggcgcgctgttagcccacggtgcggccgactcgaccctggaacaggctgcgctggaactgctgccgaccgtgcggggtgcgttctgcctgacattcatggacgaaaacaccctctatgcctgccgggacccgtatggagtacggccgctgtcgctcggacgactggatcgcggctgggtggtggcttctgaaacggcggggctcgacattgtcggcgcctcgtttgtccgcgacatcgagccgggcgaattgctggcgatcgacgccgacggagtacggtccactcgtttcgccaaccctacgcccaagggttgtgtttttgagtacgtttacctggcacggcccgacagcacgctggccggacggtcggtgcacggcactcgggtggagatcggtcgtcgacttgcccgcgaatgcccggtcgaggccgacttggtgatcggtgtgcccgaatcaggcactcccgccgcagtgggatacgcgcaggaatccggcatctcttacgggcagggtctgatgaagaatgcatatgttggacgcacattcatccaaccgtcgcaaaccatccgtcaactgggcatccggctgaagctcaatccgcttaaagaggtaatccgcggcaagcggctgattgttgtcgacgactcggttgtgcgggggaacacccaacgcgctctggtgcggatgctgcgcgaggccggtgccgtcgagctgcacgtgcgcatcgcttcaccaccggtgaagtggccctgtttttacggcatcgacttcccatcgccggccgaattgatcgctaacgtcgtcgcagacgaggaggagatgctcgaggcggtacggcagggcatcggtgccgacacactgggctacatctcgctgcggggcatgattgcggcttccgagcagcccgcttcgcggctgtgttacgcttgctttgacggtaggtatccgatcgagctgcccagtgaagccatgttaggcaaaaatgtcatcgagcacatgcttgccaatgcggcgcgtggagccgggctacgcgatcttgctgctgatcaggtcccagtcgatgcggacgaaaattgcgtttggcgttga

SEQ ID NO: 132649 - protein, 556 aa, Mycobacterium leprae
MCLAVGVGVRAPKHVPQIRRLGRAGRRLRCVTNCALGSCPIVTVQQPGRDFSSPREECGVFGVWAPGELVAKLTYFGLYALQHRGQEAAGIAVADGSQVLVFKDLGLVSQVFDEQTLAAMEGHVAIGHCRYSTTGDTTWENAQPVFRNIAAGSGVALGHNGNLVNTAELAARARDAGLIAKRCPAPATTDSDILGALLAHGAADSTLEQAALELLPTVRGAFCLTFMDENTLYACRDPYGVRPLSLGRLDRGWVVASETAGLDIVGASFVRDIEPGELLAIDADGVRSTRFANPTPKGCVFEYVYLARPDSTLAGRSVHGTRVEIGRRLARECPVEADLVIGVPESGTPAAVGYAQESGISYGQGLMKNAYVGRTFIQPSQTIRQLGIRLKLNPLKEVIRGKRLIVVDDSVVRGNTQRALVRMLREAGAVELHVRIASPPVKWPCFYGIDFPSPAELIANVVADEEEMLEAVRQGIGADTLGYISLRGMIAASEQPASRLCYACFDGRYPIELPSEAMLGKNVIEHMLANAARGAGLRDLAADQVPVDADENCVWR

SEQ ID NO: 132650 - DNA, 1515 bp, Pasteurella multocida
  CDS (1)..(1515): transl_table=11
atgtgtggtattgttggtattgttagccaaagcccagttaaccaatcaatttatgatgcgttaaccttattgcaacaccgcgggcaagacgccgccgggattgtaaccgtagatgatgaaaaccgattccgcttgcgtaaagcgaacgggttagtcagcgatgtatttgaacaagttcatatgttacgtttacaaggcaatgctggcattggacatgttcgttatcctactgctgggagctcaagtgtctctgaagcgcaacctttttatgtaaattcgccttatggcttaaccttagtgcataatggtaacttgaccaattcaagtgaattaaaagaaaagttatttcgtcgcgcgcgtcgccatgtaaataccaattcagattctgaattattactcaatatcttagccaatcaccttgatcacttcgaaaaataccaattagatccgcaagatgtatttagtgctgtcaaacaaacgcatcaggatattcgtggtgcttatgcttgtatcgccatgattattggtcatggtatggtcgcgtttcgcgatccgaacggtatccgtccattagtgttagggaaacgcgaggaaaatggcaaaacagagtatatgtttgcctccgaaagtatcgcattagatacagtgggttttgaatttgtacgagatgtacaacccggcgaagcgatttatgtcacgtttgaaggggaaatgtatgcccagcaatgtgctgacaaaccaacattaacaccttgtatttttgaatatgtctattttgcacgtccagactcctgcatcgatggggtttctgtttatgctgcccgtgttcatatgggacagcgtttaggtgaaaaaattgcacgggaatgggcggatgtggatgatattgatgtggtcattcctgtgcctgaaacctctaacgatattgctttacgtattgcgcgcgtgttaaataaaccgtatcgtcaaggttttgtgaaaaatcgctatgtggggcgtacgtttattatgccgggtcaggcattgcgagtcagttctgttagacgtaaactcaataccattgcttcagaatttaaagataagaatgtgttattagttgacgactcgattgtacgtggtaccacgtctgaacaaattgtcgaaatggcgagagcggcaggtgcgaagaaaatttattttgcctctgctgcaccggaaattcgttatccaaatgtgtatggtattgatatgccgaccaaaaatgaattgatcgcttatggtcgtgatgtagatgaaattgctaaattaattggtgtggataaattgattttccaagatttggatgcgttaaccggttctgtgcaacaagaaaatccaagtattcaagactttgattgttcggtgtttacaggggtttatgtgacgggtgatattacacctgaatatctggataatattgcagaacagcgtaatgatatcgccaagaaaaagcgtgaaaaagatgctaccaatcttgaaatgcacaatgaaaaataa

SEQ ID NO: 132651 - protein, 504 aa, Pasteurella multocida
MCGIVGIVSQSPVNQSIYDALTLLQHRGQDAAGIVTVDDENRFRLRKANGLVSDVFEQVHMLRLQGNAGIGHVRYPTAGSSSVSEAQPFYVNSPYGLTLVHNGNLTNSSELKEKLFRRARRHVNTNSDSELLLNILANHLDHFEKYQLDPQDVFSAVKQTHQDIRGAYACIAMIIGHGMVAFRDPNGIRPLVLGKREENGKTEYMFASESIALDTVGFEFVRDVQPGEAIYVTFEGEMYAQQCADKPTLTPCIFEYVYFARPDSCIDGVSVYAARVHMGQRLGEKIAREWADVDDIDVVIPVPETSNDIALRIARVLNKPYRQGFVKNRYVGRTFIMPGQALRVSSVRRKLNTIASEFKDKNVLLVDDSIVRGTTSEQIVEMARAAGAKKIYFASAAPEIRYPNVYGIDMPTKNELIAYGRDVDEIAKLIGVDKLIFQDLDALTGSVQQENPSIQDFDCSVFTGVYVTGDITPEYLDNIAEQRNDIAKKKREKDATNLEMHNEK

SEQ ID NO: 132652 - DNA, 1506 bp, Pseudomonas aeruginosa
  CDS (1)..(1506): transl_table=11
atgtgtggcatcgtcggtatcgtgggcaagtcgaacgtcaatcaggcgctgtatgacgcgctcaccgtcctccaacatcgcggccaggacgctgccggtatcgtcacctgccatgacgataagctgtacctgcgcaaggacaacggcctggtccgcgacgtcttccagcagcgccacatgcagcgcctgatcggcagcgtcggcatcggccatgtgcgttacccgaccgccggcagctccagctcggcggaagcgcagccgttctacgtcaactcgccctacggcatcaccctggcgcacaacggcaacctgaccaatgtcgagcagttggccaaggaaatctacgaatccgacctgcgccacgtgaacaccaactccgattcggaagtgctgctcaacgtgttcgcccacgagctggcggtgcgcaacaagctgcagcccaccgaggaggacatcttcgccgcggtttcctgcgtgcacgaccgttgcgtcggcggctacgcggtggtggcgatgatcaccggccatggcatcgtcggtttccgcgaccccaatgcgatccgtccgatcgtcttcggccagcggcataccgagaacggcgtcgaatacatgatcgcctccgagagcgtggccctggacgtactcggcttcaccctgatccgcgacctggcgccgggcgaggcggtgtacatcaccgaggaaggcaagctctatacccgccagtgcgccaaggcaccgaagtacgcgccgtgcatcttcgagcacgtctacctggcgcgtccggattcgatcatggacggcatctcggtgtacaaggcgcgcctgcgcatgggcgagaagcttgccgacaagatcctccgcgagcgtcccgaccacgacatcgacgtggtcatcccgatcccggacaccagccgcaccgcggcgctggaactggccaaccggctcggcgtgaagttccgcgagggcttcgtcaagaaccgctacatcggccgcaccttcatcatgcccggccaggcggcgcggaagaaatccgtgcggcagaagctcaacgccatcgagctggagttccgcggcaagaacgtgatgctggtggatgactccatcgtccgcggcaccacctgcaagcagatcatccagatggcccgcgaggccggggcgaagaacgtctacttctgctccgccgcgccggccgtgcgctaccccaacgtctacggcatcgacatgccgagtgcgcacgagctgatcgcgcacaatcgcagcaccgaggacgtcagcaagctgatcggcgccgactggctggtctaccaggacctgcccgacctgatcgacgcggtcggcggcggcaagatcaagatcgatcacttcgactgcgccgtgttcgacggcgagtacgtgaccggcgacgtcaacgaggcctacctgaaccggatcgaacaggcgcgcaacgatgcgaccaaggccaagagccaggcggtcagcgcgatcatcgatctgtacaacgactga

SEQ ID NO: 132653 - protein, 501 aa, Pseudomonas aeruginosa
MCGIVGIVGKSNVNQALYDALTVLQHRGQDAAGIVTCHDDKLYLRKDNGLVRDVFQQRHMQRLIGSVGIGHVRYPTAGSSSSAEAQPFYVNSPYGITLAHNGNLTNVEQLAKEIYESDLRHVNTNSDSEVLLNVFAHELAVRNKLQPTEEDIFAAVSCVHDRCVGGYAVVAMITGHGIVGFRDPNAIRPIVFGQRHTENGVEYMIASESVALDVLGFTLIRDLAPGEAVYITEEGKLYTRQCAKAPKYAPCIFEHVYLARPDSIMDGISVYKARLRMGEKLADKILRERPDHDIDVVIPIPDTSRTAALELANRLGVKFREGFVKNRYIGRTFIMPGQAARKKSVRQKLNAIELEFRGKNVMLVDDSIVRGTTCKQIIQMAREAGAKNVYFCSAAPAVRYPNVYGIDMPSAHELIAHNRSTEDVSKLIGADWLVYQDLPDLIDAVGGGKIKIDHFDCAVFDGEYVTGDVNEAYLNRIEQARNDATKAKSQAVSAIIDLYND

SEQ ID NO: 132654 - DNA, 1344 bp, Pyrococcus abyssi
  CDS (1)..(1344): transl_table=11
atggcaaaggtgagagggatgagagagaagtgcgggatattcggtgtaagctctgaggatgccgttaggaagacgtattatggcttaatagccctacaacataggggtcaagaaggagctggaataagcgtttggaatggtagaataagaacgataaaaggacatggtctcgtctctgaagttttcgacgagaactccttgaaccttgcaagtaacattgcgataggccacgttaggtactcgacgtccggctctctaagtgaagttcaaccgttggaagttaggtgttgtgggtacgagcttgctatagcccacaatggaaccttgacgaatttcatacccctcaggagattatacgagggtatgggaattaagttccattcctcagtagataccgaggtgattgggatatccttccttaaccactatagtcaagtgaaagatgagtttgaggccatgaggagggtcttcgaggaggttaaaggggcttactcaatattaatcctcttcgacggaaagataatagcggcaagggatccagtcggctttaggcccttggtctttggggagggcgatggatactattttgcctcggaggattccgccctaaggatgtttgggctggaaacaagggatgttcttcctggggaggtcttcgtaatcgatggagaaagctatgagagtaaagttcttgccagggagaaacatgcctactgcgtttttgaatacatctacttcgcaagaccagatagcacgttgaacgggataaacgtttactgtgcccgctataggatgggggttgagctcgccagggaaagtccagctgaaggagacgttgtgattgcggttccagattctgggagaacggccgctttaggatttgcccacgaaagtggaatcccttatatggaaggcctaataaagaaccgctacatagggaggactttcataatgccaagcggcagagggttgaaagttaagctcaagctgtctccagttagggaagtagtgaatggtaaaagggtagttctggttgatgattccatagttaggggaactaccatgacgaggatagtcaagatgcttagggatgcaggggccagggaagtccacgttaggatagcctccccaccaataagatacccatgctacatggggatagacatacctacccggcacgagcttatagctgcctggaggagcattgaggatattaggaaggagattggggcagattcattggcttacctcagcatagagggtcttaagagggccgttggaacgaaaaacctatgcatggcatgcttaactggtgaatatcctgagtgggcattcaacttttaa

SEQ ID NO: 132655 - protein, 447 aa, Pyrococcus abyssi
MAKVRGMREKCGIFGVSSEDAVRKTYYGLIALQHRGQEGAGISVWNGRIRTIKGHGLVSEVFDENSLNLASNIAIGHVRYSTSGSLSEVQPLEVRCCGYELAIAHNGTLTNFIPLRRLYEGMGIKFHSSVDTEVIGISFLNHYSQVKDEFEAMRRVFEEVKGAYSILILFDGKIIAARDPVGFRPLVFGEGDGYYFASEDSALRMFGLETRDVLPGEVFVIDGESYESKVLAREKHAYCVFEYIYFARPDSTLNGINVYCARYRMGVELARESPAEGDVVIAVPDSGRTAALGFAHESGIPYMEGLIKNRYIGRTFIMPSGRGLKVKLKLSPVREVVNGKRVVLVDDSIVRGTTMTRIVKMLRDAGAREVHVRIASPPIRYPCYMGIDIPTRHELIAAWRSIEDIRKEIGADSLAYLSIEGLKRAVGTKNLCMACLTGEYPEWAFNF

SEQ ID NO: 132656 - DNA, 1350 bp, Pyrococcus horikoshii
  CDS (1)..(1350): transl_table=11
atgagaggtgaaatcatgaaagagaagtgtgggatctttggggcttattcccaggatgcaactaaaaagacttattatggcctaatggccctccaacacagggggcaagaaggggctggaattagtgtctgggatggggatataagaacggttaaaggtcatgggcttgtttccgaagtctttaaggggggcagtattcggaggttaaatggtaatcccgtgatagggcacgttaggtactcaacatcgggttccctttcagaagtccaaccgctggaggttgaatgttgtgggtataaggtatctatagctcataacggcacgcttacaaattttcttcccctaaggaggttttatgaaagtagaggatttaaatttcgctcttccatcgatacggaagttatagcggtctcttttttaaatcattactctgagctgaaggatgaatttgaagccatgagtagagtttttgaagaagttaaaggggcttattcagttttaatgttgttcaatggaaagcttatagccgttagggatcctgtgggttttaggcctctgagttttggagctggggatggatattacttctcttccgaggattctgctctcaggatgttctgtactaacataagggatgtatctcccggtgaggttattgtagttaaggatggggaagcagagagtaagatagttggaagatccgagcatgcatattgcgtcttcgagtatatatactttgcaagacctgatagcattataaacggaataagcgtttactgggctcgctatagaatgggagttgaattggctagggaaagtccagctgagggagatgtggtaatagctgttcccgattcagggagaactgcagctttgggttttgctcacgagagtgggatcccctacatggaggggcttataaagaatcgctatatcgggagaaccttcataatgccaagtgggcgagaaatcaaggttaggttaaagctctccccagttaaagaagtcattaagggaaggaggatagttcttgttgatgattcaatagtaaggggaacaacgatgaagaacattgtgaagatgcttagagatgcgggggctagggaagtgcacgtgagaatagcatctcccccgataaggtatccatgctatatggggatagacattccgacaagacatgagcttatagcagcttggaagagtattgaggagataaagaaagagattggagctgattctctagcctacctaagtgtagaggggcttaagagggctatagggactgataagctttgcatggcatgtttaactggaaactatccagagtgggcttttgactttaaggtttag

SEQ ID NO: 132657 - protein, 449 aa, Pyrococcus horikoshii
MRGEIMKEKCGIFGAYSQDATKKTYYGLMALQHRGQEGAGISVWDGDIRTVKGHGLVSEVFKGGSIRRLNGNPVIGHVRYSTSGSLSEVQPLEVECCGYKVSIAHNGTLTNFLPLRRFYESRGFKFRSSIDTEVIAVSFLNHYSELKDEFEAMSRVFEEVKGAYSVLMLFNGKLIAVRDPVGFRPLSFGAGDGYYFSSEDSALRMFCTNIRDVSPGEVIVVKDGEAESKIVGRSEHAYCVFEYIYFARPDSIINGISVYWARYRMGVELARESPAEGDVVIAVPDSGRTAALGFAHESGIPYMEGLIKNRYIGRTFIMPSGREIKVRLKLSPVKEVIKGRRIVLVDDSIVRGTTMKNIVKMLRDAGAREVHVRIASPPIRYPCYMGIDIPTRHELIAAWKSIEEIKKEIGADSLAYLSVEGLKRAIGTDKLCMACLTGNYPEWAFDFKV

SEQ ID NO: 132658 - DNA, 1497 bp, Rhizobium etli
  CDS (1)..(1497): transl_table=11
atgaaccagtcccattccttcccgaccgacgatccgctcgacggagatacgctgcatgaggaatgcggcgttttcggaatcctgggacatcccgatgccgcggctctcacggctctcggcctgcacgccctgcagcatcgtgggcaggaagcggccggcattgtctccttcgacggcaaacgcttctaccaggagcgccatatgggtctggtcggcgaccactataccaatccgatgacgctcgcccgcctgcccggcagcatctcaatcggccatactcgctattcgacgaccggcgaagtggcgatgcgcaacgtgcagccgctgtttgccgagttggaggaaggcggcatcgccattgcccataacggcaatttcaccaatggcctgacgctgcgccgccagatcatcgcaaccggcgccatctgtcagtcgacctccgataccgaagtcgtgctgcatctcatcgcccgctcgcgccacgcttccacgtccgaccggttcatcgacgccatccgccagatggaaggcggctattcgatgctcgccatgacccgcaccaagctgattgccgcgtcgcatcccaccggcatccgcccgcttgtcatgggcgaactcgacggcaagccgatcttctgctccgaaacctgtgcgctcgacatcattggcgccaaattcatccgcgacgtggaaaacggcgaggtcatcatctgcgaaatccagcccgacggctcgatcagcatcgatgcccgcaagcccagcaagccacagccggagcgtctctgcctgttcgaatatgtctatttcgcccgtccggattcggtcgtcggcggccgcaacgtttatacgacgcgcaagaacatgggcatgaacctcgccaaggaatcgcctgtcgatgccgatgtcgtcgtgccggtgccggatggcggcaccagtgcggctgggggctatgcgcaggaaagcggcatccccttcgaatacgaatacggaatcatccgcaaccattatgtcggacgcacctttatcgagccgacgcagcagatccgcgccttcggcgtcaagctgaagcattccgccaaccgggcgatgatcgaaggcaagcgcgtggtgctggtcgacgattccatcgtgcgcggcacgacgtcgctgaagatcgtgcagatgatccgcgaggctggtgcgcgcgaagtccatatccgtgtcgcaagcccgatgatcttcttccgggatttctacggatcgatacgcccgacgcccgacaaactgctcgccaatcaatatgccgacgtcgaagccatggccaaatatatcggcgcggattcgcttgccttcctgtcgatcaacggactttaccgcgccgtcggcggcgaggaccgcaatccggcccgcccgcagttcaccgaccactacttcaccggcgactatccaacccgcctgctcgacaagaacggcgagtcgatgggcaacaagctttcgatgcttgccagcaacggctga

SEQ ID NO: 132659 - protein, 498 aa, Rhizobium etli
MNQSHSFPTDDPLDGDTLHEECGVFGILGHPDAAALTALGLHALQHRGQEAAGIVSFDGKRFYQERHMGLVGDHYTNPMTLARLPGSISIGHTRYSTTGEVAMRNVQPLFAELEEGGIAIAHNGNFTNGLTLRRQIIATGAICQSTSDTEVVLHLIARSRHASTSDRFIDAIRQMEGGYSMLAMTRTKLIAASHPTGIRPLVMGELDGKPIFCSETCALDIIGAKFIRDVENGEVIICEIQPDGSISIDARKPSKPQPERLCLFEYVYFARPDSVVGGRNVYTTRKNMGMNLAKESPVDADVVVPVPDGGTSAAGGYAQESGIPFEYEYGIIRNHYVGRTFIEPTQQIRAFGVKLKHSANRAMIEGKRVVLVDDSIVRGTTSLKIVQMIREAGAREVHIRVASPMIFFRDFYGSIRPTPDKLLANQYADVEAMAKYIGADSLAFLSINGLYRAVGGEDRNPARPQFTDHYFTGDYPTRLLDKNGESMGNKLSMLASNG

SEQ ID NO: 132660 - DNA, 2078 bp, Saccharomyces kluyveri
  CDS (388)..(1920)
aagcttccatgatcttctaaattttcaatttgggtttatgaaatatgatggtcccgtggcttaaggctgaacaaggattaaagccttttgcgtaactcccctgcttccagtacggcaaccattaacagttcttcgtccggcctaaaatcctctagcaggaaaaaaaaagaaagaaaattttttccgaagattttgactcgccttacatttattacgcttagtgatgactctgcagctataattataaaggcgtttgaaatttaataatcgagccttcacgaaaaatcagtgaaccacttagccatttgaagaagctggtctcctttcttttacattcatcaactcagaggcttatagaactcaaataaattaaactaatcaaacgacatgtgtggtattttaggtatcgctctagctgatcaatcaagtgttgttgccccagaattattcgatggctctttgttcctacaacatagaggccaagatgccgctggtatggctacatgtggtgaacgtggtagactatatcagtgcaagggtaacggtatggctcgtgatgtcttcacccaacatagaatgagtgggttggttgggtctatgggtatcgcccatttgcgttatccaactgctggttcctgtgctaactccgaagcccaacccttttatgtgaacagtccttacggtatctgtttaagtcacaacggtactttagtcaatacgttgtctctgaggagttatttggacgaggttgtccatagacacattaacacggacagtgattcggagctattactaaatgtattcgctgctgagttggagagacacaacaagtacagagttaacaatgacgatatattccatgctttggagggtgtttatcgccagtgtcgtggtgggtatgcctgtgtcggtatgctagctggttacagtttatttgggttcagagaccccaacggtatcagaccattgttatttggtgagagagtcaatccagatggtaccaaggattatatgttggcttcagagagcgttgttttgaaggcacataactttaacaaatttcgcgatttgaagcctggtgaagctgtcatcattcctaaggattgtaataaacaagagcccgaattcaggcaggtagtcccaaccaattcttacagaccagacttgtttgagtatgtttattttgccagaccggacagtgtgttagatggtatttctgtctaccacacaagattacaaatgggtatcaagctagcagaaaatgttaaaaaagttgtcgatccagatgaaattgatgttgtagtttctgttcctgatactgcacgtacttgtgccttgcaatgtgccaaccatctaaataaaccatatcgtgaagcattcgtcaaaaacagatatgttgggagaacctttattatgccgaaccaaaaagagcgtgtttcttccgttagacgtaaattgaatccaatggatttcgaatttaaggataagcgtgtcctgattgttgatgattccatcgtgagagggactacttctaaagaaattatcaacatggctaaagaatctggtgccaccaaggtgtacttcgcatctgctgctccagcaatccgctttaatcatatttacggtattgaccttgctgataccaaacagttagtcgcctacaataggaccactgacgaagttgcccaggagttaggttgtgaaaaggttatttatcaatccttggaagacctagtcgattgttgtaaaaccgataagattgacaaattcgaagttggtgtctttactggtaactacgtgaccggtgtagaggatggttatttacaagaattagaaagagttcgcgccctcaacaaggcaaaactaactacagcaaaggcagaggtggacattggattgtataatagtgccgattattaaaaacagagctttatacaaagtatagattcgatatgcacactttttgtaaattaacactatttcagctgtaacccatagtcgatagaaaaggccttccacgacaaagaccatgaggtagacaaaattaaagctagaaatcgttattctactcgaagctt

SEQ ID NO: 132661 - protein, 510 aa, Saccharomyces kluyveri
MCGILGIALADQSSVVAPELFDGSLFLQHRGQDAAGMATCGERGRLYQCKGNGMARDVFTQHRMSGLVGSMGIAHLRYPTAGSCANSEAQPFYVNSPYGICLSHNGTLVNTLSLRSYLDEVVHRHINTDSDSELLLNVFAAELERHNKYRVNNDDIFHALEGVYRQCRGGYACVGMLAGYSLFGFRDPNGIRPLLFGERVNPDGTKDYMLASESVVLKAHNFNKFRDLKPGEAVIIPKDCNKQEPEFRQVVPTNSYRPDLFEYVYFARPDSVLDGISVYHTRLQMGIKLAENVKKVVDPDEIDVVVSVPDTARTCALQCANHLNKPYREAFVKNRYVGRTFIMPNQKERVSSVRRKLNPMDFEFKDKRVLIVDDSIVRGTTSKEIINMAKESGATKVYFASAAPAIRFNHIYGIDLADTKQLVAYNRTTDEVAQELGCEKVIYQSLEDLVDCCKTDKIDKFEVGVFTGNYVTGVEDGYLQELERVRALNKAKLTTAKAEVDIGLYNSADY

SEQ ID NO: 132662 - DNA, 1602 bp, Schizosaccharomyces pombe
  CDS (1)..(1602)
atgtgcggaattttggcgttaatgcttgctgaccctcatcaacaggcatgtcctgaaatttatgagggtctttacagtttgcagcatcggggtcaagatgccgccggtattgtaaccgctggaaacaaaggtcgtctttaccaatgcaagggatccggcatggttgccgatgtttttagtcagcatcaacttcgccaactcgtaggtagtatgggtattggtcatttgcgctatcctactgctggaagttgtgctcactctgaagcacaacccttttatgttaactctccttatggtcttgtgttgggccataatggtaatttaattaatggacccgaattacgacgctttttggacactgaggcccatcgtcatgtaaacactggatctgattctgagcttttgcttaacatctttgcttacgagcttcaacggttggataaatttcgtataaacgaaaatgatattttcgaagctttgcgtaatgtatacgatcgcgttaatggtggttatgcatgtgttgctatgatcgcaggcttgggtgttttgggattccgtgatcccaatggcattcgtcctttagtgatcggtgaacgtgatacccccgaaggaaaggattacatgcttgctagtgagagtgttgtattgactcaatttggataccgtacattcagagatattcgccccggtgagtgtgtctttattcgtcgttccaatagggaagatatacttgcagggtttagaggccctcgcttgttttctcgtcaaatccttccctgcctaagatttactcccgatatatttgagtatgtctatttcgctcgtcccgactctgttattgacggattgtccgtataccaatcccgtttaaatatgggtgaaaagttagcgcatactataatgaaacggtttggtcccgattacatggaaaaaattgatgctgtcattcctgttccagattctgctcgaaccagtgcccttgcacttgcacagacagctcaactgccatacgtcgaagcttttattaaaaaccgatatattggtcgtaccttcattatgccaggtcaacagattcgtcgtaaatcggttcgtcgtaaattaaatgttcaacctcaagagttttttgataagaatgttttaattgtggatgacagtattgttcgtggtaccacctctcgtgagatcgttcaaatggctagggagtcgggtgcaaagaatgtctatttggctagttgcgctcctatgatcactcatcctcatgtctacggtattgatctcgctgattgtaaggatctcattgcttatggaaaaactgaggatgaggttgctgaagcaattagtgccgatggtgtcatttatcaaacattagaagatttattagattcttgtcgtacggctgagctgaccgaatttgaagttggtctctttactggcgaatacactactggcgctagtaaagaatatttagtccatcttgagcaaatgcgtattgctaacaatcgtgctcgtaagcatagctttgcagaagatgaggaacgtgaagctcccgaagacatttctctccataacacacattcagatgttacttttgattttgtttaa

SEQ ID NO: 132663 - protein, 533 aa, Schizosaccharomyces pombe
MCGILALMLADPHQQACPEIYEGLYSLQHRGQDAAGIVTAGNKGRLYQCKGSGMVADVFSQHQLRQLVGSMGIGHLRYPTAGSCAHSEAQPFYVNSPYGLVLGHNGNLINGPELRRFLDTEAHRHVNTGSDSELLLNIFAYELQRLDKFRINENDIFEALRNVYDRVNGGYACVAMIAGLGVLGFRDPNGIRPLVIGERDTPEGKDYMLASESVVLTQFGYRTFRDIRPGECVFIRRSNREDILAGFRGPRLFSRQILPCLRFTPDIFEYVYFARPDSVIDGLSVYQSRLNMGEKLAHTIMKRFGPDYMEKIDAVIPVPDSARTSALALAQTAQLPYVEAFIKNRYIGRTFIMPGQQIRRKSVRRKLNVQPQEFFDKNVLIVDDSIVRGTTSREIVQMARESGAKNVYLASCAPMITHPHVYGIDLADCKDLIAYGKTEDEVAEAISADGVIYQTLEDLLDSCRTAELTEFEVGLFTGEYTTGASKEYLVHLEQMRIANNRARKHSFAEDEEREAPEDISLHNTHSDVTFDFV

SEQ ID NO: 132664 - DNA, 1710 bp, Glycine max
  CDS (1)..(1710)
atggctgctgcgtctaatctctccactctctcctcctcttccctctccaaaccctcgtcctctttccctttccgcaacacaccaacaaacaacaacgcttcttttctccacaacaaatcccttccaaaccaaaactctctctctcacaaactctcttcccctctgcctctcgcatgcaacccaaaaaaccaaaacacttgtgtcttcttcgacgacgaagaccaaaagccccgtgaagagtgcggcgtggtgggcatctacggcgacccggaagcctcccgtctctgctccctggccctccacgccctccagcaccgcggccaagaaggtgccggcatcgtagccgtccacgacaaccacctccaatccgttaccggcgtcggcctcgtctccgacgtcttcgagcagtccaagctctcccgcctccccggcacctcggccattggccacgtccgctactccaccgccggccaatccatgctcaaaaacgtccaacccttcctggccgactaccgcttcgctgccgtcgccgtcgctcacaacggcaacttcgtcaactaccgctccctccgagccagactcgaacacaacaacggctccatcttcaacaccacctccgacaccgaggttgtcctccacctcatcgccacttcaaaacacaggccattcctcctcagaatcgtggacgcctgcgagcatctccaaggcgcctactccctcgtattcgtcacggaggacaagctcgtcgccgtcagagaccccttcgggttccgacccttggtgatgggtaggagaaccaacggcgctgtagttttggcctccgagacatgcgcgcttgatttaatcgaagccacgtacgagagagaggtgtacccgggtgaagttatcgtggtggaccacactggaatccaatccctctgcctcgtgtctcatcctgagccaaaacaatgcatcttcgagcacatatacttcgcgcttcctaactctgttgttttcgggaggtccgtgtacgagtctagaaaaaaattcggagaaatactagcctctgagagtcccgttgagtgtgacgttgtgatcgcggttcctgattctggcgttgtggctgcgcttggttatgctgcaaaagctggggtaccctttcagcaggggttgattaggtcccactatgtagggaggactttcatcgagccttcgcagaaaattagggattttggagtgaagcttaaactgtctccggttcatgctgtgcttgaagggaagagggttgtggttgtggatgattccatcgtgagaggcaccacgtcgtccaagattgtgaggctcttgaaggaggccggtgccaaggaagttcacatgaggattgcatgtcctcctattgttgcttcgtgttattatggagttgacacacccagttcagaggagttgatatccaaccggatgagtgtggaggagataaggaagtttattgggtcggattcgctggcttttcttcccttggataagttgaagacattgttaggggatgatgctcttaactactgctatgcttgcttctctgggaagtaccctgttgagcctgaggaacttcaaatgaagaggcttggtgttgctcacttcaattgggacgacgacttcaatgggaatttcgaatctattgatgtggggggttgggttacaaatcaagatgggtttaagattggtagtgtctaa

SEQ ID NO: 132665 - protein, 569 aa, Glycine max
MAAASNLSTLSSSSLSKPSSSFPFRNTPTNNNASFLHNKSLPNQNSLSHKLSSPLPLACNPKNQNTCVFFDDEDQKPREECGVVGIYGDPEASRLCSLALHALQHRGQEGAGIVAVHDNHLQSVTGVGLVSDVFEQSKLSRLPGTSAIGHVRYSTAGQSMLKNVQPFLADYRFAAVAVAHNGNFVNYRSLRARLEHNNGSIFNTTSDTEVVLHLIATSKHRPFLLRIVDACEHLQGAYSLVFVTEDKLVAVRDPFGFRPLVMGRRTNGAVVLASETCALDLIEATYEREVYPGEVIVVDHTGIQSLCLVSHPEPKQCIFEHIYFALPNSVVFGRSVYESRKKFGEILASESPVECDVVIAVPDSGVVAALGYAAKAGVPFQQGLIRSHYVGRTFIEPSQKIRDFGVKLKLSPVHAVLEGKRVVVVDDSIVRGTTSSKIVRLLKEAGAKEVHMRIACPPIVASCYYGVDTPSSEELISNRMSVEEIRKFIGSDSLAFLPLDKLKTLLGDDALNYCYACFSGKYPVEPEELQMKRLGVAHFNWDDDFNGNFESIDVGGWVTNQDGFKIGSV

SEQ ID NO: 132666 - DNA, 1485 bp, Staphylococcus aureus
  CDS (1)..(1485): transl_table=11
atgtttaactactcaggattaaacgaagaatgtggcgtgtttggtatttggaatcatcctgaagcagcgcaactaacatatatgggacttcatagtttgcaacatcgtggtcaagaaggtgcaggtatagttgtttctgatcaaaatgaattaaaaggcgagcgaggattaggcttactaactgaagcgattaaagatgatcaaatggaacgattaaaaggatatcaacatgcaattggtcacgtccgttatgctacttcaggtaataaaggtattgaaaatattcaaccgtttctgtatcacttttatgatatgagtgtaggtatttgtcataatggtaacctcattaatgctaaatcattgcgtcagaatttagaaaaacaaggtgctatcttccattcgtcttctgatactgaagtcattatgcatttgatacgtcgaagtaaagctcctacttttgaggaagcgttgaaagaaagtttgcgaaaagttaaaggcggttttacatttgcgattttaactaaagatgcgttatatggcgcagtagatccaaatgctatcagaccacttgttgtaggtaaaatgaaagatgggacatacatccttgcaagtgaaacatgtgcaatagatgtgttaggtgcagaatttgttcaagatattcatgcaggtgaatatgtcgtgattaacgataaaggtattacagttaaatcttatacacatcatacgacaactgcaatttctgcgatggaatatatttattttgctagaccagactcaacaatagctggtaaaaatgtccatgcagtacgtaaagcttctggtaaaaaattagcccaagaaagccctgtaaatgctgatatggtcatcggtgtacccaattcatcgctatcagctgcgagtggttatgctgaagaaataggtttgccatatgaaatgggactagttaaaaatcaatatgttgcaagaacatttattcaaccaactcaagaattacgtgagcaaggtgtgagagtgaagttatctgcggtaaaagatatagtagatgggaaaaatatcattcttgttgatgattccattgttcgcggtacgacaattcgacgcattgtgaaaatgttaaaagattctggtgcaaataaagtgcatgtgcgtatagcatcaccggaatttatgtttccaagtttttacggaatcgatgtttcaactacggcagaattaatttctgcaagcaaatcacctgaagaaattaaagattatattggcgctgattcattagcatatctatctgtagatgggttaattgaatcaattggtttagattatgacgcgccatatagtggcttatgtgtagaaagtttcactggagattatcctgcagggttatatgattatgaagcaaattataaagcgcatttaagtcatcgacaaaagcaatatatttctaaaaacaaacacttttttgatagcgagggaaatttaaatgtctaa

SEQ ID NO: 132667 - protein, 494 aa, Staphylococcus aureus
MFNYSGLNEECGVFGIWNHPEAAQLTYMGLHSLQHRGQEGAGIVVSDQNELKGERGLGLLTEAIKDDQMERLKGYQHAIGHVRYATSGNKGIENIQPFLYHFYDMSVGICHNGNLINAKSLRQNLEKQGAIFHSSSDTEVIMHLIRRSKAPTFEEALKESLRKVKGGFTFAILTKDALYGAVDPNAIRPLVVGKMKDGTYILASETCAIDVLGAEFVQDIHAGEYVVINDKGITVKSYTHHTTTAISAMEYIYFARPDSTIAGKNVHAVRKASGKKLAQESPVNADMVIGVPNSSLSAASGYAEEIGLPYEMGLVKNQYVARTFIQPTQELREQGVRVKLSAVKDIVDGKNIILVDDSIVRGTTIRRIVKMLKDSGANKVHVRIASPEFMFPSFYGIDVSTTAELISASKSPEEIKDYIGADSLAYLSVDGLIESIGLDYDAPYSGLCVESFTGDYPAGLYDYEANYKAHLSHRQKQYISKNKHFFDSEGNLNV

SEQ ID NO: 132668 - DNA, 1485 bp, Staphylococcus aureus
  CDS (1)..(1485): transl_table=11
atgtttaactactcaggattaaacgaagaatgtggcgtgtttggtatttggaatcatcctgaagcagcgcaactaacatatatgggacttcatagtttgcaacatcgtggtcaagaaggtgcaggtatagttgtttctgatcaaaatgaattaaaaggcgagcgaggattaggcttactaactgaagcgattaacgatgatcaaatggaacgattaaaaggatatcaacatgcaattggtcacgtccgttatgctacttcaggtaataaaggtattgaaaatattcaaccgtttctgtatcacttttatgatatgagtgtaggtatttgtcataatggtaacctcattaatgctaaatcattgcgtcagaatttagaaaaacaaggtgctatcttccattcgtcttcagatactgaagtcattatgcatttgatacgtcgaagtaaagctcctacttttgaggaagcattgaaagaaagtttgcgaaaagttaaaggcggttttacatttgcgatattaactaaagatgcgttatatggcgcagtagatccaaatgctatcagaccacttgttgtaggtaaaatgaaagatggtacatacatccttgcaagtgaaacatgtgcaatagatgtgttaggtgcagaatttgttcaagatattcatgcaggtgaatatgtcgtgattaacgataaaggtattacagttaaatcttatacacatcatacgacaactgcaatttctgcgatggaatatatttattttgctagaccagactcaacaatagctggtaaaaatgtccatgcagtacgtaaagcttctggtaaaaaattagcccaagaaagccctgtaaatgctgatatggtcatcggtgtacccaattcatcgctatcagctgcgagtggttatgctgaagaaataggtttgccatatgaaatgggactagttaaaaatcaatatgttgcaagaacatttattcaaccaactcaagaattacgtgagcaaggtgtgagagtgaagttatctgcggtaaaagatatagtagatgggaaaaatatcattcttgttgatgattccattgttcgcggtacgacaattcgacgcattgtgaaaatgttaaaagattctggtgcaaataaagtgcatgtgcgtatagcatcaccggaatttatgttcccaagtttttatggaatcgatgtttcaactacggcagaattaatttctgcaagcaaatcacctgaagaaattaaagattatattggcgctgattcattagcatatctatctgtagatgggttaattgaatcaattggtttagattatgacgcgccatatagtggcttatgtgtagaaagtttcactggagattatcctgcagggttatatgattatgaagcaaattataaagcacatttaagtcatcgacaaaagcaatatatttctaaaaacaaacacttttttgatagcgagggaaatttaaatgtctaa

SEQ ID NO: 132669 - protein, 494 aa, Staphylococcus aureus
MFNYSGLNEECGVFGIWNHPEAAQLTYMGLHSLQHRGQEGAGIVVSDQNELKGERGLGLLTEAINDDQMERLKGYQHAIGHVRYATSGNKGIENIQPFLYHFYDMSVGICHNGNLINAKSLRQNLEKQGAIFHSSSDTEVIMHLIRRSKAPTFEEALKESLRKVKGGFTFAILTKDALYGAVDPNAIRPLVVGKMKDGTYILASETCAIDVLGAEFVQDIHAGEYVVINDKGITVKSYTHHTTTAISAMEYIYFARPDSTIAGKNVHAVRKASGKKLAQESPVNADMVIGVPNSSLSAASGYAEEIGLPYEMGLVKNQYVARTFIQPTQELREQGVRVKLSAVKDIVDGKNIILVDDSIVRGTTIRRIVKMLKDSGANKVHVRIASPEFMFPSFYGIDVSTTAELISASKSPEEIKDYIGADSLAYLSVDGLIESIGLDYDAPYSGLCVESFTGDYPAGLYDYEANYKAHLSHRQKQYISKNKHFFDSEGNLNV

SEQ ID NO: 132670 - DNA, 1485 bp, Staphylococcus aureus
  CDS (1)..(1485): transl_table=11
atgtttaactactcaggattaaacgaagaatgtggcgtgtttggtatttggaatcatcctgaagcagcgcaactaacatatatgggacttcatagtttgcaacatcgtggtcaagaaggtgcaggtatagttgtttctgatcaaaatgaattaaaaggcgagcgaggattaggcttactaactgaagcgattaaagatgaccaaatggaacgattaaaaggatatcaacatgcaattggtcacgtccgttatgctacttcaggtaataaaggtattgaaaatattcaaccgcttctgtatcacttttatgatatgagtgtaggtatttgtcataatggtaacctcattaatgctaaatcattacgtcaaaatttagaaaaacaaggtgctatcttccattcgtcttcagatacagaagttattatgcatttgattcgacgcagtaaggcgccaacttttgaagaagcattaaaagaaagtcttcgaaaaattaaaggtggttttacatttgcaattttaacaaaggatgcgttatatggcgcagtagatccaaatgctatcagaccacttgttgtaggtaaaatgaaagatgggacatacatccttgcaagtgaaacatgtgcaattgatgtgttaggtgcagaattcgttcaagatattcatgcgggtgaatatgtcgtgattaatgataaaggtattacagttaaatcttatacacatcatacgacaactgcaatttctgcgatggaatatatttattttgcgagaccagattcaacgattgctggtaaaaatgttcatgcagtgcgtaaggcttcaggtaaaatgttagcacaagaaagtccggtaaaagctgatatggtcatcggtgtacctaattcatcattatctgcagcgagcggttatgctgaagaaatcggtttgccatatgaaatgggactagttaaaaatcaatatgttgcaagaacatttattcaaccaacgcaagagttacgtgaacaaggtgtaagagttaagctatctgcagtgaaagatattgtagacggtaaaaatattattcttgttgatgattccattgttcgaggtacgacaattcgacgtattgtgaaaatgttaaaagattctggtgcaaataaagtgcatgtgcgtatagcatcaccggaatttatgttcccaagtttttatggaatcgatgtttcaactacggcagaattaatttctgcaagcaaatcacctgaagaaattaaagattatattggcgctgattcgttagcatatctatctgtagatgggttaattgaatcaattggtttagattatgacgcgccatatagtggcttatgtgtagaaagtttcactggagattatcctgcagggttatatgattatgaagcaaattataaagcacatttaagtcatcgacaaaagcaatatatttctaaaaacaaacactattttgatagcgagggaaatttaaatgtctaa

SEQ ID NO: 132671 - protein, 494 aa, Staphylococcus aureus
MFNYSGLNEECGVFGIWNHPEAAQLTYMGLHSLQHRGQEGAGIVVSDQNELKGERGLGLLTEAIKDDQMERLKGYQHAIGHVRYATSGNKGIENIQPLLYHFYDMSVGICHNGNLINAKSLRQNLEKQGAIFHSSSDTEVIMHLIRRSKAPTFEEALKESLRKIKGGFTFAILTKDALYGAVDPNAIRPLVVGKMKDGTYILASETCAIDVLGAEFVQDIHAGEYVVINDKGITVKSYTHHTTTAISAMEYIYFARPDSTIAGKNVHAVRKASGKMLAQESPVKADMVIGVPNSSLSAASGYAEEIGLPYEMGLVKNQYVARTFIQPTQELREQGVRVKLSAVKDIVDGKNIILVDDSIVRGTTIRRIVKMLKDSGANKVHVRIASPEFMFPSFYGIDVSTTAELISASKSPEEIKDYIGADSLAYLSVDGLIESIGLDYDAPYSGLCVESFTGDYPAGLYDYEANYKAHLSHRQKQYISKNKHYFDSEGNLNV

SEQ ID NO: 132672 - DNA, 1485 bp, Staphylococcus epidermidis
  CDS (1)..(1485): transl_table=11
atgtctaactactcaggattaaatgaagaatgtggcgttttcggtatttggaatcatcctgaagcagcacagttaacatatatgggtctacatagtttacaacacagaggtcaagaaggtgcaggtattgtagtttcaaatcacgaaacgctaaaaggtgaacgaggattaggcctattaactgaagcaattaaagacgaacatatgtcaaatataaaaggttatccacatgcgataggacatgttcgttacgcaacctctggtaataaaggcattgaaaatattcaaccatttttatatcacttttatgatatgagcgtaggtatatgtcataacggtaatttaattaacgctaaatcattacgtcaaaatttagaagaacaaggtgcgattttccattcttcttcggatactgaagtcattatgcacttaattcgtcgtagtaaggcgccgacatttgaagaggcattgaaagagagtttacgactcattaagggtggatttacttttgccatcctaacaaaagatgcgttgtatggtgtagtagatcctaatgctattcgaccattagtagttggaaaaatggagaacggtgcttatattttagcaagtgaaacatgtgcgattgatgttttaggtgctgaatttatacaagatattcatgcaggtgagtatgttgttattacggatgaaggtatagaagttaagacttacacacgacaaacaacaactgcaatttcagctatggaatatatttattttgcgagacctgattcaacgattgcaggaaaaaatgttcatgcggtacgaaaggcatcaggtaaacggttagcacaggaaaacccagcaaaagcagatatggtaataggcgtacctaattcatcattatctgcagcaagtggttatgctgaagaaataggcctaccatatgaaatgggactagttaaaaatcaatatgttgctcgaacttttatacaacctactcaggaattaagagagcaaggtgtacgtgtgaaactgtcggctgttaaggatattgttgatggtaaagatatcgtacttgtagatgattcgattgttcgaggtacaacgattaaacgcatagttaaaatgcttaaggattcaggagctaaccgcattcacgtaagaattgcttctcccgaatttatgttccctagtttttatggtattgacgtatctacaacagctgaactcatctcagcaagtaagtctcctgaggaaattaaaaatcatattggtgcagattctcttgcttatttaagcgttgatggcttaatcgagtctataggacttgattatgatgcgccatatcatggcttgtgtgtagaaagttttacaggtgattatccagcaggactttacgattatgagaaaaattataaaaagcatttaagtgaacgtcaaaaatcatatatagctaataataaacattattttgatagtgagggaaatttacatgtctaa

SEQ ID NO: 132673 - protein, 494 aa, Staphylococcus epidermidis
MSNYSGLNEECGVFGIWNHPEAAQLTYMGLHSLQHRGQEGAGIVVSNHETLKGERGLGLLTEAIKDEHMSNIKGYPHAIGHVRYATSGNKGIENIQPFLYHFYDMSVGICHNGNLINAKSLRQNLEEQGAIFHSSSDTEVIMHLIRRSKAPTFEEALKESLRLIKGGFTFAILTKDALYGVVDPNAIRPLVVGKMENGAYILASETCAIDVLGAEFIQDIHAGEYVVITDEGIEVKTYTRQTTTAISAMEYIYFARPDSTIAGKNVHAVRKASGKRLAQENPAKADMVIGVPNSSLSAASGYAEEIGLPYEMGLVKNQYVARTFIQPTQELREQGVRVKLSAVKDIVDGKDIVLVDDSIVRGTTIKRIVKMLKDSGANRIHVRIASPEFMFPSFYGIDVSTTAELISASKSPEEIKNHIGADSLAYLSVDGLIESIGLDYDAPYHGLCVESFTGDYPAGLYDYEKNYKKHLSERQKSYIANNKHYFDSEGNLHV

SEQ ID NO: 132674 - DNA, 1482 bp, Synechococcus sp
  CDS (1)..(1482): transl_table=11
atgatcccgactcagccgctgaccgccgacctggattgcgatttgggcctggagcgacctgaccgccccgaagaagcctgtggggtttttgccctctacgcaccgggcgaagaagtggcgcgcatggcctatttcgggctgtacgcgctccagcatcgtggacaagagtctgctggcatcgccgtctttgaaggcgatcgcgtcatgctccacaaggacatgggcttggtctcccaagtctttgatcccgaaatcctgcagcaactgcaaggcagccttgcggtcggtcatacccgctactccaccacgggatcaagccgtattgccaacgctcaaccggcgttgctggaaacccgccttgggccggtggccttggcgcacaacggcaacttggtcaacacggttgagttgcgccaagagctgctagctaagaaccacgagctgacgaccaccaccgattcagaactgattgccttcgcgatcatggaagcagtggcagaaggccaggactggcgcggggcgatcgagtctgcctgccgccgcagccaaggagcctttagcctgacgatcggcactcctgaggcactctacggcacccgtgaccccaatggcattaggccgcttgtgctgggcacgctggagagcaatggccaaacgcgctatgtgctttcttctgaaacctgcggtctcgacatcattggtgcggactacgtgcgcgatatcgcaccgggtgaaatggtgcggattacagatgcaggtctggaaagctggacttgggccgaggcgccgcagccgaagctctgcgtcttcgagatgatttactttgcgcggcctgatagcctctttcacggcgagtcgctttacagctatcgccgccgcatcggccaacgcttagccaaggaagctccggcggatgttgacctcgtgctgggtgtgcctgactccggtattccggctgcgattggtttttctgaagcgctgggcattccctacgccgaagggttaatcaaaaaccgctacgtggggcggacgttcatccagcccacccaatcgatgcgggaaacgggcattcgcatgaagctcaaccctctcaaggatgtcttagcgggcaaacgcattgccatcattgacgattcgatcgtgcggggaacaaccagccgcaaactggtcaaagctctgcgggatgcgggtgcaacggaagtgcatatgcggatttcttcaccgcctgtgacgcatccctgcttctacggcattgataccgacacccaagatcagctgattgctgccacgcgatcggtcagtgaaatcactgagcagattggtgtcgattctctggcttacctgacggagcagggaatgctggaggcgacccgagaaagtattggtaacttctgcacggcttgctttaacggtcgctacccgatcgcaattcccgaggagatcaagcgatcgaagctgatgctcgaaactgtaacggcctaa

SEQ ID NO: 132675 - protein, 493 aa, Synechococcus sp
MIPTQPLTADLDCDLGLERPDRPEEACGVFALYAPGEEVARMAYFGLYALQHRGQESAGIAVFEGDRVMLHKDMGLVSQVFDPEILQQLQGSLAVGHTRYSTTGSSRIANAQPALLETRLGPVALAHNGNLVNTVELRQELLAKNHELTTTTDSELIAFAIMEAVAEGQDWRGAIESACRRSQGAFSLTIGTPEALYGTRDPNGIRPLVLGTLESNGQTRYVLSSETCGLDIIGADYVRDIAPGEMVRITDAGLESWTWAEAPQPKLCVFEMIYFARPDSLFHGESLYSYRRRIGQRLAKEAPADVDLVLGVPDSGIPAAIGFSEALGIPYAEGLIKNRYVGRTFIQPTQSMRETGIRMKLNPLKDVLAGKRIAIIDDSIVRGTTSRKLVKALRDAGATEVHMRISSPPVTHPCFYGIDTDTQDQLIAATRSVSEITEQIGVDSLAYLTEQGMLEATRESIGNFCTACFNGRYPIAIPEEIKRSKLMLETVTA

SEQ ID NO: 132676 - DNA, 1488 bp, Synechocystis sp
  CDS (1)..(1488): transl_table=11
atgtttcccccctccagtgatttgactgagttgaatgatggtcagcctttgtctggccaccatgccgataaaccagaagaagcatgtggggtgtttggcatttacgcccctgaagaagcggtggccaaattgacctattttggactttatgccctgcaacatcggggtcaggagtcggcgggtattgccacttttgccgggacaacggttcactgccacaaggatatggggctagtgtcccaggtttttcaagaatctaaactgaatgaaatggtgggtactctggctgtgggccacacccgctactccaccacgggatccagccatcgggtcaatgctcaaccggcagtgctccctacccgtttgggtcccctggccctggcccacaatggcaatttggttaacactaaccagttgcgagaagctttagcggaaaggggctgtgaggactttgtcaccaccaccgattcggaaatgattgcagtggcgatcgccaatgaggtggataaaggcaaagactgggtggaaggcaccattgcggccctgaccctttgtgcgggagcctatagcttagtgatcggcacaccggagggaatcattggagtcagggatccccatggcattcgccccctggtgatcggtgtgttagaagaagaaactccccgctatgtattggcatcggaaacctgtgccctggacatcatcggtgccacctatgtgcgcacggtggaagccggagaattggtccatatcaccgaatctggcctagtttcccatcgattagccgaaagcgctgaccgtaaactctgtgtgttcgagatgatttatttttctcgcccggatagcgtggttaacgatgaaagcctctacacctatcgcatgcgcattggcaaacatttagccaaagaatcccctgtggatgctgatctcgtgatgggggtacccgattccggtattccagcggcgatcggcttttcccaagcttccggtattccctatgccgaaggtttaatcaaaaatcgttacgtggggcgtacctttatccaacccacccaacatatgcgagagcacggcatccgcatgaaactcaatcctctcaaagacgtattggccggtaaacggatcattatcgtcgatgactctattgtgcggggcaccactagtcgcaaaattgtccgagcgttacgggaagctggagcaacagaggtacatatgcggatttcttctccgccagtgacccatccttgcttctatggcattgataccgacagtcaagatcaactaattgcggccagactgacagtggcggagattgctgagcaaattgaagtggactccctcgcttatctttcccaggaaggcatgttgttgtgcaccggcgaagatatttcccatttttgttctgcctgcttcaatggaagataccccatcactgtgccagatgcggtcaggcgctctaaattaatgctggagaatattactgcttga

SEQ ID NO: 132677 - protein, 495 aa, Synechocystis sp
MFPPSSDLTELNDGQPLSGHHADKPEEACGVFGIYAPEEAVAKLTYFGLYALQHRGQESAGIATFAGTTVHCHKDMGLVSQVFQESKLNEMVGTLAVGHTRYSTTGSSHRVNAQPAVLPTRLGPLALAHNGNLVNTNQLREALAERGCEDFVTTTDSEMIAVAIANEVDKGKDWVEGTIAALTLCAGAYSLVIGTPEGIIGVRDPHGIRPLVIGVLEEETPRYVLASETCALDIIGATYVRTVEAGELVHITESGLVSHRLAESADRKLCVFEMIYFSRPDSVVNDESLYTYRMRIGKHLAKESPVDADLVMGVPDSGIPAAIGFSQASGIPYAEGLIKNRYVGRTFIQPTQHMREHGIRMKLNPLKDVLAGKRIIIVDDSIVRGTTSRKIVRALREAGATEVHMRISSPPVTHPCFYGIDTDSQDQLIAARLTVAEIAEQIEVDSLAYLSQEGMLLCTGEDISHFCSACFNGRYPITVPDAVRRSKLMLENITA

SEQ ID NO: 132678 - DNA, 1533 bp, Saccharomyces cerevisiae
  CDS (1)..(1533)
atgtgtggtattttaggtattgtattagcaaaccaaaccactccagtagctccggagttatgtgatggatgcatttttctacaacatcgtggacaagatgcagctggtatagctacctgtggttctcgtggtagaatctaccaatgtaaaggtaatggtatggctcgtgacgtatttacccaacaacgtgtttccggtcttgctggttccatgggtattgcccacttgagatatcctacagccgggtcttcggctaattcagaagcgcaaccattttacgtcaatagtccttacggtattaacttggcacataacggtaacttggtgaatactgcatcattgaagagatatatggatgaagacgttcatagacatattaacacggacagtgattcggagttactattgaatatttttgctgctgaactggaaaaacataacaagtacagagttaacaatgaagatgttttccacgcgttagaaggtgtttaccgtttatgccgtggcggttatgcttgcgttggtttacttgccggttttgcattatttggtttcagagatccaaatggtattaggccattattgttcggtgaaagagaaaatccggacggcactaaggactatatgttagcttcagaaagtgttgttttcaaagctcacaactttactaaatatcgtgacttaaagcctggcgaggcagttatcatccctaagaactgtagcaaaggtgaacctgagttcaaacaagtggttcctattaactcttatagacctgatttatttgaatacgtatatttcgccagaccggacagtgtcttggatggaatatcagtttatcacacaagattggctatgggttctaaattagcggaaaatattctaaagcaactgaagccagaagatattgatgttgttattcccgtcccagatactgcaagaacatgtgcactagaatgtgctaatgtgttagggaagccttatagagagggctttgttaaaaacagatacgtgggcaggacatttatcatgccaaaccagagggaaagggtttcttcagtaaggaggaagcttaaccctatggagtctgaatttaagggtaagaaggttctgatagtggatgattctattgtcagaggtactacttcaaaagagattgttaacatggccaaggaatccggtgcaacaaaggtttacttcgcttcagctgccccagccattcgttacaaccatatttatggtattgacttaacagacacaaagaacttgattgcttataacagaaccgatgaagaagtggcggaagtaatcggttgtgaaagagtcatttaccaatcattggaagatttgattgattgttgtaaaactgataaaataaccaaattcgaagatggtgtatttaccggaaattatgtcactggtgttgaagacggttatattcaagaattggaagaaaaacgtgaatcgatcgcaaataattcatcagatatgaaggctgaagtcgatatcggattatataattgtgcagattattga

SEQ ID NO: 132679 - protein, 510 aa, Saccharomyces cerevisiae
MCGILGIVLANQTTPVAPELCDGCIFLQHRGQDAAGIATCGSRGRIYQCKGNGMARDVFTQQRVSGLAGSMGIAHLRYPTAGSSANSEAQPFYVNSPYGINLAHNGNLVNTASLKRYMDEDVHRHINTDSDSELLLNIFAAELEKHNKYRVNNEDVFHALEGVYRLCRGGYACVGLLAGFALFGFRDPNGIRPLLFGERENPDGTKDYMLASESVVFKAHNFTKYRDLKPGEAVIIPKNCSKGEPEFKQVVPINSYRPDLFEYVYFARPDSVLDGISVYHTRLAMGSKLAENILKQLKPEDIDVVIPVPDTARTCALECANVLGKPYREGFVKNRYVGRTFIMPNQRERVSSVRRKLNPMESEFKGKKVLIVDDSIVRGTTSKEIVNMAKESGATKVYFASAAPAIRYNHIYGIDLTDTKNLIAYNRTDEEVAEVIGCERVIYQSLEDLIDCCKTDKITKFEDGVFTGNYVTGVEDGYIQELEEKRESIANNSSDMKAEVDIGLYNCADY

SEQ ID NO: 132680 - DNA, 1713 bp, Glycine max
  CDS (1)..(1713)
atggccgcagcagcagcagccactctctcctcttccttctccaaaccctcctctcttccttttcacacccactcttactctttccccacaaccctaccaacagtccccactccccctcgcgccgccgccaaaccccctcttctcgtcttctccaaaaacccaatttccgacatcgtctcctccaccttctcacgcgccgaagaaggcgcgtgggacgacgagaagccgcgcgaggagtgcggcgtggtcggcatatacggcgaccctgaggcctcgcgcctctgctaccttgccctccacgcgctccagcatcgcggccaagaaggcgccggaatcgtcaccgtcaacaacaacgtcctccaatccatcaccggcgttggcctcgtctccgaagtcttcaaccaatcaaaactcgaccagctccccggcagcctctccatcggccacgtccgctactccaccgccggccaatccatgctcaaaaacgtccaacccttcgtcgccggctaccgcttcggctccgtcggcgtggcccacaacggcaacctcgtcaactacaacaccctccgaaccaacctcgaggacagcgggtccatcttcaacactacctccgacaccgaggttgttctccacctcatcgccacttccaaacacagacccttcattttgagaatcgttgacgcctgtgaaaagctcgaaggggcttattcaattgtcttcgtcaccgaggacaagcttgtcgccgttcgcgaccccttcggattcagacctttggttatgggaaggagaagtaacgggtctgtggttttcgcttctgaaacctgcgctcttgaccttattgaagcgacttatgagagagaggtttaccctggtgaggttcttgttgtggataaaaacggtattcagagtctatgcctcatgtctcatcctcaacccaaacaatgcatttttgaacatatttactttgcacttcccaattcggttgtttttgggaggtctgtgtatgagtctcggagacaatttggggagattttggctactgagagtcctgtggagtgtgatgttgtgattgctgtgcctgactctggtgttgtggctgcgcttggttatgccgccaaagctggggttccgtttcagcagggtttgattaggtcgcactatgtggggaggactttcattgagccctctcagaagattagggactttggtgtgaagctgaagctatcacctgttcgtgctgtgcttgaaggtaaacgtgttgtggttgtggatgattccattgtgagaggaaccacctcgtccaagattgttaggctgttgaaggaggctggtgctaaggaggttcacatgaggattgcgagtcctccgattattggttcttgttactatggtgtggatactcctagctctgaggagttgatttcgaataggatgagtgtggaggagataagggactttattgggtcggattcacttgcctttttgccttttgatagcttgaagaggttgttgggaagtgaaagtccaaatttttgttatgcttgtttctctgggaattaccctgtggagccaagagagcttaaagtgaagagggttggggactttgttgatgatggcttgaatggaagcttggagtctattgatggtggttgggttcaggcaaaccgaaatcaaatcaaggttggtactggtactagtactagtatttcataa

SEQ ID NO: 132681 - protein, 570 aa, Glycine max
MAAAAAATLSSSFSKPSSLPFHTHSYSFPTTLPTVPTPPRAAAKPPLLVFSKNPISDIVSSTFSRAEEGAWDDEKPREECGVVGIYGDPEASRLCYLALHALQHRGQEGAGIVTVNNNVLQSITGVGLVSEVFNQSKLDQLPGSLSIGHVRYSTAGQSMLKNVQPFVAGYRFGSVGVAHNGNLVNYNTLRTNLEDSGSIFNTTSDTEVVLHLIATSKHRPFILRIVDACEKLEGAYSIVFVTEDKLVAVRDPFGFRPLVMGRRSNGSVVFASETCALDLIEATYEREVYPGEVLVVDKNGIQSLCLMSHPQPKQCIFEHIYFALPNSVVFGRSVYESRRQFGEILATESPVECDVVIAVPDSGVVAALGYAAKAGVPFQQGLIRSHYVGRTFIEPSQKIRDFGVKLKLSPVRAVLEGKRVVVVDDSIVRGTTSSKIVRLLKEAGAKEVHMRIASPPIIGSCYYGVDTPSSEELISNRMSVEEIRDFIGSDSLAFLPFDSLKRLLGSESPNFCYACFSGNYPVEPRELKVKRVGDFVDDGLNGSLESIDGGWVQANRNQIKVGTGTSTSIS

SEQ ID NO: 132682 - DNA, 1710 bp, Glycine max
  CDS (1)..(1710)
atggctgctgcgtctaatctctccactctctcctcctcttccctctccaaacccccgtcctctttccctttccgcaacacaccaacaaacaacaacgcttcttttctacacaacaaatcccttccaaaccaaaactctctctctcacaaactctcttcccctctgcctctcgcatgcaacccaaaaaaccaaaacacttgtgtcttcttcgacgacgaagaccaaaagccccgtgaagagtgcggcgtggtgggcatctacggcgacccggaagcctcccgtctctgctccctggccctccacgccctccagcaccgcggccaagaaggtgccggcatcgtagccgtccacgacaaccacctccaatccgtcaccggcgtcggcctcgtctccgacgtcttcgacgagtccaagctctcccgcctccccggcacctcggccattggccacgtccgctactccaccgccggccaatccatgctcaaaaacgtccaacccttcctggccgactaccgcttcggctccgtcgccgtcgctcacaacggcaacttcgtcaactaccgctccctccgagccagactcgaacacaacaacggctccatcttcaacaccacctccgacaccgaggttgtcctccacctcatcgccacttcaaaacacaggccattcctcctcagaatcgtggacgcctgcgagcatctccaaggcgcctactccctcgtattcgtcacggaggacaagctcgtcgccgtcagagaccccttcgggttcaaacccttggtgatggggagaagaaccaacggcgctgtagttttggcctccgagacatgcgcgcttgatttaatcgaagccacgtacgagagagaggtgtacccgggtgaagttatcgtggtggaccacactggaatccaatccctctgcctcgtgtctcatcctgagccaaaacaatgcatcttcgagcacatatacttcgcgcttcctaactctgttgttttcgggaggtccgtgtacgagtctagaaaaaaattcggagaaatactagcctctgagagtcccgttgagtgtgacgttgtgatcgcggttcctgattctggcgttgtggctgcgcttggttatgctgcaaaagctggggtaccctttcagcaggggttgattaggtcccactatgtagggaggactttcatcgagccttcgcagaaaattagggattttggagtgaagcttaaactgtctccggttcatgctgtgcttgaagggaagagggttgtggttgtggatgattccatcgtgagaggcaccacgtcgtccaagattgtgaggctcttgaaggaggccggtgccaaggaagttcacatgaggattgcatgtcctcctattgttgcttcgtgttattatggagttgacacacccagttcagaggagttgatatccaaccggatgagtgtggaggagataaggaagtttattgggtcggattcgctggcttttcttcccttggataagttgaagacattgttaggggatgatgctcttaactactgctatgcttgcttctctgggaagtaccctgttgagcctgaggaacttcaaatgaagaggcttggtgttgctcacttcaattgggacgacgacttcaatgggaatttcgaatctattgatgtggggggttgggttacaaatcaagatgggtttaagattggtagtgtctaa

SEQ ID NO: 132683 - protein, 569 aa, Glycine max
MAAASNLSTLSSSSLSKPPSSFPFRNTPTNNNASFLHNKSLPNQNSLSHKLSSPLPLACNPKNQNTCVFFDDEDQKPREECGVVGIYGDPEASRLCSLALHALQHRGQEGAGIVAVHDNHLQSVTGVGLVSDVFDESKLSRLPGTSAIGHVRYSTAGQSMLKNVQPFLADYRFGSVAVAHNGNFVNYRSLRARLEHNNGSIFNTTSDTEVVLHLIATSKHRPFLLRIVDACEHLQGAYSLVFVTEDKLVAVRDPFGFKPLVMGRRTNGAVVLASETCALDLIEATYEREVYPGEVIVVDHTGIQSLCLVSHPEPKQCIFEHIYFALPNSVVFGRSVYESRKKFGEILASESPVECDVVIAVPDSGVVAALGYAAKAGVPFQQGLIRSHYVGRTFIEPSQKIRDFGVKLKLSPVHAVLEGKRVVVVDDSIVRGTTSSKIVRLLKEAGAKEVHMRIACPPIVASCYYGVDTPSSEELISNRMSVEEIRKFIGSDSLAFLPLDKLKTLLGDDALNYCYACFSGKYPVEPEELQMKRLGVAHFNWDDDFNGNFESIDVGGWVTNQDGFKIGSV

SEQ ID NO: 132684 - DNA, 23 bp, Artificial sequence
  primer
atgtgcggtattgtcggtatcgc

SEQ ID NO: 132685 - DNA, 27 bp, Artificial sequence
  primer
ttatccttcgttatgcatttcgagatt

SEQ ID NO: 132686 - protein, 665 aa, Artificial sequence
  consensus sequence
  Variant (3)..(4): Xaa in position 3 to 4 is any amino acid
  Variant (6)..(18): Xaa in position 6 to 18 is any amino acid
  Variant (19)..(33): Xaa in position 19 to 33 is any or no amino acid
  Variant (35)..(36): Xaa in position 35 to 36 is any amino acid
  Variant (43)..(44): Xaa in position 43 to 44 is any amino acid
  Variant (48)..(53): Xaa in position 48 to 53 is any amino acid
  Variant (54)..(67): Xaa in position 54 to 67 is any or no amino acid
  Variant (69)..(71): Xaa in position 69 to 71 is any amino acid
  Variant (72)..(75): Xaa in position 72 to 75 is any or no amino acid
  Variant (77)..(82): Xaa in position 77 to 82 is any amino acid
  Variant (83)..(107): Xaa in position 83 to 107 is any or no amino acid
  Variant (109)..(110): Xaa in position 109 to 110 is any amino acid
  Variant (111)..(112): Xaa in position 111 to 112 is any or no amino acid
  Variant (115)..(115): Xaa in position 115 is any amino acid
  Variant (118)..(118): Xaa in position 118 is any amino acid
  Variant (120)..(120): Xaa in position 120 is any amino acid
  Variant (122)..(126): Xaa in position 122 to 126 is any amino acid
  Variant (127)..(131): Xaa in position 127 to 131 is any or no amino acid
  Variant (134)..(142): Xaa in position 134 to 142 is any amino acid
  Variant (143)..(148): Xaa in position 143 to 148 is any or no amino acid
  Variant (154)..(154): Xaa in position 154 is any amino acid
  Variant (156)..(158): Xaa in position 156 to 158 is any amino acid
  Variant (160)..(163): Xaa in position 160 to 163 is any amino acid
  Variant (164)..(185): Xaa in position 164 to 185 is any or no amino acid
  Variant (187)..(187): Xaa in position 187 is any amino acid
  Variant (189)..(196): Xaa in position 189 to 196 is any amino acid
  Variant (197)..(241): Xaa in position 197 to 241 is any or no amino acid
  Variant (243)..(257): Xaa in position 243 to 257 is any amino acid
  Variant (258)..(258): Xaa in position 258 is any or no amino acid
  Variant (262)..(262): Xaa in position 262 is any amino acid
  Variant (264)..(264): Xaa in position 264 is any amino acid
  Variant (268)..(269): Xaa in position 268 to 269 is any amino acid
  Variant (271)..(278): Xaa in position 271 to 278 is any amino acid
  Variant (279)..(295): Xaa in position 279 to 295 is any or no amino acid
  Variant (298)..(304): Xaa in position 298 to 304 is any amino acid
  Variant (305)..(313): Xaa in position 305 to 313 is any or no amino acid
  Variant (315)..(317): Xaa in position 315 to 317 is any amino acid
  Variant (321)..(340): Xaa in position 321 to 340 is any amino acid
  Variant (341)..(357): Xaa in position 341 to 357 is any or no amino acid
  Variant (359)..(359): Xaa in position 359 is any amino acid
  Variant (362)..(363): Xaa in position 362 to 363 is any amino acid
  Variant (365)..(365): Xaa in position 365 is any amino acid
  Variant (371)..(373): Xaa in position 371 to 373 is any amino acid
  Variant (374)..(376): Xaa in position 374 to 376 is any or no amino acid
  Variant (378)..(380): Xaa in position 378 to 380 is any amino acid
  Variant (382)..(384): Xaa in position 382 to 384 is any amino acid
  Variant (386)..(387): Xaa in position 386 to 387 is any amino acid
  Variant (390)..(396): Xaa in position 390 to 396 is any amino acid
  Variant (397)..(414): Xaa in position 397 to 414 is any or no amino acid
  Variant (416)..(416): Xaa in position 416 is any amino acid
  Variant (418)..(420): Xaa in position 418 to 420 is any amino acid
  Variant (422)..(427): Xaa in position 422 to 427 is any amino acid
  Variant (429)..(445): Xaa in position 429 to 445 is any amino acid
  Variant (446)..(474): Xaa in position 446 to 474 is any or no amino acid
  Variant (476)..(476): Xaa in position 476 is any amino acid
  Variant (478)..(478): Xaa in position 478 is any amino acid
  Variant (484)..(484): Xaa in position 484 is any amino acid
  Variant (486)..(486): Xaa in position 486 is any amino acid
  Variant (488)..(488): Xaa in position 488 is any amino acid
  Variant (489)..(489): Xaa in position 489 is any or no amino acid
  Variant (491)..(494): Xaa in position 491 to 494 is any amino acid
  Variant (495)..(496): Xaa in position 495 to 496 is any or no amino acid
  Variant (498)..(506): Xaa in position 498 to 506 is any amino acid
  Variant (507)..(507): Xaa in position 507 is any or no amino acid
  Variant (509)..(513): Xaa in position 509 to 513 is any amino acid
  Variant (514)..(514): Xaa in position 514 is any or no amino acid
  Variant (524)..(533): Xaa in position 524 to 533 is any amino acid
  Variant (534)..(534): Xaa in position 534 is any or no amino acid
  Variant (538)..(539): Xaa in position 538 to 539 is any amino acid
  Variant (541)..(546): Xaa in position 541 to 546 is any amino acid
  Variant (548)..(551): Xaa in position 548 to 551 is any amino acid
  Variant (553)..(554): Xaa in position 553 to 554 is any amino acid
  Variant (557)..(558): Xaa in position 557 to 558 is any amino acid
  Variant (561)..(566): Xaa in position 561 to 566 is any amino acid
  Variant (568)..(568): Xaa in position 568 is any amino acid
  Variant (570)..(583): Xaa in position 570 to 583 is any amino acid
  Variant (584)..(618): Xaa in position 584 to 618 is any or no amino acid
  Variant (620)..(620): Xaa in position 620 is any amino acid
  Variant (622)..(640): Xaa in position 622 to 640 is any amino acid
  Variant (641)..(660): Xaa in position 641 to 660 is any or no amino acid
  Variant (662)..(662): Xaa in position 662 is any amino acid
  Variant (664)..(664): Xaa in position 664 is any amino acid
CGXXGXXXXXXXXXXXXXXXXXXXXXXXXXXXXLXXLQHRGQXXAGIXXXXXXXXXXXXXXXXXXXXGXXXXXXXFXXXXXXXXXXXXXXXXXXXXXXXXXXXXXXXGXXXXGHXRYXTXGXXXXXXXXXXQPXXXXXXXXXXXXXXXHNGNLXNXXXLXXXXXXXXXXXXXXXXXXXXXXXXXXDXEXXXXXXXXXXXXXXXXXXXXXXXXXXXXXXXXXXXXXXXXXXXXXXXXXXXXXGXXXXXXXXXXXXXXXXRDPXGXRPLXXGXXXXXXXXXXXXXXXXXXXXXXXXXSEXXXXXXXXXXXXXXXXRXXXPGEXXXXXXXXXXXXXXXXXXXXXXXXXXXXXXXXXXXXXCXFEXXYXARPDSXXXXXXVXXXRXXXGXXLAXXXXXXXXXXXXXXXXXXXXXXXXXDXVXXXPXXXXXXAXXXXXXXXXXXXXXXXXXXXXXXXXXXXXXXXXXXXXXXXXXXXXXNXYXGRTFIXPXQXXRXXXXXXKXXXXXXXXXXKXXXXXXDDSIVRGTTXXXXXXXXXXXAGAXXVXXXXXXPXXXXPXXYGXXIDXXXXXXLXAXXXXXXXXXXXXXXXXXXXXXXXXXXXXXXXXXXXXXXXXXXXXXXXXXDXLXXXXXXXXXXXXXXXXXXXXXXXXXXXXXXXXXXXXXXXFXGXY

SEQ ID NO: 132687 - protein, 15 aa, Artificial sequence
  protein pattern
  Variant (2)..(2): Xaa in position 2 is any amino acid
  Variant (3)..(4): Xaa in position 3 to 4 is Ile, Leu or Val
  Variant (5)..(5): Xaa in position 5 is Ile, Leu, Met or Val
  Variant (6)..(6): Xaa in position 6 is Ile or Val
  Variant (10)..(10): Xaa in position 10 is Ile, Leu or Val
  Variant (14)..(14): Xaa in position 14 is any or no amino acid
KXXXXXDDSXVRGXT

SEQ ID NO: 132688 - protein, 9 aa, Artificial sequence
  protein pattern
  Variant (2)..(2): Xaa in position 2 is Ile, Met or Val
  Variant (8)..(8): Xaa in position 8 is any amino acid
YXGRTFIXP

SEQ ID NO: 132689 - protein, 15 aa, Artificial sequence
  protein pattern
  Variant (2)..(2): Xaa in position 2 is any amino acid
  Variant (3)..(3): Xaa in position 3 is Phe or Met
  Variant (5)..(5): Xaa in position 5 is any amino acid
  Variant (6)..(6): Xaa in position 6 is Ile or Val
  Variant (8)..(8): Xaa in position 8 is Phe or Leu
  Variant (9)..(9): Xaa in position 9 is Ala or Ser
  Variant (13)..(13): Xaa in position 13 is Ala, Ser or Thr
  Variant (14)..(14): Xaa in position 14 is any amino acid
  Variant (15)..(15): Xaa in position 15 is Phe, Ile, Leu, Met or Val
CXXEXXYXXRPDXXX

SEQ ID NO: 132690 - protein, 14 aa, Artificial sequence
  protein pattern
  Variant (2)..(3): Xaa in position 2 to 3 is any amino acid
  Variant (10)..(10): Xaa in position 10 is Asp or Glu
  Variant (11)..(11): Xaa in position 11 is Ala, Gly or Ser
  Variant (12)..(12): Xaa in position 12 is Ala, Gly, Ser or Thr
LXXLQHRGQXXXGI

SEQ ID NO: 132691 - protein, 22 aa, Artificial sequence
  protein pattern
  Variant (2)..(7): Xaa in position 2 to 7 is any amino acid
  Variant (8)..(8): Xaa in position 8 is any or no amino acid
  Variant (10)..(10): Xaa in position 10 is any or no amino acid
  Variant (13)..(13): Xaa in position 13 is Asp or Asn
  Variant (14)..(19): Xaa in position 14 to 19 is any amino acid
  Variant (21)..(21): Xaa in position 21 is Ile, Leu or Val
  Variant (22)..(22): Xaa in position 22 is Ala, Cys, Gly or Ser
PXXXXXXXYXGIXXXXXXXLXX

SEQ ID NO: 132692 - protein, 11 aa, Artificial sequence
  protein pattern
  Variant (2)..(2): Xaa in position 2 is Ala, Gly, Pro, Ser or Thr
  Variant (3)..(3): Xaa in position 3 is any amino acid
  Variant (5)..(5): Xaa in position 5 is any amino acid
  Variant (9)..(10): Xaa in position 9 to 10 is any amino acid
DXXGXRPLXXG

SEQ ID NO: 132693 - protein, 14 aa, Artificial sequence
  protein pattern
  Variant (2)..(3): Xaa in position 2 to 3 is any amino acid
  Variant (4)..(4): Xaa in position 4 is Ala or Gly
  Variant (5)..(5): Xaa in position 5 is Ile, Leu or Val
  Variant (6)..(6): Xaa in position 6 is Ala, Cys, Gly or Thr
  Variant (8)..(8): Xaa in position 8 is any amino acid
  Variant (11)..(11): Xaa in position 11 is Ala, Gly, Pro, Ser or Thr
  Variant (13)..(13): Xaa in position 13 is any amino acid
GXXXXXHXRYXTXG

SEQ ID NO: 132694 - protein, 14 aa, Artificial sequence
  protein pattern
  Variant (2)..(2): Xaa in position 2 is any amino acid
  Variant (4)..(4): Xaa in position 4 is any amino acid
  Variant (5)..(5): Xaa in position 5 is Ala, Gly, Pro or Val
  Variant (6)..(6): Xaa in position 6 is Ile or Val
  Variant (8)..(8): Xaa in position 8 is Asp, Glu, Asn or Gln
  Variant (9)..(9): Xaa in position 9 is Gly, Ser or Thr
  Variant (10)..(10): Xaa in position 10 is Ala, Gly or Ser
  Variant (11)..(13): Xaa in position 11 to 13 is any amino acid
  Variant (14)..(14): Xaa in position 14 is Ala, Gly or Ser
DXVXXXPXXXXXXX

SEQ ID NO: 132695 - DNA, 276 bp, Escherichia coli
  CDS (1)..(276): transl_table=11
atgaaagtaaacttaatacttttcagcttatttttattggtctctattatggcatgcaatgtttttgcattttccatttcgggtggtggaagtgagaggagctataaagagactgaaaaaacatcagcgatgacgaccacacactctacaaaacttcagccatcacaggcgattttgtttaagatgagagaagatgcgccaccattaaacctcacagaagaaatgccgcccccttttccgacaaaggcgaattatcttattcatcctgtgcgataa

SEQ ID NO: 132696 - protein, 91 aa, Escherichia coli
MKVNLILFSLFLLVSIMACNVFAFSISGGGSERSYKETEKTSAMTTTHSTKLQPSQAILFKMREDAPPLNLTEEMPPPFPTKANYLIHPVR

SEQ ID NO: 132697 - DNA, 276 bp, Escherichia coli O157:H7 EDL933
  CDS (1)..(276): transl_table=11
atgaaagtaaacttaatactttttagcttatttttattggtctctattatggcatgcaatgtttttgcattttctaattctggtggtggtagtgagacgagctataaagagccagaaaaaacgtcagcgatgacgacaactcactctacaaaatttcagccatcacaggcgattttgtttaagatgagagaagatgcaccaccattaaacctcacagaagaaaccacgcccccttttccgacaaaggcgaattatcttattcatcctgtgcgatag

SEQ ID NO: 132698 - protein, 91 aa, Escherichia coli O157:H7 EDL933
MKVNLILFSLFLLVSIMACNVFAFSNSGGGSETSYKEPEKTSAMTTTHSTKFQPSQAILFKMREDAPPLNLTEETTPPFPTKANYLIHPVR

SEQ ID NO: 132699 - DNA, 276 bp, Escherichia coli CFT073
  CDS (1)..(276): transl_table=11
atgaaagtaaacttaatgctttttagcttatttttatttgtctctattatggcatgcaatgtttttgcattttctatttctggtggtggtagtgaggcgagctataaagagacagaaaaaacgtcagtgatgacgacaacgcattctacaaaacttcagccatcacaggcgattttgtttaagatgagagaagatgcaccaccattaaacctcacagaagacatcacgcctacttatccgacaaaggcgaattatctcattcatcctttgcgatag

SEQ ID NO: 132700 - protein, 91 aa, Escherichia coli CFT073
MKVNLMLFSLFLFVSIMACNVFAFSISGGGSEASYKETEKTSVMTTTHSTKLQPSQAILFKMREDAPPLNLTEDITPTYPTKANYLIHPLR

SEQ ID NO: 132701 - DNA, 276 bp, Shigella flexneri 2a str. 2457T
  CDS (1)..(276): transl_table=11
atgaaagtaaacttaatacttttcagcttatttttattggtctctattatggcatgcaatgtttttgcattttccatttctggtggtgtaagtgagaggagctataaagagactgaaaaaacatcagcgatgacgaccacacactctacaaaacttcagccatcacaggcgattttgtttaagatgagagaagatgtgccaccattaaacctcacagaagaaatcacgcctacttatccgacaaaggcgaattatcttattcatcctgtgcgatag

SEQ ID NO: 132702 - protein, 91 aa, Shigella flexneri 2a str. 2457T
MKVNLILFSLFLLVSIMACNVFAFSISGGVSERSYKETEKTSAMTTTHSTKLQPSQAILFKMREDVPPLNLTEEITPTYPTKANYLIHPVR

SEQ ID NO: 132703 - DNA, 27 bp, Artificial sequence
  primer
atgaaagtaaacttaatacttttcagc

SEQ ID NO: 132704 - DNA, 27 bp, Artificial sequence
  primer
ttatcgcacaggatgaataagataatt

SEQ ID NO: 132705 - protein, 91 aa, Artificial sequence
  consensus sequence
  Variant (6)..(6): Xaa in position 6 is any amino acid
  Variant (13)..(13): Xaa in position 13 is any amino acid
  Variant (26)..(26): Xaa in position 26 is any amino acid
  Variant (30)..(30): Xaa in position 30 is any amino acid
  Variant (33)..(33): Xaa in position 33 is any amino acid
  Variant (38)..(38): Xaa in position 38 is any amino acid
  Variant (43)..(43): Xaa in position 43 is any amino acid
  Variant (52)..(52): Xaa in position 52 is any amino acid
  Variant (66)..(66): Xaa in position 66 is any amino acid
  Variant (74)..(76): Xaa in position 74 to 76 is any amino acid
  Variant (78)..(79): Xaa in position 78 to 79 is any amino acid
  Variant (90)..(90): Xaa in position 90 is any amino acid
MKVNLXLFSLFLXVSIMACNVFAFSXSGGXSEXSYKEXEKTSXMTTTHSTKXQPSQAILFKMREDXPPLNLTEXXXPXXPTKANYLIHPXR

SEQ ID NO: 132706 - DNA, 1062 bp, Escherichia coli
  CDS (1)..(1062): transl_table=11
atgctcgaaatgttgatgcaatggtatcgccgccgttttagcgacccggaagcgattgccttgctggttattttagttgccggatttggcattatctttttctttagtggcctgcttgctccgttgctggtggctattgtgctggcctatttgctggaatggccaaccgtgcgtctgcaatctattggctgctcccgccgctgggcgacgtcgattgtattggtggttttcgtcggtatattgctactgatggcgttcgtggtactgcctatcgcctggcaacagggcatctacttaatccgcgatatgccggggatgctcaataagctttctgactttgccgccacgttgccgcgccgctatccggcgttaatggacgcgggcattattgatgcaatggccgaaaatatgcgcagtcggatgctgaccatgggcgattcggtggtgaaaatttccctcgcctcgctggtcggtttgctgaccatagccgtctatctggtgctggtgccattgatggtcttcttcctgctgaaagacaaagagcagatgctgaacgccgttcgccgggtgctgccgcgtaaccgtgggctggcaggacaggtgtggaaggagatgaatcaacaaatcaccaactatatccgcggcaaagtgctggagatgatcgtggtggggatcgccacctggctggggttcttgctcttcgggctgaactattcgctgctgctggcagtgctggtcggcttctcggttcttattccgtacattggcgcatttgtggtgaccattccggtggttggcgtggcgctattccagtttggcgcaggtactgaattctggagctgcttcgcggtgtatctgattattcaggcgctggacggcaacctgttagtgccggtgttgttctccgaagcggttaacctgcatccgctggtgattattttatcggtggtgatcttcggtggtttgtggggattctggggcgtattcttcgccattccgttggcgacgctgatcaaagccgtgattcatgcctggcccgatgggcaaatcgcgcaagaataa

SEQ ID NO: 132707 - protein, 353 aa, Escherichia coli
MLEMLMQWYRRRFSDPEAIALLVILVAGFGIIFFFSGLLAPLLVAIVLAYLLEWPTVRLQSIGCSRRWATSIVLVVFVGILLLMAFVVLPIAWQQGIYLIRDMPGMLNKLSDFAATLPRRYPALMDAGIIDAMAENMRSRMLTMGDSVVKISLASLVGLLTIAVYLVLVPLMVFFLLKDKEQMLNAVRRVLPRNRGLAGQVWKEMNQQITNYIRGKVLEMIVVGIATWLGFLLFGLNYSLLLAVLVGFSVLIPYIGAFVVTIPVVGVALFQFGAGTEFWSCFAVYLIIQALDGNLLVPVLFSEAVNLHPLVIILSVVIFGGLWGFWGVFFAIPLATLIKAVIHAWPDGQIAQE

SEQ ID NO: 132708 - DNA, 1065 bp, Vibrio cholerae O1 biovar eltor str. N16961
  CDS (1)..(1065): transl_table=11
atgtttgaaatggtcagtcgttggtataagcgacgcttctccgatccacacgctgccagcttggtggcgattttgttgtttggttttatcaccatctacttctttggtcatttgattgcccctttattggtggcaattgtactcgcctatctgcttgagtggcccgttactcaactgcgtcgattacgaattccgcgcaccttagcggtgatcattgtgattacggtgttcactggcttgatgattttggcggtgtttggtttggtgccaacgatttggaagcaggtggggaatttaattaacgacgtgccgaatatgtacaatggtacgcagaaattcatcaccagtctgcctgaacgttatccggaattggcacatctagagattgtcgaatcggtaatcggtaatgcgaaaaacaaagtgctaggcatgggcgaatcggtggtaaaaggttctcttgcgtctctggtcagcttagccacgctaggggtttatctgattttggtgcctctattagtgttcttcttgttgaaagataaacaagagatgctgcggatggcgagtggcattttgccgcgtaaccgcaagttggcgaataaagtttgggaagagatgaaccaacaaatctccaactacattcgtggcaaagtgctggagattgttatcgtcggcacagtcagttacatcacgttcgcgattttagatctgcgttattccgtattgctggcagtcgcagtcgggctttcggtattgatcccttatatcggcgctgcagctgtaaccgtacctgttgcgattgtggccttgttccaatgggggctgaccccgcagttttacaccttgttgattgcttacggcattattcaggctttggacggtaacgttttagtgcccgtacttttctctgaagcggtgaacctacacccggttgcgatcattattgcggtactcgtatttggcggattatggggcttctggggcgtgttttttgcgatcccattagccactctcgttaaggcggtgtggaaagccttaccaagtattgatgaagagcccgcttcctaa

SEQ ID NO: 132709 - protein, 354 aa, Vibrio cholerae O1 biovar eltor str. N16961
MFEMVSRWYKRRFSDPHAASLVAILLFGFITIYFFGHLIAPLLVAIVLAYLLEWPVTQLRRLRIPRTLAVIIVITVFTGLMILAVFGLVPTIWKQVGNLINDVPNMYNGTQKFITSLPERYPELAHLEIVESVIGNAKNKVLGMGESVVKGSLASLVSLATLGVYLILVPLLVFFLLKDKQEMLRMASGILPRNRKLANKVWEEMNQQISNYIRGKVLEIVIVGTVSYITFAILDLRYSVLLAVAVGLSVLIPYIGAAAVTVPVAIVALFQWGLTPQFYTLLIAYGIIQALDGNVLVPVLFSEAVNLHPVAIIIAVLVFGGLWGFWGVFFAIPLATLVKAVWKALPSIDEEPAS

SEQ ID NO: 132710 - DNA, 1065 bp, Pasteurella multocida subsp. multocida str. Pm70
  CDS (1)..(1065): transl_table=11
atgatcgaaatgttgaaaaactggtataacaaccgttttagtgatccacaagccatggggttgtttgccatcttactctttggttttatatccatttatttttttagtcacctcattgcaccactcctcatcgctattgtattagcttatttattggaatggccaattcgcgttctcacagaaaaactcaagtttccacgcctactctcaactgccattatttttggtggttttttagggttgatcctcgttatcgtattggtcttcattccaacgttatggactcaaaccttgaatttagtgactgatttgccacatatgtttaataaactcaatgagtggttactttctctacctgaacattatcccgagctagtggattaccaaaccattgattctgtattaagtactgtccgctccaaaattcttggctttggtgaatccgccctcaaattctccctgacctcgttattaagcctggtcaccctagggatttatgcgtttttagtgcctttaatggtgttctttttattaaaagataaaacagaattaatcgccagtgtaagccgtttccttccgcgtaaccgtacgctagcctcgagcgtttggaaagaaatgcaacaacaaattgcgaattatattcgcggtaaattattcgaaatcatcattgtcaccgctgtgacttacgcgattttcatcttctttaacttaaattattcgttattgttagctgttgcggtagggctatccgtgctcgtgccttatattggtgccgtccttgtcacgattcctattgccctcgttgccgtcgcgcaatttggcatcactcctactttttggtatatcattactgcctacgtcatcagccaaattttagacggtaacttattagtcccattccttttttctgaagccgtcaatttgcaccctctaaccattattatcgcggtattaatttttggtggattatggggcttttggggcgttttcttcgctattccattagccactttagtcaaagctgtggtgaatgcatggccatcaaccgaacaagatacacgttaa

SEQ ID NO: 132711 - protein, 354 aa, Pasteurella multocida subsp. multocida str. Pm70
MIEMLKNWYNNRFSDPQAMGLFAILLFGFISIYFFSHLIAPLLIAIVLAYLLEWPIRVLTEKLKFPRLLSTAIIFGGFLGLILVIVLVFIPTLWTQTLNLVTDLPHMFNKLNEWLLSLPEHYPELVDYQTIDSVLSTVRSKILGFGESALKFSLTSLLSLVTLGIYAFLVPLMVFFLLKDKTELIASVSRFLPRNRTLASSVWKEMQQQIANYIRGKLFEIIIVTAVTYAIFIFFNLNYSLLLAVAVGLSVLVPYIGAVLVTIPIALVAVAQFGITPTFWYIITAYVISQILDGNLLVPFLFSEAVNLHPLTIIIAVLIFGGLWGFWGVFFAIPLATLVKAVVNAWPSTEQDTR

SEQ ID NO: 132712 - DNA, 1062 bp, Escherichia coli O157:H7 EDL933
  CDS (1)..(1062): transl_table=11
  misc_feature (595)..(595): s is g or c
  misc_feature (941)..(941): y is t or c
atgctcgaaatgttgatgcaatggtatcgccgccgttttagcgacccggaagcgattgccttgctggttattttagttgccggatttggcattatctttttctttagtggcctgcttgctccgttgctggtggctattgtgctggcctatttgctggaatggccaaccgtgcgcctgcaatctattggctgctcccgccgctgggcgacgtcgattgtattggtggttttcgtcggtatattgctactgatggcgttcgtggtactgcctatcgcctggcagcagggcatctacttaatccgcgatatgccggggatgctcaataagctttctgactttgccgccacgttgccgcgccgctatccggcgttaatggatgcgggcattattgatgcaatggccgaaaatatgcgcagtcggatgctgaccatgggcgattcggtggtgaaaatttccctcgcctcgctggtcggtttgctgaccattgccgtctatctggtgctggtaccattgatggtcttcttcctgctgaaagacaaagagcagatgctgaatgccgttcgccgggtgctgccgcgtaaccgtggactggcasgacaggtgtggaaggagatgaatcaacaaatcaccaactatatccgcggcaaagtgctggagatgatcgtagtagggatcgccacctggctgggattcttactcttcgggctgaactattcgctgctgctggcggtgctggtcggcttctcggtacttattccgtacattggcgcatttgtggtgaccattccggtggttggcgtggcgctattccagtttggtgcaggcactgaattctggagctgtttcgcggtgtatctgatcattcaggcgcttgacggcaacctgttagtaccggtgttgttctccgaagcggttaacctgcatccgctggtgattatttyatcggtggtgatcttcggtggtttgtggggattctggggcgtattcttcgccattccattggcgacgctgatcaaagccgtgatccacgcctggcccgatgggcaaatagcgcaagaataa

SEQ ID NO: 132713 - protein, 353 aa, Escherichia coli O157:H7 EDL933
  misc_feature (199)..(199): The Xaa at location 199 stands for Arg, or Gly.
  misc_feature (314)..(314): The Xaa at location 314 stands for Leu, or Ser.
MLEMLMQWYRRRFSDPEAIALLVILVAGFGIIFFFSGLLAPLLVAIVLAYLLEWPTVRLQSIGCSRRWATSIVLVVFVGILLLMAFVVLPIAWQQGIYLIRDMPGMLNKLSDFAATLPRRYPALMDAGIIDAMAENMRSRMLTMGDSVVKISLASLVGLLTIAVYLVLVPLMVFFLLKDKEQMLNAVRRVLPRNRGLAXQVWKEMNQQITNYIRGKVLEMIVVGIATWLGFLLFGLNYSLLLAVLVGFSVLIPYIGAFVVTIPVVGVALFQFGAGTEFWSCFAVYLIIQALDGNLLVPVLFSEAVNLHPLVIIXSVVIFGGLWGFWGVFFAIPLATLIKAVIHAWPDGQIAQE

SEQ ID NO: 132714 - DNA, 1116 bp, Sinorhizobium meliloti 1021
  CDS (1)..(1116): transl_table=11
atgggcgatcgggtcagcagtatgggacttcagcgccagatctttttctggctgctggtgcttgtcggcttcattgccttcctgctggtgttcagttccattcttctgcccttcctcgccggcatggcgctcgcctattttctcgatcctgtggccgatcgcctggagcggctcggtctgagccggctgatggcgacaatcgccatcctggtcgccttcgtcgtcgtgctggcgctgtcgctgatgatcatcgttccgctggtcgtcacgcaggctgccgaattcattcagaaaatgccgggatacatcacgaggcttcaggaattcctgaccgacagccagtcgacgctgttgccggactggctcgccggccagatgacgacgatcaaacagaactcggccaagcttttggagcaaggcgctagcttcctcggcacgctgttccagcagatctggaactccggcttggcacttctcaatatcctgtccctgttcgtcatcacccctgtcgtcgccttctatctgctgctcgactgggaccgtatggtcgacagggtcgacagctggataccgcgcgattacgtcgaggtcgtgcggcagatcgctcgcgacatgaatacgaccatcgccggatttgtccgcggccagggctcgctctgcctgatcctcggcctctattacgggatcgggctgacgatggtggggctcaatttcggcctcctgatcggcctcttcgccggcatgatcagtttcattccctatgtgggatcgctggtcggcctcgtgcttgcgctcggcgtcgcgctcgttcagttctggccggactatgtctggatccttttggttctcgccgttttcttcagcggccagtttctcgaaggcaatattctgcagccgaaactggtcggcaaaagcgtcgggctgcacccggtctggctgatgttcgccctgcttgcgttcggcgcgctcttcggcttcgtcggcctgctcgtggcggtgcccgcggcggccgcgatcggtgtgcttgtccgcttcggcatccagcggtaccttgatagcgatctctatcacgggcatagaacagccgttcacaaggagccggagagccacggctag

SEQ ID NO: 132715 - protein, 371 aa, Sinorhizobium meliloti 1021
MGDRVSSMGLQRQIFFWLLVLVGFIAFLLVFSSILLPFLAGMALAYFLDPVADRLERLGLSRLMATIAILVAFVVVLALSLMIIVPLVVTQAAEFIQKMPGYITRLQEFLTDSQSTLLPDWLAGQMTTIKQNSAKLLEQGASFLGTLFQQIWNSGLALLNILSLFVITPVVAFYLLLDWDRMVDRVDSWIPRDYVEVVRQIARDMNTTIAGFVRGQGSLCLILGLYYGIGLTMVGLNFGLLIGLFAGMISFIPYVGSLVGLVLALGVALVQFWPDYVWILLVLAVFFSGQFLEGNILQPKLVGKSVGLHPVWLMFALLAFGALFGFVGLLVAVPAAAAIGVLVRFGIQRYLDSDLYHGHRTAVHKEPESHG

SEQ ID NO: 132716 - DNA, 1158 bp, Agrobacterium tumefaciens str. C58
  CDS (1)..(1158): transl_table=11
atgcaaccccatgtgagcggcacgagtctgcgccgacaggtgtttttctggattggcgtgcttgccgtctttgtcctcttcctgatggttttcagctccattctgctgcctttcgtggcgggcatggcgcttgcctattttctcgatccggtggccgactggctggagcggcggggtttgagccggttgatggcgaccgtcgtcatcctcgtttccttcgtgctgatctttgcgctgtcgctcatcatcatcattccgctgatcgtcgcccaggcatcggaattcatcacacgcatcccgcaatatatctcttcgttgcagcagctgatcgccggtgcagataccaatcttctgccggattgggtgagcggccagatcaactcggtaaaggagaatttttcaaagctcctgaccgagggcgctggtttcatcggcacgcttttgacgcagatatggaattccggcaaatcgctggtcgatgtcctgtcgcttctggtcgtcacgcccgtcgtcgccttttatctgctgctcgactgggaccggatgatcgacaaggtcgacagctggatcccgcgtgactacgtgcataccgtccgccagattgctcgcgacatggacaagacgattgccggcttcgtgcgcgggcaggggtcgctctgcctcattctcggggtttattatgccgtcggcctgtcgttggtgggcctgaatttcggtctgctgatcggccttttctccggcctcatcagcttcattccctatatcggctccatggtcggcctcatcctcgcggtcggcgtcgccatcgtgcagttctggccggactatatctatgtcttcctgacgctcgtcgtgttcttttccggccagttcatcgaaggcaacatcctgcaaccgaagcttgtcggcaaaagcgtcggcctgcatccggtctggctgatgttcgcgctcttcgctttcggtgcgcttttcggtttcgtcggccttctggtcgcggttcccgctgccgctgcggtcggcgtgcttgtccgctttgcattgtcgcggtatcttgaaagcgatctttaccatgggcacgccgccaatcttccctgggacgccaaccctgccctggaagaacgggaagcgtccgctggtaagattgactctcagagctga

SEQ ID NO: 132717 - protein, 385 aa, Agrobacterium tumefaciens str. C58
MQPHVSGTSLRRQVFFWIGVLAVFVLFLMVFSSILLPFVAGMALAYFLDPVADWLERRGLSRLMATVVILVSFVLIFALSLIIIIPLIVAQASEFITRIPQYISSLQQLIAGADTNLLPDWVSGQINSVKENFSKLLTEGAGFIGTLLTQIWNSGKSLVDVLSLLVVTPVVAFYLLLDWDRMIDKVDSWIPRDYVHTVRQIARDMDKTIAGFVRGQGSLCLILGVYYAVGLSLVGLNFGLLIGLFSGLISFIPYIGSMVGLILAVGVAIVQFWPDYIYVFLTLVVFFSGQFIEGNILQPKLVGKSVGLHPVWLMFALFAFGALFGFVGLLVAVPAAAAVGVLVRFALSRYLESDLYHGHAANLPWDANPALEEREASAGKIDSQS

SEQ ID NO: 132718 - DNA, 1092 bp, Streptomyces coelicolor A3(2)
  CDS (1)..(1092): transl_table=11
atgtctgccggattgagcgcggcgaaaacccgggccgcgctgcgcaccagcgcgcgcgtctcgggcgagctgctgctgatactcgtcatgctcgcagtgaccctgtgggtcctcggccgtatgtggtcggtggtgtggccgctgctcgtcggcctgctcctgaccacgttgacgtggccccccgcccgcttcctgcggcggcacgggtggcgtccggcactggccgccacggtggtgacggtggccttcctgctggtcgtcctgggcatcgtggcactgatcgccgtgccgatgtcctcccagaccgacgagttgaccgacggcgtggtcgagggcatccagcggctgcgcgagtgggcggcggggccgccgctgaacatcggtgacgacgagatcaccggtgcgatggactcggcggtggcacgcatccaggacagcgtcggcagcatcacgaccgcggtggcgacgggggtgggcgcggtggtcaacggcctgatcaccgccgtcctgggcgtgttcctgatgttcttcttcctcaaggacggaccgcggttcctgccctggctggcccgtcagttgcccggccggctggccaccgacgtcccggtcgtcgccctgcggggctgggagaccctgggctccttcgtccggtcgcaggccctggtggggctgctcgacgccgtgttcatcggcctcggcctgtggatcctgggcgtaccgctggtgctgccgctggcggtcctgaccttcgtgtccgcgttcgtgcccatcgtgggcgcgctgttcgcgggcttcgtggccgtgctgatcgccctggtgtcgaacggcctgacggacgcgctcatcgtgctcgcgatcatcgtggtggtgcagcagttggagggcaacgtcttccagcccatcctccagagccggggcctcggtctgcacgcggcggtgatcctcctggccgtgacgctgggcggcagcctgtccgggatcgtgggcagcctgctcgccgtacctttcgccgcgctgatcgcggtggtgtggacctacgtgcgcgagcagttgagcgagcggcccgaggcgaccgcgaccgccgacggctga

SEQ ID NO: 132719 - protein, 363 aa, Streptomyces coelicolor A3(2)
MSAGLSAAKTRAALRTSARVSGELLLILVMLAVTLWVLGRMWSVVWPLLVGLLLTTLTWPPARFLRRHGWRPALAATVVTVAFLLVVLGIVALIAVPMSSQTDELTDGVVEGIQRLREWAAGPPLNIGDDEITGAMDSAVARIQDSVGSITTAVATGVGAVVNGLITAVLGVFLMFFFLKDGPRFLPWLARQLPGRLATDVPVVALRGWETLGSFVRSQALVGLLDAVFIGLGLWILGVPLVLPLAVLTFVSAFVPIVGALFAGFVAVLIALVSNGLTDALIVLAIIVVVQQLEGNVFQPILQSRGLGLHAAVILLAVTLGGSLSGIVGSLLAVPFAALIAVVWTYVREQLSERPEATATADG

SEQ ID NO: 132720 - DNA, 1149 bp, Brucella suis 1330
  CDS (1)..(1149): transl_table=11
gtggaagttgaaagtttttcaggcgcatcggttcggcggcaggccggtttctggcttggagccatggccttcttcgtgctgtttctggtcgtgttcagctcggttctcctgccattcgtcgcgggcatggcgcttgcctattttctcgatccggttgcagatcggcttgaaaaggttggcctttcgcggctcgcggcaagcattgtcatcctgcttatcttcctgatgatcctgattatcgggctgatgatcgtcgtgccgattcttgctacgcagcttgccgatttcatttctaatcttcccggctacatcacgcaattgcagtcgcttctggcgaacagggattcggaatggctgaagaaatatatcggcatcgacagcacggtcattcagcaaaatctcagttcgctgctccagcaaggggcgggttttctctccacactgcttcagtcgctgtggaattcggggaaatccctgatcgatattgcgggcctgttcgtggtgacgccggtggtcgccttctacatgctgctcgactgggaccgcatggtgaacagcattgattcatgggttccgcgtaagcagcttcatacggtgcgccgcatcgcgcgcgaaatgaatgcggcggtggctggcttcatccgggggcagggcacgctctgcctcattctcggcacctattatgccatcgggctgacgctgacggggcttaatttcggcctcctgatcggcttttttgcaggccttatcagctttattccctatattggttcttttgtcgggctggcgctcgccatcggcgtggcgctggtgcagttctggcccgactggatcatggtttgcacggttgcggcggtgtttttccttggccagttcatcgaaggcaatattctccagcccaagcttgtcggctcttccgtggggctgcatccggtctggctgatgtttgcgcttttcgcctttggttcactgttcggcttcactggaatgctggtcgccgtcccggctgcggcggctgtcggggtgcttgtgcgttttgcattgaatagctatctgcgttctccgatgtatgatcctgccaaccaccgctcgaacccggacgctggacctttgatcgaggcgggtgacaatacaggccgtgagaaatga

SEQ ID NO: 132721 - protein, 382 aa, Brucella suis 1330
MEVESFSGASVRRQAGFWLGAMAFFVLFLVVFSSVLLPFVAGMALAYFLDPVADRLEKVGLSRLAASIVILLIFLMILIIGLMIVVPILATQLADFISNLPGYITQLQSLLANRDSEWLKKYIGIDSTVIQQNLSSLLQQGAGFLSTLLQSLWNSGKSLIDIAGLFVVTPVVAFYMLLDWDRMVNSIDSWVPRKQLHTVRRIAREMNAAVAGFIRGQGTLCLILGTYYAIGLTLTGLNFGLLIGFFAGLISFIPYIGSFVGLALAIGVALVQFWPDWIMVCTVAAVFFLGQFIEGNILQPKLVGSSVGLHPVWLMFALFAFGSLFGFTGMLVAVPAAAAVGVLVRFALNSYLRSPMYDPANHRSNPDAGPLIEAGDNTGREK

SEQ ID NO: 132722 - DNA, 1086 bp, Shewanella oneidensis MR-1
  CDS (1)..(1086): transl_table=11
atgtttagttttttttctcgttggtatcaagagcggtttagtgatcctcaggccgtgaccttattggctattttggtggggttagcgctagtgctttattttgctggcggcttattagcgccactgctcgtcgccctcgtgttggcttttttactcgaatggccagtagcgcaaatgctgaaattgggaattaaccgcacaactgcggcttccttagtgctaattatttttttaggaatagtcgtgctgctcacctttgggcttatccccagtgtgtggcgtcaaggggtgagcctgatgacagatttgccgagtatgatcgataaaggattgcaaactgtgcagggattagcgacccaatatccgcagtttatcagtgtcgagcagctcaatttaatggtcgccgaactcaaaaaactgctcgacacccaacatgtgctcgatattgcgaaacaactgattggatactctgcgtcgttactggtgctgatggtgtacgcgattttagtgccattgttggtgttcttttttcttaaggataaagatcaacttatcagtggcagtaaacgttttttccccactaatcgacagttagcacgcaaagtgtggtttgaaatgcaccagcaaatctttaactatattcgtggcaaagtgatcgaaatcgtcatagttggtgtcgcgagctatatcttgtttgcgtttatgggactgagctattcggccttgttaggggtgttaacgggactgtcggtgttaattccttatgtgggcgcgacgttagtgactttgcccatcatgctggtggcgtttttccaatggggtttcagctcggagtttggttatttaatgctaggttacggcattattcaggccttggacggtaacgtgcttgtgcctatcctgttttccgatgcggtggatttgcatccggtgatcattattgctgccgtgttggtctttggcggtttatggggtgttttgggggtcttttttgcgatcccattagcgtctctagttaaagccgtgatcaatgcttggccgaaaaccgagattgagcctagtgcttccgctcccccacaaaaataa

SEQ ID NO: 132723 - protein, 361 aa, Shewanella oneidensis MR-1
MFSFFSRWYQERFSDPQAVTLLAILVGLALVLYFAGGLLAPLLVALVLAFLLEWPVAQMLKLGINRTTAASLVLIIFLGIVVLLTFGLIPSVWRQGVSLMTDLPSMIDKGLQTVQGLATQYPQFISVEQLNLMVAELKKLLDTQHVLDIAKQLIGYSASLLVLMVYAILVPLLVFFFLKDKDQLISGSKRFFPTNRQLARKVWFEMHQQIFNYIRGKVIEIVIVGVASYILFAFMGLSYSALLGVLTGLSVLIPYVGATLVTLPIMLVAFFQWGFSSEFGYLMLGYGIIQALDGNVLVPILFSDAVDLHPVIIIAAVLVFGGLWGVLGVFFAIPLASLVKAVINAWPKTEIEPSASAPPQK

SEQ ID NO: 132724 - DNA, 1071 bp, Pseudomonas putida KT2440
  CDS (1)..(1071): transl_table=11
atgttcaaagtgcttcgcgactgggtgcagcgctacttctccgatgaggaagcggtggtgctggcggtcctgttgttcctggcttttaccgccgtgctcaccctgggcggcatgctcgcgccggtgctggcgggcatggtgctggcgtttctgatgcaggggctggtcaacgccctggagcgcgtgcgcgtacctacacggctggcggtgatgctggtgttcgccttgttcatgggcgcactggcggtgttcatgctggtgctggtaccgctgctgtggcaccagctgatcacgctgttcaacgagctgccgggcatgctcggcaagtggcagtcgttgttgctgctgctgccggagcgctatccgcatctggtgtcggacgagcaggtattgcacgccattgagtcggtgcgcggtgaaattggcaagtttggtcaatgggcgctgaccttctcgctgtccagcctgccactgctggtcaatgccatgatctatctggtgctggtgccgattctggtgttcttcttcctgaaggatcgcgaactcattggccgctgggtcagcggctacctgccgcgccagcgcaccttgctgaacagggtgggcagcgagatgaaccggcagatcgccaactacatccgtggcaagggtatcgagattctgatctgcggcattgccacttacatcgccttcatcagcctggggctcaattacgcagcgctattggcgttgctggtggggctgtcggtggtggtgccttacgtgggcgcggtggtcgtgaccgtgccggtgaccctgattgcgctgttccagtggggctggggtgaccagttcatctacctgatgacggtgtacgcgatcatccaggcgctggatggcaatgtgctggtaccgctgctgttctccgaagcggtgagcctgcacccggtggcgattatctgcgcggtgctgctgtttggcgggctatgggggttttgggggatattcttcgccatcccgctggcgacgctgatcaaggccgtgctggatgcgtggcccaagcaggagcctagcgtttcaccgatgctttga

SEQ ID NO: 132725 - protein, 356 aa, Pseudomonas putida KT2440
MFKVLRDWVQRYFSDEEAVVLAVLLFLAFTAVLTLGGMLAPVLAGMVLAFLMQGLVNALERVRVPTRLAVMLVFALFMGALAVFMLVLVPLLWHQLITLFNELPGMLGKWQSLLLLLPERYPHLVSDEQVLHAIESVRGEIGKFGQWALTFSLSSLPLLVNAMIYLVLVPILVFFFLKDRELIGRWVSGYLPRQRTLLNRVGSEMNRQIANYIRGKGIEILICGIATYIAFISLGLNYAALLALLVGLSVVVPYVGAVVVTVPVTLIALFQWGWGDQFIYLMTVYAIIQALDGNVLVPLLFSEAVSLHPVAIICAVLLFGGLWGFWGIFFAIPLATLIKAVLDAWPKQEPSVSPML

SEQ ID NO: 132726 - DNA, 1074 bp, Pseudomonas putida KT2440
  CDS (1)..(1074): transl_table=11
gtgactgacatgcgtcgctggatctggctgggcgctgcactgctgatcgctgtgctgctttatagcctgcacaatattcttacgccgttcctggtcggcatcatgctggcctacctggccgacccgctggtcgatcgtctcgagcgcctggggctttcgcgtacctggggtgtggtggtggtgttcggcctgttcaccctgctgctgttggcgttgttgctggtgcttgtgccgatgctggccaagcagttggtgcgcctgtacgaactggcgccgcagatgctcgactggcttgagcatgtcgcgctgccgtgggtacagggccgccttggcctggccgatggtttctggaaattcgacaagatcaaggccgccatcggcgcgcacatggggcagaccaccgatatcgtcggcatgctgctgtcccaggccactgcctcaagcctggcgttggtggcctggttggccaatatggtgctgatcccggtagtgggcttctatctgctgcgcgattgggacttgatgatgggcaagctgcgcggcctgctgccgcgccagcgcgagccgcaagtgatgggcctggcaggtgaatgccatgaagtgctgggggcattcgtgcgcgggcagctgatggtgatgctggccctgggcgtcatctattcagccggcctgatgctggtggggctcgaactcggtctgctgatcggcatgcttgcaggccttgcggccatcgtgccgtacatgggcttcatcattggcattggtgccgcgctggtggccggcctgttccagttcggtggcgacctgtacccgatgctgggcatcgttgcggtgttcatggtcgggcaggcgctggagggtatggtgctgacccctctgctggtgggcgatcgcatcggcctgcatccggttgcggtgatctttgccatcctcgccggtggtgaactgttcggcttcaccggtgtgctgctggcgctgccggtggcggcggtgatcatggtgctgctgcggcatgtgcatgacctgtacaaggaatcggatatgtacgccgggaatatcgacccggagctttga

SEQ ID NO: 132727 - protein, 357 aa, Pseudomonas putida KT2440
MTDMRRWIWLGAALLIAVLLYSLHNILTPFLVGIMLAYLADPLVDRLERLGLSRTWGVVVVFGLFTLLLLALLLVLVPMLAKQLVRLYELAPQMLDWLEHVALPWVQGRLGLADGFWKFDKIKAAIGAHMGQTTDIVGMLLSQATASSLALVAWLANMVLIPVVGFYLLRDWDLMMGKLRGLLPRQREPQVMGLAGECHEVLGAFVRGQLMVMLALGVIYSAGLMLVGLELGLLIGMLAGLAAIVPYMGFIIGIGAALVAGLFQFGGDLYPMLGIVAVFMVGQALEGMVLTPLLVGDRIGLHPVAVIFAILAGGELFGFTGVLLALPVAAVIMVLLRHVHDLYKESDMYAGNIDPEL

SEQ ID NO: 132728 - DNA, 1062 bp, Escherichia coli CFT073
  CDS (1)..(1062): transl_table=11
atgctcgaaatgttgatgcaatggtatcgccgccgttttagcgacccggaagcgattgccttgctggttattttggttgctggttttggcattatctttttctttagcggcctactcgcgccgttgctggtggctattgttctggcctatttgctggaatggccgactgtccgcctgcagtctattggctgttcccgcccttgggcgacatctatcgtgctgatcctgtttgtgggcatcctgctactgatggcgttcgtggtactgcctatcgcctggcagcagggcatctacttaatccgcgatatgccagggatgcttaataaactttctgattttgctgccacgttaccgcgccgctatccggcattaatggatgcggggattattgatgcaatggctgaaaatatgcgtagccggatgctcagtatgggggactcggtggtgaaaatttccctcgcctcgttggtcggtttgctgaccattgccgtctatctggtgctggtaccattgatggtcttcttcctgctgaaagacaaagagcagatgctgaacgccgttcgccgggtgctgccgcgcaaccgtggactggcaggacaggtgtggaaggagatgaatcaacaaatcaccaactatatccgcggcaaagtgctggagatgatcgtggtagggatcgccacctggctggggttcttgctctttgggctgaattattcgctgctgctggcggtgctggtcggcttctcggtacttattccgtacattggcgcatttgtggtgaccattccggtggttggcgtggcgctattccagtttggtgctggcacggaattctggagctgcttcgcggtgtatctgattattcaggcgctggacggcaacctgttagtaccggtgttgttttccgaagcggttaacctgcatcctctggtgattattttatcggtggtgatcttcggtggtttgtggggattctggggcgtattcttcgctattccattggcgacgctgatcaaagccgtgattcacgcctggcctgatgggcaaatcgcgcaagactga

SEQ ID NO: 132729 - protein, 353 aa, Escherichia coli CFT073
MLEMLMQWYRRRFSDPEAIALLVILVAGFGIIFFFSGLLAPLLVAIVLAYLLEWPTVRLQSIGCSRPWATSIVLILFVGILLLMAFVVLPIAWQQGIYLIRDMPGMLNKLSDFAATLPRRYPALMDAGIIDAMAENMRSRMLSMGDSVVKISLASLVGLLTIAVYLVLVPLMVFFLLKDKEQMLNAVRRVLPRNRGLAGQVWKEMNQQITNYIRGKVLEMIVVGIATWLGFLLFGLNYSLLLAVLVGFSVLIPYIGAFVVTIPVVGVALFQFGAGTEFWSCFAVYLIIQALDGNLLVPVLFSEAVNLHPLVIILSVVIFGGLWGFWGVFFAIPLATLIKAVIHAWPDGQIAQD

SEQ ID NO: 132730 - DNA, 1071 bp, Vibrio vulnificus CMCP6
  CDS (1)..(1071): transl_table=11
atgtttgaaatgatcaaccgctggtataagcgccgtttttcagacccccatgccgtcagcttagtggctatcctgctatttggttttgtgacgatctatttctttggccacttgctggctcctttgttagttgccattgttttggcctatttgttggaatggcccgttgcacaacttcgtcgctttggcgtaccgagaaccgttggcgtgatcgccgtgattcttctgtttatcggattgatgttgattgcgctgtttggattgattccaaccatttggactcaggtgggtaacttaatcaatgacgttcctaacatgtacaacgggctgcagcagtttattgcatcgctgcctgaacgttatcctgagttggccaatttacaaatcgtagaagcgattgtcaccaacgcgaaaaacaaagtgttgggaatgggagagagtgtcgttaaaggttcattagcttctttgatcagcattgcaaccttagcggtatacctcattctagtgcctttgctggtgttcttcttactcaaagacaaagaagaaatgatgcgcatggccagcggcttgctgccaaagaatcgcaacttagccaataaagtgtggcatgagatgaacgagcaaatctccaactacatccgcggcaaagtgctggagatcttgattgttggtggggtgagttatgttactttcgccattttggacctgaggtattcggcgttgctcgcagtggcggtgggcctttccgtgctcattccatacattggtgcagcggcggtaacggttcccgtcgcgattgtcgcgttgttccagtgggggatctcaaccgaattttatacgttgcttattgcttatggcatcattcaagcactcgacggtaacgtgcttgttccggtcctcttttctgaagcggtgaacctgcatccagtggccatcattgttgcggtcttggtgtttggtggtctgtggggattttggggcgtgttcttcgctatcccgttggcgaccttagtgaaagcggtttggaaagcactgccaagtcaagatgagcacgaagcgcaaccgtcctaa

SEQ ID NO: 132731 - protein, 356 aa, Vibrio vulnificus CMCP6
MFEMINRWYKRRFSDPHAVSLVAILLFGFVTIYFFGHLLAPLLVAIVLAYLLEWPVAQLRRFGVPRTVGVIAVILLFIGLMLIALFGLIPTIWTQVGNLINDVPNMYNGLQQFIASLPERYPELANLQIVEAIVTNAKNKVLGMGESVVKGSLASLISIATLAVYLILVPLLVFFLLKDKEEMMRMASGLLPKNRNLANKVWHEMNEQISNYIRGKVLEILIVGGVSYVTFAILDLRYSALLAVAVGLSVLIPYIGAAAVTVPVAIVALFQWGISTEFYTLLIAYGIIQALDGNVLVPVLFSEAVNLHPVAIIVAVLVFGGLWGFWGVFFAIPLATLVKAVWKALPSQDEHEAQPS

SEQ ID NO: 132732 - DNA, 1104 bp, Bradyrhizobium japonicum USDA 110
  CDS (1)..(1104): transl_table=11
gtgataccaacgtcccgtgaggagcgactgaaaggccggcgacacgtgagaacatcggaagaccgctcattcctcgtcttgcttgcggcaatctccgtcgcgttcggctggctgctatggccgttctccggcgcattgttgtgggcgacgctgctggcgatcatcttcgcgccactctatcgactttgcctggaaacgttcccggaatggcgcaaccttgccgcactttccaccgtcctcgtcgtggtcgtcatggtcctgatccctgtggccgtcgtgatcgcctcgctcgtcgagcagggaggggagctgtatcagcgtgttcagaccggggagatcagtttcgctcatcccctgcagcaactgaaatccgcgctgcctgactgggccgcgtccgtctcggaccgtctggccgggattgatctttcggccctgaaagaacgcctctcgagcctggttgtccccgccggccagcagctggccggccacgcgatcaacatcggtcagttgacggtggagttcgtcgcaagcttgctcgtgatgctatacctgctgttctttttcctgcgcgacggtgacgagctgaacctgcgcatccgcgacgcgctgccgctgcgtaggagccacaccgccgcgattctggatgcgttcaccctttcggttcgcgggacgatcaaggggatcatactggttgcgctgatccagggagcgcttggcgggctgatcttctggctgctcggcctgactgcgccgctgctggccggcgccctcatggcgctactttcacttctgcctgtgctcggctccgccctggtctgggttccggtcggcctctacctgctcgtggcaggcgcagtcacaaagggaatgatcctgctcgttttcggcaccttcgtgatcggtcttgccgacaactttctccgccctgtcctggtcggccagtcaatccgaatgccaagctatgttgtgctgctcgccaccctgggcggccttgcgactttcggcgcgaacggctttgtcattggtccgctcgtcgccgcaatgtttctgacggcgtggcacatctttgtcggctcgaaagagcaacaagaggtccggaattga

SEQ ID NO: 132733 - protein, 367 aa, Bradyrhizobium japonicum USDA 110
MIPTSREERLKGRRHVRTSEDRSFLVLLAAISVAFGWLLWPFSGALLWATLLAIIFAPLYRLCLETFPEWRNLAALSTVLVVVVMVLIPVAVVIASLVEQGGELYQRVQTGEISFAHPLQQLKSALPDWAASVSDRLAGIDLSALKERLSSLVVPAGQQLAGHAINIGQLTVEFVASLLVMLYLLFFFLRDGDELNLRIRDALPLRRSHTAAILDAFTLSVRGTIKGIILVALIQGALGGLIFWLLGLTAPLLAGALMALLSLLPVLGSALVWVPVGLYLLVAGAVTKGMILLVFGTFVIGLADNFLRPVLVGQSIRMPSYVVLLATLGGLATFGANGFVIGPLVAAMFLTAWHIFVGSKEQQEVRN

SEQ ID NO: 132734 - DNA, 1071 bp, Pseudomonas syringae pv. tomato str. DC3000
  CDS (1)..(1071): transl_table=11
atgttcaatgtgcttcgcaattgggtgcaacgctatttctctgacgaggaggcggtggtactggcggtcttgctgtttgtggcgtttaccctcgtcctgacgctgggcgggatgctcgctccggtgctggccgggctggttctggcttttttgatgcacgggctggtcggtcttctggagcgcctgcggatgcccgaggtggccgcagtcggcgtggtgttcacgttgttcatcggcgcgctgctggtgtttctgctggtgctggtgccgttgctctggcatcagttgatcacgctgttcaacgaggcgccgggcatgcttgccaaatggcagtcggtgctgctgttgctgcccgagcgctacccgcatctggtttccgacgagcaagtgctgctggcaattgaagtcgcccgtggcgaggtcggcaagatcggccagctggcactgacgttctcgatctccagcctgccgttgctggtcaacctgatgatctatctggtgctggtgccgattctggtgttcttcttcctcaaggatcgccatgtgatcggtcgctgggcgcgtggctatctgcctcgcgagcgtgcgttgctcaatcgggtggcggacgagatgaagcgccagattgccaattacattcgcggcaaggtcatcgagatcttcatctgtggcggcgtgacctacatcgccttcgtggcgctcgggctcaattacgccgcgctgctggcaatgctggtgggcatctcggtggtggtgccttatgtcggcgcggtggtggtcacggtgccggtggcgctgatcggtctgttccagtggggctggagtgatcaattcatctacctgatgattgctcacggtgtcattcaggcgctggatggcaacgttctggtgccgctgctgttttccgaagccgtcaatctgcacccggtcgcgatcatctgcgccgtgttgctgttcggcgggctgtggggcttctgggggatcttctttgcgattccgctggcgaccctgttcaaggccgtgctggatgcctggccacgcaatgagcccaccgtagcgccgctgctttag

SEQ ID NO: 132735 - protein, 356 aa, Pseudomonas syringae pv. tomato str. DC3000
MFNVLRNWVQRYFSDEEAVVLAVLLFVAFTLVLTLGGMLAPVLAGLVLAFLMHGLVGLLERLRMPEVAAVGVVFTLFIGALLVFLLVLVPLLWHQLITLFNEAPGMLAKWQSVLLLLPERYPHLVSDEQVLLAIEVARGEVGKIGQLALTFSISSLPLLVNLMIYLVLVPILVFFFLKDRHVIGRWARGYLPRERALLNRVADEMKRQIANYIRGKVIEIFICGGVTYIAFVALGLNYAALLAMLVGISVVVPYVGAVVVTVPVALIGLFQWGWSDQFIYLMIAHGVIQALDGNVLVPLLFSEAVNLHPVAIICAVLLFGGLWGFWGIFFAIPLATLFKAVLDAWPRNEPTVAPLL

SEQ ID NO: 132736 - DNA, 1071 bp, Vibrio parahaemolyticus RIMD 2210633
  CDS (1)..(1071): transl_table=11
atgttcgaaatggtaagtcgttggtatcaacgccgcttctcagatccccacgcagtaagccttgtcgccattttgctgtttggttttatcaccatttacttctttgggcatttgattgcgccattgctggtggcgatcgtattggcatatctcctagaatggccagtggttaaattgtctcgtatgggtgtgcctcgcaccttatcagtgattattgttctgctgatttttatcagcatcatgttgattgccttatttggtttggttccgacgatctggactcaggttggcaacttaatcaacgatattccgaacatgtataacgggctgcaaaagttcatcatgacgttgcctgagcgccatccggaattggcgaacctacaaattgtagaaaccgtcgtgaccaacgcgaaaaaccaagcactaggtttgggtgaaagcgtggtaaaaggctcacttgcatcgttagttagtattgccacattggcggtgtatttgattttggtgccgctgctgattttcttcctacttaaagacaaagaagaaatgcttagaatggcgagcggcattttgccgaaaaaccgtaagctagcgaacaaagtttggcacgagatgaacgagcaaatctcgaactacattcgcgggaaagtgctggaaatcttgattgttggtggcgtgagctacgtaacattcgcgattctagacctacgttactccgcgctattggccgttgctgtaggcttgtcggtattgattccatatattggtgctgctgcggtaaccgtaccggttgcgattgttggtttgttccaatggggcatgacgccacaattctactggttgttgctggcttacggcatcatccaagcgctagatggtaatgtgcttgtgccagttctattttcagaagcggttaaccttcacccggttgcgattattgttgcggtactggtgtttggcggtttatggggattctggggagtcttctttgcgatcccattagcgacgttagtgaaagccgtttggaatgcgctaccaagcaccgaagagagcgaacccgtccaagagtaa

SEQ ID NO: 132737 - protein, 356 aa, Vibrio parahaemolyticus RIMD 2210633
MFEMVSRWYQRRFSDPHAVSLVAILLFGFITIYFFGHLIAPLLVAIVLAYLLEWPVVKLSRMGVPRTLSVIIVLLIFISIMLIALFGLVPTIWTQVGNLINDIPNMYNGLQKFIMTLPERHPELANLQIVETVVTNAKNQALGLGESVVKGSLASLVSIATLAVYLILVPLLIFFLLKDKEEMLRMASGILPKNRKLANKVWHEMNEQISNYIRGKVLEILIVGGVSYVTFAILDLRYSALLAVAVGLSVLIPYIGAAAVTVPVAIVGLFQWGMTPQFYWLLLAYGIIQALDGNVLVPVLFSEAVNLHPVAIIVAVLVFGGLWGFWGVFFAIPLATLVKAVWNALPSTEESEPVQE

SEQ ID NO: 132738 - DNA, 1092 bp, Coxiella burnetii RSA 493
  CDS (1)..(1092): transl_table=11
atgagtaatacgaaaaatccaatattacagggcatttccaattggtttgtgcggcatttttcagatccagaagcattagctttgtttttcactttgttctttgtatttttattaattgagttttttggtaaatacttacttcccgtcgttattagcgttgttctcgcttatttatttgcttcgccagtgcgatggttagaacggtggcgattccctcattgggcggcggttactatcgtttatctttttttcttaggtatttttttactggctttattcggattgttaccattaatgtggaagcagctcgcgagcatggttcatgaatttccaaaagccattacgaaaggtcaggcgtggatgacggaatatatgcatcgttatcccaaactatttccgaccgatccaatcgctaatttagccggttatttgcaccaacaatcggctcgcattgggcaattcattttatctttttcattagcctcaattcctggaattatcgaagcaattctttatttagttttagtgccgttgttggtttttttcttcttaaaagacgggggaagcatcagcaattggctcagtcgttttctgccagaacggcaggggcttattcgtattgtctggcatgagatgaatcaaaaaatcggtgcttacgttcgcggtcgggttatcgaaattatcattgtgagtattgtcgccgttattgcatttgcgttactcggattgcaatacgcgtttttgttaggggttttactgggattatcggtgattgttccttacatcggggcgatagtggtcaccatccccatcgctatcgtgggattaatgcagtggggtttatccgcgcattttgcgtatttaatgattgtttacgccataattatcactttggatgggaatttattagtgcctttgttattttcagaagcgatggatttacatcccattgtgattatcctgtccgtattagtttttggcgggatctggggcttttggggaatttttttcgccatccccttggcgaccttagttaaaacggttttaaatgcttggccaaaagcgcgaatctcccaaaacgagacggaataa

SEQ ID NO: 132739 - protein, 363 aa, Coxiella burnetii RSA 493
MSNTKNPILQGISNWFVRHFSDPEALALFFTLFFVFLLIEFFGKYLLPVVISVVLAYLFASPVRWLERWRFPHWAAVTIVYLFFLGIFLLALFGLLPLMWKQLASMVHEFPKAITKGQAWMTEYMHRYPKLFPTDPIANLAGYLHQQSARIGQFILSFSLASIPGIIEAILYLVLVPLLVFFFLKDGGSISNWLSRFLPERQGLIRIVWHEMNQKIGAYVRGRVIEIIIVSIVAVIAFALLGLQYAFLLGVLLGLSVIVPYIGAIVVTIPIAIVGLMQWGLSAHFAYLMIVYAIIITLDGNLLVPLLFSEAMDLHPIVIILSVLVFGGIWGFWGIFFAIPLATLVKTVLNAWPKARISQNETE

SEQ ID NO: 132740 - DNA, 1056 bp, Haemophilus ducreyi 35000HP
  CDS (1)..(1056): transl_table=11
atgtttgagatgtttcaaacttggtatagaaaaaaattcaatgacccacaagcaatcgcgttattaggcattctattagtaggctttggtatcctctatttttttagtgatctccttatgccattattagtggcaatagtttttgcttacttactagaatggcctattaaactactctcttatcatttaaaaatgcctagattattcagccttatcttagttttaggcagttttatctcgctttgtacttttttattcatcttcttattacccaatctgtggaatcaagcggtcacttttattcgagatttgccgtcaatgttcaacttattaaacgcttggattcaagccttaccggaacattatccagaattaattgattatgcaatgcttgattcattgatgaattcgctcaaaataaaaattttaagctttggtgaatcgctcttaacgctgtcagttaattcaattatcagcttagtaggtcttggcatttatgcttttttagtccccttaatggtcttttttttactgaaagataaaacgctttttatccgttcatttgtcaaaattttacccaaaaatcgccgcttagtaaccaatgtatggtttgaaatgcaacaacaaattgccaactacattcgtggcaaagtgcttgaaattttaattgttgcaattgtcacttacgctatttttctcttttttggcttacgctatcccttattgctatctgttgccgttggtttatcagttctgataccttacattggtgccgtattagtcacgattcccgttgcattgatcgcgttgttacaatttggtatttcacctgagttttactacttattacttgcctttgtcatcagccagctacttgacggcaacttaattgttccctttttattttcagaagcagttaatttacatccattaaccattattgttgctgtgcttatttttggtggtttatggggcttttggggcgtgttctttgctattccacttgcaacgttagtcaaggccgtcattaaagctttaccatcaaccgaagaataa

SEQ ID NO: 132741 - protein, 351 aa, Haemophilus ducreyi 35000HP
MFEMFQTWYRKKFNDPQAIALLGILLVGFGILYFFSDLLMPLLVAIVFAYLLEWPIKLLSYHLKMPRLFSLILVLGSFISLCTFLFIFLLPNLWNQAVTFIRDLPSMFNLLNAWIQALPEHYPELIDYAMLDSLMNSLKIKILSFGESLLTLSVNSIISLVGLGIYAFLVPLMVFFLLKDKTLFIRSFVKILPKNRRLVTNVWFEMQQQIANYIRGKVLEILIVAIVTYAIFLFFGLRYPLLLSVAVGLSVLIPYIGAVLVTIPVALIALLQFGISPEFYYLLLAFVISQLLDGNLIVPFLFSEAVNLHPLTIIVAVLIFGGLWGFWGVFFAIPLATLVKAVIKALPSTEE

SEQ ID NO: 132742 - DNA, 1080 bp, Photorhabdus luminescens subsp. laumondii TTO1
  CDS (1)..(1080): transl_table=11
atgctggatatgattatacagtggtatcgccgtcggtttactgatccgcaagttattgcgttatttgtcatcctgttggcagggttttgcattatttatttcttacatggcattttgacacctttgctggtggcgattgttcttgcctatttgttggaatggccaacggctaaacttgaaaaactggggtgttcgcgcacagtggctgtttgtattgtgctgattattttttccagtattagtttgttggtcatcttgattgtggcgccaactgtatggcagcagggaattaatctgttgtcagatatacccaatatgcttaatcggtttaatgaatatgctcagacattaccagcccgttatccggcgttggttgatgctggcattattgatatgatggccgaaaatttgcgcagtaagatttcaattgccggagagtctgtagtgaaattttcggtggcttcgctgattggtctgttaacgctggctatctatctgattcttgtgccactgatggccttcttcttgctaaaagataaaaaccagatgttgcaagcattgcaacgggtcctgccacgtaaccgcattttggccgggcaggtatggcgcgagatgaaccagcaaatcactaactatattcggggtaaagtcaccgagatggtgatcgtcggtatttgtacctacgcggtgtttgcatttcttggattggattattcattgctgctttctgttttggttgggctatcagtgttaattccttatgtgggtgcgttgattgtcacgattcctgttgtactggttgcgctatttcaatggggagtcggaacagatttctggactttgattattgcctatttggttgttcaggggctggatggtaacttgctggtgccgattttattctctgaagccgtaaacttacacccgttggtcatcattctctctgtgattacttttggtggtttgtgggggttttggggcgtattttttgctattccgctggcgacgctgattaaagcggtgatccaagcctggccggaagagatcgttataataggagacgatgaaataaaagagtaa

SEQ ID NO: 132743 - protein, 359 aa, Photorhabdus luminescens subsp. laumondii TTO1
MLDMIIQWYRRRFTDPQVIALFVILLAGFCIIYFLHGILTPLLVAIVLAYLLEWPTAKLEKLGCSRTVAVCIVLIIFSSISLLVILIVAPTVWQQGINLLSDIPNMLNRFNEYAQTLPARYPALVDAGIIDMMAENLRSKISIAGESVVKFSVASLIGLLTLAIYLILVPLMAFFLLKDKNQMLQALQRVLPRNRILAGQVWREMNQQITNYIRGKVTEMVIVGICTYAVFAFLGLDYSLLLSVLVGLSVLIPYVGALIVTIPVVLVALFQWGVGTDFWTLIIAYLVVQGLDGNLLVPILFSEAVNLHPLVIILSVITFGGLWGFWGVFFAIPLATLIKAVIQAWPEEIVIIGDDEIKE

SEQ ID NO: 132744 - DNA, 1191 bp, Acinetobacter sp. ADP1
  CDS (1)..(1191): transl_table=11
atgcaagatcgtatgcttcgtcgcgtcttcatcctagcaggtatagcacttctactttgggtattatatttactcaagcccgtggtcattccatttgttggtgctttcttaattgcttatctgtttagtccactggtagaaaaactttcaaaaatcggtttgccgcgttggctttcgattagtatcgtatttattggtattggtgttttactgacttgggccatgtggtatgtggtgccgctagtatggcaacagcttatgtatgcccgtgacagtattccaagtggtattcattgggttaatgcgactttcttgccatgggtgtcgcataccttcaacgtagaacgcatggaaattgacaccgatcaaatttcaactgtagtcatggaatacatccagaccaattacagtgcagatagtattcaaaccatggcgctacgtttggcacagtctggtctgaactttatccagattgggggcacaattgtgcttattccgattatctcattctattttttacttgattgggatcggatgttgaacagtttacgtcgtttgattcctcggccttacgaagaaagtactttacgtattgtgtatgaatgtcacagcgtgctcggtgccttcgttaagggacagtttctggtcatgttactattaggtattgtatatgccgtaggtcttcagttgattggtcttgaagttggcctgattatcgggatggtggcgggactcgccagcattattccttatctcggttttgctgtgggcataatcgctgccgtcatcgccacggtttttcagtttggtgtagactggatgcagctcgccttggtgggtgtggtgtttatgattggacaggctgtcgaaggctatattcttcagccatttttgcttggtgataaaattggtttgtctcctgtagcggtggtttttgcagttttagcaggcgcacagcttgctggattccttggaatgttgattgcattgcctgttgctgcagtgattgtcgtgttacttcgacatttaagggaagcttacgaacatacacagatgtatgcaggaacagcgacggtggtttcgactggcaatggtgagcatatcagtatcgaaactgaaaatcttgatcttgatattgaagtgaaaaacccgcaagatactgatacgtcgattgataatgatcggaagtaa

SEQ ID NO: 132745 - protein, 396 aa, Acinetobacter sp. ADP1
MQDRMLRRVFILAGIALLLWVLYLLKPVVIPFVGAFLIAYLFSPLVEKLSKIGLPRWLSISIVFIGIGVLLTWAMWYVVPLVWQQLMYARDSIPSGIHWVNATFLPWVSHTFNVERMEIDTDQISTVVMEYIQTNYSADSIQTMALRLAQSGLNFIQIGGTIVLIPIISFYFLLDWDRMLNSLRRLIPRPYEESTLRIVYECHSVLGAFVKGQFLVMLLLGIVYAVGLQLIGLEVGLIIGMVAGLASIIPYLGFAVGIIAAVIATVFQFGVDWMQLALVGVVFMIGQAVEGYILQPFLLGDKIGLSPVAVVFAVLAGAQLAGFLGMLIALPVAAVIVVLLRHLREAYEHTQMYAGTATVVSTGNGEHISIETENLDLDIEVKNPQDTDTSIDNDRK

SEQ ID NO: 132746 - DNA, 1065 bp, Yersinia pseudotuberculosis IP 32953
  CDS (1)..(1065): transl_table=11
atgctagagctgttgttacaatggtatcgccgtcgttttactgacccgcaggtcattacgttactggttatcttactggcgggtttctgcattctctacttcttcagcggtattttagcgcctttgctggccgctcttgttttggcttatttattagagtggccaactgcccgcttgcagcgtattggttgttcacgatcctgggcggccagtatcgtatttgtgctatttgtcagtatcatgctgttagcggtatttgtcgtggcaccaacggcttggcagcaagggattaatctggcgtcagatatgccaaagatgatcaataaattcaatgattttgcccatacattaccggcccgttacccggcactggtcgatgccggtattgtcgatatgatggcggaaaatctacgcagtaaaatgtcaggtctcggcgactccgtggttaaattttctctggcctctttgattggcttgctgacattggctatttatctgattttggttccattgatgctgttcttcttactcaaagataaagaacagatgcttaatgcggtgcgccgtgttttgccgcgtaaccgcggtttggccgggcaggtatgggtggagatgaaccaacagattactaactatattcgtggcaaagtgctggaaatggtgattgtgggtattgccacttatctggtgtttttcatcatggggatgaattacgctctgctattggcggtgctggtggggttctctgtgttgattccttatattggtgccgtgattgtcaccatccctgtggtgttggttgcgttgttccaatggggtatcggggcagatttctggacgctttttgtcgcctatttagtggtgcaagggttagatggcaacttgttggtccccgtgctgttctctgaagctgttaatctgcacccgttggttattatcctatcagtgatcatttttggcggtatgtggggtttctggggcgtattttttgccattccgctggcaacgctggtcaaagcggttatccatgcctggccagaagaattcattcctgacgcggattaa

SEQ ID NO: 132747 - protein, 354 aa, Yersinia pseudotuberculosis IP 32953
MLELLLQWYRRRFTDPQVITLLVILLAGFCILYFFSGILAPLLAALVLAYLLEWPTARLQRIGCSRSWAASIVFVLFVSIMLLAVFVVAPTAWQQGINLASDMPKMINKFNDFAHTLPARYPALVDAGIVDMMAENLRSKMSGLGDSVVKFSLASLIGLLTLAIYLILVPLMLFFLLKDKEQMLNAVRRVLPRNRGLAGQVWVEMNQQITNYIRGKVLEMVIVGIATYLVFFIMGMNYALLLAVLVGFSVLIPYIGAVIVTIPVVLVALFQWGIGADFWTLFVAYLVVQGLDGNLLVPVLFSEAVNLHPLVIILSVIIFGGMWGFWGVFFAIPLATLVKAVIHAWPEEFIPDAD

SEQ ID NO: 132748 - DNA, 1068 bp, Mannheimia succiniciproducens MBEL55E
  CDS (1)..(1068): transl_table=11
atgattgagatgctaaaaaattggtatctacgccgtttcagcgatccacaggcaatggggcttgccgctattttgttttttggctttgtcgcaatttatttttttagcgatttaatcgcgcctttattgattgccctggttttggcttatttattggaaatgccgatttcgtttctttccgataaattgaaattaccgcgttttctttccattctgctgattcttggcggttttattgcggtgaccattctgatgattttcggtttaatcccgacattgattaatcaaaccgttaatttattcagtgatttgccgaatatgttgaatttatcccatcaatgggtgatgtctttaccggagagttatcccgaattagtggattatcaaatgattgacagcctgtttatcacaattcgtgaaaaaacactggcgtttggtgaaagtgcggtcaaattttctctatcttcgttaatgaatttagtcaccattgggatttatgcgtttttagtgcctttaatggtgtttttcatggtgaaggatcaggatgaacttattgccggtttcagccgttttttaccaaaaaacagaacgttagcatccaaagtgtggcaggaaatgcaattacaaatcgccaattatattcgcggtaagttatttgaaattttaattgtcgccgtggtgagttatattattttcctcttcttcggcttgcgttatccgttactgcttgccgtagcggtgggattgtccgtactgattccttatatcggcgccgtattagtgaccattccggtggcattagtagcgattttccaattcggcgcaacgccgacattcggttatttaatgaccgcttatattgtcagccagttattggacggtaatttattagtgccttatttattttccgaggcggtgaatctacatccgttaaccatcattattgccgtgttgatttttggtggattatgggggttttggggtgttttttttgctatcccgctcgcaactttagttaaagcggtggtaaatgcctggccttccaatgaagacgaagctatttcttaa

SEQ ID NO: 132749 - protein, 355 aa, Mannheimia succiniciproducens MBEL55E
MIEMLKNWYLRRFSDPQAMGLAAILFFGFVAIYFFSDLIAPLLIALVLAYLLEMPISFLSDKLKLPRFLSILLILGGFIAVTILMIFGLIPTLINQTVNLFSDLPNMLNLSHQWVMSLPESYPELVDYQMIDSLFITIREKTLAFGESAVKFSLSSLMNLVTIGIYAFLVPLMVFFMVKDQDELIAGFSRFLPKNRTLASKVWQEMQLQIANYIRGKLFEILIVAVVSYIIFLFFGLRYPLLLAVAVGLSVLIPYIGAVLVTIPVALVAIFQFGATPTFGYLMTAYIVSQLLDGNLLVPYLFSEAVNLHPLTIIIAVLIFGGLWGFWGVFFAIPLATLVKAVVNAWPSNEDEAIS

SEQ ID NO: 132750 - DNA, 1089 bp, Methylococcus capsulatus str. Bath
  CDS (1)..(1089): transl_table=11
atgcagcatttgcgcgaatggctcagcgactggttcaggcggattcttcccaacgcacaggccgtctcgttcgcgatcctgctggtagtcggtttcatcgtcgtggtcagcctggccaagatgctgatgccggtattcgccgccggcatcatcgcctatctgctggacggcctggtggagatcggcgagcgcagaaagctgccgcggctggtttccgtgatcgtcgtctacctcctgttcctcgcgctgctgctggtcgtgttcatcggcctgctgccgctcctctatcagcagaccctgcagctgatcgagcaggcgccgagctgggtgaatcgcgggcaggtgctgatcatggaattgccggagcgctatccggactacatcacccaggaacaggtgaacgatctgatcggcgcgatccgggcggagctgatctcctacggtcagtccatgctgacctattcctacgcctccttggtcagcctcatcaccgtggtggtctatttcatcctggtgccgctcctggtgttcttcttcctgaaggacagggaccgcatcctgggctggttcacccaatacctgccgcgcgaccgcaacctgtccaaccgcgtatggaaagaggtggacatgcagatcggcaactacgtgcggggcaagttcgtcgagatcgtcatcctattcgcggccagtttcgtgaccttttccctgatgggcctgaactacgccttgctgctggcggtgctgatggggatttcggtcatcatcccctacgtcggcgcgaccttggtcacctttccggtcatgatcgtcgcgttctttcaatggggcgtgtcggatgatttctggtacctgatgctggcctacgccatcatccaggcgctggatggggtgatgctggtgcccttgctgttttccgaggtggtcaatctccaccccgtggccatcatcgtggcgatcctcttcttcggcggctggtggggattctggggcgtgttcttcgccatcccgctggcgacgctggtgaaagccgtactcagcgcctggccgcggttgggggaaggcgaaatgcccgcggccggcggcccatag

SEQ ID NO: 132751 - protein, 362 aa, Methylococcus capsulatus str. Bath
MQHLREWLSDWFRRILPNAQAVSFAILLVVGFIVVVSLAKMLMPVFAAGIIAYLLDGLVEIGERRKLPRLVSVIVVYLLFLALLLVVFIGLLPLLYQQTLQLIEQAPSWVNRGQVLIMELPERYPDYITQEQVNDLIGAIRAELISYGQSMLTYSYASLVSLITVVVYFILVPLLVFFFLKDRDRILGWFTQYLPRDRNLSNRVWKEVDMQIGNYVRGKFVEIVILFAASFVTFSLMGLNYALLLAVLMGISVIIPYVGATLVTFPVMIVAFFQWGVSDDFWYLMLAYAIIQALDGVMLVPLLFSEVVNLHPVAIIVAILFFGGWWGFWGVFFAIPLATLVKAVLSAWPRLGEGEMPAAGGP

SEQ ID NO: 132752 - DNA, 1071 bp, Pseudomonas syringae pv. syringae B728a
  CDS (1)..(1071): transl_table=11
atgttcaatgtgcttcgcaattgggtgcaacgctacttctctgacgaggaggcggtggtcctggcggttttgctgtttctggcgttcacccttgtcctgacgctgggcggcatgctggcgccggtcctcgccggtctggtgctggcgtttttgatgcacgggctggtcagtgccctggagcgcctgcgcatgcccgaaatggccgccgtcggtctggtgttcaccctgttcatcggcgtattgctggtgttcctgctggtattggtgccactgctctggcaccagttaatcactttgttcaacgaagccccgggtatgctcgccaaatggcaatccgtgctgctattgctgcccgagcgttatccgcacttggtgtccgacgagcaggtgctgctggccatcgaggtcgcccggggtgaagtgggcaagatcggtcaactggcgctgacgttctcgatctccagcctgccgctgctggtcaacctgatgatctatctggtgctggtgccgattctggtgttcttcttcctcaaggatcggcacatgatcggccgctgggcgcgtggctatctgccccgtgagcgcgctttgatcaaccgggtggcggatgagatgaagcgccagattgccaactatattcgtggcaaggtcatcgagatttttatctgtggtggcgtgacctacattgctttcgccgcgctcgggctcaattacgcagcgttgctggcaatgctggtcggcatatcggtggtcgtgccctatgtcggcgcggtagtggtcaccgtgccggtggcgttgatcggtctgttccagtggggctggggtgaccagttcatctacctgatgatcgctcacggcatcattcaggcactggatggcaacgtgctggtgccgctgctgttttccgaggccgtcaatctgcacccggtggcaatcatctgcgccgtgctgctgttcggcgggttgtgggggttctgggggatcttctttgcgattccgctggccacgctgttcaaggccgtgctcgacgcctggccgcgcaatgagccgacggtagccccgttgctttga

SEQ ID NO: 132753 - protein, 356 aa, Pseudomonas syringae pv. syringae B728a
MFNVLRNWVQRYFSDEEAVVLAVLLFLAFTLVLTLGGMLAPVLAGLVLAFLMHGLVSALERLRMPEMAAVGLVFTLFIGVLLVFLLVLVPLLWHQLITLFNEAPGMLAKWQSVLLLLPERYPHLVSDEQVLLAIEVARGEVGKIGQLALTFSISSLPLLVNLMIYLVLVPILVFFFLKDRHMIGRWARGYLPRERALINRVADEMKRQIANYIRGKVIEIFICGGVTYIAFAALGLNYAALLAMLVGISVVVPYVGAVVVTVPVALIGLFQWGWGDQFIYLMIAHGIIQALDGNVLVPLLFSEAVNLHPVAIICAVLLFGGLWGFWGIFFAIPLATLFKAVLDAWPRNEPTVAPLL

SEQ ID NO: 132754 - DNA, 1074 bp, Colwellia psychrerythraea 34H
  CDS (1)..(1074): transl_table=11
atgtttaagttatttagtgattggtatacacgtaagttttcagatcctcacgcggtcacgttggttgttattttagtctgtatagcattatttattgctttatttagcaatttattgatgccggtatttgttgcaatagcattagcttttttgttagaccttccagttaacaaactaatgcaaagctcaatgtcgcgttctagtgctacggtagtagttgttgttacttttctaagtttctccttattagctgtattaggtttaatgcctattatttggaagcaaagcagtaatttattgcaagaagttcctcatatgatcagtcaaggacaaggttacttattgaccttgccagagaaataccctgattttgtccacgtctcgcaaattgaaagtttcattgtcatggttaatgataatttacttgaatgggggcaggttgcacttagagcgtctttgaactcaatttccgatattgtcgccttaatggtttatttgatccttgtaccgttaatggtgttcttctttttaaaagataaaacagagttaatgagcagtattgcccacttcttgcctaaagaacgccgcatggcaattaaagtgagccaagaaatgaaccaacaaattttaaattatattcgcggaaaagtgattgaaataattattgttggggcatctactactattgcttttatctttcttgatttgcaatatgccttactattgggggttttagtcggcttatcagtacttgttccttatgtaggtgcaaccgttgtcaccttacctgtgctcttagttgctctttttcagttcggtatcagtagtgagtttggttacgttatgcttgcttatggtttaattcaggcgattgatggtaatgttattgtgcctttgctgttctctgaagctgttaatttacaccccgtggtcattattatcgcggtgatattttttggtggtttatggggattttggggcatattttttgcaatccctttggcaacattagtcaaagctgtcattaatgcttggccgtctattccgggacctgccgtgacgagtgaaagctaa

SEQ ID NO: 132755 - protein, 357 aa, Colwellia psychrerythraea 34H
MFKLFSDWYTRKFSDPHAVTLVVILVCIALFIALFSNLLMPVFVAIALAFLLDLPVNKLMQSSMSRSSATVVVVVTFLSFSLLAVLGLMPIIWKQSSNLLQEVPHMISQGQGYLLTLPEKYPDFVHVSQIESFIVMVNDNLLEWGQVALRASLNSISDIVALMVYLILVPLMVFFFLKDKTELMSSIAHFLPKERRMAIKVSQEMNQQILNYIRGKVIEIIIVGASTTIAFIFLDLQYALLLGVLVGLSVLVPYVGATVVTLPVLLVALFQFGISSEFGYVMLAYGLIQAIDGNVIVPLLFSEAVNLHPVVIIIAVIFFGGLWGFWGIFFAIPLATLVKAVINAWPSIPGPAVTSES

SEQ ID NO: 132756 - DNA, 1071 bp, Pseudomonas fluorescens PfO-1
  CDS (1)..(1071): transl_table=11
atgttcaaagtgttgcgcgactggattcagcgctacttctccgatgaggaagcagtggtgctggcggttttgctgtttctcgccttcaccgcggtgctgacactgggcggaatgcttgcgccggtgctggccgggatggtgctggcgtatctgatgcaggggctggtggtcacgctcgaacgtctgcgcgtgcccggaggggcggcggtcggtctggtgtttgcgctgttcatgggcgtgctgatggtgttcatcgtcgtggtgctgccgctgctctggcaccagttgatcaccctgttcaacgagttgccgggcatgctcgccaagtggcaatcgctgctgttgctgctgcccgagcgctacccgcatctggtttccgacgagcaggtgctgcaagcgatcgaagcggcgcggggcgagatcggcaagttcggccagtgggcgctgacgttctcgttgtcgagcttgccgctgctggtgaacatcatgatctatctggtgctggtgccgatcctggtgttcttcttcctcaaggaccgggcaatgatcggcgagtgggtgcgcggctatttgccgcgcgaacgggcgctgatcacccgggttgccgaggaaatgaaccggcagatcgccaactacattcgcggcaaggtcatcgagatcgtgatttgtggtggcgtgacctacatcgcgttcgttgcgctggggctcaactattcggcgctgctggccctgttggttggcgtgtcggtggtggtgccgtatgtcggggcggtggtggtgaccgtgccagtgctgctgattgcgctgttccagtggggctggagcgatcagttcatctatctgatggcggtctacgggatcattcagaccctggacggcaacgtgctggtgccgttgctgttttccgaagcggtcaatctgcacccggtggcgatcatctgcgcggtgctgttgttcggcgggctatggggattctggggcgtgttcttcgcgattccgctggcgaccctgttcaaggcagtgctggatgcgtggccgcgcaaggagccggcggtagcgccgctgctttga

SEQ ID NO: 132757 - protein, 356 aa, Pseudomonas fluorescens PfO-1
MFKVLRDWIQRYFSDEEAVVLAVLLFLAFTAVLTLGGMLAPVLAGMVLAYLMQGLVVTLERLRVPGGAAVGLVFALFMGVLMVFIVVVLPLLWHQLITLFNELPGMLAKWQSLLLLLPERYPHLVSDEQVLQAIEAARGEIGKFGQWALTFSLSSLPLLVNIMIYLVLVPILVFFFLKDRAMIGEWVRGYLPRERALITRVAEEMNRQIANYIRGKVIEIVICGGVTYIAFVALGLNYSALLALLVGVSVVVPYVGAVVVTVPVLLIALFQWGWSDQFIYLMAVYGIIQTLDGNVLVPLLFSEAVNLHPVAIICAVLLFGGLWGFWGVFFAIPLATLFKAVLDAWPRKEPAVAPLL

SEQ ID NO: 132758 - DNA, 1071 bp, Saccharophagus degradans 2-40
  CDS (1)..(1071): transl_table=11
atgattaccgtatttaaacgttggctcgaacgctatttcgctgacgaagaagctgttctggtggcagtgctattggtcgcgagcgttatcattatcgtaaccatgggcgtggtgcttgctcctatgattgccgcggtaattatcgcctttttaatgcagggtattgtggctcggttaaaaacttggggggttagccacattgttgcggtaagtattgcctttctgattttggccggttcgctggtagtgatgcttatttacctcttgccagcgctgtggcagcaggtgcttaacttgtttgcagaggctccgcgcatgttaaaagacggccagtcattactcttattgctgcctcaagaataccctgcgcttataaccgaggatcaagtaaaacagttaatgggcgctctgcgaacagatctcgcgcaagcaggccaaacggcggtttctttttcgctggcccagctgcctattattgttgctgcacttatctatttggtattggtgcctatattagtgttcttctttttaaaagatggccagcaaatgctgggttgggttgcgagtgtgttaccgcgtgagcgcccagtaatgcaaaagatttggcgagaaatgaaccaacaaatagccaactacgtacgcggcaaggtaattgaaattgttattgtaggtggggtgagcagcttaacgtttagcttgctaggtctgcgatatgcgctacttttaggtatcgcggtagggttttcggtgcttgtaccttatataggcgcggctattgtaacgctgcctgtggcggctattggttttttccaatttggctggggtacagaatttttgtacatcatgattgcttacaccattatccaagcattagatggcaacgtgcttgtgccgctattgttttctgaagcggtgaagatgcatccggttatgattatcctttccgtgttggtttttggcggtttctggggcttttggggtgtgttttttgcaattccgcttgcaactctgtgcaaggccattttaaatgcgtggccgactaaaggctcgcctattgcgggtaacgtatag

SEQ ID NO: 132759 - protein, 356 aa, Saccharophagus degradans 2-40
MITVFKRWLERYFADEEAVLVAVLLVASVIIIVTMGVVLAPMIAAVIIAFLMQGIVARLKTWGVSHIVAVSIAFLILAGSLVVMLIYLLPALWQQVLNLFAEAPRMLKDGQSLLLLLPQEYPALITEDQVKQLMGALRTDLAQAGQTAVSFSLAQLPIIVAALIYLVLVPILVFFFLKDGQQMLGWVASVLPRERPVMQKIWREMNQQIANYVRGKVIEIVIVGGVSSLTFSLLGLRYALLLGIAVGFSVLVPYIGAAIVTLPVAAIGFFQFGWGTEFLYIMIAYTIIQALDGNVLVPLLFSEAVKMHPVMIILSVLVFGGFWGFWGVFFAIPLATLCKAILNAWPTKGSPIAGNV

SEQ ID NO: 132760 - DNA, 1137 bp, Mesorhizobium sp. BNC1
  CDS (1)..(1137): transl_table=11
atgtcgataccggcacctcgggacagtgaggcggcgccgcgccgggcgctcgttcggcacgtcagcttttggctcatcgccgccgcgatcctgattctctttctttatgtgttcagttccatcctgctgcctttcctggcgggaatggtgcttgcatatttcctcgatccgatcgctgaccggctggagcgcgtcggcctctcgcgtttggccgccacggttctcatactctgcgcgttcattatcctgctggtgatcgcgttgatggtgatcatcccggttctcggaaaccagcttacggatttcacgatgcgcctgccggattacctcacccggcttcaggcgctcatcacaaatatcgatccgggatggttcgaggagaggatcggcgtcaatccccaatcgctgcgggaagggttgagcacgctcctcacgcagggcgccggtttcgtggccacgctgttcaaatccatctggagttcaggcgtggcgctcgtcaatctggtgagcctttttgtcgtcacgcccgtggtggccttctacatgctgctcgattgggaccatatggtctccaaggtcgatagctgggtgccgcgcaagcaggtggaaacggtccgccagatcgcgcgcgatatcaataccgccaccgccggtttcgtacgggggcaggggaccatctgcctcattctcggctgcttctatgccgtcgggctgacgctggtaggcctcaattttggtcttctcatcggtttcttcgcgggcctgataagcttcatcccttttgtaggttcgctcgtggggctcgcgctttccataggagtagccctcgttcagttctggccggaatggtattgggtgctggcggtagcggtcatcttctttgcgggacagttcgttgaaggaaatattctccagcccaagctcgtgggccggagcgtcggcctgcacccggtttggctgatgtttgctctttacgccttcggttttctcttcggctttgtcggcctgctgattgccgtgccggcatccgcggcgatcgccgttctcgtccgctttgcaatttcccgctatctcgcttcgccattatacggtggccatccgtctcttccggccgagcagaaaggccgtgatctttga

SEQ ID NO: 132761 - protein, 378 aa, Mesorhizobium sp. BNC1
MSIPAPRDSEAAPRRALVRHVSFWLIAAAILILFLYVFSSILLPFLAGMVLAYFLDPIADRLERVGLSRLAATVLILCAFIILLVIALMVIIPVLGNQLTDFTMRLPDYLTRLQALITNIDPGWFEERIGVNPQSLREGLSTLLTQGAGFVATLFKSIWSSGVALVNLVSLFVVTPVVAFYMLLDWDHMVSKVDSWVPRKQVETVRQIARDINTATAGFVRGQGTICLILGCFYAVGLTLVGLNFGLLIGFFAGLISFIPFVGSLVGLALSIGVALVQFWPEWYWVLAVAVIFFAGQFVEGNILQPKLVGRSVGLHPVWLMFALYAFGFLFGFVGLLIAVPASAAIAVLVRFAISRYLASPLYGGHPSLPAEQKGRDL

SEQ ID NO: 132762 - DNA, 1053 bp, Haemophilus somnus 129PT
  CDS (1)..(1053): transl_table=11
atgattgaaatgttaaaaaattggtatcatcgtcgctttaccgatccgcaggcgatggcacttttcgctattttattctttggctttgtagcaatttattttttcaatagtttattggctcccctcctgattgcgattgttttagcttatttacttgaatatcccgttcgcttattacatgaaaaactgaaactgcccagaattttggcgacatctcttatactcggtggctttatagcaatcacatttgtcatgacctttattttgatcccggtactttgggcacaaaccatcaaactggtcagcgacttaccacacatgttcaatcaacttaacgaatggttactttctttaccggagaattatcctgaattagtagattatcaaatgatagatgcgttttttatttcatttaaaaataaaatattaggcttaggtgaatctgcacttaaactgtccattgcctccttgttaaatcttgttaccttaggaatttatgcgtttcttgtgccattaatggtatttttcctcctcaaagataaaacggaattaattaactatattacaaactttctgccaaagaaccgcactcttgcctcaaaagtttggcgagaaatgcaacaacaaattgccaattatattcgcggtaaattacttgagattttaatcatagctttagtcagttatgccatctttctattttttggtttgaattattcattgttgctggcagttgccgtgggattatctgttttagtgccatacattggtgcagttttggtcactattcctgttgctttagttgccatgttccaattcggtgcaaccccaactttttggtatttaatggttgcttatgtgataagccaaatccttgacggaaatttactcgtgccatttttattttctgaagcagtgaatttacaccctctcactattattatcgccgttcttatttttgggggattatggggtttctggggaattttctttgcaattccattggcaacactagtcaaagccgttgtttcatcttggccgtcaacagaataa

SEQ ID NO: 132763 - protein, 350 aa, Haemophilus somnus 129PT
MIEMLKNWYHRRFTDPQAMALFAILFFGFVAIYFFNSLLAPLLIAIVLAYLLEYPVRLLHEKLKLPRILATSLILGGFIAITFVMTFILIPVLWAQTIKLVSDLPHMFNQLNEWLLSLPENYPELVDYQMIDAFFISFKNKILGLGESALKLSIASLLNLVTLGIYAFLVPLMVFFLLKDKTELINYITNFLPKNRTLASKVWREMQQQIANYIRGKLLEILIIALVSYAIFLFFGLNYSLLLAVAVGLSVLVPYIGAVLVTIPVALVAMFQFGATPTFWYLMVAYVISQILDGNLLVPFLFSEAVNLHPLTIIIAVLIFGGLWGFWGIFFAIPLATLVKAVVSSWPSTE

SEQ ID NO: 132764 - DNA, 1101 bp, Shewanella sp. MR-4
  CDS (1)..(1101): transl_table=11
atgtttagttttttctctcgttggtatcaagagcgctttagcgatcctcaggcggtgacgctgctggccattctcgtgggtcttgcccttgtgttgtattttgcgggcggcttattagcgcccttgttggtggccttggtgctggctttcttgcttgaatggcctgtggcacaaatgctgaaattggggattaaccgcacgacgggcgcttccttagtgctagtgctgtttttagggatagtggtggtgctgacctttggtcttatcccgagcgtgtggcgccaaggcgtgagtctgatgacagatttgccgagtatgatcgacaagggattacaaaccttgcagggattagcgacccagtatccgcagtttgtcagttcagatcagctcaatttaatggtcgccgagcttaaaaaattgctcgacacccagcacctgctcgatattgctaagcaactgattggttattcggcctccttattggtgctgatggtgtacgccattttagtgcccttattagtgttcttctttcttaaagataaagaccagctgatcagtggcagtaaacgttttttccctaccaatcgacagttggcccgcaaggtatggtttgagatgcaccagcagatcttcaactatatccgcggcaaggtgattgagattgtgattgtcggagtagcaagctacatcttctttgcctttatggggctgagatactcggccttactcggggtgttgaccggcttgtctgtgctcattccctatgtgggcgcgaccttagtcaccttgcccatcaccttggtggccttcttccagtgggggtttagctccgagtttggttatctgatgttaggttatggcattattcaggcgttagatggcaacgtgctggtgcctatcttgttttccgatgcggtggatttacaccccgtcatcatcattgccgccgtgttagtgtttggcggtttatggggtgtttggggcgtgttctttgccatcccattggcgtccttggtgaaagcggtgatcaatgcttggccgaaaaccgagattgaacctgtagcgataacacaggtgaaggcggattcggcagaagcctaa

SEQ ID NO: 132765 - protein, 366 aa, Shewanella sp. MR-4
MFSFFSRWYQERFSDPQAVTLLAILVGLALVLYFAGGLLAPLLVALVLAFLLEWPVAQMLKLGINRTTGASLVLVLFLGIVVVLTFGLIPSVWRQGVSLMTDLPSMIDKGLQTLQGLATQYPQFVSSDQLNLMVAELKKLLDTQHLLDIAKQLIGYSASLLVLMVYAILVPLLVFFFLKDKDQLISGSKRFFPTNRQLARKVWFEMHQQIFNYIRGKVIEIVIVGVASYIFFAFMGLRYSALLGVLTGLSVLIPYVGATLVTLPITLVAFFQWGFSSEFGYLMLGYGIIQALDGNVLVPILFSDAVDLHPVIIIAAVLVFGGLWGVWGVFFAIPLASLVKAVINAWPKTEIEPVAITQVKADSAEA

SEQ ID NO: 132766 - DNA, 1101 bp, Shewanella sp. MR-7
  CDS (1)..(1101): transl_table=11
atgtttagttttttctctcgatggtatcaagagcgctttagcgatccacaggcggtgacgttgctcgctattctggtgggtttaggcctaatgctgtattttgccggcggcttattagcgcccttgttggtggccttggtgctagcctttttgctcgagtggcctgtggcgcaaatgctgaaattggggattaaccgcacgacgggcgcttccttagtgctagtgctgtttttagggatagtcgttttactgacctttggccttatcccgagcgtgtggcgtcaaggcgtgagtctgatgacagatttgccgagtatgatcgacaagggattacaaactttgcagggattagcgacccagtatccgcagtttgtcagttcagaacagctcaatttaatggttgccgagcttaaaaaactgctcgacacccagcacctgctcgatattgctaagcaactgattggttactctgcctccttattggtgctgatggtgtacgccattttagtgcccttattagtgttcttctttctgaaggataaagaccagctgatcagtggcagtaagcgttttttccctactaatcgacaattagcccgcaaggtatggtttgagatgcaccagcagatcttcaactatatccgcggcaaggtgattgagattgtgattgtcggagtagcgagctacatcttctttgcctttatggggctgagatactccgccttactcggggtgttgaccggtttgtcggtgctcattccctatgtgggcgcgaccttagtgaccttgcccatcaccttggtggccttcttccagtggggctttagctccgagtttggttatctgatgttaggttacggcattattcaggcgttagatggcaacgtgctggtgcccattctgttttctgatgcggtggatttacaccccgtcatcatcattgccgccgtgttagtgtttggtggtttatggggagtttggggcgtgttctttgctatcccattggcgtccttggtgaaagcggtgatcaatgcttggccgaaaaccgagattgaacctgtcgcgataacacaggtgaaggcggactcggcagaagcctaa

SEQ ID NO: 132767 - protein, 366 aa, Shewanella sp. MR-7
MFSFFSRWYQERFSDPQAVTLLAILVGLGLMLYFAGGLLAPLLVALVLAFLLEWPVAQMLKLGINRTTGASLVLVLFLGIVVLLTFGLIPSVWRQGVSLMTDLPSMIDKGLQTLQGLATQYPQFVSSEQLNLMVAELKKLLDTQHLLDIAKQLIGYSASLLVLMVYAILVPLLVFFFLKDKDQLISGSKRFFPTNRQLARKVWFEMHQQIFNYIRGKVIEIVIVGVASYIFFAFMGLRYSALLGVLTGLSVLIPYVGATLVTLPITLVAFFQWGFSSEFGYLMLGYGIIQALDGNVLVPILFSDAVDLHPVIIIAAVLVFGGLWGVWGVFFAIPLASLVKAVINAWPKTEIEPVAITQVKADSAEA

SEQ ID NO: 132768 - DNA, 1080 bp, Alkalilimnicola ehrlichei MLHE-1
  CDS (1)..(1080): transl_table=11
atgcaactgatcagagactggttctcccgaacgttcaacgacccccaggtggtggtgctgggcctggtcctgctgctgggcttcggcgtggtgctcttcatgggcaatatgctggcgccggtgctggcgagcctggtgttggcctatctgctggaggggttcgtgcgctatctggagcggtggcgggtgccgcgactcgctgcggtcacggtggtgttcctcagttttaccgccttcctgctggccctcttcctggtcctcttcccagtgctctaccggcagttggtgcagctggttgagcagttgcctgcgatcctggcgcgggggcaggcgctgttgctgcaactgccggagcactatccccagttgttcagcgaggcccagatgcgggagatcatcgacggcctgcgccgcgagctcatcgactgggcccagcgggtggtgacctcgttctccttccagtcggtggtggtcatcgtcaccctgctggtctacatggtgctggtgccgttcatggtgttcttcttcctgaaggacaagcggctgatgctgcagtggctgagcgaccacctgccgcgggaccggggcctggcctcggaggtctggcgcgaggtggacctgcagatcggcaactacgttcgcggcaaattcgtcgagatcatcatcgtctgggcggtcaccttcatcaccttttcgttgttcgggctccagttcgccatgctgctggcggtgatggtggggctgtcggtgatcgtgccctacgtgggtgcggcggtggtgaccctgccggtggcgatcattgcctacttccagtggggggtcagcccggagttcgcctggttgatggtggcctatttcattatccaggcgctggacggcaacgtgctggtcccgttgctgttctccgaggcggtcaacctgcacccggtggccatcatcgtggccatcctggtctttggtggggtgtggggcttctggggggtgttcttcgccatcccgctggcgaccctgatccaggcggtcatcaaggcctggccgtccgccgccagccaccgggagcaagcccagggcgaggcctga

SEQ ID NO: 132769 - protein, 359 aa, Alkalilimnicola ehrlichei MLHE-1
MQLIRDWFSRTFNDPQVVVLGLVLLLGFGVVLFMGNMLAPVLASLVLAYLLEGFVRYLERWRVPRLAAVTVVFLSFTAFLLALFLVLFPVLYRQLVQLVEQLPAILARGQALLLQLPEHYPQLFSEAQMREIIDGLRRELIDWAQRVVTSFSFQSVVVIVTLLVYMVLVPFMVFFFLKDKRLMLQWLSDHLPRDRGLASEVWREVDLQIGNYVRGKFVEIIIVWAVTFITFSLFGLQFAMLLAVMVGLSVIVPYVGAAVVTLPVAIIAYFQWGVSPEFAWLMVAYFIIQALDGNVLVPLLFSEAVNLHPVAIIVAILVFGGVWGFWGVFFAIPLATLIQAVIKAWPSAASHREQAQGEA

SEQ ID NO: 132770 - DNA, 1074 bp, Pseudomonas aeruginosa UCBPP-PA14
  CDS (1)..(1074): transl_table=11
atgatcaaggtgttacgcgactggatgcagcgctacttctccgacgaggaggccgtggtgctggcgatcatgctggtgctcggcttcagcgtcatcctcgccttcggcgggatgctcgcgccggtactggcggcgatggtgatcgccttcctgatccagggcgtggtcggcatgctggaacgcttccgggtgccgcacctgttcgccgtgtggctggtctacagcttgttcctcggcttgctggcgctgttcctggtggtcctgctgccgctgctctggcagcaattgttcaccctgttcaacgaactgccgcggatgctcggcgaatggcagagcgtgctgctgatgctgcccgagcgctatcccagcctgatcagcgaggagcaggtgctcaaggccatcgagaccgcgcgcggcgaattcggccagatcggccagtgggcgctgacctcgtcgctggccagcctgccggtggtggtgaacgtcatgatctacctggtgctggtgccgatcctggtgttcttcttcctcaaggacaagaagcgcttccatacctggttccaccgctacctgccgcgcgagcgcgggctgatgaaacaggtctgggccgagatgaaccagcagatcgccaattacattcgcggcaaggtcatcgagatcgtcattaccggcgcggtgacctacatcgccttcgcctacctggggctcaactacgcagcgctgctggccctgctggtcggcctgtcggtggtggtgccgtacatcggcgcggtggtggtgagcgtaccggtggcgatgatcgccttcttccagtggggctggagcgaccagttcatctacctgatggtggcccacgcgatcatccaggcgctggatggcaacgtgctggtgccgctgctgttctccgaggcggtgaacctgcacccggtggcgatcatctgcgcggtgttgctgttcggcgggctctggggcttctggggcgtgttcttcgcgatccccctggcgaccctggtgaaagcggtgctggatgcctggcccaaggaccttcccgagactccggcagccacgcgatag

SEQ ID NO: 132771 - protein, 357 aa, Pseudomonas aeruginosa UCBPP-PA14
MIKVLRDWMQRYFSDEEAVVLAIMLVLGFSVILAFGGMLAPVLAAMVIAFLIQGVVGMLERFRVPHLFAVWLVYSLFLGLLALFLVVLLPLLWQQLFTLFNELPRMLGEWQSVLLMLPERYPSLISEEQVLKAIETARGEFGQIGQWALTSSLASLPVVVNVMIYLVLVPILVFFFLKDKKRFHTWFHRYLPRERGLMKQVWAEMNQQIANYIRGKVIEIVITGAVTYIAFAYLGLNYAALLALLVGLSVVVPYIGAVVVSVPVAMIAFFQWGWSDQFIYLMVAHAIIQALDGNVLVPLLFSEAVNLHPVAIICAVLLFGGLWGFWGVFFAIPLATLVKAVLDAWPKDLPETPAATR

SEQ ID NO: 132772 - DNA, 1101 bp, Shewanella sp. ANA-3
  CDS (1)..(1101): transl_table=11
atgtttagttttttctctcgttggtatcaagagcgctttagcgatcctcaggcggtgacgttgctcgccattctcgtcggccttgccctagtgttgtattttgcgggtggcttattagcgccgttactcgtggcgttagtgctggcctttttgctcgaatggcccgtggcgcaaatgctgaaattggggattaatcgcacgactggcgcttctttagtactcgtgctgtttttagggatagtggtgctgctgacctttggccttatcccgagcgtgtggcgccaaggcgtgagcttgatgacagatttgccgagtatgatcgacaagggcttacaaaccttgcagggattagcgacccagtatccgcagtttgtcagctctgagcagctcaatttaatggtcgccgagcttaaaaaactgctcgatacccagcatctgctcgatattgccaagcagttgattggttattctgcctcgttattggtgctgatggtgtacgccattttagtgcccttattagtgtttttctttctgaaggataaagaccagctgatcagtggtagcaaacgttttttccctactaatcgacaattagcccgcaaggtatggtttgagatgcaccagcagatcttcaactatatccgcggcaaagtgattgagattgtgattgtcggggtggcgagctacatcttctttgcctttatggggctgagatactcggctttactcggggtattgactggtttgtcggtgctcattccctatgtaggcgcgaccttagtcactttacctatcatgttggtggccttcttccagtggggctttagctccgagtttggctatttgatgttaggttacggcattattcaggcgttagatggtaacgtgctggtgcctattttgttttccgatgcggtggatttacacccagtcatcattatcgccgccgtgttggtgtttggtggtttatggggcgtttggggcgttttctttgctattccattagcctccttggtgaaagcggtgatcaacgcttggccgaaaaccgagattgaacccgtggcgataacgcaggtgaaggcggattcggcagaagcctaa

SEQ ID NO: 132773 - protein, 366 aa, Shewanella sp. ANA-3
MFSFFSRWYQERFSDPQAVTLLAILVGLALVLYFAGGLLAPLLVALVLAFLLEWPVAQMLKLGINRTTGASLVLVLFLGIVVLLTFGLIPSVWRQGVSLMTDLPSMIDKGLQTLQGLATQYPQFVSSEQLNLMVAELKKLLDTQHLLDIAKQLIGYSASLLVLMVYAILVPLLVFFFLKDKDQLISGSKRFFPTNRQLARKVWFEMHQQIFNYIRGKVIEIVIVGVASYIFFAFMGLRYSALLGVLTGLSVLIPYVGATLVTLPIMLVAFFQWGFSSEFGYLMLGYGIIQALDGNVLVPILFSDAVDLHPVIIIAAVLVFGGLWGVWGVFFAIPLASLVKAVINAWPKTEIEPVAITQVKADSAEA

SEQ ID NO: 132774 - DNA, 1134 bp, Magnetospirillum magnetotacticum MS-1
  CDS (1)..(1134): transl_table=11
atgtcccggccggacgaactgggtaaggacgagacctcgatgcgcggccgggcaatcatcgggctctccattctcgcggtcctgatcttcctgctctacgaactgcgggaggtgatgctgcccttcgtggcggggctggcgctcgcttatctgctcgatccgctggccgaccggctggagcggctcggcctcgggcggctcgccgcgaccctgctgatcctggcgggcttcgtggtcggcttcgtggtgctgctcatcatcgtggtgccgctcgccgccagccagatcgcctccctcgtgaacgccctgccggccatggtcgcccggctgcagagcatcctcgtggagcgcgccgggccgctgctgcagcgggtgggcggcgccgaggtcgtcaacgagctgcaatcctcggtcggcaccctggtcggccagggcggcacgtggttcctggccttcctcaagtcgctctggacggggagccaggcgctcgtctccatcgcctcgctgctcgtggtcaccccggtcgtcgccttctacgtgctgcacgattgggaccggatgatcgccaccctcgacggttgggtgccgccgcgccaccgcccgacggtgcggcggctggccggggagatcgacggggccgtcaccggcttcgtgcgcgggcagagcttggtctgcctgatcctcggcagcttctacgcggtcggcctgttcctggtcgggctgaatttcggcgtgctgatcgggctgatctcgggctttctcaccttcatcccctatgtcggcacgctcaccggcttcatgctctccatcggcgtcgccctggtgcaatggtggccgagcggcgactggctgcatatcggcctcaccctcggcgtgtttctggtcgggcagttcctggaagggaacgtcgtctcgcccaagctggtgggcgattcggtcggccttcatccggtctggctgatgttcgcgctgctcgccttcggctcgctgttcggtttcctcggcctcctgctcgccgtgccggtcgccgcctccatcggcgtcgtggtgcgcttcggcatcgagcgctacctggaaagccggctctaccgctccgacgggccggtgctcatcaccgatggagaagaggtttga

SEQ ID NO: 132775 - protein, 377 aa, Magnetospirillum magnetotacticum MS-1
MSRPDELGKDETSMRGRAIIGLSILAVLIFLLYELREVMLPFVAGLALAYLLDPLADRLERLGLGRLAATLLILAGFVVGFVVLLIIVVPLAASQIASLVNALPAMVARLQSILVERAGPLLQRVGGAEVVNELQSSVGTLVGQGGTWFLAFLKSLWTGSQALVSIASLLVVTPVVAFYVLHDWDRMIATLDGWVPPRHRPTVRRLAGEIDGAVTGFVRGQSLVCLILGSFYAVGLFLVGLNFGVLIGLISGFLTFIPYVGTLTGFMLSIGVALVQWWPSGDWLHIGLTLGVFLVGQFLEGNVVSPKLVGDSVGLHPVWLMFALLAFGSLFGFLGLLLAVPVAASIGVVVRFGIERYLESRLYRSDGPVLITDGEEV

SEQ ID NO: 132776 - DNA, 1062 bp, Actinobacillus pleuropneumoniae serovar 1 str. 4074
  CDS (1)..(1062): transl_table=11
atgttcgagatgttccaatcttggtataagcaaaaatttaatgatcctcaaacagttgcgctgttaggaatccttttgattggatttggcattatctatttctttagtgatttgattatgcctttgctcattgctatcgttttcgcttatttattagaatggccgatcaaattactgactcaaaaacttaaattccctcgcttactcagtctgattttagttctgggtagttttatttccttatcgacttttctttttgtcgtaatgttaccgactttatggaatcaggcggtaacgtttattcgtgatttaccctcgatgctgaacttattaaatgcgtggttggaagccttaccggaacattatcccgaattaattgattatgccatgctcgattcgttgatgaatatgctaaaggagaaaattttagggttcggcgaatctttattagccttatcggtcaattccattatcagcttggtcggattaggcatttatgcttttcttgtgcctttaatggttttctttctacttaaagacaaacctttattcgtacgcggttttatcaaatttctaccgaaaaaccgccgcttggctgcaaatgtttggtttgaaatgcagcaacaaattgccaattatattcgaggaaaagtccttgaaattttaattgtcggtatcgttacctatgcaatacttttatttttcgatttacgttatccgttattactttccgtcgcggtaggtttatccgtacttataccttatatcggagcggtattggtaacgataccggtcgcactggttgcgttatttcaattcggcttgtccaccgacttttattatttattgttagctttcgtgattagccaattgttagacgggaacttagtcgtaccgtttttattttcggaagcggtgaatctacatcctttaacaattattgtcgccgtgctgattttcggtggtttgtggggattttggggcgtattttttgccattccgttggcaacattggtcaaagccgttataaacgctttaccgtctaatgaggaagaagtttga

SEQ ID NO: 132777 - protein, 353 aa, Actinobacillus pleuropneumoniae serovar 1 str. 4074
MFEMFQSWYKQKFNDPQTVALLGILLIGFGIIYFFSDLIMPLLIAIVFAYLLEWPIKLLTQKLKFPRLLSLILVLGSFISLSTFLFVVMLPTLWNQAVTFIRDLPSMLNLLNAWLEALPEHYPELIDYAMLDSLMNMLKEKILGFGESLLALSVNSIISLVGLGIYAFLVPLMVFFLLKDKPLFVRGFIKFLPKNRRLAANVWFEMQQQIANYIRGKVLEILIVGIVTYAILLFFDLRYPLLLSVAVGLSVLIPYIGAVLVTIPVALVALFQFGLSTDFYYLLLAFVISQLLDGNLVVPFLFSEAVNLHPLTIIVAVLIFGGLWGFWGVFFAIPLATLVKAVINALPSNEEEV

SEQ ID NO: 132778 - DNA, 1050 bp, Haemophilus influenzae R2846
  CDS (1)..(1050): transl_table=11
atgctagaaatgttaaaaagctggtactcacgccgtttaagtgatccacaagcaatgggactattagctatattattatttggctttatctccatttatttttttggagatttaattgcgcctttgttgattgctctagtactatcctatttacttgaaataccaatcaattttttaaatcaatatttaaaatgcccaagaatgttagcgacaattcttattttcggtagttttattggtctagcagcagttttctttttggtattggtgccaatgttgtggaatcaaactatttccttattaagtgatttgcccgctatgtttaataaatctaatgaatggctactcaatttacccaaaaattatcctgaacttattgattattcaatggttgattctattttcaattctgtgcgagaaaaaatccttggttttggcgaatctgctgtaaaactttctttagcctctattatgaacttggtttctttagggatttatgcctttttagtgccattaatgatgttttttatgttgaaggataaatcagaacttttacaaggcgttagccgtttcttaccgaaaaatagaaacttagctttcaaagtatggaaagaaatgcaacagcaaatttctaattacattcacggaaaattattagaaatactgattgtcactttaatcacttatattattttcttaattttcgggctaaattatccgctcttattggcttttgcggtgggtctttcagttctcgtcccttatattggcgcagttattgtcacgattcctgttgcattggttgctttattccagtttggaatcagcccaacattttggtacatcattattgcttttgctgtaagccaacttttagatggaaatctccttgtgccttatttattttctgaagccgtcaatttacatccactaattattatcatttcagtattaatttttggcggtttatggggattttggggtgtattctttgccattcctttagccactttagtaaaggccgtaataaatgccttacctcaagattaa

SEQ ID NO: 132779 - protein, 349 aa, Haemophilus influenzae R2846
MLEMLKSWYSRRLSDPQAMGLLAILLFGFISIYFFGDLIAPLLIALVLSYLLEIPINFLNQYLKCPRMLATILIFGSFIGLAAVFFLVLVPMLWNQTISLLSDLPAMFNKSNEWLLNLPKNYPELIDYSMVDSIFNSVREKILGFGESAVKLSLASIMNLVSLGIYAFLVPLMMFFMLKDKSELLQGVSRFLPKNRNLAFKVWKEMQQQISNYIHGKLLEILIVTLITYIIFLIFGLNYPLLLAFAVGLSVLVPYIGAVIVTIPVALVALFQFGISPTFWYIIIAFAVSQLLDGNLLVPYLFSEAVNLHPLIIIISVLIFGGLWGFWGVFFAIPLATLVKAVINALPQD

SEQ ID NO: 132780 - DNA, 1050 bp, Haemophilus influenzae R2866
  CDS (1)..(1050): transl_table=11
atgctagaaatgttgaaaagctggtactcacgccgtttaagtgatccacaagcgatgggactattagctatattattatttggctttatctccatttatttttttggagatttaattgcacctttgttgattgctctagtactatcctatttacttgaaataccaatcaattttttaaatcaatatttaaaatgcccaagaatgttagcgacaattcttattttcggtagttttattggtctagcagcagttttctttttggtattggtgccaatgttgtggaatcaaactatttccttattaagtgatttgcccgctatgtttaataaatctaatgaatggctactcaatttacccgaaaattatcctgaacttattgattattcaatggttgattctattttcaattctgtacgagaaaaaatccttggttttggtgaatcagctgtaaaactttctttagcctccatcatgaacttggtttctttaggaatttatgcctttttagtaccattaatgatgttttttatgttgaaggataaatcagaacttttacaaggcgtgagccgtttcttaccgaaaaatagaaatttagccttcaaagtatggaaagaaatgcaacagcaaatttctaattacattcacggaaaattattagaaatactgattgttactttaatcacttatattattttcttaattttcgggctaaattattcgctcttattggcttttgcggtgggcctttcagttctcgtcccttatattggcgcagttattgtcacgattcctgttgcattggttgctttattccagtttggaatcagcccaacattttggtacatcattattgcttttgctgtaagccaacttttagatggaaatctccttgtgccttatttattttctgaagccgtgaatttacatccactaattattatcatttcagtattaatttttggcggtttatggggattttggggtgtattctttgccattcctttagccactttagtaaaggccgtaataaatgccttacctcaagattaa

SEQ ID NO: 132781 - protein, 349 aa, Haemophilus influenzae R2866
MLEMLKSWYSRRLSDPQAMGLLAILLFGFISIYFFGDLIAPLLIALVLSYLLEIPINFLNQYLKCPRMLATILIFGSFIGLAAVFFLVLVPMLWNQTISLLSDLPAMFNKSNEWLLNLPENYPELIDYSMVDSIFNSVREKILGFGESAVKLSLASIMNLVSLGIYAFLVPLMMFFMLKDKSELLQGVSRFLPKNRNLAFKVWKEMQQQISNYIHGKLLEILIVTLITYIIFLIFGLNYSLLLAFAVGLSVLVPYIGAVIVTIPVALVALFQFGISPTFWYIIIAFAVSQLLDGNLLVPYLFSEAVNLHPLIIIISVLIFGGLWGFWGVFFAIPLATLVKAVINALPQD

SEQ ID NO: 132782 - DNA, 1080 bp, Sulfitobacter sp. EE-36
  CDS (1)..(1080): transl_table=11
atgggcctgcctatcagagatcagatgaaatactggggtgtcgcgggggcgctttttctggtgttcctgtggttcaccggtgacgtgctgctgccgtttctgatcggggcggcgattgcctatttcctggatcccgtggccgaccggcttgaagccatggggctgagccgcgcgatggccacgatggtgatcacgcttgtcgccctgctgatctttgtgctgatggcgctgctggtgatcccgaccttgatcaatcaggccatcaacctgttcgaggtcgcccccgagctgacccgcaatttcaccaatttcctgaccgaacgtttccccgccctgctggacgaaggatcgacgctgcgcagctcgatcaactctatcgggtcgaccattcaggaacggggcggcgaggtgctaaacacggcgatctcctcggcggcgtcgctgctgaacgtgatggtgctgtttgtgatcgtgccggtggttgccgtctatctgctgctggactgggaccgtatggtcgcccagatcgaccgtttgctgccacgcgaccacgcgccggtgatccgtcgtcttgcgcgtgacatcgaccgcacgctggcagggttcatccgcggcatgggcaccgtctgcctgattttaggcgcctattatgccatcgcgctgatgctggtggggctgcaattcggccttgtcgtgggctttatcgcgggtctggtcaccttcatcccctatctcggcgcggttctgggcggtgccttggccatcggtctggcgctgttccagttctggggggattggttctcgatcgggatggtggcgggcatcttcgtgcttggccagatgattgaaggcaacttcctcacccccaagctggtgggcaattcggtcgggctgcatccggtctggctgatcctcgcgctgtcggtctttggctccttgttcggctttgtcggcatgctggccgccgtgccgattgccgccgcccttggcgtgattgcacgcttcgcgaccgagcaatatgtcgaaagctcgctctatcagggcacgcagcgcaagaccttggacgaaacggcggactga

SEQ ID NO: 132783 - protein, 359 aa, Sulfitobacter sp. EE-36
MGLPIRDQMKYWGVAGALFLVFLWFTGDVLLPFLIGAAIAYFLDPVADRLEAMGLSRAMATMVITLVALLIFVLMALLVIPTLINQAINLFEVAPELTRNFTNFLTERFPALLDEGSTLRSSINSIGSTIQERGGEVLNTAISSAASLLNVMVLFVIVPVVAVYLLLDWDRMVAQIDRLLPRDHAPVIRRLARDIDRTLAGFIRGMGTVCLILGAYYAIALMLVGLQFGLVVGFIAGLVTFIPYLGAVLGGALAIGLALFQFWGDWFSIGMVAGIFVLGQMIEGNFLTPKLVGNSVGLHPVWLILALSVFGSLFGFVGMLAAVPIAAALGVIARFATEQYVESSLYQGTQRKTLDETAD

SEQ ID NO: 132784 - DNA, 1074 bp, Oceanicola batsensis HTCC2597
  CDS (1)..(1074): transl_table=11
atggcgctgccggtcaaggatcaactgaagtactgggggatcgccgcggcgatcttcctgctggcgctgtggtggatgggcgacgtgatcctgcccttcctgctggggggcgcggtggcctatttcctcgatccggtggccgaccgcatcgaagacgccggggcaagccgcgcggtggccacggcgatcatcacgctcttcgggctgctgatcttcgtgcttctggcgcttctcgtcattccgaacctgatcgaccaggcgatccagctcttcgacacggttccgaaggtgctgcacaacttccaggcgttcctgacctcgcgctttcccgagcttctggacgacggctcgacgatccgccggtcgctgacctcggtcggcgaaaccatccagtcccggggcgggcagctgctcgagacggctctcacctcggtcgggtcgctgatcaacatcgtgatgctcttcgtcatcgtgcccgtggtcgccttctacctgctctacgactgggaccggatgatggaggatatcgacgacctcctcccacgcgaacacgcgcccgcgatccgccgcctcgcgcgcgagatcgacgagacgctggcctcgttcatccggggcatgggcacggtctgcctgatcctcggcacctactacgccatcgccctgatgcttgtcggactgcagttcggcctcgtggtcggggcggtcgcgggcctgatcacctttatcccctacgtgggcgcgctggtcggcggcgctctggccatcggtctcgcgctcttccagttctggggggactgggtctcgatcggactggtggcgggcatcttcgtcctgggacaggtggtcgaaggcaacatcctgacgccgaagctcgtcggggacagcgtgggcctgcacccggtctggctgatcttcgccctgtcggtcttcgggtcgctcttcggcttcgtggggatgctggtggcggtgccggtggcggcggcgatcggcgtcctgatgcggttcgtggtctcgcagtacaaggagagccgtctgtatcgcggtctcgaagacggctcctccggacgcgactga

SEQ ID NO: 132785 - protein, 357 aa, Oceanicola batsensis HTCC2597
MALPVKDQLKYWGIAAAIFLLALWWMGDVILPFLLGGAVAYFLDPVADRIEDAGASRAVATAIITLFGLLIFVLLALLVIPNLIDQAIQLFDTVPKVLHNFQAFLTSRFPELLDDGSTIRRSLTSVGETIQSRGGQLLETALTSVGSLINIVMLFVIVPVVAFYLLYDWDRMMEDIDDLLPREHAPAIRRLAREIDETLASFIRGMGTVCLILGTYYAIALMLVGLQFGLVVGAVAGLITFIPYVGALVGGALAIGLALFQFWGDWVSIGLVAGIFVLGQVVEGNILTPKLVGDSVGLHPVWLIFALSVFGSLFGFVGMLVAVPVAAAIGVLMRFVVSQYKESRLYRGLEDGSSGRD

SEQ ID NO: 132786 - DNA, 1068 bp, Pseudoalteromonas tunicata D2
  CDS (1)..(1068): transl_table=11
gtgtttgaatttgtaaagttatggtacgaaaggaaattttctgatcctcattcagtaacgttgttttttgtgagcattgcgattgtggctttgctgtattttgtcggctcgctgattattcctgtgctggtggccgttgtcatcgcattcttgcttgaatggccggtgcaaaaaatgactcaaattggcagctcgcgattaaccgcttctgctttagttatgttgtgttttagcagtttagcgattgcatcgtttattggcattgtgccggtgctttggcagcagttagctaattttctgcaagaagcccctcatatgctcgaaaaaggaaaagcatatttattacagttaccggctcaatacccagagctgattacttcgatgcaaattcaaactttagtcggcgcagttgaaaataagtttattgaatttggccaaattattttatcgagctcgctcacatcacttaaagatattgtagcgttattgatttatttgattttggtgcctttattggtcttttttatgctcaaagataaaaaagaattagtaggaggtgtaagcagattactgccagagcaacggcgcttattgagccaggtgtggcgtgaaatgcatcagcaaattatgaattatattcgtggcaaagtgattgaaattttaattgtgggtggcgtttcgtttattacttttgcgctatttgatttacgttatgcagcactacttggcgcgctggttggtttttcagtattaattccatttgttggcgctgcgttagtgaccattcctgttgctgctgtagctttatttcagtttggcttagcacctgagttttggtacatcattattgcttacggcattattcaagcgttagacggtaatgtattagtccccgtgcttttttctgaagcagtcgatttaaaccctgtttatataatagtggcggtgttattttttggtggtttgtggggtttttggggcgtgtttttcgcaatacctttggcatcactggtgcgtgcattaatcaatgcttggtcgagtgaacaagaaaaagtcgcagtggaataa

SEQ ID NO: 132787 - protein, 355 aa, Pseudoalteromonas tunicata D2
MFEFVKLWYERKFSDPHSVTLFFVSIAIVALLYFVGSLIIPVLVAVVIAFLLEWPVQKMTQIGSSRLTASALVMLCFSSLAIASFIGIVPVLWQQLANFLQEAPHMLEKGKAYLLQLPAQYPELITSMQIQTLVGAVENKFIEFGQIILSSSLTSLKDIVALLIYLILVPLLVFFMLKDKKELVGGVSRLLPEQRRLLSQVWREMHQQIMNYIRGKVIEILIVGGVSFITFALFDLRYAALLGALVGFSVLIPFVGAALVTIPVAAVALFQFGLAPEFWYIIIAYGIIQALDGNVLVPVLFSEAVDLNPVYIIVAVLFFGGLWGFWGVFFAIPLASLVRALINAWSSEQEKVAVE

SEQ ID NO: 132788 - DNA, 1086 bp, Photobacterium sp. SKA34
  CDS (1)..(1086): transl_table=11
atgttacacatgctaaaccgctggtatcagcgtcgattttcagacccccacgctgtaagccttgttgttattcttctcggcggcttccttactatttactttttgggcagtttaattacgccgttattagtcgctattgtcttggcttacttattagagtggccagttgcgaggttaaataagctagggatgccaagaaccctttcagtcgctatcgtgttattggtctttgccagtttaatggtgcttgctttatttggtttagtgccgacgatttggcatcaaattaccaatttaagtgctgatgtgccgaagatgtttaacgaccttcaaatctatgtatctagcttaccggaacgctaccccgattttgttcaaccggctcaagtggttgatttaatgaatacactacgtgagaaagtgttagggctgggcgaaagtgttgtaaaaggctcactggcatcattagtcagtttagcaacgataggggtatatctaatcttagtgccgttgcttgttttctttttacttaaagataaagacgaaatgctgcgcacgttattaaacgttttacctaaaaatcgtcgtttagccagcaaagttggcagcgaaatgaatcagcagatctctaattatattcgtggcaaagtaactgaaattattattgttggcattgcaagttatgtcacatttgaagttatggatttacgctatgccgtattattaagtgtgttagtagggctttctgttcttataccttacattggcgcggctgctgtaacggttcctgttgctatggtcggattattccaatggggctggacgccagatttttggtggctattactggcatatggcattattcaaatgttagatggcaatgtattagtaccgattctattttctgaagcggtaaatctacatcctgtcgcaattattgttgcggtgttggtttttggcggattatggggattttggggggtattttttgctatcccattagcgacattagtcaaagctgtgtggggagcgcttcctgcgagtgataataatttatcatcttccgatgtgtcagaaaaagtgtag

SEQ ID NO: 132789 - protein, 361 aa, Photobacterium sp. SKA34
MLHMLNRWYQRRFSDPHAVSLVVILLGGFLTIYFLGSLITPLLVAIVLAYLLEWPVARLNKLGMPRTLSVAIVLLVFASLMVLALFGLVPTIWHQITNLSADVPKMFNDLQIYVSSLPERYPDFVQPAQVVDLMNTLREKVLGLGESVVKGSLASLVSLATIGVYLILVPLLVFFLLKDKDEMLRTLLNVLPKNRRLASKVGSEMNQQISNYIRGKVTEIIIVGIASYVTFEVMDLRYAVLLSVLVGLSVLIPYIGAAAVTVPVAMVGLFQWGWTPDFWWLLLAYGIIQMLDGNVLVPILFSEAVNLHPVAIIVAVLVFGGLWGFWGVFFAIPLATLVKAVWGALPASDNNLSSSDVSEKV

SEQ ID NO: 132790 - DNA, 1092 bp, Oceanospirillum sp. MED92
  CDS (1)..(1092): transl_table=11
atgcgccagatattaagtaagtggattgagcgttatttctcagatgaagaagccttgctgctctttgttctgttaggcgcttcactcatcgttattctgactttaggtcaggctcttgcgccggtttttgcggggatcattctggcctttctgatgcagggcggagttaataggttaagacagcttaatgttccgcatcttctatcggtcattttagtctttttggcgtttgtcggtggtcttggggcactgttgctgatcgttatgcctttggcctggaaacagtcggttaatttatttaatgagctgcctggtattatgtcggaaatccagtcagttctgttgttgttaccagaacgctatcctggcttcatttctgaagagcgggtcttagagcttatcaaccttgcggcggctgagttatcgcagatggggcaatgggttgtgactttttcccttaattcgattaccagcattattgctctgctaatttatctggttctggtgcctattttagtgtttttcttcctgaaagatggttcatctctgacgcgttggtgggtttcatttcttccggaaaagcgcgacatgatgactcaggtttggcacgaaatggatgatcagatcgcaaattacatacgcggtaaggttattgagatcattgtggtgggttcggtaacctacattacgtttattttcctgggtattaactatgcggcgcttctgggtattctggtgggcctgtcggttctaattccctatattggtgcggcacttgtgactctgccagtggctctgattggtttcttccagtgggggtggagcagtgaatttatgtacctgatgattgcgtacggtattattcaggcgctagatgggaacgtattggtaccgttgctgttctcggaagctgttaatcttcatcccgtggcaattattgtggcagtgctggtgtttggtggtctttggggcttttggggtgttttctttgcgatacctcttgcgacattgtttaaagccattctcagtgcatggcctaaagctaagcagcagcccatgatagaagctgaagcagtcgctgaagctgagtaa

SEQ ID NO: 132791 - protein, 363 aa, Oceanospirillum sp. MED92
MRQILSKWIERYFSDEEALLLFVLLGASLIVILTLGQALAPVFAGIILAFLMQGGVNRLRQLNVPHLLSVILVFLAFVGGLGALLLIVMPLAWKQSVNLFNELPGIMSEIQSVLLLLPERYPGFISEERVLELINLAAAELSQMGQWVVTFSLNSITSIIALLIYLVLVPILVFFFLKDGSSLTRWWVSFLPEKRDMMTQVWHEMDDQIANYIRGKVIEIIVVGSVTYITFIFLGINYAALLGILVGLSVLIPYIGAALVTLPVALIGFFQWGWSSEFMYLMIAYGIIQALDGNVLVPLLFSEAVNLHPVAIIVAVLVFGGLWGFWGVFFAIPLATLFKAILSAWPKAKQQPMIEAEAVAEAE

SEQ ID NO: 132792 - DNA, 1122 bp, marine gamma proteobacterium HTCC2207
  CDS (1)..(1122): transl_table=11
atgaaaaagatacttcataaatggattgagcgctattttggcactgaagaggctctgctactcaccattatactaattgtctcgctagtagttttcgccacgctgggcgcggtgttggggcctctttttgcggccttgattctatcttttctactgcagggtgtggtcaatacgctggtacgctacggtgtgccgcgtgctatggcactagtgagcacctatctgctttttgttgctggttttgtctcggtgattgtcggcttgattccgattatcggacgccagacatctctacttataggtgagctacccaatatgattgctgggctgcgggatttagccgtggctatacccgagcgctacgctgaatatgttagtccggaacagtttcaatccattactcagcgcctctcggaagaggtggggcgtcttctcgagcaggctctgtcgttttcgatcagtagctttcccggcattattggggtgatgatctatttggtattggtgcctttattagtgatgtttatgctcaaagataaggaccagctattactgtttttaagtaatctgttaccagaagagcgctcagtgatgcgaaccatttggaatgaaatggatatgcagttcactaactatgtgcgcggcaaggcgatagaaatactgattattggtctggtctcctatgctgtgtttctctggctcggtgttaactacgctgcgctgttagcgctgctggtgggtctctctgtgttggtaccctatatcggggctaccgtggtaaccattcctgtgctcttggtgggctatatgcagtggggctttagcaatgatttcttctggttgttcggtgcctacggtgtgattcaatttctcgatggcaatctattggtaccgctattgttttccgaagtggttaacctgcatccggtgttcattattgtgtcggtactgttgtttggcggtatttggggtttctggggtgtcttctttgctattcctttagccactttggtcaaggcagtatttaacgcctggccgcgaagggctcaacaggaattgagtttgcagccgccgctagacttagcccctgagaccgccggtgaggtaggtcccagcgcctag

SEQ ID NO: 132793 - protein, 373 aa, marine gamma proteobacterium HTCC2207
MKKILHKWIERYFGTEEALLLTIILIVSLVVFATLGAVLGPLFAALILSFLLQGVVNTLVRYGVPRAMALVSTYLLFVAGFVSVIVGLIPIIGRQTSLLIGELPNMIAGLRDLAVAIPERYAEYVSPEQFQSITQRLSEEVGRLLEQALSFSISSFPGIIGVMIYLVLVPLLVMFMLKDKDQLLLFLSNLLPEERSVMRTIWNEMDMQFTNYVRGKAIEILIIGLVSYAVFLWLGVNYAALLALLVGLSVLVPYIGATVVTIPVLLVGYMQWGFSNDFFWLFGAYGVIQFLDGNLLVPLLFSEVVNLHPVFIIVSVLLFGGIWGFWGVFFAIPLATLVKAVFNAWPRRAQQELSLQPPLDLAPETAGEVGPSA

SEQ ID NO: 132794 - DNA, 1089 bp, delta proteobacterium MLMS-1
  CDS (1)..(1089): transl_table=11
atgcttgccatgctgcggctttggcatcatcgttatttcagtgacccccaggcggtgatcctcaccttattgctgctcaccggtgctctggtgctggttttcttcgggcggatgctggcgccgctgctcaccgccattatcatcgcctacctcctggaagggccgattgcctggatggaagagcggctgggggtgcgccggctggtcggggtcagttgcgtgctggccctttttttcctactggtgctggtatcggccctgaccgtttttccggtactctggacccagcttgccgacctgctcaaggaaattccccattatctggcccggggccagcaggtgctgcttaatctgcccgaacgttacccggtgatcaccgaagagcaggtgcgggagctggtgggcaccatccgcaaccaggtaggagctctgggccagcatgtactggcgatttcgctggcctcggtggtcaacatcattaccctgctggtttacctggtactggtgcctttcctggtgtttttcctgctcaaggataaagatctgatcatgaactggatcagcctgcgattgccccgggagcggggggcggcccaggatctatggcgtgatctcgatgcccagatgggtaattacgtgcggggcaaattctgggaaatcctgatcgttggcgggataaccttcatctcctttaccatcctgcgggttgattacgccgtgctcctggccaccctgaccgggctgtcggtgctggtcccctatgtcggggcggtggtggtgaccatcccggtgttgctggtcggttattttcagtggggcgtgggcagcgaactggcctggctgttgatcgcctacggcatcattcagaccctggatggtaatgtcttaaaccccctgctttttgccaaagcggtcaatctccatccggtggcgattatcggcgccatcctgatcttcggcggcttgtggggcttctggggtattttctttgccatccccctggccactttggtcaacgccttaattatcacctggccccggaaccccgacccggaggaagaagaagcccaggcccagcctggaggttaa

SEQ ID NO: 132795 - protein, 362 aa, delta proteobacterium MLMS-1
MLAMLRLWHHRYFSDPQAVILTLLLLTGALVLVFFGRMLAPLLTAIIIAYLLEGPIAWMEERLGVRRLVGVSCVLALFFLLVLVSALTVFPVLWTQLADLLKEIPHYLARGQQVLLNLPERYPVITEEQVRELVGTIRNQVGALGQHVLAISLASVVNIITLLVYLVLVPFLVFFLLKDKDLIMNWISLRLPRERGAAQDLWRDLDAQMGNYVRGKFWEILIVGGITFISFTILRVDYAVLLATLTGLSVLVPYVGAVVVTIPVLLVGYFQWGVGSELAWLLIAYGIIQTLDGNVLNPLLFAKAVNLHPVAIIGAILIFGGLWGFWGIFFAIPLATLVNALIITWPRNPDPEEEEAQAQPGG

SEQ ID NO: 132796 - DNA, 1077 bp, Rickettsiella grylli
  CDS (1)..(1077): transl_table=11
atgttacagctcgttaaaaactggcttaatcggtatatttttgacccagagttagctattttatggctatttctactatttattattattgtttttgcttccttagggaaaattttagctcctgtatttgtcagtattgttatcgcttatttattacagtggccaatccattctttagaaaagcttcacttaccccgcatcgccgcagttttaggtgtttatattagttttgtaagtttggttatcattggaattgtaggtttattacctctattgttccgtcaattaaataatttaattgctgaattacccgcaatggtggcaaaaggccaagcacttctcttatatctccctactcgataccccggttatacctctgtaaaccaaattcaagaatggattttacaatttaaatctcaactaacccactcaggtcaattattattatccgcttctttaggttatattccgaatgtcattgcatttgccatttattttgtattagtccctttattagtttatttttttctgcttgatgaaaaaaaaataatcggctggctaagtcgatatttacctgaaaaacgacgattaatttctcaagtttggacagaagtgcttactcaaacaggcaattatgtgcgaggaaaagctttagaaatgcttatagtctggataataacttatctttcatttgctattctgggcctgcaatatgccatattactgagcgtcttagtgggagtatctgtcattattccttatataggcgcagtgatggtgactattccagtgcttattattgggtttttagaatggggatggacggcgcattttgcctatttggtcgcaatctatactttaattatcacattagacgctaatgtattagttcctcttttattttctgaagcggttaatttgcaccccgtaacgatcattattgctgtactcgtatttggtggcttactcggattctggggggtattctttgcgataccgttagccagtgtagtcaatgctattttaaatgtcatttcctgcaaaaaagcaggtaataaaaacaacatattatgctaa

SEQ ID NO: 132797 - protein, 358 aa, Rickettsiella grylli
MLQLVKNWLNRYIFDPELAILWLFLLFIIIVFASLGKILAPVFVSIVIAYLLQWPIHSLEKLHLPRIAAVLGVYISFVSLVIIGIVGLLPLLFRQLNNLIAELPAMVAKGQALLLYLPTRYPGYTSVNQIQEWILQFKSQLTHSGQLLLSASLGYIPNVIAFAIYFVLVPLLVYFFLLDEKKIIGWLSRYLPEKRRLISQVWTEVLTQTGNYVRGKALEMLIVWIITYLSFAILGLQYAILLSVLVGVSVIIPYIGAVMVTIPVLIIGFLEWGWTAHFAYLVAIYTLIITLDANVLVPLLFSEAVNLHPVTIIIAVLVFGGLLGFWGVFFAIPLASVVNAILNVISCKKAGNKNNILC

SEQ ID NO: 132798 - DNA, 1086 bp, Oceanobacter sp. RED65
  CDS (1)..(1086): transl_table=11
atgtctatgatgcgtctcattagaagttggattgaagactatttctctgatgaggaagctttatttctattgctactgcttattgcgggctttgtgattattctcacgatgggggcgatattggctccggcccttgccagtgttgtattagcttatttgctgcaaggtccgttattggctctgaaacgtttgggggttggccatctagcagcaagtgttttggtatttctgttgttcttgatagtgtgcttggcagtgatactcgtgctggctcctgccgtatggacccagattacacaattgttcggtgaattaccgaacatgttgaatcagatgcagaagctagcggtggttttacctgagcgttatcccgatgtatttgatgaagcgcagataaaggccttgggtgctgctatggctgaagaaattggtcgtttaggtcaagctgccgttgaattgtctttatctacgttacctaatttagtcgccattttgatttatatgatcttggtgcctattttggttttctttttcttgaaagacggtgacgtgatggtgcgttggtgggtgtcgatcatgccaacgaagcgaatattgattgggcgtgtgtggcgtgagatggatcagcagtttgcaaattacatccgcggtaaagtactagaaatcgtcattgtgggttttgtaacttacattgcgttcgccatcatgggggttcgctatgcagcgctcctggctttgctggttggcttttctgtggttattccatatatcggtgccgcagttgtaaccgtacctgttgtattgataggttactttcaatgggggttgaccagtgatttttactacctggtagctgtgtatttcattattcaggcgttagacggcaatgtattggtcccacttctgttttccgaagcagtaaatttacacccggtggtgatcattttgtctgtactcatgtttgggggattgtgggggctttggggtgtgttttttgctattccgctggccactttatttaaagcagttctgactgcttggcccagaggggtgagggcggcccagcaacacgagcagcaagcctaa

SEQ ID NO: 132799 - protein, 361 aa, Oceanobacter sp. RED65
MSMMRLIRSWIEDYFSDEEALFLLLLLIAGFVIILTMGAILAPALASVVLAYLLQGPLLALKRLGVGHLAASVLVFLLFLIVCLAVILVLAPAVWTQITQLFGELPNMLNQMQKLAVVLPERYPDVFDEAQIKALGAAMAEEIGRLGQAAVELSLSTLPNLVAILIYMILVPILVFFFLKDGDVMVRWWVSIMPTKRILIGRVWREMDQQFANYIRGKVLEIVIVGFVTYIAFAIMGVRYAALLALLVGFSVVIPYIGAAVVTVPVVLIGYFQWGLTSDFYYLVAVYFIIQALDGNVLVPLLFSEAVNLHPVVIILSVLMFGGLWGLWGVFFAIPLATLFKAVLTAWPRGVRAAQQHEQQA

SEQ ID NO: 132800 - DNA, 1053 bp, Synechococcus sp. RS9916
  CDS (1)..(1053): transl_table=11
atggcctggcccatctggctgcgttgggcattggccctgccactcttcaccctcaatctctacgtctgccggcagctgttgctgcctctggcccccttccccggcctgttcctcacgtcagccctgatcgccttcctgctggacattcccaggcggtggctgacgcgtcgtggtcttccccgttggttggcgattttggtggtggcgctgctcaccgtggggaccttggttctcgctggcttcaccttggttccgctgttgattgatcagctggtgcagctgatcaatgccttgcccagctggcttgaagcggccgaggggtggatcaatcgggtgcaggaatgggcgttgcagcgggggctgcccagtgattttggtgatctcagcagtgatctcctcacccgcatcagccaggtggccagtcaattgagccagcgcctgctcggcattcttggtgcgaccctcggcaccacgatcaacatcgtgatcgtgctggtgctggcggtgttctttctgctggggggcgagtcaatcaccgccggcctcgcccgttggctgcccgactcttggcggaatctggtggtctccacgatcacgcgcaccttccgtggatacttcgctggacaggtgctgctagccctgatcctcagcttgggtcagatggtggtgttcacggtgttggggattccctacggcgtgttgttcgcggtgttgatcggcttcaccaccttgctcccctacgccagtgcgctcacgatcgtggccgtcagcgcgctactggcggtgcaagatccgagcaccggcctcgaaatccttgtggccgccattcttgtgggccaaatcgtggatcaggtgattcagcctcacctgatgggaaatttgttgggtctgcaacccgcctggttgttgatcgttctgcccttgggggctagggcaggtgatctgttcggttttggttcgttgctgggattgctgctggcggtgccggtggcgagctgcaccaagacctttgtggatgcctggcgggaatccttcaggactgagccggaatga

SEQ ID NO: 132801 - protein, 350 aa, Synechococcus sp. RS9916
MAWPIWLRWALALPLFTLNLYVCRQLLLPLAPFPGLFLTSALIAFLLDIPRRWLTRRGLPRWLAILVVALLTVGTLVLAGFTLVPLLIDQLVQLINALPSWLEAAEGWINRVQEWALQRGLPSDFGDLSSDLLTRISQVASQLSQRLLGILGATLGTTINIVIVLVLAVFFLLGGESITAGLARWLPDSWRNLVVSTITRTFRGYFAGQVLLALILSLGQMVVFTVLGIPYGVLFAVLIGFTTLLPYASALTIVAVSALLAVQDPSTGLEILVAAILVGQIVDQVIQPHLMGNLLGLQPAWLLIVLPLGARAGDLFGFGSLLGLLLAVPVASCTKTFVDAWRESFRTEPE

SEQ ID NO: 132802 - DNA, 1080 bp, Alteromonadales bacterium TW-7
  CDS (1)..(1080): transl_table=11
gtgtttgaatatataaaaacatggtacgaaagaaaattctccgatcctcattcggtcaccttattatttttactactcgtttctgttgccttactgtacttttttggctcgttaattgtgccggttttagtggcattagttattgcttatttacttgattggcctgttgtacatttagagcgtcttggcttacgccgatttactgcaaccgtgatcgtaatgcttatatttacaggcattatgcttactttaattttagtgattggccctgttttgtggaaacaaaccagtaacttagtgcaagaaacccctcatatgttagagcaaggtaagtcgtatttagttgccttacccgagcaatacccaagtttaataaatgccgaccaagtacaaggcattgttgctactgtcgaggctaaagttattgaacttggccaagtcgttttatcgttttcattaacgtcgctaaaagatgttgtagcgtggttaatttatcttgtacttgtgccgttgctggtgttttttatgcttaaagataagctcgagttaacgggtagtgtggctaaattaattccgcaacagcgccgtttaattttgcaagtatggaacgaaatgaaccaacaaattatgaattacattcgcggaaaagtgtttgaaattttaattgtaggcggcgtttcgtttattgcgtttacatttttagatttacgctacgcagccttattaggtgtgttagttggtttttctgtgttaattccgtttgtgggtgctgcgctggtgactattccggtcgctgctgtggcgttatttcaatttggattagaaactcaattttggactattttgattatttacgggattattcaggcccttgatggcaatgtacttgtgccattgttattttcagaagcggttgacttaaatcctgtattcataattgtcgcagttttgttttttggtggtctttggggcttttggggggtattttttgccattcctttggcttcgcttgttaaggcattgattaccgcttggtcttcaacgcaagaagagctaaataataaactgacagaaggttag

SEQ ID NO: 132803 - protein, 359 aa, Alteromonadales bacterium TW-7
MFEYIKTWYERKFSDPHSVTLLFLLLVSVALLYFFGSLIVPVLVALVIAYLLDWPVVHLERLGLRRFTATVIVMLIFTGIMLTLILVIGPVLWKQTSNLVQETPHMLEQGKSYLVALPEQYPSLINADQVQGIVATVEAKVIELGQVVLSFSLTSLKDVVAWLIYLVLVPLLVFFMLKDKLELTGSVAKLIPQQRRLILQVWNEMNQQIMNYIRGKVFEILIVGGVSFIAFTFLDLRYAALLGVLVGFSVLIPFVGAALVTIPVAAVALFQFGLETQFWTILIIYGIIQALDGNVLVPLLFSEAVDLNPVFIIVAVLFFGGLWGFWGVFFAIPLASLVKALITAWSSTQEELNNKLTEG

SEQ ID NO: 132804 - DNA, 1074 bp, marine gamma proteobacterium HTCC2143
  CDS (1)..(1074): transl_table=11
atgtttcaagtattgcggaagtggttagaccagatatttatcgaggaggaaagtattattctccttctgttaattgcaacggctcttgttgttttgatgacaatgggtaatgtactggggccagtaataacgagtattattctggccttcatgatgcagggtgttattacgcaattgacgaaaagacgcgttcctcgatggttagcgattagcgtggcgttttcaatttttgtaggtacattttttgtcgcacttctagtggttttaccgctcgcctggaaccaaatgacaaatctgtttaatgagctaccgggaatgttgtcgaagtggcagcagttgatgctggttttacctgaacaatacccttcgtttatctctgaaactcaaattcaggactggatactgttagctaaagcagaattaggtcaggtcggtcaggtggttgtatcattttctatctcgagtattcccaacttgatagggttgcttatctatcttgtgttggttcctattctggtgtttttctttctcaaagaccacttgctcatagtcgcctggtttaaatcattcttaccgcatgagaggccaatgttaaccaaaatttggcatgaaatggatgagcaggttgccaattatgtgcgcggcaaagctattgaaattgttattgttggggttattagttatatcgcctttgtgattctggggttgaactatgcggcattgctagggctattggtcggattatctgtggttattccctatatcggtgcggctgtagttactgttcctattgccttaattgcgtatttccaatgggggtggggtagcgatttcctgactctgttaggtgtctatgccgtcattcaggggcttgatggcaatgtgctggtgccacttttgttttcagaggcggttaatttacatccaacggctattattttggccgtgctggtgtttggcggtttctggggtttatggggcgtattttttgcgattccgctcgccacactgataaaagcggtgctcaatgcttggccttcctctaggcatgatgcgatgttagctgagcagtaa

SEQ ID NO: 132805 - protein, 357 aa, marine gamma proteobacterium HTCC2143
MFQVLRKWLDQIFIEEESIILLLLIATALVVLMTMGNVLGPVITSIILAFMMQGVITQLTKRRVPRWLAISVAFSIFVGTFFVALLVVLPLAWNQMTNLFNELPGMLSKWQQLMLVLPEQYPSFISETQIQDWILLAKAELGQVGQVVVSFSISSIPNLIGLLIYLVLVPILVFFFLKDHLLIVAWFKSFLPHERPMLTKIWHEMDEQVANYVRGKAIEIVIVGVISYIAFVILGLNYAALLGLLVGLSVVIPYIGAAVVTVPIALIAYFQWGWGSDFLTLLGVYAVIQGLDGNVLVPLLFSEAVNLHPTAIILAVLVFGGFWGLWGVFFAIPLATLIKAVLNAWPSSRHDAMLAEQ

SEQ ID NO: 132806 - DNA, 1065 bp, marine gamma proteobacterium HTCC2080
  CDS (1)..(1065): transl_table=11
atgattagcatttttagaaaatggtatgaccgctaccttagtgaagaggaatcggttttattactggtcattttagtgggcagcctaatcctgctggccgcagtggggcatatttttacccctatctttgttgcagtagtgctcgcgtatttgatgcagggtgttgctaatcagctctacaaatggggtttatcgactcgaatcggcgtatggattgccaccttgatgtttaccagtgcgttttttgcctttgttttgggactgttaccgttagtttggcgacagcttgtcagcctggctcgtgaggctcccgctatggtcgagcgtgggcgtgctgccctctcggttttaccggaaaaatatcccgcgattatcagtcaggagcaaatcaatctggccatgaacagtgtgcagggtgatatggcggggttagggcagctgctggtcactaaagggtttagcagtattcctgggttactcgcggtgcttgtctacatggtgctgacgccactgatggttttcttctttcttaaagatcgcgatcaaattttagattggttcacgtccctgctaccgactgaacggccaatgctcagcaggatctggtcggaaatgaacattcaatttgctaattacgtccgcggcaaagtcattgagattattttggttgggggggtgagctacatagcatttgcctttttgggtctcaactacgcggcgcttctggccttgttggtcggcctatcggttattattccctatattggtgcaaccctagtaaccattccggtggtggcggtggcattttttcaatggggtattggtcctagcttttattgggctctaggcgcgtacggcgttatacaactactcgatggaaacgttctagttccattactatttagcgaagcggtgaaccttcatcctgtggctattattatagcggtgctcttttttggaggtgtctggggggtctggggtgtgtttttcgcgattccactagctaccttggtcagcgctattgttagcgcttggccgaccgctggtaatgaacaactgacctag

SEQ ID NO: 132807 - protein, 354 aa, marine gamma proteobacterium HTCC2080
MISIFRKWYDRYLSEEESVLLLVILVGSLILLAAVGHIFTPIFVAVVLAYLMQGVANQLYKWGLSTRIGVWIATLMFTSAFFAFVLGLLPLVWRQLVSLAREAPAMVERGRAALSVLPEKYPAIISQEQINLAMNSVQGDMAGLGQLLVTKGFSSIPGLLAVLVYMVLTPLMVFFFLKDRDQILDWFTSLLPTERPMLSRIWSEMNIQFANYVRGKVIEIILVGGVSYIAFAFLGLNYAALLALLVGLSVIIPYIGATLVTIPVVAVAFFQWGIGPSFYWALGAYGVIQLLDGNVLVPLLFSEAVNLHPVAIIIAVLFFGGVWGVWGVFFAIPLATLVSAIVSAWPTAGNEQLT

SEQ ID NO: 132808 - DNA, 1071 bp, Pseudomonas putida GB-1
  CDS (1)..(1071): transl_table=11
atgttcaaagtgcttcgcgactggatgcagcgctacttctccgatgaagaagcggtggtgctggcggtcctgttgttcctggcttttactgcggtactgaccctgggcggtatgctcgcgccggtgctggccggcatggtgctggcgttcctgatgcaagggcttgtcaacgccctggagcgtgtgcgagtccctacgcggctggcggtgatgctggtgttcgccctgttcatgggcgcgctggcggtattcatgctggtgctggtgccgctgctgtggcaccagttgatcaccctgttcaacgagttgccgggcatgctcggcaagtggcagtcgctgttgctgctgttgcccgagcgctacccgcatctggtgtcggacgagcaggtgctgcatgccatcgaatcggtacgcggtgaaatcggcaagtttggccaatgggcgctgaccttttcgctgtccagcctgccgctgctggtcaatgccatgatctacctggtgctggtgccgatcctggtgttcttcttcctcaaggatcgcgagctgatcggccgctgggtcagcggctacctgcccagccagcgcgcgctgcttaaccgggtgggcagcgagatgaaccggcagattgccaactacattcgcggcaagggtatcgagatcctgatctgcggcatcgccacctatatcgccttcatcagcctggggctcaactacgccgcgctgctggcgttgctggtggggctgtcggtggtggtgccttacgtgggggcggtggtggtgaccgtaccggtaacgctgatcgcgctgttccagtggggttggggcgaccagttcatctacctgatgacggtgtacgcgatcatccaggcgctggatggcaacgtgctggtgccgctgctgttctccgaggcggtgagcctgcacccggtggcgatcatttgcgcggtattgctgtttggcgggttgtgggggttctgggggatcttcttcgcgattccgctggcgacgttgatcaaggctgtgctggatgcctggccgcgacatgagccgagtgtgtcaccgatgctttga

SEQ ID NO: 132809 - protein, 356 aa, Pseudomonas putida GB-1
MFKVLRDWMQRYFSDEEAVVLAVLLFLAFTAVLTLGGMLAPVLAGMVLAFLMQGLVNALERVRVPTRLAVMLVFALFMGALAVFMLVLVPLLWHQLITLFNELPGMLGKWQSLLLLLPERYPHLVSDEQVLHAIESVRGEIGKFGQWALTFSLSSLPLLVNAMIYLVLVPILVFFFLKDRELIGRWVSGYLPSQRALLNRVGSEMNRQIANYIRGKGIEILICGIATYIAFISLGLNYAALLALLVGLSVVVPYVGAVVVTVPVTLIALFQWGWGDQFIYLMTVYAIIQALDGNVLVPLLFSEAVSLHPVAIICAVLLFGGLWGFWGIFFAIPLATLIKAVLDAWPRHEPSVSPML

SEQ ID NO: 132810 - DNA, 1074 bp, Pseudomonas putida GB-1
  CDS (1)..(1074): transl_table=11
gtgaccgacatgcgtcgctggatctggctgggtgccgccctgcttatcgctgtgctgctttatagcctgcacaatattcttaccccgttcctggtcggcattctgctggcctacctggccgaccctctggtcgatcgcctcgaacgcctgggcctgtcgcgcacttggggcgtggtggtggtgttcggcctgttcaccctggtgctgctggccttgctgctggtgctggtgccgatgcttgccaagcagttggtgcgtctgtacgagttggcgccgcagatgctcgactggctcgaacaggtggcgctgccttgggcgcagagccgtctgggcctggccgatggcttctggaagttcgacaagatcaaggccgccatcggtgcgcacatgggccagaccaccgatatcgttggcatgttgttgtcccacgcgaccgcttcgagcctggcgttgatggcctggctggccaatatggtgctgatcccggtagtgggcttctatctgctgcgcgattgggacctgatgatgggcaagctgcgcggcctgctgccgcgccagcgtgagccgcaagtgatgggcctggcgggcgagtgtcatgaagtgctgggggcattcgtgcgcgggcaactgatggtaatgctggccctgggcatcatctattcggccgggcttatgctggtggggctcgaactgggcctactgatcggcatgctcgccggccttgctgccatcgtgccgtacatgggcttcatcattggcattggtgccgcgctggtggctggcctgttccagttcggcggcgacctgtacccgatgctgggcatcgttgcggtgttcatggtcgggcaggcgctggagggcatggtgctgaccccgctactggtgggggaccgcattggcctgcacccggtagccgttatcttcgccatcctggccggtggtgagctgttcggctttaccggggtgctgctggccttgccggtggcggcggtgatcatggtgttgctgcggcatatgcatgacctgtacaaggagtcggacatgtacgcgggagatatcgatcctgacttgtaa

SEQ ID NO: 132811 - protein, 357 aa, Pseudomonas putida GB-1
MTDMRRWIWLGAALLIAVLLYSLHNILTPFLVGILLAYLADPLVDRLERLGLSRTWGVVVVFGLFTLVLLALLLVLVPMLAKQLVRLYELAPQMLDWLEQVALPWAQSRLGLADGFWKFDKIKAAIGAHMGQTTDIVGMLLSHATASSLALMAWLANMVLIPVVGFYLLRDWDLMMGKLRGLLPRQREPQVMGLAGECHEVLGAFVRGQLMVMLALGIIYSAGLMLVGLELGLLIGMLAGLAAIVPYMGFIIGIGAALVAGLFQFGGDLYPMLGIVAVFMVGQALEGMVLTPLLVGDRIGLHPVAVIFAILAGGELFGFTGVLLALPVAAVIMVLLRHMHDLYKESDMYAGDIDPDL

SEQ ID NO: 132812 - DNA, 1065 bp, Yersinia ruckeri
  CDS (1)..(1065): transl_table=11
atgttagagatgttattacaatggtatcgccgacgttttaccgacccgcaagtgattgcactgctggttattctgctcgcaggattttgcattctctatttttttagcggcattttggcacctttattggtggctatcgtgctggcttatttactggaatggccaacgacacgattacagcgtatggggtgttcgcggctatgggctgccagtattgtactgattttgtttggcggaattgccctgctgctgattttggtggtggctccgacagcgtggcaacaggggattaacctggttgctgatatgccaaaaatgttgaaccaattcaatgcgtatgctcagactttgcccagtcgttaccccgcgctggtcgatgcgggcattgttgatatgatggcggaaaatatgcgtggaaagctttccagcatgggcgattcggtagtgaaattctcgctggcttcgatagtgggcttgctgacattggccatctatctgattttagtcccactgatgctgttcttcctgctgaaagacaaagatcaaatgttgaacgccgtccggcgggtgctgccacgtaaccgtggcttggctgggcaggtatggaaggaaatgaaccagcaaattaccaattatatccgcggtaaagtgatggaaatggtgattgtcgggattgtcacttatctggtgttctttattctggatatgcgctacgcgttgttgttatcagtgctggtgggattctcggtgctgattccctatatcggtgcggtgatagtgactattcccgtggtattggtggcgttatttcagtggggaatcggtgcagacttctggacgctgatcgttgcttatctggtggttcaagcgctggatggcaatctgctggtgcctattttgttctcggaggcggtaaacctgcatccgttagttattattctatcggtgattatttttggtggtatgtggggcttctggggggtgttttttgctatccccttggccacgctggtcaaggcggtgattcatgcatggccggaagagtttattcctgacgtcgattaa

SEQ ID NO: 132813 - protein, 354 aa, Yersinia ruckeri
MLEMLLQWYRRRFTDPQVIALLVILLAGFCILYFFSGILAPLLVAIVLAYLLEWPTTRLQRMGCSRLWAASIVLILFGGIALLLILVVAPTAWQQGINLVADMPKMLNQFNAYAQTLPSRYPALVDAGIVDMMAENMRGKLSSMGDSVVKFSLASIVGLLTLAIYLILVPLMLFFLLKDKDQMLNAVRRVLPRNRGLAGQVWKEMNQQITNYIRGKVMEMVIVGIVTYLVFFILDMRYALLLSVLVGFSVLIPYIGAVIVTIPVVLVALFQWGIGADFWTLIVAYLVVQALDGNLLVPILFSEAVNLHPLVIILSVIIFGGMWGFWGVFFAIPLATLVKAVIHAWPEEFIPDVD

SEQ ID NO: 132814 - DNA, 24 bp, Artificial sequence
  primer
atgctcgaaatgttgatgcaatgg

SEQ ID NO: 132815 - DNA, 24 bp, Artificial sequence
  primer
ttattcttgcgcgatttgcccatc

SEQ ID NO: 132816 - protein, 331 aa, Artificial sequence
  consensus sequence
  Variant (2)..(16): Xaa in position 2 to 16 is any amino acid
  Variant (18)..(24): Xaa in position 18 to 24 is any amino acid
  Variant (26)..(26): Xaa in position 26 is any amino acid
  Variant (28)..(52): Xaa in position 28 to 52 is any amino acid
  Variant (53)..(53): Xaa in position 53 is any or no amino acid
  Variant (55)..(66): Xaa in position 55 to 66 is any amino acid
  Variant (68)..(71): Xaa in position 68 to 71 is any amino acid
  Variant (73)..(75): Xaa in position 73 to 75 is any amino acid
  Variant (77)..(80): Xaa in position 77 to 80 is any amino acid
  Variant (82)..(93): Xaa in position 82 to 93 is any amino acid
  Variant (94)..(100): Xaa in position 94 to 100 is any or no amino acid
  Variant (102)..(145): Xaa in position 102 to 145 is any amino acid
  Variant (146)..(153): Xaa in position 146 to 153 is any or no amino acid
  Variant (155)..(155): Xaa in position 155 is any amino acid
  Variant (157)..(159): Xaa in position 157 to 159 is any amino acid
  Variant (162)..(162): Xaa in position 162 is any amino acid
  Variant (164)..(164): Xaa in position 164 is any amino acid
  Variant (166)..(177): Xaa in position 166 to 177 is any amino acid
  Variant (179)..(187): Xaa in position 179 to 187 is any amino acid
  Variant (188)..(190): Xaa in position 188 to 190 is any or no amino acid
  Variant (192)..(200): Xaa in position 192 to 200 is any amino acid
  Variant (203)..(208): Xaa in position 203 to 208 is any amino acid
  Variant (210)..(222): Xaa in position 210 to 222 is any amino acid
  Variant (224)..(227): Xaa in position 224 to 227 is any amino acid
  Variant (229)..(233): Xaa in position 229 to 233 is any amino acid
  Variant (235)..(239): Xaa in position 235 to 239 is any amino acid
  Variant (242)..(242): Xaa in position 242 is any amino acid
  Variant (245)..(257): Xaa in position 245 to 257 is any amino acid
  Variant (259)..(259): Xaa in position 259 is any amino acid
  Variant (261)..(272): Xaa in position 261 to 272 is any amino acid
  Variant (273)..(278): Xaa in position 273 to 278 is any or no amino acid
  Variant (280)..(280): Xaa in position 280 is any amino acid
  Variant (282)..(282): Xaa in position 282 is any amino acid
  Variant (285)..(285): Xaa in position 285 is any amino acid
  Variant (287)..(287): Xaa in position 287 is any amino acid
  Variant (289)..(289): Xaa in position 289 is any amino acid
  Variant (291)..(294): Xaa in position 291 to 294 is any amino acid
  Variant (296)..(296): Xaa in position 296 is any amino acid
  Variant (300)..(302): Xaa in position 300 to 302 is any amino acid
  Variant (304)..(308): Xaa in position 304 to 308 is any amino acid
  Variant (309)..(311): Xaa in position 309 to 311 is any or no amino acid
  Variant (314)..(314): Xaa in position 314 is any amino acid
  Variant (316)..(316): Xaa in position 316 is any amino acid
  Variant (319)..(319): Xaa in position 319 is any amino acid
  Variant (320)..(322): Xaa in position 320 to 322 is any or no amino acid
  Variant (324)..(326): Xaa in position 324 to 326 is any amino acid
  Variant (328)..(328): Xaa in position 328 is any amino acid
  Variant (330)..(330): Xaa in position 330 is any amino acid
LXXXXXXXXXXXXXXXPXXXXXXXAXLXXXXXXXXXXXXXXXXXXXXXXXXXXFXXXXXXXXXXXXPXXXXQXXXLXXXXPXXXXXXXXXXXXXXXXXXXLXXXXXXXXXXXXXXXXXXXXXXXXXXXXXXXXXXXXXXXXXXXXXXXXXXXXLXPXXXFFXLXDXXXXXXXXXXXXPXXXXXXXXXXXXEXXXXXXXXXRGXXXXXXIXXXXXXXXXXXXXLXXXXLXXXXXGXXXXXPYXGAXXXXXXXXXXXXXQXGXXXXXXXXXXXXXXXXXXQXLXGNXLXPXLXXXXVXLHPXXXIXXXXXXXXFGXLXGFXXXXGXXXAXPXA

SEQ ID NO: 132817 - protein, 23 aa, Artificial sequence
  protein pattern
  Variant (2)..(2): Xaa in position 2 is any amino acid
  Variant (3)..(3): Xaa in position 3 is Ile, Leu or Val
  Variant (4)..(4): Xaa in position 4 is Asp or Glu
  Variant (6)..(6): Xaa in position 6 is Asn or Val
  Variant (7)..(7): Xaa in position 7 is Phe, Ile, Leu, Met or Val
  Variant (8)..(8): Xaa in position 8 is Ile, Leu or Val
  Variant (9)..(9): Xaa in position 9 is any amino acid
  Variant (11)..(11): Xaa in position 11 is any amino acid
  Variant (13)..(13): Xaa in position 13 is any amino acid
  Variant (14)..(15): Xaa in position 14 to 15 is any or no amino acid
  Variant (17)..(18): Xaa in position 17 to 18 is any or no amino acid
  Variant (20)..(20): Xaa in position 20 is Asp, Gly, Asn or Ser
  Variant (22)..(22): Xaa in position 22 is any amino acid
QXXXGXXXXPXLXXXSXXVXLXP

SEQ ID NO: 132818 - protein, 21 aa, Artificial sequence
  protein pattern
  Variant (2)..(2): Xaa in position 2 is Ile or Leu
  Variant (3)..(3): Xaa in position 3 is Ala, Gly or Ser
  Variant (4)..(6): Xaa in position 4 to 6 is any amino acid
  Variant (8)..(8): Xaa in position 8 is Phe, Ile, Leu or Val
  Variant (9)..(9): Xaa in position 9 is any amino acid
  Variant (10)..(10): Xaa in position 10 is Ser or Val
  Variant (11)..(11): Xaa in position 11 is Phe, Ile, Leu or Val
  Variant (12)..(12): Xaa in position 12 is Ile or Val
  Variant (14)..(14): Xaa in position 14 is Phe or Tyr
  Variant (15)..(15): Xaa in position 15 is Ile or Val
  Variant (17)..(18): Xaa in position 17 to 18 is any amino acid
  Variant (19)..(19): Xaa in position 19 is any or no amino acid
  Variant (21)..(21): Xaa in position 21 is Gly, Thr or Val
LXXXXXGXXXXXPXXGXXXVX

SEQ ID NO: 132819 - protein, 19 aa, Artificial sequence
  protein pattern
  Variant (3)..(4): Xaa in position 3 to 4 is any amino acid
  Variant (5)..(5): Xaa in position 5 is any or no amino acid
  Variant (7)..(7): Xaa in position 7 is Phe, Ile, Leu or Val
  Variant (8)..(8): Xaa in position 8 is any amino acid
  Variant (10)..(10): Xaa in position 10 is any amino acid
  Variant (11)..(12): Xaa in position 11 to 12 is Phe or Leu
  Variant (14)..(14): Xaa in position 14 is Ile, Leu or Val
  Variant (16)..(16): Xaa in position 16 is Phe, Leu or Val
  Variant (18)..(18): Xaa in position 18 is Ala, Ser or Thr
  Variant (19)..(19): Xaa in position 19 is Leu or Val
GGXXXGXXGXXXAXPXAXX

SEQ ID NO: 132820 - protein, 19 aa, Artificial sequence
  protein pattern
  Variant (2)..(2): Xaa in position 2 is any or no amino acid
  Variant (4)..(5): Xaa in position 4 to 5 is any or no amino acid
  Variant (7)..(7): Xaa in position 7 is Phe, Ile, Leu or Val
  Variant (8)..(8): Xaa in position 8 is Leu, Met or Val
  Variant (9)..(9): Xaa in position 9 is any amino acid
  Variant (10)..(10): Xaa in position 10 is Phe, Met or Val
  Variant (11)..(11): Xaa in position 11 is Phe or Tyr
  Variant (12)..(12): Xaa in position 12 is Phe, Leu, Met or Val
  Variant (14)..(14): Xaa in position 14 is any amino acid
  Variant (16)..(18): Xaa in position 16 to 18 is any amino acid
  Variant (19)..(19): Xaa in position 19 is Phe, Ile, Leu or Met
LXVXXPXXXXXXLXDXXXX

SEQ ID NO: 132821 - DNA, 1302 bp, Escherichia coli
  CDS (1)..(1302): transl_table=11
atgttgtgttctggatatctggggcatgacatggaagacgactgcgacattattattattggtgccggtattgcaggcaccgcttgcgcgttacgctgcgcgcgagcgggtttatccgttttgttactggaacgcgctgaaatccccggcagcaaaaatctttccggcgggcggttatatacccatgcactcgcggaactcctcccgcaatttcatctgaccgcgcctcttgaacgacgcatcactcacgaaagcctttccctgttaacgcccgatggcgtaacgacgttttccagcttacagcccggcggtgaatcctggagtgtattacgtgcacgattcgatccgtggctggttgccgaagccgaaaaagaaggtgtcgaatgcatccccggagcgacggtggatgcactgtatgaagaaaacggcagagtctgtggcgttatttgtggtgacgatattctccgcgcccgttatgtggtgctggcagaaggtgccaacagcgtcctggctgaacgtcacgggttagtgactcgtcctgctggcgaagcgatggcgttggggatcaaagaagtgctgtcgctggaaacatccgctattgaagaacgttttcatctggagaataacgaaggcgcagcgttgctgttcagcggcaggatctgtgatgacttacccggcggcgcatttctttatactaatcaacaaacgctctcgttagggattgtttgcccgctctcttcccttacgcaaagtcgtgttccggcaagcgagctgctgactcgctttaaagcgcatccggcagtgcgcccgcttatcaaaaacacggaatcactggagtatggtgcgcatctggtgccagaaggtggcttgcacagtatgccggtgcaatacgccggtaacggctggctgctggtgggcgatgcgttgcgcagttgcgtcaataccggaatttccgtgcgcggcatggatatggcgctgactggcgcgcaggcggcggcacaaacgctgataagcgcctgccagcaccgcgagccgcaaaatctgtttccgctttatcatcacaacgtagagcgcagcctgctgtgggatgttctacagcgttatcagcatgttccggcgcttttgcaacgcccgggatggtaccgtacgtggcctgcgttaatgcaggatatttcccgcgatttatgggatcagggtgataaacctgttccaccgctgcgccagttattctggcatcatttacgtcgtcacggcctgtggcatctggcgggcgatgttatcaggagtctgcgatgtctgtaa

SEQ ID NO: 132822 - protein, 433 aa, Escherichia coli
MLCSGYLGHDMEDDCDIIIIGAGIAGTACALRCARAGLSVLLLERAEIPGSKNLSGGRLYTHALAELLPQFHLTAPLERRITHESLSLLTPDGVTTFSSLQPGGESWSVLRARFDPWLVAEAEKEGVECIPGATVDALYEENGRVCGVICGDDILRARYVVLAEGANSVLAERHGLVTRPAGEAMALGIKEVLSLETSAIEERFHLENNEGAALLFSGRICDDLPGGAFLYTNQQTLSLGIVCPLSSLTQSRVPASELLTRFKAHPAVRPLIKNTESLEYGAHLVPEGGLHSMPVQYAGNGWLLVGDALRSCVNTGISVRGMDMALTGAQAAAQTLISACQHREPQNLFPLYHHNVERSLLWDVLQRYQHVPALLQRPGWYRTWPALMQDISRDLWDQGDKPVPPLRQLFWHHLRRHGLWHLAGDVIRSLRCL

SEQ ID NO: 132823 - DNA, 1308 bp, Mesorhizobium loti MAFF303099
  CDS (1)..(1308): transl_table=11
atgatcgaggaagaattcgacgccatcgtcgtcggggccggtatgtccggaaacgcggccgcctacaccatggcaagccagggcctgacggtgctgcagttggagcgcggcgagtatccgggctccaagaatgtccagggcgccatcatgtacgccgacatgttggagcaaatcattccggatttccgggatgatgcgcctctcgagcggcatctggtcgagcagcgattctgggtgatggacgacacctcccacaccgggatgcagtatcgatcggacgatttcaacgaggcgaagcccaatcgctacacgatcatccgcgcccaattcgacaagtggttttcgcgcaaggtgcgccaggccggcgcgacggtgctgtgcgagacgacggtgaccgaacttatccgcaatgccagcggcaaggtgatcggcgtgcgcaccgaccgggctggcgggccgatctacgcggacgtcgtcgtgctcgcagaaggtgtcaacggactgctcggtacacgggccggcctgcgcaagatgccgaagccagaaagcgtggcgctcgctgtcaaggaaatgcatttcctacccgatgaggtcattgagcagcggttcggcctccagggcgacgaaggctgcgtgatcgaagcggcgggcacgatttcccgcagcatggccggactggccttcctctacaccaacaaggagtcgatctctctcggcatcggctgcctcgtctccgatttcgcccagacaatggagagcccttacgtcctcctcgacaacttcaaaaaccatccttcgatccggccgctgatcgcgggctcggaagtcaaggagtattccgcgcatctcattcccgaaggtggctacaaggcaattccgcagctcttcggcgacggttgggtggcggtcggtgatgccgcccaactgaacaacgctattcaccgcgagggttcgaaccttgccatgacttccggtcgcatcgcgggcgaggcaatcattgagatcaagggccgcaaccagccgatgatcaggaggaacctcgccctctacaagaccatgctggacaagtccttcgtagtcaaagacctgatgaaatataaggacatgccggccctgatacacaccaattcccgcaatttcttcatgacttacccgcagttgatgtcgcaggccgcgcagaacttcatgcgggtcgacggaaccccgaaaatcgagaaggaaaaggcgaccactgctgccttcatcaaggcgcgttcgcgctgggggctgatcagcgatgtggtccgcctggcactcgcctggcgctga

SEQ ID NO: 132824 - protein, 435 aa, Mesorhizobium loti MAFF303099
MIEEEFDAIVVGAGMSGNAAAYTMASQGLTVLQLERGEYPGSKNVQGAIMYADMLEQIIPDFRDDAPLERHLVEQRFWVMDDTSHTGMQYRSDDFNEAKPNRYTIIRAQFDKWFSRKVRQAGATVLCETTVTELIRNASGKVIGVRTDRAGGPIYADVVVLAEGVNGLLGTRAGLRKMPKPESVALAVKEMHFLPDEVIEQRFGLQGDEGCVIEAAGTISRSMAGLAFLYTNKESISLGIGCLVSDFAQTMESPYVLLDNFKNHPSIRPLIAGSEVKEYSAHLIPEGGYKAIPQLFGDGWVAVGDAAQLNNAIHREGSNLAMTSGRIAGEAIIEIKGRNQPMIRRNLALYKTMLDKSFVVKDLMKYKDMPALIHTNSRNFFMTYPQLMSQAAQNFMRVDGTPKIEKEKATTAAFIKARSRWGLISDVVRLALAWR

SEQ ID NO: 132825 - DNA, 1287 bp, Salmonella typhimurium LT2
  CDS (1)..(1287): transl_table=11
atgtcggatgataaatttgacgctattgtggtgggcgcaggcgtagcaggaacggtcgccgcgtatgtgatggcaaaagcgggactggatgtactggttattgaacgcggaaacagcgcgggcagcaaaaatatgaccggtggccggctctacgctcacagtatcgaaagtattatgccgggattcgcaacgtccgcccccatcgaacgcgtcgttacccgtgaaaaaatctcctttttaaccgaagaaagcgccgtcacacttgattttcaccgcgcgccccctactccgccccttacgtcatataccgtactgcgcaacaaactggacccgtggttaatggcgcaggcggaacaggctggcgcgcagtttatcccaggtgtacgggtcgacgctctggtacgtgaaggcaatcgcgtcactggcgttcaggccggggatgatattctggatgcgaatattgtgattctcgcggacggcgtgaattccatgctgggccgttcgctggacatggtgcctgtctcttctgcgcatcactatgcagtcggcgtaaaagagttgattgggctctctccggcacttattgaagagcgctttaatctggcgtcccatgaaggcgccgcctggttattcgctggcgcgccctccaacgggctcatgggcggcgggtttctttataccaaccgcgattcggtttctctggggctggtatgtggcctgggcgacattgctcacgcgaccaaaagcgtaccgcaaatgctggaagattttaaacagcatccggcaatacgccctttgattcaggggggaacactgcttgaatactccgctcatatggtgcccgaaggcggcatagcaatgatgccggagctggcaaatgacggcgtgatgattgtcggcgacgccgccggtctttgtctgaatctcggctataccgtccgcggcatggatttagccatcgcgtccgcgcaagcggccgctcaaaccgccattgacgctaaagcgcggcaagatttttccgccgcgagtcttgccggttacaaacgcgcgctggagaaaaacggcgtgttacgcgatatgcggcatttccgcaaactccccggattaatggaaaacccacggctttttaccgagtacccgcgtatggcggcaaacattgtgggcgatctgttcaccgttgatggcggtccagtcccaccgttgcgtaaaactatcctgtcacatgcgaaaaaaattggactggtgaatctattaaaagacggcataaaaggggctacggcattatga

SEQ ID NO: 132826 - protein, 428 aa, Salmonella typhimurium LT2
MSDDKFDAIVVGAGVAGTVAAYVMAKAGLDVLVIERGNSAGSKNMTGGRLYAHSIESIMPGFATSAPIERVVTREKISFLTEESAVTLDFHRAPPTPPLTSYTVLRNKLDPWLMAQAEQAGAQFIPGVRVDALVREGNRVTGVQAGDDILDANIVILADGVNSMLGRSLDMVPVSSAHHYAVGVKELIGLSPALIEERFNLASHEGAAWLFAGAPSNGLMGGGFLYTNRDSVSLGLVCGLGDIAHATKSVPQMLEDFKQHPAIRPLIQGGTLLEYSAHMVPEGGIAMMPELANDGVMIVGDAAGLCLNLGYTVRGMDLAIASAQAAAQTAIDAKARQDFSAASLAGYKRALEKNGVLRDMRHFRKLPGLMENPRLFTEYPRMAANIVGDLFTVDGGPVPPLRKTILSHAKKIGLVNLLKDGIKGATAL

SEQ ID NO: 132827 - DNA, 1296 bp, Fusobacterium nucleatum subsp. nucleatum ATCC 25586
  CDS (1)..(1296): transl_table=11
atgagcgaagaaaaatttgatgccataatcgtaggtggcggtttggcaggttgctctgcagctattgttcttgcaaatgctggacttgcagttcttgtagtggaaagaggcgacttttgtggagcaaaaaatatgacaggtggtcgtctttatggacacagtcttgaaaaaattattccaaactttgcagaggaagctcccattgaaagaaagataacaagagaaaaaatttctttaatgagtgaagatagttctcttgatatagggtttggatctaaaaaattaagttcaaataatgaaaatgcttcttatacagtgcttcgttctacatttgatagatggttagcctcaaaagcagaagaagcaggtgcagaaattattcccggaattttggtagatgaacttattgtagaagatggaaaagtagtaggagtttctgcaacaggggaagaattatatgcagatgtggttattcttgcagatggagtaaactctcttttagcacaaagtttaggtatgaaaaaagagctagaacctcatcaagtagctgttggagcaaaagaagttattaaattaggagaagatgttattaatcagcgttttgctgtaaataatggagaaggggtagcatggctttcttgtggagatcctaccttaggtggatttggaggaggattactttatactaataaagatagtgtttctgttggagttgttgctactttaagtgatattggacatagtgatttatctatcaatcaattattggatagatttaaagaacaccctgctattgctccatatttagaaggaggaacttctattgaatattcaggtcatttagttccagaagaaggacttcatatggttccagaattatatagagatggagttttagtaactggtgatgctgctggtttctgtattaacttaggttttacagttcgtggaatggattttgctattgaatctggtcggcttgctgctgaagcagttatcaaagcacatgaaattggagattttagtgcagctacactatctaattataaaaaattaattgatagtagtttcatcatggaagacttaaatcaatataagggattccctactttacttggaagaagggaaatctttgaaggtcttcctgcaatggttgatgatattgctacaaaagcatttacagtagatggaaaacaaggacaaagtttgatgatgtatgttattcactctgtagcagaacatacaacagcagcaaaacttgtagattttgttactacagtattggaggcgttttaa

SEQ ID NO: 132828 - protein, 431 aa, Fusobacterium nucleatum subsp. nucleatum ATCC 25586
MSEEKFDAIIVGGGLAGCSAAIVLANAGLAVLVVERGDFCGAKNMTGGRLYGHSLEKIIPNFAEEAPIERKITREKISLMSEDSSLDIGFGSKKLSSNNENASYTVLRSTFDRWLASKAEEAGAEIIPGILVDELIVEDGKVVGVSATGEELYADVVILADGVNSLLAQSLGMKKELEPHQVAVGAKEVIKLGEDVINQRFAVNNGEGVAWLSCGDPTLGGFGGGLLYTNKDSVSVGVVATLSDIGHSDLSINQLLDRFKEHPAIAPYLEGGTSIEYSGHLVPEEGLHMVPELYRDGVLVTGDAAGFCINLGFTVRGMDFAIESGRLAAEAVIKAHEIGDFSAATLSNYKKLIDSSFIMEDLNQYKGFPTLLGRREIFEGLPAMVDDIATKAFTVDGKQGQSLMMYVIHSVAEHTTAAKLVDFVTTVLEAF

SEQ ID NO: 132829 - DNA, 1290 bp, Shigella flexneri 2a str. 301
  CDS (1)..(1290): transl_table=11
atgtcggatgacaaatttgatgccattgtggtcggtgcgggcgttgctggtagcgttgccgcactggtcatggcacgagccgggctggatgtcctggtgatagaacgcggcgacagtgccggatgtaaaaacatgaccggcgggcgtctttatgcccacacacttgaagcaatcattccaggctttgcagtatcagcgccggtagaacgcaaggtcacacgcgagaaaatctccttcttaaccgaagaaagcgccgttaccctcgattttcaccgcgagcaaccagatgttcctcaacacgcatcttataccgtattgcgtaatcgtctggacccgtggttgatggaacaagccgagcaggcgggcgcgcagtttatcccaggcgttcgcgtcgacgcgctggttcgtgaaggaaacaaggtcactggcgtgcaggctggggatgatattctcgaagcgaatgtggtgattctggctgatggcgttaactcgatgcttggccgctcgctgggaatggttcccgcttccgatccgcatcattacgctgttggtgttaaagaggttattggcctcacaccagaacagatcaacgatcgctttaatattacgggcgaggaaggtgccgcctggctgtttgccggttccccttctgacggcctgatgggcgggggatttctctataccaacaaggattccatatccttggggctggtttgtggattgggtgatatcgcccatgcgcaaaaaagcgtgccgcaaatgctggaagattttaaacaacaccccgccattcgcccgctgattagcggcggcaaactgcttgaatattccgcgcatatggtgccggaaggcggtctggcaatggtgccgcaactggttaacgagggcgtgatgatcgttggtgacgccgcaggcttctgcctgaatttgggttttacggtccgcggcatggatttagccattgcatcggctcaggctgccgccacaacggtgatcgccgccaaagaacgcgcggatttctccgccaacagtctggcgcaatacaaacgtgagctggaacaaagctgcgtcatgcgtgatatgcagcattttcgcaagatcccggcgctgatggaaaacccgcgcctgtttagccaatacccacgaatggtagccgacatcatgaacgagatgttcaccattgacggcaaaccaaaccagccggtacgcaaaatgatcatgggacacgcgaagaaaattgggctgatcaacttgctgaaagatggcattaagggagcaaccgcgctatga

SEQ ID NO: 132830 - protein, 429 aa, Shigella flexneri 2a str. 301
MSDDKFDAIVVGAGVAGSVAALVMARAGLDVLVIERGDSAGCKNMTGGRLYAHTLEAIIPGFAVSAPVERKVTREKISFLTEESAVTLDFHREQPDVPQHASYTVLRNRLDPWLMEQAEQAGAQFIPGVRVDALVREGNKVTGVQAGDDILEANVVILADGVNSMLGRSLGMVPASDPHHYAVGVKEVIGLTPEQINDRFNITGEEGAAWLFAGSPSDGLMGGGFLYTNKDSISLGLVCGLGDIAHAQKSVPQMLEDFKQHPAIRPLISGGKLLEYSAHMVPEGGLAMVPQLVNEGVMIVGDAAGFCLNLGFTVRGMDLAIASAQAAATTVIAAKERADFSANSLAQYKRELEQSCVMRDMQHFRKIPALMENPRLFSQYPRMVADIMNEMFTIDGKPNQPVRKMIMGHAKKIGLINLLKDGIKGATAL

SEQ ID NO: 132831 - DNA, 1302 bp, Shigella flexneri 2a str. 301
  CDS (1)..(1302): transl_table=11
gtgttgtgttctggatatctggggcatgacatggaagacgactgcgacattattattattggtgccggtattgcaggcaccgcttgcgcgttacgctgcgcgcgagcggatttatccgttttgttactcgaacgcgctgaaatccccggcagcaaaaatctttccggcaggcggttatatacccatgcactcgcggaactcctcccgcaatttcatctgaccgcgcctcttgaacgacgcatcactcacgaaagcctttccctgttaacgccggatggcgcaacgacgttttccagcttacagcccggcggtgaatcctggagtgtattacgtgcacggttcgatccgtggctggttgccgaagccgaaaaagaaggtgtcgaatgcatccccggagcgacggtggatgcactgtatgaagaaaacggcagagtctgtggcgttatttgtggtgacgatattctccgcgcccgttatgtggtgctggcagaaggtgccaacagcgtcctggctgaacgtcacgggttagtgactcgtcctgctggcgaagcgatggcgttggggatcaaagaagtgctgtcgctggaaacatccgctattgaagaacgttttcatctggagaataacgaaggcgcagcgttgctgttcagcggcggaatctgtgatgacttacccggcggcgcatttctttatactaatcaacaaacgctctcgttagggattgtttgcccgctctcttcccttacgcaaagtcgtgttccggcaagcgagctgctgactcgctttaaagcgcatccggcagtgcgcacgcttatcaaaaacacggaatcactggagtatggtgcgcatctggtgccagaaggtggcttgcacagtatgccggtgcaatacgccggtaacggctggctgctggtgggcgatgcgttgcgcagttgcgtcaataccggaatttccgtgcgcggcatggatatggcgctgactggcgcacaggcggcggcacaaacgctaataagcgcctgccagcaccgcgagccgcaaaatctgtttgcgctttatcatcacaacgtagagcgcagcctgctatgggatgttctacaacgttatcagcatgttccggcgcttttgcaacgccctggcaggtatcgggcgtggcctgcgttaatgcaggatatttcccgcgatttatgggatcagggtgataaacctgttccaccgctgcgccagttattctggcatcatttacgtcgtcatggcctgtggcatctggcgggcgatgttatcaggagtctgcgatgtctgtag

SEQ ID NO: 132832 - protein, 433 aa, Shigella flexneri 2a str. 301
MLCSGYLGHDMEDDCDIIIIGAGIAGTACALRCARADLSVLLLERAEIPGSKNLSGRRLYTHALAELLPQFHLTAPLERRITHESLSLLTPDGATTFSSLQPGGESWSVLRARFDPWLVAEAEKEGVECIPGATVDALYEENGRVCGVICGDDILRARYVVLAEGANSVLAERHGLVTRPAGEAMALGIKEVLSLETSAIEERFHLENNEGAALLFSGGICDDLPGGAFLYTNQQTLSLGIVCPLSSLTQSRVPASELLTRFKAHPAVRTLIKNTESLEYGAHLVPEGGLHSMPVQYAGNGWLLVGDALRSCVNTGISVRGMDMALTGAQAAAQTLISACQHREPQNLFALYHHNVERSLLWDVLQRYQHVPALLQRPGRYRAWPALMQDISRDLWDQGDKPVPPLRQLFWHHLRRHGLWHLAGDVIRSLRCL

SEQ ID NO: 132833 - DNA, 1290 bp, Shigella flexneri 2a str. 2457T
  CDS (1)..(1290): transl_table=11
atgtcggatgacaaatttgatgccattgtggtcggtgcgggcgttgctggtagcgttgccgcactggtcatggcacgagccgggttggatgtcctggtgatagaacgcggcgacagtgccggatgtaaaaacatgaccggcgggcgtctttatgcccacacacttgaagcaatcattccaggctttgcagtatcagcgccggtagaacgcaaggtcacacgcgagaaaatctccttcttaaccgaagaaagcgccgttaccctcgattttcaccgcgggcaaccagatgttcctcaacacgcatcttataccgtattgcgtaatcgtctggacccgtggttgatggaacaagccgagcaggcgggcgcgcagtttatcccaggcgttcgcgtcgacgcgctggttcgtgaaggaaacaaggtcactggcgtgcaggctggggatgatattctcgaagcgaatgtggtgattctggctgatggcgttaactcgatgcttggccgctcgctgggaatggttcccgcttccgatccgcatcattacgctgttggtgttaaagaggttattggcctcacaccagaacagatcaacgatcgctttaatattacgggcgaggaaggtgccgcctggctgtttgccggttccccttctgacggcctgatggccgggggatttctctataccaacaaggattccatatccttggggctggtttgtggattgggtgatatcgcccatgcgcaaaaaagcgtgccgcaaatgctggaagattttaaacaacaccccgccattcgcccgctgattagcggcggcaaactgcttgaatattccgcgcatatggtgccggaaggcggtctggcaatggtgccgcaactggttaacgagggcgtgatgatcgttggtgacgccgcaggcttctgcctgaatttgggttttacggtccgcggcatggatttagccattgcatcggctcaggctgccgccacaacggtgatcgccgccaaagaacgcgcggatttctccgccaacagtctggcgcaatacaaacgtgagctggaacaaagctgcgtcatgcgtgatatgcagcattttcgcaagatcccggcgctgatggaaaacccgcgcctgtttagccaatacccacgaatggtagccgacatcatgaacgagatgttcaccattgacggcaaaccaaaccagccggtacgcaaaatgatcatgggacacgcgaagaaaattgggctgatcaacttgctgaaagatggcattaagggagcaaccgcgctatga

SEQ ID NO: 132834 - protein, 429 aa, Shigella flexneri 2a str. 2457T
MSDDKFDAIVVGAGVAGSVAALVMARAGLDVLVIERGDSAGCKNMTGGRLYAHTLEAIIPGFAVSAPVERKVTREKISFLTEESAVTLDFHRGQPDVPQHASYTVLRNRLDPWLMEQAEQAGAQFIPGVRVDALVREGNKVTGVQAGDDILEANVVILADGVNSMLGRSLGMVPASDPHHYAVGVKEVIGLTPEQINDRFNITGEEGAAWLFAGSPSDGLMAGGFLYTNKDSISLGLVCGLGDIAHAQKSVPQMLEDFKQHPAIRPLISGGKLLEYSAHMVPEGGLAMVPQLVNEGVMIVGDAAGFCLNLGFTVRGMDLAIASAQAAATTVIAAKERADFSANSLAQYKRELEQSCVMRDMQHFRKIPALMENPRLFSQYPRMVADIMNEMFTIDGKPNQPVRKMIMGHAKKIGLINLLKDGIKGATAL

SEQ ID NO: 132835 - DNA, 1308 bp, Rhodopseudomonas palustris CGA009
  CDS (1)..(1308): transl_table=11
atgatcgaagaacgtttcgacgccatcgtcgtcggggccggcatggccggcaacgccgctgcgctgaccatggccaagcgcggcctgaaggtgctgcagatcgagcgaggcgaatacccgggctcgaagaacgtgcagggagcgattctctacgccgacatgctggagaagctggtgcccgacttccgcgaggatgcgccgctcgagcggcacctcgtcgaacagcggttctggatgatggacggcaagtcgcacaccggcctgcatcaccgttcggaagacttcaacgaagagaagccgaatcgctacaccatcatccgcgcccagttcgacaaatggctgtccagcaaggcgcaggaagccggcgcgatcgtgctgtgcgaaaccaccgtcaaggaactggtgcaggacgcttacggcaaggtgatcggcgtgatcaccgatcgtgaaggcggccaggttcatgccgacgtcgtggtactggccgaaggcgtcaacggcctgctcggcaccaaggccgagctgcgtgagcgcccgacgccggagaacgtcgcgctggctgtgaaggaaatgcacttcctgccgcgcgagaccatcgaagcccgcttcaacctgaagggcgacgagggcgtggtgatcgaggcggcgggcaccatctcggccggcatgaccggcatgggcttcatctacaccaacaaggagtcgatctcgatcggcatcggctgtctggtgtcggacttccagaagaccggcgagaccccctacggcctgctcgagcgcttcaagaagcatccgtcggtggcgccgctgatcgaaggctccgaggtgaaggaatacgccggccatctgatcccggaaggcggctacaacgcaatcccgcagctctatggtgacggctgggtcgtggtcggcgatgccgcgcagctcaataacgcgatgcaccgcgagggctccaacttggcgatgacctcgggccggatcgccgccgaggcgatcttccaggtcaagtcgcgcaaggatccgatgaccaaggagaatctggcgctctacaagaagatgctggacgatagcttcgtcatcaaggacctgaagaagtacaaggatatgccggacctgctgcatatccgctcgcagaacttcttcctgacctatccgcagctcgtcaacaaggcgctgcagaacttcgtgcgggtcgacggcacgccgaagatcgagaaggaaaagaccacgatcaagtcgttcgtgtcggcacggtcgtggggcggattgttcggcgacgcgttccgcttcgcgcgggcgtggcgataa

SEQ ID NO: 132836 - protein, 435 aa, Rhodopseudomonas palustris CGA009
MIEERFDAIVVGAGMAGNAAALTMAKRGLKVLQIERGEYPGSKNVQGAILYADMLEKLVPDFREDAPLERHLVEQRFWMMDGKSHTGLHHRSEDFNEEKPNRYTIIRAQFDKWLSSKAQEAGAIVLCETTVKELVQDAYGKVIGVITDREGGQVHADVVVLAEGVNGLLGTKAELRERPTPENVALAVKEMHFLPRETIEARFNLKGDEGVVIEAAGTISAGMTGMGFIYTNKESISIGIGCLVSDFQKTGETPYGLLERFKKHPSVAPLIEGSEVKEYAGHLIPEGGYNAIPQLYGDGWVVVGDAAQLNNAMHREGSNLAMTSGRIAAEAIFQVKSRKDPMTKENLALYKKMLDDSFVIKDLKKYKDMPDLLHIRSQNFFLTYPQLVNKALQNFVRVDGTPKIEKEKTTIKSFVSARSWGGLFGDAFRFARAWR

SEQ ID NO: 132837 - DNA, 1806 bp, Tribolium castaneum
  CDS (1)..(1806)
atggcattaaatttgtttacaagtataaaatacgctaaatctttgaaacctttggcacgatgttattcggaccagtttcccaaaatcacgacccactataccgttgtgccgcgagaaaacgacccacgatggaaagaggtgaatatggaacggttcggggacgagacggatattttaataatcgggggaggtcctgcggggatgtctgccgcgataagagccaaacaattggctgaaaaagacgggaaagagctcagggtttgtgttgtggagaaagcatctcaagtaggaggtcacattttatcaggagctgttatacaaccaacagcactcgatgaattaatccctgattgggcggataagggggcaccgttaaaaaccccagtaaaggaagacaaattcgggattttaacagccacgggtcgaatccctgttccggtactgccaggtacccccatgtacaaccacgggaactacatcgtgcggctggggcacgtggtgcaatggcttggggagcaagccgaggccatgggtgttgaaatctacccagggtacgcagcttcggaaatcctctaccatcccgatggtagcgttaaaggggtggcgaccaacgatgtgggtatcgccaaagatgggagccctaaagacaatttcgaacgaggcatggaattacatgccaaatgtaccatttttgcggagggctgccatggacatttatccaaacaaatcataaacaaattcaacttgagggcaaactccgagccacaaacctacggtattggtttgaaggagatttgggagattgatccttcgaaacacagtcctggccgcgttgagcactcgattggttggcctttggataaattcacctacggtggaagcttcctctaccacctcaatgaagatactcctttggtggcggttggatttgttgtcgccttggactattccaacccttatttgagcccttttagagagttccaaaggttcaagcaccaccctagcgtcaaacactacttcgagggaggtacacgtattgcctatggggcgcgtgctttgaacgaaggtggcttccagagtattcccaaactgacgttccctggaggatgtctcgttgggtgttcggccggcttcctcaatgtaccaaaaatcaaaggcacgcattatgccatgaaaagtgggatgttggctgcggaaagcgcctacgaagccattaatagcgaaaaacaagaaactgaaggttttgaaccgaagagctatccagacaaagttaagaacagtttcatttggaaagacttgaaacgggtgaggaacgtacgacccagcttccataatcctttggggatgtatggaggagtgatgtacagtggattttccataatgattggggggatggaaccgtggactttcaaacatggcgatcccgattacaagagactcaaaccggccaaagactgtacacctatcgattatccgaagcctgacggtaaaatcagcttcgatctcctctcttccgttgcgctgactgggaccaatcatgaaggtgaccaacccccgcatctaaccctgaaggacgataccgttcctgttaagcaaaatttgggcatttatgacgggcctgaaggccggttttgtccagcaggagtgtacgaattcgtcccgcttgaaagtggggacggtcaaaggctgcaaatcaacgcccagaactgtatacattgcaaaacttgcgatattaaagacccgagtcagaacatcaactgggtggttcccgaaggaggtggcggcccggcttacaacggaatgtaa

SEQ ID NO: 132838 - protein, 601 aa, Tribolium castaneum
MALNLFTSIKYAKSLKPLARCYSDQFPKITTHYTVVPRENDPRWKEVNMERFGDETDILIIGGGPAGMSAAIRAKQLAEKDGKELRVCVVEKASQVGGHILSGAVIQPTALDELIPDWADKGAPLKTPVKEDKFGILTATGRIPVPVLPGTPMYNHGNYIVRLGHVVQWLGEQAEAMGVEIYPGYAASEILYHPDGSVKGVATNDVGIAKDGSPKDNFERGMELHAKCTIFAEGCHGHLSKQIINKFNLRANSEPQTYGIGLKEIWEIDPSKHSPGRVEHSIGWPLDKFTYGGSFLYHLNEDTPLVAVGFVVALDYSNPYLSPFREFQRFKHHPSVKHYFEGGTRIAYGARALNEGGFQSIPKLTFPGGCLVGCSAGFLNVPKIKGTHYAMKSGMLAAESAYEAINSEKQETEGFEPKSYPDKVKNSFIWKDLKRVRNVRPSFHNPLGMYGGVMYSGFSIMIGGMEPWTFKHGDPDYKRLKPAKDCTPIDYPKPDGKISFDLLSSVALTGTNHEGDQPPHLTLKDDTVPVKQNLGIYDGPEGRFCPAGVYEFVPLESGDGQRLQINAQNCIHCKTCDIKDPSQNINWVVPEGGGGPAYNGM

SEQ ID NO: 132839 - DNA, 1299 bp, Moorella thermoacetica ATCC 39073
  CDS (1)..(1299): transl_table=11
atggctgagcgctttgaggtagtagttgtcggggccggtccggccggcctggcggcggccctgaccctggcccgggccggggtggaagtaattgtctttgagcgtggagaacacccgggcagcaaaaacgttatgggtggcgtcctctaccgccacccgacagaaactgtggtccccgggttttaccaccaggctcccctggaacgaccggtggtggaacagcgcctgtggttgctcaccgaggaggcggccctgaccctgggctataaagatatggtttttgccggcgaacccttcaatgcctttaccgtcctgcgggcccgttttgaccgctggctggccgaccaggccgtagccgccggggcgcttttgatcaacgaaaccgtcgtcgaagacctcctgtgggaaaacgagcgcgtcgtcggggtacggacaggccgggaagggggcgatgtgcgggcggaagtggttatcctggccgagggggccaactccctgttgacccagaaggccgggctgaaacccgacggcattaacaccaaccagctggccgtggccgtgaaggagattattgccctgccccgggaaaaaatcgaggatcgttttaacctggaagagggccagggctgcaccattgaactcctgggggaagccaccaaggggatgctgggcaccgcctttatctataccaataaggactccctctccgtaggtgtgggggtcctcctggcgagcctggtgcgccgccgcctgaaccccaacgacctcctggagcacctgaaatcccaccccatggtacgtcctctcctggccgggggcgagagcaaggagtaccagggacatcttatccccgagggcggttaccaggctgttcctaaactctacggcaacggcgtcctggtagtcggggatgccgccatgctggtcaacgggattcaccgggaaggttccaatctggccctgacctccggcctgctggcagccaggactatcctggccgccagggagaagggtgactacagtgaagccaacctggccccttatcgccaggccctggaggagagctttgtcctgaaggacctgaagaaataccagcgggccccatttttcttcgaccagaacccccaattcttcaccctgtaccccggcctcctctcccgggccgccagggagtttttaaccgttgacaacgtccccaagcgtgagaagcagaagcggattttgcgggagattaccacctcccgcagccgtttccagattgcccgcgatctctataacctctggagggtgatgggctga

SEQ ID NO: 132840 - protein, 432 aa, Moorella thermoacetica ATCC 39073
MAERFEVVVVGAGPAGLAAALTLARAGVEVIVFERGEHPGSKNVMGGVLYRHPTETVVPGFYHQAPLERPVVEQRLWLLTEEAALTLGYKDMVFAGEPFNAFTVLRARFDRWLADQAVAAGALLINETVVEDLLWENERVVGVRTGREGGDVRAEVVILAEGANSLLTQKAGLKPDGINTNQLAVAVKEIIALPREKIEDRFNLEEGQGCTIELLGEATKGMLGTAFIYTNKDSLSVGVGVLLASLVRRRLNPNDLLEHLKSHPMVRPLLAGGESKEYQGHLIPEGGYQAVPKLYGNGVLVVGDAAMLVNGIHREGSNLALTSGLLAARTILAAREKGDYSEANLAPYRQALEESFVLKDLKKYQRAPFFFDQNPQFFTLYPGLLSRAAREFLTVDNVPKREKQKRILREITTSRSRFQIARDLYNLWRVMG

SEQ ID NO: 132841 - DNA, 1293 bp, Desulfitobacterium hafniense Y51
  CDS (1)..(1293): transl_table=11
atgtcggaggataaattcgatgcaatagtcgtcggaggcgggatcgccggaacagtagccgcttatttgctggctaaggagggcttggaagtcatccttgtggaacggggcaattatgcagggagcaagaatatgacaggcgggcggatctatagccatagcctggagaagatcatgccggattttgcccgggaagcccctgtcgaacgccgaattaccagagaaaagatcagcttaatgaccgatgaaagcaatgtcactttggatttttattcttctaagctgggtgtgcagggcagtgattcttattccattttgagaggggtcttcgatcagtggctggctgaaaaggctgaggaggccggtgtacagattataccggggatccgagtcgatgacctaattattcgggaaggaaaagtctgcggtgtggtggcaggagaggatgagctggaagccaatatcacaattctcgccgatggtgtcaattcgctcctggctcagaaattgggatttaggggagagttggcagcccaccatgtggccgtgggagcgaaagaaatcattgaattgccaccccaagttattgaagaccgttttaactgcaatggcaatgaaggaacggcctggctatttgccgggtatccctctgacgggcgtgtgggaggtggattcctgtatacgaataaatcgagcatttccctgggagtagtcacgaccttaagtgatgtgatcaaaggaaacaaaaccgtacctcagatgttggaagattttaaacaccacccagctgtccagccacttattaaggatggcaagatgattgagtactccggtcatcttgtacctgaagccggattagccatgatccccaagattgtaggcaatggagttttggtcgtcggcgatgccgccggattctgcatcaatttaggctatatggtacgggggatggactttgcggtggcatcggccgaatgtgcggctaaagcagtacttaaagccaaagaagcgcaagatttcagcgagggataccttcattgctaccaggggttattggagcagagcttcgttatgcaggatttaaaacgatataaagatttcccccacttcctggaggaaaccccgagaattttcaatgagtatcctaaaatggcggatgatctgctgacagacatgtttgtggtcaaaggagaaccggcccaacccctaagaaaaacgctcatgcagcatgtaagcaagataggggtgttgaatattgccaaagacggttggaagggggtgcgttcactatga

SEQ ID NO: 132842 - protein, 430 aa, Desulfitobacterium hafniense Y51
MSEDKFDAIVVGGGIAGTVAAYLLAKEGLEVILVERGNYAGSKNMTGGRIYSHSLEKIMPDFAREAPVERRITREKISLMTDESNVTLDFYSSKLGVQGSDSYSILRGVFDQWLAEKAEEAGVQIIPGIRVDDLIIREGKVCGVVAGEDELEANITILADGVNSLLAQKLGFRGELAAHHVAVGAKEIIELPPQVIEDRFNCNGNEGTAWLFAGYPSDGRVGGGFLYTNKSSISLGVVTTLSDVIKGNKTVPQMLEDFKHHPAVQPLIKDGKMIEYSGHLVPEAGLAMIPKIVGNGVLVVGDAAGFCINLGYMVRGMDFAVASAECAAKAVLKAKEAQDFSEGYLHCYQGLLEQSFVMQDLKRYKDFPHFLEETPRIFNEYPKMADDLLTDMFVVKGEPAQPLRKTLMQHVSKIGVLNIAKDGWKGVRSL

SEQ ID NO: 132843 - DNA, 1311 bp, Burkholderia xenovorans LB400
  CDS (1)..(1311): transl_table=11
atgaagaagccttcacagttcgatgcgatcgtggtcggcgccggtccgtccggcaacgccgccgcctatacgatggccagggccggcctgaaagtgctgcagatcgagcgcggcgaatatcccggcagcaagaacgtgcagggcgcgatcctgtacgcgaaggcgctcgaagaaatcatcccggacttccgcgacgacgcgccgctggagcgccacatcatcgaacagcggatatggatgctcgacgacacctcgttcgtcggcacgcacatgcgcagcgaggaatacaacaagccgccctataaccgctacacgatcatccgcgcgcagttcgacaagtggttttcatcgaaagtgcgcgaagccggcgccttgctgatctgcgagaccacggtcaagcaactcatcatggacggcgatcaggtggtgggcgtgcagtgcgatcgcgagcatggcgacgtgtacgcggacgtggtggtgctcgccgacggcgtgaattcgacgctcgcgcgcaaggcgggctttcatggagagatcgaagccggcaacgtcgcgctcgcggtcaaggagattctcttcatgcccgaggagacgatccgccagcgctttaacatcggcgaggacgacggtgtcgtgatcgagatggtcggcaggatcaccgacggcatgacgggcaccggctttctttataccaacaaggaatcgctcaccatcggcgtgggctgcatgctgggcgacttcaagaagaaccccaaccgcacgagcccctacgtgctgctcgaaaagatgaagcagcacccgtcgatcgcaccgctgatcgcgggcggcgagatgaaggaatattgcgcgcatctgattccggaaggcggctttcacgccatcccgcgcgtctacggcaacggctggatgatcgtcggcgactcgggtggtttcgtgaacgccgcgcaccgcgaaggctcgaatctcgcgatgaccaccgggcgcctcgccgccgaaacggtgattcacgcgaaagccgcgggcctcggctatcgcgcggccacgctcaaggcctacaaggccgcgctcgaccagagcttcgtgatgaaagacctgcacaagtaccgcgacatgccggccgtgctgcaccagaatccgcagttcttcacgacctaccccgatctcgtggcacgcgccgcgcgcacgatgctcacggtcgacggcaaggacaagaaaagcaaggagcgcgaaattttttcgagcttccgcaaagcccgttcgcttgccggcatggtgggtgacgcctacaaactcctgagggccttccgatga

SEQ ID NO: 132844 - protein, 436 aa, Burkholderia xenovorans LB400
MKKPSQFDAIVVGAGPSGNAAAYTMARAGLKVLQIERGEYPGSKNVQGAILYAKALEEIIPDFRDDAPLERHIIEQRIWMLDDTSFVGTHMRSEEYNKPPYNRYTIIRAQFDKWFSSKVREAGALLICETTVKQLIMDGDQVVGVQCDREHGDVYADVVVLADGVNSTLARKAGFHGEIEAGNVALAVKEILFMPEETIRQRFNIGEDDGVVIEMVGRITDGMTGTGFLYTNKESLTIGVGCMLGDFKKNPNRTSPYVLLEKMKQHPSIAPLIAGGEMKEYCAHLIPEGGFHAIPRVYGNGWMIVGDSGGFVNAAHREGSNLAMTTGRLAAETVIHAKAAGLGYRAATLKAYKAALDQSFVMKDLHKYRDMPAVLHQNPQFFTTYPDLVARAARTMLTVDGKDKKSKEREIFSSFRKARSLAGMVGDAYKLLRAFR

SEQ ID NO: 132845 - DNA, 1296 bp, Fusobacterium nucleatum subsp. vincentii ATCC 49256
  CDS (1)..(1296): transl_table=11
atgagcgaagaaaaatttgatgccataatcgtaggtggcggtttggcaggttgctctgcagctattgtccttgcaaatgctggacttgcagttcttgtagtggaaagaggagatttttgtggagcaaaaaatatgacaggtggacgactttatggacacagtcttgaaaaaattattccaaactttgcagaggaagctcccatcgaaagaaagataacaagagaaaaaatttctttaatgagtgaggatagttcttttgatatagggtttggatctaaaaagttaagttcaaataatgaaaatgcttcttatacagtgcttcgttctacatttgatagatggttagcttccaaagcagaagaagcaggagcagaaattattcctggaattttagtagatgaactaattctagaagacggaaaagtagtaggagtttctgcaacaggggaagaattatatgcagatgtagtcattcttgcagatggagtaaattctcttttagcacaaagtttaggtatgaaaaaagaattagaacctcatcaagtagctgttggagcaaaagaagttattaaattaggagaagatgttattaatcaacgttttgctgtaaataatggagaaggagtagcatggctttcttgtggtgatcctaccttaggtggatttggaggaggattactttatactaataaagatagtgtttctgttggagtcgttgctactttaagtgatattggacatagtgatttatctatcaatcaattattggatagatttaaagaacaccctgctattgctccatatttagaaggtggaacttctattgaatattcaggtcatttagtcccagaagaagggcttcatatggttccagaattatatagggatggtgttttagtaactggagatgctgctggtttctgtatcaacttaggttttacagttcgtggaatggattttgctattgaatctggtcggcttgctgctgaaacagttatcaaggcacatgaaattggagattttagtgcagctacactatctgattataagaaagctcttgacagcagttttattatggaagacttaaatcaatataagggattccctactttacttggaagaagagaaatttttgaaggtcttcctgcaatggttgatgatattgctacaaaagcatttacagtagatggaaagcaaggacaaagtttgatgatgtatgttattcactctgtggcagaacatacaacagcagcaaaacttgtagattttgttaccacagtattggaggcgttttaa

SEQ ID NO: 132846 - protein, 431 aa, Fusobacterium nucleatum subsp. vincentii ATCC 49256
MSEEKFDAIIVGGGLAGCSAAIVLANAGLAVLVVERGDFCGAKNMTGGRLYGHSLEKIIPNFAEEAPIERKITREKISLMSEDSSFDIGFGSKKLSSNNENASYTVLRSTFDRWLASKAEEAGAEIIPGILVDELILEDGKVVGVSATGEELYADVVILADGVNSLLAQSLGMKKELEPHQVAVGAKEVIKLGEDVINQRFAVNNGEGVAWLSCGDPTLGGFGGGLLYTNKDSVSVGVVATLSDIGHSDLSINQLLDRFKEHPAIAPYLEGGTSIEYSGHLVPEEGLHMVPELYRDGVLVTGDAAGFCINLGFTVRGMDFAIESGRLAAETVIKAHEIGDFSAATLSDYKKALDSSFIMEDLNQYKGFPTLLGRREIFEGLPAMVDDIATKAFTVDGKQGQSLMMYVIHSVAEHTTAAKLVDFVTTVLEAF

SEQ ID NO: 132847 - DNA, 1293 bp, Desulfitobacterium hafniense DCB-2
  CDS (1)..(1293): transl_table=11
atgtctgatgatcgatttgatgccattgtggtcggtggcgggatagccggtactgtgaccgcatatctgctggccaaggaaggtctggaagtcatgctggtcgagcgggggaattactccggcagcaagaatgtaaccggcggacgcatttacagccatagcctggaaaagatcatgcccaactttgcccaggaagcgccggtagaacgtaaaattacccgtgaaaaaatcagcctgatgacagaagaaagcaatgtcacccttgatttcagttccaccaaactgggagaacaaggccgtgattcctattccgtcttaagaggcgtttttgaccagtggctggccactaaagcggaagaggcgggggttcagatcatccccggtatccgtgtcgatgatttgatccttagagaaggaaaggtctgcggaatcattgccggtgaggatgaactggaagccaatgtgacgattttagccgatggggtaaactctctgctggctcagaaattaggtttccgagatgagctgcagcctaaccaggttgccgtaggggccaaagaaatcattgaattaccggcacagaccattgaagaccgcttcaactgcaaaaaaggggagggaacctcttggctgtttgccgggaccccttcggcagggaaagttggcgggggattcatttatactaacaaagaaagcatttcactaggggtggtcagtactttaagcgagttgatcaaagccaacaaaacccttccgcaaatgctggaggattttaaagcccatccctccatcgaaccgttaatcaaaggcggcaagatggtggagtattccggccacctggttcccgaagggggactgaccatggtgcccaagatcattggccatggtgtccttgttgtgggagatgcggccggattctgtattaacttaggctacgctgtgcgggggatggactttgcggtgggttctgcggaatgtgcggccaaagcagtgctgaaagccaaagaagcccaggatttcagtgagagttctcttcagtgctatcagcttttcttggatgaaagcttcgtcatgaaggatctgaaacaatacaggaattttcctcatttccttgaggaaacccccaggatttttgatggctatcccaggctggcggcagatatcatgaaagacctatttgtggtgaccgacaatccaccccaaccccttatgaaaatgatgatgaaaaatatcagggaaatcggactgctgaacattgccaaggactgctggaaaggagtgcgttccctatga

SEQ ID NO: 132848 - protein, 430 aa, Desulfitobacterium hafniense DCB-2
MSDDRFDAIVVGGGIAGTVTAYLLAKEGLEVMLVERGNYSGSKNVTGGRIYSHSLEKIMPNFAQEAPVERKITREKISLMTEESNVTLDFSSTKLGEQGRDSYSVLRGVFDQWLATKAEEAGVQIIPGIRVDDLILREGKVCGIIAGEDELEANVTILADGVNSLLAQKLGFRDELQPNQVAVGAKEIIELPAQTIEDRFNCKKGEGTSWLFAGTPSAGKVGGGFIYTNKESISLGVVSTLSELIKANKTLPQMLEDFKAHPSIEPLIKGGKMVEYSGHLVPEGGLTMVPKIIGHGVLVVGDAAGFCINLGYAVRGMDFAVGSAECAAKAVLKAKEAQDFSESSLQCYQLFLDESFVMKDLKQYRNFPHFLEETPRIFDGYPRLAADIMKDLFVVTDNPPQPLMKMMMKNIREIGLLNIAKDCWKGVRSL

SEQ ID NO: 132849 - DNA, 1287 bp, Salmonella typhimurium
  CDS (1)..(1287): transl_table=11
atgtccgaagatatctttgatgccatcatcgtgggtgcaggtctggccggttcggttgcggcgctggtgcttgctcgcgaaggtgcacaggtgctggttatcgagcgcggcaattctgctggcgcgaagaatgtcaccggtgggcgcttgtatgcacatagcctggaacgcatcattcccggctttgcggatcaggcccccattgaacgcatgatcacccacgaaaaactcgcctttatgaccgacaacggggcgatgactatcgactactgcaatggtgaagatgcttcagcgtcgcaggtttcctattccgtcttacgcagtaaatttgacgcctggctgatggagcaggccgaagaggcgggggcgcaactgatcaccggtattcgcgtggataacgttgttcagcgtgatggcaaagtcgtgggcgtggaagccgatggcgatattctggaagccaaagtcgtgatcctcgctgacggggtgaattctctgctggctgaaaagctgggcatgaccaagcgtgttgaggcatcgcatgttgctgtcggcgtgaaggaactgatcgaattgccgaagttggtcattgaagatcgtttccagttacagggcaacgaaggtgccgcctgtctgtttgccggagcgccgaccgatggtctgatgggcggtggcttcctgtatacgaatgaaacaaccctttccctggggctggtctgcggtcttcatcatctgaaagacgcgaaaaaatcggtcccgcaaatgctggaagatttcaaacagcatccggcagttgcgccgctgatcgccggtggcaagctggtggaatatgccgcgcacgttgtacccgaggcgggaatgaatatgcagcctgaactggtgggcgatggcgtactgattgccggggatgctgccggcatgtgtatgaacctcggctttaccatccggggtatggatctcgccatatccgcaggcgaagcggcggcgaagacggtgctttcggcgatgaagcgcgacgattttagcaagcagtcgctgggtgaataccgtcagcatctggacgaaggtccgatgcgcgatatgcgcatgtatcagaaactaccggcttttcttgataatccccgcatgtttaccgcttatcccgaaatggcggtcaatatcgcgcgcgacctgttcaccgtggatggctccgctccggtgcccatgcgtaaaaaaatcctgcgccatgcgaagaaagtgggcttcattaatctgatgaaagatggcctgaaaggagtgaccgtattatga

SEQ ID NO: 132850 - protein, 428 aa, Salmonella typhimurium
MSEDIFDAIIVGAGLAGSVAALVLAREGAQVLVIERGNSAGAKNVTGGRLYAHSLERIIPGFADQAPIERMITHEKLAFMTDNGAMTIDYCNGEDASASQVSYSVLRSKFDAWLMEQAEEAGAQLITGIRVDNVVQRDGKVVGVEADGDILEAKVVILADGVNSLLAEKLGMTKRVEASHVAVGVKELIELPKLVIEDRFQLQGNEGAACLFAGAPTDGLMGGGFLYTNETTLSLGLVCGLHHLKDAKKSVPQMLEDFKQHPAVAPLIAGGKLVEYAAHVVPEAGMNMQPELVGDGVLIAGDAAGMCMNLGFTIRGMDLAISAGEAAAKTVLSAMKRDDFSKQSLGEYRQHLDEGPMRDMRMYQKLPAFLDNPRMFTAYPEMAVNIARDLFTVDGSAPVPMRKKILRHAKKVGFINLMKDGLKGVTVL

SEQ ID NO: 132851 - DNA, 1287 bp, Shigella flexneri
  CDS (1)..(1287): transl_table=11
atgtccgaagatatctttgacgccatcatcgtcggtgcagggcttgccggttcggttgccgcactggtgctcgcccgcgaaggggcgcaagtgttagttatcgagcgtggcaattccgcaggtgccaagaacgttactggcgggcgtctctatgcccacagtctggaacacattattccaggtttcgccgattccgcccccgtagaacgcctgatcacccatgaaaaactcgcgtttatgacggaaaagtcagcgatgactatggactactgcaacggtgacgaaacctcgccatcccagcgttcttactccgttttgcgcagtaaatttgatgcctggttgatggagcaggccgaagaagcgggcgcgcagttaattaccgggatccgcgtcgataacctcgtacagcgcgatggcaaagtcgtcggtgtagaagccgatggtgatgtgattgaagcgaaaacggtgctccttgctgatggggtgaactccatccttgccgaaaagttggggatggcaaaacgcgttaaaccgacggatgtggcggttggcgtgaaggaactgatcgagttaccgaagtcggtaatcgaagaccgttttcagttgcagggtaatcagggcgcggcttgtctgtttgcgggatcacccaccgatggcctgatgggcggcggcttcctttataccaatgaaaataccctgtcgctggggctggtttgtggtctgcatcatctgcatgacgcgaaaaaatcggtgccgcaaatgctggaagatttcaaacagcatccggccgttgcaccgctgatcgcgggcggcaagctggtggaatattccgctcacgtagtgccggaagcaggcatcaacatgctgccggagctggtcggtgacggcgtattgattgccggtgatgccgccggaatgtgtatgaacctcggttttaccattcgcggtatggatctggcgattgccgccggggaagctgcagcaaaaaccgtgctttcagcgatgaaaagcgacgatttcagtaagcaaaaactcgcggaatatcgtcagcatctggagagtggcccgctgcgcgatatgcgcatgtaccagaaactaccggcgttccttgataacccacgcatgtttagcggcaacccggaactggcggtgggcgtggcgcgtgacctgttcaccattgacggcagtgcgccggaactgatgcgcaagaaaatcctccgccacggcaagaaagtgggcttcatcaatctgatcaaggatggcatgaaaggagtgaccgttttatga

SEQ ID NO: 132852 - protein, 428 aa, Shigella flexneri
MSEDIFDAIIVGAGLAGSVAALVLAREGAQVLVIERGNSAGAKNVTGGRLYAHSLEHIIPGFADSAPVERLITHEKLAFMTEKSAMTMDYCNGDETSPSQRSYSVLRSKFDAWLMEQAEEAGAQLITGIRVDNLVQRDGKVVGVEADGDVIEAKTVLLADGVNSILAEKLGMAKRVKPTDVAVGVKELIELPKSVIEDRFQLQGNQGAACLFAGSPTDGLMGGGFLYTNENTLSLGLVCGLHHLHDAKKSVPQMLEDFKQHPAVAPLIAGGKLVEYSAHVVPEAGINMLPELVGDGVLIAGDAAGMCMNLGFTIRGMDLAIAAGEAAAKTVLSAMKSDDFSKQKLAEYRQHLESGPLRDMRMYQKLPAFLDNPRMFSGNPELAVGVARDLFTIDGSAPELMRKKILRHGKKVGFINLIKDGMKGVTVL

SEQ ID NO: 132853 - DNA, 1290 bp, Escherichia coli
  CDS (1)..(1290): transl_table=11
atgtcggatgacaaatttgatgccattgtggtcggtgcgggcgttgctggtagcgttgccgcactggtcatggcacgagccgggctggatgtcctggtgatagaacgcggcgacagtgccggatgtaaaaacatgaccggcgggcgtctttatgcccacacacttgaagcaatcattccaggctttgcagtatcagcgccggtagaacgcaaggtcacacgcgagaaaatctccttcttaaccgaagaaagcgccgttaccctcgattttcaccgcgagcagccagatgttccgcaacacgcatcttataccgtattgcgtaatcgtctggacccgtggttgatggaacaagccgagcaggcgggcgcgcagtttatcccaggcgttcgcgtcgacgcgctggttcgtgaaggaaacaaggtcactggcgtgcaggctggggatgatattctcgaagcgaatgtggtgattctggctgatggcgttaactcgatgcttggccgctcgctgggaatggttcccgcttccgatccgcatcattacgctgttggtgttaaagaggttattggcctcacaccagaacagatcaacgatcgctttaatattacgggcgaggaaggtgccgcctggctgtttgccggttccccttctgacggcctgatgggcgggggatttctctataccaacaaggattccatatccttggggctggtttgtggattgggtgatatcgcccatgcgcaaaaaagcgtgccgcaaatgctggaagattttaaacaacaccccgccattcgcccgctgattagcggcggcaaactgcttgaatattccgcgcatatggtgccggaaggcggtctggcaatggtgccgcaactggttaacgagggcgtgatgatcgttggtgacgccgcaggcttctgcctgaatttgggttttacggtccgcggcatggatttagccattgcatcggctcaggctgccgccacaacggtgatcgccgccaaagaacgcgcggatttctccgccagcagtctggcgcaatacaaacgtgagctggaacaaagctgcgtcatgcgtgatatgcagcattttcgcaagatcccggcgctgatggaaaacccgcgcctgtttagccaatacccacgaatggtagccgacatcatgaacgagatgttcaccatcgacggcaaaccaaaccagccggtacgaaaaatgatcatgggacatgcgaagaaaattgggctgatcaacttgctgaaagatggcattaagggagcaaccgcgctatga

SEQ ID NO: 132854 - protein, 429 aa, Escherichia coli
MSDDKFDAIVVGAGVAGSVAALVMARAGLDVLVIERGDSAGCKNMTGGRLYAHTLEAIIPGFAVSAPVERKVTREKISFLTEESAVTLDFHREQPDVPQHASYTVLRNRLDPWLMEQAEQAGAQFIPGVRVDALVREGNKVTGVQAGDDILEANVVILADGVNSMLGRSLGMVPASDPHHYAVGVKEVIGLTPEQINDRFNITGEEGAAWLFAGSPSDGLMGGGFLYTNKDSISLGLVCGLGDIAHAQKSVPQMLEDFKQHPAIRPLISGGKLLEYSAHMVPEGGLAMVPQLVNEGVMIVGDAAGFCLNLGFTVRGMDLAIASAQAAATTVIAAKERADFSASSLAQYKRELEQSCVMRDMQHFRKIPALMENPRLFSQYPRMVADIMNEMFTIDGKPNQPVRKMIMGHAKKIGLINLLKDGIKGATAL

SEQ ID NO: 132855 - DNA, 1302 bp, Escherichia coli
  CDS (31)..(1302): transl_table=11
gtgttgtgttctggatatctggggcatgacatggaagacgactgcgacattattattattggtgccggtattgcaggcaccgcttgcgcgttacgctgcgcgcgagcgggtttatccgttttgttactggaacgcgctgaaatccccggcagcaaaaatctttccggcgggcggttatatacccatgcactcgcggaactcctcccgcaatttcatctgaccgcgcctcttgaacgacgcatcactcacgaaagcctttccctgttaacgcccgatggcgtaacgacgttttccagcttacagcccggcggtgaatcctggagtgtattacgtgcacgattcgatccgtggctggttgccgaagccgaaaaagaaggtgtcgaatgcatccccggagcgacggtggatgcactgtatgaagaaaacggcagagtctgtggcgttatttgtggtgacgatattctccgcgcccgttatgtggtgctggcagaaggtgccaacagcgtcctggctgaacgtcacgggttagtgactcgtcctgctggcgaagcgatggcgttggggatcaaagaagtgctgtcgctggaaacatccgctattgaagaacgttttcatctggagaataacgaaggcgcagcgttgctgttcagcggcaggatctgtgatgacttacccggcggcgcatttctttatactaatcaacaaacgctctcgttagggattgtttgcccgctctcttcccttacgcaaagtcgtgttccggcaagcgagctgctgactcgctttaaagcgcatccggcagtgcgcccgcttatcaaaaacacggaatcactggagtatggtgcgcatctggtgccagaaggtggcttgcacagtatgccggtgcaatacgccggtaacggctggctgctggtgggcgatgcgttgcgcagttgcgtcaataccggaatttccgtgcgcggcatggatatggcgctgactggcgcgcaggcggcggcacaaacgctgataagcgcctgccagcaccgcgagccgcaaaatctgtttccgctttatcatcacaacgtagagcgcagcctgctgtgggatgttctacagcgttatcagcatgttccggcgcttttgcaacgcccgggatggtaccgtacgtggcctgcgttaatgcaggatatttcccgcgatttatgggatcagggtgataaacctgttccaccgctgcgccagttattctggcatcatttacgtcgtcacggcctgtggcatctggcgggcgatgttatcaggagtctgcgatgtctgtag

SEQ ID NO: 132856 - protein, 423 aa, Escherichia coli
MEDDCDIIIIGAGIAGTACALRCARAGLSVLLLERAEIPGSKNLSGGRLYTHALAELLPQFHLTAPLERRITHESLSLLTPDGVTTFSSLQPGGESWSVLRARFDPWLVAEAEKEGVECIPGATVDALYEENGRVCGVICGDDILRARYVVLAEGANSVLAERHGLVTRPAGEAMALGIKEVLSLETSAIEERFHLENNEGAALLFSGRICDDLPGGAFLYTNQQTLSLGIVCPLSSLTQSRVPASELLTRFKAHPAVRPLIKNTESLEYGAHLVPEGGLHSMPVQYAGNGWLLVGDALRSCVNTGISVRGMDMALTGAQAAAQTLISACQHREPQNLFPLYHHNVERSLLWDVLQRYQHVPALLQRPGWYRTWPALMQDISRDLWDQGDKPVPPLRQLFWHHLRRHGLWHLAGDVIRSLRCL

SEQ ID NO: 132857 - DNA, 1728 bp, Oryza sativa
  CDS (1)..(1728)
atgcaacgagtgctccgcgcggcggcggcggggattggccacgcgtcgggccaccgcgcgccgaggtggggcgcggcggcggcggcggcgaggtggctgagcgggggcagggaggcgatgagctacgacgtggtggtcgtgggggctgggcccgcggggctcgccgcggccatccggctgaagcagctctgccgcgacgccgacaccgacctctccgtctgcgtcctcgagaagggctccgaagtcggtgcgcatgtattgtcggggaacgtgttcgagccacgagcgttggatgaactcatcccgaagtggaggcaagaggataccccaataagagtccccgtctcatctgacaagttctggctgttgacaaagaataaggcatggacacttccatctcctttcgataacaagggaaactatgtgataagcttgagccaaatggtgcgatggatggcctccaaagctgaagaattgggtgttgaagtatatccaggttttgctgcgagtgagatcctttatgatgaaaatcaaatagttacaggcgttgcaaccaatgatgttggtattgctaaagatggttccaaaagggaaacttttcaacctggtgttgaactaagagggcgaatgacactgttggccgagggttgccgaggttcattatcagagaaaataataaggaaccacaagctcagagagagtgggcaaggccagcatcagacatatgctcttggaattaaggaggtttgggagatcgaggaaggaaagcacaagccaggttctgtgattcatactgtagggtggcctttggactcgaaaacatatggaggatcatttatgtatcaccttgatgatagacagttagcgataggtctggttgttgccttgaactatcaaaatcctttcatgagcccatacgatgaattccagaaattcaagcaacaccctgctgtcaggacaattttggatggtggaacagttcttcagtatggtgctcgtacgttgaatgaaggtggttttcaatcaataccaaatccagttttccctggaggtgcaattattggatgctctgcagggttccttaatgttcccaaaataaaaggaactcatacagccatgaagtcaggtatgctggctgcagaagcaactttcaaaactcttgttgaaggatcttcgatggaactctattgggagaatctcaagaagtcatggatatgggaagagctttatagagctcggaattacagaccagcatttgaatatggatttattccaggcattgccttgtctgcactggaacgatacgtattcaaaggaaagtccccctttaccttaaagcacgggatacctgaccatgaagcaacagatatggccagtttgcactcgcctattcaatatccgaaaccagatggtcaaatatcctttgacgtaccaacttctttatacaggagcagcacaaaccatgagcatgatcaacctcctcatctccgtttgagggatcctacagtaccggagagagtaaatcttcctctgtatgctggaccagagtcacattattgtccagctcgagtttacgagtatgtcaccgacgagaaaggtgaccagaagcttcacataaatgctcaaaattgtcttcattgcaaggcttgtgacatcaaagatccaaagcaaaacatcgaatggaccgttccagaaggtggaggcggtccagggtacacagtaatgtag

SEQ ID NO: 132858 - protein, 575 aa, Oryza sativa
MQRVLRAAAAGIGHASGHRAPRWGAAAAAARWLSGGREAMSYDVVVVGAGPAGLAAAIRLKQLCRDADTDLSVCVLEKGSEVGAHVLSGNVFEPRALDELIPKWRQEDTPIRVPVSSDKFWLLTKNKAWTLPSPFDNKGNYVISLSQMVRWMASKAEELGVEVYPGFAASEILYDENQIVTGVATNDVGIAKDGSKRETFQPGVELRGRMTLLAEGCRGSLSEKIIRNHKLRESGQGQHQTYALGIKEVWEIEEGKHKPGSVIHTVGWPLDSKTYGGSFMYHLDDRQLAIGLVVALNYQNPFMSPYDEFQKFKQHPAVRTILDGGTVLQYGARTLNEGGFQSIPNPVFPGGAIIGCSAGFLNVPKIKGTHTAMKSGMLAAEATFKTLVEGSSMELYWENLKKSWIWEELYRARNYRPAFEYGFIPGIALSALERYVFKGKSPFTLKHGIPDHEATDMASLHSPIQYPKPDGQISFDVPTSLYRSSTNHEHDQPPHLRLRDPTVPERVNLPLYAGPESHYCPARVYEYVTDEKGDQKLHINAQNCLHCKACDIKDPKQNIEWTVPEGGGGPGYTVM

SEQ ID NO: 132859 - DNA, 1719 bp, Oryza sativa
  CDS (1)..(1719)
atgcaacgagtgctccgcgcggcggcggcggggattggccacgcgtcgggccaccgcgcgccgaggtggggcgcggcggcggcggcggcgaggtggctgagcgggggcagggaggcgatgagctacgacgtggtggtcgtgggggctgggcccgcggggctcgccgcggccatccggctgaagcagctctgccgcgacgccgacaccgacctctccgtctgcgtcctcgagaagggctccgaagtcggtgcgcatgtattgtcggggaacgtgttcgagccacgagcgttggatgaactcatcccgaagtggaggcaagaggataccccaataagagtccccgtctcatctgacaagttctggctgttgacaaagaataaggcatggacacttccatctcctttcgataacaagggaaactatgtgataagcttgagccaaatggtgcgatggatggcctccaaagctgaagaattgggtgttgaagtatatccaggttttgctgcgattacaggcgttgcaaccaatgatgttggtattgctaaagatggttccaaaagggaaacttttcaacctggtgttgaactaagaggcgactacttagaaaatgcagggcgaatgacactgttggccgagggttgccgaggttcattatcagagaaaataataaggaaccacaagctcagagagagtgggcaaggccagcatcagacatatgctcttggaattaaggaggtttgggagatcgaggaaggaaagcacaagccaggttctgtgattcatactgtagggtggcctttggactcgaaaacatatggaggatcatttatgtatcaccttgatgatagacagttagcgataggtctggttgttgccttgaactatcaaaatcctttcatgagcccatacgatgaattccagaaattcaagcaacaccctgctgtcaggacaattttggatggtggaacagttcttcagtatggtgctcgtacgttgaatgaaggtggttttcaatcaataccaaatccagttttccctggaggtgcaattattggatgctctgcagggttccttaatgttcccaaaataaaaggaactcatacagccatgaagtcaggtatgctggctgcagaagcaactttcaaaactcttgttgaaggatcttcgatggaactctattgggagaatctcaagaagtcatggatatgggaagagctttatagagctcggaattacagaccagcatttgaatatggatttattccaggcattgccttgtctgcactggaacgatacgtattcaaaggaaagtccccctttaccttaaagcacgggatacctgaccatgaagcaacagatatggccagtttgcactcgcctattcaatatccgaaaccagatggtcaaatatcctttgacgtaccaacttctttatacaggagcagcacaaaccatgagcatgatcaacctcctcatctccgtttgagggatcctacagtaccggagagagtaaatcttcctctgtatgctggaccagagtcacattattgtccagctcgagtttacgagtatgtcaccgacgagaaaggtgaccagaagcttcacataaatgctcaaaattgtcttcattgcaaggcttgtgacatcaaagatccaaagcaaaacatcgaatggaccgttccagaaggtggaggcggtccagggtacacagtaatgtag

SEQ ID NO: 132860 - protein, 572 aa, Oryza sativa
MQRVLRAAAAGIGHASGHRAPRWGAAAAAARWLSGGREAMSYDVVVVGAGPAGLAAAIRLKQLCRDADTDLSVCVLEKGSEVGAHVLSGNVFEPRALDELIPKWRQEDTPIRVPVSSDKFWLLTKNKAWTLPSPFDNKGNYVISLSQMVRWMASKAEELGVEVYPGFAAITGVATNDVGIAKDGSKRETFQPGVELRGDYLENAGRMTLLAEGCRGSLSEKIIRNHKLRESGQGQHQTYALGIKEVWEIEEGKHKPGSVIHTVGWPLDSKTYGGSFMYHLDDRQLAIGLVVALNYQNPFMSPYDEFQKFKQHPAVRTILDGGTVLQYGARTLNEGGFQSIPNPVFPGGAIIGCSAGFLNVPKIKGTHTAMKSGMLAAEATFKTLVEGSSMELYWENLKKSWIWEELYRARNYRPAFEYGFIPGIALSALERYVFKGKSPFTLKHGIPDHEATDMASLHSPIQYPKPDGQISFDVPTSLYRSSTNHEHDQPPHLRLRDPTVPERVNLPLYAGPESHYCPARVYEYVTDEKGDQKLHINAQNCLHCKACDIKDPKQNIEWTVPEGGGGPGYTVM

SEQ ID NO: 132861 - DNA, 1839 bp, Brassica napus
  CDS (1)..(1839)
atgcatagattccttctaaagctatcttcttcttctactaatccattgagaaactctaagtttcaacgtttgatcctcccttcactaaatcttttcgcatctgggtctcctcctcctccttctgcgaatccttattcggccgattcgtttcgaaagtcgcgagctttcagctcaaagtcgagggctttaggtgtaagatgtatcagcagcgaagcggggagagaggctatagagtacgatgttgtcatcatcggagccggacccgctggtctatctgctgctatacggttgaaacagctctgtcaggagaagaacactgatctgtctgtatgcgtcgttgagaaaggagctgaagttggaggacacgtcatatctggaaatgtttttgagcctttggcgttagatgaacttctcccacattggagacaagaacaggcacccattgaggtcgctgcttcttctgataagttctggtttctgacgaaagaccgtgcaatcccacttccttctccctttgataacaagggaaactacattattagtttgagccagctggtgcgttggttaggaggcaaagctgaggagcttggaatagagatataccctggcttttcagctagtgaggtgttgtacaatgcaagcgatgaggttgttgggattgcaaccaaagatatgggaatatccaaagatggttctaagaaggagacttttcagccaggcgtacacataaaagggagagttactctatttgctgagggatgcagaggatcattgtccgagaaaataatcaaaaagtataaattaagagaggaggttaatgcacaacatcagacatatgctttgggaattaaggaggtttgggagatagatgaaagcaagcataaccccggagaggttgttcacactttgggttggcccttggatcctaagacatacggaggttctttcttgtaccacatgaacgatagacaggttgcgcttggcttggtcgttgccttgaattacaaaaaccctttcttgaatccatatgaggagtttcagaaactcaaacaccatccagccattaaacgcatcttggaaggtggtactgtgcttcagtatggagctcgcactttaaatgaaggtggttttcagtccattccctatccagtctttcctggaggagcaattattggttgttcagctggttttctcaatgtacccaagattaaagggacacataccgcaatgaaatcaggaatgttggcagcagaggctgcatttggtgcacttcatgaaggtttaaacatgaacacatactgggacaccctgaggggttcatgggtgtggaaggagctctactcagctcgaaactaccgacctgcatttgagtatgggctaatccctggcttggccgtaagtgctatggaacactatgtactgaaaggaaaggtccctttcacgttgaagcacgggaaagcagaccacgaagcaaccgatcttgctcggaaatgcaagccaattgagtatccaaagccagatggtgttttgtcctttgacgtgccaacgtctttatacaggagtaacaccaatcatgatcatgaccagccatctcatttgcgattgagggattcaaagattccagaaaaggtgaacttaccagagtatgctgcaccagagtcacgttactgcccggctcgtgtatacgagtatgttgaagatgaagagggtaagccgaaactgcagatcaacgctcaaaactgtttgcactgcaaggcgtgtgacattaaagatccgaagcaaaacatagagtggacagtgcctgaaggtggtggaggccctgcttattccatcatgtag

SEQ ID NO: 132862 - protein, 612 aa, Brassica napus
MHRFLLKLSSSSTNPLRNSKFQRLILPSLNLFASGSPPPPSANPYSADSFRKSRAFSSKSRALGVRCISSEAGREAIEYDVVIIGAGPAGLSAAIRLKQLCQEKNTDLSVCVVEKGAEVGGHVISGNVFEPLALDELLPHWRQEQAPIEVAASSDKFWFLTKDRAIPLPSPFDNKGNYIISLSQLVRWLGGKAEELGIEIYPGFSASEVLYNASDEVVGIATKDMGISKDGSKKETFQPGVHIKGRVTLFAEGCRGSLSEKIIKKYKLREEVNAQHQTYALGIKEVWEIDESKHNPGEVVHTLGWPLDPKTYGGSFLYHMNDRQVALGLVVALNYKNPFLNPYEEFQKLKHHPAIKRILEGGTVLQYGARTLNEGGFQSIPYPVFPGGAIIGCSAGFLNVPKIKGTHTAMKSGMLAAEAAFGALHEGLNMNTYWDTLRGSWVWKELYSARNYRPAFEYGLIPGLAVSAMEHYVLKGKVPFTLKHGKADHEATDLARKCKPIEYPKPDGVLSFDVPTSLYRSNTNHDHDQPSHLRLRDSKIPEKVNLPEYAAPESRYCPARVYEYVEDEEGKPKLQINAQNCLHCKACDIKDPKQNIEWTVPEGGGGPAYSIM

SEQ ID NO: 132863 - DNA, 24 bp, Artificial sequence
  primer
atgttgtgttctggatatctgggg

SEQ ID NO: 132864 - DNA, 24 bp, Artificial sequence
  primer
ttacagacatcgcagactcctgat

SEQ ID NO: 132865 - protein, 488 aa, Artificial sequence
  consensus sequence
  Variant (2)..(5): Xaa in position 2 to 5 is any amino acid
  Variant (7)..(7): Xaa in position 7 is any amino acid
  Variant (9)..(9): Xaa in position 9 is any amino acid
  Variant (12)..(13): Xaa in position 12 to 13 is any amino acid
  Variant (16)..(18): Xaa in position 16 to 18 is any amino acid
  Variant (20)..(22): Xaa in position 20 to 22 is any amino acid
  Variant (23)..(28): Xaa in position 23 to 28 is any or no amino acid
  Variant (30)..(30): Xaa in position 30 is any amino acid
  Variant (32)..(34): Xaa in position 32 to 34 is any amino acid
  Variant (38)..(40): Xaa in position 38 to 40 is any amino acid
  Variant (42)..(42): Xaa in position 42 is any amino acid
  Variant (45)..(46): Xaa in position 45 to 46 is any amino acid
  Variant (48)..(50): Xaa in position 48 to 50 is any amino acid
  Variant (52)..(54): Xaa in position 52 to 54 is any amino acid
  Variant (56)..(59): Xaa in position 56 to 59 is any amino acid
  Variant (61)..(61): Xaa in position 61 is any amino acid
  Variant (63)..(65): Xaa in position 63 to 65 is any amino acid
  Variant (66)..(66): Xaa in position 66 is any or no amino acid
  Variant (69)..(69): Xaa in position 69 is any amino acid
  Variant (72)..(98): Xaa in position 72 to 98 is any amino acid
  Variant (99)..(104): Xaa in position 99 to 104 is any or no amino acid
  Variant (106)..(108): Xaa in position 106 to 108 is any amino acid
  Variant (110)..(112): Xaa in position 110 to 112 is any amino acid
  Variant (114)..(114): Xaa in position 114 is any amino acid
  Variant (117)..(119): Xaa in position 117 to 119 is any amino acid
  Variant (122)..(123): Xaa in position 122 to 123 is any amino acid
  Variant (125)..(129): Xaa in position 125 to 129 is any amino acid
  Variant (131)..(132): Xaa in position 131 to 132 is any amino acid
  Variant (134)..(142): Xaa in position 134 to 142 is any amino acid
  Variant (143)..(143): Xaa in position 143 is any or no amino acid
  Variant (145)..(145): Xaa in position 145 is any amino acid
  Variant (148)..(155): Xaa in position 148 to 155 is any amino acid
  Variant (156)..(157): Xaa in position 156 to 157 is any or no amino acid
  Variant (159)..(162): Xaa in position 159 to 162 is any amino acid
  Variant (163)..(183): Xaa in position 163 to 183 is any or no amino acid
  Variant (186)..(186): Xaa in position 186 is any amino acid
  Variant (188)..(188): Xaa in position 188 is any amino acid
  Variant (190)..(191): Xaa in position 190 to 191 is any amino acid
  Variant (193)..(203): Xaa in position 193 to 203 is any amino acid
  Variant (204)..(208): Xaa in position 204 to 208 is any or no amino acid
  Variant (210)..(212): Xaa in position 210 to 212 is any amino acid
  Variant (215)..(217): Xaa in position 215 to 217 is any amino acid
  Variant (219)..(222): Xaa in position 219 to 222 is any amino acid
  Variant (224)..(225): Xaa in position 224 to 225 is any amino acid
  Variant (228)..(233): Xaa in position 228 to 233 is any amino acid
  Variant (235)..(240): Xaa in position 235 to 240 is any amino acid
  Variant (242)..(248): Xaa in position 242 to 248 is any amino acid
  Variant (249)..(249): Xaa in position 249 is any or no amino acid
  Variant (252)..(252): Xaa in position 252 is any amino acid
  Variant (254)..(254): Xaa in position 254 is any amino acid
  Variant (258)..(261): Xaa in position 258 to 261 is any amino acid
  Variant (262)..(263): Xaa in position 262 to 263 is any or no amino acid
  Variant (265)..(282): Xaa in position 265 to 282 is any amino acid
  Variant (283)..(284): Xaa in position 283 to 284 is any or no amino acid
  Variant (286)..(287): Xaa in position 286 to 287 is any amino acid
  Variant (290)..(290): Xaa in position 290 is any amino acid
  Variant (293)..(299): Xaa in position 293 to 299 is any amino acid
  Variant (301)..(304): Xaa in position 301 to 304 is any amino acid
  Variant (307)..(308): Xaa in position 307 to 308 is any amino acid
  Variant (310)..(311): Xaa in position 310 to 311 is any amino acid
  Variant (314)..(314): Xaa in position 314 is any amino acid
  Variant (316)..(319): Xaa in position 316 to 319 is any amino acid
  Variant (321)..(325): Xaa in position 321 to 325 is any amino acid
  Variant (326)..(326): Xaa in position 326 is any or no amino acid
  Variant (328)..(331): Xaa in position 328 to 331 is any amino acid
  Variant (335)..(343): Xaa in position 335 to 343 is any amino acid
  Variant (344)..(346): Xaa in position 344 to 346 is any or no amino acid
  Variant (348)..(350): Xaa in position 348 to 350 is any amino acid
  Variant (352)..(357): Xaa in position 352 to 357 is any amino acid
  Variant (360)..(364): Xaa in position 360 to 364 is any amino acid
  Variant (366)..(374): Xaa in position 366 to 374 is any amino acid
  Variant (375)..(380): Xaa in position 375 to 380 is any or no amino acid
  Variant (382)..(386): Xaa in position 382 to 386 is any amino acid
  Variant (387)..(387): Xaa in position 387 is any or no amino acid
  Variant (389)..(400): Xaa in position 389 to 400 is any amino acid
  Variant (402)..(413): Xaa in position 402 to 413 is any amino acid
  Variant (414)..(419): Xaa in position 414 to 419 is any or no amino acid
  Variant (421)..(459): Xaa in position 421 to 459 is any amino acid
  Variant (460)..(487): Xaa in position 460 to 487 is any or no amino acid
DXXXXGXGXAGXXAAXXXAXXXXXXXXXLXVXXXERGXXXGXKNXXGXXXYXXXLXXXXPXFXXXXAPXERXXXXXXXXXXXXXXXXXXXXXXXXXXXXXXXXXYXXXRXXXDXWLXXXAEXXGXXXXXGXXVXXXXXXXXXXVXGVXXXXXXXXXXAXXXXXXXXXXXXXXXXXXXXXXXXXLAXGXNXXLXXXXXXXXXXXXXXXXAXXXKEXXXLXXXXIXXRFXXXXXXGXXXXXXGXXXXXXXXGGXFXYTNXXXXXXGXXXXXXXXXXXXXXXXXXXXLXXFKXHPXXXXXXXGXXXXEYXXHXXPEXGXXXXPXXXXXXGXXXXGDAXXXXXXXXXXXXGXXXAXXXXXXAAXXXXXAXXXXXXXXXXXXXXXYXXXXXXSXXXXXXXXXXXXPXXXXXXXXXXXXXXXXXXPXXXXXXXXXXXXXXXXXXXXXXXXXXXXXXXXXXXXXXXXXXXXXXXXXXXXXXXXXXXXXXXXXXXD

SEQ ID NO: 132866 - protein, 32 aa, Artificial sequence
  protein pattern
  Variant (2)..(2): Xaa in position 2 is any amino acid
  Variant (5)..(5): Xaa in position 5 is any amino acid
  Variant (6)..(6): Xaa in position 6 is Ile or Val
  Variant (7)..(7): Xaa in position 7 is any amino acid
  Variant (8)..(8): Xaa in position 8 is Pro or Thr
  Variant (9)..(9): Xaa in position 9 is any amino acid
  Variant (10)..(10): Xaa in position 10 is Ile or Leu
  Variant (11)..(11): Xaa in position 11 is any amino acid
  Variant (12)..(12): Xaa in position 12 is Asp, Gly or Asn
  Variant (13)..(13): Xaa in position 13 is Gly, Ser or Thr
  Variant (14)..(16): Xaa in position 14 to 16 is any amino acid
  Variant (19)..(19): Xaa in position 19 is any amino acid
  Variant (20)..(20): Xaa in position 20 is Ala or Gly
  Variant (22)..(22): Xaa in position 22 is Leu, Met or Val
  Variant (23)..(23): Xaa in position 23 is Ile or Val
  Variant (26)..(26): Xaa in position 26 is Ala, Glu or Gly
  Variant (28)..(31): Xaa in position 28 to 31 is any amino acid
KXHPXXXXXXXXXXXXEYXXHXXPEXGXXXXP

SEQ ID NO: 132867 - protein, 40 aa, Artificial sequence
  protein pattern
  Variant (2)..(3): Xaa in position 2 to 3 is any amino acid
  Variant (4)..(4): Xaa in position 4 is Asp or Gly
  Variant (5)..(5): Xaa in position 5 is Ala or Leu
  Variant (6)..(6): Xaa in position 6 is any amino acid
  Variant (8)..(9): Xaa in position 8 to 9 is any or no amino acid
  Variant (11)..(12): Xaa in position 11 to 12 is any or no amino acid
  Variant (14)..(14): Xaa in position 14 is Lys or Arg
  Variant (15)..(15): Xaa in position 15 is Ala or Gly
  Variant (16)..(16): Xaa in position 16 is Asp, Glu, Asn or Ser
  Variant (17)..(18): Xaa in position 17 to 18 is any amino acid
  Variant (20)..(20): Xaa in position 20 is Ala, Cys or Ser
  Variant (21)..(21): Xaa in position 21 is His or Lys
  Variant (22)..(22): Xaa in position 22 is Asn or Val
  Variant (23)..(23): Xaa in position 23 is Leu, Met or Val
  Variant (24)..(24): Xaa in position 24 is Gln, Ser or Thr
  Variant (26)..(27): Xaa in position 26 to 27 is any amino acid
  Variant (28)..(28): Xaa in position 28 is Phe, Ile, Leu or Met
  Variant (29)..(29): Xaa in position 29 is any amino acid
  Variant (30)..(30): Xaa in position 30 is Ala, Gly, Pro, Ser or Thr
  Variant (31)..(31): Xaa in position 31 is Asp, His, Lys or Arg
  Variant (32)..(32): Xaa in position 32 is any amino acid
  Variant (34)..(34): Xaa in position 34 is Ala, Asp or Glu
  Variant (35)..(35): Xaa in position 35 is any amino acid
  Variant (36)..(36): Xaa in position 36 is Ile or Leu
  Variant (37)..(37): Xaa in position 37 is Ile, Leu, Met or Val
  Variant (39)..(39): Xaa in position 39 is any amino acid
  Variant (40)..(40): Xaa in position 40 is Phe or Trp
AXXXXXVXXLXXEXXXXXGXXXXXGXXXXXXXLXXXXPXX

SEQ ID NO: 132868 - protein, 26 aa, Artificial sequence
  protein pattern
  Variant (2)..(3): Xaa in position 2 to 3 is any amino acid
  Variant (4)..(7): Xaa in position 4 to 7 is any or no amino acid
  Variant (9)..(9): Xaa in position 9 is Leu or Met
  Variant (10)..(10): Xaa in position 10 is any amino acid
  Variant (11)..(11): Xaa in position 11 is Ala, Glu, Gly, Ser or Thr
  Variant (12)..(12): Xaa in position 12 is any amino acid
  Variant (15)..(16): Xaa in position 15 to 16 is any amino acid
  Variant (18)..(18): Xaa in position 18 is Ala, Ile or Val
  Variant (19)..(19): Xaa in position 19 is Glu or Gln
  Variant (20)..(21): Xaa in position 20 to 21 is any amino acid
  Variant (22)..(22): Xaa in position 22 is Pro or Thr
  Variant (24)..(25): Xaa in position 24 to 25 is any amino acid
  Variant (26)..(26): Xaa in position 26 is Ala or Val
LXXXXXXWXXXXAEXXGXXXXXGXXX

SEQ ID NO: 132869 - protein, 16 aa, Artificial sequence
  protein pattern
  Variant (2)..(2): Xaa in position 2 is Ala, Ile or Val
  Variant (3)..(3): Xaa in position 3 is Ile, Leu or Val
  Variant (4)..(5): Xaa in position 4 to 5 is Ile or Val
  Variant (7)..(7): Xaa in position 7 is Ala or Gly
  Variant (9)..(9): Xaa in position 9 is any amino acid
  Variant (12)..(12): Xaa in position 12 is any amino acid
  Variant (13)..(13): Xaa in position 13 is any or no amino acid
  Variant (15)..(15): Xaa in position 15 is any or no amino acid
DXXXXGXGXAGXXAXA

SEQ ID NO: 132870 - protein, 21 aa, Artificial sequence
  protein pattern
  Variant (2)..(4): Xaa in position 2 to 4 is any amino acid
  Variant (5)..(6): Xaa in position 5 to 6 is any or no amino acid
  Variant (8)..(8): Xaa in position 8 is any or no amino acid
  Variant (10)..(10): Xaa in position 10 is any amino acid
  Variant (11)..(11): Xaa in position 11 is Asp or Asn
  Variant (12)..(12): Xaa in position 12 is Phe, Leu or Met
  Variant (14)..(14): Xaa in position 14 is Ile, Leu, Met or Val
  Variant (15)..(15): Xaa in position 15 is Ala, Glu, Gly, Ser or Thr
  Variant (16)..(16): Xaa in position 16 is Ala, Gly, Ser or Thr
  Variant (17)..(17): Xaa in position 17 is Ala or Gly
  Variant (18)..(19): Xaa in position 18 to 19 is any amino acid
  Variant (21)..(21): Xaa in position 21 is Ala or Gly
NXXXXXRXGXXXAXXXXXXAX

SEQ ID NO: 132871 - protein, 28 aa, Artificial sequence
  protein pattern
  Variant (2)..(4): Xaa in position 2 to 4 is any or no amino acid
  Variant (7)..(7): Xaa in position 7 is Ile, Leu, Met or Val
  Variant (8)..(9): Xaa in position 8 to 9 is any amino acid
  Variant (10)..(10): Xaa in position 10 is Leu or Met
  Variant (11)..(14): Xaa in position 11 to 14 is any amino acid
  Variant (16)..(16): Xaa in position 16 is Glu, Asn or Arg
  Variant (17)..(17): Xaa in position 17 is Ala, Asp, Glu or Gln
  Variant (20)..(24): Xaa in position 20 to 24 is any amino acid
  Variant (25)..(25): Xaa in position 25 is Asp, Glu or Gln
  Variant (27)..(27): Xaa in position 27 is Ala, Cys, Thr or Val
  Variant (28)..(28): Xaa in position 28 is Ala, Ser, Thr or Val
AXXXKEXXXXXXXXIXXRFXXXXXXGXX

SEQ ID NO: 132872 - protein, 20 aa, Artificial sequence
  protein pattern
  Variant (3)..(3): Xaa in position 3 is Ile, Leu or Val
  Variant (6)..(8): Xaa in position 6 to 8 is any amino acid
  Variant (9)..(9): Xaa in position 9 is any or no amino acid
  Variant (11)..(14): Xaa in position 11 to 14 is any amino acid
  Variant (15)..(15): Xaa in position 15 is Leu, Met or Val
  Variant (16)..(16): Xaa in position 16 is any amino acid
  Variant (17)..(17): Xaa in position 17 is Asp, Glu, Pro or Thr
  Variant (18)..(19): Xaa in position 18 to 19 is any amino acid
  Variant (20)..(20): Xaa in position 20 is Ala, Asn, Ser or Val
APXERXXXXEXXXXXXXXXX

SEQ ID NO: 132873 - protein, 19 aa, Artificial sequence
  protein pattern
  Variant (2)..(3): Xaa in position 2 to 3 is any amino acid
  Variant (4)..(4): Xaa in position 4 is Thr or Val
  Variant (5)..(5): Xaa in position 5 is Ile, Leu or Val
  Variant (8)..(8): Xaa in position 8 is Asp or Glu
  Variant (10)..(10): Xaa in position 10 is Ala or Val
  Variant (12)..(12): Xaa in position 12 is Gly or Ser
  Variant (13)..(13): Xaa in position 13 is any amino acid
  Variant (15)..(18): Xaa in position 15 to 18 is any or no amino acid
AXXXXLAXGXNXXLXXXXG

SEQ ID NO: 132874 - DNA, 1143 bp, Synechocystis sp.
  CDS (1)..(1143): transl_table=11
atgcccaacaagcctcagtttcgacaatctaatcttgtttcccatttcaattattttaattcaccagaaagtattcctggaacattaaatctttcccccaatgcccctccaccgagaataattttaattgattacaataaaaatcaagccacaaaaatagagttaaaaaatcccctggattgtgaagcttatgttgatactgaatccgtatcctggattaacattgacggcttggggaatcacacaacttgggaacaattaggtgaggtatttaaacttcatcctgttgctttagaggatattgttaacgtcccccaacgtccgaaagtagttgaatatgaaaaccatttaatttttatttctcggatggtaaccctggatcaatcatctcaaacttttatcagtgaacaaattagttttattttgggtaaacattatttgttgaccatccaagaagaaccaaaatatgattgtttattttccgttagggaaagaattcgcactaaaaaaggggcaattcgacaaaagaatgctgattatttattttatgctttaattgatgctattatcgatggcttttttcctgtgatggaagtctatggtgaactagttcaatctttacaaagtgagattatttcttgtccaacgaataaatcattggccaagattcatcaattacaacaggatttattaattatgagacgggctatttggccccaacgggatgcaattaattctttacttcgggatggcagtgatttaatttctgatgaggtgcgagtatttttacgggattgttatgaccacacaattcaaatcttggatatgatagaaacttatcgagatttagcatctaacctaacagatatttatctttcctctgttagtaatcgaatgaatgaaattatgaaaacactaacagtaatttctagtatctttattccgctaacttttattgctgggatctatggtatgaattttaatcctgataaatctccttggaatatgccagagttaaactggtattgggggtatcctgtgatttggatggtaatgttgacagtgggagggatgatgctttattttttttggcgtaagggttggtttagaaatcttaatgatgttgaaaaaggaaatagataa

SEQ ID NO: 132875 - protein, 380 aa, Synechocystis sp.
MPNKPQFRQSNLVSHFNYFNSPESIPGTLNLSPNAPPPRIILIDYNKNQATKIELKNPLDCEAYVDTESVSWINIDGLGNHTTWEQLGEVFKLHPVALEDIVNVPQRPKVVEYENHLIFISRMVTLDQSSQTFISEQISFILGKHYLLTIQEEPKYDCLFSVRERIRTKKGAIRQKNADYLFYALIDAIIDGFFPVMEVYGELVQSLQSEIISCPTNKSLAKIHQLQQDLLIMRRAIWPQRDAINSLLRDGSDLISDEVRVFLRDCYDHTIQILDMIETYRDLASNLTDIYLSSVSNRMNEIMKTLTVISSIFIPLTFIAGIYGMNFNPDKSPWNMPELNWYWGYPVIWMVMLTVGGMMLYFFWRKGWFRNLNDVEKGNR

SEQ ID NO: 132876 - DNA, 1095 bp, Mesorhizobium loti MAFF303099
  CDS (1)..(1095): transl_table=11
atggcaaaggccgatgcggtgaagaggcgggcgccggcgaagacgaggcggccgcccgtcggcgcctcgccgggcacgctgatcgccgatccggcggcgcggcgcagtgagctcaggctgacgctgatttcgcccgaaaaattcaagaccatcgacaatgccagcatcgatgatctcaatgtccattgcgaccgctggccggtcgtctggctggattgcaccgggctcgccaacatcccgctgatcgaggagatcggccggatcttcaacctgcatccgctggccctggaggatgtcgtcaacaccgaccagcgaccgaaggtcgatttcttcgaggaccacgccttcgtcgtcgtgcgcatgatcgacgatgtcacagctcatcgctacgagcagatcgccgtgttcttcggtaagaatttcgtcgtcactttccaggaacgcgagggagatccgttcgacccggtacgcaagcgtatcgggagttcggcgcccaaccgcctgcgcacacgcggcgccgactatctggcctacgcgctgatcgacgccatcgtcgacagctattttccgccggtcgaggcggccggcgaccaggtcgacggcatcgaggacgagatgctgcattcgacgcacaagcatcagatgcggcaactgcacgaattgcggcgcgacgccaatgtgctgaagggcgtgctgtggccgatgcgcgatgcgctggcgacgctgatccgcaacgacgtgccctatgtcaaagccgagaccaaggttttcctcaatgacacactcgaccattcgctcaggctgatcgagctggttgagacccagcgcgacatgctgaccgggctgatcgagatgcatctgtcgctgagccaggcgcgcaccaacgacgtcatcagctatctcaccatcgtctcggtcatcttcatgccgctcaccttcctggtcggcgtctggggcatgaatttcagtcccgatgcctcgccatggaacatgccggaactgcgatcttactatggttatccggcggcgctcgtcttcatgctgcttgtcgcgatcggcctgattgccttcttcaaatggaaaaaatggctttga

SEQ ID NO: 132877 - protein, 364 aa, Mesorhizobium loti MAFF303099
MAKADAVKRRAPAKTRRPPVGASPGTLIADPAARRSELRLTLISPEKFKTIDNASIDDLNVHCDRWPVVWLDCTGLANIPLIEEIGRIFNLHPLALEDVVNTDQRPKVDFFEDHAFVVVRMIDDVTAHRYEQIAVFFGKNFVVTFQEREGDPFDPVRKRIGSSAPNRLRTRGADYLAYALIDAIVDSYFPPVEAAGDQVDGIEDEMLHSTHKHQMRQLHELRRDANVLKGVLWPMRDALATLIRNDVPYVKAETKVFLNDTLDHSLRLIELVETQRDMLTGLIEMHLSLSQARTNDVISYLTIVSVIFMPLTFLVGVWGMNFSPDASPWNMPELRSYYGYPAALVFMLLVAIGLIAFFKWKKWL

SEQ ID NO: 132878 - DNA, 1065 bp, Clostridium acetobutylicum ATCC 824
  CDS (1)..(1065): transl_table=11
atgtctagatatacaaaaggagtatctaaaaagaagggattaaagccaggcagtttgatacatgtaggaaattctacaggaaaaaaaacagaaatacatattattgattataaggatgattattttgaggaaaaggatgttcatagtattgatgagtgcttaaaatacagagatacagataatatgacatggataaatataaacggacttgaagatatagatttatatgaaaaggttggaaagtattttggagtccattcacttataatggaggatatactaaatactaatcaaagacctaaaatagaagagttcgaaaaatatatttttattgttttaaaaatgatatattttagggaagataaacttgtagttgagcaggttagtataatatgtatggaaaatcttattattacttttcaagaagaaggcaaggatggagatgtttttggaaatttaagagacagaattagaaatactaaaagtaaaataagaaaaacaggggttggatatcttacatatgcgttaattgattctatagttgataattattttgtgattttagaaaaggttgaagataaaattgaaaattttgaagagtctcttatgacaactgccacaaataatttatttaatgaagtatataatcttaaaagacaaatgatatttttatggaaagcagtttggcctttaagagaaataataaatacgcttcaaagaggagaagttgaaattataggaagcgatataagtatttattttaaagatgtttatgaccatactgtgcaggtaatagatacaatagagctctttagagatatgatagcgggacttcttgatacatacttatcgagtgctagtaacaaaatgaatgaaataatgaaatttttgactattttttcaacaatatttataccactttcttttcttgttggtgtatatggtatgaacttcgattatatgccagaacttaaattcagatatggatatgctgttctttgggtgattatgatatcactatctgcatttatgttaatgtattttagaaagaaaaaatggctttaa

SEQ ID NO: 132879 - protein, 354 aa, Clostridium acetobutylicum ATCC 824
MSRYTKGVSKKKGLKPGSLIHVGNSTGKKTEIHIIDYKDDYFEEKDVHSIDECLKYRDTDNMTWININGLEDIDLYEKVGKYFGVHSLIMEDILNTNQRPKIEEFEKYIFIVLKMIYFREDKLVVEQVSIICMENLIITFQEEGKDGDVFGNLRDRIRNTKSKIRKTGVGYLTYALIDSIVDNYFVILEKVEDKIENFEESLMTTATNNLFNEVYNLKRQMIFLWKAVWPLREIINTLQRGEVEIIGSDISIYFKDVYDHTVQVIDTIELFRDMIAGLLDTYLSSASNKMNEIMKFLTIFSTIFIPLSFLVGVYGMNFDYMPELKFRYGYAVLWVIMISLSAFMLMYFRKKKWL

SEQ ID NO: 132880 - DNA, 1164 bp, Synechocystis sp. PCC 6803
  CDS (1)..(1164): transl_table=11
atgccccaaacccaacccggcattgaggattttctcctgcgccaactgcgtcatccccaagaagaagaggaagaagaagattattttgactacttctatgacgagccgggtagtgaaccgggtaccctcagcattgaacccgatgcgcccccttcccgcattgtgttggtggattatagccccagccatgccgtgcgaaagtcggatattagtcccaatgccctgagaccttatttaggtacaaatactgtttcttggatggatattgaaggtttaggcagtgaagaagtgcttaaggaagtgggggaaatttttaaattacaccccctacttttagaagatattgttaacgtcccccagcgagcaaaggtagaagattataacgaccatgtgatggttattgcccatcgggtgcgtcctaatcgggaagaagatggctttgaaagtgagcaggttagttttgtgttgggcaaacgttacctattaactttccaggaagggcacattattgattgttttaatcccctaagggaaagaattcgcaccaatcaaggtaaagtttgccaacaaggagcggattatctttgctatttgttaattgatatgttaattgatgaatattttcccctcttggaagattatgaagaacgcattgaagccctagaagacaccattattcgtaatcccaacagctcattaatggaggaaatttaccatattcgccgggaacttttagccctgagaaggttgatttggcccctgcgccatgtgatgaatgtgctgctgcgggacaccaccaattccatcgtaacagcagacgtaagaatttactttcgagattgctacgatcacattattcaggtgttagatattatcgaagcttaccgggaattagcttctagtttaatggaggtttatatgactgccatgagcaataaaatgaatgaagtaatgaaatttttgaccgtcatttctaccatttttattcccctaacttttattgccggggtttacggtatgaacttcaaagaaatgccagaactaaacagccgctggggctactatattacttggatagtgatgctcttaattgccggaggatccctctatttcttctggcgtaagggctggcttagtccctcctatgatttgggagaaaagtag

SEQ ID NO: 132881 - protein, 387 aa, Synechocystis sp. PCC 6803
MPQTQPGIEDFLLRQLRHPQEEEEEEDYFDYFYDEPGSEPGTLSIEPDAPPSRIVLVDYSPSHAVRKSDISPNALRPYLGTNTVSWMDIEGLGSEEVLKEVGEIFKLHPLLLEDIVNVPQRAKVEDYNDHVMVIAHRVRPNREEDGFESEQVSFVLGKRYLLTFQEGHIIDCFNPLRERIRTNQGKVCQQGADYLCYLLIDMLIDEYFPLLEDYEERIEALEDTIIRNPNSSLMEEIYHIRRELLALRRLIWPLRHVMNVLLRDTTNSIVTADVRIYFRDCYDHIIQVLDIIEAYRELASSLMEVYMTAMSNKMNEVMKFLTVISTIFIPLTFIAGVYGMNFKEMPELNSRWGYYITWIVMLLIAGGSLYFFWRKGWLSPSYDLGEK

SEQ ID NO: 132882 - DNA, 1143 bp, Nostoc sp. PCC 7120
  CDS (1)..(1143): transl_table=11
atgattagaaaacttcgtcgtcttgccaaagcagtcaataaaccatataaagatgagttctatcattaccctggaaccatccccggaactatcattattgatgcagatgcgccgccaccggaaatcgacttaattgactatagccaaactgattttactcatcaacgagttgccacaccggaagaatgcctaccctatttggataccagttctgtgacttgggtagatgtccagggtttgggtaatcaggacatcttagagcgagtggggcaagtttttgagttaccgcctctggttttagaagatgtggtgaatgtatcggaacgccccaaaacggaggattacgacgaccaattattatttattgcccggatggttgtacccaaggaaagggaatcagggttttatagtgagcaagtcagtctaattttaggtaagcactacctgttaagtattcaggaagaaccagagcatgattgctttgcaggcgtgaggatgcgaattgaaaaaggtaaaggaactatccgccgccaaggtgctgattatttagcttatgctttgctcgatgcgattattgatggttttttcccagttttggaacgttatggggaagcacttgaggatttagaggaagaagtaatcgttagtcctagtcgccaaacactgcaaaaaatttatcacgtgaggcgcgaattactgcaactgcgtcgggctatttggccgcaacgagatgcgattaatgctttaatacgcgatcgcagtcaactcattagcccggaggtgcaaatctatctccgcgattgttatgaccatgcggtgcaagtcatggatatggtggaaacctaccgcgagttagcctctggattgatggatgtatacttgtcagcagtcagtaacaaaatgaatgaagttatgaaactactgacagtggtttcatcaatctttattcccctaacttttgttgcaggtatatatggaatgaatttcaatacggaaaaatcgccatacaatatgcctgagttgaactggtattggggttaccccctgtgcttaggagttatgggagcgatcgcttttgcattactatttttattttggaaacgaggttggctagaaaattcttctatgattgagcgtgattaa

SEQ ID NO: 132883 - protein, 380 aa, Nostoc sp. PCC 7120
MIRKLRRLAKAVNKPYKDEFYHYPGTIPGTIIIDADAPPPEIDLIDYSQTDFTHQRVATPEECLPYLDTSSVTWVDVQGLGNQDILERVGQVFELPPLVLEDVVNVSERPKTEDYDDQLLFIARMVVPKERESGFYSEQVSLILGKHYLLSIQEEPEHDCFAGVRMRIEKGKGTIRRQGADYLAYALLDAIIDGFFPVLERYGEALEDLEEEVIVSPSRQTLQKIYHVRRELLQLRRAIWPQRDAINALIRDRSQLISPEVQIYLRDCYDHAVQVMDMVETYRELASGLMDVYLSAVSNKMNEVMKLLTVVSSIFIPLTFVAGIYGMNFNTEKSPYNMPELNWYWGYPLCLGVMGAIAFALLFLFWKRGWLENSSMIERD

SEQ ID NO: 132884 - DNA, 1071 bp, Methanosarcina mazei Go1
  CDS (1)..(1071): transl_table=11
ttgaaaccgagtactcccggaagaaaacaatcaaatgtcggtctcgcccccggaactctcgtccatgtcggggaaaaaaaggcagaaaaaaccgttattaaagcctggttatacaacagtgaaaaacttatcgaaaaggagcttcaaaccgtagatgagtgtcaggaacttaaaggtcagcccggcatgaacctgtggataaacgtagatgggctggaccagataggaattatagaaaaactgggaggttactttggggttcaccctctcactcttgaggatgtattgaacaccggacagcgcccaaaaatggaggattacgattcttatatttatgctgttcttaaaatgatgctcctcgatgaagaaagagaagagattcttattgaccaggtaagcattatctttggcaccaactacattctttcttttcaggaaagggaaggagacgcttttaaccccatccgcgacaggttaaaaaactctgcctcgcgcctgagaaagaacggagtggaccttcttgcatacagccttatagatgctgtggttgataactattttttgatccttgaacatttcggggaagaaatagaggacctcgaagaacagcttatagttgaccccatgcctgaaaccctgaaagcgatccagaagtataagagagatatgatcacactccgcaggtcagtctggcctctcagggagttaataaatagccttcagaggacggagtcccagcttataaaggagagtacgcagatttaccttcgggatgtatacgaccacacaattcaggttattgattccatagaagccttcagggatatcctttcttcaatggtagatgtctacctctcgagcctgagccatagaatgaatgacattatgaaagtcctgacgataatcgccacgatctttatccctcttacttttattgcaggagtatatggcatgaacttcgaatacatgcccgaactcaaatggcgatggggttaccctgcagtaatgtttgcgatgacgatacttgggataagcatgtttctctactttaagaaaagaaggtgggtataa

SEQ ID NO: 132885 - protein, 356 aa, Methanosarcina mazei Go1
MKPSTPGRKQSNVGLAPGTLVHVGEKKAEKTVIKAWLYNSEKLIEKELQTVDECQELKGQPGMNLWINVDGLDQIGIIEKLGGYFGVHPLTLEDVLNTGQRPKMEDYDSYIYAVLKMMLLDEEREEILIDQVSIIFGTNYILSFQEREGDAFNPIRDRLKNSASRLRKNGVDLLAYSLIDAVVDNYFLILEHFGEEIEDLEEQLIVDPMPETLKAIQKYKRDMITLRRSVWPLRELINSLQRTESQLIKESTQIYLRDVYDHTIQVIDSIEAFRDILSSMVDVYLSSLSHRMNDIMKVLTIIATIFIPLTFIAGVYGMNFEYMPELKWRWGYPAVMFAMTILGISMFLYFKKRRWV

SEQ ID NO: 132886 - DNA, 1098 bp, Rhodopirellula baltica SH 1
  CDS (1)..(1098): transl_table=11
atgcgtcttcgtgtgcaccggccgcggtgggctcgttcacgatccaagattggaaacgttcccggggatctgtcgagcgatgtttcgacgaaaaagaaagacaccgttcccagccacattcgtgtcatccagtacgacggacgaacgcacaccaacgaagtcgtcgaatcgatcgataacgaggactcggacaatccagacatcgtgacctggatcgatttgcatggcatccgtgacatggaggcactgcgttcgcttgggcgacgattcggtttgcacccactcgcgttggaagacgtggtgcagatggatcaacatgcaaaaatggaacgctacggcgagacgttgttttttatcgccaggatgccggttggcgacaatggttttcagaccgaacaagtcagcattttcttggtcggcaacaccgtcatcaccattcaggagaaggtcggggattgcctcgatcccgttcgcgatcgaatttcgcgggcaatgggacgtattcgagatcgcggggcggactacctggtctacgccgttatcgatgcaatcatcgatggctatttcccgatcattgatcgttacgaaagccatttgtctgagatggcggaattgcttcaggatgcggacaacgacaatcttccgatgcatttgcaccacatacgggcggacttgttgtcgattcgaaagacggttcagcaacaccgagacgcgttgcggttgttgctgcgggaaggtgacggcattttggccaatgacacgcgtttgtatctccgagattgccaggaccatatcgggcaattgatggaagcagcggacaccgaccgcgagacatgcggcgaattgcgagagctgtattttgcgttgttggggcaaaaaaataatgacgtgatgaaagtgctcacgatcatcgcaacgcttttcatcccaatgagttttgtcgctgggatctatgggatgaacttcgaccagaaagcatcgcccctgaatatgcccgaactggaatggagttttggttacccgttcgctctttcagtgatgatggttttggcattgagtctgctgtacttcttgtaccgcaagggatggttgtggtag

SEQ ID NO: 132887 - protein, 365 aa, Rhodopirellula baltica SH 1
MRLRVHRPRWARSRSKIGNVPGDLSSDVSTKKKDTVPSHIRVIQYDGRTHTNEVVESIDNEDSDNPDIVTWIDLHGIRDMEALRSLGRRFGLHPLALEDVVQMDQHAKMERYGETLFFIARMPVGDNGFQTEQVSIFLVGNTVITIQEKVGDCLDPVRDRISRAMGRIRDRGADYLVYAVIDAIIDGYFPIIDRYESHLSEMAELLQDADNDNLPMHLHHIRADLLSIRKTVQQHRDALRLLLREGDGILANDTRLYLRDCQDHIGQLMEAADTDRETCGELRELYFALLGQKNNDVMKVLTIIATLFIPMSFVAGIYGMNFDQKASPLNMPELEWSFGYPFALSVMMVLALSLLYFLYRKGWLW

SEQ ID NO: 132888 - DNA, 1038 bp, Chromobacterium violaceum ATCC 12472
  CDS (1)..(1038): transl_table=11
ctgccgacgctgggggagcaggcgggaacgctgctgtcggtgggcgatgccaagcacgccggcaccgcgctgtcgctgttcgacttcgggccggaggacatggcggaggtggccgacttcccgatcgccgacctggccgcctaccgcctgcgcggcgaggtgatgtggctcaatgtctacggcctgagcgacgccgccgccatccaggcgataggcgaacgcttcggcctgcacccgctggtgcaggaggacatcctcaacgcccgccagcggcccaagctggaagattacgacgactacctgttcctggcctgccgcgtgttcgattaccagcagggcgcgcggctgcagtccgaccagatgtacctggtgctgggcgacggcttcgtgctcaccttccaggaaaagcccaccggcgtgttcgagcaggtgcgggagcggctgcgcaaggggcgcggcgcgttgcggcggcgcggcgccgactacctggcctattcgctgctggacgccatcatcgacgactacttcggcgtgctcggccagttcaacgacaaggtggagcgcgcagacggccagttgctggccggccgcgacaacggcgtgctgcggcaaatccagcggctgaagcgcgattgcctgaagctcaggcgggcgctgctgccgctgcgcgaggcgctgctgtcgctgaaccgtggagatgacgagcgctttggcgacgatacccgcgtttacctgcgcgacgcttacgaccacgtggtccacgtgctggagtcgctggagatgaaccgcgagatggtcggcgacatgatggacctctacctgtccacccaatcgcaccggctcaacctgcagatgcgggtgctgaccgtgatcacgatgatcttcatgccgctgacgctgatcgccggcatctacggcatgaatttcgagaacatgccggagctgaagtggcactacggctactacatcgtgctgctggcgatgggcggcatttccgccggcatgggttggtggttctggaagcggcgctggatctga

SEQ ID NO: 132889 - protein, 345 aa, Chromobacterium violaceum ATCC 12472
MPTLGEQAGTLLSVGDAKHAGTALSLFDFGPEDMAEVADFPIADLAAYRLRGEVMWLNVYGLSDAAAIQAIGERFGLHPLVQEDILNARQRPKLEDYDDYLFLACRVFDYQQGARLQSDQMYLVLGDGFVLTFQEKPTGVFEQVRERLRKGRGALRRRGADYLAYSLLDAIIDDYFGVLGQFNDKVERADGQLLAGRDNGVLRQIQRLKRDCLKLRRALLPLREALLSLNRGDDERFGDDTRVYLRDAYDHVVHVLESLEMNREMVGDMMDLYLSTQSHRLNLQMRVLTVITMIFMPLTLIAGIYGMNFENMPELKWHYGYYIVLLAMGGISAGMGWWFWKRRWI

SEQ ID NO: 132890 - DNA, 1158 bp, Gloeobacter violaceus PCC 7421
  CDS (1)..(1158): transl_table=11
atgcgagaccggaagccggaagccggagaagcaatgggttccgacgaggatgagtcctacgtcgattaccattacgacgaccccggtaccatgccgggaacgctcagcatcgacaaaaacgctccaccgcccgagatccacctcatcgattacgatgccgaacaatccaccggccgcagggtggaaaatcccgaggaactgacgccttacctggacaaccactcggtctcgtgggccgacgtgcgcggcttcggcagcgaggacatcctgcgccgcctgggcaaggtattcgggctgcatccgctggtgctcgaagatatcgtgaatgtgccccagcgccccaaggtggaagaatacaaggatcacttgctgattatcgccaggatggtctgtcccacctccgaaacagcagaagaatttttcagcgaacaggtgagtttgatcctgggcaaaaactatttgctcacggtccaggaagaagccaaattcgacgtcttcggccccgtgcgcgagcgcatccgcaccgccaagggcatcatctgcaatcagcgcgccgactacctggcctacacgctgctcgatgcgatcatcgacggcttttacccggtgctcgaagacttcggcgaacgcctcgaggaactcgaagcggaggtggtagaaaaccccacccgcgctacccttgagagaatctatctgctccggcgcgaactgctcatgctgcggcgcgccatctggccccagcgcgatgtgatcaacgccctcatccgcgatgccaacccgctgattggcgaggaggtgcgcctctacttgcgcgactgctacgaccacgccatccagatcatcgatatggtggagacataccgggaactggcttcgagcctgaccgacatctacatgtcctcggtgagcaaccgtatgaacgaggtgatgaagaccctcacggtgatctcggccatttttattccgctgacctttatcgccggggtttacggcatgaacttcgatcccgaaaaatccccctggaacatgcccgaactggaatggtactggggctatccgttcagcctggtgctgatgttcatagtggccgtgggtctggtcgtctatttttggcggcggggctggtttgagagcttctcctcgcagagcaaaaagtga

SEQ ID NO: 132891 - protein, 385 aa, Gloeobacter violaceus PCC 7421
MRDRKPEAGEAMGSDEDESYVDYHYDDPGTMPGTLSIDKNAPPPEIHLIDYDAEQSTGRRVENPEELTPYLDNHSVSWADVRGFGSEDILRRLGKVFGLHPLVLEDIVNVPQRPKVEEYKDHLLIIARMVCPTSETAEEFFSEQVSLILGKNYLLTVQEEAKFDVFGPVRERIRTAKGIICNQRADYLAYTLLDAIIDGFYPVLEDFGERLEELEAEVVENPTRATLERIYLLRRELLMLRRAIWPQRDVINALIRDANPLIGEEVRLYLRDCYDHAIQIIDMVETYRELASSLTDIYMSSVSNRMNEVMKTLTVISAIFIPLTFIAGVYGMNFDPEKSPWNMPELEWYWGYPFSLVLMFIVAVGLVVYFWRRGWFESFSSQSKK

SEQ ID NO: 132892 - DNA, 1065 bp, Geobacter sulfurreducens PCA
  CDS (1)..(1065): transl_table=11
atgaaaaaaatcatcaagcaacgttcccgcaagacaggccttcctcccggcagtctggtccacatcggcgagcagaccggcgaaccggtccggatatcccttgtcgactacgacgaaacgagcatcagcgagcgggaaacggacgacattgccgagtgttttccccatagcgaccagccgggggtgcggtggctcgacatggagggtatccaccggcccgaactgctcaagacactcggcgaatgctacggtatccaccccctcaccctcgaagacatcctcaataccgaccagcgccccaaactggaggacttcgacgactatctcttcgtggtcctgaagatgctctccctccagccggatggctcgcttaccgcggaacaggtcagcttcgtgctcggcccctcgtttctcatctccttccaggaaggattcaagggagacctcttcgactccatccgccggcgcctgagggaaaaccggggcaagcttcgcaagagcgggtccgactttctgctctactcactcatggacgccattgtggactactacttcgtgatcctcgaagatctggccgagcggatcgaggaactggaagaagaagtcatcgccggccccagccgcaagacggtcgtgaagatccagcacctcaagcgggaaaccatctttctgcgcaaatccgtctggcccctgcgagaggtgctgggacggctggagcggcgcgaatcgcccctggtgcgcggcgaaaccgtcatctacctgcgggacgtctacgaccactgcatccagatcatcgaaaccgtggagaccttccgggacctcctgtcggagatcctcgacatctacctctccgccatcggcaaccggaccaacgaagtgatgaaggtgctcaccatcatcgccaccatcttcatgccgctcaccttcatcgccggggtctatggcatgaacttccgctacatgcccgagctcgaatggcactggggctacccggccgttctcctgctgatgctcctggtaagcctgggtatgggaatattcttccggcgcaagagatggctgtag

SEQ ID NO: 132893 - protein, 354 aa, Geobacter sulfurreducens PCA
MKKIIKQRSRKTGLPPGSLVHIGEQTGEPVRISLVDYDETSISERETDDIAECFPHSDQPGVRWLDMEGIHRPELLKTLGECYGIHPLTLEDILNTDQRPKLEDFDDYLFVVLKMLSLQPDGSLTAEQVSFVLGPSFLISFQEGFKGDLFDSIRRRLRENRGKLRKSGSDFLLYSLMDAIVDYYFVILEDLAERIEELEEEVIAGPSRKTVVKIQHLKRETIFLRKSVWPLREVLGRLERRESPLVRGETVIYLRDVYDHCIQIIETVETFRDLLSEILDIYLSAIGNRTNEVMKVLTIIATIFMPLTFIAGVYGMNFRYMPELEWHWGYPAVLLLMLLVSLGMGIFFRRKRWL

SEQ ID NO: 132894 - DNA, 1059 bp, Methanococcus maripaludis S2
  CDS (1)..(1059): transl_table=11
atgagaaaaattggaagcagatattcaaaaaaagcaggactgccccctggagatttggtatatactggtgaaatggatttaaaagagactgaaataatatttattagttataataccgataatattttaaaaaagcaggtaagaagtctcgatgaaataattattgacgattcatgtgtaaattggatcatattttcagggattccaactgctgaagaaatgaggctgattggtgaaagatatgaacttcacaaattaacccttgaagatatattgaataccagtcaaagaactaaatttgaggtctacgagaaatataagtatcttgtaacaaggataatccaccagaaggctgataccgtacatcttgaatcagaacagctcagtataattttaaaaaacaatgttttaatcactttttttgaacacgacataagtgtcatcgagagtttgattaatcgaatatcaaacaaaagcgggtctattcgtgaaaaaaaactggattatttattttatgcagtacttgattcaataattgaccattattttgcaataatatcaccaatcgaagacgaaattgagaggtatgattcgaaattgttttcagatatcgaaaatgaagaaattatccatgtaaagcagatcagacaaatattagtagctttaagaaaaaatattggaccatttaaagaaatatttcataaattcagcagggatgagtatgaatttattgaaaaaagtaatttgatatacattcacgacctctatgaccacacggttcacttaatcgaaacaatcgatgttttaaaggataatacctcaaacattgcagaaatacacctttcggtgatgagcaacaatatgaacgagattatgaaagtacttacgataatttccacaatatttattccgctttcatttgttgcgggactttatgggatgaattttgaaaacatgcccgaattaaagtggtcttttggatatttttatgttcttattgtaatggggcttgtattaacttcaatggttatgtttttcaggcgaaaaaagtggatttaa

SEQ ID NO: 132895 - protein, 352 aa, Methanococcus maripaludis S2
MRKIGSRYSKKAGLPPGDLVYTGEMDLKETEIIFISYNTDNILKKQVRSLDEIIIDDSCVNWIIFSGIPTAEEMRLIGERYELHKLTLEDILNTSQRTKFEVYEKYKYLVTRIIHQKADTVHLESEQLSIILKNNVLITFFEHDISVIESLINRISNKSGSIREKKLDYLFYAVLDSIIDHYFAIISPIEDEIERYDSKLFSDIENEEIIHVKQIRQILVALRKNIGPFKEIFHKFSRDEYEFIEKSNLIYIHDLYDHTVHLIETIDVLKDNTSNIAEIHLSVMSNNMNEIMKVLTIISTIFIPLSFVAGLYGMNFENMPELKWSFGYFYVLIVMGLVLTSMVMFFRRKKWI

SEQ ID NO: 132896 - DNA, 1134 bp, Candidatus Protochlamydia amoebophila UWE25
  CDS (1)..(1134): transl_table=11
ttggatttatatattcgaaatcatttaagtttttgttcacttgaatttttagactttagcgagttcattatgtatcgactattaaaaaatagaactaaaaaaactggcctctcccccggatctttaattcccataggagaaaaaccgccccacgaaattaaactttccatcattgaatattctgaatcagagtttattgaaaaagaaaacgtatctatagaggaatgtttagatcatcttacaactcctaatatgacttggattcaagtgtttggcgtttatgatcctgccagcattgcgtcgattggcaaacgttttgatttacacgcacttatccaagaagatattcttaatacttctcaacgcccaaaacttgatatctaccaagaccaagttttcattgttgcaagatttttaaaatataatcaacgagatcatcaaatccaagacgagcaagtcagtcttatttttggacaaaatttactcatttcttttttagaacaagataaagatgtttttacttctgttaaagaaagacttcgacaaggtaacattcgcatacgcaaacaaaaggcagattatttggcttatgctttgttagatactattgtggaccattatttcatcgttttagaaaaaattgataccaatttagatcatttagaagaagaacttgtccgttctccaaaacctggtactttacaaagcattcagcgagctaaacaagaaatagctgttttgaaaagatctatttggcctatgcgggaggtagttaatcgttttcaacgtattgaacctccgttagtcaatgcgcatacacaaattttcttaaaagatgtctatgatcatattattcaaaacaatgatatcattgaagggtttcgtgatgtagtctcaggaatgttagatatttatttgtctaacatcaatattcgctcaaatgagatcatgaaagttttgacaattgtttccacaatttttgttcctttaacgtttatttcaagcatctatggaatgaattttgatagcatgccagaattacattatccatttggatatccgttgattatgttgttcatgctaactttgagcttattgatgttgcattacttccgacaaaaaaaatggatttaa

SEQ ID NO: 132897 - protein, 377 aa, Candidatus Protochlamydia amoebophila UWE25
MDLYIRNHLSFCSLEFLDFSEFIMYRLLKNRTKKTGLSPGSLIPIGEKPPHEIKLSIIEYSESEFIEKENVSIEECLDHLTTPNMTWIQVFGVYDPASIASIGKRFDLHALIQEDILNTSQRPKLDIYQDQVFIVARFLKYNQRDHQIQDEQVSLIFGQNLLISFLEQDKDVFTSVKERLRQGNIRIRKQKADYLAYALLDTIVDHYFIVLEKIDTNLDHLEEELVRSPKPGTLQSIQRAKQEIAVLKRSIWPMREVVNRFQRIEPPLVNAHTQIFLKDVYDHIIQNNDIIEGFRDVVSGMLDIYLSNINIRSNEIMKVLTIVSTIFVPLTFISSIYGMNFDSMPELHYPFGYPLIMLFMLTLSLLMLHYFRQKKWI

SEQ ID NO: 132898 - DNA, 1065 bp, Legionella pneumophila subsp. pneumophila str. Philadelphia 1
  CDS (1)..(1065): transl_table=11
atgaatactcataaaacaaaggcttcagcaaaagcgggactcttaccggggactgccgtatatataggcgaacacccaccgcaaccaactcaagtaacgatacatatttatgacaaaaaaaattataagcgtttagattccttcgatacccgacaagtgaaagaggcctatgaagctggacataatatttggatagatatttcaggtcttgcagacatcgagaaaattactaaaatttgctcagaatacaacatacaccccttggttatcgaggatttgcttaataccagacaaagacccaaactggatattgtagacgattatatttttgttgtttttaaattattacaatcccctcccgatcacttatcttacaatacagaacagttctgtttaatcatcaagcaaaaacttttactcacattcagagaatctgaaaaatataatttatcttccatttatcaacgccttaatggagagcactcgttaaccagagaatatggaagtgattatttgacctatctgatcatggactatattgttgatgattatttcaactttgtcgaaacttcagcccaactgcttgaaaccttggaagatcaattaattaataaaccagaaacgattaggttacaagcgttatacaccatcaaaagaagaaccattaccctcagaaaaatcattcctcctttgagagatattgtccatttgttgcttacagacgatggggggttaatcaataaaaagtataatctttacttccgggacttatatgatcattgcattcgcctggtagaatcgatcgatttgcatagagaaatgtcggcaagtatgctagacatatacctgtctactataaataatcgcatgaatgaatccatgaaaattctgaccttgtttgccagtatttttattcctttaagttttattgccggggtttatggaatgaattttaaatttatgcctgagctggattggcgatacggttaccctatgattctggttaccatggtacttctggcaatactcatgctgtatttttttaaacgaaaaaaattattttaa

SEQ ID NO: 132899 - protein, 354 aa, Legionella pneumophila subsp. pneumophila str. Philadelphia 1
MNTHKTKASAKAGLLPGTAVYIGEHPPQPTQVTIHIYDKKNYKRLDSFDTRQVKEAYEAGHNIWIDISGLADIEKITKICSEYNIHPLVIEDLLNTRQRPKLDIVDDYIFVVFKLLQSPPDHLSYNTEQFCLIIKQKLLLTFRESEKYNLSSIYQRLNGEHSLTREYGSDYLTYLIMDYIVDDYFNFVETSAQLLETLEDQLINKPETIRLQALYTIKRRTITLRKIIPPLRDIVHLLLTDDGGLINKKYNLYFRDLYDHCIRLVESIDLHREMSASMLDIYLSTINNRMNESMKILTLFASIFIPLSFIAGVYGMNFKFMPELDWRYGYPMILVTMVLLAILMLYFFKRKKLF

SEQ ID NO: 132900 - DNA, 1323 bp, Synechococcus elongatus PCC 6301
  CDS (1)..(1323): transl_table=11
gtgtacggaggattgtcagtcttcctgagttggggcaagcgccatgcactgaatggctctgcgatcgccccagcagcagtgcccgcgttacaccttgtgaaaaactggcagccccgcgatcgccaccgtcagaataggtcggcctccagactgactgtcatgggttcccgccgcaacaatcatcgacaccctcgcaagaccaagcgccagaattttcgccaccgcctgaccagtacggtctaccaagccccaggaaccttgcgacagccactcgaggccagtccaactcaactgcggcagattgagtacagcgccaaccagatcgttagccgcccgatctcggatcccttggacttggtttctgcgcggatgggggaaacgggcaccacttggttacagatgcaaggcttctcggatttggaacagttgcggagtttgggggaggtgctggagctgaatccactcactcttgaggacctgattggtcatccccagcggcccaagcaggaacgctatccccattacctagaggtgattttttatcgacctgacctgcagcctggcgatcgcctccgcctcgaacaggtggggctcgttctgggcgatcgctggctcctcacggtggaagcagacgaaattggccccaatttctctggtttggaacagcggctggccaatcgaacggcttaccccagactggaagcggatactttggcctacctcgcgatcgattggattatcgacacctacttcccggtgcttgaggtcttgggtgaggaactggagcaactagaggatgcagtggtagcccaaccaactcaggcgctgctgtcagatatctatgagctacggcgcgaactgatggtgttgcggcgcgtcgtctggccgttgcgggatgtgatcaatgccttgattcgcgatcgcacacccctgattcgggaggaagtgcgcatggatctgcgggactgtgctgatcacgcctactttttgctggataccctagaaacctatcgggatctggctaacaacttgatggaggtctatctctcgtcgatcagcaaccgcctcaaccaagtcatgaagctgttagccatcctttcgaccgtattcatgcccctgaccttgatcgccggaatctacggcatgaatttcaatcctgaggcgtctcgctggaatatgccagaactaaactggccctacggttatccggctgtgctgctggcgatggtggcgatcgcgatcgtcttactgtggttgttttggcagcgcggctggtttgaagactggagcaggcccagcttccgctctaggcaagacacctga

SEQ ID NO: 132901 - protein, 440 aa, Synechococcus elongatus PCC 6301
MYGGLSVFLSWGKRHALNGSAIAPAAVPALHLVKNWQPRDRHRQNRSASRLTVMGSRRNNHRHPRKTKRQNFRHRLTSTVYQAPGTLRQPLEASPTQLRQIEYSANQIVSRPISDPLDLVSARMGETGTTWLQMQGFSDLEQLRSLGEVLELNPLTLEDLIGHPQRPKQERYPHYLEVIFYRPDLQPGDRLRLEQVGLVLGDRWLLTVEADEIGPNFSGLEQRLANRTAYPRLEADTLAYLAIDWIIDTYFPVLEVLGEELEQLEDAVVAQPTQALLSDIYELRRELMVLRRVVWPLRDVINALIRDRTPLIREEVRMDLRDCADHAYFLLDTLETYRDLANNLMEVYLSSISNRLNQVMKLLAILSTVFMPLTLIAGIYGMNFNPEASRWNMPELNWPYGYPAVLLAMVAIAIVLLWLFWQRGWFEDWSRPSFRSRQDT

SEQ ID NO: 132902 - DNA, 1065 bp, Dehalococcoides ethenogenes 195
  CDS (1)..(1065): transl_table=11
atgaccagacaatctaaaaaatactcccagaaggcaggtatgctgccaggctcagtagtatttataggcgaaggaaagacagagccagccagcctcagccttagctcgtataccccggatgcctaccagccgctgcctttaaaaaccctggcggactgcagtacccaggttaaacagtccggcggcatagtctgggtaaaggtcagcgggcttcaggatactgctatggtggaggaactgggcaaatgctttaaccttcacccccttacccttgaagacgtggtcaatactgagcagcgtcccaaactggaggactacggcaattacctctttgccgttatcaaagcacttcactgggattccgagcttaagaaaacccgctcagaacatatcagcctgatactgggtaaaaacttcctgataagttttcaggaacaccagagtgatatttttaaccccattcaccaacgtttacagtcagataacgggcggattcggaaactaggggcagactatctgctctattccatactggatataatagtagacggctatttcagtttgatagagggcttcggagattatctggacgaaatagaagaacagcttctatcctccccatcctcccaaacactcaaacagatttcagaggccaaaaaagaaatgctctttatccgtaaatctatctggccggccagggagaccgtggcagccattgaacgcagtgaaacgcccctgatagataaaagcagccacatatatttccgtgacatttatgaccaccttatccagcagatagataccggcgaaacctaccgggatatgctttccaacatgatagatatttacctttccagcctatccaaccgcatgagtgaggtcatgaaggttttaactatattcgcttccatttttatacccctgacctttatcgtaggcatatacggcatgaattttgatatcccagagctccgcttcagttgggggtatcccggtatacttttattcatgctagccatagctttaatattagtattgtttttcaagcggaagaaatggctttaa

SEQ ID NO: 132903 - protein, 354 aa, Dehalococcoides ethenogenes 195
MTRQSKKYSQKAGMLPGSVVFIGEGKTEPASLSLSSYTPDAYQPLPLKTLADCSTQVKQSGGIVWVKVSGLQDTAMVEELGKCFNLHPLTLEDVVNTEQRPKLEDYGNYLFAVIKALHWDSELKKTRSEHISLILGKNFLISFQEHQSDIFNPIHQRLQSDNGRIRKLGADYLLYSILDIIVDGYFSLIEGFGDYLDEIEEQLLSSPSSQTLKQISEAKKEMLFIRKSIWPARETVAAIERSETPLIDKSSHIYFRDIYDHLIQQIDTGETYRDMLSNMIDIYLSSLSNRMSEVMKVLTIFASIFIPLTFIVGIYGMNFDIPELRFSWGYPGILLFMLAIALILVLFFKRKKWL

SEQ ID NO: 132904 - DNA, 1062 bp, Bacteroides fragilis NCTC 9343
  CDS (1)..(1062): transl_table=11
atgaagaataacctgttaagtgaaagattagtttataacggtgagagccagactcccacccacctgcatttatgtacttacaacgctcttgtgatgcaggaggtttcaggtgtcaatttccagactgtcgccaattctctcaaccgcgagcagatcaactggctgcaggtgcacggacttcagaacaccgaagtcatccgggaaatatgcagtcactttgaaatagactttcttatccttcaggatattctgaatgccgagcatcccactaaaatagaggagcatgacaagtacacggtgcttatcatgaagctattccgcttcaacaacaaagaagagaaaagcccggaagatgaactggatgaactggaacagcaacaagtatgcatcatccaaggaagcaactttgtactcaccttcctggaaaacgaaaccgacttctttgacgatgtcacctccgcccttcacaatgatgtactaaaaatacggggcagacaaagcgactacctgctcagtgtcttactaaacagcataatggggaattacatcgccaccgtatctaccatcgacgactccctggaagacctggaagaagaattgctcaccatcagtgacggtaacgatatcggcatccagatacaggcactccgccggcagtacatgctgatgaagaaagccattcttccattaaaggaacaatacgtgaaactcctgagggcggaaaactccctgatgcacaaagtgaaccgtgctttcttcaatgatgtcaacgaccatctgcaattcgtattgcaaaccatcgaaatatgccgggaaaccctatcgtccctggttgatctttacatatccaacaatgacttgcggatgaatgatatcatgaagcgcctcaccattgtttccaccatctttattccgttgacttttcttgtcggagtgtggggaatgaacttcaagattatgcccgaattagactggcgatatggatatgtatatgcctggatattgatgctcctggtgggcggagccgtatactggtttttccgaaagaagaaatggtattaa

SEQ ID NO: 132905 - protein, 353 aa, Bacteroides fragilis NCTC 9343
MKNNLLSERLVYNGESQTPTHLHLCTYNALVMQEVSGVNFQTVANSLNREQINWLQVHGLQNTEVIREICSHFEIDFLILQDILNAEHPTKIEEHDKYTVLIMKLFRFNNKEEKSPEDELDELEQQQVCIIQGSNFVLTFLENETDFFDDVTSALHNDVLKIRGRQSDYLLSVLLNSIMGNYIATVSTIDDSLEDLEEELLTISDGNDIGIQIQALRRQYMLMKKAILPLKEQYVKLLRAENSLMHKVNRAFFNDVNDHLQFVLQTIEICRETLSSLVDLYISNNDLRMNDIMKRLTIVSTIFIPLTFLVGVWGMNFKIMPELDWRYGYVYAWILMLLVGGAVYWFFRKKKWY

SEQ ID NO: 132906 - DNA, 1065 bp, Methanosarcina barkeri str. Fusaro
  CDS (1)..(1065): transl_table=11
atggcggcttctggaagaagaggatcacaaattgggcttgcacctggagcgcttgtccatgtaggagaaaagaaggtagaaaaggtagtaatccgggtcctggcctataacagtgaaacgcttatagaaagacaactggagaaggttgaagagtgtctggaatttaaagaccagcccgatctcaatttatggatagatgtggatgggctggatagggtagatatcataggaaagctcggaagctatttcaatatccatcctcttacccttgaagacatactcaatacacgacagcggcccaagactgaagattacgactcatatatttattcggttttaaaaatgattctccttgataaggaaaataaagagatcactatagaccaggtaagcattatcattggctctaattatgtcctctcttttcaggaaagggatgggaacgtttttgaccagatgcgggaaaggtttgaaaatccggcgtctcgcctgcggaaaagcggggtggattatcttgcctacggcctgattgatactgttatcgataactattttttaatccttgagcattttggtgataaaatcgaataccttgaagaagggctggtattacatccaaggcctgagacccttagaactattcaaaagtataaaagggatatgattacccttcgtaaatctatctggcctcttcgggagctaataaatggtttgcagagggttgagtccgatcttattaaagagactactcgaatttaccttagagatgtttatgaccataccattcaggtaatagataccgtcgaagatttccgggatattttatcttcaatggttgatatctatctctccagcataagcttcaggatgaacgaagttatggaggtcctgacggttatagcaacaattttcattccccttactttcatatcaggcgtttacggaatgaatttcaaatacatgcctgaactcaactggcgctggggctatccgacagtaatgtttgcaatgatccttctagcagtcagcatgtttatctattttaagaaaaggaaatgggtttga

SEQ ID NO: 132907 - protein, 354 aa, Methanosarcina barkeri str. Fusaro
MAASGRRGSQIGLAPGALVHVGEKKVEKVVIRVLAYNSETLIERQLEKVEECLEFKDQPDLNLWIDVDGLDRVDIIGKLGSYFNIHPLTLEDILNTRQRPKTEDYDSYIYSVLKMILLDKENKEITIDQVSIIIGSNYVLSFQERDGNVFDQMRERFENPASRLRKSGVDYLAYGLIDTVIDNYFLILEHFGDKIEYLEEGLVLHPRPETLRTIQKYKRDMITLRKSIWPLRELINGLQRVESDLIKETTRIYLRDVYDHTIQVIDTVEDFRDILSSMVDIYLSSISFRMNEVMEVLTVIATIFIPLTFISGVYGMNFKYMPELNWRWGYPTVMFAMILLAVSMFIYFKKRKWV

SEQ ID NO: 132908 - DNA, 1065 bp, Dehalococcoides sp. CBDB1
  CDS (1)..(1065): transl_table=11
atgaccagacaatctaaaaagtattcccagaaagcgggcatgctgcccggttcggtagtatttataggcgaagggaaaacagaaaaggccagcctcagcctgcactcctacactccggattcatatcaacctctgcccgtaaaaaccatggctgattgtattactcagattaaacagtccaaaggcatagtctggataaaggtaaacgggcttcaggataccgccatggtggaggaactgggcaaatgctttagcctccacccccttaccattgaagatgtagtcaataccgaacaacgccccaaactggaagactacggcaattacttctttgccgttatcaaagccttatactgggactccgaacttaaaaaaacccgttccgagcacatcagcctggtgctgggtaataactatctgattagttttcaggaacatcagagtgatattttaaaccccattcaggagcgtttgaaatctgacaacgggcggcttcgcaaacttggatctgactatctgctctactccatactggacatggtagtagacggatatttcagcttgctggagggattcggagactatctggacgaaatagaagaacagcttttgtccaccccgtcttcccaaaccctcaaacagatttcaggtgcaaaaaaggaaatgctctttatccgcaaatctatctggccggtcagagagaccattgcatccatcgaacgcacagaaaaccctctgatagataaaaacagccatgtatatttccgggatatttatgaccaccttatccagctgatagataccggtgaaacctatcgggatatgctttccaacatgatagatatttatctctccagcctttccaaccgcatgaatgaagtcatgaaggttttaaccattttcgcctctatctttatccccctgaccttcattgtaggcatatacggcatgaattttgatattccggaactccgtctcagctggggatatcccggcatactcattttcatgctggccatagttttgctgctgttatctttttttaagagaaagaaatggctttaa

SEQ ID NO: 132909 - protein, 354 aa, Dehalococcoides sp. CBDB1
MTRQSKKYSQKAGMLPGSVVFIGEGKTEKASLSLHSYTPDSYQPLPVKTMADCITQIKQSKGIVWIKVNGLQDTAMVEELGKCFSLHPLTIEDVVNTEQRPKLEDYGNYFFAVIKALYWDSELKKTRSEHISLVLGNNYLISFQEHQSDILNPIQERLKSDNGRLRKLGSDYLLYSILDMVVDGYFSLLEGFGDYLDEIEEQLLSTPSSQTLKQISGAKKEMLFIRKSIWPVRETIASIERTENPLIDKNSHVYFRDIYDHLIQLIDTGETYRDMLSNMIDIYLSSLSNRMNEVMKVLTIFASIFIPLTFIVGIYGMNFDIPELRLSWGYPGILIFMLAIVLLLLSFFKRKKWL

SEQ ID NO: 132910 - DNA, 1143 bp, Anabaena variabilis ATCC 29413
  CDS (1)..(1143): transl_table=11
atgattagaaaactgcgtcgctttgccaaagtagtcaataaaccatacaaagatgagttctatcactaccctggaaccatccctggaaccattattattgatgcagatgcgccaccaccggaaattgacttgattgactataatcaaactgattttgttcatcggcgagttgcaaccccggaagaatgcgttccctatttggatacggagtctgtgacttgggtagatgtccagggtttgggtaatcaagacatcttagagcgagtggggcaaatttttgaattaccgcctctggtgttggaagatgtggtgaatgtatcggaacgccccaaaactgaggattatgacgaccaattattatttattgcccggatggttgtacccaaggaaagagaatcagggttttatagtgagcaagtcagtttagtcttaggtaaacattacttgttaagtattcaggaagaaccggagcatgattgctttgaaggcgtgaggatgcgaattgaaaaaggtaaaggaaatatccgtcgccaaagggcagactatttagcttatgctttgcttgatgcaatcattgatggttttttccccgttttggaacgttacggggaagcacttgaggatttagaagaagaagtaatcgttagtcctactcgccaaacactgcaaaaaatttatcaagtcaggcgagaattactacaactgcgtcgcgctatttggccgcaacgagatgcgattaattctttgatacgcgatcgcagtcaactaattagcccggaggtgcaaatctatctccgcgattgttatgaccatacagtgcaagtcatggatatggtggaaacctaccgcgagttagcctctggtttgatggatgtatacttgtcagcagtcggtaacaaaatgaatgaagttatgaaactactgacagtggtttcatctatctttattcccctaacttttgttgcaggtatatatggcatgaatttcaatacggaaaaatcaccctacaatatgcctgagttgaactggtattggggttatcccctgtgcttaggagttatgggagcgatcgcttttgcattactctttctattttggaaacgaggttggctagaaaattcttctatgattgagcgtgattaa

SEQ ID NO: 132911 - protein, 380 aa, Anabaena variabilis ATCC 29413
MIRKLRRFAKVVNKPYKDEFYHYPGTIPGTIIIDADAPPPEIDLIDYNQTDFVHRRVATPEECVPYLDTESVTWVDVQGLGNQDILERVGQIFELPPLVLEDVVNVSERPKTEDYDDQLLFIARMVVPKERESGFYSEQVSLVLGKHYLLSIQEEPEHDCFEGVRMRIEKGKGNIRRQRADYLAYALLDAIIDGFFPVLERYGEALEDLEEEVIVSPTRQTLQKIYQVRRELLQLRRAIWPQRDAINSLIRDRSQLISPEVQIYLRDCYDHTVQVMDMVETYRELASGLMDVYLSAVGNKMNEVMKLLTVVSSIFIPLTFVAGIYGMNFNTEKSPYNMPELNWYWGYPLCLGVMGAIAFALLFLFWKRGWLENSSMIERD

SEQ ID NO: 132912 - DNA, 1098 bp, Geobacter metallireducens GS-15
  CDS (1)..(1098): transl_table=11
atgcccggaggcgctaacgcaacccccatgaggaacaagctcgtcacaaagcgttccgccaaggcggggcttccccccggcaccctcgttcacatcggcgaacggcaccgcgaagcggcccgggtctccattatcgcctatgacgagaaaggcgtttacgaacaggcttccgacgaccttgccgcctgtttccctctgcgcaaccagccggaagtcagctggatcaatgtggagggaatccacagcatcgaactccttcagaaactgggcgaatgttacggcatccaccctctggtgctggaagacattctcaataccgaccagcgcccgaagcgggaggactacggcgcctacctcttcatcgttctcaagatgctctccctcaaaaacggcaacaaaggggtggctgccgaacagatgagtctcattctgggtgagaacttcgtgctctccttccaggaggggcttgcgggggatcccttcgacccggttcgtgagcggctgcgggccggtcgtgggaaaatccgctccctgggagccgattatctcgtctactccctcatcgacgccattattgacaactacttcgttatcctcgaaagcctggcggagcggatcgagcggctcgaagaagagctggtggccaatccggtgcgcgaaaccgtcggcaggctccacatcctcaagcgggaagtgatttttctgcgcaaatcaatctggcccctccgcgaggtgatcagcggcctcgaacggcgtgaatcgtccctcgtccgcgaagagaccgccatctacctgcgcgatgtctatgaccataccgtgcagatcattgacaccgtggaaaccttccgcgatatcctttcggggctcctcgacatctacctttccaccctcagcaaccgcaccaacgaagtcatgaaggtgctgaccatcatcgccaccctcttcatgccccttaccttcattgccggtctctacggcatgaacttccactatatgcccgagctcaactggcgctggggctaccccgccgtgctcatcctcatgcttctggtgatcggggggatgctcgtctttttcagaaggaagaaatggatatag

SEQ ID NO: 132913 - protein, 365 aa, Geobacter metallireducens GS-15
MPGGANATPMRNKLVTKRSAKAGLPPGTLVHIGERHREAARVSIIAYDEKGVYEQASDDLAACFPLRNQPEVSWINVEGIHSIELLQKLGECYGIHPLVLEDILNTDQRPKREDYGAYLFIVLKMLSLKNGNKGVAAEQMSLILGENFVLSFQEGLAGDPFDPVRERLRAGRGKIRSLGADYLVYSLIDAIIDNYFVILESLAERIERLEEELVANPVRETVGRLHILKREVIFLRKSIWPLREVISGLERRESSLVREETAIYLRDVYDHTVQIIDTVETFRDILSGLLDIYLSTLSNRTNEVMKVLTIIATLFMPLTFIAGLYGMNFHYMPELNWRWGYPAVLILMLLVIGGMLVFFRRKKWI

SEQ ID NO: 132914 - DNA, 1065 bp, Desulfovibrio desulfuricans G20
  CDS (1)..(1065): transl_table=11
atggcccgttttctgaaaaagatggacacaagggcggggcgtccgccgggtgctctggtttttgtaggcagacagaaaatagatacgccgcgtctgcgtgtcatcgaatacgatgcggacatggcacgcgacgattttgtgcagcaccccggtcagcttgccggccgtacgcggcccgataccgtgctgtggtgcaacgtggacggcgtgcacgatgccggactgatggaaacgctgggcgggctgttcggcataccggcgctggtgcttgaagacatcatgaacacaggtcagcgccccaagcttgaagagtttcccggcattgtctttgtttccatcaaaatgccttcactcagtcaggaccgttcggcagtgacgacagaccagttgagtgccgtgctcagcgacggctgtctgcttacttttcaggaacgtccgggaatggtttttgagccggtgcgcgagcggttgaaagggcagacaggaagactgcggcggtacgggccggattatctgctgtacgcgctgctggattgcgtgtttgaggggtatctgaaaaccattgaggcactgggcgagcgcatagaagagctggacgacgaaatttttgaagaccccacgcctgaactgctgcaggagataacgcattatcgccgcgagatggcctacatacgcaaggcggtgcgccccgcgagggaaatcgcgttgcgcatggcgcgggtggaaaacggccttgtgggcgagggcattcagccttttctgcgcgaccttgccgatatggccgagatgaccgccgatgccgtggaggtgtaccgcgaactgctgaacgaccatcagaacagttataacatggcggtgggcaacagactgaacgacatcatgaagtttctgaccattttttccacggtattcattccgctgtcgtttcttgccggtgtgtacggaatgaactttgacgtgatgcccgaactgcacgtggagtatgcctattttgtgctgctgggcgttatggtggctgtcgcggggggcatgctggtgtatttccgctggcgccgctggctgtga

SEQ ID NO: 132915 - protein, 354 aa, Desulfovibrio desulfuricans G20
MARFLKKMDTRAGRPPGALVFVGRQKIDTPRLRVIEYDADMARDDFVQHPGQLAGRTRPDTVLWCNVDGVHDAGLMETLGGLFGIPALVLEDIMNTGQRPKLEEFPGIVFVSIKMPSLSQDRSAVTTDQLSAVLSDGCLLTFQERPGMVFEPVRERLKGQTGRLRRYGPDYLLYALLDCVFEGYLKTIEALGERIEELDDEIFEDPTPELLQEITHYRREMAYIRKAVRPAREIALRMARVENGLVGEGIQPFLRDLADMAEMTADAVEVYRELLNDHQNSYNMAVGNRLNDIMKFLTIFSTVFIPLSFLAGVYGMNFDVMPELHVEYAYFVLLGVMVAVAGGMLVYFRWRRWL

SEQ ID NO: 132916 - DNA, 1068 bp, Syntrophus aciditrophicus SB
  CDS (1)..(1068): transl_table=11
atggttagacccgggaaaacccgatcggggaaagtgggcctgccgcctggttccctcgttcatatcggggaaaaaactgcggaaaagacgaaaatctcactgattcattataatgaacagactctgcagaggatggacatccagcagatatccgcttgtgcttcctttcttcaagaaacgggaatcagctggatcagcttcgagggcattccggaaattcccgtcctggaagagctcggtttgaaattcggcctccaccctctgaccctcgaagacatcctgaacacggaccagcgtccgaaaatggaggattatggtgattacctctatatcgtgctgaagatgttctacttcgacaatccaggaaaagtcgacattaaatcggaacagatcagtattattttaggcgccaattttgtgatttccttccaggaacaggccggcagcatatttcaacccatcagagaacgactcgacaatgccagaggacggctgcgtagaagcggcccggattatctgacccacgcgttgattgacgcaattgtggatcattactttcttattcttgaaaattcaggggaaagaatagaactgctcgaacaggcactgattaaaagcccctctgccggaatgcttgataccctgcaggggctgaagaaagagatgatcctgctgcgaaagtcactctggcctctccgggagatgatcagcaccatggagcgatcagaatccccgttgataagcaaatcgtccgttgtttatttcaaggacatttacgatcacaccatccatatcatcgacaccctggaaaccttcagggatatgctgtccggcatgatggacatctacctttccagtataagcaaccggatgaacgaagttatgaaggtgctgaccgtcatcgcgactctctttatgccgctgaccttcatcgccgggatttatggcatgaatttcaaatatatgccggaactggagtggcggtggggctatgccatggtatggggaattctactgaccatcgcgggtcttatggtgctctacttccgcagaaagaattggtggtaa

SEQ ID NO: 132917 - protein, 355 aa, Syntrophus aciditrophicus SB
MVRPGKTRSGKVGLPPGSLVHIGEKTAEKTKISLIHYNEQTLQRMDIQQISACASFLQETGISWISFEGIPEIPVLEELGLKFGLHPLTLEDILNTDQRPKMEDYGDYLYIVLKMFYFDNPGKVDIKSEQISIILGANFVISFQEQAGSIFQPIRERLDNARGRLRRSGPDYLTHALIDAIVDHYFLILENSGERIELLEQALIKSPSAGMLDTLQGLKKEMILLRKSLWPLREMISTMERSESPLISKSSVVYFKDIYDHTIHIIDTLETFRDMLSGMMDIYLSSISNRMNEVMKVLTVIATLFMPLTFIAGIYGMNFKYMPELEWRWGYAMVWGILLTIAGLMVLYFRRKNWW

SEQ ID NO: 132918 - DNA, 1062 bp, Methanococcoides burtonii DSM 6242
  CDS (1)..(1062): transl_table=11
atgactaatatctttaaaagatcgtctaaagcaggtctcccacctggttctcttatccatgtaggtgaggtgagggaagggagggtcagatttactatttttgattacgataaaagccacttttcggaaaaagaagtggaaaacgtagaggaatgttttcgttatactgataacaaaacggttacatggatcaatatagatggcatacaccaagttgatgtcatagagaagatcggactcaattttggtttaacttcccttgtgctggaagatatacttaacacgaatcagcgtccaaaattagaggattttgaaaattacatatacgttgtaatgaaaatgatttcatttgatgaaaaggtaaatgaattaacaacagagcaggttagttttattttagcaccaaatttggtcatatcattccaggagagaatcggcgatacctttgatccggtcagggggaggttgagggcaccaaagggtcgtatcaggaagatggatgcggactatcttgcttacgcattaatagattccattgtcgataattactttattatactcgaaaagatcggggaaaagatcgattttatagaagaagagctggtaaccgatccaactccagatactttgacgacgatccatgaactgaaaagagaaatgatatcccttaaaagatcgatctggccactgagggagatccttaatagtctgagaatgatggaatcgtcacttataatggattccactcacgtatatctcaaagatgtgcatgaccacataattcagataatcgatacaatagagacgtataaagagatgctttccggaatgctggacatatacctctcaagtttgagcaataaaatgaatgaggtaatgaaagttcttacattggttgccacgatattcatacccctaacatttatagctggggtatatggaatgaattttcagcatatgcccgaactgggctggaaatggagttatccagtggtgtggctcatcatgatctcggtgggaatgtcgatggtcctttattttaaaaagatgaaatggatctaa

SEQ ID NO: 132919 - protein, 353 aa, Methanococcoides burtonii DSM 6242
MTNIFKRSSKAGLPPGSLIHVGEVREGRVRFTIFDYDKSHFSEKEVENVEECFRYTDNKTVTWINIDGIHQVDVIEKIGLNFGLTSLVLEDILNTNQRPKLEDFENYIYVVMKMISFDEKVNELTTEQVSFILAPNLVISFQERIGDTFDPVRGRLRAPKGRIRKMDADYLAYALIDSIVDNYFIILEKIGEKIDFIEEELVTDPTPDTLTTIHELKREMISLKRSIWPLREILNSLRMMESSLIMDSTHVYLKDVHDHIIQIIDTIETYKEMLSGMLDIYLSSLSNKMNEVMKVLTLVATIFIPLTFIAGVYGMNFQHMPELGWKWSYPVVWLIMISVGMSMVLYFKKMKWI

SEQ ID NO: 132920 - DNA, 1077 bp, Cytophaga hutchinsonii ATCC 33406
  CDS (1)..(1077): transl_table=11
atgagccgtaaacataaaaataaagcacgaaaaccaggcctttctccgggagagttgagcggtttcgatcattcagatgaaaatgatattgcagatatttatctcatacggtatgatgaaaatgaagtagtcgagggaaagattgaatcggttgaagatatgattgtgccacctgcagataacaatcaggtatactggtacaacatagatggtgtaaacaatcccaatcagctggctgatatagaaaaaaaatacagactgcaccctttgttgatggaagatgttgccagtgcagagcagcggccaaagctggatgattacgacgattgtctttttcttactgtaaagatgatccggcacgatgacaaaacaaatgaaattttttctgaacaggtaagctttgttattaagccaaatttaattttatcgtttcaggaaaaaaataaagagggggatgtctttaatcccaatagggaaaggctgcgccagaacaaaggtaaaatgcgaaggaagggagcagattatttgctgtacagtttgctggataccattgttgatcattacttcgagattatggaatatgttggcgacacacttgaagttattgaacaggaaatgcttacaaacccggaacctgttaaacttaaagaattatataaattcaggagagatctgatttacctgcgaaagtctgtatggccgctgcgtgaagtgatagtaaagctggagcgggatgaatgttctatgatcggcgaagatgtaaaaccctttttacgcgatgtatacgatcacaccattcaagtgattgaaactgtagaatctacacgcgatattttgtccggcatcgtagatgtttacttatcttccgtaagtaaccgcatgaatagtgtaatgaaagtattgacagtgatatcaactatttttatgcccttagccttcattacaggtttatatggaatgaatttcgacaacatgcctgaactgcatacgcaaaatgggtattacgctgtgctcgttttatgtggaacaattgcgctcgggatgcttatctattttcagcgtaaaaaatggctttaa

SEQ ID NO: 132921 - protein, 358 aa, Cytophaga hutchinsonii ATCC 33406
MSRKHKNKARKPGLSPGELSGFDHSDENDIADIYLIRYDENEVVEGKIESVEDMIVPPADNNQVYWYNIDGVNNPNQLADIEKKYRLHPLLMEDVASAEQRPKLDDYDDCLFLTVKMIRHDDKTNEIFSEQVSFVIKPNLILSFQEKNKEGDVFNPNRERLRQNKGKMRRKGADYLLYSLLDTIVDHYFEIMEYVGDTLEVIEQEMLTNPEPVKLKELYKFRRDLIYLRKSVWPLREVIVKLERDECSMIGEDVKPFLRDVYDHTIQVIETVESTRDILSGIVDVYLSSVSNRMNSVMKVLTVISTIFMPLAFITGLYGMNFDNMPELHTQNGYYAVLVLCGTIALGMLIYFQRKKWL

SEQ ID NO: 132922 - DNA, 1146 bp, Nostoc punctiforme PCC 73102
  CDS (1)..(1146): transl_table=11
atggtacgaaaactgcgtcgtcttcccaaaatagtaaataggctatataaaaaagatgaattctatcaccaaccaggtactatacctggaacaatttttattcatgaagattctccgccaccgataattttcttgattgactataaccaaaccaatttcatccgtgaacaaatagcaactccagaagaatgtatcccatatctggagatggaatccatttcttgggtagatgtacaaggtttaggtagtcaagatatattacaacggttgggtcacgtttttgaattacatcctctcgttttagaagatatagtcaatgtaccagagcgtcctaaaacagaggattatgaagaccaattgttattcattgcccgcatggtagtaccaaaggaaatatcgtgtggttttcacagcgagcaagtgagtttaatattagggaaaaactatttactgacagtccaagaagaaccagaacatgattgttttgaagcggtgcgatcgcgaattgaaaaaaacaaaggtatcatccgtaagcaaggagcagattatttagcttacgccgtgttagatgccattattgatggctttttcccggtactggagctttatggggagcgaatcgaagagttagaggaagaagtaatagttaaacctactccgcaaacactacaaaatatttatcaaattaggcgagaattactgcaactacgtcgtgctatctggccccaacgagatgcaattaattctttaattcgagatgctcccgatttaattagtgaagaagtgcgaatctacttgcgagattgttatgaccatacagtgcaagttatggatatggtagaaacttatcgagagctagcatctggattaatggatgtgtacctttcggcagtgagcaacaaaatgaatgaaatcatgaaagtactaacggtagtttcaacaattttcattccactgacttttgtggccggaatatatggtatgaatttcaataccgaaaaatcgccatataatatgcctgagttggattggtattggggttatccactttgcttggcagttatggcagcgatcgcacttgggttgctattctttttttggcaacggggctggttgcaaaactctgtaacaattaagcgtaattaa

SEQ ID NO: 132923 - protein, 381 aa, Nostoc punctiforme PCC 73102
MVRKLRRLPKIVNRLYKKDEFYHQPGTIPGTIFIHEDSPPPIIFLIDYNQTNFIREQIATPEECIPYLEMESISWVDVQGLGSQDILQRLGHVFELHPLVLEDIVNVPERPKTEDYEDQLLFIARMVVPKEISCGFHSEQVSLILGKNYLLTVQEEPEHDCFEAVRSRIEKNKGIIRKQGADYLAYAVLDAIIDGFFPVLELYGERIEELEEEVIVKPTPQTLQNIYQIRRELLQLRRAIWPQRDAINSLIRDAPDLISEEVRIYLRDCYDHTVQVMDMVETYRELASGLMDVYLSAVSNKMNEIMKVLTVVSTIFIPLTFVAGIYGMNFNTEKSPYNMPELDWYWGYPLCLAVMAAIALGLLFFFWQRGWLQNSVTIKRN

SEQ ID NO: 132924 - DNA, 1065 bp, Prosthecochloris aestuarii DSM 271
  CDS (1)..(1065): transl_table=11
atggcaaagttcagtcgcaactactctcgcaagatcggccttcctgcaggaagtctcattcatctgggtgaaaagaaacaggatgaaacccgcatcagtgtgatcgatttcaatgaggctcatgttgagcgccgggaggtccgtcgaatcgaggattgtctgccatacaagcagagcgtttcgacgacatggatcaatatcgacggtcttggcgaggttgatgtgatcgccgatgccgggaggattttcgatattaacgctctcgttctggaagatattctccataccggacaacgtcctaaaatcgaagagtatgagaatatcgtcttttgtgttcttcgaatgatatcctacgatgaagagcagcagaaggtttcagaggagcagttgagcctggtgcttggcaagggtgttcttatctcttttcaggaaaagccgggagatattttcaactcgcttcgtgagcgtcttgttcagggaaaatcaaggattcgcacaaaaggggctgattatctggcatatgcgttgatcgatatcgttatcgataattattttgatgtgcttgacaaggttgaactcaagctcgaacgtcttgacgaagagcttttcagcgattcttccatcgagacgttccgggagatcagcgatctgaaaaaagagctgatccagcttcgtaaatccacctggcctctgcgcgaaatcgttaattcaataacaaaaaacgagttcagcgtcatagatgagtctaatctcatctatttcagagatgtctatgatcacaccattcatgtgatcgatattctcgaaaccttgcgtgacatggtggcggcaatgcatgatacctacatgaactacgtcaataatcggatgaacgaggtcatgaaggtcctgacggtgatagcaacaattttcattcccctgacgtttatagcaggagtctatggtatgaatttccgctatatgcccgagctggagtggcgttggggttacttcggtgcgcttggcgtgatgggactcattgttgttggtatggtgctctatttcaaaaagaaaaaatggttttaa

SEQ ID NO: 132925 - protein, 354 aa, Prosthecochloris aestuarii DSM 271
MAKFSRNYSRKIGLPAGSLIHLGEKKQDETRISVIDFNEAHVERREVRRIEDCLPYKQSVSTTWINIDGLGEVDVIADAGRIFDINALVLEDILHTGQRPKIEEYENIVFCVLRMISYDEEQQKVSEEQLSLVLGKGVLISFQEKPGDIFNSLRERLVQGKSRIRTKGADYLAYALIDIVIDNYFDVLDKVELKLERLDEELFSDSSIETFREISDLKKELIQLRKSTWPLREIVNSITKNEFSVIDESNLIYFRDVYDHTIHVIDILETLRDMVAAMHDTYMNYVNNRMNEVMKVLTVIATIFIPLTFIAGVYGMNFRYMPELEWRWGYFGALGVMGLIVVGMVLYFKKKKWF

SEQ ID NO: 132926 - DNA, 1092 bp, Croceibacter atlanticus HTCC2559
  CDS (1)..(1092): transl_table=11
atgaagaagccaaaatttagagctcccaagatgaatataaagaaagggagaaaatctaaaaaaaatgaagttcctggaaccttagagtatactggagataaaagtggtttgcctactaaaatagaggttttcgactatacagcagattattacgagtataaagaatctaacagtatagaagatgcttttgataaacgcaataccaagcacatttcttggattaacataaacgggttacataatacagaagaaatagaaaagcttggagaacattataatatacacccacttatattagaagatatagtagatactgcacaacgacctaagatagatgagtatgcaaactatttatttatagtgtttaagatgatgtatcatagagaagatggtgagtttataaatgagcatatgtctcttataatgggagaagattatgtattaaccttccaagaatctgatggtgatgtttttgatggcttacgctcccgaatagctaactccaaaggtagaataagaaacaatggagcagattatctgatgttcgcaatattagatgccgtggtagataattactttacagtaatggaaactataagtgataaggtagaaactcttgaggatttattgtttgcacaagaagacactaaagatataactcaagatattcaggatttaaaacgagaaattcttaaaatacgcagagctaccttaccattaagagaagtagtaaatagaattgagaaaatagacagtcctttaattgaagagaaaacaagcacattcttaagagacctttacgaccacattattcaagtcaatgaaagtgtagacatttacagagaaatgatttggggtcttatggatatgtatatgactaccataagcaacaaaatgaatgaagttatgaaagtacttaccattatggccagtatttttataccgctcacatttatggcaggaatttatgggatgaactttgagtatataccagaactacagtttaagtatgggtacttttatctttggggagcaatgttaattgtgttcttcgggttactttggtattttaaacggaagaaatggttataa

SEQ ID NO: 132927 - protein, 363 aa, Croceibacter atlanticus HTCC2559
MKKPKFRAPKMNIKKGRKSKKNEVPGTLEYTGDKSGLPTKIEVFDYTADYYEYKESNSIEDAFDKRNTKHISWININGLHNTEEIEKLGEHYNIHPLILEDIVDTAQRPKIDEYANYLFIVFKMMYHREDGEFINEHMSLIMGEDYVLTFQESDGDVFDGLRSRIANSKGRIRNNGADYLMFAILDAVVDNYFTVMETISDKVETLEDLLFAQEDTKDITQDIQDLKREILKIRRATLPLREVVNRIEKIDSPLIEEKTSTFLRDLYDHIIQVNESVDIYREMIWGLMDMYMTTISNKMNEVMKVLTIMASIFIPLTFMAGIYGMNFEYIPELQFKYGYFYLWGAMLIVFFGLLWYFKRKKWL

SEQ ID NO: 132928 - DNA, 1137 bp, Synechococcus sp. RS9917
  CDS (1)..(1137): transl_table=11
atgacgacggcgtccaacgcctcgatcagttatcaggacagcattccggaaccgatccgactcccggacaggccgggggagatgccctcccacctgttcgtccatgggggtctggcaccggtgagttgccgggctctggacctcagcgacaccgccgtcggctggcagccgattcgcaacggagccacgctccgggccctgcgccaggagggacaaccgctctgggtgcagattcgcggcctgggcgatcgcccccttctcgaagacctgctcagcggcctccacctggatcacgagctctggcccctgctcctcgatgccccccaacaggcgcgggtcgactccttcccccaggccgtgctggtggtgctgcatcagttttccctggcgtccaatcaggtgcatctgatcagtgagcaaatcgccctgttgttggtgaatgatctcctgatcagcattcacgaaaatccccgcagcgatttcagtgatcttgaggcctggattcagagcttggaagcaccagaatccgatcttgatcttgacaatctgctccattatctgattgacgaagtgctcgacacccagttgcccatgctggaaatcatgcgcagctctttcgatgatctggaggaggcggccctcatgaggccgaagccatcactcctgaatcgcgcttttcagctgcggatgaatctgcgtcgcacccggcgacagctctggcccctgcgcaatcagctgatccgcctgctcaggcagagccagcgcctgctcggccccggcgctcgccagggcctgcatgagatggccgaacacgtgaacaccctgctcgacatcggtgaacagatccaacgccaggctgacgccgtgacggatgcctacttggcgagcacaggcaaccggatgaatcagatcatgaaaacgctcaccattgtgagcacaatctttgctccgctcacattcatcgctgggatctatggcatgaacttcgagaacatgcccgaactcaagtggaaatacggctacgcctattcccttctcttgatgacgatcatcgccgctctccaggcctatttcctctggcgacggggttggtttcaggactggaccggtggtcgacaaggaaaacggctgccataa

SEQ ID NO: 132929 - protein, 378 aa, Synechococcus sp. RS9917
MTTASNASISYQDSIPEPIRLPDRPGEMPSHLFVHGGLAPVSCRALDLSDTAVGWQPIRNGATLRALRQEGQPLWVQIRGLGDRPLLEDLLSGLHLDHELWPLLLDAPQQARVDSFPQAVLVVLHQFSLASNQVHLISEQIALLLVNDLLISIHENPRSDFSDLEAWIQSLEAPESDLDLDNLLHYLIDEVLDTQLPMLEIMRSSFDDLEEAALMRPKPSLLNRAFQLRMNLRRTRRQLWPLRNQLIRLLRQSQRLLGPGARQGLHEMAEHVNTLLDIGEQIQRQADAVTDAYLASTGNRMNQIMKTLTIVSTIFAPLTFIAGIYGMNFENMPELKWKYGYAYSLLLMTIIAALQAYFLWRRGWFQDWTGGRQGKRLP

SEQ ID NO: 132930 - DNA, 1065 bp, Dehalococcoides sp. BAV1
  CDS (1)..(1065): transl_table=11
atgaccagacaatctaaaaagtattcccagaaagcgggcatgctgcccggttcggtagtatttataggcgaagggaaaacagaaaaggctagcctcagcctgcactcctacactccggattcatatcaacctctgcccgtaagaaatctggctgattgtattactcagattaaacagtccaaaggcatagtctggataaaggtaaacgggcttcaggataccgccatggtggaggaactgggcaaatgctttagcctccacccccttaccattgaagatgtggtcaataccgaacaacgccccaaactggaagactacggcaattacttctttgccgttatcaaagccttatactgggactccgaacttaaaaaaacccgttccgagcacatcagcctggtgctgggtaataactatctgattagttttcaggaacatcagagtgatattttaaaccccattcaggagcgtttgaaatctgacaacgggcggcttcgcaaacttggatctgactatctgctctactccatactggacatggtagtagacggatatttcagcttgctggagggattcggagactatctggacgaaatagaagaacagcttttgtccaccccgtcttcccaaaccctcaaacagatttcaggtgcaaaaaaggaaatgctctttatccgcaaatctatctggccggtcagagagaccattgcatccatcgaacgcacagaaaaccctctgatagataaaaacagccatgtatatttccgggatatttatgaccaccttatccagctgatagataccggtgaaacctatcgggatatgctttccaacatgatagatatttatctctccagcctttccaaccgcatgaatgaagtcatgaaggttttaaccattttcgcctctatctttatccccctgaccttcattgtaggcatatacggcatgaattttgatattccggaactccgtctcagctggggatatcccggcatactcattttcatgctggccgtagttttgctgctgttatctttttttaagagaaagaaatggctttaa

SEQ ID NO: 132931 - protein, 354 aa, Dehalococcoides sp. BAV1
MTRQSKKYSQKAGMLPGSVVFIGEGKTEKASLSLHSYTPDSYQPLPVRNLADCITQIKQSKGIVWIKVNGLQDTAMVEELGKCFSLHPLTIEDVVNTEQRPKLEDYGNYFFAVIKALYWDSELKKTRSEHISLVLGNNYLISFQEHQSDILNPIQERLKSDNGRLRKLGSDYLLYSILDMVVDGYFSLLEGFGDYLDEIEEQLLSTPSSQTLKQISGAKKEMLFIRKSIWPVRETIASIERTENPLIDKNSHVYFRDIYDHLIQLIDTGETYRDMLSNMIDIYLSSLSNRMNEVMKVLTIFASIFIPLTFIVGIYGMNFDIPELRLSWGYPGILIFMLAVVLLLLSFFKRKKWL

SEQ ID NO: 132932 - DNA, 1068 bp, Flavobacteria bacterium BBFL7
  CDS (1)..(1068): transl_table=11
atggctcgcagacgcaaacgtaaagctacacctaaatccagaaattctgtattccaaccacctggaacaatctcttatgtaggattagaacgagaaggaaatgtagctacagaaacgatatgttatgatgaaaacctatatcacaaatatgagaacattcatctagtggatggtatagtagatcaagtgaactggtttaatattgaaggtgtacatgatatcgagttgctagaacaattaggtaaagattttgatttacaccatttactagttgaagatattgcaaatacgactcaacgtcctaaaacagagttttttgaagactgcatttatcaatgtattaaaatgatatcttacgacgctacagaacatgaacttaatgaagagcaggtttctatagtccttaaaaaagatgctgtcataacttttcaagaaaaaacaggtgatgtttttgaaaacataagagaacgtatagaaacaagccgtggcaggataagatctagtaaaaacgattatctcttttatgccttaattgacagtatcatagaccattattttattgcgatagaacaaataggcgaatatttaaatgacctagaagatgagatttttgaagaaccagataaagaatcacttaataaagtacaacgcaataaaagattattacttagcttaagacgtgctatctatcctcttagagaatctatcagtaagttattaaaagagcaaagtgatttaatagatcctaaaattgtaacttattttcatgatgcttatgatcattgcatacaaatcacagaaacaattgaatcttatagagaaataaatactgggctgaaagacatgtatttatctagtgtaagtcataagatgaatcaaatcatgcaggtattaaccattatgtcctccatcttcataccactcacctttctcgcaggtatatatgggatgaattttgagcatattccagaattaagttgggaagatggatatcaatacttttggataatgagtggtggtatttttgtgactttggtcgttttttttaaatggaaaaagtggttgtaa

SEQ ID NO: 132933 - protein, 355 aa, Flavobacteria bacterium BBFL7
MARRRKRKATPKSRNSVFQPPGTISYVGLEREGNVATETICYDENLYHKYENIHLVDGIVDQVNWFNIEGVHDIELLEQLGKDFDLHHLLVEDIANTTQRPKTEFFEDCIYQCIKMISYDATEHELNEEQVSIVLKKDAVITFQEKTGDVFENIRERIETSRGRIRSSKNDYLFYALIDSIIDHYFIAIEQIGEYLNDLEDEIFEEPDKESLNKVQRNKRLLLSLRRAIYPLRESISKLLKEQSDLIDPKIVTYFHDAYDHCIQITETIESYREINTGLKDMYLSSVSHKMNQIMQVLTIMSSIFIPLTFLAGIYGMNFEHIPELSWEDGYQYFWIMSGGIFVTLVVFFKWKKWL

SEQ ID NO: 132934 - DNA, 22 bp, Artificial sequence
  primer
atgcccaacaagcctcagtttc

SEQ ID NO: 132935 - DNA, 21 bp, Artificial sequence
  primer
ttatctatttcctttttcaac

SEQ ID NO: 132936 - protein, 395 aa, Artificial sequence
  consensus sequence
  Variant (2)..(3): Xaa in position 2 to 3 is any amino acid
  Variant (6)..(22): Xaa in position 6 to 22 is any amino acid
  Variant (23)..(58): Xaa in position 23 to 58 is any or no amino acid
  Variant (60)..(81): Xaa in position 60 to 81 is any amino acid
  Variant (82)..(86): Xaa in position 82 to 86 is any or no amino acid
  Variant (88)..(91): Xaa in position 88 to 91 is any amino acid
  Variant (93)..(102): Xaa in position 93 to 102 is any amino acid
  Variant (104)..(110): Xaa in position 104 to 110 is any amino acid
  Variant (112)..(113): Xaa in position 112 to 113 is any amino acid
  Variant (116)..(117): Xaa in position 116 to 117 is any amino acid
  Variant (119)..(120): Xaa in position 119 to 120 is any amino acid
  Variant (125)..(147): Xaa in position 125 to 147 is any amino acid
  Variant (148)..(158): Xaa in position 148 to 158 is any or no amino acid
  Variant (161)..(161): Xaa in position 161 is any amino acid
  Variant (163)..(173): Xaa in position 163 to 173 is any amino acid
  Variant (176)..(180): Xaa in position 176 to 180 is any amino acid
  Variant (181)..(182): Xaa in position 181 to 182 is any or no amino acid
  Variant (184)..(188): Xaa in position 184 to 188 is any amino acid
  Variant (190)..(197): Xaa in position 190 to 197 is any amino acid
  Variant (198)..(198): Xaa in position 198 is any or no amino acid
  Variant (200)..(202): Xaa in position 200 to 202 is any amino acid
  Variant (203)..(203): Xaa in position 203 is any or no amino acid
  Variant (207)..(207): Xaa in position 207 is any amino acid
  Variant (209)..(211): Xaa in position 209 to 211 is any amino acid
  Variant (213)..(215): Xaa in position 213 to 215 is any amino acid
  Variant (217)..(217): Xaa in position 217 is any amino acid
  Variant (220)..(222): Xaa in position 220 to 222 is any amino acid
  Variant (224)..(232): Xaa in position 224 to 232 is any amino acid
  Variant (234)..(258): Xaa in position 234 to 258 is any amino acid
  Variant (259)..(259): Xaa in position 259 is any or no amino acid
  Variant (261)..(264): Xaa in position 261 to 264 is any amino acid
  Variant (266)..(266): Xaa in position 266 is any amino acid
  Variant (268)..(274): Xaa in position 268 to 274 is any amino acid
  Variant (276)..(290): Xaa in position 276 to 290 is any amino acid
  Variant (291)..(291): Xaa in position 291 is any or no amino acid
  Variant (293)..(294): Xaa in position 293 to 294 is any amino acid
  Variant (297)..(304): Xaa in position 297 to 304 is any amino acid
  Variant (306)..(307): Xaa in position 306 to 307 is any amino acid
  Variant (309)..(315): Xaa in position 309 to 315 is any amino acid
  Variant (317)..(317): Xaa in position 317 is any amino acid
  Variant (319)..(319): Xaa in position 319 is any amino acid
  Variant (321)..(326): Xaa in position 321 to 326 is any amino acid
  Variant (328)..(329): Xaa in position 328 to 329 is any amino acid
  Variant (332)..(332): Xaa in position 332 is any amino acid
  Variant (335)..(338): Xaa in position 335 to 338 is any amino acid
  Variant (341)..(341): Xaa in position 341 is any amino acid
  Variant (346)..(347): Xaa in position 346 to 347 is any amino acid
  Variant (349)..(349): Xaa in position 349 is any amino acid
  Variant (355)..(355): Xaa in position 355 is any amino acid
  Variant (356)..(362): Xaa in position 356 to 362 is any or no amino acid
  Variant (367)..(370): Xaa in position 367 to 370 is any amino acid
  Variant (373)..(378): Xaa in position 373 to 378 is any amino acid
  Variant (380)..(389): Xaa in position 380 to 389 is any amino acid
  Variant (391)..(394): Xaa in position 391 to 394 is any amino acid
GXXPGXXXXXXXXXXXXXXXXXXXXXXXXXXXXXXXXXXXXXXXXXXXXXXXXXXXXXYXXXXXXXXXXXXXXXXXXXXXXXXXXXWXXXXGXXXXXXXXXXGXXXXXXXLXXEDXXNXXQRPKXXXXXXXXXXXXXXXXXXXXXXXXXXXXXXXXXXEQXSXXXXXXXXXXXQEXXXXXXXFXXXXXRXXXXXXXXXRXXXXDYLXYXXXDXXXDXYFXXXEXXXXXXXXXEXXXXXXXXXXXXXXXXXXXXXXXXXXRXXXXPXRXXXXXXXRXXXXXXXXXXXXXXXXDXXDHXXXXXXXXEXXRXXXXXXXDXYXSXXXXXXNXXMKXLTXXXXIFXPLTFXXGXYGMNFXXXXXXXXMPELXXXXGYXXXXXXMXXXXXXXXXXFXXXXW

SEQ ID NO: 132937 - protein, 38 aa, Artificial sequence
  protein pattern
  Variant (2)..(3): Xaa in position 2 to 3 is any amino acid
  Variant (4)..(5): Xaa in position 4 to 5 is any or no amino acid
  Variant (7)..(7): Xaa in position 7 is any amino acid
  Variant (8)..(9): Xaa in position 8 to 9 is any or no amino acid
  Variant (11)..(11): Xaa in position 11 is any amino acid
  Variant (12)..(12): Xaa in position 12 is Phe, His or Tyr
  Variant (13)..(13): Xaa in position 13 is any amino acid
  Variant (14)..(14): Xaa in position 14 is Ala, Ile, Leu or Val
  Variant (15)..(15): Xaa in position 15 is Ile, Leu or Met
  Variant (17)..(17): Xaa in position 17 is any amino acid
  Variant (18)..(19): Xaa in position 18 to 19 is Ile or Val
  Variant (21)..(21): Xaa in position 21 is any amino acid
  Variant (22)..(22): Xaa in position 22 is Phe or Tyr
  Variant (24)..(25): Xaa in position 24 to 25 is any amino acid
  Variant (26)..(26): Xaa in position 26 is Ile, Leu, Met or Val
  Variant (27)..(27): Xaa in position 27 is Asp, Glu, Gly or Ser
  Variant (28)..(29): Xaa in position 28 to 29 is any amino acid
  Variant (30)..(30): Xaa in position 30 is Ala, Asp, Glu, Gly, Asn or Ser
  Variant (31)..(32): Xaa in position 31 to 32 is any amino acid
  Variant (33)..(33): Xaa in position 33 is Ile, Leu or Val
  Variant (34)..(34): Xaa in position 34 is Asp, Glu, Asn, Gln or Ser
  Variant (35)..(36): Xaa in position 35 to 36 is any amino acid
  Variant (37)..(37): Xaa in position 37 is Ala, Asp, Glu or Gln
  Variant (38)..(38): Xaa in position 38 is Asp, Glu, Gly, Gln or Ser
RXXXXDXXXLXXXXXDXXXDXXFXXXXXXXXXXXXXXX

SEQ ID NO: 132938 - DNA, 999 bp, Synechocystis sp.
  CDS (1)..(999): transl_table=11
atgaccacacagctagaccgcgtggttcttattggtgttgccggggattccggttgcggtaagtctactttcttacgtcgtttaacggatttattcggcgaagagttcatgacggtaatttgtttggacgattaccatagtttggatcgccagggtagaaaagccgctggggtcaccgccctggatcccagagccaacaattttgacctcatgtatgagcagattaaaacgctcaaaagtggtcaatccattatgaaacccatttacaaccacgaaacggggctgctggatccgccggaaaaagttgaacccaacaaagtggtggttattgagggtttgcatcccctctacgatgaacgggtgcgggaactggtggatttcggggtctacctggacatcagcgaagaagtgaaaattaactggaaaattcaacgggacatggccgaacggggccacacctatgaagatattttggcttccatcaacgcccgtaagcctgacttcactgcctatatcgagccccaaaagcaatatgcggacgtggtgatccaggtgttgcccacccgcttgattgaggacaaggaaagtaaactcctgcgggttcgtcttgtgcaaaaagaaggggttaaattcttcgagccagcctacctgtttgacgaaggttccaccattgattggcgtccctgtggtcggaagctgacctgtacctatcctggcatcaagatgtactacggccccgataattttatgggcaacgaagtatctttgctggaagtggacggcaggtttgaaaacctagaggaaatggtttatgtggaaaaccacctcagcaagactggtactaagtactacggtgaaatgaccgagttgttgctcaagcataaggattacccaggcactgacaatggtactggcctgttccaggtgttagtgggtctgaaaatgcgggaagtttacgaacagttaacggcggaagctaaggtcccggcctctgtgtaa

SEQ ID NO: 132939 - protein, 332 aa, Synechocystis sp.
MTTQLDRVVLIGVAGDSGCGKSTFLRRLTDLFGEEFMTVICLDDYHSLDRQGRKAAGVTALDPRANNFDLMYEQIKTLKSGQSIMKPIYNHETGLLDPPEKVEPNKVVVIEGLHPLYDERVRELVDFGVYLDISEEVKINWKIQRDMAERGHTYEDILASINARKPDFTAYIEPQKQYADVVIQVLPTRLIEDKESKLLRVRLVQKEGVKFFEPAYLFDEGSTIDWRPCGRKLTCTYPGIKMYYGPDNFMGNEVSLLEVDGRFENLEEMVYVENHLSKTGTKYYGEMTELLLKHKDYPGTDNGTGLFQVLVGLKMREVYEQLTAEAKVPASV

SEQ ID NO: 132940 - DNA, 1906 bp, Glycine max
  CDS (178)..(1401)
  misc_feature (1835)..(1835): n is a, g, c or t
  misc_feature (1836)..(1836): n is a, g, c or t
  misc_feature (1837)..(1837): n is a, g, c or t
  misc_feature (1838)..(1838): n is a, g, c or t
  misc_feature (1839)..(1839): n is a, g, c or t
  misc_feature (1840)..(1840): n is a, g, c or t
  misc_feature (1841)..(1841): n is a, g, c or t
  misc_feature (1842)..(1842): n is a, g, c or t
  misc_feature (1843)..(1843): n is a, g, c or t
  misc_feature (1844)..(1844): n is a, g, c or t
  misc_feature (1845)..(1845): n is a, g, c or t
  misc_feature (1846)..(1846): n is a, g, c or t
  misc_feature (1847)..(1847): n is a, g, c or t
  misc_feature (1850)..(1850): n is a, g, c or t
  misc_feature (1851)..(1851): n is a, g, c or t
  misc_feature (1852)..(1852): n is a, g, c or t
  misc_feature (1853)..(1853): n is a, g, c or t
  misc_feature (1854)..(1854): n is a, g, c or t
  misc_feature (1855)..(1855): n is a, g, c or t
  misc_feature (1856)..(1856): n is a, g, c or t
  misc_feature (1857)..(1857): n is a, g, c or t
  misc_feature (1858)..(1858): n is a, g, c or t
  misc_feature (1859)..(1859): n is a, g, c or t
  misc_feature (1860)..(1860): n is a, g, c or t
  misc_feature (1861)..(1861): n is a, g, c or t
  misc_feature (1862)..(1862): n is a, g, c or t
  misc_feature (1863)..(1863): n is a, g, c or t
  misc_feature (1866)..(1866): n is a, g, c or t
  misc_feature (1867)..(1867): n is a, g, c or t
  misc_feature (1868)..(1868): n is a, g, c or t
  misc_feature (1869)..(1869): n is a, g, c or t
  misc_feature (1871)..(1871): n is a, g, c or t
  misc_feature (1875)..(1875): n is a, g, c or t
  misc_feature (1876)..(1876): n is a, g, c or t
  misc_feature (1882)..(1882): n is a, g, c or t
  misc_feature (1890)..(1890): n is a, g, c or t
cccgggccgagtcgccgccacacttcacctcgtatttcatatgtgttccaaacttcttcttggaatgtcccttcctaaataaccctcaaacaaaagccaccttaacatctcttctctgaaaattctctttagagagatagagagatagagagagagagagaaagaaattaagaaaaaatggcagcctgcactgtctactcaacacaatctctgagcacaaattgctccatctcaaccccatcaaagacacagctgagtttcttccaccaaaagcaggtagttttctggaggaacagcaacaggggcaacagcagcagcagaagaagctatgtgataacatgtgcagcaggtgactcacagacagtggtgattggtcttgctgcagactcagggtgtgggaagagcaccttcatgaggaggctgacaagtgtgtttggaggagcagcagagccaccgaagggtggcaaccctgactcaaacacactcatcagtgacaccaccactgtcatatgcttggatgattaccactctttggatagaactggcagaaaggagaagggtgtcactgcccttgaccctagagccaatgattttgatctcatgtatgaacaagttaaagctcttaaggatggaattgctgttgaaaaaccaatctacaaccatgtcactggtctcctggatccccctgagctcattaaaccccccaaaatcttagtcattgaaggcttgcacccaatgtatgattctcgggtcagagatctcttggactttagcatctacctagacattagcaatgaggtcaaattcgcttggaaaattcagagagacatggcagagcgtggacacagtcttgaaagcatcaaggctagcattgaagcaaggaagcctgattttgaagcatatattgatccacaaaagcaatacgcagatgcagtgatagaagtgttgccaacccaactcattccagatgacaacgagggtaagattttgagagtgagattgatacagaaagaaggggttaagtactttagcccagtttacttatttgatgatggctctaccatttcatggataccatgtggaaggaagcttacatgctcctaccctggcatcaaattcttctatggaccagagacttactacggaaatgaggtgtcagttgtagaaatggatggacaatttgacagactagatgaactaatatacgttgagagccacctaagcaacctctctacaaagttctatggagaggttactcaacagatgttgaagcatgctgatttccccggcagcaacaatggaacaggtctcttccaaaccatagttggtttgaagataagagatttatatgagcagctaatagccaccaaggctgagactccagtggctgcaaaagcttaggaattgaattgaacctgccataataatatatatacatatcgaccgagcaacgcagtcaaattgcattagttctcatcaaaatcatcattttctttcttctttcatgttttccacaatttcactgtgtttcatgttattttgtctattgttattaggctgttctgcatcataattaatgaaaaaaacacatatgtatgtatgtatgtacttatccgagaaaaaaaagtgaggctgagattcagttatgttgatacaagattgagacaataattggcttctctttctctagctttatccatatatgtatgtaatattttcttatcaaactttttgtgtgagattcataaattaatcaaagggaatgatctaatattctatttgttggtttctaaaaaaaaaaaaaaaaactcgcataacaaaaaaaaaaagaaacnnnnnnnnnnnnnaannnnnnnnnnnnnnggnnnntntcgnnaatggnggacttcncgatgccacttttcag

SEQ ID NO: 132941 - protein, 407 aa, Glycine max
MAACTVYSTQSLSTNCSISTPSKTQLSFFHQKQVVFWRNSNRGNSSSRRSYVITCAAGDSQTVVIGLAADSGCGKSTFMRRLTSVFGGAAEPPKGGNPDSNTLISDTTTVICLDDYHSLDRTGRKEKGVTALDPRANDFDLMYEQVKALKDGIAVEKPIYNHVTGLLDPPELIKPPKILVIEGLHPMYDSRVRDLLDFSIYLDISNEVKFAWKIQRDMAERGHSLESIKASIEARKPDFEAYIDPQKQYADAVIEVLPTQLIPDDNEGKILRVRLIQKEGVKYFSPVYLFDDGSTISWIPCGRKLTCSYPGIKFFYGPETYYGNEVSVVEMDGQFDRLDELIYVESHLSNLSTKFYGEVTQQMLKHADFPGSNNGTGLFQTIVGLKIRDLYEQLIATKAETPVAAKA

SEQ ID NO: 132942 - DNA, 1730 bp, Sorghum bicolor
  CDS (142)..(1395)
gttatcttggccctccacacccaccatcccattcagtttgcctctcttcttctcttcaagtcccagccacaaggcttggactcttggagggaagaagacaagcttagccaaagaacaaacgccgccggcacgcacgcagagatggcgatctgcagcgcgcacactaccaccacctccctgcactccccatgcacgaccaccgtctccaacgcagctggcttcagacagaggcaagtcattttcttcaccagcagcagcaaccgtaggagctgcggcggcggcggcggcggcagaaggcatcacggaggggcacggaccagctgcttccaggtctcatgctccgtcgacaagccggtggtgattggcctggcggcggactccgggtgcggcaagagcaccttcatgcgccggctcaccagcgtctttggtggcgccgcggtgccgcccaagggcgggaacccggactccaacacgctcatcagtgacaccaccacagtgatctgcctcgacgactaccattccctggacaggaacggcaggaaggagtacggtgtgaccgccctcgacccaagggccaacaactttgatctcatgtatgagcaggtgaaggcgatcaaagatggccaggcagtcgagaagcccatctacaaccatgtcactggcctcctcgacccgccggagcttatcacgccgccaaagatttttgtcattgaaggtctgcacccaatgttcgatcagcgtgtgagggacctcttagatttcagtatctacttggacatcagtgatgaagttaagtttgcatggaaaatccagcgggacatggcagagcgtgggcacagccttgaaagcatccaagccagtatcgaggccaggaaaccagattttgatgcttatattgatccgcagaagcagtatgctgatgctgtgattgaagttctgccgacccagttgattcccggtgacaatgaagggaaggtgcttcgtgttaagctcatcatgaaagaaggggtgaagttcttcaacccagtttatctctttgatgaaggatcgagcatcagctgggtgccttgtggaagaaagctcacatgctcttaccctggcatcaaatttgcctatggcccagacacttactttggaaaggaggtatccgttctggagatggatgggcaatttgacaaactagatgagctcatctacgtggagagccatctaagcaacctctcgaccaagttctacggagaggtgacacagcaaatgctaaagcatgcagacttcccaggaagcaacaacggaactggtctcttccagaccatcattgggctgaaaattagggacctctatgaacagattgttgctgagagggctggtgtaccggcggaagcagccaaagtttaatgatgcatgcattcagatctcctatcctaaaactacagctcttcaagctcaatgagaacaaccaccttcacatctcttcttgtaattagttcggatatatggcaagctaggaggaggtagaagaaatgtcattgcagaaactcaggaaaaccacgtgcaatgaaatttctagaaatccctctccttggagggcggtcttatataatcgcttcttcacttgtttagacgtatatcttcttccatacttcattgcagaattgaaagaaattaaaataaaagtgcctactactatcaagtgtaggaatttgaattcatccatacttgtattgttggtt

SEQ ID NO: 132943 - protein, 417 aa, Sorghum bicolor
MAICSAHTTTTSLHSPCTTTVSNAAGFRQRQVIFFTSSSNRRSCGGGGGGRRHHGGARTSCFQVSCSVDKPVVIGLAADSGCGKSTFMRRLTSVFGGAAVPPKGGNPDSNTLISDTTTVICLDDYHSLDRNGRKEYGVTALDPRANNFDLMYEQVKAIKDGQAVEKPIYNHVTGLLDPPELITPPKIFVIEGLHPMFDQRVRDLLDFSIYLDISDEVKFAWKIQRDMAERGHSLESIQASIEARKPDFDAYIDPQKQYADAVIEVLPTQLIPGDNEGKVLRVKLIMKEGVKFFNPVYLFDEGSSISWVPCGRKLTCSYPGIKFAYGPDTYFGKEVSVLEMDGQFDKLDELIYVESHLSNLSTKFYGEVTQQMLKHADFPGSNNGTGLFQTIIGLKIRDLYEQIVAERAGVPAEAAKV

SEQ ID NO: 132944 - DNA, 1706 bp, Zea mays
  CDS (182)..(1399)
gaaaaatagggacaccacatcattgccatccgcatttcgtcctcatgttcttgttaccttgtgtccctcgagccccccggggccgctccctattcttcttctcttcaagtgccactcccatccaccacaaggcttggcttggtgggaagaagacaaacgccggcacgcgcacgcagacacgatggcgatctgcagcgcgcacactaccacctccctgcgctccccatgcacgaccgtctcgaacgcaggtctgaggcagaagcaagtcatcttcgtcaccagcaacaggaggagcggcggcggcaggaggcacggaggggcaaggagcttccaggtctcgtgctccgtcgacaagccggtggtgattggcctggcggcagactcagggtgcggcaagagcaccttcatgcgccggctcaccagcgtcttcggtggcgccgcggagccgcccaagggcgggaacccggactccaacacgctcatcagtgacaccacgacagtgatatgcctcgacgactaccattccctggacaggaacggcaggaaggagaaaggtgtgaccgccctcgaccctagggccaacaactttgatctcatgtatgagcaggtgaaggcgatcaaggaaggccaggcagtcgagaagcccatctacaaccatgtcactggcctcctcgaccctccggagcttatcgcgccaccaaagattttcgtcattgaaggtctgcacccaatgttcgatgagcgagtgagggacctcttagatttcagtatctacttggacatcagtgatgaagttaagtttgcatggaaaatccagcgggacatggcagagcgtgggcacagccttgaaagcatcaaggccagtatcgaggccaggaaaccagattttgatgcctttattgatccgcagaagcagtatgctgatgctgtgattgaagttctgccgacccagttgattcccgacgacaacgaaggaaaggtgctgcgtgttaagctcatcatgaaagaaggggtgaagaacttcaacccggtttatctctttgacgaaggatcgaccatcagctgggtgccttgtggaagaaagctcacatgctcttaccctggcatcaaattttcctatggcccggacacttacttcggaaacgaggtatctgttctggagatggatgggcaattcgacagactagatgagctcatctacgtggagagccatctaagcaacctttcaaccaagttctacggagaggtgacacaacaaatgctaaagcatgcagacttcccaggtagcaacaacgggacaggtctcttccagaccatcattggactgaagattagagacctctatgaacagattgttgctgagagggctggtgtaccagcggaagcagcaaaagtttaacgatctatgcattcagatgtcctaaaactacagctctccgaactcaatgggagtaacaaccttcgcatctgttgggatatatggcgagctaggaggtatagaaatgtcattgcagaactcaggaaaacgtgcaatggaatttcttgaaatccctcttgaagagagtgagaactcgatagatcaagaatcaccacacgttgtattaatcgtatggtataatatttatacatgtacaggatgagctatgcaaaaaaaaaaaaaaaaaaaacgcccccaaaaaaataaaaaaaaaaaaaaaaaagcggcc

SEQ ID NO: 132945 - protein, 405 aa, Zea mays
MAICSAHTTTSLRSPCTTVSNAGLRQKQVIFVTSNRRSGGGRRHGGARSFQVSCSVDKPVVIGLAADSGCGKSTFMRRLTSVFGGAAEPPKGGNPDSNTLISDTTTVICLDDYHSLDRNGRKEKGVTALDPRANNFDLMYEQVKAIKEGQAVEKPIYNHVTGLLDPPELIAPPKIFVIEGLHPMFDERVRDLLDFSIYLDISDEVKFAWKIQRDMAERGHSLESIKASIEARKPDFDAFIDPQKQYADAVIEVLPTQLIPDDNEGKVLRVKLIMKEGVKNFNPVYLFDEGSTISWVPCGRKLTCSYPGIKFSYGPDTYFGNEVSVLEMDGQFDRLDELIYVESHLSNLSTKFYGEVTQQMLKHADFPGSNNGTGLFQTIIGLKIRDLYEQIVAERAGVPAEAAKV

SEQ ID NO: 132946 - DNA, 1212 bp, Oryza sativa (japonica cultivar-group)
  CDS (1)..(1212)
atggcgatctccagcctacatgccaccacctccctgcactccccatgcaccaccaacacaagcttcaggcagaatcaggtcatcttcttcaccaccagaagcaacaggaggggtagcacaaggtacggaggagcaagaacctttcaggtttcatgctcagtcgacaagccagtggtgattggccttgcagcagactcaggatgcgggaagagcacctttatgcgccggctcaccagtgtgtttggtggtgctgcagagccacccaagggtggcaacccagactcaaacacactcatcagtgacacgacaacggtgatatgcctcgatgactaccattccttggacaggactggcaggaaggagaaaggtgtgactgccctggaccctagggcaaacgattttgatctcatgtatgagcaggtgaaggcaatcaaagaaggcaaggcaattgagaagccaatctacaaccatgttactggtctcctagacccaccggagcttatccagccccccaagatttttgtcattgagggcttacatcccatgtttgatgaacgtgtgagggacctcctagatttcagcatctacctggacatcagtgacgaggttaaatttgcatggaaaattcagagggatatggcagagcgcggtcacagccttgaaagcatcaaggctagtatcgaagccaggaaaccagattttgatgccttcattgatccccagaagcaatatgctgatgcagtgattgaagttctgccaacccagcttattcctgatgacaatgaaggaaaggtgctacgtgttaaattgatcatgaaagaaggtgtaaagaacttcaacccagtttacctcttcgacgaaggatcaagcatcacctgggtcccttgtggaagaaaactcacatgttcttatcctggcatcaaatttgcctatggcccagacacttactttgggcatgaggtatcagtgctggagatggatggccaatttgacagactagatgagcttatctatgttgagagccatttaagcaacctctcaaccaaattttatggagaggtgacacagcaaatgctaaagcatgcagacttccccggcagcaacaatggaacaggtctcttccaaactatcgtaggactgaagattagagatctctatgagcagattattgctgagagggccggtgcacctactgaagcggcaaaagtttaa

SEQ ID NO: 132947 - protein, 403 aa, Oryza sativa (japonica cultivar-group)
MAISSLHATTSLHSPCTTNTSFRQNQVIFFTTRSNRRGSTRYGGARTFQVSCSVDKPVVIGLAADSGCGKSTFMRRLTSVFGGAAEPPKGGNPDSNTLISDTTTVICLDDYHSLDRTGRKEKGVTALDPRANDFDLMYEQVKAIKEGKAIEKPIYNHVTGLLDPPELIQPPKIFVIEGLHPMFDERVRDLLDFSIYLDISDEVKFAWKIQRDMAERGHSLESIKASIEARKPDFDAFIDPQKQYADAVIEVLPTQLIPDDNEGKVLRVKLIMKEGVKNFNPVYLFDEGSSITWVPCGRKLTCSYPGIKFAYGPDTYFGHEVSVLEMDGQFDRLDELIYVESHLSNLSTKFYGEVTQQMLKHADFPGSNNGTGLFQTIVGLKIRDLYEQIIAERAGAPTEAAKV

SEQ ID NO: 132948 - DNA, 942 bp, Nostoc sp. PCC 7120
  CDS (1)..(942): transl_table=11
atgatgagccgtccaataattcttggtattgttggtgatagtgctgctggcaaaactacactaactaggggcattgctcaggtactggggccagaaaatgtcacactcatctgcacagatgattatcatcggtacgatcgccaacaacgtgcagaaataggaattaccgctctccaccccgattgtaaccatttggatattatgcagcagcatctatcgctgctacgcacaggacaaccaattcttaaaccagtttatagtcacaaaaccggaagttttgagccgccccaatatataaaacccaacaaattcgttattatcgagggattacttggttattctactcgcgccgcccgtgactgttacgatgtgaaagtttacctcgctcctccagagaacctccgtgctaaatggaaagttaaacgcgacacgcaaaaacgcggctacactcccgaacaagttttagcagaactagagaagcgcgaaccagattcagaacaatttattcgtccccaaagacaatggtctgatattgttgtcagtttctatccacctcatgaggatggagatgaaaccaacggacatctcaacgtgcgtttagtattgcgtcctactattccccacccagactttacttccattattaatttgactaatggtagttctgtgtcagctattcgcctgggattggacagagatatgagtaaaccagttgatgtgttagaagttgacggtcacgccaccttagaacaggtaaacaaattagagcatattctctgttctgatatgccttacttgagtagtgtatgcgatcgcgaaagtaacccagaactcggcaagattgctgggacaactggcgaaacactacaaagttacccccttgccctgactcagttaatcatcacctaccatatgctcaaggcaacgcaaatttatcaataa

SEQ ID NO: 132949 - protein, 313 aa, Nostoc sp. PCC 7120
MMSRPIILGIVGDSAAGKTTLTRGIAQVLGPENVTLICTDDYHRYDRQQRAEIGITALHPDCNHLDIMQQHLSLLRTGQPILKPVYSHKTGSFEPPQYIKPNKFVIIEGLLGYSTRAARDCYDVKVYLAPPENLRAKWKVKRDTQKRGYTPEQVLAELEKREPDSEQFIRPQRQWSDIVVSFYPPHEDGDETNGHLNVRLVLRPTIPHPDFTSIINLTNGSSVSAIRLGLDRDMSKPVDVLEVDGHATLEQVNKLEHILCSDMPYLSSVCDRESNPELGKIAGTTGETLQSYPLALTQLIITYHMLKATQIYQ

SEQ ID NO: 132950 - DNA, 1005 bp, Nostoc sp. PCC 7120
  CDS (1)..(1005): transl_table=11
atgacaactaagccggaacgcgtggtactgattggagtagccggagactccgggtgcggtaaatctacgtttttgcgtcgtctgatagatttatttggtgaagagtttatgacggtcatctgtttagatgactaccattctttggatcgtaaacaacgtaaagaaactggaatcaccgcacttgaccccagggccaacaattttgacctgatgtatgagcagatcaaagcgctcaaagaagggcaaacgattaataagccgatttataaccacgaaaccggcctaattgatccacctgagatagtaaagccaaatcacattgtagtggttgagggtttacaccctctatatgatgaacgggtgagatcgctcctcgatttcagcgtctactttgacatcagcgatgaagtcaaaattgcttggaaaatccagcgtgatatggcagaaagaggtcatcgctacgaagacgttctagcggccatcaattctcgtaagccagattttcaaaaatatatcgaacctcaaagagaattcgccgatgtggtgctacaagtactacccaccaacttaatcaaggatgatacagaacgtaaagtcctacgggtgcggatgttacaacgggaaggaaaagaaggttttgaacccgcttacctgtttgatgaaggttcaacaattaactggactccttgcggacgtaagcttacctgttcttacccaggaatgcagttatactacggttccgatgtttactacggtcgctatgtctcagttctagaggtggatggtcaatttgacaacctcgaagaagtaatctacatcgaaacccacctcagcaatacatctactaagtatcaaggtgagttaactcagctgttactccaacaccgtgaatatcccggttcaaataacggaactggttttttccaagtattaacaggtttgaaaatgcgtgctgcttacgagcgcttgacaacaaaggaagccaaactagcagttcaggtttaa

SEQ ID NO: 132951 - protein, 334 aa, Nostoc sp. PCC 7120
MTTKPERVVLIGVAGDSGCGKSTFLRRLIDLFGEEFMTVICLDDYHSLDRKQRKETGITALDPRANNFDLMYEQIKALKEGQTINKPIYNHETGLIDPPEIVKPNHIVVVEGLHPLYDERVRSLLDFSVYFDISDEVKIAWKIQRDMAERGHRYEDVLAAINSRKPDFQKYIEPQREFADVVLQVLPTNLIKDDTERKVLRVRMLQREGKEGFEPAYLFDEGSTINWTPCGRKLTCSYPGMQLYYGSDVYYGRYVSVLEVDGQFDNLEEVIYIETHLSNTSTKYQGELTQLLLQHREYPGSNNGTGFFQVLTGLKMRAAYERLTTKEAKLAVQV

SEQ ID NO: 132952 - DNA, 1005 bp, Thermosynechococcus elongatus BP-1
  CDS (1)..(1005): transl_table=11
atgagcagtaagccagaccgtgtggttctcatcggcgttgctggagactccggctgtggtaaatcaacgtttttgcgccgactggccgatctgtttggcgaagactttatgactgtgatttgtttggatgactatcacagtctggatcgcaagcagcggaaagaaatggggattacagcgcttgatccccgcgccaacaactttgatctgatgtacgagcagatcaaggctctcaaaaatggcgaatcaatcatgaaacccatctacaaccacgaaacggggacgattgatccgccggagaaggtggatcccaaccacgtgattgtgattgaaggcctgcatcccctctatgatgaacgggtgcgatcgctcattgatttcagtgtttatctcgacatcagtgacgatgtaaaaattgcttggaagatcaagcgcgacatggctgagcggggccatagctatgaagacgtcattgcctccatcaacgcccgtcgccctgactttatggcctatatcgatccccaaaagcagtacgctgacgtggttttgcaaattctgccaagccagttggccaaagaggaaaaagtcggcaatatcctgcgggtacggatgctgcaacgggaaggcatccccggctttgagccagtctatctctttgatgaaggctcaacgattacttggattccctgcggtcgtaagctcacctgctcctatccgggcatccgcctcagctacggacctgatgaatactatggtcaccccgtttcggtcttagaagtggacggtcgctttgaaaaactcgatgaactcatctacattgaaagccacctgagtaatacctccaccaagcactacggcgaagtgacggaactcctgctgaagcaccgtgactatccgggttccgataatggatcgggtctattccaagtgctaacggggctgaaaatgcgggctacctatgagcgcttgacctcgcgggacgcggccactgtcaccaaccgctaa

SEQ ID NO: 132953 - protein, 334 aa, Thermosynechococcus elongatus BP-1
MSSKPDRVVLIGVAGDSGCGKSTFLRRLADLFGEDFMTVICLDDYHSLDRKQRKEMGITALDPRANNFDLMYEQIKALKNGESIMKPIYNHETGTIDPPEKVDPNHVIVIEGLHPLYDERVRSLIDFSVYLDISDDVKIAWKIKRDMAERGHSYEDVIASINARRPDFMAYIDPQKQYADVVLQILPSQLAKEEKVGNILRVRMLQREGIPGFEPVYLFDEGSTITWIPCGRKLTCSYPGIRLSYGPDEYYGHPVSVLEVDGRFEKLDELIYIESHLSNTSTKHYGEVTELLLKHRDYPGSDNGSGLFQVLTGLKMRATYERLTSRDAATVTNR

SEQ ID NO: 132954 - DNA, 996 bp, Gloeobacter violaceus PCC 7421
  CDS (1)..(996): transl_table=11
atggtcagtacgttggaccgagtggtcctgatcggtgtcggtggggattcgggttgcggcaagtcgacattcctcaggcggcttaaagatctgttcagcaaggagcttgtcacggtcatctgcctcgatgactaccactcgctcgaccgcaagcagcgcaaagaaacgggtattaccgccctcgacccgcgcgccaacaattttgatctaatggccgagcaggcgaccgccctcaaggtcggccagtcgatcatgaagcccatctacaaccacgagacgggcaaaatcgacccgcccgagctgatcgagcccactccgatcgtcattctcgaagggctgcatcctttttacgacgcgcgcgtgcgcaacctatttgacttcaagatctacttcgacctatccgatccgatcaagattcagtggaagatccagcgcgacatggccgagcgcggccacacctacgaagatgtcctcaagcagatcgaatcgcgccgcccggacttttcggcctacatcgacccgcagaagcagtacgccgatgtggtgctgcagattctgcccagtgagcttcctgaaaaagcaggcggtatcaagcgcgtcaaagcctgcatggtgcaggtggacggcatccccaactacgacgcgccctacctgttcgaccgggccatttccgatgtgtgctggaagcccaattttcccaactcggatgaagagctgaccttctgctacggcacccaggattacttcggccgcccggcgtcctacctgtcgatcgacggcgagtttgctccggaggattctcccgaactggaggagaagctgcgcaacaccagcgagacgcgctacggcgaactcgcctcgctcatcctcaagcacaccgattaccccggctcccgcgacggcaccggctttttccaggtgctcatgagcctcaagttccgcgccatctacgaagcgcttaccgcccaattgctgacggcttccaaggccaagtag

SEQ ID NO: 132955 - protein, 331 aa, Gloeobacter violaceus PCC 7421
MVSTLDRVVLIGVGGDSGCGKSTFLRRLKDLFSKELVTVICLDDYHSLDRKQRKETGITALDPRANNFDLMAEQATALKVGQSIMKPIYNHETGKIDPPELIEPTPIVILEGLHPFYDARVRNLFDFKIYFDLSDPIKIQWKIQRDMAERGHTYEDVLKQIESRRPDFSAYIDPQKQYADVVLQILPSELPEKAGGIKRVKACMVQVDGIPNYDAPYLFDRAISDVCWKPNFPNSDEELTFCYGTQDYFGRPASYLSIDGEFAPEDSPELEEKLRNTSETRYGELASLILKHTDYPGSRDGTGFFQVLMSLKFRAIYEALTAQLLTASKAK

SEQ ID NO: 132956 - DNA, 930 bp, Gloeobacter violaceus PCC 7421
  CDS (1)..(930): transl_table=11
atggcacaacgtccgatcattctcggcatcgtcggcgacagcgcggcgggcaagaccaccctgacgcgaggcctcgcccagatcctcggccccgacaatgtcacgatcatctgcaccgacgattaccatcgctacgaccgcaagcagcgcgccgaactggggatcactgccctgcaccccgattgcaactacctcgacatcatccagcagcacctcgctttgctgcgcaccggccagccgatcttaaagcccatctacaaccacaaaaccggtaccttcgatccgcccgagtacatcaaaccgcgcaattttgtggtggtcgaggggctattgggtttctcgacgcgggggatgcgcgattgctacgacgtcaaagcctacctggctcccccggagtcgctgcgtacccgctggaaaatcaggcgtgacaccgccaagcgcgggtactccgaggagcaggtgctgggcgaaatggccaagcgcgaacccgactcggagcagtttatccggccccagcgcagcacagcggacctggtggtgagcttctacccgggccagaacggccccgatacccagctcaacgtgcggctggtgctcagaccgaccattccccacccggacttcgtggatgtcatcgagcgcagcggcgcccacacccgctcggcggtgcgcgtcgaactggaccgcgacatgggcaagcccgtcgatgtgctcgaagtggacggccatgccaccgacgagcaggtcaaagaactccaggatgtgctctgcgaagagatggccaacggctcgcagctgtgcaatatccccgcggacctgggcaaggtgaccggcaccaccggcgaaacgctgcagagccatccactcgccatctcgcagttgctgatcacctaccacatgctcaaagcctcgcggggcgtctacgtttag

SEQ ID NO: 132957 - protein, 309 aa, Gloeobacter violaceus PCC 7421
MAQRPIILGIVGDSAAGKTTLTRGLAQILGPDNVTIICTDDYHRYDRKQRAELGITALHPDCNYLDIIQQHLALLRTGQPILKPIYNHKTGTFDPPEYIKPRNFVVVEGLLGFSTRGMRDCYDVKAYLAPPESLRTRWKIRRDTAKRGYSEEQVLGEMAKREPDSEQFIRPQRSTADLVVSFYPGQNGPDTQLNVRLVLRPTIPHPDFVDVIERSGAHTRSAVRVELDRDMGKPVDVLEVDGHATDEQVKELQDVLCEEMANGSQLCNIPADLGKVTGTTGETLQSHPLAISQLLITYHMLKASRGVYV

SEQ ID NO: 132958 - DNA, 1005 bp, Anabaena variabilis ATCC 29413
  CDS (1)..(1005): transl_table=11
atgacaactaagccggaacgcgtggtactgattggagtagccggagactccgggtgcggtaaatctacgtttttgcgtcgtctgatagatttatttggtgaagagtttatgacagtcatctgtttagatgactaccattctttggatcgtaaacaacgtaaagaaactggaatcaccgcactcgaccccagggccaacaattttgacctgatgtatgagcaaatcaaagcgctcaaagaagggcaaacgattaataagccgatttataaccacgaaaccggcctaatcgatccacctgaaatagtaaaaccaaatcacattgtagtggttgagggtctacaccctttatatgatgaacgggtgcgatcgctcctcgatttcagcgtctattttgacatcagcgatgaagtcaaaattgcttggaaaatccagcgtgatatggcagaaagaggtcatcgctacgaagatgttctagcggctatcaattctcgtaagccagatttccaaaaatatatcgaacctcaaagagaattcgccgatgtggtgctacaagtattgcccaccaacttgatcaaggatgatacagatcgtaaagtcctgcgggtgcggatgctacaacgggaaggaaaagaaggttttgaacccgcttacttgtttgatgaaggttcaacaattaactggactccttgtggacgtaagctcacctgttcttacccaggaatgcagttatactacggttccgatgtttactacggtcgctatgtctcagttctagaggtagatggtcaatttgacaacctcgaagaagtaatctacatcgaaacccacctcagcaatacatctactaagtatcaaggtgagttgactcagctgttgctccaacaccgtgaatatcccggttctaacaacggaactggttttttccaagtattaacaggtttgaaaatgcgtgctgcttacgagcgcttgacagcaaaggaagccaaactagcagttcaggtttaa

SEQ ID NO: 132959 - protein, 334 aa, Anabaena variabilis ATCC 29413
MTTKPERVVLIGVAGDSGCGKSTFLRRLIDLFGEEFMTVICLDDYHSLDRKQRKETGITALDPRANNFDLMYEQIKALKEGQTINKPIYNHETGLIDPPEIVKPNHIVVVEGLHPLYDERVRSLLDFSVYFDISDEVKIAWKIQRDMAERGHRYEDVLAAINSRKPDFQKYIEPQREFADVVLQVLPTNLIKDDTDRKVLRVRMLQREGKEGFEPAYLFDEGSTINWTPCGRKLTCSYPGMQLYYGSDVYYGRYVSVLEVDGQFDNLEEVIYIETHLSNTSTKYQGELTQLLLQHREYPGSNNGTGFFQVLTGLKMRAAYERLTAKEAKLAVQV

SEQ ID NO: 132960 - DNA, 1002 bp, Synechococcus elongatus PCC 7942
  CDS (1)..(1002): transl_table=11
atgagcaagccagatcgtgttgttttgatcggcgttgccggtgactccggttgcggcaaatcaaccttcctaaatcgccttgccgacttgtttggtacggaattgatgacggtcatctgcttggatgactatcacagtctcgatcgcaagggccggaaggaagcaggcgtaacggctttggatccccgcgccaacaactttgacttgatgtatgaacaggtcaaggcgttgaagaacggcgaaacgatcatgaagccgatctacaaccatgaaaccggcttgatcgatccgcccgaaaaaatcgaacccaatcgcatcattgtgatcgagggtctgcatccgctttacgacgagcgcgtgcgtgaactgctcgatttcagcgtttacctcgacatcgatgacgaagtcaaaatcgcttggaagatccaacgcgatatggcagaacgcggccactcctacgaagatgtcctcgcctcgatcgaagcgcgccgccctgacttcaaggcctacattgagccccagcgtggccatgcggacatcgtcatccgcgtcatgccgacccagctaatccccaatgacaccgagcgcaaggtgctgcgggtgcagttgatccaacgggaaggccgcgatggttttgagccggcttacctgttcgacgaaggttcgaccatccagtggacgccctgcggtcgtaagctgacctgctcctatccgggcattcgcttagcctacggccctgacacctactacggtcacgaagtctcagtgcttgaggtcgacggtcagttcgagaacctcgaagagatgatctacgtcgagggccacctcagcaagaccgacacgcagtactacggtgagttgacccacctgctgctgcagcacaaagattacccgggttcgaacaacggcacgggtctgttccaagtgctgaccggcctgaaaatgcgggcggcctatgagcgtttgacctcccaagcagcacccgtcgccgctagcgtctag

SEQ ID NO: 132961 - protein, 333 aa, Synechococcus elongatus PCC 7942
MSKPDRVVLIGVAGDSGCGKSTFLNRLADLFGTELMTVICLDDYHSLDRKGRKEAGVTALDPRANNFDLMYEQVKALKNGETIMKPIYNHETGLIDPPEKIEPNRIIVIEGLHPLYDERVRELLDFSVYLDIDDEVKIAWKIQRDMAERGHSYEDVLASIEARRPDFKAYIEPQRGHADIVIRVMPTQLIPNDTERKVLRVQLIQREGRDGFEPAYLFDEGSTIQWTPCGRKLTCSYPGIRLAYGPDTYYGHEVSVLEVDGQFENLEEMIYVEGHLSKTDTQYYGELTHLLLQHKDYPGSNNGTGLFQVLTGLKMRAAYERLTSQAAPVAASV

SEQ ID NO: 132962 - DNA, 936 bp, Trichodesmium erythraeum IMS101
  CDS (1)..(936): transl_table=11
atgactcatagtccaataatattaggtgttgtaggtgatagcgctgcgggtaaaactaccttaactagaggagtggctcaagtcttagggccagaaaacgttacagttatctgtacagacgactaccatcgctatgatcgaaaacaacgagctgaaataggcattactgccctccacccagactgtaaccatcttgatataattcagcaacatctaagcttgctgagtaccggacaaccaattctcaaacctatttataatcactcaaccggaaaatttgaccctccagaatatattaaacctaaaaaattcgttattgttgagggactattgggttattcgactaggggggcaagagactgttaccacgtgaaagtctacttagcccctccagaaaaacttagggcaaaatggaaagtaaaacgggatacgatgaaaaggggctacactgaggcagaagtcctgaaacaaatggaaaagcgggaagcagactcagacgcatttatccgtcctcaacgcaagtgggcagatgtagttgttagcttctatccctattctagtgatataaatagttctcaacttaatgtccgtttgttgcttagaccaactattccccacccagattttttagaaattctcgatcaaggtagtcctagttttcaacctgcagtccgtttgggtttagaccgagatatgggtaaaccagtagatgtattggaaattgacagtaatgctactaaggcacaggtaaatgagttagagataattctctgcaaggaaatgccccacttaaaagatttctgctccctggaaacacatccagatataggtaagctagttggtacaactggggagttgcttcagagttatcctctagctttgactcaattacttatttcttatcacatgatcaaggcaactaatatttatctgtag

SEQ ID NO: 132963 - protein, 311 aa, Trichodesmium erythraeum IMS101
MTHSPIILGVVGDSAAGKTTLTRGVAQVLGPENVTVICTDDYHRYDRKQRAEIGITALHPDCNHLDIIQQHLSLLSTGQPILKPIYNHSTGKFDPPEYIKPKKFVIVEGLLGYSTRGARDCYHVKVYLAPPEKLRAKWKVKRDTMKRGYTEAEVLKQMEKREADSDAFIRPQRKWADVVVSFYPYSSDINSSQLNVRLLLRPTIPHPDFLEILDQGSPSFQPAVRLGLDRDMGKPVDVLEIDSNATKAQVNELEIILCKEMPHLKDFCSLETHPDIGKLVGTTGELLQSYPLALTQLLISYHMIKATNIYL

SEQ ID NO: 132964 - DNA, 1011 bp, Trichodesmium erythraeum IMS101
  CDS (1)..(1011): transl_table=11
gtgaaaaaaccagataaagtagtcttaattggagttgccggagattctggatgcggaaaatctacttttttgcgccgaattacagatgtatttggaccagaattcgttacagttatctgcctggacgattatcatagtctagaccgtaagcaacgtaaggaaacaggaattactgccctggatccaagagctaataattttgacctcatgtacgagcaaattaaagctcttaaaaatcttgagtccatcgataagccaatttataaccacgaaactggcatgattgacccaccagaaaaaattcatcctaatcatattatagtaattgagggccttcatcctctctatgatgagcgtgtacgagagctcattgattttagtgtctatctagatattggtgatgaagttaaaattgcttggaaaatcaagcgcgatctagcagaaagaggccaccgttacgaagatgttctagcttctattaatgcccgtcgtcccgactttgaatcctatattgatccacaaaaagttcatgcagatgtggtcattcaagttttgcccactaagctgattcctaatgaccaggaacataaggttctacgggtacgcttgattcaacgtgaaggagtcaaaaatttcgatccagtttatctgtttgatgaaggatctactattaactggattccttgtggacgaaaacttacttgctcttatcctggaattaagatgttctatgggccagactcctatgatggcaatgaagtttctatattagaagtagatggtaactttgataacctcgaagagatgatctacgttgaaggacatctcagcaatacttctactaaatactatggtgaaatgactcatgcaatgatgaaacatcaagactatccaggttctaataatggtagtgggctattccaagttttagttggtctgaaaatgcgtgcaacttatgaaagcttgactgctacaactttagatgaaaaggtagtagcagcagtttcctaa

SEQ ID NO: 132965 - protein, 336 aa, Trichodesmium erythraeum IMS101
MKKPDKVVLIGVAGDSGCGKSTFLRRITDVFGPEFVTVICLDDYHSLDRKQRKETGITALDPRANNFDLMYEQIKALKNLESIDKPIYNHETGMIDPPEKIHPNHIIVIEGLHPLYDERVRELIDFSVYLDIGDEVKIAWKIKRDLAERGHRYEDVLASINARRPDFESYIDPQKVHADVVIQVLPTKLIPNDQEHKVLRVRLIQREGVKNFDPVYLFDEGSTINWIPCGRKLTCSYPGIKMFYGPDSYDGNEVSILEVDGNFDNLEEMIYVEGHLSNTSTKYYGEMTHAMMKHQDYPGSNNGSGLFQVLVGLKMRATYESLTATTLDEKVVAAVS

SEQ ID NO: 132966 - DNA, 1005 bp, Nostoc punctiforme PCC 73102
  CDS (1)..(1005): transl_table=11
atgacaagtaagccggaacgtgtggtactgattggagtagccggagactctgggtgcgggaaatctacgtttttgcgtcgtttgatagatttgtttggtgaagatttgatgacagtcatctgcttagatgattatcactccttggatcgcaaacagcgtaaagaaactgggataacggcactagaccccagagcgaacaattttgacctgatgtatgagcaaattaaaacgctcaaaagtggtcaagcgattgataagccgatttacaaccacgaaactggcttgattgacccgccagagcgagtagagccgaatcacattatagttgttgaaggactgcatcctttatatgatgagcgggtgcgatcgctaatcgacttcagtgtttattttgatattagcgatgaagtcaaaatcgcctggaaaatccagcgagatatggctgaacgcggtcatcgctacgaagatgtcttagcgcaaatcaattcccgcaaacctgactttgaaaagtttatcgaaccacaaagagaatttgccgatgtggttctccaagtattacccactaacttgatcaaaaacgacacagagcgccgagtcctacgagtacgtatgctccaacgggaaggtaaggaaggctttgatccaacctacctatttgatgaaggctcaacaattaattggactccctgtggacgtaagctgacctgttcttatcctggtatgcaactatactacggttcagatgtttactacggtcgctatgtctcagtactagaggtagatggtcaatttgacaacttggaagaagtaatttatatcgaaacccatctcagcaatacatccaccaaatatcagggtgaattgactcatttgttactccagcaccgtgagtatccaggttccaataatggtactggtttcttccaagtacttacaggtttaaaaatgcgtgctgcctatgagcgtttaacagctacggaagcaaagttagcggttcaggtttaa

SEQ ID NO: 132967 - protein, 334 aa, Nostoc punctiforme PCC 73102
MTSKPERVVLIGVAGDSGCGKSTFLRRLIDLFGEDLMTVICLDDYHSLDRKQRKETGITALDPRANNFDLMYEQIKTLKSGQAIDKPIYNHETGLIDPPERVEPNHIIVVEGLHPLYDERVRSLIDFSVYFDISDEVKIAWKIQRDMAERGHRYEDVLAQINSRKPDFEKFIEPQREFADVVLQVLPTNLIKNDTERRVLRVRMLQREGKEGFDPTYLFDEGSTINWTPCGRKLTCSYPGMQLYYGSDVYYGRYVSVLEVDGQFDNLEEVIYIETHLSNTSTKYQGELTHLLLQHREYPGSNNGTGFFQVLTGLKMRAAYERLTATEAKLAVQV

SEQ ID NO: 132968 - DNA, 1488 bp, Oryza sativa
  CDS (1)..(1488)
atggcggccaggtcgttcagctcggcgagcacgacgaccatcctgctgagaagcgggaggtggaggaggacaatgagggcggcggcgttcccgttccgcgtgtcgtgctccgcggcggcggcggcggcggcgggcgggacggtggtgatcgggctggctgccgactccgggtgcgggaagaccacgttcgtgcgtcgcctgacgagcgtgctcggcgccggcaccgcggcggcggcggcgcctccgtggggcggcaacccgggctccaacacgctcctcggcgacgccgccacggtgatctgcctcgacgactaccactcgctggaccgcgcggggcggaaggagaggggcgtgacggcgctggacccgcgcgccaacgacttcgacctcatgtaccggcagctgaaggccatcaaggagggccgcgccgtcgcgaagcccatctacaaccacgccacgggcctcctcgacccgccagagctcatcactccccccaagatcctcgtcgtcgagggcctgcacccaatgtatgatgagcgtgtcaggggcctgctggacttcagcatctacctggacatcagcagcgacatcaagtttgcatggaaaattcagagagacatggcagagcgtgggcacagcctggagagcatcaaggccagcattgaagcccggaagcccgacttcgatgcgtatattgacccgcagaagcagtacgccgatgccgtgatcgaggtcctgccgacgcggctgatcgccgccgcggacgacgacggcgacgaaggcaaggtgctgcgcgtgaagctgatcatgaaggaaggcgtcgagcacttcgcgccggcctacctcttcgacgaaggatcgaccatcagctggatcccctgcggcaggaagctctcctgctcctaccctggcatcaaattctcgtacttcccggacacctacttcggccacgaggtttcggtgctggagatggacgggaagttcgacaagctggacgagctgatctacgtggagagtcacctcagcaacctgtcgaccaagtactacggagaggtgacgcagcagatgctgaagcacgccgacttccccgggagcaacaacggcacggggctcttccagaccatcgtcgggctcaagatcagggacctctacgagcagccggaggacgagctgctgagcttgctgcagagcctggcagacatggacatcacgtacaaggcgctccaggagacagacatcggacggcatgtgaacggtctgcgcaaacatccctccggtgaagtccggctactcgccatctcatcctcgtcttcctcatcggcctcgccatggaccggctcctcagcggccgcgacggcggcatcgtggcgcgagtccggatctggctccgcgatggggagcaccacggtggtcgccgttgccggctcgacgggcatctcggccaccagctgcttctcgttgccatggaatccctccccacggtggtag

SEQ ID NO: 132969 - protein, 495 aa, Oryza sativa
MAARSFSSASTTTILLRSGRWRRTMRAAAFPFRVSCSAAAAAAAGGTVVIGLAADSGCGKTTFVRRLTSVLGAGTAAAAAPPWGGNPGSNTLLGDAATVICLDDYHSLDRAGRKERGVTALDPRANDFDLMYRQLKAIKEGRAVAKPIYNHATGLLDPPELITPPKILVVEGLHPMYDERVRGLLDFSIYLDISSDIKFAWKIQRDMAERGHSLESIKASIEARKPDFDAYIDPQKQYADAVIEVLPTRLIAAADDDGDEGKVLRVKLIMKEGVEHFAPAYLFDEGSTISWIPCGRKLSCSYPGIKFSYFPDTYFGHEVSVLEMDGKFDKLDELIYVESHLSNLSTKYYGEVTQQMLKHADFPGSNNGTGLFQTIVGLKIRDLYEQPEDELLSLLQSLADMDITYKALQETDIGRHVNGLRKHPSGEVRLLAISSSSSSSASPWTGSSAAATAASWRESGSGSAMGSTTVVAVAGSTGISATSCFSLPWNPSPRW

SEQ ID NO: 132970 - DNA, 1188 bp, Arabidopsis thaliana
  CDS (1)..(1188)
atggctgtctcaactatctactcaacacaagctctcaattcaactcatttcttaacctcttcttcctcctccaaacaagtcttcctctaccgtcgtcaaccacaaaccaaccgtagattcaacacactcatcacttgcgcacaagaaaccatcgtgatcggactagctgctgactctggctgcggcaaaagtacctttatgcggaggctcaccagcgtctttggtggcgctgctaagccaccaaaaggcgggaaccctgattccaacacactcatcagcgacacgaccactgtgatctgtcttgatgattaccattctttggataggtacggtaggaaagagcagaaagtcaccgctttggacccacgcgccaatgactttgatctcatgtatgagcaagtcaaagctcttaagaatggtatagccgtcgagaaaccgatttataaccatgtcactggacttcttgaccctccggagcttattcagcctcctaagattcttgtcatcgaaggtcttcacccaatgtttgatgagcgagtaagagacttactagacttcagtatctacttggacattagcaacgaagtcaaattcgcttggaaaattcagagggacatggctgaaagaggtcacagtttggagagcatcaaagcgagtatcgaagcccgaaagcccgacttcgatgcattcatcgacccgcaaaagcagtacgcggatgcggtcatagaagtgcttcctacgactctgatcccagatgacaacgaagggaaagtgttgagagtgagattgataatgaaggaaggtgttaagtacttcagcccggtttacctgttcgatgaaggttcaaccatctcgtggattccttgcggccgcaaactcacttgctcgtaccctggcatcaagttcaactacgaacctgactcctacttcgaccatgaggtatcagttttggagatggatggacaatttgatagactggacgagctgatttacgtggaaagtcacttgagcaacctctcgaccaaattctacggagaagtcactcaacaaatgctcaaacatgctgatttcccgggtagcaacaacggtactggtcttttccaaaccattgttggattgaagatcagagatctctatgagcagctcattgccaacaaagccactgctcgtgcagaagctaaagcctaa

SEQ ID NO: 132971 - protein, 395 aa, Arabidopsis thaliana
MAVSTIYSTQALNSTHFLTSSSSSKQVFLYRRQPQTNRRFNTLITCAQETIVIGLAADSGCGKSTFMRRLTSVFGGAAKPPKGGNPDSNTLISDTTTVICLDDYHSLDRYGRKEQKVTALDPRANDFDLMYEQVKALKNGIAVEKPIYNHVTGLLDPPELIQPPKILVIEGLHPMFDERVRDLLDFSIYLDISNEVKFAWKIQRDMAERGHSLESIKASIEARKPDFDAFIDPQKQYADAVIEVLPTTLIPDDNEGKVLRVRLIMKEGVKYFSPVYLFDEGSTISWIPCGRKLTCSYPGIKFNYEPDSYFDHEVSVLEMDGQFDRLDELIYVESHLSNLSTKFYGEVTQQMLKHADFPGSNNGTGLFQTIVGLKIRDLYEQLIANKATARAEAKA

SEQ ID NO: 132972 - DNA, 1245 bp, Chlamydomonas reinhardtii
  CDS (28)..(1155)
gaattccgcgtcgagctgttagcaaccatggctttcactatgcgcgcccccgccccccgggctacggcccagagccgcgtgactgccaaccgggctcgtcgcagcctggttgtgcgcgctgataaggacaagacagtggtgatcggtctggccgctgactccggctgcggcaagtccaccttcatgcgccgcatgacctccatcttcggcggtgtccccaagcccccggctggcggcaaccccgactccaacaccctgatctcggacatgaccaccgtgatctgcctggacgactaccactgcctggaccgcaacggccgcaaggtcaagggcgttaccgccctggcccccgaggcccagaacttcgacctgatgtacaaccaggtcaaggccctgaaggagggcaagtcggtggacaagcccatctacaaccacgtgtccggcctgatcgacgcgcccgagaagatcgagtcgcccccgatcctggtcattgagggcctgcaccccttctatgacaagcgcgtggctgagctgctggacttcaagatctacctggacatctccgacgacatcaagttcgcctggaagattcagcgcgacatggccgagcgcggccactcgctggagtcgatcaagagctcgatcgcggcgcgcaagcccgacttcgatgcctacattgacccccagaagaaggacgctgacatgatcatccaggtgctgcccacccagctggtgcctgacgacaagggccagtacctgcgcgtgcgcctgatcatgaaggagggctccaagatgttcgaccccgtctacctgttcgacgagggctcgaccatcagctggatcccctgcggccgcaagctgacctgctcgttccccggcatcaagatgttctacggccccgacacctggtacggccaggaggtgtctgtcctggagatggacggccagttcgacaagctggaggagctcatctacgtggagagccacctgtccaacaccagcgccaagttctacggcgagatcacccagcagatgctcaagaacagcggcttccccggctccaacaacggcactggcctgttccagaccattgtgggcctgaaggtgcgcgaggtgtacgagcgcatcgtcaagaaggacgttgtgcccgtgtaaatgggtcccttaaaccggcgtatatagcggcggcgggcgcagcgggaatgctggcggcagcgagcagaccccgccccttggaacgccacg

SEQ ID NO: 132973 - protein, 375 aa, Chlamydomonas reinhardtii
MAFTMRAPAPRATAQSRVTANRARRSLVVRADKDKTVVIGLAADSGCGKSTFMRRMTSIFGGVPKPPAGGNPDSNTLISDMTTVICLDDYHCLDRNGRKVKGVTALAPEAQNFDLMYNQVKALKEGKSVDKPIYNHVSGLIDAPEKIESPPILVIEGLHPFYDKRVAELLDFKIYLDISDDIKFAWKIQRDMAERGHSLESIKSSIAARKPDFDAYIDPQKKDADMIIQVLPTQLVPDDKGQYLRVRLIMKEGSKMFDPVYLFDEGSTISWIPCGRKLTCSFPGIKMFYGPDTWYGQEVSVLEMDGQFDKLEELIYVESHLSNTSAKFYGEITQQMLKNSGFPGSNNGTGLFQTIVGLKVREVYERIVKKDVVPV

SEQ ID NO: 132974 - DNA, 1520 bp, Mesembryanthemum crystallinum
  CDS (127)..(1320)
cccaaatacccacctcccattcctctctcattcctccccattctctctcctcccctgttttaaaacagagagaggtagagtaaacagaggagctaaaacaggggaaaacagagcatacagaaaacaatggcagtatcagcatacacagttcccaccacatcccacttgggattcaaccaaaaaaagcaactattcttctgcaacaagagtgcatacaagagggtgagtttcagcagcagaccatgtgtgataacatgcttagcaggtgactcacagacaattgtgattggtctagcagcagactcagggtgtggtaagagtaccttcatgaggaggttaacaagtgtatttggaggtgcagcagagccaccaaggggaggaaaccctgattcaaataccttaattagtgacacaaccactgtgatttgtttggatgattaccattcccttgataggacagggaggaaagagaaaggagttactgctttggatccaagagccaatgattttgacctcatgtatgagcaagttaaggctttgaaagaaggtaaggctgttgagaagcctatttacaaccatgttactggcttgttggatgcacctgagctcatcaagccacctaagatcttggtcattgaaggtttgcaccctatgtttgactcacgtgtgagggacttgctggacttcagtatctatttggacatcagcaatgaagtgaaatttgcctggaaaattcagagagacatggctgagagaggacacagtcttgagagcatcaaagccagtattgaagccagaaagcctgactttgatgcttacattgatccacagaagcagtatgcagatgcagtgattgaggtgttgccaacccagctcatccctggtgacaatgaaggcaaagtgttgagagtgaggttgattcagaaggaaggggtgcaatatttcagcccagtttacttgtttgatgaaggatcttctattacctggatcccttgtggcagaaaattgacatgttcttaccctggtatcaaatttttctacggccccgacacttacttcggcaatgaggtgactgtgctagagatggatgggcaatttgacagattagatgaattgatctacgttgaaagccatttgagcaacctatcaaccaagttctatggtgaagtcacccaacaaatgttgaagcaccaagacttccctggaagcaacaacggaaccggtctcttccaaaccattgttgggttgaagatcagagacctgttcgagcagcttatcgccagcaagacagcagctcctgcagcagctactaaggcctgaagctccatttgataaataaaaagcatctgaatctcattttttctccactactttcctcatttgtaacttctattaccatttctcctctataagtcggttatgtacttatgttaggctactctgaaattctataattatatagatatgcacaaaagcagagataaaaaatgcagttcaaaaaaaaaaaaaaaaaaaaaaaa

SEQ ID NO: 132975 - protein, 397 aa, Mesembryanthemum crystallinum
MAVSAYTVPTTSHLGFNQKKQLFFCNKSAYKRVSFSSRPCVITCLAGDSQTIVIGLAADSGCGKSTFMRRLTSVFGGAAEPPRGGNPDSNTLISDTTTVICLDDYHSLDRTGRKEKGVTALDPRANDFDLMYEQVKALKEGKAVEKPIYNHVTGLLDAPELIKPPKILVIEGLHPMFDSRVRDLLDFSIYLDISNEVKFAWKIQRDMAERGHSLESIKASIEARKPDFDAYIDPQKQYADAVIEVLPTQLIPGDNEGKVLRVRLIQKEGVQYFSPVYLFDEGSSITWIPCGRKLTCSYPGIKFFYGPDTYFGNEVTVLEMDGQFDRLDELIYVESHLSNLSTKFYGEVTQQMLKHQDFPGSNNGTGLFQTIVGLKIRDLFEQLIASKTAAPAAATKA

SEQ ID NO: 132976 - DNA, 1470 bp, Spinacia oleracea
  CDS (49)..(1257)
tttttttttttttaagagagagaaaatagtaaaaaaaaaacagaaaaaatggcagtgtgtacagtatacacaatcccaacaacaacccatttaggatcatcattcaaccaaaacaacaaacaagtttttttcaactacaaaagatcatcatcatcaaacaacactttatttacaacaagaccatcctatgtaataacatgttcacaacaacaaacaattgtgattggtttagcagcagattcaggttgtggtaagagtacattcatgaggaggttaacaagtgttttcggtggcgcggccgagccaccaaagggtggtaacccagattcaaacacattgattagtgacactactactgttatctgtttggatgattttcattcccttgatagaaatggcaggaaagtggaaaaagttactgctttagacccaaaagctaatgattttgatcttatgtatgaacaagttaaggctttgaaagaaggtaaagctgttgataaacctatttataatcatgtttctggtttgttggaccctcctgagcttattcaacctcctaagatcttggtcattgaagggttacaccccatgtatgacgcacgtgtgagggaattgctagacttcagcatctacttggacattagcaatgaagttaaatttgcctggaaaattcagagagacatgaaagaaagaggacacagtcttgaaagcatcaaagccagtattgaatccagaaagccagattttgatgcttacattgacccacaaaagcagcatgctgatgtagtgattgaagtattgccaactgaactcattcctgatgatgatgaaggcaaagtgttgagagtaaggatgattcagaaagaaggagtcaagtttttcaacccagtttacttgtttgatgaaggatctaccatttcatggattccatgtggtagaaaattaacatgttcttaccctggtatcaaattttcctatggcccagacaccttctatggcaacgaggtgacagtagtagagatggatgggatgtttgacagattagacgaactaatctacgtcgaaagccatttgagcaatctatcaaccaagttttatggtgaagtcactcaacaaatgttgaagcaccaaaatttcccaggaagcaacaatggaactggtttcttccaaaccataattggattgaagatcagagacttgttcgagcagctcgttgctagcaggtctacagcaactgcaacagctgctaaagcctagaaaaagctcgaattttacaacatatgataagatatggaatatgtcaatctaaattaaatctacttcatttgtaatttccactacctatattattattcttcttgtataagtttgtttttgtaggctactctgatattttctgctgttaatagacatgcaagagatggaaaatgcagttcaaaagatattcatagcatcaaaaaaaaaaaaaaa

SEQ ID NO: 132977 - protein, 402 aa, Spinacia oleracea
MAVCTVYTIPTTTHLGSSFNQNNKQVFFNYKRSSSSNNTLFTTRPSYVITCSQQQTIVIGLAADSGCGKSTFMRRLTSVFGGAAEPPKGGNPDSNTLISDTTTVICLDDFHSLDRNGRKVEKVTALDPKANDFDLMYEQVKALKEGKAVDKPIYNHVSGLLDPPELIQPPKILVIEGLHPMYDARVRELLDFSIYLDISNEVKFAWKIQRDMKERGHSLESIKASIESRKPDFDAYIDPQKQHADVVIEVLPTELIPDDDEGKVLRVRMIQKEGVKFFNPVYLFDEGSTISWIPCGRKLTCSYPGIKFSYGPDTFYGNEVTVVEMDGMFDRLDELIYVESHLSNLSTKFYGEVTQQMLKHQNFPGSNNGTGFFQTIIGLKIRDLFEQLVASRSTATATAAKA

SEQ ID NO: 132978 - DNA, 999 bp, Synechocystis sp
  CDS (1)..(999): transl_table=11
atgaccacacagctagaccgcgtggttcttattggtgttgccggggattccggttgcggtaagtctactttcttacgtcgtttaacggatttattcggcgaagagttcatgacggtaatttgtttggacgattaccatagtttggatcgccagggtagaaaagccgctggggtcaccgccctggatcccagagccaacaattttgacctcatgtatgagcagattaaaacgctcaaaagtggtcaatccattatgaaacccatttacaaccacgaaacggggctgctggatccaccggaaaaagttgaacccaacaaagtggtggttattgagggtttgcatcccctctacgatgaacgggtgcgggaactggtggatttcggggtctacctggacatcagcgaagaagtgaaaattaactggaaaattcaacgggacatggccgaacggggccacacctatgaagatattttggcttccatcaacgcccgtaagcctgacttcactgcctatatcgagccccaaaagcaatatgcggacgtggtgatccaggtgttgcccacccgcttgattgaggacaaggaaagtaaactcctgcgggttcgtcttgtgcaaaaagaaggggttaaattcttcgagccagcctacctgtttgacgaaggttccaccattgattggcgtccctgtggtcggaagctgacctgtacctatcctggcatcaagatgtactacggccccgataattttatgggcaacgaagtatctttgctggaagtggacggcaggtttgaaaacctagaggaaatggtttatgtggaaaaccacctcagcaagactggtactaagtactacggtgaaatgaccgagttgttgctcaagcataaggattacccaggcactgacaatggtactggcctgttccaggtgttagtgggtctgaaaatgcggaaagtttacgaacagttaacggcggaagctaaggtcccggcctctgtgtaa

SEQ ID NO: 132979 - protein, 332 aa, Synechocystis sp
MTTQLDRVVLIGVAGDSGCGKSTFLRRLTDLFGEEFMTVICLDDYHSLDRQGRKAAGVTALDPRANNFDLMYEQIKTLKSGQSIMKPIYNHETGLLDPPEKVEPNKVVVIEGLHPLYDERVRELVDFGVYLDISEEVKINWKIQRDMAERGHTYEDILASINARKPDFTAYIEPQKQYADVVIQVLPTRLIEDKESKLLRVRLVQKEGVKFFEPAYLFDEGSTIDWRPCGRKLTCTYPGIKMYYGPDNFMGNEVSLLEVDGRFENLEEMVYVENHLSKTGTKYYGEMTELLLKHKDYPGTDNGTGLFQVLVGLKMRKVYEQLTAEAKVPASV

SEQ ID NO: 132980 - DNA, 1533 bp, Triticum aestivum
  CDS (65)..(1279)
ggcaagtctcagttacaagacttgaaggggagaagagcagctcccaagaggttgggcagcaaacatggcattctgcagcccacacaccaccacatccctgcgctccccatgcaccaccatcccaaactcaggcttcaggcagaaccaagtcatcttcttcacgaccagaagcagcaggaggagtaacacgaggcatggggcaaggaccttccaggtctcatgcgcagttgagcagccaatagtgattggcctggcagcagactcgggatgtgggaaatccaccttcatgcgccggctcaccagcgtgtttggaggtgccgcagagccacccaagggcggcaacccagactccaacacgctcatcagcgacacgacgacggtcatatgccttgatgactaccattccttggacagaaccgggaggaaggagaaaggtgtgaccgccctggaccccaaggcaaacgactttgatctcatgtatgagcaggtgaaggcaatcaaggaaggcaaggctattgagaagccaatctacaaccacgtcactggcctcctcgacccggcggagctcatccagccccccaagatcttcgtcatcgagggtttgcacccaatgtacgatgaacgtgtgagagagctccttgatttcagcatctacttagacatcagcaatgaggttaagttcgcatggaaaattcagagagacatggcagagcgtgggcacagtcttgaaagcatcaaggctagcatcgaagccaggaaacctgattttgatgcctttattgatccgcagaagcaatacgctgatgctgtgattgaagttctgccaacccagctgattcctgatgacaacgaaggaaaggtgctgcgagttaaattgatcatgaaagaaggcattaagttcttcaacccggtttacctcttcgatgaaggatcaaccatcaactggatcccttgtggaagaaagcttacatgctcttatcctggcatcaaattttcctatggcccagacacttactttggccaagaggtatcggtgctggagatggatgggcaatttgacagactagatgaactcatctatgttgagagccacctaagcaacctctcaaccaagttctacggggaggtgacacagcaaatgctaaagcatgcagacttcccaggcagcaacaatggaacaggtctcttccagaccattgtaggactgaagattagagatctctatgaacagatcatcgctgagagggccggcgttcctgctgaagcagcaaaagtttgatgagccccaaattcaagttcacgaatcatttcatcaccaactcaatgagaatgagcatcctcgcatttcttgtacctagtttgaatatattacagctagaagacggtagaaagttcactgcagaactcatgaaaacctgcattttgaacttctcgaaaatcctctccatgatgagggtctcttatgtctcttcttaacaaatttcgatgtacatcttctcccatgtttcaatgcagaaaatacatgtgcttgca

SEQ ID NO: 132981 - protein, 404 aa, Triticum aestivum
MAFCSPHTTTSLRSPCTTIPNSGFRQNQVIFFTTRSSRRSNTRHGARTFQVSCAVEQPIVIGLAADSGCGKSTFMRRLTSVFGGAAEPPKGGNPDSNTLISDTTTVICLDDYHSLDRTGRKEKGVTALDPKANDFDLMYEQVKAIKEGKAIEKPIYNHVTGLLDPAELIQPPKIFVIEGLHPMYDERVRELLDFSIYLDISNEVKFAWKIQRDMAERGHSLESIKASIEARKPDFDAFIDPQKQYADAVIEVLPTQLIPDDNEGKVLRVKLIMKEGIKFFNPVYLFDEGSTINWIPCGRKLTCSYPGIKFSYGPDTYFGQEVSVLEMDGQFDRLDELIYVESHLSNLSTKFYGEVTQQMLKHADFPGSNNGTGLFQTIVGLKIRDLYEQIIAERAGVPAEAAKV

SEQ ID NO: 132982 - DNA, 1185 bp, Brassica napus
  CDS (1)..(1185)
atggctgtctcaacaatctactcaacacaagctctcaattcaactcatttctttacctcctcctcctcaaaacaagtcttcttctaccgtcgccaaaccaaccgtagattcaataccatcatcacttgcgccgcacaacaaaccgtggtgatcggactcgctgccgactccggatgcggcaaaagtaccttcatgcggaggctgaccagtgtcttcggtggagccgccgagccaccaaagggagggaaccctgactccaacacactcatcagtgacatgaccactgtgatctgcctcgacgattaccattccttagacagaaccggtcgcaaagagaaaggagtcactgctttggacccacgcgccaatgactttgatctcatgtatgagcaagtcaaagctctcaagagtggtatcgccgtcgagaaacccatttataatcacgtcactggacttcttgacgcacctgagcttattcagcctcccaagattctcgtcatcgaaggtcttcacccaatgtttgatgagagggtaagagacttattggacttcagtatctacctagacattagtaatgaggtcaagttcgcttggaaaattcagagggacatggctgaaagaggtcacagcttagagagcatcaaagcaagtatcgaagcacgaaagcccgacttcgatgcattcattgacccacaaaagcagtatgcggatgcggtgatagaagtgcttccaacgcagctgattccagatgacaatgaaggcaaagtgttgagagtgaggttgataatgaaggaaggtgttaagtacttcagcccggtttaccttttcgatgaaggctcaaccatctcgtggatcccttgtggtcgcaaactcacctgctcgtaccctggcatcaagttcaactacgaacctgatacctacttcgaccatgaggtttcggttttggagatggatgggcagttcgatagacttgacgagctgatttacgtggagagccatctgagcaacctctcgaccaaattctacggtgaagtgactcaacaaatgctcaaacatgctgacttccctggtagcaacaacggaactggtcttttccagaccattgttggattgaaaatcagagatctctatgagcagctcattgccaacaaagccaatgctcctacagaagctgctaaagcctaa

SEQ ID NO: 132983 - protein, 394 aa, Brassica napus
MAVSTIYSTQALNSTHFFTSSSSKQVFFYRRQTNRRFNTIITCAAQQTVVIGLAADSGCGKSTFMRRLTSVFGGAAEPPKGGNPDSNTLISDMTTVICLDDYHSLDRTGRKEKGVTALDPRANDFDLMYEQVKALKSGIAVEKPIYNHVTGLLDAPELIQPPKILVIEGLHPMFDERVRDLLDFSIYLDISNEVKFAWKIQRDMAERGHSLESIKASIEARKPDFDAFIDPQKQYADAVIEVLPTQLIPDDNEGKVLRVRLIMKEGVKYFSPVYLFDEGSTISWIPCGRKLTCSYPGIKFNYEPDTYFDHEVSVLEMDGQFDRLDELIYVESHLSNLSTKFYGEVTQQMLKHADFPGSNNGTGLFQTIVGLKIRDLYEQLIANKANAPTEAAKA

SEQ ID NO: 132984 - DNA, 1224 bp, Glycine max
  CDS (1)..(1224)
atggcagcttgcactgtctactcaacacaatctctgagcacaaattgctccatctcaaccccatcaaagacgcaactcagttttttccaccaaaagcaggtagttttctggaggaacagcaagaagggcagctgcagcagcagaagaagctatgtgataacatgtgcagcaggtgactcacagacagtggtgattggcctggctgcagactcagggtgtgggaagagcaccttcatgaggaggctgaccagtgtgtttggaggagcagcagagccaccaaagggtggcaaccctgactccaacactctcatcagtgacaccaccactgtcatatgcttggatgattaccactctttggacagaactggaagaaaggagaagggtgtcactgcccttgaccctagagccaatgattttgatctcatgtatgaacaagttaaagctcttaaggatggaattgctgttgaaaaaccaatctacaaccatgtcactggtctcttggatccccctgagctcattaaaccccccaaaatcttagtcattgaaggtttgcacccaatgtttgattcccgtgtcagagatctcttggactttagcatctacctagacattagcaatgaggtcaaattcgcttggaaaattcagagagacatggcagagcgtggacacagtcttgaaagcatcaaggctagcattgaagcaaggaagcctgattttgaagcatatattgatccacaaaagcaatacgcagatgcagtgatagaagtgttgccaacgcaactcattccagatgacaacgagggtaagattttgagagtgagattgatacagaaagagggggttaagtactttagcccggtttacttgtttgatgatggctctaccatttcatggataccatgtggaagaaagcttacatgctcctaccctggcatcaaattcttctatggacctgagacttactacggaaatgaggtgtcagttgtagaaatggatggacaatttgacagactagatgaactaatatacgttgagagccacctaagcaacctctctacaaagttctatggagaggttactcaacagatgttgaagcatgctgattttcccggcagcaacaatggaacaggtctcttccaaaccatagttggtttgaagataagagatctatatgagcagctaatagccagcaaggctgagactccagtagctgcaaaagcttag

SEQ ID NO: 132985 - protein, 407 aa, Glycine max
MAACTVYSTQSLSTNCSISTPSKTQLSFFHQKQVVFWRNSKKGSCSSRRSYVITCAAGDSQTVVIGLAADSGCGKSTFMRRLTSVFGGAAEPPKGGNPDSNTLISDTTTVICLDDYHSLDRTGRKEKGVTALDPRANDFDLMYEQVKALKDGIAVEKPIYNHVTGLLDPPELIKPPKILVIEGLHPMFDSRVRDLLDFSIYLDISNEVKFAWKIQRDMAERGHSLESIKASIEARKPDFEAYIDPQKQYADAVIEVLPTQLIPDDNEGKILRVRLIQKEGVKYFSPVYLFDDGSTISWIPCGRKLTCSYPGIKFFYGPETYYGNEVSVVEMDGQFDRLDELIYVESHLSNLSTKFYGEVTQQMLKHADFPGSNNGTGLFQTIVGLKIRDLYEQLIASKAETPVAAKA

SEQ ID NO: 132986 - DNA, 1248 bp, Zea mays
  CDS (1)..(1248)
atgatggcgatctgcagcgcgcacaccaccaccatctccctgcgctccccatgcacgacgaccgtctcgaacgcggcagctggcttggtgcagaagcaagtcatcttcttgaccagcatcaacaggaggagcggcagcagaaggcgtggaggaggggtgagcaggaccttactccaggtctcgtgctccgccgacggcaacaagccagtggtgatcggcctggcggcggactccgggtgcggcaagagcaccttcatgcgccggctcaccagcgtcttcggcggcgccgcggagccgcccaggggcgggaacccggactccaacacgctcatcagcgacaccacgaccgtgatatgcctcgacgactaccactccctggacaggaccggcaggaaggagaagggcgtcaccgcgctcgacccgagggccaacaacttcgacctcatgtacgagcaggtgaaggcgatcaagcaaggccaggcggtccagaagcccatctacaaccacgtcaccggcctcctcgacccgccggagcttatcacgccgcccaagatctttgtcatcgaaggtctgcacccaatcttcgacgagcgtgtgaacgacctcttagacttcagcatctacttggacatcagtgatgaggttaagtttgcatggaaaatccagcgggacatggcagagcgtgggcacagccttgaaagcatcaaggccagcatcgaagccaggaaaccagatttcgatgcatatattgatccgcagaagcagtacgctgacgccgtgatcgaagttctgccgacccagttgatccccgacgacgacgaagggaaggttctgcgagtcaagctcatcatgaaagaaggggtggacaacttcaacccggtctatctcttcgacgaagggtccaccatctcctgggtgccctgtggaagaaagctcacgtgctcttaccccggcatcaaattcgcctacggcccagacatttacttcggaaacgaggtatctgttttggagatggatgggcagttcgacagactagacgagctcatctacgtggagagccatctgagcaacctctcgaccaagttctacggggaggtgacacagcagatgctgaagcacgcggacttccctggaagcaacaacgggacaggtctcttccagaccatcgtcgggctgaagattagagacctctacgagcagattgttgccgagagggctggcgcgccagtggaagcagccaaagtttga

SEQ ID NO: 132987 - protein, 415 aa, Zea mays
MMAICSAHTTTISLRSPCTTTVSNAAAGLVQKQVIFLTSINRRSGSRRRGGGVSRTLLQVSCSADGNKPVVIGLAADSGCGKSTFMRRLTSVFGGAAEPPRGGNPDSNTLISDTTTVICLDDYHSLDRTGRKEKGVTALDPRANNFDLMYEQVKAIKQGQAVQKPIYNHVTGLLDPPELITPPKIFVIEGLHPIFDERVNDLLDFSIYLDISDEVKFAWKIQRDMAERGHSLESIKASIEARKPDFDAYIDPQKQYADAVIEVLPTQLIPDDDEGKVLRVKLIMKEGVDNFNPVYLFDEGSTISWVPCGRKLTCSYPGIKFAYGPDIYFGNEVSVLEMDGQFDRLDELIYVESHLSNLSTKFYGEVTQQMLKHADFPGSNNGTGLFQTIVGLKIRDLYEQIVAERAGAPVEAAKV

SEQ ID NO: 132988 - DNA, 1248 bp, Zea mays
  CDS (1)..(1248)
atgatggcgatctgcagcgcgcacaccaccaccatctccctgcgctccccatgcacgacgaccgtctcgaacgcggcagctggcttggtgcagaagcaagtcatcttcttgaccagcatcaacaggaggagcggcagcagaaggcgtggaggaggggtgagcaggaccttactccaggtctcgtgctccgccgacggcaacaagccagtggtgatcggcctggcggcggactccgggtgcggcaagagcaccttcatgcgccggctcaccagcgtcttcggcggcgccgcggagccgcccaggggcgggaacccggactccaacacgctcatcagcgacaccacgaccgtgatatgcctcgacgactaccactccctggacaggaccggcaggaaggagaagggcgtcaccgcgctcgacccgagggccaacaacttcgacctcatgtacgagcaggtgaaggcgatcaagcaaggccaggcggtccagaagcccatctacaaccacgtcaccggcctcctcgacccgccggagcttatcacgccgcccaagatctttgtcatcgaaggtctgcacccaatgttcgacgagcgtgtgagggacctcttagacttcagcatctacttggacatcagtgatgaggttaagtttgcatggaaaatccagcgggacatggcagagcgtgggcacagccttgaaagcatcaaggccagcatcgaagccaggaaaccagatttcgatgcatatattgatccgcagaagcagtacgctgacgccgtgatcgaagttctgccgacccagttgatccccaacgacgacgaagggaaggttctgcgagtcaagctgatcatgaaagaaggggtggacaacttcaacccggtctacctcttcgacgaagggtccaccatctcctgggtgccctgtggaagaaagctcacgtgctcttaccccggcatcaaattcgcctacggcccagacatttacttcggaaacgaggtatctgttttggagatggatgggcagttcgacagactagacgagctcatctacgtggagagccatctgagcaacctctcgaccaagttctacggggaggtgacacagcagatgctgaagcacgcggacttcccgggaagcaacaacgggacaggcctcttccagaccatcgtcgggctgaagattagagacctctacgagcagattgttgccgagagggctggcgcgccagcggaagcagccaaagtttga

SEQ ID NO: 132989 - protein, 415 aa, Zea mays
MMAICSAHTTTISLRSPCTTTVSNAAAGLVQKQVIFLTSINRRSGSRRRGGGVSRTLLQVSCSADGNKPVVIGLAADSGCGKSTFMRRLTSVFGGAAEPPRGGNPDSNTLISDTTTVICLDDYHSLDRTGRKEKGVTALDPRANNFDLMYEQVKAIKQGQAVQKPIYNHVTGLLDPPELITPPKIFVIEGLHPMFDERVRDLLDFSIYLDISDEVKFAWKIQRDMAERGHSLESIKASIEARKPDFDAYIDPQKQYADAVIEVLPTQLIPNDDEGKVLRVKLIMKEGVDNFNPVYLFDEGSTISWVPCGRKLTCSYPGIKFAYGPDIYFGNEVSVLEMDGQFDRLDELIYVESHLSNLSTKFYGEVTQQMLKHADFPGSNNGTGLFQTIVGLKIRDLYEQIVAERAGAPAEAAKV

SEQ ID NO: 132990 - DNA, 20 bp, Artificial sequence
  primer
atgaccacacagctagaccg

SEQ ID NO: 132991 - DNA, 23 bp, Artificial sequence
  primer
ttacacagaggccgggaccttag

SEQ ID NO: 132992 - protein, 337 aa, Artificial sequence
  consensus sequence
  Variant (3)..(3): Xaa in position 3 is any amino acid
  Variant (5)..(5): Xaa in position 5 is any amino acid
  Variant (15)..(15): Xaa in position 15 is any amino acid
  Variant (19)..(21): Xaa in position 19 to 21 is any amino acid
  Variant (24)..(27): Xaa in position 24 to 27 is any amino acid
  Variant (28)..(48): Xaa in position 28 to 48 is any or no amino acid
  Variant (62)..(63): Xaa in position 62 to 63 is any amino acid
  Variant (67)..(67): Xaa in position 67 is any amino acid
  Variant (69)..(69): Xaa in position 69 is any amino acid
  Variant (75)..(75): Xaa in position 75 is any amino acid
  Variant (78)..(78): Xaa in position 78 is any amino acid
  Variant (86)..(86): Xaa in position 86 is any amino acid
  Variant (88)..(89): Xaa in position 88 to 89 is any amino acid
  Variant (91)..(91): Xaa in position 91 is any amino acid
  Variant (93)..(96): Xaa in position 93 to 96 is any amino acid
  Variant (103)..(103): Xaa in position 103 is any amino acid
  Variant (106)..(107): Xaa in position 106 to 107 is any amino acid
  Variant (112)..(114): Xaa in position 112 to 114 is any amino acid
  Variant (116)..(119): Xaa in position 116 to 119 is any amino acid
  Variant (121)..(121): Xaa in position 121 is any amino acid
  Variant (127)..(128): Xaa in position 127 to 128 is any amino acid
  Variant (130)..(130): Xaa in position 130 is any amino acid
  Variant (134)..(134): Xaa in position 134 is any amino acid
  Variant (136)..(136): Xaa in position 136 is any amino acid
  Variant (139)..(140): Xaa in position 139 to 140 is any amino acid
  Variant (146)..(148): Xaa in position 146 to 148 is any amino acid
  Variant (150)..(151): Xaa in position 150 to 151 is any amino acid
  Variant (164)..(165): Xaa in position 164 to 165 is any amino acid
  Variant (167)..(169): Xaa in position 167 to 169 is any amino acid
  Variant (171)..(171): Xaa in position 171 is any amino acid
  Variant (173)..(174): Xaa in position 173 to 174 is any amino acid
  Variant (176)..(176): Xaa in position 176 is any amino acid
  Variant (180)..(182): Xaa in position 180 to 182 is any amino acid
  Variant (184)..(184): Xaa in position 184 is any amino acid
  Variant (187)..(189): Xaa in position 187 to 189 is any amino acid
  Variant (192)..(192): Xaa in position 192 is any amino acid
  Variant (194)..(195): Xaa in position 194 to 195 is any amino acid
  Variant (200)..(200): Xaa in position 200 is any amino acid
  Variant (202)..(203): Xaa in position 202 to 203 is any amino acid
  Variant (204)..(204): Xaa in position 204 is any or no amino acid
  Variant (206)..(207): Xaa in position 206 to 207 is any amino acid
  Variant (208)..(214): Xaa in position 208 to 214 is any or no amino acid
  Variant (218)..(222): Xaa in position 218 to 222 is any amino acid
  Variant (225)..(227): Xaa in position 225 to 227 is any amino acid
  Variant (229)..(229): Xaa in position 229 is any amino acid
  Variant (231)..(231): Xaa in position 231 is any amino acid
  Variant (236)..(236): Xaa in position 236 is any amino acid
  Variant (237)..(237): Xaa in position 237 is any or no amino acid
  Variant (240)..(240): Xaa in position 240 is any amino acid
  Variant (242)..(242): Xaa in position 242 is any amino acid
  Variant (244)..(244): Xaa in position 244 is any amino acid
  Variant (257)..(260): Xaa in position 257 to 260 is any amino acid
  Variant (263)..(263): Xaa in position 263 is any amino acid
  Variant (265)..(267): Xaa in position 265 to 267 is any amino acid
  Variant (269)..(270): Xaa in position 269 to 270 is any amino acid
  Variant (276)..(276): Xaa in position 276 is any amino acid
  Variant (279)..(279): Xaa in position 279 is any amino acid
  Variant (281)..(282): Xaa in position 281 to 282 is any amino acid
  Variant (284)..(284): Xaa in position 284 is any amino acid
  Variant (286)..(287): Xaa in position 286 to 287 is any amino acid
  Variant (289)..(289): Xaa in position 289 is any amino acid
  Variant (291)..(291): Xaa in position 291 is any amino acid
  Variant (295)..(297): Xaa in position 295 to 297 is any amino acid
  Variant (300)..(301): Xaa in position 300 to 301 is any amino acid
  Variant (304)..(304): Xaa in position 304 is any amino acid
  Variant (306)..(307): Xaa in position 306 to 307 is any amino acid
  Variant (308)..(308): Xaa in position 308 is any or no amino acid
  Variant (310)..(310): Xaa in position 310 is any amino acid
  Variant (312)..(314): Xaa in position 312 to 314 is any amino acid
  Variant (318)..(318): Xaa in position 318 is any amino acid
  Variant (326)..(328): Xaa in position 326 to 328 is any amino acid
  Variant (332)..(332): Xaa in position 332 is any amino acid
  Variant (334)..(335): Xaa in position 334 to 335 is any amino acid
IGXAXDSGCGKSTFXRRLXXXFGXXXXXXXXXXXXXXXXXXXXXXXXXTVICLDDYHSLDRXXRKEXGXTALDPXANXFDLMYEQXKXXKXGXXXXKPIYNHXTGXXDPPEXXXPXXXXVXEGLHPXXDXRVRXLXDFXXYLDISXXXKXXWKIQRDMAERGHXXEXXXAXIXXRXPDFXXXIXPQXXXADXVXXVLPTXLXXXDXXXXXXXXXLRVXXXXXEGXXXFXPXYLFDXXGSXIXWXPCGRKLTCSYPGXXXXYGXDXXXGXXVSVLEXDGXFXXLXEXXYXEXHLSXXXTKXXGEXTXXXLXHXXXPGSXNGTGLFQXXXGLKXRXXYE

SEQ ID NO: 132993 - protein, 60 aa, Artificial sequence
  protein pattern
  Variant (12)..(12): Xaa in position 12 is any amino acid
  Variant (13)..(13): Xaa in position 13 is Gly or Gln
  Variant (16)..(16): Xaa in position 16 is Ala or Glu
  Variant (17)..(18): Xaa in position 17 to 18 is any amino acid
  Variant (19)..(19): Xaa in position 19 is Ile or Val
  Variant (25)..(25): Xaa in position 25 is Lys or Arg
  Variant (28)..(28): Xaa in position 28 is Asp or Asn
  Variant (33)..(33): Xaa in position 33 is any amino acid
  Variant (34)..(34): Xaa in position 34 is Glu or Arg
  Variant (36)..(36): Xaa in position 36 is Ala, Ile, Leu or Val
  Variant (37)..(37): Xaa in position 37 is any amino acid
  Variant (38)..(38): Xaa in position 38 is Ala or Thr
  Variant (39)..(39): Xaa in position 39 is Ile or Leu
  Variant (41)..(41): Xaa in position 41 is any amino acid
  Variant (42)..(42): Xaa in position 42 is Gly or Leu
  Variant (43)..(43): Xaa in position 43 is any amino acid
  Variant (44)..(44): Xaa in position 44 is Ala, Ser or Thr
  Variant (45)..(45): Xaa in position 45 is Ile or Val
  Variant (46)..(46): Xaa in position 46 is any amino acid
  Variant (53)..(53): Xaa in position 53 is any amino acid
  Variant (56)..(56): Xaa in position 56 is any amino acid
  Variant (57)..(57): Xaa in position 57 is Ile or Leu
  Variant (59)..(59): Xaa in position 59 is any or no amino acid
ICLDDYHSLDRXXRKXXXXTALDPXANXFDLMXXQXXXXKXXXXXXKPIYNHXTGXXDXP

SEQ ID NO: 132994 - protein, 58 aa, Artificial sequence
  protein pattern
  Variant (2)..(2): Xaa in position 2 is any amino acid
  Variant (6)..(6): Xaa in position 6 is Phe, Leu or Met
  Variant (7)..(7): Xaa in position 7 is Phe or Tyr
  Variant (9)..(9): Xaa in position 9 is Ala, Glu, Gln or Ser
  Variant (13)..(13): Xaa in position 13 is Asp, Glu, Gly, Asn or Ser
  Variant (15)..(15): Xaa in position 15 is Phe, Ile, Leu or Val
  Variant (18)..(18): Xaa in position 18 is any amino acid
  Variant (19)..(19): Xaa in position 19 is Ile or Val
  Variant (21)..(21): Xaa in position 21 is Phe or Leu
  Variant (23)..(23): Xaa in position 23 is Ile or Leu
  Variant (24)..(24): Xaa in position 24 is Asp, Gly or Ser
  Variant (25)..(25): Xaa in position 25 is Asp, Glu, Asn or Ser
  Variant (26)..(26): Xaa in position 26 is Asp, Glu or Pro
  Variant (27)..(27): Xaa in position 27 is Ile or Val
  Variant (29)..(29): Xaa in position 29 is Phe or Ile
  Variant (30)..(30): Xaa in position 30 is Ala, Asn or Gln
  Variant (34)..(34): Xaa in position 34 is any amino acid
  Variant (37)..(37): Xaa in position 37 is Leu or Met
  Variant (38)..(38): Xaa in position 38 is any amino acid
  Variant (43)..(44): Xaa in position 43 to 44 is any amino acid
  Variant (46)..(46): Xaa in position 46 is Asp or Ser
  Variant (47)..(47): Xaa in position 47 is Ile or Val
  Variant (48)..(49): Xaa in position 48 to 49 is any amino acid
  Variant (50)..(50): Xaa in position 50 is Ala, Gln or Ser
  Variant (52)..(52): Xaa in position 52 is Glu or Asn
  Variant (53)..(53): Xaa in position 53 is Ala or Ser
  Variant (55)..(55): Xaa in position 55 is Lys or Arg
EXLHPXXDXRVRXLXDFXXYXDXXXXXKXXWKIXRDXXERGHXXEXXXXXIXXRXPDF

SEQ ID NO: 132995 - protein, 38 aa, Artificial sequence
  protein pattern
  Variant (3)..(3): Xaa in position 3 is Ile or Met
  Variant (4)..(4): Xaa in position 4 is any amino acid
  Variant (5)..(5): Xaa in position 5 is Phe, Leu or Met
  Variant (6)..(6): Xaa in position 6 is any amino acid
  Variant (8)..(8): Xaa in position 8 is Glu or Gly
  Variant (9)..(9): Xaa in position 9 is Pro or Ser
  Variant (10)..(10): Xaa in position 10 is Asp or Glu
  Variant (11)..(11): Xaa in position 11 is any amino acid
  Variant (12)..(12): Xaa in position 12 is Phe, Trp or Tyr
  Variant (13)..(13): Xaa in position 13 is any amino acid
  Variant (14)..(14): Xaa in position 14 is Asp or Gly
  Variant (15)..(16): Xaa in position 15 to 16 is any amino acid
  Variant (18)..(18): Xaa in position 18 is Ser or Thr
  Variant (19)..(19): Xaa in position 19 is Ile, Leu or Val
  Variant (20)..(20): Xaa in position 20 is Leu or Val
  Variant (22)..(22): Xaa in position 22 is Met or Val
  Variant (25)..(25): Xaa in position 25 is any amino acid
  Variant (27)..(27): Xaa in position 27 is Asp or Glu
  Variant (28)..(28): Xaa in position 28 is any amino acid
  Variant (30)..(30): Xaa in position 30 is Asp or Glu
  Variant (32)..(32): Xaa in position 32 is Leu, Met or Val
  Variant (33)..(33): Xaa in position 33 is Ile or Val
  Variant (35)..(35): Xaa in position 35 is Ile or Val
  Variant (37)..(37): Xaa in position 37 is Gly, Asn, Ser or Thr
PGXXXXYXXXXXXXXXVXXXEXDGXFXXLXEXXYXEXH

SEQ ID NO: 132996 - protein, 22 aa, Artificial sequence
  protein pattern
  Variant (2)..(2): Xaa in position 2 is Gly, Leu or Val
  Variant (4)..(4): Xaa in position 4 is Ala or Gly
  Variant (14)..(14): Xaa in position 14 is Leu or Met
  Variant (15)..(15): Xaa in position 15 is Asn or Arg
  Variant (17)..(17): Xaa in position 17 is Ile, Leu or Met
  Variant (18)..(18): Xaa in position 18 is any amino acid
  Variant (19)..(19): Xaa in position 19 is Asp or Ser
  Variant (20)..(20): Xaa in position 20 is Ile, Leu or Val
GXAXDSGCGKSTFXXRXXXXFG

SEQ ID NO: 132997 - protein, 22 aa, Artificial sequence
  protein pattern
  Variant (5)..(5): Xaa in position 5 is Asp or Glu
  Variant (8)..(9): Xaa in position 8 to 9 is any or no amino acid
  Variant (11)..(12): Xaa in position 11 to 12 is any or no amino acid
  Variant (14)..(14): Xaa in position 14 is any amino acid
  Variant (21)..(21): Xaa in position 21 is Ser or Thr
YLFDXGSXXTXXWXPCGRKLXC

SEQ ID NO: 132998 - protein, 29 aa, Artificial sequence
  protein pattern
  Variant (2)..(2): Xaa in position 2 is any amino acid
  Variant (3)..(3): Xaa in position 3 is Asp, Glu or Asn
  Variant (4)..(4): Xaa in position 4 is Phe or Tyr
  Variant (7)..(7): Xaa in position 7 is Ser or Thr
  Variant (8)..(8): Xaa in position 8 is Asp or Asn
  Variant (11)..(11): Xaa in position 11 is Ser or Thr
  Variant (13)..(13): Xaa in position 13 is Phe or Leu
  Variant (16)..(16): Xaa in position 16 is Thr or Val
  Variant (17)..(17): Xaa in position 17 is Ile or Leu
  Variant (18)..(18): Xaa in position 18 is any amino acid
  Variant (22)..(22): Xaa in position 22 is Ile or Met
  Variant (24)..(24): Xaa in position 24 is any amino acid
  Variant (25)..(28): Xaa in position 25 to 28 is any or no amino acid
HXXXPGXXNGXGXFQXXXGLKXRXXXXXL

SEQ ID NO: 132999 - protein, 17 aa, Artificial sequence
  protein pattern
  Variant (2)..(2): Xaa in position 2 is any amino acid
  Variant (5)..(5): Xaa in position 5 is Lys or Arg
  Variant (6)..(6): Xaa in position 6 is Glu, Gly, Gln or Ser
  Variant (7)..(7): Xaa in position 7 is any amino acid
  Variant (10)..(10): Xaa in position 10 is Ala, Ile, Leu or Val
  Variant (12)..(12): Xaa in position 12 is Ile, Leu or Val
  Variant (13)..(13): Xaa in position 13 is Glu, Gln, Arg or Ser
  Variant (14)..(14): Xaa in position 14 is Phe, Ile or Val
  Variant (15)..(15): Xaa in position 15 is any amino acid
  Variant (17)..(17): Xaa in position 17 is Gly, Ser or Thr
IXPQXXXADXVXXXXPX

SEQ ID NO: 133000 - protein, 17 aa, Artificial sequence
  protein pattern
  Variant (4)..(4): Xaa in position 4 is Lys or Arg
  Variant (5)..(5): Xaa in position 5 is Leu or Met
  Variant (6)..(6): Xaa in position 6 is Ile, Leu or Val
  Variant (7)..(7): Xaa in position 7 is any amino acid
  Variant (8)..(8): Xaa in position 8 is Lys or Arg
  Variant (11)..(12): Xaa in position 11 to 12 is any amino acid
  Variant (13)..(13): Xaa in position 13 is any or no amino acid
  Variant (15)..(15): Xaa in position 15 is any amino acid
  Variant (16)..(16): Xaa in position 16 is any or no amino acid
LRVXXXXXEGXXXFXXP

SEQ ID NO: 133001 - DNA, 468 bp, Arabidopsis thaliana
  CDS (1)..(468)
atgaatttcatctccgatcaggtaaagaaactctcaagctcaacaccagaggagccagaccacaacaagccagtcgaaggaaccgaaacagctacaagaccagctaccaacgccgagctcatggcaagtgccaaggttgtagctgaagctgctcaagccgcagctcgtaacgaatcagacaaactcgacaagggtaaagtcgccggagcctctgctgatatcttagacgctgccgagaaatacggtaagttcgatgaaaagagtagcactggtcagtacctcgacaaggctgagaagtatctcaacgactacgagtcgtcacactccaccggtgctggtggtcctcctcctccgacgagtcaggctgagccagcaagtcagcctgagccggcggctaagaaagacgatgaagagtctggtggtgggcttggaggttatgccaagatggctcaaggtttcttgaagtga

SEQ ID NO: 133002 - protein, 155 aa, Arabidopsis thaliana
MNFISDQVKKLSSSTPEEPDHNKPVEGTETATRPATNAELMASAKVVAEAAQAAARNESDKLDKGKVAGASADILDAAEKYGKFDEKSSTGQYLDKAEKYLNDYESSHSTGAGGPPPPTSQAEPASQPEPAAKKDDEESGGGLGGYAKMAQGFLK

SEQ ID NO: 133003 - DNA, 931 bp, Arabidopsis thaliana
  CDS (145)..(738)
aagaccaaaaactagtggacaaagaaaaagaacaaaaacctaatttcaagaaattcaataaatatcatcctccggataagttgttattgtacgtttaccaaattcaagaacaagaaaaaactttttcctttgaaacaaagaaacatggatttcttcaccgatcaagtaaagaagaaattctccgacaagaaaccggagagctctgatccggagccaaaccacaacaaaaacaaacccggtcatggcgagccaacaacacataaaccggtttccaacaccgacccaacaacacataaacctgtttccaacaccgatccaacaacacacagaccggctacgaacgctgagctcatggctagtgccaagatcgtagccgaagctgctcaagccgctgctcgtcacgagtcagacaagctagacaaagctaaagtcgccggagccaccgctgatatccttgacgccgcttctagatacggtaagctcgatgaaaagagcggtgttggtcagtaccttgaaaaggctgaacaatatcttcacaagtacgaaacttcccactctcactcctccagcggtggaactggaagccacggtactggtggcaccggtggaagccacggtaatgttggaggacacggtggtggagctggagcaccggcggctaagaaagaagatgagaagtccggaggtggtcatgggtttggagattatgctaagatggctcaaggttttatgaagtgagtaatgttttagtttctaaaaataattatgttagtaattatcttctataattactgttttagtaagctgttgttttttctgaattattattaactgttggatttgtcatttgtgtatgatggaggaaattataatgttaaagatcatgtatcatgttgttgaccactcgagattgcgttaatcaaatatttgt

SEQ ID NO: 133004 - protein, 197 aa, Arabidopsis thaliana
MDFFTDQVKKKFSDKKPESSDPEPNHNKNKPGHGEPTTHKPVSNTDPTTHKPVSNTDPTTHRPATNAELMASAKIVAEAAQAAARHESDKLDKAKVAGATADILDAASRYGKLDEKSGVGQYLEKAEQYLHKYETSHSHSSSGGTGSHGTGGTGGSHGNVGGHGGGAGAPAAKKEDEKSGGGHGFGDYAKMAQGFMK

SEQ ID NO: 133005 - DNA, 694 bp, Glycine max
  CDS (33)..(392)
  misc_feature (20)..(20): n is a, g, c or t
  misc_feature (23)..(23): n is a, g, c or t
gcgtccggcagaagcttaantangtaagatcaatggcttccgaagaatcccagaacaagccccccagcgagcagtccactaccgaactcatcacgagcgcgaagctggtggcggaggcggcgcagtcggctctgaagagcgacagcgacaaagtggacaaggccaaggtggctgacgctgccggcgatcttctcgacgcggcggggaagtatggaaaacttgatgacaaacaaggcatagggcaatatgttgacaaggctgctgattatctgcataattaccagggtgataataccactgctccttcacagcctgcagagtctaaaggtgaagaaagtggtggtgggttaggtggtcttgcaaacttggctggaggcttcttcaaaaagtagttacaaagcaactaaataagaccttaattgagtccttattctcggtctagtagtggggtttgggtaatatgcaccagatcatagatttaaatcttgttattgtaaaaaaagaaaatggaaaaaaaaaagtcttgaatttctcacttctagttctagtattgttgttgttgttgttatatgatgtatggttgaataaatgtgatttggtgtttgtactttgtagagttaattagtgacttctgtgtctgttctcttaattctaattccaaacaagagtacttccggccggcttctttttagct

SEQ ID NO: 133006 - protein, 119 aa, Glycine max
MASEESQNKPPSEQSTTELITSAKLVAEAAQSALKSDSDKVDKAKVADAAGDLLDAAGKYGKLDDKQGIGQYVDKAADYLHNYQGDNTTAPSQPAESKGEESGGGLGGLANLAGGFFKK

SEQ ID NO: 133007 - DNA, 792 bp, Sorghum bicolor
  CDS (58)..(537)
gccggccgggccgggactatctgctgaagcgaaaaaagaactgaagctatcgatccaatggcagagggcaagagctccggcgacctgttctccagcggcaagctggtcgcggaggccgccgcgtcggcgttccagcagaagagcgtggagaacgtcgacaagaaggaggtcgccggcgcggcggccgagatcctgcacgcggcgtccacgtacggcaagttcgaggacaagccggccgggcagtacatcgagaaggccgagggctacctcaaggagttcagcgcgggaggacacgccgccgagcctgcggctgcaggcgacgcggcgccgccgaagccagcggaggaggcgcccaaggagaaggagccggtgcctgcgccggcgcccaaggaggaaggcggcaagtcgtcgtcggaagggtttggcctcggcgacgtcgtgaagggcgctgagcaactcgtggagaagcagggcggcgccggggaggaaagcgccgccggtgggctgtttaagatggcgcagggcttcctcaagtagatggaactcgatcaaagctccatccacgcactgctcttgatttgtctgcccaacggcaacgtgtagctgtgtatgtctgttatgtaattattaacttcaaataatgttgccttcgctgtgtgtgttcttcaagatgtttgtgtaataataaccgagaacgttgtagcagtggtggcagagtgcttttcgacctgtcttttgataatttaaaaaacattgtatgttgtataaacactcagtccttgtttagttctt

SEQ ID NO: 133008 - protein, 159 aa, Sorghum bicolor
MAEGKSSGDLFSSGKLVAEAAASAFQQKSVENVDKKEVAGAAAEILHAASTYGKFEDKPAGQYIEKAEGYLKEFSAGGHAAEPAAAGDAAPPKPAEEAPKEKEPVPAPAPKEEGGKSSSEGFGLGDVVKGAEQLVEKQGGAGEESAAGGLFKMAQGFLK

SEQ ID NO: 133009 - DNA, 974 bp, Zea mays
  CDS (86)..(583)
gccggccgggtcgggacggcagctctgaagcgaaagagatcgatcgtatctgcggaacaagcagcgaaggatcggagcctatccaatggccgagggcaacagcagctccggcggcgacctgttctccagcggcaagctggtggcgggggccgccgtgtcggtgttccagcagaagagcgtggagaacgtcgacaagcaggaggtcgccggggcggcgaaggagctcctgcacgcggcgtccgtgtacggtaagctcgacgacaagccggccgggcagtacgtcgagaaggccgaggggtacctcaaggagttcagcgcgggacacgccaccgagcaggagcagcctgcggcggcaccaggcgacgacgcggcgcccaagccaccggcgccggaggcgcccaaggagccggcggcggtgcctgcgccggccgcggaggaaggcagcaagtcgtcggagggcttcggcctcggcgacgtcatgaagggcgccgagcagctggtgggagggaagcagcagggcggcggggaggagagcgccggcggcggtgggctgtttaagatggcccagggcttcctcaagtagatatattgtctggccaacgtatatacgtgtactcttgtagtgtctgttacgtaattagcttcaaaataatgttcccctcgcctttatttgctgtgcgcgcgcttgcttcaagtccctgtaataaccgagaacgttaattgtagcagtgtgttttttatatgattaaataagtactattgaataaagctagtgcagctgtgcaggttactctatattcttactctatatcactatttatagtctactcatcaataaatagattgcttgataatatacatcaagaaggacatcaccatagagttcataacaaatgcatagattgatgatttctgtgatacgaggtcacacagagtacaaataaaataaagtggttagtttgtaatcccaaaaa

SEQ ID NO: 133010 - protein, 165 aa, Zea mays
MAEGNSSSGGDLFSSGKLVAGAAVSVFQQKSVENVDKQEVAGAAKELLHAASVYGKLDDKPAGQYVEKAEGYLKEFSAGHATEQEQPAAAPGDDAAPKPPAPEAPKEPAAVPAPAAEEGSKSSEGFGLGDVMKGAEQLVGGKQQGGGEESAGGGGLFKMAQGFLK

SEQ ID NO: 133011 - DNA, 504 bp, Zea mays
  CDS (1)..(504)
atggccgagggcaacagcagctccggcggcgacctgttctccagcggcaagctggtggcgggggccgccgtgtcggtgttccagcagaagagcgtggagaacgtcgacaagcaggaggtcgccggcgcggcggccgagctcctgcacgcggcgtccgcgtacggtaagctcgacgacaagccggccgggcagtacgtcgagaaggccgaggggtacttgaaggagttcagcgcgggcgcgggacacgccaccgagcaggagcagcctgcggcggcagcaggcgacgacgcggcgcccaagccaccggcgccggaggcgcccaaggagccggcggcggtgcctgcgccggccgcggaggaaggcagcaagtcgtcggagggcttcggcctcggcgacgtcatgaagggcgccgagcagctggtgggagggaagcagcagggcggcggggaggagagcgccggcggcggtgggttgtttaagatggcccagggcttcctcaagtag

SEQ ID NO: 133012 - protein, 167 aa, Zea mays
MAEGNSSSGGDLFSSGKLVAGAAVSVFQQKSVENVDKQEVAGAAAELLHAASAYGKLDDKPAGQYVEKAEGYLKEFSAGAGHATEQEQPAAAAGDDAAPKPPAPEAPKEPAAVPAPAAEEGSKSSEGFGLGDVMKGAEQLVGGKQQGGGEESAGGGGLFKMAQGFLK

SEQ ID NO: 133013 - DNA, 695 bp, Thellungiella halophila
  CDS (60)..(593)
gcaggctggggatccaacaaaaaaaaaactatattcagcgagaaaaaaaaaaccaaaagatgaacttcatctctgatcaggaaaaaaaactctccaacccgaaaacggcggagccggagcacatcaagcccgtcgaaggaaccgaaacaaccaaaaaaccagcttcctccgccgaggtctgggctggggccaagattgtacccaaagctgctcaagccgcagctcgtaacgaatccgacaaactcgacaagggtaaagtcgccggagccagcgttgatatcttaaacgccgccgagaagtacggtaagctcgatgaaaaaagcggtgttggtcagtacctcgagaaggccgagaagtttctcaacgagtacgaatctacacactctacttccggcgccggtgctcctcctccggcggcggcaagtcatgatgatccggcggcggcgagtcatgaggagccggcagctaaaaaagccattgaaaagtctggtggtggtttgggaggttatgcaaagatggctcagggtttcatgaagggatttgtgatctttatttgtagttttattcatgcgcgtaataataagattaaataactaagtccgctatttagaaattatgttggatcgttaagtatggccgtatgatgaaataataacttttggagatcttcaaaaaaaaaaaaaaaaaaaaaaaaa

SEQ ID NO: 133014 - protein, 177 aa, Thellungiella halophila
MNFISDQEKKLSNPKTAEPEHIKPVEGTETTKKPASSAEVWAGAKIVPKAAQAAARNESDKLDKGKVAGASVDILNAAEKYGKLDEKSGVGQYLEKAEKFLNEYESTHSTSGAGAPPPAAASHDDPAAASHEEPAAKKAIEKSGGGLGGYAKMAQGFMKGFVIFICSFIHARNNKIK

SEQ ID NO: 133015 - DNA, 564 bp, Arabidopsis thaliana
  CDS (1)..(564)
atggatttcttcaccgatcaagtaaagaagaaattctccgacaagaaaccggagagctctgatccggagccaaaccacaacaaaaacaaacccggtcacacggagccaacaacacataaacccggtcacggcgagccaacaacacataaaccggtctccaacaccgatccaacaacacacagaccggctacgaacgctgagctcatggctagtgccaagatcgtagccgaagctgctcaagccgctgctcgtcacgagtcagacaagcttgacaaagccaaagtcgccggagccaccgctgatatcttagacgccgcttctagatacggtaagctcgatgaaaagagcggtgttggtcagtaccttgaaaaggctgaacaatatcttcacaagtacgaaacttcccactctcactcctccaccggtggaactggaagccacggtaatgttggaggacacggtggtggagctggagcaccggcggctaagaaagaagatgagaagtccggaggtggtcatgggtttggagattatgctaagatggctcaaggttttatgaagtga

SEQ ID NO: 133016 - protein, 187 aa, Arabidopsis thaliana
MDFFTDQVKKKFSDKKPESSDPEPNHNKNKPGHTEPTTHKPGHGEPTTHKPVSNTDPTTHRPATNAELMASAKIVAEAAQAAARHESDKLDKAKVAGATADILDAASRYGKLDEKSGVGQYLEKAEQYLHKYETSHSHSSTGGTGSHGNVGGHGGGAGAPAAKKEDEKSGGGHGFGDYAKMAQGFMK

SEQ ID NO: 133017 - DNA, 498 bp, Oryza sativa subsp
  CDS (1)..(498)
atggcggaggagaacaagtccggctccggcgacctgatggcgagcggcaaggtggtcgcggaggcgaccatgtcggtgttccagcagaagagcgtggagggcgtcgacaagaaggaggtcgccggcgccgccgcggacctgctgcactcggcgtccacctacggcaagctcgacgacaagccggtcgggcagtacatcgacaaggcggaggggtacctcaaggacttcagctccggcagtggcggcgccgcaccgccaccgccggcagccggagacgccgcagcgccgaagccagcggcggaggagacgcccaaggagcctgcgccggctgagaaggaggaaggcaagccaccgtcgtcgtcggaagggttcggtctcgacgacgtcatgaagggggccgagtcgctgatggagaagaagggcagcggggaggagagcgccggcagcggcggcgccgccggtgggctgttcaagatggcgcagggtttcatgaagtag

SEQ ID NO: 133018 - protein, 165 aa, Oryza sativa subsp
MAEENKSGSGDLMASGKVVAEATMSVFQQKSVEGVDKKEVAGAAADLLHSASTYGKLDDKPVGQYIDKAEGYLKDFSSGSGGAAPPPPAAGDAAAPKPAAEETPKEPAPAEKEEGKPPSSSEGFGLDDVMKGAESLMEKKGSGEESAGSGGAAGGLFKMAQGFMK

SEQ ID NO: 133019 - DNA, 501 bp, Oryza sativa subsp
  CDS (1)..(501)
atggcggaggagaacaagtccggctccggcgacctgatggcgagcggcaaggtggtcgcggaggcgaccatgtcggtgttccagcagaagagcgtggagggcgtcgacaagaaggaggtcgccggcgccgccgcggacctgctgcactcggcgtccacctacggcaagctcgacgacaagccggtcgggcagtacatcgacaaggcggaggggtacctcaaggacttcagctccggcagtggcggcgccgcaccgccaccgccggcagccggagacgccgcagcgccgaagccagcggcggaggagccgcccaaggtgcatgcgccggctgagaaggaggaaggcaagcctccgtcgtcgtcggaagggttcgggtctcgacgtcgtcatgaagggggccgtgtcgctgatggagaagaagggcggcggggaggagtgcgcccggcagcggcggcgtccgccggtgggctgttcaagatggcgcagggtttcatgaagtag

SEQ ID NO: 133020 - protein, 166 aa, Oryza sativa subsp
MAEENKSGSGDLMASGKVVAEATMSVFQQKSVEGVDKKEVAGAAADLLHSASTYGKLDDKPVGQYIDKAEGYLKDFSSGSGGAAPPPPAAGDAAAPKPAAEEPPKVHAPAEKEEGKPPSSSEGFGSRRRHEGGRVADGEEGRRGGVRPAAAASAGGLFKMAQGFMK

SEQ ID NO: 133021 - DNA, 423 bp, Vitis vinifera
  CDS (1)..(423)
atggatccaacttctcaccacaggcccggctctcacccccagaagcaccaccaaccatccagcagtgagctcctctcaagtgccaaggtagttgcagaggcagcccaagcctccttccaccatgaatctgagaaagtggacaaatccagggtcgcaggcgcagcagctgatattctgggcgccgcctcccactatggcaagctggaggagaagagctttgggaagtatgtggagaaggctgagacttatctccaccagtaccagtcctcccactccaccaccacaaccatcaattctggccactcaaccaccaacaccacagagacacattcctcctcacactccggtggtggtgacagccattctggaggtgggtatggtgactacttgaagatggctgaaggtttcttgaaaaagtactga

SEQ ID NO: 133022 - protein, 140 aa, Vitis vinifera
MDPTSHHRPGSHPQKHHQPSSSELLSSAKVVAEAAQASFHHESEKVDKSRVAGAAADILGAASHYGKLEEKSFGKYVEKAETYLHQYQSSHSTTTTINSGHSTTNTTETHSSSHSGGGDSHSGGGYGDYLKMAEGFLKKY

SEQ ID NO: 133023 - DNA, 564 bp, Arabidopsis thaliana
  CDS (1)..(564)
atggatttcttcaccgatcaagtaaagaagaaattctccgacaagaaaccggagagctctgatccggagccaaaccacaacaaaaacaaacccggtcacacggagccaacaacacataaacccggtcacggcgagccaacaacacataaaccggtctccaacaccgatccaacaacacacagaccggctacgaacgctgagctcatggctagtgccaagatcatagccgaagctgctcaagccgctgctcgtcacgagtcagacaagcttgacaaagccaaagtcgccggagccaccgctgatatcttagacgccgcttctagatacggtaagctcgatgaaaagagcggtgttggtcagtaccttgaaaaggctgaacaatatcttcacaagtacgaaacttcccactctcactcctccaccggtggaactggaagccacggtaatgttggaggacacggtggtggagctggagcaccggcggctaagaaagaagatgagaagtccggaggtggtcatgggtttggagattatgctaagatggctcaaggttttatgaagtga

SEQ ID NO: 133024 - protein, 187 aa, Arabidopsis thaliana
MDFFTDQVKKKFSDKKPESSDPEPNHNKNKPGHTEPTTHKPGHGEPTTHKPVSNTDPTTHRPATNAELMASAKIIAEAAQAAARHESDKLDKAKVAGATADILDAASRYGKLDEKSGVGQYLEKAEQYLHKYETSHSHSSTGGTGSHGNVGGHGGGAGAPAAKKEDEKSGGGHGFGDYAKMAQGFMK

SEQ ID NO: 133025 - DNA, 468 bp, Arabidopsis thaliana
  CDS (1)..(468)
atgaatttcatctccgatcaggtaaagaaactctcaagctcaacaccagaggagccagaccacaacaagccagtcgaaggaaccgaaacagctacaagaccagctaccaacgccgagctcatggcaagtgccaaggttgtagctgaagctgctcaagccgcagctcgtaacgaatcagacaaactcgacaagggtaaagtcgccggagcctctgctgatatcttagacgcttccgagaaatacggtaagttcgatgaaaagagtagcactggtcactacctcgacaaggctgagaagtatctcaacgactacgagtcgtcacactccaccggtgctggtggtcctcctcctccgacgagtcaggctgagccagcaagtcagcctgagccggcggctaagaaagacgatgaagagtctggtggtgggcttggaggttatgccaagatggctcaaggtttcttgaagtga

SEQ ID NO: 133026 - protein, 155 aa, Arabidopsis thaliana
MNFISDQVKKLSSSTPEEPDHNKPVEGTETATRPATNAELMASAKVVAEAAQAAARNESDKLDKGKVAGASADILDASEKYGKFDEKSSTGHYLDKAEKYLNDYESSHSTGAGGPPPPTSQAEPASQPEPAAKKDDEESGGGLGGYAKMAQGFLK

SEQ ID NO: 133027 - DNA, 498 bp, Oryza sativa
  CDS (1)..(498)
atggcggaggagaacaagtccggctccggcgacctgatggcgagcggcaaggtggtcgcggaggcgaccatgtcggtgttccagcagaagagcgtggagggcgtcgacaagaaggaggtcgccggcgccgccgcggacctgctgcactcggcgtccacctacggcaagctcgacgacaagccggtcgggcagtacatcgacaaggcggaggggtacctcaaggacttcagctccggcagtggcggcgccgcaccgccaccgccggcagccggagacgccgcagcgccgaagccagcggcggaggagccgcccaaggagcctgcgccggctgagaaggaggaaggcaagccaccgtcgtcgtcggaagggttcggtctcgacgacgtcatgaagggggccgagtcgctgatggagaagaagggcggcggggaggagagcgccggcagcggcggcgccgccggtgggctgttcaagatggcgcagggtttcatgaagtag

SEQ ID NO: 133028 - protein, 165 aa, Oryza sativa
MAEENKSGSGDLMASGKVVAEATMSVFQQKSVEGVDKKEVAGAAADLLHSASTYGKLDDKPVGQYIDKAEGYLKDFSSGSGGAAPPPPAAGDAAAPKPAAEEPPKEPAPAEKEEGKPPSSSEGFGLDDVMKGAESLMEKKGGGEESAGSGGAAGGLFKMAQGFMK

SEQ ID NO: 133029 - DNA, 534 bp, Brassica napus
  CDS (1)..(534)
atggatttcctcaccgaccaagtaaagaagaaattctccgacaagaaaccggaaacttcagaccctgacccgaaccacaacaataacaaaccgggccacaccgttccaacacataaacctgcttccagctccgatccaacaatgcataagccagctacaaacgcagagctcatggctagcgccaagatcgtagcggaggctgctcaagccgcttctcgcaacgagacaggcaagctcgacaaagctaaagtagccggagccaccgccgacatacttgacgccgctcaaagatacggcaagcttgatgaaaagagtggtgttggtcagtacctcgaaaaggctgaaaattttctccacaagtacgagtcttcacactctcactcctctggcggtgctggcagtcacggtggtgtcagcggaagccatggaggaggagctggagcaccggcggttaagaaagaagatgagaaatcgggaggtggcagccatgggttaggagactatgctaagatggctcaaggtttcatgaagtga

SEQ ID NO: 133030 - protein, 177 aa, Brassica napus
MDFLTDQVKKKFSDKKPETSDPDPNHNNNKPGHTVPTHKPASSSDPTMHKPATNAELMASAKIVAEAAQAASRNETGKLDKAKVAGATADILDAAQRYGKLDEKSGVGQYLEKAENFLHKYESSHSHSSGGAGSHGGVSGSHGGGAGAPAVKKEDEKSGGGSHGLGDYAKMAQGFMK

SEQ ID NO: 133031 - DNA, 504 bp, Brassica napus
  CDS (1)..(504)
atggattttctcaccgatcaactaaaaaagaagttctccgacaagaaaccagaaagttcagaaccggagacgaaccacaacaaaaacaaacccggtcatgccggtccaacaactcatagcggacataggccagctaccaacgctgagctcatggctagtgctaagattgtagccgaagctgctcaagccgctgctcgcaatgagactgccaagctagacaaaactaaagtcgccggagccaccgctgatattctcgacgccgccggtagatacggcaagtttgatgaaaaaagcggtgtgggtcagtacctcgaaaaggctgaaagttatctccacaagtatgaatctacacactctcactcctccagtggtggcagccacggcggtggtagtcacggtggaggtgctggagaactggcgggtaagaaaggggatgagaaatcgggaagtggtagccatgggtttggagactatgctaagatggctcaaggtttcatgaagtga

SEQ ID NO: 133032 - protein, 167 aa, Brassica napus
MDFLTDQLKKKFSDKKPESSEPETNHNKNKPGHAGPTTHSGHRPATNAELMASAKIVAEAAQAAARNETAKLDKTKVAGATADILDAAGRYGKFDEKSGVGQYLEKAESYLHKYESTHSHSSSGGSHGGGSHGGGAGELAGKKGDEKSGSGSHGFGDYAKMAQGFMK

SEQ ID NO: 133033 - DNA, 504 bp, Zea mays
  CDS (1)..(504)
atggccgagggcaacagcagctccggcggcgacctgttctccagcggcaagctggtggcgggggccgccgtgtcggtgttccagcggaagagcgtggagaacgtcgacaagcaggaggtcgccggcgcggcggccgagctcctgcacgcggcgtccgcgtacggtaagctcgacgacaagccggccgggcagtacgtcgagaaggccgaggggtacttgaaggagttcagcgcgggcgcgggacacgccaccgagcaggagcagcctgcggcggcagcaggcgacgacgcggcgcccaagccaccggcgccggaggcgcccaaggagccggcggcggtgcctgcgccggccgcggaggaaggcagcaagtcgtcggagggcttcggcctcggcgacgtcatgaagggcgccgagcagctggtgggagggaagcagcagggcggcggggaggagagcgccggcggcggtgggttgtttaagatggcccagggcttcctcaagtag

SEQ ID NO: 133034 - protein, 167 aa, Zea mays
MAEGNSSSGGDLFSSGKLVAGAAVSVFQRKSVENVDKQEVAGAAAELLHAASAYGKLDDKPAGQYVEKAEGYLKEFSAGAGHATEQEQPAAAAGDDAAPKPPAPEAPKEPAAVPAPAAEEGSKSSEGFGLGDVMKGAEQLVGGKQQGGGEESAGGGGLFKMAQGFLK

SEQ ID NO: 133035 - DNA, 21 bp, Artificial sequence
  primer
atgaatttcatctccgatcag

SEQ ID NO: 133036 - DNA, 20 bp, Artificial sequence
  primer
tcacttcaagaaaccttgag

SEQ ID NO: 133037 - protein, 165 aa, Artificial sequence
  consensus sequence
  Variant (2)..(3): Xaa in position 2 to 3 is any amino acid
  Variant (5)..(5): Xaa in position 5 is any amino acid
  Variant (7)..(7): Xaa in position 7 is any amino acid
  Variant (10)..(10): Xaa in position 10 is any amino acid
  Variant (13)..(19): Xaa in position 13 to 19 is any amino acid
  Variant (21)..(23): Xaa in position 21 to 23 is any amino acid
  Variant (24)..(24): Xaa in position 24 is any or no amino acid
  Variant (27)..(28): Xaa in position 27 to 28 is any amino acid
  Variant (33)..(33): Xaa in position 33 is any amino acid
  Variant (35)..(36): Xaa in position 35 to 36 is any amino acid
  Variant (38)..(38): Xaa in position 38 is any amino acid
  Variant (41)..(42): Xaa in position 41 to 42 is any amino acid
  Variant (46)..(46): Xaa in position 46 is any amino acid
  Variant (48)..(48): Xaa in position 48 is any amino acid
  Variant (50)..(51): Xaa in position 50 to 51 is any amino acid
  Variant (52)..(52): Xaa in position 52 is any or no amino acid
  Variant (56)..(57): Xaa in position 56 to 57 is any amino acid
  Variant (61)..(61): Xaa in position 61 is any amino acid
  Variant (64)..(76): Xaa in position 64 to 76 is any amino acid
  Variant (77)..(102): Xaa in position 77 to 102 is any or no amino acid
  Variant (104)..(115): Xaa in position 104 to 115 is any amino acid
  Variant (116)..(153): Xaa in position 116 to 153 is any or no amino acid
  Variant (155)..(156): Xaa in position 155 to 156 is any amino acid
  Variant (157)..(157): Xaa in position 157 is any or no amino acid
  Variant (164)..(164): Xaa in position 164 is any amino acid
LXXSXKXVAXAAXXXXXXXSXXXXDKXXVAGAXAXXLXAAXXYGKXDXKXXXGQYXXKAEXYLXXXXXXXXXXXXXXXXXXXXXXXXXXXXXXXXXXXXXXXPXXXXXXXXXXXXXXXXXXXXXXXXXXXXXXXXXXXXXXXXXXXXXXXXXXGXXXKMAQGFXK

SEQ ID NO: 133038 - protein, 26 aa, Artificial sequence
  protein pattern
  Variant (3)..(3): Xaa in position 3 is any amino acid
  Variant (4)..(4): Xaa in position 4 is Glu, Lys or Arg
  Variant (9)..(9): Xaa in position 9 is Ala, Ser or Thr
  Variant (11)..(11): Xaa in position 11 is Asp or Glu
  Variant (12)..(12): Xaa in position 12 is Ile or Leu
  Variant (14)..(14): Xaa in position 14 is any amino acid
  Variant (15)..(15): Xaa in position 15 is any or no amino acid
  Variant (17)..(18): Xaa in position 17 to 18 is any amino acid
  Variant (19)..(19): Xaa in position 19 is any or no amino acid
  Variant (23)..(23): Xaa in position 23 is Phe or Leu
  Variant (24)..(25): Xaa in position 24 to 25 is Asp or Glu
DKXXVAGAXAXXLXXAXXXYGKXXXK

SEQ ID NO: 133039 - protein, 18 aa, Artificial sequence
  protein pattern
  Variant (3)..(3): Xaa in position 3 is Ile, Leu or Val
  Variant (4)..(4): Xaa in position 4 is Asp or Glu
  Variant (8)..(8): Xaa in position 8 is any amino acid
  Variant (9)..(12): Xaa in position 9 to 12 is any or no amino acid
  Variant (14)..(15): Xaa in position 14 to 15 is any amino acid
  Variant (16)..(16): Xaa in position 16 is Asp, Glu, Ser or Thr
  Variant (17)..(17): Xaa in position 17 is Phe or His
QYXXKAEXXXXXYXXXXS

SEQ ID NO: 133040 - protein, 24 aa, Artificial sequence
  protein pattern
  Variant (2)..(9): Xaa in position 2 to 9 is any or no amino acid
  Variant (11)..(11): Xaa in position 11 is Phe, Ile, Leu or Met
  Variant (12)..(12): Xaa in position 12 is Ala, Ser or Thr
  Variant (14)..(14): Xaa in position 14 is Ala or Gly
  Variant (16)..(16): Xaa in position 16 is Ile, Leu or Val
  Variant (19)..(19): Xaa in position 19 is Glu or Gly
  Variant (21)..(21): Xaa in position 21 is Ala or Thr
  Variant (22)..(22): Xaa in position 22 is any amino acid
  Variant (23)..(23): Xaa in position 23 is Ala or Ser
  Variant (24)..(24): Xaa in position 24 is Ala, Ser or Val
EXXXXXXXXLXXSXKXVAXAXXXX

SEQ ID NO: 133041 - protein, 17 aa, Artificial sequence
  protein pattern
  Variant (2)..(2): Xaa in position 2 is any amino acid
  Variant (3)..(3): Xaa in position 3 is any or no amino acid
  Variant (5)..(5): Xaa in position 5 is any or no amino acid
  Variant (7)..(8): Xaa in position 7 to 8 is any amino acid
  Variant (9)..(9): Xaa in position 9 is any or no amino acid
  Variant (13)..(13): Xaa in position 13 is Glu or Gln
  Variant (16)..(16): Xaa in position 16 is Leu or Met
GXXGXGXXXKMAXGFXK

SEQ ID NO: 133042 - DNA, 2178 bp, Arabidopsis thaliana
  CDS (1)..(2178)
atggagattaacggggcacacaagagcaacggaggaggagtggacgctatgttatgcggcggagacatcaagacaaagaacatggtgatcaacgcggaggatcctctcaactggggagctgcagcggagcaaatgaaaggtagccatttggatgaagtgaagagaatggttgctgagtttaggaagccagttgtgaatcttggtggtgagactctgaccattggacaagtggctgcgatctcaactattggtaacagtgtgaaggtggagctatcggagacagctagagccggtgtgaatgctagtagtgattgggttatggagagtatgaacaaaggcactgatagttatggtgttactactggttttggtgctacttctcatcggagaaccaaaaacggtgtcgcacttcagaaggaacttattagattccttaacgccggaatattcggaagcacgaaagaaacaagccacacattgccacactccgccacaagagccgccatgcttgtacgaatcaacactctcctccaaggattttccggtatccgatttgagattctcgaagcaattaccagtttcctcaacaacaacatcactccatctctccccctccgtggtacaatcaccgcctccggagatctcgttcctctctcctacatcgccggacttctcaccggtcgtcccaattccaaagctactggtcccaacggtgaagctttaacagcagaggaagctttcaaattagcaggaatcagctccggattctttgatctccagcctaaggaaggtctcgcgctagtcaatggcacggcggttggatctggaatggcgtcaatggtgttattcgaaacgaatgttctctctgttttggctgagattttgtcggcggttttcgcagaggtgatgagtggtaagcctgagttcaccgatcatctcactcacagacttaaacatcatcccggtcaaatcgaagcggcggcgataatggagcatatcctcgacggaagctcgtacatgaaattagctcagaagcttcacgagatggatccgttacagaaacctaaacaagatcgttacgctcttcgtacttctcctcaatggttaggtcctcaaatcgaagtgatccgttacgcaacgaaatcgatcgagcgtgagattaactccgtcaacgataatccgttgatcgatgtttcgaggaacaaggcgattcacggtggtaacttccaaggaacaccaatcggagtttcaatggataacacgagattggcgatagcagcgattggtaaactcatgtttgctcaattctcagagcttgtgaatgatttctacaacaatggtttaccctcgaatctaaccgcttcgaggaatccaagtttggattatggattcaagggagctgagattgcaatggcttcttattgttcagagcttcaatacttagctaatcctgtgactagccatgttcaatcagcagagcaacataaccaagatgtcaactctttgggactaatctcgtctcgcaaaacttctgaagctgttgatattctcaagcttatgtcaacaacgttcctcgttgcgatttgtcaagctgtggatttgagacatttggaggagaatttgagacagactgtgaagaacactgtctctcaagtggcgaagaaagttcttactactggagtcaatggtgagcttcatccttctcgcttctgcgaaaaggatttactcaaagttgtagaccgtgaacaagtctacacatacgcggatgatccttgtagcgcaacgtacccgttgattcagaagctgagacaagttattgttgaccatgctttgatcaatggtgagagtgagaagaatgcagtgacttcaatcttccataagattggagctttcgaggaggagcttaaggcagtgctaccgaaagaagtggaagcagcaagagcagcctacgataacggaacatcggctatcccgaacaggatcaaggaatgtaggtcgtatccattgtatagattcgtgagggaagagcttggaacagagcttttgaccggagagaaagtgacgtcgcctggagaagagttcgacaaggttttcacggcgatttgtgaaggtaaaatcattgatccgatgatggaatgtctcaacgagtggaacggagctcccattccaatatgttaa

SEQ ID NO: 133043 - protein, 725 aa, Arabidopsis thaliana
MEINGAHKSNGGGVDAMLCGGDIKTKNMVINAEDPLNWGAAAEQMKGSHLDEVKRMVAEFRKPVVNLGGETLTIGQVAAISTIGNSVKVELSETARAGVNASSDWVMESMNKGTDSYGVTTGFGATSHRRTKNGVALQKELIRFLNAGIFGSTKETSHTLPHSATRAAMLVRINTLLQGFSGIRFEILEAITSFLNNNITPSLPLRGTITASGDLVPLSYIAGLLTGRPNSKATGPNGEALTAEEAFKLAGISSGFFDLQPKEGLALVNGTAVGSGMASMVLFETNVLSVLAEILSAVFAEVMSGKPEFTDHLTHRLKHHPGQIEAAAIMEHILDGSSYMKLAQKLHEMDPLQKPKQDRYALRTSPQWLGPQIEVIRYATKSIEREINSVNDNPLIDVSRNKAIHGGNFQGTPIGVSMDNTRLAIAAIGKLMFAQFSELVNDFYNNGLPSNLTASRNPSLDYGFKGAEIAMASYCSELQYLANPVTSHVQSAEQHNQDVNSLGLISSRKTSEAVDILKLMSTTFLVAICQAVDLRHLEENLRQTVKNTVSQVAKKVLTTGVNGELHPSRFCEKDLLKVVDREQVYTYADDPCSATYPLIQKLRQVIVDHALINGESEKNAVTSIFHKIGAFEEELKAVLPKEVEAARAAYDNGTSAIPNRIKECRSYPLYRFVREELGTELLTGEKVTSPGEEFDKVFTAICEGKIIDPMMECLNEWNGAPIPIC

SEQ ID NO: 133044 - DNA, 2211 bp, Oryza sativa (japonica cultivar-group)
  CDS (1)..(2211)
atgggccagcggcaggtttcggcccaaatcatcacgagggaggaagagccacacatcccactaactgcaatggcgtgcgagaacggtcaggttgctgccgatggcatcaacggcctctgcatggcggcgccccgcgccgacccgctgaactgggggaaggcggcggaggagatgtcggggagccacctcgacgaggtgaagcgcatggtggccgagtaccgccagccgctggtaaagatcgagggcgccagcctgaggatcgcgcaggtcgccgcggtggccgcggccggcgaggccagggtcgagctcgacgagtcggcccgcgagcgcgtcaaggccagcagcgactgggtgatgaacagcatgatgaacggcacggacagctacggtgtcaccaccggcttcggcgccacgtcccacaggaggaccaaggaaggtggtgccctgcaaagagagctcatcaggttcctcaatgccggcgccttcggcacgggcacggacggccacgtcctgtccgccgaggccacgcgcgcggcgatgctcgtccgcatcaacactctcctccagggctactcaggcatccgcttcgagatcctcgaggcgattaccaagctgctcaatgccaacgtcacgccatgcctgccactcaggggcacggttaccgcgtccggcgacctggtcccgctctcctacattgccggcttggtcaccggccgcgagaactctgtcgcggtcgctcctgatggcagcaaggtgaacgccgctgaggcgtttaagattgctggcatccaaggtggcttcttcgagttgcagcccaaggaaggtctcgccatggtgaatggcactgccgtcggctctggacttgcctccacggtgctctttgaggcgaacattcttgctgtccttgccgaggtcctgtccgccgtgttctgcgaggtgatgaacggcaagccggagtacaccgaccacctgacacacaagctgaagcaccaccctggacagatcgaggctgctgccatcatggagcacatcttggaaggcagctcgtacatgaagctggcgaagaagctcggtgagctcgacccgttgatgaagccgaagcaagaccggtacgcgctccgcacgtcgccgcaatggcttggccctcagatcgaagttattcgtgcggccaccaagtccattgagcgcgagatcaactctgtcaatgacaacccactcattgatgtctcccgcgacaaggcgcttcatggtggtaacttccagggcactcccatcggtgtgtccatggacaacactcgcctcgcaattgctgccatcggcaagctcatgttcgcgcagttctcagagcttgtgaacgactactacaacaacggccttccctccaacctgtccggcgggcgcaacccgagcttggattacggcttcaagggcgccgagatcgccatggcttcgtactgctccgagttgcagttcttgggcaacccagtgaccaaccacgtccagagcgcggagcagcacaaccaggacgtcaactccctcggcctcatctcctccaggaagacagccgaggccgtcgaaatcctgaagctcatgtcctccacgttcttggtcgccctgtgccaggccatcgacctgcggcaaatcgaggagaacgtcaagagcgccgtcaagagctgcgtcatgacagtggccaggaagactctgagcacgagcgccaccggcggtctccacgccgctcgcttctgcgagaaggatcttctccaggagatcgaccgcgaagccgtgttcgcgtacgccgacgacccgtgcagcgccaactacccgctgatgaagaagctccggaacgtgcttgtggagcgcgccctcgccaacggcgcggccgagttcaacgccgagacctcggtgttcgccaaggtcgcccagttcgaggaggagctccgcgcggcgctgccagcggcggtgttggccgcacgggcagctgtggagaacggcacggcggcaacgcccaacagaatcaccgagtgccgctcctacccactgtaccggtttgtgcgcgaggagctcggaaccgcgtacctcaccggcgagaagacgcggtcgcccggcgaggagctgaacaaggtgctcgtcgccatcaaccaaggcaagcacattgatccgctgcttgagtgtctcaaggagtggaacggcgcgcccctgcccatctgctaa

SEQ ID NO: 133045 - protein, 736 aa, Oryza sativa (japonica cultivar-group)
MGQRQVSAQIITREEEPHIPLTAMACENGQVAADGINGLCMAAPRADPLNWGKAAEEMSGSHLDEVKRMVAEYRQPLVKIEGASLRIAQVAAVAAAGEARVELDESARERVKASSDWVMNSMMNGTDSYGVTTGFGATSHRRTKEGGALQRELIRFLNAGAFGTGTDGHVLSAEATRAAMLVRINTLLQGYSGIRFEILEAITKLLNANVTPCLPLRGTVTASGDLVPLSYIAGLVTGRENSVAVAPDGSKVNAAEAFKIAGIQGGFFELQPKEGLAMVNGTAVGSGLASTVLFEANILAVLAEVLSAVFCEVMNGKPEYTDHLTHKLKHHPGQIEAAAIMEHILEGSSYMKLAKKLGELDPLMKPKQDRYALRTSPQWLGPQIEVIRAATKSIEREINSVNDNPLIDVSRDKALHGGNFQGTPIGVSMDNTRLAIAAIGKLMFAQFSELVNDYYNNGLPSNLSGGRNPSLDYGFKGAEIAMASYCSELQFLGNPVTNHVQSAEQHNQDVNSLGLISSRKTAEAVEILKLMSSTFLVALCQAIDLRQIEENVKSAVKSCVMTVARKTLSTSATGGLHAARFCEKDLLQEIDREAVFAYADDPCSANYPLMKKLRNVLVERALANGAAEFNAETSVFAKVAQFEEELRAALPAAVLAARAAVENGTAATPNRITECRSYPLYRFVREELGTAYLTGEKTRSPGEELNKVLVAINQGKHIDPLLECLKEWNGAPLPIC

SEQ ID NO: 133046 - DNA, 1704 bp, Anabaena variabilis ATCC 29413
  CDS (1)..(1704): transl_table=11
atgaagacactatctcaagcacaaagcaaaacctcatctcaacaattttcttttactggaaattcttctgccaatgtaattattggtaatcagaaactcacaatcaatgatgttgcaagggtagcgcgtaatggcaccttagtgtctttaaccaataacactgatattttgcagggtattcaggcatcttgtgattacattaataatgctgttgaatctggggaaccaatttatggagtgacatctggttttggcggtatggccaatgttgccatatcccgtgaacaagcatctgaactccaaaccaacttagtttggttcctgaaaacaggtgcagggaacaaattacccttggcggatgtgcgcgcagctatgctcttgcgtgcaaactctcatatgcgcggtgcatctggcatcagattagaacttatcaagcgtatggagattttccttaacgctggtgtcacaccatatgtgtatgagtttggttcaattggtgcaagtggtgatttagtgccactatcctacattactggttcactgataggcttagatcccagttttaaggttgacttcaacggtaaagaaatggatgcgccaacagctctacgtcaactgaatttgtcacccttgacattgttgccgaaggaaggcttggcgatgatgaacggcacttcagtcatgacaggtattgcagcaaactgcgtctacgatactcaaattttaactgcgatcgctatgggcgttcacgctctagatatccaagctttaaacggaaccaatcaatcattccatccatttatccataattccaaaccacatcctggtcaattatgggcagcagatcagatgatttctttgttagccaattcccagttagttcgtgatgagttagatggtaaacacgattatcgtgatcacgagttgattcaagatcgttactcactccgatgccttccccagtatttggggccaatcgttgatggaatttcccagattgccaaacaaattgaaatcgaaatcaactcagtcaccgataacccactaattgatgttgataaccaagctagctatcatggaggaaatttcctcggacagtacgtgggtatgggaatggatcacctgcgttactatattgggttattggctaaacacctagatgtgcagattgccctcctcgcctcaccagagtttagcaatggactaccaccatctttattaggcaaccgagaacgtaaagtcaatatgggactcaaaggtctgcaaatatgcggtaactcaattatgccactgttgaccttctatggaaattccatcgccgatcgctttcctacccatgcagaacaatttaatcagaacatcaacagtcaaggatacacttcagcgactctagcccgccgttctgtggatatcttccagaattatgtggcgatcgctctgatgtttggagtccaagctgttgacctccgcacatataaaaagactggtcattacgatgcacgcgcctgtctatcacctgcaactgagcgcttatattcagcagtccgccacgtagttggacaaaaaccaacttcagatcgcccatatatttggaatgataatgagcaaggactggatgagcatattgcccggatttctgctgatatcgctgctggtggtgtgattgtgcaagcagttcaagatatcttaccctgcttgcattaa

SEQ ID NO: 133047 - protein, 567 aa, Anabaena variabilis ATCC 29413
MKTLSQAQSKTSSQQFSFTGNSSANVIIGNQKLTINDVARVARNGTLVSLTNNTDILQGIQASCDYINNAVESGEPIYGVTSGFGGMANVAISREQASELQTNLVWFLKTGAGNKLPLADVRAAMLLRANSHMRGASGIRLELIKRMEIFLNAGVTPYVYEFGSIGASGDLVPLSYITGSLIGLDPSFKVDFNGKEMDAPTALRQLNLSPLTLLPKEGLAMMNGTSVMTGIAANCVYDTQILTAIAMGVHALDIQALNGTNQSFHPFIHNSKPHPGQLWAADQMISLLANSQLVRDELDGKHDYRDHELIQDRYSLRCLPQYLGPIVDGISQIAKQIEIEINSVTDNPLIDVDNQASYHGGNFLGQYVGMGMDHLRYYIGLLAKHLDVQIALLASPEFSNGLPPSLLGNRERKVNMGLKGLQICGNSIMPLLTFYGNSIADRFPTHAEQFNQNINSQGYTSATLARRSVDIFQNYVAIALMFGVQAVDLRTYKKTGHYDARACLSPATERLYSAVRHVVGQKPTSDRPYIWNDNEQGLDEHIARISADIAAGGVIVQAVQDILPCLH

SEQ ID NO: 133048 - DNA, 1710 bp, Nostoc punctiforme PCC 73102
  CDS (1)..(1710): transl_table=11
atgaatataacatctctacaacagaacataacgcgttcttggcaaatacctttcactaatagttcagattcaatcgtaactgtaggcgatcgcaatctgacaatcgacgaggttgtaaatgttgctcgtcatggaacacaggtgcgcttaactgataatgcagatgtcattcggggtgttcaagcatcttgtgattacattaacaatgcagtcgaaacagcacagccaatttacggggtgacatctggctttggcggtatggcagatgttgtcatctctcgcgaacaagcagcggaacttcagactaatttaatttggtttctgaaatccggcgcaggaaacaaattatcgttagcagacgtgcgtgcagctatgctcttacgtgcaaattcacatttgtatggtgcgtctggtatacgactcgaacttattcagcggattgaaactttcctcaacgctggcgtgacaccccatgtctatgagtttggctctatcggtgctagcggcgatttggtgccattatcctacattactggggcactaatcggtctagatcctagctttacagttgacttcgacggtaaagaaatggatgccgttacagccttgtctcgtttgggtttgccaaagttgcaattgcaaccgaaagaaggtttagcaatgatgaatggcacctcagtcatgacaggtattgcagctaactgtgtgtacgatgcgaaagttttgctcgctctgacaatgggtgtacacgccttagccatccaaggtttatacggaacgaatcaatctttccacccgtttattcatcagtgcaagccacatcccggtcaactatggacagcagatcaaatgttttctctgctgaaagattcatctttagttcgtgaagagttggatggtaaacacgaataccgtggtaaagatctgatacaggatcgttattctctccgctgtctggcacagttcatagggccaatcgttgatggggtatcagagattaccaagcaaatcgaggtagaaatgaactcagtcaccgataacccattgattgatgtcgagaaccaagttagttatcacggcggcaattttctcggacagtatgtgggtgtgacaatggatcgcctacgttattacatagggctattggccaaacacatcgatgtgcagattgcacttcttgtctcgccagagtttagcaacggcttaccaccctctttagttggtaatagcgatcgcaaagttaatatgggactcaaaggtttgcaaatcagtggaaactcgattatgccactgttgagcttctatggaaattccctagccgatcgctttcctacccacgccgagcaatttaatcaaaatattaacagccaaggctatatttccgcaaatttgacacgtcgttccgtagacatatttcagaattatatggcgatcgcgttgatgtttggagttcaagctgttgacctccgcacatataagatgaaaggtcattatgatgcacgtacatgcctctcacccaatactgtgcagttatacacagcagtctgcgaggtagttggaaagccactaacgtctgtgcgtccatacatttggaacgacaacgagcaatgtttagatgagcatattgcccggatttcagctgatatcgctggtggtggtttaattgtgcaagcagttgagcatattttttcgagcttaaagtcaacgtaa

SEQ ID NO: 133049 - protein, 569 aa, Nostoc punctiforme PCC 73102
MNITSLQQNITRSWQIPFTNSSDSIVTVGDRNLTIDEVVNVARHGTQVRLTDNADVIRGVQASCDYINNAVETAQPIYGVTSGFGGMADVVISREQAAELQTNLIWFLKSGAGNKLSLADVRAAMLLRANSHLYGASGIRLELIQRIETFLNAGVTPHVYEFGSIGASGDLVPLSYITGALIGLDPSFTVDFDGKEMDAVTALSRLGLPKLQLQPKEGLAMMNGTSVMTGIAANCVYDAKVLLALTMGVHALAIQGLYGTNQSFHPFIHQCKPHPGQLWTADQMFSLLKDSSLVREELDGKHEYRGKDLIQDRYSLRCLAQFIGPIVDGVSEITKQIEVEMNSVTDNPLIDVENQVSYHGGNFLGQYVGVTMDRLRYYIGLLAKHIDVQIALLVSPEFSNGLPPSLVGNSDRKVNMGLKGLQISGNSIMPLLSFYGNSLADRFPTHAEQFNQNINSQGYISANLTRRSVDIFQNYMAIALMFGVQAVDLRTYKMKGHYDARTCLSPNTVQLYTAVCEVVGKPLTSVRPYIWNDNEQCLDEHIARISADIAGGGLIVQAVEHIFSSLKST

SEQ ID NO: 133050 - DNA, 2163 bp, Pyrus communis
  CDS (1)..(2163)
atggaggcggagaccatcacgcaaaatgggaaaaacggccaccaccagaacggtgctgtggagtccccgctttgcattaaaaaggacccgttgaactggggtctagcggcggattcactaaaagggagccacttggatgaagtgaagcgtatggtggcggagtacagaaagccggtggtgaagctcggcggagagagcctcaccatttcccaagttgcagccatagccactcatgacaccggggtcaaggttgagctgtctgagtcggccagggctggggtcaaggccagcagtgattgggtcatggatagcatgggcaaagggactgacagctacggtgtcaccaccgggtttggtgcaacctcccaccggagaacaaacaaaggagctgcccttcaaaaggagctaattagattcttgaacgctggagtgtttggaagtgctacagaatcaggccacacactgccacaccaagcaacaagagcagccatgttggtccgaatcaacacactcctccaaggctactccggcataagattcgaaatcttggaagccatcaccaagttcctgaacaacaacgttactccatgcttgcccctacgcggtactattaccgcctctggagatcttgtcccgctatcctacattgccggattactcaccggcaggcctaattccaaagcagtcggaccaaatgggcagaccctcaatgcctcagaagcctttgagctagtagggatcaattgcgggttttttgagttgcagcctaaagaagggttagctcttgtgaacggcactgctgttggttctggcttggcctccacggttcttttcgagaccaacattttggcgttgctagcggagattttatcagcgattttcgctgaagtgatgcacgggaagccggagtttactgatcacttgacgcacaagttgaagcaccaccctggacagattgaggcagctgcaattatggaacatattttggatggcagctcttatgtgaaagctgctaagaagttgcatgagcaggatcccctgcagaagccaaagcaggatcgctacgctctccgaacatcacctcagtggctaggacctcaaattgaagtgattcgttactccaccaaatccattgagagggaaatcaactcagttaatgacaaccctttgatcgatgtttcgaggaacaaggccttgcacggaggcaacttccaggggacaccaattggagtttccatggacaacactcgcttggcgattgcctccattgggaagctcatgtttgcgcaattttccgagcttgccaatgacttttacaacaatggtttgccttcaaatctgtccggaggcaggaatcctagcttggattacggtttcaagggggctgaaatcgccatggcatcttattgttccgagctgcagtttctcgcaaatccggttactaaccatgtccagagtgctgagcagcacaaccaagatgttaactctttggggttgatctcttcaagaaagacagctgaggcggttgatatcttgaagctcatgtcttctacatttttggttgcgctttgtcagtccgtcgatttgaggcatttggaggagaacttgaggaacactgtaaagaacacggtgagccaagtcgccaagaggactttaacaactggggtaaatggggagcttcacccctcaagattctgcgagaaggatctgctcaaagttgtcgatagggagtatgttttcgcctacattgatgacccctgcagcgccacttatccattgatgcaaaaactgaggcaagtgcttgttgagcatgctttgacaaatggcgagagtgagaagaatgcaagcacttcgatcttccaaaagattggagctttcgaggaagagctgaaaacgcttttgcctaaagaggtggagagtgcaaggagtgcaattgagagcggaaatgctgcagttccaaacaggattgcggaatgcaggtcctatcccttgtacaaatttgtgagggaggagttgggaggagagtacctgaccggggagaaggtcaggtcaccgggcgaggagtgtgacagggtgttccaagctatctgccagggaaagattatcgacccgattctaggttgcctcgagggttggaacggcgcacctcttcctatctgttag

SEQ ID NO: 133051 - protein, 720 aa, Pyrus communis
MEAETITQNGKNGHHQNGAVESPLCIKKDPLNWGLAADSLKGSHLDEVKRMVAEYRKPVVKLGGESLTISQVAAIATHDTGVKVELSESARAGVKASSDWVMDSMGKGTDSYGVTTGFGATSHRRTNKGAALQKELIRFLNAGVFGSATESGHTLPHQATRAAMLVRINTLLQGYSGIRFEILEAITKFLNNNVTPCLPLRGTITASGDLVPLSYIAGLLTGRPNSKAVGPNGQTLNASEAFELVGINCGFFELQPKEGLALVNGTAVGSGLASTVLFETNILALLAEILSAIFAEVMHGKPEFTDHLTHKLKHHPGQIEAAAIMEHILDGSSYVKAAKKLHEQDPLQKPKQDRYALRTSPQWLGPQIEVIRYSTKSIEREINSVNDNPLIDVSRNKALHGGNFQGTPIGVSMDNTRLAIASIGKLMFAQFSELANDFYNNGLPSNLSGGRNPSLDYGFKGAEIAMASYCSELQFLANPVTNHVQSAEQHNQDVNSLGLISSRKTAEAVDILKLMSSTFLVALCQSVDLRHLEENLRNTVKNTVSQVAKRTLTTGVNGELHPSRFCEKDLLKVVDREYVFAYIDDPCSATYPLMQKLRQVLVEHALTNGESEKNASTSIFQKIGAFEEELKTLLPKEVESARSAIESGNAAVPNRIAECRSYPLYKFVREELGGEYLTGEKVRSPGEECDRVFQAICQGKIIDPILGCLEGWNGAPLPIC

SEQ ID NO: 133052 - DNA, 2154 bp, Lotus japonicus
  CDS (1)..(2154)
atggcaccaaccaccaacagcaaccacgagagcctaaatagttccatcttctgcactgctgctaaagcaggcagtgatcccttgagttggggtgtagcagcagattcgatgaaggggagccacctggatgaggtcaagcgcatggtggctgagtacaggaagcctgtggtcaagctaggcggggaaactctgacaatagctcaggtagctgccattgcagcaaacgaccaaggcgtaagcgttgagctgtgcgaatcagctagagctggcgttaaggcgagcagtgactgggtcatgaacagcatgaacaatggcactgacagttacggtgtcaccaccggcttcggcgccacctcccaccgtagaaccaaaaatggcaatgctttgcagctagaactcatcaggtttttgaatgctggaatatttggcaatggaactgagacaagtcacacactaccacagcctgcaactagagcagccatgctagtgaggatcaacacacttctccagggatactcaggcattaggtttgaaatccttgaagccatcaccaagctcatcaacaacaacatcaccccatgtttaccacttcgtgggactgtcacggcttctggtgatttggtccctctttcttacattgccggtttgcttactgggagacaaaactccaaagctgttggaccatccggcgaggtggttaatgccaaggaagctttccaattggctggcatagacacagggttctttgaattgcagcccaaggaagggcttgcccttgtgaatggtactgctgttggatcagggttagcttctattgttctatttgatgctaacgtattggctattctggctgaagttctatcagctattttcgccgaagtgatgcaagggaaacctgaattcactgaccatttgacacataagttgaagcaccaccctggccaaattgaggcggcagctatcatggaacacattttggatggaagttcctacatgaaagcagcaaagaagttgcacgaggtggatcctttgcaaaagccaaaacaagatcgatatgcacttagaacttcacctcagtggcttggccctctgattgaagtgattcgattctcaacaaagtcgatcgaaagagagattaactccgtgaatgacaaccctttgattgatgtttccagaaacaaggccttgcacggtggtaattttcaaggaacccctattggagtgtccatggacaacacacgtctggctcttgcagcaattggaaaactcatgtttgctcagttcactgagcttgtggatgatcattacaacaatggcttaccttcaaatctcactgctagtagaaatcccagcttggattatggtctaaagggagctgaaattgccatggcttcttattgctctgaactccaataccttgcaaatcctgtcacaacccatgtccaaagtgctgagcaacacaaccaagatgtgaactctttgggtttgatttcttctagaaaaaccaatgaggctattgagatccttaagctcatgtcttccacattcttgattgctctctgccaagcaattgacttgaggcatttggaggagaacttgaaacactcggtgaagagcactgtaagtcaagttgccaagaggactcttaccacaagtgtcaatggagaactccatccttccagattttgtgaaaaagatttgctgaaggtggttgatagggaaactctatttgcctatattgatgatccatgcagtgctacatacccattgatgcaaaaactaaggcaagttcttgtggatcatgcattagtaaatggagaaaacgagaagaactcgaagacatcaatctttcaaaagattgcaacttttgaggatgagttgaagagtctcttgccaaaggaggttgaaagtgcaagggctgcatatgagagtggaaatccaacaattccaaacaagatcaatgaatgcagatcttacccgctgtacaagtttgtgagagaggagttgggaaccgagttgctaaccggtgaaaagaccagatcaccaggcgaggagtgtgacaagttgttcacagcaatatgccagggtaaaattattgatcctcttttggaatgccttggggagtggaacggtgcccctcttccaatttgttaa

SEQ ID NO: 133053 - protein, 717 aa, Lotus japonicus
MAPTTNSNHESLNSSIFCTAAKAGSDPLSWGVAADSMKGSHLDEVKRMVAEYRKPVVKLGGETLTIAQVAAIAANDQGVSVELCESARAGVKASSDWVMNSMNNGTDSYGVTTGFGATSHRRTKNGNALQLELIRFLNAGIFGNGTETSHTLPQPATRAAMLVRINTLLQGYSGIRFEILEAITKLINNNITPCLPLRGTVTASGDLVPLSYIAGLLTGRQNSKAVGPSGEVVNAKEAFQLAGIDTGFFELQPKEGLALVNGTAVGSGLASIVLFDANVLAILAEVLSAIFAEVMQGKPEFTDHLTHKLKHHPGQIEAAAIMEHILDGSSYMKAAKKLHEVDPLQKPKQDRYALRTSPQWLGPLIEVIRFSTKSIEREINSVNDNPLIDVSRNKALHGGNFQGTPIGVSMDNTRLALAAIGKLMFAQFTELVDDHYNNGLPSNLTASRNPSLDYGLKGAEIAMASYCSELQYLANPVTTHVQSAEQHNQDVNSLGLISSRKTNEAIEILKLMSSTFLIALCQAIDLRHLEENLKHSVKSTVSQVAKRTLTTSVNGELHPSRFCEKDLLKVVDRETLFAYIDDPCSATYPLMQKLRQVLVDHALVNGENEKNSKTSIFQKIATFEDELKSLLPKEVESARAAYESGNPTIPNKINECRSYPLYKFVREELGTELLTGEKTRSPGEECDKLFTAICQGKIIDPLLECLGEWNGAPLPIC

SEQ ID NO: 133054 - DNA, 2067 bp, Lotus japonicus
  CDS (1)..(2067)
atggcagcagagtcaatgaaggggagccaccttgacgaggtcaagcgcatggtggcagagtaccggaagccggtggtccggctgggcggagagacgctgaccatagctcaggtggctgctgttgcagcacatgaccagcaccatggtgtgagcgttgagctgtgcgagtccgctagagctggcgttaaggcgagcagtgactgggtgatgaatagcatgaacaatggaactgacagttacggcgtcaccaccggttttggcgccacctcccatcgcagaaccaatcaaggcaatgctttgcagcaagaactcatcaggtttttgaatgccggaatatttggcaatggtaccgagtcaagccacacgctgccacaacctgcaactagagcagcaatgctggtgaggatcaacactcttctccaaggttactcaggaattagatttgaaatcctagaagccatcaccaagctgcttaacaacagcatcacaccatgtttaccgcttcgtggtaccgtcacagcttctggtgatctggtccctctttcttacattgctggcttgcttactggccgacaaaactccaaagccgttggaccttctggagaggtacttaatgccaaggaagctttccaattggctagcatcgactcggggttctttgaattgcagcctaaggaagggcttgcccttgttaatggcactgctgttggttctgggttagcttctattgttctctttgaggctaacatattggctatactggctgaagttctatcagctatttttgccgaagtgatgcaagggaaacctgaatttaccgaccatttgacacataagctaaagcaccaccctggacaaattgaggctgctgcaatcatggagcacattttggatggaagttcctacatgaaagcagcaaagaagttgcacgaggtggatcccttgcaaaagccaaaacaagatcgatatgcgcttagaacttcacctcagtggcttggtcctcttatcgaagtgattcgattctcaacaaagtcaattgagagagagattaactctgtgaatgacaaccctttgattgatgtttccagaaacaaggccttacatggtggtaatttccaaggaaccccaataggagtttccatggacaacacacgtctagctcttgcatcaattggcaaacttatgtttgctcagttcactgagcttgtggatgatcattacaacaatgggttgccttcaaatctcactgctagtagaaatcctagtttggattatggtctcaagggagcagaaattgccatggcttcttattgctctgagctccaatatcttgccaatccagtcacaacccatgtccaaagtgctgagcagcacaaccaagatgtaaactccttgggtttgatttcttctagaaaaacatatgaagccattgagatccttaagctcatgtcttccacattcttgattgcactttgccaagcaattgacttgaggcatttggaggagaacttgaaatactcggtgaagaacactgtaagtcaggttgccaagaggactcttaccacaggtgtcaatggagaactccatccttcaaggttttgtgaaaaagatttgctgaaagtggttgatagagagactgtatttgcctatattgatgacccctgcagtgctacatatccattgatgcaaaaactaaggcaagtgcttgtggatcatgcattagtaaatgaagaaaacgagaagaacatgaacacgtcaatctttcaaaagattgcaacttttgaggatgagttaaagagtctcttgccaaaggaggtcgaaagtgcaagggctgcatatgagagtggcaatccagcaattccaaacaagatcaatgaatgtagatcttacccgctgtacaagtttgtgagggaggggttgggaactgagttgctaaccggagaaaaggtccggtcaccgggtgaggagtgtgacaaactgttcacagcaatatgtgagggtaaaatcattgatcctcttctggaatgccttggggagtggaacggtgcccctcttccgatttgttaa

SEQ ID NO: 133055 - protein, 688 aa, Lotus japonicus
MAAESMKGSHLDEVKRMVAEYRKPVVRLGGETLTIAQVAAVAAHDQHHGVSVELCESARAGVKASSDWVMNSMNNGTDSYGVTTGFGATSHRRTNQGNALQQELIRFLNAGIFGNGTESSHTLPQPATRAAMLVRINTLLQGYSGIRFEILEAITKLLNNSITPCLPLRGTVTASGDLVPLSYIAGLLTGRQNSKAVGPSGEVLNAKEAFQLASIDSGFFELQPKEGLALVNGTAVGSGLASIVLFEANILAILAEVLSAIFAEVMQGKPEFTDHLTHKLKHHPGQIEAAAIMEHILDGSSYMKAAKKLHEVDPLQKPKQDRYALRTSPQWLGPLIEVIRFSTKSIEREINSVNDNPLIDVSRNKALHGGNFQGTPIGVSMDNTRLALASIGKLMFAQFTELVDDHYNNGLPSNLTASRNPSLDYGLKGAEIAMASYCSELQYLANPVTTHVQSAEQHNQDVNSLGLISSRKTYEAIEILKLMSSTFLIALCQAIDLRHLEENLKYSVKNTVSQVAKRTLTTGVNGELHPSRFCEKDLLKVVDRETVFAYIDDPCSATYPLMQKLRQVLVDHALVNEENEKNMNTSIFQKIATFEDELKSLLPKEVESARAAYESGNPAIPNKINECRSYPLYKFVREGLGTELLTGEKVRSPGEECDKLFTAICEGKIIDPLLECLGEWNGAPLPIC

SEQ ID NO: 133056 - DNA, 2199 bp, Lotus japonicus
  CDS (1)..(2199)
atggctgctgcaacaacaatcattaccaatggcaacggccacggccaccacgatgacgccgccttttgtgtcaacaacggtgttggactaggagtaggacctactactcctcatcatgaccctctcaactggggggctgcggcggaggcgatgaagggtagccaccttgatgaagtgaagcgtatggtggaggagtaccggaagccggtggtccgtctcggtggtgagactttgacgatcgctcaggtggctgctgtggcggctcatgaccagggtgctgtgacggtggagctctcggagtcgtcgagggctggggtggaggctagtaggaactgggtgagggatagtatgaataaagggactgatagctatggtgtcaccaccgggtttggtgccacctctcaccgccggactaagcagggtggtgccttgcagaaggagcttattaggttcttgaatgctggaatatttggcaatggaacagaatccaattgcacactaccacacacagcaacaagagcagccatgcttgttagaatcaatactcttcttcaaggctactcaggtatccggtttgagattttggaagccataaccaagctcataaacagcaacgttgctccatgcttgcctcttcgcggcacaatcacagcttccggtgatcttgttccactttcatacattgccggtttgctaaccggccgaccgaactccaaggctgtcggcccctccggcgagattcttactgccaaggaagcctttgaactggccaacattggtcatgatttctttgaattggagcccaaggaaggccttgcacttgttaacggtaccgcggttggttctggcttggctgctattgttctctttgaggccaacatacttgctgtcttgtctgagcttatttcagcgattttcgctgaagttatgctcggcaaaccggagtttaccgaccatttgactcataagttaaagcaccacccggggcaaattgaggctgcagctatcatggaacacattttggatggcagctcttacataaaagcagctaagaagttgcatgaggtggatcctttgcaaaagcctaaacaagataggtatgcgcttagaacttcaccccaatggcttggtcctcttattgaagtgattcgattctcaaccaagtccattgagagagagttgaactcagtcaacgacaaccctttgattgatgtctctagaaacaaggccttgcatggtggtaactttcaaggaacccccattggagtttcaatggacaacacacgtttggctcttgcatctattggtaaactcctgtttgctcaattctctgagcttgttaatgatttttacaacaatgggttgccttcaaatctttatggtagtagaaaccccagcttggattatggtttcaagggagctgaaattgccatggcgtcttattgctctgaactccaatatcttgcaaacccggtgacaacccatgttcagagcgctgagcagcataaccaagatgtgaactcattgggtttgatttcgtctaggaaaacaaatgaggctattgagatcctcaagctcatgtcgtccacgttcttggtcgcgctttgccaagcaattgacttgaggcatttggaggagaatttgaagcacactgtcaagaacactgttaaccaagttgctaagaggacactcacaactggtgtcaatggggagcttcatccatcaaggttctgtgagaaagatttgctgacagttgttgatagggaggatgtttttgcctacattgatgacccttgcagcggcacatacccattgatgcagaaactgagacaatcactagtggatcatgcattggaaaatgcagatgctgagaagaacgtgaacacatccatctttcaaaagattgctatctttgaggatgaattgaaggctatcttgcctaaggaggttgaaagtgccagggttgcatatgacaatggcgaaagcgcgatcccaaacaagatcaaggaatgcaggtcttacccgttgtacaagtttgtgagagaagagttgggaactgggttgctgaccggagaaaaggttaagtcaccaggggaggactttgacaaactgttcacagcaatgtgccaaggtaaaatcattgatcctatcttggaatgccttggggaatggaatggtgctcctcttccaatttgttag

SEQ ID NO: 133057 - protein, 732 aa, Lotus japonicus
MAAATTIITNGNGHGHHDDAAFCVNNGVGLGVGPTTPHHDPLNWGAAAEAMKGSHLDEVKRMVEEYRKPVVRLGGETLTIAQVAAVAAHDQGAVTVELSESSRAGVEASRNWVRDSMNKGTDSYGVTTGFGATSHRRTKQGGALQKELIRFLNAGIFGNGTESNCTLPHTATRAAMLVRINTLLQGYSGIRFEILEAITKLINSNVAPCLPLRGTITASGDLVPLSYIAGLLTGRPNSKAVGPSGEILTAKEAFELANIGHDFFELEPKEGLALVNGTAVGSGLAAIVLFEANILAVLSELISAIFAEVMLGKPEFTDHLTHKLKHHPGQIEAAAIMEHILDGSSYIKAAKKLHEVDPLQKPKQDRYALRTSPQWLGPLIEVIRFSTKSIERELNSVNDNPLIDVSRNKALHGGNFQGTPIGVSMDNTRLALASIGKLLFAQFSELVNDFYNNGLPSNLYGSRNPSLDYGFKGAEIAMASYCSELQYLANPVTTHVQSAEQHNQDVNSLGLISSRKTNEAIEILKLMSSTFLVALCQAIDLRHLEENLKHTVKNTVNQVAKRTLTTGVNGELHPSRFCEKDLLTVVDREDVFAYIDDPCSGTYPLMQKLRQSLVDHALENADAEKNVNTSIFQKIAIFEDELKAILPKEVESARVAYDNGESAIPNKIKECRSYPLYKFVREELGTGLLTGEKVKSPGEDFDKLFTAMCQGKIIDPILECLGEWNGAPLPIC

SEQ ID NO: 133058 - DNA, 2169 bp, Brassica napus
  CDS (1)..(2169)
atggaggttaacggattatcacacggaggagaagtcgacgctatgttatgcggcggagagatcaagaagaatgccacggtggttggggctgatcctctcaactggggagctgcagcggagcaaatgaaagggagccatttggatgaggtgaagagaatggtgaaggagtttaggaggccagtggtgaatctcggaggcgagactctcacgatcggacaagtggcagcaatctcgacccttggaaacggtgtgaaggtggagttgtcggagacggcgagagccggtgtgaaagcgagtagtgattgggtgatggagagtatgggcaaaggaaccgatagttatggtgttactactggttttggtgctacttctcaccggagaaccaagaacggtgtcgctcttcagaaagagcttataagatttctgaacgccggaatattcggcagcacgaaggaaacatcccacacattaccacactccgccacaagagccgccatgctcgtacgcatcaacactctcctccaaggctactcaggcatacgtttcgagatcctcgaggccataacaagtttcctcaacaacaacatcactccttcactccctctccgcggcaccatcaccgcctccggagacctcgtccccctctcctacatcgccggactcttaaccggacgtcccaactccaaagccaccggtcccaacggcgaagccttgaacgcagaggaagccttcaaaatggcaggagtcacctccggcttcttcgacctccagcctaaagaaagcctcgctctagtcaacggcacggccgttggctccggcatggcgtcgatggttctcttcgaagccaacgtcctctcggtcctggccgaggttttatcagccgtcttcgccgaggtgatgagcgggaagccggagttcaccgatcatttgactcaccggctgaagcaccaccccgggcagatagaagccgcggctataatggaacacattctcgacgggagctcgtacatgaagctagctcagaagcttcacgagatggatccgttacaaaaacccaaacaagaccgttacgctctacgtacctctccccaatggctaggtcctcagatagaagtgatccgttacgcgaccaagtccatcgagcgtgagataaactccgtcaacgacaaccctttgatcgatgtctcgagaaataaagccattcacggtggtaacttccagggaacacccatcggtgtgtctatggacaacacacgtttagctatcgcggccatagggaagctcatgttcgctcagttctccgagctggtcaacgattattacaacaacggtcttccttcgaacctaaccgcttcgaggaaccctagtttggactacggtttcaaaggagcggagatcgcgatggcttcgtactgttcagagcttcagtacttggccaaccccgtgactagccatgttcaatcagcagagcaacacaaccaagacgtgaactctttaggactaatctcatctcgcaagacatcagaagctgtagacatactcaaactcatgtcgacaacgttccttgtcggaatctgccaagccatcgatctaagacacttggaggagaatctaaaacaaacggtcaagaacacagtctctcaagtcgccaagaaagttctcaccactggagtcaacggtgagcttcacccatcacgcttctgcgagaaagacctactcaaagtcgtcgaccgtgagcaagtctacacgtacgcggacgacccatgcagcgccacgtacccgttgatccagaagctgaggcaagtcatcgttgaccatgctttggtcaacggtgagagcgagaagaatgcaatgacttcgatcttccataagattggagccttcgaggaggagctcaaggcggtgctacctaaagaagtggaggcagctagagcggcgtatgataacggaacagctgcgataccgaacaggatcaaggagtgtaggtcgtatcctttgtataggtttgtgagggaggagcttggaacagagcttttgaccggagagaaagcgacgtcgcccggagaagagtttgataaggttttcacggcgatttgtgaagggaagattattgatccgttgatggagtgtctcgatgagtggaacggagctcccattcctatatgttaa

SEQ ID NO: 133059 - protein, 722 aa, Brassica napus
MEVNGLSHGGEVDAMLCGGEIKKNATVVGADPLNWGAAAEQMKGSHLDEVKRMVKEFRRPVVNLGGETLTIGQVAAISTLGNGVKVELSETARAGVKASSDWVMESMGKGTDSYGVTTGFGATSHRRTKNGVALQKELIRFLNAGIFGSTKETSHTLPHSATRAAMLVRINTLLQGYSGIRFEILEAITSFLNNNITPSLPLRGTITASGDLVPLSYIAGLLTGRPNSKATGPNGEALNAEEAFKMAGVTSGFFDLQPKESLALVNGTAVGSGMASMVLFEANVLSVLAEVLSAVFAEVMSGKPEFTDHLTHRLKHHPGQIEAAAIMEHILDGSSYMKLAQKLHEMDPLQKPKQDRYALRTSPQWLGPQIEVIRYATKSIEREINSVNDNPLIDVSRNKAIHGGNFQGTPIGVSMDNTRLAIAAIGKLMFAQFSELVNDYYNNGLPSNLTASRNPSLDYGFKGAEIAMASYCSELQYLANPVTSHVQSAEQHNQDVNSLGLISSRKTSEAVDILKLMSTTFLVGICQAIDLRHLEENLKQTVKNTVSQVAKKVLTTGVNGELHPSRFCEKDLLKVVDREQVYTYADDPCSATYPLIQKLRQVIVDHALVNGESEKNAMTSIFHKIGAFEEELKAVLPKEVEAARAAYDNGTAAIPNRIKECRSYPLYRFVREELGTELLTGEKATSPGEEFDKVFTAICEGKIIDPLMECLDEWNGAPIPIC

SEQ ID NO: 133060 - DNA, 2160 bp, Brassica napus
  CDS (1)..(2160)
atggagattaacggatcatcatacaaagtcgacgctatgttatgcggcggagagaccaagaatgtcacggtggctgcggcggatcctctgaactggggagctgcggcggatcaaatgaaagggagccatttggatgaagtgaagagaatggttatggagtttaggaagcctgtggtgaatctcggaggagagactctgacgatcgggcaagtagcagcgatctcgaccgttggaaatggtgtgaaggtggagctgttggagacggcaagagccggtgtgaaggcgagcagtgattgggtgatggagagtatgggcaaaggcactgatagttatggtgttacaactggttttggtgctacttctcatcgtagaaccaaaaatggcgtcgcacttcagaaggagcttataagattcctgaacgccggaatattcggcagcacgaaagaaacatgccacacactgccacactccgccacaagagctgccatgctcgtacgcataaacactctcctccaaggatactccggcatccgcttcgagatcctcgaggccataaccagcttcctcaacaccaacatcactccttccctccctctccgcggcaccatcaccgcctccggagacctcgtccccctctcctacatcgccggcctcctcaccggccgtcccaactccaaagccaccggtcccaacggcgaagccttgaacgcagaggaagccttcaagaaggccggaatcccctctgggttctttgacttgcagcccaaggaaggtctcgccctagtcaacggcacagccgttggctccggcatggcctcgatggttctcttcgagacaaacgtcctctcggttctggccgaggttctctcagctgtcttcgccgaggtgatgagcggcaagccggagttcaccgaccatttaacccacaggctgaagcaccaccccggccagatcgaagccgcggcgataatggagcacatcctcgacgggagctcgtacatgaagctagctcagaagctacacgagatggatccgttacagaaacctaaacaagaccgttacgcgctccgcacatcacctcaatggctaggtcctcagatagaagtgatccgttacgccaccaagtccatcgagcgtgagataaactccgtcaacgacaaccctttgatcgacgtttcaagaaacaaagcgattcacggaggtaacttccaggggacacccatcggtgtctccatggacaacacgcgtctcgctatagcatcgatagggaagctcatgttcgctcagttctccgagcttgttaacgacttctacaacaacggtcttccttctaacctaaccgcttcgaggaaccctagtttggactacggtttcaaaggagcggagatcgctatggcttcctactgttcagagcttcagtacttggccaatccagttacaacccatgttcagtcagcagagcaacacaaccaagacgtgaactctttaggactaatctcatcacggaagacggcagaagctgtcgacatactcaaactcatgtcgacaacgttcctcgtcgcaatctgccaagctgtggatctaagacacttggaggagaatctaaaacaaaccgtgaagaacactgtctctcaagtggccaagaaagttctaaccactggagtcaacggtgagcttcacccatctcgcttctgcgagaaagatttactcaaaatcgttgaccgtgaacaagtctacacgtacgcggacgatccatgcagcgccacgtacccgttgatccagaagctaaggcaagttatcgttgaccatgctttggtcaacggtgagagcgagaagaacgctatgacttcgatcttccacaagattggtgctttcggggaggagctcaaggcggtgcttcctgacgaagtggaggcagctcgagtggcgtatgataacgggacatctgctataccgaaccggatcaaggagtgtaggtcgtatcctttgtataggttcgtgagggaggagcttggaactgagcttttgaccggagagaaggtgacgtcgccgggagaagagtttgataaggttttcacggcgatatgtgaagggaagatcattgatccgttgatggagtgtctcagtgagtggaacggagctcccattccaatatgctaa

SEQ ID NO: 133061 - protein, 719 aa, Brassica napus
MEINGSSYKVDAMLCGGETKNVTVAAADPLNWGAAADQMKGSHLDEVKRMVMEFRKPVVNLGGETLTIGQVAAISTVGNGVKVELLETARAGVKASSDWVMESMGKGTDSYGVTTGFGATSHRRTKNGVALQKELIRFLNAGIFGSTKETCHTLPHSATRAAMLVRINTLLQGYSGIRFEILEAITSFLNTNITPSLPLRGTITASGDLVPLSYIAGLLTGRPNSKATGPNGEALNAEEAFKKAGIPSGFFDLQPKEGLALVNGTAVGSGMASMVLFETNVLSVLAEVLSAVFAEVMSGKPEFTDHLTHRLKHHPGQIEAAAIMEHILDGSSYMKLAQKLHEMDPLQKPKQDRYALRTSPQWLGPQIEVIRYATKSIEREINSVNDNPLIDVSRNKAIHGGNFQGTPIGVSMDNTRLAIASIGKLMFAQFSELVNDFYNNGLPSNLTASRNPSLDYGFKGAEIAMASYCSELQYLANPVTTHVQSAEQHNQDVNSLGLISSRKTAEAVDILKLMSTTFLVAICQAVDLRHLEENLKQTVKNTVSQVAKKVLTTGVNGELHPSRFCEKDLLKIVDREQVYTYADDPCSATYPLIQKLRQVIVDHALVNGESEKNAMTSIFHKIGAFGEELKAVLPDEVEAARVAYDNGTSAIPNRIKECRSYPLYRFVREELGTELLTGEKVTSPGEEFDKVFTAICEGKIIDPLMECLSEWNGAPIPIC

SEQ ID NO: 133062 - DNA, 2118 bp, Saccharum officinarum
  CDS (1)..(2118)
  misc_feature (1401)..(1401): n is a, g, c or t
atggcgggcaacggcgccatcgtggagagcgacccgctgaactggggcgcggcggcagcggagctggcggggagccacctggacgaggtgaagcgcatggtggcgcaggcccggcagcccgtggtgaagatcgagggctccacgctccgcgtcggccaggtggccgccgtcgccgccgccaaggacgcgtcgggcgtcgccgtcgagctcgacgaggaggcccgcccccgcgtcaaggccagcagcgagtggatcctcgactgcatcgcccacggcggcgacatctacggcgtcaccaccggcttcggcggcacctcccaccgccgcaccaaggacgggcccgctctccaggtcgagctgctcaggcatctcaacgccggaatcttcggcaccggcagcgatggccacacgctgccgtcggaggtcgtccgcgcggcgatgctggtgcgcatcaacaccctcctccagggctactcgggcatccgcttcgagatcctggaggccatcaccaagctgctcaacaccggggtcagcccgtgcctgccgctccggggcaccatcaccgcgtcgggcgacctcgtcccgctctcctacatcgccggcctcatcacgggccgccccaacgcgcaggccaccaccgtcgacgggaggaaggtggacgccgccgaggcgttcaagatcgccggcatcgagggcggcttcttcaagctcaaccccaaggaaggtctcgccatcgtcaacggcacctccgtgggctccgcgctcgcggccaccgtgatgtacgacgccaacgtcctcaccgtcctgtccgaggtcctgtccgccgtcttctgcgaggtgatgaacggcaagcccgagtacaccgaccacctcacccacaagctcaagcaccacccggggtccatcgaggccgccgccatcatggagcacatcctggacggcagcgccttcatgaagcacgccaagaaggtgaacgagctggacccgctgctcaagcccaagcaggacaggtacgcgctccgcacgtcgccgcagtggctgggcccccagatcgaggtcatccgcgccgccaccaagtccatcgagcgcgaggtcaactccgtcaacgacaacccggtcatcgacgtccaccgtggcaaggcgctgcacggcggcaacttccagggcacgcccatcggcgtgtccatggacaacgctcgcctcgccatcgccaacatcggcaagctcatgttcgcgcagttctcggagctggtcaacgagttctacaacaacgggctcacctccaacctggccggcagccgcaaccccagcctggactacggcttcaagggcacggagatcgccatggcctcctactgctctgagctgcagtacctgggcaaccccatcaccaaccacgtncagagcgcggagcagcacaaccaggacgtcaactccctcggcctcgtctccgccaggaagaccgccgaggccatcgacatcctgaagctcatgtcgtccacctacatcgtggcgctgtgccaggccatcgacctgcgccacctcgaggagaacatcaagacgtcggtgaagaacacggtgacccaggtggcgaagaaggtgctgaccatgaacccgtcgggcgacctctccagcgcgcgcttcagcgagaaggagctcatcaccgccatcgaccgcgagggcgtgttcacctacgcggaggacccggccagcggcagcctgccgctgatgcagaagctgcgctccgtgctggtggaccacgccctcagcagcggcgacgcgggaacgggagccctccgtgttctccaagatcaccaatttcgaggaggagctccgcgcggggctggcccgggaggtggaaggcgccccgcttcgccgtgggccgagggcaccgcccccgggcgaaaccggaactgggacagccggtcgttcccgctgtaccgcttcgtccgcgaggagctcggctgcgtgttcctgaccggcgagaagctcaagtcccccggcgaggagtgcaccaaggtgttcaacggcatcagccagggcaagctcgtcgaccccatgctcgagtgcctcaaggagtgggacggcaagccgctgcccatcaacgtcgtcaactaa

SEQ ID NO: 133063 - protein, 705 aa, Saccharum officinarum
MAGNGAIVESDPLNWGAAAAELAGSHLDEVKRMVAQARQPVVKIEGSTLRVGQVAAVAAAKDASGVAVELDEEARPRVKASSEWILDCIAHGGDIYGVTTGFGGTSHRRTKDGPALQVELLRHLNAGIFGTGSDGHTLPSEVVRAAMLVRINTLLQGYSGIRFEILEAITKLLNTGVSPCLPLRGTITASGDLVPLSYIAGLITGRPNAQATTVDGRKVDAAEAFKIAGIEGGFFKLNPKEGLAIVNGTSVGSALAATVMYDANVLTVLSEVLSAVFCEVMNGKPEYTDHLTHKLKHHPGSIEAAAIMEHILDGSAFMKHAKKVNELDPLLKPKQDRYALRTSPQWLGPQIEVIRAATKSIEREVNSVNDNPVIDVHRGKALHGGNFQGTPIGVSMDNARLAIANIGKLMFAQFSELVNEFYNNGLTSNLAGSRNPSLDYGFKGTEIAMASYCSELQYLGNPITNHVQSAEQHNQDVNSLGLVSARKTAEAIDILKLMSSTYIVALCQAIDLRHLEENIKTSVKNTVTQVAKKVLTMNPSGDLSSARFSEKELITAIDREGVFTYAEDPASGSLPLMQKLRSVLVDHALSSGDAGTGALRVLQDHQFRGGAPRGAGPGGGRRPASPWAEGTAPGRNRNWDSRSFPLYRFVREELGCVFLTGEKLKSPGEECTKVFNGISQGKLVDPMLECLKEWDGKPLPINVVN

SEQ ID NO: 133064 - DNA, 2133 bp, Vitis vinifera
  CDS (1)..(2133)
atggatgcaacgaactgccatggaagcaacaaggtggagagtttctgcgtgagtgatccgctgaactggggaatggctgcggagacgttgaagggaagccatttggatgaagtgaagcgcatggtggcggagtaccggaagccggttgttcggctcggtggtgagacgcttaccatatcgcaggtggcggctatcgccgggcgggagggggatgtgggtgtggagttgtcggagacggcgagagcgggcgtgaacgcgagcagtgagtgggtgatggagagcatgagcaaaggcaccgacagctatggtgtcaccactgggtttggtgccacttcacataggagaaccaaacaaggtggtgcccttcagaaggagctcatcaggttcttgaatgctgggatatttgggaacggaacagagtcatgccacacactgcctcactcagcaacaagagccgccatgctcgtgaggatcaacaccctcctccaaggctactccggcatcagatttgagattctggaagcaatcaccaagctcctcaatcacaacatcactccatgcttgcctctgcgtggcaccgtcactgcctccggagacctggttcctctctcctacattgctggtcttctcaccggcaggcctaattccaaagctgttggaccttccggtgaagttgtcaatgccgaggaggcctttaaaatggctgggatcgagtcgggattttttgagttgcagcctaaggaaggcctggcacttgttaatggcactgcagttggctctggcttggcctctatggtgctttttgagaccaatgtgctggcagttttgtctgaagttttatcggctatttttgctgaagtgatgcaggggaagcccgaattcactgaccacttgactcacaaattgaagcaccaccctggccaaatcgaggctgcagccattatggagcacattctagatggaagctcttatgtgaaagaagctaagaagctacatgagatggatcctctgcagaagccgaagcaagatcgatatgctctcaggacttcacctcaatggcttggcccacatattgaagtcatccgagcatcaactaaatccatcgaacgggagatcaactctgtgaatgataaccccttgatcgatgtttccaggaacaaggctctacatggtggcaacttccaggggaccccaattggagtctccatggacaacacccgcttggccattgcagccattgggaagcttatgtttgcccagttctcagagcttgttaatgacttctacaacaatggactgccatcaaatctctctggaagccgaaacccgagtctggactatggtttcaagggagcagaaattgccatggcttcctactgttcagagctccagttcttggccaatcctgtcaccaaccatgtcgaaagtgctgagcaacacaaccaagatgtgaactccttgggcttaatctcctcccggaaaacagctgaagcggtggatatcttgaagctcatgtctaccacatacctagtggcactctgccaggccattgatttgaggcatttggaggagaatttgaagagcacggtgaagaagactgtaagccacgtagctaagaaaactctaaccactggagccaatggagaactccacccatcgagattctgcgagaaggacttgctaaaagtggtggatagggaacatgtatttgcctacatcgatgacccctgcagcgccacatatccactgatgcagaaggtaaggcaagttctggtggaacatgcgctgaacaatggcgaaaatgagaagaatggcagcacctcaatcttccaaaaaataggggcattcgaggaggagttgaaggccgttttgcccaaagaggttgagagcgcaagagatggggtggagagtggaaacccatcaattccgaaccgaatcaaggagtgcaggtcatacccattgtacaagtttgtgagggaggagctgggaacagggctgctgactggtgaaaaggtgaggtcaccaggggaggattttgacaaggtgtttactgcaatgtgtgaggggaagatcatcgaccctcttctggattgtctcagtgcttggaacggtgctcctctcccaatctgctag

SEQ ID NO: 133065 - protein, 710 aa, Vitis vinifera
MDATNCHGSNKVESFCVSDPLNWGMAAETLKGSHLDEVKRMVAEYRKPVVRLGGETLTISQVAAIAGREGDVGVELSETARAGVNASSEWVMESMSKGTDSYGVTTGFGATSHRRTKQGGALQKELIRFLNAGIFGNGTESCHTLPHSATRAAMLVRINTLLQGYSGIRFEILEAITKLLNHNITPCLPLRGTVTASGDLVPLSYIAGLLTGRPNSKAVGPSGEVVNAEEAFKMAGIESGFFELQPKEGLALVNGTAVGSGLASMVLFETNVLAVLSEVLSAIFAEVMQGKPEFTDHLTHKLKHHPGQIEAAAIMEHILDGSSYVKEAKKLHEMDPLQKPKQDRYALRTSPQWLGPHIEVIRASTKSIEREINSVNDNPLIDVSRNKALHGGNFQGTPIGVSMDNTRLAIAAIGKLMFAQFSELVNDFYNNGLPSNLSGSRNPSLDYGFKGAEIAMASYCSELQFLANPVTNHVESAEQHNQDVNSLGLISSRKTAEAVDILKLMSTTYLVALCQAIDLRHLEENLKSTVKKTVSHVAKKTLTTGANGELHPSRFCEKDLLKVVDREHVFAYIDDPCSATYPLMQKVRQVLVEHALNNGENEKNGSTSIFQKIGAFEEELKAVLPKEVESARDGVESGNPSIPNRIKECRSYPLYKFVREELGTGLLTGEKVRSPGEDFDKVFTAMCEGKIIDPLLDCLSAWNGAPLPIC

SEQ ID NO: 133066 - DNA, 2178 bp, Isatis tinctoria
  CDS (1)..(2178)
atggagaataacggatcatcacacaagatgagcggaggagacgtcgacgctatgttatgcggcggagagatcaagaaaaatgtcacggtggctgcggcggatcccctcaactggggagctgcggcggagcaaatgaaagggagccatttggacgaagtgaagagaatggttaaggactttaggaagccagtggtgaatctcgggggagagactctgacgatcggacaagtggcagcaatctcgactgttggaaatgatgtgaaggtggagttgtcggagacggcgagagccggtgtgaaggcgagcagtgattgggttatggagagtatgggcaaaggcactgatagttatggtgttactactggttttggtgctacttctcatcggagaaccaagaacggtgccgctcttcagaaggagcttataagattcctgaacgccggaatattcggcagcacaaaggaaacatgccacacattgccacattccgccacgagagccgccatgattgtacggatcaacactctcctccagggatactccggcatccgtttcgagattctagagaccatgaccagtttcctcaacaacaacatcactccttcactccctctccgaggaaccatcaccgcctccggagatctcgttcctctctcctacatcgccggactcctcaccggccgtcccaattccaaagccacaggtcccaacggcgaggccttgaacgcagaggaagccttcaagatggcgggaatcacctccggattcttcgaactgcagcctaaggaaggtctcgcgctcgtcaacggcacggcggttggatctggaatggcgtcgatggcgcttttcgagacgaacgttctctctgttttggctgagcttctatcggctgttttcgccgaagtgatgagcggaaagccggagttcaccgatcacttaactcacaggctgaagcaccatcccggccagatcgaagcggcggcgataatggagcacatcctcgacgggagctcttacatgaaactagctcagaagctccacgagatggatccgttacagaaacctaaacaagaccgttacgcgctccgcacgtctcctcagtggctaggtcctcagatcgaagtgatccgttacgccacgaaatcgatcgagcgtgagatcaactccgtcaacgacaaccccttgatcgacgtctcgagaaacaaggcgatccacggcgggaacttccaggggacacccatcggtgtctccatggacaacactcgtctcgccgtcgcagcgatcgggaaactcatgttcgctcagttctctgagcttgtcaacgatttctacaacaacggtcttccttcgaacctaacagcttcgaacaacccgagtttggattacggtttcaaaggagcggagatcgcgatggcttcgtactgttctgagcttcagtacttggccaatccagtgacaagccatgttcaatccgcagagcaacacaaccaagacgtgaactctcttggactgatctcgtctcgcaaaacttccgaagctgttgacattctcaagctcatgtcgacaacgttcctcgtcgcgatttgtcaagctgtggatctgagacatttggaggagaatctgaaacaaaccgtgaagaacacggtttctcaagtcgcgaagaaagttctcactactggagtcaatggtgagcttcacccatctcgcttctgcgagaaagatttactcaaagttgtagaccgtgaacaagtctatgcatacgcggacgatccttgcagcgccacgtacccgttgatccagaagctgagacaggttatcgtcgaccacgctttggtcaacggtgagagtgagaagaacgcagtgacttccatcttccataagatcggagctttcgaggaggagctcaaggcggtgcttccgaaagaagtggacgcagctagagcagcgtacgaaaacgggacatctgctatcccgaaccggatcaaggagtgtaggtcgtatcctctgtacaggttcgtgagggaagagcttggaacacagcttttgaccggagacagagtgacgtcgcccggagaagagttcgacaaggttttcacggcgatttgtgaaggtaaaatcattgatccgatgatggagtgtctcaacgagtggaacggagctcccattccaatatgctaa

SEQ ID NO: 133067 - protein, 725 aa, Isatis tinctoria
MENNGSSHKMSGGDVDAMLCGGEIKKNVTVAAADPLNWGAAAEQMKGSHLDEVKRMVKDFRKPVVNLGGETLTIGQVAAISTVGNDVKVELSETARAGVKASSDWVMESMGKGTDSYGVTTGFGATSHRRTKNGAALQKELIRFLNAGIFGSTKETCHTLPHSATRAAMIVRINTLLQGYSGIRFEILETMTSFLNNNITPSLPLRGTITASGDLVPLSYIAGLLTGRPNSKATGPNGEALNAEEAFKMAGITSGFFELQPKEGLALVNGTAVGSGMASMALFETNVLSVLAELLSAVFAEVMSGKPEFTDHLTHRLKHHPGQIEAAAIMEHILDGSSYMKLAQKLHEMDPLQKPKQDRYALRTSPQWLGPQIEVIRYATKSIEREINSVNDNPLIDVSRNKAIHGGNFQGTPIGVSMDNTRLAVAAIGKLMFAQFSELVNDFYNNGLPSNLTASNNPSLDYGFKGAEIAMASYCSELQYLANPVTSHVQSAEQHNQDVNSLGLISSRKTSEAVDILKLMSTTFLVAICQAVDLRHLEENLKQTVKNTVSQVAKKVLTTGVNGELHPSRFCEKDLLKVVDREQVYAYADDPCSATYPLIQKLRQVIVDHALVNGESEKNAVTSIFHKIGAFEEELKAVLPKEVDAARAAYENGTSAIPNRIKECRSYPLYRFVREELGTQLLTGDRVTSPGEEFDKVFTAICEGKIIDPMMECLNEWNGAPIPIC

SEQ ID NO: 133068 - DNA, 2142 bp, Oryza sativa subsp
  CDS (1)..(2142)
atggcgtgcgagaacggtcaggttgctgccgatggcatcaacggcctctgcatggcggcgccccgcgccgacccgctgaactgggggaaggcggcggaggagatgtcggggagccacctcgacgaggtgaagcgcatggtggccgagtaccgccagccgctggtgaagatcgagggcgccagcctgaggatcgcgcaggtcgccgcggtggccgcggccggcgaggccagggtcgagctcgacgagtcggcccgcgagcgcgtcaaggccagcagcgactgggtgatgaacagcatgatgaacggcacggacagctacggtgtcaccaccggcttcggcgccacgtcccacaggaggaccaaggaaggtggtgccctgcaaagagagctcatcaggttcctcaatgccggcgccttcggcacgggcacggacggccacgtcctgtccgccgaggccacgcgcgcggcgatgctcgtccgcatcaacactctcctccagggctactcaggcatccgcttcgagatcctcgaggcgattaccaagctgctcaatgccaacgtcacgccatgcctgccactcaggggcacggtgaccgcgtccggcgacctggtcccgctctcctacattgccggcttggtcaccggccgcgagaactctgtcgcggtcgctcctgatggcagcaaggtgaacgccgctgaggcgtttaagattgctggcatccaaggtggcttcttcgagttgcagcccaaggaaggtctcgccatggtgaatggcaccgccgtcggctctggacttgcctccacggtgctctttgaggcgaacattcttgctgtccttgccgaggtcctgtccgccgtgttctgcgaggtgatgaacggcaagccggagtacaccgaccacctgacacacaagctgaagcaccaccctggacagatcgaggctgctgccatcatggagcacatcttggaaggcagctcgtacatgaagctggcgaagaagctcggtgagctcgacccgttgatgaagccgaagcaagaccggtacgcgctccgcacgtcgccgcaatggcttggccctcagatcgaagttattcgtgcggccaccaagtccattgagcgcgagatcaactctgtcaatgacaacccactcattgatgtctcccgcgacaaggcgcttcatggtggtaacttccagggcactcccatcggtgtgtccatggacaacactcgcctcgcaattgctgccatcggcaagctcatgttcgcgcagttctcagagcttgtgaacgactactacaacaacggccttccctccaacctgtccggcgggcgcaacccgagcttggattacggcttcaagggcgccgagatcgccatggcttcgtactgctccgagttgcagttcttgggcaacccagtgaccaaccacgtccagagcgcggagcagcacaaccaggacgtcaactccctcggcctcatctcctccaggaagacagccgaggccgtcgaaatcctgaagctcatgtcctccacgttcttggtcgccctgtgccaggccatcgacctgcggcacatcgaggagaacgtcaagagcgccgtcaagagctgcgtcatgacagtggccaggaagactctgagcacgagcgccaccggcggtctccacgccgctcgcttctgcgagaaggatcttctccaggagatcgaccgcgaagccgtgttcgcgtacgccgacgacccgtgcagcgccaactacccgctgatgaagaagctccggaacgtgcttgtggagcgcgccctcgccaacggcgcggccgagttcaacgccgagacctcggtgttcgccaaggtcgcccagttcgaggaggagctccgcgcggcgctgccagcggcggtgttggccgcacgggcagctgtggagaacggcacggcggcaacgcccaacagaatcaccgagtgccgctcctacccactgtaccggtttgtgcgcgaggagctcggaaccgcgtacctcaccggcgagaagacgcggtcgcccggcgaggagctgaacaaggtgctcgtcgccatcaaccaaggcaagcacattgatccgctgcttgagtgtctcaaggagtggaacggcgcgcccctgcccatctgctaa

SEQ ID NO: 133069 - protein, 713 aa, Oryza sativa subsp
MACENGQVAADGINGLCMAAPRADPLNWGKAAEEMSGSHLDEVKRMVAEYRQPLVKIEGASLRIAQVAAVAAAGEARVELDESARERVKASSDWVMNSMMNGTDSYGVTTGFGATSHRRTKEGGALQRELIRFLNAGAFGTGTDGHVLSAEATRAAMLVRINTLLQGYSGIRFEILEAITKLLNANVTPCLPLRGTVTASGDLVPLSYIAGLVTGRENSVAVAPDGSKVNAAEAFKIAGIQGGFFELQPKEGLAMVNGTAVGSGLASTVLFEANILAVLAEVLSAVFCEVMNGKPEYTDHLTHKLKHHPGQIEAAAIMEHILEGSSYMKLAKKLGELDPLMKPKQDRYALRTSPQWLGPQIEVIRAATKSIEREINSVNDNPLIDVSRDKALHGGNFQGTPIGVSMDNTRLAIAAIGKLMFAQFSELVNDYYNNGLPSNLSGGRNPSLDYGFKGAEIAMASYCSELQFLGNPVTNHVQSAEQHNQDVNSLGLISSRKTAEAVEILKLMSSTFLVALCQAIDLRHIEENVKSAVKSCVMTVARKTLSTSATGGLHAARFCEKDLLQEIDREAVFAYADDPCSANYPLMKKLRNVLVERALANGAAEFNAETSVFAKVAQFEEELRAALPAAVLAARAAVENGTAATPNRITECRSYPLYRFVREELGTAYLTGEKTRSPGEELNKVLVAINQGKHIDPLLECLKEWNGAPLPIC

SEQ ID NO: 133070 - DNA, 2013 bp, Vitis vinifera
  CDS (1)..(2013)
  misc_feature (92)..(92): s is g or c
  misc_feature (432)..(432): y is t or c
  misc_feature (465)..(465): y is t or c
  misc_feature (765)..(765): m is a or c
  misc_feature (774)..(774): y is t or c
  misc_feature (1314)..(1314): k is g or t
  misc_feature (1410)..(1410): r is g or a
  misc_feature (1485)..(1485): r is g or a
  misc_feature (1662)..(1662): r is g or a
  misc_feature (1665)..(1665): s is g or c
  misc_feature (1669)..(1669): y is t or c
  misc_feature (1700)..(1700): w is a or t
  misc_feature (1707)..(1707): y is t or c
  misc_feature (1710)..(1710): y is t or c
  misc_feature (1735)..(1735): m is a or c
  misc_feature (1740)..(1740): y is t or c
  misc_feature (1743)..(1743): y is t or c
  misc_feature (1746)..(1746): y is t or c
  misc_feature (1749)..(1749): y is t or c
  misc_feature (1762)..(1762): w is a or t
  misc_feature (1764)..(1764): y is t or c
atgtctatgtctatcaatggtgtttctccttcatttcagagctttcggcctcccactctccctctacctgtagaggaagagaaccccttctscatattgggggagtctcgtcatgtactggctccaccgcactggaagaaggctgctgaggccctacagtgtggtcattttgatgaggtgtgcgccatggtgtcgcagtttgcacatgcgcaaactgtggatattcagggcacggctctcacagtggcccaggtcactgctcttgcacgtggggatcatgttagggtcgctctcgatgaggcggtggcccgaggccgcgtgacgaggagtgctgattgggtggctgagaacatctctcggggcacggacacgtacggggtgactactggcttcggtgccacttcccatcggcggaccaacaagaccgctgaycttcagaccgagctgattcggtttctcaacgcyggagtgatcgggaaggagactcttccggcgagtttttccaaggctgctatgcttgtccgagcgaatactctgatgcaagggtattcgggtattcggtgggagatacttgaggccatggccaagctgataaacctcaatttgatccctaaactgcctttgagggggaccatcactgcttctggggaccttgtgcccttatcttatattgctggagtattaactgggaggcattccaattccaaggttgtgacgcctgagggggaagaaatcacggccatggaagctctgaagagagctggmattgaagcyccttttcagctgcaggcgaaggaagcggtggccgcaacggtttgttttgatgccaacatcttggggctccttgcggaggttctgtctgccttgttctgtgaagtgatgaatggcaagcctgagtttacggatccattgactcatgagctgaaacaccatcctggccagattgaatcagctgctataatggaatttcttcttgatgaaagtgactacatgaaagcagcaaagcttcgtcaagagaaggatgtgttgatgaagcctaaacaagaccggtatgcgctcagaacttctccccagtggctggggcctcagattgaggtgattcgcatggcaacacatgcaattgagagggaaatcaattctgtcaacgacaaccctttgatcgatgtctctcgggaccttgctcttcatggagggaacttccaagggacccctattggtgtttccatggacaatctccggattgccattgcagcaattgggaagctcatgtttgctcaattctcggaactggtctgtgactattataatggtggkttgccttccaatttgagtggcggccccaacccgagcttggactatggcttcaaaggtgctgagatagccatggctgcctactgctccgagcttcartacctggcgaacccggtcacaacacacgtgcagagcgctgaacaacacaatcaggatgtgaattctctgggattratctctgcaaggaagagtgctgaagcagtggagatcctaaagctcatgtctgcaacttacatggtggcactttgccaggcagttgacctgagacacctagaagaaaacatgagggaagtagtgaaacatctcatcacccaagtagcaagaaaaaccctttacacagatgaagatggracsctgytagaatctcgtttctgcgagaaagaactccwgcaggtygtygaaaacttgccagtcttctcctatmtcgaygayccyacyaatccttcatacwcytttttgcctcaactccgagataaatgcaggacttaccccatatacggatttgtgaggaaagaagtgggaaccaagctccttagtggtgaaaacaaggtgagtcccggagaggatatagagaaggtttatgaggcgatcaatgatgggaagttgggagatgtgctgatgaagtgcttgtcattttggagaggcacgtcggggcctttcacgccgaggcctagtgggttgttcttctccggcgcagtttaa

SEQ ID NO: 133071 - protein, 670 aa, Vitis vinifera
  misc_feature (31)..(31): The Xaa at location 31 stands for Cys, or Ser.
  misc_feature (567)..(567): The Xaa at location 567 stands for Gln, or Leu.
  misc_feature (579)..(579): The Xaa at location 579 stands for Ile, or Leu.
  misc_feature (588)..(588): The Xaa at location 588 stands for Ser, or Thr.
MSMSINGVSPSFQSFRPPTLPLPVEEENPFXILGESRHVLAPPHWKKAAEALQCGHFDEVCAMVSQFAHAQTVDIQGTALTVAQVTALARGDHVRVALDEAVARGRVTRSADWVAENISRGTDTYGVTTGFGATSHRRTNKTADLQTELIRFLNAGVIGKETLPASFSKAAMLVRANTLMQGYSGIRWEILEAMAKLINLNLIPKLPLRGTITASGDLVPLSYIAGVLTGRHSNSKVVTPEGEEITAMEALKRAGIEAPFQLQAKEAVAATVCFDANILGLLAEVLSALFCEVMNGKPEFTDPLTHELKHHPGQIESAAIMEFLLDESDYMKAAKLRQEKDVLMKPKQDRYALRTSPQWLGPQIEVIRMATHAIEREINSVNDNPLIDVSRDLALHGGNFQGTPIGVSMDNLRIAIAAIGKLMFAQFSELVCDYYNGGLPSNLSGGPNPSLDYGFKGAEIAMAAYCSELQYLANPVTTHVQSAEQHNQDVNSLGLISARKSAEAVEILKLMSATYMVALCQAVDLRHLEENMREVVKHLITQVARKTLYTDEDGTLLESRFCEKELXQVVENLPVFSYXDDPTNPSYXFLPQLRDKCRTYPIYGFVRKEVGTKLLSGENKVSPGEDIEKVYEAINDGKLGDVLMKCLSFWRGTSGPFTPRPSGLFFSGAV

SEQ ID NO: 133072 - DNA, 2061 bp, Vitis vinifera
  CDS (1)..(2061)
  misc_feature (1257)..(1257): s is g or c
atggctgcggagacgttgaagggaagtcatttggatgaagtgaagcgcatggtggcggagtaccggaagccggttgttcagctcggtggtgagacgcttacgatatcgcaggtggcggcaatcgccgggcgggagggggatgtgagtgtggagttgtcggagacggcgagagcaggcgtgaaggcgagcagtgattgggtgatggagagcatgaagaaaggcatcgacagctatggtgtcaccactgggtttggtgctacttcacataggagaaccaaacaaggtggtgcccttcagaaggagctcatcagggtcttgaatgctgggatatttgggaacggaagagagtcatgccacacactgcctcactcagcaacaagagccgccatgctcgtgaggatcaacagcctcctccaaggctactccggcatcagatttgagattctggaagcaatcaccaagctcctcaatcacaacatcactccatgcttgcctctgcgtggcaccgtcaccgcctccggagacctggttcctctctcctacatcgctggtcttctcaccggcaggcctaattccaaagctgttggaccttccggtgaagttgtcaatgccgaagaggcctttaaaatggctgggatcgagtcgggattttttgagttgcagcctaaggaaggctttgctcttgttaatggcactgcagttggctctggcttggcctctatggtgctttttgagaccaatgtgctggcagttttgtctgaagttttatcggctgtttttgctgaagtgatgcaggggaagcccgaattcactgaccacttgactcacaaattgaagcaccaccctggccaaatcgaggctgcagccattatggagcacattctagatggaatctcttatgtgaaagaagctaagaagctacatgagatggatcctctgcagaagccgaagcaagatcgatatgctctcaggacttcacctcaatggcttggcccacatattgaagtcatccgagcatcaactaaatccatcgaacgggagatcaactctgttaatgataaccccttgatcgatgtttccaggaacaaggctctacatggtggcaacttccaggggaccccaattggagtctccatggacaacacccgcttggccattgcagccattgggaagcttatgtttgcccagttctcagagcttgtcaatgacttctacaacaatggactgccatcaaatctctctggaagccgaaacccsagtctggactatggtttcaagggagcagaaattgccatggcttcctactgttcagagctccagttcttggccaatcctgtcaccaaccatgtcgaaagtgctgagcaacacaaccaagatgtgaactccttgggcttaatctcctcccggaaaacagctgaagcggtggatatcttgaagctcatgtctaccacatacctagtggcactctgccaggccattgatttgaggcatttggaggagaatttgaagagcacggtgaagaagactgtaagccacgtagctaagaaaactctaaccactggagccaatggagaactccacccatcgagattctgcgagaaggacttgctaaaagtggtggatagggaacatgtatttgcctacatcgatgacccctgcagcgccacatatccactgatgcagaacgtaaggcaagttcttgtggaacatgcgctgaacaatggcgaaaatgagaagaatggcagcacctcaatcttccaaaaaatactggcattcgaggaggagttgaaggccgttttgcccaaagaggttgagagcgcaagaggtggggtggagagtggaaacccatcaattccgaaccgaatcaaggagtgcaggtcatacccattgtacaagtttgtgagggaggagctgggaacagggctgctgactggtgaaaaggtgaggtcaccaggggaggattttgacaaggtgtttactgcaatgtgtgaggggaagatcattgaccctcttctggattgtctcagtgcttggaacggtgctcctctcccaatctgctag

SEQ ID NO: 133073 - protein, 686 aa, Vitis vinifera
MAAETLKGSHLDEVKRMVAEYRKPVVQLGGETLTISQVAAIAGREGDVSVELSETARAGVKASSDWVMESMKKGIDSYGVTTGFGATSHRRTKQGGALQKELIRVLNAGIFGNGRESCHTLPHSATRAAMLVRINSLLQGYSGIRFEILEAITKLLNHNITPCLPLRGTVTASGDLVPLSYIAGLLTGRPNSKAVGPSGEVVNAEEAFKMAGIESGFFELQPKEGFALVNGTAVGSGLASMVLFETNVLAVLSEVLSAVFAEVMQGKPEFTDHLTHKLKHHPGQIEAAAIMEHILDGISYVKEAKKLHEMDPLQKPKQDRYALRTSPQWLGPHIEVIRASTKSIEREINSVNDNPLIDVSRNKALHGGNFQGTPIGVSMDNTRLAIAAIGKLMFAQFSELVNDFYNNGLPSNLSGSRNPSLDYGFKGAEIAMASYCSELQFLANPVTNHVESAEQHNQDVNSLGLISSRKTAEAVDILKLMSTTYLVALCQAIDLRHLEENLKSTVKKTVSHVAKKTLTTGANGELHPSRFCEKDLLKVVDREHVFAYIDDPCSATYPLMQNVRQVLVEHALNNGENEKNGSTSIFQKILAFEEELKAVLPKEVESARGGVESGNPSIPNRIKECRSYPLYKFVREELGTGLLTGEKVRSPGEDFDKVFTAMCEGKIIDPLLDCLSAWNGAPLPIC

SEQ ID NO: 133074 - DNA, 2124 bp, Vitis vinifera
  CDS (1)..(2124)
  misc_feature (6)..(6): y is t or c
  misc_feature (147)..(147): y is t or c
  misc_feature (156)..(156): r is g or a
  misc_feature (159)..(159): k is g or t
  misc_feature (174)..(174): r is g or a
  misc_feature (189)..(189): s is g or c
  misc_feature (200)..(200): r is g or a
  misc_feature (240)..(240): y is t or c
  misc_feature (246)..(246): y is t or c
  misc_feature (282)..(282): r is g or a
  misc_feature (291)..(291): y is t or c
  misc_feature (610)..(610): k is g or t
  misc_feature (1668)..(1668): s is g or c
  misc_feature (1701)..(1701): y is t or c
  misc_feature (1849)..(1849): y is t or c
  misc_feature (1965)..(1965): r is g or a
atgaaytgccacggaagcaaaaaggtggagagtttcgtcgtgagtgatccgctgaactggggagtggcagcggaggcgttgaaggggagccatttggatgaagtaaagcgcatggtggcagagtaccggaagccggtggttcggctyggtggtgarackcttacgatatcgcargtggcggctatcgcsgggcgggaggrggatgtgagtgtggagttgtcggagacggcgagagcgggygtgaaygcgagcagtgagtgggtgatggagagcatgagcaarggcaccgayagctatggtgtcaccactgggtttggtgccacttcacataggagaaccaaacaaggtggtgcccttcagaaggagctcatcaggttcttgaatgctgggatatttgggaacggaacagagtcatgccacacactgcctcactcagcaacaagagccgccatgctcgtgaggatcaacaccctcctccaaggctactccggcatcagatttgagattctggaagcaatcaccaagctcctcaatcacaacatcactccatgcttgcctctgcgtggcaccgtcactgcctccggagacctggttcctctctcctacattkctggtcttctcaccggcaggcctaattccaaagctgttggaccttccggtgaagttgtcaatgccgaagaggcctttaaaatggctgggatcgagtcgggattttttgagttgcagcctaaggaaggcctggctcttgttaatggcactgcagttggctctggcttggcctctatggtgctttttgagaccaatgtgctggcagttttgtctgaagttttatcggctatttttgctgaagtgatgcaggggaagcccgaattcactgaccacttgactcacaaattgaagcaccaccctggccaaatcgaggctgcagccattatggagcacattctcgatggaagctcttatgtgaaagaagctaagaagctacatgagatggatcctctgcagaagccgaagcaagatcgatatgctctcaggacttcacctcaatggcttggcccacagattgaagtcatccgagcatcaactaaatccatcgaacgggagatcaactctgtgaatgataaccccttgatcgatgtttccaggaacaaggctctacatggtggcaacttccaggggaccccaattggagtctccatggacaacacccgcttggccattgcagccattgggaagcttatgtttgcccagttctcagagcttgtcaatgacttctacaacaatggattgccatcaaatctctctggaagccgaaacccgagtctggattatggtttcaagggagcagaaattgccatggcttcctactgttcagagctccagttcttggccaatcctgttaccaaccatgtccaaagtgctgagcaacacaaccaagatgtgaactccttgggcttaatctcctccaggaaaacagctgaagcggtggatatcttgaagctcatgtctaccacatacctagtggcactctgccaggccattgatttgaggcatttggaggagaatttgaagagcactgtgaagaagactgtaagccacgtagctaagaagactctaaccacgggagccaatggagaactccacccatcgagattctgcgagaaggasttgctaaaagtggtggatagggaacatgtattygcctacatcgatgacccctgcagcgccacatatccactgatgcagaaggtaagacaagttctggtggaacatgctctgaacaatggcgaaaatgagaagaatggcagcacctcaatcttccaaaaaatagtggcattcgaggaggagytgaaggccgttttgcccaaagaggttgagagcgcaagaggtggggtggagagtggaaacccatcaattccaaaccgaatcagggagtgcaggtcatacccattgtataagtttgtragggaggagctgggaacaggactgctgacaggtgaaaaggtgaggtcaccaggggaggactttgacaaggtgttcactgcaatgtgtgaggggaagatcatcgaccctcttctggattgtctcagtgcttggaacggtgctcctctcccaatctgctag

SEQ ID NO: 133075 - protein, 707 aa, Vitis vinifera
  misc_feature (67)..(67): The Xaa at location 67 stands for Glu, or Gly.
  misc_feature (204)..(204): The Xaa at location 204 stands for Ala, or Ser.
  misc_feature (556)..(556): The Xaa at location 556 stands for Asp, or Glu.
MNCHGSKKVESFVVSDPLNWGVAAEALKGSHLDEVKRMVAEYRKPVVRLGGETLTISQVAAIAGREXDVSVELSETARAGVNASSEWVMESMSKGTDSYGVTTGFGATSHRRTKQGGALQKELIRFLNAGIFGNGTESCHTLPHSATRAAMLVRINTLLQGYSGIRFEILEAITKLLNHNITPCLPLRGTVTASGDLVPLSYIXGLLTGRPNSKAVGPSGEVVNAEEAFKMAGIESGFFELQPKEGLALVNGTAVGSGLASMVLFETNVLAVLSEVLSAIFAEVMQGKPEFTDHLTHKLKHHPGQIEAAAIMEHILDGSSYVKEAKKLHEMDPLQKPKQDRYALRTSPQWLGPQIEVIRASTKSIEREINSVNDNPLIDVSRNKALHGGNFQGTPIGVSMDNTRLAIAAIGKLMFAQFSELVNDFYNNGLPSNLSGSRNPSLDYGFKGAEIAMASYCSELQFLANPVTNHVQSAEQHNQDVNSLGLISSRKTAEAVDILKLMSTTYLVALCQAIDLRHLEENLKSTVKKTVSHVAKKTLTTGANGELHPSRFCEKXLLKVVDREHVFAYIDDPCSATYPLMQKVRQVLVEHALNNGENEKNGSTSIFQKIVAFEEELKAVLPKEVESARGGVESGNPSIPNRIRECRSYPLYKFVREELGTGLLTGEKVRSPGEDFDKVFTAMCEGKIIDPLLDCLSAWNGAPLPIC

SEQ ID NO: 133076 - DNA, 2154 bp, Vitis vinifera
  CDS (1)..(2154)
  misc_feature (154)..(154): m is a or c
  misc_feature (315)..(315): s is g or c
  misc_feature (909)..(909): y is t or c
  misc_feature (1188)..(1188): r is g or a
atggaattctcacaccacaacggcaacggaaacggaaaggtggacgccaatggcttctgcatgaaggccgcggatcccctctactgggcggcggcggcggagactctgaaggggagccatttggaggaggtgaagagaatggtggcggacttcmgaaaaccggtggtgaggcttgggggtgagagcctcaacatcgcacaggtggcggcggtggcggccaccggaagcgacggggtgacagtggaactgtcggagtcggcgagggccggggtgcaggccagcagcaactgggtgatggagagcatgaaccaaggsaccgacagttatggggtgactaccgggttcggtgcgacttcccatagaagaaccaaacaaggaaatgctcttcagaaagaactgatcagattcttgaacgctggaatatttgggaagggaacagagtcatgccacacattgcctcacagtgcgacaagagcagcaatgctggtgaggatcaataccctcctccaaggatactcaggcatcagatttgagatcttggaagccaccgttaagctcctcaacgccaacattagtccttgcttgcctctgcgtggcaccatcagtgcctctggtgatctcgtccctctttcttacattgccggtctcctcaccggcaggcctaactccagggccgtagggcctaacggagagtccctcaatgctgaggaagcctttcgccttgccggaattgatggagggttctttgagttgcagcctaaggagggtcttgcactcgttaatggcacggcagtagggtctggtttggcttcaacagttctctttgaggctaacatacttgctgttttatcagaagttttgtcggctatatttgctgaggttatgcaggggaagccagagtttactgaycatttgacgcacaaattgaaacaccatccgggacaaattgaagctgcggctattatggaacacattttggatggaagcgcttatgttaaagcggctcagatgctgcacgagatcgatcccctccagaagcccaagcaagatcggtatgctcttaggacttcaccccagtggttgggtcctcagattgaagttattcgaacatcaacgaagtccatagaacgagagatcaattcggtgaatgacaacccattgattgatgtgtcaaggaacaaggccttrcatggtgggaacttccagggtaccccaattggtgtttccatggacaacaccagattagcaatagcctccattgggaagctcatgtttgcgcaattctctgagctggttaacgatttttacaacaatgggttgccctcaaatctctctggtggaaggaatccaagtctggattatgggttcaagggtgctgagatagcaatggcagcatattgttctgagctccaattcctagccaacccagtcaccaatcatgttcagagcgctgagcaacacaaccaggatgtgaactccttaggattgatctcttcgcgaaaaacggaagaagcaattgacatcttaaagctcatgtcctcaacctacctggtggcactttgccaggctattgatttgaggcatttggaggagaacttgaagaacacagtcaagaacacagtgagccaagtggccaaaaaggtgctaaccattgggatcaatggggagcttcacccgtctagattctgcgagaaggacttgcttaaagtagtagaccgcgagcacgtttttgcctacatcgatgacccatgcagtgcaacataccccttgatgcaaaacctaaggcaagtcctggttgatcatgcgctgatgaacaacgaggatttgaggaattcaagtacttcaatctttctcaagattggggcatttgaggaagaactgaagacccttttgcctaaagacgtggagagcacgagaattgcctttgataatgggaatctggccattccaaaccgcatcaaggagtgcaggtcctaccctctgtacaagtttgtgagggaagagtcagggactgagtttctgacaggagaaaaggttacctcgccaggggaggagtttgataaggtgttctctgcaatatgtgaggggaagatcatcgatccgctgctcaaatgtctcaatgattgggatgggactcctcttccaatttgctga

SEQ ID NO: 133077 - protein, 717 aa, Vitis vinifera
MEFSHHNGNGNGKVDANGFCMKAADPLYWAAAAETLKGSHLEEVKRMVADFRKPVVRLGGESLNIAQVAAVAATGSDGVTVELSESARAGVQASSNWVMESMNQGTDSYGVTTGFGATSHRRTKQGNALQKELIRFLNAGIFGKGTESCHTLPHSATRAAMLVRINTLLQGYSGIRFEILEATVKLLNANISPCLPLRGTISASGDLVPLSYIAGLLTGRPNSRAVGPNGESLNAEEAFRLAGIDGGFFELQPKEGLALVNGTAVGSGLASTVLFEANILAVLSEVLSAIFAEVMQGKPEFTDHLTHKLKHHPGQIEAAAIMEHILDGSAYVKAAQMLHEIDPLQKPKQDRYALRTSPQWLGPQIEVIRTSTKSIEREINSVNDNPLIDVSRNKALHGGNFQGTPIGVSMDNTRLAIASIGKLMFAQFSELVNDFYNNGLPSNLSGGRNPSLDYGFKGAEIAMAAYCSELQFLANPVTNHVQSAEQHNQDVNSLGLISSRKTEEAIDILKLMSSTYLVALCQAIDLRHLEENLKNTVKNTVSQVAKKVLTIGINGELHPSRFCEKDLLKVVDREHVFAYIDDPCSATYPLMQNLRQVLVDHALMNNEDLRNSSTSIFLKIGAFEEELKTLLPKDVESTRIAFDNGNLAIPNRIKECRSYPLYKFVREESGTEFLTGEKVTSPGEEFDKVFSAICEGKIIDPLLKCLNDWDGTPLPIC

SEQ ID NO: 133078 - DNA, 2154 bp, Nicotiana attenuata
  CDS (1)..(2154)
atggcatcaaatggtcatgttaatggaggagaagactttgagttgtgcaagaaatcatcagccactgatccattgaattgggaaatggcgtctgaatctttaagagggagtcatttggatgaagtgaaaaaaatggtgagtgaatttagaaaaccaatggtaaaacttggtggtgaaactttaacagtggcacaagtggctgctattgcagttagggacaaaagtgcgaatggtgttaaagttgaactttctgaagatgcaagggctggtgttaaagctagtagtgattgggttatggatagtatgaataaaggaacagatagttatggtgttactactggttttggtgctacttctcatagaagaaccaagaatggtggtgctcttcaaaaagaacttattaggttcttgaatgctggtgtttttggaaatggaacagaaacaaaccacacattgccacattcagcaacaagggcagcaatgcttgtaaggatcaacacactcttacaaggatactctggcatcagatttgaaatcttggaagcaattacaaaattgattaacagcaacatcactccatgtttacctctccgtggcacgatcactgcctcgggcgatcttgtcccgttatcctacattgctggtttgctcactggtaggcctaattccaaagctgttggtcccaatggtgagacacttaatgctgaagaagcgttccgcgttgctggtgttaatggtggatttttcgagttgcagcctaaggaaggacttgctcttgtaaatggtacagcagttggttctggtatggcatcaatggttctctttgattccaacattcttgctgttatgtctgaagttttatcagcgattttcgctgaagtaatgaatggaaagcccgaattcactgaccatttgacacacaagttgaagcaccaccctggtcaaattgaggctgctgctattatggaacacattttggatggaagctcttatgtgaaggcggctcaaaagctacatgaaatggatcctctccaaaaaccaaagcaagatcgttatgctctccgaacatctccacaatggcttggccctcaaattgaagtcattcgctctgcaactaagatgattgagagggagattaactcagtgaacgataaccccttgatcgatgtttcaagaaacaaggcgttacatggtggcaacttccagggaacccctatcggcgtctccatggataatgcaagattggctcttgcatcaattgggaaattgatgtttgctcaattctcggaacttgtcaacgactattacaataacggtttgccatctaatctcaccgcatcaagaaatccaagcttggactatggtttcaagggagctgaaatcgcgatggcttcttactgctcagaacttcaattcttggcaaatccagtgaccaaccatgtccaaagtgctgagcaacacaaccaagatgtcaactccttaggcttaatctcagcaaggaaaacagctgaagctgtcgatatcttgaagctcatgtcatcaacttatctagtggcactttgccaagctatcgacttgagacatttggaggaaaacttaaagaatgcagtcaagaatacagttagccaagtagctaagagaactcttacaatgggtgctaatggtgaacttcatccagcaagattctgtgaaaaggaattgcttcgagtcgtggatagggaatacttgttcgcctacgctgatgatccttgcagttgcaactaccctttaatgcagaaactgagacaagttcttgttgatcatgcaatgaagaatggtgaaagtgagaagaatgtgaacagctcaatcttccaaaagattggagctttcgaagacgaattaaaggctgttttacctaaagaagtggagaatgcaagagctgcattggagagtggcaaccctgctattgctaacaggattacagaatgcagatcttatccattgtacaggtttgtgagaaaggagcttggaacagaattgttgacaggagaaagagtccgatcaccgggcgaggagtgtgacaaggtgttcacagcaatgtgcaatggacagatcattgatccaatgttggagtgtctcaagagctggaatggtgctcctcttcctatctgttag

SEQ ID NO: 133079 - protein, 717 aa, Nicotiana attenuata
MASNGHVNGGEDFELCKKSSATDPLNWEMASESLRGSHLDEVKKMVSEFRKPMVKLGGETLTVAQVAAIAVRDKSANGVKVELSEDARAGVKASSDWVMDSMNKGTDSYGVTTGFGATSHRRTKNGGALQKELIRFLNAGVFGNGTETNHTLPHSATRAAMLVRINTLLQGYSGIRFEILEAITKLINSNITPCLPLRGTITASGDLVPLSYIAGLLTGRPNSKAVGPNGETLNAEEAFRVAGVNGGFFELQPKEGLALVNGTAVGSGMASMVLFDSNILAVMSEVLSAIFAEVMNGKPEFTDHLTHKLKHHPGQIEAAAIMEHILDGSSYVKAAQKLHEMDPLQKPKQDRYALRTSPQWLGPQIEVIRSATKMIEREINSVNDNPLIDVSRNKALHGGNFQGTPIGVSMDNARLALASIGKLMFAQFSELVNDYYNNGLPSNLTASRNPSLDYGFKGAEIAMASYCSELQFLANPVTNHVQSAEQHNQDVNSLGLISARKTAEAVDILKLMSSTYLVALCQAIDLRHLEENLKNAVKNTVSQVAKRTLTMGANGELHPARFCEKELLRVVDREYLFAYADDPCSCNYPLMQKLRQVLVDHAMKNGESEKNVNSSIFQKIGAFEDELKAVLPKEVENARAALESGNPAIANRITECRSYPLYRFVRKELGTELLTGERVRSPGEECDKVFTAMCNGQIIDPMLECLKSWNGAPLPIC

SEQ ID NO: 133080 - DNA, 2157 bp, Astragalus membranaceus
  CDS (1)..(2157)
atggagggagaaggagccaatggacacgtgtcaaaccacgttaccgaagccgaatattgcatcagcaaagccggtggtgatccactcaactggggtgtagcagcggaggcgctgaaggggagtcatttggatgaggtgaagcggatggtggaggagtaccgcaatccggtggttaagatcggtggtgagactcttaccattgctcaggtggctggaattgcctcccatgacggaggtgttaaggtggagttgtcggaatcggcgagggctggcgttaaggctagtagtgactgggtgatgaatagcatgaacaatggcactgatagctatggtgttaccaccggtttcggtgctacttcccatcgtagaaccaaacagggcggtgccttgcagaaagagttaattaggtttttgaatgctggaatatttggcaatggtactgaatccaattgtacactgccacacacagcaactagagctgccatgctagtgagaatcaacacacttcttcaagggtactctggtattagatttgaaatcctagaagccatcactaagcttctaaacaacaacatcaccccatgtttgcctcttcgtggaacaatcacagcttctggtgatcttgttcccctttcttacattgccggtttgctaactggccgacctaactccaaagctgttggaccctctggagagattctcaatgccaaagaagcttttcagttggctaacattggttctgagttctttgaattgcaacccaaagaaggtcttgcacttgttaatggaactgccgttggttctggcttagcttcaattgttctctttgaagcaaacgtgttagccgttttggctgaagttatgtcagcaatttttgctgaagtcatgcaagggaaacctgaattcaccgatcatttgacacataagcaaaaacatcaccctggtcaaattgaagccgctgctatcatggaacatattttggatggaagctcttatgttttagcagctaaaaagttgcacgatgtagatcctttgcaaaaacctaaacaagatcgctatgcacttagaacttcaccacaatggcttggtcctttgattgaagttattagattttcaaccaagtcaattgagagagagattaactcggtgaacgacaaccccttgattgatgtttcaaggaacaaggctttacatggtggtaactttcaaggaactcccattggagtttcaatggataatacacgtttagctcttgcttcaattggtaaacttatgtttgctcaattctctgaacttgtcaatgatttttacaacaatgggttgccatcaaatctctctggcagtaggaatcccagcttggattatggtttcaagggagctgaaattgccatggcatcttattgctctgagttacaatatcttgctaaccctgtgaccacccatgtccaaagtgctgagcagcataaccaagatgtgaactcactgggattgatttcttctagaaaaacaagtgagtctattgagatcctgaagctcatgtcctccactttcttggttgcactttgccaagcaattgacttgaggcatttggaagagaatttgaagaacaccgtgaagaacactgtaagccaagttgccaagaggacactcaccacgggtgtcaatggcgaactccacccttctagattttgtgagaaggatttgcccaaagttgttgatagggagtatgtatttgcctacattgatgacccttgccttgctacatacccaatgatgcaaaatttgaggcaagtgcttgtggaccatgcattagcaaatgcagaagcagagaagaacgtgaacacatcaatttttcaaaagattgcaacatttgaggatgagttgaaggctctcttgccaaaggaggttgaaaatacaagggttgcatatgaaaatggccaatgggcaatccctaacaagattaaggaatgcaggtcctatccattgtacaagtttgttagaggagagttggggacagagttgctaactggagaaaaggtaatctcaccaggtgaggagtttgacaaacttttcacagcaatgtgccagggtaaaattattgatcctcttttggaatgtctcggcgaatggaatggtgctcctcttccaatttcttag

SEQ ID NO: 133081 - protein, 718 aa, Astragalus membranaceus
MEGEGANGHVSNHVTEAEYCISKAGGDPLNWGVAAEALKGSHLDEVKRMVEEYRNPVVKIGGETLTIAQVAGIASHDGGVKVELSESARAGVKASSDWVMNSMNNGTDSYGVTTGFGATSHRRTKQGGALQKELIRFLNAGIFGNGTESNCTLPHTATRAAMLVRINTLLQGYSGIRFEILEAITKLLNNNITPCLPLRGTITASGDLVPLSYIAGLLTGRPNSKAVGPSGEILNAKEAFQLANIGSEFFELQPKEGLALVNGTAVGSGLASIVLFEANVLAVLAEVMSAIFAEVMQGKPEFTDHLTHKQKHHPGQIEAAAIMEHILDGSSYVLAAKKLHDVDPLQKPKQDRYALRTSPQWLGPLIEVIRFSTKSIEREINSVNDNPLIDVSRNKALHGGNFQGTPIGVSMDNTRLALASIGKLMFAQFSELVNDFYNNGLPSNLSGSRNPSLDYGFKGAEIAMASYCSELQYLANPVTTHVQSAEQHNQDVNSLGLISSRKTSESIEILKLMSSTFLVALCQAIDLRHLEENLKNTVKNTVSQVAKRTLTTGVNGELHPSRFCEKDLPKVVDREYVFAYIDDPCLATYPMMQNLRQVLVDHALANAEAEKNVNTSIFQKIATFEDELKALLPKEVENTRVAYENGQWAIPNKIKECRSYPLYKFVRGELGTELLTGEKVISPGEEFDKLFTAMCQGKIIDPLLECLGEWNGAPLPIS

SEQ ID NO: 133082 - DNA, 2148 bp, Populus kitakamiensis
  CDS (1)..(2148)
atggagacaatcaccaagaatggctaccaaaatggttcttcggagagtttgtgtacccaacgtgatcccctcagctggggagttgctgccgaggcaatgaaaggaagccatttggacgaagtgaaacgtatggtagctgagtataggaagcctgtcgtgaatcttgctggtcagaacctgattatcgctcaggttgcatctattgctggccatgatgctagtaatgtcaaggtggaactttctgagtctgcaagacctcgagtcaaggctagcagtgactgggtcatggatagcatggacaagggaactgatagttatggtgtcactactggttttggtgctacttcccatagaagaaccaagcaaggtggcgctcttcagaaggaactcatcagattcttgaatgctgggatctttggcaatggaacagaaacttgccacacactgcctcactcagcaactagagcagctatgcttgtcaggatcaacactctcctccaaggctactctggcatcagatttgagatcttggaagcaattaccaagctacttaataacaacatcactccatgcttgccactacgtggtacaatcacagcttcgggtgatttagtcccattatcctacattgctggattactgaccggcagccctaattccaaggccactggtcccaacggagaagtgctggatgctgttgaagcctttaaagctgctggtattgattctggattctttgagttgcagcctaaagaaggcctcgctcttgttaatggaactgcagttggttctggtttggcttccatggttcttttcgagaccaacgttcttgctgtcttatcagaactcatatctgcaattttcgccgaggttatgaatggtaaacctgaattcactgaccatctgacacacaagttgaagcaccatccaggtcaaattgaggctgctgctataatggagcacattttagatggcagcgcttacatgaaggcagctaagaagttgcatgaaatggaccccttgcagaaaccaaagcaagatcgctacgctctgaggacttcaccgcaatggcttggcccccagattgaagtgatccgattctcaaccaagtcaattgaaagagagattaattcagtgaatgacaaccctctaattgatgtttcaaggaacaaggccttacatggtggcaacttccagggaactccaattggagtctcaatggacaatgtacgtttggctattgcatctataggcaagctcctattcgctcagttcagtgagctcgtaaatgatttctacaacaacggattgccatcaaatctcactgctagcagaaatccaagtctggattatggtttcaaaggagctgaaatagcaatggcctcctactgttctgagcttcagtatctcgctaatccagtcactagccatgtgcaaagtgccgagcagcacaatcaagatgttaactcgttgggacttatttcttcaagaaagacaggttcggaagctgtagatatcttgaaactcatgtccacaactttcttagtggcactctgccaagcagttgacttgaggcatttggaggagaacttgaggagcgctgtcaagaacactgttagtcatgtatccaagagggttttaaccacaggtgctaatggagaacttcacccatcaaggttctgtgagaaggagttgctcaaggtggttgaccgtgaagatgtctttgcttacgcagatgacccctgcagtgctacctatccattgatgcaaaaactaaggcaagttcttgttgaccatgcattggcaaatggagagaatgagaagaacgcaagcacttcagtcttccaaaagattgcagctttcgaggacgaattgaaggcccttttgcctaaagaggttgagagcgcaagagcagcatatgacagtgggaattcagcaattgagaataagattaaggaatgcaggtcttatccactgtacaagtttgtgagagaggagttgggaactggattgctcactggcgaaaacgtccgatcgcctggtgaggagttcgacaaggtgtttacagctatgtgccaggggaagatcattgacccaatgctggaatgccttggtgaatggaatggtgcccctcttccaatctgttga

SEQ ID NO: 133083 - protein, 715 aa, Populus kitakamiensis
METITKNGYQNGSSESLCTQRDPLSWGVAAEAMKGSHLDEVKRMVAEYRKPVVNLAGQNLIIAQVASIAGHDASNVKVELSESARPRVKASSDWVMDSMDKGTDSYGVTTGFGATSHRRTKQGGALQKELIRFLNAGIFGNGTETCHTLPHSATRAAMLVRINTLLQGYSGIRFEILEAITKLLNNNITPCLPLRGTITASGDLVPLSYIAGLLTGSPNSKATGPNGEVLDAVEAFKAAGIDSGFFELQPKEGLALVNGTAVGSGLASMVLFETNVLAVLSELISAIFAEVMNGKPEFTDHLTHKLKHHPGQIEAAAIMEHILDGSAYMKAAKKLHEMDPLQKPKQDRYALRTSPQWLGPQIEVIRFSTKSIEREINSVNDNPLIDVSRNKALHGGNFQGTPIGVSMDNVRLAIASIGKLLFAQFSELVNDFYNNGLPSNLTASRNPSLDYGFKGAEIAMASYCSELQYLANPVTSHVQSAEQHNQDVNSLGLISSRKTGSEAVDILKLMSTTFLVALCQAVDLRHLEENLRSAVKNTVSHVSKRVLTTGANGELHPSRFCEKELLKVVDREDVFAYADDPCSATYPLMQKLRQVLVDHALANGENEKNASTSVFQKIAAFEDELKALLPKEVESARAAYDSGNSAIENKIKECRSYPLYKFVREELGTGLLTGENVRSPGEEFDKVFTAMCQGKIIDPMLECLGEWNGAPLPIC

SEQ ID NO: 133084 - DNA, 2142 bp, Jatropha curcas
  CDS (1)..(2142)
atggcaacaattatcggaaatggtcaccagaatggttctttagagggtctgtgtataactcgtgatccactgagttggggagtggctgctgagtcaatgaaaggtagccatttagatgaggtgaagaagatggtgagtgaatataggaaacctttggtcaagttaggtggcgagaccttgactgtagctcaggtggctgctatcgccagtcatgatgccggtgttaaggtggagcttgctgagtcagcccgagctggggttaaagctagcagtgactgggttatggatagtatgaataaaggaactgatagttatggtgttactactggttttggagctacttcccatagaagaaccaaacaaggtgctgctctgcaaagggagcttattagattcttgaatgctgggatttttggcaatggaacagaaacatgtcacacattacctcactctgcaacaagagcagcaatgctagtgagaatcaatactcttcttcaaggttactcaggcattagatttgaaatcttggaagccattactaaactcctcaaccacaatatcactccatgcttgcctctccgtggcacaatcactgcttcaggagatttagttccattatcttatattgctggattattaaccggccggcctaattccaaagccattggcccttccggagaatctttagatgctgttgaagcttttcgccttgctgatattgattctggattctttgagttacagcctaaagaaggtcttgctcttgttaatggcacagcagttggttctgggttggcttctatggttctatttgaagcaaatgttcttgctgtcttgtcagaaatattatcagcaattttcgccgaagttatgaatggaaaacctgaatttactgatcatttgacacataaattgaagcatcatcctggtcaaattgaagctgcagctataatggagcatattttagatggtagctcctacattaaagctgctaaacaattacatgaaattgatccattgcagaaaccaaaacaagatcgttatgctttaagaacttctcctcaatggttaggccctcaaatcgaagttattcgattttctactaaatcaattgaaagagagattaactctgtcaatgataatcctttgattgatgtttcaagaaacaaggctttacatggtggaaactttcaaggcacaccaattggtgtttcaatggataatgcacgtttggctattgcttcaattgggaagttaatgtttgctcaatttagtgagctcgtaaatgatttttacaataatgggttgccttcaaatctttctggaggaagaaatccgagtttggattatggattcaaaggagctgaaattgcaatggcttcatactgttctgagcttcaatttcttgctaatccagttactagccatgtgcaaagtgcagagcagcataatcaagatgtgaactcattagggttaatttcttcaagaaagactcaagaagcgattgatattttgaagcttatgtcttcaactttcttagtagcactatgtcaagctattgacttgaggcatttggaagagaatttgaagcatgcagttaaaaataccgtaactcaagtagctaaaagagttttaactactggtgccaatggagaacttcatccttcaagattttgtgggaaagatttgctaaaagttgtcgatcgcgaacaagtgtttgcgtatattgatgatccctgtagtgcgacatatcctttgatgcaaaaactaaggcaagttcttgtcgaacatgccttggcgaatggcgaaaatgaaaaaaatgctagcacttccgttttccaaaagattggtgcttttgaagaagaattgaaaacccttttgcctaaagaagttgaaagtgcaagagaagcatatgagagtggaagtgcagcaattggcaataagattaaggaatgcaggtcatatcctttgtataagtttgtgagggaggagttaggtagtggattgctcaccggagagaaagtccggtcacctggagaggagtttgacaaggttttcactgctatgtgtgaaggaaagattattgatccaatgatggaatgtctcaaggaatggaatggtgctcctcttccaatttgttaa

SEQ ID NO: 133085 - protein, 713 aa, Jatropha curcas
MATIIGNGHQNGSLEGLCITRDPLSWGVAAESMKGSHLDEVKKMVSEYRKPLVKLGGETLTVAQVAAIASHDAGVKVELAESARAGVKASSDWVMDSMNKGTDSYGVTTGFGATSHRRTKQGAALQRELIRFLNAGIFGNGTETCHTLPHSATRAAMLVRINTLLQGYSGIRFEILEAITKLLNHNITPCLPLRGTITASGDLVPLSYIAGLLTGRPNSKAIGPSGESLDAVEAFRLADIDSGFFELQPKEGLALVNGTAVGSGLASMVLFEANVLAVLSEILSAIFAEVMNGKPEFTDHLTHKLKHHPGQIEAAAIMEHILDGSSYIKAAKQLHEIDPLQKPKQDRYALRTSPQWLGPQIEVIRFSTKSIEREINSVNDNPLIDVSRNKALHGGNFQGTPIGVSMDNARLAIASIGKLMFAQFSELVNDFYNNGLPSNLSGGRNPSLDYGFKGAEIAMASYCSELQFLANPVTSHVQSAEQHNQDVNSLGLISSRKTQEAIDILKLMSSTFLVALCQAIDLRHLEENLKHAVKNTVTQVAKRVLTTGANGELHPSRFCGKDLLKVVDREQVFAYIDDPCSATYPLMQKLRQVLVEHALANGENEKNASTSVFQKIGAFEEELKTLLPKEVESAREAYESGSAAIGNKIKECRSYPLYKFVREELGSGLLTGEKVRSPGEEFDKVFTAMCEGKIIDPMMECLKEWNGAPLPIC

SEQ ID NO: 133086 - DNA, 2145 bp, Acacia mangium x Acacia auriculiformis
  CDS (1)..(2145)
atggaagccgttgctaacgtcaaagccactgccgatagcttctgtctgagcggcggagtagctgccgcggaccccctcaactggggtgtcgccgccgaatcactcaagggcagccacttggacgaggtgaagcgaatggtggaggagttccggaagccggtggtccgcctcggtggtgagaccctcaccatctcccaggtggcggccatcgccgcccacgaccaaggtgtcaaggtggagctatccgagtcggccagggctggcgttaaggctagcagtgactgggtcatggacagcatgaataaaggcacggatagctacggtgtcaccactggcttcggtgctacttctcacaggcgaaccaaacaaggcgctgctctgcagaaagagcttatcagattcttgaacgctggaatatttggcaacggcacagagtcatgccacactctgccacactcagcaaccagagccgccatgctggttagaatcaacactctcctgcaaggctactctggcatcagattcgagatcctggaagccatcaccaagttcctcaaccacaacatcactccatgtttgcctcttcgtggtacaatcaccacctctggcgatctcgtccctctttcttacatcgccggtttgctcaccggccgacccaactccaaagccgttggaacctccggtgaacttctcactcccaaggaagcctttcaattggccggcattgattcagacttctttgggttacagcccaaggaaggtcttgccctcgtcaacggcaccgccgttggctctggcttagcttccatggttctgttcgaggccaacattttggccgtgctgtctgaagttctatcggcaatttttactgaagtgatgcaagggaagcctgaatttacagaccatttgacacataagttgaagcaccaccctggtcaaatcgaagctgctgctataatggaacacattcttgatggaagctcgtacatgaaagcggctcaaaagttgcatgagattgatcccctgcagaagcctaaacaagatcgttacgcgcttcgaacttcaccccagtggctgggtcctctcattgaggtgatcagattctccaccaaatccatcgagagggagatcaactctgtgaacgacaaccctttgattgacgtttcaaggaacaaggccctgcacggcggtaatttccaaggaaccccaattggagtctccatggacaacacccgtttggctctcgcatctatagggaaactcatgtccgctcaattttctgagctggtcaatgatttttataacaatgggttgccttcaaatctctctgcgggtagaaaccccagcttggactatggtttcaagggtgctgaaatcgccatggcatcttactgctctgaacttcaatatcttgcaacccagtacgagcacgtccagagtgctgagcaacacaatcaggatgtcaattcattgggtttgatttcatctcgaaaaaccaacgaagccattgaaatcttgaagctcatgtcttccacatacctcattgcactttgccaagcaattgacctgaggcatctggaggagaacttgaagagcacagtgaacagtacggtgagtcaagtcgcaaagagaactctcaccacaggggtaaacggggaactccactcttctagattctgtgagagagatttgctgaaagtggtggatagggagcacgtatttacctacattgatgaccccaccagtgctacatacccactgatgcagaaactgaggcaagttctggttgatcacgcactagagaatggcgataacgagaagaactcaagcacctcgatcttccagaagattgcagcttttgaggaggaattgaagactctgttgccaaaggaggtagagagagcaagaactgcatacgagaacggaaattcatcagtcccaaacaagatcaaggaatgcagatcgtacccattgtacaagtttgtgagagaggatctgggagctgggctacttaccggagagaagacaaggtcaccaggtgaagagtgtgacaaagtgttcacggctttgtgccagggaaagattatcgatcctcttctggaatgccttggggagtggaatggtgctcctctccctatctgttag

SEQ ID NO: 133087 - protein, 714 aa, Acacia mangium x Acacia auriculiformis
MEAVANVKATADSFCLSGGVAAADPLNWGVAAESLKGSHLDEVKRMVEEFRKPVVRLGGETLTISQVAAIAAHDQGVKVELSESARAGVKASSDWVMDSMNKGTDSYGVTTGFGATSHRRTKQGAALQKELIRFLNAGIFGNGTESCHTLPHSATRAAMLVRINTLLQGYSGIRFEILEAITKFLNHNITPCLPLRGTITTSGDLVPLSYIAGLLTGRPNSKAVGTSGELLTPKEAFQLAGIDSDFFGLQPKEGLALVNGTAVGSGLASMVLFEANILAVLSEVLSAIFTEVMQGKPEFTDHLTHKLKHHPGQIEAAAIMEHILDGSSYMKAAQKLHEIDPLQKPKQDRYALRTSPQWLGPLIEVIRFSTKSIEREINSVNDNPLIDVSRNKALHGGNFQGTPIGVSMDNTRLALASIGKLMSAQFSELVNDFYNNGLPSNLSAGRNPSLDYGFKGAEIAMASYCSELQYLATQYEHVQSAEQHNQDVNSLGLISSRKTNEAIEILKLMSSTYLIALCQAIDLRHLEENLKSTVNSTVSQVAKRTLTTGVNGELHSSRFCERDLLKVVDREHVFTYIDDPTSATYPLMQKLRQVLVDHALENGDNEKNSSTSIFQKIAAFEEELKTLLPKEVERARTAYENGNSSVPNKIKECRSYPLYKFVREDLGAGLLTGEKTRSPGEECDKVFTALCQGKIIDPLLECLGEWNGAPLPIC

SEQ ID NO: 133088 - DNA, 2316 bp, Phaeosphaeria nodorum
  CDS (1)..(2316)
atggcgtttttcaacagccttgtagtggaccattggcactcgctggaaggagacgagggcggaagacgtgacgtggttctgaatgggcgcagtctgaaacttgcagacgtcgtcgcagttgcacggcttggcttgtccgcaacactgtcgcctgaggcaaacgagagaatctcaagaagcgccgaagccatccagaagagtatcgacaatggagagatcatctacggcgtcaatacaggatttggcggcagcgcagacacacgaactcaaaagattgagaatctgcaacgcgagatcatgcgcggtctgaattacggaatcctggacggcgacctatactcaacaccattgtccctcgcgagggctgaaagccgaactaagcagcacaatgacacagtactacctttggacaacaagaacagcaaccacatgcccgcatcctgggtccgtgccacgatgctcatccgtctcaacactctttcgaatggcgcctcgggcgtgcgcgtgtctacgatccagaccctgttcaagatgctgcaagaggacgtcgtcccgataacccctctccgagggagtatctctgcgtctggtgacttaagtcctctttcatatgttggtggcgcgatgtgcggaaaaccaaacttatccgtctggagcagtgggaaggtaaccaccgcagaccgagccctgcaagagaaaaacatcgaaaaggttcgccttggaccaaaagaaggcctggcaatcgtgaatgggacggcggcaagcgcaagtgtaggggctcttgccatgcacgaagccctgaatcaggcagcattgtcacaagttctgactgcgatgagtgttgaagcgctacttggaactgatgaaagcttcgacaccttcttctccgaggtcagaccgcatcctggccaagccgatgttgcaactgccgtgtcagcactactgagaggatcggatctgatgcaaaaaggcgatggttcggagcaaagctctctacggcaagacaggtattcattacgaactacaccgcagtggatcggcccagtcttggaggactttatgttggcgcaccagcaaatagtcactgagttgaattctgtcaccgacaatccattgatcgataccacgacgaccccaagccaacccagaacgattcacgggggaaacttccaggcgcgcagcatcacatccgccatggaaaagattcgtcaaggagtgcaaggcataggccgcatgcttttcacccaatgcactgagctcattaacccgaatacaagccgcggcttgcccccaaatctcgtctttgatgagccttccgaatcatatatttggaagggcaccgatattatgattgcagcgttgacgtctgagcttggtttcctggcgaatccagtcggcacgcatgttcagactgctgagatgggaaaccaaagcttgaattcactcgcactaatttccgcgcggtatacactggaggcgctttctgtcttgacgcaactgtcgtccgcgcatctcgtcgccttgtgccaagcgctcgacctgagggcgatgggcctgcagttcctcgcaatgttggaaccgcttttctgtcagctcttcgcgtcaaaattcggatctgattcgttcataaaattgagacgagaggatgaagccacaacggagaatggaatttgttggtcaatattcacacagcgcctcgctcaagtatcgacccagaacacgtcgtcgcgtttcaaaaccgcggtttcggccgtctcgtcgcatctattgcctcttctcagtccagagtcgcttgcgacattgcagatatgggctacagaggcagaggaccttgcgctacggtcgtttcatgcgagcaaggatatctatcttgcaagtccggatgccactccctatgtaggcactgcagcgaggaaaatgtacgactttgtaagaaacgaacttcgcatcccgtttatctgtaacgattcgatatccacaccgcaggacactatggagagcggaacaagtttcttcgacgagggactaacgcatcaaaggaagggaatgaacatgggcgatgtaatcacagaggtttatcgagcgcagcgctctggtgagctgtacggcgttgttgtggagtgcctgaaagaagcaggactgggacgtacaggcctcgagaaagaatcaccaacattactcgcaaagcaagacgcaggcggtgcaaacgtaaatttgaagaggccgctggtggaaggcgacggcggtcttgcggacgaacatggcgtcgaggtccgagaaagggcggagaaaaggcgaaagagcatgagtgcctag

SEQ ID NO: 133089 - protein, 771 aa, Phaeosphaeria nodorum
MAFFNSLVVDHWHSLEGDEGGRRDVVLNGRSLKLADVVAVARLGLSATLSPEANERISRSAEAIQKSIDNGEIIYGVNTGFGGSADTRTQKIENLQREIMRGLNYGILDGDLYSTPLSLARAESRTKQHNDTVLPLDNKNSNHMPASWVRATMLIRLNTLSNGASGVRVSTIQTLFKMLQEDVVPITPLRGSISASGDLSPLSYVGGAMCGKPNLSVWSSGKVTTADRALQEKNIEKVRLGPKEGLAIVNGTAASASVGALAMHEALNQAALSQVLTAMSVEALLGTDESFDTFFSEVRPHPGQADVATAVSALLRGSDLMQKGDGSEQSSLRQDRYSLRTTPQWIGPVLEDFMLAHQQIVTELNSVTDNPLIDTTTTPSQPRTIHGGNFQARSITSAMEKIRQGVQGIGRMLFTQCTELINPNTSRGLPPNLVFDEPSESYIWKGTDIMIAALTSELGFLANPVGTHVQTAEMGNQSLNSLALISARYTLEALSVLTQLSSAHLVALCQALDLRAMGLQFLAMLEPLFCQLFASKFGSDSFIKLRREDEATTENGICWSIFTQRLAQVSTQNTSSRFKTAVSAVSSHLLPLLSPESLATLQIWATEAEDLALRSFHASKDIYLASPDATPYVGTAARKMYDFVRNELRIPFICNDSISTPQDTMESGTSFFDEGLTHQRKGMNMGDVITEVYRAQRSGELYGVVVECLKEAGLGRTGLEKESPTLLAKQDAGGANVNLKRPLVEGDGGLADEHGVEVRERAEKRRKSMSA

SEQ ID NO: 133090 - DNA, 2178 bp, Trifolium pratense
  CDS (1)..(2178)
atggaagcagtagcatcagccataacaaaaaacaacattaatgattatgattcattttgcttaactcatgctaatgctaataacatgaaagtgaatggtgctgatcctttgaattggggtgtggctgctgaggcaatgaaagggagtcacttggatgaggtcaagcgtatggtggaggagtaccggaaaccggttgtccgtcttggtggcaagacactgacaatttctcaggtggctgccattgccgcacacgatggtgccacggtggagttgtcggaatctgctagagctggcgttaaggccagtagtgattgggtgatggagagcatgaacaaaggtaccgatagttatggtgtcaccacagggttcggcgctacctcgcaccgccgaaccaaacaaggtggtgctttgcagaaagaacttataaggtttttgaatgctggaatatttggaaatggaactgagtcaagccacacactaccacacacagccacaagagccgccatgctagtaagaatcaacacacttctgcaaggctattcaggaatcagatttgaaatcttagaagctatcaccaagctccttaacaacaatgtcaccccatgtttaccacttcgcggtacaatcacagcttcaggagatttagtcccactttcttacattgctggtttactaactggaagaccaaattctaaagctcatggacctacaggagaagttcttaatgcaaaacaagcttttcaattggcgggaatcaataccgagttctttgaattacaaccgaaagaagggcttgcacttgttaatggaactgctgttggttctggtttagcttctattgttctgttcgaggctaacatattggcggtgttgtctgaagtactatcagcaattttcgctgaagttatgcaagggaagcccgaatttaccgatcatttgacacataagttgaagcaccaccctggtcaaattgaggctgctgctattatggagcacattttggatggcagtgcttatgtcaaagatgctaagaaattgcatgagatggaccctttgcagaagccaaagcaagatagatacgcactaagaacttcgccacaatggcttggtccattgattgaagtgattagattctctaccaagtcaattgagagagagatcaactctgtcaatgacaaccctttgattgatgtttcaagaaacaaggctttgcatggtggaaattttcaaggaacacctatcggagtatccatggataatacacgtttggctcttgcatcaattgggaaacttttgtttgctcaattctccgagcttgtcaacgatttttacaacaatggattgccttcaaatctctctgctagtagaaatcctagcttggattatggattcaagggatccgaaattgccatggcttcctattgttctgagttacaatatcttgcaaatccagttacaacccatgtccaaagtgccgagcaacacaaccaagatgtgaactcattgggtttgatttcatccagaaaaacatatgaagccattgagatccttcagttgatgtcttccacattcttgattgcactttgccaagcaattgatttaagacatttggaggagaatttgaaaaactcggtcaagaataccgtaagccaagttgccaaaaagaccttaactataggtgtcaatggagaacttcatccttcaagattctgtgaaaaagacttgttgaaagtggttgatagggagcatgtgttttcctatattgacgatccttgtagtgcgacataccccttgtcgcaaaaactcaggcaagtgctagtagaacatgctttagtcaatggagaaagtgagaagaatttgaacacatcaatcttccaaaagattgcaacttttgaggaagagttgaagaccctcttgccaaaagaagttgaaagtgcaaggactgcatatgagagtggaaattctacaattccaaacaagatcaatggatgcagatcatatccactttacaattttgtgagaaaggagttgggaactggtttgctaactggagaaaatgtcatttcaccaggtgaggagtgtgataagctattcacagctatgtgtcaagggaaaatcattgatcctcttcttgaatgcttgggagagtggaatggtgctcctcttccaatatgttaa

SEQ ID NO: 133091 - protein, 725 aa, Trifolium pratense
MEAVASAITKNNINDYDSFCLTHANANNMKVNGADPLNWGVAAEAMKGSHLDEVKRMVEEYRKPVVRLGGKTLTISQVAAIAAHDGATVELSESARAGVKASSDWVMESMNKGTDSYGVTTGFGATSHRRTKQGGALQKELIRFLNAGIFGNGTESSHTLPHTATRAAMLVRINTLLQGYSGIRFEILEAITKLLNNNVTPCLPLRGTITASGDLVPLSYIAGLLTGRPNSKAHGPTGEVLNAKQAFQLAGINTEFFELQPKEGLALVNGTAVGSGLASIVLFEANILAVLSEVLSAIFAEVMQGKPEFTDHLTHKLKHHPGQIEAAAIMEHILDGSAYVKDAKKLHEMDPLQKPKQDRYALRTSPQWLGPLIEVIRFSTKSIEREINSVNDNPLIDVSRNKALHGGNFQGTPIGVSMDNTRLALASIGKLLFAQFSELVNDFYNNGLPSNLSASRNPSLDYGFKGSEIAMASYCSELQYLANPVTTHVQSAEQHNQDVNSLGLISSRKTYEAIEILQLMSSTFLIALCQAIDLRHLEENLKNSVKNTVSQVAKKTLTIGVNGELHPSRFCEKDLLKVVDREHVFSYIDDPCSATYPLSQKLRQVLVEHALVNGESEKNLNTSIFQKIATFEEELKTLLPKEVESARTAYESGNSTIPNKINGCRSYPLYNFVRKELGTGLLTGENVISPGEECDKLFTAMCQGKIIDPLLECLGEWNGAPLPIC

SEQ ID NO: 133092 - DNA, 2178 bp, Trifolium pratense
  CDS (1)..(2178)
atggaagcagtagcagcagccataacaaaaaacaacattaatgattatgattcattttgcttaactcatgctaatgctaataacatgaaagtgaatggtgctgatcctttgaattggggtgtggctgctgaggcaatgaaaggaagtcacttggatgaggtgaagcgtatggtggaggagtaccggaaaccggttgtccgtcttggtggcgagacactgacaatttctcaggtggctgccattgctgcacacgatggtgcgacagtggagctgtcggaatctgctagagccggcgttaaggcgagcagtgactggattatggagagtatgaacaaaggtactgatagttacggtgtcaccacagggttcggcgctacctcgcaccgccgaaccaaacaaggtggtgctttgcagaaagagctcataaggtttttgaatgcaggaatatttggaaatggaactgagtcaaaccacatcctaccacacacagcaacacgagcagccatgttagtaagaatcaacacacttctacaaggttattcaggcattagatttgaaatcttagaagccataaccaagctccttaacaacaatattactccatgtttaccacttcgcggtacaatcacagcttcaggagatttagtgcctctttcttacattgctggtttactaactggtagaccaaattcaaaagctcatggaccctctggagaaatacttaatgctaaagaagcttttcaattggctggaatcaatgctgatttctttgagttacaaccgaaagaaggtcttgcacttgttaatggaactgctgttggttctggtttagcttctattgttctgtttgaggctaacatattggcggtgttgtctgaagttctatctgcaattttcgctgaagttatgcaagggaagcctgaatttaccgatcatttgacacataagttgaagcaccacccaggtcaaattgaggctgctgctattatggaacacattttggatggaagtgcttatgtcaaagcagctaaaaagttgcacgagatcgatcctttgcagaagccaaaacaagatagatatgcacttagaacttcaccacaatggcttggtcctctaattgaagtcattagattttctaccaagtcaattgagagggagattaactcagttaatgacaaccctttgattgatgtttcaagaaacaaggctttgcacggtggaaattttcaaggaacgcctatcggagtatccatggataatacacgtttagctcttgcatcaatcggtaaacttatgtttgctcaattctctgagcttgtcaacgatttttacaacaacgggttgccttcaaatctctctgctagtagaaatcctagcttggattatgggttcaagggatccgaaattgccatggcttcctattgttctgagttacaatatcttgcaaatcccgttacaactcatgtccaaagtgccgagcaacacaaccaagatgtgaactctttaggtttaatttcttctcgaaaaacaaaagaagccattgagatccttcaactcatgtcttccacattcttgattgcactttgccaagcaattgatttaagacatttggaggagaacttgaaaaactcagtcaagaataccgtaagccaagtggccaaaaagaccttaactgtaggtgtcaatggagaacttcatccttcaagattctgtgaaaaagacttgttgaaagtggttgatagggagcatgtgttttcctatattgacgatccttgtagtgcgacataccccttgtcgcaaaaactcaggcaagtgctagtagaacatgctttagtcaatggagaaagtgagaagaattcgaacacatcaatcttccaaaagattgcaacttttgaggaagagttgaagaccctcttgccaaaagaggttgaaagtgcaaggactgcatatgagagtggaaattcaacaattgcaaacaagattaatggatgcagatcttatccactttacaagtttgtgagagaggagttgggaacttctttgctaactggagaaagagtcatttcaccaggtgaggagtgtgacaagctattcacagctatgtgtcaagggaaaatcattgatcctcttcttgaatgtttgggagagtggaatggttctcctcttccaatttgttaa

SEQ ID NO: 133093 - protein, 725 aa, Trifolium pratense
MEAVAAAITKNNINDYDSFCLTHANANNMKVNGADPLNWGVAAEAMKGSHLDEVKRMVEEYRKPVVRLGGETLTISQVAAIAAHDGATVELSESARAGVKASSDWIMESMNKGTDSYGVTTGFGATSHRRTKQGGALQKELIRFLNAGIFGNGTESNHILPHTATRAAMLVRINTLLQGYSGIRFEILEAITKLLNNNITPCLPLRGTITASGDLVPLSYIAGLLTGRPNSKAHGPSGEILNAKEAFQLAGINADFFELQPKEGLALVNGTAVGSGLASIVLFEANILAVLSEVLSAIFAEVMQGKPEFTDHLTHKLKHHPGQIEAAAIMEHILDGSAYVKAAKKLHEIDPLQKPKQDRYALRTSPQWLGPLIEVIRFSTKSIEREINSVNDNPLIDVSRNKALHGGNFQGTPIGVSMDNTRLALASIGKLMFAQFSELVNDFYNNGLPSNLSASRNPSLDYGFKGSEIAMASYCSELQYLANPVTTHVQSAEQHNQDVNSLGLISSRKTKEAIEILQLMSSTFLIALCQAIDLRHLEENLKNSVKNTVSQVAKKTLTVGVNGELHPSRFCEKDLLKVVDREHVFSYIDDPCSATYPLSQKLRQVLVEHALVNGESEKNSNTSIFQKIATFEEELKTLLPKEVESARTAYESGNSTIANKINGCRSYPLYKFVREELGTSLLTGERVISPGEECDKLFTAMCQGKIIDPLLECLGEWNGSPLPIC

SEQ ID NO: 133094 - DNA, 2139 bp, Trifolium pratense
  CDS (1)..(2139)
atggagggaattaccaatggccatgctgaagcaactttttgcgtgaccaaaagtgttggtgatccactcaactggggtgcagcggcagagtcgttgacggggagtcatttggatgaggtgaagcgtatggttgaggagtaccgtaacccgctggttaaaattggcggcgcgacgcttaccattgctcaggtggctggaattgcttctcatgatagtggtgtaagggtggagttgtctgagtccgcgagggccggcgttaaggcgagtagtgattgggtgatggacagcatgaacaatgggactgatagttatggtgttaccaccggttttggtgccacctctcaccggagaaccaagcagggcggtgccttgcagaaggagctaattaggtttttgaatgctggaatatttggcaatggtacagaatctaattgtacactaccacacacagcaactagagctgcaatgcttgtgagaatcaatactcttcttcaagggtactctggaattagatttgaaattttggaagctatcactaagctcctaaacaacaacattaccccatgtttaccacttcgcggtacaatcactgcttcgggtgatcttgttccactttcttacattgccggtttgttaaccggaagacccaactccaaagccgttggaccttccggagaaattctcaatgccaaagaagcatttcaactggcgggcattggttctgagtttttcgaattgcaaccaaaagaaggtcttgctcttgttaatggcaccgcggttggttctggtttagcttctattgttctatttgaagcaaatgtactagccgtgttgtcggaagttatgtcagcaatttttgctgaagttatgcaagggaagccagaattcaccgatcatttgactcataagttgaagcatcaccctggtcaaattgaagctgctgctattatggaacatattttggatggaagtgcttatgttaaagcagctaagaagttacacgaaactgatccattacaaaagcctaaacaggatcgttatgcacttagaacttcacctcaatggcttggtcctttgattgaagtgataagattttcaaccaagtcaattgagagagaaattaactcagtcaatgacaatcctttgattgatgtttcaaggaacaaggccattcatggtggtaactttcaaggaacacctattggagtttcaatggataacacacgtttagctcttgcttcaattggtaaactcatgtttgctcaattctctgaacttgttaatgatttttacaacaatgggttgccttcgaatctcactgctagtaggaacccaagtttggactacggtttcaagggagctgaaattgccatggcttcttattgctctgagttacaatatcttgctaatcctgtcaccacccatgtccaaagtgcagagcaacacaaccaagatgttaactctttgggtttgatttcatctagaaaaacaaatgaatctattgaaatcttaaagctcatgtcttccactttcttgattgctctatgtcaagcaattgacttgaggcatttggaggagaatttgagaaacactgtcaagaacactgtaagccaagtagctaagagaacactcaccaccggtgtcaacggagaacttcatccatctagattttgtgagaaagatttgctcaaagttgttgatagggaatatgtatttgcctatgctgatgatccttgtttagctacataccctttgatgcaaaagctgagacaagtgcttgtggatcatgcattggtaaatgttgatggagagaagaattcaaacacatccatcttccaaaagattgcaacttttgaagatgagttgaaagctatcttgccaaaggaagttgaaagtacaagggttgcatatgaaaatggacaatgtggaatttcaaacaagattaaggaatgcaggtcttatccattgtacaagtttgttagagaggagttgggaaccgcgttgctaaccggagaaaaagtgatatcgccgggcgaagagtgtgataaattgttcacagctatgtgccaaggtaaaattgttgatcctcttttggaatgcatgggagagtggaacggtgctcctcttccaatatgttga

SEQ ID NO: 133095 - protein, 712 aa, Trifolium pratense
MEGITNGHAEATFCVTKSVGDPLNWGAAAESLTGSHLDEVKRMVEEYRNPLVKIGGATLTIAQVAGIASHDSGVRVELSESARAGVKASSDWVMDSMNNGTDSYGVTTGFGATSHRRTKQGGALQKELIRFLNAGIFGNGTESNCTLPHTATRAAMLVRINTLLQGYSGIRFEILEAITKLLNNNITPCLPLRGTITASGDLVPLSYIAGLLTGRPNSKAVGPSGEILNAKEAFQLAGIGSEFFELQPKEGLALVNGTAVGSGLASIVLFEANVLAVLSEVMSAIFAEVMQGKPEFTDHLTHKLKHHPGQIEAAAIMEHILDGSAYVKAAKKLHETDPLQKPKQDRYALRTSPQWLGPLIEVIRFSTKSIEREINSVNDNPLIDVSRNKAIHGGNFQGTPIGVSMDNTRLALASIGKLMFAQFSELVNDFYNNGLPSNLTASRNPSLDYGFKGAEIAMASYCSELQYLANPVTTHVQSAEQHNQDVNSLGLISSRKTNESIEILKLMSSTFLIALCQAIDLRHLEENLRNTVKNTVSQVAKRTLTTGVNGELHPSRFCEKDLLKVVDREYVFAYADDPCLATYPLMQKLRQVLVDHALVNVDGEKNSNTSIFQKIATFEDELKAILPKEVESTRVAYENGQCGISNKIKECRSYPLYKFVREELGTALLTGEKVISPGEECDKLFTAMCQGKIVDPLLECMGEWNGAPLPIC

SEQ ID NO: 133096 - DNA, 2175 bp, Trifolium pratense
  CDS (1)..(2175)
atggaagcagtagcagcagccataacaaaaaacaacaatggttatgattcattttgtttgagtcatgctaatgctaataacatgaaagtgaatggtgctgatcctttgaattggggtgtggctgctgaggcaatgaaagggagtcacttggatgaggtgaagcgtatggtggaggagtaccggaaaccggtggtccgtctaggtggtgagacactgacaatttctcaggtggctgccattgctgcacatgatggtgcaacggtggagctgtcggaatctgctagagccggcgttaaggcgagcagtgactgggttatggagagtatgaacaaaggtactgatagttacggtgtcaccacagggttcggcgctacctcgcaccgccgaaccaaacaaggtggtgctttgcagaaagagctcataaggtttttgaatgcaggaatatttggaaatggaactgagtcaaaccacatcctaccacacacagcaacacgagcagccatgttagtaagaatcaacacacttctacaaggttattcaggcattagatttgaaatcttagaagccataaccaagctccttaacaacaatattactccatgtttaccacttcgcggtacaatcacagcttcgggagatttagtgcctctttcttacattgctggtttactaactggtagaccaaattcaaaagctcatggaccctctggagaaatacttaatgctaaagaagcttttcaattggctggaatcaatgctgatttctttgagttacaaccgaaagaaggtcttgcacttgttaatggaactgctgttggttctggtttagcttctattgttctgtttgaggctaatatattggcggtgttgtccgaagttctatctgcaattttcgctgaagttatgcaagggaagcctgaatttaccgatcatttgacacataagttgaagcaccaccctggtcaaattgaggctgctgctattatggaacacattttggatggaagtgcttatgtcaaagcagctaaaaagttgcacgagatcgatcctttgcagaagccaaaacaagatagatatgcacttagaacttcaccacaatggcttggtcctctaattgaagtcattagattttctaccaagtcaattgagagggagattaactcagttaatgacaaccctttgattgatgtttcaagaaacaaggctttgcacggtggaaattttcaaggaacgcctatcggagtatccatggataatacacgtttagctcttgcatcaatcggtaaacttatgtttgctcaattctctgagcttgtcaacgatttttacaacaacgggttgccttcaaatctctatgctagtagaaatccaagcttggattatgggttcaagggatccgaaattgctatggcttcctattgttctgagttacaatatcttgcaaatcccgttacaactcatgtccaaagtgccgagcaacacaaccaagatgtgaactctttaggtttaatttcttctcgaaaaacaaaagaagccattgagatccttcaactcatgtcttccacattcttgattgcactttgccaagcaattgatttaagacatttggaggagaacttgaaaaactcagtcaagaataccgtaagccaagtggccaaaaagaccttaactataggtgtcaatggagaacttcatccttcaagattctgtgaaaaagacttgttgaaagtggttgatagggagcatgtgttttcctatattgacgatccttgtagtgcgacataccccttgtcgcaaaaactcaggcaagtgctagtagaacatgctttagtcaatggagaaagtgagaagaattcgaacacatcaatcttccaaaagattgcaacttttgaggaagagttgaagaccctcttgccaaaagaggttgaaagtgcaaggactgcatatgagagtggaaattcaacaattgcaaacaagattaatggatgcagatcttatccactttacaagtttgtgagagaggagttgggaacttctttgctaactggagaaagagtcatttcaccaggtgaggagtgtgacaagctattcacagctatgtgtcaagggaaaatcattgatcctcttcttgaatgtttgggagagtggaatggtgctcctcttccaatttgttaa

SEQ ID NO: 133097 - protein, 724 aa, Trifolium pratense
MEAVAAAITKNNNGYDSFCLSHANANNMKVNGADPLNWGVAAEAMKGSHLDEVKRMVEEYRKPVVRLGGETLTISQVAAIAAHDGATVELSESARAGVKASSDWVMESMNKGTDSYGVTTGFGATSHRRTKQGGALQKELIRFLNAGIFGNGTESNHILPHTATRAAMLVRINTLLQGYSGIRFEILEAITKLLNNNITPCLPLRGTITASGDLVPLSYIAGLLTGRPNSKAHGPSGEILNAKEAFQLAGINADFFELQPKEGLALVNGTAVGSGLASIVLFEANILAVLSEVLSAIFAEVMQGKPEFTDHLTHKLKHHPGQIEAAAIMEHILDGSAYVKAAKKLHEIDPLQKPKQDRYALRTSPQWLGPLIEVIRFSTKSIEREINSVNDNPLIDVSRNKALHGGNFQGTPIGVSMDNTRLALASIGKLMFAQFSELVNDFYNNGLPSNLYASRNPSLDYGFKGSEIAMASYCSELQYLANPVTTHVQSAEQHNQDVNSLGLISSRKTKEAIEILQLMSSTFLIALCQAIDLRHLEENLKNSVKNTVSQVAKKTLTIGVNGELHPSRFCEKDLLKVVDREHVFSYIDDPCSATYPLSQKLRQVLVEHALVNGESEKNSNTSIFQKIATFEEELKTLLPKEVESARTAYESGNSTIANKINGCRSYPLYKFVREELGTSLLTGERVISPGEECDKLFTAMCQGKIIDPLLECLGEWNGAPLPIC

SEQ ID NO: 133098 - DNA, 2139 bp, Medicago truncatula
  CDS (1)..(2139)
atggagggaattaccaatggccatgttgaagcaaccttttgtttgagcaaaaatggtggtgatccactcaactggggcgcggcggcggagtcattgacagggagtcatttggatgaggtgaagcgtatggtggaggagtatcgtaacccgttggttaaaatcggcggtgagacacttaccattgctcaggtggctggaattgcttcccatgatagtggtgttagggtggagctttcggagtcggcaagggccggtgttaaggcaagtagtgactgggtgatggatagtatgaataaaggtacggacagttatggtgttaccaccggttttggtgctacttctcaccggagaactaaacaaggtggtgccttgcagaaggagctaattaggtttttgaatgccggaatatttggcaatggtacagaatcaaattgtacactaccacatacagcaacaagagctgcaatgcttgtgaggatcaacactcttcttcaagggtattctggtattagatttgaaatcttggaagctatcacaaagctcttgaacaacaatattaccccatgtttaccacttcgcggtacaatcacagcttccggtgatcttgttccactctcttacattgccggtttattaacgggcagacccaactctaaagccgttggaccgtctggagaaattctcaatgccaaggaagcttttcaacttgctggcattggttctgatttctttgaattgcaacctaaggaaggtcttgctcttgttaatggaactgctgttggttctggtttagcttctattgttctgttcgaagcaaatgtactagcggttttgtctgaagttatgtcggcaattttcgctgaagttatgcaagggaaacctgaatttactgatcatttgactcataagttgaagcatcaccctggtcaaattgaagctgctgctattatggagcatattttggatggaagcgcttatgttaaagccgctaagaagttacacgagactgatcctttgcaaaagcctaaacaagatcgttatgcacttagaacttcacctcaatggcttggtcctttgattgaagtgataagattttcgaccaagtctattgaaagagagattaactcggtcaacgacaaccctttgatcgatgtttcaaggaacaaggccatacatggtggtaactttcaaggaacacctatcggagtttcaatggacaacactcgtttagctcttgcttcgatcggtaaactcatgtttgctcaattctctgagcttgttaatgatttttacaacaatggtttgccttcgaatcttactgcaagtagaaacccaagtttggattatggtttcaagggatctgaaattgctatggcttcttattgctccgagttacaatatcttgctaaccctgtcaccacccatgtgcaaagtgctgagcaacacaaccaagacgttaactctttgggtttgatttcttctagaaaaacaaacgaggctattgagatcttaaagctcatgtcttccactttcttgatcgcgctttgccaagcaattgacttgaggcatttggaagagaatttgaggaacactgtcaagaacactgtaagccaagttgctaagagaacactcacaaccggtgtcaatggagaacttcatccttcaagattttgcgagaaagatttgctcaaagttgtcgacagggagtatgtgtttgcctatgctgatgatccttgcctagctacataccctttgatgcaaaagttgagacaagtgcttgtggatcatgcattagtgaataccgaaggagagaagaattcgaacacatcaatcttccaaaagattgcaacatttgaggatgaattgaaggctatcttgccaaaggaagttgaaagtgcaaggacagcatatgaaaatggacaaagtggaatttcaaacaagattaaggaatgtaggtcttatccattgtacaagtttgttagagaggagttgggaacagcgttgctaaccggtgaaaaagtgatatcgccaggagaagagtgcgacaaattgttcacagctatgtgccaaggtaaaattgttgatcctcttatggaatgtctcggagagtggaacggcgctcctcttccaatttgttaa

SEQ ID NO: 133099 - protein, 712 aa, Medicago truncatula
MEGITNGHVEATFCLSKNGGDPLNWGAAAESLTGSHLDEVKRMVEEYRNPLVKIGGETLTIAQVAGIASHDSGVRVELSESARAGVKASSDWVMDSMNKGTDSYGVTTGFGATSHRRTKQGGALQKELIRFLNAGIFGNGTESNCTLPHTATRAAMLVRINTLLQGYSGIRFEILEAITKLLNNNITPCLPLRGTITASGDLVPLSYIAGLLTGRPNSKAVGPSGEILNAKEAFQLAGIGSDFFELQPKEGLALVNGTAVGSGLASIVLFEANVLAVLSEVMSAIFAEVMQGKPEFTDHLTHKLKHHPGQIEAAAIMEHILDGSAYVKAAKKLHETDPLQKPKQDRYALRTSPQWLGPLIEVIRFSTKSIEREINSVNDNPLIDVSRNKAIHGGNFQGTPIGVSMDNTRLALASIGKLMFAQFSELVNDFYNNGLPSNLTASRNPSLDYGFKGSEIAMASYCSELQYLANPVTTHVQSAEQHNQDVNSLGLISSRKTNEAIEILKLMSSTFLIALCQAIDLRHLEENLRNTVKNTVSQVAKRTLTTGVNGELHPSRFCEKDLLKVVDREYVFAYADDPCLATYPLMQKLRQVLVDHALVNTEGEKNSNTSIFQKIATFEDELKAILPKEVESARTAYENGQSGISNKIKECRSYPLYKFVREELGTALLTGEKVISPGEECDKLFTAMCQGKIVDPLMECLGEWNGAPLPIC

SEQ ID NO: 133100 - DNA, 2169 bp, Medicago truncatula
  CDS (1)..(2169)
atggagttttcaaatggagataatagcaatggtagtaacggttcttccatgaatcttcgcaatggtggaacaaaaactagtaacaacaatgaccctttgaattggggtatagctgcagattctatgaagggtagtcacctagatgaggtgaagcgtatggtagaggaataccggaaaccggttgtgcccttaggtggaaaaggtttaacaatagcacaagtggctgcggttgcaacttatagtaccggtgtggcggttgaactagcggaagaggcacgctccggcgttaaagctagtagtgattgggtggttgatagtatgaataaagggactgatagctatggtgtgaccactgggtttggtgcaacctcacacagaagaacaaataaaggtagtgcccttcaaagtgaactcatcagatttctgaatgctggaattttcggcaatggaacagaagcatctcagacattacctcccacagccacaagagcaggcatgttggttagaatcaacacattgcttcaaggatattcaggaatcagatttgaaatcatggaagctatagcaaaatttctgaaccataacataacaccatgtcttccattaagaggtacaatcactgcatcaggtgatttaattcctttatcatatgttgctggccttttaattggaaggccaaattcaaaatctattggacctaatggacaagttctgaatgctcaagaggcttttcaactagctggaattgaaactggtttctttgagttgcaacctaaagaaggtttagcactagtgaatggtactgcagttggatcaggtttggcttcattggttctttttgatacaaatttactagttgttctctcggaaattttgtctgcgattttcgcggaagttatgctaggaaaacctcaattcactgaccatttaattcataaagtgaaacttcatcctggtcaaattgaggctgctgctattatggaacatattttagatggaagttattatggtaaggctgcacaaaaagtacatgagattaatccacttcagaagcccaaacaagatagatacgcgattcgaacatcaccgcagtggcttggaccgcagattgaagtgattcgatacgcaacaaagatgattgagagggagataaattccgtgaatgacaatccacttattgatgtttcaagggataaggcacttcatggaggaaatttccaaggtacaccgattggtgtatcgatggataacactcgtttagccattgctgccattggtaaacttatgtttgctcaattcactgagcttgtgaatgacatctataacaacggattgccttcaagtctcactgctagccgcaatccaagtttggattacggcttcaaaggagcagaagttgcaatggcatcctattgttcagaacttcaataccttgctagtcctgtcaccactcatgtccaaagtgctgaacaacataaccaagatgttaactctttaggcttgatctcagcaagaaaaacagctgaagcagttgaaatatggaagctgatgtcatccactttcttagttgcattgtgccaagccattgatctaaggcacattgaggaaaacttcaaaagtgttgtcaagaacactgtaagtcaagtagccaagagaattctaacagttggtgtcaatggtgagttgcatccatcaaggttttgtgagaaggatttactcaatgttgttgaaggtgagtatgttttcacttacattgatgacccttgcagtcctatatatcctctaatgcagaagctgagatatgtactagttgatcatgcattgcaaaatggtgataaggaggcaaattcaagcacctcgattttccaaaagattggagcttttgaggaagagcttaaggcccttttgcctaaagaggtggaaaatgctagggttgaaattgaaaatggaaaccctgcagttcctaatatgatcaaggaatgtagatcatatccattgtacaagttcatgagagaaactttagggacaagtttgctgacaggtgagaaaattaggtcacctggtgaggactgtgataaggttttcacagcaatgtgtgatggaaggtttattgatcccatgttggattgtctaaaggagtggaatggtgttcctctacctatctgctag

SEQ ID NO: 133101 - protein, 722 aa, Medicago truncatula
MEFSNGDNSNGSNGSSMNLRNGGTKTSNNNDPLNWGIAADSMKGSHLDEVKRMVEEYRKPVVPLGGKGLTIAQVAAVATYSTGVAVELAEEARSGVKASSDWVVDSMNKGTDSYGVTTGFGATSHRRTNKGSALQSELIRFLNAGIFGNGTEASQTLPPTATRAGMLVRINTLLQGYSGIRFEIMEAIAKFLNHNITPCLPLRGTITASGDLIPLSYVAGLLIGRPNSKSIGPNGQVLNAQEAFQLAGIETGFFELQPKEGLALVNGTAVGSGLASLVLFDTNLLVVLSEILSAIFAEVMLGKPQFTDHLIHKVKLHPGQIEAAAIMEHILDGSYYGKAAQKVHEINPLQKPKQDRYAIRTSPQWLGPQIEVIRYATKMIEREINSVNDNPLIDVSRDKALHGGNFQGTPIGVSMDNTRLAIAAIGKLMFAQFTELVNDIYNNGLPSSLTASRNPSLDYGFKGAEVAMASYCSELQYLASPVTTHVQSAEQHNQDVNSLGLISARKTAEAVEIWKLMSSTFLVALCQAIDLRHIEENFKSVVKNTVSQVAKRILTVGVNGELHPSRFCEKDLLNVVEGEYVFTYIDDPCSPIYPLMQKLRYVLVDHALQNGDKEANSSTSIFQKIGAFEEELKALLPKEVENARVEIENGNPAVPNMIKECRSYPLYKFMRETLGTSLLTGEKIRSPGEDCDKVFTAMCDGRFIDPMLDCLKEWNGVPLPIC

SEQ ID NO: 133102 - DNA, 2139 bp, Trifolium pratense
  CDS (1)..(2139)
atggagggaattaccaatggccatgctgaagcaactttttgcgtgaccaaaagtgttggtgatccactcaactggggtgcagcggcagagtcgttgacggggagtcatttggatgaggtgaagcgtatggttgaggagtaccgtaacccgctggttaaaattggcggcgcgacgcttaccattgctcaggtggctggaattgcttctcatgatagtggtgtaagggtggagttgtctgagtccgcgagggccggcgttaaggcgagtagtgattgggtgatggacagcatgaacaatgggactgatagttatggtgttaccaccggttttggtgccacctctcaccggagaaccaagcagggcggtgccttgcagaaggagctaattaggtttttgaatgctggaatatttggcaatggtacagaatctaattgtacactaccacacacagcaactagagctgcaatgcttgtgagaatcaatactcttcttcaagggtactctggaattagatttgaaattttggaagctatcactaagctcctaaacaacaacattaccccatgtttaccacttcgcggtacaatcactgcttcgggtgatcttgttccactttcttacattgccggtttgttaaccggaagacccaactccaaagctgttggaccttccggagaaattctcaatgccaaagaagcatttcaactcgcgggcattggttctgagtttttcgaattgcaaccaaaagaaggtcttgctcttgttaatggcaccgcggttggttctggtttagcttctattgttctatttgaagcaaatgtactagccgtgttgtcggaagttatgtcagcaatttttgctgaagttatgcaagggaagccagaattcaccgatcatttgactcataagttgaagcatcaccctggtcaaattgaagctgctgctattatggaacatattttggatggaagtgcttatgttaaagcagctaagaagttacacgaaactgatccattacaaaagcctaaacaggatcgttatgcacttagaacttcacctcaatggcttggtcctttgattgaagtgataagattttcaaccaagtcaattgagagagaaattaactcagtcaatgacaatcctttgattgatgtttcaaggaacaaggccattcatggtggtaactttcaaggaacacctattggagtttcaatggataacacacgtttagctcttgcttcaattggtaaactcatgtttgctcaattctctgaacttgttaatgatttttacaacaatgggttgccttcgaatctcactgctagtaggaacccaagtttggactacggtttcaagggagctgaaattgccatggcttcttattgctctgagttacaatatcttgctaatcctgtcaccacccatgtccaaagtgcagagcaacacaaccaagatgttaactctttgggtttgatttcatctagaaaaacaaatgaatctattgaaatcttaaagctcatgtcttccactttcttgattgctctatgtcaagcaattgacttgaggcatttggaggagaatttgagaaacactgtcaagaacactgtaagccaagtagctaagagaacactcaccaccggtgtcaacggagaacttcatccatctagattttgtgagaaagatttgctcaaagttgttgatagggaatatgtatttgcctatgctgatgatccttgtttagctacataccctttgatgcaaaagctgagacaagtgcttgtggatcatgcattggtaaatgttgatggagagaagaattcaaacacatccatcttccaaaagattgcaacttttgaagatgagttgaaagctatcttgccaaaggaagttgaaagtacaagggttgcatatgaaaatggacaatgtggaatttcaaacaagattaaggaatgcaggtcttatccattgtacaagtttgttagagaggagttgggaaccgcgttgctaaccggagaaaaagtgatatcgccgggcgaagagtgtgataaattgttcacagctatgtgccaaggtaaaattgttgatcctcttttggaatgcctgggagagtggaacggtgctcctcttccaatatgttaa

SEQ ID NO: 133103 - protein, 712 aa, Trifolium pratense
MEGITNGHAEATFCVTKSVGDPLNWGAAAESLTGSHLDEVKRMVEEYRNPLVKIGGATLTIAQVAGIASHDSGVRVELSESARAGVKASSDWVMDSMNNGTDSYGVTTGFGATSHRRTKQGGALQKELIRFLNAGIFGNGTESNCTLPHTATRAAMLVRINTLLQGYSGIRFEILEAITKLLNNNITPCLPLRGTITASGDLVPLSYIAGLLTGRPNSKAVGPSGEILNAKEAFQLAGIGSEFFELQPKEGLALVNGTAVGSGLASIVLFEANVLAVLSEVMSAIFAEVMQGKPEFTDHLTHKLKHHPGQIEAAAIMEHILDGSAYVKAAKKLHETDPLQKPKQDRYALRTSPQWLGPLIEVIRFSTKSIEREINSVNDNPLIDVSRNKAIHGGNFQGTPIGVSMDNTRLALASIGKLMFAQFSELVNDFYNNGLPSNLTASRNPSLDYGFKGAEIAMASYCSELQYLANPVTTHVQSAEQHNQDVNSLGLISSRKTNESIEILKLMSSTFLIALCQAIDLRHLEENLRNTVKNTVSQVAKRTLTTGVNGELHPSRFCEKDLLKVVDREYVFAYADDPCLATYPLMQKLRQVLVDHALVNVDGEKNSNTSIFQKIATFEDELKAILPKEVESTRVAYENGQCGISNKIKECRSYPLYKFVREELGTALLTGEKVISPGEECDKLFTAMCQGKIVDPLLECLGEWNGAPLPIC

SEQ ID NO: 133104 - DNA, 2163 bp, Aspergillus oryzae
  CDS (1)..(2163)
atggacttgttgaatatgggaaacctgagtgacttccagacccacatacagactgcatatcaggcacgtcaacgcctacagaatttgcaaagagagggtacacttgatgttgacggagctactcttgacatctctgctatagtagcagtagcatattatggctgtatacctaagatcaccacagatcctgctgtccttggaaggattgaagcaagcgtgcaggtgctgagagaccatctggataagggataccacgtctacggtgttaatactggctttggcggcagtgcggattctcgaacggatcgagtggtagcgctgcaatccggactctcccagcttctacaagcaggtgtgctagtcgcctcagataaggataccaatgtggacctcgagcgacaaattcgcctggattcacatgctgtgcccgtcccctgggtgcgagcagccatgttggttcgatgcaattcgaacgcccgcggccactctgcggttacgctttcagtgataaagtctatcttgcagctcttggagagtcacatcacaccagttgttcctttacgaggctctatctccgcttctggagatctcattccactttcttacattgcaggcgccattgaaggcaatcccgatgtgtatgttcatgtacagaaatctcatagatctcggataatatcttccagagatgcacttttgtctgccggcatggaacctcaagtgctaggtcctaaggagggattaggcctagttaacggcacttcattctctgcagcactgtccagtctcgttatgtacgagactcatcaattggtcgtgctggtgcaggcgatctcggctgtggctttagaagcactcatgggtaatgctgagagctttcaccccttcatctctgccattcggcctcatgacggccaaatggaatgttccaggaatattctttcatttctccagggatctcgtcttgcccagggtattcaaagtgtgaagactcatactcgccaaggcttgatgcaggatagatatgcacttcgatgtgtgcctcagtggatcggaccacagctggaagacctcctgctcgcacataagcaagtcaccgttgaacttaactcaacaacagataacccactgatagatcccgagaccggcgatattctccatggcggtaatttccaagcggtttccgttacttctgcgatggagaagacaagatcatgccttcagatgcttggcaggctcctcttctctcagtctactgaactggtcgacccaagccttaacaacggcctccctaccaatcttgtcgccgatgacccaagcctctccttcactatgaaaggcgtcgatattagcatggcttcatacatggcagagttggcttaccttgccaacccggtaagctcgcacgtacaagcagcggaaatgcgcaaccaatcaatcaactctatggcttttgtatccagtcggtacaccatgcaggcagtcgagatagtgtcgctcatgtgcgcttgtagtctatacattggatgccaggccttggatctccgagtactgcatttgacctacctcgataacatcaagccccaactccatctgcttacctccaatcttttctcctcatacctatcagacaaagagcttgaaactctgaccgaatcactctgggaaaacatctcaaaaagctggtcgacaacaacccgccagggcatacctgaacgagtgcaagtagccgtaaaaaacgctattcctacgctgctagatactctgaaagagaagcgcggtccaggtctttcggatctgaatcgatgggaaacccaagccgctgaccttctcaacaaaacatatcaaaacacggcagacacattctttaaccaacaaaacaccgaggagttcctgggcgctggtgctaagattctctaccgcaccgttcgccaagaactcactgttcccttccacttgggcttcgtggagcacccgacagttaacaatgaaaccctgaatggtcgctcgaaaaagaccattggttcttggatatcaattatctatgaggccattcgtgacggcaggttaatgggtcctttcatggaatcccttgcttcaaagagctccagtgctgatgactctttgacaaagataaggagtctaaggatgtcccgactttga

SEQ ID NO: 133105 - protein, 720 aa, Aspergillus oryzae
MDLLNMGNLSDFQTHIQTAYQARQRLQNLQREGTLDVDGATLDISAIVAVAYYGCIPKITTDPAVLGRIEASVQVLRDHLDKGYHVYGVNTGFGGSADSRTDRVVALQSGLSQLLQAGVLVASDKDTNVDLERQIRLDSHAVPVPWVRAAMLVRCNSNARGHSAVTLSVIKSILQLLESHITPVVPLRGSISASGDLIPLSYIAGAIEGNPDVYVHVQKSHRSRIISSRDALLSAGMEPQVLGPKEGLGLVNGTSFSAALSSLVMYETHQLVVLVQAISAVALEALMGNAESFHPFISAIRPHDGQMECSRNILSFLQGSRLAQGIQSVKTHTRQGLMQDRYALRCVPQWIGPQLEDLLLAHKQVTVELNSTTDNPLIDPETGDILHGGNFQAVSVTSAMEKTRSCLQMLGRLLFSQSTELVDPSLNNGLPTNLVADDPSLSFTMKGVDISMASYMAELAYLANPVSSHVQAAEMRNQSINSMAFVSSRYTMQAVEIVSLMCACSLYIGCQALDLRVLHLTYLDNIKPQLHLLTSNLFSSYLSDKELETLTESLWENISKSWSTTTRQGIPERVQVAVKNAIPTLLDTLKEKRGPGLSDLNRWETQAADLLNKTYQNTADTFFNQQNTEEFLGAGAKILYRTVRQELTVPFHLGFVEHPTVNNETLNGRSKKTIGSWISIIYEAIRDGRLMGPFMESLASKSSSADDSLTKIRSLRMSRL

SEQ ID NO: 133106 - DNA, 2232 bp, Aspergillus oryzae
  CDS (1)..(2232)
atggaactcccctccaactcccgtgttgctgtacgcgataccgttctccctacgggcggtggcccagatggaggttcgccggtgttggtaccaaaaggcatgatggttcacctttcagtgtatgcccttcaccaccgaaaggacctctggggtgaggatgcggatgagttccgtccagaacgatggtcctatgaaaaacaaacttggaaatatatcccattcctcggaggtccccgcaactgtgtaggcagcaatgtgagtatagatcctgcttcttacgaatcaatcaatcaaagccaggctgccattgccaagagcctttccaaaggcgatgttatctacggagtgaatactggatttggaggctctgcggatatccgcgcaaacgacgtcttagcactccagcgcgtcttaacccgcgagctgagctatggcgtcttacccccgggtgcgcgtgatcctcgccctccgtccgaccgccagaagtccgcatatcaggcgtttgacctgagtctcgaacatgcagccgagtctcagcacctgccccttccctgggtgcgcgctgcggtcttactgcgtctgaactcgctggtcaaaggccattcgggcgtgaggcctgttatcgtggaccgtctacgggatcttctagtgaagaatattatccctatggttcccatgcgtgggagtatctcagcctctggggatttgagtcctatcgcttatatcagcggcgtacttcagggaaagcccacaattcgggttttccgtccaggcattggacgagatgtatatgctgacgaggctcttgcggaagcgggtgtagcgccgatatccttgacggcaaaagagggtctggctattgtcaatgggacggcaatgtcggcggcttgcgccaccctcgtgctgcacgacacacatcagctggccatgttaagtcagatcctgacagcaatgacagtggaagcactactgggctcaccggagagtttcgaccccttcttcgccgaggtgcgtccgcatccaggacagatcgagagctcacgaaacatccgtgtgttcctgcgtgggtctcgcctcgcactacagaaggacggcaaggacggttcgctccgccaggatcgatattcaatccgcaccgcggcgcaatggattggccccgtgctcgaagacttgctattagcacaccagcaaatcagcatcgagtgcaactcagccacagataaccccctagttaacggcgacggacagttcctgcatggaggtaatttccaggccaaggccgtcacttcttccatggagaagagtcgccaggccatccaagcgatcggtcgcatgcttttcacacagtgccaggagatgatcaatcccgcgaccagctggggtctgccgccgaacttggttgcggatgaacccagtcaatcgggtatcttcaaggccattgacatttacatctcggccttgacctccgagttggggttcctagcgggtcccgttaatcatgtgtacaatgctgagttgggtaaccagtcattgaactcactggctctgatctctggtcgatacactgcgacagccgtgagggtgcttacggagcttgtggcggcgcatctcctctccgcatgtcaggcactagatcttcgtgccatgcagttacaatttttagacggagtcaagaccgagttcttcgctcgggttgtctcaatggtggaaaagcagagcccaaacaccacagacgccagcaagaacctcccagccacactatgggcccatctccagaaaggactagaacagaccgtctcaatggacagtatagaccggttccctcacatagtcaagaccatgcgcgtgcccatcttggattgtttgccctttcaaaatgtcgttcttcaagaaatgcagtcgttcattgaccagctcggtccctggctccacgaagcttggtgtaccaaccgggaggcctatttggttcatggcgatgctagccccgtgttgggagacgggtctaagaagatgtatcacttcgttcggaagactcttggggtgccgatgttgtgtacaaagaggatattgacgcccactgcggaggccatggctgctgggcaggtggaggaggcacctacggtgggcggatacacaagtcttatctatcgggcaattcaacgaggtgaatttttgccggttattcaggagctgctggaggagtgtttagcgaaggaagagctggagcgatag

SEQ ID NO: 133107 - protein, 743 aa, Aspergillus oryzae
MELPSNSRVAVRDTVLPTGGGPDGGSPVLVPKGMMVHLSVYALHHRKDLWGEDADEFRPERWSYEKQTWKYIPFLGGPRNCVGSNVSIDPASYESINQSQAAIAKSLSKGDVIYGVNTGFGGSADIRANDVLALQRVLTRELSYGVLPPGARDPRPPSDRQKSAYQAFDLSLEHAAESQHLPLPWVRAAVLLRLNSLVKGHSGVRPVIVDRLRDLLVKNIIPMVPMRGSISASGDLSPIAYISGVLQGKPTIRVFRPGIGRDVYADEALAEAGVAPISLTAKEGLAIVNGTAMSAACATLVLHDTHQLAMLSQILTAMTVEALLGSPESFDPFFAEVRPHPGQIESSRNIRVFLRGSRLALQKDGKDGSLRQDRYSIRTAAQWIGPVLEDLLLAHQQISIECNSATDNPLVNGDGQFLHGGNFQAKAVTSSMEKSRQAIQAIGRMLFTQCQEMINPATSWGLPPNLVADEPSQSGIFKAIDIYISALTSELGFLAGPVNHVYNAELGNQSLNSLALISGRYTATAVRVLTELVAAHLLSACQALDLRAMQLQFLDGVKTEFFARVVSMVEKQSPNTTDASKNLPATLWAHLQKGLEQTVSMDSIDRFPHIVKTMRVPILDCLPFQNVVLQEMQSFIDQLGPWLHEAWCTNREAYLVHGDASPVLGDGSKKMYHFVRKTLGVPMLCTKRILTPTAEAMAAGQVEEAPTVGGYTSLIYRAIQRGEFLPVIQELLEECLAKEELER

SEQ ID NO: 133108 - DNA, 2088 bp, Aspergillus oryzae
  CDS (1)..(2088)
atgccgagtaaatatttgtatcgtagtcaccaggaggtggcgagggctcatttcaacgacctcaacgcggccattcaggaggttgaactggaagtcgacgggagtagtcttactctggccactgtagtggctgtgtccaaattctcttgccagccgtttctgacacagaagagcgatacactgaatgggatcaacaacagtgtattaacactcaaggaatgtcttgctaaccgacaccccatttatggcgtcaatacgggcttcgggggcagtgccgactcacggaccgaccatgtcatcactttacagaagtctctgcttcaactactccagagcggaattcttaccagtaaggataccgcgtccggcaatgacggaagcaataccgtgcacggaagccagtcgatgccgtcagaatgggtgagggcgacgatgcttgttcgctgtaactccgtggtgaaggggcattcagcggtgtcattgcctgcaatcaatgggctgttacagctgctccagaagaatgccactcccgtggtacccctgcgaggaacgatctccgcgtccggagatctgatgccgctcgcatatgtgactggggcgatggaaggaaatccgggaatctttgtccgagtgaatggtgacgtgatcacagcgcaggaggcgttgaaaaagattggaatgaaagcagtgaccctgggaccgaaggaagggctgggtttagtcaatgggacagcagcatcggccgctgtggcaagcttggctttgtatgagacacatcaactcgcgctgctagcacagattgtcactgcactgtccgtcgaagccctacgaggtagtacggaaagctttcatccctttatcgccgaagtacgtcctcatgacggccaggcggaagttgcaaccaatgttctctccctcctgcagacttctcagcttgcacggggcgagcgaccgacaacggtgaagaccgggctggcccaggatcgatactcactacggacggccagtcagtggcttggtccccagcttgaggacctccttctggccgaccatcaaattggcatcgagctcaattcgaccaccgataatcctctggtagacagtgcggcaagaacaacctactcgggagggaacttccaggctacctccgtgacgtcggccatggagaagacgcggctggccttgcagatgattggaaagctgctattcactcaatgcacagaaatgatcgatccgagtctcaataacgggctgcccacaaatctggtggcagacgaccccagtctatcatttacgatgaaaggggtggatatcaacatggcagcctacatggctgaattggcatacctggccaatccagtcagtacccatgtgcagacggccgagatgcataaccaggctctgaactccctggccttcgtgtccgcccggtataccatgcaggccgtggatctggtctcaatgatgacagcatgctccctttacgtcgcatgccaggccctggacctccgtgtcctacaactaagcttcttcaagatcctacaacccttgctccttcatagtttaaccggcgcgttttgcaacttcataagggaagaagaattgcaggaagcatgtcaacgtctatccgaagagagtccgagcgcctgggagtcgacttcacgattagaccttcacgatcgatgcgagaaggtgattgatatccttctacccacaattctcagctacctgacacgagttgaccggcaaaagcgcagtgacgtgtgcctcatccaagtcctgaatggatggaaggcaagcgtcatcccaagtattaaggaggcatacctacttgtgctacaggacttttgcaaaacccagaatactgcagagtatctggggtctgggaccaggataatttatgccgctgttcgccatcaactgcacgttccattccaccggggcttcatcgagcatccagtggaaggcgagccatccgttaacagtattgacggcagggacaaaaagaccgttggaggttggatttcagtcatctatcaagccctgcgtgatggtgcactaggtgaaaccgtcaactcagcattctaa

SEQ ID NO: 133109 - protein, 695 aa, Aspergillus oryzae
MPSKYLYRSHQEVARAHFNDLNAAIQEVELEVDGSSLTLATVVAVSKFSCQPFLTQKSDTLNGINNSVLTLKECLANRHPIYGVNTGFGGSADSRTDHVITLQKSLLQLLQSGILTSKDTASGNDGSNTVHGSQSMPSEWVRATMLVRCNSVVKGHSAVSLPAINGLLQLLQKNATPVVPLRGTISASGDLMPLAYVTGAMEGNPGIFVRVNGDVITAQEALKKIGMKAVTLGPKEGLGLVNGTAASAAVASLALYETHQLALLAQIVTALSVEALRGSTESFHPFIAEVRPHDGQAEVATNVLSLLQTSQLARGERPTTVKTGLAQDRYSLRTASQWLGPQLEDLLLADHQIGIELNSTTDNPLVDSAARTTYSGGNFQATSVTSAMEKTRLALQMIGKLLFTQCTEMIDPSLNNGLPTNLVADDPSLSFTMKGVDINMAAYMAELAYLANPVSTHVQTAEMHNQALNSLAFVSARYTMQAVDLVSMMTACSLYVACQALDLRVLQLSFFKILQPLLLHSLTGAFCNFIREEELQEACQRLSEESPSAWESTSRLDLHDRCEKVIDILLPTILSYLTRVDRQKRSDVCLIQVLNGWKASVIPSIKEAYLLVLQDFCKTQNTAEYLGSGTRIIYAAVRHQLHVPFHRGFIEHPVEGEPSVNSIDGRDKKTVGGWISVIYQALRDGALGETVNSAF

SEQ ID NO: 133110 - DNA, 2142 bp, Aspergillus oryzae
  CDS (1)..(2142)
atgggggatccttcgatgccgacggtggagagtatatccctacgaagaaattctatccgccatggcaagaagcaatcatatactgcatcttctttgtcatcctttcgtcagttacgtgagctcaccgatgggggcaaagaagtagttctcgatggacaatccttggatctaagctctgtatttgctgttgctcacaatggacttgctgcgacgatcacagacgataagaatgtgttaggtcgaatgcaccacagtgtagatctacttggccaaaaactggcaaaaggcgaagtcatatatggtgtcaatactgggttcggaggtagcgcagatacacgaactcaggactacgcgacactacagaaggcattgattcaacatcacaatgcagcgatactactcccaagcgatcgcggcctcgggagtcctgtgtctagcttacatcacttgaaaagccattgcatgccagttccgatagttcgagcagccatgctcacgcgttgtaattcactcttacgaggccattcagccgttcgggtccaggttgtcgagcatatcctcactctacttgctcatgggttgactccggtggtaccattacgtggtagcatatcggcttccggagacctgaccccgcttgcctacatcgcgggtgcattggagggcaatccagatatttcgatgcataacgctgctggcgatcagatcatacctgccgatgaagcattgcagttggcaggactcgtgccattgaatttcggtcccaaggagggacttggtctgctaaacggcactgctttcagcggtggcgcggccagtcttgtcctcttcgaagccaataagcttgttctactttcccaggtactcacagccatgggcaccgaagctctacttggcaccagatacaactaccatccattcatagccgatgctcggcctcatgacggccaacgggaggcggcagccaatatcttcaagatactgactgactctaagttggcgaagaatcccactgaaggaggtgagaccgccaaccacggcgggctggcacaggatcgatacgccctgcgaacgtcaacccaatggattggaccccagattgagaatatggcattatccctgaagcaggtggtatgtgaactcaactccacaacggacaacccgctcctggatccagaggaagcccagatccatcacggaggcaacttccaggcagcatcagtcacgtccgccatggaaaagaccatgggtgcgatgcagatgctgggcaagatgatcttctcccagtgctctgagattatcaatccaaacttgagtcggggtcttcctcccaatctcagtgtcgacgatcctagtttatcgtttgcgttcaagggggtggacatcaatatggcgtcgtatatgtctgaactagcctatctgaatcaccccgtcagtaaccatgttcagtcagcggagatgcacaatcagggtctgaactcgctagccttcatcgcttgtcgctatgcgggggatgccgtggaagttctgtcgctgatggccgccacatacttgtacgtactttgccaggcactggatctgcgggcgctccatttggaattcgtgaaagatgcacgggctcaggtcgacgatatcacagctgagctttactcatcaacgtttggtgctcgcttaccggcagtgcaaaacaaactctgggaagaactgatgaatcactggtcacgaacgagcacaagtgatctcgcggagcgatgccagtcaaccacgagctattccgtaggagtcctcttgagctccttggcggcagagagtaatcccgaaaattcttcgatgaccgacgtccgagcagcccagcattggcaaactcgagtatgcgccgtgttaaaatggagctatcggacgacgcgggagacttttctcacaaggcagacaaccaagtcgtatctctgcagtgcttcacgaagtttctacacctttgtccgggagaaacttgccgtgccaatgcaccgaggtatcgccgaccaccctacctatgattcggcggagcgtcgcaagaaagggtgtattggaacacaaattagcaaagtgtacgccgctcttcgaaggggtgaattccaagatgttctgctcagttgttggtaa

SEQ ID NO: 133111 - protein, 713 aa, Aspergillus oryzae
MGDPSMPTVESISLRRNSIRHGKKQSYTASSLSSFRQLRELTDGGKEVVLDGQSLDLSSVFAVAHNGLAATITDDKNVLGRMHHSVDLLGQKLAKGEVIYGVNTGFGGSADTRTQDYATLQKALIQHHNAAILLPSDRGLGSPVSSLHHLKSHCMPVPIVRAAMLTRCNSLLRGHSAVRVQVVEHILTLLAHGLTPVVPLRGSISASGDLTPLAYIAGALEGNPDISMHNAAGDQIIPADEALQLAGLVPLNFGPKEGLGLLNGTAFSGGAASLVLFEANKLVLLSQVLTAMGTEALLGTRYNYHPFIADARPHDGQREAAANIFKILTDSKLAKNPTEGGETANHGGLAQDRYALRTSTQWIGPQIENMALSLKQVVCELNSTTDNPLLDPEEAQIHHGGNFQAASVTSAMEKTMGAMQMLGKMIFSQCSEIINPNLSRGLPPNLSVDDPSLSFAFKGVDINMASYMSELAYLNHPVSNHVQSAEMHNQGLNSLAFIACRYAGDAVEVLSLMAATYLYVLCQALDLRALHLEFVKDARAQVDDITAELYSSTFGARLPAVQNKLWEELMNHWSRTSTSDLAERCQSTTSYSVGVLLSSLAAESNPENSSMTDVRAAQHWQTRVCAVLKWSYRTTRETFLTRQTTKSYLCSASRSFYTFVREKLAVPMHRGIADHPTYDSAERRKKGCIGTQISKVYAALRRGEFQDVLLSCW

SEQ ID NO: 133112 - DNA, 2172 bp, Brassica napus
  CDS (1)..(2172)
atggatcagactaacggttcagttcaccagaacggcaagatcgaagccatgttgtgcggtggagtagagaagacaaaagtggctgtggcggcggatccgttgaactggggtgcagcagcggaacagatgaaagggagtcacttggatgagttgaagaggatggttgaggagtaccgcagaccggtggtgaatctcgggggagagacgctaacaatcggacaagtcgcggcgatctccaccgcaggcggaggtgttaaggttgagctagcggaggcttcgagagctggcgtgaaagctagcagtgattgggttatggaaagtatgggcaaaggtactgacagttacggtgtcaccaccgggtttggagcgacctctcaccggagaaccaaaaacggcaccgcattgcaaacggaactcatcagatttttgaacgccggaatattcggtaacacgaaggagacatgccacacgctaccggaatccgccacgagagccgccatgctcgtccgagtcaacactctcctccaaggatactccgggatccgattcgaaatcctcgaagcgatcaccagcttcctcaaccacaacatctctccatctctccccctccgtggaaccataaccgcctccggcgatctcgtccccctctcctacatcgccggcctcctcaccggccgtccgaactccaaagccacaggtcccaacggcgaatccctaaccgccgaagaggccttcaaacaagccggaatcgcttccggattcttcgatctacaacccaaggaaggcttagcgctcgttaacggcacggcggttggatccggcatggcgtcgatggttctattcgaagcgaacgttcaatcggtgttagcggaggtcttatccgcgatcttcgcggaggtgatgagcgggaagcctgagttcaccgatcatctaacgcacaggctgaagcaccaccccgggcaaatcgaagcggcggcgatcatggagcacatcctcgacggaagctcgtacatgaagctagcgcagaagcttcacgagatggatccgttacaaaagccgaaacaagaccgttacgctctccgtacctctcctcagtggctcggccctcagatcgaagtgatccgtcacgcaacgaagtcgatcgagcgtgagatcaactccgttaacgataatccgttgatcgatgtttctagaaacaaagcgattcacggtggtaacttccaggggactccaatcggagtctccatggataacactcgtttagcgattgcttcgatagggaagctcatgttcgctcaattctcggagcttgttaacgatttctacaacaacggtcttccttcgaatctaacggcttcgaacaatccaagcttggattacggattcaaaggagctgaggtcgctatggcttcgtattgctctgagcttcagtacttggcgaatccagttacaagccatgttcaatcagctgagcaacataaccaagatgtgaactctttgggactcatctcgtctcgcaaaacgtcagaagctgttgacatcctcaagcttatgtcggcaacgttccttgtggctatatgccaagctgttgatttgagacatcttgaggagaatctgagacaaacggtgaagaacacagtttctcaagtggcgaagaaagttttaaccactggagtctacggtgagctgcatccgtcgcggttctgcgagaaggacttgcttaaggtcgttgatcgcgagcaagtgttcacgtacgtggatgatccttgtagcgctacgtacccgttgatgcagaaactgagacaagttattgttgatcatgctttgtctaacggtgagactgagaagaacgcagtgacttcgatctttcaaaagatcggagctttcgaggaagagctcaagatggtgctccctaaagaagtggatgcggctagagaggcttacggtaacggaacggcggcgattccgaacaggattaaggaatgtcggtcttacccgttgtataagttcgtgagggaagagcttggaacgaagctgttgaccggagaaaaggttgtgtctccgggagaggagtttgataaggtgttcactgcaatgtgtgaaggtaagatcattgatccgttgatggagtgcctcaaggaatggaacggagctccgattccgatatgctaa

SEQ ID NO: 133113 - protein, 723 aa, Brassica napus
MDQTNGSVHQNGKIEAMLCGGVEKTKVAVAADPLNWGAAAEQMKGSHLDELKRMVEEYRRPVVNLGGETLTIGQVAAISTAGGGVKVELAEASRAGVKASSDWVMESMGKGTDSYGVTTGFGATSHRRTKNGTALQTELIRFLNAGIFGNTKETCHTLPESATRAAMLVRVNTLLQGYSGIRFEILEAITSFLNHNISPSLPLRGTITASGDLVPLSYIAGLLTGRPNSKATGPNGESLTAEEAFKQAGIASGFFDLQPKEGLALVNGTAVGSGMASMVLFEANVQSVLAEVLSAIFAEVMSGKPEFTDHLTHRLKHHPGQIEAAAIMEHILDGSSYMKLAQKLHEMDPLQKPKQDRYALRTSPQWLGPQIEVIRHATKSIEREINSVNDNPLIDVSRNKAIHGGNFQGTPIGVSMDNTRLAIASIGKLMFAQFSELVNDFYNNGLPSNLTASNNPSLDYGFKGAEVAMASYCSELQYLANPVTSHVQSAEQHNQDVNSLGLISSRKTSEAVDILKLMSATFLVAICQAVDLRHLEENLRQTVKNTVSQVAKKVLTTGVYGELHPSRFCEKDLLKVVDREQVFTYVDDPCSATYPLMQKLRQVIVDHALSNGETEKNAVTSIFQKIGAFEEELKMVLPKEVDAAREAYGNGTAAIPNRIKECRSYPLYKFVREELGTKLLTGEKVVSPGEEFDKVFTAMCEGKIIDPLMECLKEWNGAPIPIC

SEQ ID NO: 133114 - DNA, 2175 bp, Brassica napus
  CDS (1)..(2175)
atggatcagatcaacggatcagttcaccaaaacggcaaaaccgaagccatgttgttgtgcggcggactagagaagactaaagtgacggtggcggcggatccgttgaattggggtgctgcggcggagcagatgaaagggagtcatttggatgaggtgaagaggatggttgaggattaccgtaaaccggtggtgaatctcggcggagaaacactgacgatcggacaagtcgctgcgatctcgaacgtaggcggtggcgttaaggttgagctagcggaggcttcaagagccggcgtgaaagctagcagcgattgggtcatggagagtatgggtaaaggtactgacagttacggtgtaaccaccgggtttggagctacctctcaccggagaacaaaaaacggcaccgctttgcaaaccgaactcatcaggtttttgaacgccggaatattcgggaacacgaaggagacatgccacacgctaccggaatccgccacgagagccgccatgctcgtccgagtcaacacactcctccaaggatactccgggatccgattcgaaatcctcgaagcgatcaccagcctcctcaaccacaacatctctccgtctctccccctccgtggaaccataaccgcctccggcgatctcgtccccctctcctacatcgccggtctcctcaccggccgtccaaactccaaagccaccggtcccaacggcgaatccctaaccgccgaggaagccttcaagaaagcgggaatcacttccggattcttcgatctacagcctaaggaaggcttagcgctcgtcaacggcacggcggttggatccggcatggcgtcgatggttctcttcgaagcgaatgttcaatcggtcctcgccgaggttttatccgcgatcttcgcggaggtgatgagcgggaagccggagttcaccgatcatttgactcaccgactcaaacaccaccccggacaaatcgaggcggcggcgatcatggagcacatcctcgacggaagctcgtacatgaagctagcggcaaagctccacgagatggatccgttacaaaaaccgaaacaagaccgttacgcgctccgcacgtctcctcagtggctcggccctcagatcgaagtgatccgtcacgccacgaagtcaatcgagcgtgagatcaactccgttaacgacaatccgttaatcgacgtttcgaggaacaaggcgattcacggtggtaacttccaggggactccgataggagtctctatggacaacacacgtttagcggttgcagctattgggaagctcatgttcgctcagttctcggagcttgttaacgacttctacaacaacggtcttccttcgaatctaacggcttccaacaacccaagcttggattatggattcaaaggagcggagatcgctatggcttcttactgctctgagcttcagtaccttgcgaatccggttacaacccatgttcaatcagctgagcagcataaccaagatgttaactctttaggactcatctcgtctcgtaagacgtcagaagctgttgacattctcaagctcatgtctacaacgttcctcgtagcgatttgtcaagctgttgatttgagacatctcgaggagaatctgagacagaccgtgaagaacacggtttctcaagtggcgaagaaagtgttgactactggagtcaacggggagttgcatccatcgcggttctgtgagaaagacttgcttaaggtcgttgatcgtgaacaagtgtttacatacgttgacgatccttgtagcgctacgtacccattgatgcagaagctaagacaagttatcgttgatcacgcgttatccaatggtgagactgagaagaacgcagtgacttcgatctttcaaaagattggagcttttgaggaggagcttaagatggtgcttcctaaggaagtggatgcgactagagaggcttacggtaatggaacggcggcgattccgaacaggattaaggaatgtcggtcttatccattatataagtttgtgagggaagagctcgggacgaagttgctgaccggagaaaaggttgtctctccgggagaggagtttgataaggtgttcactgcaatgtgtgaaggtaagattattgatccattgatggattgtctcaaggaatggaacggagctcccattcccatatgttaa

SEQ ID NO: 133115 - protein, 724 aa, Brassica napus
MDQINGSVHQNGKTEAMLLCGGLEKTKVTVAADPLNWGAAAEQMKGSHLDEVKRMVEDYRKPVVNLGGETLTIGQVAAISNVGGGVKVELAEASRAGVKASSDWVMESMGKGTDSYGVTTGFGATSHRRTKNGTALQTELIRFLNAGIFGNTKETCHTLPESATRAAMLVRVNTLLQGYSGIRFEILEAITSLLNHNISPSLPLRGTITASGDLVPLSYIAGLLTGRPNSKATGPNGESLTAEEAFKKAGITSGFFDLQPKEGLALVNGTAVGSGMASMVLFEANVQSVLAEVLSAIFAEVMSGKPEFTDHLTHRLKHHPGQIEAAAIMEHILDGSSYMKLAAKLHEMDPLQKPKQDRYALRTSPQWLGPQIEVIRHATKSIEREINSVNDNPLIDVSRNKAIHGGNFQGTPIGVSMDNTRLAVAAIGKLMFAQFSELVNDFYNNGLPSNLTASNNPSLDYGFKGAEIAMASYCSELQYLANPVTTHVQSAEQHNQDVNSLGLISSRKTSEAVDILKLMSTTFLVAICQAVDLRHLEENLRQTVKNTVSQVAKKVLTTGVNGELHPSRFCEKDLLKVVDREQVFTYVDDPCSATYPLMQKLRQVIVDHALSNGETEKNAVTSIFQKIGAFEEELKMVLPKEVDATREAYGNGTAAIPNRIKECRSYPLYKFVREELGTKLLTGEKVVSPGEEFDKVFTAMCEGKIIDPLMDCLKEWNGAPIPIC

SEQ ID NO: 133116 - DNA, 2157 bp, Petunia hybrida
  CDS (1)..(2157)
atggagtatgccaatgaaaactgtaatggtcatgctagtcaagatatttgtgttaagggccatgatcaacaacttgatcctttgaattggaacatggcagctgatgcacttaagggtagccaccttgatgaagtcaagagaatggtgaaggaatttaggaagccggtggtccggctaggcggtgagacgctaacagtagctcaggtggctgcgatagctagccaatcgggcacggacgtgacagtgcagctgtccgaggcgtcccgggcgggtgtcaaggctagcagtgattgggtccttcaaggcatgataaatgggactgatagttatggtgttactactggatttggtgcaacatcacatagaaggaccaaagaaggtgcagctctacagaaggagctaataaggttcttgaatgctggaatctttggcaacgggactgagtcgagccacaccctgccacactccgccacgagggcggccatgctagtgaggatcaacaccctacttcaaggctactcaggcataaggtttgagatcttggaagctataaccaaattgctcaacaataacatcaccccatgtttgcctcttcgtggcacaattacagcatctggtgacttggtaccattgtcctacattgctgggcttttaacaggcaggcccaactccaaagccactgggcctaatggagaactattggatgctgttaaggccttccaaagggctggtattgatactggattctttgagttgcagcccaaagaaggcttagctttggtgaatggcactgctgttggttctggcttagcttctatggttctttttgatgctaacattcttgctgtactttctgaagttttatcagcaatttttgctgaagttatgcaaggaaaacctgaatttacagactacttaacacataagttgaagcatcaccctggacaaattgaagctgcagctataatggaacatattttggatggaagttcatatgttaaggaagctaaaatagttcatgaaatggaccctttacaaaagcctaagcaagaccgttatgcactacgaacatcgccacaatggttaggtcctcaaattgaggtcattagagcagcaactaagatgattgagagagagattaactctgttaatgacaaccccttgattgatgtctcaagaaacaaggcattgcatggtgggaattttcaggggactccaataggtgtgtcaatggacaacactaggctagcacttgcatccattggaaaacttatgtttgcacaattttctgagcttgtcaatgactattacaacaatggtctgccttcaaatttgaccggtgggaggaatcctagcttggattacggtttcaaaggtgctgagattgccatggcttcttactgttctgaactccaatttcttgccaatccagtgactaaccatgtccaaagtgctgagcaacataaccaagatgtcaactctttgggcttaatttcttcaagaaagacagctgaagcagtggacattttgaaactcatgtcttccacttatctagtggcactttgccaagccattgacttgaggcacttggaagaaaatctcaaagccactgttaagaattcagtgagcctagtggccaagaaagtgttgacaattggcgaaaaaggagagcttcaccattcaaggttctgtgagaaagacatgctcaaagtggttgatagagaatacatttttgcatatgctgatgacgcctgcagtgctacttatccattgatgcaaaagttgagacaagtcttggtggatcgtgcactactgaatgttgatggagagaaggattccagcacttcaattttccaaaaaattaaagcattcgaggaagaattgaaagttgttctgcctaaggaaattgagagagctagaagtgacttggagcaaggcaagccagccattcctaatagaattcaagaatgtaggtcctatccactgtacaagtttgtgagggaagaactaaaggctaattacttgacaggtgagaaagttcaatcacctggagaagaatttgacaaagtattcacagctatgaatgaaggaaagttggtggacccattgcttaactgcttgaaggaatggaatggtgctcctcttccactctgctaa

SEQ ID NO: 133117 - protein, 718 aa, Petunia hybrida
MEYANENCNGHASQDICVKGHDQQLDPLNWNMAADALKGSHLDEVKRMVKEFRKPVVRLGGETLTVAQVAAIASQSGTDVTVQLSEASRAGVKASSDWVLQGMINGTDSYGVTTGFGATSHRRTKEGAALQKELIRFLNAGIFGNGTESSHTLPHSATRAAMLVRINTLLQGYSGIRFEILEAITKLLNNNITPCLPLRGTITASGDLVPLSYIAGLLTGRPNSKATGPNGELLDAVKAFQRAGIDTGFFELQPKEGLALVNGTAVGSGLASMVLFDANILAVLSEVLSAIFAEVMQGKPEFTDYLTHKLKHHPGQIEAAAIMEHILDGSSYVKEAKIVHEMDPLQKPKQDRYALRTSPQWLGPQIEVIRAATKMIEREINSVNDNPLIDVSRNKALHGGNFQGTPIGVSMDNTRLALASIGKLMFAQFSELVNDYYNNGLPSNLTGGRNPSLDYGFKGAEIAMASYCSELQFLANPVTNHVQSAEQHNQDVNSLGLISSRKTAEAVDILKLMSSTYLVALCQAIDLRHLEENLKATVKNSVSLVAKKVLTIGEKGELHHSRFCEKDMLKVVDREYIFAYADDACSATYPLMQKLRQVLVDRALLNVDGEKDSSTSIFQKIKAFEEELKVVLPKEIERARSDLEQGKPAIPNRIQECRSYPLYKFVREELKANYLTGEKVQSPGEEFDKVFTAMNEGKLVDPLLNCLKEWNGAPLPLC

SEQ ID NO: 133118 - DNA, 2157 bp, Astragalus mongholicus
  CDS (1)..(2157)
atggagggagaaggagccaatggacacgtgtcaaaccatgctaccgaagccgaattttgcatcagcaaaactggtggtgatccactcaactggggtgctgcagcggaggctctaaaggggagtcatttggatgaggtgaagcggatggtggaggagtaccggaatccggtggttaagatcggtggtgagactcttacgattgctcaggtggctggaattgcctcccatgacggaggtgttaaggtggagttgtcggaatcggcgagggctggcgttaaggctagtagtgactgggtgatgaatagcatgaacaatggcactgatagctatggtgttaccaccggttttggtgctacttcccatcgtagaaccagacagggcggtgccttgcagaaagagttaattaggtttttgaatgcgggaatatttggcaatggtactgaatccaattgtacactaccacacacagcaactagagctgccatgctagtgagaatcaacacacttcttcaagggtattctggtattagatttgaaattttagaagccatcaccaagcttctaaacaacaacatcacctcatgtttgcctctccgtggtacaatcacagcttccggtgatcttgttcccctttcttacattgctggtttgctaactggccgacccaactccaaagctgttggaccctctggagagattctcaatgccaaagaagcttttcagttggctaacattggttctgagttctttgaattgcaacccaaagaaggtcttgcacttgttaatggaactgctgtgggttctggcttagcttcaattgttctctttgaagcaaacgtattagctgttttggctgaagttatgtcagcaatttttgctgaagtcatgcaaggtaaacctgaattcactgaccatttgactcataagctaaaacaccaccctggtcaaattgaagctgctgctatcatggaacatattttggatggaagctcttatgttttagcagctaaaaagttgcacgatgtagaccctttgcaaaaacctaaacaagatcgctatgcacttagaacttcaccacaatggcttggtcctttgattgaagtcattagattttcaaccaagtctattgagagagagattaactccgtcaacgacaaccctttgattgatgtttcaaggaacaaggctttacatggtggtaactttcaaggaactcccattggagtttcaatggataacacacgtttagctcttgcttcaattggtaaacttatgtttgctcaattttctgaacttgtcaatgatttttacaacaatgggttgccatcaaatctctctggtagtaggaatcccagcttggattacggtttcaagggagctgaaattgccatggcatcttattgctctgaattacaatatcttgctaacccagtgaccacccatgtccaaagtgctgagcagcataaccaagatgtgaactctttgggattgatttcctctagaaaaacaaatgaggctattgagatcttgaagctcatgtcctccactttcttggttgcactttgccaagcaattgacttgaggcatttggaagagaatttgaaaaacaccgtgaagaacactgtaagccaagttgccaagaggacactcacgacgggtgtcaatggcgaactccacccttctagattttgtgagaaggatttgctcaaagttgttgatagggagtatgtatttgcctacattgatgacccttgccttgctacatacccaatgatgcaaagtctgagacaagtgcttgtggaccatgcattagcaaatgcagaagcagagaagaacgtgaacacatcaatttttcaaaagattgcaacatttgaggatgagttgaaggctctcttgccaaaggaggttgaaaatacaagggctgcatatgaaaatggccaatgtgcaatccctaacaagattaaggaatgcaggtcctatcctttgtacaagtttgttagaggagagttggggacagggttgctaactggagagaaggtaatctcaccaggtgaggagtttgacaaacttttcacagcaatgtgccagggtaaaattattgatcctcttttggaatgtcttggggaatggaatggtgctcctcttccaatttcttag

SEQ ID NO: 133119 - protein, 718 aa, Astragalus mongholicus
MEGEGANGHVSNHATEAEFCISKTGGDPLNWGAAAEALKGSHLDEVKRMVEEYRNPVVKIGGETLTIAQVAGIASHDGGVKVELSESARAGVKASSDWVMNSMNNGTDSYGVTTGFGATSHRRTRQGGALQKELIRFLNAGIFGNGTESNCTLPHTATRAAMLVRINTLLQGYSGIRFEILEAITKLLNNNITSCLPLRGTITASGDLVPLSYIAGLLTGRPNSKAVGPSGEILNAKEAFQLANIGSEFFELQPKEGLALVNGTAVGSGLASIVLFEANVLAVLAEVMSAIFAEVMQGKPEFTDHLTHKLKHHPGQIEAAAIMEHILDGSSYVLAAKKLHDVDPLQKPKQDRYALRTSPQWLGPLIEVIRFSTKSIEREINSVNDNPLIDVSRNKALHGGNFQGTPIGVSMDNTRLALASIGKLMFAQFSELVNDFYNNGLPSNLSGSRNPSLDYGFKGAEIAMASYCSELQYLANPVTTHVQSAEQHNQDVNSLGLISSRKTNEAIEILKLMSSTFLVALCQAIDLRHLEENLKNTVKNTVSQVAKRTLTTGVNGELHPSRFCEKDLLKVVDREYVFAYIDDPCLATYPMMQSLRQVLVDHALANAEAEKNVNTSIFQKIATFEDELKALLPKEVENTRAAYENGQCAIPNKIKECRSYPLYKFVRGELGTGLLTGEKVISPGEEFDKLFTAMCQGKIIDPLLECLGEWNGAPLPIS

SEQ ID NO: 133120 - DNA, 2064 bp, Taxus x media
  CDS (1)..(2064)
atggggtttgccgtggaatcgcgttctcacgtaaaggatatattggggctgatcaacacgttcaacgaggtgaagaaaattacagtagacggtacgacccccatcacggtggcccatgtcgcggcgctggcccggaggcatgacgtgaaggttgcgttggaggcggagcaatgcagagcccgtgtggaaacctgctcttcgtgggtgcagcgcaaggcggaagacggcgccgacatatacggcgtcaccacgggctttggcgcgtgctcgagccgtaggaccaaccagctgagcgagctgcaggagtcgcttatacgctgcctgctcgcgggggtgtttactaaaggatgcgcttcctccgtcgacgagctccctgcgaccgccacccgcagcgccatgctgctccgccttaatagttttacctatggatgttccggcatccggtgggaggtcatggaagcgctggaaaagcttctcaacagcaatgtctctcctaaagtgcctctccgaggatctgtgagcgcttcgggagacctcatcccgctcgcctacattgcagggctcctgattgggaagcctagcgtagtcgctcgcataggcgacgatgtcgaggtccctgcgcccgaggcgttgagcagggtggggctgcggccattcaagctccaggccaaagaagggctggcgctcgtcaacggcacctccttcgccaccgcgctcgcctccaccgtcatgtacgacgccaatgttctgttgctgctagtcgaaacgctttgcggaatgttctgcgaggtgatctttggaagggaggagttcgcgcatccgctgatccataaagtgaagccgcacccgggccagatcgaatcggcggagctgctcgagtggctgctgcggtcgagcccgtttcaggacctgtcgagggagtattacagtattgataagctgaagaaaccgaaacaggatcgctatgctctgaggtcgagcccgcagtggttggctcctctggtgcagacaatcagaaacgccaccactacagtggagacggaggtcaattccgccaatgataaccccatcattgaccacgccaatgacagggctctccatggtgcgaatttccagggcagcgccgtcggcttctacatggactacgtgcgcatcgcagtcgccgggctggggaaactcttgttcgctcagttcacggagctgatgatcgaatattacagcaacggcctaccggggaacctctccctggggccggacctgagcgtggactacggcctcaaggggctcgacatcgccatggccgcctacagctccgagcttcagtacctggcgaatcccgtgaccacacacgtgcacagcgcggaacagcacaaccaggacatcaactctctggcgctcatctccgcccgcaagacggatgaggcgttggatatcttaaagctcatgatcgccccgcatttaacagcaatgtgccaggcggtgaaccttcggcagctcgaagaagccctagtaaaagtcgtggagaatgtcgtttccacccttgcagacgaatgcggcctccctaacgacacaaaggcgaggcttttatatgtagccaaagcggtgcctgtttacacatacctggaatccccctgcgaccccacgcttcccctcttgttaggcctgaaacagtcctgtttcgattccattctgtctctccacaaaaaagacggcattgagacggacaccttggtggatcggctcgccgagttcgagaagcggctgtccgaccgcctggaaaacgagatgacggcagtgagggttttgtacgaaaagaaagggcataaaacggcagacaacaacgacgccctcgtgagaatccagggttccaaattccttcctttttacagatttgttcgggacgagctcgacacaggtgtgatgagtgcgagaagagagcagacgccgcaggaggacgtgcagaaagtgttcgatgcaattgtcgacggcagaattacggtgcctctgctgcactgcctgcaagggtttctcggccaaccaaatgggtgcgccaacggcgtctag

SEQ ID NO: 133121 - protein, 687 aa, Taxus x media
MGFAVESRSHVKDILGLINTFNEVKKITVDGTTPITVAHVAALARRHDVKVALEAEQCRARVETCSSWVQRKAEDGADIYGVTTGFGACSSRRTNQLSELQESLIRCLLAGVFTKGCASSVDELPATATRSAMLLRLNSFTYGCSGIRWEVMEALEKLLNSNVSPKVPLRGSVSASGDLIPLAYIAGLLIGKPSVVARIGDDVEVPAPEALSRVGLRPFKLQAKEGLALVNGTSFATALASTVMYDANVLLLLVETLCGMFCEVIFGREEFAHPLIHKVKPHPGQIESAELLEWLLRSSPFQDLSREYYSIDKLKKPKQDRYALRSSPQWLAPLVQTIRNATTTVETEVNSANDNPIIDHANDRALHGANFQGSAVGFYMDYVRIAVAGLGKLLFAQFTELMIEYYSNGLPGNLSLGPDLSVDYGLKGLDIAMAAYSSELQYLANPVTTHVHSAEQHNQDINSLALISARKTDEALDILKLMIAPHLTAMCQAVNLRQLEEALVKVVENVVSTLADECGLPNDTKARLLYVAKAVPVYTYLESPCDPTLPLLLGLKQSCFDSILSLHKKDGIETDTLVDRLAEFEKRLSDRLENEMTAVRVLYEKKGHKTADNNDALVRIQGSKFLPFYRFVRDELDTGVMSARREQTPQEDVQKVFDAIVDGRITVPLLHCLQGFLGQPNGCANGV

SEQ ID NO: 133122 - DNA, 2133 bp, Rhodiola sachalinensis
  CDS (1)..(2133)
atggatacgatatgcaagcagaacggccactcagttgctaatgttgttgtaaaagatcctctaagctgggggctggcggcggaggcgatgaagggcagtcatctggacgaggtgaagaggatggtggaggagtacaggaagccagcagtgaagctcggcggagagacattgaccatcgcgcaagtggcggcaatcgccgggcgaggatcagacgtgagggtggagctctcggagagcgcgagagagggcgtgaaggcgagcagcgattgggtgatggagagcatgggaaaagggactgatagctacggcgtcactaccgggttcggagcgacgtcgcatcgcaggacgaagcaaggcggcgccctgcagaaggagcttatcagattcttgaacgccgggatatttgggagtgggaaggacacgtgtcatacgctgtcccagtctgcgacgagagctgcgatgctggtgaggatcaacactctgctgcaaggatactcaggaatcaggtttgagattcttgaagccattacgagcctcttgaacagtgacatcactccatgcttgccgctccgcggcacgatcaccgcgtcgggtgatctcgtcccgctgtcgtacatagcggggctgctcactggtaggccgaattccaaggccgttgcagagaatggcgaggttataacccctgacgaggcgtttaagcgagcggggattgaaggcgggttctttaacttgcagcccaaggaaggtcttgcgctggtgaacgggactgcggtcgggtctggtttagcgtcgatggtgttgtttgatgcgaatgtgcttgctgtgttggcggagatcatgtctgcggttttctccgaagtgatgcagaggaagcctgagttcacggaccacttgacacataagctaaaacatcatccgggccagatcgaggcggcggcaatcatggaacatatattggatgggagtgagtatgtcaaagccgcgaagaagctgcacgagactgatccgccgcagaagccgaagcaggacaggtatgcgttgaggacttctccacaatggctggggcctcaggtcgaggttataagattctcaaccaagtctattgagagggaggtcaactctgtcaatgacaaccctttgattgatgtctcgaggaacaaggccattcatggcgggaacttccaaggcaccccgattggggtgtcgatggacaacactagattggccattgcggcaattggcaagctcatgtttgctcagttctccgagctggtaaatgacttttacaacaatgggctgccgtcgaatctttcaggaagcagaaacccgagcctggattacgggttcaaaggggctgagatcgcgatggcttcgtattgttctgagcttcaattcctcggcaacccggtgactaaccacgtccagagcgcagagcagcacaaccaggatgtgaactccttaggactcatttcatctagaaagaccgccaaggctgtcgacatcttgaaactcatgtcgtccacttacctcgtcgcgctttgccaagccatcgatctcaggcatatggaagagaacttgcgaaccatggtaaagaccacaataagccaagtcgcgaaaaggactctcacaacaggtgctaacggagagctccacgcatcaaggctctgcgagaaagatctactcaaagttgtcgacagagagtatgtgttcgcctacatcgacgacccttgcctggccacttaccccctgatgcagaaactcagacaagtgctggtcgaccatgccctcaccaagggcgaaaacgagaagaacccaaactcctccatcttcctcaaaattgccgcattcaaggacgagctcaagaccctcctacctaaagaagttgagaacatgaggcttttaatcgaaaacggcaatgctccaatggctaaccagatcaaagagtgccgatcatacccgctttacagatttatccgggaggagctcggaacagccttgcttagtggagaaaagactcgatcaccgggcgaggagttcgacaaggtgttcgtagccatgtgtgaagggaagatcattgacccaatgctggaatgcctccaggattggaatggtgctcccctacccatctgttga

SEQ ID NO: 133123 - protein, 710 aa, Rhodiola sachalinensis
MDTICKQNGHSVANVVVKDPLSWGLAAEAMKGSHLDEVKRMVEEYRKPAVKLGGETLTIAQVAAIAGRGSDVRVELSESAREGVKASSDWVMESMGKGTDSYGVTTGFGATSHRRTKQGGALQKELIRFLNAGIFGSGKDTCHTLSQSATRAAMLVRINTLLQGYSGIRFEILEAITSLLNSDITPCLPLRGTITASGDLVPLSYIAGLLTGRPNSKAVAENGEVITPDEAFKRAGIEGGFFNLQPKEGLALVNGTAVGSGLASMVLFDANVLAVLAEIMSAVFSEVMQRKPEFTDHLTHKLKHHPGQIEAAAIMEHILDGSEYVKAAKKLHETDPPQKPKQDRYALRTSPQWLGPQVEVIRFSTKSIEREVNSVNDNPLIDVSRNKAIHGGNFQGTPIGVSMDNTRLAIAAIGKLMFAQFSELVNDFYNNGLPSNLSGSRNPSLDYGFKGAEIAMASYCSELQFLGNPVTNHVQSAEQHNQDVNSLGLISSRKTAKAVDILKLMSSTYLVALCQAIDLRHMEENLRTMVKTTISQVAKRTLTTGANGELHASRLCEKDLLKVVDREYVFAYIDDPCLATYPLMQKLRQVLVDHALTKGENEKNPNSSIFLKIAAFKDELKTLLPKEVENMRLLIENGNAPMANQIKECRSYPLYRFIREELGTALLSGEKTRSPGEEFDKVFVAMCEGKIIDPMLECLQDWNGAPLPIC

SEQ ID NO: 133124 - DNA, 2238 bp, Blechnum spicant
  CDS (1)..(2238)
atggaaggcggttcgattcaggagaggcccccgcccgccctctgtttgtccggacatgtagatggcaaaatcgcagagaccccccactggctcaaggcggccgaggccatgcagggaagccactttgaggaagtgaaatgcatggtgcgcgagttcttagacaccaaggaggtggtgctacgtggcagcggactgacagtgggccaggtggcggcggtgacagatagagttggcatccacgtggcactcgacgaggcagacgctaaggcacgtgtcgacgaaagcgcagactgggttttaaaaaatgttggcaagttcacaacaggctttggtgcttcctctgccaacccctcctccagtggtgcactcatcagccaagccgccgacctccaaaatgagctcattcgcttcctcaatgcaggtgtcattggccacgacgatgtgtgcctaccaccgaagttcgtcaaggcgtcgatgcttatccgagccaacactcttttgcaggggttctctggtatccggtgggaaatccttgacgcattagcaaagcttgtaagtgcccacatccttcccaagattccactccgcggttcactcaccgcctccggcgatctcatcccgcttgcgtacatcgcagccctcctcattggccgccccaattgcattgcactcacgccgcaaggagaagaaatccgcgccatcgctgctcttaagcttgctggcattgatgcacccttccagcttcttcccaaagagggtatcgcccttgtcaacggcaccacggtcggctcagctgtggcagccaaggtctgctttgatgccaatgtgttggtgttgctagcagaggtgttatctgcgctcttctgcgaagtgatgcaggggaagcccgaattcaccgacccccttacgcatcagcttaagcaccatccgggccagatagaagcggccgcggtgatggagtatctgctcgagggcagctcctacatgcgggcagccgccaagctgaatgcaacaaatcctctgtcaaagcccaagcaggaccggtacgcccttcgtacatcacctcaatggctcggcccgcaagtcgaagtaattcgtgcagctacacactccatagaaagagaaatcaactctgtcaacgacaaccccctcattgacgtctcccgcaacctactccttaaggggggtaacttccaaggtacccccattggggtctccatggacaacatgagaattgcagtcgctgccattggtaaactcatgtttgcgcaattctccgagctcgtctgcgactactataactctgggctgccatccaatctgagcggcgggccagacctaagcctcgactacagcttcaagggtgcagagatagctatggcggcgtattgctcggagctgcaatacctggcaaatccagttacaacacacgtgcaaagtgcagagcagcacaacgaagatgtgaattctcttgggctcatcgcagcaaggaagacggcagaagcggtggacattctgaagctcatgtcgtcgacattcttgattgctctctgtcaagcagtggatctgaggcatatggaggagacgatgcaggcggtcgtgaagcacctcttgaccgacgcaatcaaagcgacactctacacagaaaatcatgagggaaccatgcccaacttgggcttcctagagggagagctgatgaaagttgttgaataccaacccattttttcctacatcgacaacccatcaaatccgaactacgcgctgatgatgcagctgcgtgagacactggtagagcaagcaatgaaagatacatcactgttccggcgcattccgatcttcgaggcgcatctgaagaagcgtctggatgaggaggtgccaaaggcaagagagagatttgaaaagggggactatgcaatggcaagcaggataagcaagtgcaggacatatcccctatacaagtttgtgagggaggagctcgggaccgatttactgcgtgggaatgcaagccggagtccgggggaggacatagagaagttgtttatggctatggtggatgggaaggtgctgttaccaatgatgaaatgcatggagggatggcgcgggatgccggggccgttcacgccgcatacgatcccggcctcccctgctcccatcgaccctgcctcctggacctggtttgataatagcagaaccccctcttcctctgtaggcacaggctactggtcaactacagtataa

SEQ ID NO: 133125 - protein, 745 aa, Blechnum spicant
MEGGSIQERPPPALCLSGHVDGKIAETPHWLKAAEAMQGSHFEEVKCMVREFLDTKEVVLRGSGLTVGQVAAVTDRVGIHVALDEADAKARVDESADWVLKNVGKFTTGFGASSANPSSSGALISQAADLQNELIRFLNAGVIGHDDVCLPPKFVKASMLIRANTLLQGFSGIRWEILDALAKLVSAHILPKIPLRGSLTASGDLIPLAYIAALLIGRPNCIALTPQGEEIRAIAALKLAGIDAPFQLLPKEGIALVNGTTVGSAVAAKVCFDANVLVLLAEVLSALFCEVMQGKPEFTDPLTHQLKHHPGQIEAAAVMEYLLEGSSYMRAAAKLNATNPLSKPKQDRYALRTSPQWLGPQVEVIRAATHSIEREINSVNDNPLIDVSRNLLLKGGNFQGTPIGVSMDNMRIAVAAIGKLMFAQFSELVCDYYNSGLPSNLSGGPDLSLDYSFKGAEIAMAAYCSELQYLANPVTTHVQSAEQHNEDVNSLGLIAARKTAEAVDILKLMSSTFLIALCQAVDLRHMEETMQAVVKHLLTDAIKATLYTENHEGTMPNLGFLEGELMKVVEYQPIFSYIDNPSNPNYALMMQLRETLVEQAMKDTSLFRRIPIFEAHLKKRLDEEVPKARERFEKGDYAMASRISKCRTYPLYKFVREELGTDLLRGNASRSPGEDIEKLFMAMVDGKVLLPMMKCMEGWRGMPGPFTPHTIPASPAPIDPASWTWFDNSRTPSSSVGTGYWSTTV

SEQ ID NO: 133126 - DNA, 2319 bp, Psilotum nudum
  CDS (1)..(2319)
atgacggcagatttagtcctgcctgtactcggcattggatctaagcctctcggattagcacacactgtgtgtggtggtagattgttacctcacaaatctgagggagatccgctgaaatgggttgaatcagctcaggagtcggaatgcagtcatttggacgaggtgagacgcatggtgaaggaattcagcgatggtaatgttgtttcattgcaagggttgaatttgacagtggcacaagtagctgccgttgcccgcagaccagatgtgaaggttgagctggattcagctgttgcgaggagaagagttgatgagagctcggaatgggtggtgaatcacattatgaaaggcacagatacgtatggggtgactacagggttcggagctacatctcaccggcggactaatcaaggaattgaactccagaaggaactcatccgtttcctgaatgcgggaatccttactgatggcaaggaagaatgcaactccttgcctacaccggctgttcgtgcagccattttggtgcgcacaaacacactcatgcaggggttttctggtataagatgggcgattttagaggcaatggagaagcttcttaacagccagattactcctcggctgccactacgaggaaccattactgcatcgggtgatcttgttcccctttcctatattgcgggtttgctaactgcgcgtcccaattccagagctgtaactgccgaagggaaggaagtgactggtgaggaagcccttaaactggctggtatacaggaaccttttgatctgcagccaaaggagggtcttgctctcgtgaatggtacagcagtgggtgcaggacttgctgcggtagtttgttatgacgccaatatctttgctctgctagcggaagtactttcagcattattctgtgaggtgatgcaagggaagcccgagttcacggatcatctcacccatcggttaaagcaccatcctggacaaattgaagctgccgcaatcatggaatggcttctcgatgggagctcttatatgaaggcagctgcaaagttgcacgaaacagatccgttgaaaaagcccaagcaagacaggtatgcattgcgaacttctccacagtggctggggccacagatcgaggtaattcgcctagctacgcatgctattcagagggaaatcaattctgtgaacgacaacccactgatcgacgtggccagagataaggctcttcacggagggaattttcaaggaactcctattggcgtttccatggataacatgagactagccattgcagctataggcaagctcatgtttgctcagttctctgagcttgtgaacgatttgtacaacaatggcttgccttcaaatttaagcgggagccccaatcctagcttggattacggcttcaagggagcggagattgcattagcgtcctatacatcagagatgcaataccttgccaaccctgtgaccacccactctcaaagtgctgagcagcacaaccaggacgtcaactctcttggtcttatttcagctcggaagacgaaggaagccatcgatattctgaagctgatgatttccacatacattgtggctctctgtcaggcggttgatcttaggcatttggaagagaacatgaaagcagctataaagcatatggtctgccaggtcgctagaagaactttgtattttgatcataatgggctgctacttccttctcgattctgtgagaaagagttgcttcatgtagttgagcatgagcccatattcctctacattgataatgcctcatcggatgcatcaattctaatgcaaaagctgaggcaggtgctggtggaccaggcaatgaagaacgtggagaaggagaaggagaagctaggtgctgctagcaccctgaatagaatcttgctttttgaggaagagctgaaaaacctatttgattcagaaataccaagagccagggagagatttgatcgtgggcaattcgctgtactgaacaggatacagaactgcagaacctatcctttgtaccgatttgtgcgggatgatttgggaacccagttactgagtggcactcagacccatagcccaggccaagattttcagaaggttttagatgcaatctcagaagggaagttagttgcaccattactgaagtgcattgagggatggagtgggcatccaggtcccttcagctgtactcagcagcagcaggaatctgcagacatagaaatgtgcaatccttccagttggatctggtttgatcaacttcattgcttcaaggctcaaggtggtggcaagggctatttcatgctctctgtgatgtag

SEQ ID NO: 133127 - protein, 772 aa, Psilotum nudum
MTADLVLPVLGIGSKPLGLAHTVCGGRLLPHKSEGDPLKWVESAQESECSHLDEVRRMVKEFSDGNVVSLQGLNLTVAQVAAVARRPDVKVELDSAVARRRVDESSEWVVNHIMKGTDTYGVTTGFGATSHRRTNQGIELQKELIRFLNAGILTDGKEECNSLPTPAVRAAILVRTNTLMQGFSGIRWAILEAMEKLLNSQITPRLPLRGTITASGDLVPLSYIAGLLTARPNSRAVTAEGKEVTGEEALKLAGIQEPFDLQPKEGLALVNGTAVGAGLAAVVCYDANIFALLAEVLSALFCEVMQGKPEFTDHLTHRLKHHPGQIEAAAIMEWLLDGSSYMKAAAKLHETDPLKKPKQDRYALRTSPQWLGPQIEVIRLATHAIQREINSVNDNPLIDVARDKALHGGNFQGTPIGVSMDNMRLAIAAIGKLMFAQFSELVNDLYNNGLPSNLSGSPNPSLDYGFKGAEIALASYTSEMQYLANPVTTHSQSAEQHNQDVNSLGLISARKTKEAIDILKLMISTYIVALCQAVDLRHLEENMKAAIKHMVCQVARRTLYFDHNGLLLPSRFCEKELLHVVEHEPIFLYIDNASSDASILMQKLRQVLVDQAMKNVEKEKEKLGAASTLNRILLFEEELKNLFDSEIPRARERFDRGQFAVLNRIQNCRTYPLYRFVRDDLGTQLLSGTQTHSPGQDFQKVLDAISEGKLVAPLLKCIEGWSGHPGPFSCTQQQQESADIEMCNPSSWIWFDQLHCFKAQGGGKGYFMLSVM

SEQ ID NO: 133128 - DNA, 2337 bp, Equisetum arvense
  CDS (1)..(2337)
atggctgccgaattccagaaccagaagaagctggcagagcttcaccgcccgcctaccctgcccttgcccgtccaaggcaagaacccgctttttgtcgatagtaaggagcctgttgccaagccccctcactggcagaaggcggcagaggcgcttcagagcagccactatgaagagatccggcgcatgatccgccagttcctcgagactgagaaggttgtcctccaagggagtagcctcactgttggccaggtcactgccgtcacccagcgctccgaagtcgctgttgagcttgatgaggccaccgctaaggcgcgcgtcgacgagagctccaattgggtgcttaacaatatcctcaaagggacggatacatacggcgttactaccgggtttggggccacctcgcaccgcaggacaacccaagctcatgacttgcaaagggagttgatccgcttcctcaatgccggcgttatcactgcgggtaaaggcgccaattgtactctgcctctgccttacgccaaggcggcgatgcttgtccggactaatacactcatgcagggctattccggcatccggtgggctattcttaacggctttgagaagcttatgaacgggaacattattccgaagatgcccctgcgtggtactatcacggcatccggtgatctcgtcccgctgtcttatattgctggattgatcaccgcccgcccgaattcgcgtgcgattaccccctctggcgaggagatccctgccgccgaagcactcaagctggtcggaatcgaggagccctttgtgctccagcctaaagaaggccttgctatcgtcaacggcacctcagttggcgctgctgtggcagccaatgtctgcttcgatgctaatgttcttgtccttttggcagaagttatctccgccctcttctgcgaggtgatgcaaggcaagccggagttcacggatccacttacgcaccagcttaagcaccacccggggcagatcgaggcggccgctgtgatggagtacttgctggagggcagctcctacatgcaagccgctgcgaagctccacgagacagatccgctctcaaagcccaagcaggaccggtatgcgctcaggacctccccgcagtggctcggcccgcaggccgaagtcattcgggccgccacccactgcatcgagagggagatcaactctgtcaatgacaacccactcatcgacgtctcacgtgacatggcactgcacgggggtaacttccaaggtaccccgattggtgtttcaatggacaacatgcgtattgccctggcggcaatcgggaagctcatgttcgcacagttctcggagctcgtctgtgaccactacaattcagggctcccatcgaacctcagcggtgggccgaatcctagtctggattacgggttcaagggtgctgagattgccatggctgcctattgttccgagcttcagtacttggccaatccggtgactactcacgtgcagagtgccgagcaacacaaccaagatgttaactcgctcggtctcatctcggctcggaagacagccgaagcaattgaaattctcaagctaatgtcggcgtcttacttggttgcgctttgtcaggctattgatctccgccaccttgaggagaacatgcaagccattgtgaagcacgtggtgaagaaggtgatcaagaagtcgctgtacaatgtggagggtgaaagcttgttgccatgggcgggtgccgagaaggagcttctctccatcatagatcaccagccggtgttctcctacatcgacaacgcaagcaacccggactacgccctcatgctccagctccgccagatcctggtcgagcagacgttcaaagtccccgctgacagtgaggacgagagtggcgcgaacagccagatgccggtgctattcaacgctatacccgtgttcgagcaagcactcaaggaagccttggacaaggagatacccaaagcccgggagagctatgacagcggtgacttcgccgtacccaaccgcatcaacaactgccgcacctaccctctgtacaagttcgttcgttcagagctgggcactaacctgctccgggggacggcgccccgcagcccaggggaggacatcgagaaggtgttcaatgggataatggaagggaagttggcgataccgttgctcaggtgtctcgagggatggcgcggctcggcagggccgttcacaccacgcccggtccctgcttcgcctgcagccttcaacccagcctactgggcctggttcgacaacatacgctccccagcggcgatggcaggcaagggctcgtggtcgtcgtccgcgttcggcatgtga

SEQ ID NO: 133129 - protein, 778 aa, Equisetum arvense
MAAEFQNQKKLAELHRPPTLPLPVQGKNPLFVDSKEPVAKPPHWQKAAEALQSSHYEEIRRMIRQFLETEKVVLQGSSLTVGQVTAVTQRSEVAVELDEATAKARVDESSNWVLNNILKGTDTYGVTTGFGATSHRRTTQAHDLQRELIRFLNAGVITAGKGANCTLPLPYAKAAMLVRTNTLMQGYSGIRWAILNGFEKLMNGNIIPKMPLRGTITASGDLVPLSYIAGLITARPNSRAITPSGEEIPAAEALKLVGIEEPFVLQPKEGLAIVNGTSVGAAVAANVCFDANVLVLLAEVISALFCEVMQGKPEFTDPLTHQLKHHPGQIEAAAVMEYLLEGSSYMQAAAKLHETDPLSKPKQDRYALRTSPQWLGPQAEVIRAATHCIEREINSVNDNPLIDVSRDMALHGGNFQGTPIGVSMDNMRIALAAIGKLMFAQFSELVCDHYNSGLPSNLSGGPNPSLDYGFKGAEIAMAAYCSELQYLANPVTTHVQSAEQHNQDVNSLGLISARKTAEAIEILKLMSASYLVALCQAIDLRHLEENMQAIVKHVVKKVIKKSLYNVEGESLLPWAGAEKELLSIIDHQPVFSYIDNASNPDYALMLQLRQILVEQTFKVPADSEDESGANSQMPVLFNAIPVFEQALKEALDKEIPKARESYDSGDFAVPNRINNCRTYPLYKFVRSELGTNLLRGTAPRSPGEDIEKVFNGIMEGKLAIPLLRCLEGWRGSAGPFTPRPVPASPAAFNPAYWAWFDNIRSPAAMAGKGSWSSSAFGM

SEQ ID NO: 133130 - DNA, 2172 bp, Selaginella kraussiana
  CDS (1)..(2172)
atggtagcgaatgagatggctgcaaacgggagcaccgggttgtgcatcaagtcgacgccggtggtagcggcgccgctaccagacccgctaaactggcggaaggcggcggcggagatggagggtagccacttggacgaagtacgcgccatggtcgaaacggtctacgggggcgaccaggtgagcatctccatcgagggcacacgcctcacggtggcgcaagtggcggcgatcgcactgcgcggtgctgatgctaccgtggagctcgacgcggtggctgcgcggggacgcgtggaccgctcttcgcgctgggtcctggacaacgccatgaaggggacggacacgtacggcgtcaccacaggatttggggccacatcgcatcgccgtaccaaccagggggtggagctgcagcgcgagctcatccgcttcctcaatgccggaatattcgcagccggtagcggcgccgctaccacggtgctgccgccggcggttgcccgggcgtcggtgctggtgcgtacaaataccctgatgcagggatattccggtatccgttgggatattctcgacgccatggcaaagctggtaaacgctggcatcacgccaagaataccattgcgtggttcagtcagtgcgagcggtgacctagtaccactctcctacgtcgcggggttgctcaccgggcgtcccaacgccaaggcgtatggtcccgatggtactaccctgctcaacggcgacgaagctctcaagatggcgggcattgcggctccattcgagctccagcccaaggagggcctggcgatcgtcaatggtaccgcggtaggggcggcggtagcgtccatcgcgtgcttcgacgcgaacgtcctcgcactcttggcggaggtcatctccgccctcttctgcgaggcaatgcaggggaagccagagtacaccgatcccctcacgcacaagctcaagcaccacccggggcagatcgaagcggcggcggtgatggagcacgtcctcctgaacagcagctacatgaaggcggccgccaagctccacgaggcggacccgctgaagaagccgaagcaagacaggtacgcacttcggacgtccccgcagtggctcggcccacagatcgaggtcatccgcgccgcaacgcactccatcgctcgcgagatcaactcggtgaacgacaacccgatcatcgacgtcgaccgcgacaaggcacttcacggtggtaacttccagggtacacccgtgggcgtctccatggacaacgtacgtctcgcgatagccgccattggtaagctcatgttcgcacagttcagcgagctcgtgaacgactactacaacaacgggttaccatcgaacctcagcgggggtgacaaccctagcctcgactatggcttcaagggtgccgagatcgcgatggcttcctacacctcggagctccagtacctggccaacccggtaaccaaccacgtccagagcgccgagcagcacaaccaggacgtcaactccctcggcctcgtctccgctcgcaagaccgccgaggcgatcgagatcctcaagctcatgtcgtcgacgtttctggtcgccctctgccaggcgatcgacctccgccacctcgaggagaacctcacgtccgtggtgaagaacgtcgtctcgaccgtggccaagaagacgctcaccacgagctccggcggcgcgctccaggcgtcccggttcgccgagaaggacctccttcaggtggtggatcacaccccggtgttcacctacgccgacgatcccaccagcccgtcctacccgctcatgcagaagctccgccaggtcctcgtcgagcactccctcaagaacctcgagcacgaggacgagtcgaggagcgcgagcatcttcagcaagatcggcgtcttcgaggaggagctcaaggccaagctccccgtggaggtggcggctgctcgcagagcgttcgaggagggcaacgccgccatccccaaccggatattcgactgtgcgtccgctcccttgtacgagttcgtgaggaaggtcggcgagagcagcatcctcatggggaccaagagcggtactcctggggaggatttcagtaagattttcgacgccatctgccaaggtaagatggttgcgccgctgttgaagtgcatggatggatggtccggtgctcccagcttctga

SEQ ID NO: 133131 - protein, 723 aa, Selaginella kraussiana
MVANEMAANGSTGLCIKSTPVVAAPLPDPLNWRKAAAEMEGSHLDEVRAMVETVYGGDQVSISIEGTRLTVAQVAAIALRGADATVELDAVAARGRVDRSSRWVLDNAMKGTDTYGVTTGFGATSHRRTNQGVELQRELIRFLNAGIFAAGSGAATTVLPPAVARASVLVRTNTLMQGYSGIRWDILDAMAKLVNAGITPRIPLRGSVSASGDLVPLSYVAGLLTGRPNAKAYGPDGTTLLNGDEALKMAGIAAPFELQPKEGLAIVNGTAVGAAVASIACFDANVLALLAEVISALFCEAMQGKPEYTDPLTHKLKHHPGQIEAAAVMEHVLLNSSYMKAAAKLHEADPLKKPKQDRYALRTSPQWLGPQIEVIRAATHSIAREINSVNDNPIIDVDRDKALHGGNFQGTPVGVSMDNVRLAIAAIGKLMFAQFSELVNDYYNNGLPSNLSGGDNPSLDYGFKGAEIAMASYTSELQYLANPVTNHVQSAEQHNQDVNSLGLVSARKTAEAIEILKLMSSTFLVALCQAIDLRHLEENLTSVVKNVVSTVAKKTLTTSSGGALQASRFAEKDLLQVVDHTPVFTYADDPTSPSYPLMQKLRQVLVEHSLKNLEHEDESRSASIFSKIGVFEEELKAKLPVEVAAARRAFEEGNAAIPNRIFDCASAPLYEFVRKVGESSILMGTKSGTPGEDFSKIFDAICQGKMVAPLLKCMDGWSGAPSF

SEQ ID NO: 133132 - DNA, 2157 bp, Isoetes lacustris
  CDS (1)..(2157)
atggttgcaaacgagaatcctgctgcatatattcccaacgggatttcactctgtatcactcccccggcagcaatgaagaaatccgatcctttgaattggggcaaagcaggggaggctctgcagaggagccatcttgaagaagtgaaagaaatgatcaagacggtgtattcaagcaagaaggtctcaatcgagggtaccaagcttacaatcgcccaagtggccgccatagccaggagggcagaggtcgaggttcatttggacgcagaagcggcaaagaaaagggtagaggagtcctccaactgggttctccaaaatgcaatgaaaggcacagatacatatggagtaaccactggatttggagccacatctcaccgccgtacagatcagggtgtggagctgcaaaaagagctcatccgtttcttgaatgccggaattttccatagcccagaaggctgcgacaatgttcttccttcttctaccgccagggcagccatgttggtaagaactaacactctgatgcaaggttattccggcattagatgggaaattcttgccacaatggaaaagcttctgaatgcaaatattacccccaagcttcctctgcgagggaccataactgcatcaggagatctggtacccctttcttacattgctgggctcttaactggaagacccaattcaagagccgttacttgcgatggaaaaatcatcaccggagctgaagctttggctatggtgggtgtggagaagccgtttgagctccagccaaaagaagggctggcgctggtaaatggcacagcagtaggttctggtcttgcttccattgtgtgttttgaggccaatgtgttagcagttctagcagagattttgtctgctttcttttgtgaagttatgcaaggaaaggcagagtttacagatccgttaactcacaagctgaagcatcaccctggccagattgaagccgctgcagtaatggaatatgttttggaaggaagtgcatacatgaaagctgctgctaagcttcacgagacggattctttgaagaagccaaagcaagacagatatgctcttcgtacttctccacagtggcttggcccccagattgaagttatcagaatggctagccattccattgaaagagaaatcaattctgtcaatgataaccctatcattgatgtcagcagagacaaggctcttcatggtggaaatttccaaggtaccccaattggtgtttccatggataatgttcgtctttccatagctgctattggcaaacttatgtttgctcagttttctgaattggtctgtgatttctacaacaatggtcttccttctaatctcagtggtggtcctaatcctagcttggattatggatttaaaggggccgaaattgccatggcttcttactgctcagagcttcagtttttggctaatccagttacaaatcatgtgcagagtgctgagcagcataatcaggatgtgaattctttggggttgatctctgccagaaaaactgctgaggctgttgagatcttgaagcttatgtctacatcttttctggtagcattgtgtcaggctgttgatctgaggcatcttgaagaaataatgcagagtactgtcaagtctgttgtgtctcatgctgccaaaaagaccctcaccacaggacttggtggtgttcttcttccttctagattttgtgagaaggaacttctgcaagttgttgacaatgttcatgtgtttacctatgttgatgaccctgccagtgctgcatatcctttgatgcagaaattgagacaggttctagttgaacattctctcaagaacatacatgaagaaggtgatgaatcaacatctgttttcaagaagatcaccttgttcgaagaggagctcaagaaacaactggttacagaagttcctctggctagggatgcatatgacaagggtcagttcagtattgctaacaagattcaagagtgcagaagttatcctttgtatgaatttgttagaaaggaggctggtactacacttctttctggcactagggtattgtctccgggcgaagatttcgataaggtttatgctgcaatgtctgcagggaagcttgtcacacctttgttgaagtgtgtagatggttggtcaggagctcccagcttttga

SEQ ID NO: 133133 - protein, 718 aa, Isoetes lacustris
MVANENPAAYIPNGISLCITPPAAMKKSDPLNWGKAGEALQRSHLEEVKEMIKTVYSSKKVSIEGTKLTIAQVAAIARRAEVEVHLDAEAAKKRVEESSNWVLQNAMKGTDTYGVTTGFGATSHRRTDQGVELQKELIRFLNAGIFHSPEGCDNVLPSSTARAAMLVRTNTLMQGYSGIRWEILATMEKLLNANITPKLPLRGTITASGDLVPLSYIAGLLTGRPNSRAVTCDGKIITGAEALAMVGVEKPFELQPKEGLALVNGTAVGSGLASIVCFEANVLAVLAEILSAFFCEVMQGKAEFTDPLTHKLKHHPGQIEAAAVMEYVLEGSAYMKAAAKLHETDSLKKPKQDRYALRTSPQWLGPQIEVIRMASHSIEREINSVNDNPIIDVSRDKALHGGNFQGTPIGVSMDNVRLSIAAIGKLMFAQFSELVCDFYNNGLPSNLSGGPNPSLDYGFKGAEIAMASYCSELQFLANPVTNHVQSAEQHNQDVNSLGLISARKTAEAVEILKLMSTSFLVALCQAVDLRHLEEIMQSTVKSVVSHAAKKTLTTGLGGVLLPSRFCEKELLQVVDNVHVFTYVDDPASAAYPLMQKLRQVLVEHSLKNIHEEGDESTSVFKKITLFEEELKKQLVTEVPLARDAYDKGQFSIANKIQECRSYPLYEFVRKEAGTTLLSGTRVLSPGEDFDKVYAAMSAGKLVTPLLKCVDGWSGAPSF

SEQ ID NO: 133134 - DNA, 2169 bp, Lycopodium tristachyum
  CDS (1)..(2169)
atggttgcacaagatagctcagtatctcgcaccttaccaggaaatggcatatctttagccacctgtgacagtggtaacgccacagctctcatggatctctgccttcccggacaggatcctctcaactgggccaaggccatggctcctctagctcaatcccatttggatgaagtgagggagatggcaaaagccttcaacagcttggatgaagtgagcattcaaggaaccaacctcactgtagcccaggtagcagcagtgtctcggcgccagggagtgaaggtatgccttgattcctcggctgcaaagcacagagtagatgaaagctcaaattgggttttgcagaatgtgatgcgaggcacagacacctatggtgtgacaacaggctttggagctacatctcacagaaggactaaccagggagtggagctgcaacaggagctgatcgggttcctcaacgcaggagtgatggaagcaggaggtggaagcaaccttctccctgcctctgccaccagagctgccatgcttgtgaggacgaacactctgatgcagggctactcaggcatcaggtggcagatcctggaagcgatggcaaagttgctgaatgcagggatcactcccaagctgcctctgcggggatccatcacagcctccggtgatctggtgccgctgtcttacatagcgggattagtgacaggaaggaagaattccaaagctgtgttggcagatgggagggaggtaagcggcgaggaggccatgaagctggtaggggtggaaaacccatttgttctgcagcccaaggaagggctggcgatggtgaacgggacttcagtgggtgcaggcttggctgcaactgtgtgctatgacgccaacgtgttggctgtgtttgcagaggtggcttcagcgctcttctgtgaggccatgcaaggcaagccagagtttgccgaccccctcacccacaggctgaagcaccacccaggtcagatagaagcagcggccataatggaattcatcctccaaggtagctcatacatgaaggcagcagcaaagctccatgagacagacccgcttaagaaacccaagcaggatcgctatgctctgcgcacctccccacagtggcttggcccccagattgaggtgatccgatcagccacccagtccatccagcgagagatcaattctgtcaatgacaacccactcatagatgtgtccagagacctagctctgcacgggggcaacttccaaggcacccccattggtgtgtccatggacaacacccgactcgccttagcttccattggcaagcttatgtttgcccagttctcagagctcgtgaatgatttttacaataatggcttgccttctaatctcagtgggggacctaaccccagcttggactatggcttcaagggggcagagatagccatggcttcctacacctcagagctacaattccttgccaatcctgtgacaaatcatgtgcagagtgctgagcagcacaaccaggatgtgaattccttggggttgatctctgccaggaagacagcagaggctattgagattctcaagctcatgactaccacctatctggtggctctgtgccaggcaattgatctaaggcacttggaggagaatatgcaagcagtcgtgaaacaggctgtttctctggtggccaaaaagactctgaccacaggcagtgatggggtgctgtccccttcaaggttctgtgagaaggatcttctccagctggtggatcatcagcccatctttacctacattgatgatccaaccagtgccgcgtacccactactgcagaagctgaggcagatcatggtggagcatgctctacatgacaaggatgcagctgttatcttcaacaagataactgtctttgaagaagagttgaaaaaccatctccaagcagaagttactctcaccagagacaactttgacaaggatattgcagcagtgcctaacagaatcaaggattgcaaatcatacccactttatgaatttgtcagaaaggagctgaacacgcagattctcattggatcgcgcactcaatcgcccggggaagtgtttgagaaagtttttgatgcaatatctgaaggtaagctagtagctcctttgctcaagtgtttggaaggatggtcaggagcacccagtttctag

SEQ ID NO: 133135 - protein, 722 aa, Lycopodium tristachyum
MVAQDSSVSRTLPGNGISLATCDSGNATALMDLCLPGQDPLNWAKAMAPLAQSHLDEVREMAKAFNSLDEVSIQGTNLTVAQVAAVSRRQGVKVCLDSSAAKHRVDESSNWVLQNVMRGTDTYGVTTGFGATSHRRTNQGVELQQELIGFLNAGVMEAGGGSNLLPASATRAAMLVRTNTLMQGYSGIRWQILEAMAKLLNAGITPKLPLRGSITASGDLVPLSYIAGLVTGRKNSKAVLADGREVSGEEAMKLVGVENPFVLQPKEGLAMVNGTSVGAGLAATVCYDANVLAVFAEVASALFCEAMQGKPEFADPLTHRLKHHPGQIEAAAIMEFILQGSSYMKAAAKLHETDPLKKPKQDRYALRTSPQWLGPQIEVIRSATQSIQREINSVNDNPLIDVSRDLALHGGNFQGTPIGVSMDNTRLALASIGKLMFAQFSELVNDFYNNGLPSNLSGGPNPSLDYGFKGAEIAMASYTSELQFLANPVTNHVQSAEQHNQDVNSLGLISARKTAEAIEILKLMTTTYLVALCQAIDLRHLEENMQAVVKQAVSLVAKKTLTTGSDGVLSPSRFCEKDLLQLVDHQPIFTYIDDPTSAAYPLLQKLRQIMVEHALHDKDAAVIFNKITVFEEELKNHLQAEVTLTRDNFDKDIAAVPNRIKDCKSYPLYEFVRKELNTQILIGSRTQSPGEVFEKVFDAISEGKLVAPLLKCLEGWSGAPSF

SEQ ID NO: 133136 - DNA, 2172 bp, Rhizophora mangle
  CDS (1)..(2172)
atggaaaatattaccgagagtcgccaccaaaacggttctttggacagcttgtgcactaccaaacctcctagacatgatccgctgaactggggggtagccgctgagtcgttgaaaggaagccatttggatgaagtgaagcggatggtggcggagtacaggaaacatgtggtgaagctcggtggagagaccctgaccatcgcccaagtggctgcaatttcccgcggggtcgacagcgggatcactgtggagctggcagagtccgccagggcaggcgtcaaggccagcagtgactgggtcatggatggcatgacaaagggtacagatagctatggcgtcaccactggttttggggctacttcccatagaaggaccaaacaaggctctgccctgcagagggagctcatcagatttctgaatgctgggatcttcggacatggaacggattcatgccacacactgcctcacgcagcaacaagagcagctatgttggtgaggatcaacactctgctccaaggttattctggcatcaggtttgagatcctggaagctattaccaagctgctcaatcacaacattactccatgcttgccattgcgcggcacgatcacggcctcaggcgatttgatcccgctgtcctacattgctggattgttaaccggccggcctaattccaaggccattggtccggacggtcaatcccttaatgctggggaagcatttcgcctggccggtattgaatctggtttctttgaactgcagcctaaggaaggccttgccctcgtaaatggcactgcagtgggttctggcttggcttctatggtcctttttgaggcgaacattcttgctgtcttggcagaaatgctatccgcaatttttgcagaagtcatgaatggcaaacctgaattcacggaccatttgacccataaattgaagcaccatcctggccaaattgaggctgcagccataatggagcacattttagacggcagctcttatatgaaagaggctaaaaggatccatgaaatggatcccctgcagaaaccaaagcaagatcgttatgctctaaggacttccccacagtggttaggtccccagattgaagttatccgattctcaaccaaatcaattgaaagagagattaactcagtgaacgacaatcctctgatcgatgtttcgaggaataaggccttgcatgggggcaatttccagggtaccccaatcggagtctcaatggataatgcccgcctggctattgcagcgataggaaagctcatgtttgctcagttcagtgagcttgtaaatgacttctacaataacggattgccatccaatctcaccggggggagcaatccaagcctggattacggcttcaagggagctgaaatagcaatggcttcttactgttctgagctccaataccttgcaaatccagtcaccacccatgtgcagagtgcagagcagcataatcaagatgtgaactccttgggactgatttcttcaagaaagacggaagaagccgttgatatcttgaaactcatgtcctcaactttcttggttgcactttgccaagctattgacttgaggcatttggaggagaatttgaagcacgtagtcaagaacactgtcagccaactagccaagagggtcttgacaacaggtgctaacggagaacttcacccatcaaggttctgcgagaaggaattactgatggtggttgatcgtgaacatgtttttgcttacatcgatgatccctgcagcgccaactatccattgttgcaaaagctaagacaagttctcgtggaccatgcactggcaaatggcgaaaatgagaagaatgcaaatatttcagtcttccaaaagattggacctttcgaggaagaactgaaggcccaccttccgaaagaagttgagggtgcaagagcagcatatgagaatgggaatccggcaattgccaacaggatcaagggatgcaggtcttatccactgtacaagtttgtgagggagactttgggcaccggattccttacaggggaaaaggtcacgtcccctggcgaggagtttgacaaggtgttcaccgctgtgtgccagggaaagtatcagtggatacagatcctggatcccctgatacgagttgacaatcgctggattacccatccattgccaatatgttaa

SEQ ID NO: 133137 - protein, 723 aa, Rhizophora mangle
MENITESRHQNGSLDSLCTTKPPRHDPLNWGVAAESLKGSHLDEVKRMVAEYRKHVVKLGGETLTIAQVAAISRGVDSGITVELAESARAGVKASSDWVMDGMTKGTDSYGVTTGFGATSHRRTKQGSALQRELIRFLNAGIFGHGTDSCHTLPHAATRAAMLVRINTLLQGYSGIRFEILEAITKLLNHNITPCLPLRGTITASGDLIPLSYIAGLLTGRPNSKAIGPDGQSLNAGEAFRLAGIESGFFELQPKEGLALVNGTAVGSGLASMVLFEANILAVLAEMLSAIFAEVMNGKPEFTDHLTHKLKHHPGQIEAAAIMEHILDGSSYMKEAKRIHEMDPLQKPKQDRYALRTSPQWLGPQIEVIRFSTKSIEREINSVNDNPLIDVSRNKALHGGNFQGTPIGVSMDNARLAIAAIGKLMFAQFSELVNDFYNNGLPSNLTGGSNPSLDYGFKGAEIAMASYCSELQYLANPVTTHVQSAEQHNQDVNSLGLISSRKTEEAVDILKLMSSTFLVALCQAIDLRHLEENLKHVVKNTVSQLAKRVLTTGANGELHPSRFCEKELLMVVDREHVFAYIDDPCSANYPLLQKLRQVLVDHALANGENEKNANISVFQKIGPFEEELKAHLPKEVEGARAAYENGNPAIANRIKGCRSYPLYKFVRETLGTGFLTGEKVTSPGEEFDKVFTAVCQGKYQWIQILDPLIRVDNRWITHPLPIC

SEQ ID NO: 133138 - DNA, 2160 bp, Beta vulgaris
  CDS (1)..(2160)
atggaggctaatcagcaataccaaaacggatcatcagaaatggacctttgcattggaggaaagcctattcaggctgacccattgaactggggaaaggcggccgaagcgatcaccggtagccaccttgatgaagtgaagaagatggttgcggagtatcgaaacccggctattcgtctaggaggagaaacacttacagtggctcaagtagcggccgtagcagccgccactggacctcatgaggcagccgtggagctagctgaatctgctagagccggagttaaggctagtagtgattgggtgatggatagcatgaataaaggaactgatagctatggtgttactactggttttggtgctacttctcatcgtagaactaaacaaggtggtgcccttcaaaaggagcttattagatttttgaatgctggagtattcggcaatggaacagaatcaagccacacactgcctcacacagcaacaagggcagctatgcttgtgagaatcaacactcttcttcaaggttactccggtatccgtttcgagattttggaagcaatcactggactcctcaacaacaacatcactccttgtcttccccttcgtggaactatcactgcctcaggggaccttgtaccactgtcttacattgcaggtctactaacaggcaggcctaactccaaggccgtaggccctaatggtgaggtccttaacgcggaacaggccttcaaggctgctcaaatcagctccggctttttcgagcttcagcctaaggaaggtctcgcattggtaaatggtactgcagtaggttcagggatggcatccattgtcttgtttgaaaccaacattctcgcggtgctggcagaggttatctcagctgtctttgctgaagtgatgaatggaaagcctgagttcacagatcacttgacccacaaattgaagcatcacccaggacagattgaggctgcagccattatggaacacatattagatggtagctcatacatgaaagctgctaaggcactacacgagttggacccattgcagaagccaaaacaggatagatatgctttgaggacatcacctcaatggctaggccctcaaattgaggtcatccgttttgccacaaagtccattgagcgcgagatcaactctgttaatgacaacccacttattgatgtatcacgtaacaaggccctgcacggtggaaatttccagggtacccctattggtgtttccatggacaacgcaaggttggctatcgcggccattggaaagttgttgtttgctcagttctctgagctagtcaatgactattacaacaatggccttccatcaaaccttacagcaagcagggaccccagcttggactatgggttcaagggcgcggaaattgcaatggcttcttactgttccgagcttcagtttttgggtaacccagttacaaaccatgtccaaagcgcagagcagcataaccaggatgtgaactccttgggtttgatctcagcccgtaagacagctgaggcagtggatatcctgaaactgatgtcatccactttcttagtggcactatgccaagctattgatctgaggcatttggaggagaatgtgaaacatgcagtgaaaaacactgtcagtcaggtgtgcagaagggtcctgatcactggttccaatggcgagctccacccaggaagattctgtgagaaagagcttatcagagttgtagaaagagaatatgtgtttgcttatgctgatgatccttgcagtgtcacttaccctctgatgcagaaactcagacaagtgcttgttgatcaggccttggctaatggtgatagtgagaagaatgtgagcacttcgattttccagaagatcggagccttcgaggaggagctcaaggcacgcctgcctaaggaagtagaggctgcacgcgctgcctacgagagtggtaactccgttatcccaaacaggattaaggagtgcaggtcttaccctgtgtacaagtttattagggaggagctgaacaccaacttgcttactggagagaaagtgatatctccaggagaggaaattgacaaagtgttcactgcaatatgccagggaaagattattgatcctcttctcgattgtcttaaggagtggaatggtgctcctctgcctatctgttaa

SEQ ID NO: 133139 - protein, 719 aa, Beta vulgaris
MEANQQYQNGSSEMDLCIGGKPIQADPLNWGKAAEAITGSHLDEVKKMVAEYRNPAIRLGGETLTVAQVAAVAAATGPHEAAVELAESARAGVKASSDWVMDSMNKGTDSYGVTTGFGATSHRRTKQGGALQKELIRFLNAGVFGNGTESSHTLPHTATRAAMLVRINTLLQGYSGIRFEILEAITGLLNNNITPCLPLRGTITASGDLVPLSYIAGLLTGRPNSKAVGPNGEVLNAEQAFKAAQISSGFFELQPKEGLALVNGTAVGSGMASIVLFETNILAVLAEVISAVFAEVMNGKPEFTDHLTHKLKHHPGQIEAAAIMEHILDGSSYMKAAKALHELDPLQKPKQDRYALRTSPQWLGPQIEVIRFATKSIEREINSVNDNPLIDVSRNKALHGGNFQGTPIGVSMDNARLAIAAIGKLLFAQFSELVNDYYNNGLPSNLTASRDPSLDYGFKGAEIAMASYCSELQFLGNPVTNHVQSAEQHNQDVNSLGLISARKTAEAVDILKLMSSTFLVALCQAIDLRHLEENVKHAVKNTVSQVCRRVLITGSNGELHPGRFCEKELIRVVEREYVFAYADDPCSVTYPLMQKLRQVLVDQALANGDSEKNVSTSIFQKIGAFEEELKARLPKEVEAARAAYESGNSVIPNRIKECRSYPVYKFIREELNTNLLTGEKVISPGEEIDKVFTAICQGKIIDPLLDCLKEWNGAPLPIC

SEQ ID NO: 133140 - DNA, 2145 bp, Camellia sinensis
  CDS (1)..(2145)
atggatagtaccaccgccattggaaacggtgtcgggagtggcggttcaccgggtttttgtctgaaagaccctttgaattggggagtggcggcggaggcaatgaaggggagtcatttgaaggaagtgaagggcatggtggaggagtttcggaagccggtggtgaggctgggaggggagactttgacgatatcgcaggtggcggcgatcgcggtgaggggtagtgaggtggcggtggagctgtcggagtctgcgagggagggagtgaaggccagtagtgattgggttatggagagtatgaataaagggacagatagttatggtgttactactggttttggtgctacttcacataggaggaccaaagaaggtggtgctcttcaaaaggagcttattaggtttttgaatgctggaatatttggcaatggaacagagtcatgtcacacattgccacaatcagccacaagggcagctatgcttgtaaggatcaacaccctcctccaaggatactccggcattaggttccaaattttggaaaccatttccaaattcctcaacaacaacatcactccatgcctgccgttacccggcactatcaccgcctccggggacctaatccccctctcttacattgccgggcttttgacgggcccgccccattcgaaggcggtcgggcctactggaaaaaccttcccccccaaggaagccttccccctaacttggaatgagggcgggttttttgatttgcaacccaaggaaggccttgcgcttgtcaacggcacagctgttggttccggcttggcttctatggttcttttcgaggctaacatactcgccgtgttatcagaagttttgtcagcgattttcgctgaagttatgcaaggcaagcccgagttcaccgaccatttgacacacaaattgaagcaccaccctggccaaattgaagctgctgccattatggaacacattttggatggtagctcttatgtcaaggcagcccaaaaactacatgaaatggatccattgcaaaaaccaaaacaggacagatatgcccttagaacatctcctcaatggctaggaccactaattgaagtcatccgatcatcgacaaaatcaattgagagggagataaactcggtgaatgacaaccctttgatcaatgtttcaaggaacaaggccttacatggtggaaatttccaaggtaccccaatcggagtctccatggacaatacacgtctagctgttgcctcaatagggaagctcatgtttgcccaattctctgagcttgttaatgacttctacaacaatgggttaccatcaaatctttccgggggacgaaatccaagtttggattatggtttcaagggagccgagattgccatggctgcttattgctcagaactccaattccttgccaatcctgtaaccaaccatgtccaaagcgccgagcaacataaccaagatgtgaactctttaggcctaatctcttcaagaaagacagccgaggcagttgatatcttgaagctcatgtcctctacatatctagtagcactctgccaagccgtagatttgaggcattttgaggagaatttgaggaacactgtcaagagcacggtgagccaagtagcgaagcgcgttctaactatgggcgttaacggagagcttcacccttcaaggttttgtgaaaaggacttgctcagagtggtagaccgtgaatacatctttgcctacattgatgacccttgcagtgcaacctacccattgatgcaaaaactaaggcaagtacttgttgagcatgcattgaaaaatggtgaaagtgagaagaatttgagcacttcaatcttccaaaagattagggcttttgaggaggaaataaagacccttttgcctaaagaggtagagagtacaagagcagcaattgagaacgggaattcggctattccgaaccggattaaggaatgccggtcttatccactatacaagtttgtgagggaagaattgggaactgaattgttgaccggagagaaggtccggtcaccgggagaggagtttgacaaggtgttcaccgctctgtgcaagggagagatgattgatccattgatggattgtctcaaggagtggaatggtgctcctcttcctatctgttag

SEQ ID NO: 133141 - protein, 714 aa, Camellia sinensis
MDSTTAIGNGVGSGGSPGFCLKDPLNWGVAAEAMKGSHLKEVKGMVEEFRKPVVRLGGETLTISQVAAIAVRGSEVAVELSESAREGVKASSDWVMESMNKGTDSYGVTTGFGATSHRRTKEGGALQKELIRFLNAGIFGNGTESCHTLPQSATRAAMLVRINTLLQGYSGIRFQILETISKFLNNNITPCLPLPGTITASGDLIPLSYIAGLLTGPPHSKAVGPTGKTFPPKEAFPLTWNEGGFFDLQPKEGLALVNGTAVGSGLASMVLFEANILAVLSEVLSAIFAEVMQGKPEFTDHLTHKLKHHPGQIEAAAIMEHILDGSSYVKAAQKLHEMDPLQKPKQDRYALRTSPQWLGPLIEVIRSSTKSIEREINSVNDNPLINVSRNKALHGGNFQGTPIGVSMDNTRLAVASIGKLMFAQFSELVNDFYNNGLPSNLSGGRNPSLDYGFKGAEIAMAAYCSELQFLANPVTNHVQSAEQHNQDVNSLGLISSRKTAEAVDILKLMSSTYLVALCQAVDLRHFEENLRNTVKSTVSQVAKRVLTMGVNGELHPSRFCEKDLLRVVDREYIFAYIDDPCSATYPLMQKLRQVLVEHALKNGESEKNLSTSIFQKIRAFEEEIKTLLPKEVESTRAAIENGNSAIPNRIKECRSYPLYKFVREELGTELLTGEKVRSPGEEFDKVFTALCKGEMIDPLMDCLKEWNGAPLPIC

SEQ ID NO: 133142 - DNA, 2064 bp, Taxus canadensis
  CDS (1)..(2064)
atggggtttgccgtggaatcgcgttctcacgtaaaggatatattggggctgatcaacacgttcaacgaggtgaagaaaattacagtagacggtacgacccccatcacggtggcccatgtcgcggcgctggcccggaggcatgacgtgaaggttgcgttggaggcggagcaatgcagagcccgtgtggaaacctgctcttcgtgggtgcagcgcaaggcggaagacggcgccgacatatacggcgtcaccacgggctttggcgcgtgctcgagccggaggaccaaccagctgagcgagctgcaggagtcgcttatacgctgcctgctcgcgggggtgtttactaaaggatgcgcttcctccgtcgacgagctccctgcgaccgtcacccgcagcgccatgctgctccgccttaatagttttacctatggatgttccggcatccggtgggaggtcatggaagcgctggaaaagcttctcaacagcaatgtctctcctaaagtgcctctccgaggatctgtgagcgcttcgggagacctcatcccgctcgcctacattgcagggctcctgattgggaagcctagcgtaatcgctcgcataggcgacgatgtcgaggtccctgcgcccgaggcgttgagcagggtggggctgcggccattcaagctccaggccaaagaagggctggcgctcgtcaacggcacctccttcgccaccgcgctcgcctccaccgtcatgtacgacgccaatgttctgttgctgctagtcgaaacgctttgcggaatgttctgcgaggtgatctttggaagggaggagttcgcgcatccgctgatccataaagtgaagccgcacccaggccagatcgaatcggcggagctgctcgagtggctgctgcggtcgagcccgtttcaggacctgtcgagggagtattacagtattgataagctgaagaaaccgaaacaggatcgctatgctctgaggtcgagcccgcagtggttggctcctctggtgcagacaatcagagacgccaccactacagtggagacggaggtcaattccgccaatgataaccccatcattgaccacgccaatgacagggctctccatggtgcgaatttccagggcagcgccgtcggcttctacatggactacgtgcgcatcgcagtcgccgggctggggaaactcttgttcgctcagttcacggagctgatgatcgaatattacagcaacggcctaccggggaacctctccctggggccggacctgagcgtggactacggcctcaaggggctcgacatcgccatggccgcctacagctccgagcttcagtacctggcgaatcccgtgaccacacacgtgcacagcgcggaacagcacaaccaggacatcaactctctggcgctcatctccgcccgcaagacggatgaggcgttggatatcttaaagctcatgatcgcctcgcatttaacagcaatgtgccaggcggtggaccttcggcagctcgaagaagccctagtaaaagtcgtggagaatgtcgtttccacccttgcagacgaatgcggcctccctaacgacacaaaggcgaggcttttatatgtagccaaagcggtgcctgtttacacatacctggaatccccctgcgaccctacgcttcccctcttgttaggcctgaaacagtcctgtttcgattccattctggctctccacaaaaaagacggcattgagacggacaccttggtggatcggctcgccgagttcgagaagcggctgtccgaccgcctggaaaacgagatgacggcagtgagggttttgtacgaaaagaaagggcataaaactgcagacaacaacgacgccctcgtgagaatccagggttccaaattccttcctttttacagatttgttcgggacgagctcgacacaggtgtgatgagtgcgagaagagagcagacgccgcaagaggacgtgcagaaagtgttcgatgcaattgccgacggcagaattacggtgcctctgctgcactgcctgcaagggtttctcggccaaccaaatgggtgcgccaacggcgtctag

SEQ ID NO: 133143 - protein, 687 aa, Taxus canadensis
MGFAVESRSHVKDILGLINTFNEVKKITVDGTTPITVAHVAALARRHDVKVALEAEQCRARVETCSSWVQRKAEDGADIYGVTTGFGACSSRRTNQLSELQESLIRCLLAGVFTKGCASSVDELPATVTRSAMLLRLNSFTYGCSGIRWEVMEALEKLLNSNVSPKVPLRGSVSASGDLIPLAYIAGLLIGKPSVIARIGDDVEVPAPEALSRVGLRPFKLQAKEGLALVNGTSFATALASTVMYDANVLLLLVETLCGMFCEVIFGREEFAHPLIHKVKPHPGQIESAELLEWLLRSSPFQDLSREYYSIDKLKKPKQDRYALRSSPQWLAPLVQTIRDATTTVETEVNSANDNPIIDHANDRALHGANFQGSAVGFYMDYVRIAVAGLGKLLFAQFTELMIEYYSNGLPGNLSLGPDLSVDYGLKGLDIAMAAYSSELQYLANPVTTHVHSAEQHNQDINSLALISARKTDEALDILKLMIASHLTAMCQAVDLRQLEEALVKVVENVVSTLADECGLPNDTKARLLYVAKAVPVYTYLESPCDPTLPLLLGLKQSCFDSILALHKKDGIETDTLVDRLAEFEKRLSDRLENEMTAVRVLYEKKGHKTADNNDALVRIQGSKFLPFYRFVRDELDTGVMSARREQTPQEDVQKVFDAIADGRITVPLLHCLQGFLGQPNGCANGV

SEQ ID NO: 133144 - DNA, 2064 bp, Taxus x media
  CDS (1)..(2064)
atggggtttgccgtggaatcgcgttctcacgtaaaggatatattggggctgatcaacacgttcaacgaggtgaagaaaattacagtagacggtacgacccccatcacggtggcccatgtcgcggcgctggcccggaggcatgacgtgaaggttgcgttggaggcggagcaatgcagagcccgtgtggaaacctgctcttcgtgggtgcaacgcaaggcggaagacggcgccgacatatacggcgtcaccacgggcttcggcgcgtgctcgagccggaggaccaaccagctgagcgagctgcaggagtcgctcatacgctgcctgctcgcgggggtgtttactaaaggatgcgcttcctccgtcgacgagctccccgcgaccgtcacccgcagcgccatgctgctccgccttaatagttttacctatggatgttccggcatccggtgggaggtcatggaagcgctggaaaagcttctcaacagcaatgtctctcctaaagtgcctctccgaggatctgtgagcgcttcgggagacctcatcccgctcgcctacattgcagggctcctgatcgggaaacctagcgtaatcgctcgcataggcgacgatgtcgaggtccctgcgcccgaggcgttgagcagggtggggctgcggccattcaagctccaggccaaagaagggctggcgctcgtcaacggcacctccttcgccaccgcgctcgcctccaccgtcatgtacgacgccaatgttctgttgctgctcgtcgaaacgctttgcggaatgttctgcgaggtgatctttggaagggaggagttcgcgcatccgctgatccataaagtgaagccgcacccgggccagatcgaatcggcggagctgctcgagtggctgctgcggtcgagcccgtttcaggagctgtcgagggagtattacagtattgataagctgaagaaaccgaaacaggatcgctatgctctgaggtcgagcccgcagtggttggctcctctggtgcagacaatcagagacgccaccactacagtggagacggaggtcaattccgccaatgataaccccatcattgaccacgccaatgacagggctctccatggtgcgaatttccagggcagcgccgtcggcttctacatggactacgtgcgcatcgcagtcgccgggctggggaaactcttgttcgctcagttcacggagctgatgatcgaatattacagcaacggcctaccggggaacctctccctggggccggacctgagcgtggactacggcctcaaggggctcgacatcgccatggccgcctacagctccgagcttcagtacctggcgaatcccgtgaccacacacgtgcacagcgcggaacagcacaaccaggacatcaactctctggcgctcatctccgcccgcaagacggatgaggcgttggatatcttaaagctcatgatcgcctcgcatttaacagcaatgtgccaggcggtggaccttcggcagctcgaagaagccctagtaaaagtcgtggagaatgtcgtttccacccttgcagacgaatgcggcctccctaacgacacaaaggcgaggcttttatatgtagccaaagcggtgcctgtttacacatacctggaatcccccagcgaccccacgcttcccctcttgttaggcctgaaacaatcctgtttcgattccattctggctctccacaaaaaagacggaattgagacggacaccttggtcgatcggctcgccgagttcgagaagcggctgtccgaccgcctggaaaacgagatgacggcagtgagggttttgtacgaaaagaaagggcataaaacggcagacaacaacgacgccctcgtgagaatccagggttccaaattccttcctttttacagatttgttcgggacgagctcgacacaggtgtgatgagtgcgagaagagagcagacgccgcaagaggacgtgcagaaagtgttcgatgcaattgccgacggcagaattacggtgcctctgctgcactgcctgcaagggtttctcggccaaccaaatgggtgcgccaacggcgtctag

SEQ ID NO: 133145 - protein, 687 aa, Taxus x media
MGFAVESRSHVKDILGLINTFNEVKKITVDGTTPITVAHVAALARRHDVKVALEAEQCRARVETCSSWVQRKAEDGADIYGVTTGFGACSSRRTNQLSELQESLIRCLLAGVFTKGCASSVDELPATVTRSAMLLRLNSFTYGCSGIRWEVMEALEKLLNSNVSPKVPLRGSVSASGDLIPLAYIAGLLIGKPSVIARIGDDVEVPAPEALSRVGLRPFKLQAKEGLALVNGTSFATALASTVMYDANVLLLLVETLCGMFCEVIFGREEFAHPLIHKVKPHPGQIESAELLEWLLRSSPFQELSREYYSIDKLKKPKQDRYALRSSPQWLAPLVQTIRDATTTVETEVNSANDNPIIDHANDRALHGANFQGSAVGFYMDYVRIAVAGLGKLLFAQFTELMIEYYSNGLPGNLSLGPDLSVDYGLKGLDIAMAAYSSELQYLANPVTTHVHSAEQHNQDINSLALISARKTDEALDILKLMIASHLTAMCQAVDLRQLEEALVKVVENVVSTLADECGLPNDTKARLLYVAKAVPVYTYLESPSDPTLPLLLGLKQSCFDSILALHKKDGIETDTLVDRLAEFEKRLSDRLENEMTAVRVLYEKKGHKTADNNDALVRIQGSKFLPFYRFVRDELDTGVMSARREQTPQEDVQKVFDAIADGRITVPLLHCLQGFLGQPNGCANGV

SEQ ID NO: 133146 - DNA, 2064 bp, Taxus chinensis
  CDS (1)..(2064)
atggggtttgccgtggaatcgcgttctcacgtaaaggatatattggggctgatcaacgcgttcaacgaggtgaagaaaattacagtagacggtacgacccccatcacggtggcccatgtcgcggcgctggcccggaggcatgacgtgaaggttgcgttggaggcggagcaatgcagagcccgtgtggaaacctgctcttcgtgggtgcagcgcaaggcggaagacggcgccgacatatacggcgtcaccacgggcttcggcgcgtgctcgagccggaggaccaaccagctgagcgagctgcaggagtcgctcatacgctgcctgctcgcgggggtgtttactaaaggatgcgcttcctccgtcgacgagctccccgcgaccgccacccgcagcgccatgctgctccgccttaatagttttacctatggatgttccggcatccggtgggaggtcatggaagcgctggaaaagcttctcaacagcaatgtctctcctaaagtgcctctccggggttctgtgagcgcttcgggagacctcatcccgctcgcctacattgcagggctcctgatcgggaagcctagcgtaatcgctcgcataggcgacgatgtcgaggtccctgcgcccgaggcgttgagcagggtggggcttcggccattcaagctccaggccaaagaagggctggcgctcgtcaacggcacctccttcgccaccgcggtcgcctccaccgtcatgtacgacgccaatgttctgttgctgctcgtcgaaacgctttgcggaatgttctgcgaggtgatctttggaagggaggagttcgcgcatccgctgatccataaagtgaagccgcacccgggccagatcgaatcggcggagctgctcgagtggctgctgcggtcgagcccgtttcaggagctgtcgagggagtattacagtattgataagctgaagaaaccgaaacaggatcgctatgctctgaggtcgagcccgcagtggttggctcctctggtgcagacaatcagagacgccaccactacagtggagacggaggtcaattccgccaatgataaccccatcattgaccacgccaatgacagggctctccatggtgcgaatttccagggcagcgccgtcggtttctacatggactacgtgcgcatcgcagtcgccgggctggggaaactcttgttcgctcagttcacggagctgatgatcgaatattacagcaacggcctaccggggaacctctccctggggccggacctgagcgtggactacggcctcaaggggctcgacatcgccatggccgcctacagctccgagcttcagtacctggcgaatcccgtgaccacacacgtgcacagcgcggaacagcacaaccaggacatcaactctctggcgctcatctccgcccgcaagacggaggaggcgttggatatcttaaagctcatgatcgcctcgcatttaacagcaatgtgccaggcggtggaccttcggcagctcgaagaagccctagtaaaagtcgtggagaatgtcgtttccacccttgcagacgaatgcggcctccctaacgacacaaaggcgaggcttttatatgtagccaaagcggtgcctgtttacacatacctggaatccccctgcgaccccacgcttcccctcttgttaggcctgaaacagtcctgtttcgataccattctggctctccacaaaaaagacggcattgagacggacaccttggtcgatcggctcgccgagttcgagaagcggctgtccgaccgcctggaaaacgagatgacggcagtgagggttttgtacgaaaagaaagggcataaaacggcagacaacaacgacgccctcgtaagaatccagggttccaaattccttcctttttacagatttgttcgggaagagctcgacacaggtgtgatgagtgcgagaagagagcagacgccgcaagaggacgtgcagaaagtgttcgatgcaattgccgacggcagaattacggtgcctctgctgcactgcctgcaagggtttctcggccaaccaaatgggtgcgccaacggcgtctag

SEQ ID NO: 133147 - protein, 687 aa, Taxus chinensis
MGFAVESRSHVKDILGLINAFNEVKKITVDGTTPITVAHVAALARRHDVKVALEAEQCRARVETCSSWVQRKAEDGADIYGVTTGFGACSSRRTNQLSELQESLIRCLLAGVFTKGCASSVDELPATATRSAMLLRLNSFTYGCSGIRWEVMEALEKLLNSNVSPKVPLRGSVSASGDLIPLAYIAGLLIGKPSVIARIGDDVEVPAPEALSRVGLRPFKLQAKEGLALVNGTSFATAVASTVMYDANVLLLLVETLCGMFCEVIFGREEFAHPLIHKVKPHPGQIESAELLEWLLRSSPFQELSREYYSIDKLKKPKQDRYALRSSPQWLAPLVQTIRDATTTVETEVNSANDNPIIDHANDRALHGANFQGSAVGFYMDYVRIAVAGLGKLLFAQFTELMIEYYSNGLPGNLSLGPDLSVDYGLKGLDIAMAAYSSELQYLANPVTTHVHSAEQHNQDINSLALISARKTEEALDILKLMIASHLTAMCQAVDLRQLEEALVKVVENVVSTLADECGLPNDTKARLLYVAKAVPVYTYLESPCDPTLPLLLGLKQSCFDTILALHKKDGIETDTLVDRLAEFEKRLSDRLENEMTAVRVLYEKKGHKTADNNDALVRIQGSKFLPFYRFVREELDTGVMSARREQTPQEDVQKVFDAIADGRITVPLLHCLQGFLGQPNGCANGV

SEQ ID NO: 133148 - DNA, 2064 bp, Taxus chinensis
  CDS (1)..(2064)
atggggtttgccgtggaatcgcgttctcacgtaaaggatatattggggctgatcaacgcgttcaacgaggtgaagaaaattacagtagacggtacgacccccatcacggtggcccatgtcgcggcgctggcccggaggcatgacgtgaaggttgcgttggaggcggagcaatgcagagcccgtgtggaaacctgctcttcgtgggtgcagcgcaaggcggaagacggcgccgacatatacggcgtcaccacgggcttcggcgcgtgctcgagccggaggaccaaccggctgagcgagctgcaggagtcgctcatacgctgcctgctcgcgggggtgtttactaaaggatgcgctccctccgtcgacgagctccccgcgaccgccacccgcagcgccatgctgctccgccttaatagttttacctatggatgttccggcatccggtgggaggtcatggaagcgctggaaaagcttctcaacagcaatgtctctcctaaagtgcctctccggggttctgtgagcgcttcgggagacctcatcccgctcgcctacattgcagggctcctgatcgggaagcctagcgtaatcgctcgcataggcgacgatgtcgaggtccctgcgcccgaggcgttgagcagggtggggcttcggccattcaagctccaggccaaagaagggctggcgctcgtcaacggcacctccttcgccaccgcggtcgcctccaccgtcatgtacgacgccaatgttctgttgctgctcgtcgaaacgctttgcggaatgttctgcgaggtgatctttggaagggaggagttcgcgcatccgctgatccataaagtgaagccgcacccgggccagatcgaatcggcggagctgctcgagtggctgctgcggtcgagcccgtttcaggagctgtcgagggagtattacagtattgataagctgaagaaaccgaaacaggatcgctatgctctgaggtcgagcccgcagtggttggctcctctggtgcagacaatcagagacgccaccactacagtggagacggaggtcaattccgccaatgataaccccatcattgaccacgccaatgacagggctctccatggtgcgaatttccagggcagcgccgtcggtttctacatggactacgtgcgcatcgcagtagccgggctggggaaactcttgttcgctcagttcacggagctgatgatcgaatattacagcaacggcctaccggggaacctctccctggggccggacctgagcgtggactacggcctcaaggggctcgacatcgccatggccgcctacagctccgagcttcagtacctggcgaatcccgtgaccacacacgtgcacagcgcggaacagcacaaccaggacatcaactctctggcgctcatctccgcccgcaagacggaggaggcgttggatatcttaaagctcatgatcgcctcgcatttaacagcaatgtgccaggcggtggaccttcggcagctcgaagaagccctagtaaaagtcgtggagaatgtcgtttccacccttgcagacgaatgcggcctccctaacgacacaaaggcgaggcttttatatgtagccaaagcggtgcctgtttacacatacctggaatccccctgcgaccccacgcttcccctcttgttaggcctgaaacagtcctgtttcgataccattctggctctccacaaaaaagacggcattgagacggacaccttggtcgatcggctcgccgagttcgagaagcggctgtccgaccgcctggaaaacgagatgacggcagtgagggttttgtacgaaaagaaagggcataaaacggcagacaacaacgacgccctcgtgagaatccagggttccaaattccttcctttttacagatttgttcgggaagagctcgacacaggtgtgatgagtgcgagaagagagcagacgccgcaagaggacgtgcagaaagtgttcgatgcaattgccgacggcagaattacggtgcctctactgcactgcctgcaagggtttctcggccaaccaaatgggtgcgccaacggcgtctag

SEQ ID NO: 133149 - protein, 687 aa, Taxus chinensis
MGFAVESRSHVKDILGLINAFNEVKKITVDGTTPITVAHVAALARRHDVKVALEAEQCRARVETCSSWVQRKAEDGADIYGVTTGFGACSSRRTNRLSELQESLIRCLLAGVFTKGCAPSVDELPATATRSAMLLRLNSFTYGCSGIRWEVMEALEKLLNSNVSPKVPLRGSVSASGDLIPLAYIAGLLIGKPSVIARIGDDVEVPAPEALSRVGLRPFKLQAKEGLALVNGTSFATAVASTVMYDANVLLLLVETLCGMFCEVIFGREEFAHPLIHKVKPHPGQIESAELLEWLLRSSPFQELSREYYSIDKLKKPKQDRYALRSSPQWLAPLVQTIRDATTTVETEVNSANDNPIIDHANDRALHGANFQGSAVGFYMDYVRIAVAGLGKLLFAQFTELMIEYYSNGLPGNLSLGPDLSVDYGLKGLDIAMAAYSSELQYLANPVTTHVHSAEQHNQDINSLALISARKTEEALDILKLMIASHLTAMCQAVDLRQLEEALVKVVENVVSTLADECGLPNDTKARLLYVAKAVPVYTYLESPCDPTLPLLLGLKQSCFDTILALHKKDGIETDTLVDRLAEFEKRLSDRLENEMTAVRVLYEKKGHKTADNNDALVRIQGSKFLPFYRFVREELDTGVMSARREQTPQEDVQKVFDAIADGRITVPLLHCLQGFLGQPNGCANGV

SEQ ID NO: 133150 - DNA, 2265 bp, Pinus pinaster
  CDS (1)..(2265)
atggttgcagcagcagaaatgacgcaggccaatgaagttcaagttaaaagcactgggctgtgcacggacttcggctcgtctggcagcgatccactgaactgggttcgagcagccaaggccatggaaggaagtcactttgaagaagtgaaagcgatggtggattcgtatttgggagtcaaggagatttacattgaagggaaatctctgcaaacctcagacgttgctgccattgctcgaagatcgcaagtgaaagtgaaattggatgccgaagctgccaaatctagggtcgaggagagttcaaactgggttctcacccagatgactaaggggacggatacctatggtgtcactactggtttcggagccacttctcacaggagaacgaaccagggagccgagcttcagaaggagctgatccgcttcttgaatgccggagttcttggcaaatgcccagaaaatgttttgtccgaagatattacccgggcttccatgctggttcggacgaatactctgctgcagggctactcgggcataaggtgggacattcttgaaactgtggagaagctgttgaatgcggggctgaccccaaagctgcccttaagaggaaccataagttcttctggtgatctggttcccctgtcttatattgctgggctcttgaccgggaggcctaattccagagtcagatccagagatggaattgaaatgagcggagccgaagcgctcaagaaagtgggcttggaaaagccctttgaattgcagcctaaagaaggtctggccattgtcaatggcacttcagtgggagcagcactggcttccattgtgtgtttcgatgccaatgtccttgctctgctctctgaagtaatctctgccatgttctgcgaggttatgaatgggaagcctgagtttacagatccattaactcacaagctgaagcaccatcctggccaaatggaagctgcagcgatcatggagtatgtcttggacgggagttcttatatgaaacacgctgctaagctccatgagatgaatcctctgcagaagccaaagcaggatcgctatgcgcttcgcacttcgcctcagtggctcggccctcaggtggagattatcagatctgcaactcacatgattgagcgggaaatcaattctgtgaatgacaatccagtaattgatgttgccagagacaaagctctacatggagggaatttccagggcacacctattggtgtttccatggataatcttcgtctcgcaatttcagcaattgggaaattgatgttcgctcaattctcagagcttgtgaatgattactacaatggaggcttgccttcgaatctaagtggcgggcctaatcccagcctggattatggaatgaaaggggccgagatcgctatggcttcttacacttctgagcttctttacctggcaaatcctgtcaccacccatgtacagagcgccgaacagcataaccaggatgtgaattctctgggtcttggttcagctagaaaatctgccgaggccatcgatattctgaagctgatgctctccacatacctgacagctctgtgccaggctgtggatttaaggcatctggaagaaaacatgctggccactgtgaagcagattgtttctcaggtagcgaagaaaaccctgagcacagggctcaacggggagcttttgccaggccgtttctgcgaaaaggatttgctccaggtagtggataacgagcatgttttctcttacattgacgatccctgcaatgccagctacccattgactcagaaactgagaaacatcctggtggaacatgccttcaagaacggagaaggtgagaaggatcccaacacttccattttcaataagattcctctgtttgaagccgagctgaaggcacagcttgaactgcaagttagtctggccagagaaagttatgacaaagggaccagccctctgcccaacaggatccaggaatgcaggtcttatcctctctatgaatttgtgagaaaccagctcggtaccaagcttctgtctggaactcgcaccacttcccctggtgaagtgattgaagtggtttacgacgctatcaatgaggacaaggtcataggccctctcttcaaatgcttggatgggtggaaaggaactctggcccattctgaaataaataatcttccaagatcccctttatacaacgactgctatgatttgagtcctcggatctttttgttcatgcagttgtttaccgatctggaatttgattggtcataa

SEQ ID NO: 133151 - protein, 754 aa, Pinus pinaster
MVAAAEMTQANEVQVKSTGLCTDFGSSGSDPLNWVRAAKAMEGSHFEEVKAMVDSYLGVKEIYIEGKSLQTSDVAAIARRSQVKVKLDAEAAKSRVEESSNWVLTQMTKGTDTYGVTTGFGATSHRRTNQGAELQKELIRFLNAGVLGKCPENVLSEDITRASMLVRTNTLLQGYSGIRWDILETVEKLLNAGLTPKLPLRGTISSSGDLVPLSYIAGLLTGRPNSRVRSRDGIEMSGAEALKKVGLEKPFELQPKEGLAIVNGTSVGAALASIVCFDANVLALLSEVISAMFCEVMNGKPEFTDPLTHKLKHHPGQMEAAAIMEYVLDGSSYMKHAAKLHEMNPLQKPKQDRYALRTSPQWLGPQVEIIRSATHMIEREINSVNDNPVIDVARDKALHGGNFQGTPIGVSMDNLRLAISAIGKLMFAQFSELVNDYYNGGLPSNLSGGPNPSLDYGMKGAEIAMASYTSELLYLANPVTTHVQSAEQHNQDVNSLGLGSARKSAEAIDILKLMLSTYLTALCQAVDLRHLEENMLATVKQIVSQVAKKTLSTGLNGELLPGRFCEKDLLQVVDNEHVFSYIDDPCNASYPLTQKLRNILVEHAFKNGEGEKDPNTSIFNKIPLFEAELKAQLELQVSLARESYDKGTSPLPNRIQECRSYPLYEFVRNQLGTKLLSGTRTTSPGEVIEVVYDAINEDKVIGPLFKCLDGWKGTLAHSEINNLPRSPLYNDCYDLSPRIFLFMQLFTDLEFDWS

SEQ ID NO: 133152 - DNA, 2097 bp, Taxus canadensis
  CDS (1)..(2097)
atggggtttgccgtggaatcgcgttctcacgtaaaggatatattggggctgatcaacacgttcaacgaggtgaagaaaattacagtagacggtacgacccccatcacggtggcccatgtcgcggcgctggcccggaggcatgacgtgaaggttgcgttggaggcggagcaatgcagagcccgtgtggaaacctgctcttcgtgggtgcagcgcaaggcggaagacggcgccgacatatacggcgtcaccacgggctttggcgcgtgctcgagccgtaggaccaaccagctgagcgagctgcaggagtcgcttatacgctgcctgctcgcgggggtgtttactaaaggatgcgcttcctccgtcgacgagctccctgcgaccgccacccgcagcgccatgctgctccgccttaatagttttacctatggatgttccggcatccggtgggaggtcatggaagcgctggaaaagcttctcaacagcaatgtctctcctaaagtgcctctccgaggatctgtgagcgcttcgggagacctcatcccgctcgcctacattgcagggctcctgattgggaagcctagcgtagtcgctcgcataggcgacgatgtcgaggtccctgcgcccgaagcgttgagcagggtggggctgcggccattcaagctccaggccaaagaagggctggcgctcgtcaacggcacctccttcgccaccgcgctcgcctccaccgtcatgtacgacgccaatgttctgttgctgctcgtcgaaacgctttgcggaatgttctgcgaggtgatctttggaagggaggagttcgcgcatccgctgatccataaagtgaagccgcacccaggccagatcgaatcggcggagctgctcgagtggctgctgcggtcgagcccgtttcaggacctgtcgagggagtattacagtattgataagctgaagaaaccgaaacaggatcgctatgctctgaggtcgagcccgcagtggttggctcctctggtgcagacaatcagagacgccaccactacagtggagacggaggtcaattccgccaatgataaccccatcattgaccacgccaatgacagggctctccatggtgcgaatttccagggcagcgccgtcggcttctacatggactacgtgcgcatcgcagtcgccgggctggggaaactcttgttcgctcagttcacggagctgatgatcgaatattacagcaacggcctaccggggaacctctccctggggccggacctgagcgtggactacggcctcaaggggctcgacatcgccatggccgcctacagctccgagcttcagtacctggcgaatcccgtgaccacacacgtgcacagcgcggaacagcacaaccaggacatcaactctctggcgctcatctccgcccgcaagacggaggaagcgttggatatcttaaagctcatgatcgcctcgcatttaacagcaatgtgccaggcggtggaccttcggcagctcgaagaagccctagtaaaagtcgtggagaatgtcgtttccacccttgcagacgaatgcggcctccctaacgacacaaaggcgaggcttttatatgtagccaaagcggtgcctgtttacacatacctggaatccccctgcgaccctacgcttcccctcttgttaggcctggaacagtcctgtttcggttccattctggctctccacaaaaaagacggcattgagacggacaccttggtcgatcggctcgccgagttcgagaagcggctgtccgaccgcctggaaaacgagatgacggcagtgagggttttgtacgaaaagaaagggcataaaactgcagacaacaacgacgccctcgtgagaatccagggttccagattccttcctttttacagatttgttcgggaagagctcgacacaggtgtgatgagtgcgagaagagagcagacgccgcaagaggacgtgcagaaagtgttcgatgcaattgccgacggcagaattacggtgcctctgctgcactgcctgcaagggtttctcggccaaccaaatgggtgcgccaacggcgtcgagtcgttccaaagtgtttggaacaaatctgcgtga

SEQ ID NO: 133153 - protein, 698 aa, Taxus canadensis
MGFAVESRSHVKDILGLINTFNEVKKITVDGTTPITVAHVAALARRHDVKVALEAEQCRARVETCSSWVQRKAEDGADIYGVTTGFGACSSRRTNQLSELQESLIRCLLAGVFTKGCASSVDELPATATRSAMLLRLNSFTYGCSGIRWEVMEALEKLLNSNVSPKVPLRGSVSASGDLIPLAYIAGLLIGKPSVVARIGDDVEVPAPEALSRVGLRPFKLQAKEGLALVNGTSFATALASTVMYDANVLLLLVETLCGMFCEVIFGREEFAHPLIHKVKPHPGQIESAELLEWLLRSSPFQDLSREYYSIDKLKKPKQDRYALRSSPQWLAPLVQTIRDATTTVETEVNSANDNPIIDHANDRALHGANFQGSAVGFYMDYVRIAVAGLGKLLFAQFTELMIEYYSNGLPGNLSLGPDLSVDYGLKGLDIAMAAYSSELQYLANPVTTHVHSAEQHNQDINSLALISARKTEEALDILKLMIASHLTAMCQAVDLRQLEEALVKVVENVVSTLADECGLPNDTKARLLYVAKAVPVYTYLESPCDPTLPLLLGLEQSCFGSILALHKKDGIETDTLVDRLAEFEKRLSDRLENEMTAVRVLYEKKGHKTADNNDALVRIQGSRFLPFYRFVREELDTGVMSARREQTPQEDVQKVFDAIADGRITVPLLHCLQGFLGQPNGCANGVESFQSVWNKSA

SEQ ID NO: 133154 - DNA, 2127 bp, Allium cepa
  CDS (1)..(2127)
atgggtgctgtgaatggggattttagcgtcaacaacgagatcatcagaatcgaggatccactgaattggggagcggctgccaaggctatgtccgggagccatttggaggaggtgaagcgaatggtgaatgagtacagggaaaagtctgtgaagcttgaaggcgcgactttgaaggtagctcaggtggccgcggtcgccgccggtgagattaaagaggtggttttggacgaaggcgccagagagggagtgaaggcgagcagcgattgggtgatggatagtatgtgcaaaggtacggatagttatggggttaccactggtttcggtgctacttctcataggaggactaagaatggagttgccttgcagaatgagctcatcagattcttgaacgctggaatatttggcagccccaactcgggcaactctctaccatcaaccactacccgtgctgccatgctagtcagagtcaacaccctcctccaaggctattcgggtatccgcttcgagatcctagaatccataacccgtctactgaatgcaaacatcacaccctgcctacctcttcgtggcaccatcactgcctctggcgatctggtcccactgtcctacatcgctgccctactcacaggccgccctaactccaaatcagtcacttccgacaacacactcctcaccccttctgaagccttccagcttgctggcatcacttctggattcttccaacttcagcctaaagaaggtctcgccctggtcaatggcacagccgtcggatccggcttggcctccattgtcctttatgaaactaatgtgcttgctgtccttgccgaggtcatgtctgccctattttgtgaagtcatgcaagggaaacccgaattcaccgaccatttaacccacaagctaaagcaccaccccggtcaaatcgaagccgcagccattatggagcacattttagaaggttcctcctacatgaaaatggcaaagaagctccacgacacggatcctctccaaaagccgaagcaggaccggtacgccctccgaacgtccccacagtggcttggccctcagatcgaggtcatcagagccgccaccaaatcaattgagcgcgagataaactctgtgaacgacaacccattgatcgacgtgtccaggaacaaagccgtgcatggcggaaacttccagggaacccccattggcgtctccatggacaacacaagattagccgtcgccgccattggtaaattgatgtttgcacagttctccgagctggtgaacgacttttacaacaatgggctaccatccaatttaactggaggacgtaacccgagcctggactacgggttcaagggggcggagatcgccatggcctcatactgctcggagcttcagtttctggcgaatcccgtgactaaccatgtgcagagcgccgagcagcacaaccaggacgtcaactccctcggactaatctccgccagaaagaccgaggaagccgtcaccatcttgaagctcatgtcgaccacattcctggtcgccctctgccaggctatcgatttacgacatctggaggagaacgtaaggcaggcggtgaagaacgctgtcagtcaggcggcgaagagggtgctgacggtgggggcaaacggggagccccacccatcgaggttctgcgagaaggacctaataaagatgatcgacagggagtacgtgtttacatatgctgacgatgcctgcagtgcggcatacccattgatgcagaaggttaggcaggtgctcgtcgaccatgcgctaggcaacggggagagagagaaggattcagagacctcgatatttcataagatcggggcgttcgaggaggagttgaaaaggacgttgcccaaagaggtggaagttgtaagggcggcgtttgaaaatggaaaatgtgtattgccgaacaggataaaggagtgccggtcgtacccgttgtatagactggtgagggaggagctcggagcggggtatctggctggggaggaggggacgagtcccggggaggtgttcgagaaggtgtttgaggcggtttgcaatggaaaggtcgtggatccgctgctcgagtgcttgcaggagtgggatggtgcacctttgcccatttgttaa

SEQ ID NO: 133155 - protein, 708 aa, Allium cepa
MGAVNGDFSVNNEIIRIEDPLNWGAAAKAMSGSHLEEVKRMVNEYREKSVKLEGATLKVAQVAAVAAGEIKEVVLDEGAREGVKASSDWVMDSMCKGTDSYGVTTGFGATSHRRTKNGVALQNELIRFLNAGIFGSPNSGNSLPSTTTRAAMLVRVNTLLQGYSGIRFEILESITRLLNANITPCLPLRGTITASGDLVPLSYIAALLTGRPNSKSVTSDNTLLTPSEAFQLAGITSGFFQLQPKEGLALVNGTAVGSGLASIVLYETNVLAVLAEVMSALFCEVMQGKPEFTDHLTHKLKHHPGQIEAAAIMEHILEGSSYMKMAKKLHDTDPLQKPKQDRYALRTSPQWLGPQIEVIRAATKSIEREINSVNDNPLIDVSRNKAVHGGNFQGTPIGVSMDNTRLAVAAIGKLMFAQFSELVNDFYNNGLPSNLTGGRNPSLDYGFKGAEIAMASYCSELQFLANPVTNHVQSAEQHNQDVNSLGLISARKTEEAVTILKLMSTTFLVALCQAIDLRHLEENVRQAVKNAVSQAAKRVLTVGANGEPHPSRFCEKDLIKMIDREYVFTYADDACSAAYPLMQKVRQVLVDHALGNGEREKDSETSIFHKIGAFEEELKRTLPKEVEVVRAAFENGKCVLPNRIKECRSYPLYRLVREELGAGYLAGEEGTSPGEVFEKVFEAVCNGKVVDPLLECLQEWDGAPLPIC

SEQ ID NO: 133156 - DNA, 2100 bp, Stellaria longipes
  CDS (1)..(2100)
atggaaaacgggctatgcatgaacaatgacccattaaactggggcaaagcagcctcagatgtatccgggtctcatcttgaagaggtcaagaaaatggtagcggaataccgtaacaaagatgtcaagttagttggcgagacgctaaccgttgctcaagttgctgctgttgctcgttcaggtgttactgtcgagctttgcaacgcggctcgtgaccgtgttaaggctagtagtgattgggttatggatagtatgagtaaaggtactgatagttatggtgttactactggttttggtgctacttctcataggaggacttccaagggtggtgcccttcagaaggaactcattagatttttgaacgccggggttttcgggaatggaactgaaaatagccacacgcttcctcacacggcgtcaagagcagctatgttggttagaattaacactctccttcaaggctactctggcatccgttgggaaatcctcgaagccatcaccaagctcctcaacagtgacgtcactccttgcctccctctgcgtggtaccatcaccgcatcaggagatttagtcccactctcctacattgccgggcttctgactggcaggccgaatgccaaagctgttggccctaatggtgaggtcctcacagctgaacaagccttcaaggctgccaaaattgattcccccttcttcgagcttcagcctaaagaaggacttgctatggtcaacggaactgctgtaggctctggcatggcgtctattgttctctttgaagcgaatatcttagctgtccttgctgaggttatatcagctgtgtttgctgaagtaatgaatggaaaacccgagtttaccgaccacttgacccacaaactgaagcaccaccctggtcaaattgaggcagctgcgataatggaacatatattggatgggagttcatacatgaaggctgctaaggccttacacgatatggacccacttcaaaggccgagacaagccaggtatgcactgagggcatctcctcagtggctcggaccacagatcggggttatccgttgggcaacaaagtctattgagcgtgaaatcaactccgtgaatgacaaccctcttatcgacgtgtccaggaataaggccatccacggtggtaacttccagggcacgccaatcggagtgtccatggacaacacgaggttggcaattgctgccatcggaaaactaatgttcgctcaattttccgaacttgtcaatgactattacaacaatggtcttccgtcaaaccttacagctagccgagagccgagtttggattatggattcaagggtgctgaaatcgcaatggcgtcgtactgttccgagctacaattcttagccaacccagtgacaaaccatgtccagagtgctgaacagcacaaccaggatgtcaactcgcttggtcttatctctgcgagaaaaaccgctgaggcagttgatattttgaagctgatgtcttcgtcattccttgttgcaatctgccaggctgtcgacctgaggcacattgaggagaatcttcagagcgctgtgaaaaacagcgtcagccaggtgtgcaggcgggttttgattaccggtgtgaacggtgagcttcacccaggaaggttctgtgaggaggacttaatccgagtggttgagagagagcatgtgtttgcctatgctgacgatccctgcagctcaacctacccattactgcagaaactccgtcaagtcctcatcgaccaagcattagcaaacggtgacagtgaaaagaacgtaactacctccatcttccagaagattggtgcattcgaggaggagttaaaggcacgtttgagtaaggatatcgaagcagtcaggagcgccattgagaaccgtagtgaagctatccctaacaggatcaaggagtgccgatcatacccgttgtataagtttgtaagggagcagctcaagactgagttgcttacaggtgaaggagtgacgtcaccaggtgaggaaattgacaaagtgttcactgccttgaacgaaggcaagattagcgatcctcttcttgaatgtcttaacgagtggaatggtgcccctctaccgatctgttga

SEQ ID NO: 133157 - protein, 699 aa, Stellaria longipes
MENGLCMNNDPLNWGKAASDVSGSHLEEVKKMVAEYRNKDVKLVGETLTVAQVAAVARSGVTVELCNAARDRVKASSDWVMDSMSKGTDSYGVTTGFGATSHRRTSKGGALQKELIRFLNAGVFGNGTENSHTLPHTASRAAMLVRINTLLQGYSGIRWEILEAITKLLNSDVTPCLPLRGTITASGDLVPLSYIAGLLTGRPNAKAVGPNGEVLTAEQAFKAAKIDSPFFELQPKEGLAMVNGTAVGSGMASIVLFEANILAVLAEVISAVFAEVMNGKPEFTDHLTHKLKHHPGQIEAAAIMEHILDGSSYMKAAKALHDMDPLQRPRQARYALRASPQWLGPQIGVIRWATKSIEREINSVNDNPLIDVSRNKAIHGGNFQGTPIGVSMDNTRLAIAAIGKLMFAQFSELVNDYYNNGLPSNLTASREPSLDYGFKGAEIAMASYCSELQFLANPVTNHVQSAEQHNQDVNSLGLISARKTAEAVDILKLMSSSFLVAICQAVDLRHIEENLQSAVKNSVSQVCRRVLITGVNGELHPGRFCEEDLIRVVEREHVFAYADDPCSSTYPLLQKLRQVLIDQALANGDSEKNVTTSIFQKIGAFEEELKARLSKDIEAVRSAIENRSEAIPNRIKECRSYPLYKFVREQLKTELLTGEGVTSPGEEIDKVFTALNEGKISDPLLECLNEWNGAPLPIC

SEQ ID NO: 133158 - DNA, 2139 bp, Bambusa oldhamii
  CDS (1)..(2139)
atgccgcgcgaggatggtcatgttgctgccaatggcaacggtctctgcatggcggcgccccgcgccgacccgcttaactgggggaaggcggcggaggagctgatggggagccatttggacgaggtgaagcggatggtggcggagtaccgccagccggtggtgaagatcgagggcgccagcctgaggatcgctcaggtcgcggcagtggccgtggccggcgacgccaaggtggagctcgacgagtcggctcgtgaacgcgtcaaggccagcagcgactgggtcatgaacagcatgatgaacggcaccgacagctacggtgtcaccaccggcttcggtgccacatcgcacaggaggaccaaggagggtggtgctctccagagggagctcatcagattcctcaacgccggcgccttcggcactggctgcgacggccacgttctgccggccgaggcaactcgagcggccatgctcgtccgcatcaacaccctcctccagggctattccggaatccgcttcgagatcctcgaggccatcaccaagctgcttaatgccaacgtcacgccgtgcctgccgctcaggggcacggtcaccgcgtccggcgacctggtcccgctctcatacattgccggccttgtcaccggccgcgagaactctgttgctgtcgcccccgacggcaggaaggtgaacgccgctgaggcgtttaaaattgccggcatccagggcggcttcttcgagttgcagcctaaggaaggtctggccatggtcaacggcactgccgtgggctctggacttgcctccacggtgctctttgaagcgaacatacttgcaatcctcgccgaggtcctgtccgccgtgttctgcgaagtcatgaacggcaagccggagtacaccgaccaccttacgcacaagctgaagcatcatcctggacagatagaggctgctgctatcatggagcacatcttggagggaagctcatacatgaagcttgctaagaagctcggtgacctcgacccgttgatgaagccaaaacaggaccgctacgcgctccgcacgtcgccgcaatggctcggcccccaaattgaggttatccgtgccgccaccaagtccattgagcgcgagatcaactctgtcaacgacaacccgctcattgacgtctcccgcaataaggcgcttcacggtggcaacttccagggcacgcccatcggtgtgtccatggacaacacccgcctcgccattgctgccatcggcaagctcatgtttgcgcagttttcggagctcgtgaacgacttctacaacaatggccttccctccaacctgtccggcgggcgcaacccgagcttggactacggtttcaagggcgccgagatcgccatggcctcgtactgctctgagctgcagttcttgggcaacccggtgacgaaccacgtccagagcgcggagcaacacaaccaggacgtcaattcccttggtctcatctcctccaggaagaccgccgaggccatcgacatcctgaagatcatgtcctcgacgttcttggtcgccttgtgccaggccatcgacctgcgccacatcgaggagaacgtcaaaagcgccgtcaagagctgcgttatgacagtggccaagaagactccgagcaccaactccaccggtgatcttcacgtcgctcgcttctgcgagaaggacctgctcaaggagatcgaccgtgaggcggtgttcgcgtacgccgacgacccatgcagccccaactacccactgatgaagaagctgcgcagtgtgctcgtggagagcgccctcgccaacggcatggccgagttcaatgcagagacttctatatttgccagggtcgccctgttcgaggaggaactacgcgcggcgctgcccagggcagtcgaggctgcacgggcgtcagtcgagaacggcacggcagcagcacccaacagaatcaccgagtgccggtcgtatcccctgtaccggtttgtacgcgaggagctcgggacggagtacctcaccggcgagaagacacggtcgccgggcgaggagctgaacaaggtgctcctcgccatcaaccagggcaagcacattgacccgctgcttgagtgcctcaaggagtggaacggcgagccactgcccatctgctga

SEQ ID NO: 133159 - protein, 712 aa, Bambusa oldhamii
MPREDGHVAANGNGLCMAAPRADPLNWGKAAEELMGSHLDEVKRMVAEYRQPVVKIEGASLRIAQVAAVAVAGDAKVELDESARERVKASSDWVMNSMMNGTDSYGVTTGFGATSHRRTKEGGALQRELIRFLNAGAFGTGCDGHVLPAEATRAAMLVRINTLLQGYSGIRFEILEAITKLLNANVTPCLPLRGTVTASGDLVPLSYIAGLVTGRENSVAVAPDGRKVNAAEAFKIAGIQGGFFELQPKEGLAMVNGTAVGSGLASTVLFEANILAILAEVLSAVFCEVMNGKPEYTDHLTHKLKHHPGQIEAAAIMEHILEGSSYMKLAKKLGDLDPLMKPKQDRYALRTSPQWLGPQIEVIRAATKSIEREINSVNDNPLIDVSRNKALHGGNFQGTPIGVSMDNTRLAIAAIGKLMFAQFSELVNDFYNNGLPSNLSGGRNPSLDYGFKGAEIAMASYCSELQFLGNPVTNHVQSAEQHNQDVNSLGLISSRKTAEAIDILKIMSSTFLVALCQAIDLRHIEENVKSAVKSCVMTVAKKTPSTNSTGDLHVARFCEKDLLKEIDREAVFAYADDPCSPNYPLMKKLRSVLVESALANGMAEFNAETSIFARVALFEEELRAALPRAVEAARASVENGTAAAPNRITECRSYPLYRFVREELGTEYLTGEKTRSPGEELNKVLLAINQGKHIDPLLECLKEWNGEPLPIC

SEQ ID NO: 133160 - DNA, 2130 bp, Quercus suber
  CDS (1)..(2130)
atggagtattgcaatggaaatggctcatcagttaactcttgcaagagcagtgacccattgaactgggggttagctgctgaggggctcaaagggagccaccttgatgaggtgaagcgcatggttgatgagtttcgtaagccactggttaagccagggggtaagagcttgaccatagctcaagtggctgcaattgctagccaagatggtgcgatcaaggtggagctagctgaggaagctcgggctggggttaaggccagcagtgattgggtcatgggcagcatggacaaaggcaaggacagttatggtgtcaccactggttttggtgcaacctcgcataggaggaccaagcaaggtggggcccttcaaagagagcttattagattcttgaatgctggaatctttggcaatggcactgaatcatgccacacattacctcacacggcgactcgtgccgccatgttggtgaggatcaacaccctcctccaaggttactcaggcatcagatttgaaatcatggaagccatcaccaagtttctcaaccacaacattactccatgcttgccactccggggtaccatcactgcatcgggcgacctggttcctctatcttacattgctggacttttaacaggcagacccaattccaaggctgttgggcccaatggagagtctctagacgccaccaaggcctttgaattagcagggattgatggtgggttttttgaattacaacccaaagagggtctagcactagtgaatggcactgcagttgggtctggcctagcttccatggttctttttgaggccaacgtacaagctgtttttgctgaagttttatcagcaatttttgccgaagtgatgcaaggaaagcccgaatttacagaccacttgacacataaattgaagcaccatcctggccaaattgaggcagcagctataatggaacacattttagatggaagtgcttatattaaagcagcccaaaagttgcatgagattgatcctcttcagaagcctaaacaagatcgttatgcccttagaacctctccacaatggcttggcccacaaattgaagttatcaggacagcaaccaagatgattgagagggagattaactcggtgaatgataacccattgattgatgttgcaaggaacaaggctctacatggtggtaacttccaagggaccccaattggtgtttctatggataacacacgtctagccattgcttcagttggcaaactaatgtttgctcaattttcaaagcttgtcaatgactattacaacaatggattgccttcaaatctcacagcaagccgcaatccaagtttggattatggtttcaaaggtgcagagattgcaatggcatcttactgctcagaactccaattcttagccaatcctgtcaccaaccatgtccaaagtgcggagcaacataaccaagatgtaaactctttggggttgatttcctcaagaaagacagctgaggctgtggacatattgaagctcatgtcaaccactttcttagttgcattatgccaagctgttgatttaaggcatatggaggagaacttgaagaacactgtcaagaacacagtcagtcaagtggccaaaagagtcctaaccatgggctcaaatggtgagcttcacccatccaggttctgtgaaaaagacttgctcaaagttgttaacagagagtacgtttttgcatacattgatgacccctgcagtgcaacctatccattaatgcaaaagctgaggcaagtcctggttgagcatgctttgaacaatggcgacaaagagaccaacttgagcacttcaattttccaaaagattggagcttttgaggaggagcttaagacccttttgcccaaagaagtagagggcgcaaggatagaaattgagaatgggaaagcagcaattcctaacccaattaaggagtgcaggtcgtacccactatacaggtttgtgagagaagaactgggaacaagtttactaactggcgagagaattcgatcacctggtgaagaattcgataaggtattctcagcaatgtgcgcagggaagttgattgatcctttgctggattgtctgaaggagtggaatggtgctcctcttcctataaattaa

SEQ ID NO: 133161 - protein, 709 aa, Quercus suber
MEYCNGNGSSVNSCKSSDPLNWGLAAEGLKGSHLDEVKRMVDEFRKPLVKPGGKSLTIAQVAAIASQDGAIKVELAEEARAGVKASSDWVMGSMDKGKDSYGVTTGFGATSHRRTKQGGALQRELIRFLNAGIFGNGTESCHTLPHTATRAAMLVRINTLLQGYSGIRFEIMEAITKFLNHNITPCLPLRGTITASGDLVPLSYIAGLLTGRPNSKAVGPNGESLDATKAFELAGIDGGFFELQPKEGLALVNGTAVGSGLASMVLFEANVQAVFAEVLSAIFAEVMQGKPEFTDHLTHKLKHHPGQIEAAAIMEHILDGSAYIKAAQKLHEIDPLQKPKQDRYALRTSPQWLGPQIEVIRTATKMIEREINSVNDNPLIDVARNKALHGGNFQGTPIGVSMDNTRLAIASVGKLMFAQFSKLVNDYYNNGLPSNLTASRNPSLDYGFKGAEIAMASYCSELQFLANPVTNHVQSAEQHNQDVNSLGLISSRKTAEAVDILKLMSTTFLVALCQAVDLRHMEENLKNTVKNTVSQVAKRVLTMGSNGELHPSRFCEKDLLKVVNREYVFAYIDDPCSATYPLMQKLRQVLVEHALNNGDKETNLSTSIFQKIGAFEEELKTLLPKEVEGARIEIENGKAAIPNPIKECRSYPLYRFVREELGTSLLTGERIRSPGEEFDKVFSAMCAGKLIDPLLDCLKEWNGAPLPIN

SEQ ID NO: 133162 - DNA, 2136 bp, Populus jackii
  CDS (1)..(2136)
atggaattttgtcaagattcacgcaatggcaatggttcactaggatttaacactaatgaccctttgaactggggcatggcggcagagtcactaaaaggaagccacctagatgaggtcaagcgcatgatcgaggagtacaggaagcctgtggtcaagctaggaggtgagaccctgaccataggccaggtaactgcaattgctagccgtgacgttggtgtcatggtggagttgtcagaggaggctcgagctggtgtcaaagccagcagtgactgggtcatggacagcatgagcaagggcacagacagttatggtgttactactggttttggtgcaacctcacatagaagaaccaagcaaggtggagagcttcaaaaggagcttataaggttcttgaatgccggtatctttgggaatgacacggagtctagccatacattgcctcgctcagcaactagggcagctatgttggtcagattcaataccctgcttcaaggttattcaggcataagatttgagatgctggaagctatcaccaagctgctcaaccacaacatcaccccatgtttgccactcagaggaacaatcactgcctctggtgaccttgtcccattgtcctacattgccgggctcttgacaggcaggcctaattcaaaggcagttggacccaatggagagcccctgagccctgctgaagcctttacacaagctgggattgatggcggcttttttgagttgcagccgaaggagggtctagcattagtgaatggtactgcagtgggttccggtctagcttcaatggtgctttttgagactaatgtgttggcaatcctatcagaagttttgtcagcaatctttgctgaagttatgcaaggaaaacctgagtttactgatcacctcacacataaattgaagcatcatcctggccaaattgaagctgccgccatcatggaacatattttagatggcagcgcctacgttaaagaagctcagaagttacatgagatcgatcctctacagaaacctaaacaagaccgatatgctcttcgaacatctccacaatggctaggccccctaatcgaagtgattagaacatcaacgaaaatgatcgaacgagaaatcaactctgtcaatgacaatcctttgattgacgtgtcgaggaataaggctctacatggagggaatttccaggggacccctattggtgtttcaatggacaacacgcgtttggccattgcctcaattggcaaactcatgtttgcacagttctctgaacttgttaacgacttttacaacaatggattgccttcaaacctcactggtggccgcaatccaagcttggattacgggttcaaaggtgccgaaattgccatggcatcttactgctcggagctccaattccttgccaatcctgtcaccaatcatgtccagagtgcggagcaacacaaccaagatgtcaactccctgggcttgatttcttcaagaaaaacagctgaagctgttgacatattgaagctcatgtctaccactttcctggttggtctatgccaagccgttgacctgaggcacatagaggagaacctgaagagcacagtcaagaacactgtcagccaagttgccaagagagtcttgacaatgggcttcaatggcgagcttcacccttcacgattctgtgaaaaagacttgctcaaggttgttgacagagagcatgtcttttcctacattgacgatccttgcagtgcaacctatccattaatgcaaaagctaaggcaagtactagtcgagcatgccttggtgaatggcgaaagggaaacgaattcaaccacttcgattttccaaaagatcggatcttttgaggaagaactgaagacccttttgcctaaagaagtggagagtgctagacttgaagttgagaatggaaatccagctattccaaacaggatcaaggaatgcaggtcataccccctgtacaagtttgtgagggaagaattgggaactagtctgctaacaggtgagaaggtcaaatcgcccggcgaggagttcgacaaggttttcacagctatctgtgcagggaagttgattgatcccttgctggaatgcttgaaggaatgggatggtgctcctcttcctatttgctaa

SEQ ID NO: 133163 - protein, 711 aa, Populus jackii
MEFCQDSRNGNGSLGFNTNDPLNWGMAAESLKGSHLDEVKRMIEEYRKPVVKLGGETLTIGQVTAIASRDVGVMVELSEEARAGVKASSDWVMDSMSKGTDSYGVTTGFGATSHRRTKQGGELQKELIRFLNAGIFGNDTESSHTLPRSATRAAMLVRFNTLLQGYSGIRFEMLEAITKLLNHNITPCLPLRGTITASGDLVPLSYIAGLLTGRPNSKAVGPNGEPLSPAEAFTQAGIDGGFFELQPKEGLALVNGTAVGSGLASMVLFETNVLAILSEVLSAIFAEVMQGKPEFTDHLTHKLKHHPGQIEAAAIMEHILDGSAYVKEAQKLHEIDPLQKPKQDRYALRTSPQWLGPLIEVIRTSTKMIEREINSVNDNPLIDVSRNKALHGGNFQGTPIGVSMDNTRLAIASIGKLMFAQFSELVNDFYNNGLPSNLTGGRNPSLDYGFKGAEIAMASYCSELQFLANPVTNHVQSAEQHNQDVNSLGLISSRKTAEAVDILKLMSTTFLVGLCQAVDLRHIEENLKSTVKNTVSQVAKRVLTMGFNGELHPSRFCEKDLLKVVDREHVFSYIDDPCSATYPLMQKLRQVLVEHALVNGERETNSTTSIFQKIGSFEEELKTLLPKEVESARLEVENGNPAIPNRIKECRSYPLYKFVREELGTSLLTGEKVKSPGEEFDKVFTAICAGKLIDPLLECLKEWDGAPLPIC

SEQ ID NO: 133164 - DNA, 2184 bp, Pinus pinaster
  CDS (1)..(2184)
atggttgcaggggcagacctgggcgctgtggaggccaatggaaatcaaaatggaaatggatttcatcatgtgcattctgttgatctctgcattcagaatggaccagaccctctgaattgggggcaggctgccaaggccctgcagggttcccactttgaagaagtgaagctcatggtggagtcctatttcggatgcgaggaagtttccattgaaggcaaatcgctcacaatcgcggatgtaaccgcagttgccaggagaccagaggccaaggtgagattagatgcagtgtcagcgaaggcacgggtggatgaaagctctaactgggttctgcaaaacatgctcaagggcactgatacatacggtgtgacgacaggcttcggagccacttcgcacagacgaacgaaccagggggccgagctgcagaaggagctcatcaggttcttgaattcgggagtcctgacagagggcaacattctgccgcaagaaacgacccgggcagccatgctggtgcgcacaaatactctgatgcaggggtactctggaatccggtgggagattctggaaacaatccagaaactactgaatgcgggaattattccgaaattgcctgtgaagggcaccatttcatcctcgggcgacctggtaccgttgtcctacattgcaggtttcataacagggcgacccaattcgagagccagatgcatagacggtaaggaactcggtgctctggaagcgcttcagcaaatcggagtcgagaagccctttgagctccagcccaaggaaggattagccatcgttacgggacctcggctcggagctgctctggcttccatcgtttgcttcgatgccaacattatctgcattgctgcagaagttctgtccgccatgttctgcgaagtgatgctcgggaaaccagagttcacagacccattgacacacaggctgaagcaccatcctgcccaaatggaagccgcggccataatggaatatgttctggatgggagctcctacatgaaaaatgccgcaaaaaagcacgagatgaatcccctgcagaagccgaagcaggatcgttatgctctcagaacctcgccacagtggctcggtccccaaatcgaagtcatcagatccgctacccacatgatccagcgagagattaactctgtcaatgacaaccctgtaattgatgttgctcgagacaaagcactgcacggcgggaacttccaggggaccccaatcggtgtctccatggacaacctgcgcctcgctctcgccgcaatcgggaagctaatgttcgcccaattctcggagctcgtcaacgattactacaacggtggcctgccttcgaatctcagcggtggccccaacccgagcctcgactacggcttcaagggcgccgagatagccatggcttcctacacatcggagcttctgtacctcgccagccctgtcaccacccacgtccagagcgccgagcagcacaaccaagatgtcaattctctgggcctcatctcagcccgcaaatcagccgaggcaatcgacatactcaatctcatggtctccacgtatttgctcgcgctctgtcaggccgcggatttgcgacacctggaagaaaacatgctgagcaccgtgaagcacgtcgtctcccacgtggccaagaaaacactgagcacgcacaacggggagcttctcaccgccgggcgcttctgcgaaaaagacctcctccaggccgtcgagaacctccacgtcttcgcctacgtggacgatccctgcaacgagaactacccattgatgcaacagctcagacaagttctcgttgcccacgctctgaccgagactgcccaaattcaaactcaaacccagtcctccattttcaacaagattcccgccttcgagaaagaattgaaagagcaaatggaagcagaaatagggcgcgctcgccaggactactacgaaaggggggtcgcgggttcgattcccaacagaatccaggaatgcagatcctttcctctctacgacttcgcgagatcgcagctcggcacccagctcctttccggcgaccgggtaacttctccgggcgaatatattgaaaaggtttacaccggaatccgtgacggcaagattatttcgcccctcttcaagtgcctggacggatggtctggaactcccgggccatttcacagttaa

SEQ ID NO: 133165 - protein, 727 aa, Pinus pinaster
MVAGADLGAVEANGNQNGNGFHHVHSVDLCIQNGPDPLNWGQAAKALQGSHFEEVKLMVESYFGCEEVSIEGKSLTIADVTAVARRPEAKVRLDAVSAKARVDESSNWVLQNMLKGTDTYGVTTGFGATSHRRTNQGAELQKELIRFLNSGVLTEGNILPQETTRAAMLVRTNTLMQGYSGIRWEILETIQKLLNAGIIPKLPVKGTISSSGDLVPLSYIAGFITGRPNSRARCIDGKELGALEALQQIGVEKPFELQPKEGLAIVTGPRLGAALASIVCFDANIICIAAEVLSAMFCEVMLGKPEFTDPLTHRLKHHPAQMEAAAIMEYVLDGSSYMKNAAKKHEMNPLQKPKQDRYALRTSPQWLGPQIEVIRSATHMIQREINSVNDNPVIDVARDKALHGGNFQGTPIGVSMDNLRLALAAIGKLMFAQFSELVNDYYNGGLPSNLSGGPNPSLDYGFKGAEIAMASYTSELLYLASPVTTHVQSAEQHNQDVNSLGLISARKSAEAIDILNLMVSTYLLALCQAADLRHLEENMLSTVKHVVSHVAKKTLSTHNGELLTAGRFCEKDLLQAVENLHVFAYVDDPCNENYPLMQQLRQVLVAHALTETAQIQTQTQSSIFNKIPAFEKELKEQMEAEIGRARQDYYERGVAGSIPNRIQECRSFPLYDFARSQLGTQLLSGDRVTSPGEYIEKVYTGIRDGKIISPLFKCLDGWSGTPGPFHS

SEQ ID NO: 133166 - DNA, 2184 bp, Pinus pinaster
  CDS (1)..(2184)
atggttgcaggggcagacctaggcgctgttgaggccaatggaaatcaaaatggaaatggatttcatcatgtgcattctgttgatctctgcattcagaatggaccagaccctctgaattgggggcaggctgccaaggccctgcagggctcccactttgaagaagtgaagctcatggtggagtcctatttcggatgcgaggaagtttccattgaaggcaaatcgctcacaatcgcggatgtaaccgcagttgccaggagaccagaggccaaggtgagattagatgcagtgtcagcgaaggcacgggtggatgaaagctctaactgggttctgcaaaacatgctcaagggcactgatacatacggtgtgacgacaggcttcggagccacttcgcacagacgaacgaaccagggggccgagctgcagaaggagctcatcaggttcttgaattcgggagtcctgacagagggcaacattctgccgcaagaaacgacccgggcagccatgctggtgcgcacaaatactctgatgcaggggtactctggaatccggtgggagattctggaaacaatccagaaactactgaatgcgggaattattccgaaattgcctgtgaagggcaccatttcatcctcgggcgacctggtaccgttgtcctacattgcaggtttcataacagggcgacccaattcgagagccagatgcatagacggtaaggaactcggtgctctggaagcgcttcagcaaatcggagtcgagaagccctttgagctccagcccaaggaaggattagccatcgttacgggacctcggctcggagctgctctggcttccatcgtttgcttcgatgccaacattatctgcattgctgcagaagttctgtccgccatgttctgcgaagtgatgctcgggaaaccagagttcacagacccattgacacacaggctgaagcaccatcctgcccaaatggaagccgcggccataatggaatatgttctggatgggagctcctacatgaaaaatgccgcaaaaaagcacgagatgaatcccctgcagaagccgaagcaggatcgttatgctctcagaacctcgccacagtggctcggtccccaaatcgaagtcatcagatccgctacccacatgatccagcgagagattaactctgtcaatgacaaccctgtaattgatgttgctcgagacaaagcactgcacggcgggaacttccaggggaccccaatcggtgtctccatggacaacctgcgcctcgctctcgccgcaatcgggaagctaatgttcgcccaattctcggagctcgtcaacgattactacaacggtggcctgccttcgaatctcagcggtggccccaacccgagcctcgactacggcttcaagggcgccgagatagccatggcttcctacacatcggagcttctgtacctcgccagccctgtcaccacccacgtccagagcgccgagcagcacaaccaagatgtcaattctctgggcctcatctcagcccgcaaatcagccgaggcaatcgacatactcaatctcatggtctccacgtatttgctcgcgctctgtcaggccgcggatttgcgacacctggaagaaaacatgctgagcaccgtgaagcacgtggtctcccacgtggcgaagaaaacactgagcacgcacaacggggagcttctcaccgccgggcgcttctgcgaaaaagacctcctccaggccgtcgagaacctccacgtcttcgcctacgtggacgacccctgcaacgagaactacccattgatgcaacagctcagacaagttctcgttgcccacgctctgaccgagactgcccaaattcaaactcaaacccagtcctccattttcaacaagattcccgccttcgagaaagaattgaaagaccaaatggaagcagaaatagggcgcgctcgccaggactactacgaaaggggggtcgcgggttcgattcccaacagaatccaggaatgcagatcctttcctctctacgacttcgcgagatcgcagctcggcacccagctcctttccggcgaccgggtaacttctccgggcgaatatattgaaaaggtttacaccggaatccgtgacggcaagattatttcgcccctcttcaagtgcctggacggatggtctggaactcccgggccatttcacagttaa

SEQ ID NO: 133167 - protein, 727 aa, Pinus pinaster
MVAGADLGAVEANGNQNGNGFHHVHSVDLCIQNGPDPLNWGQAAKALQGSHFEEVKLMVESYFGCEEVSIEGKSLTIADVTAVARRPEAKVRLDAVSAKARVDESSNWVLQNMLKGTDTYGVTTGFGATSHRRTNQGAELQKELIRFLNSGVLTEGNILPQETTRAAMLVRTNTLMQGYSGIRWEILETIQKLLNAGIIPKLPVKGTISSSGDLVPLSYIAGFITGRPNSRARCIDGKELGALEALQQIGVEKPFELQPKEGLAIVTGPRLGAALASIVCFDANIICIAAEVLSAMFCEVMLGKPEFTDPLTHRLKHHPAQMEAAAIMEYVLDGSSYMKNAAKKHEMNPLQKPKQDRYALRTSPQWLGPQIEVIRSATHMIQREINSVNDNPVIDVARDKALHGGNFQGTPIGVSMDNLRLALAAIGKLMFAQFSELVNDYYNGGLPSNLSGGPNPSLDYGFKGAEIAMASYTSELLYLASPVTTHVQSAEQHNQDVNSLGLISARKSAEAIDILNLMVSTYLLALCQAADLRHLEENMLSTVKHVVSHVAKKTLSTHNGELLTAGRFCEKDLLQAVENLHVFAYVDDPCNENYPLMQQLRQVLVAHALTETAQIQTQTQSSIFNKIPAFEKELKDQMEAEIGRARQDYYERGVAGSIPNRIQECRSFPLYDFARSQLGTQLLSGDRVTSPGEYIEKVYTGIRDGKIISPLFKCLDGWSGTPGPFHS

SEQ ID NO: 133168 - DNA, 2112 bp, Phalaenopsis x Doritaenopsis hybrid cultivar
  CDS (1)..(2112)
atggaagtttcgaaggagaatgggctctgtcttcagggacacgatccacttaactggggcgcagcggcggcggagttgcagggcagtcatcttgacgaggtaaagaagatggtggaagagttcaggagaccggtggtgcagcttgagggggcgaagttgaagatatcgcaggtcgccgccgtggccatcggcggcggtggtgcttccgtcgaacttgctgagtcggcgcgcgctggtgtgaaagctagcagtgattgggtgcttgagagcgtggacaaaggaactgatagctatggtgtcactactggatttggggcaacgtctcacagacgaacgaagcagggaggcgctttacagaaggagctaatcagattcctcaacgccggaatatttggatcaggcaattcgaacacccttccctcttcagcaaccagagcagcaatgcttgtccgcatcaacaccctcctccaaggctattccggcatccgattcgaaatccttgaagctatcgccaccctccttaacacaaacatcacaccttgcctccctctccgcggcaccatcaccgcctccggtgacctcatccctctctcctacatcgccggaatcctcaccggtcgtcccaattccaaagctctcacttccaacggctccaccgtggatgccgtcactgccttccgtctcgccggcatctccaccggcttcttcgaacttcagccaaaagaaggccttgcactcgttaacggtactgccgtgggctccggtctcgcctccttggtcctctttgaaaccaacatcctcgctatcatggcggaggttctctccgctctgttctgcgaggtgatgcagggaaaaccagagtacaccgaccacctcacccacaagctcaagcaccatccaggccaaattgaagccgcggctatcatggaacacatactcgaaggcagctcttacatgaaggtggctaaaaagctccatgagatggatcctttacaaaaaccaaagcaagaccgatatgctcttcgcacttcaccgcagtggctcggacctcaaattgaagtgatcagagcagcaaccaaatctatcgagagagaaatcaattctgttaacgacaaccctctgattgatgtctcaaggaacaaagctcttcatggagggaatttccaaggaactcccattggcgtctccatggacaacaccagactcgccatcgctgcaattggaaagctcatgttcgcccaattctcggagcttgttaacgatttttacaacaatggcttgccttccaatctcaccagcgggcgaaacccgagcctggattacggcttcaagggagctgagatagccatggcttcctactgctctgagctccaggctctcgcgaatccggtgaccaaccatgtgcagagcgcagaacaacataaccaggatgtgaattccttaggactcatctcttccagaaagacagcagagtcagtcgatatattgaagctcatgaccaccaccttcttggtcggtttatgccaagctgtagatttgaggcatttggaggagaatttgaagaatgctgttaagaatacagtgagtcaggtggctaagaggactctcaccatgggagttaacggcgagctccatccctcgagattctgcgagaaggatttgatcaaagtgattgatagagagtatgtgtttgcttacgcagatgatccctgcagctcaacttatcctctgatgcagaaactgagagcagtccttgttgaacacgccctgaataatggggacaaggagaagacttctagtacctcaatctttcaaaagatttcatctttcgaagctgagctgaaagctgcattgccgaaggaggtggaagcggcgagagctgcgttcgagaacggttcgccggcgattgagaaccggatcaaggactgcaggtcttatcctctctacaggtttgtaaagcaggttggtgctggttttctaacaggggagaagatcgtttcgccgggtgaagaattggataaggttttcaatgcaatttgtgaggggaaggcgatcgatccgatgctcgattgcttgaaggagtggaatggagctcctttgccgatctgttag

SEQ ID NO: 133169 - protein, 703 aa, Phalaenopsis x Doritaenopsis hybrid cultivar
MEVSKENGLCLQGHDPLNWGAAAAELQGSHLDEVKKMVEEFRRPVVQLEGAKLKISQVAAVAIGGGGASVELAESARAGVKASSDWVLESVDKGTDSYGVTTGFGATSHRRTKQGGALQKELIRFLNAGIFGSGNSNTLPSSATRAAMLVRINTLLQGYSGIRFEILEAIATLLNTNITPCLPLRGTITASGDLIPLSYIAGILTGRPNSKALTSNGSTVDAVTAFRLAGISTGFFELQPKEGLALVNGTAVGSGLASLVLFETNILAIMAEVLSALFCEVMQGKPEYTDHLTHKLKHHPGQIEAAAIMEHILEGSSYMKVAKKLHEMDPLQKPKQDRYALRTSPQWLGPQIEVIRAATKSIEREINSVNDNPLIDVSRNKALHGGNFQGTPIGVSMDNTRLAIAAIGKLMFAQFSELVNDFYNNGLPSNLTSGRNPSLDYGFKGAEIAMASYCSELQALANPVTNHVQSAEQHNQDVNSLGLISSRKTAESVDILKLMTTTFLVGLCQAVDLRHLEENLKNAVKNTVSQVAKRTLTMGVNGELHPSRFCEKDLIKVIDREYVFAYADDPCSSTYPLMQKLRAVLVEHALNNGDKEKTSSTSIFQKISSFEAELKAALPKEVEAARAAFENGSPAIENRIKDCRSYPLYRFVKQVGAGFLTGEKIVSPGEELDKVFNAICEGKAIDPMLDCLKEWNGAPLPIC

SEQ ID NO: 133170 - DNA, 2148 bp, Daucus carota
  CDS (1)..(2148)
atggcgtatacgaacgggcatcatgagaacgggaacggggtggatttgtgcatgaagaaggaggatccgttgagctggggagtggcggcggaggcgctgaaggggagccatttggaggaggtgaagaggatggtggcggagtacaggaagccggtggtgaagctgggcggagagacgttgacgatatctcaggtggcggcgatatcggcgagagatgatagtggcgtcaaggtggagctgtccgaggcggcgagagccggcgtcaaggcgagtagcgactgggtgatggagagcatgaacaaagggacggatagttatggtgtcactactggctttggtgccacttctcataggaggactaagcaaggtggcgctcttcagaaggagctcattaggttcttgaatgctggaatattcggcagtggagctgaagctggtaacaacactttaccacactcggcaacacgagcagcaatgcttgtcaggatcaacacacttctccagggctactctggaatcagattcgaaatccttgaagcgatcaccaagtttcttaaccacaacattactccttgtttgccactccgtggcacaatcacggcttcgggtgatcttgtgccattgtcctacattgctggactgctcactggccgcccgaactccaaggctgttggacctactggagtaactctcagccccgaggaagcgtttaagcttgctggagtggaaggtggattttttgagttgcagccaaaagaaggcctggcacttgttaatggaacagctgttggttctggcatggcctctatggtactttttgaggctaatatattagcggttctagctgaagttatgtcagcaattttcgctgaagtgatgcaaggaaagcctgaattcaccgatcacttgacacataagttgaagcaccatccaggacaaattgaggctgctgctataatggaacacatattggatggaagcgcttatgttaaggctgctcagaagcttcatgaaatggatccgttacagaaaccaaaacaagacagatatgctctgagaacatctcctcaatggcttggtcctcaaattgaagtgatcagatcatcgactaaaatgattgagagagagatcaactctgtcaatgataacccattgattgatgtttccaggaacaaggctatacatggtggaaatttccagggaaccccaatcggtgtttccatggacaatacacgtttggctatagccgccattggaaaattgatgtttgcacaattttcagaacttgtcaacgatttttacaacaatgggttgccatcaaacttgtctggaggccgtaacccgagcttggattatggattcaagggcgctgaaatcgccatggcatcatactgctctgaactccagtttttggccaatccagtgactaaccatgtccaaagtgctgaacaacacaatcaagatgtcaactctctgggcttaatatcttcaaggaaaacatctgaagctgtagaaattttgaagctcatgtctacaacgtttttagtgggcctctgccaagctatagacttgaggcatctggaagagaatttgaagagcactgtcaaaaacacagtgagccaagtagctaagcgagttctgaccatgggtgtcaacggtgaactccacccctcaagattctgtgagaaagacttgctcagagttgtagaccgcgaatacatttttgcgtacattgatgatccctgcagtgcaacctacccgttgatgcaaaaactaagggaaactctagttgagcacgcactaaacaatggcgataaagagaggaacttgagcacttccatctttcaaaagattgcagcattcgaggatgaactgaaggcccttctgcctaaagaagttgaaagtgctagagccgcggtagaaagtggaaatccagcgatccctaacaggattaaggagtgcaggtcgtatccactgtacaagtttgtgagggaagaactgggaacagaatatcttaccggagaaaaggtgacatcccccggagaagagttcgataaggtattcacagcaatgaccaaaggagagataatcgatccattgttggagtgtctccagtcatggaatggtgctcctctgccaatctgctaa

SEQ ID NO: 133171 - protein, 715 aa, Daucus carota
MAYTNGHHENGNGVDLCMKKEDPLSWGVAAEALKGSHLEEVKRMVAEYRKPVVKLGGETLTISQVAAISARDDSGVKVELSEAARAGVKASSDWVMESMNKGTDSYGVTTGFGATSHRRTKQGGALQKELIRFLNAGIFGSGAEAGNNTLPHSATRAAMLVRINTLLQGYSGIRFEILEAITKFLNHNITPCLPLRGTITASGDLVPLSYIAGLLTGRPNSKAVGPTGVTLSPEEAFKLAGVEGGFFELQPKEGLALVNGTAVGSGMASMVLFEANILAVLAEVMSAIFAEVMQGKPEFTDHLTHKLKHHPGQIEAAAIMEHILDGSAYVKAAQKLHEMDPLQKPKQDRYALRTSPQWLGPQIEVIRSSTKMIEREINSVNDNPLIDVSRNKAIHGGNFQGTPIGVSMDNTRLAIAAIGKLMFAQFSELVNDFYNNGLPSNLSGGRNPSLDYGFKGAEIAMASYCSELQFLANPVTNHVQSAEQHNQDVNSLGLISSRKTSEAVEILKLMSTTFLVGLCQAIDLRHLEENLKSTVKNTVSQVAKRVLTMGVNGELHPSRFCEKDLLRVVDREYIFAYIDDPCSATYPLMQKLRETLVEHALNNGDKERNLSTSIFQKIAAFEDELKALLPKEVESARAAVESGNPAIPNRIKECRSYPLYKFVREELGTEYLTGEKVTSPGEEFDKVFTAMTKGEIIDPLLECLQSWNGAPLPIC

SEQ ID NO: 133172 - DNA, 2142 bp, Lactuca sativa
  CDS (1)..(2142)
atgggcagcacagaaatggaggttgatagccatcaaaacggtgagagagcggagttttgtgtgaaaggggatcctttgaactgggggatggcggcggagtcattaaagggtagtcatttagacgaggtgaagcggatggtggcggagtttaggaagccggtggtgagattgggtggagagacgttgactgtgtcgcaggtggcggcgatcgccgccagtgataacgctggggtgaaggtggaactgtcggagacggcgagggcgggggtgaaggcgagtagtgattgggtgatggagagtatgaataaaggaacggatagctatggtgtcactaccgggttcggagctacctctcaccggagaacgaaagaaggtggtgctcttcagaaggagctcattagattcttgaacgccggaatattcggtaatggcacagaatcaacccacacacttccacattcagccacaagagcagccatgcttgtcagaatcaacaccctccttcaaggttactccggcatccgattcgagatcttggaggcgatcaccaagttcctcaaccacaacgtcaccccttttctccctctccgtgggacaattaccgcctccggcgatctcgtcccattatcctacatcgccggtcttctcaccggccgtgccaactccaaagccgttggacccaccggagaagttctaaatgccgaaaaggccttcgcggaagccggagttgaaggtggtttcttcgagttacagccgaaagaagggctagcacttgtcaacggcaccgccgtgggatccgggatggcgtcgatggtgctatttgatgctaatgttcttgcattgttgtcggaagtgttatcggcgatcttcgctgaagttatgcaaggtaagccggagtttactgatcacttaacacacaaattgaagcatcaccccggtcaaatcgaggcggcggcgatcatggagtatattttggacggaagcgattacgtcaaggcggcgcaaaaggtccacgaaatggacccgttacagaaaccaaaacaagatcgttatgctctccgtacatctccccaatggctcggacctcaaatcgaagtaatccgatcatcaaccaaaatgatcgagagagaaatcaactccgtcaacgacaacccattgatcgacgtttccagaaacaaagccttacacggtggcaacttccaaggaaccccaatcggagtttccatggataacacacgtttggcgatcgccgccatcggaaagctaatgttcgctcagttctctgagcttgtcaacgatttttacaacaacgggttgccatccaatctctccggcggccggaatccaagtttggattacgggttcaaaggtgcagaaatcgccatggcttcttactgctctgagctccagtttctcgccaatccagtcacaaaccacgttcaaagcgccgaacaacacaaccaagatgttaattccttgggattgatttcagcaagaaaaacagcagaatcagtcgagatcttaaaactcatgtcaaccacatacttagtagctctatgtcaatccatcgacttgaggcatttggaagagaacctgaaatccacagtgaagaacacagtgagcctcgtcgcgaagaagatcctaaccaccggcgtcaatggcgagctccacccttctcgcttctgcgagaaagacttgcttcgtgtggtcgacagggagtatgtctttgcatacatcgacgacgcttgcagcgccacctacccattgatgcagaagctccgacaggttatcgtcgaccacgcattaaacaacgaaaatgacgccggaacttccatcttccaaaagatcagtgaattcgaagaggaactgaaagccgttttgccaaaagaagtggagggagttagaagcgcatacgagagttcgacattgacgattccaaacaggatcaaggagtgtagatcatacccattgtacaggtttgtgagagaggagcttggaacagggtttttgacaggggaggaggtgacgtcacctggagaagagttcgataaggtgttcactgctttgtgcaaaggacatattatcgatccattgttggagtgtgttcaagggtggaatggtgttcctcttccgatttcatag

SEQ ID NO: 133173 - protein, 713 aa, Lactuca sativa
MGSTEMEVDSHQNGERAEFCVKGDPLNWGMAAESLKGSHLDEVKRMVAEFRKPVVRLGGETLTVSQVAAIAASDNAGVKVELSETARAGVKASSDWVMESMNKGTDSYGVTTGFGATSHRRTKEGGALQKELIRFLNAGIFGNGTESTHTLPHSATRAAMLVRINTLLQGYSGIRFEILEAITKFLNHNVTPFLPLRGTITASGDLVPLSYIAGLLTGRANSKAVGPTGEVLNAEKAFAEAGVEGGFFELQPKEGLALVNGTAVGSGMASMVLFDANVLALLSEVLSAIFAEVMQGKPEFTDHLTHKLKHHPGQIEAAAIMEYILDGSDYVKAAQKVHEMDPLQKPKQDRYALRTSPQWLGPQIEVIRSSTKMIEREINSVNDNPLIDVSRNKALHGGNFQGTPIGVSMDNTRLAIAAIGKLMFAQFSELVNDFYNNGLPSNLSGGRNPSLDYGFKGAEIAMASYCSELQFLANPVTNHVQSAEQHNQDVNSLGLISARKTAESVEILKLMSTTYLVALCQSIDLRHLEENLKSTVKNTVSLVAKKILTTGVNGELHPSRFCEKDLLRVVDREYVFAYIDDACSATYPLMQKLRQVIVDHALNNENDAGTSIFQKISEFEEELKAVLPKEVEGVRSAYESSTLTIPNRIKECRSYPLYRFVREELGTGFLTGEEVTSPGEEFDKVFTALCKGHIIDPLLECVQGWNGVPLPIS

SEQ ID NO: 133174 - DNA, 2136 bp, Populus tremuloides
  CDS (1)..(2136)
atggaattctgtcaggactcatgcaccggcaacggttccctgggatttaaccccaatgaccccttgaactggggcatggcggcagaatcactaaaaggaagccacctagatgaggtgaagcgcatgatcgatgagtacaggaagcccgtggtcaagctcggaggtgagaccctgaccataggtcaggtaacggcaattgctagccgtgacattggtgtcaaggtggagttgtcagaggaggctcgagttggtgtcaaggctagcagcgactgggttatggacagtatgaacaagggcacggacagttatggtgtcaccaccggtttcggcgccacctcacatagaagaaccaagcaaggcggagagcttcagaaggagcttatcaggttcttgaatgctggtatctttggtaatggcacagaatctactcatacattgcctcactcggcatccagggcagctatgttggtcagaattaacacccttcttcaaggttactcgggcataagatttgaaatcttggaagccatcaccaagttgctcaaccacaacatcaccccatgtttgccactcagaggaacaatcactgcctctggtgaccttgtcccattgtcctacattgctgggctcttgacaggcaggcccaattcaaaggcacttggacctaatggagagcccctgaccgctgctgaagcctttacactagctgggattaatggtggattttttgagttgcaaccaaaggagggtctagcacttgtaaatggtactgctgttggttctggtcttgcttcaatggtgctttttgagactaatgtgctggcaatcctatcagaagttttgtcagcaattttcgccgaagttatgcaaggaaaaccagagtttactgatcacttgacacataaattgaagcatcatcctggccaaattgaagctgcagctgtcatggaacatattttagatggtagctcttatgttaaagcagctcaaaagttgcatgagatcgatcctctacagaagcctgaacaagaccgatatgctctccgaacatctccacaagggctaggcctcttgattgaagtgattagaacttcaacgaaaatgatcgaacgagagatcaactctgtcaatgacaatccattgattgatgtgtcaaggaacaaggctctacatggagggaatttccaggggactcctattggtgtttctatggacaacactcgtttggcgattgcttcaattggcaaactcatgtttgcacaattctctgaacttgttaatgactattacaacaatgggttgccttcaaaccttaccggtggtcgcaatccaagcttggattacgggttcaaaggtgctgaaattgcaatggcatcttactgctcagagctccaattccttgctaaccctgtcaccaatcatgtccagagtgctgagcaacacaaccaagacgtcaactccttaggcttgatttctgcaagaaaaacagctgaagctgttgaaatattgaagctcatgtctaccacctggttggttgctctatgccaagccatagacttgaggcacatagaggagaacctgaagaacacagtcaagaacactgtcagccaagttgctaagagagtcctgacaatgggcttcaacggcgagcttcacccctcaaggatctgcgagaaagacttgcttaaggttgtcgacagagaacatgtctttacctacatcgatgacccttgcagtgcaacctacccactaatgcagaaactaaggcaagttctagttgatcatgccttgatgaatggcgagaaagaacataattcaagcacttcgattttccaaaagattggagtctttgaggatgaactgaaggcccttttgcccaaagaagtagagagtgccagacttgaacttgagaacggcaacccagctattccaaataggatcacggaatgcaggtcataccccttgtacaagtttgtgagggaagaattgggaaccattttactaaccggtgagaaggtcggatcacctggggaggagtttgacaaggtatttacagctatatgtgcagggaagttgattgatcctatgctggagtgtttgaaggaatggaatggcgctcctcttcctctttgctaa

SEQ ID NO: 133175 - protein, 711 aa, Populus tremuloides
MEFCQDSCTGNGSLGFNPNDPLNWGMAAESLKGSHLDEVKRMIDEYRKPVVKLGGETLTIGQVTAIASRDIGVKVELSEEARVGVKASSDWVMDSMNKGTDSYGVTTGFGATSHRRTKQGGELQKELIRFLNAGIFGNGTESTHTLPHSASRAAMLVRINTLLQGYSGIRFEILEAITKLLNHNITPCLPLRGTITASGDLVPLSYIAGLLTGRPNSKALGPNGEPLTAAEAFTLAGINGGFFELQPKEGLALVNGTAVGSGLASMVLFETNVLAILSEVLSAIFAEVMQGKPEFTDHLTHKLKHHPGQIEAAAVMEHILDGSSYVKAAQKLHEIDPLQKPEQDRYALRTSPQGLGLLIEVIRTSTKMIEREINSVNDNPLIDVSRNKALHGGNFQGTPIGVSMDNTRLAIASIGKLMFAQFSELVNDYYNNGLPSNLTGGRNPSLDYGFKGAEIAMASYCSELQFLANPVTNHVQSAEQHNQDVNSLGLISARKTAEAVEILKLMSTTWLVALCQAIDLRHIEENLKNTVKNTVSQVAKRVLTMGFNGELHPSRICEKDLLKVVDREHVFTYIDDPCSATYPLMQKLRQVLVDHALMNGEKEHNSSTSIFQKIGVFEDELKALLPKEVESARLELENGNPAIPNRITECRSYPLYKFVREELGTILLTGEKVGSPGEEFDKVFTAICAGKLIDPMLECLKEWNGAPLPLC

SEQ ID NO: 133176 - DNA, 2145 bp, Populus tremuloides
  CDS (1)..(2145)
atggagacaatcaccaagaatggctaccaaaatggttcttcggagagtttgtgtacccaacgtgatcccctcagctggggtgttgctgccgaggcaatgaaaggaagccatttggacgaagtgaaacgtatggtagctgagtataggaagcctgtcgtgaatcttgctggtcagaacctgaccatcgctcaggttgcatctattgctggccatgatgctagtaatgtcaaggtggaactttctgagtctgcaagacctcgagtcaaggctagcagtgactgggtcatggatagcatggacaagggaactgatagttatggtgtcactactggttttggtgctacttcccatagaagaaccaagcaaggtggcgctcttcagaaggaactcatcagattcttgaatgctgggatctttggcaatggaacagaaacttgccacacactgcctcactcagcaactagagcagctatgcttgtcaggatcaacactctcctccaaggctactctggcatcagatttgagatcttggaagcaattaccaagctacttaataacaacatcactccatgcttgccactacgtggtacaatcacagcttcgggtgatttagtcccattatcctacattgctggattactgaccggcagccctaattccaaggccactggtcccaacggagaagtgctggatgctgttgaagcctttaaagctgctggtattgattctggattctttgagttgcagcctaaagaaggcctcgctcttgttaatggaactgcagttggttctggtttggcttccatggttcttttcgagaccaacgttcttgctgtcttatcagaactcatatctgcaattttcgccgaggttatgaatggtaaacctgaattcactgaccatctgacacacaagttgaagcaccatccaggtcaaattgaggctgctgctataatggagcacattttagatggcagcgcttacatgaaggcagctaagaagttgcatgaaatggaccccttgcagaaaccaaagcaagatcgctacgctctgaggacttcaccccaatggcttggcccccagattgaagtgatccgattctcaaccaagtcaattgaaagagagattaattcagtgaatgacaaccctctaattgatgtttcaaggaacaaggccttacatggtggcaacttccagggaactccaattggagtctcaatggacaatgtacgtttggctattgcatctataggcaagctcctattcgctcagttcagtgagctcgtaaatgatttctacaacaacggattgccatcaaatctcactgctagcagaaatccaagtctggattatggtttcaaaggagctgaaatagcaatggcctcctactgttctgagcttcagtatctcgctaatccagtcactagccatgtgcaaagtgccgagcagcacaatcaagatgttaactcgttgggacttatttcttcaagaaagacagcggaagctgtagatatcttgaaactcatgtccacaactttcttagtggcactctgccaagcaattgacttgaggcatttggaggagaacttgaggagcgctgtcaagaacactgttagtcatgtatccaagagggttttaaccacaggtgctaatggagaacttcacccatcaaggttctgtgagaaggagttgctcaaggtggttgaccgtgaagatgtctttgcttacgccgatgacccctgcagtgctacctatccattgatgcaaaaactaaggcaagttcttgttgaccatgcattggcaaatggagagaatgagaagaacgcaagcacttcagtgttccaaaagattgcagctttcgaggacgaattgaaggcccttttgcctaaagaggttgagagcgcaagagcagcatatgacagtgggaattcagcaattgagaataagattaaggaatgcaggtcttatccactgtacaagtttgtgagagaggagttgggaactggattgctcactggcgaaaacgtccgatcgcctggtgaggagttcgacaaggtgtttacagctatgtgcgaggggaagatcattgacccaatgctggaatgccttggtgaatggaatggtgcccctcttccaatctgttga

SEQ ID NO: 133177 - protein, 714 aa, Populus tremuloides
METITKNGYQNGSSESLCTQRDPLSWGVAAEAMKGSHLDEVKRMVAEYRKPVVNLAGQNLTIAQVASIAGHDASNVKVELSESARPRVKASSDWVMDSMDKGTDSYGVTTGFGATSHRRTKQGGALQKELIRFLNAGIFGNGTETCHTLPHSATRAAMLVRINTLLQGYSGIRFEILEAITKLLNNNITPCLPLRGTITASGDLVPLSYIAGLLTGSPNSKATGPNGEVLDAVEAFKAAGIDSGFFELQPKEGLALVNGTAVGSGLASMVLFETNVLAVLSELISAIFAEVMNGKPEFTDHLTHKLKHHPGQIEAAAIMEHILDGSAYMKAAKKLHEMDPLQKPKQDRYALRTSPQWLGPQIEVIRFSTKSIEREINSVNDNPLIDVSRNKALHGGNFQGTPIGVSMDNVRLAIASIGKLLFAQFSELVNDFYNNGLPSNLTASRNPSLDYGFKGAEIAMASYCSELQYLANPVTSHVQSAEQHNQDVNSLGLISSRKTAEAVDILKLMSTTFLVALCQAIDLRHLEENLRSAVKNTVSHVSKRVLTTGANGELHPSRFCEKELLKVVDREDVFAYADDPCSATYPLMQKLRQVLVDHALANGENEKNASTSVFQKIAAFEDELKALLPKEVESARAAYDSGNSAIENKIKECRSYPLYKFVREELGTGLLTGENVRSPGEEFDKVFTAMCEGKIIDPMLECLGEWNGAPLPIC

SEQ ID NO: 133178 - DNA, 2154 bp, Coffea canephora
  CDS (1)..(2154)
atggagtgcgctaatggaaatggtaatgaccttgcggagaccttttgtactcaacgggccgggccagcacccgacccgttaaattggaacgcagccgcggagtctttaaaaggaagtcatcttgatgaagtcaagcgcatggtcgatgagttcaggaggcccctggtccggctaggtggtgagacgctgacgatagctcaggtggcggccgtagctgcttcctccgacgcagccgttaaggtggagctgtcggagggtgccagggccggcgtcaaggccagcagtgactgggttatggagagcatgagaaagggtactgatagttacggtatcaccaccggctttggtgcaacgtcacacaggagaaccaaacaaggcggagctctccaggaggagctcatccgattcttgaatgctggaatttttggcaacgggaccgaaacatgtcacacattgcctcactcggcaacaagggcttctatgcttgttcgaatcaacaccctccttcaggggtactctggcatcagatttgagattctggaagctattacaaagcttctcaacaataatatcaccccatgtttgcccctccgcggaacaatcaccgcctccggtgatttggttccactctcctacattgttggattattaacaggtcgaccaaattccaaggctgttggacctgacggaaaatttgtcaatgctactgaagcattcagcctggcggggattgacactggatttttcgagctgcaggcaaaagaaggccttgcacttgtgaatggcactgctgttggctctgccttggcttccatggtcctctttgaggctaatattcttgctgttcttgctgaagttctttcaggaatttttgctgaagttatgcacgggaagccagagtttacagaccatttgactcataaactgaagcaccatcctggtcaaattgaggccgcagctattatggaacacattttggatggaagttcgtttgttaaagaagctcagagggttcatgaattcgaccctttgcaaaagcccaaacaagatcgttatgcactccgaacatccccacaatggctaggtccattgattgaagtcatcagggcttcgacaaaatccatcgaaagagagatcaattctgtgaatgacaatcctttgatcgacgtttcccggaataaggccttacatggtgggaactttcaaggtacaccaattggagtctcgatggataacacccgtctagcaattgcatcaattggtaaactcatgttcgcacaattttctgagctggttaatgacttttacaacaatggattgccttcaaacctatctgggggacgtaatccaagtttggactatggtttcaaaggtgctgaaattgccatggcagcttactgctctgaacttcagttcctagccaatcctgtcacaaaccatgtgcaaagtgcagagcaacacaaccaagatgtcaactcattaggattgatctcatcaagaaaaacagcagaagctgtggacatattgaagctcatgtcatcgacctatttggttgcattgtgccaggcaattgacctgaggcacctggaggagaacttgaaggcctcagtgaaaaacacggttagccttgtagccaagaaagtgctaacaatgggctacaatggcgaattgcacccatctagattctgcgaaaaagacttgctcaaagtggtggacagagagcatgtttttgcttacattgatgacccctgtagtggaacctaccccctgatgcaaaagctaaggcaagtcctagtggagcactccttagcaaatggggacaaggagaaggacgcaaccacttcaattttccaaaagatcggtgcctttgaggatgaactcaaggcccttttgcccaaagaagtggagagtgctagatgtgagttggagaatggaaagccaggcattgccaaccgtatcaaggattgcaggtcctactcattatacaagtttgtgaggggagagttggggaccaatttcctgactggtgagaaggtgagatcacctggagaagaatttgacaaggtattcactgccatatgtgaagggaagttgattgatccattgctggattgtttgaaagagtggaatggtgctccccgtccaatttgctaa

SEQ ID NO: 133179 - protein, 717 aa, Coffea canephora
MECANGNGNDLAETFCTQRAGPAPDPLNWNAAAESLKGSHLDEVKRMVDEFRRPLVRLGGETLTIAQVAAVAASSDAAVKVELSEGARAGVKASSDWVMESMRKGTDSYGITTGFGATSHRRTKQGGALQEELIRFLNAGIFGNGTETCHTLPHSATRASMLVRINTLLQGYSGIRFEILEAITKLLNNNITPCLPLRGTITASGDLVPLSYIVGLLTGRPNSKAVGPDGKFVNATEAFSLAGIDTGFFELQAKEGLALVNGTAVGSALASMVLFEANILAVLAEVLSGIFAEVMHGKPEFTDHLTHKLKHHPGQIEAAAIMEHILDGSSFVKEAQRVHEFDPLQKPKQDRYALRTSPQWLGPLIEVIRASTKSIEREINSVNDNPLIDVSRNKALHGGNFQGTPIGVSMDNTRLAIASIGKLMFAQFSELVNDFYNNGLPSNLSGGRNPSLDYGFKGAEIAMAAYCSELQFLANPVTNHVQSAEQHNQDVNSLGLISSRKTAEAVDILKLMSSTYLVALCQAIDLRHLEENLKASVKNTVSLVAKKVLTMGYNGELHPSRFCEKDLLKVVDREHVFAYIDDPCSGTYPLMQKLRQVLVEHSLANGDKEKDATTSIFQKIGAFEDELKALLPKEVESARCELENGKPGIANRIKDCRSYSLYKFVRGELGTNFLTGEKVRSPGEEFDKVFTAICEGKLIDPLLDCLKEWNGAPRPIC

SEQ ID NO: 133180 - DNA, 2112 bp, Zea mays
  CDS (1)..(2112)
atggcgggcaacggcgccatcgtggagagcgacccgctgaactggggcgcggcggcggcggagctggccgggagccacctggacgaggtgaagcgcatggtggcgcaggcccggcagcccgtggtcaagatcgagggctccaccctccgcgtcggccaggtggccgccgtcgcctccgccaaggacgcgtccggcgtcgccgtcgagctcgacgaggaggcccgcccccgcgtcaaggccagcagcgagtggatcctcgactgcatcgcccacggcggcgacatctacggcgtcaccaccggcttcggcggcacctcccaccgccgcaccaaggacgggcccgcgctccaggtcgagctgctcaggcatctcaacgccggaatcttcggcaccggcagcgacgggcacacgctgccgtcggaggtcacccgcgcggcgatgctggtgcgcatcaacaccctcctccagggctactccggcatccgcttcgagatcctcgaggccatcacgaagctgctcaacaccggtgtcagcccctgcctgccgctccggggcaccatcaccgcgtcgggcgacctggtcccgctctcctacatcgccggcctcatcacgggccgccccaacgcgcaggccgtcaccgtcgacggaaggaaggtggacgccgccgaggcgttcaagatcgccggcatcgagggcggcttcttcaagctcaaccccaaggagggcctcgccatcgtcaacggcacgtccgtgggctccgcgctcgcggccaccgtgatgtacgacgccaacgtcctggccgtcctgtcggaggtcctgtccgccgtcttctgcgaggtcatgaacggcaagcccgagtacacggaccacctgacccacaagctgaagcaccacccggggtccatcgaggccgcggccatcatggagcacatcctggatggcagctccttcatgaagcaggccaagaaggtgaacgagctggacccgctgctgaagcccaagcaggacaggtacgcgctccgcacgtcgccgcagtggctgggcccccagatcgaggtcatccgcgccgccaccaagtccatcgagcgcgaggtcaactccgtgaacgacaacccggtcatcgacgtccaccgcggcaaggcgctgcacggcggcaacttccagggcacccccatcggcgtgtccatggacaacgcccgcctcgccatcgccaacatcggcaagctcatgttcgcgcagttctccgagctcgtcaacgagttctacaacaacgggctcacctccaacctggccggcagccgcaaccccagcctggactacggcttcaagggcaccgagatcgccatggcctcctactgctccgagctccagtacctgggcaaccccatcaccaaccacgtgcagagcgcggacgagcacaaccaggacgtgaactccctgggcctcgtctcggccaggaagaccgccgaggcgatcgacatcctgaagctcatgtcgtccacctacatcgtggcgctgtgccaggccgtggacctgcgccacctcgaggagaacatcaaggcgtcggtgaagaacaccgtgacccaggtggccaagaaggtgctgaccatgaacccctcgggcgagctctccagcgcccgcttcagcgagaaggagctgatcagcgccatcgaccgcgaggccgtgttcacgtacgcggaggacgcggccagcgccagcctgccgctgatgcagaagctgcgcgccgtgctggtggaccacgccctcagcagcggcgagcgcggagcgggagccctccgtgttctccaagatcaccaggttcgaggaggagctccgcgcggtgctgccccaggaggtggaggccgcccgcgtggcgtcgccgagggcaccgcccccgtggcgaaccggatcgcggacagccggtcgttcccgctgtaccgcttcgtgcgcgaggagctcggctgcgtgttcctgaccggcgagaggctcaagtcccccggcgaggagtgcaacaaggtgttcgtcggcatcagccagggcaagctcgtggaccccatgctcgagtgcctcaaggagtgggacggcaagccgctgcccatcaacatcaagtaa

SEQ ID NO: 133181 - protein, 703 aa, Zea mays
MAGNGAIVESDPLNWGAAAAELAGSHLDEVKRMVAQARQPVVKIEGSTLRVGQVAAVASAKDASGVAVELDEEARPRVKASSEWILDCIAHGGDIYGVTTGFGGTSHRRTKDGPALQVELLRHLNAGIFGTGSDGHTLPSEVTRAAMLVRINTLLQGYSGIRFEILEAITKLLNTGVSPCLPLRGTITASGDLVPLSYIAGLITGRPNAQAVTVDGRKVDAAEAFKIAGIEGGFFKLNPKEGLAIVNGTSVGSALAATVMYDANVLAVLSEVLSAVFCEVMNGKPEYTDHLTHKLKHHPGSIEAAAIMEHILDGSSFMKQAKKVNELDPLLKPKQDRYALRTSPQWLGPQIEVIRAATKSIEREVNSVNDNPVIDVHRGKALHGGNFQGTPIGVSMDNARLAIANIGKLMFAQFSELVNEFYNNGLTSNLAGSRNPSLDYGFKGTEIAMASYCSELQYLGNPITNHVQSADEHNQDVNSLGLVSARKTAEAIDILKLMSSTYIVALCQAVDLRHLEENIKASVKNTVTQVAKKVLTMNPSGELSSARFSEKELISAIDREAVFTYAEDAASASLPLMQKLRAVLVDHALSSGERGAGALRVLQDHQVRGGAPRGAAPGGGGRPRGVAEGTAPVANRIADSRSFPLYRFVREELGCVFLTGERLKSPGEECNKVFVGISQGKLVDPMLECLKEWDGKPLPINIK

SEQ ID NO: 133182 - DNA, 2136 bp, Lactuca sativa
  CDS (1)..(2136)
atggagaacggtaatcacgttaatggagtcgttaatgagttgtgcatcaaggatccattgaactggggagttgcagcggaggcgttgaccggaagtcaccttgatgaggtgaagaagatggttgcggagttcagaaagccggtggtgaagctcggaggagagacgcttacagtttctcaggtggcggggatcgcagctgctaatgacagtgacaccgtgaaggtggagctgtcggaagccgcgagggctggagttaaggcgagtagtgattgggttatggagagcatgaataaaggaactgatagttatggtgtcaccaccggcttcggcgccacctctcaccggagaactaagcaaggcggtgctttacagaaggagctcattagatttttgaacgccggaatattcggcaatggaacggaaacaagccacacacttccacattcagccaccagagccgccatgatcgtcagaatcaacaccctcctccagggttactccggcatccgattcgagatcttggaagccatcaccaagttccttaacaacaacatcaccccttgtttacccctccgtggaaccatcaccgcctccggtgaccttgtcccattatcatacatcgccggcctcttaaccggccgccccaactccaaagccgttggccccaccggagaagtcctcaatgccgaaaaggccttcgctgcagccggagttgaaggtgggttcttcgagttacagccgaaagaagggctagcacttgttaacggcaccgccgtggggtccgggatggcttccatggttctatttgatgctaatgtacttgcgttgttgtcggaagtgttatcggcgatcttcgctgaggttatgcaagggaagccggagtttaccgatcacttgacacacaaattgaagcatcaccctggtcaaatcgaggcggcggcgatcatggagtatattttggacggaagcgattacgtcaaggcggcgcaaaaggtccacgaaatggacccgttacagaaaccaaaacaagatcgttatgctctccgtacatctccccaatggctcggacctcaaatcgaagtaatccgatcatcaaccaaaatgatcgagagggaaatcaattccgtcaacgacaacccattgatcgacgtttccagaaacaaagctttacacggtggtaacttccaaggaaccccaatcggagtttccatggacaacacccgtctcgccattgctgcaatcggaaaactcatgttcgctcaattttctgagctggttaacgatttctacaacaatggattaccatcgaatctctccggtggacgtaaccctagtttggactacgggttcaaaggtggagaaatcgccatggcttcttactgttctgagcttcagtttctcgcaaatccagtcaccaaccatgttcaaagcgccgaacaacacaatcaagacgttaattctctcggattaatttcagcgaggaaaaccgcagaagcagtcgacatcttaaaactcatgtcgtcgacatacttagtcgctctatgccaatccatcgatttacgccatttggaagagaacatgaaatcgacagtgaagaacaccgtaagccaagtcgcgaaaaaggtcctcaccatgggcgtcaacggcgagctccacccgtcgagattctgcgagaaagatctcctccgtgttgttgatcgtgaatacgtcttcgcttacatcgacgacgtttgcagcggcacatacccattaatgcagaagctccgacaggttctggtcgaccacgctctaaacaacggcgaaacggagaagaacactaacacctccatcttccaaaagatcgctaccttcgaagaagaattgaaagtcctgttaccgaaagaagttgaaggtgttagaatcgcttatgagaatgatacattgtcgattccaaacaggattaaagcttgcagatcgtacccgttgtataggtttgtaagggaggagctcggcagagggtttttgaccggagaaaaggtgacgtcgccgggagaggagttcgacagggtgttcacggcgatgtgcaaaggtcaaattattgatccgttgttggagtgtcttggagggtggaatggggaacctcttccaatatgttag

SEQ ID NO: 133183 - protein, 711 aa, Lactuca sativa
MENGNHVNGVVNELCIKDPLNWGVAAEALTGSHLDEVKKMVAEFRKPVVKLGGETLTVSQVAGIAAANDSDTVKVELSEAARAGVKASSDWVMESMNKGTDSYGVTTGFGATSHRRTKQGGALQKELIRFLNAGIFGNGTETSHTLPHSATRAAMIVRINTLLQGYSGIRFEILEAITKFLNNNITPCLPLRGTITASGDLVPLSYIAGLLTGRPNSKAVGPTGEVLNAEKAFAAAGVEGGFFELQPKEGLALVNGTAVGSGMASMVLFDANVLALLSEVLSAIFAEVMQGKPEFTDHLTHKLKHHPGQIEAAAIMEYILDGSDYVKAAQKVHEMDPLQKPKQDRYALRTSPQWLGPQIEVIRSSTKMIEREINSVNDNPLIDVSRNKALHGGNFQGTPIGVSMDNTRLAIAAIGKLMFAQFSELVNDFYNNGLPSNLSGGRNPSLDYGFKGGEIAMASYCSELQFLANPVTNHVQSAEQHNQDVNSLGLISARKTAEAVDILKLMSSTYLVALCQSIDLRHLEENMKSTVKNTVSQVAKKVLTMGVNGELHPSRFCEKDLLRVVDREYVFAYIDDVCSGTYPLMQKLRQVLVDHALNNGETEKNTNTSIFQKIATFEEELKVLLPKEVEGVRIAYENDTLSIPNRIKACRSYPLYRFVREELGRGFLTGEKVTSPGEEFDRVFTAMCKGQIIDPLLECLGGWNGEPLPIC

SEQ ID NO: 133184 - DNA, 2133 bp, Manihot esculenta
  CDS (1)..(2133)
atggagttttgtgaggctcacaatgtaactgcttcacctggattctcctctgctgacccattgaactggggcatggctgcagagtcactgaagggcagccaccttgatgaggtgaagcgcatggtggatgagtacaggaagcctgtggtgaggctagggggtgagaccctgactatagcccaagttacagcaattgcgaaccatgactcaggtgtcaaggttgagctgtctgaggaggctcgagctggggtcaaggccagtagtgactgggttcttgattccatgaataaaggaaccgatagttatggtgtcaccactggctttggtgcaacctcccatagaagaaccaagcaggggggtgcccttcagagagaactcataagattcttgaatgctgggatctttggaaatggacaagaatcttgccacacattgtctcacactgcaactagagcagcaatgctggtgagaatcaacaccctcctgcaaggttattcaggcataagatttgaaatcctggaagccattaccaagttcatcaacaacaatgttactccgcgtttgcccctcagaggcacaatcacagcctctggtgacctggtcccactgtcctacattgccgggcttttgaccggccggcccaactccaagtcgttagggcccaatggagaatccttggatgcagctgaagcctttaagcttgctgggatcaatggtggattttttgaattgcagcccaaagagggtctagctttagtaaatggtactgcagttggttcaggcttagcttctatggttctttttgaggccaatgtgttggcagtcctgtcagaagttttatcagcaatttttgcagaagttatgcttggaaaaccagagtttacagatcatttgacacataaattgaagcatcatcctggacaaattgaagctgcagcaattatggaacatgtcttggatggaagttcttatattaaagcagctcaaaaggttcatgaaattgatccattgcagaagcctaaacaagacagatatgctcttagaacatctcctcaatggcttggccctcagattgaagtgattcgaacagcgactaaaatgatcgaacgcgaaatcaactctgtgaatgataatccattgattgatgtctccaggaatattgctttacatggaggcaatttccaggggaccccaattggtgtttcaatggataacactcgtttagccattgcttcaattggtaaactcatgtttgctcaattctctgagcttgttaatgatttttacaacaatgggttgccttcaaatctcactggtggacgcaatccaagcttggattatggcttcaaaggagctgaaattgccatggcatcttactgctcagagctccaatttcttgccaatcctgtaactaatcatgtccaaagtgcagagcagcacaaccaagatgttaactcactaggcttgatttcttcaaggaaaacagctgaagctgttgacatattgaagctcatgtcttctacatacttagttgctctatgtcaagccattgacttgagacacttggaggagaacttgaagcaaacagtcaagaacacagtaagtcaagttgcaaagagagtcttgacaatgggcatcaacggcgagctccacccgtcgagattctgcgaaaaagaccttctcaaagtcgtcgacagggaatacgtttatgcatatgttgatgatccttgcagtgcaacatacccattaatgcaaaagctgagacaagtactagttgatcatgccatgatgaatggtgaaaaggagaagaattcaagcacttccattttccaaaaaattggagcctttgaagaagaactcaagacccttttgcctaaagaagtagaaagtgcaagaactgaatatgagaatggtaatccagctatttctaacaagatcaaagaatgtaggtcatatccactatacaagtttgtgagggaagaactcggttgtagtttactgaccggcgagaagattcgatcgcccggcgaagagtttgataaggttttctcagcaatttgtgcagggaagctgattgatcccatgcttgaatgcctcaaggagtggaatggtgctcctcttccaatctgctaa

SEQ ID NO: 133185 - protein, 710 aa, Manihot esculenta
MEFCEAHNVTASPGFSSADPLNWGMAAESLKGSHLDEVKRMVDEYRKPVVRLGGETLTIAQVTAIANHDSGVKVELSEEARAGVKASSDWVLDSMNKGTDSYGVTTGFGATSHRRTKQGGALQRELIRFLNAGIFGNGQESCHTLSHTATRAAMLVRINTLLQGYSGIRFEILEAITKFINNNVTPRLPLRGTITASGDLVPLSYIAGLLTGRPNSKSLGPNGESLDAAEAFKLAGINGGFFELQPKEGLALVNGTAVGSGLASMVLFEANVLAVLSEVLSAIFAEVMLGKPEFTDHLTHKLKHHPGQIEAAAIMEHVLDGSSYIKAAQKVHEIDPLQKPKQDRYALRTSPQWLGPQIEVIRTATKMIEREINSVNDNPLIDVSRNIALHGGNFQGTPIGVSMDNTRLAIASIGKLMFAQFSELVNDFYNNGLPSNLTGGRNPSLDYGFKGAEIAMASYCSELQFLANPVTNHVQSAEQHNQDVNSLGLISSRKTAEAVDILKLMSSTYLVALCQAIDLRHLEENLKQTVKNTVSQVAKRVLTMGINGELHPSRFCEKDLLKVVDREYVYAYVDDPCSATYPLMQKLRQVLVDHAMMNGEKEKNSSTSIFQKIGAFEEELKTLLPKEVESARTEYENGNPAISNKIKECRSYPLYKFVREELGCSLLTGEKIRSPGEEFDKVFSAICAGKLIDPMLECLKEWNGAPLPIC

SEQ ID NO: 133186 - DNA, 2127 bp, Rehmannia glutinosa
  CDS (1)..(2127)
atggagaatgggcaccaccactcgaacgggttgtgcgtggagactacgcgtgatccgttgaactgggtggcggcggcggagtcgctgaaggggagccacctggacgaggtgaagaggatggtggaggagttcaggaagccggcggtgaagctcggcggtgagagcctgactatagcgcaggtggcggcgatcgcggcgagggataatgcggtggcggtggagctggcggagacggcgcgtgcgggggttaaggcgagtagcgattgggttatggagagtatgaataaagggactgacagttatggagttacaacgggttttggtgccacgtcacataggaggactaaacaaggtggtgctcttcagaaggagctcattaggttcttgaatgccggaatattcggcaacggcacggaatctaaccacgcgctgccacactccgccacgagagccgccatgctcgtccgaatcaacacgctcctccaaggatattccggcatccgatttgaaatcctagaagccctaacaaaattcctcaaccacaacatcaccccctgtttgcccctccgcggcacgatcaccgcctccggcgacctcgtcccgctatcctacattgccgggcttttaacgggccggcccaactccaaggccgtcggcccaaacggcgaagccctcaacgccggcgaggctttcagcctcgccggcgttagcggcttcttcgagctgcagcccaaagaaggcctcgcgctagtcaacgggacagctgtcgggtccggattggcctcgatcgccctgtacgacgcgaacatcctcgccgtcctgtcggaagtgacgtcagtgattttcgctgaggtcatgaatgggaaacctgaatttacggatcatttgacacataagctgaaacatcaccctggccaaattgaggccgctgctataatggaacacattttagatggtagcgcgtacgttaaggctgctcagaaattgcacgaaaccgatccgttgcaaaaaccgaaacaggatcggtacgcgcttagaacgtcgcctcaatggctcggcccccaaatcgaagttatccgaaccgcgacgaaaatgatcgagcgggaaattaattcggttaacgacacacctctaatcgatgtctcgagaaataaagcgttacatggcggtaacttccagggcacgccaatcggggtatcgatggacaacaccagattggcgatagcagctatcggaaaattgatgttcgctcaattttccgagctggttaatgatttctacaacaatggattgccgtctaatctctctggcggtaggaatccgagcttggattacggtttcaaagggtccgaaatcgcgatggcttcgtattgttcggagcttcaatttttagctaatcctgttaccaatcatgtccaaagtgcagagcaacataaccaagatgtgaattcacttggattgatttcttctagaaagaccgtcgaggctctggatattctaaagctgatgtcatccacatatttaatcgcgctatgccaggccgtcgatttgaggcacttggaggagaatttgaggctttcagttaaaaacaccgttagccaagtggcgaagaggactctgacaatgggtattaatggcgaacttcatccgtcaagattctgcgagaaggatcttctccgtgtggtggaccgcgagtacgtgtttgcatacatcgacgatccgtgcagcgggacctaccccttgatgcagaagttgaggcaagttctcgtggaccacgcgttgaacaacggtgagagtgagaaaaacgtgagcacgtctatttttcaaaagatcgaggcgtttgaggtagagttgaaggcgatcttgcctaaagaggtcgagagtgcacggatcgcgttggagagtggaaatccggcgattggtaacaggattacggaatgcagatcgtatccgttgtacaagtttatcagagaggaacttgggacgaactacttgacgggcgaaaaggtcgtttctccgggggaggaatgtgataaggtgttcacagctttgagcaagggtttgattgttgatcctttgttgaagtgtcttgagggttggaatggtgcacctccccctatctgctag

SEQ ID NO: 133187 - protein, 708 aa, Rehmannia glutinosa
MENGHHHSNGLCVETTRDPLNWVAAAESLKGSHLDEVKRMVEEFRKPAVKLGGESLTIAQVAAIAARDNAVAVELAETARAGVKASSDWVMESMNKGTDSYGVTTGFGATSHRRTKQGGALQKELIRFLNAGIFGNGTESNHALPHSATRAAMLVRINTLLQGYSGIRFEILEALTKFLNHNITPCLPLRGTITASGDLVPLSYIAGLLTGRPNSKAVGPNGEALNAGEAFSLAGVSGFFELQPKEGLALVNGTAVGSGLASIALYDANILAVLSEVTSVIFAEVMNGKPEFTDHLTHKLKHHPGQIEAAAIMEHILDGSAYVKAAQKLHETDPLQKPKQDRYALRTSPQWLGPQIEVIRTATKMIEREINSVNDTPLIDVSRNKALHGGNFQGTPIGVSMDNTRLAIAAIGKLMFAQFSELVNDFYNNGLPSNLSGGRNPSLDYGFKGSEIAMASYCSELQFLANPVTNHVQSAEQHNQDVNSLGLISSRKTVEALDILKLMSSTYLIALCQAVDLRHLEENLRLSVKNTVSQVAKRTLTMGINGELHPSRFCEKDLLRVVDREYVFAYIDDPCSGTYPLMQKLRQVLVDHALNNGESEKNVSTSIFQKIEAFEVELKAILPKEVESARIALESGNPAIGNRITECRSYPLYKFIREELGTNYLTGEKVVSPGEECDKVFTALSKGLIVDPLLKCLEGWNGAPPPIC

SEQ ID NO: 133188 - DNA, 2139 bp, Manihot esculenta
  CDS (1)..(2139)
atggcaacaatctctcagaatggtcaccagaatggttctttagactctttgtgtacagctcgtgacccactgaattggggtctggctgctgagtctatgagtggcagccatttagacgaagtgaaaaagatggtggctgagtttaggaagcctttggtcaagttaggcggcgagaccttgactgtagctcaggtggcagctattgctcgtgaatctggtctccaagtggagcttgcagaatctgctagagctggtgttaaggcgagtagtgactgggtcatggatagtatgagcaaaggaactgatagctatggtgtcactactggatttggagccacttcacatagaagaaccaagcaaggtggtgctttacagagggagctcattagattcctgaatgctgggatttttggcaataagacagaatcgtgtcacactttgtcacactctgcaacaagagcagcaatgctagtgaggatcaacactcttctccaaggttactcaggcattagatttgaaatcttggaagctatcaccaagctcctcaaccacaatattactccttgcttgccgctgagaggcacaatcactgcttcaggggatttagttccattgtcctacattgctggattgctcaccggccggcctaattccaaggctgttggccctaatggagaatccctagatgcccagcaagcctttcactctgctggtattgattctggcttctttgagttgcagcctaaagaaggccttgctctggttaatggcactgctgttggttctggcttggcttccatggttctctttgaggcaaatgttcttgctgttttatcagaagtcttatcagctattttcgccgaagttatgaatggaaaacctgagtttactgatcacttgactcataagttgaagcaccatccaggccaaatagaggctgcagctataatggagcatattttagatggtagctcttatattaaagcagctaagaagttgcatgaaattgatccattgcagaaaccaaagcaagatcgatatgctctcagaacttccccacaatggctaggtcctcagattgaagttatcagattctccacaaaatcgatcgaaagagagattaattcagtcaatgacaaccctttgattgatgtttctaggaacaaggccttgcatggtggaaatttccaggggaccccaattggagtctcaatggataatgcacgtttggccattgcatcaataggaaagctcatgtttgctcagttcagtgagcttgtaaatgatttttacaacaatgggttgccatcaaatctcacagccagcaggaatccaagcttggattatggcttcaagggagctgaaattgcaatggcttcttactgttctgagctccaataccttgcaaatccagtcaccagccatgtacaaagtgcagagcagcacaatcaagatgtaaattcattggggctaatttcttcaagaaagacagaagaagctgtagacatcttgaagctcatgtccacgactttcttagtagcactttgtcaagctattgacttgaggcatttggaggagaacttgaagcacgcagtcaaaaacacagtaagccaagtagctaagaggattctaactacaggagctagtggagaacttcacccatcaagattctgcgagaaggacttgctcaaagtggtggatcgcgagcaagtcttctcttatgtcgatgacgcctgcagtgctacctatccattgatgcaaaaactaaggcaagttctcgtggaccatgccttggcaaatggcgagagtgagaagaatgccagcacttcaatcttccaaaagatcagagcttttgaggaagaattgaaagcccttttgcctaaagaagttgagagtgcaagagaggcatacgagaacgggaatccagcaattgccaacaagatcaaggaatgcagatcttacccattgtataagtttgtgagagaggaaataggaactgggttgctcaccggagaaaagatccggtcaccgggagaggaatttgataaggttttcactgctatgtgccaaggaaagatcattgatccaatgctggattgtctcaaagagtggaatggtgcccctcttccaatatgttaa

SEQ ID NO: 133189 - protein, 712 aa, Manihot esculenta
MATISQNGHQNGSLDSLCTARDPLNWGLAAESMSGSHLDEVKKMVAEFRKPLVKLGGETLTVAQVAAIARESGLQVELAESARAGVKASSDWVMDSMSKGTDSYGVTTGFGATSHRRTKQGGALQRELIRFLNAGIFGNKTESCHTLSHSATRAAMLVRINTLLQGYSGIRFEILEAITKLLNHNITPCLPLRGTITASGDLVPLSYIAGLLTGRPNSKAVGPNGESLDAQQAFHSAGIDSGFFELQPKEGLALVNGTAVGSGLASMVLFEANVLAVLSEVLSAIFAEVMNGKPEFTDHLTHKLKHHPGQIEAAAIMEHILDGSSYIKAAKKLHEIDPLQKPKQDRYALRTSPQWLGPQIEVIRFSTKSIEREINSVNDNPLIDVSRNKALHGGNFQGTPIGVSMDNARLAIASIGKLMFAQFSELVNDFYNNGLPSNLTASRNPSLDYGFKGAEIAMASYCSELQYLANPVTSHVQSAEQHNQDVNSLGLISSRKTEEAVDILKLMSTTFLVALCQAIDLRHLEENLKHAVKNTVSQVAKRILTTGASGELHPSRFCEKDLLKVVDREQVFSYVDDACSATYPLMQKLRQVLVDHALANGESEKNASTSIFQKIRAFEEELKALLPKEVESAREAYENGNPAIANKIKECRSYPLYKFVREEIGTGLLTGEKIRSPGEEFDKVFTAMCQGKIIDPMLDCLKEWNGAPLPIC

SEQ ID NO: 133190 - DNA, 2151 bp, Agastache rugosa
  CDS (1)..(2151)
atggcggcgaacggtcatcacggctccaacggtcataataatggcgcgaacggcttctgcgtgaagcagaacgacccgttgaactgggcggcggcggcggagtcgctcaagggcagccaccttgaggaggtaaagcggatggtggaggagttcaggaagccggtggtgaagctcggcggcgagaccctcactatatctcaggtagccgcgatcgccgccaaggataatgcggtggcggtggagctggcggagtcggcgagggccggcgtcaaggccagcagcgactgggttatggacagcatgagcaaaggcaccgacagttacggcgtcaccaccggcttcggtgccacatcacaccgccggactaagcagggcggcgctcttcagaaggagcttattaggtttttgaatgccggaatattcggaaacgcgacggaatccaaccacacattgccgcacacggcaacaagagcagcaatgctggttcggatcaacactctcctccaaggctactccggcatcagattcgaaatcttggaagccataaccaaattcctcaaccaaaacgtgactccatgccttcccctccgcggcaccatcaccgcctccggcgatctcgtccccctctcctacatcgccggtctcctcaccggccgccccaactccaaggccgtcgggcccgccggcgagcccctcaccgccgagcaagccttcaagctcgccggcgtcaccggcggcttcttcgacctccagcccaaggaaggcctcgccctcgtgaacggcaccgccgtcggctccggcctcgcctccatcgccctgttcgacgccaacgtcctcgccgtcctctccgtcgtcatgtcccccgtcttcgccgaagtcatgaacggcaagcccgaattcaccgaccatctgacccacaagctgaagcaccaccccggccaaatcgaggccgccgccatcatggagcacattctcgacggcagcggctacgttaaggcggcgcagaagttgcatgagatcgatcctctgcagaagccgaagcaggaccgctacgccctccgcacatcgccgcagtggctcggccctcagatcgaagtcatccgcaccgccaccaagatgatcgagcgggagatcaactccgtcaacgacaacccgttgatcgatgtttctagaaacaaagccatccacggcggaaacttccaaggaacccccattggagtatccatggacaacaccagattagccattgcctccatcgggaagcttctgttcgctcaattctccgagctcgtcaacgacttctacaacaatggactaccttcaaatctctccggcgggaggaaccctagcctcgactacggcttcaagggctccgaaatcgccatggcctcgtactgctccgagctccagttcctcgttaacccggtcaccaaccacgtgcagagcgcggagcagcacaaccaggatgttaactcactagggttaatctcctcgcgcaagacggtggaggctctcgacatccttaaactcatgtcgtcgacctacttggtcgccttatgccaggccgtcgatctgaggcatgtggaggagaacatgaagctcgccgtgaaaaacactgtcagccaagttgccaagcgaactctcacaatgggcgtcaatggcgaactccacccatccagattctgcgagaaggaactcatccgcgttgtcgaccgtgagtacgtgttcacctacattgacgatccctgcctcgcgacctacccgttgatgcagaagctgaggcaggtgctggtcgaccacgctctgaaaaacggagaaagtgagaaaaacgtgagcacgtccattttccacaagatcgaggccttcgaggaggagctgaaggccctgctacccaaggaggtcgagagcgcaaggatcgccctcgagagtgggagtccggctgtggcgaaccggattgaggaatgccggtcgttccccctgtataagttcatcagggaggagctggggaccggtttcttgacgggggagaaggcggtgtcgcccggggaggagtgcgagaaggtgttcgcggcgttgagcaatggcctcattattgatccattgttggaatgccttcaaggatggaatggtgaacctctgcctatctgctag

SEQ ID NO: 133191 - protein, 716 aa, Agastache rugosa
MAANGHHGSNGHNNGANGFCVKQNDPLNWAAAAESLKGSHLEEVKRMVEEFRKPVVKLGGETLTISQVAAIAAKDNAVAVELAESARAGVKASSDWVMDSMSKGTDSYGVTTGFGATSHRRTKQGGALQKELIRFLNAGIFGNATESNHTLPHTATRAAMLVRINTLLQGYSGIRFEILEAITKFLNQNVTPCLPLRGTITASGDLVPLSYIAGLLTGRPNSKAVGPAGEPLTAEQAFKLAGVTGGFFDLQPKEGLALVNGTAVGSGLASIALFDANVLAVLSVVMSPVFAEVMNGKPEFTDHLTHKLKHHPGQIEAAAIMEHILDGSGYVKAAQKLHEIDPLQKPKQDRYALRTSPQWLGPQIEVIRTATKMIEREINSVNDNPLIDVSRNKAIHGGNFQGTPIGVSMDNTRLAIASIGKLLFAQFSELVNDFYNNGLPSNLSGGRNPSLDYGFKGSEIAMASYCSELQFLVNPVTNHVQSAEQHNQDVNSLGLISSRKTVEALDILKLMSSTYLVALCQAVDLRHVEENMKLAVKNTVSQVAKRTLTMGVNGELHPSRFCEKELIRVVDREYVFTYIDDPCLATYPLMQKLRQVLVDHALKNGESEKNVSTSIFHKIEAFEEELKALLPKEVESARIALESGSPAVANRIEECRSFPLYKFIREELGTGFLTGEKAVSPGEECEKVFAALSNGLIIDPLLECLQGWNGEPLPIC

SEQ ID NO: 133192 - DNA, 2136 bp, Ipomoea nil
  CDS (1)..(2136)
atggactcagtgaagctgcagaataatggccaccaaaatggcttctgcgtcaaggttgatcctttgaactgggaggtggctgccgactcattgagggggagccacctggatgaagtgaaagtaatggtggccgagtttaggaagccggcggtgaagctcggcggagagacgctcacggtggctcaggtggcagctatcgcctcccgcgacaatgccgtcacggtggagctctccgaggagtcccgcgccggcgttaaggccagcagtgattgggtgatggatagcatgaacaaagggactgatagctacggcgtcaccaccggcttcggcgccacctctcaccgtagaaccaaacaaggtggcgctcttcagaaggagctcattaggtttttgaatgctggaatattcggcaatggaacagaatcatgtcacactcttccccattcagcaacaagagccgccatgcttgtcagaatcaacacccttcttcaaggatactctggcattagatttgaaatcttggaagcaatcactaaattgctgaaccacaacattaccccctgcctgcccctccgtggcacaatcactgcctccggtgaccttgtcccgttatcctacattgctggcttgatcaccggccgccccaactccaaggccgtcggacccaacggggagaccctcaacgcagaggaagctctgcggttagccggagtgaacggaggatttttcgagttgcagcccaaggaaggacttgccctcgttaatgggaccgccgttggttctggcatggcctctatggttcttttcgaggctaacgttcttgcagtgctgtctgaggttctgtcggctatttttgctgaagtcatgaacgggaaaccagaatttaccgaccatttgacgcataagttgaagcatcaccccgggcagattgaagctgctgctattatggaacatattttggacggcagctcttacgtgaaggcggctcagaagatgcacgaaatggatcctttgcagaaacccaaacaggatcgctatgccctccgcacttcgccgcaatggctcggccctcagattgaagtcattcgtgctgcaaccaaaatgattgagagggagatcaactctgtcaacgacaaccctctcatagatgttgccagaagcaaggccttgcacggtggcaacttccagggtacaccaatcggtgtgtctatggacaactcaagattagcccttgcatctatcggcaagttgttgtttgcccagttctctgagcttgtgaacgactattacaacaatgggttgccttctaatctcacagcagggaggaatccaagcttggattatggtttcaagggcgctgaaatcgccatggcttcttactgctccgagctgcaattcttggctaatccggttactaaccatgtccagagtgctgagcagcacaaccaggatgtgaactccttgggtttgatctcagctaggaagactgctgaagctgtggacgtgttgaaactcatgtcatccacttatctcgtggcgctttgccaagctattgacttgaggttcttggaggagaacttgaggaatgctgtgaagaatgcagttacacaggtagctaagaggactctcactatgggtgctaatggagaacttcatcccgcaaggttttgcgagaaagacttgctccgagtggtggaccgcgaatatgtctttgcatatgccgatgatccctgcagtgctaactacccactgatgcagaaactccgccaagccctggttgatcacgccttgcagaacggggaaagtgagaagaacaccggcacttcaattttcctaaaggttgcagcttttgaagatgaattgaaggctgttctgccaaaagaagttgaggctgcaaggatcgctgtagagagtgggaacccggctattccaaacaggattaaggagtgcaggtcttacccattgtacaagtttgttcgtgaaggcctgggcaccgagttgctgaccggagagaaggtccggtcaccgggcgaagagtgtgacaaggtgttcacagctatgtgtgagggaagtatcatagatcctttgctggaatgtcttaagagctgggatggtgctcctcttcctatctgttaa

SEQ ID NO: 133193 - protein, 711 aa, Ipomoea nil
MDSVKLQNNGHQNGFCVKVDPLNWEVAADSLRGSHLDEVKVMVAEFRKPAVKLGGETLTVAQVAAIASRDNAVTVELSEESRAGVKASSDWVMDSMNKGTDSYGVTTGFGATSHRRTKQGGALQKELIRFLNAGIFGNGTESCHTLPHSATRAAMLVRINTLLQGYSGIRFEILEAITKLLNHNITPCLPLRGTITASGDLVPLSYIAGLITGRPNSKAVGPNGETLNAEEALRLAGVNGGFFELQPKEGLALVNGTAVGSGMASMVLFEANVLAVLSEVLSAIFAEVMNGKPEFTDHLTHKLKHHPGQIEAAAIMEHILDGSSYVKAAQKMHEMDPLQKPKQDRYALRTSPQWLGPQIEVIRAATKMIEREINSVNDNPLIDVARSKALHGGNFQGTPIGVSMDNSRLALASIGKLLFAQFSELVNDYYNNGLPSNLTAGRNPSLDYGFKGAEIAMASYCSELQFLANPVTNHVQSAEQHNQDVNSLGLISARKTAEAVDVLKLMSSTYLVALCQAIDLRFLEENLRNAVKNAVTQVAKRTLTMGANGELHPARFCEKDLLRVVDREYVFAYADDPCSANYPLMQKLRQALVDHALQNGESEKNTGTSIFLKVAAFEDELKAVLPKEVEAARIAVESGNPAIPNRIKECRSYPLYKFVREGLGTELLTGEKVRSPGEECDKVFTAMCEGSIIDPLLECLKSWDGAPLPIC

SEQ ID NO: 133194 - DNA, 2193 bp, Rubus idaeus
  CDS (1)..(2193)
atggagagcataacccagaatggacaccaccaccagaatgggatccaaaacggttcgttggacgacggtctctgcatcaaaacagagtccatcaaaacgggctactctgtttcggacccgcttaactggggagcagccgccgagtcaatgacaggcagccacctcgacgaagttaggcgcatggtggccgagtacaggaaaccggtggtgaagctcggtggagaaaccttgactatttcccaggtggcggccatagccaaccatgactctggtgtcaaggttgaactcgctgagtccgccagggcgggtgtgaaggccagtagtgattgggtcatggattccatgaacaaagggactgatagctatggtgtcaccactgggttcggtgcgacctcccacagacgaaccaaacaaggcgctgcacttcaaaaggagttaattagattcttgaatgctggagtattgcgcaatggaacagagtcagctcacactctgcctcactctgcaacaagagcagccatgctcgtcagaatcaacacactcctccaaggctactccggcataagattcgaaatcttagaagccatctccaaatttctcaaccacaacataactccatgcttgcctcttcgtggcacgatcaccgcctccggagaccttgttccgctgtcctacatcgccggactactaacgggccggcccaattccaaggcggtcgggccaaaaggcgagaccctcaatgccgctgaggcttttgcacaagtcggtatcagctcagggtttttcgagctgcagcctaaagaaggacttgctcttgttaacggcactgctgttggctctggcttggcctccacggttcttttcgagaccaacattttggccttgctgtccgaaatcttgtctgcgattttcgctgaagtgatgcaggggaagcccgaattcacagaccacttgacacataaattgaagcaccacccgggtcaaattgaggctgctgcaattatggaacacattttggatggtagctcttacgtcaaagctgccgagaaacttcatgagcaggaccctcttcagaagcctaaacaagaccgctacgctctccgaacatcaccacaatggctcggtccacaaatcgaagtgatcagattttcgactaaatctattgagagggagattaattctgtcaatgacaaccctttgattgatgtttcgaggaacaaggcattgcatggtggcaacttccagggtaccccaattggagtgtccatggacaacacccgtttggctattgcatccattgggaagctcatgtttgctcagttttctgaacttgtcaatgacttttacaacaacggtttgccatcgaatttatcgggtgggagggaccccagtttggattatggcttcaagggagctgagattgccatggcatcttattgttccgagcttcagtttctagccaatccggtgactaaccatgtccagagcgccgagcagcacaaccaggatgtgaactctttggggctgatttcgtcgcgaaaaaccgcagaagctgttgacatattgaagctcatgtcttccacattcttagttgcgctttgccaagccattgacttgaggcatttggaggagaacttgaagagcacggttaaaaacactgtgagtcaattggctaagagggttttgactactggggttaatggggagcttcacccgtcgaggttctgcgagaaggatttgcttatggttgttgaaagggagtaccttttcgcctacattgacgatccttgcagcgccacatatccattgatgcaaaggctaaggcaagtgcttgttgaacacgctttgacaaacggtgagaatgagaaaaatgcaagcacttctattttccaaaagattacggcttttgaggaggagctgaagaccattttgcctaaggaggttgagagcgctagggctgcgtacgagagcgggaatgctgctattccaaacaggattgtggagtgcaggtcatatcctttgtacaaatttgtgagggaggagttggggggagagttcctgacgggtgaaaaggtcagatcccccggggaggagtgtgacaaagtgttcacagctatgtgccagggcaacattattgatcccattctcgactgcctcagcggttggaacggtgaacctcttccgatctgctag

SEQ ID NO: 133195 - protein, 730 aa, Rubus idaeus
MESITQNGHHHQNGIQNGSLDDGLCIKTESIKTGYSVSDPLNWGAAAESMTGSHLDEVRRMVAEYRKPVVKLGGETLTISQVAAIANHDSGVKVELAESARAGVKASSDWVMDSMNKGTDSYGVTTGFGATSHRRTKQGAALQKELIRFLNAGVLRNGTESAHTLPHSATRAAMLVRINTLLQGYSGIRFEILEAISKFLNHNITPCLPLRGTITASGDLVPLSYIAGLLTGRPNSKAVGPKGETLNAAEAFAQVGISSGFFELQPKEGLALVNGTAVGSGLASTVLFETNILALLSEILSAIFAEVMQGKPEFTDHLTHKLKHHPGQIEAAAIMEHILDGSSYVKAAEKLHEQDPLQKPKQDRYALRTSPQWLGPQIEVIRFSTKSIEREINSVNDNPLIDVSRNKALHGGNFQGTPIGVSMDNTRLAIASIGKLMFAQFSELVNDFYNNGLPSNLSGGRDPSLDYGFKGAEIAMASYCSELQFLANPVTNHVQSAEQHNQDVNSLGLISSRKTAEAVDILKLMSSTFLVALCQAIDLRHLEENLKSTVKNTVSQLAKRVLTTGVNGELHPSRFCEKDLLMVVEREYLFAYIDDPCSATYPLMQRLRQVLVEHALTNGENEKNASTSIFQKITAFEEELKTILPKEVESARAAYESGNAAIPNRIVECRSYPLYKFVREELGGEFLTGEKVRSPGEECDKVFTAMCQGNIIDPILDCLSGWNGEPLPIC

SEQ ID NO: 133196 - DNA, 2151 bp, Catharanthus roseus
  CDS (1)..(2151)
atgaagaatatgggaagtactgagaacggtcacattaataacggtgaagtattggatttttgcttgaaagatccgttgaattggggaatggcagccgattcgttgaaaggaagccatttagatgaagttaaacggatggtggcggagtttaggaagccagtggtgaaactcggcggcgaaaccttaactatatcacaggttgctgctatcgccgctagagattataatgctgttaaggttgagctttcggaggatgctagggctggtgttaaagccagcagcgattgggtgatggagagcatgaataaaggaactgatagttacggcgtcaccaccggttttggtgccacttctcatcggaggactaaacaaggcggtgctcttcagaaggagcttattaggtttctgaatgctggaatctttgggaatggaacagaatcttcccacacactgccacactcagcaacaagggctgcaatgctcgtgagaatcaacaccctgcttcaaggttactccgggatcagatttgagatcctagaagccattaccaaattcctaaaccacaacatcactccttgtttgcctcttcgtggtacgatcactgcctccggtgatcttgtgcccttatcctacattgccggattacttacaggcaggcctaattccaaggctgttggacctaatggagaaattgtaaaccctgaacaagcattcaagatggctggagtaaacgatggactcttcgagctgcagcctaaagaaggacttgctcttgttaatggcacagctgttggttctggcatggcctctatggtccttttcgaagctaatattcttgcagtgctatctgaggtgctttctgcaatttttgctgaagtgatgaatggcaagccggagttcactgaccatttgacgcataagttgaagcatcacccgggacaaattgaagctgcagcaattatggaacacattctggatggaagcggttatgttaaagcagctcataagttacatgaaatggaccctttacagaaaccaaaacaagatcgctatgctcttagaacatcccctcaatggcttggtccacaaattgaagtcattcgttcagccacaaaaatgattgagagggaaatcaattcagtgaatgataaccccttgattgatgtctcaagaaacaaggccttgcatggtggcaacttccagggcaccccaattggagtatccatggacaatgctcgcttggcaatcgcgtccattgggaaactgatgtttgctcaaatatcagagcttgtcaatgatttctacaacaatggcttgccatccaatctatccggaggaagaaacccaagcttggtctacggttttaagggagctgaaattgcaatggcttcatactgttcagaactccagtatttagccaatccggtcaccaatcacgtgcagagtgctgagcaacacaaccaagatgtcaactccttaggtttgatctcttcaagaaagacagccgaagctgttgaaatcttgaagcttatgtccagcacatacctggtggcgctctgccaagcaatagatttgaggcatttggaggagaacttgaaaaatgcagtgaaaaacacagttagccaagttgcaaagagaactctaaccgttggtgtcaatggagaacttcatccatcaagattttgcgagaaggatttgattagagtggtagaccgcgaatatgttttcgcctatgtggatgatccttgcagtggtacctatccattgatggaaaagctaagacaagttattgttgatcatgcattgcaaaatggcgaaagtgagaagaatgtgaatacatccatcttccaaaagattgcagcatttgaagatgaactcaaaactgtcttaccaaaggaagtagaaagtgcaagaacagctctggagaatggaaacccggcaatccctaaccggatcaaggaatgcagatcatatccgttgtataagtttgtgagagaagatgtgggagccgaattcctcacaggagagaaagatagatcaccaggagaagagtttgacaaggtgtttacagcaatgtgcaatgagaagattatagatccactcttggaatgcctcaaggaatggaatggtgctcctcttcctatttgttag

SEQ ID NO: 133197 - protein, 716 aa, Catharanthus roseus
MKNMGSTENGHINNGEVLDFCLKDPLNWGMAADSLKGSHLDEVKRMVAEFRKPVVKLGGETLTISQVAAIAARDYNAVKVELSEDARAGVKASSDWVMESMNKGTDSYGVTTGFGATSHRRTKQGGALQKELIRFLNAGIFGNGTESSHTLPHSATRAAMLVRINTLLQGYSGIRFEILEAITKFLNHNITPCLPLRGTITASGDLVPLSYIAGLLTGRPNSKAVGPNGEIVNPEQAFKMAGVNDGLFELQPKEGLALVNGTAVGSGMASMVLFEANILAVLSEVLSAIFAEVMNGKPEFTDHLTHKLKHHPGQIEAAAIMEHILDGSGYVKAAHKLHEMDPLQKPKQDRYALRTSPQWLGPQIEVIRSATKMIEREINSVNDNPLIDVSRNKALHGGNFQGTPIGVSMDNARLAIASIGKLMFAQISELVNDFYNNGLPSNLSGGRNPSLVYGFKGAEIAMASYCSELQYLANPVTNHVQSAEQHNQDVNSLGLISSRKTAEAVEILKLMSSTYLVALCQAIDLRHLEENLKNAVKNTVSQVAKRTLTVGVNGELHPSRFCEKDLIRVVDREYVFAYVDDPCSGTYPLMEKLRQVIVDHALQNGESEKNVNTSIFQKIAAFEDELKTVLPKEVESARTALENGNPAIPNRIKECRSYPLYKFVREDVGAEFLTGEKDRSPGEEFDKVFTAMCNEKIIDPLLECLKEWNGAPLPIC

SEQ ID NO: 133198 - DNA, 2166 bp, Citrus clementina x Citrus reticulata
  CDS (1)..(2166)
atggacagaggtgctgttattgagaatggtcaccagaacggttgcttggagggtttgtgtaaggacaacaattacagttctggggatgcgttgaactggggagtgatggcggagacgttgaaggggagccatttggaggaagtgaagcgaatggtggcggagtacaggaagccggtggtcaacctcggtggtgagacgttgactgtagcacaagtggctgccattgcgacagctggcgacgtcaacgcccaagtcaaagtggagctctcagaatccgccagggaaggtgtcaaggccagcagtgattgggtgatggacagcatgaataagggcaccgacagctacggcgttaccactggttttggcgccacttctcatcgtcgaacccagaacggcggtgctcttcagaaagagctcattaaatttttgaacgctggaatctttggaaacggaacaaagtcatctcacacgctgcctcactcagcaacaagggcagccatgcttgtgagggtcaacactcttcttcagggctactctggcatccgatttgaaatcctggatgcgattacaaagctgctcaatcacagcatcactccatgcctgcctcttcgcggcacaatcactgcttcaggggatctggttcctctgtcctacattgccggactgctcaccggccggcccaattctaaggccaccgggcctaatggagagatcattgatgctcaggaagcctctaaacaagcgggtttcgggttctttgagttgcagcctaaggagggtctcgctcttgtcaatggcactgctgttggttctggcctggcttctatggttctgttcgacgctaacaaccttgctctgttatcagaaattttgtcagctatttttgctgaagtcatgcaaggaaaacctgaattcactgaccacttgacacacaaactgaagcaccatcctggccaaattgaggctgctgctataatggaacatattctcgacggcagctcttatgtcaaggcggctaagaagttgcatgagattgatcctctgcagaagccgaaacaggatcgttatgctctgagaacttctccacaatggctcggccctcagatcgaagtgattcggtttgcaaccaagtctattgaacgggagatcaactcggtgaatgacaatcccctgatcgacgtttcaaggaacaaggccttacatggtggcaatttccaggggaccccaattggtgtctcaatggacaatacccgtttggctattgcggcaatagggaagctcatgtttgcccaattttccgaacttgtcaacgatttttacaacaatggattgccgtcaaatctttccggtggcaggaatcctagcctggattatggtttcaagggcgctgaaattgctatggcttcctattgttcggagctccaatttctagccaatcctgttactaaccacgtccaaagtgctgaacagcacaaccaagatgtaaactccttgggactgatctcttccaggaagactgctgaagctgtggatatcctgaagctcatgtcttccacattcttggtagcactttgccaagctattgacttgaggcatttggaggagaatttgaagcatacagtgaaggacactgtgagccaagtagctaggaaagtcttaaccgtcggtgccaatggagagcttcatccgtcaagattctgtgagaaggatctgctcaaagcggctgatcgcgaacacgtctttgcatacattgatgacccctgcagcgctacctatccattgatgcaaaagctaaggcaagtacttgttgagcatgcattgaacaatggagagaacgagaagaatgccaactcctcaatcttccagaagattgcagcctttgaggaggaattgaaagccgttttgcccaaagaagttgagaacgccaggcagactgttgagaatggaaatccaacaattcccaacaggatcaaagaatgcaggtcttacccattgtacaggttagtgagggaggagctcgggactaattttctgactggggaaaaagttacatcgcccggcgagaaatttgacaaagtgtttacagcaatgtgccagggcaagatcattgatccaatgctggaatgtctcagggaatggaatggcgcccctcttccaatatgctag

SEQ ID NO: 133199 - protein, 721 aa, Citrus clementina x Citrus reticulata
MDRGAVIENGHQNGCLEGLCKDNNYSSGDALNWGVMAETLKGSHLEEVKRMVAEYRKPVVNLGGETLTVAQVAAIATAGDVNAQVKVELSESAREGVKASSDWVMDSMNKGTDSYGVTTGFGATSHRRTQNGGALQKELIKFLNAGIFGNGTKSSHTLPHSATRAAMLVRVNTLLQGYSGIRFEILDAITKLLNHSITPCLPLRGTITASGDLVPLSYIAGLLTGRPNSKATGPNGEIIDAQEASKQAGFGFFELQPKEGLALVNGTAVGSGLASMVLFDANNLALLSEILSAIFAEVMQGKPEFTDHLTHKLKHHPGQIEAAAIMEHILDGSSYVKAAKKLHEIDPLQKPKQDRYALRTSPQWLGPQIEVIRFATKSIEREINSVNDNPLIDVSRNKALHGGNFQGTPIGVSMDNTRLAIAAIGKLMFAQFSELVNDFYNNGLPSNLSGGRNPSLDYGFKGAEIAMASYCSELQFLANPVTNHVQSAEQHNQDVNSLGLISSRKTAEAVDILKLMSSTFLVALCQAIDLRHLEENLKHTVKDTVSQVARKVLTVGANGELHPSRFCEKDLLKAADREHVFAYIDDPCSATYPLMQKLRQVLVEHALNNGENEKNANSSIFQKIAAFEEELKAVLPKEVENARQTVENGNPTIPNRIKECRSYPLYRLVREELGTNFLTGEKVTSPGEKFDKVFTAMCQGKIIDPMLECLREWNGAPLPIC

SEQ ID NO: 133200 - DNA, 2157 bp, Citrus clementina x Citrus reticulata
  CDS (1)..(2157)
atggagataggtgccactactgagaatggtcaccagaacggtggcctggagggtttgtgcaagaataacaattacaattacagttctggggatgcgttgaactggggagtgatggcggagacgttgaaagggagccatttggaggaagtgaagcgtatggtggcggagtacaggaagccggtggtcaacctcggtggtgagacgttgaccgtagcacaagtggctgccattgccacgtcctctacgaatgtggagctgtcggaatctgccagggaaggcgtcaaggccagcagtgattgggtgatggagagcatgaataagggtaccgacagttacggcgttaccactggctttggtgccacttctcatcggacaaccaagaacggcggtgctcttcaaaaggagctcattaaatttttgaacgctggaatctttggaaacggaacaaagtcatctcacacgctacctcactcagcaacaagggcagccatgcttgtgagggttaacactcttctccagggctactccggcatccgatttgaaatcctgaaagcgatcacaaagctgctcaatcacaacatcactccatgcctccctcttcgcggcacaatcactgcttcaggggatctggttcctctttcctacattgccggactgctcaccggccggcccaattctaaggccaccgggcccaatggacagatcattgatccccaggaagcctctaaaccagcgggtttcgggttctttgagttgcagcctaaggagggtcttgctcttgtcaatggcactgctgttggttctggcctggcttctatggttctgtttgaggctaacaaccttgctctgttatcagaaattttgtcagctatttttgctgaagtcatgcaaggcaaacctgagttcaccgatcacttgacacacaaattgaagcaccatcctggccaaattgaggctgctgctataatggaacatatcctcgatggcagctcttatgttaacgtggctaagaagttgcatgagattgatcctctgcagaagccgaaacaggatcgttatgccctgagaacttcaccacaatggctcggccctcagatcgaaatgattcggtttgcaaccaagtctattgaacgggagatcaactcggtgaatgacaatcccctgatcgacgtttcaaggaacaaggccttacatggtggcaattttcaggggaccccaattggtgtctcaatggacaatacccgtttggctattgcggcaatagggaagctcatgtttgcccaattttctgaacttgtcaacgatttttacaacaatggattgccgtcaaatctgtctggtggcaggaatcccagcctggattatggtttcaagggcgctgaaattgctatggcttcctattgttcggagctccaatttcttgccaatcctgttactaaccacgtccatagtgctgaacagcacaaccaagatgtaaactccttgggattgatctcttccaggaagactgctgaagcagtcgacatcctgaagctcatgtcttccacattcttggtagcgctttgccaggctattgatttgagacatttggaggaaaatttgaagcacacagtcaagaatactgtcagccaagtagctaagaaagtcttaaccgtcggtgctagtggagagcttcatccatcaagattctgtgagaaggatctgctcaaagcggctgatcgcgaacacgtctttgcatacattgatgacccctgcagtgctacctatccattgatgcaaaagctaaggcaagtacttgttgagcacgcactgaacaatggagagaacgagaagactgccaactcttcaatcttccagaagattgcagcctttgaggaggaattgaaaaccgttttgccgaaagaagttgagaatgccaggcagactgttgagaatggaagtccaacaattcccaacaggatcaaagaatgcaggtcttacccgttgtacaggttagtgagggaggggctcgggtctaattttctaacaggggaaaaagttacatcgcccggcgaggaatttgacaaagtttttacagcaatgtgccagggcaagatcattgatccaatgctggaatgtctcagggaatggaatggcgcccctcttccaatttgttag

SEQ ID NO: 133201 - protein, 718 aa, Citrus clementina x Citrus reticulata
MEIGATTENGHQNGGLEGLCKNNNYNYSSGDALNWGVMAETLKGSHLEEVKRMVAEYRKPVVNLGGETLTVAQVAAIATSSTNVELSESAREGVKASSDWVMESMNKGTDSYGVTTGFGATSHRTTKNGGALQKELIKFLNAGIFGNGTKSSHTLPHSATRAAMLVRVNTLLQGYSGIRFEILKAITKLLNHNITPCLPLRGTITASGDLVPLSYIAGLLTGRPNSKATGPNGQIIDPQEASKPAGFGFFELQPKEGLALVNGTAVGSGLASMVLFEANNLALLSEILSAIFAEVMQGKPEFTDHLTHKLKHHPGQIEAAAIMEHILDGSSYVNVAKKLHEIDPLQKPKQDRYALRTSPQWLGPQIEMIRFATKSIEREINSVNDNPLIDVSRNKALHGGNFQGTPIGVSMDNTRLAIAAIGKLMFAQFSELVNDFYNNGLPSNLSGGRNPSLDYGFKGAEIAMASYCSELQFLANPVTNHVHSAEQHNQDVNSLGLISSRKTAEAVDILKLMSSTFLVALCQAIDLRHLEENLKHTVKNTVSQVAKKVLTVGASGELHPSRFCEKDLLKAADREHVFAYIDDPCSATYPLMQKLRQVLVEHALNNGENEKTANSSIFQKIAAFEEELKTVLPKEVENARQTVENGSPTIPNRIKECRSYPLYRLVREGLGSNFLTGEKVTSPGEEFDKVFTAMCQGKIIDPMLECLREWNGAPLPIC

SEQ ID NO: 133202 - DNA, 2127 bp, Daucus carota
  CDS (1)..(2127)
atggattgtgagaacaagaatgttgtgctaggaaacgggctgtgcatgcagaaagatccgttgaactggggaatggctgcggaggccttgacaggaagccatttggatgaagtcaagaggatggtggctgagtttaggaagcctatggtgcagcttggcggggagacactcaccgtctctcaggtggctgctattgctgcagggagtgtcaaggttgagttagccgagtccgcgagggctggtgtcaaggctagtagtgattgggtgatggagagcatgaacaagggaactgatagttatggtgttactactggttttggtgctacttctcataggaggacaaaacaaggtggtgctctgcagaaggaacttattagatttttgaacgctggaatctttggaagtggaaatgattcttcgaacatattaccacattcagcaacaagagcagcaatgctagtgaggatcaacacactcctccaaggttactctggcattcgatttgaaattcttgaggccatcaccaagttcctcaaccaaaacattaccccttgcttgccactccgtggaacgatcactgcttctggtgatcttgtccctttatcctacattgctggacttctaactggccgtcctaattccaaggcggttggacccactggagagaatctgactgctgcagaagcatttaaacttgctggagttgatggtggattctttgagctgcagccaaaagaaggccttgcactagtcaatggcacagctgtcggttctggaatggcttcaatggtactgtttgagaccaatatacttgctgtgttggctgaagttatgtcagctatctttgctgaagtgatgcagggcaaacccgaatttactgaccatttgacacacaagttgaagcatcatcctggacaaattgaagctgcagctataatggaacacatcttggatggaagctcttatgtcaaggctgctgagaagcaacacgaaatggatccattgcaaaaaccaaagcaagatagatatgctcttaggacatctccacaatggcttggaccacagattgaagtgattcgatcatcaacaaaaatgatagaaagggagatcaattctgtcaatgataaccctttgattgatgtgtcaaggaacaaggccatccatggtggtaacttccagggtacgcctattggagtttctatggacaatacaaggttggctattgcagcaattggaaagctcatgtttgcccaattttcggagcttgtgaatgacttttataacaatgggctgccatctaatctctctggagggcgtaatccaagtttggattatggtttcaagggtgctgaaattgctatggcttcttactgctctgagctacaatttttgggcaatccagttaccaaccatgttcaaagcgctgagcaacacaatcaagatgtgaactcactaggtttgatctcctcaaggaaaacagcagaagctgttgaaatcttgaagctcatgtctaccacatttttggtaggcctctgccaagctgtagacctgaggcacttggaggagaacttgaagagcactgtcaagaacactgtaagtcaagtagccaagaaagttctaactatgggtgtcaatggtgagcttcatccttcaagattctgtgagttggatttgcttagagttgttgacagggagtacattttcgcatacattgacgacccctgcagtgcaacctacccactgatgcaaaagctaagacaggtactagttgaacatgcattgaaaaatggcgaaactgagaagaacttgagcacctcaatcttccaaaagattgcagcttttgaagatgaattgaaggcccttttacccaaggaggttgaaagtgcaagggctgtggtagagagtggaaatcctgctattccaaacaggatcaaagaatgcaggtcttatccactgtacaagtttatcagggaagagctgggaacagtttatttaactggcgagaaagtgacatcgcctggagaagagtttgacaaggtgttcaccgcaatgtccaaaggagagatcattgatccattgttggcgtgtcttgagagctggaatggtgctcctcttccaattgcttag

SEQ ID NO: 133203 - protein, 708 aa, Daucus carota
MDCENKNVVLGNGLCMQKDPLNWGMAAEALTGSHLDEVKRMVAEFRKPMVQLGGETLTVSQVAAIAAGSVKVELAESARAGVKASSDWVMESMNKGTDSYGVTTGFGATSHRRTKQGGALQKELIRFLNAGIFGSGNDSSNILPHSATRAAMLVRINTLLQGYSGIRFEILEAITKFLNQNITPCLPLRGTITASGDLVPLSYIAGLLTGRPNSKAVGPTGENLTAAEAFKLAGVDGGFFELQPKEGLALVNGTAVGSGMASMVLFETNILAVLAEVMSAIFAEVMQGKPEFTDHLTHKLKHHPGQIEAAAIMEHILDGSSYVKAAEKQHEMDPLQKPKQDRYALRTSPQWLGPQIEVIRSSTKMIEREINSVNDNPLIDVSRNKAIHGGNFQGTPIGVSMDNTRLAIAAIGKLMFAQFSELVNDFYNNGLPSNLSGGRNPSLDYGFKGAEIAMASYCSELQFLGNPVTNHVQSAEQHNQDVNSLGLISSRKTAEAVEILKLMSTTFLVGLCQAVDLRHLEENLKSTVKNTVSQVAKKVLTMGVNGELHPSRFCELDLLRVVDREYIFAYIDDPCSATYPLMQKLRQVLVEHALKNGETEKNLSTSIFQKIAAFEDELKALLPKEVESARAVVESGNPAIPNRIKECRSYPLYKFIREELGTVYLTGEKVTSPGEEFDKVFTAMSKGEIIDPLLACLESWNGAPLPIA

SEQ ID NO: 133204 - DNA, 2124 bp, Ipomoea batatas
  CDS (1)..(2124)
atggccaaccaaaatggcttctgtatcaagaagcagcaggttgatcctttgaactgggagatggctgccgagtcattgagggggagccacttggatgaagtgaaacgcatggtggccgagtttaggaagccggcggtgaagctcggcggagagacgctcacggtggctcaagtggcacgtatcgcctcccgtgacaatgccgtcgcggtggagctctccgaggaggcccgggccggcgttaaggccagcagtgattgggtgatggatagcatgaacaaagggactgatagctacggcgtcaccaccggcttcggtgccacctctcaccgtagaaccaaacaaggtggcgctcttcagaaggagctcattaggtttttgaatgctggaatattcggcaatgcaacagaatcgtgtcacactcttccccattcagcaacaagagctgccatgcttgtgagaatcaacactcttcttcaaggatactctggcattagatttgaaatcttggaagcaatcactaaattgctgaaccacaacattaccccctgcctgcccctccgtggcaccatcaccgcctccggtgaccttgtcccgttatcctacattgctggcttgatcaccggccgccctaactccaaggccgtcggacccaacggggagaccctcaacgcagaggaagctctgcggttaagccggagtggacggaggatttttcgagttgcaagcccaaggaagggcttgccctcgttaatggcaccgccgttggttctaggcatggcctctatggttcttttcgaggctaatgttcttgcagttctgtctgaggttttatccgctatttttgctgaagtcatgaatgggaaaccagaatttaccgaccatttgacgcataagttgaagcatcaccccggccagattgaagctgctgctattatggaacatattttggacggcagctcttacgtgaaggcggctcagaagttgcacgaaatggatcctctgcagaaacccaaacaggatcgctatgctctccgcacttcgccccaatggctcggccctcagattgaagtcattcgtgctgcaaccaaaatgattgagagggagatcaactctgtcaacgacaaccctctcattgatgttgccagaagcaaggccttgcacggtggcaacttccagggtacaccaattggtgtgtctatggacaactcaagattagcccttgcatctatcggcaagttgttgtttgcccaattctctgagcttgtcaatgactattacaacaatgggttgccttctaatctcacagcagggaggaatccaagcttggattatggtttcaagggcgctgaaattgccatggcttcttactgctccgagctgcaatttttggctaatccggttactaaccatgtccagagtgctgagcagcacaaccaggatgttaactccttgggtttgatctcagctaggaagactgctgaagctgtggacgtgttgaaactcatgtcatccacatatctcgttgcgctttgccaagctattgacttgaggttcttggaggagaacttgaggaatgctgtgaagaatgcagttacacaggtagctaagaggactctcactgtgggtgctaatggagaacttcatcccgcaaggttttgcgagaaagacttgctccgagtggtggaccgcgaatatgtcttcgcatatgcggatgatccctgcagtgctaactacccgctgatgcagaaactccgccaagcccttgttgatcacgccttgcagaatggggagaatgagaagaacaccggcacttcaattttcctaaaggttgcagcttttgaagatgaattgaaagctgttctgccaaaagaagttgaggctgcaaggatcgctgtagagagtgggaacccggctattccaaacaggattaaggagtgcaggtcttacccattgtacaagtttgttcgtgaaggcctgggcactgagttgctgaccggagagaaggtccggtcaccgggcgaagagtgtgacaaggtgttcacagctatgtgtgagggaagtatcattgatcctttgttggaatgccttaagagctgggatggggctcctcttcctatctgttaa

SEQ ID NO: 133205 - protein, 707 aa, Ipomoea batatas
MANQNGFCIKKQQVDPLNWEMAAESLRGSHLDEVKRMVAEFRKPAVKLGGETLTVAQVARIASRDNAVAVELSEEARAGVKASSDWVMDSMNKGTDSYGVTTGFGATSHRRTKQGGALQKELIRFLNAGIFGNATESCHTLPHSATRAAMLVRINTLLQGYSGIRFEILEAITKLLNHNITPCLPLRGTITASGDLVPLSYIAGLITGRPNSKAVGPNGETLNAEEALRLSRSGRRIFRVASPRKGLPSLMAPPLVLGMASMVLFEANVLAVLSEVLSAIFAEVMNGKPEFTDHLTHKLKHHPGQIEAAAIMEHILDGSSYVKAAQKLHEMDPLQKPKQDRYALRTSPQWLGPQIEVIRAATKMIEREINSVNDNPLIDVARSKALHGGNFQGTPIGVSMDNSRLALASIGKLLFAQFSELVNDYYNNGLPSNLTAGRNPSLDYGFKGAEIAMASYCSELQFLANPVTNHVQSAEQHNQDVNSLGLISARKTAEAVDVLKLMSSTYLVALCQAIDLRFLEENLRNAVKNAVTQVAKRTLTVGANGELHPARFCEKDLLRVVDREYVFAYADDPCSANYPLMQKLRQALVDHALQNGENEKNTGTSIFLKVAAFEDELKAVLPKEVEAARIAVESGNPAIPNRIKECRSYPLYKFVREGLGTELLTGEKVRSPGEECDKVFTAMCEGSIIDPLLECLKSWDGAPLPIC

SEQ ID NO: 133206 - DNA, 2133 bp, Lithospermum erythrorhizon
  CDS (1)..(2133)
atggaaaccatagtggaaaatggaaatggaaaaactatggagttttgcatgaaagatccattgaactgggaaatggcatctgagtcaatgaaggggagccaccttgatgaagtgaaaaacatggtggctgagttcaggaaaccggtggtgcaacttgccggtaagactttgactatcggtcaggtggcggcgattgctgcccgtgacgacggagtcacggtggagctagcggaagctgcccgggaaggtgttaaggctagtagtgattgggttatggatagtatgaataagggcacggatagttatggtgtaaccactggcttcggtgccacttcacataggaggactaaacaagggggtgcccttcaaaaggaacttattagattcttgaatgctggaatatttggcaatggaacagaaactagccacacattaccacactcagcaacaagagcagccatgcttgttaggatcaatactttgcttcaaggttattcaggcatcaggtttgagatcctggaagctatcaccaagttcctcaacaccaacatcactccatgcctaccccttcgtggcacgatcaccgcctctggtgacctcgtccccctctcatacattgccggactacttactggccgtcccaattccaaggccgttggacctaccggggagaagatcaatgcggaggaagcttttcgtctagctgggatcagtaccgggttcttcgagttgcagcctaaggaaggacttgcccttgttaatggaacagctgttggttctggaatggcttcaatggttctttatgaagccaacattttggctgtcttgtctgaagtgatctcggctattttcgctgaggtgatgaatggaaagcctgaattcaccgaccatttgacacacaaactgaaacaccatccaggacagattgaggctgctgctatcatggagcacattttggatggtagtggatatgttaaggctgctcagaagttacatgagatggatcctctgcagaagcctaagcaagatcgttatgccctccgtacatcgcctcaatggcttggtcctcagatcgaagtgatccgttctgctaccaagatgattgagagggaaatcaactctgttaacgacaacccattgatcgatgtttcgaggaacaaggccttacatggaggaaacttccagggcacacctattggtgtggccatggacaacactcgccttgccatcgcctcaattggaaagcttctatttgctcaattttctgaattggttaatgattactacaacaatgggttgccatcaaatttgacaggcagcagaaatccaagcttggattatggttttaagggagctgaaatcgccatggcttcgtactgctcagaactccagttcttggctaatccagtcaccaaccatgtccagagtgctgaacaacacaaccaagatgtcaactctttgggcttaatctcttcaagaaagacatccgaggctgtcgaaatcctgaagctcatgtcttcatcatttttggttgcactcttccaagctgttgatttgaggcatattgaggagaatgtgagactcgcagtcaagaacacggttagtcaggttgccaagcggacattaaccacaggcgttaatggcgagctccacccatcaagattcagcgaaaaggacttgcttcgcgtggttgatcgcgagtatgtctttgcctacgcagacgacccttgcctcaccacctaccccttgatgcagaagctaagagaaactctcgttggacacgccttagacaatggcgagaatgagaaggatgtgaacacttcaatcttccataaaatagccattttcgaagaagaattgaaggccattctccctaaagaggtggagaatgcacgcgcctcggtcgaaaatggcattccagcaatctccaacaggattgaggaatgtaggtcatatccattgtacaagtttgtgagggaagaattggggactgaattgttgactggtgagaaggttagatcaccaggtgaggaattggacaaagtattcactgcaatgtgtgaaggcaagcttgttgatccacttctggcttgtttggaggcttggaatggtgctcctcttccaatctgttaa

SEQ ID NO: 133207 - protein, 710 aa, Lithospermum erythrorhizon
METIVENGNGKTMEFCMKDPLNWEMASESMKGSHLDEVKNMVAEFRKPVVQLAGKTLTIGQVAAIAARDDGVTVELAEAAREGVKASSDWVMDSMNKGTDSYGVTTGFGATSHRRTKQGGALQKELIRFLNAGIFGNGTETSHTLPHSATRAAMLVRINTLLQGYSGIRFEILEAITKFLNTNITPCLPLRGTITASGDLVPLSYIAGLLTGRPNSKAVGPTGEKINAEEAFRLAGISTGFFELQPKEGLALVNGTAVGSGMASMVLYEANILAVLSEVISAIFAEVMNGKPEFTDHLTHKLKHHPGQIEAAAIMEHILDGSGYVKAAQKLHEMDPLQKPKQDRYALRTSPQWLGPQIEVIRSATKMIEREINSVNDNPLIDVSRNKALHGGNFQGTPIGVAMDNTRLAIASIGKLLFAQFSELVNDYYNNGLPSNLTGSRNPSLDYGFKGAEIAMASYCSELQFLANPVTNHVQSAEQHNQDVNSLGLISSRKTSEAVEILKLMSSSFLVALFQAVDLRHIEENVRLAVKNTVSQVAKRTLTTGVNGELHPSRFSEKDLLRVVDREYVFAYADDPCLTTYPLMQKLRETLVGHALDNGENEKDVNTSIFHKIAIFEEELKAILPKEVENARASVENGIPAISNRIEECRSYPLYKFVREELGTELLTGEKVRSPGEELDKVFTAMCEGKLVDPLLACLEAWNGAPLPIC

SEQ ID NO: 133208 - DNA, 2172 bp, Pisum sativum
  CDS (1)..(2172)
atggaaacagtagcagcagccataacaaaaaacaacggttacgagtcattttgcgtgacaaatgctaagaataataacatgaaagttaacagtgctgatcctttgaattggggtgttgccgccgaggcaatgaaagggagtcacttggatgaggtgaagcgtatggtggaggagtacaggaagccggtggtccgccttggtggcgagacactgacgatttctcaggtggctgccattgccgcacatgatcatggtgttaaggtggagttgtcagaatctgctagggctggcgttaaggcgagcagtgactgggtgatggagagtatgaacaaaggcacagacagttacggtgttactaccggtttcggcgccacctctcaccggagaaccaaacaaggtggtgctttgcagaaagaactcatcaggtttttgaatgctggaatatttggaaatggaactgagtcaagccatacactaccacacacagcaacaagagctgccatgcttgtgagaatcaacacacttctccaaggttattcaggaattagatttgaaatcttggaagctataaccaaactcattaacaacaacgtcaccccatgtttactccgtggtacaatcacagcttccggagatttagtccctctttcttatattgctggtttactaacgggaagaccaaattcaaaagctcatgggacctctggggaaattcttaatgcaaaagaagcttttcagtcagctgaaatcaatgatggtttctttgaattgcaaccaaaagaaggtcttgcacttgttaatggaactgctgttggttctggtttagcttctattgttctatttgaagctaacatattggctgtcttgtctgaagtcctatccgctatttttgctgaagttatgcaagggaaacctgagtttactgatcatttgacacataaattgaagcaccatcctggtcaaattgaggctgctgctattatggaacacattttggatggaagtgcttatgtcaaagcagctaagaagttgcatgagatggatcctttgcagaaaccaaaacaagatagatatgcacttagaacttcaccgcaatggcttggtcctcttattgaagtcattagattctctactaagtcaattgagagggagatcaactctgttaatgataaccctttgattgatgtttcaagaaacaaggctttgcatggtggaaactttcaaggaacacctattggtgtatccatggataatacacgtttggctcttgcgtcaattggtaaactcttgtttgctcaattctctgaactcgtcaatgatttttacaacaacgggttgccttcgaatctctcagctagtagaaatcccagcttggattatggattcaagggatccgaaattgccatggcttcttattgttctgagttacaatatcttgcaaacccagttacaactcatgttcaaagtgctgagcaacacaaccaagatgtgaactctttgggtttgatatcttctaggaaaacatatgaagccattgagatccttcaactcatgtcttccacattcttgattgcactttgccaagcagttgacttaagacatttggaggagaatttgaaaaactcagttaagaacattgtaagccaagttgctaaaaggacccttacaacaggtgtgaatggagaacttcatccttcaaggttttgtgaaaaggacttgttgagagtggttgatagggagcatgtgtttgcctatattgatgatccttgtagtgctacatatccattgatgcaaaaattgaggcaggtgttagtggatcatgcattagtaaatggtgaatctgagaagaatttgaacacatcaatcttccaaaagattgcaacatttgaggatgagttaaagacccttttgccaaaagaggtagaaagtactagggctgcatatgagagtggaaatccaacagttccaaacaagataaatggatgcagatcttatccactttataggtttgtgagacaagagttgggaactggtttgctaacaggagaaaaggtcatttcaccaggtgaggagtgtgataagttgttcacagctatatgtcaaggaaagatcatcgatcctcttcttcaatgcttgggagactggaacggtgctcctcttccaatttcttaa

SEQ ID NO: 133209 - protein, 723 aa, Pisum sativum
METVAAAITKNNGYESFCVTNAKNNNMKVNSADPLNWGVAAEAMKGSHLDEVKRMVEEYRKPVVRLGGETLTISQVAAIAAHDHGVKVELSESARAGVKASSDWVMESMNKGTDSYGVTTGFGATSHRRTKQGGALQKELIRFLNAGIFGNGTESSHTLPHTATRAAMLVRINTLLQGYSGIRFEILEAITKLINNNVTPCLLRGTITASGDLVPLSYIAGLLTGRPNSKAHGTSGEILNAKEAFQSAEINDGFFELQPKEGLALVNGTAVGSGLASIVLFEANILAVLSEVLSAIFAEVMQGKPEFTDHLTHKLKHHPGQIEAAAIMEHILDGSAYVKAAKKLHEMDPLQKPKQDRYALRTSPQWLGPLIEVIRFSTKSIEREINSVNDNPLIDVSRNKALHGGNFQGTPIGVSMDNTRLALASIGKLLFAQFSELVNDFYNNGLPSNLSASRNPSLDYGFKGSEIAMASYCSELQYLANPVTTHVQSAEQHNQDVNSLGLISSRKTYEAIEILQLMSSTFLIALCQAVDLRHLEENLKNSVKNIVSQVAKRTLTTGVNGELHPSRFCEKDLLRVVDREHVFAYIDDPCSATYPLMQKLRQVLVDHALVNGESEKNLNTSIFQKIATFEDELKTLLPKEVESTRAAYESGNPTVPNKINGCRSYPLYRFVRQELGTGLLTGEKVISPGEECDKLFTAICQGKIIDPLLQCLGDWNGAPLPIS

SEQ ID NO: 133210 - DNA, 2151 bp, Petroselinum crispum
  CDS (1)..(2151)
atggagaacggtaacggtgcaactacaaatggacatgtaaacgggaacggaatggatttttgcatgaagaccgaagatccgttgtactggggaatcgcggcggaggcaatgacagggagtcatttggatgaagtgaagaagatggtggctgagtataggaagccggttgtgaagttaggaggagaaacattaactatttctcaagtggcagctatttcggctagggatggtagtggtgtcacggtggagctttccgaggcggcgagagctggcgttaaggctagtagtgattgggtgatggatagtatgaacaaagggacggatagttatggtgtaactactggttttggtgctacttctcataggaggactaagcaaggtggtgctcttcagaaagagctcattaggttcttgaatgctggaatatttggtaatggatcagataacacattaccacactcagcaacaagagctgcaatgttagtgaggatcaacactctgctccagggatactctggaatccgattcgaaattctcgaagcgattactaagtttctaaaccagaacattactccttgtttgccactccggggtacaatcactgcttctggtgatcttgtgccattgtcttacattgctggacttctcactggccgtccgaattctaaggctgttggaccaactggagtaattcttagccccgaagaagcgtttaaacttgctggagtggaaggaggatttttcgagttgcagcctaaagaaggccttgcacttgttaatggaacagctgttggttctggtatggcctctatggtactttttgaggctaatatattagctgttttggctgaagttatgtcagcgattttcgctgaagtgatgcaaggaaagcctgagttcactgaccatttgacgcataagttgaagcaccatccgggccaaattgaggctgcagctataatggaacacattttggatggaagcgcttatgttaaggctgctcagaagcttcatgaaatggatccattacagaagccgaaacaggacagatacgctcttagaacatctcctcagtggcttggtcctcagattgaagtgatccgatcatcgaccaagatgattgaaagagagattaactctgtcaatgataacccattgattgatgtttcaaggaacaaggctattcacggtggcaatttccagggcacacctattggagtgtcgatggacaatacacgtttggctattgcagcgataggaaagctcatgtttgctcaattttctgaacttgtaaacgatttttacaacaacgggttgccatcaaatttgtctggagggcgtaatccaagtttggattatggattcaagggtgctgaaattgcaatggcttcttactgctctgaacttcagtttttagctaatccagtgaccaaccatgttcaaagtgctgaacagcacaatcaagatgtgaactccttgggcttaatctcttcaaggaaaacatcagaagctgttgaaatcttgaaactcatgtctactacatttttagtaggcctctgccaagcaatagacttgaggcatttggaggagaatttaaaaagcactgtcaaaaacacagtaagctcagtagctaagcgagtgctaaccatgggtgtcaacggggaactccatccctcaagattctgtgagaaggatttactcagagttgtggaccgcgaatatatttttgcatatattgatgatccctgcagcgcaacctacccattgatgcaaaaattaagacaaacactagttgagcatgcattgaagaatggtgacaacgagagaaacttgagcacttccatcttccaaaagattgcgacctttgaggatgaactaaaggccctattgcctaaagaagttgaaagtgctagagctgcactcgaaagtggaaatccagcaatcccaaacaggatcgaggagtgcaggtcttacccattgtacaagtttgtgaggaaagagttgggaactgagtatcttacaggagaaaaagtaacgtcacctggagaagagttcgagaaggtatttatagcaatgagcaaaggagagatcattgatccattgttagagtgcctggagtcatggaatggtgctcctcttccaatctgttaa

SEQ ID NO: 133211 - protein, 716 aa, Petroselinum crispum
MENGNGATTNGHVNGNGMDFCMKTEDPLYWGIAAEAMTGSHLDEVKKMVAEYRKPVVKLGGETLTISQVAAISARDGSGVTVELSEAARAGVKASSDWVMDSMNKGTDSYGVTTGFGATSHRRTKQGGALQKELIRFLNAGIFGNGSDNTLPHSATRAAMLVRINTLLQGYSGIRFEILEAITKFLNQNITPCLPLRGTITASGDLVPLSYIAGLLTGRPNSKAVGPTGVILSPEEAFKLAGVEGGFFELQPKEGLALVNGTAVGSGMASMVLFEANILAVLAEVMSAIFAEVMQGKPEFTDHLTHKLKHHPGQIEAAAIMEHILDGSAYVKAAQKLHEMDPLQKPKQDRYALRTSPQWLGPQIEVIRSSTKMIEREINSVNDNPLIDVSRNKAIHGGNFQGTPIGVSMDNTRLAIAAIGKLMFAQFSELVNDFYNNGLPSNLSGGRNPSLDYGFKGAEIAMASYCSELQFLANPVTNHVQSAEQHNQDVNSLGLISSRKTSEAVEILKLMSTTFLVGLCQAIDLRHLEENLKSTVKNTVSSVAKRVLTMGVNGELHPSRFCEKDLLRVVDREYIFAYIDDPCSATYPLMQKLRQTLVEHALKNGDNERNLSTSIFQKIATFEDELKALLPKEVESARAALESGNPAIPNRIEECRSYPLYKFVRKELGTEYLTGEKVTSPGEEFEKVFIAMSKGEIIDPLLECLESWNGAPLPIC

SEQ ID NO: 133212 - DNA, 2049 bp, Populus kitakamiensis
  CDS (1)..(2049)
atggcggcagactcactaaaaggaagccacctagatgaggtcaagcgcatgatcgaggagtacaggaaccctgtggtcaagttaggaggtgagaccctgaccataggccaggtaactgcaattgctagcggtcacgtcggtgtcatggtggagctgtcagaggaggctcgagctggtgtcaaagccagcaatgactgggtcatggacagcaagaacagtcatgctgttactgctggttttggtgcaacctcacatagaaaaaccaagcaaggcggagagcttcaaaaggagcttataaggttcttgaatgttggtatcttcggcaatggcacggagtccaaccatatattgcctcgctcagcaaccagggcagctatgttggtcagaaccaacaccctgcttcaaggttattcaggcataagatttgagatgcttgaagccatcaccaagctgctcaaccacaacatcaccccatgtttaccactcagaggaacaatcactgcctctggtgaccttgttccattggcctacattgctgggctcttgacaggcaggcataattcaaaggcagttggacccaatggagagcccctgacctcgactgaagcatttacacaagctgggattaatggcggcttttttgagttgcagccgaaggagggtctagcactagtgaatggtactgcagtgggttctggtctagcttcaatggtgctttttgaggctaatgtgttggcaatcctatcagaagttttgtcagcaatctttgctgaagttatgcaaggaaaacctgagtttactgatcacctgacacataagttaaagcatcatcctggccaaattgaagctgccgccatcatggaacatattttagatggcagcgcctatgttaaagaagctcagaagttacttgagatcgatcctctacagaaacctaaacaagaccgatatgctcttcgaacatctccacaatggctaggccctctgatcgaagtgattagaacatcaacgaaaatgatcgaacgagaaatcaactctgtcaatgacaatcctttgattgacgtgtcgaggagtaaggctctacaaggagggaatttccaggggacccctattggtgtttcaatggacaacactcgtttggccattgcatcaattggcaaactcatgtttgcacaattctctgaacttgttaacgacttctacaacaatggattgccttcaaacctcactggtggccgcaatccaagcttggattacgggttcaaaggtgccgaaattgccatggcatcttactgctcggagctccaattccttgccaatcctgtcaccaatcatgtccagagtgctgagcaacacaaccaagatgtcaactccctaggcttgatttcttcaagaaaaacagctgaagctgttgacatattgaagctaatgtccaccactttcttggttggtctatgccaggccgttgacttgaggcacatagaggagaacctgaagaacacagtcaagaacactgttagccaagttgccaagagagtcttgacaatgggcttcaatggcgagcttcacccttcaagattatgtgaaaaagacttgctcaagcttgttgacaaagaacatgtctttgcctacattgacgatccttgtagtgcaacctatccattaatgcaaaagttaaggcaagtactagttgagcatgccttggtgaatggcgaaagggaaacaaattcaaccacctcgattttccaaaagatcagatcttttgaggaagaactcaagacccttttgcctaaagaagttgagagtgctagacttgaagttgagaatggaaatccagttgttccaaacaggatcaaggaatgcaggtcataccccctgtataagtttgtgagggaagaattgggaactagtttgctaacaggtgagaaggttaaatcgcctggcgaggatttcgacaaggttttcacagctatctgtgcagggaagttgatggatcccttgctggaatgcttgaaggaatggaatggtgctcctcttcctatttgctaa

SEQ ID NO: 133213 - protein, 682 aa, Populus kitakamiensis [sequence omitted]

SEQ ID NO: 133214 - DNA, 2154 bp, Prunus avium
  CDS (1)..(2154)
atggcaaccaactccatcaagcaaaatggtcacaaaaacggatcggtagagttacctgagctctgcataaagaaggaccctttgaactggggtgtggcagcagagacactaaaagggagccacttggatgaggtgaagcgcatggtggctgagtacaggaagccggtggtgaagctcggtggagagagcctgaccatttcccaagtggcggccatagccactcatgactctggggtcaaggttgagctctctgagtcagcccgggccggggtcaaggccagcagcgactgggtcatggacagcatgagcaaagggactgacagctatggtgtcaccaccgggtttggtgctacctcccacagaagaacaaagcaaggggctgcccttcagaaggagctcattagattcttgaacgctggagtgtttgggagcacgaaagagtcgggccacactttgcctcaccaggcaacaagagcagccatgttggttaggatcaacacactcctccagggctactctggcataagatttgagatcttggaagtcatcaccaagttcctcaacaacaatgtcactccatgcttgcccctacgcggcacgatcacagcctccggtgaccttgtcccgctgtcctacatcgccgggatgctaactggcaggcctaattccaaggctgttggaccagatggccagaccctcagtgctgcagaggcctttgagtttgttggtatcaattccgggttctttgagttgcagcctaaagaaggcctggctcttgttaatggcactgctgttggttctggcttggcttccacggttcttttcgacactaacattttggcattgctgtcagaaattctatcagcaatttttgctgaagttatgcaggggaagcctgaatttactgaccacttgacgcataagttgaagcaccaccctggccaaattgaagctgcagcaattatggaacatattttggatggtagctcttatgttaaagctgctaagaagttgcacgagcaggaccctctgcagaagccaaaacaggatcgatatgctctccgaacttcacctcaatggctcggtccacagatcgaagtgatccggtactccaccaaatccattgagagggagatcgactcagtcaatgacaaccctttgattgatgtgtcaaggaacaaggccttgcatggtggcaacttccaggggaccccaattggtgtctctatggacaatactcgtttggctattgcatccattgggaagctcatgtttgctcaattttctgagcttgtcaatgacttttacaacaacggattgccatcaaatctgtctggaggcaggaacccaagtttggattatggcttcaagggggctgagattgccatggcatcttattgttctgagcttcagtttctcgcgaacccggtcactaaccatgtccagagtgcagagcagcacaaccaagacgtgaactctttggggttgatctcttcaagaaagacagctgaagctgttgatatcttgaagctcatgtcttccacatttttggtggcactttgccaagcaattgatttgaggcatttggaggagaacttgaggaacacagttaagaacacagtgagccaagtggctaagagaactttgacaactggggttaatggagagctccacccatcaagattctgtgagaaggatttgcttaaagtggtcgatagggaatatgttttcgcctacatcgacgacccctgcagtgccacttacccattgatgcaaaaactaaggcaagtgctggttgagcatgctttgacaaatggtgagaatgagaagaatgcaagcacttcaatcttccaaaagattgttgcttttgaggaagagctgaaggtgcttttgcctaaagaggtggatagtgcaagggctgcattggacagtggaagtgctggagttccaaacaggattacggaatgcaggtcttaccccttgtacaaatttgtgagggaggagttgggtgcagagtacctaacaggggaaaaggtcaggtcaccgggcgaagaatgcgacaaggtgttcacagctatctgcgagggaaagattatcgacccgattctggattgcctcgagggctggaacggtgcaccacttccgatctgttag

SEQ ID NO: 133215 - protein, 717 aa, Prunus avium
MATNSIKQNGHKNGSVELPELCIKKDPLNWGVAAETLKGSHLDEVKRMVAEYRKPVVKLGGESLTISQVAAIATHDSGVKVELSESARAGVKASSDWVMDSMSKGTDSYGVTTGFGATSHRRTKQGAALQKELIRFLNAGVFGSTKESGHTLPHQATRAAMLVRINTLLQGYSGIRFEILEVITKFLNNNVTPCLPLRGTITASGDLVPLSYIAGMLTGRPNSKAVGPDGQTLSAAEAFEFVGINSGFFELQPKEGLALVNGTAVGSGLASTVLFDTNILALLSEILSAIFAEVMQGKPEFTDHLTHKLKHHPGQIEAAAIMEHILDGSSYVKAAKKLHEQDPLQKPKQDRYALRTSPQWLGPQIEVIRYSTKSIEREIDSVNDNPLIDVSRNKALHGGNFQGTPIGVSMDNTRLAIASIGKLMFAQFSELVNDFYNNGLPSNLSGGRNPSLDYGFKGAEIAMASYCSELQFLANPVTNHVQSAEQHNQDVNSLGLISSRKTAEAVDILKLMSSTFLVALCQAIDLRHLEENLRNTVKNTVSQVAKRTLTTGVNGELHPSRFCEKDLLKVVDREYVFAYIDDPCSATYPLMQKLRQVLVEHALTNGENEKNASTSIFQKIVAFEEELKVLLPKEVDSARAALDSGSAGVPNRITECRSYPLYKFVREELGAEYLTGEKVRSPGEECDKVFTAICEGKIIDPILDCLEGWNGAPLPIC

SEQ ID NO: 133216 - DNA, 2133 bp, Rubus idaeus
  CDS (1)..(2133)
atggagttctataaaaacggcaacggggcagttgagtcattttgcgaagggcacgaccctctgaactggaacatggccgcggagtcgctcaaggggagccacgtggacgagctgaagaggatggtcagtgattaccggaagccggtggtcaagctgggaggtgagaccctcacgatagggcaggtggcggcaattgcgagccacgacggaggggtgcgcgtggagctgtccgaggagaagcgggctggggtgaaggccagcagtgactgggtcatggattcaatggggaagggtacagacagctacggtgtcaccaccggcttcggtgcaacctcgcacaggaggaccaaaaacggaggagctcttcagagagaactgattagattcttgaatgccggaatctttggcagcagcctagactctacccacaaattgccgcacaccgccacgagagcagcgatgctagtgaggttcaacacccttctccaaggctactccggcatcaggttcgaaatcctggaagccataaccaaattcctcaacggcaacattaccccatgccttcctcttcggggtaccatcactgcgtccggggacttggtccccctctcctacattgcggggcttttaataggcaggcccaattcaaagtccgtggggcccaagggagagaccctaagcccagctgagggctttaagctagctgggattgatggtggtttctttgagttgcaacccaaggaaggccttgctttggtcaatggcactgccgttgggtctggtatggcctctatggtgctgtttgatgccaacactctagctgttctgtccgaagtcatgtcagcaattttcgccgaagttatgcaaggaaagccggagtttacagaccacttgacccacaaactgaagcaccaccctggccagattgaagcagcagccataatggaacatattcttgaaggaagctcttacgtgaaagaagcgaaaaaggttcatgaaatggaccctcttcaaaagcctaagcaagaccgatatgctctaagaacctccccacaatggctaggtccacagatcgaagtgatcagggcagcaaccaaaatgattgagagggagatcaactctgtcaacgacaacccattgatcgatgtctccaggaacaaggcgttacatggtggaaattttcaggaactcccaattggtgttgccatggataacaccagacttgccattgcctcaattgggaagctcatctttgcccaattctctgagcttgtcaacgactactacaacaatggcttgccttcaatcctcacaggtagcagcaacccgagtttggactacgggttcaaaggtgctgaaatcgcaatggcatcttactgctcagagcttcagttccttgcgaaccctgtgaccaaccatgtgcaaagtgctgagcaacacaaccaagatgttaactccttgggattgatctcctctaggaagacatcagaggctgtcgacattttgaagctgatgtcatccacattcctagttgcactgtgccaagctattgatctgaggcatttggaggagaacttgaagatcgttgtcaagactactgtaagtaatgtggccaagaggaccctgaccgtttcccccaacggcgagcttcacccctctagattctccgagaaagacttgctcacagtcgtggaccgcgagtaccttttctcctacatcgacgacccctgccttgctacctacccactgatgcagaaactgagggcagagctagtcgaacatgctctgaaaaatggtgagagagagcggagtgcaaacacttccatcttccacaagattgctgcttttgaagaggagctgaagaccatcttgcccaaagaagtcgacaatgccaggatcgaaatcgagaatgggaaatcagaaatcccaaacaggatcaaggaatgcaggtcttatccgttgtacaggtttgtgagggaggagttggggactagtttgttgaccggtgagaagatcaagtcacctggtgaagaatgttacaaggtgttcaatgcaatctgtgccggaaagctggttgatcctctgctggagtgtttgaaggagtggaatggtgctcccctgcctatatcttaa

SEQ ID NO: 133217 - protein, 710 aa, Rubus idaeus
MEFYKNGNGAVESFCEGHDPLNWNMAAESLKGSHVDELKRMVSDYRKPVVKLGGETLTIGQVAAIASHDGGVRVELSEEKRAGVKASSDWVMDSMGKGTDSYGVTTGFGATSHRRTKNGGALQRELIRFLNAGIFGSSLDSTHKLPHTATRAAMLVRFNTLLQGYSGIRFEILEAITKFLNGNITPCLPLRGTITASGDLVPLSYIAGLLIGRPNSKSVGPKGETLSPAEGFKLAGIDGGFFELQPKEGLALVNGTAVGSGMASMVLFDANTLAVLSEVMSAIFAEVMQGKPEFTDHLTHKLKHHPGQIEAAAIMEHILEGSSYVKEAKKVHEMDPLQKPKQDRYALRTSPQWLGPQIEVIRAATKMIEREINSVNDNPLIDVSRNKALHGGNFQELPIGVAMDNTRLAIASIGKLIFAQFSELVNDYYNNGLPSILTGSSNPSLDYGFKGAEIAMASYCSELQFLANPVTNHVQSAEQHNQDVNSLGLISSRKTSEAVDILKLMSSTFLVALCQAIDLRHLEENLKIVVKTTVSNVAKRTLTVSPNGELHPSRFSEKDLLTVVDREYLFSYIDDPCLATYPLMQKLRAELVEHALKNGERERSANTSIFHKIAAFEEELKTILPKEVDNARIEIENGKSEIPNRIKECRSYPLYRFVREELGTSLLTGEKIKSPGEECYKVFNAICAGKLVDPLLECLKEWNGAPLPIS

SEQ ID NO: 133218 - DNA, 2142 bp, Glycine max
  CDS (1)..(2142)
atggaagcaactaatggccaccaaaacggttcattttgcttgtccactgccaagggaaataatgatcccttgaactggggagcggcggcggaggcgatgaaggggagtcacctggacgaggtgaagcgcatggtggccgagtaccgcaagccggtggtccggctcggcggagagactctcaccatcgctcaggtggccgccgtggccggacacgaccacggcgtggcggtggagctctcagagtcagcgagagaaggagtaaaggcgagcagtgagtgggtgatgaacagcatgaacaacggcactgacagttacggcgtcaccaccggcttcggtgccacgtcacaccgccgaaccaaacagggtggtgctctgcagaaggaactcatcagattcttaaacgctggaatatttggaaatggaactgaatcaagccataccctgccacacactgcaaccagagcagccatgttagtgagaatcaacactcttcttcaggggtactcaggcattagatttgaaatcttagaagccatcaccaagctcctgaacaacaacgttaccccatgtttggaccttcgtggtacaatcacagcttctggagatcttgttccactttcttacattgctggtttgctaactggcagacccaactccaaagctgttggaccttctggagaagtacttaacgcaaaagaagcttttgaattggctagcatcaactctgagttctttgaattgcaacccaaggaaggtcttgcccttgttaatggcactgctgttggttctggattagcttctatggtactctttgaggctaatatactagctgtgttgtctgaagttctatcagctatttttgctgaagtgatgcaggggaaacctgaattcactgaccatttgacacacaagctaaagcaccatcctggtcaaattgaggctgctgctattatggagcatatcttggatggaagttcctacatgaaagctgctaagaagttgcatgagattgatcccttgcaaaagccaaaacaagatagatatgcccttagaacttcaccacagtggcttggtcctcttattgaagtgattcgtttctcaaccaagtcaattgagagagagatcaactctgtgaatgacaaccctttgattgatgtttcaaggaacaaggcattgcatggtggcaatttccaaggaacccctattggagtctctatggacaacacacgtttggcacttgcatctattggcaaactcatgtttgctcaattctctgagcttgtcaatgacttttacaacaatggattgccttcaaatctcactgctagcagaaatccaagcttggactatggtttcaagggagctgaaattgccatggcttcttactgctctgaactccaatatcttgcaaatccagtaactacccatgtccaaagtgctgagcaacacaaccaggatgtcaactctttgggcttgatctcatctagaaagacaaatgaagccatcgagatccttaagctcatgtcttccacattcttgattgcactttgccaagcaattgacttgaggcatttagaggagaatttgaaaaactcggtcaagaacaccgtgagccaagtttccaaaaggattcttaccacaggtgtcaatggagaactccatccttcaagattttgtgagaaggatctgctaaaagtggttgatagggagtatatattttcctacattgatgacccctgcagtgctacatacccattgatgcaaaaacttaggcaagtgcttgtagatcatgcattggtaaatgcagagtgtgagaaggatgtgaactcgtccatctttcaaaagatagcaatctttgaggaagagttgaagaatctcttgccaaaagaggttgaaggtgcaagggctgcttatgagagtggcaaagctgcaattccaaacaagatccaagaatgcagatcttacccactgtacaagtttgtgagagaggaattagggactgggttgctaactggagaaaaggtgaggtcaccgggtgaagagtttgacaaattattcacagcaatgtgccaagggaaaattattgatcctcttatggagtgccttggggagtggaatggagctcctcttccaatctcttaa

SEQ ID NO: 133219 - protein, 713 aa, Glycine max
MEATNGHQNGSFCLSTAKGNNDPLNWGAAAEAMKGSHLDEVKRMVAEYRKPVVRLGGETLTIAQVAAVAGHDHGVAVELSESAREGVKASSEWVMNSMNNGTDSYGVTTGFGATSHRRTKQGGALQKELIRFLNAGIFGNGTESSHTLPHTATRAAMLVRINTLLQGYSGIRFEILEAITKLLNNNVTPCLDLRGTITASGDLVPLSYIAGLLTGRPNSKAVGPSGEVLNAKEAFELASINSEFFELQPKEGLALVNGTAVGSGLASMVLFEANILAVLSEVLSAIFAEVMQGKPEFTDHLTHKLKHHPGQIEAAAIMEHILDGSSYMKAAKKLHEIDPLQKPKQDRYALRTSPQWLGPLIEVIRFSTKSIEREINSVNDNPLIDVSRNKALHGGNFQGTPIGVSMDNTRLALASIGKLMFAQFSELVNDFYNNGLPSNLTASRNPSLDYGFKGAEIAMASYCSELQYLANPVTTHVQSAEQHNQDVNSLGLISSRKTNEAIEILKLMSSTFLIALCQAIDLRHLEENLKNSVKNTVSQVSKRILTTGVNGELHPSRFCEKDLLKVVDREYIFSYIDDPCSATYPLMQKLRQVLVDHALVNAECEKDVNSSIFQKIAIFEEELKNLLPKEVEGARAAYESGKAAIPNKIQECRSYPLYKFVREELGTGLLTGEKVRSPGEEFDKLFTAMCQGKIIDPLMECLGEWNGAPLPIS

SEQ ID NO: 133220 - DNA, 2148 bp, Nicotiana tabacum
  CDS (1)..(2148)
atggcatcaaatggtcatgttaatggaggagaaaactttgagttgtgcaaaaaatcagctgatccattgaattgggaaatggcagctgaatccttaagagggagtcatttggatgaagtgaaaaaaatggtgagtgaatttagaaaaccaatggtaaaacttggtggtgaaagtttaacagtggcacaagtggctgctattgctgttagggacaaaagtgcaaatggtgttaaagttgaactttctgaagaggcaagagctggtgttaaagctagtagtgattgggttatggacagtatgaataaaggaactgatagttatggtgttactactggttttggtgctacatctcataggagaaccaagaatggtggtgctcttcaaaaagaacttattaggttcttgaatgctggtgtttttggcaatggaacagaaacaagccacacattgccacattcagcaacaagggcagctatgcttgttaggatcaacacactcctacaaggctactctggcatcagatttgaaatcttggaagctattacaaaattgattaacagcaacatcactccatgtttacctctccgtggaacgatcactgcctcgggtgatcttgtccctttatcctacattgctggtttgctcactggtaggcctaattccaaggctgttggtcccaatggtgagacacttaatgctgaagaagcgttccgcgttgctggtgttaacggtggatttttcgagttgcagcctaaggaaggacttgcacttgtgaatggtacagctgttggttctggtatggcatcaatggtcctctttgattccaacattcttgctgtaatgtctgaagttttatcagcaattttcgctgaagtaatgaacggaaagcccgaattcactgaccatttgacacacaagttgaagcaccaccctggtcaaattgaggctgctgctattatggaacatattttggatggaagctcttatgtgaaggcggctcaaaagctacatgaaatggatcctctacaaaaaccaaagcaagatcgttatgctctccgaacatctccacaatggcttggccctcaaattgaagtcattcgcgctgcaactaagatgattgagagggagattaactcagtgaacgataaccctttgatcgatgtttcaagaaacaaggcgttacatggtggcaacttccaaggcactcctatcggtgtttccatggataatgcaagattggctcttgcatcaattgggaaattgatgtttgctcaattctcggaacttgtcaacgactattacaacaacggtttgccctctaatctcactgcatcaaggaatccaagcttggactatggtttcaagggagctgaaatcgccatggcttcttactgctcagaacttcaattcttggcaaatccagtgacaaaccatgtccaaagtgctgaacaacacaaccaagatgtcaactccttaggcttaatctcagcaaggaaaacagctgaagctgttgatatcttaaagctcatgtcatcaacttatctcgtggcactttgccaagctatagacttgaggcatttggaagaaaacttaaagaatgcagtcaagaacacagttagccaagtagctaagagaactcttacaatgggtgctaatggtgaacttcatccagcaagattctgtgaaaaggaattgcttcgaatcgtggatagggaatacttgttcgcctacgctgatgatccttgcagttgcaactaccctttaatgcagaaactgagacaagtacttgttgatcatgcaatgaataatggtgaaagtgagaagaatgtgaacagctcaatctttcaaaagattggagctttcgaagatgaattgaaggctgttttaccaaaggaagttgagagtgcaagagctgcattagaaagtggaaaccctgctattcctaacaggattacagaatgcagatcttatccattgtacaggtttgtgagaaaggagcttggaacagaattattgacaggagaaaaagtccgatcaccgggcgaggagtgtgacaaagtgttcacagcaatgtgcaatggacaaatcattgatccaatgttggagtgtctcaagagctggaatggtgctcctcttcctatctgttag

SEQ ID NO: 133221 - protein, 715 aa, Nicotiana tabacum
MASNGHVNGGENFELCKKSADPLNWEMAAESLRGSHLDEVKKMVSEFRKPMVKLGGESLTVAQVAAIAVRDKSANGVKVELSEEARAGVKASSDWVMDSMNKGTDSYGVTTGFGATSHRRTKNGGALQKELIRFLNAGVFGNGTETSHTLPHSATRAAMLVRINTLLQGYSGIRFEILEAITKLINSNITPCLPLRGTITASGDLVPLSYIAGLLTGRPNSKAVGPNGETLNAEEAFRVAGVNGGFFELQPKEGLALVNGTAVGSGMASMVLFDSNILAVMSEVLSAIFAEVMNGKPEFTDHLTHKLKHHPGQIEAAAIMEHILDGSSYVKAAQKLHEMDPLQKPKQDRYALRTSPQWLGPQIEVIRAATKMIEREINSVNDNPLIDVSRNKALHGGNFQGTPIGVSMDNARLALASIGKLMFAQFSELVNDYYNNGLPSNLTASRNPSLDYGFKGAEIAMASYCSELQFLANPVTNHVQSAEQHNQDVNSLGLISARKTAEAVDILKLMSSTYLVALCQAIDLRHLEENLKNAVKNTVSQVAKRTLTMGANGELHPARFCEKELLRIVDREYLFAYADDPCSCNYPLMQKLRQVLVDHAMNNGESEKNVNSSIFQKIGAFEDELKAVLPKEVESARAALESGNPAIPNRITECRSYPLYRFVRKELGTELLTGEKVRSPGEECDKVFTAMCNGQIIDPMLECLKSWNGAPLPIC

SEQ ID NO: 133222 - DNA, 2154 bp, Arabidopsis thaliana
  CDS (1)..(2154)
atggatcaaatcgaagcaatgttgtgcggcggaggagagaagacaaaagtggcggttactacgaagactttggcagatccattgaattggggtttagcagcggatcaaatgaaaggaagtcatttagatgaagtgaagaagatggtcgaagagtatcgtagaccagtcgtgaatcttggcggagaaacactgacgatcggacaagttgctgccatctccaccgtaggaggcagcgttaaggttgagttagcggagacttcaagagccggtgtgaaagctagcagtgattgggttatggagagcatgaacaaaggtactgacagttacggagtcaccaccggctttggtgctacttctcaccggagaaccaaaaacggcaccgcattacaaacagaactcattagatttttgaacgccggaatattcggaaacacgaaggagacatgtcacacactgccgcaatccgccacaagagccgccatgctcgtcagagtcaacactcttctccaaggatactccgggatccgattcgagatcctcgaagcgattacaagtctcctcaaccacaacatctctccgtcactacctctccgtggaaccattaccgcctccggcgatctcgttcctctctcttacatcgccggacttctcaccggccgtcctaattccaaagccaccggtcccgacggtgaatcgctaaccgcgaaagaagcttttgagaaagccggaatcagtactggattcttcgatttacaacctaaggaaggtttagctctcgttaatggcacggcggttggatctggaatggcgtcgatggttctattcgaagcgaatgtccaagcggtgttagcggaggttttatcagcgatcttcgcggaggttatgagcgggaaacctgagtttaccgatcatctgactcatcgtttaaaacatcatcccggacaaatcgaagcggcggcgataatggagcacatactcgacggaagctcatacatgaaattagctcaaaaggttcacgagatggatccattgcagaaaccaaaacaagatcgttacgctcttcgtacatctcctcaatggctaggtcctcaaattgaagtaatccgtcaagctacgaaatcgatagagcgtgaaatcaactccgttaacgataatccgttgatcgatgtttcgaggaacaaggcgattcacggtggtaacttccaaggaacaccaatcggagtttctatggataacacgagattggcgattgctgcgattgggaagctaatgtttgctcaattctctgagcttgttaatgatttctacaacaatggacttccttcgaatctaactgcttcgagtaatccaagtttggattatggattcaaaggagcagagattgctatggcttcttattgttctgagcttcaatacttggctaatccagtcacaagccatgttcaatcagctgagcaacataatcaagatgtgaactctcttggtttgatctcgtctcgtaaaacatctgaagctgtggatattcttaagctaatgtcaacaacgttccttgtggggatatgtcaagctgttgatttgagacatttggaggagaatctgagacaaactgtgaagaacacagtttctcaagttgctaagaaagtgttaaccactggaatcaacggtgagttacatccgtcaaggttttgcgagaaggacttgcttaaggttgttgatcgtgagcaagtgttcacgtatgtggatgatccttgtagcgctacgtacccgttgatgcagagactaagacaagttattgttgatcacgctttgtccaacggtgagactgagaagaatgcagtgacttcgatctttcaaaagattggagcttttgaagaggagcttaaggctgtgcttccaaaggaagttgaagcggctagagcggcttatgggaatggaactgcgccgattcctaaccggattaaggaatgtaggtcgtatccgttgtataggttcgtgagggaagagcttggaacgaagttgttgactggagaaaaggttgtgtctccgggagaggagtttgataaggtcttcactgctatgtgtgaaggtaaacttattgatccgttgatggattgtctcaaggaatggaacggagctccgattccgatttgctaa

SEQ ID NO: 133223 - protein, 717 aa, Arabidopsis thaliana
MDQIEAMLCGGGEKTKVAVTTKTLADPLNWGLAADQMKGSHLDEVKKMVEEYRRPVVNLGGETLTIGQVAAISTVGGSVKVELAETSRAGVKASSDWVMESMNKGTDSYGVTTGFGATSHRRTKNGTALQTELIRFLNAGIFGNTKETCHTLPQSATRAAMLVRVNTLLQGYSGIRFEILEAITSLLNHNISPSLPLRGTITASGDLVPLSYIAGLLTGRPNSKATGPDGESLTAKEAFEKAGISTGFFDLQPKEGLALVNGTAVGSGMASMVLFEANVQAVLAEVLSAIFAEVMSGKPEFTDHLTHRLKHHPGQIEAAAIMEHILDGSSYMKLAQKVHEMDPLQKPKQDRYALRTSPQWLGPQIEVIRQATKSIEREINSVNDNPLIDVSRNKAIHGGNFQGTPIGVSMDNTRLAIAAIGKLMFAQFSELVNDFYNNGLPSNLTASSNPSLDYGFKGAEIAMASYCSELQYLANPVTSHVQSAEQHNQDVNSLGLISSRKTSEAVDILKLMSTTFLVGICQAVDLRHLEENLRQTVKNTVSQVAKKVLTTGINGELHPSRFCEKDLLKVVDREQVFTYVDDPCSATYPLMQRLRQVIVDHALSNGETEKNAVTSIFQKIGAFEEELKAVLPKEVEAARAAYGNGTAPIPNRIKECRSYPLYRFVREELGTKLLTGEKVVSPGEEFDKVFTAMCEGKLIDPLMDCLKEWNGAPIPIC

SEQ ID NO: 133224 - DNA, 2157 bp, Cicer arietinum
  CDS (1)..(2157)
atgatggagttaccaaatggaaattgtaacggttcttcattgaatgtttgcaatggaaatggaaatttgagtaacaatgactcattgaattggggcatggctgcggattcaatgagaggtagtcaccttgatgaggtgaaacgcatggtggaagagtaccggaaagcggttgtgccgttaggtggaaaaggtttaacaatatctcaagtggctgcggttgctacacagaataccggtgtggcggttgaacttgccgaagagacacgatatgcggttaaggcttctagtgattgggttgttgatagcatgaataaagggactgatagctatggagtcaccactgggtttggtgcaacctcacacaggagaacaaaacagggtggtgccctccaaaatgaactcatccgatttctgaatgctggaatttttggcaatggaacagaatcaactcaaacattacctcacacagccacaagagcagccatgttggttaggatcaacacattgcttcaaggatattctggcataagatttgaaatcatggaagccatagcaaaatttctaaaccataacataacaccatgtctccctctaagaggcacaatcactgcatcaggtgacttggttccattatcatatgttgccggtcttttaattggaagaccaaactccaaatctattggacctaatggacaaattcttaatgctaaagaagcttttcaactagctggaattgaaactggtttctttgagttgcaacctaaagaaggtttagcacttgtgaatggtactgcagttggttctggtttggcttctttggctctttttgagacaaatttacttgttgttctgtcagaaattttgtctgcaattttcgctgaagttatgcaaggaaaacctgaatttactgatcatttgactcataaattgaagcatcatcctggtcaaattgaagctgcagctataatggaacatattttagatggaagttattatgttaaggctgcacaaaaagtacatgacattgatccacttcagaagcctaaacaagataggtacgcgcttagaacatcgccacagtggcttggaccacagattgaagtgatcagaaatgcaactaagatgattgagagagagataaactctgtcaatgacaatccgcttatcgatgtttcgaggaataaggcgcttcatggagggaatttccaaggtacacctattggtgtttcgatggataacactcgtttagccatcgcttcaattggtaaactcatgtttgctcaattctctgagcttgtgaatgatttttacaacaatggattgccttcgaatctaacagggagccgcaatccgagtttggattatggcttcaaaggtgctgaaattgcaatggcatcttattgttcagaacttcagtaccttgctaatcctgtcaccaatcatgttcaaagtgctgaacaacataaccaagatgttaactctttaggattgatttcgtcaagaaaaacagctgaagcagttgaaatattgaagctcatgtcatccactttcttagtagcattgtgccaagccattgatcttaggcacattgaggaaaacttgaaaagtgttgtcaagaacactgtaagtcaagtggctaagagagttctaacagttggtgtaaatggtgagttgcatccatcaaggttctgtgagaaggatttgctcaatgttgttgaacgtgagtatgtttttgcttacattgatgacccttgtagtgctacataccctttaatgcagaagctgagacatgtactagttgatcatgcattggaaaatggtgatagggagggtaattcaagcacctcaattttccaaaagattggagcttttgagcaagagctcaagacccttttgcctaaagaagttgaaagtgttagagttgatgttgagaatggaaaccctgcagttcctaataggatcattgaatgtaggtcttatcctttgtacaagtttgtcagagaaaatttagggacgagtttgctgacaggagagaaaatcaggtcacctggcgaagaatgtgacaaggttttcgcagcattgtgtgatggaaggtttattgatccaatgttggattgtctaaaggagtggaatggtgctcctctacctatatgctag

SEQ ID NO: 133225 - protein, 718 aa, Cicer arietinum
MMELPNGNCNGSSLNVCNGNGNLSNNDSLNWGMAADSMRGSHLDEVKRMVEEYRKAVVPLGGKGLTISQVAAVATQNTGVAVELAEETRYAVKASSDWVVDSMNKGTDSYGVTTGFGATSHRRTKQGGALQNELIRFLNAGIFGNGTESTQTLPHTATRAAMLVRINTLLQGYSGIRFEIMEAIAKFLNHNITPCLPLRGTITASGDLVPLSYVAGLLIGRPNSKSIGPNGQILNAKEAFQLAGIETGFFELQPKEGLALVNGTAVGSGLASLALFETNLLVVLSEILSAIFAEVMQGKPEFTDHLTHKLKHHPGQIEAAAIMEHILDGSYYVKAAQKVHDIDPLQKPKQDRYALRTSPQWLGPQIEVIRNATKMIEREINSVNDNPLIDVSRNKALHGGNFQGTPIGVSMDNTRLAIASIGKLMFAQFSELVNDFYNNGLPSNLTGSRNPSLDYGFKGAEIAMASYCSELQYLANPVTNHVQSAEQHNQDVNSLGLISSRKTAEAVEILKLMSSTFLVALCQAIDLRHIEENLKSVVKNTVSQVAKRVLTVGVNGELHPSRFCEKDLLNVVEREYVFAYIDDPCSATYPLMQKLRHVLVDHALENGDREGNSSTSIFQKIGAFEQELKTLLPKEVESVRVDVENGNPAVPNRIIECRSYPLYKFVRENLGTSLLTGEKIRSPGEECDKVFAALCDGRFIDPMLDCLKEWNGAPLPIC

SEQ ID NO: 133226 - DNA, 2127 bp, Ipomoea batatas
  CDS (1)..(2127)
atggagggcgcaattgcaaacggccacaccaatgatttctgcattaaggttgatccgctgaactgggaaatggcggctgactcattgaagggcagccacttggatgaagtgaagcgcatggtggcggagttcaggaaccccgccgtgaagatcggaggtcagaccctcacgtcgctcaggtcgccgcctatcgccgcccgtgataatgcgtcaaagtggagctctccgaggctgcccgcccggcgtgaaagcagcagtgactgggttatgaacagcatgaacaatggcaccgatagctacggtgtcaccactggcttcggcgccacctctcaccggagaaccaagaacggccatgctcttcagcaggagctcatcaggttcttgaatgctggaatttttgggactggaacaggggcaagccacacactacctcactcagctacaagggcagctatgcttgtgaggatcaacactcttcttcaaggatactccgggatcagatttgagatcttggaagccattactaaattgctcaaccataatatcactccgtgtctgcctctccgtggcacaatcaccgcctccggtgaccttgtgcctttatcctacatcgccggattgctcaccggccgccctaattccaaggcggttggacccaacggtgaggccctcaccgcggaggaggcgttcaaactcgccggagtccagggtgggttcttcgagttgcagcctaaggaagggcttgcacttgtgaatggaactgctgtgggttctggcatggcgtctatggttctgtttgaggctaatgttcttgcggtgttgtctgaggttttgtctgcaattttcgctgaggtgatgaatgggaagccggagtttaccgaccatttgactcataagctgaagcatcatcctggtcaaattgaggctgctgctataatggaacatattttggatagaagctattacatgaaggctgcacagaaactgcacgaaatggatccattgcagaaacccaaacaagatcgttatgctctgagaacatctccccagtggctcggccctcagattgaagtgataagacaagcaaccaaaatgattgagagggaaatcaactctgtcaacgacaaccctttgatcgacgtttcaagaaacaaggccttacacggtggcaatttccaaggtacccccattggtgtgtccatggacaattctagattagcccttgcctccatcggaaaactcatcttcgcgcaattctctgagcttgttaacgactattacaacaacggattgccgtccaatctcaccgccgggaggaatccgagtctggattatggattcaagggcgttgaaatcgccatggcttcatactgttccgagcttcaattcttggctaatcccgtcaccaatcacgtccagagcgccgagcagcacaaccaagatgttaactccctgggtttgatctctgcaagaaagacagctgaagctgttgatgtgttgaaactcatgtcctccacttatctagtggcgctctgccaggcaattgatctgaggcacctggaggagaatttgaagaacgcagtgaggaacacggtcaaccaggtggccaagaggactctcacaatgggcgtcaatggagaactccacccatcaagattctgcgaaaaagacttgctcagagtagtggaccgcgaatacgttttcgcctacgccgatgatccctgcagcgcaaactacccattgtttcaaaagctgaggcaagtccttgtagatcacgccctgcagaacggcgagcacgagaagaatgtgagcacatcaatcttccaaaagattgcagctttcgaagacgaactcaaggcagtcctgcccaaagaagtggagggagcaagatcagccattgagaacggaaaccctgccattcccaacagaatcaccgagtgcaggtcttatcctctgtacaagtttgtccgcgaagaactcgggacggagatgctgaccggagagaaggtgaagtcgccgggagaagtgtgtgataaggtgttcacagcggtgtgtgatggagggatcattgatccattgttggagtgcctcaagagctgggatggggctcctcttcctatctgttaa

SEQ ID NO: 133227 - protein, 708 aa, Ipomoea batatas
MEGAIANGHTNDFCIKVDPLNWEMAADSLKGSHLDEVKRMVAEFRNPAVKIGGQTLTSLRSPPIAARDNASKWSSPRLPARRESSSDWVMNSMNNGTDSYGVTTGFGATSHRRTKNGHALQQELIRFLNAGIFGTGTGASHTLPHSATRAAMLVRINTLLQGYSGIRFEILEAITKLLNHNITPCLPLRGTITASGDLVPLSYIAGLLTGRPNSKAVGPNGEALTAEEAFKLAGVQGGFFELQPKEGLALVNGTAVGSGMASMVLFEANVLAVLSEVLSAIFAEVMNGKPEFTDHLTHKLKHHPGQIEAAAIMEHILDRSYYMKAAQKLHEMDPLQKPKQDRYALRTSPQWLGPQIEVIRQATKMIEREINSVNDNPLIDVSRNKALHGGNFQGTPIGVSMDNSRLALASIGKLIFAQFSELVNDYYNNGLPSNLTAGRNPSLDYGFKGVEIAMASYCSELQFLANPVTNHVQSAEQHNQDVNSLGLISARKTAEAVDVLKLMSSTYLVALCQAIDLRHLEENLKNAVRNTVNQVAKRTLTMGVNGELHPSRFCEKDLLRVVDREYVFAYADDPCSANYPLFQKLRQVLVDHALQNGEHEKNVSTSIFQKIAAFEDELKAVLPKEVEGARSAIENGNPAIPNRITECRSYPLYKFVREELGTEMLTGEKVKSPGEVCDKVFTAVCDGGIIDPLLECLKSWDGAPLPIC

SEQ ID NO: 133228 - DNA, 2118 bp, Lithospermum erythrorhizon
  CDS (1)..(2118)
atggaaaatggaaatgggaaaatggagttttgcatgaaagatccattgaactggggaatggcagctgagtcaatgaaggggagccaccttgatgaagtgaagaaaatggtggctgagttcaggaaaccggtggtgcaacttgctggtaagacattgactattgctcaggtggcggcgatcgccgcacgtgacgacggagtcacggtggagctggcggaagctgctagggaaggtgtcaaggctagtagtgattgggttatggagagtatgaataaggggacggatagttatggtgtaaccactggatttggcgctacttctcataggaggactaaacaagggggtgctcttcaaaaagaactcattagattcttgaatgctggaatctttggcaatggaacagaaactagccacacattaccccactcagcaacaagggcagccatgcttgttaggattaatactctgcttcaaggatattcaggcatcaggtttgagatcctggaagctatcacaaagttcctcaacaccaacatcactccatgcttacccctccgtggcacgatcactgcctcgggtgatctagtccccctctcctacattgccgggctactaactggtcgccccaattccaaggctgttggacctaccggagagaagctcaatgctgaagaagccttccgccttgctgggatcagcagcgggttctttgagttacagccgaaggaaggtcttgcccttgtcaatggaacagctgttggttctggaatggcttcaatggttctttatgaagccaacattttgggtgtgatgtctgaagtgctttcagctgttttcgctgaagtgatgaatggaaagcctgagttcactgatcatttgacacacaaattgaagcaccatcctggtcagattgaggctgctgctataatggaacacattctggatggtagtggatatgttaaggctgctgaattgttacatgaaatggatcctctgcagaagcctaagcaagaccgttatgccctccgtacatcgcctcaatggctcggccctcagattgaagtgatccgttctgctacaaagatgattgagagggagatcaactctgttaacgacaacccattgattgatgtttcaaggaacaaagccttacatggagggaacttccagggcacgcctattggcgtggccatggacaacactcgtcttgccattgccgcaattggaaagcttctatttgctcaattttctgaattggttaatgattactacaacaatgggttgccatcaaatttgacaggcagcagagatccaagcttggattatggtttcaagggagctgaaatcgccatggcttcatattgttcagaacttcaattcttggctaatccagtcaccaaccatgtccagagtgcagaacaacataaccaagatgtcaactctttgggcttaatctcatcaagaaagacttctgaggctgtcgaaatcttgaagctcatgtcttcatcgttcttagtagcactctgccaagctgttgatttgaggcatattgaggagaatgtgagacttgcagtgaagaagacagtcagccaggtcgctaagaagacattaaacataggcgttgatggagtactccacccatcaagattcagcgaaaaggagttgcttcgtgtggttgatcgagagtatgtctttgcctacgcagatgacccttgcagcgccacctacccgttgatgcagaagttaagagaagttcttgttagtcatgccttagcaaacagtggcaatgagaaggatgccagcacttcaatcttccacaaaattggcgttttcgaagaagagttgaagggcattctgcctaaagaggtggagaatgcacgagcctcggtcgaaaatggaactcctgcaatccctaacaagattgaggaatgcagatcatacccattgtacaagtttgtgaggggagaattgggaactgaattgcttactggtgagaaagtgagatcaccaggtgaggaattggaccaagtgttcaatgcattgtgtgaagggaaacttgttgatccacttttggcttgtttggaggcttggaatggtgctcctcttccaatatgttag

SEQ ID NO: 133229 - protein, 705 aa, Lithospermum erythrorhizon
MENGNGKMEFCMKDPLNWGMAAESMKGSHLDEVKKMVAEFRKPVVQLAGKTLTIAQVAAIAARDDGVTVELAEAAREGVKASSDWVMESMNKGTDSYGVTTGFGATSHRRTKQGGALQKELIRFLNAGIFGNGTETSHTLPHSATRAAMLVRINTLLQGYSGIRFEILEAITKFLNTNITPCLPLRGTITASGDLVPLSYIAGLLTGRPNSKAVGPTGEKLNAEEAFRLAGISSGFFELQPKEGLALVNGTAVGSGMASMVLYEANILGVMSEVLSAVFAEVMNGKPEFTDHLTHKLKHHPGQIEAAAIMEHILDGSGYVKAAELLHEMDPLQKPKQDRYALRTSPQWLGPQIEVIRSATKMIEREINSVNDNPLIDVSRNKALHGGNFQGTPIGVAMDNTRLAIAAIGKLLFAQFSELVNDYYNNGLPSNLTGSRDPSLDYGFKGAEIAMASYCSELQFLANPVTNHVQSAEQHNQDVNSLGLISSRKTSEAVEILKLMSSSFLVALCQAVDLRHIEENVRLAVKKTVSQVAKKTLNIGVDGVLHPSRFSEKELLRVVDREYVFAYADDPCSATYPLMQKLREVLVSHALANSGNEKDASTSIFHKIGVFEEELKGILPKEVENARASVENGTPAIPNKIEECRSYPLYKFVRGELGTELLTGEKVRSPGEELDQVFNALCEGKLVDPLLACLEAWNGAPLPIC

SEQ ID NO: 133230 - DNA, 2175 bp, Pisum sativum
  CDS (1)..(2175)
atggaagcaataggtgcagccattacaaaaaacaacagcggttacgattcattctgtttgaccaatgctaaaaacaataacatcaaagtgagtgactctgatcctttgaattggggtgttgcggcggaggcaatgaaaggtagtcacttggacgaggtgaaacgtatggtggatgagtaccggaagccggtggtccgtcttggtggtgagacgctcacaatttctcaggtagctgccattgccgcacatgatcatggtgtgaaggtggagctgtcagaatctgctagggctggcgttaaggcgagcagtgactgggtaatggagagtatgaacaaaggcacagacagttacggtgtcaccaccgttcatggcgccacctctcaccgtcgaaccaaacaaggcggtgctttgcagaaagaactcattagatttttgaatgctggaatatttggaaatggaagtgagtcaactcatacactaccacacacagcaacaagagctgctatgcttgtgagaatcaacacacttctccaaggttattcaggaattagatttgaaatcttggaagctataaccaaactcattaacaacaacgtcaccccatgtttactccgtggtacaatcacagcttctggagatttagtccctctttcttacattgctggtttattaactggaagaccaaattccaaagctcatggaccgtctggagaaatacttaatgctagagaagcttttcagtcagctggaatcaatgatggtttctttgaattgcaaccgaaagaaggtcttgcacttgttaacggaactgctgttggttctggtttagcttctattgttctctttgaagctaacatattagctgtgttgtctgaagtcctatccgctatttttgctgaagttatgcaagggaaacctgagtttactgatcatttgacacataagttgaagcaccatcctggtcaaattgaggctgctgctattatggaacacattttggatggaagtgcttatgtcaaagctgctaagaagttgcatgagatggatcctttgcagaagccaaaacaagatagatatgcacttagaacttcaccacaatggcttggtcctcttattgaagtcattagattctctactaagtcaattgagagggagatcaactctgttaatgataaccctttgattgatgtttcaagaaacaaggctttgcatggtggaaactttcaaggaacacctattggtgtatccatggataatacacgtttggctcttgcgtcaattggtaaactcttgtttgctcaattctctgaactcgtcaatgatttttacaacaacgggttgccttctaatctctcagctagtagaaatcccagcttggattatggattcaagggatccgaaattgccatggcttcttattgttcggagttacaatatcttgcgaacccagttacaactcatgttcaaagtgctgagcaacacaaccaagatgtgaactctttgggtttgatatcttctaggaaaacatatgaagccattgagatccttcagctcatgtcttcgacattcttgattgcactttgtcaagcaattgatttaagacatttggaggagaacttgaaaaactcagtcaagaatatggtgagccatgttgccaaaaggactcttactacaggtatcaatggagaacttcatccttcaagattttgtgaaaaggacttgctgagagtggttgatagggaacatgtgttctcctatattgacgacccttgtagtgctacatatccattgatgcaaaagctaaggcaagtgttagtggaccatgcattagtaaatggtgaatctgagaagaatttgaacacatcaatcttccaaaagattgcaacttttgaggatgagttgaagaccctcttgccaaaagaggttgaaagtgcaaggggtgcatacgagaatggaaatacaacaatttcaaacaagatcaaagaatgcagatcctatccactttacaagtttgtgagagaagaactgggaactagtttactaaccggagaaaaggtcatttcacccggtgaagaatgtgataaattgttcacagctatttgtcagggaaaaatcatcgatcctcttcttgaatgcttgggagactggaacggtgctcctcttccaatttcttaa

SEQ ID NO: 133231 - protein, 724 aa, Pisum sativum
MEAIGAAITKNNSGYDSFCLTNAKNNNIKVSDSDPLNWGVAAEAMKGSHLDEVKRMVDEYRKPVVRLGGETLTISQVAAIAAHDHGVKVELSESARAGVKASSDWVMESMNKGTDSYGVTTVHGATSHRRTKQGGALQKELIRFLNAGIFGNGSESTHTLPHTATRAAMLVRINTLLQGYSGIRFEILEAITKLINNNVTPCLLRGTITASGDLVPLSYIAGLLTGRPNSKAHGPSGEILNAREAFQSAGINDGFFELQPKEGLALVNGTAVGSGLASIVLFEANILAVLSEVLSAIFAEVMQGKPEFTDHLTHKLKHHPGQIEAAAIMEHILDGSAYVKAAKKLHEMDPLQKPKQDRYALRTSPQWLGPLIEVIRFSTKSIEREINSVNDNPLIDVSRNKALHGGNFQGTPIGVSMDNTRLALASIGKLLFAQFSELVNDFYNNGLPSNLSASRNPSLDYGFKGSEIAMASYCSELQYLANPVTTHVQSAEQHNQDVNSLGLISSRKTYEAIEILQLMSSTFLIALCQAIDLRHLEENLKNSVKNMVSHVAKRTLTTGINGELHPSRFCEKDLLRVVDREHVFSYIDDPCSATYPLMQKLRQVLVDHALVNGESEKNLNTSIFQKIATFEDELKTLLPKEVESARGAYENGNTTISNKIKECRSYPLYKFVREELGTSLLTGEKVISPGEECDKLFTAICQGKIIDPLLECLGDWNGAPLPIS

SEQ ID NO: 133232 - DNA, 2151 bp, Petroselinum crispum
  CDS (1)..(2151)
atggagaacggcaatggtgcaattacaaatggacatgtaaacgggaacggaatggatttctgcatgaagaccgaagatccgttgtactggggaatcgcggcggaggcaatgacagggagtcatttggatgaagtgaagaagatggtggctgagtataggaagccggttgtgaagttaggaggagaaacattgactatttctcaagtggcagctatttcggctagggatggtagtggtgtcacggtggagctttccgaggcggcgagagctggcgttaaggctagtagtgattgggtgatggatagtatgaacaaagggacggatagttatggtgtaactactggttttggtgctacttctcataggaggactaagcaaggtggtgctcttcagaaagagctcattaggttcttgaatgctggaatatttggtaatggatcagataatacattaccacactcagcaacaagagctgcaatgttagtgaggatcaacactctgctccagggatactctggaatccgattcgaaattctcgaagcgattactaagtttctaaaccagaacattactccttgtttgccactccggggtacaatcactgcttctggtgatcttgtgccattgtcttacattgctggacttctcactggccgtccgaattctaaggctgttggacctactggagtaattcttagccccgaagaagcgtttaaacttgctggagtggaaggaggttttttcgagttgcagcctaaagaaggccttgcacttgttaatggaacagctgttggttctggtatggcctctatggtacttttcgaggctaatatattagctgttttggctgaagttatgtcagcgattttcgctgaagtgatgcaaggaaagcctgagttcactgaccatttgacgcataagttgaagcaccatccgggccaaattgaggctgcagctataatggaacacattttggatggaagcgcttatgttaaggctgctcagaagctacatgaaatggatccattgcagaagccgaaacaggacagatatgctcttagaacatctcctcagtggcttggtcctcagattgaagtgattcgatcatcgactaagatgattgaaagagagattaactctgtcaatgataacccgttgattgatgtttcgaggaacaaggctattcacggtggcaatttccagggcacacctattggaatgtcgatggacaatacacgtttggctattgccgcgataggaaagctcatgtttgctcaattttctgaacttgtaaacgacttttacaacaatgggttgccatcaaatttgtctggagggcgtaatccaagtttggattatggattcaagggtgctgaaattgcgatggctagttactgctctgaacttcaatttttagccaatccagtgaccaaccatgttcaaagtgctgaacaacacaatcaagatgtaaactccttgggcttaatctcttcaaggaaaacatcagaagctgttgaaatcttgaaactcatgtctactacatttttagtaggcctctgccaagcaatagacttgaggcatttggaggagaatttaaaaagcactgtcaaaaacacagtaagctcagtagctaagcgagtactaactatgggtgtcaacggagaactccacccctcaagattctgtgagaaagatttactcagatttgtggaccgcgaatacatttttgcatatattgatgatccctgcagcgcaacctacccattgatgcaaaaattaagacaaacactagttgagcatgcattgaagaatggtgacaacgagagaaacatgaacacttccatcttccaaaagattgcgacctttgaggatgaactaaaggccctattgcctaaagaagttgaaagtgctagagctgcactcgaaagtggaaatccagcaatcccaaacaggatcgaggagtgcaggtcttacccattgtacaagtttgtgaggaaagagttgggaattgagtatcttacaggagaaaaagtaacgtcacctggagaagagttcgataaggtatttatagcaatgagcaaaggagagatcattgatccattgttagagtgcctggagtcatggaatggtgctcctcttccaatctgttaa

SEQ ID NO: 133233 - protein, 716 aa, Petroselinum crispum
MENGNGAITNGHVNGNGMDFCMKTEDPLYWGIAAEAMTGSHLDEVKKMVAEYRKPVVKLGGETLTISQVAAISARDGSGVTVELSEAARAGVKASSDWVMDSMNKGTDSYGVTTGFGATSHRRTKQGGALQKELIRFLNAGIFGNGSDNTLPHSATRAAMLVRINTLLQGYSGIRFEILEAITKFLNQNITPCLPLRGTITASGDLVPLSYIAGLLTGRPNSKAVGPTGVILSPEEAFKLAGVEGGFFELQPKEGLALVNGTAVGSGMASMVLFEANILAVLAEVMSAIFAEVMQGKPEFTDHLTHKLKHHPGQIEAAAIMEHILDGSAYVKAAQKLHEMDPLQKPKQDRYALRTSPQWLGPQIEVIRSSTKMIEREINSVNDNPLIDVSRNKAIHGGNFQGTPIGMSMDNTRLAIAAIGKLMFAQFSELVNDFYNNGLPSNLSGGRNPSLDYGFKGAEIAMASYCSELQFLANPVTNHVQSAEQHNQDVNSLGLISSRKTSEAVEILKLMSTTFLVGLCQAIDLRHLEENLKSTVKNTVSSVAKRVLTMGVNGELHPSRFCEKDLLRFVDREYIFAYIDDPCSATYPLMQKLRQTLVEHALKNGDNERNMNTSIFQKIATFEDELKALLPKEVESARAALESGNPAIPNRIEECRSYPLYKFVRKELGIEYLTGEKVTSPGEEFDKVFIAMSKGEIIDPLLECLESWNGAPLPIC

SEQ ID NO: 133234 - DNA, 2133 bp, Populus kitakamiensis
  CDS (1)..(2133)
atggaattttgtcaagattcacgcaatggcaatggttcaccaggatttaacactaatgaccctttgaactggggcatggcggcagagtcactaaaaggaagccacctagatgaggtcaagcgcatgatcgaggagtacaggaaccctgtggtcaagttaggaggtgagaccctgaccataggccaggtaactgcaattgctagccgtgacgttggtgtcatggtggagttgtcagaggaggctcgagctggtgtcaaagccagcagtgactgggtcatggacagcatgagcaagggcacagatagttatggtgttactactggttttggtgcaacctcacatagaagaaccaagcaaggtggagagcttcaaaaggagcttataaggttcttgaatgccggtatctttgggaatggcacggagtctagccatacattgcctcgctcagcaaccagggcagctatgttggtcagaaccaacaccctgcttcaaggttattcgggcataagatttgagatgttggaagcaatcaccaagatgatcaaccacaacatcaccccatgtttgccattgagaggaacaatcactgcctctggtgaccttgtcccattgtcctacattgctgggctcttgacaggcaggcctaattcaaaggcagttggacccaatggagagcccctgacccctgctgaagcctttacacaagctgggattgatggcggcttttttgagttacagccgaaggaaggtctagcactagtgaatggtactgcagtgggttccggtctagcttcaatggtgctttttgaggctaatgtgttggcaatcctatcagaagttttgtcagcaatctttgctgaagtcatgcaaggaaaacctgagtttactgatcacctgacacataaattgaagcaccatcctggccaaattgttgctgccgccatcatggaacatattttagatggcagcgcctatgttaaagaagctcagaagttacatgagatcgatcctttacagaaacctaaacaagaccgacacgctcttcgaacatctccacaatggctaggccctctgatcgaagtgattagaacatcaacgaaaatgatcgaacgagaaatcaactctgtcaatgacaatcctttgattgacgtgtcgaggaataaggctctacatggagggaatttccaggggaccccaataggtgtttcaatggacaacactcgtttggccattgcttcaattggcaaactcatgtttgcacaattctctgaacttgttaacgacttgtacaacaatggattgccttcaaacctcactggtggccgcaatccaagcttggattacgggttcaaaggtgccgaaattgccatggcatcttactgctcggagctccaattccttgaccaatcctgcaccaatcatgtccagagtgctgagcaacacaaccaagatgtcaactccctgggattgatttcttcaagaaaaactgctgaagctattgatatattaaagctcatgtccaccactttcttggttggtctatgccattccgttgacttgaggcacatagaggagaacctgaagaacacagtgaagatctctgtgagccagttgccaagggtcttgacaatgggcttcaatggcgagcttcacccttcaagattctgtgaaaaagacttgctcaaggttgttgacagagagcatgtcttttcctatattgacgatccttgtagtgcaacctatccattaatgcaaaagctcaggcaagtactagttgagcatgccttggtgaatggcgaaaaggtaaggaattcaaccacttcgattttccaaaagatcggatcttttgaggaagaactgaagacccttttgcctaaagaagtggagagtgctagacttgaagttgagaatggaaatccagctattccaaacaggatcaaggaatgcaggtcataccccctgtacaagtttgtgagggaagaattgggaactagtttgctaacaggtgagaaggtcaaatcgcccggcgaggaattcgacaaggttttcacagctatttgtgcagggaagttgatcgatcccttgctggaatgcttgaaggaatgggatggtgctcctcttcctatttgctaa

SEQ ID NO: 133235 - protein, 710 aa, Populus kitakamiensis
MEFCQDSRNGNGSPGFNTNDPLNWGMAAESLKGSHLDEVKRMIEEYRNPVVKLGGETLTIGQVTAIASRDVGVMVELSEEARAGVKASSDWVMDSMSKGTDSYGVTTGFGATSHRRTKQGGELQKELIRFLNAGIFGNGTESSHTLPRSATRAAMLVRTNTLLQGYSGIRFEMLEAITKMINHNITPCLPLRGTITASGDLVPLSYIAGLLTGRPNSKAVGPNGEPLTPAEAFTQAGIDGGFFELQPKEGLALVNGTAVGSGLASMVLFEANVLAILSEVLSAIFAEVMQGKPEFTDHLTHKLKHHPGQIVAAAIMEHILDGSAYVKEAQKLHEIDPLQKPKQDRHALRTSPQWLGPLIEVIRTSTKMIEREINSVNDNPLIDVSRNKALHGGNFQGTPIGVSMDNTRLAIASIGKLMFAQFSELVNDLYNNGLPSNLTGGRNPSLDYGFKGAEIAMASYCSELQFLDQSCTNHVQSAEQHNQDVNSLGLISSRKTAEAIDILKLMSTTFLVGLCHSVDLRHIEENLKNTVKISVSQLPRVLTMGFNGELHPSRFCEKDLLKVVDREHVFSYIDDPCSATYPLMQKLRQVLVEHALVNGEKVRNSTTSIFQKIGSFEEELKTLLPKEVESARLEVENGNPAIPNRIKECRSYPLYKFVREELGTSLLTGEKVKSPGEEFDKVFTAICAGKLIDPLLECLKEWDGAPLPIC

SEQ ID NO: 133236 - DNA, 2139 bp, Nicotiana tabacum
  CDS (1)..(2139)
atggctggtgttgcacaaaatggtcaccaagaaatggatttttgcatgaaagtggatccattaaactgggaaatggcagctgattcattgaaaggaagccatttagatgaagtgaagaaaatggtggctgagtttaggaaaccagtagtgaaacttggaggtgagactttgacagtggctcaagttgcggctattgctgcaaaagataatgttaaaactgttaaagtggagctttctgaaggggcaagagctggtgttaaagctagcagtgattgggttatggacagtatgggtaaaggaactgatagttatggtgttacaactggctttggtgctacttcacataggaggaccaagaatggtggtgctcttcaaaaggaacttattaggttcttgaatgctggagtttttggcaatggaacagagtcatgtcacacattaccacaatcagggacaagggcagctatgttagttaggatcaacactctccttcaagggtactctggcatcagatttgaaatcttagaagcaatcactaaattgcttaaccacaatgttactccatgtttgccccttcgcggcaccatcaccgcctctggtgatctcgtccccttgtcctacattgccggtttactcactggtcggcctaattctaaagcagttggacctaatggcgaaaccctcaacgctgaagaagcgtttcgtgttgctggagttaacggtggatttttcgagttgcagcctaaggaaggccttgctcttgtgaatggtactgcagttggttctggtttggcctcaatggttctctttgatgctaatgttctcgcggtcttttctgaagttctctcagctatttttgctgaggtaatgaatggaaagcccgagttcactgaccacttgacacacaagttgaagcatcaccccggacaaattgaggctgctgctattatggaacacattttggatggtagctcttatgtgaaggcggctcagaagcttcacgaaacggatcctctccaaaaaccaaagcaagatcgttatgctcttagaacgtcgccccaatggcttggccctcaaattgaggtcatccgttctgcaaccaagatgattgagagggagattaattcagtgaacgacaaccctttgatcgatgtttcaagaaacaaggcattacacggtggcaacttccagggcactccaattggtgtctctatggacaatgctagattagcccttgcatcaatagggaaattgatgtttggccaattctccgagcttgtcaacgattactacaacaacggattgccatctaatctgacagcaggaaggaatcctagcttggactatggtttcaagggatctgagattgccatggcttcatactgttcagaacttcaattcttggcaaatccagtgactaaccacgtacaaagcgccgagcaacacaaccaagatgtgaactccttggacttaatctcagctagaaaaacagctgaagccgtggacatcttaaagctaatgtcatccacatatctagttgcactttgccaagcaatagacttgaggcatttggaagaaaatctgaggaatgcagtcaagaacacggtgagccaagtcgcaaagagaactttaacaatgggtaccaatggagaacttcatccatcaagattctgtgaaaaggacttgcttcgagtcgtggacagggaatacgtcttcgcctatgctgacgacgcctgcagcgctaactacccactgatgcagaaactaaggcaagtcctcgtcgaccacgccttgcaaaatggcgaaaatgagaagaacgcaaacagctcaatcttccaaaagatactagcttttgaagacgagctaaaggccgtgttgccaaaagaagtcgagagtgcaagagccgcgctggaaagtgggaaccctgcaattgccaacaggataaaagaatgcagatcttatccactttacaggtttgttagaggagaacttggagctgaattattgacgggagaaaaagtcaggtcaccaggtgaagaatgtgacaaagtgttcacagcaatgtgcaatggacaaattattgattcattgttagaatgtctcaaggaatggaatggtgcacctcttccaatctgttag

SEQ ID NO: 133237 - protein, 712 aa, Nicotiana tabacum
MAGVAQNGHQEMDFCMKVDPLNWEMAADSLKGSHLDEVKKMVAEFRKPVVKLGGETLTVAQVAAIAAKDNVKTVKVELSEGARAGVKASSDWVMDSMGKGTDSYGVTTGFGATSHRRTKNGGALQKELIRFLNAGVFGNGTESCHTLPQSGTRAAMLVRINTLLQGYSGIRFEILEAITKLLNHNVTPCLPLRGTITASGDLVPLSYIAGLLTGRPNSKAVGPNGETLNAEEAFRVAGVNGGFFELQPKEGLALVNGTAVGSGLASMVLFDANVLAVFSEVLSAIFAEVMNGKPEFTDHLTHKLKHHPGQIEAAAIMEHILDGSSYVKAAQKLHETDPLQKPKQDRYALRTSPQWLGPQIEVIRSATKMIEREINSVNDNPLIDVSRNKALHGGNFQGTPIGVSMDNARLALASIGKLMFGQFSELVNDYYNNGLPSNLTAGRNPSLDYGFKGSEIAMASYCSELQFLANPVTNHVQSAEQHNQDVNSLDLISARKTAEAVDILKLMSSTYLVALCQAIDLRHLEENLRNAVKNTVSQVAKRTLTMGTNGELHPSRFCEKDLLRVVDREYVFAYADDACSANYPLMQKLRQVLVDHALQNGENEKNANSSIFQKILAFEDELKAVLPKEVESARAALESGNPAIANRIKECRSYPLYRFVRGELGAELLTGEKVRSPGEECDKVFTAMCNGQIIDSLLECLKEWNGAPLPIC

SEQ ID NO: 133238 - DNA, 2085 bp, Arabidopsis thaliana
  CDS (1)..(2085)
atggagtttcgtcaaccaaacgcaacagcattgagcgacccacttaactggaatgtagcggcggaggctttaaaagggagccacctggaggaggtgaagaagatggtgaaggattataggaaaggaacggtgcagctaggcggagagacgctgaccatcggtcaggttgcggcagtagcgagtggaggaccgacagtggagctttctgaggaggctcggggcggtgtgaaggcgagtagtgactgggtgatggagagcatgaaccgtgatacggacacatatgggatcaccactggatttggttcatcttctcgtaggaggactgaccaaggtgctgctcttcaaaaagagcttattaggtatttgaacgccgggatattcgctaccggcaacgaagatgacgacaggtcaaacacgcttccccggccggctactagagcagcgatgctcatccgtgtaaacaccctcctccaaggctactctggtatacgctttgagatcctcgaagccatcacaacactcctcaactgcaaaattacaccgctccttcctctccgaggcaccattaccgcctccggggatctcgttccgttatcctatatcgctggattcctcatcgggcgccccaactcccgatccgtgggcccctctggcgagatcctcactgccttggaggccttcaagctcgctggagtatcgtcttttttcgaactcaggcctaaagaagggcttgcgctcgtgaatgggactgcggtggggtctgctttagcctctacggtactgtacgatgccaacattttggtggttttctccgaagttgcttccgccatgtttgcagaggttatgcaggggaaaccagagtttaccgatcatcttacgcataaactcaagcaccatcctggtcagatcgaagccgccgctatcatggagcatattctagacggaagctcttatgtaaaagaagctctacatctccacaagattgatccgcttcagaaacctaaacaagatcgttacgctctgcgaacatctccgcaatggcttggaccgcagattgaggtgataagagcagcgactaagatgatcgaacgtgagataaactcagtaaacgataaccctttgatcgatgtttcaagaaacaaagctatccatggtgggaacttccaggggacaccaattggtgtcgccatggataacactcgtctagcacttgcttctatcgggaagctaatgttcgctcagttcactgaactcgtaaatgatttctacaacaacgggttaccctctaatctatctggtggtagaaaccctagtcttgattacgggttaaaaggcgcagaagtcgccatggcttcttattgctcagagcttcagttcctagcaaatcctgtgacgaaccatgtcgaaagcgcttctcaacacaatcaagatgttaactctcttgggctgatctcgagccgaacgacagcagaagctgtggttatcctcaagctcatgtcaacgacttacttggtagctttgtgccaagcctttgatctgagacaccttgaagaaattctcaagaaagcggttaatgaggttgtgagccacactgccaaaagcgttctagcaatcgaaccattccgcaaacacgacgatattcttggagttgtcaaccgcgaatacgtcttctcctatgttgatgacccaagcagcctcactaaccctttaatgcagaagctgagacatgtcctcttcgacaaagctttagctgaaccggaaggcgagaccgacacggtttttcggaaaatcggagcgttcgaggccgagctgaaatttctcctccctaaagaagtggaacgagtcaggacagagtacgagaacggtacatttaatgtggctaaccgaatcaagaagtgtcgatcgtatccgctgtaccggtttgtgcggaatgaactcgagacgaggttgctaaccggagaggatgttcggtcaccgggagaggattttgacaaagtcttcagggctatatctcaaggaaaactcatagatcctctgtttgaatgtctgaaagagtggaacggtgctccgatttctatctgctaa

SEQ ID NO: 133239 - protein, 694 aa, Arabidopsis thaliana
MEFRQPNATALSDPLNWNVAAEALKGSHLEEVKKMVKDYRKGTVQLGGETLTIGQVAAVASGGPTVELSEEARGGVKASSDWVMESMNRDTDTYGITTGFGSSSRRRTDQGAALQKELIRYLNAGIFATGNEDDDRSNTLPRPATRAAMLIRVNTLLQGYSGIRFEILEAITTLLNCKITPLLPLRGTITASGDLVPLSYIAGFLIGRPNSRSVGPSGEILTALEAFKLAGVSSFFELRPKEGLALVNGTAVGSALASTVLYDANILVVFSEVASAMFAEVMQGKPEFTDHLTHKLKHHPGQIEAAAIMEHILDGSSYVKEALHLHKIDPLQKPKQDRYALRTSPQWLGPQIEVIRAATKMIEREINSVNDNPLIDVSRNKAIHGGNFQGTPIGVAMDNTRLALASIGKLMFAQFTELVNDFYNNGLPSNLSGGRNPSLDYGLKGAEVAMASYCSELQFLANPVTNHVESASQHNQDVNSLGLISSRTTAEAVVILKLMSTTYLVALCQAFDLRHLEEILKKAVNEVVSHTAKSVLAIEPFRKHDDILGVVNREYVFSYVDDPSSLTNPLMQKLRHVLFDKALAEPEGETDTVFRKIGAFEAELKFLLPKEVERVRTEYENGTFNVANRIKKCRSYPLYRFVRNELETRLLTGEDVRSPGEDFDKVFRAISQGKLIDPLFECLKEWNGAPISIC

SEQ ID NO: 133240 - DNA, 2157 bp, Petroselinum crispum
  CDS (1)..(2157)
atggcatatgtaaatggtaccaccaacgggcatgcaaacgggaacggattagatttgtgcatgaagaaggaagatcctttgaactggggagtggctgcggaggcattgacagggagtcatttggacgaagttaagaggatggtggctgagtacaggaagccggtggtgaagctggaaggagaaacactgacaatttctcaggtggctgctatttcggctagggatgatagtggtgttaaggtggagctttccgaggaggcgagagctggcgttaaggctagtagtgactgggtgatggatagtatgaataaagggacggatagttatggtgttactactggctttggtgctacttctcataggaggactaaacaaggtggtgctcttcaaaaggagcttattaggttcttgaatgctggaatatttggaagtggagctgaagctggtaacaacacattaccacactccgcaacaagagcagcaatgcttgtgagaatcaacacactcctccaaggctattcaggaatccgattcgagatccttgaagccatcaccaagtttcttaaccacaacattactccttgtttgccactccgtggtacaatcactgcttctggtgatcttgtgccattgtcctacattgctggacttctcactggtcgtcccaactccaaggctgttggaccgactggagtaacactcagccccgaagaagcatttaagcttgctggtgtggaaggtggattttttgagttacagccaaaggaaggcctagcacttgttaatggaacagctgttggttctggaatggcctctatggtactttttgaggctaatatattagcagttttagctgaagttatgtcagcaattttcgctgaagtgatgcaagggaagcctgaatttaccgaccatttgacacataagttgaagcaccatcccggccaaattgaggctgcagctataatggaacacattttggatggaagcgcatacgttaaggctgctcaaaagctacatgaaatggatccattacaaaaaccaaaacaagacagatatgctcttagaacatctcctcaatggcttggtcctcaaattgaagttatcagatcatcaactaaaatgatcgaaagagagattaactctgtcaatgataacccattgattgatgtttccaggaacaaggctattcacggtggaaatttccagggcagcccaattggtgtttcaatggacaatacacgtctggctattgcagccataggaaagcttatgtttgctcaattttcagaacttgtcaacgacttttacaacaatgggttgccatcaaatttgtctggagggcgtaacccgagcttggattatggattcaagggtgctgaaattgccatggcatcatactgctccgaactccagtttttagccaatccagtgactaaccatgtccaaagtgctgaacagcacaaccaagatgtgaactctttgggtttaatatcttcaaggaaaacatcagaagctgttgaaatcttgaaactcatgtctactacgtttttggtgggtctatgccaagctatagacttaaggcatttggaggaaaatttgaagagcactgttaaaaacacagtgagccaagtagctaagcgagtactaaccatgggtgtcaacggtgagctccatccctcaagattctgcgagaaagatttgcttagagttgtagaccgcgaatacatatttgcatacattgatgatccctgcagcgcaacctacccattgatgcaaaaactaagggaaactctagttgagcatgcattgaacaatggtgataaagagaggaacttgagcacttccatcttccaaaagattgcagcattcgaggatgaactaaaggctcttctgcctaaagaagtcgaaactgctagagccgcacttgaaagtggaaatccggcaatccccaacaggattaaggagtgcaggtcttaccctctgtacaagtttgtgagggaagaattgggaactgagtatcttacaggagaaaaagtgcggtcacctggggaagaattcgaaaaggtattcacagcaatgtcgaaaggagagataattgatccattgttggagtgtctcgagtcatggaatggtgctcctcttccaatctgctaa

SEQ ID NO: 133241 - protein, 718 aa, Petroselinum crispum
MAYVNGTTNGHANGNGLDLCMKKEDPLNWGVAAEALTGSHLDEVKRMVAEYRKPVVKLEGETLTISQVAAISARDDSGVKVELSEEARAGVKASSDWVMDSMNKGTDSYGVTTGFGATSHRRTKQGGALQKELIRFLNAGIFGSGAEAGNNTLPHSATRAAMLVRINTLLQGYSGIRFEILEAITKFLNHNITPCLPLRGTITASGDLVPLSYIAGLLTGRPNSKAVGPTGVTLSPEEAFKLAGVEGGFFELQPKEGLALVNGTAVGSGMASMVLFEANILAVLAEVMSAIFAEVMQGKPEFTDHLTHKLKHHPGQIEAAAIMEHILDGSAYVKAAQKLHEMDPLQKPKQDRYALRTSPQWLGPQIEVIRSSTKMIEREINSVNDNPLIDVSRNKAIHGGNFQGSPIGVSMDNTRLAIAAIGKLMFAQFSELVNDFYNNGLPSNLSGGRNPSLDYGFKGAEIAMASYCSELQFLANPVTNHVQSAEQHNQDVNSLGLISSRKTSEAVEILKLMSTTFLVGLCQAIDLRHLEENLKSTVKNTVSQVAKRVLTMGVNGELHPSRFCEKDLLRVVDREYIFAYIDDPCSATYPLMQKLRETLVEHALNNGDKERNLSTSIFQKIAAFEDELKALLPKEVETARAALESGNPAIPNRIKECRSYPLYKFVREELGTEYLTGEKVRSPGEEFEKVFTAMSKGEIIDPLLECLESWNGAPLPIC

SEQ ID NO: 133242 - DNA, 2139 bp, Nicotiana tabacum
  CDS (1)..(2139)
atggctggtgttgcacaaaatggtcaccaagaaatggatttttgcgttaaagtggatccattgaactgggaaatggcagctgattcattgaaaggaagccatttagatgaagtgaagaaaatggtggctgagtttaggaaaccagtagtgaaacttggaggtgagactttaacagtggcacaagttgcggctattgctgcaaaagataatgctaaaactgtaaaagtggagctttctgaaggagcaagagctggtgttaaagctagtagtgattgggttatggatagtatgagtaaaggaactgatagttatggtgttactactggttttggtgctacttcacataggagaaccaagaacggtggtgctcttcaaaaggaactaattaggttcttgaatgctggagtttttggcaatggaacagagtcatgtcacacattaccacaatcagggacaagggcagctatgctagttagaatcaacacactcctacaaggatattctggcatcagatttgaaatcttggaagcaatcactaaattgcttaaccacaatgtcactccatgtttgccccttcgcggcacaatcaccgcctctggtgatctcgtccccttgtcctacattgctggtttactcacaggtcggcctaattccaaagccattggacctaatggtgagaccctcaatgctgaagaagcgttccgtgttgctggagttaacagtggatttttcgagttgcagcctaaggaaggccttgctcttgtgaatggtactgcagttggttctggtttggcctcaatggtcctctttgatgctaacattctcgcggtcttttctgaagttctctcagctattttcgctgaggtgatgaatggaaagcccgagttcactgaccacttgacacacaagttgaagcatcaccccggacaaattgaggctgctgctattatggaacacattttggatggtagctcttatgtgaaggcgcctcagaagcttcacgaaacggatcctcttcaaaaaccaaagcaagatcgttacgccctcagaacatcaccccagtggcttggccctcaaattgaggtcatccgttctgcaaccaagatgattgagagagagattaactcagtgaacgacaaccctttgattgatgtttcaagaaacaaggcgttacacggtggcaatttccagggcacaccaattggtgtctctatggacaacgctagattagcccttgcttcaattgggaaattgatgtttgcccaattctccgagcttgtcaacgattactacaacaacgggttgccatctaatctgacagcaggaaggaatccaagcttggactatggtttcaagggatctgagattgccatggcttcatactgttcagaacttcaattcttggcaaatccagtgactaaccacgtacaaagcgccgagcaacacaaccaagatgtgaactccttgggcttaatctcagctagaaaaacagctgaagctgtggacatcttaaagctaatgtcatccacatatctagtcgcactttgccaagcgatagacttgaggcatttggaagaaaatctgaggaatgcagtcaagaacacggtgagccaagtcgctaagagaaccttgacaatgggtgccaatggagaacttcatccatcaagattctgcgaaaaggacttgcttcgagtcgtggacagggaatacgtctttcgttacgctgatgacgcctgcagcgccaactacccactgatgcagaaactaaggcaagtccttgtcgaccacgccttagaaaatggcgaaaatgagaagaacgcgaacagctcaatattccaaaagatactagcttttgaaggcgagttaaaggccgtgttaccaaaagaagtcgagagtgcaagaatctcgctggaaaatgggaaccctgcaattgccaacaggataaaggaatgcagatcttatccactctacaggtttgttagagaagaacttggagctgaattattgacaggagaaaaagtcaggtcaccaggtgaagaatgtgacaaagtgttcacagcaatgtgcaatggacaaattattgattcattattagagtgtctcaaggaatggaatggtgctcctcttccaatctgttag

SEQ ID NO: 133243 - protein, 712 aa, Nicotiana tabacum
MAGVAQNGHQEMDFCVKVDPLNWEMAADSLKGSHLDEVKKMVAEFRKPVVKLGGETLTVAQVAAIAAKDNAKTVKVELSEGARAGVKASSDWVMDSMSKGTDSYGVTTGFGATSHRRTKNGGALQKELIRFLNAGVFGNGTESCHTLPQSGTRAAMLVRINTLLQGYSGIRFEILEAITKLLNHNVTPCLPLRGTITASGDLVPLSYIAGLLTGRPNSKAIGPNGETLNAEEAFRVAGVNSGFFELQPKEGLALVNGTAVGSGLASMVLFDANILAVFSEVLSAIFAEVMNGKPEFTDHLTHKLKHHPGQIEAAAIMEHILDGSSYVKAPQKLHETDPLQKPKQDRYALRTSPQWLGPQIEVIRSATKMIEREINSVNDNPLIDVSRNKALHGGNFQGTPIGVSMDNARLALASIGKLMFAQFSELVNDYYNNGLPSNLTAGRNPSLDYGFKGSEIAMASYCSELQFLANPVTNHVQSAEQHNQDVNSLGLISARKTAEAVDILKLMSSTYLVALCQAIDLRHLEENLRNAVKNTVSQVAKRTLTMGANGELHPSRFCEKDLLRVVDREYVFRYADDACSANYPLMQKLRQVLVDHALENGENEKNANSSIFQKILAFEGELKAVLPKEVESARISLENGNPAIANRIKECRSYPLYRFVREELGAELLTGEKVRSPGEECDKVFTAMCNGQIIDSLLECLKEWNGAPLPIC

SEQ ID NO: 133244 - DNA, 2124 bp, Arabidopsis thaliana
  CDS (1)..(2124)
atggagctatgcaatcaaaacaatcacatcaccgccgtctcgggcgatccgttgaactggaacgcgacggccgaagctttgaaagggagccacctggatgaggtgaaacgaatggtgaaagagtataggaaagaggcggtgaagttaggaggtgagactttgacgattggtcaagtagccgccgtggctagaggaggaggaggatctacggtggagctagcggaggaggctcgtgccggagtcaaggcgagtagcgaatgggtgatggagagcatgaaccgaggaacggacagttatggagttaccacagggtttggtgcaacttcccatagaagaaccaaacaaggcggtgcacttcaaaatgagcttattaggttcttgaatgccggaatatttggccccggcgccggggacacgtcacacacgttgccaaagccgacaacaagagcggcaatgctcgtccgtgtcaacactctcctccaaggctactccggtatacgcttcgagattctcgaagcaattacaaagcttctcaaccacgaaatcactccgtgcctccctctccgtggcaccatcaccgcctccggtgaccttgttcctctctcttacatcgccggacttctcactggccgtcccaactccaaagccgtgggtccctctggtgagactctcactgcctctgaggcctttaagctcgccggagtatcgtcctttttcgagctgcagcctaaggaaggactagcacttgtgaacgggacagcggttggatcgggtttggcctcaacggttttgttcgatgcaaatattttggctgttttatcggaagttatgtctgccatgttcgcagaggttatgcaagggaaaccggagtttacagatcatcttacgcataagctcaagcaccatcccggtcagatcgaagccgccgcaattatggaacatatattagacggaagctcttacgttaaagaagctcaacttctccacgaaatggatcctcttcaaaaacctaaacaagatcggtacgctttacgtacgtcaccacaatggcttgggccgcagattgaagtgatcagagcggctactaaaatgattgagcgtgagatcaactctgttaatgataaccctttgatagatgtgtcgaggaacaaggcgttgcacggtggaaatttccaagggacaccgatcggtgttgccatggataattcccgtctagccattgcttccattgggaaactcatgtttgcgcagttttctgaactagtgaacgatttctacaacaatggtttgccttctaatctatctggtgggagaaaccctagtcttgattacgggtttaaaggcgcggaaatagccatggcttcttattgctccgagcttcagttcctggctaatcccgtgaccaaccatgtccaaagcgcagagcagcataaccaagacgttaattccctagggctaatctctagcaggaaaactgcagaagcagtggatatcctcaagctaatgtccacaacctacttagtcgcgctttgccaagccgttgatctaagacatcttgaagagaatctgaagaaggcggttaaatcagcagtgagtcaggtggcgaaacgggtcttaaccgttggtgccaacggggagctacatccgtcaaggttcacagaacgtgatgtcctccaagtggttgaccgagagtacgtgttctcatacgcagacgatccctgcagcctcacttacccgctaatgcagaaacttagacacattcttgtagaccacgctttagcggatccagaacgcgaggccaattccgcgacatcggttttccacaaaatcggagcttttgaagccgagctgaaactgcttctccctaaagaagtagaacgcgtccgggttgaatacgaggaaggaacatcggctatagctaaccggattaaggaatgtcggtcttatccattgtatcggtttgtccgcgatgagctaaatactgaactgcttactggagagaatgttcggtcgccaggagaggagtttgataaagtgttcttagcgatttctgatggaaaacttattgatccgttgttggaatgtctcaaggagtggaacggagctccggtttcaatctgttga

SEQ ID NO: 133245 - protein, 707 aa, Arabidopsis thaliana
MELCNQNNHITAVSGDPLNWNATAEALKGSHLDEVKRMVKEYRKEAVKLGGETLTIGQVAAVARGGGGSTVELAEEARAGVKASSEWVMESMNRGTDSYGVTTGFGATSHRRTKQGGALQNELIRFLNAGIFGPGAGDTSHTLPKPTTRAAMLVRVNTLLQGYSGIRFEILEAITKLLNHEITPCLPLRGTITASGDLVPLSYIAGLLTGRPNSKAVGPSGETLTASEAFKLAGVSSFFELQPKEGLALVNGTAVGSGLASTVLFDANILAVLSEVMSAMFAEVMQGKPEFTDHLTHKLKHHPGQIEAAAIMEHILDGSSYVKEAQLLHEMDPLQKPKQDRYALRTSPQWLGPQIEVIRAATKMIEREINSVNDNPLIDVSRNKALHGGNFQGTPIGVAMDNSRLAIASIGKLMFAQFSELVNDFYNNGLPSNLSGGRNPSLDYGFKGAEIAMASYCSELQFLANPVTNHVQSAEQHNQDVNSLGLISSRKTAEAVDILKLMSTTYLVALCQAVDLRHLEENLKKAVKSAVSQVAKRVLTVGANGELHPSRFTERDVLQVVDREYVFSYADDPCSLTYPLMQKLRHILVDHALADPEREANSATSVFHKIGAFEAELKLLLPKEVERVRVEYEEGTSAIANRIKECRSYPLYRFVRDELNTELLTGENVRSPGEEFDKVFLAISDGKLIDPLLECLKEWNGAPVSIC

SEQ ID NO: 133246 - DNA, 2166 bp, Solanum lycopersicum
  CDS (1)..(2166)
atggcatcatcaatcgtacaaaatggacatgttaatggagaagctatggatttatgtaagaaatcaattaatgttaatgatccattgaattgggaaatggctgctgaatcattaagagggagtcatttggatgaagtgaaaaagatggtggatgaatttagaaagccaattgtgaaacttgggggtgaaactttaacagttgcacaagttgcatccattgcaaatgttgataacaaaagtaatggggtcaaagtggaactttctgaaagtgcaagggctggtgtgaaagctagtagtgattgggtaatggatagtatggggaaaggtacagatagttacggtgtgactactggatttggtgcaacatctcatagaagaactaaaaatggcggtgcacttcaaaaggaacttatcaggttcttgaatgctggagtttttggaaatggaacagaatcatctcatactttgccacattcagcaacaagggcagctatgcttgttaggatcaatactctgcttcaaggctactctggcattagatttgaaattttggaagcaattactaagttgatcaacagcaacattaccccgtgtttgccccttcgtgggacgatcactgcatcgggtgatcttgtcccgttgtcatacattgctggtttgctcactggcaggcctaactccaaggctgttggacctaatggtgagaaacttaatgctgaggaacggttccgcgtggctggtgttactagtggatttttcgagttgcagcccaaggaaggacttgcacttgtgaatggtactgcagttggttctggtatggcatcaatggtactgtttgagtccaacattcttgctgtcatgtctgaagtcttgtcagcgattttcgctgaagtgatgaacggaaagcctgaattcactgactatttgacacacaagttgaagcatcaccctggccagattgaggctgctgctattatggaacacattttggatggaagctcttatgtcaaggcagctcagaagctccatgaaatggatcctcttcaaaaaccaaagcaagatcgttatgctcttcgaacatctccacagtggcttggacctcaaattgaagtcatccgtgcagcaacaaagatgattgagagagagattaactcagtgaacgacaacccattgatcgatgtttcaagaaacaaggccttacacggtggaaacttccaaggtacccctattggtgtgtccatggataatacaagattggcccttgcatctattgggaaattgatgtttgcccaattttcggaacttgtcaacgactattacaacaatgggttgccactcaatctcacagctggaaggaatccaagcttggattatggactcaagggtgctgaaattgcaatggcttcttactgctcggaacttcaattcttggcaaatccagtgactaaccatgttcaaagtgctgagcaacacaaccaagatgtgaattccttgggcttaatctcagcaaggaaaacagctgaggctgttgacatcttgaagctaatgtcatcaacctatctcgtggcgctttgccaagctatcgacttgaggcatttggaggagaatttgaagaatgctgtgaaaaacactgtaagccaagtagccaaaaagactctggcaatgggtgctaatggcgaacttcatccagcaagattctgcgaaaaggaattgctacaagtggtggaaagggaatatttgtttacctatgctgatgacccctgcagctccacctaccctttgatgcagaagctgagacaagtccttgttgatcatgcaatgaagaatggtgaaagtgagaagaacttgaacagctcaatcttccaaaagattgtagctttcgaggacgaattgaaggccgtgttgcctaaagaagttgagagtgcaagagctgttgttgaaagtggaaaccctgcaattcctaacaggatcacagaatgtagatcatatccattgtacaggttggttagacaagaagttggaacagaactattgacaggtgaaaaagttcgatcgcccggtgaggagattgataaggtattcacagcattttgcaatggacaaatcattgatccattgttggagtgtctcaaaagctggaatggtgctcctattccaatctgctaa

SEQ ID NO: 133247 - protein, 721 aa, Solanum lycopersicum
MASSIVQNGHVNGEAMDLCKKSINVNDPLNWEMAAESLRGSHLDEVKKMVDEFRKPIVKLGGETLTVAQVASIANVDNKSNGVKVELSESARAGVKASSDWVMDSMGKGTDSYGVTTGFGATSHRRTKNGGALQKELIRFLNAGVFGNGTESSHTLPHSATRAAMLVRINTLLQGYSGIRFEILEAITKLINSNITPCLPLRGTITASGDLVPLSYIAGLLTGRPNSKAVGPNGEKLNAEERFRVAGVTSGFFELQPKEGLALVNGTAVGSGMASMVLFESNILAVMSEVLSAIFAEVMNGKPEFTDYLTHKLKHHPGQIEAAAIMEHILDGSSYVKAAQKLHEMDPLQKPKQDRYALRTSPQWLGPQIEVIRAATKMIEREINSVNDNPLIDVSRNKALHGGNFQGTPIGVSMDNTRLALASIGKLMFAQFSELVNDYYNNGLPLNLTAGRNPSLDYGLKGAEIAMASYCSELQFLANPVTNHVQSAEQHNQDVNSLGLISARKTAEAVDILKLMSSTYLVALCQAIDLRHLEENLKNAVKNTVSQVAKKTLAMGANGELHPARFCEKELLQVVEREYLFTYADDPCSSTYPLMQKLRQVLVDHAMKNGESEKNLNSSIFQKIVAFEDELKAVLPKEVESARAVVESGNPAIPNRITECRSYPLYRLVRQEVGTELLTGEKVRSPGEEIDKVFTAFCNGQIIDPLLECLKSWNGAPIPIC

SEQ ID NO: 133248 - DNA, 2223 bp, Amanita muscaria
  CDS (1)..(2223)
atgggtctcgataactccaagaacactgccaaattttttgacctaccaaaagccgtccatggtatgaatggtacaacccccgtcaatggttttaaagcgacagcgctttccaaggcctcccgaacaatgaccaagactagcgcactctcgcaattcttagaagcgtaccgtgaactcgagggctacaagaatggtagagccatcaaggttgacggtcaaacgttatctattgcagccgtcgctgcagctgctcgctacaatgcggccgttgagttggacgaatccccacttgttaaggagcgcgtgaggaaaagtcagcttgctatcgcaaacaaagtatcgaccggtgccagcgtatacggactgtcaactggtttcggtggcagtgctgatacacggacggacaaaccgatgttgttggggtttgcccttttgcaacaccaacatgtagggatactgcccacctcgactgagcctttggacgtcctacctctccaagatgcaaataacacaagcatgccagaggcgtggattcgcggggccattttgatccgtatgaattcgctaattcgtggccactctggaatcagatgggagttgatcgaaaagatgagagaactactcgcggccaatgtgatacctgtcgttcccctgagaggcagcatctcctcatccggagatctgtctcccctatcctatatcgcaggcacgattattggcaacccatcaatcaaggtatatcacggtccatcaaagtccggaattcgccaaattggatcctcgaaggatgtcttggctctgcataatatcgaacctttcccactggaatcgaaagaacctcttggtattttgaatgggaccgcattctcggcatctgtggcagctttagccctaaacgaagctatccatcttgtcttgttggctcaagtgtgcacggctatggggaccgaggcattgataggcactcgcgcttctcatgcaccgttcattcatgccaccgcacgaccacatcccggtcaagtagaatgtgctgagaacatttggaatttgctcgatgggagtaaattggctcagttagaagagcacgaagttcgcctagaagacgataaatacacccttcggcaggaccgttatccactccgaacttcgcctcaattccttgggcctcagattgaagacataatctccgctttccagactgtaacgcaggagtgtaattacttaccagctactgacaatccactgattgatggggagactggcgaatctcaccacggtggcaatttccaagcgatggctgtaactaatgcaatggagaagacgcgacttgctttacatcacgttggcaaattactattttcccagagcactgaattagtcaatcctgcgatgaaccgcggtctgccgccttcagtagctgccacagatccatctctcaactaccacgccaaaggactagacatagcaactgcggcctacgtagccgaagcgactcctggccccactcacattcagtcggcagaaatgcacaaccaagctgttaactccctggcgttgatttctgctcgggctaccatcacatcgttggaagtgctaacatctctgatcgcgtcttacttgtatattctatgccaagctctcgacctccgtgcccttcagcgcgagttcttgcccggtctagacatcatcattcgtgaggagttaagatcgtcatttggatctttcctgtcatcagaacagatggagaaattgcaacaaaatctaactagtgcatttgaagatcatcttgacaagaccacgacaatggataatactgatcgaatgactacgatggctgctacatcatcatcagttctacttcaattctttactgattctggcgcgtctgttcctccctcgtcttgcgatcttctctccagtgtctcgtccttccaatcttctgtggcgacacggtcttcagttctcatggatgacctacggaaagaatatatttttggagaccgtggccccacgcccgcaagccaatacatcggaaagacacggccagtataccaattcattagaacaactataggcgttcgtaagcatggttctgagaactacaacaagttttataatgggctgggtgtcgaagacgttaccatcggtcaaaatatatcacgcatatacgagtcaatccgggacggcaaaatgcaatccattattgtctcgttgtttgattag

SEQ ID NO: 133249 - protein, 740 aa, Amanita muscaria
MGLDNSKNTAKFFDLPKAVHGMNGTTPVNGFKATALSKASRTMTKTSALSQFLEAYRELEGYKNGRAIKVDGQTLSIAAVAAAARYNAAVELDESPLVKERVRKSQLAIANKVSTGASVYGLSTGFGGSADTRTDKPMLLGFALLQHQHVGILPTSTEPLDVLPLQDANNTSMPEAWIRGAILIRMNSLIRGHSGIRWELIEKMRELLAANVIPVVPLRGSISSSGDLSPLSYIAGTIIGNPSIKVYHGPSKSGIRQIGSSKDVLALHNIEPFPLESKEPLGILNGTAFSASVAALALNEAIHLVLLAQVCTAMGTEALIGTRASHAPFIHATARPHPGQVECAENIWNLLDGSKLAQLEEHEVRLEDDKYTLRQDRYPLRTSPQFLGPQIEDIISAFQTVTQECNYLPATDNPLIDGETGESHHGGNFQAMAVTNAMEKTRLALHHVGKLLFSQSTELVNPAMNRGLPPSVAATDPSLNYHAKGLDIATAAYVAEATPGPTHIQSAEMHNQAVNSLALISARATITSLEVLTSLIASYLYILCQALDLRALQREFLPGLDIIIREELRSSFGSFLSSEQMEKLQQNLTSAFEDHLDKTTTMDNTDRMTTMAATSSSVLLQFFTDSGASVPPSSCDLLSSVSSFQSSVATRSSVLMDDLRKEYIFGDRGPTPASQYIGKTRPVYQFIRTTIGVRKHGSENYNKFYNGLGVEDVTIGQNISRIYESIRDGKMQSIIVSLFD

SEQ ID NO: 133250 - DNA, 2112 bp, Bromheadia finlaysoniana
  CDS (1)..(2112)
atggaagtttcgaaggagaatgggctctgtcttcaggggcgcgacccacttaactggggcgcggcggcggcggagttgcagggcagtcatctcgacgaggtaaagaagatggtggaggagttccggcgaccggtggtgaagctcgagggggtgaagctgaagatatcgcaggtggcggcagtggctttcggcggcggcgcttctgccgtcgaacttgccgagtcggcgcgcgccggcgtcaaagctagtagtgattgggtgcttgagagcgtggacaagggaactgacagctatggtgtcactactggatttggggctacgtctcacagacggacgaagcagggaggcgccttgcagaaggagctaatcaaattcctgaacgccggaatattcggatctggcaattcgaacaccctcccctctgcagctacccgagcagcaatgcttgtccgcatcaacaccctcctccaaggctactccggcatccgattcgaaatcctgaaagctatcgccaccctccttaacaaaaacatcacaccttgcctccctctccgcggcaccatcaccgcctctggcgacctcgtccctctctcctacctcgccggaatcctcaccggccgtcccaattccaaagcccgcactcccaacggctccaccgtcgacgcgaccaccgccttccgtctcgctggcatctcctcaggtttcttcgaccttcagccaaaagaaggccttgcgctcgtcaacggcaccgccgtcggctccggcgtggcctccatagtcctctttgaaaccaacatcctcgccgtcatggcggagcttctctccgctctgttttgcgaggtgatgcaggggaagccagagttcaccgaccacctcacccataagctcaagcaccatccaggccaaatcgaggccgccgccgtcatggaacacatactcgaaggcagctcttacatgaaaatggccaaaaagctccatgaaatggatcctcttcagaaaccaaaacaagacagatacgctcttcgcacctcacctcaatggctcggacctcaaattgaagtaatcagagcagcaacaaaatctattgaaagagagatcaattctgtcaacgacaaccccctcatcgatgtctcaagaaacaaagctctccatggagggaatttccagggaactcccattggcgtctccatggacaacaccaggctcgccatcgccgcaatcggaaagctcatgttcgcccaattctcagagcttgttaacgatttttacaacaatggcttgccctccaatctctccagcgggcgaaacccgagcttggactacggcttcaaaggagcggagatagcaatggcttcctactgctctgagctccaggctcttgcgaatccggtgaccaaccatgtgcagagcgcagagcaacataaccaggatgtgaattccttgggactcatctcttcaagaaagacggcagaggcagtcgatatattgaagcttatgagcactactttcctggtcggtttgtgccaagctgtagacttgcggcatttggaggagaatttgaagaatgctgtgaagaacacagtgagtcaggtggctaagagggtcctcaccatgggagttaatggcgagctccatccctcgagattctgcgagaaagatttgatcaaagtgattgatagggagtatgtgttcgcttatgcagatgatccctgcagctcaacttatcctctgatgcagaagctgagggcagtgattgttgaacatgccttgaataatggagtcaaggagaaggattccaacacttcaatctttcaaaagatttcatcttttgaaaatgagctgaaagctgctttgccgaaggaggtggaggcagcgagagctgaatttgagaacggttcaccggcgatcgagaacaggattaaggactgcaggtcttatcctctctacaagtttgtgaaggaggttggctctggttttcttacaggtgagaaggtcgtttcgccgggggaagaatttgataaggttttcaatgcaatttgcgaggggaaggcgatcgatccgatgctcgattgcttgaaggagtggaatggagctcctttgccgatctgttag

SEQ ID NO: 133251 - protein, 703 aa, Bromheadia finlaysoniana
MEVSKENGLCLQGRDPLNWGAAAAELQGSHLDEVKKMVEEFRRPVVKLEGVKLKISQVAAVAFGGGASAVELAESARAGVKASSDWVLESVDKGTDSYGVTTGFGATSHRRTKQGGALQKELIKFLNAGIFGSGNSNTLPSAATRAAMLVRINTLLQGYSGIRFEILKAIATLLNKNITPCLPLRGTITASGDLVPLSYLAGILTGRPNSKARTPNGSTVDATTAFRLAGISSGFFDLQPKEGLALVNGTAVGSGVASIVLFETNILAVMAELLSALFCEVMQGKPEFTDHLTHKLKHHPGQIEAAAVMEHILEGSSYMKMAKKLHEMDPLQKPKQDRYALRTSPQWLGPQIEVIRAATKSIEREINSVNDNPLIDVSRNKALHGGNFQGTPIGVSMDNTRLAIAAIGKLMFAQFSELVNDFYNNGLPSNLSSGRNPSLDYGFKGAEIAMASYCSELQALANPVTNHVQSAEQHNQDVNSLGLISSRKTAEAVDILKLMSTTFLVGLCQAVDLRHLEENLKNAVKNTVSQVAKRVLTMGVNGELHPSRFCEKDLIKVIDREYVFAYADDPCSSTYPLMQKLRAVIVEHALNNGVKEKDSNTSIFQKISSFENELKAALPKEVEAARAEFENGSPAIENRIKDCRSYPLYKFVKEVGSGFLTGEKVVSPGEEFDKVFNAICEGKAIDPMLDCLKEWNGAPLPIC

SEQ ID NO: 133252 - DNA, 2145 bp, Camellia sinensis
  CDS (1)..(2145)
atggatagtaccaccgccattggaaacggtgtcgggagtggcggttcaccgggtttttgtctgaaagaccctttgaattggggagtggcggcggaggcaatgaaggggagtcatttggaggaagtgaagggcatggtggaggagtttcggaagccagtggtgaggctgggaggggagactttgacgatatcgcaggtggcggcgatcgcggtgaggggtagtgaggtggcggtggagctgtcggagtctgcgagggagggagtgaaggccagtagtgattgggttatggagagtatgaataaagggacagatagttatggtgttactactggttttggtgctacttcacataggaggaccaaagaaggtggtgctcttcaaaaggagcttattaggttcttgaatgctggaatatttggcaatggaacagagtcatgtcacacattgccacaatcagccacaagggcagctatgcttgtaaggatcaacaccctcctccaaggatactccggcattaggttcgaaattttggaagccatttccaaattcctcaacaacaacatcactccatgcctgccgttacgcggcactatcaccgcctccggtgacctagtccccctatcttacattgccgggcttttgacaggccggcacaattcgaaggcggtcgggcctactggagaaatcctccaccccaaggaagccttccgtctagctggagttgagggcgggttttttgagttgcaacccaaggaaggccttgcgcttgtcaacggcacagctgttggttccggcttggcttctatggttcttttcgaggctaacatactcgccgtgttatcagaagttttgtcagcgattttcgctgaagttatgcaaggcaagcccgagttcaccgaccatttgacacacaaattgaagcaccaccctggccaaattgaagctgctgccattatggaacacattttggatggtagctcttatgtcaaggcagcccaaaaactacatgaaatggatccattgcaaaaaccaaaacaggacagatatgcccttagaacatctcctcaatggctaggaccactaattgaagtcatccgatcatcgacaaaatcaattgagagggagataaactcggtgaatgacaaccctttgatcaatgtttcaaggaacaaggccttacatggtggaaatttccaaggtaccccaatcggagtctccatggacaatacacgtctagctgttgcctcaatagggaagctcatgtttgcccaattctctgagcttgttaatgacttctacaacaatgggttaccatcaaatctttccgggggacgaaatccaagtttggattatggtttcaagggagccgagattgccatggctgcttattgctcagaactccaattccttgccaatcctgtaaccaaccatgtccaaagcgccgagcaacataaccaagatgtgaactctttaggcctaatctcttcaagaaagacagccgaggcagttgatatcttgaagctcatgtcctctacatatctagtagcactctgccaagccgtagatttgaggcattttgaggagaatttgaggaacactgtcaagagcacggtgagccaagtagcgaagcgcgttctaactatgggcgttaacggagagcttcacccttcaaggttttgtgaaaaggacttgctcagagtggtagaccgtgaatacatctttgcctacattgatgacccttgcagtgcaacctacccattgatgcaaaaactaaggcaagtacttgttgagcatgcattgaaaaatggtgaaagtgagaagaatttgagcacttcaatcttccaaaagattagggcttttgaggaggaaataaagacccttttgcctaaagaggtagagagtacaagagcagcaattgagaacgggaattcggctattccgaaccggattaaggaatgccggtcttatccactatacaagtttgtgagggaagaattgggaactgaattgttgaccggagagaaggtccggtcaccgggagaggagtttgacaaggtgttcaccgctctgtgcaagggagagatgattgatccattgatggattgtctcaaggagtggaatggtgctcctcttcctatctgttag

SEQ ID NO: 133253 - protein, 714 aa, Camellia sinensis
MDSTTAIGNGVGSGGSPGFCLKDPLNWGVAAEAMKGSHLEEVKGMVEEFRKPVVRLGGETLTISQVAAIAVRGSEVAVELSESAREGVKASSDWVMESMNKGTDSYGVTTGFGATSHRRTKEGGALQKELIRFLNAGIFGNGTESCHTLPQSATRAAMLVRINTLLQGYSGIRFEILEAISKFLNNNITPCLPLRGTITASGDLVPLSYIAGLLTGRHNSKAVGPTGEILHPKEAFRLAGVEGGFFELQPKEGLALVNGTAVGSGLASMVLFEANILAVLSEVLSAIFAEVMQGKPEFTDHLTHKLKHHPGQIEAAAIMEHILDGSSYVKAAQKLHEMDPLQKPKQDRYALRTSPQWLGPLIEVIRSSTKSIEREINSVNDNPLINVSRNKALHGGNFQGTPIGVSMDNTRLAVASIGKLMFAQFSELVNDFYNNGLPSNLSGGRNPSLDYGFKGAEIAMAAYCSELQFLANPVTNHVQSAEQHNQDVNSLGLISSRKTAEAVDILKLMSSTYLVALCQAVDLRHFEENLRNTVKSTVSQVAKRVLTMGVNGELHPSRFCEKDLLRVVDREYIFAYIDDPCSATYPLMQKLRQVLVEHALKNGESEKNLSTSIFQKIRAFEEEIKTLLPKEVESTRAAIENGNSAIPNRIKECRSYPLYKFVREELGTELLTGEKVRSPGEEFDKVFTALCKGEMIDPLMDCLKEWNGAPLPIC

SEQ ID NO: 133254 - DNA, 2169 bp, Citrus limon
  CDS (1)..(2169)
atggagttgtcacatgaaacttgcaatggcatcaagaatgataggaatggtggtacttcgtcattggggttgtgcacaggtactgaccctttgaactggaccgtggcagcggactcattgaaagggagtcaccttgatgaagtgaaacggatgattgacgagtacaggaggccggtggtgaagctcggcggcgagtccttgaccattggccaagtgactgctatcgcggcccacgactctggagtcaaggtggagctagcggaggccgcccgcgccggcgtcaaggccagcagcgattgggtgatggacagcatgatgaaagggactgatagctatggtgtcaccactggctttggtgcaacttctcaccggcgaaccaagcaaggtggtgctttgcaaaaggagctcattagattcttgaattctggaatttttggcaatggcactgaatcaagccacacattgcctcactcggcaacaagggcagcaatgctggtgagagtcaacaccttgttacaaggatactcaggcatcaggtttgagatcctggaaaccattaccaagttccttaaccataacatcaccccttgcttgccgctacgtggcacgatcaccgcgtcgggcgacctggtcccactctcgtacattgctgggcttttgacaggcaggcccaactcgaaggctgttgggtccaacggccaagttctcaaccccaccgaggccttcaacctagctggggtcactagtggattttttgaattgcagcctaaggaaggtcttgccctggtgaatggcacagcggttggctctggtttagctgccacggtactctttgaggctaacatattagccattatgtctgaagttttatctgcaatttttgcggaagtgatgaatgggaaacctgaatttacagaccacttgacacataagttgaagcaccatccgggacaaattgaagctgcagctattatggaacacattttggatggcagctcttatgttaaagcagcacaaaagttacatgaaaccgatcctcttcaaaagccaaagcaagacagatatgctcttcgaacatcgcctcaatggctaggtcctcagattgaagtgatcagggcagctaccaaaatgattgaaagagagattaactccgtgaatgacaatccattgatagatgtatcaaggaacaaggcgcttcatggaggcaatttccaggggaccccaattggtgtttccatggacaacacccgtctagccattgcttcaattggcaagctcatgtttgcacaattctctgagcttgtcaatgatttctacaacaacgggttgccttcaaatcttactgggggacgtaatccaagcttggattacggattcaagggtgccgaaattgcaatggcatcatactgttctgaactccaattcctcgccaatcctgtcaccaatcatgtccaaagtgctgagcaacacaaccaagatgtgaactccttaggcctcaattcttctaggaaaactgctgaagcagtagacatattgaagcttatgtcgtcaactttcttagttgctctatgccaagcgattgacttgaggcatctggaagagaacctcaagaacacagtgaagaacaccgtgagtcaagttgccaagagagtcttgaccatgggagtgaatggagagcttcacccttcaagattctgcgaaaaagacttgatcaaagttgtggacagagaatatgtctttgcatacattgatgatccttgcagtgcaagttcaccattgatgcagaagctgaggcaagtgcttgttgatcatgcgttggacaatggagacagagagaagaattcaaccacttcaatcttccaaaagattggagcctttgaggatgaactaaagacccttttgcctaaagaggtcgaaatcgccagaactgaacttgagagtggaaatgcagccattccaaacaggatcaaggaatgcaggtcctatccgttatacaaaattgtgagagaagatattggaacaagtttgttgactggcgaaaaggttcgatccccaggtgaagaattcgacaaagttttcacagcaatgtgtgaagggaagttgattgatcctatgcttgaatgcttgaaggagtggaatggtgctcctcttcccatttgccagaattaa

SEQ ID NO: 133255 - protein, 722 aa, Citrus limon
MELSHETCNGIKNDRNGGTSSLGLCTGTDPLNWTVAADSLKGSHLDEVKRMIDEYRRPVVKLGGESLTIGQVTAIAAHDSGVKVELAEAARAGVKASSDWVMDSMMKGTDSYGVTTGFGATSHRRTKQGGALQKELIRFLNSGIFGNGTESSHTLPHSATRAAMLVRVNTLLQGYSGIRFEILETITKFLNHNITPCLPLRGTITASGDLVPLSYIAGLLTGRPNSKAVGSNGQVLNPTEAFNLAGVTSGFFELQPKEGLALVNGTAVGSGLAATVLFEANILAIMSEVLSAIFAEVMNGKPEFTDHLTHKLKHHPGQIEAAAIMEHILDGSSYVKAAQKLHETDPLQKPKQDRYALRTSPQWLGPQIEVIRAATKMIEREINSVNDNPLIDVSRNKALHGGNFQGTPIGVSMDNTRLAIASIGKLMFAQFSELVNDFYNNGLPSNLTGGRNPSLDYGFKGAEIAMASYCSELQFLANPVTNHVQSAEQHNQDVNSLGLNSSRKTAEAVDILKLMSSTFLVALCQAIDLRHLEENLKNTVKNTVSQVAKRVLTMGVNGELHPSRFCEKDLIKVVDREYVFAYIDDPCSASSPLMQKLRQVLVDHALDNGDREKNSTTSIFQKIGAFEDELKTLLPKEVEIARTELESGNAAIPNRIKECRSYPLYKIVREDIGTSLLTGEKVRSPGEEFDKVFTAMCEGKLIDPMLECLKEWNGAPLPICQN

SEQ ID NO: 133256 - DNA, 2142 bp, Digitalis lanata
  CDS (1)..(2142)
atggcagctgttgttgagaacggtcaccacggcaacaacgggttctgcgtgaagcagaatgatcccttgaactgggtggcggcggcggaggagctgaaggggagccatctggatgaggtgaagcggatggtggaggagttcaggaagacagtggtgaagctcggcggcgagactctgacgatatctcaggtggcggcgatcgccgctagggacaatgaggtggccgtgcagctggcggagtcatcgcgtgctggggtgaaggccagcagtgattgggtgatggagagcatgaacaaagggactgacagctatggcgtcaccacgggatttggtgccacgtcacaccgcaggacgaaacaaggcggtgctcttcagaaggagcttattaggttcttgaacgccggaatattcggaaatgggacagaatctacgcacacactgccacattcagcaaccagagcagcaatgcttgtgagaattaacaccctcctccagggatactccggcatcagatttgaaatcttggaaaccatcaccaaattcctcaatcacaacatcaccccatgcttgcccctccgcgggaccataaccgcatcaggcgatctcgtgcccttatcctacatcgcaggcctcttaacgggtcggcccaactccaaggccgtggggcccaacggcgagtccctcaatgcggaacaagcattcaagcttgccggtgccaattccggattattcttcgagttgcagccgaaagaaggcctcgccctcgtgaacgggacagctgttgggtccggattggcctcaattgccctttatgaagcgaacatcctttccttgttggctgaagtgatgtccgccgtttttgcagaggtaatgaacggaaagcccgaattcactgatcacctgacgcacaagttgaagcatcacccgggccaaatagaggcagccgctataatggaacacattctcgatgggagttcctatgtaaaggccgctcaaaagatgcacgaaatggatcccttgcaaaaaccgaagcaagataggtacgctctccggacctctccccaatggcttgggcctcaaatcgaagttattcgtaccgcaacgaaaatgatcgagagggaaattaactctgtgaacgataaccccttaattgacgtctcgaggaacaaggcattacatggcggcaacttccaaggcactcctattggagtgtcaatggataattctcgattagctatcgcgtcgattgggaagctcatgtttgcgcaattttccgagctggtcaatgatttctacaataacgggttgccgtctaatctttcgggagggaggaacccaagtctggattatggtttcaaagggtccgaaattgccatggcgtcttattgttcggagctccaattcttggcgaatcctgtcacaaaccacgtgcagagcgcggaacaacacaaccaagatgtgaactcattgggtctcatctcttcgagaaaaacagtcgaagctttggatattttgaagctcatgtcatccacgtaccttgttgcactttgccaagccattgatttgaggcatttggaagagaatctcaggctctcagttaaaaacacaatcagtcaagtggcgaagagaactttaaccacgggtgtaaatggggagcttcatccctcgagattctgcgagttggatttgctccgagtggtggaccgtgaatatgtatttgcttatgttgatgatccttgcagcgcgacctacccattgatgcagaaattgaggcaagttctagtggagcatgcgttgaaaaatggcgaaaatgagaagaatgccagcacgtctatcttccaaaagatagaagccttcgaggctgaactgaaagcggtgttgcctaaggaagtcgagagtgccagagttgcccttgaggatggaaagccggccattgctaacaggataacggagtgccgatcttaccctttgtacaagttcatcagagaggaattgggtaccaacttcttgacgggagaaaaggttatgtctccaggggaggaatgtgacagggtgttcacggcaatgagcaaagggctgattgttgatccattgttgaagtgtcttgagggctggaatggtgcacctcttcctatctgctag

SEQ ID NO: 133257 - protein, 713 aa, Digitalis lanata
MAAVVENGHHGNNGFCVKQNDPLNWVAAAEELKGSHLDEVKRMVEEFRKTVVKLGGETLTISQVAAIAARDNEVAVQLAESSRAGVKASSDWVMESMNKGTDSYGVTTGFGATSHRRTKQGGALQKELIRFLNAGIFGNGTESTHTLPHSATRAAMLVRINTLLQGYSGIRFEILETITKFLNHNITPCLPLRGTITASGDLVPLSYIAGLLTGRPNSKAVGPNGESLNAEQAFKLAGANSGLFFELQPKEGLALVNGTAVGSGLASIALYEANILSLLAEVMSAVFAEVMNGKPEFTDHLTHKLKHHPGQIEAAAIMEHILDGSSYVKAAQKMHEMDPLQKPKQDRYALRTSPQWLGPQIEVIRTATKMIEREINSVNDNPLIDVSRNKALHGGNFQGTPIGVSMDNSRLAIASIGKLMFAQFSELVNDFYNNGLPSNLSGGRNPSLDYGFKGSEIAMASYCSELQFLANPVTNHVQSAEQHNQDVNSLGLISSRKTVEALDILKLMSSTYLVALCQAIDLRHLEENLRLSVKNTISQVAKRTLTTGVNGELHPSRFCELDLLRVVDREYVFAYVDDPCSATYPLMQKLRQVLVEHALKNGENEKNASTSIFQKIEAFEAELKAVLPKEVESARVALEDGKPAIANRITECRSYPLYKFIREELGTNFLTGEKVMSPGEECDRVFTAMSKGLIVDPLLKCLEGWNGAPLPIC

SEQ ID NO: 133258 - DNA, 2004 bp, Helianthus annuus
  CDS (1)..(2004)
atggagaacggtacacatgttaacggatccgctaacgggttttgcatcaaggacccgttgaattggggcgttgcggccgaagcgttgacaggtagtcatctggatgaggtgaagaagatggtgggtgagtttaggaagcctgtggtgaagttgggtggcgagactttgactgtgtctcaagtggctgggatctcggctgctggtgatggtaacatggtgaaggtggagctatccgaagcggctcgggccggtgtgaaggcgagtagcgattgggtgatggagagcatgaacaaagggactgatagttatggtgtcactactggatttggtgctacttctcataggaggactaagaatggtggtgctctacaaaaggagctcattagattcctgaacgccgggatattcggcaacggcacagaatctagccacacactaccacattccgccacaagagccgccatgttggtcagaatcaacaccctcctccagggatattccggcataagattcgaaatcttggaagccatcactaaattcctcaacaacaacatcaccccatgtttacccctccggggcacgatcaccgcctccggtgacctcgtcccgttgtcctacatcgcgggtctcctcaccggccgacccaactcaaaggcagttggcccggccggtgaagttctcaatgcggaatccgcattcgcccaagctggcgtagaaggcggattcttcgagttacagcccaaagaaggtctggcccttgtgaatggtaccgcggtggggtccgggatggcgtccatggtgttgtttgaagccaatgtacttgcattgttgtcggaagtgttgtccgcgattttcgcggaagttatgcaagggaagcccgagtttacggaccacttgacccacaaactcaagcaccacccgggacaaatagaggctgcagccatcatggagtacattttggatggaagtgactatgttaaagccgcgcaaaaggtccatgagatggacccgttacaaaaaccaaaacaagaccgttacgcgctccgcacgtcccctcaatggcttggaccacaaatcgaagtcattcggtccgccacaaaaatgattgaacgggagatcaactccgttaacgacaacccgctaatcgacgtgtcgagaaacaaagccttacacggtggcaactttcaaggaaccccaattggtgtgtcaatggacaacacacgtttggctattgcagctataggaaaagtcacgatcgcgcaattttccgagcttgtgaatgatttttataacaatgggttgccttcgcatttgtcgggtgggcgtaacccaagtttggattcagggtttaaaggtggggagatcgcgatggcttcttactgttcggagcttcagtttctagcaaatccggttacaaaccatgttcaaagcgcggagcaacataaccaagatgttaactctctagggttgatttccgcaaggaaaaccgcggaagcggttgatattttaaagctcatgtcatcgacttacttagtcgcgttatgccaatcgattgacttgaggcatttggaagagaacatgaagtcaaccgtgaagaacaccgtgagccaagtagcgaaaaaggtcctaaccatgggcgtaaacggcgagctccacccatcaagattttgtgaaaaggacttgcttcgtgtggttgaccgcgagtacgttttcgcctacgctgacgacccttgcctcaccacctacccattgatgcaaaagcttcgacaagtcctcgttgaccacgcgctaaacaatggcgaaaccgagaagaacgccaacacctcaatcttccaaaagattgctactttcgaagacgagttgaaggccattttgcctaaggaagttgagagtgttagagttgcattcgaaaatggtacaatgtcgattcccaacaggatcaaggcttgtcgatcatacccgttgtatcggtttgtgagggaggagcttggtggcgctacttga

SEQ ID NO: 133259 - protein, 667 aa, Helianthus annuus
MENGTHVNGSANGFCIKDPLNWGVAAEALTGSHLDEVKKMVGEFRKPVVKLGGETLTVSQVAGISAAGDGNMVKVELSEAARAGVKASSDWVMESMNKGTDSYGVTTGFGATSHRRTKNGGALQKELIRFLNAGIFGNGTESSHTLPHSATRAAMLVRINTLLQGYSGIRFEILEAITKFLNNNITPCLPLRGTITASGDLVPLSYIAGLLTGRPNSKAVGPAGEVLNAESAFAQAGVEGGFFELQPKEGLALVNGTAVGSGMASMVLFEANVLALLSEVLSAIFAEVMQGKPEFTDHLTHKLKHHPGQIEAAAIMEYILDGSDYVKAAQKVHEMDPLQKPKQDRYALRTSPQWLGPQIEVIRSATKMIEREINSVNDNPLIDVSRNKALHGGNFQGTPIGVSMDNTRLAIAAIGKVTIAQFSELVNDFYNNGLPSHLSGGRNPSLDSGFKGGEIAMASYCSELQFLANPVTNHVQSAEQHNQDVNSLGLISARKTAEAVDILKLMSSTYLVALCQSIDLRHLEENMKSTVKNTVSQVAKKVLTMGVNGELHPSRFCEKDLLRVVDREYVFAYADDPCLTTYPLMQKLRQVLVDHALNNGETEKNANTSIFQKIATFEDELKAILPKEVESVRVAFENGTMSIPNRIKACRSYPLYRFVREELGGAT

SEQ ID NO: 133260 - DNA, 2178 bp, Medicago sativa
  CDS (1)..(2178)
atggaaacaatatcagcagctatcacaaaaaacaatgccaatgaatcattctgcttgattcatgcaaagaataataataacatgaaagtgaatgaagctgatcctttgaattggggggtggcagctgaggcaatgaaaggcagtcaccttgatgaggtgaagcgtatggtggcagagtaccggaaaccggtggtccgtcttggtggcgagacactgacgatttctcaggtggctgccattgctgcacatgaccatggtgtgcaggtggacctgtctgaatctgctagggatggagttaaggccagcagtgaatgggtgatggagagtatgaacaaaggcacggacagttacggtgtcaccaccgggttcggcgccacctcgcacagccgtaccaaacaaggtggtgctttgcagaaagaactcatcaggtttttgaatgcaggaatattcggaaatggaacagagtcaaatcacacactaccaaaaacagcaacaagagcagccatgctagtgaggatcaacacactcctccaaggttattcaggaatagattttgaaatcttggaagccatcactaagccccttaacaaaaccgtcactccatgtttaccgcttcgtggtacaatcacagcttcaggtgatttagttcctctttcatacattgctggtttactcaccggaagaccaaattcaaaagctcatggaccatctggagaagtacttaatgcaaaagaagcttttaatttggctggaatcaatgctgagttctttgaattacaaccaaaagaaggtcttgcccttgttaacggaacagctgttggttccggtttagcttctattgttctctttgaggctaacattttggctgtgttgtctgaagttctatcagctatttttgctgaagttatgcaagggaaacctgaatttaccgatcatttgacacacaagttgaaacaccaccctggtcaaattgaggctgctgcgattatggaacacattttggacggcagctcttatgtcaaagcagctaagaagttgcatgagatagatcctttgcagaagccaaaacaagatagatatgcacttagaacttcaccacaatggcttggtcctttggttgaagtgattagattctctaccaagtcaattgagagagagatcaactctgtcaatgacaaccctttgattgatgtttcaagaaacaaagctttgcacggcggaaactttcaaggaacacctattggagtatccatggataatacacgtttggctctcgcatcaattggcaaacttatgtttgctcaattctctgagcttgttaatgacttttacaacaatggattgccttcaaatctttctgctagtagaaatcctagcttggattatggtttcaagggagctgaaattgccatggcttcctattgttctgagttgcaatatcttgcaaatccggttacaacccacgtccaaagtgctgagcagcacaaccaagatgtgaactctttgggtttgatttctgctagaaaaacaaatgaagccattgagatccttcagctcatgtcttccaccttcttgattgcactatgccaagcaattgatttaagacatttggaggagaacttgaaaaactcagtcaagaacaccgtaagtcaagttgccaaaaagactcttaccatgggtgtcaatggagaacttcacccttcaagattctgcgaaaaagacttgttgaaagtggttgacagggagcatgtatttgcttatattgatgatccttgtagcgctacatacccgttgagtcaaaaactaaggcaagtgttggtagatcatgcactagtaaatggagagagtgagaagaattttaacacttcaatctttcaaaagattgctacttttgaggaagagttgaagaccctcttgccaaaagaggttgaaagtgcaaggaccgcatatgagagtggaaacccaacaatcccaaacaagatcaatggatgcagatcttatccactttacaagtttgtgagagaggagctaggaactggtttactaaccggagaaaatgtcatttcaccaggagaagagtgtgacaaactattttcagctatgtgtcagggaaaaatcatcgatcctcttcttgaatgtttgggagagtggaacggtgctccccttcctatttgttaa

SEQ ID NO: 133261 - protein, 725 aa, Medicago sativa
METISAAITKNNANESFCLIHAKNNNNMKVNEADPLNWGVAAEAMKGSHLDEVKRMVAEYRKPVVRLGGETLTISQVAAIAAHDHGVQVDLSESARDGVKASSEWVMESMNKGTDSYGVTTGFGATSHSRTKQGGALQKELIRFLNAGIFGNGTESNHTLPKTATRAAMLVRINTLLQGYSGIDFEILEAITKPLNKTVTPCLPLRGTITASGDLVPLSYIAGLLTGRPNSKAHGPSGEVLNAKEAFNLAGINAEFFELQPKEGLALVNGTAVGSGLASIVLFEANILAVLSEVLSAIFAEVMQGKPEFTDHLTHKLKHHPGQIEAAAIMEHILDGSSYVKAAKKLHEIDPLQKPKQDRYALRTSPQWLGPLVEVIRFSTKSIEREINSVNDNPLIDVSRNKALHGGNFQGTPIGVSMDNTRLALASIGKLMFAQFSELVNDFYNNGLPSNLSASRNPSLDYGFKGAEIAMASYCSELQYLANPVTTHVQSAEQHNQDVNSLGLISARKTNEAIEILQLMSSTFLIALCQAIDLRHLEENLKNSVKNTVSQVAKKTLTMGVNGELHPSRFCEKDLLKVVDREHVFAYIDDPCSATYPLSQKLRQVLVDHALVNGESEKNFNTSIFQKIATFEEELKTLLPKEVESARTAYESGNPTIPNKINGCRSYPLYKFVREELGTGLLTGENVISPGEECDKLFSAMCQGKIIDPLLECLGEWNGAPLPIC

SEQ ID NO: 133262 - DNA, 2265 bp, Pinus taeda
  CDS (1)..(2265)
atggtagcagcagcagaaataacgcaggcgaatgaagttcaagttaaaagcactgggctgtgcacggacttcggctcgtctggcagcgatccactgaactgggttcgagcagccaaggccatggaaggaagtcactttgaagaagtgaaagcgatggtggattcgtatttcggagccaaggagatttccattgaagggaaatctctgacaatctcagacgttgctgccgttgctcgaagatcgcaagtgaaagtgaaattggatgctgcggctgccaaatctagggtcgaggagagttcaaactgggttctcacccagatgaccaaggggacggatacctatggtgtcactactggtttcggagccacttctcacaggagaacaaaccagggagccgagcttcagaaggagctgatccgcttcttgaatgccggagttcttggcaaatgcccagaaaatgttttgtccgaagatactacccgggctgccatgctggttcggacgaatactctgctgcagggctactcgggcgtaaggtgggacattcttgaaactgtggagaagctgttgaatgcgtggctgaccccaaagctgcccttaagaggaaccataactgcttctggtgatctggttcccctgtcttatattgctgggctcttgaccgggaggcctaattccagagtcagatccagagatggaattgaaatgagcggagccgaagcgctcaagaaagtgggcctggaaaagccctttgaattgcagcctaaagaaggtctagccattgtcaatggcacttcagtgggagcagcactggcttccattgtgtgtttcgatgccaatgttcttgctctgctctctgaagtaatctctgccatgttctgcgaggttatgaatgggaagcctgagtttacagatccattaactcacaagctgaagcaccatcctgggcaaatggaagctgcagcgatcatggagtatgtcttggacgggagttcttatatgaaacacgctgctaagctccatgagatgaatcctctgcagaagccaaagcaggatcgctatggccttcgcacttcgcctcagtggctcggccctcaggtggagattatcagatctgcaactcacatgattgagcgggaaatcaattctgtgaatgacaatccagtaattgatgttgccagagacaaagctctacatggagggaatttccagggcacacctattggtgtttccatggataatcttcgtctgtcaatttcagcaattgggaaattgatgttcgctcaattctcagagcttgtgaatgattactacaatggaggcttgccttcgaatctaagtggcgggcctaatcccagcctggattatggactgaaaggggccgagatcgctatggcttcttacacttctgagcttctttacctggcaaatcctgtcaccagccatgtacagagcgccgaacagcataaccaggatgtcaattctctgggtctcgtttcagctagaaaatctgccgaggccatcgatattctgaagctgatgctctccacatacctgacagctctgtgccaggctgtggatttaaggcatctggaggaaaacatgctggccactgtgaagcagattgtttctcaggtagccaagaaaaccctgagcacagggctcaacggggagcttttgccaggccgtttctgcgaaaaggatttgctccaggtagtggataacgagcatgttttctcttacattgacgatccgtgcaatgccagctacccattgactcagaaactgagaaacatcctggtggaacatgccttcaagaacgcagaaggtgagaaggatcccaacacttccattttcaataagattcctgtgtttgaagccgagctgaaggcacagcttgaaccgcaagttagtctggccagagaaagttatgacaaagggaccagccctctgcccgacaggatccaggaatgcaggtcttatcctctctatgaatttgtgagaaaccagctcggtaccaagcttctgtctggaactcgtaccatttcccctggtgaagtgattgaagtggtttacgacgctatcagtgaggacaaggtcatagtccctctcttcaaatgcttggatgggtggaaaggaactctggcccattctgaaataaataatcttccaagatcgcctttatacaacgactgctatgatttgagtcctcggatgcttttgttgatgctgttgttttccgatccggaatttgattggtcataa

SEQ ID NO: 133263 - protein, 754 aa, Pinus taeda
MVAAAEITQANEVQVKSTGLCTDFGSSGSDPLNWVRAAKAMEGSHFEEVKAMVDSYFGAKEISIEGKSLTISDVAAVARRSQVKVKLDAAAAKSRVEESSNWVLTQMTKGTDTYGVTTGFGATSHRRTNQGAELQKELIRFLNAGVLGKCPENVLSEDTTRAAMLVRTNTLLQGYSGVRWDILETVEKLLNAWLTPKLPLRGTITASGDLVPLSYIAGLLTGRPNSRVRSRDGIEMSGAEALKKVGLEKPFELQPKEGLAIVNGTSVGAALASIVCFDANVLALLSEVISAMFCEVMNGKPEFTDPLTHKLKHHPGQMEAAAIMEYVLDGSSYMKHAAKLHEMNPLQKPKQDRYGLRTSPQWLGPQVEIIRSATHMIEREINSVNDNPVIDVARDKALHGGNFQGTPIGVSMDNLRLSISAIGKLMFAQFSELVNDYYNGGLPSNLSGGPNPSLDYGLKGAEIAMASYTSELLYLANPVTSHVQSAEQHNQDVNSLGLVSARKSAEAIDILKLMLSTYLTALCQAVDLRHLEENMLATVKQIVSQVAKKTLSTGLNGELLPGRFCEKDLLQVVDNEHVFSYIDDPCNASYPLTQKLRNILVEHAFKNAEGEKDPNTSIFNKIPVFEAELKAQLEPQVSLARESYDKGTSPLPDRIQECRSYPLYEFVRNQLGTKLLSGTRTISPGEVIEVVYDAISEDKVIVPLFKCLDGWKGTLAHSEINNLPRSPLYNDCYDLSPRMLLLMLLFSDPEFDWS

SEQ ID NO: 133264 - DNA, 2148 bp, Populus trichocarpa
  CDS (1)..(2148)
atggagacagtcaccaagaatggctaccaaaatggttctttggagagtttgtgcgtcaaccaacgtgatccactcagctggggagttgctgccgaggcaatgaaaggaagccacttagatgaagtcaaacgtatggtggctgattataggaagcctgttgtcaagcttggaggtgagaccctgaccattgctcaggttgcatccattgctggtcatgatactggtgatgtcaaggtggagctttctgagtctgcaaggcctggtgtcaaggctagcagtgactgggtcatggatagcatggacaagggaactgatagttatggcgttactactggttttggtgccacttctcacagaagaaccaaacaaggcggtgctcttcagaaggaacttattagattcttgaatgctgggatctttggcaatggaacggaaacatgccacacactgcctcactcagcaactagagcagcaatgcttgtcagaatcaacactctcctccaaggttactctggcatcagatttgaaatcttggaagctattaccaggctcctcaataacaacatcactccatgcttgccactacgaggcacaatcactgcttcaggtgatttagttccactatcctacattgctggattactgactggcaggcccaattccaaggccactggtcccaccggagaagtgctagatgctgctgaagcctttaaagcagctggcattgaatctggattctttgagttgcagcctaaagaaggccttgctctagttaatggaactgcagttggctctggcttggcttctatggttcttttcgagaccaacgttcttgctgtcttatcggaactcttgtcagcaatttttgctgaggttatgaatggtaaacctgaattcactgaccatttgacacacaaattgaagcaccatccaggtcaaattgaggctgcagctataatggagcacattttagatggcagcgcttacatgaaggcagctaagaagttgcatgaaacggaccccctgcagaaaccaaagcaggatcgctatgctctaaggacttcaccccaatggcttggtccccagattgaagtaatccgattctcgaccaagtcaattgaaagagagattaattcagtgaacgacaaccctctaattgatgtttcaaggaacaaggctatacatggtggtaacttccagggaactccaattggagtctcaatggataatgtacgtttggctattgcatcaataggcaagctgctatttgctcagttcagtgagctcgtaaatgatttctacaacaatggattgccatcgaatctcactgctagcaggaatccaagtttggattatggcttcaagggagctgaaatagcaatggcctcctactgttctgagcttcagtatctcgccaatccagtcaccacccatgtgcaaagtgccgagcagcacaatcaagatgttaactcgttggggcttatctcttcaagaaagacagcagaagctgtcgatatcttgaagctcatgtccacaaccttcttagtggctctttgccaagctatcgacttgaggcacttggaagagaacttgaagagcgcagtcaagaacacagttagtcaagtatccaagagggttttaactacaggtgccaatggagaacttcacccatcaaggttctgtgagaaggagttgctcaaggtggttgatcgtgaatatgtctttgcctatgtggatgacccctgcagtgctacctatccattgatgcagaaactaaggcaagtttttgttgaccatgcgttggaaaatggagagaatgagaagaattttagcacttcagtcttccaaaagattgaagctttcgaggaagaactgaaggctcttttgccaaaagaagttgagagcgcaagagcagcatatgatagtgggaattcagcaattgacaacaagatcaaggagtgtaggtcttatccactgtacaagtttgtgagggaggagttgggaactgtattgctcactggcgaaaaggtccaatcgcccggcgaggagttcgacaaggtgtttacagctatgtgccaggggaagatcattgaccccatgctggagtgccttggggaatggaatggttcccctcttcctatctgttaa

SEQ ID NO: 133265 - protein, 715 aa, Populus trichocarpa
METVTKNGYQNGSLESLCVNQRDPLSWGVAAEAMKGSHLDEVKRMVADYRKPVVKLGGETLTIAQVASIAGHDTGDVKVELSESARPGVKASSDWVMDSMDKGTDSYGVTTGFGATSHRRTKQGGALQKELIRFLNAGIFGNGTETCHTLPHSATRAAMLVRINTLLQGYSGIRFEILEAITRLLNNNITPCLPLRGTITASGDLVPLSYIAGLLTGRPNSKATGPTGEVLDAAEAFKAAGIESGFFELQPKEGLALVNGTAVGSGLASMVLFETNVLAVLSELLSAIFAEVMNGKPEFTDHLTHKLKHHPGQIEAAAIMEHILDGSAYMKAAKKLHETDPLQKPKQDRYALRTSPQWLGPQIEVIRFSTKSIEREINSVNDNPLIDVSRNKAIHGGNFQGTPIGVSMDNVRLAIASIGKLLFAQFSELVNDFYNNGLPSNLTASRNPSLDYGFKGAEIAMASYCSELQYLANPVTTHVQSAEQHNQDVNSLGLISSRKTAEAVDILKLMSTTFLVALCQAIDLRHLEENLKSAVKNTVSQVSKRVLTTGANGELHPSRFCEKELLKVVDREYVFAYVDDPCSATYPLMQKLRQVFVDHALENGENEKNFSTSVFQKIEAFEEELKALLPKEVESARAAYDSGNSAIDNKIKECRSYPLYKFVREELGTVLLTGEKVQSPGEEFDKVFTAMCQGKIIDPMLECLGEWNGSPLPIC

SEQ ID NO: 133266 - DNA, 2142 bp, Rhodotorula rubra
  CDS (1)..(2142)
atggccccctccgtcgactcgatcgcgacttcggttgccaactccctctcgaacgggttgcacgccgccgccgccgccaacggtggcgacgtccacaagaagacggccggtgctggctccctcctcccgaccaccgagacgacccagctcgacatcgttgagcgcatcttggccgacgccggcgcgacggaccagatcaaactcgatgggtacaccctcacgctcggcgacgtcgtcggcgctgctcgccgtggccgctccgtcaaggtcgcagacagcccgcacatccgcgagaagatcgatgccagtgtcgagttcctccgtactcagctcgacaacagtgtctacggtgtcacgactggtttcggcggctcggccgacacccggactgaggatgcgatctcgctccaaaaggccctgctcgagcaccagctctgcggtgtcctccccacctcgatggatggctttgcgctcggtcgcggcctcgagaactcgcttccgctcgaagtcgtccgaggcgcgatgaccatccgtgtcaactcgctcactcgcggtcactcggcggtccgcatcgtcgtcctcgaagccctcaccaacttcctcaaccacggcatcaccccgatcgtcccgcttcgaggcaccatctcggcgtcgggcgacctttcccccctctcttacatcgccgcctcgatcaccggccacccggactcgaaggtccacgtcgacggcaagatcatgtccgcccaggaggcgatcgcgctcaagggtcttcagcccgtcgtcctcggtccgaaggagggtctcggtctcgtcaacggcacggccgtctccgcctcgatggcgacgctggccctcaccgacgcacacgtcctctcgctcctcgcacaggcgctcactgctcttactgtcgaggccatggtcggacacgccggctcgttccacccattcctccacgacgtcacgcgccctcacccgacccagatcgaggtggcgcgcaacatccggactcttctcgagggcagcaagtacgccgtccaccacgagactgaagtcaaggtcaaggacgacgagggcatcctcaggcaggaccggtacccgctccgctgctcgccgcagtggctcggtccccttgtcagcgacatgattcacgctcacgctgtcctctcgctcgaggctggtcagtcgaccaccgacaacccgctgatcgacctcgagaacaagatgacccaccatggcggagccttcatggcgagcagcgtcggaaacacgatggagaagactcgcctcgccgtcgcgctgatgggcaaggtcagctttactcagctcaccgagatgctcaacgccggcatgaaccgggcccttccgtcctgcctcgctgccgaggacccttccctctcttatcactgcaagggtctcgacattgctgcggccgcctacacttccgagctcggtcaccttgccaacccggtttcgacccacgtccagccggccgagatgggcaaccaggccatcaactcgctcgccctcatctcggcccgccgcaccgccgaggcgaacgacgttctctccctcctcctcgccacccacctctactgcgtcctccaggccgtcgacctccgcgcgatggagtttgagcacaccaaggcgttcgagccgatggtcactgagctgttgaagcagcactttggcgcgctcgcgacggccgaagtcgaggacaaggtccgcaagtcgatctacaagcggttgcagcagaacaactcgtacgacctcgagcagcggtggcacgacacgttctcggtcgcgaccggtgccgtcgtcgaggcgctcgccggccaggaggtctcgctcgcgagcctcaacgcctggaaggtcgcctgcgccgagaaggctatcgcgctcacgcgctccgtccgcgactcgttctgggcggctccgtcgtcgtcgtcgcccgcgctcaagtacctctccccgcggacgcgcgtcctgtattcgttcgtccgggaggaggtcggcgtcaaggcccgccgcggcgatgtctacctcggcaagcaggaggtcacgatcggcaccaacgtcagccgcatctacgaggcgatcaagagcggttgcatcgcccccgtcctcgtcaagatgatggcatag

SEQ ID NO: 133267 - protein, 713 aa, Rhodotorula rubra
MAPSVDSIATSVANSLSNGLHAAAAANGGDVHKKTAGAGSLLPTTETTQLDIVERILADAGATDQIKLDGYTLTLGDVVGAARRGRSVKVADSPHIREKIDASVEFLRTQLDNSVYGVTTGFGGSADTRTEDAISLQKALLEHQLCGVLPTSMDGFALGRGLENSLPLEVVRGAMTIRVNSLTRGHSAVRIVVLEALTNFLNHGITPIVPLRGTISASGDLSPLSYIAASITGHPDSKVHVDGKIMSAQEAIALKGLQPVVLGPKEGLGLVNGTAVSASMATLALTDAHVLSLLAQALTALTVEAMVGHAGSFHPFLHDVTRPHPTQIEVARNIRTLLEGSKYAVHHETEVKVKDDEGILRQDRYPLRCSPQWLGPLVSDMIHAHAVLSLEAGQSTTDNPLIDLENKMTHHGGAFMASSVGNTMEKTRLAVALMGKVSFTQLTEMLNAGMNRALPSCLAAEDPSLSYHCKGLDIAAAAYTSELGHLANPVSTHVQPAEMGNQAINSLALISARRTAEANDVLSLLLATHLYCVLQAVDLRAMEFEHTKAFEPMVTELLKQHFGALATAEVEDKVRKSIYKRLQQNNSYDLEQRWHDTFSVATGAVVEALAGQEVSLASLNAWKVACAEKAIALTRSVRDSFWAAPSSSSPALKYLSPRTRVLYSFVREEVGVKARRGDVYLGKQEVTIGTNVSRIYEAIKSGCIAPVLVKMMA

SEQ ID NO: 133268 - DNA, 2151 bp, Rhodosporidium toruloides
  CDS (1)..(2151)
atggcaccctcgctcgactcgatctcgcactcgttcgcaaacggcgtcgcatccgcaaagcaggctgtcaatggcgcctcgaccaacctcgcagtcgcaggctcgcacctgcccacaacccaggtcacgcaggtcgacatcgtcgagaagatgctcgccgcgccgaccgactcgacgctcgaactcgacggctactcgctcaacctcggagacgtcgtctcggccgcgaggaagggcaggcctgtccgcgtcaaggacagcgacgagatccgctcaaagattgacaaatcggtcgagttcttgcgctcgcaactctccatgagcgtctacggcgtcacgactggatttggcggatccgcagacacccgcaccgaggacgccatctcgctccagaaggctctcctcgagcaccagctctgcggtgttctcccttcgtcgttcgactcgttccgcctcggccgcggtctcgagaactcgcttcccctcgaggttgttcgcggcgccatgacaatccgcgtcaacagcttgacccgcggccactcggctgtccgcctcgtcgtcctcgaggcgctcaccaacttcctcaaccacggcatcacccccatcgtccccctccgcggcaccatctctgcgtcgggcgacctctctcctctctcctacattgcagcggccatcagcggtcacccggacagcaaggtgcacgtcgtccacgagggcaaggagaagatcctgtacgcccgcgaggcgatggcgctcttcaacctcgagcccgtcgtcctcggcccgaaggaaggtctcggtctcgtcaacggcaccgccgtctcagcatcgatggccaccctcgctctgcacgacgcacacatgctctcgctcctctcgcagtcgctcacggccatgacggtcgaagcgatggtcggccacgccggctcgttccaccccttccttcacgacgtcacgcgccctcacccgacgcagatcgaagtcgcgggaaacatccgcaagctcctcgagggaagccgctttgctgtccaccatgaggaggaggtcaaggtcaaggacgacgagggcattctccgccaggaccgctaccccttgcgcacgtctcctcagtggctcggcccgctcgtcagcgacctcattcacgcccacgccgtcctcaccatcgaggccggccagtcgacgaccgacaaccctctcatcgacgtcgagaacaagacttcgcaccacggcggcaatttccaggctgccgctgtggccaacaccatggagaagactcgcctcgggctcgcccagatcggcaagctcaacttcacgcagctcaccgagatgctcaacgccggcatgaaccgcggcctcccctcctgcctcgcggccgaagacccctcgctctcctaccactgcaagggcctcgacatcgccgctgcggcgtacacctcggagttgggacacctcgccaaccctgtgacgacgcatgtccagccggctgagatggcgaaccaggcggtcaactcgcttgcgctcatctcggctcgtcgcacgaccgagtccaacgacgtcctttctctcctcctcgccacccacctctactgcgttctccaagccatcgacttgcgcgcgatcgagttcgagttcaagaagcagttcggcccagccatcgtctcgctcatcgaccagcactttggctccgccatgaccggctcgaacctgcgcgacgagctcgtcgagaaggtgaacaagacgctcgccaagcgcctcgagcagaccaactcgtacgacctcgtcccgcgctggcacgacgccttctccttcgccgccggcaccgtcgtcgaggtcctctcgtcgacgtcgctctcgctcgccgccgtcaacgcctggaaggtcgccgccgccgagtcggccatctcgctcacccgccaagtccgcgagaccttctggtccgccgcgtcgacctcgtcgcccgcgctctcgtacctctcgccgcgcactcagatcctctacgccttcgtccgcgaggagcttggcgtcaaggcccgccgcggagacgtcttcctcggcaagcaagaggtgacgatcggctcgaacgtctccaagatctacgaggccatcaagtcgggcaggatcaacaacgtcctcctcaagatgctcgcttag

SEQ ID NO: 133269 - protein, 716 aa, Rhodosporidium toruloides
MAPSLDSISHSFANGVASAKQAVNGASTNLAVAGSHLPTTQVTQVDIVEKMLAAPTDSTLELDGYSLNLGDVVSAARKGRPVRVKDSDEIRSKIDKSVEFLRSQLSMSVYGVTTGFGGSADTRTEDAISLQKALLEHQLCGVLPSSFDSFRLGRGLENSLPLEVVRGAMTIRVNSLTRGHSAVRLVVLEALTNFLNHGITPIVPLRGTISASGDLSPLSYIAAAISGHPDSKVHVVHEGKEKILYAREAMALFNLEPVVLGPKEGLGLVNGTAVSASMATLALHDAHMLSLLSQSLTAMTVEAMVGHAGSFHPFLHDVTRPHPTQIEVAGNIRKLLEGSRFAVHHEEEVKVKDDEGILRQDRYPLRTSPQWLGPLVSDLIHAHAVLTIEAGQSTTDNPLIDVENKTSHHGGNFQAAAVANTMEKTRLGLAQIGKLNFTQLTEMLNAGMNRGLPSCLAAEDPSLSYHCKGLDIAAAAYTSELGHLANPVTTHVQPAEMANQAVNSLALISARRTTESNDVLSLLLATHLYCVLQAIDLRAIEFEFKKQFGPAIVSLIDQHFGSAMTGSNLRDELVEKVNKTLAKRLEQTNSYDLVPRWHDAFSFAAGTVVEVLSSTSLSLAAVNAWKVAAAESAISLTRQVRETFWSAASTSSPALSYLSPRTQILYAFVREELGVKARRGDVFLGKQEVTIGSNVSKIYEAIKSGRINNVLLKMLA

SEQ ID NO: 133270 - DNA, 2148 bp, Stylosanthes humilis
  CDS (1)..(2148)
atggacactcacgctaacgctgatgccaccttctgcctcactgccaataatggacaacagccacgtcacgacccattgaactgggccgcggcagcagaggccctcaagggtagccacttggacgaggtcaagaggatggtctccgagtaccgcaagccgctagttaaccttggtggccagactttaactatatctcaggtggccgccattgctgctaacgaccaaggcgtctccgttcagctctctgaggcttccagggctggagttaaggctagcagtgattgggtcatggatagcatgaacaatggtaccgacagctatggtgtcaccaccggctttggcgccacttctcaccgcagaaccaaacagggcggtgccttgcagaaagagctcattaggttcttgaatgctggaatatttggcaatggtacagagacaaattgcacattgccacacacagctactagagcagcaatgctagtgaggatcaacacactcctccaaggctactcaggaatcagatttgagatcttggaagccataaccaagcttctcaacaacaacattacaccctgtttgccacttaggggaacaatcacagcctctggtgaccttgttccattatcatatattgctggtttgttaaccggcagaccaaattccaaggctgttggacccaatggagagacccttaatgcaaaagaagcattccaagccgccggaatcggatccgacttctttgagttgcaacctaaagaaggccttgcactggtgaatggcactcctgttggttctggactggcctcagttgttctatttgaggccaacatcctagctgtgttgtcggaggttctttcggcgatattcgcggaggtgatgcaggggaagccagagttcactgaccatttgacacacaaattgaagcaccaccctggccaaattgaggctgcagccatcatggaacacattttggatggtagctcatatgtgaaagccgccaagaagttgcacgagatcgatccgttgcaaaagcctaaacaggaccgatatgcacttaggacttctcctcaatggcttggccctttggttgaagtgattagattctcaaccaaatcaattgagagggaaattaactctgttaatgacaaccctttgattgatgtgtcaaggaacaaggccttgcatggtggtaactttcaaggtactccaattggtgtgtctatggataacacaagattggccgttgcatcaattgggaaactcatgtttgctcaattctctgagcttgtcaatgatttctacaacaatggcttgccttcaaatctaagtgctagtaggaaccccagcttggattatggcttcaagggcactgaaatcgccatggcctcttactgttccgagctgcaatatcttgcaaacccggtgactagccatgtccagagtgctgagcagcataaccaagatgtgaactctcttggtttgatttcagctaggaaaacaaatgaagctgttgagattctcaaactcatgtcacccacctacttgatcgcactttgccaagccattgatttgaggcatctggaggagaatttgaagaacactgtgaagaacactgtgagccaagttgccaagaggacactgaccaccggcgtcaacggcgaactccacccatcgagattctgtgagaaggatcttctcaagattgttgatagggagtattgctttgcatacattgatgatccttgcagtgctacgtaccctttgatgcagaagctaaggcaagttttggtggaacatgcacttgcaaatgctgaaaatgagaagaatgtgaacacctcaatcttccagaaaattacaacctttgaggaagaattgaagacccttttgcctaaagaagttgagggtgcaagaattgcatatgagaatggacaaagtgcgataccaaacaagatcaaggaatgcaggtcctatccattgtacaagttcgtgagggaagagttgggaactgagatgctaaccggtgagaaggttaggtcccctggtgaagaatgtgacaaattgttcacggcaatgtgccaaggcaagatcattgatcctcttcttgagtgcattggagagtggaatggtgctcctcttccattatgttag

SEQ ID NO: 133271 - protein, 715 aa, Stylosanthes humilis
MDTHANADATFCLTANNGQQPRHDPLNWAAAAEALKGSHLDEVKRMVSEYRKPLVNLGGQTLTISQVAAIAANDQGVSVQLSEASRAGVKASSDWVMDSMNNGTDSYGVTTGFGATSHRRTKQGGALQKELIRFLNAGIFGNGTETNCTLPHTATRAAMLVRINTLLQGYSGIRFEILEAITKLLNNNITPCLPLRGTITASGDLVPLSYIAGLLTGRPNSKAVGPNGETLNAKEAFQAAGIGSDFFELQPKEGLALVNGTPVGSGLASVVLFEANILAVLSEVLSAIFAEVMQGKPEFTDHLTHKLKHHPGQIEAAAIMEHILDGSSYVKAAKKLHEIDPLQKPKQDRYALRTSPQWLGPLVEVIRFSTKSIEREINSVNDNPLIDVSRNKALHGGNFQGTPIGVSMDNTRLAVASIGKLMFAQFSELVNDFYNNGLPSNLSASRNPSLDYGFKGTEIAMASYCSELQYLANPVTSHVQSAEQHNQDVNSLGLISARKTNEAVEILKLMSPTYLIALCQAIDLRHLEENLKNTVKNTVSQVAKRTLTTGVNGELHPSRFCEKDLLKIVDREYCFAYIDDPCSATYPLMQKLRQVLVEHALANAENEKNVNTSIFQKITTFEEELKTLLPKEVEGARIAYENGQSAIPNKIKECRSYPLYKFVREELGTEMLTGEKVRSPGEECDKLFTAMCQGKIIDPLLECIGEWNGAPLPLC

SEQ ID NO: 133272 - DNA, 2178 bp, Trifolium subterraneum
  CDS (1)..(2178)
atggaagtagtagcagcagccatactaaaaaacaacattaatgattatgattcattttgcttaactcatgctaatgctaataacatgaaagtgaatgctgctgatcctttgaattggggtgtggcggctgaggcaatgaaggggagtcacttggatgaggtgaagcgtatggtggaggagtaccggaaaccagttgtccgtcttggtggtgagacactgacgatttctcaggtggctgccattgctgcacacgatggtgccacggtggagctgtccgaatctgctagagctggcgttaaggcgagcagtgattgggttatggagagtatgaacaaaggtaccgacagttatggtgtcaccacagggttcggcgctacctcacaccgccgaacaaaacaaggtggtgctttgcagaaagaactcataaggtttttgaatgctggaatatttggaaacggaaccgagtcaaaccacaccctaccacacacagcaacacgagcagccatgttagtaagaatcaacacacttctccaaggttattcaggaattagatttgaaatattagaagctataaccaagctccttaacaacaacattactccatgtttaccacttcgcggtacaatcacagcttcaggagatttagtcccactttcttacattgctggtttactaactggtagatcaaattcaaaagctcatggaccctctggagaaatgcttaatgcaaaggaagcttttcaattagcaggaatcaatgccgagttctttgaattacaaccgaaagaaggtcttgcacttgttaatggaactgcggttggttctggtttagcttctattgttctgtttgaggctaacatattggcagtgttgtctgaagttttatctgcaattttcgctgaagttatgcaagggaaacccgaatttactgatcatttgacacataagttgaagcaccaccctggtcaaattgaggccgctgctattatggaacacattttgcatgggagtgcttatgtcaaagatgcaaagaagttgcatgaaatggatcctttgcagaaaccaaaacaagatagatatgcactacgaacttcgccacaatggcttggtcctttgattgaagtcattagattctctaccaagtcaattgagagggagattaactcagtcaatgataaccctttgattgatgtttcaagaaacaaagctttgcacggtggaaattttcaaggaacacctatcggagtatccatggataatacacgtttggctcttgcatcaattggaaaacttttgtttgctcaattctctgagcttgtcaatgatttttacaacaatgggttgccttcaaatctctctgctagtagaaatccgagcttggattatgggttcaagggatctgaaattgccatggcttcctattgttccgagttacaatatcttgcaaatccagttacaacccatgtccaaagtgccgagcaacacaaccaagatgtgaattctttgggtttaatttcttctcgaaaaacaaaagaagccattgagattcttcaactcatgtcttccacattcttgattgcactttgccaagcaattgatttaagacatttggaggagaacttgaaaaactcagtcaaaaataccgtaagccaagtggccaaaaagaccttaactataggtgtcagtggagaacttcatccttcaagattttgcgaaaaagacttgttgaaagtggttgatagggagcatgtgttttcctacattgacgatccttgtagtgctacatacccattggcacaaaaactcaggcaagtgctagtagatcatgctttagttaatggagaaagtgagaaaaattcaaacacatcaatcttccaaaagattgcaacttttgaggaagagttgaagaccctcttgccaaaagaggttgaaagtgcaaggactgcatatgagaatggaaattcaacaattgcaaacaagattaatggatgtagatcttatccgctttataagtttgtgagagaggagttgggaacaagtttgctaaccggagaacgtgtcatttcaccaggtgaagagtgtgacaaactattcacagctatgtgtcaagggaaaatcattgatcctcttcttaaatgtttaggagagtggaatggtgctcctcttccaatttgttaa

SEQ ID NO: 133273 - protein, 725 aa, Trifolium subterraneum
MEVVAAAILKNNINDYDSFCLTHANANNMKVNAADPLNWGVAAEAMKGSHLDEVKRMVEEYRKPVVRLGGETLTISQVAAIAAHDGATVELSESARAGVKASSDWVMESMNKGTDSYGVTTGFGATSHRRTKQGGALQKELIRFLNAGIFGNGTESNHTLPHTATRAAMLVRINTLLQGYSGIRFEILEAITKLLNNNITPCLPLRGTITASGDLVPLSYIAGLLTGRSNSKAHGPSGEMLNAKEAFQLAGINAEFFELQPKEGLALVNGTAVGSGLASIVLFEANILAVLSEVLSAIFAEVMQGKPEFTDHLTHKLKHHPGQIEAAAIMEHILHGSAYVKDAKKLHEMDPLQKPKQDRYALRTSPQWLGPLIEVIRFSTKSIEREINSVNDNPLIDVSRNKALHGGNFQGTPIGVSMDNTRLALASIGKLLFAQFSELVNDFYNNGLPSNLSASRNPSLDYGFKGSEIAMASYCSELQYLANPVTTHVQSAEQHNQDVNSLGLISSRKTKEAIEILQLMSSTFLIALCQAIDLRHLEENLKNSVKNTVSQVAKKTLTIGVSGELHPSRFCEKDLLKVVDREHVFSYIDDPCSATYPLAQKLRQVLVDHALVNGESEKNSNTSIFQKIATFEEELKTLLPKEVESARTAYENGNSTIANKINGCRSYPLYKFVREELGTSLLTGERVISPGEECDKLFTAMCQGKIIDPLLKCLGEWNGAPLPIC

SEQ ID NO: 133274 - DNA, 2103 bp, Triticum aestivum
  CDS (1)..(2103)
atggcttgtgcgtggcgcagccggtcgcgggccgacccactcaactgggggaaggcggcggaggagctctcgggtagccatttggaggcggtgaagcggatggtggaggagtaccgcaagccggtcgtgacgatggagggcgccacgaccatcgcgatggtcgccgcggtggctgccggcagcgacaccagagtggagctggacgagtccgcccgcggccgcgtcaaggagagcagcgactgggtcatgaacagcatgatgaacggcaccgacagttacggtgtcaccaccggcttcggcgccacctctcaccggaggaccaaggagggcggcgctctccagagagagctcatccgattccttaacgcgggagccttcggcaccggcaccgacggccacgttctgcctgccgcagcgacaagggcggcgatgctcgtccgagtcaataccttgctccagggatactcagggatccgcttcgagatcctcgagacgatcgccacgcttctcaacgccaacgtgacaccttgcctgccgctccggggcacgatcaccgcgtcgggtgacctcgtcccgctttcctacatcgccggcctggtcaccggccgcccaaactccatggcgacggctccggatggttcgaaggttaatgctgcggaggcatttaagatcgccggcatccagcacggcttcttcgagctacagcccaaggaaggccttgccatggtgaatggcacggcagtgggctcaggccttgcctccatggtgcttttcgaggcaaacgtccttagcctccttgctgaggtcttgtcgggcgtcttctgtgaggtcatgaacggcaagccggagttcaccgaccacttgacccataagttgaagcaccaccccgggcaaattgaggccgccgccatcatggagcacatccttgaaggcagctcctacatgatgctcgcaaagaagctcggtgagcttgacccactgatgaagccaaagcaagataggtatgcactccgcacatcgccgcagtggcttggccctcagattgaggtcatccgtgctgccaccaagtcaatcgagcgtgagatcaattccgtcaacgacaacccactcatcgatgtctcccgcggcaaagctatccatggtggcaacttccaaggcacgcccatcggtgtgtccatggacaacaccaggcttgccattgcagcgatcggcaagctcatgtttgcccagttctcggagctggtgaacgacttctacaacaacggtctgccttccaacctctccggcgggcgcaacccaagcttggactatggcttcaagggtgccgagattgccatggcctcgtactgctccgagctccaattcttaggcaaccctgtgaccaaccatgttcagagcgcggagcaacacaaccaagatgtcaactctcttggtctcatctcctcaaggaagactgcagaggccattgacatattgaagctcatgtcctcaacattcttggtcgcgttgtgccaggctatcgacctccgccaccttgaggagaatgtcaagaatgctgtcaagagctgcgtgaagacagtggctaggaagacactgagcactgataacaatggccatctccacaacgcacgcttctgcgagaaggaccttctgctcacaatcgaccgtgaggccgtgttcgcgtacgcagatgacccctgcagcgccaactaccccctcatgcagaagatgcgtgcagttctcgtggagcacgccttggccaatggtgaggccgaggcgcacgtcgagacgtcggtgtttgccaagcttgccatgttcgagcaggagctccgtgcagtgttgccaaaggaggtcgaggccgcccgaagcgccgtggagaatggcaccgcagcacagcaaaaccgtatcgccgaatgtcggtcgtacccgctctaccggttcgtgcgcaaggagcttggaacggagtacttgaccggggagaagacgcggtctcctggcgaagaggtggacaaggtgttcgttgccatgaaccaaggcaagcacatcgacgcgctgctggagtgcctcaaggagtggaacggcgagcccctgcctctctgctga

SEQ ID NO: 133275 - protein, 700 aa, Triticum aestivum
MACAWRSRSRADPLNWGKAAEELSGSHLEAVKRMVEEYRKPVVTMEGATTIAMVAAVAAGSDTRVELDESARGRVKESSDWVMNSMMNGTDSYGVTTGFGATSHRRTKEGGALQRELIRFLNAGAFGTGTDGHVLPAAATRAAMLVRVNTLLQGYSGIRFEILETIATLLNANVTPCLPLRGTITASGDLVPLSYIAGLVTGRPNSMATAPDGSKVNAAEAFKIAGIQHGFFELQPKEGLAMVNGTAVGSGLASMVLFEANVLSLLAEVLSGVFCEVMNGKPEFTDHLTHKLKHHPGQIEAAAIMEHILEGSSYMMLAKKLGELDPLMKPKQDRYALRTSPQWLGPQIEVIRAATKSIEREINSVNDNPLIDVSRGKAIHGGNFQGTPIGVSMDNTRLAIAAIGKLMFAQFSELVNDFYNNGLPSNLSGGRNPSLDYGFKGAEIAMASYCSELQFLGNPVTNHVQSAEQHNQDVNSLGLISSRKTAEAIDILKLMSSTFLVALCQAIDLRHLEENVKNAVKSCVKTVARKTLSTDNNGHLHNARFCEKDLLLTIDREAVFAYADDPCSANYPLMQKMRAVLVEHALANGEAEAHVETSVFAKLAMFEQELRAVLPKEVEAARSAVENGTAAQQNRIAECRSYPLYRFVRKELGTEYLTGEKTRSPGEEVDKVFVAMNQGKHIDALLECLKEWNGEPLPLC

SEQ ID NO: 133276 - DNA, 2106 bp, Oryza sativa
  CDS (1)..(2106)
atggcgggcaacgggccgatcaacaaggaggacccgctcaactggggcgcggcggcggccgagatggccggcagccacctcgacgaggtgaagcgcatggtggcgcagttccgcgagccgctggtcaagatccagggcgccaccctccgcgtcggccaggtggccgccgtcgcccaggccaaggacgccgccggcgtcgccgtcgagctcgacgaggaggcccgcccccgcgtcaaggccagcagcgagtggatcctcaactgcatcgcccacggcggcgacatctacggcgtcaccaccggcttcggcggcacctcccaccgccgcaccaaggacggccccgccctccaagtcgagctcctcaggcatctcaacgccggaatcttcggcactggctccgatggccacacgctgccgtcggagacggtgcgggcggccatgctcgtgcgcatcaacaccctcctccagggctactccggcatccggttcgagatcctcgaggccatcaccaagctgctcaacaccggcgtcacgccgtgcctgccgctccgtggcaccatcaccgcgtccggtgacctggttcccctgtcctacattgccggcctcatcaccggccgccccaacgcgcaggccatctcgcccgacggcaggaaggtggacgccgccgaggcgttcaagctcgccggcatcgagggtggcttcttcacgctgaaccccaaggaaggtctcgccatcgtcaatggcacgtccgtggggtcggcgctcgcggccaccgtgatgttcgacgccaacatcctcgccgtcctgtccgaggtgctctcggcggtgttctgcgaggtgatgaacggcaagccggagtacaccgaccacctgacccacaagctgaagcaccaccctgggtcgatcgaggccgccgccatcatggagcacatcctcgccgggagctcgttcatgagccacgccaagaaggtgaacgagatggacccgctgctgaagccgaagcaggacaggtacgcgctccgcacgtcgccgcagtggctcggcccgcagatcgaggtcatccgcgccgccaccaagtccatcgagcgcgaggtcaactccgtgaacgacaacccggtgatcgacgtccaccgcggcaaggcgctccacggcggcaacttccagggcacccccatcggtgtgtccatggacaacgcccgtctcgccatcgccaacatcggcaagctcatgttcgcgcagttctccgagctcgtgaacgagttctacaacaacgggctgacctccaacctggccggcagccgcaacccgagcttggactacgggttcaagggcaccgagatcgccatggcctcctactgctctgagctccagtacctcgccaaccccatcaccaaccatgtccagagcgcggagcagcacaaccaggacgtgaactcgctgggtctcgtctcggccaggaagaccctggaggcggtggacatcctcaagctcatgacctccacctacatcgtcgccctgtgccaggccgtcgaccttcgccacctcgaggagaacatcaagagctccgtcaagaactgcgtcacccaggtggccaagaaggtgctcaccatgaaccccaccggcgacctctccagcgcgcgcttcagcgagaagaacctcctcaccgccatcgaccgcgaggccgtgttcagctatgccgacgacccgtgcagcgccaactacccgctcatgcagaagctccgcgccgtgctcgtcgagcacgccctcaccagcggcgacgccgagcccgaggcctccgtgttctccaagatcaccaagttcgaggaggagctccgctctgcgctgccccgggagatcgaggccgcccgcgtcgccgtcgccaacggcaccgcccccgtcgccaaccggatcgtcgagagccggtcgttcccgctctaccgcttcgtccgcgaggagctcggctgcgtattcctcaccggcgagaagctcaagtcccccggcgaggagtgcaacaaggtgttcctcggcatcagccagggcaagctcatcgaccccatgctcgactgcctcaaggagtggaacggcgagccccttcccatcaactaa

SEQ ID NO: 133277 - protein, 701 aa, Oryza sativa
MAGNGPINKEDPLNWGAAAAEMAGSHLDEVKRMVAQFREPLVKIQGATLRVGQVAAVAQAKDAAGVAVELDEEARPRVKASSEWILNCIAHGGDIYGVTTGFGGTSHRRTKDGPALQVELLRHLNAGIFGTGSDGHTLPSETVRAAMLVRINTLLQGYSGIRFEILEAITKLLNTGVTPCLPLRGTITASGDLVPLSYIAGLITGRPNAQAISPDGRKVDAAEAFKLAGIEGGFFTLNPKEGLAIVNGTSVGSALAATVMFDANILAVLSEVLSAVFCEVMNGKPEYTDHLTHKLKHHPGSIEAAAIMEHILAGSSFMSHAKKVNEMDPLLKPKQDRYALRTSPQWLGPQIEVIRAATKSIEREVNSVNDNPVIDVHRGKALHGGNFQGTPIGVSMDNARLAIANIGKLMFAQFSELVNEFYNNGLTSNLAGSRNPSLDYGFKGTEIAMASYCSELQYLANPITNHVQSAEQHNQDVNSLGLVSARKTLEAVDILKLMTSTYIVALCQAVDLRHLEENIKSSVKNCVTQVAKKVLTMNPTGDLSSARFSEKNLLTAIDREAVFSYADDPCSANYPLMQKLRAVLVEHALTSGDAEPEASVFSKITKFEEELRSALPREIEAARVAVANGTAPVANRIVESRSFPLYRFVREELGCVFLTGEKLKSPGEECNKVFLGISQGKLIDPMLDCLKEWNGEPLPIN

SEQ ID NO: 133278 - DNA, 2058 bp, Oryza sativa
  CDS (1)..(2058)
atggcgggcaacgggccgatcaacaaggaggacccgctcaactggggcgcggcggcggccgagatggccggcagccacctcgacgaggtgaagcgcatggtggcgcagttccgcgagccgctggtcaagatccagggcgccaccctccgcgtcggccaggtggccgccgtcgcccaggccaaggacgccgccggcgtcgcctggatcctcaactgcatcgcccacggcggcgacatctacggcgtcaccaccggcttcggcggcacctcccaccgccgcaccaaggacggccccgccctccaagtcgagctcctcaggcatctcaacgccggaatcttcggcactggctccgatggccacacgctgccgtcggagacggtgcgggcggccatgctcgtgcgcatcaacaccctcctccagggctactccggcatccggttcgagatcctcgaggccatcaccaagctgctcaacaccggcgtcacgccgtgcctgccgctccgtggcaccatcaccgcgtccggtgacctggttcccctgtcctacattgccggcctcatcaccggccgccccaacgcgcaggccatctcgcccgacggcaggaaggtggacgccgccgaggcgttcaagctcgccggcatcgagggtggcttcttcacgctgaaccccaaggaaggtctcgccatcgtcaatggcacgtccgtggggtcggcgctcgcggccaccgtgatgttcgacgccaacatcctcgccgtcctgtccgaggtgctctcggcggtgttctgcgaggtgatgaacggcaagccggagtacaccgaccacctgacccacaagctgaagcaccaccctgggtcgatcgaggccgccgccatcatggagcacatcctcgccgggagctcgttcatgagccacgccaagaaggtgaacgagatggacccgctgctgaagccgaagcaggacaggtacgcgctccgcacgtcgccgcagtggctcggcccgcagatcgaggtcatccgcgccgccaccaagtccatcgagcgcgaggtcaactccgtgaacgacaacccggtgatcgacgtccaccgcggcaaggcgctccacggcggcaacttccagggcacccccatcggtgtgtccatggacaacgcccgtctcgccatcgccaacatcggcaagctcatgttcgcgcagttctccgagctcgtgaacgagttctacaacaacgggctgacctccaacctggccggcagccgcaacccgagcttggactacgggttcaagggcaccgagatcgccatggcctcctactgctctgagctccagtacctcgccaaccccatcaccaaccatgtccagagcgcggagcagcacaaccaggacgtgaactcgctgggtctcgtctcggccaggaagaccctggaggcggtggacatcctcaagctcatgacctccacctacatcgtcgccctgtgccaggccgtcgaccttcgccacctcgaggagaacatcaagagctccgtcaagaactgcgtcacccaggtggccaagaaggtgctcaccatgaaccccaccggcgacctctccagcgcgcgcttcagcgagaagaacctcctcaccgccatcgaccgcgaggccgtgttcagctatgccgacgacccgtgcagcgccaactacccgctcatgcagaagctccgcgccgtgctcgtcgagcacgccctcaccagcggcgacgccgagcccgaggcctccgtgttctccaagatcaccaagttcgaggaggagctccgctctgcgctgccccgggagatcgaggccgcccgcgtcgccgtcgccaacggcaccgcccccgtcgccaaccggatcgtcgagagccggtcgttcccgctctaccgcttcgtccgcgaggagctcggctgcgtattcctcaccggcgagaagctcaagtcccccggcgaggagtgcaacaaggtgttcctcggcatcagccagggcaagctcatcgaccccatgctcgactgcctcaaggagtggaacggcgagccccttcccatcaactaa

SEQ ID NO: 133279 - protein, 685 aa, Oryza sativa
MAGNGPINKEDPLNWGAAAAEMAGSHLDEVKRMVAQFREPLVKIQGATLRVGQVAAVAQAKDAAGVAWILNCIAHGGDIYGVTTGFGGTSHRRTKDGPALQVELLRHLNAGIFGTGSDGHTLPSETVRAAMLVRINTLLQGYSGIRFEILEAITKLLNTGVTPCLPLRGTITASGDLVPLSYIAGLITGRPNAQAISPDGRKVDAAEAFKLAGIEGGFFTLNPKEGLAIVNGTSVGSALAATVMFDANILAVLSEVLSAVFCEVMNGKPEYTDHLTHKLKHHPGSIEAAAIMEHILAGSSFMSHAKKVNEMDPLLKPKQDRYALRTSPQWLGPQIEVIRAATKSIEREVNSVNDNPVIDVHRGKALHGGNFQGTPIGVSMDNARLAIANIGKLMFAQFSELVNEFYNNGLTSNLAGSRNPSLDYGFKGTEIAMASYCSELQYLANPITNHVQSAEQHNQDVNSLGLVSARKTLEAVDILKLMTSTYIVALCQAVDLRHLEENIKSSVKNCVTQVAKKVLTMNPTGDLSSARFSEKNLLTAIDREAVFSYADDPCSANYPLMQKLRAVLVEHALTSGDAEPEASVFSKITKFEEELRSALPREIEAARVAVANGTAPVANRIVESRSFPLYRFVREELGCVFLTGEKLKSPGEECNKVFLGISQGKLIDPMLDCLKEWNGEPLPIN

SEQ ID NO: 133280 - DNA, 2157 bp, Oryza sativa
  CDS (1)..(2157)
atggagtgcgaaaccgggcttgttcgttccctgaacggcgacgggctgtgcatgtcgtcggtgtcggcgccgccgcgggccgacccactgaactgggggaaggcggcggacgagctggcggggagccacctcgacgaggtgaagcggatggtggaggacttccgccagccgctggtgaagatcgagggcgccagcctgacgatcgcgcaggtggccgccgtggccgccggcgccggcgacgccagggtggagctcgacgagtccgcccgcggccgcgtcaaggccagcagcgactgggtcatgaacagcatgatgaacggcaccgacagctacggcgtcaccaccggcttcggcgccacctcccaccgccgcaccaaggagggcggcgcgctccagagggagctcatcagattcctcaatgccggcgccttcggcaccggcaccgacggccacgttctgccggcggaggcgacgcgcgcggcgatgctcgtccgcatcaacaccctcctccagggttactccggcatccgcttcgagatcctcgaggccatcaccaagctgctcaatgccaacgtcacgccgtgcctgccgctccggggcaccatcaccgcctccggtgacttggtcccactgtcctacattgccggcctcatcaccggccgccagaactccgtggccgtcgccccggatggccgcaaggtgaccgccgccgaggcattcaagattgccggcattgagcacggcttcttcgagttgcagcctaaggaaggtcttgccatggtgaacggcactgccgtcggctctggccttgcatcgaccgtgctctttgaggccaacgtccttgccatcctcgccgaggtcctgtccgccgtgttctgtgaggtcatgaccggcaagccggagtacaccgaccacctgacacacaagctgaagcaccaccctggacagatcgaggctgccgccatcatggagcacatcttggaaggcagctcgtacatgaagctggcgaagaagctcggcgagctcgacccgttgatgaagccgaagcaggacaggtacgcgctccgcacgtcgccgcagtggctcggcccacagatcgaggtcatccgcttcgccaccaagtcgatcgagcgcgagatcaactccgtcaacgacaacccgctgatcgatgtctcccgtggcaaggcgcttcacggtggcaacttccagggcacgcccatcggcgtgtccatggacaacacccgcctcgccctcgctgccatcggcaagctcatgttcgcgcagttctctgagctcgtgaacgacttctacaacaacgggcttccttccaacctgtccggtggacgcaaccccagcttggactatgggttcaagggcgcggagatcgccatggcgtcgtactgctccgagctccagttcttgggcaacccggtgaccaaccatgtccagagcgcggagcagcacaaccaggacgtgaactcgcttggtctcatctcctccaggaagaccgccgaggccatcgacatcctgaagctcatgtcctccacgttcttgatcgccctgtgccaagccatcgacctgcgccacctcgaggagaacatgaagaccgcggtgaagaactgcgtgatgcaggtggccaagaaatccctgagcatgaaccacatgggcggcctccacatcgctcgcttctgcgagaaggacctgctcaccgcgatcgaccgcgaggccgtgttcgcctacgccgacgacccctgcagcgccaactacccgttgatgcagaagctccgcgcggtgctcatcgagcacgcgctcgccaacggcgacgccgagcgcgtcctggagacctccatcttcgccaaggtggccgagttcgagcagcacgtccgcgccgcgctgcccaaggaggtggaggccgcccgcgccgccgtcgagaacggcaccccgctcgtccccaaccggatcaaggagtgccgctcgtacccgctctaccggttcgtgcgcgaggaggtcggcaccgagtacctcaccggcgagaagacgcggtcgcccggcgaggagctgaacaaggtgctcgtcgccatcaacgagcgcaagcacatcgacccgctgctcgaatgcctcaaggaatggaatggcgcgccactgccactctgctga

SEQ ID NO: 133281 - protein, 718 aa, Oryza sativa
MECETGLVRSLNGDGLCMSSVSAPPRADPLNWGKAADELAGSHLDEVKRMVEDFRQPLVKIEGASLTIAQVAAVAAGAGDARVELDESARGRVKASSDWVMNSMMNGTDSYGVTTGFGATSHRRTKEGGALQRELIRFLNAGAFGTGTDGHVLPAEATRAAMLVRINTLLQGYSGIRFEILEAITKLLNANVTPCLPLRGTITASGDLVPLSYIAGLITGRQNSVAVAPDGRKVTAAEAFKIAGIEHGFFELQPKEGLAMVNGTAVGSGLASTVLFEANVLAILAEVLSAVFCEVMTGKPEYTDHLTHKLKHHPGQIEAAAIMEHILEGSSYMKLAKKLGELDPLMKPKQDRYALRTSPQWLGPQIEVIRFATKSIEREINSVNDNPLIDVSRGKALHGGNFQGTPIGVSMDNTRLALAAIGKLMFAQFSELVNDFYNNGLPSNLSGGRNPSLDYGFKGAEIAMASYCSELQFLGNPVTNHVQSAEQHNQDVNSLGLISSRKTAEAIDILKLMSSTFLIALCQAIDLRHLEENMKTAVKNCVMQVAKKSLSMNHMGGLHIARFCEKDLLTAIDREAVFAYADDPCSANYPLMQKLRAVLIEHALANGDAERVLETSIFAKVAEFEQHVRAALPKEVEAARAAVENGTPLVPNRIKECRSYPLYRFVREEVGTEYLTGEKTRSPGEELNKVLVAINERKHIDPLLECLKEWNGAPLPLC

SEQ ID NO: 133282 - DNA, 2142 bp, Oryza sativa
  CDS (1)..(2142)
atggcgtgcgagaacggtcaggttgctgccgatggcatcaacggcctctgcatggcggcgccccgcgccgacccgctgaactgggggaaggcggcggaggagatgtcggggagccacctcgacgaggtgaagcgcatggtggccgagtaccgccagccgctggtaaagatcgagggcgccagcctgaggatcgcgcaggtcgccgcggtggccgcggccggcgaggccagggtcgagctcgacgagtcggcccgcgagcgcgtcaaggccagcagcgactgggtgatgaacagcatgatgaacggcacggacagctacggtgtcaccaccggcttcggcgccacgtcccacaggaggaccaaggaaggtggtgccctgcaaagagagctcatcaggttcctcaatgccggcgccttcggcacgggcacggacggccacgtcctgtccgccgaggccacgcgcgcggcgatgctcgtccgcatcaacactctcctccagggctactcaggcatccgcttcgagatcctcgaggcgattaccaagctgctcaatgccaacgtcacgccatgcctgccactcaggggcacggttaccgcgtccggcgacctggtcccgctctcctacattgccggcttggtcaccggccgcgagaactctgtcgcggtcgctcctgatggcagcaaggtgaacgccgctgaggcgtttaagattgctggcatccaaggtggcttcttcgagttgcagcccaaggaaggtctcgccatggtgaatggcactgccgtcggctctggacttgcctccacggtgctctttgaggcgaacattcttgctgtccttgccgaggtcctgtccgccgtgttctgcgaggtgatgaacggcaagccggagtacaccgaccacctgacacacaagctgaagcaccaccctggacagatcgaggctgctgccatcatggagcacatcttggaaggcagctcgtacatgaagctggcgaagaagctcggtgagctcgacccgttgatgaagccgaagcaagaccggtacgcgctccgcacgtcgccgcaatggcttggccctcagatcgaagttattcgtgcggccaccaagtccattgagcgcgagatcaactctgtcaatgacaacccactcattgatgtctcccgcgacaaggcgcttcatggtggtaacttccagggcactcccatcggtgtgtccatggacaacactcgcctcgcaattgctgccatcggcaagctcatgttcgcgcagttctcagagcttgtgaacgactactacaacaacggccttccctccaacctgtccggcgggcgcaacccgagcttggattacggcttcaagggcgccgagatcgccatggcttcgtactgctccgagttgcagttcttgggcaacccagtgaccaaccacgtccagagcgcggagcagcacaaccaggacgtcaactccctcggcctcatctcctccaggaagacagccgaggccgtcgaaatcctgaagctcatgtcctccacgttcttggtcgccctgtgccaggccatcgacctgcggcaaatcgaggagaacgtcaagagcgccgtcaagagctgcgtcatgacagtggccaggaagactctgagcacgagcgccaccggcggtctccacgccgctcgcttctgcgagaaggatcttctccaggagatcgaccgcgaagccgtgttcgcgtacgccgacgacccgtgcagcgccaactacccgctgatgaagaagctccggaacgtgcttgtggagcgcgccctcgccaacggcgcggccgagttcaacgccgagacctcggtgttcgccaaggtcgcccagttcgaggaggagctccgcgcggcgctgccagcggcggtgttggccgcacgggcagctgtggagaacggcacggcggcaacgcccaacagaatcaccgagtgccgctcctacccactgtaccggtttgtgcgcgaggagctcggaaccgcgtacctcaccggcgagaagacgcggtcgcccggcgaggagctgaacaaggtgctcgtcgccatcaaccaaggcaagcacattgatccgctgcttgagtgtctcaaggagtggaacggcgcgcccctgcccatctgctaa

SEQ ID NO: 133283 - protein, 713 aa, Oryza sativa
MACENGQVAADGINGLCMAAPRADPLNWGKAAEEMSGSHLDEVKRMVAEYRQPLVKIEGASLRIAQVAAVAAAGEARVELDESARERVKASSDWVMNSMMNGTDSYGVTTGFGATSHRRTKEGGALQRELIRFLNAGAFGTGTDGHVLSAEATRAAMLVRINTLLQGYSGIRFEILEAITKLLNANVTPCLPLRGTVTASGDLVPLSYIAGLVTGRENSVAVAPDGSKVNAAEAFKIAGIQGGFFELQPKEGLAMVNGTAVGSGLASTVLFEANILAVLAEVLSAVFCEVMNGKPEYTDHLTHKLKHHPGQIEAAAIMEHILEGSSYMKLAKKLGELDPLMKPKQDRYALRTSPQWLGPQIEVIRAATKSIEREINSVNDNPLIDVSRDKALHGGNFQGTPIGVSMDNTRLAIAAIGKLMFAQFSELVNDYYNNGLPSNLSGGRNPSLDYGFKGAEIAMASYCSELQFLGNPVTNHVQSAEQHNQDVNSLGLISSRKTAEAVEILKLMSSTFLVALCQAIDLRQIEENVKSAVKSCVMTVARKTLSTSATGGLHAARFCEKDLLQEIDREAVFAYADDPCSANYPLMKKLRNVLVERALANGAAEFNAETSVFAKVAQFEEELRAALPAAVLAARAAVENGTAATPNRITECRSYPLYRFVREELGTAYLTGEKTRSPGEELNKVLVAINQGKHIDPLLECLKEWNGAPLPIC

SEQ ID NO: 133284 - DNA, 2142 bp, Oryza sativa
  CDS (1)..(2142)
atggagtgcgagaacggccgcgtttctgccaatggcatgagtggtctctgcgtcgcggcgccccgcgccgacccgctgaactgggggaaggccacggaggagatgacggggagccacctcgacgaggtgaagaggatggtggcggagtaccgccagcctctggtcaagatcgagggcgctagcctgaggatcgcgcaggtcgccgcggtggccgcggccggcgaggccagggtggagctcgacgagtcggcccgcgagcgcgtcaaggccagcagcgactgggtgatgaacagcatgatgaacggcacggacagctacggtgtcaccaccggtttcggcgccacgtcccacaggaggaccaaggagggtggtgctctgcaaagagagctcatcagattcctcaatgccggcgcgttcggcactggcaccgacggtcatgttttgccggcggaggcaacccgcgcggcaatgctcgtccgcatcaacacactcctccagggatactccggcatccggttcgagatcctcgaggcgatcgccaagctgctcaacgcgaacgtcacaccgtgcctgccgctccggggcacgatcaccgcctccggtgacctcgtcccgctgtcctacattgccggccttgtcactgggcgcgagaacgccgtggcggttgcaccagatggcagcaaggtgaacgccgctgaggcgttcaagattgctggcatccagggcggcttcttcgagctgcagcccaaggaaggccttgccatggtcaatggcactgccgtgggctctggccttgcatcgaccgtgctctttgaggctaacattcttgccatcctcgccgaggtcctctcggccgtgttctgcgaggtgatgaacggcaagccggagtacaccgaccacctgactcacaagctcaagcaccatccaggacagatcgaggccgccgccatcatggagcacatcttggagggaagctcctacatgaagcatgccaagaagcttggtgagctcgacccactgatgaagccgaagcaagaccggtacgcgctccggacatccccacagtggctcggccctcaaattgaggttatccgcgccgccaccaagtccatcgagcgtgagatcaactccgtgaacgacaacccgctcatcgacgtctcccgcggcaaggcgctgcacggtggcaacttccagggcacgcccatcggcgtgtccatggacaacacccgcctcgccatcgctgccatcggcaagctcatgttcgcgcagttctcggagctcgtgaacgacttctacaacaacggcctgccatccaacctgtctggcggtcgcaacccgagcttggactacgggttcaagggcgccgagatcgccatggcctcctactgctccgagctgcagttcttgggcaacccagtgaccaaccacgtccagagcgccgagcagcacaaccaggacgtcaactctcttggactcatctcctccaggaagaccgacgaggcaatcgacatcctgaagctcatgtcctccacgttcttgatcgccctctgccaggccgtcgacctgcggcacatcgaggagaacgtcaagagcgccgtcaagagctgcgtcatgacggtggccaagaagacactcagcaccaactccaccggcgatctccacgtcgcacgcttctgcgagaaggacctgctcaaggagatcgaccgcgaggcggtgttcgcgtacgcggacgacccgtgcagccacaactacccgctgatgaagaagctgcgcaacgtgctcgtggagcgcgccctcgccaacggcgcggccgagttcaacgccgacacctcggtgttcgccaaggtcgcgcagttcgaggaggagctgcgcgcgactctgccaggtgcgatcgaggccgcacgtgcggctgtggagaacggcacggcggcgattcccagcagaatcaccgagtgcaggtcgtatccgctctaccggttcgtgcgcgaggagctcggaacaaagtacctgaccggcgagaagacacgatcgcctggcgaggagctgaacaaggttcttgtggctatcaacgaaggcaagcacatcgacccgttgctcgagtgcctcaaggagtggaacggcgagcccctgccaatctgctga

SEQ ID NO: 133285 - protein, 713 aa, Oryza sativa
MECENGRVSANGMSGLCVAAPRADPLNWGKATEEMTGSHLDEVKRMVAEYRQPLVKIEGASLRIAQVAAVAAAGEARVELDESARERVKASSDWVMNSMMNGTDSYGVTTGFGATSHRRTKEGGALQRELIRFLNAGAFGTGTDGHVLPAEATRAAMLVRINTLLQGYSGIRFEILEAIAKLLNANVTPCLPLRGTITASGDLVPLSYIAGLVTGRENAVAVAPDGSKVNAAEAFKIAGIQGGFFELQPKEGLAMVNGTAVGSGLASTVLFEANILAILAEVLSAVFCEVMNGKPEYTDHLTHKLKHHPGQIEAAAIMEHILEGSSYMKHAKKLGELDPLMKPKQDRYALRTSPQWLGPQIEVIRAATKSIEREINSVNDNPLIDVSRGKALHGGNFQGTPIGVSMDNTRLAIAAIGKLMFAQFSELVNDFYNNGLPSNLSGGRNPSLDYGFKGAEIAMASYCSELQFLGNPVTNHVQSAEQHNQDVNSLGLISSRKTDEAIDILKLMSSTFLIALCQAVDLRHIEENVKSAVKSCVMTVAKKTLSTNSTGDLHVARFCEKDLLKEIDREAVFAYADDPCSHNYPLMKKLRNVLVERALANGAAEFNADTSVFAKVAQFEEELRATLPGAIEAARAAVENGTAAIPSRITECRSYPLYRFVREELGTKYLTGEKTRSPGEELNKVLVAINEGKHIDPLLECLKEWNGEPLPIC

SEQ ID NO: 133286 - DNA, 2124 bp, Oryza sativa
  CDS (1)..(2124)
atggcgagccagaccgccgacgccacggggttcgtcgcgagcgacccgctgtcgtggggcaaggcggcgctggagatgacggggagccacctggacgaggtgaagcgcatggtggcgcagtcacgggaggccgtggtgaagatcgaggggtccagcctccgcgtcggccaggtggccgccgtctccgcggccaaggacgcctccggcgtggtggtcgagctggacgaggaggcccgcccccgcgtcaaggccagcagcgagtggatcctcaactgcatcgcccacggcggcgacatctacggcgtcaccaccggcttcggcggcacctcccaccgccgcaccaaggacggccaggccctccaagttgagctgctcaggcatctcaatgccggaatcttcggcaacggctccgatggcaactcgctgccgtcggaggtgtcgcgtgcggcgatgcttgtgcgcatcaacaccctgctccagggctactcgggcatccgcttcgagatcctcgaggcgatcaccaagctgatcaacaccggggtcagcccatgcctgccgctccgaggcaccatcacggcgtccggcgacctcgtgccgctgtcctacattgccggcctcatcaccgggcgccccaacgcgcaggcggtgaccgtcgatggcaagaaggtggacgccgccgaggcgttcaagatcgccggcatccagggcggcttcttcaggctggagcccaaggaaggtctcgccatcgtgaacggcacctccgtgggctcggccctcgctgccatggtgctctacgacgcgaacgtcctcgccgtcctgtccgaggtgctgtccgccgtgttctgcgaggtgatgaacggcaagcccgagtacaccgaccacctgacgcacaagctgaagcaccacccgggctcgatcgaggccgccgccatcatggagcacatcctcgccggcagcgcgttcatgccgcacgcgcagaaggtgaacgaggtggacccgctgctgaagccgaagcaggacaggtacgcgctccgcacgtcgccgcagtggctgggaccccagatcgaggtcatccgcgcggccaccaagtcgatcgagcgcgaggtcaactcggtgaacgacaacccggtcatcgacgtccaccgcggcaaggccctgcacggcggcaacttccagggcacgcccatcggcgtgtccatggacaacacccgcctcgccatcgccaacatcggcaagctcatgttcgcccagttctccgagctggtcaacgagttctacaacaacgggctcacgtcaaacctggccggcagccgcaacccgagcttggactacggcttcaagggcaccgagatcgccatggcctcctactgctcggagctccagttcctcgccaacccggtcaccaaccacgtccagagcgcggagcagcacaaccaggacgtcaactccctcggcctcgtctccgccaggaagaccgccgaggcggtggacatcctcaagctcatgtcctccacctacctggttgcgctctgccaggccgtcgacctgcgccacctggaggagaacctcaagagcgccgtcaagaactgcgtgacgacggtggccaagaaggtgctcaccacgggccccgccggcggcctccacagcgcgcgcttcagcgagaaggccctgctcaccgccatcgaccgcgaggccgtgtacagctacgccgacgacccgtgcagcgccaactacccgctgatgaccaagatccgcgccgtgctcgtcgagcacgccctcgccaacggccccgccgagaaggacgacggctcctccgtgttctccaagatcaccgcgttcgaggaggagctccgcgaggcgctgcccagggagatggaggcggcgcgcgtggcgttcgagaccggcaccgcgccgatcaccaacaggatcaaggagagcaggtcgttcccgctgtaccgcttcgtccgcgaggagctcggctgcgtgtacctcaccggagagaagctcaagtcccccggcgaggagtgcaacaaggtgttcctggccatcagcgagcgcaagctcatcgacccgatgctcgagtgcctcaaggagtggaacggcgagcccctgcccatctgctga

SEQ ID NO: 133287 - protein, 707 aa, Oryza sativa
MASQTADATGFVASDPLSWGKAALEMTGSHLDEVKRMVAQSREAVVKIEGSSLRVGQVAAVSAAKDASGVVVELDEEARPRVKASSEWILNCIAHGGDIYGVTTGFGGTSHRRTKDGQALQVELLRHLNAGIFGNGSDGNSLPSEVSRAAMLVRINTLLQGYSGIRFEILEAITKLINTGVSPCLPLRGTITASGDLVPLSYIAGLITGRPNAQAVTVDGKKVDAAEAFKIAGIQGGFFRLEPKEGLAIVNGTSVGSALAAMVLYDANVLAVLSEVLSAVFCEVMNGKPEYTDHLTHKLKHHPGSIEAAAIMEHILAGSAFMPHAQKVNEVDPLLKPKQDRYALRTSPQWLGPQIEVIRAATKSIEREVNSVNDNPVIDVHRGKALHGGNFQGTPIGVSMDNTRLAIANIGKLMFAQFSELVNEFYNNGLTSNLAGSRNPSLDYGFKGTEIAMASYCSELQFLANPVTNHVQSAEQHNQDVNSLGLVSARKTAEAVDILKLMSSTYLVALCQAVDLRHLEENLKSAVKNCVTTVAKKVLTTGPAGGLHSARFSEKALLTAIDREAVYSYADDPCSANYPLMTKIRAVLVEHALANGPAEKDDGSSVFSKITAFEEELREALPREMEAARVAFETGTAPITNRIKESRSFPLYRFVREELGCVYLTGEKLKSPGEECNKVFLAISERKLIDPMLECLKEWNGEPLPIC

SEQ ID NO: 133288 - DNA, 2145 bp, Oryza sativa
  CDS (1)..(2145)
atggagtgcgagaacgggcacgtcgccgccgccgccaacggcagcagcctgtgcgtggctaagccgcgtgccgacccgctcaactgggggaaggcggcggaggagctgtccgggagccatctggacgcggtgaagcgcatggtggaggagtaccgcaggcccgtggtgacgatcgagggcgccagcctgaccatcgcgcaggtcgcggcggtggcctccgccggcgccgccagggtggagctcgacgagtccgcccgcggccgcgtcaaggccagcagcgactgggtcatgaacagcatgatgaacggcaccgacagctacggcgtcaccaccggcttcggcgccacctcccaccggaggaccaaggagggcggcgcgctccagcgagagcttatccggtttcttaatgccggggcgttcggcaacggcgacgacggccacgtgctgccggccgcggcgacgcgggcagccatgctcgtccgcatcaacactctgctccaggggtactctggcatccggttcgagatcctcgagacgatcgccacgctgcttaacgccaacgtgacgccgtgcttgccgctccggggcacgatcaccgcgtccggcgacctcgtcccgctctcctacatcgcgggactcgtcaccggccgaccaaactctgtggcggtgacgcccgatggcaggaaggtggatgccgcggaggcgttcaagatcgccggcatccagcacggcttcttcgagctccagcccaaggaaggcctcgccatggtgaacggcacggccgtcggctccgggctcgcctcgatggtgctctttgaggcgaacgtccttggcgtgctcgcggaggtcctctccgcggtgttctgcgaggtcatgaacggcaagccggagtacaccgaccacctgacgcacaagcttaagcaccacccgggacagattgaggcagccgccattatggagcacatcttggaggggagctcctacatgatgctggcgaagaagctcggcgagctcgacccgctgatgaagcccaagcaagacaggtacgcgctccgcacgtcgccgcaatggctcggcccccagattgaggtcatccgtgccgccaccaagtcgatcgagcgcgagatcaactccgtcaacgacaacccgctcattgacgtctcccgtggcaaggcgctccacggcggcaacttccagggcacacccatcggcgtgtccatggacaacaccaggctcgccattgccgcgatcggtaagctcatgttcgcgcagttctctgagctcgtgaacgatttctacaacaacggcctgccgtccaacctgtccggtgggcgcaacccgagcttggactacggcttcaagggtgccgagatcgccatggcatcgtactgctctgagctccagttcttggccaaccctgtgaccaaccatgtccagagcgcggagcagcacaaccaagacgtcaactctctcggcctcatctcgtccaggaagacggccgaggccatcgacgtgctcaagctcatgtcctcgacgttcttgatcgcgctatgccaggccatcgacctgcgccacctcgaagagaacgtcaggagcgccgtcaagggctgcgtgacgacggtggcgaggaagaccctgagcaccagcgccaccggcgacctccacaaggcccggttctgcgagaaggacctgctccaggcgatcgaccgcgaggccgtgttcgcgtacgcggacgacccctgcagcgccaactacccgctgatgcagaagatgcgcgccgtcctcatcgagcacgcgctggccaacggcgaggcggagcgcaacgtcgacacctcggtgttcgccaaggtcgcgacgttcgaggaggagctccgcgtggcgctgcccagggaggtggaggctgcccgtgcggccgtggagaacggcaccgccgcaaaggcgaacaggatcaccgagtgcaggtcgtacccgctctaccggttcgtccgcgaggagctcgggacagagtacttgaccggggagaagacgcggtcgcccggcgaggaggtgaacaaggtgttcgtcgccatgaaccagggcaagcacatcgacgcactgctcgagtgcctcaaggagtggaacggcgagcctctgcccatctgctga

SEQ ID NO: 133289 - protein, 714 aa, Oryza sativa
MECENGHVAAAANGSSLCVAKPRADPLNWGKAAEELSGSHLDAVKRMVEEYRRPVVTIEGASLTIAQVAAVASAGAARVELDESARGRVKASSDWVMNSMMNGTDSYGVTTGFGATSHRRTKEGGALQRELIRFLNAGAFGNGDDGHVLPAAATRAAMLVRINTLLQGYSGIRFEILETIATLLNANVTPCLPLRGTITASGDLVPLSYIAGLVTGRPNSVAVTPDGRKVDAAEAFKIAGIQHGFFELQPKEGLAMVNGTAVGSGLASMVLFEANVLGVLAEVLSAVFCEVMNGKPEYTDHLTHKLKHHPGQIEAAAIMEHILEGSSYMMLAKKLGELDPLMKPKQDRYALRTSPQWLGPQIEVIRAATKSIEREINSVNDNPLIDVSRGKALHGGNFQGTPIGVSMDNTRLAIAAIGKLMFAQFSELVNDFYNNGLPSNLSGGRNPSLDYGFKGAEIAMASYCSELQFLANPVTNHVQSAEQHNQDVNSLGLISSRKTAEAIDVLKLMSSTFLIALCQAIDLRHLEENVRSAVKGCVTTVARKTLSTSATGDLHKARFCEKDLLQAIDREAVFAYADDPCSANYPLMQKMRAVLIEHALANGEAERNVDTSVFAKVATFEEELRVALPREVEAARAAVENGTAAKANRITECRSYPLYRFVREELGTEYLTGEKTRSPGEEVNKVFVAMNQGKHIDALLECLKEWNGEPLPIC

SEQ ID NO: 133290 - DNA, 2151 bp, Oryza sativa
  CDS (1)..(2151)
atggagtgcgagactggctacgtcgccgcggccgccgatggtggtctctgcatggaggtgccccgcgccgacccgctcaactgggggaaggcggcggaggagatggccgggagccacctcgacgaggtgaagaggatggtggcggagtaccggcagcccgtggtgcggatcgagggcgccagcctgaggatcgcgcaggtggcggcggttgccggcgccggcgacggcgaggccgccatggtcgagctcgacgagtcggcgcgggagcgcgtcaaggccagcagcgactgggtgatgaacagcatggcgaacggcaccgacagctacggcgtcaccaccgggttcggcgccacgtcgcaccggcggaccaaggagggcggcgcgctgcagcgggagctcatcaggttcctcaacgccggcgccttcggcaccggcgccgacggccacgtcctccccgcgggtgccacgcgcgcggcgatgctcgtccggatcaacaccctgctgcaaggctactccggcatccggttcgagatcctcgaggcggtcgccaagctgctcaacgccaacgtcacgccgtgcctgccgctccggggcacgatcaccgcgtcgggcgacctcgtcccgctctcctacatcgccgggctcgtcaccggccgggagaactccgtcgcggtggcgcccgacggcaggaaggtgaacgccgccgaggcgttcaagatcgccggcatccagggcggcttcttcgagctgcagcccaaggaaggcctcgccatggtgaacgggacggccgtgggctccggcctcgcctccaccgtgctgttcgaggccaacgtcctcgccatcctcgccgaggtgctctccgccgtgttctgcgaggtgatgaacggcaagccggagtacaccgaccacctcacccacaagctgaagcaccacccggggcagatcgaggcggccgccatcatggagcacatcttggaaggcagctcgtacatgaaggaggcgaagaggctcggcgagctcgacccgctgatgaagccgaagcaggacaggtacgcgctccggacgtcgccgcagtggctcggcccccagatcgaggtcatccgcgccgccaccaagtcgatcgagcgcgagatcaactccgtcaacgacaacccgctcatcgacgtctcccgcgggaaggcgctgcacggcggcaacttccagggcacccccatcggcgtgtccatggacaacacccgcctcgccatcgccgccatcgggaagctcatgttcgcgcagttctccgagctggtgaacgacttctacaacaacggcctgccctccaacctctccggcggccgcaacccgagcttggactacggcttcaagggcgccgagatcgccatggcgtcctactgctccgagctgcagttcttgggcaacccggtgaccaaccacgtccagagcgccgagcagcacaaccaggacgtgaactcgctgggcctcatctcctccaggaagacggcggaggccatcgacatcctcaagctcatgtcctccaccttcctcgtcgcgctctgccaggcgatcgacctgcgccacatcgaggagaacgtcaagggcgccgtcaagacctgcgtcatgacggtcgccaagaagacgctgagcaccaactccaccggcggcctccacgtcgcccgcttctgcgagaaggacctgctcagcgagatcgaccgggaggccgtgttcgcgtacgccgacgacccgtgcagcgccaactacccgctgatgaagaagctccgcagcgtgctcgtcgagcgcgcgctcgccaacggcgccgccgagttcgacgcggagacctccgtgctcgccaaggtcgcgcggttcgaggaggagctccgcgcggcgctgccccgggccgtcgaggccgcgcgcgccgccgtggagagcggcacggcggcggcgcccaacaggatcgccgagtgccgctcgtacccgctctaccggttcgtgcgcgaggagctcggcaccgcctacctcaccggcgagaagacgcggtcgcccggcgaggagctcaacaaggtgctcgtcgcgatcaaccagggcaagcacatcgacccgctgctcgagtgcctcaaggagtggaacggcgcgccactgccaatctgctga

SEQ ID NO: 133291 - protein, 716 aa, Oryza sativa
MECETGYVAAAADGGLCMEVPRADPLNWGKAAEEMAGSHLDEVKRMVAEYRQPVVRIEGASLRIAQVAAVAGAGDGEAAMVELDESARERVKASSDWVMNSMANGTDSYGVTTGFGATSHRRTKEGGALQRELIRFLNAGAFGTGADGHVLPAGATRAAMLVRINTLLQGYSGIRFEILEAVAKLLNANVTPCLPLRGTITASGDLVPLSYIAGLVTGRENSVAVAPDGRKVNAAEAFKIAGIQGGFFELQPKEGLAMVNGTAVGSGLASTVLFEANVLAILAEVLSAVFCEVMNGKPEYTDHLTHKLKHHPGQIEAAAIMEHILEGSSYMKEAKRLGELDPLMKPKQDRYALRTSPQWLGPQIEVIRAATKSIEREINSVNDNPLIDVSRGKALHGGNFQGTPIGVSMDNTRLAIAAIGKLMFAQFSELVNDFYNNGLPSNLSGGRNPSLDYGFKGAEIAMASYCSELQFLGNPVTNHVQSAEQHNQDVNSLGLISSRKTAEAIDILKLMSSTFLVALCQAIDLRHIEENVKGAVKTCVMTVAKKTLSTNSTGGLHVARFCEKDLLSEIDREAVFAYADDPCSANYPLMKKLRSVLVERALANGAAEFDAETSVLAKVARFEEELRAALPRAVEAARAAVESGTAAAPNRIAECRSYPLYRFVREELGTAYLTGEKTRSPGEELNKVLVAINQGKHIDPLLECLKEWNGAPLPIC

SEQ ID NO: 133292 - DNA, 2103 bp, Oryza sativa
  CDS (1)..(2103)
atggagtgtgagaccggtgtcaacggctcagggccgcgcggcagcgaccccttgtactggggcaaggcggcagagggtgttgcggggagccacctcgaggaggtgaagaggatggtggttgagtaccgcgcgccgctggtgaagatcgacggcgccatgctcagcgtcgccaaggtggcagccgtcgccggcgaggccgcccgggtgcaggtggtgctggacgaatccgcacgaccccgcctggaggctagccgcgagtgggttttcgaaagcaccatgaatggcaccgacacgtacggcgtcaccaccggcttcgggggtgccgcccaccgccgcaccaaggagttcgccgcgctccagaaagagctgatccgatacctcaacgccggcgtctttggagccagccgcagcgacggctacacgctgccgacggaggtcacgcgcgcagccatgctcgtgcgcatcaacaccctcacccagggctactcgggcatccgcttcgagatcctcgaggccatcgccaagctgctcaacgccaacgttacgccgtgcctgccgctccggggcaccatcaccgcgtccggcgacctggtccctctgtcctacatcgccggcctaatcaccggccgccacaactccgcggcggtggccccggacggcaccaaggtggacgccgccgaggcattcaggatggccggcatcgagcacgggttcttcgcgttgcagcccaaggaagggctcgccatcgtcaacggcacggccgtgggctccggcctcgcggcgatcgtgctcttcgaggccaacgtcctcgccgtccttgccgaggtcctctcggcggtgtactgcgaggtaatggccggcaatccggagtacaccgaccacctcatccacgcgctgaagcaccaccctggacagatcgaagctgcggccatcatggagcacatactggaaggcagctcctacatgaagaagcttgccaaggacaaggagcagggccagggcgagcttgaccggctgacgaagctgaagcaggacaggtacgccatccgcacggcgccgcagtggctcggcccgcaggtcgaggtcatccgcttcgccaccaagtccatcgagcgggagatcaactccgtcaacgacaacccggtcatcgacgtcgcccgccgcaaggcgctccacggcggcaacttccagggcactcccgtcggggtgtccatggacaacactcgtctcgccatcgctgccatcggcaggctcatgttctcgcagttctccgagctcgtcagtagcttctacagcaacggccttccctccaacctgtccggcgggcgcaacccgagcttggactacggtttcaatggcgccgaggtcgccatggcgtcctactgctctgagctccagttcctcgccaacccggtgaccaaccatgtgcagaccgcggagcagcacaaccagagcgtcaactctctcggcctcatctcctccaggatgactgcagaggccgtcaccatcctgaagctcatgtcctctactttcctcatcgcactgtgccaggccgtcgacctgcgccaactcgaggagagcatcaaggccgctgttaacaagtgcgtgacgaatgtcgccaagaaatccctgaccctggccatggacgacgacgaccatctgctagcgctgctcggcgctgctatcgaccgcgtggcggtgttcacgtacgcagaagacccatgcagatccagcttgccactcatgcagaagctccgcgcggtgctcatggagcatgcgctggccaataacggtgacatcctcctggccaaggtggctgagttcgagcagcagctccgcgcggtgctccccgacgaggtggaggccgcacgcgccgctgtagagagcggcacggccccgaacaggatctccgactgccgctcgtacccgctgtacaggttcgtgcgcaaggagctcggcgccgagtacctgaccggcgagaagacgcggtctcccggggaggaggtggacaaggtggtgatcgccatgaaccagcacaagcacatccatccactgctggagtgcctcagcgagtggaaaggcgcgcccctgccacttagctga

SEQ ID NO: 133293 - protein, 700 aa, Oryza sativa
MECETGVNGSGPRGSDPLYWGKAAEGVAGSHLEEVKRMVVEYRAPLVKIDGAMLSVAKVAAVAGEAARVQVVLDESARPRLEASREWVFESTMNGTDTYGVTTGFGGAAHRRTKEFAALQKELIRYLNAGVFGASRSDGYTLPTEVTRAAMLVRINTLTQGYSGIRFEILEAIAKLLNANVTPCLPLRGTITASGDLVPLSYIAGLITGRHNSAAVAPDGTKVDAAEAFRMAGIEHGFFALQPKEGLAIVNGTAVGSGLAAIVLFEANVLAVLAEVLSAVYCEVMAGNPEYTDHLIHALKHHPGQIEAAAIMEHILEGSSYMKKLAKDKEQGQGELDRLTKLKQDRYAIRTAPQWLGPQVEVIRFATKSIEREINSVNDNPVIDVARRKALHGGNFQGTPVGVSMDNTRLAIAAIGRLMFSQFSELVSSFYSNGLPSNLSGGRNPSLDYGFNGAEVAMASYCSELQFLANPVTNHVQTAEQHNQSVNSLGLISSRMTAEAVTILKLMSSTFLIALCQAVDLRQLEESIKAAVNKCVTNVAKKSLTLAMDDDDHLLALLGAAIDRVAVFTYAEDPCRSSLPLMQKLRAVLMEHALANNGDILLAKVAEFEQQLRAVLPDEVEAARAAVESGTAPNRISDCRSYPLYRFVRKELGAEYLTGEKTRSPGEEVDKVVIAMNQHKHIHPLLECLSEWKGAPLPLS

SEQ ID NO: 133294 - DNA, 2073 bp, Oryza sativa
  CDS (1)..(2073)
atggagtgtgagaccggtctggtcgaccgtcccctcaacggcgaccccttgtactggggcaaggcggcggagggtcttgcggggagccacctcgacgaggtgaagaggatggtggtggagtaccgcgcgccgctggtgaagatcgacggcgccatgctcagcgtcgccaaggtggcagccgtcgctggcgaggccgcccgggtgcaggtggtgctggacgaatccgcacgaccccgcctggaggctagtcgcgagtgggtcttcgacagcaccatgaacggcaccgacacgtacggcgtcaccaccggcttcggaggtgccgcccaccgccgcaccaaggagttcgccgcgctccagaaagagctgatccgatacctcaacgccggcgtctttggagccagccgcagcgacggctacacgctgccgacggaggtcactcgcgcagccatgctggtgcgcatcaacaccctcacccagggctactcgggcatccgcttcgagatcctcgaggccatcgccaagctgctcaacgccaacgtgacgccgtgcctgccgctccggggcaccatcaccgcgtccggcgacctggtcccgctgtcctacatcgccggcctcatcaccggccgccagaactccgcggcggtggccccggacggcagcaaggtggacgccgctgaggcgttcaggatcgccggcatcgagcacgggttcttcgcgttgcagcccaaggaagggctcgccatcgtcaacggcacggccgtgggctccggcctcgcggcgatcgtgctcttcgaggccaacgtcctggccgtccttgccgaggtcctctcggcggtgtactgcgaggtgatggccggcaatccggagtacaccgaccacctcatccacgcgctgaagcaccaccctggacagatcgaagctgcggccatcatggagcacatactggaaggcagctcctacatgaggcttgccaaggagcagggcgagcttgaccggttgacgaagctgaggcaggacaggtacgccatccgcacggcgccgcagtggctcggcccgcaggtcgaggtcatccgcttcgccaccaagtcgatcgagcgggagatcaactccgtcaacgacaacccggtcatcgacgtcgcccgccgcaaggcgctccacggcggcaacttccagggcactcccatcggggtgtccatggacaacactcgtctcgccatcgctgccatcggcaggctcatgttctcgcagttctccgagcttgccagtagcttctacagcaacggccttccctccaatctgtccggcgggcgcaacccgagcttggactacggtttcaatggcgccgaggtcgccatggcgtcctactgctctgagctgcagttcctcgccaacccggtgaccaaccatgtgcagaccgcggagcagcacaaccagagcgtcaactctctcggcctcatctcctccaggatgacagcagaggccgtcaccatcctgaagctcatgtcctctactttcctcatcgcactgtgccaggccgtcgacctgcgccaactcgaggagagcatcaaggccgctgttaacaagtgcgtgacaaatgtcgccaagaaatccctggccatggacgatgacgatctgctagcgctgctcggcgctgctatcgaccgcgtggcggtgttcacgtacgcagaagacccatgcagatccagcttgccactcatacagaagctccgcgcggtgctcatggaccatgcgctggccaacggtgacaaccagctggccaaggtggctgagttcgagcagcagctccgcgcggtgctccacgacgaggtggaggccgcacgcgcggctgtggagagcggcacggccccgaacaggatcacccagtgtcgctcgtacccgctgtacaggttcgtgcgcaaggagctcggcgccgagtacctgaccggcgagaagacgcggtcgcccggggaggaggtggacaaggtggtgatcgccatgaaccagcacaagcacatcaacccactgctggagtgcctcagcgagtggaaaggcgcgcccctgccacttaattag

SEQ ID NO: 133295 - protein, 690 aa, Oryza sativa
MECETGLVDRPLNGDPLYWGKAAEGLAGSHLDEVKRMVVEYRAPLVKIDGAMLSVAKVAAVAGEAARVQVVLDESARPRLEASREWVFDSTMNGTDTYGVTTGFGGAAHRRTKEFAALQKELIRYLNAGVFGASRSDGYTLPTEVTRAAMLVRINTLTQGYSGIRFEILEAIAKLLNANVTPCLPLRGTITASGDLVPLSYIAGLITGRQNSAAVAPDGSKVDAAEAFRIAGIEHGFFALQPKEGLAIVNGTAVGSGLAAIVLFEANVLAVLAEVLSAVYCEVMAGNPEYTDHLIHALKHHPGQIEAAAIMEHILEGSSYMRLAKEQGELDRLTKLRQDRYAIRTAPQWLGPQVEVIRFATKSIEREINSVNDNPVIDVARRKALHGGNFQGTPIGVSMDNTRLAIAAIGRLMFSQFSELASSFYSNGLPSNLSGGRNPSLDYGFNGAEVAMASYCSELQFLANPVTNHVQTAEQHNQSVNSLGLISSRMTAEAVTILKLMSSTFLIALCQAVDLRQLEESIKAAVNKCVTNVAKKSLAMDDDDLLALLGAAIDRVAVFTYAEDPCRSSLPLIQKLRAVLMDHALANGDNQLAKVAEFEQQLRAVLHDEVEAARAAVESGTAPNRITQCRSYPLYRFVRKELGAEYLTGEKTRSPGEEVDKVVIAMNQHKHINPLLECLSEWKGAPLPLN

SEQ ID NO: 133296 - DNA, 2175 bp, Brassica napus
  CDS (1)..(2175)
atggatcagatcaacggatcagttcaccaaaacggcaaaaccgaagcgatgttgttgtgcggcgtagtagagaagactaaagtgacggtggcggcggatccgttaaattggggtgctgcggcggagcagatgaaagggagtcatttagatgaggtgaagaggatggttgaggattaccgtaaaccggtggtgaatctcggcggagaaacactgacgatcggacaagtcgcggcgatctcgaacgtaggcggtggcgttaaggttgagctagcggaggcttcgagagctggcgtgaaagctagcagcgattgggttatggagagtatgggtaaaggtactgacagttacggtgtaaccactgggtttggagctacctctcaccggagaaccaaaaacggcgccgcattgcaaaccgaactcatcaggtttttgaacgccggaatcttcgggaacacgaaggagacatgtcacacgctaccggaatccgccacgagagccgccatgctcgtccgagtcaacacactcctccaaggatactccgggatccgattcgaaatcctcgaagcgatcaccagcctcctcaaccacaacatctctccgtctctccccctccgcggaaccataaccgcctccggcgatctcgtccccctctcctacatcgcaggtctcctcaccggccgtccgaactccaaagccaccggtcccaacggtgaatccctaaccggcgaagaagccttcaagaaagccggaatcacttccggattcttcgatctacagcctaaggaaggcttagcgctcgtcaacggcacggcggttggatccggcatggcgtcgatggttctcttcgaagcgaatgttcaatcggtcctcgccgaggttttatccgcgatcttcgcggaggtgatgagcgggaagccggagttcaccgatcatttgactcaccgactaaaacatcaccccggacagatcgaagcggcggcgatcatggagcacatcctcgacggaagctcgtacatgaagctagcgcaaaagcttcacgagatggatccgttacaaaaaccgaaacaagaccgttacgcgctccgcacgtctcctcaatggctcggccctcagatcgaagtgatccgtcacgccacgaagtcaatcgagcgtgagatcaactcagttaacgataatccgttaattgacgtttcgaggaacaaagcgattcacggtggtaacttccaggggactccgataggtgtctctatggacaacacacgtttagcggttgcagctattgggaagctcatgttcgctcagttctctgagttggtgaacgacttctataacaacggtcttccttcgaatctaacagcttccaacaacccaagtttagattacggattcaaaggagcagagatcgccatggcttcttactgctctgagcttcagtaccttgcgaatccagtaacaagccatgttcaatcagctgaacagcataaccaagatgttaactctttaggactcatctcctctcgtaagacgtcagaagctgttgacattctcaggctgatgtctaccacgttcctcgtagcgatttgtcaagctgttgatttgaaacatcttgaggagaatctaagacaaaccgtgaagaacactgtttctcaagtggcgaagaaagtgttgaccactggagtcaacggggagctgcatccttcacggttctgtgagaaagacttgcttaaggtcgttgatcgtgaacaagtgtttacatacgttgacgatccttgtagcgctacttacccgttgatgcagaagttaagacaagtcattgtcgatcacgctttatccaatggtgagattgagaagaacgcagtgacttcgatctttcaaaagattggggcttttgaggaggagcttaagatggtgcttccaaaggaagtggatgcgactagagaggcttacgctaatggaacggcggcgattcccaacaggattaaggaatgtcgatcttatccgctgtataagttcgtgagggaagagctcggaacgaagttgttgaccggagaaaaggttgtctctccgggagaggagtttgataaggtattcactgcaatgtgtgaaggtaagattattgatccattgatggattgtctcaaggaatggaacggagctcccattcccatatgttaa

SEQ ID NO: 133297 - protein, 724 aa, Brassica napus
MDQINGSVHQNGKTEAMLLCGVVEKTKVTVAADPLNWGAAAEQMKGSHLDEVKRMVEDYRKPVVNLGGETLTIGQVAAISNVGGGVKVELAEASRAGVKASSDWVMESMGKGTDSYGVTTGFGATSHRRTKNGAALQTELIRFLNAGIFGNTKETCHTLPESATRAAMLVRVNTLLQGYSGIRFEILEAITSLLNHNISPSLPLRGTITASGDLVPLSYIAGLLTGRPNSKATGPNGESLTGEEAFKKAGITSGFFDLQPKEGLALVNGTAVGSGMASMVLFEANVQSVLAEVLSAIFAEVMSGKPEFTDHLTHRLKHHPGQIEAAAIMEHILDGSSYMKLAQKLHEMDPLQKPKQDRYALRTSPQWLGPQIEVIRHATKSIEREINSVNDNPLIDVSRNKAIHGGNFQGTPIGVSMDNTRLAVAAIGKLMFAQFSELVNDFYNNGLPSNLTASNNPSLDYGFKGAEIAMASYCSELQYLANPVTSHVQSAEQHNQDVNSLGLISSRKTSEAVDILRLMSTTFLVAICQAVDLKHLEENLRQTVKNTVSQVAKKVLTTGVNGELHPSRFCEKDLLKVVDREQVFTYVDDPCSATYPLMQKLRQVIVDHALSNGEIEKNAVTSIFQKIGAFEEELKMVLPKEVDATREAYANGTAAIPNRIKECRSYPLYKFVREELGTKLLTGEKVVSPGEEFDKVFTAMCEGKIIDPLMDCLKEWNGAPIPIC

SEQ ID NO: 133298 - DNA, 2151 bp, Glycine max
  CDS (1)..(2151)
atggaagcaactaccatcaccaatgggagccaaaacggttcgttttgcttgtccactactaagggaagtagtgatccgttaaactggggagcggcggcagaggcgatgaaggggagccacctggacgaggtgaagcgcatggtggccgagtaccgcaagccggtggtccggctcggcggagagacgctcaccatcgctcaggtggccgccgtagccggacacgacctcggtgtggcggtggagctctcagagtctgcgagagaaggagtgaaggcgagcagtgagtgggtgatgaacagcatgaacaacggcactgacagttacggcgtcaccaccggcttcggtgccacatcacaccgccgaaccaaacaaggtggtgctctgcagaaagaactcatcagattcttaaacgctggaatatttggaaatggaactgaatcaagccataccctgccacacactgcaaccagagcagccatgttagtgagaatcaacactcttcttcaggggtactcaggcattagatttgaaatcttagaagccatcaccaagctcctgaacaacaacgttaccccatgtttgccacttcgtggtacaatcacagcttctggagatcttgttccactttcttacattgctggtttgctaactggcagacccaactccaaagctgttggaccttctggagaagtacttaacgcaaaagaagcttttgaattggctagcatcaactctgagttctttgaattgcaacccaaggaaggtcttgcccttgttaatggcactgctgttggttctggattagcttctatggtactctttgaggctaatatactagctgtgttgtctgaagttctatcagctatttttgctgaagtgatgcaggggaaacctgaattcactgaccatttgacacacaagctaaagcaccatcctggtcaaattgaggctgctgctattatggagcatatcttggatggaagttcctacatgaaagctgctaagaagttgcatgagattgatcccttgcaaaagccaaaacaagatagatatgcccttagaacttcaccacagtggcttggtcctcttattgaagtgattcgtttctcaaccaagtcaattgagagagagatcaactctgtgaatgacaaccctttgattgatgtttcaaggaacaaggcattgcatggtggcaatttccaaggaacccctattggagtctctatggacaacacacgtttggcacttgcatctattggcaaactcatgtttgctcaattctctgagcttgtcaatgacttttacaacaatggattgccttcaaatctcactgctagcagaaatccaagcttggactatggtttcaagggagctgaaattgccatggcttcttactgctctgaactccaatatcttgcaaatccagtaactacccatgtccaaagtgctgagcaacacaaccaggatgtcaactctttgggcttgatctcatctagaaagacaaatgaagccatcgagatccttaagctcatgtcttccacattcttgattgcactttgccaagcaattgacttgaggcatttagaggagaatttgaaaaactcggtcaagaacaccgtgagccaagtttccaaaaggattcttaccacaggtgtcaatggagaactccatccttcaagattttgtgagaaggatctgctaaaagtggttgatagggagtatatattttcctacattgatgacccctgcagtgctacatacccattgatgcaaaaacttaggcaagtgcttgtagatcatgcattggtaaatgcagagagtgagaaggatgtgaactcgtccatctttcaaaagatagcaatctttgaggaagagttgaagaatctcttgccaaaagaggttgaaagtgcaagggctgcttatgagagtggcaaagctgcaattccaaacaagatccaagaatgcagatcttacccactgtacaagtttgtgagagaggaattagggactgggttgctaactggagaaaaggtgaggtcaccaggtgaagagtttgacaaattattcacagcaatgtgccaagggaaaattattgatcctcttatggagtgccttggggagtggaatggagctcctcttccaatctcttaa

SEQ ID NO: 133299 - protein, 716 aa, Glycine max
MEATTITNGSQNGSFCLSTTKGSSDPLNWGAAAEAMKGSHLDEVKRMVAEYRKPVVRLGGETLTIAQVAAVAGHDLGVAVELSESAREGVKASSEWVMNSMNNGTDSYGVTTGFGATSHRRTKQGGALQKELIRFLNAGIFGNGTESSHTLPHTATRAAMLVRINTLLQGYSGIRFEILEAITKLLNNNVTPCLPLRGTITASGDLVPLSYIAGLLTGRPNSKAVGPSGEVLNAKEAFELASINSEFFELQPKEGLALVNGTAVGSGLASMVLFEANILAVLSEVLSAIFAEVMQGKPEFTDHLTHKLKHHPGQIEAAAIMEHILDGSSYMKAAKKLHEIDPLQKPKQDRYALRTSPQWLGPLIEVIRFSTKSIEREINSVNDNPLIDVSRNKALHGGNFQGTPIGVSMDNTRLALASIGKLMFAQFSELVNDFYNNGLPSNLTASRNPSLDYGFKGAEIAMASYCSELQYLANPVTTHVQSAEQHNQDVNSLGLISSRKTNEAIEILKLMSSTFLIALCQAIDLRHLEENLKNSVKNTVSQVSKRILTTGVNGELHPSRFCEKDLLKVVDREYIFSYIDDPCSATYPLMQKLRQVLVDHALVNAESEKDVNSSIFQKIAIFEEELKNLLPKEVESARAAYESGKAAIPNKIQECRSYPLYKFVREELGTGLLTGEKVRSPGEEFDKLFTAMCQGKIIDPLMECLGEWNGAPLPIS

SEQ ID NO: 133300 - DNA, 2115 bp, Triticum aestivum
  CDS (1)..(2115)
atggcaggcaacggagccatcgtcgagaaggacccgctcaactggggcgcggcggcggccgagctcaccggcagccacctcgacgaggtgaagcggatggtggcgcagttccgcgagcccgtggtgaagatcgagggcgccagcctccgcgtcggccaggtggcggccgtggcccaggccaaggacgcgtcgggcgtctccgtggagctcgacgaggaggcgcggccccgcgtcaaggccagcagcgagtggatcctcagctgcctcgccggcggcggcgacatctacggcgtcaccaccggcttcggcggcacctcccaccgccgcaccaaggacgggcccgccctccaggtggagctcctcaggcatctgaacgccggaatctttggccccggcgccgatggccactcgctgccggcggaggtgtcccgtgcggccatgctcgtgcgcatcaacaccctcctccagggctactccggcatccgcttcgagatcctcgaggccatcaccaagctcatcaacaccggcgtcagcccctgcctcccgctacggggcaccatcaccgcctccggcgaccttgtgccgctgtcctacatcgccggtctcatcaccggacgccccaacgcgcaggccaccactgttgacgggaagaatgtggacgccgccgaggcattcaaggccgctggcatcgagggcggcttcttcaagctcaaccccaaggagggtctcgccattgtcaacggcacgtccgtgggctctgcgctcgcggccacggtgctgttcgactgcaacgtccttgctgttctctccgaagtcctgtccgccgtcttctgcgaggtgatgaacggcaagcccgagttcaccgaccacctcacccacaagctcaagcaccaccccggctccatcgaggccgcggccatcatggagcacatcctggccggcagcgccttcatgggccacgccaagaaggtcaacgagattgacacgcagctcaagcccaagcaagacaggtacgcgctccgcacgtcgccccagtggctcggcccccagatcgaggtcatccggtctgccaccaagtccatcgagcgcgaggtcaactccgtcaacgacaaccccgtcatcgacgtccaccgtggcaaggcgctccatggcggcaacttccagggcacacccatcggtgtgtccatggacaacacccgtctcgccatcgccaacattggcaagctcatgttcgcgcagttctcggagctcgtcaacgagttctacaacaacgggctgacctccaacctggcaggcagccgcaacccgagcctggactacggcttcaagggcaccgaaatcgccatggcttcctactgctctgagctccagtaccttgccaacccggtgaccaatcatgtccagagtgccgagcagcacaaccaggacgtgaactctctgggccttgtgtcggccaggaagaccgccgaggctgtggacatcctcaagctcatgtcctccacatacatggtggcgctgtgccaggccatcgacctccgccacctggaggagaacatcaagacctccgtgaagaactgcgtgacgcaggtgtcgaagaaggtgctgaccatgaaccccaccggcgacctctccagcgcgcgcttcagcgagaagagcctcatcaccgccatcgaccgcgaggccgtgttcagctacgccgacgacgcctgcagcgccaactacccactgatgcagaagctgcgcgccgtgctcgtggaccacgcgctcaccgccggccccggcgaagccgagagcgaggccacggtgttctccaagatcaacaagttcgaggaggagctgcggtcggccctgccgcgggagatcgaggccgcccgcgtggccttcgagaacggcaccgcgcccatccccaacctgatcaaggagagcaggtcgttcccgctgtaccgcttcgtccgcgaggagctcggctgcgtgtacctcaccggcgagaagctgctgtcccccggcgaggagtgcaccaaggtcttcctgggcatcagccagaacaagctcatcgaccccatgttggagtgcctcaaggagtggaacggcgagcccctgcccatcaacgtctga

SEQ ID NO: 133301 - protein, 704 aa, Triticum aestivum
MAGNGAIVEKDPLNWGAAAAELTGSHLDEVKRMVAQFREPVVKIEGASLRVGQVAAVAQAKDASGVSVELDEEARPRVKASSEWILSCLAGGGDIYGVTTGFGGTSHRRTKDGPALQVELLRHLNAGIFGPGADGHSLPAEVSRAAMLVRINTLLQGYSGIRFEILEAITKLINTGVSPCLPLRGTITASGDLVPLSYIAGLITGRPNAQATTVDGKNVDAAEAFKAAGIEGGFFKLNPKEGLAIVNGTSVGSALAATVLFDCNVLAVLSEVLSAVFCEVMNGKPEFTDHLTHKLKHHPGSIEAAAIMEHILAGSAFMGHAKKVNEIDTQLKPKQDRYALRTSPQWLGPQIEVIRSATKSIEREVNSVNDNPVIDVHRGKALHGGNFQGTPIGVSMDNTRLAIANIGKLMFAQFSELVNEFYNNGLTSNLAGSRNPSLDYGFKGTEIAMASYCSELQYLANPVTNHVQSAEQHNQDVNSLGLVSARKTAEAVDILKLMSSTYMVALCQAIDLRHLEENIKTSVKNCVTQVSKKVLTMNPTGDLSSARFSEKSLITAIDREAVFSYADDACSANYPLMQKLRAVLVDHALTAGPGEAESEATVFSKINKFEEELRSALPREIEAARVAFENGTAPIPNLIKESRSFPLYRFVREELGCVYLTGEKLLSPGEECTKVFLGISQNKLIDPMLECLKEWNGEPLPINV

SEQ ID NO: 133302 - DNA, 2172 bp, Brassica napus
  CDS (1)..(2172)
atggatcagactaacggttcagttcaccagaacggcaagatcgaagccatgttgtgcggtggagtagagaagacaaaagtggctgtggcggcggatccgttgaactggggtgcagcagcggaacagatgaaagggagtcacttggatgagttgaagaggatggttgaggagtaccgcagaccggtggtgaatctcgggggagagacgctaacaatcggacaagtcgcggcgatctccaccgcaggcggaggtgttaaggttgagctagcggaggcttcgagagctggcgtgaaagctagcagtgattgggttatggaaagtatgggcaaaggtactgacagttacggtgtcaccaccgggtttggagcgacctctcaccggagaaccaaaaacggcaccgcattgcaaacggaactcatcagatttttgaacgccggaatattcggtaacacgaaggagacatgccacacgctaccggaatccgccacgagagccgccatgctcgtccgagtcaacactctcctccaaggatactccgggatccgattcgaaatcctcgaagcgatcaccagcttcctcaaccacaacatctctccatctctccccctccgtggaaccataaccgcctccggcgatctcgtccccctctcctacatcgccggcctcctcaccggccgtccgaactccaaagccacaggtcccaacggcgaatccctaaccgccgaagaggccttcaaacaagccggaatcgcttccggattcttcgatctacaacccaaggaaggcttagcgctcgttaacggcacggcggttggatccggcatggcgtcgatggttctattcgaagcgaacgttcaatcggtgttagcggaggtcttatccgcgatcttcgcggaggtgatgagcgggaagcctgagttcaccgatcatctaacgcacaggctgaagcaccaccccgggcaaatcgaagcggcggcgatcatggagcacatcctcgacggaagctcgtacatgaagctagcgcagaagcttcacgagatggatccgttacaaaagccgaaacaagaccgttacgctctccgtacctctcctcagtggctcggccctcagatcgaagtgatccgtcacgcaacgaagtcgatcgagcgtgagatcaactccgttaacgataatccgttgatcgatgtttctagaaacaaagcgattcacggtggtaacttccaggggactccaatcggagtctccatggataacactcgtttagcgattgcttcgatagggaagctcatgttcgctcaattctcggagcttgttaacgatttctacaacaacggtcttccttcgaatctaacggcttcgaacaatccaagcttggattacggattcaaaggagctgagatcgctatggcttcgtattgctctgagcttcagtacttggcgaatccagttacaagccatgttcaatcagctgagcaacataaccaagatgtgaactctttgggactcatctcgtctcgcaaaacgtcagaagctgttgacatcctcaagcttatgtcgacaacgttccttgtggctatatgccaagctgttgatttgagacatcttgaggagaatctgagacaaacggtgaagaacacagtttctcaagtggcgaagaaagttttaaccactggagtcaacggtgagctgcatccgtcgcggttctgcgagaaggacttgcttaaggtcgttgatcgcgagcaagtgttcacgtacgtggatgatccttgtagcgctacgtacccgttgatgcagaaactgagacaagttattgttgatcatgctttgtctaacggtgagactgagaagaacgcagtgacttcgatctttcaaaagatcggagctttcgaggaagagctcaagatggtgctccctaaagaagtggatgcggctagagaggcttacggtaacggaacggcggcgattccgaacaggattaaggaatgtcggtcttacccgttgtataagttcgtgagggaagagcttggaacgaagctgttgaccggagaaaaggttgtgtctccgggagaggagtttgataaggtgttcactgcaatgtgtgaaggtaagatcattgatccgttgatggagtgcctcaaggaatggaacggagctccgattccgatatgctaa

SEQ ID NO: 133303 - protein, 723 aa, Brassica napus
MDQTNGSVHQNGKIEAMLCGGVEKTKVAVAADPLNWGAAAEQMKGSHLDELKRMVEEYRRPVVNLGGETLTIGQVAAISTAGGGVKVELAEASRAGVKASSDWVMESMGKGTDSYGVTTGFGATSHRRTKNGTALQTELIRFLNAGIFGNTKETCHTLPESATRAAMLVRVNTLLQGYSGIRFEILEAITSFLNHNISPSLPLRGTITASGDLVPLSYIAGLLTGRPNSKATGPNGESLTAEEAFKQAGIASGFFDLQPKEGLALVNGTAVGSGMASMVLFEANVQSVLAEVLSAIFAEVMSGKPEFTDHLTHRLKHHPGQIEAAAIMEHILDGSSYMKLAQKLHEMDPLQKPKQDRYALRTSPQWLGPQIEVIRHATKSIEREINSVNDNPLIDVSRNKAIHGGNFQGTPIGVSMDNTRLAIASIGKLMFAQFSELVNDFYNNGLPSNLTASNNPSLDYGFKGAEIAMASYCSELQYLANPVTSHVQSAEQHNQDVNSLGLISSRKTSEAVDILKLMSTTFLVAICQAVDLRHLEENLRQTVKNTVSQVAKKVLTTGVNGELHPSRFCEKDLLKVVDREQVFTYVDDPCSATYPLMQKLRQVIVDHALSNGETEKNAVTSIFQKIGAFEEELKMVLPKEVDAAREAYGNGTAAIPNRIKECRSYPLYKFVREELGTKLLTGEKVVSPGEEFDKVFTAMCEGKIIDPLMECLKEWNGAPIPIC

SEQ ID NO: 133304 - DNA, 2112 bp, Glycine max
  CDS (1)..(2112)
atggcgaccattattctagaaaatgaccctcttaactggagccatgcagcagattcactcaagggtagccactttgaagaagtaaaacgcatggtggcagaataccggaagccacttatctctctgggtggcggggagacactaactatatcacaggtggctgctgttgctgttgccaatgccaaccataacttgcaggctaaggttgatctctcagagtctgcaagggcaggcgttgacgccagctgcgactggatcacccaaaacattaacaaaggcactcccatttatggtgttaccaccggctttggtgctgcctcccacaggcaaactcaacaaggccttgctcttcagaaggaaatggttaggtttttaaactgcgcaatatttggctaccagacagagttatctcacacactgcctaaatcagcaacaagagcagcaatgcttgtgagggttaatacccttcttcaaggctactcaggaatcagatttgaaatcctagaagctatcacgaaactactgaaccacaatgtcacccccatcttgccattacgtggtacagttactgcgtctggtgatctaattcctctgtcctacattgttgcattgctaactggtaggcgaaatagtaaagctgttggaccctctggagagtcacttaatgctaaggaagctttccatttagcaggtctacattctgggttctttgagttgaagcccaaggaaggtcttgccctcgtaaatggcacggccgttgggtctggcgtagcttctactgtgctttttgaggcaaacatattagctttattgtccgaagttctatcagcagtttttgcagaagtcatgcaagggaagccagaatttacacatcatctaatacataagctgaagtatcatcctggtcaaattgaagctgcagctattatggaacacattctagatggaagctcttatgtcaaagatgctaaactgcaacagccagatccattgcagaagccaagaaaagatcgttatgctcttgtaacttctcctcagtggcttggtccacagattgaaatcatccggtattcgaccaaatcaattgaaagggaaataaactcagtaaatgacaatcccttgattgatgtcacaaggaataaggcactgaatggtggtaatttccaaggaaccccaattggagtttcaatggataatgcacgtttagctgttgcttcaattggcaaactcatctttgcccaatttactgagctagtcaatgatttgtataacaatgggttgccatcaaatctttctgctggtagaaacccaagtctggattacggtttcaaggcatctgaagttgccatggctgcttattgttctgaacttcaatatctagcaaatccagtaacgagccatgtgcaaagtgctgagcagcacaaccaagatgtgaactctttgggcttaatttctgctttgaaaactgtcgaagccgttgagatattaaagctcatgtcttcgacttatctggttgcactctgccaagctattgacttgaggcatttggaggaaaatttcaagagtacggtcaagaatactgtaagcagagttgcacagaaaacattaattacagaaggcaaagaagaaattaacccatttcgactttgtgagaaagatttgcttaaagtggtcgatagagagtacgtattttcctacattgatgatccctccaatgttacgtaccccttgatgccaaaactaaaacaagtactttatgagaaagcacacatcagtgccattaatgacaagaatgtgagcttgttgatttttgagaagataggagcttttgaggatgaattgaagtctctcttgccaaaggaagttgaaaatgcaagggtagcttatgagaatggcaatccagcaattccaaacagaataaaggagtgtaggtcatatccactgtacaagtttgtgagggaggagttagagatagggttgctcaccggagaaaagaatctctcacccgatgaggaatttgaaaaagtatatacagccatgtgtcaagcaaagattgttgacccaattctggaatgtcttggagattggaaagggtctcccatcccaatataa

SEQ ID NO: 133305 - protein, 703 aa, Glycine max
MATIILENDPLNWSHAADSLKGSHFEEVKRMVAEYRKPLISLGGGETLTISQVAAVAVANANHNLQAKVDLSESARAGVDASCDWITQNINKGTPIYGVTTGFGAASHRQTQQGLALQKEMVRFLNCAIFGYQTELSHTLPKSATRAAMLVRVNTLLQGYSGIRFEILEAITKLLNHNVTPILPLRGTVTASGDLIPLSYIVALLTGRRNSKAVGPSGESLNAKEAFHLAGLHSGFFELKPKEGLALVNGTAVGSGVASTVLFEANILALLSEVLSAVFAEVMQGKPEFTHHLIHKLKYHPGQIEAAAIMEHILDGSSYVKDAKLQQPDPLQKPRKDRYALVTSPQWLGPQIEIIRYSTKSIEREINSVNDNPLIDVTRNKALNGGNFQGTPIGVSMDNARLAVASIGKLIFAQFTELVNDLYNNGLPSNLSAGRNPSLDYGFKASEVAMAAYCSELQYLANPVTSHVQSAEQHNQDVNSLGLISALKTVEAVEILKLMSSTYLVALCQAIDLRHLEENFKSTVKNTVSRVAQKTLITEGKEEINPFRLCEKDLLKVVDREYVFSYIDDPSNVTYPLMPKLKQVLYEKAHISAINDKNVSLLIFEKIGAFEDELKSLLPKEVENARVAYENGNPAIPNRIKECRSYPLYKFVREELEIGLLTGEKNLSPDEEFEKVYTAMCQAKIVDPILECLGDWKGSPIPI

SEQ ID NO: 133306 - DNA, 2142 bp, Glycine max
  CDS (1)..(2142)
atggaagcaactaatggccaccaaaatggttcgttttgcttgtccagtactaagggaagtagtgatccgttaaactggggagcggcggcggaggcgatgaaggggagccacctggacgaggtgaagcgcatggtgtccgagtaccggaagccggtggtccggctcggcggcgagacgctcaccatcgcccaggtggccgccgtggctggacacgaccacggcgtgacggtggagctctcggagtctgcccgagaaggagtgaaggcgagcagtgagtgggtgatgaacagcatgaacaacggaactgacagttacggcgtcaccaccggcttcggtgccacgtcacaccgccgaaccaaacaaggtggtgctctgcagaaagaactcatcagattcttaaacgcaggaatatttggaaatggaaccgaatcaagccacaccctgccacacactgcaaccagagcagccatgttagtgagaatcaacactcttcttcaagggtactcaggcattagaattgaaatcctagaagccatcaccaagctcctcaacaacaacgttaccccaaggttgccacttcgtggtacaatcacagcttctggagatcttgttccactttcttacattgctggtttgctaactggcagacccaactccaaagctgttggacctaatggagaagtacttaacgcaaaagaagcttatgaattggctagcatcaattctgagttctttgaattgcaacccaaggaaggccttgcccttgttaatggcactgctgttggttctggattagcttctatggttctctttgaggctaatatactagctgtgttgtctgaagttctatcagctatttttgcggaagtgatgcaagggaaacctgaatttactgaccatttgacacacaagttaaagcaccatcctggtcaaattgaggctgctgcaattatggagcatattttggatggaagttcctacatgaaagctgctaagaagttgcatgagattgatccattgcaaaagcaaaaacaagatcgatatgcccttagaacttcaccacaatggcttggtcctctcattgaagtgattcgtttctcgactaagtcaattgagagagagattaactctgtgaatgacaaccctttgattgatgtctcaaggaacaaggcattacatggtggcaatctccaaggaaccccaattggagtctctatggacaacacgcgtctggctcttgcatctattggcaaactcatgtttgctcaattctctgagcttgtcaatgatttttacaacaatgggttgccttcaaatctcactgctagcagaaatcctagcttggactatgggttcaagggagctgaaattgccatggcttcttactgctctgaactccaatatcttgcaaatccagtaactagccatgtccaaagtgctgagcagcataaccaggatgtgaactctttgggtttaatttcatccagaaagacaaatgaagctatcgagatccttaagctcatgtcttccacattcttgattgcactttgccaagcgattgacttgaggcatttggaggagaatttgaaaaactcggtcaagaacactgtgagccaagtttccaaaaggattcttaccacaggtgtcaatggagaactccatccttcaagattttgtgaaaaggatctgctaaaagtggttgatagggagtacgtattttcctacattgatgacccctgcagtgctacatacccattgatgcaaaaacttaggcaagtgcttgtagatcatgccttggtaaatgcagagaatgagaaggatatgaacacatccatctttcaaaagatagcaaactttgaggaggagttgaagaatttcttgccaaaagaggttgaaagtgcaagggttgcttatgagagtggcaaagctgcaattccgaacaagatccaagaatgcagatcttacccactgtacaagtttgtgagagaggaattagggactgggttgctaactggagagaaggtcaggtcaccaggtgaagagtttgacaaattattcacagcaatgtgccagggcaaaattattgatcctcttctggagtgccttggggagtggaatggagctcctcttccaatctgttga

SEQ ID NO: 133307 - protein, 713 aa, Glycine max
MEATNGHQNGSFCLSSTKGSSDPLNWGAAAEAMKGSHLDEVKRMVSEYRKPVVRLGGETLTIAQVAAVAGHDHGVTVELSESAREGVKASSEWVMNSMNNGTDSYGVTTGFGATSHRRTKQGGALQKELIRFLNAGIFGNGTESSHTLPHTATRAAMLVRINTLLQGYSGIRIEILEAITKLLNNNVTPRLPLRGTITASGDLVPLSYIAGLLTGRPNSKAVGPNGEVLNAKEAYELASINSEFFELQPKEGLALVNGTAVGSGLASMVLFEANILAVLSEVLSAIFAEVMQGKPEFTDHLTHKLKHHPGQIEAAAIMEHILDGSSYMKAAKKLHEIDPLQKQKQDRYALRTSPQWLGPLIEVIRFSTKSIEREINSVNDNPLIDVSRNKALHGGNLQGTPIGVSMDNTRLALASIGKLMFAQFSELVNDFYNNGLPSNLTASRNPSLDYGFKGAEIAMASYCSELQYLANPVTSHVQSAEQHNQDVNSLGLISSRKTNEAIEILKLMSSTFLIALCQAIDLRHLEENLKNSVKNTVSQVSKRILTTGVNGELHPSRFCEKDLLKVVDREYVFSYIDDPCSATYPLMQKLRQVLVDHALVNAENEKDMNTSIFQKIANFEEELKNFLPKEVESARVAYESGKAAIPNKIQECRSYPLYKFVREELGTGLLTGEKVRSPGEEFDKLFTAMCQGKIIDPLLECLGEWNGAPLPIC

SEQ ID NO: 133308 - DNA, 2154 bp, Glycine max
  CDS (1)..(2154)
atggcatcagaagcaaatgctgccaacaccaacttctgtgtaaatgttagcaacaatggctacattagtgctaatgaccccttgaactggggtgcggcggcggaggctatggctgggagccacctcgacgaggtcaagcgcatgctagaggagtaccggaggcccgtcgtcaagctcggtggagagaccctgaccatctcgcaggtcgcggcgatcgcggcccacgaccagggggtgaaggtggagctggcggagtcctccagggccggtgttaaggccagcagtgactgggtgatggagagcatgaacaagggcactgacagctacggcgtcaccaccgggttcggtgctacctcccaccggagaaccaaacagggcgctgccttgcagaaggagctaattaggtttttgaatgctggaatatttggcaatggtacagagtccaattgcaccctaccccacacagcaaccagagcagctatgctagtgagaatcaacacactcctccaaggctactcaggaatcaggtttgaaattttggaggcaatcacaaagcttctgaacaacaacattaccccatgtttgccacttaggggaacaatcacagcatctggtgatcttgttcctttgtcctacattgctggtttgctaactggtagaccaaactccaaggctgttggaccctctggtgagattctgaatgccaaagaagcctttgaattggccaacatcggtgctgagttctttgagttgcaacctaaggaaggccttgcccttgtgaatggcactgctgttggttctggcttggcctcaattgttctatttgaagccaacatcattgctgtcttgtctgaagttatttcagcaatttttgctgaagttatgcaaggaaagcctgaattcactgaccatttgactcataaactaaagcaccaccctggtcagattgaagctgctgctattatggaacacattttggaaggaagctcttacgtgaaagctgctaagaagttgcatgagattgatcctttacaaaagcctaaacaggaccgttatgctcttaggacttcaccacaatggcttggtcctctaattgaagtgattagattctctaccaagtcaattgagagggagattaactcagtcaatgacaaccctttgattgatgtgtcaaggaacaaggcacttcatggtggtaacttccaaggaactcctattggagtctccatggataatacacgtttggctcttgcttcaattggtaaactcatgtttgctcaattctctgagcttgtcaatgattattacaacaatggtttgccttcaaatctcactgccagcagaaaccccagcttggattatggattcaagggagctgaaattgccatggcatcttattgttctgaacttcaatatttggcgaatccggtgacaagccacgtgcaaagcgcggagcaacacaaccaagatgtgaactctctggggctgatttcatcaaggaagactcatgaggctattgagatcctcaagctcatgtcctccactttcctggtcgccctttgccaagccattgacttgaggcatttggaggagaatttgaagaacacggtcaagaacgttgtgagtcaagttgctaagaggactctcaccacaggtgtcaatggagaacttcacccttcaaggttttgtgagaaggacttgctcaaggttgttgatagggagtacacatttgcatacattgatgacccctgcagtggaacataccctttgatgcaaaagctaaggcaagtgcttgtggactatgcattggccaatggagagaacgagaagaacacaaacacatcaatcttccaaaagattgcaacatttgaggaagagttgaagacccttttgcctaaggaagtggaaggtgcaagagttgcatatgagaatgaccaatgtgcaattccaaacaagatcaaggaatgcaggtcttaccccttgtacaagtttgtgagagaggagttggggacagcattgctaactggtgaaagggttatctcaccgggtgaagagtgtgacaaagtgttcactgctttgtgccaagggaagatcattgatccacttttggaatgccttggggagtggaatggggcacctcttccaatatgttag

SEQ ID NO: 133309 - protein, 717 aa, Glycine max
MASEANAANTNFCVNVSNNGYISANDPLNWGAAAEAMAGSHLDEVKRMLEEYRRPVVKLGGETLTISQVAAIAAHDQGVKVELAESSRAGVKASSDWVMESMNKGTDSYGVTTGFGATSHRRTKQGAALQKELIRFLNAGIFGNGTESNCTLPHTATRAAMLVRINTLLQGYSGIRFEILEAITKLLNNNITPCLPLRGTITASGDLVPLSYIAGLLTGRPNSKAVGPSGEILNAKEAFELANIGAEFFELQPKEGLALVNGTAVGSGLASIVLFEANIIAVLSEVISAIFAEVMQGKPEFTDHLTHKLKHHPGQIEAAAIMEHILEGSSYVKAAKKLHEIDPLQKPKQDRYALRTSPQWLGPLIEVIRFSTKSIEREINSVNDNPLIDVSRNKALHGGNFQGTPIGVSMDNTRLALASIGKLMFAQFSELVNDYYNNGLPSNLTASRNPSLDYGFKGAEIAMASYCSELQYLANPVTSHVQSAEQHNQDVNSLGLISSRKTHEAIEILKLMSSTFLVALCQAIDLRHLEENLKNTVKNVVSQVAKRTLTTGVNGELHPSRFCEKDLLKVVDREYTFAYIDDPCSGTYPLMQKLRQVLVDYALANGENEKNTNTSIFQKIATFEEELKTLLPKEVEGARVAYENDQCAIPNKIKECRSYPLYKFVREELGTALLTGERVISPGEECDKVFTALCQGKIIDPLLECLGEWNGAPLPIC

SEQ ID NO: 133310 - DNA, 2154 bp, Glycine max
  CDS (1)..(2154)
atggaatattcaaaggaaattcatagcaatggcaatgcaaatggttcattgaatctttgcaatggtagcacggacccacttaactggggcatggctgcggaacctttgaaaggtagccaccttgatgaggtgaagcgaatggtggaggactaccgtaaccccgtggtgaagttgggtggcaagagcctcaccgtgtctcaggtggcggcggttgccacccggcaccacggcggagttacggtggagctggccaaggagacccgccacggtgtcaaggccagcagtgactgggtcatggatagcatggttaagggcactgatagttacggagtcaccacagggttcggtgcaacctcacatagaagaaccaaacaaggtgctgccctccaaaacgaactcatcagatttttgaatgctggcatttttggtaatggcacagaatcttgtcacaccttacctcactcagctacaagggcagccatgttggttagaatcaataccttgcttcaaggatactcaggcattagatttgaaatcatggaggccatcaccaagtttttgaaccataacataaccccatgtcttcctctacgtggtacaatcactgcatcaggtgacttggttcctttatcatatgttgctggcctcttgattggaaggccaaactccaagtctattggacctaatggacaagttcttaatgctaaagaggcctttcaactagcaggaatagatggtggtttctttgagttgcaacctaaagagggtttggcactagtaaatggcactgcagtaggatctggcttggcttccgtggtcctttttgaggcaaacttacttgtcattctttctgaagtcttgtctgcaatttttgctgaagttatgcaaggaaaaccagagttcaccgaccacttgactcataaattgaagcaccaccctggccaaattgaggctgcagctatcatggaacatatattagatggaagctcatattgtaaggcagcacggaagttacatgagattgatccacttcaaaagcctaaacaagataggtatgctcttagaacatcacctcaatggcttggaccacaaattgaagtaattaggcatgcaacaaagatgattgaaagggagataaactctgtaaatgataaccccttgattgatgtttcaaggaataaggcactacatggggggaatttccaaggtaccccaattggtgtttcaatggataacacccgtttagccattgcatcaattgggaaacttatgtttgcccaattctctgaacttgtaaatgacttctacaacaatggtttgccttcaaatctaacagctagtcgcaatccgagcttagattatggattcaaaggtgctgaaattgcaatggcatcctattgttcagaacttcaataccttgccaatcctgtcaccaatcatgtccaaagcgctgagcaacataaccaagatgtgaactctttaggcttagtttcttcaagaaagacagctgaagcaatagatatattaaagcttatgtcatccactttcttagttgctttgtgccaagccattgatttgaggcatttggaggaaaacttgaagaacactgttaggaataccgttagtcaagtggccaaaagagttctcacagttggcatcaatggtgagttacatccttctaggttctgtgagaaagacttgcttaaaattgttgatcgtgagtatgtctatgcttacattgatgacccctgtagtgcaacctaccctctgatgcaaaaattgagattagtcctagttgatcatgcattacaaaatggtgacaaagaggtgaattcaagtacctcaattttccaaaagattggtgcctttgaggaagagctcaatgcccttttgccaaaagaggtggaaagttctaggattgaagttgagaatggaaatcctgccattcctaaccgaattaaggaatgcagatcttacccattatataagtttgttagagaaaatttgggtacaactttgctaacaggagagaaagtcaagtcacctggtgaggaatttgataaggtatttactgcattgtgtgaagggaagttaattgatcctttgttggactgtctaaaagagtggaagggtgctcctctaccaatatgctga

SEQ ID NO: 133311 - protein, 717 aa, Glycine max
MEYSKEIHSNGNANGSLNLCNGSTDPLNWGMAAEPLKGSHLDEVKRMVEDYRNPVVKLGGKSLTVSQVAAVATRHHGGVTVELAKETRHGVKASSDWVMDSMVKGTDSYGVTTGFGATSHRRTKQGAALQNELIRFLNAGIFGNGTESCHTLPHSATRAAMLVRINTLLQGYSGIRFEIMEAITKFLNHNITPCLPLRGTITASGDLVPLSYVAGLLIGRPNSKSIGPNGQVLNAKEAFQLAGIDGGFFELQPKEGLALVNGTAVGSGLASVVLFEANLLVILSEVLSAIFAEVMQGKPEFTDHLTHKLKHHPGQIEAAAIMEHILDGSSYCKAARKLHEIDPLQKPKQDRYALRTSPQWLGPQIEVIRHATKMIEREINSVNDNPLIDVSRNKALHGGNFQGTPIGVSMDNTRLAIASIGKLMFAQFSELVNDFYNNGLPSNLTASRNPSLDYGFKGAEIAMASYCSELQYLANPVTNHVQSAEQHNQDVNSLGLVSSRKTAEAIDILKLMSSTFLVALCQAIDLRHLEENLKNTVRNTVSQVAKRVLTVGINGELHPSRFCEKDLLKIVDREYVYAYIDDPCSATYPLMQKLRLVLVDHALQNGDKEVNSSTSIFQKIGAFEEELNALLPKEVESSRIEVENGNPAIPNRIKECRSYPLYKFVRENLGTTLLTGEKVKSPGEEFDKVFTALCEGKLIDPLLDCLKEWKGAPLPIC

SEQ ID NO: 133312 - DNA, 2139 bp, Glycine max
  CDS (1)..(2139)
atggaagcaactaatggccaccaaaatggttcgttttgcttgtccagtactaagggaagtgatccgttaaactggggagcggcggcggaggcgatgaaggggagccacctggacgaggtgaagcgcatggtgtccgagtaccggaagccggtggtccggctcggcggcgagacgctcaccatcgcccaggtggccgccgtggctggacacgaccacggcgtgacggtggagctctcggagtctgcccgagaaggagtgaaggcgagcagtgagtgggtgatgaacagcatgaacaacggaactgacagttacggcgtcaccaccggcttcggtgccacgtcacaccgccgaaccaaacaaggtggtgctctgcagaaagaactcatcaggtttttaaacgcaggaatatttggaaatggaaccgaatcaagccacaccctgccacacactgcaaccagagcagccatgttagtgaggatcaacactcttcttcaagggtactcaggcattagatttgaaatcctagaagccatcaccaagctcctcaacaacaatgttaccccatgtttgccacttcgtggtacaatcacagcttctggagatcttgttccactttcttacattgctggtttgctaactggcagacccaactccaaagctgttggacctaatggagaagtacttaacgctaaggaagcttttgaattggctagcatcaattctgagttctttgaattgcaacccaaggaaggccttgcccttgttaatggcactgctgttggttctggattagcttctatggttctctttgaggctaatatactagctgtgttgtctgaagttctatcagctatttttgcggaagtgatgcaagggaaacctgaatttactgaccatttgacacacaagttaaagcaccatcctggtcaaattgaggctgctgcaattatggagcatattttggatggaagttcctacatgaaagctgctaagaagttgcatgagattgatccattgcaaaagcaaaaacaagatcgatatgcccttagaacttcaccacaatggcttggtcctctcattgaagtgattcgtttctcgactaagtcaattgagagagagattaactctgtgaatgacaaccctttgattgatgtctcaaggaacaaggcattacatggtggcaatttccaaggaaccccaattggagtctctatggacaacacgcgtctggctcttgcatctattggcaaactcatgtttgctcaattctctgagcttgtcaatgatttttacaacaatgggttgccttcaaatctcactgctagcagaaatcctagcttggactatgggttcaagggagctgaaattgccatggcttcttactgctctgaactccaatatcttgcaaatccagtaactagccatgtccaaagtgctgagcagcataaccaggatgtgaactctttgggtttaatttcatccagaaagacaaatgaagctatcgagatccttaagctcatgtcttccacattcttgattgcactttgccaagcgattgacttgaggcatttggaggagaatttgaaaaactcggtcaagaacactgtgagccaagtttccaaaaggattcttaccacaggtgtcaatggagaactccatccttcaagattttgtgaaaaggatctgctaaaagtggttgatagggagtacgtattttcctacattgatgacccctgcagtgctacatacccattgatgcaaaaacttaggcaagtgcttgtagatcatgccttggtaaatgcagagaatgagaaggatatgaacacatccatctttcaaaagatagcaaactttgaggaggagttgaagaatttcttgccaaaagaggttgaaagtgcaagggttgcttatgagagtggcaaagctgcaattccgaacaagatccaagaatgcagatcttacccactgtacaagtttgtgagagaggaattagggactgggttgctaactggagagaaggtcaggtcaccaggtgaagagtttgacaaattattcacagcaatgtgccagggcaaaattattgatcctcttctggagtgccttggggagtggaatggagctcctcttccaatctgttga

SEQ ID NO: 133313 - protein, 712 aa, Glycine max
MEATNGHQNGSFCLSSTKGSDPLNWGAAAEAMKGSHLDEVKRMVSEYRKPVVRLGGETLTIAQVAAVAGHDHGVTVELSESAREGVKASSEWVMNSMNNGTDSYGVTTGFGATSHRRTKQGGALQKELIRFLNAGIFGNGTESSHTLPHTATRAAMLVRINTLLQGYSGIRFEILEAITKLLNNNVTPCLPLRGTITASGDLVPLSYIAGLLTGRPNSKAVGPNGEVLNAKEAFELASINSEFFELQPKEGLALVNGTAVGSGLASMVLFEANILAVLSEVLSAIFAEVMQGKPEFTDHLTHKLKHHPGQIEAAAIMEHILDGSSYMKAAKKLHEIDPLQKQKQDRYALRTSPQWLGPLIEVIRFSTKSIEREINSVNDNPLIDVSRNKALHGGNFQGTPIGVSMDNTRLALASIGKLMFAQFSELVNDFYNNGLPSNLTASRNPSLDYGFKGAEIAMASYCSELQYLANPVTSHVQSAEQHNQDVNSLGLISSRKTNEAIEILKLMSSTFLIALCQAIDLRHLEENLKNSVKNTVSQVSKRILTTGVNGELHPSRFCEKDLLKVVDREYVFSYIDDPCSATYPLMQKLRQVLVDHALVNAENEKDMNTSIFQKIANFEEELKNFLPKEVESARVAYESGKAAIPNKIQECRSYPLYKFVREELGTGLLTGEKVRSPGEEFDKLFTAMCQGKIIDPLLECLGEWNGAPLPIC

SEQ ID NO: 133314 - DNA, 2154 bp, Zea mays
  CDS (1)..(2154)
atggagtccgaggccggcctgcttgtccgctcctccctgaacggcgagggcctgtgcatgccggcgccgcgcgccgacccgctgaactggggcaaggccgcggagggcctgtccgggagccacctggacgaggtgaagcggatggtggcggagttccgcgagccgctggtgaagatccagggcgcgagcctgagcgtcgcgcaggtggctgccgtggccgtgggcgccgccggcgaggcccgcgtggagctggacgagtccgctcgcgagcgcgtcagggccagcagcgactgggtcatgggcagcatgatgaacggcaccgacagctacggcgtcaccaccggcttcggcgctacctcccaccgccgcaccaaggaaggcggcgcgctccagagggagctcatcagattcctcaatgccggcgcgttcggcacgggcgccgacggccacgtgctgccggcggaggccacccgcgcggcgatgctcgtgcgcgtcaacaccctcctccagggctactccggcatccgcttcgagatcctcgaggccatcgccaagctgctcaacgccaacgtcacgccgtgcctgccgctcaggggcaccatcaccgcgtcgggcgacctcgtcccgctctcctacatcgccggcctcatcacgggccgccagaactccgtggcggtggcccccgatggcaggaaggtgggcgccgcggaggcgttcaagatcgcgggcatcgagcacggcttcttcgagctgcagcccaaggaaggtctcgccatggtcaacggcacggccgtgggctctggccttgcgtccaccgtgctcttcgaggccaacgtgctcgccgtcctggccgaggtcatctccgcggtgttctgcgaggtcatgacgggcaagccggagttcaccgaccacctcacgcacaagctgaagcaccaccccggacagatcgaggccgccgcggtcatggagcacatcttggaaggcagctcctacatgaagctggcgaagaggctcggcgagctcgacccgctgatgaagccgaagcaggacaggtacgcgctccgcacctccccgcagtggctcggcccacagatcgaagtcatccgcttcgccaccaagtccatcgagcgcgagatcaactccgtcaacgacaacccgctcatcgacgtgtcccgtggcaaggcgctccacggcggcaacttccaggggacacccatcggtgtgtccatggacaacactcgtctcgcgctcgccgctatcggcaagctcatgttcgcgcagttctcggagctggtgaacgactactacaacaacggccttccctccaacctgtccggtgggcgtaacccgagcttggactacggtttcaagggtgccgagatcgccatggcctcctactgctccgagctccagttcctgggcaacccggtgaccaaccacgtccagagcgctgagcagcacaaccaggacgtgaactccctgggcctcatctcctccaggaagaccgccgaggccatcgacatcctgaagctgatgtcgtccacgttcctgatcgccctgtgccaggccatcgacctgcggcacctcgaggagaacgtgaaggccgcggtgaagaactgcgtgacgcaggtggccaagaagtccctgagcctgaacgccaggggcgggctccacaacgcgcgcttctgcgagaaggacctgcagacggcgatcgaccgcgaggcggtgttcgcgtacgcggacgacccgtgcagccccaactacgcgctgatgcagaagctccgcgcggtgctggtcgagcacgcgctggccaacggcgacgccgagcgcgacgtggacacgtccatcttcgccaaggtggccgagttcgagcagcaggtccgcgcggcgctgcccaaggaggtggaggccgcgcgcgcggccgtggagaacggcagccctctggtccccaacaggatcaaggagtgccggtcctacccgctgtaccggttcgtgcgcgaggaggtcggcaccgagtacctgaccggcgagaagacgaggtcgcccggcgaggagctgaacaaggtgctcgtggccatcaaccagcgcaagcacatcgacccgctgctcgagtgcctcaaggagtggaacggcgagcccctgccgctctgctga

SEQ ID NO: 133315 - protein, 717 aa, Zea mays
MESEAGLLVRSSLNGEGLCMPAPRADPLNWGKAAEGLSGSHLDEVKRMVAEFREPLVKIQGASLSVAQVAAVAVGAAGEARVELDESARERVRASSDWVMGSMMNGTDSYGVTTGFGATSHRRTKEGGALQRELIRFLNAGAFGTGADGHVLPAEATRAAMLVRVNTLLQGYSGIRFEILEAIAKLLNANVTPCLPLRGTITASGDLVPLSYIAGLITGRQNSVAVAPDGRKVGAAEAFKIAGIEHGFFELQPKEGLAMVNGTAVGSGLASTVLFEANVLAVLAEVISAVFCEVMTGKPEFTDHLTHKLKHHPGQIEAAAVMEHILEGSSYMKLAKRLGELDPLMKPKQDRYALRTSPQWLGPQIEVIRFATKSIEREINSVNDNPLIDVSRGKALHGGNFQGTPIGVSMDNTRLALAAIGKLMFAQFSELVNDYYNNGLPSNLSGGRNPSLDYGFKGAEIAMASYCSELQFLGNPVTNHVQSAEQHNQDVNSLGLISSRKTAEAIDILKLMSSTFLIALCQAIDLRHLEENVKAAVKNCVTQVAKKSLSLNARGGLHNARFCEKDLQTAIDREAVFAYADDPCSPNYALMQKLRAVLVEHALANGDAERDVDTSIFAKVAEFEQQVRAALPKEVEAARAAVENGSPLVPNRIKECRSYPLYRFVREEVGTEYLTGEKTRSPGEELNKVLVAINQRKHIDPLLECLKEWNGEPLPLC

SEQ ID NO: 133316 - DNA, 2229 bp, Glycine max
  CDS (1)..(2229)
atgcctaattacaatattattctcctcattccttcatttttaaacctagctccatctccctccactcaccataacatggcatcagaagcaaatgctgccaacaccaacttctgtgtaaatgttagcaacaatggctacattagtgctaatgaccccttgaactggggtgcggcggcggaggctatggctgggagccacctcgacgaggtcaagcgcatgctagaggagtaccggaggcccgtcgtcaagctcggtggagagaccctgaccatctcgcaggtcgcggcgatcgcggcccacgaccagggggtgaaggtggagctggcggagtcctccagggccggtgttaaggccagcagtgactgggtgatggagagcatgaacaagggcactgacagctacggcgtcaccaccgggttcggtgctacctcccaccggagaaccaaacagggcggtgccttgcagaaggagctaattaggtttttgaatgctggaatatttggcaatggtacagagtccaattgcaccctaccccacacagcaaccagagcagctatgctagtgagaatcaacacactcctccaaggctactcaggaatcaggtttgaaattttggaggcaatcacaaagcttctgaacaacaacattaccccatgtttgccacttaggggaacaatcacagcatctggtgatcttgttcctttgtcctacattgctggtttgctaactggtagaccaaactccaaggctgttggaccctctggtgagattctgaatgccaaagaagcctttgaattggccaacatcggtgctgagttctttgagttgcaacctaaggaaggccttgcccttgtgaatggcactgctgttggttctggcttggcctcaattgttctatttgaagccaacatcattgctgtcttgtctgaagttatttcagcaatttttgctgaagttatgcaaggaaagcctgaattcactgaccatttgactcataaactaaagcaccaccctggtcagattgaagctgctgctattatggaacacattttggaaggaagctcttacgtgaaagctgctaagaagttgcatgagattgatcctttacaaaagcctaaacaggaccgttatgctcttaggacttcaccacaatggcttggtcctctaattgaagtgattagattctctaccaagtcaattgagagggagattaactcagtcaatgacaaccctttgattgatgtgtcaaggaacaaggcacttcatggtggtaacttccaaggaactcctattggagtctccatggataatacacgtttggctcttgcttcaattggtaaactcatgtttgctcaattctctgagcttgtcaatgattattacaacaatggtttgccttcaaatctcactgccagcagaaaccccagcttggattatggattcaagggagctgaaattgccatggcatcttattgttctgaacttcaatatttggcgaatccggtgacaagccacgtgcaaagcgcggagcaacacaaccaagatgtgaactctctggggctgatttcatcaaggaagactcatgaggctattgagatcctcaagctcatgtcctccactttcctggtcgccctttgccaagccattgacttgaggcatttggaggagaatttgaagaacacggtcaagaacgttgtgagtcaagttgctaagaggactctcaccacaggtgtcaatggagagcttcacccttcaaggttttgtgagaaggacttgctcaaggttgttgatagggagtacacatttgcatacattgatgacccctgcagtggaacataccctttgatgcaaaagctaaggcaagtgcttgtggactatgcattggccaatggagagaacgagaagaacacaaacacatcaatcttccaaaagattgcaacatttgaggaagagttgaagacccttttgcctaaggaagtggaaggtgcaagagttgcatatgagaatgaccaatgtgcaattccaaacaagatcaaggaatgcaggtcttaccccttgtacaagtttgtgagagaggagttggggacagcattgctaactggtgaaagggttatctcaccgggtgaagagtgtgacaaagtgttcactgctttgtgccaagggaagatcattgatccacttttggaatgccttggggagtggaatggggcacctcttccaatatgttag

SEQ ID NO: 133317 - protein, 742 aa, Glycine max
MPNYNIILLIPSFLNLAPSPSTHHNMASEANAANTNFCVNVSNNGYISANDPLNWGAAAEAMAGSHLDEVKRMLEEYRRPVVKLGGETLTISQVAAIAAHDQGVKVELAESSRAGVKASSDWVMESMNKGTDSYGVTTGFGATSHRRTKQGGALQKELIRFLNAGIFGNGTESNCTLPHTATRAAMLVRINTLLQGYSGIRFEILEAITKLLNNNITPCLPLRGTITASGDLVPLSYIAGLLTGRPNSKAVGPSGEILNAKEAFELANIGAEFFELQPKEGLALVNGTAVGSGLASIVLFEANIIAVLSEVISAIFAEVMQGKPEFTDHLTHKLKHHPGQIEAAAIMEHILEGSSYVKAAKKLHEIDPLQKPKQDRYALRTSPQWLGPLIEVIRFSTKSIEREINSVNDNPLIDVSRNKALHGGNFQGTPIGVSMDNTRLALASIGKLMFAQFSELVNDYYNNGLPSNLTASRNPSLDYGFKGAEIAMASYCSELQYLANPVTSHVQSAEQHNQDVNSLGLISSRKTHEAIEILKLMSSTFLVALCQAIDLRHLEENLKNTVKNVVSQVAKRTLTTGVNGELHPSRFCEKDLLKVVDREYTFAYIDDPCSGTYPLMQKLRQVLVDYALANGENEKNTNTSIFQKIATFEEELKTLLPKEVEGARVAYENDQCAIPNKIKECRSYPLYKFVREELGTALLTGERVISPGEECDKVFTALCQGKIIDPLLECLGEWNGAPLPIC

SEQ ID NO: 133318 - DNA, 2115 bp, Zea mays
  CDS (1)..(2115)
atggcttgcgattccccgtgcatggcgacgccccgcgccgacccgcttaactgggggaaggcggcggaggagctgatgggcagccacctggacgaggtcaagcggatggtggccgagtaccgccaaccctcggtgaagatcgagggcgccagcctcagcatcgcgcaggtggccgctgtggccaccggcgctggcgaggcccgggtcgagctggacgagtccgcccgtagccgggtcaaggcaagcagcgactgggtcatgagcagcatgatgaacggcaccgacagctacggcgtcaccaccggcttcggcgccacgtcgcacaggaggaccaaggagggcggcgcgctccagagggagctcatcaggttcctcaacgcaggcgccttcggcaccggcacggacggccacgtcctcccggccgaggcgacgcgcgcggccatgctcgtccgcatcaacaccctcctccaggggtactccgggatccgcttcgagatcctcgaggcgatcgtcaagctgctcaacgccaacgtcacgccgtgcctgccgctccgcggcacggtcaccgcgtccggcgacctcgtgccgctctcctacattgccggcctcgtcaccgggcgtgagaactctgttgcggtcgctccagacggcagcaaggtgaacgctgccgaggcattcaagattgccggaatccagggcggcttcttcgagctgcagcccaaggagggtcttgcgatggtgaacggcacggccgtgggctctggcctcgcctccactgtgctcttcgaggctaacatccttgccatcctcgccgaggtcctgtccgccgtgttctgcgaagtcatgaacggcaagccggagtacaccgaccacctgacccacaagctcaagcaccacccgggacagattgaggctgctgccatcatggagcacatcttggagggcagctcctacatgaagcttgccaagaagctcggcgagctcgaccccttgatgaagcccaagcaggaccggtacgcgctccgcacgtcgccgcagtggcttggcccacaaattgaggttatccgcgccgccaccaaatccattgagcgcgagatcaactccgtcaacgacaacccgctcatcgatgtcgcccgaagcaaggcacttcacggtggcaacttccagggcacgcccatcggggtatctatggacaacacccgtctcgccatcgcagccatcggcaagctcatgtttgcgcagttctctgagctcgtcaacgactactataacaacggcttgccctccaacctgtccggtgggcgcaaccccagcttggactacggctttaagggcgccgagatcgccatggcgtcctactgctccgagctgcagtttctggggaacccggtcaccaaccacgtccagagcgcagagcagcacaaccaggacgtcaactcgctggggctcatctcctccaggaagactgctgaggccatcgagatcctgaagctcatgtcctcgacgttcctgatcgccctgtgccaggccgtggacctgcgccacatcgaggagaatgtcaagagcgccgtcaagagctgcgtgatgacggtggcgaagaagactctgagcaccgactccaccggtggcctccacgtcgcccgcttctgcgagaaggacctgctccaagagatcgagcgcgaggcggtgttcgcgtatgccgacgacccctgcagcgctaactacccgctgatgaagaagcttcgtaacgtgctcgtggagcgcgccctcgccaacggcgctgctgagttcaacgcggagacctccgtgttcgccaaggtcgcccagttcgaggaggacctgcgcgcggcgctgcccaaggcggtggaggctgcacgggcggctgtcgagaacggcacggcagcgataccgaacagaatcaccgactgccgctcctacccgctctaccgcttcgtgcgcgaggagctcggagccgtgtacctcaccggcgagaagacgcgctctcccggcgaggagctgaacaaagtgctcattgccatcaaccaaggcaagcacatcgatccgctgctcgagtgccttaaggagtggaacggcgagcccctgcccatctgctaa

SEQ ID NO: 133319 - protein, 704 aa, Zea mays
MACDSPCMATPRADPLNWGKAAEELMGSHLDEVKRMVAEYRQPSVKIEGASLSIAQVAAVATGAGEARVELDESARSRVKASSDWVMSSMMNGTDSYGVTTGFGATSHRRTKEGGALQRELIRFLNAGAFGTGTDGHVLPAEATRAAMLVRINTLLQGYSGIRFEILEAIVKLLNANVTPCLPLRGTVTASGDLVPLSYIAGLVTGRENSVAVAPDGSKVNAAEAFKIAGIQGGFFELQPKEGLAMVNGTAVGSGLASTVLFEANILAILAEVLSAVFCEVMNGKPEYTDHLTHKLKHHPGQIEAAAIMEHILEGSSYMKLAKKLGELDPLMKPKQDRYALRTSPQWLGPQIEVIRAATKSIEREINSVNDNPLIDVARSKALHGGNFQGTPIGVSMDNTRLAIAAIGKLMFAQFSELVNDYYNNGLPSNLSGGRNPSLDYGFKGAEIAMASYCSELQFLGNPVTNHVQSAEQHNQDVNSLGLISSRKTAEAIEILKLMSSTFLIALCQAVDLRHIEENVKSAVKSCVMTVAKKTLSTDSTGGLHVARFCEKDLLQEIEREAVFAYADDPCSANYPLMKKLRNVLVERALANGAAEFNAETSVFAKVAQFEEDLRAALPKAVEAARAAVENGTAAIPNRITDCRSYPLYRFVREELGAVYLTGEKTRSPGEELNKVLIAINQGKHIDPLLECLKEWNGEPLPIC

SEQ ID NO: 133320 - DNA, 2151 bp, Zea mays
  CDS (1)..(2151)
atggagtgcgacaacggccgcgtcgctgctaccaacggcgactccctgtgcatggcgctgccccgcgccgccgacccgcttaactgggggaaggcggcggaggagatgatgggcagccacctcgacgaggtgaagcggatggtggccgagtaccgccagcccctggtgaagatcgagggcgccagcctccgcatcgcgcaggtggccgcagtcgccgccggcgcgggcgaggcccgggtcgagctcgacgagtccgcccgcggccgggtcaaggcgagcagcgactgggtcagggacagcatgatgaacggcaccgacagctacggcgtcaccacaggtttcggcgccacctcccaccgccgcaccaaggagggcggcgctctccagagggagctcatcaggttcctcaacgccggcgcctttggcatcggcaccgacgccggccacgtcctgccggccgaggccacgcgcgcggccatgctcgtccgcatcaacaccctcctccagggctactccggcatccgcttcgagatcctcgaggccatcgtcaagctgctcaacgccaacgtcacgccgtgcctgccgctgcgcggcacggtcaccgcgtccggcgacctcgtgccgctctcctacattgcgggcctcgtcaccgggcgcgagaacgccgtggcggtggctcccgatggcacgaaggtgaacgccgcggaggcgttcaggatcgccggcatccaaagcggcttcttcgagctgcagcccaaggaaggtctcgccatggtgaacggcactgccgtgggctccggccttgcctccacggtgctctttgaggcaaacgtacttgccgtccttgccgaggtcctgtccgccgtgttctgcgaggtcatgaacggtaagccggagtacaccgaccacctgacccacaagctgaagcaccacccaggacagatcgaggcggctgccatcatggagcacatcttggaaggcagttcctacatgaagcttgctaagaagctcggtgagctcgacccgttgatgaagcccaagcaggacaggtacgcgctccgtacgtcgccgcagtggctcggcccgcagattgaggttatccgtgcctccaccaagtccattgagcgcgagatcaactccgtcaatgacaacccgctcatcgacgtcgcccgaagcaaggcccttcacggtggcaacttccagggcacgcccatcggggtgtccatggacaacacccgcctcgccgtcgcagccatcggcaagctcatgtttgcgcagttctctgagctcgtcaacgactactacaacaacggcttgccctccaacctgtccggcgggcgcaaccccagcttggactacggcttcaagggcgccgagatcgccatggcgtcctactgctctgagctgcagttcctggggaatccggtcaccaaccacgtccagagcgcggagcagcacaaccaggacgtgaactcgctcgggctcatctcctccaggaagactgctgaagccatcgagatcctcaagctcatgtcatccacgttcctgatcgccctgtgccaggcagtcgacctgcgccacatcgaggagaacgtcaagagcgccgtcaagagctgcgtgatgacggtggccaagaagactctgagcaccaactccaccggtggcctccacgtcgcccgcttctgcgagaaggacctgctccaggagatcgagcgcgaggcggtgttcgcgtatgccgacgacccctgcagcgctaactacccgctgatgaagaagcttcgcaacgtgctcgtggagcgcgccctcgccaatggcaccgccgagttcgacgccgagacatccgtgttcgctaaggtcgcccagttcgaggaggagctgcgcacggcgctgcccagtgcggtggaggctgcacgggcggctgtcgaaaacggcacggcagcgataccgaacagaatcaccgagtgccgctcctacccgctctaccgcttcgtacgcgaggagctcggagcagtgtacctcaccggcgagaagacgcggtctcccggcgaggagcttaacaaggtgctcgttgccatcaaccagggcaagcacatcgacccgctgctcgagtgcctcaaggagtggaacggcgagcccctgcccatctgctga

SEQ ID NO: 133321 - protein, 716 aa, Zea mays
MECDNGRVAATNGDSLCMALPRAADPLNWGKAAEEMMGSHLDEVKRMVAEYRQPLVKIEGASLRIAQVAAVAAGAGEARVELDESARGRVKASSDWVRDSMMNGTDSYGVTTGFGATSHRRTKEGGALQRELIRFLNAGAFGIGTDAGHVLPAEATRAAMLVRINTLLQGYSGIRFEILEAIVKLLNANVTPCLPLRGTVTASGDLVPLSYIAGLVTGRENAVAVAPDGTKVNAAEAFRIAGIQSGFFELQPKEGLAMVNGTAVGSGLASTVLFEANVLAVLAEVLSAVFCEVMNGKPEYTDHLTHKLKHHPGQIEAAAIMEHILEGSSYMKLAKKLGELDPLMKPKQDRYALRTSPQWLGPQIEVIRASTKSIEREINSVNDNPLIDVARSKALHGGNFQGTPIGVSMDNTRLAVAAIGKLMFAQFSELVNDYYNNGLPSNLSGGRNPSLDYGFKGAEIAMASYCSELQFLGNPVTNHVQSAEQHNQDVNSLGLISSRKTAEAIEILKLMSSTFLIALCQAVDLRHIEENVKSAVKSCVMTVAKKTLSTNSTGGLHVARFCEKDLLQEIEREAVFAYADDPCSANYPLMKKLRNVLVERALANGTAEFDAETSVFAKVAQFEEELRTALPSAVEAARAAVENGTAAIPNRITECRSYPLYRFVREELGAVYLTGEKTRSPGEELNKVLVAINQGKHIDPLLECLKEWNGEPLPIC

SEQ ID NO: 133322 - DNA, 2112 bp, Zea mays
  CDS (1)..(2112)
atggcgagcaacacggccatcctcgagagcgacccgctcaactggggcaaggcggccgcggagctgacggggagccacctcgacgaggtcaagcgcatggtggcgcagttccgcgaccccgtcgtcaagatcgagggctccagcctccgcgtcggccaggtggcggccgtggccgcggccaaggacgcgtccggcgtggccgtcgagctggacgaggaggcgcgcccccgcgtcaaggccagcagcgagtggatcctcgactgcatcgcccacggcggcgacatctacggcgtcaccaccggcttcggcggcacctcgcaccgccgcaccaaggacggggccgcgctccaggtcgagctgctcaggcatctcaatgccgggatcttcggcaacggctccgacggccacacgctcccgtccgaggtttcgcgtgcggccatgctcgtccgcatcaacaccctcctccagggctactccggcatccgcttcgagatcctcgaggccatcaccaagctcatcaacaccggcgtcagcccgtgcctgccgctgcggggcaccatcaccgcgtcgggcgacctcgtcccgctgtcctacatcgccggcctcatcacggggcgtcccaacgcgcaggccgtcacggttgacggcaggaaggtggacgccgccgaggcgttcaaggcggccggcatcgagggcggcttcttcaagctcaaccccaaggagggcctggccatcgtcaacggcacgtccgtggggtcggcgctcgccgccatggtgtgcttcgacgccaacgtcctcgccgtcctgtccgaggtcctgtccgccgtcttctgcgaggtgatgaacggcaagcccgagtacacggaccaccttacccacaagctcaagcaccacccggggtccatcgaggccgctgccatcatggagcacatcctggatggcagctccttcatgaagcacgccaaggaggtgaacgccatggacccgctgctgaagccgaagcaggacaggtacgcgctccgcacgtcgccgcagtggctcggcccccagatcgaggtcatccgcgccgccaccaagtccatcgagcgagaggtcaactcggtcaacgacaaccctgtcatcgacgtccaccgtggcaaggcgctgcacggcggcaacttccagggcaccccgatcggcgtgtccatggacaacgcccgcctcgccgtcgccaacatcggcaagctcatgttcgcccagttctccgagctggtcaacgagttctacaacaacgggctgacctccaacctggcgggcagccgcaacccgagcctggactacgggttcaagggcaccgagatcgccatggcgtcctactgctccgagctccagtacctggccaaccccatcaccaaccacgtccagagcgcggagcagcacaaccaggacgtgaactccctcggcctcgtctccgccaggaagaccgccgaggcggtggacatcctcaagctcatgtcgtccacgtacatggtcgcgctgtgccaggccgtggacctgcgccacctcgaggagaacctcaagagcgccgtcaagagctgcgtgatggcggtggccaggaaggtgctgaccaccagcctcggcggcgacctccacagcgcgcgcttcagcgagaaggccctgctcaccgccatcgaccgcgaggcggtgtacgggtactacgacgacccctgcagcgccaactcgcccctgatgaagaagatccgggccgtgctggtggaccacgccctcgccagcggcgaggccgagaaggacgccagcgcgtccgtgttctccaagatcaacaggttcgaggaggagctgcgcgaggcgctgcccagggagatggaggccgcccgcgtggccttcgagaccggcgccgcgccgatcgccaacaggatcaaggagagccggtcgtacccgctgtaccgcttcatccgccaggacctcggcgccgtgtacctgaccggcgagaagctcaagtcccccggcgaggagtgcaacaaggtgttcctggccctcagcgagggcaagctcatcgaccccatgctcgactgcctcaaggagtgggacggcaagcccctgcccatctgctga

SEQ ID NO: 133323 - protein, 703 aa, Zea mays
MASNTAILESDPLNWGKAAAELTGSHLDEVKRMVAQFRDPVVKIEGSSLRVGQVAAVAAAKDASGVAVELDEEARPRVKASSEWILDCIAHGGDIYGVTTGFGGTSHRRTKDGAALQVELLRHLNAGIFGNGSDGHTLPSEVSRAAMLVRINTLLQGYSGIRFEILEAITKLINTGVSPCLPLRGTITASGDLVPLSYIAGLITGRPNAQAVTVDGRKVDAAEAFKAAGIEGGFFKLNPKEGLAIVNGTSVGSALAAMVCFDANVLAVLSEVLSAVFCEVMNGKPEYTDHLTHKLKHHPGSIEAAAIMEHILDGSSFMKHAKEVNAMDPLLKPKQDRYALRTSPQWLGPQIEVIRAATKSIEREVNSVNDNPVIDVHRGKALHGGNFQGTPIGVSMDNARLAVANIGKLMFAQFSELVNEFYNNGLTSNLAGSRNPSLDYGFKGTEIAMASYCSELQYLANPITNHVQSAEQHNQDVNSLGLVSARKTAEAVDILKLMSSTYMVALCQAVDLRHLEENLKSAVKSCVMAVARKVLTTSLGGDLHSARFSEKALLTAIDREAVYGYYDDPCSANSPLMKKIRAVLVDHALASGEAEKDASASVFSKINRFEEELREALPREMEAARVAFETGAAPIANRIKESRSYPLYRFIRQDLGAVYLTGEKLKSPGEECNKVFLALSEGKLIDPMLDCLKEWDGKPLPIC

SEQ ID NO: 133324 - DNA, 2142 bp, Zea mays
  CDS (1)..(2142)
atggagtgcgagaacgggcacgttgccgccaacggcgatggcctgtgcgtggcacagccgccgcgcgccgacccgctcaactgggggaaggccgcggaggagctgtccgggagccacctggacgcggtgaagcggatggtcgaggagtaccgtaggccggtggtgaccatggagggcgccagcctgaccatcgccatggtcgccgcggtggccgccggcagcgacaccagggtggagctcgacgagtccgcccgcggccgcgtcaaggagagcagcgactgggtcatgaacagcatgacgaacggcaccgacagctacggcgtcaccaccggcttcggcgccacttcccaccggaggaccaaggagggcggcgctctccagagggagctcatcagattccttaacgctggagccttcggcaccggcgacgacggccacgttctgcctgccgcggcaacgagggcggcgatgctcgtgcgtgtcaacaccctgctccagggatactccggcatccgcttcgagatcctcgagacgatcgccacgcttctcaacgccaacgtgacaccatgcctgccgctcaggggcaccatcaccgcgtcgggcgacctcgtcccgctctcctacatcgccggcctcatcacgggccgccagaactccgtcgcggtgggccccgacggcaggaaggtgggcgccgccgaggcgttcaggatcgccggcatcgagcacgggttcttcgagctgcagcccaaggagggcctcgccatggtcaacggcaccgccgtgggctccggcctcgcctccaccgtgctcttcgaggccaacgttctcgccgtcatggccgaggtcatctccgcggtgttctgcgaggtcatgaccggcaagcccgagttcaccgaccacctgacgcacaagctgaagcaccaccccggacagatcgaggccgccgctatcatggagcacgtcctggaaggcagctcgtacatgaagctggccaagaagctcggcgagctcgacccgctgatgaagccgaagcaggacagatacgcgctccgcacctccccgcagtggctgggcccgcagatcgaagtgatccgcttcgccaccaagtccatcgagcgcgagatcaactccgtcaacgacaacccgctcatcgacgtgtcccgtggcaaggcgctccacggcggcaacttccagggaactcccatcggcgtgtccatggacaacacccgtctcgccctcgccgccatcggcaagctcatgttcgcgcagttctcggagctggtgaacgactactacaacaacggcctcccgtccaacctgtccggcgggcgcaaccccagcttggactacggcttcaagggcgccgagatcgccatggcctcctactgctcggagctccagttcctgggcaacccggtgaccaaccacgtccagagcgcggagcagcacaaccaggacgtgaactccctgggcctcatctcgtccaggaagaccgccgaggcagtggacatcctgaagctgatgacgtccacgttcctgatcgcgctgtgccaggccatcgacctgcggcacctcgaggagaacgtgaaggccgcggtgaagaactgcgtgacgcaggtggccaagaagtcgctgagcctgaacgcccggggcgggctccacaacgcgcgcttctgcgagaaggacctgcagacggcgatcgaccgcgaggcggtgttcgcgtacgcggacgacccgtgcagccccaactacccgctgatgcagaagctccgcgcggtgctggtcgagcacgcgctggccaacggcgacgccgagcgcgccgcggagacgtccatcttcgccaaggtggccgagttcgagcagcaggtccgcgcggcgctgcccaaggaggtggaggccgcgcgcgcggccgtggagagcggcagccccctggtccccaacaggatcagggagtgccggtcctacccgctgtaccggttcgtgcgcgaggaggtcggcaccgagtacctgaccggcgagaggaccaggtcccccggcgaggagctcaacaaggtgctcgtggccatcaaccagcgcaagcacatcgacccgctgctcgagtgcctcaaggagtggaacggcgcgcccctgccgctctgctga

SEQ ID NO: 133325 - protein, 713 aa, Zea mays
MECENGHVAANGDGLCVAQPPRADPLNWGKAAEELSGSHLDAVKRMVEEYRRPVVTMEGASLTIAMVAAVAAGSDTRVELDESARGRVKESSDWVMNSMTNGTDSYGVTTGFGATSHRRTKEGGALQRELIRFLNAGAFGTGDDGHVLPAAATRAAMLVRVNTLLQGYSGIRFEILETIATLLNANVTPCLPLRGTITASGDLVPLSYIAGLITGRQNSVAVGPDGRKVGAAEAFRIAGIEHGFFELQPKEGLAMVNGTAVGSGLASTVLFEANVLAVMAEVISAVFCEVMTGKPEFTDHLTHKLKHHPGQIEAAAIMEHVLEGSSYMKLAKKLGELDPLMKPKQDRYALRTSPQWLGPQIEVIRFATKSIEREINSVNDNPLIDVSRGKALHGGNFQGTPIGVSMDNTRLALAAIGKLMFAQFSELVNDYYNNGLPSNLSGGRNPSLDYGFKGAEIAMASYCSELQFLGNPVTNHVQSAEQHNQDVNSLGLISSRKTAEAVDILKLMTSTFLIALCQAIDLRHLEENVKAAVKNCVTQVAKKSLSLNARGGLHNARFCEKDLQTAIDREAVFAYADDPCSPNYPLMQKLRAVLVEHALANGDAERAAETSIFAKVAEFEQQVRAALPKEVEAARAAVESGSPLVPNRIRECRSYPLYRFVREEVGTEYLTGERTRSPGEELNKVLVAINQRKHIDPLLECLKEWNGAPLPLC

SEQ ID NO: 133326 - DNA, 2148 bp, Zea mays
  CDS (1)..(2148)
atggagtgcgagaacggccgcggcgttgctgcaaccaacagcgattccctgtgcatggcgacgccccgcgccgacccgcttaactggggcaaggcggcggaggagctgatgggcagccacctggacgaggtcaagcggatggtggccgagtaccgccaacccttggtgaagatcgagggcgccagcctcagcatcgcgcaggtggccgccgtggccaccggcgctggcgaggcccgggtcgagctggacgagtccgcccgtagccgggtcaaggcaagcagcgactgggtcatgagcagcatgatgaacggcaccgacagctacggcgtcaccaccggcttcggcgccacgtcgcacaggaggaccaaggagggcggcgcgctccagagggagctcatcaggttcctcaacgccggcgccttcggcaccggcgcggacggccacgtcctgccggccgaggcgacgcgcgcggccatgctcgtccgcatcaacaccctcctccaggggtactccggcatccgcttcgagatcctcgaggcgatcgtcaagctgctcaacgccaacgtcacgccgtgcctgccgctccgcggcacggtcaccgcgtccggcgacctcgtgccgctctcctacattgccggcctcgtcaccgggcgtgagaactctgttgcgctcgccccagacggcagcaaggtcaacgccgccgaggcattcaagattgccggaatccagggtggcttcttcgagctgcagcccaaggagggtcttgcgatggtgaacggcacggccgtgggctctggccttgcctccactgtgctcttcgaggctaatatccttgccatcctcgccgaggtcctgtccgccgtgttctgcgaggtcatgaacggcaagccggagtacaccgaccacctgacccacaagctcaagcaccacccgggacagatcgaggctgctgccatcatggagcacatcttggagggcagctcctacatgaagcttgccaagaagctcggcgagctcgatcccttgatgaagcccaagcaggaccggtacgcgctccgcacgtcgccgcagtggcttggcccccagattgaggttatccgcgccgccaccaagtccattgagcgcgagatcaactccgtcaacgacaacccgctcatcgatgtcgcccgaagcaaggctcttcacggtggcaacttccagggcacgcccatcggggtgtccatggacaacacccgtctcgccatcgcagccatcggcaagctcatgtttgcgcagttctctgagctcgtcaacgactactacaacaacggcttgccctccaacctgtccggtgggcgcaaccccagcttggactacggctttaagggtgccgagatcgccatggcgtcctactgctccgagctgcagttcctggggaacccggtcaccaaccacgtgcagagcgcggagcagcacaaccaggacgtcaactcgctgggactcatctcctccaggaagactgctgaggccatcgagatcctgaagctcatgtcctcgacgttcatgatcgccctgtgccaggccgtggacctgcgccacatcgaggagaacgtcaagagcgctgtcaagagctgcgtgatgacggtggcgaagaagaccctgagcaccaactccaccggtggtctccacgtcgcccgcttctgcgagaaggacctgctccaggagattgagcgcgaggcggtgttcgcgtatgccgacgacccctgcagcgctaactacccgctgatgaagaagcttcgcaacgtgctcgtggagcgcgccctcgccaacggcgctgccgagttcaacgcggagacatccgtgttcgccaaggtcgcccagttcgaggacgacctgcgtgcggcgctgcccaaggcggtggaggctgcacgggcggctgtcgagaacggcacggcagggataccgaacagaatcgccgactgccgctcctacccgctctaccgcttcgtgcgcgaggagctcggagccgtgtacctcaccggcgagaagacgcgctctcccggcgaggagctgaacaaggtgctcgttgccatcaaccagggcaagcacatcgacccgttgctcgagtgcctcaaggagtggaacggcgagccactgcccatctgctga

SEQ ID NO: 133327 - protein, 715 aa, Zea mays
MECENGRGVAATNSDSLCMATPRADPLNWGKAAEELMGSHLDEVKRMVAEYRQPLVKIEGASLSIAQVAAVATGAGEARVELDESARSRVKASSDWVMSSMMNGTDSYGVTTGFGATSHRRTKEGGALQRELIRFLNAGAFGTGADGHVLPAEATRAAMLVRINTLLQGYSGIRFEILEAIVKLLNANVTPCLPLRGTVTASGDLVPLSYIAGLVTGRENSVALAPDGSKVNAAEAFKIAGIQGGFFELQPKEGLAMVNGTAVGSGLASTVLFEANILAILAEVLSAVFCEVMNGKPEYTDHLTHKLKHHPGQIEAAAIMEHILEGSSYMKLAKKLGELDPLMKPKQDRYALRTSPQWLGPQIEVIRAATKSIEREINSVNDNPLIDVARSKALHGGNFQGTPIGVSMDNTRLAIAAIGKLMFAQFSELVNDYYNNGLPSNLSGGRNPSLDYGFKGAEIAMASYCSELQFLGNPVTNHVQSAEQHNQDVNSLGLISSRKTAEAIEILKLMSSTFMIALCQAVDLRHIEENVKSAVKSCVMTVAKKTLSTNSTGGLHVARFCEKDLLQEIEREAVFAYADDPCSANYPLMKKLRNVLVERALANGAAEFNAETSVFAKVAQFEDDLRAALPKAVEAARAAVENGTAGIPNRIADCRSYPLYRFVREELGAVYLTGEKTRSPGEELNKVLVAINQGKHIDPLLECLKEWNGEPLPIC

SEQ ID NO: 133328 - DNA, 2112 bp, Zea mays
  CDS (1)..(2112)
atggcgggcaacggcgccatcgttgagagcgacccgctgaactggggcgcggcggcggcggagctggcggggagccacctggacgaggtgaagcgcatggtggcgcaggcccggcagccggtggtgaagatcgagggctccacgctccgcgtcggccaggtggccgccgtcgcgtccgccagggacgcgtccggcgtcgccgtcgagctcgacgaggaggcccgcccccgcgtcaaggccagcagcgagtggatcctcgactgcatcgcccacggcggcgacatctacggcgtcaccaccggcttcggcggcacctcccaccgccgcaccaaggacgggcccgcgctgcaggtcgagctgctcaggcatctcaacgccggaatcttcggcaccggcagcgatggccacacgctgccgtcggaggtcacccgggcggcgatgctggtgcgcatcaacacgctcctgcagggctactccggcatccgcttcgagatcctcgaggccatcaccaagctgctcaacaccggggtcagcccgtgcctgccgctccggggcaccatcaccgcgtcgggcgacctggtcccgctctcctacatcgccggcctcatcacgggccgccccaacgcgcaggccgtcaccgtcgacggcaggaaggtggacgccgccgaggcgttcaagatcgccggcatcgagggcggcttcttcaagctcaaccccaaggagggcctcgccatcgtcaacggcacctccgtgggctccgcgctcgcggccaccgtcatgtacgacgccaacgtcctggccgtcctctccgaggtcctgtccgccgtcttctgcgaggtcatgaacggcaagcccgagtacaccgaccacctcacccacaagctcaagcaccacccggggtccatcgaggccgcggccatcatggagcacatccttgagggcagctccttcatgaagcacgccaagaaggtcaacgagctggacccgctgctcaagcccaagcaggacaggtacgcgctccgcacgtcgccgcagtggctcggcccccagatcgaggtcatccgcgccgccaccaagtccatcgagcgcgaggtcaactccgtcaacgacaacccggtcatcgacgtccaccgcggcaaggcgctgcacggcggcaacttccagggcacccccatcggcgtgtccatggacaacgcccgcctcgccatcgccaacatcggcaagctcatgttcgcgcagttctccgagctcgtcaacgagttctacaacaacggcctcacctccaacctggccggcagccgcaaccccagcctggactacggattcaagggcaccgagatcgccatggcctcctactgctccgagctccagtacctgggcaaccccatcaccaaccacgtgcagagcgcggagcagcacaaccaggacgtcaactccctgggcctcgtctcggccaggaagaccgccgaggccgtcgacatcctcaagctcatgtcgtccacctacatcgtcgcgctgtgccaggccgtcgacctgcgccacctggaggagaacatcaagacctccgtcaagaacacggtgacccaggtggccaagaaggtgctgaccatgaacccctcgggggacctctccagcgcgcgcttcagcgagaaggagctcatcaccgccatcgaccgcgaggccgtgttcacgtacgcggaggacgcggccagcgccagcctgccgctgatgcagaagctgcgcgccgtgctggtggaccacgccctcagcagcggcgacgcggagcgcgagccctccgtcttctccaggatcaccaagttcgaggaggagctccgcgcggtgctgccccacgaggtggaggccgcccgcgtcgccgtcgccgagggcaccgcccccgtagccaaccggatcgcggacagccgctcgttcccgctgtaccgcttcgtgcgccaggagctcggctgcgtgttcctcaccggcgagaagctcaagtcccccggcgaggagtgcaacaaggtgttcctcggcatcagccagggcaagctcgtcgaccccatgctcgagtgcctcaaggagtgggacggcaagccgctgcccatcaacatcaactaa

SEQ ID NO: 133329 - protein, 703 aa, Zea mays
MAGNGAIVESDPLNWGAAAAELAGSHLDEVKRMVAQARQPVVKIEGSTLRVGQVAAVASARDASGVAVELDEEARPRVKASSEWILDCIAHGGDIYGVTTGFGGTSHRRTKDGPALQVELLRHLNAGIFGTGSDGHTLPSEVTRAAMLVRINTLLQGYSGIRFEILEAITKLLNTGVSPCLPLRGTITASGDLVPLSYIAGLITGRPNAQAVTVDGRKVDAAEAFKIAGIEGGFFKLNPKEGLAIVNGTSVGSALAATVMYDANVLAVLSEVLSAVFCEVMNGKPEYTDHLTHKLKHHPGSIEAAAIMEHILEGSSFMKHAKKVNELDPLLKPKQDRYALRTSPQWLGPQIEVIRAATKSIEREVNSVNDNPVIDVHRGKALHGGNFQGTPIGVSMDNARLAIANIGKLMFAQFSELVNEFYNNGLTSNLAGSRNPSLDYGFKGTEIAMASYCSELQYLGNPITNHVQSAEQHNQDVNSLGLVSARKTAEAVDILKLMSSTYIVALCQAVDLRHLEENIKTSVKNTVTQVAKKVLTMNPSGDLSSARFSEKELITAIDREAVFTYAEDAASASLPLMQKLRAVLVDHALSSGDAEREPSVFSRITKFEEELRAVLPHEVEAARVAVAEGTAPVANRIADSRSFPLYRFVRQELGCVFLTGEKLKSPGEECNKVFLGISQGKLVDPMLECLKEWDGKPLPININ

SEQ ID NO: 133330 - DNA, 2157 bp, Zea mays
  CDS (1)..(2157)
atggagtccgaggccggcctgcttgtccgctcctccctgaacggcgagggcctgtgcatgccggcgccgcgcgccgacccgctgaactggggcaaggccgcggagggcctgtccgggagccacctggacgaggtgaagcggatggtggcggagttccgcgacccgctggtgaagatccagggcgccagcctgagcgtcgcgcaggtggccgccgtggccgtgggcgccgggggcggcgaggcccgcgtggagctggacgagtccgctcgcgagcgcgtcagggccagcagcgactgggtcatgggcagcatgatgaacggcaccgacagctacggcgtcaccaccggcttcggcgctacctcccaccgccgcaccaaggaaggcggcgcgctccagagggagctcatcagattcctcaatgccggcgcgttcggcacgggcgccgacggccacgtgctgccggcggaggccacccgcgcggcgatgctcgtgcgcgtcaacaccctcctccagggctactccggcatccgcttcgagatcctcgaggccatcgccaagctgctcaacgccaacgtcacgccgtgcctgccgctccggggcaccatcaccgcgtcgggcgacctcgtcccgctctcctacatcgccggcctcatcacgggccgccagaactccgtcgcggtgggccccgacggcaggaaggtgggcgccgccgaggcgttcaggatcgccggcatcgagcacgggttcttcgagctgcagcccaaggagggcctcgccatggtcaacggcaccgccgtgggctccggcctcgcctccaccgtgctcttcgaggccaacgttctcgccgtcatggccgaggtcatctccgcggtgttctgcgaggtcatgaccggcaagcccgagttcaccgaccacctgacgcacaagctgaagcaccaccccggacagatcgaggccgccgctatcatggagcacgtcctggaaggcagctcgtacatgaagctggccaagaagctcggcgagctcgacccgctgatgaagccgaagcaggacagatacgcgctccgcacctccccgcagtggctgggcccgcagatcgaagtgatccgctttgccaccaagtccatcgagcgcgagatcaactccgtcaacgacaacccgctcatcgatgtgtcccgtggcaaggcgctccacggcggcaacttccagggaactcccatcggcgtgtccatggacaacacccgtctcgcgctcgccgccatcggcaagctcatgttcgcgcagttctcggagctggtgaacgactactacaacaacggcctcccgtccaacctgtccggcgggcgcaaccccagcttggactacggcttcaagggcgccgagatcgccatggcctcctactgctcggagctccagttcctgggcaacccggtgaccaaccacgtccagagcgcggagcagcacaaccaggacgtgaactccctgggcctcatctcgtccaggaagaccgccgaggcagtggacatcctgaagctgatgacgtccacgttcctgatcgcgctgtgccaggccatcgacctgcggcacctcgaggagaacgtgaaggccgcggtgaagaactgcgtgacgcaggtggccaagaagtcgctgagcctgaacgcccggggcgggctccacaacgcgcgcttctgcgagaaggacctgcagacggcgatcgaccgcgaggcggtgttcgcgtacgcggacgacccgtgcagccccaactacccgctgatgcagaagctccgcgcggtgctggtcgagcacgcgctggccaacggcgacgccgagcgcgccgcggagacgtccatcttcgccaaggtggccgagttcgagcagcaggtccgcgcggcgctgcccaaggaggtggaggccgcgcgcgcggccgtggagagcggcagccccctggtccccaacaggatcagggagtgccggtcctacccgctgtaccggttcgtgcgcgaggacgtcggcaccgagtacctgaccggcgagaggaccaggtcccccggcgaggagctcaacaaggtgctcgtggccatcaaccagcgcaagcacatcgacccgctgctcgagtgcctcaaggagtggaacggcgcgcccctgccgctctgctga

SEQ ID NO: 133331 - protein, 718 aa, Zea mays
MESEAGLLVRSSLNGEGLCMPAPRADPLNWGKAAEGLSGSHLDEVKRMVAEFRDPLVKIQGASLSVAQVAAVAVGAGGGEARVELDESARERVRASSDWVMGSMMNGTDSYGVTTGFGATSHRRTKEGGALQRELIRFLNAGAFGTGADGHVLPAEATRAAMLVRVNTLLQGYSGIRFEILEAIAKLLNANVTPCLPLRGTITASGDLVPLSYIAGLITGRQNSVAVGPDGRKVGAAEAFRIAGIEHGFFELQPKEGLAMVNGTAVGSGLASTVLFEANVLAVMAEVISAVFCEVMTGKPEFTDHLTHKLKHHPGQIEAAAIMEHVLEGSSYMKLAKKLGELDPLMKPKQDRYALRTSPQWLGPQIEVIRFATKSIEREINSVNDNPLIDVSRGKALHGGNFQGTPIGVSMDNTRLALAAIGKLMFAQFSELVNDYYNNGLPSNLSGGRNPSLDYGFKGAEIAMASYCSELQFLGNPVTNHVQSAEQHNQDVNSLGLISSRKTAEAVDILKLMTSTFLIALCQAIDLRHLEENVKAAVKNCVTQVAKKSLSLNARGGLHNARFCEKDLQTAIDREAVFAYADDPCSPNYPLMQKLRAVLVEHALANGDAERAAETSIFAKVAEFEQQVRAALPKEVEAARAAVESGSPLVPNRIRECRSYPLYRFVREDVGTEYLTGERTRSPGEELNKVLVAINQRKHIDPLLECLKEWNGAPLPLC

SEQ ID NO: 133332 - DNA, 21 bp, Artificial sequence
  primer
atggagattaacggggcacac

SEQ ID NO: 133333 - DNA, 20 bp, Artificial sequence
  primer
ttaacatattggaatgggag

SEQ ID NO: 133334 - protein, 793 aa, Artificial sequence
  consensus sequence
  Variant (4)..(4): Xaa in position 4 is any amino acid
  Variant (6)..(6): Xaa in position 6 is any amino acid
  Variant (7)..(7): Xaa in position 7 is any or no amino acid
  Variant (10)..(12): Xaa in position 10 to 12 is any amino acid
  Variant (13)..(13): Xaa in position 13 is any or no amino acid
  Variant (18)..(18): Xaa in position 18 is any amino acid
  Variant (22)..(22): Xaa in position 22 is any amino acid
  Variant (25)..(27): Xaa in position 25 to 27 is any amino acid
  Variant (29)..(29): Xaa in position 29 is any amino acid
  Variant (30)..(34): Xaa in position 30 to 34 is any or no amino acid
  Variant (36)..(38): Xaa in position 36 to 38 is any amino acid
  Variant (40)..(41): Xaa in position 40 to 41 is any amino acid
  Variant (42)..(42): Xaa in position 42 is any or no amino acid
  Variant (44)..(46): Xaa in position 44 to 46 is any amino acid
  Variant (51)..(51): Xaa in position 51 is any amino acid
  Variant (53)..(55): Xaa in position 53 to 55 is any amino acid
  Variant (56)..(63): Xaa in position 56 to 63 is any or no amino acid
  Variant (65)..(65): Xaa in position 65 is any amino acid
  Variant (67)..(67): Xaa in position 67 is any amino acid
  Variant (68)..(69): Xaa in position 68 to 69 is any or no amino acid
  Variant (71)..(72): Xaa in position 71 to 72 is any amino acid
  Variant (74)..(75): Xaa in position 74 to 75 is any amino acid
  Variant (77)..(77): Xaa in position 77 is any amino acid
  Variant (81)..(81): Xaa in position 81 is any amino acid
  Variant (84)..(87): Xaa in position 84 to 87 is any amino acid
  Variant (88)..(89): Xaa in position 88 to 89 is any or no amino acid
  Variant (93)..(93): Xaa in position 93 is any amino acid
  Variant (102)..(103): Xaa in position 102 to 103 is any amino acid
  Variant (111)..(112): Xaa in position 111 to 112 is any amino acid
  Variant (114)..(114): Xaa in position 114 is any amino acid
  Variant (118)..(118): Xaa in position 118 is any amino acid
  Variant (128)..(128): Xaa in position 128 is any amino acid
  Variant (131)..(133): Xaa in position 131 to 133 is any amino acid
  Variant (134)..(164): Xaa in position 134 to 164 is any or no amino acid
  Variant (167)..(169): Xaa in position 167 to 169 is any amino acid
  Variant (178)..(178): Xaa in position 178 is any amino acid
  Variant (197)..(197): Xaa in position 197 is any amino acid
  Variant (199)..(199): Xaa in position 199 is any amino acid
  Variant (202)..(204): Xaa in position 202 to 204 is any amino acid
  Variant (207)..(207): Xaa in position 207 is any amino acid
  Variant (230)..(230): Xaa in position 230 is any amino acid
  Variant (235)..(235): Xaa in position 235 is any amino acid
  Variant (238)..(238): Xaa in position 238 is any amino acid
  Variant (240)..(241): Xaa in position 240 to 241 is any amino acid
  Variant (242)..(243): Xaa in position 242 to 243 is any or no amino acid
  Variant (245)..(248): Xaa in position 245 to 248 is any amino acid
  Variant (249)..(252): Xaa in position 249 to 252 is any or no amino acid
  Variant (254)..(254): Xaa in position 254 is any amino acid
  Variant (257)..(259): Xaa in position 257 to 259 is any amino acid
  Variant (262)..(263): Xaa in position 262 to 263 is any amino acid
  Variant (264)..(266): Xaa in position 264 to 266 is any or no amino acid
  Variant (269)..(269): Xaa in position 269 is any amino acid
  Variant (272)..(272): Xaa in position 272 is any amino acid
  Variant (279)..(279): Xaa in position 279 is any amino acid
  Variant (288)..(289): Xaa in position 288 to 289 is any amino acid
  Variant (292)..(292): Xaa in position 292 is any amino acid
  Variant (296)..(296): Xaa in position 296 is any amino acid
  Variant (299)..(299): Xaa in position 299 is any amino acid
  Variant (301)..(302): Xaa in position 301 to 302 is any amino acid
  Variant (304)..(304): Xaa in position 304 is any amino acid
  Variant (306)..(307): Xaa in position 306 to 307 is any amino acid
  Variant (310)..(310): Xaa in position 310 is any amino acid
  Variant (312)..(312): Xaa in position 312 is any amino acid
  Variant (316)..(316): Xaa in position 316 is any amino acid
  Variant (321)..(321): Xaa in position 321 is any amino acid
  Variant (331)..(331): Xaa in position 331 is any amino acid
  Variant (348)..(348): Xaa in position 348 is any amino acid
  Variant (351)..(351): Xaa in position 351 is any amino acid
  Variant (353)..(353): Xaa in position 353 is any amino acid
  Variant (355)..(355): Xaa in position 355 is any amino acid
  Variant (356)..(356): Xaa in position 356 is any or no amino acid
  Variant (358)..(359): Xaa in position 358 to 359 is any amino acid
  Variant (360)..(365): Xaa in position 360 to 365 is any or no amino acid
  Variant (367)..(367): Xaa in position 367 is any amino acid
  Variant (371)..(371): Xaa in position 371 is any amino acid
  Variant (390)..(390): Xaa in position 390 is any amino acid
  Variant (396)..(397): Xaa in position 396 to 397 is any amino acid
  Variant (400)..(400): Xaa in position 400 is any amino acid
  Variant (407)..(407): Xaa in position 407 is any amino acid
  Variant (408)..(408): Xaa in position 408 is any or no amino acid
  Variant (418)..(421): Xaa in position 418 to 421 is any amino acid
  Variant (423)..(423): Xaa in position 423 is any amino acid
  Variant (425)..(425): Xaa in position 425 is any amino acid
  Variant (428)..(428): Xaa in position 428 is any amino acid
  Variant (445)..(445): Xaa in position 445 is any amino acid
  Variant (449)..(449): Xaa in position 449 is any amino acid
  Variant (451)..(451): Xaa in position 451 is any amino acid
  Variant (456)..(456): Xaa in position 456 is any amino acid
  Variant (467)..(467): Xaa in position 467 is any amino acid
  Variant (477)..(479): Xaa in position 477 to 479 is any amino acid
  Variant (480)..(480): Xaa in position 480 is any or no amino acid
  Variant (491)..(491): Xaa in position 491 is any amino acid
  Variant (504)..(504): Xaa in position 504 is any amino acid
  Variant (511)..(511): Xaa in position 511 is any amino acid
  Variant (516)..(516): Xaa in position 516 is any amino acid
  Variant (532)..(532): Xaa in position 532 is any amino acid
  Variant (536)..(536): Xaa in position 536 is any amino acid
  Variant (537)..(537): Xaa in position 537 is any or no amino acid
  Variant (540)..(541): Xaa in position 540 to 541 is any amino acid
  Variant (548)..(548): Xaa in position 548 is any amino acid
  Variant (550)..(550): Xaa in position 550 is any amino acid
  Variant (552)..(552): Xaa in position 552 is any amino acid
  Variant (558)..(558): Xaa in position 558 is any amino acid
  Variant (563)..(563): Xaa in position 563 is any amino acid
  Variant (567)..(570): Xaa in position 567 to 570 is any amino acid
  Variant (573)..(574): Xaa in position 573 to 574 is any amino acid
  Variant (576)..(577): Xaa in position 576 to 577 is any amino acid
  Variant (581)..(582): Xaa in position 581 to 582 is any amino acid
  Variant (584)..(585): Xaa in position 584 to 585 is any amino acid
  Variant (586)..(588): Xaa in position 586 to 588 is any or no amino acid
  Variant (590)..(590): Xaa in position 590 is any amino acid
  Variant (592)..(593): Xaa in position 592 to 593 is any amino acid
  Variant (594)..(597): Xaa in position 594 to 597 is any or no amino acid
  Variant (600)..(600): Xaa in position 600 is any amino acid
  Variant (603)..(603): Xaa in position 603 is any amino acid
  Variant (605)..(607): Xaa in position 605 to 607 is any amino acid
  Variant (608)..(609): Xaa in position 608 to 609 is any or no amino acid
  Variant (612)..(613): Xaa in position 612 to 613 is any amino acid
  Variant (615)..(615): Xaa in position 615 is any amino acid
  Variant (617)..(617): Xaa in position 617 is any amino acid
  Variant (622)..(624): Xaa in position 622 to 624 is any amino acid
  Variant (628)..(629): Xaa in position 628 to 629 is any amino acid
  Variant (633)..(634): Xaa in position 633 to 634 is any amino acid
  Variant (637)..(638): Xaa in position 637 to 638 is any amino acid
  Variant (641)..(642): Xaa in position 641 to 642 is any amino acid
  Variant (643)..(657): Xaa in position 643 to 657 is any or no amino acid
  Variant (659)..(659): Xaa in position 659 is any amino acid
  Variant (661)..(661): Xaa in position 661 is any amino acid
  Variant (663)..(665): Xaa in position 663 to 665 is any amino acid
  Variant (668)..(668): Xaa in position 668 is any amino acid
  Variant (671)..(673): Xaa in position 671 to 673 is any amino acid
  Variant (676)..(676): Xaa in position 676 is any amino acid
  Variant (678)..(681): Xaa in position 678 to 681 is any amino acid
  Variant (683)..(686): Xaa in position 683 to 686 is any amino acid
  Variant (687)..(688): Xaa in position 687 to 688 is any or no amino acid
  Variant (690)..(692): Xaa in position 690 to 692 is any amino acid
  Variant (693)..(695): Xaa in position 693 to 695 is any or no amino acid
  Variant (697)..(697): Xaa in position 697 is any amino acid
  Variant (698)..(701): Xaa in position 698 to 701 is any or no amino acid
  Variant (703)..(704): Xaa in position 703 to 704 is any amino acid
  Variant (712)..(712): Xaa in position 712 is any amino acid
  Variant (716)..(716): Xaa in position 716 is any amino acid
  Variant (720)..(722): Xaa in position 720 to 722 is any amino acid
  Variant (724)..(724): Xaa in position 724 is any amino acid
  Variant (727)..(727): Xaa in position 727 is any amino acid
  Variant (728)..(753): Xaa in position 728 to 753 is any or no amino acid
  Variant (758)..(760): Xaa in position 758 to 760 is any amino acid
  Variant (762)..(764): Xaa in position 762 to 764 is any amino acid
  Variant (766)..(768): Xaa in position 766 to 768 is any amino acid
  Variant (770)..(772): Xaa in position 770 to 772 is any amino acid
  Variant (773)..(777): Xaa in position 773 to 777 is any or no amino acid
  Variant (780)..(782): Xaa in position 780 to 782 is any amino acid
  Variant (785)..(786): Xaa in position 785 to 786 is any amino acid
  Variant (788)..(788): Xaa in position 788 is any amino acid
  Variant (790)..(790): Xaa in position 790 is any amino acid
  Variant (792)..(792): Xaa in position 792 is any amino acid
DPLXWXXAAXXXXGSHLXEVKXMVXXXRXXXXXXVXXXGXXXLXXXQVAAXAXXXXXXXXXXXVXLXXXEXXRXXVXASSXWVXXXXXXGTDXYGVTTGFGXXATSHRRTXXGXALQXELIRFLNAGXFGXXXXXXXXXXXXXXXXXXXXXXXXXXXXXXXXXXLPXXXTRAAMLVRXNTLLQGYSGIRFEILEAIXKXLNXXXTPXLPLRGTITASGDLVPLSYIAGLXTGRPXNSXAXXXXGXXXXXXXXAXEAXXXAGXXXXXFFXLQXPKEGLAXVNGTAVGSXXASXVLFXANXLXXLXEXXSAXFXEVMXGKPEXTDHLTHKLKXHHPGQIEAAAIMEHILXGSXYXKXXAXXXXXXXXEXDPLXKPKQDRYALRTSPQWLGPXIEVIRXXTKXIEREINXXSVNDNPLIDXXXXVXRXKAXHGGNFQGTPIGVSMDNXRLAXAXIGKLXFAQFSELVNDXYNNGLPSNLXXXXNPSLDYGFKGXEIAMASYCSELQXLANPVTXHVQSXAEQHNQDVNSLGLISXRKTXXEAXXILKLMSXTXLXALCQAXDLRHXEENXXXXVKXXVXXVAKXXLXXXXXGXLXXXXXXRFXEKXLXXXXXREXXFXYXDDPCXXXYPLXXKLRXXLVXXALXXXXXXXXXXXXXXXXXSXFXKXXXFEXELXXXLPXEXXXXRXXXXXXGXXXXXXNXXXXXIXXCRSYPLYXFVRXELGXXXLXGEXXXXXXXXXXXXXXXXXXXXXXXXXXXSPGEXXXKXXXAXXXGXXXXXXXXDPXXXCLXXWXGXPXP

SEQ ID NO: 133335 - protein, 40 aa, Artificial sequence
  protein pattern
  Variant (18)..(18): Xaa in position 18 is any amino acid
  Variant (19)..(19): Xaa in position 19 is Ala, Ile or Val
  Variant (24)..(24): Xaa in position 24 is any amino acid
  Variant (25)..(25): Xaa in position 25 is Ala or Ser
  Variant (27)..(28): Xaa in position 27 to 28 is any amino acid
  Variant (30)..(30): Xaa in position 30 is Ala, Glu or Gln
  Variant (33)..(33): Xaa in position 33 is Ile, Leu or Val
  Variant (34)..(34): Xaa in position 34 is Asp or Asn
  Variant (39)..(39): Xaa in position 39 is Asn or Thr
PKQDRYALRTSPQWLGPXXEVIRXXTXXIXREXXSVNDXP

SEQ ID NO: 133336 - protein, 20 aa, Artificial sequence
  protein pattern
  Variant (2)..(2): Xaa in position 2 is Ile or Val
  Variant (4)..(4): Xaa in position 4 is Asn, Ser or Thr
PXTXHVQSAEQHNQDVNSLG

SEQ ID NO: 133337 - protein, 56 aa, Artificial sequence
  protein pattern
  Variant (2)..(5): Xaa in position 2 to 5 is any amino acid
  Variant (8)..(8): Xaa in position 8 is Ile, Leu or Val
  Variant (18)..(18): Xaa in position 18 is Ile or Val
  Variant (21)..(21): Xaa in position 21 is Ala or Ser
  Variant (25)..(25): Xaa in position 25 is any amino acid
  Variant (28)..(28): Xaa in position 28 is Ala or Ser
  Variant (29)..(29): Xaa in position 29 is Ile, Leu or Val
  Variant (30)..(30): Xaa in position 30 is Ala or Ser
  Variant (31)..(31): Xaa in position 31 is Ala, Asn or Ser
  Variant (32)..(32): Xaa in position 32 is Ile or Val
  Variant (34)..(34): Xaa in position 34 is Lys or Arg
  Variant (35)..(35): Xaa in position 35 is Leu or Val
  Variant (36)..(37): Xaa in position 36 to 37 is any amino acid
  Variant (38)..(38): Xaa in position 38 is Ala, Gly or Ser
  Variant (40)..(40): Xaa in position 40 is Phe or Ile
  Variant (41)..(41): Xaa in position 41 is Ser or Thr
  Variant (42)..(42): Xaa in position 42 is Glu or Lys
  Variant (44)..(44): Xaa in position 44 is Ala or Val
  Variant (45)..(45): Xaa in position 45 is Cys, Asp, Asn or Ser
  Variant (46)..(46): Xaa in position 46 is Asp, Glu or Ser
  Variant (47)..(47): Xaa in position 47 is any amino acid
  Variant (49)..(49): Xaa in position 49 is Asn or Ser
  Variant (50)..(50): Xaa in position 50 is Gly or Asn
  Variant (53)..(53): Xaa in position 53 is Pro or Thr
  Variant (54)..(55): Xaa in position 54 to 55 is any amino acid
DXXXXKAXHGGNFQGTPXGVXMDNXRLXXXXXGXXXXXQXXXLXXXXYXXGLXXXL

SEQ ID NO: 133338 - protein, 30 aa, Artificial sequence
  protein pattern
  Variant (2)..(3): Xaa in position 2 to 3 is any amino acid
  Variant (4)..(4): Xaa in position 4 is Ala, Cys, Gly, Ser or Val
  Variant (5)..(5): Xaa in position 5 is Ile, Leu or Val
  Variant (6)..(6): Xaa in position 6 is any amino acid
  Variant (7)..(7): Xaa in position 7 is Ala or Ser
  Variant (9)..(9): Xaa in position 9 is Ile, Leu, Met or Val
  Variant (10)..(10): Xaa in position 10 is any amino acid
  Variant (13)..(13): Xaa in position 13 is Ile, Leu, Met or Val
  Variant (15)..(15): Xaa in position 15 is Ala, Cys or Thr
  Variant (19)..(19): Xaa in position 19 is any amino acid
  Variant (24)..(24): Xaa in position 24 is Phe or Tyr
  Variant (27)..(29): Xaa in position 27 to 29 is any or no amino acid
NXXXXXXEXXSAXFXEVMXGKPEXTDXXXH

SEQ ID NO: 133339 - protein, 23 aa, Artificial sequence
  protein pattern
  Variant (8)..(8): Xaa in position 8 is Ala, Gly, Ser, Thr or Val
  Variant (10)..(10): Xaa in position 10 is Ile or Val
  Variant (12)..(12): Xaa in position 12 is Leu or Met
  Variant (14)..(14): Xaa in position 14 is Ala or Ser
  Variant (16)..(16): Xaa in position 16 is Cys or Thr
  Variant (19)..(19): Xaa in position 19 is Leu or Met
  Variant (20)..(21): Xaa in position 20 to 21 is any amino acid
  Variant (23)..(23): Xaa in position 23 is Ala, Asp, Gly or Val
LDYGFKGXEXAXAXYXSEXXXLX

SEQ ID NO: 133340 - protein, 21 aa, Artificial sequence
  protein pattern
  Variant (4)..(4): Xaa in position 4 is Ala or Gly
  Variant (5)..(5): Xaa in position 5 is Gln or Ser
  Variant (6)..(6): Xaa in position 6 is Ile or Met
  Variant (14)..(14): Xaa in position 14 is Phe, His, Trp or Tyr
  Variant (15)..(15): Xaa in position 15 is Ile, Leu or Val
  Variant (17)..(17): Xaa in position 17 is any amino acid
  Variant (20)..(20): Xaa in position 20 is any amino acid
  Variant (21)..(21): Xaa in position 21 is Phe or Tyr
HHPXXXEAAAIMEXXLXGSXX

SEQ ID NO: 133341 - protein, 14 aa, Artificial sequence
  protein pattern
  Variant (9)..(9): Xaa in position 9 is Cys or Thr
  Variant (11)..(11): Xaa in position 11 is any amino acid
GVTTGFGAXSXRRT

SEQ ID NO: 133342 - protein, 28 aa, Artificial sequence
  protein pattern
  Variant (5)..(5): Xaa in position 5 is Ile or Val
  Variant (15)..(15): Xaa in position 15 is Ala or Ser
  Variant (17)..(18): Xaa in position 17 to 18 is any amino acid
  Variant (19)..(22): Xaa in position 19 to 22 is any or no amino acid
  Variant (24)..(24): Xaa in position 24 is any amino acid
  Variant (25)..(25): Xaa in position 25 is Ile, Leu, Pro or Val
  Variant (26)..(26): Xaa in position 26 is Asn or Thr
  Variant (27)..(27): Xaa in position 27 is Ala, Gly or Ser
  Variant (28)..(28): Xaa in position 28 is Lys or Arg
LRGTXTASGDLVPLXYXXXXXXGXXXXX

SEQ ID NO: 133343 - protein, 12 aa, Artificial sequence
  protein pattern
  Variant (2)..(2): Xaa in position 2 is Ser or Thr
  Variant (3)..(3): Xaa in position 3 is Phe or Tyr
  Variant (7)..(7): Xaa in position 7 is Asp, Glu, Lys or Arg
  Variant (9)..(9): Xaa in position 9 is any amino acid
  Variant (11)..(11): Xaa in position 11 is any amino acid
  Variant (12)..(12): Xaa in position 12 is Asp, Glu, Gly, Asn, Gln or Thr
RXXPLYXFXRXX

SEQ ID NO: 133344 - protein, 25 aa, Artificial sequence
  protein pattern
  Variant (4)..(4): Xaa in position 4 is Ala or Ser
  Variant (7)..(7): Xaa in position 7 is Ser or Thr
  Variant (8)..(8): Xaa in position 8 is any amino acid
  Variant (9)..(9): Xaa in position 9 is Glu or Lys
  Variant (10)..(10): Xaa in position 10 is Ala or Ser
  Variant (11)..(11): Xaa in position 11 is Ile, Leu or Val
  Variant (12)..(12): Xaa in position 12 is Asp, Glu or Thr
  Variant (13)..(13): Xaa in position 13 is Ile or Val
  Variant (14)..(15): Xaa in position 14 to 15 is any amino acid
  Variant (16)..(16): Xaa in position 16 is Ile or Leu
  Variant (18)..(18): Xaa in position 18 is any amino acid
  Variant (19)..(19): Xaa in position 19 is Ala, Pro, Ser or Thr
  Variant (20)..(20): Xaa in position 20 is Pro, Ser or Thr
  Variant (21)..(21): Xaa in position 21 is Phe, His, Trp or Tyr
  Variant (22)..(22): Xaa in position 22 is Ile, Leu or Met
  Variant (23)..(23): Xaa in position 23 is any amino acid
  Variant (24)..(24): Xaa in position 24 is Ala or Gly
  Variant (25)..(25): Xaa in position 25 is Ile, Leu or Met
LISXRKXXXXXXXXXXMXXXXXXXX

SEQ ID NO: 133345 - protein, 20 aa, Artificial sequence
  protein pattern
  Variant (2)..(2): Xaa in position 2 is any amino acid
  Variant (5)..(5): Xaa in position 5 is Ala or Pro
  Variant (11)..(11): Xaa in position 11 is Ile, Leu or Met
  Variant (16)..(18): Xaa in position 16 to 18 is any or no amino acid
  Variant (20)..(20): Xaa in position 20 is Ala, Gly, Thr or Val
FXLQXKEGLAXVNGTXXXAX

SEQ ID NO: 133346 - protein, 17 aa, Artificial sequence
  protein pattern
  Variant (2)..(2): Xaa in position 2 is Ala, Ile, Leu or Val
  Variant (3)..(3): Xaa in position 3 is Asp or Glu
  Variant (4)..(4): Xaa in position 4 is Asp or Ser
  Variant (5)..(5): Xaa in position 5 is Ala or Pro
  Variant (7)..(10): Xaa in position 7 to 10 is any amino acid
  Variant (13)..(15): Xaa in position 13 to 15 is any amino acid
  Variant (16)..(16): Xaa in position 16 is Ile, Leu, Met or Val
  Variant (17)..(17): Xaa in position 17 is Glu, Lys or Arg
YXXXXCXXXXPLXXXXX

SEQ ID NO: 133347 - protein, 20 aa, Artificial sequence
  protein pattern
  Variant (2)..(2): Xaa in position 2 is Ala or Ser
  Variant (3)..(3): Xaa in position 3 is Ala, Ile or Val
  Variant (8)..(8): Xaa in position 8 is Phe, Ile, Leu or Met
  Variant (12)..(12): Xaa in position 12 is Phe, Ile, Leu, Met or Val
  Variant (13)..(15): Xaa in position 13 to 15 is any amino acid
  Variant (17)..(19): Xaa in position 17 to 19 is any amino acid
  Variant (20)..(20): Xaa in position 20 is Ile or Val
QXXDLRHXEENXXXXVXXXX

SEQ ID NO: 133348 - protein, 29 aa, Artificial sequence
  protein pattern
  Variant (5)..(6): Xaa in position 5 to 6 is any amino acid
  Variant (7)..(7): Xaa in position 7 is Asp, Glu, Asn or Thr
  Variant (9)..(9): Xaa in position 9 is Leu or Val
  Variant (10)..(11): Xaa in position 10 to 11 is any amino acid
  Variant (12)..(12): Xaa in position 12 is Ala or Gly
  Variant (13)..(13): Xaa in position 13 is Ile, Leu, Met or Val
  Variant (14)..(21): Xaa in position 14 to 21 is any amino acid
  Variant (22)..(22): Xaa in position 22 is Ile, Leu or Met
  Variant (23)..(23): Xaa in position 23 is Phe, Leu or Met
  Variant (24)..(24): Xaa in position 24 is any amino acid
  Variant (26)..(26): Xaa in position 26 is Ile, Leu, Met or Val
  Variant (27)..(28): Xaa in position 27 to 28 is any amino acid
SPGEXXXKXXXXXXXXXXXXXXXXCXXXW

SEQ ID NO: 133349 - DNA, 1590 bp, Arabidopsis thaliana; identical to SEQ ID NO: 56518
  CDS (1)..(1590)

SEQ ID NO: 133350 - protein, 529 aa, Arabidopsis thaliana; identical to SEQ ID NO: 56519

SEQ ID NO: 133351 - DNA, 996 bp, Oryza sativa (japonica cultivar-group)
  CDS (1)..(996)
atggagggatccgccggggcgccgctccgcacgcgcgtgtgcatcatcgggagcgggccgtcggcgcacacggcggcgatctacgccgcccgcgcggagctcaagcccgtgctcttcgagggctggctcgccaacgacatcgcggcggggggccagctcaccaccaccaccgacgtcgagaacttcccggggttccccgaggggatcctcggcggcgagctcatggatcggtgccgcgcccagtccctccggttcggcaccagcatcatctccgagaccgtcaccgcggtcgacttctccgcccgccccttccgcgtcgcctccgactccaccaccgtgctcgccgacgccgtcgtcgtcgccaccggcgccgtcgcccggcgactccacttcgccggctccgacgcctactggaaccgcggcatctccgcctgcgccgtctgcgacggggccgccccaatcttcaggaacaaacccatcgccgtcatcggcggcggcgactccgccatggaggagtccaacttcctcaccaagtacggctcccatgtgtacatcatccaccgccgcaacaccttccgcgcctccaagatcatgcaggccagggcgttgtcaaaccccaagatccaggttttctgggactctgaggtcgtcgaggcctacggcggcgagggtggaggtccattggctggtgtcaaggtgaagaacttggttactgggaagatctccgaccttcaggtgtccggtctcttcttcgccatcggacatgaaccggcgacgaagtttctcggcgggcagcttgagctcgatgctgatgggtatgtggccaccaagccaggctccacgcacaccagtgtgaagggggtctttgctgctggggatgtgcaggacaagaagtatcgccaggctattactgccgctggatcagggtgcatggctgctttggacgcggagcactatctgcaggaggtcggtgcacaggagggcaaggccgattga

SEQ ID NO: 133352 - protein, 331 aa, Oryza sativa (japonica cultivar-group)
MEGSAGAPLRTRVCIIGSGPSAHTAAIYAARAELKPVLFEGWLANDIAAGGQLTTTTDVENFPGFPEGILGGELMDRCRAQSLRFGTSIISETVTAVDFSARPFRVASDSTTVLADAVVVATGAVARRLHFAGSDAYWNRGISACAVCDGAAPIFRNKPIAVIGGGDSAMEESNFLTKYGSHVYIIHRRNTFRASKIMQARALSNPKIQVFWDSEVVEAYGGEGGGPLAGVKVKNLVTGKISDLQVSGLFFAIGHEPATKFLGGQLELDADGYVATKPGSTHTSVKGVFAAGDVQDKKYRQAITAAGSGCMAALDAEHYLQEVGAQEGKAD

SEQ ID NO: 133353 - DNA, 1467 bp, Oryza sativa (japonica cultivar-group); identical to SEQ ID NO: 56516
  CDS (1)..(1467)

SEQ ID NO: 133354 - protein, 488 aa, Oryza sativa (japonica cultivar-group); identical to SEQ ID NO: 56517

SEQ ID NO: 133355 - DNA, 1137 bp, Arabidopsis thaliana
  CDS (1)..(1137)
atgagccagtcaagattcattataaagtctttatttagcacagcaggaggtttcttacttggatctgctctctcaaatccgccgtctctagccaccgcgttttcttcttcttcctcgtcctcctccgccgccgccgccgtcgacatggaaactcacaaaaccaaggtttgcatcgtcggaagtggaccagcagcacacacggcggcgatctatgcatcgagagcggagcttaagcctcttctcttcgaaggatggatggctaacgacatcgctcccggcggtcaattaactacaacaaccgacgtcgaaaacttccctgggttccctgaaggtattctcggtattgatatcgttgagaaattcagaaaacaatcggagagatttggaactacgatcttcacggaaactgttaacaaagttgatttctcatcgaaaccgtttaagctattcactgattcgagaactgttctcgctgattctgtaatcatttctactggagctgttgctaaacgtcttagcttcactggatctggtgaaggtaatggtggtttttggaatcgtggtatctccgcttgtgctgtttgcgacggagctgctccgatttttaggaataagcctcttgtggttattggtggtggtgattcagctatggaggaagcgaattttctgactaagtatggatctaaggtttatattattcataggagggatacgtttagggcgtctaagattatgcagcagagagctttgtctaaccctaagattgaagtgatttggaactctgccgtggttgaggcgtatggtgatgaaaatggacgtgttcttggaggattgaaggtgaagaatgttgttactggggatgtttcagatctgaaggtgtctggattgttctttgctattggtcatgagccagctacgaagtttttggatgggcagcttgagcttgatgaagatggttatgttgtgaccaagccaggtactactaagacgagcgtggttggtgtatttgctgctggagatgttcaagacaagaagtatagacaggccatcactgctgcaggaactgggtgcatggcggcattggatgcagagcattacttacaagagattggatctcaggagggtaagagtgattga

SEQ ID NO: 133356 - protein, 378 aa, Arabidopsis thaliana
MSQSRFIIKSLFSTAGGFLLGSALSNPPSLATAFSSSSSSSSAAAAVDMETHKTKVCIVGSGPAAHTAAIYASRAELKPLLFEGWMANDIAPGGQLTTTTDVENFPGFPEGILGIDIVEKFRKQSERFGTTIFTETVNKVDFSSKPFKLFTDSRTVLADSVIISTGAVAKRLSFTGSGEGNGGFWNRGISACAVCDGAAPIFRNKPLVVIGGGDSAMEEANFLTKYGSKVYIIHRRDTFRASKIMQQRALSNPKIEVIWNSAVVEAYGDENGRVLGGLKVKNVVTGDVSDLKVSGLFFAIGHEPATKFLDGQLELDEDGYVVTKPGTTKTSVVGVFAAGDVQDKKYRQAITAAGTGCMAALDAEHYLQEIGSQEGKSD

SEQ ID NO: 133357 - DNA, 1128 bp, Arabidopsis thaliana
  CDS (1)..(1128)
atgaactgtgtgagtcgtttaaagtgtttgataagcaaagcacgaagctttgcacggcttggtggtgaatccactctctctcaaccgccgtctctcgcctccgccgcgttttcttcatccgccgtcatgaatggtctcgaaactcacaacacaaggctctgtatcgtaggaagtggcccagcggcacacacggcggcgatttacgcagctagggctgaacttaaacctcttctcttcgaaggatggatggctaacgacatcgctcccggtggtcaactaacaaccaccaccgacgtcgagaatttccccggatttccagaaggtattctcggagtagagctcactgacaaattccgtaaacaatcggagcgattcggtactacgatatttacagagacggtgacgaaagtcgatttctcttcgaaaccgtttaagctattcacagattcaaaagccattctcgctgacgctgtgattctcgctactggagctgtggctaagcggcttagcttcgttggatctggtgaagcttctggaggtttctggaaccgtggaatctccgcttgtgctgtttgcgacggagctgctccgatattccgtaacaaacctcttgcggtgatcggtggaggcgattcagcaatggaagaagcaaactttcttacaaaatatggatctaaagtgtatataatccataggagagatgcttttagagcgtctaagattatgcagcagcgagctttgtctaatcctaagattgatgtgatttggaactcgtctgttgtggaagcttatggagatggagaaagagatgtgcttggaggattgaaagtgaagaatgtggttaccggagatgtttctgatttaaaagtttctggattgttctttgctattggtcatgagccagctaccaagtttttggatggtggtgttgagttagattcggatggttatgttgtcacgaagcctggtactacacagactagcgttcccggagttttcgctgcgggtgatgttcaggataagaagtataggcaagccatcactgctgcaggaactgggtgcatggcagctttggatgcagagcattacttacaagagattggatctcagcaaggtaagagtgattga

SEQ ID NO: 133358 - protein, 375 aa, Arabidopsis thaliana
MNCVSRLKCLISKARSFARLGGESTLSQPPSLASAAFSSSAVMNGLETHNTRLCIVGSGPAAHTAAIYAARAELKPLLFEGWMANDIAPGGQLTTTTDVENFPGFPEGILGVELTDKFRKQSERFGTTIFTETVTKVDFSSKPFKLFTDSKAILADAVILATGAVAKRLSFVGSGEASGGFWNRGISACAVCDGAAPIFRNKPLAVIGGGDSAMEEANFLTKYGSKVYIIHRRDAFRASKIMQQRALSNPKIDVIWNSSVVEAYGDGERDVLGGLKVKNVVTGDVSDLKVSGLFFAIGHEPATKFLDGGVELDSDGYVVTKPGTTQTSVPGVFAAGDVQDKKYRQAITAAGTGCMAALDAEHYLQEIGSQQGKSD

SEQ ID NO: 133359 - DNA, 1056 bp, Chlamydia trachomatis D/UW-3/CX
  CDS (1)..(1056): transl_table=11
atgaatgtcgtttgcggaaaaagtcgggttggttatagttcctttttttgtaaaagccgggaacctttttcctgcgtatttaaagctcttttatctaagttcatattgggggttcccatgacacatgcaaagttagtcattataggctccgggcctgcaggttacacagctgctatctatgcttctagagcacttttgactccagtgcttttcgagggtttcttttctggcattgctggagggcagctaatgactacaacagaagtggaaaatttcccaggtttcccagagggagtgttggggcaccagttgatggatcttatgaaaactcaagcgcaacgtttcggtacgcaagtactttctaaggacatcaccgctgttgattttagtgtcagaccctttgttcttaaatctggaaaggagacgtttacctgtgatgcttgtattatagctactggagcatcagcaaagcgtttatctatccctggggcaggagataatgagttttggcaaaagggcgtaacagcttgcgctgtttgtgacggagcttctcccatttttcgtgacaaagatttgtttgttgtaggaggaggagactccgctttagaagaagccatgtttttgactcgctatggtaaacgtgtatttgtggttcataggagagatacattgcgagcttctaaggttatggtgaataaagctcaggcgaatgaaaaaatctttttcctttggaatagtgagattgtcaagatttctggagatactctagttcgttctatcgacatctataataatgtggatgagaccaccacaaccatggaagctgctggagttttctttgctattgggcatcaacccaacactgcatttctaggagggcaggtagctttagacgagaatggatacattattacagaaaaaggttcttctcgcacatcagttcctggagtgtttgctgcgggggatgtccaagataaatattacagacaagctattacttctgctggtagtgggtgcatggcagctttagatgccgaaagatttttagaaaattga

SEQ ID NO: 133360 - protein, 351 aa, Chlamydia trachomatis D/UW-3/CX
MNVVCGKSRVGYSSFFCKSREPFSCVFKALLSKFILGVPMTHAKLVIIGSGPAGYTAAIYASRALLTPVLFEGFFSGIAGGQLMTTTEVENFPGFPEGVLGHQLMDLMKTQAQRFGTQVLSKDITAVDFSVRPFVLKSGKETFTCDACIIATGASAKRLSIPGAGDNEFWQKGVTACAVCDGASPIFRDKDLFVVGGGDSALEEAMFLTRYGKRVFVVHRRDTLRASKVMVNKAQANEKIFFLWNSEIVKISGDTLVRSIDIYNNVDETTTTMEAAGVFFAIGHQPNTAFLGGQVALDENGYIITEKGSSRTSVPGVFAAGDVQDKYYRQAITSAGSGCMAALDAERFLEN

SEQ ID NO: 133361 - DNA, 951 bp, Agrobacterium tumefaciens str. C58
  CDS (1)..(951): transl_table=11
ttgatcattggctccggtcccgccggctataccgcggcgatctacgcggcccgcgcaatgctgaaacccgtgctgattgccggcatggaacagggtggccagctgatgatcaccaccgatgttgaaaactacccgggcttcgccgatccgatccagggcccgtggctgatggaccagatgctgaagcaggcaacccatgtgggcgcggaaatcgtcagcgacctcgtcaccgaagttgagaccaacgtgcggcctttcgtggtcaggaccgattcgggtcaggtctggaccgccgacacgctaatcatcgcaaccggtgccaaggccaaatggctcggcatcgagagcgagcagcacttccagggcttcggcgtctccgcctgcgccacctgcgacgggtttttctatcgcaacaaggatgtgatcgtggtcggcggcggcaactccgccgtggaagaggcgctttatctcgcgcatatcgccaaatcggtcaccgtcgtgcaccgccgcgacagcttccgctcggaaaaaatcctgcaggaacggctgtttgccaaggaaaacgtcaagattctctggaatacggaaattgccgaaatcaccggcgcaccggcaaagccgccgatgccgccttccgtttccggcgtcaggctgcgtgacaccaagactggtgcgatcagcgatacgcccattgatggcgtttttgtcgccatcggccacgccccggcggtcgaactgttcaagggcaaggtgaagctcaaggataacggctacatgtggactgctcctgattccacggccaccgacgtggaaggcatcttcgccgccggcgacgtcaccgacgacatttaccgccaggcaatcaccgccgccggcatgggctgcatggccgccctcgaagcagaacgctatctcacggcgcaacaaccgctcgcggttgcagcggaataa

SEQ ID NO: 133362 - protein, 316 aa, Agrobacterium tumefaciens str. C58
MIIGSGPAGYTAAIYAARAMLKPVLIAGMEQGGQLMITTDVENYPGFADPIQGPWLMDQMLKQATHVGAEIVSDLVTEVETNVRPFVVRTDSGQVWTADTLIIATGAKAKWLGIESEQHFQGFGVSACATCDGFFYRNKDVIVVGGGNSAVEEALYLAHIAKSVTVVHRRDSFRSEKILQERLFAKENVKILWNTEIAEITGAPAKPPMPPSVSGVRLRDTKTGAISDTPIDGVFVAIGHAPAVELFKGKVKLKDNGYMWTAPDSTATDVEGIFAAGDVTDDIYRQAITAAGMGCMAALEAERYLTAQQPLAVAAE

SEQ ID NO: 133363 - DNA, 1047 bp, Caulobacter crescentus CB15
  CDS (1)..(1047): transl_table=11
atgtcgccactgcggagaatccacactatatctccgcccatgtctacgctctcccctcgccagacccgctgcctgatcatcggatcgggtcccgccggctacaccgccgccatctacgccgcgcgcgcgctgctgaaacccgtgctgatcgccggcatccagcccggcggccagctgaccatcacgaccgatgtcgagaactatccgggcttcgccgacgtcatccagggtccctggctgatggaccagatgcgcgcccaggccgagcatgtcggcaccgagttcgtcagcgacatcgtcaccagcgtcgacctgtccaagcgtccgttcacggtcaagaccgacagcggccaggactggatcgccgagacgatcatcatcgccaccggcgcccaggccaagtggctgggcctggaaagcgaagctaagttccagggctttggcgtcagcgcctgcgccacctgcgacggcttcttctatcgcaacaaggacgtcatcgtggtcggcggcggcaacaccgccgtggaagaggccctgttcctgaccagcttcgccagcaaggtcaccctggtgcaccgcaaggacgagctgcgcgccgagaagatcctgcaggagcgcctgctggcccatccgaagatcgaggtgatctgggacagcgtcatcgacgaggtcctgggccagaccgaccccatgggcgtcaccggcgcgcgcctgaagaacgtcaagaccggcgagacccaagaggtcgccgccgacggggtgttcatcgccatcggccacgcgccgtcgtcggagctgttcgccggccagctggaaaccgggtccggcggctatctgaaggtcaagccgggcacggcctcgacggcgatcgagggtgtctacgcggccggcgacgtcaccgacgacgtctaccgccaggccgtcaccgccgccggcatgggctgcatggccgccctggaagccgtgcgcttcctcgccgaagaagaccacaaggccgcccaccatccgatcagccacgccgaggccaacaagatcggggtttggtga

SEQ ID NO: 133364 - protein, 348 aa, Caulobacter crescentus CB15
MSPLRRIHTISPPMSTLSPRQTRCLIIGSGPAGYTAAIYAARALLKPVLIAGIQPGGQLTITTDVENYPGFADVIQGPWLMDQMRAQAEHVGTEFVSDIVTSVDLSKRPFTVKTDSGQDWIAETIIIATGAQAKWLGLESEAKFQGFGVSACATCDGFFYRNKDVIVVGGGNTAVEEALFLTSFASKVTLVHRKDELRAEKILQERLLAHPKIEVIWDSVIDEVLGQTDPMGVTGARLKNVKTGETQEVAADGVFIAIGHAPSSELFAGQLETGSGGYLKVKPGTASTAIEGVYAAGDVTDDVYRQAVTAAGMGCMAALEAVRFLAEEDHKAAHHPISHAEANKIGVW

SEQ ID NO: 133365 - DNA, 969 bp, Salmonella typhimurium LT2
  CDS (1)..(969): transl_table=11
atgggcacgaccaaacacagtaagctgcttattctgggctcaggaccggcgggatataccgcggcggtgtatgccgcgcgcgcaaatttacagccggtacttattaccggtatggaaaaaggcggtcaactgactaccacgacggaagtggaaaactggcccggcgatccaaacgatttgaccggcccgctgctgatggaacgcatgcatgaacatgcggcaaaatttgaaaccgagataatttttgatcacatcaacaacgtggatctgcaaaatcgtccgttccgtctgacaggtgacagcgcagagtacacttgtgatgcgttgatcattgcgaccggcgcttccgcgcgctatctggggctgccatcggaagaagcctttaaagggcgcggcgtttccgcctgcgcaacctgcgacggtttcttctaccgcaatcagaaagtagcggtgatcggcggcggcaacaccgcggttgaagaagcgctttatctgtccaacatcgcttcggaagtgcaccttatccatcgccgtgacggtttccgcgctgaaaaaatcctcattaagcgcctgatggataaagtcgaaaatggcaatatcattctgcacaccaaccggacgctggaagaagtgaccggcgatcagatgggcgtcaccggtctgcgtcttcgcgacacgcagcagagcgataatatcgagacgctggacatcgccggacttttcgtagccatcggtcatagcccaaacacggcgctcttcgaaggccagcttgagctggaaaatggttatatcaaagttcagtccggcacccatggcaacgccacacaaaccagcatccctggcgtattcgcggcgggtgacgtcatggatcatatttaccgtcaggcgatcacctctgcaggtacgggctgtatggcggcgctggatgctgaacgctatctcgatggtctggccgacgcgagcaaatag

SEQ ID NO: 133366 - protein, 322 aa, Salmonella typhimurium LT2
MGTTKHSKLLILGSGPAGYTAAVYAARANLQPVLITGMEKGGQLTTTTEVENWPGDPNDLTGPLLMERMHEHAAKFETEIIFDHINNVDLQNRPFRLTGDSAEYTCDALIIATGASARYLGLPSEEAFKGRGVSACATCDGFFYRNQKVAVIGGGNTAVEEALYLSNIASEVHLIHRRDGFRAEKILIKRLMDKVENGNIILHTNRTLEEVTGDQMGVTGLRLRDTQQSDNIETLDIAGLFVAIGHSPNTALFEGQLELENGYIKVQSGTHGNATQTSIPGVFAAGDVMDHIYRQAITSAGTGCMAALDAERYLDGLADASK

SEQ ID NO: 133367 - DNA, 1452 bp, Nostoc sp. PCC 7120
  CDS (1)..(1452): transl_table=11
atgttttcttgtcactccccttgccgatctgatatgttatgctatattaaacgtagtcgttatgagttcgttataaatattatgtctaacccaactgtagaaaacttagtcattattggttctgggccagcagggtatacagctgctatctatgcggcgagagctaacctaaaacccgttgtatttgaaggttttcaagctgggggtttgcctggtgggcaactcatgacaacgacggaggtagagaactttccggggtttccccaagggattacggggccggaattaatggataggatgaaggctcaggcagagcgctggggggctgagttatatactgaagatgttatatcagttgatttgagccaacgtccatttactgtgcgctcagaggaaagagaagttaaggcacacactattattattgctactggtgcaactgccaagcgtttgggtttacctagtgagcatgaattttggagtcggggaatttcggcttgtgcaatctgtgatggtgcaaccccgattttccacggtgcagagttggctgtgattggtgctggcgactcggcggcggaagaatcaatatatctcaccaagtacggttcgaaggttaatttgttggtgcgttctgaaaagatgcgggcttctaaagcgatgcaagaccgcgttttgagtaaccccaaaatccaagtgcattggaacacagaagttgtggatgtgtttggtaatggtcacatggatggggtgaaagtccgcaataatcagactggggaagaaaccaacgtacacgccaaaggtttattctacgctattggtcacaagcccaacacttccttatttcagggacaactagaactggatgaaattggttatgttgtcaccaaacatggttcaccagaaaccagtgtagagggtgtcttcgcggcgggtgacgtacaagaccatgagtatcgccaagcaattacggcggctggtagtggctgcgcggcagcgctattagcagagcgctggttgtctgcgaatgcgttgattcaagagttccatcaagaagcaacaatcaataatgagttagaaactcagccagtagcgcagaaaaccgaagcggaacaagaagcgggatttgatgtgaatgcaactcgtcatgctggtggttatgctttaaggaaattattccatgaaagcgatcgcctactcattgtcaaatatgtctcccctggttgtgggccttgccataccctcaagccaatcttaaataaagtggttgatgaatttgacagcaaaatccactttgtggaaatcgatatcgaccaagaccgcgatattgccgaaaatgctggggtaaccggcacaccaactgttcagttctttaaggataaagaactggtgaaagaagttaaaggtgttaagcaaaagagtgagtatcgcctgttgattgaaggtaatctttag

SEQ ID NO: 133368 - protein, 483 aa, Nostoc sp. PCC 7120
MFSCHSPCRSDMLCYIKRSRYEFVINIMSNPTVENLVIIGSGPAGYTAAIYAARANLKPVVFEGFQAGGLPGGQLMTTTEVENFPGFPQGITGPELMDRMKAQAERWGAELYTEDVISVDLSQRPFTVRSEEREVKAHTIIIATGATAKRLGLPSEHEFWSRGISACAICDGATPIFHGAELAVIGAGDSAAEESIYLTKYGSKVNLLVRSEKMRASKAMQDRVLSNPKIQVHWNTEVVDVFGNGHMDGVKVRNNQTGEETNVHAKGLFYAIGHKPNTSLFQGQLELDEIGYVVTKHGSPETSVEGVFAAGDVQDHEYRQAITAAGSGCAAALLAERWLSANALIQEFHQEATINNELETQPVAQKTEAEQEAGFDVNATRHAGGYALRKLFHESDRLLIVKYVSPGCGPCHTLKPILNKVVDEFDSKIHFVEIDIDQDRDIAENAGVTGTPTVQFFKDKELVKEVKGVKQKSEYRLLIEGNL

SEQ ID NO: 133369 - DNA, 975 bp, Agrobacterium tumefaciens str. C58
  CDS (1)..(975): transl_table=11
atgtctgcccgccacacgaaggtattgatcattggctccggtcccgccggctataccgcggcgatctacgcggcccgcgcaatgctgaaacccgtgctgattgccggcatggaacagggtggccagctgatgatcaccaccgatgttgaaaactacccgggcttcgccgatccgatccagggcccgtggctgatggaccagatgctgaagcaggcaacccatgtgggcgcggaaatcgtcagcgacctcgtcaccgaagttgagaccaacgtgcggcctttcgtggtcaggaccgattcgggtcaggtctggaccgccgacacgctaatcatcgcaaccggtgccaaggccaaatggctcggcatcgagagcgagcagcacttccagggcttcggcgtctccgcctgcgccacctgcgacgggtttttctatcgcaacaaggatgtgatcgtggtcggcggcggcaactccgccgtggaagaggcgctttatctcgcgcatatcgccaaatcggtcaccgtcgtgcaccgccgcgacagcttccgctcggaaaaaatcctgcaggaacggctgtttgccaaggaaaacgtcaagattctctggaatacggaaattgccgaaatcaccggcgcaccggcaaagccgccgatgccgccttccgtttccggcgtcaggctgcgtgacaccaagactggtgcgatcagcgatacgcccattgatggcgtttttgtcgccatcggccacgccccggcggtcgaactgttcaagggcaaggtgaagctcaaggataacggctacatgtggactgctcctgattccacggccaccgacgtggaaggcatcttcgccgccggcgacgtcaccgacgacatttaccgccaggcaatcaccgccgccggcatgggctgcatggccgccctcgaagcagaacgctatctcacggcgcaacaaccgctcgcggttgcagcggaataa

SEQ ID NO: 133370 - protein, 324 aa, Agrobacterium tumefaciens str. C58
MSARHTKVLIIGSGPAGYTAAIYAARAMLKPVLIAGMEQGGQLMITTDVENYPGFADPIQGPWLMDQMLKQATHVGAEIVSDLVTEVETNVRPFVVRTDSGQVWTADTLIIATGAKAKWLGIESEQHFQGFGVSACATCDGFFYRNKDVIVVGGGNSAVEEALYLAHIAKSVTVVHRRDSFRSEKILQERLFAKENVKILWNTEIAEITGAPAKPPMPPSVSGVRLRDTKTGAISDTPIDGVFVAIGHAPAVELFKGKVKLKDNGYMWTAPDSTATDVEGIFAAGDVTDDIYRQAITAAGMGCMAALEAERYLTAQQPLAVAAE

SEQ ID NO: 133371 - DNA, 930 bp, Encephalitozoon cuniculi GB-M1
  CDS (1)..(930)
atggaaaacattgtaattataggaagtgggcctgcagcatacaatgcagcgctgtatgcaatggacaaagagcctctgctttttgagggaggatacataggaaacaacgggcctggaggacaactgacgacgacaacatctgttgacaactatccggggtttccggacggggttgaaggcccggtgcttaccgacctgatgaaggaccatgctgtttcgcgggggcttcgtgtggtcaaggagactgtctccgacctgaggaaggagggcgagtgttttgtggttgttagcgagaagggagagcgcagggcaagagccgtcattgttgccactggggcgtcggcaaggcgtctttttgttcctggaacgggagacggggagttctggcagagaggagtgagctcgtgtgctgtgtgcgacgggtttgcctataccaacaagatcacctgtgttattgggggaggagatgcagccatggaggaggcgctgtatttatcggggattgccaagaaggtttacattattcaccggaggaatgagtttcgtgcgagaaacgacatggttgaaaaggcgcgggagactgtgaatatcgagatggtgacgccctatgtgcttgaaagtgcactagggacgagcaaggttgaaaggatcaccatccgcaacgtcgagacgggagagatgaagacgattccaatggacggagtgttcttcgggatagggcacgatccaaacacttcgttcctgaagaacacaaaggtggagatggaccttaacgggtacatcgtggtgagggacgaagtgtacacaaacattccagggctctttgcagctggagacgtttgcgacaagaagtatcggcaggctgtgacggcggcggcctctggggctatcagcgggatgaaggcggtggagtttttgtgcaaggaataa

SEQ ID NO: 133372 - protein, 309 aa, Encephalitozoon cuniculi GB-M1
MENIVIIGSGPAAYNAALYAMDKEPLLFEGGYIGNNGPGGQLTTTTSVDNYPGFPDGVEGPVLTDLMKDHAVSRGLRVVKETVSDLRKEGECFVVVSEKGERRARAVIVATGASARRLFVPGTGDGEFWQRGVSSCAVCDGFAYTNKITCVIGGGDAAMEEALYLSGIAKKVYIIHRRNEFRARNDMVEKARETVNIEMVTPYVLESALGTSKVERITIRNVETGEMKTIPMDGVFFGIGHDPNTSFLKNTKVEMDLNGYIVVRDEVYTNIPGLFAAGDVCDKKYRQAVTAAASGAISGMKAVEFLCKE

SEQ ID NO: 133373 - DNA, 954 bp, Corynebacterium glutamicum ATCC 13032
  CDS (1)..(954): transl_table=11
atgtctgaagaacaatctgccgtagcaccaaagattcatgatgtcgccatcatcggctccggtccagctggctataccgcagcagtatatgcagcccgcgctgacctcaaccccatcatgttcgagggctatgaatacggtggatctttgatgaccactactgacgtggaaaacttcccaggctttgaaaagggaatcctgggcccagagctcatggaaaacatgcgcgctcaggccgagcgtttcggcaccgacatgcacatggagcttgtcgaccgcgttgatctcaccggcgacatcaagaagctgtgggtcggcgacgatgagtaccacgcgcgtgctgtcatcttgtccatgggttctgcacctcgctacttgggtgtgaagggcgagcaggaactgctcggccgcggcgtttctgcatgtgcaacctgcgatggtttcttcttccgcgatcaggacatcgccgtgatcggtggtggcgactccgcgatggaggaagcaaccttcctcaccaagttcgctcgcagtgtcaccatcgtgcaccgccgcgaagagttccgcgccagcgccatcatgctggagcgtgctcagaagaacgagaagattcgcttcgtcaccaacaagactgtcgaagaggtcatcgaggcagacggcaaggtcagcggtctgaagctcaacgacaccgtcactggtgaagattccgtcttggatgtcaccgccatgttcgttgccatcggccatgatccacgctctgaaatcctcgcaggtcaggtcgaggttgatccttccaactacgttttggttcaggagccttccacccgcaccaaccttgatggtgttttcgctgctggcgacctggtggacagccactaccagcaggccatcaccgcagctggttccggttgccgcgcagcgatcgatgcagagcattacctagcttctctggcctaa

SEQ ID NO: 133374 - protein, 317 aa, Corynebacterium glutamicum ATCC 13032
MSEEQSAVAPKIHDVAIIGSGPAGYTAAVYAARADLNPIMFEGYEYGGSLMTTTDVENFPGFEKGILGPELMENMRAQAERFGTDMHMELVDRVDLTGDIKKLWVGDDEYHARAVILSMGSAPRYLGVKGEQELLGRGVSACATCDGFFFRDQDIAVIGGGDSAMEEATFLTKFARSVTIVHRREEFRASAIMLERAQKNEKIRFVTNKTVEEVIEADGKVSGLKLNDTVTGEDSVLDVTAMFVAIGHDPRSEILAGQVEVDPSNYVLVQEPSTRTNLDGVFAAGDLVDSHYQQAITAAGSGCRAAIDAEHYLASLA

SEQ ID NO: 133375 - DNA, 981 bp, Streptomyces coelicolor A3(2)
  CDS (1)..(981): transl_table=11
atgagcaccgccaaggacgtgcgcgacgtcatcgtcatcggctcgggcccggccggatacaccgccgcgctatacaccgcccgcgccagcctgaaccccctcgtcttcggcggcgccatattcgtcggcggttcgctcacgaccacgactgaggtcgagaacttccccggcttccccgacggggtccagggccccgagctcatggagaacatgcgggcccaggcggagaggttcggcgccgagatggtcgacgacgacatcgtcgcggtcgatctgaccggtgacgtcaagaccgtcaccgacaccgccggtaccgtccaccgtgcgaggacggtgatcgttgccacgggctccggttaccgcaagctcggcgtgcccaaggaggacgagctgtccgggcggggcgtgtcctggtgtgcgacctgcgacggcttcttcttccgggaccgcgacatcgtggtcgtcggcggcggcgacactgccatggaggaggccaccttcctcacccgcttcgcccgctcggtcaccgtcgtacaccggcgttccgctctgcgcgcctcccaggtcatgcagaaccgcgccttctccgaggacaagatctctcttgccttcgacagcgaagtcgccacactccacgaggagaacggcatgctgtccggcatgacgctgcgtgacaccctgaccggcgagactcgcgaactggccacgaccggcctgttcatcgccatcggccatgatccgcgcaccgagctcttcaaggggcagttgcatctcgactccgagggttacttgatggtcgagtctccttcgacacgcacgaacgtcccgggcgtcttcggcgccggtgacgtcgtcgaccacacctatcgccaggccattaccgcggccagctccggctgcgccgcagcgctggacgccgagcggtatctcgcggcccggtccgacacgtccgtgtcggccgaggtcgtcgccgtcgcctga

SEQ ID NO: 133376 - protein, 326 aa, Streptomyces coelicolor A3(2)
MSTAKDVRDVIVIGSGPAGYTAALYTARASLNPLVFGGAIFVGGSLTTTTEVENFPGFPDGVQGPELMENMRAQAERFGAEMVDDDIVAVDLTGDVKTVTDTAGTVHRARTVIVATGSGYRKLGVPKEDELSGRGVSWCATCDGFFFRDRDIVVVGGGDTAMEEATFLTRFARSVTVVHRRSALRASQVMQNRAFSEDKISLAFDSEVATLHEENGMLSGMTLRDTLTGETRELATTGLFIAIGHDPRTELFKGQLHLDSEGYLMVESPSTRTNVPGVFGAGDVVDHTYRQAITAASSGCAAALDAERYLAARSDTSVSAEVVAVA

SEQ ID NO: 133377 - DNA, 969 bp, Xanthomonas campestris pv. campestris str. ATCC 33913
  CDS (1)..(969): transl_table=11
atgagcgcctcctctgccagtcccgccaagcattcccgcctgctgatcctcggctccggcccggccggctggaccgccgcggtctacgccgcccgcgccaacctcaagccggtagtgatcaccgggctgcagcaaggcggccagctgatgaccaccaccgaggtggacaactggccgggcgacccccacggcttgatgggcccggacctgatgagccgcatgcaggcgcatgccgagcgtttcgatactgaggtcatcttcgaccacatccataccgccgacctgtcgcagcgcccgttccggctgatcggcgacagtgccgagtacacctgcgacgcattgatcatcgccaccggcgcgaccgccaagtacctgggcatccccaccgaagaagcgttcaagggccgcggagtgtccgcctgcgccacctgcgacggcttcttctacaaggaccaggacgtggtcgtggtcggcggcggcaacaccgcggtcgaagaagcgctgtacctgtccaacattgcccgcaaggtctacctggtgcaccgccgcgacacgctgcgcgccgaaaagatcatgcaggacaagctgttcgccaaggtggcggccggcaagatcgaaaccgtctggcaccacgccatcgaagaagtgctgggcaacgatgccggcgtgaccggcgtgcgggtcaagtccaccctcgacggcagcacccgcgacatcgacgcgcacggcttctttgtcgccatcggtcaccaccccaacacgcagctattcgacggccagctggccatgaacaacggctacctggagatccgctccggcctgaacggcgcggcgaccgagacctcggtggccggcgtgttcgcagccggcgacgtcgccgaccagcattatcgccaggccatcacgtcggctggtttcggctgcatggccgcgctggatgccgaacggtatctggacaagagcgcctga

SEQ ID NO: 133378 - protein, 322 aa, Xanthomonas campestris pv. campestris str. ATCC 33913
MSASSASPAKHSRLLILGSGPAGWTAAVYAARANLKPVVITGLQQGGQLMTTTEVDNWPGDPHGLMGPDLMSRMQAHAERFDTEVIFDHIHTADLSQRPFRLIGDSAEYTCDALIIATGATAKYLGIPTEEAFKGRGVSACATCDGFFYKDQDVVVVGGGNTAVEEALYLSNIARKVYLVHRRDTLRAEKIMQDKLFAKVAAGKIETVWHHAIEEVLGNDAGVTGVRVKSTLDGSTRDIDAHGFFVAIGHHPNTQLFDGQLAMNNGYLEIRSGLNGAATETSVAGVFAAGDVADQHYRQAITSAGFGCMAALDAERYLDKSA

SEQ ID NO: 133379 - DNA, 936 bp, Chlorobium tepidum TLS
  CDS (1)..(936): transl_table=11
atggacaaagatatcagggacgtcgtcatcatcggaaccggccctgccggatatacttctgccatttacaccggacgggccaatctcaagccgctggtcatcgaggggccccagcccggcgggcagctcatgattaccaccgatatcgagaactttcccggttttcccgaaggcattcccggcccggagctgatgggcagaatgcgtgaacaggcagcacgttttggcgtcgagttccagtttggcagcatcactgaagtcgatgtgtcgcgcagtcccttctctctgatgctcgacaatggccaggagattctcgccagaacgctcattattgccaccggggcgaacgccaaatggcttggcatcgaatcggaggagaagtaccgcgggcgcggcgtatcggcgtgtgcaacctgcgacggattcttttttcgcaactgccgcgtgttcgtggttggcggtggcgatacggcgatggaggaggcgctttacctcaccaagttcgcttcggaggttgtgctggtgcatcgccgcgaggagttccgcgcttccaagatcatgagcctgcgggcgagcaagaacgagaagatcaccacgatgctcaaccaggtggtcgatgagattctcggtgacgatatgaaggtgaccggcatcaggctcaaaaacgtcaagaccggcgagctgaccgaacatgcctgtgatggcgttttcatagcgatcggccatgagccgaacgccaaacttttcaaaggccagctcgacatggacgattacggctacattctcaccaaagatcactccacagagaccagtgtcaaaggcgttttcgcctgcggcgacgtgcaggacttcacataccgccaggctgttactgccgtcggcaccggctgcatggccgccatcgaagccgaacggttcctcgaatcgatacgttga

SEQ ID NO: 133380 - protein, 311 aa, Chlorobium tepidum TLS
MDKDIRDVVIIGTGPAGYTSAIYTGRANLKPLVIEGPQPGGQLMITTDIENFPGFPEGIPGPELMGRMREQAARFGVEFQFGSITEVDVSRSPFSLMLDNGQEILARTLIIATGANAKWLGIESEEKYRGRGVSACATCDGFFFRNCRVFVVGGGDTAMEEALYLTKFASEVVLVHRREEFRASKIMSLRASKNEKITTMLNQVVDEILGDDMKVTGIRLKNVKTGELTEHACDGVFIAIGHEPNAKLFKGQLDMDDYGYILTKDHSTETSVKGVFACGDVQDFTYRQAVTAVGTGCMAAIEAERFLESIR

SEQ ID NO: 133381 - DNA, 1362 bp, Thermosynechococcus elongatus BP-1
  CDS (1)..(1362): transl_table=11
atgacaccgccacggattgaaaacgttgtcattattgggtctggccctgcgggctacacagcagctatctatgccgcccgtgccaacctgaaaccgttgatgtttgagggctatcaaattggggggctgcccgggggccaactcatgaccacgacggaagtggaaaactttcccggctttcccgaaggcattcaagggccacaactgatggcacggatgaaggcgcaagcggagcgctggggcacggaaatggtgactgaagatgtgattcaggtggattttagccaacgcccctttctcatcagctcagcggagcggcaagtctatgcccacagcgtgattatctgtacgggtgccacagccaaacgactccatttgcccggtgaagagcagtattggaccaagggcgtgtccgcctgtgccatttgtgatggcgcaacacccattttcaaggatgtggagttagcggtgattggcggcggcgatagtgcggcagaggaagctgtttatctcaccaagtatggctcccacgtgcatctcctggtgcgtagtgacaaaatgcgagccagtaaggccatgcaggatcgtgtgtttgccaatcctaaaattacagttcactggcaaaccgaagcacgggaaattcttggcgatggcaacttaatgacgggtctgcggattatcaataaagccacaggggaagaatccctcttgccggtgcggggtttattctatgccattggccacacgcccaatacccaactcttcaaggattttctggaattggatagcgttggttatattgtcactcgccatgggacacaaacaaatgtagagggagtctttgctgctggggatgttcaagaccatgaataccgccaagctgtaaccgcagcaggcagtggttgtatggcagcccttgatgcagaacgttggctttcagcgcgggggctcattcaggagtttcaccaaagggcaacggagacccagcccgcagcaacggcgaaacccaccgcctctccacaacaggagtttgatcccaatgccattaaacatcggggcagctatgccttgcgcaaactcttccacgaaagcgatcgccttctgctggtgaaatatgtctcccccacctgtggtccctgccatacgctcaagcccattttggatcgactggtggaggaattcgacggcaaagtgcagctcattgaaattgacatcactgaggatagcgcgatcgccgagcaagcgggggttaccagtacccctaccattcaacttttcaaaaataaggaactcctagaggtgattgtcggtatgaaacccaagagtcagtaccgcgagaccctccaacgctacctttcctag

SEQ ID NO: 133382 - protein, 453 aa, Thermosynechococcus elongatus BP-1
MTPPRIENVVIIGSGPAGYTAAIYAARANLKPLMFEGYQIGGLPGGQLMTTTEVENFPGFPEGIQGPQLMARMKAQAERWGTEMVTEDVIQVDFSQRPFLISSAERQVYAHSVIICTGATAKRLHLPGEEQYWTKGVSACAICDGATPIFKDVELAVIGGGDSAAEEAVYLTKYGSHVHLLVRSDKMRASKAMQDRVFANPKITVHWQTEAREILGDGNLMTGLRIINKATGEESLLPVRGLFYAIGHTPNTQLFKDFLELDSVGYIVTRHGTQTNVEGVFAAGDVQDHEYRQAVTAAGSGCMAALDAERWLSARGLIQEFHQRATETQPAATAKPTASPQQEFDPNAIKHRGSYALRKLFHESDRLLLVKYVSPTCGPCHTLKPILDRLVEEFDGKVQLIEIDITEDSAIAEQAGVTSTPTIQLFKNKELLEVIVGMKPKSQYRETLQRYLS

SEQ ID NO: 133383 - DNA, 942 bp, Corynebacterium efficiens YS-314
  CDS (1)..(942): transl_table=11
atgtctgaagaacagtccaagatccacgacgtcgccatcatcggctccggccccgccggatacaccgcggccatctacgccgcgcgtgccgatctcaagccgatcatgttcgagggttatgaatacggcggttccctcatgacaaccaccgatgtggagaacttccccggtttccaggacggcatcatgggcccggagctcatggagaacatgcgcgcccaggccgaacgcttcggcaccgatctgcgcatggaactcgtggaccgcgttgacctcaccggtgacatcaagaagatctgggtcggtgatgatgagtaccaggcacgcgccgtcatcctctccatgggttccgcaccccgctacctgggaataccgggtgagaaggagctgctcggccgtggcgtctccgcctgcgcgacctgcgacggcttcttcttccgtgaccaggacatcgccgtcatcggtggcggcgactccgccatggaggaggccaccttcctgaccaagttcgcccgctcggtcaccatcgtgcaccgccgtgaggagttccgcgccagcgccatcatgctggagcgcgcgcagaagaatgagaagatccggtttgtcaccaacaagaccgtcgaagaagtcatcgagaacgacggcaaggttgccggcctgaagctgaaggacaccgtcaccggtgagctgtccgatctggatgtcaccgccatgttcgtggccatcggccacgatccgcgctccgagatgctcgtgggccaggtggagctggactcctccaactacgtggtggccgagcacccctccacccgcaccaacgtccccggcgtcttcgccgcaggtgacctggtggacagccactaccagcaggccatcaccgccgccggttccggttgccgcgccgccatcgacgcggagaactacctggccaaccagatataa

SEQ ID NO: 133384 - protein, 313 aa, Corynebacterium efficiens YS-314
MSEEQSKIHDVAIIGSGPAGYTAAIYAARADLKPIMFEGYEYGGSLMTTTDVENFPGFQDGIMGPELMENMRAQAERFGTDLRMELVDRVDLTGDIKKIWVGDDEYQARAVILSMGSAPRYLGIPGEKELLGRGVSACATCDGFFFRDQDIAVIGGGDSAMEEATFLTKFARSVTIVHRREEFRASAIMLERAQKNEKIRFVTNKTVEEVIENDGKVAGLKLKDTVTGELSDLDVTAMFVAIGHDPRSEMLVGQVELDSSNYVVAEHPSTRTNVPGVFAAGDLVDSHYQQAITAAGSGCRAAIDAENYLANQI

SEQ ID NO: 133385 - DNA, 963 bp, Pseudomonas putida KT2440
  CDS (1)..(963): transl_table=11
atgtctgaagtacgtcattcgcgcgtcatcattctcggttccggccctgccggttacagcgctgcggtgtatgccgcccgtgccaacctcaagccgctgctgatcaccggcatgcaggcgggtggccagctgaccaccaccaccgaagtcgacaactggccgggcgacccccacggcctgaccggcccggctctgatgcagcgtatgcaagagcacgccgagcgttttgaaaccgaaatcgtcttcgaccacatcaacgctgtcgacctggccaacaagccgttcaccctgcagggtgacagcggcaagtacacctgtgatgcgctgatcatcgccactggcgccagcgctcgctacctgggcctgccgtcggaagaaaccttcatgggcaagggtgtttcggcctgtgccacctgtgacggtttcttctaccgcaacaagccggtcgccgtggtcggtggtggtaacactgccgtggaagaggcactgtacctggccaacatcgccagcaaagtgaccctggtacaccgtcgcgaaaccttccgcgccgagaagatcctggtcgacaagctgaacgcccgtgtggccgaaggcaagatcgagctcaagctcaacgccaccctggacgaagtgctgggtgacaacatgggtgtaaccggtgcgcgcctgaagaacaacgacggcagtagcgacgaaatcaaggtcgacggcgtgttcatcgccattggccacaccccgaacacttcgctgttcgaaggccagctgaccctcaaagacggctacctggtagtcaatggcggtcgcgaaggcaacgccaccgctaccaacgtcgagggtgtgtttgccgctggcgacgtggctgaccacgtttaccgccaggccatcacttcggccggtgcgggctgcatggcggcgctggatgtcgagcgctacctggacggtttggccaacgcctcgttctga

SEQ ID NO: 133386 - protein, 320 aa, Pseudomonas putida KT2440
MSEVRHSRVIILGSGPAGYSAAVYAARANLKPLLITGMQAGGQLTTTTEVDNWPGDPHGLTGPALMQRMQEHAERFETEIVFDHINAVDLANKPFTLQGDSGKYTCDALIIATGASARYLGLPSEETFMGKGVSACATCDGFFYRNKPVAVVGGGNTAVEEALYLANIASKVTLVHRRETFRAEKILVDKLNARVAEGKIELKLNATLDEVLGDNMGVTGARLKNNDGSSDEIKVDGVFIAIGHTPNTSLFEGQLTLKDGYLVVNGGREGNATATNVEGVFAAGDVADHVYRQAITSAGAGCMAALDVERYLDGLANASF

SEQ ID NO: 133387 - DNA, 966 bp, Bradyrhizobium japonicum USDA 110
  CDS (1)..(966): transl_table=11
atgtccgctcctgttcatgcaaaggtcgtgattattggctctggccccgcgggctacacggcggcgatctacgccgcgcgtgcgatgctcgagccgatcctgatccagggcatccagccgggcggccagctcaccatcaccaccgacgtcgaaaactatccgggcttcgccgacgtgatccagggcccctggctgatggagcagatggagaagcaggcggtccatgtcggcaccaagatcgtcaccgacctggtgaccaagctggagaccgggcgacggccgttccgcctcacctgcgacagcggcgacgtctatctcgccgaaaccgtgattctcgccacgggcgcgcaagcgcgctggctcgggctgccgtccgaagggaaattccagggcggtggcgtctcggcctgcgccacctgcgacggcttcttctaccgcggcaaggaagtgatcgtggtcggcggcggcaataccgcggtcgaggaagcgctgttcctcaccaaccatgcctcgcaggtcaccatcgtgcatcgtcgcgaccacttccgcgccgaacgcatcctgcaggagcgtctgttcaagcacccgaagatcaaggtggtctgggactcagccgtcgacgagatctgcggcaccgagaacccgaacaaggtcacccatgtccgcctcaagaacgtcaagaccggcaagctcaccgagctgaaggccgacggcatcttcattgccatcggccacgccccggcgaccgagctggtgaaggaccaggtcaagctcaagccgtcgggctatgtcgaggtcgccccgaactcgaccgccacctcggtgcccggcctgttcgccgccggcgacgtcgccgacgagacttatcgccaggccgtgacggccgcaggcctcggctgcatggcagcactcgaagccgaacgtttcttggccttgcgcgccagcgagcgtgcagcagcggaataa

SEQ ID NO: 133388 - protein, 321 aa, Bradyrhizobium japonicum USDA 110
MSAPVHAKVVIIGSGPAGYTAAIYAARAMLEPILIQGIQPGGQLTITTDVENYPGFADVIQGPWLMEQMEKQAVHVGTKIVTDLVTKLETGRRPFRLTCDSGDVYLAETVILATGAQARWLGLPSEGKFQGGGVSACATCDGFFYRGKEVIVVGGGNTAVEEALFLTNHASQVTIVHRRDHFRAERILQERLFKHPKIKVVWDSAVDEICGTENPNKVTHVRLKNVKTGKLTELKADGIFIAIGHAPATELVKDQVKLKPSGYVEVAPNSTATSVPGLFAAGDVADETYRQAVTAAGLGCMAALEAERFLALRASERAAAE

SEQ ID NO: 133389 - DNA, 972 bp, Streptomyces avermitilis MA-4680
  CDS (1)..(972): transl_table=11
gtgagcgacgtccgtaacgtgatcatcatcggttcagggcccgccggctacacggcggcgctgtacaccgcacgcgcgtcgctgaagccgctggtgttcgagggcgccgtcaccgcgggcggcgcgctgatgaacaccaccgaggtggagaacttccccggcttccaggacggcatcatgggccccgagctcatggacaacatgcgcgcgcaggccgagcgcttcggtgccgagctggttccggacgacgtcgtcgccgtcgacctgacgggcgagatcaagaccgtcacggacaccgcgggcaccgtgcaccaggccaaggcagtcatcgtcaccaccggctcgcagcaccgcaagctggccctgcccaacgaggacgctctctccggacgcggcgtctcctggtgcgccacctgtgacggcttcttcttcaagggccaggacatcgccgtgatcggcggcggcgacaccgcgatggaggaggccaccttcctctcgcgcttcgccaagtccgtgacgatcgtccaccgccgggacacgctgcgcgcctccaaggcgatgcaggagcgtgccttcgccgaccccaagatcaagtttgtctgggacagcgaggtcgcggagatcaagggcgacccgaagctggccggcctgtcgctgcggaacctcaagaccggtgagatctccgagctgccggtgacggggctgttcatcgcgatcggccacgacccgcgcaccgagctcttcaagggtcagctcgacctggacgaggagggctacctcaaggtcgacgcgccctcgacccggacgaacctgagcggtgtcttcggcgccggcgatgtcgtcgaccacacctaccgccaggcgatcaccgcggccggcaccggctgctccgccgccctggacgccgagcgcttcctgtccgcgctcgcggccgccgaggacgccgcggagcccgagaagaccactgtctga

SEQ ID NO: 133390 - protein, 323 aa, Streptomyces avermitilis MA-4680
MSDVRNVIIIGSGPAGYTAALYTARASLKPLVFEGAVTAGGALMNTTEVENFPGFQDGIMGPELMDNMRAQAERFGAELVPDDVVAVDLTGEIKTVTDTAGTVHQAKAVIVTTGSQHRKLALPNEDALSGRGVSWCATCDGFFFKGQDIAVIGGGDTAMEEATFLSRFAKSVTIVHRRDTLRASKAMQERAFADPKIKFVWDSEVAEIKGDPKLAGLSLRNLKTGEISELPVTGLFIAIGHDPRTELFKGQLDLDEEGYLKVDAPSTRTNLSGVFGAGDVVDHTYRQAITAAGTGCSAALDAERFLSALAAAEDAAEPEKTTV

SEQ ID NO: 133391 - DNA, 1359 bp, Prochlorococcus marinus subsp. marinus str. CCMP1375
  CDS (1)..(1359): transl_table=11
ttgtctatagaaaaccttgtaataattggatcaggtcctgcaggatacacggcagcaatttatgcagctagagcaaatcttcaacctttattaattaccggttttgaacgaggaggaattcctggtggtcaattaatgactacaacttttgtagagaatttcccaggatttcctgatggaattatgggtccagatttaatggatctactgaaagcacaagcaattagatggggaaccaagcttttagaattagatgctgaagcaatcgatctaaaacaaaatccatttcgagttaaaacagctaatcaatctattgctgcacaagcattgataattgcaacaggagcacgagcaaataaattaggtatccctaatgagaataaattttggactcgtggtattagcgcatgtgcaatatgtgatggggcaactcctcaatttcgcaatgaagaattagctgtagtaggcggaggtgattcagcatgtgaagaagctgtttatttaacgaagtatggaagtcacgttcacctactgattcgctcaaatcaacttaaagcgagcaaagccatgtcagatagagttatggcaaactctcaaataacagttcattgggaaactgaattaattgacgtagaagggaaagaatggatagaaacccttaaagtcaaacgtagaggaacaaagcaagaagaaacaataaaagcaaaaggtctgttctatgcaattggtcatactccaaatgctgatctattagaaggacagctcttgataaaccaaaatggctatataagcactaaatcaggcaggccagaaacttctatagaaggagtttttgcagcaggagatgttgccgatgcagaatggagacaaggcataactgctgcaggaagtggatgcaaggcagcattagccgctgagagatggcttagcagaaacaatctttcaacgttgataaaaagagactcaatagaacctgcaaaaacagacaaagagactgagatagcaatatctacagaacaaaattttgatgcaaccaaaacatggcagaagggaagttatgccttaagaaagctttatcatgaaagctctaaaccaattctagtagtttatacatcaccaaattgcggtccatgccacgtacttaaacctcaactaaaaagagttattcaagaactaaaaggaactgtccaaggaattgaaatagatatagatattgaacaggaaattgccaaacaagctggcgtaaatggaactcctacagttcaattatttcatcaaaaagaactgaagactcaatggagaggagttaaacaaagaagtgaattcaaagaagctataacaaaagttttaagcaaataa

SEQ ID NO: 133392 - protein, 452 aa, Prochlorococcus marinus subsp. marinus str. CCMP1375
MSIENLVIIGSGPAGYTAAIYAARANLQPLLITGFERGGIPGGQLMTTTFVENFPGFPDGIMGPDLMDLLKAQAIRWGTKLLELDAEAIDLKQNPFRVKTANQSIAAQALIIATGARANKLGIPNENKFWTRGISACAICDGATPQFRNEELAVVGGGDSACEEAVYLTKYGSHVHLLIRSNQLKASKAMSDRVMANSQITVHWETELIDVEGKEWIETLKVKRRGTKQEETIKAKGLFYAIGHTPNADLLEGQLLINQNGYISTKSGRPETSIEGVFAAGDVADAEWRQGITAAGSGCKAALAAERWLSRNNLSTLIKRDSIEPAKTDKETEIAISTEQNFDATKTWQKGSYALRKLYHESSKPILVVYTSPNCGPCHVLKPQLKRVIQELKGTVQGIEIDIDIEQEIAKQAGVNGTPTVQLFHQKELKTQWRGVKQRSEFKEAITKVLSK

SEQ ID NO: 133393 - DNA, 1377 bp, Prochlorococcus marinus subsp. pastoris str. CCMP1986
  CDS (1)..(1377): transl_table=11
atggaaacaaaagtaaaagaagacaatgttgaaaatttagtaataataggttctggtccagcaggttatacagctgctatatacgcagcacgtgcaaaccttcaacctcttttagtaacgggatttaattctggtggaattccaggtggtcaattaatgacaactactttcgttgaaaactatcctggttttcctgatggagtattaggtcctgaattaatggatttaatgaaagctcaagccgaaagatggggaacaaatctatatgagagtgatgttatttcaattgataccagtaaaagtccttttgagttaaaaaccttagaaggaagcattaaatccaattcaattattatcgcaactggcgcaagtgctaataggttaggtgttataaatgaagataaattttggagcaaagggataagtgcttgcgcaatttgtgatggagcgactccacagtttagaaatgaagaattagcagttattggaggcggagattctgcatgtgaagaagctgcatatctcacaaaatatggtagcaaggtgcatttactcgtcagatccgaaaaactcagagctagtgccgcaatgatagatagagtaaaagctaattcaaagattgaaatacactggaacacaaaagtagagaaagctaatggtactgattggcttgaaaacgttgaaaccattaattcacataaaggtaacgtcgaaattaaagttaaaggacttttttatgctattggacacacacctaatacaaagtttttaaataataaaattgaattagataaaaaaggatatattgcttgtaattctggaagaccagaaacttcaatagaaggtatatttgcggctggcgatgttgtagattctgagtggagacaaggggttacagctgctggtacaggatgtatggcagcattagctgctgaaagatggttagcagagaagaatttatcaaaaataattgttagagaaacaagcgaaccagagaaaacattgtcttcatcaagttttaatgaagaggtgacaaatgaagatactttcaatttaaattccgaatggcaaaaaggtagttacgcactgaggaagctttatcatgagagtaataaaccaatattagttatttttagctcaccaagttgtggaccatgccatgtattaaaaccacaacttaaaagagtgattaaggaatttgatggagctgtacaaggtatagaaattgatatagataaagatcaagaaatcgctaaacaagcaggaataaatggaactcctacaatacaattatttaaagacaaattacttaaaaaacaatggcagggtgttaaacaacgtagtgaattcaaagaagcgatacaaaatatcatctga

SEQ ID NO: 133394 - protein, 458 aa, Prochlorococcus marinus subsp. pastoris str. CCMP1986
METKVKEDNVENLVIIGSGPAGYTAAIYAARANLQPLLVTGFNSGGIPGGQLMTTTFVENYPGFPDGVLGPELMDLMKAQAERWGTNLYESDVISIDTSKSPFELKTLEGSIKSNSIIIATGASANRLGVINEDKFWSKGISACAICDGATPQFRNEELAVIGGGDSACEEAAYLTKYGSKVHLLVRSEKLRASAAMIDRVKANSKIEIHWNTKVEKANGTDWLENVETINSHKGNVEIKVKGLFYAIGHTPNTKFLNNKIELDKKGYIACNSGRPETSIEGIFAAGDVVDSEWRQGVTAAGTGCMAALAAERWLAEKNLSKIIVRETSEPEKTLSSSSFNEEVTNEDTFNLNSEWQKGSYALRKLYHESNKPILVIFSSPSCGPCHVLKPQLKRVIKEFDGAVQGIEIDIDKDQEIAKQAGINGTPTIQLFKDKLLKKQWQGVKQRSEFKEAIQNII

SEQ ID NO: 133395 - DNA, 1374 bp, Synechococcus sp. WH 8102
  CDS (1)..(1374): transl_table=11
atgtccgttgatgcttccgggcacattgaaaacatcgtcattcttgggtcaggtcccgctggttacacagcagccatctacgccgcacgggcgaacctgcagccccttctgatcaccgggttccagcgaggaggcatcccaggtggccagttgatgaccaccacccacgttgagaattttccaggtttccccgatggaatcctgggccctgatctgatggatctgatgaaagcccaggccgtgcgctggggcacccatctgatcgaggcggatgcagaccggattgacctgagccagcgtcccttccgcatcgaagcggagggacagacgatccaggcccatgctgtcgtgattgccacaggagccagcgctaaccggcttggcctgccctcagaggatcgctactggagcagtggcatcagcgcctgcgcgatctgcgatggggccactccacagttccgcaatgaagaacttgccgtggttggtggcggtgattccgcctgcgaagaagctgtttatctcaccaagtacggcagccatgttcatctgatcgtgcgctccgaccaattccgagccagcgctgccatggccgatcgcgtgatggccaacccagccatcacggtgcactggaacagtgagatcgaggatgtagccggggggacgtggatggagtccctcaccctgcgggaccgagtcaccagcgagacccgagctcttgcggtgcgaggcctgttttatgccattggacacacccccaacaccgatctgctgaaagaccagatcgatctggatgggaaggggtacctgttgacagcctcaggacgcccggaaacctcagtggacggcgtcttttcagcaggtgacgtcgccgacgccgaatggaggcaaggcatcaccgccgccggcagcggctgcaaggcggctctggctgcggagcgctggctcacccaccacaacctggcgacccgcgttcccagggcatccgtggacccggccaaagcggaacaaccggtgaatgtggccgtgaccaccgaggagagctacgacccccaggggctgtggcaaaagggcagcttcgcgcttcgcaagctctatcacgacagtgacaagccgctgctcgtggtttacacctcaccgacctgtggtccgtgccatgtgctcaagccgcagcttcagcgtgtgatcaacgagcttgatggccacgcccaggctgtggtgatcgacatcgaagcggatcaggccattgccgaacaggccggtgtcagcggaaccccgaccgtgcagctgttccacaacaaggagatggtgaagcagtggcgcggcgtcaagccacgcagcgaattcaaggccgcgattgaatcgctggcggcctaa

SEQ ID NO: 133396 - protein, 457 aa, Synechococcus sp. WH 8102
MSVDASGHIENIVILGSGPAGYTAAIYAARANLQPLLITGFQRGGIPGGQLMTTTHVENFPGFPDGILGPDLMDLMKAQAVRWGTHLIEADADRIDLSQRPFRIEAEGQTIQAHAVVIATGASANRLGLPSEDRYWSSGISACAICDGATPQFRNEELAVVGGGDSACEEAVYLTKYGSHVHLIVRSDQFRASAAMADRVMANPAITVHWNSEIEDVAGGTWMESLTLRDRVTSETRALAVRGLFYAIGHTPNTDLLKDQIDLDGKGYLLTASGRPETSVDGVFSAGDVADAEWRQGITAAGSGCKAALAAERWLTHHNLATRVPRASVDPAKAEQPVNVAVTTEESYDPQGLWQKGSFALRKLYHDSDKPLLVVYTSPTCGPCHVLKPQLQRVINELDGHAQAVVIDIEADQAIAEQAGVSGTPTVQLFHNKEMVKQWRGVKPRSEFKAAIESLAA

SEQ ID NO: 133397 - DNA, 987 bp, Rhodococcus erythropolis
  CDS (1)..(987): transl_table=11
atgaccatcccgtccgcggtccatgacgtcatcattgtcggttccggaccggccggctacaccgctggtgtctacaccgcgcgcgctgagctccagcccctgctcttcgagggaacccagttcggtggcgccctcatgaccaccaccgaggtcgagaacttccccggattccgcgaaggaatcatgggccccgatctgatggaacagatgcgcgagcaggcactgcgcttcgacaccgacatccgcaccgaggacgtcgaggagatcgatctcagcggcccgatcaagaccgtcgtcgcgaacggcgaaacctacgccgcgcacgcgatcatcctcgccatgggcgcggcagcccgctacctgggcattcccggtgaagaacgcctcctcggccgcggcgtcagcgcctgcgccacctgcgacggcttcttcttccgtgaccaggacatcgtcgtggtcggcggcggcgattccgcgatggaagaagcaaccttcctcacccgcttcgctcgctcggtcaccctggtgcaccgccgcgaggagttccgcgcctcacggatcatgctcgagcgcgccaaggccaacgagaagatccgcttcctgaccaatgccgagcccgtcgaggtgctcggtgagaacagcgtcaccggcctcgtcgtgcgcgacaccgtcaccggcgagacctccacgctcgagatcaccggcatgttcgtcgccatcggccacgacccgcgcagtgaactcgtcaagggccaggtcgatctcgacgacgccggatacgtgcgcgtcgctcccggttctaccgcgacctccgtcgacggcgtcttcgctgccggtgacctggtcgatcacacgtaccgtcaggcgatcaccgctgccggcaccggatgctccgcagcaatcgacgccgaacgctggctggccgaccgcggcgacatcaccgccaacacgctcgacgcagccggccacaccgtcgacgccgtctga

SEQ ID NO: 133398 - protein, 328 aa, Rhodococcus erythropolis
MTIPSAVHDVIIVGSGPAGYTAGVYTARAELQPLLFEGTQFGGALMTTTEVENFPGFREGIMGPDLMEQMREQALRFDTDIRTEDVEEIDLSGPIKTVVANGETYAAHAIILAMGAAARYLGIPGEERLLGRGVSACATCDGFFFRDQDIVVVGGGDSAMEEATFLTRFARSVTLVHRREEFRASRIMLERAKANEKIRFLTNAEPVEVLGENSVTGLVVRDTVTGETSTLEITGMFVAIGHDPRSELVKGQVDLDDAGYVRVAPGSTATSVDGVFAAGDLVDHTYRQAITAAGTGCSAAIDAERWLADRGDITANTLDAAGHTVDAV

SEQ ID NO: 133399 - DNA, 960 bp, Photorhabdus luminescens subsp. laumondii TTO1
  CDS (1)..(960): transl_table=11
atgagcgccgccaaacaccacaaacttattattcttggctccggtccagcaggctatactgccgcggtttacgctgccagagcaaatttaaatccggttcttattaccggggttgaaagaggcggtcaattgactacaaccaccgaggtcgaaaattggcccggtgatccagaaggtctgaccggcccagggttaatggaacgcatgcaccaacatgctgaaaaattccaaaccgaaatcatttctgaccatattcaaaaagttgatctgcaaagccggcctttacgcctttatggtgatgagcaagaatatacctgtgacgcactgattatcgcaacaggtgcttctgcccgttatttaggtttaccttctgaagaggcattcaaaggtcgtggtatttcagcctgtgcaacctgtgatggtttcttttatcgtaaccaaaaagtcgccgttgtcggcggtggtaataccgcggtagaagaggccttatatctggcaaatattgcagcggaagttcacctaattcatcgccgtgatacattccgttcagagaagatcttgatcagtcgcctgatggataaagtcaaaaatggcaatatcatcctgcatactgatcggattctggatgaagtactcggtgatgatatgggcgttaccggtgttcgcctacgcgataccaaaagtggcgctacagaagaattggctgttaccggcaccttcattgccatcggccatactcccaataccgctatttttgaaagccaattagaattggataatggttacattaaagttcaatccggtttacagggtaacgccactcagacctccattcccggtgtattcgccgccggtgatgtcatggatcatacttaccgacaggcaattacctccgctggtacaggttgtatggcagccctcgacgcagaacgtttcctggatgggctagccgctaaataa

SEQ ID NO: 133400 - protein, 319 aa, Photorhabdus luminescens subsp. laumondii TTO1
MSAAKHHKLIILGSGPAGYTAAVYAARANLNPVLITGVERGGQLTTTTEVENWPGDPEGLTGPGLMERMHQHAEKFQTEIISDHIQKVDLQSRPLRLYGDEQEYTCDALIIATGASARYLGLPSEEAFKGRGISACATCDGFFYRNQKVAVVGGGNTAVEEALYLANIAAEVHLIHRRDTFRSEKILISRLMDKVKNGNIILHTDRILDEVLGDDMGVTGVRLRDTKSGATEELAVTGTFIAIGHTPNTAIFESQLELDNGYIKVQSGLQGNATQTSIPGVFAAGDVMDHTYRQAITSAGTGCMAALDAERFLDGLAAK

SEQ ID NO: 133401 - DNA, 966 bp, Vibrio vulnificus YJ016
  CDS (1)..(966): transl_table=11
gtgcaaatgagcgatatgaaacacagtaaattactaattcttggttctggcccagctggttatacagcggcggtttacgcggcgagagcaaatctaaatcctgtattgattacaggtatgcagcaaggcggccaactaaccacgacaaccgaagttgaaaactggcctggcgatccagaaggtctgaccggccctgggctcatgaaccgcatgaaagagcatgcagagcgtttcgaaaccgagattattttcgaccacattaacgaagtggatttctccacacgcccatttgtgcttaaaggtgacgcggccagttacagctgtgatgcactgatcatttctacgggcgcgtctgcaaaataccttggtttggagtctgaagaagcattcaaagggcgtggcgtgtcagcgtgtgcaacctgcgatggctttttctaccgtaatcaaaaagtggcggttgtaggcggcggcaacaccgcagtggaagaagcactctatctttctaacatcgcggctgaagttcatctgattcaccgtcgcgacagcttccgcgcggaaaaaattctcataaaccgtttaatggataaagtccaaaacggcaatattgttttgcacactgatcgtgttctggatgaagtcttaggtgatgagatgggcgtaaccggtgtgcgcctgaaagatgtcaaaacgggtggcacagaagagctagacgttatgggcgcatttatcgcgattggtcactcaccgaacacccagattttccaaggtcagcttgatatgaaagatggctacatcttggtcaaatcaggcttggaaggtaacgccacacaaaccagtgtcgaaggcatcttcgccgcgggtgatgtgatggaccataattatcgtcaagcgatcacctcggccggcacgggctgtatggcggcccttgatgcagagcgttacctagactcgttgaacgacaaataa

SEQ ID NO: 133402 - protein, 321 aa, Vibrio vulnificus YJ016
MQMSDMKHSKLLILGSGPAGYTAAVYAARANLNPVLITGMQQGGQLTTTTEVENWPGDPEGLTGPGLMNRMKEHAERFETEIIFDHINEVDFSTRPFVLKGDAASYSCDALIISTGASAKYLGLESEEAFKGRGVSACATCDGFFYRNQKVAVVGGGNTAVEEALYLSNIAAEVHLIHRRDSFRAEKILINRLMDKVQNGNIVLHTDRVLDEVLGDEMGVTGVRLKDVKTGGTEELDVMGAFIAIGHSPNTQIFQGQLDMKDGYILVKSGLEGNATQTSVEGIFAAGDVMDHNYRQAITSAGTGCMAALDAERYLDSLNDK

SEQ ID NO: 133403 - DNA, 945 bp, Bdellovibrio bacteriovorus HD100
  CDS (1)..(945): transl_table=11
atgactcaggatcaaaaagttgaaaacgtcatcatcatcggttccggccctgcaggcctgacttccgctatctattcttcccgcgccaatctggagcctttgatgatcgaaggtgaagaggccggcggtcagctgatgaccacgaccgaagttgaaaacttcccgggctttgaccacgggatcacgggtcctgacctgatcacggtcatgagaaaacaggctgaaagattcggcacgcgttttatcactcgtaacgtgacgaaagtggatttttcccagcgtccgttcaaagtgtggatcggtgacaaacttcacctggcaaaatccatcatcatctctaccggcgccagcgcgaagtatctgggcctgccttctgaaaaagtttacgccaaccgcggtgtttccgcgtgtgcaacgtgtgatggtgccttcttccgcaatcaggaaatcggcgttgttggcggtggtgacacggcgatggaagaagctcagttcctgactcgttttgcgaccaaagtgtatctgatccacagacgtgaccatttccgtgcttccaagatcatggtggaccgtgctttgaagaacccaaaaatcgaagtgctttacaacactgaggtgatcgaggttctgggggacggcaagggtatgaccggcgcaaaaatcaaaggcactcttgatggcgctgtcaaagaacttccgatcacaggtctattcctggccattggccataagccgaacaccgacctttttaaaggtgttttggatatgaatgagacaggctatttgatcacccagcccaacaccacgtatactaacattccaggtgtctttgcggcgggagacgtgcaagatcacgtatatcgtcaggcgatcacggcagccggtacaggttgtatggcggcgatcgatgctgaaagatggctggaagcccaggaagctcactaa

SEQ ID NO: 133404 - protein, 314 aa, Bdellovibrio bacteriovorus HD100
MTQDQKVENVIIIGSGPAGLTSAIYSSRANLEPLMIEGEEAGGQLMTTTEVENFPGFDHGITGPDLITVMRKQAERFGTRFITRNVTKVDFSQRPFKVWIGDKLHLAKSIIISTGASAKYLGLPSEKVYANRGVSACATCDGAFFRNQEIGVVGGGDTAMEEAQFLTRFATKVYLIHRRDHFRASKIMVDRALKNPKIEVLYNTEVIEVLGDGKGMTGAKIKGTLDGAVKELPITGLFLAIGHKPNTDLFKGVLDMNETGYLITQPNTTYTNIPGVFAAGDVQDHVYRQAITAAGTGCMAAIDAERWLEAQEAH

SEQ ID NO: 133405 - DNA, 987 bp, Magnaporthe grisea 70-15
  CDS (1)..(987)
atgcacagcaaggtagttatcatcgggtctgggcccgccgcccacacggccgccatttacctggcgcgagccaacctgaagcctgtcatgtatgaaggtttcatggccaacggtaccgcagcgggtggccagctgaccacgaccacggacgtggagaacttccctggtttccccaagggtattggcggccaggaactcatggacgcaatgcgcgaacaatcatcccgctttgagaccgagatcatctccgagaccgttgccaaggttgacctgtcctcgcgccctttcaaatactgcaccgagtggtcgccggaggtcatgcacacagcagacacgctcgtaatcgcaacgggtgcgtcagcccgccgccttggcctgcctggcgaggacaagtactggcagaacggcatctcggcctgcgccgtatgcgacggtgccgtgcctatcttccgtaacaagccgctttttgtcatcggcggtggcgacagcgcagctgaggaggccatgtttttgaccaagtacggcagccacgttacagtgcttgtgcgcaaggacaagctgcgcgccagcagcatcatggccaagcgcttgctgtcgcaccccaaggttacagtcaagttcaattcggttggagtcgaggtcaagggtggggaggacggtcttatgagccacatggtcatcaaggacgtcgttactggcaaggaggagacgctcgaagccaacggtctattttatgccatcggacacgacccggccactcagctcgtcaaggggcagctcgagaccgatgaggagggttatatcgtcactaagccgggtacccccctgacgagtgtcgagggtgtttttgcttgcggcgatgtgcaagacaagagatacagacaggctattacaagtgccggttccggttgcatggccgccatggatgctgaaaagttcctggctgagcaagaggacgtcgagcccgatcgagaggcgcgcatgtaa

SEQ ID NO: 133406 - protein, 328 aa, Magnaporthe grisea 70-15
MHSKVVIIGSGPAAHTAAIYLARANLKPVMYEGFMANGTAAGGQLTTTTDVENFPGFPKGIGGQELMDAMREQSSRFETEIISETVAKVDLSSRPFKYCTEWSPEVMHTADTLVIATGASARRLGLPGEDKYWQNGISACAVCDGAVPIFRNKPLFVIGGGDSAAEEAMFLTKYGSHVTVLVRKDKLRASSIMAKRLLSHPKVTVKFNSVGVEVKGGEDGLMSHMVIKDVVTGKEETLEANGLFYAIGHDPATQLVKGQLETDEEGYIVTKPGTPLTSVEGVFACGDVQDKRYRQAITSAGSGCMAAMDAEKFLAEQEDVEPDREARM

SEQ ID NO: 133407 - DNA, 1071 bp, Aspergillus nidulans FGSC A4
  CDS (1)..(1071)
atggttcactccaaagtagttatcatcggctccggccccgccgctcacaccgccgccatctacctttcgcgggcggaactcaagcctgtcctttacgagggtatgctggccaatggcaccgcagccggtggccagcttaccacgaccactgatgtcgagaactttcccggttttccggacggaattggtggctccgagctgatggacgccatgcgcaagcaatccatccgcttcgggactgaggtcatcaccgagactatctcccgtgtcgacctttcacagaggcccttcaagctgtggactgagtggaacgacggtcccgacaacgagcctgcccgcaccgctgatgctgtcatcattgccactggtgccaatgcccgccgtctcaaccttcctggtgaggatgtatactggcagaacggtatcagcgcctgcgctgtctgcgatggtgccgtgcccatcttccgcaacaagcccctcttcgtcatcggcggtggtgattccgccgctgaggaggccatcttcctcaccaagtacggtagcagcgttaccgtgcttgtccgccgcgacaagctccgcgcttccaaggccatggccagccgcctcttggctaaccccaaggttaccgtccgcttcaacaccgttgctaccgaggttcttggtgagaagaagctcaacggcctgatgacccacctccgcgtgaagaatgtccttactggcgaggaagagaccctagaggctaacggtcttttctacgccgtcggccatgaccccgccactgctcttgtcaagggccaggtcgaactcgatgaggacggatacatcgctaccaagcccggtaccagctttaccagcgttgagggtgtttttgcttgcggtgacgtccaggacaagcgctaccgccaggccatcaccagtgcgggatctggttgcattgctgctctcgaggctgagcgattcatcggcgagtccgagtcaaacgaagagataccccctgctcacgctaaccccgctctggtggaggtaaacgcaatctacttttcaaaccttaaggaccatgcatcaagataa

SEQ ID NO: 133408 - protein, 356 aa, Aspergillus nidulans FGSC A4
MVHSKVVIIGSGPAAHTAAIYLSRAELKPVLYEGMLANGTAAGGQLTTTTDVENFPGFPDGIGGSELMDAMRKQSIRFGTEVITETISRVDLSQRPFKLWTEWNDGPDNEPARTADAVIIATGANARRLNLPGEDVYWQNGISACAVCDGAVPIFRNKPLFVIGGGDSAAEEAIFLTKYGSSVTVLVRRDKLRASKAMASRLLANPKVTVRFNTVATEVLGEKKLNGLMTHLRVKNVLTGEEETLEANGLFYAVGHDPATALVKGQVELDEDGYIATKPGTSFTSVEGVFACGDVQDKRYRQAITSAGSGCIAALEAERFIGESESNEEIPPAHANPALVEVNAIYFSNLKDHASR

SEQ ID NO: 133409 - DNA, 1056 bp, Ustilago maydis 521
  CDS (1)..(1056)
atgaccgaacacaccaacggtgcttcttcgtcttcgggtcccaaggtccacaaggtcgtaattatcggctcgggtcctgctggtcatactgctgctatatacctcgcgcgagccaacctcgagcctgttctctttgagggtatgcttgccaacggccttgctcccggcggacagctcacgacaaccactgatgttgaaaacttccccggttttcctgagggcatccgtggtcccgagatcatggacaagttccgcgcgcaatccgtacgtttcggaaccgagattcacaccgagaccatcgcaaagctggatctttcttcgcgcccgttcaagttctggcgcgagtgggccgaggacaagcctcccgagctcaccgaaactctcatcattgctacgggtgccagcgccaagcgcatgcaccttaccggcgaggacacctattggcagagcggtatctcggcgtgtgccgtttgtgatggtgccgtgcccatcttccgaaataagccgctcgtggtcgttggtggtggtgatagtgctgccgaggaggccatgtacctcaccaaatacgcctcgcacgtccacgttctcgtgcgtcgagacgaactgcgtgcctccaagatcatggccaagcgtttgttggcgcaccccaaggtaactgtccacttcaacacagtacccatcgaggccaagggtgacggtgagctgctccaggctgtgcgcgtcaaggacaccaagaccaacgaggagcgcgatatggacgccaacggtcttttctacgccatcggtcacttgcccgcaacctcgctcgtcaagggccaggtcgacctcgacagcgacggatacatcatcactacgccaggtaccgcccagacttcagtcaagggtgtcttcgctgctggtgacgtggctgacaagaagtacaggcaggctatcacgagtgcaggcactggatgtattgctgcccttgaggctgagcgtcttttggccgaagaggaggtgctcgaccctgtcgatgctgctcaggccaatcactacactggtactgacaaggcatag

SEQ ID NO: 133410 - protein, 351 aa, Ustilago maydis 521
MTEHTNGASSSSGPKVHKVVIIGSGPAGHTAAIYLARANLEPVLFEGMLANGLAPGGQLTTTTDVENFPGFPEGIRGPEIMDKFRAQSVRFGTEIHTETIAKLDLSSRPFKFWREWAEDKPPELTETLIIATGASAKRMHLTGEDTYWQSGISACAVCDGAVPIFRNKPLVVVGGGDSAAEEAMYLTKYASHVHVLVRRDELRASKIMAKRLLAHPKVTVHFNTVPIEAKGDGELLQAVRVKDTKTNEERDMDANGLFYAIGHLPATSLVKGQVDLDSDGYIITTPGTAQTSVKGVFAAGDVADKKYRQAITSAGTGCIAALEAERLLAEEEVLDPVDAAQANHYTGTDKA

SEQ ID NO: 133411 - DNA, 1116 bp, Cryptococcus neoformans var. neoformans B-3501A
  CDS (1)..(1116)
atgtctcccatcgccaatggcaacccccacggcagctctttcagcgtcagggaacccgagaggaccggcgaggtaagcaagaagatgcactccaaggttgttatcatcggctctggtcccggtggtcacaccgccgccatctacttggcccgagccaacctcgagcctgtcctgtacgagggaatgcttgccaacggtttcgctcctggcggtcaactcaccaccacgactgacgtcgagaacttccctggtttccccgagggtgttaccggtaccgaaatgatggacaagttccgagctcagagtgagcgattcggtaccaagatcatcaccgagactgttgcgcgtgtcgacctctctgtccgacctttcaagtactggactgagggcgaggaggaggaacacgagttcatgaccgccgacactatcatcatggctaccggtgcttctgccaagcgtcttttccttcctggtgaggatacctattggcagtctggtatctctgcttgtgccgtttgcgacggtgccgtccccctcttcaggcaaaagcccctcgccgttatcggtggtggtgacagtgcggccgaggaagctacttaccttaccaagtacggttctcacgtctatgtcctcgtcagaagggacgagctccgagcttccaagattatggctaagcgactcacttctcaccccaaggttaccgtcctttggaatactgttgctactgaggccaagggcgacggtgaagtcctcacgtcacttaccatcaagaacaccaagactggtgagatcggagacctccccgtcaacggtctcttctatgccatcggccacgagcccgccacttccctcgtcaagtctcaagttgagcttgacagcgatggatacatcaagactgttcccggcacctcccagacttctgtccacggtgtcttcgccgccggtgacgtccaggacaagaagtacaggcaggctatcacatctgctggttccggttgcattgctgcccttgaagctgagaagctcatcagcgaggaggaggctgatgacgagagcctccagacacaagacgtgcatgtccctgccgagcactacttgggtactgacaaggagtaa

SEQ ID NO: 133412 - protein, 371 aa, Cryptococcus neoformans var. neoformans B-3501A
MSPIANGNPHGSSFSVREPERTGEVSKKMHSKVVIIGSGPGGHTAAIYLARANLEPVLYEGMLANGFAPGGQLTTTTDVENFPGFPEGVTGTEMMDKFRAQSERFGTKIITETVARVDLSVRPFKYWTEGEEEEHEFMTADTIIMATGASAKRLFLPGEDTYWQSGISACAVCDGAVPLFRQKPLAVIGGGDSAAEEATYLTKYGSHVYVLVRRDELRASKIMAKRLTSHPKVTVLWNTVATEAKGDGEVLTSLTIKNTKTGEIGDLPVNGLFYAIGHEPATSLVKSQVELDSDGYIKTVPGTSQTSVHGVFAAGDVQDKKYRQAITSAGSGCIAALEAEKLISEEEADDESLQTQDVHVPAEHYLGTDKE

SEQ ID NO: 133413 - DNA, 1377 bp, Prochlorococcus marinus str. MIT 9515
  CDS (1)..(1377): transl_table=11
atggaaatgataaaaaaagaagaaaacattgaaaatttagtaataataggttctggtcctgcgggttatacagcagcaatatacgctgctcgtgcaaatctacaacctctcttggttactgggtttaattctggagggattcccggggggcaattaatgacaactacttttgttgaaaactttcccggttttcccgatggggtattaggacctgaattaatggacttaatgaaagctcaagctgaaagatgggggactaatttatatgagagtgatgtaatttcaattgatacaagtaaacgtccttttgagctgaaaaccctagaagggattattaaaacaaattcaattattattgcaactggagcaagtgccaataggttgggggtgataaatgaagataaattttggagcaaaggcataagtgcgtgcgcaatttgtgacggggcaacgccacaatttagaaatgaagaactagcagttattggagggggagattctgcatgtgaagaagcggcatatcttacaaaatatggcagcaaagttcatttactagttagatctgaaaaattaagagctagtgccgcaatgatagatagagtaaaaggcaactcaaagatcgaaattcattggaacacaaaagtagaaaaagcaattgggactgattggcttgacaagattgaagctattaacacagaaaaaggctacgtcgagattaaagttaaaggacttttttatgctattggacacactcctaatacaaagtttttggacaataaaattgaattagacaaaaaaggatatattgcttgtaaatcaggtagaccagaaacttctatagatggaatatatgcagctggagatgtagtagattctgaatggcgacaaggagttacagctgctgggacaggttgtatggcagcattggctgctgagcgatggttagcagagaaaaatttatcaaaaataattattagagaaaaagccgaaccagaaaaaacattgccttcttcgagttttaatgaagaggagacagatgaaaacactttcgatttaaactctaaatggcaaaaaggtagttatgcacttaggaaactttatcatgagagcaataaaccaattctagttattttcagctctccaagctgtggaccttgtcatgttttaaaaccgcaacttaaaagagtgatcaatgaatttgatggggctgttcagggtatagaaattgatattgataaagatcaagaaattgctaaacaagccggaataaatggaactccgacaatacagctatttaaagaaaaattacttaaaaaacagtggcaaggagttaagcaacgtagtgaattcaaagaagcaatacaaaacatcatctaa

SEQ ID NO: 133414 - protein, 458 aa, Prochlorococcus marinus str. MIT 9515
MEMIKKEENIENLVIIGSGPAGYTAAIYAARANLQPLLVTGFNSGGIPGGQLMTTTFVENFPGFPDGVLGPELMDLMKAQAERWGTNLYESDVISIDTSKRPFELKTLEGIIKTNSIIIATGASANRLGVINEDKFWSKGISACAICDGATPQFRNEELAVIGGGDSACEEAAYLTKYGSKVHLLVRSEKLRASAAMIDRVKGNSKIEIHWNTKVEKAIGTDWLDKIEAINTEKGYVEIKVKGLFYAIGHTPNTKFLDNKIELDKKGYIACKSGRPETSIDGIYAAGDVVDSEWRQGVTAAGTGCMAALAAERWLAEKNLSKIIIREKAEPEKTLPSSSFNEEETDENTFDLNSKWQKGSYALRKLYHESNKPILVIFSSPSCGPCHVLKPQLKRVINEFDGAVQGIEIDIDKDQEIAKQAGINGTPTIQLFKEKLLKKQWQGVKQRSEFKEAIQNII

SEQ ID NO: 133415 - DNA, 1377 bp, Prochlorococcus marinus str. MIT 9301
  CDS (1)..(1377): transl_table=11
atggaaaataaagagaagattccaaacgtagaaaatgttgtaattattggttcaggtcccgcaggatacacagctgcaatttatgctgcaagagcaaatcttcaaccattgctcgttacaggatttaattctggtggaattcctggtggccaattgatgactacaacatttgttgaaaattatccaggtttcccagatggtgtacttggtcctgaattaatggatctaatgaaagctcaagccgaaagatggggcactaatttatatgaaagtgatgttgtctcaataaatactgattcacatccctttgaattaaaaactttagaaggaactataaaatctaactcaattattattgcaactggagcaagtgcaaatagattaggcgtgataaatgaagataaattctggagtaaaggaataagtgcttgtgcaatatgtgatggagcgaccccacaatttagaggtgaagaattagctgttattggagggggcgactctgcatgtgaagaagcagcatatctcacaaagtatggaagcaaagtgcatttgattgttagatcagaaaaattaagggctagcgcggcaatggtagatagagtaaaagctaatccaaagatagcaattcattggaacacaaaagttgaaaaagcggatggctctgaatggcttgagaaaatagaaactattcactctcaagaaggtaaaggggaaatcaatataaaaggtcttttttacgcgatagggcacacaccaaatactaagttcttaggcagcaaaattgacttagataataaaggatatattgcttgcaaatcaggaagaccagaaacatctattgaaggcatcttcgcagcaggtgacgttgtcgactctgagtggagacaaggagttaccgctgctggaactgggtgcatggcagcattagctaccgaaaggtggctagccgagaaaaacttagcaaaaacaatagtcagagaaacacccgaaccagaaaaaaaacttaattcatcagattttaatgaagaagaagttaatgaagatactttcgattcaaattctgaatggcaaaaaggcagttatgcattaaggaaactttatcacgagagtaaaaaacctatcttagtaatttttagttctccaagttgcggcccatgtcatgttttgaaacctcagttaaaaagggtaattaaagaacttgatggtgcagttcttggcgttgaaatagatattgataaagatcaagatattgcaaaacaagctggtattaacggcacaccaacagttcaactttttaaagaaaaattattaaaaaaacagtggcaaggtgttaaacaaagaagtgagtttaaagaagcgataaaaaatattatctaa

SEQ ID NO: 133416 - protein, 458 aa, Prochlorococcus marinus str. MIT 9301
MENKEKIPNVENVVIIGSGPAGYTAAIYAARANLQPLLVTGFNSGGIPGGQLMTTTFVENYPGFPDGVLGPELMDLMKAQAERWGTNLYESDVVSINTDSHPFELKTLEGTIKSNSIIIATGASANRLGVINEDKFWSKGISACAICDGATPQFRGEELAVIGGGDSACEEAAYLTKYGSKVHLIVRSEKLRASAAMVDRVKANPKIAIHWNTKVEKADGSEWLEKIETIHSQEGKGEINIKGLFYAIGHTPNTKFLGSKIDLDNKGYIACKSGRPETSIEGIFAAGDVVDSEWRQGVTAAGTGCMAALATERWLAEKNLAKTIVRETPEPEKKLNSSDFNEEEVNEDTFDSNSEWQKGSYALRKLYHESKKPILVIFSSPSCGPCHVLKPQLKRVIKELDGAVLGVEIDIDKDQDIAKQAGINGTPTVQLFKEKLLKKQWQGVKQRSEFKEAIKNII

SEQ ID NO: 133417 - DNA, 1362 bp, Synechococcus sp. WH 7803
  CDS (1)..(1362): transl_table=11
atggcggtcgaaaacctggtgatcgtggggtcaggccctgctgggtacaccgcagcgatttatgccgctcgcgccaacctcaatccgctgctgatcacgggattccagcgcggtggcattcccggtggacagttgatgaccaccacccatgtggagaatttccccgggtttcccgatggtgtgctgggccctgatctgatggacctaatgaaggcccaggccgaacgctggggaacgcgtctgcttgaggctgacgcagaccaaatcgatctgagccagaggccttaccgaatcgaagccgacggcgacacgatcgaaacccaggctctgatcatcgccaccggcgcgagtgccaaccgcctgagtctccccaacgaagaacgcttctggagccagggaatcagcgcctgcgccatctgcgatggcgccaccccccagttccgcaacgaacagttggctgtggtaggcggcggtgattccgcctgcgaagaagctgtttatctcacgaagtacggcagccacgtgcacctgctcgtgcgctccgaccgtttgcgcgccagcgcggccatggccgaccgagtgcaggccaacccccaaatcaccgtgcactggaacacccaggtggccgacgctgagggcgacgaatggctcagtggactgcggctccatcgccgggacagcggcctggaagagcaccttccggtgcgaggactgttctacgccatcggtcacacgccgaacaccgagttggtgcgtgatcagctgcagtgcgatggcaccggttacttgatcacccaacccgggcgcccggaaacgtcaaaagagggtgtgttcgcggcaggggatgtggcggatgcggagtggcgccaaggcatcaccgctgccggcagcggttgccaggcggccctggctgccgagcgctggctcagccacaacgatctggcccagttggtgaagcgtgatcaagccgagccggccaaggcggacacacccacagccacagccgaaacaacggaaaccagctacgaccccaatgcgctctggcagaagggaagtttcgccctcagaaagctttaccacgacagcgagcgaccgcttctggtggtctacacatccccgagctgcggcccctgccacgtgctgaagccccagctcaagcgtgtgctcaacgaactgggaggccgcgcccagggcattgaaatcgacatcgaagccgaccaggccattgccgagcaagccggcgttaatggcacgccaaccgtgcagctcttctacaacaaagagctcaaacagcaatggcgaggagtgaaacagcgcagcgagttcatggcctcgatccgctcactgctgcctgagagctga

SEQ ID NO: 133418 - protein, 453 aa, Synechococcus sp. WH 7803
MAVENLVIVGSGPAGYTAAIYAARANLNPLLITGFQRGGIPGGQLMTTTHVENFPGFPDGVLGPDLMDLMKAQAERWGTRLLEADADQIDLSQRPYRIEADGDTIETQALIIATGASANRLSLPNEERFWSQGISACAICDGATPQFRNEQLAVVGGGDSACEEAVYLTKYGSHVHLLVRSDRLRASAAMADRVQANPQITVHWNTQVADAEGDEWLSGLRLHRRDSGLEEHLPVRGLFYAIGHTPNTELVRDQLQCDGTGYLITQPGRPETSKEGVFAAGDVADAEWRQGITAAGSGCQAALAAERWLSHNDLAQLVKRDQAEPAKADTPTATAETTETSYDPNALWQKGSFALRKLYHDSERPLLVVYTSPSCGPCHVLKPQLKRVLNELGGRAQGIEIDIEADQAIAEQAGVNGTPTVQLFYNKELKQQWRGVKQRSEFMASIRSLLPES

SEQ ID NO: 133419 - DNA, 951 bp, Candidatus Protochlamydia amoebophila UWE25
  CDS (1)..(951): transl_table=11
atggaaaaagcaaagctaattattattggatctgggcccgcaggatatacagctgctatttatgctgctcgagctaacttagagcctattttatttgaaggattttttacaggcgctgcagggggtcaattgatgacaacaactgaggtagaaaattttcctggctttcctgatggaattacaggacccgagctagtcgatcgttttcgacaacaggccattcgttttggaacaactataattagtgaggatgtagactctgttgattttcaagtttacccttttattattaaaggtaagaaatcgcattatcaagctagttctgttattgtctctactggagctacagcaaaacgtttacccattccaggcgcaggtgatgatgaattttggcaaaaaggtgtgacagcttgtgctgtctgtgatggggcggctcctatttttcgcaatcgccctttatttgtcataggtggaggagattcagccattgaagaagccacatttttgacaaagtttggaagtcgtgtttttattgttcatcgaagagatacattacgagcttctaaaatcatgcaggaaagagcctttaataaccctaaaattgaaatgatttggaattcagaagttattcaagtaaagggagaccaaatcgtaaaaaatcttgtgattagaaatgtcaaaacaggacaggaaaaagaatatgaagcagcaggactttttttcgcgattggacataatccaaatactgagtttttaaaaaatcaattggaattacattcgaatggttacttaaaagttttcaaaggaacccaaacaagcattaaaggcgtatttgcagcaggagatgttcaagattttgaatatcggcaagctattactgctgcaggtagtggttgtatggcagccttggatgctgaaagatggctcgctgaaaaaggattagacaattaa

SEQ ID NO: 133420 - protein, 316 aa, Candidatus Protochlamydia amoebophila UWE25
MEKAKLIIIGSGPAGYTAAIYAARANLEPILFEGFFTGAAGGQLMTTTEVENFPGFPDGITGPELVDRFRQQAIRFGTTIISEDVDSVDFQVYPFIIKGKKSHYQASSVIVSTGATAKRLPIPGAGDDEFWQKGVTACAVCDGAAPIFRNRPLFVIGGGDSAIEEATFLTKFGSRVFIVHRRDTLRASKIMQERAFNNPKIEMIWNSEVIQVKGDQIVKNLVIRNVKTGQEKEYEAAGLFFAIGHNPNTEFLKNQLELHSNGYLKVFKGTQTSIKGVFAAGDVQDFEYRQAITAAGSGCMAALDAERWLAEKGLDN

SEQ ID NO: 133421 - DNA, 1053 bp, Propionibacterium acnes KPA171202
  CDS (1)..(1053): transl_table=11
atgaccactcaggcccttacacccaacaccatcctcggcaacatttcgctgtccgatccctcggaaatcgacaccacccagcccttccctgagaccgtcggcgccgacgtccacggtaatgacgagccgcgcgacgtcatcatcgtagggtctgggccagccggatacaccgccgctgtctacaccgcccgcgccggactgaagccgctggtatttgaagggtcaatggatgccggcggcgccctcatgcagaccaccgaggtcgaaaactacccgggcttctccgaagggatcatgggccccgacctcatggcgcagatgcgtgcccaggccgaacggttcggagccgagctcatcgccgacgacgtcaccgatatcgacctcaccggtgagatcaagaagctcgtcgacaccgacggaaacacctacaaggcgcacgttgttatcctcgccatgggatcggcctaccgcaaactcgggcttgaggatgagccgcggttgtccgggcgcggcgtgtcgtggtgcgccacctgtgacgggttcttcttcaccggcaaagacatcgccgtcgttggtggcggtgactccgcggttgaggaagccactttccttacccggttcgccaactcggtgaccctcgtgcatcgccgcgaccaattgcgcgcctctcagatcatggccgaccgtgccgcagccgaccccaagatcaccttcgcgtggaatagtgaggtcgtcgccatgcagggcgagtcgaagctcgagtcgatcaccctgcgggacaccaaaaccggcgaggagcgtcaactcgaagttgccggcgtttttgaggccatcggccatgacccgcgctccgagctggtgcgcggccaggtcgatctggacgatgctggctacgtcgtgtgcgccgagccatccacccgcaccaacgtgccgggagttttcgcctgcggcgacctggtcgactcccactaccaacaagccgtcaccgcggccgggtccgggtgccgtgctgccctagatgccgaaaggttcctcactgaactaggtcgctga

SEQ ID NO: 133422 - protein, 350 aa, Propionibacterium acnes KPA171202
MTTQALTPNTILGNISLSDPSEIDTTQPFPETVGADVHGNDEPRDVIIVGSGPAGYTAAVYTARAGLKPLVFEGSMDAGGALMQTTEVENYPGFSEGIMGPDLMAQMRAQAERFGAELIADDVTDIDLTGEIKKLVDTDGNTYKAHVVILAMGSAYRKLGLEDEPRLSGRGVSWCATCDGFFFTGKDIAVVGGGDSAVEEATFLTRFANSVTLVHRRDQLRASQIMADRAAADPKITFAWNSEVVAMQGESKLESITLRDTKTGEERQLEVAGVFEAIGHDPRSELVRGQVDLDDAGYVVCAEPSTRTNVPGVFACGDLVDSHYQQAVTAAGSGCRAALDAERFLTELGR

SEQ ID NO: 133423 - DNA, 945 bp, Symbiobacterium thermophilum IAM 14863
  CDS (1)..(945): transl_table=11
gtgcgcaaagtggtgattcttggcaccggacctgccggcctgacggcggcgatctacaccgcgcgggccaatctgcagcctctggtcatcgagggcaacgagccgggtggacagctcaccaccaccaccgaggtggagaacttccccggtttcccggacggcatcatggggccggagctcatggacaacatgcgccgccaggcggagcggttcggcgcggagttccgcagggggtacgtcaccggcgtcgacttttcccgccgtcccttccggatcaccgtggatgagaccgacgtcatcgaggccgaggcggtgatcatcgccaccggcgcttcggccaagcacctgggcatcccgggcgaggatgagaacatcggccgcggcgtctcctactgcgccacctgcgacggcttcttctaccgcggcaagaaggtgctggtcgtcggcggcggcgactcggccatggaggaggccaacttcctcacgaagttcgccgatgtcaccgtggtccaccgcaggagcgagctgagggcctccaagatcatgcaggagcgcgcccgggcgaacccgaagattagctgggtgctgaacgccgttcccgtcgaggtcctcgcggacgagcggggcttcaaggccctgaaggtgcgtgacaaggagaccggcgaggagcggttgctggaggccgacggcatgttcgtggcgatcggccacaagcccaacaccgacttcctgcggggccagatcgacatggatgagttgggctacatcaagaccattcccggcaccgcccagaccaacgtcccgggcgtgttcgcctgcggcgacgtgcaggactcccggtaccgccaggcgatcactgccgccgggtcgggctgcatggccgcgctggactgcgagcggttcctggaggaagtggccgcgcaggaggggtcgctcaccaagtaa

SEQ ID NO: 133424 - protein, 314 aa, Symbiobacterium thermophilum IAM 14863
MRKVVILGTGPAGLTAAIYTARANLQPLVIEGNEPGGQLTTTTEVENFPGFPDGIMGPELMDNMRRQAERFGAEFRRGYVTGVDFSRRPFRITVDETDVIEAEAVIIATGASAKHLGIPGEDENIGRGVSYCATCDGFFYRGKKVLVVGGGDSAMEEANFLTKFADVTVVHRRSELRASKIMQERARANPKISWVLNAVPVEVLADERGFKALKVRDKETGEERLLEADGMFVAIGHKPNTDFLRGQIDMDELGYIKTIPGTAQTNVPGVFACGDVQDSRYRQAITAAGSGCMAALDCERFLEEVAAQEGSLTK

SEQ ID NO: 133425 - DNA, 1380 bp, Synechococcus elongatus PCC 6301
  CDS (1)..(1380): transl_table=11
atgactggcgttgaaaacgtggtcattattggttcgggtccggcagggttgactgcggcaatctacgcagctcgcgctaatctcaagcccttgatgttcgagggctatcagctgggtggcttgcccggtggtcagttgatgacgacaaccgaggtggaaaactttccggggttcccagagggcatcaccggccctgagctgatggagcggatgcgggctcaagctgtgcgctggggtgcagaactctacaccgaagacgtgatcagcgccgacctcagtcagcgtccgtttcggattcgttcccaagagcgggaggtgctggcccacagcgtgatcatcgccacgggagcgacggcccggcgtctgtctctacccggcgaagaccgcctctggaacaacggcatttctgcctgcgcgatttgtgacggagctgcgccgatcttccgtgatggtgaactggtagtcattggcggtggcgatacggcggcggaagaagcggtctatctgaccaaatacgctaagcatgttcacttgttggtgcgcagcgatcgcatgcgagcgagtaaagcgatgcaagatcgcgtgctagcccatcccaacgtcaccgtccactggcataccgaagcgatcgaagcagtgggcaatacgctgctagaggcagtgcgcgttcgcaataatcaaactggtgaagaaaaagcgatcgcggcccaaggattgttctacgcgatcggtcacaccccgaatacaaaactgttcgaaggccaaattgagctggatggaaccggctacattcgcaccaagcctgattccgtagaaacctcgctggaaggcgtgtttgctgcgagcgatgtgcaggatcacgaatatcgccaagcaattacagccgcaggaacgggttgtgcggcagcactgctggcggaacgctacctgtcggctcataacttgctgcaggaatacaagcaggaagctgcagcggcagagccagagaccaaggctgcagcaacgcctgctgccagtcagccggaagcctctgaatttgaccctacgtcggtctaccacgaaggcagctatgccctgcgcaagctctaccatgagtccgatcgcctcttggcggtgctctacacggcgccaacctgtggcccttgccggacgctaaagccgatcctacgcaaagtggcggaagagttctccgatcgcctgcactacgtgctgatcgacattgatgctgatccggaaattgcccagtctgctggtgtggttgggacaccaaccctgcagctgttcaaagacaaggccaaagtcgatgagattcgcggcgtcaaaatgaagagcgattaccgcgctcgcttcgagcaacacctccagccggtaagtcgatag

SEQ ID NO: 133426 - protein, 459 aa, Synechococcus elongatus PCC 6301
MTGVENVVIIGSGPAGLTAAIYAARANLKPLMFEGYQLGGLPGGQLMTTTEVENFPGFPEGITGPELMERMRAQAVRWGAELYTEDVISADLSQRPFRIRSQEREVLAHSVIIATGATARRLSLPGEDRLWNNGISACAICDGAAPIFRDGELVVIGGGDTAAEEAVYLTKYAKHVHLLVRSDRMRASKAMQDRVLAHPNVTVHWHTEAIEAVGNTLLEAVRVRNNQTGEEKAIAAQGLFYAIGHTPNTKLFEGQIELDGTGYIRTKPDSVETSLEGVFAASDVQDHEYRQAITAAGTGCAAALLAERYLSAHNLLQEYKQEAAAAEPETKAAATPAASQPEASEFDPTSVYHEGSYALRKLYHESDRLLAVLYTAPTCGPCRTLKPILRKVAEEFSDRLHYVLIDIDADPEIAQSAGVVGTPTLQLFKDKAKVDEIRGVKMKSDYRARFEQHLQPVSR

SEQ ID NO: 133427 - DNA, 951 bp, Pseudomonas fluorescens Pf-5
  CDS (1)..(951): transl_table=11
atgaacgatgcgaagcattcacgcctgatcattctgggctctggccctgccggttacagcgctgccgtctatgccgctcgggccaacctcaaaccgacggtgatcaccggtttgcaagccggcggccaactgaccaccaccaccgaagtcgacaactggcccggcgatgtcgaaggcttgaccggcccggtgctgatggagcggatgcagagacacgccgaacgcttcgacaccgagatcgtctatgaccacatccacaccgcacagttgcagcagcggccgtttatcctcatcggcgacagcggcacctacagttgcgacgcgctgatcatcgccaccggcgcctcggcgcaatacctgggcctgccctccgaagaagcctttgccggcaagggggtttccgcctgcgccacctgcgatggcttcttctaccgcaatcaggtggtggccgtggtgggcggcggcaacaccgccgtggaggaagcactgtacctgtcgaacatcgccaaagaagtgcacctggtgcatcgccgcgacaagctgcgggccgagaagattctccaggacaagctgttcgacaaggccgccaatggcaatatccgcctgcactggaaccagcacctggaggaagtgctgggcgatgccagcggcgtgaccggcgcccgcctcaaggacagccacagcggagaaaccaaggatctgccactggccggggtgtttatcgccatcggccacaagcccaataccgatctgttccagggccagctggagatgcgcgacggctacctgctggtgcgtggcggcagcgaaggcaatgccacggccaccggcatccagggcgtatttgccgccggcgacgtggccgaccacgtctatcgccaggccatcacttcggccggcgccggctgcatggcagcgctggatgcggaaaaattcctcgacgacaactaa

SEQ ID NO: 133428 - protein, 316 aa, Pseudomonas fluorescens Pf-5
MNDAKHSRLIILGSGPAGYSAAVYAARANLKPTVITGLQAGGQLTTTTEVDNWPGDVEGLTGPVLMERMQRHAERFDTEIVYDHIHTAQLQQRPFILIGDSGTYSCDALIIATGASAQYLGLPSEEAFAGKGVSACATCDGFFYRNQVVAVVGGGNTAVEEALYLSNIAKEVHLVHRRDKLRAEKILQDKLFDKAANGNIRLHWNQHLEEVLGDASGVTGARLKDSHSGETKDLPLAGVFIAIGHKPNTDLFQGQLEMRDGYLLVRGGSEGNATATGIQGVFAAGDVADHVYRQAITSAGAGCMAALDAEKFLDDN

SEQ ID NO: 133429 - DNA, 948 bp, Colwellia psychrerythraea 34H
  CDS (1)..(948): transl_table=11
atgagcgacgtaagacactgtcccctactaattttaggctcaggccctgctggttatactgctgcagtttatgctgcccgcgccaacttaaaaccagtaatgatcacaggtatgcaacaaggtggtcaattaaccactacaactgatgtcgaaaactggccaggcgatgcagatgaccttactggtccagcattaatggagcgtatgcagaaacacgctgaaaaatttgatactgaaattattttcgatcatatcgaatcagtagatttttcttctaagccttataaattaactggcagcagtgaatacacctgtgatgcactaattatttgtaccggtgcttcagcacaataccttggtttaccttcagaagaagcctttatgggacgtggtgtttcagcttgtgctacttgtgatggtttcttttacaaaaaccaaaaagttgccgttgttggtggtggtaatactgctgttgaagaagcactttatttatcaaacattgcgagtgaagttcatttaattcaccgtcgtgatactttccgtagtgaaaagattttaactgatcgcctatatgagaaagttgctaacggtaatatcgttttacacactgatcgtacgttagacgaagttttgggcgataacatgggtgttactggcctacgtttaaaagaaatgggttcagatgccactgaagaacttgaagtatcaggtgtatttattgccattggtcataagccaaatactgatatatttaaagaccaacttgatatgaaagacggttacttaaccattcaaagtggcacgcaaggtaacgcaacacaaaccagtgttgaaggtgtttttgccgcgggtgatgttgctgaccatatttatcgtcaagcaattacttctgctggtgctggttgtatggctgcattagattcagagcgttacttagacgccttataa

SEQ ID NO: 133430 - protein, 315 aa, Colwellia psychrerythraea 34H
MSDVRHCPLLILGSGPAGYTAAVYAARANLKPVMITGMQQGGQLTTTTDVENWPGDADDLTGPALMERMQKHAEKFDTEIIFDHIESVDFSSKPYKLTGSSEYTCDALIICTGASAQYLGLPSEEAFMGRGVSACATCDGFFYKNQKVAVVGGGNTAVEEALYLSNIASEVHLIHRRDTFRSEKILTDRLYEKVANGNIVLHTDRTLDEVLGDNMGVTGLRLKEMGSDATEELEVSGVFIAIGHKPNTDIFKDQLDMKDGYLTIQSGTQGNATQTSVEGVFAAGDVADHIYRQAITSAGAGCMAALDSERYLDAL

SEQ ID NO: 133431 - DNA, 963 bp, Pseudomonas syringae pv. phaseolicola 1448A
  CDS (1)..(963): transl_table=11
atgtcagacgtacgtcattcccgagtgatcattctcggttccggccctgccggttatagcgctgcggtctacgccgctcgcgccaacctcaagcctctgctgatcaccggcatgcaggctggcggccaattgaccacgactacagaagttgataactggcctggcgacccgcacggtctgaccggtccggcgctgatggagcgtatgcgtgagcatgccgagcgtttcgagactgaaatcgtcttcgaccacatcaactccgttgatctggccggcaagccgttcagccttcagggcgatagcgcaacctacacctgcgatgcactgatcatcgccaccggtgccagcgcccgttacctgggcctgccttcggaagaagcgttcatgggcaagggggtttctgcctgcgccacatgcgatggcttcttctaccgcaaccgtgaagtcgcggtagtcggtggcggtaacacggcggtggaagaagcgctgtatctggccaacatcgccagcaaggtgactctggttcaccgtcgcgaaacctttcgcgccgagaagatcctgatcgacaagctgcacgcacgtgtcgccgaaggcaagatcgagctcaagctcaatgccacgctggacgaggtattgggtgacaacatgggcgtgaccggtgcgcgtctgaagaacaatgacgggaccagtgacgagctgaaagtcgacggcgtattcatcgccatcggccacacgccgaacacctcgctgttcgaagggcaactggctttgaaagatggctacatggttgtgcacggtggccgtgaaggcaatgcgactgctaccagcgttgaaggtgtattcgcggccggtgatgtggctgaccacgtataccgtcaggccatcacctcggctggtgcaggctgtatggcggcactggacgtcgagcgttatctggacggtctggcaaacgccacgttctga

SEQ ID NO: 133432 - protein, 320 aa, Pseudomonas syringae pv. phaseolicola 1448A
MSDVRHSRVIILGSGPAGYSAAVYAARANLKPLLITGMQAGGQLTTTTEVDNWPGDPHGLTGPALMERMREHAERFETEIVFDHINSVDLAGKPFSLQGDSATYTCDALIIATGASARYLGLPSEEAFMGKGVSACATCDGFFYRNREVAVVGGGNTAVEEALYLANIASKVTLVHRRETFRAEKILIDKLHARVAEGKIELKLNATLDEVLGDNMGVTGARLKNNDGTSDELKVDGVFIAIGHTPNTSLFEGQLALKDGYMVVHGGREGNATATSVEGVFAAGDVADHVYRQAITSAGAGCMAALDVERYLDGLANATF

SEQ ID NO: 133433 - DNA, 933 bp, Thermobifida fusca YX
  CDS (1)..(933): transl_table=11
gtgagtgacgtccgtaatgtgatcatcatcggctccgggcctgcggggtacaccgcggccatctatgcggcccgtgccgaactgaagcctctggtctttgaaggcgccatcaccgcgggtggcgctctcatgaacaccaccgaggtggagaacttccccggttttccggacgggatcatgggccccgagctcatggacaacatgcgtaagcaggctgagcggttcggagccgagctcgttccggaagacgtcaccgaggtggacctcaccgccaacccgaaagtggtcaaggccggcgaccagaccttctacgctcgcgcggtgatcgtcgcgaccggctccggctaccgcaagctcggcgttccaggtgaagaggagttctctggccgcggtacctcctggtgcgctacctgcgacggattcttcttccgcgaccaggacattgccgtggtcggcggcggcgacagcgccatggaggaagcaatcttcctcacccggtttgcccgctcggtgacggtgatccaccgccgtgaccagttgcgcgccagcaagatcatgcaggagcgcgccttcgccaacgagaagatctcgttcctctggaacaccgaagtcgttgagatcctcggcgacacccgcgtccacgcggttcgactgcgcaaccgggtgacgggtgaggagagcaccctcaacatcagcggactgttcatcgcgatcggtcacgacccccgcgtggagctcttcaagggccaactcgaactcgacgaacagggctacctgaaggtcgactcgcccaccacccataccaacatccccggtgtgttcgcctgcggcgacgtggtcgaccaccgttaccgtcaagctattaccgcggcgggaagcggatgtgctgcggccttggacgcggaacgctacctgaccgaagaggccggataa

SEQ ID NO: 133434 - protein, 310 aa, Thermobifida fusca YX
MSDVRNVIIIGSGPAGYTAAIYAARAELKPLVFEGAITAGGALMNTTEVENFPGFPDGIMGPELMDNMRKQAERFGAELVPEDVTEVDLTANPKVVKAGDQTFYARAVIVATGSGYRKLGVPGEEEFSGRGTSWCATCDGFFFRDQDIAVVGGGDSAMEEAIFLTRFARSVTVIHRRDQLRASKIMQERAFANEKISFLWNTEVVEILGDTRVHAVRLRNRVTGEESTLNISGLFIAIGHDPRVELFKGQLELDEQGYLKVDSPTTHTNIPGVFACGDVVDHRYRQAITAAGSGCAAALDAERYLTEEAG

SEQ ID NO: 133435 - DNA, 1377 bp, Prochlorococcus marinus str. NATL2A
  CDS (1)..(1377): transl_table=11
atgccagccgagaacaaagaattaaaaactgaaaatttagtaattataggttcaggacccgctggatataccgctgctatctatgcggcaagagcaaatctacaaccgcttattattactgggtttgaaaaagggggaattccaggtggtcaattaatgacaacaacatttgtagagaatttcccaggttttccaaatggagttcaaggtccagaattgatggatttaataaaagcacaagctgtgagatggggaacaaatctaattgaagaagatgccatatcaattgatctaagcaaaagacccttttctattgttactactacccaaaaaatcaaaacaaactccttaattatttccaccggagcaagcgccaatcgtctaggccttaaaaatgagaaattattttggagtaagggtattagtgcctgtgcaatttgcgatggagcaacacctcaatttagagatgaggaacttgccgtagttggaggaggggactcggcttgtgaagaagccgaatatctaacaaaatatggaagccatgtacatttgttagtcagatcaaggaaacttagggcttcagctgcaatggccgatcgagtagaagcaaatcccaacattacgattcattgggagacagagcttttagatgttttgggtaatgattggctagagaaattaaaagttaaaagaagagacactaaccaagaagaagaaattttagctaagggacttttttatgcaattggacatactcccaacacgtctttatttacaaatcagttaagtacagactcaaaaggttacttactaacacaacctggaagacctgaaacctcattagaaggcgtctatgccgctggagatgttgctgattcggaatggcgtcaaggtgttactgcggcaggcagcggttgcaaagcagctttagctgctgaaagatggctcacaaaaaacaacttagcaacacttataaaaagggttgaattagagccctcaaaggctgatacaacaaaaattttagaagttagtaacgaggcaaatttcgaccccgagaagacatggcaaaagggaagttatgcactaagaaagttatatcatgagacagaaaaacctctcttcgtagtttacacatccagtagctgtggcccttgtcacattctcaagccccaacttcatagagttcttaacgagtcaaaagggaaagctataggtgttgaaattgatattgaaaacgaccaagatattgccaagcaagctgaagtaagcggtactccaacagtacatctttttaaaaataaggaattaaaaaaacaatggaaaggtgttaaaacaagaagtgaatataaagccgcattggatgaactaattaattag

SEQ ID NO: 133436 - protein, 458 aa, Prochlorococcus marinus str. NATL2A
MPAENKELKTENLVIIGSGPAGYTAAIYAARANLQPLIITGFEKGGIPGGQLMTTTFVENFPGFPNGVQGPELMDLIKAQAVRWGTNLIEEDAISIDLSKRPFSIVTTTQKIKTNSLIISTGASANRLGLKNEKLFWSKGISACAICDGATPQFRDEELAVVGGGDSACEEAEYLTKYGSHVHLLVRSRKLRASAAMADRVEANPNITIHWETELLDVLGNDWLEKLKVKRRDTNQEEEILAKGLFYAIGHTPNTSLFTNQLSTDSKGYLLTQPGRPETSLEGVYAAGDVADSEWRQGVTAAGSGCKAALAAERWLTKNNLATLIKRVELEPSKADTTKILEVSNEANFDPEKTWQKGSYALRKLYHETEKPLFVVYTSSSCGPCHILKPQLHRVLNESKGKAIGVEIDIENDQDIAKQAEVSGTPTVHLFKNKELKKQWKGVKTRSEYKAALDELIN

SEQ ID NO: 133437 - DNA, 1371 bp, Anabaena variabilis ATCC 29413
  CDS (1)..(1371): transl_table=11
atgtctaacccaactgtagaaaacttagtcattattggttctgggccagcagggtacacggctgctatctatgcggcgagagctaacctaaaacccgttgtatttgaaggttttcaagctgggggtttgcctggtgggcaacttatgacaacgactgaggtagaaaactttccagggtttccccaagggattaccgggccggatttaatggataggatgaaggctcaagcagaacgctggggggctgagttatatactgaagatgttatatcagttgacttgagccaacgtccatttactgtgcgctcagaggaaagagaatttaaagcacacagtattattattgccactggtgcgacggcaaaacgtttaggtttacctagcgagcatcaattctggagtcgggggatttcggcttgtgcaatttgtgatggtgcaaccccaattttccacggtgcagagttagctgtgattggtgctggtgactcggcggcggaagagtccatatatctcaccaagtacggctcgaaggttaatttgttggtgcgttctgaaaagatgcgggcttctaaagctatgcaagaccgcgttttgagtaaccccaaaatccaagtgcattggaacacagaagttgtggatgtgtttggtaatggtcacatggatggggtgaaagtccgcaataataagactggggaagaaaccacagtacacgccaggggtttgttctacgctattggtcacaagcccaacacttccttatttcagggacaactagaactagatgaaattggttatgttgttaccaaacatggttcgccagaaactagtgtagagggtgtgttcgcggcgggtgacgtacaagaccatgagtatcgtcaagcaattacggcggctggtagtggctgcgcggcggcgctgttagcggaacgttggttgtctgcgaatgcgttgattcaagagttccatcaagaaccaacaatcaataatgagttagaaactcagccagtagcgcagaaaacagaagcggaacaagaggcgggatttgctttgagcgcaactcgccatgctggtggctatgctttacgaaaattatttcatgaaagcgatcgcctactcattgtcaaatacgtctcccctggctgtggcccttgccatactctcaagccaatcttaaataaagtagtcgatgaatttgacggcaaaatccactttgtggaaatcgacattgaccaagaccgggatattgcggaaaatgctggggtaaccggcacaccaactgttcagttctttaaggataaagaactggtgaaagaagttaagggtgttaagcaaaaaagtgagtatcgtcagttgattgaagctaatctctag

SEQ ID NO: 133438 - protein, 456 aa, Anabaena variabilis ATCC 29413
MSNPTVENLVIIGSGPAGYTAAIYAARANLKPVVFEGFQAGGLPGGQLMTTTEVENFPGFPQGITGPDLMDRMKAQAERWGAELYTEDVISVDLSQRPFTVRSEEREFKAHSIIIATGATAKRLGLPSEHQFWSRGISACAICDGATPIFHGAELAVIGAGDSAAEESIYLTKYGSKVNLLVRSEKMRASKAMQDRVLSNPKIQVHWNTEVVDVFGNGHMDGVKVRNNKTGEETTVHARGLFYAIGHKPNTSLFQGQLELDEIGYVVTKHGSPETSVEGVFAAGDVQDHEYRQAITAAGSGCAAALLAERWLSANALIQEFHQEPTINNELETQPVAQKTEAEQEAGFALSATRHAGGYALRKLFHESDRLLIVKYVSPGCGPCHTLKPILNKVVDEFDGKIHFVEIDIDQDRDIAENAGVTGTPTVQFFKDKELVKEVKGVKQKSEYRQLIEANL

SEQ ID NO: 133439 - DNA, 1281 bp, Carboxydothermus hydrogenoformans Z-2901
  CDS (1)..(1281): transl_table=11
atgagcgacaaagttatatatttaagccaagaacagtttgacgaagtggtattaaaaagcgatgttccggtaattgtggatttttattccgaagattgtccaccctgcgaggcactggctccggcttacgagaagcttgcccagcagtacggggataaatttaagtttgtcaaaatctaccggcagcaaaaccgacctttagccgaaaagctgggagttaagggtagccccacagttctgttttatgtcaacgggcaagaagtgggccagaggttaaccggctatatttccaagcgtcagctaagggaagccatggaaaaagcttttggccagaaacttttgccggaagttccggaaacggttaagtatgatgttattgttcttggtggcggtccggcaggtttaagtgcggctctgtataccgcccgggccaagttaagaaccattgtggtggatgaaagtgttcccggtggccaggcggctaccacctaccatattgctaactaccccggtacccccggaacgattagaggtaaggaactaactcaaaatatgcttaatcaggccttagcttttggtgcagaagttgatgatttaaaagaagtattaaaagttgaattaaccggagaggttaagagggttatcaccgaagataagatttatgaagctccggccatcattttagccaccggagcagaaccaagaaaacttccggcggaaggggaagaccttttccggggccgcggcgtccactactgtgctacctgtgatggggcaatgtaccagggcatgaaagtagtggtggttggcggtggcaactcagccgtagaagaagcggtatttttgacccgttttgccaccgaagttacgattattcaccagtttgaccacttccaggcttccaaagttgcccaggaagaagcttttgccaatcccaaaataaaggttatctgggattcggaagtacgtaaggttgttggggataaacatgtaaccggcgttgtgattgaaaatctgaaaaccaaagaactttctaccgtgcctaccgatggggtgtttgtttacattggaactcagcctaaaaccaatttgtttgccggacaggtagagatgaacgaatggggttatattattaccgatgaagaaatgcggaccaatataccgggagtttttgcggcgggagatttaaggcagaagtcagtacggcaggcggtaaccgctgcggccgatggggtaattgcggcagtaaatgtggagagatatcttgccagtaaaaagtaa

SEQ ID NO: 133440 - protein, 426 aa, Carboxydothermus hydrogenoformans Z-2901
MSDKVIYLSQEQFDEVVLKSDVPVIVDFYSEDCPPCEALAPAYEKLAQQYGDKFKFVKIYRQQNRPLAEKLGVKGSPTVLFYVNGQEVGQRLTGYISKRQLREAMEKAFGQKLLPEVPETVKYDVIVLGGGPAGLSAALYTARAKLRTIVVDESVPGGQAATTYHIANYPGTPGTIRGKELTQNMLNQALAFGAEVDDLKEVLKVELTGEVKRVITEDKIYEAPAIILATGAEPRKLPAEGEDLFRGRGVHYCATCDGAMYQGMKVVVVGGGNSAVEEAVFLTRFATEVTIIHQFDHFQASKVAQEEAFANPKIKVIWDSEVRKVVGDKHVTGVVIENLKTKELSTVPTDGVFVYIGTQPKTNLFAGQVEMNEWGYIITDEEMRTNIPGVFAAGDLRQKSVRQAVTAAADGVIAAVNVERYLASKK

SEQ ID NO: 133441 - DNA, 1383 bp, Synechococcus sp. CC9605
  CDS (1)..(1383): transl_table=11
gtgggtaaagccggtacggatcacatcgaaaatctggtcatcgttgggtcagggccagccgggtacacagccgccatctacgccgcacgggccaacctgcaaccgcttctagtcactgggttccaacgcggtggcattcccggtggccagctgatgaccaccacccatgtggagaattttcctggcttcccggacggtgtgctcgggcccgacctgatggatctgatgaagtctcaggcggtgcggtggggcactcacctgcttgaagcggatgccgacagcattgatctgagctccaagccttatcgcgttgaggtggaaggacagatcgtccgcacccacgccctggtgattgccacgggcgccagtgctaatcgcctccaattgccctcggagcaaaccttctggagcaaaggcatcagcgcctgcgcgatctgtgacggcgccacaccgcagttccgcaacgaggaactcgccgtggtgggcggcggcgactccgcctgcgaggaagccgtgtacctcaccaagtacggaagccacgtgcatctggtggtgcgctccgacaaactccgcgccagtgccgccatggctgatcgggtgttggccaacgacttaatcacggtgcactggaacagcgagatcgacgacgtgagcggggacgactggatgcagtcgatgaccctgcgcaatcgcattgagggcagttcatccaccatcgccgttaaagggctcttctatgccatcggccacacccccaacaccgatctgcttcaggggcaaatcgatctgaacgagaagggctacctgacaacgcaaccgggacgaccggaaacgtccatggaaggcgtcttcgcagccggcgatgtggccgatgccgaatggagacagggcatcaccgcagctggcaacggctgcaaggcggccttggcagcggagcgctggctgagtcaccacaacctggccacccgggtgcagcgtgagcaggtggagccggcagtggcggaacgtcctgtgaatgtggatgtcaccacggaagccacctacgacccccaggggctttggcagaaaggaagctttgccctgcgcaagctctatcacgacagcgccaagcctctgctggtgatttacacctcacccacctgcggcccttgccacgtgctgaagccccagctgcagcgggtgattcaagagcttggtggatcagcccaggccgttgtcatcgacatcgaggccgatcaagagatcgccgaacaggccggtgtgaacggaacacccacggtgcagctgttccacaacaaagccatggtgaagcagtggcgcggcgtgaagcagcgcagtgaattcaaagctgcgattgaaggttgccttcaggctgcagcctga

SEQ ID NO: 133442 - protein, 460 aa, Synechococcus sp. CC9605
MGKAGTDHIENLVIVGSGPAGYTAAIYAARANLQPLLVTGFQRGGIPGGQLMTTTHVENFPGFPDGVLGPDLMDLMKSQAVRWGTHLLEADADSIDLSSKPYRVEVEGQIVRTHALVIATGASANRLQLPSEQTFWSKGISACAICDGATPQFRNEELAVVGGGDSACEEAVYLTKYGSHVHLVVRSDKLRASAAMADRVLANDLITVHWNSEIDDVSGDDWMQSMTLRNRIEGSSSTIAVKGLFYAIGHTPNTDLLQGQIDLNEKGYLTTQPGRPETSMEGVFAAGDVADAEWRQGITAAGNGCKAALAAERWLSHHNLATRVQREQVEPAVAERPVNVDVTTEATYDPQGLWQKGSFALRKLYHDSAKPLLVIYTSPTCGPCHVLKPQLQRVIQELGGSAQAVVIDIEADQEIAEQAGVNGTPTVQLFHNKAMVKQWRGVKQRSEFKAAIEGCLQAAA

SEQ ID NO: 133443 - DNA, 1377 bp, Prochlorococcus marinus str. MIT 9312
  CDS (1)..(1377): transl_table=11
atggaaaataaagagaaaaattcaaacttagaaaatgttgtaattataggctcaggacctgcaggttatacagctgcgatatatgcagcaagagcaaatcttcaacctttgcttgtaacaggatttaattccggtggaattcctggaggtcaattaatgactacaacatttgttgaaaattatccaggtttcccggatggagtactaggtcctgaactgatggacctaatgaaggctcaagctgaaagatggggtacaaatttatacgaaagtgatgtcgtttcgattaatactgatttgcatccctttgaattaaaaactttagatggaactataaaagcgaattcaattattattgcaactggggcaagtgcaaatagattgggagtcataaatgaagataaattctggagtaaaggaataagtgcttgtgcaatttgtgatggagcaaccccacaatttagggatgaagaattagctgtcataggaggcggagactctgcatgcgaagaagcagcataccttacaaaatacggtagcaaggttcatttgattgttagatcagagaaattaagagctagtgcagcaatggttgacagagtaaaagctaatccaaaaatacatatccactgggaaacaaaagtagagaaagctaatggttctgaatggcttgagaaaatagaaactatccattctcaagaaggtaaaggggaaatcaatattaaaggtcttttttacgcaataggacatacgcctaatacaaagttcttagacaaaaaaattgatttagataataaaggatatattgcttgcaaaccaggacggccagagacatcagtcgaaggcattttcgcagcaggtgatgttgttgattcagaatggagacaaggagttactgctgcaggaacaggatgcatggctgcattagcgactgaaaggtggctagccgagaaaaacttagcaaaaacaataattagagaaacacccgaaccagataagaaacttaattcatcagattttaatgaagacgaagttaatgaagataccttcgattcaaattctgaatggcaaaaagggagttatgcattgaggaaactttatcacgagagtaaaaaacctctcttagtgatttttagttccccaagctgcggcccatgtcatgtcttaaaacctcaattaaaaaggataattaaagaattaaatggtgcagtgctcggcgttgaaatagatattgataaagatcaagatattgcaaaacaagcaggcattaacggtacaccaacagttcaactttttaaagacaaattattaaaaaaacaatggcaaggtgttaaacaaagaagtgaatttaaagaagctataaaaaatattatataa

SEQ ID NO: 133444 - protein, 458 aa, Prochlorococcus marinus str. MIT 9312
MENKEKNSNLENVVIIGSGPAGYTAAIYAARANLQPLLVTGFNSGGIPGGQLMTTTFVENYPGFPDGVLGPELMDLMKAQAERWGTNLYESDVVSINTDLHPFELKTLDGTIKANSIIIATGASANRLGVINEDKFWSKGISACAICDGATPQFRDEELAVIGGGDSACEEAAYLTKYGSKVHLIVRSEKLRASAAMVDRVKANPKIHIHWETKVEKANGSEWLEKIETIHSQEGKGEINIKGLFYAIGHTPNTKFLDKKIDLDNKGYIACKPGRPETSVEGIFAAGDVVDSEWRQGVTAAGTGCMAALATERWLAEKNLAKTIIRETPEPDKKLNSSDFNEDEVNEDTFDSNSEWQKGSYALRKLYHESKKPLLVIFSSPSCGPCHVLKPQLKRIIKELNGAVLGVEIDIDKDQDIAKQAGINGTPTVQLFKDKLLKKQWQGVKQRSEFKEAIKNII

SEQ ID NO: 133445 - DNA, 1380 bp, Synechococcus elongatus PCC 7942
  CDS (1)..(1380): transl_table=11
atgactggcgttgaaaacgtggtcattattggttcgggtccggcagggttgactgcggcaatctacgcagctcgcgctaatctcaagcccttgatgttcgagggctatcagctgggtggcttgcccggtggtcagttgatgacgacaaccgaggtggaaaactttccggggttcccagagggcatcaccggccctgagctgatggagcggatgcgggctcaagctgtgcgctggggtgcagaactctacaccgaagacgtgatcagcgccgacctcagtcagcgtccgtttcggattcgttcccaagagcgggaggtgctggcccacagcgtgatcatcgccacgggagcgacggcccggcgtctgtctctacccggcgaagaccgcctctggaacaacggcatttctgcctgcgcgatttgtgacggagctgcgccgatcttccgtgatggtgaactggtagtcattggcggtggcgatacggcggcggaagaagcggtctatctgaccaaatacgctaagcatgttcacttgttggtgcgcagcgatcgcatgcgagcgagtaaagcgatgcaagatcgcgtgctagcccatcccaacgtcaccgtccactggcataccgaagcgatcgaagcagtgggcaatacgctgctagaggcagtgcgcgttcgcaataatcaaactggtgaagaaaaagcgatcgcggcccaaggattgttctacgcgatcggtcacaccccgaatacaaaactgttcgaaggccaaattgagctggatggaaccggctacattcgcaccaagcctgattccgtagaaacctcgctggaaggcgtgtttgctgcgggcgatgtgcaggatcacgaatatcgccaagcaattacagccgcaggaacgggttgtgcggcagcactgctggcggaacgctacctgtcggctcataacttgctgcaggaatacaagcaggaagctgcagcggcagagccagagaccaaggctgcagcaacgcctgctgccagtcagccggaagcctctgaatttgaccctacgtcggtctaccacgaaggcagctatgccctgcgcaagctctaccatgagtccgatcgcctcttggcggtgctctacacggcgccaacctgtggcccttgccggacgctaaagccgatcctacgcaaagtggcggaagagttctccgatcgcctgcactacgtgctgatcgacattgatgctgatccggaaattgcccagtctgctggtgtggttgggacaccaaccctgcagctgttcaaagacaaggccaaagtcgatgagattcgcggcgtcaaaatgaagagcgattaccgcgctcgcttcgagcaacacctccagccggtaagtcgatag

SEQ ID NO: 133446 - protein, 459 aa, Synechococcus elongatus PCC 7942
MTGVENVVIIGSGPAGLTAAIYAARANLKPLMFEGYQLGGLPGGQLMTTTEVENFPGFPEGITGPELMERMRAQAVRWGAELYTEDVISADLSQRPFRIRSQEREVLAHSVIIATGATARRLSLPGEDRLWNNGISACAICDGAAPIFRDGELVVIGGGDTAAEEAVYLTKYAKHVHLLVRSDRMRASKAMQDRVLAHPNVTVHWHTEAIEAVGNTLLEAVRVRNNQTGEEKAIAAQGLFYAIGHTPNTKLFEGQIELDGTGYIRTKPDSVETSLEGVFAAGDVQDHEYRQAITAAGTGCAAALLAERYLSAHNLLQEYKQEAAAAEPETKAAATPAASQPEASEFDPTSVYHEGSYALRKLYHESDRLLAVLYTAPTCGPCRTLKPILRKVAEEFSDRLHYVLIDIDADPEIAQSAGVVGTPTLQLFKDKAKVDEIRGVKMKSDYRARFEQHLQPVSR

SEQ ID NO: 133447 - DNA, 1047 bp, Frankia sp. CcI3
  CDS (1)..(1047): transl_table=11
gtgacagcccaggaggacggccaggatgtcaccggccgcagcagccagcccgacggcgatgacgacatacgcgatgtcgtcatcgtcggttcgggcccggcagggtacacggccgctgtctacaccgcccgggccaacctacggccactcgtgttcgagggcgcggtatcggccggcggagcgctcatgaacaccaccgaggtggagaactttcctgggtttccggacggcatccagggtccggagctgatggagaacctgcgacggcaggcggagcggttcggagccgagctggtggccgacgacgtgaccgagctcgacctcgcggcgaacccaaaggtcgtcaagatcgaggacaggacctacctcgcccgcacgatcatcgtcgccaccggttcggcctaccgcatgctcggcgtcgagcacgaggagcggttgctcggccgcggggtctccgcctgtgcgacctgcgacggcttcttcttccgggatcaggacatcgcggtggttggcgggggcgactcggcgatggaggaggcgaccttcctgacccgcttcgcccgctcggtgacggtgatccaccggcgggacaaactccgggccagcgcgatcatgcaggagcgggccttcgccaacgagaagatccggttccggtggaacgccgaggtcaccgagctcctgggcgcggacaagctcaccggcgtccggctgcgcgacaccgtcaccggtgaagcgaaggatcttccggtcaccggactgttcgtcgctatcggtcaccttccgcgtaccgaactcgtccgtggtcagctcgacctcgacgacgccggctacatctcggtcgcgcacccgaccacgaagacgaacctggacggggtcttcgcctgtggcgacgtggtcgaccacacctaccgccaggccatcaccgcagccggcacgggctgcgccgccgcgctcgacgcggagcgcttcatcgccgccggggagggtccgggcgaggtgaccaccgtggctccccgggtcgtgaccccgacgccgcaacccgcctga

SEQ ID NO: 133448 - protein, 348 aa, Frankia sp. CcI3
MTAQEDGQDVTGRSSQPDGDDDIRDVVIVGSGPAGYTAAVYTARANLRPLVFEGAVSAGGALMNTTEVENFPGFPDGIQGPELMENLRRQAERFGAELVADDVTELDLAANPKVVKIEDRTYLARTIIVATGSAYRMLGVEHEERLLGRGVSACATCDGFFFRDQDIAVVGGGDSAMEEATFLTRFARSVTVIHRRDKLRASAIMQERAFANEKIRFRWNAEVTELLGADKLTGVRLRDTVTGEAKDLPVTGLFVAIGHLPRTELVRGQLDLDDAGYISVAHPTTKTNLDGVFACGDVVDHTYRQAITAAGTGCAAALDAERFIAAGEGPGEVTTVAPRVVTPTPQPA

SEQ ID NO: 133449 - DNA, 963 bp, Myxococcus xanthus DK 1622
  CDS (1)..(963): transl_table=11
gtggcggaggagaagatcaacaaggtgaccatcatcggctcggggcccgcgggctacaccgcggccatctacgccgcgcgcgccaacctgcagccggtggtgttcgccgggggccccaccctggagcacccgcagcgggtgccgggcggccagctcatggtgaccaccgacgtggagaactacccgggctttccggaggccatcaccggcccggagctgatggatcgcttccagaagcaggcagagcgtttcggcaccaccatccacatggagaacgtggtgaaggtggacttctcccagcgccccttcctcatccagggggagagcgtcagctgccgctcggagacggtcatcatctccaccggcgctaccgccaagtggctgggcgtcaagggcgaggacacctacaagaaccgcggcgtctccgcgtgcgccacctgcgacggtgccttcttcaagaagcaggacgtgctggtggtgggcggcggtgacacggcgatggaggaggcgacgtacctggcgaaaatcgtcaaccacgtcaccctcatccaccgccgcgacacgctgcgcgcctccaaggtgatgcaggagcgcgcccgccagaatccgaaaatctccttcatgtgggactccgcggtggaggaggtcctcggcgacgcgaaggggatgaatggcgcggtggtgcgcaacctgaagacgggtgacagccagcaggtgaaggcgaccggcctgttcgtggccattggccacacgcccaacacggagctgttccagggcgtgctggagacgcaccagggcggctacctcaagacggtgccgggctccacgcgcaccaacatcgagggcgtgttcgcctgcggtgacgtgcaggaccactactaccgccaggccatcaccgcggcgggcacgggctgcatggccgccatcgacgcggagcgctggctcatcgagcacggcgagtag

SEQ ID NO: 133450 - protein, 320 aa, Myxococcus xanthus DK 1622
MAEEKINKVTIIGSGPAGYTAAIYAARANLQPVVFAGGPTLEHPQRVPGGQLMVTTDVENYPGFPEAITGPELMDRFQKQAERFGTTIHMENVVKVDFSQRPFLIQGESVSCRSETVIISTGATAKWLGVKGEDTYKNRGVSACATCDGAFFKKQDVLVVGGGDTAMEEATYLAKIVNHVTLIHRRDTLRASKVMQERARQNPKISFMWDSAVEEVLGDAKGMNGAVVRNLKTGDSQQVKATGLFVAIGHTPNTELFQGVLETHQGGYLKTVPGSTRTNIEGVFACGDVQDHYYRQAITAAGTGCMAAIDAERWLIEHGE

SEQ ID NO: 133451 - DNA, 1002 bp, Mycobacterium sp. MCS
  CDS (1)..(1002): transl_table=11
gtgccggtgcgaaacggcagaaaggctcacatgaccagctcatcgacggttcacgatgtgatcatcatcggctccggcccggccggatacacggccgccgtgtacgccgcgcgcgcacagctcaagccgctcgtattcgagggcagccagttcggcggcgcgctcatgaccacgaccgaggtggagaactaccccggcttccgcaacggcatcaccggacccgaactgatggacgagatgcgcgagcaggcgctgcgcttcggcgccgacctgcggatggaggacgtcgacgaggtctccctcgacggccccgtcaagacggtcaccgtgggcgacgagacccatcgggcccgggcggtcatcctcgcgatgggtgccgccgcacgccacctcggcgtccccggcgaggacgcgctgctcggcatgggcgtgagcacctgcgcgacctgcgacggcttcttcttccgcgatcaggacatcgcggtcatcggcggcggcgactcggcgatggaggaggcgacgttcctcacccgcttcgcgcgcagcgtgacggtgatccaccgccgcgaggagttccgcgcctcgcgcatcatgctcgaccgcgcccgcgccaacgagaagatcacgttcatgaccaacaccgcggtcaccgagatcgagggcgatcccaaggtgaccggaatccgcttgcgcgacaccgtgaccggtgaggagtcgaagctcgcggtgaccggtgtgttcgtcgcgatcgggcacgtgccgcgctcggacatcgtgcgtggtcaggtcgacgtcgacgaggacggctacgtcctggtcgagggtcgcaccaccaacacctccgtcgaaggtgtctttgccgcaggcgatctcgtggaccgcacctaccggcaggcgatcaccgccgcgggcagcggttgttcggccgccatcgacgccgagcgctggctggccgaaatcggcgtcgcaccaagcgatcaagagatctcggccccgatctga

SEQ ID NO: 133452 - protein, 333 aa, Mycobacterium sp. MCS
MPVRNGRKAHMTSSSTVHDVIIIGSGPAGYTAAVYAARAQLKPLVFEGSQFGGALMTTTEVENYPGFRNGITGPELMDEMREQALRFGADLRMEDVDEVSLDGPVKTVTVGDETHRARAVILAMGAAARHLGVPGEDALLGMGVSTCATCDGFFFRDQDIAVIGGGDSAMEEATFLTRFARSVTVIHRREEFRASRIMLDRARANEKITFMTNTAVTEIEGDPKVTGIRLRDTVTGEESKLAVTGVFVAIGHVPRSDIVRGQVDVDEDGYVLVEGRTTNTSVEGVFAAGDLVDRTYRQAITAAGSGCSAAIDAERWLAEIGVAPSDQEISAPI

SEQ ID NO: 133453 - DNA, 999 bp, Rubrobacter xylanophilus DSM 9941
  CDS (1)..(999): transl_table=11
atgtccgagcagtacgacgtggtggtggtaggctccgggcccgcgggctacaccgcggcgctctacgccgcccgggccaacctgaggacgctggtcttccaggggttcgaggcgggggggcagctcatgctcaccaccgacgtggagaactacccgggctaccccgagggggtgaccggtcccgagatgatggaggacttcgagcggcaggccgcccgcttcggggccgagatgcgcccggacaacgtggacagggtggacttctccgggcggcccttcaggctgtgggccgaggggcaggaggagccggtgctcgcccgggcggtcatcgtggccacgggggcgaaggcccggtggctcgggctgcccggggagcagcgcctcatgggccgcggggtgagcggctgcgccacctgcgacggcttcttcttcaaggacaagcgggtcgccgtggtcggcggcggggacaccgcgatggaggaggcgctcttcctcagccgctacgcctcggaggtcgtgatcatccaccggcgcgacgagttcagggcctccaagatcatgctgggccgcgcgaggaagaacccgaagatctcgttcatcaccgacacggtggtgaccgacgtgctgggcgaggacgcggtggagggcctgagcctgaggaacgtgaagaccggcgaggagagcacgctggaggtggagggcttcttcgtcgccatcggccacgacccggccacggagatcttccgcggccagctggagatggacgagggcggctacctcctgcagaaggagcacacgatgaccagcgtgcccggggtgttcgccgccggggacgtcgccgacaggcgctatcggcaggcggtcaccgcggcgggggacggctgccgcgcggcgatagacgctgagcgctggctggaggagcagggcgaggcccaggaggccgaggaccccggcgtgtggaccgccggcaaggaccggagccccgcggggagcggctag

SEQ ID NO: 133454 - protein, 332 aa, Rubrobacter xylanophilus DSM 9941
MSEQYDVVVVGSGPAGYTAALYAARANLRTLVFQGFEAGGQLMLTTDVENYPGYPEGVTGPEMMEDFERQAARFGAEMRPDNVDRVDFSGRPFRLWAEGQEEPVLARAVIVATGAKARWLGLPGEQRLMGRGVSGCATCDGFFFKDKRVAVVGGGDTAMEEALFLSRYASEVVIIHRRDEFRASKIMLGRARKNPKISFITDTVVTDVLGEDAVEGLSLRNVKTGEESTLEVEGFFVAIGHDPATEIFRGQLEMDEGGYLLQKEHTMTSVPGVFAAGDVADRRYRQAVTAAGDGCRAAIDAERWLEEQGEAQEAEDPGVWTAGKDRSPAGSG

SEQ ID NO: 133455 - DNA, 1365 bp, Synechococcus sp. CC9311
  CDS (1)..(1365): transl_table=11
atgggagcgagcgagaacctagtgatcgtcggatctggcccggctgggtatacggcagccatttacgcagcaagagccaacctcaatccgctcctgatcacaggatttcagcgcggtgggatccctggtggtcaactgatgaccaccacgcatgttgaaaatttccccggctttcccgatggagtccttggccccgatctgatggatctcatgaaagcgcaggcggagcgctgggggacgcacctgatcgaagccgatgccgacgttatcgacttgagccaacgtccctaccggattgaagccgaaggcaagacgatccaaacccaatcaatcatcatcgccactggcgcgagcgccaaccgcttgggcttacccaacgaagaacgcttctggagccagggcatcagtgcctgcgccatttgcgatggcgcaactccccaattccgcaaggaggaattggcggtggttggaggcggagattccgcttgcgaagaagcggtgtatctcaccaagtacggcagtcaggtgcacctgttggttcgctcggactgcttgcgagccagtgcggccatggctgaccgggtggaagccaatccccaaatcacggtgcactggaacaccgaggtggtggacgttgaaggaacggactggatgaacggcctacgacttcgcaatcgagacagcggcaaggaggaaacattggccgtgcgcggaatgttttatgccattggtcacacgcccaacaccgaactcttgaagggccaactggattgtgatcgcagcggttatctcgtcaccaaaccaggcagaccagaaacatccttggaaggtgtgtttgcagcgggtgacgtcgccgatgcggaatggcgccaagggattacagctgcaggcagtggctgccaagcggctcttgccgcagaacgatggttaagccatcacgacttagccacgcttgtgagtcgtgaggcggttgaaccacaaaaagccaatgcgccacaagccatagaagcaaccacggaatccacctatgacgccaatgcggaatggcaaaaaggcagttatgcgctccgcaagctttatcacgacagcaacaaacccctgctcgtgatttacagctccccaagctgcggcccttgtcatgtgctgaagccgcagctcaaacgagtgttgtcagaactcaatggacaggctcaaggcgtcgaaattgacatcgaagccgatcaagagattgcagaacaggcgggcgtcaacggcaccccaacagtccagctgttttatggcaagtcgctgcagcagcagtggcgcggagtgaaacagcgcagtgaattcaagggcgcgatcgaggcccttctcaagggccagtga

SEQ ID NO: 133456 - protein, 454 aa, Synechococcus sp. CC9311
MGASENLVIVGSGPAGYTAAIYAARANLNPLLITGFQRGGIPGGQLMTTTHVENFPGFPDGVLGPDLMDLMKAQAERWGTHLIEADADVIDLSQRPYRIEAEGKTIQTQSIIIATGASANRLGLPNEERFWSQGISACAICDGATPQFRKEELAVVGGGDSACEEAVYLTKYGSQVHLLVRSDCLRASAAMADRVEANPQITVHWNTEVVDVEGTDWMNGLRLRNRDSGKEETLAVRGMFYAIGHTPNTELLKGQLDCDRSGYLVTKPGRPETSLEGVFAAGDVADAEWRQGITAAGSGCQAALAAERWLSHHDLATLVSREAVEPQKANAPQAIEATTESTYDANAEWQKGSYALRKLYHDSNKPLLVIYSSPSCGPCHVLKPQLKRVLSELNGQAQGVEIDIEADQEIAEQAGVNGTPTVQLFYGKSLQQQWRGVKQRSEFKGAIEALLKGQ

SEQ ID NO: 133457 - DNA, 951 bp, Pseudomonas aeruginosa UCBPP-PA14
  CDS (1)..(951): transl_table=11
atgagtgaagtcaagcattcgcgcctcatcatcctgggctccggtccggccggctataccgccgccgtgtacgccgcacgcgccaatctcaagccagtggtgatcaccggcatccagccaggcggccagctgaccaccaccaccgaagtcgacaactggccgggcgacgtcgaaggccttaccggcccggcgctgatgacccgcatgcagcagcacgccgagcgtttcgacaccgagatcgtctacgaccacatccacaccgccgagttgcaacagcgccccttcacactgaagggcgatagtggcacttatacctgcgatgcattgatcattgccaccggtgcctccgcgcaatacctgggcatgtcgtcggaagaagccttcatgggcaagggcgtttccgcctgcgccacctgcgacggcttcttctaccgcaaccaggtggtctgcgtggtcggcggcggcaataccgccgtcgaggaagcgctgtacctggccaacatcgccaaggaagtccacctgatccaccgtcgcgacaagctgcgttcggagaaaatcctccaggacaagctgttcgacaaggccgagaacggcaacgtgcgcctgcactggaacaccaccctggacgaggtgctgggcgacgccagcggcgtcaccggcgtacgcctgaagagcaccatcgacggcagcaccagcgaactgtcgctggccggcgtgttcatcgccatcggccacaagccgaacaccgacctgttccagggccaactggaaatgcgcgacggctacctgcggatccacggcggcagcgaaggcaacgccacccagaccagcatcgaaggcgtgttcgccgccggcgacgtggccgaccacgtctaccgccaggccatcacttccgccggcgccggctgcatggccgcgctggatgccgaaaaatacctcgacgaccattga

SEQ ID NO: 133458 - protein, 316 aa, Pseudomonas aeruginosa UCBPP-PA14
MSEVKHSRLIILGSGPAGYTAAVYAARANLKPVVITGIQPGGQLTTTTEVDNWPGDVEGLTGPALMTRMQQHAERFDTEIVYDHIHTAELQQRPFTLKGDSGTYTCDALIIATGASAQYLGMSSEEAFMGKGVSACATCDGFFYRNQVVCVVGGGNTAVEEALYLANIAKEVHLIHRRDKLRSEKILQDKLFDKAENGNVRLHWNTTLDEVLGDASGVTGVRLKSTIDGSTSELSLAGVFIAIGHKPNTDLFQGQLEMRDGYLRIHGGSEGNATQTSIEGVFAAGDVADHVYRQAITSAGAGCMAALDAEKYLDDH

SEQ ID NO: 133459 - DNA, 990 bp, Nocardioides sp. JS614
  CDS (1)..(990): transl_table=11
atgtcagacgtccgcaacgtgatcgtcatcggctccggcccgtccggctacaccgccgccctctacaccgcccgagccaacctcacgccgctggtcttcgagggctcggtgaccgccggtggcgcgctgatgaacaccaccgaggtcgagaacttccccggcttccgcgacggcatcatgggtccggcgctgatggacgagatgcgcgcccaggccgagcggttcggcgccgagctggtcgccgacgacgtcgtcgaggtcgacctgaccggtgacctgaagatcgtccggaccgccaccgacacctacaccgcgcgcgcggtgatcctggcgatgggctcgggctaccgcaggctgggtctgccccgggagaccgagctgtccggccgcggcgtctcctggtgcgcgacctgcgacggcttcttcttccgcgaccagcacatcgcggtcgtcggcggcggcgactccgccatcgaggaggcgaccttcctcacccgcttcgggtccaaggtctccctcatcgtgcgccgcgacgagctgcgcgcctccaagatcatgcaggagcgggccttcgccgacccgaagctggagatcctctggaactcggtggtcgaggagatcaacggcgaggatcgactggagtcgctcaccctgcgcgacaccgtgaccggcgagacccgcaacctgcccgcgaccggcctgttcatcgcgatcgggcatgacccccgctcggagctgctcggcggacaggtcgacctcgacgagaacggctacgtgatcgccagccacccctccaccggcaccaacctgcccggcgtgttcgcggccggcgacctggtcgaccaccactaccggcaggcgatcaccgccgccggcacgggttgtgccgcggccctggacgcggagcgctacctcgccgagctggaccacgcggcctccggtccgctcgaggcccaggcccgggcggacgcggagatggccggcgcctga

SEQ ID NO: 133460 - protein, 329 aa, Nocardioides sp. JS614
MSDVRNVIVIGSGPSGYTAALYTARANLTPLVFEGSVTAGGALMNTTEVENFPGFRDGIMGPALMDEMRAQAERFGAELVADDVVEVDLTGDLKIVRTATDTYTARAVILAMGSGYRRLGLPRETELSGRGVSWCATCDGFFFRDQHIAVVGGGDSAIEEATFLTRFGSKVSLIVRRDELRASKIMQERAFADPKLEILWNSVVEEINGEDRLESLTLRDTVTGETRNLPATGLFIAIGHDPRSELLGGQVDLDENGYVIASHPSTGTNLPGVFAAGDLVDHHYRQAITAAGTGCAAALDAERYLAELDHAASGPLEAQARADAEMAGA

SEQ ID NO: 133461 - DNA, 1377 bp, Nostoc punctiforme PCC 73102
  CDS (1)..(1377): transl_table=11
atggtcatgactaaccccacagtagaaaacttagtaattatcggttctggaccagcagggtacacagcagctatctatgccggacgtgctaacctgaaacccgttgtatttgaaggtttccaagccgggggtttacctggtggacaactaatgacaacaacggaagtcgagaactttcctgggtttccccaagggattactgggccggaactgatggatcagatgaaggcgcaggcggagcgctggggagcggaactatatactgaagatgttatatcagttgacttgagtcagcgtccatttacagtgcgatcgcaagaaagggaaattaaaaccaacagcatcgtcattgctacgggtgcgacagcaaagcgtttgggtttacccaacgaacatgaattttggagtcggggtatttccgcttgtgcaatttgcgatggtgcaacaccgatttttcacggcgcagaattggctgtaattggtgctggcgactcggcggcggaagagtctatttatcttaccaaatacggttctaaggtaaatatgttggtacgcaccgataaaatgcgggcttctaaagccatgcaagatagggttttgagtaacccaaaaatccaggtgcattggaacacagaagccgtggatatctacggtaatggtcacatggaaggggtgaaagtccgtaatactaaaactggtgaagagagcaaactgcacgctaagggtttattctatgccgtcggtcacactcccaatacctctttatttaaggggcaattagaactggatgaggttggttacgttgtcaccaagccaggttctgtagaaaccagtttagaaggtgtttttgctgctggcgatgtgcaagatcatgagtttcggcaagcaattacggctgcgggtactggttgtatggcggcgatgttggcggaacgctggttgtcagccagtggtttaattcaagaattccatcaacagccagaaatagcagacaatgaattagaacatcagccagccaaaaagactgaagctgaagaagaagctggatttaacttggatgagacacgccatcagggaggatatgctttacggaaattgttccatgaaagcgatcgcttactcctggttaaatacgtctctcctggttgcggcccttgtcataccctgaagccaattttaaataaagtggtggatgaatttgacagcaaaattcattttgtagaaattgacatcgacaaagaccgagatattgctgaaaatgctggtgtgacaggaacgccaacggttcaattgttcaaaaacaaggaactggtgaaggaagttaaaggcgtgaagcaaaaaactgaatatcgtcagttaattgagagtaatctgtaa

SEQ ID NO: 133462 - protein, 458 aa, Nostoc punctiforme PCC 73102
MVMTNPTVENLVIIGSGPAGYTAAIYAGRANLKPVVFEGFQAGGLPGGQLMTTTEVENFPGFPQGITGPELMDQMKAQAERWGAELYTEDVISVDLSQRPFTVRSQEREIKTNSIVIATGATAKRLGLPNEHEFWSRGISACAICDGATPIFHGAELAVIGAGDSAAEESIYLTKYGSKVNMLVRTDKMRASKAMQDRVLSNPKIQVHWNTEAVDIYGNGHMEGVKVRNTKTGEESKLHAKGLFYAVGHTPNTSLFKGQLELDEVGYVVTKPGSVETSLEGVFAAGDVQDHEFRQAITAAGTGCMAAMLAERWLSASGLIQEFHQQPEIADNELEHQPAKKTEAEEEAGFNLDETRHQGGYALRKLFHESDRLLLVKYVSPGCGPCHTLKPILNKVVDEFDSKIHFVEIDIDKDRDIAENAGVTGTPTVQLFKNKELVKEVKGVKQKTEYRQLIESNL

SEQ ID NO: 133463 - DNA, 1005 bp, Oceanicola batsensis HTCC2597
  CDS (1)..(1005): transl_table=11
atgtccgacactcgccacaccaaagttctcatcatcggctcgggtccggccgggtataccgccggcgtctatgccagccgggccatgctcgacccgatcctcgtgcaggggatcgagccgggcgggcagctgaccaccacgaccgaggtcgagaactggcccggcgacaccgaggtccagggccccgacctcatggtgcggatggaggcccatgccaaggccatgggctgcgagatcatcggcgacatcatcaccgacctcgacctgtcgaaccgccccttcaccgccaggggggacagcggcgtgacctatacggcggacgccgtcatcctggccaccggcgcccgggccaagtggctggggctcgacagcgaagaggcctacaagggtttcggcgtctcggcctgcgcgacctgcgacggctttttctatcgcgggcaggagatcgtggtgatcggcggcggcaacacggccgtggaagaggccctcttcctcaccaatttcgcaagcaaggtcacgttgatccaccggcgcgacgagcttcgggccgaaaagatcctggtcgaccggctgatgaagaaccccaagatcgaaccgctctggcatcacgtcctcgaagaggtcgtgggcgaggacaaccccaagggcgtcacggcggtccgggtcaggcacgtcgacaccggcgaggtctcggagatcccgaccaagggcgttttcgtcgcgatcggccacgcgccggcctcggaactggtcaaggaccagctggagctgcaccacggcggttacgtgaaggtcgagccgggtacgtccaggacatcgattcccggggttttcgcggcgggcgacctgaccgatcatgtctaccggcaggcggtgacaagcgccggcatgggctgcatggcggcgctggacgccgagaagttcctcgccgaacagggcgacgtcgaaagccgggacaccaccctgcccctcgggtacggcgctccggaaacggaaggcgtctga

SEQ ID NO: 133464 - protein, 334 aa, Oceanicola batsensis HTCC2597
MSDTRHTKVLIIGSGPAGYTAGVYASRAMLDPILVQGIEPGGQLTTTTEVENWPGDTEVQGPDLMVRMEAHAKAMGCEIIGDIITDLDLSNRPFTARGDSGVTYTADAVILATGARAKWLGLDSEEAYKGFGVSACATCDGFFYRGQEIVVIGGGNTAVEEALFLTNFASKVTLIHRRDELRAEKILVDRLMKNPKIEPLWHHVLEEVVGEDNPKGVTAVRVRHVDTGEVSEIPTKGVFVAIGHAPASELVKDQLELHHGGYVKVEPGTSRTSIPGVFAAGDLTDHVYRQAVTSAGMGCMAALDAEKFLAEQGDVESRDTTLPLGYGAPETEGV

SEQ ID NO: 133465 - DNA, 1392 bp, Prochlorococcus marinus str. MIT 9211
  CDS (1)..(1392): transl_table=11
atgatgggcgaaaaaaataccaacgattcaacacacattgagaatgttgtgataattggctctggcccagctggatatacagctgcaatttatgcagcgagagcaaacctgcagccattattagttactggttttgcaaaaggagggatcccaggggggcaattgatgacaactacatttgtcgaaaactttcctggattccctgatggagtgcttgggcccgagttaatggatctaatgaaggctcaagcattacgttgggggacaaatcttttagaagctgatgcagaggagattgaactgaagaaacctcccttcataataaaaacaacagaagaaactattagaacgaattctttgataattgctactggagcaagagccaacaaactcggcatacctagtgaagtgcgtttctggagtcgaggaattagtgcttgcgcaatttgtgatggagcgactccacaatttagaaacgaagaactagcagttgttggaggtggagattccgcctgtgaagaagcggtatatctaacgaaatatggaagtcatgtacatttacttgttagatcaaatcagctaagagcaactgcatcaatgtctgatcgagtaatttcgaaccctcagatcagcgttcattttgagactgaattgcttgatgcagaagggaaagattggcttgaaaaagttctcataaaaagaaaaggttccaaccaaacaagaagcatcagtgtcaaaggtctgttttatgcgataggacatacaccaaacattgatctattaaaaaaccaacttgaaatagataataaaggctacataattacaaaagatggaaggccagaaacttctataaatggtgttttcgcagcaggtgatgtagcagataaggaatggcgtcaaggtatcactgctgcagcaagtgggtgcaaggctgccttggcagcggaaaagtggcttagcaaagaaaatcttgcctcacttatcaaacgtaagaattctgaacctgagccgagtcctaaaaataaatcaactcaaaccacaacagaagaaacatttagcgaagaagctatttggcaaaaaggcagttatccgttaaggaagctctatcacgaatcaaataaacctcttttaattgtttatacatctaaaagttgtggcccatgccatgtcctaaagcctcagcttaaaagagtacttaatgaactaaaaggacaagcgcttggagttgaaattgatatagagctagatacagaaatagctaaacaagctggggtaaatggaacaccaactgttcaactttttaagtctaaaaagctccacaatgagtggcaaggtgttaagcaaagaagtgttttcaaagaggaaataatcaacttgctgaaaaaagattaa

SEQ ID NO: 133466 - protein, 463 aa, Prochlorococcus marinus str. MIT 9211
MMGEKNTNDSTHIENVVIIGSGPAGYTAAIYAARANLQPLLVTGFAKGGIPGGQLMTTTFVENFPGFPDGVLGPELMDLMKAQALRWGTNLLEADAEEIELKKPPFIIKTTEETIRTNSLIIATGARANKLGIPSEVRFWSRGISACAICDGATPQFRNEELAVVGGGDSACEEAVYLTKYGSHVHLLVRSNQLRATASMSDRVISNPQISVHFETELLDAEGKDWLEKVLIKRKGSNQTRSISVKGLFYAIGHTPNIDLLKNQLEIDNKGYIITKDGRPETSINGVFAAGDVADKEWRQGITAAASGCKAALAAEKWLSKENLASLIKRKNSEPEPSPKNKSTQTTTEETFSEEAIWQKGSYPLRKLYHESNKPLLIVYTSKSCGPCHVLKPQLKRVLNELKGQALGVEIDIELDTEIAKQAGVNGTPTVQLFKSKKLHNEWQGVKQRSVFKEEIINLLKKD

SEQ ID NO: 133467 - DNA, 1404 bp, Synechococcus sp. RS9917
  CDS (1)..(1404): transl_table=11
atggctgctgagaccggcctcacccccggcaccaccgctcctgacaccgaaaatctggtgatcatcggttcggggcccgccggctacaccgcggcgatttacgccgctcgcgccaatctcagccccctgctgatcaccgggtttcaacggggcggcatccccggcggtcagctgatgaccactacccacgtggagaacttcccgggattccccgatggggtgttgggccccgacctgatggacctgatgaaggcccaggccgaacgctggggcacccgactgctcgaggccgatgccgacgcgatcgacctgagccgccgccccttccgcatcgaagccgatggatgcagcatccaggcccaggccgtgattctcgccaccggcgcgagcgccaatcgcctcgggctgccccaggaggagcgcttctggagcaagggcatcagtgcctgcgccatctgcgatggcgccactccccagttccgcaatgaggagctggcagtggtgggcggtggtgattccgcctgcgaagaagcggtgtatctcaccaaatacggcagccacgtgcatctgctcgtgcgctccggccagttgcgcgccagtgcggcgatggccgaccgggtgcaagccaacccccagatcagcgtgcactggcacaccgaggtggctgacgcagagggcgacgattggctggcgtcattgcgactgcgcaatcggcagagcggcgaggagcgacaactgccggtgcgcggcctcttctatgccatcggccacacgccgaataccgagttggtgcaaggccagctcagctgcgatgccaagggctacctggtgacccaaccgggccggccggaaacctcgctggagggcgtgtatgccgccggcgatgtggccgatgcggaatggcgccagggcatcactgcggccggcagcggctgccaggcggccctggcggcggaacgctggctcagccatcacaacctggcgagcctggtgagccgcgacagcgtggaaccggctcaggccgccacgccccagaccagcgaaaccaccaccgaagcgagctacgacccggatgcgctctggcaaaagggcagttacgccctgcgcaagctctatcacgacagcagcaagcccctgctcgtggtgtacacctcccccagctgcggcccctgccacgtgctcaaaccgcaattgaagcgcgtgctggatgagttgggcggccgagctcagggcctggaaatcgacatcgaagccgatcaggagatcgcccagcaggccggggtgaatggcacccccaccgtgcaactgttcttcgggaaggaactgaaacagcagtggcgcggtgtgaagcagcgcagcgaattccgctccgcgatcgaggctctgctgggcgcacccgtctga

SEQ ID NO: 133468 - protein, 467 aa, Synechococcus sp. RS9917
MAAETGLTPGTTAPDTENLVIIGSGPAGYTAAIYAARANLSPLLITGFQRGGIPGGQLMTTTHVENFPGFPDGVLGPDLMDLMKAQAERWGTRLLEADADAIDLSRRPFRIEADGCSIQAQAVILATGASANRLGLPQEERFWSKGISACAICDGATPQFRNEELAVVGGGDSACEEAVYLTKYGSHVHLLVRSGQLRASAAMADRVQANPQISVHWHTEVADAEGDDWLASLRLRNRQSGEERQLPVRGLFYAIGHTPNTELVQGQLSCDAKGYLVTQPGRPETSLEGVYAAGDVADAEWRQGITAAGSGCQAALAAERWLSHHNLASLVSRDSVEPAQAATPQTSETTTEASYDPDALWQKGSYALRKLYHDSSKPLLVVYTSPSCGPCHVLKPQLKRVLDELGGRAQGLEIDIEADQEIAQQAGVNGTPTVQLFFGKELKQQWRGVKQRSEFRSAIEALLGAPV

SEQ ID NO: 133469 - DNA, 1401 bp, Synechococcus sp. WH 5701
  CDS (1)..(1401): transl_table=11
atgagcgtttcctcaggccccagcagcgacgaggctgcagtggagaacctggtgatcgtgggctcaggcccggccggctacaccgccgccatctatgcggcccgcgccaacctcagtcccctgttgatcaccggcttccaggacgggggcatccccggcgggcagctgatgaccaccacccatgtggagaactttcccggtttccccgatggcatcctcggcccggatctgatggaccgcatgaaggcccaggccgtgcgctggggcacccgtctggtggaggccgatgccgaggcgatcgacctctccgagcgcccctaccgggtcagcgccgaggggcgcacaatccgcacccaggccgtgatcctggccaccggcgccagcgccaaccgcctcggccttccccacgagcagcagttctggagccagggcatcagtgcctgcgccatctgcgatggggccaccccccagttccgcaatgagcagctggcggtggtcggcgggggagattcggcctgtgaagaggcggtctatctcaccaaatacggcagccatgtgcacctgatcgtgcgccgcgagagcctgcgtgccagcggcgccatggccgaccgggtgctggccaactccgccatcaccgttcattggcagcgggaggtggccgatgtgtcggggaacggctggctggaggccctcaccctgcgcaatcccgacgacggcagcacggaagagctgccggtgcggggcctgttctatgccatcggccacacccccaacacccacctggtgcgggaccagctggcggtggatgccaagggctatctggtcaccaccccgggccagcctgacaccagcctcgaaggcgtgttcgccgccggtgatgtggccgacgcccagtggcgccagggggtgaccgccgccggcagcggctgccaggcggccctggccgccgagcgctggctcacgcaccacggcctggccaccacggtgaagcggaccgacgtggagccggagcccagcggggagcccgctcataccgccgtgagtgacgccgacaactacgaccccgctgccctctggcagaaaggcggctttgccctgcgcaagctctaccacgacagcgacaagcccctgctggtggtgtacacctcccccagctgcgggccctgccacgtgctcaagccccagctcaagcgggtgctgctggagctcgacggtgccgcccagggggtggagatcgacatcgaagccgagcaggaaatcgccacccaggccggggtcaacggcacgcccaccgttcagctcttccagggcaagcagctgcgccagcagtggcggggggtgaagcagcgcagcgaattcaaggctgcgatcgaggctctcctgcccgtgccggtggcctga

SEQ ID NO: 133470 - protein, 466 aa, Synechococcus sp. WH 5701
MSVSSGPSSDEAAVENLVIVGSGPAGYTAAIYAARANLSPLLITGFQDGGIPGGQLMTTTHVENFPGFPDGILGPDLMDRMKAQAVRWGTRLVEADAEAIDLSERPYRVSAEGRTIRTQAVILATGASANRLGLPHEQQFWSQGISACAICDGATPQFRNEQLAVVGGGDSACEEAVYLTKYGSHVHLIVRRESLRASGAMADRVLANSAITVHWQREVADVSGNGWLEALTLRNPDDGSTEELPVRGLFYAIGHTPNTHLVRDQLAVDAKGYLVTTPGQPDTSLEGVFAAGDVADAQWRQGVTAAGSGCQAALAAERWLTHHGLATTVKRTDVEPEPSGEPAHTAVSDADNYDPAALWQKGGFALRKLYHDSDKPLLVVYTSPSCGPCHVLKPQLKRVLLELDGAAQGVEIDIEAEQEIATQAGVNGTPTVQLFQGKQLRQQWRGVKQRSEFKAAIEALLPVPVA

SEQ ID NO: 133471 - DNA, 1362 bp, Synechococcus sp. WH 7805
  CDS (1)..(1362): transl_table=11
atggcggtcgaaaacctggtgatcgtggggtctggccctgctggatacaccgcagcgatttatgccgcccgcgccaacctcaatccgcttctgatcacggggtttcagcgcggaggaatcccgggtggtcagttgatgaccaccacccatgtggaaaatttccctggttttcctgatggcgtgctgggtcctgacctgatggacctgatgaaggcgcaggcggaacgctggggaacgcgcctgctagaggctgatgcagacagcatcgacctgagccagaggccttacagaattgaagccgacggcaacaccatcgaaacccaggcactgatcatcgccacaggtgcaagtgccaatcgcctgagcctcccgaacgaagaaagattctggagccatggaatcagcgcttgcgccatctgcgatggcgcgacgccccagttccgcaatgaggagttggccgtggtgggcggcggtgattccgcctgcgaggaggctgtgtacctcactaaatacggaagccatgtgcacctactagtgcgctcagaccgcttgcgtgccagtgccgccatggctgaccgagtgcaggccaatccgcagatcaccgtgcactggaacactcaggtggccgacgctgaaggagaggcatggctgagtgggttgcggctgcaacgccgagatagcggcctggaagagcacctgccggtcaagggcatgttttatgccatcggccacacgccgaacacagaactggtgcgcgatcagctcaactgcgatggcacgggttacctgatcacccagcctggtcgtcctgaaacgtcaaaagaaggagtgtttgcggccggagatgtcgcggatgcggaatggcggcaagggattaccgccgcaggaagcggctgccaagcagccctcgccgctgagcgatggctcagtcacaacgatctggctcaactcgtgaagcgcgatcaggccgagcccgccaaggcggacacacccaaagccacggcggaaaccacggaatccagctacgacccggacgctctttggcagaaaggcagttacgccctcaggaagctctaccacgacagccggcgtccgctcctggttgtttacacatcccccagttgcggcccatgccacgtgctcaagccccagctcaagcgagtgctcgatgagctcggaggaagcgctcaggggatcgaaatcgatatcgaaaccgaccaggccattgctgaacaggctggcgtcaatggcacacccaccgtgcagctgttttacgacaagcagctcaaacagcaatggcggggcgtgaagcagcgcagtgaattcatggcctcgatccgctcattgctgcaggagagttga

SEQ ID NO: 133472 - protein, 453 aa, Synechococcus sp. WH 7805
MAVENLVIVGSGPAGYTAAIYAARANLNPLLITGFQRGGIPGGQLMTTTHVENFPGFPDGVLGPDLMDLMKAQAERWGTRLLEADADSIDLSQRPYRIEADGNTIETQALIIATGASANRLSLPNEERFWSHGISACAICDGATPQFRNEELAVVGGGDSACEEAVYLTKYGSHVHLLVRSDRLRASAAMADRVQANPQITVHWNTQVADAEGEAWLSGLRLQRRDSGLEEHLPVKGMFYAIGHTPNTELVRDQLNCDGTGYLITQPGRPETSKEGVFAAGDVADAEWRQGITAAGSGCQAALAAERWLSHNDLAQLVKRDQAEPAKADTPKATAETTESSYDPDALWQKGSYALRKLYHDSRRPLLVVYTSPSCGPCHVLKPQLKRVLDELGGSAQGIEIDIETDQAIAEQAGVNGTPTVQLFYDKQLKQQWRGVKQRSEFMASIRSLLQES

SEQ ID NO: 133473 - DNA, 957 bp, Pseudoalteromonas tunicata D2
  CDS (1)..(957): transl_table=11
atgagcactgcaaaacactgtaaattacttattttaggttcaggtcctgctggatacacggctgcagtttatgcagcacgcgcaaatttaaatccagttttaattacgggcatgcaacaaggtggtcaattgaccacaacaactgaagttgaaaactggcctggtgatgcgcatggcttaacaggtcctgcattgatggatcgcatgaaagaacatgctgagcgttttgaaactgaaattttatttgaccatatccacactgttgatgttaaaaaccgtccatttactttaaccggtgacaacggcgtttatacctgtgatgcgcttatcatcgccacaggcgcttcggcaacgtatttaggcctagagtcggaagagaactttaagggccgtggtgtgtctgcttgcgcaacctgtgatggctttttctatcgcaatcaaaaagtagctgttgtcggtggcggtaataccgcggttgaagaagcgctttatctatctaatatcgcatcagaagtacatgttattcaccgtcgagattcattccgcagtgaaaagattttagctgagcgcttaaaagacaaagcggctaatggcaatgttgtactacacctaaatcgtacattggacgaagtattaggcgaccagatgggtgttaccgggatccgcatcaaagcaacagattctgatgccactgaagaacttgatttagcaggtgtattcattgctatcggtcacaaaccaaatactgatatgtttgttgatcaactggaaatgaaagatggctacttagttgtgcaatcgggtttacatggcaatgcaactcaaaccagtgttgaaggtgtttttgctgcaggtgatgtttgcgatcatatttatcgtcaagctatcacatctgcgggtacgggttgtatggctgcgttagatgctgaacgttacttagataacctcaaagcctaa

SEQ ID NO: 133474 - protein, 318 aa, Pseudoalteromonas tunicata D2
MSTAKHCKLLILGSGPAGYTAAVYAARANLNPVLITGMQQGGQLTTTTEVENWPGDAHGLTGPALMDRMKEHAERFETEILFDHIHTVDVKNRPFTLTGDNGVYTCDALIIATGASATYLGLESEENFKGRGVSACATCDGFFYRNQKVAVVGGGNTAVEEALYLSNIASEVHVIHRRDSFRSEKILAERLKDKAANGNVVLHLNRTLDEVLGDQMGVTGIRIKATDSDATEELDLAGVFIAIGHKPNTDMFVDQLEMKDGYLVVQSGLHGNATQTSVEGVFAAGDVCDHIYRQAITSAGTGCMAALDAERYLDNLKA

SEQ ID NO: 133475 - DNA, 957 bp, Oceanospirillum sp. MED92
  CDS (1)..(957): transl_table=11
atgagcgaagtacaacaccacgagctaatcattcttggtagcgggcctgcgggttacactgcagctgtttacgcggcgcgcgccaacctaaaccctgttgttatcacaggcatgcaagcgggcggtcagctaaccactaccactgaagttgacaactggcctggcgatgttgacggcgttcagggccctgaactgatgcagcgtatgcagcaacatgcagagcgtttcgatacgcagatcattttcgatcacattaatgaaacggatctgcaaaaccgccccttccgattaaaaggcgatatgggcgagtatacctgtgatgctctgattatctgcacaggtgcttctgctcagtaccttggccttccttcagaagaagagttcgcaggcaaaggggtttccgcatgtgccacctgtgatggtttcttctatcgcggtcagaaagttgctgtggttggcggtggtaatactgccgttgaggaagcactttatctttctaatattgctgaagaagtgacattgattcaccgccgtgacagcctgcgttctgagaaaattcttcaggataaaattctggaacgtgctgagaacggtaatatcaacattatctggaaccacacgcttgaagaggttcttggtgatgacatgggtgtttctggtctacgccttaagagcacgactgatggcgaagaacagcagctggatgttgcaggtgtatttattgcgattggccacaaacccaatactgatatcttccagggccagcttgatatgacagacggctacctgaaaattcagtctgggcttgaaggtaatgcaacgcagacctctgttgaaggtgtttatgccgcgggtgatgtgtgtgaccacatttaccgtcaggcaattacttctgctggttttggctgcatggctgctctggatgctgaacgctatctggacgacctgaagaagtaa

SEQ ID NO: 133476 - protein, 318 aa, Oceanospirillum sp. MED92
MSEVQHHELIILGSGPAGYTAAVYAARANLNPVVITGMQAGGQLTTTTEVDNWPGDVDGVQGPELMQRMQQHAERFDTQIIFDHINETDLQNRPFRLKGDMGEYTCDALIICTGASAQYLGLPSEEEFAGKGVSACATCDGFFYRGQKVAVVGGGNTAVEEALYLSNIAEEVTLIHRRDSLRSEKILQDKILERAENGNINIIWNHTLEEVLGDDMGVSGLRLKSTTDGEEQQLDVAGVFIAIGHKPNTDIFQGQLDMTDGYLKIQSGLEGNATQTSVEGVYAAGDVCDHIYRQAITSAGFGCMAALDAERYLDDLKK

SEQ ID NO: 133477 - DNA, 1404 bp, Synechococcus sp. RS9916
  CDS (1)..(1404): transl_table=11
atgaccgctgctgggcagctcgggacctcctctacccctggcgatggggtggaaaaccttgtgatcattggttcagggcctgccggctacaccgctgcgatctatgcagcccgcgccaacctgagcccgatcttgattacgggcttccagcgcggcggaatccccggtggtcagctgatgaccacgacccatgtggagaacttccctggcttccccgacggggtcctgggaccagatctgatggacctgatgaaggcccaggcggaacggtggggtacccgtcttgtggaggctgacgccgatggaattgatctcagctcgcgtccattccagatcaaaaccgaaggccgcatcattcgcgcccaagcggtgatcctggccacgggtgccagcgccaaccgtctggggctgccaaacgaagaccagttctggagcagcggcatcagtgcctgcgcgatctgtgatggcgccacaccccaatttcgcaatgcggaactcgcagtggtgggaggcggagactccgcctgtgaagaagcggtgtatctcaccaaatacggcagtcatgtgcacctgctggtgcgctccgatcagctgagagccagtgccgccatggccgatcgggtgcaggccaacccgcagatcaccgttcactggaacaccgaggtggtggatgccaacggcgctgactggctccactccttaaccctgcgcaaccgcggcaatggtgagcagtccgagctgcccgtgcgcggattgttttatgccatcggccacaccccaaacaccgaactggtgcacgaccagctccgatgcgatggcaagggatacttgatcaccgagcccggcagaccggaaacctccctggaaggggtgtatgccgccggtgatgtggccgatgccgaatggcggcagggcattaccgccgcaggtagcggttgccaagccgctctggcagcggaacgctggctgagccatcacaacctggcccaactggtcagccgcgagtcggtggaacctaaacaggccgaaaccccccaggtgtctgaggcggtcgacgagaccacctacgacccccatgccctctggcagaaaggcagctatgccctgcgcaagctgtaccacgacagcgacaggccactgctggtggtgtattcctcccccagctgcggcccatgccacgtgctcaaaccccagctcaaacgggtcctcaaggaactcgagggcggggcgcaaggcatcgaaatcgacatcgaggccgagcaggccatcgctgagcaggcaggggtaaacggaacacccaccgtgcagctcttccacgccaaagaactcaaacaacagtggcgtggcgtcaagcaacgcagtgagttcaaggcagcgatcgaacagctactggtgaaagcctga

SEQ ID NO: 133478 - protein, 467 aa, Synechococcus sp. RS9916
MTAAGQLGTSSTPGDGVENLVIIGSGPAGYTAAIYAARANLSPILITGFQRGGIPGGQLMTTTHVENFPGFPDGVLGPDLMDLMKAQAERWGTRLVEADADGIDLSSRPFQIKTEGRIIRAQAVILATGASANRLGLPNEDQFWSSGISACAICDGATPQFRNAELAVVGGGDSACEEAVYLTKYGSHVHLLVRSDQLRASAAMADRVQANPQITVHWNTEVVDANGADWLHSLTLRNRGNGEQSELPVRGLFYAIGHTPNTELVHDQLRCDGKGYLITEPGRPETSLEGVYAAGDVADAEWRQGITAAGSGCQAALAAERWLSHHNLAQLVSRESVEPKQAETPQVSEAVDETTYDPHALWQKGSYALRKLYHDSDRPLLVVYSSPSCGPCHVLKPQLKRVLKELEGGAQGIEIDIEAEQAIAEQAGVNGTPTVQLFHAKELKQQWRGVKQRSEFKAAIEQLLVKA

SEQ ID NO: 133479 - DNA, 951 bp, Alteromonadales bacterium TW-7
  CDS (1)..(951): transl_table=11
atgactgaagcaaaacatagtaagctactaattttaggctctggcccagctggttacacagctgcagtgtatgcagctcgtgcaaatttaaaccctgttttaattacaggtatgcaacaaggtggtcaattgactactaccactgaagttgaaaactggccgggtgatgcacacggtttaacaggccctgcacttatggaccgcatgaaagagcatgctgaacgctttgaaaccgaaattgtgtttgaccacataaataaagttgatgtttctaaacgccctttcacacttactggcgatcaaggtacatatacatgtgatgcgcttatcattgctacaggcgcatctgcaaaatacttaggcttggagtctgaaacaaacttccaaggtcgtggtgtatcggcgtgtgcaacatgtgatggctttttctataaaggccaaaaagtagcagtagttggtggtggtaataccgcagttgaagaagcactatacttatctaacattgctgatgaagtccatgtaattcaccgtcgtgacagtttccgtagtgaaaaaattcttgctgatcgtcttactgaaaaagcggcaaacggcaacgtggtaatgcactacaaccgtacactagacgaagttttgggcgaccaaatgggtgtaacaggcattcgcattaaagatgtagcatctgatgctactgaagatttagatttggcgggtgtatttatagcaattggccacaaaccaaacacagatatgtttgaaggccagctagaaatgaaagacggctacctagttgttgagtcaggtcttaacggtaacgcaacgcaaacaagcgtaccaggtgtttttgctgcaggtgacgtgtctgaccatatttaccgccaagcgattacatctgctggaacaggctgtatggcagcccttgatgcagagcgctatttagacaacctataa

SEQ ID NO: 133480 - protein, 316 aa, Alteromonadales bacterium TW-7
MTEAKHSKLLILGSGPAGYTAAVYAARANLNPVLITGMQQGGQLTTTTEVENWPGDAHGLTGPALMDRMKEHAERFETEIVFDHINKVDVSKRPFTLTGDQGTYTCDALIIATGASAKYLGLESETNFQGRGVSACATCDGFFYKGQKVAVVGGGNTAVEEALYLSNIADEVHVIHRRDSFRSEKILADRLTEKAANGNVVMHYNRTLDEVLGDQMGVTGIRIKDVASDATEDLDLAGVFIAIGHKPNTDMFEGQLEMKDGYLVVESGLNGNATQTSVPGVFAAGDVSDHIYRQAITSAGTGCMAALDAERYLDNL

SEQ ID NO: 133481 - DNA, 984 bp, Erythrobacter sp. SD-21
  CDS (1)..(984): transl_table=11
atggctacccatcgcaccaagatgctcatcatcggctccggccccgctggctattccgccgccatttacggcgcgcgcgcgatgatggagcctatcgtcgtgcagggccttcagcccggcggccagctgaccatcaccaccgatgtcgagaactatcccggcttcgccgatgtgattcagggcccttggctgatggagcagatgcagaagcaagcggagcacgtcggcacgcgcatgatgtgggacaccatcgtggacgtggacgttgcaaatggctcgcccttcaaggccatcggcgacagcggcgacgaatacatcgccgacgtgctggtgatctgcaccggcgcgcaggccaagtggctgggcgtgccgggcgaaatggaactaggcggcaagggcgtgtcggcctgcgccacctgtgacggcttcttctatcgcggcaaaaaggtcgcggtgatcggcggtggtaacaccgcggttgaggaagcgctctacctcaccaaccattccgacgatgtgacgcttatccatcgccgcgacgagctgcgcgccgagaagattcttcaggaacgcctgctcaaccaccccaagatcacggtgatctggaacaagacggtcgaaagcttcgaggccggcgacaacggcgcgctgcaccgcctcaacctgcgcgatacggtgacgagcgaggacagcacgctggaaaccgacggggccttcgtcgccatcggccacgcgccggccaccgagctgttcaagggcaagctgccgatggacgaggggggttacctcctaaccgaggcgggttcgcccaagaccgacattcccggcgtcttcgccgctggcgatgtgaccgatcacgtctaccgccaggcggtcaccgctgcggggatgggctgcatggccgcgctcgatgcggagcgcttccttgcgaaccttgaagtcgacgctgacggccacgcccacgcggcagaggctgcggagtaa

SEQ ID NO: 133482 - protein, 327 aa, Erythrobacter sp. SD-21
MATHRTKMLIIGSGPAGYSAAIYGARAMMEPIVVQGLQPGGQLTITTDVENYPGFADVIQGPWLMEQMQKQAEHVGTRMMWDTIVDVDVANGSPFKAIGDSGDEYIADVLVICTGAQAKWLGVPGEMELGGKGVSACATCDGFFYRGKKVAVIGGGNTAVEEALYLTNHSDDVTLIHRRDELRAEKILQERLLNHPKITVIWNKTVESFEAGDNGALHRLNLRDTVTSEDSTLETDGAFVAIGHAPATELFKGKLPMDEGGYLLTEAGSPKTDIPGVFAAGDVTDHVYRQAVTAAGMGCMAALDAERFLANLEVDADGHAHAAEAAE

SEQ ID NO: 133483 - DNA, 1131 bp, Oryza sativa subsp
  CDS (1)..(1131)
atgcgcctctgctccaagctcgcggcgctgctccggaggtcccgccagttcgcgcccgcagccgccgccgcgtccgggtcagcgacggccgcggccgcgtcggcgaacgggatggaggaggcggccgcgggcccgctgcgggcgcgcgtgtgcatcatcgggagcgggccggcggcgcacacggcggcggtctacgcggcgcgcgccgagctcaagcccgtgctcttcgagggcttcctcgccaacgacatcgccgcgggggggcagctcaccaccaccaccgacgtcgagaacttcccgggcttccccgacggcatcctcggcgccgacctcatggaccgctgccgcgcccagtccgtgcgcttcgggaccaggatcctcaccgagaccgtcaccgccgtcgacctctcgtcccgccccttccgcgtcgcctccggcgacaccgtcgtgcacgccgacgcggtcgtcgtggccacgggcgccgtcgcgcgccgcctccatttcgccggctccgacgcgttctggaaccgcggcatctccgcctgcgccgtctgcgacggcgccgcgcccatcttccggaacaagcccatcgccgtcgtcggcggcggggactccgccatggaggaggccaacttcctcaccaagtacggctcccgcgtctacatcatccaccgccgcaacgccttccgcgcgtccaagatcatgcaggcccgggccctctccaaccccaagatccaggtcgtctgggactccgaggtcgtcgaggcgtacggcggcgccgacggcggtccgttggccggcgtcaaggtcaagaacgtggtgagcggcgaggtctccgacctccaggtcgccgggctcttcttcgccattggacacgagccggcgacaaagtttctcggcgggcagctcgagctggactccgatggttatgtcgtgaccaagcccggctccactcacaccagcgtcaagggagtcttcgccgccggtgatgttcaggacaagaagtatcgccaggccattactgccgcgggatcagatcgaagaccttcacaggctcaatgcttgtctgaggaaagggtcaggggtaaaaccataacagaatacctttcgttttctggtgatactagctaa

SEQ ID NO: 133484 - protein, 376 aa, Oryza sativa subsp
MRLCSKLAALLRRSRQFAPAAAAASGSATAAAASANGMEEAAAGPLRARVCIIGSGPAAHTAAVYAARAELKPVLFEGFLANDIAAGGQLTTTTDVENFPGFPDGILGADLMDRCRAQSVRFGTRILTETVTAVDLSSRPFRVASGDTVVHADAVVVATGAVARRLHFAGSDAFWNRGISACAVCDGAAPIFRNKPIAVVGGGDSAMEEANFLTKYGSRVYIIHRRNAFRASKIMQARALSNPKIQVVWDSEVVEAYGGADGGPLAGVKVKNVVSGEVSDLQVAGLFFAIGHEPATKFLGGQLELDSDGYVVTKPGSTHTSVKGVFAAGDVQDKKYRQAITAAGSDRRPSQAQCLSEERVRGKTITEYLSFSGDTS

SEQ ID NO: 133485 - DNA, 1020 bp, Emericella nidulans; identical to SEQ ID NO: 56554
  CDS (1)..(1020)

SEQ ID NO: 133486 - protein, 339 aa, Emericella nidulans; identical to SEQ ID NO: 56555

SEQ ID NO: 133487 - DNA, 966 bp, Streptomyces ambofaciens
  CDS (1)..(966): transl_table=11
gtgagcgagatacgcgaggtcgtcatcatcggctccggccccgccggatacaccgccgccctctacaccgcccgcgcccagctcaggcccctgctgttcggcagctccatcttcgtcggcggctcgctgacgaccaccaccgaggtggagaacttccccggcttccccgagggcgtcgacggccccgtcctgatggagaacatgcgggctcaggccgagaagttcggcgctgagatgatcgacgacgacattgtcgaagtggacctcaccggcgacatcaagctcctcaccgactcctccggcactgtgcaccgcgcgaagacggtgatcatcgcgaccggctccggctaccgcaagctcggcctgccgaacgaggacgagctgtccgggcggggcgtgtcctggtgcgcgacctgtgacgggttcttcttccgggaccgcgacatcgtcgtggtcggcggcggcgacaccgcgatggaggaggccaccttcctcacccgcttcgcccgctccgtgaccgtcgtccaccggcgctccactctgcgcgcctcccaagtcatgcagaaccgcgccttcgccgacgacaagatctccttcgccttcgacagcgagatcgccgagatcaaggaccaggacggcaggctcgccgcggtcgtactgcgcgacgtcctcaccggcgccacccgcgacctggacgtgacgggcctgttcatcgcgatcggtcacgccccccggacagaactgttcaagggccagctggacctggacgaacagggctacctggcggtcgacgcgccgtcgacacgtaccaacctgcccggcgtcttcgccgccggcgacgtcgtcgaccacacctaccgccaggccatcaccgccgccgccagcggctgccaagccgccctggacgccgaacgccacctcgccgccctcaacgacgaacatgccctcgccgcagtccccgcctaa

SEQ ID NO: 133488 - protein, 321 aa, Streptomyces ambofaciens
MSEIREVVIIGSGPAGYTAALYTARAQLRPLLFGSSIFVGGSLTTTTEVENFPGFPEGVDGPVLMENMRAQAEKFGAEMIDDDIVEVDLTGDIKLLTDSSGTVHRAKTVIIATGSGYRKLGLPNEDELSGRGVSWCATCDGFFFRDRDIVVVGGGDTAMEEATFLTRFARSVTVVHRRSTLRASQVMQNRAFADDKISFAFDSEIAEIKDQDGRLAAVVLRDVLTGATRDLDVTGLFIAIGHAPRTELFKGQLDLDEQGYLAVDAPSTRTNLPGVFAAGDVVDHTYRQAITAAASGCQAALDAERHLAALNDEHALAAVPA

SEQ ID NO: 133489 - DNA, 1062 bp, Aspergillus oryzae
  CDS (1)..(1062)
atggtgcacagcaaagtcgttatcattggctccggccccgccgcacacaccgccgcgatctatctctcgcgtgcggagctcaagcctgtcctttatgagggtatgctggctaacggcaccgctgctggcggtcagctcaccaccaccaccgacatcgagaacttccccggcttccctgatggtatcggtggtacagagctgatggagaacatgcgcaagcagtccgtccggttcggaactgaggttatcactgagactatctcgagagtggatttctcgcagaggccgttcaagctgtggacggagtggaacgatggtcctgacaatgagcccgcccgcactgccgatgccatcatcatcgccactggtgccaatgcccgtcgtcttgacctgcccggtgagaccaagtactggcagaacggaatcagcgcctgtgccgtctgtgacggtgccgtgccaatcttccgtaacaagcccctctatgtgatcggtggtggtgactccgctgccgaagaggccatgttcctggccaagtacggcagctcggttaccgttttggtccgtcgcgacaagcttcgtgccagcaaggccatggccaaccgtctcctgtctcaccccaaggtgaccgttcgtttcaacaccgttgcgacccaggtcctgggtgacgagaagcccatgggcttgatgacccacctgcgtgtcaagaacaccgtcaccggcgaggaggagaccgtcgacgctaacggtctcttctacgctgttggccatgaccccgccaccgccttggtcaagggcaagatcgacctcgacgacgaaggatacatcatcaccaagcctggtaccagctacaccagcctggagggtgtcttcgcctgcggtgacgtccaggacaaacgctatcgccaggccattaccagtgccggctccggctgcattgccgctctcgaggctgagaagttcatcgctgaatctgagtcctctggagaggaggctcccgtcaacgaggtcaagcaagacccccagggtaacaccgcggagtacaagtccaaccctctcctctaa

SEQ ID NO: 133490 - protein, 353 aa, Aspergillus oryzae
MVHSKVVIIGSGPAAHTAAIYLSRAELKPVLYEGMLANGTAAGGQLTTTTDIENFPGFPDGIGGTELMENMRKQSVRFGTEVITETISRVDFSQRPFKLWTEWNDGPDNEPARTADAIIIATGANARRLDLPGETKYWQNGISACAVCDGAVPIFRNKPLYVIGGGDSAAEEAMFLAKYGSSVTVLVRRDKLRASKAMANRLLSHPKVTVRFNTVATQVLGDEKPMGLMTHLRVKNTVTGEEETVDANGLFYAVGHDPATALVKGKIDLDDEGYIITKPGTSYTSLEGVFACGDVQDKRYRQAITSAGSGCIAALEAEKFIAESESSGEEAPVNEVKQDPQGNTAEYKSNPLL

SEQ ID NO: 133491 - DNA, 1032 bp, Cryptococcus neoformans var; identical to SEQ ID NO: 56558
  CDS (1)..(1032)

SEQ ID NO: 133492 - protein, 343 aa, Cryptococcus neoformans var; identical to SEQ ID NO: 56559

SEQ ID NO: 133493 - DNA, 996 bp, Oryza sativa subsp
  CDS (1)..(996)
atggaggaggcggccgcgggcccgctgcgggcgcgcgtgtgcatcatcgggagcgggccggcggcgcacacggcggcggtctacgcggcgcgcgccgagctcaagcccgtgctcttcgagggcttcctcgccaacgacatcgccgcgggggggcagctcaccaccaccaccgacgtcgagaacttcccgggcttccccgacggcatcctcggcgccgacctcatggaccgctgccgcgcccagtccgtgcgcttcgggaccaggatcctcaccgagaccgtcaccgccgtcgacctctcgtcccgccccttccgcgtcgcctccggcgacaccgtcgtgcacgccgacgcggtcgtcgtggccacgggcgccgtcgcgcgccgcctccatttcgccggctccgacgcattctggaaccgcggcatctccgcctgcgccgtctgcgacggcgccgcgcccatcttccggaacaagcccattgccgtcgtcggcggcggggactccgccatggaggaggccaacttcctcaccaagtacggctcccgcgtctacatcatccaccgccgcaacgccttccgcgcgtccaagatcatgcaggcccgggccctctccaaccccaagatccaggtcgtctgggactccgaggtcgtcgaggcgtacggcggcgccgacggcggtccgttggccggcgtcaaggtcaagaacgtggtgagcggcgaggtctccgacctccaggtcgccgggctcttcttcgccattggacacgagccggcgacaaagtttctcggcgggcagctcgagctggactccgatggctatgtcgtgaccaagcccggctccactcacaccagcgtcaagggagtcttcgccgccggtgatgttcaggacaagaagtatcgccaggccattactgccgcgggatcaggttgcatggcggcgttggatgcggagcactacctacaggagattggagcacaggaagacaagactgattga

SEQ ID NO: 133494 - protein, 331 aa, Oryza sativa subsp
MEEAAAGPLRARVCIIGSGPAAHTAAVYAARAELKPVLFEGFLANDIAAGGQLTTTTDVENFPGFPDGILGADLMDRCRAQSVRFGTRILTETVTAVDLSSRPFRVASGDTVVHADAVVVATGAVARRLHFAGSDAFWNRGISACAVCDGAAPIFRNKPIAVVGGGDSAMEEANFLTKYGSRVYIIHRRNAFRASKIMQARALSNPKIQVVWDSEVVEAYGGADGGPLAGVKVKNVVSGEVSDLQVAGLFFAIGHEPATKFLGGQLELDSDGYVVTKPGSTHTSVKGVFAAGDVQDKKYRQAITAAGSGCMAALDAEHYLQEIGAQEDKTD

SEQ ID NO: 133495 - DNA, 1002 bp, Arabidopsis thaliana
  CDS (1)..(1002)
atgaatggtctcgaaactcacaacacaaggctctgtatcgtaggaagtggcccagcggcacacacggcggcgatttacgcagctagggctgaacttaaacctcttctcttcgaaggatggatggctaacgacatcgctcccggtggtcaactaacaaccaccaccgacgtcgagaatttccccggatttccagaaggtattctcggagtagagctcactgacaaattccgtaaacaatcggagcgattcggtactacgatatttacagagacggtgacgaaagtcgatttctcttcgaaaccgtttaagctattcacagattcaaaagccattctcgctgacgctgtgattctcgctactggagctgtggctaagcggcttagcttcgttggatctggtgaagcttctggaggtttctggaaccgtggaatctccgcttgtgctgtttgcgacggagctgctccgatattccgtaacaaacctcttgcggtgatcggtggaggcgattcagcaatggaagaagcaaactttcttacaaaatatggatctaaagtgtatataatccataggagagatgcttttagagcgtctaagattatgcagcagcgagctttgtctaatcctaagattgatgtgttttggaactcgtctgttgtggaagcttatggagatggagaaagagatgtgcttggaggattgaaagtgaagaatgtggttaccggagatgtttctgatttaaaagtttctggattgttctttgctattggtcatgagccagctaccaagtttttggatggtggtgttgagttagattcggatggttatgttgtcacgaagcctggtactacacagactagcgttcccggagttttcgctgcgggtgatgttcaggataagaagtataggcaagccatcactgctgcaggaactgggtgcatggcagctttggatgcagagcattacttacaagagattggatctcagcaaggtaagagtgattga

SEQ ID NO: 133496 - protein, 333 aa, Arabidopsis thaliana
MNGLETHNTRLCIVGSGPAAHTAAIYAARAELKPLLFEGWMANDIAPGGQLTTTTDVENFPGFPEGILGVELTDKFRKQSERFGTTIFTETVTKVDFSSKPFKLFTDSKAILADAVILATGAVAKRLSFVGSGEASGGFWNRGISACAVCDGAAPIFRNKPLAVIGGGDSAMEEANFLTKYGSKVYIIHRRDAFRASKIMQQRALSNPKIDVFWNSSVVEAYGDGERDVLGGLKVKNVVTGDVSDLKVSGLFFAIGHEPATKFLDGGVELDSDGYVVTKPGTTQTSVPGVFAAGDVQDKKYRQAITAAGTGCMAALDAEHYLQEIGSQQGKSD

SEQ ID NO: 133497 - DNA, 996 bp, Triticum aestivum
  CDS (1)..(996)
atggaggaggcggccgcgggcccgctgcacacgcgcgtgtgcatcattgggagcggccccgccgcgcacacggcggccgtctacgcggcacgcgccgagctcaagcccgtgctcttcgagggctggctcgccaacgacatcgcggcgggcgggcagctcaccaccaccaccgacgtcgagaacttccccggcttccccgacggcatcctcggcatcgacctcatggaccgctgccgcgcgcagtccgtgcgcttcgggaccaagatcttctccgagaccgtcacctccgtcgacttctcctcccgccccttccgcgtctcctccgacgacaccgtcgtccacgccgactccgtcgtcgtcgccaccggcgccgtcgcccgccgcctccatttcgccggctccgacgcgttctggaaccgtgggatcaccgcctgcgccgtctgcgacggtgccgcgcccatcttccggaacaagcccatcgccgtcgtcggtggcggggactctgccatggaggaggccaacttcctcaccaagtacggctcgcgcgtctacatcatccaccgccgcgacgccttccgcgcctccaagatcatgcaggcacgggctctctccaaccccaaaatccaggtcgtgtgggactccgaggtcgttgaggcctacggcggctcggacggcggccccttgggcggcgtcaaggtcaaaaacctggtgaccggcgaggtatccgacttccgggtggccgggctcttctttgccattgggcacgagccagctaccaagtttctcgccggacagctcgagctcgactccgaggggtacgtggccaccaagccgggctccacgcacaccagtgtgaagggggtcttcgctgccggggacgttcaggacaagaagtaccgccaggccattactgccgcaggatcaggttgtatggctgctttggacgcggagcactacctgcaggaggttggcgcacaggaagggaagactgattga

SEQ ID NO: 133498 - protein, 331 aa, Triticum aestivum
MEEAAAGPLHTRVCIIGSGPAAHTAAVYAARAELKPVLFEGWLANDIAAGGQLTTTTDVENFPGFPDGILGIDLMDRCRAQSVRFGTKIFSETVTSVDFSSRPFRVSSDDTVVHADSVVVATGAVARRLHFAGSDAFWNRGITACAVCDGAAPIFRNKPIAVVGGGDSAMEEANFLTKYGSRVYIIHRRDAFRASKIMQARALSNPKIQVVWDSEVVEAYGGSDGGPLGGVKVKNLVTGEVSDFRVAGLFFAIGHEPATKFLAGQLELDSEGYVATKPGSTHTSVKGVFAAGDVQDKKYRQAITAAGSGCMAALDAEHYLQEVGAQEGKTD

SEQ ID NO: 133499 - DNA, 1002 bp, Arabidopsis thaliana
  CDS (1)..(1002)
atgaatggtctcgaaactcacaacacaaggctctgtatcgtaggaagtggcccagcggcacacacggcggcgatttacgcagctagggctgaacttaaacctcttctcttcgaaggatggatggctaacgacatcgctcccggtggtcaactaacaaccaccaccgacgtcgagaatttccccggatttccagaaggtattctcggagtagagctcactgacaaattccgtaaacaatcggagcgattcggtactacgatatttacagagacggtgacgaaagtcgatttctcttcgaaaccgtttaagctattcacagattcaaaagccattctcgctgacgctgtgattctcgctactggagctgtggctaagcggcttagcttcgttggatctggtgaagcttctggaggtttctggaaccgtggaatctccgcttgtgctgtttgcgacggagctgctccgatattccgtaacaaacctcttgcggtgatcggtggaggcgattcagcaatggaagaagcaaactttcttacaaaatatggatctaaagtgtatataatccataggagagatgcttttagagcgtctaagattatgcagcagcgagctttgtctaatcctaagattgatgtgatttggaactcgtctgttgtggaagcttatggagatggagaaagagatgtgcttggaggattgaaagtgaagaatgtggttaccggagatgtttctgatttaaaagtttctggattgttctttgctattggtcatgagccagctaccaagtttttggatggtggtgttgagttagattcggatggttatgttgtcacgaagcctggtactacacagactagcgttcccggagttttcgctgcgggtgatgttcaggataagaagtataggcaagccatcactgctgcaggaactgggtgcatggcagctttggatgcagagcattacttacaagagattggatctcagcaaggtaagagtgattga

SEQ ID NO: 133500 - protein, 333 aa, Arabidopsis thaliana
MNGLETHNTRLCIVGSGPAAHTAAIYAARAELKPLLFEGWMANDIAPGGQLTTTTDVENFPGFPEGILGVELTDKFRKQSERFGTTIFTETVTKVDFSSKPFKLFTDSKAILADAVILATGAVAKRLSFVGSGEASGGFWNRGISACAVCDGAAPIFRNKPLAVIGGGDSAMEEANFLTKYGSKVYIIHRRDAFRASKIMQQRALSNPKIDVIWNSSVVEAYGDGERDVLGGLKVKNVVTGDVSDLKVSGLFFAIGHEPATKFLDGGVELDSDGYVVTKPGTTQTSVPGVFAAGDVQDKKYRQAITAAGTGCMAALDAEHYLQEIGSQQGKSD

SEQ ID NO: 133501 - DNA, 1152 bp, Arabidopsis thaliana
  CDS (1)..(1152)
atgtgttggatctcaatgagccagtcaagattcattataaagtctttatttagcacagcaggaggtttcttacttggatctgctctctcaaatccgccgtctctagccaccgcgttttcttcttcttcctcgtcctcctccgccgccgccgccgtcgacatggaaactcacaaaaccaaggtttgcatcgtcggaagtggaccagcagcacacacggcggcgatctatgcatcgagagcggagcttaagcctcttctcttcgaaggatggatggctaacgacatcgctcccggcggtcaattaactacaacaaccgacgtcgaaaacttccctgggttccctgaaggtattctcggtattgatatcgttgagaaattcagaaaacaatcggagagatttggaactacgatcttcacggaaactgttaacaaagttgatttctcatcgaaaccgtttaagctattcactgattcgagaactgttctcgctgattctgtaatcatttctactggagctgttgctaaacgtcttagcttcactggatctggtgaaggtaatggtggtttttggaatcgtggtatctccgcttgtgctgtttgcgacggagctgctccgatttttaggaataagcctcttgtggttattggtggtggtgattcagctatggaggaagcgaattttctgactaagtatggatctaaggtttatattattcataggagggatacgtttagggcgtctaagattatgcagcagagagctttgtctaaccctaagattgaagtgatttggaactctgccgtggttgaggcgtatggtgatgaaaatggacgtgttcttggaggattgaaggtgaagaatgttgttactggggatgtttcagatctgaaggtgtctggattgttctttgctattggtcatgagccagctacgaagtttttggatgggcagcttgagcttgatgaagatggttatgttgtgaccaagccaggtactactaagacgagcgtggttggtgtatttgctgctggagatgttcaagacaagaagtatagacaggccatcactgctgcaggaactgggtgcatggcggcattggatgcagagcattacttacaagagattggatctcaggagggtaagagtgattga

SEQ ID NO: 133502 - protein, 383 aa, Arabidopsis thaliana
MCWISMSQSRFIIKSLFSTAGGFLLGSALSNPPSLATAFSSSSSSSSAAAAVDMETHKTKVCIVGSGPAAHTAAIYASRAELKPLLFEGWMANDIAPGGQLTTTTDVENFPGFPEGILGIDIVEKFRKQSERFGTTIFTETVNKVDFSSKPFKLFTDSRTVLADSVIISTGAVAKRLSFTGSGEGNGGFWNRGISACAVCDGAAPIFRNKPLVVIGGGDSAMEEANFLTKYGSKVYIIHRRDTFRASKIMQQRALSNPKIEVIWNSAVVEAYGDENGRVLGGLKVKNVVTGDVSDLKVSGLFFAIGHEPATKFLDGQLELDEDGYVVTKPGTTKTSVVGVFAAGDVQDKKYRQAITAAGTGCMAALDAEHYLQEIGSQEGKSD

SEQ ID NO: 133503 - DNA, 1029 bp, Saccharomyces cerevisiae
  CDS (1)..(1029)
atgataaaacatatagtttcgccattcaggacgaattttgttggcatcagcaagtccgtgctgtcaaggatgattcatcacaaggttacaatcataggttctggccccgctgcccacaccgctgctatatacttggcaagagcagagatgaagcccacattatatgagggaatgatggccaacggaattgctgctggtggccaattgacaacaaccaccgatatcgaaaatttcccagggtttcctgaatcgttgagtggcagtgaactgatggagaggatgaggaaacaatctgccaagtttggcactaacataattaccgagactgtctctaaagtcgatttatcttcaaaaccattcagattatggaccgaatttaatgaggatgcagagcctgtgaccactgatgctataatcttggccacgggtgcttccgctaagagaatgcatttaccaggggaggaaacctactggcagcagggaatatctgcctgtgctgtatgtgatggtgcagtccctatctttagaaacaagccattggccgttattggtggtggtgactctgcgtgtgaggaagcggaatttcttacgaagtatgcgtcgaaagtatatatattagtaagaaaggatcattttcgtgcatctgtaataatgcagagacgaattgagaaaaatccaaacatcattgttttgttcaacacagttgcattagaagctaagggtgatggtaagttattgaatatgttgagaattaagaatactaaaagtaatgtggagaacgatttagaagtaaatggactattttacgcaataggtcacagccctgccacagatatagttaaaggacaagtagatgaagaagagacggggtatataaaaactgtgcctggatcgtctctgacttctgtgccaggtttttttgctgcaggtgacgttcaggactctaggtatagacaagcagttacttctgctggttccggatgcattgctgctttggatgcagaacggtacctaagtgcccaagagtaa

SEQ ID NO: 133504 - protein, 342 aa, Saccharomyces cerevisiae
MIKHIVSPFRTNFVGISKSVLSRMIHHKVTIIGSGPAAHTAAIYLARAEMKPTLYEGMMANGIAAGGQLTTTTDIENFPGFPESLSGSELMERMRKQSAKFGTNIITETVSKVDLSSKPFRLWTEFNEDAEPVTTDAIILATGASAKRMHLPGEETYWQQGISACAVCDGAVPIFRNKPLAVIGGGDSACEEAEFLTKYASKVYILVRKDHFRASVIMQRRIEKNPNIIVLFNTVALEAKGDGKLLNMLRIKNTKSNVENDLEVNGLFYAIGHSPATDIVKGQVDEEETGYIKTVPGSSLTSVPGFFAAGDVQDSRYRQAVTSAGSGCIAALDAERYLSAQE

SEQ ID NO: 133505 - DNA, 1011 bp, Ashbya gossypii
  CDS (52)..(1011)
atgctagcagcagcaacaagataccggttgggacaagctttgcagacacgaatggtgcatcacaaagttacgatcattggctccggccctgccgcacacactgcggccatttacctagcgcgcgcggagatcaagccgacgctgtacgagggcatgttcgcgaacggagtggctgcaggcgggcaactgacgacaacgacggagattgagaacttcccggggttccccgacgggctaacgggcagcgacctcatggagcggatgaaggcgcagtccgtgaagttcggaaccgaggtggtgacggagacggtggcgaaggtggacctgtcggcgcggccgttcaagctgtggacggagttcaacgaggacgaggagccgacgacgacggacgcgatcattctggcgacgggcgcgtcggcaaagcggctagggctgccgggcgaggagacgtactggcagcgcggcatttccgcgtgcgcggtatgcgatggcgcggtgccgatcttccgcaacaagccgcttgcggtggtgggcggcggcgactccgcgtgcgaggaggcgagtttcctgaccaagtacgggtcgaaggtgttcatgctggtgcgcaaggaccacatgcgcgcgtcgacgatcatgcagcgccgcgtggagcggaacgagaagatcgaggtgctgtacaacaccgctccggtcgaggccaagggcgacggctcgctgctcgacgcgctgcgtgtgcgcgacacgcgcaccggtgaggagtcggacctgcccgttaacgggctgttctacgcaatcggccacacccctgccacgcagcttgtggccggccaggtcgacctggacgagtccggctacgtgaagactgtgcccggctccaccctcacaaatgtccccgggctcttcgctgcgggcgacgtgcaggactcgcgctacagacaggccgtcacctcggccggctccggctgcatggccgcgctcgatgccgagaagttcctgtctgagctggaatag

SEQ ID NO: 133506 - protein, 319 aa, Ashbya gossypii
MVHHKVTIIGSGPAAHTAAIYLARAEIKPTLYEGMFANGVAAGGQLTTTTEIENFPGFPDGLTGSDLMERMKAQSVKFGTEVVTETVAKVDLSARPFKLWTEFNEDEEPTTTDAIILATGASAKRLGLPGEETYWQRGISACAVCDGAVPIFRNKPLAVVGGGDSACEEASFLTKYGSKVFMLVRKDHMRASTIMQRRVERNEKIEVLYNTAPVEAKGDGSLLDALRVRDTRTGEESDLPVNGLFYAIGHTPATQLVAGQVDLDESGYVKTVPGSTLTNVPGLFAAGDVQDSRYRQAVTSAGSGCMAALDAEKFLSELE

SEQ ID NO: 133507 - DNA, 936 bp, Chlamydia pneumoniae
  CDS (1)..(936): transl_table=11
atgattcattcccggttaattattattggttcaggtccatctggatatacagcggcaatttatgcatcaagagcgcttttgcatcctcttttatttgaggggtttttctctgggatctctggtggccagcttatgactacaacagaagttgagaattttccagggtttcctgaagggattcttgggccaaaacttatgaataatatgaaggagcaggctgtgcggtttgggaccaagacactagctcaagatattatttccgtagatttttctgttcgcccttttattttgaaatcaaaagaagaaacctattcttgtgatgcctgtatcatagctacaggagcttctgctaaacgtttagaaattcctggagcaggaaacgatgaattttggcaaaaaggagtgactgcttgtgccgtttgcgatggggcttctcctatttttaaaaataaagatctttatgtgattgggggaggggattctgctttagaagaagctctttacctgactcgttatggaagccacgtatatgtagttcatcgtagagataaactgcgggcttctaaagctatggaagctcgggcgcaaaacaatgaaaaaattacatttttatggaatagcgagattgtaaaaatttctggagatagcattgtccgttccgtagatattaagaatgttcagactcaagaaattacaactagagaagctgcgggggtgttctttgctataggccataagccaaatacggattttctcggaggacagctgacgttagatgagtcgggctatattgtgactgagaaaggaacgtccaagacttctgtccctggagtatttgctgctggagatgttcaggataagtactatcgtcaggcggttacttctgcaggaagtggttgtatagcagcactagatgctgaaagattcttaggctaa

SEQ ID NO: 133508 - protein, 311 aa, Chlamydia pneumoniae
MIHSRLIIIGSGPSGYTAAIYASRALLHPLLFEGFFSGISGGQLMTTTEVENFPGFPEGILGPKLMNNMKEQAVRFGTKTLAQDIISVDFSVRPFILKSKEETYSCDACIIATGASAKRLEIPGAGNDEFWQKGVTACAVCDGASPIFKNKDLYVIGGGDSALEEALYLTRYGSHVYVVHRRDKLRASKAMEARAQNNEKITFLWNSEIVKISGDSIVRSVDIKNVQTQEITTREAAGVFFAIGHKPNTDFLGGQLTLDESGYIVTEKGTSKTSVPGVFAAGDVQDKYYRQAVTSAGSGCIAALDAERFLG

SEQ ID NO: 133509 - DNA, 966 bp, Escherichia coli O157
  CDS (1)..(966): transl_table=11
atgggcacgaccaaacacagtaaactgcttatcctgggttcaggcccggcgggatacaccgctgctgtctatgcggcgcgcgccaacctgcaacctgtgctgattaccggcatggaaaaaggcggccaactgaccaccaccacggaagtggaaaactggcctggcgatccaaacgatctgaccggtccgttattaatggagcgcatgcacgaacatgccaccaagtttgaaactgagatcatttttgatcatatcaacaaggtggatctgcaaaaccgtccgttccgtctgaatggcgataacggcgaatacacttgcgacgcgctgattattgccaccggagcttctgcacgctatctcggcctgccctctgaagaagcctttaaaggccgtggagtttctgcttgtgcaacctgcgacggtttcttctatcgcaaccagaaagttgcggtcatcggcggcggcaataccgcggttgaagaggcgctgtatctgtctaacatcgcttcggaagtgcatctgattcaccgccgtgacggtttccgcgcggaaaaaatcctcattaagcgtctgatggataaagtggagaacggcaacatcattctgcacaccaaccgtacgctggaagaagtgaccggcgatcaaatgggtgtcactggcgttcgtctgcgcgatacgcaaaacagcgataacatcgagtcactcgacgttgccggtctgtttgttgctatcggtcacagcccgaatactgccattttcgaagggcagctggaactggaaaacggctacatcaaagtgcagtcgggtattcatggtaatgccacccagaccagcattcctggcgtctttgccgcaggcgacgtgatggatcacatttatcgccaggccattacatctgctggtacaggctgcatggcagcacttgatgcggaacgctacctcgatggtttagctgacgcaaaataa

SEQ ID NO: 133510 - protein, 321 aa, Escherichia coli O157
MGTTKHSKLLILGSGPAGYTAAVYAARANLQPVLITGMEKGGQLTTTTEVENWPGDPNDLTGPLLMERMHEHATKFETEIIFDHINKVDLQNRPFRLNGDNGEYTCDALIIATGASARYLGLPSEEAFKGRGVSACATCDGFFYRNQKVAVIGGGNTAVEEALYLSNIASEVHLIHRRDGFRAEKILIKRLMDKVENGNIILHTNRTLEEVTGDQMGVTGVRLRDTQNSDNIESLDVAGLFVAIGHSPNTAIFEGQLELENGYIKVQSGIHGNATQTSIPGVFAAGDVMDHIYRQAITSAGTGCMAALDAERYLDGLADAK

SEQ ID NO: 133511 - DNA, 1050 bp, Kluyveromyces lactis
  CDS (1)..(1050)
atgcttttagtgagaaatagtacattaggacgattatcatcattaagagggttttttagaaatatcaacgagagtaatatattctacagaatggttcatcacaaggttacaattattgggtccggcccagctgcccacactgctgccatttacttggctagagcagagatcaaacctactttgtacgaaggtttcatggccaatggtattgctgctggtggtcaattgactaccaccactgaaattgaaaatttccccggcttcccagatggtttgactggtagtgaattgatggatagaatgaaggctcaatctatcaagttcggtaccgatgttatcactgaaactgtttcaaaggttgatctttcttctagacctttcaagttctggactgagtttaacgaggatcaagaacctgagaccacagatgccattatcttgtctactggtgcttcagccaagcgtttgcacttgcctggtgaagaaacttactggcaacaaggtatttcagcttgtgctgtttgtgatggtgctgttccaatcttcagaaacaagccattggctgttatcggtggtggtgactctgcttgtgaagaagctcaattcttgaccaaatatggttccaaggtttacatgttggtcagaaaggaccatctacgtgcttctcaaatcatgcaaagacgtgctgaacagaatgaaaagatagaaattctatacaaccatgtcactttggaagctaaaggtgatggtaaatacttgaacgctttaaaggtaaaaaacgttaaaaccaacgaagaatatgatctaccagtcaacgggttgttctacgccattggtcacacccctgccactaacattgttgctggtcaagttgatcttgacgaagccggctatgttaagaccgtgccaggttccactttgaccaatgtcccaggtgtctttgctgctggtgatgttcaagacgccagatacagacaagcaatcacatctgctggttccggttgtatggctgctttggatgctgaaaagtacatcactgaattagaatag

SEQ ID NO: 133512 - protein, 349 aa, Kluyveromyces lactis
MLLVRNSTLGRLSSLRGFFRNINESNIFYRMVHHKVTIIGSGPAAHTAAIYLARAEIKPTLYEGFMANGIAAGGQLTTTTEIENFPGFPDGLTGSELMDRMKAQSIKFGTDVITETVSKVDLSSRPFKFWTEFNEDQEPETTDAIILSTGASAKRLHLPGEETYWQQGISACAVCDGAVPIFRNKPLAVIGGGDSACEEAQFLTKYGSKVYMLVRKDHLRASQIMQRRAEQNEKIEILYNHVTLEAKGDGKYLNALKVKNVKTNEEYDLPVNGLFYAIGHTPATNIVAGQVDLDEAGYVKTVPGSTLTNVPGVFAAGDVQDARYRQAITSAGSGCMAALDAEKYITELE

SEQ ID NO: 133513 - DNA, 1377 bp, Mycobacterium leprae
  CDS (1)..(1377): transl_table=11
atgaacaccactccttctgcgcatgagacgatacacgaagtgatcgttattggctccggtccagcaggctacactgctgccctgtacgccgctcgtgcacagctaacaccgctggtatttgagggtacctcattcggcggcgcgctgatgaccaccaccgaggtggaaaactacccaggttttcgcaacggcataaccggcccggagttgatggacgatatgcgtgaacaggcactgcgattcggcgcggaactgcggaccgaagacgtcgagtcggtatcattgcgtggcccgatcaaatcggtcgtcaccgctgaaggacagacttatcaggcccgagccgtcatcctcgccatgggtacctccgtgcgttatctacagatccccggcgagcaagaattgctaggacgtggcgtgagtgcatgcgcgacctgcgacgggtcctttttccgcggccaagacattgccgtcattggcggtggagactcagcgatggaggaagccctctttttgacccggttcgcccgcagcgtcacgctcgtgcaccgccgcgacgaattccgagcttctaagatcatgctcggtcgcgcccgtaacaatgacaagatcaaattcatcaccaaccacaccgtggtcgcggtgaacgggtatacaacagtgaccggattgcggttgcgtaacaccacaacgggagaggaaaccacgctagtagtgaccggggtttttgttgcaattggccatgaaccacgttccagcctggtgagcgatgtcgtcgacatagacccggatggctacgtcctggtgaaaggacgtacgacgagtacatcgatggacggcgtttttgcggccggcgacctggtagatcgcacctaccggcaggcgatcactgccgcaggtagtggctgtgccgccgccatcgacgccgaacgttggttggcggagcatgccgggtcaaaagctaacgaaacaacagaggaaactggagacgttgacagtaccgacacaaccgattggagcactgcgatgactgacgccaagaacgccggggtcacaatagaagtgaccgatgcttcctttttcgcagacgtcttatccagtaataagcctgtgttagttgatttttgggcaacatggtgtggaccctgcaagatggtagcgccggtactcgaagagatcgcgtccgaacaacgaaaccagctcactgtcgccaagttagatgtagacaccaacccggaaatggcacgcgagttccaggtcgtgtcgatacccacaatgattctgttccagggtggccaaccagtaaaacgcatcgttggcgctaagggcaaagcagcgttactacgtgacctttccgacgtggtacctaacctcaattag

SEQ ID NO: 133514 - protein, 458 aa, Mycobacterium leprae
MNTTPSAHETIHEVIVIGSGPAGYTAALYAARAQLTPLVFEGTSFGGALMTTTEVENYPGFRNGITGPELMDDMREQALRFGAELRTEDVESVSLRGPIKSVVTAEGQTYQARAVILAMGTSVRYLQIPGEQELLGRGVSACATCDGSFFRGQDIAVIGGGDSAMEEALFLTRFARSVTLVHRRDEFRASKIMLGRARNNDKIKFITNHTVVAVNGYTTVTGLRLRNTTTGEETTLVVTGVFVAIGHEPRSSLVSDVVDIDPDGYVLVKGRTTSTSMDGVFAAGDLVDRTYRQAITAAGSGCAAAIDAERWLAEHAGSKANETTEETGDVDSTDTTDWSTAMTDAKNAGVTIEVTDASFFADVLSSNKPVLVDFWATWCGPCKMVAPVLEEIASEQRNQLTVAKLDVDTNPEMAREFQVVSIPTMILFQGGQPVKRIVGAKGKAALLRDLSDVVPNLN

SEQ ID NO: 133515 - DNA, 1005 bp, Neurospora crassa; identical to SEQ ID NO: 56564
  CDS (1)..(1005)

SEQ ID NO: 133516 - protein, 334 aa, Neurospora crassa; identical to SEQ ID NO: 56565

SEQ ID NO: 133517 - DNA, 978 bp, Pneumocystis carinii
  CDS (1)..(978)
atgcactcaaaggtggtaatcattggatcagggccttctggtcatacggcagctatttatcttggaagagcagaattgaagccgattctttatgaaggaatgttagctaatggtattgcaccaggtggacagttaacaacaacaacagatgtagaaaattatccgggatttcctgatggtattttgggtccatcattaatggaggcttttagaaagcaatcagaaaaatatggagctcaaattataacagatacagtttctaagcttgatctgtcaaagcgtccatttaaatattgttgcgagtctaatgaagaggtgtttcatacagcagatgtggttatattagcaacaggtgcatatgctcgaagattgaatatccctggtgaagagatatattggcagcgtggtatttctgcatgtgcagtttgtgatggtgcagcacctatttttcgaggaaagcctcttgcagttgtaggagggggggattctgcagcagaagaatcattatttttaacaagatatgcaacaaaggtttatctattagttcgaagggataagctaagagcatcgccaattatggctaaacgattattacatcatcctaagattgaaattctatggaatacagtagctttggaatcattgggagataataacttgatgaactgtgtaaaaattaaaaatgttaaaacgcaagaagtttcagagttacaagtgaatggtctcttctatgcaattggtcatgagccagcaacaacattagttagaggtcaagtagaatgcgataaagatgggtatattattacaaaaaatgggggacctgaaacaaatataaagggtttttttgcagcaggcgatgttcaagataaaaaatggaggcaagcagtgacatctgcaggaagtggatgtatggcaggacttgcagctgaacgactattagctgaagaagaagaaatgaagaatatagaagatagttaa

SEQ ID NO: 133518 - protein, 325 aa, Pneumocystis carinii
MHSKVVIIGSGPSGHTAAIYLGRAELKPILYEGMLANGIAPGGQLTTTTDVENYPGFPDGILGPSLMEAFRKQSEKYGAQIITDTVSKLDLSKRPFKYCCESNEEVFHTADVVILATGAYARRLNIPGEEIYWQRGISACAVCDGAAPIFRGKPLAVVGGGDSAAEESLFLTRYATKVYLLVRRDKLRASPIMAKRLLHHPKIEILWNTVALESLGDNNLMNCVKIKNVKTQEVSELQVNGLFYAIGHEPATTLVRGQVECDKDGYIITKNGGPETNIKGFFAAGDVQDKKWRQAVTSAGSGCMAGLAAERLLAEEEEMKNIEDS

SEQ ID NO: 133519 - DNA, 984 bp, Pneumocystis jiroveci
  CDS (1)..(984)
atgcattcaaaagtaataattattggatcaggcccagcaggtcatactgcagctatttatcttgcaagagctgaattaaaacctgttttatatgaaggaatgttagcaaatggtattgcagcaggtggacaattaacaacaacgactgatgttgaaaattatcctggatttcctgatggcattatggggcctttattaatggagaagttccgggaacaatcagtaaagtatgggacatgtattataacagaaacagtatcaaagcttgatttatcaaaacgcccttttaaatattggtgtgaatctgatgaaaatacatgtcatacggcagatgtagttgtgatggcaactggggcgtatgctcgacgattacatattccaggtgaagagacatattggcagcgcggaatttcagcctgtgctgtatgtgatggggcagcaccaatatttcgaggaaaatgtctttcagtcgtaggaggtggagattctgctgcagaagaatcgttatttttaacgagatatgcaactaaagtatatctacttgttaggagggacaaattaagggcttcagcagttatggctaaaagattacttaatcatcctaaaattgaagttatctggaatacagtagtgttacggtcactcggtgatggtcatttgttaaatcgtttggaaattaaaaatgttaaaacgcaagttgtttcagaattacatgttagtggtctcttttatgcaattggtcatgaaccagcaacggctttagttcgaggtcaagttgaatgtgatgataatggatatattattacgaagaatggtggccctgaaacaaatattaagggattttttgcagcaggtgatgttcaagacaaaaagtggcgacaagcagttacgtctgcgggcagtggatgtatggcaggacttgcagctgaacgattattagcagaagaggaagaaatgaaaaatatagaaaaaaataagaaatag

SEQ ID NO: 133520 - protein, 327 aa, Pneumocystis jiroveci
MHSKVIIIGSGPAGHTAAIYLARAELKPVLYEGMLANGIAAGGQLTTTTDVENYPGFPDGIMGPLLMEKFREQSVKYGTCIITETVSKLDLSKRPFKYWCESDENTCHTADVVVMATGAYARRLHIPGEETYWQRGISACAVCDGAAPIFRGKCLSVVGGGDSAAEESLFLTRYATKVYLLVRRDKLRASAVMAKRLLNHPKIEVIWNTVVLRSLGDGHLLNRLEIKNVKTQVVSELHVSGLFYAIGHEPATALVRGQVECDDNGYIITKNGGPETNIKGFFAAGDVQDKKWRQAVTSAGSGCMAGLAAERLLAEEEEMKNIEKNKK

SEQ ID NO: 133521 - DNA, 969 bp, Schizosaccharomyces pombe
  CDS (1)..(969)
atgactcacaacaaggttgttattattgggtctggtcccgccggccatactgcagccatctatctcgcccgtggtgagcttaagcccgtaatgtacgaaggtatgcttgccaacggtattgctgctggtggtcagcttactactaccaccgatgtcgaaaactttcctggttttcccgatggtatcaatggtactacccttactgaaaacttccgcgctcaatctttgcgttttggaactgaaattattaccgagactgtttccaaattagatctttcttctcgccctttcaagtactggttggagggtgctgaagaggaagagcctcataccgctgacagcgttattttggctactggtgcttccgctcgtcgccttcacattactggtgaggatacttattggcaagcaggtatatctgcttgtgctgtatgtgatggtgccgttcccatttatcgtaacaagcctcttgctgtcgttggtggtggtgactctgctgccgaagaggcccagtttttaacaaagtatggtagcaaagtttatgtccttgtgcgccgtgacaagcttcgtgcttctcccattatggccaagcgtcttttggctaaccctaaggtggaagttttgtggaacaccgttgctgaggaggcccaaggcgatggcaagttgctcaataaccttcgtatcaagaataccaacacgaatgaagtctctgatcttcaggttaacggactcttttatgctattggacatatccctgctactaagttagtagctgaacaaattgagcttgatgaagccggttacattaaaactattaatggaactcctcgtacttcaattcctggcttttttgccgctggtgatgttcaagataaggtcttccgccaagccatcacttctgctggaagtggttgtcaagcagctttattggctatgcattaccttgaagaattggaagataccgattag

SEQ ID NO: 133522 - protein, 322 aa, Schizosaccharomyces pombe
MTHNKVVIIGSGPAGHTAAIYLARGELKPVMYEGMLANGIAAGGQLTTTTDVENFPGFPDGINGTTLTENFRAQSLRFGTEIITETVSKLDLSSRPFKYWLEGAEEEEPHTADSVILATGASARRLHITGEDTYWQAGISACAVCDGAVPIYRNKPLAVVGGGDSAAEEAQFLTKYGSKVYVLVRRDKLRASPIMAKRLLANPKVEVLWNTVAEEAQGDGKLLNNLRIKNTNTNEVSDLQVNGLFYAIGHIPATKLVAEQIELDEAGYIKTINGTPRTSIPGFFAAGDVQDKVFRQAITSAGSGCQAALLAMHYLEELEDTD

SEQ ID NO: 133523 - DNA, 969 bp, Streptomyces clavuligerus
  CDS (1)..(969): transl_table=11
gtgagcgacgtccgtaacgtgatcatcatcggctccggtccggccggctacacggcggcgctctacacggcgcgcgcttcccttcagccgctggtgttcgagggagccgtcaccgccggtggcgccctgatgaacaccaccgatgtggagaacttccccgggttccgcgacgggatcatgggcccggatctgatggacaacatgcgggcgcaggccgagcgcttcggcgccgagctgatcccggacgatgtggtctcggtcgacctcaccggcgacatcaagaccgtcacggactccgcgggcacggtccaccgggccaaggccgtcatcgtcaccaccggttcccagcaccgcaagctgggcctcccccgtgaggacgcgctctccggccggggagtctcctggtgcgccacgtgcgacggcttcttcttcaaggaccaggacatcgtcgtggtgggtggcggcgacaccgccatggaggaggcgaccttcctctcccggttcgccaagtctgtcaccatcgtccaccgccgggactcgctgcgcgcctcgaaggccatgcaggaccgggccttcgccgacccgaagatcagcttcgcctggaacagcgaggtcgccacgatccacggtgagcagaagctcacggggctgaccctgcgcgacaccaagacgggtgagacgcgggagctggccgccacgggactcttcatcgccgtgggccacgacccccgcaccgagctgttcaagggccagctcgacctggacgacgagggctacctcaaggtcgcctcgccgtcgacccgcaccaacctcaccggggtcttcgcggcgggtgacgtggtcgaccacacctaccgtcaggccatcaccgccgccggcacgggctgctcggccgcgctcgatgccgagcgttacctcgcggccctcgccgacagtgagcagatcgcagagcccgcccctgcggtctga

SEQ ID NO: 133524 - protein, 322 aa, Streptomyces clavuligerus
MSDVRNVIIIGSGPAGYTAALYTARASLQPLVFEGAVTAGGALMNTTDVENFPGFRDGIMGPDLMDNMRAQAERFGAELIPDDVVSVDLTGDIKTVTDSAGTVHRAKAVIVTTGSQHRKLGLPREDALSGRGVSWCATCDGFFFKDQDIVVVGGGDTAMEEATFLSRFAKSVTIVHRRDSLRASKAMQDRAFADPKISFAWNSEVATIHGEQKLTGLTLRDTKTGETRELAATGLFIAVGHDPRTELFKGQLDLDDEGYLKVASPSTRTNLTGVFAAGDVVDHTYRQAITAAGTGCSAALDAERYLAALADSEQIAEPAPAV

SEQ ID NO: 133525 - DNA, 969 bp, Streptomyces coelicolor
  CDS (1)..(969): transl_table=11
gtgagcgacgtccgaaacgtgatcatcatcggctccgggcccgccggctacacggcggcgctctacaccgcgcgagcatccctgaagccgctggtgttcgagggtgccgtcaccgcgggcggagcgctgatgaacaccaccgaggtggagaacttccccggcttccaggacggcatcatgggccccgagctcatggacaacatgcgggcccaggcggagcgcttcggcgccgagctgatcccggacgacgtcgtggccgtcgacctcagcggcgagatcaagaccgtcaccgacaccgcgggcacggtccaccgggccaaggccgtgatcgtcaccaccggctcccagcaccgcaagctcggcctgccgaacgaggacgcgctgtccggtcgcggtgtctcctggtgcgcgacctgtgacggcttcttcttcaaggaccaggacatcgccgtgatcggcggcggggacaccgcgatggaggaggccaccttcctctcccgcttcgcgaagtccgtgacgatcgtccaccgccgggacaccctgcgcgcctccaaggcgatgcaggagcgtgccttcgccgaccccaagatctcgttcgtctgggacagcgaggtcgccgaggtccagggcgaccagaagcttgcgggcctgaagctgcgcaacgtcaagaccggcgagctctccgatctgccggtgaccggcctgttcatcgcgatcggccacgacccgcgcaccgagctcttcaagggccagctcgacctggacccggagggctacctgaaggtcgacgcgccctcgacgcgcaccaacctgacgggtgtcttcggggccggtgacgtggtcgaccacacctaccgacaggcgatcaccgctgcgggcaccggctgctccgccgcggtcgacgccgagccgttcctcgccgccctcagcgacgaggacaaggcggagcccgagaagaccgcggtctga

SEQ ID NO: 133526 - protein, 322 aa, Streptomyces coelicolor
MSDVRNVIIIGSGPAGYTAALYTARASLKPLVFEGAVTAGGALMNTTEVENFPGFQDGIMGPELMDNMRAQAERFGAELIPDDVVAVDLSGEIKTVTDTAGTVHRAKAVIVTTGSQHRKLGLPNEDALSGRGVSWCATCDGFFFKDQDIAVIGGGDTAMEEATFLSRFAKSVTIVHRRDTLRASKAMQERAFADPKISFVWDSEVAEVQGDQKLAGLKLRNVKTGELSDLPVTGLFIAIGHDPRTELFKGQLDLDPEGYLKVDAPSTRTNLTGVFGAGDVVDHTYRQAITAAGTGCSAAVDAEPFLAALSDEDKAEPEKTAV

SEQ ID NO: 133527 - DNA, 960 bp, Yarrowia lipolytica
  CDS (1)..(960)
atgacccacagcccagttgttatcatcggttccggccccgccgcccacaccgctgccatctacctttctcgagccgagatcaagcccactctctacgagggaatgatggccaacggcattgctgccggcggtcagctcaccactaccactgagattgagaacttccccggcttccccgacggaatcatgggctcccagctcatggaggacatgcgaaagcagtccatccgattcggcaccgagatcatcaccgagaccgtctccaaggtcgatctgtcccagcgacccttcaagtactggaccgagttcaatgaggacgaggagccccacactgccgacgccattattcttgccaccggtgcctctgccaagcgactctctctgcccggtgaggaccagtactggcagcagggtatctctgcctgcgctgtctgtgacggtgctgtccccattttccgaaacaagcctctcgccgttgtcggaggaggagactctgccgctgaggaggccctcttcctcaccaagtacggctccaaggtctacgtcattgtccgaaaggacaagctgcgagcttccgccgttatggccaagcgactggcctcccaccccaaggtcgagattctcttcaaccacgtgtccatcgaggccaagggagacggcaagctgctgaacgccctggagatcgagaacaccctgaccggcgagaagcgagacctcgaggtcaacggtctgttctacgccattggtcacatccccgccacctccatcgtcaagggccaggtcgagaccgacgaggagggctacgttgttaccgtccccggtaccgccaacacctccgtcaagggtgtctttgccgctggtgatgtccaggacaagcgataccgacaggccattacctctgctggtaccggctgcatggctgctctcgactgtgagaagctgcttgctgaggaggaatag

SEQ ID NO: 133528 - protein, 319 aa, Yarrowia lipolytica
MTHSPVVIIGSGPAAHTAAIYLSRAEIKPTLYEGMMANGIAAGGQLTTTTEIENFPGFPDGIMGSQLMEDMRKQSIRFGTEIITETVSKVDLSQRPFKYWTEFNEDEEPHTADAIILATGASAKRLSLPGEDQYWQQGISACAVCDGAVPIFRNKPLAVVGGGDSAAEEALFLTKYGSKVYVIVRKDKLRASAVMAKRLASHPKVEILFNHVSIEAKGDGKLLNALEIENTLTGEKRDLEVNGLFYAIGHIPATSIVKGQVETDEEGYVVTVPGTANTSVKGVFAAGDVQDKRYRQAITSAGTGCMAALDCEKLLAEEE

SEQ ID NO: 133529 - DNA, 1548 bp, Oryza sativa; identical to SEQ ID NO: 56568
  CDS (1)..(1548)

SEQ ID NO: 133530 - protein, 515 aa, Oryza sativa; identical to SEQ ID NO: 56569

SEQ ID NO: 133531 - DNA, 22 bp, Artificial sequence
  primer
atggctgcgtctcccaagatag

SEQ ID NO: 133532 - DNA, 24 bp, Artificial sequence
  primer
tcatttattggcctcaatgaattc

SEQ ID NO: 133533 - protein, 335 aa, Artificial sequence
  consensus sequence
  Variant (2)..(2): Xaa in position 2 is any amino acid
  Variant (8)..(9): Xaa in position 8 to 9 is any amino acid
  Variant (13)..(13): Xaa in position 13 is any amino acid
  Variant (15)..(15): Xaa in position 15 is any amino acid
  Variant (19)..(19): Xaa in position 19 is any amino acid
  Variant (21)..(21): Xaa in position 21 is any amino acid
  Variant (23)..(26): Xaa in position 23 to 26 is any amino acid
  Variant (28)..(30): Xaa in position 28 to 30 is any amino acid
  Variant (31)..(38): Xaa in position 31 to 38 is any or no amino acid
  Variant (43)..(43): Xaa in position 43 is any amino acid
  Variant (47)..(47): Xaa in position 47 is any amino acid
  Variant (51)..(51): Xaa in position 51 is any amino acid
  Variant (55)..(56): Xaa in position 55 to 56 is any amino acid
  Variant (58)..(59): Xaa in position 58 to 59 is any amino acid
  Variant (61)..(62): Xaa in position 61 to 62 is any amino acid
  Variant (65)..(69): Xaa in position 65 to 69 is any amino acid
  Variant (71)..(72): Xaa in position 71 to 72 is any amino acid
  Variant (74)..(74): Xaa in position 74 is any amino acid
  Variant (76)..(86): Xaa in position 76 to 86 is any amino acid
  Variant (87)..(87): Xaa in position 87 is any or no amino acid
  Variant (89)..(92): Xaa in position 89 to 92 is any amino acid
  Variant (93)..(93): Xaa in position 93 is any or no amino acid
  Variant (95)..(108): Xaa in position 95 to 108 is any amino acid
  Variant (109)..(116): Xaa in position 109 to 116 is any or no amino acid
  Variant (118)..(118): Xaa in position 118 is any amino acid
  Variant (123)..(123): Xaa in position 123 is any amino acid
  Variant (125)..(126): Xaa in position 125 to 126 is any amino acid
  Variant (128)..(131): Xaa in position 128 to 131 is any amino acid
  Variant (133)..(138): Xaa in position 133 to 138 is any amino acid
  Variant (139)..(142): Xaa in position 139 to 142 is any or no amino acid
  Variant (144)..(144): Xaa in position 144 is any amino acid
  Variant (149)..(149): Xaa in position 149 is any amino acid
  Variant (153)..(161): Xaa in position 153 to 161 is any amino acid
  Variant (162)..(163): Xaa in position 162 to 163 is any or no amino acid
  Variant (165)..(165): Xaa in position 165 is any amino acid
  Variant (169)..(170): Xaa in position 169 to 170 is any amino acid
  Variant (172)..(172): Xaa in position 172 is any amino acid
  Variant (176)..(177): Xaa in position 176 to 177 is any amino acid
  Variant (179)..(183): Xaa in position 179 to 183 is any amino acid
  Variant (184)..(184): Xaa in position 184 is any or no amino acid
  Variant (186)..(189): Xaa in position 186 to 189 is any amino acid
  Variant (191)..(194): Xaa in position 191 to 194 is any amino acid
  Variant (197)..(202): Xaa in position 197 to 202 is any amino acid
  Variant (204)..(209): Xaa in position 204 to 209 is any amino acid
  Variant (210)..(212): Xaa in position 210 to 212 is any or no amino acid
  Variant (214)..(225): Xaa in position 214 to 225 is any amino acid
  Variant (227)..(248): Xaa in position 227 to 248 is any amino acid
  Variant (249)..(256): Xaa in position 249 to 256 is any or no amino acid
  Variant (258)..(258): Xaa in position 258 is any amino acid
  Variant (260)..(260): Xaa in position 260 is any amino acid
  Variant (265)..(265): Xaa in position 265 is any amino acid
  Variant (267)..(267): Xaa in position 267 is any amino acid
  Variant (269)..(273): Xaa in position 269 to 273 is any amino acid
  Variant (274)..(274): Xaa in position 274 is any or no amino acid
  Variant (276)..(280): Xaa in position 276 to 280 is any amino acid
  Variant (281)..(281): Xaa in position 281 is any or no amino acid
  Variant (284)..(291): Xaa in position 284 to 291 is any amino acid
  Variant (292)..(296): Xaa in position 292 to 296 is any or no amino acid
  Variant (298)..(300): Xaa in position 298 to 300 is any amino acid
  Variant (309)..(309): Xaa in position 309 is any amino acid
  Variant (311)..(313): Xaa in position 311 to 313 is any amino acid
  Variant (317)..(317): Xaa in position 317 is any amino acid
  Variant (319)..(319): Xaa in position 319 is any amino acid
  Variant (322)..(322): Xaa in position 322 is any amino acid
  Variant (324)..(327): Xaa in position 324 to 327 is any amino acid
  Variant (329)..(329): Xaa in position 329 is any amino acid
  Variant (333)..(333): Xaa in position 333 is any amino acid
IXGSGPAXXTAAXYXARAXLXPXXXXGXXXXXXXXXXXGGQLXTTTXVENXPGFXXGXXGXXLMXXXXXQXXRXGXXXXXXXXXXXXDXXXXXPXXXXXXXXXXXXXXXXXXXXXXIXATGAXAXXLXXXXEXXXXXXXXXXGXSACAXCDGXXXXXXXXXXXVXGGGXXAXEEAXXLXXXXXXVXXXXRXXXXRAXXXXXXRXXXXXXXXXIXXXXXXXXXXXXGXXXXXXXXXXXXXXXXXXXXXXXXXXXXXXGXFXAIGHXPXTXXXXXXQXXXXXXGYXXXXXXXXXXXXXTXXXGVFAAGDVXDXXXRQAXTXAGXGXXXXCXAALXAE

SEQ ID NO: 133534 - protein, 28 aa, Artificial sequence
  protein pattern
  Variant (2)..(2): Xaa in position 2 is Asp, Gly, Asn or Ser
  Variant (3)..(4): Xaa in position 3 to 4 is any amino acid
  Variant (6)..(6): Xaa in position 6 is Phe, Ile, Leu or Val
  Variant (9)..(9): Xaa in position 9 is Ala or Cys
  Variant (12)..(12): Xaa in position 12 is any or no amino acid
  Variant (14)..(14): Xaa in position 14 is any or no amino acid
  Variant (16)..(17): Xaa in position 16 to 17 is any amino acid
  Variant (18)..(18): Xaa in position 18 is Phe, Trp or Tyr
  Variant (21)..(21): Xaa in position 21 is Ala or Gly
  Variant (22)..(22): Xaa in position 22 is Ile or Val
  Variant (24)..(24): Xaa in position 24 is Ala or Ser
  Variant (26)..(26): Xaa in position 26 is Ala or Gly
  Variant (27)..(27): Xaa in position 27 is any amino acid
TXXXGXFAXGDXVXDXXXRQXXTXAXXG

SEQ ID NO: 133535 - protein, 19 aa, Artificial sequence
  protein pattern
  Variant (2)..(2): Xaa in position 2 is Ile or Val
  Variant (6)..(6): Xaa in position 6 is Asp or Asn
  Variant (7)..(7): Xaa in position 7 is Ser or Thr
  Variant (9)..(9): Xaa in position 9 is any amino acid
  Variant (13)..(13): Xaa in position 13 is any amino acid
  Variant (14)..(14): Xaa in position 14 is Phe or Tyr
  Variant (16)..(16): Xaa in position 16 is Ser or Thr
  Variant (17)..(18): Xaa in position 17 to 18 is any amino acid
  Variant (19)..(19): Xaa in position 19 is Ala or Gly
VXGGGXXAXEEAXXLXXXX

SEQ ID NO: 133536 - protein, 19 aa, Artificial sequence
  protein pattern
  Variant (3)..(3): Xaa in position 3 is Ala, Gln or Ser
  Variant (5)..(6): Xaa in position 5 to 6 is any amino acid
  Variant (9)..(9): Xaa in position 9 is any amino acid
  Variant (13)..(13): Xaa in position 13 is Phe, Trp or Tyr
  Variant (16)..(18): Xaa in position 16 to 18 is any amino acid
  Variant (19)..(19): Xaa in position 19 is Asp, Gly or Val
GGXLXXTTXVENXPGXXXX

SEQ ID NO: 133537 - protein, 21 aa, Artificial sequence
  protein pattern
  Variant (5)..(5): Xaa in position 5 is Ala, Gly or Ser
  Variant (6)..(6): Xaa in position 6 is Ala or Gly
  Variant (7)..(7): Xaa in position 7 is any amino acid
  Variant (11)..(11): Xaa in position 11 is Ile, Leu or Val
  Variant (13)..(13): Xaa in position 13 is any or no amino acid
  Variant (15)..(16): Xaa in position 15 to 16 is any or no amino acid
  Variant (18)..(18): Xaa in position 18 is any amino acid
  Variant (19)..(19): Xaa in position 19 is Ala, Ile or Leu
  Variant (20)..(20): Xaa in position 20 is any amino acid
  Variant (21)..(21): Xaa in position 21 is Leu or Pro
GSGPXXXTAAXYXAXXAXXXX

SEQ ID NO: 133538 - protein, 17 aa, Artificial sequence
  protein pattern
  Variant (2)..(5): Xaa in position 2 to 5 is any amino acid
  Variant (6)..(6): Xaa in position 6 is Gly, Asn, Gln or Ser
  Variant (7)..(7): Xaa in position 7 is any amino acid
  Variant (9)..(9): Xaa in position 9 is Ile or Val
  Variant (11)..(11): Xaa in position 11 is any amino acid
  Variant (14)..(14): Xaa in position 14 is any amino acid
EXXXXXXGXSXCAXCDG

SEQ ID NO: 133539 - protein, 18 aa, Artificial sequence
  protein pattern
  Variant (2)..(3): Xaa in position 2 to 3 is any amino acid
  Variant (4)..(4): Xaa in position 4 is any or no amino acid
  Variant (8)..(8): Xaa in position 8 is any amino acid
  Variant (10)..(10): Xaa in position 10 is any amino acid
  Variant (11)..(11): Xaa in position 11 is Ser or Thr
  Variant (12)..(12): Xaa in position 12 is any amino acid
  Variant (13)..(13): Xaa in position 13 is Phe, Ile or Leu
  Variant (14)..(14): Xaa in position 14 is Phe, Leu or Val
  Variant (15)..(15): Xaa in position 15 is any amino acid
  Variant (16)..(16): Xaa in position 16 is Asp, Gly, Asn or Ser
  Variant (17)..(17): Xaa in position 17 is any amino acid
  Variant (18)..(18): Xaa in position 18 is Ile, Leu or Val
FXXXIGHXPXXXXXXXXX

SEQ ID NO: 133540 - protein, 20 aa, Artificial sequence
  protein pattern
  Variant (2)..(2): Xaa in position 2 is any amino acid
  Variant (3)..(3): Xaa in position 3 is Ile, Leu, Met or Val
  Variant (4)..(4): Xaa in position 4 is Ile, Leu or Val
  Variant (5)..(5): Xaa in position 5 is any amino acid
  Variant (7)..(7): Xaa in position 7 is any amino acid
  Variant (8)..(8): Xaa in position 8 is Asp, Glu, Asn or Ser
  Variant (9)..(9): Xaa in position 9 is any amino acid
  Variant (10)..(10): Xaa in position 10 is Phe, Leu or Met
  Variant (13)..(13): Xaa in position 13 is Glu, Ser or Thr
  Variant (14)..(15): Xaa in position 14 to 15 is any amino acid
  Variant (16)..(16): Xaa in position 16 is Leu or Met
  Variant (17)..(18): Xaa in position 17 to 18 is any amino acid
  Variant (20)..(20): Xaa in position 20 is Ala, Ile, Leu or Val
VXXXXRXXXXRAXXXXXXRX

SEQ ID NO: 133541 - DNA, 561 bp, Arabidopsis thaliana; identical to SEQ ID NO: 130579
  CDS (1)..(561)

SEQ ID NO: 133542 - protein, 186 aa, Arabidopsis thaliana; identical to SEQ ID NO: 130580

SEQ ID NO: 133543 - DNA, 804 bp, Brassica napus
  CDS (87)..(632)
  misc_feature (470)..(470): n is a, g, c or t
  misc_feature (493)..(493): n is a, g, c or t
  misc_feature (595)..(595): n is a, g, c or t
caccacactctctcttccacagtttcgttatctagatattattttaggaggatctctctctgcttctctccatctctctcttagccatggctgctttcacttgtacctctcgtcctcctgttcccctccgttcggagtcgagaatcgcatcctctccatccgcttcactctctgctcggcggatgttcgccgtctcgcctgactcagcaggattgagaatccgtctttcccagtcttcgtccttgttgacctcgaaggttcctcgaccacgaagaggcatcgtctgtgaggctcaggaaaccactacagatatagtttcaatagtcaacgacacaacatgggactctctagttctcaaggcggacgggcctgttcttgtcgacttttgggctccatggtgtggactttgcaaaatgattgacccgctcgtgaatgaactagcaaaagagtaccccgggaaggtcaagttntacaaactgaacacggacgactntccttcaaccccaagcaagtacaatgttagaagcattccaacgatcatgatctttgtcaatggggagaagaaggatgcaatcataggtgcagtgcccagatntacgctcgcgtctagcattgataaattcttgcaatgagattagactggtgagtctgtgagatctgtttctccccccccctctgtcttgtgttctcattctctcttgtaatttgtgcttctttgtagctatctgcttcttctattgtatcttttcttcatcactgaacatctagacatggataaataagatgatgtcatgtttttatgtt

SEQ ID NO: 133544 - protein, 181 aa, Brassica napus
  misc_feature (128)..(128): The Xaa at location 128 stands for Leu, or Phe.
  misc_feature (136)..(136): The Xaa at location 136 stands for Cys, Phe, Ser, or Tyr.
  misc_feature (170)..(170): The Xaa at location 170 stands for Cys, Phe, Ser, or Tyr.
MAAFTCTSRPPVPLRSESRIASSPSASLSARRMFAVSPDSAGLRIRLSQSSSLLTSKVPRPRRGIVCEAQETTTDIVSIVNDTTWDSLVLKADGPVLVDFWAPWCGLCKMIDPLVNELAKEYPGKVKXYKLNTDDXPSTPSKYNVRSIPTIMIFVNGEKKDAIIGAVPRXTLASSIDKFLQ

SEQ ID NO: 133545 - DNA, 764 bp, Glycine max
  CDS (53)..(598)
attttaggaggatctctctctctctctgcttctctccatctctctcttagccatggctgctttcacctgtacctctcgtcctcccgtttccctccgttcggagtcaagaatcgcttcctctccatcagcttcactctctgctcggcggatgttcgccgtctcgcctgactcagcaggattgagaatccgtctttcccagtctccctcctcgttgacctcgaaggttcctcgaccacgaagaggcatcgtctgtgaggctcaggaaaccactacagatatagtttcaatagtcaacgacacaacatgggactctctagttctcaaggcggacgggcctgtattggttgacttttgggcaccatggtgtgggccttgcaaaatgattgacccgctcgtgaacgagctagcaaaagagtacaccgggaaggtcaagttctacaaactgaacacggacgactctccttcaaccccaagcaagtacaatgttagaagcatcccaacgatcatgatctttgtcaatggggagaagaaggatgcaatcataggtgcagtgcctagatctacgctcgcgtctagcattgataaattcttgcaatgagatttagactggtgagtctgtgagatctgtttctcctcctcttctgtcttgtgttctcattctctcttgtaatttgtgcttctttgtagctatctgtttcttctattgtatcttttattcatcactgaacatggataaataagatgatgtcatgtttttttatgtt

SEQ ID NO: 133546 - protein, 181 aa, Glycine max; identical to SEQ ID NO: 91432

SEQ ID NO: 133547 - DNA, 1001 bp, Triticum aestivum
  CDS (74)..(613)
acatttgaggtctgagaagaatctcaggaacagaacctattgtgtgtgtttcttgtttctctctctctctacaatggctgcttttgcgtgcactactcgtccgccgatttctctccggtcagagatgaggatcgcatcctcaacgaaagtttcactctccactcgacaaatgttctccgtgggaggattgaggactcgcgtctctctatcatcggtctccaagaattctagcgcttctcgattacgacgacgaggagggttcatcatctgtgaagctcaggacactgctacagggattccaatggtgaacgattcaacgtgggagtcactagtactcaaggctgatgagcctgttgttgtggacttttgggcaccatggtgtggaccctgcaaaatgattgatcccattgtcaacgaactagcacagcagtacactgggaagatcaagttcttcaaactaaacactgacgattctccggcgaccccgggaaagtacggtgtgagaagcataccaaccatcatgatcttcgttaagggagagaagaaggatacaatcatcggtgcagtgcctaaaaccacattagcaacaagcattgataaattcttgcagtgaagcatgtggatggatcactctcttttatttctctatagtcctgttcgtttaacgaacgctgcgttcgatatctgcgtctgaaatttgttcataagttgattaaatgaaatgaaaacaagagacgcagcgtcaaaaaaacgaagctttccggtgttgccgctgacgtcaaaaaaagtagcgaccattgttcctcatttctctctcctctctgcgactgaaatcagaaacgcggcgtcacctgttcttctctctttctctttggatacccttttttctctatgtgtatttggacttaacttatctactactccttctcatttagacatgtataatgataataatataatgttgggtttaagaaatcgtgtttatgatggtgactttatct

SEQ ID NO: 133548 - protein, 179 aa, Triticum aestivum; identical to SEQ ID NO: 91460

SEQ ID NO: 133549 - DNA, 585 bp, Arabidopsis thaliana; identical to SEQ ID NO: 91057
  CDS (1)..(585)

SEQ ID NO: 133550 - protein, 194 aa, Arabidopsis thaliana; identical to SEQ ID NO: 91058

SEQ ID NO: 133551 - DNA, 519 bp, Arabidopsis thaliana
  CDS (1)..(519)
atggcgtcaatttctctctcttcttctacggttccgtcgctgaattcgaaagaatcgtcaggtgtttctgctttcgcttctcgttctatctcggccgtcaaatttcagtttccggttcgtcgggttcgaaccggagacttaaagtttccatctttatcttcaacgactcgatgcactcctcgacgtattgaagccaagaagcagacatttgactcatttgaggatctgcttgtgaactctgataaaccagttctagttgactattatgcaacctggtgtggtccttgccagttcatggttccaatactcaatgaagtgagtgaaaccctgaaagacaagatacaggtggtgaagattgataccgaaaaataccccagtattgctaataaatacaagattgaggcacttcctactttcatcctattcaaagatggggaaccttgtgatcgctttgagggtgctttgacggccaaacaactcattcaacgaattgaggattctctaaaagtgaagccatag

SEQ ID NO: 133552 - protein, 172 aa, Arabidopsis thaliana
MASISLSSSTVPSLNSKESSGVSAFASRSISAVKFQFPVRRVRTGDLKFPSLSSTTRCTPRRIEAKKQTFDSFEDLLVNSDKPVLVDYYATWCGPCQFMVPILNEVSETLKDKIQVVKIDTEKYPSIANKYKIEALPTFILFKDGEPCDRFEGALTAKQLIQRIEDSLKVKP

SEQ ID NO: 133553 - DNA, 393 bp, Rickettsia prowazekii str. Madrid E
  CDS (1)..(393): transl_table=11
atgtcgtgttataacgaaattacaacactccttgaattcgatagcaatgatatcaatacaacacagaggataaatatggtaaataacgtaacagatagctcttttaaaaatgaagtactagaatcggatttacctgtaatggttgatttttgggcagagtggtgtggaccatgtaaaatgttaataccgataatagatgaaatcagtaaagaattacaagataaagtaaaagtactcaaaatgaatattgatgaaaatcctaaaactccttcagaatatggtattcgtagcattccaacgataatgttgtttaaaaatggtgaacaaaaagatactaaaataggtttgcaacaaaaaaattctcttttagattggattaataaatctatttga

SEQ ID NO: 133554 - protein, 130 aa, Rickettsia prowazekii str. Madrid E
MSCYNEITTLLEFDSNDINTTQRINMVNNVTDSSFKNEVLESDLPVMVDFWAEWCGPCKMLIPIIDEISKELQDKVKVLKMNIDENPKTPSEYGIRSIPTIMLFKNGEQKDTKIGLQQKNSLLDWINKSI

SEQ ID NO: 133555 - DNA, 384 bp, Escherichia coli O157:H7 EDL933
  CDS (1)..(384): transl_table=11
atgttacaccaacaacgaaaccaacacgccaggcttattcctgtggagttatatatgagcgataaaattattcacctgactgacgacagttttgacacggatgtactcaaagcggacggggcgatcctcgtcgatttctgggcagagtggtgcggtccgtgcaaaatgatcgccccgattctggatgaaatcgctgacgaatatcagggcaaactgaccgttgcaaaactgaacatcgatcaaaaccctggcactgcgccgaaatatggcatccgtggtatcccgactctgctgctgttcaaaaacggtgaagtggcggcaaccaaagtgggcgcactgtctaaaggtcagttgaaagagttcctcgacgctaacctggcgtaa

SEQ ID NO: 133556 - protein, 127 aa, Escherichia coli O157:H7 EDL933
MLHQQRNQHARLIPVELYMSDKIIHLTDDSFDTDVLKADGAILVDFWAEWCGPCKMIAPILDEIADEYQGKLTVAKLNIDQNPGTAPKYGIRGIPTLLLFKNGEVAATKVGALSKGQLKEFLDANLA

SEQ ID NO: 133557 - DNA, 420 bp, Salmonella enterica subsp. enterica serovar Typhi str. CT18
  CDS (1)..(420): transl_table=11
atgaacaccgtttgtacccattgtcaggccattaaccgcatccccggcgatcggcttcaggacgcggcaaaatgtggacgctgcggtcatgagttgtttgacggagaagtcattaatgcgaccggcgaaacgctggacaaactgttgaaggacgatcttccagtggtgatcgacttttgggcaccctggtgcggcccttgccgtaactttgcgccaatcttcgaggatgtcgcagaagagcgcagcggtaaagtccgtttcgtcaaagtaaataccgaggcggaacgggaactcagcgctcgtttcggtatccgcagcatcccgatgattatgatttttaaacatggacaggtggtcgatatgcttaatggcgcagtgcctaaagcgcctttcgacagctggctgaacgaagcgctgtaa

SEQ ID NO: 133558 - protein, 139 aa, Salmonella enterica subsp. enterica serovar Typhi str. CT18
MNTVCTHCQAINRIPGDRLQDAAKCGRCGHELFDGEVINATGETLDKLLKDDLPVVIDFWAPWCGPCRNFAPIFEDVAEERSGKVRFVKVNTEAERELSARFGIRSIPMIMIFKHGQVVDMLNGAVPKAPFDSWLNEAL

SEQ ID NO: 133559 - DNA, 420 bp, Salmonella typhimurium LT2
  CDS (1)..(420): transl_table=11
atgaacaccgtttgtacccattgtcaggccattaaccgcatccccgacgatcggcttcaggatgcggcaaaatgtggacgctgcggtcatgagttgtttgacggagaagtcattaatgcgaccggcgaaacgctggacaaactgttgaaggacgatcttccagtggtgatcgacttttgggccccctggtgcggcccttgccgtaactttgcgccaatcttcgaggatgtcgcagaagagcgcagcggtaaagtccgtttcgtcaaagtgaataccgaggcggaacgggaactcagcgcccgtttcggtatccgcagcatcccgacgattatgatttttaaacatggacaggtggtcgatatgcttaatggcgcagtgcctaaagcgcctttcgacagctggctgaacgaagcgctgtaa

SEQ ID NO: 133560 - protein, 139 aa, Salmonella typhimurium LT2
MNTVCTHCQAINRIPDDRLQDAAKCGRCGHELFDGEVINATGETLDKLLKDDLPVVIDFWAPWCGPCRNFAPIFEDVAEERSGKVRFVKVNTEAERELSARFGIRSIPTIMIFKHGQVVDMLNGAVPKAPFDSWLNEAL

SEQ ID NO: 133561 - DNA, 342 bp, Xanthomonas campestris pv. campestris str. ATCC 33913
  CDS (1)..(342): transl_table=11
gtgagcgacaaggttcaacatgtcggcgatgccgacttcgatacagctgtactgcaatccggcgaaccggtcctggtggatttttgggccgaatggtgcggcccgtgcaagatgatcgccccggtgctggacgatctggccgatacataccagggcaagctcaaggttgccaaggtcaacgtggaccagaaccgcgctttggccatcaagtaccacgtgcgctcgatcccgatgctgttgctgttcaaggacggtgaggtccaggcaagccagatcggggcagttggcaagggccagctgacccagatgatcgacaagaccctgggcggcgcggccgcctga

SEQ ID NO: 133562 - protein, 113 aa, Xanthomonas campestris pv. campestris str. ATCC 33913
MSDKVQHVGDADFDTAVLQSGEPVLVDFWAEWCGPCKMIAPVLDDLADTYQGKLKVAKVNVDQNRALAIKYHVRSIPMLLLFKDGEVQASQIGAVGKGQLTQMIDKTLGGAAA

SEQ ID NO: 133563 - DNA, 324 bp, Prochlorococcus marinus subsp. pastoris str. CCMP1986; identical to SEQ ID NO: 130501
  CDS (1)..(324): transl_table=11

SEQ ID NO: 133564 - protein, 107 aa, Prochlorococcus marinus subsp. pastoris str. CCMP1986; identical to SEQ ID NO: 130502

SEQ ID NO: 133565 - DNA, 333 bp, Gloeobacter violaceus PCC 7421; identical to SEQ ID NO: 91113
  CDS (1)..(333): transl_table=11

SEQ ID NO: 133566 - protein, 110 aa, Gloeobacter violaceus PCC 7421; identical to SEQ ID NO: 91114

SEQ ID NO: 133567 - DNA, 327 bp, Desulfotalea psychrophila LSv54
  CDS (1)..(327): transl_table=11
atggcatcagaaaaagtccagcaggttaatgatggagattttgatacattaatcagctcaggccaaccaactttggttgatttttgggccccatggtgtggtccctgcaaggcaattggccctgtcattgaagacctcgctaacgaatttgatggaaaagtcaccattgccaagatgaacgttgatgacaaccctaacactcctggcaaatatggcattagggcaatcccaaccatcattctcttcaaagatggcgaggccatagatcagctcaccggcgcagttggtaaaacacagttggttgatctctgcaacaaggctctataa

SEQ ID NO: 133568 - protein, 108 aa, Desulfotalea psychrophila LSv54
MASEKVQQVNDGDFDTLISSGQPTLVDFWAPWCGPCKAIGPVIEDLANEFDGKVTIAKMNVDDNPNTPGKYGIRAIPTIILFKDGEAIDQLTGAVGKTQLVDLCNKAL

SEQ ID NO: 133569 - DNA, 327 bp, Azoarcus sp. EbN1; identical to SEQ ID NO: 91193
  CDS (1)..(327): transl_table=11

SEQ ID NO: 133570 - protein, 108 aa, Azoarcus sp. EbN1; identical to SEQ ID NO: 91194

SEQ ID NO: 133571 - DNA, 378 bp, Trichodesmium erythraeum IMS101; identical to SEQ ID NO: 130525
  CDS (1)..(378): transl_table=11

SEQ ID NO: 133572 - protein, 125 aa, Trichodesmium erythraeum IMS101; identical to SEQ ID NO: 130526

SEQ ID NO: 133573 - DNA, 330 bp, Trichodesmium erythraeum IMS101; identical to SEQ ID NO: 91223
  CDS (1)..(330): transl_table=11

SEQ ID NO: 133574 - protein, 109 aa, Trichodesmium erythraeum IMS101; identical to SEQ ID NO: 91224

SEQ ID NO: 133575 - DNA, 315 bp, Magnetospirillum magnetotacticum MS-1
  CDS (1)..(315): transl_table=11
atgaagattgtgaccgattcctcgttcgaggccgaggtgctgaaggctcccggcccggttctggtggatttttgggccgaatggtgcggcccctgccgccagatcgccccggcgcttgaggaactctccaaggacagggccgacaagatcaccatcgccaagatcaatatcgatgagaatcccggcacccccggcaagtacggcgtgcgtggcattcccaccctgatgatcttcaagaacggccaggtcgccgccaccaagatcggcgcgctgcccaagagcaagctctacgaatgggtggattccagcctttaa

SEQ ID NO: 133576 - protein, 104 aa, Magnetospirillum magnetotacticum MS-1
MKIVTDSSFEAEVLKAPGPVLVDFWAEWCGPCRQIAPALEELSKDRADKITIAKINIDENPGTPGKYGVRGIPTLMIFKNGQVAATKIGALPKSKLYEWVDSSL

SEQ ID NO: 133577 - DNA, 324 bp, Nostoc punctiforme PCC 73102; identical to SEQ ID NO: 91233
  CDS (1)..(324): transl_table=11

SEQ ID NO: 133578 - protein, 107 aa, Nostoc punctiforme PCC 73102; identical to SEQ ID NO: 91234

SEQ ID NO: 133579 - DNA, 324 bp, Crocosphaera watsonii WH 8501; identical to SEQ ID NO: 91239
  CDS (1)..(324): transl_table=11

SEQ ID NO: 133580 - protein, 107 aa, Crocosphaera watsonii WH 8501; identical to SEQ ID NO: 91240

SEQ ID NO: 133581 - DNA, 324 bp, Synechococcus sp. RS9917; identical to SEQ ID NO: 130539
  CDS (1)..(324): transl_table=11

SEQ ID NO: 133582 - protein, 107 aa, Synechococcus sp. RS9917; identical to SEQ ID NO: 130540

SEQ ID NO: 133583 - DNA, 324 bp, Synechococcus sp. WH 5701; identical to SEQ ID NO: 130541
  CDS (1)..(324): transl_table=11

SEQ ID NO: 133584 - protein, 107 aa, Synechococcus sp. WH 5701; identical to SEQ ID NO: 130542

SEQ ID NO: 133585 - DNA, 330 bp, delta proteobacterium MLMS-1; identical to SEQ ID NO: 91251
  CDS (1)..(330): transl_table=11

SEQ ID NO: 133586 - protein, 109 aa, delta proteobacterium MLMS-1; identical to SEQ ID NO: 91252

SEQ ID NO: 133587 - DNA, 354 bp, Rickettsiella grylli; identical to SEQ ID NO: 91253
  CDS (1)..(354): transl_table=11

SEQ ID NO: 133588 - protein, 117 aa, Rickettsiella grylli; identical to SEQ ID NO: 91254

SEQ ID NO: 133589 - DNA, 324 bp, Synechococcus sp. RS9916; identical to SEQ ID NO: 130543
  CDS (1)..(324): transl_table=11

SEQ ID NO: 133590 - protein, 107 aa, Synechococcus sp. RS9916; identical to SEQ ID NO: 130544

SEQ ID NO: 133591 - DNA, 330 bp, Candidatus Desulfococcus oleovorans Hxd3
  CDS (1)..(330): transl_table=11
atgggggacaaggtattaagcatcagtgacggcagttttgaagcagaggtgatccaggcggagatgcctgtctttgtggacttctgggccccctggtgcggcccgtgcaaggctattggcccgctggtggaagaactggccgccgcctatgaaggcaaaatcaagtttgccaagtgcaacgtggatgacaacccctccactccgaccaagttcggcattcaggccattcccaccctcattattttcaaggggggagaagtggtggagcggattaccggcatggtgcccaaggccaagctggaagcggctttgaataaagcattggaatag

SEQ ID NO: 133592 - protein, 109 aa, Candidatus Desulfococcus oleovorans Hxd3
MGDKVLSISDGSFEAEVIQAEMPVFVDFWAPWCGPCKAIGPLVEELAAAYEGKIKFAKCNVDDNPSTPTKFGIQAIPTLIIFKGGEVVERITGMVPKAKLEAALNKALE

SEQ ID NO: 133593 - DNA, 621 bp, Oryza sativa subsp
  CDS (1)..(621)
atgatcaccgcctccctcctccccctccccgcgacctcctcctcctccggccgccgctccctcccgccgccgaccaccaccttcccgagacctcctcctcccctccgccgccaccgccacctctcctcctcctcctcctccgcgtcgtccacggagagcgacggcggcggcgggagcacgaacgggtcgctgccggggctcacccccgtggtcgtcgaggaggaggaggaggagttctgcccggtggagtgcgtgacggagttcaagacggaggaggagctggcccgcgtcctggagcgcgccaaggcgacgggggcgctggtggtggtggacttcttccgcccgtcctgcggcagctgcaagtacatcgagcaaggcttcatgaagctctgcaagggctccggcgaccacggctcccccgtcgtcttcctcaagcacaacgtcatcgacgagtacgacgagcagtcagaggtggcagaccggcttcgcatcaaggtggtgccgctgttccatttctacaagaacggggtgctgctggaggcgttcgcgacgcgggacaaggagaggatcatcgccgccatccagaagtacaccgctccatcgtcgccgcctgctgagtaa

SEQ ID NO: 133594 - protein, 206 aa, Oryza sativa subsp
MITASLLPLPATSSSSGRRSLPPPTTTFPRPPPPLRRHRHLSSSSSSASSTESDGGGGSTNGSLPGLTPVVVEEEEEEFCPVECVTEFKTEEELARVLERAKATGALVVVDFFRPSCGSCKYIEQGFMKLCKGSGDHGSPVVFLKHNVIDEYDEQSEVADRLRIKVVPLFHFYKNGVLLEAFATRDKERIIAAIQKYTAPSSPPAE

SEQ ID NO: 133595 - DNA, 738 bp, Oryza sativa subsp; identical to SEQ ID NO: 130547
  CDS (1)..(738)

SEQ ID NO: 133596 - protein, 245 aa, Oryza sativa subsp; identical to SEQ ID NO: 130548

SEQ ID NO: 133597 - DNA, 642 bp, Vitis vinifera; identical to SEQ ID NO: 130551
  CDS (1)..(642)

SEQ ID NO: 133598 - protein, 213 aa, Vitis vinifera; identical to SEQ ID NO: 130552

SEQ ID NO: 133599 - DNA, 750 bp, Ostreococcus tauri; identical to SEQ ID NO: 45769
  CDS (1)..(750)

SEQ ID NO: 133600 - protein, 249 aa, Ostreococcus tauri; identical to SEQ ID NO: 45770

SEQ ID NO: 133601 - DNA, 651 bp, Ostreococcus tauri; identical to SEQ ID NO: 130553
  CDS (1)..(651)

SEQ ID NO: 133602 - protein, 216 aa, Ostreococcus tauri; identical to SEQ ID NO: 130554

SEQ ID NO: 133603 - DNA, 546 bp, Medicago truncatula; identical to SEQ ID NO: 45771
  CDS (1)..(546)

SEQ ID NO: 133604 - protein, 181 aa, Medicago truncatula; identical to SEQ ID NO: 45772

SEQ ID NO: 133605 - DNA, 510 bp, Medicago truncatula
  CDS (1)..(510)
atggccgcttccatctcagcagcgtcttcctctgtaatccttcattctttgaactcttcttccacacgtgtgggaccttcatcatcatcatcttcacagcttcaatttcctgttcgccttcttccaattggtactcgccgtctttcctcttcctcccgctctcgtttccttcctctggttcaagcaaagaaacaaaccttttcctcttttgatgatttgcttgcaaactccgacaaacctgtatttgttgacttctatgcaacctggtgcggtccttgtcaattcatggttcctgtacttgaggaagtgagcgctcggcttcaagatcagatacaaatcgttaagattgatactgagaagtatcctagcattgccaacaaatacaacattgaggcattgccaactttcatcatctttaaggatggaaaaccctttgatcgctttgagggagcgttaacagcagataagctaattgaacgcatagaaaccactctcaacgtaaagcaataa

SEQ ID NO: 133606 - protein, 169 aa, Medicago truncatula
MAASISAASSSVILHSLNSSSTRVGPSSSSSSQLQFPVRLLPIGTRRLSSSSRSRFLPLVQAKKQTFSSFDDLLANSDKPVFVDFYATWCGPCQFMVPVLEEVSARLQDQIQIVKIDTEKYPSIANKYNIEALPTFIIFKDGKPFDRFEGALTADKLIERIETTLNVKQ

SEQ ID NO: 133607 - DNA, 558 bp, Medicago truncatula
  CDS (1)..(558)
atggccgcttccatctcagcagcgtcttcctctgtaatccttcattctttgaactcttcttccacacgtgtgggaccttcatcatcatcatcttcacagcttcaatttcctgttcgccttcttccaattggtactcgccgtctttcctcttcctcccgctctcgtttccttcctctggttcaagcaaagaaacaaaccttttcctcttttgatgatttgcttgcaaactccgacaaacctgtatttgttgacttctatgcaacctggtgcggtccttgtcaattcatggttcctgtacttgaggaagtgagcgctcggcttcaagatcagatacaaatcgttaagattgatactgagaagtatcctagcattgccaacaaatacaacattgaggcattgccaactttcatcatctttaaggatggaaaaccctttgatcgctttgagggagcgttaacagcagataagctaattgaacgcatagaaaccactctcaacttaaatgaagacacaaaagtttgtctatcggatgttgggatcacatacatggttggatag

SEQ ID NO: 133608 - protein, 185 aa, Medicago truncatula
MAASISAASSSVILHSLNSSSTRVGPSSSSSSQLQFPVRLLPIGTRRLSSSSRSRFLPLVQAKKQTFSSFDDLLANSDKPVFVDFYATWCGPCQFMVPVLEEVSARLQDQIQIVKIDTEKYPSIANKYNIEALPTFIIFKDGKPFDRFEGALTADKLIERIETTLNLNEDTKVCLSDVGITYMVG

SEQ ID NO: 133609 - DNA, 483 bp, uncultured archaeon GZfos19C8; identical to SEQ ID NO: 69696
  CDS (1)..(483): transl_table=11

SEQ ID NO: 133610 - protein, 160 aa, uncultured archaeon GZfos19C8; identical to SEQ ID NO: 69697

SEQ ID NO: 133611 - DNA, 522 bp, Arabidopsis thaliana; identical to SEQ ID NO: 130561
  CDS (1)..(522)

SEQ ID NO: 133612 - protein, 173 aa, Arabidopsis thaliana; identical to SEQ ID NO: 130562

SEQ ID NO: 133613 - DNA, 522 bp, Arabidopsis thaliana; identical to SEQ ID NO: 130563
  CDS (1)..(522)

SEQ ID NO: 133614 - protein, 173 aa, Arabidopsis thaliana; identical to SEQ ID NO: 130564

SEQ ID NO: 133615 - DNA, 522 bp, Chlamydomonas reinhardtii
  CDS (1)..(522)
atggcaactccttgcgtccgcgcatccccttctgctggcgctctccgctcagggcgcgctgcccgcgctgcgctgcggcccgtggctgtggccgtgcctcgtaagcgcctcgctgcgccgctgtccagcgccgcaaccgcgtcggcggtgacagcgactgagcaggcagtcggcgaggtcgcgatcgcaaacggggtgcacatcctcaccgccgacacgtaccacggcttcctggagaagaatgctgagaagcttgtggttacggacttctatgccgtctggtgcggcccctgtaaggtcattgcgccggagatcgagcgcctggctaatgagatggacgcaagccaggttgtgtttgccaagatggactgcggtgccaccaacgagtccaagaagctggccatggccctaaacatcaaggcgctgcccaccttccacctctaccgcaacagcaagcagattgacagcatgacaggcgccaagatcaaggcgctgaccgacctgatcggcaagcacctctaa

SEQ ID NO: 133616 - protein, 173 aa, Chlamydomonas reinhardtii
MATPCVRASPSAGALRSGRAARAALRPVAVAVPRKRLAAPLSSAATASAVTATEQAVGEVAIANGVHILTADTYHGFLEKNAEKLVVTDFYAVWCGPCKVIAPEIERLANEMDASQVVFAKMDCGATNESKKLAMALNIKALPTFHLYRNSKQIDSMTGAKIKALTDLIGKHL

SEQ ID NO: 133617 - DNA, 543 bp, Pisum sativum; identical to SEQ ID NO: 130567
  CDS (1)..(543): transl_table=11

SEQ ID NO: 133618 - protein, 180 aa, Pisum sativum; identical to SEQ ID NO: 130568

SEQ ID NO: 133619 - DNA, 324 bp, Anabaena sp; identical to SEQ ID NO: 130569
  CDS (1)..(324): transl_table=11

SEQ ID NO: 133620 - protein, 107 aa, Anabaena sp; identical to SEQ ID NO: 130570

SEQ ID NO: 133621 - DNA, 324 bp, Synechocystis sp; identical to SEQ ID NO: 130573
  CDS (1)..(324): transl_table=11

SEQ ID NO: 133622 - protein, 107 aa, Synechocystis sp; identical to SEQ ID NO: 130574

SEQ ID NO: 133623 - DNA, 537 bp, Arabidopsis thaliana
  CDS (1)..(537)
atgcctctttctctccgtctttctccttcgccgacggctttatctccgactaccggaggatttggtccatcgaggaaacagtgccggattccttactccggcgtcccgacgacgaagattggtttctgttctttggattctaggaaaagaggagattcctctgttgttaggtgtagcttagaaaccgttaatgtcagtgttggtcaggtgacggaggtcgataaggacacgttctggcccatcgttaaagccgccggtgaaaagcttgtcgtacttgacatgtacactcaatggtgtggtccatgtaaagtgattgcccctaaatacaaagctttatcagagaagtacgacgacgttgtgtttctaaagcttgactgcaatccagataaccggccattggcaaaagagctaggaataagagtggttccaactttcaagattttgaaggataacaaggttgtcaaggaagtgaccggtgcaaaatacgatgatctggttgcagcgattgaaacagcgaggtctgctgcttccggatga

SEQ ID NO: 133624 - protein, 178 aa, Arabidopsis thaliana
MPLSLRLSPSPTALSPTTGGFGPSRKQCRIPYSGVPTTKIGFCSLDSRKRGDSSVVRCSLETVNVSVGQVTEVDKDTFWPIVKAAGEKLVVLDMYTQWCGPCKVIAPKYKALSEKYDDVVFLKLDCNPDNRPLAKELGIRVVPTFKILKDNKVVKEVTGAKYDDLVAAIETARSAASG

SEQ ID NO: 133625 - DNA, 549 bp, Brassica napus; identical to SEQ ID NO: 22437
  CDS (1)..(549)

SEQ ID NO: 133626 - protein, 182 aa, Brassica napus; identical to SEQ ID NO: 22438

SEQ ID NO: 133627 - DNA, 549 bp, Pisum sativum
  CDS (1)..(549)
atggctctaaatctctgcacctcccctaaatggatcggcaccaccgtcttcgatagtgcttcttcatcgaagccatcacttgcttcttctttttctactacttcattttcttcttccattttatgttcgaagagggttggtctacagaggttaagcttgaggaggagtatcagtgtcagtgtaagatccagcttggaaactgcgggacccacggtgacggtagggaaagtaaccgaggtcaacaaggatacgttttggcccatcgttaatgccgccggtgataaaaccgtcgtcctcgatatgttcaccaaatggtgtggtccttgcaaagtgatagctccattatacgaagaattatctcagaagtatttggatgttgtctttctaaagcttgattgcaaccaagataacaagtccttggcaaaagagctaggaattaaggtggttcccacttttaaaattctgaaagacaacaagattgtaaaagaagtaactggtgctaaatttgatgatttggtcgctgccattgacactgttcggtctagttag

SEQ ID NO: 133628 - protein, 182 aa, Pisum sativum
MALNLCTSPKWIGTTVFDSASSSKPSLASSFSTTSFSSSILCSKRVGLQRLSLRRSISVSVRSSLETAGPTVTVGKVTEVNKDTFWPIVNAAGDKTVVLDMFTKWCGPCKVIAPLYEELSQKYLDVVFLKLDCNQDNKSLAKELGIKVVPTFKILKDNKIVKEVTGAKFDDLVAAIDTVRSS

SEQ ID NO: 133629 - DNA, 540 bp, Arabidopsis thaliana; identical to SEQ ID NO: 130577
  CDS (1)..(540)

SEQ ID NO: 133630 - protein, 179 aa, Arabidopsis thaliana; identical to SEQ ID NO: 130578

SEQ ID NO: 133631 - DNA, 522 bp, Arabidopsis thaliana; identical to SEQ ID NO: 130581
  CDS (1)..(522)

SEQ ID NO: 133632 - protein, 173 aa, Arabidopsis thaliana; identical to SEQ ID NO: 130582

SEQ ID NO: 133633 - DNA, 582 bp, Arabidopsis thaliana
  CDS (1)..(582)
atggcgtcgttactcgattccgtcaccgtgacccgcgtgttttctctgccgattgcggcttcggtctcgtcttcttcagctgctccgtcggtttcacgacgccggatttctcccgccaggtttctggaattcagaggtttgaagtcttcgcggagtttggtgactcagtcggccagtctgggtgcgaatcgtagaaccagaatcgctcgcggtggacgaatcgcctgtgaggctcaggacaccactgccgccgccgtcgaagtaccaaatctgtctgattcagaatggcaaacaaaggttctggaatcagatgtcccagttctggtcgagttctgggcaccatggtgtggaccttgccgtatgattcaccccatagttgaccagctagccaaagatttcgcagggaagttcaaattctacaaaatcaacactgacgagagccctaatacagcaaaccgttacgggatacgaagcgttccaacagtaatcatcttcaaaggcggtgagaagaaagatagcatcattggagctgtgcctagagagacgttggagaaaactatagaaagattcttggtcgagtaa

SEQ ID NO: 133634 - protein, 193 aa, Arabidopsis thaliana; identical to SEQ ID NO: 130492

SEQ ID NO: 133635 - DNA, 534 bp, Brassica napus; identical to SEQ ID NO: 130583
  CDS (1)..(534)

SEQ ID NO: 133636 - protein, 177 aa, Brassica napus; identical to SEQ ID NO: 130584

SEQ ID NO: 133637 - DNA, 423 bp, Chlamydomonas reinhardtii
  CDS (1)..(423)
atggccctcgttgctcgccgcgccgctgtgccctcggcccgctccagcgctcgccccgctttcgctcgcgctgccccgcgccgctcggtcgttgtgcgcgccgaggccggtgccgtgaacgatgataccttcaagaacgttgttctggagagcagcgtgcccgtccttgtggatttctgggctccctggtgcggtccttgccgcatcatcgcccccgtcgtcgacgagattgcgggcgagtacaaggataagctcaagtgcgtgaagctgaacacggacgagagccccaacgtggcgtccgagtacggtatccgctccatccccaccatcatggtgttcaagggtggcaagaagtgcgagacgatcattggcgctgtgcccaaggcgaccatcgtgcagaccgtggagaagtacctgaactaa

SEQ ID NO: 133638 - protein, 140 aa, Chlamydomonas reinhardtii
MALVARRAAVPSARSSARPAFARAAPRRSVVVRAEAGAVNDDTFKNVVLESSVPVLVDFWAPWCGPCRIIAPVVDEIAGEYKDKLKCVKLNTDESPNVASEYGIRSIPTIMVFKGGKKCETIIGAVPKATIVQTVEKYLN

SEQ ID NO: 133639 - DNA, 504 bp, Zea mays; identical to SEQ ID NO: 130585
  CDS (1)..(504)

SEQ ID NO: 133640 - protein, 167 aa, Zea mays; identical to SEQ ID NO: 130586

SEQ ID NO: 133641 - DNA, 519 bp, Pisum sativum
  CDS (1)..(519)
atggcccttgagagcttgtttaagagtatccacaccaagacctcattgtcttcctccattgtcttcatcttcaagggaaaagcttgtcttctcacctcaaaaagtaggattcaagaaagctttgctgaactcaacagtttcacttcgctggtgttgcttatagaaaatcacgttttgttgcatgctcgtgaagctgtaaatgaagttcaagtagtgaatgactcaagctgggatgaacttgtgattggcagtgaaacacctgtgcttgtagatttttgggcaccatggtgtggtccatgcagaatgatagcgcctataattgatgaattagccaaagagtatgctggaaaaattaagtgctacaagctcaacacagatgaatctccaaacactgcaacgaagtatggaatcagaagcataccaactgttctgtttttcaagaatggagagagaaaagacagtgtaattggtgcagttcctaaggctactctgtctgagaaagtggaaaagtatatttga

SEQ ID NO: 133642 - protein, 172 aa, Pisum sativum
MALESLFKSIHTKTSLSSSIVFIFKGKACLLTSKSRIQESFAELNSFTSLVLLIENHVLLHAREAVNEVQVVNDSSWDELVIGSETPVLVDFWAPWCGPCRMIAPIIDELAKEYAGKIKCYKLNTDESPNTATKYGIRSIPTVLFFKNGERKDSVIGAVPKATLSEKVEKYI

SEQ ID NO: 133643 - DNA, 546 bp, Spinacia oleracea; identical to SEQ ID NO: 130587
  CDS (1)..(546)

SEQ ID NO: 133644 - protein, 181 aa, Spinacia oleracea; identical to SEQ ID NO: 130588

SEQ ID NO: 133645 - DNA, 528 bp, Triticum aestivum; identical to SEQ ID NO: 130589
  CDS (1)..(528)

SEQ ID NO: 133646 - protein, 175 aa, Triticum aestivum; identical to SEQ ID NO: 130590

SEQ ID NO: 133647 - DNA, 522 bp, Oryza sativa; identical to SEQ ID NO: 69586
  CDS (1)..(522)

SEQ ID NO: 133648 - protein, 173 aa, Oryza sativa; identical to SEQ ID NO: 69587

SEQ ID NO: 133649 - DNA, 543 bp, Oryza sativa; identical to SEQ ID NO: 69832
  CDS (1)..(543)

SEQ ID NO: 133650 - protein, 180 aa, Oryza sativa; identical to SEQ ID NO: 69833

SEQ ID NO: 133651 - DNA, 543 bp, Oryza sativa; identical to SEQ ID NO: 45777
  CDS (1)..(543)

SEQ ID NO: 133652 - protein, 180 aa, Oryza sativa; identical to SEQ ID NO: 45778

SEQ ID NO: 133653 - DNA, 519 bp, Oryza sativa; identical to SEQ ID NO: 130601
  CDS (1)..(519)

SEQ ID NO: 133654 - protein, 172 aa, Oryza sativa; identical to SEQ ID NO: 130602

SEQ ID NO: 133655 - DNA, 546 bp, Oryza sativa; identical to SEQ ID NO: 69830
  CDS (1)..(546)

SEQ ID NO: 133656 - protein, 181 aa, Oryza sativa; identical to SEQ ID NO: 69831

SEQ ID NO: 133657 - DNA, 546 bp, Brassica napus; identical to SEQ ID NO: 45779
  CDS (1)..(546)

SEQ ID NO: 133658 - protein, 181 aa, Brassica napus; identical to SEQ ID NO: 45780

SEQ ID NO: 133659 - DNA, 495 bp, Brassica napus; identical to SEQ ID NO: 130607
  CDS (1)..(495)

SEQ ID NO: 133660 - protein, 164 aa, Brassica napus; identical to SEQ ID NO: 130608

SEQ ID NO: 133661 - DNA, 549 bp, Glycine max; identical to SEQ ID NO: 69842
  CDS (1)..(549)

SEQ ID NO: 133662 - protein, 182 aa, Glycine max; identical to SEQ ID NO: 69843

SEQ ID NO: 133663 - DNA, 549 bp, Glycine max; identical to SEQ ID NO: 69848
  CDS (1)..(549)

SEQ ID NO: 133664 - protein, 182 aa, Glycine max; identical to SEQ ID NO: 69849

SEQ ID NO: 133665 - DNA, 549 bp, Zea mays; identical to SEQ ID NO: 45781
  CDS (1)..(549)

SEQ ID NO: 133666 - protein, 182 aa, Zea mays; identical to SEQ ID NO: 45782

SEQ ID NO: 133667 - DNA, 513 bp, Linum usitatissimum
  CDS (1)..(513)
atggcgatgaccaattgcttccaagtaacaagctcctcctgcaaggttggaatcactaccgttcaggccacccattcttttacttcttctgcagacagactcaacttcagaagagaattcaacccagttacccttttcccaacaacttccaacccaaggagatccaatttcgtctgcaaagctcaagaagctgttgaagttaaaccagtgacggaggcagaatgggagaagttggtggttggaagtgaaatcccagtactggtggacttctgggcgccatggtgcggaccatgccggatgatagctcccgtgatcgacgagctggcgaaggagtacgccgggaagatagcttgttacaaggtgaacacggatgagagccccaacattgcaagccggtatggaatcaggagcatcccaactgtgcttttcttcaacaagggtgagaagaaagagagcattatcggtgctgtccctaagaccactttgtgtagtacactagagaagttcctttga

SEQ ID NO: 133668 - protein, 170 aa, Linum usitatissimum
MAMTNCFQVTSSSCKVGITTVQATHSFTSSADRLNFRREFNPVTLFPTTSNPRRSNFVCKAQEAVEVKPVTEAEWEKLVVGSEIPVLVDFWAPWCGPCRMIAPVIDELAKEYAGKIACYKVNTDESPNIASRYGIRSIPTVLFFNKGEKKESIIGAVPKTTLCSTLEKFL

SEQ ID NO: 133669 - DNA, 546 bp, Brassica napus; identical to SEQ ID NO: 45783
  CDS (1)..(546)

SEQ ID NO: 133670 - protein, 181 aa, Brassica napus; identical to SEQ ID NO: 45784

SEQ ID NO: 133671 - DNA, 579 bp, Brassica napus; identical to SEQ ID NO: 69860
  CDS (1)..(579)

SEQ ID NO: 133672 - protein, 192 aa, Brassica napus; identical to SEQ ID NO: 69861

SEQ ID NO: 133673 - DNA, 558 bp, Brassica napus; identical to SEQ ID NO: 91449
  CDS (1)..(558)

SEQ ID NO: 133674 - protein, 185 aa, Brassica napus; identical to SEQ ID NO: 91450

SEQ ID NO: 133675 - DNA, 540 bp, Brassica napus; identical to SEQ ID NO: 91469
  CDS (1)..(540)

SEQ ID NO: 133676 - protein, 179 aa, Brassica napus; identical to SEQ ID NO: 91470

SEQ ID NO: 133677 - DNA, 519 bp, Brassica napus; identical to SEQ ID NO: 91473
  CDS (1)..(519)

SEQ ID NO: 133678 - protein, 172 aa, Brassica napus; identical to SEQ ID NO: 91474

SEQ ID NO: 133679 - DNA, 579 bp, Brassica napus; identical to SEQ ID NO: 69876
  CDS (1)..(579)

SEQ ID NO: 133680 - protein, 192 aa, Brassica napus; identical to SEQ ID NO: 69877

SEQ ID NO: 133681 - DNA, 546 bp, Glycine max; identical to SEQ ID NO: 69886
  CDS (1)..(546)

SEQ ID NO: 133682 - protein, 181 aa, Glycine max; identical to SEQ ID NO: 69887

SEQ ID NO: 133683 - DNA, 528 bp, Glycine max; identical to SEQ ID NO: 91505
  CDS (1)..(528)

SEQ ID NO: 133684 - protein, 175 aa, Glycine max; identical to SEQ ID NO: 91506

SEQ ID NO: 133685 - DNA, 528 bp, Glycine max; identical to SEQ ID NO: 91517
  CDS (1)..(528)

SEQ ID NO: 133686 - protein, 175 aa, Glycine max; identical to SEQ ID NO: 91518

SEQ ID NO: 133687 - DNA, 549 bp, Glycine max; identical to SEQ ID NO: 69894
  CDS (1)..(549)

SEQ ID NO: 133688 - protein, 182 aa, Glycine max; identical to SEQ ID NO: 69895

SEQ ID NO: 133689 - DNA, 510 bp, Glycine max; identical to SEQ ID NO: 69900
  CDS (1)..(510)

SEQ ID NO: 133690 - protein, 169 aa, Glycine max; identical to SEQ ID NO: 69901

SEQ ID NO: 133691 - DNA, 510 bp, Glycine max; identical to SEQ ID NO: 91535
  CDS (1)..(510)

SEQ ID NO: 133692 - protein, 169 aa, Glycine max; identical to SEQ ID NO: 91536

SEQ ID NO: 133693 - DNA, 528 bp, Glycine max; identical to SEQ ID NO: 69916
  CDS (1)..(528)

SEQ ID NO: 133694 - protein, 175 aa, Glycine max; identical to SEQ ID NO: 69917

SEQ ID NO: 133695 - DNA, 546 bp, Glycine max; identical to SEQ ID NO: 91541
  CDS (1)..(546)

SEQ ID NO: 133696 - protein, 181 aa, Glycine max; identical to SEQ ID NO: 91542

SEQ ID NO: 133697 - DNA, 549 bp, Glycine max; identical to SEQ ID NO: 69920
  CDS (1)..(549)

SEQ ID NO: 133698 - protein, 182 aa, Glycine max; identical to SEQ ID NO: 69921

SEQ ID NO: 133699 - DNA, 534 bp, Zea mays; identical to SEQ ID NO: 69940
  CDS (1)..(534)

SEQ ID NO: 133700 - protein, 177 aa, Zea mays; identical to SEQ ID NO: 69941

SEQ ID NO: 133701 - DNA, 528 bp, Glycine max; identical to SEQ ID NO: 69960
  CDS (1)..(528)

SEQ ID NO: 133702 - protein, 175 aa, Glycine max; identical to SEQ ID NO: 69961

SEQ ID NO: 133703 - DNA, 549 bp, Zea mays; identical to SEQ ID NO: 45787
  CDS (1)..(549)

SEQ ID NO: 133704 - protein, 182 aa, Zea mays; identical to SEQ ID NO: 45788

SEQ ID NO: 133705 - DNA, 534 bp, Zea mays; identical to SEQ ID NO: 69962
  CDS (1)..(534)

SEQ ID NO: 133706 - protein, 177 aa, Zea mays; identical to SEQ ID NO: 69963

SEQ ID NO: 133707 - DNA, 567 bp, Zea mays; identical to SEQ ID NO: 91611
  CDS (1)..(567)

SEQ ID NO: 133708 - protein, 188 aa, Zea mays; identical to SEQ ID NO: 91612

SEQ ID NO: 133709 - DNA, 522 bp, Zea mays; identical to SEQ ID NO: 91619
  CDS (1)..(522)

SEQ ID NO: 133710 - protein, 173 aa, Zea mays; identical to SEQ ID NO: 91620

SEQ ID NO: 133711 - DNA, 567 bp, Zea mays; identical to SEQ ID NO: 91629
  CDS (1)..(567)

SEQ ID NO: 133712 - protein, 188 aa, Zea mays; identical to SEQ ID NO: 91630

SEQ ID NO: 133713 - DNA, 567 bp, Zea mays; identical to SEQ ID NO: 91633
  CDS (1)..(567)

SEQ ID NO: 133714 - protein, 188 aa, Zea mays; identical to SEQ ID NO: 91634

SEQ ID NO: 133715 - DNA, 20 bp, Artificial sequence
  primer
atggctgctttcacttgtac

SEQ ID NO: 133716 - DNA, 21 bp, Artificial sequence
  primer
tcatggcaagaacttgtcgag

SEQ ID NO: 133717 - protein, 96 aa, Artificial sequence
  consensus sequence
  Variant (2)..(6): Xaa in position 2 to 6 is any amino acid
  Variant (7)..(9): Xaa in position 7 to 9 is any or no amino acid
  Variant (12)..(12): Xaa in position 12 is any amino acid
  Variant (14)..(14): Xaa in position 14 is any amino acid
  Variant (16)..(16): Xaa in position 16 is any amino acid
  Variant (18)..(18): Xaa in position 18 is any amino acid
  Variant (24)..(27): Xaa in position 24 to 27 is any amino acid
  Variant (29)..(43): Xaa in position 29 to 43 is any amino acid
  Variant (44)..(47): Xaa in position 44 to 47 is any or no amino acid
  Variant (49)..(51): Xaa in position 49 to 51 is any amino acid
  Variant (53)..(54): Xaa in position 53 to 54 is any amino acid
  Variant (55)..(58): Xaa in position 55 to 58 is any or no amino acid
  Variant (60)..(64): Xaa in position 60 to 64 is any amino acid
  Variant (66)..(70): Xaa in position 66 to 70 is any amino acid
  Variant (73)..(75): Xaa in position 73 to 75 is any amino acid
  Variant (78)..(78): Xaa in position 78 is any amino acid
  Variant (80)..(86): Xaa in position 80 to 86 is any amino acid
  Variant (87)..(94): Xaa in position 87 to 94 is any or no amino acid
VXXXXXXXXPVXVXFXAXWCGPCXXXXPXXXXXXXXXXXXXXXXXXXKXXXDXXXXXXPXXXXXYXXXXXPTXXXFKXGXXXXXXXXXXXXXXXGA

SEQ ID NO: 133718 - protein, 29 aa, Artificial sequence
  protein pattern
  Variant (2)..(2): Xaa in position 2 is any amino acid
  Variant (3)..(4): Xaa in position 3 to 4 is any or no amino acid
  Variant (6)..(6): Xaa in position 6 is any amino acid
  Variant (8)..(8): Xaa in position 8 is Asp, Glu, Asn, Pro, Ser or Thr
  Variant (14)..(15): Xaa in position 14 to 15 is any amino acid
  Variant (16)..(16): Xaa in position 16 is Phe, Ile, Leu, Met or Val
  Variant (17)..(19): Xaa in position 17 to 19 is any amino acid
  Variant (20)..(20): Xaa in position 20 is Phe, Ile, Leu, Met or Val
  Variant (21)..(21): Xaa in position 21 is Asp, Glu, Gly, Asn or Ser
  Variant (22)..(22): Xaa in position 22 is any amino acid
  Variant (23)..(23): Xaa in position 23 is Ala, Ile, Leu or Val
  Variant (24)..(24): Xaa in position 24 is Ala, Asp or Ser
  Variant (25)..(28): Xaa in position 25 to 28 is any amino acid
  Variant (29)..(29): Xaa in position 29 is Asp or Gly
VXXXFXAXWCGPCXXXXXXXXXXXXXXXX

SEQ ID NO: 133719 - DNA, 1377 bp, Azotobacter vinelandii
  CDS (1)..(1377): transl_table=11
atgagtaaccacaggatcgaacgcgacagcatgggcgaattggctgttccggccgaagcgctttacggtgcgcagactcagcgtgccgtgaacaatttcccggtatccggccagcggatgccggcggcgttcgtgagggcgctcatcctcgccaaggctgcggcagcgcgagccaacgtcgagttgggacagctcgctccggagttgggcgacgccatcgccgctgcctgccggcaattgctggagggcgatttcatgcagcacttccccgtggacgtgttccagaccggctccggcaccagcaccaacatgaatgccaacgaggtgatcgccacgctggcgagccgtattctcggcgacaaggtcagcccgaacgaccacgtcaactgcggtcagagcagcaacgacatcatcccgtcgaccatccatgtgagtgcggccatcgaactgagcgagcgcctgctgccggccttggaacatctgtcgaaggcgataggcgagaaatcccgggaagtacaccccttcgtgaagaccggccgaacccatttgatggatgccatgccggtgcgcatgagccaggtgctggatggctgggcgcaccagattcggtcgaacatcgagcacctgacaagcctgcaaccgagcctgcatgccctggcgcagggcgggaccgcggtgggaaccgggatcaatgcgcacccgcgcttctccgagtgcttctgtaccgaactcaaggctctgaccgggctctcgttcacaccgggagacaaccttttcgccctgatcggttcccaggacaccgcggtcgccctgtcgggccaactgaagaccaccgccgtgtcgctgatgaagatcgccaacgatctgcgctggatgaactccggtcccctggccggcctcgccgagatcgagctggaagccctgcaacccggctcctcgatcatgccgggcaaggtcaacccggtgattcccgaagccacggcgatggtcgcggcgcaggtgatcggcaacgatgcgaccatcgctgtcgccggtcaatccggcaacttcgagttgaatgtgatgctgccggtcatcgcgcaaaacctgttgcacagcattcagttgctcggcaacgtcagccacttgctggccgaccgggccatcgcgaccttcaaggtcaatcagccgaaactcaaggaggcgctggatcgcaacccgatcctggtcacggccctgaacccgctgatcggttacctgaaagcggcggaaatcgccaagctggcctacaaggagggtcggccgatcatcgaggtggcactcgaacacaccgagttcaaacgcgaggagctggaacaactgctcgatccggagaaactcaccgaaggcgggctttga

SEQ ID NO: 133720 - protein, 458 aa, Azotobacter vinelandii
MSNHRIERDSMGELAVPAEALYGAQTQRAVNNFPVSGQRMPAAFVRALILAKAAAARANVELGQLAPELGDAIAAACRQLLEGDFMQHFPVDVFQTGSGTSTNMNANEVIATLASRILGDKVSPNDHVNCGQSSNDIIPSTIHVSAAIELSERLLPALEHLSKAIGEKSREVHPFVKTGRTHLMDAMPVRMSQVLDGWAHQIRSNIEHLTSLQPSLHALAQGGTAVGTGINAHPRFSECFCTELKALTGLSFTPGDNLFALIGSQDTAVALSGQLKTTAVSLMKIANDLRWMNSGPLAGLAEIELEALQPGSSIMPGKVNPVIPEATAMVAAQVIGNDATIAVAGQSGNFELNVMLPVIAQNLLHSIQLLGNVSHLLADRAIATFKVNQPKLKEALDRNPILVTALNPLIGYLKAAEIAKLAYKEGRPIIEVALEHTEFKREELEQLLDPEKLTEGGL

SEQ ID NO: 133721 - DNA, 1401 bp, Klebsiella pneumoniae subsp. pneumoniae MGH 78578
  CDS (1)..(1401): transl_table=11
atgacaacgcatcgcagtgaaaaagactcgatgggcgccatcgaggtcccggccgataaactctggggcgcccagacccagcgctcgctggagcatttccgcatctcgaccgaaaaaatgcccggggagctgatatacgccctggcgctgaccaagcgggcggcggcgaaggttaaccaggatctcggactgttgacggcggagaaagccggggcgatcgtcgccgccgctgacgaagtgctggccggaaagcacgcgcaggagttccccctggctatctggcagaccggctccggcacccaaagcaatatgaatatgaacgaggtgctggccaaccgcgccagtgaactgctcggcggagaacgggggatggcgcgaaaaattcatcccaatgacgatgtgaataagagccagagctcaaatgatgtattccccaccgccatgcacgtcgcggcgctgattgccctgcgggaaaaagtgatcccgtcgctgcaggcgctgcgggcgacgctcaatgaaaaagcggtggccttcagggatatcgtcaagatcggccgcacccatctgcaggacgccacgccgctcaccttaggccaggagatctccggctgggtggcgatgctggaccatagcctgaagcacattgaagccagtcagccgcatcttgccgagctggcgctgggcgggacggcggtaggaaccgggctgaatacccatccggaatatgccgtacgggtggcggccgagctggcgtcgctcagcggacagccatttgtcaccgcgccgaacaaattcgaagcgctggccactgtggatgccctggtccatgcccacggcgcgctgaaaggcctggcggcctcgctgatgaaaatcgctaacgatgtccgctggctggcctccggcccccgctgcggcattggtgaaatcgccatcccggaaaacgagccagggtcatcgattatgccgggcaaggttaacccaacccagtgcgaagctctgaccatggtctgctgccaggtgatgggcaacgacgtggcggtgaatatcggcggtgcttccggcaactttgagcttaacgtctatcgcccgatggtcatccacaacttcctgcagtcggtgcgtctgctggcggacggtatggcgagctttaacgagcactgtgcggtgggtattgaaccgaatcgcgagcggatcagtcagttgctcaatgagtcgctgatgctggttactgcgctgaatacccatatcggctacgacaaggcggcggaaatcgctaaaaaagcgcaccatgaggggctgactctcaaagcctcggcgctggcgctgggctacctgacggaagccgaattcgacagctgggtgcgcccggaagagatggtcggcagcctggctattcgctag

SEQ ID NO: 133722 - protein, 466 aa, Klebsiella pneumoniae subsp. pneumoniae MGH 78578
MTTHRSEKDSMGAIEVPADKLWGAQTQRSLEHFRISTEKMPGELIYALALTKRAAAKVNQDLGLLTAEKAGAIVAAADEVLAGKHAQEFPLAIWQTGSGTQSNMNMNEVLANRASELLGGERGMARKIHPNDDVNKSQSSNDVFPTAMHVAALIALREKVIPSLQALRATLNEKAVAFRDIVKIGRTHLQDATPLTLGQEISGWVAMLDHSLKHIEASQPHLAELALGGTAVGTGLNTHPEYAVRVAAELASLSGQPFVTAPNKFEALATVDALVHAHGALKGLAASLMKIANDVRWLASGPRCGIGEIAIPENEPGSSIMPGKVNPTQCEALTMVCCQVMGNDVAVNIGGASGNFELNVYRPMVIHNFLQSVRLLADGMASFNEHCAVGIEPNRERISQLLNESLMLVTALNTHIGYDKAAEIAKKAHHEGLTLKASALALGYLTEAEFDSWVRPEEMVGSLAIR

SEQ ID NO: 133723 - DNA, 1416 bp, Kineococcus radiotolerans SRS30216; identical to SEQ ID NO: 115382
  CDS (1)..(1416): transl_table=11

SEQ ID NO: 133724 - protein, 471 aa, Kineococcus radiotolerans SRS30216; identical to SEQ ID NO: 115383

SEQ ID NO: 133725 - DNA, 1389 bp, Xanthobacter autotrophicus Py2; identical to SEQ ID NO: 115408
  CDS (1)..(1389): transl_table=11

SEQ ID NO: 133726 - protein, 462 aa, Xanthobacter autotrophicus Py2; identical to SEQ ID NO: 115409

SEQ ID NO: 133727 - DNA, 1410 bp, Oryza sativa (japonica cultivar-group); identical to SEQ ID NO: 45040
  CDS (1)..(1410)

SEQ ID NO: 133728 - protein, 469 aa, Oryza sativa (japonica cultivar-group); identical to SEQ ID NO: 45041

SEQ ID NO: 133729 - DNA, 1386 bp, Vibrio cholerae O1 biovar eltor str. N16961; identical to SEQ ID NO: 115088
  CDS (1)..(1386): transl_table=11

SEQ ID NO: 133730 - protein, 461 aa, Vibrio cholerae O1 biovar eltor str. N16961; identical to SEQ ID NO: 115089

SEQ ID NO: 133731 - DNA, 1425 bp, Mycobacterium leprae TN; identical to SEQ ID NO: 115092
  CDS (1)..(1425): transl_table=11

SEQ ID NO: 133732 - protein, 474 aa, Mycobacterium leprae TN; identical to SEQ ID NO: 115093

SEQ ID NO: 133733 - DNA, 1398 bp, Clostridium acetobutylicum ATCC 824
  CDS (1)..(1398): transl_table=11
atggattttaggattgagagtgattccataggtgataagaaggttcctaaggaggtatactatggagttcaaacattgagaggtgcggataattttaaaataacaggacttaggttaaatgaagagtttataaagagtgttgttcaaataaaaaaagcagctgcaattactaatttagaaattggagagctagaggttaacataggaaaagccataattaaagcctgtgatgaggtgatagctgggaagtttaatgaagactttataatagaccctattcaaggtggagcaggaacatctataaatatgaatgccaatgaggttattgcaaatagagctatagaaattttaggatatgaaaaaggaaattatagaattgtacatccaaacgatcatgtcaatatgggacaatcaactaatgatgttataccaacagcaggaaagataactgcattaagacttgtgatcaagaatttagacaaactcaaagaattaagcaatgcctttagtgagaaagcagaacaattcaaagatgtaattaaaatgggtagaacacagcttcaagatgctgtacctataacgttgggacaagaatttagtgcttacagtgcggttgtaaaaagagatatcgctaggattcaaaaagctcaagatgagctgaaagttgtaaatataggtggaactgcggttgggacaggtattaatgcagatagcagatatgtggatagaatagttccaaggctttcttttgtttctggattaaatttaaaaaaagctgacgatttaatcgatggtacacagaatttggatagctttgctagtttatccgcaacaataaaaacctgtgctttaaatctatctaaaatagccaatgacttaaggcttatgtcttctggaccaaggacggggttaggggagatcaatcttcctgcaaagcaaaatggatcatcaataatgcctggaaaagttaatcctgtaatacctgaagttataaatcaaatagcctttaatattgcaggaaatgatgtagctatttctatggctgttgaggcagggcagctagaactaaatgcttttgagccagttatattttataatatatttgaatctatccaaactttaacaaatggtgtagatacatttattaaaaattgtattctagatattactgcaaatgaagagatatgtagtgaatacgtaaataatagtgttggaatagttacagcactctgtccttatataggttatgcagaatcagcaaagatagcgaagatggctataaaaagtggagagtcaataaaaaaagtagttttaagagaaggcgttctcaaggaaaaggaacttaatagtattattaatccactaaaaatgactaaaccagggattgtaggaaaatag

SEQ ID NO: 133734 - protein, 465 aa, Clostridium acetobutylicum ATCC 824
MDFRIESDSIGDKKVPKEVYYGVQTLRGADNFKITGLRLNEEFIKSVVQIKKAAAITNLEIGELEVNIGKAIIKACDEVIAGKFNEDFIIDPIQGGAGTSINMNANEVIANRAIEILGYEKGNYRIVHPNDHVNMGQSTNDVIPTAGKITALRLVIKNLDKLKELSNAFSEKAEQFKDVIKMGRTQLQDAVPITLGQEFSAYSAVVKRDIARIQKAQDELKVVNIGGTAVGTGINADSRYVDRIVPRLSFVSGLNLKKADDLIDGTQNLDSFASLSATIKTCALNLSKIANDLRLMSSGPRTGLGEINLPAKQNGSSIMPGKVNPVIPEVINQIAFNIAGNDVAISMAVEAGQLELNAFEPVIFYNIFESIQTLTNGVDTFIKNCILDITANEEICSEYVNNSVGIVTALCPYIGYAESAKIAKMAIKSGESIKKVVLREGVLKEKELNSIINPLKMTKPGIVGK

SEQ ID NO: 133735 - DNA, 1446 bp, Agrobacterium tumefaciens str. C58; identical to SEQ ID NO: 45050
  CDS (1)..(1446): transl_table=11

SEQ ID NO: 133736 - protein, 481 aa, Agrobacterium tumefaciens str. C58; identical to SEQ ID NO: 45051

SEQ ID NO: 133737 - DNA, 1374 bp, Thermoplasma acidophilum DSM 1728; identical to SEQ ID NO: 45052
  CDS (1)..(1374): transl_table=11

SEQ ID NO: 133738 - protein, 457 aa, Thermoplasma acidophilum DSM 1728; identical to SEQ ID NO: 45053

SEQ ID NO: 133739 - DNA, 1437 bp, Salmonella typhimurium LT2
  CDS (1)..(1437): transl_table=11
atgtcaaacaacattcgtatcgaagaagatctgttgggtaccagggaagttccagctgaagcctactatggtgttcacactctgagagcgattgaaaacttctacattagcaataacaaaatcagcgacatccctgaatttgtgcgtggcatggttatggtaaaaaaagcggcggcgctggccaacaaagagctgcaaaccattcctaagagtgtggcgaacgccatcattgccgcatgtgatgaagtccttaacaacggtaagtgcatggaccagttcccggtagatgtctatcagggcggcgcgggcacttccgtcaacatgaataccaacgaagtgctggccaacatcgggctggaactgatgggtcatcagaaaggtgaatatcagtacctgaacccgaacgaccacgtgaataaatgtcaatccactaacgacgcctatccgacaggcttccgtgtagcggtttacgcctctatcgtcaaactgatcgatgccatcaaccagttgcgtgaaggtttcgaacgtaaagcggttgaattccaggacatcctgaaaatgggtcgtacccagttgcaggacgccgtaccgatgacgcttggtcaagaattccgtgcgttcagcatcctgctgaaagaagaagtgaaaagcatcgagcgtactgctgagctgctgctggaagtcaaccttggcgcaacggcaatcggtactggtctgaacacgccgaaagaatactctccgctggcggtgaaaaaactggctgaagtcactggtttcgcctgtgttccggctgaagatctgattgaggcgacatctgactgtggcgcatatgttatggttcacagcgcgctgaaacgtttggcagtgaagatgtccaaaatctgtaacgacctgcgcttgctctcttctggtcctcgtgccggcctgaacgagatcaacctgccggaactgcaggcgggctcttccatcatgccagccaaagtgaacccggttgtaccggaagtcgtaaaccaggtatgctttaaagtcatcggtaacgacaccaccgttacgatggcggcggaagccggtcagttgcagttgaacgttatggagccggttatcggtcaggcgatgttcgaatccatccacattctgagcaacgcgtgctacaacctgctagaaaaatgcgttaacggcattaccgcgaataaagaagtgtgcgaagggtacgtttataactccatcggtatcgtcacttacctcaacccgttcatcggccaccacaacggcgacatcgtcggtaaaatctgtgctgaaaccggtaagagcgtacgtgaagttgtgctggagcgcggcctgttaacggaagccgagctggacgatattttctccgtacagaacttgatgcacccggcttataaagctaaacgttatactgatgaaagcgaacagtaa

SEQ ID NO: 133740 - protein, 478 aa, Salmonella typhimurium LT2; identical to SEQ ID NO: 45027

SEQ ID NO: 133741 - DNA, 1416 bp, Nostoc sp. PCC 7120; identical to SEQ ID NO: 115100
  CDS (1)..(1416): transl_table=11

SEQ ID NO: 133742 - protein, 471 aa, Nostoc sp. PCC 7120; identical to SEQ ID NO: 115101

SEQ ID NO: 133743 - DNA, 1494 bp, Agrobacterium tumefaciens str. C58; identical to SEQ ID NO: 45048
  CDS (1)..(1494): transl_table=11

SEQ ID NO: 133744 - protein, 497 aa, Agrobacterium tumefaciens str. C58; identical to SEQ ID NO: 45049

SEQ ID NO: 133745 - DNA, 1437 bp, Brucella melitensis 16M; identical to SEQ ID NO: 115102
  CDS (1)..(1437): transl_table=11

SEQ ID NO: 133746 - protein, 478 aa, Brucella melitensis 16M; identical to SEQ ID NO: 115103

SEQ ID NO: 133747 - DNA, 1488 bp, Drosophila melanogaster; identical to SEQ ID NO: 45056
  CDS (1)..(1488)

SEQ ID NO: 133748 - protein, 495 aa, Drosophila melanogaster; identical to SEQ ID NO: 45057

SEQ ID NO: 133749 - DNA, 1410 bp, Corynebacterium glutamicum ATCC 13032; identical to SEQ ID NO: 45058
  CDS (1)..(1410): transl_table=11

SEQ ID NO: 133750 - protein, 469 aa, Corynebacterium glutamicum ATCC 13032; identical to SEQ ID NO: 45059

SEQ ID NO: 133751 - DNA, 1386 bp, Thermoanaerobacter tengcongensis MB4; identical to SEQ ID NO: 45060
  CDS (1)..(1386): transl_table=11

SEQ ID NO: 133752 - protein, 461 aa, Thermoanaerobacter tengcongensis MB4; identical to SEQ ID NO: 45061

SEQ ID NO: 133753 - DNA, 1404 bp, Xanthomonas campestris pv. campestris str. ATCC 33913; identical to SEQ ID NO: 115110
  CDS (1)..(1404): transl_table=11

SEQ ID NO: 133754 - protein, 467 aa, Xanthomonas campestris pv. campestris str. ATCC 33913; identical to SEQ ID NO: 115111

SEQ ID NO: 133755 - DNA, 1404 bp, Xanthomonas axonopodis pv. citri str. 306; identical to SEQ ID NO: 115112
  CDS (1)..(1404): transl_table=11

SEQ ID NO: 133756 - protein, 467 aa, Xanthomonas axonopodis pv. citri str. 306; identical to SEQ ID NO: 115113

SEQ ID NO: 133757 - DNA, 1413 bp, Drosophila melanogaster; identical to SEQ ID NO: 45062
  CDS (1)..(1413)

SEQ ID NO: 133758 - protein, 470 aa, Drosophila melanogaster; identical to SEQ ID NO: 45063

SEQ ID NO: 133759 - DNA, 1455 bp, Drosophila melanogaster; identical to SEQ ID NO: 45068
  CDS (1)..(1455)

SEQ ID NO: 133760 - protein, 484 aa, Drosophila melanogaster; identical to SEQ ID NO: 45069

SEQ ID NO: 133761 - DNA, 1404 bp, Drosophila melanogaster; identical to SEQ ID NO: 45070
  CDS (1)..(1404)

SEQ ID NO: 133762 - protein, 467 aa, Drosophila melanogaster; identical to SEQ ID NO: 45071

SEQ ID NO: 133763 - DNA, 1512 bp, Drosophila melanogaster; identical to SEQ ID NO: 45072
  CDS (1)..(1512)

SEQ ID NO: 133764 - protein, 503 aa, Drosophila melanogaster; identical to SEQ ID NO: 45073

SEQ ID NO: 133765 - DNA, 1455 bp, Corynebacterium efficiens YS-314; identical to SEQ ID NO: 115122
  CDS (1)..(1455): transl_table=11

SEQ ID NO: 133766 - protein, 484 aa, Corynebacterium efficiens YS-314; identical to SEQ ID NO: 115123

SEQ ID NO: 133767 - DNA, 1380 bp, Pseudomonas putida KT2440; identical to SEQ ID NO: 45076
  CDS (1)..(1380): transl_table=11

SEQ ID NO: 133768 - protein, 459 aa, Pseudomonas putida KT2440; identical to SEQ ID NO: 45077

SEQ ID NO: 133769 - DNA, 1437 bp, Pseudomonas putida KT2440; identical to SEQ ID NO: 45078
  CDS (1)..(1437): transl_table=11

SEQ ID NO: 133770 - protein, 478 aa, Pseudomonas putida KT2440; identical to SEQ ID NO: 45079

SEQ ID NO: 133771 - DNA, 1383 bp, Lactobacillus plantarum WCFS1; identical to SEQ ID NO: 115132
  CDS (1)..(1383): transl_table=11

SEQ ID NO: 133772 - protein, 460 aa, Lactobacillus plantarum WCFS1; identical to SEQ ID NO: 115133

SEQ ID NO: 133773 - DNA, 1377 bp, Pseudomonas syringae pv. tomato str. DC3000; identical to SEQ ID NO: 115134
  CDS (1)..(1377): transl_table=11

SEQ ID NO: 133774 - protein, 458 aa, Pseudomonas syringae pv. tomato str. DC3000; identical to SEQ ID NO: 115135

SEQ ID NO: 133775 - DNA, 1386 bp, Vibrio parahaemolyticus RIMD 2210633; identical to SEQ ID NO: 115136
  CDS (1)..(1386): transl_table=11

SEQ ID NO: 133776 - protein, 461 aa, Vibrio parahaemolyticus RIMD 2210633; identical to SEQ ID NO: 115137

SEQ ID NO: 133777 - DNA, 1533 bp, Arabidopsis thaliana; identical to SEQ ID NO: 45096
  CDS (1)..(1533)

SEQ ID NO: 133778 - protein, 510 aa, Arabidopsis thaliana; identical to SEQ ID NO: 45097

SEQ ID NO: 133779 - DNA, 1632 bp, Rhodopirellula baltica SH 1
  CDS (1)..(1632): transl_table=11
gtgcagtctgcccacccaactttcggccgccgtgtcttgcgattcgtttcctacgattcgaccgaacgccagatagtagcagaaaccatcgcagagtttgggtttcgggcgtcgttcgcgccgtttcagtggattgctaccatgaccggcatcacggtttttgcttttgacgacccgtttttcctccttgttgatccagctatcgctatgaccgattttcgaaccgaacgcgactcgatgggcgaagtccgcgtgccgcaaaacgcttactacggtgcccagactcaacgtgcggtcgagaactttcctgtcagcggctggcaactcccgccgtcgatgatcgcggcgatgggacgcgtcaaattggcatgcgggatcgccaaccgcgatctcggaaagttgacgggttcgggcaagaacccgcttagcgatggtcaagtcgaatcgatgttgtcggcggccaaggaagtcgccgagggacagttggcggatcagttccccgtggacgtgttccagacgggcagcggcaccagcagcaacatgaacatcaacgaagtgctgtccaatcgcgcgatcgaaatcgatggcggcgaccggatggcggaggaaaagtcgatccaccccaacgatcacatcaacatggggcaatcgaccaacgacaccttcccaaccgcgattcatgttgcggccgcttacgaaatcgaaaatcgattgttgccagcattgcgacgcatgcacgaatcgctgacggaaaaagcccaggcttgggacaagatcatcaagatcggacgcactcacctgatggacgcaacgccgttgcgattgggacaggagtttggcggatttgctcgtcaaattgaattgtcgatcgcccgcgccgaagcggcccgcgacgcggtgctggaattgcccgtcggtggcacggcggttggcagcggtatcaacactcaccctgaatttggtgctcgcgtcgcggccagcttgtcagagcaaaccggcatcgctttcatcgaagcggtcaaccatttcgaaggcaacgcgaaccgcgatggtttggtggattcacacggtggattgaagtgcgtcgctcaaacgttgctcggtctggcgaacaacatccgctggctgggcagcggacctcgttgcggtttttatgaagtcaaactgccgactcgccaaccgggaagctcgatcatgcccggaaaggtcaatccggtgatgtgcgagtcgctgatgcaggtcgccgcccgcgtgatcggcaacgacacttgcatgacggtcagcggaggctgcggcggcaacttccagctcaacatcatgatgcccgtgatggctcacaccatcttggagtccatcgagttgttggccggtggtgtcaccgcgttcatcgatttctgcttggatggcatggaacccaacgaagaagcttgcgaagcctcggtggagcagagcctctccatgtgcaccagtctgaacccgttgatcggatacgaacaagccgctgcgctggccaaggaagcgttcaagtccggtcaaacgattcgcgaactgtgcaaagaaaaagggatcttggccgacgacgttctgaccgaagcgttggatccttggaaaatgaccgagccgcaagcatag

SEQ ID NO: 133780 - protein, 543 aa, Rhodopirellula baltica SH 1
MQSAHPTFGRRVLRFVSYDSTERQIVAETIAEFGFRASFAPFQWIATMTGITVFAFDDPFFLLVDPAIAMTDFRTERDSMGEVRVPQNAYYGAQTQRAVENFPVSGWQLPPSMIAAMGRVKLACGIANRDLGKLTGSGKNPLSDGQVESMLSAAKEVAEGQLADQFPVDVFQTGSGTSSNMNINEVLSNRAIEIDGGDRMAEEKSIHPNDHINMGQSTNDTFPTAIHVAAAYEIENRLLPALRRMHESLTEKAQAWDKIIKIGRTHLMDATPLRLGQEFGGFARQIELSIARAEAARDAVLELPVGGTAVGSGINTHPEFGARVAASLSEQTGIAFIEAVNHFEGNANRDGLVDSHGGLKCVAQTLLGLANNIRWLGSGPRCGFYEVKLPTRQPGSSIMPGKVNPVMCESLMQVAARVIGNDTCMTVSGGCGGNFQLNIMMPVMAHTILESIELLAGGVTAFIDFCLDGMEPNEEACEASVEQSLSMCTSLNPLIGYEQAAALAKEAFKSGQTIRELCKEKGILADDVLTEALDPWKMTEPQA

SEQ ID NO: 133781 - DNA, 1410 bp, Gloeobacter violaceus PCC 7421; identical to SEQ ID NO: 45106
  CDS (1)..(1410): transl_table=11

SEQ ID NO: 133782 - protein, 469 aa, Gloeobacter violaceus PCC 7421; identical to SEQ ID NO: 45107

SEQ ID NO: 133783 - DNA, 1404 bp, Corynebacterium diphtheriae NCTC 13129; identical to SEQ ID NO: 115142
  CDS (1)..(1404): transl_table=11

SEQ ID NO: 133784 - protein, 467 aa, Corynebacterium diphtheriae NCTC 13129; identical to SEQ ID NO: 115143

SEQ ID NO: 133785 - DNA, 1434 bp, Rhodopseudomonas palustris CGA009; identical to SEQ ID NO: 115146
  CDS (1)..(1434): transl_table=11

SEQ ID NO: 133786 - protein, 477 aa, Rhodopseudomonas palustris CGA009; identical to SEQ ID NO: 115147

SEQ ID NO: 133787 - DNA, 1392 bp, Geobacter sulfurreducens PCA; identical to SEQ ID NO: 45114
  CDS (1)..(1392): transl_table=11

SEQ ID NO: 133788 - protein, 463 aa, Geobacter sulfurreducens PCA; identical to SEQ ID NO: 45115

SEQ ID NO: 133789 - DNA, 1413 bp, Mycobacterium avium subsp. paratuberculosis K-10
  CDS (1)..(1413): transl_table=11
atggccactgacgacggcgacaccgactaccgcatcgagcgcgacaccatgggcgaggtccgggtacccgcaaaagcgttgtggcgcgcgcaaacccagcgcgcggtcgagaacttcccgatctcgggccggggcctggaacgcacccagatccgcgccctgggcctgctgaagggcgcctgcgcgcaggtcaacaaggatctggggctgctggcgccggagaaggccgacgcgatcatcgccgcggccgccgagatcgccgacggtcgccacgacgaccagtttcccatcgacgtcttccagaccggctcgggcaccagctcgaacatgaacaccaacgaggtgatcgcgtccatcgcggccgccaacggggtgaccgtgcatcctaacgacgacgtcaacatgtcgcagtcgtcgaacgacaccttccccaccgcaacccacatcgcggccacggaagccgcagtgcgccatctgattccggcgctgcaggtgctgcacgacgccctggcgagcaaggcccgcgagtggcacaccgtggtcaagtcgggccgcacccacctgatggacgccgtgccggtgacactcggccaggagttcagcggctacgcccgccagatcgaggccggcatcgaacgggtgcgggccacgctgccccggctgggtgagctggcgatcggcgggaccgcggtgggcaccggcctcaacgctcccgacggcttcggcgccaaggtggtcgagacgctgatcgcctccaccggattgagcgaattgcgcacggcgacaaactcgttcgaggcccaggcggcgcgcgacgggctggtcgaggcctccggcgcgctgcgcaccatcgcggtgtcgctgaccaagatcgccaacgacatccgctggatgggctcggggccgctgaccggcctggccgagatcgcccttcccgatctgcagccgggcagctcgatcatgccgggcaaggttaatccggttatccccgaagcggttacgcaggtcgccgcgcaggtgatcggcaacgacgcggcggtggccgtcggcggcttgtcgggcgccttcgagctcaacgtgtacatcccgatgatggcccgcaacatcctggagtcgttcaagctgctgaccaacgtgtcgaggctgttcgccgagcgctgcatcagcgggctgagcgccaacgtggagcacctgcgcgagctcgccgaatcctcaccgtccatcgtgacgccgctgaactcggcgatcggctacgaggaggcggcggcggtggccaagcaggcgctcaaggagcgcaagacgattcggcagaccgtcatcgaccgcgggctgatcggcgacaagctgtcgctcgaggagctcgaccgccggctcgacgtgctggccatggccaaggtcaagccgcaggactga

SEQ ID NO: 133790 - protein, 470 aa, Mycobacterium avium subsp. paratuberculosis K-10; identical to SEQ ID NO: 115351

SEQ ID NO: 133791 - DNA, 1395 bp, Wolbachia endosymbiont of Drosophila melanogaster; identical to SEQ ID NO: 45116
  CDS (1)..(1395): transl_table=11

SEQ ID NO: 133792 - protein, 464 aa, Wolbachia endosymbiont of Drosophila melanogaster; identical to SEQ ID NO: 45117

SEQ ID NO: 133793 - DNA, 1401 bp, Bdellovibrio bacteriovorus HD100; identical to SEQ ID NO: 115154
  CDS (1)..(1401): transl_table=11

SEQ ID NO: 133794 - protein, 466 aa, Bdellovibrio bacteriovorus HD100; identical to SEQ ID NO: 115155

SEQ ID NO: 133795 - DNA, 1389 bp, Bacillus cereus ATCC 10987; identical to SEQ ID NO: 115074
  CDS (1)..(1389): transl_table=11

SEQ ID NO: 133796 - protein, 462 aa, Bacillus cereus ATCC 10987; identical to SEQ ID NO: 115075

SEQ ID NO: 133797 - DNA, 1341 bp, Apis mellifera
  CDS (1)..(1341)
atgatgttaaatctattaaaatatttatcaaacaatcatggattattagaattaaagaaatcatcgtcatttttaacattaaggctgtcattgaatacaacagcagtagtttctaaaggcaagaaaaaggaatcagatagtgaatttcgaattgagagggatacttttggtgaagtgaaggtgcctgttaataaatattatggagctcaaacagtgcgatcaatgcaaaattttccaataggtgatacctttgaacgcatgccttatggtgttatagttgcatatggtatattaaaaaaagctgcagccgaaacaaataaagaacttggaatggatgctaaagtagcagatgctattagtcaagctgcagatgatgttatatgtggagatctttataatgatcatttcccattagtaatttggcaaacgggttccggaactcaaactaatatgaatgttaatgaggtaatttcaaatcgtgcaattgaattacttggtggtaaattgggatcaaaaacacctgtccatccaaatgatcatgtaaataaatctcaaagcactaatgattcatttccaactgttatgcaagtagcacttgctttagaaattaatagagttcttcttcctggtttggaaaaattacataatgcgttaaatgaaaaagttaatgcatggaaacatattataaaaattggtagaactcatactcaagatgctgtgcctctaacattaggacaagagttttcaggttatgcacaacaaatttgtaatggcattcaaagagtgaaagatactcttccaagattatatcaattagcacttggtggtactgcagtaggaacaggattaaacgcacctaaaggttttgcagagaaagcaattgcaaagattgcagatattactggtttaccatttgtacctgttgctaataagtttgaagctttagcatctagggatactatagtggaaacacatggagcatttaatacagtagcagtttcacttatgaaaatagctaatgatattcgatttttgggaagtggacctcgctgtggtttaggagaattatctcttcctgaaaatgagccaggaagttctattatgcctggtaaagttaatccgacacaatgtgaagcattgtctatggtttgttgtcaagtaatgggtaatcatactgctatcactgttgctggaagcaacggtcattttgaattgaatgtatttatacctgtaatgatttcaaatgctttaagatctgcgagattattaggtgatgcctctgcatcatttaaacaatttgatgaatgggtgaaacctgaagaaatgattggtcctaaataa

SEQ ID NO: 133798 - protein, 446 aa, Apis mellifera
MMLNLLKYLSNNHGLLELKKSSSFLTLRLSLNTTAVVSKGKKKESDSEFRIERDTFGEVKVPVNKYYGAQTVRSMQNFPIGDTFERMPYGVIVAYGILKKAAAETNKELGMDAKVADAISQAADDVICGDLYNDHFPLVIWQTGSGTQTNMNVNEVISNRAIELLGGKLGSKTPVHPNDHVNKSQSTNDSFPTVMQVALALEINRVLLPGLEKLHNALNEKVNAWKHIIKIGRTHTQDAVPLTLGQEFSGYAQQICNGIQRVKDTLPRLYQLALGGTAVGTGLNAPKGFAEKAIAKIADITGLPFVPVANKFEALASRDTIVETHGAFNTVAVSLMKIANDIRFLGSGPRCGLGELSLPENEPGSSIMPGKVNPTQCEALSMVCCQVMGNHTAITVAGSNGHFELNVFIPVMISNALRSARLLGDASASFKQFDEWVKPEEMIGPK

SEQ ID NO: 133799 - DNA, 1332 bp, Magnaporthe grisea 70-15
  CDS (1)..(1332)
atgtccgcgaacactagggctgagaccgatgcctttggcgaggttcaggtgcctgccgacaagtactggggcgcccagacacagcgctcgctcggcaacttcgacatcaaccagcctcaggatcgcatgcccccgccaattgtcaaggctctgggtatcctcaagggcgccgccgccacggtgaacatgaactatggccttgaccccaccatcggcaaggccattcagcaggcggccaaggaggtcgctgacctgaagctgctcgaccacttccccttggtcgtctggcagaccggctctggcactcagtccaacatgaacgcgaacgaggtcatctccaaccgagccatcgagatcctgggcggcgagaagggcagcaagaaacccatcgagggtgagctgattccttccctgcgcagcctgcgagacgccctgcaggccaaggtggacgagttcgaggccaagaagattatcaagattggccgcacacatctccaggacgccacgcctctgactctggctcaggagttctctggctacgtcgcccagcttgactttggcatcaagcgcgtcgaggctaccctgccggacctgaggctgctcgctcagggcggtaccgctgtcggcaccggcattaacacctttgagggctttgctgagggcatcgccgaggaggtcagccgcatgactggcaccgagttcaagacggcccccaacaagttcgaggcccttgctgcgcatgacgcgcttgtgcatgcctcgggcgctctcaacactctcgccacctcgctgaccaaggttgctcaggacatccgctacctgggcagcggcccgcgctgcggcctgggcgagctcgttctgcctgagaacgagccgggcagcagcatcatgcctggaaaggtcaatccgacccagtgcgaggccctgaccatggtttgcgcgcaggtcatgggcaaccatgttgctgctaccattggtggcatgaacggccagtttgagcttaacgtctacaagcccctcatcatccgcaacgtcctgcacagcgtcaggctgctgtcagatggcatgcggtcgtttgagaagcacctcgtcgagggcctcaaggccaacgaggagaagattgccagcattatgaaggagtctctcatgcttgtcacctgccttaaccccaagattggctatgacatggctagcaaggtcgcaaagaacgcccacaagaagggtctgaccctaaaggaaagcgccctcgagctcaatgctctgactgaggaagagtttgacaccttggtcaagcccgagctcatgatcactcccaagccctacaaggcctag

SEQ ID NO: 133800 - protein, 443 aa, Magnaporthe grisea 70-15
MSANTRAETDAFGEVQVPADKYWGAQTQRSLGNFDINQPQDRMPPPIVKALGILKGAAATVNMNYGLDPTIGKAIQQAAKEVADLKLLDHFPLVVWQTGSGTQSNMNANEVISNRAIEILGGEKGSKKPIEGELIPSLRSLRDALQAKVDEFEAKKIIKIGRTHLQDATPLTLAQEFSGYVAQLDFGIKRVEATLPDLRLLAQGGTAVGTGINTFEGFAEGIAEEVSRMTGTEFKTAPNKFEALAAHDALVHASGALNTLATSLTKVAQDIRYLGSGPRCGLGELVLPENEPGSSIMPGKVNPTQCEALTMVCAQVMGNHVAATIGGMNGQFELNVYKPLIIRNVLHSVRLLSDGMRSFEKHLVEGLKANEEKIASIMKESLMLVTCLNPKIGYDMASKVAKNAHKKGLTLKESALELNALTEEEFDTLVKPELMITPKPYKA

SEQ ID NO: 133801 - DNA, 1422 bp, Nasonia vitripennis; identical to SEQ ID NO: 45124
  CDS (1)..(1422)

SEQ ID NO: 133802 - protein, 473 aa, Nasonia vitripennis; identical to SEQ ID NO: 45125

SEQ ID NO: 133803 - DNA, 1638 bp, Magnaporthe grisea 70-15; identical to SEQ ID NO: 45126
  CDS (1)..(1638)

SEQ ID NO: 133804 - protein, 545 aa, Magnaporthe grisea 70-15; identical to SEQ ID NO: 45127

SEQ ID NO: 133805 - DNA, 1452 bp, Candida glabrata CBS 138; identical to SEQ ID NO: 45130
  CDS (1)..(1452)

SEQ ID NO: 133806 - protein, 483 aa, Candida glabrata CBS 138; identical to SEQ ID NO: 45131

SEQ ID NO: 133807 - DNA, 1479 bp, Kluyveromyces lactis NRRL Y-1140; identical to SEQ ID NO: 45132
  CDS (1)..(1479)

SEQ ID NO: 133808 - protein, 492 aa, Kluyveromyces lactis NRRL Y-1140; identical to SEQ ID NO: 45133

SEQ ID NO: 133809 - DNA, 1479 bp, Debaryomyces hansenii CBS767; identical to SEQ ID NO: 45134
  CDS (1)..(1479)

SEQ ID NO: 133810 - protein, 492 aa, Debaryomyces hansenii CBS767; identical to SEQ ID NO: 45135

SEQ ID NO: 133811 - DNA, 1404 bp, Debaryomyces hansenii CBS767; identical to SEQ ID NO: 45136
  CDS (1)..(1404)

SEQ ID NO: 133812 - protein, 467 aa, Debaryomyces hansenii CBS767; identical to SEQ ID NO: 45137

SEQ ID NO: 133813 - DNA, 1470 bp, Yarrowia lipolytica CLIB122; identical to SEQ ID NO: 45138
  CDS (1)..(1470)

SEQ ID NO: 133814 - protein, 489 aa, Yarrowia lipolytica CLIB122; identical to SEQ ID NO: 45139

SEQ ID NO: 133815 - DNA, 1635 bp, Aspergillus nidulans FGSC A4; identical to SEQ ID NO: 45140
  CDS (1)..(1635)

SEQ ID NO: 133816 - protein, 544 aa, Aspergillus nidulans FGSC A4; identical to SEQ ID NO: 45141

SEQ ID NO: 133817 - DNA, 1389 bp, Candida albicans SC5314; identical to SEQ ID NO: 45142
  CDS (1)..(1389): transl_table=12

SEQ ID NO: 133818 - protein, 462 aa, Candida albicans SC5314; identical to SEQ ID NO: 45143

SEQ ID NO: 133819 - DNA, 1419 bp, Ustilago maydis 521; identical to SEQ ID NO: 45144
  CDS (1)..(1419)

SEQ ID NO: 133820 - protein, 472 aa, Ustilago maydis 521; identical to SEQ ID NO: 45145

SEQ ID NO: 133821 - DNA, 1533 bp, Cryptococcus neoformans var. neoformans B-3501A; identical to SEQ ID NO: 45146
  CDS (1)..(1533)

SEQ ID NO: 133822 - protein, 510 aa, Cryptococcus neoformans var. neoformans B-3501A; identical to SEQ ID NO: 45147

SEQ ID NO: 133823 - DNA, 1494 bp, Tribolium castaneum; identical to SEQ ID NO: 45148
  CDS (1)..(1494)

SEQ ID NO: 133824 - protein, 497 aa, Tribolium castaneum; identical to SEQ ID NO: 45149

SEQ ID NO: 133825 - DNA, 1398 bp, Prochlorococcus marinus str. MIT 9303; identical to SEQ ID NO: 115186
  CDS (1)..(1398): transl_table=11

SEQ ID NO: 133826 - protein, 465 aa, Prochlorococcus marinus str. MIT 9303; identical to SEQ ID NO: 115187

SEQ ID NO: 133827 - DNA, 1386 bp, Dichelobacter nodosus VCS1703A; identical to SEQ ID NO: 115086
  CDS (1)..(1386): transl_table=11

SEQ ID NO: 133828 - protein, 461 aa, Dichelobacter nodosus VCS1703A; identical to SEQ ID NO: 115087

SEQ ID NO: 133829 - DNA, 1392 bp, Candidatus Protochlamydia amoebophila UWE25; identical to SEQ ID NO: 45154
  CDS (1)..(1392): transl_table=11

SEQ ID NO: 133830 - protein, 463 aa, Candidatus Protochlamydia amoebophila UWE25; identical to SEQ ID NO: 45155

SEQ ID NO: 133831 - DNA, 1407 bp, Desulfovibrio vulgaris subsp. vulgaris str. Hildenborough; identical to SEQ ID NO: 115200
  CDS (1)..(1407): transl_table=11

SEQ ID NO: 133832 - protein, 468 aa, Desulfovibrio vulgaris subsp. vulgaris str. Hildenborough; identical to SEQ ID NO: 115201

SEQ ID NO: 133833 - DNA, 1389 bp, Bartonella quintana str. Toulouse; identical to SEQ ID NO: 115202
  CDS (1)..(1389): transl_table=11

SEQ ID NO: 133834 - protein, 462 aa, Bartonella quintana str. Toulouse; identical to SEQ ID NO: 115203

SEQ ID NO: 133835 - DNA, 1389 bp, Bacillus thuringiensis serovar konkukian str. 97-27; identical to SEQ ID NO: 115072
  CDS (1)..(1389): transl_table=11

SEQ ID NO: 133836 - protein, 462 aa, Bacillus thuringiensis serovar konkukian str. 97-27; identical to SEQ ID NO: 115073

SEQ ID NO: 133837 - DNA, 1395 bp, Acinetobacter sp. ADP1; identical to SEQ ID NO: 115206
  CDS (1)..(1395): transl_table=11

SEQ ID NO: 133838 - protein, 464 aa, Acinetobacter sp. ADP1; identical to SEQ ID NO: 115207

SEQ ID NO: 133839 - DNA, 1398 bp, Erwinia carotovora subsp. atroseptica SCRI1043; identical to SEQ ID NO: 115208
  CDS (1)..(1398): transl_table=11

SEQ ID NO: 133840 - protein, 465 aa, Erwinia carotovora subsp. atroseptica SCRI1043; identical to SEQ ID NO: 115209

SEQ ID NO: 133841 - DNA, 1407 bp, Leifsonia xyli subsp. xyli str. CTCB07; identical to SEQ ID NO: 115212
  CDS (1)..(1407): transl_table=11

SEQ ID NO: 133842 - protein, 468 aa, Leifsonia xyli subsp. xyli str. CTCB07; identical to SEQ ID NO: 115213

SEQ ID NO: 133843 - DNA, 1395 bp, Desulfotalea psychrophila LSv54; identical to SEQ ID NO: 115214
  CDS (1)..(1395): transl_table=11

SEQ ID NO: 133844 - protein, 464 aa, Desulfotalea psychrophila LSv54; identical to SEQ ID NO: 115215

SEQ ID NO: 133845 - DNA, 1398 bp, Yersinia pseudotuberculosis IP 32953; identical to SEQ ID NO: 115216
  CDS (1)..(1398): transl_table=11

SEQ ID NO: 133846 - protein, 465 aa, Yersinia pseudotuberculosis IP 32953; identical to SEQ ID NO: 115217

SEQ ID NO: 133847 - DNA, 1410 bp, Symbiobacterium thermophilum IAM 14863; identical to SEQ ID NO: 45172
  CDS (1)..(1410): transl_table=11

SEQ ID NO: 133848 - protein, 469 aa, Symbiobacterium thermophilum IAM 14863; identical to SEQ ID NO: 45173

SEQ ID NO: 133849 - DNA, 1389 bp, Bacillus cereus E33L; identical to SEQ ID NO: 115218
  CDS (1)..(1389): transl_table=11

SEQ ID NO: 133850 - protein, 462 aa, Bacillus cereus E33L; identical to SEQ ID NO: 115219

SEQ ID NO: 133851 - DNA, 1398 bp, Mannheimia succiniciproducens MBEL55E; identical to SEQ ID NO: 115220
  CDS (1)..(1398): transl_table=11

SEQ ID NO: 133852 - protein, 465 aa, Mannheimia succiniciproducens MBEL55E; identical to SEQ ID NO: 115221

SEQ ID NO: 133853 - DNA, 1389 bp, Bacillus licheniformis ATCC 14580; identical to SEQ ID NO: 115222
  CDS (1)..(1389): transl_table=11

SEQ ID NO: 133854 - protein, 462 aa, Bacillus licheniformis ATCC 14580; identical to SEQ ID NO: 115223

SEQ ID NO: 133855 - DNA, 1395 bp, Legionella pneumophila subsp. pneumophila str. Philadelphia 1; identical to SEQ ID NO: 115226
  CDS (1)..(1395): transl_table=11

SEQ ID NO: 133856 - protein, 464 aa, Legionella pneumophila subsp. pneumophila str. Philadelphia 1; identical to SEQ ID NO: 115227

SEQ ID NO: 133857 - DNA, 1395 bp, Burkholderia mallei ATCC 23344
  CDS (1)..(1395): transl_table=11
atgagcgaagcagtacggatggaacgcgacacgttcggcgaaatcgccgtgccggccgcccggctatggggcgcgcagacgcagcgctcgctgcagaacttcaagatctcgaccgagaagcagtcgcccgaactgatccacgcgctcgcgctgatcaagcgcgcggccgccgccgtcaatctcgagctcggcgtgctcgcgcaggacaaggcgaacgcgatcgtcgccgccgccgacgagatcatcgccggccgtcacgccgacgaattcccgctcgccgtctggcaaacgggttcgggcacgcagaccaacatgaacctcaacgaggtgatcgcgaaccgcgcgagcgagctgctcggcggcgagcgcggcgaaagccgcgccgtgcatccaaacgatgacgtcaatcgcggccagtcgtcgaacgacgtgttcccgaccgcgatgcacatcgccgccgcgcgtgcgatcgtcgaccatctgctgcccgcgctgcgcacgctgcgcgcgacactcgacgcgaaggccgccgcgttcgccgacatcgtgaagatcggccgcacgcacctgcaggacgcgacgccgctcacgctcggccaggaattctccggctacgtcgcgcagctcgatcagggcatccgtcacgtcgaggcggcgctgcctcatctgtacgagctcgcgcaaggcggcaccgcggtcggcacgggcctgaacgcgcatccgaagttcgcggctggcgttgcggccgagatcggccggctcaccggcctgccgttcgtcagcgcaccgaacaaattcgaagtgatggccgctgccgacgcgctcgtgttcgcgcacggcgcgctgaagacggtcgccgcgagcctgatgaagatcgcgaacgacatccgctggctcgcgagcgggccgcgctgcgggctcggcgagctgtcgattccggaaaacgagccgggcagctcgatcatgccgggcaaggtcaatccgacgcaatccgaagcggtgacgatgctgtgctgccaggtgttcggcaatgacgtcgcggtgaacttcggcggcgcgagcggcaatttcgagctgaacgtgtttcggccgatgatcgcgcacaacgtgctgcaatcggtgcggctgctcgcggacggcgcacagggcttcaacgatcattgcgcggtcggcatcgagccgaatcgcgcgcgcatcgacgcgctgctgaacgaatcgctgatgctcgtgacggcgctcaatccgcacatcggctacgacaaggccgcgcagatcgcgaagaaggcgcacaaggaaggcaccacgctcaaagccgccgcgcttgcgctcggttacgtgaccgatgcgcagttcgacgaatgggtgcggccggagcatatggtcggcaaccgctga

SEQ ID NO: 133858 - protein, 464 aa, Burkholderia mallei ATCC 23344
MSEAVRMERDTFGEIAVPAARLWGAQTQRSLQNFKISTEKQSPELIHALALIKRAAAAVNLELGVLAQDKANAIVAAADEIIAGRHADEFPLAVWQTGSGTQTNMNLNEVIANRASELLGGERGESRAVHPNDDVNRGQSSNDVFPTAMHIAAARAIVDHLLPALRTLRATLDAKAAAFADIVKIGRTHLQDATPLTLGQEFSGYVAQLDQGIRHVEAALPHLYELAQGGTAVGTGLNAHPKFAAGVAAEIGRLTGLPFVSAPNKFEVMAAADALVFAHGALKTVAASLMKIANDIRWLASGPRCGLGELSIPENEPGSSIMPGKVNPTQSEAVTMLCCQVFGNDVAVNFGGASGNFELNVFRPMIAHNVLQSVRLLADGAQGFNDHCAVGIEPNRARIDALLNESLMLVTALNPHIGYDKAAQIAKKAHKEGTTLKAAALALGYVTDAQFDEWVRPEHMVGNR

SEQ ID NO: 133859 - DNA, 1410 bp, Methylococcus capsulatus str. Bath; identical to SEQ ID NO: 115230
  CDS (1)..(1410): transl_table=11

SEQ ID NO: 133860 - protein, 469 aa, Methylococcus capsulatus str. Bath; identical to SEQ ID NO: 115231

SEQ ID NO: 133861 - DNA, 1401 bp, Azoarcus sp. EbN1; identical to SEQ ID NO: 115234
  CDS (1)..(1401): transl_table=11

SEQ ID NO: 133862 - protein, 466 aa, Azoarcus sp. EbN1; identical to SEQ ID NO: 115235

SEQ ID NO: 133863 - DNA, 1392 bp, Campylobacter jejuni RM1221; identical to SEQ ID NO: 115240
  CDS (1)..(1392): transl_table=11

SEQ ID NO: 133864 - protein, 463 aa, Campylobacter jejuni RM1221; identical to SEQ ID NO: 115241

SEQ ID NO: 133865 - DNA, 1389 bp, Neisseria gonorrhoeae FA 1090
  CDS (1)..(1389): transl_table=11
atgaacacccgcaccgaacacgacacgatgggcaatgtcgaagtcccgtccgaagcctattggggcgcgcagacccagcgcagccgcaacaatttcaaaatcggcggcgaaaccctgccgcagccgctgatttacgctttggcgttggtgaaaaaagccgccgccgcgaccaatgtttccctcggcaggattaagcccgaacaggcggatttgattacgcaggcggcggatgatgtactgaacggcaggctcgacgggcagttccccttagtggtttggcagaccggctccggtacgcagtccaatatgaacatgaacgaagtgctggcaaaccgcgccaacgaaattgcaggtacgggtttggcggcgtaccggcccgtccaccccaacgaccatgtgaaccacgcgcaatcgaccaacgacgcgttcccgaccgccatccacgtcgccgccgcgattgaaatcaaccgccaccttattccggcggtaaaagccttgcgcgatacattggacaaaaaagcccaagccttcgcccccatcgtcaaaatcggccgtacccacttgcaggatgcgacgccgctgactttgggacaagaattttccggctacgtttcccaactcgaccacagcttaggccgtctgaacgacgcgctcaaaggtttgtacgaactcgccttgggtggaacggcggtcggtacgggtttgaacagccatcccgaatacgctgaaatagccgccgccaaactcgccgaactgtccggcctgccgtttgtcagcgcgccgaacaaatttgaagccttgggcggacgcgatgccgccgttgccgcttcgggcgcattgaaaacgctggcggcaagcctgaacaaaatcgccaacgacatccgctggctggcaagcggcccgcgctgcggcttgggcgaaatcaaaatccccgaaaacgaaccgggttcgtccattatgccgggcaaagtcaacccgacccaatgcgaagcgatgacgatggtgtgctgccaagtgttcggcaacgacgttaccatcggtatggcgggcgcgtcgggcaatttcgagctgaacgtctatatgcccgtcatcgcttacaacctcttgcaatccatccgcctcttgggcgacgcgtgcaacagcttcaacgaaaactgcgccgccggcatcgaacccgtaccggaaaaaatcgactatttcctgcaccattccctgatgctggttactgcgttaaaccgcaaaatcggctacgaaaacgccgccaaagtcgccaaaaccgcctacaaaaacgataaatcgctgcgcgaaactgccgttgggttgggcttgctgacgggcgaagagtttgacgaactggtcgtccctgccgatatggttcatccgcgctaa

SEQ ID NO: 133866 - protein, 462 aa, Neisseria gonorrhoeae FA 1090
MNTRTEHDTMGNVEVPSEAYWGAQTQRSRNNFKIGGETLPQPLIYALALVKKAAAATNVSLGRIKPEQADLITQAADDVLNGRLDGQFPLVVWQTGSGTQSNMNMNEVLANRANEIAGTGLAAYRPVHPNDHVNHAQSTNDAFPTAIHVAAAIEINRHLIPAVKALRDTLDKKAQAFAPIVKIGRTHLQDATPLTLGQEFSGYVSQLDHSLGRLNDALKGLYELALGGTAVGTGLNSHPEYAEIAAAKLAELSGLPFVSAPNKFEALGGRDAAVAASGALKTLAASLNKIANDIRWLASGPRCGLGEIKIPENEPGSSIMPGKVNPTQCEAMTMVCCQVFGNDVTIGMAGASGNFELNVYMPVIAYNLLQSIRLLGDACNSFNENCAAGIEPVPEKIDYFLHHSLMLVTALNRKIGYENAAKVAKTAYKNDKSLRETAVGLGLLTGEEFDELVVPADMVHPR

SEQ ID NO: 133867 - DNA, 1395 bp, Pseudomonas syringae pv. syringae B728a; identical to SEQ ID NO: 115246
  CDS (1)..(1395): transl_table=11

SEQ ID NO: 133868 - protein, 464 aa, Pseudomonas syringae pv. syringae B728a; identical to SEQ ID NO: 115247

SEQ ID NO: 133869 - DNA, 1377 bp, Pseudomonas fluorescens Pf-5; identical to SEQ ID NO: 115250
  CDS (1)..(1377): transl_table=11

SEQ ID NO: 133870 - protein, 458 aa, Pseudomonas fluorescens Pf-5; identical to SEQ ID NO: 115251

SEQ ID NO: 133871 - DNA, 1395 bp, Pseudomonas fluorescens Pf-5; identical to SEQ ID NO: 115254
  CDS (1)..(1395): transl_table=11

SEQ ID NO: 133872 - protein, 464 aa, Pseudomonas fluorescens Pf-5; identical to SEQ ID NO: 115255

SEQ ID NO: 133873 - DNA, 1404 bp, Psychrobacter arcticus 273-4; identical to SEQ ID NO: 115256
  CDS (1)..(1404): transl_table=11

SEQ ID NO: 133874 - protein, 467 aa, Psychrobacter arcticus 273-4; identical to SEQ ID NO: 115257

SEQ ID NO: 133875 - DNA, 1458 bp, Colwellia psychrerythraea 34H; identical to SEQ ID NO: 45184
  CDS (1)..(1458): transl_table=11

SEQ ID NO: 133876 - protein, 485 aa, Colwellia psychrerythraea 34H; identical to SEQ ID NO: 45185

SEQ ID NO: 133877 - DNA, 1377 bp, Pseudomonas syringae pv. phaseolicola 1448A; identical to SEQ ID NO: 115262
  CDS (1)..(1377): transl_table=11

SEQ ID NO: 133878 - protein, 458 aa, Pseudomonas syringae pv. phaseolicola 1448A; identical to SEQ ID NO: 115263

SEQ ID NO: 133879 - DNA, 1407 bp, Dechloromonas aromatica RCB; identical to SEQ ID NO: 115264
  CDS (1)..(1407): transl_table=11

SEQ ID NO: 133880 - protein, 468 aa, Dechloromonas aromatica RCB; identical to SEQ ID NO: 115265

SEQ ID NO: 133881 - DNA, 1392 bp, Thermobifida fusca YX; identical to SEQ ID NO: 115266
  CDS (1)..(1392): transl_table=11

SEQ ID NO: 133882 - protein, 463 aa, Thermobifida fusca YX; identical to SEQ ID NO: 115267

SEQ ID NO: 133883 - DNA, 1401 bp, Thiobacillus denitrificans ATCC 25259; identical to SEQ ID NO: 45190
  CDS (1)..(1401): transl_table=11

SEQ ID NO: 133884 - protein, 466 aa, Thiobacillus denitrificans ATCC 25259; identical to SEQ ID NO: 45191

SEQ ID NO: 133885 - DNA, 1416 bp, Anabaena variabilis ATCC 29413; identical to SEQ ID NO: 45192
  CDS (1)..(1416): transl_table=11

SEQ ID NO: 133886 - protein, 471 aa, Anabaena variabilis ATCC 29413; identical to SEQ ID NO: 45193

SEQ ID NO: 133887 - DNA, 1347 bp, Pseudomonas fluorescens PfO-1
  CDS (1)..(1347): transl_table=11
atgggcgaactgcaggtgccggtggacgctctctacggcgcgcagacccagcgtgcagtggataacttcccgatcagcggcaagccgatgccaacccagttcatccgcgccctgattctggcgaaagcggccgccgcccgcgccaacgtcgaactcaaccagatcagcgccgcgcaaggcaaagccatcagcgatgccgcccaagggctgctggaaggcgacttcatgcagcattttccggtggacattttccagaccggttccggcaccagctccaacatgaacgccaacgaggtgatcgccacactggccagtcgtctgctcgaggagccattaaacgccaatgatcatgtgaactgcgggcaaagcagcaacgacattattccaaccactattcacgtcagcgccgcgctggccctgcacgaacaactgctgccggcgctgctgcacctggtgcaagtgatcgaacgcaaggccgagcaagtccatcaccacgtcaagactggccgcacccacctgatggacgccatgccggtgcgcatgagccaggtgctcaacggttgggcgcagcagctcaaagccaatatcggtcacctgcaggacttgctcccaagcctgcaatccctggcccagggcggcacggcagtcggtaccgggatcaatgcgcatccggaatttgctgcgcgtttcagccgccaattgagccagttgaccaacgtccagttcacgccaggcaaggatctgttcgccctgatcggctcgcaagacaccgctgtggccgtatcgggtcagctcaaggccaccgccgtttcactgatgaaaattgccaacgacctgcgctggatgaactccggcccgctcgccggcctcggtgagatcgaactcgaaggcctgcaaccgggctcgtcgatcatgccgggcaaggtcaatccggtgattccggaagccactgccatggtggccgcgcaagtgataggcaacgactctgtaatcaccatcgccgggcagtcaggcaatttcgagctgaacgtgatgctgccgatcatcgcccagaacctgttgagcagcatcgagttgctggccaactccagccgtctgctggctgacaaggccatcgccagcttcagggtcaacgagtcgcgcctcaaggaagcgctgtcgcgcaacccgattctggtcaccgcactcaacccgatcatcggttaccagaaagccgccgaaatcgccaagcaggcctacaaacagggtcgcccggtgatcgacgttgcgctggagcacaccgacctgtcgcgcagccagctggaagagttgctcaatcccgagaagctcaccgccggcggcgtgtaa

SEQ ID NO: 133888 - protein, 448 aa, Pseudomonas fluorescens PfO-1
MGELQVPVDALYGAQTQRAVDNFPISGKPMPTQFIRALILAKAAAARANVELNQISAAQGKAISDAAQGLLEGDFMQHFPVDIFQTGSGTSSNMNANEVIATLASRLLEEPLNANDHVNCGQSSNDIIPTTIHVSAALALHEQLLPALLHLVQVIERKAEQVHHHVKTGRTHLMDAMPVRMSQVLNGWAQQLKANIGHLQDLLPSLQSLAQGGTAVGTGINAHPEFAARFSRQLSQLTNVQFTPGKDLFALIGSQDTAVAVSGQLKATAVSLMKIANDLRWMNSGPLAGLGEIELEGLQPGSSIMPGKVNPVIPEATAMVAAQVIGNDSVITIAGQSGNFELNVMLPIIAQNLLSSIELLANSSRLLADKAIASFRVNESRLKEALSRNPILVTALNPIIGYQKAAEIAKQAYKQGRPVIDVALEHTDLSRSQLEELLNPEKLTAGGV

SEQ ID NO: 133889 - DNA, 1395 bp, Rhodobacter sphaeroides 2.4.1; identical to SEQ ID NO: 115280
  CDS (1)..(1395): transl_table=11

SEQ ID NO: 133890 - protein, 464 aa, Rhodobacter sphaeroides 2.4.1; identical to SEQ ID NO: 115281

SEQ ID NO: 133891 - DNA, 1410 bp, Geobacter metallireducens GS-15; identical to SEQ ID NO: 115286
  CDS (1)..(1410): transl_table=11

SEQ ID NO: 133892 - protein, 469 aa, Geobacter metallireducens GS-15; identical to SEQ ID NO: 115287

SEQ ID NO: 133893 - DNA, 1464 bp, Rhodospirillum rubrum ATCC 11170; identical to SEQ ID NO: 115294
  CDS (1)..(1464): transl_table=11

SEQ ID NO: 133894 - protein, 487 aa, Rhodospirillum rubrum ATCC 11170; identical to SEQ ID NO: 115295

SEQ ID NO: 133895 - DNA, 1431 bp, Moorella thermoacetica ATCC 39073; identical to SEQ ID NO: 45196
  CDS (1)..(1431): transl_table=11

SEQ ID NO: 133896 - protein, 476 aa, Moorella thermoacetica ATCC 39073; identical to SEQ ID NO: 45197

SEQ ID NO: 133897 - DNA, 1392 bp, Frankia sp. CcI3; identical to SEQ ID NO: 115300
  CDS (1)..(1392): transl_table=11

SEQ ID NO: 133898 - protein, 463 aa, Frankia sp. CcI3; identical to SEQ ID NO: 115301

SEQ ID NO: 133899 - DNA, 1377 bp, Novosphingobium aromaticivorans DSM 12444; identical to SEQ ID NO: 115302
  CDS (1)..(1377): transl_table=11

SEQ ID NO: 133900 - protein, 458 aa, Novosphingobium aromaticivorans DSM 12444; identical to SEQ ID NO: 115303

SEQ ID NO: 133901 - DNA, 1389 bp, Anaplasma phagocytophilum HZ; identical to SEQ ID NO: 115304
  CDS (1)..(1389): transl_table=11

SEQ ID NO: 133902 - protein, 462 aa, Anaplasma phagocytophilum HZ; identical to SEQ ID NO: 115305

SEQ ID NO: 133903 - DNA, 1548 bp, Neorickettsia sennetsu str. Miyayama; identical to SEQ ID NO: 115306
  CDS (1)..(1548): transl_table=11

SEQ ID NO: 133904 - protein, 515 aa, Neorickettsia sennetsu str. Miyayama; identical to SEQ ID NO: 115307

SEQ ID NO: 133905 - DNA, 1386 bp, Ehrlichia chaffeensis str. Arkansas; identical to SEQ ID NO: 115308
  CDS (1)..(1386): transl_table=11

SEQ ID NO: 133906 - protein, 461 aa, Ehrlichia chaffeensis str. Arkansas; identical to SEQ ID NO: 115309

SEQ ID NO: 133907 - DNA, 1392 bp, Francisella tularensis subsp. holarctica; identical to SEQ ID NO: 115310
  CDS (1)..(1392): transl_table=11

SEQ ID NO: 133908 - protein, 463 aa, Francisella tularensis subsp. holarctica; identical to SEQ ID NO: 115311

SEQ ID NO: 133909 - DNA, 1383 bp, Saccharophagus degradans 2-40; identical to SEQ ID NO: 115314
  CDS (1)..(1383): transl_table=11

SEQ ID NO: 133910 - protein, 460 aa, Saccharophagus degradans 2-40; identical to SEQ ID NO: 115315

SEQ ID NO: 133911 - DNA, 1431 bp, Acidobacteria bacterium Ellin345; identical to SEQ ID NO: 45200
  CDS (1)..(1431): transl_table=11

SEQ ID NO: 133912 - protein, 476 aa, Acidobacteria bacterium Ellin345; identical to SEQ ID NO: 45201

SEQ ID NO: 133913 - DNA, 1398 bp, Silicibacter sp. TM1040; identical to SEQ ID NO: 115318
  CDS (1)..(1398): transl_table=11

SEQ ID NO: 133914 - protein, 465 aa, Silicibacter sp. TM1040; identical to SEQ ID NO: 115319

SEQ ID NO: 133915 - DNA, 1422 bp, Mycobacterium sp. MCS
  CDS (1)..(1422): transl_table=11
atgaccgccgacagcgctgtcgaccagaacaccgagtaccgcatcgaacacgacaccatgggcgaggtccgggtgcccaaggatgcgctgtggcgggcgcagacccagcgcgccgtcgagaacttcccgatctcgggccgcggcctcgagcgcacccagatccgcgcgctgggactgctcaaaggcgcctgcgcgcaggtgaacaaggatctcggcctgctcgctcccgagaaggcggacgcgatcatcgccgcggccgccgagatcgccgacgggcgtcacgacgaccagttcccgatcgacgtgttccagaccggttcgggcaccagttcgaacatgaactccaacgaggtcatcgcctcgatcgcggcggcgaacggcgtgaccgtccaccccaacgacgacgtgaacatgtcgcagagctccaacgacacgttcccgacggccacccacatcgcggcgacggaagccgctgtgcgccacctgatcccggcgctcgaggtgctgcacgaatcgctggccggcaaggcgcggcagtggcgcacggtcgtgaagtccgggcgcacgcacctgatggacgcggtgccggtgacgctgggccaggagttcggcggttacgcccgtcagatcgaggccggtatcgagagggtcaaggcgacgctgccccggctgggtgagctggccatcggcggtaccgccgtcggcaccgggctcaacgcgcccgacggcttcggcgccaaggtcgtcgaggtgctcgtcgaccagaccggtctgggcgaattgaccacggccaaggactctttcgaggcgcaggccgcccgcgacgggctggtcgaggcgtccggtgcgctgcgggtgatcgcggtgtcgctgaccaagatcgccaacgacatccgttggatgggttcgggcccgctgaccggcctggccgagatccagctgccggatctgcagccgggcagctcgatcatgccgggcaaggtgaatcccgttctgcccgaagccgtcacgcaggtcgccgcccaggtcgtcggcaacgacgccgccgtcgcatggggtggcgcggccggcgcgttcgagctcaacgtgtacatcccgatgatggcgcgcaacctgctcgagtcgttcaagctgctgaccaacgtgtcgcggctgttcgccgagcggtgcatcgacggcctggtcgccaacgaggagcacatgcgcgagcaggccgagtcgtcgccgtcgatcgtgacgccgctgaactcggcgatcggctacgaggaggcggccaaggtcgccaaggaagcgctcaaggagaagaagacgatccgccagacggtcatcgaccgcgggctgatcggcgacaagctctccgaggaggaactcgaccgtcgcctcgacgtgctggcgatggcgaaggtcaagcagggcaagtag

SEQ ID NO: 133916 - protein, 473 aa, Mycobacterium sp. MCS
MTADSAVDQNTEYRIEHDTMGEVRVPKDALWRAQTQRAVENFPISGRGLERTQIRALGLLKGACAQVNKDLGLLAPEKADAIIAAAAEIADGRHDDQFPIDVFQTGSGTSSNMNSNEVIASIAAANGVTVHPNDDVNMSQSSNDTFPTATHIAATEAAVRHLIPALEVLHESLAGKARQWRTVVKSGRTHLMDAVPVTLGQEFGGYARQIEAGIERVKATLPRLGELAIGGTAVGTGLNAPDGFGAKVVEVLVDQTGLGELTTAKDSFEAQAARDGLVEASGALRVIAVSLTKIANDIRWMGSGPLTGLAEIQLPDLQPGSSIMPGKVNPVLPEAVTQVAAQVVGNDAAVAWGGAAGAFELNVYIPMMARNLLESFKLLTNVSRLFAERCIDGLVANEEHMREQAESSPSIVTPLNSAIGYEEAAKVAKEALKEKKTIRQTVIDRGLIGDKLSEEELDRRLDVLAMAKVKQGK

SEQ ID NO: 133917 - DNA, 1392 bp, Rubrobacter xylanophilus DSM 9941; identical to SEQ ID NO: 115320
  CDS (1)..(1392): transl_table=11

SEQ ID NO: 133918 - protein, 463 aa, Rubrobacter xylanophilus DSM 9941; identical to SEQ ID NO: 115321

SEQ ID NO: 133919 - DNA, 1392 bp, Mesorhizobium sp. BNC1; identical to SEQ ID NO: 115322
  CDS (1)..(1392): transl_table=11

SEQ ID NO: 133920 - protein, 463 aa, Mesorhizobium sp. BNC1; identical to SEQ ID NO: 115323

SEQ ID NO: 133921 - DNA, 1404 bp, Rhodococcus sp. RHA1; identical to SEQ ID NO: 115328
  CDS (1)..(1404): transl_table=11

SEQ ID NO: 133922 - protein, 467 aa, Rhodococcus sp. RHA1; identical to SEQ ID NO: 115329

SEQ ID NO: 133923 - DNA, 1395 bp, Haemophilus somnus 129PT
  CDS (1)..(1395): transl_table=11
atggcatttcgtatcgaaaaagacactatgggcgaagttcaagttcctgctgataaatattgggctgcacaaacagaacgttctcgtaacaatttcaaaatcggtcctgaagcttcgatgccaaaagaaattattgaggctttcggttatttaaaaaaagccgccgcttatgcaaaccatgatttaggtgtgttaaatacggaaaaacgtgatttaatcgctcaggcttgcgatgaaattcttgccaataaacttgatgaccaattccctcttgtaatttggcaaactggttcaggcactcaatcgaatatgaatgtcaatgaagttgttgcaaaccgtgcacatgtcattcaaggcggtaaattaggagaaaaatccgttattcacccgaatgatgatgtcaataaatcccaatcttcaaatgatacttatcctaccgccatgcatattgccgcttataaaaaagtggttgaacatacgttaccttgtgtcagacgtttgcaaaaaacgttagcagaaaaagcagaattgtttaaagatgttgtaaaaattggtcgtactcatttaatggacgctacaccattaactttaggtcaagagttttcggcgtatgcggcacaacttgctttcggtatcaaggcactggaaaacaccttaccgcatttgcgtgagcttgccttaggtggcacagctgttggtacagggctaaatacacctaaaggctatgatgtaaaagtagcggaatatattgctaaatttacagggttaccttttgttaccgcacaaaataaatttgaagctcttgcaactcatgatgcgattgttgaaactcatggtgccttaaaacagttagcagtttctctttacaaaatcgccaatgatgttcgtttattggcttcaggtccacgctcaggcattggggaaattctcattcctgaaaatgagccgggttcatcaattatgccgggtaaagtaaacccaacgcaatgtgaagcaatgacaatggtttgtgcacaagtactaggtaatgatgtcactatttctttcgcaggtacacaaggtcatttccaattaaatgtgtataaacccgtcatggcatacaatttcttacaatcggcacaattattaggtgatgcttgtgtgtcatttgatgaacattgtgcaatgggtattgagccaaactatccacgtattaagcaacaactggagcaatctttaatgttagttaccgcacttaatacgcatattggttatgaaaatgcagctaaaattgcgaaaactgcacataaaaatggtacaacattgaaagaagaagccatcaatcttgggttggtgagtgcggaacaattcgatgaatgggtacgtccggaagatatggttggcagcttaaaatag

SEQ ID NO: 133924 - protein, 464 aa, Haemophilus somnus 129PT
MAFRIEKDTMGEVQVPADKYWAAQTERSRNNFKIGPEASMPKEIIEAFGYLKKAAAYANHDLGVLNTEKRDLIAQACDEILANKLDDQFPLVIWQTGSGTQSNMNVNEVVANRAHVIQGGKLGEKSVIHPNDDVNKSQSSNDTYPTAMHIAAYKKVVEHTLPCVRRLQKTLAEKAELFKDVVKIGRTHLMDATPLTLGQEFSAYAAQLAFGIKALENTLPHLRELALGGTAVGTGLNTPKGYDVKVAEYIAKFTGLPFVTAQNKFEALATHDAIVETHGALKQLAVSLYKIANDVRLLASGPRSGIGEILIPENEPGSSIMPGKVNPTQCEAMTMVCAQVLGNDVTISFAGTQGHFQLNVYKPVMAYNFLQSAQLLGDACVSFDEHCAMGIEPNYPRIKQQLEQSLMLVTALNTHIGYENAAKIAKTAHKNGTTLKEEAINLGLVSAEQFDEWVRPEDMVGSLK

SEQ ID NO: 133925 - DNA, 1410 bp, Trichodesmium erythraeum IMS101; identical to SEQ ID NO: 115330
  CDS (1)..(1410): transl_table=11

SEQ ID NO: 133926 - protein, 469 aa, Trichodesmium erythraeum IMS101; identical to SEQ ID NO: 115331

SEQ ID NO: 133927 - DNA, 1389 bp, Alkalilimnicola ehrlichei MLHE-1; identical to SEQ ID NO: 115334
  CDS (1)..(1389): transl_table=11

SEQ ID NO: 133928 - protein, 462 aa, Alkalilimnicola ehrlichei MLHE-1; identical to SEQ ID NO: 115335

SEQ ID NO: 133929 - DNA, 1401 bp, Hyphomonas neptunium ATCC 15444; identical to SEQ ID NO: 45206
  CDS (1)..(1401): transl_table=11

SEQ ID NO: 133930 - protein, 466 aa, Hyphomonas neptunium ATCC 15444; identical to SEQ ID NO: 45207

SEQ ID NO: 133931 - DNA, 1392 bp, Rhizobium leguminosarum bv. viciae 3841; identical to SEQ ID NO: 115338
  CDS (1)..(1392): transl_table=11

SEQ ID NO: 133932 - protein, 463 aa, Rhizobium leguminosarum bv. viciae 3841; identical to SEQ ID NO: 115339

SEQ ID NO: 133933 - DNA, 1377 bp, Pseudomonas aeruginosa UCBPP-PA14; identical to SEQ ID NO: 115342
  CDS (1)..(1377): transl_table=11

SEQ ID NO: 133934 - protein, 458 aa, Pseudomonas aeruginosa UCBPP-PA14; identical to SEQ ID NO: 115343

SEQ ID NO: 133935 - DNA, 1383 bp, Pediococcus pentosaceus ATCC 25745; identical to SEQ ID NO: 115344
  CDS (1)..(1383): transl_table=11

SEQ ID NO: 133936 - protein, 460 aa, Pediococcus pentosaceus ATCC 25745; identical to SEQ ID NO: 115345

SEQ ID NO: 133937 - DNA, 1377 bp, Oenococcus oeni PSU-1; identical to SEQ ID NO: 115346
  CDS (1)..(1377): transl_table=11

SEQ ID NO: 133938 - protein, 458 aa, Oenococcus oeni PSU-1; identical to SEQ ID NO: 115347

SEQ ID NO: 133939 - DNA, 1386 bp, Solibacter usitatus Ellin6076; identical to SEQ ID NO: 115348
  CDS (1)..(1386): transl_table=11

SEQ ID NO: 133940 - protein, 461 aa, Solibacter usitatus Ellin6076; identical to SEQ ID NO: 115349

SEQ ID NO: 133941 - DNA, 1407 bp, Mycobacterium smegmatis str. MC2 155; identical to SEQ ID NO: 115352
  CDS (1)..(1407): transl_table=11

SEQ ID NO: 133942 - protein, 468 aa, Mycobacterium smegmatis str. MC2 155; identical to SEQ ID NO: 115353

SEQ ID NO: 133943 - DNA, 1398 bp, Nocardioides sp. JS614; identical to SEQ ID NO: 115354
  CDS (1)..(1398): transl_table=11

SEQ ID NO: 133944 - protein, 465 aa, Nocardioides sp. JS614; identical to SEQ ID NO: 115355

SEQ ID NO: 133945 - DNA, 1380 bp, Azoarcus sp. BH72; identical to SEQ ID NO: 115356
  CDS (1)..(1380): transl_table=11

SEQ ID NO: 133946 - protein, 459 aa, Azoarcus sp. BH72; identical to SEQ ID NO: 115357

SEQ ID NO: 133947 - DNA, 1392 bp, Acidovorax sp. JS42; identical to SEQ ID NO: 115360
  CDS (1)..(1392): transl_table=11

SEQ ID NO: 133948 - protein, 463 aa, Acidovorax sp. JS42; identical to SEQ ID NO: 115361

SEQ ID NO: 133949 - DNA, 1422 bp, Nostoc punctiforme PCC 73102; identical to SEQ ID NO: 45212
  CDS (1)..(1422): transl_table=11

SEQ ID NO: 133950 - protein, 473 aa, Nostoc punctiforme PCC 73102; identical to SEQ ID NO: 45213

SEQ ID NO: 133951 - DNA, 1395 bp, Haemophilus influenzae R2846; identical to SEQ ID NO: 115368
  CDS (1)..(1395): transl_table=11

SEQ ID NO: 133952 - protein, 464 aa, Haemophilus influenzae R2846; identical to SEQ ID NO: 115369

SEQ ID NO: 133953 - DNA, 1374 bp, Crocosphaera watsonii WH 8501; identical to SEQ ID NO: 115376
  CDS (1)..(1374): transl_table=11

SEQ ID NO: 133954 - protein, 457 aa, Crocosphaera watsonii WH 8501; identical to SEQ ID NO: 115377

SEQ ID NO: 133955 - DNA, 1395 bp, Exiguobacterium sibiricum 255-15; identical to SEQ ID NO: 115378
  CDS (1)..(1395): transl_table=11

SEQ ID NO: 133956 - protein, 464 aa, Exiguobacterium sibiricum 255-15; identical to SEQ ID NO: 115379

SEQ ID NO: 133957 - DNA, 1398 bp, Prosthecochloris aestuarii DSM 271; identical to SEQ ID NO: 115380
  CDS (1)..(1398): transl_table=11

SEQ ID NO: 133958 - protein, 465 aa, Prosthecochloris aestuarii DSM 271; identical to SEQ ID NO: 115381

SEQ ID NO: 133959 - DNA, 1410 bp, Xylella fastidiosa Dixon; identical to SEQ ID NO: 115384
  CDS (1)..(1410): transl_table=11

SEQ ID NO: 133960 - protein, 469 aa, Xylella fastidiosa Dixon; identical to SEQ ID NO: 115385

SEQ ID NO: 133961 - DNA, 1398 bp, Croceibacter atlanticus HTCC2559; identical to SEQ ID NO: 115388
  CDS (1)..(1398): transl_table=11

SEQ ID NO: 133962 - protein, 465 aa, Croceibacter atlanticus HTCC2559; identical to SEQ ID NO: 115389

SEQ ID NO: 133963 - DNA, 1395 bp, Sulfitobacter sp. EE-36; identical to SEQ ID NO: 115390
  CDS (1)..(1395): transl_table=11

SEQ ID NO: 133964 - protein, 464 aa, Sulfitobacter sp. EE-36; identical to SEQ ID NO: 115391

SEQ ID NO: 133965 - DNA, 1392 bp, Roseovarius nubinhibens ISM; identical to SEQ ID NO: 115392
  CDS (1)..(1392): transl_table=11

SEQ ID NO: 133966 - protein, 463 aa, Roseovarius nubinhibens ISM; identical to SEQ ID NO: 115393

SEQ ID NO: 133967 - DNA, 1395 bp, Oceanicola batsensis HTCC2597; identical to SEQ ID NO: 115394
  CDS (1)..(1395): transl_table=11

SEQ ID NO: 133968 - protein, 464 aa, Oceanicola batsensis HTCC2597; identical to SEQ ID NO: 115395

SEQ ID NO: 133969 - DNA, 1452 bp, Erythrobacter sp. NAP1; identical to SEQ ID NO: 115398
  CDS (1)..(1452): transl_table=11

SEQ ID NO: 133970 - protein, 483 aa, Erythrobacter sp. NAP1; identical to SEQ ID NO: 115399

SEQ ID NO: 133971 - DNA, 1383 bp, Photobacterium sp. SKA34; identical to SEQ ID NO: 115404
  CDS (1)..(1383): transl_table=11

SEQ ID NO: 133972 - protein, 460 aa, Photobacterium sp. SKA34; identical to SEQ ID NO: 115405

SEQ ID NO: 133973 - DNA, 1380 bp, Oceanospirillum sp. MED92; identical to SEQ ID NO: 115406
  CDS (1)..(1380): transl_table=11

SEQ ID NO: 133974 - protein, 459 aa, Oceanospirillum sp. MED92; identical to SEQ ID NO: 115407

SEQ ID NO: 133975 - DNA, 1410 bp, Rickettsiella grylli; identical to SEQ ID NO: 115412
  CDS (1)..(1410): transl_table=11

SEQ ID NO: 133976 - protein, 469 aa, Rickettsiella grylli; identical to SEQ ID NO: 115413

SEQ ID NO: 133977 - DNA, 1350 bp, Oceanobacter sp. RED65
  CDS (1)..(1350): transl_table=11
atgggagaggtagaagtcccagctaatgcgctttatggagcgcaaactcagcgagcggttaataactttcagattagcggacaggggtttacaaatgaattccttgaagctgtggctttagttaagtatgcggctgccgatgtaaatgctgagttaggtgcgctagagcgagaggatgccgaagcaataaaacaagcatgcgagctcatacttcggcgagagtatttggatcaattccctgtcgatgtttatcaaaccggttcaggtacatccactaatatgaatgtgaatgaggtcattgcgaaattagccaatgacatattaggtgaaaaacgaattcatccaaataatcatgtgaattttgggcaaagttctaacgatgtcatacctacggcgattcgaatttccacagccttacaaacagaacgtcgtttattaccagcgttagaagcgatgcaggccagtttgttagaaaaagcacaggagtttagtgggatagtaaaaactggccgtacgcatttgatggatgcgatgcctgtaacttttgaacaagtgtttcaagcgtatgctagccaactagaacaatgcacggagcgtctagtacaaacactgccgcgcttgtgcgctctgcctcaaggtgggacagcagtaggaagcggtgtaaacaggcatcctgcctttgctagcaaagtagcacacgcaatcggcaaaaagacaggaatgcattttactgaaacgaaaaatcatattgcagcacagggaaccgctgatgtgccgttagagttaagtggtcaactaaagtctgtagccatggcgctttacaaactatgcaacgacttacgttggatgaattcaggacccaataatggcttgggagaaattcaactaaaagcgttacagcctggatcttctatcatgcctgctaaagtaaacccagtgatggaagaggctatggcgatggtctgtagtcaggtggtcggttttgatagtgcaaatactatggcagcagcaagcagtcagtttgaattgaatgtcatgcagccgttgcttgctcataacttgcttgaggctattcgattattaagtaatgggtgtgatcatcttagagaattcagcgtacaacatatacaggttaataaacagcatgtcgaagaaagtctagataaaaatccaattttggttacggcgcttaatccattaattggttatgacttggcggcaaaagtagcaaagaaggcattatctgagaagcgagcattaattgacgtcgcgttggaaatgacggatctatctaagcatgaattagaacaagcactagacccgctaaaaatgacacaacccggaatttag

SEQ ID NO: 133978 - protein, 449 aa, Oceanobacter sp. RED65
MGEVEVPANALYGAQTQRAVNNFQISGQGFTNEFLEAVALVKYAAADVNAELGALEREDAEAIKQACELILRREYLDQFPVDVYQTGSGTSTNMNVNEVIAKLANDILGEKRIHPNNHVNFGQSSNDVIPTAIRISTALQTERRLLPALEAMQASLLEKAQEFSGIVKTGRTHLMDAMPVTFEQVFQAYASQLEQCTERLVQTLPRLCALPQGGTAVGSGVNRHPAFASKVAHAIGKKTGMHFTETKNHIAAQGTADVPLELSGQLKSVAMALYKLCNDLRWMNSGPNNGLGEIQLKALQPGSSIMPAKVNPVMEEAMAMVCSQVVGFDSANTMAAASSQFELNVMQPLLAHNLLEAIRLLSNGCDHLREFSVQHIQVNKQHVEESLDKNPILVTALNPLIGYDLAAKVAKKALSEKRALIDVALEMTDLSKHELEQALDPLKMTQPGI

SEQ ID NO: 133979 - DNA, 1425 bp, Desulfitobacterium hafniense DCB-2
  CDS (1)..(1425): transl_table=11
gtgcgcaaggaaaaggacttgctcggagttatggaagtaccggaagacgtctattatggaatacagaccttaagagctcgtgaaaacttcccgattacgggatatcgcccacaccatgaattaatccggggattgggtttggtgaaggctgctgccgctcaagccaatatggacatcggttccttgaaccacgagatcggcgaggctgtaattaaagcatctctggaagtggccgagggtgcctttaatgaccattttgtggttgatgtcattcaaggaggagcaggaacctcgattaatatgaatgctaatgaagtgattgctaaccgggctattgagattttgggagggcgaaaaggggattactcccgggttcatcccaatgttcatgttaacatggcgcagagcaccaatgatgtatttcccacagccatccgtattgcctgtcttaatgtagcagacgatcttcttcatgccttaaatgagttgaagagtgcttttcaagagaaggccagggagtttgacggagtcatcaagatggggagaacccatcttcaggatgcggttcctattcgcttagggcaggaattcgccgcctatggacaaatgctggagagagatctgcgcaggatcactgaagcagcgaagtccttacatagtattaatatgggtgcaacagctgtaggtaccgggctgaatgctgatccgatttatattgaggaagtttctgagaatctgaggaaggttaccgggttgccgttattgcgagcggataatctggtagatgcgacacagaacacggatgcctttttggaggtgtcgggtgctcttaagaccctggccgttaacctctctaagatcgccaatgatctgcggctgatggcctctgggcccagaacgggctttggggaaattaatcttcctgctatgcagccggggtcttctattatgcccgggaaagtcaatcccgtcatggctgaggtggtcaaccaggtatccttccaggtacagggaaatgattttaccattgccttagcctgtggagcggggcagctggaactcaatgtgatggagcctgtggtagtcttcaatctgctccaatctttggatatcctccgcaatgtgatcaaggtcttcaaagagcgctgtgtcgatgggataaccgctaatgtggaacgctgtcgggatctggttgaaaacagcgtcggtgtcgtcaccgcaatcaacccccatgtaggatacgaagtcgcttcccgaatcgccaaggaagccatagtgaacggccgtcctgtcagagagattgtcctggaaagaggacttttgacctccgaggagctggatcttatattaaatcctcacgaaatgaccaatccgggtatcagcggctcggagttgcttaagggagtgcttccccgtggtcattaa

SEQ ID NO: 133980 - protein, 474 aa, Desulfitobacterium hafniense DCB-2
MRKEKDLLGVMEVPEDVYYGIQTLRARENFPITGYRPHHELIRGLGLVKAAAAQANMDIGSLNHEIGEAVIKASLEVAEGAFNDHFVVDVIQGGAGTSINMNANEVIANRAIEILGGRKGDYSRVHPNVHVNMAQSTNDVFPTAIRIACLNVADDLLHALNELKSAFQEKAREFDGVIKMGRTHLQDAVPIRLGQEFAAYGQMLERDLRRITEAAKSLHSINMGATAVGTGLNADPIYIEEVSENLRKVTGLPLLRADNLVDATQNTDAFLEVSGALKTLAVNLSKIANDLRLMASGPRTGFGEINLPAMQPGSSIMPGKVNPVMAEVVNQVSFQVQGNDFTIALACGAGQLELNVMEPVVVFNLLQSLDILRNVIKVFKERCVDGITANVERCRDLVENSVGVVTAINPHVGYEVASRIAKEAIVNGRPVREIVLERGLLTSEELDLILNPHEMTNPGISGSELLKGVLPRGH

SEQ ID NO: 133981 - DNA, 1398 bp, Synechococcus sp. RS9916; identical to SEQ ID NO: 115414
  CDS (1)..(1398): transl_table=11

SEQ ID NO: 133982 - protein, 465 aa, Synechococcus sp. RS9916; identical to SEQ ID NO: 115415

SEQ ID NO: 133983 - DNA, 1386 bp, Vibrio sp. Ex25; identical to SEQ ID NO: 115416
  CDS (1)..(1386): transl_table=11

SEQ ID NO: 133984 - protein, 461 aa, Vibrio sp. Ex25; identical to SEQ ID NO: 115417

SEQ ID NO: 133985 - DNA, 1374 bp, Alteromonadales bacterium TW-7; identical to SEQ ID NO: 115418
  CDS (1)..(1374): transl_table=11

SEQ ID NO: 133986 - protein, 457 aa, Alteromonadales bacterium TW-7; identical to SEQ ID NO: 115419

SEQ ID NO: 133987 - DNA, 1437 bp, Pseudomonas putida GB-1; identical to SEQ ID NO: 45228
  CDS (1)..(1437): transl_table=11

SEQ ID NO: 133988 - protein, 478 aa, Pseudomonas putida GB-1; identical to SEQ ID NO: 45229

SEQ ID NO: 133989 - DNA, 1395 bp, Pseudomonas putida GB-1; identical to SEQ ID NO: 45230
  CDS (1)..(1395): transl_table=11

SEQ ID NO: 133990 - protein, 464 aa, Pseudomonas putida GB-1; identical to SEQ ID NO: 45231

SEQ ID NO: 133991 - DNA, 1380 bp, Pseudomonas putida GB-1; identical to SEQ ID NO: 45232
  CDS (1)..(1380): transl_table=11

SEQ ID NO: 133992 - protein, 459 aa, Pseudomonas putida GB-1; identical to SEQ ID NO: 45233

SEQ ID NO: 133993 - DNA, 1380 bp, Marinobacter sp. ELB17; identical to SEQ ID NO: 45234
  CDS (1)..(1380): transl_table=11

SEQ ID NO: 133994 - protein, 459 aa, Marinobacter sp. ELB17; identical to SEQ ID NO: 45235

SEQ ID NO: 133995 - DNA, 1383 bp, Bacillus sp. SG-1
  CDS (1)..(1383): transl_table=11
atggattacagaacggaacgtgatacgattggtgaaatccaggtacctgctgataagttctggggagcacagactcagcggagcagggagaacttcaaaatcagccatgagagaatgcctcttgaggttacatatgggtttgcacagttgaaaaaagcagctgcaattgttaacaatgagcttggaaagctgtctgacacaaagaaggatgccatcgtaaatgcatgtgatgaaatcatctcagggttacttgatgaacatttcccattggtggtatggcagacagggagcggtacgcaatccaatatgaatgtaaacgaagtcgttgcttacagagccaatcaaatgatccagggaagcggtgaaaaagttcacccaaatgacgatgtgaatatgtcacaaagttcgaatgatacatttcctacagccatgcatgttgcggcttataaagaaatccaggaaaaactgaagcccgcgctggagcaatttcatcaaacgttaagcgaaaaagagaaagagttcatggacatcattaaaatcgggcgtacccatcttcaggatgccacaccattgacacttggacaggaaatcagcgggtggaggacaatgcttgagaggtccctgcaaatgattgaagaaagcagcaagcatctgctgaaccttgcaatcggtggaacagccgtaggcacagggataaatgcagatccgaagttcggtgataaggtggctgctcaactaggaaagcaaacaggcttttcgtttgtgtcgtccgaaaataagttccatgcgttgacttcccatgatgaggttgttcatgtgcatggtgccttgaaagcattggctgctgatgtgatgaagatcgccaatgatgtacgctggctggcaagcggtccacgaagcggtattggtgaaattacgatacctgcaaatgaaccgggaagctccatcatgcctggtaaggtgaatcctacccagagtgaggcgttgacgatggtctctgcccaggtatttggaaatgatgccgttatcggcttcgcggcgagccagggcaattttgaactgaatgtatttaaaccggttatcatccataatctgcttcaatcgaccaggcttttggctgatggcatccgttcatttgatgaaaattgtgctcaaggtatcgagccaaacaaagaagtgattgatgagtttgtgaacagatcccttatgctggtaaccgccctcaatcctcatattggttacgaaaaagcagctgaaattgctaagaaggcccataaagaaggcctgacattgaaagaagctgccgtcaggtccggatacctgtcggaagagcaatatgatgaatggatcgatccttctaaaatggtgaatctaaaaaaatag

SEQ ID NO: 133996 - protein, 460 aa, Bacillus sp. SG-1
MDYRTERDTIGEIQVPADKFWGAQTQRSRENFKISHERMPLEVTYGFAQLKKAAAIVNNELGKLSDTKKDAIVNACDEIISGLLDEHFPLVVWQTGSGTQSNMNVNEVVAYRANQMIQGSGEKVHPNDDVNMSQSSNDTFPTAMHVAAYKEIQEKLKPALEQFHQTLSEKEKEFMDIIKIGRTHLQDATPLTLGQEISGWRTMLERSLQMIEESSKHLLNLAIGGTAVGTGINADPKFGDKVAAQLGKQTGFSFVSSENKFHALTSHDEVVHVHGALKALAADVMKIANDVRWLASGPRSGIGEITIPANEPGSSIMPGKVNPTQSEALTMVSAQVFGNDAVIGFAASQGNFELNVFKPVIIHNLLQSTRLLADGIRSFDENCAQGIEPNKEVIDEFVNRSLMLVTALNPHIGYEKAAEIAKKAHKEGLTLKEAAVRSGYLSEEQYDEWIDPSKMVNLKK

SEQ ID NO: 133997 - DNA, 1392 bp, unidentified eubacterium SCB49
  CDS (1)..(1392): transl_table=11
atgaaatacagaattgaaaaagacacgatgggtgatgttcaagtacctgcagacaaactgtggggagcacaaacagaacgttctagaaataattttaaaataggtagtcctgcatctatgcctcttgaggtagtatacggatttgcttatctaaaaaaagcagctgcttatacaaaccacgaatgcggaattcttgatgaaacaaaaagagatttaatcgcagcagtatgtgacgagattcttgctggacaacatgatgatcagtttccattggtaatctggcaaacaggttctggtacacaaagtaacatgaatgtaaatgaagtcgtggcaaaccgcgcgcatcagctagctggtaaaacagtaggtgaaggtgaaaaaaccttagctcctaatgatgatgtaaacaaatcgcaatcttctaatgataccttcccaacaggaatgcacattgcggcttataaaaaacttgtagaagttactattcctggtgtagaacaattacacaaaacattagtggctaaatctgaagagtttgataacgtagtaaaaataggacgtacacacttaatggatgctactcccctaaccttaggacaagagtttagcgggtatgcttctcaattagctcacggtcttaaagccttaaaaaatacgcttgcgcatttaagcgaattagcactaggaggtactgcggtaggaacaggaattaatacaccagaaggatattctgaaaaagtagcagcacatattgcaaacttcacagggcttccatttatcacagcagaaaataaatttgaagccttagcggcacacgatgcgattgtagaatctcacggagctttaaagcaactggcggtttcgcttaataaaatagcaaatgatgtacgtatgcttgccagcggacctcgtagcggaattggtgaaattaccatcccagcaaacgagccaggatcttctattatgccaggtaaagtaaaccctacacaatgtgaagcattaacaatggtttgtgctcaagtaattggtaatgatatggcaatcgctgttggtggtatgcaaggacagtatgaattaaatgtatttaagcctatgatggcagcaaatatcattcagtctgcacagcttattggtgacgcttgtgtttcttttgacgagcattgtgcacaaggaatcgaggctaacaatgaggttatagaaaaacaactaaacaactctctaatgttagtgactgctttaaaccctaaaataggatattacaaagctgccgaaattgcaaacactgcacacaaaaacggtactactttaaaggaagaagctattaatttaggatatcttaccgaagaagagtttgaccaatgggtaatcccaggaaatatggttggaaaataa

SEQ ID NO: 133998 - protein, 463 aa, unidentified eubacterium SCB49
MKYRIEKDTMGDVQVPADKLWGAQTERSRNNFKIGSPASMPLEVVYGFAYLKKAAAYTNHECGILDETKRDLIAAVCDEILAGQHDDQFPLVIWQTGSGTQSNMNVNEVVANRAHQLAGKTVGEGEKTLAPNDDVNKSQSSNDTFPTGMHIAAYKKLVEVTIPGVEQLHKTLVAKSEEFDNVVKIGRTHLMDATPLTLGQEFSGYASQLAHGLKALKNTLAHLSELALGGTAVGTGINTPEGYSEKVAAHIANFTGLPFITAENKFEALAAHDAIVESHGALKQLAVSLNKIANDVRMLASGPRSGIGEITIPANEPGSSIMPGKVNPTQCEALTMVCAQVIGNDMAIAVGGMQGQYELNVFKPMMAANIIQSAQLIGDACVSFDEHCAQGIEANNEVIEKQLNNSLMLVTALNPKIGYYKAAEIANTAHKNGTTLKEEAINLGYLTEEEFDQWVIPGNMVGK

SEQ ID NO: 133999 - DNA, 1350 bp, Moritella sp. PE36
  CDS (1)..(1350): transl_table=11
atgggcgaacttgaagtaccatcatcggctctatatggggctcaaacccagcgtgcagtcaataactttcccatcagtggccaaccattacccgtcggttttatccgcgccttaattcaaattaaagccagtgcagcggcggcgaataaacagcttgagctagtatcgccaactatcgccgatgcgatcatgtcggcctgtaaagacttgtctgaaatggatgacatgatgcagcattttccggttgatgtgtttcaaactggttctggcaccagctcgaacatgaacgcgaatgaagttattgctcatcttgcgactaagatagctggcgaaccagtcagtgctaacgatcatgttaactatggtcaaagtagtaatgatgtgattccaagtaccatccatgtaagtgcggcactcgcacttgccaatcagttgctaccagcacttaatcatttagttcaactgatagagacaaaagcacaaagcgtcgatcattttgttaaaacagggcgtacccatttaatggatgcgatgccaattaaaatgagccaaagtctgcatagctggagtgcacaaataaaacaaaacattgataatctaaccgcattgcaacctgttattcagcgcctagcccaaggtggtaccgcggttggcacaggcattaatgctcacgccgaatttagccgtgtattcaatcaacaattgagtgccgcaacaggtcttgaatttaccccagcggacaatctatttgcattaattggctctcaagatactgcagtagcattgtcaggggcgttaaaaacgaccgctgtgtcattgatgaaaattgcgaacgacttacgctggatgaactctggtccactgtcgggtcttggcgagatcgcgcttgaagccttgcaacctgggtcttcaattatgccgggtaaagtaaatccggtgatcccagaagcgatggcgatggtttgtgcgcaagtgattggcaacgatactgcaatcactattggtggacaatcagggaatttcgagcttaatgtcatgctacctatgattgctaataacctacttaatagcatgcacttactcagtaataatgtggtgttattagccgataaagccattgcgacctttgaagtacagcaacaaaacattgagcaagccttggataaaaatccaattttagtgacagcgcttaatccgattattggttatcaattggcggcaaaaatagccaaaaccgcctacaaagagcagcgcgcggtcattgatgtggcgttagaatacactgagttatcgcgagagcagctgagtgaattacttaatccattaaaactgactcagggcggaatataa

SEQ ID NO: 134000 - protein, 449 aa, Moritella sp. PE36
MGELEVPSSALYGAQTQRAVNNFPISGQPLPVGFIRALIQIKASAAAANKQLELVSPTIADAIMSACKDLSEMDDMMQHFPVDVFQTGSGTSSNMNANEVIAHLATKIAGEPVSANDHVNYGQSSNDVIPSTIHVSAALALANQLLPALNHLVQLIETKAQSVDHFVKTGRTHLMDAMPIKMSQSLHSWSAQIKQNIDNLTALQPVIQRLAQGGTAVGTGINAHAEFSRVFNQQLSAATGLEFTPADNLFALIGSQDTAVALSGALKTTAVSLMKIANDLRWMNSGPLSGLGEIALEALQPGSSIMPGKVNPVIPEAMAMVCAQVIGNDTAITIGGQSGNFELNVMLPMIANNLLNSMHLLSNNVVLLADKAIATFEVQQQNIEQALDKNPILVTALNPIIGYQLAAKIAKTAYKEQRAVIDVALEYTELSREQLSELLNPLKLTQGGI

SEQ ID NO: 134001 - DNA, 1413 bp, Moritella sp. PE36
  CDS (1)..(1413): transl_table=11
ttgattttaaaactgactgaaacaggtgacatcatggttaatactcgaattgaacgcgacagcatgggtgaagtcaacgtacccggcaatgcgctttatggcgctcaaactcaacgtgcgatagataactttcctgtaagtggtcaaacgctacccgtagatttcattaaatcgctattactgatcaaatcagccgctgcagaagccaacctcgcattggggttattgcccgaggatatcgccaacgctatctgcactgcagttaatcagttgctagccgacgaaaatatcatgcagcactttcccgtagatatttatcaaacaggttcaggcacgagctctaacatgaatgccaacgaagtgattgcccatcttgctagtatctatagccaaaccaaaattgatgccaatgatcatgtcaattatggtcaaagcagcaatgacgtcatacccagtgcaattcatgtcagtgccgcaatcttagtcgagaaacagttattaccggcactgcagcatttacagcaaaccatcgtcgacaaagcgctaagcctaaatcatctcgttaaaactggtcgaacccatttgatggatgccatgcccgtaagaatgagccaatcgttattcagttgggcagctcaaatcagttacaacatagataatattaagatgttacaagccaagttacagcgacttgcacaaggcggaacggcagtgggtacggggatcaatgcccatcctgattttgccaaccactttaatcaaaaactgtctgcattaaccggtatcagctttagccaagccgataacttttcttttttaatggcaacacaagataccgctgtcgcgttatccggtcagttaaaaacaaccgccgtctcgttaatgaaaattgccaatgacttacgctggatgaactcgggtccactggccggattaggcgaaataagtttgccggcgctacaacccggttcatccattatgccggggaaagtaaacccaatcataccagaatcaactgcgatggtggcggcacaagtgattggtaatgatgccgccatcaccattggcgggcaatcaggtaactttgaactgaatgtgatgctaccaatgatcgcgactaacctcattagcagcattaatctactgacatcaagctcacggttactcgctgacaaagcaatcgctggttttgaagtacatgaacaacaattaacacaagcactttataaaaatccgattctagtcacggcactaaacccagtcattggttatcttaaagccgctgaaatagcaaaacaggcttatcgtgaacagcggccaattatcgatgtcgcagaagaaaatacagcgttaacacgacaagaactaacaaaattattagacccagtgcaactaacacgaaatataaagtaa

SEQ ID NO: 134002 - protein, 470 aa, Moritella sp. PE36
MILKLTETGDIMVNTRIERDSMGEVNVPGNALYGAQTQRAIDNFPVSGQTLPVDFIKSLLLIKSAAAEANLALGLLPEDIANAICTAVNQLLADENIMQHFPVDIYQTGSGTSSNMNANEVIAHLASIYSQTKIDANDHVNYGQSSNDVIPSAIHVSAAILVEKQLLPALQHLQQTIVDKALSLNHLVKTGRTHLMDAMPVRMSQSLFSWAAQISYNIDNIKMLQAKLQRLAQGGTAVGTGINAHPDFANHFNQKLSALTGISFSQADNFSFLMATQDTAVALSGQLKTTAVSLMKIANDLRWMNSGPLAGLGEISLPALQPGSSIMPGKVNPIIPESTAMVAAQVIGNDAAITIGGQSGNFELNVMLPMIATNLISSINLLTSSSRLLADKAIAGFEVHEQQLTQALYKNPILVTALNPVIGYLKAAEIAKQAYREQRPIIDVAEENTALTRQELTKLLDPVQLTRNIK

SEQ ID NO: 134003 - DNA, 1386 bp, Streptomyces thermovulgaris
  CDS (1)..(1386): transl_table=11
atgagcgaataccgcatcgagcgcgactccatgggtgaggtccgggtccccgtccacgccaagtggcgggcccagacacagcgtgccctcgagaacttccccgtctccgggcagcggatcgaacgggcgcacatcgcggcgctggcccggatcaagggcgccgcggccaaggtcaacgcggaactcggggtgctcgacagggacgtcgccgaggcgatccaggaggcggcggcggaggtcgccgagggcaagtgggacgagcacttcccggtcgacgtgttccagaccggctccgggacctcctccaacatgaacgccaacgaggtcatcgccaccctcgcgagcgagcggctcggacgggacgtccaccccaacgaccacgtcaacgcgtcgcagtcgtccaacgacgtcttcccctcctccctccacatcgccgccaccgccgccgtcctccacgacctgatccccgccctggaccacctcgcccgggcccttgcccgcaagtccgaggagttcgccgatgtggtgaagtccgggcggacgcacctgatggacgccacacccgtgaccctcggtcaggagttcgccgggtacgccgcccaggtgcggtacgggatcgagcggctgaacgcctccctgccccggctggccgagctgccgctcggcgggaccgccgtggggaccgggatcaacaccccgcccgggttctccgccgccgtcatccgggaggtcgcccgtgtcaccgggcttccgctcaccgaggcccgcgaccacttcgaggcgcagggcgcccgggacggcatcgtcgagaccagcgggcagctgcgcaccatcgccgtgggactgacgaagatcgccaacgatctgcggtggatggcctccgggccccggaccgggctcgccgagatctccctgcccgatctgcagccggggtcgtccatcatgccagggaaggtcaaccccgtcgttcccgaggccgtcctcatggtctgcgcccaggtcatcggcaacgacaccaccgtcaccgtcgccggggcctccgggaacttcgagctcaacgtcatgctcccggtcatcgccaggaacgtcctggagtccgtccggctgctcgccaacgcctcgcggctgctcgccgaccgcaccgtggacgggatcgtcgcccaccgggaacgcgcccgggagtacgccgagtcctccccctccatcgtcaccccgctcaaccggtacatcgggtacgaggaggcggcgaaggtcgccaagaaggcgctggccgagcagaagaccatccgtcaggccgtcctcgagagcgggtacgtcgagcgcggacagctcacgctcgaacagctcgacgaggcgctggacgtcctgcggatgacccgcccgtga

SEQ ID NO: 134004 - protein, 461 aa, Streptomyces thermovulgaris
MSEYRIERDSMGEVRVPVHAKWRAQTQRALENFPVSGQRIERAHIAALARIKGAAAKVNAELGVLDRDVAEAIQEAAAEVAEGKWDEHFPVDVFQTGSGTSSNMNANEVIATLASERLGRDVHPNDHVNASQSSNDVFPSSLHIAATAAVLHDLIPALDHLARALARKSEEFADVVKSGRTHLMDATPVTLGQEFAGYAAQVRYGIERLNASLPRLAELPLGGTAVGTGINTPPGFSAAVIREVARVTGLPLTEARDHFEAQGARDGIVETSGQLRTIAVGLTKIANDLRWMASGPRTGLAEISLPDLQPGSSIMPGKVNPVVPEAVLMVCAQVIGNDTTVTVAGASGNFELNVMLPVIARNVLESVRLLANASRLLADRTVDGIVAHRERAREYAESSPSIVTPLNRYIGYEEAAKVAKKALAEQKTIRQAVLESGYVERGQLTLEQLDEALDVLRMTRP

SEQ ID NO: 134005 - DNA, 1437 bp, Bacillus cereus; identical to SEQ ID NO: 45236
  CDS (1)..(1437): transl_table=11

SEQ ID NO: 134006 - protein, 478 aa, Bacillus cereus; identical to SEQ ID NO: 45237

SEQ ID NO: 134007 - DNA, 1680 bp, Ostreococcus tauri
  CDS (1)..(1680)
atgctccgctcaacgctctcgcgggcgacgaagcgcctgcgcgatggtttaatcatcgaaagaaatattattggcatcatcggacgcgatttgagagcttcggaggcgttcgttgagggtgcgcgcggtgaagatgcggtgacgaagacgaccgcgacgccggttggtgttctgcgaaagaatcgcgtgcgcgcgttcagcagcgtgcgctgggagcagatcgagagcacgaggacggagagtgatttattagggacgatggagatcccgagtcacgcgctgtacgggatcgccacggcgcgggcgatggaaaattacgacatcactgggaacaggctgagtaagtatccagagttggtccgagcgctcgcgttgacgaagaaggcgtgcgcgacggcgaatcgtaggattggtttattggacaacgaggtgtatgaagcgataacacacgcgtgcgatgcgttgatcgagtcgtcggagcatcatcatcactttacagtggatgtgattcaagggggcgccgggacgagcacaaacatgaacgccaacgaggtcatcgcgaatttagcagccaggaagttgggattgccgatcggagactacgccgtggtgaatccgaacgatcatgtgaatctgtgtcagagcacgaacgacgcgtatccgacggcggcgaagttggcggtggttttgaggcattcaagcttggtggacgccgtgcgcggcgtcatcacaagtttacgagcaaaaggggacgaattcgaggatgtgattaagatggggcggacacagttgcaagatgcggtgccgatgacacttggtcaggagttccactccttcgcggctacgttggcagcggatctgacgtatttggagcgaaacattgatcaaatgtacgagatgaatctcggcggaacagcaatcgggacgtccatatgcgccgatacttcgttcgccgatgaggccgtgcgcgcgctatctgagctcacgggacttccgatgcgctcgcccaacgatttcatcgaggcatcgagctcgacgtcgagcttcttgctcttcagtaatattttacgtcgcatcgctattaagatatcaaagatttgcaacgacttgcggttgctctcgagcggtccgcggtgcgggttgaacgagatcaatctcccagcggtcgccccgggatcgtccatcatgcccggtaagataaatccagtcattccggaagtgatgaaccaggtgtgctttcaaatcatcggcacggacgcctccatcgcggcagcgtccgaggctgcgcagcttcagctcaacgtctttgagcccgtcatcgtatacaatttgcttaacaatatggacatgctggagcgcggattgaacacgcttcgtacgaagtgcatcgatggcatcaccgccaatccggaggtgtgcaagagatccgtggataactccatcggtatcgtcaccgcgctcttgcctctcatcggctacaagaagtcttctgcagtggcgaaggaggctttggcgaccggaaggcccgtggccgagatcgcggcgcaatacgcgaagcccgatgaaatcgcgcaacttctgcgcccgcaagcgatgacgagggcgagaaaactcgagaagagaggcgtctgtcttgacacacccgcgcctttggaggcgcaggcggaaggaattatctga

SEQ ID NO: 134008 - protein, 559 aa, Ostreococcus tauri
MLRSTLSRATKRLRDGLIIERNIIGIIGRDLRASEAFVEGARGEDAVTKTTATPVGVLRKNRVRAFSSVRWEQIESTRTESDLLGTMEIPSHALYGIATARAMENYDITGNRLSKYPELVRALALTKKACATANRRIGLLDNEVYEAITHACDALIESSEHHHHFTVDVIQGGAGTSTNMNANEVIANLAARKLGLPIGDYAVVNPNDHVNLCQSTNDAYPTAAKLAVVLRHSSLVDAVRGVITSLRAKGDEFEDVIKMGRTQLQDAVPMTLGQEFHSFAATLAADLTYLERNIDQMYEMNLGGTAIGTSICADTSFADEAVRALSELTGLPMRSPNDFIEASSSTSSFLLFSNILRRIAIKISKICNDLRLLSSGPRCGLNEINLPAVAPGSSIMPGKINPVIPEVMNQVCFQIIGTDASIAAASEAAQLQLNVFEPVIVYNLLNNMDMLERGLNTLRTKCIDGITANPEVCKRSVDNSIGIVTALLPLIGYKKSSAVAKEALATGRPVAEIAAQYAKPDEIAQLLRPQAMTRARKLEKRGVCLDTPAPLEAQAEGII

SEQ ID NO: 134009 - DNA, 1575 bp, Ostreococcus tauri
  CDS (1)..(1575)
atgactcgccatacgccgccacgtcggatcgtccaatcccatcccgcgcgccatcgtcgcgcccggcgacgccgacgcgccgttgcgcgcgcgcgatcgcgtcgcgacacggacgcgatgccgttcgccgatcgcctggtggaactcatgcggacgccgcgagagggcgaggcgcgggcgctggtctcgcacggggtgtcgctcggacgacacggcgacgtcgcgggcgccgggacggagggcgagacgcgtcgggagagcgatacgatgggcgtcgtcgacgtcccgatgcataagctgtggggggcgcagacgcagcggagcttggagaattttaagatcggtggggagaagatgccgatcgcgatcgtgcggtcgttggccatcgtgaagtacgcggcggcgacggtgaacgaacgcgagggacgactgctcgggagttgtgaggaccattggatgaacactttccctttggttcgtgtgccaaaccggatcgggacgcagacgaacatgaatttgaacgaggtcatttgcaactcgccgattcatccgaatgatcacgtgaatatgagtcagtcgagcaacgacacgtttcccaccgcgatgtccatcgctaccgcgcacgaggttcaggaacgcctgattccggcgctgaaaatgttacaggaggcgctgcacgtaaaggtgctcgcgtggggagacatcgtgaaaatcggacgcacgcacttacaggacgccgtcccgatcactctcgcgcaagagttcagtgggtacgaacagcaggttaagaactcgctgttacgggctaagggtgcgctcgtacacttgctcgagcttgccatcggcggcaccgcggttggcactggactgaacgcaccgccaaggtttggcgaaaacatggcggcggagatctccatgctgactggtctaccctttgtgagcgcgccaaacaaattcgaagcactcgctgcgcatgatgcgcaatccacgttatcggggatgctcaaaacgatcgcgatttctcttctcaaaatcgctaacgacattcgattgctcggaagtggtccgcgagccggcttgggcgaactttgtcttccagaaaacgaaccagggagcagcatcatgcctggcaaggtgaatccgacacagtgtgagagcttgatgcaggtatgcgcgcaagtcataggtaatgatctcgccgttaccatcggcggctccgcgagctcacattttgagctcaacgtcgcaaagcctttgattgcgcacaacaacttgaatagcatcgctcttctctctgactcgttagagagcttcacgaaaaactgcgtagtgggaatcgaaccgaacatggagcgcatcgatgctctcatgcgtagtagcctgatgctcgtgacgagcttggtcccgaagattggctacgacaaagcggcaaaaatttccaagaaggctcacgccgagggactgacgctgagagaggccggggtgcagcttgggctgctaacgaacgaacagttcgacgaatggatccggcccgacgagatgactcgaccagaaggcttgcagtcgaagttatag

SEQ ID NO: 134010 - protein, 524 aa, Ostreococcus tauri
MTRHTPPRRIVQSHPARHRRARRRRRAVARARSRRDTDAMPFADRLVELMRTPREGEARALVSHGVSLGRHGDVAGAGTEGETRRESDTMGVVDVPMHKLWGAQTQRSLENFKIGGEKMPIAIVRSLAIVKYAAATVNEREGRLLGSCEDHWMNTFPLVRVPNRIGTQTNMNLNEVICNSPIHPNDHVNMSQSSNDTFPTAMSIATAHEVQERLIPALKMLQEALHVKVLAWGDIVKIGRTHLQDAVPITLAQEFSGYEQQVKNSLLRAKGALVHLLELAIGGTAVGTGLNAPPRFGENMAAEISMLTGLPFVSAPNKFEALAAHDAQSTLSGMLKTIAISLLKIANDIRLLGSGPRAGLGELCLPENEPGSSIMPGKVNPTQCESLMQVCAQVIGNDLAVTIGGSASSHFELNVAKPLIAHNNLNSIALLSDSLESFTKNCVVGIEPNMERIDALMRSSLMLVTSLVPKIGYDKAAKISKKAHAEGLTLREAGVQLGLLTNEQFDEWIRPDEMTRPEGLQSKL

SEQ ID NO: 134011 - DNA, 1650 bp, Aspergillus oryzae; identical to SEQ ID NO: 45240
  CDS (1)..(1650)

SEQ ID NO: 134012 - protein, 549 aa, Aspergillus oryzae; identical to SEQ ID NO: 45241

SEQ ID NO: 134013 - DNA, 1482 bp, Solanum tuberosum
  CDS (1)..(1482)
atggcgatgttaaatgcggctcgtcgattatcagctggatcagctttatcagattcactgcgttatacttcttcctggaggtttttctctacgtctttcagggaggaaagagatacgtttggtcctattctcgttccatcggacaagttatggggggctcaaactcaaagatcattgcagaattttgaaattgggggtgatcgtgaaagaatgcctgagccaatcatacgtgcattcggtattattaaaaagtgtgcagccaaggtgaacatggactatggccttgaccaatctattggaaaagcaataatgcaagcagctgaagaggttgcagaaggaaaattaaatgaccattttcctttggtggtttggcagactggcagtggcactcaaagtaacatgaatgctaacgaggttattgcaaatcgagcagctgaaatacttggccataaccgcggagacaaacatgtgcatccaaatgaccatgtaaataaatcgcaatcttcaaatgatactttctctacggtgatgcacattgctgcagcaatggagctaaataaaagattagtaccaaaccttgaaacagttgcatactcactaaattcaaagtcagtcgaattcaaggacattatcaagattgggcgaacccacacacaagatgcaacacctttgactcttggacaagagtttagtggctatgcaactcaagtgaaatatggaatcgatagagtcttatgcacgcttcagcgcatgtatcagctcgcacaagggggcacagcagtagggacaggattgaatacaaagaaagggtttgacataaaaattgctgcagcagttgcagaggaaacaaatttcccatttgttacagctgaaaacaagtttgaagcattggctgctcatgatgcatttgctgaaactagtggagccttaaataccctggctgcttcccttatgaagattgggaatgatatacgcttcttgggaagtggtccccgctgtggtcttggcgagctcagtcttcctgaaaatgaacccggaagcagtataatgcctggcaaggtaaatcctactcagtgtgaggctctcaccatggtctgtgctcaggttatggggaatcatgtggctgttactgttggtgcatcaaatggccattttgagctgaatgtcttcaagccgatgattgctaatgctctcctacattcagtaagattgctaggcgatgcatctgcttcctttgaaaagaattgtgtgagggatatccaagctaacagagacagaattgctaaattgttgcacgagtcactcatgctcgttacatgtttgaacccaaaaattggttatgataatgctgctgcagttgccaagaaagcccacaaggagggaaccagtttgaaggaagctgctctcaatctaggagtcctcaccagtgaagagtttgatcaacttgtagtccctgagaaaatgattggtccaactgactga

SEQ ID NO: 134014 - protein, 493 aa, Solanum tuberosum; identical to SEQ ID NO: 45243

SEQ ID NO: 134015 - DNA, 1389 bp, Neisseria subflava; identical to SEQ ID NO: 115434
  CDS (1)..(1389): transl_table=11

SEQ ID NO: 134016 - protein, 462 aa, Neisseria subflava; identical to SEQ ID NO: 115435

SEQ ID NO: 134017 - DNA, 1389 bp, Neisseria gonorrhoeae; identical to SEQ ID NO: 115436
  CDS (1)..(1389): transl_table=11

SEQ ID NO: 134018 - protein, 462 aa, Neisseria gonorrhoeae; identical to SEQ ID NO: 115437

SEQ ID NO: 134019 - DNA, 1395 bp, Eikenella corrodens; identical to SEQ ID NO: 45248
  CDS (1)..(1395): transl_table=11

SEQ ID NO: 134020 - protein, 464 aa, Eikenella corrodens; identical to SEQ ID NO: 45249

SEQ ID NO: 134021 - DNA, 1488 bp, Drosophila melanogaster; identical to SEQ ID NO: 115440
  CDS (1)..(1488)

SEQ ID NO: 134022 - protein, 495 aa, Drosophila melanogaster; identical to SEQ ID NO: 115441

SEQ ID NO: 134023 - DNA, 1380 bp, Pseudomonas putida; identical to SEQ ID NO: 45250
  CDS (1)..(1380): transl_table=11

SEQ ID NO: 134024 - protein, 459 aa, Pseudomonas putida; identical to SEQ ID NO: 45251

SEQ ID NO: 134025 - DNA, 1428 bp, Unknown; identical to SEQ ID NO: 45252
  Unidentified
  CDS (1)..(1428): transl_table=11

SEQ ID NO: 134026 - protein, 475 aa, Unknown; identical to SEQ ID NO: 45253
  Unidentified

SEQ ID NO: 134027 - DNA, 1437 bp, Serratia marcescens; identical to SEQ ID NO: 115448
  CDS (1)..(1437): transl_table=11

SEQ ID NO: 134028 - protein, 478 aa, Serratia marcescens; identical to SEQ ID NO: 45261

SEQ ID NO: 134029 - DNA, 1479 bp, Arabidopsis thaliana; identical to SEQ ID NO: 45262
  CDS (1)..(1479)

SEQ ID NO: 134030 - protein, 492 aa, Arabidopsis thaliana; identical to SEQ ID NO: 45263

SEQ ID NO: 134031 - DNA, 1500 bp, Arabidopsis thaliana; identical to SEQ ID NO: 45264
  CDS (1)..(1500)

SEQ ID NO: 134032 - protein, 499 aa, Arabidopsis thaliana; identical to SEQ ID NO: 45265

SEQ ID NO: 134033 - DNA, 1467 bp, Bradyrhizobium japonicum; identical to SEQ ID NO: 45266
  CDS (46)..(1467): transl_table=11

SEQ ID NO: 134034 - protein, 473 aa, Bradyrhizobium japonicum; identical to SEQ ID NO: 45267

SEQ ID NO: 134035 - DNA, 1377 bp, Pseudomonas aeruginosa; identical to SEQ ID NO: 115456
  CDS (1)..(1377): transl_table=11

SEQ ID NO: 134036 - protein, 458 aa, Pseudomonas aeruginosa; identical to SEQ ID NO: 115457

SEQ ID NO: 134037 - DNA, 1665 bp, Bradyrhizobium japonicum; identical to SEQ ID NO: 45268
  CDS (229)..(1665): transl_table=11

SEQ ID NO: 134038 - protein, 478 aa, Bradyrhizobium japonicum; identical to SEQ ID NO: 45269

SEQ ID NO: 134039 - DNA, 1395 bp, Pseudomonas aeruginosa; identical to SEQ ID NO: 115070
  CDS (1)..(1395): transl_table=11

SEQ ID NO: 134040 - protein, 464 aa, Pseudomonas aeruginosa; identical to SEQ ID NO: 115071

SEQ ID NO: 134041 - DNA, 1494 bp, Agrobacterium tumefaciens; identical to SEQ ID NO: 45048
  CDS (103)..(1494): transl_table=11

SEQ ID NO: 134042 - protein, 463 aa, Agrobacterium tumefaciens; identical to SEQ ID NO: 45271

SEQ ID NO: 134043 - DNA, 1389 bp, Bacillus anthracis; identical to SEQ ID NO: 45272
  CDS (1)..(1389): transl_table=11

SEQ ID NO: 134044 - protein, 462 aa, Bacillus anthracis; identical to SEQ ID NO: 45273

SEQ ID NO: 134045 - DNA, 1389 bp, Bacillus halodurans
  CDS (1)..(1389): transl_table=11
gtgaacacacgaattgagcgagatacgctaggagaaatgcacgttccacaagacaaattatggggggcacaaacgcagcgaagctatgagaatttccatattgggacagaaaaaatgccgatggaaattatttatgcctttgccttgctaaaaaaagcagcagcaaacgtcaacaaaaagcttggacaactgtctgccgaaaaagcagatgccattacctgggctgcaaatgaagtgctagctggcaaacacgatgatcatttcccgcttttcgtttggcaaaccggtagcggcacgcagtcgaacatgaacatgaatgaagtccttgcccgcaggggaaaccagcttctgcaagaaaaagggctagatgttacaattcacccgaacgatgacgtgaaccgatcgcaaagctccaacgacacatttcctaccgccatgcatattgcggcttataataaactggacgatcacttactgcctacactccaaatgttcaaacaaacactccaccaaaaagcaaagcaatttgatgatgtgattaaattaggacgaacacacttacaggatgcgacccccttaaccctcggccaagaaattagtggctgggctcggatgctcgaaaagaccgagcaaatgatccgtgagagcatgatttatttgcaggaattagctatcggtggtacggctgtcggtacaggggttaacgcccatcccaagttcggagaaatggtggccgccgatatcgcaaatgaaaccgggaaacctttcaaatcagccgctaataaatttcacgcgctcacaagtcatgacgaactagtacacactcacggcgccctaaaagcgcttgctgccgatttgtttaaaattgcgaatgatattcgttggcttgcaagtgggcctaggggcggactaggagaactgatcattcctgctaatgagccgggaagctcaattatgccaggaaaggtcaatccaacacagagcgaggcattaacaatgatcacgtcgcaagtaatcggaaatgatgccacgatcgcttttgctgcaagtcaagggaactttgaactgaacgtatttaagccggtcattatttacaatttccttcagtccacaacgctgttaactgatggactccggacgttccatgacaaatgcttaatcggccttgaggcaaacgaaacgatcattaaaaagcatttaaatgagtcactcatgctcgtgacagcactcaaccctcacatcggttatgagaacgcagcaaaaattgcgaaaaaagcacatgccgaaggcttaactcttaaagaagccgcgatgcaaagcggcttgctaaccgaagaggagtttgaaaaaatggtcgatccggcaaaaatggttcacccacaaggctaa

SEQ ID NO: 134046 - protein, 462 aa, Bacillus halodurans
MNTRIERDTLGEMHVPQDKLWGAQTQRSYENFHIGTEKMPMEIIYAFALLKKAAANVNKKLGQLSAEKADAITWAANEVLAGKHDDHFPLFVWQTGSGTQSNMNMNEVLARRGNQLLQEKGLDVTIHPNDDVNRSQSSNDTFPTAMHIAAYNKLDDHLLPTLQMFKQTLHQKAKQFDDVIKLGRTHLQDATPLTLGQEISGWARMLEKTEQMIRESMIYLQELAIGGTAVGTGVNAHPKFGEMVAADIANETGKPFKSAANKFHALTSHDELVHTHGALKALAADLFKIANDIRWLASGPRGGLGELIIPANEPGSSIMPGKVNPTQSEALTMITSQVIGNDATIAFAASQGNFELNVFKPVIIYNFLQSTTLLTDGLRTFHDKCLIGLEANETIIKKHLNESLMLVTALNPHIGYENAAKIAKKAHAEGLTLKEAAMQSGLLTEEEFEKMVDPAKMVHPQG

SEQ ID NO: 134047 - DNA, 1389 bp, Bacillus subtilis; identical to SEQ ID NO: 45274
  CDS (1)..(1389): transl_table=11

SEQ ID NO: 134048 - protein, 462 aa, Bacillus subtilis; identical to SEQ ID NO: 45275

SEQ ID NO: 134049 - DNA, 1392 bp, Bordetella pertussis; identical to SEQ ID NO: 45276
  CDS (1)..(1392): transl_table=11

SEQ ID NO: 134050 - protein, 463 aa, Bordetella pertussis; identical to SEQ ID NO: 45277

SEQ ID NO: 134051 - DNA, 1392 bp, Brucella melitensis; identical to SEQ ID NO: 115472
  CDS (1)..(1392): transl_table=11

SEQ ID NO: 134052 - protein, 463 aa, Brucella melitensis; identical to SEQ ID NO: 115473

SEQ ID NO: 134053 - DNA, 1392 bp, Campylobacter jejuni; identical to SEQ ID NO: 115474
  CDS (1)..(1392): transl_table=11

SEQ ID NO: 134054 - protein, 463 aa, Campylobacter jejuni; identical to SEQ ID NO: 115475

SEQ ID NO: 134055 - DNA, 1392 bp, Caulobacter crescentus; identical to SEQ ID NO: 115476
  CDS (1)..(1392): transl_table=11

SEQ ID NO: 134056 - protein, 463 aa, Caulobacter crescentus; identical to SEQ ID NO: 115477

SEQ ID NO: 134057 - DNA, 1383 bp, Chlamydophila caviae; identical to SEQ ID NO: 115478
  CDS (1)..(1383): transl_table=11

SEQ ID NO: 134058 - protein, 460 aa, Chlamydophila caviae; identical to SEQ ID NO: 115479

SEQ ID NO: 134059 - DNA, 1392 bp, Chlamydia muridarum; identical to SEQ ID NO: 115480
  CDS (1)..(1392): transl_table=11

SEQ ID NO: 134060 - protein, 463 aa, Chlamydia muridarum; identical to SEQ ID NO: 115481

SEQ ID NO: 134061 - DNA, 1386 bp, Chromobacterium violaceum; identical to SEQ ID NO: 115486
  CDS (1)..(1386): transl_table=11

SEQ ID NO: 134062 - protein, 461 aa, Chromobacterium violaceum; identical to SEQ ID NO: 115487

SEQ ID NO: 134063 - DNA, 1455 bp, Corynebacterium efficiens; identical to SEQ ID NO: 115122
  CDS (34)..(1455): transl_table=11

SEQ ID NO: 134064 - protein, 473 aa, Corynebacterium efficiens; identical to SEQ ID NO: 115489

SEQ ID NO: 134065 - DNA, 1422 bp, Corynebacterium glutamicum; identical to SEQ ID NO: 45278
  CDS (1)..(1422): transl_table=11

SEQ ID NO: 134066 - protein, 473 aa, Corynebacterium glutamicum; identical to SEQ ID NO: 45279

SEQ ID NO: 134067 - DNA, 1380 bp, Coxiella burnetii; identical to SEQ ID NO: 115492
  CDS (1)..(1380): transl_table=11

SEQ ID NO: 134068 - protein, 459 aa, Coxiella burnetii; identical to SEQ ID NO: 115493

SEQ ID NO: 134069 - DNA, 1395 bp, Deinococcus radiodurans; identical to SEQ ID NO: 115494
  CDS (1)..(1395): transl_table=11

SEQ ID NO: 134070 - protein, 464 aa, Deinococcus radiodurans; identical to SEQ ID NO: 115495

SEQ ID NO: 134071 - DNA, 1404 bp, Escherichia coli O157; identical to SEQ ID NO: 115496
  CDS (1)..(1404): transl_table=11

SEQ ID NO: 134072 - protein, 467 aa, Escherichia coli O157; identical to SEQ ID NO: 115497

SEQ ID NO: 134073 - DNA, 1404 bp, Escherichia coli O6; identical to SEQ ID NO: 115498
  CDS (1)..(1404): transl_table=11

SEQ ID NO: 134074 - protein, 467 aa, Escherichia coli O6; identical to SEQ ID NO: 115499

SEQ ID NO: 134075 - DNA, 1404 bp, Escherichia coli; identical to SEQ ID NO: 45280
  CDS (1)..(1404): transl_table=11

SEQ ID NO: 134076 - protein, 467 aa, Escherichia coli; identical to SEQ ID NO: 45281

SEQ ID NO: 134077 - DNA, 1395 bp, Haemophilus ducreyi; identical to SEQ ID NO: 115500
  CDS (1)..(1395): transl_table=11

SEQ ID NO: 134078 - protein, 464 aa, Haemophilus ducreyi; identical to SEQ ID NO: 115501

SEQ ID NO: 134079 - DNA, 1413 bp, Halobacterium salinarium; identical to SEQ ID NO: 45282
  CDS (1)..(1413): transl_table=11

SEQ ID NO: 134080 - protein, 470 aa, Halobacterium salinarium; identical to SEQ ID NO: 45283

SEQ ID NO: 134081 - DNA, 1392 bp, Helicobacter pylori J99; identical to SEQ ID NO: 115506
  CDS (1)..(1392): transl_table=11

SEQ ID NO: 134082 - protein, 463 aa, Helicobacter pylori J99; identical to SEQ ID NO: 115507

SEQ ID NO: 134083 - DNA, 1395 bp, Leptospira interrogans serogroup Icterohaemorrhagiae serovar
  CDS (1)..(1395): transl_table=11
atgaaaaccagaatcgaaacggattcgatgggcgaaattgcagtagacgattccaaatattggggcgcacaaacagaacgttccttacatcattttcatatcggaaacgatcgatttccaagagaaatgattcgtgctttaggaattttaaagaaatctgcagcggttgttaatgcggaacttggtcttttaagcgaagataaaaagaaactgattgttcaagccgccgacgaagtgatttccggaaaattggatgagcattttccgctttcggtttggcagaccggctccggaactcagactaacatgaattctaatgaagtgatttcgaaccgtgcgatcgaaattgcaggtggggtgaagggctctaaaaaaccgattcatccaaatgacgatgttaacaaggctcaatcctcaaacgatacgtttcctacagccatgcatatcgctgcggcggaacagttaaaccaaaagttgattcctgctctgatacaactcaaagaaacgttcaagaaaaaaacagatgaatttcagaatattataaaaatcggtagaactcatcttcaagacgcgactcctctgactttaggccaagaattttctggctatgttcaacaattggaatacaatattgcaagggtaaaggcagttttaccttccgtttatagacttgcgttaggcggaacagctgtcggaaccggattaaatactcaccctcagtttgcggtaaaagcagcggctcaaatcgctaaagaaactggacttccttttgtaagcgcggaaaataagttcgaggcactcgcggctcacgattctcttgtagaaacgagcggtgtgttgaaaacgatcgctgcttctttaatgaaaattgcaaacgatatacgttggctttcttctggtcctcgttgtggaattggtgaaattagtattccggaaaatgaaccaggttcttctatcatgccgggtaaagtgaatccaacacaatcagagcagatgacgatggtcgcggctcaagtaattgcaaatgacgttgcagtaaatataggcggtgcttctggaaatttcgagttgaacgtttttaaacctttgattatccacaacgttttgaattcgattcgattactttctgattcttgtgtttcttttgaagaacattgtgctcgtggaattattccgaataaggaaaagttaaacgaacacttaaataattctttgatgcttgtgaccgctttgaatcctcatataggttatgataacgctgctaaaattgccaagaacgcgcataaaaaaggaacaactctgaaagagtccggaattgaattgggacttttaacaagtgaacaatttgatcagtgggttcttcccgaaaagatgatccatccttcggtggattaa

SEQ ID NO: 134084 - protein, 464 aa, Leptospira interrogans serogroup Icterohaemorrhagiae serovar
MKTRIETDSMGEIAVDDSKYWGAQTERSLHHFHIGNDRFPREMIRALGILKKSAAVVNAELGLLSEDKKKLIVQAADEVISGKLDEHFPLSVWQTGSGTQTNMNSNEVISNRAIEIAGGVKGSKKPIHPNDDVNKAQSSNDTFPTAMHIAAAEQLNQKLIPALIQLKETFKKKTDEFQNIIKIGRTHLQDATPLTLGQEFSGYVQQLEYNIARVKAVLPSVYRLALGGTAVGTGLNTHPQFAVKAAAQIAKETGLPFVSAENKFEALAAHDSLVETSGVLKTIAASLMKIANDIRWLSSGPRCGIGEISIPENEPGSSIMPGKVNPTQSEQMTMVAAQVIANDVAVNIGGASGNFELNVFKPLIIHNVLNSIRLLSDSCVSFEEHCARGIIPNKEKLNEHLNNSLMLVTALNPHIGYDNAAKIAKNAHKKGTTLKESGIELGLLTSEQFDQWVLPEKMIHPSVD

SEQ ID NO: 134085 - DNA, 1368 bp, Listeria monocytogenes; identical to SEQ ID NO: 115514
  CDS (1)..(1368): transl_table=11

SEQ ID NO: 134086 - protein, 455 aa, Listeria monocytogenes; identical to SEQ ID NO: 115515

SEQ ID NO: 134087 - DNA, 1419 bp, Methylobacterium extorquens; identical to SEQ ID NO: 45284
  CDS (1)..(1419): transl_table=11

SEQ ID NO: 134088 - protein, 472 aa, Methylobacterium extorquens; identical to SEQ ID NO: 45285

SEQ ID NO: 134089 - DNA, 1425 bp, Mycobacterium bovis; identical to SEQ ID NO: 115518
  CDS (1)..(1425): transl_table=11

SEQ ID NO: 134090 - protein, 474 aa, Mycobacterium bovis; identical to SEQ ID NO: 115519

SEQ ID NO: 134091 - DNA, 1401 bp, Myxococcus xanthus
  CDS (1)..(1401): transl_table=11
gtgagcacgaagaacgtccgtaccgagaaagacaccttcggtcccatcgacgtccccgccgaccggctgtggggcgcgcagacgcagcgcagcctccagaacttcgccatctccaccgagcgcatgccgctggccctcatccgcgccctggtgctggtgaagaaggccgccgcgcgggtgaacgtggagaacggctcgctggcgaaggagaagggcgaggccatcatccgggccgcggacgaggtgctggccggccagcacgacgcggagttccccttgagcgtctggcagacgggcagcgggacgcagacgaacatgaacacgaacgaggtgctcgccaaccgcgcctcggagctgctgggcggcgagcgcggcgagcgccgcaaggtccaccccaacgacgacgtcaacaaggggcagagctccaacgacgtcttccccaccgcgatgagcgtggccgccgtggccgccatcaccgagcacgtgctgccggagctgaaggcgctgcgcgacgtgctcgcgcagaaggcccgcgccttccatgacgtggtgaaggtgggccgcacccacctgcaggacgccacgcccctgacgctggggcaggaggtcggcggcttcgtggcgcagttggaccacgcgaagggccacctggagcgcaccctgccgcatcttctggagctggccctgggcggcacggcggtgggcaccggcctcaacgcccccaagggctatgccgagcgggtggcgcaggagctggcccagctcaccggccaccccttcgtcaccgcgcccaacaagttcgaggcgctggccgccaacgacgcgctggtgcaggcgcacggggcgctgaaggggctggcggcggtgctcttcaaggtggccaacgacgtgcgctggctgtcctcggggccgcgctcggggctggcggaaatcaccatcccggagaacgagccgggcagctccatcatgccgggcaaggtgaaccccacccagagcgaggcgctcaccatgctgtgcgcccaggtgatggggaacgacgtcgccgtcaccgtgggtggggcgtccggcaacttccagctcaacgtcttcaagccgctcatcgcccacaacctgctccagagctgccggttgctggcggatggcatgcgcagcttccgcctgcactgcgcggtgggcatcgagcccaaccggccccgcatccaggagaacctggagcgcagcctgatgctcgtcacggcgctcaacccccacatcggctacgacaacgcggcgaaaatcgccaagacggcccacagggacggcacgacgctcaaggagacggccgtggcgctggggctcgtcacccccgagcagttcgaccagtgggtccgcccggaggacatgacgggccacaaggggtag

SEQ ID NO: 134092 - protein, 466 aa, Myxococcus xanthus
MSTKNVRTEKDTFGPIDVPADRLWGAQTQRSLQNFAISTERMPLALIRALVLVKKAAARVNVENGSLAKEKGEAIIRAADEVLAGQHDAEFPLSVWQTGSGTQTNMNTNEVLANRASELLGGERGERRKVHPNDDVNKGQSSNDVFPTAMSVAAVAAITEHVLPELKALRDVLAQKARAFHDVVKVGRTHLQDATPLTLGQEVGGFVAQLDHAKGHLERTLPHLLELALGGTAVGTGLNAPKGYAERVAQELAQLTGHPFVTAPNKFEALAANDALVQAHGALKGLAAVLFKVANDVRWLSSGPRSGLAEITIPENEPGSSIMPGKVNPTQSEALTMLCAQVMGNDVAVTVGGASGNFQLNVFKPLIAHNLLQSCRLLADGMRSFRLHCAVGIEPNRPRIQENLERSLMLVTALNPHIGYDNAAKIAKTAHRDGTTLKETAVALGLVTPEQFDQWVRPEDMTGHKG

SEQ ID NO: 134093 - DNA, 1389 bp, Nitrosomonas europaea; identical to SEQ ID NO: 115520
  CDS (1)..(1389): transl_table=11

SEQ ID NO: 134094 - protein, 462 aa, Nitrosomonas europaea; identical to SEQ ID NO: 115521

SEQ ID NO: 134095 - DNA, 1386 bp, Oceanobacillus iheyensis; identical to SEQ ID NO: 115522
  CDS (1)..(1386): transl_table=11

SEQ ID NO: 134096 - protein, 461 aa, Oceanobacillus iheyensis; identical to SEQ ID NO: 115523

SEQ ID NO: 134097 - DNA, 1395 bp, Pasteurella multocida; identical to SEQ ID NO: 115524
  CDS (1)..(1395): transl_table=11

SEQ ID NO: 134098 - protein, 464 aa, Pasteurella multocida; identical to SEQ ID NO: 115525

SEQ ID NO: 134099 - DNA, 1395 bp, Photorhabdus luminescens subsp
  CDS (1)..(1395): transl_table=11
atggcagccactcgcattgaaaaagactcaatggggcccatcgaagtacctgctgaccaattgtggggagcgcaaactcaacgttcacttgagcattttcgcatttcgcaggagaaaatgccggttgcattaattcatgctctggcattgactaaacaggctgcggccagtgtcaatatggatttgggtcttctgccgcaagaacgtggtgaagcaattattgctgctgcgaaagaggtgctggaaggtaaacatccgacagaatttcctcttgctatctggcagaccggttcaggaacacaaagtaacatgaacatgaacgaagtgttggcgaaccgtggtagcgagatccttggcggggtgagggggagtgaacgccttatccatcctaacgatgatgtcaataaaagtcagagttctaacgatgttttcccaacagcaatgcatgttgctgcggttattgcgctgagtgagcatcttattcctgagctgaaaatattacaaaaaacattggctgataaagctgaagcttataaggatatcgttaaaattggccgtacacacttgcaagatgcgacgccattgacccttggtcaggaaatttctggctgggcggcaatgttaacgcataacctgaaacacattgaagacagtattccccatgtttgtgaattggcactagggggaactgcggttggcaccggtttaaatactcatcctgaatatgctgttcgtgttgctaagaaattggctgaactgaccaaccattcgtttgttactgccccaaataaatttgaagccctggcgacttgtgatgctctggttcattctcatggggcattaaaaggtctggctgcatccataatgaaaattgcaaacgatgttcgttggttggcttccggccctcgctgtggtatcggtgaaatttcaattcctgaaaatgaaccgggtagctcaatcatgccaggtaaagttaacccaactcagtgtgaagcagtgacgatgctttgtgcacaggtgatgggcaatgatgttgctattaatattggtggggcatcaggcaactttgagctaaatgtgtttcgcccaatggtgattaataacttcctgcaatctgttcgcttgttggctgatggtatgcgtagcttcaatgaacattgtgcagtcggtatcgaacccaaccgtgatcgcattactcagttgctgaatgaatctctgatgttagtaacggcgctgaatacacatattggttatgacaaagctgcagaaattgctaagaaagcccataaagaagggctgacattaaaacaatcggcgatgaaactgggttatctgacagaagctgagtttgatgagtgggttcgtccagaagatatggttggcagcttgaagtag

SEQ ID NO: 134100 - protein, 464 aa, Photorhabdus luminescens subsp
MAATRIEKDSMGPIEVPADQLWGAQTQRSLEHFRISQEKMPVALIHALALTKQAAASVNMDLGLLPQERGEAIIAAAKEVLEGKHPTEFPLAIWQTGSGTQSNMNMNEVLANRGSEILGGVRGSERLIHPNDDVNKSQSSNDVFPTAMHVAAVIALSEHLIPELKILQKTLADKAEAYKDIVKIGRTHLQDATPLTLGQEISGWAAMLTHNLKHIEDSIPHVCELALGGTAVGTGLNTHPEYAVRVAKKLAELTNHSFVTAPNKFEALATCDALVHSHGALKGLAASIMKIANDVRWLASGPRCGIGEISIPENEPGSSIMPGKVNPTQCEAVTMLCAQVMGNDVAINIGGASGNFELNVFRPMVINNFLQSVRLLADGMRSFNEHCAVGIEPNRDRITQLLNESLMLVTALNTHIGYDKAAEIAKKAHKEGLTLKQSAMKLGYLTEAEFDEWVRPEDMVGSLK

SEQ ID NO: 134101 - DNA, 1401 bp, Prochlorococcus marinus
  CDS (1)..(1401): transl_table=11
ttgatggctgacctgatgcgtatcgaacacgacagcatgggcactattgaggtgcccgctggggttctctggggtgcacaaacccagcgatcgctccttaacttcgccatcagcacagaccgcatgccagtcgaactgatccatgccttggcattgatcaaacaggctgccgccagcgtgaactgtcgcctgggtgtgctcgatgaagtccagcgggatcaaattatcaaggctgcctctgctgttgcatccggtcttcacgacgatcagtttccactgagggtgtggcaaaccggtagcggtacccacacaaacatgaatgtcaacgaggtgattagcaacctggcgtctcaggcaaacgacgaacccctaggtagccataggccggtgcatccaaacgatcatgtcaatcgatcccagtccaccaatgacgccttccctacagctatacatatcgccgcagtccaggggatcaccaacaacttgctgcctgaactggagcaattgatcgcagcctttgcccgaaaaagcgatgcctggagtgacatcatcaaaatcggtcgcactcatctacaggatgccgtacctctcacccttggtcaggaggcctctgcgtggcgggatcaaattgcctcagcccatagtcgtattcagtcaagcctgatagagctctaccccctgccgcttggaggcaccgccgtgggaacaggcctcaacgccccagctcgcttcggtcaagaaacagctgcgcaacttgccagcatcacaggcctgccattcagctcagcgaaaaacaagttcgccgtgatggcgagccatgacgggttagtgaatgcaatggctcagttgcgcatgttggcggttgcccttttcaagatctccaatgatctgcgcctactggcctgtggcccaagggccggcctggcagagctgcatctacctgagaatgagccgggaagctcgatcatgcctgggaaagtcaacccctctcaatgcgaggccatggccatggtctgtttacaggtcatcgggcttgattcagccgtgaccatggcaggtgggagtggtcatctccaaatgaacgtctacaaacccctgattggcttcaacctgcttcacagcattgaattgctacatgacgcctgccgcaagtaccggctggcaatggtgcaagggattgaaccaaaccgaatcaagatccagcatgatctagagcaatcgctgatgctagtgactgctttagccccagaaatcggttacgacaaagccagtgagattgcccacctcgcccatgagaagggattcagcctgcgtgaagcagcactaaaactcggctatgtgagcaaagaagacttcgatcgcattgttaatccggcattgatgacatctgctcggctgtga

SEQ ID NO: 134102 - protein, 466 aa, Prochlorococcus marinus
MMADLMRIEHDSMGTIEVPAGVLWGAQTQRSLLNFAISTDRMPVELIHALALIKQAAASVNCRLGVLDEVQRDQIIKAASAVASGLHDDQFPLRVWQTGSGTHTNMNVNEVISNLASQANDEPLGSHRPVHPNDHVNRSQSTNDAFPTAIHIAAVQGITNNLLPELEQLIAAFARKSDAWSDIIKIGRTHLQDAVPLTLGQEASAWRDQIASAHSRIQSSLIELYPLPLGGTAVGTGLNAPARFGQETAAQLASITGLPFSSAKNKFAVMASHDGLVNAMAQLRMLAVALFKISNDLRLLACGPRAGLAELHLPENEPGSSIMPGKVNPSQCEAMAMVCLQVIGLDSAVTMAGGSGHLQMNVYKPLIGFNLLHSIELLHDACRKYRLAMVQGIEPNRIKIQHDLEQSLMLVTALAPEIGYDKASEIAHLAHEKGFSLREAALKLGYVSKEDFDRIVNPALMTSARL

SEQ ID NO: 134103 - DNA, 1395 bp, Pseudomonas putida; identical to SEQ ID NO: 45286
  CDS (1)..(1395): transl_table=11

SEQ ID NO: 134104 - protein, 464 aa, Pseudomonas putida; identical to SEQ ID NO: 45287

SEQ ID NO: 134105 - DNA, 1395 bp, Pseudomonas syringae pv; identical to SEQ ID NO: 115532
  CDS (1)..(1395): transl_table=11

SEQ ID NO: 134106 - protein, 464 aa, Pseudomonas syringae pv; identical to SEQ ID NO: 115533

SEQ ID NO: 134107 - DNA, 1386 bp, Ralstonia solanacearum; identical to SEQ ID NO: 115534
  CDS (1)..(1386): transl_table=11

SEQ ID NO: 134108 - protein, 461 aa, Ralstonia solanacearum; identical to SEQ ID NO: 115535

SEQ ID NO: 134109 - DNA, 1494 bp, Rhizobium meliloti; identical to SEQ ID NO: 45288
  CDS (103)..(1494): transl_table=11

SEQ ID NO: 134110 - protein, 463 aa, Rhizobium meliloti; identical to SEQ ID NO: 45289

SEQ ID NO: 134111 - DNA, 1386 bp, Rickettsia typhi; identical to SEQ ID NO: 115544
  CDS (1)..(1386): transl_table=11

SEQ ID NO: 134112 - protein, 461 aa, Rickettsia typhi; identical to SEQ ID NO: 115545

SEQ ID NO: 134113 - DNA, 1404 bp, Salmonella typhi
  CDS (1)..(1404): transl_table=11
atggtaacggtacgccgcgagaaagattcaatgggcgtgattgaagtcccggcagataaactgtggggggcgcaaacgcaacgttcgctggagcattttcggatttccacggagaaaatgcccgtctcgctcattcacgctctggcgttgaccaagcgcgccgctgcgaaggtcaaccaggacttagggttgttggcggcggaaaaagccagcgcgattatcgaggcagctgatgaagtgctggcgggaaaacatgctgatgagtttccgctggcgatttggcagaccgggtccggtacgcaaagcaacatgaatatgaatgaagtgttagcgaaccgcgccagtgaaattttgggcggcgttcgcggtatggaacgcaaagtgcatcccaatgatgacgtcaataagagtcaaagctcaaacgatgtgttcccaaccgccatgcacgtggcggcgttactggcgttacgcgaacaccttatcccgcaattatccgcattaacggatacgcttcgcgataaatcccacgctttcgccgatattgtcaaaattgggcgtactcacctgcaggacgcgacgccgctcaccttaggccaggagatttccggttgggtagccatgctggaacataacctcagacacattgagcacagtttaccgcacgtcgcggaactggcgctcggcggaaccgcagtagggacagggcttaatacccacccggaatatgcccggcgcgtggccgaggaactggcgaccattaccgcggcgccgtttgttaccgccccgaataaattcgaagcgctggcgacctgtgacgcgttggtacaggcgcatggcgcattaaaaggactggcggcctcgctgatgaaaatcgccaacgatgttcgctggctggcatccggcccgcgctgcggcattggcgagattgctatcccggagaatgagccaggcagttccattatgcctggtaaagtgaacccgacccagtgtgaagcggtaacgatgctatgttgccaggtaatgggtaacgatgtggccatcaatatggggggcgcatcgggcaactttgagctcaacgtctatcgtccgatggttattcataattttctgcaaacggtgcgcctgctggccgatggcatggcgagtttcaatcaacactgtgcgtcaggaatcgagccaaaccgcgagcgtattacgcagttgctgaatgagtcgctgatgctggtcactgcgctcaatacgcacatcggttacgataaagcggcggagattgcgaagaaggcgcataaagaagggctgacgctcaaagcctcagccgtggcattaggataccttagcgacgcggagttcgacgcctgggtacgtccggagttaatggttggcagtatgacgccgggacgttaa

SEQ ID NO: 134114 - protein, 467 aa, Salmonella typhi
MVTVRREKDSMGVIEVPADKLWGAQTQRSLEHFRISTEKMPVSLIHALALTKRAAAKVNQDLGLLAAEKASAIIEAADEVLAGKHADEFPLAIWQTGSGTQSNMNMNEVLANRASEILGGVRGMERKVHPNDDVNKSQSSNDVFPTAMHVAALLALREHLIPQLSALTDTLRDKSHAFADIVKIGRTHLQDATPLTLGQEISGWVAMLEHNLRHIEHSLPHVAELALGGTAVGTGLNTHPEYARRVAEELATITAAPFVTAPNKFEALATCDALVQAHGALKGLAASLMKIANDVRWLASGPRCGIGEIAIPENEPGSSIMPGKVNPTQCEAVTMLCCQVMGNDVAINMGGASGNFELNVYRPMVIHNFLQTVRLLADGMASFNQHCASGIEPNRERITQLLNESLMLVTALNTHIGYDKAAEIAKKAHKEGLTLKASAVALGYLSDAEFDAWVRPELMVGSMTPGR

SEQ ID NO: 134115 - DNA, 1404 bp, Salmonella typhimurium; identical to SEQ ID NO: 45290
  CDS (1)..(1404): transl_table=11

SEQ ID NO: 134116 - protein, 467 aa, Salmonella typhimurium; identical to SEQ ID NO: 45291

SEQ ID NO: 134117 - DNA, 1404 bp, Shigella flexneri; identical to SEQ ID NO: 115548
  CDS (1)..(1404): transl_table=11

SEQ ID NO: 134118 - protein, 467 aa, Shigella flexneri; identical to SEQ ID NO: 115549

SEQ ID NO: 134119 - DNA, 1386 bp, Staphylococcus aureus; identical to SEQ ID NO: 115550
  CDS (1)..(1386): transl_table=11

SEQ ID NO: 134120 - protein, 461 aa, Staphylococcus aureus; identical to SEQ ID NO: 115551

SEQ ID NO: 134121 - DNA, 1404 bp, Streptomyces avermitilis; identical to SEQ ID NO: 45292
  CDS (1)..(1404): transl_table=11

SEQ ID NO: 134122 - protein, 467 aa, Streptomyces avermitilis; identical to SEQ ID NO: 45293

SEQ ID NO: 134123 - DNA, 1386 bp, Streptomyces coelicolor; identical to SEQ ID NO: 45294
  CDS (1)..(1386): transl_table=11

SEQ ID NO: 134124 - protein, 461 aa, Streptomyces coelicolor; identical to SEQ ID NO: 45295

SEQ ID NO: 134125 - DNA, 1404 bp, Synechococcus elongatus
  CDS (1)..(1404): transl_table=11
atgacaactgacactcgcctagaatacgattccctcggtgccgttgaggtgcctgcggactgctattggggtgctcagacggcgcgttccctcaagcactttgccattggcagtcagcgaatgcccctagcggtgatccatgccatggcacggctcaaaaaggcggcggcgatcgccaaccgtgatttaggagttttagaccctgagaaagccaaatggatcattcaagccgccgatgaagttattgccggacagtgggatgatcagtttcccctcgccatctggcagacgggtagcggcacccaaacgaatatgaatgtcaatgaggtcattgctaaccgtgccattgagctggcgggaggcgttaaggggagcaaaagccccatccatcccaacgatcatgtgaattgtagccagtcctccaatgacacctttcccacggccatgcatgttgccacagtccttgccctacaggagcgcctgctgccaacgctacgccatctcttgacggtcttgcaggaaaaagcggctgcctttgcagagattatcaaaattggccgtacccatttaatggatgccgttcccttgaccctaggccaggaattcagcggttacgccagtcaaattgcggccgctcaagcccatattgaatatgccctgcagcatctgtatccccttgccattggcgctacagcggtggggacggggttgaatgcacccgctggttttggcgatcgcgtggcagcagaattagcgcaaatgacggggtatccctttcgtaaagctgaaaacccctttgccgccttggcagcccacgatcccctagtgatgctcagtggtgctctaaaaaccctggctgccgccctgatgaaaatcgccaacgatattcgttggttgggatcgggaccgcgttgtggtctgggggaattgaggttacccgccaatgaaccggggtcatcaattatgcccggcaaggtgaaccccacccaatgcgaagccttaacgatggtgtgtgtgcaggtgatgggcaacgatgcagccgtgggaatagcgggcagtcaaggaaattttgagttaaatgtctataagcccttgatcatttacaatgtgctgcaatctattgcccttctgagtgatgcagctcaatcgtttaccgaccattgcttagtgggagttgagcccaatcggcagcaaattcaagcctatgtggagcgatcgctcatgttggtgacggctctcaatccccacataggctacgacaaggcggcggcagtcgcgaaaaaggcctacagtgagggtaaaaccctcaaggaagcagctgtggaattgggctatctcactgctgaggagtttgaccgctgggtacgactagagctgatgcttggcgaaaagggcaccagttga

SEQ ID NO: 134126 - protein, 467 aa, Synechococcus elongatus
MTTDTRLEYDSLGAVEVPADCYWGAQTARSLKHFAIGSQRMPLAVIHAMARLKKAAAIANRDLGVLDPEKAKWIIQAADEVIAGQWDDQFPLAIWQTGSGTQTNMNVNEVIANRAIELAGGVKGSKSPIHPNDHVNCSQSSNDTFPTAMHVATVLALQERLLPTLRHLLTVLQEKAAAFAEIIKIGRTHLMDAVPLTLGQEFSGYASQIAAAQAHIEYALQHLYPLAIGATAVGTGLNAPAGFGDRVAAELAQMTGYPFRKAENPFAALAAHDPLVMLSGALKTLAAALMKIANDIRWLGSGPRCGLGELRLPANEPGSSIMPGKVNPTQCEALTMVCVQVMGNDAAVGIAGSQGNFELNVYKPLIIYNVLQSIALLSDAAQSFTDHCLVGVEPNRQQIQAYVERSLMLVTALNPHIGYDKAAAVAKKAYSEGKTLKEAAVELGYLTAEEFDRWVRLELMLGEKGTS

SEQ ID NO: 134127 - DNA, 1401 bp, Thermus aquaticus
  CDS (1)..(1401): transl_table=11
atggaataccgggttgagcgggacaccatgggagaggtcaaggttccggcggaccgctactggggggcccagacccaacgctctctggagcacttccggatcggggcctggcgcttccggatgccgctggagatcatccgggcctacgggatgctgaagaaggccgccgccagagccaacctggagctgggggagctacccgaggagatcgccagggccatcatccaggcggccgaggaggtcatcgccgggaagctggacgaccacttccccctggtggtcttccagaccgggtccggaacccagaccaacatgaacgtcaacgaggtcatcgccaaccgggcctcggagatcctgggcaagcccctggggagcaagtacgtccaccccaatgaccacgtgaaccggggccagagctccaacgacaccttccccaccgccatgtacgtggccaccgtcttggctcttcaccagcacctttacccggcggtggagggcctcatcgccacctttgaggaaaaagccagggcctttgacggcatcgtcaaggtgggccgcacccacctcatggacgccgtccccatcaccctgggccaggaggtggggagctgggccgcccagcttaggaacaccctggccatggtcaaggaggcggaaaagggcctctacaacctggccatcggcggcaccgccgtgggcacgggcctcaacgcccacccccgcttcggggagctggtggcccggtatctggcggaggagaccggcctccccttccgggtggcggaaaaccgcttcgccgccctggccgcccacgacgagctggtccacgtcatgggggctctaaggaccctggccggggccctgatgaagatcggcaacgacatccgctggctggcctcggggccctacgggggtatcggcgagatcttcatccctgccaacgagcccgggagctccatcatgccgggcaaggtgaaccccacccaggtggaggccctaccatgggtggtggtgcgggtctttggcaacgaccaggccgtggccttcgccgggagccagggcaacttccagctcaacgtctacaagccggtcatggtggacgccgccttggagtccatcaagcttctgggcgacgctgtggcctcctttgaccagcacctggcccaggggattgagcccaacctggagcgcatagaggagcacctcaacaagaaccccatgctggccaccgccctcaacaaggccatcggctacgacaaggcggcggagatcgtcaagaaggccatcaaggagaagaagtccctgaagcaggcggccctggagctgggttacctcaccgaggaggagtttgaccggatcgtggtgcccatgcgcctggccaagccccacgaaaacgcttag

SEQ ID NO: 134128 - protein, 466 aa, Thermus aquaticus
MEYRVERDTMGEVKVPADRYWGAQTQRSLEHFRIGAWRFRMPLEIIRAYGMLKKAAARANLELGELPEEIARAIIQAAEEVIAGKLDDHFPLVVFQTGSGTQTNMNVNEVIANRASEILGKPLGSKYVHPNDHVNRGQSSNDTFPTAMYVATVLALHQHLYPAVEGLIATFEEKARAFDGIVKVGRTHLMDAVPITLGQEVGSWAAQLRNTLAMVKEAEKGLYNLAIGGTAVGTGLNAHPRFGELVARYLAEETGLPFRVAENRFAALAAHDELVHVMGALRTLAGALMKIGNDIRWLASGPYGGIGEIFIPANEPGSSIMPGKVNPTQVEALPWVVVRVFGNDQAVAFAGSQGNFQLNVYKPVMVDAALESIKLLGDAVASFDQHLAQGIEPNLERIEEHLNKNPMLATALNKAIGYDKAAEIVKKAIKEKKSLKQAALELGYLTEEEFDRIVVPMRLAKPHENA

SEQ ID NO: 134129 - DNA, 1395 bp, Wigglesworthia glossinidia brevipalpis; identical to SEQ ID NO: 115562
  CDS (1)..(1395): transl_table=11

SEQ ID NO: 134130 - protein, 464 aa, Wigglesworthia glossinidia brevipalpis; identical to SEQ ID NO: 115563

SEQ ID NO: 134131 - DNA, 1422 bp, Xylella fastidiosa; identical to SEQ ID NO: 115564
  CDS (1)..(1422): transl_table=11

SEQ ID NO: 134132 - protein, 473 aa, Xylella fastidiosa; identical to SEQ ID NO: 115565

SEQ ID NO: 134133 - DNA, 1422 bp, Xylella fastidiosa; identical to SEQ ID NO: 115566
  CDS (1)..(1422): transl_table=11

SEQ ID NO: 134134 - protein, 473 aa, Xylella fastidiosa; identical to SEQ ID NO: 115567

SEQ ID NO: 134135 - DNA, 1398 bp, Yersinia pestis; identical to SEQ ID NO: 115568
  CDS (1)..(1398): transl_table=11

SEQ ID NO: 134136 - protein, 465 aa, Yersinia pestis; identical to SEQ ID NO: 115569

SEQ ID NO: 134137 - DNA, 1485 bp, Rhizopus oryzae; identical to SEQ ID NO: 45296
  CDS (1)..(1485)

SEQ ID NO: 134138 - protein, 494 aa, Rhizopus oryzae [sequence omitted]

SEQ ID NO: 134139 - DNA, 1449 bp, Schizosaccharomyces pombe; identical to SEQ ID NO: 45298
  CDS (1)..(1449)

SEQ ID NO: 134140 - protein, 482 aa, Schizosaccharomyces pombe; identical to SEQ ID NO: 45299

SEQ ID NO: 134141 - DNA, 1467 bp, Saccharomyces cerevisiae
  CDS (1)..(1467)
atgttgagatttaccaattgtagttgcaagactttcgtaaaatcgtcatataagcttaatataagaagaatgaactcctcgttcagaactgaaaccgatgcatttggtgagatacacgtgcctgctgataagtactggggtgcccaaactcaaagatcctttcaaaacttcaagattggtggcgctcgtgaaagaatgccattgcctttggtgcatgcatttggtgttttgaagaaatctgccgcgattgtgaatgagtctctggggggattggatcccaagatctccaaggctattcaacaggccgctgacgaagtggcttctggtaagctagacgaccactttccattggttgttttccaaacgggttccggtacccagtctaacatgaatgctaatgaagttatttccaatcgtgccattgagatcctaggaggcaagattggatctaaacaagtccatccaaacaatcattgcaaccaatctcaatcatccaatgatactttccccactgtcatgcatatcgctgccagtttgcaaattcaaaacgagttgatacctgagttgaccaatttaaagaacgcccttgaagccaaatccaaggaatttgaccatattgtgaagatcggtagaacacacttgcaagatgccacgcctttgacactaggtcaagagttttccggttacgtgcaacaagttgagaacggtatccaaagagtggcacattctttgaaaacattgagtttcctggcacaaggtggtactgccgttggtacagggttgaacaccaagcccggattcgatgtcaagatagccgagcaaatttccaaagaaactggactaaagtttcaaaccgcccctaataagttcgaggctttggctgctcacgacgccattgtcgaatgtagcggtgctctaaacacccttgcttgttctcttttcaaaatagcgcaagatataagatacttagggtccgggccacgttgcggctaccatgaactaatgctgccagagaatgaaccaggttcctcaatcatgcctggtaaagttaacccaacccaaaacgaggcattgactcaagtgtgtgtgcaagtcatgggtaacaatgcagctatcacgtttgccggctctcaaggtcaattcgagttaaatgtcttcaagccagtcatgatcgccaatctattgaattcgatcaggttaattactgatgccgcatattcatttagagtgcactgtgttgaaggtatcaaagccaatgagcctcgtattcatgagttgttgactaaatctttaatgttagtcaccgctttgaaccctaagatcggttatgatgccgcttccaaggtcgccaagaatgctcataagaagggcattaccttgaaggaaagtgcattggaattgggtgtattgactgaaaaggaatttgatgaatgggttgttcctgaacacatgctaggtcctaaataa

SEQ ID NO: 134142 - protein, 488 aa, Saccharomyces cerevisiae; identical to SEQ ID NO: 45301

SEQ ID NO: 134143 - DNA, 1509 bp, Oryza sativa
  CDS (1)..(1509)
atggcgatggtcctgcggcgcctcgcgggcgcgtccgccggtggcgccccgtcgccggcggcggcagcggccgcggccgcgctgctgctccgcccggcgctggctcgcccgatctccaccggcttccgcgaggagcgcgacaccttcggccccatccgagtccccaacgacaagctgtggggcgcgcagacgcagaggtcgctgcagaacttcgacatcggcggcgagcgcgagcggatgccggtgcccatcatccgcgcctttggggtgctcaaaaagtgcgccgctaaggtgaatatggagtatggccttgatccaacaatcgggaaggcaataatgcaggctgctcaggaggttgctgaaggacagttagatgaccactttccacttgttatctggcaaactgggagtggcacacaaagcaacatgaacgccaatgaggttattgcaaatagggccgctgagattcttggacataagcgtggcgagaagtttgtacaccctaatgatcatgtgaacagatcacagtcctcaaatgatacatttcccactgtcatgcacatagcagcagccacagagatcaattcaaggtttgtcccaagcttgcaacagttgcataagtcacttgattcaaagtctgttgaatttcaagacataattaaaattgggcgtacacatacccaagatgccaccccattgacccttggccaagagttcagcggttacgccacacaagtgaaatatggaattgatagaattgtttgtaccttaccacggatgtatcagcttgctcaaggtggaactgcagttggaacgggcttgaacactaagaaaggatttgatgtcaaaattgctgctgcagtagctgaggaaacggaactacctttcgtgacagctgagaacaagttcgaagctttggcagcgcatgatgcttttgttgagagcagtggtgctgtaaacacaatttctgcatctcttatgaagatagcaaatgacatacgcttgttaggaagcggcccccgatgtggacttggtgaacttatcctacctgaaaatgagcctgggagcagcattatgcctggaaaagttaaccctacccagtgtgaggccttgaccatggtttgtgctcaggttatgggtaatcatgttggtgtcacagtaggtggttcgaatggacattttgagttgaatgtctttaagccaatgattgcagctggattacttagatcactgagattgctaggggatgcctctgtgtcctttgagaaaaactgtgtcaggggaattcaagcaaaccataagagaatttcacaattattgcacgagtctttgatgttggtgacatctttgaaccctaaaattggctatgacaatgctgcagctgttgctaagaaagcacacaaagaaggaagcacattgaaggaagctgctctagacctcggagtattgacagaatcagaattccatgagcttgttgttccagagaaaatgattggtccttctgattga

SEQ ID NO: 134144 - protein, 502 aa, Oryza sativa
MAMVLRRLAGASAGGAPSPAAAAAAAALLLRPALARPISTGFREERDTFGPIRVPNDKLWGAQTQRSLQNFDIGGERERMPVPIIRAFGVLKKCAAKVNMEYGLDPTIGKAIMQAAQEVAEGQLDDHFPLVIWQTGSGTQSNMNANEVIANRAAEILGHKRGEKFVHPNDHVNRSQSSNDTFPTVMHIAAATEINSRFVPSLQQLHKSLDSKSVEFQDIIKIGRTHTQDATPLTLGQEFSGYATQVKYGIDRIVCTLPRMYQLAQGGTAVGTGLNTKKGFDVKIAAAVAEETELPFVTAENKFEALAAHDAFVESSGAVNTISASLMKIANDIRLLGSGPRCGLGELILPENEPGSSIMPGKVNPTQCEALTMVCAQVMGNHVGVTVGGSNGHFELNVFKPMIAAGLLRSLRLLGDASVSFEKNCVRGIQANHKRISQLLHESLMLVTSLNPKIGYDNAAAVAKKAHKEGSTLKEAALDLGVLTESEFHELVVPEKMIGPSD

SEQ ID NO: 134145 - DNA, 1479 bp, Brassica napus
  CDS (1)..(1479)
atggcgatttacgtcgcatcacggcggctttccgccagaacaaccgcggcggcgctgcgttacgccactgctctgagatcttattcgacctcgttcagggaggagagggacaccttcggcccgatccaagttccttccgataagttgtggggagcccagacgcagagatcgctgcagaacttcgagatcggcggcgagcgcgagcgaatgcccgagccaatcgtccgcgcttttggcgtcttgaagaagtgcgctgccaaggttaacatggagtatggacttgatccaactattgggaaagcgattatggaagctgctcaggaagttgctgagggcaaactcaatgatcatttcccccttgttgtttggcaaactggtagtggcactcagagtaacatgaatgctaatgaggtcattgctaacagagcagctgagattcttggtcgcaaacgtggtgaaaaatgtgtccaccctaatgaccatgtcaacagatctcagtcttctaacgacactttccctaccgtcatgcacattgcagctgcaaccgagattaattcaaggctcatccctagtctgaaaactttgcataccactctcgactctaagtccttcgagtttaaagatattgtgaaaattggaagaactcacactcaagatgctactcctttgactctaggacaagaatttggtggctatgctactcaggttaagtatggacttaatcgagtcacatgcactctaccccgcctctatcagcttgcacaaggtggaactgcggttgggacaggattaaacaccaagaaagggtttgatgtaaagatagctgctgcagtagccgaagaaacaaacctgccgtttgtcactgcagaaaacaagtttgaagctctggctgcacatgatgcttgtgttgaaaccagtgggtcacttaacacaatcgccacatcgttgatgaagattgccaatgatatacgttttcttggaagtggtccaagatgtggtcttggtgaacttgttctgcctgaaaatgagccaggaagcagcatcatgcctgggaaggtaaatcctacacagtgtgaggccttgactatggtttgtgctcaggtaatgggcaaccatgtagctgtgacagttggtgagtcaaatggtcatttcgaactgaatgtatttaagccggtgattgcaagcgctctcttgcattccgtgaggttaatagcagatgcttcagcttcgtttgagaaaaactgtgtaaggggtattgaggccaacagagaaaggatctcaaagcttttgcacgagtctcttatgcttgtgacatcattgaatccgaaaatcggatatgacaatgctgcagcagttgccaagaaagctcacaaagaaggatcgacactgaaggaagcggctctgaagttaggtgttcttacttctgaagagtttgatacccttgttgttcccgagaagatgatcggtccctccgattga

SEQ ID NO: 134146 - protein, 492 aa, Brassica napus; identical to SEQ ID NO: 45035

SEQ ID NO: 134147 - DNA, 1488 bp, Glycine max
  CDS (1)..(1488)
atggcgttgtacgtgctctcgcgtcgtttatcagctggatccaactcaaccacgctcctcgccttgcgttttgtttcctctaccagatcctactcctcttccttcagggaagaaagagatacctttggagccattcaagttccctccgagaaattatggggagcacaaactcaaagatcgttgcagaacttcgatatcggtgggccccgcgaacgcatgcccgaacccatcattcgcgcctttggcgtcttgaagaaatgcgctgctaaggtgaacatggagtatggtcttgatcccgccgttggaaaagcgattatgcaagcggcacaagaagtggccgagggaaaactaaacgaccattttcctctcgttgtatggcaaactggcagtggcactcaaagtaacatgaatgctaacgaggttattgcaaaccgagcagcagagattctttggcataagcggggtgggaagttagtgcacccaaatgaccatgtcaatagatcacagtcttcaaatgatacattcccaactgtaatgcacattgcagccgcaatggaaataaactcaagactaattcccagcctgaaaaccttacatggtacactaaactcaaagtcaattgaattcaaagatattgtcaagattggacgcactcatactcaagatgcaacacctttgactcttggacaagagtttagtgggtatactacacaagtgaagtatggtattgatagagtaattggcactttgccgcacatgtatcagcttgcccagggtgggacagctgtagggactggattgaatacaaagaaggggtttgatgccaaaatagcagcagcagtagctgaggaaaccaatctgccttttgttacggcagaaaataagtttgaggccttggctgcccatgatgcttttgttgaaactagtggagcccttaacactattgcggcttctttgatgaagattgctaatgacatacggttgttaggaagtggtccacgctgcggtcttggtgaactcattcttcctgaaaacgaaccagggagcagtatcatgcctgggaaggttaaccctacccagtgtgaggctttgacaatggtgtgtgcccaggtcataggaaaccatgttgcagttacagtgggtggatcaaatggtcattttgagcttaatgtgttcaagccaatgattgccagttgtctcctgcattcactgagactgcttggagattcatctgcttcctttgaaaagaattgcgtgagaggcattcaagctaacagggaaagaatttcaaaattactgcatgagtcactaatgcttgtcacatccttaaacccgaaaattggttatgacaaggcagcagcagttgccaagacagcccacaaagaggggtgtactcttaaggaagctgcattgaaactcggagtgctcagctctgaagattttgacaagcttgtggtacctgagaaaatgcttggaccatctgattga

SEQ ID NO: 134148 - protein, 495 aa, Glycine max; identical to SEQ ID NO: 45037

SEQ ID NO: 134149 - DNA, 1497 bp, Zea mays
  CDS (1)..(1497)
atggcgatggctctgcgccgccttgcgggcgtgtccggatcgccgtcggcctcctctgccgcggccacggtgctactccggtcggcgctgacccgcccgatctccaccggcttccgcgaggagcgcgacaccttcggtcccatccaagtccccaacgacaagctgtggggcgcgcagacgcagagatcgctgcagaactttgacattggcggggagcgtgagaggatgcccgttcccatcatccgtgcctttggcgtgctaaaaaagtgcgccgctaaggtgaatatggactatggccttgatccaacaatagggaaggccataatacaggcagctgaggaggtcgcagagggaaagttggatgatcacttcccacttgttatctggcaaactggcagtggcacacaaagcaacatgaatgccaatgaggtaattgcaaatagggcatctgagatccttggacacaagcgcggtgagaagtttgtgcacccaaatgaccatgtgaataggtcacaatcttcaaatgatacatttcccactgtaatgcatatagcgacggccgttgagatacattcgaggtttatcccaagtttgcaacagttgcatgattcacttcattcgaaaactattgagtttaaagacataattaaaattggacgtacacatacccaagatgccaccccattgactcttggccaagaattcagtggctacactacacaggtcaaatatggaattgaccgcattaattgtacattacctcggatgtaccagcttgctcaaggtggaactgcagttggaactggcttgaacaccaagaaaggatttgatgccaaaatagctgctgcagtggctgaggaaacaaacctaccctttgtgacagcagagaacaagtttgaagctttggcagcacatgacgcttttgttgagagcagtggtgccgtaaatacaatttctgcatctcttatgaagatagcaaacgacatacgtttgctaggaagtggtcctcggtgtggtcttggtgaactaatcctaccagaaaatgagcctgggagcagcattatgcctgggaaagttaatccaacccagtgtgaggctctgacaatggtttgtgcacaggttatgggtaatcatgttggtgttacaattggtggtgccaatgggcattttgaactgaatgtttttaagccaatgatcgcagccggattacttcgatcattgaggttgttaggggatgcatccgtgtcctttgagaaaaattgtgtcaggggaattcaagcaaaccacaagagaatttcacaacttttgcatgagtctctgatgttagtgacatctttgaaccctaaaattggctatgacaatgctgcagctgttgctaagaaagcccacaaagaaggaaccacgttgaaggaagctgcattagaccttggagtattaacggagcaagaattccatgagcttgtcgtcccggagaaaatgattggtccttctgattga

SEQ ID NO: 134150 - protein, 498 aa, Zea mays; identical to SEQ ID NO: 45033

SEQ ID NO: 134151 - DNA, 1488 bp, Glycine max; identical to SEQ ID NO: 45302
  CDS (1)..(1488)

SEQ ID NO: 134152 - protein, 495 aa, Glycine max; identical to SEQ ID NO: 45303

SEQ ID NO: 134153 - DNA, 1485 bp, Hordeum vulgare; identical to SEQ ID NO: 45304
  CDS (1)..(1485)

SEQ ID NO: 134154 - protein, 494 aa, Hordeum vulgare; identical to SEQ ID NO: 45305

SEQ ID NO: 134155 - DNA, 1488 bp, Glycine max
  CDS (1)..(1488)
atggcgttctacgtgctctcgcgtcgtttatcagctggatccaactcaacgacgctcctcgccctgcgttttgcttcctcttccagatccttctcctcttccttcagggaagaaagagatacctttggacccattcaagttccctccgacaaattatggggagcacaaactcaaagatcgttgcagaacttcgacatcggtgggccccgcgaacgcatgcccgaacccatcattcgcgcttttggcgtcttgaagaaatgcgctgctaaggtgaacatggagtatggtcttgatcccatcgtgggagaagcaataatgcaagcggcacaagaagtagccgagggaaaactaaacgaacattttcctctcgttgtatggcaaactggcagtggcactcaaagtaacatgaatgctaacgaggttattgcaaaccgagcagcagagattcttggccataagcgcggtgggaagttcgtgcacccaaatgaccatgtcaatagatcgcagtcttctaatgatacattcccaaccgtaatgcacattgcagccacaatggaaataaactcaagactaattcccagcttgaaaaccttacacggtacactaaactcaaagtcaattgaattcaaagatattgtcaagattggacgcactcatactcaagatgcaacacctttgactcttgggcaagagtttagtgggtatactacacaagtgaagtacggtattgatcgagtaattggcactttgccgcacctgtatcagcttgcccagggtggtacagctgtagggactggattgaatacaaagaaggggtttgatgccaagatagcagcagcagtagctgaggaaacaaatctgccttttgttacggcagaaaataagtttgaggccttggctgcccatgatgcttttgttgaaactagtggagcacttaacactattgcggcttctttgatgaagattgctaatgatatacggttgttaggaagtggtccacgctgcggtcttggtgaactcattcttcctgaaaacgaaccaggaagtagtatcatgcctgggaaggttaaccctacccagtgtgaggctttgacaatggtgtgtgcccaggtcattggaaaccatgttgcagttacagtgggtggatcaaatggtcattttgagcttaatgtgttcaagccaatgactgccagttgtctcctgcattcgctgagactgcttggagattcatctgcttcctttgaaaagaattgtgtgagaggcattcaagctaatagggaaagaatttcaaaattactgcatgagtcactgatgctcgtcacatccttaaacccaaaaattggttatgacaaggcagcagcagttgccaagacagcccacaaagaggggtgtactcttaaggaagctgcattgaaactcggagtgctcagctctgaagattttgacaagcttgtggtacctgagaaaatgcttggaccgtctgattga

SEQ ID NO: 134156 - protein, 495 aa, Glycine max; identical to SEQ ID NO: 45031

SEQ ID NO: 134157 - DNA, 1485 bp, Triticum aestivum; identical to SEQ ID NO: 45306
  CDS (1)..(1485)

SEQ ID NO: 134158 - protein, 494 aa, Triticum aestivum; identical to SEQ ID NO: 45307

SEQ ID NO: 134159 - DNA, 1497 bp, Zea mays; identical to SEQ ID NO: 45308
  CDS (1)..(1497)

SEQ ID NO: 134160 - protein, 498 aa, Zea mays; identical to SEQ ID NO: 45309

SEQ ID NO: 134161 - DNA, 22 bp, Artificial sequence
  primer
atgagtaaccacaggatcgaac

SEQ ID NO: 134162 - DNA, 21 bp, Artificial sequence
  primer
tcaaagcccgccttcggtgag

SEQ ID NO: 134163 - protein, 479 aa, Artificial sequence
  consensus sequence
  Variant (2)..(2): Xaa in position 2 is any amino acid
  Variant (4)..(4): Xaa in position 4 is any amino acid
  Variant (6)..(6): Xaa in position 6 is any amino acid
  Variant (7)..(7): Xaa in position 7 is any or no amino acid
  Variant (9)..(11): Xaa in position 9 to 11 is any amino acid
  Variant (14)..(18): Xaa in position 14 to 18 is any amino acid
  Variant (23)..(23): Xaa in position 23 is any amino acid
  Variant (25)..(27): Xaa in position 25 to 27 is any amino acid
  Variant (30)..(30): Xaa in position 30 is any amino acid
  Variant (32)..(41): Xaa in position 32 to 41 is any amino acid
  Variant (42)..(44): Xaa in position 42 to 44 is any or no amino acid
  Variant (46)..(49): Xaa in position 46 to 49 is any amino acid
  Variant (51)..(52): Xaa in position 51 to 52 is any amino acid
  Variant (55)..(56): Xaa in position 55 to 56 is any amino acid
  Variant (58)..(59): Xaa in position 58 to 59 is any amino acid
  Variant (60)..(60): Xaa in position 60 is any or no amino acid
  Variant (62)..(62): Xaa in position 62 is any amino acid
  Variant (64)..(70): Xaa in position 64 to 70 is any amino acid
  Variant (71)..(78): Xaa in position 71 to 78 is any or no amino acid
  Variant (80)..(80): Xaa in position 80 is any amino acid
  Variant (81)..(81): Xaa in position 81 is any or no amino acid
  Variant (83)..(93): Xaa in position 83 to 93 is any amino acid
  Variant (94)..(97): Xaa in position 94 to 97 is any or no amino acid
  Variant (100)..(103): Xaa in position 100 to 103 is any amino acid
  Variant (110)..(111): Xaa in position 110 to 111 is any amino acid
  Variant (115)..(115): Xaa in position 115 is any amino acid
  Variant (119)..(121): Xaa in position 119 to 121 is any amino acid
  Variant (122)..(122): Xaa in position 122 is any or no amino acid
  Variant (124)..(126): Xaa in position 124 to 126 is any amino acid
  Variant (127)..(127): Xaa in position 127 is any or no amino acid
  Variant (129)..(131): Xaa in position 129 to 131 is any amino acid
  Variant (132)..(138): Xaa in position 132 to 138 is any or no amino acid
  Variant (143)..(143): Xaa in position 143 is any amino acid
  Variant (146)..(147): Xaa in position 146 to 147 is any amino acid
  Variant (153)..(154): Xaa in position 153 to 154 is any amino acid
  Variant (157)..(160): Xaa in position 157 to 160 is any amino acid
  Variant (161)..(169): Xaa in position 161 to 169 is any or no amino acid
  Variant (171)..(171): Xaa in position 171 is any amino acid
  Variant (173)..(176): Xaa in position 173 to 176 is any amino acid
  Variant (178)..(183): Xaa in position 178 to 183 is any amino acid
  Variant (185)..(192): Xaa in position 185 to 192 is any amino acid
  Variant (193)..(194): Xaa in position 193 to 194 is any or no amino acid
  Variant (196)..(196): Xaa in position 196 is any amino acid
  Variant (201)..(202): Xaa in position 201 to 202 is any amino acid
  Variant (205)..(205): Xaa in position 205 is any amino acid
  Variant (207)..(207): Xaa in position 207 is any amino acid
  Variant (213)..(229): Xaa in position 213 to 229 is any amino acid
  Variant (230)..(237): Xaa in position 230 to 237 is any or no amino acid
  Variant (239)..(240): Xaa in position 239 to 240 is any amino acid
  Variant (249)..(249): Xaa in position 249 is any amino acid
  Variant (251)..(266): Xaa in position 251 to 266 is any amino acid
  Variant (268)..(270): Xaa in position 268 to 270 is any amino acid
  Variant (271)..(271): Xaa in position 271 is any or no amino acid
  Variant (273)..(275): Xaa in position 273 to 275 is any amino acid
  Variant (276)..(276): Xaa in position 276 is any or no amino acid
  Variant (278)..(278): Xaa in position 278 is any amino acid
  Variant (280)..(285): Xaa in position 280 to 285 is any amino acid
  Variant (287)..(288): Xaa in position 287 to 288 is any amino acid
  Variant (290)..(292): Xaa in position 290 to 292 is any amino acid
  Variant (294)..(294): Xaa in position 294 is any amino acid
  Variant (296)..(298): Xaa in position 296 to 298 is any amino acid
  Variant (300)..(301): Xaa in position 300 to 301 is any amino acid
  Variant (303)..(303): Xaa in position 303 is any amino acid
  Variant (309)..(309): Xaa in position 309 is any amino acid
  Variant (311)..(313): Xaa in position 311 to 313 is any amino acid
  Variant (317)..(318): Xaa in position 317 to 318 is any amino acid
  Variant (320)..(321): Xaa in position 320 to 321 is any amino acid
  Variant (323)..(325): Xaa in position 323 to 325 is any amino acid
  Variant (327)..(329): Xaa in position 327 to 329 is any amino acid
  Variant (342)..(344): Xaa in position 342 to 344 is any amino acid
  Variant (346)..(352): Xaa in position 346 to 352 is any amino acid
  Variant (355)..(355): Xaa in position 355 is any amino acid
  Variant (358)..(370): Xaa in position 358 to 370 is any amino acid
  Variant (371)..(371): Xaa in position 371 is any or no amino acid
  Variant (376)..(377): Xaa in position 376 to 377 is any amino acid
  Variant (379)..(381): Xaa in position 379 to 381 is any amino acid
  Variant (382)..(382): Xaa in position 382 is any or no amino acid
  Variant (384)..(384): Xaa in position 384 is any amino acid
  Variant (386)..(386): Xaa in position 386 is any amino acid
  Variant (388)..(389): Xaa in position 388 to 389 is any amino acid
  Variant (392)..(399): Xaa in position 392 to 399 is any amino acid
  Variant (400)..(404): Xaa in position 400 to 404 is any or no amino acid
  Variant (406)..(418): Xaa in position 406 to 418 is any amino acid
  Variant (419)..(419): Xaa in position 419 is any or no amino acid
  Variant (421)..(422): Xaa in position 421 to 422 is any amino acid
  Variant (426)..(426): Xaa in position 426 is any amino acid
  Variant (429)..(430): Xaa in position 429 to 430 is any amino acid
  Variant (434)..(435): Xaa in position 434 to 435 is any amino acid
  Variant (438)..(439): Xaa in position 438 to 439 is any amino acid
  Variant (442)..(442): Xaa in position 442 is any amino acid
  Variant (444)..(450): Xaa in position 444 to 450 is any amino acid
  Variant (451)..(475): Xaa in position 451 to 475 is any or no amino acid
  Variant (477)..(478): Xaa in position 477 to 478 is any amino acid
RXEXDXXGXXXVPXXXXXGAQTXRXXXNFXIXXXXXXXXXXXXXAXXXXKXXAAXXNXXXGXLXXXXXXXXXXXXXXXIXXAXXXXXXXXXXXXXXXFPXXXXQTGSGTXXNMNXNEVXXXXAXXXXGXXXXXXXXXXHPNDXVNXXQSSNDXXPTXXXXXXXXXXXXXLXPXXXXLXXXXXXKXXXXXXXXXXKXGRTHXXDAXPXTLGQEXXXXXXXXXXXXXXXXXXXXXXXXXLXXGGTAVGTGXNXXXXXXXXXXXXXXXXTXXXXFXXXXNXFXXXXXXDXXVXXXGXLXXXAXXLXKIANDXRXXXSGPXXGXXEXXXPXXXPGSSIMPGKVNPXXXEXXXXXXXQVXGNXXXXXXXXXXXXXXELNVXXPXXXXNXLXSXXLLXXXXXXXXXXXXXGXXXXXXXXXXXXXXSXXLVTXLNXXIGYXXAAXXAKXAXXXXXXXXXXXXXXXXXXXXXXXXXXXXXXXXPXXM

SEQ ID NO: 134164 - protein, 58 aa, Artificial sequence; identical to SEQ ID NO: 115587
  protein pattern
  Variant (2)..(4): Xaa in position 2 to 4 is any amino acid
  Variant (5)..(5): Xaa in position 5 is any or no amino acid
  Variant (8)..(8): Xaa in position 8 is Ala, Cys, Gly or Ser
  Variant (11)..(11): Xaa in position 11 is Ile, Leu, Met or Val
  Variant (13)..(13): Xaa in position 13 is any amino acid
  Variant (14)..(14): Xaa in position 14 is Leu or Met
  Variant (15)..(15): Xaa in position 15 is Ala, Gly, Asn or Ser
  Variant (16)..(16): Xaa in position 16 is Ala, Cys or Ser
  Variant (19)..(19): Xaa in position 19 is any amino acid
  Variant (20)..(20): Xaa in position 20 is Ala, Cys, Gly, Asn, Ser or Thr
  Variant (22)..(23): Xaa in position 22 to 23 is any amino acid
  Variant (25)..(25): Xaa in position 25 is Ile, Leu or Val
  Variant (26)..(27): Xaa in position 26 to 27 is any amino acid
  Variant (28)..(28): Xaa in position 28 is Glu, Pro or Gln
  Variant (29)..(30): Xaa in position 29 to 30 is any amino acid
  Variant (31)..(31): Xaa in position 31 is Ala, Glu or Gln
  Variant (41)..(41): Xaa in position 41 is Ile or Val
  Variant (44)..(46): Xaa in position 44 to 46 is any amino acid
  Variant (48)..(55): Xaa in position 48 to 55 is any amino acid
  Variant (56)..(56): Xaa in position 56 is Ile or Val
  Variant (57)..(57): Xaa in position 57 is any amino acid
  Variant (58)..(58): Xaa in position 58 is Ala or Gly

SEQ ID NO: 134165 - protein, 26 aa, Artificial sequence
  protein pattern
  Variant (3)..(3): Xaa in position 3 is Ile, Leu or Val
  Variant (4)..(4): Xaa in position 4 is any amino acid
  Variant (5)..(5): Xaa in position 5 is Ile, Leu or Val
  Variant (6)..(6): Xaa in position 6 is Phe, Trp or Tyr
  Variant (13)..(13): Xaa in position 13 is any amino acid
  Variant (14)..(14): Xaa in position 14 is Ser or Thr
  Variant (18)..(18): Xaa in position 18 is any amino acid
  Variant (22)..(22): Xaa in position 22 is Ile, Leu or Val
  Variant (23)..(23): Xaa in position 23 is Ala, Gly, Ser or Val
  Variant (24)..(25): Xaa in position 24 to 25 is any amino acid
FPXXXXQTGSGTXXNMNXNEVXXXXA

SEQ ID NO: 134166 - protein, 22 aa, Artificial sequence
  protein pattern
  Variant (2)..(2): Xaa in position 2 is any or no amino acid
  Variant (4)..(4): Xaa in position 4 is any or no amino acid
  Variant (7)..(7): Xaa in position 7 is any amino acid
  Variant (8)..(8): Xaa in position 8 is Ala, Gly or Ser
  Variant (11)..(11): Xaa in position 11 is Ser or Thr
  Variant (14)..(15): Xaa in position 14 to 15 is any amino acid
  Variant (17)..(17): Xaa in position 17 is Ser or Thr
  Variant (18)..(18): Xaa in position 18 is Ala, Ser, Thr or Val
  Variant (19)..(20): Xaa in position 19 to 20 is any amino acid
  Variant (21)..(21): Xaa in position 21 is Ile, Leu or Val
  Variant (22)..(22): Xaa in position 22 is Ala, Gly, Ser or Thr
NXDXVNXXQSXNDXXPXXXXXX

SEQ ID NO: 134167 - protein, 32 aa, Artificial sequence
  protein pattern
  Variant (2)..(2): Xaa in position 2 is any amino acid
  Variant (4)..(4): Xaa in position 4 is any amino acid
  Variant (6)..(6): Xaa in position 6 is Ala, Ser or Thr
  Variant (7)..(7): Xaa in position 7 is Phe, Ile, Leu or Met
  Variant (9)..(9): Xaa in position 9 is any amino acid
  Variant (10)..(10): Xaa in position 10 is Ile, Leu, Met or Val
  Variant (11)..(11): Xaa in position 11 is any amino acid
  Variant (12)..(12): Xaa in position 12 is Ile or Val
  Variant (13)..(17): Xaa in position 13 to 17 is any amino acid
  Variant (18)..(18): Xaa in position 18 is Trp or Tyr
  Variant (19)..(19): Xaa in position 19 is any amino acid
  Variant (23)..(23): Xaa in position 23 is any amino acid
  Variant (25)..(25): Xaa in position 25 is Ala, Cys or Ser
  Variant (26)..(28): Xaa in position 26 to 28 is any amino acid
  Variant (30)..(31): Xaa in position 30 to 31 is any amino acid
  Variant (32)..(32): Xaa in position 32 is Ala, Gly, Asn or Ser
RXEXDXXGXXXXXXXXXXXAQTXRXXXXFXXX

SEQ ID NO: 134168 - protein, 17 aa, Artificial sequence
  protein pattern
  Variant (2)..(2): Xaa in position 2 is any amino acid
  Variant (3)..(3): Xaa in position 3 is Phe or Leu
  Variant (4)..(4): Xaa in position 4 is Glu or Gln
  Variant (8)..(9): Xaa in position 8 to 9 is any amino acid
  Variant (11)..(11): Xaa in position 11 is Ile, Leu, Met or Val
  Variant (12)..(14): Xaa in position 12 to 14 is any amino acid
  Variant (15)..(15): Xaa in position 15 is Ala, Cys, Asp, Gly or Asn
  Variant (16)..(16): Xaa in position 16 is any amino acid
GXXXLNVXXPXXXXXXL

SEQ ID NO: 134169 - protein, 28 aa, Artificial sequence
  protein pattern
  Variant (3)..(3): Xaa in position 3 is any amino acid
  Variant (5)..(5): Xaa in position 5 is Ala, Cys, Asn, Ser or Thr
  Variant (6)..(7): Xaa in position 6 to 7 is any amino acid
  Variant (11)..(12): Xaa in position 11 to 12 is any amino acid
  Variant (13)..(13): Xaa in position 13 is any or no amino acid
  Variant (15)..(16): Xaa in position 15 to 16 is any amino acid
  Variant (17)..(17): Xaa in position 17 is any or no amino acid
  Variant (19)..(20): Xaa in position 19 to 20 is any amino acid
  Variant (21)..(21): Xaa in position 21 is Ala or Ser
  Variant (22)..(27): Xaa in position 22 to 27 is any amino acid
  Variant (28)..(28): Xaa in position 28 is Ile, Leu or Val
VTXLXXXIGYXXXAXXXAXXXXXXXXXX

SEQ ID NO: 134170 - protein, 14 aa, Artificial sequence
  protein pattern
  Variant (2)..(2): Xaa in position 2 is Ala, Gly or Pro
  Variant (3)..(3): Xaa in position 3 is any amino acid
  Variant (12)..(12): Xaa in position 12 is Ile, Leu, Met or Val
  Variant (14)..(14): Xaa in position 14 is Ala, Ser, Thr or Val
LXXGGTAVGTGXNX

SEQ ID NO: 134171 - DNA, 1596 bp, Azotobacter vinelandii
  CDS (1)..(1596): transl_table=11
atgtctgcatatcaaaacgagatcaaggcccttgctgccctcaaagagaagaacggcagcgcctggagcgccatcaacccggaatacgccgcccgcatgcgcatccagaaccgtttcaagaccggtctggacgtcgccaagtacactgcggccatcatgcgcaaggacatggccgagtacgacgccgattcgtccgtctacacacagtccctgggctgctggcacggtttcatcggccagcagaagctgatctccatcaagaagcacctgaagaccaccgacaagaagtacctgtacctgtccggctggatggtggcagccctgcgctccgacttcggcccgctgcccgaccagtccatgcacgagaagaccgcggtctcctcgctgatcgaagagctgtacaccttcctgcgccaggccgatgcccgcgaactggacctgctgttcagcgcccttgacgatgcccgcaacgccggcgacaaagccaaggagcaggaaatcctgaagcagatcgacggcttcgaaacccacgtcgtgccgatcatcgccgacatcgacgccggctttggtaacgccgaggccacctacctgctggccaggaagatgatcgaagccggtgcctgctgcatccagatcgaaaaccaggtttccgacgagaagcagtgcggccaccaggacggcaaggtgaccgttccgcacgaggacttcctcgccaagatcaatgccgttcgctatgccttcctcgagctgggcgtggacgatggcgtgatcgtcgcccgtaccgactccctgggtgccggcctgaccaagcagatcgccgtgacccgtcaggaaggcgacctgggcgacaagtacaacgccttcctggactgcgaagagatcagcccggccgagatgaagaacggcgacgtggtactgaaccgcaacggcaagctgctgcgtccgaagcgcctggccagcggtctgttccagttccgcaagggtaccggcgaagaccgctgcgtcttggactgcatcacttccctgcagaatggcgccgacctgctgtggatcgaaaccgagaagccgcacatcggccagatcaagggcatggtcgaccgcatccgcgaagccatcccgaacgccaagctggtgtacaacaacagcccgtcgttcaactggaccctgaacttccgtcagcaagtgttcgatacttgggccgccgaaggcaaggacgtcgccaagtacgaccgcgccaaactgatgagcgtggagtacgacgagaccgagctggccctggaagctgatgcccgcatccgcaccttccagcgcgacgccgcggcccaggccggtattttccaccacctgatcaccctgccgacctaccacactgccgcgctgtccaccgacaacctggccaagggctacttcgccgaggaaggcatgctggcctacgtgaagggcgttcagcgtcaggaaatccgtcagagtatcgcttgcgtcaagcaccagaacatggccggctccgacatcggcgacaaccacaaggaatacttcgctggcgaagccgctctgaaagccggcggcaaagacaacaccatgaaccagttccattga

SEQ ID NO: 134172 - protein, 531 aa, Azotobacter vinelandii
MSAYQNEIKALAALKEKNGSAWSAINPEYAARMRIQNRFKTGLDVAKYTAAIMRKDMAEYDADSSVYTQSLGCWHGFIGQQKLISIKKHLKTTDKKYLYLSGWMVAALRSDFGPLPDQSMHEKTAVSSLIEELYTFLRQADARELDLLFSALDDARNAGDKAKEQEILKQIDGFETHVVPIIADIDAGFGNAEATYLLARKMIEAGACCIQIENQVSDEKQCGHQDGKVTVPHEDFLAKINAVRYAFLELGVDDGVIVARTDSLGAGLTKQIAVTRQEGDLGDKYNAFLDCEEISPAEMKNGDVVLNRNGKLLRPKRLASGLFQFRKGTGEDRCVLDCITSLQNGADLLWIETEKPHIGQIKGMVDRIREAIPNAKLVYNNSPSFNWTLNFRQQVFDTWAAEGKDVAKYDRAKLMSVEYDETELALEADARIRTFQRDAAAQAGIFHHLITLPTYHTAALSTDNLAKGYFAEEGMLAYVKGVQRQEIRQSIACVKHQNMAGSDIGDNHKEYFAGEAALKAGGKDNTMNQFH

SEQ ID NO: 134173 - DNA, 1395 bp, Deinococcus radiodurans R1
  CDS (1)..(1395): transl_table=11
gtgccaggcaaactgtcctcactgaacgaagggcgctggccacagcgaaagacacctccccacggtgggcgaggcggccctgactctcactcaaggagcgacaccatgacccccacccccaaaacccccgccgaaatcctggaaaagacctggcagaccgaagagcgctggcagggcatcaagcgcaactacaccgccgaggacgtcgtccgcctgcgcggcagcctgcccatcgagtacaccctcgccaagcacggcgccaacaaactgtggcaacagatgaaggaaatgcccttcgtcaacgcgctcggcgccctgaccggaaaccaggcgatgcagcaggtcaaggccggcctcaaggccatctacctgtcgggctggcaggtcgccggtgacgccaacaacgcgggccagatgtaccccgaccagagcctctaccccgccagcagcgtgccggacgtcgtcaagcgcatcaacaacaccctgcgccgcgccgaccagattcagaccagcgagggcaagaacgacatcgactacttcgtgccgattgtcgccgacgccgaagcgggtttcggtggccccctcaacgcctttgaactcatgaaggccatgatcgaagcgggcgccgccggcgtgcacttcgaagaccagctcgccagcgagaagaagtgtggtcacctcggcggcaaggtgctcgtgcccaccagccagttcatccgcaccctgaacgcggcccgtctcgccgccgacgtgagcggcgtgcccaccgtcctgattgcccgcaccgacgccgacgccgccaacctgctgaccagcgacgtcgacgacaacgacaagccgttctgcaccggtgagcgcacccccgaaggcttcttctacgtcaagcccggcatcgaccaggccatcagccgcgccctggcctacgctccttacgccgacgtgatctggtgcgaaaccagcgtccccaacctggaagacgccaagaagttcgccgacgccgtgcacgcccagttccccggcaagctgctcgcctacaactgctcgccctccttcaactggaagaagaacctggacgacgaaaccatcgccaagttccaggtcgaactcggcaagatgggctacaagttccagttcatcaccctggccggcttccacgcgctgaacatgagcatgttcgacctcgcctacggctacgcccgtaagcagatgagcgccttcgtggaacttcaggagcgtgaattcgcggcccaggaacgcggcttcaccgccgtgcgccaccagcgcgaagtcggcaccggctacttcgacctcgtctcgcaggcggcgggcggcggccagagcagcaccaccgcgctcgccggcagcaccgaagccgagcagttcgcgcaccactga

SEQ ID NO: 134174 - protein, 464 aa, Deinococcus radiodurans R1
MPGKLSSLNEGRWPQRKTPPHGGRGGPDSHSRSDTMTPTPKTPAEILEKTWQTEERWQGIKRNYTAEDVVRLRGSLPIEYTLAKHGANKLWQQMKEMPFVNALGALTGNQAMQQVKAGLKAIYLSGWQVAGDANNAGQMYPDQSLYPASSVPDVVKRINNTLRRADQIQTSEGKNDIDYFVPIVADAEAGFGGPLNAFELMKAMIEAGAAGVHFEDQLASEKKCGHLGGKVLVPTSQFIRTLNAARLAADVSGVPTVLIARTDADAANLLTSDVDDNDKPFCTGERTPEGFFYVKPGIDQAISRALAYAPYADVIWCETSVPNLEDAKKFADAVHAQFPGKLLAYNCSPSFNWKKNLDDETIAKFQVELGKMGYKFQFITLAGFHALNMSMFDLAYGYARKQMSAFVELQEREFAAQERGFTAVRHQREVGTGYFDLVSQAAGGGQSSTTALAGSTEAEQFAHH

SEQ ID NO: 134175 - DNA, 1620 bp, Caulobacter crescentus CB15
  CDS (1)..(1620): transl_table=11
atgacgcagcgcaagacctatgccgaacaccgcgacgccctgctggcgcgctacccgcaaggcgtcacgccgggcggcgtcgatgtcgacgacatcatccagctgaagctgcaaaacaccttcaacacccacctggatatcgcccgcgccatggccccggtgatgcgcgccgacatggccgagtacgatcgcgacagctccaagttcacccagtcgctgggctgctggtcaggctttcacgcccagcagatgatcaaggcggtcaaacgcctgcgcggcacgaccaagggcgcctatgtctatctgtcgggctggatggtcgcgggccttcgcaaccgcttcggccacctgcccgaccagtcgatgcacgagaagacctcggtcgtcgacctgatcgaggaaatctacgtctcgctgcgccaggccgacgaagtggcgatcaacgacctcttcaaggcgctgagcgccgcccgcaaggccggcgaccagatcgccgagcaggcggcgatcaaggcgatcgacaacttcgagacccacgtcgtgccgatcatcgccgacatcgacgccggcttcggcaacgagcacgcgacctatctgttggccaaggagatgatcaaggccggcgcctgctgcctgcagatcgagaaccaggtcagcgacgccaagcaatgcggccaccaggacggcaaggtcaccgtgccgcgcgaggatttcatcgagaagctgcgcgcttgccgcctggccttcgaggaactgggcgtggacgacggcgtcatcgtcgcccgcaccgacagcctgggcgcaggcctgacccagaagatcccggtcagccaggagcctggcgatctggccagcgactacatcaagtggctgaagaccgagcccgtcaccccggaaaacccgctgaaggacggcgagctggcgatcatgaaggacggcgccttcgttaagcccgtgcgcatgcccaacggcctgttcgcgttccaggacggcaccggccgccagcgcgtcattgaggactgcatcgccaacctgacccagggcggcgccgacctgctgtggatcgaaaccgacacccccaatgtcgatgagatcgcttcgatggtggccgaggttcgcagggtcgtgccgaacgccaagctgacctacaacaactcgccgtcgttcaactggacgctcaatctgcgcaagcaggttcgcgaccagtggatcgccgagggcaagatccataaggacagctacccggacggcaatgcgctgatgtcagccgagtacgacaagagcgacctgggccgcgaggccgatgagcgtctggcgcgcttccaggtcgacatcgccgcccgcgccggggtgttccacaacctgatcaccctgccgaccttccacttgaccgccaagagcgtggacgagctgtcgcgcggttacttcggcgaagatcgcatgcaggcctacgtcaacacggtgcagcgcgaggagatccgccgcggcgtctccgccgtgaaacaccagcacgaggtcggctcggatctcggcgacaccttcaaggagatggtcgccggcgaacgcgccctgaaggccggcggccacgccaacaccatgaaccagttcgcggccgaatag

SEQ ID NO: 134176 - protein, 539 aa, Caulobacter crescentus CB15
MTQRKTYAEHRDALLARYPQGVTPGGVDVDDIIQLKLQNTFNTHLDIARAMAPVMRADMAEYDRDSSKFTQSLGCWSGFHAQQMIKAVKRLRGTTKGAYVYLSGWMVAGLRNRFGHLPDQSMHEKTSVVDLIEEIYVSLRQADEVAINDLFKALSAARKAGDQIAEQAAIKAIDNFETHVVPIIADIDAGFGNEHATYLLAKEMIKAGACCLQIENQVSDAKQCGHQDGKVTVPREDFIEKLRACRLAFEELGVDDGVIVARTDSLGAGLTQKIPVSQEPGDLASDYIKWLKTEPVTPENPLKDGELAIMKDGAFVKPVRMPNGLFAFQDGTGRQRVIEDCIANLTQGGADLLWIETDTPNVDEIASMVAEVRRVVPNAKLTYNNSPSFNWTLNLRKQVRDQWIAEGKIHKDSYPDGNALMSAEYDKSDLGREADERLARFQVDIAARAGVFHNLITLPTFHLTAKSVDELSRGYFGEDRMQAYVNTVQREEIRRGVSAVKHQHEVGSDLGDTFKEMVAGERALKAGGHANTMNQFAAE

SEQ ID NO: 134177 - DNA, 1332 bp, Ralstonia solanacearum GMI1000
  CDS (1)..(1332): transl_table=11
atggatcgatcacacaaggagagagtcatgtcgcgcgaacccgaagtgaaggcgctgcagcaagagtgggacaccaacccgcgctggaaaggcatcaagcgcggctacaccgcgcaagacgtggtgcgcctgcgcggctcgctgcagatcgagcacaccctggcccgccgcggtgccgaaaagctgtggaccctgatgaacagtgagccgttcgtcaacgcgctgggcgcgctgacgggcaaccaggccatgcagcaggtcaaggccggcctgaaggccatctacctgtcgggctggcaggtggcgggcgacgccaacagcaacggcgagatgtatcccgaccagtcgctgtactcggtggactcggtgcccaaggtggtcaagcgcatcaacaatacgttccagcgcgccgaccagatccaatggtcggaaggcaaggacgatgtcgacttcttcgccccgatcgtggccgatgccgaggccggcttcggcggcgtgctgaatgcgttcgagctgatgaaggcgatgatcgaggcgggcgccgccggcgtgcacttcgaagaccagctggccgccgtcaagaaatgcggccacatgggcggcaaggtgctggtgccgacacgcgaggcggtgtccaagctggtggccgcgcgcctggccgccgatgtgatgggcgtgccgaccgtgctgatcgcccgcaccgacgccgaggccgccgacctgctgaccgccgacgtggacgacaacgaccgtccgttctgcaccggcgagcgcaccgtggaaggcttctaccgcaccaagccgggcctgcagcaggccatcgcgcgcggcctggcttacgccgactacgccgacctggtgtggtgcgaaaccggcaagccggacctggagtacgccaagaagtttgccgaggccatccacgccaagttccccggcaagatgctggcctacaactgctcgccgtcgttcaactggaagaagaacctggacgacgccaccatcgccaagttccagaaggagctgggcgcgatgggctacaagttccagttcatcacgctggccggcttccatgccctgaactactcgatgttcaacctggcccacggctatgcccgcaaccagatgagcgccttcgtcgagctgcaggaagccgaattcgcggcggccgagaagggcttcaccgcggtcaagcaccagcgcgaagtcggcaccggctacttcgatgccgtgacgcagaccatcgagcgcgacgcgtccaccacggcgctcaagggctcgaccgaggacgagcagttcttcgaagaaaaggcgcacgccaagaaggtcgcctga

SEQ ID NO: 134178 - protein, 443 aa, Ralstonia solanacearum GMI1000
MDRSHKERVMSREPEVKALQQEWDTNPRWKGIKRGYTAQDVVRLRGSLQIEHTLARRGAEKLWTLMNSEPFVNALGALTGNQAMQQVKAGLKAIYLSGWQVAGDANSNGEMYPDQSLYSVDSVPKVVKRINNTFQRADQIQWSEGKDDVDFFAPIVADAEAGFGGVLNAFELMKAMIEAGAAGVHFEDQLAAVKKCGHMGGKVLVPTREAVSKLVAARLAADVMGVPTVLIARTDAEAADLLTADVDDNDRPFCTGERTVEGFYRTKPGLQQAIARGLAYADYADLVWCETGKPDLEYAKKFAEAIHAKFPGKMLAYNCSPSFNWKKNLDDATIAKFQKELGAMGYKFQFITLAGFHALNYSMFNLAHGYARNQMSAFVELQEAEFAAAEKGFTAVKHQREVGTGYFDAVTQTIERDASTTALKGSTEDEQFFEEKAHAKKVA

SEQ ID NO: 134179 - DNA, 1281 bp, Streptomyces coelicolor A3(2)
  CDS (1)..(1281): transl_table=11
atggcagaagcgaggacgcaggcggccgaggacctggcccggcgctgggacaccgagccgaggtggcagggcatcgagcgcacctacagtgcccaggacgtcgtccggctctcgggcagtgtccgtgaggagcacaccctggcccggcgcggtgccgagcggctgtggcgccagctgcacgagcgggactacgtccacgcgctcggcgcgctcaccggcggtcaggccgtgcagcagatcaaggcgggcctgcaggcgatctacctgtccggctggcaggtcgccgccgacgccaaccaggccgggcacacctatcccgaccaaagcctctacccggccaactccgtgccgcaggtggtgcgtcggatcaacaacgcgctgctgcgcgccgaccagatcgccaccagtgagggcgacaactccaccgactggctggcaccgatcgtcgcggacgcggaggccggcttcggcggcccgctcaacgccttcgagctggccaaggcgatgatcgcggcgggcgcggccggcatccactacgaggaccagctcgcctcggagaagaagtgcgggcacctcggcggcaaggtcctcgtccccacctcgcagcacatccgcaccctgaacgcagcccgtctcgccgccgacatcgctgacaccccgaccgtgatcatcgcccgcaccgacgccctcgccgccaatctgctgacgtccgacgtcgacgagcgggacgctcagttcgtcaccggtgagcgcacgccggagggcttctaccgggtccgcaacggcatggcacccgtgatcgcccgtggcctggcctacgccccgtacgccgatctgatctgggtcgagaccggcactccggacctggagcaggcgcgcgagttcgccgaggcgatccacgccgagcacccggaccagatgctggcgtacaactgctcgccgtccttcaactggaaggccgcgctggacgacgaccaaatcgccaagttccagcgcgagctgggcgcgatgggctacaagttccagttcatcaccctggccggcttccactccctgaaccacggcatgttcgacctggcccgcggctatgccgagcacggcatgaccgcctacgtcgacctccaggagagggagttcgccgcgcaggcccacggcttcaccgccgtcaagcaccagcgcgaggtcggcaccggctacttcgacctggtctccaccgccgtcaacccagcctcctccacgaccgctctcgccgggtccacggaggaggagcagttccactag

SEQ ID NO: 134180 - protein, 426 aa, Streptomyces coelicolor A3(2)
MAEARTQAAEDLARRWDTEPRWQGIERTYSAQDVVRLSGSVREEHTLARRGAERLWRQLHERDYVHALGALTGGQAVQQIKAGLQAIYLSGWQVAADANQAGHTYPDQSLYPANSVPQVVRRINNALLRADQIATSEGDNSTDWLAPIVADAEAGFGGPLNAFELAKAMIAAGAAGIHYEDQLASEKKCGHLGGKVLVPTSQHIRTLNAARLAADIADTPTVIIARTDALAANLLTSDVDERDAQFVTGERTPEGFYRVRNGMAPVIARGLAYAPYADLIWVETGTPDLEQAREFAEAIHAEHPDQMLAYNCSPSFNWKAALDDDQIAKFQRELGAMGYKFQFITLAGFHSLNHGMFDLARGYAEHGMTAYVDLQEREFAAQAHGFTAVKHQREVGTGYFDLVSTAVNPASSTTALAGSTEEEQFH

SEQ ID NO: 134181 - DNA, 1287 bp, Oceanobacillus iheyensis HTE831
  CDS (1)..(1287): transl_table=11
atgaaaaatgaaagagtagagaatttaactaaagagtggcaagatgatattcgttgggtggggattgaacgtccgtataaagcagaagatgtaataagactcagaggttctattgatataacgcatactttagcaactcgaggagcctcgaaattatggaaactgattaatgaagaagactatgtaaatgctttaggagcactgaccggaaatcaagcagttcaacaagtgaaagcgggacttaaagcaatatatttaagcgggtggcaggttgctgctgatgcaaatatggcaggagaaatgtatcctgatcaaagtctataccctgcaaatagtgtccctcaggtggtgagaagaattaatcaagcactacaacgatcggatcagattcatttttcagaaggggagaatgatattgattggttcgctccgatagttgctgatgcagaagctggttttggaggtcaactaaatgtattcgaattaatgaaatcaatgattgaagcgggtgctgctgctgtccattttgaagatcaattatcatctgaaaagaagtgcggtcatctaggtggtaaagtgttgctgccaacacagaatgcagtccgaaatttaatcgcagcccgatttgctgcagatgtaatgggtaccccaactataatcatcgcacgcacagatgcaaacgcagcagatatgataactagtgatgtagatgaatacgatcatttatttatcactggagaaagaactgtagaagggttctacaaaacaaaggcaggaatcgatcaggcaatagctagagggctagcatatgcaccttatgctgatttaatttggtgcgaaacatcggagccaaatttggaggaagctagaatatttgcagaagctatacatgaaaagtttccaaataaattactcgcatataattgttcaccatcatttaattggaagaaaaaactctcagatcaagaaatagcagagttccaaaaagagctaggtaaattaggttataaattccaatttgtaacattagcgggttttcatgcattaaatcacagtatgttcgatttagctaaaaagtataaaagtcatggtatggcagcttattctgaattacagcaagcagaattttcaagtgaaaaagacggatatacagcaactaggcatcagagagaagttggtacaggttattttgacgaagttgcgcaagtcatttctggtggcaaggcttctactgcggcgttaataggttccactgaaacagaacaatttacaagtttttacaaataa

SEQ ID NO: 134182 - protein, 428 aa, Oceanobacillus iheyensis HTE831
MKNERVENLTKEWQDDIRWVGIERPYKAEDVIRLRGSIDITHTLATRGASKLWKLINEEDYVNALGALTGNQAVQQVKAGLKAIYLSGWQVAADANMAGEMYPDQSLYPANSVPQVVRRINQALQRSDQIHFSEGENDIDWFAPIVADAEAGFGGQLNVFELMKSMIEAGAAAVHFEDQLSSEKKCGHLGGKVLLPTQNAVRNLIAARFAADVMGTPTIIIARTDANAADMITSDVDEYDHLFITGERTVEGFYKTKAGIDQAIARGLAYAPYADLIWCETSEPNLEEARIFAEAIHEKFPNKLLAYNCSPSFNWKKKLSDQEIAEFQKELGKLGYKFQFVTLAGFHALNHSMFDLAKKYKSHGMAAYSELQQAEFSSEKDGYTATRHQREVGTGYFDEVAQVISGGKASTAALIGSTETEQFTSFYK

SEQ ID NO: 134183 - DNA, 1779 bp, Bradyrhizobium japonicum USDA 110
  CDS (1)..(1779): transl_table=11
atgttacatgacatcaccaataaaaaacaagccatctatacgaagtttccgttttcgcgtttacgtcgtgacacgcatttcgcaatgcactgtcaagaatgtcgatggccagccatcgccatcgtcagcgaaaggatcaggcacatgaactaccagccccgtggcatcagcactttccaggcgccggcctcgtatcagagcgagatcgatgcagcgaaggcgctcctcgagacccagccgacctggaacggggtgtcggccgaggccgtcgcgcgcatgcgcctgcagaaccgcttcaggaccggcctcgacgtcgcccgctacaccgcggcgctgatgcgggccgacatggcggcctatgacaacgaccccaccaagtacacccagtcgctcggctgctggcacggcttcatcgcccagcagaagctgatctcggtcaagaagcacttcggtggcaggaccgatcgcacctacctgtatctctccggctggatgatcgcggcgctgcgctccgagttcggaccgctgcccgaccagtcgatgcacgagaagacctcggtgccggcgctgatcgaagagctctacaccttcctgcgccaggccgactcgcgcgagctcaacgacatcttccgcagcctcgacaaggcccgcaaggaaggtgacaagacgcgcgagaaggagctgatcgagaagatcgacggcttccagacccatgtcgtgcccgtcatcgccgacatcgatgccggcttcggcaacgcggaggcgacctacctgctcgccaagaagatgatcgaagcgggcgcctgcgcgctccagatcgagaaccaggtctcggacgagaagcagtgcggccaccaggacggcaaggtcaccgtgccgcacgatgtcttcctggcgaagatccgcgcctgccgccacgccttcctcgagctcggcgtcgaagacggcgtcgtcgtgacccgcaccgactcgctcggcgctggcctcacgcagcagatcgccgtcagccacaagcccggcgacatcggcgaccagtacaacagcttcctcgattgcgaggaaatcaccgcggagaacgcccgcaacggcgacgtcatcatcaaccgcaacggcaagatgatgcgtccgaagcggctgccctccaacctctaccagttccgcccgggcaccggtgaggaccgctgcgtgctggattgcatcacctcgctgcagaacggcgccgacctgctctggatcgagaccgagaagccgcatatcgagcagatcgccaagatggtcgatcgcatccgcgaggtggttccgaacgccaagctggcctacaacaactcgccgtcgttcaactggaccctcaacttccgttggcaggtctacgacgcgatgaaggaagccggcaaggacgtcagcaagtacaaccgcgccgagctgatgaaggcggaatatgacgacacgccgctggcgaaggaagccgacgagcgcatccgcaccttccaggcggattcggccaagcgtgccggcatcttccaccacctgatcacgctgccgacctaccacaccgcggcgctttcgaccgacaatctggcccgggagtacttcggcgagcagggcatgctcggctacgtcaagaacgtccagcgcgccgagatccgtcagggcatcgcctgcgtgaagcatcagaacatggccggctccgacatcggcgacgaccacaaggagtacttcgccggcgaggccgccctgaaggcgggcggcgcgcacaacacgatgaaccagttcggctaa

SEQ ID NO: 134184 - protein, 592 aa, Bradyrhizobium japonicum USDA 110
MLHDITNKKQAIYTKFPFSRLRRDTHFAMHCQECRWPAIAIVSERIRHMNYQPRGISTFQAPASYQSEIDAAKALLETQPTWNGVSAEAVARMRLQNRFRTGLDVARYTAALMRADMAAYDNDPTKYTQSLGCWHGFIAQQKLISVKKHFGGRTDRTYLYLSGWMIAALRSEFGPLPDQSMHEKTSVPALIEELYTFLRQADSRELNDIFRSLDKARKEGDKTREKELIEKIDGFQTHVVPVIADIDAGFGNAEATYLLAKKMIEAGACALQIENQVSDEKQCGHQDGKVTVPHDVFLAKIRACRHAFLELGVEDGVVVTRTDSLGAGLTQQIAVSHKPGDIGDQYNSFLDCEEITAENARNGDVIINRNGKMMRPKRLPSNLYQFRPGTGEDRCVLDCITSLQNGADLLWIETEKPHIEQIAKMVDRIREVVPNAKLAYNNSPSFNWTLNFRWQVYDAMKEAGKDVSKYNRAELMKAEYDDTPLAKEADERIRTFQADSAKRAGIFHHLITLPTYHTAALSTDNLAREYFGEQGMLGYVKNVQRAEIRQGIACVKHQNMAGSDIGDDHKEYFAGEAALKAGGAHNTMNQFG

SEQ ID NO: 134185 - DNA, 1635 bp, Rhodopseudomonas palustris CGA009
  CDS (1)..(1635): transl_table=11
atgaacttccagccacgcggcatcagcgccatccacgctccgacctcctacaagagcgagatcgaagcggccgaagctctcctcaaggacaagccgacctggaatggcgtcaccgccgaggccgtggctcggatgcggctgcagaaccgcttcaagaccggtctggacatcgcccgttacaccgcggcccagatgcgcgccgacatggcggcgtatgacgccgacccgaccaagtacacccagtcgctgggctgctggcacggcttcatcgcgcagcagaagctgatctcgatcaagaagcacggcggtggccgcaccgaccgtcgttacatctacctgtcgggctggatgatcgcggcgctgcgctcggagttcggcccgctgcccgaccagtcgatgcacgagaagacctcggtgccggcgctgatcgaagagatctacaccttcctgcgccaggcggattcgcgcgagctgaacgacctgttccgccagctcgacaaggcccgcgaggccggcgacaaggccaaggaaaccgcgatcatcgaccagatcgacaatttccagacccacgtcgtgccgatcatcgccgacatcgacgccggcttcggtaacgccgaggcgacctatctgctcgccaagaagatgatcgaagcgggcgcctgcgcgctgcagatcgagaaccaggtctcggacgagaagcagtgcggccaccaggacggcaaggtcaccgtgccgcacgacgtgttcatcgccaaggttcgcgcgatccgtcacgccttcctcgagatgggcgtggaagacggcatcatcgtcacccgcaccgactcgctcggcgccggcctgacccagcagatcgccgtcagccatcagccgggtgacatcggcgaccagtacaacagcttcctggattgcgaagaagtcgatgccagcaaaatcggcaacggcgacgtgatcatcagccgcaacggcaagttgctgcgtccgaagcgcctgccgagcaacctgtaccagttccgtccgggcaccggcgcggaccgctgcgtgctggactgcatcacctcgctgcagaacggcgccgacctgctgtggatcgaaaccgagaagccgcatatcgagcagatcgcctcgatggtcgatcggatccgcgaagtcgtgccgaacgccaagctggcctacaacaactcgccgtcgttcaactggacgctcaacttccgctggcaggtctatgacgcctggaaggaagagggcaaggacgtcagcaagtacaaccgcgccgagctgatgaaggccgaatacgacgaaactccgctggcgatcgaagccgacgcccgcatccgcaccttccaggcggattcggccaagcgcgccggcatcttccaccacctgatcacgctgccgacctaccacacggctgcgctgtcgaccgacaacctggcccgcgaatatttcggcgaccagggcatgctgggttatgttaagaacgtgcagcgccaggaaatccgtcagggcatcgcctgtgtgaagcaccagaacatggccggctcggatatcggcgacgatcacaaggaatacttcgccggcgacgcggctctgaaggccggcggcgaacacaacacgatgaaccagttcagctaa

SEQ ID NO: 134186 - protein, 544 aa, Rhodopseudomonas palustris CGA009
MNFQPRGISAIHAPTSYKSEIEAAEALLKDKPTWNGVTAEAVARMRLQNRFKTGLDIARYTAAQMRADMAAYDADPTKYTQSLGCWHGFIAQQKLISIKKHGGGRTDRRYIYLSGWMIAALRSEFGPLPDQSMHEKTSVPALIEEIYTFLRQADSRELNDLFRQLDKAREAGDKAKETAIIDQIDNFQTHVVPIIADIDAGFGNAEATYLLAKKMIEAGACALQIENQVSDEKQCGHQDGKVTVPHDVFIAKVRAIRHAFLEMGVEDGIIVTRTDSLGAGLTQQIAVSHQPGDIGDQYNSFLDCEEVDASKIGNGDVIISRNGKLLRPKRLPSNLYQFRPGTGADRCVLDCITSLQNGADLLWIETEKPHIEQIASMVDRIREVVPNAKLAYNNSPSFNWTLNFRWQVYDAWKEEGKDVSKYNRAELMKAEYDETPLAIEADARIRTFQADSAKRAGIFHHLITLPTYHTAALSTDNLAREYFGDQGMLGYVKNVQRQEIRQGIACVKHQNMAGSDIGDDHKEYFAGDAALKAGGEHNTMNQFS

SEQ ID NO: 134187 - DNA, 1332 bp, Herminiimonas arsenicoxydans
  CDS (1)..(1332): transl_table=11
atggcaactcgcgaacagcaaattcaggcactcaacaaagattggaacgaaaatccgcgctggaaaggtgtcaagcgcaattacaccgctgaagatgttgttcgactgcgcggttccttgcagatcggccacacgctggcgcagcgcggtgcagagaaactgtgggagatgtgcaataacgagccattcgtcaattcacttggcgccttgaccggcaatcaggccatgcagcaggtcaaggccggcctgaaagcgatttatctgtcgggctggcaggttgccggcgacgccaacctggcgggagaaatgtatccggaccagtcgctgtacccggccaattcggtgcctatggtagtcaaacgcatcaacaatactttccagcgcgcagatcagattcaatggtcggaagatagcggcgatatcgattttttcgcccccatcgtggcggatgcggaagccggttttggcggtgtcctgaatgcctacgaactgatgaagtccatgatcgaggccggcgctgcaggcgtgcacttcgaggatcaactggcatcggtgaagaaatgcggccatatgggcggcaaggttctggtgccgacgcgtgaagcggtggaaaaactgaatgccgcgcgcctggccgcagatgtctgcggcacgaccacgctggtgattgcgcgcacggatgcggaggcggcggacttgctgacttccgacgtggatgaaaacgaccaacccttcctgacgggcgagcgcacggtagaaggcttttacaaaacccgttccggtttcgatcaggcggtatcgcgcggactggcctatgcgccgtatgtcgatatgttgtggtgcgaaaccggcaagcccgatctgcgattcgccaagcaatttgccgatgcgatccatgcaaaatttcccggcaagatgctggcctacaactgttcgccttcattcaactggagaaaaaatctggatgacgcaaccattgccacattccagaaagaactgggtgcgatgggctacaagttccagttcatcacactggccggcttccattcgctgaattactcgatgttcaatctggcgcatggctatgcgcgcaatcagatgtcagcctttgtcgagttgcaggaagccgaatttgctgccgccgcgcagggttttaccgcagtcaaacatcagcgcgaggtcggtaccggctacttcgatgccatcactcaggtcatacagcaagggaagtcgtccaccaccgcattgcatggctcgactgaagatgagcaatttttcgataacaacaagctggcaaaagtttgtatcacaggacacaagaacgcagcttga

SEQ ID NO: 134188 - protein, 443 aa, Herminiimonas arsenicoxydans
MATREQQIQALNKDWNENPRWKGVKRNYTAEDVVRLRGSLQIGHTLAQRGAEKLWEMCNNEPFVNSLGALTGNQAMQQVKAGLKAIYLSGWQVAGDANLAGEMYPDQSLYPANSVPMVVKRINNTFQRADQIQWSEDSGDIDFFAPIVADAEAGFGGVLNAYELMKSMIEAGAAGVHFEDQLASVKKCGHMGGKVLVPTREAVEKLNAARLAADVCGTTTLVIARTDAEAADLLTSDVDENDQPFLTGERTVEGFYKTRSGFDQAVSRGLAYAPYVDMLWCETGKPDLRFAKQFADAIHAKFPGKMLAYNCSPSFNWRKNLDDATIATFQKELGAMGYKFQFITLAGFHSLNYSMFNLAHGYARNQMSAFVELQEAEFAAAAQGFTAVKHQREVGTGYFDAITQVIQQGKSSTTALHGSTEDEQFFDNNKLAKVCITGHKNAA

SEQ ID NO: 134189 - DNA, 1587 bp, Burkholderia vietnamiensis G4
  CDS (1)..(1587): transl_table=11
atgtcccaatatcaagacgacatcaaggcagtggctggcttgaaggaaaaccacggcagcgcgtggaatgccatcaatcccgagtatgccgctcgcatgcgcgcccagaacaagttcaagacgggcctcgacatcgcgaagtacaccgcgaagatcatgcgcgccgacatggctgcgtacgacgcggatccgtccaagtacacgcagtcgctcggttgctggcacggcttcatcggccagcagaagatgatttccattaagaagcacttcaacagcaccgaacgccgctacctgtacctgtcgggctggatggtcgctgcgctgcgctcggagttcggcccgctgccggaccagtcgatgcacgaaaagacgtcggtcagcgcgctgatccgcgagctgtacacgttcctgcgccaggccgacgcccgtgagctcggcggcctgttccgcgagctggatgccgcgaaggacgccgctgcgaaggccgcgatccagcaaaagatcgacaaccacgtgacgcacgtcgtgccgatcatcgccgacatcgacgccggtttcggcaacgctgaagcgacctatctgctggccaagcagttcatcgaagcgggcgcatgctgcatccagatcgagaaccaggtgtcggacgagaagcagtgcggccaccaggacggcaaggtcacggtgccgcacgaggacttcctcgcgaagatccgcgcgatccgctacgcattcctggagctgggcgtggatgacggcatcatcgtcgcgcgcaccgactcgctcggcgccggcctgaccaagcagatcgccgtgacgaacgcgccgggcgacctgggcgaccagtacaactcgttcctcgactgcgaagaactgtcgggcgaccagctcggcaacggcgacgtcgtgatcaagcgcgacggcaagctgctgcgtccgaagcgcttgccgagcaacctgttccagttccgcgccggcacgggtgaagcacgttgcgtgctggattgcatcacgtcgctgcagaacggcgccgacctgctgtggatcgagaccgaaaagccgcacatcgcgcagatcgccggcatggtcaacgaaatccgcaaggtgatcccgaacgcgaagctggtgtacaacaacagcccgtcgttcaactggacgctgaacttccgtcagcaggtgtacgacgcgctgaaggccgaaggcaaggacgtgtcggcatacgaccgtgcgcaactgatgagcgtcgaatacgacgacaccgaactggcgaagctcgcggacgacaagatccgcacgttccaggccgatgcgtcgcgtgaagccggcatcttccatcacctgatcacgctgccgacgtaccacacggccgcactgtcgaccgacaacctcgcgaaggaatacttcggcgaacaaggcatgctcggctacgtggccggcgtgcagcgcaaggaaatccgtcagggcatcgcgtgcgtgaagcaccagaacatgtcgggttcggacatcggcgacgatcacaaggaatacttcagcggtgaagccgcgctgaaggcagcgggcaaggacaacacgatgaaccagttctcgtaa

SEQ ID NO: 134190 - protein, 528 aa, Burkholderia vietnamiensis G4
MSQYQDDIKAVAGLKENHGSAWNAINPEYAARMRAQNKFKTGLDIAKYTAKIMRADMAAYDADPSKYTQSLGCWHGFIGQQKMISIKKHFNSTERRYLYLSGWMVAALRSEFGPLPDQSMHEKTSVSALIRELYTFLRQADARELGGLFRELDAAKDAAAKAAIQQKIDNHVTHVVPIIADIDAGFGNAEATYLLAKQFIEAGACCIQIENQVSDEKQCGHQDGKVTVPHEDFLAKIRAIRYAFLELGVDDGIIVARTDSLGAGLTKQIAVTNAPGDLGDQYNSFLDCEELSGDQLGNGDVVIKRDGKLLRPKRLPSNLFQFRAGTGEARCVLDCITSLQNGADLLWIETEKPHIAQIAGMVNEIRKVIPNAKLVYNNSPSFNWTLNFRQQVYDALKAEGKDVSAYDRAQLMSVEYDDTELAKLADDKIRTFQADASREAGIFHHLITLPTYHTAALSTDNLAKEYFGEQGMLGYVAGVQRKEIRQGIACVKHQNMSGSDIGDDHKEYFSGEAALKAAGKDNTMNQFS

SEQ ID NO: 134191 - DNA, 1638 bp, Bradyrhizobium sp. ORS278
  CDS (1)..(1638): transl_table=11
atgaacttccaaccgcgtggactgaacgaccaggctctccaaggctcctcgtcctaccaggccgaggtcgaggcggcgcgtgcgctgctcgagaccaacccgacctggaacggcgtcaccgccgaggccgtggcgcgcatgcgcctgcagaaccgcttcaagaccggtctcgacgtggcccgctacaccgcggccgtgatgcgcgccgacatggccgcctacgatgaggacagcaccaagtacacgcagtcgctcggctgctggcacggcttcatcgcgcagcagaagctgatctcgatcaagaagcattttggccgcaccgaccgccgctacctctatctctccggctggatgatcgcggcgctgcgctccgagttcggcccgctgccggaccagtcgatgcacgagaagacctcggtgcccgcgctgatcgaggagctctataccttcctgcgccaggccgactcgcgcgagctcaacgatctgttccgcacgctcgacgccgcccgcaaggccggcgacaaggcgaaggagaccgagatcatcgccaagatcgacggcttccagacccacgtcgtcccggtcatcgccgacatcgacgccggcttcggcaatgcggaagcgacctatctgctcgccaagaagatgatcgaggcgggcgcctgcgcgctgcagatcgagaaccaggtctcggacgagaagcagtgcggccatcaggacggcaaggtcaccgtgccgcatgacgtcttcctggccaagatccgcgcctgccgccacgccttcctggagcttggcgtcgaggacggcatcatcgtcacccgcaccgactcgctcggcgctggtctcacgcagcagatcgcctattcgagccagccgggcgatctcggcgaccagtacaacagcttcctcgactgcgaggaagtgacgccggagaccgcgcgcagcggcgacgtcatcatcaaccagaatggcaagatggtcaggccgaagcggctgccctcgaacctctatcagttccgtcccggcaccggtgaggaccgttgcgtgctcgactgcatcacctcgctgcagaacggcgccgacctcttgtggatcgagaccgagaagccgcatatcgagcagatcgccaagatggtcgaccgcatccgcaaggtcatcccgaacgccaagctcgcctacaacaactcgccgtcgttcaactggaccctcaacttccgttggcaggtctacgacgcgatgaaggaggcgggtcaggacgtcagcaagtacaaccgcgccgagctgatgaaggcggagtatgacgacaccccgctggcgaaggaagccgacgagcgcatccgcaccttccaggcggattcagccaagcgcgccggcatcttccaccacctgatcactctgccgacctaccacacggccgcgctctcgaccgacaacctcgcccgcgagtatttcggcgagcagggcatgctgggctacgtcaagaacgtccagcgcgccgaaatccgccagggcatcgcctgcgtcaagcaccagaacatggccggctccgatatcggcgacgaccacaaggaatacttcgccggcgagaaggccctgaaggccggcggcgcgcacaacacgatgaatcagttcggctga

SEQ ID NO: 134192 - protein, 545 aa, Bradyrhizobium sp. ORS278
MNFQPRGLNDQALQGSSSYQAEVEAARALLETNPTWNGVTAEAVARMRLQNRFKTGLDVARYTAAVMRADMAAYDEDSTKYTQSLGCWHGFIAQQKLISIKKHFGRTDRRYLYLSGWMIAALRSEFGPLPDQSMHEKTSVPALIEELYTFLRQADSRELNDLFRTLDAARKAGDKAKETEIIAKIDGFQTHVVPVIADIDAGFGNAEATYLLAKKMIEAGACALQIENQVSDEKQCGHQDGKVTVPHDVFLAKIRACRHAFLELGVEDGIIVTRTDSLGAGLTQQIAYSSQPGDLGDQYNSFLDCEEVTPETARSGDVIINQNGKMVRPKRLPSNLYQFRPGTGEDRCVLDCITSLQNGADLLWIETEKPHIEQIAKMVDRIRKVIPNAKLAYNNSPSFNWTLNFRWQVYDAMKEAGQDVSKYNRAELMKAEYDDTPLAKEADERIRTFQADSAKRAGIFHHLITLPTYHTAALSTDNLAREYFGEQGMLGYVKNVQRAEIRQGIACVKHQNMAGSDIGDDHKEYFAGEKALKAGGAHNTMNQFG

SEQ ID NO: 134193 - DNA, 1278 bp, Bacillus thuringiensis serovar konkukian str. 97-27
  CDS (1)..(1278): transl_table=11
atgaaaaacgaaagaatcgagaaattacaagagagctgggaattagatacgcgttggaaagggattacacgtccatattcggcagaagatgtaattcgcctgcgcggatcaattgatattgagcatacattagcgcaccgcggtgctgaaaagctttgggcatcgcttcatacggaagattacattaacgcacttggtgcattaacaggaaaccaagcgatgcaacaagtaaaagctgggttaaaagcaatttatttaagtggatggcaagtagcggccgatgcaaacttgtctggacatatgtatccagaccaaagtttatatccagcgaacagcgtacctgctgtcgtaaaacgaattaatcaaacacttcaacgtgcggatcaaattcagcatatggaaggaagcggtgatacagattatttcgtgccgattgtagcagatgcagaagctgggtttggcggacaattaaacgtatttgaactgatgaaaggtatgattgaagcgggtgcgtctggcgtgcactttgaagatcaattatcttcagagaagaaatgcggtcatttaggcggaaaagtattactaccaacgcaaacagcggtgcgtaatttaatttcggcacgccttgcggcagacgtaatgggagtgccgacaattatcgttgcaagaacagatgcggatgcagcagatttaattacgagcgatatcgatcctgttgataaagcgtttattacaggcgaaagaacaccagaaggattttaccgtacgaaagcaggtcttgaccaagcgattgcacgtggtttagcgtacgctccttacgcagacctcgtttggtgtgaaacatctgaaccaaatttagatgatgcaaaacgatttgcggacgcaattcataaagagcatccagggaaattgcttgcatataactgttcaccttcatttaactggaaacaaaaactagatgagaaaacaattgcgagcttccaaaaagaaatcgcatcttacggttataagttccagttcgtaacacttgctggattccattcattaaactacggcatgttcgaattagcacgcggctataaagagcgcggcatggcagcgtactctgaactacaacaagcagaattcgcagcagaaaaacatggctactctgcaactcgtcaccaacgagaagtaggaacaggttactttgatgaagtagcacaagtcattacaggcggtacttcatcaacgacggcattaaaaggatctacggaagaagcacagtttacgaaataa

SEQ ID NO: 134194 - protein, 425 aa, Bacillus thuringiensis serovar konkukian str. 97-27
MKNERIEKLQESWELDTRWKGITRPYSAEDVIRLRGSIDIEHTLAHRGAEKLWASLHTEDYINALGALTGNQAMQQVKAGLKAIYLSGWQVAADANLSGHMYPDQSLYPANSVPAVVKRINQTLQRADQIQHMEGSGDTDYFVPIVADAEAGFGGQLNVFELMKGMIEAGASGVHFEDQLSSEKKCGHLGGKVLLPTQTAVRNLISARLAADVMGVPTIIVARTDADAADLITSDIDPVDKAFITGERTPEGFYRTKAGLDQAIARGLAYAPYADLVWCETSEPNLDDAKRFADAIHKEHPGKLLAYNCSPSFNWKQKLDEKTIASFQKEIASYGYKFQFVTLAGFHSLNYGMFELARGYKERGMAAYSELQQAEFAAEKHGYSATRHQREVGTGYFDEVAQVITGGTSSTTALKGSTEEAQFTK

SEQ ID NO: 134195 - DNA, 1599 bp, Acinetobacter sp. ADP1
  CDS (1)..(1599): transl_table=11
atgacatatcaatcagctcttgagcacgtacgtgccgtaaaaaataaattaggtggcacttgggatgcaattcgtcctgaagacgctgctcgtatgattgttcaaaaccgtttccatactggtttggatattgctaaatatacagctgcgatcatgcgtaaagacatggctgaatatgatgctgacaacagcagctatactcaatctttgggttgctggcatggtttcatcgcgcaacaaaaaatgattgccaacaaaaaatattttggtacaaccaacaaacgttatatctatctttctggttggatggttgctgcacttcgttctgaatttggtccacttcctgaccaatctatgcacgaaaaaacagccgttcctaagttgattgcagaaatctatacattcttacgtcaagcggatgcaaaagaattaaacgatttgttccgtgctctacaaaaagctgaagcggctggtgattctgcaaaagttaaagatatcgaatctcaaattgataactttgaaactcacgttgtgccaatcattgccgacatcgatgctggttttggtaacgaagaagcaacttatttgttgactaaacaaatgatcgaggcgggtgcttgtgcaatccaaatcgaaaaccaagtttctgatgcgaaacaatgtggtcaccaagcgggtaaagtcactgttccacacgaagacttccttgcaaaaatcaatgctgtacgttatgcattccttgagcttggtgttgatgaaggtgtaatcgttgcacgtactgactctgaaggtgcggacttgactcaaaagatccctgtatctaaagagaaaggtgacttggcttctcaatatattagctacttagacactcaagaaattgatattgcggatgctcaagaagatgaaatcctgatcaaacgcgatggtaaattacatcgtccaacccgtttagcttctggtttgtatcagttccgtgaaggtactcaacatgaccgcgttgtacttgactgtgtaacaagcttacaaaacggtgcagacatgatctggatcgagacaccaactccagacgttgctggtattgctggtttcgtaaatgacatcaaaaaacaagttccaaatgcaaaacttgtttataacaactcgccatcattcaactggactttaaacttccgtcaacaagcgtacgatcgctgggctgctgaaggtaaagatgtttcagcgtatgaccgcgctaaattgatgagtgctgagtacgataacactgaattagctgctgatgctgatgaaaaaatccgtactttccaggctgatgctgcacgtgaagcaggtgtgtttcatcacttgatcactcttccgacttaccacaccgctgctctttctacgcatgagcttgctaaaggttacttcggtgaagaaggtatgttggcttatgttgctggcgtacaacgtaaagaaatccgcggtggtatcgcatgtgttaaacaccaagcaatggctggttctgacatcggtgatgaccataaagaaatctttgctggtgaacaagcgcttaaagcgggtgatgcaagcaaaaacactatgaaccagttcgctcactaa

SEQ ID NO: 134196 - protein, 532 aa, Acinetobacter sp. ADP1
MTYQSALEHVRAVKNKLGGTWDAIRPEDAARMIVQNRFHTGLDIAKYTAAIMRKDMAEYDADNSSYTQSLGCWHGFIAQQKMIANKKYFGTTNKRYIYLSGWMVAALRSEFGPLPDQSMHEKTAVPKLIAEIYTFLRQADAKELNDLFRALQKAEAAGDSAKVKDIESQIDNFETHVVPIIADIDAGFGNEEATYLLTKQMIEAGACAIQIENQVSDAKQCGHQAGKVTVPHEDFLAKINAVRYAFLELGVDEGVIVARTDSEGADLTQKIPVSKEKGDLASQYISYLDTQEIDIADAQEDEILIKRDGKLHRPTRLASGLYQFREGTQHDRVVLDCVTSLQNGADMIWIETPTPDVAGIAGFVNDIKKQVPNAKLVYNNSPSFNWTLNFRQQAYDRWAAEGKDVSAYDRAKLMSAEYDNTELAADADEKIRTFQADAAREAGVFHHLITLPTYHTAALSTHELAKGYFGEEGMLAYVAGVQRKEIRGGIACVKHQAMAGSDIGDDHKEIFAGEQALKAGDASKNTMNQFAH

SEQ ID NO: 134197 - DNA, 1293 bp, Symbiobacterium thermophilum IAM 14863
  CDS (1)..(1293): transl_table=11
atgcgagacaaggttcgccagcaggcggcagaactggagcgggagtggaggacgaacccgcggtgggcgggggtggagcggccgtactcggcggaggacgtggtgcgcctgcgcggatcgttccaggtggagtacaccctggcccggcgggccgccgagaagctctggcacctcctgcacacggagccgtacgtccccgccctgggggcgctcaccggtaaccaggcggtccagatggtcaaggcgggcctgaaggccatctacctctccggctggcaggtggcggccgacgccaacctggcggggcagatgtacccggaccagtcgctgtatcccgccaactccgtgcccgcggtggtccagcgcatcaacaacgcgctgcgccgggccgaccagatcgcctggtccgaaggcagggacgacatcgactggatggtcccgatagtggctgacgccgaggccggcttcggcgggccgctcaacgcctttgagctgatgaaggcgatgatcgaggccggggcggccgccgtccacttcgaggaccagctggcctccgagaagaagtgcggtcacatgggcggcaaggtgctggttcccaccagccagcacatccggaccctgatcgccgcccggttggcggcggatgtcatgggcgtgccgaccctcatcgtcgcccggacggactccctgggcgccaacctgctcaccagcgacatcgacccgcgggaccgggagttcatcaccggcgagcggacgccggagggattctacaaggtccgcaacggcatcgaggcggccatcgcccgggggctggcctatgctccgtacgccgacctgatctggtgcgagaccgctaccccggacctggacgaggcgcggcagttcgccgaggccatcctctcccggtaccccaacaagctgctggcctacaactgctcgccctcgttcaactggaagcgccacctggacgacgacacgatcgcccggttccagcgggagctgggagcgatggggtacaagttccagttcatcaccctggcgggtttccactcgctcaacgcctcgatgttcgaactggccaggggctacgcccgggagggcatgacggcctacgtgaggctgcaggagaaggagtttgcgctggagcgggagggttacaccgccacccggcaccagcgggaggtgggcaccggctacttcgacgaggtcgcgcaggtgatctcgggcggcgcctcctcgaccctcgcgatgcggggctcgacggaggagcagcagttcaacgtggccgactaa

SEQ ID NO: 134198 - protein, 430 aa, Symbiobacterium thermophilum IAM 14863
MRDKVRQQAAELEREWRTNPRWAGVERPYSAEDVVRLRGSFQVEYTLARRAAEKLWHLLHTEPYVPALGALTGNQAVQMVKAGLKAIYLSGWQVAADANLAGQMYPDQSLYPANSVPAVVQRINNALRRADQIAWSEGRDDIDWMVPIVADAEAGFGGPLNAFELMKAMIEAGAAAVHFEDQLASEKKCGHMGGKVLVPTSQHIRTLIAARLAADVMGVPTLIVARTDSLGANLLTSDIDPRDREFITGERTPEGFYKVRNGIEAAIARGLAYAPYADLIWCETATPDLDEARQFAEAILSRYPNKLLAYNCSPSFNWKRHLDDDTIARFQRELGAMGYKFQFITLAGFHSLNASMFELARGYAREGMTAYVRLQEKEFALEREGYTATRHQREVGTGYFDEVAQVISGGASSTLAMRGSTEEQQFNVAD

SEQ ID NO: 134199 - DNA, 1587 bp, Psychrobacter arcticus 273-4
  CDS (1)..(1587): transl_table=11
atgtcaactgcatataaatcagcgatcgatttagtacgtgaactaaaacaaaagcacggtaactggcagaatatcagcgaaactgatgcggcacgtatgatgtcacaaaaccgtttcaaaacaggtttggatatcgctaagtacacggcaaaaatcatgcgtcaagacatggaagaatatgacaatgatacgtctcaatacacccagtctctaggtgcatggcatggttttgttgcacagcaaaccatgtatgcgaagaaaaaatactttggcacgacgtctaaaacttacatctacctatctggttggatggtagctgccctacgttctgagtttggtcctctgcctgaccaatctatgcacgaaaaaacgtcagtacctaagcttatcgcagagatctacactttcttgcgtcaagctgatgcaaaagtattgaacgattatttccgcgagctaaatgcagctgaagaagcaggtcaagatacctcagctattttagaaaaaatcgaaaactttgattcacatgttgtgccaatcattgctgatatcgatgcaggtttcggtaacgaagaagcaacttacttgctcactaagcaaatgatcgaagcgggtgcttgtgctatccaggttgaaaaccaagtatctgacgctaagcaatgtggtcaccaagcgggtaaagtaactgtaccgcacgaagactttatctctaaaatcaacgcgattcgttatgcattcttagagcttggtgttgaagacggtgttatcgttgctcgtactgactctgaaggcgcgtcactcacgcaaaagatcccagtatcaaatgagccaggcgaccttgcttctcaatatatcgattttatcgaaatggaagaagtgacgctagaaaatgcaaaagaaaacgacagcttgcttaagcataacggcaaactagtacgtccagttcgtttgcctaatggtctatatcagttccgtgaagacaccaacatcgaccgcgttgtacttgactgtgtaactgctctagaaaacggtgccgatctactatggatagaaacacctactccagacgttgaacacatcaaaatgatggttgatcgtattaaagagcagcagccaaaagccaagcttgtatacaacaacagcccgtcattcaactggacgttgaacttccgtaagcaaatcatcgctcagtgggaagaagaaggtaaagacctatctgcctacaataaaaatgacttgatgagtgctgattacgacggtactgaacttgatacagcagctgacgaagcggctagaaacttccaacgtgatgcagcacgtgaagcgggtgtattccatcacttaatcacgctacctacttaccacaccactgcacttagcgtgcatgagcttgctaaaggctacttcggtgaagatggtatgcttgcttatgcagctggcgtccaacgtaaagaaatccgcgaaggcatcgcttgtgttaagcaccaagcaatggcgggttctgaccttggcgatgaccacaaagagatcttctctggtgaacatgcccttaaagctggcggcggcaagaacaccatgaaccagttctaa

SEQ ID NO: 134200 - protein, 528 aa, Psychrobacter arcticus 273-4
MSTAYKSAIDLVRELKQKHGNWQNISETDAARMMSQNRFKTGLDIAKYTAKIMRQDMEEYDNDTSQYTQSLGAWHGFVAQQTMYAKKKYFGTTSKTYIYLSGWMVAALRSEFGPLPDQSMHEKTSVPKLIAEIYTFLRQADAKVLNDYFRELNAAEEAGQDTSAILEKIENFDSHVVPIIADIDAGFGNEEATYLLTKQMIEAGACAIQVENQVSDAKQCGHQAGKVTVPHEDFISKINAIRYAFLELGVEDGVIVARTDSEGASLTQKIPVSNEPGDLASQYIDFIEMEEVTLENAKENDSLLKHNGKLVRPVRLPNGLYQFREDTNIDRVVLDCVTALENGADLLWIETPTPDVEHIKMMVDRIKEQQPKAKLVYNNSPSFNWTLNFRKQIIAQWEEEGKDLSAYNKNDLMSADYDGTELDTAADEAARNFQRDAAREAGVFHHLITLPTYHTTALSVHELAKGYFGEDGMLAYAAGVQRKEIREGIACVKHQAMAGSDLGDDHKEIFSGEHALKAGGGKNTMNQF

SEQ ID NO: 134201 - DNA, 1584 bp, Colwellia psychrerythraea 34H
  CDS (1)..(1584): transl_table=11
atgtctaactatcaaagtgcaatagaagcggttcaagcgattaaagcaaatgcaggtagctcttgggatgctataaacccagaatctgtagctcgaatgcgtgcacagaacaaattcaaaactggtttagagattgctcagtatactgcagacattatgcgtgctgacatggaagcttatgatgctgatagctctaaatacactcaatctctaggttgctggcatggttttgttggccaacagaaaatgatttctatcaagaagcattttgatggcaaaacagaccgtcgttatttatacctttctggttggatggttgcagcactacgtagcgaatttggtcctcttcctgatcaatctatgcatgagaaaacttctgtagcttctttggttgaagaactttataccttcctacgtcaagctgatgcacgtgaactaggtggtcttttccgtgaactagacgcagcaaatgctggcgataaagctgctatccaagatcaaattgataaccatgttactcatgttgtgccaattattgctgatattgatgctggttttggtaatgctgaagcgacttacttaatggctaagcaaatgattgaagcgggtgcttgtgctcttcaaattgaaaaccaagttgctgatgaaaagcaatgtggacatcaagacggtaaagtaacggttcctcacgctgatttccattctaagattcgtgcattacgtcatgctttcctagaactaggtatcgacaacggtattatcgtttcacgtactgattctgaaggtgctggtcttactaaagaaatcgctgttgttaaagaaccgggcgatcaaggcgatatatataactctttcctagacgttgaagaaattgacgtagctgatatggctgaaggcgatgtatgtttcaatcgtgacggtaaattagtacgtcctaagcgtttaccttctggtttataccaattccgtcaaggtactggtgaagagcgttgtgtatttgatagcatcgaagcaattaaagccggcgctgaccttctttggattgaaactgcaacaccgagcgtgaaagatatcgcgggtatgatgaatgaagtacgtaaagtgattccaaatgctaagcttgtttacaacaacagcccatcatttaactggacgttaaacttccgtcaacaagcattcgacgcaatggttgaagctggtgaagatgtatctagctatgttcgtgctgacttaatgaatgaagattacgattcaagtggactagctgctaaagctgatgacaagatccgtactttccaagctgatacgtcacgtgaagccggtattttccatcacctaatcacacttcctacttatcacacaacggcattgtctgttgataacttggctaaagagtacttcggtgatgcgggtatgcttggttatgttgaaggtgtacaacgtaaagaaattcgtcaaggtatcgcctgtgttaaacatcaaaacatgtcaggctctgacatgggtgatgatcacaaagaatactttgctggtgagaacgcacttaaagcaggcggcgctaacaatacgtctaaccagttttaa

SEQ ID NO: 134202 - protein, 527 aa, Colwellia psychrerythraea 34H
MSNYQSAIEAVQAIKANAGSSWDAINPESVARMRAQNKFKTGLEIAQYTADIMRADMEAYDADSSKYTQSLGCWHGFVGQQKMISIKKHFDGKTDRRYLYLSGWMVAALRSEFGPLPDQSMHEKTSVASLVEELYTFLRQADARELGGLFRELDAANAGDKAAIQDQIDNHVTHVVPIIADIDAGFGNAEATYLMAKQMIEAGACALQIENQVADEKQCGHQDGKVTVPHADFHSKIRALRHAFLELGIDNGIIVSRTDSEGAGLTKEIAVVKEPGDQGDIYNSFLDVEEIDVADMAEGDVCFNRDGKLVRPKRLPSGLYQFRQGTGEERCVFDSIEAIKAGADLLWIETATPSVKDIAGMMNEVRKVIPNAKLVYNNSPSFNWTLNFRQQAFDAMVEAGEDVSSYVRADLMNEDYDSSGLAAKADDKIRTFQADTSREAGIFHHLITLPTYHTTALSVDNLAKEYFGDAGMLGYVEGVQRKEIRQGIACVKHQNMSGSDMGDDHKEYFAGENALKAGGANNTSNQF

SEQ ID NO: 134203 - DNA, 1299 bp, Dechloromonas aromatica RCB
  CDS (1)..(1299): transl_table=11
atgagcactcgcgaacagcaaatcgccgccctcgaaaaagactgggctgaaaacccccgctggaaaggcatcaagcgcggttattccgctgctgacgtcgtccgtctgcgtggttctttccaggtcgagcacaccttggcccgccgtggcgccgaaaagctgtgggatctggtcaacaacaccccctacgtcaactgcctgggcgccctgaccggcggtcaagccgttcagcaagccaaggctggcatcaaggccatctacctgtccggctggcaagttgctgctgacaacaacgaatacgctgccatgtacccggatcagtccctgtacccggttgactccgtgccgaaggttgtcgaacgcatcaacaactccttcaaccgcgccgacgaaatccagtggtccaagaacatcaacgctggcgatgccggtcacgtcgaataccacctgccgatcgttgctgacgctgaagccggtttcggcggcgtgctgaacgcctacgaactgatgaaggccatgatccgcgctggcgctgctggcgtgcattgggaagaccagctggcttccgtcaagaagtgcggccacatgggcggcaaggttctggttccgaccaccgaagctgttcagaagctgatcgctgcccgtatggctgccgacgtctacggcgtgccgaccctggtcatcgcccgtaccgatgccgaagctgctgacctgctgacctccgactacgacgagaacgacaagccgttcttgaccggcgagcgcaccgccgaaggcttctacaagacccgcaagggcctggatcaagccatctcccgcgccatcgcctacgctgactacgccgatctggtgtggtgcgaaaccggcacgccggatctggaatacgcccgcaagttcgccgaagccgtgcataaggttcatccgggcaagatgctggcctacaactgctcgccttccttcaactggaagaagaacctggacgacgccaccattgccaagttccagaaggaactgggcgccatgggctacaagtaccagttcatcaccctggctggcatccactccatgtggtacaacatgttcgatctggcccaggactacgccgcccgcggtatgtcggcctacgtcgagaaggttcaggagccggaattcgctgcccgcgaccgtggctacaccttcgtgtcgcaccagcaggaagtcggtaccggttacttcgacgacgtcaccaccgtgatccagggtggcaagtccagcgtcaccgcgctgaccggctcgaccgaagaagaacagttccactaa

SEQ ID NO: 134204 - protein, 432 aa, Dechloromonas aromatica RCB
MSTREQQIAALEKDWAENPRWKGIKRGYSAADVVRLRGSFQVEHTLARRGAEKLWDLVNNTPYVNCLGALTGGQAVQQAKAGIKAIYLSGWQVAADNNEYAAMYPDQSLYPVDSVPKVVERINNSFNRADEIQWSKNINAGDAGHVEYHLPIVADAEAGFGGVLNAYELMKAMIRAGAAGVHWEDQLASVKKCGHMGGKVLVPTTEAVQKLIAARMAADVYGVPTLVIARTDAEAADLLTSDYDENDKPFLTGERTAEGFYKTRKGLDQAISRAIAYADYADLVWCETGTPDLEYARKFAEAVHKVHPGKMLAYNCSPSFNWKKNLDDATIAKFQKELGAMGYKYQFITLAGIHSMWYNMFDLAQDYAARGMSAYVEKVQEPEFAARDRGYTFVSHQQEVGTGYFDDVTTVIQGGKSSVTALTGSTEEEQFH

SEQ ID NO: 134205 - DNA, 1290 bp, Thermobifida fusca YX
  CDS (1)..(1290): transl_table=11
atgagcatcaccggtcgtcagcaggaagccagcgcggctctccaaaaggagtgggagaccaacccgcgctggaagggcgtcaagcggacgtactccgctgaggatgtgatccggctgcgcggctcggtcaccgaggagcacacgctggcccgtttgggagcagaacgcctgtgggagctgctccacactgaggactacatcaacgccctcggtgcgctcaccggtaaccaggctgtccagcaggtccgcgccggcctgaaggccatctacctctccggatggcaggtcgcagccgacgccaacctgtccgggcacacctaccccgaccagagcctctacccggccaactcggttccgcaggtggtgcggcggatcaacaacgcgctgctgcgcgcagaccagatctcctggtcggagggtgacgaggacgccccgtactggctggcgccgatcgtcgccgacgcggaggccggattcggcggtgtcctcaacgcctacgagctgatgaaggccatgatcgccgcgggtgcggctggcgtgcactgggaagaccagctcgcctccgagaagaagtgcggccacctgggcggcaaggtcctcatcccgaccggccagcacatcaagaccctcaacgcggcgcggctggctgccgacgtggccggggtgccttcgctgatcattgcgcggaccgacgcgcaggctgccaccctgatcacgagcgacatcgacgagcgcgaccggcctttcatcaccggcgaacgcactccggagggcttctaccgggtccgcaacggcctggaagcgtgcatcgcccgcggcctggcgtacgctccctacgccgacctgctgtggatggagacctccacgccggacctggaggtggctcgccagttcgccgaagcgatcaaggacaagtaccccgaccagttgctggcctacaactgctcgccgtcgttcaactggaagcgtcacctcgacgacgcgaccatcgccaagttccagcgcgagctgggccacatgggctacaagttccagttcatcaccctggcgggcttccactcgctcaactactcgatgttcaacctggccaaggggtacgcggctcggggcatgagcgcctacgtggagctgcaggaggcggagttcgctgccgaggccgacggctacaccgcgacccggcaccagcgcgaggtcggcaccggctacttcgacctgatcagcaccacgatctcgccggacgcttccacgacggctctgaccggatccaccgaagaggagcagttcaactaa

SEQ ID NO: 134206 - protein, 429 aa, Thermobifida fusca YX
MSITGRQQEASAALQKEWETNPRWKGVKRTYSAEDVIRLRGSVTEEHTLARLGAERLWELLHTEDYINALGALTGNQAVQQVRAGLKAIYLSGWQVAADANLSGHTYPDQSLYPANSVPQVVRRINNALLRADQISWSEGDEDAPYWLAPIVADAEAGFGGVLNAYELMKAMIAAGAAGVHWEDQLASEKKCGHLGGKVLIPTGQHIKTLNAARLAADVAGVPSLIIARTDAQAATLITSDIDERDRPFITGERTPEGFYRVRNGLEACIARGLAYAPYADLLWMETSTPDLEVARQFAEAIKDKYPDQLLAYNCSPSFNWKRHLDDATIAKFQRELGHMGYKFQFITLAGFHSLNYSMFNLAKGYAARGMSAYVELQEAEFAAEADGYTATRHQREVGTGYFDLISTTISPDASTTALTGSTEEEQFN

SEQ ID NO: 134207 - DNA, 1587 bp, Ralstonia eutropha JMP134
  CDS (1)..(1587): transl_table=11
atggctcagtatcaagacgacatcaaggcagttgctggtttgaaggagaaacacggcagcgcgtgggacgccatcaatcccgagtacgccgctcgcatgcgggcccagaaccggttcaagacgggcctggatatcgccaagtacactgccaagatcatgcgcgccgacatggccgcctatgatgccgatccgtcgaagtacacccagtcgctcggctgctggcacggcttcatcggccagcagaagatgatctccatcaagaagcacttcaacaacaacaccgaccgccgctacctgtatctgtcgggctggatggtcgccgcactgcgctcggagttcggcccgctgccggaccagtcgatgcacgagaagacctcggtcagcgccctgatccgcgagctgtacaccttcctgcgccaggccgacgcccgtgaactgggcggcctgttccgcgaactggacgccgccaaggacgccaccgccaaggctgccatccagtcgaagatcgacaaccacgtcacccacgtggtgcccatcatcgctgacatcgacgcgggcttcggcaacgccgaggccacctacctgctggccaaacagttcatcgaagccggcgcctgctgcatccagatcgaaaaccaggtgtccgacgagaagcagtgcggccaccaggacggcaaggtcaccgtgccgcacgaagacttcctggccaaggttcgcgcagtccgctacgccttcctggaactgggcgtggacgacggcatcatcgtgacgcgcaccgactcgctgggcgccggcctgaccaagcagatcgccgtgacccacacgccgggcgacctgggcgaccagtacaactcgttcctcgactgcgacgaagtctcggccgacacgctgggcaacggtgacatcgtcatcaagcagaacggcaagctgatgcgcccgaagcgcctgccgagcaacctgttccagttccgcgccggtacgggtgaggcacgctgcgtgctggattgcatcacctcgctgcagaacggcgccgatctgctgtggatcgaaaccgaaaagccgcatatcgcccagatcgccggcatggtcaacgagatccgcaaggtcatcccgaacgccaagctggtgtacaacaacagcccgtcgttcaactggaccctgaacttccgtcagcaagcgtatgacgccatgaaggcagcaggcaaggatgtatcggcctacgagcgtgcccagctgatgagcgtggaatacgacgacaccgaactggccaagatcgccgacgagaagatccgcaccttccaggccgacgcatcgcgtgaagccggtatcttccaccacctgatcacgctgccgacgtaccacaccgccgcgctgtcgaccgacaacctggccaaggaatacttcggcgaccagggcatgctcggttatgtggctggcgtgcagcgcaaggaaatccgtcagggcatcgcctgcgtcaagcaccagaacatgtcgggctcggacatcggcgacgaccacaaggaatacttcagcggcgaagcggccctgaaggcagcgggtaaagacaacacgatgaaccagttctga

SEQ ID NO: 134208 - protein, 528 aa, Ralstonia eutropha JMP134
MAQYQDDIKAVAGLKEKHGSAWDAINPEYAARMRAQNRFKTGLDIAKYTAKIMRADMAAYDADPSKYTQSLGCWHGFIGQQKMISIKKHFNNNTDRRYLYLSGWMVAALRSEFGPLPDQSMHEKTSVSALIRELYTFLRQADARELGGLFRELDAAKDATAKAAIQSKIDNHVTHVVPIIADIDAGFGNAEATYLLAKQFIEAGACCIQIENQVSDEKQCGHQDGKVTVPHEDFLAKVRAVRYAFLELGVDDGIIVTRTDSLGAGLTKQIAVTHTPGDLGDQYNSFLDCDEVSADTLGNGDIVIKQNGKLMRPKRLPSNLFQFRAGTGEARCVLDCITSLQNGADLLWIETEKPHIAQIAGMVNEIRKVIPNAKLVYNNSPSFNWTLNFRQQAYDAMKAAGKDVSAYERAQLMSVEYDDTELAKIADEKIRTFQADASREAGIFHHLITLPTYHTAALSTDNLAKEYFGDQGMLGYVAGVQRKEIRQGIACVKHQNMSGSDIGDDHKEYFSGEAALKAAGKDNTMNQF

SEQ ID NO: 134209 - DNA, 1584 bp, Burkholderia sp. 383
  CDS (1)..(1584): transl_table=11
atggcccagtatcaagacgacatcaaggcagttgccggtttgaaagaaaaccacggcagcgcgtggaatgcgatcagccccgagtacgctgcccgcatgcgtgcccagaacaagttcaagacgggcctggacatcgccaagtacaccgcgaagatcatgcgcgccgacatggccgcctacgacgccgacccggccaagtacacgcagtcgctgggttgctggcacggcttcatcggccagcagaagatgatctccatcaagaagcacttcaacagcaccgaacgccgctacctgtacctgtccggctggatggtcgctgcgctgcgttccgagttcggcccgctgccggaccagtcgatgcacgaaaagacctcggtcagcgcgctgatccgcgagctgtacacgttcctgcgccaggccgacgcccgtgaactgggcggcctgttccgcgagctcgacgccgccaaggacgccacggcgaaggcagcaatccaggacaagatcgacaaccacgtcacgcacgtcgtgccgatcatcgccgacatcgacgccggtttcggcaacgcggaagccacgtacctgctggccaagcaattcatcgaagcaggcgcatgctgcatccagatcgaaaaccaggtgtccgacgagaagcagtgcggccaccaggacggcaaggtcaccgtgccgcacgaggacttcctcgcgaagatccgcgcgatccgctacgcgttcctggaactgggcgtggacgacggcatcatcgtggcccgtaccgactcgctcggcgccggcctgaccaagcagatcgccgtgaccagcacgccgggcgacctgggcgaccagtacaacgcgttcctcgattgcgaagaactgtcggccgaccaactgggcaacggtgacgtcgtcatcaagcgcgacggcaagctgctgcgtccgaagcgcctgccgagcaacctgttccagttccgcgccggcacgggcgaagcgcgctgcgtgctcgactgcatcacgtcgctgcagaacggcgccgacctgctgtggatcgaaaccgaaaaaccgcacatcgcacagatcggcggcatggtcagcgagatccgcaaggtcatcccgaacgcgaagctggtgtacaacaacagcccgtcgttcaactggacgctgaacttccgtcagcaggcgtacgacgcgctgaaggccgagggcaaggacgtgtcggcctacgaccgtgcgcagctgatgagcgtggaatacgacgagacggaactggccaagctggccgacgagaagatccgtacgttccaggccgacgcagcgcgtgaagcaggcatcttccatcacctgatcacgctgccgacgtaccacaccgccgcgctgtcgaccgacaacctggccaaggaatacttcggcgaccagggcatgctgggctacgtggccggcgtgcagcgcaaggaaatccgccagggtatcgcctgcgtgaagcaccagaacatgtccggttcggacatcggtgacgatcacaaggaatacttcagcggcgacgcagcgctgaaggcagcaggcaaggacaacacgatgaaccagttctga

SEQ ID NO: 134210 - protein, 527 aa, Burkholderia sp. 383
MAQYQDDIKAVAGLKENHGSAWNAISPEYAARMRAQNKFKTGLDIAKYTAKIMRADMAAYDADPAKYTQSLGCWHGFIGQQKMISIKKHFNSTERRYLYLSGWMVAALRSEFGPLPDQSMHEKTSVSALIRELYTFLRQADARELGGLFRELDAAKDATAKAAIQDKIDNHVTHVVPIIADIDAGFGNAEATYLLAKQFIEAGACCIQIENQVSDEKQCGHQDGKVTVPHEDFLAKIRAIRYAFLELGVDDGIIVARTDSLGAGLTKQIAVTSTPGDLGDQYNAFLDCEELSADQLGNGDVVIKRDGKLLRPKRLPSNLFQFRAGTGEARCVLDCITSLQNGADLLWIETEKPHIAQIGGMVSEIRKVIPNAKLVYNNSPSFNWTLNFRQQAYDALKAEGKDVSAYDRAQLMSVEYDETELAKLADEKIRTFQADAAREAGIFHHLITLPTYHTAALSTDNLAKEYFGDQGMLGYVAGVQRKEIRQGIACVKHQNMSGSDIGDDHKEYFSGDAALKAAGKDNTMNQF

SEQ ID NO: 134211 - DNA, 1596 bp, Novosphingobium aromaticivorans DSM 12444
  CDS (1)..(1596): transl_table=11
atgacctaccacagcaagatcgtcgaggccggcaaggccatcgcgcctttcagccagacctgggacggcatcgagcccgagagcgtggcccgcatgcgcctgcagaaccgcttccacaccggcctcgacatcgcgcgctacaccgcgaagatcatgcgtgccgacatggctgcttacgatgccgacccggcgaactacacccagtcgctcggctgctggcacggtttcatcggccagcagaagatgatctccatcaagaagcacttcggcacgaccaaggggcgctacctctacctttcgggctggatggtcgcagcgctgcgcagcgaattcggtccgctgcccgaccagtcgatgcacgagaagaccagcgttcccgcgctgatcgaggaactctacaccttcctcaagcaggctgacgcccgcgaactcggcatgctgttccgcgatctcgatgccgccaaggctgccggcgatgcggtcaacacccaccgcctgctgcacaagatcgacgagttcgaaacgcacgtggttccgatcatcgcagacatcgacgcaggttttggcaatgccgaggcgacctacctgctcgccaagaagttcatcgaagcgggcgcctgctgcatccagatcgagaaccaggtctcggacgaaaagcagtgcggccaccaggacggcaaggtcaccgttccgcacgaggacttcctcgcgaagatccgcgcggtccgttacgccttcatggaactgggcgtcgatgacggcgtgatcgttgcccgcaccgactcgctgggcgctggcctgaccaagcagatcgcctttgtgaaggagccgggtgacatcggcgaccagtacaacagcttcctcgattgcgaggaagtcgatgcggccaaccttggccatggcgatgtgctgatcagccgcgacggcaagctgatgcgtcccaggcgcctgccttcgaacctgtaccagttccgtgccgggacgggcgaagaccgctgcgtgctcgattgcatcacctcgctccagaacggcgcggacctgctgtggatcgaaaccgaaaagccgcacatcggccagatcggcggcatggtcgaccgcatccgcgaagtgatcccgaatgccaagctggtctacaacaacagcccctcgttcaactggacgctcaacttccgccagcaggtcttcgatgcctggcaagccgaaggccgcgacacgagcgcctacgaccgtgccaagctgatgagcgtggactatgacggcaccgaactgggcgtggaagccgacgagcgcatccgcaccttccagcgcgatgctgcggctcaggccggtatcttccaccacctgatcacgctgccgacctaccacaccgcggcgctcagcacggacaacctcgccaagcgctacttcggcgaagagggcatgctcggctacgtcaagcaggtccagcgcgaggaaatccgccagggcatcgcttgcgtgaagcaccagaacatggccggctccgacatcggcgacgatcacaaggaatacttcgccggtgaggccgcgctcaaggcgggcggcgcccacaacacgatgaaccagttcgccgcctga

SEQ ID NO: 134212 - protein, 531 aa, Novosphingobium aromaticivorans DSM 12444
MTYHSKIVEAGKAIAPFSQTWDGIEPESVARMRLQNRFHTGLDIARYTAKIMRADMAAYDADPANYTQSLGCWHGFIGQQKMISIKKHFGTTKGRYLYLSGWMVAALRSEFGPLPDQSMHEKTSVPALIEELYTFLKQADARELGMLFRDLDAAKAAGDAVNTHRLLHKIDEFETHVVPIIADIDAGFGNAEATYLLAKKFIEAGACCIQIENQVSDEKQCGHQDGKVTVPHEDFLAKIRAVRYAFMELGVDDGVIVARTDSLGAGLTKQIAFVKEPGDIGDQYNSFLDCEEVDAANLGHGDVLISRDGKLMRPRRLPSNLYQFRAGTGEDRCVLDCITSLQNGADLLWIETEKPHIGQIGGMVDRIREVIPNAKLVYNNSPSFNWTLNFRQQVFDAWQAEGRDTSAYDRAKLMSVDYDGTELGVEADERIRTFQRDAAAQAGIFHHLITLPTYHTAALSTDNLAKRYFGEEGMLGYVKQVQREEIRQGIACVKHQNMAGSDIGDDHKEYFAGEAALKAGGAHNTMNQFAA

SEQ ID NO: 134213 - DNA, 1305 bp, Burkholderia xenovorans LB400
  CDS (1)..(1305): transl_table=11
atgtcccgtcaggaacaagccaaacaacttcagcagcaatgggaaacggatccgcgctggaaaggcgtgaagcgcagctacacggcggaagacgtgatccgcctgcgcggttcggtgcaggtcgagcacacgctcgccaagcgcggcgcgcaaaagctgtgggaaagcgtgaacaacgagccgttcgtcaactcgctcggcgcgctgaccggcaaccaggccatgcaacaggtcaaggccggcctcaaggcgatctatctgtccggctggcaagtcgcgggcgacgcgaacgtggccggggaaatgtatccggaccagtcgctgtatccggcgaactcggtgccgctcgtcgtcaagcgcatcaacaacacgctgacgcgtgccgaccagatccagtggtcggaaggcaagaacccgggcgacgaaggctatatcgactacttcgcgccgatcgtggcggatgcggaagcgggcttcggcggcgtgctgaacgcgttcgaactgatgaaggcgatgatcgaagcgggcgctgccggcgtgcacttcgaagaccagctcgcctccgtcaagaagtgcggccacatgggcggcaaggtgctcgtgccgacccgcgaaaacatcgccaagctgaccgccgcgcgtctggccgccgacgtctcgggcgtgccgaccgtgctgctggcgcgtaccgatgcggaagccgccgacctgatcacctcggacatcgacgaaaacgacaagccgttcctgaccggcgagcgcacggtggaaggcttctaccgcacgaagccgggtctcgaacaggcaatctcgcgtggcctcgcctacgcgccgtacgccgacatgatctggtgcgaaaccggcaagccggacctcgagttcgcgaagaaattcgccgacgcgatccacaaggaatacccggatcaactgctgtcgtacaactgctcgccgtcgttcaactggaagaagaacctggacgacgcaacgatcgccaagttccagcgcgaactcggcgcgatgggctacaagttccagttcatcacgctggccggcttccacgcgctgaactactcgatgttcaacctcgcgcacggctatgcccgcaaccagatgaccgccttcgtcgaaatgcagcaggctgaattcgctgcggccgaaaagggcttcaccgcagtcaagcaccagcgcgaagtcggcaccggctacttcgatgccgtgacgcaaacggtcgaacgcgaagcatcgacgaccgcgctgcacggctcgacggaagacgaacagttcttcgacaagcgggtcgcgtaa

SEQ ID NO: 134214 - protein, 434 aa, Burkholderia xenovorans LB400
MSRQEQAKQLQQQWETDPRWKGVKRSYTAEDVIRLRGSVQVEHTLAKRGAQKLWESVNNEPFVNSLGALTGNQAMQQVKAGLKAIYLSGWQVAGDANVAGEMYPDQSLYPANSVPLVVKRINNTLTRADQIQWSEGKNPGDEGYIDYFAPIVADAEAGFGGVLNAFELMKAMIEAGAAGVHFEDQLASVKKCGHMGGKVLVPTRENIAKLTAARLAADVSGVPTVLLARTDAEAADLITSDIDENDKPFLTGERTVEGFYRTKPGLEQAISRGLAYAPYADMIWCETGKPDLEFAKKFADAIHKEYPDQLLSYNCSPSFNWKKNLDDATIAKFQRELGAMGYKFQFITLAGFHALNYSMFNLAHGYARNQMTAFVEMQQAEFAAAEKGFTAVKHQREVGTGYFDAVTQTVEREASTTALHGSTEDEQFFDKRVA

SEQ ID NO: 134215 - DNA, 1296 bp, Ralstonia metallidurans CH34
  CDS (1)..(1296): transl_table=11
atgacgtcgcgccaacaacagattgaagccctgcagaaggattgggacaccaatccacgctggaagggtgtgaagcgcaacttcaccgccgaagatgtggttcgtctgcgcggctcggtccagatcgagcacacgctggcccgccgcggcgcggaaaaactctggcacctgctgaacaccgagccgttcgtcaacacgctcggcgcgctgacgggcaatcaggccatgcagcaggtcaaggccggtctgaaggccatctacctgtcgggctggcaagtcgctggcgacgccaatctggccggcgaaatgtaccccgaccagtcgctgtacccggccaactcggtgccaatggtcgtgaagcgcatcaacaacacgttccagcgtgccgaccagatccagtggagcgaaggcaagggcgacatcgactacttcgcaccgatcgtggctgacgcggaagccggttttggtggcgtgctgaatgccttcgaactgatgaagtcgatgatcgacgcgggcgctgccggcgttcacttcgaagaccagctcgcttcggtgaagaagtgcgggcacatgggtggcaaggtgctggtgccgacccgcgaggctgtcgccaagctgaccgcagcgcgtctcgccgccgacgtctcgggcgtgccgaccctggtgatcgcccggaccgacgcggaagccgctgaccttgtgacttccgacgtggacgagcgcgaccagccgtttctgaccggcgagcgtaccgtggagggtttcttccgttcgaagcccggcatcgagcagtcgatcgcccgtgccctggcctatgccgaggtggctgaccttgtgtggtgcgaaaccggcaagccggacctcgagttcgccaagcgcttcgcacaagccgtgcacgcgaagttcccgggcaagctgttggcctacaactgctcgccatcgttcaactggaagaagaacctcgacgacgcaacgatcgccaagttccagaaggaactcggcgcgatgggctacaagttccagttcatcacgttggcgggcttccattcgctgaactactcgatgttcaacctggcccacggctacgcccgcaaccagatgtcggcattcgtggagttgcaggaagcggaattcgccgccgcggagaagggctttaccgctgtgaagcaccagcgcgaagtgggtacgggctacttcgacgccgtgacgcagaccatcgaaggcggccagtcgtcgacgacggcgctcaagggatcgaccgaagacgaacagttctttgaaaagaaggtggcctga

SEQ ID NO: 134216 - protein, 431 aa, Ralstonia metallidurans CH34
MTSRQQQIEALQKDWDTNPRWKGVKRNFTAEDVVRLRGSVQIEHTLARRGAEKLWHLLNTEPFVNTLGALTGNQAMQQVKAGLKAIYLSGWQVAGDANLAGEMYPDQSLYPANSVPMVVKRINNTFQRADQIQWSEGKGDIDYFAPIVADAEAGFGGVLNAFELMKSMIDAGAAGVHFEDQLASVKKCGHMGGKVLVPTREAVAKLTAARLAADVSGVPTLVIARTDAEAADLVTSDVDERDQPFLTGERTVEGFFRSKPGIEQSIARALAYAEVADLVWCETGKPDLEFAKRFAQAVHAKFPGKLLAYNCSPSFNWKKNLDDATIAKFQKELGAMGYKFQFITLAGFHSLNYSMFNLAHGYARNQMSAFVELQEAEFAAAEKGFTAVKHQREVGTGYFDAVTQTIEGGQSSTTALKGSTEDEQFFEKKVA

SEQ ID NO: 134217 - DNA, 1581 bp, Ralstonia metallidurans CH34
  CDS (1)..(1581): transl_table=11
atggctcagtatcaagacgacatcaaggcagttgctggtttgaaagagcaacacggcagcgcgtggaatgccatcaaccccgagtatgccgctcgcatgcgtgcccagaacaagttcaagacgggtctggacatcgccaagtacaccgccaagatcatgcgcgccgacatggccgcctatgatgcgaatccttccaagtacacccagtcgctcggttgctggcacggtttcatcggccagcagaagatgatttccatcaagaagcacttcaagagcaccgagcgtcgctacctctacctgtcgggctggatggtcgctgcgctgcgctccgagttcggcccgctgccggaccagtcgatgcacgaaaagacctcggtcagcgcgctgatccgcgagctgtacacgttcctgcgccaggctgacgcacgggaactgggcggcctgttccgcgaactggatgccgccaccggtgccgccaaagccgccatccaggaaaagatcgacaaccacgtcacccacgtggtgcccatcatcgccgacatcgacgctggtttcggcaatgccgaggcgacgtacctgctggccaagcagttcatcgaagccggtgcatgctgcatccagatcgagaaccaggtgtccgacgagaagcagtgcggccaccaggatggcaaggtcaccgtgccgcacgaggacttcctggccaagatccgcgcgatccgctacgccttcctcgaactgggcgtggacgacggcgtcattgtggcccgtaccgattcgctgggcgcaggcctgaccaagcagatcgccgtgaccgccaccccgggcgacctgggcgaccagtacaactcgttcctggattgcgaggaactgtcggctgaccaactgggcaacggtgatgtcatcatcaagcgcgacggcaagctgctgcgtccgaagcgtctgccgagcaacctgttccagttccgtgccggcacgggcgaagcacgttgcgtcctggattgcgtcaccgcgctgcaaaacggcgccgacctgctgtggatcgaaaccgaaaagccgcatatcgcccagatcggtggcatggtcagcgaaatccgcaaggtcatcccgaacgccaagctggtgtacaacaacagcccgtcgttcaactggaccctgaacttccgccagcaggcctacgacgcgatgaaggccgcgggcaaggacgtgtcggcatacgagcgcacccagctgatgagcgtggaatacgacgacagcgaactcgccaagatcgctgacgagaagatccgcacgttccaggccgatgcatcgcgtgaagccggtatcttccaccacctgatcacgctgccgacgtaccacaccgccgcgctgtcgaccgacaacctggccaaggaatacttcggcgaccagggcatgctgggctacgtggccggcgtgcagcgcaaggaaatccgtcagggcatcgcctgcgtcaagcaccagaacatgtccggctcggacatcggtgacgaccacaaggaatacttcagcggcgaagctgccctgaaggcggctggcaaggacaacacgatgaaccagttctga

SEQ ID NO: 134218 - protein, 526 aa, Ralstonia metallidurans CH34
MAQYQDDIKAVAGLKEQHGSAWNAINPEYAARMRAQNKFKTGLDIAKYTAKIMRADMAAYDANPSKYTQSLGCWHGFIGQQKMISIKKHFKSTERRYLYLSGWMVAALRSEFGPLPDQSMHEKTSVSALIRELYTFLRQADARELGGLFRELDAATGAAKAAIQEKIDNHVTHVVPIIADIDAGFGNAEATYLLAKQFIEAGACCIQIENQVSDEKQCGHQDGKVTVPHEDFLAKIRAIRYAFLELGVDDGVIVARTDSLGAGLTKQIAVTATPGDLGDQYNSFLDCEELSADQLGNGDVIIKRDGKLLRPKRLPSNLFQFRAGTGEARCVLDCVTALQNGADLLWIETEKPHIAQIGGMVSEIRKVIPNAKLVYNNSPSFNWTLNFRQQAYDAMKAAGKDVSAYERTQLMSVEYDDSELAKIADEKIRTFQADASREAGIFHHLITLPTYHTAALSTDNLAKEYFGDQGMLGYVAGVQRKEIRQGIACVKHQNMSGSDIGDDHKEYFSGEAALKAAGKDNTMNQF

SEQ ID NO: 134219 - DNA, 1317 bp, Acidobacteria bacterium Ellin345
  CDS (1)..(1317): transl_table=11
atggcaacggagaacccgactgcccagcttcgccttgactgggagaccaacccacgctggaagggcatcacccggccttacaccgcagaagacgttgcgcgattgcgcggcaccattcgcattgaccacacgctggcgcgcctcggcgcagagcggctgtggaagctgcttcaagaagacaaatacacccaggcgctcggtgcattgaccggcaaccaggcggtgcagatggtcaaagccggattgaaagcgatctacgtctcgggctggcaagtggcgggcgacgccaatgacgcgggccaaatgtatcccgaccaaagcttgtatccggcagatagcgttccgaaccttgtgcgccgattgaacaacgcactgttgcgcgccgatcagatccatcactccgaggggaagaatggaatgtatttcctcgcgccgatgatcgccgatgccgaagccggcttcggcggcaacctcaacgccttcgagttgatgaaagcgatgatcgagtcgggagcagcctgcgttcacttcgaggaccaactgtcttcggcgaagaagtgcgggcacctcggcggcaaagttctggtaccgaccggcgaagcgatccagaagctggtcgcagctcgcttggcagccgacatctgcggcgtgccgacgctgatcctggcgcgtaccgatgcgaacagcgcccatctgctcaccagcgacatcgatccctacgatcgcgagttctgcaccggcgagcgcaccagcgaaggcttcttctgcattcgcggcgggttggattccgccatcgcgcgcggcttggcctacgcaccgtatgcggacctgatctggtgcgaaacttcggaacccaacatcggcgaggcgcagcgcttcgcggaggcgatccatgcgaagtttccgggaaagatgcttgcttacaactgctctccgtcgttcaactggaagaagaaattgtcggaggaagacatcgcgcgcttccagccggcgctcgcggaaatgggttacaagttccagttcattaccctggcggggttccatgcgctgaacctcagcatgtacgagttggccacgggttatcgtcagagcggcatgacggcctattccgccctgcagcagcgggaattccaactggagcccgagggttacgaagcggcgaaacaccagcgcttcgtaggcaccggctacttcgaccaggtgcagaacgtggtcaccagcggcaaggcctcgacccgggccctcgaacactccacggaagccgaacagttccacgctagcgaaacgcccgaaaagagcggcgtggcggccgactag

SEQ ID NO: 134220 - protein, 438 aa, Acidobacteria bacterium Ellin345
MATENPTAQLRLDWETNPRWKGITRPYTAEDVARLRGTIRIDHTLARLGAERLWKLLQEDKYTQALGALTGNQAVQMVKAGLKAIYVSGWQVAGDANDAGQMYPDQSLYPADSVPNLVRRLNNALLRADQIHHSEGKNGMYFLAPMIADAEAGFGGNLNAFELMKAMIESGAACVHFEDQLSSAKKCGHLGGKVLVPTGEAIQKLVAARLAADICGVPTLILARTDANSAHLLTSDIDPYDREFCTGERTSEGFFCIRGGLDSAIARGLAYAPYADLIWCETSEPNIGEAQRFAEAIHAKFPGKMLAYNCSPSFNWKKKLSEEDIARFQPALAEMGYKFQFITLAGFHALNLSMYELATGYRQSGMTAYSALQQREFQLEPEGYEAAKHQRFVGTGYFDQVQNVVTSGKASTRALEHSTEAEQFHASETPEKSGVAAD

SEQ ID NO: 134221 - DNA, 1596 bp, Alkalilimnicola ehrlichei MLHE-1
  CDS (1)..(1596): transl_table=11
atgtcacagtacaggaacgacatcgaggaagttgccggcctgcgccaggcgcatgaaggcacctgggacgcgatcaaccccgaatacgtggcccgcatgcgcgcccagaaccggttcaagaccggtctggacatcgccaagtacaccgccaagatcatgcgccaggacatggccgagtacgatgccgatccggcccagtacacccagtccttggggtgctggcacggcttcgtcggccagcagaagatgatcgccatcaagcgtcacttcggcaccaccaacaagcgctacctctacctctccggctggatggttgcggcgctgcgctccgagttcggcccgctgccggaccagtccatgcacgagaagaccgccgtgccggcgctgatcgaggaactctacaccttcctccgccaggccgacgcccgtgagatgaaccacctcttccgtgagctggatgcggcccgcgaggccggcgatgaggccaaggccaacgagattctcgacaagatcgagaacttcgagacccacatcgtgccgatcatcgccgacatcgacgccggcttcggtaacgaagaggccacctacctgctggccaagaagatgatcgaggcgggtgcctgctgcatccagatcgagaaccaggtcgccgacgagaagcagtgcggccaccaggacggcaaggtcaccgtgccccacgccgacttcctggccaaggtccgcgccgtgcgctatgcgttcctggagctgggcgtgaacgacggcgtgatcgttgcccgcaccgactccctcggcgccggcctgaccaagcagatcgccgtcaccgatgagccgggcgacctgggcgacaagtacaacagcttcctggacggcgattacatcgacagcgccgaggacatcaacaatggcgatgtggtggtcaagtccgaaggcaagctgctcaagcccaagcgcctcgccagcggcctctacgagttccgcaagggcaccggctttgaccgcgtggtgctggactgcatcaccagcctgaagaacggcgccgacctgctgtggatcgagaccgagaagccccacgtcggccagatcgccgagatggtcaacgccatccgcgaggaagtgccgaacgccaagctggtctacaacaacagcccgtccttcaactggacgctgaacttccgccagcaggtgttcgatgcctggaaggaagagggcaaggacgtctcccagtacgaccgcgacaacctgatgagcgccgagtacgacgacagcgagctggcggcggaagccgaccgctgggtgcaggagttccagcgcaaggcctccgcagaggcgggtatcttccaccacctgatcaccctgccgacctaccacacggccgccctgtccaccgacaacctggccaagggctacttcggtgacctgggcatgctggcctacgtggatggcgtgcagcgtcaggagatccgccagggcgtgcccaccgtgaagcaccaggacatggccggctccaacatcggggacgaccacaaggcctacttctccggtgaggccgcgctcaaggccggcgggaagggcaacaccatgaaccagttctaa

SEQ ID NO: 134222 - protein, 531 aa, Alkalilimnicola ehrlichei MLHE-1
MSQYRNDIEEVAGLRQAHEGTWDAINPEYVARMRAQNRFKTGLDIAKYTAKIMRQDMAEYDADPAQYTQSLGCWHGFVGQQKMIAIKRHFGTTNKRYLYLSGWMVAALRSEFGPLPDQSMHEKTAVPALIEELYTFLRQADAREMNHLFRELDAAREAGDEAKANEILDKIENFETHIVPIIADIDAGFGNEEATYLLAKKMIEAGACCIQIENQVADEKQCGHQDGKVTVPHADFLAKVRAVRYAFLELGVNDGVIVARTDSLGAGLTKQIAVTDEPGDLGDKYNSFLDGDYIDSAEDINNGDVVVKSEGKLLKPKRLASGLYEFRKGTGFDRVVLDCITSLKNGADLLWIETEKPHVGQIAEMVNAIREEVPNAKLVYNNSPSFNWTLNFRQQVFDAWKEEGKDVSQYDRDNLMSAEYDDSELAAEADRWVQEFQRKASAEAGIFHHLITLPTYHTAALSTDNLAKGYFGDLGMLAYVDGVQRQEIRQGVPTVKHQDMAGSNIGDDHKAYFSGEAALKAGGKGNTMNQF

SEQ ID NO: 134223 - DNA, 1623 bp, Hyphomonas neptunium ATCC 15444
  CDS (1)..(1623): transl_table=11
atgtccaaacgccctacctatgccgagctgcgcgcccaggtccagaaacgttaccccaccggccaggcgcctggcggcgtgacagtggacgacatcgtccagctgaagatgcagaacacctacaacacccatctcgacatcgcccgcgagatggccgtcgtgatgcgcgccgatatggccgcttatgaccaggatcactcgaagttcacccagtcgcttggctgctggtcgggcttccatgcgcagcagatgataaaggctgtcaagcgcatgaagggcaccgccaagggcacctatgtgtacctttccggctggatggtcgctggcctgcgtaaccgtttcggccacctgccggaccagtcgatgcatgagaaaacttcggtcgcagacctgatcgaggaaatctacgtctccctgcgccaggctgatgaggtcgccctcaacgatctcttccgtgagctgaaagctgcccgtgaaaaaggcgcgccggccgatgtgatcgaaaccatcatccagcgtatcgacacgttcgaatcgcatgtcgtgccgatcatcgccgacatcgatgccggcttcggcaacgagcacgccacctatctgctcgccaaggagctgatcaaggcgggcgcctgctgcatccagatcgaaaatcaggtgtcggacgcaaaacagtgcggccaccaggatggcaaggtcaccgtgccgcgcgaagacttcatcgagaagctgcgcgcctgccgtctggcctttgaagaactcggcgtggatgacggcgtcatcgtcgcccgcacagacagccttggcgctggcctgacgcagaaagtcccggtctcccagcatgcgggcgatctcgcctcggaatacactaaatggctggaagtcgaagaaatcacgcccgccaatccgctgaaagagggcgatctcgcgcttcagcagaacggccgcctcgtgaaacccgttcgcctcgccaacggcctcttcaagttccaggaaaacaccggcgctgaccgcgtcgtggaagactgtatcgccaacctgacgctcggcggcgcagacctcctctggatcgaaaccgacacgccagacgtggacatcatcgcgggcctggtaaaccgcgtgaaggaagcagttccagatgcgaagctcacctacaacaactcaccgtcgttcaactggacgctcaacctgcgcaaacaggtccgcaaggcctgggccgcagaaggcaagattgccgagggcgagtatccggaagcagagctgatgtcggccaagtttgacgacaccccactcggccaggaagccgatgcgcgcctcaagcgcttccagtatgacatctccgaccgcgccggcgtgttccataacctgatcacgctgccgaccttccacatgacggccttcgccaccgaccagctctctcgcggctatttcggggaagacaagatggccgcctatgtcaaaaccattcagcgccaggaaatccgcaacaacgtttcggctgtcaaacaccagcacgaagtcggctcggaccttggcgacacgttcaaggaaatggttgccggtgagcgcgccctgaaagccagcggcgagcacaacacgatgaaccagttcgagaacgtcgtctga

SEQ ID NO: 134224 - protein, 540 aa, Hyphomonas neptunium ATCC 15444
MSKRPTYAELRAQVQKRYPTGQAPGGVTVDDIVQLKMQNTYNTHLDIAREMAVVMRADMAAYDQDHSKFTQSLGCWSGFHAQQMIKAVKRMKGTAKGTYVYLSGWMVAGLRNRFGHLPDQSMHEKTSVADLIEEIYVSLRQADEVALNDLFRELKAAREKGAPADVIETIIQRIDTFESHVVPIIADIDAGFGNEHATYLLAKELIKAGACCIQIENQVSDAKQCGHQDGKVTVPREDFIEKLRACRLAFEELGVDDGVIVARTDSLGAGLTQKVPVSQHAGDLASEYTKWLEVEEITPANPLKEGDLALQQNGRLVKPVRLANGLFKFQENTGADRVVEDCIANLTLGGADLLWIETDTPDVDIIAGLVNRVKEAVPDAKLTYNNSPSFNWTLNLRKQVRKAWAAEGKIAEGEYPEAELMSAKFDDTPLGQEADARLKRFQYDISDRAGVFHNLITLPTFHMTAFATDQLSRGYFGEDKMAAYVKTIQRQEIRNNVSAVKHQHEVGSDLGDTFKEMVAGERALKASGEHNTMNQFENVV

SEQ ID NO: 134225 - DNA, 1596 bp, Pseudomonas aeruginosa UCBPP-PA14
  CDS (1)..(1596): transl_table=11
atgtccgcatatcagaacgagatcaaggcagttgccgcgctgaaagagaagaacggcagcagctggagcgcgatcaaccccgagtacgcagctcgcatgcgtatccagaaccgcttcaagaccggcctggatatcgccaagtacaccgcggccatcatgcgcaaggacatggccgaatacgatgcggactcttccgtctacacccagtcgctgggttgctggcacggcttcatcgggcagcagaagctgatctcgatcaagaagcacctgaagaccaccaacaagcgctacctctacctgtccggttggatggtcgccgcgctgcgctccgacttcggcccgctgccggaccagtccatgcacgagaaaaccgcggtttccggcctgatcgaagagctgtacaccttcctgcgccaggctgacgcccgcgagttggacctgctgttcaccggcctggacgctgcccgcgccgctggcgacaaggccaaggaagccgagctgctggcccagatcgacaacttcgaaacccacgtggtgccgatcatcgccgacatcgacgccggcttcggcaacgccgaggcgacctacctgctggccaagaagatgatcgaagccggcgcctgctgcatccagatcgaaaaccaggtgtccgacgagaagcagtgcggccaccaggacggcaaggtcaccgttccgcacatcgacttcctcgccaagatcaatgccgtacgctacgccttcctcgagctgggcgtggacgatggcgtgatcgtcgcccgtaccgactccctgggcgccggcctgaccaagcagatcgccgtgaccaacgagccgggcgacctgggcgacctgtacaactccttcctggattgcgaagagatctccgaggccgagctgggcaacggcgacgtcgtgatcaagcgcgaaggcaagctgctgcgtccgaagcgcctggcttccaacctgttccagttccgcaagggcaccggcgaagatcgctgcgtcctggactgcatcacctcgctgcagaacggcgccgacctgctctggatcgaaaccgagaagccgcacgtcggccagatcaaggcaatggtcgatcgcatccgcgaagtgattccgaacgccaagctggtctacaacaacagcccgtccttcaactggaccctgaacttccgccagcaggtgttcgatgcgttcgtcgccgaaggcaaggacgtttccgcctacgaccgcaacaagctgatgagcgtcgagtacgacgacaccgagctggccaaggtcgccgacgagaagatccgcaccttccagcgcgatggctcggcccacgccggcatcttccaccacctgatcaccctgccgacctaccacaccgccgcgctgtccaccgacaacctggccaagggctacttcgccgacgaaggcatgctggcctacgtgaagggcgtgcagcgccaggaactgcgccagggcatcgcctgcgtcaagcaccagaacatggcgggctccgacatcggcgacaaccataaagagtacttcgcaggcgaagccgctctgaaggccagcggcaaagacaacaccatgaaccagttccactaa

SEQ ID NO: 134226 - protein, 531 aa, Pseudomonas aeruginosa UCBPP-PA14
MSAYQNEIKAVAALKEKNGSSWSAINPEYAARMRIQNRFKTGLDIAKYTAAIMRKDMAEYDADSSVYTQSLGCWHGFIGQQKLISIKKHLKTTNKRYLYLSGWMVAALRSDFGPLPDQSMHEKTAVSGLIEELYTFLRQADARELDLLFTGLDAARAAGDKAKEAELLAQIDNFETHVVPIIADIDAGFGNAEATYLLAKKMIEAGACCIQIENQVSDEKQCGHQDGKVTVPHIDFLAKINAVRYAFLELGVDDGVIVARTDSLGAGLTKQIAVTNEPGDLGDLYNSFLDCEEISEAELGNGDVVIKREGKLLRPKRLASNLFQFRKGTGEDRCVLDCITSLQNGADLLWIETEKPHVGQIKAMVDRIREVIPNAKLVYNNSPSFNWTLNFRQQVFDAFVAEGKDVSAYDRNKLMSVEYDDTELAKVADEKIRTFQRDGSAHAGIFHHLITLPTYHTAALSTDNLAKGYFADEGMLAYVKGVQRQELRQGIACVKHQNMAGSDIGDNHKEYFAGEAALKASGKDNTMNQFH

SEQ ID NO: 134227 - DNA, 1293 bp, Solibacter usitatus Ellin6076
  CDS (1)..(1293): transl_table=11
atgacgaatcgtgccgacgagattttgcgggagtgggagaccgacccgcggtggagaggaatcaaacggccttacagcgcggaaaatgttctgcggctgcgcggctcggtgcgggtggagtacacgctggcgcgcatgggcgcggagcggctgtggcatctgctgcacaccgaaccctacgtggcggcgctgggggcgctgacgggaaaccaggcggtgcaacaggtgcaggcagggctaaaggctatctatttgagcggctggcaggtagccggcgacgccaacctgggcggccagatgtacccggaccagagcctgtatccggcgaacagcgtgccggcggtggtgcgggcgatcaataacgcgctgcagcgggccgaccagatccacagcgcggagggcgcgcatgggcactgctggttcgcgccgatcgtggccgatgcggaggcaggcttcggcggaccgctcaatgctttcgaactcatgaagggaatgatcgaggcgggtgcgggcgcggtgcacttcgaggatcagctttcctcggcgaagaagtgcgggcacctgggcggcaaggtagtggtgccgattgccgaattcgtgcagaagctggttgcagcacggctggcagcggacgtgatggggattccgacggtgctggtggcgcgtacggatgcgaatagcgcgggcctgctgctgagcgacatcgactcgcgcgatatgccgtttttgagcggcgggcggaccagcgagggcttcttccatttccgcggcgggattcaggcggcgatcgcgcgcggcgtggcgtatgcgccctatgcggacatgctgtggtgcgagacgtccgagccgaatttggcggaggcgcgggagttcgcggaggcgatccacgcgcggttccccgggaaactgctggcctacaactgctcgccgagctttcactggaggaagaaactggacgacgccacgatcgggcgcttccaacaggagctgggtgcgatgggttacaagttccagttcgtgacgctggcgggattccacgcgctcaacctgagcatgttttccctggcgcgcgcgtatgcggaggtgggaatggcggcgtacgcgagtttgcaggagcacgagttcgaggtgtcgcgcgaacatgggtactcggcggttcggcaccagcggttcgtgggcacgggatacttcgacgaagtgcagcaggtgatctccggcggacagagctccacggcggcgctggcgggttcgacggaggcggcgcagttcaatggcgtggaggtgacgccgtag

SEQ ID NO: 134228 - protein, 430 aa, Solibacter usitatus Ellin6076
MTNRADEILREWETDPRWRGIKRPYSAENVLRLRGSVRVEYTLARMGAERLWHLLHTEPYVAALGALTGNQAVQQVQAGLKAIYLSGWQVAGDANLGGQMYPDQSLYPANSVPAVVRAINNALQRADQIHSAEGAHGHCWFAPIVADAEAGFGGPLNAFELMKGMIEAGAGAVHFEDQLSSAKKCGHLGGKVVVPIAEFVQKLVAARLAADVMGIPTVLVARTDANSAGLLLSDIDSRDMPFLSGGRTSEGFFHFRGGIQAAIARGVAYAPYADMLWCETSEPNLAEAREFAEAIHARFPGKLLAYNCSPSFHWRKKLDDATIGRFQQELGAMGYKFQFVTLAGFHALNLSMFSLARAYAEVGMAAYASLQEHEFEVSREHGYSAVRHQRFVGTGYFDEVQQVISGGQSSTAALAGSTEAAQFNGVEVTP

SEQ ID NO: 134229 - DNA, 1659 bp, Croceibacter atlanticus HTCC2559
  CDS (1)..(1659): transl_table=11
atgaaaaatttatcacaagctaattatagttctgcactgcaagctgtaagaaaccttaaagaaaagtatggagatacttggaatgcaattgatccagaaagtgctgctagaatggtgactcaaaatcgttttaaaacaggtttagatattgcaaattatacggctgcaataatgagaaaagatatggccgagtatgatgcagattcatctcaatacacacaatcccttggttgttggcacggttttgttgctcagcaaaaaatgatagcagttaaaaaacatcataagaccaccaataaaaaatacttgtacctttctggatggatggttgctgcattacgttcagaatttggaccattaccagatcaatctatgcatgaaaaaactgctgttccggcattaataaaagaaatttatgactttttaagacaagcagatgcaatagaattgaatgatttgtttaacagacttgaaaacggtgaggatgttcaggatcaaatagacaattttgaaacacatattgtcccaatcattgcagatatagatgcaggctttggtaatgaagaagcaacctatttactgtctaaaaaaatgatagaagctggagcttgcgctatccaaattgaaaatcaagtttctgatgcaaaacaatgtggacaccaagatggaaaggttacagtaccacatgaagattttatagctaaattaaatgctattaggtatgcttttttagaattaggagtcgacgaagggatcattgtggcaagaacagattctgaaggtgctggccttacccaaaaactgccagttagccaagaacctggtgatttagcatctaaatatttagcctttgtagaaactgaagaaatagcgattaatgatgctaaagaagatgatgtgctgcttaaaagagatggtaaattagttcgccctgtgcgattagcaaatggtttatacaaatttaaaaacggctcaaatatagatagagttgtgttagattgtattacaaatcttcaaaacggagcagatttgttatggattgaaacacctacgcctaatgttaagcaaattgcacacatggtaaacagaattaaagacgttatgcctaatgcaaaattggtttacaataactcaccttcttttaattggacattaaatttccgtaatcaagtatttgaagaaatgcttttggaaggtgaaaacatgacagcttatgatagaaataatttaatggatgctcaatatgataattcagaactatgctatcgcgcagatgagaaaattagaacatttcaaacagatagtgcaagagacgccggaattttccatcacttaatcacattgcctacatatcatacaaccgcattacacatgaatgatcttaccaaaggttattttggagagtctggtatgttgtcttatgtaaaagaggtacaaagacaagaaattcgcaaaggtgtatcttgcgtaaaacatcaaagaatggcaggttcaaatttaggagacgaccataaaacattcttttctggcgataatgcactaaaggctggaggtgaaaaaaatacttcaaatcaatttgaagttaaaactgatgatagtaaggttgaagttaaatttaatgaccataaagtcgaagtaaaattaagtgtacctgcataa

SEQ ID NO: 134230 - protein, 552 aa, Croceibacter atlanticus HTCC2559
MKNLSQANYSSALQAVRNLKEKYGDTWNAIDPESAARMVTQNRFKTGLDIANYTAAIMRKDMAEYDADSSQYTQSLGCWHGFVAQQKMIAVKKHHKTTNKKYLYLSGWMVAALRSEFGPLPDQSMHEKTAVPALIKEIYDFLRQADAIELNDLFNRLENGEDVQDQIDNFETHIVPIIADIDAGFGNEEATYLLSKKMIEAGACAIQIENQVSDAKQCGHQDGKVTVPHEDFIAKLNAIRYAFLELGVDEGIIVARTDSEGAGLTQKLPVSQEPGDLASKYLAFVETEEIAINDAKEDDVLLKRDGKLVRPVRLANGLYKFKNGSNIDRVVLDCITNLQNGADLLWIETPTPNVKQIAHMVNRIKDVMPNAKLVYNNSPSFNWTLNFRNQVFEEMLLEGENMTAYDRNNLMDAQYDNSELCYRADEKIRTFQTDSARDAGIFHHLITLPTYHTTALHMNDLTKGYFGESGMLSYVKEVQRQEIRKGVSCVKHQRMAGSNLGDDHKTFFSGDNALKAGGEKNTSNQFEVKTDDSKVEVKFNDHKVEVKLSVPA

SEQ ID NO: 134231 - DNA, 1599 bp, Erythrobacter sp. NAP1
  CDS (1)..(1599): transl_table=11
atgacctaccagaataccatcgcccaaatgcagagcgttattgaagcaaatggccccagctggggcgcaattgacgccgaagcgactgcccgtatggcaatccagaaccgtttccccaccggtctcgacatcgcgaagtacaccgcgaagatcatgcgcgcagacatggacgcctatgacgctgatccggccaactacacccaatcgcttggttgctggcacggtttcatcgcgcagcagaagatgatctcgatcaagaagcacttcggcactaccaagcagcgttacctctacctttcgggctggatggtcgccgcgctgcgtagcgagttcgggccccttcccgaccagtcgatgcacgagaagacgaccgtgcctgagaccatcgaagagctctacacgttcctcaagcaggccgatgcccgtgagctcggcatgatgttccgcgaactcgacgcagcgcgcgacgcgggtgacgaggtgaaggccaaggacatcgagaaccagatcgacaactacgaaacccacgtcgttccgatcatcgcagacatcgatgcgggcttcggcaacgccgaggcgacctacctgctcgccaagaagatgattgaagcaggcgcctgcgcgcttcagatcgagaaccaggtttcggatgagaagcagtgcggtcaccaggacggcaaggtcaccgtcccgcatgaagacttccttcagaagatccgcgcgatccgtcatgccttcctcgagatgggcgttgaagatggcgtcatcgttgcgcgcaccgactcgctcggcgcaggccttaccaagcagatcgcttactcgaccgagcctggcgatcttggcgaccagtacaacagcttcctcgattgcgacgaagtcgatccggccaaaatcaccaacggtcaggtcttcatcagccgcgacggcaagctgatggctcccaagcgcctcccatcgaacctcttccagttccgctctggcactggcgaagaccgctgcgttctcgactgcatcacttcgcttcagaacggcgcggacctgctttggattgagacagagaagcctcacgtcgagcagatcgcaggcatggttgatcgcgtccgcgaagtgatcccgaacgccaagctcgtctacaacaactcgccttcgttcaactggacgctgaacttccgccagcaggtctatgatgcctacgcggaagccggcaaggacgtgagcgcttatgaccgcgacaagctgatgagcatcgactacgacggcaccgatctggcgatcgaagccgacgagaagatccgcaccttccaggccgacgctgcgaagcgcgcgggcatcttccaccacctcatcacgctgccgacctaccacaccgcggcgctcagcacggacaaccttgccaagcgctacttcggtgaggaaggcatgcttggctacgtcctcaacgttcagcgcgaagagatccgccagggcatcgcctgcgtgaagcaccagaacatggccggttccgacatcggcgatgatcacaaggagtacttcgccggtgaagccgctctcaaggcaggcggcaaggacaacacgatgaaccagttcgaggctgcataa

SEQ ID NO: 134232 - protein, 532 aa, Erythrobacter sp. NAP1
MTYQNTIAQMQSVIEANGPSWGAIDAEATARMAIQNRFPTGLDIAKYTAKIMRADMDAYDADPANYTQSLGCWHGFIAQQKMISIKKHFGTTKQRYLYLSGWMVAALRSEFGPLPDQSMHEKTTVPETIEELYTFLKQADARELGMMFRELDAARDAGDEVKAKDIENQIDNYETHVVPIIADIDAGFGNAEATYLLAKKMIEAGACALQIENQVSDEKQCGHQDGKVTVPHEDFLQKIRAIRHAFLEMGVEDGVIVARTDSLGAGLTKQIAYSTEPGDLGDQYNSFLDCDEVDPAKITNGQVFISRDGKLMAPKRLPSNLFQFRSGTGEDRCVLDCITSLQNGADLLWIETEKPHVEQIAGMVDRVREVIPNAKLVYNNSPSFNWTLNFRQQVYDAYAEAGKDVSAYDRDKLMSIDYDGTDLAIEADEKIRTFQADAAKRAGIFHHLITLPTYHTAALSTDNLAKRYFGEEGMLGYVLNVQREEIRQGIACVKHQNMAGSDIGDDHKEYFAGEAALKAGGKDNTMNQFEAA

SEQ ID NO: 134233 - DNA, 1605 bp, Pseudoalteromonas tunicata D2
  CDS (1)..(1605): transl_table=11
atgtcgacatatcaacaagaaattgaccatatcagcaccttatgtcaaatccaaggcactgcttggaatgcaattaatcctgaatatgcaactcgcatgcgtttacaaaatcgttttcgtaccgggttagatattgccaaatacactgcaaaaatcatgcgtcaagatatggcagattatgataaagaccataacgattacactcagtcacttggttgctggcatggttttaccgcacaacaaatgatgatggctgttaaacgccatcagaaaaccaccaaaaaaagctatgtctatttaagtggttggatggttgcagcactgcgctctgactttggcccgctgcctgatcaaagcatgcatgaaaaaacagctgtagcgaacctaatcgaagaaatttataccttcttaaaacaagctgatgcacgcgaacttgaccacctttacaaagacttagatagagcacgagcaactggcggtgatgtatcggcgattatcaaccaaattgataacttcgaaactcacattgtgccaatcattgccgatatcgacgccggttttgggaacgaagaagccacttatttattggctaaaaagatgattgaagcaggtgcatgctgtattcaaatcgaaaaccaagtatctgacgctaaacaatgtggtcatcaagcgggtaaagtaacggtacctcatgaagacttcttgtcaaaaatcaatgctgtacgttatgcatttttagaactgggcgttgatgatggtattattgttgcgcgtaccgactcattaggtgccagcttaacgcaaaaaatcccggtatctcgcacaccaggcgacttagcaagtcaatacaacagcttcttagatacaacaccagtaaacagccctgacgacttaaaagatggcgatatgacgatgaaaatcgatggccaacttgttaagccagtacgtttagataacggcttatatcaatttcgtgagggtactgaaaaacaacgtgtggtactcgattgtattaccagccttcaatctggtgcagacctattatggattgaaactgaaaaaccacatgtgaaacaaattgctgaactcgtaaacgagattaaagaaaccgtgcctaatgccaagttagtgtacaacaactcaccttcgtttaactggacgctaaaattccgtgaacaagtgtatcaagagtggcaagcacaaggtaaagacgtaagtgcatatcctgatccaagtgtggatgccaaagccttaatgcatagcacaatggatgcaaccgaccttgctaaagaagcggatttattagtacaaaacttccaacgcgatggcgcacgtgaggcaggtattttccatcatttaattaccttaccaacttaccacactgcagcgctcagtaccgatattttggctgaaggttactttggtgatttaggtatgctggcttatgtacgtgatgtacaacgtcaagaaattcgccgcgagcaagcctcggttaaacaccaagacttagcaggctcaaacattggtgatacccataaagaatacttttcgggtgacaatgcacttaaagcaggtggtgaagccaatactatgaatcaattttaa

SEQ ID NO: 134234 - protein, 534 aa, Pseudoalteromonas tunicata D2
MSTYQQEIDHISTLCQIQGTAWNAINPEYATRMRLQNRFRTGLDIAKYTAKIMRQDMADYDKDHNDYTQSLGCWHGFTAQQMMMAVKRHQKTTKKSYVYLSGWMVAALRSDFGPLPDQSMHEKTAVANLIEEIYTFLKQADARELDHLYKDLDRARATGGDVSAIINQIDNFETHIVPIIADIDAGFGNEEATYLLAKKMIEAGACCIQIENQVSDAKQCGHQAGKVTVPHEDFLSKINAVRYAFLELGVDDGIIVARTDSLGASLTQKIPVSRTPGDLASQYNSFLDTTPVNSPDDLKDGDMTMKIDGQLVKPVRLDNGLYQFREGTEKQRVVLDCITSLQSGADLLWIETEKPHVKQIAELVNEIKETVPNAKLVYNNSPSFNWTLKFREQVYQEWQAQGKDVSAYPDPSVDAKALMHSTMDATDLAKEADLLVQNFQRDGAREAGIFHHLITLPTYHTAALSTDILAEGYFGDLGMLAYVRDVQRQEIRREQASVKHQDLAGSNIGDTHKEYFSGDNALKAGGEANTMNQF

SEQ ID NO: 134235 - DNA, 1596 bp, Oceanospirillum sp. MED92
  CDS (1)..(1596): transl_table=11
atgtctacactgaataaagacatcgatagcatcgcatcactgaaagcaaacgctggcagcccatgggatgcaatcaacccagaatctgcagctcgcatgcgtgctcagaacaaattcaaaactggcctggatatcgctaagtacacagcggctatcatgcgtcgcgacatggctgagttcgacaaagacaaaactaagtacactcagtctctgggctgctggcacggttttgttggtcagcagaagctgatctctatcaagaagcacttcggctctactgaacgtcgttacctgtacctgtctggttggatggttgcagctctgcgttctgacttcggtcctcttcctgaccagtctatgcacgagaaaacgtctgtagcttctctggtaaacgaactgtacacattcctgcgtcaggctgacgctcgtgaactgggtggcctgttccgtgaactggacaaagcacgtgaagctggcgatgcagctaaagaagctgaaatccaggatcagatcgataaccacgaaactcacgtagtaccaatcgttgcagacatcgacgctggtttcggtaacgctgaagcgacttacctgatggctaagcagatgatcgaagcaggtgcttgctgcctacagatcgaaaaccaggttgctgacgagaagcagtgtggtcaccaggacggtaaagtaactgttcctcacgctgacttccacgcgaaactgcgcgctctgcgttacgctttccttgagctgggtgttgatgacggtgttatcgttgcacgtactgactctgaaggtgctggcctgactaaagagatcgctgtagttaaagagccaggcgaccagggtgatgtatacaactcctacctggacgttgaagaagttgctccagaagatactgctgaaggcgatgtgctgatcagccgtaacggcaaactggttcgtcctaagcgtctgccatctggtctgtatcagttccgtcagggaactggccacgagcgttgcgtatttgactgtatcgaagctatcaatgccggtgctgacctgctgtggatcgaaactgcagttccaacagtacacgaaatcaaaggcatgatggacgatgtacgtaaagtacacccagatgcgaaactggtttacaacaactctccatcattcaactggacgctgaacttccgtcagcagacttacgatgcatggttggctgaaggtaaagacgtttctgcttacgaccgtaacaacctgatgtctgctgaatacgacggttctgaactgtctgatgcagctgatgcacgtgtacgtacattccaggctgatactgctcgcgaagcgaacgtattccaccacctgatcactctgcctacttaccacacaactgctctgtctgttgataacctggctaaagagtacttcggtgagaaagctatgctgggttatgttgaaggcgtacagcgtaaagagatccgtcagggcatcgcatgtgttaagcaccagaacatgtctggttctgacatcggcgacgaccacaaagaatactttgctggtgaaaacgctctgaaagctgctggtgcgaagaacacttctaaccagttcagctaa

SEQ ID NO: 134236 - protein, 531 aa, Oceanospirillum sp. MED92
MSTLNKDIDSIASLKANAGSPWDAINPESAARMRAQNKFKTGLDIAKYTAAIMRRDMAEFDKDKTKYTQSLGCWHGFVGQQKLISIKKHFGSTERRYLYLSGWMVAALRSDFGPLPDQSMHEKTSVASLVNELYTFLRQADARELGGLFRELDKAREAGDAAKEAEIQDQIDNHETHVVPIVADIDAGFGNAEATYLMAKQMIEAGACCLQIENQVADEKQCGHQDGKVTVPHADFHAKLRALRYAFLELGVDDGVIVARTDSEGAGLTKEIAVVKEPGDQGDVYNSYLDVEEVAPEDTAEGDVLISRNGKLVRPKRLPSGLYQFRQGTGHERCVFDCIEAINAGADLLWIETAVPTVHEIKGMMDDVRKVHPDAKLVYNNSPSFNWTLNFRQQTYDAWLAEGKDVSAYDRNNLMSAEYDGSELSDAADARVRTFQADTAREANVFHHLITLPTYHTTALSVDNLAKEYFGEKAMLGYVEGVQRKEIRQGIACVKHQNMSGSDIGDDHKEYFAGENALKAAGAKNTSNQFS

SEQ ID NO: 134237 - DNA, 1602 bp, Alteromonadales bacterium TW-7
  CDS (1)..(1602): transl_table=11
atgacaacatatcaacgcgaaaccgacacactttctactttatgccaatctcaaggtaatgcatggcaggcaattaacccagagtatgcaactcgcatgcgtttacaaaatcgctttcgtactgggatagaaattgcacaatacacagctgacgtaatgcgtgaagatatggccgcttacgataaagatacaagccagtacacacagtctttagggtgttggcatggatttactgcccagcaaatgatgatggctattaaacgccaccaaaaaacaactaaacgtagttatgtttacttaagtggttggatggttgctgcacttcgctctgcgtttggtccgttacctgaccaaagtatgcacgaaaaaacatctgttccagcgcttattgaagaaatttatacattcttaaagcaagccgatgcccgtgagcttgaccacttatttaatgacctagatgaagcaaaagcgaatggcggcgacgttcaagctgtgcttgataaaattgacaactttgaaacacatgttgtgccaattattgctgatattgatgcaggttttggtaacgaagaggcaacttacctacttgctaaaaaaatgattgaagcaggtgcatgtgctattcaaatcgaaaaccaagtatctgatgccaaacaatgtggtcaccaggcgggtaaagtaaccgtgcctcacgaagactttttagcaaaaattaatgcggttcgttatgcattcttagagctaggtatcgacaacggtattattgttgcgcgtactgattcgttaggtgctagcttgactcaaaaagtgcctgtatcgcaaacgccaggtgatttagcaagccagtacaatgcctttttagagactacacctattaatggcgtagaggacttaaacgaaggtgatacggcaatgaaaatcaacggtgagctgtgtaaacctactcgccttgaaaatggcctataccagttccgtgaaggaacagagaaagaccgcgtagtactagactgtgtaactagcctacaatctggcgctgatttattgtggattgaaacagaaaaaccacacgtaaaacaaattgctgagcttgtaaaccgggttaaagagcaagtaccaaacgctaaactagtgtacaacaactcaccttcgtttaactggacgcttaagttccgtgagcaagtgtaccaagagtggcaagaagcgggtcgcgatttgagcgcttacccaagccttggtgataacaaaggcctaatggcaccagaaatggatgcaacagagcttgctgccgcagctgatgtattggtacaaaacttccaacgtgatggtgcacgtgaagcgggtattttccaccacttaattacgctgcctacataccatactgcagcacttagcacagatattttatcagaaggctactttggtgacttaggtatgcttgcttatgtacgtgatgtacaacgccaagaaattcgccgtgaacaagcatctgttaaacaccaagacctagcaggttctaacattggtgatacacacaaagagtacttctctggtgataacgcgttaaaagccggtggtgaagataacaccatgaaccagttctaa

SEQ ID NO: 134238 - protein, 533 aa, Alteromonadales bacterium TW-7
MTTYQRETDTLSTLCQSQGNAWQAINPEYATRMRLQNRFRTGIEIAQYTADVMREDMAAYDKDTSQYTQSLGCWHGFTAQQMMMAIKRHQKTTKRSYVYLSGWMVAALRSAFGPLPDQSMHEKTSVPALIEEIYTFLKQADARELDHLFNDLDEAKANGGDVQAVLDKIDNFETHVVPIIADIDAGFGNEEATYLLAKKMIEAGACAIQIENQVSDAKQCGHQAGKVTVPHEDFLAKINAVRYAFLELGIDNGIIVARTDSLGASLTQKVPVSQTPGDLASQYNAFLETTPINGVEDLNEGDTAMKINGELCKPTRLENGLYQFREGTEKDRVVLDCVTSLQSGADLLWIETEKPHVKQIAELVNRVKEQVPNAKLVYNNSPSFNWTLKFREQVYQEWQEAGRDLSAYPSLGDNKGLMAPEMDATELAAAADVLVQNFQRDGAREAGIFHHLITLPTYHTAALSTDILSEGYFGDLGMLAYVRDVQRQEIRREQASVKHQDLAGSNIGDTHKEYFSGDNALKAGGEDNTMNQF

SEQ ID NO: 134239 - DNA, 1596 bp, marine gamma proteobacterium HTCC2143
  CDS (1)..(1596): transl_table=11
atgtcaacctacagtcaaaacatcgatgccataaccaagttgcgcgcagaccaaggcagtgcatgggacgccatcgacccagaatatgcggctcgcatgcgtgcccagaaccgtttccagactggtttggaaattgctaaatatactgccaagatcatgcgtgacgacatggcaaactacgatgcagatagctctcagtacactcagtctttgggttgctggcacgggtttatcggccagcagaagatgatttctatcaaaaaacactttgacagcacggaccgtcgttatctgtacctgtctggttggatggttgccgcacttcgtagcgagtttggtccgttacctgaccaatctatgcatgagaagacctcagtatccgatcttattgaagagttatatacgttcctgcgtcaagctgatgcccgcgagatgggtggattgtttcgcgaattggacgatgcccgtgaagcgggtaatgaagttgcagcgaaagagcttcaaggcaaaatcgacaacttcgtaactcacgttgtcccaattgttgcagacatcgacgccggatttggtaatgcagaggccacttacttaatggctaagaaaatgatcgaagctggcgcttgctgtattcagatcgaaaatcaggtttctgatgagaaacaatgtggccaccaggacggtaaagtaaccgtaccgcacgaagattttctagcgaaaatccgcgccgtacgatacgcattcctcgagctaggtatagacgatggcgttattgttgcccgtactgactctttaggagcgggcctcaccaagcagatcgctgtaacgaatgagcccggcgatttgggtgatcaatataatagcttcctagaagttgaagaagttaccgttgatgacatgaataacggcgacgttctcattaagcaaaatggcaagcttgttcggcctaagcgtctggctagtaacttgttccaattccgccagggtaccggcgaagcacgttgcatcctagactcaattacgtcgttgcaaaatggcgccgacttgctgtggatcgaaactgagaagcctcatgttggtcagatcggtgcgatggtaaatgctattcgcgaagttgtcccgaacgctaagctggtctacaacaacagcccatcatttaactggacattgaacttccgtcagcaggtatttgatagcatgtctgaagccggtcaggacgtaactgcctacaaccgcgataacttaatgagcgaagagtacgacgcaacggaattggccgcagccgccgatgagagaatccgtactttccaggcagattcagcgcgtgaagctggtatcttccaccacctgattactttgccgacttaccacacagctgcgctgtctactgacaatttggctaaagagtacttcggtgaccaaggtatgttgggttatgttgctggcgttcagcgcaaggaaatccgtcagggtatcgcttgtgttaagcatcaaaacatggctggatcagacatgggtgacgatcacaaagagtatttctctggtgattctgcattgaaggcttctggtaaagacaacacaatgaaccagtttggttaa

SEQ ID NO: 134240 - protein, 531 aa, marine gamma proteobacterium HTCC2143
MSTYSQNIDAITKLRADQGSAWDAIDPEYAARMRAQNRFQTGLEIAKYTAKIMRDDMANYDADSSQYTQSLGCWHGFIGQQKMISIKKHFDSTDRRYLYLSGWMVAALRSEFGPLPDQSMHEKTSVSDLIEELYTFLRQADAREMGGLFRELDDAREAGNEVAAKELQGKIDNFVTHVVPIVADIDAGFGNAEATYLMAKKMIEAGACCIQIENQVSDEKQCGHQDGKVTVPHEDFLAKIRAVRYAFLELGIDDGVIVARTDSLGAGLTKQIAVTNEPGDLGDQYNSFLEVEEVTVDDMNNGDVLIKQNGKLVRPKRLASNLFQFRQGTGEARCILDSITSLQNGADLLWIETEKPHVGQIGAMVNAIREVVPNAKLVYNNSPSFNWTLNFRQQVFDSMSEAGQDVTAYNRDNLMSEEYDATELAAAADERIRTFQADSAREAGIFHHLITLPTYHTAALSTDNLAKEYFGDQGMLGYVAGVQRKEIRQGIACVKHQNMAGSDMGDDHKEYFSGDSALKASGKDNTMNQFG

SEQ ID NO: 134241 - DNA, 1599 bp, marine gamma proteobacterium HTCC2080
  CDS (1)..(1599): transl_table=11
atgagtcattatttggatacgatcggcgagttagagggcgtagttgccgaggcgggatcatcttgggccgacatcaaccccgagtacgccgccagaatgcgcgctcagaatcgcttcaaaacgggcatcgatattgctcgatatacggcagatcttatgcgcaaagatatggctgcgtatgatgaagaccctgcgcagtacacgcagtctttgggttgctggcatggttttattggtcagcagaagctgattgctatcaaaaagcatttcggaaccaccgataaaaagtacctctatctctcaggctggatgatcgcagctctgcgctcagagtttggcccgcttcctgatcagtcaatgcatgagaaaacatcggtgcctagccttatcgaagagctctacacctttttgcgacaagctgacgcccgagagatgggtgggcttttccgtgctcttgatgcagcgcgggcagctggaaatgatgtggaagtgcagggcatcaccaagcaaatcgaagagtttcagacccatgttgtgcctattattgctgatatagacgccggttttggtaacgaggaagccacctatcttttagctaaaagcatgattgaggccggtgcttgcgccattcagattgagaatcaagtttctgatgaaaaacagtgtgggcaccaagacggcaaagttaccgtaccccacgccgattttctggctaaaatccgcgcggttcgctacgcctttttagagttaggcgttgaaaacggcattattgttgcgaggaccgattctttgggcgctggtttgaccaagcagattgcggtaaccgatgcccctggagacctcggtgataagtacaacagttttctagacggtgattacatcgactcagcagatgacattgcaaatggagatgttgttgttaaagccaatggcaaactattgaagcccgcaaggttggcttcaggtttgttccagtttaaaaagggctctggaattgatcgcgtggtcctcgattgtattacttcgctgcaaaacggcgccgaccttatttggattgaaaccgaaaagccacatgtgggtcagatcgccagtatggtgaatcgcatcaaggaagtcgtacccaacgctaagttggtttataacaacagcccaagttttaactggacactcagtttccgtcagcaggtgtttgacgcgtggtctgaggcgggccaggacatggctgagtacgaccgtgatgccttaatgggtgccgagtacgatggaacagatttagcgattgaggccgacgctcgcattcagtcttttcaggctgacggcgcccgggaagcaggaattttccaccacttgatcacgctgcccacgtaccacacggcggcgctttcaaccgataacttagccaaggagtacttcggcgaagccggtatgctgggttacgtcgcgggtgttcagcgcaaagaacttcgtcagggaattgcctgtgtgaagcaccaaaatatggcgggttctgacatgggtgatgatcacaaagagtacttctctggtgacgctgcgcttaaagcaggtggcgccgacaacaccatgaatcaatttggctaa

SEQ ID NO: 134242 - protein, 532 aa, marine gamma proteobacterium HTCC2080
MSHYLDTIGELEGVVAEAGSSWADINPEYAARMRAQNRFKTGIDIARYTADLMRKDMAAYDEDPAQYTQSLGCWHGFIGQQKLIAIKKHFGTTDKKYLYLSGWMIAALRSEFGPLPDQSMHEKTSVPSLIEELYTFLRQADAREMGGLFRALDAARAAGNDVEVQGITKQIEEFQTHVVPIIADIDAGFGNEEATYLLAKSMIEAGACAIQIENQVSDEKQCGHQDGKVTVPHADFLAKIRAVRYAFLELGVENGIIVARTDSLGAGLTKQIAVTDAPGDLGDKYNSFLDGDYIDSADDIANGDVVVKANGKLLKPARLASGLFQFKKGSGIDRVVLDCITSLQNGADLIWIETEKPHVGQIASMVNRIKEVVPNAKLVYNNSPSFNWTLSFRQQVFDAWSEAGQDMAEYDRDALMGAEYDGTDLAIEADARIQSFQADGAREAGIFHHLITLPTYHTAALSTDNLAKEYFGEAGMLGYVAGVQRKELRQGIACVKHQNMAGSDMGDDHKEYFSGDAALKAGGADNTMNQFG

SEQ ID NO: 134243 - DNA, 1593 bp, Marinobacter sp. ELB17
  CDS (1)..(1593): transl_table=11
atgccctactcaaaagacgttgatgcccttaccactctgttgaaacagaatcctacctggaacgccatcaagcctgaacacgcggcccgtatgcgcgcccagaacaaatttcagaccggtctggatatcgccaagtacaccgccaagattatgcgcgaagacatggcgaactacgataacgatacctctcaatacacccagtctctgggttgctggcacggttttatcggccagcagaagatgatctccattaagaagcacttcggcgacacctcacgccgctacctgtacctgtccggttggatggttgccgccctgcgttcagagttcggcccgctgccagatcagtccatgcacgagaaaaccgccgtatccggcctgattggcgagttgtacacctttctgcgtcaagccgattcctgggaactgaaccacctgttccgtgatctggaagaagctcagaatgccggcgacaacgccaaggccgagcagctgataagccagattgataaccaccagacccacattgtgccgatcattgccgacatcgatgccggttttggtaacgcagaagccacttacctgctggccaggcagatgattgaagccggtgcctgctgtatccagatcgaaaaccaggtatctgacgagaagcagtgcggccaccaggacggcaaagtaaccgttccccacgccgacttcctggccaagataaacgctgtgcgtttggccttcctggaactgggtgtggatgacggcgtgattgttgcgcgtactgactctttgggtgctggcctgactcagaagattgctgtaaccgaagagccgggtgatctgggcgaccagtacaacagcttcatagacggtgacgtgattgccaaagccgaagacattaacaacggcgatgtggtgatcaagcagaacggtcagctagtcaagcccaaacgtctggcgtctggtttgttccagttcaaggccggtagtggcgaagaccgggtcattctggattgcatcaccagtctgcagaacggcgctgacatgttgtggatcgaaaccgagaagccccacgttggccagatcgcagccatggttaaccgcatcaaggaagtggttcctaacgccaagctggtttacaacaacagcccgtcgttcaattggaccctgagcttccgccaacaggtgttcgattcctggaaagaagaaggcaaagacgtatcggcctacgagcgtgctgcgctgatgagcgaagaatacgatagcaccgatctaggcaagctggccgacgagtggacagccaacttccagcgcgatgccgcccgtgaagccggtgtgttccaccacctgatcacgctgccgacttaccacacggcggccctgtcgaccgacaacttggccaaaggctacttcggtgccgaaggcatgctggcttacgtgaaaggtgttcagcgtaaagaaattcgccagggtatcgccaccgtcaagcaccaggacatggccggctccaacattggtgacgaccacaaggaattcttcgctggcgacgccgcgttgaaagccggtggtaaagacaacaccatgaaccagtttggctaa

SEQ ID NO: 134244 - protein, 530 aa, Marinobacter sp. ELB17
MPYSKDVDALTTLLKQNPTWNAIKPEHAARMRAQNKFQTGLDIAKYTAKIMREDMANYDNDTSQYTQSLGCWHGFIGQQKMISIKKHFGDTSRRYLYLSGWMVAALRSEFGPLPDQSMHEKTAVSGLIGELYTFLRQADSWELNHLFRDLEEAQNAGDNAKAEQLISQIDNHQTHIVPIIADIDAGFGNAEATYLLARQMIEAGACCIQIENQVSDEKQCGHQDGKVTVPHADFLAKINAVRLAFLELGVDDGVIVARTDSLGAGLTQKIAVTEEPGDLGDQYNSFIDGDVIAKAEDINNGDVVIKQNGQLVKPKRLASGLFQFKAGSGEDRVILDCITSLQNGADMLWIETEKPHVGQIAAMVNRIKEVVPNAKLVYNNSPSFNWTLSFRQQVFDSWKEEGKDVSAYERAALMSEEYDSTDLGKLADEWTANFQRDAAREAGVFHHLITLPTYHTAALSTDNLAKGYFGAEGMLAYVKGVQRKEIRQGIATVKHQDMAGSNIGDDHKEFFAGDAALKAGGKDNTMNQFG

SEQ ID NO: 134245 - DNA, 1599 bp, Erythrobacter sp. SD-21
  CDS (1)..(1599): transl_table=11
atgacgtaccagagccagatcgccaacatgggtgagtccatcgccgaaaacggcgcgccctggggtgcaatcgacgccgccagcgcggcccgcatggccgtgcagaaccgtttccccaccggcctcgacatcgcgcgctacaccgcgaagatcatgcgcgaggacatggaagcctacgacaaggacccggcgaactacacccagtcgctcggctgctggcacgggttcatcgcgcagcagaagatgatctcgatcaagaagcatttcggcagcaccaagcgccgttacctctacctctcgggctggatggtcgccgcgctccggagcgaattcggccccctgcccgaccagtcgatgcacgagaagaccagcgtgcccgcgctgatcgaggaactctacaccttcctcaagcaggccgacgcccgcgagttgggcggcatgttccgcgagctcgatgaggccaaggccaatggcgacagcgtcaacacgcatcgcctgctgaaggaaatcgacgagcaccagacgcatgtcgtgccgatcatcgccgatatcgatgccggcttcggcaatgccgaggcgacctacctgctcgccaagaagatgatcgaagccggtgcctgcgctctccagatcgagaaccaggtttcggacgagaagcagtgcggccaccaggacggcaaggttaccgttccgcacgaggacttcctccagaagatccgcgcgatccgctacgccttccttgaactgggcgttcccgatggcatcatcgttgcccgcaccgacagcctcggcgctggcctgaccaagcagatcgcctactcgaaggagccgggcgacctcggtgaccagtacaacagcttcctcgattgcgacgaagtcgatccggccgacatcaccaatggccaggtcttcatcagccgcgacggcaagcttctggcgcccaagcgcctgcccagcaatctcttccagttccgggccggaaccggtgaagaccgctgcgttctcgactgcatcaccgcgctccagaacggcgccgacctgctgtggatcgagaccgagaagccgcatgtcaaacagatcgccggcatggtcgatcgtgtccgcgaggtgatcccgaacgcaaagctggtctataacaattcgcccagcttcaactggacgctcaacttccgccagcagattttcgacaagtgggaagccgaaggcaaggacgtgagcggttacgatcgcgccaagctgatgagcatcgactacgacggcaccgagcttgccgccgaagccgacgagaagatccgcaccttccaggccgatgccgcgaagcgtgccggtatcttccaccacctcatcacgctgcccacctatcacacggccgcgctgagcaccgacaatctcgccaaggaatacttcggcgaacaggcgatgctcggttacgtcaagaacgtgcagcgcgaggaaatccgccagggtatcgcctgcgtgaagcaccagaacatggccggttcggacatcggcgatgatcacaaggaatactttgccggtgaagcggccctcaaagccggcggcaaggacaacaccatgaaccagttcgctgcggcataa

SEQ ID NO: 134246 - protein, 532 aa, Erythrobacter sp. SD-21
MTYQSQIANMGESIAENGAPWGAIDAASAARMAVQNRFPTGLDIARYTAKIMREDMEAYDKDPANYTQSLGCWHGFIAQQKMISIKKHFGSTKRRYLYLSGWMVAALRSEFGPLPDQSMHEKTSVPALIEELYTFLKQADARELGGMFRELDEAKANGDSVNTHRLLKEIDEHQTHVVPIIADIDAGFGNAEATYLLAKKMIEAGACALQIENQVSDEKQCGHQDGKVTVPHEDFLQKIRAIRYAFLELGVPDGIIVARTDSLGAGLTKQIAYSKEPGDLGDQYNSFLDCDEVDPADITNGQVFISRDGKLLAPKRLPSNLFQFRAGTGEDRCVLDCITALQNGADLLWIETEKPHVKQIAGMVDRVREVIPNAKLVYNNSPSFNWTLNFRQQIFDKWEAEGKDVSGYDRAKLMSIDYDGTELAAEADEKIRTFQADAAKRAGIFHHLITLPTYHTAALSTDNLAKEYFGEQAMLGYVKNVQREEIRQGIACVKHQNMAGSDIGDDHKEYFAGEAALKAGGKDNTMNQFAAA

SEQ ID NO: 134247 - DNA, 1605 bp, Moritella sp. PE36
  CDS (1)..(1605): transl_table=11
atgtctatatacaaaagtgatatcgatgcagttgcaacgctaaaagctgaacaaggttctaaatgggccgctattaaccctgaatatgcagcgcgtatgcgtactcaaaaccgtttcaaaacaggtcttgaagtggcacagtttacagctgatatcatgcgtgcagatatggctgaatacgaccaagattcttcacaatatacgcagtctttaggttgctggcatggtttcactgcgcaacaaatgatgatggctgttaaacgccacgaaaaaacaacgaagaaaagctacgtttacctttctggttggatggttgcggcactgcgttctgagttcggtcctttacctgaccaatcaatgcacgaaaaaacgtctgtaccggcactaatcgaagaaatttatacgttcctacgtcaagcagatgcacgtgaactcgatattttattcaacgaactagatgatgcccgtaacaacggcggtgacgtagtagcagcacaagccgctatcgacaatcacgaaacacatgtagtgccaatcattgctgatatcgatgccggttttggtaacgaagaagcaacgtacctacttgctaagaaaatgattgaagccggtgcatgttgtatccaaattgaaaaccaagtatctgatgctaaacaatgtggtcaccaagcgggtaaagtaacggttccacacgaagatttcctagcgaaaatcaacgcggtacgttatgcattccttgaattgggtatcgacaacggtattatcgttgcacgtactgactcattaggcgctggcctaacgcaaaaagtacctgtatctcaaacgccaggtgacttagcatcgcaatacaatgcattcctagaaacaacaccagttgaatctgcagcagacgttgccgaaggcgacatgatcatcaagctaaatggtaaattagttaaaccaacacgtttagcgtctggtctgtatgcattccgtgaaggcacagagattgatcgtgtggtacttgattgtatcgttagcttacaaaacggcgctgatttattgtggattgaaactgaaaaaccacacgtaggtcaaatcgctcacatggttaacgaagtacgtaaagtggttcctgatgcgaaacttgtttataataactcaccatcattcaactggacgcttaacttccgtcaacaagaatacgcagcatgggttgaagcaggtaaagatgtatcagcatacccagacccagcaacagacccacgtggcctgatggatgagaagttcgatacaacagaacttgcaatcgcagcagataagaaagtacaaacattccaagctgattcagcacgtgaagcaggtatcttccatcacctaatcacattgccgacttaccatgaaacagcactgggtactgatattctttctgaaggttacttcggtgaacttggtatgcttgcatatgtacgtgatattcaacgtaaagaaatccgtcgtgaacaggcatctgttaagcaccaaaacctagcgggttcagatatcggtgatgctcataaaggttacttctctggtgataacgcgcttaaagctggcggcgaagataacacgatgaaccagttctaa

SEQ ID NO: 134248 - protein, 534 aa, Moritella sp. PE36
MSIYKSDIDAVATLKAEQGSKWAAINPEYAARMRTQNRFKTGLEVAQFTADIMRADMAEYDQDSSQYTQSLGCWHGFTAQQMMMAVKRHEKTTKKSYVYLSGWMVAALRSEFGPLPDQSMHEKTSVPALIEEIYTFLRQADARELDILFNELDDARNNGGDVVAAQAAIDNHETHVVPIIADIDAGFGNEEATYLLAKKMIEAGACCIQIENQVSDAKQCGHQAGKVTVPHEDFLAKINAVRYAFLELGIDNGIIVARTDSLGAGLTQKVPVSQTPGDLASQYNAFLETTPVESAADVAEGDMIIKLNGKLVKPTRLASGLYAFREGTEIDRVVLDCIVSLQNGADLLWIETEKPHVGQIAHMVNEVRKVVPDAKLVYNNSPSFNWTLNFRQQEYAAWVEAGKDVSAYPDPATDPRGLMDEKFDTTELAIAADKKVQTFQADSAREAGIFHHLITLPTYHETALGTDILSEGYFGELGMLAYVRDIQRKEIRREQASVKHQNLAGSDIGDAHKGYFSGDNALKAGGEDNTMNQF

SEQ ID NO: 134249 - DNA, 1605 bp, Moritella sp. PE36
  CDS (1)..(1605): transl_table=11
atgtcaacatacaaaaatgatatcgattcagttgctacactaaaagctgaacaaggttctaaatgggccgctattaaccctgaatatgcagcgcgtatgcgtactcaaaaccgtttcaaaacaggtcttgaagtggcacagtttactgctgatatcatgcgtgcagatatggctgaatacgaccaagattcttcacaatatacgcagtctttaggttgctggcatggtttcacagcccaacaaatgatgatggctgttaaacgccacgaaaaaacaacgaagaaaagctacgtttacctttctggttggatggttgcggcactgcgttctgagttcggtcctttacctgaccaatcaatgcacgaaaaaacgtctgtaccggcactaatcgaagaaatttatacgttcctacgtcaagccgatgcacgtgaactcgatatcttattcaacgaactagatgatgcccgtaacaacggcggtgacgtagtagcagcacaagccgctatcgacaatcacgaaacacatgtagtgccaatcattgctgatatcgatgccggttttggtaacgaagaagcaacgtacctactggctaagaaaatgattgaagccggtgcgtgttgtatccaaattgaaaaccaagtatctgatgctaaacaatgtggtcaccaagcaggtaaagtaacggttccacacgaagatttcctagcgaaaatcaacgcggtacgttatgcattccttgaattgggtatcgacaacggtattatcgttgcacgtactgactcattaggcgctggcctaacgcaaaaagtaccggtatcacaaacgccaggtgacttagcatcgcaatacaatgcattcctagaaacaacgccagttgaatctgcagcagacgttgccgaaggcgacatgatcatcaagctaaatggtaaattagttaaaccaacacgtttagcgtctggtctgtatgcattccgtgaaggcacagagattgaccgtgtggtacttgattgtatcgtaagcttacaaaacggcgctgatttattgtggattgaaactgaaaaaccacacgtaggtcaaatcgctcacatggttaacgaagtacgtaaagtagttcctgatgcgaaacttgtttataacaactcaccatcattcaactggacgcttaacttccgtcaacaagaatacgcagcatgggttgaagcaggtaaagatgtatcagcttacccagacccagcaacagacccacgtggcctgatggatgagaagttcgatacgacagaacttgcacttgcagcagataagaaagtacaaacgttccaagctgattcagcacgtgaagcaggtatcttccatcacctaatcacattgccgacttatcatgaaacagcactgggtactgatattctttctgaaggttacttcggtgaacttggtatgcttgcatatgtacgtgatattcaacgtaaagaaatccgtcgtgaacaggcatctgttaagcaccaaaacctagcgggttcagatatcggtgatgctcataaaggttacttctctggtgataacgcgcttaaagctggcggcgaagacaacacgatgaaccagttctaa

SEQ ID NO: 134250 - protein, 534 aa, Moritella sp. PE36
MSTYKNDIDSVATLKAEQGSKWAAINPEYAARMRTQNRFKTGLEVAQFTADIMRADMAEYDQDSSQYTQSLGCWHGFTAQQMMMAVKRHEKTTKKSYVYLSGWMVAALRSEFGPLPDQSMHEKTSVPALIEEIYTFLRQADARELDILFNELDDARNNGGDVVAAQAAIDNHETHVVPIIADIDAGFGNEEATYLLAKKMIEAGACCIQIENQVSDAKQCGHQAGKVTVPHEDFLAKINAVRYAFLELGIDNGIIVARTDSLGAGLTQKVPVSQTPGDLASQYNAFLETTPVESAADVAEGDMIIKLNGKLVKPTRLASGLYAFREGTEIDRVVLDCIVSLQNGADLLWIETEKPHVGQIAHMVNEVRKVVPDAKLVYNNSPSFNWTLNFRQQEYAAWVEAGKDVSAYPDPATDPRGLMDEKFDTTELALAADKKVQTFQADSAREAGIFHHLITLPTYHETALGTDILSEGYFGELGMLAYVRDIQRKEIRREQASVKHQNLAGSDIGDAHKGYFSGDNALKAGGEDNTMNQF

SEQ ID NO: 134251 - DNA, 1638 bp, Tuber borchii
  CDS (1)..(1638)
atgtcgtcttcagcagctatagaggcggagcagaaggccttcgaggccgaagttgaagccgtgaagcaatggtggtcatcaccacgctggcactacacaaagagacctttcacggcagagcagattgtctccaagagaggaaacctacctatcttctacccaagcaacgaccaaagtaagaagctttggggtattctggagaagaaatttgattcaaaagagcctagttacacatatggatgtcttgaccctgtcatggtcacccaaatggccaagtacttagagacagtgtatgtcagtgggtggcaatgctcttctaccgctagcagcacgcacgaacccagccctgatcttgcggactaccctatggacaccgttccgaacaaagtcgaccacctcttcaaagcgcaattgtttcacgataggaaacaacgagaagcacgtctgtctgtaccagtatcggagcgtgctaatcagccgagcgtcgattaccttcggcctatcatcgctgatgctgataccggccatggtggactcacggctgtcatgaagctcacaaggctcttcattgagaggggtgctgctggaattcacattgaagaccaagcgcctgggactaaaaagtgcggccatatggctggtaaggtgttggtaccagtgggcgagcatatcaatcgcttggtagccatcagggcgcaggccgatattatgggtgtcgatcttctttccgtcgcccgcacggactctgaagctgcgaccctaatcacttcaaccatcgatcaccgagaccaccccttcattctcggatgcacaaacccatcgcttcaacccctcgtcgatttgatggccgctgctgaagcctctggcaagtccggcgatgcgctccaagcaattgaggattcctggctagcgtctgccaacatcaagctttttgatgaggccgttattgacgctatcaatgccggcggctaccccaacaagtccgggctagttgaacaatacctttccatctcaaagggaaagaggaactctgaagcacgagctatcgctaagggtatcactgggatagatattttctgggattgggagagtcctagaactagagaaggattctacaggtacagtggtggtactaagtgtgctattatgagagcagtggcatacgctccctacaccgattgcttatggatggagagcaagaagccggattacccccaggctctcgaattcgctgagggtgtccatgccgtttggcctgaacagaagcttgcttacaatctctcgcctagcttcaactggaaggcggccatgccatccggtgagcaagaaacctacattaagcgcctcggcaagctcgggtactgctggcagttcatcacactcgcaggtcttcacactacagctctcgcatcagataccttcgcaaagaactatgctaagcagggtatgaaagcctatggcaatctcgtacaagaaccagaaatagagaacggcatcgatgtcgtccttcaccagaagtggagtggagcaaactacatcgataacatgctgaagatggtcaccggcggtgtgtcgtcgaccgcggcgatgggtaaagaggttacggagacgcagttcacggggtatacgaaactttga

SEQ ID NO: 134252 - protein, 545 aa, Tuber borchii
MSSSAAIEAEQKAFEAEVEAVKQWWSSPRWHYTKRPFTAEQIVSKRGNLPIFYPSNDQSKKLWGILEKKFDSKEPSYTYGCLDPVMVTQMAKYLETVYVSGWQCSSTASSTHEPSPDLADYPMDTVPNKVDHLFKAQLFHDRKQREARLSVPVSERANQPSVDYLRPIIADADTGHGGLTAVMKLTRLFIERGAAGIHIEDQAPGTKKCGHMAGKVLVPVGEHINRLVAIRAQADIMGVDLLSVARTDSEAATLITSTIDHRDHPFILGCTNPSLQPLVDLMAAAEASGKSGDALQAIEDSWLASANIKLFDEAVIDAINAGGYPNKSGLVEQYLSISKGKRNSEARAIAKGITGIDIFWDWESPRTREGFYRYSGGTKCAIMRAVAYAPYTDCLWMESKKPDYPQALEFAEGVHAVWPEQKLAYNLSPSFNWKAAMPSGEQETYIKRLGKLGYCWQFITLAGLHTTALASDTFAKNYAKQGMKAYGNLVQEPEIENGIDVVLHQKWSGANYIDNMLKMVTGGVSSTAAMGKEVTETQFTGYTKL

SEQ ID NO: 134253 - DNA, 1623 bp, Hyphomicrobium methylovorum
  CDS (1)..(1623): transl_table=11
atggcgcacaagaaaacgtactcgcaattgcgttccgaattgctcgctcgctaccccgttggcctaacgaaaggcggcgtgagcatcgacgatatcgtccagctgcgtttgcagtcgccatacgaaagtcacctcgacgtagcgcgtgcaatggcgtctgtcatgcgcgcagatatggccgcctatgacagagatacgggcaagttcactcagtcgctgggctgctggtcaggctttcacgcgcagcagatgattaaggccgtcaagcgcctgcgcggaacgaccaaaggtgcctatgtttatctttcgggttggatggtggcaggtcttcgcaatcgctggggccatctgcccgaccagtcgatgcatgagaaaacatccgtcgttgatctgatcgaagagatttacgtttcgttgcgtcaagccgatgaggttgcgctcaacgacctgtttaacgaactcaaagacgccagagccaaaggcgcgacaaataaagcatgcgaagagattatctcgcgtatcgatggcttcgaaagccacgtggttcccatcatcgcggacatcgatgccggtttcggcaacgagcacgcaacctatttgctcgctaaggaaatgatcaaagccggcgcctgctgcctgcagatcgaaaaccaggtttccgatgcaaagcagtgcggacatcaagacggcaaggtcaccgtaccgcgtgaagatttcatcgaaaagcttcgtgcctgccgcttggcctttgaggaactcggcgtcgatgatggtgtcatcgttgcgagaacggacagcttgggcgccagcctgacgcagaaaattccggtcagccaacaggccggagacttcgcgtcgagctatatcaagtggctgaaaacagaaccgatcacagacgccaatccgctgagcgaaggcgaactggcgatctggcagagcggaaattttgcacggccgatacgtatgcccaacgggcttttctcgttccgcgagggcacaggccgggcacgagtgatcgaagattgcatcgcttctctcaaggatggcgatgcagatttgatctggatcgaaacggatacgccgaatgttgatgaaatcgcgagcatggttgcggaaatccgcaagcaggttccggacgccaagctcgtctataacaattcgccatccttcaactggactttgaaccttcgcaagcaggttcgcgctcagtggatttcagagggcaagatcgccgaagcggactatccggacggcaccgctctgatgtcggcccagtacgacacaagcgagttggggcgcgaggccgatgatcgcttgcgccaattccaggttgatatctcggcccgcgctggggtgttccacaaccttatcacgctgccgacattccacctgaccgccaagagcaccgacgagctctcgcatggctacttcggtgaagatcgcatgctggcttacgtagcaacggtgcagcgcgaagaaattcgccggagcatcagcgccgtgcgtcatcagcacgaagttggttcggatctcggagacacattcaaggagatggtctcaggggatcgcgcgctgaaggcgggcggtgcgcacaacacgatgaaccagttcgcagcagaatga

SEQ ID NO: 134254 - protein, 540 aa, Hyphomicrobium methylovorum
MAHKKTYSQLRSELLARYPVGLTKGGVSIDDIVQLRLQSPYESHLDVARAMASVMRADMAAYDRDTGKFTQSLGCWSGFHAQQMIKAVKRLRGTTKGAYVYLSGWMVAGLRNRWGHLPDQSMHEKTSVVDLIEEIYVSLRQADEVALNDLFNELKDARAKGATNKACEEIISRIDGFESHVVPIIADIDAGFGNEHATYLLAKEMIKAGACCLQIENQVSDAKQCGHQDGKVTVPREDFIEKLRACRLAFEELGVDDGVIVARTDSLGASLTQKIPVSQQAGDFASSYIKWLKTEPITDANPLSEGELAIWQSGNFARPIRMPNGLFSFREGTGRARVIEDCIASLKDGDADLIWIETDTPNVDEIASMVAEIRKQVPDAKLVYNNSPSFNWTLNLRKQVRAQWISEGKIAEADYPDGTALMSAQYDTSELGREADDRLRQFQVDISARAGVFHNLITLPTFHLTAKSTDELSHGYFGEDRMLAYVATVQREEIRRSISAVRHQHEVGSDLGDTFKEMVSGDRALKAGGAHNTMNQFAAE

SEQ ID NO: 134255 - DNA, 1617 bp, Aspergillus oryzae
  CDS (1)..(1617)
atgggttttctcgaggacgaggacaagaagtacttggacgacgtccaggccgtcaaggcctggtggaccgattccagatggcgacacaccaagcgccctttctctgcagagcagattgtggccaagcgtggaaacctgaagattgagtacccctcgaatgtccagagcaagaagctctggaaaattctggagagcaacttcgagaacaaagttgctagcttcacctacggctgtctcgaacccacaatggtcacccaaatggcaaagtaccttgacaccgtctatgtctctggctggcagagctcttccactgcttcctctaccgatgagccgtctccggatcttgctgactaccccatgaacactgtgccaaacaaggtaaaccagctatggatggcccagctgttccatgaccggaaacagcgtgaggaacggattacgacacccaaggagaagcgcggaaatgtggcaaacattgactacctgcgtcccatcatcgctgacgctgacactggacatggtggtttgactgcggttatgaagttgaccaagctgtttgttgagcgcggtgctgctggtattcacattgaggaccaagctcctggtaccaagaagtgtggccacatggctggaaaggttcttgtgcccattagcgagcacatcaaccgtttggtcgccatccgtgcgcaggcagatatcatgggcaccgatcttcttgccattgccagaaccgacgccgaagctgctactctcatcacctctaccatcgatcaccgtgaccatgccttcatcgtcggctcgaccaaccccaacatccagcctctcgtggatctcatggtggcggccgaacaagctggaaagcagggagacgagcttcaggctatcgaagaccagtgggttgctcaggctggcctgaagcttttcaacgatgccgtcattgaggccatcaacaagggtgcccactctaacaagcaatccctcattgatcaatacctgaaggctgctaagggcaagagcaaccttgaagctcgcgcgatcgccaagaacatcactggacaggacatctacttcaactgggatgcgcctcgcacccgtgagggttactaccggctccagggtggcacccagtgtgccattaaccgtggtcttgcttatgctccattcgccgaccttatctggatggagagcaagctccccgactacgcccaggctaaggagtttgctgaaggcattcacgccgtgtggcccgagcaaaaacttgcctacaacttgtcgccctcgttcaactggaagaaagccatgccccgcgatgagcaggagacgtacatcaagcgcttgggtgctctgggttactgctggcagttcatcaccctggctggtctgcacaccacagccctcatttccgaccagttcgccaaggcctactccaagcagggcatgcgtgcctatggtgaattggtccaagagccggagatggagcagggagtcgatgtggttacccaccagaaatggagcggtgccaattatgtggataacctcctgaagatggtcactggcggtgtgagcagcactgcggccatgggcaagggtgtgacggaagatcagttcaagcactga

SEQ ID NO: 134256 - protein, 538 aa, Aspergillus oryzae
MGFLEDEDKKYLDDVQAVKAWWTDSRWRHTKRPFSAEQIVAKRGNLKIEYPSNVQSKKLWKILESNFENKVASFTYGCLEPTMVTQMAKYLDTVYVSGWQSSSTASSTDEPSPDLADYPMNTVPNKVNQLWMAQLFHDRKQREERITTPKEKRGNVANIDYLRPIIADADTGHGGLTAVMKLTKLFVERGAAGIHIEDQAPGTKKCGHMAGKVLVPISEHINRLVAIRAQADIMGTDLLAIARTDAEAATLITSTIDHRDHAFIVGSTNPNIQPLVDLMVAAEQAGKQGDELQAIEDQWVAQAGLKLFNDAVIEAINKGAHSNKQSLIDQYLKAAKGKSNLEARAIAKNITGQDIYFNWDAPRTREGYYRLQGGTQCAINRGLAYAPFADLIWMESKLPDYAQAKEFAEGIHAVWPEQKLAYNLSPSFNWKKAMPRDEQETYIKRLGALGYCWQFITLAGLHTTALISDQFAKAYSKQGMRAYGELVQEPEMEQGVDVVTHQKWSGANYVDNLLKMVTGGVSSTAAMGKGVTEDQFKH

SEQ ID NO: 134257 - DNA, 1581 bp, Ralstonia eutropha
  CDS (1)..(1581): transl_table=11
atggcccagtatcaagacgacatcaaggcagttgccggtttgaaagagaaccacggcagcgcgtggaatgccatcaatcccgagtatgccgcccgcatgcgtgcccagaacaagttcaagactggcctggacatcgccaagtacactgccaagatcatgcgcgccgacatggccgcctacgatgccgactcgtcgaagtacacccagtcgctgggctgctggcacggcttcatcgggcagcagaagatgatctccatcaagatgcacttcaacagcaccgagcgtcgctacctttacctgtccggctggatggtggccgcgctgcgctctgagttcggcccgctgccggaccagtcgatgcacgaaaaaacctccgtcagcgcgctgatccgcgagctgtacaccttcctgcgccaggccgacggccgtgagctgggcggcctgttccgcgagctggacgacgcccagggccctgccaaagccgccatccaggcgaagatcgacaaccacgtcacccacgtcgtgcccatcatcgcggacatcgacgcgggtttcggcaacgccgaagcaacgtacctgctggccaagcagttcatcgaagcgggcgcatgctgcatccagatcgaaaaccaggtgtccgacgagaagcagtgcggccaccaggatggcaaggtcaccgtgccgcatgaggacttcctggccaagatccgcgccatccgctacgccttcctggaactgggcgtggacgacggcatcatcgtggcccgtactgattcgctgggtgccggcctgaccaagcagatcgccgtgaccaacacgccgggcgacctgggcgaccagtccaattacttcctcgcttgcgaggagctgtcggccgaccaactcggcaatggtgcagtcatcatcacgcgcgacggcaagctgctgcgtcccaagcgcctgcccagcaacctgttccagttccgcgccggcacgggcgaagcacgttgcgtactggattgcgtcaccgcactgcaaaacggcgctgacctgctgtggatcgaaaccgaaaagccgcatatcgcccagatcggcggcatggtcagcgagattcgcaaggtcatcccgaacgccaagctggtgtacaacaacagcccgtcgttcaactggaccctgaacttccgccagcaggcgtatgacgcgatgaaggccgcgggcaaggatgtgtcggcatatgaccgcgcccagctgatgagcgtggaatacgatcagaccgaactggcgaagctcgccgacggaaagatccggaccttccagggcgacgcgtcgcgcgaagaaggtatcttccaccacctgattacggttgcgacctaccacaacgccgcgctgtcgaccgacaacctggccaaggaatacttcggcgaccagggcatgctgggttatgtggctggcgtgcagcgtaaggatatccgtcagggcatcgcctgcgtcaagcaccagaacatgtccggctcggacatcggcgacgaccacaaggagtatttcagcggcgaagcggccctgaagctggcgggtaaagacaacaccatgaaccagttctga

SEQ ID NO: 134258 - protein, 526 aa, Ralstonia eutropha
MAQYQDDIKAVAGLKENHGSAWNAINPEYAARMRAQNKFKTGLDIAKYTAKIMRADMAAYDADSSKYTQSLGCWHGFIGQQKMISIKMHFNSTERRYLYLSGWMVAALRSEFGPLPDQSMHEKTSVSALIRELYTFLRQADGRELGGLFRELDDAQGPAKAAIQAKIDNHVTHVVPIIADIDAGFGNAEATYLLAKQFIEAGACCIQIENQVSDEKQCGHQDGKVTVPHEDFLAKIRAIRYAFLELGVDDGIIVARTDSLGAGLTKQIAVTNTPGDLGDQSNYFLACEELSADQLGNGAVIITRDGKLLRPKRLPSNLFQFRAGTGEARCVLDCVTALQNGADLLWIETEKPHIAQIGGMVSEIRKVIPNAKLVYNNSPSFNWTLNFRQQAYDAMKAAGKDVSAYDRAQLMSVEYDQTELAKLADGKIRTFQGDASREEGIFHHLITVATYHNAALSTDNLAKEYFGDQGMLGYVAGVQRKDIRQGIACVKHQNMSGSDIGDDHKEYFSGEAALKLAGKDNTMNQF

SEQ ID NO: 134259 - DNA, 1311 bp, Streptomyces clavuligerus
  CDS (1)..(1311): transl_table=11
atgacagagaccgggacagagacagagacggccggggcgccggcagagacggccgagacgctggcggagcgctgggccaccgaacctcgctggcgggacatcgagcggacctatggggccgaggaagtgatccggctgtccggcagtgtccgggaggagcacaccctcgcccggcgcggcgccgaccggctctggcgccaactgcacgaactggactacgtccacgcactcggcgccctgaccggcgggcaggcggtccagcaggtcagagcggggctccaggccatctacctcttcggctggcaggtcgcggccgacgccaaccaggccgggcacacctatcccgaccagagcctctacccggccaactcggtgccccaggtcgtccgccggatcaacaacgccctgctgcgggcggaccagatcgccaccgccgagaacgccggggacggcactgactggctggcgccgatcgtcgccgacgcggaggccggtttcggcggcccgctgaacgccttcgaactgaccaaggcgatgatcgaggcaggcgccgccgggattcactacgaggaccagctcgcctcggagaagaagtgcggccacctcggcggcaaggtcctggtgccgaccgcgcagcacatccgcaccctcaacgccgcgcggctcgccgccgacatcgccgatgtccccacggtgatcatcgcccgtacggacgcgctcgcggcctccctgatcaccagcgacgtggacgagcgcgacgccgagttcctcaccggggagcggacggcggagggcttccaccgggtgcggaacggcatggcgccggtgatcgcgcgcggactcgcctacgccccgtacgccgatctgctgtggatggagaccggaacgccggacctcgcccaggcccgggagttcgccgaggcgatccacgcccagtacccggagcagctgctggcctacaactgctccccgtccttcaactggagggccgccctggacgacgaccggatcgccaagttccagcgagagctgggggcgatggggtaccggttccagttcatcaccctcgccgggttccactccctcaaccacgccatgttcgatctcgcccgcggctacgcggagcacggcatgaccgcctatgtcgacctccaggagcgggagttcgccgcccaggccgacggattcaccgcggtccggcaccagcgcgaggtcggcacggggtacttcgacctggtctccacggccgtgaaccccgcgtcgtccacgaccgcgctctcgggctccacggaggaggagcagttccactag

SEQ ID NO: 134260 - protein, 436 aa, Streptomyces clavuligerus
MTETGTETETAGAPAETAETLAERWATEPRWRDIERTYGAEEVIRLSGSVREEHTLARRGADRLWRQLHELDYVHALGALTGGQAVQQVRAGLQAIYLFGWQVAADANQAGHTYPDQSLYPANSVPQVVRRINNALLRADQIATAENAGDGTDWLAPIVADAEAGFGGPLNAFELTKAMIEAGAAGIHYEDQLASEKKCGHLGGKVLVPTAQHIRTLNAARLAADIADVPTVIIARTDALAASLITSDVDERDAEFLTGERTAEGFHRVRNGMAPVIARGLAYAPYADLLWMETGTPDLAQAREFAEAIHAQYPEQLLAYNCSPSFNWRAALDDDRIAKFQRELGAMGYRFQFITLAGFHSLNHAMFDLARGYAEHGMTAYVDLQEREFAAQADGFTAVRHQREVGTGYFDLVSTAVNPASSTTALSGSTEEEQFH

SEQ ID NO: 134261 - DNA, 1296 bp, Ralstonia eutropha
  CDS (1)..(1296): transl_table=11
atgacccgcacagaacagatccaggccctgcagaaagactgggataccaattcccgctggaaagggatcaagcgcaatttcaccgccgaagacgtggtgcgcctgcgtggttcggtccaggtcgagcacaccctggcccgccccggttccgagaagctgtggaccctgctgcacacggagccgttcgtcaactcgctcggcgcgctgagtggcaaccaggccatgcagcaagtgaaggccggcctgaaggctatttacctgtcggggtggcaagtcgcaggcgacgccaacctggccggtgaaatgtaccccgaccagtcgctatacccggccaactcggtgccgcaagtcgtcaagcccatcaacaacaccttccagccccccgaccagatccagtggagcgaaggcaagggcgacaccgacttcttcgccccgatcgtggcggatgccgaagccggcttcggcggcgtgcttaacgctttcgggctgatgaagtcgatgatcgaagcgggcgccgccggcgttcacttcgaagaccaactcgcttcggtgaagaagtgcggccacatgggcggcaaggtgctggtgccgacccgcgaagccgtcgccaagctgacctccgggggtctgggcgccgacgtcttgggcgtgccgaccctggtgatcgcccgtacagacggcgaagccgcggacctgctgacctcggacgtggacgacaacgacaagccgttctgcaccggcgagcgcaccgtggaaggtttctaccgcgtgcgcaacggccttgagcagtcgatctcgcgcgccctggcctacgctgaagtcgctgacctggtgtggtgcgaaatcggcaagccggacctcgagttcgccaagaagtttgccgaagccgtgcacgccaagttcccgggcaagatgctggcctacaactgctcgccgtcgttcaactggaagaagaacttggacgacgccaccattgccaagttccagagggaactgggcgcgatgggctacaagttccagttcatcacgctggccggcttccactcgctgaactactcgatgttcaacctggcctacggctacgcccgcaaccagatgagcgcgttcgtggaactgcaggaagccgagttcaaggccgccgagaagggcttcaccgcggtcaagcaccagcgcgaagtcggcaccggctacttcgacgccgtgacccagaccatcgaaggcggccagtcgtcgacgaccgcactgaagggttcgaccgaagacgagcagttcttcgaagacaagaaagtggcctga

SEQ ID NO: 134262 - protein, 431 aa, Ralstonia eutropha
MTRTEQIQALQKDWDTNSRWKGIKRNFTAEDVVRLRGSVQVEHTLARPGSEKLWTLLHTEPFVNSLGALSGNQAMQQVKAGLKAIYLSGWQVAGDANLAGEMYPDQSLYPANSVPQVVKPINNTFQPPDQIQWSEGKGDTDFFAPIVADAEAGFGGVLNAFGLMKSMIEAGAAGVHFEDQLASVKKCGHMGGKVLVPTREAVAKLTSGGLGADVLGVPTLVIARTDGEAADLLTSDVDDNDKPFCTGERTVEGFYRVRNGLEQSISRALAYAEVADLVWCEIGKPDLEFAKKFAEAVHAKFPGKMLAYNCSPSFNWKKNLDDATIAKFQRELGAMGYKFQFITLAGFHSLNYSMFNLAYGYARNQMSAFVELQEAEFKAAEKGFTAVKHQREVGTGYFDAVTQTIEGGQSSTTALKGSTEDEQFFEDKKVA

SEQ ID NO: 134263 - DNA, 1587 bp, Colwellia maris
  CDS (1)..(1587): transl_table=11
atgtctaactatcaaagtgcaatagaagcagttaaagcaattaaagaaaaagcaggtaactcttgggatgccattaaccctgagtctgttgcacgtatgcgagcacaaaataaattcaaaactggtttagatattgctcagtacactgcagatattatgcgtgctgatatggctgcattcgatgcagacaagactaaatacacacaatctctaggttgctggcatggttttattggccaacagaaaatgatttctattaagaaacattttgatggcaagacagaccgtcgttacttatacctttcaggttggatggttgcagcacttcgcagtgagtttggtcctcttcctgaccaatctatgcacgaaaaaacctcggtagcttcattggttgcagagctttacactttcctacgccaagctgatgcacgtgaactaggcggtcttttccgcgacctagacgcggcaagcgatggcgacaaagctgctatccaagataaaattgataatcacgttactcacgttgtaccaattattgctgatattgatgcaggttttggtaatgctgaagcgacttatatcatggctaagcaaatgattgaagccggtgcttgtgctcttcaaattgaaaaccaagtagctgatgaaaaacaatgtggacatcaagacggtaaagtaacggttcctcacgcagatttccattctaagatccgtgcattacgtcatgctttcctagaactaggtattgataacggtattatcgtttcacgtactgactctgaaggtgcaggtcttactaaagaaatcgcggttgttaaagagcctggcgatcaaggtgacatttataactctttcctagacgttgaagaaattgacgtaagcgacatggctgaaggcgatgtatgtttcaatcgtgacggcaagttagttcgccctaagcgtttaccttctggcttataccaattccgtcaaggtactggtgaagaacgttgtgtatttgacagtattgaagcaattaaagcgggcgctgacttattgtggattgaaacagcaacaccaaatgttgcagatattaccgcaatgatgaacgaagtacgtaaagaaattccagatgctaagcttgtttataacaacagcccatcatttaactggacgttaaacttccgtcaacaagcatttgatacaatggttgctgaaggcaaagatgtttctagctatgttcgtgctgatttaatgaatgttgattacgatacgactgaattagcagcggctgctgatgataaaatccgtagtttccaagctgatacagcacgtgaagctggcattttccatcacctaatcacacttcctacttaccatactgcagcgttatctactgataaccttgctaaagaatactttggtgatgcgggtatgcttggttatgttgaaggtgtacagcgtaaagaaatccgtcaaggtatcgcctgtgttaaacatcaaaacatgtcaggatctgatatgggtgatgatcacaaagaatactttgctggtgagaacgcgctaaaagctggcggcgctaacaatacgtctaatcagtttagctaa

SEQ ID NO: 134264 - protein, 528 aa, Colwellia maris
MSNYQSAIEAVKAIKEKAGNSWDAINPESVARMRAQNKFKTGLDIAQYTADIMRADMAAFDADKTKYTQSLGCWHGFIGQQKMISIKKHFDGKTDRRYLYLSGWMVAALRSEFGPLPDQSMHEKTSVASLVAELYTFLRQADARELGGLFRDLDAASDGDKAAIQDKIDNHVTHVVPIIADIDAGFGNAEATYIMAKQMIEAGACALQIENQVADEKQCGHQDGKVTVPHADFHSKIRALRHAFLELGIDNGIIVSRTDSEGAGLTKEIAVVKEPGDQGDIYNSFLDVEEIDVSDMAEGDVCFNRDGKLVRPKRLPSGLYQFRQGTGEERCVFDSIEAIKAGADLLWIETATPNVADITAMMNEVRKEIPDAKLVYNNSPSFNWTLNFRQQAFDTMVAEGKDVSSYVRADLMNVDYDTTELAAAADDKIRSFQADTAREAGIFHHLITLPTYHTAALSTDNLAKEYFGDAGMLGYVEGVQRKEIRQGIACVKHQNMSGSDMGDDHKEYFAGENALKAGGANNTSNQFS

SEQ ID NO: 134265 - DNA, 1683 bp, Ashbya gossypii
  CDS (1)..(1683)
atgtccccttccgtcagagacgcccgcaacgaccttgccagcctgcaacagcaggcagccgccgaagccgaggatattaggagatggtggagccagccacggtgggcgggcaccaagcgcgtgtacacggccgaggacatcgtcaagcgccgcggcacgttccctgtcgtcgaatacccatcttccgtaatggcggacaagctcgtggagacattggcgcggcactcgcgcaacggcacggtttcacagacgttcggagtgctcgacccagtgcaaatgacgcaaatggtgaagtatctggacacgatttacgtgtctggctggcaatgcagcgccacggcttcgacctcgaacgagcctgggcccgatctcgcggactatccgatggacaccgtgccaaacaaggtcgagcacctgttcatggcgcagctgttccacgaccggaaacagcgcgaggcccgcctgtcgtgcactacccagcgcgagctcgaccaattggggcctgagattgactacttgaggccgattgtcgctgacgcagacaccggccacggcgggctaacagccgtctttaaactcacgaagatgttcatcgagcgcggtgcagccggtatccacatggaggaccagtcctccagcaacaaaaagtgcgggcacatggcgggccgctgcgtgatccctgttcaggagcacattagtcgtttagtgactgtgcgcatgtgtgcggacgtgatgcactcgaacctggtgcttgtcgcgagaacagactcggaggccgccaccttacttagctcgaacattgacgcgcgcgatcattactacattgtcggggcctcgaaccctgaggtaactgtaccgctgatcgaagttttggacgccgcgcagcaggccggcgcctcaggtgacagattggctcagctagaggaggactggtgcaagaaggccaagttgaggctcttccacgaggcatttgccgaccaggtgaatgccagcccttcgatcaaagacaaggcgggcgttattgccaaatttaactcacagatcgggccacagacaggcgcgtcgatcagagagatgcgcaaactgggccgcgagctgctcgggcaggacgtctacttcgactgggacctgcctcgcgctagagagggcttgtaccgctacaagggcggcacccagtgcgcgatcatgcgcgcacgcgcgttcgcgccgtacgccgacctggtctggttcgaatccaacttccctgacttccagcaggctaaggagtttgcgcagggcgtgcgcgagaagttccccaacaagtggatggcctacaacttgtcgcccagcttcaactggccgaaggccatgcctcccaaggagcaggagaactacatccaacggctgggcgagatcggatatgtgtggcagttcatcacgctagccggcctgcataccaatgccttggccatcgacaacttctcgcgcgaattcagcaggttcggaatgcgtgcgtatgcacaaggcatccagcagagggagatggacgagggcgtcgatgtcctaaaacaccagaagtgggccggcgcagagtatgttgacagcattctcaagcttgcccagggcggtgtgtcttcgacagcctcgatgggtaagggtgtaaccgaagagcagttcggctcctcaaacggtgccaaactatga

SEQ ID NO: 134266 - protein, 560 aa, Ashbya gossypii
MSPSVRDARNDLASLQQQAAAEAEDIRRWWSQPRWAGTKRVYTAEDIVKRRGTFPVVEYPSSVMADKLVETLARHSRNGTVSQTFGVLDPVQMTQMVKYLDTIYVSGWQCSATASTSNEPGPDLADYPMDTVPNKVEHLFMAQLFHDRKQREARLSCTTQRELDQLGPEIDYLRPIVADADTGHGGLTAVFKLTKMFIERGAAGIHMEDQSSSNKKCGHMAGRCVIPVQEHISRLVTVRMCADVMHSNLVLVARTDSEAATLLSSNIDARDHYYIVGASNPEVTVPLIEVLDAAQQAGASGDRLAQLEEDWCKKAKLRLFHEAFADQVNASPSIKDKAGVIAKFNSQIGPQTGASIREMRKLGRELLGQDVYFDWDLPRAREGLYRYKGGTQCAIMRARAFAPYADLVWFESNFPDFQQAKEFAQGVREKFPNKWMAYNLSPSFNWPKAMPPKEQENYIQRLGEIGYVWQFITLAGLHTNALAIDNFSREFSRFGMRAYAQGIQQREMDEGVDVLKHQKWAGAEYVDSILKLAQGGVSSTASMGKGVTEEQFGSSNGAKL

SEQ ID NO: 134267 - DNA, 1617 bp, Aspergillus fumigatus
  CDS (1)..(1617)
atgggtttccttgaagacgaagaccagaaatactgggacgacgtccaagccgtcaaggcctggtggaaagactcgagatggaggtacacaaaacgcccgtacactgcagagcagatcgtggcgaagcgtggaaacctgaagatccattacccctccaatgaccagagcaagaagctttggaagatcctggaaagcaactttgagaaaaaagttgccagtttcacctatggctgtctggaaccaacaatgctcacccagatggccaagtacctcgacaccgtctacgtttccggctggcagagctcttccaccgcctcgtctaccgatgaaccctcccccgatctcgctgattaccccatgaacactgtccccaacaaggtaaaccagctgttcatggcacagctgttccatgaccggaaacaacgcgaggaacgcatcacaacccccaaggaccagcggagcaagctgcctaacatcgactacctgcgtcccatcatcgccgatgctgataccggccatggtggtctcactgctgttatgaaactgaccaagctgttcatcgagagaggcgctgccggaatccacattgaagatcaggcccctggtacgaagaagtgtggtcacatggccggaaaggttctcgtccctattagcgagcacatcaaccgtctggttgccatccgcgcgcaggcagatatcatgggaaccgacctgcttgccatcgcccgtaccgactctgaagccgcaacactcatcacctctaccatcgaccaccgcgatcacgccttcatcgttggctctaccaatcccaacctgcagccactgaacgacctcatgctggctggtgagcaggctggcaagactggcgaagagctccaggccatcgaggatcaatggattgcccaagctggtctgaaactgttcgacgatgctgtcgttgacacaatcaaggcgggcgtgcacgtcaacaaggatgccctcatcaaggagtacctgactgccgctaagggcaagagcaacagtgaggcgcgtgcgatcgccaagggcatcacgggcgttgacatctactgggactgggatgctccccgcactcgggagggctactaccggtaccagggaggaacgcagtgcgctatcaaccgtgctgttgcctatgctccgttcgcggacctgatctggatggagagtaagctccctgattacgctcaggcgaaggagtttgccgacggtgtccacgccgtctggcccgaacagaagctggcgtacaacttgtcgccatccttcaactggaagaaggctatgccgcgtgaggagcaggagacttacatcaagagactcggcgctctgggctatgcctggcagttcatcaccctggctggtctacacactaccgcgctcatctccgaccagttcgccagggcctacgcgaaacagggaatgcgcgcgtacggtgaactggtgcaggaacccgagatggagcagggtgtggacgtggtgacccaccagaaatggagtggtgccaactatgtggataacatgttgaagatgctcaccggcggtgtcagcagcaccgccgccatgggtaagggtgtgacagaggatcagttcaagcactga

SEQ ID NO: 134268 - protein, 538 aa, Aspergillus fumigatus
MGFLEDEDQKYWDDVQAVKAWWKDSRWRYTKRPYTAEQIVAKRGNLKIHYPSNDQSKKLWKILESNFEKKVASFTYGCLEPTMLTQMAKYLDTVYVSGWQSSSTASSTDEPSPDLADYPMNTVPNKVNQLFMAQLFHDRKQREERITTPKDQRSKLPNIDYLRPIIADADTGHGGLTAVMKLTKLFIERGAAGIHIEDQAPGTKKCGHMAGKVLVPISEHINRLVAIRAQADIMGTDLLAIARTDSEAATLITSTIDHRDHAFIVGSTNPNLQPLNDLMLAGEQAGKTGEELQAIEDQWIAQAGLKLFDDAVVDTIKAGVHVNKDALIKEYLTAAKGKSNSEARAIAKGITGVDIYWDWDAPRTREGYYRYQGGTQCAINRAVAYAPFADLIWMESKLPDYAQAKEFADGVHAVWPEQKLAYNLSPSFNWKKAMPREEQETYIKRLGALGYAWQFITLAGLHTTALISDQFARAYAKQGMRAYGELVQEPEMEQGVDVVTHQKWSGANYVDNMLKMLTGGVSSTAAMGKGVTEDQFKH

SEQ ID NO: 134269 - DNA, 1284 bp, Bacillus halodurans
  CDS (1)..(1284): transl_table=11
atgagtggatggcaagaaacagcggaaaaattagagatgtcttggagcaatgacgtgcggtggcaaggagtggagcgtccatatagcggagaggaggtagtcaaactacgaggctcgcttaaaatcgagtatacccttgcaaagactggggcggaaaaactatggaagctactccacgaagaggattacgtgaatgccctcggtgcgatgactgggggacaggcgatccaacaagtaaaggcgggtttgaaagcgatttatttaagtggatggcaagtagcagcagacgccaatctagcaggacatatgtatccagaccaaagcttatatcctgccaatagcgttccaagtgtcgtaaagcggatcaatcaagcacttcagcgagctgatcaaattcaacatcttgaaggggaaggagaagtggattatttcgcgccaatcgtagctgatgcggaagctggctttggtggtcaattaaacgtctttgagctcatgaaagcgatgattgaagcaggagcttctggggttcactttgaggatcaactcgcttctgaaaagaagtgtggtcatttaggcggaaaagttctcatcccgacgcagacggcaatccgcaatttagtatcggcaagactagcagctgatgttatgggagtgccgacgattttggtcgcccggaccgatgcagatgcagctgatttaattacgagtgatattgatccagcagaccaacgttttattacgggagaacgaacgccggaagggttttatcggacgaatgcaggcattgagcaagcgattgctagaggcttagcgtacgctccatatgcggacctcatttggtgtgaaacatcaaagccttcgttagaggaagcgaagcaatttgccgacgcgattcatgagaaattccctggaaaactacttgcctacaattgttcgccttcatttaactgggaggcaaatctagatcgggcgacaatcgaaacatttcaacaagagctcggtaagatggggtataagttccaatttgtcacgcttgcaggctttcatgcactgaaccatagcatgtttgagcttgcatatggctataaacaacgggggatgggcgcttattctgaacttcagcaagccgaatttgccagtgaagtaaaaggttatactgcaacgagacatcaacgtgaagtgggaaccggttattttgatcaagtggcacaaacaatcacagggggaacatcatcaacgactgcacttactggttcgaccgaggaagcgcaatttcaaaaataa

SEQ ID NO: 134270 - protein, 427 aa, Bacillus halodurans
MSGWQETAEKLEMSWSNDVRWQGVERPYSGEEVVKLRGSLKIEYTLAKTGAEKLWKLLHEEDYVNALGAMTGGQAIQQVKAGLKAIYLSGWQVAADANLAGHMYPDQSLYPANSVPSVVKRINQALQRADQIQHLEGEGEVDYFAPIVADAEAGFGGQLNVFELMKAMIEAGASGVHFEDQLASEKKCGHLGGKVLIPTQTAIRNLVSARLAADVMGVPTILVARTDADAADLITSDIDPADQRFITGERTPEGFYRTNAGIEQAIARGLAYAPYADLIWCETSKPSLEEAKQFADAIHEKFPGKLLAYNCSPSFNWEANLDRATIETFQQELGKMGYKFQFVTLAGFHALNHSMFELAYGYKQRGMGAYSELQQAEFASEVKGYTATRHQREVGTGYFDQVAQTITGGTSSTTALTGSTEEAQFQK

SEQ ID NO: 134271 - DNA, 1731 bp, Cucurbita maxima
  CDS (1)..(1731)
atggctacctccttctctgttccttcgatgataatggaagaagaaggaagattcgaagcggaagttgcagaggtgcaggcatggtggaattctgagaggttcaagctaacacgacggccgtacacggcaaaagacgtggtgtcactacgcggcagcctgagacaaagctacgcctcaaacgatttagctaaaaagctatggcgaacgctcaaaacccaccaagccaacagcacagcttcgagaacatttggagctctagaccctgttcaagtgacgatgatggctaagcatttggacagcatttatgtctccggctggcagtgctcctcaacccacacctccaccaatgaaccaggtccggacctcgccgattacccatacgacactgttccgaacaaggttgagcatttgttcttcgctcaacagtaccatgaccggaaacagagggaagcgaggatgagtatgagccgagaggaacgagccaaaaccccttatgttgactatctcaaaccgattatcgccgacggcgacaccggcttcggcggcaccaccgccacggtgaagctctgtaaactatttgtggagcgcggtgccgccggtgttcacattgaggatcagtcctctgtgacgaaaaaatgcggtcatatggctgggaaagtgctggtggcggttagtgagcacatcaatcggctcgtagcggctcgattgcagttcgacgtgatgggggttgagacagttctcgtggctcgaaccgacgcggttgcggcgactttgattcaaacgaatgttgatagtagagatcatcagtttattttgggcgcgacgaaccctaatttgagaggaaagagcttggctggggttttggcggaagccatggcggcagggaaaacaggggcggagcttcaagcgctggaagatcaatggatttcaatggcacaattgaagacattttcagaatgtgtaacggacgcgatcatgaattcgaacggaacagagagtgaaaagaggaggaaattggatgaatggatgaaccactccagctacgagaaatgcatatcgaacgaacaaggtcgggaaatcgcagagaaattagggctgaagaatctcttctgggactgggacttgcccagaaccagagaagggttttacaggttcaaaggttcagtaatggcggcaatcgttcgcggttgggctttcgcgccacacgcggacctaatctggatggaaacgtcgagccctgatttggtggagtgcaccactttcgcaaaaggggtgaaatcggtgcacccagaaataatgttggcttataatctatcgccatctttcaactgggacgcatcgggaatgagcgataagcaaatggaggagttcatccctacgattgcgaggctgggtttctgctggcagttcataacgctggcaggtttccacgccgatgcgttggtgatcgacacatttgcgagagactacgcgcgaaggggaatgttggcttatgtggagagaatccaaagagaagaaaggaacaacggagtggacacactggctcatcagaaatggtccggagctaactactacgatcggtatctgaagacagttcaaggcgggatatcgtcgaccgctgccatgggaaaaggggtgacggaggagcagttcaaggagtcgtggacgagggcgggagcagggaacttgggagaagaagggagcgtggtcgtggcgaagtcgagaatgtaa

SEQ ID NO: 134272 - protein, 576 aa, Cucurbita maxima
MATSFSVPSMIMEEEGRFEAEVAEVQAWWNSERFKLTRRPYTAKDVVSLRGSLRQSYASNDLAKKLWRTLKTHQANSTASRTFGALDPVQVTMMAKHLDSIYVSGWQCSSTHTSTNEPGPDLADYPYDTVPNKVEHLFFAQQYHDRKQREARMSMSREERAKTPYVDYLKPIIADGDTGFGGTTATVKLCKLFVERGAAGVHIEDQSSVTKKCGHMAGKVLVAVSEHINRLVAARLQFDVMGVETVLVARTDAVAATLIQTNVDSRDHQFILGATNPNLRGKSLAGVLAEAMAAGKTGAELQALEDQWISMAQLKTFSECVTDAIMNSNGTESEKRRKLDEWMNHSSYEKCISNEQGREIAEKLGLKNLFWDWDLPRTREGFYRFKGSVMAAIVRGWAFAPHADLIWMETSSPDLVECTTFAKGVKSVHPEIMLAYNLSPSFNWDASGMSDKQMEEFIPTIARLGFCWQFITLAGFHADALVIDTFARDYARRGMLAYVERIQREERNNGVDTLAHQKWSGANYYDRYLKTVQGGISSTAAMGKGVTEEQFKESWTRAGAGNLGEEGSVVVAKSRM

SEQ ID NO: 134273 - DNA, 1731 bp, Cucumis sativus
  CDS (1)..(1731)
atggctgcctccttctctgttccttcgatgataatggaagaagaaggaagatttgaagcggaagttgcagaggttcaggcatggtggaattcagagaggttcaagctaacacgacggccgtacacggcaaaagacgtggtgtcactacgtgggagcctgagacaaagctacgcttcaaacgatttagctaagaagctgtggcgaaccctcaaaacccaccaagctaacggcacagcctcgaggacattcggagctcttgaccctgttcaagtgacgatgatggctaagcatttggacaccatttatgtctccggttggcaatgttcttcaactcacacctccactaacgaacctggcccggacctcgccgattacccatacgacactgttccgaacaaggtcgagcatcttttcttcgctcaacagtaccatgacaggaaacagagggaagccaggatgagtatgagtcgagaggaacgagccaaaactccttacatcgactatctcaaaccgattatcgccgacggtgacaccggcttcggcggcaccaccgctacagtgaagctctgtaagctatttgtggaacgcggtgccgccggtgttcatattgaggatcaatcctctgttacgaagaaatgcggtcatatggcgggaaaagtgttggtagcggttagcgaacacatcaatcggctcgtagcggctcgattgcagttcgatgtgatgggggttgagacgattctcgtggctcgaacggatgcggttgcagctactttgattcaaacgaatgttgataaacgagaccatcaatttattttgggggcgacgaacccaaatttgagagggaagagtttagctggggctttagcagaagccatggcggctggaaaaacaggagcggagcttcaagctctagaagatcaatggatttccatggcccaattgaaaacattttcggaatgtgtaacggacgcaatcatgaatacaaacgcaacagagaatgaaaagaggaggaaattagacgaatggatgaaccattccagttacgagaaatgtatatcgaacgaacaaggacgtgaaatcgcagagaaattaggactgaagaatctcttctgggattgggatttaccaagaactagagaagggttttacagattcaaaggttcggtaatggcggcgattgttcgtggttgggctttcgcaccacatgcagacttaatctggatggaaacttcaagcccagatttggttgaatgcacaacattcgcaaaagggatgaaatccatacatccagaaacaatgttagcttataatctatccccatctttcaactgggatgcatcaggaatgagcgataagcaaatggaagagttcatcccgaggatcgcgaggctgggtttctgctggcagttcataacactggcgggattccacgcggatgcgttggtggtggacacatttgcaagagattacgcgagaaggggaatgttggcatacgtggagagaattcaaagagaagaaagaaacaatggagtggatacattggcacatcagaaatggtctggtgctaactactacgatcggtatctgaagacggttcagggggggatttcgtccactgcggccatgggaaaaggggtaacggaagagcagttcaaggagtcatggacgagggaaggagcagtgaacttgggagaagaagggaacgtggtggtagccaagtccagaatgtaa

SEQ ID NO: 134274 - protein, 576 aa, Cucumis sativus
MAASFSVPSMIMEEEGRFEAEVAEVQAWWNSERFKLTRRPYTAKDVVSLRGSLRQSYASNDLAKKLWRTLKTHQANGTASRTFGALDPVQVTMMAKHLDTIYVSGWQCSSTHTSTNEPGPDLADYPYDTVPNKVEHLFFAQQYHDRKQREARMSMSREERAKTPYIDYLKPIIADGDTGFGGTTATVKLCKLFVERGAAGVHIEDQSSVTKKCGHMAGKVLVAVSEHINRLVAARLQFDVMGVETILVARTDAVAATLIQTNVDKRDHQFILGATNPNLRGKSLAGALAEAMAAGKTGAELQALEDQWISMAQLKTFSECVTDAIMNTNATENEKRRKLDEWMNHSSYEKCISNEQGREIAEKLGLKNLFWDWDLPRTREGFYRFKGSVMAAIVRGWAFAPHADLIWMETSSPDLVECTTFAKGMKSIHPETMLAYNLSPSFNWDASGMSDKQMEEFIPRIARLGFCWQFITLAGFHADALVVDTFARDYARRGMLAYVERIQREERNNGVDTLAHQKWSGANYYDRYLKTVQGGISSTAAMGKGVTEEQFKESWTREGAVNLGEEGNVVVAKSRM

SEQ ID NO: 134275 - DNA, 1641 bp, Gibberella zeae
  CDS (1)..(1641)
atggcgtcacaaaatatgacaaacccttctattaaccccgatattgaagatgagctcttccaaaaggaggttgaggctgtcaagacatggtggtctgattcaagatggcgacaaaccaagcgaccgtttaccgctgagcagatcgtttcgaagcgcggataccttcctattgattatgctagcaacacccaggccaagaagctatggaagattcttgagcaccgttttgagaatcgcgatgctagctacacctacggctgtttggaacccacaatggtgacccaaatggctaaatatctcgatacggtctatgtttctggctggcagtcatcgtcgacagcctctgcttccgacgagcctggccctgatctggctgactacccttatactaccgtccctaacaaggttggccatctcttcatggcccaacttttccacgatcgaaagcagcgtcaagagcgtctcagcgtccctaaggagcagcgcgccaacctcctcaacattgattatctccgccccattgtcgcagacgcagatactggtcatggcggtctcaccgctgtcatgaagctcaccaagctcttcattgaaaagggtgcggccggaattcacattgaagaccaagcccccggcacaaagaagtgcggccatatggccggtaaagtccttgtccccattcaagaacatatcaaccgcctcgttgcaatccgagcgcaggctgacatcatgggctctgaccttctcgctattgcccgtactgacgccgaggctgccacactcctttccaccaacattgacccccgcgaccatgcttttatcctcggctccacgaactctacactcaagcccctcaacgatctgatgatcgccgctgaagctactggcaagtctggtgctgagctgcagcgtattgaggacgagtggcttgccaaggccaatctcagcagtttcgacgatgctgtcgctgctgccattgacgcgggttccttctctgataaggctggcatcaagcaagaatacacttccagggcaaagggaaagagtaactttgaggccagggctgttgctcgccagcttctcggcagggatatcttctttgattgggatgctccccgaacgcgtgagggttacttccgcctcaagggtggatgtgactgcgcagtgaaccgcgctatcgcctatgcaccttactgcgacgccatttggatggagtccaagctgcccgatttcgctcaagccgaacagttcgctcaaggtgtccacgctgtctggccagagaagaaactcgcttacaacctgtctccctcgttcaactggaagacggccatgcctcgtgatgaacaggagacttacatccgacgtctggctaagcttggttactgctggcagtttatcactcttgcgggcttgcacacaacagcattgattagtgaccagttcgcaaaggcttacagcaccgtcggcatgcgtgcctatggcgagcttgtccaagagcccgagatggaccaaaaagtcgacgttgtcaagcaccagaagtggagtggtgctacctacgtcgacgagttgcagaagatggtcacaggtggtatcagttccacggctgctatgggcgccggtgtgactgaagaccagttcaaataa

SEQ ID NO: 134276 - protein, 546 aa, Gibberella zeae
MASQNMTNPSINPDIEDELFQKEVEAVKTWWSDSRWRQTKRPFTAEQIVSKRGYLPIDYASNTQAKKLWKILEHRFENRDASYTYGCLEPTMVTQMAKYLDTVYVSGWQSSSTASASDEPGPDLADYPYTTVPNKVGHLFMAQLFHDRKQRQERLSVPKEQRANLLNIDYLRPIVADADTGHGGLTAVMKLTKLFIEKGAAGIHIEDQAPGTKKCGHMAGKVLVPIQEHINRLVAIRAQADIMGSDLLAIARTDAEAATLLSTNIDPRDHAFILGSTNSTLKPLNDLMIAAEATGKSGAELQRIEDEWLAKANLSSFDDAVAAAIDAGSFSDKAGIKQEYTSRAKGKSNFEARAVARQLLGRDIFFDWDAPRTREGYFRLKGGCDCAVNRAIAYAPYCDAIWMESKLPDFAQAEQFAQGVHAVWPEKKLAYNLSPSFNWKTAMPRDEQETYIRRLAKLGYCWQFITLAGLHTTALISDQFAKAYSTVGMRAYGELVQEPEMDQKVDVVKHQKWSGATYVDELQKMVTGGISSTAAMGAGVTEDQFK

SEQ ID NO: 134277 - DNA, 1644 bp, Magnaporthe grisea
  CDS (1)..(1644)
atggcttctaaaaacatggtgaatcctgctgtcgaacccagcatggaagacgacctgtttgccagagaagtggccgaggtcaagcagtggtggagtgacccccgttggaggtacaccaagcggccattcactgccgaacaaattgtatccaagcgaggcaacttgaagattgagtatccaagcaacgcacaatctaagaagctgtggaagattctcgagggccggttccagaagcgcgatgccagttacacctatggctgcttggagccaacaatggtgacccagatggccaagtacctagacactgtctatgtttccggctggcagtcatcctctacagcgtcgtcctctgatgagccgggcccggatttggcagactacccctataccaccgttccgaacaaagtgtctcacttgttcatggcacaactgttccacgaccggaaacagcgtcatgagcgtctttcggcgcccaagtcggagcggtctaagcttcagaatatcgactacctgcgacccattattgccgatgccgacactggccatggaggtttgacagcggtgatgaagctgacgaaactcttcatcgagaagggagcagctggtatccacattgaggaccaggctcctggcacaaagaagtgtggacacatggcgggcaaggtcctggtgcccatcagcgagcacatcaaccgcttggttgccattcgggcgcaggccgacatcatgggtgtcgaccttctcgcaattgcgcgtaccgatgccgaggctgccacgctgatcacgaccagcatcgacccccgtgaccacgccttcatcctcggctgcacaaacccgagcctgcagccgcttgccgatctcatgaacactgcagagcagtctggaaagactggcgatcaactgcaggccattgaggacgagtggatggcaaaggcaaacctgaagcgcttcgacgacgcagttgttgacgtgatcaactcttcctcgtccattcgcaacccgaaggatgtggccgcaaaatacctgcaggccgccaagggcaagagcaacagggaagccagagccattgcaagcagcttgggcgttcccgaaatctttttcgactgggactcgccccgcacgcgtgagggatacttccgcatcaagggtggctgtgattgcgccatcaaccgtgccattgcctacgcgccatacgccgatgctatctggatggagagcaagctgcctgactacgaacaggcgaaggagtttgccgagggcgtgcacgctgtgtaccccgagcaaaaacttgcgtacaacctttcaccttccttcaactggaagacggccatgccgagagacgagcaggagacgtacatcagacgcctggcgggtctgggctactgctggcagttcatcacgctcgcgggtctgcacacgacggcgctcatcagcgaccgcttcgcgcgtgcgtactccgaggtcggcatgagggcgtatggcgagcttgtgcaggagcccgagatggagcttggcgtcgatgtcgtcaagcaccaaaagtggagtggcgcgacgtatgtcgacgagctgcagaagatggtgacgggtggtgtgagcagcaccgctgccatgggcaagggagtgacagaagaccaattccactga

SEQ ID NO: 134278 - protein, 547 aa, Magnaporthe grisea
MASKNMVNPAVEPSMEDDLFAREVAEVKQWWSDPRWRYTKRPFTAEQIVSKRGNLKIEYPSNAQSKKLWKILEGRFQKRDASYTYGCLEPTMVTQMAKYLDTVYVSGWQSSSTASSSDEPGPDLADYPYTTVPNKVSHLFMAQLFHDRKQRHERLSAPKSERSKLQNIDYLRPIIADADTGHGGLTAVMKLTKLFIEKGAAGIHIEDQAPGTKKCGHMAGKVLVPISEHINRLVAIRAQADIMGVDLLAIARTDAEAATLITTSIDPRDHAFILGCTNPSLQPLADLMNTAEQSGKTGDQLQAIEDEWMAKANLKRFDDAVVDVINSSSSIRNPKDVAAKYLQAAKGKSNREARAIASSLGVPEIFFDWDSPRTREGYFRIKGGCDCAINRAIAYAPYADAIWMESKLPDYEQAKEFAEGVHAVYPEQKLAYNLSPSFNWKTAMPRDEQETYIRRLAGLGYCWQFITLAGLHTTALISDRFARAYSEVGMRAYGELVQEPEMELGVDVVKHQKWSGATYVDELQKMVTGGVSSTAAMGKGVTEDQFH

SEQ ID NO: 134279 - DNA, 1647 bp, Neurospora crassa
  CDS (1)..(1647)
atggctgccaacaacatggtcaaccccgccgtggatcccgctctcgaggacgagcttttcgccaaggaggtcgaggaggtcaagaagtggtggagcgactcacgctggaggcaaaccaagcgccctttcaccgctgagcagatcgtctccaagcgtggaaacctcaagatcgagtacgccagcaatgcgcaggccaagaagctttggaagatcctcgaggaccgcttcgctaagcgcgatgcctcttacacatacggctgcttggagcctaccatggtgacccagatggccaagtacctcgataccgtctacgtttccggctggcaatcatcctcgaccgcctcctcttctgacgagcccggcccggatcttgctgattacccctacaccaccgtccccaacaaggttggccacctcttcatggcccagctcttccacgaccgcaagcagcgccaggagcgcctctccgtccccaaggaccagcgcgagaagctcgccaacatcgactacctccgccccatcgttgccgatgctgacaccggtcacggtggtctgaccgccgtcatgaagctcaccaagctcttcattgagaagggtgctgccggtattcacattgaggaccaggcccctggtaccaagaagtgcggccacatggccggcaaggtcctcgttcccatccaggagcacatcaaccgtctcgtcgccatccgtgcccaggctgatatcatgggctccgacctcctctgcattgcccgtaccgatgccgaggccgccaccctcatcaccaccaccatcgacccccgcgaccacgcttttatcctcggctgcaccaaccccgacctcgagcccctcgccgacctcatgatgaaggctgaagccgagggcaagaccggtgcccagctccaggccattgaggacgactggctcgccaaggccgaccttaagcgctttgacgaggccgtccttgatgtcatcgccaagggcaagttttcaaacgccaaggacctcgctgccaagtaccaagccgccgtcaagggcaagcagatctccaaccgcgaggcgcgcgccattgcccgccagctgctcggccaggagatcttctttgactgggagtccccccgtacgcgcgagggctactaccgcctcaagggcggctgcgactgctccatcaaccgcgccatctcctacgctccctactgcgacgccatctggatggagtccaagcttcccgactacgctcaggccgaggagttcgccaagggcgtccacgccgtctggcccgagcagaagctcgcctacaacctttctccctccttcaactggaagaccgccatgggccgcgacgaccaagagacgtacatccgccgcctcgccaagctcggctactgctggcagttcatcaccctcgcgggcctgcacaccacggcgctcatcagcgaccagttcgccaaggcgtacagcaagatcggcatgcgcgcctacggcgagctcgtccaggagcccgaaattgacaacggcgtcgatgtcgtcaagcaccagaagtggtcgggcgccacgtacgtggatgagctgcagaagatggtcaccggtggtgtcagctcgacggcggcgatgggcaagggtgtcactgaggatcagttccactag

SEQ ID NO: 134280 - protein, 548 aa, Neurospora crassa
MAANNMVNPAVDPALEDELFAKEVEEVKKWWSDSRWRQTKRPFTAEQIVSKRGNLKIEYASNAQAKKLWKILEDRFAKRDASYTYGCLEPTMVTQMAKYLDTVYVSGWQSSSTASSSDEPGPDLADYPYTTVPNKVGHLFMAQLFHDRKQRQERLSVPKDQREKLANIDYLRPIVADADTGHGGLTAVMKLTKLFIEKGAAGIHIEDQAPGTKKCGHMAGKVLVPIQEHINRLVAIRAQADIMGSDLLCIARTDAEAATLITTTIDPRDHAFILGCTNPDLEPLADLMMKAEAEGKTGAQLQAIEDDWLAKADLKRFDEAVLDVIAKGKFSNAKDLAAKYQAAVKGKQISNREARAIARQLLGQEIFFDWESPRTREGYYRLKGGCDCSINRAISYAPYCDAIWMESKLPDYAQAEEFAKGVHAVWPEQKLAYNLSPSFNWKTAMGRDDQETYIRRLAKLGYCWQFITLAGLHTTALISDQFAKAYSKIGMRAYGELVQEPEIDNGVDVVKHQKWSGATYVDELQKMVTGGVSSTAAMGKGVTEDQFH

SEQ ID NO: 134281 - DNA, 1653 bp, Pichia pastoris
  CDS (1)..(1653)
atgtcaggaccttacactaagattgacttagacaaggaagagcaagacttccaaaaccaaatcaaggagattgaggaatggtggtctcagccacgttgggccaagaccaagcgtatttacaacgctgaggacattgcaaagagaagatcctctttgtcttctgttccagccagtaaccagcaagcgcagaagcttttcaagctgttaggggaacacgccaagaacgagaccgcttctttcaccttcggagctttggatcctatccacatcactcagatggctaagtatttggacacgatttacgtttccggatggcaatgttcttctactgcatccacttctaacgaaccttccccagatttggctgactaccctatggacaccgttccaaacaaagttgagcgacttattcttcggcgtcaattgtttcacgacagaaagcaaagagaagagagattgtctgtttccaagcaggaaagagctaagttgccttacactgacttcttgagaccaatcattgccgatgccgacactggacatggaggtattaccgccattatcaagttgaccaagatgttcatcgaaagaggtgcagctggtattcatattgaggaccaggctccaggtaccaagaagtgtggacacatggccggtaaggtcttagtccccgttcaagagcacatcaacagattagtcgctatcagaacctctgctgatttgttccaaagtgacttgatcgctgtcgccagaactgactctgaagctgctactcttttgacctccactatcgataagagggatcattacttcgtcattggtgctaccaacccagacattcctgacttgatcgatgttttgaccgaggctgaattgcaaggtaagtacggtgccgagctctctcaattggaggctgactggagtaagaaagctggcctgaaattataccacgaggctgtctttgaagcaattgacaagtcatcctccgtcaaggataagcaagccgcaaaggacaagttttctgccaaggttggcccattgaccggaacatcccacaaggaagctgctaagttggccaaggaaattcttggtgaggaagttttctttgactgggaggctccaaaggtcagagagggttactaccgttaccaaggtggtaccgagtgtgccatcatgagagccagagcttacagtccatatgctgacttggtttggatggagtctaaggttccagactaccaggaagctgttgacttcgccaagggtgtcaagacctttacccagaccaattggttggcctacaacttgtctccatcattcaactggaacaaggccatgtctcctgacgaacaagagacttatatcaagagattgggtaaattgggatacaactggcaattcattactcttgctgttctacacaccactgctttggctgtcgacaacttctctagagattaccagaagattggtatgaaggcttacggacaacaagtccaggctaaggaaattgaggacggtatcgaaattgtcaagcaccagaaatggtcaggagccgagtacattgatggtctgttgaaattaaccactggtggtttgagttctacagctgccatgggtgccggtgtgactgaagatcaattcaaggaccattaa

SEQ ID NO: 134282 - protein, 550 aa, Pichia pastoris
MSGPYTKIDLDKEEQDFQNQIKEIEEWWSQPRWAKTKRIYNAEDIAKRRSSLSSVPASNQQAQKLFKLLGEHAKNETASFTFGALDPIHITQMAKYLDTIYVSGWQCSSTASTSNEPSPDLADYPMDTVPNKVERLILRRQLFHDRKQREERLSVSKQERAKLPYTDFLRPIIADADTGHGGITAIIKLTKMFIERGAAGIHIEDQAPGTKKCGHMAGKVLVPVQEHINRLVAIRTSADLFQSDLIAVARTDSEAATLLTSTIDKRDHYFVIGATNPDIPDLIDVLTEAELQGKYGAELSQLEADWSKKAGLKLYHEAVFEAIDKSSSVKDKQAAKDKFSAKVGPLTGTSHKEAAKLAKEILGEEVFFDWEAPKVREGYYRYQGGTECAIMRARAYSPYADLVWMESKVPDYQEAVDFAKGVKTFTQTNWLAYNLSPSFNWNKAMSPDEQETYIKRLGKLGYNWQFITLAVLHTTALAVDNFSRDYQKIGMKAYGQQVQAKEIEDGIEIVKHQKWSGAEYIDGLLKLTTGGLSSTAAMGAGVTEDQFKDH

SEQ ID NO: 134283 - DNA, 1596 bp, Pseudomonas aeruginosa
  CDS (1)..(1596): transl_table=11
atgtccgcatatcagaacgagatcaaggcagttgccgcgctgaaagagaagaacggcagcagctggagcgcgatcaaccccgagtacgcagctcgcatgcgtatccagaaccgcttcaagaccggcctggatatcgccaagtacaccgcggccatcatgcgcaaggacatggccgaatacgatgcggactcctccgtctacacccagtcgctgggttgctggcacggcttcatcgggcagcagaagctgatctcgatcaagaagcacctgaagaccaccaacaagcgctacctctacctgtccggttggatggtcgccgcgctgcgctccgacttcggcccgctgccggaccagtccatgcacgagaaaaccgcggtttccggcctgatcgaagagctgtacaccttcctgcgccaggctgacgcccgcgagctggacctgctgttcaccggcctggacgctgcccgcgccgctggcgacaaggccaaggaagccgagctgctggcccagatcgacaacttcgaaacccacgtggtgccgatcatcgccgacatcgacgccggcttcggcaacgccgaggcgacctacctgctggccaagaagatgatcgaagccggcgcctgctgcatccagatcgagaaccaggtgtccgacgagaagcagtgcggccaccaggacggcaaggtcaccgttccgcacatcgacttcctcgccaagatcaatgccgtacgctacgccttcctcgagctgggcgtggacgatggcgtgatcgtcgcccgtaccgactccctgggcgccggcctgaccaagcagatcgccgtgaccaacgagccgggcgacctgggcgacctgtacaactccttcctggattgcgaagaaatctccgagtccgagctgggcaacggcgacgtcgtgatcaagcgcgaaggcaagctgctgcgtccgaagcgcctggcttccaacctgttccagttccgcaagggcaccggcgaagatcgctgcgtcctggactgcatcacctcgctgcagaacggcgccgacctgctctggatcgaaaccgagaagccgcacgtcggccagatcaaggcaatggtcgatcgcatccgcgaagtgattccgaacgccaagctggtctacaacaacagcccgtccttcaactggaccctgaacttccgccagcaggtgttcgatgcgttcgtcgccgaaggcaaggacgtttccgcctacgaccgcaacaagctgatgagcgtcgagtacgacgacaccgagctggccaaggtcgccgacgagaagatccgcaccttccagcgcgatggctcggcccacgccggcatcttccaccacctgatcaccctgccgacctaccacaccgccgcgctgtccaccgacaacctggccaagggctacttcgccgacgaaggcatgctggcctacgtgaagggcgtgcagcgccaggaactgcgccagggcatcgcctgcgtcaagcaccagaacatggcgggctccgacatcggcgacaaccataaagagtacttcgcaggcgaagccgctctgaaggccagcggcaaagacaacaccatgaaccagttccactaa

SEQ ID NO: 134284 - protein, 531 aa, Pseudomonas aeruginosa
MSAYQNEIKAVAALKEKNGSSWSAINPEYAARMRIQNRFKTGLDIAKYTAAIMRKDMAEYDADSSVYTQSLGCWHGFIGQQKLISIKKHLKTTNKRYLYLSGWMVAALRSDFGPLPDQSMHEKTAVSGLIEELYTFLRQADARELDLLFTGLDAARAAGDKAKEAELLAQIDNFETHVVPIIADIDAGFGNAEATYLLAKKMIEAGACCIQIENQVSDEKQCGHQDGKVTVPHIDFLAKINAVRYAFLELGVDDGVIVARTDSLGAGLTKQIAVTNEPGDLGDLYNSFLDCEEISESELGNGDVVIKREGKLLRPKRLASNLFQFRKGTGEDRCVLDCITSLQNGADLLWIETEKPHVGQIKAMVDRIREVIPNAKLVYNNSPSFNWTLNFRQQVFDAFVAEGKDVSAYDRNKLMSVEYDDTELAKVADEKIRTFQRDGSAHAGIFHHLITLPTYHTAALSTDNLAKGYFADEGMLAYVKGVQRQELRQGIACVKHQNMAGSDIGDNHKEYFAGEAALKASGKDNTMNQFH

SEQ ID NO: 134285 - DNA, 1674 bp, Saccharomyces cerevisiae
  CDS (1)..(1674)
atgcctatccccgttggaaatacgaagaacgattttgcagctttacaagcaaaactagatgcagatgctgccgaaattgagaaatggtggtctgactcacgttggagtaagactaagagaaattattcagccagagatattgctgttagacgcgggacattcccaccaatcgaatacccatcttcggtcatggccagaaaattattcaaggtattagagaagcatcacaatgagggtacagtctctaaaactttcggtgccctagatcctgtccagatttctcaaatggcaaaatacttagacacaatctatatttctggttggcagtgttcatcaactgcttccacctcaaatgaacctggtccagacttagctgattatccaatggacaccgttccaaacaaagtggaacatttgttcaaggcccaattgtttcacgacagaaaacaactagaggcacggtcaaaggctaaatctcaggaagaactcgatgagatgggtgccccaattgactacctaacaccaattgtcgctgatgcagacgcaggccacggcggtttaaccgcagtcttcaaattgaccaagatgttcattgagcgtggtgctgctgggatccacatggaagaccagacatctacaaataagaaatgtgggcatatggcaggaagatgtgttatacccgttcaggaacatgttaacagattggtgactattagaatgtgtgctgatatcatgcattctgacttaattgtcgttgctaggactgattcagaagcagccactttgattagctcaaccatcgataccagagatcattatttcattgtcggtgccaccaatccaaatatcgagccatttgccgaagttttaaatgatgccatcatgagtggtgcatcaggacaagaactagctgacattgaacaaaaatggtgtagagacgctggactcaagttattccatgaagccgtcattgatgaaattgaaagatcagccctgtcaaataagcaagaattgattaagaaattcacctctaaagtgggtccattgactgaaacatcccacagagaagccaagaagctcgctaaagaaattcttggccacgaaattttcttcgactgggagctaccacgcgtaagggaagggttgtaccgttacagaggtgggacgcaatgttctatcatgagggcccgtgcatttgctccatatgctgatttggtatggatggaatctaactacccagacttccaacaggccaaggagtttgcagaaggtgttaaagagaaattccctgaccaatggctagcttacaacttgtctccatcctttaactggccaaaagccatgtccgttgatgaacaacacaccttcatccaaaggctgggtgatctaggttacatctggcaatttatcacattggccggtttacacactaacgctttagctgtccataacttctctcgtgactttgccaaggatgggatgaaagcttatgcccagaatgttcagcagagggaaatggacgatggtgttgatgtgttgaaacatcaaaaatggtctggtgcggagtacatcgatgggttattgaagttagctcaaggtggtgttagcgcaacagctgctatgggaaccggtgtcacagaagatcaattcaaagaaaatggcgtaaagaaatag

SEQ ID NO: 134286 - protein, 557 aa, Saccharomyces cerevisiae
MPIPVGNTKNDFAALQAKLDADAAEIEKWWSDSRWSKTKRNYSARDIAVRRGTFPPIEYPSSVMARKLFKVLEKHHNEGTVSKTFGALDPVQISQMAKYLDTIYISGWQCSSTASTSNEPGPDLADYPMDTVPNKVEHLFKAQLFHDRKQLEARSKAKSQEELDEMGAPIDYLTPIVADADAGHGGLTAVFKLTKMFIERGAAGIHMEDQTSTNKKCGHMAGRCVIPVQEHVNRLVTIRMCADIMHSDLIVVARTDSEAATLISSTIDTRDHYFIVGATNPNIEPFAEVLNDAIMSGASGQELADIEQKWCRDAGLKLFHEAVIDEIERSALSNKQELIKKFTSKVGPLTETSHREAKKLAKEILGHEIFFDWELPRVREGLYRYRGGTQCSIMRARAFAPYADLVWMESNYPDFQQAKEFAEGVKEKFPDQWLAYNLSPSFNWPKAMSVDEQHTFIQRLGDLGYIWQFITLAGLHTNALAVHNFSRDFAKDGMKAYAQNVQQREMDDGVDVLKHQKWSGAEYIDGLLKLAQGGVSATAAMGTGVTEDQFKENGVKK

SEQ ID NO: 134287 - DNA, 1719 bp, Oryza sativa
  CDS (1)..(1719)
atgtcgtcgccgttctccgtgccatctctgatcatggaggaggaagggcggttcgaggcggaggtggcggaggtggaggcgtggtggggaacggacaggttccggctcaccaagcgcccctacacggcgcgcgacgtcgcgctcctccgcggcacgctccggcagagctacgcctccggcgacatggccaagaagctgtggcgcacgctcagggcgcaccaggccaacggcacggcgtcgcgcaccttcggcgcgctcgaccccgtccaggtcgccatgatggcgaagcacctcgacaccgtctacgtctccggatggcagtgctcgtcgacgcacacctcgacgaacgagccgggccccgacctcgccgactacccctacgacaccgtccccaacaaggtcgagcacctcttcttcgcccagctctaccacgaccgcaagcagcgggaggcgcgcatgtcgatgtccagggcggagcgcgcgcacgagccgtacgtggattatcttaagcccatcatcgccgacggcgacaccgggttcggcggcgccacggccaccgtcaagctgtgcaagctgttcgtcgagcgcggggcggccggggttcacctcgaggaccagtcgtcggtgaccaagaagtgcgggcacatggcggggaaggtgctcgtcgccgtctccgagcatgtcaaccgcctcgtcgccgcgcggctccagttcgacatcatgggcgtcgagaccgtcctcgtcgcgcgcaccgacgccgtcgccgccacgctgatccagaccaacgtcgacgcgcgcgaccaccagttcatcctcggcgcgaccaacccgcgcctcaggaaccggagcctcgccgccgtcctctccgacgccatgtcggcgggcaagaacggcagggagctccaggccatcgaggacgagtggctcgccacggcgcagctcaagaccttctctgactgcgtcagggacgccatcgcgagcctcaacgccaccgacgccgacaagcagcgcaagctccaggagtggagcgccgccaccagccacgacaagtgcgtgcccctcgagcaggcgcgcgacatcgccgcgggcctcggcgtcacatccctgttctgggactgggacctgccgagaacacgggaggggttctaccgcttccgcggctccgtcgcggcggccgtcgtccgcggccgcgcgttcgcgccgcacgccgacgtgctctggatggagacgtcgagccccaacatcgccgagtgcacggcgttcgccgagggcgtgagggcggcgagcccgggcgcgatgctggcgtacaacctctcgccgtccttcaactgggacgcctccggcatgacggacgccgacatgtcggagttcatcccgcgcgtggcgaggctggggtacgtgtggcagttcatcacgctcgccgggttccacgccgacgcgctcgtcacggacacgttcgcccgcgacttcgcgcggcgcggcatgctggcgtacgtggagaggatccagagggaggagaggagcaacggcgtggagacgctgcagcaccagaagtggtcgggcgccaacttctacgacagggtgctcaagaccgtgcagggtggcatctcctctaccgccgccatgggcaaaggagttactgaagagcagttcaagggctcatggacagggcctggaagtgagagcagcagccatgttcttgccaaatccaggatgtga

SEQ ID NO: 134288 - protein, 572 aa, Oryza sativa
MSSPFSVPSLIMEEEGRFEAEVAEVEAWWGTDRFRLTKRPYTARDVALLRGTLRQSYASGDMAKKLWRTLRAHQANGTASRTFGALDPVQVAMMAKHLDTVYVSGWQCSSTHTSTNEPGPDLADYPYDTVPNKVEHLFFAQLYHDRKQREARMSMSRAERAHEPYVDYLKPIIADGDTGFGGATATVKLCKLFVERGAAGVHLEDQSSVTKKCGHMAGKVLVAVSEHVNRLVAARLQFDIMGVETVLVARTDAVAATLIQTNVDARDHQFILGATNPRLRNRSLAAVLSDAMSAGKNGRELQAIEDEWLATAQLKTFSDCVRDAIASLNATDADKQRKLQEWSAATSHDKCVPLEQARDIAAGLGVTSLFWDWDLPRTREGFYRFRGSVAAAVVRGRAFAPHADVLWMETSSPNIAECTAFAEGVRAASPGAMLAYNLSPSFNWDASGMTDADMSEFIPRVARLGYVWQFITLAGFHADALVTDTFARDFARRGMLAYVERIQREERSNGVETLQHQKWSGANFYDRVLKTVQGGISSTAAMGKGVTEEQFKGSWTGPGSESSSHVLAKSRM

SEQ ID NO: 134289 - DNA, 1686 bp, Oryza sativa
  CDS (1)..(1686)
atggaggaggaagggcggttcgaggcggaggtggcggaggtggaggcgtggtggggaacggacaggttccggctcaccaagcgcccctacacggcgcgcgacgtcgcgctcctccgcggcacgctccggcagagctacgcctccggcgacatggccaagaagctgtggcgcacgctcagggcgcaccaggccaacggcacggcgtcgcgcaccttcggcgcgctcgaccccgtccaggtcgccatgatggcgaagcacctcgacaccgtctacgtctccggatggcagtgctcgtcgacgcacacctcgacgaacgagccgggccccgacctcgccgactacccctacgacaccgtccccaacaaggtcgagcacctcttcttcgcccagctctaccacgaccgcaagcagcgggaggcgcgcatgtcgatgtccagggcggagcgcgcgcacgagccgtacgtggattatcttaagcccatcatcgccgacggcgacaccgggttcggcggcgccacggccaccgtcaagctgtgcaagctgttcgtcgagcgcggggcggccggggttcacctcgaggaccagtcgtcggtgaccaagaagtgcgggcacatggcggggaaggtgctcgtcgccgtctccgagcatgtcaaccgcctcgtcgccgcgcggctccagttcgacatcatgggcgtcgagaccgtcctcgtcgcgcgcaccgacgccgtcgccgccacgctgatccagaccaacgtcgacgcgcgcgaccaccagttcatcctcggcgcgaccaacccgcgcctcaggaaccggagcctcgccgccgtcctctccgacgccatgtcggcgggcaagaacggcagggagctccaggccatcgaggacgagtggctcgccacggcgcagctcaagaccttctctgactgcgtcagggacgccatcgcgagcctcaacgccaccgacgccgacaagcagcgcaagctccaggagtggagcgccgccaccagccacgacaagtgcgtgcccctcgagcaggcgcgcgacatcgccgcgggcctcggcgtcacatccctgttctgggactgggacctgccgagaacacgggaggggttctaccgcttccgcggctccgtcgcggcggccgtcgtccgcggccgcgcgttcgcgccgcacgccgacgtgctctggatggagacgtcgagccccaacatcgccgagtgcacggcgttcgccgagggcgtgagggcggcgagcccgggcgcgatgctggcgtacaacctctcgccgtccttcaactgggacgcctccggcatgacggacgccgacatgtcggagttcatcccgcgcgtggcgaggctggggtacgtgtggcagttcatcacgctcgccgggttccacgccgacgcgctcgtcacggacacgttcgcccgcgacttcgcgcggcgcggcatgctggcgtacgtggagaggatccagagggaggagaggagcaacggcgtggagacgctgcagcaccagaagtggtcgggcgccaacttctacgacagggtgctcaagaccgtgcagggtggcatctcctctaccgccgccatgggcaaaggagttactgaagagcagttcaagggctcatggacagggcctggaagtgagagcagcagccatgttcttgccaaatccaggatgtga

SEQ ID NO: 134290 - protein, 561 aa, Oryza sativa
MEEEGRFEAEVAEVEAWWGTDRFRLTKRPYTARDVALLRGTLRQSYASGDMAKKLWRTLRAHQANGTASRTFGALDPVQVAMMAKHLDTVYVSGWQCSSTHTSTNEPGPDLADYPYDTVPNKVEHLFFAQLYHDRKQREARMSMSRAERAHEPYVDYLKPIIADGDTGFGGATATVKLCKLFVERGAAGVHLEDQSSVTKKCGHMAGKVLVAVSEHVNRLVAARLQFDIMGVETVLVARTDAVAATLIQTNVDARDHQFILGATNPRLRNRSLAAVLSDAMSAGKNGRELQAIEDEWLATAQLKTFSDCVRDAIASLNATDADKQRKLQEWSAATSHDKCVPLEQARDIAAGLGVTSLFWDWDLPRTREGFYRFRGSVAAAVVRGRAFAPHADVLWMETSSPNIAECTAFAEGVRAASPGAMLAYNLSPSFNWDASGMTDADMSEFIPRVARLGYVWQFITLAGFHADALVTDTFARDFARRGMLAYVERIQREERSNGVETLQHQKWSGANFYDRVLKTVQGGISSTAAMGKGVTEEQFKGSWTGPGSESSSHVLAKSRM

SEQ ID NO: 134291 - DNA, 1731 bp, Glycine max
  CDS (1)..(1731)
atggctgcatcattatttatgccttcatccatagtggaggaagaagcgaggttcgaagccgaagtggcggaggtgcaagcatggtggaactctgagaggttcaggctaacaaaaaggccatacacagcaagagatgtagtgtccctccgaggcaacctcagacaaacctatgcctcgaacgagatggcgaaaaagctatggcgcctcctgaagaaccaccaagctaatggaacagcctcgaggacttttggtgcacttgatcctgttcaggtcacccaaatggccaagcacttggatacgatctatgtctcagggtggcagtgttcagccacacacaccacgagcaacgagcccggtcctgaccttgctgattacccttatgacactgtcccaaacaaggttgagcacctcttctttgctcagcagtaccatgacaggaagcaaaaagaggagaggatgagaatgagcagggaagagagggcaaggacaccttatgttgattacttgaggccaatcatagctgatggtgacactggctttggtggcaccacagcaactgtcaagctatgcaagctctttgttgagagaggtgctgctggaatccacattgaggaccagtcttcagtgaccaaaaaatgtggtcacatggctgggaaagtgcttgttgccatcagtgaacacatcaacaggcttgtggctgcaaggcttcagtttgatgtcatgggggtggaaactgttctggtggcaagaacagatgcagaagctgctaatttgattcaatcaaacattgacacaagggaccatcaatttatcttgggagtgaccaaccccaaccttaaggggaagagcttagcaactcttatgcaacaaggcatggctgctggaaaaaatggagctgagcttcaggctttggaggatgagtggctctcaaaggcacagttgaagactctctcagaagcagttgtggaggcaattgagaggcagaacaacattggagaggaagaaaaaagaaggaagctaaatgagtggatgcaccattcaagctatgaaaggtgcctttctaatgaggaaggtagggaaattgctgaaaagttaggagtgagaaacctcttttgggattgggacttgcctaggactagagaaggtttttataggttcaaaggttcagtgactgcatcagttgttagaggttgtgctttttctccacatgctgatgttatatggatggagactgcaagcccaaatgtggttgagtgcacagagttttccgagggggttaggtcaaagcaccctcagatgatgcttggatacaacctctctccatctttcaactgggatgcttctggaatgagtgatgaacaaatgaaggatttcattccaaagattgcaaagttggggtatgtgtggcagttcatcactgtgggaggtcttcattccaatgcactcataacttcaacatttgcaagggattttgccaataggggaatgctggcttatgtggagaggattcagagagaggagaggaacaatggggttgacacactagctcaccaaaaatgggctggtgctaattactatgataggtacctcaagactgtccagggaggtgtggcttcaactgctgcaatgggaaaaggagtaactgaagagcagtttaaagaatcatggactagatcaggagctgtaaacattgatagaggcagtattgtggttgctaaggccagaatgtga

SEQ ID NO: 134292 - protein, 576 aa, Glycine max
MAASLFMPSSIVEEEARFEAEVAEVQAWWNSERFRLTKRPYTARDVVSLRGNLRQTYASNEMAKKLWRLLKNHQANGTASRTFGALDPVQVTQMAKHLDTIYVSGWQCSATHTTSNEPGPDLADYPYDTVPNKVEHLFFAQQYHDRKQKEERMRMSREERARTPYVDYLRPIIADGDTGFGGTTATVKLCKLFVERGAAGIHIEDQSSVTKKCGHMAGKVLVAISEHINRLVAARLQFDVMGVETVLVARTDAEAANLIQSNIDTRDHQFILGVTNPNLKGKSLATLMQQGMAAGKNGAELQALEDEWLSKAQLKTLSEAVVEAIERQNNIGEEEKRRKLNEWMHHSSYERCLSNEEGREIAEKLGVRNLFWDWDLPRTREGFYRFKGSVTASVVRGCAFSPHADVIWMETASPNVVECTEFSEGVRSKHPQMMLGYNLSPSFNWDASGMSDEQMKDFIPKIAKLGYVWQFITVGGLHSNALITSTFARDFANRGMLAYVERIQREERNNGVDTLAHQKWAGANYYDRYLKTVQGGVASTAAMGKGVTEEQFKESWTRSGAVNIDRGSIVVAKARM

SEQ ID NO: 134293 - DNA, 21 bp, Artificial sequence
  primer
atgtctgcatatcaaaacgag

SEQ ID NO: 134294 - DNA, 20 bp, Artificial sequence
  primer
tcaatggaactggttcatgg

SEQ ID NO: 134295 - protein, 595 aa, Artificial sequence
  consensus sequence
  Variant (2)..(9): Xaa in position 2 to 9 is any amino acid
  Variant (11)..(47): Xaa in position 11 to 47 is any amino acid
  Variant (48)..(51): Xaa in position 48 to 51 is any or no amino acid
  Variant (53)..(60): Xaa in position 53 to 60 is any amino acid
  Variant (62)..(69): Xaa in position 62 to 69 is any amino acid
  Variant (70)..(79): Xaa in position 70 to 79 is any or no amino acid
  Variant (81)..(81): Xaa in position 81 is any amino acid
  Variant (85)..(96): Xaa in position 85 to 96 is any amino acid
  Variant (97)..(97): Xaa in position 97 is any or no amino acid
  Variant (100)..(107): Xaa in position 100 to 107 is any amino acid
  Variant (109)..(138): Xaa in position 109 to 138 is any amino acid
  Variant (139)..(162): Xaa in position 139 to 162 is any or no amino acid
  Variant (165)..(165): Xaa in position 165 is any amino acid
  Variant (168)..(170): Xaa in position 168 to 170 is any amino acid
  Variant (174)..(180): Xaa in position 174 to 180 is any amino acid
  Variant (182)..(182): Xaa in position 182 is any amino acid
  Variant (184)..(185): Xaa in position 184 to 185 is any amino acid
  Variant (188)..(188): Xaa in position 188 is any amino acid
  Variant (191)..(195): Xaa in position 191 to 195 is any amino acid
  Variant (197)..(197): Xaa in position 197 is any amino acid
  Variant (199)..(202): Xaa in position 199 to 202 is any amino acid
  Variant (204)..(204): Xaa in position 204 is any amino acid
  Variant (208)..(209): Xaa in position 208 to 209 is any amino acid
  Variant (213)..(213): Xaa in position 213 is any amino acid
  Variant (216)..(224): Xaa in position 216 to 224 is any amino acid
  Variant (226)..(226): Xaa in position 226 is any amino acid
  Variant (228)..(233): Xaa in position 228 to 233 is any amino acid
  Variant (235)..(240): Xaa in position 235 to 240 is any amino acid
  Variant (241)..(241): Xaa in position 241 is any or no amino acid
  Variant (246)..(248): Xaa in position 246 to 248 is any amino acid
  Variant (250)..(250): Xaa in position 250 is any amino acid
  Variant (252)..(267): Xaa in position 252 to 267 is any amino acid
  Variant (268)..(370): Xaa in position 268 to 370 is any or no amino acid
  Variant (372)..(381): Xaa in position 372 to 381 is any amino acid
  Variant (383)..(397): Xaa in position 383 to 397 is any amino acid
  Variant (398)..(401): Xaa in position 398 to 401 is any or no amino acid
  Variant (403)..(404): Xaa in position 403 to 404 is any amino acid
  Variant (406)..(406): Xaa in position 406 is any amino acid
  Variant (409)..(410): Xaa in position 409 to 410 is any amino acid
  Variant (412)..(427): Xaa in position 412 to 427 is any amino acid
  Variant (429)..(431): Xaa in position 429 to 431 is any amino acid
  Variant (433)..(433): Xaa in position 433 is any amino acid
  Variant (436)..(436): Xaa in position 436 is any amino acid
  Variant (443)..(447): Xaa in position 443 to 447 is any amino acid
  Variant (448)..(488): Xaa in position 448 to 488 is any or no amino acid
  Variant (490)..(494): Xaa in position 490 to 494 is any amino acid
  Variant (496)..(502): Xaa in position 496 to 502 is any amino acid
  Variant (503)..(503): Xaa in position 503 is any or no amino acid
  Variant (505)..(509): Xaa in position 505 to 509 is any amino acid
  Variant (513)..(515): Xaa in position 513 to 515 is any amino acid
  Variant (517)..(525): Xaa in position 517 to 525 is any amino acid
  Variant (527)..(528): Xaa in position 527 to 528 is any amino acid
  Variant (530)..(532): Xaa in position 530 to 532 is any amino acid
  Variant (533)..(533): Xaa in position 533 is any or no amino acid
  Variant (536)..(537): Xaa in position 536 to 537 is any amino acid
  Variant (539)..(541): Xaa in position 539 to 541 is any amino acid
  Variant (542)..(542): Xaa in position 542 is any or no amino acid
  Variant (544)..(545): Xaa in position 544 to 545 is any amino acid
  Variant (547)..(549): Xaa in position 547 to 549 is any amino acid
  Variant (550)..(553): Xaa in position 550 to 553 is any or no amino acid
  Variant (555)..(559): Xaa in position 555 to 559 is any amino acid
  Variant (562)..(564): Xaa in position 562 to 564 is any amino acid
  Variant (566)..(569): Xaa in position 566 to 569 is any amino acid
  Variant (571)..(577): Xaa in position 571 to 577 is any amino acid
  Variant (579)..(592): Xaa in position 579 to 592 is any amino acid
  Variant (593)..(593): Xaa in position 593 is any or no amino acid
WXXXXXXXXAXXXXXXXXXXXXXXXXXXXXXXXXXXXXXXXXXXXXXXXXXGXXXXXXXXQXXXXXXXXXXXXXXXXXXYXSGWXXXXXXXXXXXXXPDXXXXXXXXVXXXXXXXXXXXXXXXXXXXXXXXXXXXXXXXXXXXXXXXXXXXXXXXXXXXXXXPIXADXXXGFGXXXXXXXLXKXXIEXGAXXXXXEXQXXXXKXCGHXXGKVXVPXXXXXXXXXAXRXXXXXXGXXXXXXXARTDXXXAXLXXXXXXXXXXXXXXXXXXXXXXXXXXXXXXXXXXXXXXXXXXXXXXXXXXXXXXXXXXXXXXXXXXXXXXXXXXXXXXXXXXXXXXXXXXXXXXXXXXXXXXXXXXXXXXXXXXXXXXXRXXXXXXXXXXGXXXXXXXXXXXXXXXXXXXDXXWXETXXPXXXXXXXXXXXXXXXXPXXXLXYNXSPSFNWXXXXXXXXXXXXXXXXXXXXXXXXXXXXXXXXXXXXXXXXXXXXXXDXXXXXFXXXXXXXXGXXXXXITLXXXHXXXXXXXXXAXXYXXXXGMXXYXXXXQXXEXXXXXXXGXXXXXHQXXXGXXXXDXXXXXXXGXXXXXXXXXXXXXXXQF

SEQ ID NO: 134296 - protein, 43 aa, Artificial sequence
  protein pattern
  Variant (3)..(3): Xaa in position 3 is any or no amino acid
  Variant (5)..(5): Xaa in position 5 is any or no amino acid
  Variant (7)..(7): Xaa in position 7 is any amino acid
  Variant (9)..(11): Xaa in position 9 to 11 is any amino acid
  Variant (13)..(19): Xaa in position 13 to 19 is any amino acid
  Variant (20)..(20): Xaa in position 20 is Phe, Leu or Met
  Variant (21)..(23): Xaa in position 21 to 23 is any amino acid
  Variant (24)..(24): Xaa in position 24 is Ile, Met or Val
  Variant (25)..(28): Xaa in position 25 to 28 is any amino acid
  Variant (30)..(32): Xaa in position 30 to 32 is any amino acid
  Variant (34)..(34): Xaa in position 34 is Ala, Thr or Val
  Variant (37)..(37): Xaa in position 37 is any amino acid
ADXLXWXEXXXPXXXXXXXXXXXXXXXXPXXXLXYNXSPSFNW

SEQ ID NO: 134297 - protein, 17 aa, Artificial sequence
  protein pattern
  Variant (2)..(3): Xaa in position 2 to 3 is any amino acid
  Variant (4)..(4): Xaa in position 4 is Phe, His or Trp
  Variant (5)..(5): Xaa in position 5 is any amino acid
  Variant (6)..(6): Xaa in position 6 is Phe or Leu
  Variant (10)..(10): Xaa in position 10 is Ala or Pro
  Variant (11)..(11): Xaa in position 11 is Gly or Thr
  Variant (12)..(12): Xaa in position 12 is any amino acid
  Variant (14)..(14): Xaa in position 14 is any amino acid
  Variant (15)..(16): Xaa in position 15 to 16 is any or no amino acid
GXXXXXITLXXXHXXXL

SEQ ID NO: 134298 - protein, 16 aa, Artificial sequence
  protein pattern
  Variant (2)..(2): Xaa in position 2 is any amino acid
  Variant (3)..(4): Xaa in position 3 to 4 is any or no amino acid
  Variant (8)..(8): Xaa in position 8 is Ala, Gly or Ser
  Variant (9)..(9): Xaa in position 9 is any amino acid
  Variant (10)..(10): Xaa in position 10 is Ala or Gly
  Variant (12)..(12): Xaa in position 12 is Asp, Gly, Asn, Ser or Thr
  Variant (14)..(15): Xaa in position 14 to 15 is any or no amino acid
VXXXRTDXXXAXLXXT

SEQ ID NO: 134299 - DNA, 1701 bp, Escherichia coli
  CDS (1)..(1701): transl_table=11
atggcgattgcaattggcctcgattttggcagtgattctgtgcgagctttggcggtggactgcgctaccggtgaagagatcgccaccagcgtagagtggtatccccgttggcagaaagggcaattttgtgatgccccgaataaccagttccgtcatcatccgcgtgactacattgagtcaatggaagcggcactgaaaaccgtgcttgcagagcttagcgtcgaacagcgcgcagctgtggtcgggattggcgttgacagtaccggctcgacgcccgcaccgattgatgccgacggaaacgtgctggcgctgcgcccggagtttgccgaaaacccgaacgcgatgttcgtattgtggaaagaccacactgcggttgaagaagcggaagagattacccgtttgtgccacgcgccgggcaacgttgactactcccgctacattggtggtatttattccagcgaatggttctgggcaaaaatcctgcatgtgactcgccaggacagcgccgtggcgcaatctgccgcatcgtggattgagctgtgcgactgggtgccagctctgctttccggtaccacccgcccgcaggatattcgtcgcggacgttgcagcgccgggcataaatctctgtggcacgaaagctggggcggcctgccgccagccagtttctttgatgagctggacccgatcctcaatcgccatttgccttccccgctgttcactgacacttggactgccgatattccggtgggcaccttatgcccggaatgggcgcagcgtctcggcctgcctgaaagcgtggtgatttccggcggcgcgtttgactgccatatgggcgcagttggcgcaggcgcacagcctaacgcactggtaaaagttatcggtacttccacctgcgacattctgattgccgacaaacagagcgttggcgagcgggcagttaaaggtatttgcggtcaggttgatggcagcgtggtgcctggatttatcggtctggaagcaggccaatcggcgtttggtgatatctacgcctggtttggtcgcgtactcggctggccgctggaacagcttgccgcccagcatccggaactgaaaacgcaaatcaacgccagccagaaacaactgcttccggcgctgaccgaagcatgggccaaaaatccgtctctggatcacctgccggtggtgctcgactggtttaacggccgccgcacaccgaacgctaaccaacgcctgaaaggggtgattaccgatcttaacctcgctaccgacgctccgctgctgttcggcggtttgattgctgccaccgcctttggcgcacgcgcaatcatggagtgctttaccgatcaggggatcgccgttaataacgtgatggcactgggcggcatcgcgcggaaaaaccaggtcattatgcaggcctgctgcgacgtgctgaatcgcccgctgcaaattgttgcctctgaccagtgctgtgcgctcggtgcggcgatttttgctgccgtcgccgcgaaagtgcacgcagacatcccatcagctcagcaaaaaatggccagtgcggtagagaaaaccctgcaaccgtgcagcgagcaggcacaacgctttgaacagctttatcgccgctatcagcaatgggcgatgagcgccgaacaacactatcttccaacttccgccccggcacaggctgcccaggccgttgcgactctataa

SEQ ID NO: 134300 - protein, 566 aa, Escherichia coli
MAIAIGLDFGSDSVRALAVDCATGEEIATSVEWYPRWQKGQFCDAPNNQFRHHPRDYIESMEAALKTVLAELSVEQRAAVVGIGVDSTGSTPAPIDADGNVLALRPEFAENPNAMFVLWKDHTAVEEAEEITRLCHAPGNVDYSRYIGGIYSSEWFWAKILHVTRQDSAVAQSAASWIELCDWVPALLSGTTRPQDIRRGRCSAGHKSLWHESWGGLPPASFFDELDPILNRHLPSPLFTDTWTADIPVGTLCPEWAQRLGLPESVVISGGAFDCHMGAVGAGAQPNALVKVIGTSTCDILIADKQSVGERAVKGICGQVDGSVVPGFIGLEAGQSAFGDIYAWFGRVLGWPLEQLAAQHPELKTQINASQKQLLPALTEAWAKNPSLDHLPVVLDWFNGRRTPNANQRLKGVITDLNLATDAPLLFGGLIAATAFGARAIMECFTDQGIAVNNVMALGGIARKNQVIMQACCDVLNRPLQIVASDQCCALGAAIFAAVAAKVHADIPSAQQKMASAVEKTLQPCSEQAQRFEQLYRRYQQWAMSAEQHYLPTSAPAQAAQAVATL

SEQ ID NO: 134301 - DNA, 1734 bp, Klebsiella pneumoniae
  CDS (1)..(1734): transl_table=11
atgatttctgcatggagtaacaagatggcaattgcgattggcctcgactttggtagtgactcagtccgcgctctggcggtggaatgcgcgtccggcgcagagctggcgaccagcgtggagtggtatccgcgctggcgggaaggacagtattgcgatggcgctaacaaccgcttccgccatcacccgcgagattacatcgagtccatggaagcggcgctgaaaagcgtgctcgcttcgctgagcgccgaacagcgcgccgacgtcgtgggcattggcgtcgacagcaccggctcaactccggctcccgtcgatgccgagggcaacgtgctggcgctgcgcgaagaattcgctgacaaccctaacgccatgtttgtcctgtggaaggatcacaccgcggtcgaggaagccgaggcgatcacccgcctgtgtcatcagccgggcaaagaggattactcgcgctatatcggcgggatctactccagcgaatggttctgggccaaaatccttcacgtcacccgcgaagatagcgcagtcgcccaggcagccgcctcgtgggtagagctttgcgactgggtgcccgccctgctctccggtactacgcgtccgcaggatctgcgccgcggccgctgcagcgccggacataaatcgctgtggcatgagagctggggcggtctgccgccggccagcttcttcgatgagcttgatcccatcatcaaccagcatctggcctggccgctgttcaccgatacctggacggccgatgtgccggtcggcacgctgagcgcagagtgggcccagcgcctgggtctgccgcagagtgtggccatctctggcggcgccttcgactgccacatgggcgccgttggcgccggcgcgcagcctaacgcgctggtgaaagtcatcggcacctccacctgcgacattctgatcgccgataaagagagcgtcggcgagcgcacggtcaaaggcatctgcggccaggtcgacggcagcgtggttccacactttatcggcatggaggcaggccagtccgccttcggcgatatttacgcctggtttggccgcattctcggctggccgctggagcagctggctcagcagcagccggcgttgcgcgagcaaatcaaagccagccaaaaacagttactgccggcgctcaccgaagcctgggccaacaatccatcgctggagcatctgccggtggtgctcgactggttcaacggccgccgcacgccgaatgccaaccagcgcctgaaaggggtgatcaccgaccttaacctggccaccgacgcgccggcgctgttcggcggtctgatcgccgccaccgccttcggcgctcgcgccattatggagtgcttcaccgagcaggggatcccggttaacaacgtcatggcgcttggcggtatcgcgcggaaaaaccaggtcatcatgcaggcctgctgcgacgtgctgaaccgaccgctgcagattgtcgcctccgatcagtgctgcgcgctgggggcggctatcttcgccgccgtcgccgccggcgtctatgaggatattccagccgcccaacagcggatggcaagccaggtggaaactaccctgcagccgcgtccggcgcaggcacagcgtttcgaacaactctatcagcgctaccagcaatggtcggtcagcgcggaacaacactatctcccttcggctgcaaaggcggaaaaagccccgcaatctcaggcagcgctcacctattaa

SEQ ID NO: 134302 - protein, 577 aa, Klebsiella pneumoniae
MISAWSNKMAIAIGLDFGSDSVRALAVECASGAELATSVEWYPRWREGQYCDGANNRFRHHPRDYIESMEAALKSVLASLSAEQRADVVGIGVDSTGSTPAPVDAEGNVLALREEFADNPNAMFVLWKDHTAVEEAEAITRLCHQPGKEDYSRYIGGIYSSEWFWAKILHVTREDSAVAQAAASWVELCDWVPALLSGTTRPQDLRRGRCSAGHKSLWHESWGGLPPASFFDELDPIINQHLAWPLFTDTWTADVPVGTLSAEWAQRLGLPQSVAISGGAFDCHMGAVGAGAQPNALVKVIGTSTCDILIADKESVGERTVKGICGQVDGSVVPHFIGMEAGQSAFGDIYAWFGRILGWPLEQLAQQQPALREQIKASQKQLLPALTEAWANNPSLEHLPVVLDWFNGRRTPNANQRLKGVITDLNLATDAPALFGGLIAATAFGARAIMECFTEQGIPVNNVMALGGIARKNQVIMQACCDVLNRPLQIVASDQCCALGAAIFAAVAAGVYEDIPAAQQRMASQVETTLQPRPAQAQRFEQLYQRYQQWSVSAEQHYLPSAAKAEKAPQSQAALTY

SEQ ID NO: 134303 - DNA, 1740 bp, Arabidopsis thaliana
  CDS (1)..(1740)
atgaccaccgctgagttaaatccatttccgtctcgctccgtttttctcggtgtcgacgttggcactggaagcgcccgtgccggtttgttcgatgataatgggaagcttctaggatctgctactagtccaatacagatttggaaggatggagactgtattgagcaatcttcaacagatatttggcatgcagtttgtgctgctgtgaaatctgcttgctctcttgcaaatgtttcggatgtggaagtgaaaggaataggctttgctgccacgtgctctctcgtggcggttgatgctgagggatctcctgttacagtgtcgtggagtggtgattcaagaagaaacattattgtatggatggaccatagagctgtaaagcaggcagagagaatcaactcatttaattctccagtcttgcagtactgtggtggcggtgtttctccagaaatggagccaccaaaacttttatgggtgaaagaaaatcttaaggagtcttggtcaatggtgtataagtggatggacttgagtgattggctatcctacagagctactggagatgatacacgtagtttgtgcaccacagtatgtaaatggacttatcttggccatgcacacatgcaccagatgactgagaaggcttctcgtgatatggaagcttgtggatgggatgatgagttctgggaagaaattggtttaggcgatttggtagatgggcaccatgctaagattggacgaagtgtagcttttcctggacatccactgggtaatggtctaactgcaaccgctgctaaggaactgggtctgttagctggaactcctgttgggacttcactcattgatgctcatgccggtggtgttggggtcatggaaagtaaattagaatcagactccttgacgaaagagtcagatgtggataccttgtgctctcgaatggtcttggtatgtggcacatcaacttgtcatatggctgtttcccgtgaaaagctgtttattcctggcgtgtgggggcctttttggtcagctatggttccggagtattggcttacagaaggaggacaaagtgctactggagctttacttgatcacatcatcgaaaatcatgttgcttctccccgtcttgcaaatcgtgctgcttcccagaaagtttctgtgtttgaactcctaaacaacattttgaaaacgatggctgaagatacaagttctccatttatatctgcccttacctcagacatgcatatccttcccgactttcacggaaacagatctcccgttgcagacccaaattcgaaaggagtgatattcggaatgtctcttgacacgtccgagaagcagttggctcttctatacctcgccacaattcagggaatcgcatatggtacacgtcatatcgtagagcattgcaatactcatggtcacaaaattgatacactgcttgcttgtggcggcctttcaaagaacccattgttcatccaagaacatgctgatatagtcggttgtccgattattcttcctcgagaaagcgagtctgttctcttaggagcagcaattcttggagcagttgctggcaagaactaccctagtctccatgatgccatgaaagctcttaacgcagctggacaagtggttcatccctcatcagaccctaagatcaagaagtatcacgatgcaaagtaccgtattttccgcaacctctacgaacagcaattgtctcaccgttccatcatcgctgaagctcttgcataa

SEQ ID NO: 134304 - protein, 579 aa, Arabidopsis thaliana
MTTAELNPFPSRSVFLGVDVGTGSARAGLFDDNGKLLGSATSPIQIWKDGDCIEQSSTDIWHAVCAAVKSACSLANVSDVEVKGIGFAATCSLVAVDAEGSPVTVSWSGDSRRNIIVWMDHRAVKQAERINSFNSPVLQYCGGGVSPEMEPPKLLWVKENLKESWSMVYKWMDLSDWLSYRATGDDTRSLCTTVCKWTYLGHAHMHQMTEKASRDMEACGWDDEFWEEIGLGDLVDGHHAKIGRSVAFPGHPLGNGLTATAAKELGLLAGTPVGTSLIDAHAGGVGVMESKLESDSLTKESDVDTLCSRMVLVCGTSTCHMAVSREKLFIPGVWGPFWSAMVPEYWLTEGGQSATGALLDHIIENHVASPRLANRAASQKVSVFELLNNILKTMAEDTSSPFISALTSDMHILPDFHGNRSPVADPNSKGVIFGMSLDTSEKQLALLYLATIQGIAYGTRHIVEHCNTHGHKIDTLLACGGLSKNPLFIQEHADIVGCPIILPRESESVLLGAAILGAVAGKNYPSLHDAMKALNAAGQVVHPSSDPKIKKYHDAKYRIFRNLYEQQLSHRSIIAEALA

SEQ ID NO: 134305 - DNA, 1617 bp, Brucella melitensis 16M
  CDS (1)..(1617): transl_table=11
atgggagcgaccatgaccaactattatctgggcgtcgatgtcggcaccggaagcgcccgggccgggctgttcgacgcgggtggcaccatgcttgcatcggccaggcgcgatatcgccatatggcgcgaggcgggcggtattgtcgagcagtcgagcgacgatatatggcaggccgtttgtgaaagtgttcgcgaagtggtcagggttgctggcgtcgatcccgcagccgttgccggcatcggctatgatgccacctgttcattggtcgtgctgggcgagggcggcaagccgcttgccgttggtccttccaacgatcgggcgcgcaacatcatcgtctggatggatcatcgcgcaggtgagcaggcagagcgtatcaataccaccaaagcggatgtgctgggttatgtcggcggcgcgatttcgccggaaatggaaactccgaaactgctctggctgaaagaacacaagccggaaacgtttgctgccgcctggcagtttttcgatctgaccgattttctcacatggaaatcctgtggcagtcttgcccgctcggcctgtaccgtaacctgcaaatggacctatctcagccatgaaaagcgttgggacgagacctatttccgcgcagtcggccttggcgaactcgcggatgaaagtttcgtccgcatcggtacagacgttcgcgccggtggcgaaaatcttggcggcttgagcaaacaggccgcagccgaactgggcttgaggccgggtacggcaattgccgccggtctgatcgatgcacatgcgggcggtatcggcacggtgggcgcgcgcggttcggaaggtcggatattgtcgcgtatggcctatgtgttcggcacatcggcctgcaccatgaccaccactgaacagcctgttttcgtggatggtgtctgggggccttatttctcggccatggtgccggggctgtggttgaacgaaggcggacaatcggctgcgggtgccgctattgatcatctgattcacatgcatcccttcgcggcggaagccgaaaaggcagcggcggatcaaggcaaggggctggcagacagcctcgctgccgaagttgaagctagaggtggtcctgaaaaaacggccatgatcgttggcgacattcatgtcgtgccggaattcctcggtaatcgtgcacctttcgccgatcctgatgcgcgtgcggttattgcggggctggaccttgatacaggcatggacagtctggcggcactttatctcgccgggctttgcgggcttggctatggtgtgcggcagattatcgaagcgcagcgggccaaaggtattgtgactgacactattgttgtttcgggtggcgcggcgcgctcaaatctcgtgcggcaggtgctcgccgatgcgaccggcctcgttgttaccgcttcgacatcgccggagccggttctgctcggctcggccatgttaggtgcggttgcgtccggtgcttatcccgatcttgtgacggctatgcaagtcatgtcggaattaggcgcacgcaacaggccggacgccaggcgtgcaaaatggcatgaccaccgttttgaggcgttcatgttgcttcaggcgactgcccgcaagatccgctatctctaa

SEQ ID NO: 134306 - protein, 538 aa, Brucella melitensis 16M
MGATMTNYYLGVDVGTGSARAGLFDAGGTMLASARRDIAIWREAGGIVEQSSDDIWQAVCESVREVVRVAGVDPAAVAGIGYDATCSLVVLGEGGKPLAVGPSNDRARNIIVWMDHRAGEQAERINTTKADVLGYVGGAISPEMETPKLLWLKEHKPETFAAAWQFFDLTDFLTWKSCGSLARSACTVTCKWTYLSHEKRWDETYFRAVGLGELADESFVRIGTDVRAGGENLGGLSKQAAAELGLRPGTAIAAGLIDAHAGGIGTVGARGSEGRILSRMAYVFGTSACTMTTTEQPVFVDGVWGPYFSAMVPGLWLNEGGQSAAGAAIDHLIHMHPFAAEAEKAAADQGKGLADSLAAEVEARGGPEKTAMIVGDIHVVPEFLGNRAPFADPDARAVIAGLDLDTGMDSLAALYLAGLCGLGYGVRQIIEAQRAKGIVTDTIVVSGGAARSNLVRQVLADATGLVVTASTSPEPVLLGSAMLGAVASGAYPDLVTAMQVMSELGARNRPDARRAKWHDHRFEAFMLLQATARKIRYL

SEQ ID NO: 134307 - DNA, 1647 bp, Drosophila melanogaster
  CDS (1)..(1647)
atgtcatccggaccgttttttgtgggcgtggacgtgggcacgggcagtgcgagggcggccctggtcgcctgcgatgggcgtgtcctggagcaggcggtgcagacgatccaaacgtggaatcctgagccgggctactacaaccagtcatccgataatatatggcagtccatctgccaggtggtgaagaaagtcattggcggcgtcgataagtcaaaagtcaagggcattggcttcgatgccacctgctccttggtggttctgggcccccagggatcgccgctgacggtgagcaagtccggtgaggcggagcagaacataatcctctggatggaccatcgtgccgagcaggaaacccaagagatcaatgccttcaagcactcgctgctgaaatatgtgggtggtcaggtttcgctggaaatggaggttcccaaattgctgtggctgaagaggaatctgtcacagacttttggaaatatttggagggtctttgacctgcccgactttctgacctggcgagccactggagtggacacccgatcactttgctcggtggtgtgcaagtggaactacgatgcagcgaatggcagttggaacaaggagttcctgaagcaggcggacttggaggagttgacacagaataacttcgagaaattgggcagtgatgtccagccgcctggccgaacggtgggcaaaggactcacggccaaggctgctggggaactgggcttatccgccggcactgtggtgagcacctccctaatcgatgcccatgctggcgccttgggaatgtttggatgccgctcaaaggagtccaagggtgccgacgatgtccagggtaaaatggctctgattgccggtacatccacctgccacatgagcatcacccggaaggcatgcttcgcacaaggtgtttggggtccctatcaggatgccattattcccggctacttcctaaacgagggtggtcagagcatcgcaggacatctcctagatcacgtcctcaagtcgcatgaatcctacgccgaactgaaatcccaattgggagaggataagtttatctaccagcatcttaataagttgctgccggaactggcagcagctcgaggattaagccaggtgggctgtctcacccaggatgtccatgtctggccggacttgcatggcaatcggtcgcccatcgcagatcccacgctgcgaggagtgattactggactggacatgacgcgaggaactgaatctctggccatcaaatacttggcgttcgtccaagctctggcttacggcacacgtcacattattgaaaacctttaccagtacggtagagctccctttcaaacgctacttttctgcgggggattggccaagaatcctctgtacgtacaatgtcatgcggacatttgcaatctgcccgcactgattccggatgaacaggaaatggttctggtgggcgctgctgccttgggagccgctgcctccggccacttcgacagcttggagagcgcctcgaaatccatgggtggcactggccagctggtgaagccgaacgcggaaacgcttgagttccacaatcgcaagtacaaggtgttcctgcagctgctggagaaccaacgacagtacaggcgcattatgcaggcagacacaaagtga

SEQ ID NO: 134308 - protein, 548 aa, Drosophila melanogaster
MSSGPFFVGVDVGTGSARAALVACDGRVLEQAVQTIQTWNPEPGYYNQSSDNIWQSICQVVKKVIGGVDKSKVKGIGFDATCSLVVLGPQGSPLTVSKSGEAEQNIILWMDHRAEQETQEINAFKHSLLKYVGGQVSLEMEVPKLLWLKRNLSQTFGNIWRVFDLPDFLTWRATGVDTRSLCSVVCKWNYDAANGSWNKEFLKQADLEELTQNNFEKLGSDVQPPGRTVGKGLTAKAAGELGLSAGTVVSTSLIDAHAGALGMFGCRSKESKGADDVQGKMALIAGTSTCHMSITRKACFAQGVWGPYQDAIIPGYFLNEGGQSIAGHLLDHVLKSHESYAELKSQLGEDKFIYQHLNKLLPELAAARGLSQVGCLTQDVHVWPDLHGNRSPIADPTLRGVITGLDMTRGTESLAIKYLAFVQALAYGTRHIIENLYQYGRAPFQTLLFCGGLAKNPLYVQCHADICNLPALIPDEQEMVLVGAAALGAAASGHFDSLESASKSMGGTGQLVKPNAETLEFHNRKYKVFLQLLENQRQYRRIMQADTK

SEQ ID NO: 134309 - DNA, 1695 bp, Rhodopirellula baltica SH 1
  CDS (1)..(1695): transl_table=11
ttgttttcctcgcattcgttactccttgttttaaaagacttcatacgatccatgtccatcatcgctctaggtctcgatttcggaacggagtccgtgcgtgccatcttggtggacgccgatggtcgcgaggttgggtccgcggtcagttcgtttgaacatggccagatgcttgatactttgcccggcagcgagacgccgttgccggatcggtatgcactgcaatgtccggccgattggattgagtcggcggcagtggccaccaaggaggcgttgacgtctgctggtatggttggcgacgaggttgttggcatcggcgtggacttcaccagttgcacaatgttgcccacccaacgcaacggcactccgctttgcgaattggacggttggaagtcgagaccattggcttggccaaagctatggaagcatcacggtgctttggaacaagccgatcgaatgacggccatcgcgaaagagcgaggggagtcattcttgaaacgatatggtggtgtgatcggattggaatggttctttcccaagatgcttgaaacgattgaatgtgatcgtgatgtggccgaagcggccgaggtgtggttggaagcgggggactggtttgtttggcaacttgtcggcggcgattgtcatgcactcgttcgttcgacttgccaagccggctacaaggcgatgtggtcggctgatgaaggctacccgtcgcaagattactttcaggccgtccatccgaagctcgccgaagcggttgccaatcggatgcccggcgaaatgcgttcaccgggacaggtcgcgggtcacttgaccgaaaagatggcaatgcgttttggattgccagcgggcgttcccgtctcggcagcaatcattgatgcgcactcgggcgtgcccggtgtcggcgccgctgaacccggtgctttggtgatggtgttggggaccagcagttgtcacatgctcaacgccaccaagatggtggacattcccggagtagccggcgtcgtcgagggtgggatcttgcctgggttgtttggttatgaaacgggccaggctgccgtcggtgatgctttcgcttggttgctgaaattactgaaccgcgactcgttcgatgatttggccaaagaggcgatggctttgcctcccggtgccgcgggcgtcacgtgcttggattggctaaacggttgtcgaacaccattgatggacggtgcggttcgcggtgccttcacaggactgggaatgcagcacggtcccgctcatctttacctcgcattgatggaagcgtccgcgttcggggtgcgttggatcaccgagctgctgcgtcatggttccgctgatcactcggcatccggttcggatgaaagcggtgttccgatcgatcgtttgatcgccacgggtgggttgccgcatcacaatcgggcgttcgtggaggtgtatgcagacgtgttgggaatgcccatcgaaatccatccctccacgcaagggcctgcggtcggggccgctgtcttgggaatggtcgccgccgggccggagaagacgccattttccagtattgctgaagcggcgtccgcgatggcggcggtgcccgaggatcaacgtgacctgatcatgcctcgaccagagcgaacgcgtgcttacgaatcgctttatgatcgctatcgtcaattggccgacgcggtcgcacagcaacgaatttaa

SEQ ID NO: 134310 - protein, 564 aa, Rhodopirellula baltica SH 1
MFSSHSLLLVLKDFIRSMSIIALGLDFGTESVRAILVDADGREVGSAVSSFEHGQMLDTLPGSETPLPDRYALQCPADWIESAAVATKEALTSAGMVGDEVVGIGVDFTSCTMLPTQRNGTPLCELDGWKSRPLAWPKLWKHHGALEQADRMTAIAKERGESFLKRYGGVIGLEWFFPKMLETIECDRDVAEAAEVWLEAGDWFVWQLVGGDCHALVRSTCQAGYKAMWSADEGYPSQDYFQAVHPKLAEAVANRMPGEMRSPGQVAGHLTEKMAMRFGLPAGVPVSAAIIDAHSGVPGVGAAEPGALVMVLGTSSCHMLNATKMVDIPGVAGVVEGGILPGLFGYETGQAAVGDAFAWLLKLLNRDSFDDLAKEAMALPPGAAGVTCLDWLNGCRTPLMDGAVRGAFTGLGMQHGPAHLYLALMEASAFGVRWITELLRHGSADHSASGSDESGVPIDRLIATGGLPHHNRAFVEVYADVLGMPIEIHPSTQGPAVGAAVLGMVAAGPEKTPFSSIAEAASAMAAVPEDQRDLIMPRPERTRAYESLYDRYRQLADAVAQQRI

SEQ ID NO: 134311 - DNA, 1671 bp, Strongylocentrotus purpuratus
  CDS (1)..(1671)
atgacttcgaccgtcggaaacccagtgtatttcgtcggtgtagatgtggggacatcgagcgtcagggctgcgctggtgagcggaactggccaggtgattcgtgtagcagtagagccgattaagatttggaatccttgtgaaagtttttacgaacaatcatcagatgacatttggagagcatgttgcaagactgttaagcaagtgacctcagatgaccttgcagagtcagtccaaggcatcggatttgatgctacatgctccctggtggcgctagataaggaactgaagccactgtctgtaagccagtcaggtgacaatgggaggaacatcatcatgtggatggatcatcgtgctaaggttcaagcagagagaatcaacaaggcgggccacgaagcgctacgcttcacgggaggggagatatccttggagatggagccaccaaaactgctatggttgaaagagaatctgtttgaggcgtgttggcagaaagcaggtacattcatggatttagctgacttcatgacatggagagccactggatcacagataagatctctgtgcacagtggtatgtaagtggatgttccaagcaaacgacacaggactgagagagtggaactcatcattctatgagagtatcggcctcaaggaactcctggaagatcaacagcagaaaataggaaaccttttccagctcccaggggatccatgtggagatggtcttagtcatggtgctgctgaggagcttggactaagaccaggactacctgtaggaacaggaataattgatgcttatgctggaggcataggaatgttgggtgcagatgtgtctggcttgaagctgccttgtgaaactcgacctttgacctccaggcttgctctcatctgtgggacgtcaacatgtcacatgagtctgagcaagaaggagacctttgtgcccgatgtttggggtccttactacagctgtatcgtgccaggactctgggggaacgaaggaggagagagctgtacaggcaagctcatagatcatatcatacacactcatcctgctgttgatcagcttacagaacagagcaaaaagagaggttgtgatatgtacacatggttagatgaccaactgatgaccatggccggagaaaaacacctctcatctccagccacgctgaccagagatctccatgtttgtccttatttctatggcaacagatccccgcttgccgatcctacattaaaaggaatgatatgtggtttgacgttgtcttccagtttggatgatctagcacttctctaccttgctacccttcaagcattagcacatggaacatatttgatagtccaacaaatggtcaaatctggttacgacatctcaactctctttgcttgtggtggtctatgtaagagtgatctgttcttacaaacccatgcagatgttacaggtctgcctatagtcttgcctaaggagtccgagtcagtattggttggggctgccgtcttgggagcaaaggcttctgggagatttgacctcgagggtgcaatgagtcgcatgtgtggcgtgggtaaagttatctggccagatgaacagcagagggcctactacagcaaaaaacatgaagtgttcttgaaacttgtcgatcatcagagggagtacagacgcatcatggaagagctctga

SEQ ID NO: 134312 - protein, 556 aa, Strongylocentrotus purpuratus
MTSTVGNPVYFVGVDVGTSSVRAALVSGTGQVIRVAVEPIKIWNPCESFYEQSSDDIWRACCKTVKQVTSDDLAESVQGIGFDATCSLVALDKELKPLSVSQSGDNGRNIIMWMDHRAKVQAERINKAGHEALRFTGGEISLEMEPPKLLWLKENLFEACWQKAGTFMDLADFMTWRATGSQIRSLCTVVCKWMFQANDTGLREWNSSFYESIGLKELLEDQQQKIGNLFQLPGDPCGDGLSHGAAEELGLRPGLPVGTGIIDAYAGGIGMLGADVSGLKLPCETRPLTSRLALICGTSTCHMSLSKKETFVPDVWGPYYSCIVPGLWGNEGGESCTGKLIDHIIHTHPAVDQLTEQSKKRGCDMYTWLDDQLMTMAGEKHLSSPATLTRDLHVCPYFYGNRSPLADPTLKGMICGLTLSSSLDDLALLYLATLQALAHGTYLIVQQMVKSGYDISTLFACGGLCKSDLFLQTHADVTGLPIVLPKESESVLVGAAVLGAKASGRFDLEGAMSRMCGVGKVIWPDEQQRAYYSKKHEVFLKLVDHQREYRRIMEEL

SEQ ID NO: 134313 - DNA, 1632 bp, Nasonia vitripennis
  CDS (1)..(1632)
atggattattttgtgggtgttgatgttggtacaggaagtgttagagcagctctagttacatctcaaggaaaaattgtagcaactgcagtaaagccaacaaaaaccttcaatccaaaggctaaattttatgaacaatcatcagatgatatttggtcttcagtctgtcaagtagtcaagaaagttatagctaaaactccaaaagaccgtattaaaggaattggtttcgatgcaacttgttccttagttgcaattgataaaaatggattaccagttactgtcagtcctacgggtaatgatgagcaaaatatcattttatggatggatcatagagctcaagagcaagccgattacatcaataaactaggccataaaatgctcaaatacgttggaggaaaagtatcattggaaatggaagtaccaaagctattgtggctgaaaaataatttaccagattcttggaggagagctgcattattctttgatttacctgactttctgacatggaaagccactaattcagagtctagatcattatgctctttagtatgcaaatggaactttagtgctggaccaaatggggataatcactggtgtgctgatttcttcgatgagattggattatctgatttacaaagcaacaattggaaaaaaataggtcaagatgtaaagcctccaggacatcccgtaggacttggcttaactgcaagagctgctgaagaattagatcttttagaaggtacacctgtaggcacgtcaataatcgacgcgcatgccggtggtctcggaatgcttggatgttctgctccacaagtttcacccgagttcaccagtagattaggtttaatttgtggaacatcaacgtgccacatggctgtcagcaaagatgaaatatttgtcgatggtgtttggggaccttattatggagcaatggttcctgacctttggctcaatgaaggaggacaaagtacaactggaaagttaattgatcacataattgatagccatccagcttctttgaaaataaaaaacagtttgccaccaaatgtgcatatacaaaaatacctgtcagacctcttgagctcaatggctagtaagaaaaaactttcagacatagcatacttgactgaagatgtccacgtctggccagattttcacggaaatcgttcaccccttgccgatccaacattgcatggaatgatttgtggtcttactttagcaaccgacgaagagagcttagcaacactgtacttagcaacgatgcaatcgctaacgtatgggacgaaacacattttagaagctctgaccgatgcagggcataagatagagtcactacttgtatgtggcggacttagtcaaaacccattgttcattcaaactcaagcggacgttttgggcttaccagttctttgtcctgtggaacgagaatccgttttagttggttctgctattcttgggtcctgtgcagccaaaacattttcttctgtgcacgaagctattaaagtgatgggaggttcagctaatgtagtgaatccaatcactgaaacttactcatatcattctaaaaagtatcaagtttttaagaaaatggtcaaagaccagcaggtgtataagaagtacatgtcttctaaataa

SEQ ID NO: 134314 - protein, 543 aa, Nasonia vitripennis
MDYFVGVDVGTGSVRAALVTSQGKIVATAVKPTKTFNPKAKFYEQSSDDIWSSVCQVVKKVIAKTPKDRIKGIGFDATCSLVAIDKNGLPVTVSPTGNDEQNIILWMDHRAQEQADYINKLGHKMLKYVGGKVSLEMEVPKLLWLKNNLPDSWRRAALFFDLPDFLTWKATNSESRSLCSLVCKWNFSAGPNGDNHWCADFFDEIGLSDLQSNNWKKIGQDVKPPGHPVGLGLTARAAEELDLLEGTPVGTSIIDAHAGGLGMLGCSAPQVSPEFTSRLGLICGTSTCHMAVSKDEIFVDGVWGPYYGAMVPDLWLNEGGQSTTGKLIDHIIDSHPASLKIKNSLPPNVHIQKYLSDLLSSMASKKKLSDIAYLTEDVHVWPDFHGNRSPLADPTLHGMICGLTLATDEESLATLYLATMQSLTYGTKHILEALTDAGHKIESLLVCGGLSQNPLFIQTQADVLGLPVLCPVERESVLVGSAILGSCAAKTFSSVHEAIKVMGGSANVVNPITETYSYHSKKYQVFKKMVKDQQVYKKYMSSK

SEQ ID NO: 134315 - DNA, 1671 bp, Anopheles gambiae str. PEST
  CDS (1)..(1671)
atgtcgaccagcagcagtccagtgtatctgattggtgtggatgttggaacgggcagtgcacgggcggcactggttaccggcaagggggaagtgctgcagacctgcgtgaagccgatacaaacttggaacacgcagccaaactactacgaacaatcatcggacgatatttggtcagcggtttgcgagtgtgtcaagaacgttaccttcggatatgcgaaggagcagattaaaggcatcgggttcgatgccacctgttcactcgttgttctcgatggccagatgcaaccgctaacggtctgcccgtcttcgaaggacaaccagcgcaacgtgatcctctggatggaccatcgggcggaggaagaggcacgcttcatcaacgcaacgcaccaccaaatgctcaactatgtcggtggcagcatttcgctcgagatggaagtgccgaagctgctgtggctcaagcgagacatgcacgacgcggtctggacgaaggtcggggcattttacgaccttcccgactacctgacattccgtgccactggtgccgattgccgatcgatttgctcggccgtctgcaaatggaactacgatgcagaggatcgatgctggtcggaagatttcctgcaaacgatcggtttggtcgatgatctacgcgtcgacagctggcggctgatcggtacgcacgtggcaaacccgggtgcaccgatcgacggaggactttcgcggcaagcggcccaagagctggggttaaaccctggcacggcagttgctagttcgatgatcgatgcgcatgcgggagcgttggcactgctcggctgcgaaggaccaccggggagagcgggcgatggaagcggtctcacctccaagatggccatcatttgcggaacatcctcgtgccatatgagtcttaccaagcgaccggtactggctccagggatatggggcccgtacaagcatgcaatcatcccggacctgtacctgaacgaggcaggccaaagtgcgacgggcgtactgatcgattacatgcttcaaacgcacccatgctacgaccagctgcttaaagagcacggcggttccaatgggaagatttatgcctttctcaacacattcctagatgagttggcaaaaaagcagggtgaaagttccgttcaccgactaacgatcgatctgcacgtttggcccgactttcacggcaatcggtcgcctctggccgaccctaatctgaagggtatgatatcgggtctaacgatgacgaaggatgtgcaaaacttggcgcttatttatcttgctctcatgcaagcactagcgtacggaacacgacacatactgcaggtgctggaagcttctggacgcgagccaatcacctcgatattgctgtgcggtggtttaagcaagaattctctctttgtacaaacgcatgccgacatttgttctgttccagtgctgctgcccagcgaaccggaagccgtgctgctcggttcggcaatgatgggagcgtatgcggctggtctgtacgatagtttggagctggcagcaagtggcatgggaggtagtgctaaggtggtcaaaccggacctgagcgacagcactcgcgactatcacgagcgaaagtatcgcgttttccaacggatgtacctggaccagcgtggctatgaacgtatcatgaaaggttaa

SEQ ID NO: 134316 - protein, 556 aa, Anopheles gambiae str. PEST
MSTSSSPVYLIGVDVGTGSARAALVTGKGEVLQTCVKPIQTWNTQPNYYEQSSDDIWSAVCECVKNVTFGYAKEQIKGIGFDATCSLVVLDGQMQPLTVCPSSKDNQRNVILWMDHRAEEEARFINATHHQMLNYVGGSISLEMEVPKLLWLKRDMHDAVWTKVGAFYDLPDYLTFRATGADCRSICSAVCKWNYDAEDRCWSEDFLQTIGLVDDLRVDSWRLIGTHVANPGAPIDGGLSRQAAQELGLNPGTAVASSMIDAHAGALALLGCEGPPGRAGDGSGLTSKMAIICGTSSCHMSLTKRPVLAPGIWGPYKHAIIPDLYLNEAGQSATGVLIDYMLQTHPCYDQLLKEHGGSNGKIYAFLNTFLDELAKKQGESSVHRLTIDLHVWPDFHGNRSPLADPNLKGMISGLTMTKDVQNLALIYLALMQALAYGTRHILQVLEASGREPITSILLCGGLSKNSLFVQTHADICSVPVLLPSEPEAVLLGSAMMGAYAAGLYDSLELAASGMGGSAKVVKPDLSDSTRDYHERKYRVFQRMYLDQRGYERIMKG

SEQ ID NO: 134317 - DNA, 1911 bp, Magnaporthe grisea 70-15
  CDS (1)..(1911)
atggatattggacctgtcaatttttgttctctcgtctttttctttgcctgtttcttagctaaactttgccaatctatgccgcccctcagcgtttgtcttgctaaccgtgtggatcggatcctccttgtctcttccagggccctcaagagcacagagcactacattggtatcgatgttgggactggctctgcccgagcctgtctcatcgatgtcaccggcgacatcaagtcactcgcaaccaaggaaatcaagctctggcagcctgcagccggctacgagggctctcactatgaacaatcaacaaccgatatctgggatgccatctgcttctgcgtcaagaaagtggttaccgacacggggattgacacatccaccattcacggcctaggattcgatgccacatgctccctcgcagtattcagccacgacactgatgagcctattcctgttaccgggccagacttttctaatgcctccggggaagatcgcaacgtgatactgtggctggaccaccgacccttggctgaagccgagaagatcaatgccacaggccacaatttgctgcgctatgtcggcggcaagatgagcgtcgagatggagatcccaaagatattgtggctgaagaacaacatgcccaaagacctctttgatcgttgcaagttttacgaccttgcagacgccctgacgcatctggccactggaggaaacacgagaagcttttgcagcacggtgtgcaagcagggatttgttccagttggcgtcgatggcagtgtcaaggggtggcaggaggacttttatcatacaatcggcctcggcgatctggtggaggatgactttaagcggatgggaggagtcaacggggtgagcggagagtatctcagtgccggagaactagtcggtggattaagcgacaaagccgccaccgagcttggtctgcgtcccgggattgccgtgggtagcggtgtcattgatgcctatgcaggctggattggtactgtgggtgccaaggtcaatctcactcccgacgagcttgacgaaaccgtggcgcccaacgacgtggcccaggccttcacgcgactggcagccgtggccggcacctcgacatgccacctggccatgtccaaagaggcagtgtttgtagatggagtctggggcccctatcgtgatgtgcttatcccgggcttttggatggccgagggcggacagtcggccaccggcgagcttatgcggcacatgatcgagacgcacgcagcctttgtcgagacccaggcggctgccgttgcccagggcaagaacatatacgactatttgaacgagcacctgcggcagatggccagcaaggtccaggccccctcaatatcgtggctggcacgccacttcttcttctacggcgatctgtggggcaaccgatccccagtggccgaccccaacatgcgcggtgccatcgtcggcatgagcagcgacaagactgccgactcgttggccctgctttactattccaccatggagtttattgccctgcagacgaggcaaatcgtcgaaacgatgaacaaggccggccactccatcagcagtattttcatgagcggtagccagtgccagaacgagatcctgatggacctcatcgccacggcttgcagaatgcacgtgctgatcccgcgatacgtcaacgccgcagtcgtccacggcgccgctatgctgggcgccaaagctgcgagtgcggatgccgaaggcaagaccgaggacctgtggagcatcatggaccgcatgagcaagcctgggcgtctggtaaaccctgcacaggatcaggccctgagcaaactgcttgatgccaaatacgagatcttcttggagcaatgccgctcgcagcaggagtacaggaggcaggtggacaaggccattggggcttaa

SEQ ID NO: 134318 - protein, 636 aa, Magnaporthe grisea 70-15
MDIGPVNFCSLVFFFACFLAKLCQSMPPLSVCLANRVDRILLVSSRALKSTEHYIGIDVGTGSARACLIDVTGDIKSLATKEIKLWQPAAGYEGSHYEQSTTDIWDAICFCVKKVVTDTGIDTSTIHGLGFDATCSLAVFSHDTDEPIPVTGPDFSNASGEDRNVILWLDHRPLAEAEKINATGHNLLRYVGGKMSVEMEIPKILWLKNNMPKDLFDRCKFYDLADALTHLATGGNTRSFCSTVCKQGFVPVGVDGSVKGWQEDFYHTIGLGDLVEDDFKRMGGVNGVSGEYLSAGELVGGLSDKAATELGLRPGIAVGSGVIDAYAGWIGTVGAKVNLTPDELDETVAPNDVAQAFTRLAAVAGTSTCHLAMSKEAVFVDGVWGPYRDVLIPGFWMAEGGQSATGELMRHMIETHAAFVETQAAAVAQGKNIYDYLNEHLRQMASKVQAPSISWLARHFFFYGDLWGNRSPVADPNMRGAIVGMSSDKTADSLALLYYSTMEFIALQTRQIVETMNKAGHSISSIFMSGSQCQNEILMDLIATACRMHVLIPRYVNAAVVHGAAMLGAKAASADAEGKTEDLWSIMDRMSKPGRLVNPAQDQALSKLLDAKYEIFLEQCRSQQEYRRQVDKAIGA

SEQ ID NO: 134319 - DNA, 1644 bp, Apis mellifera
  CDS (1)..(1644)
atggacatggattactttgtgggtgttgatgtaggaacaggaagtgctcgagctgctttggtatcctctaaagggaagataataaaattggcaacatgcccacttgaaatttttcaccctgctcctaatttttatgagcagtcatctgataatatttggagtgcagtttgccatgtagtaaagtcagttgtggctgacatttctgcagataatgtaaaaggtattggttttgatgctacatgttcattggttgcaattgataaaacaggatcaccagttacagttagtccaacaggagaagataaacaaaatgttatattatggatggatcatagagcacaagaagaagctgatttcataaatgctcaagatcatgatatgcttcagtatgtaggtggaaaaatatcattagaaatgcaaactcctaaaatgttatggctgaaaaaaaatctatcttcatcttggaatcgtgcagcattgctatttgatctgcctgatttcctaacatggaaagcaacaggttctgaatcaagatctttatgttctttagtgtgtaaatggaattatagtgctggtcctgatggtaacaataaatggaatgacgaattctttgaacaaattcatttaaaagatcttaagaaagataactggagaaaaataggtaatgatgtgagggctccgggcgacccggttaaccaaggattatcaacaaaagctgcatctgaattgggtctcctaaaaggaacagctgtgggaacttcacttattgatgcacatgcaggaggacttggtatgataggctgttctgtacctgccatgtcttataacttacaaagtagattagcattaatttgtggcacatcaacttgccatatgatagttaatgagaagaaactttttgttaatggtgtttggggcccatatttcagtgctatggttccaggattatggttgagtgaaggaggacaaagtgtaaccggaaaattacttgatcatataattgatactcatcccgcgacaccaggaattttgaaaagtttaagcggaaataaacatatacagcaatatttatctgaattattacaaacgatatctgatcaaaaaggcttaaaaaatatctcgtatttaacgaaagatattcatgtatggcctgattttcacggtaatcgatcacctttggctgatccaacacttaaaggaatgatatcaggactttctttatcagttgatcaagaaaacttggcactattgtatttggcaacagtacaagctttaacgtatggtacaaaatatattttggaaacattagaagctgctggtcataaaatagatactttattagtttgtggaggtttaagtcaaaatccattatttatacaaatacaagcggatgtattagatttacctgtattatgtcctactgaaaaagaatcagtactaataggagctgcaattcttggatcttatgcagctaaaaaatttaatacaatgtatgatgctattaaagcaatgggaggatctgcaaccatggttaaacctagaagcaaatgctacaagtatcatctccaaaaatatcgagtttttcgaaagatggtgcaagatcaaaatgattatagagaaattatgagtgaagaatttttataa

SEQ ID NO: 134320 - protein, 547 aa, Apis mellifera
MDMDYFVGVDVGTGSARAALVSSKGKIIKLATCPLEIFHPAPNFYEQSSDNIWSAVCHVVKSVVADISADNVKGIGFDATCSLVAIDKTGSPVTVSPTGEDKQNVILWMDHRAQEEADFINAQDHDMLQYVGGKISLEMQTPKMLWLKKNLSSSWNRAALLFDLPDFLTWKATGSESRSLCSLVCKWNYSAGPDGNNKWNDEFFEQIHLKDLKKDNWRKIGNDVRAPGDPVNQGLSTKAASELGLLKGTAVGTSLIDAHAGGLGMIGCSVPAMSYNLQSRLALICGTSTCHMIVNEKKLFVNGVWGPYFSAMVPGLWLSEGGQSVTGKLLDHIIDTHPATPGILKSLSGNKHIQQYLSELLQTISDQKGLKNISYLTKDIHVWPDFHGNRSPLADPTLKGMISGLSLSVDQENLALLYLATVQALTYGTKYILETLEAAGHKIDTLLVCGGLSQNPLFIQIQADVLDLPVLCPTEKESVLIGAAILGSYAAKKFNTMYDAIKAMGGSATMVKPRSKCYKYHLQKYRVFRKMVQDQNDYREIMSEEFL

SEQ ID NO: 134321 - DNA, 1863 bp, Ustilago maydis 521
  CDS (1)..(1863)
atgacgatgacgatgaaaagtgccaccagattctactacatcggtgtcgatgtcggcaccggctctgcgcgagcagcattagtcgacaatgacggcaacattctcgcagaatccacccatgctacccaaacattccgcctcgaatcagatgcgcgcatcttcgagcagtcgaccaccgatatctggtctcagatcaagctggccattactcaggtggttgctgcatccaaagtcgaccctagcctcatcaaaggtgttggattcgacgcaacttgctctcttgcagtgaccgatttcgatggcaaccccattgcagtcacccctcaatctcccacgacaagtttcaattggggaccaggagaacgcaacgtcatcttgtgggcagaccaccgtgctgaagccgaagcagcactcatcaactcgaccggatctaaagtgctcaactatgtcggcaaaaccatgtcgctcgaaatggagattcctaagattctgtggttgaaaaaacacatgccagcagaactctttgagcagtgcatgttcttcgatttgcccgactatctgacatacaaagcaacaggctcgctggcgaggagcaactgctccttggtctgtaagtgctcctatgtccctccgggcgttgacggttccgagttgggctggcagccggagtttttcgaacagattgggttgggtgaattggtcaagaatgactttcagcagttaggcggtgttccgggtcgcaacggcatagtgcttactgccggtcagcctgttggtgatggtctgagcgctgatgttgctaccgagcttggattagcacctggcaccgctgttgggtcggctctgattgatgcatatgcaggttgggttggcaccgttgctgcaccagctaccaatcccgtggatgaaagcaagaacagcccatcgctcatcagctcgcagaaccgactggctgcgatcgcaggaactagcacgtgctactgcgtccaatcacccgacggtatcctcgtcgacggcgtctggggtccttacaaacatgctgttttccctggactatggatgaacgaaggaggccagtcttccaccggtcaactcatcgactttatcatcgacactcatccggcagcaccatcgcttcgcactctggcctcggagaccaaccgctcgcctttcgtcgttctccatgacaagatcgactcgctcgcctctgaggcttcccttgcgcatgcatcactgcttaccaaggatctcttcatctatcccgacttccacggaaaccgctcgccccttgccgattcgaagatgaaaggtatgatcacaggtctcaaactcgaccgctcgctcgccgatcttgcgctcaagtattatgccacgctcgaagcgatcgccctacaaacccgacacattatcgaagagatgaatgccaagggccacaggattgattcgatctacatgagtggtggtcacgtcaagaaccacgtgttcatgcagttgatcgctgatgtttgcgatatgcccgtccagctccccttcagttcgagtgccagcgtcgtcgctggttcggccatcttgggtcgatttgctgcggaagtcaaagatccggactcgtctggcgcaagtggtaaattcgcaccaaccgaagcaacgacgattaacgatcagaaaacagcagaggaggcctcattcaagtacaaggatcatctttgggatctgatggttagaatgaccaagccgggtacattggtctccccgcaaaaggatgagaagctggccaagttgctgcaagtcaagtacaagatctttcgcgaatccatcacgatgcaacgcaagtgggagtccatgattgatgaagcgatcaactag

SEQ ID NO: 134322 - protein, 620 aa, Ustilago maydis 521
MTMTMKSATRFYYIGVDVGTGSARAALVDNDGNILAESTHATQTFRLESDARIFEQSTTDIWSQIKLAITQVVAASKVDPSLIKGVGFDATCSLAVTDFDGNPIAVTPQSPTTSFNWGPGERNVILWADHRAEAEAALINSTGSKVLNYVGKTMSLEMEIPKILWLKKHMPAELFEQCMFFDLPDYLTYKATGSLARSNCSLVCKCSYVPPGVDGSELGWQPEFFEQIGLGELVKNDFQQLGGVPGRNGIVLTAGQPVGDGLSADVATELGLAPGTAVGSALIDAYAGWVGTVAAPATNPVDESKNSPSLISSQNRLAAIAGTSTCYCVQSPDGILVDGVWGPYKHAVFPGLWMNEGGQSSTGQLIDFIIDTHPAAPSLRTLASETNRSPFVVLHDKIDSLASEASLAHASLLTKDLFIYPDFHGNRSPLADSKMKGMITGLKLDRSLADLALKYYATLEAIALQTRHIIEEMNAKGHRIDSIYMSGGHVKNHVFMQLIADVCDMPVQLPFSSSASVVAGSAILGRFAAEVKDPDSSGASGKFAPTEATTINDQKTAEEASFKYKDHLWDLMVRMTKPGTLVSPQKDEKLAKLLQVKYKIFRESITMQRKWESMIDEAIN

SEQ ID NO: 134323 - DNA, 1617 bp, Tribolium castaneum
  CDS (1)..(1617)
atgtcgaatgcatattttattggtgttgacgtgggcacaggtagtgcacgagccgccttagtcaccgataatggcaaaattgttaaaacggcggtccaaagcatccaaacgtggaacccgcagcaggatttttacgagcaatcgtcggacgatatctggaatgcctgtgtgacgtgcattaagaaagtggccgaaggggtcaaccccgacgatgtcaagggcctgggctttgacgccacttgttcactcgtggctttggacaagtcggggaaccccctaagtgtgagcccgagtggcaatgaccgccaaaacgtaattctgtggctcgaccatcgcgcttcgggcgaagccgccaaaatcaacaaactcagtcactccgttcttaaatacgtcggggggaaaatctcgctcgaaatggaaacgccgaagttgctttggcttaaaacccacctcccgaaacaatgggctaaagtggggctttttttcgacttgcctgattttctgacgtggaaagcgacaagttgcgagacgcgctcgctttgctcgttggtctgtaagtggacttatgatggccaagccggctggagccccagctattttcaagaaatcggtttgggggatttacaggaggataactggcggaaaatcggcgccacagtgctgtcacccggctctccggtcggccagggtttgagcaaacaagcggccaaagagctggggcttaaatttggtacccctgttggtacttccattattgacgcccatgcgggcggtttagggcttgtcgggtgccgagctggcgttaatccggattttagtacaagattaagtttgatttgtggcacctccacttgccacatggctgtggccaacaaacccgtctttacgccaggtgtttgggggccgtatttcagcgcaatggtcccaggaatgtggctgaatgaaggggggcaaagcgccaccggaaaactaatagaccatgtgatagactcacacccggccactgcaactatcaaaggcaaaatcggagaaatgcacattcaaacctacttgagcaaccttttaaaggatttggctaaaaaagcaaatttagataatgtggcttttttgacgagagatctccacgtctggcctgattttcacgggaatcggtcaccaatcgcagacccgacgctgaagggggctgtttctggactgactttggcagaagatgaggaaagcttggccctgctgtatctagccactgtccaagctttagcgtacggcactcgccacattcttgaatcgttgattaaatcaggccatttcatcgaatcggttctaatttgtggcggtttgagtaaaaattatttattcacgcaaacccaagccgatgttgttaaccttccggttgtctgtccggaagaaattgagtcggttttgttgggttcagcaatattaggcgcctgtgctgcgaagtatttccccgatatgaccacagccataaaatcaatgggtggtaaaggaaaagtcgtatcaccgaatccctcgattatggattatcacaataagaagtacaaagtttttctagccatgtacgaacatcaggtgcaatacagaacgatcatgagtcaataa

SEQ ID NO: 134324 - protein, 538 aa, Tribolium castaneum
MSNAYFIGVDVGTGSARAALVTDNGKIVKTAVQSIQTWNPQQDFYEQSSDDIWNACVTCIKKVAEGVNPDDVKGLGFDATCSLVALDKSGNPLSVSPSGNDRQNVILWLDHRASGEAAKINKLSHSVLKYVGGKISLEMETPKLLWLKTHLPKQWAKVGLFFDLPDFLTWKATSCETRSLCSLVCKWTYDGQAGWSPSYFQEIGLGDLQEDNWRKIGATVLSPGSPVGQGLSKQAAKELGLKFGTPVGTSIIDAHAGGLGLVGCRAGVNPDFSTRLSLICGTSTCHMAVANKPVFTPGVWGPYFSAMVPGMWLNEGGQSATGKLIDHVIDSHPATATIKGKIGEMHIQTYLSNLLKDLAKKANLDNVAFLTRDLHVWPDFHGNRSPIADPTLKGAVSGLTLAEDEESLALLYLATVQALAYGTRHILESLIKSGHFIESVLICGGLSKNYLFTQTQADVVNLPVVCPEEIESVLLGSAILGACAAKYFPDMTTAIKSMGGKGKVVSPNPSIMDYHNKKYKVFLAMYEHQVQYRTIMSQ

SEQ ID NO: 134325 - DNA, 1764 bp, Propionibacterium acnes KPA171202
  CDS (1)..(1764): transl_table=11
gtggggccgaccactcgccccggcgccacccgacttcctcgcgaggaggacaccatgaacaataactatgtggtgggactggatttcggcacgctgtccggacgcgctgtcgtcgtacgggccaacgatggcgccgagatgggggccgccgtccatgagtatccccatggggtcatggaccgcaccttgagcgctgccgacggccgtaaacttccgccggacttcgccctccaggatcctgtcgattatctggagaccctcgagacgatcgtccgcggggccgtgaaggacgccggggttgatcccgaccacatcgtcggtatcgggttagacgtcacctctgccaccgtcgtcgctgcgacgaaggacggcactccactgtgtcaactacccgagttccgaaacgagcctcacgcctgggtcaagctctggaagcaccacggtgctcaggaccaggctgaccgcatcgtcaagttggcccaggtgcgtcgggaaccgtggctgacacggtatggaggaatcctgtcctccgagatgctcatgcccaaggtattggagaccctggaacgagccccgcaggtgtaccgggctaccgatgtgttctgcaacgtattggattggctgacgtggaggctgaccggggtgctggcgttctcgacgggcgattcggggtacaaacgtatgtaccaggacgggaagtatccgtcccgcgactacttgatgaacctcaacccagagttcgccgacgttttcgccgagaagatgaacgccccggtacttcccctgggagcccgggttggtggcctgacgccggagttctccgagcgtctgggattaccagtcggcaccacggtggccagcggcaacattgacgcccacgtcactgcggccgccgtgcaagcagtggagaacggccagatgactgcgatcatgggtacttcggcgtgctacgtcgttcccgggccccagctcaaggaagtccccggaatgtttggcgtcgtcgacggtgggatcgtcgatggttcgtggggattcgaggctgggcagacggcggtgggcgacatcttcgcctggtttatcgacaactgcgtcccgggctcgtatttcgacgaggctgaccacaggggcatcggtgtctatgacctgcttaccgaaaaatgtgcgaggcaggaggtcggtgcccatggtctcattgccctggactggcacaacggcaaccggtcggtgctcgcggatgccaacttgtcgggaatgatcttgggtcagactctcacgactacccccgaggaccagtaccgggccctgctggagtcgacagctttcggggcgcgcaccatcatcgagtcgttccgggattccggggttgagatcaacgagttggtggtggccggcggactgacgaagaacacattccttatgcagttgttctgcgatatctgccgagttcctctgagcgttgggactatcaaacagccaggcgcgcacggatctgcggtgttcgcggccgtcgccgccgatctgtaccccgacgttaaggctgcctctgctgcgatgggggcgaagaaggcgggggtctaccagatcgacgagcaacgcgccgagcagtacgacgccctgtacgccgagtacgctcggctccacgattacttcggccgcggtggcaaccaagtgatgcaccgtcttaaggagattcgacgtcaggcccatttgcgggcgcgggaatcgacggaaacgtcgaatggcggcaacggtgcacatttgtga

SEQ ID NO: 134326 - protein, 587 aa, Propionibacterium acnes KPA171202
MGPTTRPGATRLPREEDTMNNNYVVGLDFGTLSGRAVVVRANDGAEMGAAVHEYPHGVMDRTLSAADGRKLPPDFALQDPVDYLETLETIVRGAVKDAGVDPDHIVGIGLDVTSATVVAATKDGTPLCQLPEFRNEPHAWVKLWKHHGAQDQADRIVKLAQVRREPWLTRYGGILSSEMLMPKVLETLERAPQVYRATDVFCNVLDWLTWRLTGVLAFSTGDSGYKRMYQDGKYPSRDYLMNLNPEFADVFAEKMNAPVLPLGARVGGLTPEFSERLGLPVGTTVASGNIDAHVTAAAVQAVENGQMTAIMGTSACYVVPGPQLKEVPGMFGVVDGGIVDGSWGFEAGQTAVGDIFAWFIDNCVPGSYFDEADHRGIGVYDLLTEKCARQEVGAHGLIALDWHNGNRSVLADANLSGMILGQTLTTTPEDQYRALLESTAFGARTIIESFRDSGVEINELVVAGGLTKNTFLMQLFCDICRVPLSVGTIKQPGAHGSAVFAAVAADLYPDVKAASAAMGAKKAGVYQIDEQRAEQYDALYAEYARLHDYFGRGGNQVMHRLKEIRRQAHLRARESTETSNGGNGAHL

SEQ ID NO: 134327 - DNA, 1704 bp, Yersinia pseudotuberculosis IP 32953
  CDS (1)..(1704): transl_table=11
atgacaggcaacgtgatatcggcagacggtgctatagctctcgggttggatttcggtagcgattccgtccgggtattggcggtagattgtcaacatggcactgagatcgatacggaagtggtttactacccacgttggaagaaaggtctatattgtcaggccgcacaaaatcagttccgccaccatcctctcgactatattgaagcgatggaacaggccatccggcagatggtcaagcgcctgtcagaagaacaacgtcaacatattgtgggtattggtgtcgactctactggatcgacgccagcgccgattgatgagcaaggccaagtattagctctgcgcccggattttgcagataaccccaatgccatgtttgtgttgtggaaagatcacactgcaattgaggaggccgaagaaattaaccgtttatgccgtagcggtgaatttgcggactattcacgctatatcggtggggtttattcctctgagtggttctgggcaaaaattctacatgtcacccgtgctgatgtggctgttcgtgaggcggcagtgtcatggattgagctgtgtgactgggtaccggccctcttgtctggtaccaccgcaccgcaggatatccagcgtggccgttgcagcgccggacataaaagtttatggcacccttcatggggcggattacccccacgagcgttcctcgcagcattagataccagcctggttaatgatctcgattatcccatgtttactgacacctacaccgccgaacgaccggtaggccagatcaccgccgagtgggctgagcgtctgggcttaccaacgacggtgatcctttctggtggagcatttgattgccatatgggggcggtgggagccggtgctcaaccttatacattggtcaaagtcattggcacgtccacctgcgatatcttgattgccgatgaccaacgagtgggtgatcgggctatcgcgggtatctgtggccaggttgaaggcagtgtattgccgggttggattggcatggaagcgggtcaatctgcattcggtgatatgtatgcatggttcagcaatttgttgagttggccactgcatcaagcggcattgacccaacccgaatggcagccgcagctaaaacagatcgaatccaacctactcgcctcattgacctgcgcatgggcacaaaacccgtctctcgatcatctgcccgtggtattggattggtttaatggccgccgaaccccgaatgctaatcagcgtttaaaaggggtgattaccgatctgaatctgggtaccgatgcaccaaccctgtttggtggttttatcgctgcgaccgcctttggtgcccgcgccattatggaatgttttgaacagcaagatatcccggttgagaacgtgctggcattgggtggaattgcacgtaaatcgccggtgatcatgcaggtttgtgctgatgtcatgaatcggccactacagattgtggcatctgatcaatgttgtgcgctgggggcggcaatttttgcagccgttgccgcaggggcacacgaggatgttcccaccgcccaacgccacatggcatgcaatattgagcgcactctgattccggatcccgtccaggtcgtgcgttaccagcaactttatcaacgctatcagcagtggtgtcatacggcagagccgcattatgcgccagttaccaaggcaattcactga

SEQ ID NO: 134328 - protein, 567 aa, Yersinia pseudotuberculosis IP 32953
MTGNVISADGAIALGLDFGSDSVRVLAVDCQHGTEIDTEVVYYPRWKKGLYCQAAQNQFRHHPLDYIEAMEQAIRQMVKRLSEEQRQHIVGIGVDSTGSTPAPIDEQGQVLALRPDFADNPNAMFVLWKDHTAIEEAEEINRLCRSGEFADYSRYIGGVYSSEWFWAKILHVTRADVAVREAAVSWIELCDWVPALLSGTTAPQDIQRGRCSAGHKSLWHPSWGGLPPRAFLAALDTSLVNDLDYPMFTDTYTAERPVGQITAEWAERLGLPTTVILSGGAFDCHMGAVGAGAQPYTLVKVIGTSTCDILIADDQRVGDRAIAGICGQVEGSVLPGWIGMEAGQSAFGDMYAWFSNLLSWPLHQAALTQPEWQPQLKQIESNLLASLTCAWAQNPSLDHLPVVLDWFNGRRTPNANQRLKGVITDLNLGTDAPTLFGGFIAATAFGARAIMECFEQQDIPVENVLALGGIARKSPVIMQVCADVMNRPLQIVASDQCCALGAAIFAAVAAGAHEDVPTAQRHMACNIERTLIPDPVQVVRYQQLYQRYQQWCHTAEPHYAPVTKAIH

SEQ ID NO: 134329 - DNA, 1635 bp, Rhodobacter sphaeroides 2.4.1
  CDS (1)..(1635): transl_table=11
atgacccaggatccctcccgtcccgcgcccggcgccggtgacgtgcttctcggcatcgacgtcggcaccggcagtgcgcgcgcgggcctgttcgaccgcgcgggcaggatgctcgcctcggccaaatgcgacatcgcgatctggcgcgcgccgggcgcgatggtcgagcagtcgagccgcgacatctggcaggcggtctgccgcgcgacccgcacggcgctggccgaggcggggctgccgcccgaggcggtgggcggcgtgggcttcgacgccacctgctcgctcgtcgtggtgggcgagggcggcgcgcccctgccggtcgggccttccgaggatcccgagcgcaacatcatcgtctggatggatcaccgcgccgtggcgcaggccgagcggatcaacgcgcagggccacgaggtgctgcgctatgtgggcggccgcatctcgcccgagatggagacgccgaagctcctgtggctggccgagcaccggcccgacatcttcgcccgcgcctggcagttcttcgatctcgcggattatctcggctggcgggcgacgggggatctggcgcgctcgacctgcaccgtcacctgcaaatggacctatctcgcgcatgagcaccgctgggacgcgggctatttccggcaggtggggctcggggtgctggcggacgagggcttcgcgcggatcggcgcccgggtggtggagcccggcacgccgttgggccaagggctgacgggcgaggctgcagcggagctcggccttcgtcccggcacgccggtgggcgcggggctgatcgacgcccatgccggcgggatcggcaccgtgggcgccgagggcacgcccgagcgcgatctggcctatgtgttcggcacctcctcctgcaccatgaccaccacgcgcgagccggtcttcgtgccgggcgtgtggggcccctaccgctcggccatggtgcccggcatgtggctgaacgagggcggccagtcggccgcgggcgcggcgatcgagcagcttgtgtccttccaccccgccgcggccgaggccgcccgcgccacggaggccctgggcgaggcgctgcccgtccatctggcccggctggccgccgaggggctcgcggatctgtcggaggtggccacccgcgccgagggcctgcatgtggtgcccgaattcctcggcaaccgcgcgcccttcgccgatccccatgcgcgggcggtgatcgcgggcctcgggatggagcgcgacctgccgagcctcgtgtcgctctatgtggcggggatctgcggcatcgcctacgggctgcgccagatcctcgaggcgcaggagcgcgcgggcgccccggtcgagcggatcgccatctcgggcggtgcgggccagctcgacatggtgcgccagctgctggccgatgcgacgggcaagcccgtgctggcgagcgccgtggcggagccggtgctgctgggctcggccatcctcggcgcggtggcggccgggcacgagcccgacatgacggccgccatgcagcgcatgtcgcgcacggccgcgcactacgagcccgccgggggtgccatcgcggcgctgcacgaccgccgctatgcggccttcctcgccctgcaggaggcggcccgggccgcgcgcggctga

SEQ ID NO: 134330 - protein, 544 aa, Rhodobacter sphaeroides 2.4.1
MTQDPSRPAPGAGDVLLGIDVGTGSARAGLFDRAGRMLASAKCDIAIWRAPGAMVEQSSRDIWQAVCRATRTALAEAGLPPEAVGGVGFDATCSLVVVGEGGAPLPVGPSEDPERNIIVWMDHRAVAQAERINAQGHEVLRYVGGRISPEMETPKLLWLAEHRPDIFARAWQFFDLADYLGWRATGDLARSTCTVTCKWTYLAHEHRWDAGYFRQVGLGVLADEGFARIGARVVEPGTPLGQGLTGEAAAELGLRPGTPVGAGLIDAHAGGIGTVGAEGTPERDLAYVFGTSSCTMTTTREPVFVPGVWGPYRSAMVPGMWLNEGGQSAAGAAIEQLVSFHPAAAEAARATEALGEALPVHLARLAAEGLADLSEVATRAEGLHVVPEFLGNRAPFADPHARAVIAGLGMERDLPSLVSLYVAGICGIAYGLRQILEAQERAGAPVERIAISGGAGQLDMVRQLLADATGKPVLASAVAEPVLLGSAILGAVAAGHEPDMTAAMQRMSRTAAHYEPAGGAIAALHDRRYAAFLALQEAARAARG

SEQ ID NO: 134331 - DNA, 1668 bp, Saccharophagus degradans 2-40
  CDS (1)..(1668): transl_table=11
atggtttcttatgctttgggcctcgattacggctcagactctgttagagctcttctggtagataccgctactggcagcgaagtggcaacagctacagtgttgtacccgcgttgggcgaaagggttgtactgcaatcccagcgccgatcaatttcgccagcacccgttagattatttagagtcattagaaactgtactggctgatttgtggcaggcggctcccgctggcgctgctcaacatgtggttggaatcgcatttgatacaaccggttctacgcctatagcaatcgacagcgaaggccaagcgctggcattaaagccagaatttgccagcaaccccaacgcgatgttcgtattgtggaaagatcacaccgcagtaaaagaagcgcagcaaattactgccgcagcacaagcggctagcgaaaactaccttaaatacgaaggtggtatttactcttccgaatggttttgggccaaagcattacacgtgctgcgcgccgaccctgcggtgcgggatgccgcctacagctgggtagagcactgcgactggatgccggctgtgttaacgggcacgacgcatccaagcaagttgcgaataggccgctgcgccgccggtcacaaaatgatgtggcacgaaagctggggtggttttccgcccaatggttttttcaaagcgctcgacccggtattagatggcttgcgcgatacattgcctgctcaaacttatacctccgatcaaagcgtaggcgcattaactgcagagtgggctaccaagctggggctaccagctggaattgccgtgggctttggtgcatttgattgccatatgggcgctgtggctgcacgggttaaaccaggcgtgctaaccaaaattatgggtacgtctacctgcgacattactgtagctacctaccaagaaatggccgatacctgtgcgcgtggcatttgcggtcaagtagatggttctgtattgcctggcatggtgggcctagaggcgggtcagtctgcctttggtgatttgtacgcatggttccgcaatttaattaactggccgctgcaaaacattgcgcttagccaaaccgtgttagacgacactactcgccaagcgctaattaaagaaattgaagataaaaccttaatagccctaagcgacgaagcggccaagttggcgccgggccaagcgagtattactgcgctggattgggttaacggtcgtcgcactcccgatgccgaccaaaccgtggctatggccattgccggtttaaaaatgggcagtcaagcgccgcaggtatttcgcggcttggtagaagctaccgcattcggtgcgcgcgcaattatcgaacgctttcgcgcagaaggtgtgcgggttgattctgttgtcgctattggcggtatttctaaaaagtctgatttggtaatgcaaatttgcgccgatgtatggggctgccccatcgatgtattagaaagcgatcaaagttgtgcgctaggtgctgctatttttgctgccactgctgcgggtgtttaccccaatgtggcggcggcgcaagaagtaatggcgtcgtctgtatgcaaaacctatacgcctaatagtgatacagccgcaacgtacaacgcactttatcaaaactatttagccctaggggcattcgtaaacggagaagcaaagtga

SEQ ID NO: 134332 - protein, 555 aa, Saccharophagus degradans 2-40
MVSYALGLDYGSDSVRALLVDTATGSEVATATVLYPRWAKGLYCNPSADQFRQHPLDYLESLETVLADLWQAAPAGAAQHVVGIAFDTTGSTPIAIDSEGQALALKPEFASNPNAMFVLWKDHTAVKEAQQITAAAQAASENYLKYEGGIYSSEWFWAKALHVLRADPAVRDAAYSWVEHCDWMPAVLTGTTHPSKLRIGRCAAGHKMMWHESWGGFPPNGFFKALDPVLDGLRDTLPAQTYTSDQSVGALTAEWATKLGLPAGIAVGFGAFDCHMGAVAARVKPGVLTKIMGTSTCDITVATYQEMADTCARGICGQVDGSVLPGMVGLEAGQSAFGDLYAWFRNLINWPLQNIALSQTVLDDTTRQALIKEIEDKTLIALSDEAAKLAPGQASITALDWVNGRRTPDADQTVAMAIAGLKMGSQAPQVFRGLVEATAFGARAIIERFRAEGVRVDSVVAIGGISKKSDLVMQICADVWGCPIDVLESDQSCALGAAIFAATAAGVYPNVAAAQEVMASSVCKTYTPNSDTAATYNALYQNYLALGAFVNGEAK

SEQ ID NO: 134333 - DNA, 1590 bp, Acidobacteria bacterium Ellin345
  CDS (1)..(1590): transl_table=11
atggctatcgtcgcgggagtagatttcgggaccttgagcgtgcgcgtctcgctcgtagacagcgagcgcgggatgctcgcttccgccgttgcagaatacccgctgcaccgtcgctccgacgatcccgaatacgctacccaatcgcatgacgaccacatgcgatcgctcgccgaggctacgcgcgaagccgtgaacaaagctggcgtctccggcgaccaggtcgaagcgattgctctcgacaccactggctcctccgtcattcccgtgggcaaagatctcacgccgcttggcgagtactacctctggtgcgatcaccgctccaagggagaagctgccgaaatcacggaagccgcgcatcgcgagcatctagcggccatcgattggtgcggcggcgtctattcctccgagtggggcttctccaagctgctgcattggctgcgccacaatcccgacaagcgcgccgagttcgtcacagctttcgaacactgcgacatggtggccgcgacgctggccggaatcactgatccgaagaaggtgaagcgcagcgcctgcgcgatgggccacaagtggctctggaaccccaagctcggcgggcttcccccggaagaattcctcgtaaaggtcgacccgctgctcgctggagtacgcggaaagctcgaaggcgagtacacacagtccgatcacatcgccggacatctctgtccgtattgggcggagcaacttggtctcaaagccggcattccgattccggtcggcgcgttcgacgcgcactgggacgccatcggcgccggttgtcgcaccgacgacatggtcaacgtcatcggcacttcgacttgcatcatcggcatcacgccgtcggtgaacctggttcccggcgtctgcggcgtggtggaaggcagcgtgcatccctcgcgcaccggcattgaagccgggctctccgcagtgggcgatatcttcaatgccatcgccactcgcgcgggcaccgatgtcgcaacgctgagccatggactcgacaaatatcgggccggtcaaaccggcttgctgcgacttacctgggacaatggcgatcgcaccgtactggtgaatccgaatctccgcggcattaccctaggctggaacttgcagagcaccgcgcaagacgaactcttcgctgcgatcgaaggtacggccctgcatactcgcgtgattctcgatcgcatggcgcagaacggtgtcgagatcaaacgagtgatcaacgccggtggcattccgcagaagaacgcggtcctgaaccaggtgtatgcgaacgttctcggcaggccagtgctggttccttcgaaaagcgtgaccagcctgggttccgcgatttttgcttttctggcggccggcacgttcaagacggtggaagacgcgcaggacaaaatctgtccgccgcacaaaatgtttgagccccaaccatccgagcaggccgtgtatgacgagctctacgccttatacagcgagttgtacttcgctttcggaacgccggccacaagcggtttgggcacagtgttgccaaaattgatcaaagtttctgagcacgcgcgcaagtcggcagccgtcacttcctga

SEQ ID NO: 134334 - protein, 529 aa, Acidobacteria bacterium Ellin345
MAIVAGVDFGTLSVRVSLVDSERGMLASAVAEYPLHRRSDDPEYATQSHDDHMRSLAEATREAVNKAGVSGDQVEAIALDTTGSSVIPVGKDLTPLGEYYLWCDHRSKGEAAEITEAAHREHLAAIDWCGGVYSSEWGFSKLLHWLRHNPDKRAEFVTAFEHCDMVAATLAGITDPKKVKRSACAMGHKWLWNPKLGGLPPEEFLVKVDPLLAGVRGKLEGEYTQSDHIAGHLCPYWAEQLGLKAGIPIPVGAFDAHWDAIGAGCRTDDMVNVIGTSTCIIGITPSVNLVPGVCGVVEGSVHPSRTGIEAGLSAVGDIFNAIATRAGTDVATLSHGLDKYRAGQTGLLRLTWDNGDRTVLVNPNLRGITLGWNLQSTAQDELFAAIEGTALHTRVILDRMAQNGVEIKRVINAGGIPQKNAVLNQVYANVLGRPVLVPSKSVTSLGSAIFAFLAAGTFKTVEDAQDKICPPHKMFEPQPSEQAVYDELYALYSELYFAFGTPATSGLGTVLPKLIKVSEHARKSAAVTS

SEQ ID NO: 134335 - DNA, 1674 bp, Shewanella sp. MR-4
  CDS (1)..(1674): transl_table=11
atgtcgaatgttttaggggcttacgcgttagggcttgattacggctcagattcagttcgcgcgttattggtggatacccaaacgggcgcagaagtagcaacgaatgtggtttactacccacgttggaagaaggggcttttttgcgatcctgccaagaatcaatttagacaacatcccctcgattacatcgaaagccttatcgaggtagttcaaggactctgggcaaaagctcccagtggcgccgcgcaaagagtctgcggtttgagtgttgataccacaggctcaaccccgattgcggttgatgaatccggtgttgctctagccttaaagccagagtttgcgagtaatcccaatgccatgtttttgctttggaaagatcacagcgccatcctcgaagcccagcaaattaccgctgcggcaaacaatgcaagtgaaaactacctgaaatatgaaggaggaatttactcctccgaatggttttgggcgaaagcgctatttgtattgcgccacgacacagaagtcagacaagccgcttatagctgggtcgaacactgtgattggatcaccgcattaatgacaggcaccacacatccaaaagtctttaaggcagggcgctgcgccgccggtcacaaagtgatgtggcatgagtcatggaatggttatccgccgaatgactttttcgttggtatcgaccccttactcgatggattgagagacaagttaccgcttgaaacctgcacatctgacaaagtttgcggccagctaacccctgagtgggctcagcatttagggctatcgaccgaggttattgtatcttttggctcatttgactgccacgcaggcgccgttggagccaatgttaaacctggtgtcttaaccaaggtgatggggacttctacctgcgacattacggtcgccagttatgatgatataggtgagcgttgtatcaaaggtatttgcggtcaagtggatggctcagtattacccggcatgatagggctggaagcgggtcagtcagccttcggcgatctctacgcttggtttagggatctcaccgcatggccgatgcaacagcttgacacctctgccttatttgatgacaacaccaaagccaaactcattcagcaactcgaatctgaaaccctgacaatgttaggcaatgcggctgcgaaaattcccgttggcgagactggtattgtcgcgctggattggattaacggacgtcgcacccccgatgccgaccaatctgttgccatggctatcacagggttaaccatgggcagccaagcaccgcaagtcttcaaagctttagtggaagccagtgcctatggcgcacgggccattatcgagcgcttcaaacaagaaggcgtttgcattgaccatgtggtcaccattggtgggatctcgaaaaaatccgacttcattatgcaaacctgtgccgatgtgtggaattgcaacatcgacgtactcgagagcgagcaaagctgtgccctaggcgccgctatttatgctgcaaccgcagccggggtttatcccgatgtgctgagtgcccaagccgccatggcctcaaacgttgcgaaaacctatcagccaaatcctgaaaacgcagagaaatatcaagcgctttaccaagggtacttagcccttggccactatgttgatggagcgaaataa

SEQ ID NO: 134336 - protein, 557 aa, Shewanella sp. MR-4
MSNVLGAYALGLDYGSDSVRALLVDTQTGAEVATNVVYYPRWKKGLFCDPAKNQFRQHPLDYIESLIEVVQGLWAKAPSGAAQRVCGLSVDTTGSTPIAVDESGVALALKPEFASNPNAMFLLWKDHSAILEAQQITAAANNASENYLKYEGGIYSSEWFWAKALFVLRHDTEVRQAAYSWVEHCDWITALMTGTTHPKVFKAGRCAAGHKVMWHESWNGYPPNDFFVGIDPLLDGLRDKLPLETCTSDKVCGQLTPEWAQHLGLSTEVIVSFGSFDCHAGAVGANVKPGVLTKVMGTSTCDITVASYDDIGERCIKGICGQVDGSVLPGMIGLEAGQSAFGDLYAWFRDLTAWPMQQLDTSALFDDNTKAKLIQQLESETLTMLGNAAAKIPVGETGIVALDWINGRRTPDADQSVAMAITGLTMGSQAPQVFKALVEASAYGARAIIERFKQEGVCIDHVVTIGGISKKSDFIMQTCADVWNCNIDVLESEQSCALGAAIYAATAAGVYPDVLSAQAAMASNVAKTYQPNPENAEKYQALYQGYLALGHYVDGAK

SEQ ID NO: 134337 - DNA, 1674 bp, Shewanella sp. MR-7
  CDS (1)..(1674): transl_table=11
atgtcgaatgttttaggggcttacgcgttagggcttgattacggctcagattcagttcgcgcgttattggtggatacccaaacgggcgcagaagtagcaacaaatgtggtgtactacccacgttggaagaaggggcttttttgcgatcctgccaagaatcaatttagacaacatcccctcgattacatcgaaagccttatcgaggtagtacaaggactctgggcaaaagctcccagtggcgccgcgcaaagagtctgcggtttgagtgttgataccactggttcaaccccgattgcggttgatgaatccggtgttgccttagccttaaaaccagagtttgcgagtaatcccaatgctatgtttttgctttggaaagatcacagcgcgattctcgaagcccagcaaattaccgctgcggcaaacaatgcaagcgaaaattacctgaaatatgaagggggaatttactcctccgaatggttttgggcgaaagcgctattcgtattgcgccacgacacagaagtcagacaagcggcctatagctgggtcgaacactgtgattggatcaccgcattaatgacaggcactacacatccaaaagtctttaaggcagggcgctgcgccgccggtcacaaagtgatgtggcatgagtcatggaatggttatccgccgaatgactttttcgttggcatcgaccccttactcgatggattgagagacaagttaccgcttgaaacctgcacatctgacaaagtgtgcggccagctaaccccagagtgggcacagcatttagggctatcgaccgaggttatcgtgtcttttggctcatttgactgccacgcaggcgccgttggagccaatgttaaacctggcgtcttaaccaaggtgatggggacctctacctgcgacattacggtcgccagttatgacgatataggtgagcgttgtatcaaaggcatttgcggtcaagtggatggctcagtattgcccgggatgatagggctggaagcgggtcagtcagccttcggcgatctctacgcttggtttaaggatctcaccgcatggccgatgcaacagcttgacacctcagccttatttgatgacaacaccaaagccaaactcattccgcaactcgaatctgaaaccctgacaatgttaggcaacgcggccgcaaaaatccccgttggtgagacaggtattgtcgcgctggattggattaacggacgtcgtacgcccgatgccgaccaatctgttgccatggctatcacaggattaaccatgggcagccaagcaccgcaagtcttcaaagctttagtggaagccagtgcctatggcgcacgtgccattatcgagcgcttcaaacaagaaggcgtttgcattgaccatgtggtcaccattggtgggatctcgaaaaaatccgacttcattatgcaaacctgtgccgatgtgtggaattgcaacatcgatgtactcgagagcgagcaaagctgtgccctaggcgccgctatttatgccgcaaccgcagccggggtttatcccgatgtgctgagtgcccaagccgccatggcctcaaacgttgccaaaacctatcagccaaatcctgaaaatgcagagaaatatcaagcgctttaccaagggtacttagcccttggccactatgttgatggagcgaaataa

SEQ ID NO: 134338 - protein, 557 aa, Shewanella sp. MR-7
MSNVLGAYALGLDYGSDSVRALLVDTQTGAEVATNVVYYPRWKKGLFCDPAKNQFRQHPLDYIESLIEVVQGLWAKAPSGAAQRVCGLSVDTTGSTPIAVDESGVALALKPEFASNPNAMFLLWKDHSAILEAQQITAAANNASENYLKYEGGIYSSEWFWAKALFVLRHDTEVRQAAYSWVEHCDWITALMTGTTHPKVFKAGRCAAGHKVMWHESWNGYPPNDFFVGIDPLLDGLRDKLPLETCTSDKVCGQLTPEWAQHLGLSTEVIVSFGSFDCHAGAVGANVKPGVLTKVMGTSTCDITVASYDDIGERCIKGICGQVDGSVLPGMIGLEAGQSAFGDLYAWFKDLTAWPMQQLDTSALFDDNTKAKLIPQLESETLTMLGNAAAKIPVGETGIVALDWINGRRTPDADQSVAMAITGLTMGSQAPQVFKALVEASAYGARAIIERFKQEGVCIDHVVTIGGISKKSDFIMQTCADVWNCNIDVLESEQSCALGAAIYAATAAGVYPDVLSAQAAMASNVAKTYQPNPENAEKYQALYQGYLALGHYVDGAK

SEQ ID NO: 134339 - DNA, 1581 bp, Solibacter usitatus Ellin6076
  CDS (1)..(1581): transl_table=11
atgagcatcgtcgccggagtcgatttcggtaccctcagcgttcgcgtttccatcttcgattccttccgcggccgtctcggcgccggcgccgccgactacccgctcctgcgcaagaacgaagatcccgatcacgctacccagagccatgccgaccatatggctgccctggcccttgccacccgacgcgcattcgagaatgccggcatcgatggccacgcgatcgaagccatcgcgctcgacaccacgggttccagcgtaatcccggtggactcggccatgcagccgatcgacgattactacctctggtgcgatcaccgcgcctggaaggaagcctccgagatcacctccgccgctaaccagcaaaagctggcagccatcgattggtgcggcggcatttactccagcgaatggggcttcgccaaactgctccactggctccgccacaaccccgcgaagcgcgcccgtttcgccaccgcgctcgaacactgcgacatggtcgccgccgtcctatgcggcgtcaccgaccccgcgcaggtctcgcgcagcatctgcgctatgggccacaagtggatgtggagcgccgccctcggcggcctccctcccgaggaatttctcacttcgctcgatcccaccctcgccggagtccgcggacaactcgacggccgctacgccaccagcgatcagatcgccgggtatttgagccccgcatgggccgggacactcggcctgcgcgccggtattccaatcccggtcggcgccttcgacgcccattgggatgccatcggcgccggcgtccgcatcggggatgtggtcaacgtggtcggcacctcaacctgcatcatggcgatcagtgatcagccgagcctgattcccggcgtctgcggcgtggtccccggttcgattcatcccggctacaccggcatcgaagccggactctccgcgaccggcgatatcttcgaagccatcgcacgccgcgccggcaccagcgtcgccgaactttccaaggggctcgagcactatcgcgcgggcgagaccggcctgctccgcctcacctgggataatggcgatcgcacggtgctcgtcaatcccgaattgagcggggtgaccctggggtggcgcctcaccaccactgcgcaggacgaactcttcgccgccatcgaaggcaccgccttccacacccgcgtcattctcgaacgcatggagcaatacggtgtcccggtgcgccgcattatcaacggcggcggcattccgcagaagaacgccgtgctgaaccaggtctatgccaacgtgatgggcaaacccatcctggtgcccaagggcgacgtgaccagcctcggctcggccatcttcgccttcatggccgctggagccttccgcaccatcgaagaggcgcaggacgcgctctgccccggctttgtcaccatcgaaccggagcgcgatcaggccgccaccagccaggaactctttcacctttacaataaattgtactttgcattcggcaacggccaggagctgccccaattgcgccgcatcgccgcccacacccgaggaggaaaaagtgctggaaacgctgcgagctga

SEQ ID NO: 134340 - protein, 526 aa, Solibacter usitatus Ellin6076
MSIVAGVDFGTLSVRVSIFDSFRGRLGAGAADYPLLRKNEDPDHATQSHADHMAALALATRRAFENAGIDGHAIEAIALDTTGSSVIPVDSAMQPIDDYYLWCDHRAWKEASEITSAANQQKLAAIDWCGGIYSSEWGFAKLLHWLRHNPAKRARFATALEHCDMVAAVLCGVTDPAQVSRSICAMGHKWMWSAALGGLPPEEFLTSLDPTLAGVRGQLDGRYATSDQIAGYLSPAWAGTLGLRAGIPIPVGAFDAHWDAIGAGVRIGDVVNVVGTSTCIMAISDQPSLIPGVCGVVPGSIHPGYTGIEAGLSATGDIFEAIARRAGTSVAELSKGLEHYRAGETGLLRLTWDNGDRTVLVNPELSGVTLGWRLTTTAQDELFAAIEGTAFHTRVILERMEQYGVPVRRIINGGGIPQKNAVLNQVYANVMGKPILVPKGDVTSLGSAIFAFMAAGAFRTIEEAQDALCPGFVTIEPERDQAATSQELFHLYNKLYFAFGNGQELPQLRRIAAHTRGGKSAGNAAS

SEQ ID NO: 134341 - DNA, 1674 bp, Shewanella sp. ANA-3
  CDS (1)..(1674): transl_table=11
atgtcgaatgttttaggggcttacgcgttagggcttgattacggctctgattcagttcgcgcgttattggtggatacccaaacgggcgcagaagtagcaacgaatgtggtgtactacccacgttggaagaaggggcttttttgcgaacccgcgaagaatcaatttagacaacatcccctcgattacatcgaaagccttatcgaggtagtgcaagggctatgggcaaaagccccgagtggtgccgcgcaaagagtctgcggtttgagtgttgataccacaggctcaaccccgattgcggtcgatgaatctggtgttgctttagccttaaaaccagagtttgagaataaccccaatgccatgtttttgctttggaaagatcacagcgccatcatcgaagccaagcaaattaccgctgcggcaaacgattcaagcgaaaattacctgaaatatgaagggggaatttactcctcagaatggttttgggccaaagcgctatttgtactacgccatgacgcagaagtcagacaagcggcctatagctgggtcgagcactgtgattggatcaccgcattaatgacgggcacttcacatccaaaggtctttaaagcagggcgttgcgccgctggtcacaaagtgatgtggcacgagtcatggaatggttatccgccgaatgactttttcgttggcatcgaccccttactcgatggcttgagagacaagttaccgctagaaacctgcacatctgacaaggtttgcggccagctaacccctgagtgggcacagcatttagggctatcgaccgaggttatcgtgtcttttggctcattcgactgccacgcaggtgcggtgggggccaatgttaagcccggcgtcttaaccaaggtaatgggaacctctacctgcgatatcacggtcgccagttatgaagatataggtgagcgttgtatcaaaggcatttgtggtcaagtcgatggctcagtattgcccggcatgatagggctagaagcgggtcagtctgcctttggcgatctctacgcttggtttagggatctcacagcatggccgatgcaacagcttgacacttcagtcttatttgatgaaaacatcaaagccaaactcattcagcaactcgaatctgaaactctgacaatgttaggcaatgcggccgcgaaaatccccgttggcgagacgggcattgtcgcactggattggattaacggacgtcgcacccccgatgccgaccaatctgttgccatggcgatcacaggcttaaccatgggtagccaagctccgcaagtcttcaaagccctagtggaagccagcgcctatggcgcacgggccattatcgagcgcttcaaacaggaaggcgtttgcattgaccatgtggtcaccatcggtgggatctcaaaaaaatccgacttcattatgcaaacctgcgccgatgtgtggaattgcaacatcgacgtactcgagagcgagcaaagctgcgcattgggcgccgccatttatgccgcaaccgcagccggggtttatcccgatgtgctaagtgcccaggcagccatggcctcgaacgttgcgaaaacctatcaaccaaatccagaaaacgctgagaaatatcaagcgctttaccaagggtacttagcccttggccactatgttgatggagcgaaataa

SEQ ID NO: 134342 - protein, 557 aa, Shewanella sp. ANA-3
MSNVLGAYALGLDYGSDSVRALLVDTQTGAEVATNVVYYPRWKKGLFCEPAKNQFRQHPLDYIESLIEVVQGLWAKAPSGAAQRVCGLSVDTTGSTPIAVDESGVALALKPEFENNPNAMFLLWKDHSAIIEAKQITAAANDSSENYLKYEGGIYSSEWFWAKALFVLRHDAEVRQAAYSWVEHCDWITALMTGTSHPKVFKAGRCAAGHKVMWHESWNGYPPNDFFVGIDPLLDGLRDKLPLETCTSDKVCGQLTPEWAQHLGLSTEVIVSFGSFDCHAGAVGANVKPGVLTKVMGTSTCDITVASYEDIGERCIKGICGQVDGSVLPGMIGLEAGQSAFGDLYAWFRDLTAWPMQQLDTSVLFDENIKAKLIQQLESETLTMLGNAAAKIPVGETGIVALDWINGRRTPDADQSVAMAITGLTMGSQAPQVFKALVEASAYGARAIIERFKQEGVCIDHVVTIGGISKKSDFIMQTCADVWNCNIDVLESEQSCALGAAIYAATAAGVYPDVLSAQAAMASNVAKTYQPNPENAEKYQALYQGYLALGHYVDGAK

SEQ ID NO: 134343 - DNA, 1704 bp, Nocardioides sp. JS614
  CDS (1)..(1704): transl_table=11
gtggtcgcaggggtggtcgcaggggcggtcgcagccggttcccggcccgagctcgtggtcggcgtggacttcggcaccctctccggtcgcgccgtggtcgtccgggtcgaggacggcgccgagctcggctcggccacgcacgagtacccccacggcgtcctggaccgcgagctccccgacggcaccccgctcggcccggactgggcgctgcaggtgccggccgactacgtcgacgtgctgcgggtggccgtcccggccgcgctcgcggcggcgggcgccgacgccgcccaggtgatcgcgatcggcaccgacttcaccgcctgcacgatggtgccgacgaccgcggacggcacgccgctcaacgaggtcgagggcttcgcctccgagccgcacgcctacgtcaagctctggaagcaccacgcggcacagccgcaggcggaccggatcaacgccctcgccgccaagaggggcgaggcctggctgccgcggtacggcggcctgatctcctcggagtgggagttcgccaagggtctgcagctgctcgaggagagcccggagacctaccgggccaccgcgcactgggtcgaggcggccgactggatcgtgtggcagctgtgcggcgagtacgtccgcaacgcctgcaccgccggctacaagggcatcttccaggacggcacctacccgacccgcgagttcctggccgagctgcaccccgacttcgagggcttcgtcgaggacctgctccagccggtcaccggccagctcggccgaccggccggccggctcaccgaggaggccgccgcctggaccgggctgccggccggcatcgtggtcgcggtcggcaacgtcgacgcccatgtcaccgcccccgccgcgcagtcgaccgagtccggccagatgctcgccatcatgggcacctcgacgtgccacatcatgaacggcgcggtgctccgcgaggtccccgggatgtgcggggtggtcgacggcggcatcactcagggcctgtggggctacgaggccgggcagtccggcgtcggcgacatcttcaactggttcgtcaccaacgcggtgccggcggcgtacgccgaggaggccgccgcccgcggggtcgacgtgcacgagctgctcaccgagaaggccgccgcccaggcggtcggcgagcacggcctggtggccctcgactggcacagcgggaaccgttcggtcctcgtcgaccacgagctcagcggcctcgtgctcggcctcaccctgaccacccggcccgaggacgtgtaccgggcgctgatcgaggcgaccgcattcggcacccgcacgatcgtggagaccttcggcgcctcgggcgtgccggtcaccgagttcgtcgctgcgggtggcctgctcaagaaccagttcctgatgcaggtctacgccgacgtgctgggcatgccgatctcggtgatcacctccgagcagggcccggcgctcggctcggcgatccacgccgcggtcgccgccggcgcctaccccgacgtccacgccgcctcggcggccatgggcggcgtcgagcgcggcgcctaccagcccgacccggtccgcgccgcggcgtacgacgccctctacgccgagtaccgcgccctccacgatcacttcggtcgcggcggcaccgaggtgatgcgccgactccgctcgatccgccgcgccacccacaccggagcccaggcatga

SEQ ID NO: 134344 - protein, 567 aa, Nocardioides sp. JS614
MVAGVVAGAVAAGSRPELVVGVDFGTLSGRAVVVRVEDGAELGSATHEYPHGVLDRELPDGTPLGPDWALQVPADYVDVLRVAVPAALAAAGADAAQVIAIGTDFTACTMVPTTADGTPLNEVEGFASEPHAYVKLWKHHAAQPQADRINALAAKRGEAWLPRYGGLISSEWEFAKGLQLLEESPETYRATAHWVEAADWIVWQLCGEYVRNACTAGYKGIFQDGTYPTREFLAELHPDFEGFVEDLLQPVTGQLGRPAGRLTEEAAAWTGLPAGIVVAVGNVDAHVTAPAAQSTESGQMLAIMGTSTCHIMNGAVLREVPGMCGVVDGGITQGLWGYEAGQSGVGDIFNWFVTNAVPAAYAEEAAARGVDVHELLTEKAAAQAVGEHGLVALDWHSGNRSVLVDHELSGLVLGLTLTTRPEDVYRALIEATAFGTRTIVETFGASGVPVTEFVAAGGLLKNQFLMQVYADVLGMPISVITSEQGPALGSAIHAAVAAGAYPDVHAASAAMGGVERGAYQPDPVRAAAYDALYAEYRALHDHFGRGGTEVMRRLRSIRRATHTGAQA

SEQ ID NO: 134345 - DNA, 1701 bp, Escherichia coli B
  CDS (1)..(1701): transl_table=11
atggcgattgcaattggcctcgattttggcagtgattctgtgcgagctttggcggtggactgcgccagcggtgaagagatcgccaccagcgtagagtggtatccccgttggcaaaaagggcaattttgtgatgccccgaataaccagttccgtcatcatccgcgtgactacattgagtcaatggaagcggcactgaaaaccgtgcttgcagagcttagcgtcgaacagcgcgcagctgtggtcgggattggcgttgacagtaccggctcgacgcccgcaccgattgatgccgacggtaacgtgctggcgctgcgcccggagtttgccgaaaacccgaacgcgatgttcgtattgtggaaagaccacactgcggttgaagaagcggaagagattacccgtttgtgccacgcgccgggcaatgttgactactcccgctatattggcggtatttattccagcgaatggttctgggcaaaaatcctgcatgtgactcgccaggacagcgccgtggcgcaatctgccgcatcgtggattgagctgtgcgactgggtgccagctctgctttccggtaccacccgcccgcaggatattcgtcgcggacgttgcagcgccgggcataaatctctgtggcacgaaagctggggcggcttgccgccagccagtttctttgatgagctggacccgatcctcaatcgccatttgccttccccgctgttcactgacacctggactgccgatattccggtgggcaccttatgcccggaatgggcgcagcgtctcggcctgcctgaaagcgtggtgatttccggcggcgcgtttgactgccatatgggcgcagttggcgcaggcgcacagcctaacgcactggtaaaagttatcggtacttccacctgcgacattctgattgccgacaaacagagcgttggcgagcgggcagttaaaggtatttgcggtcaggttgatggcagcgtggtgcctggatttatcggtctggaagcaggccaatcggcgtttggtgatatctacgcctggttcggtcgcgtactcagctggccgctggaacagcttgccgcccagcatccggaactgaaagcgcaaatcaacgccagccagaaacaactgcttccggcgctgaccgaagcatgggccaaaaatccgtctctggatcacctgccggtggtgctcgactggtttaacggtcgtcgctcgccaaacgctaaccaacgcctgaaaggggtgattaccgatcttaacctcgctaccgacgctccgctgctgttcggcggtttgattgctgccaccgcctttggcgcacgcgcaatcatggagtgctttaccgatcaggggatcgccgtcaataacgtgatggcgctgggcggcatcgcgcggaaaaaccaggtcattatgcaggcctgctgcgacgtgctgaatcgcccgctgcaaattgttgcctctgaccagtgctgtgcgctcggtgcggcgatttttgctgccgtcgccgcgaaagtgcacgcagacatcccatcagcccagcaaaaaatggccagtgcggtagagaaaaccctgcaaccgcgcagcgaacaggcacaacgctttgaacagctttatcgccgctatcagcaatgggcgatgagcgccgaacaacactatcttccaacttccgccccggcacaggctgcccaggccgttgcgactctataa

SEQ ID NO: 134346 - protein, 566 aa, Escherichia coli B
MAIAIGLDFGSDSVRALAVDCASGEEIATSVEWYPRWQKGQFCDAPNNQFRHHPRDYIESMEAALKTVLAELSVEQRAAVVGIGVDSTGSTPAPIDADGNVLALRPEFAENPNAMFVLWKDHTAVEEAEEITRLCHAPGNVDYSRYIGGIYSSEWFWAKILHVTRQDSAVAQSAASWIELCDWVPALLSGTTRPQDIRRGRCSAGHKSLWHESWGGLPPASFFDELDPILNRHLPSPLFTDTWTADIPVGTLCPEWAQRLGLPESVVISGGAFDCHMGAVGAGAQPNALVKVIGTSTCDILIADKQSVGERAVKGICGQVDGSVVPGFIGLEAGQSAFGDIYAWFGRVLSWPLEQLAAQHPELKAQINASQKQLLPALTEAWAKNPSLDHLPVVLDWFNGRRSPNANQRLKGVITDLNLATDAPLLFGGLIAATAFGARAIMECFTDQGIAVNNVMALGGIARKNQVIMQACCDVLNRPLQIVASDQCCALGAAIFAAVAAKVHADIPSAQQKMASAVEKTLQPRSEQAQRFEQLYRRYQQWAMSAEQHYLPTSAPAQAAQAVATL

SEQ ID NO: 134347 - DNA, 1839 bp, Aspergillus niger
  CDS (1)..(1839)
atggcttctataccccagatgccttatcgacgaccctctcggcagggttctaggcaggcgtcgatagatacgcgggatgagatacaggtccgcgtagaccactacattggaattgatgttgggactggcagtgcccgcgcttgtataatcgatagcaaaggcgatattgtcggcctagcctctgagaacattggtctttggcaacctcaacaaggatattatgaacaatctacgaacgatatctggcgatgcatctgtgtagctgttcagcgcgcaatcagccaacacaacattgatccagagaccgtgaggggcattgggttcgatgcgacatgctcgttgtcggttttttctaacgttacgaacgaaccgatatccgtgacgggtcccaacttcaactcggaccgcaatgtgatcctctggctcgatcatcgcccagtggacgaaaccgaaagaattaatgctacgaaccacaatctgctccgctatgtaggcggaaagatgtccatcgagatggagattcccaaagtcctgtggctgaaaaacaatatgccaaaggagctctttgatcagtgcaaattcttcgacctggctgacgccctgacttacattgccactggcgccgagcagaggagcttctgtagtgtagtctgcaagcagggatatgttcctgtaggtgttgacggcagtgtaaaaggttggcaggaagactttctgaacgaaattggtctggaggacctgtcggaggataacttcaagcgaatgggcggtgtcgacggggtgaatggcgattatcttagcgctggtgaactggtcggcacattgtgtgagaaggctgcctctgagctgggtctgcccccggggattgcaatcggcagcggcgtcatcgatgcctatgcaggctggattggcacagtcggcgctaaggtcgatctcgagtcggaacagctgagctctgacatcgccaagaacgataaggcacaggcattctctcgcttggccgctgtcgctggaacatcaacctgccatcttgcgatgtccccagatcctatatttgtccctggtgtctgggggccttaccgcgatactatccagccgggatattggatggccgagggcggccaatccgcaaccggggagctgctcaagcatgttatcgagactcaccccgcgttcaatcaggcactctcgatcgctgagtcgtacaacgccaatatatatgaatatctaaacgagcatctgaaggaactggctcatgaccagaaggctcctagtatctcttatctgggccgacatgttttcttctacggtgatctttggggcaaccgttcccccattgcagatcctggaatgacaggttctatgattgggatcacgagtgacaagtctgtggatgggctcgctgttcattactatgccaccctcgaatttatcgcgctacaaaccaggcaaattgtggagacaatgaacaaagcaggtcatcgcatcacctccattttcatgtcgggctctcagtgccaaaatgacattctggtaaagctaatagcatctgcttgtgacatgcccgtgcttatccctcgttatattcatgctgctgtctgccatggtgcagccatgctgggtgccaaagccgctagtgctgacgcagaaggcaagacagaagatctgtggtctattatggaccgcatgagcaagccgggaaaaaaggtcgtcccaactacggatgagacggagaaggccttgcttaacgccaaatacaaggtcttcttagagcaatgttacaagcagcaggagtaccgagccctcgtagatcaagccgtggcctcgtggacgtcttaa

SEQ ID NO: 134348 - protein, 612 aa, Aspergillus niger
MASIPQMPYRRPSRQGSRQASIDTRDEIQVRVDHYIGIDVGTGSARACIIDSKGDIVGLASENIGLWQPQQGYYEQSTNDIWRCICVAVQRAISQHNIDPETVRGIGFDATCSLSVFSNVTNEPISVTGPNFNSDRNVILWLDHRPVDETERINATNHNLLRYVGGKMSIEMEIPKVLWLKNNMPKELFDQCKFFDLADALTYIATGAEQRSFCSVVCKQGYVPVGVDGSVKGWQEDFLNEIGLEDLSEDNFKRMGGVDGVNGDYLSAGELVGTLCEKAASELGLPPGIAIGSGVIDAYAGWIGTVGAKVDLESEQLSSDIAKNDKAQAFSRLAAVAGTSTCHLAMSPDPIFVPGVWGPYRDTIQPGYWMAEGGQSATGELLKHVIETHPAFNQALSIAESYNANIYEYLNEHLKELAHDQKAPSISYLGRHVFFYGDLWGNRSPIADPGMTGSMIGITSDKSVDGLAVHYYATLEFIALQTRQIVETMNKAGHRITSIFMSGSQCQNDILVKLIASACDMPVLIPRYIHAAVCHGAAMLGAKAASADAEGKTEDLWSIMDRMSKPGKKVVPTTDETEKALLNAKYKVFLEQCYKQQEYRALVDQAVASWTS

SEQ ID NO: 134349 - DNA, 1608 bp, Klebsiella pneumoniae
  CDS (1)..(1608): transl_table=11
atgcataacgatacgcaaaacattattggcgtggatgtcggttcgggcagcgtgcgcgccggggtattcaatctgcggggcgagctcctcgcccacgcgacccgggaaataaccctgtttcgcagcgccggaaacaaggtcgagcagtcgagccgtgagatctggcaggcggtgtgctactgcattaaaacggcggtggccaacgccggcgtttcgccgtcgtcgatcgccgggatcggcttcgatgccacctgctcgctggtggtgattggcgataacgatgcgccgctggcggtcgggccttcggacgatgcggaccgcaacattattgtctggatggatcatcgcgccaccgggcaggcggaaaagatcaatgccacgggccacccggtactgcggtacgttggcggcaaaatctcgccggagatgcaaacgccgaaaattttgtggctgaaggagaatcgcccgcacatctatcagctggcgcgccacttcttcgacctcgccgattacctcacctggcgctcaaccggcgatgaagcccgctcggtctgcacggtgacctgtaaatggacctacctggcgcatgaacaacgctgggatgccggttacttccgccagattggcctcgaagagctggtggatgaagattttgtccgcatcggccagcggattgtcgatccaggcaccccctgcggcgagggcctttgcgccacggcggcagaggagatgggcctgccgatcggtacgccggtggcggtggggatgattgacgcccacgcgggcggcatcggtaccgtcggcgtgcttaacggcgcggtcaacaatatggcctatgtcttcggcacttcttcctgcaccatgaccaccactcaggaagcggtattcgtcccgggcgtctggggcccttactattcggcgatggtgccgggctactggctaagtgaaggcgggcaaagcgccgccggcgcggctatcgaccagctgctgagcttccatccggcggcggcggaagcgcgcgagcacgcgaaagccgcaggcgtccctctaccggtctggctggcggatcgcgttctgacgcaagttgcttccccttctgaggcggtaacgctggccgccggtctgcacgtcgttccggagtttctcggtaatcgcgcgccgcttgccgatccccacgcgaaagcgctgattgccgggctggggatggagcgggacctggataacctgaccgcgctgtacgttgccgggctatgcgggattggctatggtctgcgacagatcattgacgcccagcgcgcctgcggaattgagagtgaaaatatcgtcatcagcggcggagccgggcagcatccgctggtgcgtcagctgttggccgacgcctgcggcgttagcgtcgtgagcaccgccagccgcgagccggtgctgttaggttccgccatcctcggcgcggtggcgggcagagtcgcggcttcgctgccggaggccatgaagcagtttactcaggtggatgccacctatcacagcgagacggcgtttagcccgcttcatcagcgcaggtatgcggcctataaggcgctacaacaggccggcaggctgattcgcgaataa

SEQ ID NO: 134350 - protein, 535 aa, Klebsiella pneumoniae
MHNDTQNIIGVDVGSGSVRAGVFNLRGELLAHATREITLFRSAGNKVEQSSREIWQAVCYCIKTAVANAGVSPSSIAGIGFDATCSLVVIGDNDAPLAVGPSDDADRNIIVWMDHRATGQAEKINATGHPVLRYVGGKISPEMQTPKILWLKENRPHIYQLARHFFDLADYLTWRSTGDEARSVCTVTCKWTYLAHEQRWDAGYFRQIGLEELVDEDFVRIGQRIVDPGTPCGEGLCATAAEEMGLPIGTPVAVGMIDAHAGGIGTVGVLNGAVNNMAYVFGTSSCTMTTTQEAVFVPGVWGPYYSAMVPGYWLSEGGQSAAGAAIDQLLSFHPAAAEAREHAKAAGVPLPVWLADRVLTQVASPSEAVTLAAGLHVVPEFLGNRAPLADPHAKALIAGLGMERDLDNLTALYVAGLCGIGYGLRQIIDAQRACGIESENIVISGGAGQHPLVRQLLADACGVSVVSTASREPVLLGSAILGAVAGRVAASLPEAMKQFTQVDATYHSETAFSPLHQRRYAAYKALQQAGRLIRE

SEQ ID NO: 134351 - DNA, 1680 bp, Thermoanaerobacter mathranii
  CDS (1)..(1680): transl_table=11
atggcaaagtattcaattggaatagattacgggacagagtctgcaagggctctgctccttaatcttgagacgggagaagaagtagctacttctgtaatgaattatccccatggcgtgatggatgaagaacttcctgatggaacaaaacttccacaagattgggcattacaacatccagatgactatattgaagttttaaagaaaatagtacctgatgtaataaatcaggcaggtatagacaaagctgatgtaataggcttaggcatagattttacagcttgtactatgttgcctataaaaaaagatggaactcctctttgtgacatcccccagtacaaatcgaaccctcattcatatgttaagttatggaaacatcatgctgcgcaacctgaagcaaacaaattgaatgaaatagcatcacaaaggggtgaggattttttagcaaggtatggaggaaaaatatcttcagaatggctcatacccaaaatatggcaaatattaaatgaagcgccagatatctatgaagaagctgataaatttattgaagctactgattgggttgttatgaagctaacaggtaatgaaaggcgaaatagctgtactgcaggctataaagcgatttggcacaaaagaaaggggtatccttccaaagatttctttcgagcattagatgagaggcttgaaaatttggtagaagaaaaattatctaaagatatatatccattaggtacaaaagcaggggaattgacgcctgaaatggcaaaaataatgggcttaaacccgggagtagcggttgctgtaggcaatgttgatgctcatgtttcagtaccagcagtaggagttacatcgccagggaaaatggtaatggtaatgggaacttcgatttgccatttggtgttagatgataaagaagtagaggtcccaggcatgtgtggcgttgtagaagatggaattataccaggcttttatggatatgaagcaggacaatctgcggttggcgacatctttgcctggtttgttgataattgtgtgccgtacgaatacaaaattgaagcagaaaaaagagggataagtattcacgagttattaacagaaaaagccgcaaagctaaaacccggagaaagtggcctcttggcgattgactggtggaacggaaacaggtcagtactagtagatgcagaccttactggtgtaatattaggaatgactttaactacgaaacctgaggagatatacagagcattaatcgaagcaacagcttttgggacgaggatgataattgatacttttaatcaaaatggagtaagtattagtgaactgtacgcttgtggaggacttcctgaaaaaaatcctatgcttatgcaaatctatgctgatgttacaaatctcgaaattaaagtatcaaaatcttcacaaacaccagcacttggtgcagcaatgtttggagcagttgcagcaggtaaagcaaaaggagggtttgatagtatatttgaagcggcacgagtaatacccaagctaaaggaagaaacatacaatccaatacctgaaaatgttgaaatatatgataaattatttgaagaatacaaacttcttcatgactattttggcagaggtataaataatgtaatgaaaaggctaaaagccttaaaagagggggtttccaatgttagagaagcttaa

SEQ ID NO: 134352 - protein, 559 aa, Thermoanaerobacter mathranii
MAKYSIGIDYGTESARALLLNLETGEEVATSVMNYPHGVMDEELPDGTKLPQDWALQHPDDYIEVLKKIVPDVINQAGIDKADVIGLGIDFTACTMLPIKKDGTPLCDIPQYKSNPHSYVKLWKHHAAQPEANKLNEIASQRGEDFLARYGGKISSEWLIPKIWQILNEAPDIYEEADKFIEATDWVVMKLTGNERRNSCTAGYKAIWHKRKGYPSKDFFRALDERLENLVEEKLSKDIYPLGTKAGELTPEMAKIMGLNPGVAVAVGNVDAHVSVPAVGVTSPGKMVMVMGTSICHLVLDDKEVEVPGMCGVVEDGIIPGFYGYEAGQSAVGDIFAWFVDNCVPYEYKIEAEKRGISIHELLTEKAAKLKPGESGLLAIDWWNGNRSVLVDADLTGVILGMTLTTKPEEIYRALIEATAFGTRMIIDTFNQNGVSISELYACGGLPEKNPMLMQIYADVTNLEIKVSKSSQTPALGAAMFGAVAAGKAKGGFDSIFEAARVIPKLKEETYNPIPENVEIYDKLFEEYKLLHDYFGRGINNVMKRLKALKEGVSNVREA

SEQ ID NO: 134353 - DNA, 1710 bp, Arabidopsis thaliana
  CDS (1)..(1710)
atgaccaccgctgagttaaatccatttccgtctcgctccgtttttctcggtgtcgacgttggcactggaagcgcccgtgccggtttgttcgatgataatgggaagcttctaggatctgctactagtccaatacagatttggaaggatggagactgtattgagcaatcttcaacagatatttggcatgcagtttgtgctgctgtgaaatctgcttgctctcttgcaaatgtttcggatgtggaagtgaaaggaataggctttgctgccacgtgctctctcgtggcggttgatgctgagggatctcctgttacagtgtcgtggagtggtgattcaagaagaaacattattgtatggatggaccatagagctgtaaagcaggcagagagaatcaactcatttaattctccagtcttgcagtactgtggtggcggtgtttctccagaaatggagccaccaaaacttttatgggtgaaagaaaatcttaaggagtcttggtcaatggtgtataagtggatggacttgagtgattggctatcctacagagctactggagatgatacacgtagtttgtgcaccacagtatgtaaatggacttatcttggccatgcacacatgcaccagatgactgagaaggcttctcgtgatatggaagcttgtggatgggatgatgagttctgggaagaaattggtttaggcgatttggtagatgggcaccatgctaagattggacgaagtgtagcttttcctggacatccactgggtaatggtctaactgcaaccgctgctaaggaactgggtctgttagctggaactcctgttgggacttcactcattgatgctcatgccggtggtgttggggtcatggaaaagtcagatgtggataccttgtgctctcgaatggtcttggtatgtggcacatcaacttgtcatatggctgtttcccgtgaaaagctgtttattcctggcgtgtgggggcctttttggtcagctatggttccggagtattggcttacagaaggaggacaaagtgctactggagctttacttgatcacatcatcgaaaatcatgttgcttctccccgtcttgcaaatcgtgctgcttcccagaaagtttctgtgtttgaactcctaaacaacattttgaaaacgatggctgaagatacaagttctccatttatatctgcccttacctcagacatgcatatccttcccgactttcacggaaacagatctcccgttgcagacccaaattcgaaaggagtgatattcggaatgtctcttgacacgtccgagaagcagttggctcttctatacctcgccacaattcagggaatcgcatatggtacacgtcatatcgtagagcattgcaatactcatggtcacaaaattgatacactgcttgcttgtggcggcctttcaaagaacccattgttcatccaagaacatgctgatatagtcggttgtccgattattcttcctcgagaaagcgagtctgttctcttaggagcagcaattcttggagcagttgctggcaagaactaccctagtctccatgatgccatgaaagctcttaacgcagctggacaagtggttcatccctcatcagaccctaagatcaagaagtatcacgatgcaaagtaccgtattttccgcaacctctacgaacagcaattgtctcaccgttccatcatcgctgaagctcttgcataa

SEQ ID NO: 134354 - protein, 569 aa, Arabidopsis thaliana
MTTAELNPFPSRSVFLGVDVGTGSARAGLFDDNGKLLGSATSPIQIWKDGDCIEQSSTDIWHAVCAAVKSACSLANVSDVEVKGIGFAATCSLVAVDAEGSPVTVSWSGDSRRNIIVWMDHRAVKQAERINSFNSPVLQYCGGGVSPEMEPPKLLWVKENLKESWSMVYKWMDLSDWLSYRATGDDTRSLCTTVCKWTYLGHAHMHQMTEKASRDMEACGWDDEFWEEIGLGDLVDGHHAKIGRSVAFPGHPLGNGLTATAAKELGLLAGTPVGTSLIDAHAGGVGVMEKSDVDTLCSRMVLVCGTSTCHMAVSREKLFIPGVWGPFWSAMVPEYWLTEGGQSATGALLDHIIENHVASPRLANRAASQKVSVFELLNNILKTMAEDTSSPFISALTSDMHILPDFHGNRSPVADPNSKGVIFGMSLDTSEKQLALLYLATIQGIAYGTRHIVEHCNTHGHKIDTLLACGGLSKNPLFIQEHADIVGCPIILPRESESVLLGAAILGAVAGKNYPSLHDAMKALNAAGQVVHPSSDPKIKKYHDAKYRIFRNLYEQQLSHRSIIAEALA

SEQ ID NO: 134355 - DNA, 1692 bp, Bacillus halodurans
  CDS (1)..(1692): transl_table=11
atgacaacgaaatacacaattggggttgactacgggacggagtcaggacgtgcggtgttaatcgatctatcgaacgggcaagagctagctgaccatgtgacaccatatagacacggagtcatcgatcaatatttgcctaatacaaacattaaattaggtcacgaatgggctttgcagcacccccttgattatgtagaggttttaacgacatcggtgccagcagttatgaaagaatcgggagtggatgctgacgatgtgattgggatcggcgtcgattttacggcatgcacgatgttaccagttgacgaggaagggcagcctttgtgtttgctcgcgcagtacaaagacaatcctcatagctgggtgaagctctggaagcatcatgccgctcaagataaagcgaacgctataaatgaaatggctgaaaaacgaggagaagcctttttgccacgatatggcgggaaaatatcttctgagtggatgatcgcaaaagtgtggcaaattctcgatgaggcggaggacgtttataaccgaacggatcaatttttagaggcgaccgattggatcgtctcacaaatgacgggcaaaatcgtgaaaaatagttgcacagcaggttataaggcgatttggcataagcgagagggttacccttccaatgaattttttaaagccctcgatcctaggcttgagcatttgacgacaacgaagctacgcggtgacatcgtccctttaggtgaaagggcaggtggtttattgcccgaaatggctgaaaagatgggcttgaaccctggcatcgcagtagcggtaggtaacgtagatgcccatgccgctgttccagctgttggcgtcacgacgcctggaaagttggtcatggcgatggggacgtccatttgccacatgctactaggggagaaggaacaggaagtcgaaggaatgtgcggagttgttgaagatggtatcatcccaggttatttaggctatgaggcagggcaatccgcagttggagacattttcgcctggtttgtgaagcacggcgtttcggcagcgacgttcgatgaggcgcaagaaaaaggggtgaacgttcacgctttgttagaagaaaaagcgtcacaattaagacctggcgagtcgggtttacttgcactcgattggtggaatgggaatcgttcgattctcgttgatactgaattatcagggatgcttttaggctacacgctccaaacgaagccggaagaaatatatcgagcattgcttgaggcaacagcatttggtacacgggcgattgttgatgcttttcacgggcgaggggtcgaagttcacgaactctatgcatgtggaggtttaccgcaaaaaaatcacctgttaatgcaaatctttgctgatgtgacaaacagggaaattaaagtggctgcttcaaaacaaacaccagctcttggggcagcaatgtttgcttctgttgctgctggttcagaggtaggaggctatgactcgattgaagaagctgccaagaaaatggggcgagtgaaggacgaaacttttaagccaattcctgaacatgtggctatctatgaaaagctttaccaagaatatgtgacgcttcacgattacttcggacggggtgcgaatgatgtcatgaagcgtttgaaagcgttaaaaagtatccagcatcgtccgtcttctttgttaacgtaa

SEQ ID NO: 134356 - protein, 563 aa, Bacillus halodurans
MTTKYTIGVDYGTESGRAVLIDLSNGQELADHVTPYRHGVIDQYLPNTNIKLGHEWALQHPLDYVEVLTTSVPAVMKESGVDADDVIGIGVDFTACTMLPVDEEGQPLCLLAQYKDNPHSWVKLWKHHAAQDKANAINEMAEKRGEAFLPRYGGKISSEWMIAKVWQILDEAEDVYNRTDQFLEATDWIVSQMTGKIVKNSCTAGYKAIWHKREGYPSNEFFKALDPRLEHLTTTKLRGDIVPLGERAGGLLPEMAEKMGLNPGIAVAVGNVDAHAAVPAVGVTTPGKLVMAMGTSICHMLLGEKEQEVEGMCGVVEDGIIPGYLGYEAGQSAVGDIFAWFVKHGVSAATFDEAQEKGVNVHALLEEKASQLRPGESGLLALDWWNGNRSILVDTELSGMLLGYTLQTKPEEIYRALLEATAFGTRAIVDAFHGRGVEVHELYACGGLPQKNHLLMQIFADVTNREIKVAASKQTPALGAAMFASVAAGSEVGGYDSIEEAAKKMGRVKDETFKPIPEHVAIYEKLYQEYVTLHDYFGRGANDVMKRLKALKSIQHRPSSLLT

SEQ ID NO: 134357 - DNA, 1686 bp, Bacillus clausii
  CDS (1)..(1686): transl_table=11
atgaagcgctacacgattggaattgattatgggactgagtcggggagggcagtcttggttgatttagaaaatggcgccgaagtggctgaacatgtaaccccttacgcacatggcgttatcgatcaatgcttgccagacagcgggcgttcgctagagccagagtgggcattgcaacatcctggcgactatttagatgtactgcgcttatcggtgccaaaggttgtagaaatcgcagacataagcgcttctcaagtgattggcattggcattgactttaccgcctgtaccatgcttccgattgacaagcatggggatcccctatgtttcgacccccaactcgcgggcaggccccacagttgggtgaagttgtggaagcaccatgccgcccaagatgaggccgatgaaatcaaccgcattgctgaggaacgaaaagaggcctttttagctcggtacggaggcaaatattcatccgagtggatggtgtcaaaaatttggcaaatttttaatgaagaccccgacatgttcgagaaagcagatgctttcttagaagcaacggattgggtggtagcacagctcactggcacaattgtacgcaacagttgtacagcagggtataaggcgatgtggcataaacgcgacggctatccagacgactccttttttgccgcgctagatccaggccttgcccagctgacaacgacgaaactccgcggtgatatccttgccccaggccaacgtgccggtggattaacagcagaaatggcggagacgcttggccttaagcctggaacggctgttgcggtagggaatgtcgatgctcatgtggccgtcccagcagcaggcgttgtcacaccagggaaaatggttatggtcatgggcacatcgatttgccatcttgtcttagctaaagaggaaagagaagttgaagggatgtgcggcgtagtagaagacggcattgtgccaggatactttggctatgaggcagggcagtctgcagttggcgatatatttgcatggctgatgaaacatggcattcccgctgacttgaagcaagaagcggaacaagcaggaaaaccacttcattcgttgctagaagaaaaggcggccgcttaccgtcctggcgaaaccggtttgctcgctcttgattggtggaacggaaaccgttcaacgcttgtcgatgcaaatttgacagggcttattttaggatacaccttgcaaacaaaagcagaagaattgtatcggacattgctggaggcaaccgcatttggcacgaaaaaaattattgacgctttcagggacagcggcgtagaggtgaacgttctatatgcgtgtggagggctgccacaaaaaaatgagttgctcatgcaaatttacgccgatgtcacaaatcttgaaatcaaagtggctgcttcaaaacaaacgcctgctcttggggccgccatgtatgcaagtgttgctgcaggcgatgaagctggcgggtatgagacgatattcgctgccgccgaaaaaatggcacacacgaaagcgcgctcctttaaaccaaatcatgaaaatgtccgtttatatcaggctctatacgaggaatatagcaaactccatgactactttggcaggggcgaaaacgatgtgatgaaaacactcaagcagttgcgtagcagagcaaaaggaggagccgtgcatgcataa

SEQ ID NO: 134358 - protein, 561 aa, Bacillus clausii
MKRYTIGIDYGTESGRAVLVDLENGAEVAEHVTPYAHGVIDQCLPDSGRSLEPEWALQHPGDYLDVLRLSVPKVVEIADISASQVIGIGIDFTACTMLPIDKHGDPLCFDPQLAGRPHSWVKLWKHHAAQDEADEINRIAEERKEAFLARYGGKYSSEWMVSKIWQIFNEDPDMFEKADAFLEATDWVVAQLTGTIVRNSCTAGYKAMWHKRDGYPDDSFFAALDPGLAQLTTTKLRGDILAPGQRAGGLTAEMAETLGLKPGTAVAVGNVDAHVAVPAAGVVTPGKMVMVMGTSICHLVLAKEEREVEGMCGVVEDGIVPGYFGYEAGQSAVGDIFAWLMKHGIPADLKQEAEQAGKPLHSLLEEKAAAYRPGETGLLALDWWNGNRSTLVDANLTGLILGYTLQTKAEELYRTLLEATAFGTKKIIDAFRDSGVEVNVLYACGGLPQKNELLMQIYADVTNLEIKVAASKQTPALGAAMYASVAAGDEAGGYETIFAAAEKMAHTKARSFKPNHENVRLYQALYEEYSKLHDYFGRGENDVMKTLKQLRSRAKGGAVHA

SEQ ID NO: 134359 - DNA, 1695 bp, Bacillus stearothermophilus
  CDS (1)..(1695): transl_table=11
atggggaaaaagtatgtcattggcattgactatggcaccgaatcgggacgagccgttctcgttgatctagaaggaaacgaaattgcggaccatgtcactccgtacccccacggagttattgatgaagtattgccagaatcgaacgtacaactcgagccagactgggcgctgcaacacccggctgattatattgaagtattggcgaccgctgtcccgacggtattgcaaaagtcaggggtcaacccagccgatgtgatcggggtcggcattgattttacttcatgcacgatgctgccggtcgatgcttctggcgagccgctttgtctaaagccagaattcaggaaccgtccgcacagttgggtgaaattgtggaagcaccatgccgctcaagatgaggcgaacttgctcaatgaaattgcggccaaacgaggcgaagcatttttgccgagatacggcggaaaaatttcatccgaatggatgattgcgaaaatttggcagattctaaacgaagatccggagatttacgaacaaactgatcttttcctcgaggggactgattgggtcattttcaaaatgaccggcaatatcgtccggaatagctgtgcggcgggctataagtccatttggcataaacaggacggctatccaagcaaggagtttttccgggcgctcgacccgcggctggaacacttaacagaaacgaaactgcgcggcccgatcgttccgcttggtacgagagcaggtgtgctgaccaatgaaatggccgctatgatgggcctccttccgggaacagccgttgccgtcggaaatgtcgatgcccatgcggccgtaccaggcgtcggggttgtcgagcccggcaagctggtgatggcgatgggaacctcgatttgccacatgttgcttggcacggaagaaaaatatgtcgaaggcatgtgcggcgttgtggaagacggcatcattccgggatatttcggctatgaagccggccagtcggcggtgggggacatttttgcttggtatgtcgaacaaggcgttccggcatatgtcaaggaggcagcggaaaaagaaggaatcagcgttcatgaatggcttgagaagcgagccgccgcttatcggccgggggaaaccgggctgctcgcgttggactggtggaacggcaaccgctccgtgttggtcgataccgatttaaccgggctcatcgtcggatatacactgctgacaaaaccagaagagatttaccgtgcgctgcttgaagcaacggcctttggcacgcgcaaaattatcgatgctttcgttgaaaacggtgtcaaggttgacgaattgtacgcatgcggcggattgccgcaaaaagataagctgctcatgcaaatttatgccgatgtgaccaaccgcgagatcaaaatcgcggcgtcgaagcaaaccccggcagtgggtgctgccatgttcgcggcggtggcggccggcaaagagaacggcggttatgaatcaatcgttgaggcggcgcgaaacatgggaaaagtgcgtgaagagacgttcaaaccgattccggagaatgtcgcgatgtacgagcagttgtaccaagaatatacgaagttgcatgactacttcggccgtggggaaaacgatgtcatgaaacggcttaaacattggaaagaaaccacacgagcggcgaaagaatttatgagtttatggtga

SEQ ID NO: 134360 - protein, 564 aa, Bacillus stearothermophilus
MGKKYVIGIDYGTESGRAVLVDLEGNEIADHVTPYPHGVIDEVLPESNVQLEPDWALQHPADYIEVLATAVPTVLQKSGVNPADVIGVGIDFTSCTMLPVDASGEPLCLKPEFRNRPHSWVKLWKHHAAQDEANLLNEIAAKRGEAFLPRYGGKISSEWMIAKIWQILNEDPEIYEQTDLFLEGTDWVIFKMTGNIVRNSCAAGYKSIWHKQDGYPSKEFFRALDPRLEHLTETKLRGPIVPLGTRAGVLTNEMAAMMGLLPGTAVAVGNVDAHAAVPGVGVVEPGKLVMAMGTSICHMLLGTEEKYVEGMCGVVEDGIIPGYFGYEAGQSAVGDIFAWYVEQGVPAYVKEAAEKEGISVHEWLEKRAAAYRPGETGLLALDWWNGNRSVLVDTDLTGLIVGYTLLTKPEEIYRALLEATAFGTRKIIDAFVENGVKVDELYACGGLPQKDKLLMQIYADVTNREIKIAASKQTPAVGAAMFAAVAAGKENGGYESIVEAARNMGKVREETFKPIPENVAMYEQLYQEYTKLHDYFGRGENDVMKRLKHWKETTRAAKEFMSLW

SEQ ID NO: 134361 - DNA, 1683 bp, Bacillus subtilis
  CDS (1)..(1683): transl_table=11
atggcttacacaataggggttgattttggaactttatcaggaagagcagtgctcgttcatgtccaaacaggggaggaacttgcggctgctgtaaaagaatacaggcatgctgtcattgataccgtccttccaaaaacgggtcaaaagctgccgcgtgactgggcgctgcagcaccctgctgattacctcgaagtcttggaaacaaccattccgtctttactcgaacagacgggcgttgacccgaaagacattatcgggattggaattgatttcacggcatgtacgatccttcctattgacagcagcgggcagccgttatgcatgctgcctgaatatgaagaggagccgcacagctatgtgaagctctggaagcatcatgcggcccaaaaacatgctgatcggctcaatcaaatcgcggaagaagaaggagaggcttttttacagcggtacggaggaaaaatttcatcagaatggatgattccaaaggtcatgcaaattgccgaggaagcgcctcacatttatgaagcggctgaccggatcatcgaggctgcggactggatcgtgtaccagctgtgcggctcgctcaagcgaagcaattgtaccgcagggtataaagcgatgtggagtgaaaaagcggggtatccgtcagatgatttctttgagaaattaaatccttcaatgaaaacgattacaaaggacaaattgtcaggttctattcattcagtaggagaaaaagccggcagtctgactgaaaaaatggcaaagctgacagggcttctcccgggaacggctgttgcggttgccaatgtggacgctcatgtttcggtaccggcggtcggcattacagagccagggaaaatgctgatgattatgggaacctcgacgtgccatgttctacttggtgaagaggtgcatatcgttccaggaatgtgcggcgttgtggacaacggaattctcccgggctatgcgggatatgaagccgggcagtcctgtgtcggcgatcattttgactggtttgtgaaaacatgtgtcccgccagcttatcaagaggaagcaaaggaaaaaaacattggcgttcatgagctgctgagtgagaaagcaaaccatcaagcgcctggtgaaagcggcttgcttgctttagattggtggaatggaaaccgttcaactcttgttgatgcagatttaacagggatgctgcttggcatgacactgctgacgaagcctgaagagatttatagagcgttagttgaagcgacagcttacggaacccggatgattatcgaaacattcaaagaaagcggtgttccgattgaggaactgttcgcagccggcggaatagctgagaaaaacccgtttgtcatgcagatttatgcggatgtgacaaacatggacattaaaatctctggttcaccgcaagccccagccttaggatctgccattttcggcgcgcttgcagcaggcaaagaaaaaggcggctacgatgatatcaaaaaggcagcggcgaacatgggaaaactgaaagatataacttatacgccaaatgccgaaaacgccgcggtttatgaaaaattgtacgctgaatataaagagctggttcattatttcggaaaagaaaaccatgtcatgaagcgtctgaaaacgatcaaaaatcttcaattttcatctgccgccaaaaagaattga

SEQ ID NO: 134362 - protein, 560 aa, Bacillus subtilis
MAYTIGVDFGTLSGRAVLVHVQTGEELAAAVKEYRHAVIDTVLPKTGQKLPRDWALQHPADYLEVLETTIPSLLEQTGVDPKDIIGIGIDFTACTILPIDSSGQPLCMLPEYEEEPHSYVKLWKHHAAQKHADRLNQIAEEEGEAFLQRYGGKISSEWMIPKVMQIAEEAPHIYEAADRIIEAADWIVYQLCGSLKRSNCTAGYKAMWSEKAGYPSDDFFEKLNPSMKTITKDKLSGSIHSVGEKAGSLTEKMAKLTGLLPGTAVAVANVDAHVSVPAVGITEPGKMLMIMGTSTCHVLLGEEVHIVPGMCGVVDNGILPGYAGYEAGQSCVGDHFDWFVKTCVPPAYQEEAKEKNIGVHELLSEKANHQAPGESGLLALDWWNGNRSTLVDADLTGMLLGMTLLTKPEEIYRALVEATAYGTRMIIETFKESGVPIEELFAAGGIAEKNPFVMQIYADVTNMDIKISGSPQAPALGSAIFGALAAGKEKGGYDDIKKAAANMGKLKDITYTPNAENAAVYEKLYAEYKELVHYFGKENHVMKRLKTIKNLQFSSAAKKN

SEQ ID NO: 134363 - DNA, 1701 bp, Escherichia coli O157
  CDS (1)..(1701): transl_table=11
atggcgattgcaattggcctcgattttggcagtgattctgtgcgagctttggcggtggactgcaccaccggtgaagaaatcgccaccagcgtagagtggtatccccgttggcaaaaagggcaattttgtgatgccccgaataaccagttccgtcatcatccgcgtgactacattgagtcaatggaagcggcactgaaaaccgtgcttgcagaacttagcgtcgaacagcgcgcagctgtggtcgggattggcgttgacagtaccggctcgacgcccgcaccgattgatgccgacggtaacgtgctggcgctgcgcccggagtttgccgaaaacccgaacgcgatgttcgtattgtggaaagaccacactgcggttgaagaagcggaagagattacccgtttgtgccacgcgccgggcaatgttgactactcccgctatattggcggtatttattccagcgaatggttctgggcaaaaatcctgcatgtgactcgccaggacagcgccgtggcgcaatctgccgcatcgtggattgagctgtgcgactgggtgccagctctgctttccggtaccacgcgcccgcaggatattcgtcgcggacgttgcagcgccgggcataagtcgctatggcacgaaagctggggcggcctgccgccagccagtttctttgatgagctggatccgatcctcaatcgccatttgccttccccgctgttcactgatacctggactgccgatattccggtgggcaccttatgcccggaatgggcgcagcgtctcggcctgcctgaaagcgtggtgatttccggcggcgcgtttgactgccatatgggcgcagttggtgcaggcgcacagcctaacgcactggtaaaagttatcggtacttccacctgcgacattctgattgccgacaaacagagcgttggcgagcgggcagtgaaaggtatttgcggtcaggttgatggcagcgtggtgcctggatttatcggtctggaagcaggccaatcggcgtttggtgatatctacgcctggttcggtcgcgtactcggctggccgctggaacagcttgccgcccagcatccggaactaaaagagcaaatcgacgccagccagaaacaactgcttccggcgctgaccgaagcatgggccaaaaatccgtctctggatcacctgccggtggtgctcgactggtttaacggccgccgcacaccgaacgctaaccaacgcctgaaaggggtgattaccgatcttaacctcgctaccgacgctccgctgctgttcggcggtttgattgctgccaccgcctttggcgcacgcgcaatcatggagtgctttaccgatcaggggatcgccgtcaataacgtgatggcgctgggcggcatcgcgcggaaaaaccaggtcattatgcaggcctgctgcgacgtgctgaatcgcccgctgcaaattgttgcctctgaccaatgctgtgcgctcggtgcggcgatttttgctgccgtcgccgcgaaagtgcacgcagacatcccatcagcccagcaaaaaatggccagtgcggtagagaaaaccctgcaaccgcgcagcgaacaggcacaacgctttgaacagctttatcgccgctatcagcaatgggcgatgagcgccgaacaacactatcttccaacttccgccccggcacaggctgcccaggccgttccgactctataa

SEQ ID NO: 134364 - protein, 566 aa, Escherichia coli O157
MAIAIGLDFGSDSVRALAVDCTTGEEIATSVEWYPRWQKGQFCDAPNNQFRHHPRDYIESMEAALKTVLAELSVEQRAAVVGIGVDSTGSTPAPIDADGNVLALRPEFAENPNAMFVLWKDHTAVEEAEEITRLCHAPGNVDYSRYIGGIYSSEWFWAKILHVTRQDSAVAQSAASWIELCDWVPALLSGTTRPQDIRRGRCSAGHKSLWHESWGGLPPASFFDELDPILNRHLPSPLFTDTWTADIPVGTLCPEWAQRLGLPESVVISGGAFDCHMGAVGAGAQPNALVKVIGTSTCDILIADKQSVGERAVKGICGQVDGSVVPGFIGLEAGQSAFGDIYAWFGRVLGWPLEQLAAQHPELKEQIDASQKQLLPALTEAWAKNPSLDHLPVVLDWFNGRRTPNANQRLKGVITDLNLATDAPLLFGGLIAATAFGARAIMECFTDQGIAVNNVMALGGIARKNQVIMQACCDVLNRPLQIVASDQCCALGAAIFAAVAAKVHADIPSAQQKMASAVEKTLQPRSEQAQRFEQLYRRYQQWAMSAEQHYLPTSAPAQAAQAVPTL

SEQ ID NO: 134365 - DNA, 1701 bp, Escherichia coli O6
  CDS (1)..(1701): transl_table=11
atggcgattgcaattggcctcgattttggcagtgattctgtgcgagctttggcggtggactgcgccaccggtgaagagatcgccaccagcgtagagtggtatccccgttggcagaacgggcaattttgtgatgccccgaataaccagttccgtcatcatccgcgtgactacattgagtcaatggaagcggcgctgaaaactgtgcttgcagagcttagcgtcgaacagcgcgcagctgtggtcgggattggcgttgacacaaccggctcgacgcccgcaccgattgacgccgacggtaacgtcctggcgctgcgcccggagtttgccgaaaacccgaacgcgatgttcgtattgtggaaagaccacaccgcggttgaagaagcggaagagattacccgtttgtgccacgcgccgggcaacgttgactactcccgctatattggcggtatttattccagcgaatggttctgggcaaaaatcctgcatataactcgccaggacaacgccgtggcacaatctgccgcatcgtggattgagctgtgcgactgggtgccagctctgctttccggtaccacccgcccgcaggatattcgtcgcggacgttgcagcgccgggcataaatctctatggcacgaaagctggggtggcctgccgccagccagtttctttgatgagctggacccgatcctcaaccgtcatttaccttccccgctgttcactgaaacctggactgccgatattccggtgggcaccttatgcccggaatgggcgcagcgtctcggcctgcctgaaagcgtggtgatttccggcggcgcgtttgactgccatatgggcgcagttggcgcaggcgcacagcctaacgcactggtaaaagttatcggtacttccacctgcgacattctgattgccgacaaacagagcgttggcgagcgggcagtgaaaggtatttgcggtcaggttgatggcagcgtggtgcctggatttatcggtctggaagcaggccaatcggcgtttggggatatctacgcctggttcggtcgcgtactcggctggccgctggaacagcttgccgcccagcatccggaactgaaagagcaaatcaacgccagccagaaacaactgcttccggcgctgaccgaagcatgggccaaaaatccgtctctggatcacctgccggtggtgctcgactggtttaacggccgccgcacaccgaacgctaaccaacgcctgaaaggggtgattaccgatctgaacctcgctaccgacgctccgctgctgttcggcggtttgattgccgccaccgcctttggcgcacgcgcaattatggagtgcttcaccgctcaggggatcgccgtcaataacgtgatggcactgggcggcatcgcgcgcaaaaaccaggtcattatgcaggcctgctgcgacgtgctgaatcgcccgctgcaaattgttgcttctgaccaatgttgcgcgctcggtgcggcgattttcgctgccgtcgccgcgaaagtgcacgcagacatcccatcagcccagcaaaaaatggccagtgcggtagagaaaaccctgcaaccgcgcaacgaacaggcacaacgctttgaacagctttatcgccgctatcagcaatgggcgatgagcgccgaacaacactatcttccaacttccgccccggcacaggctgaccaggccgttccgactctataa

SEQ ID NO: 134366 - protein, 566 aa, Escherichia coli O6
MAIAIGLDFGSDSVRALAVDCATGEEIATSVEWYPRWQNGQFCDAPNNQFRHHPRDYIESMEAALKTVLAELSVEQRAAVVGIGVDTTGSTPAPIDADGNVLALRPEFAENPNAMFVLWKDHTAVEEAEEITRLCHAPGNVDYSRYIGGIYSSEWFWAKILHITRQDNAVAQSAASWIELCDWVPALLSGTTRPQDIRRGRCSAGHKSLWHESWGGLPPASFFDELDPILNRHLPSPLFTETWTADIPVGTLCPEWAQRLGLPESVVISGGAFDCHMGAVGAGAQPNALVKVIGTSTCDILIADKQSVGERAVKGICGQVDGSVVPGFIGLEAGQSAFGDIYAWFGRVLGWPLEQLAAQHPELKEQINASQKQLLPALTEAWAKNPSLDHLPVVLDWFNGRRTPNANQRLKGVITDLNLATDAPLLFGGLIAATAFGARAIMECFTAQGIAVNNVMALGGIARKNQVIMQACCDVLNRPLQIVASDQCCALGAAIFAAVAAKVHADIPSAQQKMASAVEKTLQPRNEQAQRFEQLYRRYQQWAMSAEQHYLPTSAPAQADQAVPTL

SEQ ID NO: 134367 - DNA, 1686 bp, Erwinia carotovora subsp
  CDS (1)..(1686): transl_table=11
atgagcgcgggcgctattacgattggtctcgacttcggcagtgattcggtacgcgccttagccgttgactgccaaagcgggaaagagctggaaacagacgtggtctactacccccgctggcgtgagggtaaatattgtcagcctgccaacaaccagttccgacaccatccgttggactatatcgaatcgctggaacaggcgatcaaagtggtggtctctcgcctgactaacgaccaacggcagagcatcattggcattggcgtggactccaccgggtcaacgcccgcaccgattgatgaacaaggccagatcctggcgctgcgccccgagtttgccaacaaccccaatgcgatgttcgtgctgtggaaagatcacacggcaatagaagaagcagatgccattaatgcgctgtgccgcagcggtcagttcccggattacacccgctatatcggtggtgtttactcatccgaatggttctgggccaaaatcctgcatgtatcacgcgaagatgcagcggtgcgtcaggcggccgtttcctggatagaactgtgcgactgggtgcccgccctactttccggcacgcaagcgcctgccgatattcgtcgtggccggtgcagcgccggacataaatcactctggcatccgagctggtgtggactcccaccgaaagatttcctacacgcgctcgatccctgcttgacagagacattgcagtatccgttgtttaccgatacctggaccgccgaacagccggtcggcagcattaccgcagagtgggcgcagcggctcggcattcccgaaacggtcacacttgcgggtggcgcgtttgactgccacgtcggcaccgtcggcgcgggcgcacagccttatacgttggtcaaagtgattggcacctccacctgcgacattctgatcgctgatgaagaacgcattgccgaccgcaccatcgccggtatttgtggacaggtagacggcagcgtcgtccccaactatatcggtctggaagccggacagtcagccttcggcgacatgtacgcctggtttggcaggctgctgggctggtcgttacaggaagcggcgaaagaccatcctgaactcaaaacgtcactacaggcgatggaagccaagttgctggagcgacttacccacaactgggcagaaaaccccacgctggatcacctacctatcgtgttggactggtttaacggccgcagaacgccgttcgccaaccagcgcttaaaaggcgtgattaccgatctcaatctgggcactgatgcccctacgctatttggcggtttcattgccgccacggccttcggtgcgcgcgcgattatggaatgctttgaagaacaaggcgtccccgtggagaacgtgctggcactgggcggtattgcacggaaatccccggtcatcatgcaggtgtgtactgacgtaatgaatcgtcccttacagatcgtcgcgtccgaccagtgctgtgcactcggtgcggcgatctttgccgccgtcgctgccggcgttcacggagatatcccaaccgcacaacagcatatggccagcggtatagagcgcaccttgatgccagacagccagcgtgttgcccgttatcagcagctttacgagcgctatcagcagtggtgccgcctcgcggaaccggcctatagcccaacgtctacggcaaaaaactaa

SEQ ID NO: 134368 - protein, 561 aa, Erwinia carotovora subsp
MSAGAITIGLDFGSDSVRALAVDCQSGKELETDVVYYPRWREGKYCQPANNQFRHHPLDYIESLEQAIKVVVSRLTNDQRQSIIGIGVDSTGSTPAPIDEQGQILALRPEFANNPNAMFVLWKDHTAIEEADAINALCRSGQFPDYTRYIGGVYSSEWFWAKILHVSREDAAVRQAAVSWIELCDWVPALLSGTQAPADIRRGRCSAGHKSLWHPSWCGLPPKDFLHALDPCLTETLQYPLFTDTWTAEQPVGSITAEWAQRLGIPETVTLAGGAFDCHVGTVGAGAQPYTLVKVIGTSTCDILIADEERIADRTIAGICGQVDGSVVPNYIGLEAGQSAFGDMYAWFGRLLGWSLQEAAKDHPELKTSLQAMEAKLLERLTHNWAENPTLDHLPIVLDWFNGRRTPFANQRLKGVITDLNLGTDAPTLFGGFIAATAFGARAIMECFEEQGVPVENVLALGGIARKSPVIMQVCTDVMNRPLQIVASDQCCALGAAIFAAVAAGVHGDIPTAQQHMASGIERTLMPDSQRVARYQQLYERYQQWCRLAEPAYSPTSTAKN

SEQ ID NO: 134369 - DNA, 1695 bp, Geobacillus kaustophilus
  CDS (1)..(1695): transl_table=11
atggggaaaaagtatgtcattggcattgactatggcaccgaatcgggacgagccgttctcgttgatctagaaggaaacgaaattgcggaccatgtcactccgtacccccacggagttattgatgaagtattgccagaatcgaacgtacaactcgagccagactgggcgctgcaacacccggctgattatattgaagtattggcgaccgctgttccaacggtattgcaaaagtctggggtcaacccagctgatgtgatcggggtcggcattgattttacttcatgcacgatgctgccggtcgatgcttctggcgagccgctttgtctaaagccagaattcaggaaccgtccgcacagttgggtgaaattgtggaagcaccatgccgctcaagatgaggcgaacttgctcaatgaaattgcggccaaacgaggcgaagcatttttgccgagatacggcggaaaaatttcatccgaatggatgattgcgaaaatttggcagattctaaacgaagatccggagatttacgaacaaactgatcttttcctcgaggcgactgattgggtcattttcaaaatgaccggcaatatcgtccggaatagctgtgcggcgggctataagtccatttggcataaacaggacggctatccaagcaaggagtttttccgggcgctcgacccgcggctggaacacttaacagaaacgaaactgcgcggcccgatcgttccgcttggtacgagagcaggtgtgctgaccaatgaaatggccgctatgatgggcctccttccgggaacagccgttgccgtcggaaatgtcgatgcccatgcggccgtaccaggcgtcggggttgtcgagcccggcaagctggtgatggcgatgggaacatcgatttgccacatgttgcttggcacggaagaaaaatatgtcgaaggcatgtgcggcgttgtggaagacggcatcattccaggatatttcggctatgaagccggccagtcggcggtgggggacatttttgcttggtatgttgaacaaggcgtcccggcttatgtgaaagaagcggcggaaaaagaaggggttagtgtccatgagtggctggaaaagcgcgctgctgcctatcgtccgggggaaaccgggctgctcgcgttggactggtggaacggcaaccgctccgtgttggtcgataccgatttaaccgggctcatcgtcggatatacactgctgacaaaaccagaagagatttaccgtgcgctgcttgaagcaacggcctttggcacgcgcaaaattatcgatgctttcgttgaaaacggtgtcaaggttgacgaattgtacgcatgcggcggattgccgcaaaaaaataagctgctcatgcaaatttatgccgatgtgaccaaccgcgagatcaaaatcgcggcgtcgaagcaaaccccggcagtgggggctgccatgttcgcggcggtcgcggccggcaaagagaacggcggttatgaatcaatcgttgaggcggcgcgaaacatgggaaaagtgcgtgaagagacgttcaaaccgattccggagaatgtcgcgatgtacgagcagttgtaccaagaatatacgaagttgcatgactacttcggccgtggggaaaacgatgtcatgaaacggcttaaacattggaaagaaaccgcacgagcggcgaaagaatctatgactttatcgtga

SEQ ID NO: 134370 - protein, 564 aa, Geobacillus kaustophilus
MGKKYVIGIDYGTESGRAVLVDLEGNEIADHVTPYPHGVIDEVLPESNVQLEPDWALQHPADYIEVLATAVPTVLQKSGVNPADVIGVGIDFTSCTMLPVDASGEPLCLKPEFRNRPHSWVKLWKHHAAQDEANLLNEIAAKRGEAFLPRYGGKISSEWMIAKIWQILNEDPEIYEQTDLFLEATDWVIFKMTGNIVRNSCAAGYKSIWHKQDGYPSKEFFRALDPRLEHLTETKLRGPIVPLGTRAGVLTNEMAAMMGLLPGTAVAVGNVDAHAAVPGVGVVEPGKLVMAMGTSICHMLLGTEEKYVEGMCGVVEDGIIPGYFGYEAGQSAVGDIFAWYVEQGVPAYVKEAAEKEGVSVHEWLEKRAAAYRPGETGLLALDWWNGNRSVLVDTDLTGLIVGYTLLTKPEEIYRALLEATAFGTRKIIDAFVENGVKVDELYACGGLPQKNKLLMQIYADVTNREIKIAASKQTPAVGAAMFAAVAAGKENGGYESIVEAARNMGKVREETFKPIPENVAMYEQLYQEYTKLHDYFGRGENDVMKRLKHWKETARAAKESMTLS

SEQ ID NO: 134371 - DNA, 1692 bp, Mycobacterium smegmatis
  CDS (1)..(1692): transl_table=11
gtgaccccgcccggcgcgccgaagtacgtcatcggcgtggatttcggcacgctgtcgggccgggcgctcgtcgtccgcgtcgccgacggcgccgagatgggctcggccgagcacacctaccggcacggtgtcgtcaccgaggcactcccgggccatcccgaggtgcgactgcccgccgactacgcgctgcaggtgcccgccgactacatcgacgtgctgcggttcgcgatcccggaggccgtggccaacgccggaatcgatccggccgacgtggtggggctgggaactgatttcacggcgtgcaccatggtcgccgccaccagtgacggaaccccgctgtgccaactcgacgagttcgccgaccgtccgcacgcgtacgccaagctgtggcgccaccacgccgcgcaaccgcaggccgaccgcatcaacgcgctggccgcggcacgcggtgagacttggctgccccggtacggcggattgatctccagcgaatgggaattcgccaagggtctgcagatcctggaggaggaccccgagatctacgccgcgatcgaccgatgggtcgaaggtgcggactggatcgtctggcagctcaccggccgctacgtccgcaacatcagcaccgcgggatacaaggcgatccgccaggacggcaagtacccgtcacgcgcgttcctcgccgaactcaaccctggtttcgcgagtttcgtcgaggacaagatcgaacaacccatcggcaggctcggtgaggcggcgggcacgctcaccgctcaggccgcggcctggaccggcctgcccgagggcatcgtggtcgccgtcgggaacatcgacgcccacgtcaccgcggccgcggccgacgccgcggatccggggcgcctgatcgcgatcatgggcacctcgacgtgccacgtgatgaacggccggttcctgcgtgaggtgccgggcatgtgtggtgtggtcgacggtggcatcaccgacggcctgtggggctatgaggccgggcagtccggggtcggcgacatcttcgcgtggttcacgaaaaactgtgtgcccaaggagatcgcgatcgaggcgtcgcggcggggcctgaccctgcacgaacatctgtcggagctcgcggccgagcaggaggtcggcgagcacggactcgtcgcgctggactggcacagcggcaaccgctcggtgctggtggaccaccacctgtcggggatcatggtcgggcagacgctcgacaccacgtgcgtcgaccagtaccgcgccctgctggaggccaccgcgttcggcacccgcatgatcgtcgagaccttccagcgcagcggcgttccggtcgaggaactcgtcgtggcgggcggtctcatcaagaacccgctcttgatgcagatctatgccgacgtcaccggactcccgctgtcatgcgtgacctccacgcaggcgcctgcactcggcgcggcgatccacgcggccgcggctgcgggtgaataccgtgatgtgccaacggcatcggcgcggatgggcgggcgcaccaagaacgcgttcacgccgatcccggagaacgtcacgcgctacaacgcgctgtacgcggcctacgtcgaactgcacgactggttcgggcgcaacaacccgctcatgcggcgcctgcgggtgatgcgcagcaatgccgaacgccgcgagacggtggggtcggcccaatga

SEQ ID NO: 134372 - protein, 563 aa, Mycobacterium smegmatis
MTPPGAPKYVIGVDFGTLSGRALVVRVADGAEMGSAEHTYRHGVVTEALPGHPEVRLPADYALQVPADYIDVLRFAIPEAVANAGIDPADVVGLGTDFTACTMVAATSDGTPLCQLDEFADRPHAYAKLWRHHAAQPQADRINALAAARGETWLPRYGGLISSEWEFAKGLQILEEDPEIYAAIDRWVEGADWIVWQLTGRYVRNISTAGYKAIRQDGKYPSRAFLAELNPGFASFVEDKIEQPIGRLGEAAGTLTAQAAAWTGLPEGIVVAVGNIDAHVTAAAADAADPGRLIAIMGTSTCHVMNGRFLREVPGMCGVVDGGITDGLWGYEAGQSGVGDIFAWFTKNCVPKEIAIEASRRGLTLHEHLSELAAEQEVGEHGLVALDWHSGNRSVLVDHHLSGIMVGQTLDTTCVDQYRALLEATAFGTRMIVETFQRSGVPVEELVVAGGLIKNPLLMQIYADVTGLPLSCVTSTQAPALGAAIHAAAAAGEYRDVPTASARMGGRTKNAFTPIPENVTRYNALYAAYVELHDWFGRNNPLMRRLRVMRSNAERRETVGSAQ

SEQ ID NO: 134373 - DNA, 1710 bp, Salmonella paratyphi
  CDS (1)..(1710): transl_table=11
atggcaattgcaattggcctcgattttggcagtgattcagtgcgcgctctggcagtggactgcgccaccggcgacgagatcgccaccagcgtagagtggtatccgcgctggcaagaaggccgttattgcgacggcccgaacaaccagttccgtcatcatccgcgcgactacatggagtcaatggaggccgcgctgaaagccgttctggcacaattaagcgccgcgcaacgcgcaaatgtcgttggcattggcgttgacagcaccggttctacgccagcgccgattgacgccgacggtaacgtcctggcgctgcgtccggagttcgccgagaacccgaatgcgatgtttgtgctgtggaaagatcacaccgccgtggaagaagccgacgaaatcactcgtctgtgccataagccaggtaaggtcgactactcccgctatattggcggcatttactccagcgaatggttctgggcgaagattctgcacgtcacccgccaggatagcgccgtcgcgcaggccgccgtctcgtggattgaactgtgtgactgggtgccggcgctgctttccggcaccactcgcccgcaggatatccgccgtggccgctgcagcgctgggcacaaaacactgtggcatgaaagctggggcggtctgccgcccgcgagcttctttgatgaactcgatccgtgcattaaccgtcatctgcgctacccgttatttagcgaaaccttcaccgccgatctgcccgtgggcaccctgtgcgccgaatgggcgcagcgcctcggcttgccggaaagcgtggtgatttccggcggcgcgttcgactgtcacatgggcgcggtcggcgcgggcgcacagcccaatacgctggtaaaagtcatcggcacgtcaacctgcgacattctgattgcggataaacagagcgtcggggatcgcgccgtgaaaggcatttgcggtcaggttgacggcagcgtggtgccgaactttatcggtctggaagcgggccagtccgctttcggcgacatctacgcctggtttagccgcgtgttgagctggccgctggaacaacttgccgcgcagcacccggaactgaaaacccagattaacgccagccagaagcagctattgccagcgctcaccgacgcctgggcgaaaaatccgtccctggatcacctgccggtggtgctcgactggttcaatggtcgccgtacacccaatgccaaccagcgtctgaaaggcgtcattaccgatctcaatctcgccaccgacgcgccagcgctgtttggcggtctggtcgcctcgaccgccttcggcgcgcgcgccattcaggagtgttttaccgagcagggtatcgcggtcaataacgtgatggcgcttggcggcatcgcccgtaaaaatcaggtcattatgcaggtctgctgcgacgtactgaatcgtccgttgcagatcgtcgcttccgaccaatgttgcgcattaggcgccgctatctttgccgccgttgccgcgaaagtccatgccgatattcctgccgcccagcaaagcatggcgagcgcggtagaacgcactctgcgtccccgccctgaacaggcgcaacgcttcgaacggctttaccgccgctaccagcagtgggcgctaagcgcagaacaacattatcttccgactgccgcgccggcgccaacgaccccggccaatcaggcaatcctgactcattaa

SEQ ID NO: 134374 - protein, 569 aa, Salmonella paratyphi
MAIAIGLDFGSDSVRALAVDCATGDEIATSVEWYPRWQEGRYCDGPNNQFRHHPRDYMESMEAALKAVLAQLSAAQRANVVGIGVDSTGSTPAPIDADGNVLALRPEFAENPNAMFVLWKDHTAVEEADEITRLCHKPGKVDYSRYIGGIYSSEWFWAKILHVTRQDSAVAQAAVSWIELCDWVPALLSGTTRPQDIRRGRCSAGHKTLWHESWGGLPPASFFDELDPCINRHLRYPLFSETFTADLPVGTLCAEWAQRLGLPESVVISGGAFDCHMGAVGAGAQPNTLVKVIGTSTCDILIADKQSVGDRAVKGICGQVDGSVVPNFIGLEAGQSAFGDIYAWFSRVLSWPLEQLAAQHPELKTQINASQKQLLPALTDAWAKNPSLDHLPVVLDWFNGRRTPNANQRLKGVITDLNLATDAPALFGGLVASTAFGARAIQECFTEQGIAVNNVMALGGIARKNQVIMQVCCDVLNRPLQIVASDQCCALGAAIFAAVAAKVHADIPAAQQSMASAVERTLRPRPEQAQRFERLYRRYQQWALSAEQHYLPTAAPAPTTPANQAILTH

SEQ ID NO: 134375 - DNA, 1710 bp, Salmonella typhi
  CDS (1)..(1710): transl_table=11
atggcaattgcaattggcctcgattttggcagtgattcagtgcgcgctctggcagtggactgcgccaccggcgacgagatcgccaccagcgtagagtggtatctgcgctggcaagaaggccgttattgcgacggcccgaacaaccagttccgtcatcatccgcgcgactacatggagtcaatggaggccgcgctgaaagccgttctggcacaattaagcgccgcgcaacgcgcaaatgtcgttggcattggcgttgacagcaccggttctacgccagcgccgattgacgccgacggtaacgtcctggcgctgcgtccggagttcgccgagaacccgaatgcgatgtttgtgctgtggaaagatcacaccgccgtggaagaagccgacgaaatcactcgtctgtgccataagccaggtaaggtcgactactcccgctatattggcggcatttactccagcgaatggttctgggcgaagattctgcacgtcacccgccaggatagcgccgtcgcgcaggccgccgtctcgtggattgaactgtgtgactgggtgccggcgctgctttccggcaccactcgcccgcaggatatccgccgtggccgctgcagcgctgggcacaaaacactgtggcatgaaagctggggcggtctgccgcccgcgagcttctttgatgaactcgatccgtgcattaaccgtcatctgcgctacccgttatttagcgaaaccttcaccgccgatctgcccgtgggcaccctgtgcgccgaatgggcgcagcgcctcggcttgccggaaagcgtggtgatttccggcggcgcgttcgactgtcacatgggcgcggtcggcgcgggcgcacagcccaatacgctggtaaaagtcatcggcacgtcaacctgcgacattctgattgcggataaacagagcgtcggggatcgcgccgtgaaaggcatttgcggtcaggttgacggcagcgtggtgccgaactttatcggtctggaagcgggccagtccgctttcggcgacatctacgcctggtttagccgcgtgttgagctggccgctggaacaacttgccgcgcagcacccggaactgaaaacccagattaacgccagccagaagcagctattgccagcgctcaccgacgcctgggcgaaaaatccgtccctggatcacctgccggtggtgctcgactggttcaatggtcgccgtacacccaatgccaaccagcgtctgaaaggcgtcattaccgatctcaatctcgccaccgacgcgccagcgctgtttggcggtctggtcgcctcgaccgccttcggcgcgcgcgccattcaggagtgttttaccgagcagggtatcgcggtcaataacgtgatggcgcttggcggcatcgcccgtaaaaatcaggtcattatgcaggtctgctgcgacgtactgaatcgtccgttgcagatcgtcgcttccgaccaatgttgcgcattaggcgccgctatctttgccgccgttgccgcgaaagtccatgccgatattcctgccgcccagcaaagcatggcgagcgcggtagaacgcactctgcgtccccgccctgaacaggcgcaacgcttcgaacggctttaccgccgctaccagcagtgggcgctaagcgcagaacaacattatcttccgactgccgcgccggcgccaacgaccccggccaatcaggcaatcctgactcattaa

SEQ ID NO: 134376 - protein, 569 aa, Salmonella typhi
MAIAIGLDFGSDSVRALAVDCATGDEIATSVEWYLRWQEGRYCDGPNNQFRHHPRDYMESMEAALKAVLAQLSAAQRANVVGIGVDSTGSTPAPIDADGNVLALRPEFAENPNAMFVLWKDHTAVEEADEITRLCHKPGKVDYSRYIGGIYSSEWFWAKILHVTRQDSAVAQAAVSWIELCDWVPALLSGTTRPQDIRRGRCSAGHKTLWHESWGGLPPASFFDELDPCINRHLRYPLFSETFTADLPVGTLCAEWAQRLGLPESVVISGGAFDCHMGAVGAGAQPNTLVKVIGTSTCDILIADKQSVGDRAVKGICGQVDGSVVPNFIGLEAGQSAFGDIYAWFSRVLSWPLEQLAAQHPELKTQINASQKQLLPALTDAWAKNPSLDHLPVVLDWFNGRRTPNANQRLKGVITDLNLATDAPALFGGLVASTAFGARAIQECFTEQGIAVNNVMALGGIARKNQVIMQVCCDVLNRPLQIVASDQCCALGAAIFAAVAAKVHADIPAAQQSMASAVERTLRPRPEQAQRFERLYRRYQQWALSAEQHYLPTAAPAPTTPANQAILTH

SEQ ID NO: 134377 - DNA, 1710 bp, Salmonella typhimurium
  CDS (1)..(1710): transl_table=11
atggcaattgcaattggcctcgattttggcagtgattcagtgcgcgctctggcagtggactgcgccaccggcgacgagatcgccaccagcgtagagtggtatccgcgctggcaagaaggccgttattgcgacggcccgaacaaccagttccgtcatcatccgcgcgactacatggagtcaatggaggccgcgctgaaagccgttctggcacaattaagcgccgcgcaacgcgcaaatgtcgttggcattggcgttgacagcaccggctctacgccagcgccgattgacgccgacggtaacgtcctggcgctgcgtccagagttcgccgagaacccgaatgcgatgtttgtgctgtggaaagatcacaccgccgtggaagaggccgacgaaatcactcgtctgtgccataagccaggcaaggtcgactactcccgctatattggcggcatttactccagcgaatggttctgggcgaagattctgcacgtcacccggcaggatagcgccgtcgcgcaggccgccgtctcgtggattgagctgtgcgactgggtgccggcgctgctttccggcaccactcgcccgcaggatatccgccgtggccgctgcagcgccgggcacaaaacgctgtggcatgaaagctggggcggtctgccgcccgcgagcttctttgatgaactcgatccgtgcattaaccgtcatctgcgctacccgttatttagcgaaaccttcaccgccgatctgcccgtgggcaccctgtgcgccgaatgggcgcagcgcctcgacttgccggaaagcgtagtgatttccggcggcgcgttcgactgtcacatgggcgcggtcggcgcgggcgcacagcccaatacgctggtgaaagtcatcggcacgtctacctgcgacattctgattgcggataaacagagcgtcggggatcgcgccgtgaaaggcatttgcggtcaggttgacggcagcgtggtgccgaactttatcggtctggaagcggggcaatctgctttcggcgatatctacgcctggtttagccgcgtgttgagctggccgctggagcaacttgccgcgcagcacccggaactgaaaccccagattaacgccagccagaagcagctactgccagcgctcaccgacgcctgggcgaaaaatccgtccctggatcacctgccggtggtgctcgactggtttaacggtcgccgcacgccaaacgctaatcagcgtctgaaaggcgtcattaccgatctcaatctcgccaccgacgcgccagcgctgtttggcggtctggtcgcttcgaccgccttcggcgcgcgcgccattcaggagtgttttaccgatcagggtatcgcggtcaataacgtgatggcgcttggcggcatcgcccgtaaaaatcaggtcattatgcaggtctgctgcgacgtactgaatcgtccgttgcagatcgtcgcttccgaccagtgttgcgcattaggcgccgctatctttgccgccgtcgctgcgaaagtccatgccgacattccagccgcccagcaaagcatggcgagcgcggtagaacgcactctgcgcccccaccctgaacaggcgcaacgcttcgaacagctttaccgccgctaccagcagtgggcgctaagcgcagaacaacattatcttccgactgccgcgccggcgccaacgaccccggccaatcaggcaatcctgactcattaa

SEQ ID NO: 134378 - protein, 569 aa, Salmonella typhimurium
MAIAIGLDFGSDSVRALAVDCATGDEIATSVEWYPRWQEGRYCDGPNNQFRHHPRDYMESMEAALKAVLAQLSAAQRANVVGIGVDSTGSTPAPIDADGNVLALRPEFAENPNAMFVLWKDHTAVEEADEITRLCHKPGKVDYSRYIGGIYSSEWFWAKILHVTRQDSAVAQAAVSWIELCDWVPALLSGTTRPQDIRRGRCSAGHKTLWHESWGGLPPASFFDELDPCINRHLRYPLFSETFTADLPVGTLCAEWAQRLDLPESVVISGGAFDCHMGAVGAGAQPNTLVKVIGTSTCDILIADKQSVGDRAVKGICGQVDGSVVPNFIGLEAGQSAFGDIYAWFSRVLSWPLEQLAAQHPELKPQINASQKQLLPALTDAWAKNPSLDHLPVVLDWFNGRRTPNANQRLKGVITDLNLATDAPALFGGLVASTAFGARAIQECFTDQGIAVNNVMALGGIARKNQVIMQVCCDVLNRPLQIVASDQCCALGAAIFAAVAAKVHADIPAAQQSMASAVERTLRPHPEQAQRFEQLYRRYQQWALSAEQHYLPTAAPAPTTPANQAILTH

SEQ ID NO: 134379 - DNA, 1701 bp, Shigella flexneri
  CDS (1)..(1701): transl_table=11
atggcgattgcaattggcctcgattttggcagtgattctgtgcgagctttggcggtggactgcgccagcggtgaagagatcgccaccagcgtagagtggtatccccgttggcaaaaagggcaattttgtgatgccccgaataaccagttccgtcatcatccgcgtgactacattgagtcaatggaagcggcactgaaaaccgtgcttgcagagcttagcgtcgaacagcgcgcagctgtggtcgggattggcgttgacagtaccggctcgacgcccgcaccgattgatgccgacggtaacgtgctggcgctgcgcccggagtttgccgaaaacccgaacgcgatgttcgtattgtggaaagaccacactgcggttgaagaagcggaagagattacccgtttgtgccacgcgccgggcaacgttgactactcccgctatattggcggtatttattccagcgaatggttctgggcaaaaatcctgcatgtgactcgccaggacagcgccgtggcgcaatctgccgcatcgtggattgagctgtgcgactgggtgccagctctgctttccggtaccacccgcccgcaggatattcgtcgcggacgttgcagcgccgggcataaatctctgtggcacgaaagctggggcggcttgccgccagccagtttctttgatgagctggacccgatcctcaatcgccatttgccttccccgctgttcactgacacctggactgccgatattccggtgggcaccttatgcccggaatgggcgcagcgtctcggcctgcctgaaagcgtggtgatttccggcggcgcgtttgactgccatatgggcgcagttggcgcaggcgcacagcctaacgcactggtaaaagttatcggtacttccacctgcgacattctgattgccgacaaacagagcgttggcgagcgggcagttaaaggtatttgcggtcaggttgatggcagcgtggtgcctggatttatcggtctggaagcaggccaatcggcgtttggtgatatctacgcctggtttggtcgcgtactcggctggccgctggaacagcttgccgcccagcatccggaactgaaagcgcaaatcaacgccagccagaaacaactgcttccggcgctgaccgaagcatgggccaaaaatccgtctctggatcacctgccggtggtgctcgactggtttaacggtcgtcgcacgccaaacgctaaccaacgcctgaaaggggtgattaccgatcttaacctcgctaccgacactccgctgctgttcggcggtttgattgctgccaccgcctttggcgcacgcgcaatcatggagtgctttaccgatcaggggatcgccgtcaataacgtgatggcgctgggcggcatcgcgcggaaaaaccaggtcattatgcaggcctgctgcgacgtgctgaatcgcccgctgcaaattgttgcctctgaccagtgctgtgcgctcggtgcggcgatttttgctgccgtcgccgcgaaagtgcacgcagacatcccatcagcccagcaaaaaatggccagtgcggtagagaaaaccctgcaaccgcgcagcgaacaggcacaacgctttgaacagctttatcgccgctatcagcaatgggcgatgagcgccgaacaacactatcttccaacttccgccccggcacaggctgcccaggccgttgcgactctataa

SEQ ID NO: 134380 - protein, 566 aa, Shigella flexneri
MAIAIGLDFGSDSVRALAVDCASGEEIATSVEWYPRWQKGQFCDAPNNQFRHHPRDYIESMEAALKTVLAELSVEQRAAVVGIGVDSTGSTPAPIDADGNVLALRPEFAENPNAMFVLWKDHTAVEEAEEITRLCHAPGNVDYSRYIGGIYSSEWFWAKILHVTRQDSAVAQSAASWIELCDWVPALLSGTTRPQDIRRGRCSAGHKSLWHESWGGLPPASFFDELDPILNRHLPSPLFTDTWTADIPVGTLCPEWAQRLGLPESVVISGGAFDCHMGAVGAGAQPNALVKVIGTSTCDILIADKQSVGERAVKGICGQVDGSVVPGFIGLEAGQSAFGDIYAWFGRVLGWPLEQLAAQHPELKAQINASQKQLLPALTEAWAKNPSLDHLPVVLDWFNGRRTPNANQRLKGVITDLNLATDTPLLFGGLIAATAFGARAIMECFTDQGIAVNNVMALGGIARKNQVIMQACCDVLNRPLQIVASDQCCALGAAIFAAVAAKVHADIPSAQQKMASAVEKTLQPRSEQAQRFEQLYRRYQQWAMSAEQHYLPTSAPAQAAQAVATL

SEQ ID NO: 134381 - DNA, 1638 bp, Staphylococcus aureus
  CDS (1)..(1638): transl_table=11
atgtcgtatagcattggaattgattatggaactgcttcaggccgtgtgtttttaattaatacaactaacggtcaagtagtatcaaaatttgtgaaaccatatacacatggtgtcattgaaagtgaattaaatggtttgaaaataccacatacatatgcacttcaaaatagtaatgattatttagaaattatggaagaaggaatatcatatatagtacgtgaatcaaaaatagatccagtcaatatagtaggtattggtatagactttacttcatctactattatttttactgacgaaaaccttaacccggtacataatttaaaacaatttaaaaacaatccacatgcgtatgtgaaactttggaaacatcatggtgcatataaagaagcagagaaattatatcaaactgccattgaaaataataataagtggttaggccattatggatataatgttagtagtgaatggatgattcccaaaataatggaagtcatgaatcgagcaccagaaattatggaaaaaacggcttatattatggaagcgggcgattggattgtaaataaattaactaataaaaatgtacgctcgaattgtggattaggtttcaaagcattttgggaagaagaaacagggtttcattatgatttatttgataaaatagaccccaaattatcaaaagtaattcaagataaagtatctgcaccggttgttaatattggtgaagtagtagggaaactggacgataaaatggcacagaaattaggattatcaaaagagactatggtaagtccttttattattgatgcccatgctagtttattaggtattgggtctgaaaaagataaagaaatgactatggtgatgggaacaagcacatgccatcttatgttaaatgaaaagcaacatcaagtgccaggtatatcaggttctgtaaaaggagcaattattccagaattatttgcttatgaagcggggcaatcagcagtaggtgatttgtttgagtatgtcgctaagcaagcaccaaagtcatatgtagatgaagcagcaaatagaaatatgactgtatttgaattaatgaatgaaaagataaaacatcaaatgccaggtgaaagtgggctcattgctcttgattggcataatggaaatcgaagtgtattaagtgatagcaatttaacaggttgtatctttggattaactttacaaactaagcatgaggatatttatagagcatatttagaagctacagcatttggtactaagatgattatgcaacagtatcaagattggcatatggaagtagaaaaggtatttgcatgtggcggtatacctaaaaagaatgctgttatgatggatatctatgcgaatgtactgaataaaaaactaattgttatggatagtgagtatgcaccagcaataggcgcagcaatattaggtgcagtcagtggtggcgcacataattcaattaatgatgcagttgatgctatgaaagagccaattttatacgaaattaatccagaagcggaaaaagtacaaaggtatgaaacattatttaaagcttataaggctttacatgatatccatggttataaaaaagctaatataatgaaagatatccagagtttaagagttgagggataa

SEQ ID NO: 134382 - protein, 545 aa, Staphylococcus aureus
MSYSIGIDYGTASGRVFLINTTNGQVVSKFVKPYTHGVIESELNGLKIPHTYALQNSNDYLEIMEEGISYIVRESKIDPVNIVGIGIDFTSSTIIFTDENLNPVHNLKQFKNNPHAYVKLWKHHGAYKEAEKLYQTAIENNNKWLGHYGYNVSSEWMIPKIMEVMNRAPEIMEKTAYIMEAGDWIVNKLTNKNVRSNCGLGFKAFWEEETGFHYDLFDKIDPKLSKVIQDKVSAPVVNIGEVVGKLDDKMAQKLGLSKETMVSPFIIDAHASLLGIGSEKDKEMTMVMGTSTCHLMLNEKQHQVPGISGSVKGAIIPELFAYEAGQSAVGDLFEYVAKQAPKSYVDEAANRNMTVFELMNEKIKHQMPGESGLIALDWHNGNRSVLSDSNLTGCIFGLTLQTKHEDIYRAYLEATAFGTKMIMQQYQDWHMEVEKVFACGGIPKKNAVMMDIYANVLNKKLIVMDSEYAPAIGAAILGAVSGGAHNSINDAVDAMKEPILYEINPEAEKVQRYETLFKAYKALHDIHGYKKANIMKDIQSLRVEG

SEQ ID NO: 134383 - DNA, 1638 bp, Staphylococcus aureus
  CDS (1)..(1638): transl_table=11
atgtcttatagcattggaattgattatggaactgcttcaggccgtgtgtttttaattaatacaactaacggtcaagtagtatcaaaatttgtgaaaccatatacacatggtgtcattgagggtgaattaaatggtttaaaaataccacatacatatgcacttcaaaatagtaatgattatttagaaattatggaagaaggaatatcatatatagtacgtgaatcaaaaatagatccagtcaatatagtaggtattggtatagactttacttcatctactattatttttactgacgaaaaccttaacccggtacataatttaaaacaatttaaaaacaatccacatgcgtatgtgaaactttggaaacatcatggtgcatataaagaagcagagaaattatatcaaactgctattgaaaataataataagtggttaggccattatggatataatgttagtagtgaatggatgattcccaaaataatggaagtcatgaatcgagcaccagaaattatggaaaaaacggcttatattatggaagcgggcgattggattgtaaataaattaactaataaaaatgtacggtcgaattgtggattaggtttcaaagcattttgggaagaagaaacagggtttcattatgatttgtttgataaagtagaccccaaattatcaaaagtaattcaagataaagtatctgcaccggttgttaatattggtgaagcagtagggaaactggatgataaaatggcacagaaattaggattatcaaaagacactatggtaagtccttttattattgatgcccatgctagtttattaggtattggatctgaaaaagataaagaaatgactatggtgatgggaacaagcacatgccatcttatgttaaatgaaaagcaacatcaagtgccaggtatatcaggttctgtaaaaggagcaattattccagaattatttgcttatgaagcggggcaatcagcagtaggtgatttgtttgagtatgtcgctaagcaagcaccaaagtcatatgtagatgaagcagcaaatagaaatatgactgtatttgaattaatgaatgaaaagataaaacatcaaatgccaggtgaaagtgggctcattgctcttgattggcataatggaaatcgaagtgtattaagtgatagcaatttaacaggttgtatctttggattaactttacaaactaagcatgaggatatttatagagcatatttagaagctacagcatttggtactaagatgattatgcaacagtatcaagattggcatatggaagtagaaaaggtatttgcatgtggcggtatacctaaaaagaatgctgttatgatggatatctatacgaatgtactgaataaaaaactaattgttatggatagtgagtatgcaccagcaataggagcagcaatattaggtgcagtcagtggtggcgcacataattcaattaatgatgcagttgatgctatgaaagagccaattttatacgaaattaatccagaagcggaaaaagtacaaaggtatgaaacattatttaaagcttataaggctttacatgatatccatggttataaaaaagctaatataatgaaagatatccagagtttaagagttgagggataa

SEQ ID NO: 134384 - protein, 545 aa, Staphylococcus aureus
MSYSIGIDYGTASGRVFLINTTNGQVVSKFVKPYTHGVIEGELNGLKIPHTYALQNSNDYLEIMEEGISYIVRESKIDPVNIVGIGIDFTSSTIIFTDENLNPVHNLKQFKNNPHAYVKLWKHHGAYKEAEKLYQTAIENNNKWLGHYGYNVSSEWMIPKIMEVMNRAPEIMEKTAYIMEAGDWIVNKLTNKNVRSNCGLGFKAFWEEETGFHYDLFDKVDPKLSKVIQDKVSAPVVNIGEAVGKLDDKMAQKLGLSKDTMVSPFIIDAHASLLGIGSEKDKEMTMVMGTSTCHLMLNEKQHQVPGISGSVKGAIIPELFAYEAGQSAVGDLFEYVAKQAPKSYVDEAANRNMTVFELMNEKIKHQMPGESGLIALDWHNGNRSVLSDSNLTGCIFGLTLQTKHEDIYRAYLEATAFGTKMIMQQYQDWHMEVEKVFACGGIPKKNAVMMDIYTNVLNKKLIVMDSEYAPAIGAAILGAVSGGAHNSINDAVDAMKEPILYEINPEAEKVQRYETLFKAYKALHDIHGYKKANIMKDIQSLRVEG

SEQ ID NO: 134385 - DNA, 1611 bp, Staphylococcus epidermidis
  CDS (1)..(1611): transl_table=11
atgagttatagtataggaattgattttggaaccgcttctggaagagtgatattagctgacacatccaacggacatatcatatcaagatatgaggaagactatgcgaacggaacttatatgaactcattatatgataaaccgttacctgaaaactacttcttacaaaatgctgacgactatttacaaattcttgaacaaggcgttcaatttgtattagaagatagtaaagttaataaaaacgatgtggttggaattggagtcgactttacaagcagtacaattatctttctcgatgaacaatttgaaccgcttcatcgtcatgaagatttaaagacaaatccacacgcgtacgtaaaattatggaaacatcatggagctcaagatgaggcaaactatatgattcagatgagtaagaataaaaattggttagattattatggctcaagcgtaaatagcgaatggatgataccgaaaatcctggaagttaaacatgaagcaccagaaatacttagaagagcacggtatataatggaagctggagattacatcactagtatactaacaaattcaaatatacgatcaaattgtggtattggttttaaaggtttttgggacaatgaagctggatttaattacgacttcttccatagcgtggatcctgatttacctaaaatcgtcaaagaaaaatgtgaagcgccaatcatatcaattggagaaagtgcaggtcgtttatgtaaagactatcaacaaatatgggggctttctcaagatgtccaggtttcaccttttatcatagatgcacattctggcgtcttaggtgttggggcaatagaagctggagaattcactgcagtcattggtacaagtacttgtcatctcatgctagattcaagacaagtacccatttcttcaataactggctcagttaaaaatgctattatacctggattatatgcctatgaagctggtcaaccagctgtcggtgatttgtttgaatactcaaagaaccaagcacctaaacatattgtagatcaagcaaatgaacatcatatgcatgtgcttaactatttagaggaattagcaagtcacattagaatagaagaacaacatgttgttgttttagattggttgaatggaaatcgtagtatacttagtaatagtcatctaactggaagtatctttggtcttacacttcaaacaccgtatgaaatgattcatcgagcatatattgaagctacagcatttggaacaaaattaattatgaaacaatttgaagataatcatattcctgttcatacagtgtatgcgtctggtggtatcccacaaaagagtaaattactcgttgaaatttatgcaaatgttttaaataaaagggttgtcgtcatagattcatctaatgcttcagcattaggtgcagcgatgttaggtgcaaatgttgggaatgcatatagtacattaaaagaggcggcattatctatgaagcaacctatagcttatatacaagaacctgaaatccaaaaagttcaagcttataaaccactctaccataaatattgtgaactacatgatttattaggtcgtcaatatcctgaattatcatatttgatttaa

SEQ ID NO: 134386 - protein, 536 aa, Staphylococcus epidermidis
MSYSIGIDFGTASGRVILADTSNGHIISRYEEDYANGTYMNSLYDKPLPENYFLQNADDYLQILEQGVQFVLEDSKVNKNDVVGIGVDFTSSTIIFLDEQFEPLHRHEDLKTNPHAYVKLWKHHGAQDEANYMIQMSKNKNWLDYYGSSVNSEWMIPKILEVKHEAPEILRRARYIMEAGDYITSILTNSNIRSNCGIGFKGFWDNEAGFNYDFFHSVDPDLPKIVKEKCEAPIISIGESAGRLCKDYQQIWGLSQDVQVSPFIIDAHSGVLGVGAIEAGEFTAVIGTSTCHLMLDSRQVPISSITGSVKNAIIPGLYAYEAGQPAVGDLFEYSKNQAPKHIVDQANEHHMHVLNYLEELASHIRIEEQHVVVLDWLNGNRSILSNSHLTGSIFGLTLQTPYEMIHRAYIEATAFGTKLIMKQFEDNHIPVHTVYASGGIPQKSKLLVEIYANVLNKRVVVIDSSNASALGAAMLGANVGNAYSTLKEAALSMKQPIAYIQEPEIQKVQAYKPLYHKYCELHDLLGRQYPELSYLI

SEQ ID NO: 134387 - DNA, 1704 bp, Vibrio parahaemolyticus
  CDS (1)..(1704): transl_table=11
atggacacaataaatacacatcagcagcatgtaattggtttggacttcggatcggactccgtacgtgcgcttattgttaatgccgaaacaggacaggaagtttcctcgtctgtggtgtactactcacgatggatgaaggggctctattgccaacctgcgcaatcgcaattcagacatcacccgcaagattatttggatgcaatgaccagcgcgatccaagaggtactggcaacagtgccacagactctggccgattctgttgtcggcataggcgtcgacacaacaggctcaaccccagctccaatagatgaaaacggcactgttttggcgctgcttcctgagtttgagcacaacccaaatgcaatgttcgtcctctggaaagatcacacatccgtagccaaagcagatcgaattaatgaactcgcccattcgggaaaattcaccgattacacgcgttacgtcggcggtgtgtactcttcagaatggttttgggcaaaagcggcttgggtcagcgaacaagatgaacaagttgcaaaacgtgctttcagctgggtcgagctgtgtgattggatcccagcaattttggctgatactcaacatccacaaaaactgcgtcgtggcatctgcgctgcgggacacaaagcgatgtggcatgaaagctggggcggactacctgagcaagcgtttttaagcgcaatttcaccgacgttagacggtattcgcgaccgtatgttcacagaagtctttacctccgatcaggcggccgggtacctatcaaaagcatgggcaataaaattaggcttaccagaaggcatcgcgattgcaatcggcgagtttgattgccacatgggtgccgttggtgccggtgctggtgccaacgatttagttaaagtcattggcacttctacctgtgacattttgatggttgaatcacaaaacgtcggtgaccgcactattcatggtatttgtggtcaagtcgaaggcagtgccatgcccgagttgctagcacttgaagccggacagtccgcttttggcgacatgtatgcctggttcaaaaacgtcttaatgtggccactacaggcttatgccgaacacaatcctgactttgccttaactgccgaagaaattgcttcagaacttttgccgatgctctcgcaagctgccgagcagcaaggtatcgaccaatatactccggttgcaatggattggctcaatggccgccgaaccccttacgcaaaccagcgtcttaaaggtgccatttgtgacttaaaccttggtagctcatcgcctgcaattttctccgcactcgtagaatccactgcgcatggcgcaaaagcgatcgtcgattgctttatagaacaagatgtcactgtcgaacgcgtcatcgccattggtggcattgcgcaaaaatccccttacgtgatgcaaatgtgcgccgatgtgattggtcgcgacatcatcgtggtcgaatcagatcaatgttgcgcattgggggcagcgatttttgcagccgtcgcagctggcgtttacccgacgacgaaatcagcacaagccgtgatggcaagtcctgttcgtcaaacctactcaccaacaccaaaagtgcaaacattgcgagcacagcgttacgcgacgtatcgcgagcttgggcaacacatggagcagattgcggagtttcaccaatcgcaggagcgtgaagatgtctga

SEQ ID NO: 134388 - protein, 567 aa, Vibrio parahaemolyticus
MDTINTHQQHVIGLDFGSDSVRALIVNAETGQEVSSSVVYYSRWMKGLYCQPAQSQFRHHPQDYLDAMTSAIQEVLATVPQTLADSVVGIGVDTTGSTPAPIDENGTVLALLPEFEHNPNAMFVLWKDHTSVAKADRINELAHSGKFTDYTRYVGGVYSSEWFWAKAAWVSEQDEQVAKRAFSWVELCDWIPAILADTQHPQKLRRGICAAGHKAMWHESWGGLPEQAFLSAISPTLDGIRDRMFTEVFTSDQAAGYLSKAWAIKLGLPEGIAIAIGEFDCHMGAVGAGAGANDLVKVIGTSTCDILMVESQNVGDRTIHGICGQVEGSAMPELLALEAGQSAFGDMYAWFKNVLMWPLQAYAEHNPDFALTAEEIASELLPMLSQAAEQQGIDQYTPVAMDWLNGRRTPYANQRLKGAICDLNLGSSSPAIFSALVESTAHGAKAIVDCFIEQDVTVERVIAIGGIAQKSPYVMQMCADVIGRDIIVVESDQCCALGAAIFAAVAAGVYPTTKSAQAVMASPVRQTYSPTPKVQTLRAQRYATYRELGQHMEQIAEFHQSQEREDV

SEQ ID NO: 134389 - DNA, 1734 bp, Oryza sativa
  CDS (1)..(1734)
atgccccccggcggcgggggcgccgtcttcctcggagtcgacgtcggcaccggcagcgctcgcgcaggtctctttgatgagaagggtaagctgctggggtcggcgagcagtcctatacagatatggaaggagaaggactgcatcgagcaatcatcaacagacatatggcatgccgtgtgtgctgcggtaaaacacgcatgctctctggcaaatgttgcgcctgagaatgttgtcggacttggcttcgccgctacttgttctcttgttgctgttgatgctgatggttcccctgtttctgtttcttggactggtgatgcgaggaggaacatcatcgtgtggatggaccatagggctgtagaccaagctgagcgaatcaatgctcgcaattcgccggtattgcaatactgtggtgggggtgtttccccagaaatgcaagccccaaagctcttatgggtaaaggaaaatctgcaagagtcgtggtcaatggtatgtaggtggatggacctcagtgattggttagcatatagagcgactggcgatgacacacgcagcttatgcacaactgtttgcaaatggacatatcttgggcatgcacacatggaacagtggaaggaatcagattcacgtgatatggaagcatgtggatgggatgaagtcttttgggaagaaataggcttgggagaccttgttgaaggaaatcatgcaaaaataggacgcagtgttgcatttcctggccatcctctgggttctgggttgacagctactgctgccaaggagttaggtttgcgtcctgggattcctgttggaacttcactaattgatgctcatgctggtggtgttggagtcatggaaagtgtgccagatgcagaatctaaagctgacacgtctgatgaatctgatgaacaagctatatgccaccgcatggtcttggtttgtgggacatctacatgccatatggctgtctcaaagaacaaactgtttatccctggtgtctgggggccattttggtctgcaatggttcctgagttttggctcacggaaggtggccaaagtgcaactggtgctctacttgattacattgttgaaaaccatgttgctgctcctcttcttgctaatcatgctgcttctcaaagaatatccatatatgagctactgaacaagatactattttctatggcacatgagcaaaatatttcttttatttcttccctgactcaagacatccatgtcctcccagattttcatggaaataggtctcctttggctgatccaaaatccaaaggaatcatatgtggcttcacacttgatacaagtgagaagcacttggcgcttctttatctagcaacaattcaaggcattgcttatggtactcgtcatattgtggagcattgcaatgctcatgggcacaagatcgatactcttcttgcttgtggcggacttgcgaagaattccttgtatatccaagagcacgcagatataactggatgtccaataatacttcctagagagaatgagtctgtgcttttaggagctgctgtcctgggtgctgttgctgcaaagaagtttccaggtgttcgcgacgcaatgaaggcactgaatgcggccgggaaggttgtatatccatcttcagatcctagggtaaagaaataccatgatgcaaaatatcagatattcagatccctgtatgagcaacaactctcccatcgctcagctatggcacaggcattgcagtag

SEQ ID NO: 134390 - protein, 577 aa, Oryza sativa
MPPGGGGAVFLGVDVGTGSARAGLFDEKGKLLGSASSPIQIWKEKDCIEQSSTDIWHAVCAAVKHACSLANVAPENVVGLGFAATCSLVAVDADGSPVSVSWTGDARRNIIVWMDHRAVDQAERINARNSPVLQYCGGGVSPEMQAPKLLWVKENLQESWSMVCRWMDLSDWLAYRATGDDTRSLCTTVCKWTYLGHAHMEQWKESDSRDMEACGWDEVFWEEIGLGDLVEGNHAKIGRSVAFPGHPLGSGLTATAAKELGLRPGIPVGTSLIDAHAGGVGVMESVPDAESKADTSDESDEQAICHRMVLVCGTSTCHMAVSKNKLFIPGVWGPFWSAMVPEFWLTEGGQSATGALLDYIVENHVAAPLLANHAASQRISIYELLNKILFSMAHEQNISFISSLTQDIHVLPDFHGNRSPLADPKSKGIICGFTLDTSEKHLALLYLATIQGIAYGTRHIVEHCNAHGHKIDTLLACGGLAKNSLYIQEHADITGCPIILPRENESVLLGAAVLGAVAAKKFPGVRDAMKALNAAGKVVYPSSDPRVKKYHDAKYQIFRSLYEQQLSHRSAMAQALQ

SEQ ID NO: 134391 - DNA, 1725 bp, Zea mays
  CDS (1)..(1725)
atgtcccgcggcagtgccgcctccgtattcctcggcgtcgacgttggtactggcagcgctcgtgcaggactcttcgatgaaaacggcaaattgctggggtcagcaagcagccctatacagatatggaaagagaaagactgtatcgagcaatcatcaaccgatatctggcatgcggtctgtgctgcggtgaaatctgcgtgctcactggcaaatgttgctcctgaggacgttgctggccttggctttgccgccacttgctcccttgttgctgtcgatgctgatggttcccctgtttcggtttctttgagtggtgatacaaggaggaatatcattgtgtggatggaccatagagctgtgaatcaggcagagcgaatcaatgctaccaattcgccagtactgcaatactgcggtgggggtgtttccccagaaatgcaggctccaaagctcctatggatgaaggaaaatcttctagattcgtggtctatggtatgtaggtggatggacctaagtgactggttagcatatagagcaacaggtgacgacactcgcagcttatgcacaactgtctgcaaatggacatatcttggacatgcacacatgaaacagtggaaggaatctgattcacgtgatatggaggcatgcggatgggacaatgttttttgggaagaaatagggttggcagacctcctcgaaggaaattgtgcaaaaataggacgcagtgtcgcttttcctggtcatgctcttggttctggtttgacgcctactgctgcaaaggagttaggcttacttcctggtactcccgtcggaacctcacttattgatgctcatgctggtggagttggagtcatggaaagcattcctgatgcaggatctaaagctggtttgtctgatgaacatgcaatatgtcaccgtatggtattggtatgtgggacatcaacctgccacatggctgtttcaaaggacagattgtttatacctggtgtctgggggccgttttggtctgcgatgatccctgagttttggctcacagagggtggccaaagtgcaactggggctctgctcgattacattattgaaaaccatgttgcttctcctcttctttccaaccatgctgcttctcaaagtatatccatatttgaactactgaacaagatgttgctttctatgtcacaagagcagaatagtccgtttctttctgcattaactcaagacacccatgtgcttccggattttcatggaaatcggtctcctgttcctgatccaaaatccaaaggagtgatttatggcttgacacttgatacaagtgagaagcatttagctcttctatacctagcaacaattcagggtattgcttatggtactcgtcatattgtggagcattgtaatgctcatggccacaagatagacacacttcttgcttgtgggggacttgcaaagaattctctgtatatccaagagcatgcagacattacaggatgtcctataatacttcctagagagagcgagtcagtgcttttgggtgccgctgttcttggcgctgttgctggcaaaaagttcccgggtgttcgtgatgcaatgaaggctcttaatgcagcggggaaggtcgtaaatccgtcttcagaccctaaggtgaagaaataccacgatgcgaaatatcagatattcagatccctgtatgagcaacaactctctcatcgcgcaaccatggcacaggcattgcagtag

SEQ ID NO: 134392 - protein, 574 aa, Zea mays
MSRGSAASVFLGVDVGTGSARAGLFDENGKLLGSASSPIQIWKEKDCIEQSSTDIWHAVCAAVKSACSLANVAPEDVAGLGFAATCSLVAVDADGSPVSVSLSGDTRRNIIVWMDHRAVNQAERINATNSPVLQYCGGGVSPEMQAPKLLWMKENLLDSWSMVCRWMDLSDWLAYRATGDDTRSLCTTVCKWTYLGHAHMKQWKESDSRDMEACGWDNVFWEEIGLADLLEGNCAKIGRSVAFPGHALGSGLTPTAAKELGLLPGTPVGTSLIDAHAGGVGVMESIPDAGSKAGLSDEHAICHRMVLVCGTSTCHMAVSKDRLFIPGVWGPFWSAMIPEFWLTEGGQSATGALLDYIIENHVASPLLSNHAASQSISIFELLNKMLLSMSQEQNSPFLSALTQDTHVLPDFHGNRSPVPDPKSKGVIYGLTLDTSEKHLALLYLATIQGIAYGTRHIVEHCNAHGHKIDTLLACGGLAKNSLYIQEHADITGCPIILPRESESVLLGAAVLGAVAGKKFPGVRDAMKALNAAGKVVNPSSDPKVKKYHDAKYQIFRSLYEQQLSHRATMAQALQ

SEQ ID NO: 134393 - DNA, 1722 bp, Zea mays
  CDS (1)..(1722)
atgtcccgcggcagtgccgcctccgtattcctcggcgtcgacgttggtactggcagcgctcgtgcaggactcttcgatgaaaacggcaaattgctggggtcagcaagcagccctatacagatatggaaagagaaagactgtatcgagcaatcatcaaccgatatctggcatgcggtctgtgctgcggtgaaatctgcgtgctcactggcaaatgttgctcctgaggacgttgctggccttggctttgccgccacttgctcccttgttgctgtcgatgctgatggttcccctgtttcggtttctttgagtggtgatacaaggaggaatatcattgtgtggatggaccatagagctgtgaatcaggcagagcgaatcaatgctaccaattcgccagtactgcaatactgcggtgggggtgtttccccagaaatgcaggctccaaagctcctatggatgaaggaaaatcttctagattcgtggtctatggtatgtaggtggatggacctaagtgactggttagcatatagagcaacaggtgacgacactcgcagcttatgcacaactgtctgcaaatggacatatcttggacatgcacacatgaaacagtggaaggaatctgattcacgtgatatggaggcatgcggatgggacaatgttttttgggaagaaatagggttgggagacctcctcgaaggaaattgtgcaaaaataggacgcagtgtcgcttttcctggtcatgctcttggttctggtttgacgcctactgctgcaaaggagttaggcttacttcctggtactcctgttggaacctcacttattgatgctcatgctggtggagttggagtcatggaaagcattcctgatgcaggatctaaagctgtgtctgatgaacatgcaatatgtcaccgtatggtattggtatgtgggacatcaacctgccacatggctgtttcaaaggacagattgtttatacctggtgtctgggggccgttttggtctgcgatgatccctgagttttggctcacagaaggtggccaaagtgcaactggcgctctgctcgattacattattgaaaaccatgttgcttctcctcttctttctaaccatgctgcttctcaaagtatatccatatttgagctactgaacaagatgttgctttctatgtcacaagagcagaatagtccgtttctttctgcattaactcaagacacccatgtgcttccggattttcatggaaatcggtctcctgttcctgatccaaaatccaaaggagtgatttatggcttgacacttgatacaagtgagaagcatttagctcttctatacctagcaacaattcagggtattgcttatggtactcgtcatattgtggagcattgtaatgctcatggccacaagatagacacacttcttgcttgtgggggacttgcaaagaattctctgtatatccaagagcatgcagatattacaggatgtcctataatacttcctagagagagcgagtcagtgcttttgggtgccgctgttcttggcgctgttgctggcaagaagttcccgggtgttcgtgatgcaatgaaggctcttaatgcagcggggaaggtcgtaaatccgtcttcagaccctaaggtgaagaaataccacgatgcgaaatatcagatattcagatccctgtatgagcaacaactctctcatcgcgcaaccatggcacaggcattgcagtag

SEQ ID NO: 134394 - protein, 573 aa, Zea mays
MSRGSAASVFLGVDVGTGSARAGLFDENGKLLGSASSPIQIWKEKDCIEQSSTDIWHAVCAAVKSACSLANVAPEDVAGLGFAATCSLVAVDADGSPVSVSLSGDTRRNIIVWMDHRAVNQAERINATNSPVLQYCGGGVSPEMQAPKLLWMKENLLDSWSMVCRWMDLSDWLAYRATGDDTRSLCTTVCKWTYLGHAHMKQWKESDSRDMEACGWDNVFWEEIGLGDLLEGNCAKIGRSVAFPGHALGSGLTPTAAKELGLLPGTPVGTSLIDAHAGGVGVMESIPDAGSKAVSDEHAICHRMVLVCGTSTCHMAVSKDRLFIPGVWGPFWSAMIPEFWLTEGGQSATGALLDYIIENHVASPLLSNHAASQSISIFELLNKMLLSMSQEQNSPFLSALTQDTHVLPDFHGNRSPVPDPKSKGVIYGLTLDTSEKHLALLYLATIQGIAYGTRHIVEHCNAHGHKIDTLLACGGLAKNSLYIQEHADITGCPIILPRESESVLLGAAVLGAVAGKKFPGVRDAMKALNAAGKVVNPSSDPKVKKYHDAKYQIFRSLYEQQLSHRATMAQALQ

SEQ ID NO: 134395 - DNA, 22 bp, Artificial sequence
  primer
atggcgattgcaattggcctcg

SEQ ID NO: 134396 - DNA, 23 bp, Artificial sequence
  primer
ttatagagtcgcaacggcctggg

SEQ ID NO: 134397 - protein, 644 aa, Artificial sequence
  consensus sequence
  Variant (2)..(2): Xaa in position 2 is any amino acid
  Variant (4)..(4): Xaa in position 4 is any amino acid
  Variant (6)..(7): Xaa in position 6 to 7 is any amino acid
  Variant (9)..(9): Xaa in position 9 is any amino acid
  Variant (12)..(42): Xaa in position 12 to 42 is any amino acid
  Variant (43)..(56): Xaa in position 43 to 56 is any or no amino acid
  Variant (58)..(79): Xaa in position 58 to 79 is any amino acid
  Variant (80)..(82): Xaa in position 80 to 82 is any or no amino acid
  Variant (84)..(84): Xaa in position 84 is any amino acid
  Variant (86)..(86): Xaa in position 86 is any amino acid
  Variant (88)..(88): Xaa in position 88 is any amino acid
  Variant (90)..(107): Xaa in position 90 to 107 is any amino acid
  Variant (108)..(123): Xaa in position 108 to 123 is any or no amino acid
  Variant (126)..(127): Xaa in position 126 to 127 is any amino acid
  Variant (129)..(129): Xaa in position 129 is any amino acid
  Variant (131)..(133): Xaa in position 131 to 133 is any amino acid
  Variant (135)..(135): Xaa in position 135 is any amino acid
  Variant (136)..(136): Xaa in position 136 is any or no amino acid
  Variant (138)..(148): Xaa in position 138 to 148 is any amino acid
  Variant (149)..(153): Xaa in position 149 to 153 is any or no amino acid
  Variant (156)..(157): Xaa in position 156 to 157 is any amino acid
  Variant (159)..(159): Xaa in position 159 is any amino acid
  Variant (161)..(164): Xaa in position 161 to 164 is any amino acid
  Variant (166)..(166): Xaa in position 166 is any amino acid
  Variant (168)..(187): Xaa in position 168 to 187 is any amino acid
  Variant (188)..(188): Xaa in position 188 is any or no amino acid
  Variant (190)..(196): Xaa in position 190 to 196 is any amino acid
  Variant (198)..(200): Xaa in position 198 to 200 is any amino acid
  Variant (201)..(205): Xaa in position 201 to 205 is any or no amino acid
  Variant (207)..(208): Xaa in position 207 to 208 is any amino acid
  Variant (210)..(213): Xaa in position 210 to 213 is any amino acid
  Variant (215)..(226): Xaa in position 215 to 226 is any amino acid
  Variant (227)..(242): Xaa in position 227 to 242 is any or no amino acid
  Variant (244)..(250): Xaa in position 244 to 250 is any amino acid
  Variant (251)..(252): Xaa in position 251 to 252 is any or no amino acid
  Variant (254)..(271): Xaa in position 254 to 271 is any amino acid
  Variant (272)..(278): Xaa in position 272 to 278 is any or no amino acid
  Variant (280)..(280): Xaa in position 280 is any amino acid
  Variant (281)..(281): Xaa in position 281 is any or no amino acid
  Variant (283)..(286): Xaa in position 283 to 286 is any amino acid
  Variant (288)..(290): Xaa in position 288 to 290 is any amino acid
  Variant (293)..(303): Xaa in position 293 to 303 is any amino acid
  Variant (305)..(305): Xaa in position 305 is any amino acid
  Variant (307)..(310): Xaa in position 307 to 310 is any amino acid
  Variant (312)..(323): Xaa in position 312 to 323 is any amino acid
  Variant (324)..(344): Xaa in position 324 to 344 is any or no amino acid
  Variant (348)..(348): Xaa in position 348 is any amino acid
  Variant (350)..(361): Xaa in position 350 to 361 is any amino acid
  Variant (362)..(365): Xaa in position 362 to 365 is any or no amino acid
  Variant (367)..(368): Xaa in position 367 to 368 is any amino acid
  Variant (370)..(376): Xaa in position 370 to 376 is any amino acid
  Variant (378)..(382): Xaa in position 378 to 382 is any amino acid
  Variant (384)..(384): Xaa in position 384 is any amino acid
  Variant (389)..(389): Xaa in position 389 is any amino acid
  Variant (391)..(428): Xaa in position 391 to 428 is any amino acid
  Variant (429)..(455): Xaa in position 429 to 455 is any or no amino acid
  Variant (457)..(457): Xaa in position 457 is any amino acid
  Variant (459)..(467): Xaa in position 459 to 467 is any amino acid
  Variant (469)..(469): Xaa in position 469 is any amino acid
  Variant (471)..(490): Xaa in position 471 to 490 is any amino acid
  Variant (491)..(493): Xaa in position 491 to 493 is any or no amino acid
  Variant (495)..(495): Xaa in position 495 is any amino acid
  Variant (497)..(497): Xaa in position 497 is any amino acid
  Variant (499)..(499): Xaa in position 499 is any amino acid
  Variant (501)..(517): Xaa in position 501 to 517 is any amino acid
  Variant (518)..(529): Xaa in position 518 to 529 is any or no amino acid
  Variant (532)..(533): Xaa in position 532 to 533 is any amino acid
  Variant (534)..(534): Xaa in position 534 is any or no amino acid
  Variant (536)..(540): Xaa in position 536 to 540 is any amino acid
  Variant (542)..(544): Xaa in position 542 to 544 is any amino acid
  Variant (546)..(561): Xaa in position 546 to 561 is any amino acid
  Variant (562)..(563): Xaa in position 562 to 563 is any or no amino acid
  Variant (565)..(565): Xaa in position 565 is any amino acid
  Variant (567)..(569): Xaa in position 567 to 569 is any amino acid
  Variant (570)..(572): Xaa in position 570 to 572 is any or no amino acid
  Variant (574)..(574): Xaa in position 574 is any amino acid
  Variant (576)..(583): Xaa in position 576 to 583 is any amino acid
  Variant (584)..(614): Xaa in position 584 to 614 is any or no amino acid
  Variant (616)..(618): Xaa in position 616 to 618 is any amino acid
  Variant (620)..(639): Xaa in position 620 to 639 is any amino acid
  Variant (640)..(643): Xaa in position 640 to 643 is any or no amino acid
GXDXGXXSXRAXXXXXXXXXXXXXXXXXXXXXXXXXXXXXXXXXXXXXXXXXXXXXDXXXXXXXXXXXXXXXXXXXXXXXXXGXGXDXTXXXXXXXXXXXXXXXXXXXXXXXXXXXXXXXXXXLWXXHXAXXXAXXIXXXXXXXXXXXXXXXXGGXXSXEXXXXKXLXXXXXXXXXXXXXXXXXXXXXDXXXXXXXGXXXXXXXXRXXCXXXXKXXXXXXXXXXXXXXXXXXXXXXXXXXXXFXXXXXXXXXLXXXXXXXXXXXXXXXXXXXXXXXXXGXXLXXXXAXXXGLXXXXXXXXXXXDXHXXXXGXXXXXXXXXXXXXXXXXXXXXXXXXXXXXXXXXGTSXCXXXXXXXXXXXXXXXXGXXGXXXXXXXPXXXXXEXGQSAXGXXXXXXXXXXXXXXXXXXXXXXXXXXXXXXXXXXXXXXXXXXXXXXXXXXXXXXXXXXXXXXXXXGXRXXXXXXXXXGXIXXXXXXXXXXXXXXXXXXXXXXXAXGXRXIXXXXXXXXXXXXXXXXXXXXXXXXXXXXXGGXXXKXXXXXQXXXDXXXXXXXXXXXXXXXXXXGXAXXXXXXAXAXXXXXXXXXXXXXXXXXXXXXXXXXXXXXXXXXXXXXXXAXXXMXXXXXXXXXXXXXXXXXXXXXXXXY

SEQ ID NO: 134398 - protein, 12 aa, Artificial sequence
  protein pattern
  Variant (2)..(2): Xaa in position 2 is Ala or Gly
  Variant (6)..(7): Xaa in position 6 to 7 is any amino acid
  Variant (9)..(11): Xaa in position 9 to 11 is any or no amino acid
EXGQSXXGXXXD

SEQ ID NO: 134399 - protein, 13 aa, Artificial sequence
  protein pattern
  Variant (3)..(4): Xaa in position 3 to 4 is any amino acid
  Variant (6)..(6): Xaa in position 6 is any amino acid
  Variant (8)..(10): Xaa in position 8 to 10 is any amino acid
  Variant (11)..(11): Xaa in position 11 is Ala or Pro
  Variant (13)..(13): Xaa in position 13 is Ala, Gly, Ile, Leu or Val
GGXXSXEXXXXKX

SEQ ID NO: 134400 - protein, 27 aa, Artificial sequence
  protein pattern
  Variant (2)..(2): Xaa in position 2 is Cys, Ser or Thr
  Variant (3)..(5): Xaa in position 3 to 5 is any amino acid
  Variant (7)..(8): Xaa in position 7 to 8 is any amino acid
  Variant (9)..(9): Xaa in position 9 is any or no amino acid
  Variant (12)..(13): Xaa in position 12 to 13 is any amino acid
  Variant (14)..(14): Xaa in position 14 is Glu, Gly or Ser
  Variant (15)..(15): Xaa in position 15 is any amino acid
  Variant (16)..(16): Xaa in position 16 is Ala, Ile, Pro or Val
  Variant (17)..(17): Xaa in position 17 is Ile or Val
  Variant (18)..(18): Xaa in position 18 is Ala, Gly, Pro or Ser
  Variant (19)..(19): Xaa in position 19 is any amino acid
  Variant (20)..(20): Xaa in position 20 is Ala, Gly or Ser
  Variant (21)..(21): Xaa in position 21 is any amino acid
  Variant (22)..(22): Xaa in position 22 is Phe, Ile or Val
  Variant (24)..(24): Xaa in position 24 is Ala or Cys
  Variant (25)..(25): Xaa in position 25 is His or Tyr
  Variant (26)..(26): Xaa in position 26 is any amino acid
  Variant (27)..(27): Xaa in position 27 is Ala, Asp, Gly, Ser or Thr
LXXXXAXXXGLXXXXXXXXXXXDXXXX

SEQ ID NO: 134401 - protein, 20 aa, Artificial sequence
  protein pattern
  Variant (2)..(2): Xaa in position 2 is Ile, Leu or Val
  Variant (4)..(4): Xaa in position 4 is any amino acid
  Variant (6)..(7): Xaa in position 6 to 7 is any or no amino acid
  Variant (9)..(9): Xaa in position 9 is any amino acid
  Variant (10)..(11): Xaa in position 10 to 11 is any or no amino acid
  Variant (14)..(14): Xaa in position 14 is Ala, Gly, Leu or Val
  Variant (15)..(15): Xaa in position 15 is Ala, Ile, Leu or Val
  Variant (16)..(16): Xaa in position 16 is Phe, Ile, Leu or Val
  Variant (17)..(19): Xaa in position 17 to 19 is any amino acid
  Variant (20)..(20): Xaa in position 20 is Asp, Gly, Asn, Ser or Thr
GXDXGXXSXXXRAXXXXXXX

SEQ ID NO: 134402 - DNA, 1146 bp, Escherichia coli
  CDS (1)..(1146): transl_table=11
atgaagattgtcattgcgccagactcttttaaagagagcttaagtgcagaaaaatgttgtcaggcaattaaagccgggttttcgaccctctttcccgatgcgaactatatctgtttgccgatagcggatggcggcgaagggacggtggatgcgatggtcgccgcgacgggcggcaacatcgtgacgcttgaagtctgcgggccgatgggcgaaaaagtgaatgctttttatggccttaccggcgacgggaaaacggcggtgattgagatggcggcagcaagtggcctgatgctggtcgcgcctgaaaagcgtaatccgttgctggcctccagttttggtacgggggagttaattcgtcatgcgctggataacgacattcgccatattattctcggcattggcggcagtgcgacggtcgacggcggtatgggcatggcgcaggcgctcggtgtgcgtttccttgatgccgacggtcaggcgctggcggcaaacggtggtaatttagcgcgcgtggcaagcattgagatggatgaatgcgatccgcgtctggcgaattgccatattgaagtagcatgtgacgttgataacccgctggtaggggcacgcggcgcggcggcggtgtttggcccgcaaaaaggggcaacgccggagatggtcgaagaacttgaacaggggctgcaaaattacgcccgtgttttacaacagcaaactgaaattaatgtctgccagatggcgggcggcggcgctgcgggcggtatgggtattgcggcggcggtatttctcaatgcggatattaaaccgggcattgaaattgtgttgaatgcggtcaatcttgcgcaggcagtgcagggcgcagcactggtgattaccggggaagggcgcatcgactcgcaaacggcaggcggtaaagcgccgctgggtgtggcgtcggtggcgaagcagtttaatgtaccggtgattgggattgctggcgtattgggtgatggcgtggaagtggtgcaccagtacggcattgacgcggtattcagcattttgcctcgtctggcacctttagccgaagtgctcgccagcggtgaaaccaatctcttcaacagcgcgcgaaatattgcctgcgccattaaaataggtcagggaattaaaaactaa

SEQ ID NO: 134403 - protein, 381 aa, Escherichia coli
MKIVIAPDSFKESLSAEKCCQAIKAGFSTLFPDANYICLPIADGGEGTVDAMVAATGGNIVTLEVCGPMGEKVNAFYGLTGDGKTAVIEMAAASGLMLVAPEKRNPLLASSFGTGELIRHALDNDIRHIILGIGGSATVDGGMGMAQALGVRFLDADGQALAANGGNLARVASIEMDECDPRLANCHIEVACDVDNPLVGARGAAAVFGPQKGATPEMVEELEQGLQNYARVLQQQTEINVCQMAGGGAAGGMGIAAAVFLNADIKPGIEIVLNAVNLAQAVQGAALVITGEGRIDSQTAGGKAPLGVASVAKQFNVPVIGIAGVLGDGVEVVHQYGIDAVFSILPRLAPLAEVLASGETNLFNSARNIACAIKIGQGIKN

SEQ ID NO: 134404 - DNA, 1146 bp, Pasteurella multocida subsp. multocida str. Pm70
  CDS (1)..(1146): transl_table=11
atgcgaattgtgattgcaccagattcttttaaagaaagtcttacggcgcttgaagtcgcgcaagccattaaaataggctttcaaaagatattacctcacgcggaatatgtgcttgttccaatggcagatggcggagaaggcacggtacaatctttggtggatgccacacaaggtgagatcattaatacagaggtcattgcccccttaggaaatctaatccaagcattttttggattatctggagacaaacagaccgccattatcgaaatggcggcagcatcgggcttgcatttagtgcctgtcgaacagcgtaatccgctaaaaaccactagctttgggacgggacaattgataaaagccgcgttggatttgggggtaaaaaaaatcatactgggcattggtggtagtgccactaatgatgcaggtgtgggcatgttacaagcacttggcgcattatttctcgatcaacatcagcaaccaattgggtttggcggtgaacagttgcaagatattatgcatgtcgatttatctcaattagatccccgtttatcttctgtagaattagaagtggcttgtgatgtcaataatccgttgtgtggacctcgaggggcttctgccatctttggtccacaaaaaggagcaagcgtagaaatggttgagaaattagataatgcattacttcacttctcacatgtggtagagcaacaatatcaacgcaatattcgtgatcatgctggtgctggcgcagctgggggaatgggaggtggcttattattgttacctaatgtttctctaaaagctggtgtcgagattgttatcaaggctgtcaaactcgatacccttgttgccaatgcagacttagtgatcacaggagaagggagaatggatagtcaaacagcacaagggaaaaccccaagtggtgtggcaaaaactgccaaacagtttcagaaacccgtgcttgctattgtggggagtctaaaagaggattatgaagtgatttatcaagcaggcattgatgctgttttcccgattatacgtcaggtagagagtttggaagcgaccttaaagtgcggtcgagaaaatttaatttctgcggcacagaatattgctcgcttctatttacttgctaaacatataccagattaa

SEQ ID NO: 134405 - protein, 381 aa, Pasteurella multocida subsp. multocida str. Pm70
MRIVIAPDSFKESLTALEVAQAIKIGFQKILPHAEYVLVPMADGGEGTVQSLVDATQGEIINTEVIAPLGNLIQAFFGLSGDKQTAIIEMAAASGLHLVPVEQRNPLKTTSFGTGQLIKAALDLGVKKIILGIGGSATNDAGVGMLQALGALFLDQHQQPIGFGGEQLQDIMHVDLSQLDPRLSSVELEVACDVNNPLCGPRGASAIFGPQKGASVEMVEKLDNALLHFSHVVEQQYQRNIRDHAGAGAAGGMGGGLLLLPNVSLKAGVEIVIKAVKLDTLVANADLVITGEGRMDSQTAQGKTPSGVAKTAKQFQKPVLAIVGSLKEDYEVIYQAGIDAVFPIIRQVESLEATLKCGRENLISAAQNIARFYLLAKHIPD

SEQ ID NO: 134406 - DNA, 1146 bp, Pseudomonas aeruginosa PAO1
  CDS (1)..(1146): transl_table=11
atgaaaatcgtgattgctcctgattcgttcaaggaaagcctgtccgcgcccgacgtcgccgaggctatcgcccgcggctggcggcgagtcttcccgcaggccgaggtgttgctgcggccactggcggacggcggcgaaggcacggtcgatgcggtactcgccgccaccgccggcgaacgtcgcgaatgccgtgtcgaaggcccgctcggtgagccgaccctggcgcactggggctggctggacgacgccaccgcagtgatcgaaatggcttccgccagcggcttgcacctggtcccgcgcgaccgccgcgacgccacgcgcagcagcagccgtggcactggcgagctgatccgtgcggcgctggacgccggggcgcggaagattatcctcggcctcggcggcagcgctaccaacgatgccggcgccggcctgctgggcgcgctcggcgtgcgtttcctggctgccgacggcgaggaactggcgcccggcggcgccgcgctggctggcctgcacagtctcgacctgggcgggctggatccgcgcctggtggatgtcgcggtggaagtcgccgcagacgtcgacaacccgctatgcgggccgcgcggcgcgtcggcggtgttcggtccgcagaagggcgccagcgccgaacaggtggcgcaactggatgccgccctggcgcacttcgccaaggtggtcgcggcgacccttggcgaggacttcagccgggtgccgggcgtcggcgccgccggcggcctgggtttcgccgcgagggcattcctccgcgcgcgtttccgcccaggcatcgaactggtggcggagctggccgggctggccgatgcgctggtcggtgccgacctggtgctgaccggcgagggccgtctggatgcgcagagcctgcacggcaagaccccggtgggcgtggcgcggatcgcgcgccaggccggcgttcccgtggtagccctggccggcagcctgggcgacggctaccagcgcctgcacgacgccggcatcgatgcggcgttcagcctggcgccgggaccgatcagcctggagcaggcctgtgccggagcggcggcggaactggaggcgcgcgccgagcagatcgcccggctctggcgcctggctcaggcttcgcgggaagggtag

SEQ ID NO: 134407 - protein, 381 aa, Pseudomonas aeruginosa PAO1
MKIVIAPDSFKESLSAPDVAEAIARGWRRVFPQAEVLLRPLADGGEGTVDAVLAATAGERRECRVEGPLGEPTLAHWGWLDDATAVIEMASASGLHLVPRDRRDATRSSSRGTGELIRAALDAGARKIILGLGGSATNDAGAGLLGALGVRFLAADGEELAPGGAALAGLHSLDLGGLDPRLVDVAVEVAADVDNPLCGPRGASAVFGPQKGASAEQVAQLDAALAHFAKVVAATLGEDFSRVPGVGAAGGLGFAARAFLRARFRPGIELVAELAGLADALVGADLVLTGEGRLDAQSLHGKTPVGVARIARQAGVPVVALAGSLGDGYQRLHDAGIDAAFSLAPGPISLEQACAGAAAELEARAEQIARLWRLAQASREG

SEQ ID NO: 134408 - DNA, 1158 bp, Lactococcus lactis subsp. lactis Il1403
  CDS (1)..(1158): transl_table=11
atgaagaaaaaatttgtattagcgccagattctttcaaagaaagtttgagtgcgctggaagtttgtcaagcaatggaaaaaggaattaaaaaagtttttcctaaagctgaaataatttctatgccaatggctgacggtggtgaggggacaacagatgctttgattgatgcaacgggtggacgacgggtatataaaaaagtacaaggttcatttgcaaatacaaatgtagaggcctattttggtattttgggaaactcaaatacggcggtcattgagatggcaaaggcaaatggtctggaattggttgctttggaagatagaaatccaatgattacatcaacctatggaacaggacaattaattaaggctgcaatggatgaaggagtagataaaatcatcattggcattggtggaagtgcgactaatgacggtggctctggaatggctcgtgctttgggagctaaatttttaaataaagaccaagaagagattccacttggtggaggtttccttaaagaagttagaacaattgatatgagtgattttgacccaagagtggaagaaattgaaatattaattgctactgatgtcaccaatcctttaaccggaaataatggcgcttcttatgtttttggaccacaaaagggagcaactgaggaaatggtcaaagtattggatgaaaacttgaagcattatgcagaaattgttcataatgatctggggaaagatgttaaaaataaaccgggagctggtgcagcaggtggtttgggagcaggtttgcttgcttttaccaatgcaaaaatgcaattaggaattgagcttgttgcacaaacaatatacttagaagataaaattaaagaagctgattatgtatttacaggtgaaggtggaatggattatcagacaaaatttggtaaagcaccctatggcgtctgtaaaattgctaaaaaatacaagaaaccttgctttgctttggcaggatatattggggatggagcagatgttctttatgacgaaggaatgaccgctatttttggtgttttgagtcaagcacaatctttgtcagataccttggctgacggcgcaaagaacgttgagcgaacgagtgaaaatattacaagagtattagcaatgaatgagcaaaaggctcacttataa

SEQ ID NO: 134409 - protein, 385 aa, Lactococcus lactis subsp. lactis Il1403
MKKKFVLAPDSFKESLSALEVCQAMEKGIKKVFPKAEIISMPMADGGEGTTDALIDATGGRRVYKKVQGSFANTNVEAYFGILGNSNTAVIEMAKANGLELVALEDRNPMITSTYGTGQLIKAAMDEGVDKIIIGIGGSATNDGGSGMARALGAKFLNKDQEEIPLGGGFLKEVRTIDMSDFDPRVEEIEILIATDVTNPLTGNNGASYVFGPQKGATEEMVKVLDENLKHYAEIVHNDLGKDVKNKPGAGAAGGLGAGLLAFTNAKMQLGIELVAQTIYLEDKIKEADYVFTGEGGMDYQTKFGKAPYGVCKIAKKYKKPCFALAGYIGDGADVLYDEGMTAIFGVLSQAQSLSDTLADGAKNVERTSENITRVLAMNEQKAHL

SEQ ID NO: 134410 - DNA, 1146 bp, Escherichia coli O157:H7 EDL933
  CDS (1)..(1146): transl_table=11
atgaagattgtcattgcgccagactcttttaaagagagcttgagtgcagaaaaatgttgtcaggcaattaaagccgggttttcgaccctctttcccgatgcgaactatatctgtttgccgatagcggatggcggcgaagggacggtggatgcgatggtcgccgcgacgggcggcaacatcgtgacgcttgaagtctgcgggccgatgggcgaaaaagtgaatgctttttatggcattaccggcgacgggaaaacggcggtgattgagatggcggcagcaagtggcctgatgctggtcgcgcctgaaaagcgtaatccgttgctggcctccagttttggtacgggggagttaattcgtcatgcgctggataacggcattcgccatattattctcggcattggcggcagtgcgacggtcgacggcggtatgggcatggcgcaggcgctcggtgtgcgtttccttgatgccgacggtcaggtgctggtggctaacggcggcaatttagcgcgcgtggcaagcattgagatggaggaatgcgatccgcgtctggcgaactgccatattgaagtagcatgtgacgttgataacccgctggtaggggcacgcggcgcggcggcggtgtttggcccgcaaaaaggggcaacgccggagatggtcgaagaacttgaacaggggctgcaaaattacgcccgtgttttacaacagcaaactgaaattaatgtctgccagatggcgggcggtggcgctgcgggcggtatggggattgcggcggcggtattcctcaatgcggatattaaaccgggtattgagattgtactgcgggcggtcaacctggagcaggcggtgcagggggcagcactggtgatcaccggggaagggcgcattgactcgcaaacggcaggcggtaaagcgccgctgggcgttgcgtcggtggcgaagcagtttaatgtaccggtgattgggattgctggcgtattgggtgatggcgtggaagtggtgcaccagtacggcattgatgcggtattcagcattttgccacgtctggcacctttagccgaagtgctcgccagcggtgaaaccaatctcttcaacagcgcgcgaaatattgcctgcgccattaaaataggtcagggaattaaaaactga

SEQ ID NO: 134411 - protein, 381 aa, Escherichia coli O157:H7 EDL933
MKIVIAPDSFKESLSAEKCCQAIKAGFSTLFPDANYICLPIADGGEGTVDAMVAATGGNIVTLEVCGPMGEKVNAFYGITGDGKTAVIEMAAASGLMLVAPEKRNPLLASSFGTGELIRHALDNGIRHIILGIGGSATVDGGMGMAQALGVRFLDADGQVLVANGGNLARVASIEMEECDPRLANCHIEVACDVDNPLVGARGAAAVFGPQKGATPEMVEELEQGLQNYARVLQQQTEINVCQMAGGGAAGGMGIAAAVFLNADIKPGIEIVLRAVNLEQAVQGAALVITGEGRIDSQTAGGKAPLGVASVAKQFNVPVIGIAGVLGDGVEVVHQYGIDAVFSILPRLAPLAEVLASGETNLFNSARNIACAIKIGQGIKN

SEQ ID NO: 134412 - DNA, 1164 bp, Escherichia coli O157:H7 EDL933
  CDS (1)..(1164): transl_table=11
gtggtaacaggcataggtatgaaaatcgtaatcgccccagactcttataaagaaagtttatctgccagcgaggttgcgcaggcgatagaaaaaggatttcgggaaatttttcctgatgcacagtacgtttctgttcctgttgccgacggtggcgaaggaacggtggaagcgatgattgcagccacccagggttccgaacgtcacgcctgggttacagggccgctgggcgagaaagtgaatgccagttgggggatctccggcgatggcaaaaccgcgtttattgaaatggcggcggccagtgggctggagctggtacctgcggaaaaacgcgatccactcgtgaccacttcacgcggcacaggcgagttaatcctgcaggcgctggagagcggcgcgacaaacattattatcggcattggcggcagcgctacaaatgatggcggcgcaggcatggtacaggcgctgggggcgaaattatgcgacgccaacggcaatgaaattggttttggcggcggtagtcttaatactctgaatgatattgatatttccggcctcgatccgcgcttaaaagattgcgtcattcgcgtcgcttgtgatgtcaccaatccgctggtgggcgataacggcgcatcgcgcatctttggcccacaaaagggagccagtgaagcgatgattgttgagctggacaataacctctctcactatgccgaggtcattaaaaaagcgctgcatgttgatgtgaaagatgtccccggcgcaggagctgcgggtggtatgggcgcggcgctaatggcgtttcttggtgcggaactgaaaagtggtattgaaatcgtcactacggcgctgaatctggaggaacatattcacgattgtacgctggtgatcaccggtgaagggcgtattgacagccagagtattcacggcaaggtaccgattggtgtcgcaaacgtggcgaagaagtaccataaaccggtgattggcattgcgggtagcctgaccgatgatgttggcgttgtacatcagcatggcattgatgcggtcttcagcgtattgaccagcataggtacgttggacgaagcattccgcggggcttatgacaatatctgccgtgcttcacgtaatatcgccgcgacactggcgattggaatgcgcaacgcggggtga

SEQ ID NO: 134413 - protein, 387 aa, Escherichia coli O157:H7 EDL933
MVTGIGMKIVIAPDSYKESLSASEVAQAIEKGFREIFPDAQYVSVPVADGGEGTVEAMIAATQGSERHAWVTGPLGEKVNASWGISGDGKTAFIEMAAASGLELVPAEKRDPLVTTSRGTGELILQALESGATNIIIGIGGSATNDGGAGMVQALGAKLCDANGNEIGFGGGSLNTLNDIDISGLDPRLKDCVIRVACDVTNPLVGDNGASRIFGPQKGASEAMIVELDNNLSHYAEVIKKALHVDVKDVPGAGAAGGMGAALMAFLGAELKSGIEIVTTALNLEEHIHDCTLVITGEGRIDSQSIHGKVPIGVANVAKKYHKPVIGIAGSLTDDVGVVHQHGIDAVFSVLTSIGTLDEAFRGAYDNICRASRNIAATLAIGMRNAG

SEQ ID NO: 134414 - DNA, 1146 bp, Mycobacterium tuberculosis CDC1551
  CDS (1)..(1146): transl_table=11
atgaaaggctcgcaggcctcggatgacgcgaccggtagcttggggcccggccgactccagctgcccgccatgcgggtgttggtggcaccggactgctacggcgacagcctgtctgcggtggaggccgccgcggccattgcgaccggctggacgcggtcgcgaccaggcgattcgttcatcgtcgccccccaatccgatggcggtccgggttttgttgaggtgctgggcagccggctaggagagacccgccggctgcgtgtttgcgggccactgaacaccgtcgtgaacgcggcgtgggtgttcgatccgggctcggcaaccgcgtatttggagtgtgcgcaggcttgtggtctggggttgcttggcggcccgcccacgcccgagaccgcgctggcggcccacagcaagggcgtcggccagctcatcgccgcggcactgcgggccggggcggctcggatcgtggtggggttggggggcagcgcatgtaccgacggggggaaggggatgattgccgagcttggcggcctggacgcggcccgccgacagttggccgacgtcgaggtgatcgccgcctcggatgtcgaatacccattgctgggaccatggggcacggccagggtgttcgcgccgcagaagggcgcggacatggccaccgtcgcagtgttggaaggccgtctggcggcatgggcgattgaactggacgcggccgccgggcgcggggtgagcgccgagccgggcgcgggcgccgccggtggtatcggggctgggctgctcgcggttggcggccggtaccagtcgggtgcggcaatcatcgcagagcacacgcattttgccgacgaccttgccgatgcggagctgatcgtcaccggtgagggccgattcgacgagcaatccctgcacgggaaggtggttggtgcgatcgcggctgcggcccgcccgctcgcaattccggtgatagtgttggccggccaggtgtcgctggacaagtccgcgttgcggtcggcgggcattatggccgcattgtccatcgctgagtacgccggttcggtgcggttggcgctggccgatgcggccaatcagctcatgggcttggcgtctcaggtagcggcgcgactcgggaatagcggtccttcagggtaccgttga

SEQ ID NO: 134415 - protein, 381 aa, Mycobacterium tuberculosis CDC1551
MKGSQASDDATGSLGPGRLQLPAMRVLVAPDCYGDSLSAVEAAAAIATGWTRSRPGDSFIVAPQSDGGPGFVEVLGSRLGETRRLRVCGPLNTVVNAAWVFDPGSATAYLECAQACGLGLLGGPPTPETALAAHSKGVGQLIAAALRAGAARIVVGLGGSACTDGGKGMIAELGGLDAARRQLADVEVIAASDVEYPLLGPWGTARVFAPQKGADMATVAVLEGRLAAWAIELDAAAGRGVSAEPGAGAAGGIGAGLLAVGGRYQSGAAIIAEHTHFADDLADAELIVTGEGRFDEQSLHGKVVGAIAAAARPLAIPVIVLAGQVSLDKSALRSAGIMAALSIAEYAGSVRLALADAANQLMGLASQVAARLGNSGPSGYR

SEQ ID NO: 134416 - DNA, 1143 bp, Clostridium acetobutylicum ATCC 824
  CDS (1)..(1143): transl_table=11
atgaaaagttttactattgtattagcgccggattcttttaaagaaagcatgactgcaaaagaagtctgtttggcaatggaaaagggaataaagaaggttaatgatagaattaattgcatacatgttccaatggcagatggcggagaaggtacaatgcagtctctcgtggatgctacaaatggaaaagtatattcactaaatgtaatgggacctcttttagataaggttgaggcacaatacgggattttgggtaatggagaaattggagtaattgaaatggcaagtgccagcggaattcatttggttccaaaggagaagagaaaccctttaattacaactacatatggtacaggagaacttgttaaagcttgtcttgatagaggcgtgaaaaaaatacttataggtataggtggaagttcaactaatgatggaggagtaggtgctattaaagcacttggagctaaatttttagatgaagaaggaaaagatataggttttgggggaggaagcttatctaagctaagaaaaatagatttgtctgagcttgatgaaagattaagtaaagtggaaattgaagttgcatgtgatgttaataatccactttgcggtaaaaatggagcttctaatatctttggacctcaaaaaggtgctacaaaagaaatggttgaaacattagatgaaaatctaaagcattatgctaaaataataaaagaacagtgtaaaaaggatgttattgacatgccaggagcaggagcagcagggggccttggagctggtcttgtagcatttttagacggtaaacttgagcgtgggattggattggttataaagtattctggactagaagaaaaagtaaaagactgtgatattgtttttacaggggaaggaagtatagactatcaaactaagtttggaaaaacaccaattggagtagctaagcttgctaaaaagtatgacaaaccagttattgcacttgcaggaagagttggggacaacatagaggatttgtacgaagaaggcatagactcgatatttggaataataagaggtgtaaagactcttgaagaagttcttaaagacggaaaagaaaatattgaaaagacatcagaaaatataatgagattaataaatttaaatatataa

SEQ ID NO: 134417 - protein, 380 aa, Clostridium acetobutylicum ATCC 824
MKSFTIVLAPDSFKESMTAKEVCLAMEKGIKKVNDRINCIHVPMADGGEGTMQSLVDATNGKVYSLNVMGPLLDKVEAQYGILGNGEIGVIEMASASGIHLVPKEKRNPLITTTYGTGELVKACLDRGVKKILIGIGGSSTNDGGVGAIKALGAKFLDEEGKDIGFGGGSLSKLRKIDLSELDERLSKVEIEVACDVNNPLCGKNGASNIFGPQKGATKEMVETLDENLKHYAKIIKEQCKKDVIDMPGAGAAGGLGAGLVAFLDGKLERGIGLVIKYSGLEEKVKDCDIVFTGEGSIDYQTKFGKTPIGVAKLAKKYDKPVIALAGRVGDNIEDLYEEGIDSIFGIIRGVKTLEEVLKDGKENIEKTSENIMRLINLNI

SEQ ID NO: 134418 - DNA, 1128 bp, Streptococcus pneumoniae R6
  CDS (1)..(1128): transl_table=11
atgagggaaaatatgaagattgtaattgcaccggattcgtttaaggaaagcttgacagctcaacaggtagctgaagcaataaaaagaggcttccaacaatcgatagcagatgtagaatgtctcctctgccctgttggtgatgggggagaaggtactgtagatgctatccgacattctcttgacctaaaagaaaaatggatccaagtgacagacccttctggacaaaaagaagccatgcgctattttcaaaaaggggaactggcactatttgaagtagctgacttggttggtcttggaaaaattccgctagagaaacgaaatccacttcaaatccaaacttgtggtattggagagttgattctccatctcatttctaaagggattaaagatatttatatcggtgttggtggcacggccagtaatgatggaggactggggattgctgctggtttaggttatcaattttatgatagggatggaaatgtcttgcctgcttccggtcaatccttattaaacttagcttctgtttcaacagaaaattgctataaaattcctgaaggtgttcaaattcatattttagcagatgtcgtgagtcccttatgtggtcatcaaggtgcgacttacacttttggcaatcaaaaaggtctacatccgactatgtttgcagtcgtagatcaggcgatccaagatttttatgaaaaattctcacctgcaacattagaaattaaaggagcaggagcaggtggaggccttgctggtggtttgtgtgcctttgctcaggcaagtatcgtgtctggaattgatacctgcttggacttaatcaactttgataagaaagtttcagatgctgacttggttgttgttggagaaggaagacttgatagtcaaagctttgctgggaaagcgcctataggtgttgcaaaaagaacccctgttggagttcctgttattgctatttgcggtagtcttgctgaagatttacctcccctaccatttgaaaatatccaagctgtcttttctattttggagaaaagtgaacctttagaagatagtttgaaaaatgccagtctctatctggagcgcacggctgccaatattgggcacttattaaatatgtgcaagatttag

SEQ ID NO: 134419 - protein, 375 aa, Streptococcus pneumoniae R6
MRENMKIVIAPDSFKESLTAQQVAEAIKRGFQQSIADVECLLCPVGDGGEGTVDAIRHSLDLKEKWIQVTDPSGQKEAMRYFQKGELALFEVADLVGLGKIPLEKRNPLQIQTCGIGELILHLISKGIKDIYIGVGGTASNDGGLGIAAGLGYQFYDRDGNVLPASGQSLLNLASVSTENCYKIPEGVQIHILADVVSPLCGHQGATYTFGNQKGLHPTMFAVVDQAIQDFYEKFSPATLEIKGAGAGGGLAGGLCAFAQASIVSGIDTCLDLINFDKKVSDADLVVVGEGRLDSQSFAGKAPIGVAKRTPVGVPVIAICGSLAEDLPPLPFENIQAVFSILEKSEPLEDSLKNASLYLERTAANIGHLLNMCKI

SEQ ID NO: 134420 - DNA, 1143 bp, Salmonella typhimurium LT2
  CDS (1)..(1143): transl_table=11
atgaaaatagtgatcgcaccagactcgtataaggaaagtttgagtgctcttgaggtagcgaccgccattgaacaaggatttcgcgagatctggcctgacgccgattacctgaaattgccgctggctgatggcggagaaggtactgtcgaagcgatggttgaagcgacggcgggtcgaatcgtgcatgttgaggtcaccgggccgttggggcatcgcgtcaatgcgttttatgggctttccggcgatgcgcgttccgcgttcattgaaatggcggccgccagcgggctggagcaggtgccgcccgcgcaacgcgatccgttgaagaccacgtcatggggaaccggcgagctgatccgtcatgcgctggatgcgggcgttgagcatatcattattggtatcggcggtagcgccaccaacgatggcggcgcggggatggtacaggcgctgggggccaggctacgggatgcgcagggcaatgatattgcgcaaggcggcattgggctggaaacactcgccagcattgatatcagcggcctggataagcgtttgtcggcgtgccatatagaggtcgcctgcgatgtcacgaatccccttaccggcaaagagggcgcgtctgcggtttttggtccgcaaaaaggggcgacgccggaaatgattgaacgcctggatacggcattgactcgctatgcgcatttgattgcccgcgatctgcatgtcgatgtgttggatctggcaggcggcggcgcggcaggcggcatgggggcggcgttatacgcgttttgcggcgcgcagctacggcgtggcattgagattgtcaccgatgcgcttcatctggaagcgtgtcttgcggatgctgatttagtcatcaccggcgagggacgcatcgacagccagaccattcacggtaaagtccctattggcgtggcaaacatcgccaaacggtataacaagccggtaattggtattgcgggtagcctgacggcggacgttagcgtggttcatgaacatgggcttgatgcggttttcagcgtgatttataccatctgcacgctggaggacgcgctgaagaatgcgagtgaaaacgtacgaatgaccgcgcgcaacgtggctgcaacgctgaaagcggggcaacagttacgctga

SEQ ID NO: 134421 - protein, 380 aa, Salmonella typhimurium LT2
MKIVIAPDSYKESLSALEVATAIEQGFREIWPDADYLKLPLADGGEGTVEAMVEATAGRIVHVEVTGPLGHRVNAFYGLSGDARSAFIEMAAASGLEQVPPAQRDPLKTTSWGTGELIRHALDAGVEHIIIGIGGSATNDGGAGMVQALGARLRDAQGNDIAQGGIGLETLASIDISGLDKRLSACHIEVACDVTNPLTGKEGASAVFGPQKGATPEMIERLDTALTRYAHLIARDLHVDVLDLAGGGAAGGMGAALYAFCGAQLRRGIEIVTDALHLEACLADADLVITGEGRIDSQTIHGKVPIGVANIAKRYNKPVIGIAGSLTADVSVVHEHGLDAVFSVIYTICTLEDALKNASENVRMTARNVAATLKAGQQLR

SEQ ID NO: 134422 - DNA, 1146 bp, Salmonella typhimurium LT2
  CDS (1)..(1146): transl_table=11
atgaaaatcgtaattgcccccgactcctataaagaaagcctttctgccgccgaggtagcgcaggcgatagaaaaaggatttcgggaaattttccccgatgcgcaatatgtctctgttccggttgccgatggcggcgaaggaacggtcgaagccatgattgccgcgacgcagggcgttgaacgcgccgcatgggtgaccgggccgttgggtgaaaaagtgaaagcctgctggggaatgtccggggatggtaaaaccgcgtttattgaaatggcggcggccagcggactggcgctggttccgccagaaaaacgcaaccctttgattacaacctcgcggggaacgggggagctgatattgcaggcgctggaaagcggcgcaagcaatatcattatcggcattggcggcagcgcgacaaatgacggcggcgcagggatgatgcaggcgttaggcgcaaaactgcgcgatgcaaacggcgcggatatcggttacggtggcggaagccttcattgtctaagcgacattgatatttcagagctcgatccccgtttaaaactctgcgcgattcgtgtcgcttgcgatgtctctaatcctctgatcggcgacaacggcgcatcacgaatttttgggccgcagaaaggcgcgaccgaagagaacattgttgagctggacagaaatcttgctcactatgccgacatcataaaaaaatcgctgaatgtcgacgtaaagacggcacccggcgcaggcgcggcaggcggtatgggggcggcgttaatggcttttctcggtgcggaattacgcagcgggatcgaaattgtcacggcggcactgaacctggaggagcatatccacgactgtacgctggtggtgacgggagaagggcggattgatagccaaagtattcgcggtaaagtgccgattggcgtcgcaaatgtggcgaaaaaatatcataagccagtaattggcattgccggcagcctgacgcacgatgtagggatagtacatcattatggcatcgacgctgtctttagcgtactcacgcgcatcgtgacgctggaggaggcttttcggggcgcttttgacaatatttatcgggcatccagaaatgttgctgccgctctggcgataggaatgcgcagcgcagggtga

SEQ ID NO: 134423 - protein, 381 aa, Salmonella typhimurium LT2
MKIVIAPDSYKESLSAAEVAQAIEKGFREIFPDAQYVSVPVADGGEGTVEAMIAATQGVERAAWVTGPLGEKVKACWGMSGDGKTAFIEMAAASGLALVPPEKRNPLITTSRGTGELILQALESGASNIIIGIGGSATNDGGAGMMQALGAKLRDANGADIGYGGGSLHCLSDIDISELDPRLKLCAIRVACDVSNPLIGDNGASRIFGPQKGATEENIVELDRNLAHYADIIKKSLNVDVKTAPGAGAAGGMGAALMAFLGAELRSGIEIVTAALNLEEHIHDCTLVVTGEGRIDSQSIRGKVPIGVANVAKKYHKPVIGIAGSLTHDVGIVHHYGIDAVFSVLTRIVTLEEAFRGAFDNIYRASRNVAAALAIGMRSAG

SEQ ID NO: 134424 - DNA, 1134 bp, Listeria monocytogenes EGD-e
  CDS (1)..(1134): transl_table=11
atgaaaatcgtcatcgcacctgattcattcaaagaaagcgccactgcggtggaagtagcaactgccattaaaaaaggctggactaaagctcgtccagccgatcaaataagccttgcccctgtttctgacgggggtgagggttttcttactgttttaagtgagtcttccgaggtggaattgttccaagcagaagtaaccaacttaaacggtcacaaaataatggcctcctacggtattcacgcccgccaagaaactgcgattatcgagtccgccaacacgattggattagatttaatcccagcggcagaccgtaatccagcccatgcaagctctgctggcgtcggtgaactaattttggcatcactggatcacaacgtcaaaaaaatcattatcggccttggtggaagtggcacaaacgatggcggcgctggactaatccaagctttgggcgttgcactacttgataaaaacaaacagcctattccgcccggtggcattcatttgcaagaactagcctacattgatgccagcaaccttaacccaaagctgaaaaacattcaattccaaatagcctgtgacgtgacgaatccacttcttggagaaaacggtgctacatttgttttcggtgctcaaaaaggggcaagtcccgacatgctcgttaaactagagaacgccatgcagaactacggagcaaaactcgaccaattttcttctcaaaaaatcaccacaaaaaaaggagctggagccgctggtggtatcgctgctggactaatgaccttcctaaatgcagacttattaagcggttcaactcttgttatggaactttctaatatgaaagataaaatgaaagacgccgatattgttattgttggtgaaggacgaatggacaagcaatcgatgatggggaaaattcctgttcaaatcgctcaagaagctaaaaaacaaggttgcttcgttctggctattgtcggcagccttgcactcgaaaacaacctagcccagcagcacggcatcgatgcttttttcccaaacatccctgaaataacagatttacccactctttttgaaaatacgacgaaaaacctcgaacgtacggcggaaaacatcgccaaactaactttaattggcaaataa

SEQ ID NO: 134425 - protein, 377 aa, Listeria monocytogenes EGD-e
MKIVIAPDSFKESATAVEVATAIKKGWTKARPADQISLAPVSDGGEGFLTVLSESSEVELFQAEVTNLNGHKIMASYGIHARQETAIIESANTIGLDLIPAADRNPAHASSAGVGELILASLDHNVKKIIIGLGGSGTNDGGAGLIQALGVALLDKNKQPIPPGGIHLQELAYIDASNLNPKLKNIQFQIACDVTNPLLGENGATFVFGAQKGASPDMLVKLENAMQNYGAKLDQFSSQKITTKKGAGAAGGIAAGLMTFLNADLLSGSTLVMELSNMKDKMKDADIVIVGEGRMDKQSMMGKIPVQIAQEAKKQGCFVLAIVGSLALENNLAQQHGIDAFFPNIPEITDLPTLFENTTKNLERTAENIAKLTLIGK

SEQ ID NO: 134426 - DNA, 1122 bp, Listeria monocytogenes EGD-e
  CDS (1)..(1122): transl_table=11
atgaaaattgtcattgcaccggattcattcaaagaaagtttgacggcgcatgaggtggcagagtatattaaagagggctttcaagaaatttatccggatgctgattatcatttactccctgtcagtgatggcggggaaggcacgctagagattttaagtaaagctttagacgcgaaaaaaatgaaaatcgatgtgtccggcccttttagcgaaccagtttcagcgcaagttgctttcacggaagggaacaaaaaagctttaatagaaatggccgaggtttgtggtttgcacttagttccgacgactagacgcgatccacttcaagtgagtactaaaggagtgggcgagctaattttgcacgccatgaaaaaaggtgcgaccgagattattattgggattggtggaagcgcttcaaacgatggcggaattggcatggctagtgcgcttggttatgaattcctagatgcagaaaataatatcgtcaacccgattggcgtaaatttagctgatatagcaaccattcgttccgaaaaggtccccgctgaactagaaaacatcacagtaaatattgtcacggatgtcgaaaatccgctttgtggagaagctggcgcatcgtatgtgtttggtccgcaaaaagggctagccacaacagatttagctacagcagatgaagcaatgcgccatttttatcaattagcaaatcctgccatggttacaatgccgcgagcaggtgccgggggtgggattggtgctggacttgtgacgtttgcaaaagctaaccttttatcgggaattgattttgttattgaagcacttcaaatcaaaaccatttgtgaggatgcagatttggtcattgttggcgaagggaaaatggacgggcaaaccgcacaagggaaagctcctgtgggtgttgcgaaagtagtgccgaaagaaacaccagtttttgcaatttgtggaagtgttggtgagggactagaagcagtatatgaagtcggaatcagcgcagtatttccatctattgccaagccagcatctttagaaagtatacttaaagaaacaccaaataatttaagaagaaccgcgcgaaatgttgcggcagtttggaaaggacgagtagaatga

SEQ ID NO: 134427 - protein, 373 aa, Listeria monocytogenes EGD-e
MKIVIAPDSFKESLTAHEVAEYIKEGFQEIYPDADYHLLPVSDGGEGTLEILSKALDAKKMKIDVSGPFSEPVSAQVAFTEGNKKALIEMAEVCGLHLVPTTRRDPLQVSTKGVGELILHAMKKGATEIIIGIGGSASNDGGIGMASALGYEFLDAENNIVNPIGVNLADIATIRSEKVPAELENITVNIVTDVENPLCGEAGASYVFGPQKGLATTDLATADEAMRHFYQLANPAMVTMPRAGAGGGIGAGLVTFAKANLLSGIDFVIEALQIKTICEDADLVIVGEGKMDGQTAQGKAPVGVAKVVPKETPVFAICGSVGEGLEAVYEVGISAVFPSIAKPASLESILKETPNNLRRTARNVAAVWKGRVE

SEQ ID NO: 134428 - DNA, 1122 bp, Listeria innocua Clip11262
  CDS (1)..(1122): transl_table=11
atgaaaattgtcattgcaccggattcatttaaagaaagtttgacggcgcacgaggtggcagagtatattaaagagggctttcaagaagtttatccgcatgcagactaccagttacttccagttggagatgggggcgagggtacgcttgatgttttaagtagagccgtggatgcgaaaacgacgaaaatcaatgtttctggtccgtttggcgagcctgtttcagcaaaagttgcctttacagagggcaataaaaaagcgctgatcgaaatggctgaggtttgcggtttgcatctagttccagcaactaaacgtgatccacttcaagtgagcacaaaaggggtgggcgaactaattttgcacgtaatgaaaaaaggtgcgaccgaggttatcattggcataggtggaagcgcttcaaatgatggcggaataggcatggctagcgcgcttggctatgaatttttagatttagaaaacaatgtcgtaaatccaatcggcgccaatttagctagcatcgcaaccatccgctctgaaaatgttcctactgagctcaaaaacatcacgataaatatagtaaccgacgttgaaaatccgctttgtggaaaagaaggcgcatcctatgtattcggcccacaaaaaggattagctgccactgatctcgcgagcgcagacgaggcaatgcgtcatttttatcagctggccaatccagcgatgataacaatggcacgagctggtgctgggggaggaattggcgctggacttgcaacatttgcagaggcgaatttgctgtctggcattgattttgtaatcgaggcgcttcaaattaaagcagtttgcaaagatgccgatttagtcatcgttggtgaaggaaaaatggacggacaaactgctcaaggaaaagcaccagtcggcgtggcgaaagaagtacctgatggaacacccgtttttgcaatttgtggaagcgtaggagagggtcttgaagctgtctatacggccggaatccacgcggtatttccctcaattgcgagtccaacaactttagaaaaaatacttaaagaaaccccaaataatctaagaagaaccgcacgaaacgttgcggcagtttggaaaggacgagtagaatga

SEQ ID NO: 134429 - protein, 373 aa, Listeria innocua Clip11262
MKIVIAPDSFKESLTAHEVAEYIKEGFQEVYPHADYQLLPVGDGGEGTLDVLSRAVDAKTTKINVSGPFGEPVSAKVAFTEGNKKALIEMAEVCGLHLVPATKRDPLQVSTKGVGELILHVMKKGATEVIIGIGGSASNDGGIGMASALGYEFLDLENNVVNPIGANLASIATIRSENVPTELKNITINIVTDVENPLCGKEGASYVFGPQKGLAATDLASADEAMRHFYQLANPAMITMARAGAGGGIGAGLATFAEANLLSGIDFVIEALQIKAVCKDADLVIVGEGKMDGQTAQGKAPVGVAKEVPDGTPVFAICGSVGEGLEAVYTAGIHAVFPSIASPTTLEKILKETPNNLRRTARNVAAVWKGRVE

SEQ ID NO: 134430 - DNA, 1122 bp, Clostridium perfringens str. 13
  CDS (1)..(1122): transl_table=11
atgaaatttgtattagcaccagattcattcaaggaaagtatgacttcaatggaagcctgtaatgctatggaaagaggaattaaaaaggtctttaaagatgcagaatgcataaaggttccaatggctgacggtggagagggaactgtagaagctttagttcatgctacctttggaagaatagaaagagtaaatgttactggacctttaggaaataaggtggaagctttttatggagttttaggtaatggaaagactgctgtcatagaaatggctagtgcttcagggattcaacttgttaagagagaagaaagaaatcctttaataacaacaacgtttggaactggagaacttataaaggctgcattagatcaaggaataaaacatttagttataggaataggtggaagtgccactaatgatggaggatgtggaatgcttcaagctttaggtggaagacttttagacaaggaaggaaatcaaatagcctttggtggaggagcattaaaagatatagaaagtattgatttaagttctttagatgaaagactaaaggaagtatcaatcgaagtagcttgtgatgtaactaatccattagtaggagaaaaaggagcctcagcagtatttggtcctcaaaagggagcaactaaagaagtggttaaagaattagataataatttagctcattatgcttctgtaataaaaaaagacctaggaaaagaagtttcacacatagaaggttctggtgctgctggaggattaggtgctgctttattactattaggtggagaattaaaaagaggtatagagcttgtaataaaacatacagagttagctgaaaaggtaaagggagcagactttgtatttactggtgaaggaagtatagatgatcaaactatatatggaaaaacaccaatgggagttgctactgtggctaaggaaaatggagtttctacaattgccttttcaggaaaagttggagagggaatagaaggcctttatgaaataggtataaagagtatatttagtataatgactggagtttcaactttagatgaagctttaaaagaaggaagtagaaatttagaattaacaactgaaaatgtagttagacttttaaaataa

SEQ ID NO: 134431 - protein, 373 aa, Clostridium perfringens str. 13
MKFVLAPDSFKESMTSMEACNAMERGIKKVFKDAECIKVPMADGGEGTVEALVHATFGRIERVNVTGPLGNKVEAFYGVLGNGKTAVIEMASASGIQLVKREERNPLITTTFGTGELIKAALDQGIKHLVIGIGGSATNDGGCGMLQALGGRLLDKEGNQIAFGGGALKDIESIDLSSLDERLKEVSIEVACDVTNPLVGEKGASAVFGPQKGATKEVVKELDNNLAHYASVIKKDLGKEVSHIEGSGAAGGLGAALLLLGGELKRGIELVIKHTELAEKVKGADFVFTGEGSIDDQTIYGKTPMGVATVAKENGVSTIAFSGKVGEGIEGLYEIGIKSIFSIMTGVSTLDEALKEGSRNLELTTENVVRLLK

SEQ ID NO: 134432 - DNA, 1125 bp, Corynebacterium glutamicum ATCC 13032
  CDS (1)..(1125): transl_table=11
atgtccaactcccccaccgacgtttcaacgagcgcacctcgaattatgatcgcgccagattcctacaaaggaaccgctaccgcatcagaagctgcgcaatacttaggcgaaggcgtgttggaaattttgcccaacgcctccattacgttggcacccatggccgacggtggcgaaggaacatcctcagttttcggcgggcaggtcataacattacccacgacaaatgccgcgggacgcctcaccgaagccagctacaccttagattccgaaacaaacactgcctacattgacatcgccgcagcctccggtttgcccgccgttgcagacgatctagtccccaccaccggcgatacctacggcaccggcgttttgatcgcagacgcggtcacccgtggcgcaactcgcattgctttaggccttggcggatcagccacaactgacgccggctcaggaattctcatcgccctcggcgccgtcccacgcaacaaagagggctacgcactacgaaccggtggcgccgacctcatcaacctcgattacatcgataccgccgaactcaacatccccgcagccgccgtcgaatggatcctgctcaccgatgtcgacgcccccgccaccggcccgcagggcgcggccaccgtattcgggccccaaaaaggtgccaccgaaaaagacatttcgcttctcgacgccgccctccaccacgcctgcgcccaactggaagttgatggcacaaagccaggtatgggcgcagccgggggcattgcaatcggactgacgtggctgtccaccctcatgcacggcaacgaccaacagatccatatcctccccggcgcgccactgattgcccgctccaacggaatcgaggatgcgctgccagaaactgacttgttgatcaccggtgaaggccgactagattcccaatcgttcaccggaaaggttgtgggcaccctccacggtttagctaaagcccacgatgtggatctcgctgttgcggccggcatcgtggaaggcggtattcccgatgatttcctagcggtagaaatgattaaatcctccgacgttgcagcacaattacgtgatgcaggccgaaggatcgctcaagaatacgtagctcaaaactag

SEQ ID NO: 134433 - protein, 374 aa, Corynebacterium glutamicum ATCC 13032
MSNSPTDVSTSAPRIMIAPDSYKGTATASEAAQYLGEGVLEILPNASITLAPMADGGEGTSSVFGGQVITLPTTNAAGRLTEASYTLDSETNTAYIDIAAASGLPAVADDLVPTTGDTYGTGVLIADAVTRGATRIALGLGGSATTDAGSGILIALGAVPRNKEGYALRTGGADLINLDYIDTAELNIPAAAVEWILLTDVDAPATGPQGAATVFGPQKGATEKDISLLDAALHHACAQLEVDGTKPGMGAAGGIAIGLTWLSTLMHGNDQQIHILPGAPLIARSNGIEDALPETDLLITGEGRLDSQSFTGKVVGTLHGLAKAHDVDLAVAAGIVEGGIPDDFLAVEMIKSSDVAAQLRDAGRRIAQEYVAQN

SEQ ID NO: 134434 - DNA, 1134 bp, Thermoanaerobacter tengcongensis MB4
  CDS (1)..(1134): transl_table=11
ttgaaaatactgcttgcaccggattctttcaaaggaagtttatcttcaaaagaagtatgccatgctatggaaaatggcataaaaagagttattgacgcagaaataatatctattccaattgcagatggaggagaaggaacagttgaagcattagtttacgctgtgggaggagagataataaaatcagatgtcactggccctttaggggaaaaggttgaggctttttacgggattttgaaagatggcacagctgtcattgaaatggctgcctgtgccggtttataccttattcctgaagaaaagagaaaccccctaaagacgacaacttacggagtgggagagcttataaaactggctttggacagagggtgtcgcaagttcataataggaataggcgggagtgccacaaatgacggcggagttgggatggctcaggctctgggagcaagatttttagataaagatggcaatgaaataggctttggaggaggagagctatataaaattgaaaagatagacataagctctattgataaaagaatatatgaaagtgaatttattgtggcatcagatgttgacaatcctttatgcggtgaaaaaggggcatcttatgtttatggtcctcaaaaaggcgcaacgcctgagatgataaaaatactagatgaaaacttaaggcatttagcttatgaggctaaaaaagttattgaaaaggactactcagaagtgcccggagcaggagctgcaggagggttaggttttggtttaatggctttcttaggtgccaaattaaaaagagggattgacataataatagaaactactcgattggaagaaaaaataaaagaagtagacttagtcataacaggagaaggcaatacagactttcagacagcctttgggaaggctccagcaggcattgccaaacttgcaaaaaaatataataagcctgtgattatcctctcgggcggtttagggaaagactataaaagtttgtatgacataggtgtaactgctctttttagtataactaataaacctatgtctttagaagaagctatgaaaaacgcttatcagcttgtgtcagacagaatagaagacattatgagagtttttgctatctcaataaagaggtaa

SEQ ID NO: 134435 - protein, 377 aa, Thermoanaerobacter tengcongensis MB4
MKILLAPDSFKGSLSSKEVCHAMENGIKRVIDAEIISIPIADGGEGTVEALVYAVGGEIIKSDVTGPLGEKVEAFYGILKDGTAVIEMAACAGLYLIPEEKRNPLKTTTYGVGELIKLALDRGCRKFIIGIGGSATNDGGVGMAQALGARFLDKDGNEIGFGGGELYKIEKIDISSIDKRIYESEFIVASDVDNPLCGEKGASYVYGPQKGATPEMIKILDENLRHLAYEAKKVIEKDYSEVPGAGAAGGLGFGLMAFLGAKLKRGIDIIIETTRLEEKIKEVDLVITGEGNTDFQTAFGKAPAGIAKLAKKYNKPVIILSGGLGKDYKSLYDIGVTALFSITNKPMSLEEAMKNAYQLVSDRIEDIMRVFAISIKR

SEQ ID NO: 134436 - DNA, 1299 bp, Streptomyces coelicolor A3(2)
  CDS (1)..(1299): transl_table=11
atgtctcatccgtcccccgtgctgaaccgagtggtcgtggcccccagcggattcaaggagtccctgtccgcccgcgccgccgccgacgccatcgcggcgggcgtccgccgggtgctgccggacgccgagatcgaccggatcccgctcgtggacggcggcgagggcaccgccgtcgcgctggcgtccgcgaccggcgggcggctggtggcgctggccgccaccggtccggtcggcgaccgggtcggcacccacttcgcgctgctcggcaccggggacacggcggtggtggagatggcggccgtcgcgggcctgtccctggtcccccgcgctctgcgcgaccccggcgccaccaccacgtacggcgtcggcgagctgatccgcgccgctctcggcaccggggtgcggcgcgtgctggtcggctgcggcgactcggggacgtccgacgggggcgcgggcgcgctccaggcgctcggggcccggctgctggacggggacggcttcgaactcggacccggcggacgggagctgaaccgcctcgtccgcgtcgacccgtccggcctcgacgcccggctgaaggacaccgagctgctcgtcgcctgcaacccctacaacgtgctgtgcggcgagcggggcgtggcccgggtgttcggcccgcagaagggggcgacgcccgcgcaggtcgaggagttgtcggccgggctggagaactgggcgcgcgtgctcacccgcgacctcggcgtcgtcggcaccgacctgcgcacggggtccggcaccggcgcgtccggcggtctcggcgcgggactcgccgccgtcggggcccggctgctgccccgcttcgacgtgctcctgggccacctcgacctggacgcccgcctcgcccgggccgacctggtgctcaccgccgagggagccctggaccaccagacgccgcgcggcaaggtgccggccgaggtggcccgccgcgccaagctctccggcaggcccgtcctcgccctggcgggcacgctcggcgagggcgcgcacgacgtgcccggggtggacgcctgccacgggatcatgccggcgccgatggccctggcggacgcgttgctgcgcgcctccgagctcctcacggacgccacggaacgggcgctgcggatggtgctgctgggggcccggttgccggccgggccggctcaggcggcggtgccggtcaccggtgccgtcccgcgggacgccgggtcgccggacgcgtggtcgccggacgccgtgtcgccggacgccgggtcgggcacgcagcggccgtcctcggtgcggtag

SEQ ID NO: 134437 - protein, 432 aa, Streptomyces coelicolor A3(2)
MSHPSPVLNRVVVAPSGFKESLSARAAADAIAAGVRRVLPDAEIDRIPLVDGGEGTAVALASATGGRLVALAATGPVGDRVGTHFALLGTGDTAVVEMAAVAGLSLVPRALRDPGATTTYGVGELIRAALGTGVRRVLVGCGDSGTSDGGAGALQALGARLLDGDGFELGPGGRELNRLVRVDPSGLDARLKDTELLVACNPYNVLCGERGVARVFGPQKGATPAQVEELSAGLENWARVLTRDLGVVGTDLRTGSGTGASGGLGAGLAAVGARLLPRFDVLLGHLDLDARLARADLVLTAEGALDHQTPRGKVPAEVARRAKLSGRPVLALAGTLGEGAHDVPGVDACHGIMPAPMALADALLRASELLTDATERALRMVLLGARLPAGPAQAAVPVTGAVPRDAGSPDAWSPDAVSPDAGSGTQRPSSVR

SEQ ID NO: 134438 - DNA, 1143 bp, Streptomyces coelicolor A3(2)
  CDS (1)..(1143): transl_table=11
gtggacgggacccgccgggtactcgtcgccgcggacaagttcaagggctcgctgacggccgtcgaggtcgccgagcgcgtcacggccggactgcgccgcgtcgtgccggacgtcctggtcgaggcgctgcccgtcgccgacggcggcgacggcacggtggccgccgcggtcgcggccggattcgaacgccgggaggcacgggtcgccggtcccctcggcgaggaggtgacggcggcgtacgcgctgcgcggcgacaccgccgtcgtggagatggccgaggccagcggcctccagcggctcccggaaggcgtcctcgcgccgctgacgtcgtccacgtacggctcgggcgagctgctgcgggccgcactggacgcgggggcgcggacgatcgtgttcggggtcggcggcagcgccaccacggacggcggcgccgggatgctggccgcgctcggggcgcggttcctggacgggaacggcgagccggtcgcgccgggcgggggcggtctcgcggggctggtctcggccgacctgtcgggcctcgactcccgcctgtccgacgtggagctggtgctcgccagcgacgtcgacaatccgctgaccgggccgaagggcgccccggcggtctacgggccgcagaagggtgcctcgccggacgacgtgacggccctggacgcggccctcgcgcacttcgcgaaggtcctggagcggacggagggcgtgggcgcgcgggccgccgagtacgccgcgtcgccgggcgcgggtgcggcgggcggcatcgggttcggcgcgatgctgctgggcgcgcggttccggcccggcatcgaggtgatgctggacgtgctgggcttcgcgccggcgctggagcgggcggacctggtgatcaccggggagggctcgctggacgagcagaccctgcacgggaaggcgccggcgggtgtcgcggcggcggcacgggccgcgggcaaggaggtcgtcgcggtgtgcgggcgcctggcgctgccggcggaggtgctggggcgggccgggatccggcgggcgtatccgctgacggacgtcgagccggacgtcgcgaagtgcatcgcggacgcggggccgatcctggagcgggtggccgagtccatcgcgcgggacttcctggcctag

SEQ ID NO: 134439 - protein, 380 aa, Streptomyces coelicolor A3(2)
MDGTRRVLVAADKFKGSLTAVEVAERVTAGLRRVVPDVLVEALPVADGGDGTVAAAVAAGFERREARVAGPLGEEVTAAYALRGDTAVVEMAEASGLQRLPEGVLAPLTSSTYGSGELLRAALDAGARTIVFGVGGSATTDGGAGMLAALGARFLDGNGEPVAPGGGGLAGLVSADLSGLDSRLSDVELVLASDVDNPLTGPKGAPAVYGPQKGASPDDVTALDAALAHFAKVLERTEGVGARAAEYAASPGAGAAGGIGFGAMLLGARFRPGIEVMLDVLGFAPALERADLVITGEGSLDEQTLHGKAPAGVAAAARAAGKEVVAVCGRLALPAEVLGRAGIRRAYPLTDVEPDVAKCIADAGPILERVAESIARDFLA

SEQ ID NO: 134440 - DNA, 1176 bp, Xanthomonas campestris pv. campestris str. ATCC 33913
  CDS (1)..(1176): transl_table=11
atgaaaatcgtcatcgcgcccgattcgtacaaggaaagcctgtccgcgctggaggtggccacccagatcgaggccggcttccgcgaggtgttccccgactggagctacaccaaggtgccggtggccgacggcggcgagggcacggtggcggcgctggtcgccgcgaccggcgggcgggtgatcgactgcaccgtcagcggcccgctgggcacgccggtgcaggcgttcttcgggttgaccggcgatggccgcaccgcggtgatcgagatggccgctgccagcggcctggcgctggtgcccccggcgcagcgcgcgccgctgcaggccagcacggccggggtgggcgagctgatcctggccgcgctggatgccggcgcgcggcgcttcatcatcgggattggcggcagcgccaccaacgacggcggcgccggcatggcccaagccctgggcgcgcgcctgctggatgcgcgtaatgagccgatcggcgcgggcggcggtgcgctggcggcgctggcccgcatcgagaccgatggcctggacgtgcggctgcaggaatgccacatcgaagtggcctgcgacgtggacaacccgctgatcggcccgaccggcgcctcggcggtgttcggcccgcaaaagggcgcaacgccggccatggtgcggcaactcgatgccaacctgcagcactacgccaacctgctcgagcgcgacctcggcctgcgcctgcacggcttgcccggtggcggcgcggccggcgggctgggcgctgcgctggtggcgtttctgggcgcgcagctgcggcccggcgtggagatcgtggcgcaggcgctgggcctggacgccaccattgcgcaggcggatctggtcctcaccggcgaaggccgcatcgacagccagagcctgcatggcaagaccccggtcggggtggcgcgggtggcgcagcaccacggcaagccggtgattgccattgccgggtgcctgggcaacggcgccggcctgctgcatgcgcacggcatcgcagcgatgtttgcggtggtgcaccgcgcctgcacggtggagcaggccctggccgaggcggccagcaatgtgcgcatcgccgcgcggaacgtggccgccgcgttgcaggtgggcatggcgctggcgcaaccggggttgccggtcccggcgcgcgcgtcttga

SEQ ID NO: 134441 - protein, 391 aa, Xanthomonas campestris pv. campestris str. ATCC 33913
MKIVIAPDSYKESLSALEVATQIEAGFREVFPDWSYTKVPVADGGEGTVAALVAATGGRVIDCTVSGPLGTPVQAFFGLTGDGRTAVIEMAAASGLALVPPAQRAPLQASTAGVGELILAALDAGARRFIIGIGGSATNDGGAGMAQALGARLLDARNEPIGAGGGALAALARIETDGLDVRLQECHIEVACDVDNPLIGPTGASAVFGPQKGATPAMVRQLDANLQHYANLLERDLGLRLHGLPGGGAAGGLGAALVAFLGAQLRPGVEIVAQALGLDATIAQADLVLTGEGRIDSQSLHGKTPVGVARVAQHHGKPVIAIAGCLGNGAGLLHAHGIAAMFAVVHRACTVEQALAEAASNVRIAARNVAAALQVGMALAQPGLPVPARAS

SEQ ID NO: 134442 - DNA, 1170 bp, Xanthomonas axonopodis pv. citri str. 306
  CDS (1)..(1170): transl_table=11
atgaagatcgtcattgcccccgattcgtacaaggaaagcctgtccgcgctggacgtggcgacgcagatcgaggcgggctttcgcgaggtattccccgactggcagtaccgcaaggtgccagttgccgatggcggcgaaggcaccgtcgacgcgctggtggccgcgaccggcgggcgggtgatcgcctgcaccgtgagcggcccgctcggcgccccggtgcaggcgttcttcggcctgaccggcgacggccgcaccgcggtgatcgaaatggccgccgccagcgggctggcgctgctgccgccggccgagcgcgcgccgctgcgcaccagcaccgcaggcgtgggtgagctgatcctggccgccttggacgccggcgcacggcgtttcatcatcggcatcggcggcagcgccaccaacgacggcggcagcggcctggcgcaggccttgggcgtgcggttgctggatggccagggcgaggcgatcgggccgggcggcggcgcgctggccgcgctggcgcgcatcgacaccgacggcatggatgtgcggctgcaggattgccagttcgaagtggcctgcgacgtggacaacccactgatcgggccgaccggcgcctcggcggtgttcggtccgcagaagggcgccacccccagcatggtgcgccagctcgatcgcaacctgcagcattacgccgacctgctgcagcgcgacctgggcgtgcggttgcacgcgctgcccggcggcggcgcggccggcggcctgggcgcggccttggtggcgtatctgggcgcgcagctgcggcccggcgtggagatcgtcgccaaggcgctcgggctggacgcgctggtcgcgcaggccgatctggtcatcaccggcgaaggccgtctcgatagccagagcctgcacggcaagaccccgatcggcgtggcgcgggtggcgcaacggcatgccaaaccggtgatcgccatcgccggttgcctgggcaatggtgccgcgctgctgcacggccacggcatcgatgccatgttcgcggtggtgcatcgcgcctgcacggtggaacaggccttggccgacgccgccagcaacgtgcgcatcgccgcgcgcaacgtggcggcgacgctgcagctgggcggcgcattggcacaggtccggtcggagggcgagcggggctga

SEQ ID NO: 134443 - protein, 389 aa, Xanthomonas axonopodis pv. citri str. 306
MKIVIAPDSYKESLSALDVATQIEAGFREVFPDWQYRKVPVADGGEGTVDALVAATGGRVIACTVSGPLGAPVQAFFGLTGDGRTAVIEMAAASGLALLPPAERAPLRTSTAGVGELILAALDAGARRFIIGIGGSATNDGGSGLAQALGVRLLDGQGEAIGPGGGALAALARIDTDGMDVRLQDCQFEVACDVDNPLIGPTGASAVFGPQKGATPSMVRQLDRNLQHYADLLQRDLGVRLHALPGGGAAGGLGAALVAYLGAQLRPGVEIVAKALGLDALVAQADLVITGEGRLDSQSLHGKTPIGVARVAQRHAKPVIAIAGCLGNGAALLHGHGIDAMFAVVHRACTVEQALADAASNVRIAARNVAATLQLGGALAQVRSEGERG

SEQ ID NO: 134444 - DNA, 1143 bp, Staphylococcus aureus subsp. aureus MW2
  CDS (1)..(1143): transl_table=11
atgcaattacaaaaaattgtcatcgctcctgactcatttaaggaaagtatgaccgcacagcaagttggcaatattataaaacaggcatttactaatgtttatgggaatacccttcattatgatatcattccgatggctgatggtggtgaaggtaccacagatgctttaatgcatgcaacaggtgccactaagtatacagtcatcgttaatgaccctttaatgcgacctattgaagcatgttatgcacgcgcagacgaacaacaaattgcaattattgaaatggcggcagcgtcaggtttggatttattagaaaaagaggaacgtaatcctttatacacatcatcatatggtaccggtgaactaattaaagatgcattaaatcatggtgctaagaccattattttagggattggtggcagtgcaacaaatgatggtggtacaggtatgctaagtgcactgggcgttcagtttactgatgtaaacggggacttattacaaatgaatggtgctaatcttgctcacattgcacaaatcgatataaccaatctagattcgcgattaaaagaggtgacctttaaagtggcctgtgatgtttcaaatcctttattgggtgaaaatggtgctacctatatttatggtcctcaaaaaggcgctgatgcaaagatgataccaaagttggatttcgcaatgtcgcattatcatgataagataaaaatgtgcacaggaaagtccgttaatcaaataccaggttctggtgcagctggcggtatgggcgcagcattattagcgttttgtgagacaactttaacaaaaggtattgatgtcgtctttgacattacagattttcatcaaagaattaaagatgcagacctcgttattactggagaaggacgcatggattatcagaccatctttggtaaaacacccgtaggcgttgcgttagctgcaaaacaatatcatattcctgtcatcgcgatttgtggcagtctaggcgaaaattatcaacatgtttacgatttcggtattgatagtgcctattctataatctcttcacctagcactttagaagatgtcctacaaaatagcgaacaaaatttattaaacactgcaactgacattgctcgtattctgaaattgcaataa

SEQ ID NO: 134445 - protein, 380 aa, Staphylococcus aureus subsp. aureus MW2
MQLQKIVIAPDSFKESMTAQQVGNIIKQAFTNVYGNTLHYDIIPMADGGEGTTDALMHATGATKYTVIVNDPLMRPIEACYARADEQQIAIIEMAAASGLDLLEKEERNPLYTSSYGTGELIKDALNHGAKTIILGIGGSATNDGGTGMLSALGVQFTDVNGDLLQMNGANLAHIAQIDITNLDSRLKEVTFKVACDVSNPLLGENGATYIYGPQKGADAKMIPKLDFAMSHYHDKIKMCTGKSVNQIPGSGAAGGMGAALLAFCETTLTKGIDVVFDITDFHQRIKDADLVITGEGRMDYQTIFGKTPVGVALAAKQYHIPVIAICGSLGENYQHVYDFGIDSAYSIISSPSTLEDVLQNSEQNLLNTATDIARILKLQ

SEQ ID NO: 134446 - DNA, 1137 bp, Yersinia pestis KIM
  CDS (1)..(1137): transl_table=11
atgaaaattattattgctcccgattcattcaaagaaagcctcaccgccatgcaggttgccgaggccattgagcaaggcttcagcgagattttcccgcaggcagaatatataaagctgccaatggccgacggcggcgaaggtaccgttgaatcaatggttgcagccactagcggagagttagttaacgtagaggttaccggcccattaggtgctccggttaaggccttttacggttggatgggcgatggcgaaacggcggtgattgaaatggcggcggcatctggcctgcatttagtggcaccagagcagcgcaatccactgattaccaccagctacggtactggcgaactgattttggcggcactgaatcacggggcgcgcaaaattattctcggcatcggaggcagtgccaccaatgacggcggcgcaggtatgatgcaagcattgggcgtacagcttcgtgatcaacaaggtaaagcgctcacggttggcggggcggcattagcgcaattggtcgatattgatctcagccagttggatgatcgcctggcacaaaccgatattctggtcgcctgcgatgtagataacccattgtgtggtgcgaaaggcgcatcggcagtgttcggtccacagaaaggggcgacgccagaacgtgtgcaacaattggacgcggcgttgcagcactatggtgaaaaaatcgagcaagttactgggaaatccgtcattaacgtggccggtgctggtgctgctggcggtatgggcgcggcgctgttcggtttactgaatgcacggttacaaccggggattgagatagtcaccgaagcgctaaaattagcggctaccgtgcaaaatgctgatttagtcattaccggcgaagggcgtatcgatagccaaaccatttacggcaaaacaccggtcggggtggcgcgagtcgcgaagcgttttgatattcctgtcattgctatcgctggcagcatggcaccggactatgaggtggtacatcaacatgggttagatgcggtattttcagttctcaaccatattcaaacgctaccagaagcactggaagaggcgagtgataatattcgtatcacggcgcgtaacgttgctgctgtctggaaaatgggcagaagttaa

SEQ ID NO: 134447 - protein, 378 aa, Yersinia pestis KIM
MKIIIAPDSFKESLTAMQVAEAIEQGFSEIFPQAEYIKLPMADGGEGTVESMVAATSGELVNVEVTGPLGAPVKAFYGWMGDGETAVIEMAAASGLHLVAPEQRNPLITTSYGTGELILAALNHGARKIILGIGGSATNDGGAGMMQALGVQLRDQQGKALTVGGAALAQLVDIDLSQLDDRLAQTDILVACDVDNPLCGAKGASAVFGPQKGATPERVQQLDAALQHYGEKIEQVTGKSVINVAGAGAAGGMGAALFGLLNARLQPGIEIVTEALKLAATVQNADLVITGEGRIDSQTIYGKTPVGVARVAKRFDIPVIAIAGSMAPDYEVVHQHGLDAVFSVLNHIQTLPEALEEASDNIRITARNVAAVWKMGRS

SEQ ID NO: 134448 - DNA, 1179 bp, Oceanobacillus iheyensis HTE831
  CDS (1)..(1179): transl_table=11
atgaaaattgtaatcataccatccggatttaaagagtgcctgaacgcagaagaagttgcgagctctatggatacgggcatccgtcgatttgatcgaaatgtagaaacagttgtcattccaatgattgatggtggggaaggttttgcagaaaccattatcaatattaaaaaaggaaaacttatttacaagaaagtcactggtccggtaggcgaacagataatgagccattttggagtatataaagagaaagggataaaaactgctgtaatagaaatggcagctgttgcagggttaaaattagttcctcgttccatgcgtaatcctttggaaacgactacatttggtgtgggcgaactaatcacggccgctttagacgaaaatgtcgatcatattattatcgggtgtggtgattcgggaacttctgatgggggagctggaatggctcaagcgttaggtgttcaatttctcaatcaacatcatcagttattggatatccgtggaggtggcgacttaagtcaagtcgaacatattgacctctctcatttggaccaaagagtagctaaagtgaatattgatgttgcttgtaattggcataatattctttgtggtgaaaaaggagtggcccgtgtatttgctccacaaaaaggcgctacgcctgaagaagtagaaattttaagtgatggtttagaacactatgcgtctttgatccaggaagcaatgggtgttgatgttagagtcataccgggaagtggagcttcaggtggtctaggagcgggattgcttgccttcacaaatgctgtgctacatcctcgctatgatattatcatgcaatatattcagcttgaagatcatattcagggtgctgatttggttttaactgcggaaggatgtttagatggccaaacgccaaatggaaaaataccatcagaagtttcgaggatagccaaattagcaggggtcccggtgattgctattaccggtaccattggcgaaggagcaagtattaattacacaagtgggattgatgcgtatataagtattatccaaaaaccgacttcattagaaagtgctatggaagaagcagctatttggattgcggatagtgcagaggcagcgataagacaaatacaaataggatacaacattgcacaacgcaaatataaacgggatgtaatatga

SEQ ID NO: 134449 - protein, 392 aa, Oceanobacillus iheyensis HTE831
MKIVIIPSGFKECLNAEEVASSMDTGIRRFDRNVETVVIPMIDGGEGFAETIINIKKGKLIYKKVTGPVGEQIMSHFGVYKEKGIKTAVIEMAAVAGLKLVPRSMRNPLETTTFGVGELITAALDENVDHIIIGCGDSGTSDGGAGMAQALGVQFLNQHHQLLDIRGGGDLSQVEHIDLSHLDQRVAKVNIDVACNWHNILCGEKGVARVFAPQKGATPEEVEILSDGLEHYASLIQEAMGVDVRVIPGSGASGGLGAGLLAFTNAVLHPRYDIIMQYIQLEDHIQGADLVLTAEGCLDGQTPNGKIPSEVSRIAKLAGVPVIAITGTIGEGASINYTSGIDAYISIIQKPTSLESAMEEAAIWIADSAEAAIRQIQIGYNIAQRKYKRDVI

SEQ ID NO: 134450 - DNA, 1134 bp, Oceanobacillus iheyensis HTE831
  CDS (1)..(1134): transl_table=11
ttgaagaaaatcgttatcgcaccggattcatttaaggagagtatgacagcgaaacaagcggcagttgcaattgctaaaggaatcaaaactgtatttcatcaacagttagatctcgaactaataccaatggcagacggcggtgaaggaacaactcaatcccttgccgatgcacttagtggaaccatacattcaaaaatagttaacggacctttaggagatccggttacggcttcttacgcaatttccggtgacacaaagacagcaattattgaaatggcagaggcgtcgggacttgcccttgtccctaatgaaaaacgaaatcctttaaaaacatcaacttatggtacaggacaattgatacaagccgcacttgaccataatgtagaaaaaatcattcttggcattggcggaagtgctaccaatgatggcggcgcaggtgtagtggaagcattaggtggcagattgttagactcagaagggaactctctaccttcaaacggtggaagtctaatccaccttaatgatatcgatgtaagtaatttagataaaagattacaaggtgtagaaataatcgttgcttgtgatgttgacaacccattattaggagagcatggtgcaagtgcaatttatgggccgcaaaaaggtgcagataaaaaaatggtagctgaccttgattcagctctgagtaattaccatgacgtagtagaacgagtaacaaagaaatcagtgaaagatatcccgggagctggcgcagctggaggacttggcgctggattactagcagtacttcaggcaaagctcgaacctggtgtagaaatcgtcttgaaagaaaccaattttcatgaacgagtagctgatgctgatcttgtcatcactggtgaaggaaaaatcgatgggcaaaccatctatgggaaaacccctattggcgttgccaaggctgcgaaaaagttcggtgttccagttatagctctaagtggaacgttaggtgcggattatgaaatagtctatgaccacggtatcgacgctgcatttagtattgttcaaggtccttgtgatttagaagatgccttagagaatggaccagactatttggaaaaattggcaggtagtgttagtcgagtattaaaaatatga

SEQ ID NO: 134451 - protein, 377 aa, Oceanobacillus iheyensis HTE831
MKKIVIAPDSFKESMTAKQAAVAIAKGIKTVFHQQLDLELIPMADGGEGTTQSLADALSGTIHSKIVNGPLGDPVTASYAISGDTKTAIIEMAEASGLALVPNEKRNPLKTSTYGTGQLIQAALDHNVEKIILGIGGSATNDGGAGVVEALGGRLLDSEGNSLPSNGGSLIHLNDIDVSNLDKRLQGVEIIVACDVDNPLLGEHGASAIYGPQKGADKKMVADLDSALSNYHDVVERVTKKSVKDIPGAGAAGGLGAGLLAVLQAKLEPGVEIVLKETNFHERVADADLVITGEGKIDGQTIYGKTPIGVAKAAKKFGVPVIALSGTLGADYEIVYDHGIDAAFSIVQGPCDLEDALENGPDYLEKLAGSVSRVLKI

SEQ ID NO: 134452 - DNA, 1221 bp, Bifidobacterium longum NCC2705
  CDS (1)..(1221): transl_table=11
ttggaaagcctgaattctgaacaaaaaaataatcacgcgaattacggaaaacgtttaccgtttcgtcgtgtcgtgcggtatgctcgaagcatgacgcgatacttatgcgcccctgactccttcaaagagagcctgaccgccatggaggcggcccgggcgatggctcaggggattgagaatgccgaccacgatgccgaggtccgttgccttcccatggccgacggcggtgaaggcaccgcacgcgcgcttgtcgacgccaccggcggatcgatgcgcgccgtgccggtccacgacccgctcggccggcctgtcgaaggccacttcggtctgctcgccgacggcacgaccgccgtggtcgagacagccgaagccagcggactggcactgcttgaagccaaagaacgcaacccgttgatcgcctcctcctacggcaccggcgaactcatgctcgccgccgtccgttccggagccaagcgcatcatcgtcgggctcggcggcagcgccaccaacgacgccggtgccggacttctgcaggccctcggcgttcgtcttctggacaagaacggtaacgacttggcacacgggggagcggccctcgccaatctgaccaccatcgatatcagcacgatggacccggctctcaagaacgtcgccatcaccgccgcctgcgacgtgaccaacccgctgaccggccccaccggcgccagcgccgtgttcggcccgcagaaaggtgcgtccaaagatgatgtcgccacattggacgccgccctcgcgcattttgcgcaggtaatcgacagccagctcggcgttgccgtgaacgacgtgccgggtgccggcgcggccggtggcatcggtgcagcgctgaagggcttcctaaacgccgaattccgcccgggcatcgccatcgtcatcgaacaatccggactcgatgcggccgcgcaatgggctgacgtggtgttcaccggcgaaggctccatcgacttccagaccaagttcggcaagacgccggccggcgtggccgaaaccgccaagcgccacggcaagccggtcatcgcagtagccgggcatattggcaccggcatcgatgagctgcatgaggtcggcatcgacgcggtattcggcatcgcgcccggagccgccagcctcagcgaactgctggccgacgcggccgccaacgtgacccgcaccaccgaacaaatcgtacgaaccctacaactgtga

SEQ ID NO: 134453 - protein, 406 aa, Bifidobacterium longum NCC2705
MESLNSEQKNNHANYGKRLPFRRVVRYARSMTRYLCAPDSFKESLTAMEAARAMAQGIENADHDAEVRCLPMADGGEGTARALVDATGGSMRAVPVHDPLGRPVEGHFGLLADGTTAVVETAEASGLALLEAKERNPLIASSYGTGELMLAAVRSGAKRIIVGLGGSATNDAGAGLLQALGVRLLDKNGNDLAHGGAALANLTTIDISTMDPALKNVAITAACDVTNPLTGPTGASAVFGPQKGASKDDVATLDAALAHFAQVIDSQLGVAVNDVPGAGAAGGIGAALKGFLNAEFRPGIAIVIEQSGLDAAAQWADVVFTGEGSIDFQTKFGKTPAGVAETAKRHGKPVIAVAGHIGTGIDELHEVGIDAVFGIAPGAASLSELLADAAANVTRTTEQIVRTLQL

SEQ ID NO: 134454 - DNA, 1227 bp, Shigella flexneri 2a str. 301
  CDS (1)..(1227): transl_table=11
atggcgtattgcaatccgggcctggaatccaggccgaataagagaaacgccctccggcgtcatgtggtaacaggcataggtatgaaaatcgtaatcgccccagactcttataaagaaagtttatctgccagcgaggttgcgcaggcgatagaaaaaggatttcgggaaatttttcctgatgcacagtacgtttctattccggttgccgacggtggcgaaggaacggtggaagcgatgattgcagccacccagggttctgaacgtcacgcctgggttacagggccgctgggcgagaaagtgaatgccagttgggggatctccggcgatggcaaaaccgcgtttattgaaatggcggcggccagtgggctggagctggtacctgcggaaaaacgcgatccactcgtgaccacttcacgcggcacaggcgagttaatcctgcaggcgctggagagcggcgcgacaaacattattatcggcattggcggtagcgctacaaatgatggcggcgcaggcatggtacaggcgctgggggcgaaattatgcgacgccaacggcaatgaaattggttttggcggcggtagtcttaatactctgaatgatattgatatttccggcctcgatccgcgcttaaaagattgcgtcattcgcgtcgcttgtgatgtcaccaatccgctggtgggcgataacggcgcatcgcgcatctttggcccacaaaagggagccagtgaagcgatgattgttgagctggacaataacctctctcactatgccgatgtcattaaaaaagcgctgcatgttgatgtaaaagatgtccccggcgcaggagctgcgggcggtatgggtgcggcgctgatggcgtttcttggtgcggaactgaaaagtggtattgaaatcgtcactacggcgctgaatctggaggaacatattcacgattgtacgctggtgatcaccggtgaagggcgtattgacagccagagtattcacggcaaggtaccgattggcgtcgcaaacgtggcgaagaagtaccataaaccggtgattggcattgcgggtagcctgaccgatgatgttggcgttgtacatcagcatggcattgatgcggtcttcagcgtattgaccagcataggtacgttggacgaagcattccgcggggcttatgacaatatctgccgtgcttcacgtaatattgccgcgacactggcgattggaatgcgcaacacggggtga

SEQ ID NO: 134455 - protein, 408 aa, Shigella flexneri 2a str. 301
MAYCNPGLESRPNKRNALRRHVVTGIGMKIVIAPDSYKESLSASEVAQAIEKGFREIFPDAQYVSIPVADGGEGTVEAMIAATQGSERHAWVTGPLGEKVNASWGISGDGKTAFIEMAAASGLELVPAEKRDPLVTTSRGTGELILQALESGATNIIIGIGGSATNDGGAGMVQALGAKLCDANGNEIGFGGGSLNTLNDIDISGLDPRLKDCVIRVACDVTNPLVGDNGASRIFGPQKGASEAMIVELDNNLSHYADVIKKALHVDVKDVPGAGAAGGMGAALMAFLGAELKSGIEIVTTALNLEEHIHDCTLVITGEGRIDSQSIHGKVPIGVANVAKKYHKPVIGIAGSLTDDVGVVHQHGIDAVFSVLTSIGTLDEAFRGAYDNICRASRNIAATLAIGMRNTG

SEQ ID NO: 134456 - DNA, 1113 bp, Streptococcus mutans UA159
  CDS (1)..(1113): transl_table=11
atgcatattcttattgcaccagattcttttaaagagtctttatcagctctggaagtagcacaggctcttcaaaagggattctctaaatccttgcctcaagcaacttttgatctattgcccgttggtgatggtggcgaaggaaccttagaagctttggctttgggtttacagctaacaaaagcaagtcatacggtttcaggaccttttggagatcctattgaggttcagtatgcctacaaggatgacttggcagtttttgaaattgcggccattacaggtttggaacacattcctaaagacaagagaaatcctttgataattagtaatcgtggtattggtgaattgcttgtctttctcgctcaaaaagggattagaagagttatggtcggtgttggcggcagttctagcaatgatggtggtctaagtctggcagccggattgggttatgctttttttgatgataggggagaaaaagttgaagccattggggccaatttgggtaaaattgttatcttttcggatcaggctgttcctgcttgtttgagagatttggatgtgacgattattacagatgtgacgaattgtctgtgtggtccgcaaggggcaacgtatacttttgctggtcaaaaaggattggcagaaacggaatttgcagcagttgatcaagcaatgcgtcgtttctatgagcttgtcaatccagctattttggaacttcaaggagcaggagcaggtggtggtttggcagctggtttggtcacctttgcagctggaaaaattgtctcaggcattgatgcggttttagatattttagattttgagcagcatgttcaaaaggcagatttggtaattgtcggtgaaggacgtatggataagcagagtttatcgggtaaggcgccagtcggtgtagctagacgcacgccgagtaaaacgccagtcatttctatttgtggtagtctcaaggatgatcttcctgattttccagttgcgcatattgcagcagcctttcctatcatttcaagggttgattccttggaaaatacgctggcgcaggctagccaaaatctggagagaacagcacaaaatattggtaatcttttaagcttagatttataa

SEQ ID NO: 134457 - protein, 370 aa, Streptococcus mutans UA159
MHILIAPDSFKESLSALEVAQALQKGFSKSLPQATFDLLPVGDGGEGTLEALALGLQLTKASHTVSGPFGDPIEVQYAYKDDLAVFEIAAITGLEHIPKDKRNPLIISNRGIGELLVFLAQKGIRRVMVGVGGSSSNDGGLSLAAGLGYAFFDDRGEKVEAIGANLGKIVIFSDQAVPACLRDLDVTIITDVTNCLCGPQGATYTFAGQKGLAETEFAAVDQAMRRFYELVNPAILELQGAGAGGGLAAGLVTFAAGKIVSGIDAVLDILDFEQHVQKADLVIVGEGRMDKQSLSGKAPVGVARRTPSKTPVISICGSLKDDLPDFPVAHIAAAFPIISRVDSLENTLAQASQNLERTAQNIGNLLSLDL

SEQ ID NO: 134458 - DNA, 1143 bp, Streptococcus agalactiae NEM316
  CDS (1)..(1143): transl_table=11
atgaaggtagtagtagctattgattctttgaaagggagtctttcttctttagaagctggcaatgctataaaggagtcaattaatgaagtaatctcaggggcggatgtggaagtacatccattagcagacgggggagaaggaactgttgaagctttgacgctaggtatggggggtacgatcgaaacaatccctgttaaggggcctcttggagaaaaagtacatgcgagttatggtattattccacagcgtcagttagctattattgaaatggctgcagctgctggtattaccctaattgctactgaagagagaaatcctctccacacaaccacttatggagttggagaaatgataaaggatgctataagtaaaggctgtaggcactttattattggtattggaggtagtgctactaatgatggtggggcaggtatgctacaagctttgggatatgcattattagataaagataatcaagaaatcagtttgggagcacaaggattggcagatttaaaatctatctctactgataaggttattgaggaattaaaagaatgtgattttaaaattgcatgtgatgtaacaaatcctttatgtggtgctcaaggttgtagttcgatttttggaccgcaaaaaggtgctgatgaagatatgattacaaaaatggatacttggttaagtaattatgctaccttagctacttcagttagtgaaaaagcagatgcaactattgaaggaacaggtgcagcgggtgggcttggatttgcctttttagcctttacaaatgctaccttagaacctggtattgatattattctatcagaaattaatatagaaaaagcgatttctgaagctgatttagtagttactggtgaaggtcgtttggatgggcaaacggtgatgggaaaagctccaattggcgtagcaaaattagctaaaaaatatggtaagaaagtagtggcattttctggatctgtcaccgaagatgctatactttgtaatcaacatggtattgatgctttttttccaatcgtacgacgccttatcagcttagatgaggctatgtctaaagaggtagcttataaaaatatgaaagaaactgctactcaagtctttagattaatcaatttgtataatcattaa

SEQ ID NO: 134459 - protein, 380 aa, Streptococcus agalactiae NEM316
MKVVVAIDSLKGSLSSLEAGNAIKESINEVISGADVEVHPLADGGEGTVEALTLGMGGTIETIPVKGPLGEKVHASYGIIPQRQLAIIEMAAAAGITLIATEERNPLHTTTYGVGEMIKDAISKGCRHFIIGIGGSATNDGGAGMLQALGYALLDKDNQEISLGAQGLADLKSISTDKVIEELKECDFKIACDVTNPLCGAQGCSSIFGPQKGADEDMITKMDTWLSNYATLATSVSEKADATIEGTGAAGGLGFAFLAFTNATLEPGIDIILSEINIEKAISEADLVVTGEGRLDGQTVMGKAPIGVAKLAKKYGKKVVAFSGSVTEDAILCNQHGIDAFFPIVRRLISLDEAMSKEVAYKNMKETATQVFRLINLYNH

SEQ ID NO: 134460 - DNA, 1221 bp, Corynebacterium efficiens YS-314
  CDS (1)..(1221): transl_table=11
atgactttctacctaccagaacgtattcttgtcgccccttccggcttcaaggaatccctgtctgccgtggaagtgtccgattccattgcggccggtgtgcgccgcgtcctgcccggcgtacgtgtggataccttccctgtcccagatggtggtgaaggcactctggaaatcctcagttcccgttcgggaaccctccttcataccgagcaggtgatgggtccggtcggaaaggaagtcactgcccggtggttggaatatgtcgatgagggcgtaggcgtcatcgagatggcccaggcggccggactcagcctggtgccacgtgatcagcgtgatcccactgccaccaccacctacggagtggggcaacttatcgcccgcatgcttgaccacggcatcaaccacatcatcatcggctgcggtgattccggaacctcggatggtggtgccggagcactcagcgcactcggtgccaaaatcctggatgattccggtgcccgggtatccccgggtggtagaggcttgagcgctgcggtgaaaattgacaccacaaagctccacccgaagctggctgatgtctccctcaccctggcctgcaatatccataatgttctcactgggaagaaaggtgtcgccgctgtattcggcccgcagaagggggccacaaagaaacaggtcaagcagctatccagagcgctggagcagtgggccaccctgctggaccacaccttctcctcggcggcagacctccaccgtggtcccggttccggtgcctccggggggctcggcgcaggtttgatggccctgggtgcagtagcccgggaccgtttcgatgtcctgctctcggaccttcccacccctaccaatcttgatgatctcatcagtgcttctgatctcatcatcaccgccgagggggccattgatttccaaacgccccggggcaaggtacccgccgaggtggcacggcgtgcacgtgtcaccggagttccagtcctggcgttggccggttcgctgggcaagggagcaccccaggtgcatgaggtgggtatcggtgccatccaatccatcatgactgttccaatggccatggaggatgcggtccgcgatggaagcgaactcctgaccgatgcggcagaacgcgcaatccgcctgctcatgctcggctgtgccgtctccggaaggcgcgaagatcatatccgtgcccacttccaggcagccacctga

SEQ ID NO: 134461 - protein, 406 aa, Corynebacterium efficiens YS-314
MTFYLPERILVAPSGFKESLSAVEVSDSIAAGVRRVLPGVRVDTFPVPDGGEGTLEILSSRSGTLLHTEQVMGPVGKEVTARWLEYVDEGVGVIEMAQAAGLSLVPRDQRDPTATTTYGVGQLIARMLDHGINHIIIGCGDSGTSDGGAGALSALGAKILDDSGARVSPGGRGLSAAVKIDTTKLHPKLADVSLTLACNIHNVLTGKKGVAAVFGPQKGATKKQVKQLSRALEQWATLLDHTFSSAADLHRGPGSGASGGLGAGLMALGAVARDRFDVLLSDLPTPTNLDDLISASDLIITAEGAIDFQTPRGKVPAEVARRARVTGVPVLALAGSLGKGAPQVHEVGIGAIQSIMTVPMAMEDAVRDGSELLTDAAERAIRLLMLGCAVSGRREDHIRAHFQAAT

SEQ ID NO: 134462 - DNA, 1140 bp, Pseudomonas putida KT2440
  CDS (1)..(1140): transl_table=11
atgaagatcgtcattgcccccgactcgttcaaggacagcctcgacgctgccggtgtcgcccgcgccatcgctgcgggcctgagcgaagcgtggccggaggctgaactggtcgagtgcccaatggccgacggtggcgaaggcaccatggaggtgatcctggccgccagccgcggtgaattgcgccgccagaccgtgcgcgggccactggggcagtacgtcgaggctggctggggctggttgccgcaaagtcgcaccgcaatcatcgaaatggcccaggccagtggcctgcaacaggtgccaacaggccaacgcgatgcttgccgcagcagcacctggggtaccggtgaactgattgccgcagctctcgacgccggcgcccggcgtgtggtgctggccatcggcggcagcgccaccaacgatgccggcagtggcatgttgcgagcacttggcctgcgcctgctggatgctgacgggcaagcgctggaagagggcggcctggccttggccaagctggcccatatcgacgccagcggcctcgacccgcgcctggccggggtgcagtttgaagtcgcggcggatgtcgacaacccattgtgtggcgccaacggcgcatcggcgatcttcggcccgcagaaaggtgccaacccgcagcaagtggaggcgctggaccacgcgctgaatcattttgccgaccattgtgcgctgctgttgggcgcggatgtgcgcgattaccctggttgtggtgcggccggtggcatgggcttcgctgcccgggcattcatggacgcgcagtttcgccctggggtggaagtcgtggctgagctggctggccttgacgccctggcacaaggggcagatctggtggtgacgggcgaggggcgtttcgatgcccagacactgcgcggcaagacgccgatgggggtggcgcgggttgccaagcgccatggcgtgccggtggtggtactggccgggaccttgggggaggggtatcagcagttgtatgcccatggggtcgacgctgtatttgcattggccaatggaccgatgagccttgagcaggcgtgtgcaaatgctgccgagctgttgcaggccagggcttgtgatatcggtcggctgtggcgctgcgcgaagcgaggctga

SEQ ID NO: 134463 - protein, 379 aa, Pseudomonas putida KT2440
MKIVIAPDSFKDSLDAAGVARAIAAGLSEAWPEAELVECPMADGGEGTMEVILAASRGELRRQTVRGPLGQYVEAGWGWLPQSRTAIIEMAQASGLQQVPTGQRDACRSSTWGTGELIAAALDAGARRVVLAIGGSATNDAGSGMLRALGLRLLDADGQALEEGGLALAKLAHIDASGLDPRLAGVQFEVAADVDNPLCGANGASAIFGPQKGANPQQVEALDHALNHFADHCALLLGADVRDYPGCGAAGGMGFAARAFMDAQFRPGVEVVAELAGLDALAQGADLVVTGEGRFDAQTLRGKTPMGVARVAKRHGVPVVVLAGTLGEGYQQLYAHGVDAVFALANGPMSLEQACANAAELLQARACDIGRLWRCAKRG

SEQ ID NO: 134464 - DNA, 1152 bp, Escherichia coli CFT073
  CDS (1)..(1152): transl_table=11
ttgataatgaagattgtcattgcgccagactcttttaaagagagtttaagtgcagaaaaatgttgtcaggcaattaaagccgggttttcgaccatatttcccgatgcgcactatatctgtttgccgatagcggatggcggcgaagggacggtggatgcgatggtcgccgcgacgggcggcaacatcgtgacgcttgaagtctgcgggccgatgggcgaaacagtgaatgctttttatggccttaccggcgacgggaaaacggcggtgattgagatggcggcggcaagcggcctgatgctggtcgcgcctgaaaagcgtaatccgttgctggcgtcaagttttggcaccggagagctgattcgtcatgcgctggataacggcattcgccatattattctcggcattggcggcagtgcgacggtcgacggcggtatgggcatggcgcaggcgctcggtgtgcgtttccttgatgctgacggtcaggtgctggcggctaacggcggcaatttagcgcgcgtggcaagcattgagatggatgaatgcgatccgcgtctggcgaactgccatattgaagtagcatgtgatgttgataacccgctggtaggggcacgcggcgcggcggcggtgtttggtccgcaaaaaggggcaacgccggaaatggtcgaagaactggaacaggggctgcaaaattacgcccgtgttttacaacagcaaactgaaattaatgtctgccagatggcgggcggcggcgctgcgggcggtatgggcattgcggcgacggtattcctcaatgcggatattaaaccgggtattgagattgtgttgaatgcggtcaatctggcgcaggcggtgcagggtgcagcactggtgatcaccggggaagggcgcatcgactcgcaaacggcaggcggtaaagcgccgctgggcgtggcgtcggtggcgaagcagtttaatgtcccggtgattgggattgctggcgtattgggtgatggcgtggaagtggtgcaccagtacggcattgatgcggtattcagcattttgccacgtctggcacctttagccgaagtgctcgccagcggtgaaaccaatctcttcaacagtgcgcgaaatattgcctgcgccattaaaataggtcagggaattaaaaactga

SEQ ID NO: 134465 - protein, 383 aa, Escherichia coli CFT073
MIMKIVIAPDSFKESLSAEKCCQAIKAGFSTIFPDAHYICLPIADGGEGTVDAMVAATGGNIVTLEVCGPMGETVNAFYGLTGDGKTAVIEMAAASGLMLVAPEKRNPLLASSFGTGELIRHALDNGIRHIILGIGGSATVDGGMGMAQALGVRFLDADGQVLAANGGNLARVASIEMDECDPRLANCHIEVACDVDNPLVGARGAAAVFGPQKGATPEMVEELEQGLQNYARVLQQQTEINVCQMAGGGAAGGMGIAATVFLNADIKPGIEIVLNAVNLAQAVQGAALVITGEGRIDSQTAGGKAPLGVASVAKQFNVPVIGIAGVLGDGVEVVHQYGIDAVFSILPRLAPLAEVLASGETNLFNSARNIACAIKIGQGIKN

SEQ ID NO: 134466 - DNA, 1152 bp, Staphylococcus epidermidis ATCC 12228
  CDS (1)..(1152): transl_table=11
atgtcaccatataaagttatcattgcacctgattcttttaaagaaagtatgtcggcgaaggaagctgctttagctattaaagatggattccaagaggtgttcgattccagtacaatatatgacattattcctatggctgatggtggcgagggaacaaccgaagtattgaaagaagccttaaatgctacctcttattgtgtagaagtaaaagatccacttaatagaaatatcatggctagttatgcgagaagcgacgaacaccaaacagctatcattgaaatggcagctgcttcaggactagcattattgagtaaagatgaaagagatccatctattacaacttcgtacggtaccggccaactcattaatgatgcacttaatcacgatgttaataaaattattttaggaataggtggaagtgccacgaatgatggtggtgtaggaatgttaaaggctttaggtgtctcttttaaagataaaaacaatcaagagattcgcgatggaggtttagccctatctcaaatagaatacattgatattactcgtataaacccacgattgaaagatgtgaatattaaagtagcctgtgatgtaactaatccattattaggagacaatggagcaacaatagtttatggtccacaaaaaggcgctcagcaaaagatgataccaaagttggattcagcattacgtcactatcatgataaaattgaaagagaattaaatatgaatgtaaaagatatcccgggcgctggtgctgcaggaggcatgggaactgcattaatcgcgtttctaaacgctaaattacgtcctggaattgatgtagttcttgaagagactcaatttaaacaaaggataaaagatgcgaatttagttgttactggcgaaggtaaaatggataaacaaacaatctatggcaaaacacccattggcgtagccaaagttgcaaaatcatatgatatacccgtcattgctatttgtggtagtttaggaaaagattacgaagcaatttatcaccacggtatcgatagcgtgtttagtatcatggaacgtccatgccaccttgacgaagctttgaaagaaggcgcacttcatgttaaacatacaacaataaatatcgcacgacttttacaagtaaaaattgaaaaatga

SEQ ID NO: 134467 - protein, 383 aa, Staphylococcus epidermidis ATCC 12228
MSPYKVIIAPDSFKESMSAKEAALAIKDGFQEVFDSSTIYDIIPMADGGEGTTEVLKEALNATSYCVEVKDPLNRNIMASYARSDEHQTAIIEMAAASGLALLSKDERDPSITTSYGTGQLINDALNHDVNKIILGIGGSATNDGGVGMLKALGVSFKDKNNQEIRDGGLALSQIEYIDITRINPRLKDVNIKVACDVTNPLLGDNGATIVYGPQKGAQQKMIPKLDSALRHYHDKIERELNMNVKDIPGAGAAGGMGTALIAFLNAKLRPGIDVVLEETQFKQRIKDANLVVTGEGKMDKQTIYGKTPIGVAKVAKSYDIPVIAICGSLGKDYEAIYHHGIDSVFSIMERPCHLDEALKEGALHVKHTTINIARLLQVKIEK

SEQ ID NO: 134468 - DNA, 1137 bp, Clostridium tetani E88
  CDS (1)..(1137): transl_table=11
atgaaatttgtattggctccagattcattcaaagaaagtatgactgcaaaagaagtagcaacctcaatggaaaatggattgaagaatatatttccaaaagctgactatataaaggtccctatggctgatggtggagaaggaactcttcaagctttaattgatgctactaatggtgaaatatttaaagtagaagttttgggaccattaggtgaaccaataactgctgaattcggaatattaggtaatggaactactgctgtaatagaaatggccagtgctagtgggctatatcatatagaaccagagaatagaaatcctttaataactacaactttcggtactggtgaacttataaaacatgctcttgataaaaatgttcatcaaatatttataggtataggtggtagtgccactaatgatggtggtgctggaatgattcaagctttaggtggtaaacttttaactaaatccggtgaagatattcccttcggtggtggtgctttaaataaacttcatagtattgatttgagcaatttagatcctagactttcagaggtatccattgatgttgcttgtgatgtaaataaccctttaacaggtaaaaatggagcttcttatatatttggtcctcaaaaaggtgctactcctgaaatagtagaacttttagatgaaaatctaaaacattatgctaaagtaataaaaaaatatttgcaaatggatatagaaagtattcctggtgctggagctgctggtggtcttggtgggggattaatggcattcttatctgctaatctaaaaaaaggagtagatcttgtaatagagtatactcatttagaagaaaaattaaaaaatgcagattttgtttttactggtgaaggtgctatagattatcagactaaatttggaaaaactccttatggtgtagcatctattgctaaaaaatatagcataccagtgatagttttatcaggtaaaattggggatggatgtgaggtcttatacgaaggtggaataacatctatctttggtatattacctggagcagtagacataaaagaagctttaaaaagtggtgctgttaatatagaaagaacttctgaaaatgtaggtagattaataaaatccattataaaatag

SEQ ID NO: 134469 - protein, 378 aa, Clostridium tetani E88
MKFVLAPDSFKESMTAKEVATSMENGLKNIFPKADYIKVPMADGGEGTLQALIDATNGEIFKVEVLGPLGEPITAEFGILGNGTTAVIEMASASGLYHIEPENRNPLITTTFGTGELIKHALDKNVHQIFIGIGGSATNDGGAGMIQALGGKLLTKSGEDIPFGGGALNKLHSIDLSNLDPRLSEVSIDVACDVNNPLTGKNGASYIFGPQKGATPEIVELLDENLKHYAKVIKKYLQMDIESIPGAGAAGGLGGGLMAFLSANLKKGVDLVIEYTHLEEKLKNADFVFTGEGAIDYQTKFGKTPYGVASIAKKYSIPVIVLSGKIGDGCEVLYEGGITSIFGILPGAVDIKEALKSGAVNIERTSENVGRLIKSIIK

SEQ ID NO: 134470 - DNA, 1113 bp, Lactobacillus plantarum WCFS1
  CDS (1)..(1113): transl_table=11
atgcacgctttgatcgcaattgattcatttaaaaattccatcacgagcattcaggccaaccgaatagtggctaaacgatttgcggctcacggaatcaccgctactcaagttgcgattgccgatggtggtgaaggaacggtggcggcgtggctggctaaccatgctggtggacaagctattacggcatcaacggtggatctggcgcaacggccagtgactgcaacgtatggctactttgccactgaaaaaatggcagtgattgaggttgcggctgcatccggaatccagtttgtcacgacgaccttgacgccgttagcaacgaatacctatgggaccgggctactgattaaagatgcgattgagcgtggcgcccgtcagattattctgggcttaggtggtagcggaacggtcgacggtggtgccggaatcctacgtgcgctcggttatcgtttttgggctgccgatggtcaagagttagccatgactggcgctgatttaagtcgggtcactaagattgacgatcgacatgtgttgccacaattagctgaagtctcgttcattagtgcagcggacgtgacgaatccgctaacgggaccgaacggcgcagctaagatttttggcccacaaaaaggattaccggttgctcaaattcaggttcacgatgccgctttagctcactatatgacggtcgcagctggtgcggtgagtgcccacgaaggcgatggggctgccggtggtattgggtttgcattacgttactttttacacgcccgcgtttgctctggttttcaattgttagctgaaatgagcaatcttaaaacgaaagtggcccaagcggatctagttatctctggtgaaggccaagtcgacgatcagagttttatgggcaaggtaccaattcagctcagtcagttagcccaagcggccggcaagccttgctatttattagttggtcggcaaaaaggtgcaaatgaaacatttgccaaacagggggtcacggctgttttaccgattgtcgatcaagtcatgaccttagatcaagccatggcgcagggaccagccaatctggaacggatggcggaccgcttagcccgaatcattagccagtcataa

SEQ ID NO: 134471 - protein, 370 aa, Lactobacillus plantarum WCFS1
MHALIAIDSFKNSITSIQANRIVAKRFAAHGITATQVAIADGGEGTVAAWLANHAGGQAITASTVDLAQRPVTATYGYFATEKMAVIEVAAASGIQFVTTTLTPLATNTYGTGLLIKDAIERGARQIILGLGGSGTVDGGAGILRALGYRFWAADGQELAMTGADLSRVTKIDDRHVLPQLAEVSFISAADVTNPLTGPNGAAKIFGPQKGLPVAQIQVHDAALAHYMTVAAGAVSAHEGDGAAGGIGFALRYFLHARVCSGFQLLAEMSNLKTKVAQADLVISGEGQVDDQSFMGKVPIQLSQLAQAAGKPCYLLVGRQKGANETFAKQGVTAVLPIVDQVMTLDQAMAQGPANLERMADRLARIISQS

SEQ ID NO: 134472 - DNA, 1140 bp, Pseudomonas syringae pv. tomato str. DC3000
  CDS (1)..(1140): transl_table=11
atgaaaatagtcatcgcccccgactcgttcaaagacagcctcagcgcccaagcggtggccgacgccatcgccagcggccttgccgaagtctggccgcacgcagaattgatcaaatgcccaatggctgacggcggggagggcaccatcgaggcattgctggcggcttgcaacggcgaactgatgagtgccagggtcaatggcccgctggggcagccggtcgaagcacagtggggatggctggcagaaagccggaccgcaatcattgaaatggccatggccagcggcttgcaattactcacccttgagcagcgcgatgcctgtgtcaccagcaccgcaggcaccgggcagttgattcttgtggcgctggacgccggagcccggcgcatcattctggcaatcggtggcagcgcaaccaatgacggcggcagcggcatgctcgcggcattgggcgcacgctttctcgatgccgaccaccagccgttgccgcccggcggcctggcgcttgcgaatctcgcccgcatcgacctgagcggtttcgatccacgtctgtccgggatgcgcgtcgaaattgccgccgatgtcgacaatccgctgtgcgggccgaacggcgcttcgcacatcttcggcccgcagaaaggggcatcgcccgagcaggttatcgcgctggacgcagcgcttggctgtttcgccgatcattcggcgcatatcctcggcctggaccagcgcaacagccccggcagcggtgcggcaggtggaatggggtttgccgctaaagcgtatctgaatgcctcgtttcgtcccggcgtcgaagtggttgccgacctgaccgggctggagcaggcgttgatcggtgccgatctggtgattaccggcgaaggtcgtttcgacgcgcaaaccctgcgtggcaagacgcctctgggtgtggcgcgggttgcgcagcgccagcgcgtgccggtgcttgtgctggccggtacgctgggcgagggttacgagcagctttaccagcacggcatcagcgcagcctttgcgctcaccagcgggccgatgagccttgagcaggcgtgccgcgatacccgtcgtttgctgcatgaccgcgcacgtgatgtggcgcgggtctggcaactggcggctcgtcactga

SEQ ID NO: 134473 - protein, 379 aa, Pseudomonas syringae pv. tomato str. DC3000
MKIVIAPDSFKDSLSAQAVADAIASGLAEVWPHAELIKCPMADGGEGTIEALLAACNGELMSARVNGPLGQPVEAQWGWLAESRTAIIEMAMASGLQLLTLEQRDACVTSTAGTGQLILVALDAGARRIILAIGGSATNDGGSGMLAALGARFLDADHQPLPPGGLALANLARIDLSGFDPRLSGMRVEIAADVDNPLCGPNGASHIFGPQKGASPEQVIALDAALGCFADHSAHILGLDQRNSPGSGAAGGMGFAAKAYLNASFRPGVEVVADLTGLEQALIGADLVITGEGRFDAQTLRGKTPLGVARVAQRQRVPVLVLAGTLGEGYEQLYQHGISAAFALTSGPMSLEQACRDTRRLLHDRARDVARVWQLAARH

SEQ ID NO: 134474 - DNA, 1137 bp, Vibrio parahaemolyticus RIMD 2210633
  CDS (1)..(1137): transl_table=11
atgaaagtggtaattgcacctgattcatttaaagaaagcttaaccgccaaacaagtgagcgaggcgatcaaaacgggtcttgctcgcgtatggcaggatgccgagtttgttacggttccggtcgcagacggtggcgaaggcacggttcaatctttgatagatgcaactcaaggcgaacaagtcttcacaacagtgaccgcgccattagggaatgatgtcgaagcgttttatggcatcctcggcgacggcgaaaccgcggttattgaaatggcggaggccagtgggctgcaccttgtgccgagtgacgctcgcgacccaaaactgaccagcagcattggtaccggacagctgatcaaacacgcgctagatcgcggtattcaacgcttaatcattggtttgggcggcagcgctaccaatgatggtggcgtgggcatgttgaccgcgttgggggtaacgtttcttgatgaatctggccatgcaattaccccaaatggaggcgggttagcggcgcttgcatccatcgatatttctggtcttgacccgcgcttagctgcttgcgaagtgttggtagcgtgcgatgttgataacccactctgtggcgacaaaggcgcgtcggctatctttggcccgcaaaagggagcgacagcgtcagacgtcactctgctcgataacgcattgcgcaagtttggagagttgacggaacaagcgacgggtaagcacgtactgactcgtgaaggggcgggtgctgctggtggtatgggcgcggccttgctcgggtacacgccagcacgtttgcaaccgggaattgagattgtgcttgaaacggtcaaacttgctcagcatgttgcggatgcggatatcgtattcacaggtgagggtcgcatcgatcatcaaaccgcacatggtaaaacgccgatgggcgttgctaaggtggccaagcagtttgatttaccagtcattgcattagcaggctgtgtgggcgacaactatcaggcggtttatgagtgcggtattgatgcggtgtttgcttgtgtaccaagggcgatgagcttatctgaggccatgaaagaggccgacgtcaacgttgccaatttagccgaaaacgtcgcgagaatgtggcaaattaagtcgcactga

SEQ ID NO: 134475 - protein, 378 aa, Vibrio parahaemolyticus RIMD 2210633
MKVVIAPDSFKESLTAKQVSEAIKTGLARVWQDAEFVTVPVADGGEGTVQSLIDATQGEQVFTTVTAPLGNDVEAFYGILGDGETAVIEMAEASGLHLVPSDARDPKLTSSIGTGQLIKHALDRGIQRLIIGLGGSATNDGGVGMLTALGVTFLDESGHAITPNGGGLAALASIDISGLDPRLAACEVLVACDVDNPLCGDKGASAIFGPQKGATASDVTLLDNALRKFGELTEQATGKHVLTREGAGAAGGMGAALLGYTPARLQPGIEIVLETVKLAQHVADADIVFTGEGRIDHQTAHGKTPMGVAKVAKQFDLPVIALAGCVGDNYQAVYECGIDAVFACVPRAMSLSEAMKEADVNVANLAENVARMWQIKSH

SEQ ID NO: 134476 - DNA, 1149 bp, Salmonella enterica subsp. enterica serovar Typhi Ty2
  CDS (1)..(1149): transl_table=11
atgaagattgtaattgcgccagattcatttaaagagagcttaagcgctgataaatgctgtcaggctattaaagcgggattttcaaccgtatttccggatgcgcgctatgtttgtttaccgatcgccgatggtggagaaggaaccgtggatgcgatggtggctgcgaccggcgggaaacgggtttctgtggacgttagcgggccgatgggggaaaaagtaaacggattttatggcctgaccggcgacggcaaaacggcgattattgaaatggcggcggcgagcggattgatgctggtggcgcccgaggcgcgtaatccgctgcgggcatccagtttcggcacaggcgaattgattcgtcacgccctggacgcgggaattcgccatattattctgggtatcggcggcagcgccacggtggatggcggaatgggagtagcgcaggcgctcggtgtgcgttttctggacgcgcagggaacgccgcttggcgccgaagggggcaatttatcgcgcctggcgagcattgacctgcaggggcgcgatccgcgaatttcagagtgtcgtattgaggtcgcctgtgatgttgataacccgttggtggggccacgcggcgcggcggcggtattcggtccgcagaaaggggcgacgcctgaaatggtcgagacgctggaaaatggattgcgtaattatgcccgtattttacatgccctgaccggacgcgacatgtctcaaataccgggcggtggagcggccggaggaatggggattgccgctatcgtcttcctggaagcggaaatgaagcccggtattgagattgttatgcaggcggtgaagctggaggaggcggtaaaagaggcctcgctggtgattaccggagaagggcgaatcgactcgcaaacggcgggaggaaaagcgccgataggcgtcgcatcagtggcgaaacggcatcatgtcccggttatcggcattgccggcgtattgggcgacggcgtggaagtggtccatcgtcacggtattgatgcagtattcagtattttgccgcggctggcgcctttgccggaggttctggcgaacggtgaacaaaatctctaccacagcgcctgtaatattgcccgcgtcatcaaacttggccaggacatcgggactcgttaa

SEQ ID NO: 134477 - protein, 382 aa, Salmonella enterica subsp. enterica serovar Typhi Ty2
MKIVIAPDSFKESLSADKCCQAIKAGFSTVFPDARYVCLPIADGGEGTVDAMVAATGGKRVSVDVSGPMGEKVNGFYGLTGDGKTAIIEMAAASGLMLVAPEARNPLRASSFGTGELIRHALDAGIRHIILGIGGSATVDGGMGVAQALGVRFLDAQGTPLGAEGGNLSRLASIDLQGRDPRISECRIEVACDVDNPLVGPRGAAAVFGPQKGATPEMVETLENGLRNYARILHALTGRDMSQIPGGGAAGGMGIAAIVFLEAEMKPGIEIVMQAVKLEEAVKEASLVITGEGRIDSQTAGGKAPIGVASVAKRHHVPVIGIAGVLGDGVEVVHRHGIDAVFSILPRLAPLPEVLANGEQNLYHSACNIARVIKLGQDIGTR

SEQ ID NO: 134478 - DNA, 1146 bp, Salmonella enterica subsp. enterica serovar Typhi Ty2
  CDS (1)..(1146): transl_table=11
atgaaaatcgtaattgcccccgactcctataaagaaagcctttctgccgccgaggtagcgcaggcgatagaaaaaggatttcgggaaattttccccgatgcgcaatatgtctctgttccggttgccgatggcggcgaaggaacggtcgaagccatgattgccgcgacgcagggcgttgaacgcgccgcatgggtgaccgggccgttgggtgaaaaagtgaaagcctgctggggaatgtccggggatggtaaaaccgcgtttattgaaatggcggcggccagcggactggcgctggttccgccagaaaaacgcaaccctttgattactacctcgcggggaacgggggagctgatattgcaggcgctggaaagcggcgcaagcaatatcattataggcattggcggcagcgcgacaaatgacggcggcgcagggatgatgcaggcgttaggcgcaaaactgcgcgatgcaaacggcgcggatattggttacggtggcggaagccttcattgtctaagcaacattgatatttcagagctcgatccccgtttaaaactctgcgctattcgtgtcgcttgcgatgtctccaatcctcttatcggcgacaatggcgcatcacgaatttttgggccgcagaaaggcgcgaccgaagagaacattgttgagctggacaggaatcttgctcattatgccgacatcataaaaaaatcgctgaatgtcgacgtaaaggcggcgcccggcgcaggcgcggcaggcggtatgggggcggcgttaatggcttttctcggtgcggaattacgcagcgggatcgaaattgtcacggcggcactgaacctggaggagcatatccacgactgtacgctggtggtgacgggagaagggcggattgatagccaaagcattcgcggtaaagtgccgattggcgtcgcgaatgtggcgaaaaaatatcataagccagtgattggcattgccggcagcctgacgcacgatgtaggaatagtacatcattatggcatcgacgctgtctttagcgtactcacgcgcatcgtgacgctggaggaggcttttcggggcgcttttgacaatatttatcgggcatccagaaatgttgctgccgctctggcgataggaatgcgcagcgcagggtga

SEQ ID NO: 134479 - protein, 381 aa, Salmonella enterica subsp. enterica serovar Typhi Ty2
MKIVIAPDSYKESLSAAEVAQAIEKGFREIFPDAQYVSVPVADGGEGTVEAMIAATQGVERAAWVTGPLGEKVKACWGMSGDGKTAFIEMAAASGLALVPPEKRNPLITTSRGTGELILQALESGASNIIIGIGGSATNDGGAGMMQALGAKLRDANGADIGYGGGSLHCLSNIDISELDPRLKLCAIRVACDVSNPLIGDNGASRIFGPQKGATEENIVELDRNLAHYADIIKKSLNVDVKAAPGAGAAGGMGAALMAFLGAELRSGIEIVTAALNLEEHIHDCTLVVTGEGRIDSQSIRGKVPIGVANVAKKYHKPVIGIAGSLTHDVGIVHHYGIDAVFSVLTRIVTLEEAFRGAFDNIYRASRNVAAALAIGMRSAG

SEQ ID NO: 134480 - DNA, 1134 bp, Bacteroides thetaiotaomicron VPI-5482
  CDS (1)..(1134): transl_table=11
atgaagaaagtagtagtagcgatggattttttcaaagggtgtctttcctcatcagaggtggaaaaggcggtggaagaaggcataaagctggtttgtccggattgtgaagtcattcgttttccgatagccgacggaggtgagggaatattgactgtcttggtagaagcaacacgaggcacttatcagaagatcatagcgaatgatcctttgatgcgcccgatagaaaccacttatggagtttcgggtgataaacgcgttgcttttattgagatggccaccgtgaatggtctgccgctattatcagaaactgaacgaaatccgatgctgaccactacttatggaaccggtgaattgatattgcacgctattgaacagggatatcgggaatttgtcattggtatcggaggaagtgctacgaatgatgccggagtaggtatgttacaagcattaggagcccgatttctcaataaggatggagcagtcttgggagaaggaggcgaaatcctgcatcgaattgccgctattgatttttcttccgttcaccctgcacttgaagatactcgtttcacgatagcctgtgatgtacgaaatcccttttgtggtccggaaggcgctgcgcatgtttttgcccggcagaagggggcggatgatgcaatgatagagaaattagatgcgggtatgcagtctttttcccgattgatccattcaactaccggaagagaaatcactcacgttcccggagcaggagctgccggaggcttgggaggtgcttttcttgcttttctgaatgctgaactaaagcccggcattgatttactgctccaaacattgaaatttagtgagaaaataaaaggtgctgatctgatcataaccggtgaggggagaacagaccgtcaatctttaatgggaaaagtaccttccggaatattagaagaggcgaaacgacaagggataccggtcattgttgtggcaggcagcatagaggatacggaaattctgaatcaggcaggttttcaaggtctcttttctatcattccttcgcccatgtctttagaaacagccatgaagccggaagtcgctaagaaaaatatttgccggactgttgctcaaattatctctttagtgaatttatag

SEQ ID NO: 134481 - protein, 377 aa, Bacteroides thetaiotaomicron VPI-5482
MKKVVVAMDFFKGCLSSSEVEKAVEEGIKLVCPDCEVIRFPIADGGEGILTVLVEATRGTYQKIIANDPLMRPIETTYGVSGDKRVAFIEMATVNGLPLLSETERNPMLTTTYGTGELILHAIEQGYREFVIGIGGSATNDAGVGMLQALGARFLNKDGAVLGEGGEILHRIAAIDFSSVHPALEDTRFTIACDVRNPFCGPEGAAHVFARQKGADDAMIEKLDAGMQSFSRLIHSTTGREITHVPGAGAAGGLGGAFLAFLNAELKPGIDLLLQTLKFSEKIKGADLIITGEGRTDRQSLMGKVPSGILEEAKRQGIPVIVVAGSIEDTEILNQAGFQGLFSIIPSPMSLETAMKPEVAKKNICRTVAQIISLVNL

SEQ ID NO: 134482 - DNA, 1149 bp, Enterococcus faecalis V583
  CDS (1)..(1149): transl_table=11
atgacgaaaaaatttgttttggctccagactcatttaaagaaagtatgagtgcaaaagaagcctgtctggcaatggaaaaagggattttagctgtatttaaagatgcagacattcaacatgtcccgatggcagacggcggggaaggaacggtggattccttagtggatgcaacaggaggtacaagagtaccagtgcgcgtggcaggaccgcttcctgatcaaatcgttgaaacctattacggcttattaggtgaccaagaaacggtggtcattgaaatggcgaaagccaacggaattgaattggttaaagcagcagaacgcaatcccttgatcacttctacttatggtacaggagagatgattcaacatgcgctcaatcatggggcaaaaaaaatcattatcggcattggtggtagcgtgacaaatgatgggggtgcaggtatgattcaggcacttggtgcgcgtttgttagacaaggaagggcaagaattgacacgtggcggtggtgcattagataaactggcgcagatcgatttaacacagtttgatcaacgcatttttgctaccgaagttctagtagcaagtgatgtgaataacccactaacagggccaacaggggcgtctcatgtctttggtccgcaaaaaggtgcgacagaagaaatggtggctcaattagataaaaacttagcccattatgcagcgatcatcaaaaaagagatcggcattgatgttgagatgatgccaggcgcaggagctgctggtggtttgggtgcagggttactagcattcacaaaagctcagttacgcccaggaattgatattgtcgtagaagtgaatcaattagaagaaaaaataaaagccgctgattatgtctttactggtgaaggcggtatggattttcaaacaaaattcggcaaagccccttatggcgtctcgcgtttggccaagaagtatcaaaaaccggttttcgcttgtgctggctatatcggcaaagatgtggatgtcctctatgaagaagggatgacggctatttttggaattttggccaaagccgaaccattggaagcagcattgaaaaatggaccagttaatttagaaagaaccgttgaaaatattgctcgtacattacagctggtgccttgtgactaa

SEQ ID NO: 134483 - protein, 382 aa, Enterococcus faecalis V583
MTKKFVLAPDSFKESMSAKEACLAMEKGILAVFKDADIQHVPMADGGEGTVDSLVDATGGTRVPVRVAGPLPDQIVETYYGLLGDQETVVIEMAKANGIELVKAAERNPLITSTYGTGEMIQHALNHGAKKIIIGIGGSVTNDGGAGMIQALGARLLDKEGQELTRGGGALDKLAQIDLTQFDQRIFATEVLVASDVNNPLTGPTGASHVFGPQKGATEEMVAQLDKNLAHYAAIIKKEIGIDVEMMPGAGAAGGLGAGLLAFTKAQLRPGIDIVVEVNQLEEKIKAADYVFTGEGGMDFQTKFGKAPYGVSRLAKKYQKPVFACAGYIGKDVDVLYEEGMTAIFGILAKAEPLEAALKNGPVNLERTVENIARTLQLVPCD

SEQ ID NO: 134484 - DNA, 1152 bp, Streptomyces avermitilis MA-4680
  CDS (1)..(1152): transl_table=11
gtggcggacgctggagtcaacgggacccgcagggtgctcatcgccgcggacaagttcaaggggtcgctgaccgccgtacaggtcgcggagcgtgtgacggccggcctgcgccgggtcgcgcccgccgtggaggtcgaggcgctgcctgtggccgacggcggcgacgggaccgtggacgcggcggtcgcggccggattcgagcggcgtgcggtgcgggtcgccgggccgctcggcgaagaggtcacggcggcgttcgcgctgcgcggcggcaccgcggtcgtggagatggcggaggcgagcgggctgcaacggctgcccaaaggtgtcttcgcgccgctcacggcgtcgacgtacgggtccggggaactgctgcgggccgcgctggacgccggggcgcggaccatcgtgttcggggtcggcggcagcgcgacgaccgacggcggggcgggcatgctggccgcgctcggtgcgcgcttcgtggacgcggagggcgagccggtggctcccgggggcggcggactgagcgagctcgccctggccgatctctcgggcctcgacccccgcctcgcggagatcgagctggtcctcgcgagcgacgtcgacaatccgctgaccgggccgaagggcgcacccgcggtgtacgggccgcagaagggcgccgcaccggacgacgtggccacgctggacgcggcgctggcgcacttcgcggcggtgctggagaaggcgatcgggccgaaggccgcggagtacgccgccgcgcccggtgcgggtgccgcgggcggcatcgggtacggggcgctggtgctcggcgccgggttccggcccggcatcgaggtgatgctggacgtgctcggcttcgcgccggcgctggaccgcgccacgctcgtgatcaccggcgaggggtcgctggacgagcagacgctgcacgggaaggcgccggcgggtgtggccgcggcagctcgggcggcgggcaaggaggtcgtcgcggtgtgcgggcggctcgccctgccgccgcaggagctggggcgggccggcatccggcgggcgtacccgctgacggagtccgagccggacatcgcgaagtgcatcgaggacgcggggccgatcctggagcgggtcgcggagaacatcgcccgggacttcctggtctga

SEQ ID NO: 134485 - protein, 383 aa, Streptomyces avermitilis MA-4680
MADAGVNGTRRVLIAADKFKGSLTAVQVAERVTAGLRRVAPAVEVEALPVADGGDGTVDAAVAAGFERRAVRVAGPLGEEVTAAFALRGGTAVVEMAEASGLQRLPKGVFAPLTASTYGSGELLRAALDAGARTIVFGVGGSATTDGGAGMLAALGARFVDAEGEPVAPGGGGLSELALADLSGLDPRLAEIELVLASDVDNPLTGPKGAPAVYGPQKGAAPDDVATLDAALAHFAAVLEKAIGPKAAEYAAAPGAGAAGGIGYGALVLGAGFRPGIEVMLDVLGFAPALDRATLVITGEGSLDEQTLHGKAPAGVAAAARAAGKEVVAVCGRLALPPQELGRAGIRRAYPLTESEPDIAKCIEDAGPILERVAENIARDFLV

SEQ ID NO: 134486 - DNA, 1146 bp, Bacillus cereus ATCC 14579
  CDS (1)..(1146): transl_table=11
gtgaaagttgttattgcatctgattcatataaagaaagcctaaaagctatagaagtatgtggagctattgaaagaggttttagagcaatttttcctaatgcagagtatgtgaaaataccaattggagatggaggagaagggacggttgaatcacttgttgatgctacaggggggagaattatatcaattagtgtgacaggaccgcttagagaaggtatacaagctttttatggcatttctaaagataaaaagacagcgtttattgaaatggcagcagcatcaggattacagcacgttccagttgaaaagcgcaacccacttattacaacgacaaaaggaacaggagaacttatattacatgcgctagatcaaggagtggagtacataattttaggacttggaggaagtgctacaaatgatggcggggcaggtatgttagaggctttaggagtaaggtttataaatggtaagggtgaagtaatagatccatctggaggcacattacactcgattgttactattgatttttcacgaatggacccacgcttaaagggggtaaagatagaagcggcatgtgatgtggataatccattagtcggaatgcagggagcatctttcgtatttgggagacaaaagggtgcaaatatagagatgatgaaagagctagatgagaatttacaacattatgcgaatatgcttaaacgatatgtatcttttgatgtatctgaaatacctggtgcaggggcagcgggaggaatgggagcggctgttatttcagtgttaaagggagacttgcgtaggggcattgaaattgtattagattatacaaatttcgataaacatatagaagatgcacatcttattataactggtgaaggtagaatagataaacaaactgcatatggaaaggctcctgtgggtgttgcggggcgtgcaaaacgtttttctgtgcctgtaattgctattggagggtctgtatcatctgattgttcagctgtgtacgagaaaggaatagatgcggtatttagtatcacaacgagaccgatgacactagaagaagcatataaagtagcagaagaaaatattgaaatgacaacgaagaatattgcaacagtatggaaaatagcatcagaaaaacacttctaa

SEQ ID NO: 134487 - protein, 381 aa, Bacillus cereus ATCC 14579
MKVVIASDSYKESLKAIEVCGAIERGFRAIFPNAEYVKIPIGDGGEGTVESLVDATGGRIISISVTGPLREGIQAFYGISKDKKTAFIEMAAASGLQHVPVEKRNPLITTTKGTGELILHALDQGVEYIILGLGGSATNDGGAGMLEALGVRFINGKGEVIDPSGGTLHSIVTIDFSRMDPRLKGVKIEAACDVDNPLVGMQGASFVFGRQKGANIEMMKELDENLQHYANMLKRYVSFDVSEIPGAGAAGGMGAAVISVLKGDLRRGIEIVLDYTNFDKHIEDAHLIITGEGRIDKQTAYGKAPVGVAGRAKRFSVPVIAIGGSVSSDCSAVYEKGIDAVFSITTRPMTLEEAYKVAEENIEMTTKNIATVWKIASEKHF

SEQ ID NO: 134488 - DNA, 1185 bp, Bacillus anthracis str. Ames
  CDS (1)..(1185): transl_table=11
atgcgtattttagttgtaccatcagggtttaaagaaagtttaggggcgaaggaagctgccgatgtaatgaaagaggggattttaaaagttatgccacttgctactgtagagactttaccgatggttgatggcggggaagggtttacagaggcaattataaatattactggtgggaaaatgtatgaagtacaagtaacgggacctgttggagatgagatacaatcttattttggtgtttttgaaacaagaaacggtgagcgtacagctgttattgaaatggctgcggcagctgggttacgccttgtaccgagagatttacgtgatccaaggaaaacgactactcacggtgttggacagttaatagaattagctttaaacaaaggagtagatcgtatattaataggatgtggtgattcaggtacgtctgatggaggtgctggtatggctgaagcgttaggtgtaaagtttttaaatgaagatgaaaaggaaatacaaattcaaggtggcacctctttattacaagtttcaaaaatagatacgtcacaagtagatcctagattaagacatgtccaaatcgatgttgcttgtaattggtttaatcaattatgcggtgagcatggagtagctagagtgtttggtccgcaaaagggtgctaacgaagcacaagtaatagaactagaaaaagcattggaacgctatgcttctattataaaaaaagatatagggatagatgtacatcatacaccaggaagtggtgcatctggcggtcttggtgctggactgcaagctttaattggggcaacgcttcatccgagatacgacattattatgaagtatatggatttaaataaattattgttaaagtgtgatcttgtatttaccgcggaaggaagtatagattttcaaacaccacgtgagaaaattccagctgaggtggctaaatgtgcaaaaagatatggattaccagtaatagcgttagtagggacagttggtaaaggggcacgtattaattacgattacggaattgatgcatatacaagcatattaccaatgccatcttcattagaaaatgcattttctaatgcggagaaatggcttcgtgattgtacagagagtacgatgcgtacagttttagttggctatcaaatcgcttctcgtttaaataaaagtgggtacgtatcatga

SEQ ID NO: 134489 - protein, 394 aa, Bacillus anthracis str. Ames
MRILVVPSGFKESLGAKEAADVMKEGILKVMPLATVETLPMVDGGEGFTEAIINITGGKMYEVQVTGPVGDEIQSYFGVFETRNGERTAVIEMAAAAGLRLVPRDLRDPRKTTTHGVGQLIELALNKGVDRILIGCGDSGTSDGGAGMAEALGVKFLNEDEKEIQIQGGTSLLQVSKIDTSQVDPRLRHVQIDVACNWFNQLCGEHGVARVFGPQKGANEAQVIELEKALERYASIIKKDIGIDVHHTPGSGASGGLGAGLQALIGATLHPRYDIIMKYMDLNKLLLKCDLVFTAEGSIDFQTPREKIPAEVAKCAKRYGLPVIALVGTVGKGARINYDYGIDAYTSILPMPSSLENAFSNAEKWLRDCTESTMRTVLVGYQIASRLNKSGYVS

SEQ ID NO: 134490 - DNA, 1146 bp, Bordetella bronchiseptica RB50
  CDS (1)..(1146): transl_table=11
gtgaagatcgtcatcgcgcccgattcattcaaggaaagcctgtcggcccccgacgccgccgccgccatcgcgcgcggcgtccggcaggcctgtcccggcgcccataccctgtgcatcccgatggccgacggcggcgaaggcacggtccaggccgtgctggccgccaccggcggccaatggcgcgaaacaaccgtgcgcggcgcgctgggcgaaccggtgcgggcccgctggggctggctgcccgatgacgccaccgcggtcatcgaaatggccgccgcggccggcctggaacttgccccgccggcgcagcgcgatcccttgcgcgcctgcagccatggcgtgggcgaactgatccgcgccgctttggatgccggcgcgcggcgcctcatcgtgggcttgggcgggtcggccaccaacgacggcggcgcgggcatgctgacagcgctgggcgtacggtggctggatgcggacggccgggcactggcgcccggcggcgcggcgctggccgatttgcggcaggtggacgccagcggcctggacgcgcgcctgcgcggcgtcgtggtcgagatcgcctccgacgtcgacaatccgctgtgcggcccgcacggcgcctcgcataccttcggtccgcagaagggcgccaccccggaacaggtacggcagctggacgccgccctggcgcacatggccgaaatcgtgacgcgggcggggcatcccgaccagcgcgcggcgccgggcgccggcgccgccggcggcctgggctatgccgcgctcgccttcctgtcggcgcgcttgcgcccgggggtggagatcgtcgccgaactgggccagctggcacaggcggtggccggcgccaccctggtgttcaccggcgaaggccgcatcgatgcgcagacgctgcgcggcaagaccccggccggcgtggcccgcatcgccagcgccgccggcgtgccggtggtggcgctggccggctcgctgggcgagggataccaggacctgcatgcgggcggcatcacggcggcattcagcctggcgcccggccccatcacgctgcagcaggcctgcgagcaggccgaaacactgctggccgagcgggcccgcgacatcatgcaactatgggtcgcggcaggacgccgcatgctctag

SEQ ID NO: 134491 - protein, 381 aa, Bordetella bronchiseptica RB50
MKIVIAPDSFKESLSAPDAAAAIARGVRQACPGAHTLCIPMADGGEGTVQAVLAATGGQWRETTVRGALGEPVRARWGWLPDDATAVIEMAAAAGLELAPPAQRDPLRACSHGVGELIRAALDAGARRLIVGLGGSATNDGGAGMLTALGVRWLDADGRALAPGGAALADLRQVDASGLDARLRGVVVEIASDVDNPLCGPHGASHTFGPQKGATPEQVRQLDAALAHMAEIVTRAGHPDQRAAPGAGAAGGLGYAALAFLSARLRPGVEIVAELGQLAQAVAGATLVFTGEGRIDAQTLRGKTPAGVARIASAAGVPVVALAGSLGEGYQDLHAGGITAAFSLAPGPITLQQACEQAETLLAERARDIMQLWVAAGRRML

SEQ ID NO: 134492 - DNA, 1161 bp, Porphyromonas gingivalis W83
  CDS (1)..(1161): transl_table=11
atgaagaagatcgtgatagccatagactccttcaagggttgtctctcctctgtcgaggcaggagaagcagctgctgagggcgtacgggcagcctgtccgattgcagaagtaatggtactgcccgtagctgatgggggagaggggatgcaggatgtactgatagctgccacagatgggcagcgcatagccgttcgtgcacactccccactaatggaaatgcgcgaggcttcttatggtatatccgctgacggacagacggctttcatcgaaatggcgagcatcagcggactgcctctcgtgccggaagaccggcgcaatcctatgcagactaccacgttcggaacgggagagctgatcaaagatgctctggatcgaggttgtcgtaagtttatcgtcgggatcggtggcagcgccaccaacgatgccggactggggatgctacaggcattgggctttcgcttctacgatcgggatgggagagatataggggagggcatggccctatgcggcggtttgctgtcggaggtctatcgcatcgatgactcttcggcacatccggctttggccgattcgctttttacggtggcctgcgatgtgcgcaatcctttttgcggccccgaaggtgccgcttttgcctttgctcctcagaagggagcggatgaggagatggtggcccgattggatgattcgatgcagcatttggctgccgttatacaccggcatacggggcaggatatagtccatatcccgggagctggagctgcaggcggtatgggaggagggctgttggctttcctcggagcggtgctgaagccgggcatcgagctactattggacgctttgcatttctccgaaaagatacgggaagccgatttgattctgaccggtgagggcaaagccgaccggcagaccctgatgggcaaagtgccggccggtgtgttggctgaggctatgaagcaggagatacccgtggtattgctggccggcagtatcgaggatgctgtagctcttaaccgcgccggtttcctcggcctctttccgattactccttctcccgtcagccttagagaggcgatgaatccggcttatgcacgggacaacctccggcgcacggccgagcaggtatgccgtctctatgctttcgcctccgcacggccttag

SEQ ID NO: 134493 - protein, 386 aa, Porphyromonas gingivalis W83
MKKIVIAIDSFKGCLSSVEAGEAAAEGVRAACPIAEVMVLPVADGGEGMQDVLIAATDGQRIAVRAHSPLMEMREASYGISADGQTAFIEMASISGLPLVPEDRRNPMQTTTFGTGELIKDALDRGCRKFIVGIGGSATNDAGLGMLQALGFRFYDRDGRDIGEGMALCGGLLSEVYRIDDSSAHPALADSLFTVACDVRNPFCGPEGAAFAFAPQKGADEEMVARLDDSMQHLAAVIHRHTGQDIVHIPGAGAAGGMGGGLLAFLGAVLKPGIELLLDALHFSEKIREADLILTGEGKADRQTLMGKVPAGVLAEAMKQEIPVVLLAGSIEDAVALNRAGFLGLFPITPSPVSLREAMNPAYARDNLRRTAEQVCRLYAFASARP

SEQ ID NO: 134494 - DNA, 1140 bp, Photorhabdus luminescens subsp. laumondii TTO1
  CDS (1)..(1140): transl_table=11
atgaaaattgttattgcgcctgattcatttaaagaaagtctcagcgccttacaggccgctgaagcgatagaacaaggatttcgtgaaatctatccacaagctgaatacattaaattgccgatggcagatggaggagaagggacagttgaatcgatggtagcagctactggaggaaagattgtacgtctgttggtcactggtccgttaaatcagccagtggatagtttttttggcgtgctaggtgatggagaaaccgctgttattgaaatggctgcggcttctggcttacatttggtgccgatggaaaagcgtaatccgttgataactacgacttatggtaccggtgagctgatgttggctgctttggatcaaggtgtcagaaagataattttaggcattggcggtagtgcgactaatgatggcggtgccggtatgatgcaggcgttgggagcctgtttgcttgattctgatggtaaagcgttggggcttggcggggctgcgctaagtcggcttgctaaaattgatctttccggtttggacgcgcgtttgaatcgaactgaaattatcgttgcctgtgatgtaattaacccgttatgtggtgagtttggtgcatctgccattttcgggccacagaaaggggcgacaccagagatggtgaaagaattagatgcagctctgcgccattatggtgaaaaaattgaattactgaccggcattaaggttattgacgtacccggtgcaggagccgctgggggaatgggtgttcctttacttggttggctggacgctaaattgcaaccgggaattgatattgttatctccacgctggaattggcaaaggtagtacaaggcgctgatctggttattacgggtgaaggccgaatagacagccagactatttacggtaaaacgccgattggtgttgctcgtatcgccaaaaagtatgctatttcaaccattgcattggttggcagtataagtcaggactatagcattgttcatgagcatggattggatgccgttttctcaattatgtccggcgtctgttctctttctgacgctcttgtttgcgggcatgagaatttgagggtaactgcccgcaatgtggctgcggtctggaaaatgggtcagctagaataa

SEQ ID NO: 134495 - protein, 379 aa, Photorhabdus luminescens subsp. laumondii TTO1
MKIVIAPDSFKESLSALQAAEAIEQGFREIYPQAEYIKLPMADGGEGTVESMVAATGGKIVRLLVTGPLNQPVDSFFGVLGDGETAVIEMAAASGLHLVPMEKRNPLITTTYGTGELMLAALDQGVRKIILGIGGSATNDGGAGMMQALGACLLDSDGKALGLGGAALSRLAKIDLSGLDARLNRTEIIVACDVINPLCGEFGASAIFGPQKGATPEMVKELDAALRHYGEKIELLTGIKVIDVPGAGAAGGMGVPLLGWLDAKLQPGIDIVISTLELAKVVQGADLVITGEGRIDSQTIYGKTPIGVARIAKKYAISTIALVGSISQDYSIVHEHGLDAVFSIMSGVCSLSDALVCGHENLRVTARNVAAVWKMGQLE

SEQ ID NO: 134496 - DNA, 1137 bp, Vibrio vulnificus YJ016
  CDS (1)..(1137): transl_table=11
atgaaaattataattgctccagattcctataaagaaagccttactgccatggatgtggccatcgcgattgaaaaaggatttaagcaagtcttacctgatgcacactacgtgaagctccctatggcagatggtggagaaggcacagtgcaatcgatggttgacgccactggtggcaccatcatcgaacataccgttacgggcccacttggccagcgtgtcgatggcttttttggcttgctcggcgaaggcaaaaccgcagtcatcgagatggcggcggcttctggcttgcaccttgtgacaccagatcagcgcaacccactcatcaccacaacgtttggtacgggcgagttgatcaaagccgccctcgaccacggtgtggaacacattattgttggcatcggtggcagtgcgaccaacgatggtggcattggtatggcgcaggctctcggcatcaaactacttgatgcacaagggaacgcgcttggttatggtggcggtgagctagcgaaattggcaacgattgactgctctcaactcgatcctcgtttggctcaagttcgtcttgaagtggcgtgtgatgttgataacccactatgtggtacaaaaggcgcttccgctgtctttgggccacaaaaaggggcaacgccagagatggtcacaattttggacaaaaacttagcgcactatgccacgatcattaaacagcaacttgacgtggatgttcgtgatatggccggtgcaggcgctgcgggcggcatgggtgcggcgctgctaggcttgctcaatgccgagcttcgtcctggtattgagattgtcatggacgcggttcacttagatgaaatcgttgcggatgcggatctggtgatcaccggagaaggtcgtatcgacagccaaaccattcatggcaaaaccccgatcggtgtcgcacgcacagcgaaaaagcacggcttgccggtgattggcatcgcgggttgtctgtcggccgattgcggagtggtccatgaacatggcctcgatgccgtctttgccgtggtcaatcgttccgttgatctgccaaccgcgttagcagaagcggcagagaacgtggagctaacagcaagaaacgttgccgctgctttttgtatgactcgccgttaa

SEQ ID NO: 134497 - protein, 378 aa, Vibrio vulnificus YJ016
MKIIIAPDSYKESLTAMDVAIAIEKGFKQVLPDAHYVKLPMADGGEGTVQSMVDATGGTIIEHTVTGPLGQRVDGFFGLLGEGKTAVIEMAAASGLHLVTPDQRNPLITTTFGTGELIKAALDHGVEHIIVGIGGSATNDGGIGMAQALGIKLLDAQGNALGYGGGELAKLATIDCSQLDPRLAQVRLEVACDVDNPLCGTKGASAVFGPQKGATPEMVTILDKNLAHYATIIKQQLDVDVRDMAGAGAAGGMGAALLGLLNAELRPGIEIVMDAVHLDEIVADADLVITGEGRIDSQTIHGKTPIGVARTAKKHGLPVIGIAGCLSADCGVVHEHGLDAVFAVVNRSVDLPTALAEAAENVELTARNVAAAFCMTRR

SEQ ID NO: 134498 - DNA, 1215 bp, Vibrio vulnificus YJ016
  CDS (1)..(1215): transl_table=11
ttggtgtcatcatctcggcctttttgttcttactactttagagcggtgtatttgatgaaaatagtaattgctcctgactcatttaaagaatcactcaccgccaagcaggtttgtgaatgcgttgagcaaggttttgctcaagtatatccgcaagctcaatacatacactttcccctcgccgatggtggcgagggaacggttgaagtactgatacaggggctagagggtgaggtgcagcattcgctcgtggctggaccgctagaacggggtattgtcgattcaaaggagagggctaaatgggcgttacttgataatggcaataccgcattgattgaaatagcggcagcgtcaggcttggatttacttgcggcttcggaacgtaaccctgcagtcactactacatatggtactggcgagctgataagtaaagcactagatctgggagtgaacaaaattatgctcggcctaggtggaagtgcgactaacgatggtggtgctggaatcgtacaagctttgggggggaaattgctagacagagagggtaatgaactgccaaaaggtggtattgctcttgctgatcttgatcgtatcgatttgtcacatgctcaccctcgttgtcatcaagtagagtttatcgtggcatgtgatgttaccaacccaattattggtgtgaatggtgcgagcgaggtttttggcccccagaaaggggcatctccaagattggttgctgaattggaccgttctttagatcgttttgccaaggctgtattttcaataactggagtcgatcatcgcttaagtgctggttttggtgctgcgggcggcacgcctttggaactatcgttgctatttgatattcaaattacgcccggaatcgagatggtattagatgcgctggatgcggataaagtccttgagcatgcggatttggtgatcaccggagaaggccaaatggacaatcaaaccttgcaaggtaaaactccatttggtatcgcaaatcgagccaaaaaaaaatcaattccagtgataggcattgctggatctttgggctcagatatcgaaggcttgtacagcaaaatcgattgtgcttttgatactgttagctctcctcaaagcctagaccaagcgctcaaacaggcgagtaaaaacgtagctcaaactgctagaaatatcgctgcgactctcaagttgggtgcggccttaaataacaagtag

SEQ ID NO: 134499 - protein, 404 aa, Vibrio vulnificus YJ016
MVSSSRPFCSYYFRAVYLMKIVIAPDSFKESLTAKQVCECVEQGFAQVYPQAQYIHFPLADGGEGTVEVLIQGLEGEVQHSLVAGPLERGIVDSKERAKWALLDNGNTALIEIAAASGLDLLAASERNPAVTTTYGTGELISKALDLGVNKIMLGLGGSATNDGGAGIVQALGGKLLDREGNELPKGGIALADLDRIDLSHAHPRCHQVEFIVACDVTNPIIGVNGASEVFGPQKGASPRLVAELDRSLDRFAKAVFSITGVDHRLSAGFGAAGGTPLELSLLFDIQITPGIEMVLDALDADKVLEHADLVITGEGQMDNQTLQGKTPFGIANRAKKKSIPVIGIAGSLGSDIEGLYSKIDCAFDTVSSPQSLDQALKQASKNVAQTARNIAATLKLGAALNNK

SEQ ID NO: 134500 - DNA, 1131 bp, Lactobacillus johnsonii NCC 533
  CDS (1)..(1131): transl_table=11
atgacaaaatatgtagtagcccctgattcatttaaggaaagtatgacagcaaaagaagtctgtgatgcgatggaaaagggaataaaaaaagctgattcagctgctgaagtgattaaagtacctatggcagatggtggagaaggaacagttaattctttagtagatgcgacacatggtcaaagagttatagttgaagttacaggtccgcttggaaataagataagtgcatattatggaattctaggtaatgggacaactgctgtaattgaaatggctaaggcaagtggcttagagatagtagaaaagaagaagcgtaatccaatgataaccactacttttggtactggtgaattgattagggatgccttagatcacaatgttaaagaaattattattggattaggcggcagcagcactaatgatggcggtagcggcatggctcaagctttaggagcaaaactacttgatcaaaacaatcatcaaattccttttggtggcggaaatttagataaactagacaaaattgatatttctaacttagattcaagattgcaagatgtaaaaatcattttagcaagtgatgttactaatccattaattggtaaagagggtgcatcaagagtttttggactgcaaaaaggtgccacaccagaaatggttgaaaaacttgaaaataatttacagcactacgctaaaattgttaagcgtgatttgaataaagatgttgcctcagtgtcaggcgctggagcagcgggaggtttaggagctggtttaatggcttttactacttgtgaaatgaggcaaggagtagatcttgcaattgaagtaaccaaactagaagaaaaaattagggatactgactatgtctttactggagaaggtggcacagattttcaaactaaatttggaaaaacaccatatggagttgctaaattaggtaaaaagtatcataagccagttatctcattagcaggctatctgggggaaggaattgatagtttatatagtgaaggcttcactgcaatttttggaattattcccggagcgtgtgatctttcaactgctttgaaaaatggaccaagtaatgtggctagaactacagaaaatatagttcgtttacttaagttttaa

SEQ ID NO: 134501 - protein, 376 aa, Lactobacillus johnsonii NCC 533
MTKYVVAPDSFKESMTAKEVCDAMEKGIKKADSAAEVIKVPMADGGEGTVNSLVDATHGQRVIVEVTGPLGNKISAYYGILGNGTTAVIEMAKASGLEIVEKKKRNPMITTTFGTGELIRDALDHNVKEIIIGLGGSSTNDGGSGMAQALGAKLLDQNNHQIPFGGGNLDKLDKIDISNLDSRLQDVKIILASDVTNPLIGKEGASRVFGLQKGATPEMVEKLENNLQHYAKIVKRDLNKDVASVSGAGAAGGLGAGLMAFTTCEMRQGVDLAIEVTKLEEKIRDTDYVFTGEGGTDFQTKFGKTPYGVAKLGKKYHKPVISLAGYLGEGIDSLYSEGFTAIFGIIPGACDLSTALKNGPSNVARTTENIVRLLKF

SEQ ID NO: 134502 - DNA, 1167 bp, Treponema denticola ATCC 35405
  CDS (1)..(1167): transl_table=11
atgaaaaagatactgcttatccccgattcctttaagggaacaatgagctcggctcggatatgcactttgatgaaaaatgcgataaaagagattttccctgaagctcaaactctttcaatccctgtcgcagacggcggggagggcagtgtcgaagcctttttagaagctataggcggcataaaaaaaacggttaaagtcaaaaatcctttttttgaagaaatggaaggcttttacggtattttaaaaaatgaagagccaaatgccgaaaagactgctgtaattgaaatggccgcctgtgcgggcctccctcttgcgttgggaaggcttaacccatctcttaccacgacctatggggtaggtgaactcatagccgatgcccttaaaaacggctgtacaaatattataatcggtttgggcggaagtgcgacaaatgacggaggctgcggagctgcagcagccttgggagttaagttttttgataaggaaggaaaaagttttattccggcaggcggaaccttaaaaaatattgaacgcatagatatgacaggtctaagccctcttgtaaaaaaagcaaggtttacgactatgtgcgatatagataatcctcttttcggaaaaaccggagcagcctacatctttgctccgcaaaaaggtgcagaccccggcatggttgaagaactcgaccaaggcctaaaacgtctggccttggttgcaggaaaaaccgaatccctcaattccggttctgaaacggcagaaatccccggggcaggggctgccggaggcatgggctacggaactcttgtctttttaggttccgagttaaaaatgggtattgaaattgttcttgatacggttgactttgagaaaaaactggataataccgattttgtttttacgggagaaggcaaattggatagtcaaagtttaagaggaaaggttgttgcaggcgttgcccaaagagccaaaaagaaaaatgtgcctgtgatagctgtcgtaggcgatgcagaagagggcatagacgatatctataaaatgggagtttccgccgtattcagtataaaccgtcttgccgtcccattcagccaagcaaaaaaaacggccgaaacggatttgaccgcaacaatgaaggatgttttgcgcctaatcggaattttttccatatgttga

SEQ ID NO: 134503 - protein, 388 aa, Treponema denticola ATCC 35405
MKKILLIPDSFKGTMSSARICTLMKNAIKEIFPEAQTLSIPVADGGEGSVEAFLEAIGGIKKTVKVKNPFFEEMEGFYGILKNEEPNAEKTAVIEMAACAGLPLALGRLNPSLTTTYGVGELIADALKNGCTNIIIGLGGSATNDGGCGAAAALGVKFFDKEGKSFIPAGGTLKNIERIDMTGLSPLVKKARFTTMCDIDNPLFGKTGAAYIFAPQKGADPGMVEELDQGLKRLALVAGKTESLNSGSETAEIPGAGAAGGMGYGTLVFLGSELKMGIEIVLDTVDFEKKLDNTDFVFTGEGKLDSQSLRGKVVAGVAQRAKKKNVPVIAVVGDAEEGIDDIYKMGVSAVFSINRLAVPFSQAKKTAETDLTATMKDVLRLIGIFSIC

SEQ ID NO: 134504 - DNA, 1533 bp, Magnaporthe grisea 70-15
  CDS (1)..(1533)
atgtctcaactcgatattcccagtcccgtcactgacgaagccgacagtcatgacgaatcttgtcaagacgatcatagccactcatctgcgggtgaggactgccctgatacgcccaactttgcagagccgattcctttacagcaaaccgacatgggaatcttgcgcctccaagagcctgatggcctcaagattcttgtagcgcctgccgcatacaagggatgtctccagcctgatacggccgccgattgcatcagtaccggcattctttcggttgtgcccgacgcccgcatccgcaagcttcctctgatcgatggtggcgaaggcttcacccgtggtgtcgtcgccgccaccggtggtagcatccatcaagttgtggttcctggcccactcaacgagcctgttcaagcctttttcggtatgattggtcattccaacattcaaacaagcccgatcgagagaaagactgccatcatcgaaatgtctgctgctgcaggcctcagcctggtgccggtggaacgtcgcaacccatgcatgacaacaacctatggcgtcggcagtctcgtccttgccgcgatggaagctggcgcacagcgtatcatcatcggctgtggagactcggccacttgcgacggtggtgccggtatgctacaggccctaggtgcagttctgctggatcaagagggtcggtcgttgccgatagctcagggtggggagtccatcctccgactacatcgggtagataccaccggtctcgacacccgtattgccgacggctctgttcaaatcgaggctgccgtcaactggaagaatgtactcaccggccccaagggccaggcccgcatctacagcgagcaaaaaggtgcaactcccgcccagatcgagttgctgtcaagtgccatggacgcattggcctttgcagctgccagacgtctgcaaagcacccctgaaactgtgggacagataccgggttcgggcgcgtcgggcggcatgggaacggcattactggttatgggtggtaggctccgcgcccggtgtgatgtaatggatgaattcctcccgccgctggatactctcttcgagactgccgacagtttcgacctggtcatcacagccgagggcggactggactaccagactccacgaggcaagatgccagcagaggtggctcgacgcgcaagcagtcgcaatatcccagtggtggccatcgcgggtaccatcggtaacggtgctgctgataacctgtcggttggtatcaaggcgtatgcttgcatgctgcaggggccgtcgacactggccgaggccatggtgccagctagggcaaggcagttgctagaggagagtgcggccagcgtcatgcgaacggtactggttggcttgttgaaacataccttggcagatctcactcgtaacccatccctcggcgccaccaactcccaaggcccctcctctccatctccttggcaaactcggaaacagcgccaacctcttggaatccagcttgtgcaatctcagccgctgcgggagctggtttga

SEQ ID NO: 134505 - protein, 510 aa, Magnaporthe grisea 70-15
MSQLDIPSPVTDEADSHDESCQDDHSHSSAGEDCPDTPNFAEPIPLQQTDMGILRLQEPDGLKILVAPAAYKGCLQPDTAADCISTGILSVVPDARIRKLPLIDGGEGFTRGVVAATGGSIHQVVVPGPLNEPVQAFFGMIGHSNIQTSPIERKTAIIEMSAAAGLSLVPVERRNPCMTTTYGVGSLVLAAMEAGAQRIIIGCGDSATCDGGAGMLQALGAVLLDQEGRSLPIAQGGESILRLHRVDTTGLDTRIADGSVQIEAAVNWKNVLTGPKGQARIYSEQKGATPAQIELLSSAMDALAFAAARRLQSTPETVGQIPGSGASGGMGTALLVMGGRLRARCDVMDEFLPPLDTLFETADSFDLVITAEGGLDYQTPRGKMPAEVARRASSRNIPVVAIAGTIGNGAADNLSVGIKAYACMLQGPSTLAEAMVPARARQLLEESAASVMRTVLVGLLKHTLADLTRNPSLGATNSQGPSSPSPWQTRKQRQPLGIQLVQSQPLRELV

SEQ ID NO: 134506 - DNA, 1206 bp, Gibberella zeae PH-1
  CDS (1)..(1206)
atgacatctggttccaccatcgctaaaccaagcatgagggtcctcgtctgcccctcaggtttcaagggcagtcttcagccgagtcaggcggctgattgcattgaagctggtatcttggctgttgaacctctcgcctcggtccgcaaggtcccactggtcgatggcggcgagggattcactcaggcaatcgtctctgcgaccggaggctcaatccatcacattcccgtgactgggcctgtaggagagatcatcatgtcattctttggcatcctcggtcgaagcagcaaggacgagccagtcactgcagtgcttgaaatggcggctgctgctggtctgagcctagtcccatcaagctgccgtaaccccggaaagactacgacatttggtgttggccagcttatccttgctgcgctagacgctggagccacccgcattcttgttggatgtggtgactctggtacttgcgacggcggcgcagggatgcttcaggcccttggcgcaaagttgtttgacactaacgggtgtctcctctcaatcgctcaaggtggcgaatctcttttggcccttgactcaattgatctatccgaggtagatagtcgcgtgttcaaagctaaaatcgacgttgccgtaaattggcacaacgttctctgcggacctgagggggtggcaaatgtgtttggaccccagaaaggatctactcccgaacaagccgctcgccttagccttgccatggaaagattggcagaggttactactggagtcctttgcgataaggacgtacgattggctccaggaggtggcgcttcaggggggcttggaacgggattgcgtttggtcggggctactctgaagcccagatacgagattgtcatgcagtacatcaacgtgcatagcatcttcaacgactgtgatcttgtcatcaccgcagaaggaggtatagatgatcaaacacccagaggtaaaatccccgccgaagtcgcgaggcttgccaagaagcatggactgccagtcattgccatcgctgggacgattggccagggagctagagtgaattatgacatcggtattgacgcctttacttgtattattcagagacccatgtctctagatgatgcggtccaagaagcggagaagctgacccgggagagtgcggagacggtgatgaggattgtggtggttgggaggatgctggggaaaggcatctga

SEQ ID NO: 134507 - protein, 401 aa, Gibberella zeae PH-1
MTSGSTIAKPSMRVLVCPSGFKGSLQPSQAADCIEAGILAVEPLASVRKVPLVDGGEGFTQAIVSATGGSIHHIPVTGPVGEIIMSFFGILGRSSKDEPVTAVLEMAAAAGLSLVPSSCRNPGKTTTFGVGQLILAALDAGATRILVGCGDSGTCDGGAGMLQALGAKLFDTNGCLLSIAQGGESLLALDSIDLSEVDSRVFKAKIDVAVNWHNVLCGPEGVANVFGPQKGSTPEQAARLSLAMERLAEVTTGVLCDKDVRLAPGGGASGGLGTGLRLVGATLKPRYEIVMQYINVHSIFNDCDLVITAEGGIDDQTPRGKIPAEVARLAKKHGLPVIAIAGTIGQGARVNYDIGIDAFTCIIQRPMSLDDAVQEAEKLTRESAETVMRIVVVGRMLGKGI

SEQ ID NO: 134508 - DNA, 1017 bp, Aspergillus nidulans FGSC A4
  CDS (1)..(1017)
atgaaggttctggtctgcccatctggcttcaagggaagcattaaccctggcacagcggcggactgtattgaggccggcatcctgcaagccatgcctcaggcaactgtccacaaagttcccctcgccgacggtggagaagggtttgctcatgccctggtggctgctacgtcgggggcaatacgcaatcttcgcgtaaccggccccgttagagagcccgttcaatcattctatgggatcctcggcaacaccccggtcaagactgctgtgattgagatggcagccgtggccggtctgagcttggtccctcctgaccgccgcaacccctgcgcgacgactacttatggcgttggccagctgattgccgcggcgcttgatgacggggcccaacggatcatcgtcgggtgcggtgactctggcaccagtgacggtggtgccggaatgctccaagccctcggggctcgactactcgactacgatgggcgagagcttccgcaggcaggtggcggccagtcactcgtttccctcgccggagttgatttttcaaagatgcatccccggttgaaatatgttaatattgaggccgtctgtaactggaagaacgtcctctgcgggccacagggagtagcgcgagtctacggcccgcaaaagggcgcatctgccgaacaaacacagcttctagaagcagcactgcaaatctatgccgtcgtcattcatcgcacgcttgggatcgacatctccaatgcacctgggagcggtgcatccgggggtctaggggcaggcttgctcctcgttggagcggagttacgcccacggtatgaggccttgatggagtatttccaccttagagacatttttagtgactgcgacctggtcatcacggcagagggggcgatcgatgaccagaccccaaggggcaagatcccggcagaggtcgcactgcgtgctagagagcgcaacattccggtcatcgtccttgcagcggccctcgaccctggacgaagcgatgggggacactga

SEQ ID NO: 134509 - protein, 338 aa, Aspergillus nidulans FGSC A4
MKVLVCPSGFKGSINPGTAADCIEAGILQAMPQATVHKVPLADGGEGFAHALVAATSGAIRNLRVTGPVREPVQSFYGILGNTPVKTAVIEMAAVAGLSLVPPDRRNPCATTTYGVGQLIAAALDDGAQRIIVGCGDSGTSDGGAGMLQALGARLLDYDGRELPQAGGGQSLVSLAGVDFSKMHPRLKYVNIEAVCNWKNVLCGPQGVARVYGPQKGASAEQTQLLEAALQIYAVVIHRTLGIDISNAPGSGASGGLGAGLLLVGAELRPRYEALMEYFHLRDIFSDCDLVITAEGAIDDQTPRGKIPAEVALRARERNIPVIVLAAALDPGRSDGGH

SEQ ID NO: 134510 - DNA, 1110 bp, Mycobacterium sp. JLS
  CDS (1)..(1110): transl_table=11
atgaaaatcgttctcgcaccggactctttcaaggagtccatgagcgccgcgcaggccatcgccgccatgcgcgacggggtacgcgcggcccttccggacgccgattgcgtcggggtcccgatggccgacggcggtgagggcaccgtcgacgccgtggtggacgcgctcgacggtgagcgggtgacggtcgaggtggccgatgcgctcggccggcccgtgccggccacctacggttatgttcccggccgtcgtctcgcggtcatcgagatggccgccgcggcgggtctggaactcatccccgccgacgagcgtgatgtgctgtgcgccagcaccttcggtgtcggccagctgatggcccacgcgctcgaccggggcgccgccgagttcctgatcggcctcggtggatccgccaccaacgatggcggcgcggggttgctcaccgccctgggcgtcgagttgctcgacggctcggatgcgccgctgccaccgggcggcggtgcgctggccgatctgcaccgcatcgacaccgcgggcctcgatccgcggctggcgggcgtgcacatccagttggcctgcgacgtgaccgcacccctgctcgggcccgcgggcgccagcgccgtgttcggcccgcagaagggtgcgacacccgccgacgtcgcccggttggaggctgcgctggcgcggttcgccgcggtggccgacgccgcgcacgcggagacacccggtgcgggtgcggccggcgggctcggcttcgcgctgctcgaattcctcggcgccacaagccgtcccggtgtcgaggtggtggccgagacggtcgggctggaacaggcgctacgcggtgcggcgtgggtgttcaccggtgagggcggcgtcgacgcgcagaccctgatgggcaagacgccgttcggggtcgcgcaggtggccgcccgcaccgggaccagggtggccatcttcgccggccgggtcggccccgacgcgtcggtgcttctcgagcacggcgtcgacgagatcgtcgggatcaccgcacccggaacacctctcgccgaggcgctgcgcaccggcccgcagtcgctggcgcgggccgtcgagaacttcctccgccggctctga

SEQ ID NO: 134511 - protein, 369 aa, Mycobacterium sp. JLS
MKIVLAPDSFKESMSAAQAIAAMRDGVRAALPDADCVGVPMADGGEGTVDAVVDALDGERVTVEVADALGRPVPATYGYVPGRRLAVIEMAAAAGLELIPADERDVLCASTFGVGQLMAHALDRGAAEFLIGLGGSATNDGGAGLLTALGVELLDGSDAPLPPGGGALADLHRIDTAGLDPRLAGVHIQLACDVTAPLLGPAGASAVFGPQKGATPADVARLEAALARFAAVADAAHAETPGAGAAGGLGFALLEFLGATSRPGVEVVAETVGLEQALRGAAWVFTGEGGVDAQTLMGKTPFGVAQVAARTGTRVAIFAGRVGPDASVLLEHGVDEIVGITAPGTPLAEALRTGPQSLARAVENFLRRL

SEQ ID NO: 134512 - DNA, 1155 bp, Clostridium difficile 630
  CDS (1)..(1155): transl_table=11
atgaaaatattaatttctatagattctttgaaaggaagcttatcttcaatagaggcaggaaatgcaataaaaaaggggatattgaaggttaaagaagatgcgcaagtaaagatattgccacttgctgatggtggtgaagggacagtagatgctttagttcaagggatgaatggtaaaaaagagactatagaagttactggaccaatagctaaaaaagtggatgcaacatatggattattaaaaaatacaagtacagcaataatagaaatagctcaagcatcaggattaacattggttccgactgaacttagaaatcctttatacactacaacttatggtgttggggaaataataaaggaagcaataaataaaggctatagaaattttatagttgggataggtggaagtgctactaatgatgctgggataggtatgcttcaagccttagggtttgagttttatgataaaaataacaagttagtaggattaggtggaaaagttttaaatgaaataagacatataaaaatagaaaatagattaaaggaattagatgaatgtaagtttaaaatagcctgtgatgtaaataatccgctgtttgggaaaaatggagctgcatacatatacgggtctcaaaaaggtgcaacatcagaaataattgaggagttagataatgggcttagaaatttttccaaagtagttaaaaattacttaagtaaagatgtagctaatgtagaaggagcaggagcagcaggaggattaggttttgcttttttagcatttttagattcaaaattagaatctggaataaaaataatattagaagaaattaaattagaggaagagttaaaagatgcagattttgtcataactggtgaaggtagattggacaatcaaactgctatgggcaaggctccaataggagttgcaaaactggcaaaaaaatatggggtaaaagtaataggtttggctggagccacaacagaagatgcagttaaatgtaatgaagagggtatagatgcttatttttctatagtaaatagagctatgacaatagaagaagcaatggataaagcaactgctagtgagaatatgacagctacaacaacacaaatattcaatcttataactagtatacaacagtcaaaaaatatgtag

SEQ ID NO: 134513 - protein, 384 aa, Clostridium difficile 630
MKILISIDSLKGSLSSIEAGNAIKKGILKVKEDAQVKILPLADGGEGTVDALVQGMNGKKETIEVTGPIAKKVDATYGLLKNTSTAIIEIAQASGLTLVPTELRNPLYTTTYGVGEIIKEAINKGYRNFIVGIGGSATNDAGIGMLQALGFEFYDKNNKLVGLGGKVLNEIRHIKIENRLKELDECKFKIACDVNNPLFGKNGAAYIYGSQKGATSEIIEELDNGLRNFSKVVKNYLSKDVANVEGAGAAGGLGFAFLAFLDSKLESGIKIILEEIKLEEELKDADFVITGEGRLDNQTAMGKAPIGVAKLAKKYGVKVIGLAGATTEDAVKCNEEGIDAYFSIVNRAMTIEEAMDKATASENMTATTTQIFNLITSIQQSKNM

SEQ ID NO: 134514 - DNA, 1134 bp, Listeria monocytogenes str. 4b F2365
  CDS (1)..(1134): transl_table=11
atgaaaatcgtcatcgcacctgattcattcaaagagagcgccactgctgttgaagtagcaaatgctataaaaaaaggctggactaaagcacgtccagccgatcaaattagccttgcccctgtttctgacgggggtgagggttttcttactgttttaagtgagtcttccgaggtggaattgtttcaagcagaagtaaccaacctaaatggtcacaaaataacggcctcctacggtattctcgctagccaagaaactgcaattatcgagtccgctaacacgattggattagatttaatcccagccgtagaccgcaatccagcttacgcgagctctaaaggcgtcggtgaactaattttggcggcactgaatcacaacgtcaaaaaaatcattatcggccttggtggaagtggcacaaacgatggcggcgctgggctaatccaagctttgggcgttgcactacttgataaaaacaaacagcctattccgcccggtggcattcatttgcaagaactagcttacattgatgccagcaaccttaatccaaagctgaaaaacattcaattccaaatagcctgcgacgtcacgaatccacttcttggagaaaacggcgctaccttcgttttcggtgctcaaaaaggcgcaactcccgaaatgctcgttcaactagagcgcgccatgcagaactacggagcaaaactcgatcaattttcatctcaaaaaatcactacaaaaaaaggagccggagccgctggtggtatcgctgccggactaatgactttcctaaatgcagacgtgttaagcggttcagctctagttatggaactttctaatatgaaggataaaatgaaagatgcggatatcgttattgttggtgaaggacgaatggacaagcaatcgatgatggggaaaatccctgttcaaattgctcaagaagctaaaaaacaaggttgtttcgtcctagcaatcgtcggtagccttgcactcgaaaacaatatcgcccaacaacacggtatcgatgcgtttttcccaaacatcccagaaataacagatttacccactcttttcgaaaatacaacaaagaacctcgaacgcacggcggaaaacattgccaaactaactttaattggcaaataa

SEQ ID NO: 134515 - protein, 377 aa, Listeria monocytogenes str. 4b F2365
MKIVIAPDSFKESATAVEVANAIKKGWTKARPADQISLAPVSDGGEGFLTVLSESSEVELFQAEVTNLNGHKITASYGILASQETAIIESANTIGLDLIPAVDRNPAYASSKGVGELILAALNHNVKKIIIGLGGSGTNDGGAGLIQALGVALLDKNKQPIPPGGIHLQELAYIDASNLNPKLKNIQFQIACDVTNPLLGENGATFVFGAQKGATPEMLVQLERAMQNYGAKLDQFSSQKITTKKGAGAAGGIAAGLMTFLNADVLSGSALVMELSNMKDKMKDADIVIVGEGRMDKQSMMGKIPVQIAQEAKKQGCFVLAIVGSLALENNIAQQHGIDAFFPNIPEITDLPTLFENTTKNLERTAENIAKLTLIGK

SEQ ID NO: 134516 - DNA, 1122 bp, Listeria monocytogenes str. 4b F2365
  CDS (1)..(1122): transl_table=11
atgaaaattgtcattgcaccggattcattcaaagaaagtttgacggcgcatgaggtggcagagtatattaaagagggctttcaagaaatttatccggatgctgattatcatttactccctgtcagtgatggcggggaaggtacgctagagattttaagtaaagctttaggtgcgaaaaaaatgaaaatcgatgtgtccggcccttttggtgacccagtttcagcacaagttgcttttacggatgggaacaaaaaagctttaatagaaatggccgaagtttgtggtttgcacttggttccgacgactagacgcgatccacttcaagtgagtactaaaggagtgggcgagctaattttgcacgccatggaaaaaggtgcgaccgagattattattgggattggtggaagcgcttcaaacgatggcggaattggcatggctagtgcgcttggctatgaattcctagatgcagaaaataatatcgtcaacccgattggcgcaaatttagctgatatagcaaccattcgttccgaaaaagtcccagctgaactagaaaacatcacagtaaatattgtgacggatgtcgaaaacccactttgtggagaagctggcgcatcgtatgtgtttggtccacaaaaagggctagccgttacagatttagcaacagctgatggggcaatgcgccagttttatcagttagcgaatcccgccatggttacaatgccgcgagcaggtgctgggggtggaattggtgctggacttgtgacgtttgcaaaagctaacctgttatcgggaattgattttgttattgaagcacttcaaatcaaaactgtttgtgaggatgcagatttggtcattgtaggcgaagggaaaatggacgggcaaaccgcacaagggaaagctcctgtgggtgttgcgaaagtagtgccgaaagaaaccccagtttttgcaatttgtggaagtgttggtgagggactagaagcagtatatgaagtcggaatcagcgcagtatttccatccattgccaaaccagcaactttagaaaatatactgaaagaaacaccaaataatttaagaagaaccgcgcgaaatgttgcggcagtttggaaaggacgagtagaatga

SEQ ID NO: 134517 - protein, 373 aa, Listeria monocytogenes str. 4b F2365
MKIVIAPDSFKESLTAHEVAEYIKEGFQEIYPDADYHLLPVSDGGEGTLEILSKALGAKKMKIDVSGPFGDPVSAQVAFTDGNKKALIEMAEVCGLHLVPTTRRDPLQVSTKGVGELILHAMEKGATEIIIGIGGSASNDGGIGMASALGYEFLDAENNIVNPIGANLADIATIRSEKVPAELENITVNIVTDVENPLCGEAGASYVFGPQKGLAVTDLATADGAMRQFYQLANPAMVTMPRAGAGGGIGAGLVTFAKANLLSGIDFVIEALQIKTVCEDADLVIVGEGKMDGQTAQGKAPVGVAKVVPKETPVFAICGSVGEGLEAVYEVGISAVFPSIAKPATLENILKETPNNLRRTARNVAAVWKGRVE

SEQ ID NO: 134518 - DNA, 1158 bp, Bacillus thuringiensis serovar konkukian str. 97-27
  CDS (1)..(1158): transl_table=11
atggagatagttatgaaagttgttattgcatctgattcatataaagaaagcttaaaagctatagaagtatgtgaggctattgaaagaggttttgaagcaattttccctaaagcagagtatgtaaaaataccaattggagatggaggagaaggaacggttgattcacttgttgatgccgcaagggggagaattatatcacttcatgtaacagggccgcttagagaacgtgtacaagccttttacggtatgtctaaagataaaaagacagcgtttattgaaatggcagcagcatcaggattacaacatgttccggttaaaaaacgaaatccacttgttacaacgacgaagggaacaggagaacttatactacatgcgctagacgaaggcgctgagcatatcattttaggacttggaggaagtgctacaaatgatggaggagcggggatgttgtcagctttaggagtcaggtttataaatggaaaaggagaagtaatagatccatctggtggaacgctacattcgattgtctctattgatttttcacaaatggattcacgcttaaagcatataaagatagaagcagcatgtgatgtagataatccgttagttggaataaggggagcatctttcgtgtttgggcgacaaaagggtgcggatgaagagatgatgaaagagctggatgagaatttaaagcattatgcgcatattcttaaacaatacctatattgcgacgtatctaaaatacctggtgcaggagctgcgggaggtatgggagcagctgttattgcagtgctaaagggaaacttgcgtagaggaattgaaattgtattagattatacaaattttgataagcatatagaaggtgcagatttaattataactggcgaaggaagaatagatgaacaaacagcatatggaaaggccccagtaggtgttgcggagcgtgcaaagcattttcacattcctgtcattgctattggaggatctgtatctccgaattacaccgctgttcatgaaaaaggaattgacgcagtatttagtattacaccaagtccgatgacattagaggaggcatataaagtaacagaagagaatatcgaaatgacagcgaagaatattgcagcagtgtggaaaatagcatcagaaaaacacttctaa

SEQ ID NO: 134519 - protein, 385 aa, Bacillus thuringiensis serovar konkukian str. 97-27
MEIVMKVVIASDSYKESLKAIEVCEAIERGFEAIFPKAEYVKIPIGDGGEGTVDSLVDAARGRIISLHVTGPLRERVQAFYGMSKDKKTAFIEMAAASGLQHVPVKKRNPLVTTTKGTGELILHALDEGAEHIILGLGGSATNDGGAGMLSALGVRFINGKGEVIDPSGGTLHSIVSIDFSQMDSRLKHIKIEAACDVDNPLVGIRGASFVFGRQKGADEEMMKELDENLKHYAHILKQYLYCDVSKIPGAGAAGGMGAAVIAVLKGNLRRGIEIVLDYTNFDKHIEGADLIITGEGRIDEQTAYGKAPVGVAERAKHFHIPVIAIGGSVSPNYTAVHEKGIDAVFSITPSPMTLEEAYKVTEENIEMTAKNIAAVWKIASEKHF

SEQ ID NO: 134520 - DNA, 1143 bp, Staphylococcus aureus subsp. aureus MRSA252
  CDS (1)..(1143): transl_table=11
atgcaattacaaaaaattgtcatcgctcctgactcatttaaggaaagtatgaccgcacagcaagttggcaatattataaaacaggcatttactaatgtttatgggaaaacccttcattatgatatcattccgatggctgatggtggtgaaggcaccacagatgctttaatgcatgcaacaggtgctactaagtatacagtcatcgttaatgaccctttaatgcgacctattgaagcatgttatgcacgcgcagacgaacaacaaattgcaattattgaaatggcagcagcgtcaggtttggatttattagaaaaagaggaacgtaatcctttatacacatcatcatatggtaccggtgaactaattaaagatgcattaaatcatggtgctaagaccattattttagggattggtggcagtgcaacaaatgatggtggtacaggtatgctaagtgcactaggcgtaaagtttactgatgtaaacggggacttattacaaatgaatggtgataatcttgctcacattgcacaaatcgatataaccaatctagattcgcgattaaaagaagtgacctttaaagtggcctgcgatgtttcaaatcctttattgggtgaaaatggtgctacctatatttatggtcctcaaaaaggcgctgatgcaaagatgataccaaagttggatttcgcaatgtcgcattatcatgataagataaaaatgtgcacaggaaagtcagttaatcaaataccaggttctggtgcagctggcggtatgggcgcagcattattagcgttttgtgagacaactttaacaaaaggtattgatgtcgtctttgacattacagattttcatcaaagaattaaagatgcagacctcgttattactggagaaggacgcatggattatcagaccatctttggtaaaacacccgtaggcgttgcgttagctgcaaaacaatatcatattcctgtcatcgcgatttgtggcagtctaggcgaaaattatcaacatgtttacgatttcggtattgatagtgcctattctataatctcttcacctagcactttagaagatgtcctacaaaatagcgaacaaaatttattaaacactgcaactgacattgctcgtattctgaaattacaataa

SEQ ID NO: 134521 - protein, 380 aa, Staphylococcus aureus subsp. aureus MRSA252
MQLQKIVIAPDSFKESMTAQQVGNIIKQAFTNVYGKTLHYDIIPMADGGEGTTDALMHATGATKYTVIVNDPLMRPIEACYARADEQQIAIIEMAAASGLDLLEKEERNPLYTSSYGTGELIKDALNHGAKTIILGIGGSATNDGGTGMLSALGVKFTDVNGDLLQMNGDNLAHIAQIDITNLDSRLKEVTFKVACDVSNPLLGENGATYIYGPQKGADAKMIPKLDFAMSHYHDKIKMCTGKSVNQIPGSGAAGGMGAALLAFCETTLTKGIDVVFDITDFHQRIKDADLVITGEGRMDYQTIFGKTPVGVALAAKQYHIPVIAICGSLGENYQHVYDFGIDSAYSIISSPSTLEDVLQNSEQNLLNTATDIARILKLQ

SEQ ID NO: 134522 - DNA, 1164 bp, Acinetobacter sp. ADP1
  CDS (1)..(1164): transl_table=11
atgccaaaaacttttgtacttgcacccgactcatttaaagaaagtatgagcgccattgaagcttgcgaggcgatgcaagcgggattacaaaacgtatttcccgatgctcattttattctatgccctatggctgacggcggtgaaggaacagtcgatgcattgattaatgctgctcaaggcaaacgaattaatatcaatgtcatgggtcccttacccacccaaataattaatacttattttgggttaattgatgaaggaaaaacagccgtcattgaaatggccaaagccaatggcattcatctactctcaccagcgcagcgtaatccattacatacctctacttttggaacgggtgaaatgattcgtgccgcgcttgatcttaaagtttcaaaaattattatcggattgggcggtagcgtgaccaatgatgcaggtatgggaatggcgatggcactgggtgtacggtttcttgatcattatggattaaccgtacccttgggtggtggtaatttagtgcagatttgcacaatggatctgtcacagcttgatccacgtctcaaagatgttgaaattattattgccagtgatgtaaacaatcctctgttaggtgttcaaggagcaagttatattttcggccctcaaaagggggctacagcagaaatgattaagcaacttgaagctaatattactcactttgctcatatagtcgaacagcaactcaaaagagaatttaaagcgattgcaggtgcaggcgcagcgggtggactggcatttggacttatggcgtttactgcagccaaaattcaatctggtgtagaaacagtgattcaaaatacacacttacatgaggcgattcagcaagctgattatgtatttacaggcgaaggtggaatagattttcaaaccaaatttggtaaaacaccaatcggtgtagctcatcttgcacagtccttaggtaaacctgtgattgcatgcgctggatatatcggatctgggattaatgaactttatgaacatggaatgacagcaatttttggaattttagataaaactacagatattgatagtgcttgcaaaaatggcaaggagaatctcgcaagaacaagcgaaaatattggccgcctcattgcccaagtagatcaatttaagacaccctcagagtag

SEQ ID NO: 134523 - protein, 387 aa, Acinetobacter sp. ADP1
MPKTFVLAPDSFKESMSAIEACEAMQAGLQNVFPDAHFILCPMADGGEGTVDALINAAQGKRININVMGPLPTQIINTYFGLIDEGKTAVIEMAKANGIHLLSPAQRNPLHTSTFGTGEMIRAALDLKVSKIIIGLGGSVTNDAGMGMAMALGVRFLDHYGLTVPLGGGNLVQICTMDLSQLDPRLKDVEIIIASDVNNPLLGVQGASYIFGPQKGATAEMIKQLEANITHFAHIVEQQLKREFKAIAGAGAAGGLAFGLMAFTAAKIQSGVETVIQNTHLHEAIQQADYVFTGEGGIDFQTKFGKTPIGVAHLAQSLGKPVIACAGYIGSGINELYEHGMTAIFGILDKTTDIDSACKNGKENLARTSENIGRLIAQVDQFKTPSE

SEQ ID NO: 134524 - DNA, 1146 bp, Erwinia carotovora subsp. atroseptica SCRI1043
  CDS (1)..(1146): transl_table=11
atgaaaatagtgatcgcaccggattcttataaagaaagcctgtctgcacaagaagttgccacgcagattgaaaagggatttcgtgaaatatttcccgatgcctgctatgtcaaattgcccgttgcagatggtggggaagggacagttgaagccatggttgctgcgaccgatggcaagattgtgaatgtgaaggtgacagggccgttaggcgataacattgatgcgttctttggcctgtctggcgatgaaaaaacagcttttattgagatggcggcggcaagcggtctggaacgcgtgccttctcaactgcgtaatccgttaaagaccaccagctatggtacgggcgagttgattcgctgcgcgttggatcacggcgttcagcactgcatcatcgggattggcgggagcgcaaccaatgatggcggatcaggcatggtgcaggcgctaggcgcgaagttgctggataagcagggcgaacagattggttttggtggtggtgaactcgacaagcttgccagcattgatatcagcgagctggatgaacgtattaaaagctgccgttttgaagtggcctgcgatgtgaccaacccgttgacggggaaactgggggcatcggctatttttggtcctcagaaaggcgcaacggcagagatgatagaacagttggataatgcgttgaagcattatgcagcggtgatccgtcacgatctggacatggacgtggaacacgtacccggatctggtgcggcgggcggaatgggggcggcgttacaggccttttgcggcgctgagcttcgccagggtattgagattgttacggaagcgctaggattggatgaactggtacgagatgccactctggtgattaccggagaagggcgtatcgacagccagacgatccatggcaaagtgccgattggcgtggcgcgagtcgccaaacagtataataaaccggttattggtatcgcaggcagcctgacggcagatgtcgctgtggtacatgaacatggcctggatgcagtattcagcgtgctttacaacatctgctcactagaagaagcgctggataatgcggcagagaatgtgcgaatgacggcgcgtaatatcgccgccacgatccgactggcgcagtcaatatcgcgctga

SEQ ID NO: 134525 - protein, 381 aa, Erwinia carotovora subsp. atroseptica SCRI1043
MKIVIAPDSYKESLSAQEVATQIEKGFREIFPDACYVKLPVADGGEGTVEAMVAATDGKIVNVKVTGPLGDNIDAFFGLSGDEKTAFIEMAAASGLERVPSQLRNPLKTTSYGTGELIRCALDHGVQHCIIGIGGSATNDGGSGMVQALGAKLLDKQGEQIGFGGGELDKLASIDISELDERIKSCRFEVACDVTNPLTGKLGASAIFGPQKGATAEMIEQLDNALKHYAAVIRHDLDMDVEHVPGSGAAGGMGAALQAFCGAELRQGIEIVTEALGLDELVRDATLVITGEGRIDSQTIHGKVPIGVARVAKQYNKPVIGIAGSLTADVAVVHEHGLDAVFSVLYNICSLEEALDNAAENVRMTARNIAATIRLAQSISR

SEQ ID NO: 134526 - DNA, 1209 bp, Propionibacterium acnes KPA171202
  CDS (1)..(1209): transl_table=11
atggtcatcaagatgggagagccggtctcgagccacgacatggtggcgtgccatgctgagaccatgcgtcccgatccgaatgcgccggtcgtcgtagccgttgactcgtttaaaggctcactgagctctgggaaggcttgtcgagcagtccggcgggggttttctgcggctgatccggatcgtgaggtcatcacgatcccggttgctgatggcggggaggggactgttgaggcagttctagcggccggttgtcatgctgtcaccgtcaagtgtcacggcgccacaggagacctcgcggaagtcgactacgcaatgcgtgaccgccatgctgtcattgaaatggctacctgttgtggtctagagagggccgaccgggtatccgggcggccgacgccccggcgtggcctcgtggcatccagccgcggtcttggtgaggttatcgcagctgccctgcgtaaaggagcgaccgacatcaccgttggggtcggtgggtcagcatccactgatggcggcgcaggaatgttggaagccttaggtgtgcgtctgctcgacaaaaatctcgcgccaatttctcccggggcagcagggttgacggaactcacacgcctcgacctgtccggactcaatcgaaaattgtcgggggtagagctgacagtcgcgtgtgacgtcacttcgccgttgctcggaccagaaggtgcggctgccgtgtttggtcctcagaagggtttggaccacgaaggcatcgcgattgctgaggccggtctgaccaggcttgccgacctgatggaaccagccatcggtagtacttaccgggacgatccgggatccggtgccgccggcggagttggttgggcgcttcgctgtctgggagcaaaataccgcccgggggcagctgcaatgctcggatgggccaaagcagtgtcaaaaatctctggggctggacttgttgtcactggcgagggtcgacttgacaggcaaaccttgctaggcaagcttcctgacacgatccgcaagattgctctcgacgcaggagtgccggtatgggcggtgtgcgggaggtgcgacctgcctgaggagaagcgtcgtgtcttcgagcgcatcatctgcttgtccgacattgagcccgatgttgaggcatcgatggcccaagctgggccgctgttgagtcgggcggtggagcaggcagtgcgggaggagctcggtcgctga

SEQ ID NO: 134527 - protein, 402 aa, Propionibacterium acnes KPA171202
MVIKMGEPVSSHDMVACHAETMRPDPNAPVVVAVDSFKGSLSSGKACRAVRRGFSAADPDREVITIPVADGGEGTVEAVLAAGCHAVTVKCHGATGDLAEVDYAMRDRHAVIEMATCCGLERADRVSGRPTPRRGLVASSRGLGEVIAAALRKGATDITVGVGGSASTDGGAGMLEALGVRLLDKNLAPISPGAAGLTELTRLDLSGLNRKLSGVELTVACDVTSPLLGPEGAAAVFGPQKGLDHEGIAIAEAGLTRLADLMEPAIGSTYRDDPGSGAAGGVGWALRCLGAKYRPGAAAMLGWAKAVSKISGAGLVVTGEGRLDRQTLLGKLPDTIRKIALDAGVPVWAVCGRCDLPEEKRRVFERIICLSDIEPDVEASMAQAGPLLSRAVEQAVREELGR

SEQ ID NO: 134528 - DNA, 1137 bp, Yersinia pseudotuberculosis IP 32953
  CDS (1)..(1137): transl_table=11
atgaaaattattattgcacccgattcatttaaagaaagcctcaccgccatgcaggttgccgaggccattgagcaaggcttcagcgagattttcccgcaggccgaatatataaagctgccaatggccgatggcggcgaaggtaccgttgaatcaatggttgcagccactggcggagagttagttaatgtagaggttaccggcccattgggtgctccggttaaggccttttacggttggatgggcgatggcgaaacggcggtgattgaaatggcggcggcatctggcctgcatttagtggcaccagagcagcgcaatccactgattaccaccagctacggtactggcgaactgattttggcggcgctaaatcacggggcgcgcaaaattattctcggcatcggaggcagtgccaccaatgatggcggcgcaggcatgatgcaagcattgggcgtacagcttagtgatcaacaaggtaaagcgctcacggttggcggggcggcattagcgcaattggtcgatattgatctcagccagttggatgatcgcctggcacaaaccgatattctggtcgcctgcgatgtagataacccattgtgtggtgcgaaaggcgcatcggcagtgttcggtccacagaaaggggcgacaccagaacgtgtgcaacaattggacgcggcgttgcagcactatggtgaaaaaatcgagcaagttactgggaaatccgtcattaacgtggccggtgctggtgctgctggcggtatgggcgcggcgctgttcggtttactgaatgcacggttacaaccggggattgagatagtcaccgaagcgctaaaattagcggctgccgtgcaaaatgctgatttagtcattaccggcgaagggcgcatcgatagccaaaccatttacggtaaaacgccggtcggggtggcgcgagtcgcgaagcgttttgatattcctgtcattgctatcgctggcagcatggcaccggactatgaggtggtacatcaacatgggttagatgcggtattttcagttctcaaccatattcaaacgctaccagaagcactggaagaggcgagtgataatattcgtatcacggcgcgtaacgttgctgctgtctggaaaatgggcagaagttaa

SEQ ID NO: 134529 - protein, 378 aa, Yersinia pseudotuberculosis IP 32953
MKIIIAPDSFKESLTAMQVAEAIEQGFSEIFPQAEYIKLPMADGGEGTVESMVAATGGELVNVEVTGPLGAPVKAFYGWMGDGETAVIEMAAASGLHLVAPEQRNPLITTSYGTGELILAALNHGARKIILGIGGSATNDGGAGMMQALGVQLSDQQGKALTVGGAALAQLVDIDLSQLDDRLAQTDILVACDVDNPLCGAKGASAVFGPQKGATPERVQQLDAALQHYGEKIEQVTGKSVINVAGAGAAGGMGAALFGLLNARLQPGIEIVTEALKLAAAVQNADLVITGEGRIDSQTIYGKTPVGVARVAKRFDIPVIAIAGSMAPDYEVVHQHGLDAVFSVLNHIQTLPEALEEASDNIRITARNVAAVWKMGRS

SEQ ID NO: 134530 - DNA, 1146 bp, Symbiobacterium thermophilum IAM 14863
  CDS (1)..(1146): transl_table=11
atgaagatcatcgtggcgccggactccttcaagggaagcctgaccgccctgaaggctgcggaagccatgcggcagggcgtgctggacgccatgcccgacgccgaggtggtggcgctgccgatggccgatggcggggaaggtaccacccaggcgctggtggcggccactggcggtcagctggtggaagcggaggtgacaggcccgctgggcgaaccggtacgggccgcttttggcctgctgggcgacggcgacaccgccgtcatcgagatggcggccgcttccgggctgctgttggtgccgccggagcgcagggatcccaaggtgaccaccacctatggcaccggtgaactgatccgggcggccctggaccggggcgtgcgccggatcctggtcggcatcggcggcagcgccaccaacgacggcggcgtaggcatggcccaggccctgggcggccgtttcctgaaggcggacggcagcccggtggatcggggcggcgcggccctgttggagttggagcggatcgacctgagcggcctggacccccggctgaagggcgtggagctgatggtggcctgtgacgtggacaatccgctgaccggtccgcgcggcgcggcggcggtctacggcccgcagaagggggccacggcggaggacgtggcgctgctggaccgggcgcttacccggctggccgacgtgatggtccgggacctgggccgggatgtccggaacctgccgggcgcaggagccgccggtgggctcggggccgggctcatgggattcctgggcgcacggctccgtccgggaattgatgtggtgatggaggtcaccgggcttcggcgacagttgcagggcgcggcgctgctcctcaccggcgagggcaggaccgacggccagaccctggcgggcaaggtgccgctgggcctggcgcgggcggcggcgccctgcggcgtgccggtggtcgtgatctcgggcgcggtgaccgacgatgccgacgccctgctggagcagggggtcgcggcgctgctcagtactgccccggggccggtgacgctggatgaggccatggctcgggccgaccagtggctgcggcgggcaaccgcccaggctatgcggctggtccgggttggcatacaggttccccgttag

SEQ ID NO: 134531 - protein, 381 aa, Symbiobacterium thermophilum IAM 14863
MKIIVAPDSFKGSLTALKAAEAMRQGVLDAMPDAEVVALPMADGGEGTTQALVAATGGQLVEAEVTGPLGEPVRAAFGLLGDGDTAVIEMAAASGLLLVPPERRDPKVTTTYGTGELIRAALDRGVRRILVGIGGSATNDGGVGMAQALGGRFLKADGSPVDRGGAALLELERIDLSGLDPRLKGVELMVACDVDNPLTGPRGAAAVYGPQKGATAEDVALLDRALTRLADVMVRDLGRDVRNLPGAGAAGGLGAGLMGFLGARLRPGIDVVMEVTGLRRQLQGAALLLTGEGRTDGQTLAGKVPLGLARAAAPCGVPVVVISGAVTDDADALLEQGVAALLSTAPGPVTLDEAMARADQWLRRATAQAMRLVRVGIQVPR

SEQ ID NO: 134532 - DNA, 1131 bp, Bacillus licheniformis ATCC 14580
  CDS (1)..(1131): transl_table=11
atgaaaatcgtaatcgcacctgattcatttaaagaaagcatgacatcgcttgaggcggctagaagcattgaaaaaggctttaaagagattctgcctgacgccgaatacgtcaatattccggttgccgacggaggcgaaggaaccgttcaggctctggttgacgctaccggaggagatattgtatatcaaacggtcactggccctctcgggaagcccgtaaaggcagcttacggcctgcttggtgacggaaaaacggctgtcatcgaaatggctgaagcgtcaggccttcacctcgttccacctgaacagcggaatcccctgttaacgacaacgagaggaaccggagagctgattctggatgctgcggaaaaaggagtgtcccagatcatcatcggactcggcggaagcgcgacaaatgacggcggcgcgggaatggcttcagcacttggcgtgaagtttctaaaccgcgctggagaagagattgaaaatgggggcggtgcactagctgagattgccaaaatcgatgtgagcggccttgatccaaaattaaagcatatccaattcgaagccgcctgtgatgttgataatcctcttacaggtcctcgcggtgcctccgctgtatttgggccgcaaaaaggagcgaacagtgaaatgacggcccacttggatcaaaacttaaaacattatgctgcagctgtcaaagcagagctgggatgcgaaatcgattcactcccgggagccggagcggccggaggattgggagctggcctgtgcgcctttttaaaagcggaattaaaaagcggtgttgacattgttttagatactttgtctttttctgaacgcattaaaggggccgatcttgtaattacaggcgagggaaaaatagacggccaaacggtcagcggaaaaacgccggccggcgtcgcaaaacgcgcctgcagcgaaaatattccggttattgcatttgccggatcgctcggtgaaggctgcgagcttgtttatgatatcggcatttccgctctcttttcgatcgtgcccggcatcagctccttggagaacgctcttgccgatggaagttcaaatcttacgcgctgtgcgcgaaatgtagccgccgtctggtcactcgaataa

SEQ ID NO: 134533 - protein, 376 aa, Bacillus licheniformis ATCC 14580
MKIVIAPDSFKESMTSLEAARSIEKGFKEILPDAEYVNIPVADGGEGTVQALVDATGGDIVYQTVTGPLGKPVKAAYGLLGDGKTAVIEMAEASGLHLVPPEQRNPLLTTTRGTGELILDAAEKGVSQIIIGLGGSATNDGGAGMASALGVKFLNRAGEEIENGGGALAEIAKIDVSGLDPKLKHIQFEAACDVDNPLTGPRGASAVFGPQKGANSEMTAHLDQNLKHYAAAVKAELGCEIDSLPGAGAAGGLGAGLCAFLKAELKSGVDIVLDTLSFSERIKGADLVITGEGKIDGQTVSGKTPAGVAKRACSENIPVIAFAGSLGEGCELVYDIGISALFSIVPGISSLENALADGSSNLTRCARNVAAVWSLE

SEQ ID NO: 134534 - DNA, 1158 bp, Mannheimia succiniciproducens MBEL55E
  CDS (1)..(1158): transl_table=11
atggagcgagataggatgaaaattgtcattgcgccggattcttataaagaaagcctttcagctatgaatgtcgctaatataattgaaaaaggatttaaacaaatttttcctgatgcaacatatgtaaaagtgcctgttgccgatggtggtgagggtaccgtagatacgatggttgaagcgacaaacgggaaaagaatagagttggatgttgtaggggcgctgggttctcaacaaaaagcattttggggcatatctcatgataattctgtcgctttcattgaaattgccgccgcatgcgggattgaacaagtccccatggaaaaacggaatccgttaattaccaccacatacggtgtcggtgagttgatcctgtcggcactggattccggagttcgccattttattgttggattaggcggtagtgctaccaatgacggtggtgcgggtatgctgcaagccttaggagtgaaattgctggacgaacaaggtaaatccttaggttatggcggtgcggaactggctcgtctgtctaaaattgatttttcaacaatggattgccgtttagccgaatgtaagtttgatgtggcttgcgatgtgactaacccgttagttggggaaaatggagcatctgcaacgtttggaccgcaaaaaggtgctacgccacaaatggttaagcaattagatgaggctttaagccattatgcggatattattaagcaagatttaaatatcgatgtgaaagatttacctgggtccggtgcggccggcggtttaggtgccgcttttgccggcgtgttaaaaggcgagcttaaaagcggtatcggtattattactcaattacttgatttagaaagtaaaataaaagatgccgatctggttattaccggagaagggcgtatcgatcatcagagtattaatggtaaggtacctgtcggtgtagcggctatcgcaaaacgctatgatctaccggtaatcgggattgcaggaagtttaggaaaagatatccatgtggtttatgattatggcttagatgcggtatttagtgtacttaataaagtttgtagcctgccggaagcgttggatcctaccaatgcggcggaaaatttggaaattaccgcgagaaatattgcagcgacacttaagatgaaaatttcataa

SEQ ID NO: 134535 - protein, 385 aa, Mannheimia succiniciproducens MBEL55E
MERDRMKIVIAPDSYKESLSAMNVANIIEKGFKQIFPDATYVKVPVADGGEGTVDTMVEATNGKRIELDVVGALGSQQKAFWGISHDNSVAFIEIAAACGIEQVPMEKRNPLITTTYGVGELILSALDSGVRHFIVGLGGSATNDGGAGMLQALGVKLLDEQGKSLGYGGAELARLSKIDFSTMDCRLAECKFDVACDVTNPLVGENGASATFGPQKGATPQMVKQLDEALSHYADIIKQDLNIDVKDLPGSGAAGGLGAAFAGVLKGELKSGIGIITQLLDLESKIKDADLVITGEGRIDHQSINGKVPVGVAAIAKRYDLPVIGIAGSLGKDIHVVYDYGLDAVFSVLNKVCSLPEALDPTNAAENLEITARNIAATLKMKIS

SEQ ID NO: 134536 - DNA, 1164 bp, Burkholderia mallei ATCC 23344
  CDS (1)..(1164): transl_table=11
atgccgcagccctcgcccatcgtggtcattgcacccgattcgttcaagggatcgctgagcgccgagcaggtcgcgaacgcgatcgccgccggcgtcgcgcgagcgcgcccggacgcgctcgtgcggcggtgcccgatggcggacggcggcgaaggcacgctcgacgcgctgctcgcgcacggcggcacccgtcgcacgctgcgcgtgccgggcgcgtcgctcgcgccgcgcgacgcggccgtcgggctcatcgacgcgcgcacggcggtcgtcgaaaccgcggaaatcgtcggcatcaccgatccggccggcatgagcgcgcccgtcgccgcccgcagcacgcgcgggctcggcagcgccattcgcgcgctcctcgacgacggcgttcgcacgttctatgtcgcgctcggcggtagcagcacgaacgacgccggcgcgggcctgctggccggcctgggcatgcgcgcgttcgatgcgcagggccgcgagatcgagccgacgcccgagcggctcgcgcacgtcgcacgcgtggacttcgccgggctcgacgcccgcgtggccggcgcgtcgttcgtcgcgatgtccgacgtcgacaatccgctcacgggcgcgcacggcgcgaccgccgtgttcggccctcaaaagggcgtggcgcccgcgcaggtcgcgccgctcgacgccgcgctcgaccacttcgcgacgctcgtcgaggccgcgctcgccctacgccccacggcggcagcgcacgcccgcgcccgcgatctgcccggcgccggcgcggcgggcgggctcggcttcgcactgcatgtgctcggcgcgcgcttcgagccgggcgccgaggtcgtcgcgcggcagatcgggctcgacgcggcgctcgcgggcgcgcactggctgctcacgggcgaaggccgctcggatgcgcagacgctgcacggcaaggcgccgttcgtcgcgtgccggcatgcgcgcgcggccggcgtgccggcgacgctgctgtccggcgcgatcgacccggcggcgctgccgcaattgtccgaacatttcgacggctgtttctcgcccgcaccggggccgatcacgctcgaggccgcgctgcgcgacgccgcgcgcctgctcgagaacgcggccgagcaactggcgcggctgcgctacggccgcccgtga

SEQ ID NO: 134537 - protein, 387 aa, Burkholderia mallei ATCC 23344
MPQPSPIVVIAPDSFKGSLSAEQVANAIAAGVARARPDALVRRCPMADGGEGTLDALLAHGGTRRTLRVPGASLAPRDAAVGLIDARTAVVETAEIVGITDPAGMSAPVAARSTRGLGSAIRALLDDGVRTFYVALGGSSTNDAGAGLLAGLGMRAFDAQGREIEPTPERLAHVARVDFAGLDARVAGASFVAMSDVDNPLTGAHGATAVFGPQKGVAPAQVAPLDAALDHFATLVEAALALRPTAAAHARARDLPGAGAAGGLGFALHVLGARFEPGAEVVARQIGLDAALAGAHWLLTGEGRSDAQTLHGKAPFVACRHARAAGVPATLLSGAIDPAALPQLSEHFDGCFSPAPGPITLEAALRDAARLLENAAEQLARLRYGRP

SEQ ID NO: 134538 - DNA, 1164 bp, Burkholderia pseudomallei K96243
  CDS (1)..(1164): transl_table=11
atgccgcagccctcgcccatcgtggtcattgcacccgattcgttcaagggatcgctgagcgccgagcaggtcgcgaacgcgatcgccgccggcgtcgcacgagcgcgcccggacgcgctcgtgcggcggtgcccgatggcggacggcggcgaaggcacgctcgacgcgctgctcgcgcacggcggcacccgtcgcacgctgcgcgtgccgggcgcgtcgctcgcgccgcgcgacgcggccgtcgggctcatcgacgcgcgcacggcggtcgtcgaaaccgcggaaatcgtcggcatcaccgatccggccggcatgagcgcgcccgtcgccgcccgcagcacgcgcgggctcggcagcgccattcgcgcgctcctcgacgacggcgttcgcacgttctatgtcgcgctcggcggcagcagcacgaacgacgccggcgcgggcctgctggccggcctgggcatgcgcgcgttcgatgcgcagggccgcgagatcgagccgacgcccgagcggctcgcgcacgtcgcacgcgtggacttcgccgggctcgacgcccgcgtggccggcgcgtcgttcgtcgcgatgtccgacgtcgacaatccgctcacgggcgcgcacggcgcgaccgccgtgttcggccctcaaaagggcgtggcgcccgcgcaggtcgcgccgctcgacgccgcgctcgaccacttcgcgacgctcgtcgaggctgcgctcgccctacgccccacggcggcagcgcacgcccgcgcccgcgatctgcccggcgccggcgcggcgggcgggctcggcttcgcactgcatgtgctcggcgcgcgcttcgagccgggcgccgaggtcatcgcgcggcagatcgggctcgacgcggcgctcgcgggcgcgaactggctgctcacgggcgaaggccgctcggatgcgcagacgctgcacggcaaggcgccgttcgtcgcgtgccggcatgcgcgcgcggccggcgtgccggcgacgctgctgtccggcgcgatcgacccggcggcgctgccgcaattgtccgaacatttcgacggctgtttctcgcccgcaccggggccgatcacgctcgaggccgcgctgcgcgacgccgcgcgcctgctcgagaacgcggccgagcaactggcgcggctgcgctacggccgcccgtga

SEQ ID NO: 134539 - protein, 387 aa, Burkholderia pseudomallei K96243
MPQPSPIVVIAPDSFKGSLSAEQVANAIAAGVARARPDALVRRCPMADGGEGTLDALLAHGGTRRTLRVPGASLAPRDAAVGLIDARTAVVETAEIVGITDPAGMSAPVAARSTRGLGSAIRALLDDGVRTFYVALGGSSTNDAGAGLLAGLGMRAFDAQGREIEPTPERLAHVARVDFAGLDARVAGASFVAMSDVDNPLTGAHGATAVFGPQKGVAPAQVAPLDAALDHFATLVEAALALRPTAAAHARARDLPGAGAAGGLGFALHVLGARFEPGAEVIARQIGLDAALAGANWLLTGEGRSDAQTLHGKAPFVACRHARAAGVPATLLSGAIDPAALPQLSEHFDGCFSPAPGPITLEAALRDAARLLENAAEQLARLRYGRP

SEQ ID NO: 134540 - DNA, 1167 bp, Burkholderia pseudomallei K96243
  CDS (1)..(1167): transl_table=11
atgaagatcgtgattgctcccgattcgttcaaggaaagcctgaccgcggtcgaaacggcgcggcagatcgaggccgggttccgcgaggtgttcgccgatgccgactaccgatgcctgccgatcgccgacggcggtgaaggcacggtggacgcgctcgtcgcggccgcgggcggcgagcgccgcggggcgagcgtcgccgatccgctcggccggccgacgcgcgccgcgttcggcatcctgcccgacggcaccgcggtgatcgagatggccgaggcgagcggcctgcatctcgtggcgcccgacgcgcgcgatccgcgcgtcacgtcgagccggggcacgggcgagctgatccgcgcggcgctcgacgcgggcgcgcggcgcttcatcgtcggcctcggcggcagcgcgacgaacgacggcggcgcgggcatgctgcaggcgctcggcgtgcatctctcggacgccgacggccgcccgctcggccccggcggcgcggcgctcgcgcggctcgcgcgcatcgacgcggccggcctcgacggccggctcgccgagtgcgcgttcgaagtcgcgtgcgacgtcgacaatccgctcgtcggcccgaacggcgcatccgcggtgttcggcccgcagaaaggcgcgacgcccgaaatggtcgcggatctcgatcgccatctcgcgcatttcgcggcgatcgtcgcgcgcgatgtcggcccggacgtcgcgcagttgccgggcggcggcgcggcgggcggcctcggcgcggcgatgtccgcgttcctgggcgcgacgctgcgccccggcgtcgagatcgtcaccgatgcgctgcggctgcgcgacgcgattcgcggcgcgagcctcgtcgtcacgggcgaaggccgcatcgacggccagacgctgcgtggcaaggcgccgatcggcgtcgcgcggatcgcggccgaatgcggggtgcctgtcgtcgcgatcggcggcgcggtgacccatcaggccggtgcgctgtacgcgcatggcttcgatgcggtcttcgcgtccgtcgggcgcgcgtgtacgatcgacgaggcgctgcgcgacgcggcggcgaacgtgcgcttcgcggcgcgcaacgtcgcggcggcgatccgcgtcggcctgaaactcggccggcacgcgccgtcgcggcgcctcgcgtga

SEQ ID NO: 134541 - protein, 388 aa, Burkholderia pseudomallei K96243
MKIVIAPDSFKESLTAVETARQIEAGFREVFADADYRCLPIADGGEGTVDALVAAAGGERRGASVADPLGRPTRAAFGILPDGTAVIEMAEASGLHLVAPDARDPRVTSSRGTGELIRAALDAGARRFIVGLGGSATNDGGAGMLQALGVHLSDADGRPLGPGGAALARLARIDAAGLDGRLAECAFEVACDVDNPLVGPNGASAVFGPQKGATPEMVADLDRHLAHFAAIVARDVGPDVAQLPGGGAAGGLGAAMSAFLGATLRPGVEIVTDALRLRDAIRGASLVVTGEGRIDGQTLRGKAPIGVARIAAECGVPVVAIGGAVTHQAGALYAHGFDAVFASVGRACTIDEALRDAAANVRFAARNVAAAIRVGLKLGRHAPSRRLA

SEQ ID NO: 134542 - DNA, 1155 bp, Bacillus clausii KSM-K16
  CDS (1)..(1155): transl_table=11
atgcaaaaaatttcaattgctcctgattcgtttaaagaaagcttgacagccctccaagcagcacaagcgattaaagcaggatttaaacgagttttcccccatgccatttacgaatgcatccctatggccgacggaggagaaggaacagttcaatcactcgccgatgcacttggcgctacaattcgtacagctactgtaacaggacctctcggcaaccaagtcgaagcagcctacgccttcgccaaaaaagaacagatagcagtcattgaaatggcagctgcgtctggcttgcatctcgtgccaaaagataagcgcgacccgcggaaaacaacaacgtttggaacaggcgagttaataaaagacgcgctggaacagggcgctaaacggattattctcggtctaggcggcagcgctacgaatgatggcggcgcaggttgtgcacaagcacttggcatccgcctcgaagatgccgaagggaaagagcttcaacaaggctgtagcccccttattaagcttgctcgtattcgtacagaaacaaagcatcccttgcttgcggatgcttcgcttgaaattgcctgtgatgtcgataatccgctgcttggtccaaaaggggcttcagccatttatggcccgcaaaaaggcgctacccaagaaatgatcgcagaaatggaaagggcgctcactcattatgcagccgtcattaaacaacagctcggtaaatctgttcagcacattgctggcgctggcgcggcaggcggtttaggagcaggattgctcgccttctttcaaccaagaatcgagtctggcgttacgctcgttttagaagcaaccggttttcataagcgaattgctggttcagagctggttgtgacaggagaaggacggctcgattcgcaaaccccttacggcaaaacaccaataggcgtggcgaaagcagccaaagcacaacaaatccctgtcatcgccgtagctgggcaattaggcgatggttatgaagcgatcttcgaccatgggattgacgcagccttttctcttgtcccaggcgcgatcccattggacgaggcaattgccaatggggccgcctacttagaagccgttgcagagcaaatcgctcgaacgtacgcactggctttggaaaacaaccgaaacgactaa

SEQ ID NO: 134543 - protein, 384 aa, Bacillus clausii KSM-K16
MQKISIAPDSFKESLTALQAAQAIKAGFKRVFPHAIYECIPMADGGEGTVQSLADALGATIRTATVTGPLGNQVEAAYAFAKKEQIAVIEMAAASGLHLVPKDKRDPRKTTTFGTGELIKDALEQGAKRIILGLGGSATNDGGAGCAQALGIRLEDAEGKELQQGCSPLIKLARIRTETKHPLLADASLEIACDVDNPLLGPKGASAIYGPQKGATQEMIAEMERALTHYAAVIKQQLGKSVQHIAGAGAAGGLGAGLLAFFQPRIESGVTLVLEATGFHKRIAGSELVVTGEGRLDSQTPYGKTPIGVAKAAKAQQIPVIAVAGQLGDGYEAIFDHGIDAAFSLVPGAIPLDEAIANGAAYLEAVAEQIARTYALALENNRND

SEQ ID NO: 134544 - DNA, 1152 bp, Staphylococcus epidermidis RP62A
  CDS (1)..(1152): transl_table=11
atgtcaccatataaagttatcattgcacctgattcttttaaagaaagtatgtcggcaaaggaagctgctttagctattaaagatggattccaagaggtgttcgattccagtactatatatgacattattcctatggctgatggtggcgagggaacaaccgaagtattgaaagaagccttaaatgctacctcttattgcgtagaagtaaaagatccacttaatagaaatatcatggctagttatgagagaagcaacgaacaccaaacagctatcattgaaatggcagctgcttcaggactagcattattgagtaaagatgaaagagatccatctattacaacttcgtacggtaccggccaactcattaatgatgcacttaatcacgatgttaataaaattattttaggaataggtggaagtgccacgaatgatggtggtgtaggaatgttaaaggctttaggtgtctcttttaaagataaaaacaatcaagagattcgcgatggaggtttagccctatctcaaatagaatacattgatattactcgtataaacccacgattgaaagatgtgaatattaaagtagcctgtgatgtaactaatccattattaggagacaatggagcaactatagtttatggtccacaaaaaggcgctcagcaaaagatgataccaaagttggattccgcattacgtcactatcatgataaaattgaaagagaattaaatatgaatgtaaaagatatcccgggcgctggtgctgcaggaggcatgggaacagcgttaattgcgtttctaaacgctgaattacgtcctggaattgatgtagttcttgaagagactcaatttaaacaaagaataaaagatgcgaatttagttgttactggcgaaggtaaaatggataaacaaacaatctatggcaaaacacccattggcatagctaaagttgcaaaatcatatgatatacccgtcattgctatttgtggtagtttaggaaaagattacgaagcaatttatcaccacggtatcgatagcgtgtttagtatcatggaacgtccatgccaccttgacgaagctttgaaagaaggcgcacttcatgttaaacatacaacaacaaatatcgcacgacttttacaagtaaaaattgaaaactga

SEQ ID NO: 134545 - protein, 383 aa, Staphylococcus epidermidis RP62A
MSPYKVIIAPDSFKESMSAKEAALAIKDGFQEVFDSSTIYDIIPMADGGEGTTEVLKEALNATSYCVEVKDPLNRNIMASYERSNEHQTAIIEMAAASGLALLSKDERDPSITTSYGTGQLINDALNHDVNKIILGIGGSATNDGGVGMLKALGVSFKDKNNQEIRDGGLALSQIEYIDITRINPRLKDVNIKVACDVTNPLLGDNGATIVYGPQKGAQQKMIPKLDSALRHYHDKIERELNMNVKDIPGAGAAGGMGTALIAFLNAELRPGIDVVLEETQFKQRIKDANLVVTGEGKMDKQTIYGKTPIGIAKVAKSYDIPVIAICGSLGKDYEAIYHHGIDSVFSIMERPCHLDEALKEGALHVKHTTTNIARLLQVKIEN

SEQ ID NO: 134546 - DNA, 1329 bp, Achromobacter xylosoxidans
  CDS (1)..(1329): transl_table=11
atgaccgccgaagcaaggcgaaaaaatctgcgtccgcgaatcctgcttgcaccatgtggctttaaggagagcctgagcgtagctgaattgatcgagagcatggcgcgaggaataaagagcgccgcccctgacgccgagatccgtgtggcccccatggcagacggtggcgaaggttttgttcagacgcttgtggagctgacaggtgcccgtctacgtccagtgcaagtgactggtcctgtgggccagccgctggaggcgcatctcggtctgctcggcggagtccatgttggaactgtagcgattgagatcgcggcggctgcaggtctacggcacgtacctgtggaccaacgagatcccctctggaccaccagttacggtgtaggtgagctggtgcgcgaagccttggatttgggtgcccagcgattgctcatcggttgcggcgacagcggcgtaaacgatggcggcgccggtcttgcccaagcgctaggcatcaggctttctgatcgtagagggcgaaccatcggccgcggctgcagggcattggacggcctcgctcacatcgacctctccgggcgcgacccgcgcctcagcaatgtcagcatcgacgtggcggtgaactgggacaacgtgctgctgggacgacgcggagtttcgcgaattttcggtccgcagaagggcgcgttgcccaaagatctcgccacattggagattggcctcgggactctggcagcagttatccaacgcgatctcgggatcgacgttcgcaccatgcaagggggaggtgcatcgggggggctgggtgcaggtctgcacgcatttctgggggcgcgcctctatccccggttcgcgattctttcgcgcttcttggactttgacgcactcctcgagcgcgccgatctcgtattgaccgcggaaggaagcatcgatggactcacgccgctcggcaagctgccggcggaggtggcgcgccgtgcgaaacaggccggcattccggtcgtcgcgatcgttgggtcagtcggagacggagcagacacagtgcacgaaatcggcatcgatgcctacttcagtattgtcgaccgccccggttcgatggccgacgcaatgtcgagggcgcctgaattggtagcaagagctacagagcaagtcgttcgcttagcgcttcttgactgcaatcgacgcgcaagcggaagcgaaaatagtgcgaggagtgtcccagaagtcacggaggcgcatgtgatcacggcgaacgccaaccgacccgatgccctgccgccgtcgcatcgtgacgggcatcgtcctcggtgtgcaaatagatgctggtcgtgctga

SEQ ID NO: 134547 - protein, 442 aa, Achromobacter xylosoxidans
MTAEARRKNLRPRILLAPCGFKESLSVAELIESMARGIKSAAPDAEIRVAPMADGGEGFVQTLVELTGARLRPVQVTGPVGQPLEAHLGLLGGVHVGTVAIEIAAAAGLRHVPVDQRDPLWTTSYGVGELVREALDLGAQRLLIGCGDSGVNDGGAGLAQALGIRLSDRRGRTIGRGCRALDGLAHIDLSGRDPRLSNVSIDVAVNWDNVLLGRRGVSRIFGPQKGALPKDLATLEIGLGTLAAVIQRDLGIDVRTMQGGGASGGLGAGLHAFLGARLYPRFAILSRFLDFDALLERADLVLTAEGSIDGLTPLGKLPAEVARRAKQAGIPVVAIVGSVGDGADTVHEIGIDAYFSIVDRPGSMADAMSRAPELVARATEQVVRLALLDCNRRASGSENSARSVPEVTEAHVITANANRPDALPPSHRDGHRPRCANRCWSC

SEQ ID NO: 134548 - DNA, 1137 bp, Haemophilus influenzae 86-028NP
  CDS (1)..(1137): transl_table=11
atgaaatttgtgattgcacctgattcttttaaagaaagtttgaccgcacttgaagtcgctaccgccattgaaacaggcttcaaacgtgtattccccgatgcggactatgtaaaattgccaatggcagatgggggcgaaggtacagttcaatcccttgtggatgccacgcaaggcaagctcattgaatgtgaagtcaccgcgcctttgggtgacaaagtgaaaagtttcttcggtttatcgggagatggaaaaaccgcgattatcgaaatggcagcagcttctggtttacatcttgttccgcctgaaaaacgcaatcccttgcttaccaccagttacggcacaggggagttgattaaattggcattagatttaggcgtagagagtttcattcttggcattggcggtagcgcaaccaacgatggtggtgtaggaatgttgcaagctctagggatgcaatgtttagattcgcaagataagcctatcggttttggtggagcagagctagcaaatattgtgaagattgacgttcaacaattagatccacgtttgcaacaagttcacattgaagtagcgtgcgatgtgaataatccgctctgtggtgaatgtggtgcatctgccatttttggaccacaaaaaggcgcaacgcctgaaatggtgaaacaacttgatgctgcactttcgcattttgctgaaattgccgaacgcgattgcggtaaacaaattcgtgatcaggctggcgcaggtgctgctggtggtatgggtggtggcttgctattattaccaagcgtacaactgaaagcaggcatacaaattgtgttagagcggttacatttaattgaccatgtaaaagatgctgatgtagtgattacgggtgaagggcgaatagatgcacaaagtattatgggtaaaacgccaattggtgtggcacgtacggcaaaacagttcaataagccagtgatcgccatcgcagggtgtttgcgtgaagattatgatgtggtgtttgatcacggtattgatgcggtgttccctattattcaccaacttggcgatttatcggatattctcaaacaaggcgaacaaaatttaatttctaccgctcaaaatgtggcgagagtactggcatttaaatttcattaa

SEQ ID NO: 134549 - protein, 378 aa, Haemophilus influenzae 86-028NP
MKFVIAPDSFKESLTALEVATAIETGFKRVFPDADYVKLPMADGGEGTVQSLVDATQGKLIECEVTAPLGDKVKSFFGLSGDGKTAIIEMAAASGLHLVPPEKRNPLLTTSYGTGELIKLALDLGVESFILGIGGSATNDGGVGMLQALGMQCLDSQDKPIGFGGAELANIVKIDVQQLDPRLQQVHIEVACDVNNPLCGECGASAIFGPQKGATPEMVKQLDAALSHFAEIAERDCGKQIRDQAGAGAAGGMGGGLLLLPSVQLKAGIQIVLERLHLIDHVKDADVVITGEGRIDAQSIMGKTPIGVARTAKQFNKPVIAIAGCLREDYDVVFDHGIDAVFPIIHQLGDLSDILKQGEQNLISTAQNVARVLAFKFH

SEQ ID NO: 134550 - DNA, 1140 bp, Pseudomonas fluorescens Pf-5
  CDS (1)..(1140): transl_table=11
atgaagatcatcatcgcccccgactcgttcaaggacagcctgagtgccgaaggcgtggcccaggccattgcccaggggctggcggatgtgtggcccgacgccgagctgtgccaatgccccatggccgacggtggcgaagggacggtggaatcgattctcgccgcctgtgacgggcaactgcgcagcaaccgggtccaggggccgctgggagcgatcgtggaggcgcgctggggctggctgccccagagccacacggcaatcatcgaaatggccgaggccagtggcctgcaactgctggcgctggagcagcgcgatgcgtgcaacagcagcaccttcggcaccggggagctgatccaggccgctctggaggccggtgcccggcgcatcatcctggccatcggcggcagcgccaccaacgacggcggcgcgggggccctgcaggcgctgggggtcaagctgctggaccgccagggccggatactgcctcgcggcggcctggccctggccgatctcgcccacatcgaactggatgccatggacccgcgcctggcccaggtgcgcttcgacatcgccgccgacgtcaacaacccgctgtgcggcgagcacggcgcttcagccatcttcggcccgcagaaaggcgcctcggcgcagcaggtgcagcaactggaccaggccctgggacactttgccgacctgtgcgcccaggtactgcccaaggatgtgcgtgatgaacccggcagcggcgcggccggtggcctggggtttgccgccaaggcgtttctcggcgcgcaatttcgtcccggggtggaagtggtggcggaactggtgcgcctggaacaggccgtgcgcggtgccgatctggtgatcaccggtgaaggtcgcttcgacgcccagaccttgcgcggcaagaccccgttcggcgtggcgcgcatcgcccgtgagcagggggttccggtgattgtcattgccggcaccctgggcgagggctaccagcagatgtacgcccacggcgtggatgcggccttcgccctgacctcaggccccatgagcctggaacaggcctgccgcgaagctccgcgcctgctgcgcgaacgcgccgccgacatcgcccgcctctggcgcctggcccgcaaccactag

SEQ ID NO: 134551 - protein, 379 aa, Pseudomonas fluorescens Pf-5
MKIIIAPDSFKDSLSAEGVAQAIAQGLADVWPDAELCQCPMADGGEGTVESILAACDGQLRSNRVQGPLGAIVEARWGWLPQSHTAIIEMAEASGLQLLALEQRDACNSSTFGTGELIQAALEAGARRIILAIGGSATNDGGAGALQALGVKLLDRQGRILPRGGLALADLAHIELDAMDPRLAQVRFDIAADVNNPLCGEHGASAIFGPQKGASAQQVQQLDQALGHFADLCAQVLPKDVRDEPGSGAAGGLGFAAKAFLGAQFRPGVEVVAELVRLEQAVRGADLVITGEGRFDAQTLRGKTPFGVARIAREQGVPVIVIAGTLGEGYQQMYAHGVDAAFALTSGPMSLEQACREAPRLLRERAADIARLWRLARNH

SEQ ID NO: 134552 - DNA, 1137 bp, Psychrobacter arcticus 273-4
  CDS (1)..(1137): transl_table=11
atgaaaattttaatcgcccccgactcgtttaaagaaagcttagaggcattggatgtctgccacgctatccaatctggattcagtcaagtatttcctgacgctgactataagctactgcctatggcagatggcggtgaaggcacatctacagtgttgtcctatgtattgggtggatactggaaagaagtggtagtcaatgatcccttgatgcgacccattagcgcaaaatatttattactacctgatgcgaccgctgtcatcgaaatctcccaagcttgtggcttacacctattgactatagcagagcgcaatcctgtcgtcgcgagcagctatggtgtcggcgagctgattacggatgctttaaatgaaggggttaaacgcatcatcattggtcttggtggtagtgctaccaatgacgcggggcttggtatgctaacggcacttggcatgacgtttcatgatagtgatgataatacgttagcccaaggcggcggcgcgcttaccaacttacagcgtttagatgcgacaagcttccatgccagcttattagagacagtatttgaagtggcttgtgatgtgaccaatcctctatgcggcgagttgggtgctagtgcgatatttggccctcaaaaaggtgctagctcacagcaagtcaatactctagatcaagcattaagtcattttgctagtgtatgcgagcagcatggctaccaagattatcaagagatagcaggcgctggtgcagcaggtggacttggctatgcgttaatgagcttttgccaagctgagttaaaatcaggttttgatacgattgcagaagttgccaacttatcacagcacatcgctgatgcagatttagtcattactggtgaaggcaagcttgatgctcagtctgctatgggaaaagtggctggtggtgttagccaccttgccaaactgagccatataccagtgattgctatttgcggtagtgttgatagcctagaaccgactcagaccagtcagttcgatgtcattatgcccagtatacaaaagctagataccatcgataacgtctttaaaagcgcttatcgcaatattgaaaccaccgctaccaatattgctgcggcgattaaactaggtcaaagcataaaataa

SEQ ID NO: 134553 - protein, 378 aa, Psychrobacter arcticus 273-4
MKILIAPDSFKESLEALDVCHAIQSGFSQVFPDADYKLLPMADGGEGTSTVLSYVLGGYWKEVVVNDPLMRPISAKYLLLPDATAVIEISQACGLHLLTIAERNPVVASSYGVGELITDALNEGVKRIIIGLGGSATNDAGLGMLTALGMTFHDSDDNTLAQGGGALTNLQRLDATSFHASLLETVFEVACDVTNPLCGELGASAIFGPQKGASSQQVNTLDQALSHFASVCEQHGYQDYQEIAGAGAAGGLGYALMSFCQAELKSGFDTIAEVANLSQHIADADLVITGEGKLDAQSAMGKVAGGVSHLAKLSHIPVIAICGSVDSLEPTQTSQFDVIMPSIQKLDTIDNVFKSAYRNIETTATNIAAAIKLGQSIK

SEQ ID NO: 134554 - DNA, 1140 bp, Pseudomonas syringae pv. phaseolicola 1448A
  CDS (1)..(1140): transl_table=11
atgaaaatagtcatcgcccccgactcgttcaaggacagcctcagtgcacaggccgttgccgacgccatcgccagtggtctggccgaggtctggccgcatgcccaactgatcaaatgcccgatggcagatggcggggagggcaccatcgaagcgctgctggcagcctgcaatggtgaactgatgagcgcccgggtcagcggaccgctgggcgatccggtccaggctcattggggctggctggccgagagcagaacggcaatcatcgaaatggccatggccagcggcttgcaattactgacgctggcacagcgcgacgcctgtgtgaccagcacagcaggtacgggccagttgatctcggcggcactggatgcgggtgcccgtcgcgtgattctggccatcggtggcagcgcaaccaacgacggcggcagcggcatgctctcggcattgggcgcacgctttctcgatgccgacgatcagcccttgccatcgggcggtctcgcgcttgccgatctggcccgtatcgacctgagcggctttgatccgcgcttgtctgacgtgtgcgtcgagattgccgccgacgtcgataatcctctgtgtggaccgaatggcgcctcgcatatcttcggcccgcaaaaaggcgcatcgcccgagcaggttgtggcgctggatgccgcacttcggtgtttcgccgaccattcggcgcggatcctcggtctggaccaacgcaacagccctggcagcggcgcggcaggcggaatgggctttgctgccaaggcgtatctgaatgcctcgtttcgcgcaggcgttgaggtggttgccgagctgaccgggctggagcaggcgttgaccggggccgacctggtcatcaccggcgaaggccgttttgatgcgcagaccttgcgcggcaagacgccgcttggcgtcgcgcgcgtcgcgaagcgccagcaagtgccagtgatcgtgctggctggaacgctgggcgaaggctacgagcagctttacccgcacggcattggcgcggccttcgcgctggccagcgggccgatgagccttgaacaggcctgtcgcgatgccagtcgcctgctgcacgaccgcgcgcgtgacctggcgcggctctggcaaatggcggcaggacgctga

SEQ ID NO: 134555 - protein, 379 aa, Pseudomonas syringae pv. phaseolicola 1448A
MKIVIAPDSFKDSLSAQAVADAIASGLAEVWPHAQLIKCPMADGGEGTIEALLAACNGELMSARVSGPLGDPVQAHWGWLAESRTAIIEMAMASGLQLLTLAQRDACVTSTAGTGQLISAALDAGARRVILAIGGSATNDGGSGMLSALGARFLDADDQPLPSGGLALADLARIDLSGFDPRLSDVCVEIAADVDNPLCGPNGASHIFGPQKGASPEQVVALDAALRCFADHSARILGLDQRNSPGSGAAGGMGFAAKAYLNASFRAGVEVVAELTGLEQALTGADLVITGEGRFDAQTLRGKTPLGVARVAKRQQVPVIVLAGTLGEGYEQLYPHGIGAAFALASGPMSLEQACRDASRLLHDRARDLARLWQMAAGR

SEQ ID NO: 134556 - DNA, 1092 bp, Thermobifida fusca YX
  CDS (1)..(1092): transl_table=11
gtgatcgctcctgacaagttcgctggaaccctcaccgcggtcgaagcagccgaagccatcgcagacggctggcgctccgtcgacccggacacccactgcaccctggtgccgctctccgacggcggccccggattcgtcgacgtgctgcacacggcgctcggcggcaccctcgtcgccaccgaagccaccgggccgctcggcaccccggtgcaggcccgcttcctcctcgtcggacagaccgcctacgtggaaagcgcccaagcgtgcggcctccacctgctgcccgctaaagaccgcaacccggaaaccaccaccacctacggggtaggggagctgatcggcgcagccatcgaccgcggcgccaccaccgtcgtcgtcggcctgggcggcagcggcaccaacgacgggggagcgggcatgctcgccgccctcggcgctacgcccgccgaaccactgcggagcggcggcggtgccctcaccggcctagaccgcgtcgacctggccgcggcccgcgcccgcgtcgccggcatccggctcattgccgccaccgacgtggacaacccgctgctcggcgcccacggcgccagcgccgtcttcggaccgcagaaaggcgcggacgccgcccaagtccagcgcctggacgccgcgctcgcccacttcgcggacctcaccgacccggagacgacgctgcgcgccacgcccggagccggggcagccggcgggctcggctacggactgctgctgctcggcggcaccgtcgaatccggggtgcgcagagtgctgggcgcggtcggcctcgacaccctcgtggcctccgccgacgcggtcatcaccggggaagggtccttcgactcccagtccctgcgcggcaaactcccgcatggggtagcgcagaccgcgtcccggcacggcgtgccctgcgtcgtcctcgccggccgggtcgccgtcgcggaagaagaagccgccgcggcaggcgtcaccgcagcccactccctcgtcgaatccgcgggatcagtgcaggccgccctggagcactccgcgcgggaactgcgccgcctcgcagcccgcgtcgcagcggactggccgcgctga

SEQ ID NO: 134557 - protein, 363 aa, Thermobifida fusca YX
MIAPDKFAGTLTAVEAAEAIADGWRSVDPDTHCTLVPLSDGGPGFVDVLHTALGGTLVATEATGPLGTPVQARFLLVGQTAYVESAQACGLHLLPAKDRNPETTTTYGVGELIGAAIDRGATTVVVGLGGSGTNDGGAGMLAALGATPAEPLRSGGGALTGLDRVDLAAARARVAGIRLIAATDVDNPLLGAHGASAVFGPQKGADAAQVQRLDAALAHFADLTDPETTLRATPGAGAAGGLGYGLLLLGGTVESGVRRVLGAVGLDTLVASADAVITGEGSFDSQSLRGKLPHGVAQTASRHGVPCVVLAGRVAVAEEEAAAAGVTAAHSLVESAGSVQAALEHSARELRRLAARVAADWPR

SEQ ID NO: 134558 - DNA, 1140 bp, Pseudomonas fluorescens PfO-1
  CDS (1)..(1140): transl_table=11
atgaaaatcgtcatcgcccccgattcgttcaaggacagcctgagtgctcaaggcgttgcagaagccattgcgctgggcctggcgcaggtctggccgcaggcgacgctggtcaaatgcccgatggccgacggtggcgaaggcacggtggagtcgattctcgccgcgtgcgaaggcgaactgcgccgcacccgtgtgcgcggcccgttgggcgcagcggttgaagccgcgtggggctggctgccgcataaccacactgcaatcatcgaaatggccgaagccagtggattgcaattggtgccgccggggcagcgtgacgcatgcataagtagcacgttcggcaccggtgaactgatccgcgcggcgctggatgctggcgcacaacgagtgattctggccatcggcggcagcgccaccaatgacggcggcgccggcgcgatccaggcgttgggggtgaagttgctggatgctcaagggcaaacattggtgccgggcggattggcgctggcgcaactcgcacgactggacctgagcgaactcgacccgcgactggcgcacgtccggttcgacatcgccgccgacgtcaacaatccgctgtgtggcccccacggtgcctcggcgattttcggcccgcagaagggcgcatccccggcgcaagtgcaacaactggatcaggccctcggccacttcgccgaactctgcgcgcaagtgctgggcaaggatgtgcgggatgagccgggcagcggtgccgcgggtggattgggctttgcggccaaggcgtttctcggtgcgcgattccaggccggtgtcgaagtggtcgccgagctggtcggtctggccgatgctgtgaagggcgctgacctggtgatcaccggcgaagggcgcttcgatgcccagaccctgcgcggcaaaaccccgtttggcgtggcgcggatcgccaagcaacacggcgtaccggtgatcgtcgttgccgggactttgggcgagggctatcaagcgctctacgatcacggtatcgacgccgcattcgccgtcaccagcggcccgatgaccctcgaacaggcttgcgccgaagcaccgcgtctgttgcgcgaacgtgccacagacatcgctcgcgtctggcgcatggcatccccggcctga

SEQ ID NO: 134559 - protein, 379 aa, Pseudomonas fluorescens PfO-1
MKIVIAPDSFKDSLSAQGVAEAIALGLAQVWPQATLVKCPMADGGEGTVESILAACEGELRRTRVRGPLGAAVEAAWGWLPHNHTAIIEMAEASGLQLVPPGQRDACISSTFGTGELIRAALDAGAQRVILAIGGSATNDGGAGAIQALGVKLLDAQGQTLVPGGLALAQLARLDLSELDPRLAHVRFDIAADVNNPLCGPHGASAIFGPQKGASPAQVQQLDQALGHFAELCAQVLGKDVRDEPGSGAAGGLGFAAKAFLGARFQAGVEVVAELVGLADAVKGADLVITGEGRFDAQTLRGKTPFGVARIAKQHGVPVIVVAGTLGEGYQALYDHGIDAAFAVTSGPMTLEQACAEAPRLLRERATDIARVWRMASPA

SEQ ID NO: 134560 - DNA, 1155 bp, Carboxydothermus hydrogenoformans Z-2901
  CDS (1)..(1155): transl_table=11
atgaaaatagttgttgcccccgattcttttaaaggaagcctgagttcattaaaagttgccttagctattgagagaggtattaaaagagctgcatccgaaatagatgcagaaattgaaataataaaaattcctatggccgacggtggagagggcacagtagaggccataatgtgtgctctgggtggaagacttgtaaagacccgggttcttgatcctttaggaagggaaatagattcttttttcggtgtactaccagatggtaccgcagtaattgaaatggctgcggcttccgggcttaatcttttgaaaactgaagaaaagaatcctatgataactaccacttacggcacgggtcaacttataagggcggcacttgatgagggatgtagaaaattaattataggaataggaggcagtgctaccaatgatggtggtgtggggatggcccaagctttgggcgtaaaatttcttgatagcaacgatcgtgagattggttttggaggtggagaactttataaaatagagcggatagattactcaggccttgatgcaagaatcaaagataccgattttgtagtcgcctgtgatgtgaagaatgtgctatgtggtccaacaggtgcttcggcagtttatggacctcaaaaaggtgcaacccttgaaatggtaaaagttttagatgaaaatttaaggcatctagctacaatgataaaaagatacctgggaaaagatgtggctgaggtcccgggttcaggagctgcaggtgggctgggagcagctttgctggcattcttagatgcaaaacttcggccgggaattgaaatagttatggaacttactcagtttcctgaggtagtaaaaactgcggaattaattattactggagaaggagcaacggattaccagactatgttcggaaaggtccctttgggaattgcccgggtggcaagaaaatttggtaagccagtagtatgtatttccggttcccttaatacaggttacgaaaaattatatgccgagggtataacagctttgtttagcatagttaaccgcccaatgactttagatgaagctatggaaagagcggaagaactgcttgaaaaaatttctgaaaatgtcttcagactatattatttaatgcgggaaggggataaataa

SEQ ID NO: 134561 - protein, 384 aa, Carboxydothermus hydrogenoformans Z-2901
MKIVVAPDSFKGSLSSLKVALAIERGIKRAASEIDAEIEIIKIPMADGGEGTVEAIMCALGGRLVKTRVLDPLGREIDSFFGVLPDGTAVIEMAAASGLNLLKTEEKNPMITTTYGTGQLIRAALDEGCRKLIIGIGGSATNDGGVGMAQALGVKFLDSNDREIGFGGGELYKIERIDYSGLDARIKDTDFVVACDVKNVLCGPTGASAVYGPQKGATLEMVKVLDENLRHLATMIKRYLGKDVAEVPGSGAAGGLGAALLAFLDAKLRPGIEIVMELTQFPEVVKTAELIITGEGATDYQTMFGKVPLGIARVARKFGKPVVCISGSLNTGYEKLYAEGITALFSIVNRPMTLDEAMERAEELLEKISENVFRLYYLMREGDK

SEQ ID NO: 134562 - DNA, 1146 bp, Moorella thermoacetica ATCC 39073
  CDS (1)..(1146): transl_table=11
atgcgtcgtattgttattgcccccgactctttcaaagagagtttatcggccccggaagtcgccgcggccatagctcaaggtatccatcgggtcctgccggaggtggaaaccgtcaacgtgcccatggccgacggtggtgaaggcctgacagccaccctggtagctgctaccggcggccgggagatgaccgccaccgtcaccggccccctgggggaaccggtccaggcctcctggggtatcctgggggacggtatcacggccgtagtggagatggcccaggcttccggcctgcccctggtaccccgggaaaaacgcaatcccctggttaccaccacctatggtacaggtgaactcatccaccaggccctggaggcaggttgccggcggctgattgtgggcatcggcggaagcgctaccaatgacggcggtgccggcatggcccgggccctgggggtaaagctgctggatgcagagggcgctgacatcccccccggggctggaggactggaacgcctggagcgcatcgatatccagggcctggacccgagggtgaaggaggtagaaatcctggtagcttgcgatgttgacaaccccctgtgcgggccccggggcgcctcggccgtctacggcccccagaaaggagccacgccggagatgattccccgcctggatgccgccctggcccgcctggcggatatcgttgccagggacctgaaggtggatgttagagaactgcccggcgccggtgccgccggaggcctgggtgccggcctggtagccttcctgggggccaccctgcgccgtggtattgaactggtcatagaagctgtgaatcttgacggtatcctggcagccggcgccgacctggtcatcaccggcgaaggggaaatcaaccgccagacggcttacgggaaggttccggccggagtggccggtgtggccgccaaatatggtatcccggtagtcgccctggtgggctccatcggcgaaggagccagtgccgtctatgatcatggcatccagggtttcatgagtattgtcccccggccggtacctttgagttactgcctggagaatgccgcctccctgctggccgatgccgccgagcgcttaatgcgcttgctaagtataaacattaaaaaatga
